United States Patent Application Publication US 2005/0228172 A9 - sequence listing, part 35

SEQ ID NO: 121027 - DNA, 567 bp, Homo sapiens
aacaacacagaacatgacaaagctagagaaagctgttaataataatagaagaccaagcagatttaactcaaagaagactacctgaagacatttaataagaaaattcccaaaggtcaaggataaaggaaaagattctgaaagcaacaagagaaaagaaaaaataaaataacgtataaaggagcttcatatgtgtaacagcagatttctcaatgcaaacctgacaggccaggagagagtggcatgaaatatttaaagggttgaaggaaaaacaaaacaaaacaacttttatcctagaatagtacatccaacaaaataaagggtttcccagaaaaacaaaaggtgagggatatcatcaacacaagayttgttctacaagaaatgctaccagaagttctttaatctgaaagaagagggtgttaatgagcaataggaaataatctcaaagcacaaaagccactggtacatagacaattagtgaatactataacattgtatttgtggtgtataaatgactcatatattgagtaagaacactaaaagattaacctatgaaaaaataactatagg

SEQ ID NO: 121028 - DNA, 567 bp, Homo sapiens
aacaacacagaacatgacaaagctagagaaagctgttaataataatagaagaccaagcagatttaactcaaagaagactacctgaagacatttaataagaaaattcccaaaggtcaaggataaaggaaaagattctgaaagcaacaagagaaaagaaaaaataaaataacgtataaaggagcttcatatgtgtaacagcagatttctcaatgcaaacctgacaggccaggagagagtggcatgaaatatttaaagggttgaaggaaaaacaaaacaaaacaacttttatcctagaatagtacatccaacaaaataaagggtttcccagaaaaacaaaaggtgagggatatcatcaacacaagatttgttctacaagaaatgctaccagaagttctttaatctgaaagaagagggtgttaatgagcaataggaaataatctcaaagcacaaaagccactggtacatagacaaytagtgaatactataacattgtatttgtggtgtataaatgactcatatattgagtaagaacactaaaagattaacctatgaaaaaataactatagg

SEQ ID NO: 121029 - DNA, 546 bp, Homo sapiens
atttgggaaactcatcccaaaaagatcatcacccaggcaaatagtcgtcaggttacctaaagtcaagaaaagggaaaaaaatcttaagagctgtgagacaaaagcaccaggtaacctgtaaaggaaaacatattagattatyggcagatttctcaacagaaactctacaagccagaaagtattgggtcctgtctttagcctcctgaaacaaaataattgtcaaccaataattttgtatctagcaaaactgagcttcaaaaaatgaagaaaagataaagtatttttttcagacaaacaaatgttactaccaaggctgcactaaagaaatgataaagagttctaatcttgaaacaaaatcttaaaatacaccaaaatagaaactgtttaatgtataaatctcacagtgcctataaaacaacacaacgaaaaaaaacccaaggtattcaggcaacaactgacatgacaaatagaacagtacctcacagaaatacaaaaaaaaaaaaaaaaaaaaaactacaaaagatctttcaaggttactatgaacac

SEQ ID NO: 121030 - DNA, 531 bp, Homo sapiens
aaaggcagaaaaattttcaaggaccaaataactttatgaatcatttgattaaatatcattaaattgtgatctttactgcaaaaccttaaagaatatttttcaggctaatgaacttaataaatctctaatataatcttccaaactcgtttgccaaataatcttttcttgtccaagaatcctatagattagcatttatccaaacccagtttaggaggaatgtggattacatgtaaatcgcttcaatattatattgtacataatctctctttctctctctctctttgtctctctgtctcgttatcctcccattccaaaagaaatacctactatgttcctattattcttccagggagtgggaatagagtgataaaaagagtaraaaaagtcactgctcttaatacagtatatagctagaggaaataaaaataatatacaagtaaaataaattcaagtagagatgagtactatgccccaaacaccatataatacagtagataaaatagagagaactgaggtaattatttagatctc

SEQ ID NO: 121031 - DNA, 601 bp, Homo sapiens
tctgtgcaatatttgcattcatctcacagtgttaaacctttctttccattcagcagttttgaaactttattttttgtagaatctgcaagtggatatttggagcacttcgaggcctatggtggaaacsggaatatcttcacataaaaactacacagaagcattctgagaaacacctttgttaagtgtgcattaaactcacagagttgaaactatcttttgattgagcagttttgaatctctctttttgtagaatctgcaagaggatatttggagccctttgcggcctatagtggaaaaggaaataccttcacataaaaactacaaaagagatttctgaggaacgtcttggtcatgtgtgccttcatctcacagagttgaaactttcttttgattgagcagtttggaaacactctttttgtagtatctaaaattggatgtttggatcgcattgaggcctatggtggaaaagaaaatatcttcacatgagaactacacagaaccattctgagaaacttctttgtgatgtgtgctttcatctcacagtgttgaaccattcttttgattgagcagttttgaaacactcattttgtagaatctgcaa

SEQ ID NO: 121032 - DNA, 601 bp, Homo sapiens
tctgtgcaatatttgcattcatctcacagtgttaaacctttctttccattcagcagttttgaaactttattttttgtagaatctgcaagtggatatttggagcacttcgaggcctatggtggaaacgggaatatcttcacataaaaactacacagaagcattctgagaaacacctttgttaagtgtgcattaaactcacagagttgaaactatcttttgattgagcagttttgaatctctctttttgtagaatctgcaagaggatatttggagccctttgcggcctatagtggaaaaggaaataccttcacataaaaactacaaaagagatttctgaggaacgtcttggtcatgtgtgccttcatctcacagagttgaaactttcttttgattgagcagtttggaaacactctttttgtagtatctaaaattggatgtttggatcgcattgaggcctatggtggaaaagaaaatatcttcacatgagaactacacagaascattctgagaaacttctttgtgatgtgtgctttcatctcacagtgttgaaccattcttttgattgagcagttttgaaacactcattttgtagaatctgcaa

SEQ ID NO: 121033 - DNA, 537 bp, Homo sapiens
cttaggggacagaaatgattttttaaattaaggaaactgaggctcagagaaatgagactagagcccaagattcctgacctatagggccagatttcattcccctccaaatcatccctggcagcactttgcttccagtgtctgaattttgaggtggatgtgtgtatgtgtgtatgtcttcagttttctacattaatattgtgcttggaggtttttgcagttattaacatctctgataggttgccatggcagagatgtttgtctctttaccaagctggtgacaatttaatgatagtattgtcaaccagtgtcttcaatgattatgcacatttatcaaacagtataatcatctctactatgccagttgctcacacaccagaaatgaagctccagaaacagtctatcactctgacaaggataataggtcattattaccaaatcagcagtcagtgagccagtgctttaaaaataaacgatcctgcttyccatcattatttatttttcataagtgcccaggtttgtcttgcatctgacagcagg

SEQ ID NO: 121034 - DNA, 546 bp, Homo sapiens
atctgtaattttgcgtctctcagtacacatggcttccagcctcagagcagaaaccacttttggacatgacatggaactcatgtatgaaatgggctttggaatgctatrtattttcatgcttagaaattttgtttgatttatttcaattcaacaaatatttattgagcacctactatgcatcaaaccctggacataaaataattcataacatgtggatgctgatcttcagaagcccttgatctagtagaaaagacagatcttgatacagtgtggcaagtgatactcatgataagcataaaacgctgtgcaagctgctaagttttggattttatttcatttttgagagtatcttagagcttatacatttttttttcttgaggtttttcttgaagtttttttcatggctgttggtccagatgaatgatggtatgacctgacttcatggctttccagtgctcttggggtatatttaaaatcttcaaagttggctattggggcctgcgtgacctgaccctgcccacctcccctgcctgagctggagtcaca

SEQ ID NO: 121035 - DNA, 471 bp, Homo sapiens
gaattcaagaagtctattccatgccatgccctgacctgcagaaaaaaaaaaattctcccaaatattctttctgggcaaagccgctgaatttgaccttgagtacccatccagatgccccaggatgccaggttcgttggacactactcaagtacaaaacatgaggtgatgagggcagagtcactgatcagccttcccttcaaggaaattgaaccgctaattaacatgactcactcttgacaggaaagacagagaagctgcccaggccagggtagtaacaggatagtaccagccagcaaatgtcagccccacaaagccctgccagcccatttccacaagatccagcccaaagggtagtctctctgagtcaagaagtgyaacattccatgtagaggagcagagaagacaaagcacagccctcccggagcagaagccaccccgggccatgaatccaagtgcagaacttggctccag

SEQ ID NO: 121036 - DNA, 561 bp, Homo sapiens
ggaatggggggtggcttctttttgtgttgctataacagaataccacaggctgagtaatttgtaaacagaaatttattgtctcacagttctgaaggctgagaagtctgaggtcaaggcatcagcaggttcgatgtcagatgaagacattctgttcttccacgatggtgccttgcacgttgtgtcctcacatgatggaaggcaggatgagagagagcccactcccagaaaccctttatatggcagcattaatccattcatgaggggagagccctcatgacctaaacacctcccattaggtcccacytcacaacacttgccttggggactatctaacacatgactttggggggatgcattcaaaccataccagggaagaaagaaaggaagaaaagaaggaagaagggggactctgtacaatttagatattacctgctcacccctatctcattcatttgatttcccataagaaagcagtggggattctccccgcaaagcctttcctctgggcttccctccttaccgttctctgggcactcacctctgtgatggaatatcagcaca

SEQ ID NO: 121037 - DNA, 561 bp, Homo sapiens
ggaatggggggtggcttctttttgtgttgctataacagaataccacaggctgagtaatttgtaaacagaaatttattgtctcacagttctgaaggctgagaagtctgaggtcaaggcatcagcaggttcgatgtcagatgaagacattctgttcttccacgatggtgccttgcacgttgtgtcctcacatgatggaaggcaggatgagagagagcccactcccagaaaccctttatatggcagcattaatccattcatgaggggagagccctcatgacctaaacacctcccattaggtcccacttcacaacacttgccttggggactatctaacacatgactttggggggatgcattcaaaccataccagggaagaaagaaaggaagaaaagaaggaagaagggggactctgtacaatttagatattacctgctcayccctatctcattcatttgatttcccataagaaagcagtggggattctccccgcaaagcctttcctctgggcttccctccttaccgttctctgggcactcacctctgtgatggaatatcagcaca

SEQ ID NO: 121038 - DNA, 561 bp, Homo sapiens
ggaatggggggtggcttctttttgtgttgctataacagaataccacaggctgagtaatttgtaaacagaaatttattgtctcacagttctgaaggctgagaagtctgaggtcaaggcatcagcaggttcgatgtcagatgaagacattctgttcttccacgatggtgccttgcacgttgtgtcctcacatgatggaaggcaggatgagagagagcccactcccagaaaccctttatatggcagcattaatccattcatgaggggagagccctcatgacctaaacacctcccattaggtcccacttcacaacacttgccttggggactatctaacacatgactttggggggatgcattcaaaccataccagggaagaaagaaaggaagaaaagaaggaagaagggggactctgtacaatttagatattacctgctcacccctatctcattcatttgatttcccataagaaagcagtggggattctccccgcaaagcctttcctctgggcttccctccttacygttctctgggcactcacctctgtgatggaatatcagcaca

SEQ ID NO: 121039 - DNA, 591 bp, Homo sapiens
atgactctggtgatcgtgaaaatacagagttagaggagatttttatataaaacctgtgaagcttgtattttctgtattgtatttgttgctacaatagttacttattgcctgagatttcttctgagatgccagttatcttaagcctgtgtatctttctggtggttctctggagagaggttgagattgctttttccttttaaatagtcagtacttgagtggtatggaggagctgcacacagacatgtacactttggagccaattcaaatattagagccaaaagtcaaaagagaaaaggtaaacaaactttaaaatgtgagggcaagagtgtaaatcagacaaatgatttggtatgaagaatatatagcatggtgcatcaaatttagagaagataaacataattagtagaamtagaggtaaactggaagtgttgacatgaactctcactgtctgaaaaaaagagataatttctttactgctgtcactaaactacctcatatgatcatgtgaaataatgaaatatacatctttagtaaacatattcaggcctctgctaccattttccaaaaaatgttctttgcagaaaagctgtt

SEQ ID NO: 121040 - DNA, 479 bp, Homo sapiens
ccctaaaaccctacctcttgcttcattgcttctttttctgtactcatggcctctcatgatgttggaggcaggaggtcattaccctggagttcattaaatccccatgacttggaccaggtgtgtacacccagayatcacaggaagggatttctgcctcttttccccagccctggcattgaactcagatagacccaggcttaaacccaatcagtaccacctactcatcaagtgaagtagtacaagtgagttaaactatctgagcctcaaattctccatctatatatattaaggatgtgatatccttctctcaaagttgatgtgaaaatacataacatggtctatgttaatgctgttagcaagggcttggcatacattagatgcttaataaataaacatcttaaattggtttcaagtcatgagaatggtcattttgaagggttgtttccttgcaaaggaagtttaaagtcctccttaaaagc

SEQ ID NO: 121041 - DNA, 519 bp, Homo sapiens
atgttctgcagcctgggagaaaaagttttagacaaagtttggttaagaggcattacattccaaaagatcggtaggcataaccagttcaattaatcatttatgaaaagaatgggaatttgtagggtctgtgtctggccttgccatatgaaaacaaaggggcatctgtgagtattatctaagtcrcatggggaagggtagttttttgcagtaaatcattttccataatacaagagtggggagtttctttaacctaatttgttttgtaggagcacagggctcaggtataattcaatgttgtctataatgtgtttcattaaagctcaagaaattaaggtatcaaagataagataagagcttcttggcttaatagcaagattatatataaaacagattttacttggtatgcaacattagtgtgatatgatgggaataaaaggacaactttaggcgctatattaatagaagtctatcaggaagagggcttagtagtctatattgtggattgtgctggtcagaata

SEQ ID NO: 121042 - DNA, 668 bp, Homo sapiens
gccagcctcattggcttcagtaactctgccaatggagatcaagggcaagaatttatggtcatagtgggaaaggaagtgcagagaacacactgattcagacagttttatgtgtctgggaaaagagcaaaaaaagtttttgaagaatttttggtcttctccaacaagttgtcacaaaacaataatccagtgccttctctgttatacatccagataacagaatatctgctackatgtacagtttgctctttgctactagctttcatatacaaattgcaatttcttcaaacattattgcttactgctctgacttaagttaaccaaattttgattttcatgtatcaggtacaaaaaaatcatttcagtttattacggaacttgccaggcaatgtgttagtttcagcaattgttcggtctttgttaagcagattgtgcaactacacaaaatttcactgcagtggctttccaatcttatctagaagaggaaagataagacttagagcatcaccttgtgctggtggtggtgatatggggttcctgggacaagggaggtctgagccagtagggatccagtcaattgccaccagagccattcaatgattacttgctctctgggctaccgtttcaggcacaaaaaatcagaggtagattcagtcttctatacacctaca

SEQ ID NO: 121043 - DNA, 583 bp, Homo sapiens
ctgtgctaaatctcaagcaatttagctcggcaaagtagattagttagagccaatgcaaagctctacctcataactttcagtaaaagtgatactcagatatatagtttgaggcttgaactggaaactgagacgttctgctttttcagctctaagaatattagatgctaataaaggcaagtgaaacaggtacctgtggcctggactcttactctgaaaacatttaaatcttaaataacttttatatagtcagtgccatttctcccaaagggaaatctactgtggaaagggctcatgaaaaataagttggatgaatggtgagaagattgttatatacatctatttgttgctgcaaacatgctttttccaggaactctcttccaagacttaactgagctagtattgaatagtgaggctccatatgagactcctctggaacttgggtgaattcrcagccaagagttttatcagaatctttcactggttaacacctggcttattgtcctctgcaccacctcaaatcctcctcttccaccaaccactgctgcaataactaaggccatgcaggttttggccatttttgtac

SEQ ID NO: 121044 - DNA, 614 bp, Homo sapiens
ggctgggcctctccttcttggtgacagagacgtgagcttgtacaacacaaatgaccctgacacctgtgcccacaaagttccattcctcttgctctcagctctaggtatttatacagccaatctaaagtcattggaattagaagagacactagcgatctgttatttgcagttgagggaaatgctttctggagagcacgtgttttggcccagtgcataggtaatctgtagcacagttttgatcagaattcagacttcccaaactcccagttcagaacatttgaaactgcatcaatctcatcctcatggtcaaactgctgtgtctaaagaacttcactttggtgctgcatgtgaggatgagcccctcaatatcacgaggtatctgtaaagactgaatccaggctggggacagccccaggtagtgctgatgagagctgacacccaaaatgcaatctggggagtcaacaagagaaraaaagtctccatgaaaccaacgagcagcactgagagccaaggtcataacctgggaagacattttctgctatgaaaatatggagaggccaggcaaagaagaaatggagaacagtgagagtaggaaggtagagatagaaataagg

SEQ ID NO: 121045 - DNA, 554 bp, Homo sapiens
taagtagttgtcaagcgaggatagcccataatttatcaaagacctggaaaacatttccaatacaattgatttcatttctcaattaaaaaggtcaatgtccttgaattctaacaacatctgaaaatatccatctaattagactttcaaaaatctatgagaggaattcattttacctacctgtcatctgttttgattgtcgaactttttaacaaatgaaaagcaattgatgaagcttctccgcaaacaaagcaaacataatgccaaatgctgaatccatcacttagaaacagaagaaagtaatagccaatgattatgcatcaatatagctcagctgcttttttcagtagggtccctgggatctaacctgcaaggtgtgtgcttctcgtatgactttgkcttgagaacatggaataaataagtctagatgtgcatttcagggcccacgtaatacaagatattacttcaagttcacatttgctgctgcacaattatgttcaaataggacttcctaggtaagatgttctccaacacagcacacattgaactgaggagag

SEQ ID NO: 121046 - DNA, 554 bp, Homo sapiens
tggtctgttgtcaaaaaatagtaccttgggatggagaatcctaagaacagttctcacttaatgagaggctgtcaaataaactcattcttgctcaaaactatgtatttttgtactttgtccttctagtttccgtggatgctgatgaattctattgaaagaktcaggccttctaatgattccattggataattatttaagtgaatacttttttttttattttactttaagttctgggttacatgtgcagaacatggaggtttgttacataggtatacacatgccatggtggtttgcagcacccatcaacccgtcacctacattaggtatttctcctaatgttatccctcccctagccccccacccactgcaggccctggtgcatgatgttcccctccctgtgtccatgtgttctcattgttcaactcccttaagtgaatatgttttgaaaaaaaaattcatgtggggtatatatgtacacacaatggaaaaaaagagtcatggagagtagaaaaactttggaaatatatttgctcaaaatgattgatctctggatg

SEQ ID NO: 121047 - DNA, 597 bp, Homo sapiens
aagccttacagttatcatcatacctaatgacgaaaggcagactgaatgttttctttgtaagattgacaaggcaagacagttcactcttaccacttctattgaacattatactagagtatcaagcaatgcaataagaaaaaaatgtgatttttgaaagaaatttttgaaatgattggaaaggaagaaataaaattgagtttatttctagatatctttatatgtagaaaatcctatgaaacattttaaaaaacgatttgaactagtaaatgagttaagcaaaattgtgggatacaagaacaaaatgtaaactcaattgtatttctatgcacyggcagtgaacaatcagaaattaaaattaaaaacataattccctttataatagcatcaaaatacaaaatacttaggaacgaatctgacaaaagctgtccaaggcttgtacactgaaaactacaaaacactgcttagaaaagttaaagatctaaataagtgtaaagatataccacgtttatggttcagaagattcagtactattaagatgtctattatcctcaaattgatgtatagattgaacacaatctcaatcatgtacccagcaga

SEQ ID NO: 121048 - DNA, 597 bp, Homo sapiens
aagccttacagttatcatcatacctaatgacgaaaggcagactgaatgttttctttgtaagattgacaaggcaagacagttcactcttaccacttctattgaacattatactagagtatcaagcaatgcaataagaaaaaaatgtgatttttgaaagaaatttttgaaatgattggaaaggaagaaataaaattgagtttatttctagatatctttatatgtagaaaatcctatgaaacattttaaaaaacgatttgaactagtaaatgagttaagcaaaattgtgggatacaagaacaaaatgtaaactcaattgtatttctatgcactggcagtgaacaatcagaaattaaaattaaaaacataattccctttataatagcatcaaaatacaaaatacttaggaacgaatctgacaaaagctgtmcaaggcttgtacactgaaaactacaaaacactgcttagaaaagttaaagatctaaataagtgtaaagatataccacgtttatggttcagaagattcagtactattaagatgtctattatcctcaaattgatgtatagattgaacacaatctcaatcatgtacccagcaga

SEQ ID NO: 121049 - DNA, 552 bp, Homo sapiens
aatgctttgacacaggagatgcttttattattattattatttttaccacacctcatcttgattagttacttgtttgtagaaagacttccctctttgattcttttgttttacagcaggaatgattgagatgagcagagcatcatttcaaattctctcataagactggattgtaaatcacttactgtcaagackgtggccagttgccattcaactataattaattcatacactattgctattgacatgtttctcaggtgagtgaaaagtttctatgcctctgtattttaattggtttagctcaagtttttggctaaatgtgttaaagaaaaacaaagccagttaaagctagttaaagattataaagacaaaccagtatggaactgagctcaactccaatccatatagaggctactgggcattttaaagggagaatgagggagtgaagagagagaaactgcccggctcaaccaaagtcatggaagtgaaaaattacaattattgggtaaaagggtttggccaatgtgattagaccgtctgggtttgttaactagt

SEQ ID NO: 121050 - DNA, 552 bp, Homo sapiens
aatgctttgacacaggagatgcttttattattattattatttttaccacacctcatcttgattagttacttgtttgtagaaagacttccctctttgattcttttgttttacagcaggaatgattgagatgagcagagcatcatttcaaattctctcataagactggattgtaaatcacttactgtcaagacggtggccagytgccattcaactataattaattcatacactattgctattgacatgtttctcaggtgagtgaaaagtttctatgcctctgtattttaattggtttagctcaagtttttggctaaatgtgttaaagaaaaacaaagccagttaaagctagttaaagattataaagacaaaccagtatggaactgagctcaactccaatccatatagaggctactgggcattttaaagggagaatgagggagtgaagagagagaaactgcccggctcaaccaaagtcatggaagtgaaaaattacaattattgggtaaaagggtttggccaatgtgattagaccgtctgggtttgttaactagt

SEQ ID NO: 121051 - DNA, 552 bp, Homo sapiens
aatgctttgacacaggagatgcttttattattattattatttttaccacacctcatcttgattagttacttgtttgtagaaagacttccctctttgattcttttgttttacagcaggaatgattgagatgagcagagcatcatttcaaattctctcataagactggattgtaaatcacttactgtcaagacggtggccagttgccattcaactatamttaattcatacactattgctattgacatgtttctcaggtgagtgaaaagtttctatgcctctgtattttaattggtttagctcaagtttttggctaaatgtgttaaagaaaaacaaagccagttaaagctagttaaagattataaagacaaaccagtatggaactgagctcaactccaatccatatagaggctactgggcattttaaagggagaatgagggagtgaagagagagaaactgcccggctcaaccaaagtcatggaagtgaaaaattacaattattgggtaaaagggtttggccaatgtgattagaccgtctgggtttgttaactagt

SEQ ID NO: 121052 - DNA, 522 bp, Homo sapiens
gctgccttcatccattatcttagcaagatcttctaaataacatcctgcagcttctacatcagcacttgttgcttcaccttgcacttttatgtaatggaaacggcttctttccttaaayctcatgaaccaatctctctgctggcttcaaccttttcttctgcagcttcctcacctttttcagtcttcatagaattaaagaaatttagggtcttgttctggattaggctttggcttgagggaatgctgtggttggtttgatcatctatccagacctctaaaatattttccatatcagcaataaggctgttttgctttcttatcgtttgtatgttcactgaagtagcacttttaatttgcttcaagaatttttcttttgcatttacaacctggttaactatttggcacaagaggccttgcagcctatctcagcttttgacatgggttcctcagtaagcttaatcattcctagcttttgttttgaagtaagagaattgtgactttttctttcacttagagaccatt

SEQ ID NO: 121053 - DNA, 603 bp, Homo sapiens
atatttcttcaatgactacatgtagaacctttgcttgatctgtttgtaccacagattattacttattgcagtgttgacctgcttaatcatagattgtggaatccagagaagagttcagagatttttctaattcaaaccactcattttatttttgaaaaaatttgtagggaaggtaaatttcaccaggtggcagaagtagaaatagaactcaagtctcttgactttaaatcacatgtacttttaggccttatttccacctagcaatttggataattcattgtctaattactttctagcttaagcatrttcttccttcatactcaagagtgttattcagcttcacagctaaactatatcaatatcagcttaagttactaatccctttgctgattttagattcaatttatggcataacattttttatacttcctttcagaaaaaacacaactgaaattattcaaaatgtctctgatttaacatgatacattgtttgaatgccgtgtagtccacaatctccctagaaaatatgctcaatttaaatggtactgatttcatctcaatgcacagaagtccttgtcacttgtaaaatatcttgtacagtgg

SEQ ID NO: 121054 - DNA, 634 bp, Homo sapiens
atattcttacaagtgaacattaatggcaattaaagagagtaaaccagacctttagcaacatgcataaattgcaaaaacaaaactttaagcaaaaaatagaastgtgtaagcctatataaagaataatagaatgtatgcatagttgggatacttgtaaaacaatactatatggtttaataatacacattgttacaccatgaggtgtaacaacatgggtgggataaataatgccagattcagtgactaccactgggaagaagagaggtgcacgattttctatctgctatgtcttgtttgtttatttgcttttagctaggtaggtacacctagttcattgttattattttctgtgtattttgtatgactgaaaatgtttcctaataagaaaaaaatcatttttaggctattacttctatagtgctcattgcccagagaagaactatttgtatcatagacagttaatcctctagcccttaaatatgaaaaatccaaattttgggggatctttacctaggttgtcagttttatttgcagcaaaatatacaaaacttgaaaatatactaatgtaactctgaaataccactactggaaaatgtttcataacattccaatgaccctccgtcagtttgggtaa

SEQ ID NO: 121055 - DNA, 555 bp, Homo sapiens
gaatcaatatcatctactcaaagacctagaaagggcccagaagtcttggaaatttccctgggatttttttaaacctgctcatttgcttctaaataaatcagcgtctctctaaaatgccagaggtgaggtgaaacaaacaagcaagcaaacacatggtttaaaaaaattcttttcccgattatatcagggaaaatgtcttcttacagacttcaggggttcaaacattttaaaaatgtattttaaaggtatgtcacattacattattgttttctattatttctagcactgcaagtagttaaatttcctctaggtttaaatctgactttatggattaatctgtgaatcaattgtaagtaacattgttactacaaaaaatgagttttaagttttagaatcattcatttataaacagaatatagtttttacattggggaatatctttagttatcaattaaatacrtggttgatagagttcatgtttaaaattaaatgcttttagaatacaataaaatcttggtaaatgtcaacttgttagtcattaaaatgtgatttgga

SEQ ID NO: 121056 - DNA, 606 bp, Homo sapiens
gacagatctgctgagctttgaagtgattttctttctttcccttgaagaggaaaatgatattttcaccggtacatttgaagtcccccaagtatgggaaggtaccaattccrgacaagtgccactgcagcgtaacactcagagaacctgaacttttcaactctgttggtgatgggggcagaaattcactgttgccactgccaggtctgtttcatatttcaaaggaatattgggtgctgcaaataggaactgagggttaaactcattaaacccatcagtcctgtgattggtgggtattttgccatcattttaagacactaaacgtgggaggcagatgtcaaaatacttgtacaattttaaaatgtcacaagtttaaaatgatacaattaaagctggttgctaacaaaataaatttaaaaaatatctagctgtgtctaattgtggttttaatttgcattaatgatattaagcatctttttatatgcttatttgccatctgtatatctcctttggagaaggctcgactctttactcatttttatcaggtttgttgctttcttattgttgagttttgagagtttttaaacatccttttaaagaaatgtgatt

SEQ ID NO: 121057 - DNA, 622 bp, Homo sapiens
tgctagactttattgtgcatatcaatgtttgggaactttgtgacatttcagttgttcttgaaagtctatttatacatctgcacattgccctgaagggcatgggaaaatatttgggaggagaaggtagttgtgagtttcccagggcctctgattatccgagttaaagattacctgaaaaaatagctgcgatgccttcctctcaacgcaccttttccctctctgtcaaccaggctttgtggctgtatccattctgcatggaaagaaatcctgggaactagttcttctttgcttgcttacttgggattcttgaaaagtgtctatgcaacttctgatcattattcgatgtggaactttcataaagatcatattttgggtctygccaatttttcatatctacccactgccttagctttcactgcctttaaggcagtgattttcagagtggtgtttgtagatccctgggggtcttcaagacccttctgcatggtccacaaggcccatactgctttcataatatgagatgttatttgatcctttcactcttgatagtcgaccagtggtgcaaaagtcaatggtaggcaaagcagctggtgcctttgcacaaatcaaaacggtggtacca

SEQ ID NO: 121058 - DNA, 556 bp, Homo sapiens
tcagcttttgggaaagggacttttagtgctrtcactcatcaagctttattaggcttctgatcaatttctaattaaagaaaacatgaatcctcatatgacaaggggaaaaggtgattcctaagtaaagtactgaatgtcttgtctcttaattcccaatttatcaaaacaaatcaaaacactcactggtaattttaatctagacccccacaatttttttttacaggccttgtttgcttttaggtataagaaatcccaaaagttcttacatttttattctattgttcgagatcattttggaaaaagaaatatgcttcagaacatttggtgaaaagatgacaaatgttaattttattttagactctataaatacaattttatattatttatttgagatggatgtattactttcagatttttgctctggtatagcataataattgatcccatatttctcagataagccggtaaggaatatatcactttgatacagtgtaactctataggaaaaaaacccagtatttctttatgaaatactaaacataagtttgtttaatca

SEQ ID NO: 121059 - DNA, 546 bp, Homo sapiens
ctgccacttttctattcctggatttggtgatctttaaaatcctcttcagctataacaggcaatgattgtttgaatgagaaaaagtgtaaggtgaaaatttgagaatggcaaagtaaagttaacaccaacttttatggcccaatattatgattgtcaatgggcgcattaayaagaaaatgatactaactataaaaattctaaattgctgtgtcaggtccccactttccttacctgaaagctatggttaccttgtgcatcataacactgactgtaaattaggaaactcattttacttcctccatctgcagagaccagtgcttaaagagggtgcatttgaaatggattttacaattcaaatttagttacacaaaggcttaccactctgagcaaaaataaaaatcttccctctgctattgtaatcaaaacaataccctgagcttacagctctgtgtacgtattgcaaccagagtgatttaggttaaactctgattcaaacatctaagaaatttaggagcaggtaaaaccagcatctgctttattggtata

SEQ ID NO: 121060 - DNA, 546 bp, Homo sapiens
ctgccacttttctattcctggatttggtgatctttaaaatcctcttcagctataacaggcaatgattgtttgaatgagaaaaagtgtaaggtgaaaatttgagaatggcaaagtaaagttaacaccaacttttatggcccaatattatgattgtcaatgggcgcattaacaagaaaatgatactaactataaaaattctaaattgctgtgtcaggtccccactttccttacctgaaagctatggttaccttgtgcatcataacactgactgtaaattaggaaactcattttacttcctccatctgcagagaccagtgcttaaagagggtgcatttgaaatggattttacaattcaaatttagttacacaaaggcttaccactctgagcaaaaataaaaatcttccctctgctattgtaatcaaaacaataccctgagcttacagctctrtgtacgtattgcaaccagagtgatttaggttaaactctgattcaaacatctaagaaatttaggagcaggtaaaaccagcatctgctttattggtata

SEQ ID NO: 121061 - DNA, 603 bp, Homo sapiens
atatttcttcaatgactacatgtagaacctttgcttgatctgtttgtaccacagattattacttattgcagtgttgacctgcttaatcatagattgtggaatccagagaagasttcagagatttttctaattcaaaccactcattttatttttgaaaaaatttgtagggaaggtaaatttcaccaggtggcagaagtagaaatagaactcaagtctcttgactttaaatcacatgtacttttaggccttatttccacctagcaatttggataattcattgtctaattactttctagcttaagcatattcttccttcatactcaagagtgttattcagcttcacagctaaactatatcaatatcagcttaagttactaatccctttgctgattttagattcaatttatggcataacattttttatacttcctttcagaaaaaacacaactgaaattattcaaaatgtctctgatttaacatgatacattgtttgaatgccgtgtagtccacaatctccctagaaaatatgctcaatttaaatggtactgatttcatctcaatgcacagaagtccttgtcacttgtaaaatatcttgtacagtgg

SEQ ID NO: 121062 - DNA, 588 bp, Homo sapiens
acatcctaatcccccaaacctgtgaatacatgaacacattagcatatatgacaagtgggactttgcagatgtgaactgtaagataataaatttatattgttttcagccattaagttggtggtaatttgttatagctgcaatargaaagtaatacacacagcaactataagagccagataaccaaattctagttactttacttgtaatttataggcacctgtacttagtaactaggaaaataatgagttcatacacaagagaaatgacaatagacagaagagactgagactactgagacaaatcaggttatacaaaaagatagctcatttaggaactatttattgtatacttgagtttcactggaaaggcctgtaagtgtcagagttgcactttgaagtcaactggaaagtttcaaaagcaataactgaggcatgggtccaatctctatattctgatttgtctggggtataactaggtatcagaattttaaaaatcaccccacctgattctttttttaaatttttatttttttaaacttttattctaagttcaagggtacaattgcaggtttgttacatagctaaactt

SEQ ID NO: 121063 - DNA, 667 bp, Homo sapiens
ccttgtcttcatgtttcataggctgagggacaggaggaagagaggggattggtcttgctgtctcaggggtagcagaggcagaagaacatccaagtgtaagtggacctgtgcagttcaaacctctgttgttctaaggtaaactgcacttgcttttaaatacaaacttctaaaacatttcataagaataactacctttgctttctgtaattatttatttctaaatattagattaatattatctatgattataattaaatatctgcaattaaatataacataaaacagtagtcctcaattgcaggtacttttgcctctaatgggacatttggcaaggtccatagctatgtttggttgtcacaactcaagggaggctgctattggcatctagtgggtagaggccagggctgctgctgctacatatcctgcaatgcctaggatagattcctcacacacaaaaaaagacttatctggactaaaatgccaataatgctaaaatgccaaataaccctgatttataytgaagggagaggaaaaatgaaacatgaacattcaaagactaactagcaagctagttcttcaaagcgaacaaatacataacagaaattagaatttcctgaaataaactatttcagtgcatattaaaagcttgtatgttttgtttatttta

SEQ ID NO: 121064 - DNA, 623 bp, Homo sapiens
tcttctcagtccagaagactttatgttgctgatcgggaacatcagggaaaaaatctcattcaatgataagaggaatatttttttctaaaataccaataccagttacakcaatgcacgatgcacaattgtcattctatgtgtctagtaaatgttcttcaagtaaccccttttcaaagtcagaaaaagaataagtaatctgaataggaacagaaatatgaataataaaaataagtgacacatgcttctcaccacaagaacagatgggatgacagggcttagtcatgttaagacaagtgaaaggaggcatgtactaagtatagcaaattggttgaactctatatggaatcccacagaaagagtaactcacacagttcaaaagtatttattcttccaatgataacattagtaacataaaataagcatgataactataaaaataaaacttcagcatcttattaaaggatataaaatgagacttgaacaaatgtagtacaaaagaaaaatacatattgaatataaccacaaatagttggtagcaataaatgctttgatcacagttgattttaatgaataatatatacaacatatgtaacatacacaaaaactataatatacaagtcaca

SEQ ID NO: 121065 - DNA, 540 bp, Homo sapiens
aattgcttaaaatcggtgataaaaagaaaaatcttaaaagtatctagaggagaaaaagaaaaacaaggcaaggaatgaaaacacatttcttatcagaaagcatataaaccagaagactatgaaagaacatctttaagtctctaaggaaaaacactgtcaatctagaattttatgtccagtgaaaatatctttcaaaaatgaagacaaaatggagaattttttcaaacttacagaagctaaaagaatgtgaattagataagatggaaatagaaagaacaagcctacccaacaagaataaagaatgaggggaaatagacaaaacattttgatttttgktatttttgtattttaaaatctttgtaaaagataattgtgtgtttaaagaaaacacaatagcaatgtatccttgggtttatgatacaaacatggtatgtaatgatggggtaaaattgtgaggtagaaaatggaatcttgtaagcctcttatacattgtgttagtttattttatattgctataaaagaatacctgaaatggggtaa

SEQ ID NO: 121066 - DNA, 549 bp, Homo sapiens
gaaagaagaaaattgaaagactgctagctagaataaaggaaaaaagagaaaagatccaaataaacaccattagaattgacaaaggtgacattaccacaatccccacagtaatataaaaatttgaaaaaaaaaatccctcagagactattacaaacacctctatgcacacaagctggaaaacttggaagaaatggataagttcctggacacataacaccctctcaagactgaaccaasaataaatgggaactctgaacagaccaataattagttctaaaattgaattggtaataaaaagcctaccaacaagaaaaagttcaggactatatagattcacaaccaaattctaccagatgtataaagaaaagctgataacattcctactgaaaccattccaaaatattgaggatgagggactcatccccagctcattctatgagggcagcatcatcctaatactaaaacctagctgacacataacaaaaaaagaaaatttcaggccaatatccttgataatacagatgcaaaaatcctcaacaaaaaaatagc

SEQ ID NO: 121067 - DNA, 559 bp, Homo sapiens
aaactgaatatgatagagcttaagatactaaaagaatatctacaaagactgggagtgggatggggaagttaattaccaacattsattctgattcttctacctatattttatcagagcttttggatctccttttaaacacaacttttcttttccttgtaacgtcactccaaattttccttatttcccttccaacttctaatattttttcctccacttcttttcatccttgttttcctttaattccaatttttctttccttaatgcaagagatatgcaaagtatagaacaaaatgaaaggatcatttaaaaattagatggagaaaaatttgcagcaacatggcagaacatttagggtaccagttcaagtctgttcctcctctcctttgcaaaaacaggaccaaaaagaaggataaagaggagagaagaaggtggagaaggaaagaaagaaatcaagaggaggaatagagaggaggaagagaaggaaggagaaggagaacaagaaagaagaaagaagggaatttccacaaataatatccagtgacctgagcttgaaacactc

SEQ ID NO: 121068 - DNA, 559 bp, Homo sapiens
aaactgaatatgatagagcttaagatactaaaagaatatctacaaagactgggagtgggatggggaagttaattaccaacattcattctgattcttctacctatattttatcagagcttttggatctccttttaaacacaacttttcttttccttgtaacgtcactccaaattttccttatttcccttccaacttctaatattttttcctccacttcttttcatcctygttttcctttaattccaatttttctttccttaatgcaagagatatgcaaagtatagaacaaaatgaaaggatcatttaaaaattagatggagaaaaatttgcagcaacatggcagaacatttagggtaccagttcaagtctgttcctcctctcctttgcaaaaacaggaccaaaaagaaggataaagaggagagaagaaggtggagaaggaaagaaagaaatcaagaggaggaatagagaggaggaagagaaggaaggagaaggagaacaagaaagaagaaagaagggaatttccacaaataatatccagtgacctgagcttgaaacactc

SEQ ID NO: 121069 - DNA, 559 bp, Homo sapiens
aaactgaatatgatagagcttaagatactaaaagaatatctacaaagactgggagtgggatggggaagttaattaccaacattcattctgattcttctacctatattttatcagagcttttggatctccttttaaacacaacttttcttttccttgtaacgtcactccaaattttccttatttcccttccaacttctaatattttttcctccacttcttttcatccttgttttcctttaattccaatttttctttccttaatgcaagagatatgcaaagtatagaacaaaatgaaaggrtcatttaaaaattagatggagaaaaatttgcagcaacatggcagaacatttagggtaccagttcaagtctgttcctcctctcctttgcaaaaacaggaccaaaaagaaggataaagaggagagaagaaggtggagaaggaaagaaagaaatcaagaggaggaatagagaggaggaagagaaggaaggagaaggagaacaagaaagaagaaagaagggaatttccacaaataatatccagtgacctgagcttgaaacactc

SEQ ID NO: 121070 - DNA, 599 bp, Homo sapiens
ttgacctaatgttcaagtcccttcaaaattgtccacaatataaaaatatggcwttaagctgcaaagacagtttgaaatgactagagatgtttcttttaaaaacctacacaatgtgactgactttatctaggtaagtctgacagttaagcaagatgggaatctgagcaattaagagcacgtgtttaggatttgtttcctgaagatagtaactgacactaaagcctagaaaggtattcttatacatttagctctgctaaatgaccagcaggtcacagaaggtaaacgtaagacttccacagaagatgctgacactgacaaatgaaaatgaggttaaatagagtcattataaaaatccctctggtaaaacttcagaaaaacagaagttaaagccagatgcttctattacccagctcatccaatttaagtctactcaagaatcgataaagctctattctgagatttcttagcgactgttcaaggttttgggagttgcaggaggcttgattagcatttgccggtgctgggacattttttaggagataccacaaatcatataacttcagttatgagaagtccatgaaatatgtcctagatataag

SEQ ID NO: 121071 - DNA, 559 bp, Homo sapiens
atagtatgcctttggaaactatatatgcatattctgatttttaatataaatggtagcataatataaaccccattttgtaccttttttcttcactactatatattaaaagtctttccagatcagtccatataaaagtggatataccataatatattgaatcactcccctattgaaggacatttagttatttttccaatttgcttgtacaagcaatgctttagtgaatttccttgtacatatgttactttacgcatgaagtgtaattgctggattaaargagatacattttaaattttgatagatactgccaattgttcttcagcaatacattctttaatagcaaattacttgagaatagcaaatccatggaagatacatctaccttggtataataaaccttcttgtttttcagggatataaagatttttgtcttaatgagaagaagaaatcaggatgtaatagtttccttagaaataccatggatgtgcagatcttcaagtaagccaaatatttgttttctcaaataagaggcaagtggtttaaagccttatactgtaag

SEQ ID NO: 121072 - DNA, 534 bp, Homo sapiens
ttctttttttcccgttctctatttatacacatatgagaagaacggtttctatttatttcagctatctgaggtttttgaacatgcaagacctcatctggatgtggatacaaatgacaaatagcagtagaatcctaatttcactggctcttgttcaatctattccagcaggatcccaaaccctataaggcacctcccctccagcctcctaagcattcctgggagtcaactcaatgccaatatctacctttttttttttccttttttcttctcagacccatggttaggactctgctccccagtcattactgcatccaccaggttttgtcccaccttctactgcagtgaaaccattggacctagggagatgcaaggctgacagggtgcttctgtggagtgggacagcatgcttcactcccctctgtgtgcaacagtaggaatgctgctgagatatgccaaatggcacagagtctttggtaaaagtggtctttcagtttttrcttatgtttcacaccttcagtttcaaatatgaatttg

SEQ ID NO: 121073 - DNA, 605 bp, Homo sapiens
caaataatactgagtagttatttttcatttttctcattgcaaaaacaaaataaaatttgaatatcaactctaagagaagatatgamaaaatcagagtctttatgaaccactggaaggaatatgaattaagatagttacattggaaaacagtttggtcatatttaatagaaaatgtacagaccttattctgcaggcattctacttctaggtatatattgtatattatagagaaatccttacacatatataaacaagcagaaatttactagtctatttatttcagaattgttgtaataccaaaagactgaaaactatgtacatgaccatcagttaagtaatagatcaaatgtggtataatcatatgatggcttaaagccatgtggatgtttgcctccctgcaagcaagtttgctacatttttcccttataggcagaacctatctctttctggagaggctttaaatgccagactcttagtttagtgttttctttgcctgttcagtttgggcacacgaatcaattctggtcactgggaatagaggagaagcctgctgagacctcctgtgacaaacgtttctctctgataagaacagagagattcatgag

SEQ ID NO: 121074 - DNA, 606 bp, Homo sapiens
ccattgcatcattcttatgcctttgcatcctcatagtttagctcccacttataagtgagaagataacaatgtttggttttccattcctgagttacttcatttagaataatgttctccaactccatctaggttgctgcaaaccgtttttatggttgagtagtattccatggtgtgaatatataccacattttctctatctactcattgactggacatttggyatggttctatattttcgtgattgcaaactgtgctgctatcaacttgcatgtgcaagtatctttttcttttatatatatatatttattatactttaagttctagggtacctttgcacaacatgcaggtttgttacatatgtatacatgtgccatgctggtgtgctgcacccattaactcatcatttacattaggtatatctcctaatgctatccctcccccctccccccaccccacaacaggccccggtgtgtgatgttccccttcctgtgtccaagcattctcattgttcaattcccacctatgagtgagaacatgcggtgtttggttttttgtccttgtgatagtttgctgagaatgatggtttccagcttcacccatgtccct

SEQ ID NO: 121075 - DNA, 572 bp, Homo sapiens
caaaatttacttattgatctatacactctctgtagctatttttaggtttatttaggtatgtaatcatgttttctacaaagaatgacaagtttatttaattttttctaatcttaatattttgccataatgcaatgactggaacatctagtataacttttaatagaaatagcaatagtgacacttcctatctcatttatatctcgggaaaaagctttagtatgtcattgttatgttgcaagcttgttaccgaattttgtaggtagctaccttgggaaaaactattcagggaagctattctgtcattcctttctctctcaatgcccaggaggatggatgatacaagataggcacattgtaatatgtttacaggccttcacaggtttcatataatttatggtgaattaatccaatcatttttaaatttttgattcatggttccctagagaatataagggccaaacctctgagattwaaaaaatagacttgtttcataatctaaatgatccctgctttcaggagggcccattaatattacttggaaacttcatatactctgggcaaaacaatacttg

SEQ ID NO: 121076 - DNA, 490 bp, Homo sapiens
aaaagtgcattcatcaaacagataattcactctctcccctggagaagaatgaatgctgcagtgtgctaggagtgttattcttccatgtggaagcaggaaatgaaggagaggcgggctcttatkacactctaatagataatattctagagccatttcactgcactgtaaaaacaaatcattaaacaaaattctgattgtacagtggtacatacaagtctactgacctctataggaaaagcttgcaaccaccacagaaagaatgatcatttagaaattataaaatttaagtgtcttaaaatgccaagtcctaagttcatcttgataaatcggattaataggctagctttcattatcataggctgaagaatttatccatttatagaaattaatattattatactttaaatctctctgagaatgcatggtataacatcagtaactgtcatctaaatggaatgagggcttgtctatttaaactgactagaaatac

SEQ ID NO: 121077 - DNA, 579 bp, Homo sapiens
aaggtatttgagaagtttgagtgattggatttttatctggtatgttataaataacttttgaagggttttaagaagagaagtatgacatatgcatcttttagatagatttctggcaactgtgtgaatagatttcagtaaaacgagcttagagactggaggtccagctagttgtgtgtaattgcccagttagagatggcaaagtccagaaccaggacaataggagtaggacaaaatagaaaaaactaattctgaataatatttaatgggtaagaatttattaattattggatttkgacatgagagacatggagggctcaaagttaataggagagtggcaccttttatcaactgaatgaaggaacacatgaagaaccagctttaaggaagacagtgtgtttttgaggggcagaattagtgatgtctaattctcatgtataaagacctttataatagcaggtgaagaaatggggatgtagattttgaagtcagacatttgtaagtattaaaaatgagagtaaattaaattatgtctttcaagaattacacatcaagcaagaagtacaatgagcagagaaagga

SEQ ID NO: 121078 - DNA, 579 bp, Homo sapiens
aaggtatttgagaagtttgagtgattggatttttatctggtatgttataaataacttttgaagggttttaagaagagaagtatgacatatgcatcttttagatagatttctggcaactgtgtgaatagatttcagtaaaacgagcttagagactggaggtccagctagttgtgtgtaattgcccagttagagatggcaaagtccagaaccaggacaataggagtaggacaaaatagaaaaaactaattctgaataatatttaatgggtaagaatttattaattattggatttggacatgagagacatggagggctcaaagttaataggagagtggcaccttttatcaactgaatgaaggaacacatgaagaaccagctttaaggaagacagtgtgtttttgaggggcagaattagtgatgtytaattctcatgtataaagacctttataatagcaggtgaagaaatggggatgtagattttgaagtcagacatttgtaagtattaaaaatgagagtaaattaaattatgtctttcaagaattacacatcaagcaagaagtacaatgagcagagaaagga

SEQ ID NO: 121079 - DNA, 542 bp, Homo sapiens
ttgacagaaccattttacccagtactttcaacctttgtttgtgtttagtctcatacaggaattttgcagcagatggatttttaaagtccatctgctttaaaattttttcattattgattttccaatcttctttaatatttatgtgctaacaaaagcatgtttctgaccaaggaaactaaaggcttatrtaatatataaattataacattagataaatctttttcttttttcatcttaaatattcttagtcttctgaacctcacataggccttgctttctgtaatttagaatattcagctgaacagatttagtgacagaatagaaagcattgaattgttgttttaaatacactaaaaaattgttattgaattaattatatggcttgaatttataaaataccactcaaggcaacaaaaaattaagtaatacttctagtttctaataaaatttatttttaattattccccatttgtttataaaaatattccctccattatgcactctcattataattttattgcctctcagtttagaaaatggtt

SEQ ID NO: 121080 - DNA, 560 bp, Homo sapiens
acataggcttggatacatttaaaactttttggaatctcagtgttctcctatgtaaaatgagaatatgtggtgatttcatctattgatgcttgtgaagaattgtctgaggttctcaacttttatgctacagtcctcctaactcacaagagtgtaaatgcacatggacttctgaaaggagagttaaaaaattatttcaaaactcaaaaatgtttttgaggttttacgttttccatcaatattgaagaagaaaaccttaacatgtggggcctctccgcttttctgtccgctttttctcactttatgattmtcctcttctatgaggaataaaatagcagaatcgatgaagagtattttacttgaaaagtaatcaaaacagaagaaatattatgccacaccctcacatggagggctgcacaatgaaggataaaaatgttacaggacacatatcatacacaactttgaatggtatgaaagagagtattggtagagatgtacatcgtggaaacatagtgggatggacaagaagcttttttgaattttcaaccccttggagatttaag

SEQ ID NO: 121081 - DNA, 624 bp, Homo sapiens
cattttgtttgatttaaacacagtcacccctgctctcttttgtttaccattcgcatggaatatgaggacaaaatctaggcaggtcttatatttttatcaatttaacmactttatgtgtttgcattggagagttaagtccacttatgtttaattattgatagggaagtgcttactattgccattttgttgttctctgtcttgtagttcctttgtttttctcttttattttttgctgtttttaattgtgtttgttgatttcttaaatttttagttattcttttattcttttcttttttgcttttgtgtctctcctatgatattctctttgtggtgattatgaggcttatattatacatcctagggttataacagctgataacaacttaacttcaatcacatacactacatatttatatttcccaattcacatacacacatataattccttaatccaacttaaatttgtaaatttggtgaattatgtatctgtttacttacatttcttctcaggtaagtaacaaattgcctcagaactatttatgtaaaatttacccttttcccctataaatataaaatgctatctatcataaataatattttcatgtgtttgtagattaatgttta

SEQ ID NO: 121082 - DNA, 691 bp, Homo sapiens
ccctgtttataggaatattgtgcagagaaaaagataatgctgtaaaatatttcacatcatttctggggattaaaatataaagagagtaatagaaatgaaagacacacatgacaaaccatttagaatgaaattcaatattttcaacactattggggtctatttatacataagatatttgttgggctaaacagctgaggattgataaacttatcttttgtataaagaattgctcttttaaaaatcctttctcatgacttaagaaaaaatctgtaataataactctagtgcagtggttcccaaaacacacgtatggtcagaattaagatatttttaaatgataatttctatgcttcacttcatggaatttttatgtaaaccatagaacctggaaagtggcatagtttagacataatatttgtgctttttgaaaacctcagcaggtcattctgataagcaaccatgcttggtaacataaccrttgtgaacagtgaagtgttctaaacatttagttctgctaaacttttcctcagttttataggaatactatgaaaatatcaatatggaaaagtaatttgtggctattttttaaaaattttatttcagtagtttttgaggaacaggtggtttttggtgacatgaataagttctttagtgatttctcagattttggtgcaccatagccagagcagtg

SEQ ID NO: 121083 - DNA, 618 bp, Homo sapiens
atttaagtcagatatattgatttgacaattatgacactggaactatttttcctgtaatggttgttaaagatttttatggacaatattgtaactgtaagggtaatttgtatttgaaatttgaacaaccaaattatggcccaccctatcatctgtcttggtgaatgaattatctgtatatgaaaagartatgtattctccaattgcacggtatataaaatattaattaggccaatttgcttaatattatcaaaatctcctatatttttatggattatttattttttatcaaatattgcactagaatattaaggtctttaagtgtgattgtgcatttgtctactatgcttttacttgtgtgaattttttcttcaagtattttgaaactgtattcctaagtatatatttgtttatgattgctctattttttttatgagtttgccctattaatactatggaatacctctctttatctgtagtaacattttttatctttaagttgattttgtctgctattagtagtcacataaaacttattacacttactgtttgcttgcaatattttaaacttttatgctttcaacttgaatacctttctatagttcaaatgtgtttcttgca

SEQ ID NO: 121084 - DNA, 371 bp, Homo sapiens
ccagggacctcttgatctacagttaaatgctctaccactgagctataattgagaatagtatataatttatacttatagttccatacatacatacaggtgctcatgctgactcaacagagttgctggtcctgttcaactgtaagtggatctccttatgccataactatcttccttttccaaaaagaaacgaacatttcttgacatcagcttggatgtccactggaggttctgtatgagacaacaaagtctgtacctggcttsgtatacaggcagaagatgaagcccagagggaaggtgctgcttacagagccaaggattcgaactttctttgccagcttttcagttgagatcactttctaataacccccagt

SEQ ID NO: 121085 - DNA, 410 bp, Homo sapiens
ccagagttgatccagggacctcttgatctacagttaaatgctctaccactgagctataattgagaatagtatataatttatacttatagttccatacatacatacaggtgctcatgctgactcaacagagttgctggtcctgttcaactgtaagtggatctccttatgccataactatcttccttttccaaaaagaaacgaacatttcttgacatcagcttggatgtccactggaggttctgtatgagacaacaaagtctgtacctggcttggtatacaggcagaagatgaagcccagagggaaggtgctgcttacagagccaaggattcraactttctttgccagcttttcagttgagatcactttctaataacccccagtgtgagaccaagatgacctccctgaattc

SEQ ID NO: 121086 - DNA, 561 bp, Homo sapiens
ttttttttaagacagatgaagattgctttaaagggccttcttttctcaaggatgtgccatcagaaactaaagagatgtatctgttatagacttacttcttcctgagactgatttggaggtatgagatagattttgtattgtctgaactgctgcttcctgctatttctatttctatatttctaataatacaaaataatcgtagaaaaaaacctaaatgctcagacttaacaattgctttatgattttttaaaaccccaataaccaagaayacttaatccaaaaattacttaagaaatttctgaggtgagccagggagtcagtccacatatgcctgaatataattctctttgaatcatggaagaggagaagaaaatagcaagcttatatttctacattagaatggttaaaaaaaaaatctcctaaccttctctgaaaactgggtaccatgacagagcttcaccacatgactaggataaaagactgggtcatggcctcagtaatcccttgattcaagagattcttcctataaccagtgtattgaacaagtggctgtcatgaaat

SEQ ID NO: 121087 - DNA, 626 bp, Homo sapiens
tctgtctccctaaaatgtttaaaaccatactgcaacccaactgccttgtgtgcactttctcaggacctattgaaactgtgttcctgaggcatggtcaccatatcggttcagaataaagctctttaaaatgttttacaggacttaattttttttttttcattagcaaaccgattacaacagaaggcagaactatccatgagctgcaagagaaattacatcccttattttgactgaaccagtttgagctgagttttccatttcttattttgtaaaagaatgctaataaaatttcccttgattcccaaatcktcccacccctttgaaccaaatgaaggtaactgaagtaattaagacaaaataatggtcatctctttgggttaggattccatgaaaatcccttgaactcatatttgtcacctcccatgtgcaacagaaaggatttaaaaataaacaagacaacatctatgacattgatctgtgaaatctgcagatgtcaggataaaatcacttttgctagatccagacaaaataggtctgagaaggcaccaaaggagatgggttcatacaaacacgcttaactaagaaattgtttccaaggactttctaaaaaccccacaagaaatcct

SEQ ID NO: 121088 - DNA, 552 bp, Homo sapiens
ttgtcaaagattggatggttgtaggtggaaagttttttcatgggttctctgtcctgttccattggtcgatatgtctgtttttgtaccaataccatgttgtttgggctactgtagcagtatattatagtttgaagtcaggtagtgtgatgcctccaggtttgttttttctgcttaggattgctttgactactcaggctctttttgagttctataagagttttagattttttttyccctaattctgttaaaaaaaatgccgttggtagtttggtaggaatagtgttgaatctgtaaattgctctgggcaatatgaacattttaataatattgattcttccaattcatgagcatgaaatatttttctatgtatttgcatcatctctgatttatttttgcagttttttatagctctctttttatggaacttttaactccttggttaatgtattcctaggtattttaatctttttgtggctattgcaaattagataaatttttgatttggctctcaacttgaacattattgctgtataaaaatgctactgagggcca

SEQ ID NO: 121089 - DNA, 554 bp, Homo sapiens
ggtcattagggtggaccctaagccaatctgactggtgtccttataaaaagaggaaattagggcggggtgcggtggctcacgcctctaattctagcacttagggaggccaaggcaggcagattgcatgagctcaggagttcgagaccagcctgagcaacatggtgaaacccccgtctctactaaaatacaacaayaacaacaacaaaaacaaacaaacaaacaaaatactggccaggcgtggcggcatgtgcctgtagtcccagctactcaggaggctgaggcaggagaattgtttgaacccgggaggtggaggttgcagtgagccgagatcatgccactgcactccagtctggcgacagagcaagactccttctccccccactgccccccaaaaaaggaagaggtaattaggacagagacatgcacagagggaccatgtgagaacacagggagaagacgccatctacaagccaaggagagaggccaaagaaaaaccaaccctgcaaacactttgggcctagacttccaacttctagaactatgagaaaataaat

SEQ ID NO: 121090 - DNA, 554 bp, Homo sapiens
ggtcattagggtggaccctaagccaatctgactggtgtccttataaaaagaggaaattagggcggggtgcggtggctcacgcctctaattctagcacttagggaggccaaggcaggcagattgcatgagctcaggagttcgagaccagcctgagcaacatggtgaaacccccgtctctactaaaatacaacaataacaacaacaaaaacaaacaaacaaacaaaatactggccaggcgtggcggcatgtgcctgtagtcccagctactcaggaggctgaggcaggagaattgtttgaacccgggaggtggaggttgcagtgagccgagatcatgccactgcactccagtctggcgacagagcaagactccttctccccccactgccccccmaaaaaggaagaggtaattaggacagagacatgcacagagggaccatgtgagaacacagggagaagacgccatctacaagccaaggagagaggccaaagaaaaaccaaccctgcaaacactttgggcctagacttccaacttctagaactatgagaaaataaat

SEQ ID NO: 121091 - DNA, 554 bp, Homo sapiens
ggtcattagggtggaccctaagccaatctgactggtgtccttataaaaagaggaaattagggcggggtgcggtggctcacgcctctaattctagcacttagggaggccaaggcaggcagattgcatgagctcaggagttcgagaccagcctgagcaacatggtgaaacccccgtctctactaaaatacaacaataacaacaacaaaaacaaacaaacaaacaaaatactggccaggcgtggcggcatgtgcctgtagtcccagctactcaggaggctgaggcaggagaattgtttgaacccgggaggtggaggttgcagtgagccgagatcatgccactgcactccagtctggcgacagagcaagactccttctccccccactgccccccaaaaaaggaagaggtaattaggacagagacatgcacagagggaccatgtgagaacacagggagaagaygccatctacaagccaaggagagaggccaaagaaaaaccaaccctgcaaacactttgggcctagacttccaacttctagaactatgagaaaataaat

SEQ ID NO: 121092 - DNA, 572 bp, Homo sapiens
acttatgatctttgcttttggattctttcaaaatatgtataagaaataatatcaattctacacaatctcttccagaaaacagaaaacatttcccaatgcatctggaagcccgcgttaccttgataccaaaccaaagaaatttaaaaaatgaaaactactgatcaatatctgttacaaacatagatttaaaaatcatcacaaaatttaatatgacaggtccaacaatacataaagggatgatatatgatgctcaagtgtggttcaaccctgaaatgcaagtttggagtggcattaaaaagtcagtcagttaaatgtaatgtccatattagtaamctaaaaggaaataagagtattttaacaaatacaagaaaactattagccaaaaattaacatcattatatatacatatatatgaactcagtaaaatggatatataaaggaatttcctcaatgtaaaaagagcatctataaaaacctatagattacttcgtaattaataatgaaagacaaaatgttttctttctaagataagaaacgaggtaagtattaggttggtgcaaaagtaattgtgg

SEQ ID NO: 121093 - DNA, 536 bp, Homo sapiens
tggcaaatctctagataggtcaacaaagttaaagaaagagagaagacacaaattacagatttataaattcagaatgaaagaaayggtatcactattggctctgcagacttaaaaaggatagggaatactacaaagaactctacatatataacttttacaacttcgtttaattcctcaaaaaactacaagctatcacaacttgttcaatatgaaatagaaaatttgagtaaccatgtgaatattaaagaaataaatttcttggtaaaaaattccctaatatcagttattgtaattgtagtacatttgtaaacacttaagaaaatgacaattctacaatgctttagaaaatagaagaaaacacatagaaattcatattatgaaactggtattaggcagatgccaaaatcagacaatgacagtccaaagtataaaattatggactaatataattcataaatatagatggaaaaagtcttaataaaatattagtagaattcagcatcatatgaagattttttgatacaaaataacaaagt

SEQ ID NO: 121094 - DNA, 580 bp, Homo sapiens
gctactcacaaccagaaaatacttttgtgcgcacacacacacaccgaaaaaaaattacaaccaatatatttcaaaaacttagacataatttatgaataaagagaattcactaattcataaaagaattayaccctgaaatcgatttgattgtatcccgtgtttataagccaggtccagtatttggaatcaatcaatataatcctctatgccaaaaactaaagaaaacaaaccacatgattagtcataccaatggatgcagaaaaagcatcaattcaacactaattcatgataaaaactgtcagcaatctcaaaatagaggtcaatttcctcaacttgataaagaacatctgcaaaaacagccaatataacattcagtggtgaatgctgaatgtctgttcctaccgctcttattcaacataatactgaaaccaaggcaatagggcaagaaaagcaaataaattgtgtacacattaaaaaggaagtcataaaaccatcctcattaacagatggcatgtttatgtatctagaagagcccaagaaatctattttaaaaaataaagaaaatttatgttcacacaaa

SEQ ID NO: 121095 - DNA, 554 bp, Homo sapiens
gtgattgtcctcactttacagatgagaatcctgagctaagataagtgcaatgaacttacccaaggtcagatggctagaatggggcaagccaggattcaactccaactctactcactcccatgtatagatggctgcacacagctgcagggtatatgtaagcagtcccacaagagygtgaacatgtacacacgtgtgcaaatgcctatttacccccacctttcaaaagtcctcaccattatttgatttgtgttattttgaaaagaagtttggcttttcatactttttctaaaatggattagacaattattttgtttcttctttcctctctcccatgcctctccctctgcacaccctccacaagcacatcttccttcttagactagtgaaactggctcctgccttcagctggggaagcacagggagaggaacagagtagggaagttcaggcagctttgcgctgctgcagtgtggtagcagcccacccacgtggttcctgattggcagcaagatgggtagtgtggcaggacggatttttaaaatttttaattagtttg

SEQ ID NO: 121096 - DNA, 476 bp, Homo sapiens
gatttgggaaaaaaatccaaaggtacagtcaactacacaaaaaaaagcttagtctcattaatcattaggaaaatgcaaattgtaactggaataagataaaactacaattcaaagagaaaggctaaaatttcaaaccaaaaaaaattctgggttttggagagctgggaaggaatagggctcctaatcttacaacaatgaaagaacaaaactaacttcaaagtcatgactttatttttatagcaaccaggttgccaagaactgagtcaaaatgtaagggaaaataagcacctgcaaggagaaagaggayggatgcacttacataagacagatgcaaatagacaccactatgacaagtaaagctggaataatcaataaattcctaaagacaaagtggggctggtcagattgggaaaccactgacagctgcagaagttgggaaagatccaccatcttgaaaactttttccccacaaatcc

SEQ ID NO: 121097 - DNA, 591 bp, Homo sapiens
gctataatcatgtgtggtatgtgtactctacagaccagatagtccaaacagatatcaatgctttttaaaagtctataaggtcattagaaatattttaaactacctataggtatatatgtatgtaattgaactatcatgcaagtaagattatttcyttagagtgtgaaatccactcaatttattaaaatattttctaatatctattacaataatatttcttaagtagctaacataagaggagttttaagacatttatttacatgtagttactagattcaaactcgattccactattttcagaagtcatactctgagacaagtcctttttttatctaactatgtttctgcctatattaaaagacagatatgtcaattttgctaatcatgctgttccaaacctctacatcctgattaattttctctttgttctaccagtcattcagagacttacttacattcaaacttctctctaggtttaacatgtgtgtatatattcttgtggttttgtctatttttgctgtatataatttaagacattttattgacatatatcatacatccagaaaagtactatgattaaatatggacaac

SEQ ID NO: 121098 - DNA, 591 bp, Homo sapiens
gctataatcatgtgtggtatgtgtactctacagaccagatagtccaaacagatatcaatgctttttaaaagtctataaggtcattagaaatattttaaactacctataggtatatatgtatgtaattgaactatcatgcaagtaagattatttccttagagtgtgaaatccactcaatttattaaaatattttctaatatctattacartaatatttcttaagtagctaacataagaggagttttaagacatttatttacatgtagttactagattcaaactcgattccactattttcagaagtcatactctgagacaagtcctttttttatctaactatgtttctgcctatattaaaagacagatatgtcaattttgctaatcatgctgttccaaacctctacatcctgattaattttctctttgttctaccagtcattcagagacttacttacattcaaacttctctctaggtttaacatgtgtgtatatattcttgtggttttgtctatttttgctgtatataatttaagacattttattgacatatatcatacatccagaaaagtactatgattaaatatggacaac

SEQ ID NO: 121099 - DNA, 536 bp, Homo sapiens
tttccttgtgacctgggatttgtcattcttcactgccatgtcagcaktatgtcttcaaatatatatttttaaaagatccatatatcagattttttgagcaggaggattcttccaaattgtctaatgtgccatttcaggcaaaagacttcatattaaaaataaataggaagatgtttgcatgtacttcataagaaacatatccaaattccccatggaaagtgttccacccagtcagaaataaggaaatgaaaaacaaaatcaccatgaaatgaaatcgctactcattcactacataatgactaatatttttaaaaagtgtgtgtatatatatatataaaacctctgatgatgatatgatgtgaccaccatgttgtaagcatatatatatatacactaacccttgacaaggatataaatcaactggatctttcatattaagtatattgctggtagcaaggaatatacttgcaggtgagcccccaaatggagtgtagcctgtaatgtttcttaagaggtggaagaaaacagttttattg

SEQ ID NO: 121100 - DNA, 536 bp, Homo sapiens
tttccttgtgacctgggatttgtcattcttcactgccatgtcagcattatgtcttcaaatatatatttttaaaagatccatatatcagattttttgagcaggaggattcttccaaattgtctaatgtgccatttcaggcaaaagacttcatattaaaaataaataggaagatgtttgcatgtacttcataagaaacatatccaaattccccatggaaagtgttccacccagtcagaaataaggaaatgaaaaacaaaatcaccatgaaatgaaatsgctactcattcactacataatgactaatatttttaaaaagtgtgtgtatatatatatataaaacctctgatgatgatatgatgtgaccaccatgttgtaagcatatatatatatacactaacccttgacaaggatataaatcaactggatctttcatattaagtatattgctggtagcaaggaatatacttgcaggtgagcccccaaatggagtgtagcctgtaatgtttcttaagaggtggaagaaaacagttttattg

SEQ ID NO: 121101 - DNA, 540 bp, Homo sapiens
aaatgatcccaggaaacatttagtcctcaattctgacctcttctctttgtgattcttttccttgtgacctgggatttgtcattcttcactgccatgtcagcattatgtcttcaaatatatatttttaaaagatccatatatcagattttttgagcaggaggattcttccaaattgtctaatgtgccatttcaggcaaaagacttcatattaaaaataaataggaagatgtttgcatgtacttcataagaaacatatccaaattccccatggaaagtgttccacccagtcagaaataaggaaatgaaaaacaaaatcaccatgaaatgaaatcgctactcattcactacataatgrctaatatttttaaaaagtgtgtgtatatatatatataaaacctctgatgatgatatgatgtgaccaccatgttgtaagcatatatatatatacactaacccttgacaaggatataaatcaactggatctttcatattaagtatattgctggtagcaaggaatatacttgcaggtgagcccccaaa

SEQ ID NO: 121102 - DNA, 536 bp, Homo sapiens
tttccttgtgacctgggatttgtcattcttcactgccatgtcagcattatgtcttcaaatatatatttttaaaagatccatatatcagattttttgagcaggaggattcttccaaattgtctaatgtgccatttcaggcaaaagacttcatattaaaaataaataggaagatgtttgcatgtacttcataagaaacatatccaaattccccatggaaagtgttccacccagtcagaaataaggaaatgaaaaacaaaatcaccatgaaatgaaatcgctactcattcactacataatgactaatatttttaaaaagtgtgtgtatatatatatataaaacctctgatsatgatatgatgtgaccaccatgttgtaagcatatatatatatacactaacccttgacaaggatataaatcaactggatctttcatattaagtatattgctggtagcaaggaatatacttgcaggtgagcccccaaatggagtgtagcctgtaatgtttcttaagaggtggaagaaaacagttttattg

SEQ ID NO: 121103 - DNA, 631 bp, Homo sapiens
gtctcacttttccttcctcctctaacactttgtggcccacaaccacaatatcacagagaagattaaataaacaaaatgggaataaagtcacaggaattcagtgagtgccaaatatgtgcagtatcagccagaatgattgctggtagggataaaacagcacaataaactcccaagccacggagcgtgtttggtagtgctgccaaaaaccacagtgccgccttatgtgtgcacttacaaaatctaaatacagcctccccatggcacagcaagagcagaagtgagagggacagatatgctcccataagtgctgtcactggagactggagcacaccaagagcatcttagtttaattttgagtaaccactggtgaggatttggcagaatataagaaagaaattaaagaccctttaaaataaaatygatccatttctaacatataaattatttgattaagtacatacagagagttggagagcagggcccagatacatggtgatatcaccccagcttagaatggcatgagtgaagaaaacatgacacagaaatagcagctaagtaataataccttgaaaaaaaagtaagccaaggatttcttaaccattaagtattggaggtcattattacaacctca

SEQ ID NO: 121104 - DNA, 487 bp, Homo sapiens
agttttcaacaaaaacaaaaatcacaaggcatgcaaagaagagtatattattcaaagacccattcaaagaaaacaaaataaaccaatgaaaagtatctctgacagagatctaatggtagatggactagacaaagaatttaaaacaactggcttaaagatgcataaaaaagtcaaagaaratgtggataaagtcaagaaacaacggatgaacaaatgaaataccaaaagatattttgatatctttaaagagctaagcctaaaaagaaaatgaaaagcctttggagatgaaaagtacaataactaaaatgaaaaattcactaaagagattcaaaggcagatttgagctggaagaagaaaaaacaggcaaatttgaagataggacaatgggacttattgatctgaggaaaagagggaaaaaaatcaaagaaaactgaacacagtataagagacttgcagggcaccatgaagaagagcaatatataaattt

SEQ ID NO: 121105 - DNA, 520 bp, Homo sapiens
gtgggtaacctgattctgcacttaaggaagtcctattggcttgtaagggcattgttctgagctgaaataacacagatggctgtctcaaaagtgactaaggtaagtatccacgaagttgtggactgctgaacaaacctggttcactgctatgctaattaccagttagctgaactgtccatttctatttcaaattcctactaaatggaggaaaacagtgttgaaaaatgaaactttaactacacacagctttcttttacagtattcattgtttatacttgtgtacacatctcattttgatgttggaacacattgtgcaataatattgcagtgatgataaaatcataggattatacagattaaatccattgtagaaagatcaagatttctttgttcagtgctcactgtccttgctgtgagrggcagatgtacttagaaaaaagtaaggcaaaagttctgtaaagcaatactttctttatgatggttttatctaaatttgttggtttagttttaggcaggaatg

SEQ ID NO: 121106 - DNA, 561 bp, Homo sapiens
tagtgaaacagtgatctaggcctaaaaatattgtaaaattaacaaactaaatataaatgtcaaacatatttttattaaaaaaggacttatttttggtaattcaaagtcatattcttggtcagatatgctaattttataataagtgaaattgaagaagatgagaaaagtagtagaaaagaaaccaaagttctcatgtccggtagttggaacttaaaataataataaaataatttaaaactgagggtattattccaaatacctaaagaagatgtaacaatgtccaattgttatgtctaatagacataaactacatggtaaaacacataaaagktcataaatggtaacagaaacagacaattacctataacaatgcatcataaataatcccaaatatcaactaaaaagaaaataaatggtttgaaaggcagtcattaaaaattatgtttacaaagatatttggttacatgataagatgcttatgctcatattaagtaaaaatgacagaatttggggtctaaattccaaatgttctacttactaattatgtgaacttgcaaagta

SEQ ID NO: 121107 - DNA, 575 bp, Homo sapiens
aatgcacacaccgaggaaagaccacgtgaggacatggcgagaaggtgatcatctgccagccaaagaaagagagaggcctcaagaaaccaaacctgctaacatcttgatctgagaccagcagccttcagaaccgtgacaaaacgaatttctgttgtttaagccaccaagtctgtggtattctgttatggcagacctagcaaactaatacataaccgtgttaccattatgacaaccaataatcttaatatggatacaatagcattgcctaatatacagtctatgctcaaatttgtcttttattgtagtttttaattcaagttttaatsaagaatcactcatcgcagttgtttttcatctctttcacctattttaatctagaatagtttccctaccattccttgcagacattgacctttgaagaattccaggctagataaaatgcccaaggatatagaattgtctttttgtttcatcgtggttagatttgggttacatatttggtgatactacacaggcaatattggtagttttcatgcatgccagaggaagcatcaggtctgcttgttctctaattg

SEQ ID NO: 121108 - DNA, 490 bp, Homo sapiens
agaaatactagtgagtattatgctggtacccaggacatactgtactaggatgatgttcattccttctsatttgtggtccgtcttgtgctccctttcttcccatctccaagtcagcctatcggacctggagcagaaagcagcaagggaatacatggcggtcctaccaagactttctgtcaggagggaacatctctccatacaggttagaacccctaaaacagatgtatcccacctatgtaatggttactttcaatatcttagtgcaaaatttacaagcatttttacgcagatgggggcatattcacctacttcaggttaatccaacctccaaatattcacacagcacctactaggagacagcaatgtacaataagcaaaagctagacaggtgaaaacaacacacagttctgccagcaaggaggtcagacagtattaagagatcattcattcaaacaaacaattagtactcaagatgaacatggctctaaac

SEQ ID NO: 121109 - DNA, 490 bp, Homo sapiens
agaaatactagtgagtattatgctggtacccaggacatactgtactaggatgatgttcattccttctgatttgyggtccgtcttgtgctccctttcttcccatctccaagtcagcctatcggacctggagcagaaagcagcaagggaatacatggcggtcctaccaagactttctgtcaggagggaacatctctccatacaggttagaacccctaaaacagatgtatcccacctatgtaatggttactttcaatatcttagtgcaaaatttacaagcatttttacgcagatgggggcatattcacctacttcaggttaatccaacctccaaatattcacacagcacctactaggagacagcaatgtacaataagcaaaagctagacaggtgaaaacaacacacagttctgccagcaaggaggtcagacagtattaagagatcattcattcaaacaaacaattagtactcaagatgaacatggctctaaac

SEQ ID NO: 121110 - DNA, 336 bp, Homo sapiens
tatattctgaatagactaaaataacctaatgggtcaatttctcaaccaagaatatatattttctatagatatttattaagtttatttataaatacctactyctaaatctattatcattgtgaaacttttaaaaattacctcaggcagaacgagtgtttttcctttgatcgctcaaacataattgctaattgctatttagccttattctattttgtcttacatgctatttactatcttaccaagcaaagatgaattccttgtatgtgtaatagatttcttcaatactgtactaagtgtctgaggaaataaatttaatcaaagaaatttcatacatgt

SEQ ID NO: 121111 - DNA, 599 bp, Homo sapiens
acaatcagccaaattatttgcaactctaaaacaataattgcctttccttcagtttccaataatttgttccacatttccatctgaaaccttatcagaatagcctttactgttcatatttttaccagtattctgttcactacctcttaggtaatgtctagaatactgagggtttctctacaactttcttttggttctgagcccccaccagatttgccctttacagcctgttcacatcaatataggctttctctagcatgcactccaaaactcttccaacctttatcaattacccagttccaaagccacctccacatttttaggtatatatatgyatatatttatcaacaccctcacttctcagtaccagtttcttagtccatttgggctgctataacaaaatactttagactgggtaatttacaaacaagagatatgtagttctctcagttctggaggcttgaaagtccaagatcatggtgccagcagatttggtgtctggtgagggctgctttatagatcttgctttcttgcttcatcctcacatggtcaaaggggaagcaataaacaagctctttcagacctcttttataaggacatta

SEQ ID NO: 121112 - DNA, 557 bp, Homo sapiens
gcctattatattaggcagtatttgtatgcattacagataaacgaggtgactagtacaacactcaaatctcttgtctaagcagaatgtttactttttatatatattaactttcaccttttcattttacatggcatcatgttcacatttaacatatgctaatctttgctgttgtccacaagatttactatttatgagaatgttcaaacattcaaattatgcctcaaatactattactgaaataaatattaatcaaaactacaccaattacaaggggggggaagctactggacactcatatttgtctgctaatcctagacattggaaaagtaatagaccaaaaccctacatagatacggtaytgaaattaaatcacatctaatggagattatccttatctgaaaggttacaatgctcccctagaattttttcattcaatatgtgtaatggttgattttacatcaacttgatgatgccaccggatacccagatatttggtcaaacggtattctggtgtttatgtgagggtagttttggatgagattaacatttaagtaagt

SEQ ID NO: 121113 - DNA, 495 bp, Homo sapiens
gggaattccctcttggctctgtgaaggagaaaaactatgaagagatctttggaatgaggggtctcaagggcactggaaggctctggcatgtgaagagcttgagttggaatgcatctgagagcccgaggggctggcccagacacaggaggaagcctccgagctggcttggattttttttccattaaaaagttctctggttcctgaggtgcgatggtgatggtgggagaggctggttagcgacagggggggctctctgaactttctgcttagttttgctgtgaacctaaaactgctctaaaaataatttattgattttttaaaaaagttatcaggaaagaacacctacagttggttagatatgattaataactagtaccaacatggcattgttaacaaagaatacattattattattataaggtactcakgagtaaagaacaatgaataatatacatctaattttttaatactcaatgcacaatcaacatttctgat

SEQ ID NO: 121114 - DNA, 595 bp, Homo sapiens
ccctggtgcctgctgtgggctccactgtccctgacacccaccctctcctggccagtgagtctgtgggccaaggcactcagcttgagcactgaacccagaattcctactcaccaccagagccagccccacggcctgcagcacccccgtggcccatcctctagggggctggccatgtgtggcygtgtccagccgaggtccaaagggcacatgagctgtgtgaccacacccctgcaggtcagacctttcaggggcctcctgagcccatgcatcagggaaaggagccagttctcccctgtgttgctgtgctactcttctaaatctaaaccaggacttcaggtcattgggcaggtttctttgcgaaggtgagaagagggtgtgttttatttaaatgcttgctgggttgacttacagcttgatttttatctcagacatttgtatgcagcctgtgttttcaccgtgccccctgcactgcgtgctcaggccaggcctgacctgggagaaggctggggcttccataggccatagaattagcaaagtttgtcacatgaaaaacaaatccagacttggtgagaacaaactcaagggttaggcaagt

SEQ ID NO: 121115 - DNA, 610 bp, Homo sapiens
gatttttacaaaaataaattctgacacttaaaaatcataaaatgctagtggtcatactggtagatcagtcttacaagaaataacgtcaaaatgcagtgatgctatttcctyctgcattgcagccagtccacccccagcgaaccttcactcctctaccagttccctcctctgttcctaaatgacaagatttcagccccatttcctgaatactttcttgttttaatgcatagtaaggttatgtgactgattttggcattcatctaataataatggctattaggtatgcattcaatgcacacttagtgaagccaactcttgggctctgggctgagcactagggatttagcagtgaatgagacagaggattgagatggagctctggggccgggctactttcattcatccccagccctgtctcttactagttcctctagccattatttaatatttctgttgcagtttctccatctatcaaacaagaataataatggtaacaattaattgatagtctaattttcaattaaaaatctaatggagttgtcaggattaaatgactttatacatgcaaatcacttagaacaacactttgcagccactaaatattaaataa

SEQ ID NO: 121116 - DNA, 560 bp, Homo sapiens
tggttgtccttatctttaagtctatgaaagcctttgatatgataacattttgacagttttacctcctttgcctatctccattttatctgttcttcatttggtacattctagctccatttcttagtggctcagcttcttatagctttatatggctcaactttaaaataaggattacaaaatcaatttcagaggattattgcatggactatatatagtcacatataaattacccagtaaaataactggcaaataatagtcacttaggccggccgcagtggctcacgcctgtaatcccagcactttgggaggccaaggctggtggatcactgaagtcaggagttggagaccagcctggccaacatggtgaaaccccatctccactaaaaatacaaaaattaaccaggcwtggtggcacacacctgtaatcccagctacttggcaggctgaggtatgaaaatctgttgaacctaagaggtagaggttgcagtgagccatcatagtgcctctgcactccagcctagatgacagagtgagacctcatctcaaataataataataat

SEQ ID NO: 121117 - DNA, 530 bp, Homo sapiens
aaatgccaatgatgatattaccttattacagacacaatttctatttgttctctattaatactttgggctgttgcaatctgaaaacgatttaatgccattctatagaacaagatgattctaaactgggctacagtgcctgctggaaataatcttttgtcattgatgttgttgcagtagagggtttcaccctaaaccaaaagggttgcaccactaaatcctctctaatatgggacctaaactctcagatttgtcttacckacactaatctgtttctttcttattctctgggttgtattcagcttagtaaggtattgtcttcatctctatactccctcttctagactctgttttgtgatattgaaattagatatctgcaaaacacatttctgccctgctacctgcctcaataactggctcttcccaaaagatgctctagagaaagactacaagcctggaggaagaagagggactttcttgttcctgtttttgcggcatcctgtgagctccttatctgcttgtaacattgagtc

SEQ ID NO: 121118 - DNA, 530 bp, Homo sapiens
aaatgccaatgatgatattaccttattacagacacaatttctatttgttctctattaatactttgggctgttgcaatctgaaaacgatttaatgccattctatagaacaagatgattctaaactgggctacagtgcctgctggaaataatcttttgtcattgatgttgttgcagtagagggtttcaccctaaaccaaaagggttgcaccactaaatcctctctaatatgggacctaaactctcagatttgtcttacctacactaatctgtttctttcttattctctgggttgtattcagctyagtaaggtattgtcttcatctctatactccctcttctagactctgttttgtgatattgaaattagatatctgcaaaacacatttctgccctgctacctgcctcaataactggctcttcccaaaagatgctctagagaaagactacaagcctggaggaagaagagggactttcttgttcctgtttttgcggcatcctgtgagctccttatctgcttgtaacattgagtc

SEQ ID NO: 121119 - DNA, 530 bp, Homo sapiens
aaatgccaatgatgatattaccttattacagacacaatttctatttgttctctattaatactttgggctgttgcaatctgaaaacgatttaatgccattctatagaacaagatgattctaaactgggctacagtgcctgctggaaataatcttttgtcattgatgttgttgcagtagagggtttcaccctaaaccaaaagggttgcaccactaaatcctctctaatatgggacctaaactctcagatttgtcttacctacactaatctgtttctttcttattctctgggttgtattcagcttagtaaggtattgtcttcatctctatactccctcttctagactctgttttgtgatattgaaattagatatctgcaaaacacatttctgccctgctacctgcctcaataactggctcttcccaaaagatgctctagagaaagactacaagcctggaggaagaagagggactttcttgttcctktttttgcggcatcctgtgagctccttatctgcttgtaacattgagtc

SEQ ID NO: 121120 - DNA, 551 bp, Homo sapiens
gctgataggccatacatatgtcactgtgactattacctttaatgctataactcaacagcagcttagacaatacataaatgaatggggtgtctgtgttccaataaaaatttaattaaaaaatggagacaatccactggccatgattaaaccctaatttaatcaataaaaattcaaatgacatagattcttattaaggcattgtcattggtatccaatttatcttttcaacattaccatttkactgcagtatgaaccaatacacaatcactgatatgaatgccatttcaaagacctggtgaaatctatctcaaatgcaggattagaaaatgtttactattacatagaattgacaggtatctacttttttttttcacaattgtacagacataccatgatagaaggatagcaacagtcaacataaaaatctcctgtcattcacatattgtggtgctattaatatccccaaagaaagacgtaaacacaatattcctggtgtgaaatatatttgtccttgatacattgaattcataatcaagaaaaaataattagca

SEQ ID NO: 121121 - DNA, 551 bp, Homo sapiens
gctgataggccatacatatgtcactgtgactattacctttaatgctataactcaacagcagcttagacaatacataaatgaatggggtgtctgtgttccaataaaaatttaattaaaaaatggagacaatccactggccatgattaaaccctaatttaatcaataaaaattcaaatgacatagattcttattaaggcattgtcattggtatccaatttatcttttcaacattaccatttgactgcagtatgaaccaatacacaatcactgatatgaatgccatttcaaagrcctggtgaaatctatctcaaatgcaggattagaaaatgtttactattacatagaattgacaggtatctacttttttttttcacaattgtacagacataccatgatagaaggatagcaacagtcaacataaaaatctcctgtcattcacatattgtggtgctattaatatccccaaagaaagacgtaaacacaatattcctggtgtgaaatatatttgtccttgatacattgaattcataatcaagaaaaaataattagca

SEQ ID NO: 121122 - DNA, 590 bp, Homo sapiens
tggttgtttctctctggagaagcattactaatataggaagattccttaaactttaaacatatgacttcaagaattggaaattaagtttagagtatgtttagtaaaatatccttaaaattttattgctcttcttgtaaagaaaatttggggaatcaattctgcttttatttccttctatttttttcattgtacatgctgcttttcatgtacaaaagttacagatgtctgtattcatttttcctcttccactctctctgcctaatttatttatttttttaacttgcatgggtaagccaattcatatttctaaactctctttctttatccstacaaggtcaaaaactctattttgataaagcttaccactttgactgtttttctttctctatccattcttctttgtgtcaaactattacagtacacatacttttgtttaattgaccctaaaatgctatctttcccttgatgtattcaagtatcaggcaacttaaaagttacttagatatatatttatgacagatgtttgatagctcactgtctcctcattggcctttccatactctcagacacaagactctgtgaaagtactg

SEQ ID NO: 121123 - DNA, 590 bp, Homo sapiens
tggttgtttctctctggagaagcattactaatataggaagattccttaaactttaaacatatgacttcaagaattggaaattaagtttagagtatgtttagtaaaatatccttaaaattttattgctcttcttgtaaagaaaatttggggaatcaattctgcttttatttccttctatttttttcattgtacatgctgcttttcatgtacaaaagttacagatgtctgtattcatttttcctcttccactctctctgcctaatttatttatttttttaacttgcatgggtaagccaattcatatttctaaactctctttctttatccgtacaaggtcaaaaactctattttgataaagcttaccactttgactgtttttctttctctatccattcttctttgtgtcaaactattacagtacayatacttttgtttaattgaccctaaaatgctatctttcccttgatgtattcaagtatcaggcaacttaaaagttacttagatatatatttatgacagatgtttgatagctcactgtctcctcattggcctttccatactctcagacacaagactctgtgaaagtactg

SEQ ID NO: 121124 - DNA, 567 bp, Homo sapiens
ataataagaaaagaaacactgcataataaaatgaatgaaagatttaaacagatctttcaccagggaagatgcatagatatcacataagctcaagaaaagatgctcaacctcactagtcattaggaaaatgcaaagtaaaaccaccttggacatttcttcatacctattagcatgtctaaaataaaaacagtgataaaacgaagtgttggtgagaatgctgagtaattcagccctcaaaaattgctgataggatgcaaagtagtacttgacatgggacaacagacattgtttgatygtgttttacagagtgaaacataaaactaccatatgacccaggtatttcactcctacatgtttaccgagataaatgaaagcatgcatccataggtacaaagacttttataagaatatttatagcagtttatttataatagtaaaaaaattggctaataatctgaatttccatcaataggtaaatatggaatacaacgcagcaataaaaatgaatcaactatttgtacacaaagcaaaactcacgaaaagagccagacaaaagggtatgtatgg

SEQ ID NO: 121125 - DNA, 567 bp, Homo sapiens
ataataagaaaagaaacactgcataataaaatgaatgaaagatttaaacagatctttcaccagggaagatgcatagatatcacataagctcaagaaaagatgctcaacctcactagtcattaggaaaatgcaaagtaaaaccaccttggacatttcttcatacctattagcatgtctaaaataaaaacagtgataaaacgaagtgttggtgagaatgctgagtaattcagccctcaaaaattgctgataggatgcaaagtagtacttgacatgggacaacagacattgtttgattgtgttttacagagtgaaacataaaactaccatatgacccaggtatttcactcctacatgtttaccgagataaatgaaagcatgcatccayaggtacaaagacttttataagaatatttatagcagtttatttataatagtaaaaaaattggctaataatctgaatttccatcaataggtaaatatggaatacaacgcagcaataaaaatgaatcaactatttgtacacaaagcaaaactcacgaaaagagccagacaaaagggtatgtatgg

SEQ ID NO: 121126 - DNA, 551 bp, Homo sapiens
gatccattgtattgtcttcagaaactaggtataaagctaaatttaaaattacattctatatcattagtctgtttcttagaaactcatgcatctggtggttatcagctgcatgtaggggtgagaaaaaataaagctttaatcttcctgtttagatgaattaatacactttgaagccattagaaattataactctagcagccttcagaattacctcccaaaaaaagagccatgtacacatgtaggaccttgtttggattcagttttgaacctcctcaagacctccttcagcaaatcwctctgattgctacttaaattgcagaaacagttcactgtggtttgtcaggtccttctagggaattagaaagcttagaagacattagaactctttgtccaggcattctggcatagaactgattactgtggaggtgaatttcaaaatgttgaagacatttattactgcttttaaaatacctttggtgcaacgggatggataggcccataatatcagaataatatataaacagctacttatgtttttctgcactggaaat

SEQ ID NO: 121127 - DNA, 627 bp, Homo sapiens
aagctcatctgtctcaattctgctaaatcagtttttactccttcagtcactttccaatttcccaattttgttgtcatctttaatactttcatctccttccttactcttctatcactgaggattcaggaaggactagagggccaggatgtggtggctcacgcctataatcccaacactttgagaggccaagcattgcttgagcccaggagattgaggcagcctgcagtgagctaggattgtaccactgcactctagcctaggttatagagtgactccttgtcttaaaattaaaaaaaaaaaaaaagatgaaggaatagagataaagatacatgctcaatgctgttttaacagggtagtgctttctgtgaaagggttacctatggccagttccagcaacagaaacacytgctatccttaataaatatacaaacctcagctggctgctggctgaaaaagaggctccaaactgcaaggcaactgccattgaatgttcagttggttaagttatacatccttaggtggatttcaaattcaggcatccaggtatattttattcttctccaggttccttcttggggataatagtcaatttaataaattagtgtttttatagtgcaaaacaaccta

SEQ ID NO: 121128 - DNA, 573 bp, Homo sapiens
aacaatttcaaaacctgtgtgatatcagcatttgtgagggaaagtaatggggccacctgatagccaaagaacaggaaacctacaaagttttccaaagtactcactggaaagtgaagtgggctgtctcaggagagcatgtgagactcgggtgggagggtacagatctagtggattctaatttgccagtgagtgcaagaggactgagcattgaaatgttttaggctctatgaattctgagaagtcagaaactaaagttcccttctaagacaaaatcctgctttggagaaaaaaaaaaattatcggagtaaagtctaagctgagttgaaaaaaaaaggtgaaaaggaaagaggtcaaaataaaaatgaagaggaagatgggacgggatacagagtaggcagatctcagaaaatctgactatatttgtatcactctgtgaacamaccagatgggcatcctgggagccatgaagctagaagaaatcctggctcactcatttcacttgaaaatgaccaacagaaaagaaaaagcagttgaatcccatacaatgtttcatgaaaaaagagattaagatca

SEQ ID NO: 121129 - DNA, 629 bp, Homo sapiens
ggaaggtatattattgtttagctggcactggcagatagtagagtcagtgggttttaagactcatgaaatgttgtgtggcttccaggcattttgctgtaagtgttcaccttggtgttgaaaacgctgtyagaaatttcctatgatccttgcattatcctgggaccctgaacactagaggcaacacaggggttaaaggcatgtgttgttccttcttctgggaatgttctgcattcagacacacacatggttcacagattcctttcattcatgcttctgctcaaatatcactttctgatcactctttataaaagtgcactctttcatttcacttgatcccccacaccctttcctattcttcattgtacatattcactttttattttttcatatgtggtttatttactcattgatcttctattggaatatcagctccaaaaagcatgaactttgttttgttcactgtggtattcttggaagagtgcctacaacattaagggtacacagtaaatgctggttgaatgaatgaatgttgaatacatgcacatataatgaagtatagttatgtgttacttaacaatggagatacatgctgaaaaatgcttcattaggcaattttgtcattgtgcgaa

SEQ ID NO: 121130 - DNA, 529 bp, Homo sapiens
gaaaactacatttgtcagaaaacttgctagcagaggacttgctagcagattataccaaagcactagtttgcaaagttaaaaggaggggaaaatagtggaaggtatattattgtttagctggcactggcagatagtagagtcagtgggttttaagactcatgaaatgttgtgtggcttccaggcattttgctgtaagtgttcaccttggtgttgaaaacgctgtcagaartttcctatgatccttgcattatcctgggaccctgaacactagaggcaacacaggggttaaaggcatgtgttgttccttcttctgggaatgttctgcattcagacacacacatggttcacagattcctttcattcatgcttctgctcaaatatcactttctgatcactctttataaaagtgcactctttcatttcacttgatcccccacaccctttcctattcttcattgtacatattcactttttattttttcatatgtggtttatttactcattgatcttctattggaatatcagctcc

SEQ ID NO: 121131 - DNA, 543 bp, Homo sapiens
tgtcccagtgtccagcattgtgtaaagcatatggcaggtatttcattgaagtttcttgaactaaagaattaacttgtgagaaaagagcctgagaaggagaagaataaagagttaagtgctggaaaaagcataactaatggactaagtttcaggggcaggcagaaggagaggtgaccagaggccaggtggagagattagcctcagaaaggaggaaggttaataataagtgggatccaatctctgcccccaaatgaccatcatcacatttgttttagagctatgcacacagccaggcactaaatatttcccagtgactatgactacagcaagscttgctaaaaacatttgtaacagaaaaaatatcacagtgaactttccttctcaggggctggggccagtgaattcatgttaatattacagactaaactgaaaatgactttttaaagagataatcgtgatatgtctttaatattaatcttcactacatcatacagtattgtgagagtggaatagcttcaacagagaagcgacagaagtttcata

SEQ ID NO: 121132 - DNA, 545 bp, Homo sapiens
cactaaatgttataaaattaataaatgaatgaatgtcttatatcaacacaaccatatgagtaaaactctggccttaaaggtattctgactagaggagagataaacataaaattaaaatacaaagcaatcaaaaagctctcacttttctttaaagggaaaggaaaacaatcataaggaagcaaagtagacttatttaagtgttatttcttgcttgctagtaatttaaaattgacaaagggagctccagtggcacatgtttaatgattattattttcaaataaaataataatagaaaacataaaataagtgatcaataagttggtgttgtggagtcttccctggtaaaatctcaaaacaccaagactaaaagtaaartaacaaaagttttaaggaaggaaaaaaacctgaaagcttgtgagatatccaaaaatctcagacttcattccagatctcctgaatcaaatctgtatgttagcaagattcccaggtgacttagaatgtgcacatcctttcatttttttcctcacttcaccatccatttctct

SEQ ID NO: 121133 - DNA, 565 bp, Homo sapiens
ctttacagtgcattgccaacatataaagactctttaaaaacatagtctcgacataaaattacacttaggaaaatccattacccagtccatgttttctcaaaaatatttctcaaaactcagttatattttctcaaaaaaatttgtttgatagtcagcttactcaaataagaatcccagcaaggtctacacactgcatttggctgatgtgtctctaaagtatctttcaatctgcaacatttcttctcacctttatttatttatttatttaatttatttattttgagacagagtctcgcgaagtgcagtggcgcgatctccactcactgcaagctctgcctctcgagttcacgccattctcctgcctcagcctccrgagtagctgggactataggcgtccgccaccacgccaagctaattttttgtatttttagtagagacggggtcttctcacctttattaatttcatgtcattcatttgtcaaagaaaccaagtcatttgtcctatacaatttcacacaatctggatttagcagattgatgtttcttgatgtctttaacttgttcc

SEQ ID NO: 121134 - DNA, 570 bp, Homo sapiens
gcaaggccttagtaatatgaaaaaaatcatatcttctgtgagtgcaaattgaaacaagccttttaaaaagcaatttgagccacatgtattaaaaagcttgataatgacagtcatagtttcttctccactcatatcccaagcaaataatctgaaataaggacaaagatttgagagtaaaattgttcagctcagacatgttatttttgaggaaatttttttttaatttaacttggagattagttgaatgtaatgcattcatggttggggatattttatagctgttataaatggtgcgtacaaaagtttaatgacatgagaaaaatattgataccataatgcttaagaggaaaaaactcaggatgataaaactgaaatcgctgctattttagattggaagcaagtgtgataatagcattgggaaatggagaagatacttataattaccttgggtagtaagtaggactttgggcagttttgcaagtgrgtactttgtcatgcttttccagctttcactaatgtcaggtgatactttcatcattagaagaaaaatagttactaaaaaggaaataa

SEQ ID NO: 121135 - DNA, 545 bp, Homo sapiens
agcaaggcaacatagcgagaccccatctctataaaaaacttaaaaattagccaagcatggtggtgtgtggctgtggtccagctacttgggaggcagaggtgggaggattgcttgaatccaggaggtcgcggctacagtgagctctgattatggcactgcactccagcatgggtgacagaaacagactctttcaaaaaaagaaaaaaagaaagagagaaagagagaaaggaaggaagaaaggaaggaaagaaaggaaagaaagaaagaaaagawtaaaaaaagaggagcagaagtgactttcacttatttggctgtggaatttaatatccctgggcaagggagaaaggctcagctggtgacatggctaccactctattgttcaatctgagttccttattccaagcctaacatgagcacaaaacctgcctgaatgactttttgtgcctggagaaaagtcagctaaacttcccggaagacacaaaagtctcaactcacaatctccactggaaaacaatttatgtctgtcattgtgatttcctggaaag

SEQ ID NO: 121136 - DNA, 612 bp, Homo sapiens
tgagtattgaactggagctaaaaaattcatcattttttgcacagccaattatttcaatctttgttgcaatttttgaagtttatgaaacctacacttattactttttctatttatccattttttccaaatgaataaggacgaatgcaataaaatattcagataatgaagtacaaaaccrtgaacaatgacaaacagactggttggctgtcaggcagtgccaacatagctcaaaattcttgtttttcagataatacgtgaggtataagtttagagtgccactagaaagagcttatggatatcaatgcataataatgcaaaataagaaaatactttatgaaaaataaaactgtaaaatttagggtccatctataatttttaaaaccacccttccaatgaagcatatagtctgtctccttaaaggtgacaagatcagttcacagaacaacctagaaaataaagagattacaaacatattcttctaaatatagaaactgtggttattttgaattattaaagctaaaaatacatccatgtatatatatggcctttctgaagtaactgcaaaaaatggggaatatgctctgctcatctggagttaatcttaaacatgaa

SEQ ID NO: 121137 - DNA, 612 bp, Homo sapiens
tgagtattgaactggagctaaaaaattcatcattttttgcacagccaattatttcaatctttgttgcaatttttgaagtttatgaaacctacacttattactttttctatttatccattttttccaaatgaataaggacgaatgcaataaaatattcagataatgaagtacaaaaccatgaacaatgacaaacagactggttggctgtcaggcagtgccaacatagctcaaaattcttgtttttcagataatacgtgaggtataagtttagagtgccactagaaagagcttatggatatcaatgcataataatgcaaaataagaaaatactttatgaaaaataaaactgtaaaatttagggtccatctataatttttaaaaccacccttccaatgaagcatatagtctgtctccttaaaggtgacaagatcagttcacagaacaacctagaaaataaagagattacaaacatattcttctaaatatagaaactgtggttattttgaattattaaagctaaaaatacatccatgtatatatatggcctttcygaagtaactgcaaaaaatggggaatatgctctgctcatctggagttaatcttaaacatgaa

SEQ ID NO: 121138 - DNA, 571 bp, Homo sapiens
aatcacaaaataaaaaaaattttacttgagctgacttaraaatttgctaaattagctataatttatgtatagttttaaaataaatatgtttgcgtaagacccacataatatgtgcttggcagcaatgctaagatatctgtaaaggacccatttttccatttgtttgtttgtttgtttgtttgtttgatacatggtctcactctgctatccaggctggagtacaatggcatgaacatggctcactgcagcctcctgggtacaagcaatcctcctgcctcagcctcccgagtaggtgggactaactacaggtgtgtgccaccataccaggctaatttatttcaatttttttttttttttttgtagagacaactcactatgttgcccaggctggtcttgaactcctgggctcaagtgatcctttcacctgagcctcccaaagttctgggattacaggtgtaagccaccatgcctggcaccattttctgttttttaaatttcttatctgccagaactaatatggtccacatgcacgtgcctagtgagcagtatgtatcccatgggctcacacata

SEQ ID NO: 121139 - DNA, 571 bp, Homo sapiens
aatcacaaaataaaaaaaattttacttgagctgacttagaaatttgctaaattagctataatttatgtatagttttaaaataaatatgtttgcgtaagacccacataatatgtgcttggcagcaatgctaagatatctgtaaaggacccatttttccatttgtttgtttgtttgtttgtttgtttgatacatggtctcactctgctatccaggctggagtacaatggcatgaacatggctcactgcagcctcctgggtacaagcaatcctcctgcctcagcctcccgagtaggtgggactaactacaggtgtgtgccaccataccaggctaatttatttcaatttttttttttttttttgtagagacaactcactatgttgcccaggctggtcttgaactcctggkctcaagtgatcctttcacctgagcctcccaaagttctgggattacaggtgtaagccaccatgcctggcaccattttctgttttttaaatttcttatctgccagaactaatatggtccacatgcacgtgcctagtgagcagtatgtatcccatgggctcacacata

SEQ ID NO: 121140 - DNA, 549 bp, Homo sapiens
cactctgcagctttctgtcagtgaaaacccagaccaacaattaagaaaatgtcccacaaagggaattaatgagaagagtttcctcctttcttggctccagaaaacctggcccaagagagctgtgtcaataagtctcatacatttcggtttcttttggtgggggtggcaggaaggatgttggtatatttgttttctattgctgctataacaaattatcataaacttggtgcttaaaatggcatgactttattatagttttgaaggtgaggagtctaaaatctgtttcaccaggccaaaagtcaaggtggtcagcaggcctgggttccttgtggagactctgtgagcaaatctattttcttgccttttccagcctattctagaggctgcctgcatttcttggctcggggctgcctttctccatcttcaaagccagcaacagaagggcccsaccttctcaatgctgctgccatgtctgattctcttcagctggctaactctttcctttaaaggactcatatgattagattgggcctacctgggtaatcccag

SEQ ID NO: 121141 - DNA, 608 bp, Homo sapiens
gttaatacccctcttgaaacaattcctctttttgttactgtaactctccatcctccatttcccaactgcctttctggccaattttccctaatctcgtcccaagctcttctagtcaacctccaaactttgaagtgcatgagctctatcccaggctctccttaactctttatctacaatctctccatggattacttcatctcatttcatttatttaaaacccaattacatgttgatgtctcgcaaaccatatcttcagccttgatttctccactgagtcacacactcatatataaaactatataattggcatatcctcatcaaagaaaaacagttcttttacactttaacatatcgggaactgaaatccttgttttccacccatgcccaaaccagctactcccatttcagtaaatggcatcatcttaattttttaaaccaaaaccttcctacagttttggggaggtcatccatgattatttgtattcctcgtttcctaaaaacaaccctttaacaagtcctgttkgtgctagtgccaaaatatatttttttctatatgtgtttttctctatttgcaatgtcactagcctaggtttaatcactactccctt

SEQ ID NO: 121142 - DNA, 597 bp, Homo sapiens
gctttaaaaaaaaaaattttattccctaagtataactaaccatgcaaagaaaatttaattctagcaggaaaaaaaggctcaaatagaatatcaccccatgccacgcattaaaaaaaaaattactgtattgtttaatataacaggaactctcctttctctaatgtcattttccccttatcccaaatatctgctaaatgacccataaaatatgctgtgaacttatctcacactaatatgaaactgcaaaaaaaaaaaagaaaacaaaaggaaaagtccctaagtgaatggtaactccacaatctctactgtataatttctctaattgaaaagcaattgatttttctgaagaaaggtcataaaccctggctgtctgaagtcaggctctctgatctcagctactgtttcaagtcttttccttctgcaatacccaactttacttaagtagacaaaaccacctcccaactacatgggtgatgaaaaacaaccatactgaaccccatcagcttscctcctgctgtcctccaaatttttacctgctgctaaagaaaagatactctactttcagaatgtcaaggaaaacctttcctcctaagtttt

SEQ ID NO: 121143 - DNA, 597 bp, Homo sapiens
gctttaaaaaaaaaaattttattccctaagtataactaaccatgcaaagaaaatttaattctagcaggaaaaaaaggctcaaatagaatatcaccccatgccacgcattaaaaaaaaaattactgtattgtttaatataacaggaactctcctttctctaatgtcattttccccttatcccaaatatctgctaaatgacccataaaatatgctgtgaacttatctcacactaatatgaaactgcaaaaaaaaaaaagaaaacaaaaggaaaagtccctaagtgaatggtaactccacaatctctactgtataatttctctaattgaaaagcaattgatttttctgaagaaaggtcataaaccctggctgtctgaagtcaggctctctgatctcagctactgtttcaagtcttttccttctgcaatacccaactttacttaagtagacaaaaccacctcccaactacatgggtgatgaaaaacaaccatactgaaccccatcagcttccctcctgctgtcctccaaatttttacctgctgctaaagaaaagatactctactttcagawtgtcaaggaaaacctttcctcctaagtttt

SEQ ID NO: 121144 - DNA, 499 bp, Homo sapiens
ttttcttctcccaggagctcactgtgaaaagattcttctaccgattcataatttttagttaattgcctcattaagccattgcaatagctaaatatgtctcctttactattaaaggctatagatctgcctgctgtaatttttaatggagataactggtgtttaccaaaagggatcgacctcagattaagcagaaacagtggaagagcttttagccaaggaatttgaaagacctccattaattttgccagttgagctttgattattctgtttgtgtggtccactaacccagatgactgggggtggtcaacacaatggaaatactggagaatgggccaaatttaacgtactggttggatgacttatccagtgatcccagtgyctctgtcattatgaagctccagaggaactccccaggctgcaataatgttttctaagagaattgtactcaccctaaggtcattgctcttctacatagaaacacctgcacccaatgagaaaa

SEQ ID NO: 121145 - DNA, 589 bp, Homo sapiens
gacatggtgaaacctcgtctctactaaaaatacaaaaatgtgcttggcattgtggtgctcacctgtaatcccagctacttgggaggctgagtcagtagaatttcttgactcaaggaggcagaggttgcctggccaaaatggtgaaaccccatctctactaaaaatacaacaattagacgcacgtggtggcaggcacctgtaatcccagctactaggtggctgaagcaagagaatcacttgtgcctgggaggcagaggttgcagtgagccgagatcacgccactgcactccagcctgggtgacagagcaagactctgtcttamcaaaaaaaaaaaaaaaaagagagagagcgtgagctgggaatgaatactgttcctcagagtccatctaccggcctttcctccagattttttttgtttccagttttccagtctcacattttccagaccccttatcatcagtccaaattatgtgctattatgagaaaaaactcttcctatatctaaatttatggagttcagttcctggtaatatatctcttcatcaatgccttttaggactaccctaagaggagctgtagcaaggtacta

SEQ ID NO: 121146 - DNA, 631 bp, Homo sapiens
tgctttttgtttgcttgtttttaatcatccttgrgtctatgtctctacaggttcactaccatcttgggctgaggaaattctggaaaatactttggagaaagactttgattgtgtcagtttactccatttaatattttactttttgaattgtgaaattaatttccaactattaatagtatgtaaaggttcatccataaatagtcactgtttctggttcagctccggctactaaagtgcagccaattttatatctaaaggcctgtttaggcagaagtttgtggacagtgacatatggggtgggccacagctaacagatgcgttactttgacgaagcttgagtttatatggctaaagacagccattatatgttatgaacaaagaaaagggatagctggtattgagatattcttgaaccagtgtctaatcattattcactcttcattttgctttataccttataaggactaaagttgacttactggtctattgattctcattggaacatagtctttacggcaaacccaatggacagaggtttatgagaggaactgattgccagttgagcagtgtgtcaaatgttcgttaccttaatctagaactatgctatcaacacaagcagtccttgctttgc

SEQ ID NO: 121147 - DNA, 631 bp, Homo sapiens
tgctttttgtttgcttgtttttaatcatccttgagtctatgtctctacaggttcactaccatcttgggctgaggaaattctggaaaatactttggagaaagactttgattgtgtcagtttactccatttaatattttactttttgaattgtgaaattaatttcsaactattaatagtatgtaaaggttcatccataaatagtcactgtttctggttcagctccggctactaaagtgcagccaattttatatctaaaggcctgtttaggcagaagtttgtggacagtgacatatggggtgggccacagctaacagatgcgttactttgacgaagcttgagtttatatggctaaagacagccattatatgttatgaacaaagaaaagggatagctggtattgagatattcttgaaccagtgtctaatcattattcactcttcattttgctttataccttataaggactaaagttgacttactggtctattgattctcattggaacatagtctttacggcaaacccaatggacagaggtttatgagaggaactgattgccagttgagcagtgtgtcaaatgttcgttaccttaatctagaactatgctatcaacacaagcagtccttgctttgc

SEQ ID NO: 121148 - DNA, 631 bp, Homo sapiens
tgctttttgtttgcttgtttttaatcatccttgagtctatgtctctacaggttcactaccatcttgggctgaggaaattctggaaaatactttggagaaagactttgattgtgtcagtttactccatttaatattttactttttgaattgtgaaattaatttccaactattaatagtatgtaaaggttcatccataaatagtcactgtttctggttcagctccggctactaaagtgcagccaattttatatctaaaggcctgtttaggcagaagtttgtggrcagtgacatatggggtgggccacagctaacagatgcgttactttgacgaagcttgagtttatatggctaaagacagccattatatgttatgaacaaagaaaagggatagctggtattgagatattcttgaaccagtgtctaatcattattcactcttcattttgctttataccttataaggactaaagttgacttactggtctattgattctcattggaacatagtctttacggcaaacccaatggacagaggtttatgagaggaactgattgccagttgagcagtgtgtcaaatgttcgttaccttaatctagaactatgctatcaacacaagcagtccttgctttgc

SEQ ID NO: 121149 - DNA, 706 bp, Homo sapiens
ctacaaatagggatagtttgacttcctctcttcttatttggatacgtttatttctttctcttgcctgattrctccagccaggacttccaatagtatgttgaatagaagtggtgagagagagcatccttgatttgtgccagttttcaaggggaatgcttccagctttttcccattcagtatgatgttggctgtgggtttgtcataaatggctcttattatttttgaggtatgttccttcaatacctagtttattgggagtttttaacatgaatggatgttggattttgtattagccagggttccctagagggacagaactaatagaatatatatatatatcatatatatatgtatatatatgtgtgtatatatatatgtatatatataatgtatatatatgtatatataatgtatatatatatacacacacacacaaatatatatgtatatgagagtttattaagtattaacttacatgatcataaggtcccacaataggctgtctgtgagcttgaggagcaagaagagccagtccgactctcaaaactgaggaacttggagtccgatgcttgacggcaggaagcatccaacatgggagaaagatgtaggctgggagactaggccagtcttgcttttcacatttttctgcctgctttatattcacaggcagctgattggattacacccaccagattaagcgtgaatc

SEQ ID NO: 121150 - DNA, 706 bp, Homo sapiens
ctacaaatagggatagtttgacttcctctcttcttatttggatacgtttatttctttctcttgcctgattactccagccaggacttccaatagtaygttgaatagaagtggtgagagagagcatccttgatttgtgccagttttcaaggggaatgcttccagctttttcccattcagtatgatgttggctgtgggtttgtcataaatggctcttattatttttgaggtatgttccttcaatacctagtttattgggagtttttaacatgaatggatgttggattttgtattagccagggttccctagagggacagaactaatagaatatatatatatatcatatatatatgtatatatatgtgtgtatatatatatgtatatatataatgtatatatatgtatatataatgtatatatatatacacacacacacaaatatatatgtatatgagagtttattaagtattaacttacatgatcataaggtcccacaataggctgtctgtgagcttgaggagcaagaagagccagtccgactctcaaaactgaggaacttggagtccgatgcttgacggcaggaagcatccaacatgggagaaagatgtaggctgggagactaggccagtcttgcttttcacatttttctgcctgctttatattcacaggcagctgattggattacacccaccagattaagcgtgaatc

SEQ ID NO: 121151 - DNA, 659 bp, Homo sapiens
attgcaccgtgattgcttttatatyactgatatcaaactgtgcataattagagactgttttaactccaataacaaataacatactttgtttttacatagctaaataatatcctacagaagcaacatcattacatcataggataatggctcaatatgtccattaaaggaagacttgccttttctaactattgggtattgttcatagtgttgatggacttggtcatttttattttacaatgtaaaactgggttgatacatgcttcttgactgttctgcaaacttaactaaatgatgaacttaaaaaacatattgtacaagaagaggaggttttgaatgttatcaccatacataactaataaatgtttaaggtgatggatattataattaccctgatttgatccttatacaatgtatacatgcaccgaaacatcacactgtaccccataagtatgtacaactattatatgtcaattataaataaaaaattaataatgaaaaattaaaatagaaaaagaaaaaaccatattgtacagaacttagcaacaatgtacttcattctagtgtgcaaaaatactgaatcttcagagtataattaataatgataaaataaacctttgcaacatttaagatgctaaataacacttgaaactcaaggaaac

SEQ ID NO: 121152 - DNA, 659 bp, Homo sapiens
attgcaccgtgattgcttttatattactgatatcaaactgtgcataattagagactgttttaactccartaacaaataacatactttgtttttacatagctaaataatatcctacagaagcaacatcattacatcataggataatggctcaatatgtccattaaaggaagacttgccttttctaactattgggtattgttcatagtgttgatggacttggtcatttttattttacaatgtaaaactgggttgatacatgcttcttgactgttctgcaaacttaactaaatgatgaacttaaaaaacatattgtacaagaagaggaggttttgaatgttatcaccatacataactaataaatgtttaaggtgatggatattataattaccctgatttgatccttatacaatgtatacatgcaccgaaacatcacactgtaccccataagtatgtacaactattatatgtcaattataaataaaaaattaataatgaaaaattaaaatagaaaaagaaaaaaccatattgtacagaacttagcaacaatgtacttcattctagtgtgcaaaaatactgaatcttcagagtataattaataatgataaaataaacctttgcaacatttaagatgctaaataacacttgaaactcaaggaaac

SEQ ID NO: 121153 - DNA, 659 bp, Homo sapiens
attgcaccgtgattgcttttatattactgatatcaaactgtgcataattagagactgttttaactccaataacaaataacatactttgtttttacatagctaaataatatcctacagaagcaacatcattacatcataggataatggctcaatatgtccattaaaggaagacttgccttttctaactattgggtattgttcatagtgttgatggacttggtcatttttattttacaatgtaaaactgggttgatacatgcttcttgactgttctgcaaacttaactaaatgatgaacttaaaaaacatattgtacaagaagaggaggttttgaatgttatcaccatacataactaataaatgtttaaggtgatggatattataattaccctgatttgatccttatacaatgtatacatgcaccgaaacatcacactrtaccccataagtatgtacaactattatatgtcaattataaataaaaaattaataatgaaaaattaaaatagaaaaagaaaaaaccatattgtacagaacttagcaacaatgtacttcattctagtgtgcaaaaatactgaatcttcagagtataattaataatgataaaataaacctttgcaacatttaagatgctaaataacacttgaaactcaaggaaac

SEQ ID NO: 121154 - DNA, 632 bp, Homo sapiens
gatatctcatattccgaaaatacatttgcccaacattgagtaatayagaaggtcagcaataaatatccgatttattaaatatgtatttaagatgagtattacaagcatataatacatggcttttcaccaaaaaggagtcactgattccatatcatctaaacagtcttagaataacttgataacaacacaaaaaaagttcaagtacgtaaaattgagctttaattaattaaaattaaagataaccaaaaaaattaaaattaaattttatccacactcatctttgatcatatgaatataggataattggctgggagtggtggctcacacctataatcccaatgctttgggaggccaaggtgggaggactgcttgaggccaggggttcaagaccagcccgggcaatacagcaaggccccactctctacaaaaaatattgaaataaaaagaaaagaatatgggatatttaaatattctacagaacatagttgaaaaaagttatgaaccaccttcttggcattactcctattttttgtctgaataacaaataacaatactctaggaaatgcttccaaataaagatgattttatgtaaagtatggtattcttactttacaatggatgactttaaaatt

SEQ ID NO: 121155 - DNA, 622 bp, Homo sapiens
aaatgagcaggcaaggtaaaggcattttcagacatatgaagtctgtggaaattaaattacctgtttaatccttcctgaaaaaaattgcttgaaattagttatacccctacaaggtgggaaaaaaatctatgacaaatgaggacatggaatacataaagcagtagacctaacccaggcatgatacaaaaaaatctcagtaaacaggtatgcaactgacttgtaaagcaactagtctaaattacatgtgtgagagctggaaatacagcttcaggagcaaaatgagtttattttagcaaacatggtgccattattaggaagctaataggataccttaattggcagaggtagaattacattttttctctgcagatgcaatcatacttaatagttttatagcgaatgatgattgtataattacaatatggtaaatagttgataagttttcaatgtttaagaatcaacctataaataaagcataaaagacttgtaytgattgatgtcctgtggctccttaaaatgtgtaaaacccaagtgtagcccgaccactttgggcacatgctgtcaggacctcctgaggctgtctgtgacacgtccttaaccttggcaaaataaacttctaaac

SEQ ID NO: 121156 - DNA, 513 bp, Homo sapiens
aaaaaatcaacagaaggtttagaagagatagttgaaatctaccagttgttttcaggctgtacacagagatcaaacaggatagaaaaaattaatgagaaagttagaggtagaaccagaaaattcattctctggttaacaggagtaacagaagaagaacagacaaatgagaaagggaggaattatcaaataaataatacaaaaataatttctcataaacaaaggatatgaactgccagatcaaaagggctaggtaacccacacacaacgaacataaaaagatcacaccaaagtaaatgaccatgacattttagaagattctaatcattttcagaaacaacaaaagggcrtatatcaggaactagagtgacatcagttttctcaataataactcaacaagttagaaaatgatcaagccatgtgtccagccaatctatgcagcaagtcatagttttcattcactcatgttcaactttaaacaactgcatctcctatgtactgcttcttgggaagctc

SEQ ID NO: 121157 - DNA, 663 bp, Homo sapiens
ttactgtttgattttaaaaatgtgttgtattacttttgtaaatattaaaaatgaattttaaaaaccagacctaaagaataggtattctcatttatgacccaaaataaattaatagttggtttggttccttttgctataatttctccaggtcaataagaatatatgtcatacstggttcaaacatgagacaatgcgttaaaacaaagggcttgcaattcacagaattagaaggcacatacgatgaattgatgttcttggggttggggaacacaaggctctcatttgatgctgtttgaaatgaaataaaataaaatccaagccaagtcaaagtgccacaggtaggaagtgattataaaccagcacttgtctgtaagagtttcacaaatatcacatcacttaatgaccagaagcctgttaattgtctgggtaccagagtattgtatcagataaattcagttctatattatacttcatatatctgatttaaaaacattttttaatagaggtagggtctcgctatgctgctcaggctggtctcaaactcctgggctcaagcagtcctcttgctttggcctctgaaagtgctgggattataggtgtgagccaccatgtccagcctgtgtatctgattctaatgctgtgtataactaaaataaaaaataa

SEQ ID NO: 121158 - DNA, 631 bp, Homo sapiens
tggagttgttctgaagattaagaataatggttgttaaactggctaggtatggctcctgtcacactggaaagacacactatgtgatgcttattctctgctgttgttccaaggctctccaaagttgcataggctatgtgataggaaggtgtttcagcactgacacccaaataatcagcagtcagcccccaacacctgccagtgatcggtagaagagggcctagccagttcagtgttcatgagtacrtgacaggtgaatcgccacacaaatggtaagtatagttactttacacgcctcccaaccacacagtattgtgcatgacaaggacaccctcagcttcagtaagcagagaataaatggattctagaaaaataaacactcatggatacactatgtttgaataaggatctagagtcaaacactttttcataaacttcctgtccacttctccacccactagatccatattgcttctgagaacatgctctagtaactgttttaacagaataatctatctttttcaggagaggatggcaatcaaaataaaaggaatagctacacctgagtaaaaaacatcttctctaaaagtctcaaagaatattactaaatgccttattcaaacattgttcaatt

SEQ ID NO: 121159 - DNA, 570 bp, Homo sapiens
aataggtatgtgcatgcaatatagatgtattagttcattttcacactgctgtaaggaaatacctgagaccgggtaatttataaataaaagaggtttaattttctcacaggtctgcaagctgtacaggcttctgcttctggttaggcctaatgaaacttaaaatcattggagaaggtgaaggggaagcaagcatatcttcaaatgctggcaggagagacagagcataaagagggaggtgctacacactttcaaacaaccagatcttctgaaaattctattaagagactgtattagggggatggtgcaaaaccattagaaatcacctccatgatccaatcacttcccaccaggccccacctccaattcaacatgagattacaattcaacatgagatttcagtggagacccttgccccatcaaaatctcatgtccttctcacatttcaaagcacaatcatacctttccaacagttctccaaagtyttaactcatttccaccttacctcaaaagtccaagcccaaaatttccacgttacctcaaaagtccaagcccaaagtgtcatctatgaca

SEQ ID NO: 121160 - DNA, 584 bp, Homo sapiens
tgaggctggatgagccctgaggtccctttcactctttttaattttttwtttttttttaatttccataggtttcgaggaacaggtggtattcagttacatgagtaagttttatgtgtttttttgttttgttttgttttgttttgtttttatgagacagagtcttgctgtgtcacccaggctggagtacactggcacaatctctgctcactgcaacctctgcctcccgggttcaagtgattctcctgcctcagcttcctgagtagctgagattacaggtgcaagccacctcgctcagctaatttttgtatttttagaagagacggggtttcaccatgttggtcaggctggtctcgaacccctgacctcgtgatctgcccgcctcggcctcccaaagtgttgggattacaggcgtgagccaccgtgcctggctgagtaaatttgttagtggtgatttgtgagattttggtgcacccatcacctgagcagtgtataattaacccaatttgtagtcttttatctctcacctccttcccaacactcctctctgagtctccaccatccactgtgtcatttttatgcctttg

SEQ ID NO: 121161 - DNA, 584 bp, Homo sapiens
tgaggctggatgagccctgaggtccctttcactctttttaattttttatttttttttaatttccataggtttcgaggaacaggtggtattcagttacatgagtaagttttatgtgtttttttgttytgttttgttttgttttgtttttatgagacagagtcttgctgtgtcacccaggctggagtacactggcacaatctctgctcactgcaacctctgcctcccgggttcaagtgattctcctgcctcagcttcctgagtagctgagattacaggtgcaagccacctcgctcagctaatttttgtatttttagaagagacggggtttcaccatgttggtcaggctggtctcgaacccctgacctcgtgatctgcccgcctcggcctcccaaagtgttgggattacaggcgtgagccaccgtgcctggctgagtaaatttgttagtggtgatttgtgagattttggtgcacccatcacctgagcagtgtataattaacccaatttgtagtcttttatctctcacctccttcccaacactcctctctgagtctccaccatccactgtgtcatttttatgcctttg

SEQ ID NO: 121162 - DNA, 584 bp, Homo sapiens
tgaggctggatgagccctgaggtccctttcactctttttaattttttatttttttttaatttccataggtttcgaggaacaggtggtattcagttacatgagtaagttttatgtgtttttttgttttgttttgttttgttttgtttttatgagacagagtcttgctgtgtcacccaggctggagtacactggcacaatctctgctcactgcaacctctgcctcccgggttcaagygattctcctgcctcagcttcctgagtagctgagattacaggtgcaagccacctcgctcagctaatttttgtatttttagaagagacggggtttcaccatgttggtcaggctggtctcgaacccctgacctcgtgatctgcccgcctcggcctcccaaagtgttgggattacaggcgtgagccaccgtgcctggctgagtaaatttgttagtggtgatttgtgagattttggtgcacccatcacctgagcagtgtataattaacccaatttgtagtcttttatctctcacctccttcccaacactcctctctgagtctccaccatccactgtgtcatttttatgcctttg

SEQ ID NO: 121163 - DNA, 661 bp, Homo sapiens
cagcttttatgtgcagattttaggtgaaatcaaagtgactctccctttttggggtttacagcaagccaagtaaaaccagaggagagatcctctcatggaatttttttcaacacattgtaaaaagtattttgacctaaaaggaaaaagctggggtaaacataatataagtagagagtttattttggctaaatcttaaagattgcaaccctggagtaaaaagttgccctgaatataccctccaattagaagcagttgtaagtgtgtatttttaaaggcaaaaaaggaaggcagagagggtactgatacaaagttatctgtcaaaaattcttattgttttatataaataactggttagcgattgactatacattgttaagctatagggtgtgggttatagagtcaagtgtggcattattaggttgtggcaataccaaccaatttaaaaagataaatagttcaaagaggagagcagaatataactgtggtctcattttaatatatctctggtttaaaagaacttgcatgtctcaaatraaagttcttttcttccctcgaatcccaggacatgaattcagaatttggaactgcacatttaggtcttggaaggctggtgagctatgcacatttgtgagcatttggacaagaggaggagagaggaagg

SEQ ID NO: 121164 - DNA, 559 bp, Homo sapiens
ttcagttttggaacttggactggctctccttgctcctcggcttgcagacagcctattgtgggaccttgtgatcctgtgagttaatacttaataaactcccatatatatattatatttatattccattagttctgtccttccagagaacactgactaatacacaaggcctactcattgtgttgtaaaattcaatggacttgacaaatgcataatttcatgtatccataaatacatactacaaaatagttttatgatagtaacaaaaatccaccatggcttgcctattcaccctacttcaccattcyctccaacttctggcaatcattgatctttcatagtctccatagttctgcattttccagaatgttacataattgcaatcattcagtatgtagcttttgagactggcttctttgcagctaagtggcttctttcacttgagaatatatatttgagattcaaccatgccctttgtagctcccttctttttttctcattaaataatattttgctctatagataataccacagtttttaaatccattcatctatcgaaaga

SEQ ID NO: 121165 - DNA, 559 bp, Homo sapiens
ttcagttttggaacttggactggctctccttgctcctcggcttgcagacagcctattgtgggaccttgtgatcctgtgagttaatacttaataaactcccatatatatattatatttatattccattagttctgtccttccagagaacactgactaatacacaaggcctactcattgtgttgtaaaattcaatggacttgacaaatgcataatttcatgtatccataaatacatactacaaaatagttttatgatagtaacaaaaatccaccatggcttgcctattcaccctacttcaccattctctccaacttctggcaatcattgatctttcatagtctccatagttctgcattttccagaatgttacataattgcaatcattcagtatgtagcttttgagactggcttctttgcagctaagtggcttctttcacttgagaatatatatttgagattcaaccatgccctttgtagctcccttcyttttttctcattaaataatattttgctctatagataataccacagtttttaaatccattcatctatcgaaaga

SEQ ID NO: 121166 - DNA, 567 bp, Homo sapiens
tgcatccatgttgctgcaaaggacatgatttcagtaactttctcctgataagagaccatggccatgggctggttgtgactggtttacagaggctgagcactgagtgcctgcatgccctgcttcatcttttgatctataggacttaattgcaatacatttaaatgtcgtttccactccaaaatgaacataggagcctttttgcttattatgcatgtatgtgtccccgctttgtgaatattcatagctcttcctrtaacctgttgaatgtgtatacctggccatcctgttcagcacaaatctctcttccactctcccctcccttgaagcacctgttaatggtctctgcctgagactacacttcccagcttgtcagaatggccaccttgcaggctgtaaccctttataagaaataaagctctcctttctaaatttataaatcttgtgatttttaagttgacatcttcaccaccgggagagctagttgcctctcctaaattgatcagagtgaatatctctgtcttaaagacttttaatatattgtaaaataaatttatttcaccctaatga

SEQ ID NO: 121167 - DNA, 435 bp, Homo sapiens
gaattcattttttacaaaggtgccaagaatatccactggagaaaagacagtctctttaataagtggtgctggaaaaactggatatccatacgcgcaagaatggaactaaacccctatttctcatcatacacaaaaatcaactcaaaataggttaaagactttttttttgatccaatgatagtttttctcacataccatttacmgttggttttccattaaaagctattcatatatgtggctcccttcgtaatccttttaaacatagtagccctatggacttaacctgtaagttactattatcctttattttattttattttattttatttacaaaatggattaaagactgaaatctaagatttcaaattataaaaccactaaaagaaaacactgaggaaactctccaggacattggagtgagcaaagatttcttgt

SEQ ID NO: 121168 - DNA, 489 bp, Homo sapiens
actctctggtttccaggggctcttttcctagaccctggctacagactcattatgtggtccacacttcttatgtctgaatcatcctctggacaaagtagtgagtaaaaaagagaataaaaataatggtattcccttgacactcttcagaacatgtatatttcttttccaaattcatctggtgagagagaattttctctcagamttttaagcacctatgcaactgctgctgtcaccctgccaacacaggaatgcaccttcataaatggggcttgcctccagtcagagctagaggagtaaaaagggaaagaagaattatggtaatttttcctacatgtacattttctatctcagagaagcccatttcccagtcctctgctatgaaagaggatttttcttggagctttctttgtcagtgcacaaagtgaaattccatggtttagggcacctaaaatctaaacccagagatatgggaaagaaaaacaaaacaaa

SEQ ID NO: 121169 - DNA, 582 bp, Homo sapiens
atcagctttcaaggtgttgaggtttgcaagacatcaagaaaattgaagagcacaacattattagattttaaaactatggtcaaagtataacctattttaaatgtaatgaattttcaaccaataaaaggtcaacaatagctcttgagtcgtgagtacatgtataaccctggagcgctacacagtatgatctggacaatttgcagagtaaccacagtctgggagatgcatgcctgctagaaagtcacctttcaagtcattgtttgtctttgcctttatggagaaggtgaaatacacttcaaagctttaaacacactctcagaatttagggacttgccaccattkagaaactgtttgaggacaatgaaggttgaaaggcttcagcctataaagtccctcaggatttgagatcaaagctgaggccagttcaagaaatctgcagccaatggtagctcaatacataggagaaatggtcagctaccctttgttatcatttgaggcagaaaaaaagttttcctacccatgatgatttcatcattaagtctaaacagggtctaacaacaccatcattagtgcaccctttta

SEQ ID NO: 121170 - DNA, 518 bp, Homo sapiens
aaaacttatgccaccagctttcctggtgaaaagctgggaatgcaggttgcacatagcagatcatgacttctcagcctccgtaactgaggaagmcaattcctcataacaaatctcacatatttatctattatatctatctattgatcaattgatctaactcctattggctctatttctctgcagaatcctaacccaagattcagactaatgggaataatttcagttagctaatatctaaaattttgctctcttcccaacttaggctgttgccctatagtcattcttattgacatctccagttctacaagaagagaaaaaggagacaaaaggttagttttataacttctttgaagctctcttcaaagatttggtgagcaaaaaaattagaaacatagacccaatggagctttagtagacactgtagatttctaccttccagtctctccatgctgcttataattcactctaatttagtaaagatttattgagcacccacacgtgaaagtgctaggacactg

SEQ ID NO: 121171 - DNA, 518 bp, Homo sapiens
aaaacttatgccaccagctttcctggtgaaaagctgggaatgcaggttgcacatagcagatcatgacttctcagcctccgtaactgaggaagacaattcctcataacaaatctcacatatttatctattatatctatctattgatcaattgatctaactcctattggctctatttctctgcagaatcctaacccaagattcagactaatgggaataatttcagttagctaatatctaaaattttgctctcttcccaacttaggctgttgccctatagtcattcttattgacatctccagttctacaagaagagaaaaaggagacaaaaggttagttttataacttctttgaagctctcttcaaagatttggtgagcaaaaaaattagaaacatagacccaatggagctttagtagacactgtagatttctaccttccagtctctccatgctgcttataattcactctaatytagtaaagatttattgagcacccacacgtgaaagtgctaggacactg

SEQ ID NO: 121172 - DNA, 556 bp, Homo sapiens
taccaaagaagaatcaaaaaagtttgtgaaagatattcaagaacagtagtcattagggaaatgcaaattaaaaccacawtgagatactactatgcaaagagcccctggacaggggctggtgcaagccccggtgttcaaaggctgaagaacctggaatctgatgtccaaaagcaggaggaacagaagcaagattccagcacaggaagatgaaaaaggagccagaagactcagcaaacaaacttactccaccttcttttgcctgatttgttgtaggcatactcgtagcaaattgcatggtatccacccacattgaagatggaccttcctctcttttcaccaactcaaatgtcagtctcttctggaaacaccctcacagacatacccagaaacaatacttttccagccatttaggcatccctcaatacaatcaagttgacacctaatattaaccatcacagataacaaaagctttgaatacacacatgtgcacatgtatatacacatacatcttcaaataatttaaaatagaaaaggcctgccttttgtgttattaaca

SEQ ID NO: 121173 - DNA, 510 bp, Homo sapiens
tgtttatcaaaattaaaactttttcactgcaagagacactgactgttaagagattgagaagatcaagaagactggagaacatattttcaaatcacatagtatctgataaaggattagtatctaaaatatataaaaagcattttaaaactaaataataagaaaaaagaaactaaaaataggcaaaagatttggagagacactttaccaaagaagaatcaaaaaagtttgtgaaagatattcaagaacagtagtcattagggaaatgcaaattaaaaccacaatgagatactactatgcaaagagcccctggrcaggggctggtgcaagccccggtgttcaaaggctgaagaacctggaatctgatgtccaaaagcaggaggaacagaagcaagattccagcacaggaagatgaaaaaggagccagaagactcagcaaacaaacttactccaccttcttttgcctgatttgttgtaggcatactcgtagcaaattgcatggtatccacccac

SEQ ID NO: 121174 - DNA, 556 bp, Homo sapiens
taccaaagaagaatcaaaaaagtttgtgaaagatattcaagaacagtagtcattagggaaatgcaaattaaaaccacaatgagatactactatgcaaagagcccctggacaggggctggtgcaagccccggtgttcaaaggctgaagaacctggaatctgatgtccaaaagcaggaggaacagaagcaagmttccagcacaggaagatgaaaaaggagccagaagactcagcaaacaaacttactccaccttcttttgcctgatttgttgtaggcatactcgtagcaaattgcatggtatccacccacattgaagatggaccttcctctcttttcaccaactcaaatgtcagtctcttctggaaacaccctcacagacatacccagaaacaatacttttccagccatttaggcatccctcaatacaatcaagttgacacctaatattaaccatcacagataacaaaagctttgaatacacacatgtgcacatgtatatacacatacatcttcaaataatttaaaatagaaaaggcctgccttttgtgttattaaca

SEQ ID NO: 121175 - DNA, 556 bp, Homo sapiens
taccaaagaagaatcaaaaaagtttgtgaaagatattcaagaacagtagtcattagggaaatgcaaattaaaaccacaatgagatactactatgcaaagagcccctggacaggggctggtgcaagccccggtgttcaaaggctgaagaacctggaatctgatgtccaaaagcaggaggaacagaagcaagattccagcacaggaagatgaaaaaggagccagaagactcagcaaacaaacttactccaccttcttttgcctgatttgttgtaggcatactcgtagcaaattgcatggtatccacccacattgaagatggaccttcctctcttttcaccaactcaaatgtcagtctcttctggaaacaccctcacagacayacccagaaacaatacttttccagccatttaggcatccctcaatacaatcaagttgacacctaatattaaccatcacagataacaaaagctttgaatacacacatgtgcacatgtatatacacatacatcttcaaataatttaaaatagaaaaggcctgccttttgtgttattaaca

SEQ ID NO: 121176 - DNA, 408 bp, Homo sapiens
gaattccctcttctagtttgttttaaagagaatgttcagggcaggtgagtaacaaaacagcaatcagctatctaacattcttttctttcaatctcctccagaaactagttcagctctgggtctgcagagctcaggggcctacaacccgaggagacagcctcagaatgaaatgggtaggtggttaggaaggtgaggaggacaacagtaagcatttatctccttcatagcctgtgtctgtagagcctgttgaagaccaccaaatactgcacgatcratgtcaccactgttaccgagcctgtttcttccgtctctacaccctttctttcagatctgatgcaatcttatgccagacttccaatctccaggaattttttcttcccttatcaacctgttcacatatgttacacc

SEQ ID NO: 121177 - DNA, 600 bp, Homo sapiens
ttttgaaaatatgcttacaaattatcttttaattttacactcattcgtgcaaatgcagctacttatttaaaatttcacaactttgaatagtatgtaataatatactctatgtgacattaaagcaccaaatatgaacataaatttcaaagattaaaaaatgcatatacacacacatgggcgcacacacacacacacacacacacacagttggcccttcatatccatgggtttcacatacacagattcaaacaaccatagaatctatgactccactggaccaytgagtcatcagcctttgttgggataagactttcactcaaggataagcattgtaagaaatggtgtttttaattttttaagaacaggatcctctcttgttttgtatactattgctgattatgtcggccagctttgaaaaaattttgtctaatattggaagtttacttctaaattccgaagtgctacagaaagaatggactattgtgaaacatgagctttagctaattaccatatagcaacgtactgttaagtgagaaagcagaaaagaaagctgtatacataccacaatagcaacaaagtaaaccatacctatgaaacaaa

SEQ ID NO: 121178 - DNA, 600 bp, Homo sapiens
ttttgaaaatatgcttacaaattatcttttaattttacactcattcgtgcaaatgcagctacttatttaaaatttcacaactttgaatagtatgtaataatatactctatgtgacattaaagcaccaaatatgaacataaatttcaaagattaaaaaatgcatatacacacacatgggcgcacacacacacacacacacacacacagttggcccttcatatccatgggtttcacatacacagattcaaacaaccatagaatctatgactccactggaccattgagtcatcagcctttgttgggataagactttcactcaaggataagcattgtaagaaatggtgtttttaattttttaagaacaggatcctctcttrttttgtatactattgctgattatgtcggccagctttgaaaaaattttgtctaatattggaagtttacttctaaattccgaagtgctacagaaagaatggactattgtgaaacatgagctttagctaattaccatatagcaacgtactgttaagtgagaaagcagaaaagaaagctgtatacataccacaatagcaacaaagtaaaccatacctatgaaacaaa

SEQ ID NO: 121179 - DNA, 657 bp, Homo sapiens
gtaccctctgactctgaactaaatatatatatctactgctatcttgtcatccaaaggaattagtatcaattttgactgcaactggcaatctataaatgtacaagtttttcacattcttgcaaatgttgtgtattgtaattatgtattccttttagtgctaattaaattgtggaaagttattctttattgttgatattttcatacattgattagtattttcatgtgtgatttatattttgcaaatttagctatttaattaccatgttttatgtgctcattataaaattaatcatttatttgaggccggtatttttcagtgtctatataacagacttgagttagttggttaatttatcttgaaaattttctacaccaccatgatgacacttttattatataaactaccatttaaacaaatatttgtttatatgtctttctctctcccagacgggagcaatattatattcaaatctctactcaggttgcctaacacaatgtttatgatgccaaatatagaggtcttttttctgggctgccaacactatcatcactcawtataaattatactaaactattattatatttcaaaaatgacctcagaaaggaacaaaagagaatgtgtttagtcagtttgccttacttaactataagctaact

SEQ ID NO: 121180 - DNA, 570 bp, Homo sapiens
caatgttattatattaccccatctccctcaacaaacatttaggatcagcaatttagtgtggaatggtgcttgaagtcattccacttttcactttagagcataagctggttccacttacgatactgtgtattctaagccagcatcattgtaactgatagtctcttctcacccagctttgatggtggggcagctcccatgtctgcagctgtggtccaggggctgtctgtgctgaatacagcagttgctgtgacactaggcacatgccatctgcagcatctcttttttcttgcatccctgttttgagcacaggtatgtaaaaatcttctctttcttcttcccaggctgatagtcatattctctatcaatgtgatcgccaaccaccayatctggtacctgacaaagttctccccgttcttctgtctcctctcctcaagtggaatgaaggggtttcttttggagccatgagctgtgcagcctggggttaagggaggggttttgctagcacctgcttagctgccccagctggtgtctctgtaggcggcatgttcccccagcccgctatttctgggc

SEQ ID NO: 121181 - DNA, 635 bp, Homo sapiens
aataaatggatacccatatattatagttctcatcagcctctaaaatcatgttttgtattatctatcttaccaaatattttttatggattaatcgtgttatactaggtactgaactttcaaaaatatgttcttgctcaataatgagtatatgaactaagaaaatttctatgttgttttgaaaaccaacctttgaaacagcaccatgatacacctttctgaaagaacaaaatgaaacctcaaatcagacaattaagctggatgagtaacatgatttgaagcaccaaaaacatttaatcaaggtgagattatgcctagaatctgacaaatatccccttatctgcaacatcaaccctactcagtaggagaaataaatttctagaaggcttcacatctgagtttgaatgtttccayccagcttccatgatattaaatatttgaaatcttaaaatagtaatgctacaaggaacttttcagtttatctagatgaatgttcactttatagatgaacaaaaaaaccaaggcccagaagaaagcatgtctttgaaaaggtcatacagtgatttgtaggagagcttggagtgatacctcttcagaagacttccaaactattatacaccaattacttggtcaagaca

SEQ ID NO: 121182 - DNA, 627 bp, Homo sapiens
gtaagaaattttgatggtaataaaaattcacctgcttggaactagacagttttaaraaattctgttttaaaaatacataaacaagagaatttttgaggattgcttaatgagtgttaactcttctgaacctctaagtggagacttcattcacctgaatggcctttagattcctagaaaaaaagtaaaatggcaaaagggagacagagagagagagacagatcaaaccacacatttggtatgcaatgctggcaaaaaaaaaatgcttaaatccacgtggataatgtgaacatggagtggggtatcacaatcatttgcaactacctctgccttgtgtccattagatgtctttatatcttcatgattaatagcaaccactaagttgctattaatttaagtatacttaatttacttaagtatacgtaaaaagtacttaaattaagtatttttactcagttaatgggacacactatagtcatcatattattcttcaccacccagatttcacttacccacagccagaatatcagctgatcaaggttatttgcttggagtggggagtggtgtgtggtggggggcactggtgattcatacttttattactgtgtgcctgatttttgattgccttga

SEQ ID NO: 121183 - DNA, 537 bp, Homo sapiens
aatctatttctgtaacaggaagtctggactataatatgtgaaaacctaatacctagttagaggtagtaactgtatgtagtaatcatcattctcttatgtttagatgtctaataaatataaataaaatataataatacaaataaataataaatacagaaataacttatgcttcacatggcaagtttcaatagacttgaatttaattttttgacttgttaatatgataccatrttttgtcagagggaaaattttctgctaagaagtttggttgcatgatcctcaaacagagggaatcttaatgcacgggactactacagttaaattcaaatttcattcaactgtccttaacctggcttatattgatgtatccttggaatgtgtaacctgacaaagagattcttggcgattcccaatgtgtagagaagcagggattaaatccacatggcttttgtcacctaaaaatgaataaagttagaaatagttgagtgtcaaatatttttgagtgtctaagaagccactggagttttcggagcaacc

SEQ ID NO: 121184 - DNA, 537 bp, Homo sapiens
aatctatttctgtaacaggaagtctggactataatatgtgaaaacctaatacctagttagaggtagtaactgtatgtagtaatcatcattctcttatgtttagatgtctaataaatataaataaaatataataatacaaataaataataaatacagaaataacttatgcttcacatggcaagtttcaatagacttgaatttaattttttgacttgttaatatgataccatattttgtcagagggaaaattttctgctaagaagtttggttgcatgatcctcaaacagagggaatcttaatgcacgggactactacagttaaattcaaatttcattcaactgtccttaacctggcttatattgatgtatccttggaatgtgtaacctgacaaagagattcttggygattcccaatgtgtagagaagcagggattaaatccacatggcttttgtcacctaaaaatgaataaagttagaaatagttgagtgtcaaatatttttgagtgtctaagaagccactggagttttcggagcaacc

SEQ ID NO: 121185 - DNA, 629 bp, Homo sapiens
taattttaacttcacttgggtaaagaatgcccagatgggtagtaaagaattgttttgaggtgtgtttgtggagggtttccagaaaatattagcagtcgaatctgtagatttagtaaaaaagatctgccctcatcaatgtaggtgggtattatccaatcggtttagggcctgaagataagaataaaaagrcagaggaagggaaaagtttcttttcttcttgagctgggacatccattttttcctactcttggacatcagaccttctggttcctgggactttggactctccccacttcctattctcagatctttggccttaggctgagggattacgctatcattcccctggtcctcaggacttcacactcagactgaattacaccactggcattcctggttctacagcttgcagatggcatattgtgggacttgctggcctccatggttgtataagctaaattatataataaatattatcttatgtatctatttatcctattgttattgctctggagaaccctggctgaaacagtggtcatatttacttctatctttatgtagtagtacacaacagtatcttgtttcagtgaaaaagcataaagttttacagtgtcttcaataaatggttt

SEQ ID NO: 121186 - DNA, 627 bp, Homo sapiens
cactagtgatctttgtttggttctgcacttctgtgaacagagcaaacctccaaagggtttcttttgggggagaaaccactcccaaattattttaaggatattagcaaatcctacttgtggcaccaagatctggaaattatcccctgattctgattcattaaattcccctccctcccctacattcaacccaaacactgcaggctgctgcccagattagaagtgaactggagacctgaagaggtacctagctagccacctgaccctgactctcacccatcttcatcagaagaggatagcaccccagatgttgggccagaagaactcagctcctctcctgcctctatcatgtagcaagaagaccacactcagctggagttgtggcctgggcagctgtgtctgctggtccttccacctctgcctgggggagggctggrtgtgatgtgggagaactggatagagcagcatgcagatgcccagtgaagcacacaggcaggactcagcctctgcccaggccagctaggagcgctttagtctcaaggcagagacctgtgaggttttgttccaggtgatcagcccggttcaccacagtgggagaaaaggcagaggtggagtaaagagtaaaggctg

SEQ ID NO: 121187 - DNA, 583 bp, Homo sapiens
gctgggattacaggcttcagccaccrcacctggccaaaactaattttatgcatatctagctgaaattgttttttgataaatgtaaaatattgaaaatattctgatcacaaattcaatttaatcttttaggccacaaactgacaatattatgagtatatttatatgattatatgattagcatcacatggtattttaggcaaatacaacacttgaaatcactgcaatggcaacagaggtagctatgaaattattacagtagtacagtatgtactacagtaattatatgcagttatgatttaacattatacctttacatttgtttacatttctctcatgaacctaacgtatactgttgtaaggttcttgtactataggtaaagtggtatgatagtatatgaaggtaggctatgctaaatcaaagatgcatactataaaccctattgtaacccccaaaataacaccacaaagttatagctaacaagccaacagaggagataaaacagaatcataaaaaaatgctcaatccaatagaaggtagaaattgaggaagaaaggaacaaagaacagattagacaaatgggaa

SEQ ID NO: 121188 - DNA, 453 bp, Homo sapiens
gcaactgtaacttccattctaacagtaagcaatgtaaggaataaagagaacaaaaacaaaacactctgaattgattgtagttttacaatctcagttccacatactaaatcttaattttttgtactgtttctctgagagatgacataatttccctgacatcaacaaggatagtagggaattgattttcagtgaggtgatgcctcccccagcatatgaatgaaaaactcagttccttcaggttctcatacaaggcgaatgtctaggcaacatttgtgagagactgaaactccatcacaaattgcaatttgtgctgtccttcattcctttgaaaaagaattttaacatttatggagcatttgctatgttgtgggkttttttgtttttgtttttgagaaatgcagagaatatggcaaaacatggcataaaggcacctgactctactaactcccaggc

SEQ ID NO: 121189 - DNA, 572 bp, Homo sapiens
ggcctaaagcagaatgggtagttaaaaagtaataaggtagggccagacgtggcccacgcctgtgagtaccagcactttgggaggccaagacaggaggattgcttgagcccaggagtttgagaccagcctaggcaacatggcaaaaccctgtctctacaaaaaaatacagaaattagctgggtgtgatggtgcatgcctgtaatcccagctactagggaggctgaggtgggaggatcgcttgagctcagcaggttgaggctgcagtgaaccatgagtgtgccactacactccagcctgggcaacagagagagctcctgtctccaaaaaaaaaaaaaaaaaaaaaatagcaagstacacaggtatctctatgaaaatgaatgataggcactccataaagtacaattgtagttaggaatttaggaatcatgtactattctgtatttccagatgagtattgttctggattatccagaggtgcatggaaaagcttgagccaaactctccactccactcagtgtttattcaactacagtagggtatcattgccgaggcactagtgacacttggggctg

SEQ ID NO: 121190 - DNA, 642 bp, Homo sapiens
agcaaaagagaaaaaactgagccaaacattttctgataaggagaatatagttttataccaaaataaatatgcaaaatggaaaatgtcaatatcaagtcagcttccattttcagcagcaaatatatactggtccttaaaatgggaaatagaacatcaacctatgatttcagtttgccagtttaattcagattacagtttccaacagaaaacagaatctttattatccatagaataagaatggctttttctatatctgctgaagggcttagctccccaagtgatggggagaggctgggaggttataatcagtggaagtggcaaggacagacttgtacrgtaatggctgtctggaatgtgacctgcaggggcctgagcatagggggccagtgctcaccttggtgtaagacttcctgacttgctcctgctctgtttcttcagatgtacccttacccagagccctgggtgagaagccaggttggcctgggttcctggacccagccctggctagaaggtcagataattttatgttccttgatatctgcctgtgtgaggctctctattgagccctgtaaggaataaataagcaaagttccttggttggtgcttactcttatctgaaaatgtgcaggcctcatgtcatgt

SEQ ID NO: 121191 - DNA, 642 bp, Homo sapiens
agcaaaagagaaaaaactgagccaaacattttctgataaggagaatatagttttataccaaaataaatatgcaaaatggaaaatgtcaatatcaagtcagcttccattttcagcagcaaatatatactggtccttaaaatgggaaatagaacatcaacctatgatttcagtttgccagtttaattcagattacagtttccaacagaaaacagaatctttattatccatagaataagaatggctttttctatatctgctgaagggcttagctccccaagtgatggggagaggctgggaggttataatcagtggaagtggcaaggacagacttgtacagtaatggctgtctggaatgtgacctgcaggggcctgagcatagggggccagtgctcaccttggtgtaagacttcctgacttgctcctgctctgtttcttcagatgtacccttacccagagccctgggtgagaagccaggttggcctgggttcctggacccagccctggctagaaggtcagataattttatgttccttgatatctrcctgtgtgaggctctctattgagccctgtaaggaataaataagcaaagttccttggttggtgcttactcttatctgaaaatgtgcaggcctcatgtcatgt

SEQ ID NO: 121192 - DNA, 460 bp, Homo sapiens
agtgataatgaggaattatgcaccgtcattcataagtgacacgtgtcacatccacttattttgagttggccaaagcaaatcatagagaaatccattctggcaattagaagtctttcacactttaattctaagtcaatcctcaggctctagaatacactcaaatatgcattgcatgctaagactggacagacctcagcagaggaatctcttccaacattccttttagggccaaacacaaaggacaatggataaagtagaacctactagggggcaaaacctatgacctctaggaagcctggcattaatgcatttgtttccttatatgcctgtccaatagcwcagcaagcaatttattgaagatattctgtacttttttcaccacaaattgttgcagatatcaggagtggataaattgattgtagtatactgactatctggatcttaaatcatgaaaactcta

SEQ ID NO: 121193 - DNA, 479 bp, Homo sapiens
gacctggtgggaggtgattggatcatgrgggcagattttcccttgctgttctcatgatagtgagtaagttatcacaagaactagttgtttaaatgtgtgtagcacttcccccttttctctctctcctgttgctatgtgaagatgtgcttgattccccttcatctcccagccatgcctcccatagatcctgtgaaactgtgaatcaattaaacctcttttcttcataaactactcagtctcaggtagttcttcatagcaacatgagaacagattaatacaaaactttattaaatgtaacagggcagtgaacacattcttttagtgaaataacattaccttgatgcaaacaaatactatgacttttagaaacattcatatccatatgactttatgtagtgcagtctatgtaccagagtgtggtgaatgtatcctttcaataaaataaccctgtacttattcacccatgcaactagaattcc

SEQ ID NO: 121194 - DNA, 569 bp, Homo sapiens
aaaagtggggtttttgcatacagggaaattaagttatcagcttaaaatagaccattataactataagatactttatgtaagccccttggtaatcaggaataaaatacctaaaagagttataaaataagaaaaagaaaggaatcaaaaccaatctctacaaaaactcaaacacaaaagaagacagtaagacagaaagagaaaaaaactgtaagacaaatagaaaacagttaacaaaatggcaatagtacatacttactaataatttaaaatattaatatactaaaattataattaaatgaagagtgagttgatagatgaaaaaagattcaactgtgtgctgtctacaagaaactcactatagattcaagaatactcattagctgaatatgaaaggataaaaaaaaacctccrtgcaaatggcaatcaaagaaacaagagtggtatagttacatccggcataatagacttcaaataaaaaaactgttactagagaaaaggaaggttgtaatgtaatgataaatggatcaattcaatagggagatatgtataataattgtaaaataattgta

SEQ ID NO: 121195 - DNA, 583 bp, Homo sapiens
ttaatattttgttgttccttttttgagacgaagtctcactcttgttgcccaggctggagtgcaatggcatgatctcagctcactgcaacctctgcctctggggttcaagcgattctcctgtctcagcctcctgagtagctggcattacaggcacaaaccaccatgcccagctaatttttgtatttttagtggagatgaggttttgccatgttggccaggctggtctcacgctcctgacctcaggtgatccattcacctcagcctcccaaagtgctgggattacaggtgtgagccaccatgcccggcctartattttgtttttatcctacttattaccttgtattttgtacataataggcttcattctctcctctatggaggaagagtgacttttataacctccatggctggcactgactttttataaccttcagtgcttgtgttaccttgaagctgtggatcccctaactgatctcttactagaatcagaggaaaggaaaatattgtgttgcttaccaggtacaatttctctcagaatcccaaatcaaacagatattatttgctcagttacatttctcaagaa

SEQ ID NO: 121196 - DNA, 583 bp, Homo sapiens
ttaatattttgttgttccttttttgagacgaagtctcactcttgttgcccaggctggagtgcaatggcatgatctcagctcactgcaacctctgcctctggggttcaagcgattctcctgtctcagcctcctgagtagctggcattacaggcacaaaccaccatgcccagctaatttttgtatttttagtggagatgaggttttgccatgttggccaggctggtctcacgctcctgacctcaggtgatccattcacctcagcctcccaaagtgctgggattacaggtgtgagccaccatgcccggcctagtattttgtttttatcctacttattaccttgtattttgtacataataggcttcattctctcctctatggaggaagagtgacttttatarcctccatggctggcactgactttttataaccttcagtgcttgtgttaccttgaagctgtggatcccctaactgatctcttactagaatcagaggaaaggaaaatattgtgttgcttaccaggtacaatttctctcagaatcccaaatcaaacagatattatttgctcagttacatttctcaagaa

SEQ ID NO: 121197 - DNA, 581 bp, Homo sapiens
tgcatcagggcctatctctctctttagtgctagtaagaattagttttatatatctgggtgctccagtgttgggtatatatataattacaatcatcatatcttgttgctgaatcaatccctttatcatcatatagtgacctttgttgttatggttttcatcttgaaatctattttatccaatataagtgtagcgactcattgatttctattggcatraagtatctttttccagtcctctagtttcagtctatgtgtctttataggtgaattgtgttttttgtaagcaacagatattttggtcttgggatttttttttttccttttttcttccattcacctactctgtcttttgattggagagtttagtcaatttacattcaatgttattattcataagtagagacttattgcagctgttttgttatttgttttctgtctgttttgtggtcttctcctccttcttttcttccttcctttcttccttttagtgaagataattttccctggtggtatgctttaatttcttgcttttttgtatttgttttgtatgttttatgatttgagatatccatgaagtttgc

SEQ ID NO: 121198 - DNA, 586 bp, Homo sapiens
tcaataactttcattggttccccatttcctacaacataaagcttacactcccttaagtgtcagttaagacactctaaaatatggccccatgatacttccaaataatctctttgcttcatgcaagctagtgggttaatttttcccttacatggtgggagctttctccacttcctgattttgtgcctccttacctgaaatacaactgtcctaatcttaatttatttattttgttcccattcttcaagaattgggttaaaaccaaacttgttgatcactatggcttttgaggatctgttagatctctgaaatctggtgattcttctaatcacttggtagtaccagtgacaccttttgttttacattaaaatgtaaaaccttttatgctctgggaamagctagaaggcaggaattgtatcagattcatttttgtaatccagtaactagaacgcagttggccttcaatatgttggtattaatgaaaataaagcatgcatatggcaggcatatgtgaaaactcaatcattttgtggtagctgcctgaaacaatgtcttaaggagacatttgaagccaggcaacaatgaatgt

SEQ ID NO: 121199 - DNA, 588 bp, Homo sapiens
gagtggttaaacaaataacagcatagaaccatacccctcagtttcaaacctgacatttttcatttctggctgggtgaatttgagccagttgagggacttttccaggtttaagtcaatgaaatgtggtattaattattcttaacttttagggctttatgaaaattaaatgatgcttctgctcagtaaacaggaaataatttcctttagattaagtaaaagataaaaatttaacaataatgtatgtaattgggaataaacccaaacagatactcataccaaataccaagaatatgggttttatatcctggatcattctttagaatgaacattttttgacatgayacttgactatttaattatctgtctttgtgatatgattattcatatccttaactaaaacatctttaagatttaaaaacaatctcaaagcaaatgggtaaggttcatatcagaggataaataagtggtgttatggtttgaatgtgtcccccaaagtttatgtgctagaagcttgattccccaatgcagcattgttgggagatgggacatttaagtggtgataaggctatgaaggcttttgtgtattag

SEQ ID NO: 121200 - DNA, 524 bp, Homo sapiens
ttgaaacaaactcccattcttttgactccaatagaaatttctctctctcatcttatttgtggtcttycttttagagtaggtggagttttttataggtagaaaaatgatttgtggccaggtgcagtggctcacacctgtaatcccagcactttgggaggccaaggtgggtggatcacttgaggtcaggagttcgagaccagcgtggccaacatggcgaaaccacatctctactaaaaaaaaaaaaaaaaaaatacaaaaattagctgaacctggtggcacacacctgtaatcccagctgcttgggaggctgaggcaggagaattgcttgaacccgggagttagaggttacagtgtgctgagatcatgccattgcactccagcctaggtgacagagtgagactccgtctcaaaaaaaaaaaaaatcaccccctccccaaacttcatctccagtgcttggccaagtgccctgtgtgtaataatgtgtttttcattaaagtaaaaaaggatactaatccataaaataa

SEQ ID NO: 121201 - DNA, 524 bp, Homo sapiens
ttgaaacaaactcccattcttttgactccaatagaaatttctctctctcatcttatttgtggtctttcttttagagtaggtggagttttttataggtagaaaaatgatttgtggccaggtgcagtggctcacacctgtaatcccagcactttgggaggccraggtgggtggatcacttgaggtcaggagttcgagaccagcgtggccaacatggcgaaaccacatctctactaaaaaaaaaaaaaaaaaaatacaaaaattagctgaacctggtggcacacacctgtaatcccagctgcttgggaggctgaggcaggagaattgcttgaacccgggagttagaggttacagtgtgctgagatcatgccattgcactccagcctaggtgacagagtgagactccgtctcaaaaaaaaaaaaaatcaccccctccccaaacttcatctccagtgcttggccaagtgccctgtgtgtaataatgtgtttttcattaaagtaaaaaaggatactaatccataaaataa

SEQ ID NO: 121202 - DNA, 442 bp, Homo sapiens
tctactaaaaaaaaaaaaaaaaaaatacaaaaattagctgaacctggtggcacacacctgtaatcccagctgcttgggaggctgaggcaggagaattgcttgaacccgggagttagaggttacagtgtgctgagatcatgccattgcactccagcctaggtgacagagtgagactccgtctcaaaaaaaaaaaaaatcaccccctccccaaacttcatctccagtgcttggccaagtgccctgtgtrtaataatgtgtttttcattaaagtaaaaaaggatactaatccataaaataaaagcaaatagcatctttgaaaacagctgctttgatgacaagtaacatggaagatttgcactgcattgcactagggagatcattaggaagatactgaagatctagctaaatgacaattcagagaaattaaccacctacatggggc

SEQ ID NO: 121203 - DNA, 578 bp, Homo sapiens
tagttataaatcctaattaagttgatatgaccagttgtagaaatgaacactgcattggtcatgcaaaactttccttactttgatatgaatagatttgtgtatatagtagcaattttttatcctcacttctcccatttccttactgtctacaatacagtgtattaatagcagtcagtttcatattttagtacttacatttcagaatatcaaaaggggaatgtgactcaactagaagagaaatgaacatcagtccaaaatagttgaagaaaatttgtatactcttttggggagagggctagcatgtttttggttttgtgagggatagttgcattatgttaggtgaaagtgtgggtttgctactgtctttatttagaagttcagtatggctaaaagacgtgtaattggaagctagcttaaaaaggggtggactgtgatgggtttstattctctcaatagcaaatctggggctacgtttctaagaattcccttcactgaagagttccaagttactggaagaaacttggaacaaaaggagttctgcatgaattttgaaaggtctactgactcaacaggcagtc

SEQ ID NO: 121204 - DNA, 626 bp, Homo sapiens
cactgtgttgccagatgatttttcctaactgtaggttaatgtaacatgtggcaaacacatttgaggtagcctaggctaagttatgatgttcggtgggttaagtgtattaaatgcattttcaattwatgatatttttaacttaatatggttttatcaggccataacccactataagtcaagaagcatctctgtaaagaaatactgtctcttccacttctttaactgcgtgaaattatacaacacatattatcatctttccataaagagtgaatccattcttttaataatttgtatatactatagttccatactttggatataacatattttatttaaacatattcctactaataaacaccacttatgacagctctgatttgattttataacaatacgcagcaactatctacatttatttgtcttctaatatttctcctctatgattgattcttaaatgggaggttgcaggaccaaagttatgtatatgtgtgtgatttcaatggacacctaaacacactttaacttataaactaagtactcacaagctacagaagggagaagattgggccccactggtctgtaaagaaaataaaagccttcattacttccagaatcttaataccatg

SEQ ID NO: 121205 - DNA, 626 bp, Homo sapiens
cactgtgttgccagatgatttttcctaactgtaggttaatgtaacatgtggcaaacacatttgaggtagcctaggctaagttatgatgttcggtgggttaagtgtattaaatgcattttcaatttatgatatttttaacttaatatggttttatcaggccataacccactataagtcaagaagcatctctgtaaagaaataytgtctcttccacttctttaactgcgtgaaattatacaacacatattatcatctttccataaagagtgaatccattcttttaataatttgtatatactatagttccatactttggatataacatattttatttaaacatattcctactaataaacaccacttatgacagctctgatttgattttataacaatacgcagcaactatctacatttatttgtcttctaatatttctcctctatgattgattcttaaatgggaggttgcaggaccaaagttatgtatatgtgtgtgatttcaatggacacctaaacacactttaacttataaactaagtactcacaagctacagaagggagaagattgggccccactggtctgtaaagaaaataaaagccttcattacttccagaatcttaataccatg

SEQ ID NO: 121206 - DNA, 626 bp, Homo sapiens
cactgtgttgccagatgatttttcctaactgtaggttaatgtaacatgtggcaaacacatttgaggtagcctaggctaagttatgatgttcggtgggttaagtgtattaaatgcattttcaatttatgatatttttaacttaatatggttttatcaggccataacccactataagtcaagaagcatctctgtaaagaaatactgtctcttccacttctttaactgcgtgaaattatacaacacatattatcatctttccataaagagtgaatccattcttttaataatttgtatatactatagttccatactttggatataacatattttatttaaacatattcctactaataaacaccacttatgacagytctgatttgattttataacaatacgcagcaactatctacatttatttgtcttctaatatttctcctctatgattgattcttaaatgggaggttgcaggaccaaagttatgtatatgtgtgtgatttcaatggacacctaaacacactttaacttataaactaagtactcacaagctacagaagggagaagattgggccccactggtctgtaaagaaaataaaagccttcattacttccagaatcttaataccatg

SEQ ID NO: 121207 - DNA, 626 bp, Homo sapiens
cactgtgttgccagatgatttttcctaactgtaggttaatgtaacatgtggcaaacacatttgaggtagcctaggctaagttatgatgttcggtgggttaagtgtattaaatgcattttcaatttatgatatttttaacttaatatggttttatcaggccataacccactataagtcaagaagcatctctgtaaagaaatactgtctcttccacttctttaactgcgtgaaattatacaacacatattatcatctttccataaagagtgaatccattcttttaataatttgtatatactatagttccatactttggatataacatattttatttaaacatattcctactaataaacaccacttatgacagctctgatttgattttataacaatrcgcagcaactatctacatttatttgtcttctaatatttctcctctatgattgattcttaaatgggaggttgcaggaccaaagttatgtatatgtgtgtgatttcaatggacacctaaacacactttaacttataaactaagtactcacaagctacagaagggagaagattgggccccactggtctgtaaagaaaataaaagccttcattacttccagaatcttaataccatg

SEQ ID NO: 121208 - DNA, 627 bp, Homo sapiens
tcactctcatttatacaccgctttattattctcggtgtattttgctttgtaaagctgggatacctctgcacctttcccttgcccctccacagtctgagatggaataagagtgggacacaactcctcctttttcttttttcttctcctcatgatcacaaaacccacaccactaccttactgatgctacagctgctcacactgaggctttagtcgtacatacaaagaaaatagccattcttcaccgctctcgtagtgttttacttaaacattacttaaacatttccagaaagtggcctcaggagattcaaatatggaaccaagttgcagattgttccacatccaaaagatgtgctaaacaattcattggcagccttattgcctccagccagaccaccaggttgcccattacccaatatgaccgtggcaaccagatatgcaaacctgcmtgccctacccctgatgtcaattcctgcgctttgcctcataaaaaaagccctacatgctctttctggggagccagccagagaatccttccatctctgccatctccctcgcactcgagcacaagccccaaaataaagacttgtctgggaaatcttcttggcctcttgttaatttcagttacat

SEQ ID NO: 121209 - DNA, 660 bp, Homo sapiens
tattcataaatagtataacctaattaaatacaaaatcaagcaaatcaatataaaaccttgtatgtaatatggaggaaaagtaaaaggaaggaggaataagaggaaaataatgaaataatatgtgtttatatattgaatacttttgcatgattatattaggtacaatactaataataaataaacccacttataataaatacatttatttgtaagaatccagaagccttttcatataatagtctcaggaagttagtagaatttaaacaagaatgtgctagaataaaatctaatgttagattaactattagccaactagacttacttgagaattacacaagaaggaaagataatgctttgtgcaataggaaaaacatgccaggataaattttaaaatctagaaatgaagaaataaagtaacatgaagtctttgcaagcaagaggtattcaaaagtcatgcagtgtgtggcaaaagtytttaatggataaaacttctttacgcattttggatgtttaaaatacccagctactagtttccagtcatatgcttcattcattgtaacaacttaaatcatattccaatttctttactgcctcattctaaagccatacagtaattggtctaatttgtaatatgtaatttggggattactgtgacatgcc

SEQ ID NO: 121210 - DNA, 576 bp, Homo sapiens
aatgtgcagctatggttggaaacccttgcctaaagccagaaaataacaactttttatgaatgcaaatgaccacctcagtgctcttttgactacatttgcaaattgtgggacacatccacaaaccagcatcaagtcctctgcgacagtgctctgaattatttaagtcctcaaagtgattatgacacagcccctttagctgatccatggtccataggcttttaagaaccactgctctaggctggcgattttgcctcttccttcttgtcatccactaacgactgaggggtttaggatgcaccactgtgtgttgggaaagttacccattgtttactagattcactaacatttacattgcttctactttgggcttttatatacagaaatatataatcttcagtccttrtccacattttgccaaaagtcacaaaagctgcacatttattaataggagctattcctacagggattcaaaaaaaggaagaaatcatgggaagtttgtgagggcagagaaagcttcatggagtttgcacacattaagggtagctaggatgagaattaccagtgaaggaagcgagt

SEQ ID NO: 121211 - DNA, 612 bp, Homo sapiens
tgaagtagttggcccaaggtcacacagctggcaagaagcaaaactaaattagacccagatgtgcagagatcaaagccttgctcttgatgccaagcttttagaaggcaactctgatggctgaggcagagaaagtcatgtgggtaaccccagtcagaaaaggagaagaaagtggtcrttttcccaagtcttgtcttcagcccctgagtgggagagatctggccctctgagacagggagcagaggtgaacctctaccatctcttccccatcggcttgtgcgtcccatccctttcttggcccggattctctactttaattgtctttctctcccctactctcctccctcttcccgatctcgtccagtccccggggtctgcccaagatgccattcggtgggataattaaagttcccctcctgttagcatctcgctccggagccctcccagcagctgttcagctgcagcgggcctgggagggccgcacaaaagctttgctaatgattgtgtctacaagctgcgtgtgcgagcgagtgtgtgtatgtgagtatgtgtgtgagcgtgtgtgtagaccgccagcgtgtgaccggtcttaccccacccctttgggctgggggc

SEQ ID NO: 121212 - DNA, 623 bp, Homo sapiens
cgctaactctttagcctaaggatatcattatattataattctttctccctgaatctcatagtatcttcattctcccacattcatggagataaaatgtcaggctttgctctttcgtggatcagtcatgaccttctgtggaagcctataccatccattcctttgtaattactagtttaatctctaaacaacatggattctgagtagaaattcaccatttcttaatacaatattcagaatttytaaatttccctaagtcttgcatacaaagtgagggaaaaaattatgtcccatagacagtaactttttttctgtcacctttcagacagaaaggggcagaaagcttgcttgagaatcaagtttctaactctggttttgttatcacccaggaaatcacttaattatattgggctataaatttctgattttttcaattataaatttataatgcataatttttgaaaatgcttttggctcaaaacttatgttaactctatgactatgatataattggactgtctacatcactcaaatttaatttttaacttttattaagtgaacataagtccctagaaaaggtttttttatacaagttaactttaataaatccaaactcaaacatttac

SEQ ID NO: 121213 - DNA, 608 bp, Homo sapiens
ttttctttttttttttttttcttttttgagacagagtctcactctgtcccctcaactagggtgcagtggagtgatctcagctcactgcaaccactgcctacagggttcaagcgattctcctgtctcagcctctagagtagctgggattacaggtgtgtgccaccacgcccggctaatttttgtatttttagtagagaaggggtttcatcatgttggccaggctggtccagaactcccgacctcaggtgatccacctacctcggcctcccaaagtgctgggattacaggcttgagccacagcaccacgccttaagtatttcttttaattaacttatttttttggcacttaggtcttgcacctctgacctcttccttttccmatcagttccccttttcatctgctataatgaactttcatattatctttctggtcattcaaatctcttgcttaaaaccatttaagagcttgccattaagtagagaagaatgttcacattgcttagtaagacacaaaggtcttcaaagatttagattctgcttgaattcttgcctcatttcctgccacaggtaacttcaattccaacttcccttcaatatatctgcaatat

SEQ ID NO: 121214 - DNA, 535 bp, Homo sapiens
accctcttagtcattcttcacttacttgaagcctctgctaagctccagcaataatttaatcaacttctcctatatcccatgacttttactgaaatcatcatattgtattgatgatttccccaagctgtgtgtcccgtctttagaatgccaagcatgtgtttatagctcaagtaytgatctgctcaggtcccaggccacttgtccctgggtggccagcagccttgtctcttctaagtgctgctacaaaaatggatcattggttcccactaaaggggtattaaatgatctaggaatttacttaacttaatatttagaaatgagtctactctctgatctgtgttgtaataatttgtaaaattaattctaattgaggctcaaacaaaattgtgatgttctttataactattttacattatttattttcttcattttcttgtaaactcacttattttaaaatgatacaatttttgaacaaagtcttaaagtataactaatctatttgttgcacctaaaataaattttttaattaaaataa

SEQ ID NO: 121215 - DNA, 611 bp, Homo sapiens
ggactccaaaggagctaaaacagtgaagaggcaggagcgtggtgggaggtaaggttatagatgtaaccaggttccagatgtaaagttggccataagttcttctgggaaaatattatcctactttaatgcttcctcatctcttcaataacattttcattcttattcattcactgaaaactgcttgttgaatgactatcaggcattgctttaggttttgtggatacagccttaaagaaaaaaaaaaagaaaacagacaaagatccctgcccttatggaatttatattccagtagttgaatagagaccataaccagtaagtaagcaagtaagcaaaataaataattttttatccaattttccctaaattctaactcttggactacttattttttacctctatagagtgtaagctcctcaaggtcatggatcatattttagctatatatttttctataggctgctgcacatgtcttgtatagggtggcagagaatagaatactgggagaagcaccagmgttggatacataatgccttccatatggtcatgactctactccagttggctatttggcctagaaccagctatttgtcctagaaccgattcagaaatta

SEQ ID NO: 121216 - DNA, 318 bp, Homo sapiens
gaatgagcatgcccctagattttcaacactgtgctcccaatcactgcagaatgktttactctcagcttatttgatgttatttggctacacagactacaaagtggtcattttaaacaaactcatgtaagtttttttgaaactataccatggaatatttaaaataaaaactagattagtatgaagtatatcattattttttaaatatttatatttctcagtggatattttgccatgtaattataaagaagggaaatgcatttgaaatcctcattatttgccagaatcccttagtacagtatggaatactacaagaatctc

SEQ ID NO: 121217 - DNA, 318 bp, Homo sapiens
gaatgagcatgcccctagattttcaacactgtgctcccaatcactgcagaatgttttactctcagcttatttgatgttatttggctacacagactacaaagtggtcattttaaacaaactcatgtaagtttttttgaaactataccatggaatatttaaaataaaaactagattagtatgaagtatatcattattttttaaatatttatatttctcagtggatattttgccatrtaattataaagaagggaaatgcatttgaaatcctcattatttgccagaatcccttagtacagtatggaatactacaagaatctc

SEQ ID NO: 121218 - DNA, 318 bp, Homo sapiens
gaatgagcatgcccctagattttcaacactgtgctcccaatcactgcagaatgttttactctcagcttatttgatgttatttggctacacagactacaaagtggtcattttaaacaaactcatgtaagtttttttgaaactataccatggaatatttaaaataaaaactagattagtatgaagtatatcattattttttaaatatttatatttctcagtggatattttgccatgtaattataaagaagggaaatgcatttgaaaycctcattatttgccagaatcccttagtacagtatggaatactacaagaatctc

SEQ ID NO: 121219 - DNA, 621 bp, Homo sapiens
aagggttttgccaaaatccctgtttccccagtagggctgacagccatacacatccatctgaataagctggggaatttgggggsggtgagacactcaaacatgtatggctctgtttgatgtaggcacacacatccccatcttgtggagcagaggtacctgaattcaactgataggatttggacaaatttcgcagtacaggaagaaagcaaatatgatgttgtcagtacagccaactttcatccaacttaatgtaatattgctgtgacttccactgctaaatgaatatttggctttggtttgcataattttactatgaatgctcaaaatcccagaggggattatcctgatctggaaaggttgcatggagaatagtactaataatatcagcacatcacatcccaaatgagctttgagatataggactctgtgatggatgattttgctgattggaacctatgacaaagtgaggcaaatctggaagcactcattaatttcatactgcttaaacatggctacaaggtatacaccaactgaaaagtacctattagtgttctacttaagtagaactgaagtagaagtagtagttctacttctactgaagtagaactgaaggagaacgct

SEQ ID NO: 121220 - DNA, 569 bp, Homo sapiens
atatagagagacagccacctggcatttgcaagtagaccttgctggattatgagatttgattagcgggcttatgctgggtccctaggccatggctgagatcaatgctgcagattaacctcatcttgctgattatagtcctatttgttttaaacttagttactgtatgagaaaaaatgaatagttatggtcccagcttttgttggtcagatwagagtggtcaacagattgatataatcatggaaaacttcatcaaaagtcaaatgagtgttgaaactaaggatggatattattaagagacaattttccatgtttgtttttatctttttggtgcatctagcaagttaggcactaattgctctttgttaaggactatctttccaatgttgtttgtaagtataacagctttggaagatgaagatagtgttgtttcccagtggagtgaaagaaaaacatgcttgttgaccattatgaagattctggttccctaagcccagggctgcctgagagcctgtgcagcaggtatccatctgtgcccatccatgtcattcaggtggggtgagaggaagtca

SEQ ID NO: 121221 - DNA, 593 bp, Homo sapiens
tattatgtattgacagaaaacatcaatatggatgatgttagacagtgggaggaacgcatttttgtgtgctagttttgtctttataataacagcattgatctgtatttcagctaaccsgttttcagcaactcacagctaatttgcccatatctacattggtatgagcaataatatggtgaatgtcagatgggatctgcaattcataggaacagctctgcagcctaatgatttttgtcaaatgtgaattaattattaatctgatttgtccttctttgttcagagctctgcaaatgttagtaaatcagggtctgctcaaacttttagtagaattgaggcgataataagcaggtactttttgatttgcttactttcctcttgcctgatgaataaaatattcctgtacttttaaggccttgggattaccatttgctcaattttaaaattacttactcaaaatgaattgtttgtttagtgagttttatattttatactcctttttgttagaaactttcagcattcttctttaaataatacgaaagttttcatcctattctcaggttaacaaatcatggtagtgctgaagaacaaagaag

SEQ ID NO: 121222 - DNA, 593 bp, Homo sapiens
tattatgtattgacagaaaacatcaatatggatgatgttagacagtgggaggaacgcatttttgtgtgctagttttgtctttataataacagcattgatctgtatttcagctaaccggttttcagcaactcacagctaatttgcccatatctacattggtatgagcaataatatggtgaatgtcagatgggatctgcaattcataggaacagctctgcagcctaatgatttttgtcaaatgtgaattaattattaatctgatttgtccttctttgttcagagctctgcaaatgttagtaaatcagggtctgctcaaacttttagtagaattgaggcgataataagcaggtactttttgatttgcttactttcctcttgcctgatgaataaaatattcctgtacttttaaggccttgggattaccatttsctcaattttaaaattacttactcaaaatgaattgtttgtttagtgagttttatattttatactcctttttgttagaaactttcagcattcttctttaaataatacgaaagttttcatcctattctcaggttaacaaatcatggtagtgctgaagaacaaagaag

SEQ ID NO: 121223 - DNA, 580 bp, Homo sapiens
ctactgattcaggatctctgagatggtggcctggatgtctccatattaaatgtatctatcattttcccagttgattcttatagtgacaagtcatggacatgcaaaagccccattgtttcagattgactgagagctctacctcggattgtgttcgacaaactggataaaatttactggaatggatagcacaatgggtaatgctgtgttttattctttttttttttttctttaactaccatctcaagtcttttggattacctcactcttctggcatcacagaatgacagatgaacttctctaacttgtgttcagtgattttcrccttaaagcatatattttaaagaaaatgcattttttattcctaaattattagtttttgttattttccaggataatacccctaagtcagaataaaataatatttcaaagcctgcatattgttatcatcaatgtcattgcttatgggatacacatttgaaataagtacaagtcacatagaattagagagaaatcagttaaacaccaaaaaaacacagggaaataggattgagatgttgaagtgttttgtgatggtaagaga

SEQ ID NO: 121224 - DNA, 434 bp, Homo sapiens
cacttttccaaatttgatgagaattataaacctacgtatacartaaatcccaagcacacacacacaaagaaataaactacaccaaggtacattacaattaaattactcaaaactacggataaagaaaatatcttaagcatccagagacaagggacacattatgaacacagggaaaacagtcagagttagattaccagcacatttttttctggaaacaaggaaactttaatgtattgaaaaataaaaattaacaacctaggcttttaagctgaggaaaatatcttgcaaaattaaaggtaaagtaaaaacttttaaagataattcatcactaacagacttgcatgacaagaaatgctaacagaaatctttcaagtggaaggaaaatgacaccaaatgaaaatgtgaatctacccccaaaaataaagagcaactga

SEQ ID NO: 121225 - DNA, 652 bp, Homo sapiens
cacatattaatttgattaaaatagaccaattaaatgaatggaaaataaactttcctcctaattttttgggaataaactatttcaaacttagtcgtcaatcaagtatgagaaactggtgcatgctgacttagttataaatttgcttattttattgataccatatagcatttaactttatgttctcactgaattttaatcctattaaaattctcctggcagttctattcagagagaaaagttagaatttctacaaaacttaaaattatttatagatgagtatctcaatatatttttgttgagatatatctaggaggatagtttatgtttagttgttgaaatacatcaatattgagctcttggtgtgtctcaacmaaatagccacataggggagctctaacccagcaaaagaataaatcacctgctaaacaggataccaaaacaatatttttttcttttcaaaatgaaatccaaagagagttttagccatttttacattattccaattatattctttacatgcctctcagaaatgtttacctgaaaattacgtgtcacattcaaaatgatttacagcaaaagcctttttccccctgctaacctgtgtctattctacattagcatgaaattgcattgcaatagctagagattttag

SEQ ID NO: 121226 - DNA, 652 bp, Homo sapiens
cacatattaatttgattaaaatagaccaattaaatgaatggaaaataaactttcctcctaattttttgggaataaactatttcaaacttagtcgtcaatcaagtatgagaaactggtgcatgctgacttagttataaatttgcttattttattgataccatatagcatttaactttatgttctcactgaattttaatcctattaaaattctcctggcagttctattcagagagaaaagttagaatttctacaaaacttaaaattatttatagatgagtatctcaatatatttttgttgagatatatctaggaggatagtttatgtttagttgttgaaatacatcaatattgagctcttggtgtgtctcaaccaaatagccacataggggagctctaacccagcaaaagaataaatcacctgctaaacaggataccaaaacaatatttttttcttttcaaaatgaaatccaaagagagttttagccatttttacattattccaattatattctttacatgcctctcagaaatgtttacctgaaaattacgtgtcacattcaaaatgatttacagcaaaagcctttttccccctgctaacctgtgtctattctayattagcatgaaattgcattgcaatagctagagattttag

SEQ ID NO: 121227 - DNA, 566 bp, Homo sapiens
gcacatttgggcataaacatgataataatagacacagtggtctactagaggtgggagggagggggtgtaggttgaaaaagttcctattgggtactatgttcactacctgagtaacaagatccataccccaaacctcagcacaaggcaatattcccatggaaaaaaactgcacgtgtaccccctatatctaaactgaaagttgaaatttagaaaaagctgactgtcttactccyagttttctttcagtatttgcttcaggatctttttctccacgaatatttccctgatcctttggtgcgtttgtgttaattcttctaaactttcaaaaatcctggactgacttctaccaaatcacaaataaattacatatacagttttatttgtctgcatcccccacaaaactttaaactttatgtgggtaagaattgcatctttgatttctgtttcctactcacttaggaatacaacttggaacatataagtctcagtgtctgtgatgagtatataaaggaatacttaggtagttatattgaatcatgtatgttatagaaaaaatagcaagtaat

SEQ ID NO: 121228 - DNA, 618 bp, Homo sapiens
gttattatatattttttaagccttgcaatacattgaaattgaattggtaattaagaatataaagtgcatgacatcttattgacctgtttagtatatcctacatgttcagaacagtgcatcacatttgacagatattcattgaataatcattgaatggttgatcttaatttactataataggaaaaatataaggatgtaatattgagtaatattggattgaggcaraaagggaaactaaaatttggagaagataattcaaaagttggagtagagaaatgagagatgtgagctggaaagtgcacactccaataaactcaaattctcattcagagttttcaaaaagcattcagtgaagagatcacaggggagcactccacatgacagaaaccatgccatataaacagccatcaaatgggatgttttactgaaagaaaataagttttcagtatttatgggtactgaaaaaaattgaactttaatatttcacattgactatacaaaatacagtcattttgtatttggcataccttctgggtacaccatattttctttacttaaatctcttaattgtgttaccaaattacttttcacagatttaaggactttgaaagaattgga

SEQ ID NO: 121229 - DNA, 615 bp, Homo sapiens
cccttcttaataacagctctggtaacattyctgtaaaacaaatcagaacaaaaacttcttatggtaactatatttgaagggccttgaagacaaaaaacaacttattcttggagaattttttcatgtttttataaaatttctcattgtacaaatcaggtgggtgtaaagagcccttataagtattttcttcttactttcttaatcctaacttaattactgtttcttgaaagaaagatattatgccagagaatgcgtaacacttgcttatgaccctaagtggggtttgcagatggtcagaaataaaagaatggctcccaatgcccttgaaaatgggagaaatacagctgtgtaaagccatcacaggttgttattttgtgatgattatttgtacttcccccttttggaaaattaagttataaaaacaaacacctgtttcaataattcacagtgcatcattaattcaaatgacttcaagggaaaagctatgttcattcttataaactgaatttcctaatgataacaattcactcagtaacaaaactaaaaaatcgttattaaaatataattctcaggtcgcatagcctgataatagtcaatagcattacaatgaaaatg

SEQ ID NO: 121230 - DNA, 615 bp, Homo sapiens
cccttcttaataacagctctggtaacattcctgtaaaacaaatcagaacaaaaacttcttatggtaactatatttgaagggccttgaagacaaaaaacaacttattcttggagaattttttcatgtttttataaaatttctcattgtacaaatcaggtgggtgtaaagagcccttataagtattttcttcttactttcttaatcctaacttaattactgtttcttgaaagaaagatattatgccagagaatgcgtaacacttgcttatgaccctaagtggggtttgcagatggtcagaaataaaagaatggctcccaatgcccttgaaaatgggagaaatacagctgtgtaaagccatcacaggttgttattttgtgatgattatttgtacttcccccttttggaaaattaagttataaaaacaaacacctgtttcaataattcacagtgcatcattaattcaaatgacttcaagggaaaagctatgttcattcttataaactgaatttcctaatgataacaattcactcagtaacaaaactaaaaaatcrttattaaaatataattctcaggtcgcatagcctgataatagtcaatagcattacaatgaaaatg

SEQ ID NO: 121231 - DNA, 622 bp, Homo sapiens
cttaagggtactgtgatccgcactccctcaatctcaggagttttaatagatggagagaaagcaaacctcagtgtttatgcactgagggtcattatgcaatgacccttatatgtgtgggtcattggttctaagacctgtatgcatcaacactagaatgagagggttgataaaatgtgaaaatatatgcatgtttagcttatgcatcacaggagggcctatataattttagaattagggtatttgagtgactgagctatcaagatagatggtggttgccagacgaagccatgattaaaagtaagacccaagagttggttcaattattgttaatttaaaatctagttgtggccattagattgggatgactggggtgcggtggaagacaaatgtgttagagaggagaaagttgcacagaactatggagaacagatcatctttttatactaaaagatcttgagtaatgaaaatgttaccaaaacaccaggggcagtctaggtcctgctgatcactgtgcataaagccaattactgagatgaagagtattgccaaggamgaaggccttaattgggtgctgcttctaaggagatgggagctcagtctcaaatccatctccctgaccaac

SEQ ID NO: 121232 - DNA, 546 bp, Homo sapiens
ctgtttgaaatactgtaaccatcgaatatggtcaaatctatcctgagttttacagaaaccacagcaaatgacttggcaatccataaatccacactcgacaggacttaagcaggtttcataaatgatttgcaatgaagaaggatttcactataattgttctccatagccataaaaagcattatagattagaaaaaaatgacaaggcaatattaaagaaaaatgttttcttagcaacatttttttttaaaaaagtgtggraagaaaaataaaacctttaatgagctaaaataagtgtgttatatctatataaggaaagaaggggtcttctctatcagttaaggtatattccttagttttttgagcaaaacccaaaagaaatccagtggaaacccaaaataagtccagcatgctcacaaaatcaatacttctaaagctttggggtaaaaagcatctcttcggtgtgattattaaaaatatttcttcacccctactttcagagatttgactccacgctaagctctccaagaaatgttataagtgggacct

SEQ ID NO: 121233 - DNA, 581 bp, Homo sapiens
agtcttatgggggacaaaaattggagaacaggtcctcaggctttgattgtctacaccagctttcttaaagatagctttctattctcaayttcagacaacagtgtgattatctgtccccactttacccgcctgctggaaactgaaccatgaatacctgagacagttctcagttaatttagtaagtttattttgccaagtttgaagatgcgcacccgtgacacagcctcagggggttctgactacatgtgcccaaggtggccagagcagtttggttttatacattttagggagacatgagacatcaatcaacacatgtagcatgaacattggttcagtctggaaaggtgggacaactcaaagcaaaggcaggacactcaaagaggggagggggcttccaagtcataggtagataagagacaaatatttgcatgcttttgagtttctgattagcctctccaaaggaggcaatcagatatgccttaatctcagagagcagaggtgtgactttgaatagaatgggaggcaggtttgctttaagcagttcccagcttgacttttcccattagcttagctatttgggg

SEQ ID NO: 121234 - DNA, 581 bp, Homo sapiens
agtcttatgggggacaaaaattggagaacaggtcctcaggctttgattgtctacaccagctttcttaaagatagctttctattctcaacttcagacaacagtgtgattatctgtccccactttacccgcctgctggaaactgaaccatgaatacctgagacagttctcagttaatttagtaastttattttgccaagtttgaagatgcgcacccgtgacacagcctcagggggttctgactacatgtgcccaaggtggccagagcagtttggttttatacattttagggagacatgagacatcaatcaacacatgtagcatgaacattggttcagtctggaaaggtgggacaactcaaagcaaaggcaggacactcaaagaggggagggggcttccaagtcataggtagataagagacaaatatttgcatgcttttgagtttctgattagcctctccaaaggaggcaatcagatatgccttaatctcagagagcagaggtgtgactttgaatagaatgggaggcaggtttgctttaagcagttcccagcttgacttttcccattagcttagctatttgggg

SEQ ID NO: 121235 - DNA, 614 bp, Homo sapiens
atattccatgtaatcaaaccatttccttgagcttctctaatttcctaaaataaaaacagcaaaagaaaaagaagagaattggtgtgggaacaccagtgcagtataaatgccctccttctcttatgtcacggatctcatttcctttttactccatagggtagttgcatgttctgaatgttacatgcttctctaatctttgaagctttttgcrtatgtggctttgcttagagtaccattctacagagtctgccatccagtacctgtacacatcatagtcttccttcaaaaccaatgtggattttaaatcatttgggaaaatacatttgattcctactctctggcttctaatcagaataaactacctctctttttttgtgtcatcttggcctcttgtagttatattcacaagaatatttataatattgtaaataagaccttctttgtctatttacttttgtttcccctgctagactatatgctccgtgagatagtaaatctgttattcatgtatctatctccagtttcttgagcatatctgctgaatcaaaaattatatggacagatagaaaaattaattataatccataaattgttttccttttgatgtactcaat

SEQ ID NO: 121236 - DNA, 584 bp, Homo sapiens
taacatgtaaacatcctctcatttgttattctgaaactctgttctaagagctgctcttcatatttgcttcccttttgataatccctgggataatagactcattgacagttgtgctcatgtgacatttaaacatatactgcctcagatttatttttatgtgtgcagttgcttgtgctagattgcagttcctttgagatctctttaagaattaaaacagtagcttcycaattgtttgcaggagtagatataaataataaatgacaaaaaggtattaaaacctgccttatactactcattaaagtgatgcttttttaaatattcccttctctgtttccatgatgagagaatgaatgaatgaatcaggcagaaggaaactgactataggccactgagtcgtagtaaactagaaaggtctatgggaaactgaactctttctttctcataaatgaacagagtctattaaatatgacaaagtcatttcaaatccatttataaaactcctaagaaggtgaagttgtagcacatctattttcatttctaatatggggcatgttttctcagcaatggtctaattactcaatatg

SEQ ID NO: 121237 - DNA, 575 bp, Homo sapiens
attttgttaaaatgccagttcttcataactttatctaaagatccagcacatccttatcatactctcagcaagcttatttgtagatattgacaaagtgggccttcaattgatatggaaaggcaaaagacctagaacaaccaacacaattctgcaatggatgtcaatattagaatactcatatgatctgattttaggacttactataaagccagcttcatcgagatttcatggtgttgtcaaaagtataaacttgttggttactggaatggaatagaaaacccagaaacagactcctaccaatataatatactaatttttgacaaaggcacaaaggcaaatcaatgaaaaaacaactatgtacatatgatgctggaaaaattggccatccatatgcaaaaaaacataactagagagaaactttatgatttacaaaaagaaaactaaaatggatcatagacttamtgtatataatatttctatagggaaacatacaagaaaattcgtgcgactttgggtttgctaataaatttttgcttataatattgaaagcaaatcaatgaaagaaaaatttggta

SEQ ID NO: 121238 - DNA, 605 bp, Homo sapiens
tgtgatattaattttgtgatgtgataagctatgacctaaagaaagtattcctttcccacatcaacataaattcccagttcctaagttttaatcaagatttttatcctataggacctaatcagtacgtaggtacatagacatagatagayagatagatagatagatagatagatagatagatagatagatagacagatagatagaaagatacatacatacatacatacgtacatacatacatagtatagagagatagcttttagcctgggggtagttctagaacaatgatttgaaagctgcttgacttctcatcaggaaaaaatggagccataagacagtggaacaagatctttaaagtgctgaaagataaaaactgcaaacccagaagaacactgtgtccaataaaaatattctttaaaaattaaagcaaaataaagatattttcatataaaagtaaacaagatcatttttcagcagatttacactactagaaattctaaaagtagcggttttgtttttgttttataattaatttgtacaatcattatatgtatatgtaaaaaaagaaatgataccagatggaaactcagatctttagaaagagg

SEQ ID NO: 121239 - DNA, 576 bp, Homo sapiens
ttatgggaaaaaaccctcagaagcagaaagtcaaatatcacatgttttcactttcacaagtgagagctaaacaatgggcacacagggacatagagtagaagaatagacactggagactacgaaaggcaggggtgggactgaggggtgagaaattgcctgtcgggtacaatgtatgctatttgggtagtgagtacactaaaagcccagacttcaccactgtacaatctatgcayctaagaaatctgcacttgtactccctaaatatataaaaatttgtaacaacttttaaaaaagaataattggcattgttacagagcctggttagacaatcctcacagtaaagttctttttgcttcctttgaaaacaaataataagagaaagtgtcaggagtattttataaataaattatgggcccacagtgtattggctctgttccagggaatgacacaatcaataatgatgtgtcgttgtttagtgcattaatccaaattctcatgaagtagcagtcaggctgtggctccaatgctgaacttgttaaagaaggtataggaaaaatttaggatgaatttttgatc

SEQ ID NO: 121240 - DNA, 625 bp, Homo sapiens
aaccagtggcaatctcacctcgagaggccaattaatccatgtgagggaataatgaactcgacagtgagggagcccaggtacaggctatctccccacttttcaatgacagacactggagcactctttccagctctcatttatcagtctcagtggtgaacacaagccatcttgtgccactgcattcctcaaactgcatttattgtctagaggcacatggtgatcgtgacagggaagactagcccaagttcatctgaacagctgtggttcctataccctaaattctcagcatctaaagatttttaccttttatggaatcccctttgtctccttctaaaagtactatttgatctttttattgcattaaagttactggtgctttaagacttggtccatctcatttgagatacctggaaacactctagggagaacaaaggtgaaagatctgggcaaaggtcagtaaaatattctacccaactacaggccagaggacagcttcagttttgtctctccaacatcaygggctggaataaacagaggaatggttctataattctagctcagagacttccagttctagtaatatggcgagctatatatgcaaaccatctcccctactggggaaaaa

SEQ ID NO: 121241 - DNA, 625 bp, Homo sapiens
aaccagtggcaatctcacctcgagaggccaattaatccatgtgagggaataatgaactcgacagtgagggagcccaggtacaggctatctccccacttttcaatgacagacactggagcactctttccagctctcatttatcagtctcagtggtgaacacaagccatcttgtgccactgcattcctcaaactgcatttattgtctagaggcacatggtgatcgtgacagggaagactagcccaagttcatctgaacagctgtggttcctataccctaaattctcagcatctaaagatttttaccttttatggaatcccctttgtctccttctaaaagtactatttgatctttttattgcattaaagttactggtgctttaagacttggtccatctcatttgagatacctggaaacactctagggagaacaaaggtgaaagatctgggcaaaggtcagtaaaatattctacccaactacaggccagaggacagcttcagttttgtctctccaacatcatgggctggaataaacagaggaatggttctataattctagckcagagacttccagttctagtaatatggcgagctatatatgcaaaccatctcccctactggggaaaaa

SEQ ID NO: 121242 - DNA, 508 bp, Homo sapiens
aaaaacaaaaatgaaacaaaaagtctcaaggccagaaaggggagaccaagagaagctagactttcctagagtcaaggaaaccagttgtaagggatttacctatgaagtcagaacagttttgactgcctgtcaatgggggtgtccaaggagaaagaccattgcttctgaaaagactaaaagagaaccaaagcatggagcagcagctgtctctgggagacaaaaggaagaatcttcacggaggctgggactgatggatggaccataacctctgatttggtgatacaactccaggagtgggacctgtatactcatagagggtgaggaygagtgtgtttctgaatgtttgaaatatgtttaactccacaagggtagaccagggtacacacctttaaggagcatacatactcttagtatagtgttctatgcagatggcatcccttagtgaccttttccagagacaatgcaggtggtgcagttgtacaggaccaaggccttgtccactgcatat

SEQ ID NO: 121243 - DNA, 508 bp, Homo sapiens
aaaaacaaaaatgaaacaaaaagtctcaaggccagaaaggggagaccaagagaagctagactttcctagagtcaaggaaaccagttgtaagggatttacctatgaagtcagaacagttttgactgcctgtcaatgggggtgtccaaggagaaagaccattgcttctgaaaagactaaaagagaaccaaagcatggagcagcagctgtctctgggagacaaaaggaagaatcttcacggaggctgggactgatggatggaccataacctctgatttggtgatacaactccaggagtgggacctgtatactcatagagggtgaggatgagtgtgtttctgaatgtttgaratatgtttaactccacaagggtagaccagggtacacacctttaaggagcatacatactcttagtatagtgttctatgcagatggcatcccttagtgaccttttccagagacaatgcaggtggtgcagttgtacaggaccaaggccttgtccactgcatat

SEQ ID NO: 121244 - DNA, 579 bp, Homo sapiens
tacctactccctgcactcagtgaaatgaacttctttccttataccagatggggaaataaattaacttccaaacaaatggacagcctaaaytagcaatcagtaaactttttctacaaaaggaggagattactaatctggctttacaggcacacaatctctgctgcaaccactcaactccaaccttgtagtatgtaagcagccacagacaatacataaacagaggcatgctgcattccaataaatattaacaaaattaggcaggggcatatttggcccacaagttctaatcaacccctgctctaaactaacatctttatacaaatccaagtgatgtttttgttcaatggaatttattttcaaaatggagacactggttttcaaaatcaaaatttaggaaaaaaggtaaatcacatagttgagttattttgtttctcagctaaaacagtattttctgaaataccagtgatgctaagtgcttatactaatacatgtgaacctagccatctgatgacagatgaactttaattttcactcaagattatactattttaaaaaataaaatatgaaatagcagttaga

SEQ ID NO: 121245 - DNA, 578 bp, Homo sapiens
taaatatgcaaattagtaaattataacagacagcaattgatgaatcaaaaagaaatgtccgaacagtatactgtctataagacactcacatcaaatatgacactagaagtagactcaatataaaagaaaagaaaatggcatagtatgcaaaattaataaaatgaatcagtagcaaatactaatatcagataaagtagactacaaagccaagaatgttaccagtgacagaaatgtacattacataatgaagaaagtcatttcggaaagaagacagagcagttctaagtgcgtagacaccaagcaacagagcratacagtgcatgtagcagaaactggtgtgaaatgaaggaggccttcattttctatttgggaagcaaatgctctctaagtatagcaggacattctgggatattttttaagcaaagtacccccgtggtcatattttttttttgtagcagagtaacccgttccctcttcaaaccacatccctctccattgtcccagctcctctctgactgcaagcctcctcttttattttaaggacctttgtgatcatattggtttcatctagataactg

SEQ ID NO: 121246 - DNA, 488 bp, Homo sapiens
aacaatccaggaagacaaatcagagtgttttgctagtggagaagtgctgcwacacctaaaccctattaatgccagatctttgcagtgatttccactcataaagttgggttgactccttgccttgttctcctatgtgtctgtgtgacttcatgctgaggggatgtgacatcacagagggagaagtgcacttgtgtacagaaacatggcttaggagattggctttggaggtggctgcaatgaaatatacgttttgaagaagttccctatgaaatgtcttataaactgtttcttctggccaggtgctcgggctcacacctgtaatctcagcactttcagtgaccaaggagaaaggatcaggatcatgtaaggccaagaatttgatgcaagcctgggcaacatagggagaccccatgatctacaacacacacacacacacacacacacacacacacacaatttgtgaacaatgtcatcacaaagtgattatt

SEQ ID NO: 121247 - DNA, 488 bp, Homo sapiens
aacaatccaggaagacaaatcagagtgttttgctagtggagaagtgctgcaacacctaaaccctattaatgccagatctttgcagtgatttccactcataaagttgggttgactccttgccttgttctcctatgtgtctgtgtgacttcatgctgaggggatgtgacatcacagagggagaagtgcacttgtgtacagaaacatggcttaggagattggctttggakgtggctgcaatgaaatatacgttttgaagaagttccctatgaaatgtcttataaactgtttcttctggccaggtgctcgggctcacacctgtaatctcagcactttcagtgaccaaggagaaaggatcaggatcatgtaaggccaagaatttgatgcaagcctgggcaacatagggagaccccatgatctacaacacacacacacacacacacacacacacacacacaatttgtgaacaatgtcatcacaaagtgattatt

SEQ ID NO: 121248 - DNA, 488 bp, Homo sapiens
aacaatccaggaagacaaatcagagtgttttgctagtggagaagtgctgcaacacctaaaccctattaatgccagatctttgcagtgatttccactcataaagttgggttgactccttgccttgttctcctatgtgtctgtgtgacttcatgctgaggggatgtgacatcacagagggagaagtgcacttgtgtacagaaacatggcttaggagattggctttggaggtggctgcaatgaaatatacgttttgaagaagttccctatgaaatgtcttataaactgtttcttctggccaggtgctcgggctcacacctgtaatctsagcactttcagtgaccaaggagaaaggatcaggatcatgtaaggccaagaatttgatgcaagcctgggcaacatagggagaccccatgatctacaacacacacacacacacacacacacacacacacacaatttgtgaacaatgtcatcacaaagtgattatt

SEQ ID NO: 121249 - DNA, 650 bp, Homo sapiens
agtacaaatttttaagaaaatgtttactccatttaattatagaggtgtttgatcattccatggacaaataattatgttttcaacctttacaatattgaaaatatttgcaaatgtaaatttgcattaataagaaaataaagctggatgygttttcaacatgtggctttaaatataatttatttaaatggcctcatgggggaaaatcattttaacttacataaattctcattttgtctctcttgtttcttatagagttgcccaataagaagtcctcccatgagatttggaagtccgaaaaggatgactcaatattctccattggtacctaagacagacacagggacagacatgaggactagagaaacacctgaaaagatgctgtaggaagctgagagcatcaacacccccacccctaagcttccagacaggactgaggaccatatggttagaaagcccatacttcagaggaagatgcattctgttgcctgagggaggatcagagattcctgcttctaatatcagctttcatgactactatatccttggctttgaaaggttgtagtgggaaacttaatcttaggaatttggtcattcttgtcatacccaacagagcaaagaaaccagtggggaaacgcactcagggtgcaaaa

SEQ ID NO: 121250 - DNA, 650 bp, Homo sapiens
agtacaaatttttaagaaaatgtttactccatttaattatagaggtgtttgatcattccatggacaaataattatgttttcaacctttacaatattgaaaatatttgcaaatgtaaatttgcattaataagaaaataaagctggatgtgttttcaacatgtggctttaaatataatttatttaaatggcctcatgggggaaaatcattttaacttacataaattctcattttgtctctcttgtttcttatagagttgcccaataagaagtcctcccatgagatttggaagtccgaaaaggatgactcaatattctccattggtacctaagacagacacagggacagacatgaggactagagaaacacctgaaaagatgctgtaggaagctgagagcatcarcacccccacccctaagcttccagacaggactgaggaccatatggttagaaagcccatacttcagaggaagatgcattctgttgcctgagggaggatcagagattcctgcttctaatatcagctttcatgactactatatccttggctttgaaaggttgtagtgggaaacttaatcttaggaatttggtcattcttgtcatacccaacagagcaaagaaaccagtggggaaacgcactcagggtgcaaaa

SEQ ID NO: 121251 - DNA, 550 bp, Homo sapiens
tccttgccttgttctccttatgggacttcatgctgagggcatgtggcatcacagagggagcagtgcacttgggtgcagaaatatagcttagtagattgtctggccttagaggtggctgcaatggaatacacattttcaaggaarttccctgttaaacctcctggtaaactgatagttaagaccaggtgcggggacttatccccgttatcctagatgtttgcaagatcaagtagggagggtagcagaaatctaggagttcaagaccagcttggaaaacatagggagaccccctcatctctagaaaaaaaacactgtttgttaagatgtggtgtgaacaatggcatctctaagtgattatttattaacatttgctgagaaaattagaaaatagaacgatgccttctgatccaataatatcataataaagatgtgaagtttttaaactatggtaagtatagagaacataaaattgcccatcttagccattttcaagtgtacaggacaatggcattaagtatagtcacattgttgggctagcatcagtaatatc

SEQ ID NO: 121252 - DNA, 457 bp, Homo sapiens
ttttgaaagatcaccctggtgacctaaaagaagctaacaaagacattgtgcttctaggcctttgctgcctcattcttgtcaaaatgcagcctcacaggttaatgcatcatctctcacccatcccagggtctcaggtgtcccctacccatctacaagggttgggccrtgttggtgtaggaatgcggtctggctgtccttgctctgtgaacaatccattgcctttgtcacttgatccagatatttcagtcctgattgtccactccaggaagggagattctgccctataaaaactggtcatatttcataatatcaccaacactaaagggaggataagatgtccctggcaccagaagagggcccctagctccatgatatttcttagtcttgttatccatcactgtgggatcttgtagaaaggaagcacccagaggaaacataatcctcctattagagttag

SEQ ID NO: 121253 - DNA, 633 bp, Homo sapiens
caaactcaattcacttaaagtgcagcaggatatcatagcagggtgattacccagataagtcagtgaaatccaggtgtttatatttcttgtttagggaagagggaattgggaagtgtaggcaacctggagagaatagatgagaatagaagtgcatcctcaaaagaataggtaatcacctgcctggatgaartatgaacttccagtcttttctatttttgactcctgttttgtgtcaatcttccctgatataaatattctcaggaagaattttcttaaaaattggtttccttctgaagaatttgcttttaggaagataagggatatttaggaaaagcctttttgtgcatttgtcgctttctaaatgcctttagttttacataatcatcatacaaatgcagcacagtttgagatgttattttctggattcctttacttggaacccacctgccaaaatcctgttccagagagatgcagctacagactgaaagagcagttgacccctgaacaatgtggaggttggggcactgaccactagtgcagttgaaaacctgtgtagaacttttgcatccctaacttaagtactaatagattactttttactagaagccttagtgatcacataaatagttgatt

SEQ ID NO: 121254 - DNA, 587 bp, Homo sapiens
ccaggtaaagttgcccatatgttctcttctctccacacaactttacttagagttatagcgaaatgtaatgtgtggcaaagctcttattgcctgcacagaaaccatcttcttctcctttggtgcctaggacaccagctctatcctgctggacatggtgaggacagtgagcctctcccagcccgggacaggagcagggattaaggatacatgtgattagctccacaatgcaatgtcaggggagtgaaggaggggcagggactctgggaagaatttgatccttcataagaagatggaaggtgaagagctttgcttcacctttgataatcaatgactttattttagattttggagctgggacacatgtttcattgccctgaatccttccacatctcctctttctcttacaatatctctgactcagtttgtctttctcagattgtgtgctgaaaatcaattttccctcctaayatgaaaacaaactaacagaagtctcttcctcctatcatgtgctgtgagatctgaccgctaaactctgtgatacccagatcgtataagagatagtcatgggattttacccaagagatttt

SEQ ID NO: 121255 - DNA, 562 bp, Homo sapiens
tttccttctaaatgtgtgttttcaatatttttatgacatcagtatttttcaaatgaaatctatacacaggaatatcaacatcttttataaacatttctctgcaaggaagcaaaaatatataaagtggttatatttagccacagacccctttggacaaaaggtagayggcttagattctagttttaatttagactagctgctattgggtttggagcacatcacagaattgcgatgcataaaatgtgaatgtaatcctcactgcttcaaattctccacaatgaaaacttatatggaaaagtatgctgtgacaacagcaatgaaacaatctatgtaaggtgtttaagataaaaagagtttaattttaatttactttataaaaatagatgatttattgaggaaaaatttccattgcctctaaaataaagtcccaaattatttacgtgactcaaaaggtccactgtaatctctgaccccacctgcttctccacacttatgagccatcattgtctccttggttttctgaattcaagccattctaaattttagttcagtgctgttcagt

SEQ ID NO: 121256 - DNA, 469 bp, Homo sapiens
cttataccctaataacgcccaatatatcactataagtttgcttatctgcccttcagtagccctccttatttaatcacttttgttacttttttcttttaaaaatattaagatgttgcatctcattacttctttaagttactcacccattgccctccatcttttcagcataatttctttaaaggggtaattccttacctctactttcttactatccaccttctaaagaatgaatgcttttctgacctaaggttcccttacagtcattttagattttccttccttacagagctaatatttgagaaaagtagtgtrcattcattgtctctttccctgtcacatattcactatttacttcacctcaatatggtatctcctcccattactacactaaaagcactattttcatggtttttgataactttcttgttgctagatccaatgggtggttatcggttcttatgtcaatgga

SEQ ID NO: 121257 - DNA, 554 bp, Homo sapiens
atgactatatttacaaacacacaagatagtagtctgcttcttcttctgcgtcttcttcttcttcttcttcttmttattattattactattgagaggaagtctcactctgttgctgaggctggagtgcagtggtgtgatctcagctcactgcaacctctgcctcctgggttcaagggattctcccacctcagcctcccaggtagctgggattacaggcacccgccaccacacctggctaattttttggtattttttagtagagagggggtttcaccatgttggtcaggcgggtcttgaactctggccctcaggtaatccacctgccttggcctcccaaagtgctgggattatagccatgcgccaccacacccggtctattgttgttttatcagtcaatattttagatttattgtgtttcttatctttattgttttttctatgctttatctattctctcattttttaatgactgaagtgttttgatttctctttcatctatttagatagttgagatgcctcaaaattaatcttctgtccctgagaagtacagtgta

SEQ ID NO: 121258 - DNA, 469 bp, Homo sapiens
ctgctcagcaatttaataaattgtgcagtctacagagaatatcattaattatgtaaagactgatggggattcatttacttggtttctttctgaaccacttgacttgtctctgtttaattaaacaataataaatgtgatggtagggagaaacttatgctgtcagtgaacaataataaatgtgttcttggaatagagaaagggattctagatatcttcatatttagacagaaaatcacaggaagataattaaaacacttgcttacttgcctacaatttactgacatatatcttcactcatatttcttaagtctccagttatggaggacactgtgaaggcaaattactgtcaatgcctcagtatatttccttattttatctcttggagagttcgttttcttttagggcagtatattttatacatttkatgtaatgttcccatgtctggctgcaatttgctagtatggcactc

SEQ ID NO: 121259 - DNA, 490 bp, Homo sapiens
actggtctgtatgtagtctcacagaagagctttgctcagaagggatcttagttattaattagaccaataaaatttgtcttgatgggtcaaaataggatacaaagaaagaatcattcactggtaggattactaygcaaaagcacagagtttctgctgattacgctttaatttaattatattttgtgctcattctacattcacatacctgtaccttgcttttctataagtcagcagacatgggagtaagtggatactataagcaggtcgatgtttaaagatgatgaacattaaacaaaggaggaggtgactagttgctgcgaacaggactgattgatgcagaagtagagtagagctagtcacaatactgaaggaaaacaggttcactcctgcgtcttactaaggagatgtggccaagagtaccactatagctttaccttgtttctgaactgggacctgggtgtgccctatttccatgttgcagggtcagaac

SEQ ID NO: 121260 - DNA, 663 bp, Homo sapiens
gtttagatttctaaaggaaatggaaagatgtttggcaatgagagaagtcagttatgatttttagaagatggttgttttcttcagcatttaaaactgtttttgctttgatataattttgaagacgattataaagcttgggaccttcgtaaaagtgaactttataagccagaacgaacttaccacccccctactgtgaaatttggaaattcaactacattccaggatgactttgttcctcaggagataaagcctaggcaaagctttaaacccttctctgtggtcaaacgttctacagccccttttaatggtattacaagtaatcgccttgattatatacctcatcagcttgaactcaagtttgaaaggccaaaagaagtttacaaaccaactgaccaacgctttgaggayttcacaactcaccggtatgacttttggggtcttatttggtgaaactgcaaaactctgcagacctgtacacaccagagtgacccagaatgctcggtttgaaggaagcactgaattccgtgaaagttttcaaccatgggaaatcccacgaccggaggtcaagaaagtaccagagtatgtgcctcctacaggtagcatgctgttaaacagcacaagccatcttgactatgttccgtatcaggccaaccgtgttgttcc

SEQ ID NO: 121261 - DNA, 621 bp, Homo sapiens
  misc_feature (1)...(621): n = A,T,C or G
caataagcttccattggcaggtttctgtcttcttggttagcgagagaaaaaaaaagcctttaaaataaatcatagcttgggaactgtttaccacccttcaccctcacccactcttaaaaaaaaaaaaaaacactagactgcatgtgagnatcccacagagatcccttaccgaagctaggagagagggagggtatgtgtgtagaatgatgttataaagccatttttttcccttcctgtggtgaaaggtcgtaatgtgtggtatttcacggttttatataaatcttggtttaggatgtggaacagactcaataatacatgtgcttttggcaaagagcactcttcggatcccrtaaatcagaagtaaataagaagtccaagtgaacaaaagagcaggaacatttaattgatgcaaagcaggactctcatctgctttaaagagaggttcatgtaaattccctcagttcctatcttcacggttagagcccgacctataaaacaggttattacattacagccggcagccttggatgattgaaaggaaaggctccccaccccaaacacacacacacacacacacacacacacacacacacacacgcaatagatacaatgtatactttc

SEQ ID NO: 121262 - DNA, 312 bp, Homo sapiens
accattgcactccagcgtgggtgacagagcgacactctgtctcacacacacacacacacacacacayacacacaaaaggtgagctggcatgtgcacagatcacatggcaagaagaagcaagacagaaggggggatgtcaggctctttttaaccagctccctcaggaactaatagaggacagcaccaagacattcatgagggatccaccccccatgacctaaacacctcccattacagcccacttccaacagcgcagatcctttttttttttttttgagatagagtcttgctccatcgcccaggcaggctgaa

SEQ ID NO: 121263 - DNA, 581 bp, Homo sapiens
gaaaaaagaatgaaattctgtcatttgcagcaacatggatggaactggaggtcattatgttaagtgaaataaaccaggcatggaaagacaaatattacctgttctcactcatatgtgggagctaaaaacgtttatctcatgggggtagacagtagaatatagttacaggaggctgggaagsttatgtgtaggggtagggagatgaagaagagatggttaatgggtacaaacatagagttagatagaaggaataagttctaatgttcaatagcagactaggatgattatagctaacaataatgcattatatattacaaaatagcaagagaagagggcttgaaatgttcccaacacatggtaatgatcaatgctcaaggtgatgaatatcctaaataccctgacttgatcattacacattctatggatgtaatagaatatcacatgtactccataaatgtgtataattattatgtattaataaaaatatgtaacttatctaattgtaaattgttgtactttaatgtttaataatggctagtttaatcaactggctcatggaattcctgaaaaattaacaactg

SEQ ID NO: 121264 - DNA, 500 bp, Homo sapiens
ggcacacacctgtagtctgagttacttgggaacctgaggcacgagaattgcttcacactgggagatggaggttgcagtgagctgagatcatgccactgcactccagtctgggcaacagagtgagactctttctcaaaaaaaaaaaaagtatttactcatttgacaggcaaaaaataacataaattacttgtttacctatgaagtaaaacatgttttcattgtttttggcattgtgtttctttcatgaattgtctgtacatgtaggaaaggctgttctttagaaagataactgaawtttttttaaaaaattgacacttgaataagaatggttaatctgtggagagaaacatgtttagatgctgctaaatatctgggaattccatgccaagtgtagctggagaatgattcgtgatcatgaatcacgaggtgaaaacaaggcaggacttcctaaaggtttctgtattacttttctgcaaatataatccactcagacattggtt

SEQ ID NO: 121265 - DNA, 340 bp, Homo sapiens
tttcaacaattcctgacacagcaataattggaacaactgctaatagcaatagggttaactgccaaccgtagataaatgatatgataataccagttccaaggttagctatattctgtgcaattaaagccaacctggttcctgtggcctgggagagaaaaagcacaaagcaactgtagttttaagctccaaatgcatgcgctccagccttagcctcttggtcagaatgatgagtgggttctatgcctgagmtacattggcttactttcattacaataaacccacaacacctgtgcttaactcatgaggctctgcagacatttcttcattgtgcctttacact

SEQ ID NO: 121266 - DNA, 454 bp, Homo sapiens
tttcttataaaagcctttgcattcaactgtaaaaacagcaaccctcttccaggccccctcttggtggtggagagctttcttcttttgcttattaaacttttgctccaacctcaccctttgtgtccaygctcgttaattctcttgatcctgagacaaagagttctgggtgatacctcacagtgagagacttctacattgtggtgcattggcaagactaacattttggtgcattggctgggaaaggaaagatcagaagaatgagtaggagtggacctccaactctactttcatttctgaggcttttcaccctcattttaaaaagttaaacaaaacactgggcccctgtcagccagttaaaagcttttagagtggctgccagccttacaagactcaggggacaggcttgctttagaggactttgtcaatccccaattgccctcatgtggtgggaatg

SEQ ID NO: 121267 - DNA, 454 bp, Homo sapiens
tttcttataaaagcctttgcattcaactgtaaaaacagcaaccctcttccaggccccctcttggtggtggagagctttcttcttttgcttattaaacttttgctccaacctcaccctttgtgtccacgctcgttaattctcttgatcctgagacaaagagttctgggtgatacctcacagtgagagacttctacattgtggtgcattggcaagactaacattttggtgcattggctgggaaaggaaagatcagaagaatgagtaggagtggacctccaactctactttcatttctgaggcttttcaccctcattttaaaaagttaaacaaaacactgggcccctgtcagccagttaaaagcttttagagtggctgccagccttacaagactcaggggacaggcttgctttagaggactttgtcaatccccrattgccctcatgtggtgggaatg

SEQ ID NO: 121268 - DNA, 587 bp, Homo sapiens
actcccactttgaaaagttcctagcataaacacacactttactaagaatcttaaaatacctgactgtaagataaattaattttaaaatgacctcaataatttaatcataatttgaatagctgatcatatcttctctgggtaatgacatgaggaaaatacacaattggccacagctgactaactacttggtcttagatttaaaagaaatggatttagtgaggagcagggctttctttccagtaccagctgtgatggagcgacaccttctggcacacatggagtactgcatgctagagggctcctctgctaggaggccctcttcaagagatctcaatcaactccactgacccaagttcggttccatcaaaarggtcaaagataggtgacagtgttggctagacagttaataatttccattgctgactttacacatcattcctggctggccattggccttttagaaaaaaaacaaagcagcctaaagtaccaagatcatctaacattattagaaatattggccacatcctccccactcttcactccatgtcccacccaaaagaaaacttcatatgaccaaaaagtcaatg

SEQ ID NO: 121269 - DNA, 587 bp, Homo sapiens
actcccactttgaaaagttcctagcataaacacacactttactaagaatcttaaaatacctgactgtaagataaattaattttaaaatgacctcaataatttaatcataatttgaatagctgatcatatcttctctgggtaatgacatgaggaaaatacacaattggccacagctgactaactacttggtcttagatttaaaagaaatggatttagtgaggagcagggctttctttccagtaccagctgtgatggagcgacaccttctggcacacatggagtactgcatgctagagggctcctctgctaggaggccctcttcaagagatctcaatcaactccactgacccaagttcggttccatcaaaaaggtcaaagataggtgacagtgttggctagacagttaataatttccattgctgwctttacacatcattcctggctggccattggccttttagaaaaaaaacaaagcagcctaaagtaccaagatcatctaacattattagaaatattggccacatcctccccactcttcactccatgtcccacccaaaagaaaacttcatatgaccaaaaagtcaatg

SEQ ID NO: 121270 - DNA, 482 bp, Homo sapiens
attaatttagcagctgcaatacagaatggcaaaataaatataaattcatacattaatgaatgtttaattcatttaaaaaccattatattagctgactgtgaaatgtccarataattgtgtcttcaaacgtggctgaattcaatatggaagataagcattcaagaacgaggaagaagtttgatttgaattttacctgagcacacttccaaatgctgaaatcatgtaccaaccatcctaacttgtacttagattgtaacactttactgatttctatttgacaacagaaagcaatattcctaatcaccaatgttcataacatctaattggaaatacagattatcttaaaagaaaaaaaaacatgcaaaacccctacacagcagttggggtttcatttttaaatcaagcttgtcccacttctccctctgtttcttactccttttccatgtttcttagacccaatgaccaatcaattcttctgttca

SEQ ID NO: 121271 - DNA, 539 bp, Homo sapiens
tggaagtcattggcttgagttacatttttaaacaaatttaatatgagtctagcaacattatgggtgggaagtataccctggcagcttttagagactttcacatcatcttccaattcatccaaaagctgagtgaaaccatgatgaagagatgtgaaaacattcatgtcaaacttaaataattgagatatggtttcccagatttcagtccacatttgaagccatgaaacggtacagtgaatggacataaacttgttgaayacactgacatttgctgagaggtttgaaaaaatttgtgccaatggaaaaacaaatgaagactcctcacttgttgaataatttacggaagaaatgtgtttattgtccgaaatcaagcatttattatccaataggtcttctactgaactgttgaagaattggctcatatattgaaataaagaaatacgaaaatcttcatcaattatgagcagctgtttgaggcctgtcaaagtagtgtggatcacttccagttcttggccctctgtagacatgaaggattgggc

SEQ ID NO: 121272 - DNA, 588 bp, Homo sapiens
ctggccaacatggtgaaaccctgtctctgccaaaaatacaaaaattagccaggtgtggtggcacatgcctgtaatcccagctactcaggargctgaggcaggagaatcacctgaacctgggaggcaaaggttgcaatgagctgagatcatgccactacactctagccttggtgacagagcgagacttagtctcaaaatatatatatatgtataaaggcaggtaagataaacagctttaacttgttgtaagctctttacattctcctggaaatgataaaaaaaattactggtatatctaataagtgaaggatgtgtatgataatatatagtaaccactaaaagaataatagagaaatgtataacaaagaaaagccaatagaaggagataacaagggattgataaaaataattgattaatccaaagaaggcataaagagaaaaacagaacaaagaacaattttctcctttgtataattttcagtaaattttatatttctactaattttgccttctttattccattacaataatctactacctattgtttaatctgaatcatagctatgaacacccattgtttcccacttt

SEQ ID NO: 121273 - DNA, 588 bp, Homo sapiens
ctggccaacatggtgaaaccctgtctctgccaaaaatacaaaaattagccaggtgtggtggcacatgcctgtaatcccagctactcaggaagctgaggcaggagaatcacctgaacctgggaggcaaaggttgcaatgagctgagatcatgccactacactctagccttggtgacagagcgagacttagtctcaaaatatatatatatgtataaaggcaggtaagataaacagctttaacttgttgtaagctctttacattctcctggaaatgataaaaaaaattactggtatatctaataagtgaaggatgtgtatgataatatatagtaaccactaaaagaataatagagaaatgtataacaaagaaaagccaatagaaggagataacaagggattgataaaaataattgatwaatccaaagaaggcataaagagaaaaacagaacaaagaacaattttctcctttgtataattttcagtaaattttatatttctactaattttgccttctttattccattacaataatctactacctattgtttaatctgaatcatagctatgaacacccattgtttcccacttt

SEQ ID NO: 121274 - DNA, 555 bp, Homo sapiens
gaaaagtcaaggagattccatgttctgacttgagccactgagcagaaggtggtagtttcccagagatggaaaagcctaaagtaatgttaatgcgtaggctgcaggtgagaggtcaagaaatcagcttgagatttggaaacactgaatgcctatgagacatccaatgcagaggtcaagtgggccattcacaatatgagtcagaagctcagaaaaatgaaaacaaccacagatcatctgggaggagggcagagtagaggcaacagctagaaagggcagtttccatcttggcttcctgtgcctgggatctgcccagctgacctttccaggaagtctctggtrgtcacctgccgaccttatcacaaagctctccaaaacacatcaaccttaatttcaggttcaggttcacccaagaagaaaaacagtaggcttttgtcttatatccttttgcaatcacttacccttctccaaatctgggccccaagcaattatgagtttactttctcttgcgatagcttagctttgcctgttctcctcctcggttctttgaatgtgcct

SEQ ID NO: 121275 - DNA, 555 bp, Homo sapiens
gaaaagtcaaggagattccatgttctgacttgagccactgagcagaaggtggtagtttcccagagatggaaaagcctaaagtaatgttaatgcgtaggctgcaggtgagaggtcaagaaatcagcttgagatttggaaacactgaatgcctatgagacatccaatgcagaggtcaagtgggccattcacaatatgagtcagaagctcagaaaaatgaaaacaaccacagatcatctgggaggagggcagagtagaggcaacagctagaaagggcagtttccatcttggcttcctgtgcctgggatctgcccagctgacctttccaggaagtctctggtggtcacctgccgaccttatcacaaagctctccaaaacacatcaaccttaatttcaggttcaggttcacccaagaagaaaaacagtaggcttttgtcttatatccttttgcaatcacttacccttctccaaatctgggccccaagcaattatgagtttactttctsttgcgatagcttagctttgcctgttctcctcctcggttctttgaatgtgcct

SEQ ID NO: 121276 - DNA, 513 bp, Homo sapiens
cacatttatctgccggatctcagctgctggcactgtgtgttctcaggggatactctgtcaggtgtttttcaaggctcctggctgaccctccccagcttctccctttggttctctagctccagacccctaacatggccactaaacaccmccagcaggcaccccactgccccagatctgtgccgttgggctttatcttccgtgcaaacttgtcagcatccctttttattcatccagagctcttcattccatcactattcaacttgtcaaaatgtgctcagccaggaacaagtttaggtcagagattttaataatctcttcagagctttcctcttttgaatcattgtgaatattatgcatcagaaaaactccagattttgagcctcagactgggaggcacaattaggtgctcagagaggccagaatttggccaacttctcattccccaaatggactcaaggaatatgagagaattctgaatgagagagcaggcaaaattacccaagagggaatgag

SEQ ID NO: 121277 - DNA, 551 bp, Homo sapiens
tccctcaccataaatccagaagcctgtacatcacatttcctgcaataaggatacgtgtacctgagcctgataaatagatagtcccccatctacccaccctagccttctgcctgctcttctccagaagaaacagcctcagctmtttcaactcagcatattttaccctcttcctaccacccttctggctcccagagaagcatcccaggtacgcttgcttctgtcctgatgatcaggtattacaggctcattcatcgtgctgatgcgtgtcaacttcaggcccatgaggcaatttgatagccagaaaacatccttgtgggtggctcccacttgacctcccttctcaccctccactgggcctgggagttcactggtgtttcacacaggactgtcacgggaactgtgaaacgggttcctactccttcgcgagtggcgtcttccaagtggaaaacacacacacaaacacacccgggaaggctcgtagtgaccactgcaacctccttcccctactcagccccactccaccttgcttgaggtgccatgccctcctagac

SEQ ID NO: 121278 - DNA, 577 bp, Homo sapiens
ctgccccttaatttgcatataattaaaggtcaatgtaaatatgactgcagaactgccctgagctgctactctggtcacactacctacagggtagccctgctctgcaaggagcagtccctctgctgttgctataggccactgcttcaataaaagttggcatctaggccaggtgcagtgrgtaatacctgtaatcccagcactctaggaggctgaggcgggtggatcatttgaggccaggagtttgagaccagcctggtcaacatggtgaaaccccatctctactaaaaatacaaaaaaattagttgggtgttttggcgcacacctgcactcccagctactcaggaggttgaggcgggagaatcacttgaacccaggaggcagagtctgcagtgagccactgcactccagcctgggtgacagagtgagaccctgtcccgaaacaaaaaaaagttggcctctaacaccttcggtttgcccttgaattatttcctgggtgaagccaagaaccctctcagtctaagccccagttttgtggcttacctgccctgcatcaacaccagaaacttaaccctttggg

SEQ ID NO: 121279 - DNA, 575 bp, Homo sapiens
cccttaatttgcatataattaaaggtcaatgtaaatatgactgcagaactgccctgagctgctactctggtcacactacctacagggtagccctgctctgcaaggagcagtccctctgctgttgctataggccactgcttcaataaaagttggcatctaggccaggtgcagtgagtaatacctgtaatmccagcactctaggaggctgaggcgggtggatcatttgaggccaggagtttgagaccagcctggtcaacatggtgaaaccccatctctactaaaaatacaaaaaaattagttgggtgttttggcgcacacctgcactcccagctactcaggaggttgaggcgggagaatcacttgaacccaggaggcagagtctgcagtgagccactgcactccagcctgggtgacagagtgagaccctgtcccgaaacaaaaaaaagttggcctctaacaccttcggtttgcccttgaattatttcctgggtgaagccaagaaccctctcagtctaagccccagttttgtggcttacctgccctgcatcaacaccagaaacttaaccctttgggaa

SEQ ID NO: 121280 - DNA, 587 bp, Homo sapiens
ttgtgaacactgtcttgtgaatagtttaatcatctatcaaagtcaggtgtgaccacttgtttaatcagtcccacattgttgaatactcatgttcttccaatttttactattatagataaactaaaataaatacctctgtaaatatactcatttttctgtcaaataatttaattatgatwaattatctaaacttgttttattagtcaatggaaacattttatggcactaactgcatatttctaaattgctttctaaaagagttctgagttttatttgcttttataggcacttcaaaaaaattttataggcattgcttttataggcatccactctgtgttactttttcacaacttcttacaacaatggtttttcacaacagcattgaatatcacattttaattaattttgtagcccatttaataagccacaatggggggttaacgttgttccgttttaaatttttccactggaaggctaaaatttttccgatgggttccaaatttaagtaggtattcacaaaattttacagctgaaaagtgaataaagctagaggaaaaaatgactgagagcattttacccttataata

SEQ ID NO: 121281 - DNA, 593 bp, Homo sapiens
tcccccatcccccatgtcttgtttccatgcaaccagcttttagcatcctctgttcccaattctgaaagctgatgttttcataatttggacttgtttccaccaaccaagcagttagggcagatctaaagcaaatcctacctaaaaatataaaatgttatctatttcttctttggctaattatattgaacacaaaaataatgtaattctcctgaagatcttgttggtttaaacatataattaacattttatttgccctccataatttattctttcccccaccatgcgcgtgtgcatgagtgcatgcacgcaaacgcacacwcacacatacatgaagtgatgtatatttgaatattggtcaattagttcctacttcaaatactctggagaaatgtgagctatttaaaataattttatagtagaaccatgtttatagtgaataattttttggcaaaatagattgctgtctacaatttttgtttatatacttagatgttggtttttaaaaatctgaactgttaaaaggtgttattaaaactctgcatttttctactttttcctgattttcatctttcttagcatccataagaacaaat

SEQ ID NO: 121282 - DNA, 593 bp, Homo sapiens
tcccccatcccccatgtcttgtttccatgcaaccagcttttagcatcctctgttcccaattctgaaagctgatgttttcataatttggacttgtttccaccaaccaagcagttagggcagatctaaagcaaatcctacctaaaaatataaaatgttatctatttcttctttggctaattatattgaacacaaaaataatgtaattctcctgaagatcttgttggtttaaacatataattaacattttatttgccctccataatttattctttcccccaccatgcgcgtgtgcatgagtgcatgcacgcaaacgcacactcacacatacatgaagtgatgtatatttgaatattggtcaattagttcctacttcaaatactctggagaaatgtgagctatttaaaataattttatagtagaaccatgtttatagtgaataattttttggcaaaatagattgctgtctacaatttttgtttatatacttagatgtyggtttttaaaaatctgaactgttaaaaggtgttattaaaactctgcatttttctactttttcctgattttcatctttcttagcatccataagaacaaat

SEQ ID NO: 121283 - DNA, 603 bp, Homo sapiens
cactttgacaagcatactatatgagagaaaacataactttggtgtatgtctttgaaattgaagagagtgttttttaaaaaatgaatatcttaaacactggaaatataaggaagggatacatagtccccttctctggggagaaatgtgctctccagttttaaaaaagagaacagatgtattaatgttaagatactccatccacctgtggcggtacttttttttagtaataaataatccaaaaagtgatataatgaaatcctacactgttttctgtttttgaaaatgcaatgtaaagctaacatgaataaattagaaaagaaaacttcttaaggtatgaaaatagcctgaagaatagaaatgattttagaggcattaaaatctatgctcaggatgacagaccatgttcaacaagtgtgtgcccgagagaaagaactagatagcaaaatgartccctatttttccagtattccctggtgtccactctaaatgttttgagatatcaaccaaagctcaataaaaaacctaccttagtcttttagaaatcatattgtacaaccattgtaaaaatagtttttggtgctcaattatgagtaaaagaattct

SEQ ID NO: 121284 - DNA, 603 bp, Homo sapiens
cactttgacaagcatactatatgagagaaaacataactttggtgtatgtctttgaaattgaagagagtgttttttaaaaaatgaatatcttaaacactggaaatataaggaagggatacatagtccccttctctggggagaaatgtgctctccagttttaaaaaagagaacagatgtattaatgttaagatactccatccacctgtggcggtacttttttttagtaataaataatccaaaaagtgatataatgaaatcctacactgttttctgtttttgaaaatgcaatgtaaagctaacatgaataaattagaaaagaaaacttcttaaggtatgaaaatagcctgaagaatagaaatgattttagaggcattaaaatctatgctcaggatgacagaccatgttcaacaagtgtgtgcccgagagaaagaactagatagcaaaatgagtccctatttttccagtattccctggtgtccactctaaatgttttgagatatcaaccaaagctcaataaaaaacctaycttagtcttttagaaatcatattgtacaaccattgtaaaaatagtttttggtgctcaattatgagtaaaagaattct

SEQ ID NO: 121285 - DNA, 603 bp, Homo sapiens
cactttgacaagcatactatatgagagaaaacataactttggtgtatgtctttgaaattgaagagagtgttttttaaaaaatgaatatcttaaacactggaaatataaggaagggatacatagtccccttctctggggagaaatgtgctctccagttttaaaaaagagaacagatgtattaatgttaagatactccatccacctgtggcggtacttttttttagtaataaataatccaaaaagtgatataatgaaatcctacactgttttctgtttttgaaaatgcaatgtaaagctaacatgaataaattagaaaagaaaacttcttaaggtatgaaaatagcctgaagaatagaaatgattttagaggcattaaaatctatgctcaggatgacagaccatgttcaacaagtgtgtgcccgagagaaagaactagatagcaaaatgagtccctatttttccagtattccctggtgtccactctaaatgttttgagatatcaaccaaagctcaataaaaaacctaccttagtcttttagaaatyatattgtacaaccattgtaaaaatagtttttggtgctcaattatgagtaaaagaattct

SEQ ID NO: 121286 - DNA, 603 bp, Homo sapiens
cactttgacaagcatactatatgagagaaaacataactttggtgtatgtctttgaaattgaagagagtgttttttaaaaaatgaatatcttaaacactggaaatataaggaagggatacatagtccccttctctggggagaaatgtgctctccagttttaaaaaagagaacagatgtattaatgttaagatactccatccacctgtggcggtacttttttttagtaataaataatccaaaaagtgatataatgaaatcctacactgttttctgtttttgaaaatgcaatgtaaagctaacatgaataaattagaaaagaaaacttcttaaggtatgaaaatagcctgaagaatagaaatgattttagaggcattaaaatctatgctcaggatgacagaccatgttcaacaagtgtgtgcccgagagaaagaactagatagcaaaatgagtccctatttttccagtattccctggtgtccactctaaatgttttgagatatcaaccaaagctcaataaaaaacctaccttagtcttttagaaatcatattgtacaaccattgtaaaaatagtttttggtgytcaattatgagtaaaagaattct

SEQ ID NO: 121287 - DNA, 550 bp, Homo sapiens
gaagttaaatgacagtgaaaaatgggaccaaatggtcaatccagctgtccatgtgtttgtgtgatttcacatggtctgtttctctaactcattctcttgtttgtgccttttttatatcccccaactggaaggtaagcacttcaagaacagtgccttgtgcatctggtaaaccatggcacctgacagcctagtgtggcatttggtgcctcatacacactcaacwtatatatgttaaatgaatgaataagtgaaaactttctggtgaagatgtttatgatttatgtgatgacaatagcctggtagctaattaataactacatagtatatgtaagtatatataattttatatactaaatcacctgttgaaactactttcaaactccagatcttattattttagccaatcatgaattttgaacacataccttttatgccaacaccaaaaacacagaaaattttaaaactatgtagtataagagagatgattaaaaactatcacagattatcttgctaatagccacaaaaatagaagaagaagaagataactcca

SEQ ID NO: 121288 - DNA, 550 bp, Homo sapiens
gaagttaaatgacagtgaaaaatgggaccaaatggtcaatccagctgtccatgtgtttgtgtgatttcacatggtctgtttctctaactcattctcttgtttgtgccttttttatatcccccaactggaaggtaagcacttcaagaacagtgccttgtgcatctggtaaaccatggcacctgacagcctagtgtggcatttggtgcctcatacacactcaacttatatatgttaaatgaatgaataagtgaaaactttctggtgaagatgtttatgatttatgtgatgacaatagcctggtasctaattaataactacatagtatatgtaagtatatataattttatatactaaatcacctgttgaaactactttcaaactccagatcttattattttagccaatcatgaattttgaacacataccttttatgccaacaccaaaaacacagaaaattttaaaactatgtagtataagagagatgattaaaaactatcacagattatcttgctaatagccacaaaaatagaagaagaagaagataactcca

SEQ ID NO: 121289 - DNA, 483 bp, Homo sapiens
caaccccaaactttcactcagtatgtcttatgcagacttttactcactattctcagcagttctgcaaaaatagaaatctcctttccaaagatcacagcctgttccttctctcactaactttcactgtctagttatgtgacagccttacttctcaattattttgcttataagagataactaaaacaacttgaatgtgatgactatccatgctttcttttccatcaagtcctcatgcctgtctagttactccacctggatatattttactatagcagaaacaargtcgagaacaatacctaccagggaagaaaatggtaattcaaagaagttttgctgtctcccagcctcctttttttcatattttttttttactagaatagctttctccagttaactcattgcacaaattcgggattttacttctagaagtttccatgaatagttaagagtcactcatagcatgatggaacagttcagactgag

SEQ ID NO: 121290 - DNA, 564 bp, Homo sapiens
gtgccgctgttcttgtgatagtgagtgagttcttacgaggtctgatggttttataagrgacttacactcagcacttctgcttgctgccaccatgtaagatgtgcttttgctcctccttcaccttctaccatgattgtgaggcctcccctcatgtggaactgtgagtccattacatctctttcctttataaatgacccactattgggtgtgcccttacagcagtgtgagaatggagtaatacaacctgttatgataatttctgagaccaagtataacttagatggtaccaagtagaaagaatagaaggggaggcagctctattacaaggaaaactgatttcctcactcctcctacagggaaagtgatttggagacctgagcttcaggtttcaactctggaaacattgtttacactggtgttttgtaccttcaaattttctaaattatttatttggtagtgtatcttgctatccatccaacagctcttgctaataccaatctttgcattctagaaaacttgaatgccacacgcaataatccaaacattattttcattaggccactc

SEQ ID NO: 121291 - DNA, 564 bp, Homo sapiens
gtgccgctgttcttgtgatagtgagtgagttcttacgaggtctgatggttttataagggacttacactcagcacttctgcttgctgccaccatgtaagatgtgcttttgctcctccttcaccttctaccatgattgtgaggcctcccctcatgtggaactgtgagtccattacatctctttcctttataaatgacccactattgggtgtgcccttacagcagtgtgagaatggagtaatacaacctgttatgataatttctgagaccaagtataacttagatggtaccaagtagaaagaatagaaggggaggcagctctattacaaggaaaactgatttcctcactcctcctacagggaaagtgatttggagacctgagcttcaggtttcaastctggaaacattgtttacactggtgttttgtaccttcaaattttctaaattatttatttggtagtgtatcttgctatccatccaacagctcttgctaataccaatctttgcattctagaaaacttgaatgccacacgcaataatccaaacattattttcattaggccactc

SEQ ID NO: 121292 - DNA, 647 bp, Homo sapiens
gctttcatttgaacctgactcattgtgtggccctgttaggttaattgaacttaatgtacaaattcctataaattaaaataacaaataaccctttgaatgacatctaggcaggagaaatgacaggcaatcaacaatagcctcctgaatggcatgtaactacagcatgtgaaatgaccaaggatcattgctgtcatgagcaaatgtggtaaatgtggtctcygggaaatgtatttatgtaaatctgcaaaccaatctactcacaaggagcagaaaagtcaaggcatttaccattatatgtggaagtagacatgtcaatcaagagaaaatggactcagaatcagtttacaatgttattaaagccactgggtctaaaattttcagatagcataaagcctctacagtgaactacaactagtagtccatctcttcattctagttggaaagtaaaataagggaggtcaaatacagtttaaaggcaagattattggaagtccattataaattgtgagaaaaaatgtactgcattaatcaaaggatgccataatgtataagcttctaaaaagtaaattgctatgcttctcagataagaattagaaaatttatcttcttatttatgaatgtatcaaaggaatattttacaagttaag

SEQ ID NO: 121293 - DNA, 647 bp, Homo sapiens
gctttcatttgaacctgactcattgtgtggccctgttaggttaattgaacttaatgtacaaattcctataaattaaaataacaaataaccctttgaatgacatctaggcaggagaaatgacaggcaatcaacaatagcctcctgaatggcatgtaactacagcatgtgaaatgaccaaggatcattgctgtcatgagcaaatgtggtaaatgtggtctctgggaaatgtatttatgtaaatctgcaaaccaatctactcacaaggagcagaaaagtcaaggcatttaccattatatgtggaagtagacatgtcaatcaagagaaaatggacycagaatcagtttacaatgttattaaagccactgggtctaaaattttcagatagcataaagcctctacagtgaactacaactagtagtccatctcttcattctagttggaaagtaaaataagggaggtcaaatacagtttaaaggcaagattattggaagtccattataaattgtgagaaaaaatgtactgcattaatcaaaggatgccataatgtataagcttctaaaaagtaaattgctatgcttctcagataagaattagaaaatttatcttcttatttatgaatgtatcaaaggaatattttacaagttaag

SEQ ID NO: 121294 - DNA, 647 bp, Homo sapiens
gctttcatttgaacctgactcattgtgtggccctgttaggttaattgaacttaatgtacaaattcctataaattaaaataacaaataaccctttgaatgacatctaggcaggagaaatgacaggcaatcaacaatagcctcctgaatggcatgtaactacagcatgtgaaatgaccaaggatcattgctgtcatgagcaaatgtggtaaatgtggtctctgggaaatgtatttatgtaaatctgcaaaccaatctactcacaaggagcagaaaagtcaaggcatttaccattatatgtggaagtagacatgtcaatcaagagaaaatggactcagaatcagtttacaatgttattaaagccactgggtctaaaattttcagatagcataaagcctctacagtgaactacaactagtagyccatctcttcattctagttggaaagtaaaataagggaggtcaaatacagtttaaaggcaagattattggaagtccattataaattgtgagaaaaaatgtactgcattaatcaaaggatgccataatgtataagcttctaaaaagtaaattgctatgcttctcagataagaattagaaaatttatcttcttatttatgaatgtatcaaaggaatattttacaagttaag

SEQ ID NO: 121295 - DNA, 567 bp, Homo sapiens
ctggccattaacttttctccttaatctctggcaagcctatatttcaattgccttttatagccagaaataaggaactaaattagtaatccatatataagatgcttctcaggtaggtagcaacttacctagtaatactagggaaaaggatgctcttaccattactgakacaccatcatgtagtctccaggccagtgtgcttgttgaagttaacaggtagctgcagccatcataagattaccattgggaaaaattcaacatgatataatattaaacagtaatttctgcagagataaaaacaggttagtcattataacagccagaccctggatttccaaactaatagatatctggtttttaattctgccttagaaatataatgcacacctattggaagcttattatttcataagagaagtacataggaaaaaactccaggccctaggaattgagaaaaagaagttcatttttttgaagtgggaagaatgtccagaacctattagaacctacattccctccattgctcttcccaggaagatcaacactcactttatcaagagaaaatgtctc

SEQ ID NO: 121296 - DNA, 600 bp, Homo sapiens
gtattttcaaggaaattttaaatttccatcttaattttttaaattgaccctttggtcattcaggagcatgttgtttaatttccatgtatttgtgaattttccagggttccattgtagtcagaaaagatacttggtttctccttttttgaatgtgttgagatttgttttgtggcccaagttatgttctwttctggagaatatttcatgtgctgatgaaaagaatgtgtactcttctgcaaatgggtgaaatgttctgtaaatgttaggcctgtttgcctgtagtttaactctgatgtttccttgttgattttctgtctgggttatctgtccattactgacagtgaggtgttgaagtctctgacttttattttattacagtgtatccctctcttggacctattaatgtttgctatatatacttgggtactttggtgttgggtgcatagatattaataattgttgtatcttcttgcttaattgatccctttatcattatatagtgaccttctttgttactttttacagtctttgacttgtagtctattttatctgatacaagtatagctactcctactcttttttggtttccacatgcatgca

SEQ ID NO: 121297 - DNA, 610 bp, Homo sapiens
ttactattttgtatgaccgtgcagcaaggactgcctcttctgctacccctccagccaccccttgcagtgagctcctccaggccagtgatcatgtttcactcatctctatatctttattatcttaagtgctgacatataataagccctcaattaaaaataattcaattggaatttgatgactaccctaattcaaattgcttcttcccccaaattctttcttctctgtatgttttttctcattgcatactgttctggtttgagttgtgtccctcaaaaaatgttgaagttctgacctctccccaccccaccatccctgtgagtgtgaccttatttggaaacaccatctttgcagatgatcaacttaggatgagggcagtgggttgggccctaattcaattatgactgtgtccttataagaaggaacaatttggatatagagacatgcgcacacacagggagcctgccacatgaagatgagggcagagattgggggatgtagcaaaagctaaaaaatgycaaatgccaaagattgtccacaaactatcagaaggcaggagagaggcaaggaacagattctgcttcacagtcctcagaaggaaccaaccctccc

SEQ ID NO: 121298 - DNA, 552 bp, Homo sapiens
ggatatgacaaatttgtccagaatccctctcataagggcagcagaggatgggggagcctcatgggtacccaggcagcagaagctggaagtgaactgacatgaatggggcttgaggatgcaatctgcccctatcctcaggagtctgagggcagcacagaggcagggtagtggggaaggaaaacatcaggcacataagatgcccctcacactcaactccctggtcacaaactagagagtcaccagcccccatcatgagcccctcttctggatgcagggcctgcccttctgtggaggtcttaggagtgatggcataagaggacagagacctaggtataagtcgcaggcatctggtawtgaacagagcactccagtgattagcttcctataaaaaaaatacaaaccaaacccaggaaatgtgcacagccttgtaaaaccactacaatttcagattgggtttatctggtttattgcttgatatgcaattagaagtgtcttgaacacatcagctttcagttcttcccacggttgagtatttaatgacctgtgaatgaa

SEQ ID NO: 121299 - DNA, 499 bp, Homo sapiens
agctgggactacaggcacccgccaccgtgtccggctaatttttgtatttttagtagagactgggtttcaccatgttggccaggctggtcttaaactcctgacctcaggtgatctgcctgccttggcctcccaaagtgctgggattacaggcgtgagccaccacgcctggaccactctcacacttctaaccctgcctgatttcaaaccttcagcctgattttatgcataattgagatttgtgtgttttgtttgagacagggtcttgctctgtggcccaggctggagtgcagtggtgtgatctcggctcactgcagsctcaacctccgtgactcaggcgatcgtcctgcctcagcctcctaagtaactagggccaccacaggcatgccaccacaggcatgccaccacacctgactaatttttgcatttttttgtagagacagggtctagctatgttgtccaggctggtcttgaactcctgagctcaagtgatcctttcacc

SEQ ID NO: 121300 - DNA, 588 bp, Homo sapiens
  misc_feature (1)...(588): n = A,T,C or G
agggctgatggccacagtgggcccttgtgcacagaccatggagccactgaatggggccctcanaatgcttcctggaagagggcaggctgggctcagaccccccgggcaggcatgagctagtggggaggctggaagtctcaggtatgtgtgtggaacaggggatgaggacaagattggtggctacagtactgtggaagaragcaccagaccttgaagagcttctccaaagatcccatatccattggcagctttactggggcaagaagaaaatctcatttcctcaacatgtttcagaagtgttctaggttctggggatacagcagtgaataaaaaaatacaagtccatgctcttaaggagcttgtctcctgataggagagacaggcaagaaacaaatcaataaataatataaagatcaggatcatgaagcaaaataaacagaggccaggaaactgagggcagcagatgtgctgttttagacgggatgggtgaggaaggtgtctgggataaggtggcatctgagcagagacctgagtatgcgatggagcaatccatgcagctgtttagggggaaacaagagacaatagaag

SEQ ID NO: 121301 - DNA, 567 bp, Homo sapiens
ttatgaatcaaagacattgatagatgtattataagattacaatcatattttccttttgacagtcacattataaaacatgatgtgttgcacttaatctcaattagcttatcacaattaaaattaataatgtttattattgctgataaaaataatgactctcctattctcaaatgtgcaagtaattcttgtaattttaatacaagtttgcatatttttattaattgttttaatctcattsgatttggttcatggatccaatttttaaaatattgataatgggataatgccttgtctccccatttcatgtacactaaaaacaagatttcttacaatggtctgcaagcccatcatgatctgccgcatgttaaccgccaaaattcttttatatcttcacccttgatcttacccgtggtcctggccacctcactgtcctctggacataccaacaggctgctgccttatgatcaagactctagttaatttcttgacttggaaagatagccctccatatattcattggtcagctcattcaacttcctcaagtctttactgaaacctcacattctc

SEQ ID NO: 121302 - DNA, 569 bp, Homo sapiens
ttttgtaaagagctgccatggattctaccattctctactgttttattaaagtcataaagcactttygttaaagaagtgaactttggttccaatccagcttgaaacctattgggaggaattaaatgagatttagaattatagataataatttcacagccctcttaattaaaagaaaaataaaaacctcaactcttctgtaaaatcaaatttgaataaagtgtaagtatagattctggccccaacaatatataagctgatgagccacagtgatatataaaacctgtcaaccaagtatttgtgaatcagctgtatagattgttggcaggaaaagcattacaaatctatttgcttggagatgtatagagaattagccttaaattttctactctgctacattatataccactccattcattcattcccttattcactcaatgatcaacatttgctttggcttacagtggtcaaggaaaacctctcctagatgtgacatctgaggtgaaacttacagacaagtatagtcttataaagattgggaaacatgtattccaggcagaagaaacagcaag

SEQ ID NO: 121303 - DNA, 569 bp, Homo sapiens
ttttgtaaagagctgccatggattctaccattctctactgttttattaaagtcataaagcactttcgttaaagaagtgaactttggttccaatccagcttgaaacctattgggaggaattaaatgagatttagaattatagataataatttcacagccctcttaattaaaagaaaaataaaaacctcaactcttctgtaaaatcaaatttgaataaagtgtaagtatagattctggccccaacaatatataagctgatgagccacartgatatataaaacctgtcaaccaagtatttgtgaatcagctgtatagattgttggcaggaaaagcattacaaatctatttgcttggagatgtatagagaattagccttaaattttctactctgctacattatataccactccattcattcattcccttattcactcaatgatcaacatttgctttggcttacagtggtcaaggaaaacctctcctagatgtgacatctgaggtgaaacttacagacaagtatagtcttataaagattgggaaacatgtattccaggcagaagaaacagcaag

SEQ ID NO: 121304 - DNA, 569 bp, Homo sapiens
ttttgtaaagagctgccatggattctaccattctctactgttttattaaagtcataaagcactttcgttaaagaagtgaactttggttccaatccagcttgaaacctattgggaggaattaaatgagatttagaattatagataataatttcacagccctcttaattaaaagaaaaataaaaacctcaactcttctgtaaaatcaaatttgaataaagtgtaagtatagattctggccccaacaatatataagctgatgagccacagtgatatataaaacctgtcaaccaagtatttgtgaatcagctgtatagattgttggcaggaaaagcattacaaatctatttgcttggagatrtatagagaattagccttaaattttctactctgctacattatataccactccattcattcattcccttattcactcaatgatcaacatttgctttggcttacagtggtcaaggaaaacctctcctagatgtgacatctgaggtgaaacttacagacaagtatagtcttataaagattgggaaacatgtattccaggcagaagaaacagcaag

SEQ ID NO: 121305 - DNA, 569 bp, Homo sapiens
ttttgtaaagagctgccatggattctaccattctctactgttttattaaagtcataaagcactttcgttaaagaagtgaactttggttccaatccagcttgaaacctattgggaggaattaaatgagatttagaattatagataataatttcacagccctcttaattaaaagaaaaataaaaacctcaactcttctgtaaaatcaaatttgaataaagtgtaagtatagattctggccccaacaatatataagctgatgagccacagtgatatataaaacctgtcaaccaagtatttgtgaatcagctgtatagattgttggcaggaaaagcattacaaatctatttgcttggagatgtatagagaattagccttaaattttctactctgctacattatataccactccattcattcattcccttattcactcaatgatcaacatttgctttggcttacagtggtcaaggaaaacctctcctagatgtgacatctgagrtgaaacttacagacaagtatagtcttataaagattgggaaacatgtattccaggcagaagaaacagcaag

SEQ ID NO: 121306 - DNA, 435 bp, Homo sapiens
gaatgctcatatttctatcttcatttacaaagttaaaattaatattccatctgtatattcattttgattggaatgcagagtgcctggtgcacagtgggtgttcaactaatgtttgttaaataaaattccctgtgawttctccccttgcaagtgctagacttggtaactgattataacaggagaatatcaacataatttttttggattgcctgaatcaattccattctttctggcccactttagggaaactgtcaatgacgaagaccctaaggaaactcatctgtggtccataaggagatgaatccccatgtctggggcatcatgttcactgtggcgccaccaactcagatgaccagacacaaatgaatttctcatggtactgtggtggaatcagctgttttgagttaactacctaagtgaatgttctatttttcc

SEQ ID NO: 121307 - DNA, 400 bp, Homo sapiens
gaattcgttcattcagtaaattttttttttagtatctacccaatgccaagccccacataaaacattaagagtagggacaataatacattaaggtctctgaccccatgaaactcatggtcagaggaggaagatcaacatgtatgcagagaaatgaaagcaatttaacaaatgcttgcatacagttatgtgcacaggagcaggaagaatgggcaagagaatakccagactagctaggacatgtgggagacttcagagagaagactgggtgcagagagatgttctgagtttgaagaggccaaggctgtatataacctccacgaaaaccactgtctgcagtgcccagccataggccacccccttagacctcctaactccctagtcacaagaggctgtgttagtt

SEQ ID NO: 121308 - DNA, 572 bp, Homo sapiens
catacctaccttctttctgcctggggaacactccaagccattccctacctkaggacatttgcatatgctattctgtctagtaagttccacttctagtctaggttgctttgcaaccctggctgcacattagaataattttaagccttaccttgaggtcaattaaatttccacctctggaggtggggtccaccatctatttttaaaaactcccaggtgatatgaatgcacttcaaaggttgtgagtcatcactttaaatcttcatgtggctgggtcctcccattgttcaggtctcagcaccaagatcccttcccagagaagcattccctaatcatcttatctgaagtagcctgaactctaaccccccagagctctctacatcactcactgattttattatctctacagtactcttcactctctgaagttatcttttctattttttatttattgtcttccccactgtaattcaagcttcaagagagggatttgttcatcttgttgacttctgtatcaggacatctgcccgatacatagtaagtgctcaaaatatatttgctagatgagcaagtaa

SEQ ID NO: 121309 - DNA, 572 bp, Homo sapiens
catacctaccttctttctgcctggggaacactccaagccattccctaccttaggacatttgcatatgctattctgtctagtaagttccacttctagtctaggttgctttgcaaccctggctgcacattagaataattttaagccttaccttgaggtcaattaaatttccacctctggaggtggggtccaccatctatttttaaaaactcccaggtgatatgaatgcacttcaaaggttgtgagtcatcactttaaatcttcatgtggctgggtcctcccattgttcaggtctcagcaccaagatcccttcccagagaagcattccctaatcatcttatctgaagtagcctgaactctaascccccagagctctctacatcactcactgattttattatctctacagtactcttcactctctgaagttatcttttctattttttatttattgtcttccccactgtaattcaagcttcaagagagggatttgttcatcttgttgacttctgtatcaggacatctgcccgatacatagtaagtgctcaaaatatatttgctagatgagcaagtaa

SEQ ID NO: 121310 - DNA, 564 bp, Homo sapiens
cctttggcaacaccctcacagccatgcccaggaaaaatactttgcatccttccatgcaatcaagttgacactcaacattaaccatcacagagtccaagttggtatttttgatagtatacgtcactggataagagctkccactcagcacacctggggaaaagtatactttctctacagacattattttctactttgagttcctcaacatgaggatgcaaaaagttttaataaacaacaacaaatttatttaactacaacctatcacaagttgcatattgatattgaaaattctgtgaaagtctaagtgttcagtgcctctccttccctgtgtcccatcagcatggccatcagagcagcaagccaatgctttgccatccagcacctgtgccctacccacccagtgccaagccacagtggaggcatgagagctcttttctttccctctctattcgctctgcctcctttcgaagctcctgagagaagcatttaaataatacactggtcttcaataatagaatctgattggaaggactgctggagcccacttgtaatcactgaagcagc

SEQ ID NO: 121311 - DNA, 656 bp, Homo sapiens
ggggatgcacatcacagaggaggcaccaagagtgggggcttgcctcgatatagaaatgtagcaactctggagaattggtgtcacagggcagagcataaaagcaggacattatttcctcggaaaagtgtctttttaaaacatgatttgtttcattttgcagtggaaagggttggacagatgtgcattcaaattctccctccttttcttgctagtgtatgacctgagcaagttatttaacccctcagagtctggtgttccttatttgtgactcagagatagtaatacttcctaccatacagattttggtggaaagtaaataatagaactatgtgaagccctagcaaagaatctgtcacacagtgggtgtttggcacctactgtcaccgatcttctgtgcaaacccctccccgcagctgctcctgttccaatcactctgggaacrctggactcatgacaattgccactccctttgtgtgccttatatttgcccattcccaagtcttcactgattttattccctattctaggcatctccagatgcctacatcctacccgtgctcaaagacacatttcaaatgcccactcctctgggaaatgcctgttgtacccctggacacaaatcatctctcctccttagagccaataacccatgctcc

SEQ ID NO: 121312 - DNA, 554 bp, Homo sapiens
ttaaactagtaaaacatcaaagccatttttatttactgaagaacacaaacaaagtaaatataaagtatttttaataaataataatttacaacaaaagtataaaagacacctcaggccaggtggctcacgcctgtaattccagcattttgggaggctgaggcgggtggatcacctgaggtcaggtgtttgagaccagcctggctaatatggtgaaaccccatctctactaaaaacacacaaaaaaatagctgagtgtggtgacgggcacctgtaagtccaaatactgggaggctgaggcagaagaatcacttgaacctgggaggcagaggttgcaatgagctgagatcgcaccactgcacactaatctgggagaaagagcraggctccatctcaaaaaaacaaataaataaataaataaataaaaataaaaaataaaagacacctcatattggcactatgatagctgttcttccttgttgtaagcccctaactgatactggaatgtgatgttacaaactaacatgtttattctgatgtccatatgtcctaaatct

SEQ ID NO: 121313 - DNA, 610 bp, Homo sapiens
aaaattttaaatataatatttcagataatacaaaagctgtaagtaccaataagtattacaaggagaataggacaatgtgggatggggttgaatgaagttagtcattgtagaaaaggtgcttaaggaagatgctataatttggatatttgacactccaaacttcatgttgaagtgtgattccccagtgttgtaggttaggcctaatgggaggtgtttgggtcatggtggcagttccttcaggaaagaaaggcttggtgccattcttgcaggaatgagtgaattttgactctattaagtcttgtgaaagataactccaagagctagttttaaaaagagcctggcaccttccctttctcattcttgcctccttctctttccatgtgatctctgtacatgttggctctgctttgccttccaccatgagtggaagcagcctgaagccctcaccrgaagcaaatgctggcaccgttcttcttgtatagcctgcagaatcatgagccaaataaacctgttttcttttttaattgcccagcctcaggtgttcttgcatagcaacacaaacagactaaaagagaagacaatatggaagtgaaaaactgaaccacacagg

SEQ ID NO: 121314 - DNA, 606 bp, Homo sapiens
ttccttttttaaggaaagcttttaaaagaacatgacataatctaaacaataatttccctgttaatggcaagaatatttgtttttgccattataagcaatactactataaacatacttacacatatagatttactacaattgctttgaattctaagataaagttttccagaagtggtattactgcattaaaatatattggtatttttaattttaatagatatctccaagttggtctccaaaaagctgttaacaattcacattcattttcaatatgtgaacatgtttttaccttaacccctcccmgcaatagactgtagacattaacaacttcttatgcaatctacattataattatttctcaagtcagtcatttgcttatgaaataattgtaatatattttctacacaaatattatacttaatcacatatgcatatattatttttataaaattaaagtatcctctgattctagatttatttttatacacaagccttaaatctacataaaattatagtgtataaaacagaagaatggagtcaatttttatcttttcccattggttagccagacattaagtatcattggtttaataatgtcatttcaca

SEQ ID NO: 121315 - DNA, 606 bp, Homo sapiens
ttccttttttaaggaaagcttttaaaagaacatgacataatctaaacaataatttccctgttaatggcaagaatatttgtttttgccattataagcaatactactataaacatacttacacatatagatttactacaattgctttgaattctaagataaagttttccagaagtggtattactgcattaaaatatattggtatttttaattttaatagatatctccaagttggtctccaaaaagctgttaacaattcacattcattttcaatatgtgaacatgtttttaccttaacccctccccgcaatagactgtagacattaacaacttcttatgcaatctacattataattatttctcaagtcagtcatttgcttatkaaataattgtaatatattttctacacaaatattatacttaatcacatatgcatatattatttttataaaattaaagtatcctctgattctagatttatttttatacacaagccttaaatctacataaaattatagtgtataaaacagaagaatggagtcaatttttatcttttcccattggttagccagacattaagtatcattggtttaataatgtcatttcaca

SEQ ID NO: 121316 - DNA, 606 bp, Homo sapiens
ttccttttttaaggaaagcttttaaaagaacatgacataatctaaacaataatttccctgttaatggcaagaatatttgtttttgccattataagcaatactactataaacatacttacacatatagatttactacaattgctttgaattctaagataaagttttccagaagtggtattactgcattaaaatatattggtatttttaattttaatagatatctccaagttggtctccaaaaagctgttaacaattcacattcattttcaatatgtgaacatgtttttaccttaacccctccccgcaatagactgtagacattaacaacttcttatgcaatctacattataattatttctcaagtcagtcatttgcttatgaaataattgtaatatattttctacacaaatattatacttaatcacatatgcatatattatttttataaaattaaagtatcctctgattctagatttatttttatacacaagccttaaatctacrtaaaattatagtgtataaaacagaagaatggagtcaatttttatcttttcccattggttagccagacattaagtatcattggtttaataatgtcatttcaca

SEQ ID NO: 121317 - DNA, 631 bp, Homo sapiens
atgggaggatgcaacagtttttttacagcattatcatatctgtaagaatatccacatatctgcagatgccagtattgcaaaagtcagagataaaattgtttgtgttaggaagttagcaacttacaagaaagggctcaagtctgctatttatttgaaggatagcactaggcaagatgttatatatgtatttagtttatctcaggatgtgaaattcttttgtgttgttgttccctactgtggaacctcatatgcttagttgtaatggtgtcaaggcaagattcaggtttactatctcaaatcaaatgcatacatttagtaataagccatagtggctacttgagaaggaaatgttacaggatagtaacaaatctcaggagtctgtttgggaatgatggaatgtcgcttctgagattagaatatttaaatctgtttattttgayccgaccacaggatcttggatttataagagagaggtacaacttactcatgcaggctgcctctcctgattttcccaccaaagctaataattagggtagaggtttacagacagtattggccaacaaatactatggtaaactgtggtatcacagccacactttatttcctgaaaaaacaataacactattaaagc

SEQ ID NO: 121318 - DNA, 534 bp, Homo sapiens
aaggctcctaatttcctaacattctataaagccctttacataaattttcttatttaatcttcaaaactaccctatggcaaaaacatttttgcatttccattttacagaagagggaactacagactaatgtggataaaaaccttgttcatgggcatatcattatcgtgtagtaaagtttgtatttgaactcatactttttactataagctatattagtcacttccagtgccaactcatacagtttttcccctgtaaattcatttgtgtttcccctcttctcttgccataatamttattacatccccttgaccacagagcatacttttaagcttctactgtagaatttgtatatttacatgtaattgttgtgtctagtaattgagtatcttgatagcagccattgtaccttatttgtatttaaatccaacattagtgcttggtagatagtaagttttgttgaatgaaaactaaataaagagatgacccacaataaaagaaagtataatattttggtcactaacataggacagtgat

SEQ ID NO: 121319 - DNA, 583 bp, Homo sapiens
atagacaagcactaaaggcaatgtcatctacaaactcagaggtaaataacctcaaagaggctttcagcacactccagaagtatagtaagaaaagcagcaatctgggaagttctcagtgatgaggttaccataagtataatccaaagttcagcaacaaccctctagtttctgttcatgttctttgcaatccaggggctgttctaaactgtcatcacactcctcaagccattagcaacctcaacatcagcaagtgatatgccctacttctccccagataaattatgatattgaggatgaccttctcttccctgcttctgcccctggactttgcatacaaccaactctgcccatcagggaggtgtaactgtggctaaaacktcatgtgctaaaaattccttccctatttatcctcctatgtcttgcccaccaaatttttgtcttcctatttctctttaatcctttccttttcagtgatttctttcctttggaacataaacatatttctttacctcaaaagtcaaacccctgacttgatcctgtagtctcctctaactacctttctctttctttccacttatgcttc

SEQ ID NO: 121320 - DNA, 583 bp, Homo sapiens
atagacaagcactaaaggcaatgtcatctacaaactcagaggtaaataacctcaaagaggctttcagcacactccagaagtatagtaagaaaagcagcaatctgggaagttctcagtgatgaggttaccataagtataatccaaagttcagcaacaaccctctagtttctgttcatgttctttgcaatccaggggctgttctaaactgtcatcacactcctcaagccattagcaacctcaacatcagcaagtgatatgccctacttctccccagataaattatgatattgaggatgaccttctcttccctgcttctgcccctggactttgcatacaaccaactctgcccatcagggaggtgtaactgtggctaaaacgtcatgtgctaaaaattccttccctatttatcctcctatgtcttgcccaccaaatttttgtcttcctatttctctttaatcctttccttttcagtgatttctttcctttggaacataaacatatttctttacctcaaaagtcaaacccctgacttgatcctgtagtctcctctaactayctttctctttctttccacttatgcttc

SEQ ID NO: 121321 - DNA, 609 bp, Homo sapiens
tctttgcgctcatttatgtattgatgtctctctagttgttttggttatataaagtatatgttctcgtcaatcacttaggaagtcctcaaggaacaacattctctaattctttcatgttattaataacaacagtttttctgtgttcttaatactcaaaagtcgstttttctgaatataaaattatttgctcactttctttccttggttttctttaataaatttctcattttattcagcataaaccactgttgttaaaacgtctaatgataggtctgggcacggtggctcaagcctgtaatcccagcactttgggaggccaaggggggcggatctcctgaggtcaggagtttgagatcagcctggccaacatggtgaaactctgtctctactaaaaatacaaaaattagcatggcatggtggcacgtgcctgtaatcccagctactggggagactgaggcaggagaatcacttgagctggggagacggaggttgcagtgagccgagatagcaccactacactccagcctgggccacagagcacgactgtctcaaaaaaaaaaaaaaaagaaaaagaaaaaaaaagaatgcctaatgataaattgtacattt

SEQ ID NO: 121322 - DNA, 609 bp, Homo sapiens
tctttgcgctcatttatgtattgatgtctctctagttgttttggttatataaagtatatgttctcgtcaatcacttaggaagtcctcaaggaacaacattctctaattctttcatgttattaataacaacagtttttctgtgttcttaatactcaaaagtcgctttttctgaatataaaattatttgctcactttctttccttggttttctttaataaatttctcattttattcagcataaaccactgttgttaaaacgtctaatgataggtctgggcacggtggctcaagcctgtaatcccagcactttgggaggccaaggggggcggatctcctgaggtcaggagtttgagatcagcctggccaacatggtgaaactctgtctctactaaaaatacaaaaattagcatggcatggtggcacgtgcctgtaatcccagctactggggagactgaggcaggagamtcacttgagctggggagacggaggttgcagtgagccgagatagcaccactacactccagcctgggccacagagcacgactgtctcaaaaaaaaaaaaaaaagaaaaagaaaaaaaaagaatgcctaatgataaattgtacattt

SEQ ID NO: 121323 - DNA, 516 bp, Homo sapiens
tttctcaatgtacttgaggactctgttggcttgtataatgtgcaatgcagaataggtacatatccaccaaaaaattctgtataaatatacaatcaatttacaacaggatcaccataataaatggaatttcatgatgatgatgtttaaaggttccatgtgtagtaccaaagaataaatgagtttttaacatttggagaagacaagatgttgttttgagaaattccctgtgtgattctggtatgtatattgattgatgggtattcacatcttttatgggtttaattgtatatgccctaaaagttcacatactaaagtattaactctcaatgcctcagaatatgactgtatttggatatagggtctctaaagaggcaaaagttaaaatgaaatcatgaggrtaggccctaatccaatatgactggtgtccttataagaaaaaatttggacagagatatgcacaaagataagtttatgtgaagacacaggaagaaggtggaattctacaagccaaaaaaa

SEQ ID NO: 121324 - DNA, 565 bp, Homo sapiens
aatgcctcagaatatgactgtatttggatatagggtctctaaagaggcaaaagttaaaatgaaatcatgaggataggccctaatccaatatgactggtgtccttataagaaaaaatttggacagagatatgcacaaagataagtttatgtgaagacacaggaagaaggtggaattctacaagccaaaaaaaaaaacatgtttcagaagaaaccaacccttccaacaccttgataaaggattctagtttccatacttgtgaaagaaattartttatgttgcttaagccacccagtctgtggtactttgttacggccaacttagcaaactaatagagcctcctcaaagaagaaaagatatgctctttggaaattttagttgtcttctatattttatcagagactgaaataagtgtaataagttggacaagggatatttttccaaaatatgaaataattttccacactaaagcagtaggccataaggaaggaaaattatcctgtgctgaaattttgtatttagtgaagaggacaaagctttcaataaagatcatagcaaccatgagga

SEQ ID NO: 121325 - DNA, 550 bp, Homo sapiens
aatgttggaaaaaaaaacagaggtttagtaatgggtagaataatgggtttactttggcagagatggaaattaaaaagtatttgagatatctaagtaaaggtcttataaggcaattgaatgtatgccaatgaagaaaaattaagacacatctgcaaaggacatgtagatttagtgtcaataacayagtccacagctcagcaaaagacaagtagaatacaagattacctaaagaggaaaatgtgaaataaaggccaacaaaaagatctgaggtaacaccaagaggaatggtagtaaactattaacttaacttactctaaaaataatctctaccttgattatatttaaacaacaaaataaacaaaaaagcagtgcaacctcaaagcttcagagaatgaaattgaatggagaatagaaataaagcattggtatttccattataacaaaataattcattccattacataacagccaaccatgttgggaggaatagtaacaatgaatattgtgcacgttagaattttaaacatctatgacaggagactgtattctg

SEQ ID NO: 121326 - DNA, 587 bp, Homo sapiens
tggtgttgtcagtgttccagattttggctattttaataggtgtgtagtgrtatatcattgttgcttaatttgcatttccctactgacatataatgtggagcatcttttcatatgcctatttgccacctgtatgtggtgagatgttggttaaggtctccggtactttttttttttttttttttgagacagagtttcactgtatcacccaggctagaatgcagtggtgcgatctcggctcactgcaacctccgccttctgggtttaagcaattctcctgtctcagcctccctagtaggttgagtactgtatttttagtagacacggggtttcaccatattggcccattttttaaaatggtattgtttgctttcttattgttgaggtttgaaaatctttgtatattttgtgtatttcgagtcctttatcggatatgtcttttgcaaatattttctgccccagtctgtggcttgtcttgacagtgtctttttcagagcaaaaattttaaattttaacgaggtccatcttatcatttttttaatggatcatgcctttggtgttgcaactaaaatgtcatcaccaatttcaag

SEQ ID NO: 121327 - DNA, 587 bp, Homo sapiens
tggtgttgtcagtgttccagattttggctattttaataggtgtgtagtgatatatcattgttgcttaatttgcatttccctactgacatataatgtggagcatcttttcatatgcctatttgccacctgtatgtggtgagatgttggttaaggtctccggtactttttttttttttttttttgagacagagtttcactgtatcacccaggctagaatgcagtggtgcgatctcggctcactgcaacctccgccttctgggtttaagcaattctcctgtctcagcctccctagtaggttgagtactgtatttttagtagacayggggtttcaccatattggcccattttttaaaatggtattgtttgctttcttattgttgaggtttgaaaatctttgtatattttgtgtatttcgagtcctttatcggatatgtcttttgcaaatattttctgccccagtctgtggcttgtcttgacagtgtctttttcagagcaaaaattttaaattttaacgaggtccatcttatcatttttttaatggatcatgcctttggtgttgcaactaaaatgtcatcaccaatttcaag

SEQ ID NO: 121328 - DNA, 508 bp, Homo sapiens
gaattccaccttctgaaagcaaagcaagttcacccatataaactttaattgagacgattgtaaatgtctcctttactcttacctccagagtggtaaccacctgctaccccatataaaccgttgtatgtccaatcctggagttcctaatttctctttctttattattggattatttcatgtaactccaattttccaactaggctttgactttagccactgtgtctttgacttgttggattgatacttttccaagatagaataaaaatgagaggtacctkccagcagccatgaagatgcaccaccactcagatcttctgttgaggagagcgtaattgacacaggaccccagatgctgtgctttgaatccaccaccaattcacacagaggccatgcttcccataggctaatcttaggcaaagggctggaagtggcaaggattctaaggcaggtccgtttttaggagttctagaacacctctgataagcaactttgtccctagaacttgtca

SEQ ID NO: 121329 - DNA, 629 bp, Homo sapiens
tgcacacgtatttttatagcaacacaatttacaattgcaaatctgtggaaccaacgtaagtgtccgtggactaatgactggataaagaaaatgtggtatatatacaccatggaatactactcagccattaaaaggaatgacataatgtcttttgcagaaacttagatggagctgtaggacattattctaagtaaagtaaccggagtggaaaagaaaaaatcatatgctctcacttggaagtgggagctaagctatgggcatgcaaaagcatacagatagatataatggacttcagagactcagaagagggaggcagggaccggtgccagggataaaaatctacacattaggtacaatgtacactactcaagtgatgggtggactaaaatctcagaattcaccactatataatttatccatgtgacaaaaaaaaaaaaaacacttgtgccccaaaagctactgaaatttaccaataaataaagaaaatattaaaacataaattaaataaaccttgaraaaaggaggtaggcgttaatcaatgagcaaaatcctttaaaagcaggagtggatggaatccaaagcaggaaaggctaacgtcttgtaggaatgacaagatgtcctgcaattgt

SEQ ID NO: 121330 - DNA, 629 bp, Homo sapiens
tgcacacgtatttttatagcaacacaatttacaattgcaaatctgtggaaccaacgtaagtgtccgtggactaatgactggataaagaaaatgtggtatatatacaccatggaatactactcagccattaaaaggaatgacataatgtcttttgcagaaacttagatggagctgtaggacattattctaagtaaagtaaccggagtggaaaagaaaaaatcatatgctctcacttggaagtgggagctaagctatgggcatgcaaaagcatacagatagatataatggacttcagagactcagaagagggaggcagggaccggtgccagggataaaaatctacacattaggtacaatgtacactactcaagtgatgggtggactaaaatctcagaattcaccactatataatttatccatgtgacaaaaaaaaaaaaaacacttgtgccccaaaagctactgaaatttaccaataaataaagaaaatattaaaacataaattaaataaaccttgaaaaaaggaggtaggcgttaatcaatgagcaaaatcctttaraagcaggagtggatggaatccaaagcaggaaaggctaacgtcttgtaggaatgacaagatgtcctgcaattgt

SEQ ID NO: 121331 - DNA, 620 bp, Homo sapiens
ctcttgttgctcaggctggagtgcaatggtgccatctcgactcaccacaaccttcgcctcctgggttcaagtgattcttctgcctcagcctcccaagtagctgggattacaggcatgggtcaccacgcctgtctaattttgtatttttagtagagacggggtttctctatgttagtctgggtggccttgaactcctgacctcaggtgatccacctgccttggcctcccaaagtgctgggattacaggcatgagccactgtgtccggccaagttaaatatttttatgggtggagaagaaagagcttagaagaaaatcaagtttgcagattttattagtcacttcttatgcactttctcagagcagctcaaatttgcctgcaatctcatgtccttggccatttgttccaccatagctgccactgccacaactgaccctgtgggcccctgttgaccaactgcctgagaccaacactgaatctccagttcttcccattgctttcggtcycagatgaagtacaggcaagagatcttacttctccatagggtacccgtggggccagttgacccaggggagttaacatcaatacattgataaataatagaaaactagaggcaagagg

SEQ ID NO: 121332 - DNA, 566 bp, Homo sapiens
gaattcttttctaagactattttcttcttattttagtttatacaataaaataccttggatcttaaatagctacctgcaccttccttttttacactcagtgtatcctctctgctctctactttttggccttcctttttcccaccataagctgcagttctgagtgtgaagagcctcagcagaagccatagccacccccattatgtacacagctaggctggctagaaaaataactattacattgccagaactacttatagaatttattttagcactacttgtgtttagtctatatcatctccataatatgttacttagaatgattaaaagacaaatctattctatgctgcaattctattcagttggaatgaaatgatgtagcatttttataagytcttatctgcttagctggctaagacttggattttcatttctagtggatgtttcctatgacgtcatctttttcaaagatgcttgaggatgtactaaagaagctgagagaattatacttaaaggactcacaacaagagataaaatgtacaagaaaattaaaaagtatgtgtataaaa

SEQ ID NO: 121333 - DNA, 569 bp, Homo sapiens
gtgcatcagccagtggactaaccaccatgtagagaattgtttcttcggggaaatatattgtgagtctcaaacagctctgaatctgttggaacacaactccattttaggtgccaatattttgtttttgcactgtggaattttatagtggtaaagggacaataagatgattgctgctaggctttacttgctatttttgcatgatgtgattttcctttctgtatcatgagcagaaacccataaacaatgcaaatgctcatcagtaggcaagcagatgaataatattccctttcgataatmgtcatacaggagtttggacgaatcttagcaatgtaatgttaagtgaaaaaaaaatcccaaaatattagatacagcattatatcttgtatgtaaaatttaaaataattaatattattttataattgttataaggacaacagagttacctaaaaaagaaatgtagagaataatgaacatgattcaggatggagcttacttcacttgggggaggtcaggagattgcatggggccttagccaaacgattagatgtggattgttgttaaatgacgta

SEQ ID NO: 121334 - DNA, 569 bp, Homo sapiens
gtgcatcagccagtggactaaccaccatgtagagaattgtttcttcggggaaatatattgtgagtctcaaacagctctgaatctgttggaacacaactccattttaggtgccaatattttgtttttgcactgtggaattttatagtggtaaagggacaataagatgattgctgctaggctttacttgctatttttgcatgatgtgattttcctttctgtatcatgagcagaaacccataaacaatgcaaatgctcatcagtaggcaagcagatgaataatattccctttcgataatcgtcatacaggagtttggacgaatcttagcaatgtaatgttaagtgaaaaaaaaatcccaaaatattagatacagcattatatcttgtatgtaaaatttaaaataattaatattattttataattgttataaggacaacaragttacctaaaaaagaaatgtagagaataatgaacatgattcaggatggagcttacttcacttgggggaggtcaggagattgcatggggccttagccaaacgattagatgtggattgttgttaaatgacgta

SEQ ID NO: 121335 - DNA, 621 bp, Homo sapiens
ttcatcacaggcaaacccatgctctaacacaaagtgagagtccactgtaaaaataaatcatattccttttcatgggttcatagttattcactaacaggaggcttttgcataaggctctctgctataaattcctcctgggataatgagaggctcccctatgtgaatcccaggatcactttcttctaccaggtttaccccctgctacatcccatcgacaggtgctgtggttcatatgtctctgctaaagtgacagtgcaatttttttgttgctgttataagacagacttatcatttttaaaagatgcatcttgcatgcatgtttgaggggttgtttaagcttcatagaattgtggtaaccccagatcagggcggaatacacgtagacatttgaggttctccagaccagtagaatcagagtaatggatgaagagttctgtcaaggctttgtaatttctagctgtcaaagagtaccctggggctgcatgagctgagastgcgagtggtgtttgattgtgccttaagcaaagtgaatgtttgagctagagggaaccccagggagcatctagtctggctttcttcttgtgaagttaggaacctgaggtccagagatgttaaagaact

SEQ ID NO: 121336 - DNA, 580 bp, Homo sapiens
aggagcaggcatatcacgtgccaagagcacaataaagggcgtggggagatgctacacacttttaaacagctagatctcatgagaactcactcactatcataagaacaggaacaaaccatgagggatccatccctataaccaaaacacctcccaccaggccccacctccaacaggggattacatttcaacatgagatttgggtgggacaagtatccaaaccatatcagygtggcatacggaagttaaataaattgttcaagctcacacaagaaaaaaatggtggagtcagggttcaaatgcaggcaatcttaccccagagcctgaactcccatgctctgctataacttcctaaagatggaatcatacaaaatcaaaggctatggagatcttattaatttgtgtttttactaaaataatttctgtatgtaggataagaaaagtctaaacagcacagagtggtattaaataaaaaatgaaagacttccacacccttcttcccccacctaccagtctgacttcctaaagaagatagttaaacctttattctttttgctattttgataactaccactataatttg

SEQ ID NO: 121337 - DNA, 599 bp, Homo sapiens
accactgccttatgtgcaaatgatctcatattgtgaattgctttcttacttttatagtcccattgtgatttgtattaagggcatattgaatgctagaattctttttcttttctttttactatgagctattcagatgatattgatcagacattactgtatgacttgtacttaatcctattcaagaatcaagcatgaagacaatcttggattatatgtcarggaataaattagaaatatattctcctgcttgctcctgaataagagactaaatgatgcaattggtttaatatattttatggtttatttttgcttgtagcaggtgactgtctgcttcaggactatggtattttatttatttctattttttttttctactcctttctgtttcttgtttcaattcctgtcacttgagaggaaaatgtatttgaggatggaagaaaggaccaagttagggaaagagccaaagcttccactgcgcttctcatagggagaataattaggatcttagtggaatttccattttatgcattcttaatggtctcattcaatatacctaattttgtgacagttaatctaaaaaagatcaagaattattattg

SEQ ID NO: 121338 - DNA, 610 bp, Homo sapiens
caaaatgcctgattgtatctccacaaaagggataacataatatttaaaggacaggctgatataactttgtataatcatgagtatctagtaaattctaaatttcactgggtcaggaaagaaatccaattagtactacaagtgagtagcatccttaagttaaatcttttgtaagtaagttawcattattgcattcaagactaacattaggcaaagtctgccacctgtctcaaaaaggctttatgttatcacaagtttgcaaaaatgaagaacatgcaggaatcaacaagagtatatccccaccaatacagaaatatcatgattgcatggtctgctgaagttttccaaatgctttccttttgaaatataaagtgtaacattaaaaaacacattttcccataatgtattacttcattaaggtgaaagtttcatgaaagtagaaatatttttatcttggtcatttttctcactgtttctgccccttgcaaggtgcttaataaatatttgttgcatgaaataaatatatgaattagttaatactgttcttattttaatgtctcaggtgttaagtgactataaaaatggctgataagattatcattttaaattagaa

SEQ ID NO: 121339 - DNA, 555 bp, Homo sapiens
gatcacagttttctgattataagaattttggagaaagaaaattacccaaaagtctttcaaaagaaagaccatcagtatattaccgtgcctgaagggagactcaccacgacagagttctaatgataaggactttcccggtctggctggcccaccgttggcccccaataatcactgtttkttccagcttcacaccttggttcatgctgttctgtttatcaaggagggcccccttccccaacttgggctgccctcctgcccactttcaatgcccatttcagagctcaacatttccaaagtgcctccctggacaactcctctcagtcctctcttcccctctggaacctctgtatcactcatcgtctgccactcatgtgtcccatatttattccacaaagcgctataatgtcagttttaaagtgtatatcttgactgcttaattgcatgatggttgtatcacagactttggccccatccatccagatgctgaatactacttttaaagtcaccaactagagaatggaaaatcttctgggttaagagccatgcttatataca

SEQ ID NO: 121340 - DNA, 486 bp, Homo sapiens
gctcaacatcacacatctgtcaggtggggaaaccagaatccaactctgatctctgagatgcagaaacctgattttgaaatccaatgctcttccacctccctaacgttgttgaggttattgaatgccaggctggagaatttctacttacctgggagaacactgagtaaccatggaagttcctgagacaactgagktacaacagagaagcctcaggttggtgacactaacaagaaaaaagagaatgtttacactgtaagcaaagcctggtttggaaatatcagaggagctcagccatccaaggccctgcttagatgctcctagtacatcgatagtcaatgcatggtaactggttggggagctctaaaattgaaattcaggttccaattcagtaatcagacaaaccttggtcagagtcctggccccattattaggttttttggagctgaatgagttacctccattctctgagcctcaggcatgttattt

SEQ ID NO: 121341 - DNA, 632 bp, Homo sapiens
catgtgtggaacaagacctgctttcctcctgcttttgaagatgttctaatggaagtcccactgaggaccaagttcatgggtgctgctgttgcattttggtatgagcaggaatatacaaaaggcagaaaggacatgtttactaaaaggcaagctcatagagtaatctggaaattaagggagccagctgcacatgccttggatttttacctgttataaaatattcytctacaataccctcaggttcatatagtgccttttggttttaagaacaactgggaacatagtatttttccaaattagcatccatatactagacatttttcattgcagtgaaatttgattaggtttaaagggtgttttgcacttaatcccagccttgttcttggtcttacaggggaattcagagaaatgtaagacacatttccttccctaagtagcttataatttcatcaggaagaggaaaaggaagtactagcatatggtcaatgtagagaaagaactatgtgtctgtgggtgggaattatctaaagaagtggggagatggaacttgagcttggatgtataaaatggttgtggtataagtaaatgaagaagatgacatttgtgaagaaaggagcaattggaacaaaggt

SEQ ID NO: 121342 - DNA, 632 bp, Homo sapiens
catgtgtggaacaagacctgctttcctcctgcttttgaagatgttctaatggaagtcccactgaggaccaagttcatgggtgctgctgttgcattttggtatgagcaggaatatacaaaaggcagaaaggacatgtttactaaaaggcaagctcatagagtaatctggaaattaagggagccagctgcacatgccttggatttttacctgttataaaatattcctctayaataccctcaggttcatatagtgccttttggttttaagaacaactgggaacatagtatttttccaaattagcatccatatactagacatttttcattgcagtgaaatttgattaggtttaaagggtgttttgcacttaatcccagccttgttcttggtcttacaggggaattcagagaaatgtaagacacatttccttccctaagtagcttataatttcatcaggaagaggaaaaggaagtactagcatatggtcaatgtagagaaagaactatgtgtctgtgggtgggaattatctaaagaagtggggagatggaacttgagcttggatgtataaaatggttgtggtataagtaaatgaagaagatgacatttgtgaagaaaggagcaattggaacaaaggt

SEQ ID NO: 121343 - DNA, 632 bp, Homo sapiens
catgtgtggaacaagacctgctttcctcctgcttttgaagatgttctaatggaagtcccactgaggaccaagttcatgggtgctgctgttgcattttggtatgagcaggaatatacaaaaggcagaaaggacatgtttactaaaaggcaagctcatagagtaatctggaaattaagggagccagctgcacatgccttggatttttacctgttataaaatattcctctacaataccctcaggttcatatagtgccttttggttttaagaacaactkggaacatagtatttttccaaattagcatccatatactagacatttttcattgcagtgaaatttgattaggtttaaagggtgttttgcacttaatcccagccttgttcttggtcttacaggggaattcagagaaatgtaagacacatttccttccctaagtagcttataatttcatcaggaagaggaaaaggaagtactagcatatggtcaatgtagagaaagaactatgtgtctgtgggtgggaattatctaaagaagtggggagatggaacttgagcttggatgtataaaatggttgtggtataagtaaatgaagaagatgacatttgtgaagaaaggagcaattggaacaaaggt

SEQ ID NO: 121344 - DNA, 617 bp, Homo sapiens
atatatatatagttatattaatatgtggaagtgacctgcagtcaatgtttgtgttttgctagcttccttgtctgaattaagtagaatggcagcaatttaggtggaacagcagtcagcaaatataacaggctgaaatatgctttattggtcaaatgattcctaaaaatttcagacgttagataatcttgtaactataagagtctccatgccaaatttcagtttcttcacagacacacttgcaaagcatgatgaagaaagcatagagggtrttgaacaatgtaacatgcaaaccacaatttcggatttgtagtggcccggcttgtatgtgcaaatccacacttttaagtatgtccacttcctttaatgaagacccctcttagacagagttgttgttgttctttttcttttcatgtgcaacactgtctccatatagggtcatagctatgagtgaggttgctaactctaagtgaaaaatgtatagcacatgtttggaagccccttttttgtttgtttgtttgtttgtttaaaaaatattgttcatttacacagcaatctagcaaaaatgcatgaaaatgacagacatttcttaaaacccctacatagatgagtcatcataa

SEQ ID NO: 121345 - DNA, 599 bp, Homo sapiens
cttttcatggaataaaaatttaaatattgctgtaggttgattttggtcattttaaatgacctttgaatttgtcttaatgacgctggcaacaaagaaaaatgragaaataaaataaagacacagtgaacttttgcataatttatataaatgacagatgaaaaacagatctcacacaaacatgctagaaactcagggcttggctgttttctaaatcacagttatactataggagactattgtacttttgatcaatgcacttaaaaatatattttaaaattcctctgatatatttttaaaaaatcagaattgcaggttcgtctttgtaaaatctgaattgatacttgtatgataagtgcttagatgacttaaaaatattaatccatacttaatggtatttctttgtaactttgattagatctttgatgatgcaaaataattggtttctggtagttttatgtcagaaaggtgagttctgttaaacacctgctctccctttattaaagaaccattgcaatgactatttttaagtaataaaaggttaataaaactattattattttgtttaactgccttctaaaacaaccaacctcttaaaagtt

SEQ ID NO: 121346 - DNA, 599 bp, Homo sapiens
cttttcatggaataaaaatttaaatattgctgtaggttgattttggtcattttaaatgacctttgaatttgtcttaatgacgctggcaacaaagaaaaatgaagaaataaaataaagacacagtgaacttttgcataatttatataaatgacagatgaaaaacagatctcacacaaacatgctagaaactcagggcttggctgttttctaaatcacagttatactataggagactattgtacttttgatcaatgcacttaaaaatatattttaaaattcctctgatatatttttaaaaaatcagaattgcaggttcgtctttgtaaaatctgaattgatacttgtatgataagtgcttagatgacttaaaaatattaatccatacttaatggtatttctttgtaactttgattagatctttgatgatgcaaaataattggtttctggtagttttatgtcagaaaggtgagttctgttaaacacctgctctccctttattaaagaaccattgcaatgactatttttaagtaataaaaggttaataaaactattattatttwgtttaactgccttctaaaacaaccaacctcttaaaagtt

SEQ ID NO: 121347 - DNA, 514 bp, Homo sapiens
gtggaaagaaagacctcgtactagaagagaaaagtaagaagctaatgaatgaatgtgatcatttaaaagaaagtctctttcagtatgagagagagaaagcagaaggagtagtaagtatcaaggaagataaatattttcaaacttctagaaagaaaatttaaacatttggttctggatacatgttgaacttagttgaatataaaaatctagataaaaagtgtgtttaccatactgtataattccatttacatgaagcatccagaaaagataaatgtatagggacaaaaagtagattmatgtttgcaaggggctggggctggaagctggtagtgactgctaatgggcatgaggaatcttacagtgatggaaatgctctaaagttggattgtagagatggctgcacaactcagtaaatgtactaaaaatcttttaactttaagtcaaaacagatacattctatagtatgtaaattatatttcaacaaagctgttttaataaaaaaggaaaaatgttt

SEQ ID NO: 121348 - DNA, 582 bp, Homo sapiens
ggatacatgttgaacttagttgaatataaaaatctagataaaaagtgtgtttaccatactgtataattccatttacatgaagcatccagaaaagataaatgtatagggacaaaaagtagattaatgtttgcaaggggctggggctggaagctggtagtgactgctaatgggcatgaggaatcttacagtgatggaaatgctctaaagttggattgtagagatggctgcacaactcagtaaatgtactaaaaatcttttaactttaagtcaaaacagatacattctatagtatgtaaattatatttcaacaaagctsttttaataaaaaaggaaaaatgtttactatatcggcttagaaacatgcctcatttctaggaaataaaagaggtgagagatgatttactttgagaaaagacattgtgtcacctatgaaattttattaggcacagagtcatattttaaggtagatagttctgtactgctgaaatagtaattttaatgtctttatattgccacatgttaagaccataatgtagttataaatggaaatgtttacacctgaagtattttcaaattaaaatt

SEQ ID NO: 121349 - DNA, 517 bp, Homo sapiens
cctgggtgagagggcctgatggggttgtcctgggtcatcacgggggtgatcagaaaagatgcagaatggaattgctgcgaggatgaatgagatgactgtcagcacagaataggcacccagtgagtgttcagggattaccctcagcagctgcccagaggccaaaaccacccacytgatagcgactgtccccaagccaggagaaaaagaagagagcaggtcccactcacctgagtctgatcagtcagctgtgttgagatgtgcctctcacctagaaaatggtccttcacgcagagccactcacagacacggctgtgtgtctctaactgctccacaacacagaggcgatgggggcttagcaacagtgacattgtggggtgacacaacccaccacaatgggagcctgcatgggtcaacagggcccagagtcaatgtcctctatcccctgaactgacatgtgtggatgcagtgtgtttgtgcatgtgtgtgtgcctgtatatgtgtgcacttatgtgtgtgt

SEQ ID NO: 121350 - DNA, 457 bp, Homo sapiens
tgcagagagagctgtgaaatatcttcaaggcctttttccctttgtcttggctattagcacagggcttctttatatgcmaatttctgaagtcttcttgaatttttccccttaaatggggttttgtgttattgctacatagccaacctgctatagagatacctgaaaaagtagaagcaggctcagtagtgggtagcaaacaaagattgggagggtttggagggattagagcatgacagaaagatgagggagtgggaggaagtgatttaatcatggatgggcaggggtgggtgtggacggaaaaaggggtgggtagggtgggaatgagtaggctggctgtagggtggtgggagggtggtgggtagtaggaagggggagtagcctgctgcagaggcagagcctcatggaaaaccattactagggcagtgcacctgtggctttgcaggtttgagcccccatg

SEQ ID NO: 121351 - DNA, 457 bp, Homo sapiens
tgcagagagagctgtgaaatatcttcaaggcctttttccctttgtcttggctattagcacagggcttctttatatgccaatttctgaagtcttcttgaatttttccccttaaatggggttttgtgttattgctacatagccaacctgctatagagatacctgaaaaagtagaagcaggctcagtagtgggtagcaaacaaagattgggagggtttggagggattagagcatgacagaaagatgagggagwgggaggaagtgatttaatcatggatgggcaggggtgggtgtggacggaaaaaggggtgggtagggtgggaatgagtaggctggctgtagggtggtgggagggtggtgggtagtaggaagggggagtagcctgctgcagaggcagagcctcatggaaaaccattactagggcagtgcacctgtggctttgcaggtttgagcccccatg

SEQ ID NO: 121352 - DNA, 457 bp, Homo sapiens
tgcagagagagctgtgaaatatcttcaaggcctttttccctttgtcttggctattagcacagggcttctttatatgccaatttctgaagtcttcttgaatttttccccttaaatggggttttgtgttattgctacatagccaacctgctatagagatacctgaaaaagtagaagcaggctcagtagtgggtagcaaacaaagattgggagggtttggagggattagagcatgacagaaagatgagggagtgggaggaagtgatttaatcatggatgggcaggggtgggtgtggacggaaaaaggggtgggtagggtgggaatgagtaggctggctgtagggtggtgggagggtsgtgggtagtaggaagggggagtagcctgctgcagaggcagagcctcatggaaaaccattactagggcagtgcacctgtggctttgcaggtttgagcccccatg

SEQ ID NO: 121353 - DNA, 457 bp, Homo sapiens
tgcagagagagctgtgaaatatcttcaaggcctttttccctttgtcttggctattagcacagggcttctttatatgccaatttctgaagtcttcttgaatttttccccttaaatggggttttgtgttattgctacatagccaacctgctatagagatacctgaaaaagtagaagcaggctcagtagtgggtagcaaacaaagattgggagggtttggagggattagagcatgacagaaagatgagggagtgggaggaagtgatttaatcatggatgggcaggggtgggtgtggacggaaaaaggggtgggtagggtgggaatgagtaggctggctgtagggtggtgggagggtggtgggtagtaggaagggggagtagcstgctgcagaggcagagcctcatggaaaaccattactagggcagtgcacctgtggctttgcaggtttgagcccccatg

SEQ ID NO: 121354 - DNA, 534 bp, Homo sapiens
taaaatataatagccttaaaaatcttatttgtacctggcacagtggctcctgcctgtaatcccagcatactggcaagctgaggcaggcagatcacctgagatcaggagtttgagagcagcctggccaacatggtgaaaccccatctctactaaaaatagagmatttagcagggtatggtagcacatgcaggtagtatcagctactcgaggggctgaggcaggagaattgcttgaacccgagaggcagaggtggtaatgagtcaagaccgagccactgcactccagccttggtgacagagcaagactctgtctcaaaaacacaaacaaacaaacaaaaaacctaattgttcccacataagtctatgttcacacaagatctgaagagtacacaacaccgtgagacaggacagacataaattttaaaagttatattctggtttctgtaaaaataaaacggttgaatttaagcttttaagacaagtcaaggaaaagagcaaaaaatgcaaaagtgaaacttgaaaggtcattttccca

SEQ ID NO: 121355 - DNA, 534 bp, Homo sapiens
taaaatataatagccttaaaaatcttatttgtacctggcacagtggctcctgcctgtaatcccagcatactggcaagctgaggcaggcagatcacctgagatcaggagtttgagagcagcctggccaacatggtgaaaccccatctctactaaaaatagagcattkagcagggtatggtagcacatgcaggtagtatcagctactcgaggggctgaggcaggagaattgcttgaacccgagaggcagaggtggtaatgagtcaagaccgagccactgcactccagccttggtgacagagcaagactctgtctcaaaaacacaaacaaacaaacaaaaaacctaattgttcccacataagtctatgttcacacaagatctgaagagtacacaacaccgtgagacaggacagacataaattttaaaagttatattctggtttctgtaaaaataaaacggttgaatttaagcttttaagacaagtcaaggaaaagagcaaaaaatgcaaaagtgaaacttgaaaggtcattttccca

SEQ ID NO: 121356 - DNA, 534 bp, Homo sapiens
taaaatataatagccttaaaaatcttatttgtacctggcacagtggctcctgcctgtaatcccagcatactggcaagctgaggcaggcagatcacctgagatcaggagtttgagagcagcctggccaacatggtgaaaccccatctctactaaaaatagagcatttagcagggtatggtagcacatgcaggtagtatcagctactcgaggggctgaggcaggagaattgcttgaacccgagaggcagaggtggtaatgagtcaagaccgagccactgcactscagccttggtgacagagcaagactctgtctcaaaaacacaaacaaacaaacaaaaaacctaattgttcccacataagtctatgttcacacaagatctgaagagtacacaacaccgtgagacaggacagacataaattttaaaagttatattctggtttctgtaaaaataaaacggttgaatttaagcttttaagacaagtcaaggaaaagagcaaaaaatgcaaaagtgaaacttgaaaggtcattttccca

SEQ ID NO: 121357 - DNA, 539 bp, Homo sapiens
gaattcatgatcttcagtcaaggttaaatgaaagtagttactcctgtcagctaggtgattaaatgctgcctacatcaggcacatttatgtgcaaaattaaaattttggtataaagcatgaatctttatgcatgccagttaattatcttgcggttcctccagttattaaatgcccactgcatttcttcttaatcatcagcttcctttcaaaacttatttcatacttcacattacaccagatttcaatgtttaaatgaaatgccttaccaatgaaaacttcctctttttgagggcttggctgtactatgctactgaaaataatcacgatgaacattttctcattattatatacaagtatttctagaagacaggttgactaatgccaagatattttgaaagtgattctgttcaggctggaccaaggcttggttttgacctgggattcagcttcctgcatgcccctttacttcaccactgcaggtggccactgcayggtgacttgcgctgattgtaaggcattgcttctttttcctctctcat

SEQ ID NO: 121358 - DNA, 586 bp, Homo sapiens
tagcaaagcccaggcttctgtattcgatcacagattttatgtttgttttccttgtcagaccaagtctgatttgtggatttcctttgaatatgtgccccatrctctgatatgtaagttgttttagactataagtcaattatttggtcaccccttacattgtcccaataacttattttttcccttttttctatagcacagcataaaattttcacattatgcactgcctttcacatatggaccacgatgtattattttccactgctaaaaagatataaattcaagtgaagattattaaatatgagccttttatccaatacacaacttatcttttaaaagataagcacctttaacacaattagaattctatgctaatttagacttcttccattccttaatttcttttctcattgctttatccctcctgacacacatgaacaagtgttgggtacgtgtgtgcacaaacacacacagaaacaatgtgcatagtgtatatgcatacatgcacacacactgttgtttgattatcaaaataatatcagtgcatttacatagcacttatgattatacatatcacatactggaaaat

SEQ ID NO: 121359 - DNA, 649 bp, Homo sapiens
gaattcttttgacattaaatgttatcaacttaaatattttattttctccactgaattgtttaaatttgcaaatattagctatattatcacacaagtagactctctcaagactggtgtgatccttggaggaggaaattttataaacccagtatggttaaatcactgagaaaaaaaaaatgcttttcctctgtgaccttttatgtctaatcttgggaggaatgactattaaatagtrattagatccactttaacaggcctgtagtataaactgccagagactcttttctaaagtggcaattgtatatctggcctctggtaaagcattgccaaggagataatcaactttgtaaagtcatgaaacatgggattatttggtttgttttgtgttttaatacaaggattaagttcattcatttgcctgtgaactgtacatagaaaggtagttaataactttgaagcacaaaattaatagcttgttacccaagacagctaatataattagctcccacacactgagtctttataaaatatgtgaaaggaaataaagatcggttagtaaaagtctttatgtttttctttctaaggttcttttttccctattctctttttttcttcctttggttgaagggagcagttcacaattttaaca

SEQ ID NO: 121360 - DNA, 498 bp, Homo sapiens
tggttaacagttaaaatagctgaattgtgcgttttattcagtggttcaaaaaagcctcaaatggatgaaataacttgatatcttcgccatgctctgatttgctgggtaagacagctaacttttaggatgcttatttggatcaattttttataatttcaaaaccattttagaggctaatttttttttaaacaaggaatatacaattttttttttttgtcactgaacaagttttaaattactgktttgttattttgtaagtgaatttgtaagtgaaagcctccaacttaaattagcttcttgtccagggaactcattctgactgactaaagtccctaaggcctttctagttaaaggaaagccatggagctatgtttaaaaaacaaaagcacatagctatggggcttgggcatatcttctttttaaaatgtcactattactgttttgtctccagatgcaatttaatccatttagatatttaaaccaagtggaatgttgttt

SEQ ID NO: 121361 - DNA, 408 bp, Homo sapiens
ggcggctggcctgtacactgtagggtttccagagcagtgtttctcactctgggcactatttctatttggagcacattattstctgatgtggcggctagcctgtacactgtcgggtttctagagcagggtttctcactctgggcactatttctagtttggagcagattattctctgatgtggcggctggcctgtacactgtagggtttctagagcagcgtttctcactctgagcactatttctatttggagcagattattctctgatgtggcggctggcctgtacactgcagggtttctagaatacggtttctcactctgggcactatttctatttggagcagattattctctgatgtggcggctggcctatacactgtagggtttctagagcagggtttctcactctg

SEQ ID NO: 121362 - DNA, 408 bp, Homo sapiens
ggcggctggcctgtacactgtagggtttccagagcagtgtttctcactctgggcactatttctatttggagcacattattctctgatgtggcggctagcctgtacmctgtcgggtttctagagcagggtttctcactctgggcactatttctagtttggagcagattattctctgatgtggcggctggcctgtacactgtagggtttctagagcagcgtttctcactctgagcactatttctatttggagcagattattctctgatgtggcggctggcctgtacactgcagggtttctagaatacggtttctcactctgggcactatttctatttggagcagattattctctgatgtggcggctggcctatacactgtagggtttctagagcagggtttctcactctg

SEQ ID NO: 121363 - DNA, 408 bp, Homo sapiens
ggcggctggcctgtacactgtagggtttccagagcagtgtttctcactctgggcactatttctatttggagcacattattctctgatgtggcggctagcctgtacactgtmgggtttctagagcagggtttctcactctgggcactatttctagtttggagcagattattctctgatgtggcggctggcctgtacactgtagggtttctagagcagcgtttctcactctgagcactatttctatttggagcagattattctctgatgtggcggctggcctgtacactgcagggtttctagaatacggtttctcactctgggcactatttctatttggagcagattattctctgatgtggcggctggcctatacactgtagggtttctagagcagggtttctcactctg

SEQ ID NO: 121364 - DNA, 408 bp, Homo sapiens
ggcggctggcctgtacactgtagggtttccagagcagtgtttctcactctgggcactatttctatttggagcacattattctctgatgtggcggctagcctgtacactgtcgggtttctagagcagggtttctcactctgggcactatttctagtttggagcagattattctctgatgtggcggctggcctgtacactgtagggtttctagagcagsgtttctcactctgagcactatttctatttggagcagattattctctgatgtggcggctggcctgtacactgcagggtttctagaatacggtttctcactctgggcactatttctatttggagcagattattctctgatgtggcggctggcctatacactgtagggtttctagagcagggtttctcactctg

SEQ ID NO: 121365 - DNA, 321 bp, Homo sapiens
ttttccaaatctgtgcactattttgccttctcacggtgatatatgagcgcccctgttgctcctcatcctttacagcactttttattgtcagtctttttttytggagttggtctcactctgtcccccaggctggagtgcagtggcatgatcacagctcactgaagcctcgacttccctgggctcaggtaattctcccacctcagcctcctgaatagctgagattacaggcacacaccaccttgcccagataatttttgtattttctgtagaaacagagtttcaccatgttgcccaggctggtctggaactcctgggctcaag

SEQ ID NO: 121366 - DNA, 490 bp, Homo sapiens
agtgatgacggctccatcctacccggccatttcttcatggaggtgtggccacagggtctcagaccctgaaaatgagcatccggggacagtccctaactgagacggcccaggccagcagggccagtggaggattcgcattcactctggtgctccacaagtttgacggtttgggaaaattcgcggactctcccaaagcctgcatctcccacttctacaatgactrgttaaatgcgcccaaggaccaggcgctcgctacaccagcatgccaggaaaggggaggagcgacgtgaggacctcctgtgtcaccctgtcctgggcgctctgtgaactttgtgatgcctgagatgagctcccttttccagaggaggaaaaaggagcccaaaatttgacaggacatttgaagcatccgcccccctaccccccagctttgtggaatgaggtcaggaatatgtaaataaacaaacagagtacgtggtaaggagcagaattc

SEQ ID NO: 121367 - DNA, 457 bp, Homo sapiens
atgtactagattttctaaagtttcattttctctgttaaaattttctatttgttcactcattaagacaatgttttcatttaatctattaaagcaccaaatttatctttattttttcttcttctttttcctcttccacctcctctttttcttttctttttcttcttcttgtttttttaagagacagagtttcactctgttgcccaggctggagtgcagtggtgtgatcataacttactataaccttgaactcctggactcaagtgatcattttgcctcagccttctgagtrgcgaagactacaggtatatgccaccatgcccggctaattttcaaattttttgtacagacagggtctcactatgttgcccaggctgatcttgaacttctggcctcaagtgatcctcctaccttggcctcccaaagtgctgagattacaggtgtgagccatcatgcctgg

SEQ ID NO: 121368 - DNA, 602 bp, Homo sapiens
ggccaccacccagacgagggggaagcctcgatgcttagagatggtacaagccaggctctcattgcatctgggtttcgtggaaaaaacaatcctctcgagggtaactggaacttaatggatgcgccgcaggtggaaggcgctctgtccccctgtttacgatgacgcataatccctccaactctctgagaatgtgacacaaaggagggggtcacggtggctgaggtcaaggagcccttcctctgtgaagggcggccccaggtctgcgcggcggtgaagacagactggcagtgggagggagggaacccgacaaagagttgagacgcgtrgtcctcgggaacagcactgtggaagtcccccggattgaggcgcgcccgtccagtggagaatgccacctccagccactggggcgcctgggggcagggcggagacacagcgggcgtcccttcgccgctgcataggagggcgacgctgggcagcggttgttggcgcggtatccccgccctgcccagcatctgccccacgtttcttcaggctaaactaccgggatccgggcttcttcctaaagtaaaactcgctccggaaaggccaacagtccagcggcc

SEQ ID NO: 121369 - DNA, 584 bp, Homo sapiens
ggatttttgaatattcatcttctactctgtaaccttgctggagatgttcttaaattctaatagtttttaatggatatctaagatgttctgtatactagatcatgtgatttgtaaatagttatatttttatcttcyttacctatctttatgcctttaaatttcctgcatcactgccctagctaaaacctccagtatgctgtggaatagaatttgtcttattgctgattttaggcagaaaatgttcaatatttcattaaatacaatgttaactgtaggcttttcgcaggtgacttttatcaggttgaagaaattccccattgctagttaattgtttttatcatcaaagaatgttgaattttgtcactttttatctgtatctggtaagacaatcagctgactttattttattgttatggcacagtgttagattttcagatgctaagcctatcttgcattcctgagataaatagcacttggacacagtatataatgctttatatgttgttggatctgaatttcttgatttgttttgagcatttttgtgttcatattcttaagaaatactagtctgtagtttctatcta

SEQ ID NO: 121370 - DNA, 592 bp, Homo sapiens
ttagtatattaatcagcatccactcaagacagcaaaaccataaagtaatttaaacacagaaagtttcatgtaaagaaatattaagtatataaggagttaaaaacatgaaggattgtgtacctcaggggtaaaaggaattttaaagaatagaggaataccggatatagggagragtcattacctctcaggggaagtgccaccaaccaaagaagtacatctgggtttttctgcctgggttgacatacatagactctgccccatggtgtatgggaaaatggagacgttcactacggtgctgcatcaagctgtcccaggggaggtgccaagcctcggaagtcactgcaaagctgtctgcaagggtgctgaggtggtgagaagccagctaagagggacttgggagaagcagccagtgaagaggtgtcctatgctgctggatcccatacagaggagcacatgaaggaccgggaagggaagctgcctctcccatgtgaacctctagtgctcttcattgtctgagcttaacatcatgctatttgaaaataaatatttatgatgattggctccattatgattaagtagcaatgtagggtgc

SEQ ID NO: 121371 - DNA, 579 bp, Homo sapiens
ttcaaacggttctcctgcttcagcctcctgagtagctgggactacaggtgcctgtaagcacacccagctaatttttgtattttttgtagagacagggtttcaccatgttggccaggcttgtctcaaacacctgaccttgtgatcgcccaccttgacctccttaagtgctgggattacaggtgtgagccactatgcctgggctaaaatctatattttacttgaaaaaattgctattgaattattccactgcaakgtaaaatgaagaggttaagtgtgggcataccacagctgcacatggcttgttacaagccatttttaggcagactggttagccatcactgcctaagactgatttagaaatttacagttacacttgttcactcaatattctgcacactattgtgaatgaggcattcttaatccaatttcccttgaagttattacatagaacataaataagaaaagctattgttattgtttttcatcattggaaagtcaaatcagtctgaggctgagtgataagaagctgtacttctaataaaagtgagaagattcttgggtagaaagcactcagggaaa

SEQ ID NO: 121372 - DNA, 604 bp, Homo sapiens
tctgctacattttaccatcaccttaaacctactctaaaatatagactatcaatttgtaaaacactggttataaattgcaaatatgccatgattataactgtatggaggcaggtgccctgaagaaacattagataaatattcaaaaatgctaatatatttctattagagtgatagaaatatactgtgaaaaaaacttttttctttatttacaaatatttaataatataatcrtgttatatttcttgaatattttaaaatatgtatggctaccatatgtttactttgtactttcacttatttttttcatgaccatccattgaattatatgttccctaatttaaatagattcaaactatcttctgccgcataagatacagtggtgatatagtctgttaatctccattctcttgcattggagcaaagtgaagaagttacattgaaaaaaattgcgttagcaataacataaaatactgggcaaaaatgacagcacccttttatcttctaatttgcaacagcattcataaaggaggcttcaataattgtgcttttttaaaaaattgatttggtgatctattcaaatatcccattgttctcagaactgtgt

SEQ ID NO: 121373 - DNA, 604 bp, Homo sapiens
tctgctacattttaccatcaccttaaacctactctaaaatatagactatcaatttgtaaaacactggttataaattgcaaatatgccatgattataactgtatggaggcaggtgccctgaagaaacattagataaatattcaaaaatgctaatatatttctattagagtgatagaaatatactgtgaaaaaaacttttttctttatttacaaatatttaataatataatcatgttatatttcttgaatattttaaaatatgtatggctaccatatgtttactttgtactttcacttatttttttcatgaccatccattgaattatatgttccctaatttaaatagattcaaactatcttctgccrcataagatacagtggtgatatagtctgttaatctccattctcttgcattggagcaaagtgaagaagttacattgaaaaaaattgcgttagcaataacataaaatactgggcaaaaatgacagcacccttttatcttctaatttgcaacagcattcataaaggaggcttcaataattgtgcttttttaaaaaattgatttggtgatctattcaaatatcccattgttctcagaactgtgt

SEQ ID NO: 121374 - DNA, 586 bp, Homo sapiens
tgtggcttttgtttttctttttagaaatgttacataatgacctttagcttagcatattctgtggaaaaagctaaaaatggatttttttgtgggtgaattaacacacaatttgaattattttgcagtattactgtatttgaggtttgccactgccacaagtcagcagacactaaatattgyattcagctttcatatgcagtatttctggaagatagtatgcatatgtgggatgtaaaatatatcttttaagacattttcagtctaaatagacttcccaatctctttcactaagcccatggatcagcaggaatgtttttggagtgttcccacagaatcatcatttcatttatgatggcattacatttttagtcagtcttcaaaaactcatctttgaaattgtgtgaaaaaaatataagcaaatatctttcccccaaaatcctctaatatttcattagccttacagaatgagttaacatatttagcaaacttccaacatttttctcatgttacactggcttataatgttaaaagggacttaggaaaaaagagtttgatgtaccacaggtggactgcaaatttaaatggt

SEQ ID NO: 121375 - DNA, 586 bp, Homo sapiens
tgtggcttttgtttttctttttagaaatgttacataatgacctttagcttagcatattctgtggaaaaagctaaaaatggatttttttgtgggtgaattaacacacaatttgaattattttgcagtattactgtatttgaggtttgccactgccacaagtcagcagacactaaatattgcattcagctttcatatgcagtatttctggaagatagtatgcatatgtgggatgtaaaatatatcttttaagacattttcagtctaaatagacttcccaatctctttcactaagcccatggatcagcaggaatgtttttggagtgttcccacagaatcatcatttcatttatgatggcattacatttttagtcagtcttcaaaaactcatctttgaaattgtgtgaaaaaaatataagcaaatatctttcccccmaaatcctctaatatttcattagccttacagaatgagttaacatatttagcaaacttccaacatttttctcatgttacactggcttataatgttaaaagggacttaggaaaaaagagtttgatgtaccacaggtggactgcaaatttaaatggt

SEQ ID NO: 121376 - DNA, 586 bp, Homo sapiens
tgtggcttttgtttttctttttagaaatgttacataatgacctttagcttagcatattctgtggaaaaagctaaaaatggatttttttgtgggtgaattaacacacaatttgaattattttgcagtattactgtatttgaggtttgccactgccacaagtcagcagacactaaatattgcattcagctttcatatgcagtatttctggaagatagtatgcatatgtgggatgtaaaatatatcttttaagacattttcagtctaaatagacttcccaatctctttcactaagcccatggatcagcaggaatgtttttggagtgttcccacagaatcatcatttcatttatgatggcattacatttttagtcagtcttcaaaaactcatctttgaaattgtgtgaaaaaaatataagcaaatatctttcccccaaaatcctctaatatttcattagycttacagaatgagttaacatatttagcaaacttccaacatttttctcatgttacactggcttataatgttaaaagggacttaggaaaaaagagtttgatgtaccacaggtggactgcaaatttaaatggt

SEQ ID NO: 121377 - DNA, 280 bp, Homo sapiens
atgtaagcagacagatggaaatgtgaataaggaaacaaaacaaaatgctagaaactgaaaataccatagcagaaataaacactgtctttgatgggctcatcagtagacttcacatatctgaggagaaatcagtgagcttgaaaatatatcaatagaaatttcccacattgaaaggaaaatagaaaaaaaaactttaaaaaagaacagratagcacataaaagtggagcaatcttaaaaggcataacaaaacatatgattaacaggaaaagttgaagaggg

SEQ ID NO: 121378 - DNA, 280 bp, Homo sapiens
atgtaagcagacagatggaaatgtgaataaggaaacaaaacaaaatgctagaaactgaaaataccatagcagaaataaacactgtctttgatgggctcatcagtagacttcacatatctgaggagaaatcagtgagcttgaaaatatatcaatagaaatttcccacattgaaaggaaaatagaaaaaaaaactttaaaaaagaacagaatagcacatmaaagtggagcaatcttaaaaggcataacaaaacatatgattaacaggaaaagttgaagaggg

SEQ ID NO: 121379 - DNA, 585 bp, Homo sapiens
tttcctttgtccttaacttactcactatgtgtgatctatcctgtaaggcagtttgcaggaagtgggtaagttacacttgtgggaaaagtactgagtggagggcatggtgctgaccccgcatacagcacaaggaggccctagacttttgctcctcgggcgtacattgaagtgacaaagcaactccctcccaggcatccaggtgagtcaacgacatgatagaggcaatgcacattttattgtccactgcttcattctgggaaatattattcagatcaactattggcattctgcaaaacatctttagtcagtcagttttctrcgtgtataaataaagcaattgtactcattcatataagattttagcataaatgtttagtacattgtcagatctagtatattttagtgcataaatccgctacttggaatatatttgacatttaaaaataaagcagatttcagtgagcttttattgggggattatcaagaaggtgactcaaaagtttatatggacaggaaaatggcccagaaaagccaacaatattgccagagaaaaacaaagttggaggctaacattacccaactgaa

SEQ ID NO: 121380 - DNA, 585 bp, Homo sapiens
tttcctttgtccttaacttactcactatgtgtgatctatcctgtaaggcagtttgcaggaagtgggtaagttacacttgtgggaaaagtactgagtggagggcatggtgctgaccccgcatacagcacaaggaggccctagacttttgctcctcgggcgtacattgaagtgacaaagcaactccctcccaggcatccaggtgagtcaacgacatgatagaggcaatgcacattttattgtccactgcttcattctgggaaatattattcagatcaactattggcattctgcaaaacatctttagtcagtcagttttctacrtgtataaataaagcaattgtactcattcatataagattttagcataaatgtttagtacattgtcagatctagtatattttagtgcataaatccgctacttggaatatatttgacatttaaaaataaagcagatttcagtgagcttttattgggggattatcaagaaggtgactcaaaagtttatatggacaggaaaatggcccagaaaagccaacaatattgccagagaaaaacaaagttggaggctaacattacccaactgaa

SEQ ID NO: 121381 - DNA, 585 bp, Homo sapiens
tttcctttgtccttaacttactcactatgtgtgatctatcctgtaaggcagtttgcaggaagtgggtaagttacacttgtgggaaaagtactgagtggagggcatggtgctgaccccgcatacagcacaaggaggccctagacttttgctcctcgggcgtacattgaagtgacaaagcaactccctcccaggcatccaggtgagtcaacgacatgatagaggcaatgcacattttattgtccactgcttcattctgggaaatattattcagatcaactattggcattctgcaaaacatctttagtcagtcagttttctacgtgtataaataaagcaattgtactcattcayataagattttagcataaatgtttagtacattgtcagatctagtatattttagtgcataaatccgctacttggaatatatttgacatttaaaaataaagcagatttcagtgagcttttattgggggattatcaagaaggtgactcaaaagtttatatggacaggaaaatggcccagaaaagccaacaatattgccagagaaaaacaaagttggaggctaacattacccaactgaa

SEQ ID NO: 121382 - DNA, 585 bp, Homo sapiens
tttcctttgtccttaacttactcactatgtgtgatctatcctgtaaggcagtttgcaggaagtgggtaagttacacttgtgggaaaagtactgagtggagggcatggtgctgaccccgcatacagcacaaggaggccctagacttttgctcctcgggcgtacattgaagtgacaaagcaactccctcccaggcatccaggtgagtcaacgacatgatagaggcaatgcacattttattgtccactgcttcattctgggaaatattattcagatcaactattggcattctgcaaaacatctttagtcagtcagttttctacgtgtataaataaagcaattgtactcattcatataagattttagcataamtgtttagtacattgtcagatctagtatattttagtgcataaatccgctacttggaatatatttgacatttaaaaataaagcagatttcagtgagcttttattgggggattatcaagaaggtgactcaaaagtttatatggacaggaaaatggcccagaaaagccaacaatattgccagagaaaaacaaagttggaggctaacattacccaactgaa

SEQ ID NO: 121383 - DNA, 584 bp, Homo sapiens
taagaatgcttagatgtcatagaacaaagtgtatttaccctgtgagtaaatggagaagagaacagaagccccacatctaaatcttgggtatcccaacatgtaatggttggtgaagatttctgttagtaggctgagwaggagtggagagtggggaaggaaaaaaattatacatttttaatattgtattctgcaggccaaaaataaagcatttcaaaaaggagggagtatgaactgtgtgaaggacacttaaaaggttaccatgaagaactctgagaattgtcctttacctctggcaacgtggagagtgctgacaacctagggaggggtaagtgagaaatgagagtcccacaggtgtaaatataagagagaagaggtggggataagtggagattcaggccatgactattgacactattttacagatttttttttttaatggagagcaaagaaattgagtgaggaacagagaaacacgtggagcccaagaacagcttttacaactaacttaaatatttggtaagatagggtatattactgcacgtgagattgtcaacggaaataatctactaaggacagaggaataa

SEQ ID NO: 121384 - DNA, 616 bp, Homo sapiens
ttgggaatttaatccatttacattgaaagtgattactgataggtaaagacttaatatttccattttgttagttgttttcatatattttgtgttattttatgcctgttttcctgtcttgctgccttcatttgtgtgtcttttaggttttgttttggcatggtttgattctttttgygtgttatttgtgcatcttctgtagatttttttgtgtgttgtttacattgagattacataaattataacatcaattataacaatccttttttttttagacagagtctcgctccatcacccatgctggagtgcagtggcactattttagctcactgcaacctctgctgcctgggttcaagcaattgtcctgtctcagcttcccgggtagctgggatcacaggcgcctgccaccacactcacctaatttttgtatttttagtagagacagagtttcaccatattggcaggctcgtctcaaactcccaacctcaggtgatccacttgagtcagtctcccaaagtgctgggattatatgcgtgagccaccgcgcctggcctgtaacaatcaattctaacatatagaaagcacacaggctccactcttatctttactctactttatc

SEQ ID NO: 121385 - DNA, 699 bp, Homo sapiens
aatattgaaataatgacaactgatttttaaaacaaaacaaagatgtatgtggaccaagtgttgaggcagccagatgtggtcacagtgctatgccctctgctgctttttcttcctctacagctggaaatttcacactkcagtaatttcttcctacatattttcctgtgtcccttttttccccattcaaaggccttctatgtatttctgacaattattttgtttaaacacaggttttatcgtcacatttatctttcaaacatccccatggctcctggttgcctacacaagaattccaaactgcttatctcccacacaaatctttccgtaaacagagcatcatctttccaactctgggccatctttgcatattagctgttcaatgccatgtctgccacactcattcatgtcattctctgggtgtgaagtacccttctgtctttcgcaaccaaatccacactcatttccacgtgcttcctccaccatgaagccatcttcaatcgataacctaccccaggaagattgttttgtaattggttaaagaccaattccacttgtgtcagcaataataatgtgtattggtaaatcattttatatttagagttgcaacataaattatgtcttattatcttaatgtggctataattttcacaaaacactttcatgtatgacgaaagttgatcctcaaagccacctcattag

SEQ ID NO: 121386 - DNA, 699 bp, Homo sapiens
aatattgaaataatgacaactgatttttaaaacaaaacaaagatgtatgtggaccaagtgttgaggcagccagatgtggtcacagtgctatgccctctgctgctttttcttcctctacagctggaaatttcacactgcagtaatttcttcctacatattttcctgtgtcccttttttccccattcaaaggccttctatgtatttctgacaattattttgtttaaacacaggttttatcgtcacatttatctttcaaacatccccatggctcctggttgcctacacaagaattccaaactgcttayctcccacacaaatctttccgtaaacagagcatcatctttccaactctgggccatctttgcatattagctgttcaatgccatgtctgccacactcattcatgtcattctctgggtgtgaagtacccttctgtctttcgcaaccaaatccacactcatttccacgtgcttcctccaccatgaagccatcttcaatcgataacctaccccaggaagattgttttgtaattggttaaagaccaattccacttgtgtcagcaataataatgtgtattggtaaatcattttatatttagagttgcaacataaattatgtcttattatcttaatgtggctataattttcacaaaacactttcatgtatgacgaaagttgatcctcaaagccacctcattag

SEQ ID NO: 121387 - DNA, 568 bp, Homo sapiens
gtcactttgttcattgctactttgtcttgaatttgactcctttcttttacacaaaagtgcatcatttattagtcttttaatattattattaagaatgttttgcaactgttttgtggttattttaagggttttttccctatttttgcttacgcatgagcaataattcagttagacatatagttctaagtcaaagtcttccctagagtcctttaattttaagagttattgttatttctaataagaaatatgatgcctgcctaattttctcttctttgtaggtaacctgttggagcaagccttggtctttgcaagccaagcatattcaagggattttacgaagggactgtgtatgctgatgtgggtgaggctaaggaaacagacaagaaatattgatgtctccagggacccacacacacataaagggggatccagcattcctttaagsctgtacctaaaagctgagggagtaatgtttccagaacctgggtgagaatcggagcaataggagaagatgtcaccatacagggatgaagccctgggcagaaccatactgaagcaggaaatgcag

SEQ ID NO: 121388 - DNA, 288 bp, Homo sapiens
ctttcttcttcctgtgttctcagcaatattgtttgtttagctttcaatgtgactttcattccacatatagttgtattttttccaccttttcctgtacactgccagtcatgtttcactttcttttgtcaaccatgacttacstaagcggttgcatttcttatccttcttttattttatgaaagtggttgctttaggtttctattccttaatgaataggaatataattggaatctactttctggaaagagttgccaatagagtgcttttggctgccatgcatttctcgtg

SEQ ID NO: 121389 - DNA, 288 bp, Homo sapiens
ctttcttcttcctgtgttctcagcaatattgtttgtttagctttcaatgtgactttcattccacatatagttgtattttttccaccttttcctgtacactgccagtcatgtttcactttcttttgtcaaccatgacttacctaagcggttgcatttcttatccttcttttattttatgaaagtggttgctttaggyttctattccttaatgaataggaatataattggaatctactttctggaaagagttgccaatagagtgcttttggctgccatgcatttctcgtg

SEQ ID NO: 121390 - DNA, 288 bp, Homo sapiens
ctttcttcttcctgtgttctcagcaatattgtttgtttagctttcaatgtgactttcattccacatatagttgtattttttccaccttttcctgtacactgccagtcatgtttcactttcttttgtcaaccatgacttacctaagcggttgcatttcttatccttcttttattttatgaaagtggttgctttaggtttctattccttaatgartaggaatataattggaatctactttctggaaagagttgccaatagagtgcttttggctgccatgcatttctcgtg

SEQ ID NO: 121391 - DNA, 288 bp, Homo sapiens
ctttcttcttcctgtgttctcagcaatattgtttgtttagctttcaatgtgactttcattccacatatagttgtattttttccaccttttcctgtacactgccagtcatgtttcactttcttttgtcaaccatgacttacctaagcggttgcatttcttatccttcttttattttatgaaagtggttgctttaggtttctattccttaatgaataggaatatarttggaatctactttctggaaagagttgccaatagagtgcttttggctgccatgcatttctcgtg

SEQ ID NO: 121392 - DNA, 589 bp, Homo sapiens
ggccgtctcatgaatgaggtcacttccctctatcacacatgtgggtgcataaaagcctggcccctccctcagcaggaagacaatgctgaaggatcctctcagttccagctctccccctaggaggggctgaagtcccccagagcccacatctcaacacaacttttctctccacctaatcctatgtccacaggttttaatcccaaaagcaatcctaatcctcctctcccacactcatctctggctcagagttggcttctttgggatcccagcctgctacggttggtataaaagttatataagacagcaagcagtaacttggatgaaatcttggagccagctgacacactgattagcctctgcttggctggcaatgaagatcccatatccagtggacacagaaaacttcyggcaccaggtgatgtccagttgttgaaattttggaaaacacaaatggtttcttcatggaagtattatttcatgtgatgcatcacattctgaaagctacagaagccattgtattggaatcaacatatggagtatttctcaagaactcatgttggttccttggctcgtgtggaagatcaagcaa

SEQ ID NO: 121393 - DNA, 554 bp, Homo sapiens
acattgcaggaagtttataaatgtacattttctatcatcttcccccgtaagaccatactttaaatttaacataactatatagatcccataatgactagcaatatgccctgcacaaaatatactcttgagaaatgtttatgaaattaaactaaatttaaaatatatakagagaatacaaatgtttttaatacatcattattttaaattacaaaaaatacaagcttaagtcctaaaattaattttatatattttgaattttatgtattataattataactaaaaatccacagtgctcaaactttttttgttgttgtcgttggttggttcattttttttttcagccaatctcacatgaggccacagagtgtcaaggaaagaataaacaatttggagccaaagttgaatttaaatttagcatatttcattggctcaaagataccattaattatgagatgaacatatacaattgttacaaagactgtactgccaatacactaaggcatgattgctaatgcattaagtgcacaatgaatacttatttcagagaagttaat

SEQ ID NO: 121394 - DNA, 661 bp, Homo sapiens
tatctatggattaatcaaatagtccaacggcaatatggactatttacctattagaatatgaactctccacattccatagttaattatgtcctatggtggttggtttgttcacaatccttatgaaatatgtttgccaaagaaaggaatagatgtaaattatacatctccatatctccacttttccatatccacatacccatatctccactacagtcatatctccactttgcagcatatggagcgtcagaaaaactaaatagctcccccaagacaccaagctaggaaatttatattctttttgtaaaccacacctgatgcagaaattgctgcttcttatgtcatgtcaccctacaaggtcacaatgtggatattttcaaaactacaggctttttgttgtctctcagagaattgcaaagcctgttaagtttcataaaagttgattcaagttagaaggtgatagcatcgaataatgagttacattcatatttcragcgaaagcattaaacaatttcgcaactccacttaaagcatttattgtctgatatcttagaaccaattccaaggggagcaatggatttgggtctggatgctgtagaatgtggtcagtatttaagttattctgtggaggataactaggatattgagtgtaacagtagtgagt

SEQ ID NO: 121395 - DNA, 513 bp, Homo sapiens
cccttccctccccctccgtcacagggcatcctgtccctccccctccgtcacagggcatcctgcttatgaatgcacattcatattctcggctggggaaatattgccacagctcaggtacccactgggcttttctttgcttttgacagaagttatatagagtttatatttaaagaaagaaaaatgaaaggtttttctgaatttctacagaaaatgttgagctttttyaatgttccactcacactggagcttcttatagaggagcctagtgatatcttttgcaaacaaaggaagcttttggtggtgctcttaatatgaaggtcaaggttttatttatattcacattcaattcagaaagaataaaaaaatcaatacagatatgaagctggtatacattgtccacaagccctggtatttttaaatgtgacacaaaaaggcacatgcaaagggaaactgctgaagaaggatttggctcacagacactcatgaaactctacactttgccaccagtaatca

SEQ ID NO: 121396 - DNA, 583 bp, Homo sapiens
ttataaatttcctctaaataactaaatgcaatatgtgatcctggaatttatctaggactgtgaaaacattacaatacaggactttattgggacaattgacaaaatttgattatagattgtaaattagatagtagttttgcattaatgttaaatttgctgatttgaataattgtccagggattatgtaagagaacattctcattcttaggaaaaacacagtgaagtatttagtggtaaagagacattttgttttcaactcatgacaaatggttcaaagaaaaaagaaaaactatcawtatacacacgcagaaaaaagttgagaaatcagatggtcaaaatgtaaataattggcaaatctgagtaagcagtatgagatttttgtactttttttgtaactcttttgtaaattaaaatcatatccagataaagaccaattttttttttaaaaagaagatagtcaaggagacagtcttaccatttaatcaacaagtaatacttaaacgttttaaatttattttcttggctatgcctcttttcttttagaagcacatttataagttggctaaaaatgtaattaaaactg

SEQ ID NO: 121397 - DNA, 583 bp, Homo sapiens
ttataaatttcctctaaataactaaatgcaatatgtgatcctggaatttatctaggactgtgaaaacattacaatacaggactttattgggacaattgacaaaatttgattatagattgtaaattagatagtagttttgcattaatgttaaatttgctgatttgaataattgtccagggattatgtaagagaacattctcattcttaggaaaaacacagtgaagtatttagtggtaaagagacattttgttttcaactcatgacaaatggttcaaagaaaaaagaaaaactatcattatacacacgcagaaaaaagttgagaaatcagatggtcaaaatgtaaataattggcaaatctgagtaagcagtatgagatttttgtactttttttgtaactcttttgtaaattaaaatcayatccagataaagaccaattttttttttaaaaagaagatagtcaaggagacagtcttaccatttaatcaacaagtaatacttaaacgttttaaatttattttcttggctatgcctcttttcttttagaagcacatttataagttggctaaaaatgtaattaaaactg

SEQ ID NO: 121398 - DNA, 583 bp, Homo sapiens
ttataaatttcctctaaataactaaatgcaatatgtgatcctggaatttatctaggactgtgaaaacattacaatacaggactttattgggacaattgacaaaatttgattatagattgtaaattagatagtagttttgcattaatgttaaatttgctgatttgaataattgtccagggattatgtaagagaacattctcattcttaggaaaaacacagtgaagtatttagtggtaaagagacattttgttttcaactcatgacaaatggttcaaagaaaaaagaaaaactatcattatacacacgcagaaaaaagttgagaaatcagatggtcaaaatgtaaataattggcaaatctgagtaagcagtatgagatttttgtactttttttgtaactcttttgtaaattaaaatcatatccagataaagaccaawtttttttttaaaaagaagatagtcaaggagacagtcttaccatttaatcaacaagtaatacttaaacgttttaaatttattttcttggctatgcctcttttcttttagaagcacatttataagttggctaaaaatgtaattaaaactg

SEQ ID NO: 121399 - DNA, 633 bp, Homo sapiens
taagatatctgggcttcccctgcaaaagcagcagcaactctggcaaagtgggaggttcgacccccgtctgtacccctaggaaatccagggggatgagcagccgtggtctgcaggccccacttccaaggcacctcccaggataagacccactggcttggaacttcagccaggcagggatagcrgcgttacacctccctgagagggagctgccagagggagggtcaggccgccatctttgctgtttcatagctttggacgttgttgccttcaggctctggggaatatgaggtgaccagcaactggagcagtaccttgcacagcacagcaggtctacaaagaggcagccagactacttttcatgtgggtgtcagatcccattctcttcactggaccaaatttgccagctgaggtctataacatcccaaccggtgttttccagcaggtagcagttccaaacctccgtgggatgcagctcccagacagaggggtgaacaaacttcccatataagtggtcaagcctagttttctgtggaacctagtcagtattacttattatttgggtagtgaatgagcatcccatctttgctgtttcacagcctcagccattgctgccttcagtctttggagagtttg

SEQ ID NO: 121400 - DNA, 564 bp, Homo sapiens
gcactgaagtcacagtgttgaacctatcttttgattcagcagttttgaatctctctttttacggaatctgcgagtggatatttgtagctcattggggcctactgtggaaaaacaaatatcttcacataaaaactacacagaagcatcctgagaaacttctttgtgatctgtgcattcatctaacagagttgaatctttcttttgacacagcagttttgaaacactcttttttcagaatctgcaagtggatatttggagccttttgaggcctatagtggagaaggaaatatcttcacataaaaactatgcagaagcattctgagaaactactttgtgatgtgtgcattcatctcacagagtagaacctttctttggattgagcagttttgaaacactctttttttagaatctgcaagtggatatttggagccttttgaggcctatggtggagaaggaaatatcttcacataraaactatgcagaagcattctgagaaaccactttgtgatgcgtgcattcacctcacagagtagaacctttcttttgattgagcagttttgaaac

SEQ ID NO: 121401 - DNA, 639 bp, Homo sapiens
gtttttgtttttgtttttgttttcagagcactctaggaagcagtaaatgtgcctggcatttcaatgtgcataaatctgtgaaacatataataataatatttggaactgaagatataraaatagatgacaattattcatttaacctttgagttttcagcaacttgagaatgacagacaaattaatttatgagttcagatgcagaaggttaagcatctgacatagactaatgtgaacattcaaagatcaatagagcatcactagctgaaataataaaatcagaagattcaaatcagattcagacctaagctattcccattacttgtgctggaattgtggtaattatatctgtacataacttgtactttgttacagttaaaatatatattttgaatatgtctgtatgtatgttatacatatattacaatatataatattttataatcatctttatatataattatttgattgaatttataaagttctgagcaaagaaataagttaaagagaagtacttaagtgagcttcagttaacatacaattacatcaacctcctgatgtgcaggtaaaggtagatgttacgacttacagaatattaccttagcaaggtcagtccttttgtcattgtttttgaagttgta

SEQ ID NO: 121402 - DNA, 599 bp, Homo sapiens
tctctccaaaaacataatcttgaatgaaaacatcaagtcctagtgtgtcaaaatatatttaaattttagaaatagaacatttctataaaattaaaaagcacatattaatcttttatgcaaatgcataaataaaaaagaaacaaaggcagaccaaagagcccaaagagaaagagaaacacatatttcagtatatatcttagtactctcttctttgaaattacaaaatcgtatgtaatgtaaatttcartctgatagagcaggagcaccgtgatctcagacaaacaccaccactttaaattccagctccctttctagcctcatgcatttcaagtatatcatttctcttcgaactaaaagcagccagaaagagcagacagtaaaacacagataaaacagcttggatacagagggaggtgggcggaaagtctcttgagtaactgacaaacttcactttcatacagtgggccccagtaaaacagtgggccttaacaagcacattcctttcccttcaggtgcactaagatagggaggctaaaagcagactccgggggtacgcctgcacctgcagaaagatgtatgggaacagacacacaactctc

SEQ ID NO: 121403 - DNA, 599 bp, Homo sapiens
tctctccaaaaacataatcttgaatgaaaacatcaagtcctagtgtgtcaaaatatatttaaattttagaaatagaacatttctataaaattaaaaagcacatattaatcttttatgcaaatgcataaataaaaaagaaacaaaggcagaccaaagagcccaaagagaaagagaaacacatatttcagtatatatcttagtactctcttctttgaaattacaaaatcgtatgtaatgtaaatttcaatctgatagagcaggagcaccgtgatctcagacaaacaccaccactttaaattccagctccctttctagcctcatgcatttcaagtatatcatttctcttcgaactaaaagcagccagaaagagcagacagtaaaacacagataaaacagcttggatacagagggaggtgggcggaaagtctcttgagtaactgacaaacttcactttcatacagtgggccccagtaaaacagtgggccttaacaagcacattcctttcccttcaggtgcactaagatagggaggctaaaagcagactccgggggtacgcctgcacctgcagaaagatgtatkggaacagacacacaactctc

SEQ ID NO: 121404 - DNA, 642 bp, Homo sapiens
gtaatgtttgttatgatatggaataactggaacatttctggaagtcatacgttgttgatagagatataaaatgattcaactgctttggaaaacaatctgtcattttctcatacattaaaaaaccttcatttaacatgaattattctgataatgcgtttttttttctggttatatgtatactccttgttctgtactctagtttttccaatattaatatagtcactacagctttcttttgattaaactttgcatagcgtatcttttctcatcattttacttttaacttgttttagtgcctttatatttgagatgagttttttatacaccatattgaattaggttctccctctccttcccacacatttgagataattttttcttttacttcatacatagtgttgaactttgttctggtacacagataattttactttgaataaatttcttttaaggcttactttcaaactatattaggaaatgtccagcrcagtctttagtatgggactagctcacccctataaattactaagtactaaggcaataacctctgagaactgtacactggatctcgtatatgatgagctctgtttactctggtgtaaggaactaactcttcacctcttgtggattttaagaatgctt

SEQ ID NO: 121405 - DNA, 582 bp, Homo sapiens
aattttggaaactatagaaaaaattaaacaatgtgctttcaaatgaccagtgggttaatgaagcgattaagacagaaattgataacaattttaaaagaaatcataatggaaacataacataccaaaacttaagagatatamcaaaaacaatattaagagataattttacagcaatatgggcctatgtgaacaaagaggaaaagcttcgaataaacaacctaataatacatattaagaacttgaacagcaagagcaaatgaaacctaaagttagttggaaagaaataataaacatcagagcaaaaattaataaaatcaaaatgaagaaaaaaatacagatcaacaaaatgaaaactgggtttttgaaaatgtaaagaaaattgacaaacctgtggccagactaagaaaagaagagcgacaacccaaataaataaaatcagaaagaagacacaacagatctgtagaaattcaaagaggataattcgatgctaccatgagcaacaatatgctagtaaatttaaaaatttagaataaactcctagacacttacaacctacaaagattgaactatgaaaaaataaaa

SEQ ID NO: 121406 - DNA, 655 bp, Homo sapiens
attagacattggagctctctgtgtcaggtctttagactttctttttgactaagcagcccttccccatccccacaggttatctcgagtttggccttagactgaattatgctattggctttcctgactctcttgtttgcagatggcatatcatggaacttcttggtcataataattttatgagccaattcccataatatatctatcccctcatatatatttttatttgttatatatcttaacatctctttctatatatctagcaatttaaaatatctatcgatctgtatatctatctatctatctatcwctctatcatctaaccatctatctatctctttatcaatccattctattggtcctgtaactctagagaaccctgactaagagagagagacataaacattcagaccatagcatatttgttctctaatttcttttcctttgtcccccaacccctatagctctcagaatacagtagctgtcactgtcggtaagtcaataaagcctttaataataatgacatttttgtagttatttgatttattgaattcttgtacctaatatggtgcagaacaatgtgatactatatattataattatgtaagataattctaagaaggcatgtagcattttaaatgaataatatgtattacat

SEQ ID NO: 121407 - DNA, 655 bp, Homo sapiens
attagacattggagctctctgtgtcaggtctttagactttctttttgactaagcagcccttccccatccccacaggttatctcgagtttggccttagactgaattatgctattggctttcctgactctcttgtttgcagatggcatatcatggaacttcttggtcataataattttatgagccaattcccataatatatctatcccctcatatatatttttatttgttatatatcttaacatctctttctatatatctagcaatttaaaatatctatcgatctgtatatctatctatctatctatctctctatcatctaaccatctatctatctctttatcaatccattctattggtcctgtaactctagagaaccctgactaagagagagagacrtaaacattcagaccatagcatatttgttctctaatttcttttcctttgtcccccaacccctatagctctcagaatacagtagctgtcactgtcggtaagtcaataaagcctttaataataatgacatttttgtagttatttgatttattgaattcttgtacctaatatggtgcagaacaatgtgatactatatattataattatgtaagataattctaagaaggcatgtagcattttaaatgaataatatgtattacat

SEQ ID NO: 121408 - DNA, 646 bp, Homo sapiens
aacaccaaaagaatagaatgatttcttttataggtattcttttgtttcttttttaatccaatagaatgcacacacacacacatataygacacacacacacaagcatatatatatatatatatgcttgtatatataaatgcatcccccaacacacaaaataatagaaggaaagaagacggaatatagaatgaataaaaaaggtaagttttgatagcttcttatttcatgatgttaagtaggtttaaaataaagcaaataaaataccctagtcattggttttgataaatgtgatacagtacaccacattttgaactttcaattgataatttatttactactaaatacaatgagtgtcaatttaaactctacatcatttaacttattaaaacaaaattcgatatctattcagaacaccattcctcatcgcttgcaattttcatatttttttcctagcaggaaaaagaagtgggaaaaaattattggcaacagtgtttcactgattggtggaagggaaagaatatcacttactttcaagaaataggatacaatttgagagtttctgcttttcacaatgttgttttcagttattcagtgtagttattgatggtcttagtgtataagaaatttgaaagataaaacttataaa

SEQ ID NO: 121409 - DNA, 646 bp, Homo sapiens
aacaccaaaagaatagaatgatttcttttataggtattcttttgtttcttttttaatccaatagaatgcacacacacacacatatatgacacacacacacaagcatatatatatatatatatgcttgtatatataaatgcatcccccaacacacaaaataatagaaggaaagaagacggaatatagaatgaataaaaaaggtaagttttgatagcttcttatttcatgatgttaagtaggtttaaaataaagcaaataaaataccctagtcattggttttgataaatgtgatacagtacaccacattttgaactttcaattgataatttatttactactaaatacaatgagtgtcaatttaaactctacatcatttaacttattaaaacaaaattcgatatctattcagaacaccattcctcatcgcttgcaattttcatatttttttcctagcaggaaaaagaagtgggaaaaaattattggcaacagtgtttcactgattggtggaagggaaagaatatcacttacttwcaagaaataggatacaatttgagagtttctgcttttcacaatgttgttttcagttattcagtgtagttattgatggtcttagtgtataagaaatttgaaagataaaacttataaa

SEQ ID NO: 121410 - DNA, 640 bp, Homo sapiens
tagtaatgcatggagaaaaaagaaagttcaggaagtttaatgaccccttcttgtctcagtagctgcagagccaatacaactcagctgtcagaattcagttattgattctctattgcttataatatgacttttctctctttccccatgagtttttctattgatatacaaaaatccatttttatatttattgaatgcttacaaaataaaaaatactctgtgatgaactataatgatgtaaagtccatcagataaatatagaccttgttataaatactttgagaggaasaaagtagttttgtgagtttcagctaagaatatattatttccaaatgatagaattaacaatagttagatggtatataggatgaatctttaagaatagataagatattaaatgtagattgacagagattgtcatactaagagaggaaaatgataagaataagaaagtcaatttgaaaaaaaaaaaaattggtcaaccaccaaaatgtgggaagagtttgtatttcacttcggttggtagggttcctgagacaccaataggaactatgtacagaaagccatattctgagcagtgtctggaaggcattgaatgctaaattggggagtttgaacttattctaaagacttctggaatcta

SEQ ID NO: 121411 - DNA, 640 bp, Homo sapiens
tagtaatgcatggagaaaaaagaaagttcaggaagtttaatgaccccttcttgtctcagtagctgcagagccaatacaactcagctgtcagaattcagttattgattctctattgcttataatatgacttttctctctttccccatgagtttttctattgatatacaaaaatccatttttatatttattgaatgcttacaaaataaaaaatactctgtgatgaactataatgatgtaaagtccatcagataaatatagaccttgttataaatactttgagaggaagaaagtagttttgtgagtttcagctaagaatatattatttccaaatgatagaattaacaatagttasatggtatataggatgaatctttaagaatagataagatattaaatgtagattgacagagattgtcatactaagagaggaaaatgataagaataagaaagtcaatttgaaaaaaaaaaaaattggtcaaccaccaaaatgtgggaagagtttgtatttcacttcggttggtagggttcctgagacaccaataggaactatgtacagaaagccatattctgagcagtgtctggaaggcattgaatgctaaattggggagtttgaacttattctaaagacttctggaatcta

SEQ ID NO: 121412 - DNA, 640 bp, Homo sapiens
tagtaatgcatggagaaaaaagaaagttcaggaagtttaatgaccccttcttgtctcagtagctgcagagccaatacaactcagctgtcagaattcagttattgattctctattgcttataatatgacttttctctctttccccatgagtttttctattgatatacaaaaatccatttttatatttattgaatgcttacaaaataaaaaatactctgtgatgaactataatgatgtaaagtccatcagataaatatagaccttgttataaatactttgagaggaagaaagtagttttgtgagtttcagctaagaatatattatttccaaatgatagaattaacaatagttagatggtatatargatgaatctttaagaatagataagatattaaatgtagattgacagagattgtcatactaagagaggaaaatgataagaataagaaagtcaatttgaaaaaaaaaaaaattggtcaaccaccaaaatgtgggaagagtttgtatttcacttcggttggtagggttcctgagacaccaataggaactatgtacagaaagccatattctgagcagtgtctggaaggcattgaatgctaaattggggagtttgaacttattctaaagacttctggaatcta

SEQ ID NO: 121413 - DNA, 640 bp, Homo sapiens
tagtaatgcatggagaaaaaagaaagttcaggaagtttaatgaccccttcttgtctcagtagctgcagagccaatacaactcagctgtcagaattcagttattgattctctattgcttataatatgacttttctctctttccccatgagtttttctattgatatacaaaaatccatttttatatttattgaatgcttacaaaataaaaaatactctgtgatgaactataatgatgtaaagtccatcagataaatatagaccttgttataaatactttgagaggaagaaagtagttttgtgagtttcagctaagaatatattatttccaaatgatagaattaacaatagttagatggtatataggatgaatctttaagaatagataagatattaaatgtagattgacagagattgtcatactaagagakgaaaatgataagaataagaaagtcaatttgaaaaaaaaaaaaattggtcaaccaccaaaatgtgggaagagtttgtatttcacttcggttggtagggttcctgagacaccaataggaactatgtacagaaagccatattctgagcagtgtctggaaggcattgaatgctaaattggggagtttgaacttattctaaagacttctggaatcta

SEQ ID NO: 121414 - DNA, 503 bp, Homo sapiens
gcccaaatttagcaattactgaactccactttcaacatagtaatcaggggattcttttgaatcatatctgcaatatgtgagggcttaattcttcatccccaatcaagtacccaaatgtatgaaatggcgaatctgaaatccgtgttgtgatatctttgtgagttgatttaccacggtttctacttaataaaattcacctcctcctgtagcaaagcctcgtagatggagtatagtgctgacactcagcacatccagagtctggtgcatgcractgtactgcacttctacataatgaagtcaacatggtcagggaagagaagtgattaccctttctcaacctacttgctgcatagtatgggataccttttccctgtattataaactattcctggaatattcatatctaacagcccccataaataaggtagcaaaatagaaagagagtaaaatagatgtgtctacaatgttttatatttatcacgtgcaagataattattacatga

SEQ ID NO: 121415 - DNA, 503 bp, Homo sapiens
gcccaaatttagcaattactgaactccactttcaacatagtaatcaggggattcttttgaatcatatctgcaatatgtgagggcttaattcttcatccccaatcaagtacccaaatgtatgaaatggcgaatctgaaatccgtgttgtgatatctttgtgagttgatttaccacggtttctacttaataaaattcacctcctcctgtagcaaagcctcgtagatggagtatagtgctgacactcagcacatccagagtctggtgcatgcaactgtactgcacttctacataatgaagtcaacatggtcagggaagagaagtgattaccctttctcaacctacttgctgcatagtatgggataccttttccctgtattataaactattcctggaatattcayatctaacagcccccataaataaggtagcaaaatagaaagagagtaaaatagatgtgtctacaatgttttatatttatcacgtgcaagataattattacatga

SEQ ID NO: 121416 - DNA, 511 bp, Homo sapiens
tttactttcttcaaaatatttttatgtacagaacaaaagactttcatttaagtgataaatgtaaatagatctagcattgaacattaacttgtaatatttcctgaaaatgtttactttcctgactgaagacttgatatttgtgttacgtataatgttcctggatgattttagtaggttagttaatatggactatatctgacccaatgcaactgtgcaaactgaaaaactgatatatttgttagaatcacttcttatatcaataccataataagacattttagtcacaaatattattttaaaggttatatgtgtcaatgtttaaaggcacttgatgtgcggtaatgaaaactgtaatataatactcttattatcttacacttcattcattatattaatttcttattagaaatggctggcatacattcgtttttgtttgtttttgagatggagtcttgctctgtcacccagwctggagtgcagtggtacaatcttggctcactgcaatctctgc

SEQ ID NO: 121417 - DNA, 666 bp, Homo sapiens
gtacctactttttaagcctctcacttgctattgtatagccttgggaaaactacttaacattatgtggttatttctttcatttgtaaaatgaggatgtagtatctaatttttaaggttactatattaattaggtaaatgttaatgtaactaacccacagttcacctaaaaatatgataaaccaaattgggttcaaccatattgtacactttcataacccattgatatttttttccatgactgtatcttttaaattttaaaggaattgtctgctttattcacatttttatctgaaaatcttttttcaacttttaagttccgggttgtatgtgcaggatgtgcaagtttgttacataggtaaatgtgtgccatggtggtktgctgcacttatcaacccatcccctaggtattaagccctgggtccattagctattcttcctaataccctccctccccacccctaatatgccccagtgtgtgttgtctacccccgtgtatccatgtgttctctcgttttccttccacttgtaagtgagaacatgtggtgtttggttttctgttcctgcattactttgctgaggataatggcttccaacttcatccatgttcctgcaaaggacataatctcattcctttgtatggctgcacagtattccatggtgtatatg

SEQ ID NO: 121418 - DNA, 514 bp, Homo sapiens
gaaaagcaccagcgataattagctcatagcatatagatgtccttctcaggatagtttttcttttttaaattggttgaagaataaacaaacaaacagacaaactgccaggtcaaaccattgaatacagaagataaaaatcatgatgaaaggattgtttttcactctcctttaaaaagtgtattttatttatgtgctcaggttgtttagtattctttaataaatgaatamattaaatctggattaataataacacaaatagatgttttgcattttagttgtaaaaattataataacaatttgaggaaaagttctggctctgaagtaaactgtaccatatgatattgaatagccaattggtaaggaaggcagaaagttaaaaaaaaaagttattagagggaattattatccaaagtggaatgaagcttctaaacagagatgttttcagactctgttcatttcatcctcacatcatggaaaaaacagaaacaggcataacaactactacaaaacattg

SEQ ID NO: 121419 - DNA, 488 bp, Homo sapiens
agccttattgctgatattgagaaagtttcagtggtctggatagatcaaaacagtcacttcattttcttaagcccaagcctaatccagagcaaggccctaactcttaaattctatgaaggctgagagaggtraggaagctgcagtaaaaaagttggaagctagctgaggttggttcataagctttaaggaaagaagacatgtctataacataaaggtgcaaggttaaggagtaagtgctgatgaagaagctgcagcaagttatccagaagatctagctaagatcattgatgaaagtggctacagtcaccaacagaatttcaatgtagacaaaacagtcttctcttggaagaagatgcaatctaggactttcattgctacagaggagaagcctatgcttctccaaacttctcaaactttggaagcctatgtcttccaaacttcaaaggacagcctgactctcttgttaggggctagtgcagctggtgatt

SEQ ID NO: 121420 - DNA, 537 bp, Homo sapiens
gaacacaaattaggagaaaacaaagaaacctatgcagacatatccacagagatcagacctcaggaatatagacttgatcacctcataagggatgaaacctggcccactgaggtgaaggcagaataaaaagcgaatatcgattggatcagggggaataacattataaatactgatgaaaccctggtgaacagttgcagaaatgagaacagtaatagctcctcatattcttcttgcatgatcatacttagtagtacctaattattaatcatatacttctttttcatttctgtagtaytttatactgaatttttttgtcgtggttaccttttataattggtctataatttacaaaaataaagatggcatcgaaactggaagagaagagaattaacattacctagagttaaatgtaataactgatatgactttgggtcttccctttcatggaaacaatgagcacactttaatttgtctgaggtcttactgtgctgtttatgtgggagcatgctgttgttgcagttgggagtttaaacatga

SEQ ID NO: 121421 - DNA, 638 bp, Homo sapiens
aagttctttttttttttgaggcggagtttggctcttgttgccgaggctggagtgcaatctgtttcttcttgggacactcattcttggaacttcaccaccatgctgtgaggaagcccacgtaaccacatggagagcctatgtataggtgttacagccagcagtaacaactgagctcccagttgatagctggtatcaaccatcagtcatgtaagtgaggctttgcataatgccagcccctgactgtggaatcccttctattttttgagttaccccagtcattgagttagcttcaaatttagaatcttttcagctaaggccccagatattgcagagcagagacaaggtaacactctccaaatttttaactcactgtcagaatccgtaagaacaggaagatgattactgtgttggggtctgttttgccactatgtctgtggtgtttttcactygttaaggaagatttcagtactactctcctttactgttgcaagctattctgttgtgtgtgtttactgacttggctctgacctagaaacttgtctgtgctttacagagaaaaaagacttcttgctctgaggcacgttctttcatgcatgtgttcagcctggtgactattgtgttgatgaatacatcaacat

SEQ ID NO: 121422 - DNA, 588 bp, Homo sapiens
tccctcatcagtatttggaaatcagatgggtgatttggacttggccaaaattaactctttagtagcatattcgcatatttgcatagattttaaaaaatgaatgtagagccaatcatcaggttttgatgcgtattagtttgtactttcaaataattacaatgattaaaaaacarcatatacatttgcataacacttgacctttgctggaggtattcagtcagaggttagagaccatctattgcaggcattgtagaaggaaaatgttagacctggtgacttttaagatacatttaaactccagattcttttttctttttcttttggtggttgagaggacagggtttcactctattgtcaagactggagtgcagtggtgcaatcacacttcactgcaacctaattcccaggctcaagcaatcctcccaactcagcctcttcagcagctgggataacaggtgctcaccaccatgcctggctaatttttttatttattttttgtagagacaaaatctcactatcttgcccaatctggtcttcaactcctaggctcaagttatcctcccaccttggcctcccaaagtgctgatg

SEQ ID NO: 121423 - DNA, 518 bp, Homo sapiens
tgcaacctaattcccaggctcaagcaatcctcccaactcagcctcttcagcagctgggataacaggtgctcaccaccatgcctggctaatttttttatttattttttgtagagacaaaatctcactatcttgcccaatctggtcttcaactcctaggctcaagttatcctcccaccttggcctcccaaagtgctgatgttacaggtgtaagccacagagcccagccaaaatattttgatgacrtgaaaatactttggaaatatttataatttttttgttatgcttaatttttaggttaaattttaaacattttcttaaaaaacacaatttgttagtaaaattagagtttattctttgagtctttgaaattttagttaagaagcactaaattcttcaatgataataactcttgctttaaatgtctaaaatgaagccaaatgattcacatgaatttcatcttacttcatatatgtatgtgtgtgtgtgtgtttgtgtgcatatatatttatatatacata

SEQ ID NO: 121424 - DNA, 448 bp, Homo sapiens
ggctaaacaaaacagaataaaatattaatawctatggttaagtgtaaggaacggaaggagcagatttctgtgagacaaaaaaatagtatgtgggagtctaggtcagaatgggaggccagggcgtgcctatctaaaaacaaaaatgtcttaaagtgtgacctaagctatgaatataagttagctgcagaattgtgaaagaattgttaaggactatataggaaatggttttacttccactttctcctgaaacagctctctctgtatctgtctctgtcacacacacacacacacacacacacacacacacacacacgaaacattgaatgggattgcagcagacttctgagagttggaaagtagatgaacaagaggttttaataaagcaagtaagagagccaagaaacaagctaatttgcaccagcagataaagaggcactagaattagaat

SEQ ID NO: 121425 - DNA, 483 bp, Homo sapiens
tggcacatatacaccatggcatacttattttttattttttttttttttgagacaaggccttgctttgtcacccaggctggagtgcagtggcacaatctctgctcactgcaacctctgcctcctgggttcaagcaattctcctgccttagcttcctgagtagttgggatcacagctatgtgccaccacgccctgctaatttttgtatttttagtagagacagggtttcgccatgttggccaggctggtctcaaacttctgacctcaggtgatccacccgcctcagcctcccgaagtgctgggattacaggcatgagccaccacgtccagcctacaccatggcatactatgcagtcataaaaaagaacaagatcatgtcctttgcaggaacatggatggagctggagttcattatccctagcaaactaacacaagaacagaaaaccaaatacygcatgttctcacttataagtgggagctaaatg

SEQ ID NO: 121426 - DNA, 636 bp, Homo sapiens
aacagctggcactctcctttttgtacatgtccatacaaagatgaacatatcttctaaaatatggtattgccacagaatcaagcacacagattagaagaagccatgttctgatttttttcccagcattttgcatgatgtgtattgaaaacggggtttgtcaaaagcatargaacagctgtgaaagacttacttgaaaaaagtgaaagaaaaagagagagagaattagaatgaattagaattaggtaaagtgagtagctgcaaagactatcggaatgataacaataaaagatgtgggaagacgttctccggcgtcatgaaaattaacgtgggaagattgcctttaatcatcacctaaactaacaaaaagaaagggcaacgatttctgagtgacaagaagaaggtgctctttctctgaaccaagattaccatgtagttcctcaagaaaagcctgggtgaaggtaaaggaaatacagtttagtgtaacgtcccttaattatttacagatgtttatgaaactcctagttgtctcatctgttcagcagggggaaaaacataaacggaaaagcagagattgtgtccctctgtctgctatcaattaaatcatcaaaacaaaattatcattcaagttacaatgta

SEQ ID NO: 121427 - DNA, 574 bp, Homo sapiens
taaaaacacaaaaaattagctaggcatagtgggagcgcctgtaatccaagctactcgggaggcctgaggcaggagaatcacttgatcccaagaggcggaggttgcagtgagctgagatggcaccactccactccaggwtgggcaacaagagcaaaactccatttcaaaaaaaaaaagaacttctagcaatgttcgtcagagaatttgcagtaactcatgactctactatgttataaggaaataaccaaatccatgtgtgacttggagcattttgagacacagaattgctgaactacttggaaccaggatgaccaaacagaaactcataccaatccagggatggagatattttcttaatcattcttggctaaaagttttattaatgccttagtgtagagttgtaagaggtaaaataccagatgcataatactggatgtataattattatacatcttaattgtactttgtgctgtttttacagttatgtttagggacattgtcaagaataggcagacacattaactagcacccattactgactggggtgtaagcaagtctcagccctgtttctttg

SEQ ID NO: 121428 - DNA, 554 bp, Homo sapiens
tgttctccccaaattacatttttggggtgtagtktagacatcatgagccatgcttatcagttagggtagcgggaagttcccataagtccaagttcttaaatggcagtcttgggccaacctaataagtatgactttctcaggatagtctttctcaggatagagctcaggtccttagctcaactctttttagtaggctttttattttttattttgttttatagcacagtatgaaggaatatccaggttcataggaagttttcaaccaatgtctgcaatgatgtctctatgacaaaagatggttttcagagaaaatcccttatatattgctaaatagaactaatctcccccactattgggtatattaaccatggcagcatattcttcttatttttaagctggatatataaactcgtttttcttttgtatttgtataaatttaaggggtccaagtgcacttttattacatctgtatattgcctagtggtgaactcttggcttttagtgtatccatcacctgaataatgtacatcatacccaataagtaatttctcatc

SEQ ID NO: 121429 - DNA, 553 bp, Homo sapiens
gttcataggttcaggatcaaggatctggtagattcttgggctttggtttcttaaatgccattcatgaaggcaagagattcgggaaaagaacagaccaaaggtagagtgagaatggctcctactgcagacagatgctcaacttagaaagaccgaaatcgtcttttccatgcccacttctggtagggttaaaattgcctggaagaaaatgctgaatttctgtctgtactaaggaaacaatgacagcaaasctggtgatgtgagttaaaaaaagagaatgcaagaagaaaaggacaaattaggtgagctttgaatgatggatcagatgggacactactgggacactgattactaggatcaccctctaattcttgcagggcatggagattttgcattctgtttagaaaggtggtctccaacctgtggggctaccttgtcaggatgcattaagacttggagattacagctccagagagtaaacaatgaatcactcttccccatgatggctttgaaagaattgggggttaccacctgtgcatggtgtccgtctctgcag

SEQ ID NO: 121430 - DNA, 514 bp, Homo sapiens
aaaaaaaaaaaaaagacacaaaactagaaatgtcaaggccccatattgttaataaaataaaatatttaagggaagytaggtacctgaaatatctacagatgtgtagactccttaaaatattacccatcactcatgtttctagcaatatatgaagctctcaaaaaaatctagtgttttctaacatgaagacatttaacacaaatgctgccttttctaactgttgttcagagattttaacaaatgtgtgattcctgaaacgagcatatttttaaaagttctatctaatgtagtagctaatttaaagctctgagtcagttacattgcgttaaagtttatttatatatgtattttttttggcatagcagtttataaataagttttgcacatgggaagaaactaccacattctatgttacagtttccagactcatccactggtcttctcagttagagtaaatatggtgccagggaaggtggatgtcaattgggacatgtggtccaaagacacaaagacc

SEQ ID NO: 121431 - DNA, 514 bp, Homo sapiens
aaaaaaaaaaaaaagacacaaaactagaaatgtcaaggccccatattgttaataaaataaaatatttaagggaagttaggtacctgaaatatctacagatgtgtagactccttaaaatattacccatcactcatgtttctagcaatatatgaagctctcaaaaaaatctagtgttttctaacatgaagacatttaacacaaatgmtgccttttctaactgttgttcagagattttaacaaatgtgtgattcctgaaacgagcatatttttaaaagttctatctaatgtagtagctaatttaaagctctgagtcagttacattgcgttaaagtttatttatatatgtattttttttggcatagcagtttataaataagttttgcacatgggaagaaactaccacattctatgttacagtttccagactcatccactggtcttctcagttagagtaaatatggtgccagggaaggtggatgtcaattgggacatgtggtccaaagacacaaagacc

SEQ ID NO: 121432 - DNA, 619 bp, Homo sapiens
aggcaaaatgtatataattgtaatatctactagtctactttgcagggtagtttgtgccttatctgagatgaagtaaatgaaacacttgctgtgcatgcgcaggattttgtgtgctacaatgcaggttttataggtgaaggtaatgcttatagccctggagttgtccaaatatatgaaccaaaatataaagaaagctagaaacccacctgtgggaacttgggagaatagaatagttttagcgtggataccagagacaaatggatagtatagtcattactcctttttcagattcataggaagtaccctgttgccattgcaagagattttgtttttacacttcctgaagacctgttgtgtataaagtaaccttaagatagccccctttatactatcaagctcaattctgcagcagtggcactgaaaggacaaactttctttgtggagaaaattgaccagactcctaggccttgrttattgtactcccaatggtccttcttttcttagagatttcattaatccccattgccatgttcataccttaaaggagaagaagaagctgacttgagttctacagattggcttaatcggtcagctatgaacattttctaaaaacagttgt

SEQ ID NO: 121433 - DNA, 531 bp, Homo sapiens
agcccatgctcttttcgccacatcattgaatttccaacactgcaaagcagaggtttgttctctttaaagaatyggaattaaaggatcagaattttaggtgtttgttctctttaaaggatcagaattttaggatataggctgatgagtcttgacatttccttaatgtaacaagttaagtctttatttaagagatagaacaacctgtgattttcttccattggtgggccagacagataataaaaatgatagcaaaggttattaaaatttatacggagactagcatagattggaataactacaaagtgaattctttaagctgctatcgaaaggtggtgaaatagtacaatatgaaaaaaaaaaaactcttctttagcttcagatacctaaatatgtcatcaaaagactgctcaattctcaaatgctagtattttctgactcctctaaacctattcttaatgcaaaatatcaaagtcagcgggatagtaggtgtcccaaaatgtcttaattcagagaattagtgttaactgagcc

SEQ ID NO: 121434 - DNA, 601 bp, Homo sapiens
tgccaggctctgctggaagagccaaggcaggaggatgtctgcatcccacagacatctgaagggctgattctgagggctcttgaacagactcaacctattcatttgtgcctcaaacatatttcctaccttacagtacatgcctatcttaatgatctaaactttttttaatcaccaagataactacaaacaaggtagattgttgaaatgctgcactgcattcactaggtcacttctggaactttatcttaaggaaatcattagacaagtttgcaaagatatttctcaacgtgtgktttgaggactaccagtatccatatcgcctgtagtgcttgataaaatgcagcttcctgggtcttatgcctctcttattgaagatgtgaggctcatgcatctatattttaaaagagcctcagataattcttaatcacatttaagcttgaggatcactaatgtacagggatgttattgcaatattgtttaaaagaggaacaaaaaggagcagggagcctaaatgttcatcagaggaggattagttaaaataatgatgatacaatgacattctgcagctttaaatatgtaatatagatccatatttattgac

SEQ ID NO: 121435 - DNA, 548 bp, Homo sapiens
gtgtgtgccattgtgtggtggtcgtggaggagggagacccacgcgcctgtctatcgctggatgggattggaatttgaagaaaaaatgtccctactcctgttgcgggttcttgcctatctggccgcctccagtcccgcccacgagacctccagctttcattttcttcctgaactaaagcccgaggactgaggcccttcacgcgtagtagcccccacccccgktgcccaaagccggccatcgcacggcggttcttagctttttagtctctgtcacgctaatacatgctgttagtccaggtcagggatggttccatgcaggcgattttgacagcagtcatcataccaagctattaggaagcgtgatgtcagtgcgttctggaaggacagataatttataaaccagttcttgacatggtatcttacaaggaaacatctgaagccatcagtaaaagaggcattttaattcacacactaaaaatattttgtgtttagttaacatcgtgcaaatgttgaaagaggtagtagcatttatcattttgtaggtattta

SEQ ID NO: 121436 - DNA, 458 bp, Homo sapiens
agttttgctgcttgtttggttctgaatggacttttcctctacctgggagaactggtgactgaacttcctgcctgtctaagaggtttgatggaagtaacyattctacagcagtggcttattttctagcacagttaacaggcatctggtgattttctgcaactatctttcataaaacgagctaaatttttactggattggatgttgagattttattatacatatgtaagtgtgtctctttttctttctttcttttttttcttacttaaatgtgactgcctagagtactagaaggttttgtgagaagtggaaaatttattaatttttattttataaaattcctgagtttttccttatttcagcatgtttggagaaatacctatgtgtatgaaatagcctgataggttttaagtggcatttttgttccagagattttcccttatgactttgattcaatgaaa

SEQ ID NO: 121437 - DNA, 459 bp, Homo sapiens
ggctgaaggcagtctttccaataaaatgtcacattcttatgcctagttctgagacttgagccagctctaaaactggaattcacaggtccccataggaaggatcctgcaacaacagtgcaagtgtagacagcaatgatagccccagtggttttytaaataagcttatgactatttacttggaaactatgtacagagaagagggaaataaaaactttggatgtaggacccaaggtctgagagtatacagataacccaggcctcagtgtcatcatggtgccactattaaggtagacatgtataggaacttagtaataaactaaatcctgaccaaggtctggcttacagcgtttttgctaggtccacagatccaccaagtgtattttttttcctttctgattcctgaatttcccagatgttctggaaaaatagaatgaagggtaatcttttgaaggtagagat

SEQ ID NO: 121438 - DNA, 602 bp, Homo sapiens
ctctcattggagttagggtgtatcttaatctagtatgctctcatttgcatccttaccttaattatatcagcaaaaatcctattttcaaataagatcacattcagaagtcctgggtggatatacatttatgggaggaacactattcattcccactacaggtatggaaaaatacrttgtccttggtaaacactattgggaaataagaccctctatttctaggtgtcaagaatatctaaaactttaacttttactatggatcaagcattacccattaatgtattaactcatttgatactcagaaaactccatgaattaagtactgtctgttgccatctccaacttacagatggaaaaactgaagcacagaagggttgaaaatgttttgacagttattatagctgttaaatggctgagctacatttaaatccaaatattctaacacagagctcatgctcttaaccactatcatattcccaataaggaaacaggacggggaagaaaggaaaagcaaacaaaccaacggtttgaaggactaatatgcctaagtgcatgtgttaggtaatctaactttaatgatagaccactttagtaggtcttatcag

SEQ ID NO: 121439 - DNA, 597 bp, Homo sapiens
taaaatgaatgactgtgttctacattatggctagaaataaatacaccatggaagcctagtgatttggatttttaaacaaatttaagaaatttgtacaataaaaaatgagattgagtgtttgtctttacttcaaggaatgaattttaattctagtttttgttaaatggtcactcaagatttatagttcaacaattcttccacaaggccgccaaaggctattttggagttctgtttctgctattttccaaaggatattggaaggcttatagctacaataaactgtattttttttttggttcagtgaatttgagacccattaatcatatgattttagaaccagarttgagaattaaagaacctgaaatgaagtttgcaaaatggtggtccacaagcaaaagctctctgctgacaggttttgtttttcccacttgtattcacatacgttataaattacttgctattaagttgaattagttgcttttctcttctccactctgggaaagaattatattttcccaaccaagacattagtattggccatatgactgttttgtcatgtgaagtgttattgacatatcttggttttaacaaccactg

SEQ ID NO: 121440 - DNA, 609 bp, Homo sapiens
ttggctcactgcaacctccgcctcccaggttcaagatatcctcccacctccgcttcccaagtagctgggactaaaggcatgcaccaccatgcctggctaatttttgtattttgtgtttttttttttttttaraagaaatgggggtttggccatgttggccaggctggtcttcaactcctgacctcaagtgacccgcctgctttggcctctcaaagtgctaggatttctggcgtgagccactgcatctggcacaattattgttatttttaagaaatctaattctgttgcaacatttaaaggaatacattaaaaatgataggttttaaattatttttttaatgctgagtaatcactgagtttgcttcatacaaaatacattccgacaatcaccaacaaatcttcaaataaccaggaaggtagaagcctaaatggattaaaatcatggggttgatcagtattactcaatgttcccatgtaccaactctgcacatgtaccccctgtatctaaaataaaagttgaaatttaagaaataaaaacatggggtttagagtcagactaactggctttcttcagttattgtgtgacctctggcaagtctcttaatattg

SEQ ID NO: 121441 - DNA, 552 bp, Homo sapiens
acatttttcaattaatttttaaaaatcaactgccattgatttgcaaatgaagaaataaagccatggtcagaggtaaattgccttgcctgtctgaacagcgagagactattcagggtagtrtaactcatctaaccaagagagcatcaaaataaaataaacatgatttctttgcatgtggttattttcatgcatttaaagatggttctgttggcaagatttcttgctttttgttaacaacaaggaagtcataaaaatcaaactgctgtgtgcagtggctcatgcctataattaccaatttgggaggccaaagatggaggattgcttgagcccaggagttagagacccattcactacaaaatatacaaataattagccaggagtgctggtatgtgcctgtagtcctagctactggggaggctgaggtaggaggatgtcgaagttgcagtgagctgtgatctttctactgcactctagactgaatgacatagtgagacctgtctatttaaaaaagtaataataactcatttatcattcattaaatagtacgtgctc

SEQ ID NO: 121442 - DNA, 603 bp, Homo sapiens
cctagggacagaggggaaaggagaaacagttggactagactgcattcacccaggtcaaggaaactacagacaggagataaccaggaataagaaagatccctgaggagcacaaaaaagagtcagcttaaacacctgccagccccagggaaggtgagccattgtagcagcacagtcacagtggctttcatgccccttcatctgtccttccttcccttccttctacatggaagggtcagaaatcatgttgagccagctatgggaggagaaaaagcatgaggcaaagaaatagagaaatctcatactcccatgacatccctttcattttaaattactgttttgttgttgttgttttgttttgctttttttttcatgttaagtggctgtaaaactttcatttacctaaagggctttttatccagggcagggaaagaccacactcaatgagaagatttaaagacagagtgggagtcaaatgtcaactttagtttgtatttatacccatacgtgttgctcatccaacaaacaaattttacttaygttcagatgaaatatacaccttgtaaattctttctatagagtctagtccagccttcaggaacttac

SEQ ID NO: 121443 - DNA, 631 bp, Homo sapiens
tcagactggatgacatctatgcttccttttagttgtgatattttgttgttctttcataacattttaagtaattttttttattttttacttttttcatacattgtgtccaggcgctatgcttttktttgtttgtttgtttttgagacagagtctcgctgtgttgcccaggctggagtgcagtggtgtgatctcggctcactgcagcctccgtctcctgggctcaagtgattctcctgatttagcctcctgagtagctgggattacagatgtgcaccatcacaccaggctaatttttgtatttttagtagagacgggggttttgccatgttggccaggctggccttgaactcctgacctcaggtgatctgcctgccttgaccttccaaaatgctgggattacaggcatgagccaccatgcccagctaggtgatttattacatttttcatttgaatgtctgttgcagagatacagtgcaagaggactttatttatgagctaatatgcttttccagctgccttttggacatctatatctggatactccctgcaggctccttcatctctctatgtgaagtcaaattatcacctttctatcatcccatgagcccaacctgtttccctcctgagattc

SEQ ID NO: 121444 - DNA, 561 bp, Homo sapiens
tacttgccaatggctgggggaggaacataggaagtgactactaatacccatgtgtcttcattccacttgccaatggctgggggaggaacataggaagtgactactaatacccatgtgtcttcattccactgggtttctttttgcagtgataaaaattttccaaattcaataggggtaatggttgcacaataccattttagtgaatatactaaaagctactgaattgttcatttcaagagagcgaatgtcatactatgtaaattatatattaacaaagctattayaaaaataataaaacaaagaaatgcagctgtcatagtaatttatttaaaaaatccaataggcacaaataaatgaaaagatattccatgtttatgaattgtaagaaataatattgttaaaatgtccataccacccaaagcaatctatagactcagtgcaattccaatcaaaaatccactggcctttttcacataaatagaaaaaaaaatcctaaaatttatttttgaccccaatagctatagcaatcttgagcaaagtgaacaaaagctagagggatca

SEQ ID NO: 121445 - DNA, 561 bp, Homo sapiens
tacttgccaatggctgggggaggaacataggaagtgactactaatacccatgtgtcttcattccacttgccaatggctgggggaggaacataggaagtgactactaatacccatgtgtcttcattccactgggtttctttttgcagtgataaaaattttccaaattcaataggggtaatggttgcacaataccattttagtgaatatactaaaagctactgaattgttcatttcaagagagcgaatgtcatactatgtaaattatatattaacaaagctattacaaaaataataaaacaaagaaatgcagctgtcatagtaatttatttaaaaaatccaataggcacaaataaatgaaaagatattccatgtttatgaattgtaagaaataatattgttaaaatgtccataccacccaaagcaatctatagactcagtgmaattccaatcaaaaatccactggcctttttcacataaatagaaaaaaaaatcctaaaatttatttttgaccccaatagctatagcaatcttgagcaaagtgaacaaaagctagagggatca

SEQ ID NO: 121446 - DNA, 588 bp, Homo sapiens
actcaaagaaattcaagataacacagagaaggaatttcaaattatatcagataaatttaacaaaaagaaataaagaaaatcaatcagaaattcaggagmtgaaaactgcaattggtatattaaagaatgcatcaggctggcaagatggccgaataagaacagctccagtctgcagctcccagggagaccaacatagaaggagggtgattcctggatttccagctgacgtacctggttcatctctctgggactggttagacagtgggtgcagcccacagagggtgagcacaagcagggtggggcatcacctcacctgggaacagcaaggggccaaggaactccctgccttagccaagggaagccatgaggaactatgccatgagggactgtgctatccagcccagatactatgcttttcccaaggattttgcaacctgctgaccaggagatgccctcctgtgcctacaccaccaaggtcctgggtttcaagcacaaaactgggcagctgtttgggcaggcatcaagctagctgcaggagtttttgtttgttggtttgtaccccagtacaattgttctggagacagaacc

SEQ ID NO: 121447 - DNA, 588 bp, Homo sapiens
actcaaagaaattcaagataacacagagaaggaatttcaaattatatcagataaatttaacaaaaagaaataaagaaaatcaatcagaaattcaggagatgaaaactgcaattggtatattaaagaatgcatcaggctggcaagatggccgaataagaacagctccagtctgcagctcccagggagaccaacatagaargagggtgattcctggatttccagctgacgtacctggttcatctctctgggactggttagacagtgggtgcagcccacagagggtgagcacaagcagggtggggcatcacctcacctgggaacagcaaggggccaaggaactccctgccttagccaagggaagccatgaggaactatgccatgagggactgtgctatccagcccagatactatgcttttcccaaggattttgcaacctgctgaccaggagatgccctcctgtgcctacaccaccaaggtcctgggtttcaagcacaaaactgggcagctgtttgggcaggcatcaagctagctgcaggagtttttgtttgttggtttgtaccccagtacaattgttctggagacagaacc

SEQ ID NO: 121448 - DNA, 588 bp, Homo sapiens
actcaaagaaattcaagataacacagagaaggaatttcaaattatatcagataaatttaacaaaaagaaataaagaaaatcaatcagaaattcaggagatgaaaactgcaattggtatattaaagaatgcatcaggctggcaagatggccgaataagaacagctccagtctgcagctcccagggagaccaacatagaaggagggtgattcctggatttccagctgacgtacctggttcatctcyctgggactggttagacagtgggtgcagcccacagagggtgagcacaagcagggtggggcatcacctcacctgggaacagcaaggggccaaggaactccctgccttagccaagggaagccatgaggaactatgccatgagggactgtgctatccagcccagatactatgcttttcccaaggattttgcaacctgctgaccaggagatgccctcctgtgcctacaccaccaaggtcctgggtttcaagcacaaaactgggcagctgtttgggcaggcatcaagctagctgcaggagtttttgtttgttggtttgtaccccagtacaattgttctggagacagaacc

SEQ ID NO: 121449 - DNA, 651 bp, Homo sapiens
tggtactggcaggaatttcaattccctggagcttgaaagcaatacacatggcactctttaatgtgaatccagctaaaagctggctggggaacaaatgacagccagatagcttgccctgccatagtcgtgaatcttccctttgaggattgcattattagagttctttcctcccaaaacactgtattataaacctaatgcktggctcagtggtttagggatatataagaaagcataatagaaaacattctagatcagctcctatttctgttctcaatattaagataattttggtatctgtatctgcctaagcttcatattaagagacggaaagagattgttttttgtatttcttgatagcagcaatagacgagagttactcatgtgctctgctgtatgctgctcacacacatcaaattaccctcctaacacatatacttgcatgtcttgcacatgtacaggcacacgctgcaggcatagtcctctaaggcaatcaaagcacatcaagggtcctgcctacatgtgcttttaagttccattaaggactcttggagagtgactatttcataatggctcacacttgataaaaccagttcaagagcaatttatatgcccaagactaacatatgaaaaaacaacaacgcagaacaaaaa

SEQ ID NO: 121450 - DNA, 549 bp, Homo sapiens
tgcctagtataatgcctcacacagagaagggcccttattaatattggggaattaaaacaaacttatcttcctggcctcccctttatttttataaatgttggtatttcatatcaggaagtatatatgaatktcaatcatattatacaggatcttcaaattagagtttccaaatttagtcacaaattttgtttctgattttaaggagaaatttttcaaagactaatacagtttgtatcaaggtttaaattgtgtctttcaaatgttttcaaatggtaaaataaagggtagtaaaacaagcaatatttgtagttacaataaaaacagaaatttctccaatgtcacattcatgttaatactgaatttgcctgtctgtggaatgcttattgctatttaacaaaaacttgagaggccatgtaaatcactcaatcagcttctaaattaagccagtttaaagatctttcatgggtaagtttaaataaaacaataatatagcatgaatgtatactgtgggaaactaatgagcctgatgaattaacagtgcgatcagga

SEQ ID NO: 121451 - DNA, 587 bp, Homo sapiens
aagggaagcagtatgtttttttaagctccacaataaatcagcacaattaaacaaaaataaatgaatcaaacaaacaaagagtgaamatgtataagacacaactaggggtaaatgggtctgccctagagagactcataattttttggtgacagtaaatgtaagtcctaaaacagaagtatgaataaggaatggcgggagcacagaataaatctcatgtaatccagccttctgtcctgaaagctgtgaagttatttcattaagaacaactgattcctttaaagccaaagaatgaggctgggcgctactggttactatatatagggtgtagatatgtagtctttccacactctactgaattctgtacctaattaacacaagactatcagtttcaaaacagcagactggaatagtgtttctagtcgagtgtgctgttggctattacatggtatggctctcagcatttttgcctacagagtcagtttctcagttcaaactatttattacttagtatttctatttccctaacccacataccattatatatgtagagggtctctgctatagaaatgccccacaaggaatgtgaa

SEQ ID NO: 121452 - DNA, 597 bp, Homo sapiens
aacattgtaaaaaagtccaaaatgaaatcgctgataaactggagtcaagcttagaagatagccaagagatgcaacaaaatgagactctgggaaacagaaggtaatagcaagtagttaagagtgaccaaactcctttactaccttcattcatacttttatatagctgcacatttttaaatctcaaactgaaaacttttctgactaccgttagaaacctaattattgagttgttgggaaaaatagaccaggaaacaaaatcattcctgtgagttttatgaaataaattgctacaaaaatatttattgaattgtcatggaataagtaaaatagagatatcctaattagttgtaagtatcatatattatraaaccttattaaaatatttatgtaatgataatcatgctctagatcatcggaacagctaccatatgtcatggtacatgcacctgctgcatgccaggtcctgtgcacaaatattttctcatttgttccagcagtgacactatgattattgctaaccttgatttctagatgaggaaaacagagactaaagctagtcagtggcaaaggaagaatcctaacctagaattatctgac

SEQ ID NO: 121453 - DNA, 646 bp, Homo sapiens
aaattacataattatttgtgtgtcagttctttcatccttaaatgaggataatatgagtacctatctttgtgagtatcaaagtattgtatgtatttagaacactacctgactcctgctaagtattcaatagatattaactatgattattagtagtaatattatggttactgacatcacttacttcctcagacttcttcctgcttcttgtgctagactagcttggtataattattttagctttctaagacagaaacttataatcatgtctttgctcagtcttctggaaactctctgaagaagaractcttttaaacaactctctgaggcaacatgctcaaagctaagtggctcttctttgagaaaatacacactcagctagtcattttctctaggcaaggtcaagttctctaaatggctcttgcttcagtttcagccttctcgagtgagccagcacgtgtgttgttgcacacaaccattcaaacttcctggcagcgttcaaactctggtgttgaagaggctagaaaatattttttttcccaaactgtcttaatttgcctaataacagacgtaggaacacatctgcaaagtatcaaaaatggcctaaaatgaacacacacacacaaactgtgcttgttatttattattt

SEQ ID NO: 121454 - DNA, 594 bp, Homo sapiens
tctaaagaatgaatgacttatcggcaaatgagtcattagtcatcttcttgtcattatctgaactctgcagataccaaacaatccactcagctctgattcagggtttttcagcttgttatttgtattatcactgatgtaatttttccttctttctttttaaaaacatgaactgaagaggtaaactaaggagtagtctagagaaaactttttccacaaaatattcaactggcttaaatataaaaaggaatgagtttccaaaatgatttcaccattaaactaagggctcatattgaatttagaaaatgagatattcctttctstccctgagtgcaaagcaaccactttcaagtaggcctctgaattctcttctttagccataataccagtgatatctcttattccttccattgcttttctttaaatttaatcccaagtagctgtaaatcacagcagtcacagtgggaaggtaatcatagtattcgtctttgcaagatatttttgcccttctggtttgattgctgcctctcagttatggagctattaattttttacagatcttctgtttaccatggcatcctgcctagtatgccaagt

SEQ ID NO: 121455 - DNA, 609 bp, Homo sapiens
tttcattgcaccttgggtatcgcatgtgtgtccaattaaccaaccctttgaaagatcagatcttccccacagtacacacgatgaagggctgtctacttcttccctccaagcagtcttgacacaagtacacattgaaaagagaccaaattgaatagaaaaaggaccacattcaatagaaaagggaccacatctaaaaatcctcttgaaaactgagaattgttaacccaattaactaccatgtttcaaggggtgcaaatgttttaaagtacaatttgaaaacacaatatgcaaactctatcaaggaaaataygaaatcctctaccaattacaatgtgacagtgtgcagcaaatgtttctgtgtaaatgttaaaattcagctctgcatcctacattactaagagtgggaggtaggggtagcagaaaatctgggggagtggtgtttggtttttgaaaagaacagtaagaattatcattggttcaaaaattgcttcttttattgttttgttcatgattatttagaaggaatttggaatctgattgagcaaaataaaggacaggcagctttccatttaaggctatggataatatccccctgtgaatgaaaatgta

SEQ ID NO: 121456 - DNA, 609 bp, Homo sapiens
tttcattgcaccttgggtatcgcatgtgtgtccaattaaccaaccctttgaaagatcagatcttccccacagtacacacgatgaagggctgtctacttcttccctccaagcagtcttgacacaagtacacattgaaaagagaccaaattgaatagaaaaaggaccacattcaatagaaaagggaccacatctaaaaatcctcttgaaaactgagaattgttaacccaattaactaccatgtttcaaggggtgcaaatgttttaaagtacaatttgaaaacacaatatgcaaactctatcaaggaaaatacgaaatcctctaccaattacaatgtgacagtgtgcagcaaatgtttctgtgtaaatgttaaaattcagctctgcatcctacattactaagagtgggaggtaggggtagcagaaaatctgggggagtggtgtttggtttttgaaaagaacagtaagaattatcattggttcaaaaattgcttcttttattgttttgttcatkattatttagaaggaatttggaatctgattgagcaaaataaaggacaggcagctttccatttaaggctatggataatatccccctgtgaatgaaaatgta

SEQ ID NO: 121457 - DNA, 544 bp, Homo sapiens
gctctttgctctaaattttacttgtccatcggcataatctcaacaactgttttacatttcaagccatttcattccattacctagagttgagtgctttgaagctgccatgaaatttttatagactaattttttaaagtaccacaaatgtgaatgagaggaactatatgttataatatcagaatgcaaaaataccactttatattttcagattgctttgaatgtgatgattctgtggggctttacagaatacacagtaaatgtagcatgattagaaagtttgcatccccaagctggcacttcctgttagcccttactaagggctttggtaactatataaaacgggatgctcagtaatgcataaaataagtttaaaatgcctattttaaattcaataagtttaagtacagttttcccttggtatatgtgaaggattgcttccaggattgcmcacatttacaaaaatccacacaaactcaagtcccatagttggtctcgtggaacccatgtatattcgggttttgtatctgtaactactgtattttcc

SEQ ID NO: 121458 - DNA, 599 bp, Homo sapiens
aagatgggtcttttgaagttacccagtcagagacaaaaagagaaaaaaattaatgaaaaagagtgaagacagtcttcaggactcatgggacattattcaatgaacaaacttttccattatgggagttttggaaagagaggagattaagatagaaacagaaagattttttaatacaataatttctcaaaacttcccaagtcttagaagagatatgaacatctagatccatgcaactcaaatatcactaaacagactcaacccaaacaagccccttccaaagcacactataattaaactgtcaaaagtcaaagatgaggagagaattttaaaaggaacaagagaaaaaggttaagtcacatgtaagtraatccccattagaatatcagcagaaaccttgtaggccaggagagaacaggatggtatatttatgtgctaaaagaaaaaaaaaaaactttctgacatgaacactatacccaaagctggccttcagaaatgaaggagaaagtttttccaagacaagcaaaagttgagggagttcaccacttgacctgctttacaagaaatgctttaaaaagtttttcaagtgaaaacaaaagaac

SEQ ID NO: 121459 - DNA, 523 bp, Homo sapiens
gaagacagagctttgtgtatcagaggttgtgcatcggtagtgcctaatgtttttgtctgtgtggttacacagaaattccaatcaaagatcctaagctttctaaaaatatatgttttcattgtaagtcaagacrgtgatttagttaatcttcactctagcttataaatctctgaacagtgcaatcagcataatgcttggtagaacattgaaaatgccctcacatgctttggtggaaaacagtttatgggatttttttttttttccaacatggctcatgagagatttggggatttatttaaccgcctttatccaggcaaatctcctagtgaccttgttgggattttgatctcagttaagactagaatatatgtgactcatgctaagtaaagggcccacagaggatagatgagctgacatgaatttccctcccttgggaaaaaagggacgggcatgagcagaatctgcagcagaagagtccaagcttgtccaacctgcagcccatgggctgtgcagcttcaaatgc

SEQ ID NO: 121460 - DNA, 601 bp, Homo sapiens
ctggccttctctgtcgtcttgccttggtgcccatgacggcacatctttcatcactgcgtctgctgtcctcctctgaactcatggaagggccacatgtaattagatgaggtcagctgggggtgggggaggagagccaggctcgctgctcctaaacaggacctccaaaaaatcagatacagggtcgctcctgttcactgcctcatcagcaaggtcattaattggcccagatttctcagagagcatttaaagatgattcatcttaggaaaggctaacccctgtcttccaaatgcttggcctttttttttttttttcttcttctttttaactactgtgtaggaaaacgtctttaacttgattacgttttgaaaagtgatttctccatgacaaatcagtaccctttttgaaaacgtaccttgtccccagagacgttcttgctcggcatttcagcgggtctccaggagttcacgctctgacccccgggattcatcagtatcgycaaggctcttttgttattgtcctgaagtttacacgagctccccaaattaaagatgaaggtcatttatttattgttgttagcctgtctcccattgtacatgagca

SEQ ID NO: 121461 - DNA, 573 bp, Homo sapiens
attttctatgccttttgactgaattcttttttttttcttttctcctaaggagttagtgaatggcttttcataaagacattgtattttttcatagcaatgtttttaaaaattatagcaaaaatggggccaatattaatatgaatttggataaatagtggtttatatgcaatagaatgtcatgtagccattacaattgatgatatatttgttaatcaaataagtaaagtgacaaaaacattacaaaataggaagcatagtaggatttcaattttgaaggaaaataaggctctatccatggaaaaatgccttgaaggatatacgtctaagtgtttcaaccctttttctctaggtggtgggattttaggggwttttgactttcttctgttcatttctctgagttttctcaattttctcccatgtgttacaacgaacatgcattacatttagaacatagaaaaacattttccagcatcttgagttgattctctaagtaaattccttgctccttaaattctgaaaactgtagagaccagatcaacgtgtaggatgtcagaggtggaaaagctgtgggaa

SEQ ID NO: 121462 - DNA, 573 bp, Homo sapiens
attttctatgccttttgactgaattcttttttttttcttttctcctaaggagttagtgaatggcttttcataaagacattgtattttttcatagcaatgtttttaaaaattatagcaaaaatggggccaatattaatatgaatttggataaatagtggtttatatgcaatagaatgtcatgtagccattacaattgatgatatatttgttaatcaaataagtaaagtgacaaaaacattacaaaataggaagcatagtaggatttcaattttgaaggaaaataaggctctatccatggaaaaatgccttgaaggatatacgtctaagtgtttcaaccctttttctctaggtggtgggattttaggggattttgactttcttctgttcatttctctgarttttctcaattttctcccatgtgttacaacgaacatgcattacatttagaacatagaaaaacattttccagcatcttgagttgattctctaagtaaattccttgctccttaaattctgaaaactgtagagaccagatcaacgtgtaggatgtcagaggtggaaaagctgtgggaa

SEQ ID NO: 121463 - DNA, 573 bp, Homo sapiens
attttctatgccttttgactgaattcttttttttttcttttctcctaaggagttagtgaatggcttttcataaagacattgtattttttcatagcaatgtttttaaaaattatagcaaaaatggggccaatattaatatgaatttggataaatagtggtttatatgcaatagaatgtcatgtagccattacaattgatgatatatttgttaatcaaataagtaaagtgacaaaaacattacaaaataggaagcatagtaggatttcaattttgaaggaaaataaggctctatccatggaaaaatgccttgaaggatatacgtctaagtgtttcaaccctttttctctaggtggtgggattttaggggattttgactttcttctgttcatttctctgagttttctcaattttctcccatgtgttacaaygaacatgcattacatttagaacatagaaaaacattttccagcatcttgagttgattctctaagtaaattccttgctccttaaattctgaaaactgtagagaccagatcaacgtgtaggatgtcagaggtggaaaagctgtgggaa

SEQ ID NO: 121464 - DNA, 508 bp, Homo sapiens
aaccaaacccaaacccagcagaggaaaggaaataaccaagatcagagtggaactaaatgaaattaaaacaaaaaaaaaaaawgaaagataaatgaaacaaaaagctggttctttgaaaagataaatgaaattgatagaccattagcaagattaaccaagaaaagacgagagaaaatccaaataacctcaataaaaaatgaaatgggagatattacaactgacaccactgaaatacaaatgatcattcatggctactatgaacatctttactcacataaactagaaaacctagaagagatagataaattcctggaaagatacaaccctcctagtttaaatcatgaagaattagataccctgaacagacagataacaagcagcgagattaaaatggtagttaaaaaattaccaacagaaaaagtccaggaccagacagattcacgacagaattctatcagacctttaaagaattggtaccaatactattgacactattccacaacatgga

SEQ ID NO: 121465 - DNA, 579 bp, Homo sapiens
aggatctgccatattctgggaacagtgtaatgtctggaaatatcaaggtgatagtaagaaagtcacaatctaggccacagctttgaatggagatgttcattataaataatataagtactttaataaatctgtgtttgaaaatttattaaattgctttttttaatttagaaagatttgtagaaaaacattcaaaagaaagcaattaaaaatagccaataaatattcatgaatatggttatattctagtatctactgagaaattgaaaacaaaatgttcaaatatagtaactggttaaatgagtcttgatacagctataccacggaataaacaatacatagtttacaaacattcttgacttggactttgggcaagacgtttttatctttttctacatctcagttttcccgttaaaaaaaaaaagcacaaaatatcttcctmacctatatattgcaagattattagaatggttaaaaactacagagtaaacataagcacctaaaaaagtgaaatattaaaaaagactaaaacccactatttgaataaaatgagaaattagtaagtgaatgtcacttcctctc

SEQ ID NO: 121466 - DNA, 578 bp, Homo sapiens
ttccattttcattaccacacccttcataattcttgtttgagctcatattatgaaaacattgaatatacaagtctatttcgaccttactttagtttatgggaaaaagcatccaaagaagcataaatgcataatgtacagtacttccatacgtctctccccacaactctggttacttcttaataaaatggcagaagtgggatttattcagtcttcagaatgaaaagaatattcttaggtagaagtgagttctccactgcagtcagaatggccatttcatgagacaagtctttgtttcccaaatcttcttctttaaacctttgccatcattgctagtatcatgccatgctgctgcatggaacaggggtctcccttttccagrtgattatcaaatgtcttagactgttttgtgctgctgtaacagaatatcacaaactgggtaatttatagcaaacagaaatgcattggctcacagttcaaggggccaccatctggcaagggccattcttgctagaccgttacatggcacaaagaatcacatagtggaaggtcagagagccagagagagcaagagggggata

SEQ ID NO: 121467 - DNA, 555 bp, Homo sapiens
tacaaggcccttacctttaattcttattaatcatttaattagatatttcactcttagtatccatatctttctctagagctcagtcatcatagataatasaacattgaggtaaaaactgccactggggaacaggtgttcccatattcctaaatcacacttacttgggacaagatgagcttccaaaaaaagattgctattttaatgatgctcatcacagtcatgactggctcagggctttcaaatctcctccctcaactgcagcaaatttagaaagcctgcattttttaaagcattctaaaagattcaacagttttctccatgtaatcagagacactaattatcaagcttatttcagataaagtagtagttaatgccaatttatcaagacgggaaatgaatctgatcttatttctattgcaactgcccaaaggcaggtggcttaaggcaagtatatttagtttaatgagactctagcggataaacagtctaagtttgagcaccctcattatgcatcagcaaatacagtgacctgcctgctgcaggaattcaatttat

SEQ ID NO: 121468 - DNA, 555 bp, Homo sapiens
tacaaggcccttacctttaattcttattaatcatttaattagatatttcactcttagtatccatatctttctctagagctcagtcatcatagataatacaacattgaggtaaaaactgccactggggaacaggtgttcccatattcctaaatcacacttacttgggacaagatgagcttccaaaaaaagattgctattttaatgaygctcatcacagtcatgactggctcagggctttcaaatctcctccctcaactgcagcaaatttagaaagcctgcattttttaaagcattctaaaagattcaacagttttctccatgtaatcagagacactaattatcaagcttatttcagataaagtagtagttaatgccaatttatcaagacgggaaatgaatctgatcttatttctattgcaactgcccaaaggcaggtggcttaaggcaagtatatttagtttaatgagactctagcggataaacagtctaagtttgagcaccctcattatgcatcagcaaatacagtgacctgcctgctgcaggaattcaatttat

SEQ ID NO: 121469 - DNA, 555 bp, Homo sapiens
tacaaggcccttacctttaattcttattaatcatttaattagatatttcactcttagtatccatatctttctctagagctcagtcatcatagataatacaacattgaggtaaaaactgccactggggaacaggtgttcccatattcctaaatcacacttacttgggacaagatgagcttccaaaaaaagattgctattttaatgatgctcatcacagtcatgactggctcagggctttcaaatctcctccctcaactgcagcaaatttagaaagcctgcattttttaaagcattctaaaagattcaacagttttctccatgtaatcagagacactaattatcaagcttatttcagataaagtagtagttaatgccaatttatcaagacrggaaatgaatctgatcttatttctattgcaactgcccaaaggcaggtggcttaaggcaagtatatttagtttaatgagactctagcggataaacagtctaagtttgagcaccctcattatgcatcagcaaatacagtgacctgcctgctgcaggaattcaatttat

SEQ ID NO: 121470 - DNA, 555 bp, Homo sapiens
tacaaggcccttacctttaattcttattaatcatttaattagatatttcactcttagtatccatatctttctctagagctcagtcatcatagataatacaacattgaggtaaaaactgccactggggaacaggtgttcccatattcctaaatcacacttacttgggacaagatgagcttccaaaaaaagattgctattttaatgatgctcatcacagtcatgactggctcagggctttcaaatctcctccctcaactgcagcaaatttagaaagcctgcattttttaaagcattctaaaagattcaacagttttctccatgtaatcagagacactaattatcaagcttatttcagataaagtagtagttaatgccaatttatcaagacgggaaatgaatctgatyttatttctattgcaactgcccaaaggcaggtggcttaaggcaagtatatttagtttaatgagactctagcggataaacagtctaagtttgagcaccctcattatgcatcagcaaatacagtgacctgcctgctgcaggaattcaatttat

SEQ ID NO: 121471 - DNA, 620 bp, Homo sapiens
gagagaaaaaaaataaattcgaagttgtcatgaagaaaagttcttttgaaataaagcaaaaaatattaatctgaagaagaaaagagtactgagtgcttgaaaaaaaataatctggaatgatcaacattaatacatggcctggcaaattattaaatttctagagcaagagaaatgttcatatgttcaggtacaaagacacataatctgtaagggtgaacggttttgactgatacagacttctctactgcgagataaagtcccaaagagaaaaaaatratgcatgtacaattgtgcagaaaataaatgtgactcaataataatacatccagttgatatgagtttcaagtatgagggcaatggagagacagcctcaaacgtcagaactcggggaaataacattcggtcactcatcttggaaaatcttcccagtgaccaaatgcagctgattcagtgttgaatcagaatgctgagacctgaaaatgggaatggcagcaaggagaatgatggtgagcacttaactaatttacacacagaattaagactaagcacatgtgggaattaagattatggaacaaaatatagttgtattacatcttgacaatgtaaaaatagtaatgtaa

SEQ ID NO: 121472 - DNA, 627 bp, Homo sapiens
ttggcctgtgggagcttacagtctagtggaaaaggcaaacaaggatggattcaacttttatatgagttcaattagctgctatagtagaaatacagactaaatgttatcacagcacaaaagatggaaaaattgtgttgcttgagaaagtcaggaaaggcttactggtagtgatgctatctctgcttgaccctgaagattgaatggacagccttggttgagagaatagcttaagcagttgaaattaaatgcagtttaaataattaaaaaactgcatattaattccattttcagaatgatttgctacttttgctggggtgcatattaatcaacatacttattagtaggcaaccacagttaggttgtgatcatttgtggggaaaaaagcattgtattatttcttgtgctttcattctctccttttacatgtttgatggagttttatttttttcttaatgaaacatgctaatatgttaatagataaaataatgttgtacataaattatgtaatatgtagctgtatrtatatatacacacgtatgtgtgtatgtatatgtttgtgtgtatatttgtgtgtatatgtatgtgtctgtgtgtgtatatatacacacacttatatttcctatacaa

SEQ ID NO: 121473 - DNA, 383 bp, Homo sapiens
aaacaataacaactgaaataatttaccaagacaacttacaaaataagtcactaaatgcatgtacaggcatttgaagtttcatctggtggaagggttgtagagaatattccttgtccccctcagtgtgtttaattttcttctactcattgtaccaaggtctggcctcattataagcatgctattccaggtgaattgaaaagaagttgcatagataccttgccattattaatcactgcctctattgtcaaaagctatttgcagatattttatctcattctatctaaaaattattccgatgtatttatggtttgctcttcttttgtactacaatttggtacatgaaaatggtgctcyacaaatcagggagtagtgaaagtaataat

SEQ ID NO: 121474 - DNA, 462 bp, Homo sapiens
acatgaaataatttggggcaagtccatagagtaaagtgaaarcaagtttattagagaaataaagcaaagaaagaatgactggctactccatagtgggagcagtggcattggctgctctcctgagtatacttacagttatttcttgattatatgttgaacaaggggtggattattcatgagttttctgggaaacgggtgggcaattcctggagttgagagtttgtcccctgtttagaccatatagggtaacttcctgatattgccttgacatttgtaagctgtcttagtgctggtgggagtgtctattattaacatgctaatgcattataattagcatgtaatgagcagtgaggacaaccagaggtcacttttgtcaccatgttggttttgatgggttttggccagtttctttgctgcaacctgttttatgatctttaatgtcctatgatcagcaaggtctcc

SEQ ID NO: 121475 - DNA, 462 bp, Homo sapiens
acatgaaataatttggggcaagtccatagagtaaagtgaaagcaagtttattagagaaataaagcaaagaaagaatgactggctactccatagtgggagcagtggcattggctgctctcctgagtatacttacagttatttcttgattatatgttgaacaaggggtggattattcatgagttttctgggaaacgggtgggcaattcctggagttgagagtttgtcccctgtttagaccatatagggtaacttcctgatattgccttgacatttgtaagctgtcttagtgctggtgggagtgtctattattaacatgmtaatgcattataattagcatgtaatgagcagtgaggacaaccagaggtcacttttgtcaccatgttggttttgatgggttttggccagtttctttgctgcaacctgttttatgatctttaatgtcctatgatcagcaaggtctcc

SEQ ID NO: 121476 - DNA, 567 bp, Homo sapiens
tttttggcactcattggtagatcttgcctgcagccatcatcattgaggatttccaatgctgattttctgtttctgtaattcgttctacatgttttcattataattctcctctaagggttgccctttctcgcatatttattcattcacttatttatgaatatttagttaaaatcagagctatcaacatttattttattattcaagtggttctacctttggccattgggaactttttcaggttggctcctgtgtctttcarcatattccattttttaatttttggcctttctttactttttagcactgcagtatactccaggattttgcctgtcccagccctggaatgagccacttctctagagagccttggtccttttattttggggtatgacagctatacttttttaaaaacttgcaaatatgataaattattctcttcaatatttcatgcaggaattttctagtatttcataagtgaatgattttcttgagaaatttttgtatggtcccatgaaattagaaaaaaactataaatagaataatgtaaatgagaaggtaattgatttc

SEQ ID NO: 121477 - DNA, 635 bp, Homo sapiens
agcatgcttaatttgatttgccttcttggcccataaaatatactaattttttattatgtttaaacctattgaaatatttatgycataatcagaaaaagaaaaacacatataattgatatttttaaaccagagtttattttcatacttaacaattttaggtatacctaacgatttttagaaaaataggattctttgccataacaaggattttaaattgccactttagaaggacagatacaatcataatcttcttaaagaccaaatgagaaataatgtttaaaacaatgaaccatctcagattataacggtgatactgttagatataaattcataaattcaatgttgttgaggcaggcatgcttcatgcttctgtctctgatgttttcaaaacctgacagagcagtgctatgtggagtgaagcaaaagcacaaattgagtcaaagctatttatcaatgtctgttaataatctacacatcaaactgcaaatcattccattaaaaaaaagtggtagggagaaaagagttttttattcatttgtaaattgttttctttcaatgttcagaattttttttttaaattttgacttaatggagaccactatctgtacaaaatttctgaaactcgcttttacttc

SEQ ID NO: 121478 - DNA, 635 bp, Homo sapiens
agcatgcttaatttgatttgccttcttggcccataaaatatactaattttttattatgtttaaacctattgaaatatttatgccataatcagaaaaagaaaaacacatataattgatatttttaaaccagagtttattttcatacttaacaattttaggtatacctaacgatttttagaaaaataggattctttgccataacaaggattttaaattgccactttagaaggacagatacaatcataatcttcttaaagaccaaatgagaaataatgtttaaaacaatgaaccatctcagattataacggtgatactgttagatataaattcataaattcaatgttgttgaggcaggcatgcttcatgcttctgtctctgatgttttcaaaacctgacagagcagtgctatgtggagtgaagcaaaagcacaaattgagtcaaagctatttatcaatgtctrttaataatctacacatcaaactgcaaatcattccattaaaaaaaagtggtagggagaaaagagttttttattcatttgtaaattgttttctttcaatgttcagaattttttttttaaattttgacttaatggagaccactatctgtacaaaatttctgaaactcgcttttacttc

SEQ ID NO: 121479 - DNA, 498 bp, Homo sapiens
ttgtacataatgccaaatattgaaataggttttttattgatttgtcacgcattaggtaattttctaggacactgagtttatgaggtatttaagctttgtctatatcatttcaaagaatatatgggaatagatgtttttgattaaattaattagatatttgggcaaattatatgagggattgtctgaaaactcctatgggtatttttctttccagagattagctctgaacrgcagtctatctgtgccccactaaaaacgcaaaatttttttcatattgcaagtttccaaagactgtttctggagatattttgttagaggaatatcctccctcattgtattgacataatattttgctcacatatttattgtagtctattggacataatttaagaccgttggagtcagaatgagatattttatattcatatcaccagcgactctggaagtgcatgtcacatagtaggaatgcaaaaaatggctgttaaaataaattggtat

SEQ ID NO: 121480 - DNA, 547 bp, Homo sapiens
acagtgcaaataaagtaataacttgaccccaaacagaaacttcaatgtaggaatcagttatcgttattgcataatggtgccactggttatgattgtctttgttttgccctcttaagtttatgttaattacatttgctcaagacctcccagatattgacattatacacaaattgaaggaaattgcattttctccattgttgtaattcaggctgtctaatggaaataaaatgtaagctacattttgaatttttaattttctagcagctacaatatagaagaaaaaaagaaacaggtaaaattaattttaataatagattttatttaatctgacatrtctaaaatattgccatttcagcatgtaaccaatataaaaattactgagctattttactttttattaaccaagtttttataatctggtgtgtgttacactgtcagcacatctcacttcgtagcattcatgtttgaaatactcaatagccacttgtggctagaggttagtatattgaacaatgcagttctatccaaataaataaataaaaacatg

SEQ ID NO: 121481 - DNA, 547 bp, Homo sapiens
acagtgcaaataaagtaataacttgaccccaaacagaaacttcaatgtaggaatcagttatcgttattgcataatggtgccactggttatgattgtctttgttttgccctcttaagtttatgttaattacatttgctcaagacctcccagatattgacattatacacaaattgaaggaaattgcattttctccattgttgtaattcaggctgtctaatggaaataaaatgtaagctacattttgaatttttaattttctagcagctacaatatagaagaaaaaaagaaacaggtaaaattaattttaataatagattttatttaatctgacatatctaaaatattgccatttcagcatgtaaycaatataaaaattactgagctattttactttttattaaccaagtttttataatctggtgtgtgttacactgtcagcacatctcacttcgtagcattcatgtttgaaatactcaatagccacttgtggctagaggttagtatattgaacaatgcagttctatccaaataaataaataaaaacatg

SEQ ID NO: 121482 - DNA, 547 bp, Homo sapiens
acagtgcaaataaagtaataacttgaccccaaacagaaacttcaatgtaggaatcagttatcgttattgcataatggtgccactggttatgattgtctttgttttgccctcttaagtttatgttaattacatttgctcaagacctcccagatattgacattatacacaaattgaaggaaattgcattttctccattgttgtaattcaggctgtctaatggaaataaaatgtaagctacattttgaatttttaattttctagcagctacaatatagaagaaaaaaagaaacaggtaaaattaattttaataatagattttatttaatctgacatatctaaaatattgccatttcagcatgtaaccaatataaaaattaytgagctattttactttttattaaccaagtttttataatctggtgtgtgttacactgtcagcacatctcacttcgtagcattcatgtttgaaatactcaatagccacttgtggctagaggttagtatattgaacaatgcagttctatccaaataaataaataaaaacatg

SEQ ID NO: 121483 - DNA, 640 bp, Homo sapiens
ttttcctttccactaatataaccaagacttgactgccaaaatagaaagttgaatgatatatgtgtgctgaaagcctcaaaatacttcaggcaaatactttgattttggattccattaactgaaagaaccttttctttcctatttatagagtaccagaggaaaagaacactgaaccaaaaccaaagagactggagttttactcccagttttgcctccattatatttattgtgtgaccttggagaagcctgtcaattcttcacactcaaacgctcccatctgcaaaatgttggcaatagactagagaatcttcacaatccctattcaccccatattctttgtattctcyttctttgtgtgtgtgtatgtttatgctgctcaatatgcaatatctgaaactgcttttgaaaatgtaaattactcaattgacccactaggtggtagcaaatttctggttactgtataatggcaggcttccaaccacttccataaccttctaaattctgccatcaagaagttagtgaaaaggacttctttgccttgtttgtcaaaaatcatgagttttattctcagctctgtcatttactacttgcatgatcttgggaaaatgagtattgcagggtttttgatttcccaccataa

SEQ ID NO: 121484 - DNA, 604 bp, Homo sapiens
aagataaaaaactaaaatgtccagtgtttgaatttgtggatggaataatctgagtattattgtgagtcccaccgtccccatttccccgttgtacattattcttagacttaacagactatgagtgtatttaagtatttttaagaaacttaagagaaaggtaagaaaaactacctttcctacaagaaaacaaatgctctactgacaaacacwtattttcctgaaggctttttaaaagacttaatgtttagccacaaacacatctagaatagttgtataaggagattgtattaaactatcttcatctcagaaaaatacaaccccaggggttcaccagtacctaagtgagacagatatactctttggaactaaaacgttgctatgctgaaaagaagcagcaatcttgccctggaatgatcaagaggaaacagaacactgagatcctattacctgaaaaggccccagaaagcttgaagtgccactgcccacagattttttaagtttggtcaagaactcctcaaaggcaacatgattctaaaaataaaacaacgatcaattaggtcttctgaaaactattacttttaaaacatgtaaaaaaaaaaagaat

SEQ ID NO: 121485 - DNA, 611 bp, Homo sapiens
acacaggggaagtttaacttgtacaacagaatagacctgaacttctaggaattattgtttgcttttctcttatgctgttttcgccaactctttagtattgtacacacatctacgtgttctgtgaagttttttttttatgattgtttgtctgtctttttagttttgtaaaaactaaggaaaagagatgagttctatacccagaatgatgtgaaacaggataggaacaatgtgagtgtgagaggtgaagctggctgggcttctgggttgggtggggacttggagaacttttctgtctacctaaaggattgtaaacacaccaatcagcattctgtgtctagctaaaggtttgtaaatgcamcaatcagcactctgtaaaaacccaccaatcagcgctctgtgtctagctaaaggtttgtaaacgcaccaatcagcactgtaaaacggaccaatcggtgctttgtaaaatggaccaatcagcaggatgtgggcggggctaaataagaaaataaaagctggcaaccagagccagcaggtccccttccaggctgtggaagccttgatattttgctcttcataataaatcttgctgctgctcactctgggtccgcact

SEQ ID NO: 121486 - DNA, 565 bp, Homo sapiens
ttatgtgcacatggagatgatgatacccatctcacaggattcttgtgaggatttgccacagtctaggtaatattttttagacattttagaactgccatcaggtttgttgaatcagtgactacagtaagacctttccattcttaagaactcacatraactccactaataaaagtacgatagactccatttcagggtgatttggaaaaccagagaaaatttgttcataaagaatttgaaatgatatctgacccatgcataggtgttaagcccatgaaagactgtgattagtgaaagccctgaggaagaaaggggtatgcctttctagagaacccatgagaatgtctcttttctttattgggagtcaggcccagctaggaggaagggcattgcctcttgggatgacgtagatgcagtttccttatttctcttcatacagatttcctcctctgttagatatgaataatcaccatcattgtgaaggcactttgtagaatataatgctctgtgccagtggtgattatctttagtggcatctgatgacctaatttgagtttaggtaccaatg

SEQ ID NO: 121487 - DNA, 570 bp, Homo sapiens
agcaatgtttaaacaattgcagctcattgccagatgctaactaactgaccaccccgccccttccacaagccataactacagttttgattggacaagggactgatttcagtaactctctcttggtaagagaccaccaatcacggactggttctcacctgtttacagaggctgcgcactgagttcctttgtgtcccttcttcaccttttggcacgtgggtcctaattgtaatacatttaaatgttaagtccccacccctaaatgaacttaggttgtatgtaacatgcatgtttttcagtatgcaygcattcatgaatatccataacttctgcaatctaataaacatgtatacttagccaacccgttcagcataaatcctcattccatcctcccctccccagaaggttacttttggattttttggccaaggctacactttctgcctgcaggttgtaattgccttatttagaagtaaagctctcctttctacacttaaaaattgtgtggtttttaagttaacacaggcaaacacagcagagactgttgcagaagggagacagcatgtgctgtgg

SEQ ID NO: 121488 - DNA, 586 bp, Homo sapiens
ataaaattcttctctttataatacaattgattcttgacatgatacagtaaccttttcatttagaatgctagttctactctgtttataaaaattaggaaaaatgcwgacatctataactaactttccagcatatttagtgtagtctcttgatcttttttctaaatacctaaagggtcaactacataagaaaaacttaatttttttttaattaagcatttgaagcttttgtcctccaactgaaaattctgttaaatttcttaatgcaaggactccaggtagaaaggggaataatcagttgcattcttttccatgctgggaggctgtgagcctccaggaagagtggagcctgcaagaactcccaaggccatgactttcccctgcccttaccaaacttcagccccactagactgttttgactcctcagatgggctaatctttgtttcaattttggaatgaactagttcttctgcacaaaatcctcttcaccccaacctctaatcccctcaattcagtaactcctacctatttattcttcagttctcaactaaaaaaacagaaggtgaatggatgagcattaatgatagct

SEQ ID NO: 121489 - DNA, 583 bp, Homo sapiens
gaaggggataaaataaaatgtgaagccagcagttcttacttttagatcattcacttactaatggaataacgttggatacatggctaaacctgaaatttgggtttctcctctacacagtggaggtcatcgcatgtccctagcatacattctcctggttgttggaggaaaggatgagataatgtatgtataaaagccttttgtgaacaataattttaccttcgaggcataccttttataacaggtttattgaaatatcatgcacatattatacaaatgacctttctaatgtgcacaatgtaatagtttttagtacaaagagttgtgcagccattaccacaatygattttagaagatttcaacacttaaaaaagaagttcataaccattagcagacattctccaactcttcctgcaacacacacaaacacacaccaccccatctccagacctaggcaacactaatctgcttcctgttaccagagattagcctgacctgaatatttcatataaatggagtcatacaatatatggtcttttgtgactagctcctagcatagttttcaaagttcattcatgttttagca

SEQ ID NO: 121490 - DNA, 583 bp, Homo sapiens
gaaggggataaaataaaatgtgaagccagcagttcttacttttagatcattcacttactaatggaataacgttggatacatggctaaacctgaaatttgggtttctcctctacacagtggaggtcatcgcatgtccctagcatacattctcctggttgttggaggaaaggatgagataatgtatgtataaaagccttttgtgaacaataattttaccttcgaggcataccttttataacaggtttattgaaatatcatgcacatattatacaaatgacctttctaatgtgcacaatgtaatagtttttagtacaaagagttgtgcagccattaccacaattgattttagaagatttcaacacttaaaaaagaarttcataaccattagcagacattctccaactcttcctgcaacacacacaaacacacaccaccccatctccagacctaggcaacactaatctgcttcctgttaccagagattagcctgacctgaatatttcatataaatggagtcatacaatatatggtcttttgtgactagctcctagcatagttttcaaagttcattcatgttttagca

SEQ ID NO: 121491 - DNA, 583 bp, Homo sapiens
gaaggggataaaataaaatgtgaagccagcagttcttacttttagatcattcacttactaatggaataacgttggatacatggctaaacctgaaatttgggtttctcctctacacagtggaggtcatcgcatgtccctagcatacattctcctggttgttggaggaaaggatgagataatgtatgtataaaagccttttgtgaacaataattttaccttcgaggcataccttttataacaggtttattgaaatatcatgcacatattatacaaatgacctttctaatgtgcacaatgtaatagtttttagtacaaagagttgtgcagccattaccacaattgattttagaagatttcaacacttaaaaaagaagttcataaccattagcagacattctccaactcttcctgcaacacacacaaacacacaccacyccatctccagacctaggcaacactaatctgcttcctgttaccagagattagcctgacctgaatatttcatataaatggagtcatacaatatatggtcttttgtgactagctcctagcatagttttcaaagttcattcatgttttagca

SEQ ID NO: 121492 - DNA, 615 bp, Homo sapiens
ggcagctaggactaacctacacttatattctttggcatgactcctgggaaagaaaatcactggaggaaaaaagtggagtcccgctcttctgatcatgtacattctgggcaatataaatgtgggacaaactgctagaatcggccctgctggtgatgttttttattgagatgacatttatagttcctgtgcatctccttagactgacagtgatgtgagggtagggcttgtgtctatcttattccctagcacccatcctggttcctggtagatagtacacagacattgagtaaatttttaatgaatgaataaatgacagaatggctgtatacatgattcctcgattagtctgtgaattcttaaattcagaaacaatgtctaatactgagtatrcttcctatttagagtttaatttattttctttctcccttttgctctataatgtttttaggtcagcaaggatttctcttctactttttatccttttttgcccccctgaactctcctccaaatacttctggccttatctcttgccttctcatcctctagatggctctcagaaaacacttaaccttctagttacattaccagtttaatgagttaggctgcttctcactc

SEQ ID NO: 121493 - DNA, 607 bp, Homo sapiens
aatttagggagttgcatgagagtagagtttcatytgggagaatcctccatcttccctgctaaatttttggtaagggcaacaagctgttcatgatatttttaatgttatcaagtttattaagaaaaatatggagagaactaacatctgcctgctattgagcatggggcagagtcaacccatgtagatgagggaacagtggattcatttggttatatacagaattaaacaattataaacatacaactgctgacccttatagtaaatcgtggctgttctgtgaacaaacaacacctcctctttgattatttgcagcttcttggcactttatttgaaatgctagaatttcaagaggcagagaaggcacacggagatgttttattccacttaccaggattgggttaattctcaacaaattccagtatttataaaacttaatttcatgtgcacccatttaaaagaaattcaatctgcacctactgcaaaggagatttagatgtcaagtaccatattaccactttcttgctggaaatgacaaggctgctggaagactgataataggtctggtagttatattttattatgcctgatgcaaaaaaaaaaattaaat

SEQ ID NO: 121494 - DNA, 607 bp, Homo sapiens
aatttagggagttgcatgagagtagagtttcatttgggagaatcctccatcttccctgctaaatttttggtaagggcaacaagctgttcatgatatttttaatgttatcaagtttattaagaaaaatatggagagaactaacatctgcctgctaytgagcatggggcagagtcaacccatgtagatgagggaacagtggattcatttggttatatacagaattaaacaattataaacatacaactgctgacccttatagtaaatcgtggctgttctgtgaacaaacaacacctcctctttgattatttgcagcttcttggcactttatttgaaatgctagaatttcaagaggcagagaaggcacacggagatgttttattccacttaccaggattgggttaattctcaacaaattccagtatttataaaacttaatttcatgtgcacccatttaaaagaaattcaatctgcacctactgcaaaggagatttagatgtcaagtaccatattaccactttcttgctggaaatgacaaggctgctggaagactgataataggtctggtagttatattttattatgcctgatgcaaaaaaaaaaattaaat

SEQ ID NO: 121495 - DNA, 599 bp, Homo sapiens
gcaacacattgtgttcagccaaaaaaaaatatagattttacccagacattaggatcagctcctgttggggccttgacagtatcattccaggaaacataaaatttaccagactcactattatatctcaacttagcctgaaaacaggtgtttgacctcccccgtcttcctggtaaaatttgataacaatcatcctagcacaacacacctgttcatcaacctaagcttggtaaacatggcctttcatacttgatttttcttatagcatggatctatggtacaacacttacatgctccatacttcattttttatttttattttaagttcaggggttcacgtgcaggcttgtgacataggtaaacttgtgtcatgkgggtgtgttgtacagattatttcatcacccaggtattaagcctagtacccattagttatttttcctgatcctctccctcctcccaccctccatcctatgaaaggccccagtgtgtgttgtttccctctatgtgtccgtatgtttccatcatttagctcccacttataagtgagaacatgcggtatttggttttctgttcctgcattagtttgctaaggataatggcct

SEQ ID NO: 121496 - DNA, 599 bp, Homo sapiens
gcaacacattgtgttcagccaaaaaaaaatatagattttacccagacattaggatcagctcctgttggggccttgacagtatcattccaggaaacataaaatttaccagactcactattatatctcaacttagcctgaaaacaggtgtttgacctcccccgtcttcctggtaaaatttgataacaatcatcctagcacaacacacctgttcatcaacctaagcttggtaaacatggcctttcatacttgatttttcttatagcatggatctatggtacaacacttacatgctccatacttcattttttatttttattttaagttcaggggttcacgtgcaggcttgtgacataggtaaacttgtgtcatgtgggtgtgttgtacagattatttcatcacccaggtattaagcctagtacccattagttatttttcctgatcctctccctcctcycaccctccatcctatgaaaggccccagtgtgtgttgtttccctctatgtgtccgtatgtttccatcatttagctcccacttataagtgagaacatgcggtatttggttttctgttcctgcattagtttgctaaggataatggcct

SEQ ID NO: 121497 - DNA, 662 bp, Homo sapiens
gggtcatatggtatttgttcattgcctatttcatgaaaaaacygtatatcagtgctccatcacataatgtaataagagaaaactcgctattaaaatggaatggcagttaagcaaacactctgaagaacaaaaactagtgcagaagaaacaggcaaccacgaaaataaatgtgcaaggagaggaagatgaaatcaaaaaagaagtaaggattgttatcatcatcattaataatcattgtgattaataataactataaggatgatgattgcagtggtagtcatagtagtagtgatataataattctggagattagaatgctaacagactgcaaacaagagtattgaacattgaccaccttcacatagtttgccactgaattatcttaattatctcaaatggctgcatggagttacgacatagaaaaataaaaacaagaagtacaaataaaaagcaaccaaatacatacatatatatatatatatacataatgtgtatgtgtattgtatgtatgtgtgtgtgtgtgtgtgtgtgtgtgtgtgtatataaactttacatgaagttatttaaaaattttttaactgttttttgggaggtgaggtgaggctgggtgagaataagactaacaactggtgctcttgtaatggaggcacataaatcatgat

SEQ ID NO: 121498 - DNA, 662 bp, Homo sapiens
gggtcatatggtatttgttcattgcctatttcatgaaaaaaccgtatatcagtgctccatcacataatgtaataagagaaaactcgctattaaaatggaatggcagttaagcaaacactctgaagaacaaaaactagtgcagaagaaacaggcaaccacgaaaataaatgtgcaaggagaggaagatgaaatcaaaaaagaagtaaggattgttatcatcatcattaataatcattgtgattaataataactataaggatgatgattgcagtggtagtcatagtagtagtgatawaataattctggagattagaatgctaacagactgcaaacaagagtattgaacattgaccaccttcacatagtttgccactgaattatcttaattatctcaaatggctgcatggagttacgacatagaaaaataaaaacaagaagtacaaataaaaagcaaccaaatacatacatatatatatatatatacataatgtgtatgtgtattgtatgtatgtgtgtgtgtgtgtgtgtgtgtgtgtgtgtatataaactttacatgaagttatttaaaaattttttaactgttttttgggaggtgaggtgaggctgggtgagaataagactaacaactggtgctcttgtaatggaggcacataaatcatgat

SEQ ID NO: 121499 - DNA, 662 bp, Homo sapiens
gggtcatatggtatttgttcattgcctatttcatgaaaaaaccgtatatcagtgctccatcacataatgtaataagagaaaactcgctattaaaatggaatggcagttaagcaaacactctgaagaacaaaaactagtgcagaagaaacaggcaaccacgaaaataaatgtgcaaggagaggaagatgaaatcaaaaaagaagtaaggattgttatcatcatcattaataatcattgtgattaataataactataaggatgatgattgcagtggtagtcatagtagtagtgatataataattctggagattagaatgctaacagactgcaaacaagagtattgaacattgaccaccttcacatagtttgccactgaattatcttaattatctcaaatggctgcatggagttacgacatagaaaaataaaaacaagaagtacaaataaaaagcaaccaaatacatayatatatatatatatatacataatgtgtatgtgtattgtatgtatgtgtgtgtgtgtgtgtgtgtgtgtgtgtgtatataaactttacatgaagttatttaaaaattttttaactgttttttgggaggtgaggtgaggctgggtgagaataagactaacaactggtgctcttgtaatggaggcacataaatcatgat

SEQ ID NO: 121500 - DNA, 613 bp, Homo sapiens
gaaattattgtgggagttcttgaaagtttataaaaggatccttagcaaccttgaaattttactctgaagaggacaggagaagtcagcaacatgatttgcaaatatttccccccattctatgggttactttgcactttcttcatggtgtgctttgaaacacaaaagttttttatttttatgaagtccagtgtatttatttattatttattttggtagcttatgcttttggtatctaagaagactttgtctatccaatgtcgcaaaratatactgctgtattttattctaagggttttataatgttagcttttatatttaggtctatgattcatttggagttaatttttgtttatgatataagaaaagagtttagttccctaaatcttatttactgaactccagctatgtgtcagatattgtaccaaaattttccatacactccatttactctcacaacagtccactgttgaaagttttaagatgaggagataagaaaaatcagaatgtattaaaatattgagaggacaacaattttagtcactaccatttcttgagaatatataatggaccaaagtctgtgctaaaggctttttatgtgctcactaatggaatt

SEQ ID NO: 121501 - DNA, 613 bp, Homo sapiens
gaaattattgtgggagttcttgaaagtttataaaaggatccttagcaaccttgaaattttactctgaagaggacaggagaagtcagcaacatgatttgcaaatatttccccccattctatgggttactttgcactttcttcatggtgtgctttgaaacacaaaagttttttatttttatgaagtccagtgtatttatttattatttattttggtagcttatgcttttggtatctaagaagactttgtctatccaatgtcgcaaaaatatactgctgtattttattctaagggttttataatgttagcttttatatttaggtctatgattcatttggagttaatttttgtttatgatataagaaaagagtttagttccctaaatcttatttactgaactccagctatgtgtcagatattgyaccaaaattttccatacactccatttactctcacaacagtccactgttgaaagttttaagatgaggagataagaaaaatcagaatgtattaaaatattgagaggacaacaattttagtcactaccatttcttgagaatatataatggaccaaagtctgtgctaaaggctttttatgtgctcactaatggaatt

SEQ ID NO: 121502 - DNA, 617 bp, Homo sapiens
cctttgttaaattaccttcgagtcaaaagcctgttgtctgtgagattagttcttataatcatttttttattaaaaaaccagctgccatttatggacaggtgtttaatttgaggtcatgttagaaaaataacwatttaaaacagttttatatacttgaagaatttattggacacgtttgaaattccattcacaacaaatgcaagaggaaaataaaacaaacatatgatttctcattattctctagaagcactgggaacttaaccctaccagtcccacagtgaaatgatgaagccattctttagttatgcatattctgctactcttttaagacatttgctaaaaagtcaatttttcttgagcacattaatatatatacgaattgaggtgtttcaaattatatttttattacaaaagtttaaattttaatccagatttcagcattgcctatacttagaaggaaagactgtcagtcatggagggaaaataccataccctgttaaactccttgcaggaaatttcttttctagtagttatttgctttgctctcagaaagcataattagtcacattttaatagtccctatgacctctttctatatagacagctgtggaagaaaa

SEQ ID NO: 121503 - DNA, 555 bp, Homo sapiens
tgactagttaggatttatttcttgagaattttatttgcagaaatgactgtccttttgtagtatctactacttgttcccatcaatgtgactgataggtagcattgctagctggtcaaagcygcctggaaaatcccactgtctgtttgctttcaagcaaagcaaaagccatagctatacttctagcccaattagaaacacaaaagctctgtctcccaaaaaaaaacaactcaggagatcagggaggtcatacacttgcattttggcttttcaggccagaacgcagagggcacttttcctgtcacgtgaacagatgagcacagcagacactgtctgtgacctttggtggccacgctgtgcagggagctacctgcacagttgagaaagaatagagttcaaaatgagacacataagattgttggttgatttttctttaatctttcattttctttttctttttaattgttttttccaggcagaaagggaaagcgtcagtatataactcagacattgctaaaatttgtaccaagctccccatcccaaactgaacaaccatcc

SEQ ID NO: 121504 - DNA, 545 bp, Homo sapiens
ccagcggcttccggctccccgaggacccctcccatccttgtgtcctcatcgggcctggcacaggcatcgctcccttcctcagtttctggcagcagcggctccatgactcccagcaaaagggtgtggctggaggcttccccggtgggagggtaccagaggccagcgcctgcctaggagcagaaccgtagccccacaaacggttcctggacctctctggagggaaggcctcccaagtttgtctccctgtgtggggcctatgtgggtgagaacggccgccttcctgtctccggcattggaaccggggctccctctctcgtgagtggaggtaacgggaaagtccctgcttttgacytccgatgggctgagggaatcctgcatctgcactttcagttgtgtgactatgtatgagtgattggaatgccctgggcctcagtttcttcatctgtaaagtggggataatgctgttaactagctaggatacttgtgggagtgaagtgagaattccagttcggctttgagccatagcgccctgctggccaacatgg

SEQ ID NO: 121505 - DNA, 468 bp, Homo sapiens
gctgtatctggggccttttgagtccaggctggagttagagtggcatggatgtggggagcagtgtccagaggctgcacagggtagcagagcactggactggaccgatgaaagcatttagttttcctagaccttagggccagtgacaggaggggctgtctgagagatctctgaaataccttccaggcctttttcccactgtcttggctattagcacctggttgttttttagtcatgcaaatctstgtatcaagtggttgctcctcagcctgtttgaattcctctccctttgtcatgtggctaggctgcaaattttccaaacttttacaacttgcttctgctttaaatataactttcaacttaaaggcatgtctttgctcttgcatctgagaatagacttttagaagcagctagaccacatttgaatactttgctgcttggaaagctgttctgccagatacgttatattat

SEQ ID NO: 121506 - DNA, 446 bp, Homo sapiens
tccattccattgatctatttgtctattcttttgccaatattatactgccttgattaccagcactctaaagtaaattttgaagtccaatagcgtcagtcctctaactttgctctccttcaatattgtgttggctgtgctgggtcttttccctctttttatatactctagtgtcaacgtgtggatacccacagattaacttgttgggatttttattaggattacattggctctatatattcagttgggaagaacagatatctgacaacaatgattttttcttatccaaaacatggaatatctcttcatttatttagttcttttatttctttcataagaattttgtagttctccttaaatatctcttgtgcatattttgtcatatacaaacacytttttgggggggcaagtgctaatataaatggtattgcatttttcaatttaaattc

SEQ ID NO: 121507 - DNA, 571 bp, Homo sapiens
ggtggaggcacagatccaaactacatcatcctctcatccaagagtttcttaacaacaatttaaaattgattcctaggtgaaattagtttttaatatctaagttcattgaattttaatcaaagaatattgcctataagattttaactttctgcaacttacttgttgatgtttcttagtgatctagcgtatgatctgttttgtgtgcacctgaaaaaaaaggaatttgttttttcattctgttaactgatttcaaaatgtttattgggtctcaattttctgccaatgcctagtttagactgtaaggatacagaagaaaacaaaataagtgaaatttattttcttatggcacatattttatcaggaaaatataaatcatgcacaacagaagaggattttagtaacacagtagaggttaaggcgatggggagaggtgtatacataaagtagtcagtgagaygctttatgtttatttaatatttgaacagagacttgatgaagtgagagagcaaaccatggggatgtttgtgaagagagtccaaggcattggcaagagagtgtgcaaagttcttga

SEQ ID NO: 121508 - DNA, 591 bp, Homo sapiens
atcttctacaaattgttttgtttgctgaactagaaaatgaggtggatcaaaataagaaagataagtcaacacaacaaattaacaacagcaagagatcacctacggtgagagagaacatcaatagggtcagaatacgggattccgcggtagcccagcagaagaggaactttgcccttgtcagcactttccttctggacagtctcagtgctctctcagctcagctcccttgactctgactgcctttctctcattatcgtaaatacttcgttgactccctgcttcccttattgaaggtggaatttcttctgttattgatatagattcatggttggatcrctgcatggcttttcctttttttttttttttttttttgtgacatcagttggtttctaaactgtataatccctcctgtctgagtctctaatatttcatttaatacttataaaagccctatcaagtcggctttatctcctttttacagatgtgggagctgagacctagcagagtaaaacattaattctttccattagtatgctcattggttgataaagatagtaactttttgtctttcatgtctgctttaaatatttt

SEQ ID NO: 121509 - DNA, 591 bp, Homo sapiens
atcttctacaaattgttttgtttgctgaactagaaaatgaggtggatcaaaataagaaagataagtcaacacaacaaattaacaacagcaagagatcacctacggtgagagagaacatcaatagggtcagaatacgggattccgcggtagcccagcagaagaggaactttgcccttgtcagcactttccttctggacagtctcagtgctctctcagctcagctcccttgactctgactgcctttctctcattatcgtaaatacttcgttgactccctgcttcccttattgaaggtggaatttcttctgttattgatatagattcatggttggatcactgcatggcttttcctttttttttttttttttttttgkgacatcagttggtttctaaactgtataatccctcctgtctgagtctctaatatttcatttaatacttataaaagccctatcaagtcggctttatctcctttttacagatgtgggagctgagacctagcagagtaaaacattaattctttccattagtatgctcattggttgataaagatagtaactttttgtctttcatgtctgctttaaatatttt

SEQ ID NO: 121510 - DNA, 591 bp, Homo sapiens
atcttctacaaattgttttgtttgctgaactagaaaatgaggtggatcaaaataagaaagataagtcaacacaacaaattaacaacagcaagagatcacctacggtgagagagaacatcaatagggtcagaatacgggattccgcggtagcccagcagaagaggaactttgcccttgtcagcactttccttctggacagtctcagtgctctctcagctcagctcccttgactctgactgcctttctctcattatcgtaaatacttcgttgactccctgcttcccttattgaaggtggaatttcttctgttattgatatagattcatggttggatcactgcatggcttttcctttttttttttttttttttttgtgacatcagttggtttctaaactgtataatccctcctgtctgagtctctaatatttcatttaatacttataaaagccctatcaagtcggctttatctcctttttacagatgtgggagctgagacctagcagagtaaaacattaattctttccattagtatgctcattggttrataaagatagtaactttttgtctttcatgtctgctttaaatatttt

SEQ ID NO: 121511 - DNA, 563 bp, Homo sapiens
tgaattttgcaaaggagacctttaattttctttacatgggctctctttttttaatccaagtatataggtggaagttcaattcaatggcttcagtagaatatttgtgacttgctaataatttaactttgcataacttcacaggcaaccttgaaaatggcccatacaaaaactctcattttttcttaatttagatttatccaacacaatttttgattatgtttctataatccctaatatgcttaactcagaattaaccaaagtttttcaaactgtattgactctaaaaactattctggaatagaatttttaaaagcattttccatttgagtctatgccagggttattgtaattktcatctaaatatctcaacattctgtcctctatatgatttttcaaacaaatttacatagctgcttgaatcagataactaagagaattatgagcatgtgggtaattgaacattttgagctttgacctgctagtttgcttttttgcttgctatagactgaacttccaaattctggctaaacatcgtattattgtgtgatgtaagtcaaaaggca

SEQ ID NO: 121512 - DNA, 562 bp, Homo sapiens
ttgtgacttgctaataatttaactttgcataacttcacaggcaaccttgaaaatggcccatacaaaaactctcattttttcttaatttagatttatccaacacaatttttgattatgtttctataatccctaatatgcttaactcagaattaaccaaagtttttcaaactgtattgactctaaaaactattctggaatagaatttttaaaagcattttccatttgagtctatgccagggttattgtaattttcatctaaatatctcaacattctgtcctctatatgatttttcaaacaaatttacatagctgcttgaatcagataactaagagaattatgagcatgtgggtaattgaacattttgagctttgacctgctagtttgcttttttgcttgctatagactgaacttccaaattctggctaaacatcgtattattgtgtgatgtaagtcaaaaggcaaatccaggcaaaatcyggaataagcaaataggtctcatctgctggaaggccacagggcgtgggctcttctcacagtggaagaatggagaagctcatttgg

SEQ ID NO: 121513 - DNA, 579 bp, Homo sapiens
acacacacacacacacacacacagaaatggtaactatgcggagtgatggatgtgttaacttaattgtggtaatcaattcacaatgtatatgtatatcaaatcatcacattctacatcttgaatatataaaatttttatttattcagttatacttcaataaagctgggaagaagaatcccaaagtcctgtgaggaaggggaaaatggggcaagaactaaggaggcaattgtataatagaactacagttctaattttttgtggccaaagtaatcatatctgacacataactttatagtttatgatgaattttcatatgggatctaattgaaccatcccaatcttggtattcaggtagagataatattataatctctattttacagattaggaaactgaggctcagagagaaaaagtgacttgtccaagatgagcaacmacgacccaaacaaaagattcttgagtgaagcccagcaccctgtttcttcagttattcaaatcatatggttgctcagctacttaaagctactttctatgtacttcacagttgttatttaattccctgtgacattaagaacacag

SEQ ID NO: 121514 - DNA, 640 bp, Homo sapiens
aggactctcaaattgggtattttagtgttaatttctcaccactaagatgtagattaatttaaagtcccatatggtctgtttatactgatgcatcttggagtaaattacagatgatataaaactgagttaaaaagtatattttatttagcacttatatggtgcttactatyttccagctactgttttaagtgttctaccaatactagctcatttaatcctcacaacaatccaatgaagtgggtaccattactatcttcaggaaattaaggcacagcgaggtgaaattacttgcctgcattcatactgctggtaagagttaagctgagattcaaactgagtaatgtggctttgcacggagtctatgctctaggctgtctcttgagaaagtgcctttaacgttttgttaggttggcagttgcctttttctgcgatgtgggttgaagagatcagcctgcatgtttctcctgtgatccccatctacagtctttctttcctgcatccagctgctcacaacacacacaactctgtaagaacacacaatcatgtacacacacacactaggcagtccaaatcagagaacaagaagccattttccaaagtcaccacaacacagaaggcatctttctgcttaaaaagcatc

SEQ ID NO: 121515 - DNA, 625 bp, Homo sapiens
atcatgtctccaatagttgagctcttatctaattgtactaaaatgctataatgcctgttatgtttatttggagtattacaaataattttaggaggagggagaagtgaaaaggtggagcacagaggatttttagggcagtgaaactactctatatattataatggtggatacttgtcattatacatttgtctaaaccaatctaatgtacatggggtgaacccttatgtaaactatgggctctgtgtgataatgttgtatcgatataggtttatcagttgtaacaaatgtaccactctggtgaaggctgttagtagtgggggaggttatgtgtgtgtggggggtggtatatagaaaacctctgtaccttctgctcaatttttgctgtaaacctaaaatggctcttatgaaaaaagatgatgagaagaaaagactgcattaaaaataataaaagtatattcatttaacacatgcatttgagcaaagataaaataaatgaataaacaattctgcaygccttatgaccaggtgtaaattttggttgggtcctcagaaccttgtctgcggtactgcagtcagcatgacagctgcagcaggtgccctatgtctcctcattgccagccaacta

SEQ ID NO: 121516 - DNA, 595 bp, Homo sapiens
gcccttcacagacaaagtttgctgacctctgctctagtscagcaaaaaggtcatcagtttggatactttttgcattggtgagctcactactttattaagccacctcccctgttgtccaaggaagttctaagtagccacacagaaagtctgcctcctggtaatgtccccctatgggtcctgatttcttcctctagaacagcaaagagaaggctaattcttcatgcacatgacaacacttcaaccacattccatcaattctctcttgtctggattatccattctcagacctctctgttgtgccttagtgtttccagacccctctccatcctgcttcctgtgaaagcatgtctgggcttggtccaccctaatctgatctcaggatctctgcctttccctctgtaagattcataccatgactgaagacctgccttctctgggtagctaataagcttcacaagggcaagggccttattttcttgtgtttctctatattcccagcatggttttgttcctgatggctcaattatttattgaaggttaccgaatgactgatctgtaatatacttcttaaaacattatatcggaaacaggtata

SEQ ID NO: 121517 - DNA, 600 bp, Homo sapiens
agttttctcatctgtacaatggtatataagtgcctgaatatgtgggtgtgtacatgcatgagtatgtatgtgtacatatatatgcatgacacrttcataaatgcacagacacacacatatgcacgtatcataaatgtattgcaggcaataaacaaattagagctataattcaaccttcatggtgagaactaaaaaaagacaatctttcagagcttagctagagtacagattatagataaaagaaatggaaatggtaagtgcaaaagaaaatggcagggaatattgccaaatggtgttcatatctgtctgaattagtacaaagaaaggagaagtaaaaagaacttcagaagctttgtggttcgactgtagttacctgactttagaaaaaaaagtagtctcccagccctaccttcttcaccactggcactctcccaataaagattcaaggaacaaagcgaatgggcatctctttagcaactgcttaactaagaaatggcaggctgaggcagaaccctaaagaagatgatcactgtagttatgactaggatgggaaaggcaaactaagcttaaagaccctgagcagaaacttaaagggagtta

SEQ ID NO: 121518 - DNA, 612 bp, Homo sapiens
gatttttaacttgcctacagtcttttatcctcactatatagatgataaccaaccacccagtttgccccagacrattcctattctatccttgacagtgctacgtctttaaaaacaaaacaaaacaaacaaacctcagtcccacacgaaaccgggactttggtcatccttgatatagaataatatgtatcttaagaaaatactgtttctgctatgaaaaatcacatctaatatttctagaaatattaatgctaacattttaaggtgtaatgaatatgaaacactgctcatcagtcttaactgttttaacactttaaaatcagactatctactattttagagctctccctctataatttggatgtattattgcatttaaacatcatttctataaacactttacataaaacaaaaatgttataatttacatgacaaccttatttatataaaacacacaaatatttagtgcatccttcacctagtaatatagaaaattttagtttttcttcacaaaaatctctgtacactgccctggaaatagccacacagcttatcgtagaaatagctggaattcagacaaatgtgtctgccatttatcacatcttattgagaaat

SEQ ID NO: 121519 - DNA, 628 bp, Homo sapiens
tgataacgcctaggataaatgcagtgaattttatggagctgtaactttgggattgttccgtattttgaaaaacttcaattacatgtaaaatgctacaagtggtatagtaggtgtcaggtcaggattaaataactaaatgaatattaaacatataatttasggcaatataaaatgtgttggttatttctgtttgtttgttggagtgttttaaatcaataatccaggtcatgtaaaataaagttactgggaaagactccacatgacattctcattttctattcctggattggaaatgttgaagatgagctatgtatttaatcatgtctgcttctctccatgaataagggaatagcataaagaacacagctttcttaaagttaatgaaaaagcagaacaatcaaaggaagcaactccgtcagggagcagctctggttcctcagatctaagcagggaacagtaaacaactgcagtgtcactattcccagttgcaggaaacacaacctattatcaaatatcctgaagatgatgatataggccctccaagtgacataagtccttgtgtaaagaaaatataaacttgccttcagtaaaatagtctgttttcttgattatccttttaactatttga

SEQ ID NO: 121520 - DNA, 619 bp, Homo sapiens
tcatccaattttttgtgggcctaaaaagacaaaagtgatgaaagaaatgagaattcactctctcttcttgactttttgatctggaacattgatcttctgtggcctttaactgggtcttatataatcagcactcttggctctcaagactttagactcagaaactcagactaaaactagtctactggcttttctgggtctctggcatacaaacatgacatttctcagccttttataaccatgtgagcaactttcttataataaatctatatatatatatataatmtcctattggttctgtttctctggaaaaccttgactaatgtagactctattactgaaggtggttctagaggaacagaattttaagaataagttttgtatattggttctgggattttgggaactgactttctaatctgattgggtttgaagatgtgaagactattttcagtagtaaagagagcatcgatgttccatggcatcaactgctgagagatacacaaactaactacatacagtattcttagtcaaccacttataagaagcaaagagctgggtgactgtgtgtttaatactttccagaatttttggaaaactaacaaatacaatgaggttgtct

SEQ ID NO: 121521 - DNA, 619 bp, Homo sapiens
tcatccaattttttgtgggcctaaaaagacaaaagtgatgaaagaaatgagaattcactctctcttcttgactttttgatctggaacattgatcttctgtggcctttaactgggtcttatataatcagcactcttggctctcaagactttagactcagaaactcagactaaaactagtctactggcttttctgggtctctggcatacaaacatgacatttctcagccttttataaccatgtgagcaactttcttataataaatctatatatatatatataatctcctattggttctgtttctctggaaaaccttgactaatgtagactctattactgaargtggttctagaggaacagaattttaagaataagttttgtatattggttctgggattttgggaactgactttctaatctgattgggtttgaagatgtgaagactattttcagtagtaaagagagcatcgatgttccatggcatcaactgctgagagatacacaaactaactacatacagtattcttagtcaaccacttataagaagcaaagagctgggtgactgtgtgtttaatactttccagaatttttggaaaactaacaaatacaatgaggttgtct

SEQ ID NO: 121522 - DNA, 527 bp, Homo sapiens
ggagaaaaaaacagaaaagaaagagagaaagaaaaaggaattacaatgaaataaagaaacmttccacaaaaagaacaagaaaaaagaaaaaaaaaagttgagagtattcctagctaatacacttgaactataacatactttaaaggaagtcttctggccaaagaaatatagttctgcctgaaaaaaaaaaagagctacataaattaactggaagtatcaaaaaccataattacattggtatgttaaaaaataaacattttgtttcttgtctaaaatttatttaaaatataaacatttgttattttgtacattttcttcaaaagtttattaactggaaagtggaaatagattgtttagtttggaaaagttaacccttcattatcagcaggacccagcaaaatctgacttcattgactcattcaggaatattcatattggagaaaaaataaaagaaaaaattaagacattggaatttgaaaattttaaaaactgaatttcaaggctctctataacattacctaaaacta

SEQ ID NO: 121523 - DNA, 661 bp, Homo sapiens
acttgcatgtcctttattgagatatagcagctcgtatgctctttcttctctccttgtactagtatatctccccaaattcaatttcactaattaagaatttgttaaaatatgggggsaaatgtataaattttaaatattaaaagagtagtattaactgggcattttaaatatttaccttatgaaatcaataatattctacctcataaaagtaatcatattactatatgtgtagccatttttttccagagatatacacctctatataatatatgaaatatatgggtcgatattcattttaagggatttattaaacaaaataagtactgggtaaaaatacgtattatatggcatgattaatttaccttgatgttaccatttctagaatcgtctctaaaatgtagagtaattggaaaaattttttcttatacgattattatacaatttagaatgatttctattcttgaaagtttctttttcttttcctttctttaattagtgatggtttattgtattaatgcttttagtggtttatagattccattgttagcataacttgaaaattaaataccagtaaagctggagaagttcctgcagataaagattttttttccttttctaattttcgatgtttcaataagtccccactagaaacttcaatttt

SEQ ID NO: 121524 - DNA, 537 bp, Homo sapiens
taatgcttaatgggtatgcagtttctgtttggtatgatggaaaagatttggaaacaaatagtcacratggtttcataacattgctaatataattaatgccattggattatacacttaaaaatgattaaaatagcatttcatgttatatgtatatattttatcacaataaaacatttaaaaaggcacaagactactgaaaatttaaaaaggaaaaaagattagatggatagatagatatacagacaaacagaaagacacatatgtatatctccttaccacatcatttgactccctggatcataccatgcctgaagtctgcactaattcttttaactttcagttacataaaccaatacattttacttttaaatctattttgaattggctggcactagaaacttaaataattctggatcctgttatttcaggcataatagtgtacagttaggaaggaaaaggatatatcttgacatctgtttaggttctaaaaattttatataaacccctgatattagcagaaaatcaaccaaatcttat

SEQ ID NO: 121525 - DNA, 637 bp, Homo sapiens
gtacaagtgcaattttgttacatgcatagattgcatagtggtcaactcaaggcttttagggtatccattatccaaataatacgcattgtgcctgttaagtaatttctcattatacatcccctcacccttccaagtctccattgtcttatcattctactctctgcatccatgtatacacatttttttaactcctacctatgagtgagaatgtgcaatatttgtatttctgtgtctcatttgtttcacttacgataataacctataattccatccatgttgctacaaaggacatgattttgttctttttatggctgaatagtattcctttgtgtgtatatagtgatgaatgatatatccaatcatctgttgatggacacttaggttaattccatatctttcctattgtgaatagtgctgcaataaacatacacgtgcaggtatatttttgatatattgatttattttcctttgggtagatacctagcagtgggattgctggatctggtagttctattgtgggtatgtggtagtttcattgcggacatgatagttctatttttagttatttgataaatcctcatattrtttgccatagaggttttacaaatttacattcccaccaacagtgtatatgagt

SEQ ID NO: 121526 - DNA, 585 bp, Homo sapiens
cactttgagttaactttttaataagatataaaagataaatggaagcacatactttccatagggatctctaatttgtttccacaccatttgttaaaaagataatcctttctccactgaattatctttgcacttttatcaaaaagtagttacccgtaaatgtgtgggtttatttctggattctccattctgttcctttgatttatttgtcttcttgatgctgataccatactgtcttgattattgcagctttatgatataygctaaatcagttacctttgttcttttttttttcagttgtttttgctattctaagtcctttgcatttccatatgaaatttatcatcagtttgtcaatttctactaaaaaatgtctgctgggattttattgggattacattgaatctatagattaagcagtggaatccaaaacttccactctcaccctttcctccctccctgtcaccctcacactaatagtggcagattccaatgccccaggctccagcggaccaggaactagagggtaagctcaaaccaggggcacagtgtctcctgccagtatatgtttccatggggacccaaagc

SEQ ID NO: 121527 - DNA, 407 bp, Homo sapiens
  misc_feature (1)...(407): n = A,T,C or G
gaattctcttttacctggaggagggtcaacccttttgttctacttaggccttcaactgattggatgaggcccaccgactgcccatccaacgttgggtagggccatctattttactccctaatactgatttgactgatatgtttacaaaaacacccacacggacccactaaaaataatgtttgaccaaatatctgggtgcctgctggatcagtgaaattgacacatgaaatcaatcatcacaatctctctggcnncaatgncagtgtcctatactgtcattttttaaaacacactgtaatatttttttcctaggtgaacttgctgtttgctttcaaacacaccttacttaaattatccatgttagagctgcttcttttcttatgyttcctcttcctcccattacgttc

SEQ ID NO: 121528 - DNA, 528 bp, Homo sapiens
tgaattcttctaaatacacccgacacagtttgcaatccccgtcatctgtgatgtggcctccatacatgatctcatcaaagagataacggacatcttcccacgggacctgtggagaaaaccacacaaatattcactgctgggtgcagagtctgcctcagagtagccaaccagtggcacgtgcccctctaacacaatgccctccaagcctccgtcaataggaggatttaaaggtggttcagaaattgtctaagtttctgcagagaatttcttggcagaattattttcagtgtcttctaayatagtcagtgaaaattcactaacattgagctgtttatgaagtttttttctttaagagatgaggtctggctttgttgcctaagctggagtgcagtagcacaattacagctcactgaaaccttgaactctggggccccagcaatcctctcgcctccgcctctcaagcaactagaactacaggcacagagcactacatctggcaaatttttaaaaaattttgtagagacgggg

SEQ ID NO: 121529 - DNA, 674 bp, Homo sapiens
attgatagaatcttgatatgcaattatgacacctctaatagtggtaaagagctggattgattacatcctcagaaatcaatggtttatccttcaactgaggctgaaaaatgacctcaggaggggctgagaacagaagtctccttacctcatattcaggctgggtgctgagaaccaaacacaccctactctgcattaacatgacattgtgctattcttgtgtcttcattagagtgggctacacaggcagatgttgattattaaaacttcctgaagattcttcacctctcttgctttgaaattgtcacgttgctgtttctagcaattctgaactgttgtaccatgaaccttacccaatcctaatcatatctgggctttcaaagcccaccttaaatcaacttccaattcttaataaattctgacctcaccttcttcctgcaagacacrgccacagctttgctaggtggtattgttacagtagatagttaggcaatggtgagcagagcaggagagccccgcgaactcccagcccaacaatgtcaggtgaccatcaggtgatggttaggcagttgttaaactgtctctaaaatgataattggtcccagccaacgccggggaaaggcagtctcccagtagacagaaaacacctgaagctgctgatcagtagcttcccgata

SEQ ID NO: 121530 - DNA, 674 bp, Homo sapiens
attgatagaatcttgatatgcaattatgacacctctaatagtggtaaagagctggattgattacatcctcagaaatcaatggtttatccttcaactgaggctgaaaaatgacctcaggaggggctgagaacagaagtctccttacctcatattcaggctgggtgctgagaaccaaacacaccctactctgcattaacatgacattgtgctattcttgtgtcttcattagagtgggctacacaggcagatgttgattattaaaacttcctgaagattcttcacctctcttgctttgaaattgtcacgttgctgtttctagcaattctgaactgttgtaccatgaaccttacccaatcctaatcatatctgggctttcaaagcccaccttaaatcaacttccaattcttaataaattctgacctcaccttcttcctgcaagacacggccacagctttgctaggtggtattgttacagtagatagttaggcaatggtgagcagagcaggagagccccgcgaactcccagcccaasaatgtcaggtgaccatcaggtgatggttaggcagttgttaaactgtctctaaaatgataattggtcccagccaacgccggggaaaggcagtctcccagtagacagaaaacacctgaagctgctgatcagtagcttcccgata

SEQ ID NO: 121531 - DNA, 489 bp, Homo sapiens
cagcagccctgcagtccattgcctgggctactgcagttgactcatagctggtttccgcatgtattgctttgcttttttgcaattgtagccatacacaagtgacagatatctttaacagatgcagattgaattatgttgctctctgctgaaaagactctaaaagttccccactgtcctcagaataagaccccaaatacataacattgtctgactcttccctgttgtgcctcctttctggcctcatggtgtaccattgtccctcattctgtctgtcagtccctcttgaggccaagcccattcttctcaggacctttgctcttygcctttctctgtctgaaggttcactgactgtatgagtcagtgttctccagaaaaacagaaccaagagatgtacagatatttaagaggggatttattatggaaatggactcacactgagaagtcccatgatcttctgtgtgcaggctatagcattaaagaagctggtgc

SEQ ID NO: 121532 - DNA, 573 bp, Homo sapiens
tgagtgtgccagctaggaacctgaccaaaacctgatctcacctttgggataagccaaaccatttttcaggttttctttctttccttctttctttcttcaagaaaaccatatcaatgattttttagctacatgtaaaagttaattttatgtgtcaacctgactgggtcatgaggtgcccctataaacattatttaaacattattatttaatactaaattttaacattattagttaagcgttatttctatgtgcctgtgacggtgtttcaggaagaggttcrtatttggattggcatatttggattggcagaatatacagttcatatttggattggtaaagcagatctgccctccccagtgtggccgggcatcatccaatctgtagaaggcctgaataggacaaagagatcagggatgagcaaattctctctctcctttaacagggacatctatcttctcctgctttctcacaccaagctctttggccttcagagtccaggacttatatcaacacaccctcctaccctctaagttctcaggccttcaaacttggattgaattaccccactagttt

SEQ ID NO: 121533 - DNA, 573 bp, Homo sapiens
tgagtgtgccagctaggaacctgaccaaaacctgatctcacctttgggataagccaaaccatttttcaggttttctttctttccttctttctttcttcaagaaaaccatatcaatgattttttagctacatgtaaaagttaattttatgtgtcaacctgactgggtcatgaggtgcccctataaacattatttaaacattattatttaatactaaattttaacattattagttaagcgttatttctatgtgcctgtgacggtgtttcaggaagaggttcatatttggattggcatatttggattggcagaatatmcagttcatatttggattggtaaagcagatctgccctccccagtgtggccgggcatcatccaatctgtagaaggcctgaataggacaaagagatcagggatgagcaaattctctctctcctttaacagggacatctatcttctcctgctttctcacaccaagctctttggccttcagagtccaggacttatatcaacacaccctcctaccctctaagttctcaggccttcaaacttggattgaattaccccactagttt

SEQ ID NO: 121534 - DNA, 579 bp, Homo sapiens
catactttcaatataaacttgcaggaaaaccatgttctaaaaattttgaaggcccacctacaaccttaatttgggaagattgtgttaactcacatgcagtaatattaaaaaagactcgtatggtttagtaatagactsggcacaaaagggctatttaaaaaaaattgcttctctggcagaaaggaatacctgaagggtacttattttatttcttattgggagaactagaatcatcattctactttgcataggaggttcaactcattctttcccttaaaatgggaagataaaggcattaccccccgaggccttgtatgatactccccattctgagcccagaacacccagaactttggaaatttgctattgacatgtctgtactgtgagtaggggaaggggaaactattctgtctgttgtccccactactgtccccctctctcagcatcaacatagatccagacattctactttacttacctccatcctgatggttcccatatacagttttgttaagcttccttacatgctgttagtgggaaatatcaaaatttgaacgaacagtcagagtacccaatgca

SEQ ID NO: 121535 - DNA, 573 bp, Homo sapiens
gggatattgggagcgcattgagacctacagtgaaaaagaaaatatattcacataaaaactagaaagacattttctgagaaactacttgtgatgtgtgcattcatctcacagaaataacgctttctttgatttagcagttggaaactgttttggtagaatctgtgaaaggatactagggaatgtaatgaggctgatggtgaaaaaggaaatatcctcagataaaaaccagaaagatgcttwctgaggaactgctttgtgatgagtacattcttctcacagagttacacctttcttttgattgagcagtttcaaaatactatttttgtttaatttgcaaagggatatttgagatctcaatgaggactacggtgaaaaaggaaatatctccacataaaaactagaaaggttcctaagaaagagctttgtgatgtttccttttatttcacagagttattcatttcttttgattgaggagcttggaaatgtggttttctaaaatctgtgaaggtatatttgggagcattttgaggcctacggtgaaaaagaaaatatcttctaatgaaaactagtaag

SEQ ID NO: 121536 - DNA, 541 bp, Homo sapiens
cgtttccaaactgttcaattaaaagaaagttttcactctgccagttaaatgtacacattacaaagcagtttctcagatagcttccttcttgtttttatcctgggatattggctttttcacatttggcatcaataagctccaaatagcccttcacagattctacaaaaactgtgtttccaacctacttaatgaagagaatgctttacctctatgagatgaatgtgcasatgacaaagcggtttctcagatagcttatgtctggttttattcttggacattttcttttttgcctttggcctccatgaactcatatatgtcctttggcagaatggacaaatactgtctccaaactgctgaatcaaaacacaggtttgaatctatgaggtgaatgcacacatcacaatgcagtttgctcagaaagcgttcttctattttttatctgaagttattttccttttcaccataggcctcaaaatgctgccaaatgtccattcacagattctacaaaaacagtgtttccaaactactgaaagaaaagaaa

SEQ ID NO: 121537 - DNA, 593 bp, Homo sapiens
  misc_feature (1)...(593): n = A,T,C or G
taagcctcagagcactgcgggaaaccanggcttatttcatcccttgtctacatccataaaagacagacattcccagagtggccatttmaaaggcctacacctaggaatgcattctctttctcagggctgctccttgctgagaaaaagaattcagccatatttctcctatttacttttgaaaaaagagaaatatggttctgttctgcccagctctcagacagccagacataatggttatctccctagttccctgaacatctctcttatcttgtgcttttttcaagttgcccagcttgcataatgttttaacaatttgtgcagttaacacaatcatcacagggtcctgaggcaacattcatcctcagcttatgaagatgatgggattaagagatttaacagaggcataggaaatcacacaagtatggtttgggaagtgataaatgtccatgaaatcttcacaatttatgttcagagattgcagtaaagatagatgtaagaaattataaaagtattaatttggggaactaatacatgtccacaaaatcatcacaatttatgttcttctaccacggcttcagccagtccctccattc

SEQ ID NO: 121538 - DNA, 640 bp, Homo sapiens
agttaatgaactacttgatgtgactcttctcacttacttgggcttgccattagaagagattgtgacatgtctctgataccagcacctaggtgttgtgactctccttgtttgcctgtgttatgcccacagaagttagagtgaattatcactaggccctacacacaggtgatgtgattctactgcctgctcattgcccacaggggtcactgcaacatatctctggcaccactatctagattgtgacatattctttcacccaacatttatgtgatgtgattctcctctcatgcccggactcttacacccgttttaattttgacatagagctggtctcatctgtctaggttacgtgacaggttgtgtgactctcttcttttttcctaagccctacctacaaggagcattggtacatagctctgggcccytcgccaaaaataatgaattcttattctttggccctttcctcagtgagtattgtgacatattgatggactcagcacctaggtgaggtaactctcttctattttgtgggctctgaccaaggaggtattgtgatgtatcacttagcccagcacataggtaaatgttattcttttctcctgcctgagctcagcataaattgtgtattgtgacatgtggc

SEQ ID NO: 121539 - DNA, 606 bp, Homo sapiens
cggaagtatgtggcagaagaattagtcaaaaaattttttaatccattgaaattaaagaaaaatgagtaaaaagttgctgtttgcagattatacaattttctatttaaaaaactaagcagtatattaaagcctgtctaataaatgcactcagtaaattagcaaaatataaaagtaacatagaagtatatgtatggtttctttcacttaaaacaactatctgataaaatacagaaagaggctgggtgcggtggctcatggctgcaataccagcattttgggaggccgaggaaggtggatcatctgatgtcaggagtttgagacaagcgtggccaaaaaggtgaaaccctgtctctactaaaaatataaaaattagctggatgttgtggtgggcaccggcaatctctgctaattggtaggctgaggcargagaattgcttgaaaccaggaggtggaggttgcagtgagcccagattgtgccactgcattccagcctgggtgacagttggagactccatctcaaaaggaaaaaaaaaaaaaatagaggaagaaaaaaatcttatttactataacattaaataataaatttctgagaaaaatattaaccaa

SEQ ID NO: 121540 - DNA, 536 bp, Homo sapiens
tacgtttcatggttcttttaagatggcactaagattttgttaggcaagtaagtctaattgggaaagacttaattttagaacactcacctttgttaaaacataaaggagtcattgtttaattctgcaagacaatttagcaaaagtgggttttacttaaaacattatgatggtgttgtcaaagacaaaattacaaaaaaaaattagtttaaagatcttatttggcttttatttgcaattctagaatcaggcaacaccaacaccacattttataaagaaaactgagcgtctcaatgagctgtgcagagatgtttagttttatagcgaaaaaggagctgaagaaacagaaacagaagacaaaaagcagatgggccctttcaaagtttctttgttaaggttaaagcagaagggacttccttatcatgctgaaagaactggcttgcttgggaatttggctattctctttctctctcytgatgtttttgaaaatcagatatacaattgaattttgactttgtgatgtggaaatacagcatgag

SEQ ID NO: 121541 - DNA, 562 bp, Homo sapiens
ttgttaagtatttaggaatatggtgagtcatttgttaaacttacatgatagaagtatttataccacaaatttgggagctgcaacaactaagagccttttctcccaccaaattgtaggttatcagcccaacacaaaatatattttccattcaatgactattttccacgtgatttkgcattgatctgaaggtgaatttactctttaccttgctgaagaaggtgataggacttctattttgttgagaacatgtacacaccctaaaatttgacctgttaccttcccaagttcagagacattcatgattcatacttgaaaacatctaaacattcttatacaggtaaagtacggaaggaggggaagcaaagtttagcttttctgttagtcatacagaactgctgtttgatgctgtaagaaccctgcattgaaatgaaggattggagcagggcaataatcatgtaagttcaggaggcatacaactttagctatcaagtcttcttgcttaaaaaaataggatcagcagtgctctgttaatctcccataataactaacctcttggcatttt

SEQ ID NO: 121542 - DNA, 573 bp, Homo sapiens
aagagttttataatatctagtcctcctaatagtcttacatttatgttggctatgtctagagtagggggccaatkgtgaagagcagcactcagtggaaagaatataagtacattcatgagatcatcttagggaactcaaagctgtcttataatccttgttcgaacaagcaatggtcttgttacatgaaaatatgtcaaatgttgttttatttttgttaaaaatagttaatatgaagttgaatgatgcccagaatcagaaggggtctttcttaataagctggtcccaagaatccaaagtcagatatttgctgtgatagccgctaaaattatttgaatttttctgttgagaacttcatgactctccagtgcccctcttgttaatattcacatgatccagaattatttccatgcctgaaacactgcattcctagatggcaggcaaaattccatggtaaatacatagctgttcactaatggtaactccaatcacaaaacacatgtgaaatctggtgactaaaatatcctatatttgaataaatattactttatatctatgtttaaatctggatttctc

SEQ ID NO: 121543 - DNA, 517 bp, Homo sapiens
tcctttttcatttctgattttaggtgtttcgattttctctttttctgtcagataatctagttcttggttttctattttccttatattttcaacaagccagctttttttgctgatcctttgtatcctttttagtctctattatgtttagttctgctatgatctttattatttttttccttcactaactttgggcttggtttgttcttgcttttctagtttttatgaactgcataattaggctgtttatttgaaatctttctactttttgattgaagtgtttattgctataaatgtctctcctcatactgcttttgctgtattctatacattttggtatgtcgtgtctccatttttgcttgtttcaaaattctggtgattttcttctcaatttcttcatgaacccmatagttgttcaagatcatgttatttaatttccatttatttttacagttttcaaagtttctcttatttttgatttctggttctgttccattgtggtctaaagagattttttaaa

SEQ ID NO: 121544 - DNA, 612 bp, Homo sapiens
ggattcaagttaggttattaaagtgtgaaatctttctccactggaatgatttgttttaattttgtgcatgtgtgttatagtcccactaagtagttgttagttaaaagttaagaaggacttctcaagtgtcctgcacggtgcagaagagactccatggatattgaaggactatagtaaaaatccagaatgggtcagggatttctacattgtatattgatcaaagctgcccagtttctctagcacaactcaatagaaaaaccaattctcattctctgtttgtaccatggctggccattgtgttctgtatgttttgatggtctggaagatatctacaactctttcacatctcattatttccaaaacaatgcttaatattatgaagattttactccttccaagctcacattacagtgaactgaamtgggtccatcttgaccacagtactcttttgttttatgcacttggccaattaagtcaataaatctttttccagactttggcactttttaatctgggcagtcagtgaactggagctgtctcactgttcaggactggctgtccttggcatctatgactttaaattcccttgtgataaactatggcatgttgtac

SEQ ID NO: 121545 - DNA, 530 bp, Homo sapiens
atcatctttgccccgcaaatagtgagacctgctaatatgagcctggctggatttcagaatgctatgaatcagtgactgccatgcccttccttttcttcatcttttkgagtagaagtgtctgttgcagttaatcagtccctgtccaacatggtatgtgggatagatagaaagtagataacttgtatttttagttcacaggtttctgaatcaagaagaactccatgcaaggggcctcatctgcattaagacctgatgacaacattggataagacttgagggatcctgagatgggtataagcatattttacctgtggatggagtatcactaattgtagtcagaaagcaaaatgtattcaattgaaaagatgctctcaatatttcacagcccctcccagcaagtgaagtctatgcctccatcccttgaattttagcttcacctcatgacttgccttgacaatgggatataagaaaacactatgcaagaagatgattaaaaaacagcttccacactgacacctcccctcttttgc

SEQ ID NO: 121546 - DNA, 530 bp, Homo sapiens
atcatctttgccccgcaaatagtgagacctgctaatatgagcctggctggatttcagaatgctatgaatcagtgactgccatgcccttccttttcttcatcttttggagtagaagtgtctgttgcagttaatcagtccctgtccaacatkgtatgtgggatagatagaaagtagataacttgtatttttagttcacaggtttctgaatcaagaagaactccatgcaaggggcctcatctgcattaagacctgatgacaacattggataagacttgagggatcctgagatgggtataagcatattttacctgtggatggagtatcactaattgtagtcagaaagcaaaatgtattcaattgaaaagatgctctcaatatttcacagcccctcccagcaagtgaagtctatgcctccatcccttgaattttagcttcacctcatgacttgccttgacaatgggatataagaaaacactatgcaagaagatgattaaaaaacagcttccacactgacacctcccctcttttgc

SEQ ID NO: 121547 - DNA, 591 bp, Homo sapiens
taaaacatcaaaaaataggccaggcacggtggcttatgcctgtaatcacagcaaactccatctcaaaaaaaaaaaaggaaaaaagaactaggggatacaaacccaaatattgtatttcctcacttataaacgggagctaagctatgaagatgcaaaggcataacaattatgtaatggggatgggcacggtggctcacgcctgtaatcccagcactttgggaggctgaggtgggcgatcacctgaggttgggagttcgagacaagcctgaccaacatggagaaaccctgtctctactaaaactacaaaattagccagrcatggtggcacatgcctataatcccagatactcgggaaggctgaggcaggagcatcgcttgaacctgggaggcagaggttgcggtgagctgagatcgcgccactgtactccggcctgggcaataagagcgaaactctgtctcaataaataaatataattaaaaaaaagaattatatagtggactctgggcactcagtgggaagggtaggagagggggtgagggatgaaagactacacattgggtagagtgcacactgcttgggagattggtgca

SEQ ID NO: 121548 - DNA, 586 bp, Homo sapiens
atgcatccaggtagaaaggatctaacttgccagaattagaaatgagtcaccatgtcaactgtagctggatgttcacatatgacggtcacaatccaaactgtgggctgtgtcaatgtgtgaaattcaggacctctccaatgggstctgtccatctgtgagggcgacagtcttaacagttggtggtatgtgcatataagaaacacagtctcacctgtttagtgtgccctgtaatgacactttctgtaccactcaagggctttatataatatgtaaaaaatagtagtcttttatgaccttaatacatagagaagacccataatctctctcattttcctaagtctggttatgggagacagtatctcttctattggctggtttgaggtataagagcatttaataaacctgtgagctggacaaaatatatgtcacaattctacctgtgggtaggaagtgagcagcagattcacatcacataggtttttggcaaagatatgtcacaatctttcctgaggtcagaaaccaggcagaagtcatatcacctaggtgttcagccacagatatattacaatcccctcttaaagcagag

SEQ ID NO: 121549 - DNA, 606 bp, Homo sapiens
attttgtgacattgcccaagaggcttcacatagccttaggcaagactgtcaatgtgtactgatgtccttcttacttagaagagacctgcttttgatcccgtttattgatgaggattgaaaagaacatattcaccagatcaatggcaacatactgagtgccagaggctgtgttggtytgtttagtaaagatatcccatctggctcagcagctgagattggagctaccacttgattaagtttatggtagtccactgtcatccaccatgatctgtcagtttatttttccaagcaccatacaggtgaattatatagagagatgctggagaacatcatccagcagaaatgatgataccaattctctttgctggtggcactaattttcttttggaatagtgctaacttgggtacagtctcctgactggtggggttgtgctggatagtttcagagacttccacttgtcccttcctaccctaatggcttttactcagtaggctagggaacctgtgggaagattctgccgctactttgcttatccatccaaattattctcttggacaatggggaaataaccacaggttgagttcatgggtccatttgatccaatt

SEQ ID NO: 121550 - DNA, 583 bp, Homo sapiens
ttgagcattatttggatttagcagttttgaaacactccttttgtagtatctgcaagtggatatttggatctcttcgaggactaagtttgaaatggaaatatctccacataaaaaccacacagaagcattatgagaaaawaatttgcaatgtgtgcattcatctaacagagttgaacatttcttttgattgagcagttttgaaacactcttttagtagcaactgcaagtggatatttggagtgctttgaggactattgtggaaaaggaaatatcttcacataaaaactacacagaagcatcctgagaaagaactttgcaatgtgtgcattcatctcaaagtgttgaaacattctttcgattgagcagttggaaaaactcttttgtaggatctgcatatggatattggaacgtttgaggcataaggtggaaaaggaaatatcttcaaataaaaactacacagaagaattccgagaaacttcttgtgatatgtgcgttcatctcacagagttgaacccttgttttgattgagcagtttgaaacaatctctatgtagaatctgcaggtgtatatttggactgctctg

SEQ ID NO: 121551 - DNA, 583 bp, Homo sapiens
ttgagcattatttggatttagcagttttgaaacactccttttgtagtatctgcaagtggatatttggatctcttcgaggactaagtttgaaatggaaatatctccacataaaaaccacacagaagcattatgagaaaataatttgcaatgtgtgcattcatctaacagagttgaacatttcttttgattgagcagttttgaaacactcttttagtagcaactgcaagtggatatttggagtgctttgaggactattgtggaaaaggaaatatcttcacataaaaactacacagaagcatcctgagaaagaactttgcaatgtgtgcattcatctcaaagtgttgaaacattctttcgattgagcagttggaaaaactcttttgtaggatctgcatatggatattggaacgtttgaggcataaggtggaaaaggaaatatcttcaaataaaaactacacagaagaattccgrgaaacttcttgtgatatgtgcgttcatctcacagagttgaacccttgttttgattgagcagtttgaaacaatctctatgtagaatctgcaggtgtatatttggactgctctg

SEQ ID NO: 121552 - DNA, 230 bp, Homo sapiens
tgcaccagcttcaacttcaagtcatcagctgcataagcccctaacaagaaagtcagcatgtcctttgaaactttgaagccaggcattgacttctcctgcctagctatgaaagtcctagatggcatcttcttccaatagaaggctgtttcatctacattgaaaatgtgctgcttataatagccarcttcatcaatggtcttagctagatcttcagaataacttgcagcttc

SEQ ID NO: 121553 - DNA, 618 bp, Homo sapiens
gagcgtgactacttaagatatctcctataaatgggatcatatagtagccatcattttgttaatggcttatttcaggtgacataatrattctcgaagtttgtcttaaagtgtgacaagattttttttaaggctgaataatattccattgtatttatatgttacattttttgatgtatttgtaagtcaagaaagggttgcttcagtcttttggcttttgtgaatactggtacagtaaacatcaatattcaaatatgccttctagctcctgcattgcagagtttgcatatagatttacaaattgaattattgtatttaatgattccatttttaattatttgggtaacataacattttaaaacagtggctgcatccttgttttacaccaacaaataacggattttcagttcatcatcaacagatttaatgttttaaaaaaattgatagtggccattctaattggtttgagtttttttcacgtgatttttatgcatttctctacaaatgtaatttcctgtgtcttttcaaatgctttttccaatttttgtatttttttgattaaaatttatttcaattattagtccatttaagacttgtttatgtattctcaatattaactgc

SEQ ID NO: 121554 - DNA, 618 bp, Homo sapiens
gagcgtgactacttaagatatctcctataaatgggatcatatagtagccatcattttgttaatggcttatttcaggtgacataataattctcraagtttgtcttaaagtgtgacaagattttttttaaggctgaataatattccattgtatttatatgttacattttttgatgtatttgtaagtcaagaaagggttgcttcagtcttttggcttttgtgaatactggtacagtaaacatcaatattcaaatatgccttctagctcctgcattgcagagtttgcatatagatttacaaattgaattattgtatttaatgattccatttttaattatttgggtaacataacattttaaaacagtggctgcatccttgttttacaccaacaaataacggattttcagttcatcatcaacagatttaatgttttaaaaaaattgatagtggccattctaattggtttgagtttttttcacgtgatttttatgcatttctctacaaatgtaatttcctgtgtcttttcaaatgctttttccaatttttgtatttttttgattaaaatttatttcaattattagtccatttaagacttgtttatgtattctcaatattaactgc

SEQ ID NO: 121555 - DNA, 618 bp, Homo sapiens
gagcgtgactacttaagatatctcctataaatgggatcatatagtagccatcattttgttaatggcttatttcaggtgacataataattctcgaagtttgtcttaaagtgtgacaagattttttttaaggctgaataatattccattgtatttatatgttacattttttgatgtatttgtaagtcaagaaagggttgcttcagtcttttggcttttgtgaatactggtacagtaaacatcaatrttcaaatatgccttctagctcctgcattgcagagtttgcatatagatttacaaattgaattattgtatttaatgattccatttttaattatttgggtaacataacattttaaaacagtggctgcatccttgttttacaccaacaaataacggattttcagttcatcatcaacagatttaatgttttaaaaaaattgatagtggccattctaattggtttgagtttttttcacgtgatttttatgcatttctctacaaatgtaatttcctgtgtcttttcaaatgctttttccaatttttgtatttttttgattaaaatttatttcaattattagtccatttaagacttgtttatgtattctcaatattaactgc

SEQ ID NO: 121556 - DNA, 618 bp, Homo sapiens
gagcgtgactacttaagatatctcctataaatgggatcatatagtagccatcattttgttaatggcttatttcaggtgacataataattctcgaagtttgtcttaaagtgtgacaagattttttttaaggctgaataatattccattgtatttatatgttacattttttgatgtatttgtaagtcaagaaagggttgcttcagtcttttggcttttgtgaatactggtacagtaaacatcaatattcaaatatgccttctagctcctgcattgcagagtttgcatatagatttacaaattgaattattgtatttaatgattccatttttaattatttgggtaacataacattttaaaacagtggctgcatccttgttttacaccaacaaataacggattttcagttcatcatcaacagatttaatgttttaaaaaaattgatagtggccattctaattggtttgagtttttttcacgtgatttttatgcatttctctacaaatgtaatttcctgtgtcttttcaaatgctttttccratttttgtatttttttgattaaaatttatttcaattattagtccatttaagacttgtttatgtattctcaatattaactgc

SEQ ID NO: 121557 - DNA, 612 bp, Homo sapiens
acaaacgtgaagaatgtagcaaagcctttaacctgtcgtcacacattacaacacatacaataattcatactggagagaatccctacaaacgtgaagaatgtgacaaagcctttaatcagtcctyaacccttactacacataagataattcataccagagagaaactcaatgaatataaggaatgtggcaaagctttcaaccagtcctcacaccttaccagacataagataattcatactggagagaaaccctacaaatgtgaagaatgtggcaaagcctttaaccagtcctcacaccttaccagacataagataattcatactggagagaagccctacagatgtgaagaatgtggcaaagcctttaggcagtcctcacaccttactacacataagataattcatactggagagaaaccctacaaatgtgaagaatgtggcaaagcttttaaccagtcctcacaccttactagacataagagcattcatactggagaaaaaccctaccagtgtgaaaaatgtggcaaagcttctaaccaatcctcaaaccttactgaacataagaatattcatactgaagagaaaccatacaaatgtgaagaatgtgggaaag

SEQ ID NO: 121558 - DNA, 612 bp, Homo sapiens
acaaacgtgaagaatgtagcaaagcctttaacctgtcgtcacacattacaacacatacaataattcatactggagagaatccctacaaacgtgaagaatgtgacaaagcctttaatcagtccttaacccttactacacataagataattcataccagagagaaactcaatgaatataaggaatgtggcaaagctttcaaccagtcctcacaccttaccagacataagataattcatactggagagaaaccctacaaatgtgaagaatgtggcaaagcctttaaccagtcctcacaccttaccagacataagataattcatactggagagaagccctacaratgtgaagaatgtggcaaagcctttaggcagtcctcacaccttactacacataagataattcatactggagagaaaccctacaaatgtgaagaatgtggcaaagcttttaaccagtcctcacaccttactagacataagagcattcatactggagaaaaaccctaccagtgtgaaaaatgtggcaaagcttctaaccaatcctcaaaccttactgaacataagaatattcatactgaagagaaaccatacaaatgtgaagaatgtgggaaag

SEQ ID NO: 121559 - DNA, 568 bp, Homo sapiens
gcctactttttggaaggattgtttcttttttattcttgttgctttttttgagttctttgtagattttggatattagttctttgtcagatgtgtagattgtaaagatttttcccastctgtgggttttctgtttactctgctgactttacttttgccatgcaaaggctctttagtttaattaagtcccagcatttatctttgttttattgcatttgcttttgggttcttggtcatgaagtcctgcctaagccaatgtctagaagggtttttttcaatgttctagtttcaagtcttagatttaagtccttaatccatcttgagctgatttttgtataaggtgagaggcgaggtgaggatccagttttattttcctacatgtgactagccaattatcccagcacatttgttgaaaagggtatcctttccccatataatgtttttgtttgttttgttgatgatcagttggctgtaagtatttgggtttatctctgggttctctattttgttccattggtctatgtgcctatttttataccagtaccatgctgttttggtgactatcgtctta

SEQ ID NO: 121560 - DNA, 436 bp, Homo sapiens
aatggaatggaatgcaatggaattaacccgaatacaatggaatggaatggaatggaacggaatggagtggaatggaatggaatcaacccgagtgcaggggaatggaatggaatggaatgcaatggaatggaatcatccggaatggaatggaatggaatggaatgcaaagcaatggaatcaactcgattgcaatggaatggaatggaatggaaaggaatacattggaatcaacccgagtggaatggaatggaaaggactggaatggagtggaatggaacggaatggaatggaatggaatggaatggaatggaatggaatcaactygattggaatggaatggaatggaatggaatggaatggaattaacccgaatagaaaggaatggaatggaatggaacggaacggaacggattggaatggaatggaatggaatgga

SEQ ID NO: 121561 - DNA, 578 bp, Homo sapiens
taaactgctttaattctttctactctctgctaacaatatgagctttgcaaacataggcatttgatttataggaataaagcttgattaaaaggctgtgtcataaataatcacatgcacattgggccaatatataagaagaagttcattgttaatttggataactctgacttggcttcttcaggataacacagcacatrgcatgtactgaaatagagggaattagtactgggaactagttacaagggttgggagagctgaaaagaaaaaaaacaagttggtgaggaagtgaagacctttgttacaggagaaaacaccaccatacatgggactggggaaccaaaggaagatgtggtgttaccggagcctcagagttaggcctgcttgatcccaagtagctaaatggcagaggatctccagggaaactgggcccagggagcgaaaacctgtcccttgcggatgttgctgctggaagaggctgcctgaggaagagagagaagatgagctatatcttggcctctcatttccttctgccttcctatctattgccattgcctcctgatggctggacttatctgtca

SEQ ID NO: 121562 - DNA, 578 bp, Homo sapiens
taaactgctttaattctttctactctctgctaacaatatgagctttgcaaacataggcatttgatttataggaataaagcttgattaaaaggctgtgtcataaataatcacatgcacattgggccaatatataagaagaagttcattgttaatttggataactctgacttggcttcttcaggataacacagcacatagcatgtactgaaatagagggaattagtactgggaactagttacaagggttgggagagctgaaaagaaaaaaaacaagttggtgaggaagtgaagacctttgttacaggagaaaacaccaccatacatgggactggggaaccaaaggaagatgtggtgttaccggagccycagagttaggcctgcttgatcccaagtagctaaatggcagaggatctccagggaaactgggcccagggagcgaaaacctgtcccttgcggatgttgctgctggaagaggctgcctgaggaagagagagaagatgagctatatcttggcctctcatttccttctgccttcctatctattgccattgcctcctgatggctggacttatctgtca

SEQ ID NO: 121563 - DNA, 595 bp, Homo sapiens
cattgactctatgggagaagtcctattataactgcaatttctcaaatgaggaaactgaggctgcaagaggttaaataatgtgtccaagatcacactcatgttaagcagtaaaaactgaatttgcacaacagtctgaagccagagcccatgttctcaatgcattacctcagctctgttggctcatccagcacagtctaccttgtgagaaatacttgtaaattggcctgtctattcctcaccccagattataacatcccacaagggccgaggcatcatattcccctcctttgaaccccaattatgccttagcttgacactttgcatacagtgagtgtcttttttaattgccagagcatgcgtactacacagggacaaattctaacaatttagatttcttcagtttcttcctttgtaatggctccaggcactatccaaaaaaacagtagtacagaggctagtttcaaacacaactccccatgtacacacacacaaacacaaagacggcacaggagggaagtgatgaatgtggcacagacaacagtaargaaataccagcaatttgaagccctgtccctgaatcctactcctgttgcct

SEQ ID NO: 121564 - DNA, 577 bp, Homo sapiens
atcttcgtaagattttcacaaagtttcactaatactagtcaatggggctgccattctttctgctttagtagcagcaagaaacacaaaattgtattaagaaacatgttttctgcagctgtccaagttttaacgggtaagaatgagaaattcaactaaactcaaattctgggctatacagaaatagagaactataattctatgctgtgaattgataacatgaaaagggaagactaagtaaagcagtccttcaggagcaatgaaggtcaccataataagccaatgtggggaaatggtaatagccatagcttgtgttggagtgtagcttgaaggggactttggactttcacatacattgttatccctttcccaccttagcatacaaggggaattaagccagtgagtaatccaattagtctcrtcaacactggctccatgtgactggggcgttggtattccctaatctcatgccaatatcagcttgaggagagtggagcacctgagagtaaatggccaaaatcggagctctaaatggatgagctggaagaaaggttcgctcattattatatgaaattatgag

SEQ ID NO: 121565 - DNA, 681 bp, Homo sapiens
cttggcacacccattagaccttgctgggaagggttacagaaaggattattaacttaataaacgttttctcctttcattccatctcagaacaaaacatcaagccaaaataaacactttcaaattattcaactgattctgcagcctggccgcagtggattcagcatcagttatagatgatcctccaactttcccttcacctcccccaaaactcttctgkcattacaaaactcaaaacaaattcatcttgttgacaagcagaactgattcaagaaaggcaagatagctcatcatctttgtcattaaactttagataattaaaacgtcacaccaaacttcccttgaattagctgattaactgctctcttctatatatttaacttaaaaacattaaaaaccattattttaatgatatagaacatgaaattagaggactattacattattcagcactcttcaaagacccatgaccaaaaaaaaaaaattcattttaatgtgtgtcccacatctgtagaaatctcagaactgcatttgcctgtgatttaaagtaactatcacaatattatctattggaaaaattagaaaacatgacagaaatgagaaagtagaaaagtatattcatgtgtgtgtggaataccttcttgactttcgatagtatttattttaaaggtattttagacaaaa

SEQ ID NO: 121566 - DNA, 654 bp, Homo sapiens
aggtcaacaggggccttttaggttatgttaaggaggtggactttatcctgaaggcaaaggaaagtcatagaaggggaagaaggggactgccatgatccatcatcagccaagaacacagttggcattcatagtgaaggggcatctgtgtgtctaaggaccrgaaataatctccatgaagagggtgaaaggcatcagggcttggttaaaagaaattcatgggaagctaactggcctgtaagtcagatgatttagactcttgccccccttttcctacaacttagatctgtacccttagacaaggtggaatggggaagggaaaaaacactgtggactcttttctctaatttggtataaggacagggcaggcacatctacttcatgtaatttactaatctcattgactacatccccatgccatagctattctcaccacagtttaagaagagaactcaggcttagaatgacagagctgagatccaaacccaggacttctgggatcctggtgctcttcctgcagtattctggggaggatcaaaattccctcgtttttcggcaaagaaaagaatttgcccttggttacttacaaggtcttttcagttccttccaagattctatgcttggaattgggatgcaaacccttcatccagagattaa

SEQ ID NO: 121567 - DNA, 560 bp, Homo sapiens
tgggacttttcagttttaaactgggacagtccctgccaaaccaagatgagttagtygccttaagttttgatccccctgcttccacttttgcgtccctccaattcttttccacactgaagccaaagtgatttattcaaaatgaaaatctgaaacatgagatatcacttcaaacctgttagaatgcctaaaattaaaaagactggccagaccaagactgagtgaggattggaggaactgggactgtcacacactgattatggaaacatagaatgcactttggaataaaaaaaccactttggagacctgtttggcagtttctttcaaagttaaacgtacacttaccattcaatttatgtttatgaaagaaaacatatatccataaaaacaaatgttcatagtaggtttattcaaacataaagctttattcatgatacccaaaaagtggaaacaataccaatgtccatcaataggttattggataagtaaattgagatatatcaaaaaaaatgggatactacccagcaaaataagcatgactgatgcatgcaacaacatgtatg

SEQ ID NO: 121568 - DNA, 560 bp, Homo sapiens
tgggacttttcagttttaaactgggacagtccctgccaaaccaagatgagttagtcgccttaagttttgatccccctgcttccacttttgcgtccctccaattcttttccacactgaagccaaagtgatttattcaaaatgaaaatctgaaacatgagatatcacttcaaacctgttagaatgcctaaaattaaaaagactggccagaccaagwctgagtgaggattggaggaactgggactgtcacacactgattatggaaacatagaatgcactttggaataaaaaaaccactttggagacctgtttggcagtttctttcaaagttaaacgtacacttaccattcaatttatgtttatgaaagaaaacatatatccataaaaacaaatgttcatagtaggtttattcaaacataaagctttattcatgatacccaaaaagtggaaacaataccaatgtccatcaataggttattggataagtaaattgagatatatcaaaaaaaatgggatactacccagcaaaataagcatgactgatgcatgcaacaacatgtatg

SEQ ID NO: 121569 - DNA, 560 bp, Homo sapiens
tgggacttttcagttttaaactgggacagtccctgccaaaccaagatgagttagtcgccttaagttttgatccccctgcttccacttttgcgtccctccaattcttttccacactgaagccaaagtgatttattcaaaatgaaaatctgaaacatgagatatcacttcaaacctgttagaatgcctaaaattaaaaagactggccagaccaagactgartgaggattggaggaactgggactgtcacacactgattatggaaacatagaatgcactttggaataaaaaaaccactttggagacctgtttggcagtttctttcaaagttaaacgtacacttaccattcaatttatgtttatgaaagaaaacatatatccataaaaacaaatgttcatagtaggtttattcaaacataaagctttattcatgatacccaaaaagtggaaacaataccaatgtccatcaataggttattggataagtaaattgagatatatcaaaaaaaatgggatactacccagcaaaataagcatgactgatgcatgcaacaacatgtatg

SEQ ID NO: 121570 - DNA, 560 bp, Homo sapiens
tgggacttttcagttttaaactgggacagtccctgccaaaccaagatgagttagtcgccttaagttttgatccccctgcttccacttttgcgtccctccaattcttttccacactgaagccaaagtgatttattcaaaatgaaaatctgaaacatgagatatcacttcaaacctgttagaatgcctaaaattaaaaagactggccagaccaagactgagtgaggattggaggaactgggactgtcacacactgattatggaaacatagaatgcactttggaataaaaaaaccactttggagacctgtttggcagtttctttcaaagttaaacgtacacttaccattcaatttatgtttatgaaagaaaacatatatccataaaaacaaatgttcatagtaggtttattcaaacataaagctttattcatgatacccaaaaagtggaaacaatacmaatgtccatcaataggttattggataagtaaattgagatatatcaaaaaaaatgggatactacccagcaaaataagcatgactgatgcatgcaacaacatgtatg

SEQ ID NO: 121571 - DNA, 603 bp, Homo sapiens
gatgagaaatcacatggaggagagccaacgggtcccagctgacaaccagatgagctctggaatcacagtgaactagacatcacatagctgcacgcagacacatgagcacagcttagcccagcctaaattgccaatctgacttgcaatatcatgagctaaataaatcgttgttttaaaccatcaagttttgaggttgtttgttatgcaacaatagttcattgatacaggcagcaagtccatgaatatcttccgtcaattttcttggattgagaaataataattcctggttcaggttacttccaattcactattaaatttctgaatggtaacaaaaggaagcaagtaatgaaatgattattctatatagataagagcttttattattaatttttagrtcatacttaggatagtgatactttgctgtttttctggcaattaagttagttttaagaatgccttgatgtattttaaagacaattggcctgaataagaattttagctagtttatgccttttttccttactcgtatcttgaaatgtagattcataattacttaggcttcttattcattcttttcttttgcttttgccaagatgcttactg

SEQ ID NO: 121572 - DNA, 603 bp, Homo sapiens
gatgagaaatcacatggaggagagccaacgggtcccagctgacaaccagatgagctctggaatcacagtgaactagacatcacatagctgcacgcagacacatgagcacagcttagcccagcctaaattgccaatctgacttgcaatatcatgagctaaataaatcgttgttttaaaccatcaagttttgaggttgtttgttatgcaacaatagttcattgatacaggcagcaagtccatgaatatcttccgtcaattttcttggattgagaaataataattcctggttcaggttacttccaattcactattaaatttctgaatggtaacaaaaggaagcaagtaatgaaatgattattctatatagataagagcttttattattaatttttaggtcatacttaggatagtgatactttgctgtttttctggcaattaagttagttttaagaatgccttgatrtattttaaagacaattggcctgaataagaattttagctagtttatgccttttttccttactcgtatcttgaaatgtagattcataattacttaggcttcttattcattcttttcttttgcttttgccaagatgcttactg

SEQ ID NO: 121573 - DNA, 571 bp, Homo sapiens
gacaataccaagtgttgacaaggatgcagaggaactggaactctcacaaactcctgttggaaaactaaattgatacaatcactttgcaarattgtttgtcagtatctactgaagctaaatatacacatgccctataacccagcaatttcacctctattaatattacagaaatgaatgcatacattcaataaatgactacgaaagggcataatagaagcttctagaatgctggtaatgtatatctttaccttagtagaggatatatcagtgtgttcactttgtaaaaattgatcatctatattcttatgcttcttcctgttgtacttttgtaagttacacttcaataaaaattattcagaaaggactagcaacctaaaccttatacccattaaaaacaacaaaattacaaacctttgaaattcagatggctagaagctagagagatggcacaaaatagagacactaaacagacattcatatgtaatcacttaactgacaaaagtgtaactatttctatgaggaaatacatggtattttccatttaaattgcaaggctgaggtttaagaaaaa

SEQ ID NO: 121574 - DNA, 571 bp, Homo sapiens
gacaataccaagtgttgacaaggatgcagaggaactggaactctcacaaactcctgttggaaaactaaattgatacaatcactttgcaagattgtttgtcagtatctactgaagctaaatatacacatgccctataacccagcaatttcacctctattaatattacagaaatgaatgcatacattcaataaatgactacgaaagggcatratagaagcttctagaatgctggtaatgtatatctttaccttagtagaggatatatcagtgtgttcactttgtaaaaattgatcatctatattcttatgcttcttcctgttgtacttttgtaagttacacttcaataaaaattattcagaaaggactagcaacctaaaccttatacccattaaaaacaacaaaattacaaacctttgaaattcagatggctagaagctagagagatggcacaaaatagagacactaaacagacattcatatgtaatcacttaactgacaaaagtgtaactatttctatgaggaaatacatggtattttccatttaaattgcaaggctgaggtttaagaaaaa

SEQ ID NO: 121575 - DNA, 421 bp, Homo sapiens
atataatatatatgaaatcattagtatatatatgaaagttttctgatccattttttaaaagctagaacaagtacctgctttcgraaaacacatcctgacaaaagtaaccttgaaaataaagtataaaccaagctccctttttaatatagaggtaaaagcaattttaagtaaaattgaaagtacattttagtaattcaactaaatttatttcaagattagaatctatcatattatttcattagaggataaaattcacacttgatggaggattttaaaaagtgttttataaaacttaactgggcataggagaatgttattttaacatgaaaatgagtgtatctcttcggcagggcttaagctgcttgctgaaaatgtagagacatgagcctcatcctaacctctgcacctgaaacatgaattc

SEQ ID NO: 121576 - DNA, 529 bp, Homo sapiens
aaaagcttccctctgcagtaatttttctttgatttacgggttgtgttaaaattgttgttctataatggtcatgtctagagactgttgcacttaaagggaaaattgctctaaataaaaacgaatgatactaaaatcccttctctcccaatgaaatgattctcctgtattttgttctccttgtgtgctcaccaaaaaagcttctytggtctattatttcccaattacctcttctgatgttagctgagagcagagaaggaggatgggatcacgaggctcataacatttgatcttttccaggcttcagcaaacctgtgaatcattttcataagctaaatcaatatcaggtgtcacctggtggcaggtaagggcaatccgatggtttttgtaataccttgtggacattgattttccacatatcaagagaggacacgaaatagggaatggatgagtatgcaaaagtaaaatgaccacacagctctgcagtttggttcagggcttgcatgtttcctgacttcactctgacttctca

SEQ ID NO: 121577 - DNA, 618 bp, Homo sapiens
ctttggggtacagaaatatcctcatttttcatattccagtttttaaagaattctcttgaggaggcaggagagccacaatatccaatgggtaaaatacctttttaaaaaacaacagttacagcacatcaaaatttgtcatgtgcaggcaaagctgtacttctaaagaaagacctaaaatcaattacctaaaactttcaacttaagacactagaataggaagagcaaggtaaacccaaagtaagtagaaagatagggataatagagctctgagcagaaatcaatgaaataaaatgcaggcaaaaagtatagaaaattagtttagaataaaactagtttagaataaaaagtatagaaaattagtataggaaactaattttctagctctggctattggaaagttcaacaaaattgataaactctagctaaatagactaagcaaaaaagagaaagaacacatatcactaatactaggaaaaaaagtgtttatcaccaccaatcctacatacattaaaagaataattagaaactactatggataactttaggctaaaaactttgayagtttaggtgaaatggagggttctttgtttttttttttttggaaaaatacagttcacc

SEQ ID NO: 121578 - DNA, 490 bp, Homo sapiens
ggattttgaaagactttttttgtggacttacttcataatggatgagagctgttgcctggagagggactatgtggcaggaccctaattatcagttcaattgggaagaacccaggagacatatttgcagtaattcaaatccacagaaataaagagtttgatgtgaacctcagatgatagagaaaatggatatattttgtaggctgtatcaggagaaaaagcagyaggcactggtgatttccccaagcaagttaaagccaaaggctgttagttctcttcaagactgtaacacaggagataggtcatatggcaatttcattgaaaaatcccattatgatgtagtaaagtttcattaacagcagcagagaaatttggcattaggatagggaaacataagtatggaacagaaagctgtcaaggtgaacatgggcattctactttccagctgcttttaatccagaacagaaacaagttctggctgttgctggaacag

SEQ ID NO: 121579 - DNA, 490 bp, Homo sapiens
ggattttgaaagactttttttgtggacttacttcataatggatgagagctgttgcctggagagggactatgtggcaggaccctaattatcagttcaattgggaagaacccaggagacatatttgcagtaattcaaatccacagaaataaagagtttgatgtgaacctcagatgatagagaaaatggatatattttgtaggctgtatcaggagaaaaagcagtaggcactggtgatttccccaagcaagttaaagccaaaggctgttagttctcttcaagactgtaacacaggagataggtcatatggcaatttcattgaaaaatcccattatgatgtagtaaagtttcattaacagcagcagagaaatttggcattaggatagggaaacataagtatggaacagaaagctrtcaaggtgaacatgggcattctactttccagctgcttttaatccagaacagaaacaagttctggctgttgctggaacag

SEQ ID NO: 121580 - DNA, 631 bp, Homo sapiens
gatctttttatatgctctttttacttaagttttaatttgtcctttaaaaaaaggtgaaacaaaccaagaacaagttctagaaaactgaagcaacctcttatgtatactagatgcttgatttaggaggagtttttaaacgttttcaatgttattatgtagtaaatgacactattatgaagctactagtcattccataagagtcttaaaggactgctctgtgtaacactgtgactgccgtgtgtgcttagacccgtagtttcctcagtggatagcactcaatttattccgtagtgatattgtaacaatactgccattcccttctacygcactgcccaaggtgtgtgtagcacaaacagttctcattacaaaggaccaattcagaactgaaaagctatgcataggacaaggaagatacatagaatggggtggaacacagcattttgtcaagcactgtgcaatattccatatttttccccactatggtagacaaccatttcgtggaagggcagcctattatcccacactgcatctagccttttgtcccattcacttctgtgatccattttaatttccaggccacaagacagtagtgatgctctgaaatgaaagtttgtcttcacaaatatcaaaa

SEQ ID NO: 121581 - DNA, 618 bp, Homo sapiens
catcacattttcatgcaaaggaccattgaattccctaatgatgttctgattttcttaacaatgaacaccagtgaactttcccctaggcaaaccagatggaaactaaatcgtttctgcagaatgaacgatttgtgaaatcttggcaaattgaattccaaatatacttagagatgatcttgactttctctgtaactctaccacaacatgcaatgcatttaaggcctacatgggaaatacactaattagttgcataacctttatgcagaaatgaatgagaacagaagatcaccatcaaaggaataaaagtcagtaactccgaaaaagaagtaatatgcagatgggacatcttcactaagaaagtatgagtttaatgtagatattgtgggaggtattcccttgtcatctttgaattggttctttttaacctgctttgtgaaggaggtaactcattaagcacgtttctttacattgtttcaaatacgtyatttagctagttatatgaaaatctgaattcaaattcttaatctatgtgtctacattttctacttcacacactctcttacctataccccaaaatggaattaaatggactgtgcatgaaaaagattttgtttctat

SEQ ID NO: 121582 - DNA, 524 bp, Homo sapiens
tttgggggtgggaggaattaatgctgtgtgttcttttattgctcatatcttcatggccatttcaaaaattattttgaaatgctgagtgtgtttacagaggcagtgttaacaaaatagttttcatcatcatcaaggtttgaatccctgaagcaccctrtccctctgttctacaaattagccacatgaagaaaactgagagaataagtttcatgttgctaaaagagaataataggctgatcatgtatattcacagggtacaaattacattgtcttaattttgcagcaatatgaactattactaaagaaataccttacttgcctatccatctattgattgtgttggagttcaatacagtttttctctcagggtcataaagccattcacagaatcaggggtgttcaagggcgagaattcagtcatgggttcttagtttgtgtttctggttgggccagtaaagccccttcctcatctctcttttccacttatcactacagatgcagacttaaaaccatggcttcaggct

SEQ ID NO: 121583 - DNA, 524 bp, Homo sapiens
tttgggggtgggaggaattaatgctgtgtgttcttttattgctcatatcttcatggccatttcaaaaattattttgaaatgctgagtgtgtttacagaggcagtgttaacaaaatagttttcatcatcatcaaggtttgaatccctgaagcaccctatccctctgttctacaaattagccacatgaagaaaactgagagaataagtttcatgttgctaaaagagaataataggctgatcatgtatattcacagggtacaaattacattgtcttaattttgcagcaatatgaactattactaaagaaataccttacttgcctatccatctattgattgtgttggagttcartacagtttttctctcagggtcataaagccattcacagaatcaggggtgttcaagggcgagaattcagtcatgggttcttagtttgtgtttctggttgggccagtaaagccccttcctcatctctcttttccacttatcactacagatgcagacttaaaaccatggcttcaggct

SEQ ID NO: 121584 - DNA, 524 bp, Homo sapiens
tttgggggtgggaggaattaatgctgtgtgttcttttattgctcatatcttcatggccatttcaaaaattattttgaaatgctgagtgtgtttacagaggcagtgttaacaaaatagttttcatcatcatcaaggtttgaatccctgaagcaccctatccctctgttctacaaattagccacatgaagaaaactgagagaataagtttcatgttgctaaaagagaataataggctgatcatgtatattcacagggtacaaattacattgtcttaattttgcagcaatatgaactattactaaagaaataccttacttgcctatccatctattgattgtgttggagttcaatacartttttctctcagggtcataaagccattcacagaatcaggggtgttcaagggcgagaattcagtcatgggttcttagtttgtgtttctggttgggccagtaaagccccttcctcatctctcttttccacttatcactacagatgcagacttaaaaccatggcttcaggct

SEQ ID NO: 121585 - DNA, 495 bp, Homo sapiens
ttaaaaaaaaaaaaagttgccagtrcaaatcattcctcagtaaacgaatcgcttttttctagaatctcagaattttacttaccatttgtttttgtttttgttttgagacagggtttcactctgttgttcaggctgaagtgcagtggcactatcacagttcacttgtagccttgactttctgggctcaagcaatcctcctacctcagtctcctaagtagctgggactaaaggcatgtgccaccatgacaggctggttttaaaattttttatagagatgggatcttgctatgttgcccagactggtctccaactcttgggctcaagctatcctcctgctgtggcctcctaaagtgttgggattacacgtgtgagccattgtgcccagccctttcttttttaaataaaatattctcctctacattttttagatgcatatttcttataaaagacaatatcaacaccttgcaatatataattactttttaaaaaatgaat

SEQ ID NO: 121586 - DNA, 495 bp, Homo sapiens
ttaaaaaaaaaaaaagttgccagtgcaaatcattcctcagtaaacgaatcgcttttttctagaatctcagaattttacttaccatttgtttttgtttttgttttgagacagggtttcactctgttgytcaggctgaagtgcagtggcactatcacagttcacttgtagccttgactttctgggctcaagcaatcctcctacctcagtctcctaagtagctgggactaaaggcatgtgccaccatgacaggctggttttaaaattttttatagagatgggatcttgctatgttgcccagactggtctccaactcttgggctcaagctatcctcctgctgtggcctcctaaagtgttgggattacacgtgtgagccattgtgcccagccctttcttttttaaataaaatattctcctctacattttttagatgcatatttcttataaaagacaatatcaacaccttgcaatatataattactttttaaaaaatgaat

SEQ ID NO: 121587 - DNA, 495 bp, Homo sapiens
ttaaaaaaaaaaaaagttgccagtgcaaatcattcctcagtaaacgaatcgcttttttctagaatctcagaattttacttaccatttgtttttgtttttgttttgagacagggtttcactctgttgttcaggctgaagtgcagtggcactatcacagttcacttgtagccttgactttctgggctcaagcaatcctcctacctcagtctcctaagtagctgggactaaaggcatgtgccaccatgacaggctggttttaaaattttttatagagatgggatcttgctatgttgcccagactggtctccaactcttgggctcaagctatcctcctgctgtggcctcctaaagtgttgggattacacrtgtgagccattgtgcccagccctttcttttttaaataaaatattctcctctacattttttagatgcatatttcttataaaagacaatatcaacaccttgcaatatataattactttttaaaaaatgaat

SEQ ID NO: 121588 - DNA, 405 bp, Homo sapiens
aagagcttggaaaaaagcctggactccctcttctgtggtctagttgacattttgatggcagccttgcgagacaccgagcagaggacmctgttaggctgggcttggatttctaattcatgtaaactgtgagataataaacgttgtgttgttttaagccactaatattgtagcaaatgtttttaacaaactttttttagaataggtttagatttacagaaacgttaagactgtacagagatttctcatatacctcatacctagtttcccctattattaacctctacattaatatggcacatttattagaatgaatggaccaatgtaaatgcattattgttaactaaagtccatactttattcagattttctgagtttttctgttccaggacaccacattacatttag

SEQ ID NO: 121589 - DNA, 633 bp, Homo sapiens
ctagtataacattgaaaaagatcaccacacttggtttgaagtctaaatgaaataataggcttgatttaagagccatattgtatgaaaaatataattgttttttactatttttttcctgagtgggtatgattggtgtcacctatgtttaataatgtaactactgcagtgggtctcaaagacaagccacatcagattcacctggagggcttgttaaactcagttgcaaaattctacactcagaaagtctgaagtggggcttaataattttgttattattattattattattattgtagagacgggtctcactatgttgcccaggctagtcttgaactcctgtcctcaagcaatccccctgcctcgacctcccaaaattagaattacagacatgaaaggatttttatttttaatgagtaaccagtgatgccaaygctgctggtccaggggacccactttgagaaccactgtgtacacacacacacttgaaacacataaatatatatatcttaaattaatttgtgatcatgaagggtatgtgtgtgtgtgtttaaatgcctgtgtgattgtacatcattcaaccagctacattttttaatcattagtcatttcttattatgtggcagtgaatataac

SEQ ID NO: 121590 - DNA, 650 bp, Homo sapiens
ggtgagcttagaaatagtaaacaaaacaagcaaaacaaagcacaaccctcaaatattcattttatagagccttgtgtaaagtcagccacttgagagcattttctatgctaattgttcctgtagctaataaagttttttcttgttaacatccaaaaataggttaccttatcacatgttaaaatrtgtaatatatggactgcaataggctggcagtaaacagagtttattacatagatctgtattagttgaaagagaattgtatttcttgattcagatgaatgtatattcaaatagtagattaagaagcaaatgaatggatgctgaacagttatttagaaaatttgaatccaaaaatagtatatatgaatatatgtatacatatgtatgcatatgtgtgtgcgtattcacaaaactccaaattatttgataattggacacttgagaaagtgccaaagtggtttttaggaaaaatcatatactttacattttcttctttttttgctattggggactttttgcatattgaccgcattctatagactactaggaggacatgtactgctaagtgtggtccacaggccacagagctctcagaaacagggcagaggcttctgtgtataatattttcaatgcttcactgcctcagtatg

SEQ ID NO: 121591 - DNA, 592 bp, Homo sapiens
gcaagtaagttgatagacacagcagtggaaatgtgtggacattcttttctgatggcttctactttatcaaccacataggaagcagggtcctcagctaagagagggtcaggaaagaggaactggaggtttgagaagagatgagaagttgtgaaattgtggtctagaacaagaggagtgaatgaattcagcatatgtagaagagctgcttgatattcctgattatggatttaaagtgagacactcagaagaagtgaatatttttttccaaccttgtttagctttgtgattataggtgcagaatagacaagagttggtttaaccagcccacggatttatccgggtgtatctgtcaagatccagtcagaaaayagaaaccataccaccaactagaatagaggaaatctaatataaacaacaatacctaggtgaaagtggttaactactaaacaggggtgaaagaaaactctaaggtgcacagaggcagtgcctgcaaagggtgactagatgcctacatgccaatcacagcaccagaaatgtctcttctttcacttgtagccttgcagtttccctctagcattctctgtgggcagag

SEQ ID NO: 121592 - DNA, 530 bp, Homo sapiens
tgcataatcaagttaaacttcaggcaagaaatggaatggctcttcttaagacagagaaagcaaattcttgtgatatcccttattgctgatttgcctcccgttcccatattggcaggagagaaataggaacactcttcaaatgcatgctatggcaaactgttgagaaccatggcatgagcagtatcactgctctttttttttttctttcatagtgtttacagtagaaaatgaggatgcaagattcctgggttctcattttgaccttttttccacatctcacataaaatatgaggcataataccgtattttggaagtttggaggaggatgtaccatgagayatttctgtgctaaatatatttagcctaaatgttgacatatgatttcctaattacagaggatctttttgacagtgaaacttctgcagttctttcttttagaaagagactcttacaaagacctcaaggcatcagataacttttgtacaatcttaatgctgttcagatacagatcaattacaaacaaggcaatg

SEQ ID NO: 121593 - DNA, 586 bp, Homo sapiens
ggacttatagccagaatacataaggacagaaatttcaccaaagaagatatgcagatggtcaataagcacatgaaaagatgctcaacatcattagtcattagggaaatgcaaaataaaaccacaatgatataccagtacacatgtagtataccaagttttggcagggatatgaagagattagaactctcatacacatgttgtgataatgtaaaaatgttacaactacttaaaaactatttgatattttcttaaaatattaaatatacatctatcatatcacccagccattacactcctaggttttaaccaagagaaattaatgtctatgtctgttcaaaggcttgtatatgaatgttcttaacagcgttatttgtaatagcaataagctgaaaaagyctattaacagataaatgcataaacaaacagtggtacatttacataatggaatagtacttggcaacagagaggaatgggtacagataaatatactaacatggatgaatctcaaaataattatgctaagtgaaagaagccagattaaaaaatacagataatttaatacttttttctaaatctatgaattgca

SEQ ID NO: 121594 - DNA, 550 bp, Homo sapiens
aatgggtacagataaatatactaacatggatgaatctcaaaataattatgctaagtgaaagaagccagattaaaaaatacagataatttaatacttttttctaaatctatgaattgcaaactaatttatagtggcagaaaaaagatcagtggtttcctggagatgaggaaggggaaatgagaaggggtaagaggaaggatgacaaagggatgtgactgagctttagaagcaatggatatgtttgttatcttgaatgtsgtaattattttgtgtgtacatacatattcaaaacataaaattgcacacttcaaatatatgcagtttactgcatctcaattatatctcaataaagctctttaaaaaaaaaacaagagaaaagaaagtaacagtaaccaagacagtatggtattggcataaggatagattagtggaacagaactgagagtcagaaaatacacctacatttgtatggtcaattgattttcaacaaaagtgtcaaaagatcactgaggaaaagatcatcttctcaataaatggtattgtaataact

SEQ ID NO: 121595 - DNA, 483 bp, Homo sapiens
aaattctttgctggcacaaaaggccctttatgatcaagttcctgccttgtgataagagtcttcccttgctgttctgccatggagctggataacatgctcacagtcccaggactatgccatgttcttttaccttgtcttggtttttcacatrctatttcttgttcttgggacactttcattttccattcactttgggaacttctcttcattctttaaacttcagcataaatatcacgtctcagtaaatgtttctttgattctcaaagatagtctctctgggctcttaaaacactgcttatgtttctgtcttctaatacatagtatattatattaattagtttgaatgccccttttcttgcttaccatgagtttttttgataacaggggcagtttcatatttatctttataagcctagcacagtgcctggaatgtactagttatttcagtacatgtcgagtggcttacatggctgtgccatgtga

SEQ ID NO: 121596 - DNA, 569 bp, Homo sapiens
ttgtgaggccttaaattttgccaagccattttgtgactagacttcagttatttaaaaatatctctatcttgtaaacttctctgtattggaacttctgcattttcagactttgttttggattttgttttgctttgcttcttggggaagcctgtatgaaaaatatcagcattaatataaaggaattagtaccccagatcattaattcttgggcttcagagggtttctgaaataaaagtttacttgtactagatatttaagtgcgtttatggatcttaggtaaaaatatttgccccaccaaattctgtaagagtactgggacaccaaaaggttaaaaatcatcctctaggaaccagcttctttgtggcttctttctgaccccactttctgtgactccagaagagctggtactcaaaacaagggtagtcttgaccccsctcctctggaatcatttggccatgtcttgagatatgtttgttatcacaactaggtagtgctagtggcatccagtgagtagaagacagagatagtacaaaaaatcttaaagtgcacaggacaaccacccccaacaa

SEQ ID NO: 121597 - DNA, 644 bp, Homo sapiens
gatcagaacagaccctcaccacagaaatcaaggtcagttctagagaaaatagtaatagcttttgctttaatgcataatyactgtttatttttcttttggaaggaggagaaaagagaaaggaaccctcccattcatccttccgtatcactactcagaaccaagtacctctgcttctaaactacatcagggagtgcaactcccatggaatcacaggacaagaagaaatgggaacagatatttaaggtaatagatatacaaattaccttgatttgactatataaatttatcaaatgatcacacgtatcttgaaaacaagtacacctagtatgtatcaataaaaaattttttaaaataataaaagaagtaatgggaataagacatagtcatccaagaagtattggatgcagtgcaacctgcctgaccaaaaataaaacattataggtgagtatgagttctggggggtgccagatagccatgtatgcttgacactgtggtctataatcactctatctagtcagagtgttagaaaacctaaaaatgctgtaaagttctcattgtagcctagcagtcttgggcttaatgggtcactttaactgtagactttagcaaaaatatccacatacactctcagttagtaaacacta

SEQ ID NO: 121598 - DNA, 613 bp, Homo sapiens
gagcaggtggagatagttgaatcatgggggtggtttcccccatgctgttctcatgatagtgagtgagttatcaggagatctgatggttttataaggggctcttcccccttcactcagtattctccttcctgatgcctttgaagaaggtgccttgcttccccttcacctttcaccacaattgtaagcttcctgaggcctccccagccatgctgaactgtaagtcaattaaacctstttcctttataaattacccagtcttgggcagctgtttatagcaatatgaaaacggactaataccaacaaaggagaaagtacagtctcttcaataaatggtgctgggaaaactgtatatctacatgcagaagaatgaaattggacacttataccagatacgaacaaataaactccaaatagattaaaggcctcaatgcaagacatgaaactgtaaaactactagaacaggggaaaagcttcctgacattggtctaggtaatgatttcttgaatatgacaacagaagcattgacaataaaaggaaaaatagacaaatgagaatgtgtcagactaaaatgtttctgcacagcaaaggaaataacagagtgaagagataaccc

SEQ ID NO: 121599 - DNA, 613 bp, Homo sapiens
gagcaggtggagatagttgaatcatgggggtggtttcccccatgctgttctcatgatagtgagtgagttatcaggagatctgatggttttataaggggctcttcccccttcactcagtattctccttcctgatgcctttgaagaaggtgccttgcttccccttcacctttcaccacaattgtaagcttcctgaggcctccccagccatgctgaactgtaagtcaattaaacctctttcctttataaattacccagtcttgggcagctgtttatagcaatatgaaaacggactaataccaacaaaggagaaagtacagtctcttcaataaatggtgctgggaaaactgtatatctacatgcagaagaatgaaattggacacttataccagatacgaacaaataaactcmaaatagattaaaggcctcaatgcaagacatgaaactgtaaaactactagaacaggggaaaagcttcctgacattggtctaggtaatgatttcttgaatatgacaacagaagcattgacaataaaaggaaaaatagacaaatgagaatgtgtcagactaaaatgtttctgcacagcaaaggaaataacagagtgaagagataaccc

SEQ ID NO: 121600 - DNA, 613 bp, Homo sapiens
gagcaggtggagatagttgaatcatgggggtggtttcccccatgctgttctcatgatagtgagtgagttatcaggagatctgatggttttataaggggctcttcccccttcactcagtattctccttcctgatgcctttgaagaaggtgccttgcttccccttcacctttcaccacaattgtaagcttcctgaggcctccccagccatgctgaactgtaagtcaattaaacctctttcctttataaattacccagtcttgggcagctgtttatagcaatatgaaaacggactaataccaacaaaggagaaagtacagtctcttcaataaatggtgctgggaaaactgtatatctacatgcagaagaatgaaattggacacttataccagatacgaacaaataaactccaaatagattaaaggcctcaatgcaagacatgaaactgtaaaactactagaacaggggaaaagcttcctgacattggtctaggtaatgatttcttgaatatgacaacagaagcattgacaataaaaggaaaaatagacaaatgagawtgtgtcagactaaaatgtttctgcacagcaaaggaaataacagagtgaagagataaccc

SEQ ID NO: 121601 - DNA, 602 bp, Homo sapiens
actatgaactctctaaatgattttatgcatgttgatagtgtcattaagagttcagattagattagttggcttttgacttttccagtagtttcttctaggtttacatggctgttgctgcacgatcagaagcgctttattgcttcagatggcagcagtcacttactgctagtgatttgcaacctcattgttgcttcttttatgatcttttagttcctaccttttctttgactccattaggatttcctgatacaatgacagataagagacccccgtttaggcagcagttcagctgtgctgtcatgatagttacagkttttcatagcactccctttgaccagataaatccccccagaaattacgtagacaccaaactactgttgccaggtaaatggcataataaatgtgaaaatgtttgtgtttctccaaagaaggctgctatagaaactcaaagtatagtttgaaagtcattttgattatgttcaagtttcctataataaaattctagataaaatgcattctaatgaaattcatttatatgccatagagtcttggtttttatgtttaaataaagaatatgtattaatatatttttatagctataa

SEQ ID NO: 121602 - DNA, 423 bp, Homo sapiens
gtaaataaattgacattgctttttctataaaaagtggcagtcattattctaaaagcttgaggaggctttggaatgagaactttcaatccgcatagtcaaaataatacatagttctaaaagactaacatacacggctacaggacttcaggcaagtaaaaagacaagtgacagaagaactcaaggatctgcaaaaatttagagtatggcaaagaaggcacttcaaatcattagaaagactatgtggactattcggtccaaargttattgggacaacttgttgacaagttaagaaaaaatctagattccctacctcactccacacatcaaataaatcccaaatggcttaaaaataaaaatgtagaaaacaaaagataataaaaaagtataggtaaaaaaattacatcattttggaattaggaattc

SEQ ID NO: 121603 - DNA, 568 bp, Homo sapiens
ggcaacacactgtgggccggtctctacaaaaagataaaaaattagccaggcatggtagcgcctgcctgtaatctcakctactcaggaggctggggcaggaggatcgcttgagcccaggaggtcaaggctgcagtgagctgtgatcatggcactgcactccagcctgggcaacagagcaaaaccctgtctcaaaaataaaaaagaaccactgttttagaggaagttaatttcttcctgtgtccagttccttcttcagtgatcaagtacgaccaaaaaggagtctttcagagggattgggcaaagtgtagcagggacatggggctttggtttcctcagaggtgaggcacagggtcatttgatgccattggacccatgtatttatggaccgccaggtttgtgctaagacggtggtaagtgtgatgagggcagatatgaatcagacatggcaccctattctcagttgcaaagtccagaggggagagagacgtttaaaaaagaccaaaacaaacaaaaagaaaaacacaagccacattttaagtgaaagaagaggtaggagtaattcattatc

SEQ ID NO: 121604 - DNA, 430 bp, Homo sapiens
aggaaagaacaaggacagcttaaaggttagaagcaagatggagtcggttaggtctgatttctttcatagtcataatttcctcagttataattttaagagaacctgggacaggttctttaatgtctctgtttcttcctctataaaatgaggacagcagccagctcaccttctgggggtgctgggctgactgagtcctgcgtggaaggtgyttagagtggggcctggcccaggaggcccctcagctctcagcggccctcactgcggagctgtgaggtggatggtaattgattttctggttctgctgatgtgagactctgcacctgcgaggcagaggctgcccagtgctgttcagggagcctgggctctgactggccattccatgattcagcaactttggattctcaccatatccacatgtgagttataggaa

SEQ ID NO: 121605 - DNA, 452 bp, Homo sapiens
tgaattccttcccaaagtgagttcagcttacacccaggaaagaacaaggacagcttaaaggttagaagcaagatggagtcggttaggtctgatttctttcatagtcataatttcctcagttataattttaagagaacctgggacaggttctttaatgtctctgtttcttcctctataaaatgaggacagcagccagctcaccttctgggggtgctgggctgactgagtcctgcgtggaaggtgtttagagtggrgcctggcccaggaggcccctcagctctcagcggccctcactgcggagctgtgaggtggatggtaattgattttctggttctgctgatgtgagactctgcacctgcgaggcagaggctgcccagtgctgttcagggagcctgggctctgactggccattccatgattcagcaactttggattctcaccatatccacatg

SEQ ID NO: 121606 - DNA, 451 bp, Homo sapiens
gaattccttcccaaagtgagttcagcttacacccaggaaagaacaaggacagcttaaaggttagaagcaagatggagtcggttaggtctgatttctttcatagtcataatttcctcagttataattttaagagaacctgggacaggttctttaatgtctctgtttcttcctctataaaatgaggacagcagccagctcaccttctgggggtgctgggctgactgagtcctgcgtggaaggtgtttagagtggggcctggcccaggaggcccctcagctctcagcggccctcactgyggagctgtgaggtggatggtaattgattttctggttctgctgatgtgagactctgcacctgcgaggcagaggctgcccagtgctgttcagggagcctgggctctgactggccattccatgattcagcaactttggattctcaccatatccacatg

SEQ ID NO: 121607 - DNA, 570 bp, Homo sapiens
ggctggcggccaaatgcacacggagcctctgctcagtgttacaaggaaggttttcactgcacagaaaactctcttctctggacttgagaaacaaccaaagcaatggctygtggtggatcctagcaccgtgaggcccaggagaggggaagcttccaaaaccagggagcaggggagcggctggaggcgctcgcatccgcacctgctgcacagcaaagtgccgcacatctcagaggcggaatgcggggcttccttcccaggtgactgcagtttggccgcggtggctcagatctcagtggggctggctcaggggtctgagggtccaacgggtgtcagctcaccttgcgccactcagatgaacagtgcagcagcggcagtgtggctggctctgctcccgcaccgcgcgtcctccctggtcccacaggcagccaggcatgtccccctgtgctgatggcagaggcacagggagtgagcctcagtgaggagctccctggagcccgggcagcgcctgtccactgatgtttcactggacaacgcaggtgacatggctttgattggagcaggatattccac

SEQ ID NO: 121608 - DNA, 570 bp, Homo sapiens
ggctggcggccaaatgcacacggagcctctgctcagtgttacaaggaaggttttcactgcacagaaaactctcttctctggacttgagaaacaaccaaagcaatggcttgtggtggatcctagcaccgtgaggcccaggagaggggaagcttccaaaaccagggagcaggggagcggctggaggcgctcgcatccgcacctgctgcacagcaaagtgccgcacatctcagrggcggaatgcggggcttccttcccaggtgactgcagtttggccgcggtggctcagatctcagtggggctggctcaggggtctgagggtccaacgggtgtcagctcaccttgcgccactcagatgaacagtgcagcagcggcagtgtggctggctctgctcccgcaccgcgcgtcctccctggtcccacaggcagccaggcatgtccccctgtgctgatggcagaggcacagggagtgagcctcagtgaggagctccctggagcccgggcagcgcctgtccactgatgtttcactggacaacgcaggtgacatggctttgattggagcaggatattccac

SEQ ID NO: 121609 - DNA, 570 bp, Homo sapiens
ggctggcggccaaatgcacacggagcctctgctcagtgttacaaggaaggttttcactgcacagaaaactctcttctctggacttgagaaacaaccaaagcaatggcttgtggtggatcctagcaccgtgaggcccaggagaggggaagcttccaaaaccagggagcaggggagcggctggaggcgctcgcatccgcacctgctgcacagcaaagtgccgcacatctcagaggcggaaygcggggcttccttcccaggtgactgcagtttggccgcggtggctcagatctcagtggggctggctcaggggtctgagggtccaacgggtgtcagctcaccttgcgccactcagatgaacagtgcagcagcggcagtgtggctggctctgctcccgcaccgcgcgtcctccctggtcccacaggcagccaggcatgtccccctgtgctgatggcagaggcacagggagtgagcctcagtgaggagctccctggagcccgggcagcgcctgtccactgatgtttcactggacaacgcaggtgacatggctttgattggagcaggatattccac

SEQ ID NO: 121610 - DNA, 570 bp, Homo sapiens
ggctggcggccaaatgcacacggagcctctgctcagtgttacaaggaaggttttcactgcacagaaaactctcttctctggacttgagaaacaaccaaagcaatggcttgtggtggatcctagcaccgtgaggcccaggagaggggaagcttccaaaaccagggagcaggggagcggctggaggcgctcgcatccgcacctgctgcacagcaaagtgccgcacatctcagaggcggaatgcggggcttccttcccaggtgactgcagtttggccgcggtggctcagatctcagtggggctggctcaggggtctgagggtccaacgggtgtcagctcaccttgcgccactcagatgaacagtgcagcagcggcagtgtggctggctctgctcccgcaccgcgcgtcctccctggtcccacaggcagccaggcatgtccccctgtgctgatggcagaggcacagggagtgagcctcagtgaggagctccctggagcccgggcagcgcctgtccactgaygtttcactggacaacgcaggtgacatggctttgattggagcaggatattccac

SEQ ID NO: 121611 - DNA, 622 bp, Homo sapiens
aagcttgttaattaagattatcattttgtttttttcctagattccatgacaatagtttttcctcactggtacatgactatagaatatatgggctttctcctcaatgacttgaccctggatttctataggctctaactagagctcttgattccttctatttccctcgtctcttgrtaatattgacattatcctcctctaaaccccagtacactccaaaccctaatgcaaagtgtgaaataagcagaatttctcttaagtgcctagttttgcaactcagcatttcttccccttggcctctccaaactctttaactgtagaattttatcccccaaattctataccatatcttactaaacggcgaaaggaggcccacagttggttggcaggtttggtttggtttggtttggtttggttttcatggaaagtattccttctttcttttcttttctcctttatttttgttttcttagttgaatcaatatttaaaaaacaccatattctgcatttaaaaagttctctgaattgggtaaaaataagtgagcaataaaatgggaaatgtgtcatcactggtcccagattttgaactagcaataattgcatgatgctgagtagaaatgattcc

SEQ ID NO: 121612 - DNA, 593 bp, Homo sapiens
tttaatacagaagcttgttaattaagattatcattttgtttttttcctagattccatgacaatagtttttcctcactggtacatgactatagaatatatgggctttctcctcaatgacttgaccctggatttctataggctctaactagagctcttgattccttctatttccctcgtctcttggtaatattgacattatcctcctctaaaccccagtacactccaaaccctaatgcaaagtgtgaaataagcagaatttctcttaagtgcctagttttgcaactcagcatttcttccccttggcctctccaaactctttaactgtagaattttatcccccaaattctataccatatcttactaaacggcgaaaggaggcccacagttggttggcaggtttggtttggtttggtttggtttggttttcatggaaagtattccttytttcttttcttttctcctttatttttgttttcttagttgaatcaatatttaaaaaacaccatattctgcatttaaaaagttctctgaattgggtaaaaataagtgagcaataaaatgggaaatgtgtcatcactggtcccagattttga

SEQ ID NO: 121613 - DNA, 572 bp, Homo sapiens
tacaggagtacaattcaagatgagatttgggtggggacagagccaaaccrtatcaattgctgctctttgttaggttaagagagaaaccagagatagccagaaggttggatgtgtggcccactcttttgtttccatcatggggtagaaacctcggtattggaggaacacagatgagcacatacaatgttatgcattttcctgcttcttttacttggaatcctttccgggttttatattaatctaggttctgtaagttctcaattggtctatagaattcttgcagaagtgctctggtctgtgcatgattgttaaatcaatgtttctagggaaaacagagggcctgaagctctcttcatcttcctgacatctttcaggatcttgctgacatacattaaaaatttatttcccaattagtcatatatcattttcttatggtgttttcccatgccaaaaatatcaagttataggtattaagacttttaatttttcttcttttagaaaaaatgtataacttatataggagaaatgttcccattcctaggttataaaaaatttaccagtgttttcctctg

SEQ ID NO: 121614 - DNA, 405 bp, Homo sapiens
tgtgctgtcaagccacataaaaaatgtagaaatctaatatgcctattgcttagtaaaaaagccagtctgataaggctacatactgtatgattctaaatatatagtattctagaaaaggcaaaattatagagacaataaaatatttgtggtttcctgggattgaggggaagaggaagattgagcaggtgctasacaggggcacattagggcagtgaaagtattctgcatgatattataatggtggattcatgacactatgcatttgttaaaacctataaaactgtaacacaaggagtgaagccaaatgtaaactatggactttggttaataataatgtatcaatattggctcatcaattataacaaatgtaccacattaatgcaagatgttaataatgaggaagac

SEQ ID NO: 121615 - DNA, 592 bp, Homo sapiens
ggaagctcctttcctaaatgatcatagtggtccttccacaagtgaccactcaatcccagctcagcccacaatcggaccactttgcattgtcactgaagagcatccactcctcgtttcctggccggcttatgtactcttactgcaggaggtgatttggcagcaaaagtatctgcrgtcttcattggagcatttgaaatgcccatgccatcatcttaatgtatgaaaacacataaagaacaggaagtaactgagtcaagtaagctatttctatttgaggcagaagtgaaaaacagattacctggccactagggatagagggacttcattaactggaatgtggcctggggcttgggatgggccatcctgacatgatgactttgggcagtcatcctgttggcactgaaaaaccgagagcatcagtcaggctgtgctgtcgtatgaaaggaagattttattcctataacttttaagagtgaagaaaattattagtttattacaccactgtattgacactctttgcgtttagtttgattaagtctgtgtaaaggaagagaattactttgaccgtcagggtgtcagataacttactgcc

SEQ ID NO: 121616 - DNA, 531 bp, Homo sapiens
taattaaatataatcagattttagattcaaaaagcacagtagccatttaacacaaacaagcaggcagctaggttgacaaacacactcaggaagaagtggatccctgtttctttcgaattttgaatttcacaatccagaactgtgaattcaattcctgtccttcctttgtattacaacgactggggattattagactcagagcgccagctttccagctcaagggctcctgcagaattattaatcagccgcttctgargcccctgtaatccggtggcagatcaaggctgatctcgccatgagatgccctccctctgcccccgtcagcacatgaatttcttgttctctgtcaacaacagcattgccattcccgcacagtgtgctgtgacctgaacagcaaatatcaggagagagaaaaggaagaaaaaaaaaacctttttaattactgaatttaatctaattcttcccatgctagagaagcaaaccatcctttcatgaaaagcaaaccctttaaaatgcaagccattgtcttaa

SEQ ID NO: 121617 - DNA, 531 bp, Homo sapiens
taattaaatataatcagattttagattcaaaaagcacagtagccatttaacacaaacaagcaggcagctaggttgacaaacacactcaggaagaagtggatccctgtttctttcgaattttgaatttcacaatccagaactgtgaattcaattcctgtccttcctttgtattacaacgactggggattattagactcagagcgccagctttccagctcaagggctcctgcagaattattaatcagccgcttctgaagcccctgtaatccggtggcagatcaaggctgatctcgccrtgagatgccctccctctgcccccgtcagcacatgaatttcttgttctctgtcaacaacagcattgccattcccgcacagtgtgctgtgacctgaacagcaaatatcaggagagagaaaaggaagaaaaaaaaaacctttttaattactgaatttaatctaattcttcccatgctagagaagcaaaccatcctttcatgaaaagcaaaccctttaaaatgcaagccattgtcttaa

SEQ ID NO: 121618 - DNA, 638 bp, Homo sapiens
aagtatattaggattttaacagatattcatagattctttttctttttttttttgtttttttgattgaggtagactctcactctatcttccatgctgaaatgtaatggtgcagtcttggctcactgcaacctctgcctgctgggttcaagcgattcttgtgccttagccttttgagtagctgggactacaggcacgtgccaccatgcccggctaagttttgtgttttcgtagaagcagcgtttcaccrtgttggccagactggtctccaactcctgacctcaggtgatccacctgcctgggcctcccagagtgctggaattacaggcataagccactgcactcaaccttaacagatattctttatcaaattgaagaaacttccttccattccctgtttcataagaattttaaccaaggtcagttgttgaattgtatcaaatgatatttctgcatatattgaaataatcatactttcccctctattctgtttatatggtaaagtacattgattgatttacaaatgttaagccaatttctattcctaagataaaccctatttgaccactatgtattatcttttttatattattgctggaattgactggctaataatagttgagaacttttcatatatatat

SEQ ID NO: 121619 - DNA, 638 bp, Homo sapiens
aagtatattaggattttaacagatattcatagattctttttctttttttttttgtttttttgattgaggtagactctcactctatcttccatgctgaaatgtaatggtgcagtcttggctcactgcaacctctgcctgctgggttcaagcgattcttgtgccttagccttttgagtagctgggactacaggcacgtgccaccatgcccggctaagttttgtgttttcgtagaagcagcgtttcaccgtgttggccagactggtctccaactcctgacctcaggtgatccacctgcctgggcctcccagagtgctggaattacaggcataagccactgcactcaaccttaacagatattctttatcaaattgaagaaacttccttccattccctgtttcataagaattttaaccaaggtcagttrttgaattgtatcaaatgatatttctgcatatattgaaataatcatactttcccctctattctgtttatatggtaaagtacattgattgatttacaaatgttaagccaatttctattcctaagataaaccctatttgaccactatgtattatcttttttatattattgctggaattgactggctaataatagttgagaacttttcatatatatat

SEQ ID NO: 121620 - DNA, 638 bp, Homo sapiens
aagtatattaggattttaacagatattcatagattctttttctttttttttttgtttttttgattgaggtagactctcactctatcttccatgctgaaatgtaatggtgcagtcttggctcactgcaacctctgcctgctgggttcaagcgattcttgtgccttagccttttgagtagctgggactacaggcacgtgccaccatgcccggctaagttttgtgttttcgtagaagcagcgtttcaccgtgttggccagactggtctccaactcctgacctcaggtgatccacctgcctgggcctcccagagtgctggaattacaggcataagccactgcactcaaccttaacagatattctttatcaaattgaagaaacttccttccattccctgtttcataagaattttaaccaaggtcagttgttgaattgtatcaaatgatatttctgcatatattgaaataatcataytttcccctctattctgtttatatggtaaagtacattgattgatttacaaatgttaagccaatttctattcctaagataaaccctatttgaccactatgtattatcttttttatattattgctggaattgactggctaataatagttgagaacttttcatatatatat

SEQ ID NO: 121621 - DNA, 656 bp, Homo sapiens
ttacattcaaataaacttatcagagccatattagtacatgatgaaatgcattttgtttccagagaaagtttagtgcttatgcattttaaagaatactaattccactgtgggtatacccaaaggaatataaatcagtctaatataaagatacatacatgttatgttcattggagcactattcacaatagcaaagacatggaataaacccaaatacctgtcaatgatagaccagataaagaaaatgtgagtacatatataccatggaatactatgcagccataaaaaggagtgagatcatgttctttgcagggacacggatggagctggaagtcattatcctcagcaaactaacacaggaacagaaaaccaaacaccgcatgttctcacttataagtggttactgaacaatgagaacacatggaccccgggggtggggaacaacacgcactgggggttttcaggggggcagaggaagggggagcatcaggataaatagctaatgcacayggggcttaatgcctaggtgatgggttgataggtgcacaaaccaccatggcacaggtttacctatgtaacaaatctgcacatcctgcacttgggtcctggaacttaaataaaatttttagaaaaaaagaatactaatgccatcccatcat

SEQ ID NO: 121622 - DNA, 446 bp, Homo sapiens
cattgcaggccatgagctgatcacagtgggcaaatcagtgctgattactttgattacaaacataaatgattaaaccagatttctgtttccaactaccaaagctttcaccacttccttttagttgaagttttacttttcatttattttgtataataacaaaattaaaaactagtaagcttctcagggggttctgratgtcattgctgtagtagattggctgtttgatattgagtatctgatatatctgatttgtctttgatgtttcttctctacttgcattattccttttttctactgcctgaaacaaaatttcctattaggtagcctgaggaaaaccacagctgttgggctccactcttaatttagactctgttcagatttctgcctacagggtgggcatttgtcacagtgggaagcacacaaagattctggcggggacaatgctg

SEQ ID NO: 121623 - DNA, 446 bp, Homo sapiens
cattgcaggccatgagctgatcacagtgggcaaatcagtgctgattactttgattacaaacataaatgattaaaccagatttctgtttccaactaccaaagctttcaccacttccttttagttgaagttttacttttcatttattttgtataataacaaaattaaaaactagtaagcttctcagggggttctggatgtcattgctgtagtagattggctgtttgatattgagtatctgatatatctgatttgtctttgatgtttcttctctacttgcattattccttttttctactgcctgaaacaaaatttcctattaggtagcctgaggaaaaccacagctgttgggctcyactcttaatttagactctgttcagatttctgcctacagggtgggcatttgtcacagtgggaagcacacaaagattctggcggggacaatgctg

SEQ ID NO: 121624 - DNA, 584 bp, Homo sapiens
ccttaagttatagccaaggacaaacccatctagttgaagtctacattccctacacttgcagtcgggtatgaccaagtgtaaagttctggccaatgaattgggagaagaaatggtgagtgctagttcctagaatcgactataaacctccaacacatcattgaaaagacagtgcatcaacctgagatcctggactttgaaccagatacaatagtttgttaagacttttgattgcctccccggggaagagctgagtgtatcctgcaacgagacgacataggtggtgaaagctacacagacttcaaatgggccagactctctagtgtctagtgtaactgcagaattaggggccacagagaacaacagacaaggtgattcttcccgaagagtagaaccagagtccaaccaaagcatcactccattgctagctagggcagggagtcttcacaatccaatgcttccagatttgatcattgctatggaccactggctgtggtgacttcacattctttgcttttccaagtaagygtttttgtaacagttgtactggtcctagtccaccatttcatactgcatacaaaggaaaa

SEQ ID NO: 121625 - DNA, 629 bp, Homo sapiens
agtttccaggcttttgtttcttttacaatagaagtacccccaggaagaataactccttaagttcctgatgctttactgtgaacaggtttaccagatgctctgaatgcagacagcaggtaggttgagcttagggcagcctgagaggaagaggcctgtgaggataaagaggcctgcccaagactctcttaggatgcaggttgtgcaaaaacgcaggatctcactaccccttttacagataacttcactgggacccagtggtcactggcgcagggaatacagtccttggcagagattctcagaaagtttaaaatgagctcgaatacgcaggtgggaagctgaaaggcatttccccctggaaatatgactgagttttcaacagtcacaaatctaagaattccaagaagaaatgtaacctaaaaataccgtctttctgccctatacactttacagccctggaggttggkatcctcctgagatctgagggtaccccttactgaaaaccagccctttttcccatggtgccagagcctgcccaggcacagccaaagatggagtttggctggagggaattcagcactgcgactttaacagggcgtgccagtccactgctgcagtctctactgcagtga

SEQ ID NO: 121626 - DNA, 613 bp, Homo sapiens
tgtataaaaatgaactttgatcccttaccccatactctgcacaagcattaaattaagattaactgagatttgacctgaacgtaaaatctaaaattgtgaagcttttacaataaaacaaaggtagacaaagactccttctacaaatacctggcactaaacattaaaaaatcataaattgtgcttcatcaaaaatacatctgctcttcaagatagatgaaaaggcaattcactgactttgagaccaagtatttgtgttcagaatatgtaaaggaattctaaaactcaacataaaaagacaaaaataaaacaaaaacwcatgcaaaaaataaaaaaacaaaaaatgagcaaattatttggacaaaaagttcccaaaaaaggaaatgcaaatagctagcaatcacatgaaaagatgctcaatattattagttatcaaggaaataaaaagtaaaaccataagatactcatacccattagaatggctacagttaaaacgactgacaatactaagttttgatgaggatgtggagcaattggaatgctcatgtattgaggtgagaatataaaatggcgcaaccacttttaataactaccctatggctcaacaattccactt

SEQ ID NO: 121627 - DNA, 447 bp, Homo sapiens
cctcaacaaatggcatccatcaaataacaacatggctgtgacaaccactacaagagacttaaaaacctaatgtttctttcaggaaaccaaccatataagactactataaaacaaagatgtgtccttaagcacacaggaggtgaaaaatcccagagctcatatagtgtgaaaaacttgagtagaggaaaggattatattgggtaaaatgtgggttttaaaatttgttccgccaatgagactattaagataataatacagtgaaayattacgcatttatctcacgtggagtccagttctacataacgtttgaaggagtagaggtcaggtgcttaggagtaaagggcagtattttctgagatggagggagtccacatgaccacatgtgggtaatattctcagcatggaatattagaagatattctcaagaaaattttaaaattagaattc

SEQ ID NO: 121628 - DNA, 581 bp, Homo sapiens
gcaatgataaaatgggagagaatggattgattattgctgcttgagcccatacagaaatagggccttggagttgctggatgccattgattgctatctattcattctcacaacaactttaaggaaaatgcagccaagaggagatatactcccaggttagagatacaatgggtaacttccagcaaatattatttctgtgtagaaatgaaaaagtaaaaatgagggatgatatccattttcagaaaatgcaagactggtataaaattaaaacattataatgtccagaaagatgattatgcataaatggcatatcctgactgaatttgtcatcagccacagtgttcgattcatacctacctsttttacaggaaaaataaaagataagtacacattgctgctagcatcaaagaagcaatgcaactctaaagacagagctggaatctttttcttgcattaacttcaaatctgtcagtggtataaattatgattgcagaagttatattattgtggcagtattataagcaagaagaatatagcagtattttcagatcccaggtggaacatatatggctggcatttatatc

SEQ ID NO: 121629 - DNA, 545 bp, Homo sapiens
cttcaaatataccgacaagtgcgggcatgatggagcccattaaaatgttgggagattgtttttatgattgaagtctgtattactccaaccataaagaaagagagcaaggagtcattagcattttcatgatggtgtatttctgcttgtctccgcgccatcactcatctttactgcccgtccctttgctctcgcgctgctacaamgaggagagactgcagcctgagtcggggctggggatggggggagatgggggccagagatccgcgccccccacgccgctgtgcccttcacgccaaatcctcaccctccctgagacgcagatcgggggtgagaggctggaaacagacgtagggcctcagcttccttctgcggctcctcctgcccttgaagtgtgggagcagggggtcctgcccaaatggtgcttggagatctgagcacagtggggtggtggggggttacaccccttcctttctctggctcttcacttgctgacctacactgagagctcttcagggttatccacataggagtaaattcaagaattc

SEQ ID NO: 121630 - DNA, 550 bp, Homo sapiens
aatgtcaatattaaggtaaaatgcttatggccttatttttccattttgaatagtattcaaaaaataaatctcagagatgaaacaaatgaaagagagatttttaaaaacaattcaaaagatcaaccaaccaaactattggtttttcgaaaagataaaaaaatcaacaaaacttcaactagactaagaaaaaaagagaagacccaaataaataaaatcagagatgaaaatggagacatgataactaacatcacagaaatacaaaggatcataagagattattaagaacaactatatgccaacaaatttgagaacatagaagaaatttataaattcttaagacacatacaagctaccaagattaaagtataaagaaatagaaacactgaaccaaccgatcacaagtgagaaaattgaattagtaaacaacaacaamaaaatctttcatcaaaaaaatcccaggaaatatccaggattaaacataaccaaaacagtgaaagatatctacaatgaaaactaaaacaatgtaagaaatcaaagaaggaacaaaaaa

SEQ ID NO: 121631 - DNA, 535 bp, Homo sapiens
catttgaataggtctgagttccaaggaaatattcagaatttatgtattgcttttatttaactttaagagatcccattgtgctttatgtacatcgttgtttttgaaggacacatataaaacggttttgaacaaagatgtgtgtgtgtgtggttgtatgtgtatgtgcgcgtgcactgtgcatatgtgtgtgtatgcttgtgagagaaatcttcactgggagccaagggctataattaaaaattgcaagcaactcttatatcgtgcttgctacttgcgctgttctctctgtctctctcacacacacacagacacacacatgcatatacacactcatttatttagtctttagaatagccctactatttccctcattttacaggtgaraaaattaatactttttgttcattaagctatatgcctggcttatttcaagaatctaatgggtttgggctgctcttgggagtcacatttatttctgaaaatttgcagatttcaggtttctgagaaactgggacagtttagatcattgaaccag

SEQ ID NO: 121632 - DNA, 535 bp, Homo sapiens
catttgaataggtctgagttccaaggaaatattcagaatttatgtattgcttttatttaactttaagagatcccattgtgctttatgtacatcgttgtttttgaaggacacatataaaacggttttgaacaaagatgtgtgtgtgtgtggttgtatgtgtatgtgcgcgtgcactgtgcatatgtgtgtgtatgcttgtgagagaaatcttcactgggagccaagggctataattaaaaattgcaagcaactcttatatcgtgcttgctacttgcgctgttctctctgtctctctcacacacacacagacacacacatgcatatacacactcatttatttagtctttagaatagccctactatttccctcattttacaggtgagaaaattaatactttttgttcattaagctatatgcctggcttatttcaagaatctaatgggtttgggctgctcttgggagtcacatttatttctgaaaatttgcagayttcaggtttctgagaaactgggacagtttagatcattgaaccag

SEQ ID NO: 121633 - DNA, 654 bp, Homo sapiens
acgtttgcacctttgcaccctcagttgactaaagtatagcacaatccctgaactttttgttckgattatatccactttacatgaaattcactcaatctttattattttagctttatactaagtcttgaaattcagtggtataattcctccaactttgctctactttaacaaggttttagctactcaatgtattttatctttttatataaattttagaataagctttccaaattccatttttaaaaaagcctactgagatttgatggggtttactttcaacctgtagatcaatgtgggaagaattgatatcttaataatactttatcttctaatccataaacatggccattatctttatttgggtctttcgcaagtctctcagcaatgtatggtgtttatcaatgtatatatcttttacttacattgttaaatttttcataattaatatttggggcactagaaaatagtaattttaaaattttattttcagatggttttactagtttacaaatatagtttttttaatatatagatgtttattctgctaacttcttaatctcattattaatgctggtagccttttggagattccttaggattttctataaggacaaaaataccatctacgaaaagataattttactttttctttcc

SEQ ID NO: 121634 - DNA, 507 bp, Homo sapiens
ttaaaagtccttctattcaattctgtgctgggaggaccctgaacgatatatgggatggaggggtgaaggtggaagtggggggaagcaggtgccaggcggacaagcccattctcaaacctgctgcctcgcctggattgactgccagacagctctcaatatgcctggtttgtgaggaagggtgagggaaggaagggtacatgggtagaactggtcagccctctgcatagatagccagggttttggattgagtatcctctcttctacaccatgttcagctcagaagccrgaagtgctcctcaactagaggccagatactctcttctgcaactcacagccaacatgacacacacaaacagacactcatcttcaagccttgatggtgaatgtctcaacccaacttcctcacatctacacctccaaccactgccttcggtggctttgctccctttacctgactaaatgattccatttcctctgtcctaaccctcttcccttttctcaggaatt

SEQ ID NO: 121635 - DNA, 651 bp, Homo sapiens
gagcaagatgtagcaggtattattagccctatgacttgccgagctatacagcaagtaaaggtagactcaggaatgaaaacccagactcctggcttcttgtcagtgttctgcccatggctctcatcactagaccatatttcytaattcatatttggaaagtcactaataaaattaatggtaggaactgtaactcacaacatcatacattattataatttatacattcatatcttaaagaccattttggttttcgtgttaaaacacataggtaattggatttcacattttggttgcattcatttttcgcccccctcaacctttacaggttattttcttttatttgagctgtgttccaaagacccagcattccaaaaccttggaacggttttgttcagttatgccagctaattctggacttgcattgaggtaagaaaaacttaacattcttttggtcctctgcctaatggaataggctctttatataagattattcttgaaaacttgataaaaatagtctgttgttccactatgtcctcatgaatatatactgcttaatttcagagttgttaagccaatatttagctattcattcaaaagtcagtgtaaaaattctggtcgcttcagaaaacttcaggttacaaaggggcaaat

SEQ ID NO: 121636 - DNA, 579 bp, Homo sapiens
ctgtcacactctcctgatccaaacaagtaacaggacaagccagattcaaggggaagggctctttctcttgttggaaggagggacaaagtcatgtagcagaagggttgggggaactgttggcagccatttttgcagtaatctattacaacatggtagcaaggaaggattgtgaaattatctaggtaaacttttaaatttttgcatttgagaaaatcaaagtttagagaagtgaaatagtttgtttaaggtaccacagctggttttccagactcttgctgtgcaaagtgctgtccttagaccagcaccatcagcacctttgagaacttatttgaaatgcagaatctcggaccccactcaggacatactaaatcagaatctgcctttcccaaggttcccaggagctctgaatgcacattaaartgtgccgagactctcctgctctttttacttctgcaactgagacagaagacctaccacctacaaaagaagattgttttgtagtcagggacttgattcagcatggaaaaggctttgttttacttattgcctattatgtggtttgtttttcaaagccttacc

SEQ ID NO: 121637 - DNA, 627 bp, Homo sapiens
  misc_feature (1)...(627): n = A,T,C or G
attttgagatatgttcctttaacgtctagtttgttgagggttttttagcatganaggatgctgaatattatcawcagccttttccacatctattaagatgattaagtcagccatcttgggtcttctctcttctgccatagctacctataggcccatagagagatccagtccttatatgggtttgtaattatctgttgttcctctggctcaaatcaaagagggaaccagaccaaaaaagttaaggaaagttgaggaataggaaatgcactcacaagccacttgtgagaaggctgggtttttttttaattattgcatcttatatgatacaattacatgcctatatattttcaattttacatcaatttaacctataattctataagtaccaacttggaaagcattcattaactttgttagataattttatagattagagacaccatctgaggagtccaactagacagctagagaaagaggccttgccagcccccaatcattccagctaccccatcttagatattccagtcctaggtgagtacccgtgggaataaacaccttgtgaagcagatgaaccacccaggtgagccaagccaacccacagtagcagttgcctaccacatgccaggc

SEQ ID NO: 121638 - DNA, 627 bp, Homo sapiens
  misc_feature (1)...(627): n = A,T,C or G
attttgagatatgttcctttaacgtctagtttgttgagggttttttagcatganaggatgctgaatattatcatmagccttttccacatctattaagatgattaagtcagccatcttgggtcttctctcttctgccatagctacctataggcccatagagagatccagtccttatatgggtttgtaattatctgttgttcctctggctcaaatcaaagagggaaccagaccaaaaaagttaaggaaagttgaggaataggaaatgcactcacaagccacttgtgagaaggctgggtttttttttaattattgcatcttatatgatacaattacatgcctatatattttcaattttacatcaatttaacctataattctataagtaccaacttggaaagcattcattaactttgttagataattttatagattagagacaccatctgaggagtccaactagacagctagagaaagaggccttgccagcccccaatcattccagctaccccatcttagatattccagtcctaggtgagtacccgtgggaataaacaccttgtgaagcagatgaaccacccaggtgagccaagccaacccacagtagcagttgcctaccacatgccaggc

SEQ ID NO: 121639 - DNA, 581 bp, Homo sapiens
taacaaatgaactaaaatgcttgcagtgtgcgcattttttccccaaaatcactttcatagattgagcaatttggagcatttaggcataccttttgtttcttttgccttgttttgtttcactttctggggttcctctcattgtcatttcaacatagatcctaaatcccttgaatttattttctgatggtggtctttaatggatattttattctatttttttattatctatttgttttagaaacacagtctcactctgttgcccaggctggagtgcagtgatgtgatcatagctcagtgtmgccccgacctcctgggctcaagcgatccttccaccttagcctcctaagtagctggaactacaggtgcatgctgctattcctggttacattttttttttttttttttgaagatagggtctgtctgtattgctcaagctagtctccaactcctggcctcaagccatcctcccacctcagcctcccagagttcctggattacagacgtgagctatcacttctggctgacatcctattctagaagaaaaggctatatatgaaaagatacaatattcaatgcatata

SEQ ID NO: 121640 - DNA, 610 bp, Homo sapiens
cccacccaaaactcatcttgaattcccccttgttgtgggagaggcctggtgggaggtaattgaatcatgggggcaggtctttcctgtgccattctcgtgatagtgaataagtctcacaagatctgatggttctataagggggagtttccctgcacaagctctctttttgcctgccaccacccatgtaagatgtaatttgctcctccttgccttccggcatgattgtgaggcctccccaatgaaattgttatgttatactatacaatagttctcccttatttgtggttttgctttctgtagtttcagttactcatggtaaagtccgtaatatatgaaaagaaaggragcaccaatgcatgcatgttcacataactttcattaaagcatattgttataatcattctattttattattagttgttaatttataaattagactttatcataagtaaacatgtataggaaaaagctacatatctatctatctatctatctatctatctatctatctatctatctatcgtctatctatctcattactatctgaggtttcaggcatccactgggggtgggagtatttttactatatatctcctgtggataagggaga

SEQ ID NO: 121641 - DNA, 635 bp, Homo sapiens
tctagtaatttgttattttttaaattagcaatatagttaatatactttaataccacgaattatctcatatacattgtgagtaatatagaaaatagttttacatccacaaggaaaatacatacaatcatgcatggtttaacgatggggatacactctgagaaatgtgkctttaggcaatctcgtctttgtgtgaacatcatggagggttcttacacaaatctagacaatatagtctactacacacctaggctgtatggtatagcctatttctcctaggctacaggcctgtgtggcatgtcactgtcctgaataccatatgcaatggtaacacaatggtatttgtgtatgtaaacatatctaaacatagggaaggtgcagtaaacgtacagtattgtaatcttatgagaccacagttgtatatgcagtacatcgttgactggaacattcttatattatgcatgactgtatatgaattgtatacatattgaataaatagaactttataaaactttactcattggaaggcatgaaagtttctgacaaagttataatgtattattattcaattccagaaaagaacaattagcgactggtggtagctagtcttcaaagatggcccccaatgaactaaactt

SEQ ID NO: 121642 - DNA, 533 bp, Homo sapiens
gaaccatgcccagatagtcaatgtagctggtatgctaaatagcacatcttaagaaataatttttaagtagcaaattttagtcttccaccactctttaaacttttttgagggaatctcccactggataaaaactcagcagaatccaaggttttctgcttcctttgaggatagacagacctgcagtcatttaccataaacatagtatctatttagtaattagaataccaggacctagatattgaccctacaatcttcatccaaagtgaataaatgaagattacttcaactctctaatcttcaagtcaatcttcatttgcttcctcttccggytgaaacagaaatactaggaagagagagggcagggtacagtgtaagatgtcatgtacatgttatgtaaaatgcatacagtgcctgggttatagagtttatttgggatgtgattccaggaagcagggatgagagactggagataatgagataaagaaggagaaacgccaatgtaagcaggtgaaagtaaggtccctgctatggac

SEQ ID NO: 121643 - DNA, 580 bp, Homo sapiens
tggggcatggctacacaaagtacagaccagcagctccaacatcagctgggagtttgttacaagtgcagaatctcaaaccttgccccagacaaagaattaggactacattttaacaagattcccaggtgattcctagtcataggatggttattaataayattctatacagtcattctcctgcagggatttgagtctttagtcacagtgacacgtgccaggaagtcagtataatgttgcggaggtagactccaaaccagaggtgagttggaattctgtgcctgtcacttaccagctgtgtgaccgagcatatgacccaatttctctaatccttaactttctccttggtaaagaggccacagtaactcctcagaatcaagtccaatttgctggagaggtcagggaaagcctttggttttactcattttgaaccaggagcagaataggcagattatatttaaaattttaattattagtgtattcaagaggttgcttgaaaattaggtgtctgccttcttaagaaacagtgctgttcccaggtattgagaatggacattgcccaaaccaccaggaaggccacctg

SEQ ID NO: 121644 - DNA, 580 bp, Homo sapiens
tggggcatggctacacaaagtacagaccagcagctccaacatcagctgggagtttgttacaagtgcagaatctcaaaccttgccccagacaaagaattaggactacattttaacaagattcccaggtgattcctagtcataggatggttattaataatattctatacagtcattytcctgcagggatttgagtctttagtcacagtgacacgtgccaggaagtcagtataatgttgcggaggtagactccaaaccagaggtgagttggaattctgtgcctgtcacttaccagctgtgtgaccgagcatatgacccaatttctctaatccttaactttctccttggtaaagaggccacagtaactcctcagaatcaagtccaatttgctggagaggtcagggaaagcctttggttttactcattttgaaccaggagcagaataggcagattatatttaaaattttaattattagtgtattcaagaggttgcttgaaaattaggtgtctgccttcttaagaaacagtgctgttcccaggtattgagaatggacattgcccaaaccaccaggaaggccacctg

SEQ ID NO: 121645 - DNA, 576 bp, Homo sapiens
tgtcatagctttaaattacagttctttacagatgaccctcaaattcatgtcatctgtccaaatcgctcacctgagctacacacacatcttagcttggatgcctaaaagttagctctattaaacatatgcaaggctgggcacggtggctcatgcctgtaatcccagcactttgggaggccgaggagggtagatcacctgaggtcaggaattcaagaccagcgtgaccaatatggtraagccctatctctactaaaaatacaaaaaaaaaatgtagcaagccttggtggtgtgcacctgtagtcccagcaattcaggaggctgaggcaggagaattgcttgaacccgggaggtggaggtttcaaagagctgagatcatgcccctgcctccagcctgggtgacagagtgggactctgtctcagaaaaaaaaaaaaaaacaaggcaaaacggaacctcaatttctaccttctcaactgtattcttccccagatttttccatcacaatggcaccatcactcatccagtagtgctgatgcaggaccaaggagtcatctttaatactctttctctcacatact

SEQ ID NO: 121646 - DNA, 585 bp, Homo sapiens
ccaaatccacgtacatgttttgtttggcaccatacttttgttttatttatgtatttatttatttatttatttatttagtgagttagttagttggttatttgagacagggtcttactctgtcgcccatgctggaatgcagtggcatgatcactgctcactggagcctgaacctccctgggctcaggtaaccctcccacctcagcctcctgagtagctgggactacagctgcctatggctacacctagctgatttttttytttctttctttagaggcaggatttctccatgttccccaggctggtcttcaactcctgggctcaagtgattgcctgccttggccctgctaagtgctggaattacagatgtgggccaccttacccagcctgcctcataatttttaaattggttttcaacattaaaaaatctgacttcttggccagacacagtggctcatgtctgtaatcccagcactttgggaggctgaggtgggcagatcacgaggtcaggagttggagatcagcctggccaacatggcaaaaccccatctctactaaaaatacaaaaattagctgggcgtggtggca

SEQ ID NO: 121647 - DNA, 585 bp, Homo sapiens
ccaaatccacgtacatgttttgtttggcaccatacttttgttttatttatgtatttatttatttatttatttatttagtgagttagttagttggttatttgagacagggtcttactctgtcgcccatgctggaatgcagtggcatgatcactgctcactggagcctgaacctccctgggctcaggtaaccctcccacctcagcctcctgagtagctgggactacagctgcctatggctacacctagctgatttttttttttctttctttagaggcaggatttctccatgttccccaggctggtcttcaactcctgggctcaagtgattgcctgccttggccctgctaagtgctggaattacagatgtgggccaccttacccagcctgcctcataatttttaaattggttttcaacattaaaaaatctgacttcttggccagacacagtggctcatgtctgtaatcccagcactttgggaggctgaggygggcagatcacgaggtcaggagttggagatcagcctggccaacatggcaaaaccccatctctactaaaaatacaaaaattagctgggcgtggtggca

SEQ ID NO: 121648 - DNA, 618 bp, Homo sapiens
agatttaggttttgtatggctgctcctcatttgattttatatttaagcaaaattaattttattgtcatcaatgtcacagagaacttgtgtgtattgaaaggcatgagttctttggcagatttatacctaactcattaatattcttagttccatattttatattcaaatttacttctgcatacattagtttacatagggtatttgtatatatcaaggcatgtctatgtatgtgattttttgacatgttttctaccatctatgggtatacaccccagtgaatgaatttaaacacatcagagcctctctttatacaatgacaatccattatctattttaattttacaacaaatattttcagaatgggatagttcctattaccggaggttaaactgtaatttgartttatctgccccagactaaaatcagcacagcagtacattgcctttgtcatactattaaacattgtgaaattgtctttctcattggttttatgcaaagagaaatccattcgttgtacaagtacagaaaaatgaatttaatatctattattttaaatataagagagagggaggatgcattaatagatttatgtatgacacatatatatccaaaaagagt

SEQ ID NO: 121649 - DNA, 628 bp, Homo sapiens
tctttttttaaatttttattttagggttgggggtacacgtgaaggtttgttagatagataaacatgggtcatggggatttgttgtacatattattacatcatcaaggtattaagctcactctcaggtcacagcacaataaaaatagaagtcaacaggaggttggctagtcatcttttctgcttctctcccttctcccactctctctcatcaaatggaccccagtgtctgcagtttcctttttttgtattcataatttcttatcatttagctcccacttataataatatgtggtrtttggttttctgttcctgcattagtttgctaaggatgatagcctccagctccatccctgttcctgcaaaagacaggatctcattcttttttatggctgcataatatttcatggtatatatgtaccacacatttatttttatccgggctgtcatggatggacatttaggtttattccatgtgtttgctattgtgaacagtgctgaaataaacattcatgtacatgtgtctttagggtagatgttttttatttcttattatataccccgtaatgggattgctgggtcgaatgatagttctgcttttaggtatttgaggaatcaccatactgctttt

SEQ ID NO: 121650 - DNA, 532 bp, Homo sapiens
cagcttagcctattagtttcctttttttttttttttttttttttgagacagagtctcactctgtcacccaaactggagtgcaatggcatgatcttggctcactgcaacctctggctcctkggatctcccaccttagccttctgaatagctgggattacaggtgcatgccaccacacctggcttatttttttgtatttttagtagagacggggttttatcatgttggacaggctggtcttgaactcctgacttaagtgatccacctgcctcagcctcccaaagtgctgggattataggcatgagccactgcacccagccgcttctttcttataatggcaattttgtctatcagttcctgtatcactttattgtaatccttaaatgccttgcattggttttcagctttctcctgaatctcaatgatcttcattcctttccatattctgaattgtatttctttcatttcagccatttcagcctgcttaagaaccctttctggctgtacgcagtggctcacacctgtaatcctagc

SEQ ID NO: 121651 - DNA, 532 bp, Homo sapiens
cagcttagcctattagtttcctttttttttttttttttttttttgagacagagtctcactctgtcacccaaactggagtgcaatggcatgatcttggctcactgcaacctctggctcctgggwtctcccaccttagccttctgaatagctgggattacaggtgcatgccaccacacctggcttatttttttgtatttttagtagagacggggttttatcatgttggacaggctggtcttgaactcctgacttaagtgatccacctgcctcagcctcccaaagtgctgggattataggcatgagccactgcacccagccgcttctttcttataatggcaattttgtctatcagttcctgtatcactttattgtaatccttaaatgccttgcattggttttcagctttctcctgaatctcaatgatcttcattcctttccatattctgaattgtatttctttcatttcagccatttcagcctgcttaagaaccctttctggctgtacgcagtggctcacacctgtaatcctagc

SEQ ID NO: 121652 - DNA, 532 bp, Homo sapiens
cagcttagcctattagtttcctttttttttttttttttttttttgagacagagtctcactctgtcacccaaactggagtgcaatggcatgatcttggctcactgcaacctctggctcctgggatctcccaccttagccttctgaatagctgggattacaggtgcatgccaccacacctggcttatttttttgtatttttagtagagacggggtttyatcatgttggacaggctggtcttgaactcctgacttaagtgatccacctgcctcagcctcccaaagtgctgggattataggcatgagccactgcacccagccgcttctttcttataatggcaattttgtctatcagttcctgtatcactttattgtaatccttaaatgccttgcattggttttcagctttctcctgaatctcaatgatcttcattcctttccatattctgaattgtatttctttcatttcagccatttcagcctgcttaagaaccctttctggctgtacgcagtggctcacacctgtaatcctagc

SEQ ID NO: 121653 - DNA, 579 bp, Homo sapiens
ggagctgtgagtcaattaaacctctttcctttataaattacccaatctcaggtacatctttattagcagcatgagaacagactaataaaacacttttagagtagaaagtctcaggacagttatatatatttttaaggctcttataattaagtttttttcctctctctcttccttttttttaacttttattttgagttcaggggtacgtatgcaagtttgttatttaggtaaacttttgtcatggggatttgttgtacagattatttcatcactcaagtattaagcctagtatccattagttatttttcctgatcytttccatcttctcatcctctactttgtggtaggcctcagtgtctgttcctctctatgtgtccatgttttcttatcatttagctctcacttataagtaagaatatgtggtatttggttttcttttgctgcatcactttgctaaggataatggcctgcagctccaaccatgtgcctgcaaaggtcataatctcattctctgttatggttgcatagtttcctatggtgtatatataccacatttttaaaattcaatctatcattgat

SEQ ID NO: 121654 - DNA, 634 bp, Homo sapiens
agatctgaaaccttgaaactacaggaagaaaacattggagaaatgcttcagaacgtgggtctagacaaagacctattgtgtaacacctcaaaagcacagacagcaaaagtataattggtaagtgagattatatacatctaaaaacttgtgcacaacaaaggaaacaatcgacagagtgaagagagaacctatggaattaaagaaaatacttgcaaactctccatctgagaaggcaataatacccaacagaatgaatcagtaactcaatagcaaaaccacaaataatctgattaaaaaatgtgcaaatcatctgaagagtcatttctccaaagaagatatgtaagtggctaaygggtatataaaaaatacgcaaaataattaatcatcagggaaatgcaaatcaaaactacaatgagatatcatctcatcccagttagaagacaaaaaaatagacaactgtgtcaagaatgtggagaacactgttgtgttgtacactgttgatggaaatgtaaagcagtacagccattatggaaaaaagtatgtagattcctaaaaaaactaaaaatagaactaccgtttgatgtagcaatcccactgctggatatacaaacaaaagaaaggaaatcggtatatc

SEQ ID NO: 121655 - DNA, 570 bp, Homo sapiens
aggagtttattcctcatgctatttcacactggacttccagccatttgtcaaaattactctttaggtgcttctaccagttcatggcttcagcagcttctgttccaggttagctgatctcagttttttgtgagatcagtgattctgtttagggcagtgtctccacatttcagggtaccagtttactccactatctcaattctttgattggtcctagaaaatccattgatatttagggtgttctggttttctcattaaaaaaaaaatagttaatgaccactatgccctttacctattagagctatagctcaagtcaaatgcttacaatataatgtttgaagwaaaccatgttttatttttaaagaaagaaaacagatcaaaatgcagaatgtacagaaattatctcaaccctgttaaatctattaacagtttaaaatgcttttctttcagtgggtgggttacagttggttgtctgctttttaccattctgtattttctaaattgtgttcagtgaccatattttacttttataattacaaatatatttggaaacattctagaactcaaagcaga

SEQ ID NO: 121656 - DNA, 533 bp, Homo sapiens
tgagaggccaagatgggcagatcacttgagttcgagagctcgagaacagcctgggcaacatggtgagactccatctttacaaaaactacaaaaattagctgggcatggtagtgcggcctgtagttccagttacctgggggctgaggcaggaggattgcttgaacccaggaggttgaggctgcagtgagccaagattgtgctactgcactccaacctaggggataaagtgagaccctgttcaaaaaagaaaaatctaggtggagaaagccttgacacctgggcactctgcacatggctgtcaaaatgtgctagctttgtactccaaagtgggcttccaccagagcccaggtcacatttcagcccactggagctgtacctggggcagccactttataacaagartcacctttcctccagtttccaataacatgtttctaatttctatctcagacttcattagaattacttttcccttccttattattatcaacattgtattcaggaacacttattctgtaagaaaattaaagctt

SEQ ID NO: 121657 - DNA, 629 bp, Homo sapiens
  misc_feature (1)...(629): n = A,T,C or G
agatggttttttattatgatgatgaatgacagaaggggcccactggtgtttggagggcagggcttaggtaggctaaacgtcctgtaatacattgtatagtccctcccacaaaatagataattatcctgtgccccacatgattttgaatggccaacctgacactcatgtaagtaaaaaacctgattataattgcatgggcctagaacatatgtctagtttttataaaatgctaaagtatttttttntgcttatttttattatatgcttgaattccagaaatgcaatgtatgtacaaatcaataagcaattgttgttttagtttttcagaactttacyaggggtagttgatccaaatggcattattggatgtggtggtttccggacacccacctgtgacactgcggtgaccggtctcctgtctggcctgaagtggatctggaccccacacagtccccatgtacagctgataccaggctgaagtggatcaggaggctgaggaactaagccagtgtcaggtggtgcaccaggctgcccaagtaagaggccctacacatgcaggtaggaaggctgtacatggcctttcttcccttctgatgagcttgggcgaaatatgtggatatataacagat

SEQ ID NO: 121658 - DNA, 581 bp, Homo sapiens
tttgtgagggatgcattgacaaatgagatttttccctcattctgttgccgtatgattaatttttaaaaatctagataataatacaagatcatttctgttaaattatatattggtgtgggctatttaggataatgagtttattatattagttatatcttacaactgtgtaccataaggtttttcactaccaaatgttacttacatgaaatgctgtaatcattaatatactttatcccaaatattcgttactatgaataaatttctttcygcataaacatatatgcaatagttttaaaaatcaagggaaaacaatcttggcaaaatatactttggtccgtccatttcatccatttggaaatattctgaattctagacaactgccaacattgcacagttggagttaccagatatagcaatagctttataggtttgagaaagttgaagtagttcatcaaaattacgtgaacttattctgtaatgatgtgtgataattaagctttgtgcagatcaatttttgatgtataaaacacaaatgcccacaaagcttacttcacaggattgaagtataatagaaatcactg

SEQ ID NO: 121659 - DNA, 512 bp, Homo sapiens
gctcagctttttatagaaaatgaaatgtaaaaatttaaataaatctgatagaaaaatataggttttaaaaaatgttacatggaaaattcaatatcaatgaaaatttaayttaatttagaatgcctctgcactacaggatgggagaggtgacacatgcctgtaatcccagtactttgggaggccaaggtgggaggatcacctgagcccaggatttccaggcagcagtaagcaacgatcatgacattgcactctggcctgggtgacagagcgagaccaggtctctaaaaaattaataataataaaacaaaatacctctacaactggccagacatggccagaagttaggagtattataatatgtattatgcataatggaatttgataaagtcattgctcattaaatgagcataatacctttggaaataccgagaaggaatcaaggaattcctgcaaaagttaacctccgtctccataagaaacattagtttggtttcctcctttgtactacttgt

SEQ ID NO: 121660 - DNA, 500 bp, Homo sapiens
ctgggctattaccctttggctttcccattatttttctgcaygaatcccccgttgaccttgaatgagacacacctgaaatgtactgaggagaaagagatgagaactggtcagctgaatactaatttgctctctgccacttattacctccggctttttggctattaccactaacgctcaattgtgatgctctctttcttgaatcagtgctctccatgtggaggccctatgaatgaattccttaatttttcaacatcagtgcaaaagagatgaagagaggcagataattatttgaagcttctacagggcaatgtactatgcagtatgtctattaactagagattgcaaccagaagagtaaatgatacccatgcttatatacatagttatcattatttatgaatatagacttgggctgcagtagcagtttaatggattcagagacatttattaaattggtttcatgtatttttctggccatgagcttaaataattatatttctt

SEQ ID NO: 121661 - DNA, 537 bp, Homo sapiens
gcaacttaactttgcactttaagaagaagacaaatctaaatgtaaaattagcagaagaaaggaaataataaagattagaacagaggtaaacaaaatagaaaaacaattaaaaagttaacaaaacaaataactgattcttcaaaaatatcaacaaaattaataaagttatctaaattgactatgaaaaagattaatataactaaaatcagatacgaaagtggaaacattatactgattttatacaaataaaaaggattgtaagaaaatgctatgaatggtaacacacaaacaaattggataacctagatgaaccaggcaatttccaataaataatcaaccttccaaggctgaattataaagaaatagaaaatctaaataaacctatagctagtaagcagatttagtcagtaatcaatacctcttaataaagaaacrtcttgagcaagatgactttactgataaattctaccaatcatttagagttaacatcaattcttctgaaattcctccaaaatattgaagcaggaacacctccta

SEQ ID NO: 121662 - DNA, 591 bp, Homo sapiens
gattgactgaccaaggttcttattccccaactaatgcagagagataggattcttcttgtccaggagtattcggcatgtgctatggatcaagggtctcctcataatatttccttttctttgctttgtaagtgggagtgtttgagattattacgtttttccagccagttttcagttggtatgcttcagatgatgaaaccgagtacttactttattcatagacctcagaatattgaaataggattttagtagaaatacaggcagaatgaatattcctttgattcaaagctcatttcatgggatgaatcgttttaagattcattttgtattatgaattatgattcatgatatgtcatgacatgaaattagcatgcagtakctggaactgactttaggctataaccccttgggcagtgttgaacatgattttaattgtacatagatacttgtaatttgttagatagagcaaatgtttgaaaagaagggtatatacgcttgttggtcactaaaggaagactcaagctattgttttaatgtttagcctgttttttccaattacatatcctcttatctttaagataagccttatcatat

SEQ ID NO: 121663 - DNA, 591 bp, Homo sapiens
gattgactgaccaaggttcttattccccaactaatgcagagagataggattcttcttgtccaggagtattcggcatgtgctatggatcaagggtctcctcataatatttccttttctttgctttgtaagtgggagtgtttgagattattacgtttttccagccagttttcagttggtatgcttcagatgatgaaaccgagtacttactttattcatagacctcagaatattgaaataggattttagtagaaatacaggcagaatgaatattcctttgattcaaagctcatttcatgggatgaatcgttttaagattcattttgtattatgaattatgattcatgatatgtcatgacatgaaattagcatgcagtatctggaactgactttaggctataaccccttgggcagtgttgaacatgattttaattgtacatagatacttgtaatttgttagatagagcaaatgtttgaraagaagggtatatacgcttgttggtcactaaaggaagactcaagctattgttttaatgtttagcctgttttttccaattacatatcctcttatctttaagataagccttatcatat

SEQ ID NO: 121664 - DNA, 604 bp, Homo sapiens
gattcattttgtattatgaattatgattcatgatatgtcatgacatgaaattagcatgcagtatctggaactgactttaggctataaccccttgggcagtgttgaacatgattttaattgtacatagatacttgtaatttgttagatagagcaaatgtttgaaaagaagggtatatacgcttgttggtcactaaaggaagactcaagctattgttttaatgtttagcctgttttttccaattacatatcctcttatctttaagataagccttatcatatgtcctcagttggtcagtgaatcataaaatctctctgtrttgcaccagctatagagttgaaatgttattcacctctggccaagaatagcgacttcttgagtatagagttggtatatgttaattaccaacatatacctttggggcagaaattaatgttctgctccacaattaatgtttgaacgttgaaaggcaggctttctttttcagctgaggttgccaaagtgggagaacataaatacagattacaaagtggccctctttctcactgcatggaagatgctacctataagaaagaataaaaccaacacagaaagcgaagaaacaga

SEQ ID NO: 121665 - DNA, 600 bp, Homo sapiens
cactgatgtgagaatggttgaggatgattctttaggaaatactatttaagcttagtgttgaaggaatcaaaagagctgagctctgaggagcaaggggccgatgttccaggcagacagagcaacaattgtgaaggccctgggatgcgaatgagtttgagcagggcttaagggtcagaacagaagtccaagtggctgtaattaagtgaccataggagagacaggtgcagacaaagattggagcagtgggaagkgctgcttggctttgttagcttgggctatgtaagcagaaggtcttgttcccttttctggtggattctgtggaggttacaaagaaaagcaaaatatatttctttttcccaagagtgtagttggattagtagactatacaagtaactaccatacatgcagtgtttgagagcagtccttagatatatcaagagtggtgtgggagaagaggaaaggaatcctcaagattaaggggtaatcaggcacacctcatttggctttgatagtgggatttgatcctattatgcctgcaatgtgtcagacattgtcaaacattcaatgtataaagaagagtaagacatggtcctggccacg

SEQ ID NO: 121666 - DNA, 600 bp, Homo sapiens
cactgatgtgagaatggttgaggatgattctttaggaaatactatttaagcttagtgttgaaggaatcaaaagagctgagctctgaggagcaaggggccgatgttccaggcagacagagcaacaattgtgaaggccctgggatgcgaatgagtttgagcagggcttaagggtcagaacagaagtccaagtggctgtaattaagtgaccataggagagacaggtgcagacaaagattggagcagtgggaagtgctgcttggctttgttagcttgggctatgtaagcagaaggtcttgttcccttttctggtggattctgtggaggttacaaagaaaagcaaaatatatttctttttcccaagagtgtagttggattagtagactayacaagtaactaccatacatgcagtgtttgagagcagtccttagatatatcaagagtggtgtgggagaagaggaaaggaatcctcaagattaaggggtaatcaggcacacctcatttggctttgatagtgggatttgatcctattatgcctgcaatgtgtcagacattgtcaaacattcaatgtataaagaagagtaagacatggtcctggccacg

SEQ ID NO: 121667 - DNA, 600 bp, Homo sapiens
cactgatgtgagaatggttgaggatgattctttaggaaatactatttaagcttagtgttgaaggaatcaaaagagctgagctctgaggagcaaggggccgatgttccaggcagacagagcaacaattgtgaaggccctgggatgcgaatgagtttgagcagggcttaagggtcagaacagaagtccaagtggctgtaattaagtgaccataggagagacaggtgcagacaaagattggagcagtgggaagtgctgcttggctttgttagcttgggctatgtaagcagaaggtcttgttcccttttctggtggattctgtggaggttacaaagaaaagcaaaatatatttctttttcccaagagtgtagttggattagtagactatacaagtaactaccatacatgcagtgtttgagagcagtccttagatatatcaagagtggtgtgggagaagaggaaaggaatcctcaagattaaggggtaatcaggcacacytcatttggctttgatagtgggatttgatcctattatgcctgcaatgtgtcagacattgtcaaacattcaatgtataaagaagagtaagacatggtcctggccacg

SEQ ID NO: 121668 - DNA, 478 bp, Homo sapiens
ttttttttttttcctgtctcactcattccagtaacattttggtccttgcattcctgaacatcttcctgggaacccaccgtttcttcttattactggtctattgctgtgctttataaaccccttaaagaagctttgaacactctgaagaactgaataatatatctcagaggaaaggtatagactaaattgactactgcaaatagtttgcacagaaaagtaatgtttggaaaaatagattggggtctcagtattggggcatggaatgtttggttgtggagtttagagcttattgaataggcctcagggatacacacttaaaaagtaakgctttggtgagattaatcagatgtaaacctagagaatgactgtaggatggggataggagaagatgctgaagacagactattacaacaatatgtgttatagaaatattatataatactacagaaatattgcagaaatactattgcagaaatat

SEQ ID NO: 121669 - DNA, 478 bp, Homo sapiens
ttttttttttttcctgtctcactcattccagtaacattttggtccttgcattcctgaacatcttcctgggaacccaccgtttcttcttattactggtctattgctgtgctttataaaccccttaaagaagctttgaacactctgaagaactgaataatatatctcagaggaaaggtatagactaaattgactactgcaaatagtttgcacagaaaagtaatgtttggaaaaatagattggggtctcagtattggggcatggaatgtttggttgtggagtttagagcttattgaataggcctcagggatacacacttaaaaagtaatgctttggtgagattaatcaratgtaaacctagagaatgactgtaggatggggataggagaagatgctgaagacagactattacaacaatatgtgttatagaaatattatataatactacagaaatattgcagaaatactattgcagaaatat

SEQ ID NO: 121670 - DNA, 606 bp, Homo sapiens
attccactgacaaatatccattcattcactcatttatacattcactgcacaaatatctattaaatacctggtacaacagaaaaattaagagaaagtcctgcttttatgaagtttatattctagaagatccttgtgattttagcatttttataatttaaacatttttcatagatttgctgatatgtttggctttgtgttcccacccaaatctcatcttgaattgtactcccatcattcccatgtgttgtggaagggatctggtgggagataattgaatcgtggrggtagtttcccccatactgttcatgtgctagtgaataagtctcaggagatctgatggttttaacagggggttctgcttttgcatcttcctcttctttctcttgctgttgccatgattctgagaattccccagccatgtagaactgtaagttcaattgaacttctttttctccccagtcttgagtatgtctttatcagcaatgtgaaaacagactaatacagttgtatacctacacacacacatgcacacacatgcacacacgcaaaggcacacctacacgtagtgtttcatcagctagggtcttaataggaagaaataacaga

SEQ ID NO: 121671 - DNA, 581 bp, Homo sapiens
tacaagctcagccacagtggggtaatgcaacaaatgggctcctagggtttccaactccagattttgacttttgtacagcattactggacctggctgggtgagaggggagcccacttccctaaagggtgagttccagggctggcagcattcactacaatctgacggaagagccattaagccttaagtgaacgtcagcgatagcctggyaatactctgcatgggcctgtggtggtggtggccatgggatgagccccctctgcctgtggaaagataaaggaatagtgaaaagagctgtgtctcatggtttcagtgcagctcagttgcagtagaatagaacaccaggtaggtttctaaagttcttaactctagtctctggctgccagatgaaatctctggatctcactcagtgcctgggggaacttgtcagcccaaagggaaagacagaaccctggctggctttgtcacctgctgactatagagccctagggccatgagtgaacattggcaatagcgaggtagtggtaacagtgggctttgggcaagacccagttctgtgctggcctctggtctgacccagcaca

SEQ ID NO: 121672 - DNA, 553 bp, Homo sapiens
tcgtcctccgctcactccctggatgagctcatccttattcatggctttgcacaccataattgtaactctagcttcaatttctgtcctgagcatcaactcatatttctatctgcctatacaatgtctcatctaaacatcagaaatacattgcagacttacatatctaaaaacagacctcttttgtttcccatctcctatctcaacatgacacttcactagccttcctcatctcaataaatataatcaatattcatccaattgttagtccaaagcccaggagtcttgatttctccctttctttcacatccatttttaagtccaccggcacattctgttgactctacccttaaatattcctggaatcagtttgctttttggcactttctccattgtcaccatcatcccagtcactatcatctctcatctcaactactggggacatctctcaaatggttctccaagtccactcttggcttctacactmtctccttcaccctgaagccattgtgatattttggaaatataaatcagtttatgtggctccctttactcc

SEQ ID NO: 121673 - DNA, 594 bp, Homo sapiens
actatgtgtttctatcaattcaataagcactctgggctgaggacatctcagaccatgctggccacaggtctctgaaaattagctgcttcaaaagtgcgagaagtcatgcatatgtgttcatatatgtgactaagttattcttacttaggcatatggattagtgttctaggactgtcataacaaattaccacaaatttaatggcttaaaaccacagaagcccatttactcacagatctagacgctagagtatgaagccaaggtatttggttggttccttctggacgctgaggtagactctgttctatgcctctatcctggctcctgatggctgctggcaatccttggtgcyctttggcttgttgcctcactccaatctctgcctctgtcttcatgtcgcattcttctctgtgtctgtgtctttgttctcttctcttctcttcttttatcttcttttatcttctcttctcttataaagatgtcattagatttaaggcttatactcatccatgatgattatatctcaagatccttaacttcattacaaaagcaaagtcacttattccaaataaggttagatttacaggtttggtggt

SEQ ID NO: 121674 - DNA, 594 bp, Homo sapiens
actatgtgtttctatcaattcaataagcactctgggctgaggacatctcagaccatgctggccacaggtctctgaaaattagctgcttcaaaagtgcgagaagtcatgcatatgtgttcatatatgtgactaagttattcttacttaggcatatggattagtgttctaggactgtcataacaaattaccacaaatttaatggcttaaaaccacagaagcccatttactcacagatctagacgctagagtatgaagccaaggtatttggttggttccttctggacgctgaggtagactctgttctatgcctctatcctggctcctgatggctgctggcaatccttggtgccctttggcttgttgcctcactccaatctctgcctctgtcttcatgtcgcattcttctctgtgtctgtgwctttgttctcttctcttctcttcttttatcttcttttatcttctcttctcttataaagatgtcattagatttaaggcttatactcatccatgatgattatatctcaagatccttaacttcattacaaaagcaaagtcacttattccaaataaggttagatttacaggtttggtggt

SEQ ID NO: 121675 - DNA, 498 bp, Homo sapiens
agctcacgcttggtgagctgcacccactgtccttcccccactctccgatgagccccagtgagatgaacccggtacctcagttggaaatgcagaaatcaccygtcttctgcatcgctcgtgctgagagctgtagactggagctgttcctattcggccatcttggaacccatttccaactgatttctatcttaaaacaacttttgcatttggctcctgcaatacaatcactgtttgcttttacttccacatcaatggaatgtccatttgttaaattattttctttctgaccactcactcttgcagttccagaggcctcagtcttcagacacctctaacttacggtcattccctatgtaaactcacaatttatgcttgattaaacactcatataaactggtaactaagtgtatacttcagctcctatcactaccttgctttccaaagtcatctacataactaaccatctgattctctaattggaagcctaacatgaatctc

SEQ ID NO: 121676 - DNA, 646 bp, Homo sapiens
ctgtctcagtggaacctcaacatccaaaagcaggcttggataagaggcagtgtattgctttacagtaatggaattattgtaaccaaaggattttgttgttgtttgttcttgttgttgttatgctcaagtttaatttttatacttattttttaaagaaagaattcttcaagcccagaaagcacgttaacttttcattatgaaattactcactgactcagtcaagagagcattgttatcagttatccttttgtattcatcaaggttctccacagaaacagaaccaatattatatatatagatatatcaaaagagaggtattatgaggagttggctcatgaaattacagaggctgagaagtcctacaaactgctatctgcaagccagagsgccaggaaagtcaatggcgtagttctggtccaaactcaaaggcctaagaaccagaggagccaatgttccatgtcctagcttgagtccaaaggctcaagaaccaggagtaccaatgtccaaggccaggagaagatggatgtcccagctcagagtaaattcactcttcctctgcctttttatctaacctggctcttagcagatgagatgatcaccacaaacattggtgagagggatccttttttttccttttctaatttta

SEQ ID NO: 121677 - DNA, 646 bp, Homo sapiens
ctgtctcagtggaacctcaacatccaaaagcaggcttggataagaggcagtgtattgctttacagtaatggaattattgtaaccaaaggattttgttgttgtttgttcttgttgttgttatgctcaagtttaatttttatacttattttttaaagaaagaattcttcaagcccagaaagcacgttaacttttcattatgaaattactcactgactcagtcaagagagcattgttatcagttatccttttgtattcatcaaggttctccacagaaacagaaccaatattatatatatagatatatcaaaagagaggtattatgaggagttggctcatgaaattacagaggctgagaagtcctacaaactgctatctgcaagccagagcsccaggaaagtcaatggcgtagttctggtccaaactcaaaggcctaagaaccagaggagccaatgttccatgtcctagcttgagtccaaaggctcaagaaccaggagtaccaatgtccaaggccaggagaagatggatgtcccagctcagagtaaattcactcttcctctgcctttttatctaacctggctcttagcagatgagatgatcaccacaaacattggtgagagggatccttttttttccttttctaatttta

SEQ ID NO: 121678 - DNA, 580 bp, Homo sapiens
cctcaggtctgcccacctcggcctcccaaagtgctgggattacaggcacaagycaccatgcccggtcagcactgcagattttttaaaatacgagtatgttccctgccctcaagaaatcacaggcttcagaaggctaataaataataatagtctaaagaagttggcaaagaccaaacttcatgcctttttatgctcttctatttctttctcagagaacggccccatcatctactcagccatcccaagaattactgtagactcattcctctcctttaatccaaacatttaaacagagtgcaagctctattaagtccaccttcttaattcctcttgaagcaatttctactacaacggccatgtctcagatctgcttctctatccacctggaatggtgcaataatccctgtatttatcagaattgttttagtaggaaggaacagaaacctaactcaatatagcctaaggaaacaatcgggaagggagaaaattttctgaaagaaggaaagttgggtagtccataaaacgaaaagaataactgtgggatccagtgcaattaagcacacagtgcctagtaaccagg

SEQ ID NO: 121679 - DNA, 580 bp, Homo sapiens
cctcaggtctgcccacctcggcctcccaaagtgctgggattacaggcacaagtcaccatgcccggtcagcactgcagattttttaaaatacgagtatgttccctgccctcaagaaatcacaggcttcagaaggctaataaataataatagtctaaagaagttggcaaagaccaaacttcatgcctttttatgctcttctatttctttctcagagaayggccccatcatctactcagccatcccaagaattactgtagactcattcctctcctttaatccaaacatttaaacagagtgcaagctctattaagtccaccttcttaattcctcttgaagcaatttctactacaacggccatgtctcagatctgcttctctatccacctggaatggtgcaataatccctgtatttatcagaattgttttagtaggaaggaacagaaacctaactcaatatagcctaaggaaacaatcgggaagggagaaaattttctgaaagaaggaaagttgggtagtccataaaacgaaaagaataactgtgggatccagtgcaattaagcacacagtgcctagtaaccagg

SEQ ID NO: 121680 - DNA, 433 bp, Homo sapiens
cacatggtttctgcacatactgtgccagctttcaatcgattgcttctcagctccaattcttctctttattgccttctctatgataatggagctagtycctgtcagcatttctcccttgtcagctggcatgatgttaagctttgtcagtagtgaattttgaagggcactacaggaaggagaggtttctcttcctggttcatgtgctcctctttataggctccagcagcacaccatggtcagcagccagcagtgattgacactttcctgtgggccactttcctcagtaccccaagagtagctttccagtggtttctgcatcctggcacctcttatgtgtcattccctccagcatcccagctgttggaatcctaatgtgttctgctggtgtgggatgctagcaaaatactttatcatcactgggccatggctgcat

SEQ ID NO: 121681 - DNA, 620 bp, Homo sapiens
tttctttttggaccagtcccccattatgcaattcttgtagtgtgtttctcagctctatcagattactttggttcttttttataatggctatttcatctaacggctcctgtattatgtgattcttaggttccttggattgcatttcaatgtcctcctgaatctcratgatctttgttcctgtctgtattctgaattctatttgtatcatttcaaccatttcagcctcgttaggacagtgtgggcatttggaggaaagaaggcactctggcttttttaattgccagagttcttgtgctggttatttctcatctgtgtgagcaagctgatgttcctttaactgtggtgttgagtacagtcagttgacttcctttctggatgttttcagagggccaaagctttgttcaggtgtttatttgtagctaaattcttgtttttgatttcacagggtgagtatattagcaaagtattttttggtattgatgttttgtgctgtgatccagtaggtggcacttaagtgtaatggccggtaggtagggtcttgctcagttaacacagctcccctgtatttcttcacaattgcagttgtactccctctcagtgctctgaaagtgtgggtttat

SEQ ID NO: 121682 - DNA, 620 bp, Homo sapiens
tttctttttggaccagtcccccattatgcaattcttgtagtgtgtttctcagctctatcagattactttggttcttttttataatggctatttcatctaacggctcctgtattatgtgattcttaggttccttggattgcatttcaatgtcctcctgaatctcaatgatctttgttcctgtctgtattctgaattctatttgtatcatttcaaccatttcagcctcgttaggacagtgtggkcatttggaggaaagaaggcactctggcttttttaattgccagagttcttgtgctggttatttctcatctgtgtgagcaagctgatgttcctttaactgtggtgttgagtacagtcagttgacttcctttctggatgttttcagagggccaaagctttgttcaggtgtttatttgtagctaaattcttgtttttgatttcacagggtgagtatattagcaaagtattttttggtattgatgttttgtgctgtgatccagtaggtggcacttaagtgtaatggccggtaggtagggtcttgctcagttaacacagctcccctgtatttcttcacaattgcagttgtactccctctcagtgctctgaaagtgtgggtttat

SEQ ID NO: 121683 - DNA, 620 bp, Homo sapiens
tttctttttggaccagtcccccattatgcaattcttgtagtgtgtttctcagctctatcagattactttggttcttttttataatggctatttcatctaacggctcctgtattatgtgattcttaggttccttggattgcatttcaatgtcctcctgaatctcaatgatctttgttcctgtctgtattctgaattctatttgtatcatttcaaccatttcagcctcgttaggacagtgtgggcatttggaggaaagaaggcactctggcttttttaattgccagagttcttgtgctggttatttctcatctgtgtgagcaagctgatgttcctttaactgtggtgttgagtacagtcagttgacttcctttctggatgttttcagagggccaaagctttgttcaggtgtttatttgtagctaaattcttgtttttgatttcacasggtgagtatattagcaaagtattttttggtattgatgttttgtgctgtgatccagtaggtggcacttaagtgtaatggccggtaggtagggtcttgctcagttaacacagctcccctgtatttcttcacaattgcagttgtactccctctcagtgctctgaaagtgtgggtttat

SEQ ID NO: 121684 - DNA, 565 bp, Homo sapiens
atgcctgcttcacaggggggatgmaatgaagtattacatgcaaacacttggtatgtgcatagctgatgtatatgaaggaatggtgttagaaaagtgggtttggagtctggcaaaaattttgaaggacctgatgaatgttgaaatagattgaaatgtgaggaaggaagtttgcttcttttacatatggcttacctgtggtggtgtgccttctctgtccacaggtccttaatagcaacttaacatacatttgtagacgctcagggtgaagaccactatgtcaccaagcaatgttctggtggaaacttctgaaattgaatggacaatgccaactctaaatgactttccataggcagtttgaaagccctcatttcttggaagctttcagtaagtgaggggcttgtagtgcagagtattcttttccaagtagtccaggaggcattggctttggctgcacttggacattgttttgcttactcctctgactgttgctttacttctgagtctctcctctttattcccatttggcacaggcaggtcagtaaagtcagtcttgtgaacactgtaa

SEQ ID NO: 121685 - DNA, 565 bp, Homo sapiens
atgcctgcttcacaggggggatgcaatgaagtattacatgcaaacacttggtatgtgcatagctgatgtatatgaaggaatggtgttagaaaagtgggtttggagtctggcaaaaattttgaaggacctgatgaatgttgaaatagattgaaatgtgaggaaggaagtttgcttcttttacatatggcttacctgtggtggtgtgccttctctgtccacaggtccttaatagcaacttaacatacatttgtagacgctcagggtgragaccactatgtcaccaagcaatgttctggtggaaacttctgaaattgaatggacaatgccaactctaaatgactttccataggcagtttgaaagccctcatttcttggaagctttcagtaagtgaggggcttgtagtgcagagtattcttttccaagtagtccaggaggcattggctttggctgcacttggacattgttttgcttactcctctgactgttgctttacttctgagtctctcctctttattcccatttggcacaggcaggtcagtaaagtcagtcttgtgaacactgtaa

SEQ ID NO: 121686 - DNA, 565 bp, Homo sapiens
atgcctgcttcacaggggggatgcaatgaagtattacatgcaaacacttggtatgtgcatagctgatgtatatgaaggaatggtgttagaaaagtgggtttggagtctggcaaaaattttgaaggacctgatgaatgttgaaatagattgaaatgtgaggaaggaagtttgcttcttttacatatggcttacctgtggtggtgtgccttctctgtccacaggtccttaatagcaacttaacatacatttgtagacgctcagggtgaagaccactatgtcaccaagcaatgttctggtggaaacttctgaaattgaatggacaatgccaactctaaatgactttccataggcagtttgaaagccctcatttcttggaagctttcagtaagtgaggggcttgtagtgcagagtattcttttccamgtagtccaggaggcattggctttggctgcacttggacattgttttgcttactcctctgactgttgctttacttctgagtctctcctctttattcccatttggcacaggcaggtcagtaaagtcagtcttgtgaacactgtaa

SEQ ID NO: 121687 - DNA, 513 bp, Homo sapiens
aaccatagtcaccatatacaatagatctcttgcacttctttttcttgtctaattgaaattttgtgtccattgactaatatctccccactccctctctctccagcccccgggaactatcattctactctctgcttctatgagttcaacttttttagtttccacatgtgagataatgcagtatttgactttctgtgcctggcttattttacttaacataatgtcctctaggttcgtccctgttgttgaaaatgacaggaattccttcctttttttttttttcaatctgaatagtttctttatccattcatctgttgattaacacttaggttgattctatatcttgtctattgtgatagtgctgcagggtatataaagtggaggtatctcttcaacattctgattttactgattttattccctttggctatattaccaaagtaccagggatttggtctaggccctgttggtcatcacacagaaagccaacacgragacaataattatcacaaggat

SEQ ID NO: 121688 - DNA, 475 bp, Homo sapiens
ataaaagaacagtctatatcacattgttttaaagatggtgccttcagagtacagaatgctgtggtgccttcttttttggtgacgtgttcgcaggaaaaaaatatatatataatctgaaatatggtgggcaaaaatagtgataggtgcaaacctgtccaaatgtcttgctttgcacagacttgaagggcccaagtttccttccaagctcagagaaaagctcagcctctggaaggggctgccacacatatccctccctgcatgcatcttctccccatcaaacagagcagcttgacaaagggaagttcrgagaaaacaggcctttttttcccagggaaacaatggaactctagttctatttccctatatctccctttcttagcaatttaaaatgataattgacctagcttctgcacactctctgaatcacttcattgtgttaaaattattcgaatgacaattgatgaagaacacaaat

SEQ ID NO: 121689 - DNA, 554 bp, Homo sapiens
acttctcttttaaaatgcagttaatctttggaatttaagttctacatcttaatgcacttttattatttattccccatcacacagaaagttttccaggagtaataacatatatacagagactatagaatttaaaacatacaaatcatggtcatggaaatgctttgttctcaaatgcaatcccatatgggcagatagggtcctaatctccctagtagtgaaaatggctacccggcaaagacagggaatcaacttaaatgcccataaatgacagattggataaagaaaatgtggtacatacataycatggaatactgcgcagccataaaaaagaacaagatcatgtcttttgtgggaacatggatggacctagaggctatcatccttagcaaactaatgcaggaacagaaaaccaaatactacatcttctcacttataagtgagagctaaatgatgagaacttatgaacacaaagaaggaaacagtagacactggggtctacttgagggtggagagtgggaggagggagaggagcagaaaaaataactattgggtac

SEQ ID NO: 121690 - DNA, 633 bp, Homo sapiens
atattgcttcaatttttataaaattttgtttaattaaaacctttaagttgaaaatagaaaagttgtgaggcaaaagtagtaaaagagacaaaggataagaagccaggcacgtctttttcaggaccaacttccttctccaggcagtttcaatgtgaatttggggaaaacaagtatttgccacattgtgacagagtgagcatgaaaaagcagtctatgcagtcaacccttccaagtctatttggttctcagaaaggtctaaagatacaaatttagatcaggaaatcaaatttcttaaaacactccccgtctaaagaaaacactggaatggcaggtcaatgacagagttgctcccagggtttggttcctcactgagaacagactgaggatgtatcccactgatgacagtaatgctgttccattgaaatataacrccacacacgagtgttaacttaaaatgtttctaatagccacatttttaaaattcaaaagtatacacacactacaacaaaaatatgttacatgacgcataggttatagtagtcttaccaaaacaataaggttctgtttaacaatatagtttttacatctaaataaactaagattaaatacaatttaaaattcagtttcacacta

SEQ ID NO: 121691 - DNA, 562 bp, Homo sapiens
agtactacagtgagtactaaagttaattgtatgcagctatgatttaatattgcatcttcacatttgttttcattttkcttgactgcaaatagcactttgtacagtctgtgtgtgcataagttttgatgcatttaactttttacaataggtccgtgtatattttatgatagtaaataataaaatagtctggtatctacatatgttttatgcattcatgacatacctaagttttctttttttttaatatttctaggctatagagtttttttaaattttttcaaattgttgcgaatctccaaaagtttttccaatatatttactgaaataaatctgcacataagtggaccaatgcccttcaaacttgtgttgttcaggggtcaattgcattcgtttgttagggcttctgcaacaaattagtataaatttgttaacttaaaaccatatgattttatttttgccagttctggagactaggaggctgaaactgagcatcaccagagccatgcttcctctcaaggctgggggaagaatcgatccttgtctcctccagctcctggtggct

SEQ ID NO: 121692 - DNA, 624 bp, Homo sapiens
atctgcacataagtggaccaatgcccttcaaacttgtgttgttcaggggtcaattgcattcgtttgttagggcttctgcaacaaaktagtataaatttgttaacttaaaaccatatgattttatttttgccagttctggagactaggaggctgaaactgagcatcaccagagccatgcttcctctcaaggctgggggaagaatcgatccttgtctcctccagctcctggtggctcttggcttgcctttcttttctcttacaaggacatctgtctttggaatcagggatctctctagtccaggttaatgtcatctctagattctcaccttaattatatctacaaagacccttatttcaaataaggtcacattctgaagttctggttgatagatcctttgcgggggggtggtggagtgtcactattcaacgcactacggatagttaccttcttctcaggaactcacagaagaactaggaaaaaaaacccccacaaagacataaaggatttgaatcatcctctccacaaacttgaattaatttacgtttatataacgctatacccaacataggtagattatacattctttttaagtgtacataaaatatttattaaaatggattata

SEQ ID NO: 121693 - DNA, 602 bp, Homo sapiens
aatgcttcaagatgtagcaagagccatggctggggtcagtactcagagaatcttcatagatgaaatgacccctctgctaaaacatgaagaacaggtgcaactttcacagctggacaattttttttttttttttttgagatggagtctcactctrtcacccaggctggagtgcagtggcgtgatctcagctcactgcaatctctgcttcccgggttcaagcgattctctgtctcagcctcccgagtagctgggattacaggtgcctgccaccatgcccagctaatttttgtatttttagtagagacggggtttcaccatcttggccaggctggtctagaactcctgacttcatgatccacctgcctcagcctcccaaagtgctgggattacaggcatgagccaccgcacctggcccacaaatattttatgaatcattatatatgaaagtctagagatttgggagcccatagtcttccttgaattgaaaatagctcagtattgctaccgcaatgagtggtagaatatgtatatgacagggaggcatggaaagaagataggatagaaaggatggagaaaggggagttagtactagagccagaaca

SEQ ID NO: 121694 - DNA, 547 bp, Homo sapiens
gagcaacaccatctatcctgtgtatcctcagcagaactcccaatatccttgtccactgtaagatgtaaagcagactctgaaaagacctacctctgctgctgcggatatgatcaataatcaaacttcctcctttttctcaacttgcattgttttcccaaatatttttgcattagtttcatcagtgaaaaaaaaaattaccactctgccccagctgtctttatgtttctctgaagattctgaagaccctgcacgcttggagagagaagaaaggaaagacgagagatttcaaagatagagggaaggctctgaatgtgtgaacattccaaatatgttaaattcctctatgccatttaaaacctttggaatgcaaagaggggaaaagtctctgttccgtcctgtggttctgctgagtgacctaagcccctcatgtaacatctctcaagattcccatccctttcttatatgtaaactgggggaaaaatatagctagcatcstgcctgtcactcatggtttttgatagggcagcatcacatggcaagataattt

SEQ ID NO: 121695 - DNA, 611 bp, Homo sapiens
aacctgtcttgctttcattttaaatattaattattgtgtgccacactttctccatggcaggcacagagtgaaatcagtatgaagaaaatgagacttttgttgatatgctatgttcagtccaccagtttttgtaatgccgaagtgttttaattatataaatgtwagcaaagtattattgatatcatttataattttatttggaatggcattcactaactttgtatttactttaaaaatttaagaaaccatcaactttagcagctgcttattctactgtacttatttgttctatattggcaagtctacttcactgtgtattatttcccaagaatcctatattatgacaaatattatttcaagatttggttaggggtggtggtgctatggtttgaatttgtctcccgaaaagcacgtgtcaaaaacttaatccccaatgcaactgtgttttgacatggggcctaattggaggtgtttatgtcataagggctccaccttcatgaatgaattaatgcttaggctatgagttcaattttttgttccttgtaccatctcttgcccttctaccatccactatgggatgatgcagcatcaaggccctcactggatgctgt

SEQ ID NO: 121696 - DNA, 611 bp, Homo sapiens
aacctgtcttgctttcattttaaatattaattattgtgtgccacactttctccatggcaggcacagagtgaaatcagtatgaagaaaatgagacttttgttgatatgctatgttcagtccaccagtttttgtaatgccgaagtgttttaattatataaatgtaagcaaagtattattgatatcatttakaattttatttggaatggcattcactaactttgtatttactttaaaaatttaagaaaccatcaactttagcagctgcttattctactgtacttatttgttctatattggcaagtctacttcactgtgtattatttcccaagaatcctatattatgacaaatattatttcaagatttggttaggggtggtggtgctatggtttgaatttgtctcccgaaaagcacgtgtcaaaaacttaatccccaatgcaactgtgttttgacatggggcctaattggaggtgtttatgtcataagggctccaccttcatgaatgaattaatgcttaggctatgagttcaattttttgttccttgtaccatctcttgcccttctaccatccactatgggatgatgcagcatcaaggccctcactggatgctgt

SEQ ID NO: 121697 - DNA, 622 bp, Homo sapiens
ctgcattttgtccctccttctagtgaccttcttttgctcctggatgtgtccttggagctttccattctcttatctacatattcttccctaaattaacccagctagattcctggctttaaatagcctttatatgctgctggttcccaaatcttaatctccagtcctgacatcttcccagagctttagactcctgtatccaactgtttacttgccagctgtgccagccaagagtctctttcactcatttcccatatcagcaagcccccacagatttcaccactgattttggaggaaatctgtcacttctcactgccctagtcccagccatattattttttgacttcaatacagttctttcctaagtcctctcactgctccagccttctccctccctccccagccagtttattatctccagggaggccagagtgaactctattaaaagtaagtcagactcagctcaaaatcatctaatggctttccattgcactcagaatgaaagccaaagcccttgccatgcccacaggcttttcyaccatctggcctgcctccacgtcctcattttattttttttccctttcactcttcccctttctctctgctctctaaacacactgaccaa

SEQ ID NO: 121698 - DNA, 555 bp, Homo sapiens
tgcataacctgggacaaagagagtagtaagaacattaaaacataagaacattgatacatcccttgtagactaaattgcacacttcctctatatgcctgattgtaatactttatttgcatctatagagattgaatacagagagttgttgatactagtattttaacttcattatgaatatttttcaaagttaactaaaatatgttgtaaatcaagctttaactagagaattcacatctatgaagacataaagtgaagcaacagattatgagggctgtgamataggaactgtgtctaaagcagcttgtattatttcttggataaaagaaggataaataagtaaatgaactgtgatatacctggaatttaaggcatgtgcccatactcacatttggaggtaggcaggatataagtcaattctttcgttggcatatggcatataccatatgtatatggcatacaattcacatctgtagcagggatttcagcttgattctagacctatctgctaccagttttaaacatgcctgtcaggatgggcccagtgggaactagggg

SEQ ID NO: 121699 - DNA, 532 bp, Homo sapiens
gatttataagcatttaatcccccaaacaatcttttgaagtaggcattccccccatgttataaaggagaaagccaaggttcatcaagtttaagtaacttgtttgaggccctgcaaccagcaagtggtagccaccaaggacaaggtcacttagataagactctcccaacctctgaactttgattccataaccacacgtcatttaaaatctgcttgttgatctcatctagtgaatacctgtcaggttaatgtttcccaaatctaatgggtcaatcagaatcaggcttagaaagtttagtagaaactaaattctcagaacatacactgagagattctgattcagtactgcagaagtgaagtcytaaaggtctatatgttctaaaggccctctgggtaattacctatttcaagatgtaatactcaagagtaatttgatttttatatccattattgcctttaaattcaggaaatagaaaccagtaagtaaaaataaaaagtaaattattttttatcaaatgcatgaagtttaaaaggg

SEQ ID NO: 121700 - DNA, 625 bp, Homo sapiens
gtgagtcttacagctttgttctttttgctcaagactgatttggcttctttgtggtcttctgtgattccacacaaattttagaattgctttttatatttctgagaaaattgtcattgaaattttgatagggattgtagtaaacatttagattgttttgagtagtatggacatttaacaatattacttcttccaatacacaaatgtgggatacctmtttatgtcttcaatttcttgcatcaatattttatagttttcagaatgtagaacttttatcttcttggttaaatttatttctatgtattttatcctttctttcaaaagatatttttgatatcaccctttaacaaagacaaatgcttgctttagctgctaactaattcaagaacttttctctaattctatttagaaaattattgtgattagtctctggataaaattgcatgttctgatcaggcatctcagtcatctttataacagctgaattttagtgttataggcagtcagccattgctcactctgtattttgtttgtgttagccaattgtagctttattatctgtagaggatagagctatgtaagcatgctatagacataactttgactggcaaggagactaggtaacaag

SEQ ID NO: 121701 - DNA, 504 bp, Homo sapiens
tctgtgttctcaaagttttcctatactaccacatccacctccccacagctttcctctttcatatcgtttattcctctgtactaaaaatgttaacatgtctctccattaggctgttccttggggacagggactgtgtgttgtttgtttatcccagcactgtgatcttcatgatgcagcaaagcaaacataatgtcctcctgttttatgaatatgagacataacgcctctcacatttctggcaagagttgcagacctgtaaatcacttgttrtttagcctctttctgtttagccaggtcaaggcaagcatagggtagacatctgactttccagacgtcactgttgtatcctgatttccaccctgcagtgataagcccatgcagtccttcctcccacagacatttatgtgtcagtcaggcactgtgctgagcatagagtgtagacctatagtatagagatctgcccattgtctctttgagtatagacctgcccatctggttctgcag

SEQ ID NO: 121702 - DNA, 545 bp, Homo sapiens
gcctagctggaatcttaaagaagctagacttagaggagagatttartgagataaaattttctaagctgtgagatggttagacgtcctcatcacctcaattttccaagttttccaatcttactagcatggtgaagaacaaacagtgaaggctgtacagccagtaagaactgggttcaaatactggctccaccaattaatagatatatgaccttagtcaagccactaaatttccttgggcttcagcttttacagctataaaattagactaattttatttttaccgtcaagaattagagatgtttgtaaagttcttagcacattattgctcggtcataaaaacaagaaaaactgatacggtatttactaagtgtcaggcccttacttaattctccaaaaaccctatgaagtaggtactattattagcctcaattttatagatatgtaaatatgcacagataagtcatttacccaaggtcacactgctaaagtaaggggcagaattggcatttgaacccaaagaatctggcttcagagtcaagcctctt

SEQ ID NO: 121703 - DNA, 545 bp, Homo sapiens
gcctagctggaatcttaaagaagctagacttagaggagagatttaatgagataaaattttctaagctgtgagatggttagamgtcctcatcacctcaattttccaagttttccaatcttactagcatggtgaagaacaaacagtgaaggctgtacagccagtaagaactgggttcaaatactggctccaccaattaatagatatatgaccttagtcaagccactaaatttccttgggcttcagcttttacagctataaaattagactaattttatttttaccgtcaagaattagagatgtttgtaaagttcttagcacattattgctcggtcataaaaacaagaaaaactgatacggtatttactaagtgtcaggcccttacttaattctccaaaaaccctatgaagtaggtactattattagcctcaattttatagatatgtaaatatgcacagataagtcatttacccaaggtcacactgctaaagtaaggggcagaattggcatttgaacccaaagaatctggcttcagagtcaagcctctt

SEQ ID NO: 121704 - DNA, 645 bp, Homo sapiens
aatttccttgggcttcagcttttacagctataaaattagactaattttatttttaccgtcaagaattagagatgtttgtaaagttcttagcacattattgctcggtmataaaaacaagaaaaactgatacggtatttactaagtgtcaggcccttacttaattctccaaaaaccctatgaagtaggtactattattagcctcaattttatagatatgtaaatatgcacagataagtcatttacccaaggtcacactgctaaagtaaggggcagaattggcatttgaacccaaagaatctggcttcagagtcaagcctcttaatgttgctgtgttatgcctcttaataaaactgggtccaaagaccataatatcagcacatccctcttgggaaggttcttaaaataagaaaaaatatgtggttagactttcttcttgtgtactacctgataatgcaagggtcttggttaataagccagagtcaacagaaggcttaatatcatcatacaaacgtggggggaagccacttgtatgtggcaggctgtacgttatgatggttgacagatacaacaggaaagactgaaatgtacttggatttctgcactaagcaggttgtcaaaattatataatttttaagtacttgaatt

SEQ ID NO: 121705 - DNA, 453 bp, Homo sapiens
aagggaatgtctacaatctgggaagctctcagtgctatgagcccacaggcagcctttccttataaccaagagcaaagtgatactagggctgggctgcacagcagagactagaagatctatctccctgccttctaggcaggtctaggctagaagggaagaaggaaacccactttttgctggtgtttgcagttcttccttccaaaatacaggaagcacctgcactgcatgatgcctcagaccaggggaggccagtggccagcctctgcctgttgctctcccacttccacactgggtgctcctgcagggcacggcctgggtctgaggcttgggatcccagcgaggccagttccaagacaggagcctgggagctgctagaccagtgtgggtgggaccaggccagggtaaccacaggtttaaaytgggtggggaggagactctttgtagtaagcttct

SEQ ID NO: 121706 - DNA, 568 bp, Homo sapiens
agtccagacccccagcccctcctcctctgggaacacaggtgtcaggcccagctcttcctcggtggtgaagcagtggaaagagtcggcttrggcagctgtgggttcaggccctgcctctgccactctgcagcctatggtaggaagggcccctctctgccctgagcctcagccctaagagctcatcctggtctccagccctgagacccgtggaggcaccagcctggccctcagtgccttttggtgacgctgtgcgcccgctctcctacagagaccctgagggcgcggtggctcacgcacaggacgtcatctcggacctgctgtgcaaccgcatcgatatctcccagctggtcatcaccaaggagctgacccgcgcggcctccgactatgccggcaagcaggcccacgtggagctggccgagaggtcctgcgcggggcgggtggcctggccagaaattacccctccttcctgccagctgggccacttcctacaccctcgctcccacccccgccacccacctgccctcacccacccgccaccccgtctccacgcaggatgaggaagcgggac

SEQ ID NO: 121707 - DNA, 623 bp, Homo sapiens
ttattaatctttatggaatttaacaagcaagtttaattttataggatttcttatgaagctctttggaatgtgagatagtggtgacagtcatggtaagaaagactagaattggagtaatttattctagaaaacacaaggcaatccttgctgtagagaaaggttgctttcacagctccatttccttttgcatagtaagagggcattacgttgactaacagcagtttcttatcagtgtatgagaagtaagtcctcttattcaaccaatccttggataaatgactaaggatggctgcttcctactgaagagaatgtgggaggaaacattgattgggtggagaatgagaccgcaaggaaatatcaaacaattcctaaattagggagtcatgaattaagacctcacaggagaagaagggtgatgttctttttgagtaaagagagtatgatttacaaggcagcctgggaaagcaagcrttggtgggttggtggagaaagtaggccttgtataggcaagactgtagctatggctcctcttcctggctttctgcacctatgtcccaggcaatgcatgagtcatccaacacacggggccataaagcacttaatgaaggtcataccagagcaag

SEQ ID NO: 121708 - DNA, 588 bp, Homo sapiens
ttttttacatccaacttttgttattatttctacccaacttcagtacatatagtggtttattactgtacgttgagccaagttcaaacactgtcttctatcatctaagaccctacctctgtgcctctataggttcacttaggctatacttctatgcagattttaaagacaactgtctacacttattccaaacctttgaattctaaaatcctttccactttcttgatgaagtcttttatccccaattccagaacgcagagttgaaagatcccattgatggcagggagcaggaatatttcatcaaattccagatatccagcttaggaaagaaatgatagttaatacttttaaatcctttgatttttcagggctataaagcactgtgtaaacatgggagggcaggttacrtgcttaaagataaacccgcatgccctaagtaaatgttgcagagtaattaagctgagagaaattcacagttgatttccaaggataacaataacataagtggtaatctcaataatttgagaggttaccatatttcttaaacagaagctttgtcatcttttacagcgaacacacttggtaattgtc

SEQ ID NO: 121709 - DNA, 516 bp, Homo sapiens
tcagtttccttatttgtaaaatgaaattattcataccagagtctcaaattagatgtttcgtgctttataaatgatyatgttctacaactaaatggagcttctttgactaacctcttgtttcaggccacatgtgaccaacgtggctgttgctggaatccccagggagctgtaagtgttccctggtgctactattccaagaatcatagctaccatgtagagggcaaccttgtcaacacaaatgcaggtaagccagagtctgccatgatgcaggaggtccagaccctctggaggttgactctgtatcccccaggggcagcctgcagagttctgctctgtggggccatataaccacatgtgacagaaggtgggcattgctcttaatcgaggactagaatctatgtgggcaccaaggaaaaattattctctgccttgggagttgagagaccatgtcctctttccaacttccccatttatggaccttcatgactgcaataatcattgatcatttttgttttc

SEQ ID NO: 121710 - DNA, 578 bp, Homo sapiens
cacaatgaaatatcatctcaccctagttagaatggctattatcaaagagatagaaataacaaatgctgataaggatgcagagaaaggggaatgctcgcacactgttgctggaaatgtgaagtcattacggaaaacagtgtggaggtacctcaaaaaactaaaactagaactaccacatgatccagcaatcccactgctgggtatataccaccaccccaaaaggaaatcagtacatcagagagatatcttcacttctatatttattgcagcaccatttccaatagccaagatatggaatcawcccaagtgtccatcaatgatgaatggataaaatggaaatgtacctgtacacgatggaatatattattcagccttaaaaaagaataaaatcctgtcatttgcagcaacatggatggaactggagaatattatgttatgtgaaataagccaggcataggaagacaaatatgtgttctcattcatatgtgggagctagaaaagtggatgtcatggatggagagaggagaacggtggttaccagagaatgggaagggaagggggaaaggagatgaagagaa

SEQ ID NO: 121711 - DNA, 578 bp, Homo sapiens
cacaatgaaatatcatctcaccctagttagaatggctattatcaaagagatagaaataacaaatgctgataaggatgcagagaaaggggaatgctcgcacactgttgctggaaatgtgaagtcattacggaaaacagtgtggaggtacctcaaaaaactaaaactagaactaccacatgatccagcaatcccactgctgggtatataccaccaccccaaaaggaaatcagtacatcagagagatatcttcacttctatatttattgcagcaccatttccaatagccaagatatggaatcaacccaagtgtccatcaatgatgaatggataaaatggaaatgtacctgtacacgatggaatatattattcagccttaaaaaagaataaaatcctgtcatttgcagcaacatggatggaactggagaatattatgttatgtgaaataagccaggcataggaagacaaatatgtgttctcattcatatgtgggagctagaaaagtggatgtcatggatrgagagaggagaacggtggttaccagagaatgggaagggaagggggaaaggagatgaagagaa

SEQ ID NO: 121712 - DNA, 527 bp, Homo sapiens
aggatttcaacatgttttgaggaggactcaatttaacccgtaagaatactatgtgggccacacatgctgcttcacatctgttatcccagcactttgggaggttgaagcaggaggatcattgctcagggcgtaggggacaccaggtgcataaaaccacagcgttgactggcgtgggggcttacacctgtaagtttgggaagctaaggcaggacgatcacttgagcccaggagtttgaggccagcctgggtgacatagtgagatctcatttytaaaaaaaaaaaaaaaaaaaaaaatttaattagctgggcatggtggtagccgcctacagtcccagctactcaagaggtgaagcaggagggtcgcttgagtccagaagatcaaggctgtggcgagctgtgattgcacaacctgcactcacagcctgagcaatagagcaagccctgtctcaaaaaaaaaaaaaaaaaaaaaaaagaaggcatctccgcttgtctgtcggattccactgagctgtcatagaaaggaagtg

SEQ ID NO: 121713 - DNA, 375 bp, Homo sapiens
ttttttttggtgcaaatatatcccatgcaatatttgggacctgcttaccctaaaaaatgatttgttgtttatctgaaattcaagttwaactggcatcctgtcttttcacttgctacatatgagagttccgtgtgggggttatcagtgtgcatttgtgagttcccatgtgaaggactgtctccaagtgtctgtaggtgccaggatggagatggacagagaagatcctcttgggctgctttagtggtacctagaggctgtggggttggacacttcagccccaggggctgggcagcactgtccagcacctgcctgctcctgtcttcttcacgggggctgacttccctgccatctccctccaaatacggtagcaagagc

SEQ ID NO: 121714 - DNA, 375 bp, Homo sapiens
ttttttttggtgcaaatatatcccatgcaatatttgggacctgcttaccctaaaaaatgatttgttgtttatctgaaattcaagtttarctggcatcctgtcttttcacttgctacatatgagagttccgtgtgggggttatcagtgtgcatttgtgagttcccatgtgaaggactgtctccaagtgtctgtaggtgccaggatggagatggacagagaagatcctcttgggctgctttagtggtacctagaggctgtggggttggacacttcagccccaggggctgggcagcactgtccagcacctgcctgctcctgtcttcttcacgggggctgacttccctgccatctccctccaaatacggtagcaagagc

SEQ ID NO: 121715 - DNA, 375 bp, Homo sapiens
ttttttttggtgcaaatatatcccatgcaatatttgggacctgcttaccctaaaaaatgatttgttgtttatctgaaattcaagtttaactggcatcctgtcttttcacttgctacatatgagagttccgtgtgggggttatcagtgtgcatttgtgagttcccatgtgaaggactstctccaagtgtctgtaggtgccaggatggagatggacagagaagatcctcttgggctgctttagtggtacctagaggctgtggggttggacacttcagccccaggggctgggcagcactgtccagcacctgcctgctcctgtcttcttcacgggggctgacttccctgccatctccctccaaatacggtagcaagagc

SEQ ID NO: 121716 - DNA, 375 bp, Homo sapiens
ttttttttggtgcaaatatatcccatgcaatatttgggacctgcttaccctaaaaaatgatttgttgtttatctgaaattcaagtttaactggcatcctgtcttttcacttgctacatatgagagttccgtgtgggggttatcagtgtgcatttgtgagttcccatgtgaaggactgtctccaagtgtctgtaggtgccaggatggagatggacagagaagatcctcttgggctgctttagtggtacctagaggctgtggggttggacacttcagccccaggggctgggcagcactgtccagcacstgcctgctcctgtcttcttcacgggggctgacttccctgccatctccctccaaatacggtagcaagagc

SEQ ID NO: 121717 - DNA, 514 bp, Homo sapiens
atgtgtaaggaaaataaatcttggggcccccaaatcagtaagctaaagggaagagtcaagctgggaactacttagggtaaacctgcctcccattctattcctagtcacytctctgttcactgagataaatgcagatctgattgcttcctttggagaggccaattagaagctcaaatgaaggcaacaatttgtctcttatctacctatgacctggaagcccctgcccacttcaacttgtcccagctttcattctagttgtcctgcctttccagaccaaaccaatgttcatcttacatatgttgattgatgtctcgtgtctccttaaaatgtataaaaccaaactgtgctctgaccaccttggacacatatcatcagggcctcctgaggctgtctcatgggcatgcatcctcatccttggtaaaataaactttctaaatcaaccgagacatgtctcagatatttggggttcacatctagaagaaatggataaattcctacacacatacaacctacc

SEQ ID NO: 121718 - DNA, 514 bp, Homo sapiens
atgtgtaaggaaaataaatcttggggcccccaaatcagtaagctaaagggaagagtcaagctgggaactacttagggtaaacctgcctcccattctattcctagtcacctctctgttcactgagataaatgcagatctgattgcttcctttggagaggccaattagaagctcaaatgaaggcaacmatttgtctcttatctacctatgacctggaagcccctgcccacttcaacttgtcccagctttcattctagttgtcctgcctttccagaccaaaccaatgttcatcttacatatgttgattgatgtctcgtgtctccttaaaatgtataaaaccaaactgtgctctgaccaccttggacacatatcatcagggcctcctgaggctgtctcatgggcatgcatcctcatccttggtaaaataaactttctaaatcaaccgagacatgtctcagatatttggggttcacatctagaagaaatggataaattcctacacacatacaacctacc

SEQ ID NO: 121719 - DNA, 514 bp, Homo sapiens
atgtgtaaggaaaataaatcttggggcccccaaatcagtaagctaaagggaagagtcaagctgggaactacttagggtaaacctgcctcccattctattcctagtcacctctctgttcactgagataaatgcagatctgattgcttcctttggagaggccaattagaagctcaaatgaaggcaacaatttgtctcttatctacctatgacctggaagcccctgcccacttcaacttgtcccagctttcattctagttgtcctgcctttccagaccaaaccaatgttcatcttacatatgttgattgatgtctcgtgtctccttaaaatgtataaaaccaaactgtgctctgaccaccttggacacatatcatcagggcctcctgaggctgtctcatgggcatgcatcctcawccttggtaaaataaactttctaaatcaaccgagacatgtctcagatatttggggttcacatctagaagaaatggataaattcctacacacatacaacctacc

SEQ ID NO: 121720 - DNA, 430 bp, Homo sapiens
ccactagtcatgtgcccttgagtaatgtgtaaacttcacgaaaaaaatmaggaagccctcgggtttaagacatctagccatacttaaagtgaatatgagaggccccatcccactctcccagctgacatgagaacagatagaggtttcaaatgggctattttctggtgcaatgagatataagcctagatttcctatccctatgtctatttttcctctgttactttgagattacattacttgtagccttgagtgtttaaaagagaagatcaaacccatttatttaatgtcacaatcaatattgagcccaggggcatctacagaatagattctctgtaggcagtgttcactatggctttgaggagttcaggcagaatttatgagcacaattctttcttcagttagaaagaaagcacattcatgatatactaac

SEQ ID NO: 121721 - DNA, 538 bp, Homo sapiens
gagtgatagaaagggcttgaaatcagacaagccgtgtcagtgacacacaacagaaatgcagtcatataaagagaagatattacagcaacacatgatctgaagctgaatgccacagtgatacactcacattaaattgccagaggacatatcagtttttaaaacggtttaatttctttgaatatcattggactagagtttgcycaggtggcagaatttagctggggcctttggctgaaaattgttagtgcagtgaatgtttaccctgggtgggcaaaatattaaggatccctttcaagtttattttcaattgataaaatgcttattctcctaaccaagtcttaatctttatttagattatagtttaagacctcttaattgtaattctaaaaatggtatctaatccccttctatttttgacatggggctatgaaaaacagattaaaccaactacgtcaagaggtggtatgttatgggcaaaaagccatggatttgaaatctaaaccttaattattttcctggctatacaatttagtgttat

SEQ ID NO: 121722 - DNA, 587 bp, Homo sapiens
agtacatatcaggcattgtacccagagcattaatattatctcacattcatagtaaccttataaagtacctgccattactatccttattttacagatgaaggaaatgagacacaattgacagcctagtagtttcctaaggtcacaccactattaagtagcaaagctgaaactggaagctaggaatttgtcttcacgaagaataattctaagagtttctactaatatgcaaaatactgataaggtgaagccactttatacatcctttcacaaatcttaatttagaccaataaaatgattctaaaatttacttgaaggctaaaaaacatatatgaataataaggaaagtacagaaaaaagatagtaacttgttctaccagcttcctaaaagacatcagaatttagaatacaaagatgataattcaaataagttatgagaagyattcaataagtggtatggggcaactggttaatattcaatctggggaaaacaatttaagatgtcagccaatgttttgcatgatataaatcttattttagtataatacattgattataattaaagcataatatcttgatgttctgaattc

SEQ ID NO: 121723 - DNA, 467 bp, Homo sapiens
ctgtgtcaagttcactgacaagtctgtggaaggcatctgcattgctgtcactatgttattttctcttatattagcatttaattcagtacagttgccatctcttcagtaaaattcctgacctgttaatgtatgtttttcatatttttcattagatcccttaacatagtatcatcattattttaaattccctgacttatagttccaacatctgtgacatatttgtctaattttgttggttgctttgtctcttgacaatgaactcttttgtgcttttttctgtgtcttgtaatttttggttggaaattggacatcagcatatataattcaaaattaagataaacactggacaatacaaattgagataaatagtatttatacctggaaattggcatgcctcttcttttaataggcctttttttgagarttgaaggataagtaaatcttttccctctgcatggaatgtagca

SEQ ID NO: 121724 - DNA, 632 bp, Homo sapiens
cttggagagccccagggatgcctcttcctgttcagtaccaatggctgtttctagcagtggccttgggtaggtggccctgggttcaaatccttgttctgccaggaagagcgatgggacttgggaagtcagttgtcctttctccaggtttcagttcccccaacggcagtaaggaggctgtccgaccccgccgtggggtctgtgaaaatacaatgggatgtcgcacaccaggccccagcagggcagcccaggactcagtgcagctgtggttctgttaatttggcctctttgcttcaacagttgttttagtttcaccagaaataaatgcatatatttttttaaaaaccctgatactgcttattaatttccacatgcactaacctgccaaaaagcctgctgttctgacatccagaacaacaggggaagttcaggcaggaggtagaaagaggcccgggttycagacctggttcgcccttgctcaggttctcaccttgagtccctctcttgaccctgagtcatgactcttgatttctagtgacagaaaacccatctgaaaaacgacttaggtaaaacaggaggaggttgcttttggcatggcttcatccgagggctcagatgacatcaccagagaattc

SEQ ID NO: 121725 - DNA, 615 bp, Homo sapiens
gacgtgcttatatattcaaattacagagtcccatcttgcagcattattattttagttcatagctagttgtggcagtaccaagcagtttcaatagatcaatatatagctaaaaagaggggacatagcatgtgattgctgtctcgttttaatgtctctctggacccaagcagtttaaagtgttcagattcttcaaataaaagttattttttccatatatatayacacacacacacaaacatacctaaaaagaagaggataaagccatataaaactataattatctgtatgtaaagaagtagaaaagattctgatatgataaaattattaaattattaatccactaataataatattaattgaacactaatgacatttctgagcaaggcattttgcatgtatactttgtctcatcaatatcttacaacaaccttaaaagaacgttttaatttttctatgtcagttatggaaattgatgttcagagagactaaagtaatttgccttaggctgctcagatggtagatgacagagctgcgtgtcaaacccaacagtgtgtggcttcaaggccagtgctcatatttctatgccacgctatcaccagaattttatgattttaa

SEQ ID NO: 121726 - DNA, 615 bp, Homo sapiens
gacgtgcttatatattcaaattacagagtcccatcttgcagcattattattttagttcatagctagttgtggcagtaccaagcagtttcaatagatcaatatatagctaaaaagaggggacatagcatgtgattgctgtctcgttttaatgtctctctggacccaagcagtttaaagtgttcagattcttcaaataaaagttattttttccatatatatacacacacacacacaaacatacctaaaaagaagaggataaagccatataaaactataattatctgtatgtaaagaagtagaaaagattctgatatgataaaattattaaattattaatccactaataataatattaattgaacactaatgacatttctgagcaaggcattttgcatgtatactttgtctcatcaatatcttacaacaaccttaaaagaacgttttaattwttctatgtcagttatggaaattgatgttcagagagactaaagtaatttgccttaggctgctcagatggtagatgacagagctgcgtgtcaaacccaacagtgtgtggcttcaaggccagtgctcatatttctatgccacgctatcaccagaattttatgattttaa

SEQ ID NO: 121727 - DNA, 578 bp, Homo sapiens
tttttttccccacgcaattcttcttttctataataagctaaaagtaattgtgtgtgtgtgtgtgtgtgtgtgtgtgtgtgtgtgtgtatgtgtttgtatttttcagaattcttaaaacctttaagcaagttctgggccctgatattgatccttttgatatactaaccagattgaaagctccttgagcacaaatatacgtcagattcatcattaaattcatcataattccaggaccaaaagctcaaattggacaatttgcagtccccaaaaggtcaktgctttcagtcactaagaaatgtgcgagttgtgacactacacaggtgctccttgacttactatggggttgtgccccaataaactcattctctgttgaaaataacaagtcaaaagtgtgtttttgacacataggtttattcagacataaccgcgtggtaaattgagaagcatactgaatgtgtattgctttcttcccatttgtcaagtagaaaagttctaatttgaaccaatataagttgggaactaacattaggatgtaacatagattattattcagaaatgtctattttccattcacagtg

SEQ ID NO: 121728 - DNA, 601 bp, Homo sapiens
aaattacctctatgaacacaaactagaaaacatagaagaaatgaataaattcctggaaatacacaagctcccaagattgaaacaggaagaaattgaaatcctggccagaaaaataatgaatttcaaaactgaatcaataataaaaagcctcccaactaaaaagccctggaagagacagattcacagttgtattctagcagacatacaaagaagagctggtaccaattctactgaaattattccccccccaaaaaaaatgagkgacttctctctaacacattttactaggccagcagcattctgatactaaaatgtaagttctaaaatgagaatttttgtattttctggtataatatactatactatctatgcctagaaagcttccagaaacaccatacacacttaataaatatgtgaaaatgaatgaataaaaatgatggttcaccaccttctcccttgctttcctctttcagaagaactaaaaaatgaatattcatttttcctagctacatttcagtgtggtatgagcttattgtgtctcttgtaagtgagatatgtatggatgttttgtaggaagggattccttcccaaataaaaggta

SEQ ID NO: 121729 - DNA, 544 bp, Homo sapiens
tgaggagtatgaggaaagtgtctcaattacctttgcattttttctgtaaaaatattctaaaataattttatcttacaaaaagcaaagtggagaattaggataatcatttctgtcaagtatccattttccactagcaacagtgataaggtcttcaaaagtttgccatgatacctgaaggtattactttcaagtaagatgatgaaagttaacccatttcaaaccaaatgctagtatattcaaaaatgctagaatctctctttccattttaattatagttcttttttttccttttgagcagcagaataaagagtcatgggaaaagtgcttttgagcagcagaataaagagtcatgggaaaagtgctcttgatgtgtatatattcttaattttctgagcactaaatgatgctgcaacctgctatttagtgggtgctattgagaaaaaatatttgcaaacccatctctccccataaggttctcaaaggaatatatttttcrgaagttattaaagcaagtgaaaattttgagtgtcccttccttatgaga

SEQ ID NO: 121730 - DNA, 291 bp, Homo sapiens
tgcctcactttatagataaggaaagtgagccttaaagagacttaatacttgcccaaggtagcacagctggtaaatgatagtgctgggacttagaccaaggtcttttattctaggcacaagttctttacctctgttctattctggctttcaaatgccaatttagttatatgtcttaagagaagtggagaagccaagtatttgtgatctgaagctttgcagtaggaccaragcacctcacagccatttggcccatggacagtacttcccagaacatttcaaatgtttgcctca

SEQ ID NO: 121731 - DNA, 575 bp, Homo sapiens
taattaccagtctggaaataacacaaatgttcttcaacagacaaatggataaacacactgtagtacatctatccaatggaatagcagttagcaataacaatactttttatgggttgaattgtgcccccccccataaaaagatacgttgaagtccccacccccagtacctcacaatgtgacctcatttagaaatagggccattgaaaatgtaattagttaaraagaggtcatactggaatagggtggcttcctaattcaatatgactggtgtccatataaaaggagccatatgaaaatagacacatacataggaagaatgccatgtggcaaagaaaacagattttagttatgtaactgccagtcaaggaacacaaatggtttctggcaaaccaccagaagccaggaagaatcaagaaaagatgtcaagagtgagcacagcccagttggcaccttaatttcagacttgtggtcaccagcctcctgagaaaatgaatttgtgttgttttaagccacccaacctttgatagtttgttacagcagccctaggaaactgatacactaatgctacataaaat

SEQ ID NO: 121732 - DNA, 575 bp, Homo sapiens
taattaccagtctggaaataacacaaatgttcttcaacagacaaatggataaacacactgtagtacatctatccaatggaatagcagttagcaataacaatactttttatgggttgaattgtgcccccccccataaaaagatacgttgaagtccccacccccagtacctcacaatgtgacctcatttagaaatagggccattgaaaatgtaattagttaaaaagaggtcatactgkaatagggtggcttcctaattcaatatgactggtgtccatataaaaggagccatatgaaaatagacacatacataggaagaatgccatgtggcaaagaaaacagattttagttatgtaactgccagtcaaggaacacaaatggtttctggcaaaccaccagaagccaggaagaatcaagaaaagatgtcaagagtgagcacagcccagttggcaccttaatttcagacttgtggtcaccagcctcctgagaaaatgaatttgtgttgttttaagccacccaacctttgatagtttgttacagcagccctaggaaactgatacactaatgctacataaaat

SEQ ID NO: 121733 - DNA, 613 bp, Homo sapiens
  misc_feature (1)...(613): n = A,T,C or G
taattaatatgtaattgtgtaacaaattggaaaatatttacacaaaatagttaatccaatgtctgtcaggaactgattcaagctcccctttcagccaagaatactttggtcttaaaatttgatatctgatgacactaataaaagtggcacagctaagtttgacataataatctcctcaaatatttgaatgaatttatttttaaaaagtaaaacttcaatagaactcccaayagttgtacaaaatagtttaagttagattgctttaatttttactttattttttaaattaatataataattgtacataattatggggtgcatagtgatgttttgacacatataatgcacagtaatcagatcagggtaattagctatacattaaataccatatcaaacatttatcatttagttgtatttggaacattcaatattctccttccagctatttgaaattataatctattatcgttaactatagttaccctatagtagactgctttcttgacttaataaaataaaatgtttggattgaatcccacataaaataatgtgcttctatctgactctatccttgatttctnnnnnnnnnnnnnnnnnnnnnnnnnnnnnnnnn

SEQ ID NO: 121734 - DNA, 613 bp, Homo sapiens
  misc_feature (1)...(613): n = A,T,C or G
taattaatatgtaattgtgtaacaaattggaaaatatttacacaaaatagttaatccaatgtctgtcaggaactgattcaagctcccctttcagccaagaatactttggtcttaaaatttgatatctgatgacactaataaaagtggcacagctaagtttgacataataatctcctcaaatatttgaatgaatttatttttaaaaagtaaaacttcaatagaactcccaacagttgtacaaaatagtttaagttagattgctttawtttttactttattttttaaattaatataataattgtacataattatggggtgcatagtgatgttttgacacatataatgcacagtaatcagatcagggtaattagctatacattaaataccatatcaaacatttatcatttagttgtatttggaacattcaatattctccttccagctatttgaaattataatctattatcgttaactatagttaccctatagtagactgctttcttgacttaataaaataaaatgtttggattgaatcccacataaaataatgtgcttctatctgactctatccttgatttctnnnnnnnnnnnnnnnnnnnnnnnnnnnnnnnnn

SEQ ID NO: 121735 - DNA, 634 bp, Homo sapiens
tctccatttaaactactgaatggtgaaataagacacaatacattatttttctcctcctcatcctcctcctcctcctcttcctcttctttctttcccaaagtaggagtcaaatcacagtgtttagccaactctccagttgcagagttccagtgacatcaaagaattgccaactctctctcatttaccaacacctgggaagaatcaatgtctctttcagttatcagcccatcgatgtgttggtrcccttttgagcactgactttgtgaattcagttctgtaccaggcattctagacatgcttatcaccccctccaagaatctgcggtccacttagggaagcaagatgaatatacatcaagcagtgagaggaaagaaaaaaatggcctataattcaatactaaattagtgataaggattttgtgtgtgtgtgtgtgcaagggttagggctagggtggtgcaatagtgtaaggaagtatggagcatgtcagcagtcgtagcaggcttcccttcaatggtagtgtctgtgggtagccagccctgtgccgattaagtgtgtgggactaaatgcaacccaactccactgatgatataagacatccattttcctcttttctgcaacagggggcaaggacacc

SEQ ID NO: 121736 - DNA, 545 bp, Homo sapiens
caggcacagcaatctgcgccccatcaatatgatttttccatggcatcatgttgacagtcagcagctgacacatcacctccctctgcaggagcatctctgaagccccggggaagggttttcccaaagcccaggcaaggataggagcatcgcctcacctggagagggttgggggatttaaaacacactttcacatacatcatctcactttatcatcatcttaaccgagagacacaggtaggtactgtcatcctcactgtacaaagtccagagaaaatgaggtattggagaagtcaggagatttgctcaaaaccaggtagctacatatttctggagcttggtgacttacaaaacccattgcaacttgagcygggaagctggccgggacattgggcatgttctggggcacttcagacactcccagctctcttagggccatgactggtctggaggagagactagaagtggggcacaccagcagggttggcttcaaagagaatcctggaaatgacaaggtaattgtctttccttcttattccctcccttct

SEQ ID NO: 121737 - DNA, 441 bp, Homo sapiens
gaattctgcaggtcaacttatgtatgtacattaatttattactcaatcttgttttaatttataatttttgttgttataagcaatgcttttatgaacaatcttgtaataaaacattgttccgagattctttccttttttttttttttgtgagatggagtcttgctctttcgcccaggctggagtgcagtagcacaatcttggctcactgcaacctctgccagccgggttcaaacaattctcctgcctcagcctcctaagtagctgtgatttcagttgcacatcaccatgcccagctattgttttctgtttctagtagagattgggtttcacatgttggccaggctagtctcaractcctgacctcaagtgatctgcctgcctctgcctcccaaagtgctgggatcacaggcatgagccaccacgcctggccaagattcttct

SEQ ID NO: 121738 - DNA, 619 bp, Homo sapiens
gcacaataacccaagccaccttttattatgatctttgtgcttccgggtgcatgtttaagtcacctagagtaaaccacaattgtgcagtacccgcaggtgactattagtataactcatcaggaagaaaaccatgtgaactgtcatcagttatgatagtttcctaatagtcaaatggaatcacagttgctaaattgggcctcatttgtgcatttgttgtatgtcatgatcttgccctgaaatggcaaaacactgagaaaatatctaaaaatgggcaaagaaatgcagaaattgaatacctgagccagaacccttttttttttttaactcatttctacggagggatactacggtataatattacccagagctaggtgtttatatagcctcagctgactccaattcctgaggcctgtaggaccaactgcttttgaaatacaagcaatgygagcctcaaggatgaaggacccagagagtatttggaactcctctgtggttgttgcttttaatgttacacggtctggcctttaggaaccatttacgatttaggttataagagagaaggagaatgtgaaccaattctacccagtaataatcacccacaccaaaaactggtcttaaa

SEQ ID NO: 121739 - DNA, 627 bp, Homo sapiens
tcaagttgacacataaaatggatgatcacaagtccacctcttgtcaacttagcacccatatgcatctctttaaactgtgcttaattttcaaataaagacaatatcagggtcatgattccacctagcatgatacaactatcctgcatacgacctacaacacaccaatctcttccttaagtccctgaccgttgtttaatcttctttgaatgtaccataagttcaatactacgttgtaatataataatgcttaaactgatttatatatctacaatggactactattcaggtattaaaaagctatgaaaaaaagaattaaaaccagccaggcatggtgggtcatgcctgtaatcccagcactttgggaggtcgaygcaagaggatcacttgtgttcaggagttcgagacaagcctaagcaaaatagtgagacctcgtctctacaaaaaatcaaaaattagccaggcatggtgacatgtgcctgtggtccccgatactcaagagactgaggtggaaggatcgcttcagtccaggaggtcaaggctgtagtcagccgtgattgcaccactgcactcagcttgggtgacagagtgaaaccctataaaacaaaacaaaaaaaaaaacaaaaaaat

SEQ ID NO: 121740 - DNA, 614 bp, Homo sapiens
ttttgttttctacatgatttaagaggttaactcatttaaagaaaacaattattactctaagtgctaatagaaatgtaactttggtttgtaactccacattttgttttccacataatttagaaactaatgcatttttaaagttattagtttatcttggggggcacataatatataaaggtataatcttatgatgtcaaatactaaaaaggcgggacagggaggctcacacctataatcccagcacttttggaggccaaggtgggaagatgcttgagctcaggagtttgaaactagcctaggcaacatagtgagactctgactttacaatttttttaaatttaataaattagccacgtgtggtggttcatgccatagttctagctactcaagaggctgaggtagttgtatcgcttgagcctgagaggttgaagctgcaatgagccattactgcaccactgtgctccagcctgggctacagagyaaaaccctgtcttaaaacaaaacaatacaaacaaacaaaaaaacaactacaaggtgtggggatagagctataaaggaaggagagcttgtgtacattactaaagttaagctggtgtaaattcaaattagagtat

SEQ ID NO: 121741 - DNA, 654 bp, Homo sapiens
atggtttgttaagctttttggatttgcagcctgttatatttcatcaattctggaaatctacagacactttttttttttcaaatggatctcccaacttcatttttcttatggtactctaataattacatcattttagatggcttgtttttacattacaagttacaaaggacaccttattttttcagccagttaaaattattattcagagcttcacattatatattttctattggagtgttttgaagttaattgatctttctctttgtattatctaatatgctgtatcaattagctgtctgtttctatacctaaatatctgagactgcgtaaaggaaagrgattgatttagctcatgattgtagtgactggaaagtccaagagcatagcactggcatctgctgagcttctggtaggggccacatgctgcatcacagcatggccaagaagcagaaaggtaagtgggcacgtgaaaagagagaccaaagatgaggagtgctcttgctttataagaaacagctttcataaaaattaaactattccagtgataactagtccactctcaagagacgaagaactcacttagtactgcaagaatgacactaagccacccatgagggtgataccccataacccaaatgcctctcattaggcctc

SEQ ID NO: 121742 - DNA, 591 bp, Homo sapiens
tgcatgtatatatttagcaccatgcattaaattgcctggatcattgcatcccaatagcaatgagtctttctaaggcccaggtcttggcttctaagttccattttccacttaagagaaccagaagtaactgattccagagctaagtaggaaagtataagataaacttgaacaccttgtagtgccaaagtgctcaaagaatgacgaggacttgtcgaaagatcacagaaatcaacataaatggaattcccaatggtcaaactggattaacataagtatcaaaattaaaaaaaaaactcaaattgtataataaattatataattttttagttcatctggatgaatacgcaaattgtataatttttttagtatmtttccagatgaactaaaaattattctaccacttaattaaaatttcctaaggtattttattggaatgtccttaaattgatcaataactttttgaagaaaagactaaaagtcttctcaaaattaaattatttctttaaggaaaatgatatatattttcacatatttgcaactatattttaatttctaagcaaagttgtacagtttttgtgtgtgtgtttgtgt

SEQ ID NO: 121743 - DNA, 591 bp, Homo sapiens
tgcatgtatatatttagcaccatgcattaaattgcctggatcattgcatcccaatagcaatgagtctttctaaggcccaggtcttggcttctaagttccattttccacttaagagaaccagaagtaactgattccagagctaagtaggaaagtataagataaacttgaacaccttgtagtgccaaagtgctcaaagaatgacgaggacttgtcgaaagatcacagaaatcaacataaatggaattcccaatggtcaaactggattaacataagtatcaaaattaaaaaaaaaactcaaattgtataataaattatataattttttagttcatctggatgaatacgcaaattgtataatttttttagtatctttccagatgaactaaaaattattctaccacttaattaaaatttcctaaggtattttattggaatgtccttaaattgaycaataactttttgaagaaaagactaaaagtcttctcaaaattaaattatttctttaaggaaaatgatatatattttcacatatttgcaactatattttaatttctaagcaaagttgtacagtttttgtgtgtgtgtttgtgt

SEQ ID NO: 121744 - DNA, 502 bp, Homo sapiens
cttcccttccaatttcaaaggtagtcttctttcactatctgttggtgcttggtaccaggaccccccatggatactaaaatccatgtatactcaagtctgtaatgtaaaatggcatcatatttgcctacaccatgcatatcacatccttctgtacactttaagtaatctctagattacttataattcttaatataatgcctacacttcatttcattcatgtaaattcaatgtagtactccacatgcagcaaattcaaattttgctttttggaattttgtggatatttttctgagtatatttgacccatggttgattgaatctatggatacagaacccakgggtaagtaaggtccaccgtactggtatacatggaggaaatatattatttccagacagtcaatcagctctctgtcaggtaaaaaaaaattaaaaagtgatagtaacaaacaatctttggtctatagagattcagtagcaggccagcaaacttctggtatggtga

SEQ ID NO: 121745 - DNA, 640 bp, Homo sapiens
gggtgtatccaagtctaatgtttatagtgactgataaatacaaattcatgataccaacatttccactctctcacttcatgcttcacttttacatttgggtcttggtcttggcaaacattcattcttcttctcaaggggcacaaatgggaagagaaagagcctaaactctattttgagataatgatcatccaagctcctggtttcacagccttagtggagataggttggattgctgaaatgtagtgtggtaaatagaaaaatcaaagacagttatttctacatttaagtcattatatatccacttgcaattgttgaacrtgggtaaattgtttatccttttaccatcttgtaagtatggttctgtgttagtctgtccaggctgctataacaaagtatcataaactagatagcttataaacaaacatttatttctgttagttctggaggctgcaatgtccaaggttaaggtactgacagatttggtgttcgacgagggcctgtcactcatagacagtgtcttctggctgcatgcttgtgtggtaaaaggcgcattttttataagggcagtatttccctcataaaataatagcttccgaaagtcctacatcttaagacaatcatcttgggggttaggatttta

SEQ ID NO: 121746 - DNA, 499 bp, Homo sapiens
gatagctttgtaacaaaagttaatgaaaatactgtgaaaaatatattgcaagcatatcaatttactttattttcaataaaaccatccaagaaaaaatgatttttctgaaaagcattaatctaaagcaattatatcagatttgttgacagccattatccaatatttaggataactcacaatttttataaraaaaatttcagatcatttcttgaacatgcatttctacagtgagttgtttctctggagtatattgtctattgaccaggcagctgacactactctcatgagtgatagagcctttgtaattatttctttaaaaagtgatttatgagagcagaatgccatctgtggaaattgaacagaaaaaggtggctccatacacttgtattgtagtgaacaattaaagtgagccaattaccactgaatttgatcaattttaattcaagtttctagtttccacgatgatgcagatggttctttctgaaatataaacctgatg

SEQ ID NO: 121747 - DNA, 575 bp, Homo sapiens
tgattcttcatgtgagttcaatgaattaatttctttatgaggttatgtttaacatttaatttatttaagtctatcattttaatttcatcccaacaagtcagcaattggttggaattttgatttctgtgtagatttttctagagaatatgaagacattacataagtaatgtcttcatattcgaatgtgtgctgtgcttgtgawagcacttcttatcgttgtagaactgatggcacaatttcactataaaactgtatgctgatttcaagtgtcccacctgttccaggaaaacattgtgccagctccaacaatcaaagccggttttttatttggtctttttagttctcaaagccattatagtgtagtttaaaagtaaagatgtgaactatattcactcatggattattcaccaaaagttttagcacaatgttagctcagtcacaaaaatcaatgtctttcagatatacgtgaaaaatagatagacacagatatgttattacttaagttgtcagttagccttcattaaaatgtaaggaaaaaataaaacattttattaaataaagagaagttcaaagaa

SEQ ID NO: 121748 - DNA, 599 bp, Homo sapiens
gctgggattacaggcatgagccactgcacccgaccagatctggattttttwaaaagaactatacttttgcaggctatggtgatgataagcaaatcccatatgtggtggtacaaaatcttccccagaggactcaaagaattttcacacatggcatagttggccaaatgtataataaatttgttattttttcctttccaaacatacccaaaagctcgtctttcttatctactccgagaaagcctcacatgcttgaaatgttctttgagacaagaactctgtcaggacatatccatatttatagaaagggcaggctgggtgtgatggctcatgcctgtaatcccagccctttgggaggctaaggtgggaggatcacttgagcctgggaattcaagaccagcctgggcaacatagcgtgtaacgtctctacattaaaaaaaaaaaaaaattagctggccatggtggcatgtgcctacagtcccagcttcttgggaagctgaggcagggggattgcttgagcccaggaggttgaggctgcagtgagctatgattgaaccactgcaatccagcctgggtgacagagctagaccctgtctcaaaaa

SEQ ID NO: 121749 - DNA, 595 bp, Homo sapiens
gctttaaaatgctttgcaccactctcagagtcattgggttatatgtttttagctaatcattggttagtaataaagaggctgcccctcttgaggtggtgactgacgcagttatgtcttctgcatccttatgcttaaaaacagcatcatcttgagcgtaaagtaaacattcttaagtaataactgagcagatragtccaatataaatagcgttcaaatcaccagaacctagttccccaggtgaaactttttcattttacagacaaaagaaacagagatttgaaatgatttgcttttgggattttgaaagttggaaattggaaaataaaatctagcttctcaaagctagaaagccttcctttaatttttgatgcacagtgtttctattctaaagtaggcatacatgaaatgccagcactgggctttgaattattcaaactccactttgctcatcctccctcgtgcctacttgtcccactgtgggtgcgcaggaaatgcttgttaagtagctcaccactcttaatcagaaacttgggaataagagtgtttagcatttgagtttaattaaggttttaaactttcaggagtgcttccttaa

SEQ ID NO: 121750 - DNA, 582 bp, Homo sapiens
agactcagaagttctttcttgcttatgtatttggtgatcctcatcaacacaatcatttaaaaagcttatgaggaagtaagtatattaacctttcatgtttgaaggtgttatagaacttaatgaaactgatttccttttaatcaggacaacttgtgcaatgtaattttagatgcatgccaacaggcaatctsccacagtacggcttccatatttgggatgaggcaacaggttgccagcttcaaagcaggaaaagttcttatacagaaaagtgaagcaaatattcatttaataataatgtgtaattattattatattatgtaatgatagtttagccactttttattatttctatgtagattatttattttgttgcatacttttatgttagcccagcttcaatttgccacatgaaaactcctcaactccctccctaccaatatttgtatgcactctgggagggataaccccagggcacatcctctgcttcctactgttgcaatcaatcaagaggcaggactaatgccagattcactgttcatagcagacttttacagtaggtcacggtatagtttgaagagcatg

SEQ ID NO: 121751 - DNA, 525 bp, Homo sapiens
tcagagtggaggcagctggcaaggaggcagtcaggagaccctactaatatagggaatccaaatgaaggagaaaaatcatgatggcacagctagaaactaatagagaagaaaaaataccccaggcattttggccttgttttacaacatatttcttagctttttgatrgcaatggaagcttttttgaagttgtcttttgtttcctgcctttactgtatgctctgaattcccttctctttcatgctttttggtttgcatctattctttcatattggaggctttgtcaaacattctgtggaccttatctgtttgcatatatttaaatgcaaggcactgaaagacaaaagacctattcaaggcagagtacaaagtggaccagggcaggtaagtgggagagctgtgattgtcaaatggtggctccattttaagggcatcctgcagggaattggttcatcgagagaatatgaagtgcaagtccatgcagatcttttctctgaggctgttctgtttccctagagagattccca

SEQ ID NO: 121752 - DNA, 597 bp, Homo sapiens
caagacctcggtggacaaactctaacaagctcttaccaacgtcaggataacacttttggaataccacgtgtggacaggagtcctaaaatgttcaggtaaccaatgactgccaccattaattcaatgagatgaccagctcagagataggcagcctagattctagtctcacttgccttcctgaggctcaatttccaagaaatactccaaacagctacaaaaccacaggtctactggttcaggcagtcttttcccacattaagttcatcattcacaaatggcattcttcctaatagacaaggttattcactgtcttctctggtgtgactgtcaytgttttatgtcttagttaatggcccagagagcctcctgaagtggaggatagggaagtaaagaagtgcatcactccataactctctaccaatgagatgggccagtaaggtatgtgaataaaaatgccacaccatcataatgaaaatggggacaattcaaggtatggctcttctgctctcttaacaaatgccaacttgactactaggcagataagcaaggatagaagatcactccttacactgatgagggccagtcaaggggggggtc

SEQ ID NO: 121753 - DNA, 587 bp, Homo sapiens
acagctcctcgtctatttccagacagcactgcacaaggcaagccggcttagtctgacaaatctggctgcacttatttatagcagggagaagtcctgcagaagtatgtgttggcagacacactgaccaatagcttctgctatctctaagtgacacgacttttgttcaaaartcagtaaggcagacaacagctaatgtggtacattatcccttaaaaagaccacactcagctacctttgcgctcctatggccatggacagaactcagcttggagcacactggattgacagtagcaatacctagtccctctcaacatgtccaattctctggtctcagccgcaacctgggcaggtagtaactctgggcctcagacagaaaacaaaggggggaccccaaaactagggacctggagatgctttgccatagaatggcttgtttctcccagtaatgatctctgcagttgttcccttttaatctggagtcacgtgcagcctctgatcaggtttcctctggcctccctcctgccacgcctgcagcatacctctctccatgctccacgctaaggccacaatctgaggtggcagagcac

SEQ ID NO: 121754 - DNA, 579 bp, Homo sapiens
tctttattaagaactttaagtcatcaatttttaaccacgtgttacataccagctacagagctggatgctgggatacagatatgtttgctctcagcaaattsatggttgtgctggggaggccggcatgtcaaagatccagggtgagcatcaatctgtgcagggatgtgaatgtgtggtgatggcagagaatgtacaagtctgtgtggtaggaggcacaggcaagccccttcttcctacaatgctctgagatctggagccacactccttcctgctcacacatgaaaacatgtatgcttataccaacatcaacagacagcatcccacaggagcaagataaggcacacggatcctagatgtgctcaataaatatttatcgagcaagtaaaagacctaggtctaaatgcaagctccacaacacgttgactgtgtaactacagaggtgtgcatttgaaaagcatgttagagggaatgatttacttcatatatggtggattagggcggtgtgtgacagagttgtgccttttatttctattaagctctgagataatgcttttacatgtatccacacactaatgttta

SEQ ID NO: 121755 - DNA, 579 bp, Homo sapiens
tctttattaagaactttaagtcatcaatttttaaccacgtgttacataccagctacagagctggatgctgggatacagatatgtttgctctcagcaaattcatggttgtgctggggaggccggcatgtcaaagatccagggtgagcatcaatctgtgcagggatgtgaatgtgtggtgatggcagagaatgtacaagtctgtgtggtaggaggcacaggcaagccccttcttcctacaatgctctgagatctggagccacactccttcctgctcacacatgaaaacatgtatgcttataccaacatcaacagacagcatcccacaggagcaagataaggcacacggatcctagatgtgctcaataaatatttatcgagcaagtaaaagacctaggtctaaatgcaagctccacaacacgttgactgtgtaactacagaggtgtgcatttgaaaagcatgttagagggaatgatttactycatatatggtggattagggcggtgtgtgacagagttgtgccttttatttctattaagctctgagataatgcttttacatgtatccacacactaatgttta

SEQ ID NO: 121756 - DNA, 563 bp, Homo sapiens
aagacattaacaacactaccaaccaacctgacctaattgatgcttattgactatttcacccaacaacagaaaaagacacatttagtccatattctaagctataaaacacaactataaatttgttaagacatgttttattgcttagaatatgcttagaatatagaatagaataagtaaattagtccatattctaagctataaaacatgtcttaacaaatgtaaaacaatttttcacaaaatgtatggtctcaggccacaatggaattcagtaagaaatgaagaaaaagacatttgaaaaccccctaaatatttagaacctaaataaaacacttttaaataccatttaggtaaaaaagkaacacatcattgagaaattagaaagtgttctaaaattaataaaaataaaaacactcatatataattatgtaggatgtcattaaagcacagcttagaatgcagttgactatattagaaatcaagaaaggcctcaaatcgattatctcagtttctacctttagaaactagaaaaagagagcccagataagagaatataggatataata

SEQ ID NO: 121757 - DNA, 609 bp, Homo sapiens
atttttccagtaggaaacagtgctctgaattttggaagtaaacagtgtctatacatacaaaattggtcatacatgtattttgggcactgtcatccaaaagatttgtggatatgcaggcaaggtgtttacatcatacttatttaggtgcccccacctccaccccacagcagaagacaatttttccaggtcccttcagctggaacaatttatcaactgrttccagtagggaaaaggcaaaatagaattcagctcattatgtaaatcaatcatgtttcttctcatgtttatttatccaatgctagctcgatctgctaaatcaagttagtagccagatcctctgaatcctccattgactttattcaggcatattgggtggtagtctggtcatattttacaccctctgcttcatatgtctaaggctcaggtttataattctcactttaatggcccaaaacctgagctgtaaggtgaaatcctttatattgttcataatgttctgtttagtaacaaatgatgtttagagatattggtaccttttacagtcatgaaaataacacaagcttttctccaacaatgatcttccttttaaattgttttaattcacatttt

SEQ ID NO: 121758 - DNA, 655 bp, Homo sapiens
ccatctatgaacaagtaatgaacccttagtggacattggatctgtcagcaccatgatcttagactttccagttttcagaacagtrtgaaataaacttctgttgtttataagccagcctatggtaccttgttatggtagcccaaatggactatgacagtataagacatggaaataataggaattttaagcaattataaatcatgtatttattctttatatattctgaatccattcaatcaatataaaataaatgtggcagctaagtgctatgtaatgcattttgcagaagataaggtgtctaaatttatattttcatgaagagactttgttttctaaactgtctttggtttacaaaaataattgagcagaaagtacaaagttcctatatgccccctcattttatttttttctcattccccccattattaacattttgcatcagtatggtatatttgttataattagtgagctaatattaatatattaatattcactaagtcctagtttacgttttattattaactagtccacgtgtcagaatttattctttatgttgaatgttctataggttttaaatgtgtaatgatatatgtcaaccattacagtattacacataataggcatgccctaaaactctcttactcatcccttattt

SEQ ID NO: 121759 - DNA, 545 bp, Homo sapiens
atctttcattataattagatatagggagtatgcgggacccgaactcaaggctttatgttgttatctctttaagaaaaatcctgggaacttcatacattgttggtgctagtaccttatcagttaactgggctcctttgaaatactgaggatctgcttacacaggtcaactcctcgcggaagggggttgggtaaggagcccttagtgtcttgtaaattaaggggtcaactggagtttgtccggctttcccagctagagagagtcttatttacacgggaagcaaggctaggtgattaaagagacaagcaggataaaattccaagtagcgagttagagtaaaaacaagrttaggcatttcagtggaaacccctaagtttcattggccatggccagaaacctgcagttgtctccatgtttaggtgctacccaccaagggtcccaacttggaaaagaaaagagagagagagtccctgtatggagcagaaaggaaagggagaaaaatgaatctcaaactttgggcttacctcttcctcctggctggttcgtc

SEQ ID NO: 121760 - DNA, 582 bp, Homo sapiens
ttaatagggaaagacattttagaattatacaatacccacatctctttctcacaaaaggggaaaagatatttataattagaatataaagtagaattgttacacttaaaacctctctgacccttaaaaaaatactctagaggccttggaagggatgagacctataaatttgcattacataaaaagaggcttgattattctctgtacagccctatcccatgtaacatttcaattcagtggtaccaaatcctcctatgttttttactgtcatcccatctgaaggtgagttatttactgcgatcattaatattttcaacttgacttgattgaaggatgcaaagcattgtttctgggtgtatcttggtatttctgggtgttgccagaagagattaacattttcagtcagtggactcrgagaggaagacctgccctctggaagacctacccatattgtaggtaggcaccatccaattggctaccagcactgctagaaaaagcaggcagaaaaagatgaaagatgccaatttgctgaatcttccgggcttcatctttctcccgggctgaatgcttcctgcccttgaacat

SEQ ID NO: 121761 - DNA, 608 bp, Homo sapiens
cagtgttttaagtgcttctgcctagtgactgtctcataagatgagtgccatgaagatacaagaaaaggtcaagaagactttgcaatatagttgactatggagacaataggattatctgtgagtggtgaagatctggatttctaatcttccctcatttggtcaacctgttagaagtgagaaaatgaccaaaaagaggaaaggagagattgaatatacgaacagacaatggccagtccatatatgaaaatagaactctgaacaaaaacttctgcagcaaccatcccagggagctgaaccacagcttctccagcaaatagtccagggaatgaaactacaacctctatagcaattgtttcagaacagtaatcacttcttcaatcactaagacgtgatatctttcctcacccatcataagggacacagctgacastcctataacaaaagacagcaagaggaagcataaaggatttatttaatcaaagtttacatgacatggaggccttcagaaatgaagactcaaagactcagggaaaactgtctatttttatgcttagcttcaataaggaattggcagccatgtggaaatataattggacaaaagggtatga

SEQ ID NO: 121762 - DNA, 565 bp, Homo sapiens
gaaaatctaaaagttaattttagacccaagagacttaatgtaggatattaatcctggagaaagctgccaaaaatgtcaaaaggtttaaaacacttaattgaaacagaatcacaggtcatcgtaaaataataactatttatttaactagagcaataatcaaaagacacaaaaacctcaacctttgaaagctcagttttcctaaataataaaaaaatctaaataagacaacacaggaattatcttgataaaatgtaaaatctttsttttttatgccagtgtcaaaaaggtccagaaaaacttcctgtattgtgattacagctccttaagtgaagcccatttggataagctggaagtcaaaactgatgaaaaggatacttgaatttaattagacatagaaagaccgtgttcagggttacaagtacacattatattttcgaggaatgtaaacaagaaaactagtaccttgaaatgggaaatatatggcttttagtaacagcttgggaagcttcctggttacattgaccaatttagacataccaagcaaagccaggtgcacagatcacat

SEQ ID NO: 121763 - DNA, 614 bp, Homo sapiens
atctaatgccaccactgatctgacaggaggcggagctcaggaggtaatgctcgctagcccgctgctcacctcctgctgtgccacccagtttttaataggccacagaccggtattcgtatccgtccaaggcccaggggttagggacccccaggtataggtaacctgtaagacmtgtacaacatggcctttcctcatctccctaacattatctccaaccactctttctctcacatgcataaaacattttgccatatcaagatctttatattctctgtttattactcctgcctattcccaagtctttttacgtccaaaatcttcattttgcatcacatcagtattctgcccagatttgcctccccaaggagaattgtcttcaccagtctatctaaaataaccaaaattctttctaccagtcactctctatttccttaatgtgatttattttccccacagattaatgaaagtatggaattatatctgtttacatgcttattgtttgtttgtcataggcttctggcatttacacattagaatgtaaactccataagggaaaatattattttacccattcattgtcatattgtcatgtaaccatatatttgctgaatgta

SEQ ID NO: 121764 - DNA, 626 bp, Homo sapiens
tgttatatatccacatatttcgcccaagctcatcagaagggaagaaaggccatgtacagccttcctacctgcatgtgtagggcctcttacttgggcagcctggtgcaccacctgacactggcttagttcctcagcctcctgatccacttcagcctggtatcagctgtacatggggactgtgtggggtccagatccacttcaggccagacaggagaccrgtcaccgcagtgtcacaggtgggtgtccggaaaccaccacatccaataatgccatttggatcaactacccgctagtaaagttctgaaaaactaaaacaacaattgcttattgatttgtacatacattgcatttctggaattcaagcatataataaaaataagcaaaaaaaaatactttagcattttataaaaactagacatatgttctaggcccatgcaattataatcaggttttttacttacatgagtgtcaggttggccattcaaaatcatgtggggcacaggataattatctattttgtgggagggactatacaatgtattacaggacgtttagcctacctaagccctgccctccaaacaccagtgggccccttctgtcattcatcatcataataaaaaaccatc

SEQ ID NO: 121765 - DNA, 572 bp, Homo sapiens
aagagttgatggtgataaggccaaaggaagccaggcaagaagataaagtcatgaagaacaatgtttattcatttaataagtaggcatttacaatgcagttttgtagaatttggctgtggaagacagatgtaagtaaaagttacaaataaggaagtttrcattcaaagtaaaggtttttttaataactagcgctacttaatgcaggcctgagaggtctcctggtgaggtgatcttacattcattacaagcacttagcaggagccaaagaactccttatgagacaggtagataggatttctgtgttgggtaaaatatttgactagataagccctaagtctcatttataattgcaattctctggaggcttttgcctcaatggagagagcatcttcttctttgatataaataatgccttgagaaaatgccttcttttcttccttttttcactcagtatatcaagcattacagttgcttgatatgtgctttttgagccctagcaggttgttctggagaaggatagagataaaatttgttttttccatgccaagcttgcatgcacacatgcacgtaca

SEQ ID NO: 121766 - DNA, 526 bp, Homo sapiens
aatttcgtgctttgattcaggtcatatcttgtcaaagtgtaatcaagcttactttagcagacaatggccaaatacagcctgtggttctgtttgaggagggacattctcacatacttccaatgtcagatggatttagggtataattagttatgaaaaagcatgtttagctcaacacatgcactatcaaagtgttaattttttttctaaaaggtactggttgtttttccattatttaaggcactcaggcaaacaataaaagactattttggtgacatgctgagacaagatgacctayagataatcaggaatccctttaaaattgttacagaaagagctatttatggattctaaaatttagctgtaaatgcaactgttcttctccagtctttgctccattgcctctctaagcaaaccaaatatatctaacacatcccctttttgtcccttagagagataggttaaaggctttaagaataaaatatagatcagctgtcaactaccagaggagaactatttcaataatatg

SEQ ID NO: 121767 - DNA, 609 bp, Homo sapiens
tcctctgtgatgaatcagccaaatcccaacaccctcaagaagctacttaaaatgatgaggtattagagwgtgtgggggactgtgcaggtagaaaccctatgaacaggtagaccaatgggaagtctgcagttcaataagggtagaaaagtttaatacatcactttgttctttaaaaattcttctatccagcagctatttctgttctatattttcaggtactagcacccgagggtgtttttgttaaatgctactttgttcagcacttctctgttacagcaactggattctttaattgttcacaaacttaaattatgtgaagagaagtcctatccctttagctctatttccttagcccccaaggaaatttttatgagattcgttttctctgcttcatggattagatttaatttccgttcataagcagacccttactatctgtggtctccctcaggattctattgttcacctttcttccaacctaaatctcaaaggctgccttacaactaatttacaacttccagtaaaagtactttagaaatataggcatttgctcagaatatccataagttacaaaacattgcctttattaaaaaaactacaggtggtcat

SEQ ID NO: 121768 - DNA, 590 bp, Homo sapiens
tttgttctctggctccagctgtttcagagaatcctggcaatatgcygccctcatttttttgaattcttaagtcctacatttattaaatttgtcagattttctcaaccctgtacagacatagtgaatgtgtgtacacatgggtggtatttttaacctagtcttaaccactgatttttcttgtgataaaagtgatgtcctgagacatttcaattgttgtggtatcatgctagttaataaatactcggatatcatatgacaaaattatattattggcaaaggcaaacatctatagataggaagatgatgctggaagtcctcatttacacatgttatgctaatattttctaccaaaaattatcactgacattgaagatcacttgaatctcagagcatttatggatggcacttcataatttcagcgtcgtaacttagaatactctattcttttattaattttgaatttcttaatattattcatcagtttcatcatctgcaaaaggcagataataataatacctattcctaggtttgaacatgaaatttaaacaaggtaatccataaaatcacagttgctggcaattagtaagcat

SEQ ID NO: 121769 - DNA, 607 bp, Homo sapiens
tgttctagtcttttatatttataaaaaatactcgccagtgaaaacatgaagccacaattaaagggtgaattttatcgttttgtttcaataaatgaatggtcttctaaataaaaaatacacaagcagaggtagaattttgaacattatcaagggcctttttcaattatcccmaaataaacaatgtctaaaaattagctggaatgtcatcatcttttaagtcctctaagtggttttactttacaaggaaaggtaataaaaagctatgaattaatatttaattactttataggttttactggaaaaaatgattgtttactgggtatcagtaaatgcttgaaaccttcctcacagttccacctgtagtactgccaatgaatagataaaaacctaagtggtaagaggttctttgacatgtatactctagaatactctttcattgaagaaaaaataaatctgaccaaaaccaaaattagataatgcacgttaaatgttttcctaaatgataaagttctgtgcaaatggacaagatattactaataatatctaaatcaaagatgaattggtttgtgcacaaaaaaagcacaaaaaggcaagtatagtattaaaa

SEQ ID NO: 121770 - DNA, 590 bp, Homo sapiens
gatgccaatacttgtatctttgagcaggtgacctggtgaaggctttgtgatctccaagaaaatccaatcgtacgtttttgtcacccccacaggccttttcacctgcaagaaaccgatgattgtgcccacaggaaaactggggcttaatggacaactgagtcctgcaaaaccttttcctcttagtgccacaagaaatccctaaaaatctagcctttccagaaacagctacaagtccttcttctctaattgcacaccattgttgagatccagaaagaccctcactctgccrgttggccacactcttccacacaggcaaaggaaagcccatgagatagtaagcaccactccggagcactgcctccccctaaatcaacttctcaaaacttaccagttaggcattcactgattatgtcatgagaaatcaaagtctttataagagcagttgccatgttttcttcatgatggcatctccactccaagtacatggaaggcatgaacataatacatgtcattcacttcacatttaccaagcagctccctgagcccaaccctttgttgtctctgaacatccatgaaaagaagacgcagcc

SEQ ID NO: 121771 - DNA, 535 bp, Homo sapiens
tttacatacttgcggagcttaaaataaaatctgagaagataccattcaaactcaagcccttgcattgcagcagggagacattctggggagtccaccagcactctgtttccagaggtgcgctctggtagtcactgagccatataagggtcagactaccttaaacaagctgctttatttctcaataagtggaccattgacacatcaacatagtgagacagccaagtgcaaaggggttcccagaaaaactcaaaccrgcctttgcactgggaggagtgagcactggagtggtgccacagaagtctgcaccatttgcagtgaggaggagcctggctcctcttcttcctgggcagaatctgggatgcaatctgcgaggtgggaagcatatactggcaggagtcttaccctgctgaaggtccctgtttctccctccccccacccccgcttttctttgcccaataaattccatgtttttctcatccttcaaagtgtctgtaagcctaatatttcatggctgtgtgacaaggaccccatcttt

SEQ ID NO: 121772 - DNA, 535 bp, Homo sapiens
tttacatacttgcggagcttaaaataaaatctgagaagataccattcaaactcaagcccttgcattgcagcagggagacattctggggagtccaccagcactctgtttccagaggtgcgctctggtagtcactgagccatataagggtcagactaccttaaacaagctgctttatttctcaataagtggaccattgacacatcaacatagtgagacagccaagtgcaaaggggttcccagaaaaactcaaaccggcctttgcactgggaggagtgagcactggagtggtgccacagaagtctgcaccatttgcagtgaggaggagcctggctcctcttcttcctgggcrgaatctgggatgcaatctgcgaggtgggaagcatatactggcaggagtcttaccctgctgaaggtccctgtttctccctccccccacccccgcttttctttgcccaataaattccatgtttttctcatccttcaaagtgtctgtaagcctaatatttcatggctgtgtgacaaggaccccatcttt

SEQ ID NO: 121773 - DNA, 535 bp, Homo sapiens
tttacatacttgcggagcttaaaataaaatctgagaagataccattcaaactcaagcccttgcattgcagcagggagacattctggggagtccaccagcactctgtttccagaggtgcgctctggtagtcactgagccatataagggtcagactaccttaaacaagctgctttatttctcaataagtggaccattgacacatcaacatagtgagacagccaagtgcaaaggggttcccagaaaaactcaaaccggcctttgcactgggaggagtgagcactggagtggtgccacagaagtctgcaccatttgcagtgaggaggagcctggctcctcttcttcctgggcagaatctgggatgcaatctgcgaggtgggaagcatatactggcaggagtcttaccctgctgaaggtccctgtttctccctccccccacccccgcttttctttgcccaataaattccatgtttttctcatycttcaaagtgtctgtaagcctaatatttcatggctgtgtgacaaggaccccatcttt

SEQ ID NO: 121774 - DNA, 470 bp, Homo sapiens
tggacctatgcactggagggtcctcagaaaacaaaatacaccttatggatatagtagtggtaagacaacaaaaagaaagcactagagctccatgatcaagtacaygggccgagcagttaaatactgagatttgaattccagtggggttacttactaactctgtgattgtgaacatgtcacctgacctctgagctcaggttcttcatctatacaacaggaataatactagtatctacctcacagggtattcatgagaactaaattagttaacaatggaaattgcctaaaataatgaccagtgcatggtgaatacccactaaatgttagctcttattccactattgcaagcacagactgctggtttggtggtggagtttgtaaatcttggagcagcctgagtcactaggcatgaatctcaggatctttctctcctgcaagcttcacacagttgataatgtaggggtttaaac

SEQ ID NO: 121775 - DNA, 470 bp, Homo sapiens
tggacctatgcactggagggtcctcagaaaacaaaatacaccttatggatatagtagtggtaagacaacaaaaagaaagcactagagctccatgatcaagtacacgggccgagcagttaaatactgagatttgaattccagtggggttacttactaactctgtgattgtgaacatgtcacctgacctctgagctcaggttcttcatctatacaacaggaataatactagtatctacctcayagggtattcatgagaactaaattagttaacaatggaaattgcctaaaataatgaccagtgcatggtgaatacccactaaatgttagctcttattccactattgcaagcacagactgctggtttggtggtggagtttgtaaatcttggagcagcctgagtcactaggcatgaatctcaggatctttctctcctgcaagcttcacacagttgataatgtaggggtttaaac

SEQ ID NO: 121776 - DNA, 607 bp, Homo sapiens
gactcaattaacatgttttctaggattgcaattattacagaaggcaggtgtaattgaaattcgataaagttctcattgaaagtatgtgccaccaactttcttggagtagtaaagatgccaaatgtttcctctcttattccattataaattggcaatttcagaggggtcagaaaattcaaggactcagccacttgagtccttcagtatattccttcccaaaggaagcataaaatatgacagtagcagctactacaaatgaaagtggaaatgaacttaattgggatacatctggtgaagccactttaacccaacacattgtggcattttacgatgyggcagagtaaaggaggcatgtcaaaccttaggacataccaggtgctcaaagcagacatctattccactgctaaaatcataaaggactctgtgacaaaaatagagaggctatatattccttttatctactctttaggtcctatgagttgaccacttccccctctgcctttcttcgttgcagaagccaaaagaggaatagacatttattctatcattccctaaaacacattcagtttctaacctcaaagggctttgcagcaaaggacaaggtgaa

SEQ ID NO: 121777 - DNA, 646 bp, Homo sapiens
ccaaaactcatggatgcatggaaacttaggaaactggtctggtccctgcatctgaatgtgcctttgctcctagaatgcccagggaccttggaagaaatctgaattctacatttgagagcaagcatactgtatatcagggtccagagaagtgagtcccaaatatgattttgctgtctccaaaatcttgtaaaaatgcagatatgagtctttgaatgtttggttgtatttattttgtcattgttatttcttcattttgcttgagatttatgaaaactaaaaaccacaactgaatattcctcataccccactaattgttctatagagaaacctttctgttccttcctaatctcaactggactcagcccaactggaataaaccgaggagctttatcaagctgattaaaccctcccgccacacacatgcattccctccctattccccaaatgaccacatactttaaagaaagagaccayaattagtatcttgaagatatttcaacttgttttaaaaatataatatctttccctggggtcattatttttctgttttcctatctctttcagagctatcagaattctctgaattttttcccataaagacacctacagcatgaataggcttttttttccccactgtgttttaaac

SEQ ID NO: 121778 - DNA, 604 bp, Homo sapiens
acatgtacaccagggaatactactcagccataaaaaaagaacaaaataatgccttttgcagcaacttggatgaaactggaggccattattctaagtgaagtaactcaggaatagaaaaccaaataccatatcttctcacttataagtgggagttaaactatgagaatgtagaggcataagagtgatataatggacttttgggagtcggtggggaaggtgaggagtggggtgagagataaaagactacatwttgggtacagtgtacactgctcaggtgatgcctgcactaaaatctcagaaatcaccactagagaacttatccatgtaagcagaaaccacctgtctctcaaaaactactgaaataaaataattttaaaattatgtcttgggtaattgttttgagattgatggtgcacagtagtgtttgaaaactcataaaagggaagaagaccctcaaagaatatgtggtcaaatcccctcattcctcattgcccagatagaggcattaaagctcctaaagcaaaagagacctacccaaggccacagtgtaagggaaggagaaagctgttgggaagcccatccagtaagactggcctcatctcac

SEQ ID NO: 121779 - DNA, 422 bp, Homo sapiens
tcgaattcctgttcttgtgttgccactcacttgtgctgtgcactctggccactgacctttgcatgtgttggtttcgtaacgtggaaatgaagctgtctgctgtacccacctcttcagatcacagggagagttcaatgaaataatgttcatgtaagcactctgaaaagcacagagctctaaataaatgctgaaggttggcattccaggcagtggggggcatgaaaaatactgggagtttctattctgcccttgctcagttatgagaccctgggttgctcttgcaccttctgaggtatgataagtagacacctgtgatcaccttgaaagtggagkctaatcgaggcaaatgtggcttggttatagaaatcttaaaagcacgtatttgctaagggatgaatcagttacctgggaaagtaaaatca

SEQ ID NO: 121780 - DNA, 576 bp, Homo sapiens
cattgacatcagatacctaccaagtatagtttatgaagactggtctagaagccaggggttactttgtagagagggaggagaggactcagatggagatcacattagagcctgagtcttgttagacaaggtaagcagctgctgagtccagatgaagggccagtgagatcaccactgaggctgcagaagcggaagtgcgcaagagagcttgaggcctcagggaagcacaggcagcagacagccagtggcctaggctcagtgaaaggagcctcaggaccactgcctccccagagaggagagtccccatcagagcccarctgaataggtttgttgacacccccaagcctatcatcctccccagtcctaaaacagaacgctggcaaactgaattcctctgggatgtgtctgagcacattagcttgtctggactgcaggaatcatggaggggaagagtgggcaatgagtggcctctgccttttatgggcatggtgggcttgcaggcccaggcaggatgcctcttgcctatagcataggttagacatccaaggcattaccataggagcaggtgctctaaggggt

SEQ ID NO: 121781 - DNA, 603 bp, Homo sapiens
ttcatctacacattgagtcttcacattgaataaactgagaagrcggtggaagaggtggggttaaacttgccagctcagggatgacagaggttgaagaaaatctgcatataagtggacccacacagtttaaacctgtgctgtttaagggtaaactatttatattaaaatgtgaatgacatatttgttgatcatatgtcttgcaacattgctgaatgtccctattagttctaggagattatttgtaaattctccctacacagagaattatgtcattttcaaagaaagttttatttttatttttatttcccatctgtttgccttttacttctttttgcgtgtgcgttttctcattaaacaagaatcagaaaaggagagaacctttctttcttcttggtcttagtggaaaggcatttagtctttcaccataaagtacttacttctttcttttcattttcctgatgtcagaacttaggttaacgactttacacctttcttctttgttagtgtgtgcaatgatctcagcaatgctttaattatatccaacttattttgagatgttgtattatcatttccactaaattttacatatttatgttttttgtt

SEQ ID NO: 121782 - DNA, 565 bp, Homo sapiens
gaattcctacccctgggcttgaaagaacaagggtgagatgaggtgagaacaagttgcaaacatgagagaccatgtttccccattctgcttgccagcaggatgtcacaaaatcctttgccagcagaatttcagaaagcccccgcctcagtgactaagcacagcccttcagaagaatgccatggagacaataagcagctcagagcacaggtgcccatgtcttttgcctgaatcactatattttttagaaaagattagttcaaygagccccggtcttttcctgtaaacaaaataacatctgacaggattaatgactatgcctgtgtgatttagaactaggaagacacgcagctcctcctgggtgagcctttgttagagctccccctaaagtttgtaagtatagtttcaggtatagcgtccgggggctccaaactgtcaggggagaaagggtctgggaaggcaaatgaaatagatgtagtttattctatatacgcagggagttttctctaccatgctttcacatgcttttctctttttttggaagttcttcccactcctccatacaccc

SEQ ID NO: 121783 - DNA, 560 bp, Homo sapiens
aaatgctataaaacttagcagaatgacttacaaaagtggcagagtctgacatgtccagcacagcagtacatgccagtaaaagagcacggagaaaccctagcatccactagagtagttgaaaacactcctctctcctcttcttatagggtcagtggcaattccaaagactgctgtgccaaacagaacttaaggaagagagagaacctagccaaacaacactttctcttgctaaagtaagtgctccagatcacctttcaaatgcaattacctaatacaaccatggattttaaagtacataggcagttttgatggcagaaagaatgaaatttcccatttatgttagagtttatttttaactcagaaataaagcagaacatcataattgtgcatatttttttctactatattatgaccataacagacagtgaagtacaaaatgtgaaactacattctaatataatatagtcatgctggatattttagacattgtatatatttcayacaagaacatatctaatatgttgatttactatagcctatacatttgtcaaaaaatcagt

SEQ ID NO: 121784 - DNA, 540 bp, Homo sapiens
tccttgctttctggtataataaaatgtttagtgttatccttagtgtttatttttattctgaagctgaggaagctcaagctcatgcaggttaagtaattcaaccaaagttttayaggtagtaaacaacgggcttgatattctgacccagctacattttattctaaaacttcaagtcgagtgttcattagagacccttctaccccacaaatttaattcttatttagcattatttaactaattataattttgacaaattctgctttaaaggaaaaaggaattaagtttttttgtttttctttttaagcaaaaactctttacttttaagaaaaaggtataattttttcatttactattcttggcataaattttgattttttccagtgaaaccaaaatctcctgaacccccttcagtatcatccaagtcttgaatatctctttatgtataaaaaattcattcataaatgagctgtgcaatccaatcatttttttgacttcaaacttttctttgccaaaattaaacattatatcaccaaaatttcc

SEQ ID NO: 121785 - DNA, 604 bp, Homo sapiens
aacttcctgagctacaattcaggaattaaatcacatagttacagaatatcattagaaatcttacagcaaaaataggttttattaatatccttgaattcactgattaaayctatttctttttttctgcaatttatgtaaattttgtaggtttgttcattttaagatgaactgtatcaagctgggattttcaaacttctttcagtttcatatttctgcccaattgttgtttttaatgtgcttatatttttccaaccactcaaacttatttataatgccattcgttatgtgttagaagctatctaaatcatgcttaggatttttgtatgcctgtctaaaatggaaaatgcattcagagacacaggagagatttatttatttatttatcttaccaagctaagaaaacccaacaaccaatactttctgattcatcctggaaactcaatttgtcagatatcagggtagttttctatttccatctgcaaataaataataggaatcgcagtcactccttgctgtaatgactgcatcatcgacttcatcagttatttaaaaagctagggagaaaaccagcgacagctgtaaaagggcctggaattgtttggag

SEQ ID NO: 121786 - DNA, 614 bp, Homo sapiens
tatacatgctacaatacttcagtgaatcacaatttagatcatgaagcactggaagaaaatatgtttatcctcctgcaaagacatttacgtaaaatacaatgaagttctctgaagagaattagcaagcactgagtttttaaacactgttttctttggcagtcttttgaaggaaaggactctgttgaacgacataatacaggtatctcagttgaattagctggcatatttgtaactaaccagatattgagatggcatttgattagcaaaattgtaaagttaaggtgaattcatgatccgcacttaaaaattaagatgaaaaacagattttaaaaaatgcttsctgtgtaatggattatctcaggatttggcaataacttgatatatgagacagatattgtaataattaaccccacacaaattgaggcaatgggcattctgagaataatggagaaactgagccttcatcttggacagctgggttctattatttttattttactgccacacttcaatctacacaacatgtacttactaaatatccttagataatttaaccaaagtgtaatttttggtcctaattaagtgaatctatagttccagatgccataggccat

SEQ ID NO: 121787 - DNA, 648 bp, Homo sapiens
aacaaatatagagcaggaacacatattcactcacacatatacacactcacataaagcaacaacatacatttgtatgtwaaaatgtgtttcttcccttttatgtatgtataaatattattccaatattttaaaacttacataagtgctttatgtaactcttagacatttataaatatttgtatgattgcataaaatagttctcatgaggctataaaagacaggaaaaatacatgtaaatctatatgcattaggttgagtaattttggatgacagaattttttatatgaaaaagtatttatcagaaaatcatattgattattctttattattttaaacaatttgaaataattctactttcaacactttaaacactgtggtgaaacctacctgtattttggtgtttcattgtattttttccttttcaagacttggacattgacaaaaagaattaattaaaaagaattaaagcatgataatgaattaacagatcaaggattgataggctttatttattagcattctttgattggaaacagtagaatagtatttcccatagaagacattttgaagaagaatatggtgtaacttataagtttgaaggaaaattagcaaagggcttaggaagttcagaaacgacatcaggatcta

SEQ ID NO: 121788 - DNA, 649 bp, Homo sapiens
  misc_feature (1)...(649): n = A,T,C or G
ctcaataaatttaagaaaatttaaattatatcaagcactctcttttactcacagtcgaataaaactggaagtcaactccaaaaggaaccttaagaaccatgcaaatacatggaaattaaataacctgctcctgaatgagcattsggtcaaaaataaaatcaagatggaaattttaaatgtttctaattgaatgataataatggcacaacctatcaaaacctgtgatacagcaaaggcagtgctaagaggaaagttcataaccctaaatgcctacatcaagaagactgaaagagcacggactgatactctaaggtcacacctcaagggactagagaaagaagaacaaacccnacccaaacccagcagaagaaaggaaataaccaagatcagagcagaattaaatgaatttgaaaaaaaatacaagagataaatgaaacaaaaagctgatcttcaaaaagataaataaaattaatagacctttggcaagattaaccaagaaaagaagagcaaatccaaataacctcattaagaaacgaaacaggatatgttacaaatgacaccacagaaatactaaagatcattcaatgctactatgaacaactttatgcacataaactagaaaacctagaagagacggataaattcaacc

SEQ ID NO: 121789 - DNA, 583 bp, Homo sapiens
  misc_feature (1)...(583): n = A,T,C or G
ttcagctattatattcttcaagtccaaaatttttgttctttttttatagtttstatgtcttcagtgatattttcattttgttcattttcctgattttgcttaattatctgttttctctcttagctcatcgagcatctttaaaatggttatctttaattctaaaatttcaacacgaacacagaaataaaaactcattagtctagatatctactttctggtgggcatgaaattcttcactgacttgagctcaaactagacaaataagacaaatagaaaaccctaccaaacaagattctctgtcgtcttacacccaacagagaanataactctntanaccattactgcatttacagaactcatcaaatgataagacgttgaggccaaatttccaactactcttgccagtgatgtgcaataacttcaccaaatggtcagaccataaaaccaaattcccaacatttcctgccagcaatcagaaataacttactggctgaaaacaaaccaaaagcaaaacacaaaattagtagagtggaaaataaaaataagaaagacagtcaacaaaattatttagtcagaaatccta

SEQ ID NO: 121790 - DNA, 235 bp, Homo sapiens
tttgcagcattaaatgcttatattagagaagagggaagttccaaaaatcagtaacctaagcttccgtcttatgaaactagaaaagaaagagcaaaataaacccaaaacaactagatggaaagaagaayaaagataagaggaagaatcaataaaattgaaagcaaaaaataaagaaaattaatgaaatacttgttattgtgaaaagatgactaaaattgattgaaactacagtaag

SEQ ID NO: 121791 - DNA, 235 bp, Homo sapiens
tttgcagcattaaatgcttatattagagaagagggaagttccaaaaatcagtaacctaagcttccgtcttatgaaactagaaaagaaagagcaaaataaacccaaaacaactagatggaaagaagaacaaagataagaggaagaatcaataaaattgaaagcaaaaaataaagaaaattaatgaaayacttgttattgtgaaaagatgactaaaattgattgaaactacagtaag

SEQ ID NO: 121792 - DNA, 235 bp, Homo sapiens
tttgcagcattaaatgcttatattagagaagagggaagttccaaaaatcagtaacctaagcttccgtcttatgaaactagaaaagaaagagcaaaataaacccaaaacaactagatggaaagaagaacaaagataagaggaagaatcaataaaattgaaagcaaaaaataaagaaaattaatgaaatacttgwtattgtgaaaagatgactaaaattgattgaaactacagtaag

SEQ ID NO: 121793 - DNA, 628 bp, Homo sapiens
ttagttgcatttctgctggggtttttttgtatttcttctgaagcttaccatgttgagaatattatttgcccgcaattagacactttcagctaaagctgcaagagaaaatgtattacctgatgggctgagcgctaatggaaatttataccatggcaaatatcagttatctcactaaacaatttttctctaaagatgtgcttagcaatttgatactaatatgattaatacttatttaagacaagacccgtcactttgtattttccagaaaatatagtatttttagccttctttcttgccaatggaatttaaaagcamaatttacatttattttggtgtgatttcaggcaaccagtaagtgtttagtaagtcctttaacaaatacaaaatgtcattcatctattcaagggaatgttattaaatggcaaattgtggcacacaggctgtactctgaaaataataatattcctgaaatttaaggggactgctcagattaaaagaaaggtggacaatgagttcagattgttcatgtacagagttcatagaaggctctaaaagcctggccatggccaagcatatacaataataacaataaaataaacgtttttactttaaaaatcctgaaaaataa

SEQ ID NO: 121794 - DNA, 615 bp, Homo sapiens
aaaatatatatacatctttaactcaagtatattaatgaaattatgaaatatcattattcatttttaaatttaayattaaatatggcagatgggaaaataattataaaactacttgcagttatatatgagaccactattaaatctaggccttacatttttcactttttcctaatttgggtcaatatctaatgcctaataaagttcacagcatgtttgacagcattccaaatatgctgtattcttctttatttgaatttcaactcctttatttaacattctacttctttgtcaattagtgcctcaaaggatgatagcctgcctaagcagcaaaattcatggcagctttcaactttgtattgtgcctagtaccaagatttttaaatgctctaatcatcttgtcacacttctaaaattataacattggtggtgtgatcaaaggctgagattccattgagaacttcacctaggatttaatctgacttcctgcagatgctagttgggaacatataataaagtttattagtgtgtagttattcattatgtaaagaattgcatcatgcagaggaaagaggtgagggtcaggaaagttactgaatcatcagagtaaagatgagt

SEQ ID NO: 121795 - DNA, 568 bp, Homo sapiens
cctgccctcccctccgagccaagcagcgcacagggtgcgagcactcccagcgctgcgagtcccgcagaaaactggtgaatgaaatgcgcacagagaccaacctggctggtgaccgcggcgcagaaccaggggtcgctaaccagcttagccacaggattctcccgcaggatgggataaagagagcacagcccccaccccacacccctgccactggaacgcggtcctcctacagactccttcctcaaaaagggaggtgggggcgcaggcttttttctcttaaactaagtgaataaacacgaatcggaaacaactgtgaacatcctggggggccagacggaaggcgtgaggagaaagaccaggcggctctccaactcccgaggaatcaccgtcctgacacgccaacaatcaaccaccagggccaggggccgaccaggggcccccgctccccwcccgcagtgcgtctggggggccgaggccaaggattagaggggtgaccctcccggggcgcggggagagggagtgccgggcacggtgccctcaaggtcaccacgcgccgtggcgggggcga

SEQ ID NO: 121796 - DNA, 511 bp, Homo sapiens
acatcacatggtgtttctgacgatcttgctctcaaaaactcattgggtcgataagagaaaggatgctgttcacacatgctgtaggaaaggtgggcagggcagagacttgactttgttttctaggaaacaaagaayggagtcatcaccggtgctctgcagagcaatggaaacactgaaagctctgaagccaatggcacatccaagggaagcaaagacagaaaatcaaaatcaactgtccccaagatggcttttatgcaaccaggttgggagtcatcacagagcaccaaacaaaggatatctgcagagacggtgtattagtccattctcacactgctccaaagaaatacctgagactgggtaatttatacagaaaagaggtttaattggctcacagtttcgcaggctgcacaggaagcatgatgctggcatctggtcctggggaggcctcagggagcttttactcatggcagaaggcaaagtgtgagcaggcgtcttacatggcaggagcagg

SEQ ID NO: 121797 - DNA, 618 bp, Homo sapiens
ttgactgaagttcaattactgtaataaatgtattccaaatttcatctcaattgcatttgcattttaatgaatgattctcaccttcttgtcaatttggcagccaggctagatttattaagttattgtataaacagggcattctaatgcaggaatttaaatgcaaaatatttgcttggtgcttttgaactggggctgcgttattaatttgcctctatgggttgcctgaaaattcaagaacttaaggatggtgtttcagatcccttcattccatcatttttgccctctyttcctccgaaatcaatatgtctgggtgggctgacagagcaaggcctgagccagccagatgaagtgggctccccaagcctccagcctcaaccaattgggaataaactgatttatttgctattatttgaaaacagtaaaatttgttaagtgaaaatttcccatgtaggcaattcccttctgcaagagcaggacatccctgaaatcagattgccatgagtgtttgttcatcttaatgtcattctgcctttcccgtcaaagcactcctggctttatagccccatatttcttgtaggtagagctggaaaatgtaagtgaaaaccagctggatgtaga

SEQ ID NO: 121798 - DNA, 642 bp, Homo sapiens
agcattttcatttatccaacgtaagggtagaatttctgggggtgattccaggaaactgagccatgacactcaggtatattataaacaaagtagatgtcttagcttactaatttttcaatctgactgctgtcacatttgctgggaattatttacttcattactggctattacaggctgagtcatgaggacagaaaatatattactaccacagaaaacagggccgacacccaggcatattttaatctaagtagatgccttagctttctaatttttggatgtgactaccatcacatttgctgggaattcccttgttcattgctggctattaagaaacatgggtcagtgatttaaaagagwtgtttaggactctttctcttttaaagacatctgcatgtccataaacaaaaatagaagccccttttcaaaagatcaggagatcaggagacgaggtgccctaaacagcagtcctcttcccctggaaaaggctgcagcagccctcaatttgggattcagagtggttttcacaatggcaccctgctgtagttggtgccaaaagtagatgttttaggaggcatttctgcaacccagaatctgtgtgtacaaaaaagttaaggcctaagtgatatacaggaaagccttatg

SEQ ID NO: 121799 - DNA, 599 bp, Homo sapiens
aagaaggcaggaagaaaagaaagaagaaagagaagaccacaaaacaaccaaaaagcaaataacaaaatagcaggagtaagtctttacttatcaataatatcattgagtgtaattggactgaactctccaataaaaagacattggccgaatggatgaaacaagaccaactgatctgttgcctrtaagatgaacactttacctacaaagacacacatagactgaaaataaagggatagaaagagatatttcatgccaatggaaaccacaaaagagcaggagtagctatacttatatcagacaaaataaattttaagacaaaaactataagaacagactaagaaggtcactatataatgataaaggggtcaattcagcaagaggatagaacaatttaaaatatacatgcacacaacactggagtaccaagaaatataaagtaaatattattagagctaaagagaaagatatgcccaaatacaataatatcaggagacttcaacacctcactttcagcattggacagatcttccagatggaaaatcaacaaagaaatattggatttaatcagcactatagaccaaatggtactaatagatatt

SEQ ID NO: 121800 - DNA, 613 bp, Homo sapiens
aggacattttaggtattacttcatctagaaaggaatggctcttcagcgaggcaagcagaactgggaatgcagagcccaggtaggcaggagaaggctttgaccttcttctctttgtctattcatggagaaattcaccttgggcttttgggacagtatctaacgtatagaagcaagaatggagagactccagcaagctctttgccttatgaggtccctttcwtaaggggtggaatacaatttaaatgagctaattgatatttcagggtatgattgcctataaaatatgggttgtgcactaaaatgaagaggactttgctttcgtaagattaagaatcactgagttagataaagttagacaagtctgttgcaggacttctcagagccttcattacgcttacacacattttagtctctatggagtgaatacggtacatactgtttctcaacttctttcaaccacaaaacacctttctcatggagtatcttctaatagctccccaagttattgttctgtggaacaaagtttggaaacattagtctcaaataataatactctctatattatttccattccccccagccttcagtgattatttttaacatccaagcctta

SEQ ID NO: 121801 - DNA, 568 bp, Homo sapiens
atgaattttacaaaagagagagacagacatgaagcaccttgcatttttaagaggaagaaaatctgcatccatgtgtagtatctttgggctctgtttcctccaagctagcctttccctttaacatggagagcatgtgtgcctgatgagacctgggaaatcaaatcacaaaattgagtccgccacatgacgctgacagacagaaaccagaggcagcaaggtgtcgcagggttaaattgatgtgaaatgtgcagaacaggcacatccacagggcaggaagcagatcagtggtgccggggctggggatggagcagagggtactgcagaagggcagggggcatctgctggcagcatggagatgctgaggctggagtgcaggatggtgacaactctgcaaacttacaaaaaagtcaacaaatggtgcacttaacataggtgaatgctgtggcctgtaaatcacaccaggacacagctgccagcatcacatcctcctatrgagagctccagcctccagccttgggtccttgctgctgcctgtttctctggctgatgcccctgctcctcacccagg

SEQ ID NO: 121802 - DNA, 566 bp, Homo sapiens
ggccactctgcctgcgtccgcctcacgygccccttcagcgccaggtctgggggatccacgcctgcgccccgggcgaccctgtcgcggggtctggctgtccaggaccgggggcccgggtgtcaggctggtagcaggaaggaaggcgctggcctccccaccgcattcgccccatgcggcgtccccgggaagggccgcggaagagccgccgtccgcacccagagggccatggacggggagcgccctgcgtggtgttcgtggcgctggcctggtctctgcggatcggaggcaaagccagcctggctctcgggtcgcccgtcttctgtcgagctggcaacatcagtcgtttcccaccgccattcgcgctttctactggaccctctgctttttattgttgatttgtgggagctctttgcataggggccccgccatcgcagcctggcatcctcgcaggcgcttgccctcggaacgccgggtgggctgcgggcgcggcgggactcctggtttctcttccccaggacggacaccggcgtcgccgcgtcctacgaagccaggcgccgagcgggagg

SEQ ID NO: 121803 - DNA, 566 bp, Homo sapiens
ggccactctgcctgcgtccgcctcacgtgccccttcagcgccaggtctgggggatccacgcctgcgccccgggcgaccctgtcgcggggtctggctgtccaggaccgggggcccgggtgtcaggctggtagcaggaaggaaggcgctggcctccccaccgcattcgccccatgcggcgtccccgggaagggccgcggaagagccgcygtccgcacccagagggccatggacggggagcgccctgcgtggtgttcgtggcgctggcctggtctctgcggatcggaggcaaagccagcctggctctcgggtcgcccgtcttctgtcgagctggcaacatcagtcgtttcccaccgccattcgcgctttctactggaccctctgctttttattgttgatttgtgggagctctttgcataggggccccgccatcgcagcctggcatcctcgcaggcgcttgccctcggaacgccgggtgggctgcgggcgcggcgggactcctggtttctcttccccaggacggacaccggcgtcgccgcgtcctacgaagccaggcgccgagcgggagg

SEQ ID NO: 121804 - DNA, 616 bp, Homo sapiens
ctcccttcacagctcagtactgtcctcaagatagtgagttttcatgagatttgattgtttaaaggtgtgtgacaacacccctcccactctctttttttctcctgttgtggccatgtgacrcagctgctcccaggtagctttgtgccacaattgtaagcttcctgaggccaccctagaagctgagcagatgccagcgccatgcttctatagcatgcagaaacatgagcaaattaaacctcttttcattacgaattacctggcctcaggtattccttcatagtaatgcaagaatggccttacacactgcacactgtttatgataatgaatgcaccagtttatactccccccaacatccacaatagttcatttttctccattcttcaataatcttttatatttaaaaaaatatctatactaacagttatgagatgatatatatctcatcatggttttgatttgcatttccttgatgactaatgatgttgaatacctttttaatatgcatgttaccatttagatgccttatttggagaaatgtctatctaggttctgtgcccacttttaaattggtttacttatttatctatttttcctattgagttgtaggacttatta

SEQ ID NO: 121805 - DNA, 616 bp, Homo sapiens
ctcccttcacagctcagtactgtcctcaagatagtgagttttcatgagatttgattgtttaaaggtgtgtgacaacacccctcccactctctttttttctcctgttgtggccatgtgacacagctgctcccaggtagctttgtgccacaattgtaagcttcctgaggccaccctagaagctgagcagatgccagcrccatgcttctatagcatgcagaaacatgagcaaattaaacctcttttcattacgaattacctggcctcaggtattccttcatagtaatgcaagaatggccttacacactgcacactgtttatgataatgaatgcaccagtttatactccccccaacatccacaatagttcatttttctccattcttcaataatcttttatatttaaaaaaatatctatactaacagttatgagatgatatatatctcatcatggttttgatttgcatttccttgatgactaatgatgttgaatacctttttaatatgcatgttaccatttagatgccttatttggagaaatgtctatctaggttctgtgcccacttttaaattggtttacttatttatctatttttcctattgagttgtaggacttatta

SEQ ID NO: 121806 - DNA, 616 bp, Homo sapiens
ctcccttcacagctcagtactgtcctcaagatagtgagttttcatgagatttgattgtttaaaggtgtgtgacaacacccctcccactctctttttttctcctgttgtggccatgtgacacagctgctcccaggtagctttgtgccacaattgtaagcttcctgaggccaccctagaagctgagcagatgccagcgccatgcttctatagcatgcagaaacatgagcaaattaaacctcttttcattacgaattacctggcctcaggtattccttcatagtaatgcaagaatggccttacacactgcacactgtttatgataatgaatgcaccagtttatactccccccaacatccacaatrgttcatttttctccattcttcaataatcttttatatttaaaaaaatatctatactaacagttatgagatgatatatatctcatcatggttttgatttgcatttccttgatgactaatgatgttgaatacctttttaatatgcatgttaccatttagatgccttatttggagaaatgtctatctaggttctgtgcccacttttaaattggtttacttatttatctatttttcctattgagttgtaggacttatta

SEQ ID NO: 121807 - DNA, 518 bp, Homo sapiens
aaggaatgaaactgaggagacagaaatgagaagctgtgcttaggggaaggaaataaaacctgttttatggaagaaaggatttctcctttggctggatgttacagtcatgacacatcagctaaacatcacgctttcgggaggtcttccctgagttgccaatgtaagtacctcctgcccactctgtaagacatgctgtcatagcacttaccactacctgatttgggaaaggggggtgtattagtcctttttcacattgctataagaaactacctgagactgggtaatttatagagaaaayagattaattgactcacagttccacatggctggaggggcctaaggaaacttacaatcatggcagaaggcaaaggggaagcaaggcacgttttacattgtggcaggagtgagagagagcaaggaagaaagtgccacactcttaaaccatcagatcctgtgagaattcactcactatcatgagaccagagttgggggaaaccacccccatgatccaatcacct

SEQ ID NO: 121808 - DNA, 441 bp, Homo sapiens
aacttctaaagcaacctagcttcactatggtggtctgagaatattagacattctccctccacagaaaacatgtactaaatggaaaaaaaaaattaaaaatgtccattttgaggcactggaaaacaaccaaaggcaggtaacaacttgagaactgtttacagttctcaacaaagccagcctgcaccaggtaagactgatgagcctkcagccttccttcctggggcattcccacaccacctctccccacatcaggtggggagggtgtgcagccttatggtcagaagccatggagtctgtagcttctgaccataagcttctgactgcctggttcagtcgtcagataaaatgagaaattacttaaaatccaagtcccacaatttccagtcaaacactgctcactacccacactcactcatgagctcacacacacacccaacagca

SEQ ID NO: 121809 - DNA, 601 bp, Homo sapiens
tccttcatgactgaaggataattttgctgaatgtactattctagggtaaaagtttatttccttcagcactttaaatatgccatgcaacactctcctggcctgtaaagtttccactgaaaaatctgctgccagacatattggagctccattatatgttatttgcttattctcgcttgctgcttttaggatgctttctttatccttgatctttgggaattggattattaaatgccttgaggtgtagtcttctttggattaaatktggttagtgttctataaactttttgggcttggatactgatatctttctctaggtttgggaatttctgttattatacctttgaataaactttctatccccatctctttctctatctcctctttagggccaataactcttaggtttgcccctttgaggctattttctaaatcctggaggcatacttcattgttttttattcttttgtctcctttgtgtatagcctgttttcaagctcagtaattctttcttctgtttgatcaattctgctattaaatagcctgtcttcaagtgcagtaattctttttttctttgtcagttctgctactaaaaggctctgat

SEQ ID NO: 121810 - DNA, 601 bp, Homo sapiens
tccttcatgactgaaggataattttgctgaatgtactattctagggtaaaagtttatttccttcagcactttaaatatgccatgcaacactctcctggcctgtaaagtttccactgaaaaatctgctgccagacatattggagctccattatatgttatttgcttattctcgcttgctgcttttaggatgctttctttatccttgatctttgggaattggattattaaatgccttgaggtgtagtcttctttggattaaatgtggttagtgttctataaactttttgggcttgratactgatatctttctctaggtttgggaatttctgttattatacctttgaataaactttctatccccatctctttctctatctcctctttagggccaataactcttaggtttgcccctttgaggctattttctaaatcctggaggcatacttcattgttttttattcttttgtctcctttgtgtatagcctgttttcaagctcagtaattctttcttctgtttgatcaattctgctattaaatagcctgtcttcaagtgcagtaattctttttttctttgtcagttctgctactaaaaggctctgat

SEQ ID NO: 121811 - DNA, 671 bp, Homo sapiens
tctgctgaaagctgttttcatcactcaataaaactcactgccttgttcactcttcaattgtcagcacatcctcatttttcttgggcatgggacaagcactcggggagtggtacacaaaccagactaagccaggatgggccaagtagggtggccatctcctgcagcagatagcatggccgagtgaggcccaagccaggtgtcaccggctggaagtccccagcttgcaaaattactgagaagaaaatcctgcatcataaggaagtactaaaaccaaacaaacacaaaatccataataatggggtttgtcaaaggaacacaagagctgctgaaagaactcccaatcaatatctcagaacttagaaatgtaccttacctattcaatttccccttccctccagctcctgacagccatcataatttggagatgattttgcccagttttaaagacacgcacaaaatcattcatttttatgcctgataaatctctaytttccctgaggacacgaatgctacttgctctcattccaaccccctaaagctgaaacagtgcttcactcagccaacgttaagggcttgatgcattctggttccagtctggggaggtgggaggatggagagaagaataaaactctgagaaaggaagaaaaaagctgcagagattgagataatgg

SEQ ID NO: 121812 - DNA, 572 bp, Homo sapiens
gaaatagctgctgcagagccagcaaatagagttggccttgcaaagctgtctttgtggggaaaatttgcatctgtagagaatcttcattaacatagccacatgtccccctttctatgccttttttagatctaggagtgattgagaatctgacacctttaaacctttgaaaagaaacttactatctagtcactctgagggagacttcatctacataacaaggccacctttggagccaagcctcttcctttcttcttcccataaactgtcttgccactaaaacctattttggacatattctgagtctggattctttctgtaatttcaagatggcagattagcttctgccacctattgggaagctggatcttcatactgaaggctctcgtgtatacacattaaataaatttgtatgcctttctccgataactcaatcagccttgtgacagtaattttttagctaacctrtaggggggccaatagccctggcccccaccctaatctctgtggctgcctttccctcccctgtgggcccaaccaccctctgactcctctgactcctctttttatattag

SEQ ID NO: 121813 - DNA, 616 bp, Homo sapiens
caagttggggtgcaacaaaggcaagggggtgtttggaattataggatggagaacagggaaactggataagctgtttgaagagggaacctaattgtatttaacaaaccagaatgtttaattaatgaagttgtaacttttattaagtgtttcatagcatttcagttttgcggccttctttttattctcatttctgcaggctcccaacagctctggccttgggccctgcgtccactgggcttgatgctcctagtgggaggttcctgacctcaaagtcccccttcactgccccatgatgagagagactgggagctgctggtagaggtaggaaggctgtaagtgtgcccagtgggctctaggtaaaggaaatgggccagggctgttttctggacagtgagaacaacagtggattcaggtcagagtagttcagttggtgagacagccagggtaccctttcccaagtcctgggaagaaggagaggagacraggctggtaacctgatcattgggtcaagcatgacatagctctcatgggaccatctccaagctctgctgtaggcagaggggaggccagaatcaaagtcctgtcctcttcttcagggaagggtcatttggaagga

SEQ ID NO: 121814 - DNA, 592 bp, Homo sapiens
ccaaaacaatccttgccaaggctaatgtcaagaagtttttttcctatgttttcttctaggagttttacagtttcaagtcttacgtttaagtctttaatcaatttagagttaatttttgtgtatggtgtaagacagtgatccagtttcatccttttgcatgtgaatatcgagtttttccaataccatttataaaagagactatcctttccccattgaatatcttggcacctttcccaaaggttacttgaccacatacatgtggatttatttctggtcggtctctctctctctcccacccccsttttgagacagggtctccgtctgtctgtcacccaggctggagtgcagtggtgctacaatcttaactcactgcaacctccacctcctgggtttaagcaatccctccacctcagcctcctgagttgctgggactataggcatgcaccaccacttccagctaatttttgaattttctttgtagagatgggattttgccatgttacccaggctggtctcaaactcctgcactcaaatgatccactctcctcagcctcccaaagtgctgggattacaggcatgagccaccatgtcc

SEQ ID NO: 121815 - DNA, 568 bp, Homo sapiens
caccatgcccaggcttctcgctatctattcctgcataacaatcaactccaaatttagtggcattaaacaacaactattttattctgctcccatactctgtggggcaggactttggacagggcacagtgggactgtcttgtctctactccatgtcgtctgagacttcagcttgaagattaagggtgacccagtggaagggractggaatcatatgagggcttgttcacccacatttctggcagctgatgatgcctgttgactgaggccttgttgagatatcagttggaaaaactatatgtggcctctcctcgtgtttgcttgggcttcctcacatcatggcagctgggtgtatctgtatcaccttttaccacctagccttggaagtcacatagcatcagttctgccatagtcataagagtgtccagattcaaggacagagaatggagaccccaactcttgataggaggaatatcaaaatgagaagaacatatggacaggaagcattggtgcagctatttatggaaaatacaatctgccacaactcccaaatagaattctggcctgtagt

SEQ ID NO: 121816 - DNA, 632 bp, Homo sapiens
ccggcaaactcaatgggtggtgaggaycagcttcctcttttgcaaatggtctgcttctcatatcctcacatgatggagagcagagagaggggaacaaacttctcttcttataaaggtgctaatcctaattgtgagggctccatcctcatgatataactagctcccaaagaccccacttcctaatactatcaccttgagaattaaggcttcaacatataaatttgtgagagacacaaacagtccattgcaatgcctgatttctcattattagggtgttaataagttttttgtgaccatattgaaacttacaatagattcaaaccacatgcaatatgcaatataggaatgtagattctatattagggacagttccatgtgggctcaatattacaattaagactaatactgggaaatttctatttaaattgatgtaataatgatgaattaataattataataataaggatcataattattgaactttaatatatactagtactgtgacagatagtcttctaaaaggtcaaataaatttcccaaggccatctaacttcagattctacacatgtaatcacgatgcaatatgttctctatctctccctgtctgtatcataagctcattggcagccaca

SEQ ID NO: 121817 - DNA, 599 bp, Homo sapiens
ataatgaaaggaattatgcaggatagttgaataaaatcagatgacattgtaaccaaactaaactgggtccatttgcccaaacaacagaaagacaaagactggaattttgcagtgaggaaggtttattgtgaggcagctgaaaagaagactagggaatgctcaaatccatctacccaagctgggggatgtgttgggtttatgaggatagtgtaatgaagtatgatctgactggatcttgcaatgaggtgatgccagaatgcatgatctgactggatcctgaccttcttgccttgtactttttcttaattcagtccctgcttctcagtcctagcacttaggttctgcacatggttcatctgggcatgcttagctcatgtsatcttcaacttggaggtccctggcgaccaaaaaaacaactttcaactttgctacatgacagttaaaccagattggtatgatgcagttataacatagacaagttctttcaaagtagctgtaattaaagtccaaaattgtgagaattcaatatgacaataaaatgtatctgaattaggagctttctgtatgttcaacttaaatttgtgctggtaaagagattg

SEQ ID NO: 121818 - DNA, 562 bp, Homo sapiens
gtgtacagcagcagagaggtaccactccttgcggatcaggggctacccataggcagtgtgcccagagtagcagtccagcagtcatatttacacacacttctaattatatgcaaattaggggtggtttatgcagaaaaaggggtgttaacttccaggctgtctagtcattgccatgaaaagggacagtaacttcatagtgttgccatggcaatggtaagctgacatggaacactgatgggcatgtcttaccgggagatgcttctgcccaggacctattttagctagtactcaatttaggctggtacccaagccaygcctgtggagtccggtcctgcctcctatctcggctcagactcataaacacaatagcatactatatagttctattcatttgaatagtatagaatttattttatgtgactcgtgagccaaacatgcctatttaatttggttcagtccaaaatgtagcatcttcttaagtgctatctcctctgaaactcatctttaacctcctccatcagatttgggctgcctttaacaaatcttcctcctggagttttta

SEQ ID NO: 121819 - DNA, 593 bp, Homo sapiens
attggtagttgttgggtgactacctcacccagctaaaaatcaactacagcaactataggatagggagatctgcstttatactagtttaggtgaaaacataataggtgaaaattttagctgaccacaaggaagaagtcccagttctaggaaacagagtctcattagcttggttgtagtagaggaaatctagaatttttttggagtaaagaaatcctttgagctgggtagacaaaattttaccagattgaatggtaaatatatggaggggaaaccagctgtggtataactggggatggttcataggtgggcaagcagcctgggaagggagattggctcctgcacattaggaagggcccagagagacttgccaaagagtttggattttattctgtagatggtgaaatttatttcaaggaaggggttatcactgtcaggtatacacattagacgtgattggggcagtagtgatagagccagaagggaatcatcgtggagctgaggtgacagacctgctaagacagagacctgcaattgaaaatggagacaatgatgagaaccaaggaaaggtccttttgataggctaggaattgagc

SEQ ID NO: 121820 - DNA, 574 bp, Homo sapiens
ggcatatgataagctgaataaagaccacatttctcaggctyctcttaccaacatggcacatgtatacatatgtaacaaacctacacgttgtgcacatgtactctaaaacttaaagtatagtaataataaaaaaaagaaaaaaaccaataaataaataaataaataaagcagaaatgttttgtgtgggcttcaaagacatgttaagacttgttacatgcccattgccccttcttcatcctattctccatttgattcctggatcatgaagcagatgtcaaactctctaacagtcatgttgaattgtaagggcaaggatcgtatcttaggaatgaagaaatagtgagtttgaaaaagcctgggtctgaaaacttcattccatagaaccataataccaggcataaaattattttgcatgtgacagcatgagaaataaactatattgtttgtcatgattgcttttgtttttccctgtgagacacagccacatgtgattctgattcagagaactttgtggtggcttcaatagatgggacagaatattgagagattgtgactctactctttgctcataaaa

SEQ ID NO: 121821 - DNA, 586 bp, Homo sapiens
ttttacaaccactttgggattcatttcttattacagcagacacttgcttgtgctttctgatctgactgacatatgtgccacattctctgacaactttttttgtatctgcgattgagtccaaaatacctagccttccaarcactacataaactagcctctgcaaactccaccaatcttacttctcatcacatttcttaccctaaatattctcaaaatgcatggaacagatgtttacactgttttctccttcatacactcgccattatgctgcattgtgtctacaatattccttacctcactatgagtcaaaattattcctattaattctgtaggggttggctagtatatctgtttctcagaatagtgtagcatgactacctgcaatctagcataagcctttcttttacacaatcacagttccctgttgttgagagttgtcttcaaatcatatttattctacaaaatttctcctacaaaataagtgtaatcagaaaattgtgaggcagtcatgttgctattgttgttattctaaagagaaatgaggcaacagattgtgatgagaacatgattaagattccatctcata

SEQ ID NO: 121822 - DNA, 586 bp, Homo sapiens
ttttacaaccactttgggattcatttcttattacagcagacacttgcttgtgctttctgatctgactgacatatgtgccacattctctgacaactttttttgtatctgcgattgagtccaaaatacctagccttccaagcactacataaactagcctctgcaaactccaccaatcttacttctcatcacatttcttaccctaaatattctcaaaatgcatggaacagatgtttacactgttttctccttcatacactcgccattatgctgcattgtgtctacaatattccttacctcactatgagtcaaaattattcctattaattctgtaggggttggctagtatatctgtttctcagaatagtgtagcatgactacctgcaatctagcataagcctttcttttacacaatcacarttccctgttgttgagagttgtcttcaaatcatatttattctacaaaatttctcctacaaaataagtgtaatcagaaaattgtgaggcagtcatgttgctattgttgttattctaaagagaaatgaggcaacagattgtgatgagaacatgattaagattccatctcata

SEQ ID NO: 121823 - DNA, 589 bp, Homo sapiens
tctggaagtttaaagttcttttcccctaaggaataaagcaataaatatggagaaatgatgacattttaccctctcacccaccccaccctgcttcagaggaaattacacgaatttcctttttttttttttcactgtctgtttctttttcatataaaactaattttaacctaaagtaatttagaaaataaaaagcaggaatccaaaagggaaatcttattagatttgtctgcaaatgatgattttaattaattatttgggacttaaacacagcaaaggtctagattttgaccagaacttagctttgtttcaagcaggtaaattctgagggcaccttcagcctttccaggactgcttgtctctgcccttatggattgctacatttttccttctgaagagctttctagtttaatggtgacttgaggtgtttggagctagaagtctgaacttctgaaaagattgaaagtgcctggaaaccatctgagaggcaatccagtcaaggtggcctcccttctctatgtgctcaggacaaatgcttttctcttggcccygaatcttcccgggaatctcaatttcaaatcaaacagcacaa

SEQ ID NO: 121824 - DNA, 578 bp, Homo sapiens
tcttatggttataaacggtaattaggaaaacatatttaaagcttgttctcaagaactgcctcatagaggtttttgttttagtattaattgaaataagtgatagcactataagctagattgtattattactcactaaatttaggtgaatrcgttcagacagcttagttttcttttaaatgatttgtgtggtatcgtgcagctagtaaagagtagagatggaattcagactatggtggtctgaactcaaagctgaaatatttaagtgttgtgctgtgtattaagagttgaattgtgtctcttccaagtagatatgttgaagccctaatccccagtgtgacactatttgaggatagaactcttaaaaaagtaattaagcttatacgaggtcataagggtatagtccttaatccaacatgactggtgtcctcataagaagaggaagggatgcagcacacaaagaaaatgtcctgtgaggacccagtgggaaggtgtcatctgcaagctgaggaaagaggccaaaggagaaaccaaacttccaacacctgaagtttagacttctatcctccacaactgtgagg

SEQ ID NO: 121825 - DNA, 578 bp, Homo sapiens
tcttatggttataaacggtaattaggaaaacatatttaaagcttgttctcaagaactgcctcatagaggtttttgttttagtattaattgaaataagtgatagcactataagctagattgtattattactcactaaatttaggtgaatacgttcagacagcttagttttcttttaaatgatttgtgtggtatcgtgcagctagtaaagagtagagatggaattcagactatggtggtctgaactcaaagctgaaatatttaagtgttgtgctgtgtattaagagttgaattgtgtctcttccaagtagatatgttgaagccctaatccccagtgtgacactatttgaggatagaactcttaaaaaagtaattaagcttatacgaggtcataagggtatagyccttaatccaacatgactggtgtcctcataagaagaggaagggatgcagcacacaaagaaaatgtcctgtgaggacccagtgggaaggtgtcatctgcaagctgaggaaagaggccaaaggagaaaccaaacttccaacacctgaagtttagacttctatcctccacaactgtgagg

SEQ ID NO: 121826 - DNA, 548 bp, Homo sapiens
gctttcaaaatgattataaccgcttttagaatacaatcaagtcatgggaatgtcagttttattgaactattatcagcattaggtagtgcattttttccttaattttgctagtgaaacaagtggaaaatgataactcatagctatgacaatttttatttttgattaggaggtagaacacttctctgtatgttttattagaatttcctctttatgcaacttatactaccgaactttacacatgcatgaatggtaacacagaagaattattatttttaagagttttataatctcttatgtttagyacataacaactatcagattttgattgttgataaattttttattaatttttaattttgcataagccatttttgccaaaattaaagtattaattttgtcatatacatcggtgctattttattattccttccatattacagataaacgcaaactatatttaccctagggctttgttgttgttgttttgggttttttgaattaaaatttaattcaatctgacaggtatttttggtgcataatatagagtt

SEQ ID NO: 121827 - DNA, 570 bp, Homo sapiens
ttaattaagtgtgttaaatgtacactatttggcacttaatattttcartagagaaaagtatcattttaatgatactattttatggttctgatatacagaagattatatcccttctgcctacttcccatagccttgccacatgtatgtaaatagataagtacattagactgtaaaagtgaatacttatcttggcccctaaatctccttataaaaaatactacattttaaaattattcaaacagtgtttaattttaaacatgttagcagttttaatcttctaaactcctttcattctctaataatactgggtcaatgtaaagacgttgtggcaagttgcaacaagcttcagtaaaacattgaccgttcttcagcattctcttcagttacagcagcagtcactgtattccctggagaaaatctgcttttagttaattcactcaagttcagagactcttttgatttcagacaatggactttcaggtagtatacttcgtggcacagaatatgattcatatttactaggtggtacaatttatctcccataacaattctttatttgctagtgctttt

SEQ ID NO: 121828 - DNA, 551 bp, Homo sapiens
aaaacaagatgaaaacaagctgacctggtactaaacatcttcttgtgaaaaggctcatgacaaatacartctttatagaagcttccacatttgaaatgtgaaatggtgagatttttaggagataccacatgagtttgtattctatcattgaaagtctctcttgtaggaaaagcattaagactgttgtctttgcctcattcattcattcattctgcatcaacaaatatttattgaatacttgttatgtgcaaagcaatataagcaactcaaggatgtggacagtatagcctctgtgagaatttgtataatgcatattcaggaacagtcagcctgtcaaaattggatcatcttatctgacttacatttggatgaggacatcattggtacaatggaaagaccactggtcgtgaaggaagccacttactccatcgtttgctatttctaagatctgagataaattaacctcaaagggctgatgggttggagagcagtgaaaacaagaacatagactaccttcaggattactttcacatagacttactatgacctag

SEQ ID NO: 121829 - DNA, 596 bp, Homo sapiens
tttcgctgtcgccgaggctggagtacaatggcatgatctcagctcactgaagctgccgcctcccaagttcaagcgattctcctgcttcagcctcccaagtagccgggattacaggcgcccaccaccatgcccggtttttttgtttgtttgttttgttttgttttgttttgtatttttagtcaagacatggttttgccatgttggccaggctggtctgaactcctggcctcaggtgatccgcccatcttggcctcccaaagtgctgggattacaggcatgagcaaccgtacctggcctactttttcaccatcttaatggtaccttttgaagaacaaaagtttttcatcttaatatgtgccaatttgtcattttcccctttaccttagtgtttttctgctctgtttaagaaatcttacctctcacctgggcacagtgcctcacacctgtaatcctagcactttgagaggcggagaygggaggatcagttgagcctaggagttggagaccagcctgggcaacacagcaagaccccatctctatttttaaaaagaagaaaaaaagaggaatcttatctcaccaagattgttcaaatttat

SEQ ID NO: 121830 - DNA, 558 bp, Homo sapiens
caaactcgtatctgtctctctaaacatgagcccaaataatgtagaagataggaccacataactaatttgagacttgtactttaacttgattgtggtttgattaatttggatgagagcagaaaaactcactagtgtaaaatataatgattctaagtatgttattttcctaatgaatgcttgaagttacttaagtagtagaaacttaagttacttaaatttatcttgggtgtatttcatggggttatattccaagcttattatcttctatcactttatattcttatatagtaacgtgaggcttatgttacttcttctggctactactctttaaactttttatttttaccttctctatgaacatttttaaacttagattctttgtctttttttctgaactgaatatagatagacctgaattttccttcctattgtgaatattctcttygcttctcattcactatttgaaggactatatagcataatagttacaagctgggctctggagttggagccgcttctttgctgcatgaccttgagcaagttgtatctttctgatat

SEQ ID NO: 121831 - DNA, 608 bp, Homo sapiens
catgccccagcactcttgagagcagagaaaagacctcaggcgccactcaaacaactgtaggagatgctcttttcactasgcacaagcctttaaatccaccaattaaaaaatcagaataaattaccttcttcagataaaaatctaatccctggaatatagggaaatttcacaatcatcatcttggccctcacatttacttttctgttatcagtaacttcagaacatacaatttatgtaaatggaaaaagagaaaaaagacaattaaaatacaaccaaatgttattaataagagtggtctccaataagtggagtgagacattatttctatgtcacattctttatgaacacaactttgttttgcacaacacatgatcgtaattaacaaatataatacttttagaagagaggccctgttagacatgagtggacagctttggaatcaaacaaactagagttggaatgttgccttcacttcattccttgagctgtgtgaccttgggtaagtaacttaacctctctagacttcagttttctcaactgtaaaattaggaaaatagcaacttcgtaagattattgaggatgtgattatgcacattgatcagtaagtg

SEQ ID NO: 121832 - DNA, 514 bp, Homo sapiens
gctaaaaaccaagtcatggaaggacgcattcccagctttccctaaatagaccaacagaaacaaggacaagtatcaggtctcstggtgaaagtgatggatgttcaggtaacacaccccaattccatgcttggttaactcagtatatggatggggcagcattgaggcctgagatggccagatagatgcaaccgtggagatagaggtggccacagctttgcagcttcacctgggcagtggcaagagcaccaaccttgaggttggagactggtttataatattagtactgcacagggtggttatgaagattgaattagataagggaggcataagtactttgtaaaacttcacatgttacacaaatttaagggaggattactatgagtaatagacaagttatctgtgctctatttgggacacaaagtttctgtgttactgttttctttccttttacaatcaaaacagagaagttcacatctcagattttaagatgtgtactagatgctggaaaaacagg

SEQ ID NO: 121833 - DNA, 676 bp, Homo sapiens
ggtctcaaaagctttttctgttaccttacagagttttagtactatgtttgtctttgctgtgtgctctttcaaattctttttggcaagagatagagtaaaaatgcacaaaaccatgaaagtatctcatctgtatgcaatctatggccatagaacaaagaggagctaattggtccataagtggaatctgtgatctcagcatcatttcgtatggtgctctaatctaattaaccagccactgtctttggctatatgctgcttaaggatatgattcatatttatctttgtgtacccaccatctagcatatttttggcacttggatcgaactcaatatttattacatgaagttagagttccatactactcactttttaatatacctactctstatgtatttcctctttaaactagaagaaaaaaaaatttcaaaaatcacagcttgcacctccctctggctttgaaaaggaaggtaagattgtgttttttccttaaatggtttaaaattaacaaacagtttaaagtattggaagaaaatacaataaatacttttaaaattgttttattaatacaaaataataaaaacattaaattaaataataaatgtatttaattttcttgaaaataaaatatatttgaatgtcaaatgtgttgttttcaaaaaggttagacaggggattg

SEQ ID NO: 121834 - DNA, 585 bp, Homo sapiens
ataagtcacaaataaaggctaaatatagtaaaggctgaactaggaacagatgtctggggacatgtagtctgtacaccaaccatataggtatcagaatgtgtgcagctgtgaagaagtacttacacgatctgtttcagtgaagctcgtaggggtgtagttgtgggaagctgagggctaccaggagccattatagtcacagaaatggtaagacagcggagacttgagcagcgtgcagggwctcctcatatagacaaagttgcggaactgttagtatcacagtggtacttttatttttcaagcatttataacattattaacacaagacatatttaagaaacaccaactgtttataccgctttggatattggacagaaaaggaaaggtcacccttagctttaagaatagggctggtggtgttatgtttgtgagaaaaatactgcctgatgactggacttttaagaaatctgaagatgaaggtgacactgtgagagaatcattatagaaataaaactatactaaataatggagtagttgagtccttcacctgagaagcatctttaataagaaaggtaatatgttatttat

SEQ ID NO: 121835 - DNA, 597 bp, Homo sapiens
aactaggttcaccaaaaccaagcaaacatgaatatgcaaactaattgtagaactgagcaaatatacagaaactacttcccttgctctggttctgacttctcatgacaggggaagaagacacatcctaaaacaatcctagaataagatcctttgtgaaagttggttttgtgctctcagatggtttcccaagaaagtctccactctagaatttacctaatagctgttttattaactgggaagttagcatttgctttattggtgagatctctttaaagattaaaatggccaggtgcggtggctcatgcctstaatcccggcactttgggagcccgaggtggggggatcacctgcagttaggagatcaagaccagcttggctaacatggcgaaaccccatctctactaaaaatacaaaaataagccaggcatggtggtgggtgcctgtaattccagctactcgggaggctgaggcaggagaactacttgaactcaggaggcaggttgcagtgagccaagattgtgccactgcattccagcctgggcgacagagtgacactcaaataaataaataaacaaataaataaataaataaataaaa

SEQ ID NO: 121836 - DNA, 597 bp, Homo sapiens
aactaggttcaccaaaaccaagcaaacatgaatatgcaaactaattgtagaactgagcaaatatacagaaactacttcccttgctctggttctgacttctcatgacaggggaagaagacacatcctaaaacaatcctagaataagatcctttgtgaaagttggttttgtgctctcagatggtttcccaagaaagtctccactctagaatttacctaatagctgttttattaactgggaagttagcatttgctttattggtgagatctctttaaagattaaaatggccaggtgcggtggctcatgcctctaatcccggcactttgggagcccgaggtgggsggatcacctgcagttaggagatcaagaccagcttggctaacatggcgaaaccccatctctactaaaaatacaaaaataagccaggcatggtggtgggtgcctgtaattccagctactcgggaggctgaggcaggagaactacttgaactcaggaggcaggttgcagtgagccaagattgtgccactgcattccagcctgggcgacagagtgacactcaaataaataaataaacaaataaataaataaataaataaaa

SEQ ID NO: 121837 - DNA, 540 bp, Homo sapiens
gtttggctgtgtcctcacccaaatctcatcttgaactgtggttctcataatctccatgtgtcrtgggagggacctggtgggaggtaattgaatcatggggcagttacccccacgctgctgttcttatggtaatgagggagttctcatgagatctgagggtttcgtaaggggcctttccttgctttgcttggcacttctccttgctgccaccatgtgaagaaggacatgtttgcttcccttctgccataattgtaaatttcctgaggcctccccagccctgcagaactgtgggtcaattaaacctttttcctttataaattacccagtctcaagtatgtctttattagcagcatgtgaacagactaatatacatggctccaatatcattcctttagaggacacattccattgctaatttgcagaaggatttgattgtagaagggagtgtatgtggagtttcctcttacatggggtgggagttatcttctgatttgcttaaaacatctcttaaattacttaaaaagtatgtatttcatagac

SEQ ID NO: 121838 - DNA, 559 bp, Homo sapiens
agataccataagttaggactttaccatatttgggggcatacagtttaacccataatattagagaaatgactaaattatctcttaaatctgtccacagagaaaatgttactaaagtgttgttgtatgaagaggtgaccaagagtatgcagtcaaaaatatcggggaaaagaaaaaagaaacgggtgtttcgagtacttcattaaggaagcaatgtttttaaaaactgttatgtgatgtttgtgttatttaaagtcgttatgtttgaaatttcttctgatttcttattctaaaaatgcacttttattaatttttgttaataaatccatatcctatgttcttatagaagtccccacactctgaaattgtatgagtttcaggccaaacatacttggatctacacctgggggtcaggtagtctgctcctgtttgcttcggatttgctccattttattacccctccatcattctaatgcacgagatgtggggtgctgggtgcttccatgcctttgttcacagcycagccatggctgctttccctcttactaagaatacaaagttg

SEQ ID NO: 121839 - DNA, 576 bp, Homo sapiens
tactcaacctactgggttattagaataatactaatattattattcatgatatgattttgaaaagcacaaaacattcaatacaaccaaaagacacccaagttatctgaaaaaataaaccacccctcattaargttcaagtttcccttttaaggcaaatgtgtcatttatttataagttttgttttttttattaaccagtcttgttttcttataaagcagaggaaggagaagagaacatttaaaagagtcaggaagttagtgaatttacaattttccttccagactaaatacatcatatcactactcaattctcccctttacctattcaaactaatttacatagaggaaaggctatagaaacctgcaagcagatgccagctctatagaacatgtatcttccctgccaataaatgggtctacaaaaccaatagggatgatttagaaagcacattggaactttgcttttctattaaatacatctgcagggaaaacaagcaaatgaaaagaaacatagccacaagaaacatcttttaaatgaacacaattttaattttattgtcatttatcttctgacgaa

SEQ ID NO: 121840 - DNA, 576 bp, Homo sapiens
tactcaacctactgggttattagaataatactaatattattattcatgatatgattttgaaaagcacaaaacattcaatacaaccaaaagacacccaagttatctgaaaaaataaaccacccctcattaaggttcaagtttcccttttaargcaaatgtgtcatttatttataagttttgttttttttattaaccagtcttgttttcttataaagcagaggaaggagaagagaacatttaaaagagtcaggaagttagtgaatttacaattttccttccagactaaatacatcatatcactactcaattctcccctttacctattcaaactaatttacatagaggaaaggctatagaaacctgcaagcagatgccagctctatagaacatgtatcttccctgccaataaatgggtctacaaaaccaatagggatgatttagaaagcacattggaactttgcttttctattaaatacatctgcagggaaaacaagcaaatgaaaagaaacatagccacaagaaacatcttttaaatgaacacaattttaattttattgtcatttatcttctgacgaa

SEQ ID NO: 121841 - DNA, 387 bp, Homo sapiens
aataaacatagtcccaaggagataatgctaaattaagtgtcccaatgaaatatttttattgtcaatgaactraataatacctcaataaactgtgatttttttattaaatcattcccagaaagaatggtttaagagccaccagtatgagttgtaaataatcatttgaggcagatatttgctaatatttggtaatgatcttacatggacgatcaaatgaatatagctagagatatattttgcaaccagtttatcttggagggttcactagaatatatttcaaagtcacacattttgtgggagcttttgagttattttatgtatcatctttaaaaattccccaggcaaaaataattatggcaaagttctgttgctctccggagcatggac

SEQ ID NO: 121842 - DNA, 507 bp, Homo sapiens
gacactagtttttaactatgtagatttaagttttgctaccagttttagcaattgtaatcacaatgctttttttttttttcctcgaagaatcttagccttgttacctttggaaaagcttttcgtgtttgtaaataccatgatttttccacctcatgatcttgaatgcactgttcatttaaagtttttgcggaagggaagatttgaaaggcaagcaaatctcagcatatactctctacataagctagatgtatgctyaacccatgttaactacagatcctttgtgatggataagtatttatgctttttcaattccttaaatttaccagttttacaataagctctgttgtatttcacaaatcctatggcaacatctttaaggttggctgtttttctcttttgtaaattagcttcatagattatttttatagtgaacgcattaaaatagtattgaagtttaattttattgaaaaacattgcattactcagaggatcatttggcatttttta

SEQ ID NO: 121843 - DNA, 582 bp, Homo sapiens
ctcttgcttatttcaggagagctcttctcatgctattaaaattgctcatgaacttgagagtgttcccactacacactaagcttaattggtacaggagctgtggatttttcaccattttattctcagtgctttgtacaatgactggggcctaataaaaattcaattaatatttgtcagatgaatgaattaataataatcaagraacataaggataacatatattaatgttctttatgccaggtattgaactcaatgctttacagagatcatctaattaaatcttcgtagctctatatgatgacagttttgaatacataatgacagaaaaaggctaaaaagagacttagcaaatcatcaaggtgataaagctggtaagtgacagactaaggttattacacacactagatagttaggtaatccaaaatataggaatgtatagtcatttagccccacaaaacaggaacagtagtcagataatccaaaatatagggatgtatagtcatttggccccacaaaacaggagcagcactgactgaatagcaatgcaatgtatttttcagatcaccttaccataggagctgt

SEQ ID NO: 121844 - DNA, 582 bp, Homo sapiens
ctcttgcttatttcaggagagctcttctcatgctattaaaattgctcatgaacttgagagtgttcccactacacactaagcttaattggtacaggagctgtggatttttcaccattttattctcagtgctttgtacaatgactggggcctaataaaaattcaattaatatttgtcagatgaatgaattaataataatcaagaaacataaggataacatatattaatgttctttatgccaggtattgaactcaatgctttacagagatcatctaattaaatcttcgtagctctatatgatgacagttttgaatacataatgacagaaaaaggctaaaaagagacttagcaaatcatcaaggtgataaagctggtaagtgacagactaaggttattacacacactagatagttaggtaatccaaaatataggaatgtatagtcatttagccccacaaaacaggarcagtagtcagataatccaaaatatagggatgtatagtcatttggccccacaaaacaggagcagcactgactgaatagcaatgcaatgtatttttcagatcaccttaccataggagctgt

SEQ ID NO: 121845 - DNA, 541 bp, Homo sapiens
atatttatttttattttttgatgcttgaaaaatataccatcaaactacaggtacagaatctcatactaaccttccatactgccagagtaacatctctcaggaatgtctccccacctccaggtttcaaattaggcaataagtagctgggaagtccagcacagtacaggaacttcttgctaggaattcttgtgcaccatctgtgacattcatgtgctgcctgcaacaggcagctaacacaaatatgtaaccatcctcaaagcactcatgcaactgagagtactttgttggatgaagagaccatgccccgacctcagtatcagctaactgcaagggaacrgaccacagatacaagactctctggcagtgttatggagagtggcttagtacaggagcatttgccataggtcaggaggaaattaaaatagcacaagctggaagtaatgagtgttggatctgagacggaagccatgggaaagcaaaggaatctaaagattacagatttatggtagaggtgaaattgactggatctggtaactgatcc

SEQ ID NO: 121846 - DNA, 530 bp, Homo sapiens
attataatataataacgagttttgattccatttcagaactcattattggtctgttcaggatttcagtttcttcctggtaaaatcttcgaaagctgcatgtttccaggaacttattcatttattctaggtttccaagtttgtgtgcatagatgtgttcataatactctctgagggttttttaaattatttctgtgggattggttgtaatatcccctttgtcatttctgattgtgtttatttggatcttttctctttttttttctttattaatctatctagctggtggtctatgaatcttagttattctttcaaaaaacaaagttttggttttcttaatcttttgtatggatttktgcgtctcgatttttgcatctcagttttggtcaactccagttttggtcatttattttcttctgttagctttggggttggtttgtgcttggttttctagttcccataggtgatattagattgttaatttgagatctttctaacttcttgttgtaggcatttggtgctgtaaactttcc

SEQ ID NO: 121847 - DNA, 596 bp, Homo sapiens
atcacaaattaaaagtctcctatcaaagaaaagcccatgaactgtttcccttctgaattttactgaacatttaaagaattaatacaaattcttttccaactcttagaaaaaattgaagagagaacacttccaaacccattttacaaagcattaccctgacacaaaagtcagacaaggaaactacaagaaaagaaaactacaggtcyatattcctgatgaacataaatgcaaagcttctacaaaaaaaaatactagcacctgtattcaacagcaaattaaaaggatcatacaccatgatcaagtagtatttatcccttggatgcaagggtggtccaacctatgcaaatgaagaatgtcatataccacattaacaaaaggaaaagcaaaaattatatgattatatcaatggatgcagaaagagcatttgaaaaaatttatcatcttttcatgataaaaaactgtcaacaaatcgagtatagaaggaaagtacttcaacataataaaggccatatatgacaagcccacagctaacatcatactcaatggttaaagattagaaacttttctctatgaccaggaacaagacaaggatgcca

SEQ ID NO: 121848 - DNA, 634 bp, Homo sapiens
acatgtatatatgtgtgcatatatgtatgtgtgtgtatatatatatataatcatctcattttgtgctttaaatatatatataattcttatttatttatattttgaggtcaatcttayctcaatgagctataaataaaataaaccataagatcatttctattttgcaagtacttaaacttaattaagtcagtactattcctttgccccttttccttaataagaagctgatatagttaggctttgtgtccccacccaaatctcattgtgaattgtaatctgtataatccccataatccccatgtgtcaagggagagaccaggtggatataattgaatcacaggagtggtttcccccatgctgttctcatgatagtgagtgagttctcacgagatctgatggtttttataaaggactattccccctttgctcacacttctccttcctgccgccttgtgaagaaggtgccttccttccccttcaccttctaccatgattgtaagtgtcctgaggcttccctagccatgctgaactatgagtcaattgagcctctttcctttatagattgtccagtcttgggcagtcctttatagcagtataaaaatggaccaatacagaatgtttaaaaagagatagc

SEQ ID NO: 121849 - DNA, 634 bp, Homo sapiens
acatgtatatatgtgtgcatatatgtatgtgtgtgtatatatatatataatcatctcattttgtgctttaaatatatatataattcttatttatttatattttgaggtcaatcttacctcaatgagctataaataaaataarccataagatcatttctattttgcaagtacttaaacttaattaagtcagtactattcctttgccccttttccttaataagaagctgatatagttaggctttgtgtccccacccaaatctcattgtgaattgtaatctgtataatccccataatccccatgtgtcaagggagagaccaggtggatataattgaatcacaggagtggtttcccccatgctgttctcatgatagtgagtgagttctcacgagatctgatggtttttataaaggactattccccctttgctcacacttctccttcctgccgccttgtgaagaaggtgccttccttccccttcaccttctaccatgattgtaagtgtcctgaggcttccctagccatgctgaactatgagtcaattgagcctctttcctttatagattgtccagtcttgggcagtcctttatagcagtataaaaatggaccaatacagaatgtttaaaaagagatagc

SEQ ID NO: 121850 - DNA, 609 bp, Homo sapiens
tcagtggcacaatctcagctcactgcagcctccgcctcctgggttcaagtggttctcatgcctcagcctccctggtaactgggcctgcaggcgcacaccaccatgcctggctaattttttgtatttttagtagagatgttgttttgccatgttggccacgctggtctcccaaagtgctgggattacaggcatgagccacagcacctggcccagaatttgcatttctaacaagctccaggtgatgccgctgctgctgctgcttgtctgggtgccacactttgaggacctctgttgtaagaaataaaaggaagttcaatttaaatccaaatgtttggaaatcatgtgaaaactttgggtaaagggtgctatttaaattggggctgaagctcagaaattaaggattgcaatctcagagctattcacatagcgttttgtgctttgatttactcttgatataataaggctaatgtatggagagataaataaaactcttrggtgacatttcaataggaattatgtaagtgcgtaagtgacacagaaagtattttattactcacaaatatgcacatttcagcatttcacttgatttcttttgcacttctattttga

SEQ ID NO: 121851 - DNA, 628 bp, Homo sapiens
gtgggggatgacagtgttaatgatgagcacgtgaggggttgccagagtgggggttagctgaagagaatggaatgatgaatgttttgattatcttttaatatgaaagtgagatcacctatatgcagaacattgtcgtggagatagccattttggcacttgtgatagtagaagttgaccttccttttccttatacaaaggaaataaattggcatagattataatttaatttatacttkacatactgaaacaaaataatttatgtatttactgacagaactgcagaggtaaatggtggtgcaattgaacatttgtaattaaagcaagaaattagggaggaaggccattaaaacttaaagtaggaagttccctgccaaaacataagtgtaagcattaagtcagagtttgcactcatttagagggaagtcattttaagattttattgactgactgattaattgattgagacagggtctctgctctgttgcccaggctggagtgtagtggtgccatcagggctcactgcagcctcaacttcctggacttaagtgatcctccagcctcagtaaccctccctccccctgtccactcccagtagctgggactataggcacatgccaacatgcatggc

SEQ ID NO: 121852 - DNA, 649 bp, Homo sapiens
cctacatcactttcttctcttactatgcatgtacttttctcatctttctatgcctggtacccagtacctacgttgcaataaacacaccttggtatatgaggaaagaatgaataattaaattaatgattagtgaatcagtaaatattatatcttgcctcagaagcaactttaccaatttttctcaagaagtttaaaatatacaggttactaaatcctatctctcacttccctgaaagtctttaggagtaggacctgtgaatctgtatttttartagtcaaaacagaaataagaacctgggtttaagaaaaagttgtgcccaacatactgattcagctcacataaaactcccaccttaattcacacttacaatatcagagagcttgataagaccaagctgagggcatcaatgggaaaggagggactcatctcatccttaaatcctacctcataggagagctgcttacctcgtaaccaaccctacctggaagaaagcctgaatgtgcttcacatttcaggcacattatataatattctttgaataatatcaacataagaaatgcctgcagttggttccaccaagctgtatatgggaagttgttttccccctggaacaagcagtcctcagcatacaaatgggtcatattccaa

SEQ ID NO: 121853 - DNA, 533 bp, Homo sapiens
agcaacttcttatccattcaagttttaacatgagattggaggaatccagtccaatcttcaagctgaacttataatatcagttctcttgctatttccaccacatctacagttccttcctacactgaagtcttgaaccctcaaaagcatccamggaggttgaaatcaacttcttccaaactcctgttaatgttgatattttgacctcctcccataaattatgaatggtctttctgacatctagaatggcaaatcctttccagaaggttctcaatttgcccagattcatcaagaaatcactatctatggcagctatagtcttatgaaatgcatttcttaaaaaataagacttgaaagccaaaattactacttgacccatgggctgcagaaaggacactgtgttagcagcgtgaaaataacattaatctccttatacatctccatcagaggtcttaggtgaccaggtgcattgtcaatgagcagtaatgttttgaaaggaatctttttttctgagtaatgtgtctcaacagtgagat

SEQ ID NO: 121854 - DNA, 533 bp, Homo sapiens
agcaacttcttatccattcaagttttaacatgagattggaggaatccagtccaatcttcaagctgaacttataatatcagttctcttgctatttccaccacatctacagttccttcctacactgaagtcttgaaccctcaaaagcatccaargaggttgaaatcaacttcttccaaactcctgttaatgttgatattttgacctcctcccataaattatgaatggtctttctgacatctagaatggcaaatcctttccagaaggttctcaatttgcccagattcatcaagaaatcactatctatggcagctatagtcttatgaaatgcatttcttaaaaaataagacttgaaagccaaaattactacttgacccatgggctgcagaaaggacactgtgttagcagcgtgaaaataacattaatctccttatacatctccatcagaggtcttaggtgaccaggtgcattgtcaatgagcagtaatgttttgaaaggaatctttttttctgagtaatgtgtctcaacagtgagat

SEQ ID NO: 121855 - DNA, 533 bp, Homo sapiens
agcaacttcttatccattcaagttttaacatgagattggaggaatccagtccaatcttcaagctgaacttataatatcagttctcttgctatttccaccacatctacagttccttcctacactgaagtcttgaaccctcaaaagcatccaaggaggttgaaatcaacttcttccaaactyctgttaatgttgatattttgacctcctcccataaattatgaatggtctttctgacatctagaatggcaaatcctttccagaaggttctcaatttgcccagattcatcaagaaatcactatctatggcagctatagtcttatgaaatgcatttcttaaaaaataagacttgaaagccaaaattactacttgacccatgggctgcagaaaggacactgtgttagcagcgtgaaaataacattaatctccttatacatctccatcagaggtcttaggtgaccaggtgcattgtcaatgagcagtaatgttttgaaaggaatctttttttctgagtaatgtgtctcaacagtgagat

SEQ ID NO: 121856 - DNA, 533 bp, Homo sapiens
agcaacttcttatccattcaagttttaacatgagattggaggaatccagtccaatcttcaagctgaacttataatatcagttctcttgctatttccaccacatctacagttccttcctacactgaagtcttgaaccctcaaaagcatccaaggaggttgaaatcaacttcttccaaactcctgttaatgttgatattttgacctcctcccataaattatgaatggtctttctgacatctagaatggcaaatcctttccagaaggttytcaatttgcccagattcatcaagaaatcactatctatggcagctatagtcttatgaaatgcatttcttaaaaaataagacttgaaagccaaaattactacttgacccatgggctgcagaaaggacactgtgttagcagcgtgaaaataacattaatctccttatacatctccatcagaggtcttaggtgaccaggtgcattgtcaatgagcagtaatgttttgaaaggaatctttttttctgagtaatgtgtctcaacagtgagat

SEQ ID NO: 121857 - DNA, 528 bp, Homo sapiens
accacactggacctgcatggtgctgtgactgaatggcactttagcgtgttctgcctctgggaggcagtaaatgtacatatcgtgaaggaagaaaagaaaactttatgtttgttagctagacagatgtccagtggtagtcattagtgctattctgcatttccccacccagccaaattttcctggtaacatgacttgctctggcaaataaaatgtgagcagaggtgagatgggtgtaattcactgcacactctctttccctttccttttggcacagccacacacaagttcaggatggtagctcctccatctgattgggtcactgagggcccacaatatgtrgaggtaatgaatatacatcattagcaagaaataaacttcaactgtttaagtcactgagaggtttgggggttacatgttgccaccatgctatcctagccaatcctaagtggtacatgtagacagtgaattaattagcacctgtattttagactatgtagtagtcattgctggggtggaaacagtaacttt

SEQ ID NO: 121858 - DNA, 572 bp, Homo sapiens
tgtttggtcacttttgcttaaaggattgtaattacataatgcatgttgaaatcatattaagtaacctggccacttgcctatttacttcttgtggctaacaataatgaatgaaaccatttatatatgttgttttagtatatcacaaaattttatagaaactagaagctcggtgatgaataatagacatccatgagccttcttatttgttttgaatttgagacattttctagaatattgctgtttgartgaggcttcagtactttacagaatcgttgcctgcacatcttggaaacacttgctgggattacttcttcaggttaacccaacagaaggctaaagaaggtatattgctgttgacagtgagcgactgtaaacatcctcgactggaagctgtgaagccacagatgggctttcagtcggatgtttgcagctgcctactgcctcggacttcaaggggctactttaggagcaattatcttgtttactaaaactgaataccttgctatctctttgatacatttttacaaagctgaattaaaatggtataaattaaatcactttaaaaccatgtc

SEQ ID NO: 121859 - DNA, 586 bp, Homo sapiens
aataaaacctagagaaagcatattctgaataggagagaacatggtttattcttgtaatcacttaactgaatgcaggcattccattgtgactcagattctaattgaagcacagtagaagtttagaaactgtgttaatggttttttttcccacttaccttttcctttgtcaatgtcatagggtgctaggaatcactccactctgaaggattcccttgtcttcatggcccagtttctctgacaccgtgtttattcttatgatgaccatggtggtaagcggggacttgacaagatcccttttgcccttttattgtcaacggaatttaatagaacaacttctttgaggctcttcaaacatgaactctccatttcaaactgcttccaagtatgtcactactaaacagaaatttctagtgaaagaaataaaccatatgctgcttttcccttcagcttattttaaccatatggtactagaaatcrgaatgttacagtgctattaatttaaactccccgtgtttccagcactactgttccccagttaatttaaagaaatctttactactggcctggaaaaactgtctttgccaaa

SEQ ID NO: 121860 - DNA, 581 bp, Homo sapiens
gtaattgacactgaaagcttttggaaactgaagtttatagcactgggcccaaatcaatgatattttattttattttatttgaggtatttgaatagggcrttagttggcatgttctaataccatgtgatgaagcccaagtttgggcaaagtattaacctcctctacaacaaacagaagttagacaaggttttaaaattaccaccagatctttgaggaacagaggaagaaagtgttctagagataccacaaactgagcttcatttgatgtgggtttatttctcgtgggccactaataatcacatgttaaattttctcctccatatttaaagattgagagtccatcctaccctttattataagttgattaaaaaacaagactctctaaaaaactcaaaatactgggttctagtcctggattttccaccaggtcacaagattcttagcctttatgtgtccagtgacaagaaacatgactcgtaacctcggtttgcacaatcttctctcaggaacttcccagggaatgtgcaatttctggctcacaagcagggaataagctgattcattcttctgctcaagaatga

SEQ ID NO: 121861 - DNA, 632 bp, Homo sapiens
gaatgcaataatattatgatacaaatattagtgtgatgtaaatacaaaatatatatctgcaatcctttccagcccttgggcsactagcctgtaagttccaggagaacccggactgtctgatttgttcactgttccatcctcagagcctggcacagaagagatgtccagtaatattacatccagtaatatttttgggtcaattaaaagattccatagtaattccttaatatgtaaggtagaggttttaaaattattattacccggtcttgtttgtttacacatgaaacaaacccagctttaaagaactcaaataaaaaggaaaagatgctgtttgtgtgattaattctagaacaaaaggtgtgtgcctggtcttgggagcaactctcaggggtccaaatcagcaggctttctgtctccatctctcatacctcatttaccccagtgtcctccataaggtgactcatagtcacaggtagcatgtcagtcacatttcagtttccccatcagagaggggtttcctcctttccttagtttcagtttgactctgttatttttactcactcttagcagcaaaggttaggagacagggtaaagttcagtagaaggccttttgtcaaggatttgctagttca

SEQ ID NO: 121862 - DNA, 552 bp, Homo sapiens
cacctaatactggagctcccaaacttataaaacaattactaagaaatgagataggcagcaacacaataatactgggggacttcaatacttcactaacagcattcgacaggtcaccaagacagaaaatcaacaaagaaataatggatttaaattataccctggaacaaatggacttaatggatatttacagaacattctatccaaaaaccacagaatatacattctattcatcagcacatasaactttctccaagagagatcatatgataggacacaaataagccgcaaaaattttaagaaaattgaaattatatcaagtacattctcagaccacagtggaataaaactggaaatcaactccaaaaggaatcttcaaaactatgcaaatatatggaaattaaataacctgcttctgaatgatcattgggtcaacaatgaaatcaagttaaaaattaaaaaattcttcaaactgaatgaccatagtgacacaacctatcaaaacctctgggatacagcaaagacagtgctaagaggaaagttcatagccctaaa

SEQ ID NO: 121863 - DNA, 616 bp, Homo sapiens
  misc_feature (1)...(616): n = A,T,C or G
aagatatccaggcagtatgggccaccaatagtgcatgtttaagactgtgtgatgaatagctgaatgatgacataccctgtcagtgtgtttatgtgactctctatataatatcatttggagataatgccaaaagcataactttgaagtggcaataaatgctaaaccatagcaaaatggctgtttgccacacacacctccctgctcatgtacacctggagcaggtgactgcaaactgaacgtggtaggcaatggrtaacatgtagggtagattttaaagaactaccagaactaagcaataatgggaggtgagacaaatcatgaagaactttgcagctatgctcagaaatttggaataaaggcaaaagagatctcaagagttcccttctctgaaaaaaagatagtgacaatgacaagccaatacttgcattttcccattctatatgtcactttcttaaaagactgtgatcttctgctaaaaatatcgagtggactcagaattaaataccaaatcatcgtgtacccatcgaacaagatgacaaaaacattgaaaaatagccttagttgagtaacttgngatgtggagtgatctggcttaaagatggaattttggcttatg

SEQ ID NO: 121864 - DNA, 610 bp, Homo sapiens
actgtgctaagtgctttatatgggttttatcacttaatcatccaataaggaaggttatgacttataaggaactgaattttacaggcaaggaaagtgaaatgaaagaggttaagtaattttctaatgctccatagagtacatggtagaccagagatgaattcaagcagtctaagttaactactcttcatgcttggcacatggttgaaagaacaagaagtatatcttgtcaatagcgattgcaaatcctmtaaaatcacctaagtgtatggattttctggatgccttagcacatagccatgtatgtttgtgtgcatatacattatttgtttttgtagatttatatataaataatgtgtctaatgtctaagtacttttgcccttttttacgttattagtttatactggtgggggagattagccctaatatttattagagggagaaaaagtcatttttacagcatcctgcacatagcaactcttcaacgaatgcctattgaattcatccttattttctaaggaaagtggcaatggatcagaacgagaagatccaggttttagttctggttttaatggtgattcactgtgaggaaaagaccaggttggctgtctt

SEQ ID NO: 121865 - DNA, 506 bp, Homo sapiens
aagctaacccccaagtgaaaacagctctccagaacccttgtgtgctgtaatataatacagatgctggtctatttctaatgtctttgaaatgtacattgatataatgggacaacatgctttattataaacacgtttaaacattcatrtgtttcatattggtgtgtcaaaagatccatcaacaatttaattgtagtattttatactccataaactagtacatattcaggtaaaacaaatattcttcattccagctaatataaccacagtgaaacttcatgtattcaaccccttcttatctgaatatataatttttcagaattttgctttctagccaggatatagatattaataaacagacattcaaatattttcacatatttttaatctgagatgttttaatcccaatgtatattaagatctcatgaatatgtggtataatgaggatatattctccacttatagcagaaaattagaggtggtatatccgttaacttttgatcaaagaa

SEQ ID NO: 121866 - DNA, 526 bp, Homo sapiens
ccctttcccttgttcaggccacttcagattggaagcccacacctactccaggctgttttccaactggaaaatgatgtgatggggtaatcctgctctctatctgtatctcaccagcagaatgcatactctatcagaaaggttctttggtggaatgtatattctctgtcctggagctccccaagtgcccactgtctctgacctcaaagtccaggcctttcaattggatgacccaagactaccccactgtgattctttctcctgagtgatctacactttcttttgtggcaacactcactacmtcctgaccctaccgtctctaagatatggtgcaggtgcttctgcactcttctggctgccaaaccagtcagccctttgcttgctttctagatttctaaaggcaggattcagatataatgctacagtttgtctaaacccaataaataaactgttctctccccaggcctcagacaaaacaaacatgattatcttccttctgtatgtcagtaaggtgagcaacaccattctc

SEQ ID NO: 121867 - DNA, 541 bp, Homo sapiens
atttattctgcatttgagatgacagttgatggctaatattttctgtggggaaaaacatagccttaagaaacaaacttagcatgcttaacagtgaattgtggtacagcaacaatagagacccaacttatttttaaaattccagcaaccaaaacaaataaaaaatatgatgttataatgtatatattataatatttgttacattaatagaaggtgaactacctgttattgtaaaagaaaatccaatttacygtctgttgccttcaattttgatttgacaaatgcttaatcttacgctgtgtttcaagtcctgtcatttatcttttggagcatgtactgtaatgtctccttgaggcaaataaaactatctttgcatttcatttactaaaaatgcttaggtatatttgagtttattaggtgcaaatatgtgagaagctaattctgttgttaagatctttttggcatgtgaaatccatcatgactttaagtttgaaactgttgattgcatccttatttgtatcaaaagaagaaggcacatgatgac

SEQ ID NO: 121868 - DNA, 664 bp, Homo sapiens
aaaattcctctctttgtactgtctctttttatttctcagccagccracacttatggaaaatagaaagaaactacattgaaatattggaggcaaattcccccaatactgggctcaagtgatcttcctgccttggcctctcacagtgctggggttacagacatgagacactgcacccaagctgattttctcagtcagctttgatggaggtacttgacataaacttaagaaggcctttgtgctgtatctccatctcacactttcctatcagttactgccaaatactttcctgccttaatatccaggccttgtcttcttcattgattagaattttctcagtgtaaacttgcatgttgcccggcttagttactctccattctgaagaagctctgcataacatgcaccaacagctggcttacaggcctcaatgagaaggaacggtgtttgaaatctgtctcatttcttgggctaaagctttctcttttgagtcttagacccattggagtatttgtaaagctatgaaccctccacaaaagtacacataattacacatacataccatcagtagtttccagattctggaaaactctttcatagcactccctaagaagttaagtcccagctctagagaccatttgaggcagttgtagactgtgatatgttgttt

SEQ ID NO: 121869 - DNA, 524 bp, Homo sapiens
tctagacaaaaagtttgtttactcattatcaccctctaacaggcttcttagccaggtcttccaacatcttcccaacctcgcccttctcaaggccacctctattacatttacaccctgttgttgagatcatccctaatattatgcacccatgattttcccagaagcccctcttcccttttctcattctttttttcttcacatttctctcttgctttcctgatgtgtgttatgtgagcatttctttgctacccattggtgtctgccatttcttcccctgtggtctagtttagtatggtggtgttttacagaagaggatggttctccagcaaaggccccaccctcaagcctggatccccatggccctaggtgagaagtattcttgtttttgtgcccaaaaagttgccttttggcctgccatgccccctatyctgtacccacataaactccaaaccccagactccagaagcagcagacaaggagacaaacagtagaacaacacagagaaagagaaggaatgtctggag

SEQ ID NO: 121870 - DNA, 544 bp, Homo sapiens
aggtatttgcactcccctgttcattgcagtgttatttacaatagccaagttatagagtcaatctaagtatccagcaacagatgaatggataaagaaaatgtagatttacccaatggaatactattcagccttgagaaacaagaaattctgccatttttcaatgacgtggatgaacttggagaacactatattaattgarataagccaggaagaggaagacaaaaaccacgtgttctcccttacatgtgaaatatctaaaacaatggaattcttagaggcagagagtagaacgctggcttccagagtgtgaagtggggagtttgtgaactggtgaacctgaaaaactgtaaaatctgggttagatggtaggcaatatataattatttaagatggctatgtcacttagcttgattcaaccgattccataccgtatgtatatgtgtgtgtgtgtgtgtatatatatatatatatatatatatctcataacatcactgtgtacttcataattatatatgattataagcagaaaataaaataaaaatgc

SEQ ID NO: 121871 - DNA, 544 bp, Homo sapiens
aggtatttgcactcccctgttcattgcagtgttatttacaatagccaagttatagagtcaatctaagtatccagcaacagatgaatggataaagaaaatgtagatttacccaatggaatactattcagccttgagaaacaagaaattctgccatttttcaatgacgtggatgaacttggagaacactatattaattgagataagccaggaagaggaagacaaaaaccacgtgttctcccttacatgtgaaatatctaaaacaatggaattcttagaggcagagagtagaacgctggcttccagagtgtgaagtggggagtttgtgaactggtgaacctgaaaaactgtaaaatctgggttagatggtaggcaatatataattatttaagatggctatgtcacttagcttgattcaaccgattccataccgtatgtatatgtgtgtgtgtgtgtgkatatatatatatatatatatatatctcataacatcactgtgtacttcataattatatatgattataagcagaaaataaaataaaaatgc

SEQ ID NO: 121872 - DNA, 521 bp, Homo sapiens
tacacgacaaacctctatgacacaagtttacctaggtaacctgcacatatacctctgaacttaaaaagtttttttttaataaaaaaggatgtgctttatttgtgtaatgagaagaaataaaataccaattakattgtaaaaatggatgactctgaaggagcttttattatattgaatattgatgtttcatggggttaaaaatgagagatttaaaaatatacaggaataatacatcaattggtatggtaatgattgaaggaagtgctttaagtttagatggtgtgagaagtgaataaaatgtactgattaattgtaaatatagatgtgatttctagtgtaactactacaaatgactgctatatagaaatgaatatttaactttcaagctagtacaatggaaaaatgaaacaggaaaaataattataaaataagaaatagaaaaaaccatagaaggaacagaataagtagaaaaaagatattaacagatgtaagtatagatgtaatttctagtggaaccacta

SEQ ID NO: 121873 - DNA, 583 bp, Homo sapiens
tgtttttctagtcaacattggctccaaattcctgctctgtcatagtatttccatgtattgacattttcattcattaactcacatatggatcccaggcttttttgtttgtttaacacatgtcaacaccatcaccacttaaagaaggcattggatttgctatgtggacttcacaggaaatttaggaagatggaaggacattcacaagatgataagaaaagattggaattgaaaaagttagtcattttttttttaaatttctttaagctgtttttctccagttgactctagcctccctgactctctctgcttctctcttttccttagattcccagtaatgttgagayatattccttatacttaggaaaagtaacttacttgtaactgacaaatgtagctctgtccttttctttgaatattcaaggatttaataaacgtttctaaacaataggtcatcttctctggctgttaccatttctctttctcctacctaaatataaacaaaaagagaacagtatagagatatacttctccaaatctcagactttttatgtgactttccattcctctcccatctattaacggg

SEQ ID NO: 121874 - DNA, 597 bp, Homo sapiens
gatgaagggttcataggaccttcgtgtacattttttttacagcttcctgtgaactgtaatgacttcaagtgaaaagtttttacaaaaacggctcattagtttgtaacctgaaatattacctttgccaccagcagcatgtgaaacacactctgctacaatggactctgttatgctgtcccttctccttgttcacttgactgacggtaggttctagctcagtctaaatttcctctcaaagctactgcttctgaagcctccctaatttcctttctgtagggcaaacttagcaagtcccttttttatggtctcactgcattttatatatatatgtccatagcagctgttacatttcttgtatttttctttttagttctgtatccacctttaaacttcaagaagcttggtggtgtttctgcattgtcctctttttttttctttgacattattatcctcacactaccaaattttattgaatgaaatctatttarcctcaatgagaattcttataacagataagacctttaaatatcagtacaattttgcaagcacaattgttaaaagcccattggttaaaacaggtttcttaaattcagcatt

SEQ ID NO: 121875 - DNA, 520 bp, Homo sapiens
ggtgtcctcacatatttagtatgaaaatttttaacaagtttagcaccatttatcctgataaaaggaaaataaaaataaacaactaaaaagggatgttacattgatggttaaatcgttctttgtactcagtgaattgtgaagaattattgttggacttaaatatacctagaaaaaagtttaggattaatgataacatcttgcctttttgctgttttattttaaaagattatttatttgacattacaaaataagtatatggctattaaagaaacctggaaaacatataagagctggagaaaaaattatttctcatcagcttactacctaaaggcaatcagtatttacattttgaccttagtttctctgtcattttttttaaacatgcctttaaaaatataactaagtgttaatacacacaaatttacatacatagtgacatatttttattaaacataagcattgctcttagkgtatcacttaagtttattttcttattttttatgttcaatgcttgagaatc

SEQ ID NO: 121876 - DNA, 640 bp, Homo sapiens
ttggttttcctttgtgcctccagtgcctaatacagaacctgatgcagaaaagggatgataaataattgtgaagttaacaaattaataattctactccaaagtaattttctcctgctatagtgtgaattatttggcaccttttctaactaaagatagagaaggggaaaaaaaacaccaacttaatctctgatgttgtacccttcaagagaaatatcttctgaaaaatagatagtgattaaagactcagatttattaaacttacaagtaagtattttcrgaactaacagaatttaagtttacttttcaaatcaaagaaatccatcagcatttatttgagtatattaaatagtgttttgcaaaacatcagttctcaggattttgctagaaaaaatgtgaaaaaaattatccaaaatcaaataagtttaaaacaaatatggcaaacaggcttctttactgaaatacttttcatagtagttgagggaataatatactctggaatatagtatgctggtatcaaaaacttatttgaccagggaactttatttttatagtaactttcgtaatacttatgttccatgttgaaaatgtcagattagaaaacattttaaaatttcaaagctaaactccagaaaatagtgtg

SEQ ID NO: 121877 - DNA, 632 bp, Homo sapiens
ttttccccctctgaaatatggtttgttttcaaaaagaagagaattactaaagaatttcactactgtatagaagagcatctttttaattaaagaaaaaatatatctggcatgattattagcattaaaattctctctatattatacaaacattgtttaaaaattatacaaaaatatatactcatgaaaggaaagaaatatgaatactcaaatttgaccatcaggaataaaactacatttagatttaaaaaaaatgggtaaggggacatagcacttttccctctctgaaacatacataagtgaaagttgaaaagatatgctaaaagcatatttttctcttgcttaggattcatcatcaccgagtttctgtttgtaatartgattttaaaatattttaaaatttggctaaaaaaaatgagcctcttaggcctgacatcatgtaaatatttttcaatacaatatgttattcttcacaaccatataaacattgacataactataattactatcattattatctacatatctgtaattaaagaaatggaggtgcatagagattgaatacttgtttaacaaaccttactgaattccttatatgtgccagttatttcaataggccagggagcaagttaatg

SEQ ID NO: 121878 - DNA, 632 bp, Homo sapiens
ttttccccctctgaaatatggtttgttttcaaaaagaagagaattactaaagaatttcactactgtatagaagagcatctttttaattaaagaaaaaatatatctggcatgattattagcattaaaattctctctatattatacaaacattgtttaaaaattatacaaaaatatatactcatgaaaggaaagaaatatgaatactcaaatttgaccatcaggaataaaactacatttagatttaaaaaaaatgggtaaggggacatagcacttttccctctctgaaacatacataagtgaaagttgaaaagatatgctaaaagcatatttttctcttgcttaggattcatcatcaccgagtttctgtttgtaataatgattttaaaatattttaaaatttggctaaaaaaaatgagcctcttaggcctgacatcatgtaaatatttttcaatacaatatgttattcttcacaaccatataaacattgacataactataattactatcattattatctacatatctgtaattaaagaaatggaggtgcatagagattgaatacttgtttaacaaaccttactgaattccttatatgtgccagttatttcaatakgccagggagcaagttaatg

SEQ ID NO: 121879 - DNA, 587 bp, Homo sapiens
atttattgttattggtattactaatgaaaattatatttattcttaaaaatataatttgaaaagaaaatagagagtatgaatataagagtgtgggtgatagggaataagtgctatcaatggatactacaactgtagaatatgaaaaatcttatctactataaaacattctctaagttaggatggaaaatgccatgttagcactccccccaccatcctccatggcagatatcattaaaagtaatcatcctaatgagcttggacatggccctagaaccctcctaatcttagtgcctattggaagcactcaagataaaacttaatttaccatatctggcctagatctaggcttcacctagattctaaraataaaaaatcaaaaaggcaagaaactctgaatgaggaatgtgcatgtactggggataaaattttgcaaaataaaatgtaaattaagtcacagttactataattgcctgcctcgccttatttttgaatctctagaattttttcattagcaaataactcaaaattagttgcaaaattgtgcttaaaataacattgtaaatcactctatagggcattcctggaca

SEQ ID NO: 121880 - DNA, 539 bp, Homo sapiens
aattccatgtaaatttttaatagttttaaaattatattgccaaattaataaggttgcttagaagcaaagaatcagaacagaggaacatggattatctgaaggaacatttcatctaaaaccaggtagcttccaggtaattatcaatatccyacaaaaaagcgtatcacatggaaactgctaataaatatctccttgcccacttgtgaagttttctcattttacaaatccacagtcaagcagagacttcaaaatttcagtggggataagcagtattcctaatggttttgccggctctaactctggctaattttttttgaagatgacatttccgactatattatctcttaacaacacattgaaggcagataaaagccaggagttataagaccaatctctatcatatgggcaacactataggtagatacatatttaaccttattttaccaaggaaaatgtgaaataatttgtttgttaaatgtaccagtgggtttctattttcagtttcctaaggaaactatcattatcccttattttctttc

SEQ ID NO: 121881 - DNA, 648 bp, Homo sapiens
aaaacttgaggataaatagtattacctagaaattagaaaacatatttaattggatgataataaatgcacaacaaattaaaattagtgaaatgcatctaactcaattcttaaaggaaatgtatagttttaaatgtaacattagatgagtagaaaggtataaagcaatgacttttgtttccaagtttagaatctttgaacagtaaaaatagaacctaaaataaacataataaacaaaataataaaattaaaatagaaaaaagaaacacaaaaataatagagaaaatcaacaaaaccagaagttaattctttgatraaattaacggaattaataagtcactagaatgacttttaataaatgagagagagagaaagacccaatgtaacacaaagaatgaaaagaggaacttcctcagagatgctgctaaaactaccagtctaataatggaatatcatgaacaactttatcccaataagtttaaaaacttagattaaatgaaaaaaattattaaggcataaatcaccaaaactgattaaagaaaaaatagaaatgctaaatagccatctagccaataaataaactcaattataattaaacaaatatcctcagctcccctacacacacacacacaaacacacacatacacacac

SEQ ID NO: 121882 - DNA, 659 bp, Homo sapiens
tgaaaattaaacactatttctctaagattatgaacctagcctgagcaataagacataaaaaagaatcaaaattagacatattggtgagaaaraaataaaaacgctcatatcaggaaatgatctgatcatctatttaaaaatcctatgaaatctataaaaaactattagaataaatgaatttagcaagatcagtatataaaaagtatatttctgtatactaaccatgtaaaattagaaatagaaattaaaaatcaataacaaatagcatcaaaattatgaaatacttaagagtaaatctgacaaagaaatggaaagcctatactataaactataaaactataaaacattgttgagagaattaaaaacctaaacgaatagatgtagtgtgcttataaattgcaagttcaaatattgttaatgtaagaacatgtatgaagagcaaatatgctcatgaaaatttgcttaacttcattagtgattagagaaatgcaatcaaaacccaaaagatacactattacacactactagaatgtctgaagttgaaaagactgactatatcaagttctgtaaaggatgcaaaagaactagaactttcatacacataatcactttggaaaactatttggcagcttctaaaaactgaatacatttacctacca

SEQ ID NO: 121883 - DNA, 659 bp, Homo sapiens
tgaaaattaaacactatttctctaagattatgaacctagcctgagcaataagacataaaaaagaatcaaaattagacatattggtgagaaagaaataaaaacgctcatatcaggaaatgatctgatcatctatttaaaaatcctatgaaatctataaaaaactattagaataaatgaatttagcaagatcagtatataaaaagtatatttctgtatactaaccmtgtaaaattagaaatagaaattaaaaatcaataacaaatagcatcaaaattatgaaatacttaagagtaaatctgacaaagaaatggaaagcctatactataaactataaaactataaaacattgttgagagaattaaaaacctaaacgaatagatgtagtgtgcttataaattgcaagttcaaatattgttaatgtaagaacatgtatgaagagcaaatatgctcatgaaaatttgcttaacttcattagtgattagagaaatgcaatcaaaacccaaaagatacactattacacactactagaatgtctgaagttgaaaagactgactatatcaagttctgtaaaggatgcaaaagaactagaactttcatacacataatcactttggaaaactatttggcagcttctaaaaactgaatacatttacctacca

SEQ ID NO: 121884 - DNA, 576 bp, Homo sapiens
tctaacctcaccaactatagcaggctcctaacttatctgcctgcactaaagtcctgttcccatctaaaaccagtatattgattatctactgttgtctaacacattgcaccaaaatgtagccatttaaaacaagcatttattattcttcctcatggtttctaatgatcaggaatccaggcgtacsttagctgtgtggtactggctcaggtctctccaaagattgcagttcagctgttggctttctctaatgtcatctggaggcttgaccaggaccaaaagattcacccccaagatgttttcctcatatgactattgttagaagtcctccattccttccacatgggcttgtctacaagtctttctgagtgttcttacatggcagctgtctctctcagggccagagatccaagagaaagagaacaaagaagaagccacatgacttctgtgatctagtttctgaagttatacaccatcacttcattttattctctttgttagaagcgagtcattaggttcagcccacatgcaaggggagggaaattaggctccaccttctaagagaaggagcatcaaaga

SEQ ID NO: 121885 - DNA, 511 bp, Homo sapiens
cacataaatggatcgactgtattacctcatcactaccccgacaggagggagtttgggcctctgcstgggatctgttgtgtccaacttcagggtaaagtgtgagtgagaaatattaccagagacaacagtgaatggttttgagactgagaggtggacatctttctatgaaatgcttgcaatcgaaagccaggccgatccttcagcagtcatcaatacaaagagctacacagaatggatagaaggagggggaaaaaaaggagagacttgaaatacagtgggggaggaggcaggaaaacagggttgtatccttattgaagaaattttctagatcttggaacctagcaagaaatatatcttgtagttgacccatggcttttccgtggccaagagaattgctgttttggctattattgattctgcttagagaatacccttcacataagtcacaatgtactaagtttctcctcaactttctttactctcctacctatagtatcccattcctttcctt

SEQ ID NO: 121886 - DNA, 568 bp, Homo sapiens
  misc_feature (1)...(568): n = A,T,C or G
aactcagtgtgatcacccagaacgattttagctatattgaacttacagataatgaaaattaataggtcttttttccccacaggaaatgctaacaaggtggtttcttcttcctgtatttgtcaaacttactccttttaaaagtgtagttctttatatttaatcaaaatatatttgtgtatgtatattgttttatcrcataacttatcaaaatcttttataacccaaattcatttacttaaatatttccttctacaaattcatcacatctacagatatgatatgcctgtcacttatgtattcattatcctgatcactaataggatggtcgggcgggagattgcagctccnatggcaggtcactgcaggggaagagatgagtcgagggttgcatgacgtgttggtcggtgcgatacggccatttgcctagctattggtatgtacttctgtcctgttcatcagtctacacagtctatcttgaccatagtgataaaaaaagacttttccaaaagctatgtgaaatcacaaaaacccttgctatcaaaaaatttcagaattagaagcctaaaaa

SEQ ID NO: 121887 - DNA, 658 bp, Homo sapiens
tgtgttctcattgttcaattcccacctatgagtgagaattaatggttgcagcacaccaacatggcacatgtatacatatgtaacaaacctgcactttgtgcacatgtaccctaaaacttaaagtataataatagtataattaaaaaaaaacaaaaaaacactgcagaacatttacatttgaaagagaattgttaaaggtgtttatattaccttaatatatttttatattttgtgatattttaaaagttatttagcatttgatggttactatcagaaagaaatatgatccaattactayttaataattaaaaatattacttctgtttctagtagtaacaaattggaagcacttatgttagaactgaagagaaaatatggaaaaacttaaacatggtaagtgtatgagaatagaaatttttatttttatatgtttatatattttatttaacgatgtattgtgaccaatatccatggtaataaatatttttcaaaaacattgttttcaatggctataaagtattctcctaaaggaaacacctcttcttccaccatccagcaatagactgctgatgaactatgcattctttgtcccaggacaatataatataataaagttacacgagttttaagaaatagttttataaaatcccccatgtga

SEQ ID NO: 121888 - DNA, 491 bp, Homo sapiens
ttcacattttaaaatttcattgatatttctatattcatcttatattcagcaacttttctaaactcacatattaattctaattaaycattagattcacttggatttcctacatagataatcatatcattaggcagtttgttgttttcttttctaatccttattatcttcatttctttgtcctgtctcactatgctgactctgacctccaactcactgctgaatgaagcagtgcaaataagcatccttgctttgtttctgactttaaagtgattgcctctaatattttgactattaaataggaaatttgccatatacttttggtgaatgccctttttgaagttaaggaatcccctttagattcatggttttctttgaatttccatcatgaatttatcatattttattaaatagttgttctgtattctttgaaataaaaaacagtgatttttttcctcaaagttgattacacatttaaggaattcagtgaataa

SEQ ID NO: 121889 - DNA, 583 bp, Homo sapiens
cagaacatacttggcctcacctatttaaaactgatttgttgccagaaacaaccaaacactaatagattttcaaagtcagtggtgagaatcaggggcagaaacaccaggactagaaccttggtatcctggaattataatcctggcctcaaccaaccagaacaggatgctccttcaaaagcaaaacaaaacaaaagaaaaaaggaaggcttttctattgtacacatccaaggcactgtcagcacatcactgtttcattgttctgcccattcttcatgggagcagtcacaattatgtggtcatgcctggttcttttcctarttctaataaaagaatgaggagaaagaattccacatccctctaacttttcattctgcagaactccaaatttactgtttaaatgtttcattcaaagacttgggtaaccatgaatgagaacagtcaggtacctggaaactctctggctttctctttttctacattagtgaaatgctccaaaaaccgttaaatgagacttcctttatctgtgcagggagttggggttacccagaaccaggagagtgatttgactaatgagagcaattct

SEQ ID NO: 121890 - DNA, 542 bp, Homo sapiens
caggagtcaagtaaagaacacaggaaccagcttgaaaaggcacccactrgctagatctgaataatttgtgcatctaaaaatataatactgatcatcaagtattaaatataatacatttaacttaaaaatccatgaatccatattaagggggagtggaaggatgtgagggaagttcttgcaaaatgctatctattaaatgaaaaagggattacagaattagaacataatccctttgcaatcttcactgtaattaattcaggcaagaatcacctatgaatgcctagaagtacctgggaaaatattattggggaataggatattcacatgatctcacacagtatcatcccagagactatttactaatcacaaaaggacacaggtacttgtatatgggaaagctacagtagttaacacttaaccaaacaatcccattccacaatcaccagtagcagacatcctgtgccttctgatgggaagtagtagtgatatcacctcagctgtcttcttgccaaaaaaagtgaatctaaaaaatgggaaacaga

SEQ ID NO: 121891 - DNA, 601 bp, Homo sapiens
caacatgcttggagtatagttaagaggtgacagtaccatgtagtgggcaggtagttaagaaatctacatcctaattccagctctggtacttacaaccttggaaaaagtcgtccagaatgaagaaagtcagtttgtattattcaaaatgaatggatcaggcgagattctctctgagggcccttttagttcaaaaattctgtgtaaaagtgaagcagttgtaagccattgaaacttgatgtgatcaaagctttatgacatcagagcagagacatatgtgtagtatctctccaaaacgtatcagcagctcaacatatagaatttcatatcttgattccatgccrtacctactcattaggcactgttgattctttccagatactttctatttcttaggcttaatttggatgctccttctttgcttgaagcttggtacaggaatatgaataccaggaatagatatatatgaagcaataaacttatttgatagtcttttggctcttccaaatgaatagttcacacatgtgttagatgtgttggtgtattaaagaatgaagaaaacccgaggttgcttaaatttgtagcatcttttactgtaaggtac

SEQ ID NO: 121892 - DNA, 601 bp, Homo sapiens
caacatgcttggagtatagttaagaggtgacagtaccatgtagtgggcaggtagttaagaaatctacatcctaattccagctctggtacttacaaccttggaaaaagtcgtccagaatgaagaaagtcagtttgtattattcaaaatgaatggatcaggcgagattctctctgagggcccttttagttcaaaaattctgtgtaaaagtgaagcagttgtaagccattgaaacttgatgtgatcaaagctttatgacatcagagcagagacatatgtgtagtatctctccaaaacgtatcagcagctcaacatatagaatttcatatcttgattccatgccgtacctactcattaggcactgttgattctttccagatactttctatttcttaggcttaatttggatgctccttctttgctygaagcttggtacaggaatatgaataccaggaatagatatatatgaagcaataaacttatttgatagtcttttggctcttccaaatgaatagttcacacatgtgttagatgtgttggtgtattaaagaatgaagaaaacccgaggttgcttaaatttgtagcatcttttactgtaaggtac

SEQ ID NO: 121893 - DNA, 579 bp, Homo sapiens
ctaagacatcacttttcctagctaggagctgccacagaacacaaatttcaaagggccagagatctgcataaccaaacactagacatgaggtcaagatgggtcatccttctggggagtggtgggtaaacagaragagagaacgctttttttaaggaaagaaaaagtagaaggataatagcacatatcataaaatcatatgcttaatttaaaaatgcatcaggtaatatgccagtgacatccaaattaatttgttcaaaaagctgatctctctgatgtcctattgttaagcttaattctataatcctcaaaaaagtgtttgaatctcaagaaatagcaagtactcagcctcaagcaggcaacatcgagtttgctaaaataatggaaaactcagataaagcagaccaggacacttgctcctctatgccctgcatcaccatctacagacagagccaggattcctgaatgaatccaaatcatttcaatacagacatgaggctgagaatacaaactacagataagtaattaaatgcacaagaatgaactgctgtgctttgtacatttaggaaataaacgtgcatt

SEQ ID NO: 121894 - DNA, 624 bp, Homo sapiens
gcttcttttctcaagagctcaaatgggaagggatttcaaagtaaaattataccacaggacacaatcactctcaggtcctttctacagacttaatgtaacctgagtcatccctgaattacaagtgagctagagttctttcactgtaaataacatgggaacagcagcagtttgagagtatgcttgaaatccttaaaatgaaaaatctgccagagtccagaaagagtgtcctctgtaaccagacccaataggctctctttaaccccactacatccacaaggaaaggttctaagacatcacttttcctagctaggagctgccacagaacacaaatttcaaagggccagagatctgcataaccaaacactagacatgaggtcaagatgggtcatccttctggggagtggtgggtaaacagagagagagaacgckttttttaaggaaagaaaaagtagaaggataatagcacatatcataaaatcatatgcttaatttaaaaatgcatcaggtaatatgccagtgacatccaaattaatttgttcaaaaagctgatctctctgatgtcctattgttaagcttaattctataatcctcaaaaaagtgtttgaatctcaagaaatagcaagt

SEQ ID NO: 121895 - DNA, 394 bp, Homo sapiens
tctttccctctcagctgccatcatcctagtcaaaacgaccattacgtcttgtgggtttactaaagttgcctctgactggtatccccaattcttagattgycctttccaatcttttcttcataatattactagagtgatttttaaattaacaaaactttttgttataacaatttttagccatacccaaaagtagaaaaaatagtgtaatgactcccatttagccatcagccagattcaacagttaccagcgtctcaacacacttgcttcttgcttgttgtatctgtcttctcccttttttccttcttttttcctttttatttttgagacagagtcttgctttgacctaggctggagtgcactggtgccctcatacctcactgctgcctggaattc

SEQ ID NO: 121896 - DNA, 551 bp, Homo sapiens
atcctaggctgggctgatgtaaaattattttcatcatcacattcattgtgtcagccagatctttggctccaaacatgctgtccttgtaaaaattcyatttcagctgtcagggtaatcaaaaggtttcaaaaacttttcttgaatactgagttgaaataaaataataaaacacactatcaaatgccaaagtctgcagaaggatgataccagatatgggcaggttttacatttttaaaaagtcaattttattaaattctttacttggatataactttggagtacctattcctaacatatacaatttcaggataaatcaagttgattttccatctgaaatcagatatgggactaccacataattaaacacacaaaatctaaaacaatatttcattgatttaaattaacttttaatggcacagtttatgttgtgtaacggtatttttataatgtcattacattgcacgggcagaaaaagaaaataatggctacaagttttatctttaaaattttgacaccacagatctgtatttctaaaaaaccataagctacag

SEQ ID NO: 121897 - DNA, 539 bp, Homo sapiens
gcttcccccagagcaagtgatccaagagagggctagaggtgacgtgaccaagatggaagccacagtacctttttatgacctaatccccaaactcaccacccacagtcacttcagccacattctatttgttagaggtgagtcaccaagtccagcccaggctaaagacgagagttaggctttacctcttgaagggaggcatatcaaaggttttgtggactatcaaaggttttgtggacattaaaaaaaaaaaaactaccatgaaaacttattccaaggttgccgtttttaacagacaacagtcattgaagcatgtgctcaataccaattatatttagtgttcaaataagactgtagacatatttattttaatgtacttttcagattgatattcatagggcatagaaattcacagggcagttttyttaagtcaatgagcaactttcttatgtcatgagtcagatgtgacactgccaaattcacaactaagtccactgggagttaacaggaaagaagatggagaacctatcatatttgttatt

SEQ ID NO: 121898 - DNA, 568 bp, Homo sapiens
tcatattttcacagttcatcagatcttgagtctttgggccttttattgaagagtggatctttgggattatgggtgatggccttttgcaggacactggaaacagtgccatagagcacaggaagggcaggcagcacaaattaagcctttattattgctgcagttgcctccaaaatgttttgacactcccttgccctcttcagtttctttctaagctgcattgmcctctgtatctttcagtgttacttataccatatacttattattccagaatgagtacatgtcaaggaactttcactttacgtaatcaagaacaaataacacattgttcattcataaaggaagctgatggtacatacttgccagtaagatgattgagaggtatttctcttgaggaagggggtcccatgttactcttcataatttcttggccccatcatgggtcccattacaattcatgcccatcctatgtagggtcaacagttgatctgagtatacttgcctttaaaaataatctacttaatatctgtttctataacagactctatagtaggccatccagttaaagctg

SEQ ID NO: 121899 - DNA, 562 bp, Homo sapiens
aatatatttcctaggcagcttggggaaactgataaaagaggtatcatttgctgtagattttgaagaaggaacaggaactttctaagcagagaagttgtgtcactttcactcccaccacggggcttttgcatatgattttttctctgcctggaaggctgtttccttccwtcccatcctcctcagtcctttatcttattagttatgactcatccttcaggtatcagcactactgttactttctcagggaggccatctctggctctataacttggattagttttccattcagagaaaaaaaaattgaagaggtacatgctttttatttttacacttctcagatggtaattatatagacatctgtctgattattttataaatgtctgtttcacactgcactgtaagctcctcgaaagcagaggatcacttatatatatatatctccagcttctggcagagaccctggcaaacaataaatgttccataaatattagtaaaatgagtgactgaggaaatttgctaaggctcagtctctacattcatcacatggtttcatatctacccc

SEQ ID NO: 121900 - DNA, 608 bp, Homo sapiens
tttttctgttttgagaggtactatgctgagtggaacatctttgatcacatttgactaacatattgactaatatattttctaacatttatagctatttggaggacgaggtatgcatttcttttatagttatgtcatagcttgaattatagcaactrttgctcacaatggagagaaaattattcatactaaccttttgctctatttcttaacttcagacacagacatggggctagcagttttgttctaagggtgtttgtcccatttttggttgcatgtaagaggaatgtaaattttttcattagattttcagaacttgtttgcatcatgtgaggaatgattacttacgccgacgtttttctagagatgggacaatgggatttcctgttacttaaagtgaaaagtgatgctgaaatcacaggagaatgcataaccaagagtgaaataggtagtgagggaaatgaaccagagagagaggcctgaataggtcaccaatttgaggaggatgggcaggaaacattgaaaactggatgaggagagctaaggaccacaaggtcttatacggaacatgccatagcaggttgagggattttgatgggttggggttcatt

SEQ ID NO: 121901 - DNA, 549 bp, Homo sapiens
agagaatggacattagatcaaaagtacaaacatgtgaataaagtatggacttcagttaataataatgtataaacatttgttcattatttataactgatgtaatatttaaaaatagagaaattaggtgtgagatatatgggaactctrttattttctgtaaacgtgagactattctaaagcaaaggtttatttaaaaaaaaagataaaacaaccttttagcagcgaaagactcagggcagaattaattaacaaggactcagagaacataggtaaagctacaagcctctccaattaaaaaaaattggatcttttgcataacatttttttcttattttttatgacatcatttgcatttctgaattattaaatatggcaaccgtctgtttcaaacacagacaacaagcaagtcttttcaggcaaaatctactttagtttttttttttttttacttaattcgctaaggactttttaattttttgatagaattcagttcctttattgcaaactgggttgataatatatgtactgatagcctgagaataaacattt

SEQ ID NO: 121902 - DNA, 579 bp, Homo sapiens
attgagagtttcagtcatactatagcatatcacatttggcaaactagcaagaaaataataaatcaaaaggcatgaatcataatagtaataacattgatgagttttatcttgtaaaatattaatttacaaaggtaccttgaataggagtgaaaatatagtacctttgaaaatgttaagacagaaatatttacactttcaattgggaaagtcatccacaaaaaatcattgccaaaactttaattattctamttataatatttattctacttatatttaaaatttaatgaatacaaatttttgatactatatgcagatattttatttataatttttacaaagcattatatttttgaaaatgaatttgtcagtcaagtcaatattcaaaaaattaagtaatttaaatttttggtgcccctttctcttttagtttgtgttttgattatatgattgggtataaccagacctcttcaagcaacaggaagaagtatctcagtagacttttgtcctgtacagtaagttcttctggtaggaagggtcaattctggaccctataaacctttctcccaatcaaaattttaa

SEQ ID NO: 121903 - DNA, 549 bp, Homo sapiens
ccattatgtcagttaaacttatatctgcttttgcatttctgatttttaacagtcaaaagtaggataatcaataaaagaaaaaactaaactatttaatttttaaaatatattccttacttctgttgttacattatggcatgttcttgatagtaaacatgatgttagtggtgtgaattagttatgattaaggattcagaatgccaattttaaaggttaagttggcttcttccataaagtcagatcttcgtcagtgatggaaagcactggaaagtttcaaataatttatgttagtactaactggtgtcattcttttaatctcttttgaggacctaataaaggtgaaagtgaaagtaaataccatcttctttgtctacatacctacaaaatattataaccaatgtttctgtatccaaggggggaacacaaagacaaccaggtaacccattccatcctcatgaacagagaagragtttagacaaaagagtgttttacaggccagagagttccagacttgactgcttttttgaacaactgttgcatttgttgccg

SEQ ID NO: 121904 - DNA, 539 bp, Homo sapiens
aaagaggttcatttagtttagaattctggaggctaggaagtcctagatttggtggctgcctctggtcggcttctggtgagggcctagygctgctggatagcctggcagaagcacagacatatgagtgcaagctaaaagagacaagcacaaggggtcaagcttgctatgtaacaacccactttaatgagaactagccaagttccctgagaactaacccagtctctaaagaatagcattaatccattcatgggggaagagtctccatgacccaaacacttcccacttagtcctatgtcccagtgctaccacattgaggaattgaggttctgatacctgaacttcggggggacacgctcaaaccgtagcaccacttgagcatgctatgctttctctttcccccgctgtaaagttctttcccaagaaaaacacatgactagttccttcagttctctgctctactgtcccctcttcagagaggtctcagcatcgattgtaattattcatagaagaagaagaacacctggatgttagctgacaac

SEQ ID NO: 121905 - DNA, 599 bp, Homo sapiens
gtgtgtgtgtgtgtgtgtgtgtgtgtgtgtgttctgtgtcccaacacagcaaataaattcaatgcaccagattctccagataagtgacacaattcactacaagggtggttgctaaaatgttctgcctctctccttagaaatccacaacagaatgaggagaaaggaagccttaagtgtggcttctaaaatatccaagggtgatttgaccgcctactttgataattgctgttactggcccaggtctcagctcttacaaacgaygccccagtaatgagatacttaccagacagaagtaccttggggactctgaggtgagccgttggcattcatggttctcttcattgtgtatggtcctttcttttcatggaggctccatttcctcagacactaccaggcatttctcttattgatctccccttttctcgccatgcagtttcttcactgaagcactagttaacattaaacacttgcatttttacatcagcatttcatttaaaaataattatatgaggaaatgatcaatgttacacaacctcagtcattttgcaatgaatgagaaaatacttatggcttttaacgattagagaaataatttatgt

SEQ ID NO: 121906 - DNA, 599 bp, Homo sapiens
gtgtgtgtgtgtgtgtgtgtgtgtgtgtgtgttctgtgtcccaacacagcaaataaattcaatgcaccagattctccagataagtgacacaattcactacaagggtggttgctaaaatgttctgcctctctccttagaaatccacaacagaatgaggagaaaggaagccttaagtgtggcttctaaaatatccaagggtgatttgaccgcctactttgataattgctgttactggcccaggtctcagctcttacaaacgacgccccagtaatgagatacttaccagacagaagtaccttggggactctgaggtgagccgttggcattcatggttctcttcattgtgtatggtcctttcttttcatggaggctccatttcctcagacactaccaggcatttctcttattgatctccccttttctcgccatgcagtttcttcactgaagcactagttaacattaaacacttgcatttttacatcagcatttcatttaaaaataattatatgaggaaatgatcaatgttayacaacctcagtcattttgcaatgaatgagaaaatacttatggcttttaacgattagagaaataatttatgt

SEQ ID NO: 121907 - DNA, 562 bp, Homo sapiens
aatgtgtctttaatatttaataatctgatttttttcttattttaaagcctgtagaagtattttacaacttaggatttcattttagaaaatgaaatgatacattgcttttattagcttgattgtaattgtgcatactgcattactataataatttygtagccacctcttgttgctatcctggtgagctcaaatgcttcaagtattcgcttaaaatgtcttgttacattaatcatctttgtgttactcagctcctctctccagtaagttgggtatcacagtaaaaagtatctctcactgttcttatgtatttttcgtcgtgtttagtgcaataccataaaccttgaataacaccaggggacccatatgaagcacttctagtgatgctggaaatactcccaagaagcggcgtaaagtcatgacgttacaagatcaatttgaattgcttgatacggactgtagattgaggtctgaagtggtcattgcccaccatttcaaacaaagggtttgtaatgtaacatgtattaatgtaacaataaatactgtacagtattgtaaatatatt

SEQ ID NO: 121908 - DNA, 625 bp, Homo sapiens
ccagtcagcaccctgtcaaaacagaccactcggctctaccaatcagcaggatgtgggtggggccagataagagaacaaaagcaggytgcccgagccagcagtggcaacccgctgggtccccttccgcactgtggaagctttgctctttcgctctttgcaataaatcttgctactgctcactctttgggtccacactgcttttatgagctgtaacactcaccacaaaggtctgcagcttcactcctgagccagtgagaccacgaacccaccagaaggaagaaactccgaacacaccggaacatcagaaggaacaaactccagaagcgccaccttaagagttgtaacactcaccacgagggtctgcggcttcattcctgaagtcagtgagaccaagaacccaccaattccggacacaatttcatcttctttggctatattcccagaagagggatcactgggtcatatggcaattctattttacaaatttgcatactgtgttccataatggctgtaccaatcttcattcccatcaatagtgtattagagttcccttttcttcacatccttgccagcatgtcttaccacttgtctttttgataatagtcatcttaacaatgtgacatca

SEQ ID NO: 121909 - DNA, 543 bp, Homo sapiens
  misc_feature (1)...(543): n = A,T,C or G
nnnnnntgaaaaacgatgccttgctgctgtcttgtcctggtttgtagttataattttastcttggtctagccactgtggacccccatgcagccttcaacttccaagaaaagaggcagttgttgcttttcttcccaaacctcagtaatttccgtgctggctttattccacctctttgatagtcagggtgttccagggttttcacagtcctcgaaactcatttcagaaagccccttcaggagataccctggcaggaagtctggactatgcatcaaaatattgccataaaactcaagttttattgctattgttcctataataggaaactcttatatgtttatcctgcatgctatcatgctggaaatatttaaagtatgtttggcagaatcatgccaacagcttttaatggcatgctcaaaataagtgttggcccagcatcaaatctctccagccctacttctgtccacccagatacctctaacaaatggtctgaattcactacagaagattgagagagaaaacaaacacaaaataaataaatagta

SEQ ID NO: 121910 - DNA, 543 bp, Homo sapiens
  misc_feature (1)...(543): n = A,T,C or G
nnnnnntgaaaaacgatgccttgctgctgtcttgtcctggtttgtagttataattttagtcttggtctagccactgtggacccccatgcagccttcaacttccaagaaaagaggcagttgttgcttttcttcccaaacctcagtaatttccgtgctggctttattccacctctttgatagtcagggtgttccagggttttcacagtcctcgaaactcatttcagaaagccccttcaggagataccctggcaggaagtctggactatgcatcaaaatattgccataaaactcaagttttattgctattgttcctataataggaaactcttatatgtttatcctgyatgctatcatgctggaaatatttaaagtatgtttggcagaatcatgccaacagcttttaatggcatgctcaaaataagtgttggcccagcatcaaatctctccagccctacttctgtccacccagatacctctaacaaatggtctgaattcactacagaagattgagagagaaaacaaacacaaaataaataaatagta

SEQ ID NO: 121911 - DNA, 543 bp, Homo sapiens
  misc_feature (1)...(543): n = A,T,C or G
nnnnnntgaaaaacgatgccttgctgctgtcttgtcctggtttgtagttataattttagtcttggtctagccactgtggacccccatgcagccttcaacttccaagaaaagaggcagttgttgcttttcttcccaaacctcagtaatttccgtgctggctttattccacctctttgatagtcagggtgttccagggttttcacagtcctcgaaactcatttcagaaagccccttcaggagataccctggcaggaagtctggactatgcatcaaaatattgccataaaactcaagttttattgctattgttcctataataggaaactcttatatgtttatcctgcatgctatcatgctggaaatrtttaaagtatgtttggcagaatcatgccaacagcttttaatggcatgctcaaaataagtgttggcccagcatcaaatctctccagccctacttctgtccacccagatacctctaacaaatggtctgaattcactacagaagattgagagagaaaacaaacacaaaataaataaatagta

SEQ ID NO: 121912 - DNA, 538 bp, Homo sapiens
gtggtaaattcctttgtggtttcggtggtcttatcacacatgggcctcaccaagatgctgggctggagagaacgctcactgtgactctcccaggcttcatgaaattcccccgacttagaagcagttctgggcaaaaacacactgttagaggaggatttgctttcttcaacggctgtcgcaagtgaggcctcagatctgcgctcttcaaatcctacataaagagcccagagtttctccccaygctcagcactgggctcgctttcctgcagaggaaacgatggcaggtagagcttaagaatgacgttctcccccaggtcggccgagagtgctgtgccatgaattgatagtggcaggacgagaatagtagagacacgggtgattaaacagtgatgccagacagtgtggggacagcagcatctttccatttgaagggtctacatataccacacagaccacctatacctcagctgtcttcccaccctaccctgctctggggcttgaccacgtggtctgagccttagagtcagttccatgcact

SEQ ID NO: 121913 - DNA, 589 bp, Homo sapiens
ttcatggggccaaaaggtgtgttttactagctacgctaggctgtcattatccaacaagactcctgctaacaaatgagggcccatgagttagtgaaatccatgttccctaagcttgtgaggtagaatgacgatgacygaaatgttatgtctttggttttgtaagttgatgggcttattttcagaatctttctttcaactcagccttagttaatctcatgtttccacctgtttatgctacttccgtaccccatatacccactcgggaggcttcccgatctcgccgcatctgggagagcggcagctgcaccttttccctggtaaaacgtcttactttactcgcacactgcatgaaacagccagaaaccaagggtgcaaataggtcatctccttatcctgggaagataaaaacagggttgactaccttccctcttctctactgagacagtatttcctcccttctaattaaggatttttagagggggtgtgcgtgcatgttcatgtgtatttcgattgggtttgcaaacttaagagaaaggtcattagtgaaagtttgcacatcatttgcttgtgctgaggcacgtgtgcaaga

SEQ ID NO: 121914 - DNA, 551 bp, Homo sapiens
tgtgtttcgctatagtgtttcatgttcctcctgaattaagggaagcttttatcataattgagatgcccagtttacaaaaaagtgcagaattgcctctgatgagaagagacccacagaatccatcagaccctcaaatttttcatctagataaaggttaagtaaacaagtattagaaacatgatgcatgtaagttattgttttataaacctgatcatttaaataaaattaatgtataatgatgtggcacttaaattccactatgaaataaaaccacctgcttctgtttcaatattaggcatccatagaaagcctgcagtgcaaatttacaagcttgaagtgaaggatcaaaaatagcttcttyaatcattgactaaaaaaaattatcaatgaattaagctaattaaaataatatacccattttctggcatatttttttggatcttattttttagccataagggagaagggttttctgaaatccttaattggtttttaaattgccagattgaattatttgcctccaaaggattcctgtttcctcaagccaaata

SEQ ID NO: 121915 - DNA, 617 bp, Homo sapiens
ttgcatatttctagaattttataaaaatggaattatggaatcacaaagcatgtacttttttggtctttttctcagagtaactattttgacagccatctatgtttttacatgtattatagtctattactatattttacattttcatacatttagtgtatataaatacagttttgttacatggatatattgaatagcgatgaagtctatgctttcagtgtaaccaccacccaaatagtgtccattgtactcattaggtaatttcttattcctcaaccccatcccacccttccaccttttctagtctccaatgtctgttattccactcttattgctgactactgttccattatatggatatgccacatttatttatctattcccttgtagatagatatttggtttatttgcarttttaagctttacaaattaagctgctatgaacatttgtgtagaagtgtttttataagcacatgcttttatttcactcagttaaacacatgggaggggagtggctggatcactgacttcttaaaaattaacttcttaaaaaagtgccagacttttctaatgtgtttataccacttcatattcccatcagtagtgtatgatcattccag

SEQ ID NO: 121916 - DNA, 560 bp, Homo sapiens
gtgccactcactgcactccagcctgggcaacagagcgagactctgtctcaaaaamgaaaacaaaaaaaaaaaaacaaaaaaaaaaccagtcatcctgaggatgctcaagggtgagactgggttttgggggtatttttactatatgtggaatagcagacccactagttactatgaaaggtttagcattccaaaaataataattatcttataaagtatctttgctaaatacttaaaacttaaatactaaaaacaagtatacatagtaaatttttaaaaattaatttctcaaaacttatctaaatttgcttttggtcaattcaaattgagtttttaaattaataagtcctatttctctgtatgctacacttcagaaacaagttgtttctgtctgcgatattagtgatcttgctattttcttaaaactggaaataatcataattacattttccctaaacattatacatggcatatctaattgtgccaccggaagacttcatcaaacagccactctaataaggaaagcatagcttttatttgaatggggattttcagtgcactca

SEQ ID NO: 121917 - DNA, 560 bp, Homo sapiens
gtgccactcactgcactccagcctgggcaacagagcgagactctgtctcaaaaacraaaacaaaaaaaaaaaaacaaaaaaaaaaccagtcatcctgaggatgctcaagggtgagactgggttttgggggtatttttactatatgtggaatagcagacccactagttactatgaaaggtttagcattccaaaaataataattatcttataaagtatctttgctaaatacttaaaacttaaatactaaaaacaagtatacatagtaaatttttaaaaattaatttctcaaaacttatctaaatttgcttttggtcaattcaaattgagtttttaaattaataagtcctatttctctgtatgctacacttcagaaacaagttgtttctgtctgcgatattagtgatcttgctattttcttaaaactggaaataatcataattacattttccctaaacattatacatggcatatctaattgtgccaccggaagacttcatcaaacagccactctaataaggaaagcatagcttttatttgaatggggattttcagtgcactca

SEQ ID NO: 121918 - DNA, 560 bp, Homo sapiens
gtgccactcactgcactccagcctgggcaacagagcgagactctgtctcaaaaacgaaaacaaaaaaaaaaaaacaaaaaaaaaaccagtcatcctgaggatgctcaagggtgagactgggttttgggggtatttttactatatgtggaatagcagacccactagttactatgaaaggtttagcattccaaaaataataattatcttataaagtatctttgctaaatacttaaaacttaaatactaaaaacaagtatacatagtaaatttttaaaaattaatttctcaaaacttatctaaatttgcttttggtcaattcaaattgagtttttaaattaataagtcctatttctctgtatgctacacttcaraaacaagttgtttctgtctgcgatattagtgatcttgctattttcttaaaactggaaataatcataattacattttccctaaacattatacatggcatatctaattgtgccaccggaagacttcatcaaacagccactctaataaggaaagcatagcttttatttgaatggggattttcagtgcactca

SEQ ID NO: 121919 - DNA, 655 bp, Homo sapiens
atgtggggctttggaaaaattggtaaatctctctgtgcctcattttattaaactgtcaaaagagatcaaaatggtaattaactgatgtaattattgtgataattaaatgagttatrtacataaagcacttaaaacagtgtctggcacagagtattagattttatacttactatatgattgatgacatacaacatccacaggatgtaattcatgggattcaccagattcattgtgagaattagttggagaaatacatcaaattacaatgacccaacattttttaccaatataaattatactttcacttaaaccacaatgctcttagtagtacattccctcacgaagaagaaatatattcctttcaaggatatgcagagtctcaattctttactccttttctgccttctaacttgcagtgctttgtggggggtgaagtatatattcctatccctttcatattgagctggatcattcaagttgctttcactaaagaaagacttgcacacaggatataagcagaggccttaagtgtatttgcacaatttgactcagtctcctatgtttctctgatcatcatgagaagtgcatgtcccagaacgccattgtccctttagtctaagcccctcaaaaattatgtgaccagagcccagaacca

SEQ ID NO: 121920 - DNA, 655 bp, Homo sapiens
atgtggggctttggaaaaattggtaaatctctctgtgcctcattttattaaactgtcaaaagagatcaaaatggtaattaactgatgtaattattgtgataattaaatgagttatatacataaagcacttaaaacagtgtctggcacagagtattagattttatacttactatatgattgatgacatacaacatccacaggatgtaattcatgggattcaccagattcattgtgagaattagttggagaaatacatcaaattacaatgasccaacattttttaccaatataaattatactttcacttaaaccacaatgctcttagtagtacattccctcacgaagaagaaatatattcctttcaaggatatgcagagtctcaattctttactccttttctgccttctaacttgcagtgctttgtggggggtgaagtatatattcctatccctttcatattgagctggatcattcaagttgctttcactaaagaaagacttgcacacaggatataagcagaggccttaagtgtatttgcacaatttgactcagtctcctatgtttctctgatcatcatgagaagtgcatgtcccagaacgccattgtccctttagtctaagcccctcaaaaattatgtgaccagagcccagaacca

SEQ ID NO: 121921 - DNA, 488 bp, Homo sapiens
taactggcccattattctgctttaggcaaaactacccatatacagaccttgctgtgcctgtggattattacctgctcttctgggcaytggaccatttgctgtcagagtgaatggaaactgtggcaatgatgggattcaagacacactaccctaaattatggcacctcggtattctggaaaacagagaagcaggaaggccacttttatcttccctttcctcttctcgcttgaagcagatcataacactctcttctgagaggggccctccctatacttcaaggaaaggaacatccttatctctgaagacacgggaatacagaggagaatcagaaaaaatcaggccttggtaaatccacctccctaagtttattaccattagattatagcctcttttgtccagtcagacttctctatgacctcttcttcaaacctaagcataaaaatatacaagtttacttgtttaagtcttcatttctgaagtctcgtgt

SEQ ID NO: 121922 - DNA, 488 bp, Homo sapiens
taactggcccattattctgctttaggcaaaactacccatatacagaccttgctgtgcctgtggattattacctgctcttctgggcactggaccatttgctgtcagagtgaatggaaactgtggcaatgatgggattcaagacacactaccctaaattatggcacctyggtattctggaaaacagagaagcaggaaggccacttttatcttccctttcctcttctcgcttgaagcagatcataacactctcttctgagaggggccctccctatacttcaaggaaaggaacatccttatctctgaagacacgggaatacagaggagaatcagaaaaaatcaggccttggtaaatccacctccctaagtttattaccattagattatagcctcttttgtccagtcagacttctctatgacctcttcttcaaacctaagcataaaaatatacaagtttacttgtttaagtcttcatttctgaagtctcgtgt

SEQ ID NO: 121923 - DNA, 569 bp, Homo sapiens
atgagacttattcactaccacaagaacagtatgggggaaaccactcacatgattcaaattatctcccaccaggtccctcctacaacatgtaggaattataggagtacarttcaaaatgagatttgagtggggacacagagccaaatcatatcctagtctatacagaaaatgtttgctgaatgctaccctagaccactggacatataaacacattattaaatcagcagatccctgagtgttcatggattgtatatggcatttaatatcatatacatgtgttataaaggcctctaaagaatttgttacttctttctcaccagacctaattattatgatatcatcaatgtactggataaacataacatgtctccagatgaagatacattttaaattgattgccacatggagtgggagagttaatattgctctgagataaaacaataaaggtcaatagctatttctgccagttaaaagcaaatggctttatctaagtatttttctaattgatatagagaaaaaatacattggaagatgaagagagcagcttcaatcagaggtactttttaaat

SEQ ID NO: 121924 - DNA, 639 bp, Homo sapiens
ctaagtactacatacaactagaatcatacagtatttttttcgggagtggcttgtttatttagcctaatgtcctcaagatttatcatgttgtagcatatgtcaaaattttctttttttctaagtctgtctataaaagataaacttaattctgtcattttaaagtgtgttttctgtaagacttagagctttcttgtctgaatttcctgcaatactcttttcctttgtttttatttaatttttttttgtagtgaaacagtcaaatttctttctcattttcttttgtgtatattctgtaactatcttttgtgtggttaacataggaattagattttaaattctaaagctaaaacacactartttggatttatacctgcttaacttcagtatatacagaatctttgcccctttacatccctttcaccacttcttacagttgctgatgtcacaaaattacattgtgtgtccaaaacataaaccaacaatttttaaaatgcattagtctcttaaattatgtacaaaataaaatgtggagttataaaccaaagttgcagtaatactgctttcaagaataattgtttttctaaaaaatgcattaatctctttaattatgtagaaaatataaaatagatttacaaactc

SEQ ID NO: 121925 - DNA, 525 bp, Homo sapiens
tgtgtggctctgcatggcctgctgtacctcttgtctctaggacctgcaagtataataaactttatttttttcctgagtctctaccttcttttaatggctacacccaactgactatctcataaaaagaatatgaaacaggatggagatccaaatatgtcctccactgacattgttgggcggggatgtgctctttaacactgggctgtcccaagccttttctgatggtactgctgatttggaagagagttgtcttattatagcctggtgagtgtggaagtttaggttccccattttgacctttgtgcttttgtcaaaaattaattgaccaaatatatgtgaatccatttctggactctctgttctatgtcattgatctatttgtcttatcattatgctaatactgtactgtctcaattactgtaaccctcctaacttttttctttttcaaagttttctttgtttttttagctattctaggtcttctgcatttycatatgaattttaaaatcagcttgataatttggc

SEQ ID NO: 121926 - DNA, 558 bp, Homo sapiens
aatggatttattcgtggtatctcatttgtggtttaatttgcgtttctcaaattactaaataagtgagcatcctttcccgtgtcttttagctatttgtatatctcatttggcgaaagtatatttaaatttttttctcatttttaaattgagttgtttgtcttattgagctgaagagtttgttatatattctggatacaagcactttgtcggaaatctgattttcaaatattttcccccagtctgtggcttgtctttttattttcttaatagtttaatttgaagtgcaagagttattcatcttaataatcttttttaaaaaatgggttgtgcttttattgtcacattaagaattccttatataacccaagtcacagagcttttcttctagatcaggattttgcataacagcattcttgctattttcttctcgatcagsattttgcaatagcagcattcttgatatgttgagccagataattctttgtcatgggagcctgtctttttcattccagaatacatagcagcatccatggcttttatgcactagatccattagcg

SEQ ID NO: 121927 - DNA, 560 bp, Homo sapiens
tattcaagttttttgcctagttttaagattagttttttaaaaataattgttttgcaggaatttaaaaatatgtatactagcctttattggatatatgtattgtggatattktttgccagtctttagcttgcctttccattttctacacaaaggcttttaaaagaagaaattttaattttgataacattcatatgctatatttttcttttgttgtttgtgctttcagtatcttggctaagatgcttccccattccctcagtgaacatgtggcaatgtcgcaacgtctagagacatttttgtttgccacaacttggagagagaagactaggacctagcaggtagaggccaagaatacatctaagcatcctataatgtacaggacagtctccctacaatgtagaattatccagccccaaatgtcaacagagtcatggttgagaaatcttggtttagagtgatacacaaaagtccaaatacattttccatttttcttgttgaagtgttcttatcagaaaagcatttccatctaatttatacatttgtaaaatctaatgtcctcc

SEQ ID NO: 121928 - DNA, 479 bp, Homo sapiens
gataatgaccatattggaaaacttatcaatagaagtggagtgtgccaactgccaagggatttccagagtttccagaggttcagcattgagaaactctctgattgcctatttttaggactcaacaagccatccccacataaccctagaagctgcaatgacttctatcaaagttgcatgataccagctaaatgaagagattttagggcaggctgggggtaaatggggtttttgggaaatgaggaaagaaggaaattcagagacattacacgtgagccacatgtaaaatgaaggaaatatacacaaccagatcatactaggaatratgacaggctgaaaaaggtgggaatatggggacaaagtgaagttttctcttgatctgggcaaatatagaaagtgttaaacaagaggaggaaaggtttgaagaacaatggcattcagataaggatgagctcacacagaggtgatatctacttggtatg

SEQ ID NO: 121929 - DNA, 650 bp, Homo sapiens
agggttctgtggttatgtataatagaaagtgacttcagctaacttgagcacaaaagtggaatttattggaagaagctgagaactattacaaaattgaatgaaaagctgaagtcccagatctttaaaagaatccatggagctgctctgaggatgcttgctacttggtagggggaagcagacacttaaataaaaagaagtgccaggtaggtgagtgcagtggctcacgcctataatcccaacactcccggaggctgctgtgggagagtcagttgagaccaggagtttgagacaagcgtgggcaacgtattgaaacctcatctctagaaaatttttaaaaattagctaggtgtggtggtggagctatgattgtaccactggactccagcactctagcctgggtgacagaacaagatctcatctcttaaaaaaaaaaaaaaagcaattaaatgtggyagtatcactatagaaatatgctaaaaataaaaggaattacaaaggagggattggtcaattgtccctggtaaggggtagggataagtttcaaggtaaagaaaggcttcatagtggaggtaatatttgagtcaactcttaaaagtagattacttttaagtaatcttattagtagagttgatgtttgcttgatggccaaa

SEQ ID NO: 121930 - DNA, 415 bp, Homo sapiens
aaacagcaaataaaaatttctatcaccagaattatgttttttttgtggtggggaactaccaatagctataaatagaagagattwttatggaagtatcatagataaaaagagtgctcgcttcaggagcacatataataatacagaaagaaatttaaagataataaaatatttaggataaaaagaattgtctcttaaaaatgaaaagaaaattatctttatgtatatataacaactataactctcatcaaaaaactacaggaacagcatgttttcaaaagtacaacaatttccaaactatttgaaataaatctatgaataattcaatggccaacattttccaaacaaaccaataaaatgcagagtgtgcatgaagctatctgttacaatctgtggcactgatatttcacagaagaaa

SEQ ID NO: 121931 - DNA, 416 bp, Homo sapiens
aaacagcaaataaaaatttctatcaccagaattatgttttttttgtggtggggaactaccaatagctataaatagaagagattattatggaagtatcatagataaaaagagtgctcgcttcaggagcacatataataatacagraagaaatttaaagataataaaatatttaggataaaaagaattgtctcttaaaaatgaaaagaaaattatctttatgtatatataacaactataactctcatcaaaaaactacaggaacagcatgttttcaaaagtacaacaatttccaaactatttgaaataaatctatgaataattcaatggccaacattttccaaacaaaccaataaaatgcagagtgtgcatgaagctatctgttacaatctgtggcactgatatttcacagaagaaat

SEQ ID NO: 121932 - DNA, 415 bp, Homo sapiens
aaacagcaaataaaaatttctatcaccagaattatgttttttttgtggtggggaactaccaatagctataaatagaagagattattatggaagtatcatagataaaaagagtgctcgcttcaggagcacatataataatacagaaagaaatttaaagataataaaakatttaggataaaaagaattgtctcttaaaaatgaaaagaaaattatctttatgtatatataacaactataactctcatcaaaaaactacaggaacagcatgttttcaaaagtacaacaatttccaaactatttgaaataaatctatgaataattcaatggccaacattttccaaacaaaccaataaaatgcagagtgtgcatgaagctatctgttacaatctgtggcactgatatttcacagaagaaa

SEQ ID NO: 121933 - DNA, 427 bp, Homo sapiens
cagtcacaaacctaaacagcaaataaaaatttctatcaccagaattatgttttttttgtggtggggaactaccaatagctataaatagaagagattattatggaagtatcatagataaaaagagtgctcgcttcaggagcacatataataatacagaaagaaatttaaagataataaaatatttaggataaaaagaattgtctcttaaaaatgaaaagaaaattatctttatgtatatataacaactataactctcatcaaaaaactacaggaacagcatgttttcaaaagtacaacaatttccaaactatttgaaataaatctatgaataattcaatggccaacattttccaaacaaaccaataaaatgcakagtgtgcatgaagctatctgttacaatctgtggcactgatatttcacagaagaa

SEQ ID NO: 121934 - DNA, 615 bp, Homo sapiens
atactaaaacagccaaactcatagaagcagagactagaatggtggttgctgggattgggggtgagagtgagaaggaaatgagcagacattggtcaaagagtataaaatttcagttatgcaagatgaatttgttctggaggtctaatatacagcatggtgaatacagttaacaatactgtattgtatacttgaaatttgctaaaatgatagatcttgtgttatcmtcacacataaaaaagaaagaaaatggtaactatgtgaggtgatagatatgttaattagcctgatcatggtgataattttacaatacatacatttatcacaatatctagttgcatattttaaaaatatacaattcctatttgtcacttatacttcaataaggctgaaaataagcagtagttatcaacgcagtgtggtactggcataaagatagacatagatcaatggaatagaatcaagagtccagaaataaaccccatacttttatggtcaactgattttgaactgggtgccaagaccattcaatggggaaagaattgtctcttcaacaagtggagctgagagaactgaatattcacatgcaaaataaggaagtgggatcgctaccttata

SEQ ID NO: 121935 - DNA, 565 bp, Homo sapiens
ttcatgagggaatgtgccaggaayagcctggtttagacagtttgttgatgtgactctggtcccccagaagccaatggtcagttagcaacttgtgaagcagccacttccatctggggaccctatcactaaactcacacaaaaaaagtcgctagggtatttcagattttaaacggttagtctattgaataatcagcaacgtgacaaccatctcatttaaaaaactttgcatatgattttgccatgtgtttgtctctcaggtacctttccagcttttgtccctgggtgtacacatgtcacatgtgtgcaaatggcacatatgcaattttctgtcattgcatcagatgtatattcgttaattgtgacttggtctctaaattgccattttgaattactatgataatttgtatagtgaatgagatatgatttgcctcaccaaccttctattgttgccatttaaattgagccttaatgctgatgattatcagctatgaagcatgtggatttttcacagtttggtattattttcttagaacaaattcccagcagttggaacaccaaaggaaaa

SEQ ID NO: 121936 - DNA, 545 bp, Homo sapiens
ttgatttcttctttgatccattggttgttcaggagcatgttgtttaatttccttgtatttgtgaatttttcaagatttttcttgttattgatttctagtttcatatcattgtgatattaaaggatacttgatattatttcagtcctcttacatttgttcagacttgtgtttttttggcctaaaatgtaatctatcctggagaagaatgtatattctgttgctgttggatggagkgttcagtgtatgtatgttcagtccatttggtctaaaatgtaattcacatttgattctttttattgattttctgtcatggatgatctgcctattgttgaaagtggagtgttaaagtccctgactgttattgtgttgctatttctcccttcagatcctttaatatttactttatatgtttaggtgctctgttgggtatagatataattgtaattgctatagcctcttgataaatggacgcttttatcattatataattatatttttggtctctttttacagttattgacttaaagtctattttgtctgatata

SEQ ID NO: 121937 - DNA, 603 bp, Homo sapiens
tgttagttgttttctatgtgtcttacagttgtttttttcctcttttcccctcatgccgtcttcctttgtatttcactgatttttttaagttgatgtgtttgcatttatttatctttcttttgtgcattttctataggtattttctttttggttaccacgtggattacataaaacatcttatatgaggtaaccatatatttttaactgataacaacctaaatcatatacaaaaactaattttttacattttccccacttcttcatgttattaatttaacaaataattattattaattatgaattttttaaaggaagtaaaatatgcttagaggagggccaagcaggcaacaggagagatccaagtgccttgacgaattatatcatgtcatatttttattcattagcatagttttattgttgtgatttttctttccttttttagcttttaaattttattcttttttttyctgcttgattaagtctgctgttaaacacctctggtgacgttttcagttcagttattgtgttcttcagctccagaatttctatgtgaaaggtttttttttttatagttttacctcactttgttcatgcatcactttt

SEQ ID NO: 121938 - DNA, 450 bp, Homo sapiens
gactactttaatctctctgattttccattataaatgacaggcaggactttgagatttaaattctacctttcatgactttggaaacattatgcaacctttctgagcctcagttttcttatttgtaaaagggagttaatcatagtatctccctcattgatactgtgtattcattatatgtaacatacttacaaaccttatatagtaggtgctatatkacttttctcctctcctattataaatacagagttttattccataacatgcaaattgtttcttacacttaggtgagtggaaggatgaatatgagagtttctggcttataggtgcttgaaatttttattaaagtttgaactgcatgttttgcaaataatgctcagtgtcataatagggtagctcctaaggaagagcaattttaaactttattctttgattctacaattacttctggag

SEQ ID NO: 121939 - DNA, 450 bp, Homo sapiens
gactactttaatctctctgattttccattataaatgacaggcaggactttgagatttaaattctacctttcatgactttggaaacattatgcaacctttctgagcctcagttttcttatttgtaaaagggagttaatcatagtatctccctcattgatactgtgtattcattatatgtaacatacttacaaaccttatatagtaggtgctatattacttttctcctctcctattataaatacagagttttattccataacatgcaaattgtttcttacacttaggtgagtggaaggatgaatatgagagtttctggcttataggtgcttgaaatttttattaaagtttgaactgcatgttttgyaaataatgctcagtgtcataatagggtagctcctaaggaagagcaattttaaactttattctttgattctacaattacttctggag

SEQ ID NO: 121940 - DNA, 581 bp, Homo sapiens
agaacatgcattatttgatttcctgttcttgcattagtttgctaaggataatgacctccagctccattcatgttactgcaaaggacatgatcttgtttttttgatggctgtatagtattccatggtgtatcaacatattcaattcttgaagcctagttttattgctttcagtagttcccaaaaagggcagtcctttctgcctttcatcaacaaacatcctgctaagkgtaaacaattgttcagcatatttcttgaagcttaggtctttctgtactttagccaaaatgccccacattattttgactcaaccacagcttggaggaaagtgaacaacctgggtcactttcacttttcacagattccctggaatctgttcttgccttcaggataacatttcttagcaaaaattcaggaacatttatgctatgatttctgcctacccttccagcatcattttttgctgctccttaactatagacctatctcccaaatcttttaggtaaagttctctgaatgcatctggcaatccttgtatctattttctcatttagaatttctatttctcttctacctgcattata

SEQ ID NO: 121941 - DNA, 539 bp, Homo sapiens
actatttttttttctttccttctactaattatgggtttggtttgttcttgctgttctagtttgttgaggtgcattattagcttgtttatttgagaactttttatttttttgacgtaggcttccttgtaatatatttgcaccttagcagtgcttttgctagatcctgtaggttgtagtttcattttaatttgtttcaatatttttaaaatttatcttcgtaatttctttattgatccaattgccattcaggagcatgttgtttaatttccatgtctttatacagtttcaaaagttcctcttgrtattagtttttaactttattttattgttgtctaagaagatacttgatattatttttactttgttgagcgtgttgagttttgttctgtggcttaacatgtggcttattctagagaatgtttcatgtactgatgagacaaatgtgtatgttgtaactattggaagaaatagtctgtaaatgcctattaggtcaacttggtctgtaatgcagattaaacccaatgtttctttgttgattt

SEQ ID NO: 121942 - DNA, 636 bp, Homo sapiens
tggatcttatatttttaattcattcatccagtctatattgtttagttggggaattaaaaatatttataattaatgttattattaataggtgaggacttacacctgccattttgttactagttttttgattgttttatatatttcttttcttctcttccttttttatttacctttataatttggtaaagttttttgttgtaatttcatttgactcctatcctttttcacttgtgtgcctgctgtactagtgaattatatacttctatgtgatttaatgatggtagatgtcagccttccacttccacaagtaggtccctcttaagtatttcttgtagggcccatctagtcatgatgaattccttcagtttttgcttggctgagaaaagctttatttctccttcattttggaaggataactctgctgacaggtttttattttttcctcttagcactttaaatatrttttcctttttattctagcctgtagggtttatatgagtaatccactgctagtctaatggaaatttccccatacaaaatttgatgctttctcttgctgtttttagaattctctctttgtcttagacttacaacactttgagtataaatgccttgctggagtcctttgttagttga

SEQ ID NO: 121943 - DNA, 516 bp, Homo sapiens
cttacaacactttgagtataaatgccttgctggagtcctttgttagttgaatatatctgtgtattttcaaactttatctaaatgtctgtatatctttcaagacttggcacactttcagctattttttaaataggatttctatgtcttttctaatctcttcctctgaaggataaaatttggaaatttggttattttatagtgcttcattttttatgtaggctattctcttcttcattttttttytgttcctctaaatgggtcgtttcaaaagacctgttgtcagttcagaaattacttcttctattttgtctactctactattgagactttctagtatatgctttatttcatttatgttattttttatttccaggttttctttttagtttttttttaatgatatctaatacttcattaaatttccattcagatcatgaattgttttcctaatttttgaattgtttacttgttgtcttgagtttcactaaattttcttaaatattattattttgaatt

SEQ ID NO: 121944 - DNA, 649 bp, Homo sapiens
ggtctgcctttcccagcccactgactcaaatgttaatctcctttgacaacgtactcacagacacactcagratcaatactttgcatccttcaatccaatcaagttgacacttagtattaaccatcacagcaggcatttgatacttcagaacacagctttggtacaccctggattggaaattgtggttatatgttagtacctagtacatctaatgccctgtgatagattctgtgattgtaatagtgaataactaaaatacatcagagtattcaaagctaagtattttatcatcattttatataataacaaaagctatctcaaattttcttgtgaaaattaaatagaatgagctgtgtattctgggacatagtaaatgcccaataaatggagcttcaaaaacatcaccatatgcaatgtgtaaatcttaaatagatcctgacttaaaaaataaaaactataatgaacatccttgggacagttatgaaaacttggatttgagttggatattcaacattagggcattattgttagctgtcttatgtgtgacaatgacattgaggttgtgaaggagaatatacatgctcttaaatcatgcatgagcaagtatttatgggtgaagtgtcatgacggttgcaacttattttcaatg

SEQ ID NO: 121945 - DNA, 512 bp, Homo sapiens
aatctctatcagctggccctgggtggtcgttgttcatgttactcatcatctgtgttatcagtaggaatgcttccggtattacagaaaggggaccatgcgtcagaaaatggttacaaagtggcraaaactgacctgactggggatgtagtcaaagggcaggaacggagggtgggacaggtcaaggaggtgaccagaaaggcactcaccaggggagcaaaatataaagaggcaccaaaacactcagcggtcctgataaataatattttagtgcaatattttaaaaatcagaatttttgtaaaaatatccaatggtgaagaaaatatcaacattgtaagtaaagatgggatcgcaccctgcccttgccaaactcactcactcacttcatcgtcgttaccttacagccctgagaggaggcagaagccataaagaatgagaccagaggaaaaaacctctcctactcccatttctccaggtttctaggaacaggaatgagggagaagcaagggaattc

SEQ ID NO: 121946 - DNA, 573 bp, Homo sapiens
gttttaaaactagttgaaaaaatagaaagcgactgctttattgtaatctcttattatatatcatgtatactgtcagaattgagaaaatcattataattgatgcaaaaatggtaccttgtgagggatttgggggctaagactgacggtaaggaaacctgaagcagatattttgtcctatttcccaggttttatctcatttaaagaaaaaaacttggtagataatawaataaagcccaagaactcctgcctttgcagcctgacaatgctaataggagacataatcttgtatttagtcaaagaggaaagtttcctgttctcctctgggaaaagaactaggcaggtttgcaatgctgggtaagtttaagtttgtgatctcaatgtgatttctgattttgaacaatatgtacactctgggatattgaaattaaaaacaactagtcactggaaacaaaatatgaagtaaaaagtcaataaataatcaatataagatgtaaaaatatgtaagacataaaaccatgaaaaataaatgtaagcccagggtaataaagaagatatttcaacaaataaatttga

SEQ ID NO: 121947 - DNA, 594 bp, Homo sapiens
cagccctctgggaggctgaggcagggggatggcttgagcccgggagcagggataccccagccctcctggttattttattggcccagggctcttacaattgcccaggttaagtcctagagaggcagtagcctagaagacaggagcctcgcctgagtcagatgctgtaaaaagcttgatccacagctgcccctgtttccttatatttcccttcttttaaattatttattctgagattatcttcttgatttcaaataacatagaattcagagtatgaacgaattgaattccccttcccctgtttgaattgcactggtatataccactgtagacrttctctgtgcatttgtattccataaatacttttttaccttaatgtagtcattatattttattctgtgatttgttttttccacttatcatgttttggaactctttccatattatttcatataactctgcttattcatttgaactcatgataagtatcccatcatatgaatgaaccatgatttcaccaacaacattcagttggttcccagtttattgctcttacaaacagcaacgtagcaaacaattataaaagtagtagaagaa

SEQ ID NO: 121948 - DNA, 523 bp, Homo sapiens
ctcataaaagtttttgaaaaaataatcaatgtgtacttgaaatgtagaaaaatattgtataggtatctatgattaactatcttattcaaatcaaattgatttcatttcatatacccttaggagtttattttcattgtcctatctgtgaactattcaagtcaaggtagctcatgtcaagagcatggctctggagtccaatctttttgatcagatcctggttccattgtgacttcaagttacttctctgttacttcaagttacttcctgttagagaattgtcagtgtaaggtaaggtaattactgcaaagtatatagcccaatacgatggcagctgctatttttgtttgccaatgttattttcattagcaaaagaaagtagatgataaggcaatctcccaccacacagggaaccagacaggcctttgsgtcacaccattagctgctgttggcaagcttttcactttcagaggtttaacctcaaaactaagtatgggcctgtgaccaaaattaaacatgtccattg

SEQ ID NO: 121949 - DNA, 523 bp, Homo sapiens
ctcataaaagtttttgaaaaaataatcaatgtgtacttgaaatgtagaaaaatattgtataggtatctatgattaactatcttattcaaatcaaattgatttcatttcatatacccttaggagtttattttcattgtcctatctgtgaactattcaagtcaaggtagctcatgtcaagagcatggctctggagtccaatctttttgatcagatcctggttccattgtgacttcaagttacttctctgttacttcaagttacttcctgttagagaattgtcagtgtaaggtaaggtaattactgcaaagtatatagcccaatacgatggcagctgctatttttgtttgccaatgttattttcattagcaaaagaaagtagatgataaggcaatctcccaccacacagggaaccagacaggcctttgcstcacaccattagctgctgttggcaagcttttcactttcagaggtttaacctcaaaactaagtatgggcctgtgaccaaaattaaacatgtccattg

SEQ ID NO: 121950 - DNA, 543 bp, Homo sapiens
ctttccccattacccttcctggccttggggaaccattattttactctatatttccatgagattaatttttctagctatcacttgtgaatgagaatatgtgttatttgtctttctgtgcctggcttgtttggcttaacataatgtcctctagtttccatctattttgttgcaaatgacaagattttattcttatttgtggctgaataacattccgttggatatatgtaccacattttccttatgcattaattcatscactgatgaaaaatgaggttgattccatatcatggctattgtgaatagtgccgtaatgaatatgggagttcaaatatcactttgatatactgatgtcttttcttttggatacatacctagccgtgggattgcggaatcatatggtagttctatttttagctttttggggaatctccatattgttttccatagtggctgagctaatttacattcccaccaacagtgtgtgagcattttcctttctccatgtcctcatcagtatcagtttcttttaatctttttgatgaa

SEQ ID NO: 121951 - DNA, 489 bp, Homo sapiens
acgatactttgcttatgggcagcagacaccagaagtgccagcttattactactgtcagggaacagtcctcaatgaatggcttactggagttggtgtaacagtaccccagtcttctctcctcttggatgggagagtcctaagacttgactttgccctggcctcaggttgcccctaagaaactaagttccagggaccccccgtggtagctagatttgaaaaagcacctgttagtggctactaaacctccaatcctctgctggcacaccctacatcttcccccacaaaagtacctgaacttcaattcttattttagggactgaggtctccattttctttctggccacgggctagggaccactctcagctcatagaagccactgcctgtcccttgccccaggagcccctccacttcagcaatggagaaatcagccaggtcaagcccctctcatacttggaatctctctamactacttcctcagtcaccagcca

SEQ ID NO: 121952 - DNA, 381 bp, Homo sapiens
ttatataataataatggaatcaattcatcaagatgatttaacaattccaaatataaatgtactatattagtttgttttcacactgctgataaagacatayccaagactgggcaatttacaaaagatagagtttcaatggacttacagttccacatggctggggaggcctcacaatcatggtagaaagcaagaaagagcaagttatgtcttacatggatggcagcaggcaaaaaagagagagagagagacagcgcttgtgcaggggatctcctctttttaaaactatcagatctcataagacttattcactatcatgagaacagtatgggaaagatctgccctcatgattcagttacctcccacatggtgcctcccataggg

SEQ ID NO: 121953 - DNA, 550 bp, Homo sapiens
gagagctcatattaccagtatctacatagaagataatcaataaatgcttattgtctgcctgtctggcttggacaaataacatactgaacttcagtttcttcagatccagtctgtcaacttcatggaaccatggagtccaayatacataagggcacttcaaaacctttaaagtatttatcaaataggaaggatttcttaatgcatcaaacagtttcctgatacaatagtattatcagcatatattattggcagagaatacgttccaagacatctagtagctaataccaaaatgtatatatattatgtttcttcctattcattacatatctataataatctaatttataaactgggcacagtaagagattaacaacaataaataataaaataaaacaattataacaatacgacagcaccactattcttctgctgtggggccattattaagtaaaataaggcttacttgaacacaagaaaggcgataacatgacaattgatctggtaatgtaaacagctactaagtgactaccaggcaggtaacatttacagc

SEQ ID NO: 121954 - DNA, 550 bp, Homo sapiens
gagagctcatattaccagtatctacatagaagataatcaataaatgcttattgtctgcctgtctggcttggacaaataacatactgaacttcagtttcttcagatccagtctgtcaacttcatggaaccatggagtccaatatacataagggcacttcaaaacctttaaagtatttatcaaataggaaggatttcttaatgcatcaaacagtttcytgatacaatagtattatcagcatatattattggcagagaatacgttccaagacatctagtagctaataccaaaatgtatatatattatgtttcttcctattcattacatatctataataatctaatttataaactgggcacagtaagagattaacaacaataaataataaaataaaacaattataacaatacgacagcaccactattcttctgctgtggggccattattaagtaaaataaggcttacttgaacacaagaaaggcgataacatgacaattgatctggtaatgtaaacagctactaagtgactaccaggcaggtaacatttacagc

SEQ ID NO: 121955 - DNA, 620 bp, Homo sapiens
tgaattcttggtagtattgttgcaaagatagaattaaggaactttaatggatacgagtgaccttagagttcttctgaaccagtgtttctcaacctttctttacattatcgcttccctaaggagcctgtgtagactcatcttcccatgaaattttaataccatgatatactgtgtactgtatggttgtgctttatacataaaaagaatacattttttcaccctccccctgaaaagaaataaccatttattacctstgttgagaatacatggtctaatctaatattctcaggctcagagaagttaagtgacatgttcaaagtcatgcaacacagtcaggatgatatttttctatactaaatggtaatgctcttcatgctgtgagttctgaaaaattggcagtaaatttattcaggctgctatactttgtgagatttggggcttttgtttgtgcgtataaaatttgagtgtcgtctcattgtcagggactggactgaccctcttaaacacataatttaatttaatcttcacaacaactgcaggagagaggtagcattctcatcagtcctatgttaatgaataaactgaagtacagagaagttaaggaattactcaagactaca

SEQ ID NO: 121956 - DNA, 551 bp, Homo sapiens
gacgcaagaccctgtctccaaaaaaaaaagtttgtcgtcaccaaaaagcattatattaatggaaaaatgtttcattttctccttctaatggaaattaaattagcaaaaattaatttagcttatttttcttctctctgtcttacagtagatctgtctctctgtctctgtctctctgtctctgtctctctctctctctctctctctctcwcacacacacacacacacacacacacacacacacacaaactgctggtggtagtcattcttttacctcttggctttgagataaaacaaatacctttgaggaatttttaattttttttaatcagtaaataatgacattagtatttttgaatagttggattcattacatacatttttatccattattatttgactagatccatctaattgtgactactttgctttcaaaattgaaaggattgccctgactttatttttaaaagaaggaaatttagttaacctttgttttagttttcttaggtttccttttttccaaaatggctttaacacaaaaaatgtaggtggat

SEQ ID NO: 121957 - DNA, 501 bp, Homo sapiens
gaattcaatacagagagctaaagaaatggaaaatattagagacattagaaagatatgggaagcattgtaagaaaatgtaacatctgtgtaatcaaagttccaaagaaagagaataaaaagaaacaaggaatagataatatttgaagagatagtggtagaggattttccagaattgatgaatgaataaatgtgctgggcctcagaaattgatatcccaaaatacrgcactttgatgtgctaaactgaagaagcctcgaggtctctctgacctccttccacctcctgtttctcaacccattgtctctcctaaataaagctcatgatgaagctgttccctgacgttcccttatctccctgaagtccagactggctcagaagaaaatggttacctctggtccgttccctgagttttcattaactgaactcatatcgcaggaaaaaagtctgaagtctcaacatacctgaacagactggtcacaaaccatcgtctgctttgtgggt

SEQ ID NO: 121958 - DNA, 567 bp, Homo sapiens
gccataaaaaccattaactataataggttctttcagtcagtaagtatttattgaacatctgctctctttaaagcacaactataagaaccacgagaatataacagagtcaaaaaacaaagtcctgaccctgaggaacctgtgcagaggatgaagcaagaagatacatacggaaggctggtggagaaattacaaggcattatgggcacatagtgcaatggttcagtactcatttctgggccggttatctgtttaaggataactctaggtgtggtccctgccctcagcgagctaacagtctagaaggataaacacaaataaatggccattttcaataccacttgatgttaaaatagaaatatgcaaaagaagtagagattataaacacaattactagaagtctgtccagatcagctccatagtggttttatggagaatgcctattgaaatagatgagtttgtgtcttagccttraaggatgtataggattaggataggtaaaaagagcagtaatggaggggcatattaggtagtgggaacaaaatggacataatctctgagataggaatg

SEQ ID NO: 121959 - DNA, 587 bp, Homo sapiens
ttataaaattcagtatttgggtttttatttacaatgcccatgtraaaacaagaaagcaaacacaaagtttgactaaatgccagtggctttgtgaaaagtagttgctacttgctcctaagttgataatcaaggtctacatctagcctgaaagtaaagtagcaacctctcttactgctcaggaactgatgcctgagataccctcacaacccacactatgagaacttgtgattttgcatctcctcagcaactacaacttccagtatgcagaatggcagaaaggacacacatggctagagagggaatggatagtggcaaacgacattgtggaaggtggagatcatctcatgataaagacagatgagtgaagagtagtcaagaagaaccctgggaacaataaactttggaggttgtagtttccatgctttgttgtcaaataaaatataaagtctgacttaggattactaggatatgtttagtctttcttataattagttaagaggaaaataggagcagttttcccccttctacccaggaaggtaccagtagactaataaccactgggtactggacaataggtaagaggctat

SEQ ID NO: 121960 - DNA, 587 bp, Homo sapiens
ttataaaattcagtatttgggtttttatttacaatgcccatgtgaaaacaagaaagcaaacacaaagtttgactaaatgccagtggcttygtgaaaagtagttgctacttgctcctaagttgataatcaaggtctacatctagcctgaaagtaaagtagcaacctctcttactgctcaggaactgatgcctgagataccctcacaacccacactatgagaacttgtgattttgcatctcctcagcaactacaacttccagtatgcagaatggcagaaaggacacacatggctagagagggaatggatagtggcaaacgacattgtggaaggtggagatcatctcatgataaagacagatgagtgaagagtagtcaagaagaaccctgggaacaataaactttggaggttgtagtttccatgctttgttgtcaaataaaatataaagtctgacttaggattactaggatatgtttagtctttcttataattagttaagaggaaaataggagcagttttcccccttctacccaggaaggtaccagtagactaataaccactgggtactggacaataggtaagaggctat

SEQ ID NO: 121961 - DNA, 630 bp, Homo sapiens
ctttcttttgtttatcatttttgaaatggctttttatatttcctattaggtggtctttttcttcagtctcaatttcacttccattttgaaattcctagyaggggtttgtcagagcatttatgttcccagtgttgcagctgactttcccagcatttatttgttgtccttgggtagtccaagaggataagcattctgtcttcatatttaatgtacatttcttatatataacaagttcaaggacatcagagaatgttagagctggaaaggccctacccatagtgttgaacagcagtctcatttcatatacattcagaactgatgctaagatgtattgtctaaagtcttaggtataatgattgtggttggtgactgtgaccttgtggctggttcccgacttgcctttacttcccccagtgccctctctacactgctgcattatttcctttttaaaaatgtaggttatgctttggtgggactgcaaactgataagttttcagaagttttttttggcagtgactagcgtaattaaaaatgcaaatagactacaaaccagcaatttctatctttaaatttacatttttgctttactgtataaggtatctattgtaagcactgtttgaaatagcaaaa

SEQ ID NO: 121962 - DNA, 548 bp, Homo sapiens
ctaggttaactttatttctggcatagcttaacatatattattcatgatatatttctctcctagtaaaatatgaaattttaaaaatctaaatactttttagaggactttgactttccctttttcctgaaaaaaatattctttttaatawtctaccttaaacacataatcaactctaatcaatcagaaaccactgaatgattttatttcatctctccccatgcctacattctatccccctccatgattaatacaattaggccagtaaggggaaggtattgttgaatcaaatgagaaaattgtcttttatattttgttaaaattaactagaaacaaattaactagaaataattgaacaactgaaagctacattcatagtctacttactcattgcatagatgaagtaacaggctcagaggagttgagtaacttgcaccaaaatactaattttttgtttaatcatctggttgatacatcataaacatatatgacctaaatcaatagtaatctaccttctactctgatcttagttctccaagtaatgaaatatc

SEQ ID NO: 121963 - DNA, 522 bp, Homo sapiens
gtgaactcgcatgcatttcaggtgacttaaacattcttttcctatgctaaattcttcccttcccctactctactggctagggacgaaagaaacccacccatcctccagttcctgtcattacagttcatggctatcactctagtgcagtgggaaacatggaaacacaaggccttatgaaattataaggatgctagaagtcaaggccttcatccagggacaaaaggaaagctcatagtaggccatcacctctggagggaaaacatgcaaagcagcaccagtgmccacctgaggtcaaacatatctgtccatctaagattggactccagagggggacaccccagggaatcctctggacctcaacctctccaaaggggatgcccttggtagaggtccccaggtcaagtactaagcccttcttagaattttctctgccagttgcaatactgtttcaccacaatactatttggaatctggagtttgctgttgaatgggaaagtgggatggaattgcatgtatccaggc

SEQ ID NO: 121964 - DNA, 586 bp, Homo sapiens
atctcagacaagactttttaacagctgagcccagccagacgtctataccctaaaatacctatgagttgggtaaattgtgtcctcttgaggtcacaagataacttggggttcctgggcctgttagaaagtgacattctttacttaccacaggtcaggaaccttgtacatgggctgtgaagacaagatatgaagtcatattctccaagaggctttaattggttctataagtaaactttgattctttaaaggaagcatgctattccaktcaaaaccttggtaaaataaccaatttctccaattgtgtcgtgttataaaagaaaacagattcttgttgcatttatgcaattaactgtactgccataaattgaaaatactcattaatagtttccaaattctggggaaatcaggtagagagaacaaatatgctccaaaagttttacttcccactgccccccgccccagcccccacagtaatatattttactcacttgtaacaagttgcaaatagctctaaaaagtaagttatcttgatactgaaaacaaaaggattagcaatgtttaacacatcagctctccatgaaagtcc

SEQ ID NO: 121965 - DNA, 586 bp, Homo sapiens
atctcagacaagactttttaacagctgagcccagccagacgtctataccctaaaatacctatgagttgggtaaattgtgtcctcttgaggtcacaagataacttggggttcctgggcctgttagaaagtgacattctttacttaccacaggtcaggaaccttgtacatgggctgtgaagacaagatatgaagtcatattctccaagaggctttaattggttctataagtaaactttgattctttaaaggaagcatgctattccagtcaaaaccwtggtaaaataaccaatttctccaattgtgtcgtgttataaaagaaaacagattcttgttgcatttatgcaattaactgtactgccataaattgaaaatactcattaatagtttccaaattctggggaaatcaggtagagagaacaaatatgctccaaaagttttacttcccactgccccccgccccagcccccacagtaatatattttactcacttgtaacaagttgcaaatagctctaaaaagtaagttatcttgatactgaaaacaaaaggattagcaatgtttaacacatcagctctccatgaaagtcc

SEQ ID NO: 121966 - DNA, 517 bp, Homo sapiens
tatatgaaacacaatagtaaattaactcaaagcactgataaaaattgcctaacatgaatgtctgtgtttcttgtcatgcaatgataacctcaaaacacttcttttagtttatatggataacggcagctgaaggctgtgttccagtattctacgtttaagaaacatttttatcagtttgagaaatgatttttttgaaagtaaaatttattttgttactgaaatcaggtaaagttttcaggtattttattcataattttctacttctgtatattcactttttttttttttttttttttttttttactggtttcttctaagagctccacatagggatgtcaaaaactgtgcttgcaraaatgaaagtatcctcattatgctaatttaagttccactgataggcatgttctgttttataaattacatcctcttgtcagaagtcaaaatgtatttgaataacttcatggaaattgtcaccaggatttaaaattgtgtgccttacatgccattgttaatttaa

SEQ ID NO: 121967 - DNA, 517 bp, Homo sapiens
tatatgaaacacaatagtaaattaactcaaagcactgataaaaattgcctaacatgaatgtctgtgtttcttgtcatgcaatgataacctcaaaacacttcttttagtttatatggataacggcagctgaaggctgtgttccagtattctacgtttaagaaacatttttatcagtttgagaaatgatttttttgaaagtaaaatttattttgttactgaaatcaggtaaagttttcaggtattttattcataattttctacttctgtatattcactttttttttttttttttttttttttttactggtttcttctaagagctccacatagggatgtcaaaaactgtgcttgcagaaatgaaagtatcctcattatgctaatttaagttccactgataggcatgttctgttttataaattacatcctcttgtcaraagtcaaaatgtatttgaataacttcatggaaattgtcaccaggatttaaaattgtgtgccttacatgccattgttaatttaa

SEQ ID NO: 121968 - DNA, 628 bp, Homo sapiens
gcatactgtaatcagtttgaggcaaggtatatgggataaaaaataatcagaacattaaaactcttatttaaatatctagcawacaatctatgaattgtatatctgagataacaaattaatttgtccagtgagtcaaaggcaacttaaaatataacagtcaaacaaaccttctattgaaatgacttttaaaaaggtgatgaagatttcatcttacaataaattattttctagtttttatatagacaaaatctagaaacagaaaacacttattttaaaagaagaaatggttattttattatttttattacaaaatacagtacctctaaaaaccttattacagtttcattttattttcttgccaatagaatattgaagaatattgcttaaagtaggatttcttcttttgtttcacaagaatatctctgagttcagacacaaagttgaacaaggggcataccaggagagatatactcttgagctgggatacaaaaaatatctaaattgttataatactacagtgttatgaaatttattttattgatggttttaatattttctttcatctcatgaaatttcttatttttatttcattcatgaatataacttatgagatatacaacaaaatatc

SEQ ID NO: 121969 - DNA, 412 bp, Homo sapiens
ttttatcttctgcctggaaggattacattcaggggttttagccatgcatatttatctataaatggtctaaaccagtacctctttatctttccttaaagtacttttcagggtctagggctgtttggagctgtttgttacaagcaggacatmtctctctgaggactccttttctatcttgaaacagtgagaattttgccttttgctctgtatacattgaatatcccttatccgaaatgcttgggaccagaagttttttggatttcagatttttcagattttgggatgtttgcatgtacataatgtactatcttggagatgggatccaaatctaaacatgaaattctatgtttcatgtacacattatgcacatagcctgaagataatttctttttttacctttttctttaagaga

SEQ ID NO: 121970 - DNA, 412 bp, Homo sapiens
ttttatcttctgcctggaaggattacattcaggggttttagccatgcatatttatctataaatggtctaaaccagtacctctttatctttccttaaagtacttttcagggtctagggctgtttggagctgtttgttacaagcaggacatctctctctgaggactccttttctatcttgaaacagtgagaattytgccttttgctctgtatacattgaatatcccttatccgaaatgcttgggaccagaagttttttggatttcagatttttcagattttgggatgtttgcatgtacataatgtactatcttggagatgggatccaaatctaaacatgaaattctatgtttcatgtacacattatgcacatagcctgaagataatttctttttttacctttttctttaagaga

SEQ ID NO: 121971 - DNA, 573 bp, Homo sapiens
ttctaacttatccaagtttgactccaatatttttaccaaaggataaatatctctgcttcaaagaatcataaaaacattacaacagcctggcacagtggctcatgcctgtaatcacagcactttgggaggccaaggcaggaggactgcttgagtccaggagtttgagaccagcctgggcaacagagcaaaaccccatctctacaaagaaaaaaaaawtttttaataaggggggcataagggtgcactcctgtggtcccagctacttgtgaggaccacttgagtcctggagattgaagctgcagcaagctacgactatgccactgcactctagcctgggcaacagagcaagactgcagactgtatcaaaacaaaacaaaacaaaacattacaacatatgagaatgttcaacttcactaatactttcccaatgcaaatttaagtaaagatagtattttttatttatcagtttagcaaatatttttaaaggatcctccatgctaattggagtgtggttaaacaaaaaacctgcttgttacactgctggtatgactacaactgggaaccttttggaaa

SEQ ID NO: 121972 - DNA, 573 bp, Homo sapiens
ttctaacttatccaagtttgactccaatatttttaccaaaggataaatatctctgcttcaaagaatcataaaaacattacaacagcctggcacagtggctcatgcctgtaatcacagcactttgggaggccaaggcaggaggactgcttgagtccaggagtttgagaccagcctgggcaacagagcaaaaccccatctctacaaagaaaaaaaaaatttttaataaggggggcataagggtgcactcctgtggtcccagctacttgtgaggaccacttgagtcctggagrttgaagctgcagcaagctacgactatgccactgcactctagcctgggcaacagagcaagactgcagactgtatcaaaacaaaacaaaacaaaacattacaacatatgagaatgttcaacttcactaatactttcccaatgcaaatttaagtaaagatagtattttttatttatcagtttagcaaatatttttaaaggatcctccatgctaattggagtgtggttaaacaaaaaacctgcttgttacactgctggtatgactacaactgggaaccttttggaaa

SEQ ID NO: 121973 - DNA, 590 bp, Homo sapiens
ctctactggccatcccctgcctttcaagtaggtcaaatgtatttcaacataaggatctttgtattagctaatctttttgcttgcaaagtcttttctgaaatcacatggcatgctctttttggtcttcaggtgtcaaattaaatgtcattttcccagaggtgctctccagaccatcaaatctgaagaggccactggattattccctatcatgttgctgtgttttagcttcttatatattcgttcattcatctgtttacttatgtattgtttctgtttttttttttttaagtttaactatctgatgctttcaccataatacaaagcccaggaggtcaatggcctgtccctcttgtttgtataggagaatagtaagagctcaaaaagatatttctgattcaatgtttgagagcrgtggatattagtatattttttcaaaaatatccagactacaagtaaagggaaggcaaaaaaagaattctgatttgtggatacagtttatgtgaattaaaatctgagctctaccacttaagagttataagacactatgggagaaattactgttttgaggtgtctgccttttcatctgttaa

SEQ ID NO: 121974 - DNA, 447 bp, Homo sapiens
tgaattctcacggcacctgctagtcactcagtcttctattgagaaagccagatttctgtaggtaaaaagtcagcctatattctggagatgaaggaatagaccagaaattgatgtctgagccaagagcgggccaatagggacagtccaaatatgatggtgattaacaaatctaacctgatccttccctccttggggaggtgtttttgctatctggtggcatatttgctctatgggtatggtgttaagtgttatggtaagaaagagaaactgatggaagtttctttctctaccaaaatataagaggaactgcttgccttggaggaactgctgagactggtaactttgttacaagagggccagatrtagtcttcttactggatcagattaatataaccaggaaaacttgccatatagctaacactttggctaacgcatatttctgtttct

SEQ ID NO: 121975 - DNA, 611 bp, Homo sapiens
ttagtatgtacgcatggaatgatctccaataaataatatggaatgaaaaaaagcaagatgtagaacagtacgcagagtgcactactgtttgtgttaaaaatgtatattttaatgcaaatatacaaattttacacatgtaatttatacatggatatataagtaaatgactgtatgcacaatctcaagactacctctggaagggtatatacaagataataatgttaatctccagggtaagagaatgagagagtagggaaaaggggtatcagggagacttacttttcactatgtatccttttaataccttttgaattgtacaatattatcaatctaaaaataaaataaggccattttattttatttttttctagagccagggtcttgctctgtcacttgggctggagtgcrgtggtgccataacaactcactataaccttgaactcttaggctcagcagtcctctcacatcagcctcccaaagcactgggattgcaggcctgaaacagcatgcctggcccaaaaattcctgacacatgcaaaacatttctataaatgaggctatgttgggtctttattaaaaggatagagaaagaaaactcatttggagaatag

SEQ ID NO: 121976 - DNA, 546 bp, Homo sapiens
aaacaccaatcttatttaagaaacaaattacctaataggaacctactgggagatctattaggagaggtcagcatagtaggagaggggctacagggccagtaaatatgtaaagttgatgaatgactgaggtagcactagagagtaatgagaaaaaaatataaatttaataaattctgctaggaacattggttaattatatagaaaayatgtagtaacattcttacatcatagacagtaatgaatgtacgcatgtatggatgtaataaacatttagaaataaagagaaacttcaaagctcttagaagaaaatacaggagaatatttgtgacttgggggcattaagtcaaaatttgataaatgggattatattaaaattaagaacttccattcatcaaaggacactataaagaggcagttcacaaattgggagaagtcactgtaacacctaaaaccaactaacacattgaaccaaaaatgtgtaatgaacacctaaacatcattaagaaaagacaacaagcaacccagtagaaaaagagtcaaataatg

SEQ ID NO: 121977 - DNA, 572 bp, Homo sapiens
cgttatgcaggaaaaatgttggatcttgaaagtggagtaagaataaatgtggcagaagaaaatggagaagaatgtttatgtcagagagatggaacataggcagaagctcaaggagatggaggacattgtaaatcttagaatatgggaggatgtgcataggcratatgcaaatactatgccacttttcatcagggatttgagcatccttgaattctgacatccttggaagtttctggaaccaattcccatgcataccgagggataaccttatatgtggatatatacatatatagatgtatatatttaggtctttaagtgtgtgtgtatatagttatatatgtatgtaaaaagtagagccaatgaatgagaatggtaaccaccaaattaaggatggagttttatcaggatagaggatgagaaataagataagggaaacgtacattaggggaattccattctacttttaaggtaagcattcaatacacaaacttaatattattattttgtaccatctgtagatataaataattccataataacataaatagtaacagaaaatggggagccactgc

SEQ ID NO: 121978 - DNA, 578 bp, Homo sapiens
tgagaaacagcaaagatggagcttggccactctctctgggagctccattccaaggtggtttggaamtgctgctggctggaaaaaattgatgagggtggttgtagacctcacctcagtctggagactgcacctagtgaagagaaccaagatctaggactagagtctggccatctctccacagagctgctgtactgtgacaggggaccacttcagtccctagttgtctcagattcccagagccccaaggcaacaatgactaagtcagttaaacagcaaagatggtggcccacctgtccctctgggagctccacctcagggagctgtaatgtagtcacccatggctggctggagttccaagccagtgtgtcttatcctgcgaggtgttgtggaagtggggcctatagacgtcactgtgcagccccctggattcaaccctaggggtatgtatgtgagtttaaccttctactttgccagagttgcagcctcttttgctgggaagcccgggtatttaaagctcctggggctctgggagtgcctgagtggctgctctgcctagacttcacataagacttaggaaa

SEQ ID NO: 121979 - DNA, 578 bp, Homo sapiens
tgagaaacagcaaagatggagcttggccactctctctgggagctccattccaaggtggtttggaactgctgctggctggaaaaaattgatgagggtggttgtagacctcacctcagtctggagactgcacctagtgaagagaaccaagatctaggactagagtctggccatctctccacagagctgctgtactgtgacaggggaccacttcagtccctagttgtctcagattcccagagccccaaggcaacaatgactaagtcagttaaacagcaaagatggtggcccacctgtccctctgggagctccacctcagggagstgtaatgtagtcacccatggctggctggagttccaagccagtgtgtcttatcctgcgaggtgttgtggaagtggggcctatagacgtcactgtgcagccccctggattcaaccctaggggtatgtatgtgagtttaaccttctactttgccagagttgcagcctcttttgctgggaagcccgggtatttaaagctcctggggctctgggagtgcctgagtggctgctctgcctagacttcacataagacttaggaaa

SEQ ID NO: 121980 - DNA, 576 bp, Homo sapiens
caaaatctggcaaagacacaacaatagaaaaaaacaggcaaatattcttgattaacatagatgccaaaatcctcagcaaaatactagcaagccaaatccagcagcacaccaataagttaattcaacacaataaagtaggctttattctggggatatagggttagttcmacatatacaaataaacaaatatgactcacaacataaacagaattaaaaataaaggccatatgattatctcaatagacatataaaaagcttttgataaaaatctcaaatcccttcatgataaaaatcctgaacaaactaggcattaaaggaacatacctaaaataataaaagccatatgtgacacactcaagccaacatgtactgaatggacaaaagctggaagcattccccttaaggactggaacactgaatgggcaaaagctggaagcattccccttaaggactggaacaagacaagaatactcactctcaccactcctgtccaacatcatactggaagtcttagccaagcaaccaggcaatagaaagaaataaaaggcacccaaatagggaaacaagaagtcaaat

SEQ ID NO: 121981 - DNA, 576 bp, Homo sapiens
caaaatctggcaaagacacaacaatagaaaaaaacaggcaaatattcttgattaacatagatgccaaaatcctcagcaaaatactagcaagccaaatccagcagcacaccaataagttaattcaacacaataaagtaggctttattctggggatatagggttagttccacatatacaaatmaacaaatatgactcacaacataaacagaattaaaaataaaggccatatgattatctcaatagacatataaaaagcttttgataaaaatctcaaatcccttcatgataaaaatcctgaacaaactaggcattaaaggaacatacctaaaataataaaagccatatgtgacacactcaagccaacatgtactgaatggacaaaagctggaagcattccccttaaggactggaacactgaatgggcaaaagctggaagcattccccttaaggactggaacaagacaagaatactcactctcaccactcctgtccaacatcatactggaagtcttagccaagcaaccaggcaatagaaagaaataaaaggcacccaaatagggaaacaagaagtcaaat

SEQ ID NO: 121982 - DNA, 576 bp, Homo sapiens
caaaatctggcaaagacacaacaatagaaaaaaacaggcaaatattcttgattaacatagatgccaaaatcctcagcaaaatactagcaagccaaatccagcagcacaccaataagttaattcaacacaataaagtaggctttattctggggatatagggttagttccacatatacaaataaacaaatatgactcacaacataaacagaattaaaaataaaggccatatgattatctcaatagacatataaaaagcttttgataaaaatctcaaatcccttcatgataaaaatcctgaacaaactaggcattaaaggawcatacctaaaataataaaagccatatgtgacacactcaagccaacatgtactgaatggacaaaagctggaagcattccccttaaggactggaacactgaatgggcaaaagctggaagcattccccttaaggactggaacaagacaagaatactcactctcaccactcctgtccaacatcatactggaagtcttagccaagcaaccaggcaatagaaagaaataaaaggcacccaaatagggaaacaagaagtcaaat

SEQ ID NO: 121983 - DNA, 594 bp, Homo sapiens
tttctacagttctcttttgagtcacccagttggcagcttcctacttctacgtcctgattgggttcatttgctttcctgagtggactctcgctaataactggaagcatagcgtatctcttcatttattgtcttctttgaactctgttaacagaaatttatagttcttgttctataytcgtgtgacatatttctagttaattatgaggtactttatattttgttgtttgtgtgtgtgggctagctttgtcataaatctttgagcaggtcattgccagaataaaggaaaacttttaattccatgtcgattttaagtaattaattttttctgaagtttaatgaaagaagagaactgtatgtttcagagcataatcactggagatgtttgtagctatgttaaaagtttatgctaatagcataaatgaagtctacctggttccatcaatgcctgaataatctgactgtatcacaattgacattcactgggaaaaaatgaagaaggcatagtggagactaacaaaggacaaggaagatcacagcagacattgctaaaaataaaaattatttccaaaagaaatgctattcatagtgaattat

SEQ ID NO: 121984 - DNA, 431 bp, Homo sapiens
ttaatccttcctttacacctgagggacactggccaggccaaccagtgtcctctgttttctcatgrtcaatgggaataagagccctaccactgcccagcccctaaggggtggtgagggtgcagacggttcatgatgacagttgctgggagctacaggagaagtgaggagggctggtgggcctgtggcaacttcccacagctcacaggagggctggagctgacctggccgctccgctctgctgcagaaacaacagctgctgctccctgggctctgggatgtgtctgcagtagcctggggacaccagagccccaacccagtggagcccctgccctgccgttctgtgttctccagtgcaagccccgagctggtgtgcatctctcttgctttagggatataaaactctttcatttccaaaataaagagaacaaagc

SEQ ID NO: 121985 - DNA, 546 bp, Homo sapiens
  misc_feature (1)...(546): n = A,T,C or G
nnnnnnnnnnnnnnnnnnnnnnnnnnnnnnnnnnnnnnnnatctagttgcttaaggtagaagtcaaagtcattgatttaagactcttctaatgtagacattcagcagtgctaaaaatttgtattcaagtacagctgtagctgcattccacaaattctggttgatgaatttttattcagttcagaatattttctattttctatttctattttcattacctgtttgacccagggttatttagatgtgtgttacttagtttccaaatatttgtgtatttsccagagttatttttgttatcggtctttaatctgattgatttgtggtcagggcacatactttgtatgacttaaatccttctgactcaatcctttgagagttgttgtatggcctaaaatatggtctattttggtaagtgttccgtgggtacttggaaagcatagtgttgttcaagtctattctcgctgattttctgccttcttgttctatcacttattgagtaaagggtattgaaacctcagattacctagaaattgtctgttactttttg

SEQ ID NO: 121986 - DNA, 546 bp, Homo sapiens
  misc_feature (1)...(546): n = A,T,C or G
nnnnnnnnnnnnnnnnnnnnnnnnnnnnnnnnnnnnnnnnatctagttgcttaaggtagaagtcaaagtcattgatttaagactcttctaatgtagacattcagcagtgctaaaaatttgtattcaagtacagctgtagctgcattccacaaattctggttgatgaatttttattcagttcagaatattttctattttctatttctattttcattacctgtttgacccagggttatttagatgtgtgttacttagtttccaaatatttgtgtatttgccagagttatttttgttatcggtctttaatctgattgatttgtggtcagggcacatactttgtatgasttaaatccttctgactcaatcctttgagagttgttgtatggcctaaaatatggtctattttggtaagtgttccgtgggtacttggaaagcatagtgttgttcaagtctattctcgctgattttctgccttcttgttctatcacttattgagtaaagggtattgaaacctcagattacctagaaattgtctgttactttttg

SEQ ID NO: 121987 - DNA, 594 bp, Homo sapiens
tttgttttaaaacccattcaggctacaattgaaaataaaaattctgttctgaatacagccaccaaaatgaaagatgtacaaacatccacaccaggtaaactttgcattgtagatttaactctggaaagaagtacattaatctgtttgtaatgctcatagtctttctattctcaattatttcactttttatattttatttcaggatttcatctaaataatgcagctgttatcatttttatattttcaaaaatgagatttacatgcataargaaaatatatttttaaaacataaggtttttgttttgttttgttttttgttttgttttgttttttgtttttggagacagagctttgctcttgttgcccagggtggagtgcaatggctcaattgtaactcacgacaacctccaccttcctggttcaagcaattctcttgcctcagcctcccgagtagctgggattacaggtatgccccaccatgcccggctaattttgtatttttagtagagacaggctttctccatgttggtcaggctggtcttgagctctcgacctcaggtgatcctcccgcctcgccctcccaaagtgctggga

SEQ ID NO: 121988 - DNA, 579 bp, Homo sapiens
catctgcttaaatccttccaatagatgtctatctcagaagaaaagtaaaattccagtggccttagatgctctaagtaacccgccctccacctcccgccctgactcagctgctatatctctcctccgtactcactccattcctactctacgtgaatcctgccactcctcgttagtctgaaatcctccttagtctgaraatggggatcagtgtcaactaataaatcacagatagctatgcctctctttgtcctggacaagttatatccaaatgatagtaattgagccttgaaataaaaattatgagcaaattttttatttaaaaactgaaagtaaattataaatgtcagtgggaagattaaatcaaacatgatttggctaaaatttactgcattttccccatattataatagaagtaaaattagatgccttgaaagaatagaatgatcatatctatacataatttgagattgaaatagtttcagatttaagtcaaattgacatgaagaaaaacaaaattttaccaactaagacatatttaaagctactgaagaaaagtaattatgaaatagggaatacact

SEQ ID NO: 121989 - DNA, 579 bp, Homo sapiens
catctgcttaaatccttccaatagatgtctatctcagaagaaaagtaaaattccagtggccttagatgctctaagtaacccgccctccacctcccgccctgactcagctgctatatctctcctccgtactcactccattcctactctacgtgaatcctgccactcctcgttagtctgaaatcctccttagtctgagaatggggatcagtgtcaactaataaatcacagatagctatgcctctctttgtcctggacaagttatatccaaatgatagtaattgagccttgaaataaaaattatgarcaaattttttatttaaaaactgaaagtaaattataaatgtcagtgggaagattaaatcaaacatgatttggctaaaatttactgcattttccccatattataatagaagtaaaattagatgccttgaaagaatagaatgatcatatctatacataatttgagattgaaatagtttcagatttaagtcaaattgacatgaagaaaaacaaaattttaccaactaagacatatttaaagctactgaagaaaagtaattatgaaatagggaatacact

SEQ ID NO: 121990 - DNA, 579 bp, Homo sapiens
catctgcttaaatccttccaatagatgtctatctcagaagaaaagtaaaattccagtggccttagatgctctaagtaacccgccctccacctcccgccctgactcagctgctatatctctcctccgtactcactccattcctactctacgtgaatcctgccactcctcgttagtctgaaatcctccttagtctgagaatggggatcagtgtcaactaataaatcacagatagctatgcctctctttgtcctggacaagttatatccaaatgatagtaattgagccttgaaataaaaattatgagcaaattttttatttaaaaactgaaagtaaattataaatgycagtgggaagattaaatcaaacatgatttggctaaaatttactgcattttccccatattataatagaagtaaaattagatgccttgaaagaatagaatgatcatatctatacataatttgagattgaaatagtttcagatttaagtcaaattgacatgaagaaaaacaaaattttaccaactaagacatatttaaagctactgaagaaaagtaattatgaaatagggaatacact

SEQ ID NO: 121991 - DNA, 616 bp, Homo sapiens
cttgtatccactagtttagccttccgaaagtttcttcatccagtcgtggcaacaaaggataatatattagcctcaataaaaatatcatcaattatcaattttgacatacatatacaaagtaaaactgctrcaagcattagatattgatcagtttttcattcagaaatcagtgcaatattcattgaaaatgaccattttaggagttaattagaatccagcataatttttgtttctaaaatagccttgttgggagtatcatgttgttctctaaagaagtttcatgaaatagctattgtatccaagaggtagctccttgaacaaggaagccaatgtattcagattcaactttgtctcatttctgtaactaaaatcaacaaaacatgtatctctgatgcctaatagtaacaaagaggagtaatgagtcagtgtgtgtgtttttatgccaattctaggattgtttccttcttccagcagttcctgcagcagccaaaatcaagtattttttattaaaatattccaaatgcatctgaagtgagttcactcaggtttcctcagcggaaaccccaaaattatataaatgactgcctcttttcacaccttcctgcctcacaatccg

SEQ ID NO: 121992 - DNA, 570 bp, Homo sapiens
agggcctacgggaatgttgtgatattaaagtgattcattgatgatgaggtgccattatttttgaaacctgcacttgagtcgacgtatgaattacttctcaaagtttgtattttctgtatgcttctttsaatacatagctaattgttagttcatctcactagtcaatcagtatgtattggacactttttacaatctggtacattctgatcactgcattaaatctgtctgtataataatttatgaggtaattggttaaaataagccagaagttaagaccatgagagtgttagatattagggttctcggctccttcctaattgtgggggccaatagtcaactgcaataaagtcaaagaagataaggaaaactggtgtccaagggaataggcaatgatgctgatataaagaaatgacttttatatggaaccaaagacttacgaacccagtccccaaatggtctctaagtgtagacctggctacctgtgtaaaagaggaaaatagttagaactggcaggattaatagtaggaaagccttcctgggatggtcttttctgagctctggtttctgaga

SEQ ID NO: 121993 - DNA, 570 bp, Homo sapiens
agggcctacgggaatgttgtgatattaaagtgattcattgatgatgaggtgccattatttttgaaacctgcacttgagtcgacgtatgaattacttctcaaagtttgtattttctgtatgcttctttgaatacatagctaattgttagttcatctcactagtcaatcagtatgtattggacactttttacaatctggtacattctgatcactgcattaaatctgtctgtataataatttakgaggtaattggttaaaataagccagaagttaagaccatgagagtgttagatattagggttctcggctccttcctaattgtgggggccaatagtcaactgcaataaagtcaaagaagataaggaaaactggtgtccaagggaataggcaatgatgctgatataaagaaatgacttttatatggaaccaaagacttacgaacccagtccccaaatggtctctaagtgtagacctggctacctgtgtaaaagaggaaaatagttagaactggcaggattaatagtaggaaagccttcctgggatggtcttttctgagctctggtttctgaga

SEQ ID NO: 121994 - DNA, 570 bp, Homo sapiens
agggcctacgggaatgttgtgatattaaagtgattcattgatgatgaggtgccattatttttgaaacctgcacttgagtcgacgtatgaattacttctcaaagtttgtattttctgtatgcttctttgaatacatagctaattgttagttcatctcactagtcaatcagtatgtattggacactttttacaatctggtacattctgatcactgcattaaatctgtctgtataataatttatgaggtaattggttaaaataagccagaagttaagaccatgagagtgttagatattagggttctyggctccttcctaattgtgggggccaatagtcaactgcaataaagtcaaagaagataaggaaaactggtgtccaagggaataggcaatgatgctgatataaagaaatgacttttatatggaaccaaagacttacgaacccagtccccaaatggtctctaagtgtagacctggctacctgtgtaaaagaggaaaatagttagaactggcaggattaatagtaggaaagccttcctgggatggtcttttctgagctctggtttctgaga

SEQ ID NO: 121995 - DNA, 570 bp, Homo sapiens
agggcctacgggaatgttgtgatattaaagtgattcattgatgatgaggtgccattatttttgaaacctgcacttgagtcgacgtatgaattacttctcaaagtttgtattttctgtatgcttctttgaatacatagctaattgttagttcatctcactagtcaatcagtatgtattggacactttttacaatctggtacattctgatcactgcattaaatctgtctgtataataatttatgaggtaattggttaaaataagccagaagttaagaccatgagagtgttagatattagggttctcggctccttcctaattgtgggggccaatagtcaactgcaataaagtcaaagaagataaggaaaactggtgtccaagggaataggcaatgatgctgatataaagaaatgacttttatatggaaccaaagacttaygaacccagtccccaaatggtctctaagtgtagacctggctacctgtgtaaaagaggaaaatagttagaactggcaggattaatagtaggaaagccttcctgggatggtcttttctgagctctggtttctgaga

SEQ ID NO: 121996 - DNA, 570 bp, Homo sapiens
tttctatttcatttcttctgtaatgaaaaacccagtcagttgtattgttattaattaacgtcctgggaaagtctgagtcttgaagacattctctaaacaagtgaagggagaagaggcccagaaggtctatgctctgtggtaaccaygaaaaacctactcagtcatctttaactgaacctgttacccaaatgagtggaccccaaaataacgttaatgcaaacctagattcccaaaacttctgatcttgccatgtttacaaattaacctaaatgtaaatgaatcactcactattctatacatgtttaacaacccaaagtatattattgaattagatggggaatatttcttggggctgttaccttgaccattccacaaagttttgtggctggtggataaagtaggagggacctttggcctggtagaatcccttagtggggctatactctcccaacaaagtagcattagttatgtgaatgtgtttttggaaacacatcatggaaataaaattagggagatggatttcagccatgaggaaaatacttatacatgtgaatattcaaaaacctgaaa

SEQ ID NO: 121997 - DNA, 523 bp, Homo sapiens
acatcattgcttcacaggtctgatttcaatcattaagtgattatgtgcaaatcttataacatatttgagtctcgatattctcattggctcaatkatctgctagattaaatcagtgatcttccaaccttttttgctcacctattccctaaattaattttgacaatgtcccccttcatctaaaatttaaaattttttatcatacctttaagtagctgcaaagcatgcaatatctagcttactataaatattaatatttttagaagaaattgtatacaacttttatattgatccaaatgatttaaatactgtatttatttactattcaacatcatcaattttaaaaaatacatgaacatgctgttctttacagtcaaaattttgtcatctctttttttttcttgaacttgtatattgtccatcttcccccacagaattttactctaaagtaaaatatatttgtgctgggcaccagatgagctgtccagattcacggtcaatgaaggactttttgctccagctgcag

SEQ ID NO: 121998 - DNA, 523 bp, Homo sapiens
acatcattgcttcacaggtctgatttcaatcattaagtgattatgtgcaaatcttataacatatttgagtctcgatattctcattggctcaatgatctgctagattaaatcagtgatcttccaaccttttttgctcacctattccctaaattaattttgacaatgtmccccttcatctaaaatttaaaattttttatcatacctttaagtagctgcaaagcatgcaatatctagcttactataaatattaatatttttagaagaaattgtatacaacttttatattgatccaaatgatttaaatactgtatttatttactattcaacatcatcaattttaaaaaatacatgaacatgctgttctttacagtcaaaattttgtcatctctttttttttcttgaacttgtatattgtccatcttcccccacagaattttactctaaagtaaaatatatttgtgctgggcaccagatgagctgtccagattcacggtcaatgaaggactttttgctccagctgcag

SEQ ID NO: 121999 - DNA, 523 bp, Homo sapiens
acatcattgcttcacaggtctgatttcaatcattaagtgattatgtgcaaatcttataacatatttgagtctcgatattctcattggctcaatgatctgctagattaaatcagtgatcttccaaccttttttgctcacctattccctaaattaattttgacaatgtcccccttcatctaaaatttaaaattttttatcatacctttaagtagctgcaaagcatgcaatatctagcttactataaatattaatatttttagaagaaattgtatacaacttttatattgatccaaakgatttaaatactgtatttatttactattcaacatcatcaattttaaaaaatacatgaacatgctgttctttacagtcaaaattttgtcatctctttttttttcttgaacttgtatattgtccatcttcccccacagaattttactctaaagtaaaatatatttgtgctgggcaccagatgagctgtccagattcacggtcaatgaaggactttttgctccagctgcag

SEQ ID NO: 122000 - DNA, 418 bp, Homo sapiens
catggcttatgcctgtaatcatagcgatttgggaggccaagatgaggattgtgtcaggccaggagttcaagaccagcctgggcaacatagtgagaccttgtctctaaaaaaaaagaaaaaaaaaattagccaggcaagataagtcacatgatgtaggagttccagctactcaggaggctgargcaggaggattgcttgagcccaggagtttaaggctgcagtaagctatgattgtgctgctgcactacagcctgggtgagagaagagagcaagaccttatctctaaagtaagatatatatatatattccattatcccagaacatcccctaatgtgctttgcaatttttcacacaccccacctacacccagggaaacagtctgatttctaaaaccatagctttacttttgactatttta

SEQ ID NO: 122001 - DNA, 561 bp, Homo sapiens
caagaaggaacctccttaagactcagttttcctatctgtagtatgggagcaataagaagattactgtaaagttaaatgagatgatacatattagataacatacaactaatgtaataacattatagtaaattttagcaattactttaatgtcttttatatacactgcccccaagcaacctattagtgaactcaccccaataaaatctaaattttccacttattttactctcaaaatataccttaaaagattgttttctgtagactgccaagaatttgagaatggcagggatgttcttggttttaagggatrtgaaaattatttttagtacatccaaatttttgacaacaatctgatgatatgaatgaagcaaatagttaaattaagaagacagtgagaagtggctatcttagacacatcagaacaaataatgcctccttaaggggaaactaagagtttgcaccccaatatgtccttcactcttaggtttcttctagaccttgtagtgtatagttgctgtgtccctggagcagcagttacttatagtcagcattgcagcttat

SEQ ID NO: 122002 - DNA, 633 bp, Homo sapiens
acatccactgcaaccttcattcagatgtccaggaaaattttcctaacgctcttcactccagtcaacacttgcctggccactgagccaatcatacatggattttctccagttcttatattctgagtttattatttcttctggttccttataactaaatagacatggttattaatatctccttcaactctatattcatctaaatttaactatcattttttctctcttgataattgaattcctcaagagatttcatttactatacctacctcaatcaattctcactgaaatttttaaaataataatatawtgttaattataaaacatgagcaaatccatttctagaattttattggtgccttgtggtcagcataaatattttgagattcattcacattgctgtgtgtaataataatttattgttttattgctaaattcttaggtaatactttttgttttattattttagtggtcacttgaggatttatagtattcatgtttaacctatcacagcctaagttaacttcaagtttatacattatacagtttcacataaaatgtgaatcttataatagcatgttttcatttttctcaccttgaccacacttgtgctattgctgctacttgcatatgttt

SEQ ID NO: 122003 - DNA, 470 bp, Homo sapiens
actaacaaactatggcagaggcttgtctcaattccccagaacacccagatcaacttcctgtgcctctgatttccataaaaccaggaatggcaaggaactctattgccagatcaaatcattccaggtgaaagcaggtcaagctayctcagacacaccttgccacacacttgtgcagcaactttcccagaagcccaattttcaacaaacaggtggccactcctctgactgtccttctctaaacactggagcccattttatgagattgtaccagcaactgtccttttctaacatgggaaaatcaactgataaaaaacaagggagggttgaatgagggctgaaaattttggtccctcctacatgtcaccaatattcacagctctgaaaaatgaaccactttatcagaaggagattaaccgcaaaaacatggctgataagggcttttagtagcaggtgttgggtgactgtcttca

SEQ ID NO: 122004 - DNA, 608 bp, Homo sapiens
agcgatagatggaagagcctcggtcccttataggttccctggaattggccacctcactcagcatgttgtggctgccagtttttctcagtcccaatctccatgaagaaggagattcatctttgggctcttctggcttgttaaaaaggccagaagagaactatgagagaagcaaataaaagaaatgaaaaataaaggctctgatgattctttctcagcctatttgccttttccacacttaactaagttcagcgaggcaacataaggtagctaagaagaacaaatacatggcagtctttctgcccatgttccctccctcacccagcaaaagctaataacctctccaggctctttcttcctaagccaaaaatagcctcggattcttcacacagtgctcctamctgacagggttgttctgagaaatttgctatctctgtgcaattaataatgacctggaacaccaggagattgtattctagtaatataccttcttctaactcaccgtggaactgaatataagatactttacttctctaggtctcaacatgctcacctgtaaaatgacggtaatgagcttaatccctccttataatatgtggagactggaaaaa

SEQ ID NO: 122005 - DNA, 545 bp, Homo sapiens
cttcactttaccataccagacataatgctgaacacaacagagattaggtatggttgatctgtcccatcattgagctatatagttctttgattcagaactgctgttttccacatttgtcctaaactttagtttacattacctgagtgacagcacgtgcaaaagaaacaaaaacaaaaaaagtcattgatttttttggcccctaatgtcccaccctaatgtcattratctttattctccccactcaaattattcatctgctttatgagtaaaaaatatggcttattcactcttcatctgtatatggggtgggttttccattctgcagtctgaacaaaaataccgtacttatgtagttctcctgtatagcactaattaagccaaagacatgcatgaccaaacaataaaagattcaaaatgaggagcagagaaaggaggactgaattctagatgtttcataaaactggagtaagtatgaatcactgaccaaatactctcctatatgaaatgacagttttagtattatgtgtatttacttattttttaag

SEQ ID NO: 122006 - DNA, 463 bp, Homo sapiens
gacagacaagccaccccagtcccaggaaagctctgagctgtgtaaaacaaaaggaagctctatactggtccttcagatacttcagacaggttaaaacgatcacaattttttgagagcaagatctgtactaatccttctcgtgctaacagcctgcaccatgagtataagctgctgtcttcaaagtcattgttcatctaggcacaaggaatggtaggtgagcaatttaaggtgccatagtgttctgtttctgcagcgctacagctccctacttttcctggtttttaatgttaactaaattccagagttctacgaaaactaattctgatagtttctggaagcttattaggtgtttttrcaagagccctagagttccctactccaccatattatatgacttttctcacaaatgttttatatgcataacaaaagtatttgactttgattatgctgattgcaaatttca

SEQ ID NO: 122007 - DNA, 559 bp, Homo sapiens
aagggatttctttaaccagatgaagagtacctatgaaagactcagcgctaacataataccgaataatgaaaagctagatgctttctccctacaatcaagaacaagacaagtatggccattcttacctcttctattcagtatcatattggatgttacatattgccagggcaaccaggtwagaaattaaagacatctagattggaaagaaagaagtacaactatatctatttgcagatgacatgaacttcatacaggaaatcccaaggaaaccaggacaaaccaattaagactaataagttcagcaaagctgcaggatgccagtgcaatatacaaaaatcaactgtattttaatacactagcaattcacaatccaaaaataaatttttaaaaaaaattcaatttacaacagcaagaaaaagaattaaatacttgagaatatatttagcaaaataaatatatgtctagtatactaaaaaacatagaatgaaatggaagaaaatcaaaataactagaaaactggctcatgtttatggactgaaagattaatacttcctaaact

SEQ ID NO: 122008 - DNA, 424 bp, Homo sapiens
ttcccctgctttagttgcagatatgtaaaccataaattgttgatgttctgtgaatctacctagcctctgacaatattgcagtccatcacaacattattctgatagatataaggggagagcctcatcccgtagcttataggtccttcctgaatggagaaacagaggctcaggtagtaaagattacctactgtagtgcctatgatcaaccttctcagacctgacctccacggagaactggaatagctggaccgggtgagcaagagctgaagtgctatgtgtatgtggtagaggagggagttgggctaggggtggaggacaaggatgaaacctgagcracagagcaagggattctctcaaacgctgaggatgtggaggaaggagcctgcagccttcatttcatttcatgacaattcactcatagaaa

SEQ ID NO: 122009 - DNA, 554 bp, Homo sapiens
gacatccagcttaggaacattcaaaacggctaggcctggaactgatatttgtgtataacatatggtttttctcatatagatagactattccagyatcatttagtgaaaagtgacctgcaagacaatcttgctgaaattgctttgaatctgaacatcagctggggagaactgcattacatgaaacttcatacacataaatgtgttttatttttctatttgtcttagaattattaaaataaattttcatacaaatactatatgtattttgttagattcattcagattctatgcatttttcttcctaatacataaggcatatttttaaaaaatgttttctgtttgttgccaaagaatagaaatgcaattgatttttgaatattaaacttatatctagccatggtattgaattcttctaattcctaataatttgtcaattattttattctttctaggtaaatactgatactataataaattttccttctgcttctttccttttcctattatttacttttcttgaattactaggctagtttggactttaataaaacgtg

SEQ ID NO: 122010 - DNA, 554 bp, Homo sapiens
gacatccagcttaggaacattcaaaacggctaggcctggaactgatatttgtgtataacatatggtttttctcatatagatagactattccagtatcatttagtgaaaagtgacctgcaagacaatcttgctgaaattgctttgaatctgaacatcagctggggagaactgcattacatgaaacttcatacacataaatgtgttttatttttctatttgtcttagaattattaaaataaattttcatacaaatactatatgtattttgttagattcattcagattctatgcatttttcttcctaatacataaggcatatttttaaaaaatgttttctgtttgttgccaaagaatagaaatgcaattgatttttgaatattaaacttatatctagccatggtattgaattcttctaattcctaataatttgtcaattattttattctttctaggtaaatactgatactataataaattttccttctgyttctttccttttcctattatttacttttcttgaattactaggctagtttggactttaataaaacgtg

SEQ ID NO: 122011 - DNA, 633 bp, Homo sapiens
  misc_feature (1)...(633): n = A,T,C or G
tgggtggagctgaaggtatggattacctttcttccattccattccagatataagtagggaataaagaacagccttctttgggggactcaggcaatggncctgttgtgtaaacttagtgtcacccttaacttgaactggaggcaggggattttattaatattctgctctctcagacaatggtacaggagtagctgtcatctagcagtggtgcaactacttcccttggttccacacaaccatattcctatcttctgcccagatgatgccactggcaacttgatacagaaggtcaccttaaaccagactcagattggcaccatgtgaccccaggactaatttttctgcaaggcaagcaggcccttccttgctttttccttggacctaatactgcctgttccctgggagttatacatgacccttgacagggacccaagccctgatagcagcagcaacrtcttagcctctggtgccaatggaacaattctctgaggaagacaaggacacggttttagccattttacccaagttttcctcccaaaggcctgatacaacatcttccagtcacccaagggagatattgccaataagacagttaagcctcttaattttaagagactagctttgaccccagag

SEQ ID NO: 122012 - DNA, 640 bp, Homo sapiens
tgttgtggaattggagtttattatggtaagtgaaataagccaagcacagaaagaaaaactttgcatgttctcatttttgtgtgggagctaaaaattaaaacaattgaactcacagaggcagagagtagaatggtggttaccacaggctgggaagagtagttgggtattggggggaagtggacatggttaatgggtacaaaaagtagtgccaggtgtggtggctcacacctgtaatcccagcactttgggaggctgaggcaggtggatcactacaagccaggagttcaagaccagcctggccaacgtggtgaaacccctgtctctactaaaaatacaaaaatcagccgggcatgctggcatgtgcctgtcatcccagctacttgggatactaaggcaggagaaatgcttgagcctgggaggcggaggttgcagtgagycgagatcacgccactgcactccagcctgggtgacagggtgaggctgtctcaaaaaaaaaaaagaaagttagaaataatgataagacctaacatttggtagcacaacaaggtgactatagttaaaaataatttaattttacattttaaaataaaacggtataattgaattgtttgtaagacaaaggataaatactttaggtgat

SEQ ID NO: 122013 - DNA, 640 bp, Homo sapiens
tgttgtggaattggagtttattatggtaagtgaaataagccaagcacagaaagaaaaactttgcatgttctcatttttgtgtgggagctaaaaattaaaacaattgaactcacagaggcagagagtagaatggtggttaccacaggctgggaagagtagttgggtattggggggaagtggacatggttaatgggtacaaaaagtagtgccaggtgtggtggctcacacctgtaatcccagcactttgggaggctgaggcaggtggatcactacaagccaggagttcaagaccagcctggccaacgtggtgaaacccctgtctctactaaaaatacaaaaatcagccgggcatgctggcatgtgcctgtcatcccagctacttgggatactaaggcaggagaaatgcttgagcctgggaggcggaggttgcagtgagccgagatcacgccactgcactccagcctgggtgacagggtgaggctgtctcaaaaaaaaaaaaraaagttagaaataatgataagacctaacatttggtagcacaacaaggtgactatagttaaaaataatttaattttacattttaaaataaaacggtataattgaattgtttgtaagacaaaggataaatactttaggtgat

SEQ ID NO: 122014 - DNA, 394 bp, Homo sapiens
gaattcaaatgtagaaattcttcaaaaagaaatctctagacccaggtattttcactagagacttctgctagaggtttaagmaatcattaacatcaattctatacaatctcttccggaaaagagaagaggaaacacttcccaattctttacctcaaactagtattaccttgatactaaaaccaacaaagtaccaacagtatcaaaacaaagtaaacttcagactgatatcccttgcgaatataaacacaaaattcccaaacaaaattgcaaaaatagatttcaataatatattaattatataccatgaccaaatgaggttttcttccagggatgcaaggctgtttcaatattcaaatacatcatattacatgttaagaggcaaaataagaaaaat

SEQ ID NO: 122015 - DNA, 555 bp, Homo sapiens
gtttttcttatggcatccacacttaagttcacatccttcaaaaaataaatttgtaacatgtttttaagcgattggtattgttaacaccaagtatgagatcccattttcagaggtgtttgaaccacagcaactccatcttgaataagggctgggtaaaaatgatgctgagacctactgggctgyattaccggatggttaagacattctaagtcacaggatgacacaggagttcggcacaacatacaggtcataaagagcttgctgatgaaacagggtgcagtaaagaagccagctaaaacccacccaaaccaagatggcgacaagagtgatctctggtcgtcctcactgctacactcccaccagtgccatgacagtttacaaatgccatggcaacatcagaaagttaccctatatggtctgaaaaggggaggcatgaataatccaccccttgtttagcatatcatcaagaaataaccataaaaatgggcaaccagcagccttggggctgctctgtctatggagtagccattcttttattgttttactttcctaata

SEQ ID NO: 122016 - DNA, 555 bp, Homo sapiens
gtttttcttatggcatccacacttaagttcacatccttcaaaaaataaatttgtaacatgtttttaagcgattggtattgttaacaccaagtatgagatcccattttcagaggtgtttgaaccacagcaactccatcttgaataagggctgggtaaaaatgatgctgagacctactgggctgtattaccggatggttaagacattctaagtcacaggatgayacaggagttcggcacaacatacaggtcataaagagcttgctgatgaaacagggtgcagtaaagaagccagctaaaacccacccaaaccaagatggcgacaagagtgatctctggtcgtcctcactgctacactcccaccagtgccatgacagtttacaaatgccatggcaacatcagaaagttaccctatatggtctgaaaaggggaggcatgaataatccaccccttgtttagcatatcatcaagaaataaccataaaaatgggcaaccagcagccttggggctgctctgtctatggagtagccattcttttattgttttactttcctaata

SEQ ID NO: 122017 - DNA, 555 bp, Homo sapiens
gtttttcttatggcatccacacttaagttcacatccttcaaaaaataaatttgtaacatgtttttaagcgattggtattgttaacaccaagtatgagatcccattttcagaggtgtttgaaccacagcaactccatcttgaataagggctgggtaaaaatgatgctgagacctactgggctgtattaccggatggttaagacattctaagtcacaggatgacacaggagttcrgcacaacatacaggtcataaagagcttgctgatgaaacagggtgcagtaaagaagccagctaaaacccacccaaaccaagatggcgacaagagtgatctctggtcgtcctcactgctacactcccaccagtgccatgacagtttacaaatgccatggcaacatcagaaagttaccctatatggtctgaaaaggggaggcatgaataatccaccccttgtttagcatatcatcaagaaataaccataaaaatgggcaaccagcagccttggggctgctctgtctatggagtagccattcttttattgttttactttcctaata

SEQ ID NO: 122018 - DNA, 555 bp, Homo sapiens
gtttttcttatggcatccacacttaagttcacatccttcaaaaaataaatttgtaacatgtttttaagcgattggtattgttaacaccaagtatgagatcccattttcagaggtgtttgaaccacagcaactccatcttgaataagggctgggtaaaaatgatgctgagacctactgggctgtattaccggatggttaagacattctaagtcacaggatgacacaggagttcggcacaacatacaggtcataaagagcttgctgatgaaacagggtgcagtaaagaagccagctaaaacccacccaaaccaagatggcgacaagagtgatctctggtcgtcctcactgctacactcccaccagtgccatgacagtttacaaatgccatggcaacatcagaaagttrccctatatggtctgaaaaggggaggcatgaataatccaccccttgtttagcatatcatcaagaaataaccataaaaatgggcaaccagcagccttggggctgctctgtctatggagtagccattcttttattgttttactttcctaata

SEQ ID NO: 122019 - DNA, 538 bp, Homo sapiens
taatgttttaatttattaaaaatacacaattatattatattaagtataacatataaactatagactacatattcaaaactataaagtaaatgaatacaaaacatagtattttaaatgttatatcacagacattgtgaatgtatgtcattcaaaactgagcatgattttgcttttgacagtttttaaccctccatcaacatttcctgttcaatagtgaaagcagtaagatttccagggcatatattcattcctcattgagggaatttttaartgtaaacatttttagatttatctactgaaaagtttaaaaattatttttaagagccacacaattaccatccgtttttctagttgaaaatacgaaggagaattcgagctgacaaaaatgcaacctcaatactattttgactttttaaaataaaactattccctatgtttaaggagcctatctatcctgcaaattctttataagggggaaaaaacatggtaacatacacacacacacatacacacacacaaacacacacatctaaaaatg

SEQ ID NO: 122020 - DNA, 633 bp, Homo sapiens
ttcttgtgcccactgagtttaataaatggttctcactgggtatttttgtctttttttcctctgatttatgtacactctaggaggtggtttcaatgactacttaggctacttacattctctataaagtgattttttcccctcttgagttttgtatctttctccttgttggtagtttccttcctataattctagttttatgcatgatatatctgtaatatgatttgaaataaaatgggaaacataaggaattttaccccagaaaattaaaacagagtgaatatagactggataaacacatattatggcctttccrcttgtcttccccactctgtacaccggaaagataagattttaaaaaatattacattaggggtaaaatagttctggtgtgtgaagaagataaatgtaggtccggaacaatcagtctagacttttagacctttttaacagctaatttggattactattcaataaatttggttgatgactgtgcaagcaatgtatactatgacccaacagtttggatggactatgattgtgctatacacatcttttaatttggttcttgtttcatcttgatagtatactatgtttttttcatccttttcaacttgcaatgctgaaaaaaatttc

SEQ ID NO: 122021 - DNA, 633 bp, Homo sapiens
ttcttgtgcccactgagtttaataaatggttctcactgggtatttttgtctttttttcctctgatttatgtacactctaggaggtggtttcaatgactacttaggctacttacattctctataaagtgattttttcccctcttgagttttgtatctttctccttgttggtagtttccttcctataattctagttttatgcatgatatatctgtaatatgatttgaaataaaatgggaaacataaggaattttaccccagaaaattaaaacagagtgaatatagactggataaacacatattatggcctttccacttgtcttccccactctgtacaccggaaagataagattttaaaaaatattacattaggggtaaaatagttctggkgtgtgaagaagataaatgtaggtccggaacaatcagtctagacttttagacctttttaacagctaatttggattactattcaataaatttggttgatgactgtgcaagcaatgtatactatgacccaacagtttggatggactatgattgtgctatacacatcttttaatttggttcttgtttcatcttgatagtatactatgtttttttcatccttttcaacttgcaatgctgaaaaaaatttc

SEQ ID NO: 122022 - DNA, 486 bp, Homo sapiens
gagtccttcaagttgaaatgaaaggatgctagacagtaattcaaagccatacaaaaatataaagttctctagtagttaagtgtacaaataaaaaaactctcttgagataaagatcaataacaacttgcaagtgtgcaatgaaaccacttgctgaatgaatatcatcactacccagaggttatatacagcatataattttacaaatcatataaaggtgctctcacttaaacctattcttctaaactctcataaactccataggaggcagaaaacgagagttggcaaagcaragctgctaatgcaaaataattcttattctaacacaaaaaatttctttaatgaatgaaacttgggcatgccagtatagacattgatacagaaaccctacattgaattctccatttgtatgtgatgaaaacactgaaaataaagatgaactataaatgctttctttgaaacaaaaatacacatagccaacaatgaaag

SEQ ID NO: 122023 - DNA, 549 bp, Homo sapiens
aaatatttaatatctttaaaaaagaaatttcaaatgaataattgttttattgattagtttattttactcattttaaaatacaaaaggaggtagacaggcatttaaaatagaggaacatcattttcgaaattatttacctacaaagattgcttcagatcttaataacagtggtttatagatctggtcttatcaaataactacaacaaacaactaaataagaatgcttattgttgtgtgtctagaacatatcaggcactttacatatattattttgttgacttatctcaataaaattaagtatatacgtagagtcaagaaatgacgccaatatgtagcagcgtcagaattaaaacttaggtttccctcaacctaaaactgataaatatttcaccttatgacacccccatacaatagraattatgttctaaacccaagcatttaaattctggtgtttaaagggaccttaaaatatgagctacttaaaatatttctccatttttgatactgtaaaactagtatttatttattaactcatcatcattaatcact

SEQ ID NO: 122024 - DNA, 635 bp, Homo sapiens
aaattctcaaaaaccctttgatagtctttcatgctacatccaggatttttgaatctctggtttccagaagcatggtaagaatgcttttttacatgccaccaaggttgaggtggtgtcacatgatgagtgctggtcaatgctctgtaagtggaaatgacgtgtttcacttctggactgaagtatttacttatgggacatcttcccctctgctgcagctcattacaacttttgataaaatgatttctctatcaagctatgtcacagagtgagaagatagtatggaaagccccagccaactcatgacaaacaagtaccctgagggaaaaacaaactttctttttttaagcctgtaaggtttatgggttgtttattactgcaatctaaactagactggcattaactgttccactttgaagacaaaaataaattccacagctagtaagaggaagaactgagacaacctcagrtctattgcaaaaaatacatatttttctctacaacctctttccactccacgtgtttttgcaccaacccgtggactttccatcattaagttttagagcccatgggaatacctcagttcttttagtattgttgtagaaccctaagggcatttctctcagaatgcattaaaa

SEQ ID NO: 122025 - DNA, 555 bp, Homo sapiens
tccatccacatgcctcttcctcaaatttctttgtcaccaattttccaatcatgcttcttccaagtcccagaacatccagccaaaccattggctatagcccattaatcagtatataatcacacatctggccatttctccttccaggcaaagtgcacaaccaggtgcacttcttgaagttctgcccactggaaagatttcccttcatcactatcattcagacctatcttagaaaagggctgtagtgctgcagctgtccactaccaggtggtgtctgaatatcatgcagaatcatctgtgaaccaggccctagttttctctttccctgtcaattgatcatagggaaccmccccaatgaggccactggtgcaggctggggttggggagagaagacaggttggcaggaaaggagaccatggacatttgaaccacttcctcatgtaacttacttgttccttcaggacctactcgaacctgatcacgtatataccacttccatttgatgatggaatgctgctgtgcatgacccactttatggctagataggtgagaaagctc

SEQ ID NO: 122026 - DNA, 555 bp, Homo sapiens
tccatccacatgcctcttcctcaaatttctttgtcaccaattttccaatcatgcttcttccaagtcccagaacatccagccaaaccattggctatagcccattaatcagtatataatcacacatctggccatttctccttccaggcaaagtgcacaaccaggtgcacttcttgaagttctgcccactggaaagatttcccttcatcactatcattcagacctatcttagaaaagggctgtagtgctgcagctgtccactaccaggtggtgtctgaatatcatgcagaatcatctgtgaaccaggccctagttttctctttccctgtcaattgatcatagggaacccccccmatgaggccactggtgcaggctggggttggggagagaagacaggttggcaggaaaggagaccatggacatttgaaccacttcctcatgtaacttacttgttccttcaggacctactcgaacctgatcacgtatataccacttccatttgatgatggaatgctgctgtgcatgacccactttatggctagataggtgagaaagctc

SEQ ID NO: 122027 - DNA, 555 bp, Homo sapiens
tccatccacatgcctcttcctcaaatttctttgtcaccaattttccaatcatgcttcttccaagtcccagaacatccagccaaaccattggctatagcccattaatcagtatataatcacacatctggccatttctccttccaggcaaagtgcacaaccaggtgcacttcttgaagttctgcccactggaaagatttcccttcatcactatcattcagacctatcttagaaaagggctgtagtgctgcagctgtccactaccaggtggtgtctgaatatcatgcagaatcatctgtgaaccaggccctagttttctctttccctgtcaattgatcatagggaacccccccaatgaggccactggtgcaggctggggttggggagagaagrcaggttggcaggaaaggagaccatggacatttgaaccacttcctcatgtaacttacttgttccttcaggacctactcgaacctgatcacgtatataccacttccatttgatgatggaatgctgctgtgcatgacccactttatggctagataggtgagaaagctc

SEQ ID NO: 122028 - DNA, 438 bp, Homo sapiens
ttcatacaaatcaaagtaaatgttttctaaaaagagagaacatacagtaagatatgacawaacataatacaatacactaaggctcttacagaaaaaggctgaatccaaaagtaaattgaaagacacacagaaaaataaggtaggaaacaaggacaatcctagtcttcttcactttcaataggggatgtaaatttgcaaaatgttggcagaaaagtctcattcacctaatcaacaaatgtgtatcgtttgcctgtgtgcaaaatgccgcattaaatactgcactagaatctcagaaaagggggaaaagtaacattataaaatacttattgatcagcaggagttgtagagtagggtcaatgtaagaaaaaatcatgtaaaaattatagtataaattataactcaactttgaaatggaatttcacttcaagtttgaaatgg

SEQ ID NO: 122029 - DNA, 641 bp, Homo sapiens
agctccttagcctgacgtacaaagccctgtgggtctttccagtggacttctctccattcatcttctgtcatgmtccccaacccccactctgctctagccacactgacctcctttctgcattttaatctaagcactttcttcccgtccttcgcaatataaaattttccctgcttgtttcagtgtaatcaatcattaatatttgttggacatatgaatgaataagtactaacagagtttaaggaattgaaattcaagctggtcatagggcttggtgtcaactcttttaactttctgctggcttcttaatataactggaaaaggaggctgtcctaaaaagatttggtttatgttaagttcacttttattgcggctgttcattgatgggttgataacatactaaatacatagcctatctttctgcaatattgtatattataccaaaacaaaaaactcattgaaaattagtcctaatatctttacaggaaagacctcaaggaaatccatggcccaaatacatgtagtgaccataagccatttcctagaatgactgtttgaaccctatttaaactgtaaacatagtgttgattatccccatgacctggtgaaatatcccagaaacactggcattttggatttcaaac

SEQ ID NO: 122030 - DNA, 641 bp, Homo sapiens
agctccttagcctgacgtacaaagccctgtgggtctttccagtggacttctctccattcatcttctgtcatgatccccaacccccactctgctctagccacactgacctcctttctgcatttwaatctaagcactttcttcccgtccttcgcaatataaaattttccctgcttgtttcagtgtaatcaatcattaatatttgttggacatatgaatgaataagtactaacagagtttaaggaattgaaattcaagctggtcatagggcttggtgtcaactcttttaactttctgctggcttcttaatataactggaaaaggaggctgtcctaaaaagatttggtttatgttaagttcacttttattgcggctgttcattgatgggttgataacatactaaatacatagcctatctttctgcaatattgtatattataccaaaacaaaaaactcattgaaaattagtcctaatatctttacaggaaagacctcaaggaaatccatggcccaaatacatgtagtgaccataagccatttcctagaatgactgtttgaaccctatttaaactgtaaacatagtgttgattatccccatgacctggtgaaatatcccagaaacactggcattttggatttcaaac

SEQ ID NO: 122031 - DNA, 620 bp, Homo sapiens
gcaagtggtagtaaagttgtcaattaagtgactttaaaatagaaacaccaggagggagagtcaagatggacaactggatgcagccaggaagagctcctcccactgagagagataggaccatcaagtagaccagcacacaaagtgggagatccaaataggtcttcagaaagaaagcactgagagtgggcagaagaaggatgtagaccctgggctgaaacggaaggaaggtgggaatccagcataaggttgccaagcaccagaactcatttctggccctgaatggctcctagggaaggggcgagtgaaataggtgtgggacagcccacacctctgtacctctgggatcctagattcaggagaccacatgacccccatggatgtgtgagctggcacgaagaactgcccagagagttggcagagacagaattccagcctgcatggagaccagagggtcaggcacggaagtgctgcaatgaaacgtggcacatgggtcgcatcccccaaggctcaccatactcttctaggtagccctagccagtttgsgtgcttgacctggacagagcagggcagaagcaagacccagtggtatgctgtcatcaagagacccatctgacatgcaa

SEQ ID NO: 122032 - DNA, 620 bp, Homo sapiens
gcaagtggtagtaaagttgtcaattaagtgactttaaaatagaaacaccaggagggagagtcaagatggacaactggatgcagccaggaagagctcctcccactgagagagataggaccatcaagtagaccagcacacaaagtgggagatccaaataggtcttcagaaagaaagcactgagagtgggcagaagaaggatgtagaccctgggctgaaacggaaggaaggtgggaatccagcataaggttgccaagcaccagaactcatttctggccctgaatggctcctagggaaggggcgagtgaaataggtgtgggacagcccacacctctgtacctctgggatcctagattcaggagaccacatgacccccatggatgtgtgagctggcacgaagaactgcccagagagttggcagagacagaattccagcctgcatggagaccagagggtcaggcacggaagtgctgcaatgaaacgtggcacatgggtcgcatcccccaaggctcaccatactcttctaggtagccctagccagtttgcstgcttgacctggacagagcagggcagaagcaagacccagtggtatgctgtcatcaagagacccatctgacatgcaa

SEQ ID NO: 122033 - DNA, 578 bp, Homo sapiens
ataatcacacaataatagtgggggattattgagctctccattgtcattgagctcccacctcaagatcctagagaaagaagaacaaaataaacccaaagcaaatggatcaacagcatttaaaaacctctagcaagactggaaaaaaaaaatgaaagagaaaacacaaattacaggtattgggaaggaaacagggatataaccacagacccttttaatgtagacattaacatgacgataagaaaatacaaacaactctatacatgtaaacttgataatttagttgaacaatttctcaaaattataaactactataacttacctaatatgaaattcatttgaamatttctataaatattaagaaaattgaattaataatacaaagtaaacttccaaaaaagaaactttaaaacctaagtggtttcattggagaattctatcaaaaatttaaaagaattagcacaagttctatataatttatttcaagaaatataagataaatgaacattttctaattatttttatgaatctagtattatcctggtaaaaacaaatataatgaaaattacaattacaaacta

SEQ ID NO: 122034 - DNA, 578 bp, Homo sapiens
ataatcacacaataatagtgggggattattgagctctccattgtcattgagctcccacctcaagatcctagagaaagaagaacaaaataaacccaaagcaaatggatcaacagcatttaaaaacctctagcaagactggaaaaaaaaaatgaaagagaaaacacaaattacaggtattgggaaggaaacagggatataaccacagacccttttaatgtagacattaacatgacgataagaaaatacaaacaactctatacatgtaaacttgataatttagttgaacaatttctcaaaattataaactactataacttacctaatatgaaattcatttgaacatttctataaatattaagaaaattgaattaataatacaaagtaaacttccaaaaaagaaactttaaaacctaagtggtttcattggagaattctatcaaaaatttaaaagaattagcacaagttctatataatttatttcaagaaatataagakaaatgaacattttctaattatttttatgaatctagtattatcctggtaaaaacaaatataatgaaaattacaattacaaacta

SEQ ID NO: 122035 - DNA, 576 bp, Homo sapiens
aaatccacaagctatgaagctgacttacaaaaataaactgtatttcttttatatgctagcaatgaacaattggatagtgaaattaaaaatatcatttacaattactcaaaaaatgaattagctataaatctaataaaatacgcacagggtctacatcttgaaaattacaaattatgatgaaataaattaaagaactagataaatgaaaacaccatgtttgtggatcagaagactcaaagatatcaattatctccaaattaatatacataatttatgcataatgtgcataatttatgcagttcctataaaatttaaaaatgttgacaaggttgtgaagaaactcctcatcgctggtgagaatgcagaaatggtactgccactctagaaagcagtttagcagttttcaacaagactaaacatgcaactaccaygtaacccatcaattttactcctggccatttatcccagagaaataaaaactcatgttcacacacagtccttataggaatgtttgtagcagttttattaataataactaaaaagtgaaaacaacccagatattcctcagtgggtgac

SEQ ID NO: 122036 - DNA, 521 bp, Homo sapiens
ccagcaacaagtgcatctaatacccggattaattttggaaaacagaagcccagcccccgtgccacaaggaggggcatccctagaagagccaactcagcttcagagcacactctgggactgcctgaagcctcatgttgctaccacattatagttatttattcttcaatcgaatcttacctctattaccttgcagttgtttttaaaagagcagtgttcaatagaacactcacatggaaaggtgacacatttcttgcgatgggttctcatatatctcttacattctgctcattactattattattattactgttgtttagttgggttattttctattcacctgtctcaagttcaaaaattgatattttctgctgttcagttttctattacaaacgttcaaaaagttcttaatttcagatattgtatgttgcaattccaaaatgtccatttaattctkttttacaaaatctggttctatttgaaaattttcaccttttttatttttcttctttttgattagcata

SEQ ID NO: 122037 - DNA, 581 bp, Homo sapiens
aggacagcaacttcaaagattaaaggaacatcagcccacacaagaaagaaccaacacaagaactcaagaaactaaaaaagccagagtatcttcttacctgcaagcaactgcactagttccccaacaatggttcttaaccaggctgaaatgacagacatagaatttgaaatatgaataggaatcaagatcattgagatttaaatgaaagttgaaatccaatcgagggaatctaaggaatacaataaaacaatataagagctgaagtggaatatactcattttaagaaagaaccaaactgatctgatcgagttgaaaaactcactataaaaatttcataatgtaatcagaagtattaacaaaatagacaaagattaaaaatctcagagctcacacacaaaaaactggctctttgaatcaactcagacaaaataaaaataaaaataaaaataaaaaagaataaatgaagcctctgggaaatacrggttatgtaaagaccccaagcatactactcattggcatccctgtaaaaagagggacttcgaaaacatatttcaagatattgtccatgaaaacttccccaa

SEQ ID NO: 122038 - DNA, 606 bp, Homo sapiens
gagttgctaatctaatttcagacaaaacagactttaagccaacaaagatcaaaaaagacacagaagggcattacataattgcttattttgtttgtttgttttttgcttgttgatttgtttatcatccttatagattttgggtattagactcttgttggatgcatagtttgcaaatattttctcccattctctctgtttactctgccaatattttgttttgcagaaggtctttagtttaattaggtcccatttacccatttttgtttttgttgcagttgcttttggcatctttgtggtaaaatatttgccaccagacctgccttacaagaggtcccagaaggagtgctaaatataacctgccttacaggaggttgccaagggagtactaaayatagaaaggaaagactgttaccagccactacaaaaacacactttaagtacatggaccagtgacactataaagcaaccacacaaacaagtctgcataataactagataacaacatgatgacaggatcaaatctgcatatgtaaaaactagccttgaatataaatgggctaaatgcccaattaacactgagtaggcagttggttaaagaagcaagac

SEQ ID NO: 122039 - DNA, 606 bp, Homo sapiens
gagttgctaatctaatttcagacaaaacagactttaagccaacaaagatcaaaaaagacacagaagggcattacataattgcttattttgtttgtttgttttttgcttgttgatttgtttatcatccttatagattttgggtattagactcttgttggatgcatagtttgcaaatattttctcccattctctctgtttactctgccaatattttgttttgcagaaggtctttagtttaattaggtcccatttacccatttttgtttttgttgcagttgcttttggcatctttgtggtaaaatatttgccaccagacctgccttacaagaggtcccagaaggagtgctaaatataacctgccttacaggaggttgccaagggagtactaaatatagaaaggaaagactgttaccagccactacaaaaacacactttaagtacatggaccagtgacactataaagcaaccacacaaacaagtctgcataataactagataacaacatgatgacaggatcaaatctgcatatgtaaaaactagccttgaatataaatgggctaaatgcccaattaacactgagtrggcagttggttaaagaagcaagac

SEQ ID NO: 122040 - DNA, 594 bp, Homo sapiens
ttgttagctagtattttgttgagggtttttgcatgtatgtttatcagggatattagtctgtaggttttttgttgttgttatattcttccctggttttggtatcagggtgacactgacttcatagaatgagttagggaggactctctttctcaatcttttggaatggtttcaatagggtaggtatcaattcttcttcggatgtctggtagaattcagctgtgcatatgtgtggtcctaaacattttttgttgggaatttttctttcttactaattcagtctcactgatttttattggtctatgtagggtttctatttctgccaaatttaatctaggagggctgtaggcttccagcatttattawttttttctagatattctaattcctgtgcaaagaggtgttcatagtaatttcaaatgaacttttgtatttttgtggtgtcaattgtaatatcttcagtttcatttctaatcaggcttatttgaatcctctcttcttgattaatttagctaatagtctatcaactttgtcttttccaatgtctaatttttgtttcattgatcttttgtaatttttgtttcaaattcatttagt

SEQ ID NO: 122041 - DNA, 634 bp, Homo sapiens
caactacctatcatgtcctcttctctcatttaactgtagaacagtccctgcattacctttgatggcaatttgaagaacaatgtcctcttttgatttagttcagctccaatgcctgggtgcccagatttcactcaagtcaaaggaatctctttagtatctcaagcaagtgcattcttggtagcatttccttatcccttcttgggaaatgtccagggatgtcaaggctaattaaagaagagatttaatatagaactttctatattttataaacattttttctttcaaaaaatgtattagataactactggatagcagaactgttaatagaayctggttatacaaagggaaatatagcttcggccttaaaggaatttacagtatagtgggagaaatatgtagacatattaacagtttaagttttgtttcataagttctattataaatatattcaaattgtttaggtgcatattatgtcctggatataaaacggtactgagctctctctccagtttcttatagtagctattttatttcaattatatctattatctacctcaatactgactctgagcaggcagtttaataattcctaaaaataaaacagaaaactcaagtcaggaaatcctgcaatttt

SEQ ID NO: 122042 - DNA, 564 bp, Homo sapiens
cttaggtaaatggtttggtttctcctgcaagatagtatttgggcctgggagagtattcaaataacactcctgctcttttttctgaatttggacaaaattcagatagaaaactttgtcattaaaatataaagaaaccaaagaaggtacctggatccttgctttgtcttttggcagttgctgtcacatctgctaagtgtggtgggtctggcatagttgcaaaactccactaggattttgatgagaatggagaccagtgggttatttttagtgtctaaaattaatttagtaattaagttattactgttttaaaaaacaatagttagagttaaactaggaacaagaagggaaaatacatcctcaytgtgtatttacacaaagtcaaaaatatgtatatacagaagcagctcaatttttcagtatgtttatggaaaaattcagcatcagtcttatttttcagctatttactatggactaacttcaaaaacatgttcttttcccatgaaactcacggggagcttttttattgaggtccatgaaataaaagaattgtattgagcagcaaac

SEQ ID NO: 122043 - DNA, 479 bp, Homo sapiens
actccatgtcccacatccagkgcacattggtgcaaagagtgagcttccaaggccttggcatctctgcttttgtgactttacagggtgcagtccccatggctgctctcttaggctggatttgagtgtctgtggcttttccaggtgcagagcccaggctgccagtggatctaccattctcagatctggaggatagtggctcccttctcctagctccacttggcagtgcctaaataggaactctgtgtgggggctccaaatccacatttatcctctgccttgccatagcagaggttctctgtgggggctccacccctgcagatggcttctgttgggcacccaggcttttccatacatcctctgaattctagatggaggctcccaagcctcaagtcttgcactctgtgcactcgcaggcttgacaccatatggaagccaccaaggcttatggcttgcaccctctggagctgcagcctgagctg

SEQ ID NO: 122044 - DNA, 580 bp, Homo sapiens
atctgttgcaaatattaacttgctcattcccacctgacgaaagttaagtsaaagctgtgctgagatagtacttcaaaactgtcctttccactcatttgcccagccattcatttgctcaggcaataaatattgctgctcaaagaggtcttccctgaccacctatctaaaaaatacccgcactaaacccagttattctctatcaataatatcacaaaacttatttctctggatttatattattcagttaatttttacttatttacaatatgggcttctcttgttagaagataagctctatagaccttttgattcgtgattctgttcccatcaactagaagagtactgggtagactgcaggttattaataaatattaataaaatgaatgaatagtatctgactaattagaataaattaaaatttaactgaggctcttagtcaactgccttctcgatgatagttctcacatgggaagagcctgtaaatgactgtgtgaattcttccagctctttactaggatggaaatgcaaggagaaggcactgagctcaatgcttaatctattttatttcatctaaaacatg

SEQ ID NO: 122045 - DNA, 618 bp, Homo sapiens
aacttcttctccatcttttctctctcattccaattcacagttagatcttatattatttataatttttaaatatatgtgatatgaatataaacttataaaaattcagcccatacagatgtatatwagaatcctctaggaggattaaggaccgaagtgcagatactaaagtaattttctctgctgtgcacaaatagcaccctttatcttccagaacacttactgtacttttaatttaaaaacatagaccatgctaagggggcaaacatatgtttgtatgtatgcaaatgattctggtaacgttccaattgaacattaactgaaactattgatcttcttaaaccagaactaacattaattgaaactattgatcttcttaaatcagagctaagttctcaaagataacctattgaaatcgaataattttaactatttggaaaggaataatattttcattatgatttaatgctctcattgtatctatcaccatttttcaatagagaaagagaattctaagaaaataagtcatgagtaggaggatgaaaaattggaagaggccagcatatgcagtaactattaaaagtatgtgatatgtggtctagtggggtgcccaggaccatg

SEQ ID NO: 122046 - DNA, 523 bp, Homo sapiens
atttataatgcagaaaaatctactgttaatgtttggtatatttttttccaagcattttcttctgtatgcttagagttagaaagttgaaacaaagttttggttttggtatttttaaacttgtatcaaatattcacttatatctttaagttaccttataaattatgatttcaataattaaatggtatgaaaatttcaatatatatcataacttatttaactggccrtcctctgagatgtttcaactacatttcagtagtttgttatttaaaccaatactatcaaaaatatcaatgtgtaactatcttgcacatctttatttcaatttctataaattgaccacaaggaaattttgccaacatgatgggtaagttatagcttctacattattaataatcaaatagatgcaaattaaaacaataaacttgaatactgtttttcataggttcatatagttttagtttccatgattgaattttgctaaatacctatgtcttacttatctttcctgtaatatcaagaatat

SEQ ID NO: 122047 - DNA, 567 bp, Homo sapiens
taaggaatgggatagaaaaggacacaaatgtagtttccaaaagagtgctgtaaatatgttggtttagctttggcttcaggggagtgccactgaattctcctttctgccattagcattgggaagcccaaggagaggagaattcagaagcagattaagggagacattttggtaatacaaacactattaattgctcccttttttcaaccccatatgartattgtgaggataagaacaaaaaaaaatcgtgtgtattatttattagccccagctcacaattaatctcagttttctataggaaagcagagaaattaaaaatatacatttagtggccaaatatttttagagttaaaatccctacaattaaaaattcaaagatttccagtgtccagatagcctatgcagatggcagtattgagactctcaaatactgagcacagggaaaaatgtaaaaatatcttgaattaagatttgcaaatgtgaaggcactgaaatataagacattctaaaaatgagcaccaaacagcttcaatatatgtctcattcatttgtcattctttgtccctgaag

SEQ ID NO: 122048 - DNA, 567 bp, Homo sapiens
taaggaatgggatagaaaaggacacaaatgtagtttccaaaagagtgctgtaaatatgttggtttagctttggcttcaggggagtgccactgaattctcctttctgccattagcattgggaagcccaaggagaggagaattcagaagcagattaagggagacattttggtaatacaaacactattaattgctcccttttttcaaccccatatgaatattgtgaggataagaacaaaaaaaaatcgtgtgtattatttattagccccagctcacaattaatctcarttttctataggaaagcagagaaattaaaaatatacatttagtggccaaatatttttagagttaaaatccctacaattaaaaattcaaagatttccagtgtccagatagcctatgcagatggcagtattgagactctcaaatactgagcacagggaaaaatgtaaaaatatcttgaattaagatttgcaaatgtgaaggcactgaaatataagacattctaaaaatgagcaccaaacagcttcaatatatgtctcattcatttgtcattctttgtccctgaag

SEQ ID NO: 122049 - DNA, 420 bp, Homo sapiens
gaattctacaaaagtttctccccaagatcacatgtacactttcataaagcttcttgccaatacctcatatgtctttaaagtaagagcttcaacctcagctggtgaaggtgatgaaagcacatgccatgtcagcacactacctgaaacaggtaactaacgtgaaacaggtaactaacatgaaacctttaactatttggggattgtgtcaataccacctgcaatctttatagcatacttatctaaacatacaaagcacatattaaaaaatacaacacaggctttttatcccacgtgttgcttgagtrccagctgtgtactacattgacccttctccaaaacattgggagattgaagggaggaaaaaaagagagatgatcctctttactgtatttccacaaatataaaacccccacctaatga

SEQ ID NO: 122050 - DNA, 565 bp, Homo sapiens
acacacacacacacacacacacacacacccctcacattcacacctgtttccctttcttgctggaggtgaaaattggaatgctattataagcttgtgcagatgactataactgagaaatcaggcacatcacagggaaatcattgcacctacagcctcattctttttttgaaagctggcagggcacatgcaatataaaatgaagggtgagacrgcatgtctccagcaggacagaaaaggttatggggcactgaggaagtatgggaaatgctcagttgctctcagaaacaaacaatgaaataaataaaaatactggaaagagagacagaagcatagttgtagccttaggtatgggtatgccaaaacacagggagtaaataataaaataaacatgtgaacataaaggcatctatgtgtccccatgtgtgaggagtgactcaagattggactatagcaatggcagaggatgttttgttcaaaagctagatagatatgctgtcagatggtagtgtcagactatacactcggccagcataaaaattgcataaatctatgaacctgtaatgga

SEQ ID NO: 122051 - DNA, 568 bp, Homo sapiens
ggatggagtgtggaagccaaagccactccatcttggatgctaatctaccatattgacttctgattaaccccagttccaggaagacctctaaaatttccagtttatctcttgttccttgtgtaagagtaggtacttaccataaattctgcccttgggtgaaatgaccttgatgttcttgtacttcaactgtcctacacatcccttctgaawcaacatttccctaggttatgtaagtcctgggtctgggggtttacagtgcggagatccacgattttgtctcacagctgcctggcacacagacatgtcttctgttcataagtccttattacatctttccaagaaaaaagaaaaaaaaagcttctacaatccttaaagtcaccctcaaaggaggaaaatatgaagaagagggaatttgccacatatccacattaaaagccataaaatatgttcagtttatctgtatatataatttatgttgtaccagcttccacagcagctagttctttaaaatattccattcttttagcacttaggtgtgttcatttgatcaccttactttcaggcatgg

SEQ ID NO: 122052 - DNA, 581 bp, Homo sapiens
ataatatgcatttagctttcctccctgtattttcatgacttgatagttcatttctttttatcactgagtaatattccactgtctgcatgtactacattttatttatccattcactggcagcaggacatcttggttactctactaatcaccttagattaaaatagattgccagaaattcagttgctgggtcaaggaaaatgcatattttatattttaatagctgcttatgaaattatccttcaaaagcttcgtacaatttggatttcctgaaatgagtgctcatttcttcacaaccttgccaatgctgaaagttttgaaaattatatattgttactacaatcatccaggtgtagatttttgtgtcgacgtgttttcaactcctttgagtaactatgaaggtacatgactgattgctgaatcttatggtaagagtatgtttggttttrtaagaaactgccaaattcttttccaaagtggttgtaccatttcacacttccaccaacaatgaatgagagttcctgttgttccacatccttgccagcatttggtggtgttaatattctagattttggtcattttaa

SEQ ID NO: 122053 - DNA, 593 bp, Homo sapiens
tggttaatgtcaacaataataaaataaatgaatagcatggagatggagcctccattcaatgtagtcttacattaaaaaagtttagtttcttataaagactcaatagatattattttgctattacatatacacagcttttggacaatagaaccttgtttttttttgatagatcaaaaagtaatagtatggagtggtttgtaataccagccttaaacagtgattctgggtaatgtatggaatacttgagacaatgaatcacattttagtaggatttgtaatgaaaatgccatggaaggatatagtctaagggtctctgtcataccatgtagctaacagtagtaattgtcagtgattacttccagaaccaatggtctataaaagcacgacatgcagaaagaagcatacaatcctgatattacccttkgtcgtaggctgatttccaacaccgtgtgcctggcagaggaaaaagcaactgtataaatattcagataggaaagagaaagagagaactcacgtcagttcctaagctattctttcaggtaactttttcggaaacaaatacttgtgctctactgcctgttcagataactagt

SEQ ID NO: 122054 - DNA, 540 bp, Homo sapiens
caagacaggaaagtgggattcacaggttttatctgaccctctgcagattacagtgctcttattaaaactacatacagttgattctattttctatataataatatcataaggtaaagagaaaatgttcacaattactgggaaatgggtactatggaagaaaaagtattatctgtacccaaacatatgtgtgtcctctgttggctgacttgttagttttcaaggaacatcccactaatcttttattgatcctattatccgaaaaggaagaactctctacctaaaagtgcacattactgaaacaagctcgaaatagaaagatctgcatggatgacctcatagagaggtgcaagctagccacaggcagaagggaaatctatcttagtaacactgcttcccttagtttctgcttccttatctcacaaatctccaaagttactgacaacagcatttatttcagcacmtttaatatgccctttaagttaccacaacttagatgtacggtaaatgatacaaacaaaaactacattagaagtatatttc

SEQ ID NO: 122055 - DNA, 550 bp, Homo sapiens
ttcagcacatttaatatgccctttaagttaccacaacttagatgtacggtaaatgatacaaacaaaaactacattagaagtatatttccctcatcckggaatattatatttgttttaaatgggtccctaaggaaaaaaaacaggaatcagatgatagcacttcacacctcgtcttccccatgtcttagctgaataatctgaatatatttattcattcagcacaaatatgtattgagtaccaggtactgttgtaggcactggagacatggtatcaaccaaagaaacaagaaactccctcttggaatttgcatttcagtaagagaagcagacagtaatcaatgtgcatacgtgaaatatatagcacagcagaaggtattaagtgctacagagaaagataaacgtgggccaagtgactgaagaggcatgttattgtacaggcagtgcccagagaaggtctcattaacaggtttcctgtgtgcctagactgaagaaagggagctaatgcgctggggagattggggaaagagtgctctgatcaaagtggcaagat

SEQ ID NO: 122056 - DNA, 550 bp, Homo sapiens
ttcagcacatttaatatgccctttaagttaccacaacttagatgtacggtaaatgatacaaacaaaaactacattagaagtatatttccctcatcctggaatattatatttgttttaaatgggtccctaaggaaaaaaaacaggaatyagatgatagcacttcacacctcgtcttccccatgtcttagctgaataatctgaatatatttattcattcagcacaaatatgtattgagtaccaggtactgttgtaggcactggagacatggtatcaaccaaagaaacaagaaactccctcttggaatttgcatttcagtaagagaagcagacagtaatcaatgtgcatacgtgaaatatatagcacagcagaaggtattaagtgctacagagaaagataaacgtgggccaagtgactgaagaggcatgttattgtacaggcagtgcccagagaaggtctcattaacaggtttcctgtgtgcctagactgaagaaagggagctaatgcgctggggagattggggaaagagtgctctgatcaaagtggcaagat

SEQ ID NO: 122057 - DNA, 576 bp, Homo sapiens
tacctactaggaaattgaaaaatattcttaagaatagtataaaacagttgttctcataaatatcacccaaataactcaatctaaaccttaaggtctaattattacaaaaatgacttgaatcagatttcactctgatgtgaaastgcttcagctcagtattcagtcaaattatggaagatattaagataagaggggttctgccttttcctagagatgatatgccagagtgtgaaatggccttaacacccattgagaataaaaatgcccttagatagagcaatgcatgtgtacatgatgctttactcatccaagccactctttttgggtttctattgtgttgtaggttttgtgttaggtgctgaggacacagtaacaatcagatcgatccagaccacactgtgctctcattccagctgacaaaattgtcaaaaaagaaaaatgcaataagtgctacaacagagatctagacaaagtgtagcagggccacttggtgggaccctgctttgtcccacacacagaatttcttggaatttaggtaaatagagctcatgataatgtaagtaagctttaaaatta

SEQ ID NO: 122058 - DNA, 602 bp, Homo sapiens
actgtcaaacacttataaaagcatcatatcttgtgagaactcactcactatcctgagaatggcctgggggaaaccacccccatgatacaatcacctcccaccttgtccctccctcaacacctggagattttggagattacaatttgagatgagatttgggtggggacacagagccaaaccatattatttcattcctggcccctcccaaatctcatgtgttcacatttcaaaacacaatcatgccttcccaacagtcccccaaagttttaagtcatttcagcattaacctaaaactcaaaagttcaaaatctcatctcagacaagttcattacttccaagatacaattggatacattctcttattccaaatgagtgwaattggccaaaacaaaggggccacagtccccatgcaagtccaaaacccaacagggcagtcattaaaattaaaagctctgaaaggatcttgtttgactacatgtctcacatccagggcacactgatgcaaggggtgggctcccatggtcttgggcagctctgcccctgtggctttgcagggtataatccctctcctggatgctttcatgggctggcattgagtgcct

SEQ ID NO: 122059 - DNA, 602 bp, Homo sapiens
ccatgcacatgcctcttcataggtcacatgttcaaaaaaaatggcagtgttagcatgatctgagggtggagttgtcagccctctgctgtcaaaaggtgaagcagagaacatgtacatgcttaccgcacatcctctgcacaagtcagccaaaaccggcctgtagatggtggtcagtttttaggaaggaatgcattgcgaggaagtctggtcawgccctcagatgactggctaaaggccataaaggaatgaggcatccatgtcttgttttctaaagctggtctctgcttactctttaggaaagaatcctggttgaaggttaataaggaaggcatatctgacctcccatcctgtcatggctggaaacccagtttttaaggtttctctggggtccccttggtcaagaagcagtctgttcagtcggtgggggcttggtaacatttttatttctcactttcttatatactgttggaatgtatttgttaatattttaccaaagttttctgtgtctatgttcatgagaaatatttctctatttttctcaccctgaaatgtccttttcaggtttggtatcagagacatgctcaaaatacaagttagagtgt

SEQ ID NO: 122060 - DNA, 602 bp, Homo sapiens
cctttgtcagtcctgagaatgttcaaggccccagcttgggtttaaatcatcaggggaaaacatgcagctggccacctcaaagagtggtcaagttactctgtagttctcaatcaggacagagaaaaaatgagagaaaatgggggaatcaatgttatmcttggtagtaagaattaatcttgagaagtgtgagtcattcagtttcacttttcttttttaagattgttttgtgaatttggtttcctgtgcatatccatattgttttgttttattttgtttttggagaggggacttgtcaatttttacaaaaaaaaaacataactgggaattggaagatattacattgaatctgtagattaatctgtaaagtattgttatcttagtattaagtatttttatccttgaaaattggacatcttttaattatttcagatcttctgtgacttatttcagcattttaaaaagtgagtgtaaaaactttgcacttctattgttaacttttttctagatatttatttttttgatgctattataaatgaaattgtattcttcgttttattatattttcattgttggttgcattcattcaaagtacaattgaattt

SEQ ID NO: 122061 - DNA, 595 bp, Homo sapiens
acttccatttagtttggcttttattaagaaaacaagctgagaataactaattttaatcaatatttagataagtcagaaaaatacttttaataagaacaaatataaaatatcttgtatttaagaaccacctgaaaagayaatttgatgaatcagatggttagtacttacttagcacatacaatacattaggcaagattctaactaattatacatttatagacattacttgagagttaaaaacgagaaacccaaagattcattggcaatgacaaattggcattttctatcatataaggtgaaataaaaaccatcataaaaattcactgttttgatttaagacaactaaaaacataaaaaatattgaataactttaccagaaagtttgactaggcatagagataaatgagtagcatttttgaacagtaagcaaaaaacacacattatcaaacatcagacaaaaatattttacatggaaaaatatcaggcctataaaatttcattgactttatgagatcagaaataaaacagattacatttttaggcactatgacatggtaacagaaatgatgaattaatgtgtaaccagagtcaagtg

SEQ ID NO: 122062 - DNA, 595 bp, Homo sapiens
acttccatttagtttggcttttattaagaaaacaagctgagaataactaattttaatcaatatttagataagtcagaaaaatacttttaataagaacaaatataaaatatcttgtatttaagaaccacctgaaaagatawtttgatgaatcagatggttagtacttacttagcacatacaatacattaggcaagattctaactaattatacatttatagacattacttgagagttaaaaacgagaaacccaaagattcattggcaatgacaaattggcattttctatcatataaggtgaaataaaaaccatcataaaaattcactgttttgatttaagacaactaaaaacataaaaaatattgaataactttaccagaaagtttgactaggcatagagataaatgagtagcatttttgaacagtaagcaaaaaacacacattatcaaacatcagacaaaaatattttacatggaaaaatatcaggcctataaaatttcattgactttatgagatcagaaataaaacagattacatttttaggcactatgacatggtaacagaaatgatgaattaatgtgtaaccagagtcaagtg

SEQ ID NO: 122063 - DNA, 585 bp, Homo sapiens
tatgtatttaaaaatagatttaaatatatagattaaaatatatgtgtgtatatatatatttttgggacaggtcttattctatcattgaagcgcagtgttgcggtcatagctcactgtaaccttgacctcctgggctcaggtgatcctcccttctcagtctcccaagtggctcggattataggtgcgtgccaccacatctggctaattttttgtaaagataggttttcactatgttgcccaggctggtctcaaactcctgggactcaatcctcctgtcttggcctcccaaagtgttaggtggccactgtgcctggctgacgtgtgttaatatattgacttgttttccttgtttgtcatctgtctccaactataccacaggctccatgagacctgtgatttttgtctttttggctcactgctgtattcttagtgcatgaagccatacccaacacatggtaggtgcttaataaccatttsttgagtaagctaacgactagttttaaggctagaatgataatacctgccttgaaagattcccaattcacattgaaatctgtgatgaactttggagtttcagatgtgaga

SEQ ID NO: 122064 - DNA, 687 bp, Homo sapiens
gttttcgctctggaacaaacattctgaggtgaggacagagaaaaaaacataatcaagagatgttaaatgtgagaatyggcaagtcccatagagatcacgcacttcagcatccccattttatgagtgagaaagcggaggaccagagaggaaaccattaaccacagttccctgttaaatgctaaactatgactccccgaaaattcatatgaaaggcaaccaaagcaaaaatggacaaatgggatcacatcaagttaaaaagcttctgcacagcagaggaaatgatcggcaaagaagctcaaacgactcaataggaaaagtctaacaatctgatcaaaaaaataggcaaaagatttgaatagacatatctcaaaagcagacctaaaaatgacaaacaggcatatgaaaagatgctcaacatccctaaccatcagagaatgcaaatccagactacagtgagatgccatcgcaccccagttaaaatcacttttatccaaaagacaggcatgaacaaatgctggcaaaaatgtggagaaaaggaactcgtgtacactgttggtgggaatgtaaattagaaaaccactgaggagaacagtttggaggctcctcagaaaactaaaagtggagctaccatatgatccagcaatcccattgctgggtatacacgcaaaaggaaggagaccagtatat

SEQ ID NO: 122065 - DNA, 687 bp, Homo sapiens
gttttcgctctggaacaaacattctgaggtgaggacagagaaaaaaacataatcaagagatgttaaatgtgagaattggcaagtcccatagagatcacgcacttcagcatccccattttatgagtgagaaagcggaggaccagagaggaaaccattaaccacagttccctgttaaatgctaaactatgactccccgaaaattcatatgaaaggcaaccaaagcaaaaatggacaaatgggatcacatcaagttaaaaagcttctgcacagcagaggaaatgatcggcaaagaagctcaaacgactcaatagraaaagtctaacaatctgatcaaaaaaataggcaaaagatttgaatagacatatctcaaaagcagacctaaaaatgacaaacaggcatatgaaaagatgctcaacatccctaaccatcagagaatgcaaatccagactacagtgagatgccatcgcaccccagttaaaatcacttttatccaaaagacaggcatgaacaaatgctggcaaaaatgtggagaaaaggaactcgtgtacactgttggtgggaatgtaaattagaaaaccactgaggagaacagtttggaggctcctcagaaaactaaaagtggagctaccatatgatccagcaatcccattgctgggtatacacgcaaaaggaaggagaccagtatat

SEQ ID NO: 122066 - DNA, 687 bp, Homo sapiens
gttttcgctctggaacaaacattctgaggtgaggacagagaaaaaaacataatcaagagatgttaaatgtgagaattggcaagtcccatagagatcacgcacttcagcatccccattttatgagtgagaaagcggaggaccagagaggaaaccattaaccacagttccctgttaaatgctaaactatgactccccgaaaattcatatgaaaggcaaccaaagcaaaaatggacaaatgggatcacatcaagttaaaaagcttctgcacagcagaggaaatgatcggcaaagaagctcaaacgactcaataggaaaagtctaacaatctgatcaaaaaaataggcaaaagatttgaatagacatatctcaaaagcagacctaaaaatgacaaacaggcatatgaaaagatgctcaacatccctaaccatcagagaatgcaaatccagactacagtgagatgccatcgcaccccagttaaaatcacttttatccaaaagacaggcatgaacaaatgctggcaaaaatgtggagaaaaggaactygtgtacactgttggtgggaatgtaaattagaaaaccactgaggagaacagtttggaggctcctcagaaaactaaaagtggagctaccatatgatccagcaatcccattgctgggtatacacgcaaaaggaaggagaccagtatat

SEQ ID NO: 122067 - DNA, 582 bp, Homo sapiens
gtctctgccctcagaaagcttatgatctactgggagaaatccttcccacccccacaccgtgccrctccacacacaaaaaaccaacattaatacctttctgttttatctcctaatctgctcgctcatgtgcaatggagaagaggaaggacatagcaaagcctatcaaagtcccctaatcccccagtgacgggaaaaactctgaacacaaaaaaccgacattaatacctttctgttttatctcctaatctggtcactcatgtgcaatggagaagaggaaggagacagcaaagccactgtcccccagtcccgctgatgacgggaaaaactccagcctccacctttctcccttttgaatctgaactcctaaaagcttcaggcaccttcagatcttcacctctctcccacagcggcaagcctcaggctccatccaaccctttcaataaactctttatgcaatgaatgaaccaaaaggctaatctctgtgatgtatcatgaattcctttgaatcaatgagaaaaaagataaagaacccaattttttaaattgcagagaggtgaactggcaattcggaagaaaaacagc

SEQ ID NO: 122068 - DNA, 582 bp, Homo sapiens
gtctctgccctcagaaagcttatgatctactgggagaaatccttcccacccccacaccgtgccactccacacacaaaaaaccaacattaatacctttctgttttatctcctaatctgctcgctcatgtgcaatggagaagaggaaggacatagcaaagcctatcaaagtcccctaatcccccagtgacgggaaaaactctgaacacaaaaaaccgacattaatacctttctgttttatctcctaatctggtcactcatgtgcaatggagaagaggaaggagacagcaaagccactgtcccccagtcccgctgatgacgggaaaaactccagcctccacctttctcccttttgaatctgaactcctaaaagcttcaggcaccttcagatcttcacctctctcccacagcggcaagcctcaggctccatccaaccctttcaataaactctttatgcaatgaatgaaccaaaaggctaatctctgtgatgtatcatgaattcctttgaatcaatragaaaaaagataaagaacccaattttttaaattgcagagaggtgaactggcaattcggaagaaaaacagc

SEQ ID NO: 122069 - DNA, 535 bp, Homo sapiens
tggtcccacccacgagattggaccaccttggagatgatccccagccccaagmttgctctcatcctccatgtgctcttgcacagtaattcagaatgccaggattaactgccagctcattgaagctgatgactcagtttctccaaccccactctgcttagtctccctgcttttccccttcaacccatcccaaggaggccaaaaatgcgtcatggccaaacccacccacatactgacaaagggtcagagttgcccatgttgagttcggagccaaggtctgagtaatgggcaccaaggggagcatactttggcttgattccaacaaaatgtaaatacagagcagagaagaaatgaggagggccagccctgaggctgcagcaggtcccacaaatgctgtacactcatgtcaggaagccaaggctataaaagccacaagtgaattaggatggagtccaaagtgttgatgtcatgtgagaacatcttcgcatagtgtcgctgcctgggaatggggctggcacttgtgtccaggacagccaga

SEQ ID NO: 122070 - DNA, 535 bp, Homo sapiens
tggtcccacccacgagattggaccaccttggagatgatccccagccccaagcttgctctcatcctccatgtgctcttgcacagtaattcagaatgccaggattaactgccagctcattgaagctgatgactcagtttctccaaccccactctgcttagtctccctgcttttccccttcaacccatcccaaggaggccaaaaatgcgtcatggccaaacccacccacatactgacaaagggtcagagttgcccatgttgagttcggagccaaggtctgagtaatgggcaccaaggggagcayactttggcttgattccaacaaaatgtaaatacagagcagagaagaaatgaggagggccagccctgaggctgcagcaggtcccacaaatgctgtacactcatgtcaggaagccaaggctataaaagccacaagtgaattaggatggagtccaaagtgttgatgtcatgtgagaacatcttcgcatagtgtcgctgcctgggaatggggctggcacttgtgtccaggacagccaga

SEQ ID NO: 122071 - DNA, 535 bp, Homo sapiens
tggtcccacccacgagattggaccaccttggagatgatccccagccccaagcttgctctcatcctccatgtgctcttgcacagtaattcagaatgccaggattaactgccagctcattgaagctgatgactcagtttctccaaccccactctgcttagtctccctgcttttccccttcaacccatcccaaggaggccaaaaatgcgtcatggccaaacccacccacatactgacaaagggtcagagttgcccatgttgagttcggagccaaggtctgagtaatgggcaccaaggggagcatactttggcttgattccaacaaaatgtaaatacagagcagagaagaaatgaggagggccagccctgaggctgcagcaggtcccacaaatgctgtacactcatgtcaggaagccaaggctataaaagccacaagtgaattaggatggagtccaaagtgttgatgtcatgtgagaacatcttcgcatagtgtcgctgccygggaatggggctggcacttgtgtccaggacagccaga

SEQ ID NO: 122072 - DNA, 592 bp, Homo sapiens
aaaccgcttcaacttgtacccttcatcagcaaagtatttagctcaacatgtatgcctctgggggagctcatccacatgtcatttaaggatatttccagcaacatcatcttcactaccccgggacagtcttttagagtggattatgtgcctgttggatggggtcatccttatattcagcacagtgtttgycctgaaactttaatggagtgctcctagtttgataacttttgccatgacaaataaattgaatttctctgtcttaacaacagatgtttgaatacggccccatgtccctctctgctccttcctgccttactcctctcctcttccttcccttccttttcaagagcagggtttgtaaactttttcttgaaagcatcagatagtaaatgttttagacttcgtgggccatacagtctcttgtagtagtttctcaactctgccacccatagcatgaaagcagctgatatagtttgaatatgtgtccctgcccaaatttgatgttgcaatgtaacccccagtgttagaggtggggcctggtgggaagagacttgatcatgggggtggatttctcatgaatgacttagcatca

SEQ ID NO: 122073 - DNA, 309 bp, Homo sapiens
agcaagatacagtatttgggtgaaatctgtacaacaaacagaagtctacctatgtgacaaacctgcacatgagccgctaaacttaaaagttaaaaaaagtacctgcattggaacaggtggtttacacactcactgacgcttaagaagcgctgctctacaacaccttccctttctctccctcctgtgtgcttggcccttcttctcttcctcttttctctcttccccttccctcttcttstctcctccctgtttgtcacctcttttttcctttccccaactacttgtaatagctgcaggtttacaggcatg

SEQ ID NO: 122074 - DNA, 415 bp, Homo sapiens
gaattctaattagattgacatagttaaggccaaaaatataaagtagacattgctaccttatcttcaacccttgcctttaagaggcaaatgaacacaaaacacaggtgaatcttgcttggttctgagatagtgaaggaatttctccagtatttaaatatattcacataaccagttatataaatccaaatataaaaccaatctccaatatgttttaagatggcattcaccatctttgtgaaaagytgaacattactaacaaagtctaatcaaatcatgtctttagaaagggtaaacagtgatagcatttactgaattggattactattaaaattcaaaaaaactgaacatattcatttaactgcaagccagtcttagttttacatcaggactgcccaacaaaatattctgtcagtta

SEQ ID NO: 122075 - DNA, 518 bp, Homo sapiens
ctccactgcatgcctgaaaatgtgagcaatagaatcctaagggggaaaaaatgacgttttgaagattgctttctatttcagaaaaaggttataacatagatggtaattactcacactttccttctcgggacaccacagcttttccacagcagtgtaactgagagaagaactgwtcaaaatacagacagccagacatggtggcttatgcctataatcccagcactatgggaggccaaggtgggtggatcacttgaggtcaggagtttgagaccagcctggccaatatggtgaaaccccatctctgctaaaaatacaaaaattaagtgggcatggtggcaagtgcctgtaatctcagctattccggaggctaaggcaggagaatagcttgaacttgggaggcgaagattgcagtgagccaagagattgtgccactgcactccatcctgggcaacagactgagactctatctcataaaaaaaaaaaaaaattaaaagacaatgtgacatcaggtaagtaaa

SEQ ID NO: 122076 - DNA, 518 bp, Homo sapiens
ctccactgcatgcctgaaaatgtgagcaatagaatcctaagggggaaaaaatgacgttttgaagattgctttctatttcagaaaaaggttataacatagatggtaattactcacactttccttctcgggacaccacagcttttccacagcagtgtaactgagagaagaactgatcaaaatayagacagccagacatggtggcttatgcctataatcccagcactatgggaggccaaggtgggtggatcacttgaggtcaggagtttgagaccagcctggccaatatggtgaaaccccatctctgctaaaaatacaaaaattaagtgggcatggtggcaagtgcctgtaatctcagctattccggaggctaaggcaggagaatagcttgaacttgggaggcgaagattgcagtgagccaagagattgtgccactgcactccatcctgggcaacagactgagactctatctcataaaaaaaaaaaaaaattaaaagacaatgtgacatcaggtaagtaaa

SEQ ID NO: 122077 - DNA, 539 bp, Homo sapiens
aacgtctattctttatctcatgaatgattagctaaggttacaactgtttgtttttgaactagcaagacacagaaataaacattttctgcccacttaaataacagagacctcttctgattgcaaaacaatacagctgggaatccccacacctgcaatttgtctactctttcctgtaaatgccttaaggcaaatccactctgcagagacactgtaattttctgatctgtgggactctccctatggcactagctggaataatatcaccttctcaattgtctcatgcattttgtcttcaacagtactgagaataattccctgggcggcatcagtgattgggtgctagtgagagttgcattcccttttctttctactttccagacaagtaaaagaaacaaagcaataaagaaccatcaaacaagactttgayagataataatatattctgtggataatttctacttcagagataggcaattacacatttttaaaagcaatttttactgctcagttacagcaagtttgcctatttacaaaataaa

SEQ ID NO: 122078 - DNA, 566 bp, Homo sapiens
tagtattctgttacagcagcccaagtggactgagacagtactctttgtcatgtgtggccactgaagtctctgcttgattagcttattggcctgctattgattgaacagatttccttaaacacctggaatcagtcagtctcccaatccttgccaagggcctgtgtgtgcatgctgggacatgccttccacattcagccaggcagctgacaactctgccttcgccttcacttcctgctgacacagaagctcagggtccatcagaagtggcagcttaggggcttctcrggttttttctgagtttgcacagagcagagccttccagattctctggaatgtgttggagcatttcaaagccccatggacatctcatttttcagcttttccttttaagcttccttgttagcctgttgtttttcccaactatgtagcagtcaggttaaacagttgcctgtaaatattttcaacaaacatctctgggaaaaggtttttctctctaggcaagctctgaatctggtcaaatagagacagcctttcaagtggaaccttccagggaaccaccagacaaa

SEQ ID NO: 122079 - DNA, 566 bp, Homo sapiens
tagtattctgttacagcagcccaagtggactgagacagtactctttgtcatgtgtggccactgaagtctctgcttgattagcttattggcctgctattgattgaacagatttccttaaacacctggaatcagtcagtctcccaatccttgccaagggcctgtgtgtgcatgctgggacatgccttccacattcagccaggcagctgacaactctgccttcgccttcacttcctgctgacacagaagctcagggtccatcagaagtggcagcttaggggcttctcgggttttttctgagtttgcacagagcagagccttccagattctctggaatgtgttggagcatttcaaagccccatggacatctcatttttcagcttttccttttaagcttccttgttagcctgttgtttttcccaactatgtagcagtcaggttaaacagttgcctgtaaatattttcaacaaacatctctgggaaaaggtttttctcwctaggcaagctctgaatctggtcaaatagagacagcctttcaagtggaaccttccagggaaccaccagacaaa

SEQ ID NO: 122080 - DNA, 626 bp, Homo sapiens
tcgtactggcttccttgctcctcagtttgtagatggtctattgtgggacttcaccttgtgattgtgtgagtcaatactccttaataaacttcccttcatatatatatctatcctattagctctgtcccactagagaaacctgcctatacacttcccaatagaaagtttattttccagccaaaaaaacatcctctgtattttatgattgaatgtcacttcctcaggactctctgtttttacacattctctgctgaaacatctctctttctctggctaattactttttatgctttgggcttagaaaaccaattaccaaatgtgggaacctatctctgatctacagtgctagataggtcctcctccctgctcccagagcacactgaacatgaccacttttacagtatttattattcactgctgtaagtattgatgttcttctgaatctcctctgataaatttctttgggacatgaaatgtrtcctattctttgcatctactatgcctagtaaccttggctaatctcaaatgttcatggaaaaaacagtatttttgtttataataaaaacaaatagacaatcaaattcatcacaaattgatgcattaataataaaacaacagtgttactt

SEQ ID NO: 122081 - DNA, 650 bp, Homo sapiens
taagaaatgtcagaaatgaatatattactgtaaacacaacaacataattrtaccatttattgagttcctgcaatttcactaggaactctatgtctagttctatgtatagctgctatttaaaaatactcaaaactaggtaatttttaaagaacagaaacttacctctcacagatctgaagtctggaaagtccaagttcaagctgtcagcatttggtgtctggtaaggggcttttggccatgtcctcaacatggcagagagggtgaacattgtgtcctcacatggcagaagggcaaaaaggacccaggctagttttctctaacctttttataaggcactaatctattcatgattttggagcccttgtgacttaatcaattccccaaaaggcctcacgtcttaaaactagtacaatgaagatgaagtttcaacatgaattttggagggaacatcattattcaaacctccaaggaggatgtagtatcttaattttacagattaaggacatgagggtttcattctgtgacataacatatgctttccaaatataaccataaaattaatacaaaagttaattaaaccaaaatagcttgaatagatttttctcttataaaaataaaaaatgaatagatacatacctgtaaccatgtga

SEQ ID NO: 122082 - DNA, 551 bp, Homo sapiens
aaaatggaaatgtatttagatgtaaagaaagttatgcagaagttttcttaaaatatcagcaaaacgtgatcaatactagttgctagtaatatgtgtacatatttgacctgtgtatgagaatgagtcccagatcaaatgtaattagtaacagttgataatgaaaatattattttaaaacagggagatttttcagataagaaatgtcagaaatgaatatattactgtaaacacaacaacataattgtaccatttattgagttcctgcaatttcactaggaactctatgtctagttctatgtatagctgctatttaaaaatactcaaaactaggtaatttttaaagarcagaaacttacctctcacagatctgaagtctggaaagtccaagttcaagctgtcagcatttggtgtctggtaaggggcttttggccatgtcctcaacatggcagagagggtgaacattgtgtcctcacatggcagaagggcaaaaaggacccaggctagttttctctaacctttttataaggcactaatctattcatgattttgga

SEQ ID NO: 122083 - DNA, 650 bp, Homo sapiens
taagaaatgtcagaaatgaatatattactgtaaacacaacaacataattgtaccatttattgagttcctgcaatttcactaggaactctatgtctagttctatgtatagctgctatttaaaaatactcaaaactaggtaatttttaaagaacagaaacttacctctcacagatctgaagtctggaaagtccaagttcaagctgtcagcatttggtgtctggtaaggggcttttggccatgtcctcaacatggcagagagggtgaacattgtgtcctcacatggcagaagggcaaaaaggacccaggctagttttctctaacctttttataaggcactaatctattcatgattttggagccctygtgacttaatcaattccccaaaaggcctcacgtcttaaaactagtacaatgaagatgaagtttcaacatgaattttggagggaacatcattattcaaacctccaaggaggatgtagtatcttaattttacagattaaggacatgagggtttcattctgtgacataacatatgctttccaaatataaccataaaattaatacaaaagttaattaaaccaaaatagcttgaatagatttttctcttataaaaataaaaaatgaatagatacatacctgtaaccatgtga

SEQ ID NO: 122084 - DNA, 521 bp, Homo sapiens
accctcaaagagatcggtctgacaatatataaaatgcaggatcatggactaaaagtgaaaattatactgtgctctatgaggtcacagtgtaattccccaaagtagttatttttcagttttattctgagacagtataattgatttaataaatttgatcaatacttgtttgtttctactacttctgattgtgaattttttcagataatttagattactrtttagttcaacagtgcaaatattttcataaaaaatgaaaagcaaacaaacttagacaaactgaaaactataaaattaactttaccactgaaagctcaggaataagccctaaatatattttcataaatatctctacttcctgtttaaagatgaataatcttttagctcttaattccaattactcccacatttaatttatgccatgttcttagggccttgtccaaacaagcatcacttctcaattcattatcttcctaatcaaaaccctgccacctcccaatacctgctattcaagtcccttcaga

SEQ ID NO: 122085 - DNA, 573 bp, Homo sapiens
aatcagcttgatagtgggaatcatttcacagtggatatatatatatatatgtgtgtgtgtgtgtgtgtgtgtgtcaatccatcatgttgtataccttgaatatatgcaagttttatttgtcaattatatctcaataatcctgaaacttacagaaattgttcccagatgctgggcctccccagtgttggcctattggaagaacattaatagaaaaagtcaaatgactttataactgtgccataatatagcaagtccatactattcctatttggatttaggctttataagcatggctttaacaaacattatcctycacagggtgctttgcatattacatgacctcgttatctgtttttagaataaactgtttggaggccaagcttttagttacgcaatgaaatagcagctcgttaaggtataaaggtaactaaaaagcataccaaaggtaacgtgcaggattagctttttctttgtgatatgggtcttttgtgaaatattttccttgtctatcttgtatctatgatctcgtttttcattactgggaatatcatgactttcattcagatacccaac

SEQ ID NO: 122086 - DNA, 509 bp, Homo sapiens
tccaaccccccatcttatgctctaaatcccatctgctcacaccttcccaaggatttatctccaataattatccctccttgtgcacatcaatgtcatgtggacaatgtctactagatcatattcattaatgtgcaaacataccagatatctttactttgttctgaattctccagtaggcattccccattgctttgtcccccttcacagcaaacttcttaagggaattctctacagctgaaatacccacttcctcacctcacatctctttctcaactcatttcatttcaacttctacccccaccaatcctrtcaagacaccagccgacagcttcccttgacacattgccaagcccagtggtcgcttctctgttcttacactgcttgacctccctcctacttgattatcccctactttcttctagtagcttccaggacacctcattctcatggttttcctcactgactattctttttcagccttctgtgcctcctctctgggctcagcctcc

SEQ ID NO: 122087 - DNA, 613 bp, Homo sapiens
tgcattacactgtttttattatctgcattgtacttacttgaaatactatctgacatttttcttgtgtatttattttccatcttttctctttagaatgtaagctccacaagtwgggagacgctctgttgtatttattgccatatcccaggatctagaagtatgtctagcgccaagtggatgctcaataaatatttgataataagtgctttctcagtagagcttagtcaaagaatacgagctttctggtataaaaaagttacctatttgcaaaataaaaataatatacttaggtttatgtggcagataatactttcaaaacttttttttttttttttaagacagggtctctcctggctcactgcaacctctacctcctggactcaggtgatcctcccacctcagcctcccaagtagctgggactagaagtgcatgttactacactcagctaattttctttattccatggtataaatacttccaccatggaagggtgaaagacagggtttcaccatgttgcctaggctggtctcaaactcctgaacttacacgatctgcccacctcagcctcccaacggctagggattacaggcatgagcaggcacacctggctca

SEQ ID NO: 122088 - DNA, 613 bp, Homo sapiens
tgcattacactgtttttattatctgcattgtacttacttgaaatactatctgacatttttcttgtgtatttattttccatcttttctctttagaatgtaagctccacaagttgggagacgctctgttgtatttattgccatatcccaggatctagaagtatgtctagcgccaagtggatgctcaataaatatttgataataagtgctttctcagtagagcttagtcaaagaatacgagctttctggtataaaaaagttacctatttgcaaaataaaaataatatacttaggtttatgtggcagataatactttcaaaacttttttttttttttttaagacagggtctctcctggctcactgcaacctctacctcctggactcaggtgatcctcccacctcagcctcccaagtagctgggactagaagtgcatgttactacactcagctaattttctttattccatggtataaatacttccaccatggaagggtgaaagacagggtttcaccatgttgcctaggctggtctcaaactcctgaactyacacgatctgcccacctcagcctcccaacggctagggattacaggcatgagcaggcacacctggctca

SEQ ID NO: 122089 - DNA, 613 bp, Homo sapiens
tgcattacactgtttttattatctgcattgtacttacttgaaatactatctgacatttttcttgtgtatttattttccatcttttctctttagaatgtaagctccacaagttgggagacgctctgttgtatttattgccatatcccaggatctagaagtatgtctagcgccaagtggatgctcaataaatatttgataataagtgctttctcagtagagcttagtcaaagaatacgagctttctggtataaaaaagttacctatttgcaaaataaaaataatatacttaggtttatgtggcagataatactttcaaaacttttttttttttttttaagacagggtctctcctggctcactgcaacctctacctcctggactcaggtgatcctcccacctcagcctcccaagtagctgggactagaagtgcatgttactacactcagctaattttctttattccatggtataaatacttccaccatggaagggtgaaagacagggtttcaccatgttgcctaggctggtctcaaactcctgaacttacaygatctgcccacctcagcctcccaacggctagggattacaggcatgagcaggcacacctggctca

SEQ ID NO: 122090 - DNA, 669 bp, Homo sapiens
gtgcattttaaacccttggaatgttacatggtgatgaggtaacagtggctatgaatgttcttacaagtgggagctgagcattgggtacacaaggacacaaagatgggaatagtaaacactgtgaatcccaaaagggrgcaggatgggaggagggcaagagattaaaaactacctatggggcactatgttcactacttgggcgatgggatcattagaagcccaaaccttagcatcacacaatatacctgtgtaacaaacctgcacatgtatcccctgcatctgaaataaaaacacaaaacacaaaaacaaaatataaaaacaacagctctgagttttgacataaggtgtgcagtgcagattcccaaatctagatttaacatgcaacgacactaacagggtctccacatcattcagagccaacgtcagggggattgttggtgaggagaggggagtgtggataccaggaaaggaaccaacctcagttatgtcagttgggccagaggaggccaaaggatcctatctccctgatgccttgtctcagacctcagttgcctttgtggttgcctagtgccacggaggcaacgggcattcaaaattctgctaaataaaaacacacagcaaattaggttttatttaaactcagtaacttactctccttgttaaaaactc

SEQ ID NO: 122091 - DNA, 669 bp, Homo sapiens
gtgcattttaaacccttggaatgttacatggtgatgaggtaacagtggctatgaatgttcttacaagtgggagctgagcattgggtacacaaggacacaaagatgggaatagtaaacactgtgaatcccaaaagggagcaggatgggaggagggcaagagattaaaaactacctatggggcactatgttcactacttgggcgatgggatcattagaagcccaaaccttagcatcacacaatatacctgtgtaacaaacctgcacatgtatcccctgcatctgaaataaaaacacaaaacacaaaaacaaaatataaaaacaacagctctgagttttgacataaggtgtgcagtgcagattcccaaatctagatttaacatgcaacgacactaacagggtctccacatcattcagagccaacgtcagggggattgttggtgaggagagrggagtgtggataccaggaaaggaaccaacctcagttatgtcagttgggccagaggaggccaaaggatcctatctccctgatgccttgtctcagacctcagttgcctttgtggttgcctagtgccacggaggcaacgggcattcaaaattctgctaaataaaaacacacagcaaattaggttttatttaaactcagtaacttactctccttgttaaaaactc

SEQ ID NO: 122092 - DNA, 669 bp, Homo sapiens
gtgcattttaaacccttggaatgttacatggtgatgaggtaacagtggctatgaatgttcttacaagtgggagctgagcattgggtacacaaggacacaaagatgggaatagtaaacactgtgaatcccaaaagggagcaggatgggaggagggcaagagattaaaaactacctatggggcactatgttcactacttgggcgatgggatcattagaagcccaaaccttagcatcacacaatatacctgtgtaacaaacctgcacatgtatcccctgcatctgaaataaaaacacaaaacacaaaaacaaaatataaaaacaacagctctgagttttgacataaggtgtgcagtgcagattcccaaatctagatttaacatgcaacgacactaacagggtctccacatcattcagagccaacgtcagggggattgttggtgaggagaggkgagtgtggataccaggaaaggaaccaacctcagttatgtcagttgggccagaggaggccaaaggatcctatctccctgatgccttgtctcagacctcagttgcctttgtggttgcctagtgccacggaggcaacgggcattcaaaattctgctaaataaaaacacacagcaaattaggttttatttaaactcagtaacttactctccttgttaaaaactc

SEQ ID NO: 122093 - DNA, 554 bp, Homo sapiens
atataatcccatatgaacaaacctatgcttatctcagaaagcaggctagaataactaaaatgatgttctctcctttttttattcaaaggcatctaaatggaattgagtaaatgaaaaaaaaaaaagtaacagctcttttccctttggagccatttgctggttaaatttgcttgtagaagtgaccatgcttcagaatgattagctttggtgaaggttataagctacaggtaagctcaggacatcgctgccttctgctggaacagtagtcagatgagactagaggagctgcgacactgggccagtcacctcascttgccagaaatttgttctttaagctccaggatacagaatatgtactacttttatatatatatacatatatatatataaactgtatatacatatattatttatatatatttatatttatacatatatatgtatatatacacatatatatgataagatatatatatcttatcatctaaaatattaataagcactgcaattggtgggaaggaagtactggtctccttttttttctaaaagtagga

SEQ ID NO: 122094 - DNA, 593 bp, Homo sapiens
caagaccagcctgggcaatatggcaagaccctgtttcaaaaaaattaaaaaagaaaaaaaatcaaaaactttttaaattaattacattgggttagactaaaatggacagaaattgtacaaaataagagggctttgaacctcaaaacttctacagctacagagctggttgagaaagctattaacatgtagatgtaaatattggtaatttctattggaaaagaaaggataactcaaagggaagaatcaggaacccagagggtatagccaagactcatggagaatcatttttagggagtcaacaagccccaaaccatgctggatttcagaaattgctgtgaaccttatacaactggattatttgttgtaataactctatctctatcccaaccctgcatattgtggcagggggaagcaagagtgcagagagtacatggtcctgatttaattgacaaaattctggactaccagctgatgccataagagaatgaaacttttgcagacyttgggaggagatgaaagtattttatatgttagagaaagtaaacaattcatggccagaagatggaaggtgtagattaaagatagccacaaat

SEQ ID NO: 122095 - DNA, 546 bp, Homo sapiens
tttaaatgacaaaaaaaccccacaaaaacccaatctatgttccagttatgagggaaatcwttaatgatttgaagtgtgatggctagtctatggcaagtaagaggtaggaaggagacttaaatccaggttttctgattctggttcagtgctcattctgtggtctttctgagaaaggaatgttggaactgctttggaggaagacatttccaggaatggaacacctattcagtactgacagaggaggagcactgccatcttggacaagcacctcatcctaaagttcatcttaatcaaaaaccacctaaatccaaaggacatcagcctaatggccaaggtcagcatgaccataaaccacaaataacatctctgaccagaaacattccaaactcctccccaaccagagacatgctagccccgagatagtctccctctggccggaaagatgtcagccccaagataacctctcctccgtccagagaaattccaaccccccataaacttctcccccacacagaaacattccaagcttgtgataagcctgctcac

SEQ ID NO: 122096 - DNA, 466 bp, Homo sapiens
cctccttctgacactcaggtgggtttggagatggcatttgggctactctgttgtttctatttcattttgctttggttttgtttttcacataacaaagatttattaaccaccctctctgtgactagtgctgttttaggccctggacacaaagcagtgaacaaaacagacaagccctactcttatggagtatatgtgctagtgcagaaagcaaactagtgtatagacagcatcatttcaaagtgatatgccgtgaaaatagtaaagcaggtcaaggggacaggggtggyggtggccaagcacacatgtgtgtgaatgtgggccctaacaatgaagtatcgagggaaaaaaacttcaggttccttcaaggacgtgggagcagaatcaggaaaatgctactggctactaatattaagatgctacttcttactctaggctggtgtggcctagggaaatcttcaaggccttc

SEQ ID NO: 122097 - DNA, 466 bp, Homo sapiens
cctccttctgacactcaggtgggtttggagatggcatttgggctactctgttgtttctatttcattttgctttggttttgtttttcacataacaaagatttattaaccaccctctctgtgactagtgctgttttaggccctggacacaaagcagtgaacaaaacagacaagccctactcttatggagtatatgtgctagtgcagaaagcaaactagtgtatagacagcatcatttcaaagtgatatgccgtgaaaatagtaaagcaggtcaaggggacaggggtggtggtggccaagcacacatrtgtgtgaatgtgggccctaacaatgaagtatcgagggaaaaaaacttcaggttccttcaaggacgtgggagcagaatcaggaaaatgctactggctactaatattaagatgctacttcttactctaggctggtgtggcctagggaaatcttcaaggccttc

SEQ ID NO: 122098 - DNA, 527 bp, Homo sapiens
gtgctggtgatcatccctggaaacaggcttatccttccctccagcctctcagtgtgacgcagaagcagggaagccgagaggcaggctgtgttgattgggcttattgaagcttgcccccgacctcggcagcaggcaaataggactctgaagatgggaaaaagagaggaacttttctgactgctgtgtttttaaagtttattaaactcagtgacaaaatcttctgtggaaagtcaagaaaaggaggatragagtaagaaaacttagtatcagatggcatgagaccgaggaaaaacaaaagcagaaggggaccttcctttatcagcccccaccaaactctcgacaggagccaaagaagatgagcataactattgaattcaactcgttttccagagcagatcctatgcatcacgggctccccatccagatcatgaaattcacctcaagacccacagctaataaacacaagaccaaacctagatcttatgattctgagtttcatgctcttcctgtcacactgccctgctgga

SEQ ID NO: 122099 - DNA, 527 bp, Homo sapiens
gtgctggtgatcatccctggaaacaggcttatccttccctccagcctctcagtgtgacgcagaagcagggaagccgagaggcaggctgtgttgattgggcttattgaagcttgcccccgacctcggcagcaggcaaataggactctgaagatgggaaaaagagaggaacttttctgactgctgtgtttttaaagtttattaaactcagtgacaaaatcttctgtggaaagtcaagaaaaggaggataagagtaagaaaacttagtatcagatggcatgagaycgaggaaaaacaaaagcagaaggggaccttcctttatcagcccccaccaaactctcgacaggagccaaagaagatgagcataactattgaattcaactcgttttccagagcagatcctatgcatcacgggctccccatccagatcatgaaattcacctcaagacccacagctaataaacacaagaccaaacctagatcttatgattctgagtttcatgctcttcctgtcacactgccctgctgga

SEQ ID NO: 122100 - DNA, 626 bp, Homo sapiens
ttcccagcacaggaaagttgtgggagagtggggaggaatgaaatgttgtgggcagacccagtgaagagtggagagacgatagtctcagcatggtggtaataggcatcactggcttttctagaaaccacagaccatgtgatatggtttggttctgtccccacccacatctcatcttgaattgcagttcccataatccccatatgtcatgggaggaaaccaatgggaggtaatttaatcatgagagcagttacccccatgctgttctcctgattgtgtgttctcacaagatctgatggttttttaaggggcttttcccccttttgctttgcacttccctttcctgctgccatgtgaaaaaggacatttttgttttgccttccactatgattataagtttcctaaggcctccccagctctgtggaactgtgagtcaattaagcctctttctttataaattacccagtctcaggtatttctacatagtagatgtgagaacaaacctaatacagcmaattattaccagtagagtggggtgctgctataaggatacccaaaaatgaagcaactgtggaaccaggtaacaggcagaggttggaacaggttagaggactcagaagaagacagga

SEQ ID NO: 122101 - DNA, 670 bp, Homo sapiens
actatttccattgtattattttctactctcagaaaaactccactgcacttgccagcagtaccatatctggatttggaggaaacyacacattctaatcccatcaaatggcaaatacacatttgattgggcctctgcaagcaatagcctcctcgttggccagggtcagggagaacagagattgagaatctgaaggcctgtttttagtctctgccattagcttagccaccctgggcaagtccctgaatgtaactaaacttccatattcttctttgtaaaatagagaagtttgacacagaaatatttgatctgggtactataggttcatgaatgactatcaagggaagtctgtgaacttcctgaaattgtgtgtaaaatgttatggctatctgagtcatatgtatttttgcatttttaaggaacaaagggtttatagctgtcattaagttttttaaaggaaaccaacttttaaaaacaagaggttaagaaactcctgaatagttaattttgatatctcttttttctataaaatgtctacacttctaagaaaacatctaaaactgctttagcccacaatatatattttttcctctgattgtccattctccccatgatcagtcaccacctcaatatacttgaaacatttatgcaaggccagggtaaacgtcatcta

SEQ ID NO: 122102 - DNA, 670 bp, Homo sapiens
actatttccattgtattattttctactctcagaaaaactccactgcacttgccagcagtaccatatctggatttggaggaaactacacattctaatcccatcaaatggcaaatacacatttgattgggcctctgcaagcaatagcctcctcgttggccagggtcagggagaacagagattgagaatctgaaggcctgtttttagtctctgccattagcttagccaccctgggcaagtccctgaatgtaactaaacttccatattcttctttgtaaaatagagaagtttgacacagaaatatttgatctgggtactataggttcatgaatgamtatcaagggaagtctgtgaacttcctgaaattgtgtgtaaaatgttatggctatctgagtcatatgtatttttgcatttttaaggaacaaagggtttatagctgtcattaagttttttaaaggaaaccaacttttaaaaacaagaggttaagaaactcctgaatagttaattttgatatctcttttttctataaaatgtctacacttctaagaaaacatctaaaactgctttagcccacaatatatattttttcctctgattgtccattctccccatgatcagtcaccacctcaatatacttgaaacatttatgcaaggccagggtaaacgtcatcta

SEQ ID NO: 122103 - DNA, 518 bp, Homo sapiens
cagaaatctaaagtaggtccacagggctgcaactcttctggaggccctgggggagaattcctttccttgaccgttccagcttccagaggccaactgtatcctttggctcatggcccctttttctgtcttcaaagacagcagcataagccaggcatggtggctcatacctgtaatcccagcactttgagaggtggagaccaggagtttgagactagcctggataacatagcaagactccatctccmccaaaaaaaaaaaaaaaaaaaaaattaaaaattagccaggtatggtaacatatacctgtagtctcagctgttcagaaggctgaggcaggagggtcacttgagctcaggagttcaaggctgcagtgagctatgatcatattactgcactccagcctgagtgacagagagtgagactctgccaaaaaaaaaaaaatccagcagcatagcatcttcaaatctctctccatccttctgcctgaccctctgtcatctctgtcatcacattgccactgt

SEQ ID NO: 122104 - DNA, 604 bp, Homo sapiens
tatggttcaataatattgacagtaaataaatagttacattagtagcatatttatccagagtttaccagtggtcagccttaataagcagtgatactatattttctctaaaaaaggcattgttagcttttggtaacatgtatgcctttcttatttccaatrtatcttaaaaaaacacaaagcctccccaggaaacgtatgtatataaacataaaattttgtgtacagattcagatgattcagaagtgctccaattaatgttttatcctagcttaaaaatcatcaagaagagcattaaacgagtgttcaaaagcgttttcattgacagcatgaataaatgtagcccattagcaaagaagggtaaaaaaaaaaaagaaaaaatctataaaacaatcacaagatttgaaaatgcttggaaatttattgcagtggtaagcggctctatatatctcatgtgacaagtccatgattgtttaactggatttaaacagagtattatgatagatgttcagagcacattccctgagttatcaagaatgactaaaccatctttgcgctttctgtttcaaaaggcactttagaaaggattccaccagaaatgacttaa

SEQ ID NO: 122105 - DNA, 604 bp, Homo sapiens
tatggttcaataatattgacagtaaataaatagttacattagtagcatatttatccagagtttaccagtggtcagccttaataagcagtgatactatattttctctaaaaaaggcattgttagcttttggtaacatgtatgcctttcttatttccaatgtatcttaaaaaaacacaaagcctccccaggaaacgtatgtatataaacataaaattttgtgtacagattcagatgattcagaartgctccaattaatgttttatcctagcttaaaaatcatcaagaagagcattaaacgagtgttcaaaagcgttttcattgacagcatgaataaatgtagcccattagcaaagaagggtaaaaaaaaaaaagaaaaaatctataaaacaatcacaagatttgaaaatgcttggaaatttattgcagtggtaagcggctctatatatctcatgtgacaagtccatgattgtttaactggatttaaacagagtattatgatagatgttcagagcacattccctgagttatcaagaatgactaaaccatctttgcgctttctgtttcaaaaggcactttagaaaggattccaccagaaatgacttaa

SEQ ID NO: 122106 - DNA, 588 bp, Homo sapiens
tgacttaatatattcctcagcccattgcacattgtcatcattggtcaattcaaggcttccaccttatctattgttatttttcttcttcttctcaatgtctgcccccattcccctcttacacatgggcaccaccctatttgtgatacaggtcttaaatatgcacatattcctgtaatattattatgtgacggtatttttaatcttgtgtataggatattttgctgcttaagcttctctgcttcttacttttcrtgcttaacacatttgaaattttactctgtggtatttccttccttccttcctatagttggtttttccattgacttcatggtccatattttacatgtttttgatcaataacaacacagattgtttccagcttcctgccattcctaaaaattattttttgccattctgactgtgtaaactgatatattattgttctttaatttttcctttatctgattaatagtagggtcgagtattctttcatatatgttcctgttagccatggtattatctacctatacactgcttgttcgcctattttccccatttttctattgagatttctgtctttttcttatt

SEQ ID NO: 122107 - DNA, 520 bp, Homo sapiens
ttacgtgaaatgtaaagggctttcacatttgttttcyatatccatttaactctgagcaaatatcaccatctcagtttacagctgaggacacacagacgcaagacaggagctatcactacacaatctgtgttctctacttttctactgttttccttgaaatgaagttctcaaaggtatgtaagattcattcaagttgtttgctaaatgtaataggaattctagttaatatgatgcttaatatcaccaggcactcttttaagcacgtcacatatatcaactgaatttttcctcacaacagctctgagttaaggactatgattttcgcatttcacagggaagaaagtgtaagtacaaataggttttttaattgcttaaggattaacatttagtaaaatctggagctggaattcaagccaaggcagcctggttgcagagtctacccactacactggtccctaagaagagtccttgttccctcttctacagatttttttaaaattagcatctgagggtagatctc

SEQ ID NO: 122108 - DNA, 528 bp, Homo sapiens
cttcttttaatttataatagcatcaaaaataatgaagcacttatagataaatttaacaaagaagtacaaaacatgtataccaagaactacagaatattgytgaacaaaattaaagaaaatttaggtaaatggaaagacatattgtgttcatgaagttgaaaacagtattgcttagatggtaatatttcctcctcttactgaaaaccaaatgtattctcatatcaaacataaaagtgtgaaaatgtaaaaatgtaagaataaatatttcttagctttgctaatcgcgcaattattggagagaatcttaaagtgattattttgaagaccataggtaagaaaagatgaagttgttaacgtagtaatgaagaaataaaagtatgaaagtttccaaaatagagcaatagagaatgggtgagaaaatagcatagtgatggagtcctgacacctaatccttagaacactgtgttcactacttattaaagctagcacagctgaggaatctttgatatatttatcagtcttctgatt

SEQ ID NO: 122109 - DNA, 528 bp, Homo sapiens
cttcttttaatttataatagcatcaaaaataatgaagcacttatagataaatttaacaaagaagtacaaaacatgtataccaagaactacagaatattgttgaacaaaattaaagaaaatttaggtaaatggaaagacatattgtgttcatgaagttgaaaacagtattgcttagatggtaatatttcctcctcttactgaaaaccaaatgtattctcatatcaaacataaaagygtgaaaatgtaaaaatgtaagaataaatatttcttagctttgctaatcgcgcaattattggagagaatcttaaagtgattattttgaagaccataggtaagaaaagatgaagttgttaacgtagtaatgaagaaataaaagtatgaaagtttccaaaatagagcaatagagaatgggtgagaaaatagcatagtgatggagtcctgacacctaatccttagaacactgtgttcactacttattaaagctagcacagctgaggaatctttgatatatttatcagtcttctgatt

SEQ ID NO: 122110 - DNA, 581 bp, Homo sapiens
ggcatgattttaagaataaaacaaaagataaggaatcaaagctttagaaagattcagaatcacagaggtaaggacaaaaggctttatagtaattatcaaatataaaaccataaaggtcaataaaatggacatttaacaaatcaaaattagatctattgagaagagagaattgagagttatgccaaaaactacagaaaaattttaatatttatgaaaaatctcagagttcataatatagaagaaataccagttcatcttgaaaaaatagagttgaagattgcgatgtatgttgattaaataaatttcgcaccaattatttttttcattgtaaaaatattctcaagcctatttcactattttttaacagagaaaagcaaaggaaagggtagtgtttattgcaagtgcaaaccaattatgtgctcatattctggggaaaacatcgactacatttataaaatatraagttagcccacttaaattttctgatttataaaaaaaagatacacataaagtgcagaaatatatatgcatatatgcacatatacatctattcgtgtgtgtgcacatgctaggattatttt

SEQ ID NO: 122111 - DNA, 599 bp, Homo sapiens
tgtatgaatgagggaaaaatatgtaaaacaattagcacaataccaggcatatagtaaattttttataaaggtgaatattattaaaataaattattgcttaagctcaggagtttgaggctgcagtgagctataattgcaccaccgcactctagcctgggtagcagagggggacctgtctcaaaaaaaaaatattatgagaattggggaattgaatgcttatactactagagatgcttttactactgacacagaatgacaaacatactacagctactacaaaggaagagctaaatatgaaaaaaattagattttaaatttgataaattggctttatttaaagtaaactttggctgggcgcggcggctcacgcgtgtaatcccagcactttgggaggcctaggmgagcagattacttgagcccgggagtttgagacaagtctgggcaatgtggcaaaaccccgtgtctactcaaaatacaaaaattatccgggcatggtggtgcacggctgtactcctagctattcagaaggctgaggtgggtggatcgcttgggcccgggaggtccaggctgcagttagtcatgatcacaccactgcactt

SEQ ID NO: 122112 - DNA, 571 bp, Homo sapiens
ttctgttattcataagccacctcctatgtggcattccgttatagcagcctaaatggaccaagaccatacaaaaccaaagaaaaaatgcatgacacaaaattgtgctctataaaatatcaggttttgtatgggaggtgtttaaagacaaggcaggctagaattgagaaacatgcagaaagaaagcagtatcagccatcactgatattttcactctctattctcctaacaatcattaccttcctgataatgagtattctatccattactggtggaaaaatttcaaaggaaatttatatgtaatgtgaaaatatagaaaatatctgattgccaatttatctaaaaaaaagtttrgagaaacacacaaagtagtgttttgaaacttaaaaaataactttcttatgagtaatagtaagataataatgatggacaaaggaattaatgtttactatacaaagcaaatattaaggactttctatgactagagcaaataatcattattcttacactgtttttgtaaatgaaaaacagccatttactataaacagtgtaagaatatttctctagtgtagtc

SEQ ID NO: 122113 - DNA, 485 bp, Homo sapiens
tctgtgaactgctcatgcaagggatctaggttgcactctccttatgataatctaatgcctgatgatctgaggtggaacagtttaatccccaaactatccccacactgtcccttcccacggaaaaactgtcttccttgaaaccagtccctggggccaaaaatattagggaccactgatctataggattttcattttatttaaatgwgatgtgaaagcatgggaaagtttggaaaagtctcatgatcttatttaggatgataaaatcatgaattaaaaagctacttggtggagagagaaagcaaagagaccagcaaggaggctattgtagcatcaagtgacaaatgatggtggattgagccagaatggtggcagtggagtggaatcaggttctggatattctttgaagatggatttgatatggtaagggaaggagaggaattaagaatgggtcctagattcctcagctgagctgggaaaatccattt

SEQ ID NO: 122114 - DNA, 548 bp, Homo sapiens
cggaaaaactgtcttccttgaaaccagtccctggggccaaaaatattagggaccactgatctataggattttcattttatttaaatgagatgtgaaagcatgggaaagtttggaaaagtctcatgatcttatttaggatgataaaatcatgaattaaaaagctacttggtggagagagaaagcaaagagaccagcaaggaggctattgtagcatcaagtgacaaatgatggtggattgagccagaatggtggcagtggagtggaatcaggttctggatattctttgaagatggatttgatatggtaagggaaggagaggaattaagaatrggtcctagattcctcagctgagctgggaaaatccattttactattagtgtttcctcaggaagagaatgagctaatgcatttggggaaaatattatcacttcctgaaaactcaaaagaaaatgatcattttttaaaaatctattgtatcctttgttttctcttaacgttcttttgtctcccagccttttattttgaaaaatgttaacttcaataagaat

SEQ ID NO: 122115 - DNA, 548 bp, Homo sapiens
cggaaaaactgtcttccttgaaaccagtccctggggccaaaaatattagggaccactgatctataggattttcattttatttaaatgagatgtgaaagcatgggaaagtttggaaaagtctcatgatcttatttaggatgataaaatcatgaattaaaaagctacttggtggagagagaaagcaaagagaccagcaaggaggctattgtagcatcaagtgacaaatgatggtggattgagccagaatggtggcagtggagtggaatcaggttctggatattctttgaagatggatttgatatggtaagggaaggagaggaattaagaatgggtcctagattcctcagctgagctgggaaaatccattttactattagtgtttcctcaggaagagaatgagctaatrcatttggggaaaatattatcacttcctgaaaactcaaaagaaaatgatcattttttaaaaatctattgtatcctttgttttctcttaacgttcttttgtctcccagccttttattttgaaaaatgttaacttcaataagaat

SEQ ID NO: 122116 - DNA, 548 bp, Homo sapiens
cggaaaaactgtcttccttgaaaccagtccctggggccaaaaatattagggaccactgatctataggattttcattttatttaaatgagatgtgaaagcatgggaaagtttggaaaagtctcatgatcttatttaggatgataaaatcatgaattaaaaagctacttggtggagagagaaagcaaagagaccagcaaggaggctattgtagcatcaagtgacaaatgatggtggattgagccagaatggtggcagtggagtggaatcaggttctggatattctttgaagatggatttgatatggtaagggaaggagaggaattaagaatgggtcctagattcctcagctgagctgggaaaatccattttactattagtgtttcctcaggaagagaatgagctaatgcatttggggaaaatattatcacttcctgaaaactsaaaagaaaatgatcattttttaaaaatctattgtatcctttgttttctcttaacgttcttttgtctcccagccttttattttgaaaaatgttaacttcaataagaat

SEQ ID NO: 122117 - DNA, 442 bp, Homo sapiens
gaattctagaagagactgctgctaaaattacagtatcaatcactgctctgagattactttttcaaggataatgtaagattgtaaacagcaacagaacttcaatagcaatacacagacccgccacttacatagttaaaagtgtagagaagataattgtttacctatcacaggatatctttggaaccaggaatgcattgaatgcattgaaataaaaatcatttgccattgaatactagattacagctgtccaattagatttctgtgctgttggcccaactccagagccagaaaagacctcaggaagctgaaaactccttagaggtacaagtctgtattcraccaggaagtctgtactaagtgataaagacttgtggcatgtccatgtaatcacagtctagggaagcccctttggaggctcttgaaaatagtactctctgagctc

SEQ ID NO: 122118 - DNA, 631 bp, Homo sapiens
tcctttgatatacacaagttttttgttttgatgtagtctaatgtatatgcttttggtgtcatattaaagttgtcattaccaaatctaatgtcattaaacttctcccctatgactataatttcttctaagagttttatagttttaactcatgtttaggtcttgaatccattttgagttaatttytgtatatggtgtacggtaaggatccaacttcattcttttgcatgtggatgtgcacttttcccaaaatcatttgttgaacttaaacggatttttaacctacgtaacccaaatgacattaaaatataaaaagaacccttaatgtgcattaaaatctataaccactacgaaatcataataatccagctgtaaaacaaatgagttccttctggggagaaaaggctgtggccagcccaggaggcaaaagtactaagcaggatatgaaaacacaaaacaaaaggtcagtctttaaacaaaggcagtttgaaaagccttgtcagggcacagcagtctctcaagatgatatatttcatttctatacattaaagatactatatatttaatccaaaaggagtgactccaccagtcaaatacagataagaaaacatacatcttgatgtctaattacctt

SEQ ID NO: 122119 - DNA, 631 bp, Homo sapiens
tcctttgatatacacaagttttttgttttgatgtagtctaatgtatatgcttttggtgtcatattaaagttgtcattaccaaatctaatgtcattaaacttctcccctatgactataatttcttctaagagttttatagttttaactcatgtttaggtcttgaatccattttgagttaatttttgtatatggtgtacggtaaggatccaacttcattcttttgcatgtggatgtgcacttttcccaaaatcatttgttgaacttaaacggatttttaacctacgtaacccaaatgacattaaaatataaaaagaacccttaatgtgcattaaaatctataaccactacgaaatcataataatccagctgtaaaacaaatgagttccttctgrggagaaaaggctgtggccagcccaggaggcaaaagtactaagcaggatatgaaaacacaaaacaaaaggtcagtctttaaacaaaggcagtttgaaaagccttgtcagggcacagcagtctctcaagatgatatatttcatttctatacattaaagatactatatatttaatccaaaaggagtgactccaccagtcaaatacagataagaaaacatacatcttgatgtctaattacctt

SEQ ID NO: 122120 - DNA, 565 bp, Homo sapiens
ctaaatgggaataaactgtgaagaggaagaccaagccaatagttctggtttggccttgattattcttcctctaagctctgagaatctttttcaagcatactgcttttggtctattattatcttgcataaaatatcaacaacctggtctatcactgactagaaatgaccattagtaccataggtttgaccacagccatgttggacacctgaaaaggtatcctattgattttaacrtatgaaaaaaatcacaaaattgaaattaatatgtttgatttaatgtttgtaaaatataacattttgtcagctagccaatagcaatgcaactcttatatggttacatatacattatcttccatgagagctgtgtgtacactttaatatggtccattcaacgtggtctgggggctttcacaagcaaaggaagacatacaaatggtcaataaacacatgaaaagatgcttagcttcactagcatcagcgaaatgcaagtgaaggccccaatgagatattattcacactcactaggagggttagaataaaaaagaaaataacaaatgttggtgag

SEQ ID NO: 122121 - DNA, 539 bp, Homo sapiens
aaatttaccagtcattcctcatgctatagtctgtcagatcttctcatctaaccagttgcagtcatttcttgactctgtcttgcagaccaggacagcytatactctgtcaataggtctaaccaaggcatgagtcacaaaaagagcttttagattaggaacagccaaatacatcactcataggctgctactctttgcctctacacttgtgacagacacggcctcagaatcttcctcaactcagtgctctaatcagtcactcccaattatagatggcttgtgacatgaaactcacatgttgtctacattctctgtcttaccattgcaatgacatctctgacaattttgataaactttctgtattcccaaaacatattagttattgaccatagagaacttagccctccataaccctcactatttcctgtatatccattgccacctggccttctttgttttgctgttgtccatgaattagtataatgactaatatcactgtttgtctcttaaggcagatacataatttccatcaggaaatatct

SEQ ID NO: 122122 - DNA, 593 bp, Homo sapiens
tgttgaagatgaaggtatttattgctttccttcttcctgagctcctgatgttgtaagttgtcatcattagtaatgaagatggtatcgctggttatattttccgctactactacctcctccccaaataaaataaacggggcctatgctatatctttttattttcatcccaagagaatatcttctaacgatagaagtttatcatgttaggaagaaagcaactgtttaaacatgggcattacacattacactttccaatattactgaaaaacaactgaatctagcttcctccctgaatttgggagtattctgcactaaaatggctactaaattttgtcatctgccttgaaacaacaaagatggagaagaataccttactgaaatatgaataaggaatgtctcattctcctgctyctctgggcttttgagtaacctgtgctgctgtgggaggtaatttgtattaccacttcgtgaaaagagtaaacaagcaagaaaacaagagtcagtgatgccctaccactatcccctttcccctgccttaatcaatttctcaaaaagaccataggccataaaaattgaatagatcatcacaaaag

SEQ ID NO: 122123 - DNA, 576 bp, Homo sapiens
gtaggttttaagaatcacatcattctttatatgagattattttaatccttgcttgctttttgtcctcttatgtatattgatattgaaagcctgcctgcctgttttcagtgctaaaatatttatgaaattgctttcaatgacatgattagactttacatattccatagtcaaattaagrttgacattaaaactgagaagctttggagaaacagttatagttttaattaatcgtcagcatttcaactggtttacctgatagccttatggatttctaaagacattttaaaaacatatctgtttctctatgagtaagtggcatatatctgtgagttggctacctggaattacatataagatccatgtcagatgtgactaaaggttttgactcttgtgttaagtttgattaactgattttggaggggatttttggatcgctatttaaaacaattatgaagccaggttcagcctatataagaactagttctgggatcaattaatgatgtctggcgtaggcatggggtcaaataataatacttatagattatgtcaataagtacaagcatagtgaaccagccc

SEQ ID NO: 122124 - DNA, 630 bp, Homo sapiens
tgagcataaaaaggtagaatcagcaacaaaggtttagggaagaaacatctaaccactaaaaaggtatgagagaagtgaaaataaagggcatactggaagcaaaatttagaattttgtgtaacttcaaagcttamtgcagaagaatttatgctacagtatgaaagaaagcagcttaatcactagaaaaatttacagcacttaggttaacagcagcttaaagacaggtctcacaagttggcattatgtttaagaagctattctcatctatggctaagataaggcaacatgttttttctcttacattgaatacagaaaatgttaattctttaaaaactttaaacagacacaatggtatctaattaaatggtatcctgaggaaaaattcagtatgggaggggttgttggtagcgcttcttcaccctcccatccccccaactcaggcaggctgaaggaatcagatgtgagactctgattttaatcatgttttttgctttgacgaaaaggatcctctaaaaccatttaaaaatgttctacagagagacagctagtaactgctgaagatagggtgagtaaattcatacatcaaaaaaggacactaagacgaatagtgaatgttataaggcaattaga

SEQ ID NO: 122125 - DNA, 171 bp, Homo sapiens
tatagaatcttcaattccaacagtatcttgctcaaataggcactcatttattaactgctatcagtctaaacagtctaggaaaagagaaatcttyatatattcacattcatttgctgtaggtccaagctttgatgacaagagatccttcagttggacaatgtagttaaaggg

SEQ ID NO: 122126 - DNA, 569 bp, Homo sapiens
tgagcattcataaagtgtttccccctgcaccttggccccccgtctcatgcagcacatttatgacattgaaaaccaccagtaatagataacattgagatttgaaatttagttttacttaggtataatgacagaccaagtayaaggctttggttgagagaccagcttttaaatattgaaagacaaatatagtgtaaaaggcgcaatggaatttgtatagtgaaggagattctctagtcccagggttgtaatgtcacttctgtctaattcattacagaattacagaatcaaatcatgttagccctagaagaaactgcagatcattttgttcaatcttctcattatataggaaaggaaatttgagggccagtgcaatggtttgccaaggtcacacaactagttagtggaaggatccaggcattctaattcctttctttcactaatacatttggcctgctctacagaattacttctgtctgatactatccactttgaagagtagctagcatatagtagccatttacttttggctcaattaaaagcaaacatttttgggacaaaatcaggctttc

SEQ ID NO: 122127 - DNA, 569 bp, Homo sapiens
tgagcattcataaagtgtttccccctgcaccttggccccccgtctcatgcagcacatttatgacattgaaaaccaccagtaatagataacattgagatttgaaatttagttttacttaggtataatgacagaccaagtataaggctttggttgagagaccagcttttaaatattgaaagacaaatatagtgtaaaaggcgcaatggaatttgtatagtgaaggagattctctagtcccagggttgtaatgtcacttctgtctaattcattacagaattacagaatcaaatcatgttagccctagaagaaactgcagatcattttgttcaatcttctcattatataggaaaggaaatttgagggccagtgcaatggtttgccaaggtcacacaactagttagtggaaggatccaggcattctaattcctttctttcactaatacatttggmctgctctacagaattacttctgtctgatactatccactttgaagagtagctagcatatagtagccatttacttttggctcaattaaaagcaaacatttttgggacaaaatcaggctttc

SEQ ID NO: 122128 - DNA, 467 bp, Homo sapiens
ataaagaaaatgtgatacatgtaaaccatagaatacagccataaaaaagcatgaamtcatgtctgttgtagcatcatggatacagctgaaggccattaccctaaaggaattaatgcagaaacagaaaactgaatgctgcctgttctcatttataagtgggagctattcactgggtacacatggacacaaagatggaataatggatgctggggactccaaaagaggggagggagagagaggagaaggggttgcaaaactacctattgggtactatattcactctttgggtgactgggtcaacagaaacccaacttcagcatcatgtaatattcccatggaagaaacctgcacatgtaccccctagaatctactaataaaataaaataaatgtttactgatattatattaagtcaggttctcaaatattagcatacaccagaatcccctggagagcttgttgaaacaca

SEQ ID NO: 122129 - DNA, 620 bp, Homo sapiens
agggaaatatccaaggagtaggctgcatcgggttatatgacaataacatatacctgtgaagtctactaggcttttgtttttaggtaatccttcactgatgaatttgtcctgccgtaaattgcagcctgcctttgctggccaggcatgttttgagagatgcccttgctataaccttttatgataataaactagtaatgttgttgggcagataactcagttcatcaagtaccgtragagttggtcagctgataatgaaaataactatttaatgtgcatctccctaaaaccaatacctaacttctattataaataaggaagaaaacttttgattagcacttatctgggaaaacgaaactaaaatttatgaagatgatttttaaagaaaaattttatttaacaatttttaggttatattacaactatgtactaattttttagaacaaagaatgagtcacgtgaactttgtttttggtcttgtttttctgataaaatatggtagcatgataaaaattcctttatttgacttttatagcttgattataaagagtgcatcattgtgttatttgctttatttttctcttcattgtgaaagtcctgactctgccagattttcaaatgtt

SEQ ID NO: 122130 - DNA, 620 bp, Homo sapiens
agggaaatatccaaggagtaggctgcatcgggttatatgacaataacatatacctgtgaagtctactaggcttttgtttttaggtaatccttcactgatgaatttgtcctgccgtaaattgcagcctgcctttgctggccaggcatgttttgagagatgcccttgctataaccttttatgataataaactagtaatgttgttgggcagataactcagttcatcaagtaccgtgagagttggtcagctgataatgaaaataactatttaatgtgcatctccctaaaaccaatacctaacttctattataaataaggaagaaaacttttgattagsacttatctgggaaaacgaaactaaaatttatgaagatgatttttaaagaaaaattttatttaacaatttttaggttatattacaactatgtactaattttttagaacaaagaatgagtcacgtgaactttgtttttggtcttgtttttctgataaaatatggtagcatgataaaaattcctttatttgacttttatagcttgattataaagagtgcatcattgtgttatttgctttatttttctcttcattgtgaaagtcctgactctgccagattttcaaatgtt

SEQ ID NO: 122131 - DNA, 620 bp, Homo sapiens
agggaaatatccaaggagtaggctgcatcgggttatatgacaataacatatacctgtgaagtctactaggcttttgtttttaggtaatccttcactgatgaatttgtcctgccgtaaattgcagcctgcctttgctggccaggcatgttttgagagatgcccttgctataaccttttatgataataaactagtaatgttgttgggcagataactcagttcatcaagtaccgtgagagttggtcagctgataatgaaaataactatttaatgtgcatctccctaaaaccaatacctaacttctattataaataaggaagaaaacttttgattagcacttatctgggaaaacgaaactaaaatttatgaagatgatttttaaagaaaaattttatttaacaatttttaggttatattacaactatgtactaattttttagaacaaagaatgagtcacgtgaactttgtttttggtcttgtttttctgataaaatatggtagcatgataaaaattcctttatttgacttttatagcttgattataaagagtgcrtcattgtgttatttgctttatttttctcttcattgtgaaagtcctgactctgccagattttcaaatgtt

SEQ ID NO: 122132 - DNA, 586 bp, Homo sapiens
atgggagttcgagaccagcctgaccaacatggagaaaccccatctctaataaaaattaaaaattagccaggcgtgttggctcatgcctgtaatcctagctacttaggaggctgaggcaggagaattgcttgaacccaggacgtggaggttgccatgagctgagatcacrccattgcactccagcctgggcaacaagagcgaaactccatctcaaaaaaaaattattttgattttttttgggggggattttattttctgattgtaaaagtaatccatgttgaaaagtataaagaagcagaaagaaaattgcctatccttctgctacctgggacatcacaatatagtatatacggtaatgagagatatcttagaacatcttatttgcagctccccctaaaagactgtctgtgtttatgggatactttccagttttaaatgtgtgatattacagaaacatccagattcagaatggtcatcaattagctgtatatttggacctcccatttccaccactatcatttttattccagtctttttgtttcactaattggagttctgtttgatatctgttaaggtaataaatgct

SEQ ID NO: 122133 - DNA, 606 bp, Homo sapiens
tggtcctactctgatgtgtctttggcagaaatgtagagagaaaaattatgtttcacaaaaactatagtacacttattagattgcagccctgttcattgtttttgagtctctctgatgacccaacatttgataggttctcggggttattcacatagatctctcaaggcttcgaattagctctctatggactcctgaagctagggctttcactcctgtgatagcgcttactaaaactgtggataagagtgcctgaagcagctacattgcctggtatatactctggggttcgtgtctcacgccaggataatttaggacatggacacacagtaggagcttaggaatggaggttwagtaggcagaagagaagaggaagagaaacagctttctttatatatagagagaggggtctctgagcagaaaggaccagctggcagtggatgtgctggaatttatagtccagtttgaggaggtagtgtctgatttatgtagggctcacagattggtttgatcagatatgacacttacatctttcgtgaagaaggctggtggcctcaccctaatcttattatgcaaatgaattctccttggctggcaccatcttgtctg

SEQ ID NO: 122134 - DNA, 622 bp, Homo sapiens
ttgggagtttaaattgaggagttggcagaaggtcttctacacaatatacatctctctccttcttatagccatgctaataaatatgttttttcttttattttaaatttccctgctgtggtgtcctcttcatcatctttgttcttgggatgaacttttcactactgacatgatatacagaggtgtgcagtacaaatgggtttaaaggaattcaaaactatgcatattttaaagaataaaaygagaggattatatataaatacacacaaatgtaaccaaagttctaataggaaattattagatgtttacacaatgaaataaaagggaaaaatacccgtataatcagaagtacaaaactcagtgaaaattaaaacttattttatgtcaaaacaaagaaaatgctagatgtgcagttctgctgctattatatgattgaattcacataatctaaaaccatctatttttttctactctaagcaatatcttattagaaatctcattgatggtaaccaagagtggcatcttcatttaccactctcttacaattttaatcaatttaaccatatgtttgttgcaatccctcctggctttgctgctaaatagacaggaattcccatcagtaatt

SEQ ID NO: 122135 - DNA, 622 bp, Homo sapiens
ttgggagtttaaattgaggagttggcagaaggtcttctacacaatatacatctctctccttcttatagccatgctaataaatatgttttttcttttattttaaatttccctgctgtggtgtcctcttcatcatctttgttcttgggatgaacttttcactactgacatgatatacagaggtgtgcagtacaaatgggtttaaaggaattcaaaactatgcatattttaaagaataaaatgagaggattayatataaatacacacaaatgtaaccaaagttctaataggaaattattagatgtttacacaatgaaataaaagggaaaaatacccgtataatcagaagtacaaaactcagtgaaaattaaaacttattttatgtcaaaacaaagaaaatgctagatgtgcagttctgctgctattatatgattgaattcacataatctaaaaccatctatttttttctactctaagcaatatcttattagaaatctcattgatggtaaccaagagtggcatcttcatttaccactctcttacaattttaatcaatttaaccatatgtttgttgcaatccctcctggctttgctgctaaatagacaggaattcccatcagtaatt

SEQ ID NO: 122136 - DNA, 541 bp, Homo sapiens
gaattcccatcagtaattactccgaaaaagaaagaaaccagaaatcagagaatggatcataattggcttaatgttacaccatgggtgagctttatgaccaggggcagaataaaaaaccagtgttcaaagggatgtgacatatttagatgtatcatgggccagcatcaatacttataagggggttataattccacagataaaaatyggaagctgtcattttttaaaacagtaagtcaatgagttacatgtgtgacagtatcactgtttaggctactgttgtggctaatttgtttgaagctaaagccaaacattactaggcaataagaagtagaatgctccgtatattagttgtttattggtatataacaaattacagccaatgtagcagcttaaaacaacactcatttattatctcacagttctgtagctcagaatccggtttaccataagaggttctctactcaggatctcacaaaactgaaatccaagtatcagccaaatccaattgtcatttgggctcagggttcacttccaagcacat

SEQ ID NO: 122137 - DNA, 580 bp, Homo sapiens
ctactcttgctcttttttggtttccattggcatagaatatcttttttcatacctttattttcactctatgtgtgccattataggtaaagtgtcttttgtgtaggcaacagatcaaagggttttggttttttcatccattcagccactatatgtctttctgttggaagctttagttcatttataatcaatgttattgttgctaagtgaggacttactcctgccattgtgttatttgttttctggtttttttgtggtctttttttttctctctctctctckttttttttcttttctgtcttttagtgaagtgattgacttattttcttccttttgtttttaggtatcttttgtatcttctttgatttgaggttaccatgtggcaatactattttataagtcattattttaagctgataacaacataacactgtttgcataaacaaagacacaaacaaggaacaagaaaaactaataatgactctatgccataacttcattcccttgctttttaacttcttgttgttaatatttataccttgttgtactgaatatgtcttgaaaagttgttgtagttgttatt

SEQ ID NO: 122138 - DNA, 623 bp, Homo sapiens
cagtagttaaaacaagacatacaaagaagatggctaaatacaataaacctagaatagcagtaagaatcagaaatgccccacgaggtatgaataagtatgatacggaaggtagtatctggatttccaatacagtagttgacatcagtcagtatctagggatccagcttctatctaactcctggacagggactggtgacggcaagcaaaagcttcagttctgaagacttgggcaacagaatcagatttggtcacaagatctagggaaatggatctaataaccaaaacaaggcacaactctggaatgtggwctcaggaatatgttaaaagttagattgttagggttgagcccagactgcagacagaataagtagaaggactgagtaaatgcttgtcctcagagggtacaagatgagtttcaagctcttccatctgcatataataaagggtttcaaaggcaagaaattcggcagatctcaatacccatgtttccttctctgatcaacagtgtgtgaaaggagagatttttgtttgcttctgaaccctcttccaggtctgagatttctgttattctgttaaattgaaccaaaataaggacaaccttttcattcactggataaaatggg

SEQ ID NO: 122139 - DNA, 623 bp, Homo sapiens
cagtagttaaaacaagacatacaaagaagatggctaaatacaataaacctagaatagcagtaagaatcagaaatgccccacgaggtatgaataagtatgatacggaaggtagtatctggatttccaatacagtagttgacatcagtcagtatctagggatccagcttctatctaactcctggacagggactggtgacggcaagcaaaagcttcagttctgaagacttgggcaacagaatcagatttggtcacaagatctagggaaatggatctaataaccaaaacaaggcacaactctggaatgtggtctcaggaatatgttaaaakttagattgttagggttgagcccagactgcagacagaataagtagaaggactgagtaaatgcttgtcctcagagggtacaagatgagtttcaagctcttccatctgcatataataaagggtttcaaaggcaagaaattcggcagatctcaatacccatgtttccttctctgatcaacagtgtgtgaaaggagagatttttgtttgcttctgaaccctcttccaggtctgagatttctgttattctgttaaattgaaccaaaataaggacaaccttttcattcactggataaaatggg

SEQ ID NO: 122140 - DNA, 643 bp, Homo sapiens
acatgtactattttgttacacgcatagcatatgtaatgaccaagtcagggtatttaagatatccattatctcacgtatttattgtttctatatgttgggaacgttttaagtcctctcttctagctattctgaaatatgaaatatattgttgttaactatagtatacttactctactatcaaacattagatcttattccttctatctaactgtaagtttgtacccattgagyagcctctcttttccatccctctcccctcaacacacccttccccatgtctggtaattaccactctactgtctacctccatgaaatcaattctattagctcccacatatgagtgagagtatatgatgtttgctttctttgcctgacttatttcacttaacctccagttccatccatgttactgcagatgatgatgattattatttcataataacctccagttccatccatgttactgcaaataagaggatttcattctttcatatgggcgaatcgtatttaattgcgtatatgcacattttctttacccattcatgcaccgatggacacttagtttgattcagtatctttgctattgtgaatagtgcttcaataaacatgtgagcgcaggtatccctttgatattctgatttcc

SEQ ID NO: 122141 - DNA, 643 bp, Homo sapiens
acatgtactattttgttacacgcatagcatatgtaatgaccaagtcagggtatttaagatatccattatctcacgtatttattgtttctatatgttgggaacgttttaagtcctctcttctagctattctgaaatatgaaatatattgttgttaactatagtatacttactctactatcaaacattagatcttattccttctatctaactgtaagtttgtacccattgagtagcctctcttttccatccctctcccctcaacacacccttccccatgtctggtaattaycactctactgtctacctccatgaaatcaattctattagctcccacatatgagtgagagtatatgatgtttgctttctttgcctgacttatttcacttaacctccagttccatccatgttactgcagatgatgatgattattatttcataataacctccagttccatccatgttactgcaaataagaggatttcattctttcatatgggcgaatcgtatttaattgcgtatatgcacattttctttacccattcatgcaccgatggacacttagtttgattcagtatctttgctattgtgaatagtgcttcaataaacatgtgagcgcaggtatccctttgatattctgatttcc

SEQ ID NO: 122142 - DNA, 643 bp, Homo sapiens
acatgtactattttgttacacgcatagcatatgtaatgaccaagtcagggtatttaagatatccattatctcacgtatttattgtttctatatgttgggaacgttttaagtcctctcttctagctattctgaaatatgaaatatattgttgttaactatagtatacttactctactatcaaacattagatcttattccttctatctaactgtaagtttgtacccattgagtagcctctcttttccatccctctcccctcaacacacccttccccatgtctggtaattaccactctactgtctacctccatgaaatcaattctattagctcccacatatgagtgagagtatatgatgtttgctttctttgcctgacttatttcacttaacctccagttccatccatgttactgcagatgatgatgattattatttcataataacctccagttccatccatgttactgcaaataagaggatttcattctttcatatgggcgaatcgtatttaattgcgtatatgcacattttctttacccattcatgcaccgatggmcacttagtttgattcagtatctttgctattgtgaatagtgcttcaataaacatgtgagcgcaggtatccctttgatattctgatttcc

SEQ ID NO: 122143 - DNA, 609 bp, Homo sapiens
ttcatgcaccgatggacacttagtttgattcagtatctttgctattgtgaatagtgcttcaataaacatgtgagcgcaggtatccctttgatattctgatttcctttcctttggataaataccagtagtgggactactggattatatggttgttctattttgtttttagagaaatctmaaaattttgaaggcattcatcaactgtagtttatgttcagtctgtagttcatcattgctgatgagaactataaaggcagttaactcttttttgtatatgacctggtttattttttaacctccaaaagcttatacatttttccccttttccttggcatctttaatggtgttggagttcctcttatgtttcacaattataatctttgtactcatctttgggcatccccatggctgcatgggcttcctcataggtaagtttaatggttgcctctttgtagtttcaaaattcatcatttttacttcagcttttgttttaatgcctaagatcaggttattttatttcctggcttggagaattgcccagataccatacctgtaggcaagtgtgtgatactgagtttggtcatataatcttgtattttgtccagtcac

SEQ ID NO: 122144 - DNA, 609 bp, Homo sapiens
ttcatgcaccgatggacacttagtttgattcagtatctttgctattgtgaatagtgcttcaataaacatgtgagcgcaggtatccctttgatattctgatttcctttcctttggataaataccagtagtgggactactggattatatggttgttctattttgtttttagagaaatctaaaaattttgaaggcattcatcaactgtagtttatgttcagtctgtagttcatcattgctgatgagaactataaaggcagttaactcttttttgtatatgacctggtttattttttaacctccaaaagcttatacatttttccccttttccttggcatctttaatggtgttggagttcctcttatgtttcacaattataatctttgtactcatctttgggcatccccatggctgyatgggcttcctcataggtaagtttaatggttgcctctttgtagtttcaaaattcatcatttttacttcagcttttgttttaatgcctaagatcaggttattttatttcctggcttggagaattgcccagataccatacctgtaggcaagtgtgtgatactgagtttggtcatataatcttgtattttgtccagtcac

SEQ ID NO: 122145 - DNA, 587 bp, Homo sapiens
tttgtgcctctgctcatttggcatctcatcaaagaggccctttctaaaaacttcttaaaaagcmctgcccacccactgctcctactctgcactggccctttgtgctaatttacatttcatatagcactacctaacatagtatatattgtcagtgtatctgcttcttcccactagattataagctttgtgatcttggagacttgtttccctagggtctggttagtacctggcacataatagacactaaataatatatattaaatgttatgtggatggactaaattataatagatttggtatgaagggaaagtttcagatttcagttcttaatatatatagttctttatttttaatatttttttcaaaagaatacatttccctaatgtgtacattgttgttttattaagttatttaaaaatcacagaccaaatgcaaatcaatctctcatctttccaaattaattcaggaagcatgtttttagttacattcttccaaatcacctaaacaaattctagcttaaaattaattaaaggccttaattttacataagaggcttgaagattgatttaagatattacatgaacagt

SEQ ID NO: 122146 - DNA, 572 bp, Homo sapiens
ctacatgtaattacaaacagttttgaagatattatgaaggtgagcagaaaaccttttaaccttaattccaaataatagtttttcaattttttttctttcattggagaggtggggcaagtgtgatgtgtgcctagaacaatgagattttgtgactcagaagaaaggaaagaggaaacatctcagtagagaaccttgcatggggaagagggaaatttgttgctgtgaagcagtactttagaaaaattaatcacagaaaaaaatacaactagatactttagaaaaattaatcacaggaaaaaaaatacaatcaggatgcgatgagaacctgaaaaggtgaagcagcagtgttaayggaatggacgggataataggagacatttaaaaggatcaaccatattaatggctggaatcaaacatttgtagaaagaagtaaatcaattaaggcagggacagaatgttaaccaggaggtctgtataatcatttggtgataagtgtagaaacaccagtaaaaggagtgctatagaaattgtggtcaataactattccactaagagtttctactagttcacat

SEQ ID NO: 122147 - DNA, 542 bp, Homo sapiens
tcattacttgttactagtctgttcaggttttgaatttatttgtggttcaatctcagtaggttgtatgtgtctgggaatttgtccatttttttccctagatttttccaatttattgacatatagttgctcatagtagccactgataatcctttgaatttctgtggtattagttataatgtctcctttttcatcctgattttatttatttgcatcttctctctttttctgtagtctggctaaaagtttgccaattttgtttaacttttcaaaaaaccaactttttatttcattggtcttttgtattgttttcttcatttcaatcttatttatttctgctttgatttttaccattgattttctactactaatyttgtgtttggtttgttcctgcttttccagttctttaagatgcattgttaggttgtttatttgaagtttttcttattttttgatgtaggcacttatagctatgaactttcctcttagtactgcttttgtcatataccataggttttggtatgttgtgtttccatcatcatttg

SEQ ID NO: 122148 - DNA, 599 bp, Homo sapiens
gtgtagtaccaggtattgctgctggttatttgagcccaaggacacttcagttaccagggtgaataaatcctgtcaggactgggtcatttccttcgaatgagaaggttgctctctggcccagggtatgtctagaaatgttatcttgcaggtagggcctggaaagggggcctcatgactctgactgctgccctatcctgctatagaagagctgctatccaagaggcaaaacgaaatcttctccagtcttctgtctcctgtcctcaagcagagaaaaggggtctcttttggagcagttagttgtacagcctggaattaggggagaggtggtgcaagcactcctttagccaccctggatagcatctcaggaggttgtgtgccccaccctcacccccagtcagctgggtttgggcccagttcagcactaggacttaggagttgcggtcttcatggcctatactgcctttcaagattatttagggccggsgctcagggcactttagccagcagtagtgaggcttgtgggaactcaagcactgaccactgggatcagtgattcccctctggctaatgctggtttaaatggtccctccatgggtggg

SEQ ID NO: 122149 - DNA, 631 bp, Homo sapiens
aaggatgttgaattttgtcaaatgcttcttctgtgtctgttgaaatgatcatatgattcttatccttcattttgtttatacggtgtaatcacatttgctaatttagatatatcaaaccatccttgcatccagggataaatcccagttgatcttggtgtataattcttggaatatgctgtagaacttggtttgctgctattttcttgaagatttttgcatgtatgctyatcagggatactgacttgtaattttaattgtagtctcctagtctggattcagtatcagggtaatgctggactcataaaatgagtttggaagtgtcagatatttttcgatagaacaaaacttggcataaagaatatcatgtactatatatcaggaacattaccaaatgaaaataaagttcttctctcttattgagaattgaaaagaatttaagatgctgtatcccacagagaaagcttctcttatgtagcaagggctttgtatgttccgagtctgatgaacctatctttatagtcatttgagaggtatgtgtatatatttgggggtatgtgtgtgtgtttgtgcattcagacacagttacagtttagttgccccaaattgtatttaatacttaccaagcactaag

SEQ ID NO: 122150 - DNA, 631 bp, Homo sapiens
aaggatgttgaattttgtcaaatgcttcttctgtgtctgttgaaatgatcatatgattcttatccttcattttgtttatacggtgtaatcacatttgctaatttagatatatcaaaccatccttgcatccagggataaatcccagttgatcttggtgtataattcttggaatatgctgtagaacttggtttgctgctattttcttgaagatttttgcatgtatgctcatcagggatactgacttgtaattttaattgtagtctcctagtctggattcagtatcagggtaatgctggactcataaaatgagtttggaagtgtcagatatttttcgatagaacaaaacttggcataaagaatatcatgtactatatatcaggaacattaccaaatgaaaataaagttcttctctcttattgagaattgaaaagaatttaagatgctgtatcccacagagaaagcttctcttatgtagcaagggctttgtatgttccgagtctgatgaacctatctttayagtcatttgagaggtatgtgtatatatttgggggtatgtgtgtgtgtttgtgcattcagacacagttacagtttagttgccccaaattgtatttaatacttaccaagcactaag

SEQ ID NO: 122151 - DNA, 600 bp, Homo sapiens
atcctagactgtggtgcttttatactttgtctccatgcctgcccattagctgtcactttgccctgtagccagagtgtctgcacctagtggcacccctccacctttccacatctttgatatgtttcatttcctccagcagcagcctaggaaaaactgaagcacgccaggggaaaaccatagatgtgagcttgttctttattgccttaatgttgctcacaatgctaagttagtgtgctctagatgtgaaataactcccctcctctcacatgaactagagagtaggacttagggactactcctgcccattctgttcaggcattttcacatattagaaagtaatgtggcttttttattttctgcaggtttgctcaaaaktatgactattagatcagtgaaagtattattagatttgcttttggagattgtggcaggatgatcattgatcccaatcttttctaactttttctagctgcccagctagagattatatttcccaccttctccttcaggtagttgtgaccatacaactgtgttctctctggtaaaataggaatagaagtaatatgggcaactcacattcatttttctaacaggaaattg

SEQ ID NO: 122152 - DNA, 530 bp, Homo sapiens
gtagtaatgaatgtctctacaaaaggcattctaaaatgtactttcaaaaatcttgtatttgtttaaaaattcttgtaaagaagcttaaactaaaatgtaataaatgcatttcttactgccattcttatattggttaggggtgactaaccaattgttcatgtttcagtcaggaaaggccttgtaatgctgcaataagaaagagccttcttttatttcttgtttccartgttctctgtggatctgggcaatcaccttctatatggctactcagtaatgctgactcacggagaaactgaatgttcagcctctttggtcagtggaagagaaaatagagtatcacacttgcgtcacgcttttcagtgacacaaatcacttgtgctctcacctcattattgaaacatgattcatatggacctgcctaatgaattaacatttttcatatggctcttcctgtgcattacttgcaaggaagatgggtaatgagagaaggacagggtttatttgctgaccattgtatctctgacttagtc

SEQ ID NO: 122153 - DNA, 497 bp, Homo sapiens
tgtttgtatataatctgtcagtcatttgtcagtgtatatgctacaaatatatatattttgtaatctgtggactttcttaatgctatttttaataagaaaatattttaaatgtagtaacacataatttattattattttttacttgtgcttttttgtattgcattggaaaaattttcctggtccaaaccacacctaaaaaggctgttttcttcataaaaccctccggggatgttgaaagggatctcattaaatgtatagaytgatttgaggagagtagacaaattaataatcttgcatctttcaattcaagaacatggtgtatcttttcacttattatttgtttatgtctttgaaaatttgcctcaaatatatatcatatttttagtatagacgtctggtatattctttatcagacttgacactaagtatgtgacatattttggtactcttttcaatggtatattttaaattcaattttctaattgttcattgctgat

SEQ ID NO: 122154 - DNA, 497 bp, Homo sapiens
tgtttgtatataatctgtcagtcatttgtcagtgtatatgctacaaatatatatattttgtaatctgtggactttcttaatgctatttttaataagaaaatattttaaatgtagtaacacataatttattattattttttacttgtgcttttttgtattgcattggaaaaattttcctggtccaaaccacacctaaaaaggctgttttcttcataaaaccctccggggatgttgaaagggatctcattaaatgtatagattgatttgaggagagtagacmaattaataatcttgcatctttcaattcaagaacatggtgtatcttttcacttattatttgtttatgtctttgaaaatttgcctcaaatatatatcatatttttagtatagacgtctggtatattctttatcagacttgacactaagtatgtgacatattttggtactcttttcaatggtatattttaaattcaattttctaattgttcattgctgat

SEQ ID NO: 122155 - DNA, 486 bp, Homo sapiens
aaattgatttaatcttcacaggcacctactataactatacacacacacacaataatatgaatagtttattgtaaaaatatttggtacgtacctgtgcttcttatgaggtttataaagactcatacaatcctgtcagtgtctagttttccttatcttctttttcctagttttttgaaaaaaatcgatattctttagtaagacactgctttttctttttccacaacaatattgacattctgtgtcaaagttctagctgtttcatacatcagaatggaaggttattctctctaaataggtccttattgctaacaaaaataccaaaattaaaatttgatagacactaaaattaatttcttaagcaattaaaacatctcctctatacgatytctctcacatttgctctttatttcatcctttctgtttctcactctcctcatcttcttcctctatttctcttttcctgttttacctttcaattgggcagta

SEQ ID NO: 122156 - DNA, 605 bp, Homo sapiens
attttaaaattttcatcatttttatattggttttggttatctgttatcaatgacctttgatgttactaaggtaattgttttggggtgtcagaaaccacatccacataagatggcaaatttaattgataaatgtcatacatgttttgctgcccccaaccagacattatcctgtctccctctcctcaggcctcatttttccctcagacctactaatgttgaaattaggcaaattaataacccttcagtggcctctaagtgtccaagtggaagaaagagttgcacaactctcactttaaatcaaaaactataaatcattaagtttagtgaggaaggcaggtcaaaaggcaaataggttgaaagccaggcctcttgtgccagttagcaacattgtraatgcaaaggaaaagttcttgaagaaaagtaaatgtgctactccagtaaacacataaatgataagaaagtgaaacagcttcactgtcgatatggagaaagttttagtggtctggctagatcaaatcagccacaacattcctttcagccaaagccaaatccagaacaaggacttacctcttcaatctatgaagattgagaaaggtgaggaagct

SEQ ID NO: 122157 - DNA, 605 bp, Homo sapiens
tgtgtttcttagaatgtcaaaactggaacaagacactgaacctctctgcttaaacttaaaaacaataattctgtaatacagaataggatccatgtggataagtgaacatatgtatttcttaaaagggaaaactgagactagcctatgatgtaaatctaatatttgaacattaattttaacatgaaaggtatttttagtgagactaaatatcttgtgactagatgtcattccacagaactcacagataaaatmctaaatatacagcatcatcatattgctctttatttccactgggaaaataaacttaagctatagtagcagaaaccagtcacatatattgaggactaccttaaatagcaaggtcactggattcagaatggacttattggagtagaatttggattctgctactgtgtagttattgaataataagactcacctgtctagcatgacttttatgcattttcagctgaagccaaaagaatgaatcagatacactttcaaggatctttgctatcatataattcttcaagattgattcaatatattttaagaagcgtaattcaaagatcagaaggcagggacatacatagtattgttgtgaa

SEQ ID NO: 122158 - DNA, 462 bp, Homo sapiens
gaattcctcttagctcttccccaaataataacttccctagacttttctccttctttcattaagtatttattagtatttattttatttttttgagacagagtcttgctctgtcgcccaggctggagtgcagtggcacaatctcggctcactgcaacctccgtctcctgggttcaagagattctcctgtctcagctacccctgggattacaggcacacaccaccacgcccagctaatttttgtatttgtagtaaagatggggttttgccatattggccaggctgttctcaaactcctgacctcgagtgatctgcccacctcggcctcccaaagtgctgggmttacaggcatgagccacctgtgcctagcctattagtacttattatatgccaaactctgtgcaaattgtctttggcactattctcttaggtagacagtgccacttttcctccagatccaaagca

SEQ ID NO: 122159 - DNA, 554 bp, Homo sapiens
tttttgtatttgtagtaaagatggggttttgccatattggccaggctgttctcaaactcctgacctcgagtgatctgcccacctcggcctcccaaagtgctgggcttacaggcatgagccacctgtgcctagcctattagtacttattatatgccaaactctgtgcaaattgtctttggcactattctcttaggtagacagtgccacttttcctccagatccaaagcagactctcccacctccccagtcctctcagccaccttgggaattctttcctctaagttacatatgacacctccctaaagcacacctcccactacacatgccaactgaaagcttctatagggtaacaatgatctattttttacctttgtatgccccacaccmttgactgcactagcctgtgtgcattaaaacatagataaatatcccccatgtagttactaataccaaggaaataggaagacgtgctggatggggggctctggtgggtggctgtcctccccacaaagctgttagagcagaacaggtgctacccgtacacctccagaaag

SEQ ID NO: 122160 - DNA, 334 bp, Homo sapiens
cgttgtttcttaatcccctccctcctcccaccctccaccctccaccaggccccagggtgtgattgttcccctctrtgtgtccatgtgttctcagcatttaacgcccagcctttcttatatcaataatctctaacaggcaaaacagaaattccattttgatgattaaaaggaggaagaaaattaacttcatggtcctgacccacgttcaacttgataagagaggagagagcactgtgtgaaggcaagagctggtaagctcagacaacagaaagaccgggactaactcctgctcatcacttcactacacggccttggccatgctgctgatcttcac

SEQ ID NO: 122161 - DNA, 334 bp, Homo sapiens
cgttgtttcttaatcccctccctcctcccaccctccaccctccaccaggccccagggtgtgattgttcccctctatgtgtccatgtgttctcagcatttaaygcccagcctttcttatatcaataatctctaacaggcaaaacagaaattccattttgatgattaaaaggaggaagaaaattaacttcatggtcctgacccacgttcaacttgataagagaggagagagcactgtgtgaaggcaagagctggtaagctcagacaacagaaagaccgggactaactcctgctcatcacttcactacacggccttggccatgctgctgatcttcac

SEQ ID NO: 122162 - DNA, 545 bp, Homo sapiens
atccctttgcaccagttcccagtacaaagtaaccccttacttgtagaaaacmttattattgtcattagtattttcgagatgtaatttgagtcttgtagcccaggctggagtgcaatggtccaatctcagctcactgcaacctctgcctcccaggatcaaagtattctcctgcctcagtctcccaagcagctggaattacaggcatgcaccaccatggcctgctaattttttgtacttttagtagagacagggtttcaccatgttggccaggctggtctcgaactcctgacctcaggtgatccacttgcctcaaccttccaaagtgttgggattacaggcatgacccaccacacctggactagaaaacactattcaatagcaaacagtagcagtatgcttgggggttttaggattgtttattttcaaatctctagaaaacttcaatacattaccttaggctataatcccagggcagagtctcatctgttaatagggggctggtctaagggtccttccagctctcagattaatggtttcccatgttg

SEQ ID NO: 122163 - DNA, 545 bp, Homo sapiens
atccctttgcaccagttcccagtacaaagtaaccccttacttgtagaaaaccttattattgtcattagtattttcgagatgtaatttgagtcttgtagcccaggctggagtgcaatggtccaatctcagctcactgcaacctctgcctcccaggatcaaagtattctcctgcctcagtctcccaagcagctggaattacaggcatgcaccaccatggcctgctaattttttgtacttttagtagagacagggtttcaccatgttggccaggctggtctcgaactcctgacctcaggtgatccacttgcstcaaccttccaaagtgttgggattacaggcatgacccaccacacctggactagaaaacactattcaatagcaaacagtagcagtatgcttgggggttttaggattgtttattttcaaatctctagaaaacttcaatacattaccttaggctataatcccagggcagagtctcatctgttaatagggggctggtctaagggtccttccagctctcagattaatggtttcccatgttg

SEQ ID NO: 122164 - DNA, 545 bp, Homo sapiens
atccctttgcaccagttcccagtacaaagtaaccccttacttgtagaaaaccttattattgtcattagtattttcgagatgtaatttgagtcttgtagcccaggctggagtgcaatggtccaatctcagctcactgcaacctctgcctcccaggatcaaagtattctcctgcctcagtctcccaagcagctggaattacaggcatgcaccaccatggcctgctaattttttgtacttttagtagagacagggtttcaccatgttggccaggctggtctcgaactcctgacctcaggtgatccacttgcctcaaccttccaaagtgttgggattacaggcatgacccaccacacctggactagaaaacactattcaatagcaaacagtagcagtatgcttgggggttttargattgtttattttcaaatctctagaaaacttcaatacattaccttaggctataatcccagggcagagtctcatctgttaatagggggctggtctaagggtccttccagctctcagattaatggtttcccatgttg

SEQ ID NO: 122165 - DNA, 581 bp, Homo sapiens
attaggatatgtttctagatatacagaaatgggtgtgtgtgtgtgtgtgtgtgtgtgtgtgtaggtatgtattccaactttactgaatacacataatttaaacagagtacgcaagtcaaaccatgaatattaaaatgtattttttcatgttgagtttagcttgatattaaaaaaaattaggattaattactgtctgaactttctttttgaaaaataaaacaaatatttcattgtatcttgtgaactttactttgttagtggactactttgggacgtgatataacttattagaataaaataaaagccaatgagaaatcgtttgttttctaacgtaacatatctaaacatatgctaatacattttcttattctatgtttttactaacaatgccactcctcatttcatctaaggtaaattctgttagtatttgggggtgacagtgatgctttctacccacacatgaatttagaaagagtgaaacaagatttatctcttaaaatgtataaamaaataatgacaagtcttcataaagtgacagaataatttctaggcttttaggagtatgttatgaatgacgatac

SEQ ID NO: 122166 - DNA, 619 bp, Homo sapiens
gtaatttaatcaaatcttactttacaatggaaacaatttaggtagagagacatgcctaacataattctgtctaaatcaggactcctgatttatacatataaggttttattttgcatttaactgttctatctccaaaattatagtatttattcttatattatttaataggtttacttttttcataatttggaaaacatcagtctttcgggtctattttatggtaatgtackatttgtcggagtgtcaaaatgacttaattgctaactgtgctcagcaaagtgtttagaagagaattctcgagtgttgtcaacgtcaacgtgcaatacatttgtcacacgagcaaaatgttggtgacaagttttgaaaatgttggatcttttaaatttaaatttctaaagaagttttaaatttttaagcttaaagaaaaatattacatagaacaatattgtattatttaagaatacagtagtttatatttacatatattaacagatgaataacaactataaacctcataggcagtgttatcaattagtgatgtctttggctctgagtaataaacaaacaaaatatgaccctagagttgtttgaataaatacagattttatttcattctagt

SEQ ID NO: 122167 - DNA, 619 bp, Homo sapiens
gtaatttaatcaaatcttactttacaatggaaacaatttaggtagagagacatgcctaacataattctgtctaaatcaggactcctgatttatacatataaggttttattttgcatttaactgttctatctccaaaattatagtatttattcttatattatttaataggtttacttttttcataatttggaaaacatcagtctttcgggtctattttatggtaatgtactatttgtcggagtgtcaaaatgacttaattgctaactgtgcycagcaaagtgtttagaagagaattctcgagtgttgtcaacgtcaacgtgcaatacatttgtcacacgagcaaaatgttggtgacaagttttgaaaatgttggatcttttaaatttaaatttctaaagaagttttaaatttttaagcttaaagaaaaatattacatagaacaatattgtattatttaagaatacagtagtttatatttacatatattaacagatgaataacaactataaacctcataggcagtgttatcaattagtgatgtctttggctctgagtaataaacaaacaaaatatgaccctagagttgtttgaataaatacagattttatttcattctagt

SEQ ID NO: 122168 - DNA, 619 bp, Homo sapiens
gtaatttaatcaaatcttactttacaatggaaacaatttaggtagagagacatgcctaacataattctgtctaaatcaggactcctgatttatacatataaggttttattttgcatttaactgttctatctccaaaattatagtatttattcttatattatttaataggtttacttttttcataatttggaaaacatcagtctttcgggtctattttatggtaatgtactatttgtcggagtgtcaaaatgacttaattgctaactgtgctcagcaaagtgtttagaagagaattctcgagtgttgtcaacgtcaacgtgcaatacatttgtcacacgagcaaaatgttggtgacaagttttgaaaatgttggatcttttaaatttaaatttctaaagaagttttaaatttttaagcttaaagaaaaatattacatagaayaatattgtattatttaagaatacagtagtttatatttacatatattaacagatgaataacaactataaacctcataggcagtgttatcaattagtgatgtctttggctctgagtaataaacaaacaaaatatgaccctagagttgtttgaataaatacagattttatttcattctagt

SEQ ID NO: 122169 - DNA, 619 bp, Homo sapiens
gtaatttaatcaaatcttactttacaatggaaacaatttaggtagagagacatgcctaacataattctgtctaaatcaggactcctgatttatacatataaggttttattttgcatttaactgttctatctccaaaattatagtatttattcttatattatttaataggtttacttttttcataatttggaaaacatcagtctttcgggtctattttatggtaatgtactatttgtcggagtgtcaaaatgacttaattgctaactgtgctcagcaaagtgtttagaagagaattctcgagtgttgtcaacgtcaacgtgcaatacatttgtcacacgagcaaaatgttggtgacaagttttgaaaatgttggatcttttaaatttaaatttctaaagaagttttaaatttttaagcttaaagaaaaatattacatagaacaatattstattatttaagaatacagtagtttatatttacatatattaacagatgaataacaactataaacctcataggcagtgttatcaattagtgatgtctttggctctgagtaataaacaaacaaaatatgaccctagagttgtttgaataaatacagattttatttcattctagt

SEQ ID NO: 122170 - DNA, 607 bp, Homo sapiens
gaattcaaatattaatgagctaaaaatgagggcttttttttcaaaaaaagaaagaacaatagaattgagaaaataagaaaataggtaatagggtatatgaagaaaatcaatatatataaaatgtattattaagaaaggtaaaacaaactaaatcacaatgtacctagatcttggagctacctctaattttgtttcacaggatatgggtaactggaaaagggagtcaaatcaggttgttctgttgacatacagtrgaatgagattatcctatgtatggttaaacttgtatatactgtgcattttagaagattagaagaataaacctctagtacaagctggttatcctccttccaagtaggagcagtgtgacaagaaaagaagttcaagcttgttttgtataaacaccaaagtctttgcatataaagaggcatgattacacttttaatcaatgactcaattgatcaaaagccatacaaatacacagatccttttagaagtgtgtcaaaggtaattttaaatgaatttatctatttttacaaaacatttttatttatagtaggaaactttgtagatacaaataagtcagtacatctttgaggtaaaagta

SEQ ID NO: 122171 - DNA, 491 bp, Homo sapiens
aggaattttttttctttcctgttctgctttatgctaatatatttttattcttctaaccaatacattgtcaggagaaccattaaatgctgatcggaaacacggctttggtcctaacgtaattccagggatgagtgtggtttttaacttagattgcctacaacctttgttggattaagattggttaaaagtttaaacatcctgaaacattactagtaacttttaatagtcccataccagtgatattgaacacttccatgctttgatttcaggatgattcatttacatgaaaagcctggtatgatcttccatctatcttttagcattttttctmcctttataattaaatataggcaatcgggcatttattctggcatttcacttttctcctagaagtttgtttatgggttacttttaagaaacagttttagaacacgcagcattagttataatgttgtttttattatttttgttaagaaataatcaatatttat

SEQ ID NO: 122172 - DNA, 509 bp, Homo sapiens
tcccgtcacccacactgaaaccttccgcagtagactgaggcctttcatgggatctcccaagcttgaccgcccactgatgctatcctgtcatcaaacttctcttctctctttcaaaaaattattaagcacagactcttataatatattctttgctggtgatgcgtcttccaaataccttgaaataactagcttttcatacaaggttttaatgcatttatttttttacccaaacattctacatagttttttcttcatagcacttgaaatttcctggactttggtaggatggagaaaaaaacagacttggtaatctctattgaggaaattgtttttagatagtagcaacattatttcctayatctaaatagaaagaaataactttgccttaaatgtaggttattcaattatttttaaagtagcagaagcttttattaattggcagtcttcttaaactcttaattttatctcttgacacaatatttagtttagattttaatttttattgtttt

SEQ ID NO: 122173 - DNA, 659 bp, Homo sapiens
atatgattttcctttttacttttcatgatgatgtgcaaagccttaggcactcctgatgttattgttctaggagtttttcatgagcagtatcaatcctaagtgttttcagaaacataatgaagaaaacaaacactgaatgactacacatcatcttccaggcagagagatttctgatatgaatcttcgaggattgagatcaaaaacctaagcagagaatgggcatccatatgtatgtgtttttaacatgtgggatttcccccaccactattggcaaaagtgggaagagtgaactgtgcttcacaaagattttttcaagcttgagtgggagtgtctgttcayggttgagtgagaagctggggttttccttaggccccaaggcattgtttttttaaaatgttattttcagaaatggagcttggagtagactgcaaacaggcatctaactgccaaggacatgtgaaacctgtaatgttggtcattctggatcctattcaagtacatactgttactgggtaagatcacttttactttactttagcagaagccccaattctgctttaggaaaaaaaatcatatcatgttttcccatttttatttataaatcctgaaggtttctgcaagcagtaacatttaaaaggacaatgacatacttacaagtt

SEQ ID NO: 122174 - DNA, 550 bp, Homo sapiens
gaggcagggatatcagggtaacccatggtgcagataacaaatgggctgccactccctgatggtccatggagaggagctgggaccagctatgattccacatccccaattatgtctcatatacttaacaccttcttgttttaaattaycttttaactcttcttttaaagctgataggtattattttctgagcatactgtctgaataaaatttctactgctgtataataaaatttctcccatatacttaaaaatgttcaagataaatgaactatattctacccttgagagaaaaaaaaagtagcctcgccaaccagaatttcctccagtccacccaattagaggtacagtatattcaggtagttagtttgaggattagagcacataaagtgatcaggggtgttaggaaactgtgaatatcatgttagagtagcttttgaaataaggctgggaatgaattcttggaaaaactgaatgtaacataagaaataagcagaaagaaggcaatgcccgcaccagggctgtggaagtagctgattaacgtgcagctattg

SEQ ID NO: 122175 - DNA, 550 bp, Homo sapiens
gaggcagggatatcagggtaacccatggtgcagataacaaatgggctgccactccctgatggtccatggagaggagctgggaccagctatgattccacatccccaattatgtctcatatacttaacaccttcttgttttaaattaccttttaactcttcttttaaagctgataggtattattttctgagcatactgtctgaataaaatttctactgctgtataataaaatttctcccatatacttaaaaatgttcaagataaatgaactatattctacccttgagagaaaaaaaaagtagcctcgccaaccagaatttcctccagtccacccaattagaggtacagtatattcaggtagttagtttgaggattagagcacataaagtgatcaggggtgttaggaaactgtgaatatcatgttagagtagcttttgaaataaggctgggaatgaattcttggaaaaactgaatgtaacataagaaataagcagaaagaaggcaatgccygcaccagggctgtggaagtagctgattaacgtgcagctattg

SEQ ID NO: 122176 - DNA, 475 bp, Homo sapiens
ccttctttccttccttcctgtcttccttttagtgaaggttattttctctttgatataatttactttcttcctttttattcttgtgtacccatgtattttttttaatttcacgtatgatatggtttagctgtgtcctcaccaaaatctcatcttgaattcccacatgttgtgggagggacctatgggaggtaattgaatcatgggggcaggtattttccatgctgttctcatgatagcaaataagtctcatgagatccgatggttttaaaaaggggagtttccctgaacaagctctcttctcttgtstgctaccatgtgagatatacctttcaccttccaccatgatgtgagagctctccagccacgtggaattctaagtccaattaaacttctttcttttgtaaattgcccagtcttgggtacatatttatcagcagtgtgaaaacagactaatacagtaaattggtaccaggag

SEQ ID NO: 122177 - DNA, 573 bp, Homo sapiens
ttgtggcctagaatgtctttcaagtttatttagggccccaagtactttagtccacaatggcaagtttgctagaactcaagttccaaccactgggatgggtgattcaccttctgctaaggccacttgtatgttccctctgtagcaggcatcagctgagttcagcccagtattgctttccactgtgacagggcagcactgagttcaatgtaatgtctcaaaactgctgtcctctccctctcccaaaggcacagattttctctcagcaccacacaccgtgctgccaatggatgggggagggatggtgttggcaattcarcactgtttcctaccctattcagtgcctctttcagcgatatgaagttacaaccaggtactgtgtgtgctcacctgatattggttcttatgaagctgttttctgtatgtagatagcttgttaaattcggtgttcctgtaggacagatgaccaggaagccttctattgggccatctgctctgcccctctccagataattacctttaatattaattttcattcaagaaaatagaccagatcaccaattccattgttatcca

SEQ ID NO: 122178 - DNA, 573 bp, Homo sapiens
ttgtggcctagaatgtctttcaagtttatttagggccccaagtactttagtccacaatggcaagtttgctagaactcaagttccaaccactgggatgggtgattcaccttctgctaaggccacttgtatgttccctctgtagcaggcatcagctgagttcagcccagtattgctttccactgtgacagggcagcactgagttcaatgtaatgtctcaaaactgctgtcctctccctctcccaaaggcacagattttctctcagcaccacacaccgtgctgccaatggatgggggagggatggtgttggcaattcagcactgtttcctaccctattcagtgccyctttcagcgatatgaagttacaaccaggtactgtgtgtgctcacctgatattggttcttatgaagctgttttctgtatgtagatagcttgttaaattcggtgttcctgtaggacagatgaccaggaagccttctattgggccatctgctctgcccctctccagataattacctttaatattaattttcattcaagaaaatagaccagatcaccaattccattgttatcca

SEQ ID NO: 122179 - DNA, 480 bp, Homo sapiens
agaattcactggattatcaggcagagactcctgttctcttcccttgctttcccccaaacaaatgaagtccctgtgctgaactgcctggggttggggaaggggtgtcamaagcacacctatagccaccatgactgggaccctgttgggtccaacttataaccagcccaggactgggtcttgctaaaggtctgtggtcactattgcctggctaaagctgatgtttatcaagggccaagggcactttagtcaggaggtgatgagtctagccaggcttgtgtctttcccttcaggttagcaagttctcctctggcccagggtcggtgtataaatgctgttcaggagctagggcctagagtcaggagctttagggctcttcttgatgtttattttactgtggctaagctagtacccaacttctaagacttaagtcctctgtattcttccctctcttttccccaagtaggaatctctccccaagct

SEQ ID NO: 122180 - DNA, 557 bp, Homo sapiens
ggctaagtgcgtgttttacagagatccgtcggtgtggattgcaccttccttgttttacagggatccgtcgatgtggagtgcaccttccttgcagtcgggggctcggtgccgggtgccgtcgttagtccaggaagaaggcggggagcttctcccgctcgaacaatttgcagctagttccggggcttcccttcctcctcccacaccggcccgcatcctagtgttgctttctctgcccccagcaccagcctcttcttgggctccctcctccccttcccactcgcgtctcttaggaaactgcgaccctagtgtttgctaaggagcaggggaggtccttcccgtcgccgacgccccccgcccggraagcggcgcgttttctgggccgagggcgcatcgaggatgtgacccattccctggccaagggtgtgggtggggaacggcaaccgatctcactgcctggcggggcagcttcctttccaggcaaggcggagacctgcagggcgtggagaccccgcccggcgcagaacgcgctggccagtgggcagcttgacagggtcccc

SEQ ID NO: 122181 - DNA, 508 bp, Homo sapiens
taaatgagcttagaattagattcttccctcatcaagtccccagattaaaacaagcctggccaatacctaaattatagcctttcaagactctgagcagaggacccagtgaagccatacctgcactcctaacccacagacactgtgagataataaatatatgcttttgtttttggctgctacatttgtggtaatttttgttttgcagcaatagaaaattaatatagttagccaacgatagctcacaagccaaatctggcctgctacctatttccgtatagcctacaagcaaataatgatttttacatttttaagtggcaaaaaataaatcaaaagaatgttttgtracagatgaaaattatgtgaaatccaaaccagtgtccataaagttttattaaaaaacagctacatccatatatttatgtattgtctgtggctgcttatgtgctataactgcacaattctgtaggtgtgacagaggctatatggatgacaaagcctaagatattca

SEQ ID NO: 122182 - DNA, 624 bp, Homo sapiens
atgcattcaaaccaaagcactcagataacaccagaagctttgataattaacataataagggtcagaaatgagctttaactggtaaaaaatagtggtttaattagcatcatggatattagaaatggtctctcaccagtgaaatttatggtattyaagaagacgtgagttgccttacacttttcagccatcttagtttcctagggttgccataacaaaatatcacaaattggtactttgggtggcttaaaccagcagaaacttactctttcacggttctggaggctagaagcctgaaatcaaggtgttgacagagctatgctccctctgaaggcaattgataagactccctaacttcttcctagtgtctggtagttcctggcaattcgtgttcgttggcatatagctgaatcatcccaatctccacctctgtctttacatgccttctctcgtgtctgtctttatgcggtcttcttataaggataccagtcattgtgtttatgtctcaccctaatcaaatataaccttatcttatataattacttctgcaaaacctatttccaaataaggtcacattctgaggttctgggtagatgtgaattttggtgaggtgttaggaggaggaga

SEQ ID NO: 122183 - DNA, 624 bp, Homo sapiens
atgcattcaaaccaaagcactcagataacaccagaagctttgataattaacataataagggtcagaaatgagctttaactggtaaaaaatagtggtttaattagcatcatggatattagaaatggtctctcaccagtgaaatttatggtattcaagaagacgtgagttgccttacacttttcagccatcttagtttcctagggttgccataacaaaatatcacaaattggtactttgggtggcttaaaccagcagaaacttactctttcacggttctggaggctagaagcctgaaatcaaggtgttgacagagctatgctccctctgaaggcaattgataagactccctaacttcttcctagtgtctggtagttcctggcaattcgtgttcgttggcatatagctgaatsatcccaatctccacctctgtctttacatgccttctctcgtgtctgtctttatgcggtcttcttataaggataccagtcattgtgtttatgtctcaccctaatcaaatataaccttatcttatataattacttctgcaaaacctatttccaaataaggtcacattctgaggttctgggtagatgtgaattttggtgaggtgttaggaggaggaga

SEQ ID NO: 122184 - DNA, 498 bp, Homo sapiens
agctacagcttcaaagtgttttgaccggttccaagttaatggcatgcttttgatagatatttgttatcaccagatcaaagttcatttatattattcgcaaaatattaactgttttcacatttattttgctttaactattataataagatattaaaataatgtatggaaaataaaggttttaatgcaagtaartgttggactagagcggccatattatattccagagaaagtatactccacgtagttggtgccacattaaagctgcacactaccactccctggtggctgcatggctaaactgtagctttctggaaatcacctcctttgaggttgaaaatgcataatacaaacaaacaaaaccacacagtaacaggatgacacctctatgtgagtccaaatggccattgtccaaactgcataattctgtaagaaacagagaaagtagaagtaccatttttttttgcacttttaaaaataatctgaagagattggcagtga

SEQ ID NO: 122185 - DNA, 498 bp, Homo sapiens
agctacagcttcaaagtgttttgaccggttccaagttaatggcatgcttttgatagatatttgttatcaccagatcaaagttcatttatattattcgcaaaatattaactgttttcacatttattttgctttaactattataataagatattaaaataatgtatggaaaataaaggttttaatgcaagtaagtgttggactagagcggccatattatattccagagaaagtatactccacgtagttggtgccacattaaagctgcacactaccactccctggtggctgcatggctaaactgtagctttctggaaatcacctcctttgaggttgaaaatgcataatacaracaaacaaaaccacacagtaacaggatgacacctctatgtgagtccaaatggccattgtccaaactgcataattctgtaagaaacagagaaagtagaagtaccatttttttttgcacttttaaaaataatctgaagagattggcagtga

SEQ ID NO: 122186 - DNA, 584 bp, Homo sapiens
aactacatataaaaaagaaaaacttcaaataagcaacctaatgatgcatcttaaagaactaaaaaagcaagagcaaaccaatcttaaaattagtagaagaaaaaaataacagagcacaaataaatgaaattgaaatgaaaaacaatacaaaatrcaaatgaaacaaaaagttggtgtttttaaaagataaacaaaattaagaaacctttagccagactaaggaaaaaagaaaacccaaataaatcagagatgaaaaggaagacatcacatctgatactacagaaattcaaagaatcattagtagctactatgagcaactacatgccaatacattgaaaaatctagaggaaatggacaaattccaacacatacaacctaccaagtttgagccatgaagaaattcaaaaggtgaaccgaacaataagtgatgagattgaagccataataaaaagtctgttaataaagaagagcacagacccaaaagcttcactgctgaattctaccaaatattttaagaagaattaacaccagtcccactcaaactatcttgaaaaaacagagcaggagggaatacttccaaatgc

SEQ ID NO: 122187 - DNA, 581 bp, Homo sapiens
tcaacatgagatagccttttcaagctggatcaacttgatactgttgaactgtamcaagaatttgtccttaaaaagcagaagaccaggtcaccctatcctacactatgtttaaataaacatggtaaatatccttttgcaatgtctctctttggcaaacttgtgatccctttttcacgatatctttaagaagaaatctacaaatactattgcagtatactacaaataattataaacttctaagtaagtatattttctaattttataaaatatttataaatgttctttgtaattccattatagaccatattatagacaaaaatgttgttatatatcttcttccccttactagaaattaaaattttcttactccgatttaaatatctaattttattaagactttttaaagtatgcatagatgtgaagaaatttgcatattttctaattccttcttaatagaactccacttattatgatactaaggtatctatcatttgggaattctgctcctattatttatttcaagattttacttcaagctcttgcattccaaaaggacatacagatgagttatatgtaggctt

SEQ ID NO: 122188 - DNA, 402 bp, Homo sapiens
aatgaggtatcatgaaattaaagttctacattttcctctgtgtaataaatatgaactacatgacaggtaataggaactactttatttacaaactattcaatgcttacactgaaaaacagtcacctcctatttcaggaaaaagtgtttcaaacatgcagaaaatttggagaaagctctgaaaaaattatctrtatgattagaatagcaagaaaagcaaaccatttggacaagcaagagatatatgatggttaattttatgtgtcaacttggcaaggctatggtgcacagttgtttgaccagtctagatattgctgtgaaagtatttttcagatgtgattagtatttgaatcagtaggttctgtgtaaggcagagtaggctttgtagtgcaggtgaatctcatc

SEQ ID NO: 122189 - DNA, 578 bp, Homo sapiens
tatagaattgagtcagtttgtttatatttgtttctttccattctgcaccattccatcaataaagagtcattcactgagcagctattatatgttaggccatctgttacgattttatataagataacagtcttactatgggggaacttatttatttatcaaagtgtgtgtgcatgtgactgtcaggggcctggggaagaaaggtgtgtgtgttctcagtacttaagcaacatcagtgaacacgacagacagaaatcgctgccctagagaaattttcattccggtgccyctgttcacagattaatggggaaaatatacaagtaaaacataaattacattatagcctagcaacaggtgcatatagaagggaatatgaaggaatgatttaccacctctgatgttggaaactggccgggacagcataggttcctgatagtgtctttgaaggatgtatagaactttactaggtagtctaaagaagggacagacttttggagtagaacaggtaacatgtgcaaagccacagttacgtaagggtcaacacaaagtcagagcagacaatcaaagacaaaagccaggag

SEQ ID NO: 122190 - DNA, 643 bp, Homo sapiens
taaatttcaattcccattcaattttgttaaaaaataacaaacatatatcgaatgccttcaatgtgcccgagcatgtgccattagggaaattcaaaaatgaattatatagcactcctgcccaaaaggaatttataagctgggggtaacactaagtaccattgctgttcaatctgcttctgttttctctcttgcgttttgcggaaaaatgttagcttccacaatgtttccttgtgtgatgccttgtatcatgtgtcctagcaatttactgtcaatgacctctcccaaacaggcctccaagcctccaaaaaatgggaatccaactgtgtttgactggcaacacctcagaaggaaggtgttaattcactttcttaagattgctaattaaatatggaatattctgcttcatcctcttattacaaagaaccagttcactgcctgttttaagaaaggtcttaagcagttttcatgtagtcattgttgctgmgtcttttagcttccagagctgaaaagcgaagtttgaagaaggcatgagtgtacgtgatttctctgtgtttcgggttaggctttgagtcagggggacctggtggatttgggctcatatttttcttgctgtggcagagtgcagaagaccgacacttccttt

SEQ ID NO: 122191 - DNA, 610 bp, Homo sapiens
gcctgctgcatgacagacaatctttggcatacacaataactgttcatttcaatggactttttagcactgtataatctttctgaagacattttaaatgacaattggggatcaaaatttaagtcaaactttaattttatatcacgttaacaaagtaatccaaatcaggtaacagtagtatgaacataggtatgaacacagatatgagcacatgtatgtccacaggcaaagagaagttatgttgccacacattcttctgcttaatggctgcatttttcttttttacaaaaattataaaacatattccaatatcaaataccttaaaatgtaaaaaatatgtgtttttaaatcaaggaactatatgagagatatatatatatgtgagaatacatatatgtattctgtgtgtgtctatatatacacatttacataaacacatacacataacatatatgcatactatatatatgtatatmcacacatacacacagcaaatatgtagcctacgttgtctgtatagctgatattagatgtggcataaacagtgatcagatgagtgcgtttggggttgtgtatcattaatgtcattgtagatcaagagtatgaaatcatt

SEQ ID NO: 122192 - DNA, 562 bp, Homo sapiens
ccatgcaagtttgaaactcaacaggcagtcattaaaccttaaagatccaacataatctcccttgactccatgtcccacatctagggcataatgctgaatggggtgtataggagaacttccagttcttgcaaggctttaggtagctctatccctgtggctttgcaggattaagctcccaagcatactttcatatggctggggctgagtgcctgtgsgtttttcatgctgagagtgcaagctaccagtggatctgccattctggggtctagagaatggagagccccatcccacagctccactaggcagtaccccagtgggctctctgtgtgagacttccaactccacatttccacttagcactgctctagtagaggttctttgtgagggctctgcccctccagcagtcttctgcctggatacccaggctttcccatacttcatctgaaatctatggagaggttgccaagcccccacaactcttgcactctgtgtacctgtaggcttaacaccacataaaaattgccaaggcttatggcttgcaccttctgaagcagcagctgga

SEQ ID NO: 122193 - DNA, 562 bp, Homo sapiens
ccatgcaagtttgaaactcaacaggcagtcattaaaccttaaagatccaacataatctcccttgactccatgtcccacatctagggcataatgctgaatggggtgtataggagaacttccagttcttgcaaggctttaggtagctctatccctgtggctttgcaggattaagctcccaagcatactttcatatggctggggctgagtgcctgtgcstttttcatgctgagagtgcaagctaccagtggatctgccattctggggtctagagaatggagagccccatcccacagctccactaggcagtaccccagtgggctctctgtgtgagacttccaactccacatttccacttagcactgctctagtagaggttctttgtgagggctctgcccctccagcagtcttctgcctggatacccaggctttcccatacttcatctgaaatctatggagaggttgccaagcccccacaactcttgcactctgtgtacctgtaggcttaacaccacataaaaattgccaaggcttatggcttgcaccttctgaagcagcagctgga

SEQ ID NO: 122194 - DNA, 615 bp, Homo sapiens
ttgggaggccgaggcaggcagatgacaaggtcaggagttcaagaccaggctggccaacatagtgaaaccccgtctctactaaaaatacaaaaaattagctgggcatggtggtgggcacctgtaatcccagctacttggggggctgaggcaggagaatcacttgaacccgagaggcggtggttgcagtgagtggagattgtgccacggtrctccagcctaggcgacagagtgagactccatctcagaaaaacaaaaacaaacaaaaagaagtggcaccttactttaaaaccaggtctgtctatgtgattttgtataaaaattgtgatagtccatggaaatgtgatggaaagaagctgttgtaactaacaatatataggacttcactggtagtacagtcttttccatatatacttaatcatttaattctacctgtgagccaaacatctgtaaattggagaggaaacagtgtccattcagagggtcattgttaataatatatgagtttttgtgagcattgcctaatagagttagtaccatgagcatgctagttgatatttatcatcatcatcattattccaaattttcatatgaaaaaagaagatgagcaaagtaacg

SEQ ID NO: 122195 - DNA, 604 bp, Homo sapiens
tatgtgggataaccctgtactttccactcagttttgctgtgaacctaaaagtgctctaagaaaataaaatttattaatgtttttttaaaaaatgaagttggatccctactctatcatattaaaaaataaactccaaatggattgaagacctaaatgtgaaagggaaaattataaagctaatgaaagaaaatattggagaatatctatatgatctcagtttctttaggcaagatcataaaagtgcaagccataggagataagttgatgaatttgactagaagaaagttatttctgctaaatgaagaattccaaaggtaagactaacctctgggtgccagaaaggaaaagatatttgtagatgttgaggtattcatgtctagaaaatcccccaaaacagcaagaaaaagacaataraatccactggcaaagattttgaatagacaatttgcagaaaggcaaacctgataaatttgtgaagatgatcaaatgtagtaacattaaaataagatactacattataagcatcagattggaaacagttagaaaatccagtaataacaagtactggtgaggatatggaggaaattaggaacactagtacatg

SEQ ID NO: 122196 - DNA, 557 bp, Homo sapiens
ttgactttcttgaaatgcatctcactttataatagaaacatccttcacatggagatatccagaaagctagggaaatgtacatcttaatctcatggcccagactcatccatttacaaacaaagcagtgaccaggacaaagaccctggaaaaagtttgggcccaccacactgtgagggtccagctccagggaggtctgttgtgctgcaccatggaggtggcaactacctggttttgctcttgttcccttacacagatgaggagatagagacttccccctccttccctctttttttcctctcttctcggtgatttctacctatcctaytttgtaaaggttttaagtgttttcaagggacacattctctgaagttcaactccctcatgtctcccagatgtgcaacatggaaatgtacatgttacattgtcaaccttaggatatagatttttacttatgtattgggttttaatttattccttgccaacttgaaaacaatttgcagtaccttgtttcacacagacgctccagaatgattcccaagtctcccaacataaacatg

SEQ ID NO: 122197 - DNA, 513 bp, Homo sapiens
gagttttatagttttgatgggaatagactcaaaatgcattttctcagaatataaaattctctcaggagttgaccaaatgaggaataaatagaaacttccgcaaccaagtgtaccaaagtcttggtctccactagcatctctgtaggtgaatgttggtcttcctcagggttctgggctcagtttgactctcactctcaactctgcacgctttccctgggtgacatcagccactccaaatcctttgactcttacctaggccagcaactcccacgtccacactcccattccctcccagctttccagagttacaatgscctatgtctaacgacccactagactgcccaccatcacaacctaagccacattagcctcagattctctcctgtccccaaaccctgttccttctcctagaacattggtagtagaatgatactaacatttggaggaataaggtacgaatcttggaatctagcacaggagactgaaaagtgaataggtaacaacagaactcag

SEQ ID NO: 122198 - DNA, 557 bp, Homo sapiens
ccttcaatgccttgataagaagtgtggatatcaccctggggaggggggatgaggcagtactgaagggcttgcgctaggacatttcatattcagatttatggtttaggaagatcaggctggaggttgtgtaattattgaattacagctttgccctaaaagccacatcagtaacaaaggcctgccttatttatatgaagactgatatttcacactagagcctgkcctcaaatcccgacccagggcagagttctttccatccttgggtacacttaccctacctaattaccaaatagctttctgggtctttcaaatgttggtgtgtcaaccttctaacaaaaactctaataaactattacccaaattcatcttctatgcctattaccctcactggatcttgtccagttccatcttcctccgcactctgtctcttgggtttcagaattattaatagaactccaacctcaatgagaagaccctgagtcccagctccatcctatggccagcccctgccatccacctgctatgtgttactgaaatgccccagtcttgctacacac

SEQ ID NO: 122199 - DNA, 598 bp, Homo sapiens
tctcgtactgtatttttcagctccatcaggtcatttatgttcttctctacactggttattctagtcagcaattcatctaaccttttttcaaggttcttagcttccttgcattgggttagaacatgctcctttagctcagaggagtttgttattacccgccttctgaagcctacttctgtcaattcatcaaacttattctctgtccagttttgttcccttgctggtgaggagttgcgatcctttgtaggataagcggcattctgatttttggaattttcaaactttttttgctggcttatccacatctttatggatttatctacctttggtctttgatgttggtgaccttctgatggggtctttgagtggacrtgctattcctttctgtttgttagttttccttctgacagccaggcccctgtgctgccagtctgctggagtttgctggaggtccactcctgaccctgtttgcctgggtatcaccagtggagactgcagaacacaaagattgttgcctgatctttcctctggaagcttcatcctagaggggcacctgccagatgccagccagagctctcctgtatgagatgtctgttgg

SEQ ID NO: 122200 - DNA, 461 bp, Homo sapiens
caggaaggtataataaagagaatccagtactctgaattgagagacttggctttgcattccatccttgcccctgattaattgaatgacttcaggagarcattttttctcaatttcttacactgtgatgtgagcgatgtccctgggcatttccctgccaacctagattcttaatgaaatagacttgagcccctaattttttggctggtgcatgtccaaaggagttcctagaaaggttgcagcctgccccactctgcttcttgggctctctccagcactgtatccacttgagccaaaacccaaataactaaatgagcatgtgcacacacacacacacacacacacacctctctctctctctcactacagcttcccaccatcttgctatttggctccatttctttctctccctctcatctctattccacactccctccatctcctaaaaccaggagttctaaacc

SEQ ID NO: 122201 - DNA, 657 bp, Homo sapiens
taaaataatacaatgccttgcaaattataaatgctgtagaaatcaagggatcacactactattggtatgctcaaactctaatttccttatcattatggaagtaaactagctcttgagaacttggagtttttattattaaaagttaattaagaagatcttcattagcatgtgcaatcaagttcactgttctaattggttcactgaaatttcactgctaaaatagcatggaaggaaccacaataaaatcctgaataaatgttaatttcatagcaccaaatgtattaaggaccaaacaaaagatttatggccattgacattactcaactcagctgtctgcttctgatgatcacctacctactgatgcaagaatactacaccaactccagtgcttcaaccatcacctttgataagatgctcacaaatgaacatatgcagcccacacctttctcctgrgccttatctcaaatccttaactgtttgaaatcatctgagttcctgacacttaccagtcctaaagtttaattcattgcaattgtctaaatttaggctggcttatttttcattaataatgtcatcattctctcaattacccagctcagtacttcatccgttcttccttcaaaatatctttcaaaaattttccttttattctgacca

SEQ ID NO: 122202 - DNA, 591 bp, Homo sapiens
gggtgggctcagtctttctaatatatatgtgtgtgtgtgtgtgtgtgtgtgtgtgtgtgtgtgtgtgtgtatatatgtgtatatatatatgtgtgtrtatatatatatatatatatatatatatatgctaatggcactcaagtgtatatcacatagagcttacttttgagaaatgtgtaccttgcatctcacccgagtactttgaagcatctacacttcatatgtaccacacggaaattatcattttcctacattattgaagctctacctgatccagttttttcccatatcggtgacatattttacctacttaaggtccaagctgtaaaactgaaaatcattttggtagtttcctctctcaacttttacaccaaatccactgatactttctgtcttttctagttcctaaatctataggaagtctgaccatttctcaggatctctgcaaagtggctgcattgtcttttctattgaaatgctaatcatattggggttctttaattttcatgcacttgtcaagcactatgacaactatgaggatgctgtagggagaattaaatcaaatttattcactcaaaagtttgacagctt

SEQ ID NO: 122203 - DNA, 601 bp, Homo sapiens
agacaagaaattactaagagtaattgtaaacaaaagcagtctgttagtgttattctatgtcatcatgaaaaccaagatctgcaatactttttacctctttcaccaaggttgtctttcctaaaatttttccctctcaagtctgccaagatcaaaacatctcattatttgaattaagcaacccaaattgtatgattttgaaaaaagttgtgtttttggtttccccccagartcagatattaggtatattaaacagtaaattaaattttatttacatgaaaatttttaaaaatccaagtgctaaccaagactttggttttaccaaaatttatattaatgttttttctacctgtatgtttacagattatttcccactgccattctgtaagtaaaacaaaaagagtgaaagaaagaaaaagaaagaaaaaaacaatccagaccagcctggtcaacatggcgaaaacttgtctctacaaaaaaatacaaaaagttagccaggcatggtggcacatacctgtaggcccacctactagggacgctgaggcaggaggatcatctgagtctaggaggtcgaggctacagtgagctgggattgtaccactgc

SEQ ID NO: 122204 - DNA, 620 bp, Homo sapiens
gctgttaatctgataggttttcctttatagtttacctggtgcttctgtctcatagctcgtaagtctttcctttgtcttaacttttgataaccctatgacaatgtgcctaggtgataatctttttgtgatgaatttctcagatgttctttgtgcttcttgtatttggatgtctaggttgctaccaaggccaaagaagttgtccttgattatccccccatatacattttccaagcctttagaattctcttcttcctcaggaacgtcattattcttaggtttggtcatttaacagaatcccagacttcttggaggctttgttcatatttacttactcttttttctttgtatttgttggattgggttaattcaaagaccttgtctttgagctctgaatttcttttttctacttgttcaagtctattgctgagactttccagagcatttcacatttctaaaagtgtgtgcaaagtttcctgaatttttttgtttttcctttcagctacstatttccttgaatatttctcccttcgcttcttgtatcattttttggatttctttgcattggtctttgcctttctctggtgcctccctgattaacttagtaaataaccttctgattt

SEQ ID NO: 122205 - DNA, 633 bp, Homo sapiens
tattattattattattattattattattattatgagacgagtctcgctctgtcgctcaggctggaatgcagtggcgcgatcttggctcactgcaagctctgcctcctgggttcacgccattctcctgcctcagcctctggagtagytgggactacaggcgcctgccaccatgcccggctaattttttgtatttttagtagagaagaggtttcaccatgttagctaggacggtctcgatctcctgacctggtgatccgcccacatcggcctcccaaagtgctgggattacaggcctgagccactgcgcccagccatcatattatttttataagcatttctatatgtgtctctaatgcaagggtcagcaaactatagcctgcaggtcaaatccagcctgcttccttcctgcttttataaataaagttttattggaacctagtgacagtcattcattaatggattgtctatagctgcttttcccagcagaattgacatgctggtaatagagaactcatgagctgaaaagcttaatatttttactatctatctttttttacagaaaaagcttgtcaatccctactctaaagatgaagaatctttatggggaaaaaaaaagacctagcataacacacc

SEQ ID NO: 122206 - DNA, 633 bp, Homo sapiens
tattattattattattattattattattattatgagacgagtctcgctctgtcgctcaggctggaatgcagtggcgcgatcttggctcactgcaagctctgcctcctgggttcacgccattctcctgcctcagcctctggagtagctgggactacaggcgcctgccaccatgcccggctaattttttgtatttttagtagagaagaggtttcaccatgttagctaggayggtctcgatctcctgacctggtgatccgcccacatcggcctcccaaagtgctgggattacaggcctgagccactgcgcccagccatcatattatttttataagcatttctatatgtgtctctaatgcaagggtcagcaaactatagcctgcaggtcaaatccagcctgcttccttcctgcttttataaataaagttttattggaacctagtgacagtcattcattaatggattgtctatagctgcttttcccagcagaattgacatgctggtaatagagaactcatgagctgaaaagcttaatatttttactatctatctttttttacagaaaaagcttgtcaatccctactctaaagatgaagaatctttatggggaaaaaaaaagacctagcataacacacc

SEQ ID NO: 122207 - DNA, 524 bp, Homo sapiens
aaattttaatttatattacatttcctgaatatgatacaatagggtggttatataatagaatgtctttgcttttagcaggtaatataggctgaagtattcaggaatgaactgtaaagatatctgaaactatctttaaaatggcttaatttaaaagtatctgtgtgtgtgtgggtgggtgggtgtgcrtgcatgcgcacatgtgtgcacatgtgtcggggggtggcaaatactgcaaaatgccagtaattggtgaacctggatgaggagctctaaaaccagtttgttgttctattgtttcagcctctctacaggtttgaaatttttcaaagtaaaattgagaaaaacagcaaattaaccaagataatgttttcaatctaaatagtactctcattatagttgtaccaggtttaagttctctttcttttgccaggcatttggaaatatgtcacttagtggacataatttgacctgttttgcttcaccatgcgctttcccacattattaaagcacttctaattaaaaac

SEQ ID NO: 122208 - DNA, 524 bp, Homo sapiens
aaattttaatttatattacatttcctgaatatgatacaatagggtggttatataatagaatgtctttgcttttagcaggtaatataggctgaagtattcaggaatgaactgtaaagatatctgaaactatctttaaaatggcttaatttaaaagtatctgtgtgtgtgtgggtgggtgggtgtgcatgcatgcgcacatgtgtgcacatgtgtcggggggtggcaaatactgcaaaatgccagtaattggtgaacctggatgaggagctctaaaaccagtttgttgttctattgtttcagcctctctacaggtttgaaatttttcaaagtaaaattgagaaaaacagcaaattaaccaagataatgttttcaatctaaatagtactctyattatagttgtaccaggtttaagttctctttcttttgccaggcatttggaaatatgtcacttagtggacataatttgacctgttttgcttcaccatgcgctttcccacattattaaagcacttctaattaaaaac

SEQ ID NO: 122209 - DNA, 611 bp, Homo sapiens
actgagagtggcgttaagcccctaagtttgtgtcacactctcacctaagtgagaacttgtccataaagggggaattttaaaaacaaaattctagggcggtcattgttttggactaaggtcatgcactaggccccaacaaaccaaaccaaaccaaaatggagttgcttgtgctaagactttaaggaaacacatagattctagaacagaccaggttttgttttttctcttgcaaatctctataatgaaaatttctaagagcggaggtatctgccccctgaagttcccattaaatcttttaaccaaattcatttcctcttgcctagagaccttcaagcttcagataatcatgcaacaaaggttccagccaattccaggtgaagacaccgccccaatgccatcaagaarctactccacctccactagacagaacagggtgagagttccatgatccccaagtcaacatgaagcagttacagaaaaaagaccatcagtccctctgcctcccataaagacttatggagatcacatccctcacgggggagatgatgcagaaaaataggttctggaggcagagaacataaggccaattcacacttcagctatgagaggaa

SEQ ID NO: 122210 - DNA, 509 bp, Homo sapiens
actaatgtttatttaataagtattacaagtgacatcctaagggatttacatttttatttaatccttacagcaacccagtggaataggtttttattatcagcattctaaatgcacacacaaaaaaatcaaggttaagagaggctaataaatttgcccaagacaacaaaactgataagtgaataaaatagaattcaagccaaatagagggaggaaggcgaatgaagtcgctccaactccctacatgtggggtctccaaggctgactgcttgtctgaaccataagggtsaggtaccctctccaagggtcattttctttttaccacatcatgttgagcccggtggagcttgaaaaaaaaaagcttattatttgattgcctaataaggaatcaaatgaatagacaaagaacaaaaaaaaaatgagaattaagccaatgtattggcaggtcagaattttattgcttttgaccaaagtttgctgtgtgacttatagagcaagagtagatgccaagg

SEQ ID NO: 122211 - DNA, 499 bp, Homo sapiens
gaattctgttacgttggtttatccagaatcctcccttactcataatgtttcctcttagtaattttccatccactggcccccaccctgctccttggctgtaaattcccacttgtccatgctgtattctgagttaagcygaatctttctcccctactgcgaaattccattgcagtggtccccaaacctatagcaatggaccttaataaagtctttcttactatgctttaacaagcatcattgaataatgtttttttctttgacaggagtattgttggggagcaagctgatgaaaattataggaaagcaaaataacttcttcagaattaataaaatgatttaagtccaaacttttgaacatggctttaaaatcactctttgctatgatactttttgcccacttgcatttctcatacctctccacaaaacattttgaagagccacgtttctccagaaattcatgttcttattggactaaattgcttcagtgtcaagttttcac

SEQ ID NO: 122212 - DNA, 611 bp, Homo sapiens
gggtcaaagaagccaaaaatttctattaaatgagacatcttggcaaggtacatcaaaatagttcttatatttacacattctataatagcaactgacattaatttttcacctgacatatgaaattgtcttttgttgtcyccatgtgtttcctgaccaaaatatctttttcttagctgccacacatcttaatgtgtcaccttctttattgttcagctcatgtgattttcattatctatccctggtattgcaacaatacctcttcaatcctgactaccacactgacaccaacgtcctaaagtgaatggaacaaggtgctacactattcctgcttctagctacttatatccgctaatgtggagcggtccagggagaaactctgaccagcctgaccactgggaaaacagtgtggagcctcagaaagttcacccagattgcaggagggaggagcttggcctctcctattccagggtgggaactgggattcaatctgtgaggcgggaggccagccagcaggactcaggctttgcagagagtccctgtttccctttttttccttttcaccaaataaattccatgtttctcacccttcaaagtgtctgtgaacctaacat

SEQ ID NO: 122213 - DNA, 608 bp, Homo sapiens
ctattacttgaaaatctaatttagcaatatataaaatatttaaaataacatgatcaaataaattttattctggtaatacaacactggttcagcatttaaaataaattacacttgaagaaatgttactcatagagagactgaagaataaaaacaatataatcaactaaatacagtaaaatgatttggctaaattcaacatccattcttaataaatctctaattagattatagataaataaataataaataaaatagattacagataaataaatctctaaatagattaagaaagaaaggaacttcttcaacctaataaaaggtgtacaaaaaagacctagagatagtattgtacttagtggtgaaaggttcaatgtttttccccaaygactaaagacaagggaaatatatctagccttattattcatattcaacatcataataagtattgtagccaatataataaagcaagaaaaaatatcaagattggaaaggaagaaataaagccagggaatattaaaaaaaaaaacactgttgaaatcaataagtgaattaagcaagatgataaaagatctatataaatattcaataatatctcaatatattattaa

SEQ ID NO: 122214 - DNA, 610 bp, Homo sapiens
ctgtttggaacaattaatacaacattctccacctaatttcacccaggaccatgtgaggatagaccttccatagccattgaggaatgtgagaatgtaatgttcatcatagtctagacatgagacacagccctgccctatgttgtgaacaccaattgacatcccaaggaattttgatttggcccagacatgagcagtgaattgtatcttcttgttaaaatactcaacataaaaggctgaaatgggtggatgatgggaaayctggtcagccacgaatgttacagtatttttggaaacccagggaactggtctttctgaaactagttttgtgttctcttcagtatcatttggtagtgtccagtgacactgaaaaatcttgcccaaaatgggactgtatggctttttggcaactgaccctttccttcttgcatgaaaggctgagaggtatgatttcacaaccagaaccattctatccttgtgatccttctagtcactaatggacacaaacaggtcccagtgtgcaaaaagtctgcctacatttctaaaagagatgttctttcaagaataaaccttggaagaactaccttagtaagatccatcccaagcctaacct

SEQ ID NO: 122215 - DNA, 566 bp, Homo sapiens
tgtgattaggtttatgcatcagaaaagctaatctgaaattatatgcaggccatatcacacatgataaaaactggaggcaggaacactagcgaggaagctagtccagacaaatgagaggcaatgagtgcagaaattaggacaatggaagggagactgacatttctgagggctgactggaacatatgctctgtatatctgtcaataaactcttaaatttgagatactctccatccccaaacaacaaagttcaaaaaattaaaagctccttcatctccatccccaaggcactcattattcccatcgctggcatcatctccttcacttttctcaactcatcagtcactcactcctgttgattttatttcccaaacacttcttaaatcctttaaccattctgtttatattgcctatggagaagaagaaggaaacattatttagtgagcatagttaaccagataacwtgatccagtcctacccacagtgattaaattaattttaaatgatctttggtgagccacttaatcttgctgcattttcccccttatctgtcaagaatataataatca

SEQ ID NO: 122216 - DNA, 558 bp, Homo sapiens
tttgttgttgttgtctgttctttgagggtcatatccaaaaaatcctttccaagaccaacatcatgaattttttccctatgcattcttccggtagcttttcagtttcaagtaatacatttaattgtttaataaattttgattgacaaattttagaattgtttttctctttctgtgaaaaatataattgtaattatgattgagattgcattgaatttatagattgttttgggtagtagtgacatttataacaatattaattcttccaatccatgaacatgggtatctttccatttatttgtgtcttctttgatttctttaatcartgtgttacaattttcagtgtagagatctttaatctccttgattaaatttactcctcagtattatttctttgtaattactgataatgggagtcacttcttaatttctttttcaaatggtttattgttagtatatacaaacgctactattttcgatgttgaaaattctttaatattggataactcatcatgttatcggtggaaggtatccaacttaccagcagcaaatctggggtct

SEQ ID NO: 122217 - DNA, 516 bp, Homo sapiens
agaagcccaagtttcagagtaggagtggaaatttatttaaaaaggctttagaacaggagagaaagtacagtacagttgaaagagaccctagcacatgacttgaaggacaattgcaatttttaaccatgatcctgggactttataggctggcctctttcccatgatttttcccttagggtgggccgcccacatgtgcagtgtcctccttactcttgggaggtgagcacgcacactgtgtttaggaagtgtaggcatgcccatctgaggctttcttcctttgctgtggtgtgcctccagaaggtcatactctgccattttgtctcttcatgtgtaggcccaggaatttgcttttccttggtgtctgcatgcaattaacactttagtaccacakgtgtgcaccatcaggaattggcccctccctggctcaggctgccaatttatcacttttatagataatatgataattgccaaacagtcacctgacattcccagtgggtcaagggagagccctcccct

SEQ ID NO: 122218 - DNA, 521 bp, Homo sapiens
cagtggattccacggctgtgcaaaaattaagtttgtaccctgctctatgccctggctgtcaagaaaaagaacagtctgacttttccatgaccttgtttggctttaaagttcccagacagagggttactcagtactgtatttgtgacttcagccttgagccagatatgttgtgcctgtggggtgggcactgttgtgttttgggtcaccaggccagctgtagcattgacttcaaaatcttcagagcatgaatcctattttcttcctttttcattcttttatcagcttctatcaccacctgctcactgtaaacagtgatttcccttgcttttatttsgctgctggccgatatgtatagccttgactggttttcttttggatcagactttcccttatctactatgttgctgttttattatttattgccagaagtgttctgtccagatgtgctttgcagatgaaaatatatcacatgaaaaatagcatgttctagtcattcttttcaaataatcatgatctttgtt

SEQ ID NO: 122219 - DNA, 521 bp, Homo sapiens
cagtggattccacggctgtgcaaaaattaagtttgtaccctgctctatgccctggctgtcaagaaaaagaacagtctgacttttccatgaccttgtttggctttaaagttcccagacagagggttactcagtactgtatttgtgacttcagccttgagccagatatgttgtgcctgtggggtgggcactgttgtgttttgggtcaccaggccagctgtagcattgacttcaaaatcttcagagcatgaatcctattttcttcctttttcattcttttatcagcttctatcaccacctgctcactgtaaacagtgatttcccttgcttttatttcsctgctggccgatatgtatagccttgactggttttcttttggatcagactttcccttatctactatgttgctgttttattatttattgccagaagtgttctgtccagatgtgctttgcagatgaaaatatatcacatgaaaaatagcatgttctagtcattcttttcaaataatcatgatctttgtt

SEQ ID NO: 122220 - DNA, 589 bp, Homo sapiens
cagtctcatgttttctgtcagcatttatataactgaggcaggttaacttgctaacttacaagcaaggtaaatctcagatcattctcatttttctgacactttctagataaataaaccaacatagaggcttctagaaagatgtgcaaagaaagaagtttgtggcaataatttttttgacatctgtatcaaattgtgccttaattcagatatctctrtcttactcagttaaatgagccaccacattttccttaagttttcttaaattatgtttccatcacttgcaaccaaaaaaaatcccaatttatcccaatatttgagaacaatctaaaaatttaacttaattcgatgcagaaatgggactactgaaagattagattagatatggatttctagcatagctgtgaatttaactggaagcgaatgaaaacaataggatttttccattagactacaatattttacacacatttaattgttgagtattaatatggaatttcattccggtgcattgtatgcatgtactcaactagcaaaaaaaatatgtaggtctttaattgtcattagtttttagaagatgaaggacagatat

SEQ ID NO: 122221 - DNA, 589 bp, Homo sapiens
cagtctcatgttttctgtcagcatttatataactgaggcaggttaacttgctaacttacaagcaaggtaaatctcagatcattctcatttttctgacactttctagataaataaaccaacatagaggcttctagaaagatgtgcaaagaaagaagtttgtggcaataatttttttgacatctgtatcaaattgtgccttaattcagatatctctgtcttactcagttaaatgagccaccacattttccttaagttttcttaaattatgtttccatcacttgcaaccaaaaaaaatcccaatttatcccaatatttgagaacaatctaaaaatttaacttaattcgatgcagaaatgggactactgaaagattagattagatatggatttctagcatagctgtgaatttaactggaagcgaatgaaaacaataggatttttccattagactacaatatttyacacacatttaattgttgagtattaatatggaatttcattccggtgcattgtatgcatgtactcaactagcaaaaaaaatatgtaggtctttaattgtcattagtttttagaagatgaaggacagatat

SEQ ID NO: 122222 - DNA, 596 bp, Homo sapiens
tgccccatgattcaattacctcccactggttcctacccatgacacatggggattatgggagctacaattcaaaatgagatttgggtggggacacagsaaaccatatcaagcatcaacaacaatctgactttgaatacaatttttatatatttatcaagaactgagcatacatattttagtgatacatgattttcttaagtttattatataaaaaattcctgaaaaataagaaagtgtatattattcaacagagttaaacaatttaacatgtattccatttttttgtgtgtgtggatggtttccacaattacacaaggtacaagagttaaatacttgacttttgattttctaaacaaaaaatgtagattcttccttttgcttatttaggagacagacaaatccatgattctaaaaatcttcaacagttctctttatatcttcacatgtaattttaacattttgatatagtctatctatattgcatatgaaactgcaaaatttgaagaataaaaaggatctattcaaattatctgctattacatgaacaataataatggtaataaaaagaataattatgcaactgcatgccactcaaa

SEQ ID NO: 122223 - DNA, 633 bp, Homo sapiens
gtgtgtaaaatgtatctcaccgtggtttcagttggcatattgctgattactaataaagttgaamatctcttcaaaggctgtttatttttcttctttctgttaaatgtctattaatgtatttttccttcttctctattgggttgtcttttattattgctttaaaattcttttaatgttgtggacattatcctttttcagctgtgtgtgttgtaattgttctcccactttgtgacttgatgtttcctctgttttaggggccttttgataagtttatgcagtcatatttatctctctttcatcatgttttatgattttgatgtgttgattaagaatccattcctatgcagagattacatattacttctaaaaatattgaagtcctgcctttcatattgaaatattttgtcaagaattgatgtttgcatataaaattaggaaaaaatcctagggggtactatgggagtcacctgctgctcacttagttaccattcagagatcctaatacgcatgccctgagtatgctaagcacagaggactggtgtcagagtcacacctaagtaatctaagaagagacgttgctgtagtggcctctgatagcaaagtagactttgtgcagggtatctgatgagatct

SEQ ID NO: 122224 - DNA, 530 bp, Homo sapiens
agttgttcaatggatgtgaaataaaggaacataaatatgacccttgcttttatcttccttgggcatcccaggctctggcatttagatcaaatggttacagtctatagaagttgattctgtagactgtggtctgggagcacagggcagaagctcagcccaatgattgcccttcagtgtgtcgaacgccctgtgcttcactaccaggctttttgatgtggctgagaaagtttacgttcaatctcaaaatgctctccttagggaacatctaatacggtttccttgagaaaataaattaatttctcaggtttggcattggcaagtgtcccactcactgcccrttaggaaccctgctttccaaacctatactcctcttactatgtcatcctgatgccctgtttagttgcttctcataagaatagaaatggtagccggccctggtggctcacacccataatcccattgctttaggaggccaaggcaagaggatttcttcagaccaggagttcaaaaccatcctgggcaacttatca

SEQ ID NO: 122225 - DNA, 530 bp, Homo sapiens
agttgttcaatggatgtgaaataaaggaacataaatatgacccttgcttttatcttccttgggcatcccaggctctggcatttagatcaaatggttacagtctatagaagttgattctgtagactgtggtctgggagcacagggcagaagctcagcccaatgattgcccttcagtgtgtcgaacgccctgtgcttcactaccaggctttttgatgtggctgagaaagtttacgttcaatctcaaaatgctctccttagggaacatctaatacggtttccttgagaaaataaattaatttctcaggtttggcattggcaagtgtcccactcactgcccattaggaaccctgctttccaaacctatactcctcttactatgtcatcctgatgccctgtttagttgcttctcataagaatagaaatggtagccggccctggtggctcacayccataatcccattgctttaggaggccaaggcaagaggatttcttcagaccaggagttcaaaaccatcctgggcaacttatca

SEQ ID NO: 122226 - DNA, 530 bp, Homo sapiens
taactcccttcaagaggcaagcagggataggccagctgtgatggctcatgcctgtaatcccaacacttcgggaggctgaggccggcaggtcatcaggtcgggagttcgagaccagcctggccaacatggtgaaaccccatctctactaaaaatacaaaaattagctggcgtggtggtgggtgcctgtaatcccagctactcggggggctgaggcagaagaatcatttgaacccgggaggcggaggttgcggtgagccgaggtcgcaccattgcactccagcctgggcaacagagcgagactccatctcaaaaaaaaaaaaaaaaaaaaaaaaaggcaagcagggacatgggatagtggtgagcacrtagggagacgtatatccgtggtaaatttttaattcttgagtgaggctggcttagcagcgtttgttatgcaataaaaataaataatgaaagtaaaagacgggctacgtaaggactgatcgtgattatgtgtcacgaaccgaggactatgcctggtacagtgcctc

SEQ ID NO: 122227 - DNA, 549 bp, Homo sapiens
atttctctaaggagctggtggggagctgctccatcaagcatgggcttagcgttctcagttttgtgtcactaaggtgattgtgtcatttattgcccaaactgggacactagaaggtgaaagrgggtgctattaataaacatgaggtataagccaggagtgttttaggcaaactggcatataaggctacacgctagcttggtactaagaactcgcttgctacagaaacctcaaaatgtaaacccagaatcccccaggattagagctgtgctgtcaaccatgttattaaaacagggtaattgtgctttcttactttctacaaaacagctaatgccattagctctgaaatagaaacctgtgctaaatgcatcttttatgagatgcagggccttttgtactttccccggctgatttgctaggtgccaaacaccatttctgggcggaagagtacctggggcatcctttgccaacgtgaccgaggcacgccgagacccaacctttgttccgattgcctctcttaggctcttccaagtcaatgtgtggggggaattc

SEQ ID NO: 122228 - DNA, 609 bp, Homo sapiens
gcatttagtgctgtaagtttccttttcagttttagctgtgtcccagacattttatgttggattttcactttcattcagtttaatgtatttttaatttttcttgagacttccttttttgatttatggattatttagatgtatattgcttagtttctaagtatttggaagttttcctctcatcttctgcttttggtcctctgacacatacatattctgtatgattttattttttaaaaactgttgaggtttgttttatggcataggacatarcatatcttggtgtatgtttggtgggcacttacaaagaatgtgtattctgttgttggggtgagtgttctaaaaatgtcagttagaacttatttgtttgtagttaatatgatttggctctgtgtccccacccaaatctcaccttcaattgtaatgcccataatccccacttgtcaagggcatgaccagataaaggtaattaaatcacgggggtggttttgcccatgctgttctcgtgataatgagtgagtctcatgagatctgatggttttataagcatctggcattttccctgcttgcattcactgtgtccagccatctgtgaagaaggtgcctgtttct

SEQ ID NO: 122229 - DNA, 464 bp, Homo sapiens
gggggcaagttccagccacccttccgggtcaagaagcaacgactcctggttagggggaaacttagatttttcttttgcatggaactgctgctgtgcaagatttgccaaggcttatagggtttcattttttacttgactggtgtttgagaaaaactgcaaggaaagggtggcgaaaggaagaaacactataaactttgggggcggggacattttcttggaagtgacaagtagcctcagatctgcagttcctgggccagcgacggcatcctttgctctgacactccaagggtctggacgctgccacatgaccaacaccaaagaccccaaaagagccatggaatccacgctggcgacatccarttctgccacaggccccgtcaccttctcccacgtctttggtcagcagtgccaacttatgcaagcaggtaggaattgcgtcgtgtgtcatgtgcccagagaatggg

SEQ ID NO: 122230 - DNA, 584 bp, Homo sapiens
taactgttagaattaataaacagattcaacaaagttgcaggatacaaaatcagtgtacaaacatcagtagcatttctacatgattaataggaactatctgaaaacgaaatcaagaaaagaatcccattcacaagaggtataaatattaagacacctaggaataaatttaatgaaaaaaatgaaagatcttttcactgaaaactataaaacatttgtgaaagaaactgatattccatgttcatagattggatgaattaacattgttaaaaatcatactttctaaagtgatctatggatttagtgcaattcctttcaaaatatgaatgattttcttcaaagaaatagaaaaacaatactaaatgtcatatggaaccacaaaagtcaccaaataaccaaagcratactgaggaaaaaaagaacaaagctgaaggcatcatactccctggcctcaaaaatatactacaaagctaaccaagcaacacagagctggtataaaaacagacacatggaacaatggaaaaggatagagaacccagaaataaatccacacatcaagagccaactgatttttttacaaagtgcca

SEQ ID NO: 122231 - DNA, 588 bp, Homo sapiens
gagataggaattgtgaggctggaattctctaagattatttatgtctagtaagagaatagcatgccctcgctgtgagagttaggccagctcatgaaygtcaggatttactctttcgttctctccatttacgtctatcatttgaaaatttacataattgtagaataagttttaaactttttaaaataagctttttaaattaatgggtctataaaatattgtacagaccatattgttgaaaaatggttatatacaaaatgaatcaaacttaatattttagtaaatactgcctctgcctactttatattttataaaataggatatcattaatagaagaattttggtgacaaaacatgtatttgatttacatttctcttcagatatatttatgcatagaataaaaatcttgacgaaaatgtctaaggaaatgttcaatatttttatattacctttttagggagctcatcttaataacttcatttcctaaagtcataaattttgtatctatttgtacataagccttctaacttttgctaacttttaatttttctattttacatagttaaattgcataagtcttctaatttttct

SEQ ID NO: 122232 - DNA, 588 bp, Homo sapiens
gagataggaattgtgaggctggaattctctaagattatttatgtctagtaagagaatagcatgccctcgctgtgagagttaggccagctcatgaatgtcaggatttactctttcgttctctccatttacgtctatcatttkaaaatttacataattgtagaataagttttaaactttttaaaataagctttttaaattaatgggtctataaaatattgtacagaccatattgttgaaaaatggttatatacaaaatgaatcaaacttaatattttagtaaatactgcctctgcctactttatattttataaaataggatatcattaatagaagaattttggtgacaaaacatgtatttgatttacatttctcttcagatatatttatgcatagaataaaaatcttgacgaaaatgtctaaggaaatgttcaatatttttatattacctttttagggagctcatcttaataacttcatttcctaaagtcataaattttgtatctatttgtacataagccttctaacttttgctaacttttaatttttctattttacatagttaaattgcataagtcttctaatttttct

SEQ ID NO: 122233 - DNA, 588 bp, Homo sapiens
gagataggaattgtgaggctggaattctctaagattatttatgtctagtaagagaatagcatgccctcgctgtgagagttaggccagctcatgaatgtcaggatttactctttcgttctctccatttacgtctatcatttgaaaatttacataattgtagaataagttttaaactttttaaaataagctttttaaattaatgggtctataaaatattgtacagaccatattgttgaaaaatggttatatacaaaatgaatcaaacttaatattttagtaaatactgcctctgcctactttatattttataaaataggatatcattaatagaagaattttggtgacaaaacatgtatttgatttacatttctcttcagatatatttatgcatagaataaaaatcttgacgaaaatgtctaaggaaatgttcaatatttttatattacctttttagggagctyatcttaataacttcatttcctaaagtcataaattttgtatctatttgtacataagccttctaacttttgctaacttttaatttttctattttacatagttaaattgcataagtcttctaatttttct

SEQ ID NO: 122234 - DNA, 595 bp, Homo sapiens
taattctccctgaatttaatgtcagatctcacacattacaagactcggtcccacaagactgacctcactttggacaccagtcacaagtcccaggtcattcatccttacttctgatcaactggctataagtcagggcttctcatgacccctttctcaggcttgatatatgctagaatggttcacagcactcaggaagtcactttagttatatttaccagtttattataaagggcacagaataatggccagatgaaatgatacatagggcaaaggatcctgagtgcgaagcatccgcacctgcagacttgtggtgyaccactctcctggcatgcggatgtgttcaacaattgggaagctctcagatccctgtaatttaggaatttttatggaggtttcatcacatagtatgattgattaccttattggccattagtgattatctcattcagcagctccttgcccctcctcagggattggacagtggggctgaaagttctgagcttctaatcaagggttggtcttttgggcaacaaagctcccctcctgaagcctgccaagagtgacctcattaagacaaaagtttcttctatcatcc

SEQ ID NO: 122235 - DNA, 576 bp, Homo sapiens
aaatcttaggaaattttgcaatacaaagcaattgtccaattgtccatggcaaattgaaaacactcaaaattagtaaacagaaagcatgtctgtttgtaggcattgtaattacacatcaaaattgtcctttagcgtccctgacctgagaatccayggttgtttacattcaatgtaattaagcttagtatactttcttttttgtttaacatttttggaccaaataatttatttttctaaatgggcatgttaagtattggaatcatctcactttttggaatctgtatggactttgagatcattttgacaagactttgcaacatagaattcttcaggtttccttcactttctttaaaaccacaatcactgggggcaattaacatggatatgagttctttgtgccatagagtgagttgctgagaaagagatcctactcatccattagatacacaattagttttggacaatgtaattcctaaattctaaagtctcctttaaaatccattaagatatactatcctcccaaactagttagtttcactaagaaacagttttacaacctatccaattaatgaataa

SEQ ID NO: 122236 - DNA, 370 bp, Homo sapiens
gtaccaattttctgtcatagtctgtttyctgcttctataacagaattccacagactgggtggtttttgtaatgaatagaaatttatttggctcacagttctggaggctgggaagctaagagcatgatgctggcatctcgcgagggattctgtgttgtaccataatatggtggaaaggcaagtgatcatgaaggacagacagaaaaaataggactgaactcatccttttgctcaagaatgcatgatctcagtaactactccagagataatggcattggtctattcatgaaggcagagcctcatgacctacttaaatatctcactttttaatactgttacaatggcaattaaatgtcaatatgagttttgga

SEQ ID NO: 122237 - DNA, 598 bp, Homo sapiens
tgaacccatgtgggttcaaacccgttattcaagggtcaactgcatactgaaagtggagggatggaaaaagacattccatgtcaacagaaaccaaaagcaagcaagagtagctatacttaaatcagataaaacaaactttaagtcaaaaagtgtaaaaagagataaagaaggttattatataatgataaaggggtccatctggcaagaggatayaacaataataaacatgtatgtacccaacaccagagcactcagatatataaagcaaatactatttcatctaaagggagagatagactgcaaaacaataatagttggggaccccactctcagcattagacggatcatctagacagaaaatcaacaaggaaacattgaatttaaacttctttagaccaaatggtcctaacagacatttacagaacattttatctaacagctgtagaatgcactttttttttcatcagcacatggaacattctccaggatagaacacgttaggccacaagccaagtctcaactaatttaaatgaattgaaattatatcaaatatattttctgaccacaatggaataaaactaaaaaccaataataagag

SEQ ID NO: 122238 - DNA, 559 bp, Homo sapiens
atttgggaatctatgtcctagcttgtttgtcattttgcatatctctaaatatactataggatgaattttgagaaatagaattgcctagtcaaagagtatatttacaccagaaattttgctattgccaagttgttcttgaaagagaatgtgccaatttatacaccacctcccaccacaatatctgagactgtttccctatagcctcaccaatatagtgcgttattaaacttgtgattttgttaatctgatgggtaaacaatagtatcgcaatgaagtttaaattttgttttctcttatttgagggaggctgaatatcttttcgtttccaagagccatttgtattttattttttatgaacaatcctttackcatttgttttcttctggatgttgctaccacactggttgatctcagtctcttggctgggtcttcctcttttatagatctctaaatgctggaatgtcccagtgctctgtctccagcttttttttttctttatttttctcctaattatcaaatgagtttctcctattctatataagtttctcctcttctatat

SEQ ID NO: 122239 - DNA, 605 bp, Homo sapiens
aagaaaaaaaaaagaaacgagggtattttttctctgacccgctatttatattctacccctattcagcagcagttagaaactatctggtattcagaaggaaagaactgcttcttccttccttgcaggcttaagttcaagcaaatgtcagtgcatctagtgcycttgcctaggaaataacaagattgcaagtccacaggaacaactgggttctcccgggtcaaaaggagatgatgagagtggaggtcaagaattcttcatgttaaaagatattctagcattaaattcagaagctaaagtgcttatttgcaattattgttaattgaaacaacaacagtaacagcaataataaggatgactctgaaatttactgaggaaacaaagataccagatgtttaaagtgcattattttattttgttgtataatataataggtagtattttgatattgttaaaattccaaaggggaaatggagaaacagaagttaacttactggaccaagggcacacagctggttggtggcagagtttgtgttagaaccagatctgcctgactcctaagcaccatactaggaggtatcacatgcatatactgttgtgatataggt

SEQ ID NO: 122240 - DNA, 605 bp, Homo sapiens
aagaaaaaaaaaagaaacgagggtattttttctctgacccgctatttatattctacccctattcagcagcagttagaaactatctggtattcagaaggaaagaactgcttcttccttccttgcaggcttaagttcaagcaaatgtcagtgcatctagtgctcttgcctaggaaataacaagattgcaagtccacaggaacaactgggttctcccgggtcaaaaggagatgatgagagtggaggtcaagaattcttcatgttaaaagatattctagcattaaattcagaagctaaagtgcttatttgcaattattgttaattraaacaacaacagtaacagcaataataaggatgactctgaaatttactgaggaaacaaagataccagatgtttaaagtgcattattttattttgttgtataatataataggtagtattttgatattgttaaaattccaaaggggaaatggagaaacagaagttaacttactggaccaagggcacacagctggttggtggcagagtttgtgttagaaccagatctgcctgactcctaagcaccatactaggaggtatcacatgcatatactgttgtgatataggt

SEQ ID NO: 122241 - DNA, 567 bp, Homo sapiens
tttctcccaacatttatttctctgaacatgctccccatcttcttttaatttctctctagggacagatagggcagaactggtgaattgtaatgggtcttgggatcaccttaatagaaaaacagacacctccagattgaggaggctgtgtcagattctctcaaaaggatttcgctaagcagtctccgagtaagtcattggaagggccgtaaatgggaatacaaatgagctcattatcatgtcaatttcccatcctatatgactgcttgagttttgcaggtgccatagggtctaccaaatgttcaccattttttctcctcagtagtagcataggctgccagataaagccattatcccagaattccgtctaacttcrtttcctgaaacatcacttttgtagggaaggagaaaaggaattaccgtctatggagcacaaggtattctagggttatttccgtttggaacctgacaaagaaattatagaattatttgagaagaggtaatacaatgaaatggaccaagttaaagttgcaaagagcaactaaaacacccaaacaaataaaaccctct

SEQ ID NO: 122242 - DNA, 606 bp, Homo sapiens
tgaacctgtaaattgcactactcctgaacctgtaaattacacaactatgacaatatagcctgctacatggtaratgtttaataaatgtatttggacaaaactgagcaggtgtagtggaattggtgggataattttctccctactttcaatttctatctgacttgcgcaggcatttgtttgttacagaccacattcttgtgattgttattgtgatggtcttagttctccaaactacactacaagtctcttgagggcaagacaacatattcttcacaataataatagatgctgtattatgctccatgctttatacatttttaatccttataatggatctgaaagggatatattagcatttccatttttcgaatgaggaaacaaatgcaaaggtgaatgacttgcctgtggctaccaagctaacagtgggagattcaaacaccttctgtctgcctcacatttttccactttgctctgctgaaagccaaacacttacattacccagctctagagatttagcatggtctaggatacttgaatattattgtctcagttactcttcattcagagctctctctcctggctagactggtgaaaatcatagagctc

SEQ ID NO: 122243 - DNA, 601 bp, Homo sapiens
agtcttggaacatgtccggggtccagggtctaaaacccctcgtggcctttggaatatgtccagacttgctggctccttgcttctagcactcccattatctcaagtagtcatatgtttcaaagaaaatgctaaaccatcacagctgtaactcattcgcttgatacaccacttcctttcaacctccacatcctcaccacctgtttctttgtctgatcaccaataaatagtgtgggctcccacagctcggggccttcacagcctccatactagcgttggtcccctggtcctactttctctcttaacttgtcttttctcattcctttgactccaccggacttcgtagcccccacggcctggtgttgagtctgatcaccccarcaagtagagacatggaaactattaaatccaaatccaaatcaaatttatatacagatggaaactgcaatgtctgagaaaaattaactggatggaaataacaggtgagacacagcagagcaaaatattggtaaatttgaaaacaatgcaatagaagccaaaataaaacacactaagaaaaagaaaacataaagaaaaaagaacagagaatagaatatcagtaagc

SEQ ID NO: 122244 - DNA, 609 bp, Homo sapiens
tgtcatcactttaaaataatgagttataatatttgcaatcctcagggtaacctcaaagcaaaaaatatacaattgatacacaaaaaataaaaactgagaaattaagttataccaccaaagaaaatcaccctcactaaaaaaaaggcaagaagaaaggaggargagaggaccacaaaacaaacagaaaacaaataacaaatggcaagaagaagtccttatcaataataacattgaatgtaaacagactaaactctccaataaaaagacacagagtggctcaatggatttaaaaagacaagattcaataatctgttgcctgcaagaaacacacttcacctataaagatgcacacagactgggaaaaaaaggttagaaaaaagaaatcccatgccaatgggaaccaaaacagagcaggagtgcatatgattctatcagagaaaatacatttcaagacaaaaactgtaagaagaggcaaagaaggtcattgtataatgatttagggatcaattcagcaacagaaataacaattgtaaacatatttacacccaacattggagtacccagatatacaaaggaaatatttttagagctaaagggagagactccaat

SEQ ID NO: 122245 - DNA, 609 bp, Homo sapiens
tgtcatcactttaaaataatgagttataatatttgcaatcctcagggtaacctcaaagcaaaaaatatacaattgatacacaaaaaataaaaactgagaaattaagttataccaccaaagaaaatcaccctcactaaaaaaaaggcaagaagaaaggaggaagagaggaccacaaaacaaacagaaaacaaataacaaatggcaagaagaagtccttatcaataataacattgaatgtaaacagactaaactctccaataaaaagacacagagtggctcaatggatttaaaaagacaagattcaataatctgttgcctgcaagaaacacacttcacctataaagatgcacacagactgggaaaaaaaggwtagaaaaaagaaatcccatgccaatgggaaccaaaacagagcaggagtgcatatgattctatcagagaaaatacatttcaagacaaaaactgtaagaagaggcaaagaaggtcattgtataatgatttagggatcaattcagcaacagaaataacaattgtaaacatatttacacccaacattggagtacccagatatacaaaggaaatatttttagagctaaagggagagactccaat

SEQ ID NO: 122246 - DNA, 598 bp, Homo sapiens
ctcaaagccaggagcagcaacgtttcctcctccaaggagtctttcttatatccctatatgctctaagaagggtgccctttctagttgcctgtataatgttttgaatgtacctgggtcatagcccttaccacatggcattgaagctaattgtctggtagtgttttcccactaaatttgtaggttcctaggagcaattgtattgccttattcttcrtttttttcagggttcagcacaagggaggcactcagtaagttattagccaatgaatgtggagagtaaacatggtttcctggtgtatctttagaacctcagtagagaaagtcatttcttcctagatgattttcaacaacaggccactagagacttaggcatctggctttttttttttttccccagattggtctgctgaagacccaccagagtcccaaggtgaaaacaacaattatcctctgttggttacttcagctaatggcgggagtcatgtatgttgggtgcctaaaagcatcagacagcaataaacttaaaatgatactacctttttgtcccagagtagtcaatgattaaataacaaactaattgaccacattcaacatataa

SEQ ID NO: 122247 - DNA, 574 bp, Homo sapiens
gatttaagtaacgagactgctgactcgggaaatcagagtcttttgccattcattgacygactgagttaagcataaaactgaaatgattttatggaccattctttttggcaatgtcgatcctaaatctgatatgaaatggggctgccattacaattgttttgaaatacaactaactgagtactttgagggattttgcttttcattttattttttcaccaatggagtagattcgaatgatgtagattgtaagagaagttaaaagactttcaatattgattctaagatgatttgctttttatttttttataattataggcatttgaatattttgcaatatttcttcataaatgaacatcttttaaaaaataaattccagaccttagacaactaacctaatgggctgggagaagttatttaaactttaggaactagctactgtgcaattcaagtgaaagaaacaatgccaataattcattagtgattgctagtgaaactaagttcattctacagagatgataaaaacctggactataaatcctcaggcatttgaaagtcatcatatacttgtagaaag

SEQ ID NO: 122248 - DNA, 463 bp, Homo sapiens
gcatttatatcctggcaaatgatctacatgcacattttttaaagccgtgggattaaaaagataaagacccttactagaagactagcagttggttttttaacttagctgctctgtttcatttctttttacagtcagtgataaatggagatcatatattctccttaatggcctgttcgtgatttggcattgtgctaaggctggctggcagtggctctgaggatatgtgggggtgtccctgggcaggagaggagatactgctgaaagycatgccccatcccttttccctctgccccagtgctaggggctggctgggccactcagccagcacagacggcccagtgggcacaagttacaggggacttcttccagcttcctttttcctctcccttcctgcctgttcagagacgtgcaacagagtaatgagaaggaggaggcctccttgaaataatgtcacatggaattc

SEQ ID NO: 122249 - DNA, 515 bp, Homo sapiens
agaaccaacaggattttctgagggttcagtgtgggatatgtgataaagagaagagtccagaatttggggccaaaagagcacaaaatggagatgacgaggcagagctaccattacctgggaggggaagctgtgatctggggaaaagtgagatcaggaattccgtctgggactcgcygagcttgggatgtttaacaagggaccaagtgaggtgtggagagggcagttttgagcataattctctacaaacctgggtcaggggacaccacagtggagacacagagttgaagctcacccatgtacaaacgatgcttaaagcacaaaagactgccaactccagggttcagaactgagtatgatgacatctgggaaaatgcataagcaccaaacttcaaataataagaatataatgtatgaaaaacagccaagcgtggtggctcacacctgtaatcccagcaacttgggaggctgaggtaggagaatcgcttgaggccaggagtttgagagcagcctgggtc

SEQ ID NO: 122250 - DNA, 515 bp, Homo sapiens
agaaccaacaggattttctgagggttcagtgtgggatatgtgataaagagaagagtccagaatttggggccaaaagagcacaaaatggagatgacgaggcagagctaccattacctgggaggggaagctgtgatctggggaaaagtgagatcaggaattccgtctgggactcgctgagcttgggatgtttaacaagggaccaagtgaggtgtggagagggcagttttgagcataattctctacaaacctgggtcaggggacaccacagtggagacacagagttgaagctcacccatgtacaaacgatgcttaaagcacaaaagactgccaactccagggttcagaactgagtatgatgacatctgggaaaatgcataagcaccaaacttcaaataataagaatataatgtatgaaaaacagccaagcgtggtggctcacacctgtaatcccagcaacttgggaggctgaggtrggagaatcgcttgaggccaggagtttgagagcagcctgggtc

SEQ ID NO: 122251 - DNA, 548 bp, Homo sapiens
caatgtagggctttctctctccttccccctcccctccagctttttttttcttcttttcttcctttgcagaacrtttcactacagcacttgtcttaaattccttaagttatcacaatttatattaaacgtgggttacttaaacgtaaaatcatataccttgccaaattatttctggattacttacaaagactttttctcccaggttaaagagagccaaaactaaaaaatggctttatgcttcaccaaataatatagatttcctgagtaaaattttgtgctattttatttagagaaaatatttgccattcctattttgcagctattacaattacggtgactctgcctggattcccttatgccttgaagcctgttttaatgctcttcctgagaaagctactgctacttttttccagtgtgtgttctttgaaagttagcaacacagagaatataacagaaaccaatcccttcatatgttggggttgagagggcagaaaataaaacccccacccccgaagagaatatgaacataaatgtaaagtcaaggtcat

SEQ ID NO: 122252 - DNA, 536 bp, Homo sapiens
ttattttttctctaatcttgtcttcacgctttatttcattaagttgatcttcaatctctgatatcctttcttccacttgattgattcagctattgatacttgtgtatgcgtcacgaagttstcatgctgtgtttttcagttcttctggtcatttatgttcttctctaaactggttattctagttagcaattcctttaaccgtttatcaaggttcttagcttccttgcactgggctataagatgctcttttagcttggtggagtatgttattaaccaccttctgaagcctacttctgtcaattcatcaaacttattctccttccagttttgttcccttgctggtgaggagttgtgatctttagaggagaagaggcattctgggttttggaattttcagcatttttgtgctggtttttcctcatcttcgtggatttaactatctttggtttttgctattagtgaccttcatatagtgtttttgcgtggtcatcctttttgttcatgttgatgctattgctttctgtttgttagttttc

SEQ ID NO: 122253 - DNA, 536 bp, Homo sapiens
ttattttttctctaatcttgtcttcacgctttatttcattaagttgatcttcaatctctgatatcctttcttccacttgattgattcagctattgatacttgtgtatgcgtcacgaagttctcatgctgtgtttttcagttcttctggtcatttatgttcttctctaaactggttattctagttagcaattcctttaaccktttatcaaggttcttagcttccttgcactgggctataagatgctcttttagcttggtggagtatgttattaaccaccttctgaagcctacttctgtcaattcatcaaacttattctccttccagttttgttcccttgctggtgaggagttgtgatctttagaggagaagaggcattctgggttttggaattttcagcatttttgtgctggtttttcctcatcttcgtggatttaactatctttggtttttgctattagtgaccttcatatagtgtttttgcgtggtcatcctttttgttcatgttgatgctattgctttctgtttgttagttttc

SEQ ID NO: 122254 - DNA, 536 bp, Homo sapiens
ttattttttctctaatcttgtcttcacgctttatttcattaagttgatcttcaatctctgatatcctttcttccacttgattgattcagctattgatacttgtgtatgcgtcacgaagttctcatgctgtgtttttcagttcttctggtcatttatgttcttctctaaactggttattctagttagcaattcctttaaccgtttatcaaggttcttagcttccttgcactgggctataagatgctcttttagcttggtggagtatgttattaaccaccttctgaagcctacttctgtcaattcatcaaacttattctccttccagttttgttcccttgctggtgaggagttgtgatctttagaggagaagaggcattctgggttttggaattttcagcatttttgygctggtttttcctcatcttcgtggatttaactatctttggtttttgctattagtgaccttcatatagtgtttttgcgtggtcatcctttttgttcatgttgatgctattgctttctgtttgttagttttc

SEQ ID NO: 122255 - DNA, 649 bp, Homo sapiens
cttgttctcttccctgtctttttccaaataaatgggaatccctctttgtgtgctgagctgcctggagctggggaaggggtgacacaagcaccactgtggccacsaccagtgggactgtgctgggtcaggcctgaagccagcacagcactgggcctcacccaaagcctgcctgaaaaccacccatgttcatgaaagacccaagtgttgtaaaatcagcatgtggtgaagctggccaggcttgtgtccttcccttcaggatgacaagatttccctggtcccaggtgggtccagaggtcccacctgcgagccagggcctggatttggaaaacttaggaaccaatctggtactctattctactgcagccgatcttggacccaatccacaagatgaagcccttcctacccttccgtgtcctttgaacaagcagaggagtttctccctgtggccagcaccactgaggcctgcagcaaatactgcctggctactatcaatattcacttaagtcccaaagtctcttcagtcagtttgtggtgaattctgccagtcctgattctctctcttaaaagaaatgggctctcctctggcccagggcaggtctaggaatgccatccaggagctaagttcaggaataagagaccccaggcacct

SEQ ID NO: 122256 - DNA, 649 bp, Homo sapiens
cttgttctcttccctgtctttttccaaataaatgggaatccctctttgtgtgctgagctgcctggagctggggaaggggtgacacaagcaccactgtggccacgaccagtgggactgtgctgggtcaggcctgaagccagcacagcactgggcctcacccaaagcctgcctgaaaaccacccatgttcatgaaagacccaagtgttgtaaaatcagcatgtggtgaagctggccaggcttgtgtccttcccttcaggrtgacaagatttccctggtcccaggtgggtccagaggtcccacctgcgagccagggcctggatttggaaaacttaggaaccaatctggtactctattctactgcagccgatcttggacccaatccacaagatgaagcccttcctacccttccgtgtcctttgaacaagcagaggagtttctccctgtggccagcaccactgaggcctgcagcaaatactgcctggctactatcaatattcacttaagtcccaaagtctcttcagtcagtttgtggtgaattctgccagtcctgattctctctcttaaaagaaatgggctctcctctggcccagggcaggtctaggaatgccatccaggagctaagttcaggaataagagaccccaggcacct

SEQ ID NO: 122257 - DNA, 683 bp, Homo sapiens
tgaatcaggtgcagctcttacagcaaatgattccagatctggactcctggtgaacctgcactgactaggcagccacaaactcagtaaaagattagcagaaacaggagatctacctgcttccagaaatactttcctctggttctcttcctgcagttcgtgcaagactcacattgctgagttcgttcaataaatcccaagtgagcatgaacatgatcactggcagtgatagcaaattaaacctaaataaaccatgaacattttggctaaatcagttaatcagatgaactagcagagaccggaggtraaagataaattttaatgataaaaaaggtgataaaacctctggattacagtactgtgggaagattcaacctgtgtttggtgtcacctaaaggagctattaataacagaatgccctcttagggcatcaaagacttggactggagtctagcggcatcggcaatgaaaagaaaacaagtatgtgagagaaaaagagctttattttgctagttaattcataaccaatactgaagagtgacttcagcatgggtgcagacactgtattaggctggcagcaactgatgcatgaacaatgggtctctgggaattgaaatggccatgttatcttataattctcagaagtttcaaacacctgcatctatgcatctgtgagttgttggttg

SEQ ID NO: 122258 - DNA, 439 bp, Homo sapiens
  misc_feature (1)...(439): n = A,T,C or G
cgacttttccaacttctgtaatttaggaaacaggccaaaaaagggtgatatgcgatgacaaatctgttcatagccaatttctctcatttaaatttaaaaaataaacaaaaatcaatagatgatatctccctggaaaacaaattcactgaaactgaaagtaaatgaacaagtatttgttctttttacaacaatctataatrttaattttagatgcataactaatatttaaagggataaccacatcagcgatcgggtttgggaattctttgctaacatgaccagctcaatactanaatcctagagggcaaaaattttaatgaatttggtttgcgttgggttttgtttaaatctatcacaatcaaacctattattgaaaatgttgggtcccatttgatatctcttgctagttgtatattttacaattgtcccttcattttgt

SEQ ID NO: 122259 - DNA, 555 bp, Homo sapiens
gactgtctcactgacaccattagtattgagtcagttgtggttcatcaggaaaacagagaccaccctgtgtatcatggatcttaaggatgcacataataaagaattaggggtttatacttctgttggaaaacagaagaacagagatagagaagcttctaccaacatttaggggtcctgcctctgaaagtcaaagaagtcatctcagcctaaagcactgaagtggttggttgaaggtcttatctggaagttgctgcaattctctggkgtctctagaaaggtcttatgaacaaactcggactaaaaccactaaactggtggttctcaagcactcacctctgaccacacatctggctgcaaccatatccagagaataattattttcttccaagtttctttcattggcaaattcaaacccaggactactcagggaaggggattctgggatatacagttcccagtttctttgctgaaatgtagaggagactttggttcccatctaaaagagtgttgggtgcacaatggacctcaggtgatcctgcggaagagctcccaatt

SEQ ID NO: 122260 - DNA, 574 bp, Homo sapiens
cgttaagcattcaataaacgttaattattatgcataatataactgaacttgagtcttctaagtatgtctttaattctaaatgtatatcctacctgtctccatctttccttgtgtaatgtcttctgctattaaaagccaaatctggatttagaattccatttctgttttcaattatttagytcttggataattcctctctgtgttgttccccttaaggattaaattcttgaataatcccctgcattattaatttattcctaatggatcattctgatcagcatataaacataatctagtatctcccttcctaaaaaaacaaaaaatcctctcttgagcctacctatccctaatagctactgctaattttttcagcagtcatgcaaagtaaaacatccggaaaaaagttttctaaatccacttggtcacatttctgtccccatcttactctatgtgatggcagcattccacacatttggtcacttaagcattatctttctttggaaaccttttttccttctgcctttctttctacttcactggctcctccttctcaggttcttaactggctacttct

SEQ ID NO: 122261 - DNA, 605 bp, Homo sapiens
tttgccaagagtgtttatggattacttaattataaagtttgcatgttgaaatcttaaagaaacaagcagattgacatgacttgtttaaaaatgcagtattcattaatgaattcaatccatcagcaatatttcttcattgtcatagatttcctcagttttatcagggccatagttgcttggaaaaaatattcaccagaaaaaggtttctttttaatagtaattacttggaaagaatataaagttcttcatttctctcaaatgatagaacactttccataaaggttctcacgaagtaatgaagactgctaaacccacatcttttcttgttttcttcagctrcattaaatgtcaatctcgttagagaagtttactagatgcgggtggaaaatcctatttacaatttacatattccaggtataaggataagataagtaagccacaatgactactacagtgtacatgagaaggcttatctttttcagaggtcattactgtaaatagaatcattgaaaattgcaagacattaatttgtggaatgaatatacagagagagctgatatattgaagcaacacacacaggaatattccactttagcctcacttcc

SEQ ID NO: 122262 - DNA, 614 bp, Homo sapiens
taatgaattcaatccatcagcaatatttcttcattgtcatagatttcctcagttttatcagggccatagttgcttggaaaaaatattcaccagaaaaaggtttctttttaatagtaattacttggaaagaatataaagttcttcatttctctcaaatgatagaacactttccataaaggttctcacgaagtaatgaagactgctaaacccacatcttttcttgttttcttcagctacattaaatgtcaatctcgttagagaagtttactagatgcgggtggaaaatcctatttacaatttacatattccaggtataaggataagataagtaagccacaatgactactacagtgtacatgagaaggcttatctttttcagaggtcattactgtaaatagaatcattgaaaattgcaagacattaatttgtggaatgaatatacagagagagctgatatattgaagcaacacacacaggaatattccactttagcctcacttccactctaggtaagagaatgttctattttaaacttacrtttagaattggataagcagttttagacaaagcaatactttgaataatagcagaaataatattatgagctaaattat

SEQ ID NO: 122263 - DNA, 590 bp, Homo sapiens
tttggtgaaaaaatattcgtttctattgtgtatatatccagagtggaatcacagggtatgcatatgttgatgactagctgtttagtaataaaagtgatacatgttcattgcatttaaacatttaaaataaaatagcaaaaagaagaagaaaaaattaaactactttaatccaagaactcatataaatattgtaaaaatgtgtggaaagccttcctgtgtgggtgaagggagagtgttcccagaaacgggataagcttactgaagcacagaattctagaaaatgtatcactttgaagaacataacttttaakaactgcagaaatgatagaatgttagagtgtaagtgtagcagaagtctaggcagaacttggtaggagcctattaatggagggccttataacacccaacctaactttagcctttatcctaagagcaatgggaaagccgtcccaaaatttggagatgagaaataacatgatctgatatgtgttttaggaagatcatctctgcctgcagtgtagagaatggcctggagtgtaccaagacttgaggcagaaaatgagattttctagtaatccaggcaagggatg

SEQ ID NO: 122264 - DNA, 596 bp, Homo sapiens
tctggagatgaatagtggtgagatatggaacatttccgtcatctgaaaaaattccctcttgccattttgtagctaatacccttcccccaaactccagcccttcataatcaaggatagtatctctgtcctcaatgatttttcttttctcagatgtcatataagtgaaaccatacactatatacctgctgtgtctggcttctttcacttatcgtaatgctggtgagaatcatccatgttgctgcatgtaccatactttgtcccttttgattgttgacttgtattctattgtctgtgccacagtttatgtatatattcmtcacttgatggacatatagtttcaatttttgatactttttaataaaagtgctatgaatattcacatacacgtatgctctttaataaacacaaaaagtgagattgctgcgttgtttggtaagtgtttgttggaatacaaaaggcacttgcagattgttttctgggttagttttcccactgcattcccaacatcatgtgagagatctggcatcttcatatccttgccagcatttgcattgtctgtttctgttcttgtctttaatttttatcattctggtagt

SEQ ID NO: 122265 - DNA, 567 bp, Homo sapiens
aaggcttgaacagattaaagctagatgtttttggaaacactacttcattggcactgtgcatattctcaccagagagtcgtgaggwctgtccctgacattatcagctattgacgatcattatatagacccattaattcattggcagttacaaaatgctgatattcatattctaacacttttcatcacttattagctggaatatacctataaagagaaaatttaccaactatttagttactctggggtataggaaagcaagcaaataattaattcttatcctaaattagcaaattttcaaaataataagttgattccttagtacacttcaaaggtgaccagtgagtttttaacctatactttttagaataaatataaatgcacagactaaaacctatttgtagtgtttcaattaattgtagttattatccttatcagtatccaaaatatattatctttggccaatgagagcctcctatgactcctgggtctttattagctgatcctggtgttagtcagctggggctccaacaataagatatcacagatgaggtggcttaaacagaaatg

SEQ ID NO: 122266 - DNA, 663 bp, Homo sapiens
actactgataagggtccaacaaagatcacaagtcaaagggcaaaagcagaactactgataagggtctatgttcagcggtgcactattgtcttgataaacatcttaaacaacagaaaacaaggtttgagagcagagaaccggtccgaccacaaatttaccagggtggagtttttccccatcctagtaagcctgagggtaccgcaggagaccagagcatatctcagtccttatctcaaccgcataagacagacattcccagaayggccatttatagacctcctcccaggaatgcatccctttcccagggtattaagattaatattccttgctaggaaaagaatttagcgatatctctcctacttgcacgtccatttacaggctctctgcaagaagaaaaatatgcctttttttgcccaaccccgcaggcagtcagaccttatggttgtcttcccttgttccataaaaatcgctgttactctgttctttttcaaggtgcactgatttcatattgttcaaacacacatattttacaatcaattggtacagttaacacaattatcacagtggtcctgagatgacgtacatcctcagcttatgaagataacagaattaagagattaaagtaaagacaggcataagaaatcataaaagtattatttggga

SEQ ID NO: 122267 - DNA, 663 bp, Homo sapiens
actactgataagggtccaacaaagatcacaagtcaaagggcaaaagcagaactactgataagggtctatgttcagcggtgcactattgtcttgataaacatcttaaacaacagaaaacaaggtttgagagcagagaaccggtccgaccacaaatttaccagggtggagtttttccccatcctagtaagcctgagggtaccgcaggagaccagagcatatctcagtccttatctcaaccgcataagacagacattcccagaacggccatttatagacctcctcccaggaatgcatccctttcccagggtattaagattaatattccttgctaggaaaagaatttagcgatatctctcctacttgcacgtccatttayaggctctctgcaagaagaaaaatatgcctttttttgcccaaccccgcaggcagtcagaccttatggttgtcttcccttgttccataaaaatcgctgttactctgttctttttcaaggtgcactgatttcatattgttcaaacacacatattttacaatcaattggtacagttaacacaattatcacagtggtcctgagatgacgtacatcctcagcttatgaagataacagaattaagagattaaagtaaagacaggcataagaaatcataaaagtattatttggga

SEQ ID NO: 122268 - DNA, 663 bp, Homo sapiens
actactgataagggtccaacaaagatcacaagtcaaagggcaaaagcagaactactgataagggtctatgttcagcggtgcactattgtcttgataaacatcttaaacaacagaaaacaaggtttgagagcagagaaccggtccgaccacaaatttaccagggtggagtttttccccatcctagtaagcctgagggtaccgcaggagaccagagcatatctcagtccttatctcaaccgcataagacagacattcccagaacggccatttatagacctcctcccaggaatgcatccctttcccagggtattaagattaatattccttgctaggaaaagaatttagcgatatctctcctacttgcacgtccatttacaggctctctgcaagaagaaaaatatgcctttttttgcccaaccccgcaggcagtcagaccttatggttgtcttcccttgttccataaaaatcgctgttactctgttctttttcaaggtgcactsatttcatattgttcaaacacacatattttacaatcaattggtacagttaacacaattatcacagtggtcctgagatgacgtacatcctcagcttatgaagataacagaattaagagattaaagtaaagacaggcataagaaatcataaaagtattatttggga

SEQ ID NO: 122269 - DNA, 611 bp, Homo sapiens
tgcatatatcattaaacctttcagcaatcttgaatcacctgtgttatcagaaatcttcctattttattataaagcaaaaggagttattcacagaagatttgctggttttgcagtcaaaactgacttcacaaaaaggaaatgtacaaataaaataggaactatttgytctatatttcaccatcttagaggaggcaggaatcacccaagccagcactgatacaaagaggaaactgagtcacacggcacttggtggatattggatgagacagaggaagagtttaagtgagcagcatcatcatacaggtacagatggaactgagcaaaattttctcaaatgatttatgaatttaaaaattcaaagtgctgggaaagatgtgaggagtcatccagactcaatctcttttataaaaagtgagaaaaatgaggaccagcaaggaaaagtgacatggcctttgtattagccagggacacagtgatgctgaaggccaggccttctggattctgttatattactttgacctctctctactgtggagacagaggacacaggtatctgtgggaaactgtacatgtgaagtcagggacagagtagcaggctggggagcatgcag

SEQ ID NO: 122270 - DNA, 615 bp, Homo sapiens
ttaatatgcaatctgataattattttgttcatgtgacacaattagtctatttaaattcactctgataatgaaactatgtagattctcttaaaatatcattttctgtktttggtttttctatatttttctactcatgtgcccattttaggtggtagtaattatgtaattattttttattatttagtatttgtcttagaaattttatcatgagtatttaacttatcaaagccaataagcaacatattaatccatctcctaaatgataaatgaaaaataaaattataccattttattaccctgtgagctattttgtcatgtaatttagttctttttatttcacaagttagacatgataaataaaatacacaactaaattgtacccaaatgaataatttgattcttctatgtttgtattcctgcttaccaactctgttttatatattgttaaagtatttttagatctgagctttaattacataaaaggaaatacgcttttctaagcttataattcaaatgctattgacaaatatattttcaggtaactgttactgtgtagccaagatcactaaatgtatgcaccccgtctacctagaaactactaatccactttttttt

SEQ ID NO: 122271 - DNA, 439 bp, Homo sapiens
ataacatctaaattatacagacaagcaccataaaatacctatacaaaggaaaamcaaaagaaccacacagagtcatagatttgtttcaaaactatgtttagtgtcaaggatacagattgctttttagcattttggaggtaacttcttgagatctgtgagtttttaaaaaaaacatgatgttatgttgtagcctatgactatggttccaagcaaggatcctggtctaattagcaaaaaaaaaaaaaaaaaaaaaaaaaaaaggactggccgaagcaatcaggcccactcctgaggaatgctgaggaatgttccctcgacactccttcagcaatcttttgcgatatgatatagcagtaaaagccaacatggagtagagaggacagaattactcttgcgtttgaaaccgcaaacagtcccaaacaaaacacataaaacaaca

SEQ ID NO: 122272 - DNA, 560 bp, Homo sapiens
aagataagggggctgtgggggccaggcccttattacctgtggatgaagcctcatctgcaggtgagcaggcagcagccctcagagggaacaaatggcaaatctctcttcagatcttaaaggtgtcagactctcagttaatctctcacagatctgggtaaggcctagaaaagaaaagcrcggctacattaatagaggttctctacagatgcaaatttctcctgcaaaagacagttttgcagggccatttcaaaatatgtcaaagaaatacatgaatattttggggtaaaatatgttggtttccttcagggtctactatctgtcatgtgatgctatagcagagtcaggtcagaaagtagaccatattatactgcattcattaaaaaacccatttcaggagattttacagtttgcagggaatgacttaaccctttccttgcatggccttaggtcttgtttataatttgatgtcctatagccacaaagagtctgttttgtcagtcttaggatctctactttaacctaatgctggtcagtgatgcctgtactccaaaagggagagg

SEQ ID NO: 122273 - DNA, 588 bp, Homo sapiens
gccagccaggcaaggatgattaattttaactatagtttctttcagataagaaaattttctcccaaagtccatagaagtattctttttcaacagattttgatttataatgtgaatttctcaatgcctgccttcccaatgctagttgagagaaagaaagggagggaggagaagagagagaattactattaggctaaggaattcactattacaccttaagatttgtccccaaacccatacatggtctcacaaaccctcaatcctggacttctgggagtggcttcacttcctaggctcaaggcagatttaagtggtttataaccccagctggctaagaggcatcctcttycctagttccaccacctcccaaatttaattatccaacagcaagatgagatgaacccatgggaatccaccaagaagcttgatgatctggacatagtctttgatatttcagggtagaaaaaataggcccctgtaagcaccgactcaatgtttttcagccaatctgggcctattcccagaaatgagcctccagtagcttttttcttttctccaagaacagtgggtccacaggtgaagatgtcagca

SEQ ID NO: 122274 - DNA, 566 bp, Homo sapiens
tttgtcactaccaggcctgccctacaagagctcctgaaggaagcactaaacatggaaaggaacaactggtaccagccactgcaaaaacatgccaaattgtaaagaccattgaggctgggaagaaactgcatcaactaacgagcaraataaccagctaacatcataacgacaggatcaaattcacacataacaatattaaccttaaatgtaaatgggctaaatgctccaatgaaaagacacagactggcaaattgaataaagagtcaagacccatcagtgtgctatattcaggaaactcatgtcatatgcagagacacacataggctcaaaataaagggatggaggaagatctaccaagccaatggaaaacataaaaaggcagaggttgcaatcctagtctctgataaaacagacttcaaaccaacaaagatcaaaagagacaaagaaggccattacataatcataaagggatcaattcaacaagaagagctaactaccataaatatatatgcacccaatacaggagcacccagattcataaagcaagtccttagagacctagaaag

SEQ ID NO: 122275 - DNA, 581 bp, Homo sapiens
cagttgctctcatctcatcagctggacattacaatacccatcttatggcctgtgctttacggttcatgagacattttcccatgcattgccttgtgtgatcttctcaamaaccttgctatggccaagtactgcagctcacacccgtaattgcggcactgtgggaggctaaggcgggcagatcacttgaggttacgagtttgagaccagcctggccaacatgatgaaacccggtctctactaacaatgcagaaattagccaggcatctgtaatcccagctatttgggtggctgaggcacaagaatcacttgaacccaggaggcggaggttgcagtgagccaagatcgtgccactgcactctagcctgggtaacatagtgagaccctgtctcaagatttaaaaacaattaaaaaaataaaatcttgtagtaacagcaatgcaaacaaggtagagaatgacccagagataatatgtagagaacatactcacctactaaggagagtcagagtgataatccagatctccaaagtcccagatgaatccctttaacttttcccatgacttcccaatcatggatgttttg

SEQ ID NO: 122276 - DNA, 581 bp, Homo sapiens
cagttgctctcatctcatcagctggacattacaatacccatcttatggcctgtgctttacggttcatgagacattttcccatgcattgccttgtgtgatcttctcaacaaccttgctatggccaagtactgcagctcacacccgtaattgcggcactgtgggaggctaaggcgggcagatcacttgaggttacgagtttgagaccagcctggccaacatgatgaaacccggtctctactaacaatgcagaaattagccaggcatctgtaatcccagctatttgggtggctgaggcacaagaatcacttgaacccrggaggcggaggttgcagtgagccaagatcgtgccactgcactctagcctgggtaacatagtgagaccctgtctcaagatttaaaaacaattaaaaaaataaaatcttgtagtaacagcaatgcaaacaaggtagagaatgacccagagataatatgtagagaacatactcacctactaaggagagtcagagtgataatccagatctccaaagtcccagatgaatccctttaacttttcccatgacttcccaatcatggatgttttg

SEQ ID NO: 122277 - DNA, 643 bp, Homo sapiens
cttaattctaccataagtgcccttccctttcaggttaactgcatgaccgattaaatgctctgacaaaggcaaggtgactctagaaggaaacatgcaattatgtagtttctaagtagtaattatctcaaattaattgctgttttatgggagttttgatcaaaccaaacaatatttacaattgtaattcaatttcaagatatcctgttactctgcttagctaatttagctatccgttcagtcatgccttctcatgtttgggaaacatatatgacttatggtacagttaaatgaggtttcattaactccaaagggagctgtctgaacaggaaatatatgccacagtgtggaagaaataatgctggggaacccaaggggactacgaaaaaaayactggccttccttgtgtccacttaggtcaacatttctgacttctattataaagtctactgttgttattggtataacctcatcaagaaaattaagggttcattttccatgcttttcttcaatcctctatcccttgtctgccaccaaaagataagagatctaagatcctgtcgcatttaaacaatgagtcatgttagccattttttcagtctctcaggatagtgatttgcctatgttctctttttcccactaaaaa

SEQ ID NO: 122278 - DNA, 643 bp, Homo sapiens
cttaattctaccataagtgcccttccctttcaggttaactgcatgaccgattaaatgctctgacaaaggcaaggtgactctagaaggaaacatgcaattatgtagtttctaagtagtaattatctcaaattaattgctgttttatgggagttttgatcaaaccaaacaatatttacaattgtaattcaatttcaagatatcctgttactctgcttagctaatttagctatccgttcagtcatgccttctcatgtttgggaaacatatatgacttatggtacagttaaatgaggtttcattaactccaaagggagctgtctgaacaggaaatatatgccacagtgtggaagaaataatgctggggaacccaaggggactacgaaaaaaatactggccttccttgtgtccacttaggtcaacatttctgacttctattataaagtctactgttgttattggtataacctcatcaagaaaattaagggttcattttccatgcttttcttcaatccyctatcccttgtctgccaccaaaagataagagatctaagatcctgtcgcatttaaacaatgagtcatgttagccattttttcagtctctcaggatagtgatttgcctatgttctctttttcccactaaaaa

SEQ ID NO: 122279 - DNA, 663 bp, Homo sapiens
aagaagtcaatgcccttctttaattagcaaggcagactagtgacagtgtactttccaaaggtatcaatgagatacttatgccaggtttaaacaaggaatagtcacttatttgaaaaatggaatttggctttgggtatggctaggagcattacaggagaagagagtagatgtgaatacaatatgtagtgagatttgacagacactgaaatatttgtacttaattcttacatgatcatgtatttttcaggacttgaatggcataattgtttttataagttgtctctttcatcagggcattattccagttgaagaaggctttgcyctgatgatctaatcacccctcaatggccccatgctctagtatcattctcctggtggttagaatctccacataggaatttggggcaggggcacaaatattcaaaccatagcaattattaatacagatggcaaagactaatgaagaggatctaaactaggaaatctggcacttacagtgcaaagtggggaagaatacggagacattgctcaaatagacgtaaggaaccaagattgactgtaggtttttcaaggcagcttaagcccatgacctgggtctgcctgaagctgtcatcagcccttactgtttctcagtttattaataaaatgtttgcaggtgaattc

SEQ ID NO: 122280 - DNA, 550 bp, Homo sapiens
ggtgacaaagtgaaaacgcgttaatgaaaaggcacaggatgactgtaacagggactagactatgagtggaggagatgtagataactagggtagatcttaaaaatgtttaggtgaaatcaatagaatttggagatggagaagatatgaaggatggtgaaaaggggaatttaaaaatatcartacaagaaagtcattagaatttggagatgaagaagatgtggcaaggtcattaaaacaggacattttaagatattcatgtcaaagatgtttgagccagagcgacttcatcttgaataccagctagagaagatgaggatgggacttgctgggctggattcccaggaggttaggcattcttagtcacaggatggaggttggcaggcctggtatcacaagacacaggtcataaagaccctgccgagaaacaggatgtggtaaagaagctggcccaaacccaccaaaaccaagatggtgaagaaagggacttctggtcatcctcactgctcattatacaagaattataatgcatcggctgctaaaagacactccc

SEQ ID NO: 122281 - DNA, 550 bp, Homo sapiens
ggtgacaaagtgaaaacgcgttaatgaaaaggcacaggatgactgtaacagggactagactatgagtggaggagatgtagataactagggtagatcttaaaaatgtttaggtgaaatcaatagaatttggagatggagaagatatgaaggatggtgaaaaggggaatttaaaaatatcaatacaagaaagtcattagaatttggagatgaagaagatgtggcaaggtcattaaaacaggacrttttaagatattcatgtcaaagatgtttgagccagagcgacttcatcttgaataccagctagagaagatgaggatgggacttgctgggctggattcccaggaggttaggcattcttagtcacaggatggaggttggcaggcctggtatcacaagacacaggtcataaagaccctgccgagaaacaggatgtggtaaagaagctggcccaaacccaccaaaaccaagatggtgaagaaagggacttctggtcatcctcactgctcattatacaagaattataatgcatcggctgctaaaagacactccc

SEQ ID NO: 122282 - DNA, 517 bp, Homo sapiens
gcacacactatggaaaaagggcagtcttttctgtagaaggttgggtaaacttgatatccacatgcaaaaaaaatgaaattagacccttatctcacaccatacataaaaatcaactaaaaacgaattaaagacttaaacaagagatcagaaattgtaaaactattaggaaaatacaggagataatctccagggcaaaggtctgtgcaataatttattggatatgactcaaaaagcacaggcaacaaaarcaaaattagacaaatgggatcacatcaaactaaaaagcttctgaacagcaaagaaaatcaacagaataaagagaaagcctatggaattgaaggaaatattcacaaaacacacatctgaaaagggtataatatccaaaatatgatacatatgtatatgtgtatatatatacacatatatatacatatacatatatacatatacatatatatgtgtgtatatatatacacacttttatatatgtgtgtgtatatataaatatatatatata

SEQ ID NO: 122283 - DNA, 517 bp, Homo sapiens
gcacacactatggaaaaagggcagtcttttctgtagaaggttgggtaaacttgatatccacatgcaaaaaaaatgaaattagacccttatctcacaccatacataaaaatcaactaaaaacgaattaaagacttaaacaagagatcagaaattgtaaaactattaggaaaatacaggagataatctccagggcaaaggtctgtgcaataatttattggatatgactcaaaaagcacaggcaacaaaaacaaaattagacaaatgggatcacatcaaactaaaaagcttctgaacagcaaagaaaatcaacagaataaagagaaagcctatggaattgaaggaaatattcacaaaacacacatctgaaaagggtataatatccaaaatatgayacatatgtatatgtgtatatatatacacatatatatacatatacatatatacatatacatatatatgtgtgtatatatatacacacttttatatatgtgtgtgtatatataaatatatatatata

SEQ ID NO: 122284 - DNA, 470 bp, Homo sapiens
caccacgaaatgacaaactgaacttggtgaaagtgaaaacttttgctttacagaaatattttttwaaaaaatcaaagacaattcacagactaggagaaaatatttataaaacctaggtctatgaaatgactggtatcaagaacatataaggaattcttacaatttattaagtaaacaatcccctttttaaaataaataaaatattttaattgagagtgcaacagtgaagatatagagatggaaaataagcacatgaaaagatattcaacataattaaccattagggaaatgcaaattaaagccacagtgagatactacacacccactagaatggataaaacttaaaaggctgaaattgtcaggtatttgcaagaatatgaggcaaccagaaacctcatatattgagcatgggactgcattactataaggcactttggaaagcagtttggacccttcttataagataaata

SEQ ID NO: 122285 - DNA, 539 bp, Homo sapiens
cttttgtgcaccttgaatggacagagcctctggaagctgtgggctcctgttagattttgggggcagcccaggaagctatgctgagattcgcagcatctggtcttctcctgtgtagctacctcccttctgattaggtttgcatccttggctaattagatcaggamcctaatctaaccttgcagtacgtgtgtgtgtgtgctgggtgaggggggtctcttcctgtcaatctgtgacccggctgaagcactgcagtgctcaataaacattgtccattaatgtcattttaatcattatgagttgctaactggcaacaggcatttttcagaattgaagctttcttagaaatcagttgacttacagtatcatctttgagcaattgcagatgcagagactaaaaatttcacagtaatcatgaataaagcttgattgaagaaagtgaaaatgtcatcccagtctggggcgggatatgaactgtatcagcagaacatgaatgatgaagagatatctagactggaccataacagagacaattcccttaa

SEQ ID NO: 122286 - DNA, 381 bp, Homo sapiens
ggaattcctgtttggtttttcctttttttttttttttttctttttgagatggagtctcgctctgtttcccaggctagagtgctatggcacgatctcagctaactgcaaccttcacctcccaggttcaagtgattcttctgcctcagcctccgaagtagctgggactacaggtgcctgccaccacacctggtgtggcggcaatttttttgtattcttygcagagacagggtttcactgtgttagccagtcttgtcttgaactcctgacctccagtgatttgccttccttggcctcccaaagtgctgggattgattacaggcatcagccattgtgcccaacctggttttcctttgtgatatctagttcctttagtaaatttct

SEQ ID NO: 122287 - DNA, 587 bp, Homo sapiens
agactggccatcatactaattttatatgtaaaaatataatacaaaatcatgtaagtgcttacattatttgaactatgaaaaaaagcatttgccattaattctagggaaagctttttcatctgtattgctacataccttgatcctttgggctttaacttaaactgtcttaaaaggttcctcatgaacttttcgtttcacggcattagaacaacaatttaatcatagttaatatgttagctgcaatttctttatttttatttctttgcttattgattttartccaataaatttgcatttgatatatacaaaataataaaaccatagaatttttcattggaatcatttgagtataaataaggtcatttccctttaaagtgttttgcctaaattgtttccacttaaccttctggataaagcaggggcagcctaagctcagggactaatatcatagggggaaaaagcaaatccaaataaggggaaaaaaaggaatacagaaatgagattcagaggaaaaacctaaattatgggattctggggttgatgaagtagccacagaaagaaagctgaattatgggaatctggggttg

SEQ ID NO: 122288 - DNA, 610 bp, Homo sapiens
caggatgcttttcttctataaggatttactgtcaatcagtttgagtgtgtctgcattttaataaaggcgatctgatcactctaccctaagtcagcaaggcacccccttgaaaccaacaattgtcgttattcacatcagctctgcagttctactgggacatcataagccccttctttttatagcagwccttctccagcttctattttaacttaaatatcacacaaacaattctttctgaggaaaagcaggggaaagatgactaattgaaaatagcatttcttagactagaattatgattccaggctgggtacctcccaagcagctcaaagtgacgaagggaaaggttgctgaagtaaaaggaaagacagaactatggaaaaagaaagactataaagaaaatgagggattattttacggctagagataagtaatgtgtcgtataagttgtcagtttacacaacaccctgcattttctccttcctctttttaaaccagtgcacaatgttgtgctcactgatagctaaaaagcagaagctgcctgaagtcaatagtttttttctaccatttcctaaattctgacctcactggtgagctcatgctagtgacttga

SEQ ID NO: 122289 - DNA, 569 bp, Homo sapiens
atccttgtgagaaagggtaggtaaaaaacctttttgagatttctctaaagtctaaaatgtcagcttatggatggatttccccagtcaaaaattttcctaggaggaaatttggccaaatgcctagagctaggaatttaggatgagtttctaattgaataagccatcctacatagttaatccaacatgtacaaaaagcaactctaaattcaaaggaataataagatttaggataggaagcagagactaagaggcaaactaagatttgatagaaactagaaaaggcaagacgagcctaaagtatcccatggttagccgcagagtcacagctcaaacaggtrtgctttaaccacacaatctaaagtacttttcactccattacctgcttctttctttcttagcacttaaaacattctgaaattattttgcttattcacatacttacaagctcatggtcaacttcccctattaaaatgtaagctctctctaaaaaaaataaataaaataaaataatcagtttatctggagacattaaaagcagagttctatccaaaaaaaggatctgtgggaat

SEQ ID NO: 122290 - DNA, 601 bp, Homo sapiens
tgagtgggactctgtctatctttttttaaatttggtcttgaggtctctctcaggagaatggctataaaatttagctgtgccctrttggggctccagagtatttggatgtggatgtttacaatgtgcttttcacaggatacttctttattctggtggacaatctaatgcttaaggatctgatctgagaccaggtgtctctctcataggaaatttgtttacactggcagacaatcctgtggctcttatctgatcaatgtcaagtttattcctaccaagataaccattatctgtgaaagctctgactaggaaagaagttagacttgggtgtgtcaatcagacagacacagagtagcaaatcaacaaaacacataaaataactgaggtagtttattacttacagatccaaagagaagagggcagtatgccccgcacagcaccaaagggaaggagggagctgtccaggacacttgtgttcagtctgcaagtggggagcaagggagagaaagagggagggagttgtggccaaatcctttagtggggttcagagatttacccaagcaggtttcccacaggaagttttaattggtgggttcatggcaag

SEQ ID NO: 122291 - DNA, 580 bp, Homo sapiens
atctcttgaaaaatcatctgatatatctgactatatttcatctgtagggtttagattttttagcatcataatgtagatcataaccagactttcattatggctaacccacgattttgagttcaaaaatagtcacaaattcatagaaaaatagatttggaagggctctaggtcagaatatatttcaatctcttattttataaatgaagaaattgagaagcaagaggtttttcgtgtttctttcctctctttaacttttacacaaggtattcattatctctccaagacttcacttaycttaaacttgtttctttaaccttaaccttttgtcattaatttctttgctagaccctgccccaccccaatgcgcattttctctcacacttgtggtctgttatagataatttagatagaataattcattggtccacctataatttaagggagggaagtattgattaggccacccttgattttatagttaagaagatccgtgcagttacagaacttgtttaagttcccgctgcaatgaattgatgttgttcccggaccaaactgagggtcgagatgcttattctcatgg

SEQ ID NO: 122292 - DNA, 618 bp, Homo sapiens
tgcctgtcattctctaaatcctttgagtcattgtcagttgcttttaaacaatggatattcaaataactcctgaactgcttcttcattatttagcataattgtagtttacaaatatgcatttataattgggtacaggctacaagtaatataagattttatatttaaaaatttattttaaatttttaaaataaatattttaattcaagtgtagtatttagatagaaaagtccataaatcctatgtatgcagcttgatgtattttaacaaagtgagtgtacccatgaaatcagcacccagataaaaaatatagaacattgctagcaccccaaaagctttgttcctgcatacttstagtcagtaacccttatcttcaaagataaccactatcctgaatgttttcatgcattactttgcctttttttgtctgtaattgtagagtatatactcttgaatatttgacttcttccattcaacataatatttgtgagatctatcactgttgtgcttgctattttatttttgttttgtttcctttgatgaagcctgttggatcccaagatgggagcaaaaagctgctagttagatatgcaaaatcttgttccccattcagacctactg

SEQ ID NO: 122293 - DNA, 597 bp, Homo sapiens
ttagtctgtggtattccgctatagcagcacaaaacaaactaaggcactagtttagtaatttacatccaactgaacatgaggatagggcaaattattgctactccaaaccctcattaatatgaaaaatgcatatatagttgtcacactttttttaaaaataattacattgaagtaataggtcatgcctgtaatcccagcactttgggaggccaaggcgagtggatcacttgaggtcaggagtttgagaccaacctggccaacatggtraaaacctgtctctactaaaaatacaaaaattagctgggcatcgtgatgcttgccggtaatcccacctactttgggatgctaaggtatgagcatcactagaacccgggaggcagaggttgcagggacctgagattgtgccactgcactccagctcagcaacagtgtgagaatctgtctaataataataataataataataataataataatattcacatggaaaattaagaccaagtaattctttggggcccaaatgaagagaatacttgcctttattttctttttactttagccagtgacagtgattacagaatttcagaaaaaaaaaac

SEQ ID NO: 122294 - DNA, 680 bp, Homo sapiens
taagttacataaagaagtagctcaaatgtccatggctcctactactgctacactgtcttctctctcccaaactgtatttatggcctcatggggaattctctacaatcagttgacagggaagacaaaatttggcctagtttatagacactactgtataataagcaaacatcacctgaaggtagatttattatctgatttgtttactaaaatagttattgcaacaaaagctactcatgggtttataaggaagagtatagtttaggcacttagaaatgtctttgtttaaaacaaatttttttaagtgcactgtaaaagcatcatgcagtctagcctcataataattctccctctttggagacccggattcagtatgggttctgcccagagctcagagatctggttaaaatataggtagcttctacttaaataaaattggtctcctcatacaatcctatgataactttctgtaattttatgtttgatttggcatccatctttaatttccctctagaactacmagactttttctctctgtaacttgatatgtaaattttgctatctgatttttttatctaagagttgtttcttttgaatatacagatttagggctatttagctgacagctgccaggataatgaaacagattattgagtttgcagtctaattggaaaaaaaaaagg

SEQ ID NO: 122295 - DNA, 620 bp, Homo sapiens
ttgttcaccaaagttggggatattcctgggaaaatccctgatcttgcctctgatagctccagaaaaatagtttgttgaaaaccaagtggcaagaatgaaaatgctatacttctatttgttttatttctttcatggttttcacattagaagtacctggaatatcagttgtgttcaactgaaaatagcactggaggctgaagagaagatgatgtcacttttcataacatcaggtgaggtgacatgggtattggttcttgaatgagaagacacatgaagttcagcagagcctagctgagccatagcagtgtgagcaggaaataaatttctccttgtaaatctcagatgtttcgcagtggtctcttctttcagtaaatgctgaytaaaacagaaggggtcctagaaaaataagactatatctctccaaattaacatacacaatttccaaattacaactagctcagaatcacttacagacttccaataatccatatagatccatagagaagcttcctgaattgtgcctaagcttgtttaggtcattggtccctgtgccatgtattgcatggtaatttaattgaattgttttcaggccagtctattttaccccaactgcctagcct

SEQ ID NO: 122296 - DNA, 378 bp, Homo sapiens
tgaaaaacaattcaaggataggtatttataaatatatcagaatattatacatgtatttttgtatgcacatgtgttttatttaggaaggaaataacatgttaacttttgcgtatcttaattttttattcagcattgacttcccacctgttgtttaactttttcattctttgtttttttttttttttccgttgtggtcaagtgcgtattgaagaccaccttagcttagctgagaacgttgtacttgtgaagcatttgaatgtgggccacatcaagggtgaacaaaataattcatttcctggccctgctcargtatcctcaccctgagagtctgcccctgtgggccacaacactgccacccataacagtcacacctctctt

SEQ ID NO: 122297 - DNA, 664 bp, Homo sapiens
cttcacatgtccaagtataattggaatgaactaggttagattttcttggaggttacaaagaaaaactaggtggttatatttttgcattgatgagttagggaattggaaattcatctgctctcctattactttttctgtacagactcagcatattgatttttcctgtgatgccagcctctggtggctggctaacctggagcacttgacaattgctttctgggaatttagacaggtcctcagagcaagaggtggaagggagatgtttttctattatgtgacataggtccttcttaatccagaagttagtaataaaaattgtggcaatattctattcttcgagaagatggaaaaactggcattttttgtaactgatatggcccaacacccagaacaatgcctacctatagcaggatttcaataaatatatgttgagtgaataattggaaagtaatttttaaaatgatatcacattaagatcattactctacccacaatmccaacttcaggttttgcaatagtgaaaagaaaaaaaaattagataaactctacctacagtttaacaacactatgttttacatttctatatataatatacccagggtagtggtctctattgttgaaacctttcctcacctctcaagtaggagcacagagacattgcacc

SEQ ID NO: 122298 - DNA, 393 bp, Homo sapiens
ctttctctagtcaaaatcaaaaataataatttttaagctaggaaaattcagtaatttgatgagggaatttggctggaaaagtgaaaaacaattcaaggataggtatttataaatatatcagaatattatacatgtatttttgtrtgcacatgtgttttatttaggaaggaaataacatgttaacttttgcgtatcttaattttttattcagcattgacttcccacctgttgtttaactttttcattctttgtttttttttttttttccgttgtggtcaagtgcgtattgaagaccaccttagcttagctgagaacgttgtacttgtgaagcatttgaatgtgggccacatcaagggtgaacaaaataattcatttcctggccctgctcaggta

SEQ ID NO: 122299 - DNA, 653 bp, Homo sapiens
tggtgttctttgccatctatctgatcaccgtggtggggaatattagtttggtggcactgatatttacacacygtcggcttcacacaccaatgtacatctttctgggaaatctggctcttgtggattcttgctgtgcctgtgctattacccccaaaatgttagagaacttcttttctgagggcaaaaggatttccctctatgaatgtgcagtacagttttattttctttgcactgtggaaactgcagactgctttcttctggcagcagtggcctatgaccgctatgtggccatctgcaacccactgcagtaccacatcatgatgtccaagaaactctgcattcagatgaccacaggcgccttcatagctggaaatctgcattccatgattcatgtagggcttgtatttaggttagttttctgtggattgaatcacatcaaccacttttactgtgatactcttcccttgtatagactctcctgtgttgaccctttcatcaatgaactggttctattcatcttctcaggttcagttcaagtctttaccataggtagtgtcttaatatcttatctctatattcttcttactattttcagaatgaaatccaaggagggaagggccaaagccttttctacttgtgcatcccacttttca

SEQ ID NO: 122300 - DNA, 553 bp, Homo sapiens
tgttatagatcaactatatgacacccctttaaatgttttcaaaagatgtgagtaaagattgagattcgtttggggactactctgcatcttcaaaagcaacacagctcttgtctgttcatgttggacttggctttataagtgtaacayagagaaaaaaatgagagtatgctatataagtttctctttctcttagattaccaaaaatttgttaaggtaagtttgatgcctttgtttccattgcttagtgaaagtactaagtacagtgtgcagaatcatgcatatcgaataaatagtttagagccattttctggtatgtgttaaaacggcaaaatgttctttttcattcagacttcaaatagtttatgtttttctttattagtggaaaatttggtagaaaaaacaagtttataaaaccatgtaaatggataaataatgaaaacaaataaccagctgggtttgagaatggtaccacccaagccagagggctaatccacagtggtaggatggatgtttggtagacaaccatgataatcacctctcaagtcctccttca

SEQ ID NO: 122301 - DNA, 572 bp, Homo sapiens
cccagcatttattagggttaccaaggcagaaataacctatacctgccagaaattattctttaccagctctggrgaaacaaaaatgaacaaatttgattataagttaaatttataaatagagcttggaacttgtcaccacaattgttcattgaaattcttcatactattttccaattttttaaatgctccaagatatgagtaattgtagacacagtttcagtaaaagcaatctacaatttctatcaatagacaagctgttgagaaaaatatttaagcctgggatttctctggagctgagttttcaaacacctcgagtctagaagcacctgttttgggggttgaaagcagagactgagagagagactgaaaggctttcctgcagtaaagatccatacatgttaggaaattattttttcagtggttcagaagtaagcaaaagggtatttctcaactacgttagtgttttgtattcacggaaccccaattctgagtgttattaccatggaaaattctcagcaaggcttccaggttgtttcttgagcaaggtagaaataacatacaatctaataaga

SEQ ID NO: 122302 - DNA, 569 bp, Homo sapiens
tttccttagcttgatgaattctgaagttaatacttgtgattgtattctgaaattctcaaagtgagatttttcagctctctaaaataagtttggttcattcttacaatgtgtactttatctttcacctcctatttcattttattgtattcctcagaatccttggattgggtttcaactttctcctgaattttcatgatcttcattcctctctatgccctgaattctacatctgtcatttcagtcatttcatcctggttgagaacccttgctttggaactagtgcagtcttttggaggtcagaaaacactctggctttttgagttgctagagttcatgcactggttctttctcactcatcaatgtgggctgatgttctttcaatctttgaagttgctttcctttggatgggttttgtttttgtttttgttttgtttaggtttttttttgcttttatcttctttttcattttttctataggttattagaatacaggtgttatttggttatgtgagtaagttcttyagtggtgctttgcgggattttggtgcacccatcacccaagcagtata

SEQ ID NO: 122303 - DNA, 578 bp, Homo sapiens
gaattcagtattggtactttgagaaaattaataagataaatagagcagtaggtaggctactagagaaaaaaagagaaaagatctaaataaacacaatccgaaatgaaaaaggagatattaccactgacctgaccccacagaaatacaaaaaatgctagccaggcatggtagctcatgtctgtaatcccagcactttgagagtcagaggcaggcagatcacttgaggccaggagttcaagaccagcctgaccgacatggtgaaattccatctctactaaaaatacaaaaaaaaattgtgaggtgtggtggcaggcacctgyagtcccaactactcaggaggccaaggcatgagaatggcttgaacctgggagatggaggttgcagtgagccaagatccaagattgagccactgcactccagcctgggtgacagagcgaaactctgtctcaaaaacaaacaaacaaacaaaacaaacaaacaaacaaaaaaacctcagagactattatgtacacccctatgcacacaagctaggaaatctagaagaaatggataaattcctggaaatatacagccttcca

SEQ ID NO: 122304 - DNA, 505 bp, Homo sapiens
tatatcacatttattgacttgtgtatgttaaaccatccctgcatacctgatatgaaacccatttgattatcatggattgtctttgtgatatgctgttggatttggttaggtagtattttgttgagaatttttgtacctatactcatcagggatattggtctgtagttttttttaatrtcctttcctcattttggtattagggtgatactggctttatagaataatttgaggagaattccttctttctctttcttttgaaatagtgtcaataggattagtagcaatttttctttgaatgtctgatagaattcaactgtgattctgtctggtcctggaccttttttttttttttttttttttttttgttaagtttttaattaccattttaatttcactcgcttgttattggtccgttcagagctcctatttcttcttgccttaatctaggagggttgtacacacccaggaatttatccctctcctctaggtcttctagtttatgtgt

SEQ ID NO: 122305 - DNA, 382 bp, Homo sapiens
tttggttcttgctcagacatcgctagcaaattctcagaaaagcaataggctgtaccattagcctatgtctgtagatgaatatactatctaggtttttgtagtgtgttctgatgttcacacaatgatgaaatcgcctaacaatgcatttctcagaatgtattttgttgccataggatgcatgactgttaaattcctgttctagcccaaagattctgtgaaaacttctgtgtraaataaatttttccccccaaagtgatgaggtgtagaatttactgtattaataggagggaactctcacacttacaagtgcattgtacaaaaccccgtctgcccatgatgtacaaaagttgttcctgaatgagatcattaagttggaatcaca

SEQ ID NO: 122306 - DNA, 492 bp, Homo sapiens
gaattcgaggccggtctggttctggcgttagctccaagatcctcatatcttgatgctggatgaggtcatcttgtcctaagtgaaacagagcaaaaacaaggtcaaaagttaccatggaaaactaaatattcaaaatactcagtgtttcctgtaggtagttctaaagatgattagaagttccatctctggcaaaatgttaaatgaaaaaagcaaaaagtttacaagtactatggtaactggtaaattttactgtatatggcttctctttaaaaaaaaaaaatttttttttttttttttggtgacacggtctcactctgtcacccagactggagtgcagtggagtgatcacagctcactgcagccttgacctcctgggctcaagtgatccacccacctcagccttccaagtagctrgaatcacaggcatgtgctaccatgcccagttaattaaaaaaaattgttttagagacagggtctcactatgttgcacag

SEQ ID NO: 122307 - DNA, 537 bp, Homo sapiens
ttactgtgtgtctagggtgaaatttcaaattcttccattcttcaacttctctttcttagccctcaactctttttctatctctgctgtattctggatgacttcctctgataatctttctgttttacttattcacttcttaatcctgtgtagtctgctgattaaagtgtccttaaagtttcctccatacccataccaatattttttgtttctgaaactagctatttttccccaagtttttccgtcctcttccattatctccatttttatggattctatccttttttaaactttcaatattttcaacatacttatattaaagtactttttcagctgattttattacttctactttcttgggcatgaacgctctatttgttgcatctgctagacttacctctcayagtggtgtttaacagtgttttgtgatattttctcctcagcttatcttcaattggaattttcttcagtgagccctgggttatgaagccctccttggggggatgtttcctagagactttcagctggggtcatgtgcat

SEQ ID NO: 122308 - DNA, 594 bp, Homo sapiens
atgcacttaaaaatgtagtctttcctttcctccagacttcccataggacgagtttctaaataacactaaaagtggacttttcaaactcaaactttaaaaatggttaaaaagccatggtttagatttttaaagtgaaaggtgccatttgcctgcaaccttttcaaagtcaccctaatgaaatattgggaaaattttccagtccacagaggcactttctgaarcctctgtcctttctgttaattagcacaattaacctctaagctggcaagcccctctggctcgccactaacaggcccacagaaatgtcagattttcaaagggcttcacataagtgaatggcaaagtccaccttttgagcaactacatttagagctgggggtctccatgaaaatcttttttctgcacctgtagactgcactcctgactccttacctacaacttccagcacctgtgctcactgacatgcacttgaattctctccaaccaatgagatttcacaaccagctcagcagaaagcttgtttccaaaaattatatcaaagctgcctttgttgtaaaagtgagatttcagtacttagattacagaaaattaaga

SEQ ID NO: 122309 - DNA, 548 bp, Homo sapiens
attttttaacttttctgattagtcatacctataataatctagatacccaatatataaagttctaattattttaggtcactttttaaatatgagtagttttttaaaaatatcataataccagtaaagaagtaagaatgaaactcatgtctccagaatatccaaagcaatctaagcaaaaagaacaaatccagaggcaccacattgyctggcttcaaactacactacaagctagcataaacaaaacagcatggtactggtacaaaaatagacacatacaccaatgtaacagaatagggaagccagaaatgaagccatatgcctacaaacaattgatcttcagcaaagttgacaaaaataaacaatggagaaagaagaccgtattcaataaatgatactgggaaacaggccagccatatgcagaagaatgaaactagactcctatctctcaccatatagaaaaattaactcaagatatattagattagacttaaatgtaaagctgaaactatgaaaatcctagaagaaaacctaggaaaaactcaactgga

SEQ ID NO: 122310 - DNA, 577 bp, Homo sapiens
atgatatgctgattgtttcatcttatctcattcttaacctgtccactaatctgtctaggcttttataatggcctagaatcaatgacaaccaagtagtaatgagcgcccctaaggtgcagattgtggcrtctaagcataacggaagcagcactctccagatatgattgattccaggttttggaaagaaaatatgcaaggcgagtctttgcattttactgtagtagaaaactaaaaactaacaaagacaagtaagatcatttaaaacaaaataggtgccaacttaagggagctcctactggcccaagatgcaacaatttgatcttcaaaatgaataatgattgcaatggaatgaagcacataaaatatataaaaatcttagtttctaattatagtaaaaaatcaaagactaatttaaaaaaaactcatcggtcatcataagagtttactaaagcacaaactgattacttttggattttattattaaggcaaaataagcattcatccagactcttctatatgaactgtatttcagattccatgacacagtttatgaggaagacttccttagagaattatt

SEQ ID NO: 122311 - DNA, 593 bp, Homo sapiens
tcagcagaatagggattacattaaaaaaaatagacacctattttatattgacttgtttcctcctgagacccattgagaggatcatatgacttcacaattattgctttaatggctttatcttacttagggggatgtaatattcaggagttaaaacattttaatggccaggtcatggtgacagtaaatgcttatctttgtacgtgtttataaatatgtaacctggcatatttattatgtttctacatattctatttcaaggtgaggtaatcacatgctatgctgttggaaatttctagtaggaggtagtgagccttttatgccagagtcggctatcacatgccattgccttgctcaggagtggccttgggtaytcgatgtgtctaaccccttctatcaatgatgagaaatggccaaaaatgagtggacttgatttcatggtccctatagcccaagaacataagttatgttggcttcatttgtcactgtgcctgaggttggagtacagatatgtggaatcctgtctgcagcagaaaggttatgggagatgggcaagatcaaagccaggagagcagagttcaaccatattctaagga

SEQ ID NO: 122312 - DNA, 634 bp, Homo sapiens
taatactctctgtattaatccatttctctaaaacaaagtggtttttaagagaattctgaaatataaacctgaattctgactgctatacattacctcaccctacctaactactttgggctgttgtgaagattcatggagtaattcatgtataacayctagtatgagcctggcacatagtgggtattctataagcactcactttctccacttttttttttaaagaggattatctccaactttgaaatgtagaaatggaaacagatggagaatggtgaggaagcttgctttagacagtaaattaggagaccttggatgagcgtgcatatgaaacttggtttccatgacacccaggccagggcttgaatgcatcttctccagcactgccaaatctgtggtgagggtctcaaatgtctgagagccagctttgtgagctgctcgccaggttcagtctccaccaggtgtgttggaatgccagcatccctctctcactgcgacgctgactttctttatagtgtttactctgaatttcatttaaaaaatccctacctagagttattccttgatcaggttcctgctaatacctgccaggaaattttctaaaccattttctaggttgagtcaacaaatagaaact

SEQ ID NO: 122313 - DNA, 570 bp, Homo sapiens
cagtggcatctctaccaagaacaatctctgtagagtgtatagtggaaatgatgttgctgaacacaaattgtagtgtgaaagtgaacragtaagaaagaaaagtgagggagaggaggtgaatacagacaactctttcaagacgttttattgtgaaagagaaaagaaaggagattggtgaaatatgatggttaaaattttatttttttttaatatggaagaggtttgagctgtttgcaagctgaggggaaaaaagcagtgcaagaagtgttgcaaaacagtgaagacagggatgatgggcaggtaggaggtatggagtaagccgagaaccccaaagtttcagcatttgcagttccattcttattgagatcttgtgaaggaatgagaggacagaagggctcacccctgcagtatttgggggcctggagaacaatgcaaagtggttcagtctgaaagtcccttccaaggacatgcagagttgattttatgtcactgggtacctaccagtaatggtgaaaatgagcaaatagccctattcacattctgcctaaataaaaggcaacttgcgtttcc

SEQ ID NO: 122314 - DNA, 493 bp, Homo sapiens
caggcatttcccatcaactagcaagctctttcaaactgagaaatagaactcattcactaattcactcacttgagaaatatacattgagcatgcactatgtgccaaggcatggaaccaggttccaggaacacaaagctcaatgcatacaaactttgttctcaaggagaccatgggggtggcaggggtgcgtggagcaggttcaacaggygattgcagtgcagtttcataagcactttgtgggttgagtttagggtgctttggaaactgttctcacctgtttggtagggattagggaaaacttcctggaaagtgtatccaaaaggagacccgacagatgagcagcagttagaggggtatgtgagaggctagtagaagaaagtatttcaggcagagagaccatgtcgtacagagcctagaggtgtgagcacattggagagctggagctttgagcaggaaaagcaagtgcagtaaaacaggctggagggtgagcagg

SEQ ID NO: 122315 - DNA, 493 bp, Homo sapiens
caggcatttcccatcaactagcaagctctttcaaactgagaaatagaactcattcactaattcactcacttgagaaatatacattgagcatgcactatgtgccaaggcatggaaccaggttccaggaacacaaagctcaatgcatacaaactttgttctcaaggagaccatgggggtggcaggggtgcgtggagcaggttcaacaggtgattgcagtgcagtttcataagcactttgtgggttgagtttagggtgctttggaaactgttctcacctgtttggtagggattagggaaaacttcctggaaagtgtatccaaaaggagacccgacagatgagcagcagttagaggggtatgtgagaggctagtagaagaaagtatttcaggcagagagaccatgtygtacagagcctagaggtgtgagcacattggagagctggagctttgagcaggaaaagcaagtgcagtaaaacaggctggagggtgagcagg

SEQ ID NO: 122316 - DNA, 602 bp, Homo sapiens
catttttctaagtcttcactgacaaatcactttacttcacagaggcccatggattttataatatatttttaattaaaatgcatagataggggtcccacaaaaacatttgctcaattccccacacatcctaaagaaagccagaagacctgtctctcaacatcagttatccctttctaccatgaagttttagctgaatagygtacatggttgcataaagacaacagtccctagcctcccttgttatgaagtagggccacttaacatttctgggttatgcctctaaaaagaaacatgcaggcacttctaccctttcgctgcttctgctgtctgggatgagaacagaagcattcctggaacccagaaatggaatccaggggttaggatgatagtcacctaccagccctggctcacccatctctagactgtcctgtgatacagaaataaactctattttatttaagccactgtactttgaggtgtcttagagacagcaatttactgaggtgagaaaaaaagagcctgtgaaaaataaatccatggttcagttttagacttattaagctcaaaattcctatgaaatatcaaaatggctatgtcaagtg

SEQ ID NO: 122317 - DNA, 602 bp, Homo sapiens
catttttctaagtcttcactgacaaatcactttacttcacagaggcccatggattttataatatatttttaattaaaatgcatagataggggtcccacaaaaacatttgctcaattccccacacatcctaaagaaagccagaagacctgtctctcaacatcagttatccctttctaccatgaagttttagctgaatagtgtacatggttgcataaagacaacagtccctagcctcccttgttatgaagtagggccacttaacatttctgggttatgcctctaaaaagaaacatgcaggcacttctaccctttcsctgcttctgctgtctgggatgagaacagaagcattcctggaacccagaaatggaatccaggggttaggatgatagtcacctaccagccctggctcacccatctctagactgtcctgtgatacagaaataaactctattttatttaagccactgtactttgaggtgtcttagagacagcaatttactgaggtgagaaaaaaagagcctgtgaaaaataaatccatggttcagttttagacttattaagctcaaaattcctatgaaatatcaaaatggctatgtcaagtg

SEQ ID NO: 122318 - DNA, 589 bp, Homo sapiens
tcggcgtacagcacttgttaacaaaacagggagaggctcagatggaaatgtttccttgcccaagaggtgactgaacagagcagagatgaaagcagagtccatgtctgctgagaatagaaatctcaaaattctctagggtggagttaaaagaagggcccatgcttaatgtgagtttctgtggttccctcagagtccaaaagggctgcaaactttcccagccttggtcattaaaaagtgaaagaggactgagagaaaggagatggcctcggaggacaactcagcattgtacagggcaatgggcctcccacctaagaaggtgaatgggcttgtgaatgcctcccggttgtcccttttctgagacgggtgggtctttcaagtacccaagcactaagttagggatggtcagttggaagttggcaagacactcagcagctagagtgctgagggcagctcaggagacagatggagagcmgggtggggaaaggcagtaggaggggacagctccagcactaccattttaggaacacacgtgccttgctgtgggtgaagtggtcaccaccgaagtggcttaagctgtttggccaacact

SEQ ID NO: 122319 - DNA, 621 bp, Homo sapiens
tgaagcagagccaagaagaaatctcaaaggacccactccctagacatatgtgaatagaataaaaatgagacacaaatgatagcacgaagcctccagcactctayggacaaagtgaggggctgtgttgcaggtcaggagaaggttcttgttcttgggaaagaaataaaattaaaatatggctatcctttacataagaagttccttcagacctatcatcaacagagggggtctttttctgttgttttcctccaagtaggagttggaatttcttaaagcaaagatatacattcaaggctgagtttagaggtgtctccatgactgcataccaagggttcccagcctgctgatcagataatagaggaatcaatctcatatgctcatttatactaaagtgttaaagatttgatgtgttacttctcccagaggtagttactttacaaaggcccatggatagaaaacaatatttaacctaaaggaatatacagaacttcagataccagaatttcaggtagaatttcaggcaccggagctttttaaccctaccgaggaaaccatttattaatacatggtgtatctaaacatatctgtctgatgcagtgacagaagaaaaagagtgtcata

SEQ ID NO: 122320 - DNA, 611 bp, Homo sapiens
gactcataggtagacatttatatgttcaggttgtaaaggcatcataaaaataattcatagtttttgaattaaaataagatctggtagagaattgttgtacagatattaccagataacctagagttttactcaaaaacatatagaaagcttgaatacacttttggagcatgtctctcaacaagagttaatatttcaaaaatacaacaaggagcacaaaatatggatttttttttgttttcaggagtgcatcctagctgtagttgatgatgatattacagagagaaagaagaatttggggtaatagagagggcttgagaaagagtggagaagaaataattttatactggtatttattgtccatattgcattggcctggggtaaactcgttattggatataagacatgcctaagtaacaaaaatacttaatacgagcaattttagacttgtagcatggtcccatctttgaatttcacctgccaaaacacrgaggataaaagccattccccttattgcatcaaacccttttgaattctatacctccaaatctgcatctggagattatggaatgttatggtgttaccaggaatttggcatgagtataattctcaaa

SEQ ID NO: 122321 - DNA, 547 bp, Homo sapiens
ctacaacaccttattctacccgggtgtggcaccagctgttaaaatattttgacaatcatctctgtgtatatgtgcatttgcatacaaaaagtcacatggatatatcttaatatcaaatatgcttaactctggctactttctcctaactctcctcaaaccacttttaccatgaccatttttcaatctaaccaggrgctgcaattgtttaatcccaatcaatctgcatatgtatgaccccttctttctttttttttcccattttactcagtgtagagtggattgccaaaatgttagtacctctatttccaatacctgtaatctcttgatcacttgtgcctggcttctgtatattggaattaggactcaggactcagtcctgtgtgcctttcatggtctaatttttatgatagggatctgatgtccaaatttcctagttttatgtataagttagtgaactctgttcgtgaccagtctggccaacatagtgaaaccctgtctctattaaaagtaaaaaaaaatagccaagcgtggtggggggcgcctgtaa

SEQ ID NO: 122322 - DNA, 355 bp, Homo sapiens
aaaaataaagatgagaatataaatcaataaaacagaaaggggaaagaaaatagagaaaagtccatgaaaacaaaggctgactcaagaagatcaataagattgataaatctctagmcagactgatcaggaaaaaaataagacaagatacaaattattagtatcaagaatgaggaaggtgaaatcactacagattctacacggtattaaaataataagaaacattatgatcaactccattcctttaatttgtcaagatagacgaaatgaacaaatttcttgaaagatgcaaatttatgaaaggagagacagataacctaaataggtacctattaaagaaataaaatttgttgttaaa

SEQ ID NO: 122323 - DNA, 582 bp, Homo sapiens
aagaaaaatttcttagttgattattgctttaaacttaatgtctctggcttacagacatgtgtgtctaaatattcatatttaatttctrtgatgacaccaaacctatccagtagtatcgataatcttcttatacatgacctccataaggttgtttcagtattcccacacatcttctccctgactgggagggttggaaccaacctcatttctttgtgtagtgcttttaaaaataatattgtttttcacataaggcatattaagtgtttttgcaccagatgtattacatggatgtttttctttgactaatttattaccaatgatccatagtaatcagataacacagcaaggttgtcagtaaggcattggtggagatcatcatagtctaaaaagtgatttttgtgacaatgacagttgtcttgttgcagagtgaactttgttgtatataacagtgctgtgcagtataaatataatgtgagcaacataagtaatttttctagtgggtatgttaaaaatttgaggaaaaggaaacatttgggaacaattgtagtaaattttatttaattcagtaatccaaaatagtaa

SEQ ID NO: 122324 - DNA, 582 bp, Homo sapiens
aagaaaaatttcttagttgattattgctttaaacttaatgtctctggcttacagacatgtgtgtctaaatattcatatttaatttctgtgatgacaccaaacctatccagtagtatcgataatcttcttatacatgacctccataaggttgtttcagtattcccacacatcttctccctgactgggagggttggaaccaacctcatttctttgtgtagtgcttttaaaaataatattgtttttcacataaggcatattaagtgtttttgcaccagatgtattacatggatgtttttctttgactaatttattaccaatgatccatagtaatcagataacacagcaaggttgtcagtaaggmattggtggagatcatcatagtctaaaaagtgatttttgtgacaatgacagttgtcttgttgcagagtgaactttgttgtatataacagtgctgtgcagtataaatataatgtgagcaacataagtaatttttctagtgggtatgttaaaaatttgaggaaaaggaaacatttgggaacaattgtagtaaattttatttaattcagtaatccaaaatagtaa

SEQ ID NO: 122325 - DNA, 582 bp, Homo sapiens
aagaaaaatttcttagttgattattgctttaaacttaatgtctctggcttacagacatgtgtgtctaaatattcatatttaatttctgtgatgacaccaaacctatccagtagtatcgataatcttcttatacatgacctccataaggttgtttcagtattcccacacatcttctccctgactgggagggttggaaccaacctcatttctttgtgtagtgcttttaaaaataatattgtttttcacataaggcatattaagtgtttttgcaccagatgtattacatggatgtttttctttgactaatttattaccaatgatccatagtaatcagataacacagcaaggttgtcagtaaggcattggtggagatcatcatagtctaaaawgtgatttttgtgacaatgacagttgtcttgttgcagagtgaactttgttgtatataacagtgctgtgcagtataaatataatgtgagcaacataagtaatttttctagtgggtatgttaaaaatttgaggaaaaggaaacatttgggaacaattgtagtaaattttatttaattcagtaatccaaaatagtaa

SEQ ID NO: 122326 - DNA, 582 bp, Homo sapiens
aagaaaaatttcttagttgattattgctttaaacttaatgtctctggcttacagacatgtgtgtctaaatattcatatttaatttctgtgatgacaccaaacctatccagtagtatcgataatcttcttatacatgacctccataaggttgtttcagtattcccacacatcttctccctgactgggagggttggaaccaacctcatttctttgtgtagtgcttttaaaaataatattgtttttcacataaggcatattaagtgtttttgcaccagatgtattacatggatgtttttctttgactaatttattaccaatgatccatagtaatcagataacacagcaaggttgtcagtaaggcattggtggagatcatcatagtctaaaaagtgatttttgtgacaatgacagttgtcttgttgcagagtgaactttgttgtatataacagtgctgtgcagtrtaaatataatgtgagcaacataagtaatttttctagtgggtatgttaaaaatttgaggaaaaggaaacatttgggaacaattgtagtaaattttatttaattcagtaatccaaaatagtaa

SEQ ID NO: 122327 - DNA, 644 bp, Homo sapiens
atgtgtttgaatttccattccaggaaggacactttctactattattttaatgtacatctgcatctctctaaaagccaccttgagtagatcctggtcagcataattccaaaatgaaatatgtggcatttacaaatttgtaagggggttatcttttcctattgtatttcatctcttggtcatttctcttttctgtgatttccgcttgcacccccatgattctaatgagcatgataatttggggatgttaccagcatcttcatttacaggctgagaatttttgttgtaaccagcaagaattatgcccaactgccatgatcagtctgtttttattatttagttttataagaaataagcgtcaatatcttagagttacrtgacataaataggactatgtaccttcatattttggtaaaaattagataaaatattcagtaaacatttactcgataccttgtatctgcactcagtttcttgggaaggattaaaagaacttgaaggaagagtacttgtcctccaagatctttgcatgtagctgaagagataaaacatgtgactttttatggagaggttgaactgaataataattggaggccaactgacccatcttcctgttgacttctgtttatcccccagatttcattcag

SEQ ID NO: 122328 - DNA, 499 bp, Homo sapiens
aaatttgtaagggggttatcttttcctattgtatttcatctcttggtcatttctcttttctgtgatttccgcttgcacccccatgattctaatgagcatgataatttggggatgttaccagcatcttcatttacaggctgagaatttttgttgtaaccagcaagaattatgcccaactgccatgatcagtctgtttttattatttagttttataagaaataagcgtcaatatcttagagttacgtgacataaataggactatgtaccttcatattttggtaaaaattagataaaatattcagtaaacatttaytcgataccttgtatctgcactcagtttcttgggaaggattaaaagaacttgaaggaagagtacttgtcctccaagatctttgcatgtagctgaagagataaaacatgtgactttttatggagaggttgaactgaataataattggaggccaactgacccatcttcctgttgacttctgtttatccc

SEQ ID NO: 122329 - DNA, 644 bp, Homo sapiens
atgtgtttgaatttccattccaggaaggacactttctactattattttaatgtacatctgcatctctctaaaagccaccttgagtagatcctggtcagcataattccaaaatgaaatatgtggcatttacaaatttgtaagggggttatcttttcctattgtatttcatctcttggtcatttctcttttctgtgatttccgcttgcacccccatgattctaatgagcatgataatttggggatgttaccagcatcttcatttacaggctgagaatttttgttgtaaccagcaagaattatgcccaactgccatgatcagtctgtttttattatttagttttataagaaataagcgtcaatatcttagagttacgtgacataaataggactatgtaccttcatattttggtaaaaattagataaaatattcagtaaacatttactcgataccttgtatctgcactcagtttcttgggaaggattaaaagarcttgaaggaagagtacttgtcctccaagatctttgcatgtagctgaagagataaaacatgtgactttttatggagaggttgaactgaataataattggaggccaactgacccatcttcctgttgacttctgtttatcccccagatttcattcag

SEQ ID NO: 122330 - DNA, 476 bp, Homo sapiens
aaacatgtgactttttatggagaggttgaactgaataataattggaggccaactgacccatcttcctgttgacttctgtttatcccccagatttcattcagagattcctctctcagctcttcttgctttccctgttttttctcttcccctcctcttgaatttaaaatcatagtatctgaaagtaattatagtcaaaaatctcaacagagataacgctgtaggamaggggcccaatctttgggggcagaagagtgtttaaagaaaggttttaggttttcaattataattcttaataattatgacaaggttcatcttttgaaataattattcagcatttaattgcttaatagacattataagcacttgaacctgcattacatttaattctcacagtaatgtttattattccccttttatacctgaaactcagagagctttagtctaagttgtttagtgacacagctagaaaacagcag

SEQ ID NO: 122331 - DNA, 476 bp, Homo sapiens
aaacatgtgactttttatggagaggttgaactgaataataattggaggccaactgacccatcttcctgttgacttctgtttatcccccagatttcattcagagattcctctctcagctcttcttgctttccctgttttttctcttcccctcctcttgaatttaaaatcatagtatctgaaagtaattatagtcaaaaatctcaacagagataacgctgtaggaaaggggcccaatctttgggggcagaagagtgtttaaagaaaggttttaggttttcaattataattcttaataattatgacaaggttcatcttttgaaataattattcagcatttaattgcttaatagacattataagcacttgaacctgcattacatttaattctcacagtaatgtttattattcccsttttatacctgaaactcagagagctttagtctaagttgtttagtgacacagctagaaaacagcag

SEQ ID NO: 122332 - DNA, 617 bp, Homo sapiens
cctttgttgggccctataaagggtttccggatatcaaatgataaatagtctccagatgaagaaatgctctataacgccccaccgctgtgttttcctatattttgtccttttctgaaaactttaaatacacgaatttttggtagaaatgaaaatctttctgttttatatatttgtttctgtccatggcactctgatatctttgaatctagtaaggatatagccttgtcttatttataccagcaagcagtgttgtcacttaatgctctcatttttcacgtaaatgactgacattttcccaagtcttcacaagtgatttttgaagacgttgctgcattgagcagagactatgtcattgtaattgcagaagtttttaaattaaatatgtttaataaaattttagagcctgtttctgtggaacacrtaacacataatggtggtgtaatgtgtatttaaccataaattagcttcacaaaaatttgtgtacttaaaagtgtttatatccaaagaaattcttatttactgctcagtaatctcttgtgtagaagaaaatatgtaacatagtttgctgagtctttgataataacccccagtgtaaaataaagccgtaaagatgaaat

SEQ ID NO: 122333 - DNA, 542 bp, Homo sapiens
tatcctcctggggtcctttcatttgacatcacattttttggcttcagttaagagaatcactttggtagaagtacttccttgtgttagttgtagtcatgtgaaacctaatctctctcttgaaatctggactacatgttttatgaaaacttaattatgtgtcccttttgctttgtagaatcttctgagcgacctcctttatccacagtaaacaaatatattttcstttttaattaacaaaatgctttgtgatatatacatgatatattaatcaattaatcattatgttgtaaaacccattcagcttactctgaaagaggcagatcccagttcaaaagtagccatgagaaggaaggattcaccacctccaggaaaaggtaaatttgccaatacaaatttcatctggaaagaaggacataaatatattggaaatgttcatggtcttctgattcttatttcttttaccccaataagatagaaggatttgatctaaatgatgctgatgctgttgttagtgtctatgattataaaatgatatttagaag

SEQ ID NO: 122334 - DNA, 542 bp, Homo sapiens
tatcctcctggggtcctttcatttgacatcacattttttggcttcagttaagagaatcactttggtagaagtacttccttgtgttagttgtagtcatgtgaaacctaatctctctcttgaaatctggactacatgttttatgaaaacttaattatgtgtcccttttgctttgtagaatcttctgagcgacctcctttatccacagtaaacaaatatattttcctttttaattaacaaaatgctttgtgatatatayatgatatattaatcaattaatcattatgttgtaaaacccattcagcttactctgaaagaggcagatcccagttcaaaagtagccatgagaaggaaggattcaccacctccaggaaaaggtaaatttgccaatacaaatttcatctggaaagaaggacataaatatattggaaatgttcatggtcttctgattcttatttcttttaccccaataagatagaaggatttgatctaaatgatgctgatgctgttgttagtgtctatgattataaaatgatatttagaag

SEQ ID NO: 122335 - DNA, 646 bp, Homo sapiens
tggtaaccatattactttttttttaatcatcaaagttttaaaggcagttatcagttatctgtggccacaggaccctaagtttttcataagcaagaccaggccagtcctagaaaaatattatcttactgtgcttggagaatatctaaatatagtccatgttatgttaactatatttagcatatattaaaaggatgtttctaattcatttctctacttactacctacccagttaggttttctctttcagtaagtaccctgcctggttctctgaagctttttcttattttctggattcttttttttccttctgtgacatggtaataatattttcggtgatgtctttttactgttctcctctgcttttcttagggtttatgatcttctattatagttttcatttaaggcagctaaatattccccattttcctatagacaaaatcagaagtgcatagaatttcagaatrttaagaaatcctagagactaaacaaaatatcttctagtacttgaatccttgcttaacatcctgatcaagtggttgttcaggtggagaacctgaaactcaaagagagaaaattatttggatacagtaaatcagataaatgggaattgcactcaggtttcttagttcaaaacccagtcttcttt

SEQ ID NO: 122336 - DNA, 646 bp, Homo sapiens
atgggaattgcactcaggtttcttagttcaaaacccagtcttcttttacatcattctgtcattgagtgattttagttttagaaagagggagtggctctggtgaacacagtggaaaaggatgagaatggaatgagctgttgaacccaatgaaagtggataagaatggaatttgcaggggacagacaaatttgaagatgtagattggagattgycattgatccctgcagaagagggatccagaagggggagcccataggaaggtatttagatagtgatgaatgaaatgaagctgtaagtactcaggagggagacttttccagcagcctctctcttgagtatctgagtgtttatgaaggttcttaagcttgctggtttttgtggacctgaataaggcaggatctatataatgacaataattggattttataatttttaatgttttaatcttctgtgaggaatattcccagagtacatttgtactttgattttttacactcagctttcaaacacttgcagtgtttcagggggctccctgtagagttctagagtaaagagaatcaatgggcaatctaagtagcttacatgctgaagatccaagactcccattttccagtgacacagattagtctttgaatcagaaatagat

SEQ ID NO: 122337 - DNA, 646 bp, Homo sapiens
atgggaattgcactcaggtttcttagttcaaaacccagtcttcttttacatcattctgtcattgagtgattttagttttagaaagagggagtggctctggtgaacacagtggaaaaggatgagaatggaatgagctgttgaacccaatgaaagtggataagaatggaatttgcaggggacagacaaatttgaagatgtagattggagattgccattgatccctgcagaagagggatccagaagggggagcccataggaaggtatttagatagtgatgaatgaaatgaagctgtaagtactcaggagggagacttttccagcagyctctctcttgagtatctgagtgtttatgaaggttcttaagcttgctggtttttgtggacctgaataaggcaggatctatataatgacaataattggattttataatttttaatgttttaatcttctgtgaggaatattcccagagtacatttgtactttgattttttacactcagctttcaaacacttgcagtgtttcagggggctccctgtagagttctagagtaaagagaatcaatgggcaatctaagtagcttacatgctgaagatccaagactcccattttccagtgacacagattagtctttgaatcagaaatagat

SEQ ID NO: 122338 - DNA, 646 bp, Homo sapiens
atgggaattgcactcaggtttcttagttcaaaacccagtcttcttttacatcattctgtcattgagtgattttagttttagaaagagggagtggctctggtgaacacagtggaaaaggatgagaatggaatgagctgttgaacccaatgaaagtggataagaatggaatttgcaggggacagacaaatttgaagatgtagattggagattgccattgatccctgcagaagagggatccagaagggggagcccataggaaggtatttagatagtgatgaatgaaatgaagctgtaagtactcaggagggagacttttccagcagcctctctcttgagtatctgagtgtttatgaaggttcttaagcttgctggtttttgtggacctgaataaggcaggatctatatartgacaataattggattttataatttttaatgttttaatcttctgtgaggaatattcccagagtacatttgtactttgattttttacactcagctttcaaacacttgcagtgtttcagggggctccctgtagagttctagagtaaagagaatcaatgggcaatctaagtagcttacatgctgaagatccaagactcccattttccagtgacacagattagtctttgaatcagaaatagat

SEQ ID NO: 122339 - DNA, 607 bp, Homo sapiens
aaagaaactaatggatatcatagtatttgtataataatcaaccgggttgaaaggagtaacattttgagaatatctgtatcaccaatcataatcatcatctcatgtgaatctgtagataagtaaatggcagacttgaggtttgaatctacatatgagtgacttcaaagtctatcctttttgtgttagatcatgtagtaatggtggcaattatcattattttaacttgctgcatgttgttcttaaacctattgtgtctttcttctasactatttcagaaccatactttacgaacagaaggactatttctcaacaatctgcagaaaagtgtaagctatttgaaacctgactattgtattatctactgattcttttttttttttctttcttatttttttgtagacagagtgttactcactgttgccctggctggagtgcagtggcatgatcttggctcactgcaacttccacctcctgggttcaagtgattctcctgcctcagcctcctgagtagctgggattacaggtgtgcaccaccacacctggctatttttgtatttttggtagagatggaatttcaccatgttggccaggctggtcttgaacacct

SEQ ID NO: 122340 - DNA, 607 bp, Homo sapiens
aaagaaactaatggatatcatagtatttgtataataatcaaccgggttgaaaggagtaacattttgagaatatctgtatcaccaatcataatcatcatctcatgtgaatctgtagataagtaaatggcagacttgaggtttgaatctacatatgagtgacttcaaagtctatcctttttgtgttagatcatgtagtaatggtggcaattatcattattttaacttgctgcatgttgttcttaaacctattgtgtctttcttctagactatttcagaaccatactttacgaacagaaggactatttctcaacaatctgcagaaaagtgtaagctatttgaaacctgactattgtattatctactgattcttttttytttttctttcttatttttttgtagacagagtgttactcactgttgccctggctggagtgcagtggcatgatcttggctcactgcaacttccacctcctgggttcaagtgattctcctgcctcagcctcctgagtagctgggattacaggtgtgcaccaccacacctggctatttttgtatttttggtagagatggaatttcaccatgttggccaggctggtcttgaacacct

SEQ ID NO: 122341 - DNA, 607 bp, Homo sapiens
aaagaaactaatggatatcatagtatttgtataataatcaaccgggttgaaaggagtaacattttgagaatatctgtatcaccaatcataatcatcatctcatgtgaatctgtagataagtaaatggcagacttgaggtttgaatctacatatgagtgacttcaaagtctatcctttttgtgttagatcatgtagtaatggtggcaattatcattattttaacttgctgcatgttgttcttaaacctattgtgtctttcttctagactatttcagaaccatactttacgaacagaaggactatttctcaacaatctgcagaaaagtgtaagctatttgaaacctgactattgtattatctactgattcttttttttttttctttcttatttttttgtagacagagtgttactcactgttgccctggctggagtgcagtggcatgatcttggctcactgcaacttccacctcctgggttcaagtgattctcctgcctcagcctcctgagtagctggkattacaggtgtgcaccaccacacctggctatttttgtatttttggtagagatggaatttcaccatgttggccaggctggtcttgaacacct

SEQ ID NO: 122342 - DNA, 623 bp, Homo sapiens
gagtaaatgattgttaggtttgccattagggaaggaaagaagtagaaagcaacctgaaagaacagctccacaaatacaaaggtgaagaggggaaagaagtaagaatacagagttgaataagagtgtcaagatgacaaagattagtataaaacacctcaaaaacggtgaatttaaatgacagtagaatgtctccatatcatattatagaattattttaaatatagattaggaaaagaaagccaagtaattaaaataatgctcagattcttctgagtgacttamgggtgattttaataaaggattggaagaaaatttatgggtgactatatttaacattctgtttaacatttaaaaatagccaggagagaataacttgaatatttctagtttaaataaaacatacatatttaaggtaatgtgtatctctgttaccctcattagattatatagatggaacaaatcatcacacgtacactgaaaatatatgcatctatttattaatttaaaaattctaaatggaaagaaaatttaatcctaactttttaaaatttcagtaaagtgatgtctcatattttatctagtgaatattgtgttcatagatcatgcaaagtaaaatgtgtttt

SEQ ID NO: 122343 - DNA, 407 bp, Homo sapiens
gaattcttctggtattttaatttcaccaataattctggaactgctgtttttgtatttctcaaaatgttttgtcttgcatcgtgcaataaggcagccaccatcatatgtgaccaccgagcacttctaatgcagctagccagaactgatkttttaagtataaagcatcttgttcacttttatactaaatgctgaaatattgttttgaatataccaggttaaataaaatatattaaaatttatttcacctttttttttaagtgtaactactagaaaatttaaaattacacatatggtctgcatcatatttctattagacagcactggctcaccgttctactggttggctagcttgtacctccagataacatctgataatccaatcactagctatcacaaactagatcttt

SEQ ID NO: 122344 - DNA, 370 bp, Homo sapiens
taattctggaactgctgtttttgtatttctcaaaatgttttgtcttgcatcgtgcaataaggcagccaccatcatatgtgaccaccgagcacttctaatgcagctagccagaactgatgttttaagtataaagcatcttgttcacttttatactaaatgctgaaatattgttttgaatataccaggttaaataaaatatattaaaatttatttcacctttttttttaagtgtaactactagaaaatttaaaattacacatatggtctgcatcatatttctattagacagcactggctcaccgttctactggttggctagcttgtaccyccagataacatctgataatccaatcactagctatcacaaact

SEQ ID NO: 122345 - DNA, 561 bp, Homo sapiens
aaatactaggacatggctcatataagatggaataagcctggaaatacacccccctccccaatatttcagaacataaagtctacagaaagagaatcctaatgtattgaacctggtttctcaattgaaacaaaagtcttcaaggaaggagagatacgcaaaatttaacaggaatayatatgaagcagtatctttaaagaatgtaaatatatcaaccaaaagtaaacttgagattcaaatttccattgctaaagtattttcagttagaatgacataattattatataactactcaaaacaaaacaaaacttactggaaaaaagaacaactggtttgagaagaaaaacttttcatggtagagcagaaataactgtcaaagagaaaatacttagaaaaagtcatatataaagagtggcctagttttactgcacacgtctttgccatgcagaaacagctaaatcccatctgacaactactttccctttcgtgtaccttgtctttagagaataaaatatatctgggtttgatatagaggagactaattttcacattaaaaatgatttt

SEQ ID NO: 122346 - DNA, 561 bp, Homo sapiens
aaatactaggacatggctcatataagatggaataagcctggaaatacacccccctccccaatatttcagaacataaagtctacagaaagagaatcctaatgtattgaacctggtttctcaattgaaacaaaagtcttcaaggaaggagagatacgcaaaatttaacaggaatatatatgaagcagtatctttaaagaatgtaaatatatcaaccaaaagtaaacttgagattcaaatttccattgctaaagtattttcagttagaatgacataattattatataactactcaaaacaaaacaaaacttactggaaaaaagaacaactggtttgagaagaaaawcttttcatggtagagcagaaataactgtcaaagagaaaatacttagaaaaagtcatatataaagagtggcctagttttactgcacacgtctttgccatgcagaaacagctaaatcccatctgacaactactttccctttcgtgtaccttgtctttagagaataaaatatatctgggtttgatatagaggagactaattttcacattaaaaatgatttt

SEQ ID NO: 122347 - DNA, 583 bp, Homo sapiens
gtacgtctccatcaatgagtcaacaaaggcctactatgaaactggaatcttcacatacacctgggagtagtaacaaggctrtgccccacctccaccccaaaagcaaagtttcagataaatcctactaaaagggggatttaaataaaatgcagagcttcataacacaacacttaaaatgcaaaggattcaaccaaatataccatgtcataccatactaagaaccaggaaaatctgaacaggaatttgaaaatatagtcaaaaggtgcaaacaatgagaattcatagatgtcataattatctatcaaagattttaaactatatattataaaactgcttcaacaagcaattacagccggacacagtggctcacgcctgtagtcccagcactttgggaggcagaggtggttggatcacttgaggtcaggagttcgagaccagcctagccaacatcgtgaaaccccatctgtactaaaaatacaaaaattacccaggcatggtggttcacgcctgtgattccagctactcgggaggctgaggcatgagaatcacttgaacccaggaagcagaggttgcagtgagctga

SEQ ID NO: 122348 - DNA, 583 bp, Homo sapiens
gtacgtctccatcaatgagtcaacaaaggcctactatgaaactggaatcttcacatacacctgggagtagtaacaaggctgtgccccacctccaccccaaaagcaaagtttcagataaatcctactaaaagggggatttaaataaaatgcagagcttcataacacaacacttaaaatgcaaaggattcaaccaaatatamcatgtcataccatactaagaaccaggaaaatctgaacaggaatttgaaaatatagtcaaaaggtgcaaacaatgagaattcatagatgtcataattatctatcaaagattttaaactatatattataaaactgcttcaacaagcaattacagccggacacagtggctcacgcctgtagtcccagcactttgggaggcagaggtggttggatcacttgaggtcaggagttcgagaccagcctagccaacatcgtgaaaccccatctgtactaaaaatacaaaaattacccaggcatggtggttcacgcctgtgattccagctactcgggaggctgaggcatgagaatcacttgaacccaggaagcagaggttgcagtgagctga

SEQ ID NO: 122349 - DNA, 583 bp, Homo sapiens
gtacgtctccatcaatgagtcaacaaaggcctactatgaaactggaatcttcacatacacctgggagtagtaacaaggctgtgccccacctccaccccaaaagcaaagtttcagataaatcctactaaaagggggatttaaataaaatgcagagcttcataacacaacacttaaaatgcaaaggattcaaccaaatataccatgtcataccatactaagaaccaggaaaatctgaacaggaatttgaaaatatagtcaaaaggtgcaaacaatgagaattcatagatgtcataattatctatcaaagattttaaactatatattataaaactgcttcaacaagcaattacagccggacacagtggctcacgcctgtartcccagcactttgggaggcagaggtggttggatcacttgaggtcaggagttcgagaccagcctagccaacatcgtgaaaccccatctgtactaaaaatacaaaaattacccaggcatggtggttcacgcctgtgattccagctactcgggaggctgaggcatgagaatcacttgaacccaggaagcagaggttgcagtgagctga

SEQ ID NO: 122350 - DNA, 516 bp, Homo sapiens
gattgctacattgaagtatgtagttttgttttttttgtgtgtcagtctttaaccatttgtgtccctgttaacttataattgatgaatttatttgtatttatttttargcagggtaaaaaatagtaatatgtctcataaataatatatgttcctattactagttttggtaggatttaaaaactttataataatcctcaatatagaaacctgcccctttaaccatattactatttgcttttaaaaaaaaattttaggttttgtttctaaaatgcttcacaatttatttttgaaaatataaggaatgaaattctaactttctaatttgaatggaaggatgagttggtagcacacaaagcactaaattgagtaatgtagattttattatttttaatgaatcctttgtttaatattttgcaggttcaatttgtttacttgtgatgtacagagagttttttataccttcccagcttatatttgaatattccttttcaaggttttataaagagatttctctcc

SEQ ID NO: 122351 - DNA, 473 bp, Homo sapiens
tattactagttttggtaggatttaaaaactttataataatcctcaatatagaaacctgcccctttaaccatattactatttgcttttaaaaaaaaattttaggttttgtttctaaaatgcttcacaatttatttttgaaaatataaggaatgaaattctaactttctaatttgaatggaaggatgagttggtagcacacraagcactaaattgagtaatgtagattttattatttttaatgaatcctttgtttaatattttgcaggttcaatttgtttacttgtgatgtacagagagttttttataccttcccagcttatatttgaatattccttttcaaggttttataaagagatttctctcctttacccctttcagcaatgtgcattttgtaagcactttggagccactatcaaatgctgtgaagagaaatgtacccagatgtatcattatccttgtgctgcaggagccgg

SEQ ID NO: 122352 - DNA, 473 bp, Homo sapiens
tattactagttttggtaggatttaaaaactttataataatcctcaatatagaaacctgcccctttaaccatattactatttgcttttaaaaaaaaattttaggttttgtttctaaaatgcttcacaatttatttttgaaaatataaggaatgaaattctaactttctaatttgaatggaaggatgagttggtagcacacaaagcacwaaattgagtaatgtagattttattatttttaatgaatcctttgtttaatattttgcaggttcaatttgtttacttgtgatgtacagagagttttttataccttcccagcttatatttgaatattccttttcaaggttttataaagagatttctctcctttacccctttcagcaatgtgcattttgtaagcactttggagccactatcaaatgctgtgaagagaaatgtacccagatgtatcattatccttgtgctgcaggagccgg

SEQ ID NO: 122353 - DNA, 473 bp, Homo sapiens
tattactagttttggtaggatttaaaaactttataataatcctcaatatagaaacctgcccctttaaccatattactatttgcttttaaaaaaaaattttaggttttgtttctaaaatgcttcacaatttatttttgaaaatataaggaatgaaattctaactttctaatttgaatggaaggatgagttggtagcacacaaagcactaaattgagtaatgtagattttattatttttaatgaatcctttgtttaatattttgcaggttcaatttgtttacttgtgatgtacagagagttttttataccttcccagcttatatttgaatattccttttcaaggttttataaagagatttctctcctttacccctttcagcratgtgcattttgtaagcactttggagccactatcaaatgctgtgaagagaaatgtacccagatgtatcattatccttgtgctgcaggagccgg

SEQ ID NO: 122354 - DNA, 484 bp, Homo sapiens
tcacagcaaataactcaaatcttttacatcactagtaaactcaaaaaatatagcaaaaagcaataacattaaatttcattattgatctactagctttaactatttaatactagtacacttagttttgattactttgaagcaaaaacaataatcttttcttcttttaatgactttttcagttataggaaagatgayattaaaagaagatatacaaccatagcttagctacaggtataaaattgttttaaagatatgtaattgtgctattgaattaaactgaaaacataaatatcaactcatgattttgaaaaaaaaatcttttttatgtttggttttggtaaaaggagagacaaataagtcagaagaacagaaaatacagaaataggcaaactttcccatattcaattaatttttgagcaaggggccaaggtaattcaagagagcaataaataatcttttagaatgatgctggaactgccaaata

SEQ ID NO: 122355 - DNA, 484 bp, Homo sapiens
tcacagcaaataactcaaatcttttacatcactagtaaactcaaaaaatatagcaaaaagcaataacattaaatttcattattgatctactagctttaactatttaatactagtacacttagttttgattactttgaagcaaaaacaataatcttttcttcttttaatgactttttcagttataggaaagatgatattaaaagaaratatacaaccatagcttagctacaggtataaaattgttttaaagatatgtaattgtgctattgaattaaactgaaaacataaatatcaactcatgattttgaaaaaaaaatcttttttatgtttggttttggtaaaaggagagacaaataagtcagaagaacagaaaatacagaaataggcaaactttcccatattcaattaatttttgagcaaggggccaaggtaattcaagagagcaataaataatcttttagaatgatgctggaactgccaaata

SEQ ID NO: 122356 - DNA, 484 bp, Homo sapiens
tcacagcaaataactcaaatcttttacatcactagtaaactcaaaaaatatagcaaaaagcaataacattaaatttcattattgatctactagctttaactatttaatactagtacacttagttttgattactttgaagcaaaaacaataatcttttcttcttttaatgactttttcagttataggaaagatgatattaaaagaagatatacaacyatagcttagctacaggtataaaattgttttaaagatatgtaattgtgctattgaattaaactgaaaacataaatatcaactcatgattttgaaaaaaaaatcttttttatgtttggttttggtaaaaggagagacaaataagtcagaagaacagaaaatacagaaataggcaaactttcccatattcaattaatttttgagcaaggggccaaggtaattcaagagagcaataaataatcttttagaatgatgctggaactgccaaata

SEQ ID NO: 122357 - DNA, 484 bp, Homo sapiens
tcacagcaaataactcaaatcttttacatcactagtaaactcaaaaaatatagcaaaaagcaataacattaaatttcattattgatctactagctttaactatttaatactagtacacttagttttgattactttgaagcaaaaacaataatcttttcttcttttaatgactttttcagttataggaaagatgatattaaaagaagatatacaaccatagcttagctacaggtataaaattgttttaaagatatgtaattgtgctattgaattaaactgaaaacataamtatcaactcatgattttgaaaaaaaaatcttttttatgtttggttttggtaaaaggagagacaaataagtcagaagaacagaaaatacagaaataggcaaactttcccatattcaattaatttttgagcaaggggccaaggtaattcaagagagcaataaataatcttttagaatgatgctggaactgccaaata

SEQ ID NO: 122358 - DNA, 559 bp, Homo sapiens
tggtataataatgagcctacacttttgtattttctggtttaaccttcagaaagttttgtcagtcactcatgggaacaaggtataatatacaaacctaatmaaaatgtataaaaaattatcaaatttgatatacttacacgcaataaagtggctacaagcattagatatgaataaggttgttcatttggaaatcactccaatattcattaaaaataaatattttaggagtcaattaaagaatttaacattatttttgtttctaaaataagtctggtttgaaggatcatgttattctctaaagtattttcattaaattgctattttatccaaaagttagctctctgaacaacaaagccagtgtatgcatatttacatttatctcatttgactaactgataacaacaaaacatatatctctgatgcccaataattacaaagaggggtaacaggtgactgtggtttatcacaattctggcactctatcctccttccagtagttcctggaacagccaaaatcaaatcttcctttatgcaaacattctaaatgcatctgacgtga

SEQ ID NO: 122359 - DNA, 559 bp, Homo sapiens
tggtataataatgagcctacacttttgtattttctggtttaaccttcagaaagttttgtcagtcactcatgggaacaaggtataatatacaaacctaatcaaaatgtataaaaaattatcaaatttgatatacttacacgcaataaagtkgctacaagcattagatatgaataaggttgttcatttggaaatcactccaatattcattaaaaataaatattttaggagtcaattaaagaatttaacattatttttgtttctaaaataagtctggtttgaaggatcatgttattctctaaagtattttcattaaattgctattttatccaaaagttagctctctgaacaacaaagccagtgtatgcatatttacatttatctcatttgactaactgataacaacaaaacatatatctctgatgcccaataattacaaagaggggtaacaggtgactgtggtttatcacaattctggcactctatcctccttccagtagttcctggaacagccaaaatcaaatcttcctttatgcaaacattctaaatgcatctgacgtga

SEQ ID NO: 122360 - DNA, 559 bp, Homo sapiens
tggtataataatgagcctacacttttgtattttctggtttaaccttcagaaagttttgtcagtcactcatgggaacaaggtataatatacaaacctaatcaaaatgtataaaaaattatcaaatttgatatacttacacgcaataaagtggctacragcattagatatgaataaggttgttcatttggaaatcactccaatattcattaaaaataaatattttaggagtcaattaaagaatttaacattatttttgtttctaaaataagtctggtttgaaggatcatgttattctctaaagtattttcattaaattgctattttatccaaaagttagctctctgaacaacaaagccagtgtatgcatatttacatttatctcatttgactaactgataacaacaaaacatatatctctgatgcccaataattacaaagaggggtaacaggtgactgtggtttatcacaattctggcactctatcctccttccagtagttcctggaacagccaaaatcaaatcttcctttatgcaaacattctaaatgcatctgacgtga

SEQ ID NO: 122361 - DNA, 559 bp, Homo sapiens
tggtataataatgagcctacacttttgtattttctggtttaaccttcagaaagttttgtcagtcactcatgggaacaaggtataatatacaaacctaatcaaaatgtataaaaaattatcaaatttgatatacttacacgcaataaagtggctacaagcattagatatgaataaggttgttcatttggaaatcactccaatattcattaaaaataaatattttaggagtcaattaaagaatttaacattatttttgtttctaaaataagtctggtttgaaggatcatgttattctctaaagtattttcattaaattgctattttatccaaaagttagctctctgaacaacaaagccagtgtatgcatatttacatttatctcatttgactaactgataacaacaaaacatatatctctgatgcccaataattacaaagaggggtaacaggtgactgtggtttatcacaattctggcactctatcctccttccagtagttcctggarcagccaaaatcaaatcttcctttatgcaaacattctaaatgcatctgacgtga

SEQ ID NO: 122362 - DNA, 527 bp, Homo sapiens
gttttgttgattaactgaaccttttactattgtgacatgacatttgttatttattgctggaatttttttttttttttttgctatgaaatckactttgttattaatgcagccactcctgctcagctgcctttggaactgttaacatgtatctttttccatccttacaaccaatttgtgtctttacatttaaagtgcatttcttataggcagcctgcagttgggtcttgctttcttgctgagcctgacagtctgtattatagttgaggttcttagacaagtgtcatgtataatgtgactattgatacagttatgtttgtctagtagctgtttgattgctactagtcccaactgttctttgttccccttcttttcctgctttcttttagattagtcaactgttttttactattcaattttatatatatttttgggtttattagcgataactgttttgctatcttagtgtttaggatttttagtatataattttaacttatcacagttcaccttcagtaatattatgcatc

SEQ ID NO: 122363 - DNA, 527 bp, Homo sapiens
gttttgttgattaactgaaccttttactattgtgacatgacatttgttatttattgctggaatttttttttttttttttgctatgaaatcgactttgttattaatgcagccactcctgctcagctgcctttggaactgttaacatgtatctttttccatccttacaaccaatttgtgtctttacatttaaagtgcatttcttataggcagcctgcagttgggtcttgctttcttgctgagcctgacagtctgtattatagttgaggttcttagacaagtgtcatktataatgtgactattgatacagttatgtttgtctagtagctgtttgattgctactagtcccaactgttctttgttccccttcttttcctgctttcttttagattagtcaactgttttttactattcaattttatatatatttttgggtttattagcgataactgttttgctatcttagtgtttaggatttttagtatataattttaacttatcacagttcaccttcagtaatattatgcatc

SEQ ID NO: 122364 - DNA, 527 bp, Homo sapiens
gttttgttgattaactgaaccttttactattgtgacatgacatttgttatttattgctggaatttttttttttttttttgctatgaaatcgactttgttattaatgcagccactcctgctcagctgcctttggaactgttaacatgtatctttttccatccttacaaccaatttgtgtctttacatttaaagtgcatttcttataggcagcctgcagttgggtcttgctttcttgctgagcctgacagtctgtattatagttgaggttcttagacaagtgtcatgtataatgtgactattgatacagttatgtttgtctagtagctgtttgattgctactagtcccaactgttctttgttccccttcttttcctgctttcttttagattagtcaactgttttttackattcaattttatatatatttttgggtttattagcgataactgttttgctatcttagtgtttaggatttttagtatataattttaacttatcacagttcaccttcagtaatattatgcatc

SEQ ID NO: 122365 - DNA, 610 bp, Homo sapiens
agccactccctctttctaaaactaaaatcgctcaatgacagaatgtaaaagaagactgggttttgaacaaagaaagctgagtgcaattctcatttctctgatttactgtatccaaataattttttctctttgagtttcaggttctccacctgaacaaccacttgatcaggatgttaagcaaggattcaagtactagaggatattttgtttagtctctaggatttcttaacattctgaaattctatgcacctctgattttgtctatagaaaaatggggaatatttagctgccgttcmcgaaaactataatagaagatcataagaaaagcagaagagaagtaaaaagaaatcaagaaagtattaaaatgtcatagaaggaaaataaaagaatccagaaaataagaaaaagcttcagcgaactaggcagggtactcacttaaagagaaatcctaactgggtaggcagtaagtagagaaatgaattagaaatatccttttaatatatgctaaatatagttaacataacatggtctatctttagataatctccatgcacagtaagataatattttttctaggactgacctggtcttgcttacaaaaatcttaggg

SEQ ID NO: 122366 - DNA, 602 bp, Homo sapiens
taaaattttaagttataaaatgttaatatagactaatagtaataatatagtcatactactgaaataataattttaatgtatttatgttgcaacattttaagaccatgataaatcagatatatggaaatgctcatacctaaaatggtattttgaagttgattcaataaattggggtactttgacagttaatttcagatttcctagatgagctgaagtgtattmcctatttcataattacttttcttcagtagctttaaatatgtcttagtaggtaaaattttgttcttcttcatgtcagtttgacttaaatctgaaactatttcaatctcaagttatgtatagatatgatcattctattttcaaaggcatctaattttacttataatatggggaaaatgaagtaaattttagccaaatcatatttgatttaatcttcccactggcatttataatttactttcatttttaaataaaaaatttgctcctaatttttatttcaaggctcaattactatcatttggatataactttgtccaggacaaaagaggcatagctatctgtgatttattagtttgacactgcatccccattttcagactaag

SEQ ID NO: 122367 - DNA, 602 bp, Homo sapiens
taaaattttaagttataaaatgttaatatagactaatagtaataatatagtcatactactgaaataataattttaatgtatttatgttgcaacattttaagaccatgataaatcagatatatggaaatgctcatacctaaaatggtattttgaagttgattcaataaattggggtactttgacagttaatttcagatttcctagatgagctgaagtgtattccctatttcataattactttycttcagtagctttaaatatgtcttagtaggtaaaattttgttcttcttcatgtcagtttgacttaaatctgaaactatttcaatctcaagttatgtatagatatgatcattctattttcaaaggcatctaattttacttataatatggggaaaatgaagtaaattttagccaaatcatatttgatttaatcttcccactggcatttataatttactttcatttttaaataaaaaatttgctcctaatttttatttcaaggctcaattactatcatttggatataactttgtccaggacaaaagaggcatagctatctgtgatttattagtttgacactgcatccccattttcagactaag

SEQ ID NO: 122368 - DNA, 602 bp, Homo sapiens
taaaattttaagttataaaatgttaatatagactaatagtaataatatagtcatactactgaaataataattttaatgtatttatgttgcaacattttaagaccatgataaatcagatatatggaaatgctcatacctaaaatggtattttgaagttgattcaataaattggggtactttgacagttaatttcagatttcctagatgagctgaagtgtattccctatttcataattacttttcttcagtagctttaaatatgtcttagtwggtaaaattttgttcttcttcatgtcagtttgacttaaatctgaaactatttcaatctcaagttatgtatagatatgatcattctattttcaaaggcatctaattttacttataatatggggaaaatgaagtaaattttagccaaatcatatttgatttaatcttcccactggcatttataatttactttcatttttaaataaaaaatttgctcctaatttttatttcaaggctcaattactatcatttggatataactttgtccaggacaaaagaggcatagctatctgtgatttattagtttgacactgcatccccattttcagactaag

SEQ ID NO: 122369 - DNA, 639 bp, Homo sapiens
tttgttttttattcattcagataagatgaaaaatcagtatctgttactccatcagagctagtaacagattgcagcagagcttcagcacagcacatgctgcaaactggccagagtgmttttctttcctctttgcttaactgcttctttctcatccttcatttctcagtgtagcatctcttcctcacggaaatcttccctgggtgaagtatagatcaaattatcttatgcaatcatataactatggtttgtgtcttttttacaggacccatctgagtttataactgtcatctttttatcttggttcttcgctatactttaagctaaaataatagcagaagtgttgtcttatcttcagagcttattataatatcttccaccttgtaggcactcaatatgtacatacttgttcagtgtctgaatgaatacatgttaaaaatgcacagtcctttatatccagaaatctactcatgtattttatctctactttgctttttcccggttacagattgtgttcacctattgaaaattaaaaatacattttgtttgtgtaaaagatgaatagaacttaaagaaaatctctgtgagcaacttggagtaaaaattcaaaaaaatgaaaaataaggctagtgtactacaaaa

SEQ ID NO: 122370 - DNA, 639 bp, Homo sapiens
tttgttttttattcattcagataagatgaaaaatcagtatctgttactccatcagagctagtaacagattgcagcagagcttcagcacagcacatgctgcaaactggccagagtgcttttctttcctctttgcttaactgcttctttctcatccttcatttctcagtgtagcatctcttcctcacggaaatcttccctgggtgaagtatagatcaaattatcttatgcaatcatataactatggtttgtgtyttttttacaggacccatctgagtttataactgtcatctttttatcttggttcttcgctatactttaagctaaaataatagcagaagtgttgtcttatcttcagagcttattataatatcttccaccttgtaggcactcaatatgtacatacttgttcagtgtctgaatgaatacatgttaaaaatgcacagtcctttatatccagaaatctactcatgtattttatctctactttgctttttcccggttacagattgtgttcacctattgaaaattaaaaatacattttgtttgtgtaaaagatgaatagaacttaaagaaaatctctgtgagcaacttggagtaaaaattcaaaaaaatgaaaaataaggctagtgtactacaaaa

SEQ ID NO: 122371 - DNA, 379 bp, Homo sapiens
aacacaccaaaattgaaacacaaagaaatacaaaacatgaacagaccaataacaaataatgagaacaaagctgtaataaaaagtctcccaggaaagaaaagccccaatattctatggcttcactactgaattctaacaaatatttaaagaactaataccaatcctactgaaactattccacaaaatacagatggggartacttccaaactcattctataacaccagaattacctttataccaaaatcaaagacactttaaaaaaagaaaactacaatatctccaattaatattgatgcaaaaatcctcaacaaaatgctagcaaacctttaagcaataaattaaaaatgtcattcttcatgatcatgtgtgatttatca

SEQ ID NO: 122372 - DNA, 612 bp, Homo sapiens
  misc_feature (1)...(612): n = A,T,C or G
tcacattaactgacttcaaattatattacaaagctatagtaactgtagcagcctggtactggcataaaaatagacacataaaccaatggaattgaacagawaacccagaaaaaaattttatacattttcactgaactcatttccaacaatggtgccaagaacttaaattagggaaaagacaatctcttcaataaatcatgcttggaaactggatatctacatgcaaaagaatgaaattataaccccaactcttgccatatacaaaagtcgaatcaaaatggattaaatacttaaatctaagacctcgaattaaaaaactactgcaagaaaacattggggaaagtctctccaggtcttggcaaaaatgtcttgagtaataccccacaagcacaggcaaccaaagcaaatatggacaaatgaagttacatcaagttaaaaatcttctgtatgtcaaaggaaatgatcaataaagtgaggagacaacccacnagaataggagaacatatttgcaaactattcacctgacaaaagattaataactagaacagataagcagctcaaactactgtataggaaaaaaatctagtaatctgatctttacaatgggcaaaa

SEQ ID NO: 122373 - DNA, 612 bp, Homo sapiens
  misc_feature (1)...(612): n = A,T,C or G
tcacattaactgacttcaaattatattacaaagctatagtaactgtagcagcctggtactggcataaaaatagacacataaaccaatggaattgaacagaaaacccagaaaaaaattttatacattttcactgaactcatttccaacaawggtgccaagaacttaaattagggaaaagacaatctcttcaataaatcatgcttggaaactggatatctacatgcaaaagaatgaaattataaccccaactcttgccatatacaaaagtcgaatcaaaatggattaaatacttaaatctaagacctcgaattaaaaaactactgcaagaaaacattggggaaagtctctccaggtcttggcaaaaatgtcttgagtaataccccacaagcacaggcaaccaaagcaaatatggacaaatgaagttacatcaagttaaaaatcttctgtatgtcaaaggaaatgatcaataaagtgaggagacaacccacnagaataggagaacatatttgcaaactattcacctgacaaaagattaataactagaacagataagcagctcaaactactgtataggaaaaaaatctagtaatctgatctttacaatgggcaaaa

SEQ ID NO: 122374 - DNA, 599 bp, Homo sapiens
tgctagtgtgtgatacgtgtgacaaagggtatcatactttttgtcttcaacgaattatgaaatctgtaccaaccaatggctggaaatgcaaagtaagttgtttacttttttaaatcctctgtatgttttatatggagaacagacaaatcggatatctattcaaatctatacattaccatcagctttttaaaaacagctttattgacatataactgacatacagtaaactgtacactcttcaagataatgaacatagtcatcaccatcaaagtttcctggtgccwcttggcttgctttgtggctgttcaaacccaaaccctctgtcttcctagtctgctttttcactatagattagtattcacttcctagaatttttaataaaagcttcatatactatatactcgtttttggtctggcttctttaactcagtgtaattattttgaaattcatccctattgctgcacagatcagtagtgattcttttgtattactgagtgctggagataccacaatttgtgtattgaatcacctgttggtgaacatttagggtccttcaaaattttgagctattataaaaaatgccgatgaactcattaac

SEQ ID NO: 122375 - DNA, 568 bp, Homo sapiens
attgactttttaaaggtgtagcatttgtgtttattaatttcatttagttagatgaagtccttttaccttattttttgacttgttgattcaacaagttacaattgaccactattaattgttcctatcaatttatcatatttttaaacaaataatttgtggctgttatttagcaagtaggtcaggccagtgttaatatattgtgttttttaccagtataaaattgttmtttattctatgtaatgtgttttttgttgagggatcaggaagggcaggtattttgctttgcctgacactatggccacgtagggtgttagtttaacagttgaatggttatcttttcacatcttattttggattcttttgtgttataaaaatgtatcttttgaaaagcttaatagaggtaactgtttggattgacggttgtaattgaaatgcttggctgttttgagacaaaatttttcttttctttctattttttctcttcttttacttcctgcaatgatttataattcagaatctcattttgtgaatgtaaatgattataaatattaaagatataaattttctc

SEQ ID NO: 122376 - DNA, 618 bp, Homo sapiens
tgaagtccttttaccttattttttgacttgttgattcaacaagttacaattgaccactattaattgttcctatcaatttatcatatttttaaacaaataatttgtggctgttatttagcaagtaggtcaggccagtgttaatatattgtgttttttaccagtataaaattgttatttattctatgtaatgtgttttttgttgagggatcaggaagggcaggtattttgctttgcctgacactatggccacgtagggtgttagtttaacagttgaatggttatcttttcacatcttattttggattcttttgtgttataaaaatgtatcttttgaaaagcttaatagaggtaactgtttggattgacggttgtaattgaaatgcttggctgttttgagacaaaatttttcttttctttctattttttctcttcttttacttcctgcaatgatttataattcagaatctcattttgtgaatgtaaatgattataaatattaaagatataaattttctcccattccccactgamaataaagtttttattccccttttctctgtttgattcgattaacctagattgtaaaccttgtcacaattttcttgcaaaaatatattt

SEQ ID NO: 122377 - DNA, 587 bp, Homo sapiens
tagcagtggtaggatagtaacaggaggcagtgtcagactttctttgacttagatgaaaagccaatcgaaggtttgaatggaggagtgacatgatttgagcctgctttttaactggatcagtctggctctcctaatggtaataggccaaaagaaggcgagacaaaacaggacacaatttaggagatagcggtaatcaggcaagggaagatggtgacagcttggtgtctagggtgcaagcagtggaagtgatgagaagtggctggactctggctatattgtgtrcattgtggaggaaaagacctcaggagttgcttttacctgtgtgctataggatgtaagagagaaaggagtcaagggtggtttcatggtttttggcctggagaacaggaaaatgaggaaaactgatagctgtaggtttgtagagaaagaatcaagttcagtttcatatgctttaaacttgaggtgcctgttaaaatatccagatggaaatatgttcattttaatgtcattcttgtaccaactagatgattctgtgatttacaagaaaaaggaaagagatacattttgaaatacaattaaaataacca

SEQ ID NO: 122378 - DNA, 610 bp, Homo sapiens
tttagttggctcacagttctgcaggctgtacaagacgcatagcagcttctgcttctggggagacctcaggaagcttagatggcagacagcaaagggaaagtaggcttgtcttacatggcaggagcaggactgagagagagtgaaggtgctacgcactttcaaacaaccagatctcatgagaactcacatattatcaggagaacagcaccaagagggtggtgctaaaccgttcatagagctctgcttccatgatcccatcaactcccaccatgacctcattttggacactgggaattacaactcaacatgagatttgagcagggacacatatccraaccatatcacataccattcttcctctgtctttcaagtccctaatattcattcctgcaccacctgccaccttaccacaaagccaatgctacatgtgttaggtttctgttatagcagcaccctgccttaagataccaatgtatgtattcgttagggttgtattcgctgctataacaaaaaatcagaggcttaatacaaataactttctttcccacataatagtaaaatgatttctagttggaaatcgtaagcaatatataaataggctgataaaaaa

SEQ ID NO: 122379 - DNA, 610 bp, Homo sapiens
tttagttggctcacagttctgcaggctgtacaagacgcatagcagcttctgcttctggggagacctcaggaagcttagatggcagacagcaaagggaaagtaggcttgtcttacatggcaggagcaggactgagagagagtgaaggtgctacgcactttcaaacaaccagatctcatgagaactcacatattatcaggagaacagcaccaagagggtggtgctaaaccgttcatagagctctgcttccatgatcccatcaactcccaccatgacctcattttggacactgggaattacaactcaacatgagatttgagcagggacacatatccaaaccatatcacataccattcttcctctgtctttcaagtccctaatatycattcctgcaccacctgccaccttaccacaaagccaatgctacatgtgttaggtttctgttatagcagcaccctgccttaagataccaatgtatgtattcgttagggttgtattcgctgctataacaaaaaatcagaggcttaatacaaataactttctttcccacataatagtaaaatgatttctagttggaaatcgtaagcaatatataaataggctgataaaaaa

SEQ ID NO: 122380 - DNA, 555 bp, Homo sapiens
ggagatggagttggccctccgtgtccccgggtttcacatccatggattcaaccaactgcagattgaaacctgtggatatggaagactgactgtactaggtatactaggtcattatatataataagggacttgagcatctggggatttttcatctgtggggtcttggaaccaatcttccacaggyacaaagggccaactctagtgcagtctcgccaatgactagactgaaaggaagttaggtatttcactgaagacttacatgttaaatagtgctgatggaatttgaatcttgatcctccaaagaatctgttcttttgttattttctgcagttctctcctaaatgttttagaagagagaattagcacaacataaatgtataatttctcagcccaatttactaacggtgttgcaaaatatctgattaatgcttccagccatttggatttgtggtttcaaatatgtgtacaaaatattaaaaagttaatatagaaatgtccttctcagatctgtccaagtttaatttgctatgccttaagacataattattagttcat

SEQ ID NO: 122381 - DNA, 629 bp, Homo sapiens
tttcttattctattggtatataaaatctatttttggccaggtgcggtgactcatgcctgtaatcccagcactttgggaggccgaggcgagtggawcacctgaggtcaggagtttgagaccagcctggccaacatggtgaaaccctgtctgtactaaaaatacaaaaattagctgggtgtggtggcaggtgcctgtaatcccagctactcaggaggctgaggcaagagaattgcttgaatccaggagtcagagcagtgagtggaaattgtgccactgaactccatcctgtgcaacagagtgagactctgtctttaaaaaataaaaataaaaaaaaaaacaacaaaactaatgttaattaaccatttgtggggaccatggaactgagtagaaatgattctccttcaagaaatcctcccctgatagtttttcctcttttaactattaaaagacaaacttaagacaatttaaatttaatggcctttaactgagcaaagaatacctcaggtgttgggcagccctcacaaccaccagaggaggttcagagcgctctgctcttcaacatgagcaggaaacatttatggacagacaatgcaagtgaggtacagaaacagcttcattcctgacagctt

SEQ ID NO: 122382 - DNA, 653 bp, Homo sapiens
ttcccctcaaaaggcatctgtccacatctcccctagaactttgctagactgattattttttctcctcctcttatctttaaccatttgcttttcactactcctctgcccaccaacatacttctgtgccaaccattcgaaaaacaaaacaaaatacccatcctcagcacaactacttcctctgcccaaaagtcattttttagttgtcttcacatcaytgttttaccaacggcggctcaacccactgctaccatagcctttcagaccaacttctgatcttgtcatcaacttctgaccttagagaagatggacatagctaattctgccccttcttttggaaacatttcctgttattccacctctgacagctttcagcatctttactgaacttggcattgccaagttttctgttttcttctcgctgtaaaactatggatgagaaataatatccagctccacactggccattgagaggctagacattagggaaaatattatttctagcctcaatttatctttagagctccagccttccattttcagttgctattgctaataataacaataagtaatgtatatattggttactctgggccaggcacttttctaagcactttaaatatattaactatttcatgaacatttctagttggtca

SEQ ID NO: 122383 - DNA, 624 bp, Homo sapiens
atcctgcactacagacagatatgtccaactttttatttggcatctccacttggatgccatagacatctcataattaatgtgttcaaagccaaactcctcattccatttttcttctgtaattgtgccactcacccattctctgtctcattaataactgtccatctgttagttactgaggtcaaaatgttaacagtataaagtatctgagtcacatggcaccaaaataagttaccaccgatgaatccgtatgagtctgcagcaacctcaattcttgcctccttagaggaaagaatttgacctaggaggcataaagcagaaggagagacaaggcaagttttagagcaggagtgaaagtttattaaaaagctttagagcaagaatgaaaggaaggaaagtacacttggaagagggcaacttgaaagacaagtgtgtggtttgatcttttggcttggccttttatatgttggcatacttccggagtcttgcattacttctccctggattcttcccttagggtgggctgtcacctgggaggggagcatgcgtaytgtgtttactggggttgtacacatgctcacttgaggcattcttcccttaccagtcacatgtccctaggaggtcata

SEQ ID NO: 122384 - DNA, 603 bp, Homo sapiens
cagaagttcttgggagtcttgttgctgaaacccatcaaacttgggagcatattttgctatggtccgctataaatataagagaagtcacagtcattatttcctacccataaaatttggaatgaacatgtcctataatccaatcagagccattgtaagaaaataaatagtatagtacttagtctgcctccatttcaacaaatgtattttggataatcatgaaatcttttgaatcttaatgtcaaatgaccaaaaaaaaaaagagaagtattttggccaatactgtgtcctcagttcagtatcatgtaagcaaactgttcttcaggcacatagatgttatttaagacagaaatattaaaacagcatttgctcacatggaaagacatcctgttctataatgttttacacatttttatatgcatataaaatatgtatattttacaggtacattatacataacatgcataaaataatgtgtatataataatacatagcatgtataaaataatatgtgtatatattattttatataatgtaatgttgtcttcaacaattacattttctggtcttrttgcatcctaacttttattaaccgcattagaatta

SEQ ID NO: 122385 - DNA, 578 bp, Homo sapiens
taccacccttctttccctcactgccactcaaacctgacttctgtcaatagggtcacaatgccttctgcatgacctcactaagctctgcctctgcccattgatatgacccctaattatgtggtcactggagctgctttcaggtgtccttgtcccaagggacatacagcacacagcctgtggagggtggaggaaccaactgcaaggtgggtttccagtagggccaactggkgttaaagaaggggtgggaggcaataaagaggcttgctttcagggtgtaagtgtaggagacaggaatgtagacaacagatttcagcctccactttactttctagtggtattattattattattattatcagtagtattatcaccatcattatttgctgtggtatgagtgtttgtgtctctcccccaaaattcatgctgaaatctaatccccaatgcaatagtattaagaagcggaacatttgggaagtgattaaggaacactgacctttacccacttggcccaccatgacccacctgatgcagactttccccctttgttagggaagtgcaattcagacaaccttttatgc

SEQ ID NO: 122386 - DNA, 578 bp, Homo sapiens
taccacccttctttccctcactgccactcaaacctgacttctgtcaatagggtcacaatgccttctgcatgacctcactaagctctgcctctgcccattgatatgacccctaattatgtggtcactggagctgctttcaggtgtccttgtcccaagggacatacagcacacagcctgtggagggtggaggaaccaactgcaaggtgggtttccagtagggccaactgggkttaaagaaggggtgggaggcaataaagaggcttgctttcagggtgtaagtgtaggagacaggaatgtagacaacagatttcagcctccactttactttctagtggtattattattattattattatcagtagtattatcaccatcattatttgctgtggtatgagtgtttgtgtctctcccccaaaattcatgctgaaatctaatccccaatgcaatagtattaagaagcggaacatttgggaagtgattaaggaacactgacctttacccacttggcccaccatgacccacctgatgcagactttccccctttgttagggaagtgcaattcagacaaccttttatgc

SEQ ID NO: 122387 - DNA, 606 bp, Homo sapiens
ggtcacaatgccttctgcatgacctcactaagctctgcctctgcccattgatatgacccctaattatgtggtcactggagctgctttcaggtgtccttgtcccaagggacatacagcacacagcctgtggagggtggaggaaccaactgcaaggtgggtttccagtagggccaactggggytaaagaaggggtgggaggcaataaagaggcttgctttcagggtgtaagtgtaggagacaggaatgtagacaacagatttcagcctccactttactttctagtggtattattattattattattatcagtagtattatcaccatcattatttgctgtggtatgagtgtttgtgtctctcccccaaaattcatgctgaaatctaatccccaatgcaatagtattaagaagcggaacatttgggaagtgattaaggaacactgacctttacccacttggcccaccatgacccacctgatgcagactttccccctttgttagggaagtgcaattcagacaaccttttatgcacgaccctgttcattctctaaacctcaagctctattgctgtcaaacacacagaactagtttatctcactagagatgtg

SEQ ID NO: 122388 - DNA, 578 bp, Homo sapiens
taccacccttctttccctcactgccactcaaacctgacttctgtcaatagggtcacaatgccttctgcatgacctcactaagctctgcctctgcccattgatatgacccctaattatgtggtcactggagctgctttcaggtgtccttgtcccaagggacatacagcacacagcctgtggagggtggaggaaccaactgcaaggtgggtttccagtagggccaactggggttaaakaaggggtgggaggcaataaagaggcttgctttcagggtgtaagtgtaggagacaggaatgtagacaacagatttcagcctccactttactttctagtggtattattattattattattatcagtagtattatcaccatcattatttgctgtggtatgagtgtttgtgtctctcccccaaaattcatgctgaaatctaatccccaatgcaatagtattaagaagcggaacatttgggaagtgattaaggaacactgacctttacccacttggcccaccatgacccacctgatgcagactttccccctttgttagggaagtgcaattcagacaaccttttatgc

SEQ ID NO: 122389 - DNA, 593 bp, Homo sapiens
cttgtgtgatttcaggtatccagaagttgacttaaaagttcctcttacaggttaggttcatttgcatttctctaatgaccartgatgatgagctttttttcatgtttgttggctgcataaatgtctttttttgagaaatgtctgttcacatcctttgcccactttttgatggggttgaaactcttgtggtgatcctagttaaaacacaactctgcgtggataggtattgggtagcaattgactcttcctaagatttttttttttttcctgagacaaacagtaggaggttgacactatagccatcaccaaataaacaggagacactggagctttgaaaggttgaattatttgcacaagatcactcagttgatgaatggcagagcaaaagttttgaaaccagggttatctgactttagagctcttttattcttaggtacaaaaaaaattgtctctatttttgcaaagaccacagcttacatcagagcttggctgatttctctgatgtctacatctcatcaacaatctaccttttggcttctcaacacatactgattattaatgtagggtgaccactgttagagaggtcgaaaggt

SEQ ID NO: 122390 - DNA, 593 bp, Homo sapiens
cttgtgtgatttcaggtatccagaagttgacttaaaagttcctcttacaggttaggttcatttgcatttctctaatgaccaatgatgatgagctttttttcatgtttgttggctgcataaatgtctttttttgagaaatgtctgttcacatcctttgcccactttttgatggggttgaaactcttgtggtgatcctagttaaaacacaactctgygtggataggtattgggtagcaattgactcttcctaagatttttttttttttcctgagacaaacagtaggaggttgacactatagccatcaccaaataaacaggagacactggagctttgaaaggttgaattatttgcacaagatcactcagttgatgaatggcagagcaaaagttttgaaaccagggttatctgactttagagctcttttattcttaggtacaaaaaaaattgtctctatttttgcaaagaccacagcttacatcagagcttggctgatttctctgatgtctacatctcatcaacaatctaccttttggcttctcaacacatactgattattaatgtagggtgaccactgttagagaggtcgaaaggt

SEQ ID NO: 122391 - DNA, 593 bp, Homo sapiens
cttgtgtgatttcaggtatccagaagttgacttaaaagttcctcttacaggttaggttcatttgcatttctctaatgaccaatgatgatgagctttttttcatgtttgttggctgcataaatgtctttttttgagaaatgtctgttcacatcctttgcccactttttgatggggttgaaactcttgtggtgatcctagttaaaacacaactctgcgtggataggtattgggtagcaattgactcytcctaagatttttttttttttcctgagacaaacagtaggaggttgacactatagccatcaccaaataaacaggagacactggagctttgaaaggttgaattatttgcacaagatcactcagttgatgaatggcagagcaaaagttttgaaaccagggttatctgactttagagctcttttattcttaggtacaaaaaaaattgtctctatttttgcaaagaccacagcttacatcagagcttggctgatttctctgatgtctacatctcatcaacaatctaccttttggcttctcaacacatactgattattaatgtagggtgaccactgttagagaggtcgaaaggt

SEQ ID NO: 122392 - DNA, 584 bp, Homo sapiens
accacagcttacatcagagcttggctgatttctctgatgtctacatctcatcaacaatctaccttttggcttctcaacacatactgattattaatgtagggtgaccactgttagagaggtcgaaaggtatgcatccctgagtttcctccctgcyttccttccttcttttcttccttccttcctgccttagtccatttgggatgctattaaaaagtaatataaacagggtggcttataaagagcagaagtttacttctcacagttctcgaggttggaagtccaagatcaagacaccggcataggtgtctggagagagctcgttcccttctctgtgttgttatgtggtgaaaggtacaaacgagctccttcaggcctcttttataagggcagcaatcccatcacaagggcttcactccacgacttaatcacctcctcaaagcccgcaccttgtaatatcatcaccaccttgggggttggcatttcaacagatgaatggggagacagaaatattcaaacattcgggccacagcacttccttacctccttcctccctccgtcaatttattcattcatgtactgattct

SEQ ID NO: 122393 - DNA, 583 bp, Homo sapiens
tcagttgatgaatggcagagcaaaagttttgaaaccagggttatctgactttagagctcttttattcttaggtacaaaaaaaattgtctctatttttgcaaagaccacagcttacatcagagcttggctgatttctctgatgtctacatctcatcaacaatctaccttttggcttctcaacacatactgattattaatgtagggtgaccactgttagagaggtcgaaaggtatgcatccctgagtttcctccctgctttccttccttcttttcttcctyccttcctgccttagtccatttgggatgctattaaaaagtaatataaacagggtggcttataaagagcagaagtttacttctcacagttctcgaggttggaagtccaagatcaagacaccggcataggtgtctggagagagctcgttcccttctctgtgttgttatgtggtgaaaggtacaaacgagctccttcaggcctcttttataagggcagcaatcccatcacaagggcttcactccacgacttaatcacctcctcaaagcccgcaccttgtaatatcatcaccaccttgggggttggcat

SEQ ID NO: 122394 - DNA, 583 bp, Homo sapiens
tcagttgatgaatggcagagcaaaagttttgaaaccagggttatctgactttagagctcttttattcttaggtacaaaaaaaattgtctctatttttgcaaagaccacagcttacatcagagcttggctgatttctctgatgtctacatctcatcaacaatctaccttttggcttctcaacacatactgattattaatgtagggtgaccactgttagagaggtcgaaaggtatgcatccctgagtttcctccctgctttccttccttcttttcttccttccttcctgccttagtccatttgggatgctattaaaaagtaatataaacagggtggcttataaagagcagaagtttacttctcacagttctcgaggttggaagtccaagatcaagacaccggcataggtgtctggagagagctcgytcccttctctgtgttgttatgtggtgaaaggtacaaacgagctccttcaggcctcttttataagggcagcaatcccatcacaagggcttcactccacgacttaatcacctcctcaaagcccgcaccttgtaatatcatcaccaccttgggggttggcat

SEQ ID NO: 122395 - DNA, 583 bp, Homo sapiens
tcagttgatgaatggcagagcaaaagttttgaaaccagggttatctgactttagagctcttttattcttaggtacaaaaaaaattgtctctatttttgcaaagaccacagcttacatcagagcttggctgatttctctgatgtctacatctcatcaacaatctaccttttggcttctcaacacatactgattattaatgtagggtgaccactgttagagaggtcgaaaggtatgcatccctgagtttcctccctgctttccttccttcttttcttccttccttcctgccttagtccatttgggatgctattaaaaagtaatataaacagggtggcttataaagagcagaagtttacttctcacagttctcgaggttggaagtccaagatcaagacaccggcataggtgtctggagagagctcgttyccttctctgtgttgttatgtggtgaaaggtacaaacgagctccttcaggcctcttttataagggcagcaatcccatcacaagggcttcactccacgacttaatcacctcctcaaagcccgcaccttgtaatatcatcaccaccttgggggttggcat

SEQ ID NO: 122396 - DNA, 570 bp, Homo sapiens
agacatgaaatgaataaggataaatgaataartggatgaatcctcaatatcactattttataataatttattctggggaaaaaaaggcaccaaacctcagagccataagcagaaatgaaaatccaccagaaaatgcaaaattattgtgaagactttctatttgaataggaggagacttggatctgtaatcatgagtccatagatggaacattctcaggttacacccatgccataatttgaacatttgaatcaggaatgcaagctttttctctctagctgaattgttgtcgttgttgttgttcttcttctttttaaattttgcagtgatttactttgagtggagtcatttgctcttgagaagaagcatcaccactaaaggatgctttattttatttctgaaaggcatttgcaggtagctcagcagatctgttttgccacttttgtatcacgcccttgtgtgcttagccacatacatgtagaaattggttaaaatgaaacaaaagtgcaataaactgctgcttctggatttaagtattagttaccgcaaaattatttcaaaaaatatccatt

SEQ ID NO: 122397 - DNA, 570 bp, Homo sapiens
agacatgaaatgaataaggataaatgaataagtggatgaatcctcaatatcactattttataataatttattctggggaaaaaaaggcaccaaacctcagagccataagcagaaatgaaaatccaccagaaaatgcaaaatkattgtgaagactttctatttgaataggaggagacttggatctgtaatcatgagtccatagatggaacattctcaggttacacccatgccataatttgaacatttgaatcaggaatgcaagctttttctctctagctgaattgttgtcgttgttgttgttcttcttctttttaaattttgcagtgatttactttgagtggagtcatttgctcttgagaagaagcatcaccactaaaggatgctttattttatttctgaaaggcatttgcaggtagctcagcagatctgttttgccacttttgtatcacgcccttgtgtgcttagccacatacatgtagaaattggttaaaatgaaacaaaagtgcaataaactgctgcttctggatttaagtattagttaccgcaaaattatttcaaaaaatatccatt

SEQ ID NO: 122398 - DNA, 570 bp, Homo sapiens
agacatgaaatgaataaggataaatgaataagtggatgaatcctcaatatcactattttataataatttattctggggaaaaaaaggcaccaaacctcagagccataagcagaaatgaaaatccaccagaaaatgcaaaattattgtgaagactttctatttgaataggaggagacttggatctgtaatcatgagtccatagatggaacattctcaggttacacccatgccataatttgaacatttgaatcaggaatgcaagctttttctctctagctgaattgttgtcgttgttgttgttcttcttctttttaaattttgcagtgatttactttgagtggagtcatttgctcttgagaagaagcatcaccactaaaggatgctttattttatttctgaaaggcatttgcaggtagctcagcagatctgttttgccacttttgtatcacgcccttgtgtgcttagccacatacatgtagaaattggytaaaatgaaacaaaagtgcaataaactgctgcttctggatttaagtattagttaccgcaaaattatttcaaaaaatatccatt

SEQ ID NO: 122399 - DNA, 489 bp, Homo sapiens
tactcttaaaaccatcagatctcctaagaattcactcactatcatgaggataacatgaagtaaacttcttcgacacatggcgattacaggtccctctgtcgatgtgtggggayaataatttgagatgaggtttgggtggggacacagagccaaaccatattattctgctcctggcacctcccaaatctcatgtcttttatatatatttcaaagccaatcatgcttttccaacagtcccccaaagtcttaactgattccagcataactcaaaactccaagtccaaagtcttatttgagacaagtcccttctgcctatcagcctataaaattaaagaaaaaaaagttagttacatccacaatgggggcctcatgaccctgaccagtgccctatcctactgtggctcaactgatatccaagatgcaagacaaagtcctttctactctttcctctaatctcctctagcagaaggaagcagtcttttttggagc

SEQ ID NO: 122400 - DNA, 489 bp, Homo sapiens
tactcttaaaaccatcagatctcctaagaattcactcactatcatgaggataacatgaagtaaacttcttcgacacatggcgattacaggtccctctgtcgatgtgtggggacaataatttgagatgaggtttgggtggggacacagagccaaaccatattattctgctcctggcacctcccaaatctcatgtcttttatatatatttcaaagccaatcatgcttttccaacagtcccccaaagtcttaactgattccagcataactcaaaactccaagtccaaagtcttatttgagacaagtcccttctgcctatcagcctataaaattaaaraaaaaaaagttagttacatccacaatgggggcctcatgaccctgaccagtgccctatcctactgtggctcaactgatatccaagatgcaagacaaagtcctttctactctttcctctaatctcctctagcagaaggaagcagtcttttttggagc

SEQ ID NO: 122401 - DNA, 489 bp, Homo sapiens
tactcttaaaaccatcagatctcctaagaattcactcactatcatgaggataacatgaagtaaacttcttcgacacatggcgattacaggtccctctgtcgatgtgtggggacaataatttgagatgaggtttgggtggggacacagagccaaaccatattattctgctcctggcacctcccaaatctcatgtcttttatatatatttcaaagccaatcatgcttttccaacagtcccccaaagtcttaactgattccagcataactcaaaactccaagtccaaagtcttatttgagacaagtcccttctgcctatcagcctataaaattaaagaaaaaaaagttagttacatccacaatgggggcctcatgaccctgaccagtgccctatcctactgtggctcaactgatatccaagatgcaagacaaagtcctttytactctttcctctaatctcctctagcagaaggaagcagtcttttttggagc

SEQ ID NO: 122402 - DNA, 563 bp, Homo sapiens
gatggtgcggtgtcctggcactatccttgatgttccaagaggggtgagaatccatctcctgagtaaaagcttcacatggggtgaggaggggagaattgaacagagaggaagcagggaaggccaagacagcgaccaccttacagcaattttaaccagaaatggacacagaccctggaccccatcacaggagtgcaggcctaggactgtctccacggtgatgcatagctcccttgtcaggttagtcgggtgcagggattgtgacgtctgcaggggtgtggaaggctgggcaatgggagcagcttactgggctggaacagaaatactgaacttcttttccatcagtgaaatccgcttctagrtcagaaaaaactgcgagttctagagaggcagggcctaggaggaggtcaggtcctgagccttcctggtttgaccccttcccaccctctgtgtttctgggtctgtcctcacttccacccagcggatcctgagtctcttcctttgagtccctgtgagtgtgttgtgtgcagtggggccgggctgcttcatccgactgcacgttaaat

SEQ ID NO: 122403 - DNA, 595 bp, Homo sapiens
atcactgctctggggataggccacacactctgaggtactgagtttgaaaagtgttttaattctgagcagtctttgtatgtaacacagagcaccttttccatgataacttcttggcagtaagagaggtataaaaaccagcacttttttttttctattctggaacacaaaagccaattctagaatagctttcaatcagtacagcaattttaataaacattcaataaatgcctatttaattgacctgaaatccaaatgtattagattccatttaacttttcartggtcacaaagcagttagtggattgatgtgaagaccaaatatatgcaacatcatatttatatctgtaatgcaaattgggaaataaaggtcatgcttttctgaagacaatggtaattgtaaatgttgaccacttggtagaaacaagctgaaatctgagttttttgatccctgagctttccatctcttccttttatctgtaagtagtcagctattacgtatagtagtacccaagcccacgtggccttgtgctaaaattggccctttgcagctggaagagtcataagagattagtatagtgtagaggatgaaccactg

SEQ ID NO: 122404 - DNA, 595 bp, Homo sapiens
atcactgctctggggataggccacacactctgaggtactgagtttgaaaagtgttttaattctgagcagtctttgtatgtaacacagagcaccttttccatgataacttcttggcagtaagagaggtataaaaaccagcacttttttttttctattctggaacacaaaagccaattctagaatagctttcaatcagtacagcaattttaataaacattcaataaatgcctatttaattgacctgaaatccaaatgtattagattccatttaacttttcaatggtcacaaagcagttagtggattgatgtgaagaccaaatatatgcaacatcatatttatatctgtaatgcaaattgggaaataaaggtcatgcttttctgaagacaatggtaattgtaaatgttgaccacttggtagaaacaagctgaaatctgagttttttgatccctgagctttccatctcttccttttatctgtaagtagtcagctaytacgtatagtagtacccaagcccacgtggccttgtgctaaaattggccctttgcagctggaagagtcataagagattagtatagtgtagaggatgaaccactg

SEQ ID NO: 122405 - DNA, 595 bp, Homo sapiens
atcactgctctggggataggccacacactctgaggtactgagtttgaaaagtgttttaattctgagcagtctttgtatgtaacacagagcaccttttccatgataacttcttggcagtaagagaggtataaaaaccagcacttttttttttctattctggaacacaaaagccaattctagaatagctttcaatcagtacagcaattttaataaacattcaataaatgcctatttaattgacctgaaatccaaatgtattagattccatttaacttttcaatggtcacaaagcagttagtggattgatgtgaagaccaaatatatgcaacatcatatttatatctgtaatgcaaattgggaaataaaggtcatgcttttctgaagacaatggtaattgtaaatgttgaccacttggtagaaacaagctgaaatctgagttttttgatccctgagctttccatctcttccttttatctgtaagtagtcagctattaygtatagtagtacccaagcccacgtggccttgtgctaaaattggccctttgcagctggaagagtcataagagattagtatagtgtagaggatgaaccactg

SEQ ID NO: 122406 - DNA, 550 bp, Homo sapiens
gaattccaggatgcctacgttctgttgcatgaaaagaaaatttctagtgtccagtccattgtacctgctcttgaaattgccaatgcttactgtaagcctttggtcataattgctggagacattgatggagaagctctaactacactcatcctgaataggctaaaggttggtcttcaggttgtggcagtcaaagctccagggtttggtgacaatagaaagaaccagcttaaagatacggttattgctactggtggtacagtgtttggagaagagggctgacactaaatcttgaagacgttcagcctcgtgacgtaggagaagttggagaggtcactgtgatcaaagattatgccatgctcttaaaaggaaaaggtaacaagtctcaaattgaaaaatgtgttcaagaaatcattgaccagtcagatgtcacaactagtgaatacgaaaaggaaaaactgartggagaaactttcagatggagtagctgtgctgaaggttggtgggacaagtgatgttgaagtgaatgaagagaaagacagagttataggtg

SEQ ID NO: 122407 - DNA, 582 bp, Homo sapiens
cagtaagggtgcatctcccttctgtagtggcatttaaagtcttatttttcagtcttagggtccatcctcgttgttcagtttgtttggttgtttttttttttttttgtactcttcaggttttgagtgactttattgggaattatrtgagtcagggtctacaagatattgatctaggacttatttcctttctctaatcatttcaggtcaaagctccattccactctctggcttctgtggaggaagggctgaactgtgcctagttattttgaggtttgggacaaacaaagaattgagcatagtggtgaatcgttttgaaatgagagacctagccaaggatatgttcacttagtaagaggtcacatcttctgcaaaataaaaaaatcaatcaaatctctctcagtaaaattggttgttatgtgaaggcactgtaaagcataaataatatgcaaattgtatttattgttgctattattattctacttctgtggtgtaacaatagtagcaccttatgtttacatactagtcactttataaaaactgggactaaaaatcaagaactacagttgacctttgaagaatata

SEQ ID NO: 122408 - DNA, 582 bp, Homo sapiens
cagtaagggtgcatctcccttctgtagtggcatttaaagtcttatttttcagtcttagggtccatcctcgttgttcagtttgtttggttgtttttttttttttttgtactcttcaggttttgagtgactttattgggaattatgtgagtcagggtctacaagatattgatctaggacttatttcctttctctaatcatttcaggtcaaagctccattccactctctggcttcygtggaggaagggctgaactgtgcctagttattttgaggtttgggacaaacaaagaattgagcatagtggtgaatcgttttgaaatgagagacctagccaaggatatgttcacttagtaagaggtcacatcttctgcaaaataaaaaaatcaatcaaatctctctcagtaaaattggttgttatgtgaaggcactgtaaagcataaataatatgcaaattgtatttattgttgctattattattctacttctgtggtgtaacaatagtagcaccttatgtttacatactagtcactttataaaaactgggactaaaaatcaagaactacagttgacctttgaagaatata

SEQ ID NO: 122409 - DNA, 582 bp, Homo sapiens
cagtaagggtgcatctcccttctgtagtggcatttaaagtcttatttttcagtcttagggtccatcctcgttgttcagtttgtttggttgtttttttttttttttgtactcttcaggttttgagtgactttattgggaattatgtgagtcagggtctacaagatattgatctaggacttatttcctttctctaatcatttcaggtcaaagctccattccactctctggcttctgtggaggaagggctgaactgtgcctagttattttgaggtttgggacaaacaaagaattgagcatagtggtgaatcgttttgaaatgagagacctagccaagratatgttcacttagtaagaggtcacatcttctgcaaaataaaaaaatcaatcaaatctctctcagtaaaattggttgttatgtgaaggcactgtaaagcataaataatatgcaaattgtatttattgttgctattattattctacttctgtggtgtaacaatagtagcaccttatgtttacatactagtcactttataaaaactgggactaaaaatcaagaactacagttgacctttgaagaatata

SEQ ID NO: 122410 - DNA, 534 bp, Homo sapiens
atgtcaaaatgaccaccagaagaaatgacacaatgcatctgttatcaaagtggtaaactccttctgaatttccaaaccacatttccacccaggctgcactgcctgtgctttgacatatctctgactgtgatgaccatcatctcttgtaagggattttgcagccaactctctcattatagtgtcatcttgagtatggagaagaagggaaaacaagccggtcctcctgactgtagttctgaatattgacacagaagtcgatagatcaggaattcccctgctccaggagggggatctctgagggcaaactccaaagtttgatgaatrtgatgttcagcccctgcagaaccttgcttgttagtgttgcctctgcagtgtcatttactgtctgtcttttccctcgccctgatcttgaaacttctgcacggccactgaatttgcatgtgtgcatcacctggtctccatggcaactgcagaaaatcagagcagagacaaaggattcagtgtccacttgtgaccagtgctttctacctaaat

SEQ ID NO: 122411 - DNA, 534 bp, Homo sapiens
atgtcaaaatgaccaccagaagaaatgacacaatgcatctgttatcaaagtggtaaactccttctgaatttccaaaccacatttccacccaggctgcactgcctgtgctttgacatatctctgactgtgatgaccatcatctcttgtaagggattttgcagccaactctctcattatagtgtcatcttgagtatggagaagaagggaaaacaagccggtcctcctgactgtagttctgaatattgacacagaagtcgatagatcaggaattcccctgctccaggagggggatctctgagggcaaactccaaagtttgatgaatatgatgttcagcccctgcagaaccttgcttgttagtgttgcctctgcagtgtcatttactgtctgtcttttccctcgccctgaycttgaaacttctgcacggccactgaatttgcatgtgtgcatcacctggtctccatggcaactgcagaaaatcagagcagagacaaaggattcagtgtccacttgtgaccagtgctttctacctaaat

SEQ ID NO: 122412 - DNA, 613 bp, Homo sapiens
cacgtcataattagaagacaaggttgaataaatgatggcaaatatgagttagctaccaaaaggtaatraagtacgataagaaagaaacatgcataagaagaactgctagtctcagtgagtatttgccatttcagcaccatttaaaaataaatgaagacgttctgcttctggccaagatgaactaagagggatctaccatttaaaaattatgaaacaacagctggaaagacactgggcatcaggtaataaacaatgatccctgagatatggaaacaaacatatgagccctgcagttgccccagcttgcttcccttagagtgtccccagtttgcagcatgtgaggggaaactgaagtagaatctggaagagtctctgagctgaagagacagagctggtggctgaggaagcatgaggaatctggagctgatgggaaagggtacaaagcaaggagaggaccctgaagatctggaaagggcctcctggaatgttgagtggattgctggtctgcacgtgtgtggagaaccttcctgtacctggagaaagaaccattcaaaaggatgatggggagcagtgcctggtgttcactcaaaggtgaaaatagtacctgttccca

SEQ ID NO: 122413 - DNA, 613 bp, Homo sapiens
cacgtcataattagaagacaaggttgaataaatgatggcaaatatgagttagctaccaaaaggtaataaagtacgataagaaagaaacatgcataagaagaactgctagtctcagtgagtatttgccatttcagcaccatttaaaaataaatgaagacgttctgcttctggccaagatgaactaagagggwtctaccatttaaaaattatgaaacaacagctggaaagacactgggcatcaggtaataaacaatgatccctgagatatggaaacaaacatatgagccctgcagttgccccagcttgcttcccttagagtgtccccagtttgcagcatgtgaggggaaactgaagtagaatctggaagagtctctgagctgaagagacagagctggtggctgaggaagcatgaggaatctggagctgatgggaaagggtacaaagcaaggagaggaccctgaagatctggaaagggcctcctggaatgttgagtggattgctggtctgcacgtgtgtggagaaccttcctgtacctggagaaagaaccattcaaaaggatgatggggagcagtgcctggtgttcactcaaaggtgaaaatagtacctgttccca

SEQ ID NO: 122414 - DNA, 613 bp, Homo sapiens
cacgtcataattagaagacaaggttgaataaatgatggcaaatatgagttagctaccaaaaggtaataaagtacgataagaaagaaacatgcataagaagaactgctagtctcagtgagtatttgccatttcagcaccatttaaaaataaatgaagacgttctgcttctggccaagatgaactaagagggatctaccatttaaaaattatgaaacaacagctggaaagacactgggcaycaggtaataaacaatgatccctgagatatggaaacaaacatatgagccctgcagttgccccagcttgcttcccttagagtgtccccagtttgcagcatgtgaggggaaactgaagtagaatctggaagagtctctgagctgaagagacagagctggtggctgaggaagcatgaggaatctggagctgatgggaaagggtacaaagcaaggagaggaccctgaagatctggaaagggcctcctggaatgttgagtggattgctggtctgcacgtgtgtggagaaccttcctgtacctggagaaagaaccattcaaaaggatgatggggagcagtgcctggtgttcactcaaaggtgaaaatagtacctgttccca

SEQ ID NO: 122415 - DNA, 613 bp, Homo sapiens
cacgtcataattagaagacaaggttgaataaatgatggcaaatatgagttagctaccaaaaggtaataaagtacgataagaaagaaacatgcataagaagaactgctagtctcagtgagtatttgccatttcagcaccatttaaaaataaatgaagacgttctgcttctggccaagatgaactaagagggatctaccatttaaaaattatgaaacaacagctggaaagacactgggcatcaggtaataaacaatgatccctgagatatggaaacaaacatatgagccctgcagttgccccagcttgctkcccttagagtgtccccagtttgcagcatgtgaggggaaactgaagtagaatctggaagagtctctgagctgaagagacagagctggtggctgaggaagcatgaggaatctggagctgatgggaaagggtacaaagcaaggagaggaccctgaagatctggaaagggcctcctggaatgttgagtggattgctggtctgcacgtgtgtggagaaccttcctgtacctggagaaagaaccattcaaaaggatgatggggagcagtgcctggtgttcactcaaaggtgaaaatagtacctgttccca

SEQ ID NO: 122416 - DNA, 601 bp, Homo sapiens
caaaccattttatctgtcaattaaaaaataaaaatcattatattaagttcttagtgaaaatcaaagcaacaatcaaaagtaggactattgaagattcagactctttagaaatgaaggcttgagttactctaccagataaggaatcttgactaattgactttttggctgagagcaagagaagtatggaaatatggaatggatcctgagaataatggcacatgtatatataagcagaaatgagtgttctatgcttttgcgtagtttctctttccttgttatgtgtgtttgtttttataaataataatttttattgtcttttcctccttccctttattactttacatacaaattatatgctattgttatacaatttagctttcaggtaacagaatagtcagtgggaccctgactaaatttgaggagtatctaatgcaaccagggatgatgcaatgacttgaggcctgtttttcctcatgttagggaagggayggggctgcatatcatgtataaaggatgcttgtaaaacagggtcatgtactaagaagggtaaaaagcaatctgaagaatatggcagtcacagatgtggggagcaggcactacc

SEQ ID NO: 122417 - DNA, 568 bp, Homo sapiens
atttgccttatggtgaccagagccttctactccaggtaagtgtatctcaagtctttctgtttttctytgtattttctatctctctcattccatcctgcaagtttctatgagctaacaggaatatgattagtgctaattatgaggcatgctaagggaaaagtgggaataatttaagagggaggagtagttaattaatgcagagagatgtggataagagcggagagagagagagagccatgtcaaacaggaatataaaaaaatctgagatcagagattaagaccaaacaagagaaaaaaagtctcaactgcatatttccctggtgcccatgactttaatcagggggagaagctttggaaaactgatgatgaagatgtcaggttgctacttcttgggttccaggagccacgcaagtcttaaaaatagctgaacgatgatcaggaaagggcagaacttcattcaacccaatttaataataaggctgaattttctctgtatattctctatggaattaaaaaataaggcaacaagaaaagctcattttgactttttggcagcagggaaagttaa

SEQ ID NO: 122418 - DNA, 568 bp, Homo sapiens
atttgccttatggtgaccagagccttctactccaggtaagtgtatctcaagtctttctgtttttctctgtattttctatctctctcattccatcctgcaagtttctatgagctaacaggaatatgattagtgctaattatgaggcatgctragggaaaagtgggaataatttaagagggaggagtagttaattaatgcagagagatgtggataagagcggagagagagagagagccatgtcaaacaggaatataaaaaaatctgagatcagagattaagaccaaacaagagaaaaaaagtctcaactgcatatttccctggtgcccatgactttaatcagggggagaagctttggaaaactgatgatgaagatgtcaggttgctacttcttgggttccaggagccacgcaagtcttaaaaatagctgaacgatgatcaggaaagggcagaacttcattcaacccaatttaataataaggctgaattttctctgtatattctctatggaattaaaaaataaggcaacaagaaaagctcattttgactttttggcagcagggaaagttaa

SEQ ID NO: 122419 - DNA, 568 bp, Homo sapiens
atttgccttatggtgaccagagccttctactccaggtaagtgtatctcaagtctttctgtttttctctgtattttctatctctctcattccatcctgcaagtttctatgagctaacaggaatatgattagtgctaattatgaggcatgctaagggaaaagtgggaataatttaagagggaggagtagttaattaatgyagagagatgtggataagagcggagagagagagagagccatgtcaaacaggaatataaaaaaatctgagatcagagattaagaccaaacaagagaaaaaaagtctcaactgcatatttccctggtgcccatgactttaatcagggggagaagctttggaaaactgatgatgaagatgtcaggttgctacttcttgggttccaggagccacgcaagtcttaaaaatagctgaacgatgatcaggaaagggcagaacttcattcaacccaatttaataataaggctgaattttctctgtatattctctatggaattaaaaaataaggcaacaagaaaagctcattttgactttttggcagcagggaaagttaa

SEQ ID NO: 122420 - DNA, 520 bp, Homo sapiens
ctgacattttaggggggaggctagaactcagttctgtacaaaacaaagtcctgtctctaacctgcacatgcaactggtcacttacaggtcctaaatatctttcaaataagttttaaataaatttattcacttctatttatgccaattataccttattgtgctaactaaataagatttataaatgtaactaagagattgaataaaatgatgaataaggcaatcagcattttctagtttttttaatcatcccttgctttaaatttgttggccttaagattattattattttctaattacygctcatattttagggtaatcatacattaaaaaatagatttttagaagaacaaagtaggttataaccatgtatgtgcaatatgactcaatgatgagctctctctgtgtggggattacctctaggtacaaggtctgtgggtggtttattatctttgtactagttctgtatttttttaattaaataggccttataataatacaatataataaatgacaatttagg

SEQ ID NO: 122421 - DNA, 600 bp, Homo sapiens
ctgacactcaaaggcatttccttccttttgttattaaatttagaatgggaaaatagaagaaaaacttttaccctgttaaccgtaggcttatgaatgaatgttgtccattgtgttcygaacaactattctaaaagtaggcccatatatgaaggtctgcaaatggaggacaaaagaatcaacttctattattaatctctgtggggcaagatatatctttgattttaagaaatgggggtgtggactcaagcattaggctgacattataatgcaactcatttctccctctggtgtcacccttctctctgggcctaatttcagggaggtctggatgtgcttcagatttttgcccaatggggaaaaagtgtattgtcctgtatacaggtgggttgggtgctagataacagtaactgcagctcctcataaggataactttgcacctgagttcacatgcatccatcaggtaatgtagccttcttatttcacccctgtttataacttgcattctcatatcattgcacttttagcaaagttgcataacacattaaaacctgatctcagctgtgctctggggaatgaatgagaaggcatggatgcagagaa

SEQ ID NO: 122422 - DNA, 540 bp, Homo sapiens
ctaggatacaaaaccttagaggtctacgtggtgttctgttgtactgtggctaactggcactgaaatcacaaaacacagtccttccctctcatccttcccctttccaaaggcagaagagtctcattctgtagccaccaccaccccaggccacacggactactgctaggctactgctgatgtctccttaaggctcaaggtcttttcagtcaactggtggtgaatgctgcctgccctagatctcaccctttaagggctttgggctcccctctggcccagggctggtccagaaatgccatccagggtcaagtcctgtaattaggkacctcaaaggcccacttggtgctctatacctctatggccacgatcctaccttaggtgcaaggcaaagtcccctttacttttttctctgcttttctcaagcagaaggagttttgtcccatagccatcacagttggtaatgagctgagtctcatctgaagccagcaaatctcagaggttgacccagaaccttttgtgtactacctaggtatcactgctgat

SEQ ID NO: 122423 - DNA, 540 bp, Homo sapiens
ctaggatacaaaaccttagaggtctacgtggtgttctgttgtactgtggctaactggcactgaaatcacaaaacacagtccttccctctcatccttcccctttccaaaggcagaagagtctcattctgtagccaccaccaccccaggccacacggactactgctaggctactgctgatgtctccttaaggctcaaggtcttttcagtcaactggtggtgaatgctgcctgccctagatctcaccctttaagggctttgggctcccctctggcccagggctggtccagaaatgccatccagggtcaagtcctgtaattaggtacctcaaaggcccacttggtgctctatacctctatggccacgatcctaccttaggtgcaaggcaaagtcccctttacttttttctctgcttttctcaagcagaaggagttttgtcccatagccatcacagttggtaatgagctgagtctcatctgaagccagcaaatctcagaggttgacccagaaccttttgtgtastacctaggtatcactgctgat

SEQ ID NO: 122424 - DNA, 617 bp, Homo sapiens
gcagtgaagccatcaggtcaggtcccagctatcctttgaagggagactattattgcctctatctcattagttgttattggtccattgatgctttaactttcttcatgtttcaatcatcataggttgtatgtgtctaggaatatasttatttattttaaattttccagcttattggcatatagttgcttataaaggtctttaatgatcatgtgcatttctgtggtatcagtctgccttttcatctctgattttatttatttgagtcttctttttttttgttagcctagctaaaggtttgtcaattttatttttcttttcaaaaagtcaacttttattgtgttttgccttgtattttttaagagaatttcattcatttctgttctgatcgttattagtttttttcttccactaattttgtgtgtggcttgttctttgttcagtctttaagtctttaaggtatagtgttaagttgtttatttaaagccttcccacattttgtgtaggagttttttgttataaacttcccatctttctttgcttttgtatcatagcttacactcccaagttctacttgttccagagttttctaaaataactcatattaggtactgcatgag

SEQ ID NO: 122425 - DNA, 617 bp, Homo sapiens
gcagtgaagccatcaggtcaggtcccagctatcctttgaagggagactattattgcctctatctcattagttgttattggtccattgatgctttaactttcttcatgtttcaatcatcataggttgtatgtgtctaggaatatacttatttattttaaattttccagcttattggcatatagttgcttataaaggtctttaatgatcatgtgcatttctgtggtatcagtctgcyttttcatctctgattttatttatttgagtcttctttttttttgttagcctagctaaaggtttgtcaattttatttttcttttcaaaaagtcaacttttattgtgttttgccttgtattttttaagagaatttcattcatttctgttctgatcgttattagtttttttcttccactaattttgtgtgtggcttgttctttgttcagtctttaagtctttaaggtatagtgttaagttgtttatttaaagccttcccacattttgtgtaggagttttttgttataaacttcccatctttctttgcttttgtatcatagcttacactcccaagttctacttgttccagagttttctaaaataactcatattaggtactgcatgag

SEQ ID NO: 122426 - DNA, 592 bp, Homo sapiens
tattcttttcaaattccatatgcacgcacactttctattactgctaatgagagctttgcatgtgttttgatggtgactagcatttggtaattttaggaaaatgcacatattgttaagttctctttttctcttcttttttggtcctctgttggttgttgagggaacaaattcatggaatattacaatctgcagccttccaaaaggatcctttcagtgcttttaaaatttaattatataacacatgaygggtttaaatcacctcctctcgtaatgtaacccattaaaaaacagtttagtaactcgtttttattgtgtgaagatgatcaatggtgtatcattatctgtttcaaatctggaatatcattaaagacattggcagcactcaacattgaaaacttaagaattacttttaatacatctcttttgaaaaccaatactgtggactttttcattaggaaagaaaagaatgttttcaaatgtggttgcaaacaaaagaaaacaaaattttatggaaacctttacccagttctcagcactggctgctcatcagaataatttgggaaaattacttaaagaaaatatgaatacctgt

SEQ ID NO: 122427 - DNA, 592 bp, Homo sapiens
tattcttttcaaattccatatgcacgcacactttctattactgctaatgagagctttgcatgtgttttgatggtgactagcatttggtaattttaggaaaatgcacatattgttaagttctctttttctcttcttttttggtcctctgttggttgttgagggaacaaattcatggaatattacaatctgcagccttccaaaaggatcctttcagtgcttttaaaatttaattatataacacatgatgggtttaaatcacctcctctmgtaatgtaacccattaaaaaacagtttagtaactcgtttttattgtgtgaagatgatcaatggtgtatcattatctgtttcaaatctggaatatcattaaagacattggcagcactcaacattgaaaacttaagaattacttttaatacatctcttttgaaaaccaatactgtggactttttcattaggaaagaaaagaatgttttcaaatgtggttgcaaacaaaagaaaacaaaattttatggaaacctttacccagttctcagcactggctgctcatcagaataatttgggaaaattacttaaagaaaatatgaatacctgt

SEQ ID NO: 122428 - DNA, 598 bp, Homo sapiens
tgggtttgactgtaatgtgcaatttcaattagaagtcaccaattgtaatattaaaaattcaataatgcaaaaatttagttcttcaattatcatttgaaaattactaaagacaatctaaaatgaaatcctctttctttccacaggcccttgtttcattccttgtagaggtaaagtggttatttaagaatgtgtctatttatgtatcttaattttcttaggaatgttcgaaatttccattgttgattggttgacaatccatgttaatctatctgaagtagctctttagaggaaatgtaatcttaagccatctgcttattaatccttattaataataatttcagagaaataatatttgtagacaatgttctaacataatgcatggtgaaatattttctcaagtattmtaaattgtagccttaggttaaatctacaacattcaagaatggttcctttggacaataatttagtccttcatagaatgtatgctattgaaatttaatttggcattattcaattaacctatcttaagggacattacaataaatagctctagaatctcttcattacataaattttggcagtcatgtcaagaaacttg

SEQ ID NO: 122429 - DNA, 598 bp, Homo sapiens
tgggtttgactgtaatgtgcaatttcaattagaagtcaccaattgtaatattaaaaattcaataatgcaaaaatttagttcttcaattatcatttgaaaattactaaagacaatctaaaatgaaatcctctttctttccacaggcccttgtttcattccttgtagaggtaaagtggttatttaagaatgtgtctatttatgtatcttaattttcttaggaatgttcgaaatttccattgttgattggttgacaatccatgttaatctatctgaagtagctctttagaggaaatgtaatcttaagccatctgcttattaatccttattaataataatttcagagaaataatatttgtagacaatgttctaacataatgcatggtgaaatattttctcaagtattataaattgtagccttaggttaaatctacaacattcaagaatggttcctttggacaataatttagtccttcatagaatgtatgctattgaaatttaatttggcattattcaattaacctatcttaagggacattacaataaayagctctagaatctcttcattacataaattttggcagtcatgtcaagaaacttg

SEQ ID NO: 122430 - DNA, 561 bp, Homo sapiens
gggcagtcagtgatggccgtagccaggtcagccttggtgagtgagagtccatgttgctgagtccatgcataacatccatctctgccaccatgccacttttttcatgggcacattgggcaatgacggggtggctggggaaagaggctgagtagtgtccacagagcaagtcaacccatccacttgattattaaaatcctcctctgctgaggtcaccctttggtgagcattcatgtgagttacaaatttcttcacagtttttgaccacttagagargtccattcacatacctcttccccaaatttccttttcaccaattttccaaccatactccttccaagtccctgaccattcagccaaaccattggctacagccatgaatcagtatataatcacacatctggccatttctccttccaaacaaagtgcacagccaggtgaactgctcaaagttctgcctattgcaaagatttcccttcaccactgtccttcagggatgccctagaaagaagctgaagtgctacagtggtccacttttggctggtgcctgcatttcataccaca

SEQ ID NO: 122431 - DNA, 578 bp, Homo sapiens
ttgctttagcatttgctctgcctttatgtaactcagtttataatactgggcaaaaacaaggactctgtcagaaagtcawagtggaagcagttttaggactagtgcagtaaacagtagagaatggctcctaataagtgggcacagcaaagcctctcctagtgaaagtcactgtccaaaaacattttctatttgcctgcacttggtgcacacatgtttttcagtatctaggtgagatcgtgatgttccgtgaatcatattcagaatatcaatgtaagttttctgacatttttgcttttagtttggtaaaacaacataaaatttagaatcctaaccattttcaagtgtacaattcagtgacaccaaacacactcacaatgctgcacaatcaccaccaccatccatctccagaacactttcacatcccaaacaaaagcccccaccaaggaatgataactcccctttcccctttcccttggcccctgcaacctccattctgcttctgtctctaggaattcacccaatctaggtgctgatagaaggcaaaccatacaaaacagacgcttttgtgcataacttat

SEQ ID NO: 122432 - DNA, 583 bp, Homo sapiens
aagcctgctccctcttttacccagttttatgcttctaagaatatggcactccatttattcagtctctcttgagagaatgctggaaaacattcttgtttctttcttaaattttccctctcacatcccacatccagtatatgaataggtcctgacatctctacctatgatcactaaggagttaccattctatttaaagtcaacatcagtgtatcaccttaactgttgcaacaagtctgtaactagtctctctgttcccacttttgycccatgacacaatatttctattcaagacctagttattgtttgaaaatataaattggattataaaaatattctgttcaaaatatttcaatggtttttacatcttactcagaaagaaaagtttatcattcaccatggtgtaccagctcagtgtgacctgctgatgctcagaggacagaataactcatatctagccatactgccatcttgctccgacttccggggctttgtactttctgctgctcttcctaaaatgcattctccccaggtccttgcagagttaactctttacgtcattgagacctccattcaaatgccactt

SEQ ID NO: 122433 - DNA, 547 bp, Homo sapiens
ctcttgggcacatttgagaaacttcctaaaaacatttttaaagtaaataagcttgtgcagacatcttttattttttacacactgaaagtattggataagggagatagaactctgaagttgagttataactttcatgttatccttaaaaatcaactttacagcaccaaacatccttccagaatcttctgagattgtctcccatcccctgcttatttatttatttccttttatttgtagttgacaagtaataattgtacatatttaaggggtacagagtgacatttccgtccatgtatacaaagtgtaatgatcaaatctggctaattagcatatctaccaccgtgaatatttatgatttctttttgttgtgaacattcaaaatcctcccttctagctttttgaaagtccatactaaattagtgtgaaccatatccatcctacagtgctgcagaacaatataacttacyccatccatctaaccctaactttgtattagctaaccaacccctctttagcctctcctctttcccacccttcgcagcctcta

SEQ ID NO: 122434 - DNA, 547 bp, Homo sapiens
ctcttgggcacatttgagaaacttcctaaaaacatttttaaagtaaataagcttgtgcagacatcttttattttttacacactgaaagtattggataagggagatagaactctgaagttgagttataactttcatgttatccttaaaaatcaactttacagcaccaaacatccttccagaatcttctgagattgtctcccatcccctgcttatttatttatttccttttatttgtagttgacaagtaataattgtacatatttaaggggtacagagtgacatttccgtccatgtatacaaagtgtaatgatcaaatctggctaattagcatatctaccaccgtgaatatttatgatttctttttgttgtgaacattcaaaatcctcccttctagctttttgaaagtccatactaaattagtgtgaaccatatccatcctacagtgctgcagaacaatataacttactccatccatctaaccctaactttgyattagctaaccaacccctctttagcctctcctctttcccacccttcgcagcctcta

SEQ ID NO: 122435 - DNA, 653 bp, Homo sapiens
ggtaggggcttgggaagtggggagtgctgattggtcaggagatggaatcacagcggggcaaagtgaggttttcttgctgtcttctcttcctgggtgcaatggcagaactggttgggccagattactggcctgggtggtgtcagctgatccatcaagtacaggatatgcaacatattccaagcactgatcttaggctttacagaagtgatgttaccaccaggagaaattttgggaggtttggacttttgttgccagaggctgcatgacccctaaactgtaatttctaattttgtagctaatttgttratcctgcaaaggcagactggtacccaggcaagaagggggtcttttcaggaaagggctgtaatcaattttgtttcagagtcaaaaccataaactgaattcccttccaaagttagttcagcctatactcaggaatgaaaaaggacagcttaaaggttatgaggaagatggtgccagttaggtcaaatcattttttcactgtcttagttataattttgcaatggtgttttcataactttaaatcatgactatcacagttttgataaataatctagggtaaacaaattaaataattaagtaaatgtaatgggataagtacttgtatacaaactgatcataatttagaatat

SEQ ID NO: 122436 - DNA, 593 bp, Homo sapiens
atcaattgtaacaaatgtcccaccctggtggtggatgtttactaaacgggaacccatgcatatgtgagggcaagagatatatgggaaatatttgtagtctcaagttttctgtgaacctaaaaccgccttaaaaatctattttttaaatgttagcttggwttaaaagacattttaaatcaccaataagtaaatactaacaattatttattttcccttttaaaaaaggcaatggaaggttgtgtgaaaaagagttaaggctgcccagcgtaggcataaagggaaatgcacaaataaatgcaaagaatgaggcaattgacacttccaatacagtggccaagcagaaccaaggaaagattgtagattattgtaatctcccaggtcgtactttatttagctctgtgaatgacagaactcgtattcagctatagtcagcatgtgacataaaacctaacgtggagaaaattgatatcacttccatattctgctgatattgtttcctccaactgcctgttagccagatcacattacagaaacatctttaccataatagattatatatacttaagctcccaattatcatattaatatagaag

SEQ ID NO: 122437 - DNA, 581 bp, Homo sapiens
aagggcatgggagtacattgtctatgtgaatagtgatgttaccaagaatgatgacagaatttgtgggartaaaaagacaaaccaggcatataaacatttaatgaattagggagagtgtctcggagggcaattgttgattccaacacggaggggtagtagatggtatagtctgaggcaggtatgtcagagagcctgtgtaaaccgaaattcaggaaagtaaaactatttacctaaaacaaagtaataaaatggcacatagtaaacacacacaaacacacacacacataaatacacaagtgcacatacacacagaagtgcacaatatacatacatatacacaactagaaatctatacaccacacctcaatcctcctatcctcggcaaaagaatacatttacaatctctagcaattctgttgaccttaaaacagtttaactaccaagaatttgacatcgcacgtatatgaagaaagttgaagacataagatcaaagtgaattttccttcattcctttcttgcccatttagattttacttcttctttctttgcctttctttttgtcatgtagaaaacagagccac

SEQ ID NO: 122438 - DNA, 581 bp, Homo sapiens
aagggcatgggagtacattgtctatgtgaatagtgatgttaccaagaatgatgacagaatttgtgggagtaaaaagacaaaccaggcatataaacatttaatgaattagggagagtgtctcggagggcaattgttgattccaacacggaggggtagtagatggtatagtctgaggcaggtatgtcagagagcctgtgtaaaccgaaattcaggaaagtaaaactatttacctaaaacaaagtaataaaatggcacatagtaaacacacacaaacacacacacacataaatacacaagtgcacatacacacagaagtgcacaatatacatacayatacacaactagaaatctatacaccacacctcaatcctcctatcctcggcaaaagaatacatttacaatctctagcaattctgttgaccttaaaacagtttaactaccaagaatttgacatcgcacgtatatgaagaaagttgaagacataagatcaaagtgaattttccttcattcctttcttgcccatttagattttacttcttctttctttgcctttctttttgtcatgtagaaaacagagccac

SEQ ID NO: 122439 - DNA, 581 bp, Homo sapiens
aagggcatgggagtacattgtctatgtgaatagtgatgttaccaagaatgatgacagaatttgtgggagtaaaaagacaaaccaggcatataaacatttaatgaattagggagagtgtctcggagggcaattgttgattccaacacggaggggtagtagatggtatagtctgaggcaggtatgtcagagagcctgtgtaaaccgaaattcaggaaagtaaaactatttacctaaaacaaagtaataaaatggcacatagtaaacacacacaaacacacacacacataaatacacaagtgcacatacacacagaagtgcacaatatacatacatatacacaactagaaatctatacaccacacctcaatcctcctatcctcggcaaaagaatacatttacaatctctagcaaytctgttgaccttaaaacagtttaactaccaagaatttgacatcgcacgtatatgaagaaagttgaagacataagatcaaagtgaattttccttcattcctttcttgcccatttagattttacttcttctttctttgcctttctttttgtcatgtagaaaacagagccac

SEQ ID NO: 122440 - DNA, 541 bp, Homo sapiens
tcactgactataaaagatattccatcactcctggtggttaccaggatggatctgccacacagccagcccctctgttggtactattgccaaggtatagaaaagagtatagtctgtttgacagctattatgctttgtttaaatgcaattttaaatgcaggagtttctaagtgtgttattcatgccagtgatttctgcaaaaaataaacattttgtaaaactgctaaaagacttcacaaattgagcaaagcaaagaattttttgcaggacaagaggcagyagaataaattctgagaactacctaaaagaactacctaaattcactcagcgatgggtactcattaaaagtgcaaactcttgtgtttaatccaatacctactatattagaatctcttggggccaggaacctagaatctgtattttaataagtacctcaaggtgatacttttccaccttaaatcagtgaaagtcaaatgagagaagaattcccaggatcaggccctcaggaatatcatttagaggccatgtaaagacgatggaaagg

SEQ ID NO: 122441 - DNA, 609 bp, Homo sapiens
tagcattggcacttgctcctgctttcatttagcaatacctctttaggatggctctctccaaatggctctcttgaaatttgctgtgctctgggcctttatgacctgattttctgcaattaaaattcctctttcttgaaatgtaccacattctctccaactctactccctgactgtcaaggsattgcttagccaggctaataaggaattttgctaagggatgatgagtgcccgagtgttgtgggaaaaagattttattccacattaaccttgctcccacaaaatatactcagatgactggctctgtgtagggtctggaggaagcaagatttgtagcatttgccaatttccatggtgtaaattctcccacatggccaatgccaaggtaccaacatggcagagctaggaagagatccacagaatcggctctcatatattggtatgagtgcactgcagcacacccctggctcctgcaggattcacagtgatttcctaagtgtcatgattcccaggaagtgagaatattatgactagatgtggttgatttaagagacattttaaggcaaaaaggggtcacatggaatatttaagattgcattgcagacttctgca

SEQ ID NO: 122442 - DNA, 609 bp, Homo sapiens
tagcattggcacttgctcctgctttcatttagcaatacctctttaggatggctctctccaaatggctctcttgaaatttgctgtgctctgggcctttatgacctgattttctgcaattaaaattcctctttcttgaaatgtaccacattctctccaactctactccctgactgtcaaggcattgcttagccaggctaataaggaattttgctaagggatgatgagtgcccgagtgttgtgggaaaaagattttattccacattaaccttgctcccacaaaatatactcagatgactggctctgtgtagggtctggaggaagcaagatttgtagcatttgccaatttccatggtgtaaattctcccacatggccaatgccaaggtaccaacatggcagagctaggaagagatccacagaatcggctctcatatattggtatgagtgcactscagcacacccctggctcctgcaggattcacagtgatttcctaagtgtcatgattcccaggaagtgagaatattatgactagatgtggttgatttaagagacattttaaggcaaaaaggggtcacatggaatatttaagattgcattgcagacttctgca

SEQ ID NO: 122443 - DNA, 548 bp, Homo sapiens
ctctgcatgtgtgcttcccagtgtgcatgtctgtctctgtgtccaaatttccaccccccgcttttttttttttttctgagacggagtctcgctctgtcacccaggctggagtgcagtggcacgatctcggctcactgcaacctccgcctcctgggttcaagcgattttcttgcatcagcctcccaagtagctgggactataggcacctgccaccacgactggctgattttttgtatctttagtagagacagggtttcactgtgttagccaggatggtctcaatctcctgaccttgtgatcygcccactttggcctcccaaggtgctggaattacaggcgtgaaccaccgcgcctggcccaaatttcccctttttataaggacaccagtcctattaaagtaggggcccaccctattctaatatgacctcatgtttaattatatctcgaatgaaactgtttccaaataaggtaatattctgagtactcagtgttaggacttctacatagaccactcaatccataatactctccaacgtagggggtctgga

SEQ ID NO: 122444 - DNA, 529 bp, Homo sapiens
ggtttatctccattatagcttgcttagcatgcatggaatttttgaatatgcggattagtgtcttacaaaagtctagagaactttcagccaaaataccatcacatattgtcccttcccagttcccttcttctatgagaacactcactaaacacatgctgcactwtctcactgtatattccatgtctcttcatgattctgtccacattgtgcattttttaaaaattttctgtaatgcactctgaaatatttatgaactctcaccatggccatgtctaatctgatgagttcatttttgagtttttaatttaaaatactatgtttttatacaaactacttttcaaatttgctacatcaattttttagtctcctaaaaatatattcattttttttaaaattttttgaaagcaaatgtactttataatctaacagtgatatttctactaatgaacctttgtggatctgtttgtactctttttctgctttcctttcaaatggtggaatatcatttccttgtgtacttagatgcctt

SEQ ID NO: 122445 - DNA, 624 bp, Homo sapiens
ttatgcacatcagtgcggggccttagtaaccactgtgcaagttgaaactgggcaaagttatcttaataattaatggaaaaacataaacttgttcctgcaatcattaaaaacacttgtcagtcaggtgcagtggctcacaccggtaattccagcactttgggaggccaaggtgggcagatcacttgagcccaggagtttgagaccagtttgggcaacatgacggaaccctgtctctacaaaaactacaaaaaattagccaggagtggtgatacgtacatatagtcccagctatccaggaagctgaggtgggaggatcacctcagcctggtggtcgaggctacagtgagcctttttgataccactgcactccagcctggacaacagagtgagatcttgtctctaaataaaagaataaataaataaacacatttgtcaaaatattaaaaatgtcttactgttggttatatatgcatagaaaagtaaaaaccaaaaaamaaccctaaaactagtatttatatagtacactataatttaaaacattgataattaaaatacatgttttatatatttctttgaaatgtattcagagtagtttgtacagtatttgcacaacttctcatcatg

SEQ ID NO: 122446 - DNA, 547 bp, Homo sapiens
taattccagcactttgggaggccaaggtgggcagatcacttgagcccaggagtttgagaccagtttgggcaacatgacggaaccctgtctctacaaaaactacaaaaaattagccaggagtggtgatacgtacatatagtcccagctatccaggaagctgaggtgggaggatcacctcagcctggtggtcgaggctacagtgagcctttttgataccactgcactccagcctggacaacagagtgagatcttgtctctaaataaaagaataaataaataaacacatttgtcaaaatattaaaaatgtcttactgttggttatatatgcatagaaaagtaaaaaccaaaaaacamccctaaaactagtatttatatagtacactataatttaaaacattgataattaaaatacatgttttatatatttctttgaaatgtattcagagtagtttgtacagtatttgcacaacttctcatcatgtgattctcaatattttttatgctttggtgaattgccatacttctttataaattcgattatttgtcc

SEQ ID NO: 122447 - DNA, 624 bp, Homo sapiens
ttatgcacatcagtgcggggccttagtaaccactgtgcaagttgaaactgggcaaagttatcttaataattaatggaaaaacataaacttgttcctgcaatcattaaaaacacttgtcagtcaggtgcagtggctcacaccggtaattccagcactttgggaggccaaggtgggcagatcacttgagcccaggagtttgagaccagtttgggcaacatgacggaaccctgtctctacaaaaactacaaaaaattagccaggagtggtgatacgtacatatagtcccagctatccaggaagctgaggtgggaggatcacctcagcctggtggtcgaggctacagtgagcctttttgataccactgcactccagcctggacaacagagtgagatcttgtctctaaataaaagaataaataaataaacacatttgtcaaaatattaaaaatgtcttactgttggttatatatgcatagaaaagtaaaaaccaaaaaacaaccctaaaactagtatttatatagtacactataatttaaaacaytgataattaaaatacatgttttatatatttctttgaaatgtattcagagtagtttgtacagtatttgcacaacttctcatcatg

SEQ ID NO: 122448 - DNA, 547 bp, Homo sapiens
taattccagcactttgggaggccaaggtgggcagatcacttgagcccaggagtttgagaccagtttgggcaacatgacggaaccctgtctctacaaaaactacaaaaaattagccaggagtggtgatacgtacatatagtcccagctatccaggaagctgaggtgggaggatcacctcagcctggtggtcgaggctacagtgagcctttttgataccactgcactccagcctggacaacagagtgagatcttgtctctaaataaaagaataaataaataaacacatttgtcaaaatattaaaaatgtcttactgttggttatatatgcatagaaaagtaaaaaccaaaaaacaaccctaaaactagtatttatatagtacactataatttaaaacattgataattaaaatacatgttttatatatttctttgaaatgtattcagagtagtttgtacagtatttgcacaacttctcatcatgtgaytctcaatattttttatgctttggtgaattgccatacttctttataaattcgattatttgtcc

SEQ ID NO: 122449 - DNA, 568 bp, Homo sapiens
tttaattttagtaacatctaagctttcacagaatctttttgtggttgtatctgaaatcttatggccaaattcaaggtcacctaaatttgctcctatatttgtagttttgcatttaaatctatgtcctattttaagttgatattttgtgacgctctgaggttcgtgtgtccaggttcatttttttatgtgtgtgcrgaaggatatcccattgttgcagcaccacttactgcatttattgcaaagactattcctttgctattgaattgcattttgctcctttgtcaaagatcagttgattacatttgtatgaggcctatttctggacccactagttccactgaactatgtgtgaattctttagtcaataccacactgtcttgacactgtgcctttatagtaagtcttaaaatcgggtagtatgcatcctccaactttatggtttttcagtttgcattgagtatttcaggttttttgacttttcatataaactttatatatctgtttgttgatatctaaaaaaagtatttttctaaaaaattgggattgcattgaatatattcatcaaata

SEQ ID NO: 122450 - DNA, 604 bp, Homo sapiens
ctaggtcttaggttactgtgtgtgaagagaggcccagtgagacagagccttcactcttccacattggctcagaataaggcagggttttgaggtatttgtgggtttgagtgagtgatatttcctaagatggctctgtctcctatgaggccaaaatttctccaggaatgtttttgtgatcaatcacatcctgcatctaatcatctgattagcaaccgtaattcaatctgtagtcctaattccttattcatgtaatctaacacattcacaggttccagggattagatgatgagcatcttgcaggggataggagcatcattctacctaccacatacacatacagcattaataggctttgcctctccaagccttggcttaagttgaatgatattacaaagatgacagagactggagtaagctgatgacctagatgagccttatggaagaacaggtaaccttgktgagacccagtagttgtctactttccattagaattctcctgggagaactcagtaatgtaagacttagagtttacaattaaccaggatggtctcatcttttgtcgggtctgagatcttgccctgtaccacaccgtgcccttcatcct

SEQ ID NO: 122451 - DNA, 633 bp, Homo sapiens
aagcccaacttgtttataacaagtttagcttcatcagatttggccttattttttatataagtgtatcaaagatgttaactgactacataggaatatgagacttaaaatctctcaagggcagaaagacaaaccaaggctgactttagattctgcttgtagtacctacagacaatttaaatgtagtataacatctcattcaaaaccttgttaatataaccaattgtatcctattataagaaaaacagmtttttcttgtataatttgcatacaaaattacatatattaataagaatttttaactcttagtaatcttaatttctaataaaaaacctaaaaagtaaagcaaatttattttcttggtgcattctcctcagattgaatttatagttttatgatcttaaaaatataatagagacatatataaacctatctgaccagcaaacccaggttaaaaaaagtatgcagacaaatctgaagacattctattttatttttatcaataatttaaaaacagcttatttatcaaagatctccccaagtcccatgaacttgaaatgtatttaattatcacatttgtagaagctttaggtatgctcatttatctctgaaccaatttaaataaagcattttact

SEQ ID NO: 122452 - DNA, 633 bp, Homo sapiens
aagcccaacttgtttataacaagtttagcttcatcagatttggccttattttttatataagtgtatcaaagatgttaactgactacataggaatatgagacttaaaatctctcaagggcagaaagacaaaccaaggctgactttagattctgcttgtagtacctacagacaatttaaatgtagtataacatctcattcaaaaccttgttaatataaccaattgtatcctattataagaaaaacagctttttcttgtataatttgcatacaaaattacatatattaataagaatttttaactcttagtaatcttaatttctaataaaaaacctaaaaagtaaagcaaatttattttcttggtgcattctcctcagattgaatttatagttttatgatcttaaaaatataatagagacatatataaaccyatctgaccagcaaacccaggttaaaaaaagtatgcagacaaatctgaagacattctattttatttttatcaataatttaaaaacagcttatttatcaaagatctccccaagtcccatgaacttgaaatgtatttaattatcacatttgtagaagctttaggtatgctcatttatctctgaaccaatttaaataaagcattttact

SEQ ID NO: 122453 - DNA, 564 bp, Homo sapiens
aattgctcagtctcaggcattctgttatagcaatacaaaatggtctaagacaattggtcatctaaattttttgtaataattcacttatctgtttgtattttccattgggtgacacacattttgtgggaccctagcagagaatctggtacataacaagcctttgataaaggtttgttgaaagaatgggatcgtgagctaatgaaataagaaaggaaagaatgggaggcaggatcgatcagtcaatctaccagccaattagtcagtatactattaccaatattcttttcctattttttgtcttgtacacatttaatttcataggacattgaacaatgacttcatgaaatctagacatacctcactcaaaacaaatttaaaatgtgccgtttagtttgaaggtaaacttcatggtagtaaaggctctcaggaagaattggtttgatttmtttttttttttaaagaacatttacatagtattaagcttatttattcagcaaattcttagcagtattttaactaactgcaggaaaattaattagaaacacaaggattaaattattgttc

SEQ ID NO: 122454 - DNA, 585 bp, Homo sapiens
catttgtcaaaagatttccccatgtgtgtcttgtgcaggacttggttgttgtaaccctctcagcctcccatgcaggaggagtatttttcctgatgctttctcttgataggtcttgggatgatcatatttgactgatgtgttagtgttcttactttaactcgtgcactatgaactttatatcatgttttacttcccagcatattaatgctctggtcttcagtgcagatggagtgaagccctaaaactcagccccgtcagccaattaggattcatctgacaagcgacactttgtcttttgtgtgctagcctgggaatgscaaaaagacagcatcttgtttgccttttcaaaaatacacccccatagaatagaaattacgtacgcttttgctggcttaagcataatatagatttattatgtgggaaagatagatgagagattttttttttttttacaatgctgggaaggctttaaaattatttactgtcctcattatcattaggaagcagacattatctgatctatctctccagttttttatggtaaaactctattttaagattcataatttttaaagactgcctgcc

SEQ ID NO: 122455 - DNA, 646 bp, Homo sapiens
accactaaaggatgacacaggatctgaggacaagaactgaaagaataaagagaggcaggcagcatatggtgatagttatgaagaaatccactttcagacattatgtcttaaatatatatatatatgtttttgtttttgtttttcctgaaagggcattgggttgacttctgcttcagtcactgacataacctttgcttttctttctgagagttaccttgggagcagcccaatatggatttgacttgttcatttggcatgatttagtacctgagttagcttttcagaaatcttgccagtattagcattgtgtgcagatgcttctcagatgagtggcgtcttgggacatcagcagagatggtgctattaaatcacacagccagtgtcctctgccattctatgaaaggcaggcaagagtgccgcagcttcccgatgcctccagataaactacagggccttttaaggagtgccctgggtaagctaccacggtggtgaggtgcatttggktaagtgtgatagagacagccaaggtggcgcatgggccacggtgagctgtgtcagcctttcccattgcatatggctgcctggctgcctctatggtgaaaggtaactgtgggtagtagaaaaatgattggtgaaaagagaacag

SEQ ID NO: 122456 - DNA, 579 bp, Homo sapiens
ctaaaaatgaatcacattttgtccagcattccttgaaagttcacaataaatgtcaagtctttgcggtttctattcataactcaagagcctttacaggaactttgcccatactaaagttttctttcagaaggaaccgtttttccttttttctttattgtgtttcttcatcatcctcaaaatcaatttttttaatggatgaatcagattctgcttttgtccattygtcctttgagtgagtggatagctgcgcagagcatcatcaaagccttcatgtccaacatccccgagccagtccctaacccaggccaataagaaccccaatgccaccacaagagatatgaaaagaaaaagcagccctctggttctcttcagttttgccccatgctattctctaagtatgcatgagggctgtgaaggataagatccagtccagtgggaaagaagacaggtttgtgaattgaacaaaaaaaaaagaagcagcatcaagaaacaaaacatggaggcagtgctccgaatagaaatagctagcctactgattctaagtgggcatcgtgattcaaggaagaggtagaatctttg

SEQ ID NO: 122457 - DNA, 579 bp, Homo sapiens
ctaaaaatgaatcacattttgtccagcattccttgaaagttcacaataaatgtcaagtctttgcggtttctattcataactcaagagcctttacaggaactttgcccatactaaagttttctttcagaaggaaccgtttttccttttttctttattgtgtttcttcatcatcctcaaaatcaatttttttaatggatgaatcagattctgcttttgtccatttgtcctttgagtgagtggatagctgcgcagagcatcatcaaagccttcatgtccaacatccccgagccagtccctaacccaggccaataagaaccccaatgccaccacaagagatatgaaaagaaaaagcagccctctggttctcttcagttttgccccatgctattctctaagtatgcatgagggctgtgaaggataagatccagtccrgtgggaaagaagacaggtttgtgaattgaacaaaaaaaaaagaagcagcatcaagaaacaaaacatggaggcagtgctccgaatagaaatagctagcctactgattctaagtgggcatcgtgattcaaggaagaggtagaatctttg

SEQ ID NO: 122458 - DNA, 579 bp, Homo sapiens
ctaaaaatgaatcacattttgtccagcattccttgaaagttcacaataaatgtcaagtctttgcggtttctattcataactcaagagcctttacaggaactttgcccatactaaagttttctttcagaaggaaccgtttttccttttttctttattgtgtttcttcatcatcctcaaaatcaatttttttaatggatgaatcagattctgcttttgtccatttgtcctttgagtgagtggatagctgcgcagagcatcatcaaagccttcatgtccaacatccccgagccagtccctaacccaggccaataagaaccccaatgccaccacaagagatatgaaaagaaaaagcagccctctggttctcttcagttttgccccatgctattctctaagtatgcatgagggctgtgaaggataagatccagtccagtgggaaagaagacaggtttgtgaattgaacaaaaaaaaaagaagcagcakcaagaaacaaaacatggaggcagtgctccgaatagaaatagctagcctactgattctaagtgggcatcgtgattcaaggaagaggtagaatctttg

SEQ ID NO: 122459 - DNA, 579 bp, Homo sapiens
ctaaaaatgaatcacattttgtccagcattccttgaaagttcacaataaatgtcaagtctttgcggtttctattcataactcaagagcctttacaggaactttgcccatactaaagttttctttcagaaggaaccgtttttccttttttctttattgtgtttcttcatcatcctcaaaatcaatttttttaatggatgaatcagattctgcttttgtccatttgtcctttgagtgagtggatagctgcgcagagcatcatcaaagccttcatgtccaacatccccgagccagtccctaacccaggccaataagaaccccaatgccaccacaagagatatgaaaagaaaaagcagccctctggttctcttcagttttgccccatgctattctctaagtatgcatgagggctgtgaaggataagatccagtccagtgggaaagaagacaggtttgtgaattgaacaaaaaaaaaagaagcagcatcaagaaacaaaacatggaggsagtgctccgaatagaaatagctagcctactgattctaagtgggcatcgtgattcaaggaagaggtagaatctttg

SEQ ID NO: 122460 - DNA, 549 bp, Homo sapiens
attgctttcaaaatggaaacttcaagcaaagccagtgttgcttgtattgacctttaggggaggaaggtagttagcattttttgttgttcaatttcatgtaaaatgaggagccctgagagctagcatttctgtcctgaagcatcttcatgtagatcagattcacacccccatgcctgactcctcaaagcatgctaatcccatcttgacatttgcagtaaatgaaaactctctgtcagtaggtagatacaggctttccttctaagggtctcctatgatgacaatttgatataaaygaattaggtatttctatagccctattctccagggctggaggcagcatgtcaccttcctcattgcaatgttggtggggtggagggtcagtgtggtgtggcccaaatatcaaacactgatgggtgggatatatttgctttgatctgatacttccagttcctcatgatctcatttctaggcttcagtttccaccattgcgaaatgaaaggatggatgagattaaatatgccctgtagttggttcccaaatttaagaatc

SEQ ID NO: 122461 - DNA, 637 bp, Homo sapiens
tcaccttcctcattgcaatgttggtggggtggagggtcagtgtggtgtggcccaaatatcaaacactgatgggtgggatatatttgctttgatctgatacttccagttcctcatgatctcatttctaggcttcagtttccaccattgcgaaatgaaaggatggatgagattaaatatgccctgtagttggttcccaaatttaagamtccatgattctaagtctttaatggtcgtaggagaaagggttcaagaatgtaccagttacataatattttggaagtacactgtcactagaaacttgaggtccccttttttgtcaacttcaagggatgacttttactttagagaaaatttctttcaaaggactctgtctgtctttggaatttctacttggttaatgatgtttagggatatgaggaggtgcagagaggagcagaaatcatggtggcatgcataaaaaacatgccttgaaatacattctatgatgtgcttgccattattatgattattatagttattgattcacataggcatatagaaactaaataattccaagcttacttttcaaaaagacaaaaattagtgtttttctcttaattttagataaaatcctagtttaaaaaattttaatcttacc

SEQ ID NO: 122462 - DNA, 644 bp, Homo sapiens
tttttcccagttgtattatttttttcccacttggatctaaaatacatttttgtgaacagggtatcaatgatttctaggtagctctccaacatgtcttgagtatgtgctcaaactccacatacactgaacacctcatgatcaactgcataagctttccaaatatctactttcatgccctcacgtaggaaataatttacctgttccttagagtcttttctccttagagtctctaatcacatttctgtaacttggccattgataaatttgtgagtgttaatatcaagaagaggcgctttgaagatgttttttagattgttataggcttcacacaagtctattgtttttagraaacctacactggctctatcacacttaaaaatactcctttcttttgttcctccccttttatttctatttaaaaatttttaaagattactttttaatagttaagacatccacatggttcaaaatttagaagatacaaagtggattaagtgaaaaattttcttctcatctcttcattttaatcagctccactaccctccaaagatatccagcataaccagcccattgtgtaatcttcccaatacatcctttgtatacatagattcacccatattcctttgtatttattatacagatgg

SEQ ID NO: 122463 - DNA, 644 bp, Homo sapiens
tttttcccagttgtattatttttttcccacttggatctaaaatacatttttgtgaacagggtatcaatgatttctaggtagctctccaacatgtcttgagtatgtgctcaaactccacatacactgaacacctcatgatcaactgcataagctttccaaatatctactttcatgccctcacgtaggaaataatttacctgttccttagagtcttttctccttagagtctctaatcacatttctgtaacttggccattgataaatttgtgagtgttaatatcaagaagaggcgctttgaagatgttttttagattgttataggcttcacacaagtctattgtttttagaaaacctacactggctctatcacacttaaaaatactcctttcttttgttcctccccttttatttctatttaaaaatttttaaagattaytttttaatagttaagacatccacatggttcaaaatttagaagatacaaagtggattaagtgaaaaattttcttctcatctcttcattttaatcagctccactaccctccaaagatatccagcataaccagcccattgtgtaatcttcccaatacatcctttgtatacatagattcacccatattcctttgtatttattatacagatgg

SEQ ID NO: 122464 - DNA, 600 bp, Homo sapiens
aacatatgaactttggggggacataaacatttaatctatagcattatagaatattatttaagagggtaaataaatattaagatacatataataacatggatgaatcgtaaaaacataatgttgaatgaraagatcaaacccaggaaaactacacagagtatgatacttgttttatacaattccagaaccaatagaataatatatcaatatgaatttctatatacacacatatattaatcactatataaagtgataaaattatatgtaagcataaaaaacaacatgaaattgtaaggacagtatttgtacaggaggcaagaagagatcagagtcagatatgtgtcattcacagatgttttagtgcttgggtaatgatttatgattatttattttttaagaagtactattctttccttcaattcatgctgacttgttcagcaaaattggaatatatttgtgcattcacctacaatatgaattataagattatacattttatattttccttttttttatcccttttcttcctcacatgactaccattatttttctttttgtattatttatttggggatacaaacttattctcaaactgagcag

SEQ ID NO: 122465 - DNA, 600 bp, Homo sapiens
aacatatgaactttggggggacataaacatttaatctatagcattatagaatattatttaagagggtaaataaatattaagatacatataataacatggatgaatcgtaaaaacataatgttgaatgaaaagatcaaayccaggaaaactacacagagtatgatacttgttttatacaattccagaaccaatagaataatatatcaatatgaatttctatatacacacatatattaatcactatataaagtgataaaattatatgtaagcataaaaaacaacatgaaattgtaaggacagtatttgtacaggaggcaagaagagatcagagtcagatatgtgtcattcacagatgttttagtgcttgggtaatgatttatgattatttattttttaagaagtactattctttccttcaattcatgctgacttgttcagcaaaattggaatatatttgtgcattcacctacaatatgaattataagattatacattttatattttccttttttttatcccttttcttcctcacatgactaccattatttttctttttgtattatttatttggggatacaaacttattctcaaactgagcag

SEQ ID NO: 122466 - DNA, 575 bp, Homo sapiens
caacatatgaactttggggggacataaacatttaatctatagcattatagaatattatttaagagggtaaataaatattaagatacatataataacatggatgaatcgtaaaaacataatgttgaatgaaaagatcaaacccaggaaaactacacagagtatgatacttgttttatacaattccagaaccaatagaataatatatcaatatgaatttctatatacacacatatattaatcactatataaagtgataaaattatatgtaagcataaaaaacaacatgaaattgtaaggacagtatttgtacaggaggcaagaagagatcagagtcagatatgtgtcattcacagatgttttagtgcttgggtaatgatttatgattatttattttttaagaagtactattctttccttcaattcatgctgacttgttcagcaaaattggaatatatttgtgcattcacctacaatatgaattatargattatacattttatattttccttttttttatcccttttcttcctcacatgactaccattatttttctttttgtattatttatttgggga

SEQ ID NO: 122467 - DNA, 469 bp, Homo sapiens
catttggtgttttaatagctccagtttacagatgaggaaactgaggaacagaaaagttaagtaattagtctaaactgaataggtaataagtgaagcagtgagataattatctattatcttattcaaaatagatttaaaatgtacattattctataccaaatactctggtgaagagcttctggaaataataaaacctgcatatcatgtaagttagcatcaaaaaacrttattgactccatattcaactcttagaattttctatccatcccaaaacccttgttctatgttcgtttcttcaactattattctgcttaactgatgactcctgtgttttttttttcttttaatctctttacttccaaaaagatatttcactgaaggctttacaaggaattcccattaaaatctgaatcaatttgtccattatttttatgcttttagattacatctttgcttcatttcattactt

SEQ ID NO: 122468 - DNA, 414 bp, Homo sapiens
gtctaaactgaataggtaataagtgaagcagtgagataattatctattatcttattcaaaatagatttaaaatgtacattattctataccaaatactctggtgaagagcttctggaaataataaaacctgcatatcatgtaagttagcatcaaaaaacattattgactccatattcaactcttagaattttctatccatcccaaaacccttgttctatgttcgtttcttcaactattattctgcttaactgatgactcctgkgttttttttttcttttaatctctttacttccaaaaagatatttcactgaaggctttacaaggaattcccattaaaatctgaatcaatttgtccattatttttatgcttttagattacatctttgcttcatttcattacttaaaaagattggt

SEQ ID NO: 122469 - DNA, 593 bp, Homo sapiens
attattattgttagtaaatctgccaaaaattaattctaagtttacaactaaaagccacaaatgaactttttatttactcggtcatatggaatctttaagcacaagtaaaagatctctaagtggccctaggaaataagaagtgttaaaacaaatcagctctgccaaatactgggagttctgagaacttcactgagtccccagccatgctggtcgtcttccagtttccactcagagctttttatctaatcaatgaatttactgatttaaatacaggtttaggaacaaagtcctaagtagttattttatggttcttgctttgctttgcaaccgtatcccagcatatttcccctctctcactgtgctccagttataataggctactgttgattccaattccttgtcctggtgtcaggacttttccctttcaactgttcactccaacctcagatttttcaatgaccagctccttctcatgccrcagatctctgcttaaatgcaaccttcacaaaaatccttctgtgaccacactatctccaggtggagtaatattgctcccatcaccccctaccacatcatcctcagagtacttacca

SEQ ID NO: 122470 - DNA, 593 bp, Homo sapiens
attattattgttagtaaatctgccaaaaattaattctaagtttacaactaaaagccacaaatgaactttttatttactcggtcatatggaatctttaagcacaagtaaaagatctctaagtggccctaggaaataagaagtgttaaaacaaatcagctctgccaaatactgggagttctgagaacttcactgagtccccagccatgctggtcgtcttccagtttccactcagagctttttatctaatcaatgaatttactgatttaaatacaggtttaggaacaaagtcctaagtagttattttatggttcttgctttgctttgcaaccgtatcccagcatatttcccctctctcactgtgctccagttataataggctactgttgattccaattccttgtcctggtgtcaggacttttccctttcaactgttcactccaacctcagatttttcaatgaccagctccttctcatgccacagatctctgctyaaatgcaaccttcacaaaaatccttctgtgaccacactatctccaggtggagtaatattgctcccatcaccccctaccacatcatcctcagagtacttacca

SEQ ID NO: 122471 - DNA, 602 bp, Homo sapiens
aactgctcagttgtgacaggctggtaccattaatgttgcctcccagaccaatatctagcatttgtaaaatataaatgaattggaaaaactttataccaaatcaacaaaaaccacataatacagttcaatgctagcaatcttactagtagatgaggaaagtggtatttagaaatagcaatgtattaatacaaaaaaagtaaactctaattggaaccaatayactgctttggaatgctccccagaacttacaaggcggtttttaaagtgtgatattccaataattcattggcacgtctttagtggattacagtactttaagtccccaaatattttagtctttgcaaaacaatagtagtatgaaatgttttaaagtcttcaaacttctaaaattagtttttatcaacacatttacctcatgtcaacttaatttattaagatgtccaatgctaattgttttttgatgttttttcatatgtagtgacatacagagcatttagcactgatacttagcacctgctactttcattatctagtttttgaccacataaagaaacttagggcagtggttcagtcccttcttaattacaaacctttgctggcag

SEQ ID NO: 122472 - DNA, 629 bp, Homo sapiens
gaaacttagggtattgcttttacagctggaaacctctgtggctggtggtgcctttgcctgagtttttgcttcggcccactgggcttgttccacccactcagcctggcaagtgcactcatctcatgccaccagtccagatcccatgcctgccaagggtgagccaggcacagagtggcaaggggtgcataagtgagtgagcaaaaggtctggccactgcacacagccatgcacactggctgctgcagtgggatgggcagctctgggtgctagcacaggcactgagtgcaagcctgcagctggattagatgcaccataagcggcttctgctgtgggtgtctacatctggacaaggggaatgcagtggtgcccagaagcttagagctgcaaccacagagctccaaagagggtgtcacagccctggctcagggatcacctaggtctgggctcccaaagggctgcagctcttctttccttctagttgcctgcaatgtggcaagtcaggggtgatgyttcagccctgtttgtgttacagctttttcagttgtcccacttccaggaagaatgaagtacatggacaactggtaggtgagaaaggtggagaggagctttattgcatgacagaacagctc

SEQ ID NO: 122473 - DNA, 609 bp, Homo sapiens
aaagaccaattctcaaaaatctcagaatgtgtcaacccctccacactcatattccagtctcaggaatttcaattatttgtggcaggctacttatttctccaaactccaagcacagagaccagagacatctcctctctctttctttttctctctttctctctctccctccctccctccctccttccctccctctccattcaacctatttgattaattaatagaacaatactttacaaattttaaacaaaagaacatgcacataaggcatccttggatgcactggattttccctctcatattatatggaatacactgctcttcctgtaaaattcaaaaagaccatttacttcccttggagtaagaacaattcaagcctttaactayatgattctggcctctctactgagtctacagcaagtattactgctaggaataataataaattaaacatggaaagccaaataacaatatttcaatatatcacttttaatacagatcactttgcctctcagaaaccctggatagcctagaagtattatggaaagtctctctaaaagccctcgttcaattttttcccaattagccttaatgatcacctcgatttcatcc

SEQ ID NO: 122474 - DNA, 590 bp, Homo sapiens
aacattgtcaaacgcaaggccatggcagtcaggatgaaatatatttgcttatggcttggattggctggtgtattatgtaagaaatattctacagtcatagttagcttatttaattttgattttaaagtactctttcrtattcgcagtgtatttagtacattaaagtaatgagatgattccttagagaatataatcacatttctattaaactatatccattctcattaagcacaatacagttaggctccatctccagtgttaagacaacaaaataatatttacacattaacattaaaggatattatgctaaagtttctaaatccatagtttagaaaccttcaaattgattagactgtttttactttacatagtcagaagttctcatactctaattttgttcacttccaaggcgattaaagtttttatatccaaaaatcatctaaatattactgactagtatttgaatatgaaaagttagctaacgaatttgagcagtaaacatagcaaaactgtttcggtcctgggaaaacagccctgtcctctattcagtttatctcctagatgattcctgaattctctacatagaaata

SEQ ID NO: 122475 - DNA, 590 bp, Homo sapiens
aacattgtcaaacgcaaggccatggcagtcaggatgaaatatatttgcttatggcttggattggctggtgtattatgtaagaaatattctacagtcatagttagcttatttaattttgattttaaagtactctttcgtattcgcagtgtatttagtacattaaagtaatgagatgattccttagagaatataatcacatttctattaaactatatccattctcattaagcacaatacagttaggctccatctccagtgttaagacaacaaaataatatttacacattaacattaaaggatattatgctaaagtttctaaatccatagtttagaaaccttcaaattgattaractgtttttactttacatagtcagaagttctcatactctaattttgttcacttccaaggcgattaaagtttttatatccaaaaatcatctaaatattactgactagtatttgaatatgaaaagttagctaacgaatttgagcagtaaacatagcaaaactgtttcggtcctgggaaaacagccctgtcctctattcagtttatctcctagatgattcctgaattctctacatagaaata

SEQ ID NO: 122476 - DNA, 672 bp, Homo sapiens
tgttgtgtgtttataaaattcatgtgttgatctcttcatgctcaaagaatagtccaaaataagagtttggagaaaatggcagtacaagaagaataatgcttacccagtttaaattttttcctacccttaaattctaaaaaaaaamaaaaaaaactgattcttattcaggtagagtcagggagaaggctatccgaaatctgactgaaaaggaaggagcatgctatttaataaaattccccacctgtttcttgtattctttctgagttaaaaccaatgaccttaagaagaaattgtctacttatatcctaggatttcaattatccctcttcctcgataacactcctgttggcacatttacgacagcaaatgtgaataataaacttaatccttttttgctctagtacatgctcttaacattttatctcatctagacccactcaaacatagatgtgcttcatctttcatacaatcttcagatcaggaagacgtttttgtttgttagatggttggttttggtttttggttttttccatgagagattatttgcatctattctgcagcaggatttttaaaaatagtcacatcttttgcttcaaattagagactacactcagaaaaattcactccagtattcccacattataccgcctctacacatttataaccaaattc

SEQ ID NO: 122477 - DNA, 563 bp, Homo sapiens
cctacagaatcaacaaactaacaaaaaataataaggtggtaggatataaaattaacaaacaaaaatcaatagccttaatrtatacaaacaataaccaattagaggatattatgatagacaaaaatctatttagagaaccaacaaaaagataaagtacttaggaataaatttaacaatttgcaaacctaatcaggaaaattttaaaacacttctgaaagatacaaaagtagacaggaaccaatggaaaagcatcctccattcttggatagaatgtctgaacattataaagatattagttcttatgatccagcaaccctactactgggtaaatatccaaaggaaataaaatctgtatgttgaagagatatctgcactgtcatgttaactgcagcattattcatcatagccaagatatggaatcaacctaagtgttcatcaatggatgagtggataaagaaaatgtgatatatgtacataatgaaaacagaataaaaaagaatgaaatcctgtcatttgcaacaacatggatgagcctggaggaccttatgtcaagtaaagtaagt

SEQ ID NO: 122478 - DNA, 563 bp, Homo sapiens
cctacagaatcaacaaactaacaaaaaataataaggtggtaggatataaaattaacaaacaaaaatcaatagccttaatatatacaaacaataaccaattagaggatattatgatagacaaaaatctatttagagaaccaacaaaaagataaagtacttaggaataaatttaacaatttgcaaacctaatcaggaaaattttaaaacacttctgaaagatacaaaagtagacaggaaccaatggaaaagcatcctccattcttggatagaatgtctgaacattakaaagatattagttcttatgatccagcaaccctactactgggtaaatatccaaaggaaataaaatctgtatgttgaagagatatctgcactgtcatgttaactgcagcattattcatcatagccaagatatggaatcaacctaagtgttcatcaatggatgagtggataaagaaaatgtgatatatgtacataatgaaaacagaataaaaaagaatgaaatcctgtcatttgcaacaacatggatgagcctggaggaccttatgtcaagtaaagtaagt

SEQ ID NO: 122479 - DNA, 563 bp, Homo sapiens
cctacagaatcaacaaactaacaaaaaataataaggtggtaggatataaaattaacaaacaaaaatcaatagccttaatatatacaaacaataaccaattagaggatattatgatagacaaaaatctatttagagaaccaacaaaaagataaagtacttaggaataaatttaacaatttgcaaacctaatcaggaaaattttaaaacacttctgaaagatacaaaagtagacaggaaccaatggaaaagcatcctccattcttggatagaatgtctgaacattataaagatattagttcttatgatccagcaaccctactactgggtaaatatccaaaggaaataaaatctgtatgttgaagagatatctgcaytgtcatgttaactgcagcattattcatcatagccaagatatggaatcaacctaagtgttcatcaatggatgagtggataaagaaaatgtgatatatgtacataatgaaaacagaataaaaaagaatgaaatcctgtcatttgcaacaacatggatgagcctggaggaccttatgtcaagtaaagtaagt

SEQ ID NO: 122480 - DNA, 563 bp, Homo sapiens
cctacagaatcaacaaactaacaaaaaataataaggtggtaggatataaaattaacaaacaaaaatcaatagccttaatatatacaaacaataaccaattagaggatattatgatagacaaaaatctatttagagaaccaacaaaaagataaagtacttaggaataaatttaacaatttgcaaacctaatcaggaaaattttaaaacacttctgaaagatacaaaagtagacaggaaccaatggaaaagcatcctccattcttggatagaatgtctgaacattataaagatattagttcttatgatccagcaaccctactactgggtaaatatccaaaggaaataaaatctgtatgttgaagagatatctgcactgtcatgttaactgcagcattattcatcatagccaagatatggaatcaacctaagtgttcatcaatggatgagtggataaagaaaatgtgatatatgtacataaygaaaacagaataaaaaagaatgaaatcctgtcatttgcaacaacatggatgagcctggaggaccttatgtcaagtaaagtaagt

SEQ ID NO: 122481 - DNA, 592 bp, Homo sapiens
ggttattcgaatctgataatctgatcatcatgtctttaacagctttcagctctgacctacaagtcatgtctggattcttttatagcttttgaatccaaacaagctcctgaccttgctaactatagcccagcaccaggagatttctgacagtataaaattcaaggccgaatcttaagactatgtaatgaaattgataaccataaattccaagctgggctcaggacaacaggacttggcatttctggccattacttccaaagcaaatcatatctgtatatgaaatacaacaaagtctgctagtcygaaagcatgttaaatatggcttgttatgttcagcctttccacactgctcttataaacaggagttggactgtttccatcagactctgaccaagtaaacttaaatgtaatgatgttacagtctgagtctttttgttttttaagaaaagcaacataagcaacaaaagcttccctgcctttttcccgcggttgctcccactccatctctcgcttccattttctttcagaacactctgaaactctcaagcattttctataagagaacttgcagttctccatagggatcaggaga

SEQ ID NO: 122482 - DNA, 636 bp, Homo sapiens
tgtgctgggagatctgctgctcctttagagctggcaggcagagacgtttaagtctgcttaagctgggcccacagccacgcctttcccaggtgctctgtcccagggagatgggggttttatctgtaaacccctgactggggctgaacagctgataatcttgttgagtgtcacttgtatgtgactactttcaagattgtctttaggcttttaatatttgattatatggtgtctttgaaaggacctcttccgagttgtcctacttggaattccttgagcttctgggatgtattccaattcatgcctttcagccagtttggggagttttcatccactgtcgtatcaaataatctttgtctctttttctctctgttttctttctgagtctcccatcattcctatattggtgtgcctaaagaagtagtttaggctgttttcactcttctgtattctttttaactttttctcctctaatttttttctcctctgactcagtattttcaaatgcattatcttcagatttgctgatttgcctgcctcctcaaatctgtttttaaaccactctagtgaaattttcaacttggtcattctrtttttttcagctccataatttctgttggagtccttcttcatttctct

SEQ ID NO: 122483 - DNA, 649 bp, Homo sapiens
catttaataatcatactatgatccaggccaattataacaattctttcctataaaactacagttgttagaggaatgtcgagtaggaaaatgtttaaatcctgacataaaaatgtctgtgataaaaccaggagctctgagtttcatggccctttaatattgcctctgaagtaatgaaaaggccattttccaacacttgtttcaaggacttcactaataacatcttccacaaaggactgatctttttttaagcrggatattgtgacgttattctaaaccatttaaaattatgtaacaaacttttactggaatctctcagtcttccttttttattcactctaatgaaatacttgttaaatacttcatcttaaccttatggaaatgcttatgacagacaatctgttatttaagtcagtttcagaattaaaggataagaattgggggtggtgatgaggaaggaggtcataaataatctaaagaattaggaaaaaggcttttcttttggtcttgattcaattcatctagattgcaaaaatattgtgctatgatagcttgatactaatccctgggggacagtgccttccatgcaaacctcctcttgggtatgagtggctgtccacttagaaagaacctggctggcaaggaaattgct

SEQ ID NO: 122484 - DNA, 649 bp, Homo sapiens
catttaataatcatactatgatccaggccaattataacaattctttcctataaaactacagttgttagaggaatgtcgagtaggaaaatgtttaaatcctgacataaaaatgtctgtgataaaaccaggagctctgagtttcatggccctttaatattgcctctgaagtaatgaaaaggccattttccaacacttgtttcaaggacttcactaataacatcttccacaaaggactgatctttttttaagcgggatattgtgacgttattctaaaccatttaaaattatgtaacaaacttttactggaatctctcagtcttmcttttttattcactctaatgaaatacttgttaaatacttcatcttaaccttatggaaatgcttatgacagacaatctgttatttaagtcagtttcagaattaaaggataagaattgggggtggtgatgaggaaggaggtcataaataatctaaagaattaggaaaaaggcttttcttttggtcttgattcaattcatctagattgcaaaaatattgtgctatgatagcttgatactaatccctgggggacagtgccttccatgcaaacctcctcttgggtatgagtggctgtccacttagaaagaacctggctggcaaggaaattgct

SEQ ID NO: 122485 - DNA, 649 bp, Homo sapiens
catttaataatcatactatgatccaggccaattataacaattctttcctataaaactacagttgttagaggaatgtcgagtaggaaaatgtttaaatcctgacataaaaatgtctgtgataaaaccaggagctctgagtttcatggccctttaatattgcctctgaagtaatgaaaaggccattttccaacacttgtttcaaggacttcactaataacatcttccacaaaggactgatctttttttaagcgggatattgtgacgttattctaaaccatttaaaattatgtaacaaacttttactggaatctctcagtcttccttttttattcactctaatgaaatacttgttaaatrcttcatcttaaccttatggaaatgcttatgacagacaatctgttatttaagtcagtttcagaattaaaggataagaattgggggtggtgatgaggaaggaggtcataaataatctaaagaattaggaaaaaggcttttcttttggtcttgattcaattcatctagattgcaaaaatattgtgctatgatagcttgatactaatccctgggggacagtgccttccatgcaaacctcctcttgggtatgagtggctgtccacttagaaagaacctggctggcaaggaaattgct

SEQ ID NO: 122486 - DNA, 587 bp, Homo sapiens
gaacatcacatactcaattttggccaatctttatttgttgcttaaaaaataagcatttctacactgctttactcaaaaccaccacagagttgtgaaaagaattgctgtgcatttctyatgaaaatgtttggataccccaccacgcacatctgtacaattctcatatttataatcattcatattcagaatagtatgtgccttctaagtatgccagtgaaaaataaaatgattacttttcctcaaacgttcagcaggcagtctaaattagccagctggtctcttgtcatggctggaaatatatagctttttataaaaagtgacagtaaatatgtctatggcccagttactttatatgcaagtggaaattccatcagtgcaatgacttatgattggagaagagcaaaaaagtgtataaagaaagagaagcaatgagaatagtgtttcatgtgccttgcagtggctcacaaaaaaataactcatttttaggaagtgaaatcaccttgttttatggctaggcagtaatctcaaggtccacttgttaagtttttttttattattgaagattcagaagtcatttaaaaacatga

SEQ ID NO: 122487 - DNA, 528 bp, Homo sapiens
ttttgagcacccatttgtgggtcaggccctaggaaagggcacttctagaggataaaaggagctgctttgtctctacttaaggactagggagagaaggctatttagagccaggtgctttgcaagctgattctcaaatagcttcattgtgatacttgtgaagaaagctgtcagcatgtggaaaaagccctttccatattggcttcccttgcattttctgccattctgcagttttcctatggagctgcttggggttgcagctgtctgccagggaatrcagagtgtttcccagagtttggctgaggcctgggatgaagactcacccatactctgtgcctatcaataagctccttccagaagcgcagctgtagctgggagggcccccactgcactctggagaggagaaatgaaaacaaaggcaagggtgaatgaggctccaagggtaccagttgtctccacaggagagactcttagagatcagcagcccattgtacagaagaggagactgaggcccagagaggaggaataact

SEQ ID NO: 122488 - DNA, 407 bp, Homo sapiens
aattcaagctatttccaaaagggcagcattttccaatctccatgctccaaatctctccatctaactgtacaaatagatgaattaaaaatactgggctagctgaattactgtcatagagaccttcaaccattttctcaccaaataagaaacagtggatggactgtcttcgaaattaggaagtaggcaatttctttttatctttgtagaatttaccatgctgtctatttctgctctaagatttcatacttcaagcaccatggtctacctttgcttactaaatagattaactgttaaaccctgcatatcatagactaaaccttattgttaagcattagtggtagatggttgccacttwctttttacctttgtgtaaatacaaatcttttgccttcctcaaggtataggta

SEQ ID NO: 122489 - DNA, 605 bp, Homo sapiens
agacttatccctagacagtctggctcccagcctctgtacatagcacatcaatgtagaattttaatatctatgttatcaaataaaggataaggtaaatgtatcccaaggcagaactattaaaagaaggaagctttctttatagtctgatgtatgccacagggagctgatctgttctctctaaggcgtggaggaccagagatcatgtatgagaggctggttgtcctggatggtgactcttatgtgctgagtcacatgaaagcactggacttctagacaaatgcagaacatgaagaagatgagaataaaggtagttctcactgagactggctatttagttcagctaagacccagaaccaacacacccatagtcagtctctctctctctctttctttctttctctctgtctctctctctctcwcacacacacacacacacacacaaacacacagagcttatttactttgtgccagtcactgctctaagaattttacatgtattacctcaattaatcctcaaaataacactttgagtcagaagataatcaatatcctaccttacatataaagaaactgaggcacggagagattaagcaactggcccggta

SEQ ID NO: 122490 - DNA, 604 bp, Homo sapiens
ttgtcttacatccatttagaataacactagacaatgctatgatttttgcttgaaacatcaaacataatttaggaaattagaatctatgaaaataaagtgagcattttaaagcttccagaaagaaatctgacacaacctgttttgtctttcattttttctttctttcctttatattcatcatagatgttatgatgccctatctgttaactccaatatctggattatctatgagtttgtttttaataactgatttatttcttatcagtctgttttacttgcttttttgtatatttggtaytttttttaaagtatgctgaatttatggataatatgatatagaactactcaagaattttgaattttttttctgggcagaatttgtaattacttgcagatcatcttgctgctctcaagacctagttttaagctgtgttatggtaattatattttattttcctcttagaacatatgcctcactcctgggatactgcacctctcctaagagaatttttagagtcccaactgagtttctcagttgtttgccaacatttccccatttggctggatctgaactccagtagctttccaggaagttttcagtccc

SEQ ID NO: 122491 - DNA, 604 bp, Homo sapiens
ttgtcttacatccatttagaataacactagacaatgctatgatttttgcttgaaacatcaaacataatttaggaaattagaatctatgaaaataaagtgagcattttaaagcttccagaaagaaatctgacacaacctgttttgtctttcattttttctttctttcctttatattcatcatagatgttatgatgccctatctgttaactccaatatctggattatctatgagtttgtttttaataactgatttatttcttatcagtctgttttacttgcttttttgtatatttggtattttttttaaagtatgctgaatttatggataatatgatatagaactactcaagaattttgaattttttttctgggcagaatttgtaattacttgcagatcatcttgctgctctcaagacctagttttaagctgtgttatgrtaattatattttattttcctcttagaacatatgcctcactcctgggatactgcacctctcctaagagaatttttagagtcccaactgagtttctcagttgtttgccaacatttccccatttggctggatctgaactccagtagctttccaggaagttttcagtccc

SEQ ID NO: 122492 - DNA, 595 bp, Homo sapiens
cttagttggaatggcttttatgcaaaagacaaccaataacaaatactggcaacaatatggagaaaagagaatccatgttcactgttggtgggaatgtaaattagttcaaccactatggagaacagtttggggggtttctcagaaaatgaaaaatagaactaccaaatgatccagcaaccccactgctaggtatatacytaaaagaaagaaaatcagtgtattgaagggatatctgcactcccatgtttattgcagcagtattcacaatagccaagatttggaagcagcccaagtatccatcaacagacaaatgcatcaagaaaatgtggtgcatataccctacggagtactattcagctgtaaaaaaggaatgggatcctgtcatttacaacaacatggatggaactcgaggtcatagtgttaagtgaaataaaccaggcacagaaaaacaaatttcccatattctcacttatttgtgggagctaaaaatcaaaacaactgaattcatggagacagagagcagaaggatggtgaccagaggctggaaagggaagtggagggtgaggggaaataggggtgattaatgggtacaaaa

SEQ ID NO: 122493 - DNA, 537 bp, Homo sapiens
gggtttttcccaccggagcctgatccccagcttatgcctggaggctccagcgcctggagcttgctttctctcgactgagcctcctctctctgttaggaaatttcctccctaggaccaacagaaggggccccaaggtcacttttcccatccaccttakcagtacccttggggccaaatctaattcctcctccacccaccagcaaggatgtaaagaacgtatgtcttcccaagtctttctgcaggtggagcaccccagtttcttagccaccttccctctaagcccctggtgtgaggctggagcttacacataaagactccccaggtggtcctgccactcagagggcacagccatgccctccctccacaggcagcttctgggaatgctgcctgcaatccccctccctttcctggagtattttagcatttcacctccattctgtcatccagtcttcgtaaaaaccctctgaagtaggcagggctgctatcattggattcatttttcagatggggaaagctgaggttatacacaaactgcag

SEQ ID NO: 122494 - DNA, 592 bp, Homo sapiens
agcacttcaacgaagctgagtagaaacagctctcggctttcattaggccacagctcccctgcatgctgagctacaccacatcagacctgcctgggcctctcaccacataattcccctttctgcactctgccttctatatgcaaacctgcactgggatattgagaacaccgattgtcgacagataagtgaaaactgatgtgacatcaccatagagatgagatacattttcagagtttcagacacacttacattcgtgtgatatatcccacaacttatattacgaataggtacagattctgaatagttaaatttaaaatatttttagaatttcaaatctaacctttggattatgtttttttggtatccacagggatgacagatttttctgttgttcttgggttttctaatcagcatcacagagtatcacaaggacatgttcagttagtgcatctgattcagattggatagaatgtatcatcttgttggtaaaagactttcaggctgcaaaattactttccaaaaaycatgcaaatctggccattagcaaatgtcaatgaatgaagaataagctcaagtctccctcccttttgct

SEQ ID NO: 122495 - DNA, 572 bp, Homo sapiens
cactgttttcctctgccctgctctgtgctccagatggtgacttccacacaaggcatctgagactcccttatgttctgacctccaggtggggttggccaactagaatgaccagtaggagatgagaaaagtgagcaaaaagagaggccctaggatatgaagtgtaacataactaattcttgtttggaggaaccagattctaataactaagccagaaccatgaaaagatagttttaacataatctgaaaaatactgaagctatgaactttaagtttagagaaagcttcctgggaggaagaggattttagctacatcttgaaagatgattagagttggttggttgaaaaaagggagggccttctaggcacagagaacaacatgggcaaaagctytactggcacagttacatacgattggtcattgtgcacatgtatttgacatactgtcattgtcagtgacctgagaacaagagctatatctcctttctaatcttgcctccacattcccttcaacatagtactgaggacatagcaggaactcaacaatatcttttgattgagtgagtgaatgtctc

SEQ ID NO: 122496 - DNA, 576 bp, Homo sapiens
tgcatactttaaatgagtgaattttatagtctgcaagttatatctctataaagctattgcagaaaattattctccccttttctctttagtctcttcttctgggactacaaattgatatataaaaaattrgttacaacatcttactggttacatcatccaataagaacactaagaataacttaatgctttaatttgtagtcattcttatttcatcgattgtcagtaacatgtttttatagtgctttttaaaagccagaatctaatcaaggttctcaaattgcatttggttatcatccctttttagactcttttaatctaaaacattcctctctccttttattgtttgtttgtgtgtgtgtgtgtgtgtgtgagagagagagagagatactggcctttattttttaattatccaggtgactttttcatggaaaatcatccactgagtttttaatattaactattaactatttttcatttccagaaactgtttttttttcaaattgatcatttgaaatgcttgttctttgcttatgtttttctattctatttttccttgtttaaatattttacacacag

SEQ ID NO: 122497 - DNA, 576 bp, Homo sapiens
tgcatactttaaatgagtgaattttatagtctgcaagttatatctctataaagctattgcagaaaattattctccccttttctctttagtctcttcttctgggactacaaattgatatataaaaaattggttacaacatcttactggttacatcatccaataagaacactaagaataacttaatgctttaatttgtagtcattcttatttcatcgattgtcagtaacatgtttttatagtgctttttaaaagccagaatctaatcaaggttctcaaattgcatttggttatcatccctttttagactcttttaatctaaaacattcctctctccttttattgtttgtttgtgtgtgtgtgtgtgtgtgtgwgagagagagagagatactggcctttattttttaattatccaggtgactttttcatggaaaatcatccactgagtttttaatattaactattaactatttttcatttccagaaactgtttttttttcaaattgatcatttgaaatgcttgttctttgcttatgtttttctattctatttttccttgtttaaatattttacacacag

SEQ ID NO: 122498 - DNA, 534 bp, Homo sapiens
gttgaaaacacttggttttggcagaaatttttggttggcatcatagagttatttcccattcagtagtaatcaaggcattttatagttggtactttttattgctcaccatttgacaatracatgtatgttatgttgtttgattcctaaaacaagttgtaaagtagcttttcatatgcccactttacaaataataaaactgatgcacagagaggttaggagacttgtaggttttgggcctctgacatccagcactccttcttctttcatctgtgccctcattgagggactttccccctgaaagtccaggaacaacacactcaagcacagtagctctgggatgtagcagccacctctgccttgacaaaaattacaaggccttttgcatgtggcagtttagcccactggagaccattccagttgcaactaagccaatcttatcatctgtggtttgtctacacagtagcacaattggcagaaacacaggagtattggttactgtgcttacagtgactttgggaaccatgactgatcagt

SEQ ID NO: 122499 - DNA, 529 bp, Homo sapiens
gtataacttacattttcacaaaggacctcgggcagccggtgggagattcctgcaagctgtgcttctttgcagattccaattcaatggaaaataaaatccactttcaaacctgaactaggagctttcactcccctaggttattcctggatgagtagatacagccgggttttttttycaataacctacatttctttttggatcttaatagattttttatcttgaccttgtatgtcagaaagcaaataacttggcccagaggaaatgacaactccaaattggaatatggcaaacacggattcttctgcaccccatttggacctaacaattaatctatgtggtattctttttctatctctaggaatgcctccctactcaagaatgtcctctctgggcccgaaattctgtcactaagagattcatttatttgcacatagattagttggctttcagaacttgcacgatatcaattcaaatacatcattggcagttaacatcatagcaagactttgatcaacaaagtttttaaact

SEQ ID NO: 122500 - DNA, 611 bp, Homo sapiens
cactccttccacctggagcctctctctcttgctccaaagactcagagaggctgaggcttcacattagcaaactaattgaaatgcaatccaagcttaactatctgtaaacctggtggaaggagatggtttggacagtcaagctttctagctaactgaaggtttctgacacattaaagcaccaacaattgtttaaccattacagatgaaaacttttctaaaacgtatcgctggattccctaaccttctcaatcaaattaactatatattcctaatgttacagcttcaattaatcctgttccatcaacacaaaaagactgatgctgggtcagtgggcttttgtttttgttagagagacttccaaaacatactctatatataacaatgtgtgtsggggtgcatacacacacagacatatgcacacacacttatacacagagggaaggaggaagagagaaatgacactggagtggaaactggcagactacattactagtttcatgcttctattaactagcagtgtgactttcaactagtcacctcactctctatgtctctattttctcataatctgagggagggtccctaagtgttctttaagatctgatcagatt

SEQ ID NO: 122501 - DNA, 554 bp, Homo sapiens
tctccaagctccttaggaagaaacagaacaaagggcaatatttaaaatttagtcctaatttccaccctatccagggtctgtgtgccagtggatcgattcagggggtcctcagtggtggtckgagcttctgacagacaattcagtgacatagattaagatattatctttagtttctaagaggaaagcaaacatctcctggattctaacttatttaacaattgttttaggctactatttcttatttaacaagttggttagttacttttcaggactagctaggtgcctagaatttctctcgaagaaactcaggatttctcatgcttgggtgctccaggtgcctaaaaatgggagtccctgctctgtctcaattccacattgaagttgtaactgtcatggggtattttgtgccatctgatgttagtttggtataagacaataaaggaggcagctaatctgtaacaaagatcagtgactggaagcaaggaagtctggtctctggttcatctagtcacagaactagagcaatgagcaggacagtgaagctgtaatttgac

SEQ ID NO: 122502 - DNA, 621 bp, Homo sapiens
agctgtctgccttatacaactgccctctggtgaccaccatcctatgggagatgcagcctgcttaactcgcccaccgaccctcacacccgacatggcctgtagagatatgacacagtgactgcctctccatcatggggtgacctcctaaacttaagcctgtgtgcttgaaacccaccaattaaaatccctgtgggaaaccttcttggatacagccctagatccaataaggaccttggctcactggtccctttctctttctctctgtctgcactccttaatcyccatgtgtgtggtttccagatatgccaggtacccccagacctgaaagtcttggaagtcataaagtatttatttacattttgtgcctttcctaagatcctaaattaaacatggcaaaattctatattcatagttaaaaaacaagcaaatgactatttctttgtcaatactgtgattttacattcacaatacatcatataaacaagcacaactaatcttttacaaatgttgaatgtgtaacatataaattaaaaaataaacacatttttcagaaccatttccagatgtgttagcagcaaaataaagaaaaaaataattcctagctacctacaaatgaatgaa

SEQ ID NO: 122503 - DNA, 602 bp, Homo sapiens
  misc_feature (1)...(602): n = A,T,C or G
ggaattactactgatttttgtatgtgattttgtaccctacaactttactaaattcatttattagttccaacagttgtttggtgraaactttagggatttttaaatatataagatcatgccgtccacaaacagggacaatttaaccccttccttttcaacttgaatgcatgttatttctttttattgactaatttatgtggctagtactttcagtacaattttcactagaagtggaaagtgtgggaatcttgtcatgttctagatcttagaggaaaaacttccaatttttttccattgagtacaatgttatctgtgggtttgtcatacatggcctttattgggttgagatatattccttctattcctaatctgttgagagatcttttttaaaaattatgaatggatactgaattttgtcaatgctttttctgcatgtattgaaatgatncattggtttttggtcttcattctggttatgttgattcgcatatgttgaacatccttgctttcctgggctgattccacttgatcatggtgaaaatccttttaatgtgttgttaaatttggtttgctagtattttgttcagaatgtttacattatg

SEQ ID NO: 122504 - DNA, 602 bp, Homo sapiens
  misc_feature (1)...(602): n = A,T,C or G
ggaattactactgatttttgtatgtgattttgtaccctacaactttactaaattcatttattagttccaacagttgtttggtggaaactttagggatttttaaatatataagatcatgccrtccacaaacagggacaatttaaccccttccttttcaacttgaatgcatgttatttctttttattgactaatttatgtggctagtactttcagtacaattttcactagaagtggaaagtgtgggaatcttgtcatgttctagatcttagaggaaaaacttccaatttttttccattgagtacaatgttatctgtgggtttgtcatacatggcctttattgggttgagatatattccttctattcctaatctgttgagagatcttttttaaaaattatgaatggatactgaattttgtcaatgctttttctgcatgtattgaaatgatncattggtttttggtcttcattctggttatgttgattcgcatatgttgaacatccttgctttcctgggctgattccacttgatcatggtgaaaatccttttaatgtgttgttaaatttggtttgctagtattttgttcagaatgtttacattatg

SEQ ID NO: 122505 - DNA, 602 bp, Homo sapiens
  misc_feature (1)...(602): n = A,T,C or G
ggaattactactgatttttgtatgtgattttgtaccctacaactttactaaattcatttattagttccaacagttgtttggtggaaactttagggatttttaaatatataagatcatgccgtccacaaacagggacaatttaaccccttccttttcracttgaatgcatgttatttctttttattgactaatttatgtggctagtactttcagtacaattttcactagaagtggaaagtgtgggaatcttgtcatgttctagatcttagaggaaaaacttccaatttttttccattgagtacaatgttatctgtgggtttgtcatacatggcctttattgggttgagatatattccttctattcctaatctgttgagagatcttttttaaaaattatgaatggatactgaattttgtcaatgctttttctgcatgtattgaaatgatncattggtttttggtcttcattctggttatgttgattcgcatatgttgaacatccttgctttcctgggctgattccacttgatcatggtgaaaatccttttaatgtgttgttaaatttggtttgctagtattttgttcagaatgtttacattatg

SEQ ID NO: 122506 - DNA, 602 bp, Homo sapiens
  misc_feature (1)...(602): n = A,T,C or G
ggaattactactgatttttgtatgtgattttgtaccctacaactttactaaattcatttattagttccaacagttgtttggtggaaactttagggatttttaaatatataagatcatgccgtccacaaacagggacaatttaaccccttccttttcaacttgaatgcatkttatttctttttattgactaatttatgtggctagtactttcagtacaattttcactagaagtggaaagtgtgggaatcttgtcatgttctagatcttagaggaaaaacttccaatttttttccattgagtacaatgttatctgtgggtttgtcatacatggcctttattgggttgagatatattccttctattcctaatctgttgagagatcttttttaaaaattatgaatggatactgaattttgtcaatgctttttctgcatgtattgaaatgatncattggtttttggtcttcattctggttatgttgattcgcatatgttgaacatccttgctttcctgggctgattccacttgatcatggtgaaaatccttttaatgtgttgttaaatttggtttgctagtattttgttcagaatgtttacattatg

SEQ ID NO: 122507 - DNA, 510 bp, Homo sapiens
agaggaaaagggtcatatagaagaggctaccttgagaagatcagtaatataaccagctcagggtgaccttgcagagaaaggggcaggggaacgtacaccctgacctcattctttcttccaatcttctasttggatttccaatttaaaaaaaacaaaaactggaagccaaaggactcatttattggtgtgggtatctatgggacagatgtataattgtgataataaatgtgagaatatctaattgcacaactgtccttggtacattttataccaagtgcaatgtgagtgatgcttcctggagtcctgtaatttggtaatcctattaagcgcttagtacagtgtctgccacatagtaattgctcagtgaatagtaactcccttccttgtttcagttggaacagactcagttgaaaagttcccaattatatgtggttctctttgggccctcacatatgggagcttaaagaaaaatgctgccaccctttagggcttctttcccttaagtagcaa

SEQ ID NO: 122508 - DNA, 575 bp, Homo sapiens
tctgaggcttttccagctgcatggtaaaagctgtcagttgatctacaattctggagtcctgatgatggtggccctcttctcacagctccactaggcagagccccactgaggactcagtgtagggattccaaccccacatttcccttccttactgttgtagcagaggttctccatgagggctccacccctgcaggaaacttctgcctagatatccaggcatttccatacctcctttgaaatctaggcagaggtttccaattcttgtcttctgtgcatctgtaggasaaacaccacatggaagctgtgaagtcttggcactttcaccctctgaagccacagcctgacctgtaccttggccccttttagccacagctggagctgaagcagcttggacatggcagggtaccatatcctaaggctgcacagagcaggaggcccagcctaggaaacaatttttccctcctagacctctgggcctgtgatgggaggggttgccatgaaggtctctgacatgccctggagacattttccccattttcttggtgattacttactcaaatttctccagtgggctt

SEQ ID NO: 122509 - DNA, 575 bp, Homo sapiens
tctgaggcttttccagctgcatggtaaaagctgtcagttgatctacaattctggagtcctgatgatggtggccctcttctcacagctccactaggcagagccccactgaggactcagtgtagggattccaaccccacatttcccttccttactgttgtagcagaggttctccatgagggctccacccctgcaggaaacttctgcctagatatccaggcatttccatacctcctttgaaatctaggcagaggtttccaattcttgtcttctgtgcatctgtaggacaaacaccacatggaagctgtgaagkcttggcactttcaccctctgaagccacagcctgacctgtaccttggccccttttagccacagctggagctgaagcagcttggacatggcagggtaccatatcctaaggctgcacagagcaggaggcccagcctaggaaacaatttttccctcctagacctctgggcctgtgatgggaggggttgccatgaaggtctctgacatgccctggagacattttccccattttcttggtgattacttactcaaatttctccagtgggctt

SEQ ID NO: 122510 - DNA, 575 bp, Homo sapiens
tctgaggcttttccagctgcatggtaaaagctgtcagttgatctacaattctggagtcctgatgatggtggccctcttctcacagctccactaggcagagccccactgaggactcagtgtagggattccaaccccacatttcccttccttactgttgtagcagaggttctccatgagggctccacccctgcaggaaacttctgcctagatatccaggcatttccatacctcctttgaaatctaggcagaggtttccaattcttgtcttctgtgcatctgtaggacaaacaccacatggaagctgtgaagtcttggcactttcaccctctgaagccacagcctgacctgtaccttggccccttttagccacagctggagctgaagcagcttggacatggcagggtaccatatcctaaggctgcacagagcaggaggcccagcctaggaaacratttttccctcctagacctctgggcctgtgatgggaggggttgccatgaaggtctctgacatgccctggagacattttccccattttcttggtgattacttactcaaatttctccagtgggctt

SEQ ID NO: 122511 - DNA, 562 bp, Homo sapiens
agattgtttaggtttccctctgccaccgtaggtggggatgagagtgcatcctgcccctggtgacgttcaaggggaagaagaccaaatggaattgagggtgtcttatgctctaaaccttctggagagagactttttttcttcttgctgatagactgatactcttgatatagccaatgtagggtggggatctaggacaaagggtgttgtaggaatctgcactggcactgaagrggcacaaggagaacttgggactcagttgactagtgaaagagaccagacagaaacttgggcttaatctccaaactgctattaagagttatacatttgcctagaacatctttatttcatatacatctcatgtacttttaatatactgagggcattagaaacaggtagctggaaaggactgagcatttttaggactgagggaatggtggctttaaaacatctgaaaatcatttgatattcctctcaccaaggggtgggtctatgtttcctccccttgaatctaggctgatcttagtgatgggttgatttctaaataatttaatcatcttttgga

SEQ ID NO: 122512 - DNA, 569 bp, Homo sapiens
tcatagtcacatgatggctgacttactgtaaccttcaggtagaaagaaaggaagaggtaaagagataaaggtacatcccagctgattcagtatctccttctctttgaaaactctcacagaaactgccctataacttctactgacatctcatctcaatggctagatcagtgctatataacaaaactttctgcartgatagaaatgttctatatctgaactatccaagatgttagctactagccacttatgactgtttagcatttaaaatgtcacttgtggaactgacaaaatcaacttttaattttacttgattttaataaatttaaatttaaatagatacatgtgtctagtggctaccacaataaatagtgcagggctagaccttaatcacatcactaccccatctgcaagaaaagctggaaaatgaaggtttggagctaaacacgttgctaccctccacaaaattatgtttttcttagtaaggaaaaacaaacaaaaatgaatataggctgggcagataacagcctctgcaaccaagggatatttgcttgctaatattccttaagccc

SEQ ID NO: 122513 - DNA, 571 bp, Homo sapiens
acacactcatcttttaaatcagtttatctgtggattcatacacatgagccaataactctcacaggttcacaagtcagacagtaaaacaatggtgacagctctcttaatattgtgaagctgctttattaacttcctgggatagacaatttattcttcaatcagtgtctttccaaagcatcagctggctctatgggaatcctatactcmataaaagccctctcttggtccatataaaagatagtcacatgttatgtgcaattcacaaggcatctgatgggaatgacaggatttccacaatgcagaggggtcaattgtctcatcctccctcatttattcatttccaggttgttacaacagttttggttcacatgggcctggttaaatgaatttcagatgatgatatttagttttaactatccctacctctccaatggattactgcaaagaaatcttattgaatgtaaaaaaaaataatgtaggcaaccaaacaccatgaaatagcagaggtgacacatttttctcctagtctgaggttctcgttggccatcatacttgcttataatagtggcaa

SEQ ID NO: 122514 - DNA, 571 bp, Homo sapiens
acacactcatcttttaaatcagtttatctgtggattcatacacatgagccaataactctcacaggttcacaagtcagacagtaaaacaatggtgacagctctcttaatattgtgaagctgctttattaacttcctgggatagacaatttattcttcaatcagtgtctttccaaagcatcagctggctctatgggaatcctatactcaataaaagccctctcttggtccatataaaagatagtyacatgttatgtgcaattcacaaggcatctgatgggaatgacaggatttccacaatgcagaggggtcaattgtctcatcctccctcatttattcatttccaggttgttacaacagttttggttcacatgggcctggttaaatgaatttcagatgatgatatttagttttaactatccctacctctccaatggattactgcaaagaaatcttattgaatgtaaaaaaaaataatgtaggcaaccaaacaccatgaaatagcagaggtgacacatttttctcctagtctgaggttctcgttggccatcatacttgcttataatagtggcaa

SEQ ID NO: 122515 - DNA, 417 bp, Homo sapiens
gaattcctttaactttgaccacaaaacygtaaatgttcttttcattaaaatctcttgaatcaatagagatgattctgttttctgtctggaaaagagctaaactagaacagtacagctggaattaaaaattaggagtggtgtggcagacagaggctaagatggccatctcctggtattcatgccccgtataccaccctcaccttgagtatgggtgagacctgtgacttgcttttaaccaataaaatatggcaaaagtaatagaatgtcatctctgcctttatgacacctcagataatgacaccatcttgataagagactctctcccttgttggctttaatgaagtggccatgttgggaggcaaggaactgagggtaacattcatccaataggcagccagaaactgagactctcagtcc

SEQ ID NO: 122516 - DNA, 576 bp, Homo sapiens
acagttcacaataggcttcatgctcctatgagaatctaatgcacctgctgatttgacaggaggtggagctcaggcggtaattctctcttgcccactgcttacctccttctgtgaggcccagtacctaataggcaacagaccaatacccagccacctgtccacgtcccagtgttggggacccctgctttagagggagtttggctctaatgatgccttgatttggaactctgacctccagaactgtaagataatatttttctcgtgtkttaagccacccaatgtgtgataatttgttattgcagccctaaaataagaaactctgaattcttcatctgaggaaggccacttctgaattttaaagcctgaacactctactacactgagctgcctttacttcactgcaccatacctactgaaatttctagagaaaagaccacaggtgaattgttaaaatgtcaaattgactgttgattttatatatggcttcaagcttgatccactcatgattcctcttttaaaaataatttgtggacattttgtttcccaatctactctgttatttatattaaatcttgg

SEQ ID NO: 122517 - DNA, 576 bp, Homo sapiens
acagttcacaataggcttcatgctcctatgagaatctaatgcacctgctgatttgacaggaggtggagctcaggcggtaattctctcttgcccactgcttacctccttctgtgaggcccagtacctaataggcaacagaccaatacccagccacctgtccacgtcccagtgttggggacccctgctttagagggagtttggctctaatgatgccttgatttggaactctgacctccagaactgtaagataatatttttctcgtgtgttaagccacccaatgtgtgataatttgttattgcagccctaaaataagaaactctgaattcttcatctgaggaaggccacttctgaattttaaagcctgaacactctactacactgagctgcctttacttcactgcaccatacctactgaaatttctagagaaaagaccacaggtgaattgttaaaatgtcaaattgactgttgattttatatatgscttcaagcttgatccactcatgattcctcttttaaaaataatttgtggacattttgtttcccaatctactctgttatttatattaaatcttgg

SEQ ID NO: 122518 - DNA, 550 bp, Homo sapiens
tgaggcaaaaggaaactaaattgctctacataataaaacaggaattcaagttatttggggaggggtgtccagagaaaagtaagaacctgaaactgggagaagagaatagctggggatgttttgaggttctaaaatccaaaggaaactgtatattaaaatcacaaaactgcacctatggtagcagttccccgggagatatttttcccccagagcccagtttaagtacaagcttccttgatgcttgcctgtgctaagtggttttgttggagtaggtagctaggcagacatgagcagggcaggagagggccctcctcaggaatgtcaggctaccatcaggwgataggcagtcattaaacagtctctccaaaataataattggtcgcagccagtgccaggaaaaggcagtctcccaacagatagcaaactcttggtgatcagcagcttcccgacaagatctcagaagttgggctagtgggctcaagcatgtgcagtaactgacaaaatggcggagtttaactagtatatgaccttcctctgggaacactagact

SEQ ID NO: 122519 - DNA, 575 bp, Homo sapiens
tttcttacctccatgattcattatatactcaattctctttgtgaaaaatcacaatctcctttagccattttttccatccaaatgttacctgttcttcaaaaccaccttttcatgaacctttccctattctctactttgaaattaatttttcttctgttatcccatatatttcacttatctattactgcctaaaaccctatcccttacttactggtttagaatatcaattttaccttgcttgtgattttgtgggttagaaatacatgaaggactcgggtgcgtgactcatcagctgaagtagctgggactagaggatcaattttcaagaaggcttattcactcacaagtttggcacctcagtgcttcttggcctttctccacctctgcatggtacctcatccttctgagctttggcttttctcagcatgacaacttcttaaagccatcaggagaccaagatggaagctgccattcctcttaaaggcyaggtctggaactgacataccaatacttccatggtactgtattggtcactgaaatcacaggccagctcagattcaagagtggaaagaaag

SEQ ID NO: 122520 - DNA, 597 bp, Homo sapiens
gggaaatgatcagaaaaagaaatagcccacataaagggcattttttttctttgaaaataaaggagcctcatgtagagaaaatgcagtagaagacttgaaagtcatcagcttgagcgacagcagtcaagacatcatatagcagtactgcttatgtgactttaaatggtttaccctctgaggttcagtgccccaacatacaaaatgggctaattctacctgtccagtcctcctcataagactttctaagcattaattactaattcttcaaagggcctccaagagcagcataatgagtaatttgtggaacagccaccttatgaaatattacacagctacagagtgaataagttagagttgtttgttaatgacctggagacatgttaacaaaacctgttcagaaaaagctagttgcagagggatgtgtacactatagttctatatttataaacagtgcagaaaatgaatcaaaatacgggaatacacttgtatgcatgcaatgagaaaaaaagtatggaaggatatatttcaaaatgttttggaaccaaggttgagrtggcaaatcagaaatgatgaaaagaagaatgaaatcatggtgca

SEQ ID NO: 122521 - DNA, 608 bp, Homo sapiens
attagaatcctttggctagttacttgtgtttgttttattctctcctgcacccaccttttggcgagtgactctgcatgtggcaatgctttaaggaaacaacttcaaccttaaaaacgtgtcttttagccacatctaacgcatttacrgaaacagaagagctcttcagtgccatgctaaattataccatgggacaggaagaaattatgtttcctgtcaacagcctgaactctaatgatttttttggaactctatatttaattaaagattttgttatcatacctgtataatctgtaaagttacaactttttccttctaaactggagtatttcaagtaaagatgaacattccctttttccttgcttcaaattagttgaaggtattgaatgcctcttctgatgccttttctgtatcacttgtgctgggtctttagactttgtaagcacatgaaccttgtttaagtaatggagacaactcaggagattaacattctgttttgcttttaagtagatatcttacctttcccatactgtcttggaaactaaagaagggagaatggacatttgcttttaaaaaagaaacttgttcaaattaagatcagttacattttt

SEQ ID NO: 122522 - DNA, 608 bp, Homo sapiens
attagaatcctttggctagttacttgtgtttgttttattctctcctgcacccaccttttggcgagtgactctgcatgtggcaatgctttaaggaaacaacttcaaccttaaaaacgtgtcttttagccacatctaacgcatttacagaaacagaagagctcttcrgtgccatgctaaattataccatgggacaggaagaaattatgtttcctgtcaacagcctgaactctaatgatttttttggaactctatatttaattaaagattttgttatcatacctgtataatctgtaaagttacaactttttccttctaaactggagtatttcaagtaaagatgaacattccctttttccttgcttcaaattagttgaaggtattgaatgcctcttctgatgccttttctgtatcacttgtgctgggtctttagactttgtaagcacatgaaccttgtttaagtaatggagacaactcaggagattaacattctgttttgcttttaagtagatatcttacctttcccatactgtcttggaaactaaagaagggagaatggacatttgcttttaaaaaagaaacttgttcaaattaagatcagttacattttt

SEQ ID NO: 122523 - DNA, 608 bp, Homo sapiens
attagaatcctttggctagttacttgtgtttgttttattctctcctgcacccaccttttggcgagtgactctgcatgtggcaatgctttaaggaaacaacttcaaccttaaaaacgtgtcttttagccacatctaacgcatttacagaaacagaagagctcttcagtgccatgctaaattataccatgggacaggaagaaattatgtttcctgtcaacagcctgaactctaatgatttttttggaactctatatttaattaaagattttgttatcatacctgtataatctgtaaagttacaactttttccttctaaactggagtatttcaagtaaagatgaacattccctttttccttgcttcaaatkagttgaaggtattgaatgcctcttctgatgccttttctgtatcacttgtgctgggtctttagactttgtaagcacatgaaccttgtttaagtaatggagacaactcaggagattaacattctgttttgcttttaagtagatatcttacctttcccatactgtcttggaaactaaagaagggagaatggacatttgcttttaaaaaagaaacttgttcaaattaagatcagttacattttt

SEQ ID NO: 122524 - DNA, 618 bp, Homo sapiens
caacattagattgcacaaagactgtggcttctgtcttgggaatcctctctctctctttcattgtaagggaagctgacttctatgttgggcgctgcctattaagaagtccacatagcacggagccagtgtcaccagtcacagccagcaaggaaggacctggggactgcccccagccacatgattaatcttagaagtgaatcttccctaagtaaggcttttaaatgatggcagccttatgagagtccttgagctagagggccttactaattctgatatagttcttgacccagagaagttggcataatgaatgtttgttgttttaatccactaagttttggaggtaatatgttaagcatcaacagataactaataaaaggagtgattctgagcaagaaaggcttaagtggagggaagctaaggtcgaatagtttatgaatatcatcctgtaagaatacagggcttggagctttgaaggtgggagcagaaaaaaatttatgtaagcttgtcattaacartatgactaaaaaagttcattatactgaaggataaatgcttacatgtgcctcagagaatagatgtttttattcccgggaagaaagataaactttttcaaaaaac

SEQ ID NO: 122525 - DNA, 556 bp, Homo sapiens
tttgagtctttttgtgaggtctagtccaactggcaaaatatggtatctcaatttcctaccataaactcatcatatctcaaatttaaatttctcatctttcttcatgcaaaacaccttgaacctcaatttaaacttcatcatattcttcaatttcttctccctttgttttattacacagcttatttyggcaaaatcctagggtattttaatgtgtttttcatgtgcatcacctctccatatatttacaattgttctggcaaaagtttatattgataattggtcttagtgattataattatgccctacttttgctttctgtaattcatcctacacactgttgctaagtaataataccactaaatcacagctcagaatatatattttattgcctgctggttttctatatctatgagaacatttatttcgaatgaaacaaaaacgattaaacacgtaaagctggagcactgaaaagcaccaggcatgctaagggccagggatagacagatgaaagagcatgcccgctatctttctcttaacattcaaagacccgttaatt

SEQ ID NO: 122526 - DNA, 556 bp, Homo sapiens
tttgagtctttttgtgaggtctagtccaactggcaaaatatggtatctcaatttcctaccataaactcatcatatctcaaatttaaatttctcatctttcttcatgcaaaacaccttgaacctcaatttaaacttcatcatattcttcaatttcttctccctttgttttattacacagcttattttggcaaaatcctagggtattttaatgtgtttttcatgtgcatcacctctccatatatttacaattgttctggcaaaagtttatattgataattggtcttagtgattataattatgccctacttttgctttctgtaattcatcctacacactgttgctaagtaataataccactaaatcacagctcagaatatatattttattgcctgctggttttctatatctatgagaacayttatttcgaatgaaacaaaaacgattaaacacgtaaagctggagcactgaaaagcaccaggcatgctaagggccagggatagacagatgaaagagcatgcccgctatctttctcttaacattcaaagacccgttaatt

SEQ ID NO: 122527 - DNA, 585 bp, Homo sapiens
acccttcatctgtgtctatttttctcttttcttttcttttcttttttttttttttttttgagacagagtctcactctgttacccaggttggagtgcagtggcatgatcttgtctcactgcagactccgcctctcgggttccagcaatcttcctgccacagcttcctgagtagctggcattacaaggtatgggccaccatgcccggctaatttttgtatttttattagagatggggtttcgctatgttggccagactggtcttgaactcctggcctcaagtgatctgcccgcctcagcctaccaaagtgctgggttacaggcatgagcgacttgcctggctatgtctatttttaacatagttatagtgaactataattatttttacataaaaactattcttacaaatgttatatgtattttaagagcatacaaacttacaggtttttttatttaataaaaaccagtggcagattgataatgcagaatatattatttgtaaaaaatcatttgttgtcatacaaacatatattttatttgaarattatacttttgaatagctttttggaaagttaaagtattctcatt

SEQ ID NO: 122528 - DNA, 610 bp, Homo sapiens
ttccaaaagcacacagttagttattgtgaggacctttaacgaggtcttcagacagctgtggagagagagcaagaagttaattctggggaatcataggggtgagtggagggtggtggggaatggcttcaaggtaatggatggagaccattttgcccaagtccaggatcattctcatggccggatggtcaacacttcggatgatgtgtgatgaagagctttgccaccgaggtcaattccactttaggcccggcccagtaactcacacctgtaatcccagmactttgggaggctgagactggtggattccttgagatcaggagtttgagaccagcctgctgaacatggcaaaacctcctctctactaaaaatccaaaaattagccagctgtggtggcgggagcctgcaattccagctacttgggaagctgaggcagaagaatcgcttgaacccaggaggtgtaggttgcagtgagcagagatcatgccactacactccagcctgggtgacagagagagactctgtattaaaaaaaaaaaaaggagaaaaaataattccatttgaggctgagtcatttcaccatcatttataggaatggatcaagttcacagaa

SEQ ID NO: 122529 - DNA, 610 bp, Homo sapiens
ttccaaaagcacacagttagttattgtgaggacctttaacgaggtcttcagacagctgtggagagagagcaagaagttaattctggggaatcataggggtgagtggagggtggtggggaatggcttcaaggtaatggatggagaccattttgcccaagtccaggatcattctcatggccggatggtcaacacttcggatgatgtgtgatgaagagctttgccaccgaggtcaattccactttaggcccggcccagtaactcacacctgtaatcccagcactttgggaggctgagactggtggattccttgagatcaggagtttgagaccagcctgctgaacatggcaaaacctcctctctactaaaaatccaaaaattagccagctgtggtggsgggagcctgcaattccagctacttgggaagctgaggcagaagaatcgcttgaacccaggaggtgtaggttgcagtgagcagagatcatgccactacactccagcctgggtgacagagagagactctgtattaaaaaaaaaaaaaggagaaaaaataattccatttgaggctgagtcatttcaccatcatttataggaatggatcaagttcacagaa

SEQ ID NO: 122530 - DNA, 463 bp, Homo sapiens
ccaccgtccctgacctatttttcatcatcttaacttagacacacgtcctcaggaagaattcagaaaggcaccctcactagatctgaaccccccagtagctagcttcctagtatggcaacctctctatagcatctcccctagctgatccctctgcctctattgggatggttgcatgatacccatttcaggacagggccgccaacaggacaatgyatggacattctagtgtccccttcactgtttcatcctcataggctggctcacagtagatgcccactagcgtttagtgaaacaggctctgctgtggtctgcagagaaagctcaccaccctccctcacctgagcagctggtccaggtggccttcgaggaaagaaacagagttcatataaagcttttggaggcagtgcagcttgaggaactgagtggtgaactgggtaacaatctccttcttctgctctgggga

SEQ ID NO: 122531 - DNA, 463 bp, Homo sapiens
ccaccgtccctgacctatttttcatcatcttaacttagacacacgtcctcaggaagaattcagaaaggcaccctcactagatctgaaccccccagtagctagcttcctagtatggcaacctctctatagcatctcccctagctgatccctctgcctctattgggatggttgcatgatacccatttcaggacagggccgccaacaggacaatgtatggacattctagtgtccccttcactgttwcatcctcataggctggctcacagtagatgcccactagcgtttagtgaaacaggctctgctgtggtctgcagagaaagctcaccaccctccctcacctgagcagctggtccaggtggccttcgaggaaagaaacagagttcatataaagcttttggaggcagtgcagcttgaggaactgagtggtgaactgggtaacaatctccttcttctgctctgggga

SEQ ID NO: 122532 - DNA, 463 bp, Homo sapiens
ccaccgtccctgacctatttttcatcatcttaacttagacacacgtcctcaggaagaattcagaaaggcaccctcactagatctgaaccccccagtagctagcttcctagtatggcaacctctctatagcatctcccctagctgatccctctgcctctattgggatggttgcatgatacccatttcaggacagggccgccaacaggacaatgtatggacattctagtgtccccttcactgtttcatcctcataggctggctcacagtagatgcccactagygtttagtgaaacaggctctgctgtggtctgcagagaaagctcaccaccctccctcacctgagcagctggtccaggtggccttcgaggaaagaaacagagttcatataaagcttttggaggcagtgcagcttgaggaactgagtggtgaactgggtaacaatctccttcttctgctctgggga

SEQ ID NO: 122533 - DNA, 447 bp, Homo sapiens
ccgagcaccagtggctcacggctctaatcccagcagtttgggaggccaaggcaggtggatcacttgaggtcaggtgttggagaccaacctggccagcacggtgaaacacccgctctactaaaaatgcaaaaattagccaggcatggtggcagatggctgacaccagcttctgaggatggagactgaggcatgagaattgcttgaacctggaaggtaaaggttgcagtgagttgagatcgtgccactgcactccagtctgggcaacacagtgagactccatccccgtcctcacaaaaaaaataacgttgtgtagaggagggtttctgycatgttgcccaggttggtctcaaacccctgggctgaaatgatcctcccactttggcctcccaaagtgttggggttaaaggcatgagtcactgctcccttcaagaattttgaaacgacatc

SEQ ID NO: 122534 - DNA, 607 bp, Homo sapiens
ctgtgaacttgatccattcctataaatgatggtgaaatgactcagcctcaaatggaattattttttctcctttttttttttttaatacagagtctctctctgtcacccaggctggagtgtagtggcatgatctctgcacactgcaacctacacctcctgggttcaagcgattcttctgcctcagcttcccaagtagctggaattgcaggctcccgccaccacagctggctaatttttggatttttagtagagaggaggttttgccatgttcagcaggctggtctcaaactcctgatctcaaggaatccaccagtctcagcctcccaaagttctgggattacaggtgtgagttactgggccgggcctaaagtggaattgacctcggtggcaaagctcttcatcacacatcatccgaagtgttgaccatccggccatgagaatgatcctggacttgggcaaaatggtctccatccattaccttgaagccattccccaccaccctccactcacccctatgattccccagaattaacttcttgctctctctccmcagctgtctgaagacctcgttaaaggtcctcacaataactaactgtgtgcttttgga

SEQ ID NO: 122535 - DNA, 559 bp, Homo sapiens
aaactgcagttcaatgaccccctttgcaagagccccctctgcagccsttgaggggagcgaaagcattttcatctggcctcacccccatctgcagccagctctttcacttctggagctgggcttgttgtgataacctggaagagggggaattagttgggatgactcacttgctggagcccatcaacactagaccaggcttgtggccagatgcctggttaaccagcccaggagagttcctttctcaggaagagaatgattattgatcctctatacccattgcccaggacagtgtcaggcacactataggcccttgggcatttgtgtggcatcatcagcattacgcctgtatcaccaagtcaagctttcccaatagcagttggtggcaaactccaactcctagtgtcagaaggcatcacaaagcccagatgtcctgggcctcccagctcaggcaagcctagcgtggacacagaaacccttgacactgagccaatatctcttccccctgtatggcttgaatttcagatatattgatgttgagcccttctggccggcagtggga

SEQ ID NO: 122536 - DNA, 609 bp, Homo sapiens
tttgattttcagcaatctcagctgaggggctacctgggctaagggtttacttgagggcacacaaaggagttttcaggtcatttatgtgatacttgagttgggaattrgaatccctgagctcattcttttatttcccctttgtctagtgacaatagaagcaaccatctagtattcattagtttgctgaaaatgtttgaaatgccctatacacagtcacccagatcctagcttcttataaagtggttgataggagtctccaatggtgatatttgtgtatctctattgccagattatgccatgaactatcagtgctctattattggaaatagagttattaacaactttaaatgaaatctgtttagagaaccaattccagaaaccccagaacaaacccagaacactcattctcaaaattctgttcctctagaaccattatctgtaccaaaatctgtattagtcagagtttttgagaaaaacagaaccaatatgatatataatgggctcacacaattatggaggctgagaagtccagttggcagcctggagacttgggagaaccaatgatgtagttctagtctgtgttggaaggcttgagaaccaggagaactg

SEQ ID NO: 122537 - DNA, 519 bp, Homo sapiens
tttccatattactaaggaaataatataaggatttagtgctataaatttctctctcagctctgctatagctgaatccctcaattttttttttaagacagggtctcattctgtcaccgaagctggactgcagtagcacaatctccacttactgcagcctcaaccttctgggctcaagcaatccccccatctcagcctcccaagtaactgggactacaggtgcatgccaccacacctggctaattttttgcagagatagggatttcaccatgttgcccaggctagtcttgaactcctgggctgaagaagtgatccacccgccacagcctcccaaagtactgggattataggagtaagccattgcacccagccgcatccacaaattytgatatgccatattttcattgtgttacttgcgttttaaaaattccctttgagacttcttcttgtccacattgtatataaatgtttactgcttaatttccaagtgtttgcagatttttctcctgtctttctgcaatt

SEQ ID NO: 122538 - DNA, 420 bp, Homo sapiens
ttgcaccaatggcctggatgtgggacatggagtcaaagaaaattattattgagctttaagatttaatgattgcactgctgagttttgaatatgtgtggagcccgtagccccctttttttggcctatttatcccttttggaatggggtttgtaacccaatgcttgtactyccattgtattttggaagtaactctaacttgttttttattttacaggtggaagagatttactcttgtctcagatgagactttggacttcagacttttaagacaatgctggaatgggctaagactttgggagactgttgggaaggcataactgtattctgaaatgtgagaaggacatgagatttgggagtggcaaggggtggaataatatagtttggatatgtgtcccttcccaaatctcatgttaaattgtc

SEQ ID NO: 122539 - DNA, 567 bp, Homo sapiens
tggatgatcagagtatacgcgtccattactcctattatctactcaccttaaactctgctgcttggttaaagttttggaacctttatcgagtcacttccctgttcaaaaacctttgatggcttccagttttctagagcctaagtagccactgtgtgtcatacataccaagaaactcccatccagcatttacagcaaacatcagtaatccatcatggtgattttttttttctatttggttgtagttttatcaataaatcaaaaactggcacktgaattgaaacacttttgtcatcgttgacctagtttgctgtatagaaacactggttttggacttagacaaacttgggttcaaatttcagctctctgccactcattggtggggtgatcctggccaagtcatttcacctatgggagcctcactctcttagcatataaaatggagataatagaaactattcaacagagtttttaggtaatgcaggtaaacaatttggcatagtacctggtatatattgcttagtaaattaaagttattatttttatcactgttaccataatgttcattat

SEQ ID NO: 122540 - DNA, 539 bp, Homo sapiens
aatactctccgcactagaaacagtcaagttacttcatctcagaaataatctcccccaggaactatcacacttaaaatcataacaacaaaactacctcagacacatcccagggcaatagtccaagggacagaactctcaaaagtactagagcctgctattttgagtagattgaaaagtaagagcccctctaaatgaggtcaacaatcaggccccgtgtctcagagctcttctagccaagaaagtccatctggaaagcaagcaacctggagaaaccaaaccacccagacacacactgaccagcccagcatcagcagtgtgctttggtttcttctcagactgaaagctggactagggagacaagtgctagaaaatgaarcataaagcatgaagggtattttttttctccgttaaaagaacattcacacggtccctagtgtctacaaaagttagcagctgtcagtaaagaaatgattatccaacaacaaaaaaattacagtgaaactgtttactagggaaaaaattcaaatttgaacctcatt

SEQ ID NO: 122541 - DNA, 561 bp, Homo sapiens
agcattttgctgtggttttgtgtgttttgcttgttttaacagctctgtagcctgatttcctttaactgtttagtgcctgataggaaarttgggcttttaaatgtatggacagggcaacaaggctaattcctgcagttgtgtacccactccctccctggccccctcctaccacatatacttcttttcaataatactgtttttcagtggcttttctccaagtaccctggcatttttaatgcatgagatctggacctttttagcagtaacctaaggctcctttgtgcagtcgtgcttctgactcgataaccttacagttcacttgttccctgttttgcattcacattgagtcgtttggctggcacaggactgccaggcaatgcctagtacagcctgttactatgcagctaatcagggagataatccttgtaaaccagtaactgatagccaccctcattcccatctatgtgttgagtctttttttttttttttttttgcttttgcagctatttcagcctccatcctgttgtcttgttaactatgggaaaaagaaaatgcagccca

SEQ ID NO: 122542 - DNA, 561 bp, Homo sapiens
agcattttgctgtggttttgtgtgttttgcttgttttaacagctctgtagcctgatttcctttaactgtttagtgcctgataggaaagttgggcttttaaatgtatggacagggcaacaaggctaattcctgcagttgtgtacccactccctccctggccccctcctaccacatatacttcttttcaataatactgtttttcagtggcttttctccaagtaccctggcatttttaatgcatgagatctggacctttttagcagtaacctaaggctcctttgtgcagtcgtgcttctgactcgataaccttacagttcacttgttccctgtttygcattcacattgagtcgtttggctggcacaggactgccaggcaatgcctagtacagcctgttactatgcagctaatcagggagataatccttgtaaaccagtaactgatagccaccctcattcccatctatgtgttgagtctttttttttttttttttttgcttttgcagctatttcagcctccatcctgttgtcttgttaactatgggaaaaagaaaatgcagccca

SEQ ID NO: 122543 - DNA, 561 bp, Homo sapiens
agcattttgctgtggttttgtgtgttttgcttgttttaacagctctgtagcctgatttcctttaactgtttagtgcctgataggaaagttgggcttttaaatgtatggacagggcaacaaggctaattcctgcagttgtgtacccactccctccctggccccctcctaccacatatacttcttttcaataatactgtttttcagtggcttttctccaagtaccctggcatttttaatgcatgagatctggacctttttagcagtaacctaaggctcctttgtgcagtcgtgcttctgactcgataaccttacagttcacttgttccctgttttgcattcacattgagtygtttggctggcacaggactgccaggcaatgcctagtacagcctgttactatgcagctaatcagggagataatccttgtaaaccagtaactgatagccaccctcattcccatctatgtgttgagtctttttttttttttttttttgcttttgcagctatttcagcctccatcctgttgtcttgttaactatgggaaaaagaaaatgcagccca

SEQ ID NO: 122544 - DNA, 537 bp, Homo sapiens
gtctcatcccaacgatgatacaatatattttcggctggcttccttgtcaccrcttttcctatcaaatgtatcctgaatgttactatcagagtattcttccaaaacgatgttttcatcacatcattcttatctagtaacttacaataacttcttagagctggacaaatcaacttcaaacttgggcaaggcattgcttctcataatctcctccccaccggctcccagctttgtacaccagagtgcgctctgttgcaatcttagcatcctgcatgggtccctggtacaaactgtccctttaaggtatctgtatctgcatgcaacaggaagtggggtgtggtttgttctgggatgagactacagttgtatgctgaaaagagtttatccttgacctagaactagtactgcttttagaaaaaaaaatcttgtttaccgttaaaaaggagaaagttaaatagcacttacagttaaaaagaaaaaaaggcaaatagcaacagacaaagaatataaaatgtaaatgctcctggtaataacaaccac

SEQ ID NO: 122545 - DNA, 537 bp, Homo sapiens
gtctcatcccaacgatgatacaatatattttcggctggcttccttgtcaccacttttcctatcaaatgtatcctgaatgttactatcagagtattcttccaaaacgatgttttcatcacatcattcttatctagtaacttacaataacttcttagagctggacaaatcaacttcaaacttgggcaaggcattgcttctcatartctcctccccaccggctcccagctttgtacaccagagtgcgctctgttgcaatcttagcatcctgcatgggtccctggtacaaactgtccctttaaggtatctgtatctgcatgcaacaggaagtggggtgtggtttgttctgggatgagactacagttgtatgctgaaaagagtttatccttgacctagaactagtactgcttttagaaaaaaaaatcttgtttaccgttaaaaaggagaaagttaaatagcacttacagttaaaaagaaaaaaaggcaaatagcaacagacaaagaatataaaatgtaaatgctcctggtaataacaaccac

SEQ ID NO: 122546 - DNA, 535 bp, Homo sapiens
aatgaggaattgaaagttatttgaaattagaagaaagagaactggcaggggacgggcggaacagtaaatggacctaaggaagtagaaaggagagtctgtggcatcacagtgacataggttatataaaaacagacctgcagagctatggtttggttcagtgtagttgatttggaaggtggacttatactggtaggatgcaaaagcaattattttattgctcattctttctatgatggttcagaaaataggacagagtagagtactttcagatctagtcattttatttgtgtttatgtggatccagccccatttctttcatatgtgttatagatgctctttatcttcatataggttatccaccatggggattctggaagaaaagttgagttctaggctgacttttcctgactttcagaaggttcytaggtcccatttgacccatcagagtttgtgcagggaaggtgaaaccaaatttgtcaaatccttccaaattattttgtattattagaaatatgatttcattactgagatttta

SEQ ID NO: 122547 - DNA, 511 bp, Homo sapiens
cgaatctgtggtttcaggaatccattgggggtctttgaacgtatccttcgtggatacggggggactactgtactgtataagctttatagaatgttgaggtcctgggtcacctcctctgttgagattctagcaaagccccttacataaaagagttcataaaaagttttatttcatataaacaaaggtaaaagagcagtagaatcattctaaccataggttaaatagggaaaaaaggatttttcccctgagtctactgtgttatcagcccttgagttcagccttcgctgttgcaattggagtrtaatccatggggacaaactcagtacagaggaggtggctcagaatgcaaggacaagggcacaaggtggaagaagagaccagaatacttttagcaatgacaaggaaggagacatcaactcaaaagaaatatgcaggacaaaggagatgacgggagaaattttgaggtagaggggagaaaagttgaaggagtagaagttaacacagttatcag

SEQ ID NO: 122548 - DNA, 511 bp, Homo sapiens
cgaatctgtggtttcaggaatccattgggggtctttgaacgtatccttcgtggatacggggggactactgtactgtataagctttatagaatgttgaggtcctgggtcacctcctctgttgagattctagcaaagccccttacataaaagagttcataaaaagttttatttcatataaacaaaggtaaaagagcagtagaatcattctaaccataggttaaatagggaaaaaaggatttttcccctgagtctactgtgttatcagcccttgagttcagccttcgctgttgcaattggagtgtaatccatggggacaaactcagtacagaggaggtggctcagaatgcaaggacaagggcacaaggtggaagaagagaccagaatacttttagcaatgacaaggaaggagacatcarctcaaaagaaatatgcaggacaaaggagatgacgggagaaattttgaggtagaggggagaaaagttgaaggagtagaagttaacacagttatcag

SEQ ID NO: 122549 - DNA, 542 bp, Homo sapiens
caggcagctcagctgagttggtggctcactgtttcctgaagatttttattcattgagtccagggtagaacttgagaatatttatttatttttttttaaaaaaaagctctctcaggtttgcaaaccrctgggctggtttacaaattaaaactgcagagataaactacctaaaagccattttccacatgtcaccaactttcagggtccctcacaaataacccaaactgagaatgttaaatctcccttatgagggttagaagtagataactggccaagtcagtagagacagaatttgaagaataagttttccaaattcaaaacttagtggtgttaagtaactattttatccttattcatagtttctggaaatcagggtttccagaggggcttggttaggcaatttttcttcacatagtcttagggcctatccacgtggtctctgcacaggctgtggagagagggcttcctcacttcatggcgacctcagagcagttgtgctgctcacatgaagctcagggctctgagggagtggctaagagaacc

SEQ ID NO: 122550 - DNA, 625 bp, Homo sapiens
tctttagtgtgtgtgtgtgtgttgctggaattaacacaagtatgtctgtttctggactgcacctgtgtgtgcacacccacaggctcctgttggttttgtttgtacatgcccygttcgcatcccagcccactcagaaggctgcaggcccagacacagcctaatggacagagccaggtgggcagggcaggctggctggcctgcacccagggggcggtgggtggatctgggcatcttccagaggcaccggcctggcagggaacaaaggggcaatcagtagagaggccactagagcacagctgattgaggaagaggaattaactaggagccccatggggctctgcagggggcgggggcggtggcccctggcattctgattaggagggggagcaggtgcagctgggcttacctgagccacaggaaggagttggagggggcagaggggaaagcctaggatgggatgaagtagagcagagctgggagctgaggacctggaccaatgactttgagggagaggagcaaggggtcctgggtgagaaggtcacagagtgtactgagcagatattgtcatcctaaatgggatccttgtcacctgtcatcctaagtggatcacactcccacttatcca

SEQ ID NO: 122551 - DNA, 595 bp, Homo sapiens
agggctttccccttttgctgctctcattctctcttgtctgccaccatgtaagacatgcctttcatcctctgccatgattgtgaggcccccccccagccatgtggaactgtgagttcattaaacctccttttctttataaattagtctcaggtatgtctttatcagcagtgtgaaaatggactaatacaggctctaagaagaggaaggactctggggactattgtcatggttatgtgtcagggccctgaggccagtcactctgggttcaaatcccaagcccaccagggaccctggtttgtgactttgaacaagtttctcagcctgtctaagcctcagttcttgctggaaggtcatggatttcgtggtgtaatgaacacacgtgacacaggtcatcacggaamcttctgacctcccagcaagagtgaagccatctgtgctcaagacttggctcagtctccactgagtccacttcatgccgacacccccaaatcagcaaaccagggcgctgtgcccctcagacagacactgagatggaaaagaccctctttcacacactcctgtggttggggtggagcgctgaacatagacaagggtg

SEQ ID NO: 122552 - DNA, 627 bp, Homo sapiens
aatctctcagccatgactcagctgggcctgggtggggctcagcagaatccttggggcccccacagcctcctgatgctccagcccctgctgcctccatccacagtgtctggcacagcctttcccctcccatgtctctcgcccctcatgacatctctcactggtatcatcctggatggacaattgggcctttcaagctcttcatgccaccccgactcttcccaaacccccttgaggggatctttcttttgatgtgtrtaagtcatgctattccttctatggctttcttggcagcattttgtgaagaatgcctgacttacgtttaatgacaaagagagagagaattgctcttgctttgtgtgtccttccattgagaggctgaagtataatccgaacagtttgtctgagcatgttctggctgagtttggattggagcttggagcagatgggattttatgagggttgtaaaagtcaggcttttaatatgtgtcaaccaaatcaatgtgtaaaggagaaatgttaaaagtagggaaatgactggggtctggagcacaaggacactaaactggggcacaggtggctttaatagctcacgaaatttggctcaaactcttccacgagagcagaaga

SEQ ID NO: 122553 - DNA, 453 bp, Homo sapiens
aaaaatagattctctatccttcccctcacccctgcgagcaaagtggcctttcccaacatcttttcccaaatggatgaaacaggtcttgaggacgcagatgtggcattctacataaactacaggatcaggcttttctgggacagtgggtctgctggagccaagagtggaacagcacaagacaacatcagcaaaccctggcgcacctaaccgcgggctgccatggatgccgggacggactggagttcctcctgctccaggtacaagtccacaaagagagaccyagcggcccagcagcagcctcctgggcaccaccagaaagcgatgtacttaagggcctcaggcggtcgagaggcaacgtggcttccacatgtgtgggaatgagactaaaaagctggctcaaagcaaaatatgaacttataggaaaggagggccctggactgggcaggaagagag

SEQ ID NO: 122554 - DNA, 568 bp, Homo sapiens
cagtgtgtaagcattgtcttttctccataaccttgccagaatctcttattttttgaatttttgataatagccattctgactggtgtgagayagtatctcattgcagttttgatttgcatttctctactgatcaatgatgttgagcttttctttatttgcttgttggccatgtgtgtgtcttcttttcaaaagtatctgtcatgttctttgcccactttttattggggttccttataaatttgtttaagtcctttacagactctggatattatttttttgttggcaggatagtttgaaaatattttctcccattctgtggcttgtctgtttactctgctgatagtttcttttgctgtgcagaagctcttgaatttaagtaggtctcatttgtcagtttttgtttttgttgcaattacttttggcatcatcgtcatgaaatctttgtcagggccaatgtcgagaatgatatttcctaaattatcttcctgtgtttttatagttttaggttttccattcaagtctttcatccatctagatatgacatttatatatggtataaggaaggggt

SEQ ID NO: 122555 - DNA, 568 bp, Homo sapiens
cagtgtgtaagcattgtcttttctccataaccttgccagaatctcttattttttgaatttttgataatagccattctgactggtgtgagacagtatctcattgcagttttgatttgcatttctctactgatcaatgatgttgagcttttctttatttgcttgttggccatgtgtgtgtcttcttttcaaaagtatctgtcatgttctttgcccactttttattggggttccttataaatttgtttaagtcctttacagactctggatattatttttttgttggcaggatagtttgaaaatattttctcccattctgtggcttgtctgtttactctgctgatagtttcttttgctgtgcagaagctcttgaatttaagtaggtctcatttgtcagtttttgtttttgttgcaattacttttggcatcatygtcatgaaatctttgtcagggccaatgtcgagaatgatatttcctaaattatcttcctgtgtttttatagttttaggttttccattcaagtctttcatccatctagatatgacatttatatatggtataaggaaggggt

SEQ ID NO: 122556 - DNA, 590 bp, Homo sapiens
ttgacatttattcttaaaatgaaactttatctttaggaaaacaataatattggttatttaagttaatgaaagtctgatgcacttttattaattttgtcttcatgcrggtgatcttgattgtatattgcaattgtaaattggtttgactattttagaatattttttacagtaattcaaatgttaaccaatattcttgtaggataacaagagtattaaattttaatgtttaggcttctaaaaaattatataggcacaaaattgtaactaaactgatggtataattttaggtctgattcctcagctgtgtagacttagcatctacttatctgttatatctgctatctacctattatctacttgtctattatcatatttttatcatatatatgcatttattgagactcagttgtagaagaaaaatgaacacatatactaccttgccaattggatatacaattacgtataaaacattatttcttcacatcttgttttatgaactagaataaaagtttcctagatttaaagaatgcaatttttttctcgaaagaatctgtaattagtagtaatttttttaaaatttatttgttttg

SEQ ID NO: 122557 - DNA, 534 bp, Homo sapiens
ccccaggtggcagccccgggcgccgcggacagcgcccctcagcccgatactcaccatgcgcgggggtcgcgcagcacagccagagcgccagcagcgcccacagcagagcggggcgcagggcgggyatcttctcggtcgcctcctccgccgccgccgccgcggccgcctgggcagatccacatggggagggggtcccgatagaggagccccactctctcctcccctcctcctgcttcaaaggctcaggccctggcgctacgctccgaagcccagcgcaaatgcctcgactccccgcgccccgagtccgccgctcctcggccgccgcctcagccgccgcccgaagtttggctgaaactttctcgggtgtgcagcgaagcagcctcgtgtgtccttccgcctcagccgcctcctcccaccgcaagccccgccccactgtcgccgcggcctcggccccgccgccttgggcacccaggggtttcccgcaggaagaagcgccggcccgagctccgcgcggagggatctactacgagtcac

SEQ ID NO: 122558 - DNA, 494 bp, Homo sapiens
accatgcgcgggggtcgcgcagcacagccagagcgccagcagcgcccacagcagagcggggcgcagggcgggtatcttctcggtcgcctcctccgccgccgccgccgcsgccgcctgggcagatccacatggggagggggtcccgatagaggagccccactctctcctcccctcctcctgcttcaaaggctcaggccctggcgctacgctccgaagcccagcgcaaatgcctcgactccccgcgccccgagtccgccgctcctcggccgccgcctcagccgccgcccgaagtttggctgaaactttctcgggtgtgcagcgaagcagcctcgtgtgtccttccgcctcagccgcctcctcccaccgcaagccccgccccactgtcgccgcggcctcggccccgccgccttgggcacccaggggtttcccgcaggaagaagcgccggcccgagctccgcgcggagggatctactacgagtcactggccccgtccg

SEQ ID NO: 122559 - DNA, 532 bp, Homo sapiens
ccgggcgccgcggacagcgcccctcagcccgatactcaccatgcgcgggggtcgcgcagcacagccagagcgccagcagcgcccacagcagagcggggcgcagggcgggtatcttctcggtcgcctcctccgccgccgccgccgcggccgcctgggcagatccacatggggagggggtcccgatagaggagccccactctctcctcccctcctcctgcttcaaaggctcaggccctggcgctacgctccgaagcccagcgcaaatgcctcgactccccgcgccccgagtccgccgctcctcggccgccgcctcagccgccgcccgaagtttggmtgaaactttctcgggtgtgcagcgaagcagcctcgtgtgtccttccgcctcagccgcctcctcccaccgcaagccccgccccactgtcgccgcggcctcggccccgccgccttgggcacccaggggtttcccgcaggaagaagcgccggcccgagctccgcgcggagggatctactacgagtcactggccccgtccgc

SEQ ID NO: 122560 - DNA, 581 bp, Homo sapiens
gctgggatgaaagcaggatcttgaaaggtcagtaaaatttgtataagacaaggagaccagctaagctaaggatattcgttgtaacactgtaatagcaaaaccttgaaaacaacataaatgcccacccttagaggaatggatgaataatgtatggtatatttataaaatgaaatgcaacacagtaattgaaaagactatagctatttatgtcaatagggataaatcttaaaaactaaatgayagtgaaaataatcgcagagggagacaaagtataccatttatgtatatttttttcaagacaatactacacattatctgtggatgcatatatatagatatagatattaagagactataaccagaatagtagttacttccagggcaggagagtagggggtgtgatcaaacctgggtacaagtgggcttctaagaaaagagctaaaagtaagaacaacaacaatagttgtatggacatatcattccgggaaagagccctcgtgaaagcaaaggtacagtcagaagagtaagtaaatgagttctgtctctgttagcagtgagaggagtcaaggacggaaaggggg

SEQ ID NO: 122561 - DNA, 581 bp, Homo sapiens
gctgggatgaaagcaggatcttgaaaggtcagtaaaatttgtataagacaaggagaccagctaagctaaggatattcgttgtaacactgtaatagcaaaaccttgaaaacaacataaatgcccacccttagaggaatggatgaataatgtatggtatatttataaaatgaaatgcaacacagtaattgaaaagactatagctatttatgtcaatagggataaatcttaaaaactaaatgacagtgaaaataatcgcagagggagacaaagtataccatttatgtatatttttttcaagacaatactacacattatctgtggatgcatatatatagatatagatattaagagactataaccagaatagtagttacttccagggcaggagagtagggggtgtgatcaaacctgggtacaagtgggcttctaagaaaagagctaaaagtaagaacaacaacaatagttgtatggacatatcattccrggaaagagccctcgtgaaagcaaaggtacagtcagaagagtaagtaaatgagttctgtctctgttagcagtgagaggagtcaaggacggaaaggggg

SEQ ID NO: 122562 - DNA, 588 bp, Homo sapiens
tctgtccctgtatcttttgttcctttggcttggaatgactcctgtagtccccttccctcctcctcttaatgaacttctaatcataattcatccttcagtccaaagaaggctttgccgacaccacaataaattcctccctctaacagacagtccctccactgtcttccactgccgcttctttatcttaacaccratacttatttttcacacaggactctttgtatttctgtgttctcaactaagttttgaggtcctcatgggcaaagaccacagcctattaatccccagtgtctatcacataatagatgttgaactagaatgtaaaacaacactaagcaagtacaagtcagtatgggcatagacctatgaagttccaaaactgcatgttaacaagcactttaggtaagcaagtatcattagtgaaagtagtcacattgaaatactggaaacccttttcaaaaataacgtagtcaaaatatttttggaatttgtcttgtgcaagtatgttcagagaaagataacattatttttcagttgtttacccacagtgttaccagttcgatcttcctctttactcactaaagataa

SEQ ID NO: 122563 - DNA, 588 bp, Homo sapiens
tctgtccctgtatcttttgttcctttggcttggaatgactcctgtagtccccttccctcctcctcttaatgaacttctaatcataattcatccttcagtccaaagaaggctttgccgacaccacaataaattcctccctctaacagacagtccctccactgtcttccactgccgcttctttatcttaacaccgatacttatttttcacacaggactctttgtatttctgtgttctcaactaagttttgaggtcctcatgggcaaagaccacagcctattaatccccagtgtctatcacataatagatgttgaactagaatgtaaaacaacactaagcaagtacaagtcagtatgggcatagacctatgaarttccaaaactgcatgttaacaagcactttaggtaagcaagtatcattagtgaaagtagtcacattgaaatactggaaacccttttcaaaaataacgtagtcaaaatatttttggaatttgtcttgtgcaagtatgttcagagaaagataacattatttttcagttgtttacccacagtgttaccagttcgatcttcctctttactcactaaagataa

SEQ ID NO: 122564 - DNA, 572 bp, Homo sapiens
ttgcacatctctctcccctcctgaaggcctagggtgagcccacagcattgttccagcagtgagggagtcttcactgcctcctgagactctctcacggctcttaagatacctccctgaagtccctccaaagaattcaatgtgcccctagtctaaatcastttcctccatcataaatactcatagatgacgcaacaataaagcgttaataacgataatggcaattttgtgtgtcaaacattgtattaagcattttacctgctttattgtttgtaatgcttcaacagcttatgagaaggtattattatttctacttcacagtgcagaaaatgaaacctgagtaagttgtcttagatcacacagctgctaagcagtggcacagggatttaagcccaggtccatctgatcaactccgatggcacataattgacctctgcattgtcccgcctgcccacaggtcactgcctcagtgatccagtcccatccgttgtttagataactgaataagttatcctcgaatcatttattgtaagcctagtctctcaagtttactgtgagtcaagggctaggtcata

SEQ ID NO: 122565 - DNA, 572 bp, Homo sapiens
ttgcacatctctctcccctcctgaaggcctagggtgagcccacagcattgttccagcagtgagggagtcttcactgcctcctgagactctctcacggctcttaagatacctccctgaagtccctccaaagaattcaatgtgcccctagtctaaatcagtttcctccatcataaatactcatagatgacgcaacaataaagcgttaataacgataatggcaattttgtgtgtcaaacattgtattaagcaytttacctgctttattgtttgtaatgcttcaacagcttatgagaaggtattattatttctacttcacagtgcagaaaatgaaacctgagtaagttgtcttagatcacacagctgctaagcagtggcacagggatttaagcccaggtccatctgatcaactccgatggcacataattgacctctgcattgtcccgcctgcccacaggtcactgcctcagtgatccagtcccatccgttgtttagataactgaataagttatcctcgaatcatttattgtaagcctagtctctcaagtttactgtgagtcaagggctaggtcata

SEQ ID NO: 122566 - DNA, 592 bp, Homo sapiens
caccccacctgctctcagttaaaacagagcttaaggcttttccacaggtgtaagatatcaaacttttagcctgccctgatatcctcygggtcttctgcagttttttctgtatccactagaaagtgaatgaataattcatttttttaaaatattttctttcctgtctcagtattcttgctgctgcatcccattgttagattgatttcttctttcttactggggcaccttcttgggttttcattacattctagaccagtttgacatccctacgtccaaagctcttcctctatgtgggttgatttgttttttaatgtcactgagcactacattttatacttgtcacttatagatgtcattctagtgccccaagacctcttttcaaggtatcaagtgatcaaagtcatttatatagaggtctcctgaaaacatgtgtgaccatctatcttgggaagttttgtaaacctgatgctattttgttgtttccattttgttttcccatatactgaaaagaacagggccacgagcagttcttatggaatatggtttgatatatattttgttgagatgacctaacaccattgattttgggttg

SEQ ID NO: 122567 - DNA, 592 bp, Homo sapiens
caccccacctgctctcagttaaaacagagcttaaggcttttccacaggtgtaagatatcaaacttttagcctgccctgatatcctccgggtcttctgcagttttttctgtatccactagaaagtgaatgaataattcatttttttaaaatattttctttcctgtctcagtattcttgctgctgcatcccattgttagattgatttcytctttcttactggggcaccttcttgggttttcattacattctagaccagtttgacatccctacgtccaaagctcttcctctatgtgggttgatttgttttttaatgtcactgagcactacattttatacttgtcacttatagatgtcattctagtgccccaagacctcttttcaaggtatcaagtgatcaaagtcatttatatagaggtctcctgaaaacatgtgtgaccatctatcttgggaagttttgtaaacctgatgctattttgttgtttccattttgttttcccatatactgaaaagaacagggccacgagcagttcttatggaatatggtttgatatatattttgttgagatgacctaacaccattgattttgggttg

SEQ ID NO: 122568 - DNA, 592 bp, Homo sapiens
caccccacctgctctcagttaaaacagagcttaaggcttttccacaggtgtaagatatcaaacttttagcctgccctgatatcctccgggtcttctgcagttttttctgtatccactagaaagtgaatgaataattcatttttttaaaatattttctttcctgtctcagtattcttgctgctgcatcccattgttagattgatttcttctttcttactggggcaccttcttgggttttcattacattctagaccagtttgacatccctacgtccaaagctcttcctctatgtgggttgatttgttttttaatgtcactgagcactacattttatacttgtcacttatagatgtcattctagtgccmcaagacctcttttcaaggtatcaagtgatcaaagtcatttatatagaggtctcctgaaaacatgtgtgaccatctatcttgggaagttttgtaaacctgatgctattttgttgtttccattttgttttcccatatactgaaaagaacagggccacgagcagttcttatggaatatggtttgatatatattttgttgagatgacctaacaccattgattttgggttg

SEQ ID NO: 122569 - DNA, 396 bp, Homo sapiens
atcacgtatttggccatatttccattttttggtttttgtgatgctggaagaatgaccagaatgggtcacgggaagagtattcattcytgtattattttccaggacagaggtgtgcccttctagagtactgggaccaaaattcagaagtgtctgaaaccttgctttaacagtatgggaaataacctctatcacctggaatttccctggaactttggaatatacaagagaagtatgagacgtgggtcttcccttggctgtgtttaattcactcttctatggaataccaatgattctcactaagacttttgcctttttataaccacaatgtatgtcttatggagaagattgtacactttgctctatttagaaagaataaatatgagcaatagttttagg

SEQ ID NO: 122570 - DNA, 565 bp, Homo sapiens
aaataatgtacccacttcagaacagtctgacagttcctgaaaaggttaaacagcattaccatctgacgcagcaattctgctcctaggtatatatccaagaaatatgaagataaatgtctaccaaaaaattrtacaagaatgttcataacagaattattgataatactcaaaaagtagaagcaactcaaatgtcaatcaactgatgatggataaataaaatgataaaatgtggtaaatccatatgataaaatattattcagccataaaaaggcacagagtactgacaaatgctaccacatcaatgaactttgaaaacctcatgctaagtgaaagaagctgtcataaattactacatgctgcatgtttccatttgtatgaaatgtccagaagaggcatttctggaacagaaactttacccaattgcagtccatatgttttctgggatcccggagttccctttcaacaatgtaaaatacaaacttaggtcaaaagttcccatgtctgagaaaactcaagccaaatcagttctcctccaaagttgacaggatttatgctttaaaaatac

SEQ ID NO: 122571 - DNA, 582 bp, Homo sapiens
taaaggatctgaacagacattctccaaagaagatacataatgactaataagtatatgaaaagatgttgaaaatcatcaaccatcagggaaatgtaaatcaaaaccacaatgagataaacacttcacattacagatgaatataataaaaaagacagacaataacaactgttgatgaggatgtggagaaactggaattctcatacactgctggttggaatgtaaaataatgtacccacttcagaacagtctgacagttcctgaaaaggttaaacagcattaccatctgacgcagcaattctgctcctaggtatatatccaagaaatatgaagataaatgtctaccaaaaaattatacaagaatgttcataacagaattattgataatactcaaaaagtagaagcaactcaaatgtcaatcaactgatgatggataaataaaatgataaaatgtggtaaatccatatgataaaatattattcagccataaaaaggcacagagtactgayaaatgctaccacatcaatgaactttgaaaacctcatgctaagtgaaagaagctgtcataaattactacatgctgca

SEQ ID NO: 122572 - DNA, 565 bp, Homo sapiens
aaataatgtacccacttcagaacagtctgacagttcctgaaaaggttaaacagcattaccatctgacgcagcaattctgctcctaggtatatatccaagaaatatgaagataaatgtctaccaaaaaattatacaagaatgttcataacagaattattgataatactcaaaaagtagaagcaactcaaatgtcaatcaactgatgatggataaataaaatgataaaatgtggtaaatccatatgataaaatattattcagccataaaaaggcacagagtactgacaaatgctaccacatcaatgaactttgaaaacctcatgctaagtgaaagaagctgtcataaattactacatgctgcatgtttccatttgtatgaaatgtccagaagaggcatttctggaacagaarctttacccaattgcagtccatatgttttctgggatcccggagttccctttcaacaatgtaaaatacaaacttaggtcaaaagttcccatgtctgagaaaactcaagccaaatcagttctcctccaaagttgacaggatttatgctttaaaaatac

SEQ ID NO: 122573 - DNA, 595 bp, Homo sapiens
gataggattaagatgtccacaatataatgcatgaacttgaccctattatcccctccaatttaaaatatgtaagatatcatgtgcttttcctcaattaagcattgagaaatagtaagtgcttctttctcttatttccactgaaacatcaattggmtgatacctagttttctgggttatgttcaggtggctgacattacaacggaaaaagggaaaggaggtacaggaatggggaagagttcaaagggatatttaaaaatctgttaatatttaagtaggcatttttaaccaaataaaaagacacaaaatataattaaaataacataaaatatctaagataccatataaacaccaaagtcaaggaaggaatcaattgaagaataacattctatgatattttccacattgaggcactgaggaacctttttacatgccaccccttgattcataagatgtacaaccatttcaaactgtgtgtattatttatgacaattttctctgaacaatatcaaaaaggcatggtaagtctccattttcataatgaagttgtttaaatggaatctctgagaagcatttaaattaagaaacacaaacactt

SEQ ID NO: 122574 - DNA, 179 bp, Homo sapiens
tagtgccatgtcatgcactacattgtctccrctggtatggttcttctttatttaagccactgttatgtctttgctgtacctttctcaaactcccatctagatagtttttgtggggaagaccctgtcttgaacccttggtgtaggttccctgaatacctgagtacataaaccccactaag

SEQ ID NO: 122575 - DNA, 630 bp, Homo sapiens
atggtgggttttgatcttcttccccttcttttcttccccttcttctttccttctttgatcttcttccccttcttttcttccccttccccttcttttcaatttctgcaataaattcagacatggacagacacattaagctgattcccctacacacataacaatccactgtctaatcctcacacagggacctcaggctcctcagcataagaataggacactgtgagagatatatttcaggaggcctgaaggctggtcatgayagaaattcctcggtttttctcccagaaactgtgggtaaaatgtccctattctagtagatcgttatctcaatatcatttgtcccaagtttgtgcaaacagttacgccatatttttccaatcaacttaaagcaaataccctcaaatgatttctaggagaaaaactgcaatatttagccctgtctcatcaaatactcagattgttcatggttgtgaggactttagacactgaaattagagtgaaaaaggaaatctacaaacccttgagtcaaaatcatagttctctgaatttgtcacatctgcccaggtccaatgtcatgagaataggatcagggcgccacaggtatggcctgagactaggaagagagtcttg

SEQ ID NO: 122576 - DNA, 630 bp, Homo sapiens
atggtgggttttgatcttcttccccttcttttcttccccttcttctttccttctttgatcttcttccccttcttttcttccccttccccttcttttcaatttctgcaataaattcagacatggacagacacattaagctgattcccctacacacataacaatccactgtctaatcctcacacagggacctcaggctcctcagcataagaataggacactgtgagagatatatttcaggaggcctgaaggctggtcatgacagaaattcctcggtttttctcccagaaactgtgggtaaaatgtccctattctagtagatcgttatcycaatatcatttgtcccaagtttgtgcaaacagttacgccatatttttccaatcaacttaaagcaaataccctcaaatgatttctaggagaaaaactgcaatatttagccctgtctcatcaaatactcagattgttcatggttgtgaggactttagacactgaaattagagtgaaaaaggaaatctacaaacccttgagtcaaaatcatagttctctgaatttgtcacatctgcccaggtccaatgtcatgagaataggatcagggcgccacaggtatggcctgagactaggaagagagtcttg

SEQ ID NO: 122577 - DNA, 518 bp, Homo sapiens
cactgcactggactctgagaaaatatctacttgtgattaaaacatggcaaacacattctagacatatgagtttacaaaaaacacccttcgatgtaatggacaaaactgaatgagttagctcagttgttcccaaggtatgggctgtggagttattgcaagggattgcaatcctyataaatcactttctaaactactaaacagtatcttgtccatatttaaatatatgtatatgcttttatgactagtaaaacataaagatatattaaatgattcttgaattcttagattttgacagtatacattgtattcaaacaacacactgagaaattgtttcatctcaagctctctcctttatgcgctatactcttgctaaatgcctttcagctcctagaaaatgctatagtacactacttctcacttccagacctctgtacacgctgttcagtcagcccaaaatgcttttccccaccttctcatggctaagccctaaaatttcattgtatgaacttaaatgttat

SEQ ID NO: 122578 - DNA, 590 bp, Homo sapiens
ttcgatgtaatggacaaaactgaatgagttagctcagttgttcccaaggtatgggctgtggagttattgcaagggattgcaatcctcataaatcactttctaaactactaaacagtatcttgtccatatttaaatatatgtatatgcttttatgactagtaaaacataaagatatattaaatgattcttgaattcttagattttgacagtatacattgtattcaaacaacacactgagaaattgtttcatctcaagctctctcctttatgcrctatactcttgctaaatgcctttcagctcctagaaaatgctatagtacactacttctcacttccagacctctgtacacgctgttcagtcagcccaaaatgcttttccccaccttctcatggctaagccctaaaatttcattgtatgaacttaaatgttatttcctgtgaaaaacagccttgacaccccctctgttcttataaccctgagcctgtgttactcattagcccttattatgattatctgtcaacagactaaaattattaattctcatactcccagtgcctaacacaatgactggcatatagaaggcattcga

SEQ ID NO: 122579 - DNA, 590 bp, Homo sapiens
ttcgatgtaatggacaaaactgaatgagttagctcagttgttcccaaggtatgggctgtggagttattgcaagggattgcaatcctcataaatcactttctaaactactaaacagtatcttgtccatatttaaatatatgtatatgcttttatgactagtaaaacataaagatatattaaatgattcttgaattcttagattttgacagtatacattgtattcaaacaacacactgagaaattgtttcatctcaagctctctcctttatgcgctatactcttgctaaaygcctttcagctcctagaaaatgctatagtacactacttctcacttccagacctctgtacacgctgttcagtcagcccaaaatgcttttccccaccttctcatggctaagccctaaaatttcattgtatgaacttaaatgttatttcctgtgaaaaacagccttgacaccccctctgttcttataaccctgagcctgtgttactcattagcccttattatgattatctgtcaacagactaaaattattaattctcatactcccagtgcctaacacaatgactggcatatagaaggcattcga

SEQ ID NO: 122580 - DNA, 597 bp, Homo sapiens
cagagaagtgttaactcacactggtaggatgccccttctcactcaaaacagctgagttcatatcccaggcatggccgctgtatcaaaataattrgtaattaaacaagttaatatatgcaacatgcttacagcttggcactgttaagattattaccctctttccttcaagcacagcagaacacgagaaatgtcacatctttatctgcagactttgggggatccaaggcagaattttcacctactcagagcaggctgagattcaacttcccttttcaggtttcaccgacatccctgaaggttccatagcatatctgccatcatgtggaaagataaaattcaattcccaggcattcccaggtgcacttctaaggaagtggtatggtgtgaagaataaagcaatggaccaagggctaaaaagtcagacatctggcctggcacagtggctaacacctgtaatcccagcactctgggaggctgaggcaggtggatcatttgaggtcagcagttcaaaaccagcctggccaacatggtgaaaccacgtctctactaaaaatacaaaaaaattagccgggtggtagtggcacaccccagtaatcc

SEQ ID NO: 122581 - DNA, 597 bp, Homo sapiens
cagagaagtgttaactcacactggtaggatgccccttctcactcaaaacagctgagttcatatcccaggcatggccgctgtatcaaaataattagtaattaaacaagttaatatatgcaacatgcttacagcttggcactgttaagattattaccctctttccttcaagcacagcagaacaygagaaatgtcacatctttatctgcagactttgggggatccaaggcagaattttcacctactcagagcaggctgagattcaacttcccttttcaggtttcaccgacatccctgaaggttccatagcatatctgccatcatgtggaaagataaaattcaattcccaggcattcccaggtgcacttctaaggaagtggtatggtgtgaagaataaagcaatggaccaagggctaaaaagtcagacatctggcctggcacagtggctaacacctgtaatcccagcactctgggaggctgaggcaggtggatcatttgaggtcagcagttcaaaaccagcctggccaacatggtgaaaccacgtctctactaaaaatacaaaaaaattagccgggtggtagtggcacaccccagtaatcc

SEQ ID NO: 122582 - DNA, 597 bp, Homo sapiens
cagagaagtgttaactcacactggtaggatgccccttctcactcaaaacagctgagttcatatcccaggcatggccgctgtatcaaaataattagtaattaaacaagttaatatatgcaacatgcttacagcttggcactgttaagattattaccctctttccttcaagcacagcagaacacgagaaatgtcacatctttatctgcagactttgggggatccaaggcagaattttcacctactcagagcaggctgagattcaacttcccttttcaggtttcaccgacatccctgaaggttccatagcatatctgccatcatgtggaaagataaaattcaattcccaggcattyccaggtgcacttctaaggaagtggtatggtgtgaagaataaagcaatggaccaagggctaaaaagtcagacatctggcctggcacagtggctaacacctgtaatcccagcactctgggaggctgaggcaggtggatcatttgaggtcagcagttcaaaaccagcctggccaacatggtgaaaccacgtctctactaaaaatacaaaaaaattagccgggtggtagtggcacaccccagtaatcc

SEQ ID NO: 122583 - DNA, 597 bp, Homo sapiens
cagagaagtgttaactcacactggtaggatgccccttctcactcaaaacagctgagttcatatcccaggcatggccgctgtatcaaaataattagtaattaaacaagttaatatatgcaacatgcttacagcttggcactgttaagattattaccctctttccttcaagcacagcagaacacgagaaatgtcacatctttatctgcagactttgggggatccaaggcagaattttcacctactcagagcaggctgagattcaacttcccttttcaggtttcaccgacatccctgaaggttccatagcatatctgccatcatgtggaaagataaaattcaattcccaggcattcccaggtgcacttctaaggaagtggtatggtgtgaagaataaagcaatggaccaagggctaaaaagtcagacatctggcctggcacagtggctaacacctgtaatcccagcactctgggaggctgaggcaggtggatcatttgaggtcagcagttcaaaaccagcctgrccaacatggtgaaaccacgtctctactaaaaatacaaaaaaattagccgggtggtagtggcacaccccagtaatcc

SEQ ID NO: 122584 - DNA, 609 bp, Homo sapiens
ctgttcactgtgacatagctgtgggggccaagccatgttaccaaaaaaaaaggaaaaaaaacacacaaaaaatcttttccattatggaaacataggcaaaatcctctcaaattactctgcttaacattatagttgcagattaaccatttgagctctaaacttttcttattgtacaataagaaaccaatattgatggtcacattcaggtgtccttggtgccttcctgaaggccagctgggcatcctcagcaccctgtctgagacagtctccccaaactgacaggactacacattcagacagacagactccctaaaacattacaggcctcccttccccaccagaagtgaaaaagggaagtgaagtaatgatgggtttggaatagagagggccagggtgccagagagaggagagagagagaggaaaagagagagggacattttttttttatggtactcaaraccaaaccaacttaggccagaagaggggtgtgatccattccaatgcccataggattgatcagacccaatagtcaaccattttaatccatcctgcaaggatgttattcaggcagccaaaagcagtaaggatttggagaagagaggcaaagca

SEQ ID NO: 122585 - DNA, 609 bp, Homo sapiens
ctgttcactgtgacatagctgtgggggccaagccatgttaccaaaaaaaaaggaaaaaaaacacacaaaaaatcttttccattatggaaacataggcaaaatcctctcaaattactctgcttaacattatagttgcagattaaccatttgagctctaaacttttcttattgtacaataagaaaccaatattgatggtcacattcaggtgtccttggtgccttcctgaaggccagctgggcatcctcagcaccctgtctgagacagtctccccaaactgacaggactacacattcagacagacagactccctaaaacattacaggcctcccttccccaccagaagtgaaaaagggaagtgaagtaatgatgggtttggaatagagagggccagggtgccagagagaggagagagagagaggaaaagagagagggacattttttttttatggtactcaaaaccaaaccaacttaggccagargaggggtgtgatccattccaatgcccataggattgatcagacccaatagtcaaccattttaatccatcctgcaaggatgttattcaggcagccaaaagcagtaaggatttggagaagagaggcaaagca

SEQ ID NO: 122586 - DNA, 609 bp, Homo sapiens
ctgttcactgtgacatagctgtgggggccaagccatgttaccaaaaaaaaaggaaaaaaaacacacaaaaaatcttttccattatggaaacataggcaaaatcctctcaaattactctgcttaacattatagttgcagattaaccatttgagctctaaacttttcttattgtacaataagaaaccaatattgatggtcacattcaggtgtccttggtgccttcctgaaggccagctgggcatcctcagcaccctgtctgagacagtctccccaaactgacaggactacacattcagacagacagactccctaaaacattacaggcctcccttccccaccagaagtgaaaaagggaagtgaagtaatgatgggtttggaatagagagggccagggtgccagagagaggagagagagagaggaaaagagagagggacattttttttttatggtactcaaaaccaaaccaacttaggccagaagaggggtgtgatccattccaawgcccataggattgatcagacccaatagtcaaccattttaatccatcctgcaaggatgttattcaggcagccaaaagcagtaaggatttggagaagagaggcaaagca

SEQ ID NO: 122587 - DNA, 226 bp, Homo sapiens
tgattgctatggcaaattagacttttcatatttgaaggggatttttttttttttagtgagttatctcggactrttagcaagcaattctggctgatgttagtcataaagtttacttgaattttctttagtacaatcatccctgaaattataaagaggaaatgagttggtcaaaacgggtatgtaaattcaactttattgctccacctgtacaaaaaggaagtagaat

SEQ ID NO: 122588 - DNA, 581 bp, Homo sapiens
gaattcaatactcattcaacaaacatgcctatgtccatgaactgcatgcccactctgtgccaggccttataactttgacttctgtactattcagcgatgctactgcagcattaagcatgcttcttatgtaacactgcttcatcacatcaaccaagaatcccctgggcccaacacttacacagacttgacaaacggcaacaggataaacaggaaaatatctggaatccttgcctgtctctataaatcatctgctgacttgcagagtaacataggacaaatgagttctcaggtgtccatgcctcagtttacctatgtgtaaaatgcataacgcctccctcagagagatgtacagagaatcactgaggtratgtctaagcatttggaactccttggcagaaaggcgctacataattactaattggtatttaagctgcccttcatgtgtgccaagtactttatgatcattccttaggagttactcccagctactttgtgaagttgccttcatgtctatttccatttgaaagatgaagaaatagaagtagagaaaagtttagtggtttgcttaaggtcacaaagat

SEQ ID NO: 122589 - DNA, 582 bp, Homo sapiens
tgtaaagcaaaaatgctgattcagacaaataggacatatacacagcaaagccaaaacaaacaatactttaacatgtatcggataaaggtagaaagttgagcatttaccttccaaaaaggagggaaggtcaatagcccaaagagagaaatcacagacaactgagaggaaatgactttttgtttaaaagctaatcagttctgttcaaatatatttaaaatatgcaatggaaaggcatttcttttaagaatgtttttaaaagacctaaaacaactagctcatatcatatstgtttcaaaaattatttgaagtttacacatacagttacatgacaagttaacatatcatgatagctttttaaatcattgccatcaataatctgttcttctttcatctttccttttgtaatctcaaaggaaaagttgcgagactacgttgggggaaagaaaggcttgttagaagtcacggcatgctctgattgtgacaaagagtgctgtggctaagtgacccagatctattgacaaggcttggaagagttagtcccaggtaggagagaaaatttaccagtaagcactaaatgaattc

SEQ ID NO: 122590 - DNA, 550 bp, Homo sapiens
cgcttaaacaagcacatgagatcctggtcccaagattaaagatgaagatgcagggctagctgtgtattcaagagccctgggcaaggctaattatggcctattttcacctggtcagaaagagaaacattttgctggattcagggttctaaggacacaggacaaagaaaacaaagagctccacactggctctttgaatatcttgaaatcattatyttaacaaaaattatttagtggacttgagcttggtgaatggcacatactgatgggattggggcaattcccttcagaggggtcatgcccaagcccaatagcacacttaatttaccaagccactagcaaacatcagtagaagaataaggaagaccggaagaaaaacttgcagcagcaaaaaaaaaaaaaaaatgcttttaaagtgtgtaatatatgttgtataatgttcattttagcattggctcacagctgagataaaaccttgactaatgaatgaatcttctttcttaactttctatggatgcttgccccattgtcaaaagtctgtatgttggggaac

SEQ ID NO: 122591 - DNA, 550 bp, Homo sapiens
cgcttaaacaagcacatgagatcctggtcccaagattaaagatgaagatgcagggctagctgtgtattcaagagccctgggcaaggctaattatggcctattttcacctggtcagaaagagaaacattttgctggattcagggttctaaggacacaggacaaagaaaacaaagagctccacactggctctttgaatatcttgaaatcattatcttaacaaaaattatttagtggacttgagcttggtgaatggcacatactgatgggattggggcaattcccttcagaggggtcatgcycaagcccaatagcacacttaatttaccaagccactagcaaacatcagtagaagaataaggaagaccggaagaaaaacttgcagcagcaaaaaaaaaaaaaaaatgcttttaaagtgtgtaatatatgttgtataatgttcattttagcattggctcacagctgagataaaaccttgactaatgaatgaatcttctttcttaactttctatggatgcttgccccattgtcaaaagtctgtatgttggggaac

SEQ ID NO: 122592 - DNA, 550 bp, Homo sapiens
cgcttaaacaagcacatgagatcctggtcccaagattaaagatgaagatgcagggctagctgtgtattcaagagccctgggcaaggctaattatggcctattttcacctggtcagaaagagaaacattttgctggattcagggttctaaggacacaggacaaagaaaacaaagagctccacactggctctttgaatatcttgaaatcattatcttaacaaaaattatttagtggacttgagcttggtgaatggcacatactgatgggattggggcaattcccttcagaggggtcatgcccaagcccaatagcacacttaatttaccaagccactagcaaacatcagtagaagaataaggaagacmggaagaaaaacttgcagcagcaaaaaaaaaaaaaaaatgcttttaaagtgtgtaatatatgttgtataatgttcattttagcattggctcacagctgagataaaaccttgactaatgaatgaatcttctttcttaactttctatggatgcttgccccattgtcaaaagtctgtatgttggggaac

SEQ ID NO: 122593 - DNA, 550 bp, Homo sapiens
cgcttaaacaagcacatgagatcctggtcccaagattaaagatgaagatgcagggctagctgtgtattcaagagccctgggcaaggctaattatggcctattttcacctggtcagaaagagaaacattttgctggattcagggttctaaggacacaggacaaagaaaacaaagagctccacactggctctttgaatatcttgaaatcattatcttaacaaaaattatttagtggacttgagcttggtgaatggcacatactgatgggattggggcaattcccttcagaggggtcatgcccaagcccaatagcacacttaatttaccaagccactagcaaacatcagtagaagaataaggaagaccggaagaaaaacttgcagcagcaaaaaaaaaaaaaaaatgcttttaaagtgtgtaatatatgttgtataatgttcattttagcattggctcacagctgagataaaaccttgactaatgaatgaatcttctttcttaactttctatrgatgcttgccccattgtcaaaagtctgtatgttggggaac

SEQ ID NO: 122594 - DNA, 595 bp, Homo sapiens
aataatcaaatccatctcaaatttaaggagaagggattgcacaagggcatgaaagccaggaggtaaggatcattaaggacyatcttacagggtacctaccatagttatttaggtccattttcttccccagtacccttcagggtgactatgttgttcatttgaaatacaattaggttcatttgttactgcttatttcccaattaggttctccttcacctcatcttgcttgattttaattattgattcatttttggctggttgtgtgaaacattaccatggttctaagagtcagcactatatacaaagataaactctgagaagtgtcactgcctccttatccctattacctcattcccattcttccctttttcccatacatttatcacttagacctcgtaggcaaccagtctcttcagtttctgctttccttcctatatcttttgtacaaatgagcagatacatggttattttcttatatccctttctttcttacatgaagagtagcatattacagatagtctcttatactttgtttattcactcaacagtatatcctggaaattattccaaatgcattcattagagatctccctta

SEQ ID NO: 122595 - DNA, 526 bp, Homo sapiens
gagcaggctgaggagtcaaatcgagaaatggaaagaaacaagccaggagaagtcttacgattctgcttctacagcctgcaaagagccaaagccgaggtgctgcacggccctgagctacacctctgctctcactttcatcaccctaccaggctcctcgggtggcttcttcccacacgccccccccccccggcctcccaagacggagtttcgctcttataaccgggctggagtgaagtaacgtgatctcagctcgctgcaacctcctcccccgcaggttcaagcgattctcctgcctcagcctccaaagtagctggaattacaggcacccaccaccaygcccggctaatttttgtattttttagtagagatgggatttcaccatgttgatcaggctggtctcgaactcctgacctcagacgatccacccacctcagcctcccaaagtgctaggattacaggtgtgagccactgcgctcagcccgggccgcttctttaagtttggcccttctgcagagtcagctcggaa

SEQ ID NO: 122596 - DNA, 395 bp, Homo sapiens
agagccctggcctccttcccgggagagcaggtatccagcccacctctgtcactaatgtgctctatgtccttgggtggatttctccctctcagggccttggtttcccagtgtttccccaagtacccccactctccctagcttctttattctgattgtcaactgctcttttcagcagacaaatgccacccagtggctccatcacagtgcaggggaggcccctgcaggggcgggagcattggcaggccctgcacatctgagcagtcgtggttaattactcagacttctatttattgcctccctaattccccargcaaacatctgcattaccgggagtaattcactcacaccaacttccactatgaggggtggaaacttcaagatgtgcccctgcccca

SEQ ID NO: 122597 - DNA, 550 bp, Homo sapiens
gattttaaaattgtagtgtttttcaagaggagtgaaacagatcctggacaatacttgacatattcttgtaaaaagttcaattgactcaaaatagtcaggaaagttatgaagtaacatcatataatactttatccccaacaatattaaatgtgattacaattttacagaatattcaaatcaaaatgttatataagacaaattattattcttgcttttacawctccttagaaggagaaacattcaattgttttaaaaatgttctatttatttttcagaaatgaggtgttgccttcttgcccaggctagtatgcagtggcacaatcatagctcactgcagccttgaattcttgggctcaagtgatcttcctgccccaagcctcccaagtagctgggaccacaggcacgtgccaccatgcctggctgatttttttttttttttaatgttttgtagagacaggatctcagtatgttgcgcaggctggtctttaattcctgggctcaagtgatcctcccatagatttgtctgtgttttctctaaataggttataaa

SEQ ID NO: 122598 - DNA, 550 bp, Homo sapiens
gattttaaaattgtagtgtttttcaagaggagtgaaacagatcctggacaatacttgacatattcttgtaaaaagttcaattgactcaaaatagtcaggaaagttatgaagtaacatcatataatactttatccccaacaatattaaatgtgattacaattttacagaatattcaaatcaaaatgttatataagacaaattattattcttgcttttacatctccttagaaggagaaacattcaattgttttaaaaatgttctatttatttttcagaaatgaggtgttgccttcttgcccaggctagtatgcagtggcacaatcatagctcactgcagccttgaattcttgggctcaagtgatcttcctgccccaagcctcccaagtagctgggaccacaggcacgtgccaccatgcctggctgatttttttttttttttaatgttttgtagagacaggatctcagtatgttgcgcaggctrgtctttaattcctgggctcaagtgatcctcccatagatttgtctgtgttttctctaaataggttataaa

SEQ ID NO: 122599 - DNA, 572 bp, Homo sapiens
tgtgatttgaatgtttgccagaaggttggagtggtttcacttgttttttttttttgtattataatggttttcatccacaggtcatcgaaacaataggagaagtctttcattcttggcgtctaagaatgcatctccaaattatacactcagagaccagagraaaagccacaatgtgggtgtgtggacccatttgacccaatataagatgggcttcagccaaaactccatttcttacctgaaccttaaagcctccatattaatcagatgaacatgatggtgttttaggacctctgtgatcaatgccacctcaaaccctatatataacagtattagagtctgaataatttcttttccccagtctaaaagtatcctggacaaaggctgaaaaaagaaacactaaagaaatattcactttttatacttgaggggaatcagcatgatcttgaatcaatgggtctgtgaatgacatagatctggaaactgcgtgagaagtgcaattttccatttatggcgtctgacaccaaccttctaatcaccagctttctatttctttattataacaaaatagagaa

SEQ ID NO: 122600 - DNA, 606 bp, Homo sapiens
agaccagcctgggcaatgtaggaagaccctatccctaaaaaaaaaaattaaaaaatcagccaggtgtggcggcgcatacctgtagtcctggctactggggaggctgaggtgggaggatcacttgagcccaggaagtcaagtytgcagtgagccatgattgcaccactgcactccaacctgggtgacagagtgagtgagacccagtctcaaagaagaagaagaagaaaaaaagaaaaaaaaaaatatatatatattcaataatgcagtaatataattgcaaactcactatatgatgaaaatatttttcaaatatttctatatataacctatagaaactattctgacatctgagaagtaaattgtaccaaaatattttttcagatcataccaaaagaggaagagataaattttgaatagaggtaatatatgggctcttagattattaaataatctacttaataaaataagtgaaatacatgaacacagcaggaaaacatttacattttgtgcagatttgactaaaatactgtcattgataaagataacataaatctcataatagactagacctctacagcaagaattggaggtcaaattggtccatga

SEQ ID NO: 122601 - DNA, 606 bp, Homo sapiens
agaccagcctgggcaatgtaggaagaccctatccctaaaaaaaaaaattaaaaaatcagccaggtgtggcggcgcatacctgtagtcctggctactggggaggctgaggtgggaggatcacttgagcccaggaagtcaagtctgcagtgagccatgattgcaccactgcactccaacctgggtgacagagtgagtgagacccagtctcaaagaagaagaagaagaaaaaaagaaaaaaawaaatatatatatattcaataatgcagtaatataattgcaaactcactatatgatgaaaatatttttcaaatatttctatatataacctatagaaactattctgacatctgagaagtaaattgtaccaaaatattttttcagatcataccaaaagaggaagagataaattttgaatagaggtaatatatgggctcttagattattaaataatctacttaataaaataagtgaaatacatgaacacagcaggaaaacatttacattttgtgcagatttgactaaaatactgtcattgataaagataacataaatctcataatagactagacctctacagcaagaattggaggtcaaattggtccatga

SEQ ID NO: 122602 - DNA, 606 bp, Homo sapiens
agaccagcctgggcaatgtaggaagaccctatccctaaaaaaaaaaattaaaaaatcagccaggtgtggcggcgcatacctgtagtcctggctactggggaggctgaggtgggaggatcacttgagcccaggaagtcaagtctgcagtgagccatgattgcaccactgcactccaacctgggtgacagagtgagtgagacccagtctcaaagaagaagaagaagaaaaaaagaaaaaaaaaaatatatatatattcaataatgcagtaatataattgcaaactcactatatgatgaaaayatttttcaaatatttctatatataacctatagaaactattctgacatctgagaagtaaattgtaccaaaatattttttcagatcataccaaaagaggaagagataaattttgaatagaggtaatatatgggctcttagattattaaataatctacttaataaaataagtgaaatacatgaacacagcaggaaaacatttacattttgtgcagatttgactaaaatactgtcattgataaagataacataaatctcataatagactagacctctacagcaagaattggaggtcaaattggtccatga

SEQ ID NO: 122603 - DNA, 569 bp, Homo sapiens
gctagtagaaacctactatgtgggtcagggtcctttcttcattttcatcatctcccaggccaacccacgttgctgtgaggattaaattaaataatggggccaggcacagtggctcacatctatgatcccagcactttaggaggtcaaggtgggaggattgcttgaggccaggaattcaagaccagcctcagcaatgtagtaagaccccatctctacaaaacatgtttaaaaaaagaaaaattggctgtgtatgctggcatgcacctgtagtcctagctactctagaggctgagacaggaagatcctttgagcccaagagttcaaggctgcagtgagccataatcacaacactgcactccagccttggcgatgaagcgagaccttgyctgaaataaataaaataaaatatgtgaaggggtgtcatgaaagtgtacagtactactgcaattcttatagctgaaatatgtaaccagagggaagtgccaaaaattgcttttgtggtaatagtattagttttcatgcattacaaagataccctgggtatataaagaatcctctaaattgaaatc

SEQ ID NO: 122604 - DNA, 577 bp, Homo sapiens
ctttctaaagtttaagtttgatgttaaaaaaaacactgaataattagttagaacaataatattttcttaagggattgattattcttaataaattataacgtattttaatttttcaacccaaagttcaacttttattgcatctctccattttcagttttctctccccttttaaagagagtaaaatagtaatgctctcctttaacacattttcagcttatacaaatakttttttcctggagctctgttgcagtggcctgatattaacaatgttttcttaaaggtttaaaggaaatgttttctccaatataacattctttgcagtgcggaacgtcttttgccttttggtagctggcctaacaggtttaccttttatcaaaacaattcttatgccattattactaagtatttttttttttttgcttatgacaaaaacagattaaactttttaaaattaaggttattacatccgtgtatctctctgcatgtgtttttaaagtacttgggacattgagttactgagctttgactctgggtctaaaaaggacaccaagtcctgctaaattttaaatgctgacag

SEQ ID NO: 122605 - DNA, 585 bp, Homo sapiens
atgcattttaacgtatttgatgcatwtctattcacttcttgttatttttcatagtgttgctcaaattcctttaatctggctagtagggagtttaagttgactcaaagaagttttcaaacttgacatagtattctctctctctctctgtttcttttttttttgttttgctttgttttgtttttgtaaaaacattgatttcacttattcattgtgtctgaaataatcaatctcagaaacagaatgtagagtggtggtttcaagggacgggtaggagggtatatgaggagttgtaattgaataggaatagcattttagctatgcaaaatgggtaaattctagagaactgctatagaacattgtgcctatagttaacaatactgtattgtactcttaaaaatatgaaagggtagattcatgttaaatgttcttactttttgaattcttgacctggagcacaaagtaaagggagagaaggattgtgggtatatgcatatgaactgcagaaggatactgtagttgtttgcagttgaatcctgattagactaacactgaggcaagagacctatgctcaataataactggcaa

SEQ ID NO: 122606 - DNA, 585 bp, Homo sapiens
atgcattttaacgtatttgatgcatttctattcacttcttgttatttttcatagtgttgctcaaattcctttaatctggctagtagggagtttaagttgactcaaagaagttttcaaacttgacatagtattctctctctctctctgtttcttttttttttgttttgctttgttttgtttttgtaaaaacattgatttcacttattcattgtgtctgaaataatcaatctcagaaacagaatgtagagtggtggtttcaagggacgggtaggagggtatatgaggagttgtaattgaataggaatagcattttagctatgcaaaatsggtaaattctagagaactgctatagaacattgtgcctatagttaacaatactgtattgtactcttaaaaatatgaaagggtagattcatgttaaatgttcttactttttgaattcttgacctggagcacaaagtaaagggagagaaggattgtgggtatatgcatatgaactgcagaaggatactgtagttgtttgcagttgaatcctgattagactaacactgaggcaagagacctatgctcaataataactggcaa

SEQ ID NO: 122607 - DNA, 633 bp, Homo sapiens
tttgtcaaacacataaaccttttttataacagcagtttaagaagtagcacagaatatccttacatttgcaaagggcccagggcccagggaaagaagttatctgaagtaaaactaagtgagaaagactggatttttattcctgaagaattattggagactccagacacatgcacacacacacactcacacacacacacataaacaaataggaattgacaaagtcttcctagatgttaaatgtaggcatttcttggcaatgatgtaggtagttagggttgggtgatagcattaaatatctcaaaaggccacaattatcttttcaggtcatttcatatggttattagtataacactatatgggtattcaaaagtaatagtaaaaataatactcatcaaaatttccgtataacagttttttttaaattcaaartgctttcacgtacattcaggctcaactgagcacttaattcaattatgagcaacttttacatcaccatatgtgttcacatacatttttctatgttcccacagtactttgtatgatatgtagatttattgtctgtatgtgcagatgagaaaacttgagagtcagagaaactataactttccagaacttcatggacagttagtggca

SEQ ID NO: 122608 - DNA, 539 bp, Homo sapiens
accttcatgaggtattttcaagcacctacaaaaccctgtaatatatagtggtgaacaagacgatatggcccttttttatgtaacttacagcagtaataaattctctgaagaagtataatagagacccctgacataagcagtgtttcccatagtatggtstggagattactcacatcagagccacctaggcacttgaatttggattcctaggtcccatcaaaaaattactgaatcaaaaaatctgacgatgaagcctgggattttcaagttataacaagtaccccagtgattcttctgcactctatagtttgaggacttctcttgtagagtgtggactactcttaaattttcttatttttgcttatcagtatttcttgtagtgttttcagtgaatatgtaatacttaagaaaagaactattaaaataatttaagacagttctggcaagtcaacagatatcagtagagtaatctgggtgtgaatggatgtgcagaggctaaaaatattcatctcatagaagtagagactagaataatggtt

SEQ ID NO: 122609 - DNA, 539 bp, Homo sapiens
accttcatgaggtattttcaagcacctacaaaaccctgtaatatatagtggtgaacaagacgatatggcccttttttatgtaacttacagcagtaataaattctctgaagaagtataatagagacccctgacataagcagtgtttcccatagtatggtgtggagattactcrcatcagagccacctaggcacttgaatttggattcctaggtcccatcaaaaaattactgaatcaaaaaatctgacgatgaagcctgggattttcaagttataacaagtaccccagtgattcttctgcactctatagtttgaggacttctcttgtagagtgtggactactcttaaattttcttatttttgcttatcagtatttcttgtagtgttttcagtgaatatgtaatacttaagaaaagaactattaaaataatttaagacagttctggcaagtcaacagatatcagtagagtaatctgggtgtgaatggatgtgcagaggctaaaaatattcatctcatagaagtagagactagaataatggtt

SEQ ID NO: 122610 - DNA, 539 bp, Homo sapiens
accttcatgaggtattttcaagcacctacaaaaccctgtaatatatagtggtgaacaagacgatatggcccttttttatgtaacttacagcagtaataaattctctgaagaagtataatagagacccctgacataagcagtgtttcccatagtatggtgtggagattactcacatcagagccacctaggcacttgaatttggattcctaggtcccatcaaaaaattactgaatcaaaaaatctgasgatgaagcctgggattttcaagttataacaagtaccccagtgattcttctgcactctatagtttgaggacttctcttgtagagtgtggactactcttaaattttcttatttttgcttatcagtatttcttgtagtgttttcagtgaatatgtaatacttaagaaaagaactattaaaataatttaagacagttctggcaagtcaacagatatcagtagagtaatctgggtgtgaatggatgtgcagaggctaaaaatattcatctcatagaagtagagactagaataatggtt

SEQ ID NO: 122611 - DNA, 539 bp, Homo sapiens
accttcatgaggtattttcaagcacctacaaaaccctgtaatatatagtggtgaacaagacgatatggcccttttttatgtaacttacagcagtaataaattctctgaagaagtataatagagacccctgacataagcagtgtttcccatagtatggtgtggagattactcacatcagagccacctaggcacttgaatttggattcctaggtcccatcaaaaaattactgaatcaaaaaatctgacgatgaagcctgggattytcaagttataacaagtaccccagtgattcttctgcactctatagtttgaggacttctcttgtagagtgtggactactcttaaattttcttatttttgcttatcagtatttcttgtagtgttttcagtgaatatgtaatacttaagaaaagaactattaaaataatttaagacagttctggcaagtcaacagatatcagtagagtaatctgggtgtgaatggatgtgcagaggctaaaaatattcatctcatagaagtagagactagaataatggtt

SEQ ID NO: 122612 - DNA, 393 bp, Homo sapiens
gaattcctcagttccaggatttctgtttggttcttttttatgacatctatttgttgaatttgtcatcttgttcataaatttattattatttctttgtttacttgtgcttcagtatacatgtgggtttggttccaggatctccaacatctaccaatatccacacatactcaaatcctgtagtcagcattacagaactcgtgtatatgaaaagtctgccttccatatatgtgggttttgcaaccccaaaatactgtatttttaatctgcatttggctgtagaagcgaaacctcagatatggaagattgactgcatttattacataaaaattcaygtataagtgtacccacatggttcaaacccatgttgttcaagggacaactgtattgtttacg

SEQ ID NO: 122613 - DNA, 604 bp, Homo sapiens
attataagatggtacaagcgctgttctaaatgtatctgctagccaaactaaatcatgtctcaagggactgaaagaacatatgcaagtgtttgcttaacaattgacagtgatatttgagtaatcaagaaaaacaagagagattttggaaggttagagatagacatgatattctaattttccagwtgaagaatgtgattttttaccaaatttagcttagtaatcttgacaccagttatcaagattgtgaaataatttattaaaaagacagcacatgatcaccaaagcattataaatgaatacagcatctcatgttgagcattagagtcaataaatattttactcatatgttaagcactgtccttaacattgtatacaatgcttcataccgtgaataaaattaaaattaacaatacaaaattgatattttattcagaagtacctccaaagataatattctccttctgagcagagcaggcatttgaaatgtgtgcaatattatgatattgatttaaataagttgaaaccacagtcactttgcaccaatctaatagtagtatattattgctagtttcagatcctttttcttttttttttgaaacagagt

SEQ ID NO: 122614 - DNA, 438 bp, Homo sapiens
atgtaaaacgacgtttttcctatttcgcctcccaccctcatgcaaattttgattttcaactcttccaacccttccgcaccctgaaacaaacctcatctcctttcctccctcttctggctccgcgggttactcgccccgcccccacccttcaktcccttagcaacgcgtcctcggtccgtagaaaccggttgccgagctctgcctacctctgaaaggcctagagagcagagttctcttctcagaggggcttcgcccacagacttttgtcactaaaagcccaggtgactccccagatgcttacggatattaaaaccgattatgctgaaggagtggaaggagagtcaagtaaaagaagaagatcaagtaaaaagaactggggaacagtgactttgtttccccttattgtacctcctttctccttttgtgctttcctggaaa

SEQ ID NO: 122615 - DNA, 438 bp, Homo sapiens
atgtaaaacgacgtttttcctatttcgcctcccaccctcatgcaaattttgattttcaactcttccaacccttccgcaccctgaaacaaacctcatctcctttcctccctcttctggctccgcgggttactcgccccgcccccacccttcagtcccttakcaacgcgtcctcggtccgtagaaaccggttgccgagctctgcctacctctgaaaggcctagagagcagagttctcttctcagaggggcttcgcccacagacttttgtcactaaaagcccaggtgactccccagatgcttacggatattaaaaccgattatgctgaaggagtggaaggagagtcaagtaaaagaagaagatcaagtaaaaagaactggggaacagtgactttgtttccccttattgtacctcctttctccttttgtgctttcctggaaa

SEQ ID NO: 122616 - DNA, 575 bp, Homo sapiens
tactttactatttatcctttgggggtgggagttgggtagagagactatacaatttctttggagggcaaataagcaactttcacagttacagraaaagcttagttgttaatttaagccagaggaaaaaaaaggaagcaaaataaacattgtctctgttaaaaaacaaaatttcagcaaatttagtttttagatctgataggtttttatgtgtgattcatgaatcggcagcatctctttctaaaaaactgatatgtgctctgagtgtcctggaggtgtttaagttactatagtgatatgggctggcttgtataattatatacttagttttggctctactattctaacagaacagttggtttttgtaaggtaggaacaagaaatagaaatttttataaaaactaccagattggttaacattgttacttcaggttattttccttgtaatggttaaagcagaggggatttccttatcatccctgctcaggttgactgggctctttctacgtggttgctgtgaattttctgttttcaggaaaaactagtctgtgggagttttacctgcttccttaaagttt

SEQ ID NO: 122617 - DNA, 575 bp, Homo sapiens
tactttactatttatcctttgggggtgggagttgggtagagagactatacaatttctttggagggcaaataagcaactttcacagttacagaaaaagcttagttgttaatttaagccagaggaaaaaaaaggaagcaaaataaacattgtctctgttaaaaaacaaaatttcagcaaatttagtttttagatctgataggtttttatgtgtgattcatgaatcggcagcatctctttctaaaaaactgatatgtgctctgagtgtcctggaggtgtttaagttactatagtgatatgggctggcttgtataattatatacttagttttggctctactattctaacagaacagttggtttttgtaaggtaggaacaagaaatagaaatttttataaaaactaccagattggttaacattgttacttcaggttattttccttgtaatggttaaagcagaggggrtttccttatcatccctgctcaggttgactgggctctttctacgtggttgctgtgaattttctgttttcaggaaaaactagtctgtgggagttttacctgcttccttaaagttt

SEQ ID NO: 122618 - DNA, 422 bp, Homo sapiens
gaattcaaaaaaagaagtgaccactctgtcatttcttactgaattagcttaacagtttaggattctttaggataagccaatacacraaggccataatatgtgtgtgtgtgtgtgtgtgtgtgtgtgtgtgtgtgtgtgtggtgtgtgtacttggaagcatcttttccactgaatgttttccaggtactatttgcaaattttaccaaactcccaaggtaaactcattgccgaaacctcgacttgtcattgtgaaaacttgacaacctggtgttgtcactggtacccatgtcctagaacttccatgtaagaggatctttgtgccttagtcatttaactcccaggaacatatataagaccagttagccttaggctgaattattcctgtaatgaataaatgtgtcgatgttttaaataatttctga

SEQ ID NO: 122619 - DNA, 590 bp, Homo sapiens
acttgacaacctggtgttgtcactggtacccatgtcctagaacttccatgtaagaggatctttgtgccttagtcatttaactcccaggaacatatataagaccagttagccttargctgaattattcctgtaatgaataaatgtgtcgatgttttaaataatttctgatatacagctcaatcctgtttctctgaattctgttgagatatgaaataagtggtcacaaactctgtgtaatatcagggatcttattcaatcccatggctccaatgactatcttgaccccaatgatgcctgcatttatatcaccagatgggacctctctctcgagtccctgacttgcataaccaatttccctctcaattgtctctccatgaaattggttatacaagtcagtgcccctcaaatgcaacatccaaaatttatcttccccacaatttggcttctcaatccttggtgactttgtaaaccacccagttggtgacaacagaatcctgagaatcatcctcacctggacactctatttttcatcactgtgcactcagatcccagcacagggcctgcctattgaaggaggtcaatacatcttt

SEQ ID NO: 122620 - DNA, 397 bp, Homo sapiens
agtctagtggtgggcagagatccataaagatagtgataaggttttcagagtactctggatccaaatgagggccacycagccaggtttggtgaggtcagggaaagcatctcagtgaaggtgatactagagatgggacatagacaatcaggatttggccaagcagacactggcaagtggaaacagacattttaggaagaaagaacagtaagtccataattaggatagagaagagagtatgcagagaacaacagaccatgattattgaacataattccatgtggctagagacctggtctgattgtttacactgcatcctacagcattttgtattagaatgtaagccctaaaagaggagaggacttgtctgctctggtcactattatattaccagtgcctg

SEQ ID NO: 122621 - DNA, 604 bp, Homo sapiens
gccttggaaagttatgagattttgaggaataagaattaagtgtcaagggagaggaaagtattccaggcaaggggaacatcagagtatgctcakgaacgcagacagggaaagactgataggagaagctagatcaagttatatacagccatggaaggccatgcaaagatcttgtattttattctggaagcaactggaaaacttggtggagctctttcaaaggagtggcccagccaaatttggattttaaaaagatccctctggctgcaatttggagaatgaacttgaaggcaagaatgaaatctagagactagaaatatgaggttagctaaatagtattcaagagccccatatctacaggaagacatacacgagtttgatatctggctttgccatttgagttactcaatttctctaagccttaatttcctcatctctaaaatgggggtaagcatatcttgtgggatagttatgaagattaaatgaggtaaaccataccaaaacacataaaacattacctagtaacctagttaattatccatcctagttgctggtagcatttgttatgatctaaatgtgtccccccaaaattcctgtgttgaaacct

SEQ ID NO: 122622 - DNA, 627 bp, Homo sapiens
tgcacactgtacctggaaaagccacaggcacataatgccaggcctgagagcagccaccagggcttacccctataaatccacagctgtccaatgacttgggagcctaccccttgcaccagtgtgtcttgagtgtgacacatggagtcaaaggagattattttggagcttttagatttaatgactgcctttcagggcttcagacttgcacagggcctgtagcccctttcttttggccaatttacctcttttggaaggggattatttacccaattcctataccctcattgtatcttggaagtaactaacatgtttttgattttacaggcccataggcagaggagactagctttatctcagatgagactttggactttagacttttgagttaagacwttggaggactgttgggaagccattgttgtattttcaaacgtaaaaagttcatgagatttggaaggggccaggggcagaaatgtaaggtttggatctatgttctcagccaaatctcaggttgaattgcaatcccatgttggaggtgaggcctggagggaagtgattgaattaggttgtcagagttctcatgaatattttagtaccatctcacttggtactgtatagtgagtgagt

SEQ ID NO: 122623 - DNA, 499 bp, Homo sapiens
atgaatcaaaatgtttagttaagaacacacagtcgggcatttggacataaataaagatggcaactaaagacactggggactaccagagaagggagagagggagcaaggcaagggctgaaaaactacctatttagtaggtatttagctcactacctgggtgatgggatcatttgtaccccaaagctcagtgtcacgcaatttagttatgtaacacacctgcacatgtacccctgactctaaaagttgaaattataaaacaaagaaaaacagtttcattarcagattgcaagatagtaaaagattaactggattgacaaacaggttagaactatggaaccactactatgttaccatattagtggatataaatccttaaacaagaacaaattttatgtttgctattgattgtgccatgtcatgagagaagagtaaggcaccatcagtggcagttgtgttaccaagattgatgttgatttgttcatccctgggtagaaatgga

SEQ ID NO: 122624 - DNA, 499 bp, Homo sapiens
atgaatcaaaatgtttagttaagaacacacagtcgggcatttggacataaataaagatggcaactaaagacactggggactaccagagaagggagagagggagcaaggcaagggctgaaaaactacctatttagtaggtatttagctcactacctgggtgatgggatcatttgtaccccaaagctcagtgtcacgcaatttagttatgtaacacacctgcacatgtacccctgactctaaaagttgaaattataaaacaaagaaaaacagtttcattagcagattgcaagatagtaaaagattaactggattgayaaacaggttagaactatggaaccactactatgttaccatattagtggatataaatccttaaacaagaacaaattttatgtttgctattgattgtgccatgtcatgagagaagagtaaggcaccatcagtggcagttgtgttaccaagattgatgttgatttgttcatccctgggtagaaatgga

SEQ ID NO: 122625 - DNA, 499 bp, Homo sapiens
atgaatcaaaatgtttagttaagaacacacagtcgggcatttggacataaataaagatggcaactaaagacactggggactaccagagaagggagagagggagcaaggcaagggctgaaaaactacctatttagtaggtatttagctcactacctgggtgatgggatcatttgtaccccaaagctcagtgtcacgcaatttagttatgtaacacacctgcacatgtacccctgactctaaaagttgaaattataaaacaaagaaaaacagtttcattagcagattgcaagatagtaaaagattaactggattgacaaacaggttagaactatggaaccactactatgttaccatattagtggatataaatccttaaacaagaacaaattttatgtttgctattgattgtkccatgtcatgagagaagagtaaggcaccatcagtggcagttgtgttaccaagattgatgttgatttgttcatccctgggtagaaatgga

SEQ ID NO: 122626 - DNA, 538 bp, Homo sapiens
acatctggctgagctttggtagctctattccaagcctggagatgccagctccgtccttggcacagaatgctagtgatttgcacaagggtgagaggccaaaagaggctaataaaatgaagacaggcaagctccatggaattagacaacaggacaaccttgaccactttgaggggcgtggtgggggccgcaggcagagggggtgggttacagagtgactaggagarcagtggaggctgcagcaggagacaagcctggctctgaagacagcgagccctccagggaacatgcggtcaggggaggttctgaaagatgacacactgcagagcgcattggtttgtatgctgatgacaagtatccagtaggaaagcaaatgaacagattttcattctcagaaaggcctgtcctgacctcctgagggtacacagagcacaaggggcaggacagggaggtggatgcatgctcatcgattcatgcaaagtcctcggccaaagtccccctgctccccacctctgggactttgtccttcctcaatttaaga

SEQ ID NO: 122627 - DNA, 434 bp, Homo sapiens
gaattcttgttgagctgaaaagtctttaggctcacatgatggccccagggcccaggccctgtccagccatgcagtaggcatcatccttgggcacaaaggtgagattcttgtggtggcagatgctgtggcagctcttgctttgccaggaaagactgaggaaggccactgtccccattaagtgaacaatagttggccaggtctgagaggttgaacttgggtcacaggcctgtccctgaacccatcactgattggctccaacctgcatcasctattacatgctagaggtggaggcaggaccccactcatacccagaagggcaaagggtggatccctcaacaggattatgggatgtagggtgatagactgctgggcagccagaaagcaaacagatcctctccaatacctcaactgatgaaagcaccaagctaaaatca

SEQ ID NO: 122628 - DNA, 434 bp, Homo sapiens
gaattcttgttgagctgaaaagtctttaggctcacatgatggccccagggcccaggccctgtccagccatgcagtaggcatcatccttgggcacaaaggtgagattcttgtggtggcagatgctgtggcagctcttgctttgccaggaaagactgaggaaggccactgtccccattaagtgaacaatagttggccaggtctgagaggttgaacttgggtcacaggcctgtccctgaacccatcactgattggctccaacctgcatcagctattacatgctagaggtggaggcaggaccccactcatacccagaagggmaaagggtggatccctcaacaggattatgggatgtagggtgatagactgctgggcagccagaaagcaaacagatcctctccaatacctcaactgatgaaagcaccaagctaaaatca

SEQ ID NO: 122629 - DNA, 569 bp, Homo sapiens
ttcagaagtggaagctggattgccctcaggggttgacccgcagggtgttgaatttcaggatatagcagagagagctcagtatgttggattatcccaagctgtgggattttgaaaaacagccaccatacagtccatatctggtcgacaaggagaccatcggagtggaaaggggataatctgggcctcaggcctacggtgtgtacaagtataataatcgcttttatttaaagtgcgaatggattatttagtccatttcagccaggcatttgcatcttgatattttgtcttgatggctaaggtctgttttagatctcttatttttacaatagacaccctagctttattagatgtaggagcaactgttgtgggatctagatctgaggctaccgaagaaggggaagatggcggaataatatatatttttaaaatacctggggtcggggagtcttttctatttatgtcaattcttataccatagaagtgactaagggcaggtctagagttagttaaggtggarggggtgataaagagaaggacagggttatatagataaggctgacagttagaag

SEQ ID NO: 122630 - DNA, 693 bp, Homo sapiens
gactctttgttcctttcttcctgtcttgctatctttctatgtgattaagtgatttttctctagtgggatgctttgattcctttttatcttttgtatatctaccttatgcttttgctttgtggttaccatgatgcttacaaaaagtctcataattatatcgggctattttatgctgataacaacttaattttgattgcataaaaactctgtgcctttactccacatctccctgcatttaaaatttttttatgtcacaatgtatatctttttatagcatatatcccttaaaaaattattgtagctattattttcaatagttttgtcttttaaccttcatgctaaagatataagagattcattctttcatattacagatatatgtggccaccattaacgtatttgaatattatgaatttgactatgtacttactttaacyagtgagttttatgttttcttttttgttactaattagcatcttttttcatcttgcagactccctttagcatttcttgtaagacaggtctggggttaatgaacttcctcagcttttatttggtaaaaacttgatatctccatttctgaggcacagctttggtgaatgcagtatccttattttgtagtttttttcttcagcattttgaatatattaacctgctctttcctggcctgtatggaacctgttgagaactttg

SEQ ID NO: 122631 - DNA, 530 bp, Homo sapiens
ttttcatttgtgccatctgttctctggtaaaactctacctcctgttcttgatcttcttgagcatattaattacaattattttatttatttatttttaaacattttaattttaattttttttgacacagagtcttactgtctcccaggctggagtacagtggagcaatctgggctcactgcaacctccrccttccgggttcaagcgattctgttgtctcagcctcccgagtagctgggattacaagcacatgccatcatgccaggctaattgtttttgtatttctagtagagagggggtttcactgtgtgtgccaggctggccttgaactcccgacttcaagtgatccacctgctcggactcccaaagtgctgtgattagagacatgagccactgcacctgaccacaattattttaaattcaatttttaataactccaaaatatgaatcaactatgaatccctttctattaaattactttccctattcttttgtcttcccttttggttctggtaatttttgattggctgct

SEQ ID NO: 122632 - DNA, 640 bp, Homo sapiens
ggagagatatgtgtgagcacagagagtggaagggcccttggaggaaaggaatgtctagaaagaatcttaaaattgttaggtgactccttctcatgatcctgaccttcagtaaggtgttctgttcttaataatgcagatgttgcttctgtggaaatgcaagaagtggctgttgaaattacatttgttttgctaagaagcaaaacagagactccacctctaagaatgcagaggaggcctccattagttcactggcaacctgagaaagcctttcagcttgcgcaggctkcggaatagaggtgggactttggtgacaattttacttagagtttaaagggcagagatttcatgctgacaactgaattatatacagtttggagtgaataagaacaaatctgatttgtagacaacattattcgaataagtcactgtgaaaactgtactttttttctcaaaccttatgggtaccatttagtaatttattactgtgcattagtagtaatgtggtgacttataaaagttcattttctttatatgcctaatttatgtccatgtcataacctaggtactggggaaaattcactcattatatgctcaaaaatagatttttaaaaagcaacacgggcaaaatctattaaaaaca

SEQ ID NO: 122633 - DNA, 548 bp, Homo sapiens
tgaagaatgaccatgatggagaattgagaaacaagaccatctgcatcaacaggaatttggtaagattttagactatgtcgacctgacctagttgtttgttccaggaaaattttgtctgggagagataaaactataaaccaatatataaattcactgtttgtttcagaactttcctacagaccaatttattggacataatctggtgacctgggcatctggtgacctgggagaactgctcacttatcaaacaagggcttattttttaagatttgcttcaagaccctcactgtgctatgtctactaatcctaaatgaatataccaaaaacttttatccaatcctaatcagttccctgtcttgaaagacctaccttaaatcacctgggttcagacctcaccatcttataacaatctcagtgctgatagccttcttttgagatactgctaaaactttctcaagatggtgttctcctttagtgyagaaattccaaataaagttggttttgctatattaacaagttgttgggtgacatttttggaagtttagcaa

SEQ ID NO: 122634 - DNA, 607 bp, Homo sapiens
ttcaatgcccaaaatttccaaatgaaaaataagaaaaaatgtgcaagctattgttgacaatgtgaagagaggtattgggagcaaaatgaaaagaactttaaaacattgagcattagagggtatttaaaagaaagataacatttgggaaaaggtttgattgagataaagttggttaaaatttgtcctgtatctatcaaattgagtattgattttgtgcatgtatatattgtgctgactgaaattaaaatgataaaacttagagatttggaaactagaataggggaaaaaaagagggctgtagggtgacctaaatttcagttagatactactgactgcaagtagtaaagggactatttagatttcaaaggaaaaataagaaatttagctaggtgaattaatactgtaactgactttaaatcaaaagaatatggattatttacattgtacttatytgaaataggagttatataaacttactcttttattttgattttgtttacgctgtgccactccaaatgttccgactgtgttaggaaagaaaatgattcagagaaactctgattgattaaagcagcattatgagtagtattctgggtgttttagaaac

SEQ ID NO: 122635 - DNA, 571 bp, Homo sapiens
ccccatctctaaaaaaataataaaaagaattagctaggtgtagtggcacacacctgtggtcccagctactcaggaggctgaggtggggaggatcacttgggcctggggaggtccaggctgcaatgagctgtgatcatgtcactgcattccagcctgggtgacagagcaaaactctgtcccaaaaaaaaaaaaaaaaaaaagtgttgtgttttttttttgataaagtttctcytattgcaagtcttggctacaaaattaaaaacatttctttgatatttatattctcccccaatgtaaaacacttccatccctacctttgccaaggctggctgtccatttaaaaaaagatttgagagaaaattacttgtaagtaatttgaaaattgtggccacaccctggtaatacctaattacagccttaggcagactgtacaactgttacgaatagagaacctttgcttctaagaagtatctgttctaggaacccaatcctagtgtggtagaaactgttttagttgtatttttgttttgttttgttcttttgagatagagtctcgctctgctgcctaggc

SEQ ID NO: 122636 - DNA, 562 bp, Homo sapiens
atatctgtcacattgtcctgttctcatgctgaggagcctgagatccctgtgtggggattagacagtggactgttatgggtgtaggtgaattggcttattttgtctgtccctgtctgaatgtattgcaggaaytaaaaaggaccaagaagaggaagaagaccaaggcccaccatgccccaggtaactgagcaattgtgaacatctacttctgtgttgacatctggagactcctggttcagggaaaacagagcgggctgacattatcgattacatcttttcaagcaagcctgaattattcctactaacattgctgttggttttcattgcagtagatatttaggtttccatttcttcctccccttatcatttactaacctactgtaggtggaccagacttcaaaaactgtattctcatggcgactgcatggaaacttgagcacattttatggaaaattattgagcacagtcttttcatgatccctgtatgctgtgtgtcctgagggcactaactcagagtgtcctgttactccctcatcagtgtgtcacctggacaattcactga

SEQ ID NO: 122637 - DNA, 562 bp, Homo sapiens
atatctgtcacattgtcctgttctcatgctgaggagcctgagatccctgtgtggggattagacagtggactgttatgggtgtaggtgaattggcttattttgtctgtccctgtctgaatgtattgcaggaattaaaaaggaccaagaagaggaagaagaccaaggcccaccatgccccaggtaactgagcaattgtgaacakctacttctgtgttgacatctggagactcctggttcagggaaaacagagcgggctgacattatcgattacatcttttcaagcaagcctgaattattcctactaacattgctgttggttttcattgcagtagatatttaggtttccatttcttcctccccttatcatttactaacctactgtaggtggaccagacttcaaaaactgtattctcatggcgactgcatggaaacttgagcacattttatggaaaattattgagcacagtcttttcatgatccctgtatgctgtgtgtcctgagggcactaactcagagtgtcctgttactccctcatcagtgtgtcacctggacaattcactga

SEQ ID NO: 122638 - DNA, 562 bp, Homo sapiens
atatctgtcacattgtcctgttctcatgctgaggagcctgagatccctgtgtggggattagacagtggactgttatgggtgtaggtgaattggcttattttgtctgtccctgtctgaatgtattgcaggaattaaaaaggaccaagaagaggaagaagaccaaggcccaccatgccccaggtaactgagcaattgtgaacatctacttctgtgttgacatctggagactcctggttcagggaaaacagagcgggctgacattatcgattacatcttttcmagcaagcctgaattattcctactaacattgctgttggttttcattgcagtagatatttaggtttccatttcttcctccccttatcatttactaacctactgtaggtggaccagacttcaaaaactgtattctcatggcgactgcatggaaacttgagcacattttatggaaaattattgagcacagtcttttcatgatccctgtatgctgtgtgtcctgagggcactaactcagagtgtcctgttactccctcatcagtgtgtcacctggacaattcactga

SEQ ID NO: 122639 - DNA, 644 bp, Homo sapiens
tcacaactagagcataaaggatgttagtgggttggagatgggtggggcaaatggagctagacagttctaaggtttttacaatattacattgaataatattgaccctaagtagaatgtgaaaagccaaggatgtgtttgtaattctagcataactactaaaaaacgaagcatagagttatacttaaaaaggcaatagattttcttctagggtttttatggtttcaggtcttacatttaartctttaatccattttgatttttgtatatggtaaaagaaaggggtccaggttcattcttctgcatatggataaccagttatcccagcaccatttatttactagggagtcatttccccattgcttgttattgtcgaccttgtcgaagatcagatgattgtaggtgtgcagctttatttctgagttccattgctctatgtatctgtttttgtaccagtaccatgctgttttggttctggacaaatattttatgacaaagtctccaaaagcaattgcaacagaaacaaaaattgacaagtgggacctaattaaactaaagagctttttcacgcaaaagaaactatcaacagaagaaacagtcaaccaacagaatgggagaaaatatttgcaaactatgcgtacaacata

SEQ ID NO: 122640 - DNA, 640 bp, Homo sapiens
ccagcggtcagcccaaggtctagcatgcgaatcagggacgtgatggttctttgggattctagggatctacctggaaaatagatgaaagtaacaaaagttttacataccaatattcaaaactgcatcaaactaccagaaacacttgccactttcaaagatagaccatgctaagtagctccaggtgtgtgccaccatgcctggcaaatttttgtatttttagtagagactgggtttcaccatgttggccaggctggtctcgaactcctgacctcaggtgatccacctgccttgacctgccaaagtgctgggattacaggaatggctcttgactctaactgcaasgtccctaaatcattagatcatttcctgaatatcttatgcttcaggcattggccatcacttgggttaccattgtcataagtcaaaagcctccacaaccaaggcccttaaacatgggatagcctgtgcagggcagaagtataaagaatatagagaagtgaagcacaaaacttgttgcattggccaggaattaaaccagggtctcctatgcaggcggtgagaattctaccactggaccaccaatccggctcttatgtgtggtcctggagaaacaattgaaatacaatactgaaaaagacag

SEQ ID NO: 122641 - DNA, 476 bp, Homo sapiens
gccctgccataaattgtgattatctataccttgtcagttttatctgtgtatatatcttttacagtaatccccacatccaccagagaacctaggttattggcagaatgaggtttgggaattttggtcctctggccagacactatcagatagtactctgattccaccatttttgaaattatatacaacaaattttaagtattgtttattttggagagttcaggttaaaggaaatgaagactattattcagtattatttctgtaattttgtaattttaaccataacataggtttcttatcaaaatgtatggaagccagaaagcagtgaagcaacaatattttctccaaaacaaacaggmcaaactttggcaggagtgacaaatctggcatgcaatggtggcttctatatcagaaatcaagtcttttactttgtgagaggcaggagtttttagttctttgtcttccttttggctgccaga

SEQ ID NO: 122642 - DNA, 587 bp, Homo sapiens
gggaaatgtttaaatagaaatttaaaaatggggctggtggagtcatgttgatgatttcggagttaatcatttctgcktattaaattgtttccagcattttctagctgaagttactgttgttgtcaactactcagcatccaaaattttcacaagaaaacaaggttttttctcttcaaattacagtccaaagagtggcaaacaagaaagatgacagagtcggaagaccttaagatttcttttctttggtcaagaactcattacacaatggatgatacatcttaggtggccctactaaaaagagacacaagaatctagagactatctcactgtcaaccaatccaaggaactttgctttagatggccaaagccagaaacagcaaagtagaagaactactagagctttaagcagttccttagtatttttccttggcttatccaagcctggatactggtccactttcccaaagttggtaaagaggtaatacagcttgggattgattggatattgagacagaaagagagggggagagagagatatctaggtactggagcagcactaggcactcagaagaaggaacacttggagc

SEQ ID NO: 122643 - DNA, 587 bp, Homo sapiens
gggaaatgtttaaatagaaatttaaaaatggggctggtggagtcatgttgatgatttcggagttaatcatttctgcgtattaaattgtttccagcattttctagctgaagttactgttgttgtcaactactcagcatccaaaattttcacaagaaaacaaggttttttctcttcaaattacagtccaaagagtggcaaacaagaaagatgacagagtcsgaagaccttaagatttcttttctttggtcaagaactcattacacaatggatgatacatcttaggtggccctactaaaaagagacacaagaatctagagactatctcactgtcaaccaatccaaggaactttgctttagatggccaaagccagaaacagcaaagtagaagaactactagagctttaagcagttccttagtatttttccttggcttatccaagcctggatactggtccactttcccaaagttggtaaagaggtaatacagcttgggattgattggatattgagacagaaagagagggggagagagagatatctaggtactggagcagcactaggcactcagaagaaggaacacttggagc

SEQ ID NO: 122644 - DNA, 442 bp, Homo sapiens
ttacttggcaagcaagctattgattttggcgggggtgggatggtgtttatcagtcacccctactagcagagatgtgataacactgcagtcagagtagttgagttttaaaattttgacttgccaaccaacagaacattatttatatggtaaaacttagacatcagaggctacaggcactcaggctaaattctgacccattcattggtgacaaatgttaagggatttttgtcccattagccctttttttactcatgatggtactctgaacagaagaatctcctctaacaatttaagaccattcattgtataagcatgtaaatcatcaatctcaatgacacattttcacaactatacactgaattggctcagaggcttcactcataactttaactttttttccccctttactacaarttttacccaaactctgtcagttgaattc

SEQ ID NO: 122645 - DNA, 618 bp, Homo sapiens
acaatcacagtgataagtttaatatacctttcttaggaattgacagatctagttgactgaaacttattgaggatatggagaatttgaagaacacggttaataagattaatcataactataattatgcctataccatcttatattcaaaataggcaagctacattattttcaaattcacatagaatattgacaaacattggccataagtgagatggcacattaaccctcaccaagtgctgaaaagctgaaaccatataggaccagggcatagtttactgatcataaaacaatacaatcatcaaacatgccctccttaagttgtactcttaggaaaaagcacatgggttaaaggggatatcagaataaaaattatacrctctttagaaataacaagagcactataattcagccataccctgagacttcacaagctttggtcccagtaagctagaattcaaatcttagccctatatttaaataactccttgaattgccatttcttatcccaattatctgtcattccactgtgaaatatatttcatggcaaataatattaaaacctacatgaagcagtcaggagaaaatttgtagctttaaaatgcatttaagagaaaataa

SEQ ID NO: 122646 - DNA, 354 bp, Homo sapiens
tgtgtatcctaaagaaatacttagaaatgtacctccaagagacatgtacaaggaagttcccttatgcattgtttgtaaaagtaaaacagtgatgatctcaatgcccactgataggggaaaggtttaattcaccatgattcataaatamagagaaattctatataaagtggaatagatttgtgtggcatggaaggatcgccaaaaagtattttaagattaaaaaaaaagtaaaaaatatgtgcagaattatgcctttttttcatagaaaaaagtctaggggattcaccgctcagcaggccatcctggctatctgggcataaccaccacccagagtgtaatttcttctaaggcaat

SEQ ID NO: 122647 - DNA, 574 bp, Homo sapiens
aaatgttggcgtttaaaagccaccaataagaaaatgaagagataaaccagagactgagaaaaaaaattcaaatcatatatttaatacaggactcatatccagaatatgaaatacacttacaactacgcaacaaaaagataaataacccaattttaaaataggcaaaatatttgaataaccatttcatcaaaaaggtgtaggaatagacaataaaatacatgaaaagatggtcagcatcatcagtcagcagggacatgcaaatcaaaactacagtgagacaccacttcttacccactagaatgctataataaaaaaggacagyaacacctgggggaagtgaaataatgacgtggaaaaactaaaatactcacgcattgttgatgggacatgtagtcacgttggaaaccagtttggcagtatcttaaaatgttgagatatatttaccatatgacctagcactatcacttctagctgtctacccagaagaaaaaaacctatgtccacacaacacatgaatgtgaatattcatagcaactttatccataattgtccataaagtggaaacactcaaata

SEQ ID NO: 122648 - DNA, 574 bp, Homo sapiens
aaatgttggcgtttaaaagccaccaataagaaaatgaagagataaaccagagactgagaaaaaaaattcaaatcatatatttaatacaggactcatatccagaatatgaaatacacttacaactacgcaacaaaaagataaataacccaattttaaaataggcaaaatatttgaataaccatttcatcaaaaaggtgtaggaatagacaataaaatacatgaaaagatggtcagcatcatcagtcagcagggacatgcaaatcaaaactacagtgagacaccacttcttacccactagaatgctataataaaaaaggacagcaacacctgggggaagtgaaataatgacgtggaaaaactaaaatactcacgcattgttgatgggacatgyagtcacgttggaaaccagtttggcagtatcttaaaatgttgagatatatttaccatatgacctagcactatcacttctagctgtctacccagaagaaaaaaacctatgtccacacaacacatgaatgtgaatattcatagcaactttatccataattgtccataaagtggaaacactcaaata

SEQ ID NO: 122649 - DNA, 447 bp, Homo sapiens
atcctgctctgtgccttgggactctaactcctaaggaccacaccacatcaatggactccctttccttcctgcttctgaagagatttgcttgaagagcatcactagcaggaggtatgaagggtaagcaggaagtgaggtggggctgtttcttccctgcctcctcaatccrggtctctgcaggctggctttgtccttgacttgagaccatagttctgtcacagagccttctccacatacctctggtagccactactgccctgtggcacttcagggccatggggtggtaatgccagtcctgctactggccccagggggaactttgtggtttccctatatcctgtctacgcctttagaaataaatagtctctttattaaactcttctcagatgactcaatttaaatgtgctatttgtttcctgccaaatccctaacttcagttagctaagc

SEQ ID NO: 122650 - DNA, 568 bp, Homo sapiens
aattttttatatgcagaaaaartagattatactgctctgtaacttgctcatttcacttaatattatgaagcatgtcattaaatattcttctatgatattattttaatgtcagtattatcataatttatttaatatcctctttttagacttttcaattgtccctaggttttcactatcataaacctctgctgttacagctaaatgtttgcacactctagtaattatttcttcgggataaagttctaaatgcacaagtgctgggctaaacaatgtataacatcgtaagtctttataacataaggttaaaagtggtctccagctgaattttactgatttatactgctattagcagtggaagagatacctttttacaccattactaacaataaaaataaaaatctttgaatagtttaaagtagtagttaatagtgattttataggtggttgtttggggtaatttgggattttttaagaggtgggctaagtgttaaagttaaaagcctatcacactcaagtggctcttcaaaatttcttgtcctctctccccttcctaccccacagaacatag

SEQ ID NO: 122651 - DNA, 580 bp, Homo sapiens
ggtgatgctgagccgtacaagtcagtggatatccagatggaaacacactggcttagccatgccactcacatgtaacagtggggcacttccatgctggttgttaaatatgctctgccttgagaccccctgagtgccctccrgttcctagctgccctggtctttccttgggatctctttcccatgttcagcaatcaaagggttgaatcctgacacttgaggggcctcttggacccacttctgtgcctgtgccatagtgaacatgctgattgtcacccctgcaaatgtgccacttggatagaaggaggcctagccccacttccatgatgggaacaatcccttttccctctgagtaagtcttgattcactgttactgttgagagttctggttccaccattgtaatcttgtggccttgcctctagactgccttatgggtgaggtgtttttaaggaggagggatgtcttggtacttccatatgcaaacccccctgaatgggtctgggataggctgggcctggcggggaactctcctctatggagaattacattgaattcattgatgtgtgctcaccagtgatcact

SEQ ID NO: 122652 - DNA, 603 bp, Homo sapiens
gctgcgggtgggagtggggtttgttgattcatatttgcaggaaaccagagatcagatgcctgcctgatacccaggctttggagaggggggttattcttggcaatgtgggtaacactgagcttctgtgatagatagtattgtacttggggacagtaaaatggagatgtgacttcatggccaatctcagggaggcggaactgtgggaagttgtggctggtcctggttctcaaggtgagggcatgcaggtgcttttcatagaggccattctcatttatgaagggtcattagatattttatyggattggtaggtaccaatcccataaaaccattgggatggttaggcaccgtgcgtccagtgtacttctggataaaacaactggagcatttacatggcgggaaaaagaacaggtaatttgagaggccttcacattcaagagtggccatcaaggtttcttcctctctgcgtcagagaccagtccagggagtgaactcttttctttctgacaggctgctgccctagaaaaatgacgcacttcaaatgaagggtctttcttagctaaattgccctgtgagagcttgaggagccggtgcaaattaaaggcc

SEQ ID NO: 122653 - DNA, 416 bp, Homo sapiens
tcagcaaccaaaatggagtcatggggacgggtgggacctgccgtgatggtcccacctgcattacccccatggcagactagggtggtgtggcctgtctgggaatgtggtctttctctctgagaacccagctatgtggttagtaactcaggattgtggccctgtggttactgtgcactaatcagccctccaaacactggaggagcacaccctggtgtctgcaccgctggctgttttcaagagtgttgttctcttccaccaaacagcctacactcagccctgcactcagattttgctttatttgttgatgaarctggaaagagtccatttgacgtgtaacctggtctccgctaagcggttgttctctattcttgtcaaatgtgaaggcttcccaagcctggttatgcattgttggctgc

SEQ ID NO: 122654 - DNA, 639 bp, Homo sapiens
agtgtcttagacccataaagaaaagcatctggacaaatatttggatttattttagtggttgaaacacacgattgaagaagcttggagaccacagtcttggtaacccagaggggatctgggagctcatcacatccaaaccttcattttagcaataaagcatctgaagcttcccccacatcctaggagaaatgatctggtcaaaagcacagtgtgtcagcagccaaggccaactctctaattcccactccaggggtgttgagaaaatgagaccaatagagtgatraagaattcccctgaaatagctgggcaacttgtaggaacctgtcaaacttcttcctccagcgtagcacaaattttaattggtggtacctagaacagtttccatttttgtgaaaaatggcatctgatcaatttcctcacttccagtagaggccgcctgctgtggctgcatttctactggccagttctcattggccagcatctgccttcttttcctgtggaaatagaacttacgggcaggagaaaggacatatttggtaatgttacgctcctcagcttcctgctccggctgtctcagctgcaaaatgtcaagggaaaaaatatccctccaacttggaaggaattccagacagaccctga

SEQ ID NO: 122655 - DNA, 606 bp, Homo sapiens
ttggttctcactttcagaggttttctatcagaatttgcagttggctaatttctttatgtygatgaaaatccatatggttgcttttatgtgtttgattatggggcctttctgccaaatccaatcccttcattccttacctccccacacctactgccaaatggtggtcagttagtatattttgcccataacttggatatggctatcaaaactaattaatttgcttgaccatttggctacccaagtttctatctcagctctcttccgcattatccaccccaaactatctcagctcttttccccattatctttccaaaactgtgccaggtttgacaaacttattaaccaaaaagaaaatacttaattttaaaaaataactgcatgtctagattggcctcactggtcttggctggagcgttggagaaattttatcttctcctttctccacagagttactttcatttaaaaaaactaagctcttctccagaccatttcctccagtaactccattttgacttttggaagtcaagcaggttgagctctcattctcctctaatcctctcacacactgttccagccaataaatcttgatttcagtttgggttctcc

SEQ ID NO: 122656 - DNA, 606 bp, Homo sapiens
ttggttctcactttcagaggttttctatcagaatttgcagttggctaatttctttatgttgatgaaaatccatatggttgcttttatgtgtttgmttatggggcctttctgccaaatccaatcccttcattccttacctccccacacctactgccaaatggtggtcagttagtatattttgcccataacttggatatggctatcaaaactaattaatttgcttgaccatttggctacccaagtttctatctcagctctcttccgcattatccaccccaaactatctcagctcttttccccattatctttccaaaactgtgccaggtttgacaaacttattaaccaaaaagaaaatacttaattttaaaaaataactgcatgtctagattggcctcactggtcttggctggagcgttggagaaattttatcttctcctttctccacagagttactttcatttaaaaaaactaagctcttctccagaccatttcctccagtaactccattttgacttttggaagtcaagcaggttgagctctcattctcctctaatcctctcacacactgttccagccaataaatcttgatttcagtttgggttctcc

SEQ ID NO: 122657 - DNA, 588 bp, Homo sapiens
accgtatctctctctacctattgttccaatccacttgaaggtttctcaaatacttcaagaacatcttcaaaactgaatgcaggaccttcttcagttttttaaattttttggagagagggargtcttgctatgtttcccaggctggtcttgaattcctggcctcaagtgatcctctcacctttgaagtgttgggattgtagacatgagccactgcacctggcctaatcttcctctcaatctcgcttttcctcctggatttattttccctcaatgaatagcaccatcattcatctggtccctcaaggcagaaagagaaacttggacatcattctgcatttgtttctcctttatactcagttctaggtggttttggcctatatgtaattatctgcaggtagcccccaccctgcaagattacacaggttacagttaaatgcctgtctataacccaaaaatattattatctttcctctatcatagcctgcataatactgttaaatttgtcaatgtgcatatcttctccaaaaccataaactttgtctgtattttctctcttgtatcctctgcaactagcaatgtttatcatat

SEQ ID NO: 122658 - DNA, 635 bp, Homo sapiens
aaggaaagtggtttaatcggctcagttccacaggctcaacaggacgcatgactgggaggcctcaggaaagttaacaatcatgttggaaggtgaaagagaagcaagcacgtcttaccatggcagagccagagagagagagtgagggcgcatgtgccacacactttcaaacaaccagatctcatgagaactcactaacactagatcagcaaggggggatgtccactcccatgattcaatcacctcccaccaggctcctccaccaacacgtggggattgtaattcaagatgagatttgggtggggacacagaaccaaaacatatcaattaacttgctgggaattttggaagttargataaagtagaccttagaccttaaaataactctagaagagtttttggaagacctctgtaatagggtatatgacagactcagattgaaaggatcacttaaatcaagaaatgttaggggcataaataaattaatacagcacatagactgagtttattctttgagccctgttcttccactacttcttaaggtatagtgaatcctacttctcagaggcctcatgaaggcaaatgaaactctttagattcaagtataaaatatcaaatattgttggttaataaattct

SEQ ID NO: 122659 - DNA, 539 bp, Homo sapiens
tgtgggtttttaggaacttatccatttcctctagattttctagtttgtgtaacagaggggttcagatagtctctgaggatctttgtgtttctgtggggatcaactgtaatatcacctttgtcatttctgattgtgcttttttggattttctctctttttttttctttgttaatctatttagtggtctatcaatcttattcatcctttgaaagaaccaacttttggattcgttgttcttttttgtatgaatttctgggtctcaaattcatttatttctgatttaattttagttatttcttttcataagctagctttggagttagtttgttcttgttttcctggttcctgcaggtgtgatgttagatctttattttcagatctttctagctttttaaggtaggcatttagcactatagactgtcctctttacactgcttttgctgcatcccagagattttggtatgttgtgtctctgttttcaattacttcarataatttttttatttctgccttaatatgattgtttacccaaaagtcat

SEQ ID NO: 122660 - DNA, 589 bp, Homo sapiens
catctacctggggaaagtaaaatgaaatctcggctctttctgaaacatctgtgcctatgttgcagctgccaacacaaactttggtgcaatgaaaccacaatgctctccatcaatgccgaacacaaaagcaagacagcactagctcgccaaaagaggttctggggacgctggactccattcccagaaatacacaacttgctygcattgcaaaaatgtctgcctggagtttcctcacagggcttgctctgcctggactccactcctgctgactggagccataagctcagtcctaaacctgaagagccagtggcagctgtcccaggattcacccagttgcaatttggaatgggttgaaaggctgatttttatctcgagtgaatattgccaggtttcctaggatgaaagggaatcacaaggatgagacagccagcagcagaggtttagacacatggtgtggtcatgccccagcatgaaactctaggctccaggttctccggacacaaccctgccctccctgcttaaaactcttagctcagagcacctgggcttttcaaaagatgccttaagcaccaggcactattcccaagcc

SEQ ID NO: 122661 - DNA, 635 bp, Homo sapiens
cagttaagctttgagtgtggctctgacagctcttcagcacctctgtcgtgttataaataggaatttggtggaaatttagtacacatggaacttacaaaagggggttgagcaaggctgatgatggcttctactgcatttaagaaagsatttgtccttacgttaccagaaaagggtcctgatcgagaccccaagagagggttcttggatcttgtgcaaagaagaattcgaggcaagtacataaagtgagagcaagtttattaagaaagtaaaggaataaaagaatggctactctgtaggcagagcagcccttagggttgctggttggctatttttagagttattttttgattatacatgaaacaagggtggattatttgtgagttttctgagaaagagacaggcaattcctggaactgagggtttctcccctttttagaccacatagggtaattttctgacctgccatggcatttgtaaactgtcatggtgctggtgggagtgtaattagcatataatgagcagtgaggaagaccagatgtcactttcatcgccatcttggttttggtgagttttggccagcttcttcaccacatcattttctcagcaaagtctttatgacctgtaccttttgccaa

SEQ ID NO: 122662 - DNA, 635 bp, Homo sapiens
cagttaagctttgagtgtggctctgacagctcttcagcacctctgtcgtgttataaataggaatttggtggaaatttagtacacatggaacttacaaaagggggttgagcaaggctgatgatggcttctactgcatttaagaaagcatttgtccttacgttaccagaaaagggtcctgatcgagaccccaagagagggttcttggatcttgtgcaaagaagaattcgaggcaagtacataaagtgagagcaagtttattaagaaagtaaaggaataaaagaatggctactctgtaggcagagcagcccttagggttgctggttggctatttttagagttattttttgattatayatgaaacaagggtggattatttgtgagttttctgagaaagagacaggcaattcctggaactgagggtttctcccctttttagaccacatagggtaattttctgacctgccatggcatttgtaaactgtcatggtgctggtgggagtgtaattagcatataatgagcagtgaggaagaccagatgtcactttcatcgccatcttggttttggtgagttttggccagcttcttcaccacatcattttctcagcaaagtctttatgacctgtaccttttgccaa

SEQ ID NO: 122663 - DNA, 583 bp, Homo sapiens
gactattctagataaagacgatctctttttattgttttggagacagggtctcattctgtcacctaggctgcagtgtagtggcatgatctcagctcacggaaaccttcacctcctcctgggttcaaacgattctcatgcctcagcctcctgagttgctgggattacaggcacgtaccaccatgcctggctaatttttgtgttttcagtagagacagggttccaccatgttggacaggctggtctcgaaatcctgaccccaactgatccaccagcctcggcctcccaaagtactgggattacaggtatgagccactgtgctctgccaataaagatgatttccaccatcacctcatgcaactcactgtggccatatgactacgttctagtcaatgggatgtaaaaagaaatggtatctttaacttctgggaagccctttcccactccctctttttttgctagctgaaataagaatgtgatggctagagcttggacagtcatcttagaccatgaaatggaaactgcttcargagaaatatggagcagtgagactgaggaaacccagaacttgtacttacctgggact

SEQ ID NO: 122664 - DNA, 569 bp, Homo sapiens
gaattcctacccatctctctggtctcagctcctgatccacctcccctccaggatggcagctgctggtgtttgcttcctgcaaaacccttcttggccgggcgcagtgactcatttctataatcccagcactttgggaggctgaggtgggcagatcacctgaggtcaggagttcgagactagcctgaccaacatggtaaaaccctgtctttactaaaaatacaaaaattaggctgggtgtggtggctcacacttgtaatcccagcactttgggaggccaaggtgggtggatcacctgacgtcaggagtttgagaccagcctgggcaaccatggccaacatggtgaaaccccgtctctaccaaaaatacaaaaattaggccaggcatattggctcatggctgtaatcccaacactttgggaggctgaggtgggagaatcacctgaggtcaggagttggtggcacgagtctgtaatctcagctactcgggaggctgaagcaggaggattgcttgaacccaggaggcagaggytgcagtgagcggagatcgcgccactgcactccagcctgggc

SEQ ID NO: 122665 - DNA, 607 bp, Homo sapiens
tttcatgaaagaaagaatccatttatgtggtaaactttgctgttgtcttattttagataaattgctacagcttatcccagccttcagcaaccaccactgtgatcagtaagcaacaatcaacatctaagaaagaccctccaycaacaggaagattatgactcattgaagtctctcatgattatttgtattgcttagcaataagatactctgaaattaagtatgtactttttttaatcataatgctattgcaaactcaatacactgcagtagaatgtaaacataacttttatatgcgctaggaaagaagagtcaagccatctctcttcactgatgatataattccatacctggaaaactttaaagagtctgcgaaaaggctcccagaactaacagctttagtaaagtttcaaggtacaaaatcagcagcatttcttacaccaataatgcttaggttaagagtcaaattaggaacacaatcccatttacaagagtcacacaaaatttaaatgcctagaaatatactgaactaagaaggtaaaagatctctacaagaggaactatgaaatactgctgaaagaactcagaaataccacaaataagtggaaaa

SEQ ID NO: 122666 - DNA, 581 bp, Homo sapiens
tttggaagataaagagaaaaaagacaaagggggtactatctaaaaaagtcaaacagggataattagaaaaaagcaaaatgtttggattgtcatgtgaaccctgaaaggctacttgggcagcctgtactgtgtgtttcctgccccagaatatggcctctgagtcacggctggagtggcacaagcacttccagccaatcctcccatctgccctgcataggcctcctgtgcttgtcttcccagagccacttgaggctttcaatgattcttttgaccctcacktctcatactggcttcataattttctgctgcatggctctgaagaagccagatatagtcctttgttgccatggtctgaatgtttgtgtattagtctgttctcatgctgctaggaagcaatacctgagactgggacatttataaaggaaagaggcttaattgactcacagttcagcatgactggggaggtctcaagaaacttacaatcatggtggaagggtaagctaacacgtccttcttcacatggcagctacaaggagaagtgatgaacaacggggaaagagccccttgtaaaaccatcagat

SEQ ID NO: 122667 - DNA, 581 bp, Homo sapiens
tttggaagataaagagaaaaaagacaaagggggtactatctaaaaaagtcaaacagggataattagaaaaaagcaaaatgtttggattgtcatgtgaaccctgaaaggctacttgggcagcctgtactgtgtgtttcctgccccagaatatggcctctgagtcacggctggagtggcacaagcacttccagccaatcctcccatctgccctgcataggcctcctgtgcttgtcttcccagagccacttgaggctttcaatgattcttttgaccctcacgtctcatactggcttcataattttctgctgcatggctctgaagaagccagatatagtcctttgttgccatggtctgaatgtttgtgtattagtctgttctcatgctgctaggaagcaatacctgagactgggacatttataaaggaaagaggcttaattgaytcacagttcagcatgactggggaggtctcaagaaacttacaatcatggtggaagggtaagctaacacgtccttcttcacatggcagctacaaggagaagtgatgaacaacggggaaagagccccttgtaaaaccatcagat

SEQ ID NO: 122668 - DNA, 581 bp, Homo sapiens
tttggaagataaagagaaaaaagacaaagggggtactatctaaaaaagtcaaacagggataattagaaaaaagcaaaatgtttggattgtcatgtgaaccctgaaaggctacttgggcagcctgtactgtgtgtttcctgccccagaatatggcctctgagtcacggctggagtggcacaagcacttccagccaatcctcccatctgccctgcataggcctcctgtgcttgtcttcccagagccacttgaggctttcaatgattcttttgaccctcacgtctcatactggcttcataattttctgctgcatggctctgaagaagccagatatagtcctttgttgccatggtctgaatgtttgtgtattagtctgttctcatgctgctaggaagcaatacctgagactgggacatttataaaggaaagaggcttaattgactcacagttcagcatgactggggaggtctcaagaaacttacaatcatggtggaagggkaagctaacacgtccttcttcacatggcagctacaaggagaagtgatgaacaacggggaaagagccccttgtaaaaccatcagat

SEQ ID NO: 122669 - DNA, 544 bp, Homo sapiens
ataattattatatcatcctgataagccaaaaatacatcctcatgtacttactgtttcaaaatattcttggcataaaaaagcaaaaaaaaaaaaaaaacccgctaaaccctaaacataaacatataatataatatgaatgtaatgtgtaatatatgagatcgayttagcaaacaaaattgtgaataaacatgtaacttaaaatcatatatacttgctgtctagagaagaccattgatatggtttggctgtgtctataccaaaatatcatcttgaattcccatgtgttgtgggagggacccggtgggaggtaattgaatcacgggggcaggtctttcctgtgctgttctcatgatagtgaagaagtctcacgagatccgatgattataaaaaggggagtttccctgcacaagcactcctctctttgcctgccaccatccaagtaagatgtgacttgctcctccttgccttctgccatgattatgaggcttcccccagccaagtggaactgtaagtccaattaaacctctttcttttgtaaattgcc

SEQ ID NO: 122670 - DNA, 635 bp, Homo sapiens
caagacacaattacagcctagccaatttttaatctttctgtatgtgcccttctgttttgagaataagtaaaagcacttttctattttttcctctaccgtttttttcaaataaagatagttataaaacatttaaaaaatatattttttgttagatattaagaaattaattaagagtctcatgtcctaaaatttttatacagttagtaasaattatttaaaaagtagtagggcacaaagcaccctaaatatctttattgtataatttcttttggaaaatggagcaattatacttgcttaaactttcccaatttcatataattttattactctttttttgtcaaccatagaatgactctaacgttggaaaagttagttgggcatgacagataaatctttccatgaaattgacctttctaaaactatttcattaagtgtgatgctttcccaaagatatctacaggaaatatacataatagtgaaatgttgaatgcattctttttagatcacttataagtcaatgttgttgcaccatttatacttacattacaatggagacaatggagatcttagttattacagtaagacattagtgggaaatgtggtttaggattctaaaaagataaagaagaaactag

SEQ ID NO: 122671 - DNA, 635 bp, Homo sapiens
caagacacaattacagcctagccaatttttaatctttctgtatgtgcccttctgttttgagaataagtaaaagcacttttctattttttcctctaccgtttttttcaaataaagatagttataaaacatttaaaaaatatattttttgttagatattaagaaattaattaagagtctcatgtcctaaaatttttatacagttagtaagaattatttaaaaagtagtagggcacaaagcaccctaaatatctttattgtataatttcttttggaaaatggagcaattatacttgcttaaactttcccaatttcatataattttattactctttttttgtcaaccatagaatgactctaacgttggaaaagttagttgggcatgacagataaatctttccatgaaattgacctttctaaaactatttcattaagtgtgatgctttcccaaagatatctacaggaaatatacataatagtgaaatgttgaatgcattctttttagatcacttataagtcaatgttgttgcaccatttatacttacattacaatggagacaatggagatcttagttattacrgtaagacattagtgggaaatgtggtttaggattctaaaaagataaagaagaaactag

SEQ ID NO: 122672 - DNA, 666 bp, Homo sapiens
taacccttttctcaaatggacaggccagaagccctgtgttatgaccatgtgggctaaacaattatgtccctttgcccctgtgttcttttttatttttcagttttatgaattttttatttttgtgggtatataggaggtatatatatttttggagtacatgagtactacaagcatgccaygtgaaataagcaaatcatggagaatggggtatccatcccctcaagcatttatcctttgaattacaaacaattaaattatactctttattttaaaatgtacaattaagtattattgactatagtaaccctgttgttctatcaaatagtaggtcttattcactctttctgtttttttgtacccaagttcctgtattattaaataaataacttacaagtggaaaccatgaagacacaaaaaacaagcagtgtgtagatcaaggtttggtaactggtgtgaaggacaggggtggctgcttttgaaagtgacacatctattcatgcataggcattcttgtaatggagaactcctttgtttctgccactcttgagtcctagtcaaagctgtcagtccttgttatgtgttcataggtggcatttggtgatttgggaggtgattcgtcgatgttagggcagcgccctgctttcaccgttctgcttgacaatatgt

SEQ ID NO: 122673 - DNA, 588 bp, Homo sapiens
ggcatgaactgtaatttcccaatctgtgacaactccccttcctcttacagtctccctgggcaatatctattctttggtccttctttcatgcaatactttaaaatgtaaatataaaagacaatgttgtttatcacagtttttaataggaactaaaaccccacacaaaaatatagatatgtgaacaagtaaaattcaggtatcaaccagtaaggggaactccaagaggcagtttcagggtgcacattccaacaggcccttgtgtactcaccaggcctacaaacagccctactgtgtacaagacctcaaagggataaagatrttcatgtacctagaataagccttagtgacccatatgctagcactgctaagcatcactcaaagactctatctgtgataattcagcattgccttccaagtatggtctgacttcctcttctatgaccctggaatctgtttttgcaattgccagtgatgatgaataagtgcataggctacagtgcatgtttaaggcatgctttaaaaagcacatcattatttcaaaaattttaaagattcctaaaagagcatcctgtgtgagtaaatccccat

SEQ ID NO: 122674 - DNA, 553 bp, Homo sapiens
gtccacaatgatacttcaacaaaaaaagtaaggaaaaggaaaggtggaagatgagtatgttaacttcctcatttttcatagcaaggagtacacaggtactgtctcaagcaatcatttcaagaagtagatatctcaatattttgtttaaaatcaagtggccaatgatctacagattcaatgaaatccctaccaaaatycccagttgttgttgttttttttttgcagaaacagacaagctgatcgtaaaatttatatggaaattcaagagacttgcaataaccaaaacaatattgaaaaagaacaaaagttggagaacttgtatttcctgatttcaaatactatgaagctatagtaattagtgtggtactggcgtaagggcagatatatattatagttcaatggtatagaaatgagagtccagaaataagcactcacatttatggtcaattaatttccaaaaagggttaagatgattaaacagaggaaaacagccttaacaaatagtgccggcacaactcaatatccacgtgcaaaagaatgaagctggaccctt

SEQ ID NO: 122675 - DNA, 365 bp, Homo sapiens
gtagctggccctcccattgtctccagctatcagcagaaaggataactccttcctgmctctagtcttccctcctctgtcttctgccctgttctggctcagtcctgggcttttatggatgtcagaggggaggaagtgtatgcccattggtccatgggcagccatgggcgggcccaggaaaaagcaccatgagttttgcctccaatctgcaggactggcagcctagcctgcaggtggggcttcactggggacccattcccttccacccaggagcctgtctgcctcccacagccatccatggcacccaggcttctggcatcaaagggcacttgcaggccagtgcccagccaccctcggaccccctcagc

SEQ ID NO: 122676 - DNA, 365 bp, Homo sapiens
gtagctggccctcccattgtctccagctatcagcagaaaggataactccttcctgcctctagtcttccctcctctgtcttctgccctgttctggctcagtcctgggcttttatkgatgtcagaggggaggaagtgtatgcccattggtccatgggcagccatgggcgggcccaggaaaaagcaccatgagttttgcctccaatctgcaggactggcagcctagcctgcaggtggggcttcactggggacccattcccttccacccaggagcctgtctgcctcccacagccatccatggcacccaggcttctggcatcaaagggcacttgcaggccagtgcccagccaccctcggaccccctcagc

SEQ ID NO: 122677 - DNA, 365 bp, Homo sapiens
gtagctggccctcccattgtctccagctatcagcagaaaggataactccttcctgcctctagtcttccctcctctgtcttctgccctgttctggctcagtcctgggcttttatggatgtcagaggggaggaagtgtatgcccattggtccatgggcagccatgggcgggcccaggaaaaagcaccatgagttttgcctccaatctgcaggactggcagcctagcctgcaggtggggcttcactggggaccmattcccttccacccaggagcctgtctgcctcccacagccatccatggcacccaggcttctggcatcaaagggcacttgcaggccagtgcccagccaccctcggaccccctcagc

SEQ ID NO: 122678 - DNA, 631 bp, Homo sapiens
ggcttaaacagcatatacttgtttctcacagttgtgggaattcaatgattaaaatctggaccagcagagccagtgtctggtgaaggccctcttactggtttgcaggtgttcttgttgtatcttcacatggctgagagaagagggctctagtcttctgctcttcttattaggatgctaaccccattgtgggaactccaacctcatcaaaatcaaattacatcccaaagtgcartgcacagcatctaatctaatcaaatcagttgtcccttgaataaaattctagctcctataacaagacttcaaattatgacttggttgttgccaaaactgtctatctggatttgctagaaatcaaatatacttgaatatttcctctaaagattttctcattcctaccctattgtttatatttacagaattcttaaataattacatatacaaggcttctattagctctgacaagagcttctattagctttgactatcgcaagcagctttatagcactgtaggtaaaagcatgtgctttgaaatcatacaataaatttattaaatgctaagcactttatattcactatttaattttatcatcttaatcaccttcattattaactccattaaaccctatttgtt

SEQ ID NO: 122679 - DNA, 631 bp, Homo sapiens
ggcttaaacagcatatacttgtttctcacagttgtgggaattcaatgattaaaatctggaccagcagagccagtgtctggtgaaggccctcttactggtttgcaggtgttcttgttgtatcttcacatggctgagagaagagggctctagtcttctgctcttcttattaggatgctaaccccattgtgggaactccaacctcatcaaaatcaaattacatcccaaagtgcagtgcacagcatctaatctaatcaaatcagttgtcccttgaataaaattctagctcctataacaagacttcaaattatgacttggttgttgccaaaactgtctatctggatttgctagaaatcaaatatacttgaatatttcctctaaagattttctyattcctaccctattgtttatatttacagaattcttaaataattacatatacaaggcttctattagctctgacaagagcttctattagctttgactatcgcaagcagctttatagcactgtaggtaaaagcatgtgctttgaaatcatacaataaatttattaaatgctaagcactttatattcactatttaattttatcatcttaatcaccttcattattaactccattaaaccctatttgtt

SEQ ID NO: 122680 - DNA, 655 bp, Homo sapiens
aatgggctattaattattcattgttactgttgataataatagttatcatgcattgagatccaactgagcatwggccaccctacaaggtaaaaattatgtctgttttacagatgaagaaactgagtttcacatagattaggtaaattacctaaagccatccagttaataagtgacagaacagagctcttgttcaaacactgggcccttgactccaaagcctgcagttcccagcacccccagggtcaccaaaacctggcctctcctgggggaggtcagggctgaggccaacaagcccaagtcacaccctttaccacctgggacatgattttctccaggtgagcaatgttttcttaaaagaacaggaggacagtaaataattaactaagacagtttctccctccctgaagccaaggtagaacctcccccctacagccaacccccactctcctcactcctgtttcctctgggctcaagtttgtggccattaaatagaagaggagaaagtttgaaccaggcatgaaatatttatcaggtaattacaatatgcagattctgttcctaggggtgatttatctttttggaaatataggaaaaggtcctggaaacttgtatcctaattgcttggcctattattgtagcaaccaggtagaaactc

SEQ ID NO: 122681 - DNA, 325 bp, Homo sapiens
gatatgacttgaaacctgtgcttctcgattgagaggctggtgggggaaagagagrtcaggaaaagggtccagatgtgtgttcaggggtccccagagagttgagggaaactagcatctccttagggtaaggaagacaaaatgaccattcctgatcccagattgcttagatactgtgcctgggagtcctcccacctcaccttaattcctgtctccacacacagcttggccaagtttcttcccctgttggagtctcactcccaatccgctactctatctctccaggagcctacaaagcactttgaaatccgaagtttgtgggaagtgg

SEQ ID NO: 122682 - DNA, 538 bp, Homo sapiens
gtgtctgctcttttgcaattggaagaaaagaaagaatattttattttttgactctttagattttcttcactaacagtatttccaaggctaagtaagggggttgcaagtaacaccaagagaaaaaagcagtcttgagcaactttttaaaaatggtcttaaaatatggaaaatgaagccaggtgtggtggctcactcttgtgatcccagcactttgggagcctgaggtgggaggattgcttgaggccaaaagtttgagaccagcctgggcagcatagcaagatccccatcattgcaaaaaacaatttttaaaaaaaattagctggatatggtggtgcatgccttagagtcccagttacttgggaggctgaggtaggaggagttcttgagcccaggagttcaagtctgaagtgagctatcattgcaccactgtcctcaagcctgggcaacaaagtgagacctctgcctgtctctctctctctctctctctctctctctctmtatatatatatatatatatacacacacatataaatatata

SEQ ID NO: 122683 - DNA, 618 bp, Homo sapiens
tttgtacatttcagcagagagccagctccacttccaaaagacagagagtgaccaaatgggcctttgagcagccctgggcctacccatcaaggctgaaatccatttgtcttgggttttggcaaggcactctggcaaaagcagcggccaggcagccagaaacacaaaccagaagaccatgctttgagacaggcttcagaggggccgactgagctctagcgcaatgtttaataaaagataaagagctcattgcagtactatttataatagcaacaaaaacttggatgatcagcataagattggctaaatacatttgtctatatctctacagtgaaaattagattttcaaagaatatctaacaacttagagaaatacttattcagttgacacttgaaccatgcaggagtcagagacactgatccccaygcagtcaaaaattttcacagaactctggacttccccaaaacattaactaatagcctaatactgactaacaccttactaatagccgagtaatacatatttttgtatgttgtgtgtgttatatgctatattcttacaataaagtaagttagagaaaagaaactgttattaagaaaatcatgaggaagagaaaatat

SEQ ID NO: 122684 - DNA, 439 bp, Homo sapiens
gtgtcatcaagtctttaaaatttaattcagaatatggcaagtttcagtaagaaccaccctccgaagtttgcttttaaggaccaagggtaggcaggactgtggagtaagaagctacaaagctatgaacgtaaaygtataataataggtgctaacgaccacacacgtgctacagataccgtcttttggagagcaacccttcatttggagaagcgtaagcacacatgctttgtgaaagcttcattgtacacagtaaaatcagcaggttgcccggctcttgtaatgcaaatgaggaatacacgggtgaatgttttccgttctttacctagaagtggaagggagtgcaaacccaagttagacggtctcttcaccattactctgtttctgaaatcatctatttacaagtagggtaatatatctgtctgataaaggaagagaattc

SEQ ID NO: 122685 - DNA, 616 bp, Homo sapiens
tgttactttgtcctcagccagcacctaccaggaaatattcagaatagttgcacacagaacaaatatcacttgtctgatgtcactatatagtgtccatgcagtcagaagaggtgtcttaaatcggtgacctcagcacttggccgtggccagcccttcagctccttcccatcttcaaggcaagctgatcacagcaacatggctgtctgcttcacctgaccacagaagagggatggacccaagagactgaatagaggaggatggccaggctttctgagcagacacgtgggggccagtaaggggtgactgacgcccagaggtcaacaaagaaaaaaaaatgttaaaagtcataagaaaggtttttttaaatcttttatttatctttagaaagayaaataaaaatacctagaaatatgaggtagttaactaattatagcagcaaacagaactgtaaacctcaagagtcctttaaaatacatttctctactataaaacaataataactgatgctcataaaaaggtaaaatatcagatgcacaacactatatctaagaagagaaggcatcacacatgttttaaaggttgatgtctgaactaactgaaatcactaaaaacaggt

SEQ ID NO: 122686 - DNA, 616 bp, Homo sapiens
tgttactttgtcctcagccagcacctaccaggaaatattcagaatagttgcacacagaacaaatatcacttgtctgatgtcactatatagtgtccatgcagtcagaagaggtgtcttaaatcggtgacctcagcacttggccgtggccagcccttcagctccttcccatcttcaaggcaagctgatcacagcaacatggctgtctgcttcacctgaccacagaagagggatggacccaagagactgaatagaggaggatggccaggctttctgagcagacacgtgggggccagtaaggggtgactgacgcccagaggtcaacaaagaaaaaaaaatgttaaaagtcataagaaaggtttttttaaatcttttatttatctttagaaagacaaataaaaatacctagaaatatgaggtagttaactaattatagcagcaaacagaactgtaaacctcaagagtcctttaaaatacatttctctactataaaacaataataactgatgctcataaaaaggtaaaatatcagatgcacaacactatatctaagaagagaaggcatcrcacatgttttaaaggttgatgtctgaactaactgaaatcactaaaaacaggt

SEQ ID NO: 122687 - DNA, 437 bp, Homo sapiens
tgcttccaggaaacctgacccaagacagaggttgttgcaagggcagaggccacaggcatctacaccagcctctggcgttcagtctgtgagcggcccaacgctgcccatgtgctcctccttaaagcctactcaaccctggggtctacaggcaaattcctcgcgggcgccttccctkgtcctggctgccgctctgcttcctttgcaagctccttctcgcacccttgcgctggctccctccagagggctccatcccctgcccactgtgccttcgtgggtggtgcccagatctctgtctcctctgccctggacccctctgcccctgactggcagatctatagagttcagtgcccctggaggctccacgtccatcccacagggacccggactctcatcttcctcctgagcgtgctctccctggagacctggcattggaattc

SEQ ID NO: 122688 - DNA, 558 bp, Homo sapiens
caacatgggattttggagctagagttttaaatcccagtttactagtactaagtatctagataatgttcttatctaagtgtgtacaatgcagccaatagctactactctgcctcctgctttgggagggcatggtgatactgatgagactatagttctctygctacaagacctgccagtaaattctccactcacaggtgaattctggactcacttaccgctcagacttgggctgacgtttctcaattagggccccagatgtccctgtgcccgtgggatctcagattatccctagactgtaccacagatatccactgacatgaattatcacagtctttctaaccagctgaggttggagcctgaccttgaatttattctctctggacaggactctcactcccatctgcctcttccaagcagtccttatatgaatgagaccttgagcctcattgcacgtgaactgccatctttattctcacttcaatctatttagccttccttgagctagataccagcaccatcttacctatgaacccagactctactcaaatatgtcactca

SEQ ID NO: 122689 - DNA, 560 bp, Homo sapiens
cttacctatgaacccagactctactcaaatatgtcactcacgattcggctggatgctctgaacaacaaagttagaccccactgatgttcattaccctgaaatggatgygatgattggggttgtctcctgtcaccctttggagtccagccctacatcaagtctgttcccgtaaccccacctctgacaatcactaatagacctttgagtctctttctgtagtcgagaggtcctagtacatctcatgagaaggtccccgagggttaggccacggacattgtttaaaaatatataaattataaagtactctacaaggacttagtgttaccatcataattatctcatgatgatccagttcttgctgccagagatgctgctatgtagaggaatgatttgagatggagactggacttctaagtgccttccatgtttaatcatccgaagtcctgcagatgcactgaattccattttaaaattaacagaattaggcaaattaggcaaaatcctattttctacatgaatttcaagtattgtttgatttaaacctttctcttttcaccaca

SEQ ID NO: 122690 - DNA, 605 bp, Homo sapiens
ccatctgagaaagtcattagtgagagaagagcttttataagctcttccttgaaaatggggcatgcttgctgtttttggaaaatatcagcctggaagagataaagttccgtagagggcaaagctatcaaagccaaaatcacacgattctttgatttcagaggcccttgcttagaatttggcactgccccacctccatttccccctctattcccatggatcaaccaaagccataacacagccctgggagcccagagaggactatagtaaaagtagtatttattaaatgtgagttatgagccaggaactgtgcaaggtgctttagagacattagttcctccagaggaatttcagaagccacaactaggttagtgtaaaaacartttttttaagggtttgagtagattcttgtttaaactaacacaagcctaaatccagattaataaatatacttttaaaaaatgtcaacacagccatggagttaccgtcttactgacacactcttcattgcctctttccttcttcacaaggctgtgatttccttggagcatggcctcttaaaggcaagtgatttatctgcatctacttatccctatacctagaggaat

SEQ ID NO: 122691 - DNA, 605 bp, Homo sapiens
ccatctgagaaagtcattagtgagagaagagcttttataagctcttccttgaaaatggggcatgcttgctgtttttggaaaatatcagcctggaagagataaagttccgtagagggcaaagctatcaaagccaaaatcacacgattctttgatttcagaggcccttgcttagaatttggcactgccccacctccatttccccctctattcccatggatcaaccaaagccataacacagccctgggagcccagagaggactatagtaaaagtagtatttattaaatgtgagttatgagccaggaactgtgcaaggtgctttagagacattagttcctccagaggaatttcagaagccacaactaggttagtgtaaaaacagtttttttaagggtttgagtagattcttrtttaaactaacacaagcctaaatccagattaataaatatacttttaaaaaatgtcaacacagccatggagttaccgtcttactgacacactcttcattgcctctttccttcttcacaaggctgtgatttccttggagcatggcctcttaaaggcaagtgatttatctgcatctacttatccctatacctagaggaat

SEQ ID NO: 122692 - DNA, 646 bp, Homo sapiens
acgattaatgaatgtgtttgtttacttaatttctgtctcctccactagactataagttccagaagggcagacaacatttttcttatgcaacatatatttctagggcctagcacagtgtcttgtccataatttttgaatcagtgaatttattcctgctcaaactcccttctccaggctccccatcaaacttcatggtggcaccgccatgtccaatccactctcccagggaatgcaattccatcgtcttcaaattgttgtattctggcccagcacagtggctcacacctgtaatcccagcactttgggaggccaaggtgggtggatcaccagaggtcaggagcttgagaccagcctggcaaacatggcaaaatcccgcctctactaaaaatataaaaattagctggtgtgatggcttgtgcctgtagtttcagctacttgggaggctgaggcaggagaatcrcttgaacctgagaggtgcaggttgcagtgagctgagattgtgccagtgcactccagcatgggctacggagtgagactccatcaaaataaaataaaataaaataaagttatgtttagccgctttctctccatcttttatgctaccaccttaattcagacactcgtcattccacacttacacaactac

SEQ ID NO: 122693 - DNA, 646 bp, Homo sapiens
acgattaatgaatgtgtttgtttacttaatttctgtctcctccactagactataagttccagaagggcagacaacatttttcttatgcaacatatatttctagggcctagcacagtgtcttgtccataatttttgaatcagtgaatttattcctgctcaaactcccttctccaggctccccatcaaacttcatggtggcaccgccatgtccaatccactctcccagggaatgcaattccatcgtcttcaaattgttgtattctggcccagcacagtggctcacacctgtaatcccagcactttgggaggccaaggtgggtggatcaccagaggtcaggagcttgagaccagcctggcaaacatggcaaaatcccgcctctactaaaaatataaaaattagctggtgtgatggcttgtgcctgtagtttcagctacttgggaggctgaggcaggagaatcacttgaacctgagaggtgcagrttgcagtgagctgagattgtgccagtgcactccagcatgggctacggagtgagactccatcaaaataaaataaaataaaataaagttatgtttagccgctttctctccatcttttatgctaccaccttaattcagacactcgtcattccacacttacacaactac

SEQ ID NO: 122694 - DNA, 470 bp, Homo sapiens
ttgagttgaatattcagtagtttctggagttgctgagtgaaatttcacctaatttagaatttccatagctcatgctctgaaacctcagtaatcgggacatgcaacttttagaaaaccagaattattttgcttaaaaaatgttttgctttctggtcaatttacaggtgttaactagtggtccctagttgttttaaaatagaaaagaaggaaatagtgctctctccatccccacgtgtcccyacccagtcatgcaaggtacctctccagtctggttaccatagcctctcaggcaaaaggaggcaaagcctgaggcaccagagaagtctgtaaggagcaaggccaaactgtccaggcagtgaggacagagattgaccttggatatgggaatgcttccttcttagcaatcaaagccaaagggtatttcccacctcagttgaacaccatgttgcacgtcctgggaaagacagcct

SEQ ID NO: 122695 - DNA, 487 bp, Homo sapiens
gaattctgcatttctggcaagctctctggtgatgctgagtccacagatctgcaggccacacttcaaggagcaaggcacttcagtcatttattagttacagctatgcctaagaactgggcaaaggactggaccaggtagtttaaaaatgtccaagagtaccatgtttcaggttcagctacttggacagcgttaggaagtaggagttgttttaggtgtgtgggtcaatggaaacatagtggtcacccagccactagagctagctctttctttcaaacattttcttcttgtctttggttatgatttaggctggaaggagtggggtgcttcacatttactgataccttgcaaaaaatatttctagatcragtcaataggttattctgagaataaaggaatgaatagaactaaggatgagggagagaggaagcaagaaaggcaggaggtgcattttaagtctgtgatgggcagtctgtggtgagtagccatt

SEQ ID NO: 122696 - DNA, 560 bp, Homo sapiens
ccaccactcttttgtgttactgttcatagtgtgaagtcagttcgtttggtcagtccccagtgtctgcctaggcctttagtgtctctttcttgagttccaatttgacaatcaggtattctattgcctctatgatcacaaaattctagccaataaataactcttgctaatatattaaaggattatagtggattttttaacatttctaggcatcatctttgtcattagactcttctggtgacagtgttgcagcttaaatgagtaattttaatgaatgtaagtaatttgactgcatggtaaattatgtgtgtgtgtgtgtgtatgtgtatgtgtgtgtgtgtgtgtgagaragagagagacagagagagacagagagaaagagagaggaattctctttcagatagagcttttgtttcctgtgaaatcctacttcctatgaagctgtctgaagtctccctacctttgtgaaggctttgtttcaatcaggggatagttcatttgggggactgatcacgggacatgaagggtcctatttgtgagtaaaaaaggtagcttacacccac

SEQ ID NO: 122697 - DNA, 483 bp, Homo sapiens
gtaccatatgatcttgcaatctcactgctagatccatccccaaaagaaaataaatcaatattttgaagatatatctgcactctcacatttattgcagtactattcacaacagccaagatttggaagcaccctatgtgtccatcaacagaaaaatgaacaaaggaaatgtggtatatgtacacaatggagtactattcaaccataaaaaagagtgaggttctgtcatttgcaacaacatggatggaactggaggacattatgtgagatgaaataaaccaggcacagaaagacaaacttcamatgttctcacctatttgtgggagctgaagtcaattgaactcacggagatcgagagtagcaggatggttaccagaagatggaaagggtagtgaagtggggagagtgaagatggttaatgagtacaaaaatatagtcagaaagaatgaataagacttagtatttgattgcacaacaaggtgacta

SEQ ID NO: 122698 - DNA, 625 bp, Homo sapiens
actataaggtataaatcctaactctgcattagtaccttgtttgcagtcactggtgctaatggcagtaactggcaaataaaacctaagtcatttttgccactattttgtaagtaagggaaggtgtttttttgcttcattagtcaattgtcaggaatatagatggtaatgacactttccacaacaccagtgagacacgaatagggcaccttctttaggtctgaatgagacatgtttattagtaaatgaaagcttcaaacatccattccctacatggagaaattcaaacactcaaaatcacccaacttcccaccatgagccatgaggttttcttagaccagggagaagaagactttctgtggcccattcctaagttcctggctggaatcaaggtagacaaattatataaacgttgtaccatttgttgttccaacaaatgagtgaccgttaccrtctcctggtgcccaatggatgtaaaactgcattactacagcaatgtggctaatagatataaagttacaggccttcaaatgcttgatttaacacatttttattgggcatacagtctgtgcctaggattgtggacattatattccaagatgtaacatttttctgtgatagatgaccc

SEQ ID NO: 122699 - DNA, 586 bp, Homo sapiens
ccctccagctagatgatgaataaatccttaaatgacataaaaggagcccagtcaccaagttcagtgccaaccatttccatttctaagtgcctctgatgctacctgcctcctgagaatgctgctcagcactgcaatggaactaaccttacacaaagagcagctgccagatgcctggactgcaagccgcctgcaaacccaacctgacatggacagcgaatgccacactgataatgacaccttgctccggtgtggtacccaggttttgtcactccacattaagtagcatggggacagacagagaaagggcccaaacatatacataatacggaaaatgaatcttgtgagtaaagatgaaagtcatgtgggtaatacagtctggtaggaaaaggcaggtttttgttgatgctacatatgggctggggcctgaaggtgggaggaacaggagggaagatatcctatgaaaaatagattgaaagtctagtcctttgagttctgsactttaatttcttctcagaagactttccttcattccacttaacccattagtttaacacagattcacttcaatgcacaattaaatttcgct

SEQ ID NO: 122700 - DNA, 282 bp, Homo sapiens
tattgacccctttgagaatctgatgcttgctaaagatctgatcttctccccacagaggcagagacacagrgacacatgcatttttacacacaatttcagaggcgcatggacctctcctgttttacttcatttctgctttccagtccaaggacaatttcttgcctttgagcccctttctgctctgaaagaataaagtccagattgaacccagcaacagaatgatttattttggcttccaaaaaaaaaaaatcataatcttttcagacctgtcctcacccaccc

SEQ ID NO: 122701 - DNA, 399 bp, Homo sapiens
tcctcattatcctccattacccactacactttctagcatcttgtaaccactattctattctctaagttcatgtgatcaaattttttatctcccatatacgagtgagaacacgtgatatttgtctttctgtgcctggcttatttcacttgccataatattttccagtttcatccatgttgttgcaattgacttttaaattgatcttgtattcagcaactttgctaaaaaaaactttattgttaaccataatttttgtgtaatttgttttagtttttcaatgaaatcaattacatcastagcaaataatgctaatattgtctcttccttttcggtacttaatctgtcattactttttcgagttcattattattctggctacaaactctggtatagtgttga

SEQ ID NO: 122702 - DNA, 571 bp, Homo sapiens
aggcctgtggcaaagggactggggaatcagttgacttgtgtgcgcttaagcaaaatggccaaatagctcccatgactataggaaaggagaccagcagatgtgggggcagcagagtgttccaagcatgggattaggaatgctcattgtccttgcaccattacgagcaaggctcttctgctrtctgttaacaccatgttttatcttgttttcattcatacacgctgaagaatgagcacaacacaggcagtttggcatctttagagatgaaaagtattttcgctagaaagatcaggtacaaatctattttacctaagaagagaaatattatttataagaggggaggtgtctttggtctttgctgcctttctcactgtgctttaaacaaatttctactacataaatgtgggtataactagtttataatcttatatatgtctagttcaagtcttacaaggatgcagtggaatatctgcagtgaagagaagtcttgcccatctatataaggacctctggagtaaaaagctgcagtgtttgtgaattttgaggctatgttgttgaatgatcattttta

SEQ ID NO: 122703 - DNA, 576 bp, Homo sapiens
gtatccaagcatgtgaaggcatagacacatacatatgaaacccatttatactggatacaaaaacttagctgaaaatctttccagtcgaccacctcaaatagttggatccatttttaataaaagtarggctgatttggtgcaactacctttcagttaggatcacaaggggtagatggtggtgaaagggctgaaaatagaggattccacctagaaagcacaaactaagctttaatattgtctttcttgagtaaattttacattgtgaattctggtctcactacccaacaaaaaccatgggtgagagaaattaatgtccttagctttcctctggagacatctttttgttctaacacagagaaatgtttgccaataaaaattcatacccaaatgagtacagttattggttaagatgaaatgtttctcatttgaaactttcatggttgttataaagaaaatttctgcatcccttcataaacgttgagactgactgaaactgactgagttaagttatagtgtcaatgaatagccacacattttctactttaaaaatataagtgatcagagagccattcggct

SEQ ID NO: 122704 - DNA, 576 bp, Homo sapiens
gtatccaagcatgtgaaggcatagacacatacatatgaaacccatttatactggatacaaaaacttagctgaaaatctttccagtcgaccacctcaaatagttggatccatttttaataaaagtagggctgatttggtgcaactacctttcagttaggatcasaaggggtagatggtggtgaaagggctgaaaatagaggattccacctagaaagcacaaactaagctttaatattgtctttcttgagtaaattttacattgtgaattctggtctcactacccaacaaaaaccatgggtgagagaaattaatgtccttagctttcctctggagacatctttttgttctaacacagagaaatgtttgccaataaaaattcatacccaaatgagtacagttattggttaagatgaaatgtttctcatttgaaactttcatggttgttataaagaaaatttctgcatcccttcataaacgttgagactgactgaaactgactgagttaagttatagtgtcaatgaatagccacacattttctactttaaaaatataagtgatcagagagccattcggct

SEQ ID NO: 122705 - DNA, 653 bp, Homo sapiens
ggatttgttgagtccagtgcaaactgaaacagtgacctatgtgaatgacagccaggtaaatgtcagaggacaatgccaaaaagacatattaagttcaggagttgaaattgtggtaagcattagtgcccatcctcaaagaagtcttctctgactttcctgtgcaaggcagtttcctctctccccaatttatgatgctatatcaaactcaacaaaccttggtaatggattgaatgatgtgggtgaaggaacagaaggaagaatcaagaatgtcttggccctaggattattatctggctcacggtaagctctaaataaatatctgttgaaagaaaaaatagctgggaataatacacattttgtcaccctcagccacactatgcagactataaaattgatgcttgtttrcatcattaggtggccatatttacattaaaaccacagttttaagagccaaaaaatcctgggttcaaatcctgacttcaccatttgagctatgagacattaggagagttacttaactgagtctttctttctcttcttataaaaaggaaatcatctcataccaccctcacaagatgatggtgaagattagatgagataatacatttatcgtacttagaagaatacctggcagaaagtattcgtagagggta

SEQ ID NO: 122706 - DNA, 653 bp, Homo sapiens
ggatttgttgagtccagtgcaaactgaaacagtgacctatgtgaatgacagccaggtaaatgtcagaggacaatgccaaaaagacatattaagttcaggagttgaaattgtggtaagcattagtgcccatcctcaaagaagtcttctctgactttcctgtgcaaggcagtttcctctctccccaatttatgatgctatatcaaactcaacaaaccttggtaatggattgaatgatgtgggtgaaggaacagaaggaagaatcaagaatgtcttggccctaggattattatctggctcacggtaagctctaaataaatatctgttgaaagaaaaaatagctgggaataatacacattttgtcaccctcagccacactatgcagactataaaattgatgcttgtttacatcattaggtggccatatttacattaaaaccacagttttaagagccaaaaaatcctgggttcaaatcctgacttcaccatttgagctatgagacrttaggagagttacttaactgagtctttctttctcttcttataaaaaggaaatcatctcataccaccctcacaagatgatggtgaagattagatgagataatacatttatcgtacttagaagaatacctggcagaaagtattcgtagagggta

SEQ ID NO: 122707 - DNA, 531 bp, Homo sapiens
caggccttggctcctagatggcaagcatcaaaagtcaaggataaagacaggatcctaaaagcagcaagagaaaagatacattccaaaaagcttaacaacaactagtaacaggcttctcagcagaaaacttacaggctaagacatgtcatgccatatttaaagtgctgaaggaaaagaccctttatgctaggatagtgcatccagtgaaaatctccttccaacaagaaagataaagaccttccaagacagaagctgtgggatttcatcaacaccagacctgttctacaagaaatgctaaagagaatttatcaactggaaagaagaggaccttaactagccagaaaaaccatctgaaggcacaaaactcagtaagtacagacaaacacaaactattgtaatactgtaattgtgatgtatgaactactcatatcttgaataagaagagtaaaaaaargaagctttcagttaacaaataactctaataactttaagacatagacagtataatgagatataaacaaacaacaaaaa

SEQ ID NO: 122708 - DNA, 531 bp, Homo sapiens
caggccttggctcctagatggcaagcatcaaaagtcaaggataaagacaggatcctaaaagcagcaagagaaaagatacattccaaaaagcttaacaacaactagtaacaggcttctcagcagaaaacttacaggctaagacatgtcatgccatatttaaagtgctgaaggaaaagaccctttatgctaggatagtgcatccagtgaaaatctccttccaacaagaaagataaagaccttccaagacagaagctgtgggatttcatcaacaccagacctgttctacaagaaatgctaaagagaatttatcaactggaaagaagaggaccttaactagccagaaaaaccatctgaaggcacaaaactcagtaagtacagacaaacacaaactattgtaatactgtaattgtgatgtatgaactactcatatcttgaataagaagagtaaaaaaaggaagctttyagttaacaaataactctaataactttaagacatagacagtataatgagatataaacaaacaacaaaaa

SEQ ID NO: 122709 - DNA, 504 bp, Homo sapiens
cctggcctcttcctccatcttcaaagtcagcatcttccaatctctccctgactctgaccttcctgccccatctcataagaaccctatgaggacactgggaccacctaaatgatccaggatgatgtcccatctcaagatccttaatcccacctgcagagttcctgttgccaagtaaggtgacatcgtcatgggtttcagggatgaggatgtgaacatccttgggagatattttttcagctgactacactgacgctgaccccagagaaccctctgtctaattaattgaaattccacatctggaaatatcatcatgtgtacacacttatgctccctttgtggcagggacaaacacattattatttagggaatttattgttttccttgccaaaaggtgttttgttttgttttttaagtaatcatttaggagttgtacrttttagcaacaaggagaatgaaaatggttgaaacggttaaacttgctcgtttttttttttagttgttgga

SEQ ID NO: 122710 - DNA, 556 bp, Homo sapiens
gtgttttcttgcaatgctcctcaattttatcaggaataattttttttttttgagactgagtcttgctctgtcacccaagctggagtgcagtggtgccaattcagctcactgcagcctctgcctcctggggttcaagtgattctcctgcttcagtctccagagtagctgggactacgggcatgcaccacttcacccagctaatttttgtattttttaagtagagacggggtttcactatgttggccaggctggtctcaaactcctgacctcaagtgatccactggtctcggcctcccaaagtgctggggttacaggcctgagccaccaggcccagccgaaatgaaattcttaatagcctgcatgctcccagataactcactggagcttrgttttaagctcactaggctgtcatatttaagcaatgtgaccccattcctccctccatagctgattagatccttgatcctggctgaaccaatctctttcctgggaatattgatttgggacaaagagcttagtttgggttggtctcttgaatgcaggaactattatataa

SEQ ID NO: 122711 - DNA, 556 bp, Homo sapiens
gtgttttcttgcaatgctcctcaattttatcaggaataattttttttttttgagactgagtcttgctctgtcacccaagctggagtgcagtggtgccaattcagctcactgcagcctctgcctcctggggttcaagtgattctcctgcttcagtctccagagtagctgggactacgggcatgcaccacttcacccagctaatttttgtattttttaagtagagacggggtttcactatgttggccaggctggtctcaaactcctgacctcaagtgatccactggtctcggcctcccaaagtgctggggttacaggcctgagccaccaggcccagccgaaatgaaattcttaatagcctgcatgctcccagataactcactggagcttggttttaagctcactaggctgtcatatttaagcaatgtgaccccattcctccctccatagctgattagatccttgatcctggctgaaccaatctctttcctgggaatattgatttggsacaaagagcttagtttgggttggtctcttgaatgcaggaactattatataa

SEQ ID NO: 122712 - DNA, 401 bp, Homo sapiens
aatagcctgcatgctcccagataactcactggagcttggttttaagctcactaggctgtcatatttaagcaatgtgaccccattcctccctccatagctgattagatccttgatcctggctgaaccaatctctttcctgggaatattgatttgggacaaagagcttagtttgrgttggtctcttgaatgcaggaactattatataaaagcattgcagctcttggtggttgcggcagagacgcagagaaagccagtttgcattgaaggaagggtacagcagaatgaagtgagtgacagtctcttgcaggacttctgggtcccaggtctgggctctacctttgtccttggagcatcaggaaaaacagctgtgtcactgtatactttcttcccttaagctaaag

SEQ ID NO: 122713 - DNA, 564 bp, Homo sapiens
tctgccacagcgtggtaacattcctcagaaacctcctgctctgcgaaactgttgctaaaactctcagggcttatgggaaaaatggagttaatagcagaacaccaaagtcctgtggctgggttggaaggcagtaggcacttgttttttattttcataagatacttttaggggcttctgctgccagtgctkagggcttttctgctgaaggctgtcattttattcccactagtctggctctccttgtctgagaaaacccacctctgctgagatacagcctctgtggtatatgcactttcatttaccagttgtatatgagcgattctcctttcagaaacaagtgtcatcagaaccttctgaggtgactggtgtgatgcatactttgagggagtgttagggatgaataacagggttagttgctaaggtggtggctgcacatgtgcttgggcatgattttgtctgagctgtgtttaggtcatttgttgattcttcttgactcatcaaaccaatacccatgcagagtgttgttgatctttatgcttgtatgtgggtatgtactgttgcccc

SEQ ID NO: 122714 - DNA, 564 bp, Homo sapiens
tctgccacagcgtggtaacattcctcagaaacctcctgctctgcgaaactgttgctaaaactctcagggcttatgggaaaaatggagttaatagcagaacaccaaagtcctgtggctgggttggaaggcagtaggcacttgttttttattttcataagatacttttaggggcttctgctgccagtgctgagggcttttctgctgaaggctgtcattttattcccactagtctggctctccttgtctgagaaaacccacctctgctgagatacagcctctgtggtatatgcactttcatttaccagttgtatatgagcgattctcctttcagaaacaagtgtcatcagaaccttctgaggtgactggtgtgatgcatrctttgagggagtgttagggatgaataacagggttagttgctaaggtggtggctgcacatgtgcttgggcatgattttgtctgagctgtgtttaggtcatttgttgattcttcttgactcatcaaaccaatacccatgcagagtgttgttgatctttatgcttgtatgtgggtatgtactgttgcccc

SEQ ID NO: 122715 - DNA, 564 bp, Homo sapiens
tctgccacagcgtggtaacattcctcagaaacctcctgctctgcgaaactgttgctaaaactctcagggcttatgggaaaaatggagttaatagcagaacaccaaagtcctgtggctgggttggaaggcagtaggcacttgttttttattttcataagatacttttaggggcttctgctgccagtgctgagggcttttctgctgaaggctgtcattttattcccactagtctggctctccttgtctgagaaaacccacctctgctgagatacagcctctgtggtatatgcactttcatttaccagttgtatatgagcgattctcctttcagaaacaagtgtcatcagaaccttctgaggtgactggtgtgatgcatactttgagggagtgttagggatgaataacaggkttagttgctaaggtggtggctgcacatgtgcttgggcatgattttgtctgagctgtgtttaggtcatttgttgattcttcttgactcatcaaaccaatacccatgcagagtgttgttgatctttatgcttgtatgtgggtatgtactgttgcccc

SEQ ID NO: 122716 - DNA, 606 bp, Homo sapiens
ctgtatcattgaatggtcagcccagagttaggtcatctggtgtgytgggtcagtctagggttgaatcaatgaatggtcagcttggggtgggactgtctgatggctctgttcaacctggggcaagatcatcaggaggaaatgttcaacttggagaagggacatctgatcgtgatatgcattctggggctggatcatctataaattctggtcagtttggggctgggatatctgttggctatggtcagtctggagctaagtcacatgacagtcatggtcagtctgaagctcggtcagtctagaggttatggtcaatttggggctggagtatcttttagctgtggccactcaggagctaggccacctaatgattatgacaagtctggggctgggttctacttaggtcacggccagcctgggcgtggcacccctggcccctctggtccacctggggaaacaccatctggagatcttggccacatgggatccccagtggatgataaggctccccaacacaggagtccagtcaatggcaacacactgcctcccccggttcatgatggtcaaggaggggggtataggagcaggagctggaaacacactcagtca

SEQ ID NO: 122717 - DNA, 606 bp, Homo sapiens
ctgtatcattgaatggtcagcccagagttaggtcatctggtgtgctgggtcagtctagggttgaatcaatgaatggtcagcttggggtgggactgtctgatggctctgttcaacctggggcaagatcatcaggaggaaatgttcaacttggagaagggacatctgatcgtgatatgcattctggggctggatcatctataaattctggtcagtttggggctgggatatctgttggctatggtcagtctggagctaagtcacatgacagtcatggtcagtctgaagctcggtcagtctagaggttatggtcaatttggggctggagtatcttttagctgtggccactcaggagctaggccacctaatgattatgacaagtctggggctgggttctacttaggtcayggccagcctgggcgtggcacccctggcccctctggtccacctggggaaacaccatctggagatcttggccacatgggatccccagtggatgataaggctccccaacacaggagtccagtcaatggcaacacactgcctcccccggttcatgatggtcaaggaggggggtataggagcaggagctggaaacacactcagtca

SEQ ID NO: 122718 - DNA, 537 bp, Homo sapiens
gcaacacactgcctcccccggttcatgatggtcaaggaggggggtataggagcaggagctggaaacacactcagtcagcaattgccaacaactgccctcaacaaagacctcctggctcaggaagggctgcttggagccatcattctcaacaaccagaatctggttagggagagagagatgctacttaagatcctcctgggcagcaggaccttacctactggaaaagatcayctgctggaggcagcagggtctctggctctggaaggactgctctgcaagggttctctggggggcctctgtggccacgggagtcttgttggcatcaacaatgttctgaagagcacttctttcgggaaactcaacagctggtaagtttaagtccttcatcaataaaacagtttcccaatgcactgatcaacaagggttctaggtgctcactatatgttaagtgttggagtctgactcacctaattggaaggcagacagtaagaaggcagcctcagacgccgcctcctcctgcaaactctcagcccactg

SEQ ID NO: 122719 - DNA, 556 bp, Homo sapiens
ttggggagaaaaataaaatgcggcagaaaaaaaaaatctctaatctggaygggcacggtggcttacgcctgtaatcccagcactttgggaggccaaggcacgtgaatcacctgaggtcaggagtttgagaccagtctggccaatatggtgaaaccccctctctactaaaaatacaaaaaattagccaggcatggtcgtgggcacctgtaatcccagctacatgggaggctgaggcaggagaattgcttgaacccaggaggcgatggttgcagtgagccaagatcgcaccattgccctccagcctgagcgacagagcgagactccgtctcaaataaacaaacaaaaaaaatcactaatcttgcagcttggagacaatgactattaacagttttgtttgcttctttccagaccttttccagcactattttgaatgtcaataaatattccatacatagatgcaccatgatacatttttaaccattctactgttagatacttgggttgttttcaattttcacgcttataaataactttgtgattaatatcttgaggaata

SEQ ID NO: 122720 - DNA, 556 bp, Homo sapiens
ttggggagaaaaataaaatgcggcagaaaaaaaaaatctctaatctggatgggcacggtggcttacgcctgtaatcccagcactttgggaggccaaggcacgtgaatcacctgaggtcaggagtttgagaccagtctggccaatatggtgaaaccccctctctactaaaaatacaaaaaattagccaggcatggtcgtgggcacctgtaatcccagctacatgggaggctgaggcaggagaattgcttgaacccaggaggcgatggttgcagtgagccaagatygcaccattgccctccagcctgagcgacagagcgagactccgtctcaaataaacaaacaaaaaaaatcactaatcttgcagcttggagacaatgactattaacagttttgtttgcttctttccagaccttttccagcactattttgaatgtcaataaatattccatacatagatgcaccatgatacatttttaaccattctactgttagatacttgggttgttttcaattttcacgcttataaataactttgtgattaatatcttgaggaata

SEQ ID NO: 122721 - DNA, 556 bp, Homo sapiens
ttggggagaaaaataaaatgcggcagaaaaaaaaaatctctaatctggatgggcacggtggcttacgcctgtaatcccagcactttgggaggccaaggcacgtgaatcacctgaggtcaggagtttgagaccagtctggccaatatggtgaaaccccctctctactaaaaatacaaaaaattagccaggcatggtcgtgggcacctgtaatcccagctacatgggaggctgaggcaggagaattgcttgaacccaggaggcgatggttgcagtgagccaagatcgcaccattgccctccagcytgagcgacagagcgagactccgtctcaaataaacaaacaaaaaaaatcactaatcttgcagcttggagacaatgactattaacagttttgtttgcttctttccagaccttttccagcactattttgaatgtcaataaatattccatacatagatgcaccatgatacatttttaaccattctactgttagatacttgggttgttttcaattttcacgcttataaataactttgtgattaatatcttgaggaata

SEQ ID NO: 122722 - DNA, 569 bp, Homo sapiens
tgggaatttattagataatgtgttatcttaagattgtattccatctaatttacaataaagtaatttttaatgttctggcttgtgaagtagggtatggatagcaaatacatggcactaaagccaccattccccaattctgagcctatggcattactaatcaattcagtaattttcccttcagaaccagtattctttccaaccatgctctgggcagcaacgaattgattatagttcacactcatttgcaatcatgggttagtttcaaaaccrtatccatttaataacagatacgttgagttgctacttgagggtggagggtgagaggaggatgaggatcaaaaatgattgcttattgtctgtgtaatggaataaactgtacaccaaacccctgcaacgtgcaatttacctatgtaacacacctgaaactaaaagttaaaaaaaatctaaaatacattttattttgatttttctttaaaaatgatgttttcttatcttttacatattgttgaatgatattagatagcctcctgaggaatttgttaagatggcaagaagtggttcctacaggt

SEQ ID NO: 122723 - DNA, 517 bp, Homo sapiens
taaaaattgacataaataaaaacaaaacctcaatataccaaaatgtatggtatacagttaagaggaactcagatggaaagttatgggtataaatgcaaatattttaaaaagtcaataacttcatcttccaccttaagaaactagaaaaagaagaacaaattaaacccagagctagcaaaaaaggaaacaataaagactagagaacaattagacaacagaaaaaaaaatggaaaaaaaattaattctttcaaaagatcaacaaatttaacaaatctttctttagacygacaaataaataagagaagactcaaattactaaagtcaggaataagaggggacacaacactactgaccttacagaaataaaaaggattgtcaagaaatctataggcaattctatgccaacaaattaagtaattgagatcaaatggacaaatttttagaaagatacaaactatcaaaactgactgaagaagaaatagaaaatctgaatttatgtataaaaagttggattatt

SEQ ID NO: 122724 - DNA, 547 bp, Homo sapiens
aggcctgtatatagattcatatgtgttttgcacatggatgtctagttatgtcagcagcatttgttgaaaagactgtctttcctccatcttattgtctctgcccctttgtcaaagatcaatwgactatatttatgtgggtctatttcttggatctctattgtgttctactgatctatttggctattctttcaacaatatctcactgtcttgattactgcagctttctagtaagtcttgaagttgggtaatgtcagtcctccagctttgctcttcttcagtattgtgttggctattctgggtcttttgcctgtctgtataaactttagattgaggttttcctattcatgaacatggaatatctctccagttatatagttctttgattttattttccatcagcgtttgtagttttcctcatgtagatcttacacatattttattaaatttgtatgtcagtattttatttattgggatgctaatgtaagtggtattatgtttttaatttaaaattccacttgttaattgctggtatttaggaaagcaattg

SEQ ID NO: 122725 - DNA, 599 bp, Homo sapiens
gactatggctatttcacaatagttgtaacacaggtctactgactgaaagagatgatgagttgagtatccctcattcaaaatgcttgggcctagaagtgttttggatttcgaactttttcagatttttaartacttgcatatacataatcagatatcttaggaatagaacccaagtctaaacatgaaatttattttttatatacaccttaaacacatagcatgaagctaaatttatacaatattttaaataatgttgtgcatgaaacaaagtttgtgttcattggaccatctgaaagcaaaggtgttactatttcatgtcagtgctcagaaagttttgaattttggagcattttggatttgggaattagggatgcttaacttgtatttggatgcaatcatcagagtatttcagttgagagcagctcttccctatttcccatatagcaattaccagaacaaaacagaaatgacctcagcagctcagttggtccctttcctcatcatgtggggcagctgccctccaccagcaagggcaagggccagtgtgaccgccttttctgggtacccacacttggtggatcctgagctcttgtctgaca

SEQ ID NO: 122726 - DNA, 599 bp, Homo sapiens
gactatggctatttcacaatagttgtaacacaggtctactgactgaaagagatgatgagttgagtatccctcattcaaaatgcttgggcctagaagtgttttggatttcgaactttttcagatttttaaatacttgcatatacataatcagatatcttaggaatagaaccyaagtctaaacatgaaatttattttttatatacaccttaaacacatagcatgaagctaaatttatacaatattttaaataatgttgtgcatgaaacaaagtttgtgttcattggaccatctgaaagcaaaggtgttactatttcatgtcagtgctcagaaagttttgaattttggagcattttggatttgggaattagggatgcttaacttgtatttggatgcaatcatcagagtatttcagttgagagcagctcttccctatttcccatatagcaattaccagaacaaaacagaaatgacctcagcagctcagttggtccctttcctcatcatgtggggcagctgccctccaccagcaagggcaagggccagtgtgaccgccttttctgggtacccacacttggtggatcctgagctcttgtctgaca

SEQ ID NO: 122727 - DNA, 497 bp, Homo sapiens
agttttacctttcccagaatgtcatataaatggaatcatacagtatgtagccttttgggtttggcttctttgacttagcaaaatgcatgtgagattcatccatagatgtccattcacaggtttgaggacattcaggttgtctccaggttgagcaattttgaataaagttgctattcatgtacaagtctttatatagacacatgctttcatttgtcttgagtaaagacctaggagtaggattactgggtcataggtaagggtatgtttaccttaataagaaaatgccaagctctcccaaagtgactcaaacattttgcattcccgccagcaaagtatgaggagcatctcagcygtccaacatctttgtcagcgcttggtattgtccgtttttcttctaaagccagtctaataggtatgtagtggtacttcgttatggttttaatttgtatttccctaatgactaatgaggttgagcatcttttcatgtgcttatttgc

SEQ ID NO: 122728 - DNA, 587 bp, Homo sapiens
gtgctggaaggaggacctagtccatgccaccacagtttggaaatcagcagctcccaatccagcagcagaaagtagaacttccaaccccatgcactccaacatggacaggtatccacaccttgcacacccctcaccarcacctacaccagggagttctggttagagaagttacggctcaatgaagtgcagctgcaaagcctagtcacttaaagaataattcacagccttggctgcacattgtaatcacctgggggctttgaaaagcagcaagtctgagtcctcagcccagagatcctaatttacttggtctggggtgtagggtggccatcaggatttttggaatcaggtgattctaattttcaataagactaagaaccacagatttggaagctgatttaaagacactcatccatcaaccatgccgcagagcaccgactgcttattttagcattttgatccattatcatgctccttagaaattctggcaacaaatattcattttcacattaatggaaataaattgctcttaaaatgaagaccagtgtaagtggtatttggctggaacataatgtttcctgttcagaata

SEQ ID NO: 122729 - DNA, 619 bp, Homo sapiens
ccctctcacaacatgagggaattatgggagatataactcaagatgagatttggatagggacacagccaaaccgtatcattccattcctggccccatgtccaacatctcatctgagacaagacaagtcgtttctgctatgagtctgaagaatcaaaagcaagtttgttattttctggatacaatgggggtacaggctctgggttaatacagcaattccaaatgggaaaaattggccaaaacaaaggggctacatgctccatgcaagtccaaaagtcagtgagcagtcaaatattaaagctccaaatgatctcctttgactccatgtctcacatccaggccatgctgatgaaagaggtgsttcccaaggttatgtgtagctatgcccctgttgctttgcagggtaaatcctccctcccagctgctttcacaggctagcattgagtgtctgcagcttttccaagtgcgtggtgcaagctgtcaatggatctatcattctggggtctggaggagggtggctgtcttctcatagctctacaggcagtgccccagtgggcactctgtgtgggagctccaactcacatttcccttccacactgccctagcagaggttctccatgag

SEQ ID NO: 122730 - DNA, 619 bp, Homo sapiens
ccctctcacaacatgagggaattatgggagatataactcaagatgagatttggatagggacacagccaaaccgtatcattccattcctggccccatgtccaacatctcatctgagacaagacaagtcgtttctgctatgagtctgaagaatcaaaagcaagtttgttattttctggatacaatgggggtacaggctctgggttaatacagcaattccaaatgggaaaaattggccaaaacaaaggggctacatgctccatgcaagtccaaaagtcagtgagcagtcaaatattaaagctccaaatgatctcctttgactccatgtctcacatccaggccatgctgatgaaagaggtgcttcccaaggttatgtgtagctaygcccctgttgctttgcagggtaaatcctccctcccagctgctttcacaggctagcattgagtgtctgcagcttttccaagtgcgtggtgcaagctgtcaatggatctatcattctggggtctggaggagggtggctgtcttctcatagctctacaggcagtgccccagtgggcactctgtgtgggagctccaactcacatttcccttccacactgccctagcagaggttctccatgag

SEQ ID NO: 122731 - DNA, 619 bp, Homo sapiens
ccctctcacaacatgagggaattatgggagatataactcaagatgagatttggatagggacacagccaaaccgtatcattccattcctggccccatgtccaacatctcatctgagacaagacaagtcgtttctgctatgagtctgaagaatcaaaagcaagtttgttattttctggatacaatgggggtacaggctctgggttaatacagcaattccaaatgggaaaaattggccaaaacaaaggggctacatgctccatgcaagtccaaaagtcagtgagcagtcaaatattaaagctccaaatgatctcctttgactccatgtctcacatccaggccatgctgatgaaagaggtgcttcccaaggttatgtgtagctatgcccctgttgctttgcagggtaaatcctccctcccagctgctttcacaggctagcattgagtgtctgcagcttttccaagtgcgtggtgcaagctgtcaatggatctatcattctggrgtctggaggagggtggctgtcttctcatagctctacaggcagtgccccagtgggcactctgtgtgggagctccaactcacatttcccttccacactgccctagcagaggttctccatgag

SEQ ID NO: 122732 - DNA, 618 bp, Homo sapiens
ttttgcacaatttaatacttttatatatttctctcaaagagctcttttggtgtgaaaaaatgtaaatgaggtttatatttgtatagtgcatgttatgttcttgttgcatttaaatgtcctgatatcctacccaaagatttcaatgtcctgttttaaaacaattatttttccagaacatacttacaagtggaccactttgtcgtaaaaactgtgtagctttatgttatcttacattatctcctgtcagaatataccctcaacacaagctttgtaggagtttgtcttcctgaaagagagtaaaaacccagtgggaatttcaattatatttaatatattatttaaaagtagattactctcatagtttctgatttcaaaacagtaaaagtttatacatrgtttaaaaataattatgatgtttaagaaataatattgatatccttattttctcttttgaactattgttttctccaatatttttgtgcccatctcaggagctaagacaattctgctgaaaaagcagtatcattcataagatggttagagttctgggtttgaatctaactcaactcatatatttaggagttttgtagtcttgggcaagctacctaactgctggat

SEQ ID NO: 122733 - DNA, 578 bp, Homo sapiens
tttctctttactttccaatttgggaaatgcctattggcatcagtgaaatctgaactttggaagaaatataagcagatgggattaattgacagaacattttctgtttcaaaactttaaacatattattggaggttacttattttataaggtaagaaaatcctatagtagattaagagcccaagttaacaccttatarcctcttaaggctactggtagatgttctatgtaatccaattgccagctatatggcaagtcttatacttggaaattttagccatagccactttcaagccgtcctcaccttttgacattgaatatagtttcttattttactatcagtttcatcaagtacaaggggaatgtgccgtccgtcagcctattgtgcatggcataagcacctatatatttatataaaatatatatacatatatatgtatattttgtgaatcctgataactaattctaggaattgtatttagacttttgccttagcattttcattttcttttgagactgcaactgttttgctagtttttgttggttatttagtgcactcatttgttcttactctgaattcc

SEQ ID NO: 122734 - DNA, 340 bp, Homo sapiens
gagtcctttgatcactctagctctcactgcaccagatataccctgcccaagaatcattccatccctcacccttgtgcctcccagggggaagggcaacattctcccctttttgtattttccattccctctgagtgagacttggaaactaacatgcctgcctgagagcactgatatgagcrtctggtaagtacaatgggaagtgagcaggcttggagaaacaaggagaaagcatgtcttaaacaagtttaggcttcactcaaggtcaacaggcattgcctaaaatatagtaggtacctaataactactcatgggatgaatgaatgaattgattaatagcagc

SEQ ID NO: 122735 - DNA, 442 bp, Homo sapiens
gtttcacataactttttctctgtgttctttagttttatctacatatattatgtaacttcggatgttacataactttttaacttatttgtaaatattttcctatattgttcacagttcatgtaaactacttttggaggcttaactttttatacttgtcaagaaaattaacatatttttcttttgaatcttgaataaataatatcatttgttttcattttattattcctaaatggtaggtgtctgcctggttttcaagcaggggggttcatatagtgttggaaaaatatttggaaaaattcttcatttaaatctcattttrtgacataaagtcatttagtatgtcactcattgatgcatttcaacacacagcagtcagtcatatacaaggcagaacacgcaagagttggtgacaacatcacaagtaggaaaagaatttctgctt

SEQ ID NO: 122736 - DNA, 527 bp, Homo sapiens
aattatatttgaagttcttctgtgcccagcccctggaattctccaataacatgctggtaatgttttcttgccttttttttcccctctagcacaggccccattctacctaacagatgagtttgattccatttatttttacagatatgtattgaatcttggacaaaaagtcataaatagcctggaatagggagaattaaaatgttctgsttgatgggtggcattttgctttatgtaattggtatcatttttcactggctctactgccaagagtccctgttttataggaacattcctcttcctaagtgctcagatctatcctcccactcggccttttttgatattattgttgcctttccccctgtgcctggtgcatcagggctgaacaaagcccatgcaggcataggcagaatgccgactgacttcagatgacaagtaaatagtctggaacatttgagtgaggggtagggagctgtactgacagaagaagccagaaaaggaagcactccctctccaccccagccttcagt

SEQ ID NO: 122737 - DNA, 359 bp, Homo sapiens
ttctgaacccctggtgtacacaccctgtgtagtcctctccccttcagcagaagtagagcctgtgaatatgatgggctatcactcccatgattaggttatgttatatggtaatgatgatagaattatgcagatataattaaagtgagagatcagctgactttgagttattcaaaagggagatggcctctacctaatcaggtgagtccttaagagagagattctcccactggccttgaaggagcaacctgccatgtggcttggaggagaccatgtggctagaacccaagaacagcctttaattgctgaaagtggtcacagccaamagccagcaagaaaatgaagacctaaatcctatattc

SEQ ID NO: 122738 - DNA, 471 bp, Homo sapiens
taaatcagaatttttagttaatgattgaccataagaaataaaagtgcctttcatatagtgggagtttaacaaatattttctgactgaataaacaartgttatatgcatcagaacactccagctggttatgcagtaacatttctccccaacttggaagtctacctagaaaaatcacatgagggtcaagagatttcctgcaaacttattttcaaaagaaatcagcagttgggtgatcctaagttattagagcttgatacaatcaaccccatatcagtaggatatttgccaagaggacaaacatagtcagtggtcagaaaacctctcctaggcacacacaagcaatgtgcactaataatggtctctggtctaggaaaatgctatgatttccttgaaaactcatatttctgcaatcctagtcaagtgctgtcaattaaaccactttttaaaaatagttttaactacaaaccaaaa

SEQ ID NO: 122739 - DNA, 568 bp, Homo sapiens
gatgctttatgaaccaaaactaggctgtgattaaatttccatcaaattcttccatttattctgaacctcttaaggtggggcaataagtaagtggctcaatacttaatatgtctttaataaatgagtgtggagttgagctgaattttctgttctggggatcagggaatgggagtggaggtggaagaagcctgcrtaagcaggaaagtattagatacttgtgtggaggtggaggtagaggacaagtggctcccctgaagagggaaggatattagaaaaagaagcctaggaatgaaaaaggcaagcctcagaaactcacaacctcttttctgcagaaacaagcagccgccatccactgaggtatttcctgttaggcagctgtgtagacaactcagctcctcctgcctgtcagggtgttcatcacccaggagtgttttggataaaacaggagaagctgtgttaatctagatggaactgtatttgtgttagggaatacaaatcctccaggctatgacaaggcttaggtaaaattatggatgagattggtttgggggacatggggataaggact

SEQ ID NO: 122740 - DNA, 380 bp, Homo sapiens
tctctcctctcaattgcactcccaaataacttgactaaataaattcctcttgtaagcaacattcagatcacagggtatgactactgttatgtaaaggctgcccttggtatcaaagcggaaggttaaagagccattttcagaaattgaatctaacaacagccagataaaatgaatgctggtctcctgtggagttctttctagaaataatcttaatctaatagatactttattttaaatgtrtttctttcctttcctttcctgtttccctccctccctccctctctccctccttccttctttcttttcttcctccctctttctttcttgttcacattggcaacctggattatgaaccacaatgaccaaggtatggaattcat

SEQ ID NO: 122741 - DNA, 565 bp, Homo sapiens
ctgtatattgtggcttacttttcagtctgactctggcataacattatgagacaaggaaaaaaaaaatttaactccaaaatatatttccttgmcatactttaaaattgccctgcaacatctcttagaaaaatccacattctatagagaatccccttccccctttgttctccttcctcccttcccagatccaggagataatcagctaaaagccaggcacccttttaagtccgatgaaaaacaatttacaacttgctctctctaaagcctgttacctaagagcttcctctgcacaataaaacttggtgtccacaagcctttatctttaacctgaatattcctttctatagatcccaggtcttcagacaacctcaaccaattgtcaaccacaaaatgtttaaattgaccaatagcctggaagcccctgctttgagttgtcctgcctttctaaaccaaactaatgtaattcttaaatgtatttgactgatgtctcatgccttcctaaaatacataaaaccacgctgtaccgcaactaccgtgggcacatgttctcacgaccccctgaggg

SEQ ID NO: 122742 - DNA, 606 bp, Homo sapiens
gctgttgttttttgatatggatagtctgtacatctctagccatgacagcattatgggctgcccctgagaggctgaaataatgacaaagtgtgataatacatgtattaaatacaagcagtgtttttatatgcatttatagtaaaaccattagaaatcactttctgggactacagttttgggaatgctgtgagttaaatcatatttttgttatgatgaatactgttatgttgctaaataaaacatgaaaaatgtagaaaatgwgtgtaatccttactctgtggcattattttataatagcatatatgtctatggataatttgctacatagtttcacatttggtcaaggtttaataaaggtaaatttgttgattttagaaactcttgtgttgtcaaaaaacgcagaaaacgagatctgtcattgactctatgtcctttaagtcagaagatactagtatgcatatcaaggctatgacattatccattataaaataaggaacaaaccaaatatcagcattgtggtatgcagacacagtatcaaaggctgagaagagcttctcctaaaaataaatttctaacaacaacttcagtataaacaaaaatgattaa

SEQ ID NO: 122743 - DNA, 606 bp, Homo sapiens
gctgttgttttttgatatggatagtctgtacatctctagccatgacagcattatgggctgcccctgagaggctgaaataatgacaaagtgtgataatacatgtattaaatacaagcagtgtttttatatgcatttatagtaaaaccattagaaatcactttctgggactacagttttgggaatgctgtgagttaaatcatatttttgttatgatgaatactgttatgttgctaaataaaacatgaaaaatgtagaaaatgagtgtaatccttactctgtggcattattttataatagcatatatgtctatggataatttgctacatagtttcacatttggtcaaggtttaataaaggtaaatttgttgattttagaaactcttgtgttgtcaaaaaacscagaaaacgagatctgtcattgactctatgtcctttaagtcagaagatactagtatgcatatcaaggctatgacattatccattataaaataaggaacaaaccaaatatcagcattgtggtatgcagacacagtatcaaaggctgagaagagcttctcctaaaaataaatttctaacaacaacttcagtataaacaaaaatgattaa

SEQ ID NO: 122744 - DNA, 581 bp, Homo sapiens
gccaaaaccattaacatccaagttctatatgaatgtgtcttgaggtagctggccaattcctggaggcagccgttccacctagctttattcctttgttgcttggagttggctagctgcaagtacggacatcaatggcytagagtaagcagttatgtacccaattttggtacatcttttgaataagttggctggctgagtttgtaagtgtttctccttctttccctctcgattttgcagcttttgtgcaaaagttgaagtcaacttctacttaaatcccattctgttttctttaaatatcctttattaagtattttcagttttctatttaaataaatgatcatagatgtgcgacttagaaaaaaatcagcatctaattaaagctcacatatgtttatgctttttctccatttactcatttgtatgcaaaattgtttttcattttatttttttttctgatttgattttctattttggcattttcccatgtttgtttcataagctgaaattttgtgatttaataaaaatcaagcaactattaaagaggtaagttttactaaggattgtgtttaatccaacaagct

SEQ ID NO: 122745 - DNA, 594 bp, Homo sapiens
ccttcttgcacacgtgcctcagcacaagcaaatgatgtgcaaactttcactaatgacctttctcttaagtttgcaaacccaatcgaaatacacatgaacatgcacgcacaccccctctaaaaatccttaattagaagggaggaaatactgtctcagtagagaagagggaaggtagtcaaccctgtttttatcttcccaggataaggagatgacctatttgcacccttggtttctggctgtttcatgcagtgtgcgagtaaagtaagacgttttaccagggaaaaggtgcagctgccgctctcccagatgcggcgagatcgggaagcctcccgagtgggtatatggggtacggaagtagcataaacaggtggaaacatgagattaactaaggctgagttgaaagaaagattctgaaaataagcccatcaacttacaaaaccaaagacataacatttcggtcatcgtcattctacctcacaagcttagggaacatggatttcactaactcatgggcccycatttgttagcaggagtcttgttggataatgccagcctagcgtagctagtaaaacacaccttttggccccatgaagg

SEQ ID NO: 122746 - DNA, 594 bp, Homo sapiens
ccttcttgcacacgtgcctcagcacaagcaaatgatgtgcaaactttcactaatgacctttctcttaagtttgcaaacccaatcgaaatacacatgaacatgcacgcacaccccctctaaaaatccttaattagaagggaggaaatactgtctcagtagagaagagggaaggtagtcaaccctgtttttatcttcccaggataaggagatgacctatttgcacccttggtttctggctgtttcatgcagtgtgcgagtaaagtaagacgttttaccagggaaaaggtgcagctgccgctctcccagatgcggcgagatcgggaagcctcccgagtgggtatatggggtacggaagtagcataaacaggtggaaacatgagattaactaaggctgagttgaaagaaagattctgaaaataagcccatcaacttacaaaaccaaagacataacatttcggtcatcgtcattctacctcacaagcttagggaacatggatttcactaactcatgggccctcatttgttagcaggagtcttgttggataatgmcagcctagcgtagctagtaaaacacaccttttggccccatgaagg

SEQ ID NO: 122747 - DNA, 646 bp, Homo sapiens
ctgtcctggggaagcattgttaagaattaggagcaatgtttcaggaaaaatgaggagtagacctagcttttattgccattattcacaaaggtagggaagaataatggtggtaggaaaaagaagcaatcaataagtgtattgtgattgcactaggaaagagatcttagagttaaatccattattcacttgtagtattaaataaacttgctgaatcattctaatccaaaaaggaatacttttgtaaacagtctcctcatagccaaatttaatatttaacatatttagattctgctgcaataatatgggtgagagttgggcagtgatggtagcagaagttctacaaagaggcatctgctgcttaaaaatgcatcaagaatgactccaagatttttggccagagcttttgaamcaatagaggcgccatttactgagaatgaaaagcaatgagagaagcagttttgagatgtccattagcacaaccaaacctagaagtctactagactgttgggtgaactgaactatcattctggggggagttatttggaattcatcatagtagagatggaatttaattaaataaaatcacctgaggaatgtagactggtacacagaagagttctgaagactgagccctgagatgctccaa

SEQ ID NO: 122748 - DNA, 604 bp, Homo sapiens
cagatgagactggtattcgaatcagtaggctctgtaaagaagactgctctccccaatgtaggagggcagcaccmaatttgttgagagcctgaatagaacaaaaggtgaagggagaattctcctgtctgcctgaccacatgagctgagacactggtcttctcctatccttggactgggacttactggctcccccagttctcaggcctttggactcagattgaactacaccactggctttcccgagtctccagcttgctgacagcagatcatagaacttctcaggcttcataatcacatgagccagttcctcataaaaaatatctttatatagagagagcggcatatgacttagtctgaaacttgcttcaaaaatagctaaaacacaaagaataaaaagggataaataaataaaatatggaaaagactgataactgtttagtatgatgacagatatgtgagaatttgtatttgtatacatttggaatttttgataatgttaaatttttttaaagtattttctccacttgtttcataaactattatgatcattgagaaaaagtatataaaagcgaaaacacatatcagtgtgttttaatgtcagtgt

SEQ ID NO: 122749 - DNA, 604 bp, Homo sapiens
cagatgagactggtattcgaatcagtaggctctgtaaagaagactgctctccccaatgtaggagggcagcaccaaatttgwtgagagcctgaatagaacaaaaggtgaagggagaattctcctgtctgcctgaccacatgagctgagacactggtcttctcctatccttggactgggacttactggctcccccagttctcaggcctttggactcagattgaactacaccactggctttcccgagtctccagcttgctgacagcagatcatagaacttctcaggcttcataatcacatgagccagttcctcataaaaaatatctttatatagagagagcggcatatgacttagtctgaaacttgcttcaaaaatagctaaaacacaaagaataaaaagggataaataaataaaatatggaaaagactgataactgtttagtatgatgacagatatgtgagaatttgtatttgtatacatttggaatttttgataatgttaaatttttttaaagtattttctccacttgtttcataaactattatgatcattgagaaaaagtatataaaagcgaaaacacatatcagtgtgttttaatgtcagtgt

SEQ ID NO: 122750 - DNA, 401 bp, Homo sapiens
attcaggtttcctcagttgtactcatgcacttacttccgtattaaattttatacaattttgtcacatgtaggttcatacatccaccaccacagtcaagatgcagaacagttctgtcaccacaaggatctctcatgattttataaccacccccatctawcttttgcaccctgctcccctccctcagctccctaatctttggcaaccactgatctggttctccatctctataattttgtcatttcaagagtataatagaatcatataatatgtattgttttgagattgtcattttttactcagcagaattccctcaagattcatctaagttgtatataagctcatttctttattactaactagttttccatggtatgaatgtatcataatttatttattcact

SEQ ID NO: 122751 - DNA, 401 bp, Homo sapiens
attcaggtttcctcagttgtactcatgcacttacttccgtattaaattttatacaattttgtcacatgtaggttcatacatccaccaccacagtcaagatgcagaacagttctgtcaccacaaggatctctcatgattttataaccacccccatctaacttttgcaccctgctcccctccctcagctccctaatctttggcarccactgatctggttctccatctctataattttgtcatttcaagagtataatagaatcatataatatgtattgttttgagattgtcattttttactcagcagaattccctcaagattcatctaagttgtatataagctcatttctttattactaactagttttccatggtatgaatgtatcataatttatttattcact

SEQ ID NO: 122752 - DNA, 401 bp, Homo sapiens
attcaggtttcctcagttgtactcatgcacttacttccgtattaaattttatacaattttgtcacatgtaggttcatacatccaccaccacagtcaagatgcagaacagttctgtcaccacaaggatctctcatgattttataaccacccccatctaacttttgcaccctgctcccctccctcagctccctaatctttggcaaccactgatctggttctccatctctataattttgtcatttcaagagtataatagaatcatataatatgtattgttttgagattgtyattttttactcagcagaattccctcaagattcatctaagttgtatataagctcatttctttattactaactagttttccatggtatgaatgtatcataatttatttattcact

SEQ ID NO: 122753 - DNA, 401 bp, Homo sapiens
attcaggtttcctcagttgtactcatgcacttacttccgtattaaattttatacaattttgtcacatgtaggttcatacatccaccaccacagtcaagatgcagaacagttctgtcaccacaaggatctctcatgattttataaccacccccatctaacttttgcaccctgctcccctccctcagctccctaatctttggcaaccactgatctggttctccatctctataattttgtcatttcaagagtataatagaatcatataatatgtattgttttgagattgtcrttttttactcagcagaattccctcaagattcatctaagttgtatataagctcatttctttattactaactagttttccatggtatgaatgtatcataatttatttattcact

SEQ ID NO: 122754 - DNA, 597 bp, Homo sapiens
acctctgcctcccaggttcatgcgattctccttcttcagcctcctgagtagcagggattacaggtgcctgccaacatgcccagctgattttggtatttgtagtagagacagggtttcaccatgttggccaggctggtctcgaactcctgacctcaggtgatcctcccaccttggcctctcaaagtgctaggattacagatggcatgacccactgygcctggccaataactacttttcaattatacataacagaacaattatttattaagtgttctggaaaataagctaggacctaattgtcccctttaattcagttaaggaaaaagacaccacaattactatattcactactatgtaagttaaacacatgaaataaatgataaaatgagggctccaacaagggcaaaacttgagcaccacagaagcactgtgacagggagcccgggaaagtccagtatattattactacaccaaaatgagtcctcggctccagtccactggattattcactatccgatgaccacgcagtcatgctctgtagcttctcatttttctcactctgctagccctgcctggtgcacccttctcatgcacatg

SEQ ID NO: 122755 - DNA, 595 bp, Homo sapiens
ccaacactggtgaaatcaaaacacataaaaatgacaggaaaacaatgctcacttggaaaatattgctcaattttgttctctggtgtttttaccctctaccactcacttcagcttccttacaaaaactcaagaggmatgacaattcaagaggaattgtcaagaaatcccagacaggtaatcagtacaatttaggtcccttgttttcatttaatattgcctattgaaagaaccagaatagtactctcttacagtggtattagggcagtggcatttattatttacaaatgacaaagagataaatattatttattatgtaaaatgacaaagaaccaaatttaagtttattttaatggaaaataaataaggaatatttttcaaaatgtctttgcattctcctcatttcatacaagatttgagatggctcctactgcattttataactcccaagagtgccaactcaaaatctagaatgccaacacttttctagtaaattaaagatgcataggttatgcttatgtatgtattctaagagataaacaatttatagatcaggaaaatttttttaaataatcaaaaggcaacaatttatttaaac

SEQ ID NO: 122756 - DNA, 595 bp, Homo sapiens
ccaacactggtgaaatcaaaacacataaaaatgacaggaaaacaatgctcacttggaaaatattgctcaattttgttctctggtgtttttaccctctaccactcacttcagcttccttacaaaaactcaagaggaatgacaattcaagaggaattgtcaagaaatccmagacaggtaatcagtacaatttaggtcccttgttttcatttaatattgcctattgaaagaaccagaatagtactctcttacagtggtattagggcagtggcatttattatttacaaatgacaaagagataaatattatttattatgtaaaatgacaaagaaccaaatttaagtttattttaatggaaaataaataaggaatatttttcaaaatgtctttgcattctcctcatttcatacaagatttgagatggctcctactgcattttataactcccaagagtgccaactcaaaatctagaatgccaacacttttctagtaaattaaagatgcataggttatgcttatgtatgtattctaagagataaacaatttatagatcaggaaaatttttttaaataatcaaaaggcaacaatttatttaaac

SEQ ID NO: 122757 - DNA, 595 bp, Homo sapiens
ccaacactggtgaaatcaaaacacataaaaatgacaggaaaacaatgctcacttggaaaatattgctcaattttgttctctggtgtttttaccctctaccactcacttcagcttccttacaaaaactcaagaggaatgacaattcaagaggaattgtcaagaaatcccagacaggtaatcagtacaatttaggtcccttgttttcatttaatattgcctattgaaagaaccagaatagtactctcttacagtggtattagggcagtggcatttattatttacaaatgacaaagagataaatattatttattatgtaaaatgacaaagaaccaaatttargtttattttaatggaaaataaataaggaatatttttcaaaatgtctttgcattctcctcatttcatacaagatttgagatggctcctactgcattttataactcccaagagtgccaactcaaaatctagaatgccaacacttttctagtaaattaaagatgcataggttatgcttatgtatgtattctaagagataaacaatttatagatcaggaaaatttttttaaataatcaaaaggcaacaatttatttaaac

SEQ ID NO: 122758 - DNA, 465 bp, Homo sapiens
cacctagcacatagcagacacaataaatatttaatgcatgaattaattatgcatctttaaaactttgcttccatggttacttatctcagcattttaagtattttattattcccctgtattattcaactayggctaattcaaacttcaaaagaataatttaggactatctagtgttcaagttctctgtccaggaaggagaaatgcactgcatgaaactaaacaagacttaaaaattgtgtttaagatatcacctggcatgtttcatctggagaaatctcatcattagcttactttcaggtattttcccagtgcagatgaagtaagggcatactattctcattgtttaaaatacagtggatgtgagaaatgaaaaagacactttacaaactcctcactgttggttggcaactaaacacagcaagagggagtgtgatgtggtggcaacagcctggagtttggaggctg

SEQ ID NO: 122759 - DNA, 573 bp, Homo sapiens
ccttactaacttcataagtcatggaactccttgagagtgagtttttcaggttgcagtggtcctcagtgtggtcttctataaataacaaactcacatactggaaacaaaaatcacagccattcataaagaacttcctaggtatctatcctgattgttgcttggtgtttatacatgcatgatgttcagccgtgattcactagactccagtcacattctccttccttctatttttctaatacttcaagctctttcctatgcttattttggaattaagccaatacttctgtatatagattgtwtacaatcagatacaaactaaaggaaggaacagtgatcaaaaatgcatgaccaggctggacatggtggctcatacctctaattccagcactttgggaggatgaggcagaggcttgctgaggccaggagtttgagaccaccctgggcaccatagtgagacctcatctctactaaataataaaaataataaataataaatgcatgattagacagaaccccacggctgaaggaaccataaagttctataaagtactatcctaataatgcaaagtaaat

SEQ ID NO: 122760 - DNA, 600 bp, Homo sapiens
acattagctctctttgccagacacacccagggaggcatcgaccctgtagaattgctccacaaagcacccatcaggagaccacctctagcatcaccacaacatgaaacatcttctgacctaagacagacactgcacttactacactatgctgacttccttaaacgtgtcccccatttcaatccagatattacctataaatcacttttctgtacccatatgaataactgatatttgactctgtagcagtctaggtctaatctggagatagaaactacaaagtgggttaaacaaaggaagattaatataaagaataattaaactataataaaggagaataagatataaggaattctacatggtatcccagggmagatggagagtacccaaagaagaacaaatttcaaaaggcatcccttccccaaggttggggtttagacctcattggaaaaagtatatttcagctcatggaaaaccagaagttttctggttccagcctggagctagtctgcagtcattgagcaagtgggaggcaaccctctagagtgaaggcaaagaacaagtgatcaacaatcagtggtgtgggcatgcagaaagggtcag

SEQ ID NO: 122761 - DNA, 632 bp, Homo sapiens
gaagcagtgaatggaggaagaaggaaagtatcagaatgagtgatgaaaaagactaaactatttatcccactgcagatcttggaatctgagctgagtcagacctgaaggagagaaaaggttggattgcatgagattgtgagactttgagactagattggaccagacttttcaacttttgaaaaatgagatatttctatttgttaaaacctgaaagtractaagaaacaaagccaaagaaagaaactaggctaaatggggaacaaagtatcaactttgttaacagcttgatgaagcctattaaatgcctcaaagtcatggtctaatgaaagccagatagagagagaccgtaacttatattgaaatccctaaatgagcctctttacttactccccacatctgacgaatgcacaggcacatcaagatcaattctcagggtgagatcaaaccactgcaatctaaggaaagtacaacataaaacatgcacaccagtgcaagaacaaaagaaggaagacagacagctggaaagaccttgtttacccccagcatccagcactgtgcggtatgtgctatctggtttatgcctgggaaatagccccaatacaagctgccatgtagaaaagaaggaagctgaa

SEQ ID NO: 122762 - DNA, 581 bp, Homo sapiens
atctacaggattgggtgtccatctggttactgactgaccagaggaatttccaacatgcctttccatccttattgggaaataaaccacattttttccccttggattaattaagcacctgaaggtagtttaraaagtagaacacctgacacatgtgactccagtgtatttccccaacgctctctccttgtgcaagtctagtgaatggaccaagctgatctgtcatatttattccaattcgtggaataaatatgccacctgaagcatcagcccatctcacagagccccagaatcttcctgccactcccagactttatttttatttctggcacatgagcatgaagcacacaatcacatagaaaggctgaatcttggagagctgagtgaatgtcaacttatatttcaaaaggtgtttttctgtttcagaagacatatcatgtgctcattaaacatccacctacaatcagctctgatgaagagtggaccctgatccacctcttacagatttgcttgagagctttaaacccttctaatctcaggctggttcacatttgactgctgaagttttagctgagtattcagct

SEQ ID NO: 122763 - DNA, 648 bp, Homo sapiens
tgaacattatcaataacttgatctaattaatatttatacaatgccataaccagtaactgcrgaattcatactcctttaaaatacacatggtatattcataaatgcacatagtatactcacaaagatagactatttgctgagacttaaaacaagtcttagtaagtttaaaatgattgaaatcagagattttatctgaccacaaaataaaaaatagaaataattaaattacataagaaaacccctaatatttagaaattaataacaaacttctaaataattgatgtgtcaataaagatatcacaaaagaagttataaaatattttcaattaaacagtaatgaaaatacatctcacaatttgtgggataaagctaacacggtgtgtagaaggcagtttatagatttgaagggttattcagaaaaaaaaagtgtctaatcctatgtcctatagtcctaccttaaaaatacgtaaaaagaagagtaaaatgtactcaaagtaagttgacagaagaaaatagtaaaggaaaaagcaaaaataactgaaatagaaaccagacaatagaaaaaattaacaacttcaaaagttagtcctatgcaaagattaaaattgactttatctattttggctgctataaaaaataccttagact

SEQ ID NO: 122764 - DNA, 566 bp, Homo sapiens
agttgttacaagcttggattttggagtcagatagatcaggattccattcgtggctttacaacttactatccaagtgttctcaaaaattactttactttcctctcctgttaagtgaggaaaatatcttcaataagattatctaagattgtattagacaaaataagaaaagcttttagcatgataacaagtagatttttgaatgaatgaatccccagggaagtcctacgaaaggtgggtggtatagagaagcaaggaaactgaggctcagagatgttgagcaagttataaagaaaataagcagcaaagctaggatccaaatcaagttcagtatgtttgcaatgtcaaggaagtttctattatttctgcaagaaacattagtggcattttccactccagagtttctttaaaggacatatgctggkgaactccagttatttgtcaactctgtctccctagaaatctctttagattagagttatcatcatcctttggcatttcaaaccctgcacaacatgtttataattggatggtctgataaatgatcctgcataaaccagccactaaca

SEQ ID NO: 122765 - DNA, 664 bp, Homo sapiens
ttaaaaacatgaaaattctggcagaaatttccttcatttaaagatagatgataaccataaaagacaaaacctactttatctacctcacaagtacagagaaaagagaaattatcctgcatttcaataagaagtacaagatctcttatgagagttctttaagatctcaacttgaaattaatttttctatactatcatatctttgtctttattttaacaaattataatatatttgcatatacctttgatttaaacttttgagggaacaattactttctaagttttaataaagaaatgcagtacaataattacatgcatattcttaggtacttttgagaaagtccagtggattatcacgttttagataaatggtagttgtgtccattttagagaattggcagctctggcccaatcagttatacttggtcagaaggctataaaacagggagsggaatgatactgaatgaaaaggaaaggaaagtagtaacacattagagtccatgttagagttctacctagtcaaatatcttaaaatatgatgaatatttaaaaacaaatgccctacacttagccattttaatttttaatcaaggttaagacttaaatagataaattttttgatcagagaatgaaagtatgaattttatataaattgtactgctagagc

SEQ ID NO: 122766 - DNA, 578 bp, Homo sapiens
tacttccaattatttaagactggtattctgaaaagctatgcaattttgtatgtttattttgttttcagccaccttatcgaattttcttactaactttattagtgtttcttttgatcartttgaatattctagctgtaaaaacatgttatctagaaaaataatttttgtttatattgccatatttagacttttacttcttaagttctatttttgattaattggttaaaacttccaaaggcatttcaaattataacagttttatcagaaattcttgtgtttttccctaattttattagtttcatatttagtatgaacttagtcaaattttagatcccccttttacattttttattaatattaatatttttaagccagtattaagggtttactcaaaataacctaaaatatcagaattcttcctcatttgatcagtgatactctaaatataatgtgaaggtaacaaaaagaaatatagtatttaaaaatgtcaattatgttcctttaaattactattactttcataaattgatttgttatttctaatcacatctataatatagccagttaaataattaatg

SEQ ID NO: 122767 - DNA, 498 bp, Homo sapiens
ttttgtattttgaattccttaacttttatttgttttagaaattgaggcaaggtagatgaggacaaaactggtttctaaaaataattacatttgcaaatatttgcagaagctttagtcaaaccagagtttacttcaagaaattttttaggccgggcgcggtggctcacgcctgtaatcccagctactggggaggctgagaattgcttgaacccgggaggtggaggttgcagtgagccgagatcgcgccactgcactccatcctgggcgactgagtgtggcaccatctcaaaaaaaaaaaaaaaaaaaaagatgcctgtaatcccagcagtctgggaggccaaggkgggcggatcacttgaggtcaggagttcgaggccaacttggtgaaaccccgtctctaccaaaaatacaaaaaaatcagccaggcatggtgatgtgtgcctgtaatcccagctactcgggaggctgaggcagaatcgcttgagtctccagctgccc

SEQ ID NO: 122768 - DNA, 588 bp, Homo sapiens
atcgtcattcacatctcctctagagcaggagttaagagcttggatcctgaaggctcccccaacatcctccccagaaaaaaacaacagttcaaatcccatatctgattcttactaccaagttgttcttgggcaggtcatctatcctctgtaagcctcaatttcctcttcaaatgagaataaatcttatatgtgaaaagctgcactccatgaaatgttagttattatcatcacttgtcctcacaactagattagaagcaagtttatctcagaaactcatttttaaaaatccaatgcaagatctgaaaaaatgattcatgggaacttactaaaattttaaagcaaattaacaagaagatkagtacaattaattcacttgtatgaaatctcacttaattctaagtatacccatacaaggcatctaaaaaaataaataaaagagtagaattcggcaaagatataggtttgtcttaataactgcttcctaactcataactagctaaatttatttcccagatgttcctccataccccacattgtctttccccaccctgactcacacacacacacacacacacacacacactcact

SEQ ID NO: 122769 - DNA, 491 bp, Homo sapiens
gactagtactttcgtgtctccagacctttgcacatgctattccctctrcctgtaatgcccttttcctgttgccccacctggctacttgggaaaatatcactgatcctataaacctaactaaatatttcctttcctctatctctccctctccctgcccccagtggacatggccctgccatgatcctgggcataccaaattgtactcatcttttgagttgaccatctcttcaactagcaggcaagctccatgggagctggaataaaatcttctttttgtctcagtatctctggtgcacagcacagtgcctggcacacagaacaaatacatttcatagaacaggggttggcaaactatagcttgctgcctgtctttgtaaatatggttttaccagattgcaaccatgcccattcattcatttacaaattgtctgtggctgcttccacattgcaatgacagagttaaggagttgtgcaagatgatgacttgcaaa

SEQ ID NO: 122770 - DNA, 491 bp, Homo sapiens
gactagtactttcgtgtctccagacctttgcacatgctattccctctacctgtaatgcccttttcctgttgccccacctggctacttgggaaaatatcactgatcctataaacctaactaaatatttcctttcctctatctctccctctccctgcccccagtggacatggccctgccatgatcctgggcataccaaattgtactcatcttttgagttgaccatctcttcaactagcaggcaagctccatgggagctggaataaaatcttctttttgtctcagtatctctggtgcacagcacagtgcctggcacacagaacaaatacatttcatagaacaggggttggcaaactatagcttgctgcctgtctttgtaaatatggttttaccagattgcaaccatgccyattcattcatttacaaattgtctgtggctgcttccacattgcaatgacagagttaaggagttgtgcaagatgatgacttgcaaa

SEQ ID NO: 122771 - DNA, 395 bp, Homo sapiens
aaaggaattctgaaacgacagatgggcagggtcccttggtcctcagacttgataattctatgcctctctgcacagctggtgtctgggctccctggcattggagtggtatgctattcaatgagtcattcattccgtcrtccattcaacacctgttactgagtacctgctacatgccacgccccattttaggcagtgaacaaaacagaagtccttgccctatagagctcatgttctactggcatgaggatattttttttcttctagcacttttcaattcataaactgcttacacattcacaactccattcaatctccacattaaacagaagaagggtaggatacatactattagcaacatttggaggtaagaaaggcttagggaaaatgggtgattt

SEQ ID NO: 122772 - DNA, 529 bp, Homo sapiens
gcacgtggactaatacggtatttgtcttctttgtagctggcttatttcacttagcataatgttctcaaggtccaaccatgtggtagcacgtatcagaatttccttcctttataaggctgaattaaattccattgtatgtatgtacctcattttgttcatccattcatctatggatggacatttgggttgtttttattgttggttgctataaacatgtgtggacaaattatctcctcaagaccctacctttaattcttttgggtatacacccagaagtgaaattgctggatcarttgctgatggtcattctatttttgtagcctccttttaaaactttgctttttagtacttattttccccaaattaataatttctcaggtaaataagaaaccaatcttttacagaatagtttttttatcatccatagagtgttttatcaaatggccatacttattaaattggttgcttccagatttccattatgaaaaaccatgctagataaacaaatgtttatccataagatgaattc

SEQ ID NO: 122773 - DNA, 560 bp, Homo sapiens
tcaggcactttctgtaggagactgttatttctgtaaagatggttatttaaccctcctccaccccatcacggtggccctgagggctgacccggaggccagtggagctgcctggtgtccacgggggagggccaaggcctgctgagctgattctccagctgctgccccakcctttccgccttgcacagcacagaggtggtcaccccagggacagccaggcacctgctcctcttgcccttcctgggggaagggagctgccttctgtccctgtaactgctttccttatggcccagcccggccactcagacttgtttgaagctgcactggcagcttttttgtctcctttgggtattcacaacagccagggacttgattttgatgtattttaaaccacattaaataaagagtctgttgccttacttgtttctctcctgacctgtgtattcctttgtttctggatctgatccattcagccccttccatcatcactgacttgttcaggtctgctgcagagcgcccatggtggttccctggtatcttacatattccacagtgtctttgag

SEQ ID NO: 122774 - DNA, 597 bp, Homo sapiens
ccaattattattataatatataaatatatatgcttatttattgttttcttcccctagagtacaagtttcatctatcttaatcaactgatatatttctaactctttaaatagtatctgatacatgggaaaatgccaaaatatattggcacaatgcatgaatgaatagtgttttcttcatgaaacctttcagagtgctcccattgtaggtaattcctctctccttggagtccccagtgtatttaatttccatttcctactgtattgtcatgttccttgaattttgrttattcatagatactcttatatatcctctactccactgtaggatgctggagggcagaattgaaggcaaaatgttcaataattggttgaattgatgaatcaagtaaaaatgatttaaaaaatcacccttatttaaaatacggatagaagaggcagtgctgaaaatgtctacagtgtgacttaccagcacttctcaacacgtcttggcaatcgtgtcatttggactgttggcggatatatacatttttcaggattgtcttcaacatgcccatgccattttctcagccccattatgtttgtaaaatgaattcactc

SEQ ID NO: 122775 - DNA, 539 bp, Homo sapiens
ttttcaaaatagttcccagttcaatgaggcatttatatttgtttaattgaagagactcactcattccatttttttctttttttaagagacagggtctcactatgttgcccagaggagtgcagtggctattcacaggcatgattatagcacactacagtctcgaacttctgggcttaagtgatcctcctagttcagtctcccaagtagctgggactacaggtgtgtgccacaacgatgggctggattatttcttttcttacttattcttgaagtttttatgaagtctctgtctttcacatactctagaactgctcaaaaaagaggacattcagctaagaacaaaaatatccaggtgataatctcagtttagtcactaaaaatctacctgaccttgagaatccactctgcccttagcatctccgaatgtcagattgttcatctgaaaagtgggtgaatttggtaatttcatttctatttcaaaatggygtgaattagtgacacaggagacatccaagaactgaccttttgatgtcagtcat

SEQ ID NO: 122776 - DNA, 399 bp, Homo sapiens
tatttccttcctaccctcacctatcccctatacatcttaaccaccatatcactttaacaatctttaccacaacctccctgttcctagtcaccatcactgcccacctgcaagagtttcctacctggggtccttctacaccagtaagctgccacagagtttatagaggatgggtgacaagtggaaattctttacagtcctyaatattgcagtcagagtgattcctgaacatgcatgagaacacacccttctctgctcagaatcctcctatggattttcatcacagagtcaaagtcaaagtctttctggtggtctaggccctgccacctctctaacttcagctcaccctatgcttcctcctgctcattcatagctgtttccttggttacatcaaacgaattc

SEQ ID NO: 122777 - DNA, 603 bp, Homo sapiens
aaccatctgtgagagctttcatcctgctgacaataacttactagacaataaatgaatctcatccctatcaaatttacatctctcattactagtaagtatgaacatttttattattggacatttttatttcatttctttaattttctttttcttgagacagggtcttactcttgttgcccaggctagaatgcagtggtgtgatcatggctcactgcagcttcaacctcacccccaggctcaggtgatccttccacctcagcctctcaagtagctgggaccacaggcatgtgccaccatgccaggccaatttttgtattttttgtagagaaggggtttcaccatgttgcccaggctggtctcaaactcctgggcattttaatttcttcttttgtaaattatctattcttctcctttgtctatttttctatttggatgttactgttttactgatttttcaaaagctctttatgtgctacaatactaagcttctaaaggctttcttttytgtttttgcaaatatctttttctgttttttcctttttatttagtttatgtttggtttgtgtgcaacaaaatttttaatttatatgtagccacatttat

SEQ ID NO: 122778 - DNA, 557 bp, Homo sapiens
agtctctcatcagcaagaaggttgttggagtagagggaggaatggttgggaaaggtggccaagccctcaacgaggtccctcaactctgcagatctggaacatcaaataggaaggagttagggactttgagcattctattcactaaagtgttcttgttacagagaaggaaatgatggaagccaacttatctcacccccaactttaggatccatactggaaagacaatttaataattgtagcgagaagtacgtatctcgggaggaaaacctccaaggacaatgaagtrgaagcactttgaaagctctagtcactatatactgtagatacaaattaccacggtcactgaagatgaatacggcatctacattctccttctggcatattgctgaaccccactgtctagccagagactgaaacacactggtcacatgtttgctgatgccacttccaaatttagaaacaatcaaaaactcactcaacattttagatgattgagagattcaagaggtctgaatctcccttttaccacagacagcctgatcctctttgggttaagt

SEQ ID NO: 122779 - DNA, 454 bp, Homo sapiens
ctttattagttgcaaaggaaakaaatacaaatcagactggctttagacaaataggaaacttactgccttctatttctggaaaggtctgggggttgctttcagttatggctggatctggggaaccagatgatgctgtcgttctccttctctgcctttggttgcatttgcatttgctctattctcaggcagggccaccattgctgttgtatggatcagcatgtagctccaggctgaccacctactcatttactaaccttttaatgaagtctataactctttcccagtggtttcagaaaaagcactagggctccctgtgtcgtgtggttacccctgtccagtcactgtgcctgaatggccaggtgccagtgacacaattcttggggttggtcctgtggctactcccacccaaacccagggatcgttgagtgggatgtaaatgattcagcaaatgaga

SEQ ID NO: 122780 - DNA, 454 bp, Homo sapiens
ctttattagttgcaaaggaaagaaatacaaatcagactggctttagacaaataggaaacttactgccttctatttctggaaagktctgggggttgctttcagttatggctggatctggggaaccagatgatgctgtcgttctccttctctgcctttggttgcatttgcatttgctctattctcaggcagggccaccattgctgttgtatggatcagcatgtagctccaggctgaccacctactcatttactaaccttttaatgaagtctataactctttcccagtggtttcagaaaaagcactagggctccctgtgtcgtgtggttacccctgtccagtcactgtgcctgaatggccaggtgccagtgacacaattcttggggttggtcctgtggctactcccacccaaacccagggatcgttgagtgggatgtaaatgattcagcaaatgaga

SEQ ID NO: 122781 - DNA, 526 bp, Homo sapiens
atgcttctcttcccatctgtcttatttcctctgtcctctgaggatgctgcttattattatttttataaatacattctcgtgaagagaaaattaaatatgyatgtgttttaaaaccaagtatgcacaatagagtcctacaaaatgcttgaatggagtcagtcagtcaatctttcatgaatatttgaatttttaggtggcccagctcaggtaacttacataattgcactgtgtccttacagtgaagcaaaaaaaaagaggggggggtggttaaggcctgggatggagatggaggttttacacacacaggcgcgcacacacacacacacacgtgcacatagacatacacacacccatatgtatgtatgtgtgtgcctattaattgcggttcctactcaggactctgatgaaagccacactattacaagtgactttggtttatttgaaggttgtagaaaagtcggcctcatcttttcaaatacccctgagttaactttctcctgaaacctaactttgcccatcaattctc

SEQ ID NO: 122782 - DNA, 526 bp, Homo sapiens
atgcttctcttcccatctgtcttatttcctctgtcctctgaggatgctgcttattattatttttataaatacattctcgtgaagagaaaattaaatatgtatgtgttttaaaaycaagtatgcacaatagagtcctacaaaatgcttgaatggagtcagtcagtcaatctttcatgaatatttgaatttttaggtggcccagctcaggtaacttacataattgcactgtgtccttacagtgaagcaaaaaaaaagaggggggggtggttaaggcctgggatggagatggaggttttacacacacaggcgcgcacacacacacacacacgtgcacatagacatacacacacccatatgtatgtatgtgtgtgcctattaattgcggttcctactcaggactctgatgaaagccacactattacaagtgactttggtttatttgaaggttgtagaaaagtcggcctcatcttttcaaatacccctgagttaactttctcctgaaacctaactttgcccatcaattctc

SEQ ID NO: 122783 - DNA, 586 bp, Homo sapiens
agaaaataaaataacatctaagtaaatagagatatagtccatgttcatgaattggaggatttaatattgttaaagtgtctgtttttttccaaattgacctataaattcaatgcaatactaataaaagtctcagtgagccactttgtaactatgaataacctgactctaacatttatatggaaagtcaagaaacatagactagtccacacaacatttaaaaaaaagaacagatttggagacatttatgcgaggaggagaatgttgagtatgtgaaatacaggaatttctctttaagatggtgaaactatcctctgttgcactctaatagtgtgtatatgatattatttatttcttaacacctaaagaacattacagcacaaagtgaaccttaatatatgcaaatataaataaaaagcatttaggtagctggggaattctgagatggaacatggaatgtgaygaaacatctgactatgttgctgataaatgacataatgccactggcggaagtggggaaaatgttgctgacctgtgtagctttggaaatgagtggactatgcaaaactaaaaaaaaaatctgcacata

SEQ ID NO: 122784 - DNA, 529 bp, Homo sapiens
agtgcatcaatgcaattgtacccagatataattctattgtatttaagccagaaaaatcaaaactacctactaatgcacattttttcagcttgaatttttaatttaactgwctcctccaaattgagcaaatgatgcatagatgcgtgtccagattcaatgatcaaattcttcaataaaaagggagggtggatgggaaggcagttccagatgagtcctatcagaatctaagatttgcagattctgtctaatgttactgtggattttcttccactttatgtcaagttactaaaccttatataagggtagagtaattaagccagcctagagaaattataagcacattgtcagaacacccacgccaaagtccaggaatgactgtcagcaattttggatcccagactgttacacttgctttccttggcaagctctaatcaatgagccagccacagaggatcgaaggcaactgtgatgaaatgccaccttatgaagtaattggcttcatggatctgcccagatgaatcataaaact

SEQ ID NO: 122785 - DNA, 529 bp, Homo sapiens
agtgcatcaatgcaattgtacccagatataattctattgtatttaagccagaaaaatcaaaactacctactaatgcacattttttcagcttgaatttttaatttaactgamtcctccaaattgagcaaatgatgcatagatgcgtgtccagattcaatgatcaaattcttcaataaaaagggagggtggatgggaaggcagttccagatgagtcctatcagaatctaagatttgcagattctgtctaatgttactgtggattttcttccactttatgtcaagttactaaaccttatataagggtagagtaattaagccagcctagagaaattataagcacattgtcagaacacccacgccaaagtccaggaatgactgtcagcaattttggatcccagactgttacacttgctttccttggcaagctctaatcaatgagccagccacagaggatcgaaggcaactgtgatgaaatgccaccttatgaagtaattggcttcatggatctgcccagatgaatcataaaact

SEQ ID NO: 122786 - DNA, 621 bp, Homo sapiens
gcttgaatttttaatttaactgactcctccaaattgagcaaatgatgcatagatgcgtgtccagattcaatgatcaaattcttcaataaaaagggagggtggatgggaaggcagttccagatgagtcctatcagaatctaagatttgcagattctgtctaatgttactgtggattttcttccactttatgtcaagttactaaaccttatataagggtagagtaattaagccagcctagagaaattataagcacattgtcagaacaccyacgccaaagtccaggaatgactgtcagcaattttggatcccagactgttacacttgctttccttggcaagctctaatcaatgagccagccacagaggatcgaaggcaactgtgatgaaatgccaccttatgaagtaattggcttcatggatctgcccagatgaatcataaaactattcatcaatatcctcagttgtgcagcagtgagctgttacatggttagctcaaggaatactctgatcaggaaagcttattgtacgattcatttggcaacctattaatcatcttcaccttagaatagaagagggtaggaaaaggaacaaataccatcatcaccattaagccagggctagc

SEQ ID NO: 122787 - DNA, 529 bp, Homo sapiens
agtgcatcaatgcaattgtacccagatataattctattgtatttaagccagaaaaatcaaaactacctactaatgcacattttttcagcttgaatttttaatttaactgactcctccaaattgagcaaatgatgcatagatgcgtgtccagattcaatgatcaaattcttcaataaaaagggagggtggatgggaaggcagttccagatgagtcctatcagaatctaagatttgcagattctgtctaatgttactgtggattttcttccactttatgtcaagttactaaaccttatataagggtagagtaattaagccagcctagagaaattataagcacattgtcagaacacccacgccaaagtccaggaatgactgtcagcaattttggatcccagactsttacacttgctttccttggcaagctctaatcaatgagccagccacagaggatcgaaggcaactgtgatgaaatgccaccttatgaagtaattggcttcatggatctgcccagatgaatcataaaact

SEQ ID NO: 122788 - DNA, 605 bp, Homo sapiens
taaaccttatataagggtagagtaattaagccagcctagagaaattataagcacattgtcagaacacccacgccaaagtccaggaatgactgtcagcaattttggatcccagactgttacacttgctttccttggcaagctctaatcaatgagccagccacagaggatcgaaggcaactgtgatgaaatgccaccttatgaagtaattggcttcatggatctgcccagatgaatcataaaactattcatcaatatcctcagttgtgcagcagtgagctgttacatggttagctcaaggaatactctgatcaggaaagcttattgtacgattcmtttggcaacctattaatcatcttcaccttagaatagaagagggtaggaaaaggaacaaataccatcatcaccattaagccagggctagcaggcacgaacttctctgctaatatagatgcaaaatctaaatgcacttacaatgttttcctgtcaagaatataggtgttacacttttctattcgaaatttgtatttccctcagccttgatttattgttgtccataaaaatttacgtgaatattggaaaaagtggctgtacatgtgctgttgtct

SEQ ID NO: 122789 - DNA, 656 bp, Homo sapiens
gcaagatgagaggaccagactaagctttcttccccatccaacattttcatcagcaaattaaaccaagagtgagaatctttcctccagatcttcttccaacctctgaayacagcaactttgattgttgttaattacccaaacccctgcctagctgaaggatggatggctctgtgtttacaacttgaatgtcttcaaacataacgtattcaaccagggacagaacaatgccaccgcagactggaaagcaaagatattgtttatacaggtaagatgtcttgaaccagctgtctctccagacattttttgctttgtagaaaacaatgaggaacaccgttatagacataaatgaaagctcccaagatggttacagggagccaaaggatctgggagaggcacggctgggctgctgctaattggacaggtggctcttcctgccagctgtcctcattcaacaggcattttttaatgagaaatatttctctgcaattgaagtaatggtcctaatagaatattatggccttgcataaggaaaagaacacaaaggagtttagatacactctgcatgcatcattagagtgctctctagaatatcctcagtgggtgctcaccttgaatgtccttgaatattggcaaccataacttcatcatgcacccaa

SEQ ID NO: 122790 - DNA, 656 bp, Homo sapiens
gcaagatgagaggaccagactaagctttcttccccatccaacattttcatcagcaaattaaaccaagagtgagaatctttcctccagatcttcttccaacctctgaatacagcaactttgattgttgttaattacccaaacccctgcctagctgaaggatggatggctctgtgtttacaacttgaatgtcttcaaacataacgtattcaaccagggacagaacaatgccaccgcagactggaaagcaaagatattgtttatacaggtaagatgtcttgaaccagctgtctctccagacattttttgctttgtagaaaacaatgaggaacaccgttatagacataaatgaaagctcccaagatggttacagggagccaaaggatctgggagaggcayggctgggctgctgctaattggacaggtggctcttcctgccagctgtcctcattcaacaggcattttttaatgagaaatatttctctgcaattgaagtaatggtcctaatagaatattatggccttgcataaggaaaagaacacaaaggagtttagatacactctgcatgcatcattagagtgctctctagaatatcctcagtgggtgctcaccttgaatgtccttgaatattggcaaccataacttcatcatgcacccaa

SEQ ID NO: 122791 - DNA, 645 bp, Homo sapiens
ttgtttaggattgcattaaatctgtgctttatctggggagatttcccaccttcctggtattactttgcttgctcttcttttcagtctctttggctggtttccttcttatctccatgtcttgccctcagtgcctsagcaggtcccagggctccttagttggaacaacaatcttctctctctatgcataatcaccagagcaaggttcacagattccagcatgtttcacatcacatagatggcttgttaaacacggattgtaggaccccatccctgaagcttctaattcagtaggttggaggttaggcccaagaatttgtctaacaaatcaatgctgctattcctgggaccaccctttgagaagagctgttcacggagccttttttaaaaataccatctatatactgataaagttttatgctcagcctaaacttcatccaccttcctctgaactccaaaattccatgtacaactaacaatgtagtaactttaataatcacctgagactttatagattccagacctaactcctcattcccttcctcctacaccacactccatatacagttgatcagcaaatcctactggctgtactttcaaatgtatccagaatttgttctcagttctcaccacctccaccatgactgc

SEQ ID NO: 122792 - DNA, 645 bp, Homo sapiens
ttgtttaggattgcattaaatctgtgctttatctggggagatttcccaccttcctggtattactttgcttgctcttcttttcagtctctttggctggtttccttcttatctccatgtcttgccctcagtgcctgagcaggtcccagggctccttagttggaacaacaatcttctctctctatgcataatcaccagagcaaggttcacagattccagcatgtttcacatcacatagatggcttgttaaacacggattgtaggaccccatccctgaagcttctaattcagtaggtyggaggttaggcccaagaatttgtctaacaaatcaatgctgctattcctgggaccaccctttgagaagagctgttcacggagccttttttaaaaataccatctatatactgataaagttttatgctcagcctaaacttcatccaccttcctctgaactccaaaattccatgtacaactaacaatgtagtaactttaataatcacctgagactttatagattccagacctaactcctcattcccttcctcctacaccacactccatatacagttgatcagcaaatcctactggctgtactttcaaatgtatccagaatttgttctcagttctcaccacctccaccatgactgc

SEQ ID NO: 122793 - DNA, 398 bp, Homo sapiens
cagtagaatagagcaccaagtagatccctaagatttctgactccaggcattggctcccagatggcatctctggacccattatgggccaggattaatttgctaccctgaagggaagaacacaagcttgactggccgcaccaaccactgattgtagagccctaggaccttaagcagacaaagagggtagccaagcagtggttaccatgagcattgggcaagacccactgccctgctrgcttcaagtctgagctggcacactcccagttgtggtggtcacaggggttcttgtgtcagccctatccaagctccaggcagcccagcactgatagagactccatttgtttgggagtaagcaagggaagagaacaagagcaactgcctggtaaaccagggaattc

SEQ ID NO: 122794 - DNA, 606 bp, Homo sapiens
aacaatcagtttgtaactccaacatgctcctaggatggctgacccatagttcacagcggggcatgaatagagatgaggacttctgaattagtgtcatgctcatgcactcactcatatttactctcaacataacaccctgtgttggtttcaagttggcttcaaattctctgaaacacttcccatgaaaaggtgaaatayagcctcttctcttgaatggagacagtctctgtaactgcttgaacaataaaatacagcaaaagtgacgctgtgcttgtttccaggcctaggctctaaaatactggcagtttctacttcctattttttgaacacttgctcatggaatccagctgccatgccatgaagaggaccaaacagccctacagagagtctcacatggaaaggaatcgaggttcctggccaacatcccatttgagctcccagcctggaccctaaaacacttcctgcaggatcctccacatactctattgtctgccagtcagacgcagaggatccagtggaatgctcttgggtgttgaggaatggcaaagccactacatgaaagagcctgagtccctgaggaactgaataaagcagatatacctctcc

SEQ ID NO: 122795 - DNA, 595 bp, Homo sapiens
gtgaagcttcagatactgaatggtcaactattacatgattttgccctccaatagatggtttctagagccctcagataccaaccagtttctctttwaaaaaaggatgttattatgtgcaattgtgtagatactatgtgcctgtttaaatgcattgtcattacagatttctgaatctcaggccctcgtggcttcactttgtaatgcaagtgtggcaaagtacaaagagtttgtgggttttggaatcagagaaattggagctgaaatctgaggaagccactaaatttctgtgttgtctggcagggaggtagggctgagagtgtctgttaatgattgcttgttttaaggatgagaggcaatgtttgtaaagctcctataatgtattactatttaaattctatgattattcagttattacagcccttgctttgaacaaaacactcttaattttgctggtacttctcagtcttttccacacaaagactgataatgggcgaggaaagtaaatatcatcctcaagaaacaggagaaagtttccataacagatttctttgtaatcttatggttgaccttatatatttgcattaatgtgatgatt

SEQ ID NO: 122796 - DNA, 596 bp, Homo sapiens
gtgaagcttcagatactgaatggtcaactattacatgattttgccctccaatagatggtttctagagccctcagataccaaccagtttctctttaaaaaaaggatgttattatgtgcaattgtgtagatactatgtgcctgtttaaatgcattgtcattacagatttctgaatctcaggccctcgtggcttcactttgtaatgcaagtgtggcaaagtacaaagagtttgtgggttttggaatcagagaaattggagctgaaatctgaggaagccactaaatttctgtgttgtctggcagggaggtagggctgagagtgtctgttaatgattgcttgttttaaggatgagaggcaatgtttgtaaagctcctataatgtattactatttaaattctatgattattcagttattacagcccttgctttgaacaaaacactcttaattttgytggtacttctcagtcttttccacacaaagactgataatgggcgaggaaagtaaatatcatcctcaagaaacaggagaaagtttccataacagatttctttgtaatcttatggttgaccttatatatttgcattaatgtgatgatta

SEQ ID NO: 122797 - DNA, 506 bp, Homo sapiens
gtgaggtttaagaactttctcttggggtctagattgggacccctttccagtaacaatatgatccatccattctacttcttacagatttacccaagaaaaakaaaagcatatgttcatacaaagatttgtaaacaaatgtctatagcaactttattcataacagccaaaaactgtaaacaacccaactatccattaacaggtgaatgaataaagaaattgtggtatatacatacaatggaacactatttagcaatataaaagagtgaaccattgatacacagtacaactctgatgaattgcaaataattctgctaagtgaaaggagacagaaaaaaaggaattcatattgaataattccatttacataaaattctaggaaatgtaaactaatccaaaaaatgacagcgagcatatcagaagttgcctgaggatttcacagttgggggagtgggggcatgaggaggataggaagaggcagcaggagaaagagataaaaaaggacatga

SEQ ID NO: 122798 - DNA, 703 bp, Homo sapiens
aatgatatgaggaactacagcatatgttgggacatttttaaaaaaawggtaaaaccagagaagtgggcaaggtccagatatgaagcaccttaaaagccatctaaagagcctggaatttattcttagctgtgaagactcagggaagaggttaaagtaatagagacatgactggatttctatctaggaaagaacactctaacagcagcaaggagaatggattggagacctgcaagattaaaggaagaggtctcagaagctgctgcaataatccaggtatgaaattaggaaagcctaaagtaaatcagcagcagaagagatgaataggaggggtataaaggagagattttgacttgttcttaaattaggttttggggaaaaaaagagaaaggcagagtcacagaagactgtcagttttccagttgcataaggcagtgttttataccaagggagacaatacaataggaagaacatgtttggtttgtggggggaaaaatgagctccattttggacataacaaatttgaagcaactgtacaaaatacaagtcaggataaactgaaggcagttaaataaatcattttggagactaggaatgaagcctggactggagctatggatttgggtgccagatgcttatcagtggcagtctgaaccagaagaataagtaagatctctcgggaagcatggagaaaataaggcagagg

SEQ ID NO: 122799 - DNA, 606 bp, Homo sapiens
gaaactccagaaaaggagaatagtgaatttaatatcagagacacactaaagatacatacccaaacgagtcttgtaagggaaatggtttctgacaaacttctgattattgtttaaacaaatgacttgttcacatattcaattgcttaatgatgtcaagcttataatcactacacatgggtgtgtatgtaacacatccatggctagagaaggtgaaagtccctgctgcttttcacagtgaggtccaagaataagaaggcagaaaactccactcagggggcctcccatgcattgcttcacacagttcagaaggccccactctctgcctaccttctgtataaccatgccttctcctccttggaaaagcctacacrccaaaggacagaagagacagacagaacaaacaacttccataaaatgctcggtggaggcaaggactaaactccatctgaaaacataatcttgtttctagtgtttatgctttaattctctgttttaagcccaccctaactgcttcttctgcttatggttaaaatatacagagatcacttactgcatacattatctttgttatgtagtgatgcatatgcaaatatattatgttattta

SEQ ID NO: 122800 - DNA, 601 bp, Homo sapiens
gacaaatggctaaacaaaggtartaatgggaaacaactgagttcttttatgttacaaaaacaggtaattaattctctccttttctatctcttattaaccatgacttgtgcactcactttgttttagtttctcagtaccacagggataggttttagccaaactggaaatatctgtcttaataaaggtctaccataggcttattgagagctggtctgtttttaatattgaaaatacaagctgtattttcatagagatgtccacatggacaaatttcctgttcttgattacaccgtgtggtttgggttctacactaagcctagattaagagatttaatcatttttgtttttagaagaagagaagaaaggaaccaaattccacttcttttcctacctagatttaagatcatggtatacttaagacatttacaatccagccctgtattccataaactttagtcaaaggtcaatactttaataatccacactattgtccagaaaaaaatttatccttggaattttcttacatttataaaagattattgattttatcttaggtcttgggttaaaaaaatgagacgaaaaaaactttatgagatacctc

SEQ ID NO: 122801 - DNA, 601 bp, Homo sapiens
gacaaatggctaaacaaaggtagtaatgggaaacaactgagttcttttatgttacaaaaacaggtaattaattctctccttttctatctcttattaaccatgacttgtgcactcactttgttttagtttctcagtaccacagggataggttttagccaaactggaaatatctgtcttaataaaggtctaccataggcttattgagagctggtctgtttttaatattgaaaatacaagctgtattttcatagagatgtccacatggacaaatttcctgttcttgattacaccgtgtggtttgggttctacactaagcctagattaagagatttaatcatttttgtttttagaagaagagaagaaaggaaccaaattccacttcttttcctacctagatttaagatcatggtatacttaagacatttacaatccagccctgtattccataaactttagtcaaaggtcaatactttaataatccacwctattgtccagaaaaaaatttatccttggaattttcttacatttataaaagattattgattttatcttaggtcttgggttaaaaaaatgagacgaaaaaaactttatgagatacctc

SEQ ID NO: 122802 - DNA, 607 bp, Homo sapiens
ttcagatggccccagtaaacactgcaactctgatggtaacttattttacaatatgtttccgggttgtcattttcttttcagtgtcaataatcatattgctaaaagtcctttattctaggaatcatctatctcagtaagttttttaaaaaaaaatgtaaaactttttgcagaaaaattttacaccatactgaacaactttaaaaggaagcatagaaaactagtttatttgaatcataagtttactttcatgtgctcagataaagttattttccttggcatttcagactccagcctttgaacttcattgyaaacaccatggaatttggcctttcagaaattgccagtgtcctggtgaataacaagccttctcctatcacggatttgtacagctatattaaaaattagtcaaatatcaaaaggaacaccaaagcttgtaggtaaaatgtcatcttagaattgcattttgaactttgggagcagtaaaaggcttgacaattaaaatgtcagagcggtcttatcaaaaaatatcttcagatattatttctttcctttttttgtttttcatagaatcaaatggagacctagccacatacacagacaggcaggc

SEQ ID NO: 122803 - DNA, 631 bp, Homo sapiens
atatttctcacattttctacataatgcagaaagcttccctagactctaagcttgagcttcaggtgatgcaaattaattccttcagtctacctggctagctatcaaagaagattctgccttttcattagttcattactcctactttagaagctgctaatgaattgatttttttaatgaacctgaagatattgaacacatacaagaaaaccttcaatattaatgccagcccatttggtttttcattcataagaaggagaaaatgggggctgaactcccccttttataacagcatyaatcccactcatgagcactcaaccacctctaatgtcccacgtcttaatattgtcacaatggtaattagatttcgacatgagttttggagggaacaaacattcaaaccatagcagacagaaagcagaatcaggaacgtgatctagaagtgacttttctttgtactttctccaaggttcccttgcaaggctaagatacatacacatagtaaagactgtcacacactcttggaatatttgggaaaataaataatcttagaattctctgctttttctgcctcacttgggcatcagtctgcctcaacatgctgtagcccaaactctcttcaatttcccactta

SEQ ID NO: 122804 - DNA, 631 bp, Homo sapiens
atatttctcacattttctacataatgcagaaagcttccctagactctaagcttgagcttcaggtgatgcaaattaattccttcagtctacctggctagctatcaaagaagattctgccttttcattagttcattactcctactttagaagctgctaatgaattgatttttttaatgaacctgaagatattgaacacatacaagaaaaccttcaatattaatgccagcccatttggtttttcattcataagaaggagaaaatgggggctgaactcccccttttataacagcatcwatcccactcatgagcactcaaccacctctaatgtcccacgtcttaatattgtcacaatggtaattagatttcgacatgagttttggagggaacaaacattcaaaccatagcagacagaaagcagaatcaggaacgtgatctagaagtgacttttctttgtactttctccaaggttcccttgcaaggctaagatacatacacatagtaaagactgtcacacactcttggaatatttgggaaaataaataatcttagaattctctgctttttctgcctcacttgggcatcagtctgcctcaacatgctgtagcccaaactctcttcaatttcccactta

SEQ ID NO: 122805 - DNA, 587 bp, Homo sapiens
accatccttttgtggatgagaagacaaagtctgggtgtttaaaacctgaggtcttggccaaaacctaggtttattaataaatctggagccaacccagtatcatggcaccagggataacctttggcwactcatgaacatcctgcacaatctaagaagttagcatctccccacttctcaggcttggccctgaatgcaattcaaaataatataaaagaactaacttcaagaatgtacctcctcttcttttcaactaattttctttcaaatgtaagctctaatatcacctctatgaagatttctctgactccccagtgtatttggtcttccctctgtacttttgttcgttctgttttattatacctgtattgtataataattctttttttcattgttctgtaacactaggaagtaatcttcctcgatgagaatatcttttattcttcttcataaccccaggacctagggcaatgtctgttgcattgttggaactttataacatttggttgataatagaaagcagcatttgttctaggatttgtccagtttacattaaaaaaaaaaaaaagaagtgtcatggaaaatcagtc

SEQ ID NO: 122806 - DNA, 559 bp, Homo sapiens
agggatggtgaatgtggcaagttccatgactgacaagcccatgttaggaggcattagtgtaaagaagatgctttatctaattaactaaatccatccatcatgctgctattaaaatctctgacccttctttctttctcatttaactcatgtaattacttcaattacacatttcttcaattattataattatgtattatttgtgttgaagtcattcttagccggtacaacattggcaacataatctctgtttccttcctgtctttatattcaatttcagtgtctttataataatacctgttagttttggggccagaatcttgtccctcttgtttattgctattttttcagcattagaatagtgcttgacttgtgacaagggctcaataaacattagttgaatggattaataaaaaggaggcttagaarggcaaagtggtcaggtgttgggtgataattgggcatacatttcatgggtctccctctaatgtttaatgtctaacgttcatctattttacgatggaaatgtacctattattcattttttactgttttttttttc

SEQ ID NO: 122807 - DNA, 582 bp, Homo sapiens
cagtttttaattctctattaatcctcactctcttggttgctccaaagctgttgtctcctccaggtgatgtttaagcctgtctctcttctcctcgcatgcaccttatgaaaaatggctttgccatctgcagctgtcaggaggctgtggacttgggagtacagctcaatgaatatacaaatgtgcagctggaccacagccccttccagaaggtagctggaatataaatcayaagcttgcattactcaagtaaccattggggggctgccatgcattagggagcttaagggaagtaagaggacatgagaagagtctcactggaaataggccctgcaatatgtgaataggttggctgaaataaacagagctgagagtagcatgtttcaaaaaaactaatttgttaggctcttgcagatcatggaccaaaactaagaccaccacagggttcattgagctccagtagatttgcttcctttaggacttaaaaggatatgagagctcagatggcaaaaaggaacaacgtatttgaaactggaagaaagggaatcctttagtaggtttgcttccttttggtctctctctctc

SEQ ID NO: 122808 - DNA, 633 bp, Homo sapiens
ttttccaagtttagaaaaatttgttatttctttgaataaggcttctaccctttttttctttttcaactcmcttttcaactccaaacatctgaaaatttgcccttttgatgtttattcatctatcccatatgctttctttttattcttttcttcttttccccctctgtgtattttcaaatagcctatctttgaactcaatggtgttttcttctgtttgatcaattatggtgttggttctccctattgcatttttcattttgttcattgcatttttatgctttaatatttctgttttttattatttcaaactctctgttaaatttatccataaatttctagatttttaaaattaaagtttgttgagcttccttaaaatagctattttaaattctttgtctgagaaattgcatatctccattactttagggtcagtttctagcatcttatttgtccatttggtgaggtcagactgaatgttcttgattattgtgaatgtggaacaatatctgcacattgagagactaagattttttttctcagtcttcactgtctgtttttgtgcctgttattcctcagcaggccttccagacattttaagccgactgaccattgtgtttttcaagtctgtgatca

SEQ ID NO: 122809 - DNA, 557 bp, Homo sapiens
aaatatgaatggagagcttctgtgggactcgaatagagaagtatatggccagakaaatgaaagcaagtgatagaccttggatctcaagaggatgaacctcaaatagctttgatctgccaggagtgggtataaaaggattgtctcaatggaaaaccatatggcattttcttaaaaggttaaaaatagaactaccatataatccagcaatcccgcttctgtatatttatccaaaagaattgaaatcaggatcttgaagaaatatctgcactttcatgttcattacaacattattcacaatagccaagatgtgaaaacaactcaaacgtccatcagtagatgaatggataaggcagatgtgatatacacatacaatgaaatgtttgttattcagccataagaaagaaggaaatcctgccatatgtgacatgaatgcaccttgaagatattatgttaagtgaaataagccagtcacagaagtacaactactatacaataccactcatacaaggtagctaaaatagtcaaactcatagaaactaaaagtagaatggtggttg

SEQ ID NO: 122810 - DNA, 595 bp, Homo sapiens
tttattttttatttaagaataagtgaatagaattacaacaacaaaaacagtgcattggagaaagtattwtcagaacatgaattggaccccattattctgataatgaaaaaaaaatttttcagcctggctcagtgactcacacctgtaatcccagcactttgggaggccaaggcaggtggattacctgagatcaggaattcgagacccagcctggccaacatggcaaagccccgtctctactaaaaatacaaaaattagctgggtgtggtggcctgcacctgtaatcccaattactcggaaggctgaggcaggagaatctcttgaacctgggaggcagaggttgcagtgagcctagattgcaccattgcactccagcctaggcaacagagggagacaaaaaaaaaaaggaaacttccaatttgctttttgaacctagtagaaatcgctataaagaaatcactgttaaattttttttaaatggcacagaaatggattctgattgttaaatacatgattgaacatgatggagacccctcattgactcgtgagcacctcaagctggaagttcaaggccatccatgattcaattcagtca

SEQ ID NO: 122811 - DNA, 470 bp, Homo sapiens
atgaaccaccatgcctggcatcttccttctatttttaataaaacatttctcagcctgggttagggttctgccatctcagctggactgctatggagatgaggtggtgtctgtttcagaatttcatatctggaggcacttatgtcccatgggtgatgtgaattctgattgagacatgatctgactttcccattgtataattactctctttgtttcaggtacaaccaataagcagcctttgggcagctgagaagacaaggcgagtatcctgctcctaaactcagttccctaactcagcacccactcctgactcctgcttggtctactcctgcctcggtgatgttcaagctcagtacttcttccacttcagccctcaggcaggcaaaaacacttccttatgcctcaatgactaacatstgtacctatttattcatagcacaagtatcttggactcatgaattcctatatttaat

SEQ ID NO: 122812 - DNA, 608 bp, Homo sapiens
cattggaatgtggcacctgagctaccttgtttggtacagawtccccccagatttccaccttagcaagggaaaacgaccctagatgaagacaaagatgctggaaggtaaagcaaataaagaaatatatgagtaagtctaagttaactttcacgttatagtacaaaaacaataatgtattttgagtttaaaatacagcattaaaactcatcaagataatactatgcaagttgagatcagggtaaatgaaattaaaagtattgtaaggtccatttgagtgtctgggcaaggataaagctattgattagcataagggtgtgattagatatggatgcattctgtcttatcataaggaacacttgaaggtggaaacctttaagtgggaaatagggataatttcaatttgctttcaaaggcatccacccagaagtattatttaaatattaccccatgcatccttaaccactctcagactaaaggatgctgttgtcaggttgtaataaaaaatcttgtttagagctattctttttctgtagttgggttttgacggcattggccagttccacagtacatgggacaatgttatcattggaaagtggggcatgagctac

SEQ ID NO: 122813 - DNA, 629 bp, Homo sapiens
aatgggggcagagatgagagtgatgcagctacaaggcaaaggacacaaaggattgccagtagctaccaaagttaaggaaaaggcagggaaggattctttctaaagccttcagggaaaatgggccctgctaacattttgacttcagacttttaagctccagaactgtgagagaatatatttctgttattttaagccactcagtttgtggtactttgttatgacagccacaggaagctaatacaagtgccatgtgtgctcaagtgttgtcatctcagatctgcttcccagatagtattcaaagactgcattggtgccctttctctgtaataccatgctgtgcttctcgctgccatagctaccatctctaccacaatagagatgacactggtctataattgtgtagttttctctcaattctcaagattttgaggtgccagaaactgtccttatttttatgtctagcatatagtaggaaatgctttatatrcctagcatatagtaggaaattcactaagtgcttattaaaataagatatttttttccaaatgtataaatctataatgctcttgtgtaaaacatttacatctcaagaatttaagacatgcacatatggaacaaattaaactcac

SEQ ID NO: 122814 - DNA, 372 bp, Homo sapiens
cttaataacaaaacttgacaaagatgttacaggaaagcaaaaacacgagccaatgttaagtttgttccaagaatgcaaaaattaacatctaaagtcaaattaatgtaattcatcatatttgccaaacaaaaatagaataattttaacagatacaggagaacaatttgataaaattcaatatacagtcacagtttttttacacaagaaaaaaagagaacctcctctagcaacccagaaacaggaggaatttccctaatcttatggagagtatctatttgtaaaagtttaaaaccaataatggggtcaatggcmaaatatttaaaactttccccctaaatttgggaacaccacttttttttttaattttattat

SEQ ID NO: 122815 - DNA, 587 bp, Homo sapiens
gtaaaaggtacagaaggtatgcttctcagtgttagattttgagcaagtagggggcttgggtgtttatcagctccctctgcctgatttcagcataggttgggcatgtcaaagtagctttgccttagtgtgttaactctctagtagtttctaacaggccagcgctttgataagtcatggcttggatgtcagcagatatcatttccagaattccctagggcatcctcccaccgagctgtagacagttcccttaagtctgaaggatgcttggctcttccatatgttgtagttcttgactcagtggcttgttccttgctctcagtggctgatggaaattggaaggggaaacttatcttgctgttctgatttgcttctgccctttagtgtcccacaaaagacaccctagacgtttctgtggagaggtagtgatattacatttttttttttctgtgtcacgggaattagctgtggataaaatgtatattttatgggggtccaagctgtgcactgatgtgctccaggccattacagcaatctcatgaggagccatggagtattttaracactcaaggtaaacacagagatatgtg

SEQ ID NO: 122816 - DNA, 604 bp, Homo sapiens
tttctcttctttctcttttctaacttttctgttaggttaactgttcactctttcatcttgcccagagaccacatgttgaaaaatgtccttgggagcttgaccttgtaaccatgtggcagtactttctcttggtctctgccatccagggagcaggaatttgggggttcatgtcatagttattcccaaaatttatgcctttgcaaactcaaaattggttgctctagactccttctgggaagtgcaatggaaacttcccaatgttktagcttaatagttaaggcttatgggtttcacctgtgagattatttttggtaaagttcaaaagccagaaatattggcagtttggcatggctaaaggtggtagtaagagatttaaaaggactttaaaaaaaaaaagagtgctatggtgaaaagtccacttaattgaaagtggatattcaagttctaacagcctgggactccttgggaaaaacagaggagatgccccagatccagcactgggaaaaacctctgttttcctcagagaaatcagtaattgaaagtggatagatctctctcaaaatcttaggctctgttctgttttgcattacattgtgttatctga

SEQ ID NO: 122817 - DNA, 590 bp, Homo sapiens
atgaggcacaagtaatattcttggagactagcggttctgatgcagaaaattcagctagtagccaatgaatgagaaccagtcatcagtatgcagattatttgtgaagatwcaaatttggatgggtctaacagaagtttatggaaccctgactctggccagagactcagcagttggaaatgagtcacaaggctaaaatgagaaattgagcaaaattgatccaatacaatcttcatctatggagtgaaggtgccttaaattctgacccatggcggcaatgagagcccaaacctgggggcacagatgagctacctgttggaggtgtcacttgagagaagctggggtctatgcatgctgggaatcagggaaacagacaaaagatttcatgaaatttgtataagcaaatctgtaaatatgatacaggaagtaataaaactactgctcttattgtagcatttgtcttgcagaaaatatataaactagggaaatgtgtgaagacacagaagttttcattttttaaaccactcagagaaaaatattttggtatatttctatcaattttttctattttattttacatagatgagatcatt

SEQ ID NO: 122818 - DNA, 590 bp, Homo sapiens
atgaggcacaagtaatattcttggagactagcggttctgatgcagaaaattcagctagtagccaatgaatgagaaccagtcatcagtatgcagattatttgtgaagatacaaatttggatgggtctaacagaagtttatggaaccctgactctggccagagactcagcagttggaaatgagtcacaaggctaaaatgagaaattgagcaaaattgatccaatacaatcttcatctatggagtgaaggtgccttaaattctgacccatggcggcaatgagarcccaaacctgggggcacagatgagctacctgttggaggtgtcacttgagagaagctggggtctatgcatgctgggaatcagggaaacagacaaaagatttcatgaaatttgtataagcaaatctgtaaatatgatacaggaagtaataaaactactgctcttattgtagcatttgtcttgcagaaaatatataaactagggaaatgtgtgaagacacagaagttttcattttttaaaccactcagagaaaaatattttggtatatttctatcaattttttctattttattttacatagatgagatcatt

SEQ ID NO: 122819 - DNA, 590 bp, Homo sapiens
atgaggcacaagtaatattcttggagactagcggttctgatgcagaaaattcagctagtagccaatgaatgagaaccagtcatcagtatgcagattatttgtgaagatacaaatttggatgggtctaacagaagtttatggaaccctgactctggccagagactcagcagttggaaatgagtcacaaggctaaaatgagaaattgagcaaaattgatccaatacaatcttcatctatggagtgaaggtgccttaaattctgacccatggcggcaatgagagcccaaacctgggggcacagatgagctacctgttggaggtgtcacttgagagaagctggggtctatgcatgctgggaatcagggaaacagacaaaagatttcatgaaatttgtataarcaaatctgtaaatatgatacaggaagtaataaaactactgctcttattgtagcatttgtcttgcagaaaatatataaactagggaaatgtgtgaagacacagaagttttcattttttaaaccactcagagaaaaatattttggtatatttctatcaattttttctattttattttacatagatgagatcatt

SEQ ID NO: 122820 - DNA, 569 bp, Homo sapiens
atccaaggatgtcacttttggaactctgtagatcagaaaaactgtgctttaaagtgtgtaagtattaattagatttctattttgataytgatgtttctttcaagaggaaatttgtgtaagaggattcccatttgcatttccattggctttcaactagtttgcttgaccctaagacaaaacaaaacaaaactaaaaaaccaatagcctggataatacatagtaatggaaaagagattgagattaacatttttaatgtgactagaggtcacggaaggttattgccaataacagaacccagggatgttcaatcgctccaaaactataaatgttttttagtagaatctccggtatttgttaaatttcctaggcctatgcgtctcaaattttagtgtgcaattatccgggatcttattaaaatgctgattctgattcaataggtcttgggtggagcctgagattctgcacttgtaacaagctcccaggtgttgcaatgctggtggttcccagaccacattttggataccagggccgtaggtcatgttcaaagtttctatgcaggaaatatagta

SEQ ID NO: 122821 - DNA, 667 bp, Homo sapiens
ctctgcctcttccctactcagttcagttcaacaggagagaagaaaataaacactcaaaacttgtacctggatattatgagagatgtataaagggtcagaattgttataagaatgtatctgtaccaatcctgtaaaggaacaatcattggttcaacagctaaatagctaattagttcataagtcactcaggcacataccatgtaagagctaaggtcatgtagccaaaaggtgagattagtctcttgtttccataagctattttttttgcaaaaataacatatattatgaatgcttcagtgaaaagaaacagggactcgatttagagctgcattaaaattctgactctgacattttgtagctctaagtccttgaacaagtcacttgatctgatgtttacatctgtcaaataagagtcaataatttctccacaaaattctcctttccttttcacccctccttcctgcccagtccctgagtcattaaggttgaaaatggactggtatataaggccttctcaatgattcttcctaactcaaaaccatgcctcagcagatttcgctggccttatgatatggctccctggctcctgaggagaaataccactgttaggaaacagtcatggttcacagtgctgcctggcaascgggctacagcatagtctgcccct

SEQ ID NO: 122822 - DNA, 377 bp, Homo sapiens
ggttggggaggggaggggaccgcgggcgcgccctgggacctctctcccagaacggtgctgttgaagccagggtcagatgtcgtggctaaaaaaaggcagccggcggcggcgtgactggcagggtcgtcggcagctgcgggtgtcagtctcgccccgcgtcgccgcgggaggggcccacccaggtagtggctggggagacccgcggggcggcggggggatgctcgccaagctgttgtgggagtckccgagaggccgcagatttcccgggatccacgcaaacaccgttgtcaggacaccttatctgctctcggtatcaccacctggacatggcagtgcctgcccgggagtgagcgcgcggcggggaattctttgcttca

SEQ ID NO: 122823 - DNA, 417 bp, Homo sapiens
ataagtgaatatgtctttctggtggaaatatttattttcttttggatatatagccagtaatgggatctgctgggtcaagtggtagtagctaagttgtttgagaaatctcaaaactgcttgccacartggttgaactaaaatatattcccacaagcagtgttcccttttcacatagcctcgcaaaagtctgttgttttggggattttttttttgtatttaatgttactgaaggctttattaatgccttaaaaacacaaaagttcttgaacatacatttattatctggaggaataaatgcactccaaatgcttatcatcagaactctggaaaaagacgtataagttctgggcattttggtaatagctgttctgatgggtgtgagatgctatctcattgtggttttgatttgcatttttt

SEQ ID NO: 122824 - DNA, 639 bp, Homo sapiens
ttcaccatgttggccaggctggtcttgaactcctgacctcagatgatccatccaccttggcctcccaaagtgctgggattacaagcgtgagctaccacgcctggccaatactttatttttatrgagacagggtctcactattgttgcccaggctggaactcctggactcaagcaatcctcccaccttggcctcctaaactgctgggattacatgtatgagccactgtgcctgaccctttcttcttttaatacatatttaggtaaactacagtttttcactattaaacaatgttgcaatgaacattcttacaggtactctctgtgtacacatgtatgtgaccatttatccagagtgagagcaagaattcttgtctttttcttgactttaccagaaataattccaaaacattaaaattaagttcaatatttgctgtaaattttaatatcctataagttaaattttaataaataccctatatatagtttataagttttccttctattgctagcttttattaagaatgataattttatggaatgccttgtgctatttggttctattctcactcattactccttaaaatctgtaaatggcatgtactacatcaacttttctcattttgaaccatccccgtgcta

SEQ ID NO: 122825 - DNA, 605 bp, Homo sapiens
aatatcaggtacattgctaaggttttttactctaatccctagctccctggacatgtccagggtctggagaaactcactgccatgaagggaagggccttggatcagacccagtgctatgctggcttcaggtcccagtggtggccacagaggtgcttgcatcatcacatccctagttccaggtggctgagcacagagacagattccatttctttgggagaaagtaagggaaaagaacaagagcctctgcctggtaatccagagaattcctcygaattttgtccaagaccaccaaagcatcaccatgagctgacagaagagcccatgggctttaagtgaacattggtggcggcctgacggagcccctctgtggaccagtggtggtggtggccacagagaaaggctcctctacttatggaaaggggagagaagactacaagtctgcaaaaaccacaacactatttggcatggggcccaagtgcttcaaatacctggaaagccttcccaagaaggacaggtacaaagaagcccagactgtgaagactgtagtacatacataactcttcaatgctgagacactgatgaacatctgtaagcatcaacaccat

SEQ ID NO: 122826 - DNA, 530 bp, Homo sapiens
ttctgatatgtgctacatgaatgaaccttaaaaacagtacgtaagttaaaataagccagacacaaaatgacaaatattgtatgatttcatttatatgaggtacctagataggcaaatccatagacacagaaagaatagaggttaccaggggatagaggaggaggaatggggagttattgtttaatgagtgcagagtttctgtttggcatgatgaaaaagttctggaaatgaatagtggtgatggttccacaatattgtgaatgtacttaatgccactgaattatagacttagaaattgttaaaatgttaacttttctgttatgtatgttttactacaattttaaaaaccacatgtgatgtagggttattgatgccataccagggagtgggagtttgcctactatccccagagacaaatcttgatcagaagggagggctataaaaatgttgytctaagaagactgatcaatagccatgaggcagagaagcttgaatcaatgccaggcaccagactagggtgtgaactttta

SEQ ID NO: 122827 - DNA, 575 bp, Homo sapiens
acacctttatgccaataaacccaaacaacagagttctattttcataattttatattgtatttcttcttgaggtctgtggcatagccatctcctgacacaaagaatacacatttgattgctgaatgagtaaaattccataatgagaaataggagaaccctgaatatgtagaatgcaattactagtatttatagtgtctgggtcctactgattctactcctgttggagaaagaaaaaaggggaggggagagtacatatgagagaacacattaaaagattaatgaaatgtttcrcttatggtaaaaaagtgataagaataaattcactcatctagtcatgtaacatttactcagcacttggctgattcctttccttagggagctcacagtcaatagagggtgtcatatgtcaaaataaataaatacagtttaaaatatgtaaaatatcattgaacaaaaaatgaacaattatatgtaattttgtgaaaaactctctttattttcaggaactcaaaataggatggccggtggcagaagcaaagagtttgtctggcaaggacacttaggaccagatgaca

SEQ ID NO: 122828 - DNA, 587 bp, Homo sapiens
gcacatacattaggctaagatattttcagggamtcaaaaaaggattctctgacttccttggtatcctttccaatcaattaattgactgcttgtaatacaggcaaagaggaacatacagtataatttatccgtacaagtagaggctgttttatcccattagcaaaattagaaaagatgatctatggcaaatagagttatttcatcatggtacaaacattatcactataactgaattccttaaattagaaaaataatatttgaacccttcaaacagctatgtacacaggatgcttgtagtataagtgcagtttataagataatttttaagtattggagaaagaaataacactgccagcaaaattaaatactttagttaataaagtcttactcttctggtttctttagtcataaaataatactatccttctctttacaaaaatgagataaataacatgaaattctatgactaatcaggaaagaaaatcaaatgcattcaagagcacatactaacaggtggtaaccaaacaaaattagttttttagttattttttagataacagtgataaatttagccccatattttcaaa

SEQ ID NO: 122829 - DNA, 587 bp, Homo sapiens
gcacatacattaggctaagatattttcagggactcaaaaaaggattctctgacttccttggtatcctttccaatcaattaattgactgcttgtaatacaggcaaagaggaacatacagtataatttatccgtacaagtagaggctgttttatcccattagcaaaattagaaaagatgatctatggcaaatagagttatttcatcatggtacaaacattatcactataactgaattccttaaattagaaaaataatatttgaacccttcaaacagmtatgtacacaggatgcttgtagtataagtgcagtttataagataatttttaagtattggagaaagaaataacactgccagcaaaattaaatactttagttaataaagtcttactcttctggtttctttagtcataaaataatactatccttctctttacaaaaatgagataaataacatgaaattctatgactaatcaggaaagaaaatcaaatgcattcaagagcacatactaacaggtggtaaccaaacaaaattagttttttagttattttttagataacagtgataaatttagccccatattttcaaa

SEQ ID NO: 122830 - DNA, 666 bp, Homo sapiens
agttctttagtagttgtttttgagattttggtgaactcatcacctgagcagggtacactgtacccaatatgtagtcttttatccctcgttcccccctacaacccttccctctgtgtcctcaaagtccattgtatcattctaatgcctttgcattttcatagcttakctctcacttataagtgagaacatatgatatttggttttccattcttgtgttacttcacttagaataatgcccccagctccatccaagttgctggaatggccattacgtgattctgttttatggctgagtggtattccatggggtatgtatgccacattttatcatttgttggttgatgggcatttaggttggttatatatttttattcaaacttattttttaaaaaacagattcaaatgcaacttctcctcactagaatgtaaacgtcatgagagcagggactatattgccagtgtttagaatggtgcctgacatatagttaccattcattaggtatttacaattattcttgataccttagttccagctaatagaattgataaagtctagctctctgagttctagtcttgataccaccattttccagtacttatcacataatgtttctgagcctcagtttcctctttctaaagtgagaatgagactagctgccaaccaac

SEQ ID NO: 122831 - DNA, 666 bp, Homo sapiens
agttctttagtagttgtttttgagattttggtgaactcatcacctgagcagggtacactgtacccaatatgtagtcttttatccctcgttcccccctacaacccttccctctgtgtcctcaaagtccattgtatcattctaatgcctttgcattttcatagcttagctctcacttataagtgagaacatatgatatttggttttccattcttgtgttacttcacttagaataatgcccmcagctccatccaagttgctggaatggccattacgtgattctgttttatggctgagtggtattccatggggtatgtatgccacattttatcatttgttggttgatgggcatttaggttggttatatatttttattcaaacttattttttaaaaaacagattcaaatgcaacttctcctcactagaatgtaaacgtcatgagagcagggactatattgccagtgtttagaatggtgcctgacatatagttaccattcattaggtatttacaattattcttgataccttagttccagctaatagaattgataaagtctagctctctgagttctagtcttgataccaccattttccagtacttatcacataatgtttctgagcctcagtttcctctttctaaagtgagaatgagactagctgccaaccaac

SEQ ID NO: 122832 - DNA, 429 bp, Homo sapiens
gctctggttttaaaactcccagtatggagttggtgagaaaaaaatattggaatgtcattgttagayttccaaacacaggtacacacacacttgcacactcaaacatggatatagctataagatacagtacatcaaattaaacatgttgcttaaaaaattctatgactaactcaaaggcatacacacatttatcttgagttctgggttttattttacatgcagaacactcaggaaaataaggcaggaactatcttgctatgaatattctccataatggccctttcaaacatttcataagattaatatttcaagtaatttcaagtaattgttagcttaccagagttctaagcacttaaatatgaacagtaaaatataaacaaataaatgcataaatggaaatgtggctaaaatgactgaagaactgaattc

SEQ ID NO: 122833 - DNA, 563 bp, Homo sapiens
caactggtatgtcacatgctatgaactttttaaaagttgacagctataactttcagtgaataaagtagaaacaaagtatgaatgaaaactgatgcttcaatgaataaggtatgcttttacaacggtactgcctaaaaaatttctaaacataaccacatcctgacaataaaggcaactgaaaagaagaaaacctatttctttctaatttattgttatattttcctaaagaaacatccatatcctacataaaatttyctcaccagtgtaaggaaacaattttttttttattttagttgaaccaatacatgatgtgattccagaaaacacagaaacaggaaatctaataaaactaaagacttattcatcttcctgagttactgttggagaataacaagatcagacataaattcctgtccacatacatatcttcagaagaataatcacaaaaagggcaatcatttggtattcgcttttaagctaacagtacaatattagctcttttcaccacctttacctagcatccttaacttaccaaggatctaatactcattcacaaggaattt

SEQ ID NO: 122834 - DNA, 563 bp, Homo sapiens
caactggtatgtcacatgctatgaactttttaaaagttgacagctataactttcagtgaataaagtagaaacaaagtatgaatgaaaactgatgcttcaatgaataaggtatgcttttacaacggtactgcctaaaaaatttctaaacataaccacatcctgacaataaaggcaactgaaaagaagaaaacctatttctttctaatttattgttatattttcctaaagaaacatccatatcctacataaaatttcctcaccagtgtaaggaaacaattttttttttattttagttgaaccartacatgatgtgattccagaaaacacagaaacaggaaatctaataaaactaaagacttattcatcttcctgagttactgttggagaataacaagatcagacataaattcctgtccacatacatatcttcagaagaataatcacaaaaagggcaatcatttggtattcgcttttaagctaacagtacaatattagctcttttcaccacctttacctagcatccttaacttaccaaggatctaatactcattcacaaggaattt

SEQ ID NO: 122835 - DNA, 563 bp, Homo sapiens
caactggtatgtcacatgctatgaactttttaaaagttgacagctataactttcagtgaataaagtagaaacaaagtatgaatgaaaactgatgcttcaatgaataaggtatgcttttacaacggtactgcctaaaaaatttctaaacataaccacatcctgacaataaaggcaactgaaaagaagaaaacctatttctttctaatttattgttatattttcctaaagaaacatccatatcctacataaaatttcctcaccagtgtaaggaaacaattttttttttattttagttgaaccaatacatgatgtgattccagaaaacacagaaacaggaaatctaataaaactaaagacttattcatcttcctgagttactgttggagaataacaagatcagacataaattcctrtccacatacatatcttcagaagaataatcacaaaaagggcaatcatttggtattcgcttttaagctaacagtacaatattagctcttttcaccacctttacctagcatccttaacttaccaaggatctaatactcattcacaaggaattt

SEQ ID NO: 122836 - DNA, 634 bp, Homo sapiens
acaaaacgaatcagtgagattaaagggtggaagcccagcagagtgagcctgaacagttttacaaacccagctgcagtgtcctgttagaagccttcaacttgccaagcacagatccattcctttgaaaaggtcactgtgtgaagagctgcctaccagtggctgactcacacaagcatctattcacgctcattttcctacatgaatagttccagggttaccagagttctagcctcatctcaaggccttcatttatttattttcccagagcagtctcatcaggctatgaagttccagcttgctttatgttgatgactgctgagtctacatctgctgctctcacttcttctgaattctgaagaagaaatttcttaggctgcattccaggccctttgtattctctcccagacctgccatgacagcctgaatttccactgctcagatttatgtgtcgtatgtcctggaataactgaactattrgttattttctataaatactccatatttttcagtcttcatcctcctcacatttaccacctctgcatgtgtgttcattggttctttatctacatttactccttggctaggtaatacgattcaatctcaaggttgtacatgctctctatatctttataac

SEQ ID NO: 122837 - DNA, 502 bp, Homo sapiens
tttgtgtcttctcttttttcttagcatgtctagaggcttacaaactttatcgatcttttcaaagaaccagttatagattttgttgattttctttattaatttcttgttttcaatttcattgatttctgctctaatttttatcagttttcctactttgaatttaatttgcccttctttttctagtttccttagactattgactctgtatctttcttttctaatacatgtcattcaacgctacatatttccctcaaagccctgcttttgctgtatcccacaaattttgataagttgtcaaatacttcaaaatatttttaaatttctcttagtatttcttcttygacccatgagttattaagaagtacgttattgtttaatctccaagtatttggggattttcccgctatgtttctgttattggtttagtttactaccattgtggtgtgacagcagagattgtatgatttctattattttcaatttgttaaggtgtgtgttatgt

SEQ ID NO: 122838 - DNA, 404 bp, Homo sapiens
atttgcccttctttttctagtttccttagactattgactctgtatctttcttttctaatacatgtcattcaacgctacatatttccctcaaagccctgcttttgctgtatcccacaaattttgataagttgtcaaatacttcaaaatatttttaaatttctcttagtatttcttcttcgacccatgagttattaagaagtacgttattgtttaatctccaagtatttggggattttcccgctatgtttctgttattggtttartttactaccattgtggtgtgacagcagagattgtatgatttctattattttcaatttgttaaggtgtgtgttatgtccagaatgtgttctctcttggtgaatgttccatgtaagcttgagaagaacgtgtaatatactttt

SEQ ID NO: 122839 - DNA, 404 bp, Homo sapiens
atttgcccttctttttctagtttccttagactattgactctgtatctttcttttctaatacatgtcattcaacgctacatatttccctcaaagccctgcttttgctgtatcccacaaattttgataagttgtcaaatacttcaaaatatttttaaatttctcttagtatttcttcttcgacccatgagttattaagaagtacgttattgtttaatctccaagtatttggggattttcccgctatgtttctgttattggtttagtttactaccattgtggtgtgacagcagagattgtatgatttctattattttcaatttgktaaggtgtgtgttatgtccagaatgtgttctctcttggtgaatgttccatgtaagcttgagaagaacgtgtaatatactttt

SEQ ID NO: 122840 - DNA, 449 bp, Homo sapiens
gaatctaatataactaacttttattactaaaggagcttaaacttcaaaaaatgaaactattaaatagattaagaaacaatatgtgaatygaatctcatttgagattaaacaactgctttgggttacatgtgtcagctgtttcacctatttcttacttaggaatgggcttgcctaatacatttttttttgtttttttttgcaaccaccaagaatgtgacaggaaaacaattaattgtactttaatgtctcttcattactatctatcctatcattttaatcaaagcaccatgcaaaatctggaaatattcgaatgtccatggaattgttgaatctgttttgttttatcatgagacaaaagtaattgagtaaaatactcggctaagggaattgttaactttttctctcaatacttatttcatttcatttggttattcattacttaactgtga

SEQ ID NO: 122841 - DNA, 571 bp, Homo sapiens
attagttactgttgttgaaaatatgtctaaaccattttggttctttgacctaacataaattaatacttgaaaatgtaaatcttttacaaattactgatggctccatgtaaacactatttctcttaatggagtaatgattcatggaaaaacttctatcaaaactttttcatctttattatggaaaagcataatttatgtttatagaccaatgttgcacttaaaaattacaccctaaactgcatttttgaaagtattattatagaatgaaccaaaatattatctgggtctagaacataaatattagygtagctatctgggttagagaagttaatagaatgtaggctgaaggtagagcaccctcttccaggacagctcacattgctggttccatttccatttgcttccatgtctcaacatgtctaattgaggattctgatgaatttatgttggtcatttgatgtctcaaaagatattttttcaagatatgataatagattgtcttcttctacatgatcttgcagcaaatcttgaacaactctatggaattaacagaacatctatgttcactcca

SEQ ID NO: 122842 - DNA, 347 bp, Homo sapiens
gaattctcccaaatctcgtccaagaccgtcaagtcagtacgtcgagagtgtgcaaaaaccacagcattactcagtttgtggtgcctgctaaagcagatacagctcagatcacaacaagtcttttcaaatatctggaaatcctttctaagaaggatggatacaaataagcacagacagtgaagactacagtaaatgcctaactcttcaatgcrcagaaaccaaattatatctgctagcattaccactatccaggaaaacatgacctcaccaaatgaggtaaataaggtaccaatgaccaaccctggagaaacggagatatgtgacctttcagaccaaaaattaaaaat

SEQ ID NO: 122843 - DNA, 657 bp, Homo sapiens
ttgacatatctggaaaatgagtccaaggatacaccacattataggactgttgtaggcaactggatgagactatgtataaaatagtttataaagtagaatacattactgaaaggcaggagatgctcatattctatgcccaggccctttgagagaagcattccagtatctccttattattcttccagtcttaaagggattgtacttccatgtagagaagagtytgaaagccccatttcaatgtctgctctgtgaaaaggttaccagtattttttattgtcatttagagtgacctgaggggaaattggccagacttctctcctaggtctacagtgttactacaaaactgaaactccacccagaaacctgagccagctggagaatgaggcactgggcatgaaacatgccaaaaatatctacccgctgctttccaggatcccaaatgacactggtcattgaaaacccatccctctaacccaaagggaaaaattcagctctgcttaagaagaacttaatgcccaatattaatgttaaaatccaaaaaggtccttccaaaattctgaccttctattgaaagacatgtttttgtttcactgtctcttggaaaatactttagcagcacatttcagagttacaaaatggagcagattgacagacctg

SEQ ID NO: 122844 - DNA, 657 bp, Homo sapiens
ttgacatatctggaaaatgagtccaaggatacaccacattataggactgttgtaggcaactggatgagactatgtataaaatagtttataaagtagaatacattactgaaaggcaggagatgctcatattctatgcccaggccctttgagagaagcattccagtatctccttattattcttccagtcttaaagggattgtacttccatgtagagaagagtctgaaagccccatttcaatgtctgctctgtgaaaaggttaccagtattttttattgtcatttagagtgacctgaggggaaattggccagacttctctcctaggtctacagtgttactacaaaactgaaactccacccagaaacctgagccagctggagaatgaggcactgggcatgaaacatgccaaaaatatctacccgctgctttccaggatcccaratgacactggtcattgaaaacccatccctctaacccaaagggaaaaattcagctctgcttaagaagaacttaatgcccaatattaatgttaaaatccaaaaaggtccttccaaaattctgaccttctattgaaagacatgtttttgtttcactgtctcttggaaaatactttagcagcacatttcagagttacaaaatggagcagattgacagacctg

SEQ ID NO: 122845 - DNA, 428 bp, Homo sapiens
taagtgctcaacatcattgatcatcagagaaatgcaaatcaaaactacaatgagatgtcatctcaccccagttaaaatggcttttatccaaaagtcaggcaataacaaatgctgacaaagatgtggagaaagggaaaccctcgtatgttactggtggaratgtaaattaatacgaccactatggggaacaatatggagattcctcaaaacactaaagctagaactaccatatgatccggctatccaaggaaaggtatacacccaaaagaaaggaaatcagtatattgaagagacatctgtactcccatgtttatttcagcactattcacaatagccaagatgtggaaacaacctgtgtccatcaacagactaatggataaagaaaatgtggtacatatacacaatggagtagtattcagccattaaaa

SEQ ID NO: 122846 - DNA, 568 bp, Homo sapiens
tttatacaagtttcaaatatcttctctcagtttgtgtctcatgttttctccatgtttatgatgttcttttatataacagaagatttacatatttatataaacaaatttattaatctttrtaagatgagccttttgttttatgtctaaaacatttttttctacaatagggtcataaagatattctcatagaattgttgctaaaagcttttcctaggctacttagatcagtaaaccacatagaatttattgtgtacatatttttcctaaaaggaaggcaactgtctgagcggcatttgttaactaattccatccttttataaacttgaatttgtagtgggatttctataatatgttaaccaaattttgtataccaataagagctacttctggcttccctgttttgttccactgatctttttctggatccatgcaataatacgcaaatgatcttaattgctattgccttctaccatcttgatatatgctaagccaaattcccaatcttctttttcagaattggctttggcatgcaggttttgttcaattaataattatttagtgtatatgt

SEQ ID NO: 122847 - DNA, 568 bp, Homo sapiens
tttatacaagtttcaaatatcttctctcagtttgtgtctcatgttttctccatgtttatgatgttcttttatataacagaagatttacatatttatataaacaaatttattaatctttgtaagatgagccttttgttttatgtctaaaacatttttttctacaatagggtcataaagatattctcatagaattgttgctaaaagcttttcctaggctacttagatcagtaaaccacatagaatttattgtgtacatatttttcctaaaaggaaggcaactgtctgagcggcatttgttaactaattccatccttttataaacttgaatttgtagtggkatttctataatatgttaaccaaattttgtataccaataagagctacttctggcttccctgttttgttccactgatctttttctggatccatgcaataatacgcaaatgatcttaattgctattgccttctaccatcttgatatatgctaagccaaattcccaatcttctttttcagaattggctttggcatgcaggttttgttcaattaataattatttagtgtatatgt

SEQ ID NO: 122848 - DNA, 538 bp, Homo sapiens
tagtggcttgggactggaggagccccctctttagggagctcctccagggaccaccctgtgggacaaaagaatttgaacagcagtccttgagccccagatcctccagtacaagccactacctagaggaaggggcttcctgagagctgaattgcagtgattgttatatctcttctgggttcagccacccagtggagctaccaggctccaagatggtactggggtgtgtctgcaaagagtsctgtgattttatttgtcttcaggtttctcagccatggttaccagaacctgctctggttgaggtggcaggagagtgaagtggactctttgagagtccttggtttcagttttgttcagtgtgctggtttctctaatgctggttatggtaacagtgatattgtcatgtgcacagacatgacctctggttagccaggatattacaggtgatagaattggtgtggttttctcctttcctgagtgggctgttcttttatgagttgctgtaatggttgggttgggtggcctctagccaggaggtggc

SEQ ID NO: 122849 - DNA, 597 bp, Homo sapiens
gtttttttgaacggacctttttaacgtgaaccttttagcattttgaaggcactctctttatgtgtaataatatttttgccttaaaatctgttttgtttgatattataataatatagctatgccagactattgaaattagtatttatcctatagttttttaatcataattttactctcaacatttttttctctatatactttagtgagtctgctttaaaaaagcatatagatgaattttgttatttttgttttaactaaagattttagctattaccatttattttgacatatgtaactttattttatcaaatcattctgtgctctttatttcttttttaatgttttatgctttactcctgtgttcatggggttttttttagcttaaactttgttttttaattctagtctccctctgtttttgtttggaaattatttactttttctattatattagaggttattcttgaaatttgaacatayggactaaacttatcaaagtaaaaaattcatcagtatacttacctcctccccaagcaacataaatgccatagtacaatttaatcactggaaaacagtattttagtcctatcttgtgtt

SEQ ID NO: 122850 - DNA, 618 bp, Homo sapiens
gaagactcttaggtccctgcagaaacatatttcatcagagtctttaagacctggtaattttcattttgtgcaaacagaatttcacttccagctatgtcagaataattattaatagtaccagactatttctccactataaatagctataaaaaatgggcaaaacacatgaaacaatgtttaagtattggaaaacatacagtgcaggattgtgattcctgaaagaaaggacataattgtggcaagagtaccaaatcacaccagctttgtgcccataatcatttgccacatgatgtccctggaaaagagctcccaagttgagcaaatagatctttttgaagttaggaaacagagataagaattcagtgcttctgacacagatgaaatgtgcaaagcagaatttttgagaggagcatgcctctccagttatttaaatggaatttttaaaactgaaaaacatgatttttaaatttttaaaattcagcagatgggcttaaaagcaaaatgaagctagggagccaatgaattaaagatagacgagaagaattataaattttaaagagagcaraaagaattgaaagaaggtgaatagtacttcaacaacatatggggcaatataca

SEQ ID NO: 122851 - DNA, 595 bp, Homo sapiens
tatcaaaaccacaatgagataccatctcacaccagtcggaatagctataatcagaaagtgataaaataacaggttacctctgaggctgcagaggaaataaaacacttatacatagttggtggtaatgtaaataagtcactggaggggcagtttgaagattcctcaaagaactaagaattgaactaacatttgacccaacagtcccaatactggatatacactcaacggaaaataaatcattctgccaaaaagacacatgcacctgtatgttctttgtagtgttattcacaatattaaagccatgaaattaacccagggtatatcaacagtgtactggmaaaagaaaatgtggtacatatacatcatagaatcttatatagccataaaaagaaaaaaaatcatttcatttgcagcaacatggatgtagctggaggccattatactaagtgaagtaatgaagaaacagaaaaccaaataccacatgttctcacttacaagtaggagttaaacattaagtatacatagagataaaaataggaaaaaatagacactggagcctagtagaggagggaaagagaggagggcaagggctgaa

SEQ ID NO: 122852 - DNA, 613 bp, Homo sapiens
gggggcatagtttggggatgattcaagtgcattacatttatcattagactctcataagaagcgagcaacccccctcgcatgcacagttcacaatagggtttgcaatcctatgagaatccagtgmcgctgctgatgtgacaggaagtggagctctagcccacagctcacctcctgctgtgcggcccagttcctaacaggccatagaccagtaccagtctgtggctgcaggggctggagatccttggggtatatcattctcagattccttcctcatttttctctaaaataactttatgaacatcagatttataggacggggaaaaaatttttattttctacttacattttcatttttcaagatgagtttcaggattgcttctctctgttttaaagcctaaaagcaggataatttccagttagcatttttattttttatttttttaaaaagatcaagtagtgttcctaatattttgtcccttctaaagtctctctcaatacttataaggagatgacagaaactttgaagaggtcaaagcaactagattcaaggctctagagtaattatctctggttctcctactgaactgtatcttcttactctcatccccagtgc

SEQ ID NO: 122853 - DNA, 613 bp, Homo sapiens
gggggcatagtttggggatgattcaagtgcattacatttatcattagactctcataagaagcgagcaacccccctcgcatgcacagttcacaatagggtttgcaatcctatgagaatccagtgccgctgctgatgtgacaggaagtggagctctagcccacagctcacctcctgctgtgcggcccagttcctaacaggccatagaccagtaccrgtctgtggctgcaggggctggagatccttggggtatatcattctcagattccttcctcatttttctctaaaataactttatgaacatcagatttataggacggggaaaaaatttttattttctacttacattttcatttttcaagatgagtttcaggattgcttctctctgttttaaagcctaaaagcaggataatttccagttagcatttttattttttatttttttaaaaagatcaagtagtgttcctaatattttgtcccttctaaagtctctctcaatacttataaggagatgacagaaactttgaagaggtcaaagcaactagattcaaggctctagagtaattatctctggttctcctactgaactgtatcttcttactctcatccccagtgc

SEQ ID NO: 122854 - DNA, 590 bp, Homo sapiens
taccttaccagacctgtgtcgctgtcataaaaggagtactttttaaacatgaactctagtcagatagctagtcaaaaatctttgatttaatcctttttccctaggatgtgctacagtgtggagtggggagtgctcaccttgtcttggtggtctcttcctatgcagacatccttagagatgtgcattgtcctgtccaatccttagtgttggtccaatttcaagtgcgttcttgtctgaaaggccccttcaatttaaacaactctccttacttctttcatgctctcctgggtaccctgaggccgttttgttgctccagcacaactctgaggtcgtggggkatgaatttggtgggactagttaaggtccttgacatgtccccactactcccaggagtgtaggaactaggttcctactttgctgtgaccatgcagggacttggaggagctctgggggctgctgaaacccaccctcttttcctctgagatcagaagcacatccaatgccctctgctttcagagcccccagggctatttggcctccctcttccccaagctcagcaccaggggcaggacactactccctgtttcaga

SEQ ID NO: 122855 - DNA, 590 bp, Homo sapiens
taccttaccagacctgtgtcgctgtcataaaaggagtactttttaaacatgaactctagtcagatagctagtcaaaaatctttgatttaatcctttttccctaggatgtgctacagtgtggagtggggagtgctcaccttgtcttggtggtctcttcctatgcagacatccttagagatgtgcattgtcctgtccaatccttagtgttggtccaatttcaagtgcgttcttgtctgaaaggccccttcaatttaaacaactctccttacttctttcatgctctcctgggtaccctgaggccgttttgttgctccagcacaactctgaggtcgtggggtatgaatttggtgggactagttaaggtccttgacatgtccccactactcccaggagtgtaggaactaggttcctactttgctgtgaccatgcagggacttggaggagctctgggggctgctgmaacccaccctcttttcctctgagatcagaagcacatccaatgccctctgctttcagagcccccagggctatttggcctccctcttccccaagctcagcaccaggggcaggacactactccctgtttcaga

SEQ ID NO: 122856 - DNA, 585 bp, Homo sapiens
atgcttctaaaaaactaatatgtgatccttggagtagaggaagttgtacattcaaggttttctaccctttttgtgtgtgtttattttaatgaggacaatgggaactacaccatttctttcctgttagttcatcctggattacctttttatatccattaaacatagaaattctgaagccatgtctgcctacatgtcatcctgattgcctttgtgtataattgcagatcaaatgtagaagcagtgactacttaaaaaaaaagttgttatagaccaaggcttgaggaaagagaaaggtacagtgacaatgagatatcttgggggaaatttggtcccgtagaccaggggttagcaaatcatatcctgtgggccaaaccacagtcacctgcctgttttggtaggcctataagctaggaatggtttttacatttttttaaaagactgatggggagaagtgaaaggaaaaattatattttgtgttatgamaagtatatgaaattaaaattttagtgtctataaataaagctttcgaaacgtaccatgcttattcgtttacacattgtggcttcttttacagcaaggatgggt

SEQ ID NO: 122857 - DNA, 614 bp, Homo sapiens
agtcctggctgttgacccttcttacgggagactttctatcagccaaacttgtagyatgtggtcattgaaactttcttcttaggtccaagaatgtcattatattgtcagtaacaatattcctggacaaagaggaagagagatgctaaagttttgtatcatatgatttctgaagttctctcctataatccttatgttagccctcagaggtcgtgatcctcttttataatagaaataaacaagattcagatgaatgtgcctgatcttagcagagccaattatccatgacacccagcctccatgagtgactgacatattactgaaatgaaatttgagggtgtttcatttgatggagaacatccaggtcaccatctttttataggccagctgttttttccatcttccttacttgcagagaaattaaaactgcatgatacatttcctgtagtgaagctaagcctgaagcctcaggacctgtgtgcacaggggcatggaagagaatgtgttttagccatgccataaataccttatcatacatgacttttacagaaatgtgacaagagcaacaaaaagaaagaaagaggcaactttgaaatctcaatgctcttggattcatt

SEQ ID NO: 122858 - DNA, 614 bp, Homo sapiens
agtcctggctgttgacccttcttacgggagactttctatcagccaaacttgtagtatgtggtcattgaaactttcttcttaggtccaagaatgtcattatatkgtcagtaacaatattcctggacaaagaggaagagagatgctaaagttttgtatcatatgatttctgaagttctctcctataatccttatgttagccctcagaggtcgtgatcctcttttataatagaaataaacaagattcagatgaatgtgcctgatcttagcagagccaattatccatgacacccagcctccatgagtgactgacatattactgaaatgaaatttgagggtgtttcatttgatggagaacatccaggtcaccatctttttataggccagctgttttttccatcttccttacttgcagagaaattaaaactgcatgatacatttcctgtagtgaagctaagcctgaagcctcaggacctgtgtgcacaggggcatggaagagaatgtgttttagccatgccataaataccttatcatacatgacttttacagaaatgtgacaagagcaacaaaaagaaagaaagaggcaactttgaaatctcaatgctcttggattcatt

SEQ ID NO: 122859 - DNA, 614 bp, Homo sapiens
agtcctggctgttgacccttcttacgggagactttctatcagccaaacttgtagtatgtggtcattgaaactttcttcttaggtccaagaatgtcattatattgtcagtaacaatattcctggacaaagaggaagagagatgctaaagttttgtatcatatgatttctgaagttctctcctataatccttatgttagccctcagaggtcgtgatcctcttttataatagaaataaacaagattcagatgaatgtgcctgatcttagcagagccaattatccatgacacccagcctccatgagtgactgacatattactgaaatgaaatttgagggtgtttcatttgrtggagaacatccaggtcaccatctttttataggccagctgttttttccatcttccttacttgcagagaaattaaaactgcatgatacatttcctgtagtgaagctaagcctgaagcctcaggacctgtgtgcacaggggcatggaagagaatgtgttttagccatgccataaataccttatcatacatgacttttacagaaatgtgacaagagcaacaaaaagaaagaaagaggcaactttgaaatctcaatgctcttggattcatt

SEQ ID NO: 122860 - DNA, 607 bp, Homo sapiens
actgtctctcaccctttcttactgaaaatgtgattttaaaaatatttttagtaataattattgataatcctagcataatgtaaaagggcctgggctttgggggatattttaaaaacatgccagaggttgctcagagcatcctccctccccatctttctggcccatttaggtcgtatctctctcatttggacagttaatcttcagtgttttccaaacactcagtttacaaagattgggtcaatgtctcgcaacgtttggaatcttaatagactcttaataaatatctgtttgaawaaatgagtggactctgatatgtgcttcaaatggtataccaccccctagaaatgtaagtatgagagaaaatgctgacctggaaattataaaaggcaaccagagagtagtgtaaaagtcgttcagacataagtagataagacttgccctagggccacagaacaacaaaacgtttcttattgtttgtctggtttttgttttgttttgttttgtttttgctgttgttgtttgttaactcagtgtagacagagcaattcagctcactttaattggctaagtcgatcactctgttagttttcaggtcaactatcctgcc

SEQ ID NO: 122861 - DNA, 316 bp, Homo sapiens
atccggtcctttctccatggacaactgaagaagagatcctctgggatgttaccatcgcggccactcgggtgaccgttttcccggggagctgcgcgggtcggtggtgmcagcgcttctgtgctcccggcggctttccctgtaagacataatgggactgggacgtccacttccggctcaaacgaagttcagacggcgcgcaagccgcgcggtgcccgggtgctgaggccgtccctagccaggagactggaggcctaggcccggcactgtgggcatcttgggcaccgtggcgcggtgcgggccgagggcggtggtctcc

SEQ ID NO: 122862 - DNA, 569 bp, Homo sapiens
agagactcttattaccttcccttactttctcccaaacaaatgtagtctctctgttctgagcaacccaaagctggatgtggaatgacaaaagcacccctgtggccaccaccactaggactatgctgtgtcagacctgaagccagcacagcactgggtctcatccaaggcctattgtaaccattccttggctactgcctatgtttgctcaaggctatggggctctataatcagctctacaatcagcaagtgatgaaactagtcaggcttatgtccttcccttcaagtcagtaagctcctccaggccccaggtgggtccagagttgccattacatgagccaggaactagaattaaaccttagaagtctacctggtgttctattttcctgtggctgagtacaaaatactgtactcaaaccagattatacagccggtcccactcttccttccccttttccaaggcaggrgtcacctcatgaccgccaccaacacaggtcacagggagtactgcctgactaccgctaatgttcccttaaggcccaagggctacttagtcagcttataatgaattc

SEQ ID NO: 122863 - DNA, 537 bp, Homo sapiens
tcccagtgactcgcttggtaaacctgattgggtcatggatcacttctaaaggacacctagcaggcaggcagcagagaacctgttacgaggccatgaatacagacaaaatgcatgtaacctttcctgccagtgtaaggaagtcaaggaggagagtttaaaataagatgctgttcaaagtggtgcaagacacaaggaacagagatcggatgagaccacaggcaataggcaaataaaagatgcactctcttcctctgagaggtggtgacccactttcctaagagaaaagtgttttgaagactgacttcccaattttttctgccccgggaaagcttctggaacaacactttasgggctactgacaggctgctctgcttctcaccagccatgagcatccaaccccaaagcagtccccaggcttctctgtgtctcctctacaaggacgggctggggaagaccctaagctccactccctgcaccatccctagcttatgagagcagccaccatgctccctgctcctgcatttattgcaaagagcc

SEQ ID NO: 122864 - DNA, 569 bp, Homo sapiens
tttgtcccttaagccattgagtcacttcagaggatcatcttaagaaacattagaatcatagaatcttctcattaaaagggactagcaaggtcatctaccttgaaatttctctaaagctgtaattcatcaatgaccatttactttgtaatagatcatagttctgaagctctgctgcaattcttctcatttctctcagtgcaagctggtgttttcttctccaaaaggctctatatttcataggagtgattgattagttggtttttcagagcaaaacagtctgaattcaatcctttctttgccacttaatagctatgcaatcttgggcaaatgtactaatacctctaaatcttagtatttctcatttctaaaacagagatgcttaatcacataacaaaagtaggagaagctacgatcatgctgtatagyagcaaagcttcaataagtagtaatcatcattgtatagtaaacaattacttgagaattctctctccccatcatgttcccttgctggcaatttcttgatgctggttttaattctctaacttctttcaagttcatttcttctctct

SEQ ID NO: 122865 - DNA, 580 bp, Homo sapiens
gtgtctgtatttgttgatggaaaccttgctgcatctctgggatataatctcagtggctttcatcccatctttctctaaatgggtgtcagtgccctagcaatgaccttgggtactggaatagactcaggtctccccacgcatggttttgctgccaggcagtagatggcagaattgagcttgacttttatggttgcctttcttctcacttgcctccattggtgaagttgaagtactcttaagctacttgttaaaatagctttttttaaaaaaaaaaatcacaaataattctatgtgtctgttttattccatttgaatctcatacattgcctaccgtataatgcttttttaaagaaaaagcttatwggaactatagttgatttcttcctcttgttccaaggttttctaatctcaaaaggacatcaccctcattttaatactttttttacctctgttttcttttatccaatgttattaaagctttcttctatcctcttccccatcatttaaaaaaatttaaaaatcaacactagattttttattttatgtccttcaaattattcagacaattctactcgtctta

SEQ ID NO: 122866 - DNA, 619 bp, Homo sapiens
ttgcggataagtattgtgcatgtatgtaaaaacattgaaactttctcaatacatgaagagatgtcctttttgtacatctgcatttgtgaaagataaaatttttcaagatctctgatctttgggcaactgcatatgtggtggtgacccattgcacgttctgactgatctcatcaaacaacttacattgtttgtcacagtattgcagatgactgcagttataaagctgggagcacaaaattaccaaccgtagtcatatggtttatacatttctcttttgacctgtttctttatgaatatgatttgtctgctcataactgatatatctatgtgactgttagcatacctgagtgttcatgcttgcaaaaatagttatgttattattgcctctcttattgtgtaaagtggcctatgaagtgttttattttctcagggsacaggatcttactctgtcttccaggctggagtgcagtggctcgctcgatcatggctcactgcaaccttgacctccagggttcaattgatcctcccacctcaacctcccaagtagctgagacaacaggtacatgccatcatgtgtggctaatttttgtattttttgtagagatggggttttgttatg

SEQ ID NO: 122867 - DNA, 614 bp, Homo sapiens
gttgtttgtttctataggaaagaatacttattgacagtgaaagaaagcaaaagaaatggatttttttaaaataatgaaacttctagatgagcaaacctggaggatagtttgtgaattaaacaaatgtgtttggtgtataatcagggaaactgataaaacccactcatctaaaaagaaggtgagagttttcggctgtcaccagggtctaacttggtaagtcagtcccattaccacataccaatgaagtaaaaaaaaaaaagattcattcggtttagaatcttkagaaccactagtctggtagtgctgtcaggttaaaggattagttgttcaatataaaccatatatttggactaaaataatcacattagcctttgttaaatgtactcatgatcaagtgaggtaacaatagtgttcttcctactttagatttaaaacttgacatttctaatatgatcgatgtctccactttgctgtctgacatagtactgcttaaaccttcctcaaatacttgtatgccatatatgtttctaatctatataaaataatactgatatataagcactgtgttttcttctagcttaaaataataagtcaatttcttgaggataggtaca

SEQ ID NO: 122868 - DNA, 553 bp, Homo sapiens
tagtatgtaaacaagcaataattttggtttgaagccaagaaatcagaattatggttacattggaaactcccatatctttctctttcttactgcctacactatgcatttagtgttctacttgtacatacattaatatttagttataatagttaatcagtgtgtcttacttgcctaagtttctatataactttgtttccattggtgctgtctgtcaaacaccattgtctgtcaatcagcttctgggggtgctatgctctcttagttgttcagacccaacacactaaaaggggtgccctttcattcatttattcaatcaataaatatttattgaacatctactattatgtcaaataagacatatgtgctcctgcccttttagaacttacagtctattgagcaagacaagcaatgaacaagtaaataaataaatatgttattacaacatatgattgttgctatggaggtaawgaccatgaagctgtgatagagagtaatggggacagctaccaactttagagtaattgaggaaggcctctcagaagaagtgacatgt

SEQ ID NO: 122869 - DNA, 571 bp, Homo sapiens
tttgtgaggagtgtgtcaagggaggtcagtaggctaatattttttcctctaggaccctagcagtcgattgtattgcaggcaccacgccaaatttttttttcttttttttctgttttgaatcctcaaaccactatccaattagtgcttgtttccacagcagctacttccaggaaactgctgatgaggcttctcaaagsgggccagcacacaaggccactgctgtttaactagtgtatggttttggtgtaccggattcatgttccattgtaattctacagaaatcgtacaccctggagatgaacacatggcagcttatagattttcagtgactgctgcttccatctggattaatatgagcccccgttctcatttgctttgatcatttccttgtattagggatctgcttgatatgagtaggtcatgcataaagagagacatacattccaccagcaagcaagacctatccatctccccagccctgaatcaggatgatatcaggaattcacaatgaataggcagacttgcttggagtcattgctccaatagcctcttttctgctttgggcttgaga

SEQ ID NO: 122870 - DNA, 619 bp, Homo sapiens
catgagccactgcgcccgaccccattcattattgtttatgtatatggaacccatggtttttattctaggttgtacatcctgtagagtatatgccaaatatactttacaataatataatgtttttattttgttttgttttgttttgttttgagatgaagtctctctctgttgcccagcccggagtgcagtggtgcactctcagctcactgcaacctctgcctcctggattcaagggattctcctgcctcagcctccccagtagctaggattacaggcacctaccaccacacctggctgatttttgtatttttagtagagatgaggttttgccatgttggtcagactgatctcaaactcctgacctcaagtgatccacccacgctggcctcctaaagggctgagattacaggcatgagccaccacacctggccatcatgtttttgactttgaaccagaaattattttctgattttagtgtgttcacatattttgtagtcaagatactgagacatttgacacaggaaaaatcccycacttgccagtttggctcttccccatggagtgtgttgtgaattcttatctgggtttgttattcaaaatttagttttggtctatttca

SEQ ID NO: 122871 - DNA, 410 bp, Homo sapiens
atatttcaataagtggcatgttccaacaaatattcatttattgcctactgtgtgccaggaacagtattaggatctggtggacacaacagtgaataacagcaacaacaacaaaaacaaaaaaggcatttgtctttatagagattacattctaatgggagcacgrctcagtaagaaagaaataacaaggtaattttatattgtgataaattccatagaaagaattaataggatggtgtgtgataaagaataactatggaagatcctcagatgtaacagtgagctagctgaaatctagaacgtgctttgagaacagcctggggagaagcattttaggcagagggaatgcaaatgaagagtctttaaagtggtagaaagtttggccaacttcctgaacataaagtagggtggat

SEQ ID NO: 122872 - DNA, 557 bp, Homo sapiens
ctagtttatgtgtatatgtttagaaaaatgcattgcaaactttttcatactttcataagtttttccacttcttctcctgcccatgtttcagataaatacaatatcatgtatgacagcctcaractgtattctagaagaaatttacatattgtgatgatttagtttcatcttcatgttgaataaaatttaatttagagtacagattttggatttaggttgcttgtgcttaaatcctagcgatgccacttgtatgtattcttgagacaaatccagtaatttctgagccacagtttcgttgcttaaaatatggagataaacatgaaacctactagatgtgatttttctgaggattaaatgagttaatcctttcaaagcacggagcacagggctttaatattattttccaatgtgttcaagcaccactacagtgttcttctactctcatagccttaacatctccctgcattgtgtaaatgcccaaaacatttatattattttggattcctacatcttcccatactgaaattagtgcagccacgtgacattctttataccaa

SEQ ID NO: 122873 - DNA, 546 bp, Homo sapiens
ggatatttaacagagggtgaggatagttctgggacttttgctcagttgatgaacaaaagggartggggaagggcgtgaaggcaaagggtgtagaaaactcacagcactgcctagtgtgatgtgccaaagagatgggagaacatgggcatatttcttgtgcccttccaggatccttgtttcccgcccaagttctgatgagggcctcaaatggtagtttgagggagaatatgacagtttctatccctggtgaggatacacactgaacaacctattttctcatgagtaacctgttgcagaactaatgatacataaattcagctgtagagttgatgaactgaatgcagagtcgtgtaggtgtattttcttgtggagatgtttaatcatattttcagaggagtttatgactcaaaaaaggtaagaaccactgatttatacccttattggtattctttacaatatattctgttcatttatgtcttactccgtaaaactgaagttggcaaactatagcctgtgggaaaaatatggcccaccacttgtttttct

SEQ ID NO: 122874 - DNA, 576 bp, Homo sapiens
gtctgtgcactttttcttggtctttcatttgcatcagatccccaaactttgtacctgacccagaaaagattacagactaacagtctagttgctcctagaatttaccaattgatgatatgccatggcctgtgactatgtgtgaggatgcaaagggcagcttccaagcatgtgtgctggtcattctgtcctctgtaggtcagctgctggcattggtggtttgggtgtacatttctacattttcttaatgtggaaaggtcaggaaaatagagaactgcctttggaacaggctgtgctttgactctattgacttggagataastattgtgactattagcatatgtaggtactcagcacatatttgctaatgagagaaaagaaggcagaagacaagagaaatgaagagaggggcctatgatgtgcccccagcctgggcaaaatgtgcataaggactggagagctttgtcctgtgtccttcagaaacttggaggggtttgataagcattataataaaatatactaatataaactatattaattatttatgacttaacttggacaaatgtccaaaactggtca

SEQ ID NO: 122875 - DNA, 597 bp, Homo sapiens
taaacttgcatattccagaagctaaggaaactccaaacagaaaaagacaaacaaataaacaactcccccacccacaaaaaacccaagcccagatacataataatsaaactgctgaaaactaaagacaaagtattaaaaacagccaaagaaaaaaatagcacatgacttatggggagcaatgtttcagctgactgtagatctgtcataagaagccatgaagacagaacaaagtggtgtgacgttttaaaagtcactataaatttctcatgaaaaactatgaagccagaaagaagtggcatgacattttttaagtgctgaaagcaaaggaatattaacccacaactctatattcaggaaaatatgcatgacaaatgaaggagaaataaagatattctcagaagaaggaaaactaagagaattcttaaccagcagacctccttgagaagaacttctaaacatttcttctaaacagacagaaggtaagtgatactagaaggaaatttagaatatcaggaatgatgaaataagtacagaaatgttagatatgcaggcagacatagtagactacttttctctttagttttttaaaatatattg

SEQ ID NO: 122876 - DNA, 597 bp, Homo sapiens
taaacttgcatattccagaagctaaggaaactccaaacagaaaaagacaaacaaataaacaactcccccacccacaaaaaacccaagcccagatacataataatgaaactgctgaaaactaaagacaaagtattaaaaacagccaaagaaaaaaatagcacatgacttatggggagcaatgtttcagctgactgtagatctgtcataagaarccatgaagacagaacaaagtggtgtgacgttttaaaagtcactataaatttctcatgaaaaactatgaagccagaaagaagtggcatgacattttttaagtgctgaaagcaaaggaatattaacccacaactctatattcaggaaaatatgcatgacaaatgaaggagaaataaagatattctcagaagaaggaaaactaagagaattcttaaccagcagacctccttgagaagaacttctaaacatttcttctaaacagacagaaggtaagtgatactagaaggaaatttagaatatcaggaatgatgaaataagtacagaaatgttagatatgcaggcagacatagtagactacttttctctttagttttttaaaatatattg

SEQ ID NO: 122877 - DNA, 597 bp, Homo sapiens
taaacttgcatattccagaagctaaggaaactccaaacagaaaaagacaaacaaataaacaactcccccacccacaaaaaacccaagcccagatacataataatgaaactgctgaaaactaaagacaaagtattaaaaacagccaaagaaaaaaatagcacatgacttatggggagcaatgtttcagctgactgtagatctgtcataagaagccatgaagacagaacaaagtggtgtgacgttttaaaagtcactataaatttctcatgaaaaactatgaagccagaaagaagtggcatgacattttttaagtgctgaaagcaaaggaatattaacccacaactctatattcaggaaaatatgcatgacaaatgaaggagaaataaagatattctcagaagaaggaaaactaagagaattcttaaccagcagacctccttgagaagaacttctaaacatttcttctaaacagacagaaggtaagtgatactagaaggaaatttagaatatcaggaatgatgaaataagtacagaaatgttagatatgcaggyagacatagtagactacttttctctttagttttttaaaatatattg

SEQ ID NO: 122878 - DNA, 520 bp, Homo sapiens
gaattctttgcagtttcaaagacagtcacaatcagtagtttctggggatgataactggcaacgatggaccagatggccggccaggggcactcactttcactaaggtgcacttgaggagtctgctgtcagcccctggggtgcatgctggatgcccrggggtcatttctaagcctttcctgcatatggtacctaacaggtacttaatggaaatctctttacaacaggtttaccctcatgttcgctgatttgatttgatgcaaaaaaaatccagagcctcaggcctctggtttgggatggcatgggaaacagaagagaggtacagatatcttaagggtggtctctgatgctgaggagacccctctcacctggagctgctgaccagccccaagcactggggtcctggtaggccttatgataaatgatggctgaaaagactgggggaagcatagagctgatggaggtgaaggtgctttcccatgtcctccctcccccaaagacacaggacaagtgaagaacctct

SEQ ID NO: 122879 - DNA, 612 bp, Homo sapiens
tgaatattttatatgtcaccttgatcacacacatttatctcagacagataatacacaaataactagctcttccttggcatccctacataaatcttactccagtctctgttttcttctggcctgacagtcccatgggtctctgttcacaatcatgtggcttcaagattgtacttaagtgtctccgctgaagacaatcaggtggcagtgagcacagccatgaatgrggaagaggtaaacaaagggatagtgggcttcattaaaccataagggcagcaagtctctttgggacccttacaacggatgaggtaattcggtcatattgattctaaaagactccaactttcttaagtggccactttaagggacagcagcataatttggccagatgagcttcagtaaatttaaagaaagtttacctttattattcatacttaatattcattattctaaaatattcctttaaaaagtacaatctaatgactgtaatagcccagaaatacaatgtaacaggaggaaactgtggccaaggcaaaaacacctacaatttgtaaaagaatagttggagtcaatgaaataaccttgttataacctgtttacatagtgttggcacag

SEQ ID NO: 122880 - DNA, 375 bp, Homo sapiens
aggaaagggaagcatagggagcytgaaggagagcaagaaggggtgttgggcagcactagtaatgtataccacatgcccagctgttggctgtttctcttaatgaattacattgatttctccacctcttcatattgcttctctaagacatggtgctgtccttgatttgtacccacattttattccacttttcttctagaatgtaaattgttcataattcgctattcattgtcactgttatataggtgacctgctctaggagcctgttgaatttctcattacaaaaatgttcatatacaggagattaaaattgcaattactgtaagaagaagtcatgattaatttaataaatagatattttaattattaatttaatgg

SEQ ID NO: 122881 - DNA, 538 bp, Homo sapiens
gatgagatgattcagtgttaacagtcatgcctgtaatactaaggcctgaatttcatgacagcatcatggactttgactgctctctactggatagaaaatatatgaggtcttctcaaatggataagcatttctgaagagattgtttttatcttctttctcttctcatattaaggtaggtaaagattccatttccttgctgtacttctttatatgtaagctaactgtattattatgttattttccacattccaaatttctgaatattttaagatgatacatatacaatgatatatttatcatagctttacttttaaatgtgctttctcccaaatttattcccaagtcacttccagcaaatgacatttatattataatttctttcaacatrtatagcaatcagtgttcaaccaacaatgctcctatgttgttattattgaaaagaagccctccatcacacacacagacacacacacacacacacattcatgagatactaacaatgctttgatgatcatttttggttttaaaactaacaaaa

SEQ ID NO: 122882 - DNA, 643 bp, Homo sapiens
ttactttaaaaactagacttgtgatggtcccttaattatccccatcactatagaaagggtgattccttcctcactgcctccaaaggaccccgtatgcatccatcacagcaactttaacaatgtctgcacctcctttttcagatgcctgttcctctttcttattcatatttttactttgtttccttggcatctaattcattttaagaacattaggttaaaaaataaataaataaataacctacaagaattcaagaracacagatcctctaaaatataattttataatagctcaagtcccttacgtgacttttttatccattaaaatagatacatgtgaataatttcttttttaaaaatagtttactctcctagctcttcctttactcatctcagatactttcatctttctaatacttccaacctgtccgagaaaaaagtctctctctcagcaccttgctcagagaactcctcattctcccctttacccctctgatctaattctaaattctcaaccctcaaagcactgaactgacaagaaaggaagcttctcagagagcagaagagagtaggagactgagtaggtcaacctagaatttcctttcaagtgcaaagaaagggcaatggctggtaacagtcatatact

SEQ ID NO: 122883 - DNA, 628 bp, Homo sapiens
ttgaaggtggaggaaggccactagtcacagaatgcaggtggcctctaagggctggagaagtcaagagaactgattcgctgagtctccagagggaacgcagccctgcagatgccttgatttcagcacagggagaactggatccaatttctgtccccagaagtggaaggggtcagtgtgttctctcctgctgccatgtttgtgataattttctgcagcagcaacaggaaaccgacacaggaacccaggtcaaggacaagctaggaaaccaaacaaggatagccaggtgtggtggtgggcacgagtaatccaacgactggggaggctgaggcaagakaatcacttgaaccggggaggcagaggttgcagtgagccaagacaacaccactgcactccagcctgggtgaaaaagtgactgtctcaaaaataaattaattaatcaattaattaaagaaaccaaacaaggagaaggttggctaccgtgggatcagcaagggtgggatgctgatgccaccaccaggctccatccacataggaaggggttgatgctcctggaaccagcaccagggaccaccctatggaagctggggccatggagaaggcacagacatggcaggagaggctcccaatc

SEQ ID NO: 122884 - DNA, 581 bp, Homo sapiens
aggttaaagatacatagatgatgattgattgattcattaatagataatacatagagatgatgatgatgaagacagataatacgtacagatagagaggcagacagaaatcatagagagagagatgatacatacatataaataacagatgattgatggatagatagacaastgatagatacatagatgatatatagatatagatgacaggtagagaatttgtagataggcaccgaatagataaatagatagatcgacagataatagatagaaatatgcagaaagttatgaacaggacacaacgtgagaaacttagaatttaaaaaagtaacatcaagtcaaccaatccaaggagagtcagagagaataaaacaatccaaaaacggaaaacatatctagaggtggggaagcgaggtcagagacctagagagacagagaaggtggaagaaggaaatagacatgaagagagatggggtggagggtgagagagagagagagagagcattaggtcatagagcaggggagtgagttctcagctcaggtgaagggagctgtgacaaggaagatcctccctgaggaaaatg

SEQ ID NO: 122885 - DNA, 581 bp, Homo sapiens
aggttaaagatacatagatgatgattgattgattcattaatagataatacatagagatgatgatgatgaagacagataatacgtacagatagagaggcagacagaaatcatagagagagagatgatacatacatataaataacagatgattgatggatagatagacaactgatagatacatagatgatatatagatatagatgacaggtagagaatttgtagataggcaccgaatagataaatagatagatcgacagataatagatagaaatatgcagaaagttatgaacaggacacaacgtgagaaacttagaatttaaaaaagtaacatcaagtcaaccaatccaaggagagtcagagagaataaaasaatccaaaaacggaaaacatatctagaggtggggaagcgaggtcagagacctagagagacagagaaggtggaagaaggaaatagacatgaagagagatggggtggagggtgagagagagagagagagagcattaggtcatagagcaggggagtgagttctcagctcaggtgaagggagctgtgacaaggaagatcctccctgaggaaaatg

SEQ ID NO: 122886 - DNA, 581 bp, Homo sapiens
aggttaaagatacatagatgatgattgattgattcattaatagataatacatagagatgatgatgatgaagacagataatacgtacagatagagaggcagacagaaatcatagagagagagatgatacatacatataaataacagatgattgatggatagatagacaactgatagatacatagatgatatatagatatagatgacaggtagagaatttgtagataggcaccgaatagataaatagatagatcgacagataatagatagaaatatgcagaaagttatgaacaggacacaacgtgagaaacttagaatttaaaaaagtaacatcaagtcaaccaatccaaggagagtcagagagaataaaacaatccaaaaasggaaaacatatctagaggtggggaagcgaggtcagagacctagagagacagagaaggtggaagaaggaaatagacatgaagagagatggggtggagggtgagagagagagagagagagcattaggtcatagagcaggggagtgagttctcagctcaggtgaagggagctgtgacaaggaagatcctccctgaggaaaatg

SEQ ID NO: 122887 - DNA, 510 bp, Homo sapiens
tatttctctataattacttctttgatcctttatcttatccattaggcaatgagcctaaaacctcttccctatttggctttctgtgagcatgagatcatatagaaaatgtgaaagtccgctgaatcctccagcacagatcctggaatagagaaagtgctctggtcatcacaaaaaaaacttgcccactcacccaaatcccccacctcacccctacttccaatcacctgtggagattcaggtagaccatggggaggtaaacattaacactccttggagtgagtccagatcttggaatcagagatcagcgacagcactagctcctgctcccctttcctactaattcacaggaggacaggtggtwttgaagcaatagatggccgagggggtggtccttcccccagcctctcgggtagaacagcagcctaatatgtgtctcccgagatcacaaagagcagcaggtttcacacgggcttcaacactatttcctggccgtttgacataagagaattc

SEQ ID NO: 122888 - DNA, 403 bp, Homo sapiens
tctctttgggtttccaccggtgattttatagttctggatttacatttaagctgctaattaccttaagttaatttatgtgtatgattacagatacaggtccagttttattcttctgcatatggctatttagttttcccagcaccttttattgaaaaggaaatctttctccagkgtatgttttgttaacgtcgtcaatgattattcactgtagatatgaggctgtatttctgggctctctattctggtctattgatctctgtttctgtgtctataccagcactgtgctatttaagttactatagccttagagcatagtttgaagtcagatagcgtgatgcctccaggtttctacattcacctagaattgctttctctattaggatcttttttggttctgtatgaa

SEQ ID NO: 122889 - DNA, 456 bp, Homo sapiens
ggcctttgtgtgtcctgaggactttttccccttgtttcttggtagtgtctcctgtcatcggcctcccacctgtgtccatgggtgtggggggcaggatggagattaaggccatccaygcctgagtgaccatcctgcccagcagtaacagaggcggctcaggggtggcatagccaagtggcttccccttctggctcctccatgagccaaacccctttctctggcctcccatgcctcatgtctccctgtaccctgtggaaggggcaggcaccaccacacagcaaccctgctcttccccagccttcctaataagggggatttcagaggccgacctgctatgtgaagtatgagactatggcagaatcattgtgtataaatacaattcatgagaagtagattttgtttcaaagcatccctctctcttgccattcattacacctctccttactcttttaaagc

SEQ ID NO: 122890 - DNA, 511 bp, Homo sapiens
gaagataggagaattaggagatttggacgagacttgtaaggtgaggaagctctttgaaaaacaagctttggctcaaaatctgggcagaaattctagttggctctccccttttatttttmactggtttgtttatccctaacaaagagtagatgagcagttctgggaatcattattaaaaacattaaaaaaagataagcctgcatgtaaagaaatcctttgctgttgtatttgatgagatgacatgttttattcaaataccccattacctagtagaatctttggcacatagtaggtgctcaataaacagtgattagttgattgactgaatgtattaattgccttttaatggtatttatctttctcctctcataagaggacacagctgtacctcccaacattcttatgtggcttgtcaaaacaaaaacagactaggcttgaattggccaccctgattaatctggtcttgatattttttcagaagccatttttgtcatcagtgtagctggtgaaa

SEQ ID NO: 122891 - DNA, 554 bp, Homo sapiens
cattctgagttttaagtgctaagtcagaataggtgttaaaatgagcctttggaaaaacagtttgtcagtttgcacacatctatgttttaggtgcaatagcaaataaacacagtacatgaacgaatgagtgctcatgggaaataagaggtggtcttatctaaaggraagtactgtgggccatggtcggaatcctagggttccggatcctgccatgccactcgctggcagcctggttggcttccccgggctccacctttcaccagcgggagcggaactgtttctcattgtttccactctgggctgttggagccccagggctctcagggtgtttcagggggctgtggacagggagaggaacagcacttttcccctaagatttacaaagagcaattctccttaaacaactggtttaggaaaagctactggactaagttctcccagccccaactttctggcactttagaaactgtccatttccaccgagtggctggcctcagttaggattgcagtgagcaagctgcctggatggtgtgatcacctgggaaggaaagcaa

SEQ ID NO: 122892 - DNA, 554 bp, Homo sapiens
acattctgagttttaagtgctaagtcagaataggtgttaaaatgagcctttggaaaaacagtttgtcagtttgcacacatctatgttttaggtgcaatagcaaataaacacagtacatgaacgaatgagtgctcatgggaaataagaggtggtcttatctaaagggaagtactgtgggccatggtcggaatcctagggttccggatcctgccatgccactcgctggcagcctggttggcttccccgggctccacctttcaccagcgggagcggaactgtttctcattgtttccactctgggctgttggagccccagggctctcagggtgtttcagggggctgtggacagggagaggaacagcacttttcccctaagatttacaaagagcaattctccttaaacaactggtttaggaaaagctactggactaagttctcccagccccaactttctggcactttagaaactgtccatttccaccgagtggctggcctcasttaggattgcagtgagcaagctgcctggatggtgtgatcacctgggaaggaaagca

SEQ ID NO: 122893 - DNA, 636 bp, Homo sapiens
tggtatcttaagagggtagaaaataaggatttctgagaaggcaacttcaggagtaaggcctgaaaggttccaattagcaaagagagctacaggttacaggtgcgggtgaagggttataagtgccctttcattattctttgtatggttaatttttatcaattatctttcatttcattattaacccagcacttgataaaacatcaagagtttatcataaccagtgagtaagtcattaaaagatattattctttaaatcttagctcaaargttctttcctctgtataccttttgggtatccctcaggctgctgagaggtaattatttctgcatttcagcaagtcccctcattcttctctgccccttgccctgttctttgatgtgcttcttaaagtatttatcacactaaacatttgtcacaagattttacactgaccatcataagacctttgatggcagatacaatattttatttatctttgtatatttttgctatttttcatttgtcttttatttatctttgtatacatgacacataggtgatgcttcacattagtttgtcaaattaacaaatgaaccttaagttgtgttgaaagcatttctcttcattagtatacagtgggttaggattattaattt

SEQ ID NO: 122894 - DNA, 636 bp, Homo sapiens
tggtatcttaagagggtagaaaataaggatttctgagaaggcaacttcaggagtaaggcctgaaaggttccaattagcaaagagagctacaggttacaggtgcgggtgaagggttataagtgccctttcattattctttgtatggttaatttttatcaattatctttcatttcattattaacccagcacttgataaaacatcaagagtttatcataaccagtgagtaagtcattaaaagatattattctttaaatcttagctcaaaagttctttcctctgtataccttttgggtatccctcaggctgctgagaggtaaytatttctgcatttcagcaagtcccctcattcttctctgccccttgccctgttctttgatgtgcttcttaaagtatttatcacactaaacatttgtcacaagattttacactgaccatcataagacctttgatggcagatacaatattttatttatctttgtatatttttgctatttttcatttgtcttttatttatctttgtatacatgacacataggtgatgcttcacattagtttgtcaaattaacaaatgaaccttaagttgtgttgaaagcatttctcttcattagtatacagtgggttaggattattaattt

SEQ ID NO: 122895 - DNA, 544 bp, Homo sapiens
ataatttgataaggtaaataaaagctgcaacctgacakcaggaaatttgaattcagctgccatttctgccttgggaaagtgctggctttattttcctcaaaggaaatgatgtaaatacttaactaaaatgattgctgggagggacatgagaaaaaaaaaaactatctgtaagattctactttaaactgagaagtgtcatgttaggcaactagcactttgtttgttaggtcttaaagacaactggctgattaccaaactccttaagaacagtccaaatggagaaagatacaatgattgaagcccagtcatgatctggctgctgatgtcctgtggtgtatctggaacctaagatacctgtgagatggcagtctcaagtctttttgtgtccaaatggcttgcgtgattgaaccatgacttttttggttttaagtctacagcaaaaaaatataatttataaatgtttttgaagagtatatttagggttcatacttttatcttcataaacttaatactttgattaaaattaattttttatcaaaacctt

SEQ ID NO: 122896 - DNA, 535 bp, Homo sapiens
ggtaaatttttaatttatatttcgacctatgataagttgaaaagcagacaattttgaatagttaaataaatgtatctttacataaactttacataaacttgaatttaagcatttcgttgccggaaaaattatccaaatctttgaaagaaagcaaaaggatgggcaacacaatcattacatatcacacagggcaacagctacccaaagtttttctagagatgtatgtggttcatttcactgttttctcctgagtttgcttgttaacagcagattttcttcagtagagatgctaatatttcctgcctagtggaacagataaccacaaagattgatagcttgttagaaattaaccagtttgtatcttatcctaatatttcttgttaaatygactataaatagcctagcttcttaaatgttgcttgaactgatcataatatcactggttctctaattaattaattagttaaatagaattcttgacacaggttcctgtgatatttgtctgagagtaatgatttcacctcttcagaaatta

SEQ ID NO: 122897 - DNA, 642 bp, Homo sapiens
ttcagccctgatcagcttggactctccaaggcctgcaggctggaccagctgagatgcccaaacagcaaatgtggcagcccaccccgacccccaagcactctagggagaaattagaactctgtaggaggtgtaactcaagcaggggtggctgggaggacccacccagggaggaagaatggaatagggtcccatttaaagcagtctggccacacctcaataaagcagccaagccatgatggggaactgcctccacctgcatcatcttggactctaaagcccacaggctggaatgaccaattcacccaaacagcaaaggtggcagacctcccctccctgccaggcactccatcccagggagaaataagaactctgtcagcctagagtaccagcgacggtggctgtaggctccagttgggagatcccggccagtgaggaggaatgaatcagggtcctgcttaatgtcccagggagaaataagaactctgtccatagaatacgggcaagggtggctggaggccccagctgggaggtcctgcccagtgaggaggaatggatyggggtcccacttaaagaagcagtctagccgcattttggtaaagcagctgcactttgctgggggcaggggtcgggggaaggtccctt

SEQ ID NO: 122898 - DNA, 525 bp, Homo sapiens
tgtggcagcttctcccatcacaggcctggagacctaagaggaaaaaagtggtttcatgggccaggcccagggccccactgctctgtgcagcatcaggacatggygccccgaatctcagccactccatttccagccatgattaaaagtccacagatacatctcagtccactgctccagaggatgcaagctataagaagccctggaagcttccatgtggtgttgggcctgcaggtatacagagggctagagttaaagcttgagagcctccacctagatttcagaagacatgtagaaatgcctggatgtccaggcagaagtctgatgtggggacagagctctcatggagaacttccagagcagtctggatgggaaataggaggttggagcccctacatggagtccccactggggcactgcctagtggagctatgagaagaggccaccatcctgcagaccccagaatggtagagagcttgcaccaggcacctagaaaagccacaggcactcaatgccgctcagaaagca

SEQ ID NO: 122899 - DNA, 626 bp, Homo sapiens
aattattttgaaataagaatctgtaagcaatgactttttttatattccttgcccaacaaatctgcctaggactttcagtataattacagagaaaagtggttaaaggaggcaccctttgtttcatttttgatttcagaattattttttaacatttaatctttaaacaagatatttgctgtaggtttttatgaatacctttaaataggttactaatgttttcattaatattttattaatattttgctatagattttatcataagaggctatataacttttttcaattgcttttactgaagctaataagatatataaattatagttttactcagttaatttatcattaaacaactttcattcatatgttaaactattaatatattgataatggtaaattatgtttgttatatattgttgcattcagttgattaaaatgttgttcagtatatttgtatctgaatccatgagtgagatttcccagtgaatttccttttagaattctcctcatcaggtttttggaatsaaagttatgcaagtcttaaaaaaaaatgagttaatgagttttcattctttttctacattcaagagtagttttatgagagtagaatcatttgccagaaaggaatt

SEQ ID NO: 122900 - DNA, 553 bp, Homo sapiens
tgtattagtacattttcgcactgctataacgaaatacctgagactgggtaatttataaagggaagagatttaattgactcacagttccacatggctgggaggcctcaggaaacttacaatcatggaggaaggtgaaggggaagcaggcacctttttcaaaaggtggcaggagggagtgagagcaaaggaataaaaactgccatgtagaaaactatcagatctcatgagaactcactcaytctcatgagaaaagcataaggaaaaccacccacatgatccaattacctcccaccaggtctctccctcaacacctggggattataatttaaggtgagatttgggtggcaacacaaagcctaaccatatcatttcaccccgggccctcccaaaatctcatgtccctttcacatttcaaaaccaatcatgccttcccaacagtcccccaacatcttaattcattccagcattaacacaaaagtccacagtccaaagtctcatctgagagaaggcaagtccttgccacctatgaggatgtaaaattaaaaacaagtta

SEQ ID NO: 122901 - DNA, 526 bp, Homo sapiens
ctagccgggcgcggtagctcacacctgtaatcccagcactttgggaggccaaggtgggtggatcacgaggtcaggagatcrgagaccatcctggctaacacggtgaaaccccgtctctactgaaaatacaaaaaattagacaggtatggtggcgggtgcctgtaatcccagctacttgagacgctgaggcaggagaatggcatgaacctgggaggcggagcttgcagtgagcggagatcgcgccactgcactccattcagcctgcgcgacagagcgagactccgtctcaaaacaaacaaacaaacaaacaaacaaacaaaagaatatttcctatatgaatggctctgttgattgaatggctctgagaattgttatttttagagagttttttaaccgtaatcttgaaaagcctgctaactctccccttctttggcaatctggaaaacctgctgcttaaaatgatattgtccagacttagcctattagacatcaaggaaaagtcccaaaatagaagacggttcccagc

SEQ ID NO: 122902 - DNA, 526 bp, Homo sapiens
tgttttcactgtagcttttgttttagagaggacaacttgtaaaactttcagtgaacttaggcaaggagmaagccaaccctggcagggcaggccctctctgcaggaaacccctaactgggaggtgcccagctctggcaagtctttgaactgtcagatgccaggtgctgttagggcacctccactcagcccctgcctaatgcaagctcttgaaaactcagagatagcttcctccgtcattagcatttgtgctctgtactgaacacaggtcaaagggagatgttaaaatacaccccagagttcacagggccaggatttgaccctattgaaacctgataaataccacccctctattgttctctgggtggaatctggcaccagggtgagaactgggatatgactgaaagattttgttttattgctatcttagtctattcattgttgcagagaccctgacaggatttctcttatctgtgatttgacaaaatatatcttcttaatcatttcacggttgatgttaagagggttc

SEQ ID NO: 122903 - DNA, 625 bp, Homo sapiens
tgtccccaatcaaatctcaaccgaattgtttctcccagaattcccatgtgttgtgggaaggacccaggtggaggcaattgaatcatgggtgccagtctttcccatgctaactcaatgaatatcccagcattagttggaaaggtgagaagtttgttaacataattgtcttctactgtattactcctaagaattgtaactctgagcaggtccttgttagaaggatggccgagacgggcacattggctcacgactgtaatcccagcactttgggaggccgaggtgggtggatcacaaggttaagagatcragaccattctggccaacatggtgaaaccccgtctctactaaaaatataaaaattagccgtgcgtggtggtgggtgcctgtaatcccagctactcaggaggctgaggcagtagacttgcttgaacccaggaggtggaggttgcagtgagccaagattgcatcactgcactccagcctgggtgacacaatgagactccatttcaaaaaaaagaaaaaagggaagtacaatatactatgcacagagctttggaactcctgtccccaggcatgttctgtttctcttgttgcatctggggaaggaaggtaggaaacggtgccc

SEQ ID NO: 122904 - DNA, 625 bp, Homo sapiens
tgtccccaatcaaatctcaaccgaattgtttctcccagaattcccatgtgttgtgggaaggacccaggtggaggcaattgaatcatgggtgccagtctttcccatgctaactcaatgaatatcccagcattagttggaaaggtgagaagtttgttaacataattgtcttctactgtattactcctaagaattgtaactctgagcaggtccttgttagaaggatggccgagacgggcacattggctcacgactgtaatcccagcactttgggaggccgaggtgggtggatcacaaggttaagagatcgagaccattctggccaacatggtgaaaccccgtctctactaaaaatataaaaattagccgtgcgtggtggtggktgcctgtaatcccagctactcaggaggctgaggcagtagacttgcttgaacccaggaggtggaggttgcagtgagccaagattgcatcactgcactccagcctgggtgacacaatgagactccatttcaaaaaaaagaaaaaagggaagtacaatatactatgcacagagctttggaactcctgtccccaggcatgttctgtttctcttgttgcatctggggaaggaaggtaggaaacggtgccc

SEQ ID NO: 122905 - DNA, 625 bp, Homo sapiens
tgtccccaatcaaatctcaaccgaattgtttctcccagaattcccatgtgttgtgggaaggacccaggtggaggcaattgaatcatgggtgccagtctttcccatgctaactcaatgaatatcccagcattagttggaaaggtgagaagtttgttaacataattgtcttctactgtattactcctaagaattgtaactctgagcaggtccttgttagaaggatggccgagacgggcacattggctcacgactgtaatcccagcactttgggaggccgaggtgggtggatcacaaggttaagagatcgagaccattctggccaacatggtgaaaccccgtctctactaaaaatataaaaattagccgtgcgtggtggtgggtgcctgtaatcccagctactcaggaggctgaggcagtagacttgcttgaacccaggaggtggaggttgcagtgagccaagattgcaycactgcactccagcctgggtgacacaatgagactccatttcaaaaaaaagaaaaaagggaagtacaatatactatgcacagagctttggaactcctgtccccaggcatgttctgtttctcttgttgcatctggggaaggaaggtaggaaacggtgccc

SEQ ID NO: 122906 - DNA, 575 bp, Homo sapiens
agaccagaaaggatgctagacattgtcgtgatcagttttggatctctctcctcttgacctttttatagatgaatttatgggcagcyccatagactgaggccacacttagtgcccctaaggttctaacttccaaggggataaaaacagacatcagcttcttaaaattctcacactcctctctgattagcaccatattccagccttccttcctccagtgcaccttcatcaggcatcacctccacatcacactgcattagttttctctttctttgcgcaacagggatagagggatagaggacagggagggtttccccttttctgattcccaagatcaccgtcattctcagtccctgctgagggaggaggcttgtcatttggggagatttgaaaatcaaccctagggcttggcttgccagcctggatgtgtgggcagcggccaatctgagaaacaatctggatatcacattgcccgagaaaaggggatgtccctctgggaaataagcctggctctgtttgtattggctttcagagaactcttctgacctgacatggtgctaacttggtattgtgggaaa

SEQ ID NO: 122907 - DNA, 575 bp, Homo sapiens
agaccagaaaggatgctagacattgtcgtgatcagttttggatctctctcctcttgacctttttatagatgaatttatgggcagctcyatagactgaggccacacttagtgcccctaaggttctaacttccaaggggataaaaacagacatcagcttcttaaaattctcacactcctctctgattagcaccatattccagccttccttcctccagtgcaccttcatcaggcatcacctccacatcacactgcattagttttctctttctttgcgcaacagggatagagggatagaggacagggagggtttccccttttctgattcccaagatcaccgtcattctcagtccctgctgagggaggaggcttgtcatttggggagatttgaaaatcaaccctagggcttggcttgccagcctggatgtgtgggcagcggccaatctgagaaacaatctggatatcacattgcccgagaaaaggggatgtccctctgggaaataagcctggctctgtttgtattggctttcagagaactcttctgacctgacatggtgctaacttggtattgtgggaaa

SEQ ID NO: 122908 - DNA, 575 bp, Homo sapiens
agaccagaaaggatgctagacattgtcgtgatcagttttggatctctctcctcttgacctttttatagatgaatttatgggcagctccatagaytgaggccacacttagtgcccctaaggttctaacttccaaggggataaaaacagacatcagcttcttaaaattctcacactcctctctgattagcaccatattccagccttccttcctccagtgcaccttcatcaggcatcacctccacatcacactgcattagttttctctttctttgcgcaacagggatagagggatagaggacagggagggtttccccttttctgattcccaagatcaccgtcattctcagtccctgctgagggaggaggcttgtcatttggggagatttgaaaatcaaccctagggcttggcttgccagcctggatgtgtgggcagcggccaatctgagaaacaatctggatatcacattgcccgagaaaaggggatgtccctctgggaaataagcctggctctgtttgtattggctttcagagaactcttctgacctgacatggtgctaacttggtattgtgggaaa

SEQ ID NO: 122909 - DNA, 541 bp, Homo sapiens
tcttgatggaaatgatctaaaaacctgacttgaaaagcacagaattgtaagttgaattaaaaaaaaaaaaataaggcccaaccagctattgccttcaagagacccacgtcatatgtaatgacacccacaggctgaaagaaaagaaatggagaaagacctatcatgcaactgcaaaaccaaaaagagcacaggtcgatattcttatactagataaagcacactttaaaccaaaaacagtcaaaaaggacagagcaagacattacataacaataaaatattcaattcaacaagaacacctaattatcctaaatacatatgcaatgcaacattggcactcagattcataaaacaagtacttcttggactgcartaagatttagacagctgcacaagaatagtgggggacttcaacgttccactaacagtgctagatagatcatcaaggcagaaaactaacagaaattttggacttaaactcgacacttgacgaattgttcctaatagatatttacagaatactcaacctaacaaccgcaaagta

SEQ ID NO: 122910 - DNA, 541 bp, Homo sapiens
tcttgatggaaatgatctaaaaacctgacttgaaaagcacagaattgtaagttgaattaaaaaaaaaaaaataaggcccaaccagctattgccttcaagagacccacgtcatatgtaatgacacccacaggctgaaagaaaagaaatggagaaagacctatcatgcaactgcaaaaccaaaaagagcacaggtcgatattcttatactagataaagcacactttaaaccaaaaacagtcaaaaaggacagagcaagacattacataacaataaaatattcaattcaacaagaacacctaattatcctaaatacatatgcaatgcaacattggcactcagattcataaaacaagtacttcttggactgcagtaagatttagacagctgcacaagaatagtgggggacttcaaygttccactaacagtgctagatagatcatcaaggcagaaaactaacagaaattttggacttaaactcgacacttgacgaattgttcctaatagatatttacagaatactcaacctaacaaccgcaaagta

SEQ ID NO: 122911 - DNA, 603 bp, Homo sapiens
ttttaccctagttaaaatggtatttataaaaaaataaagaatattgatgctagtgaggatgtggagaaaggggaacccttgcacactattggtgcaggtacaaattagtatagccactgtggataactgtatgaaggttcctcaataaatgaaaaaatcacaactaccttaggatccagcaattccactgctgggtataaagccaagagaaaaaataatgagtaaatcaaagaaatatgtacattcctcatttactgtagcaccctttacaaaaaaaataaaaattgaatcaacctaattgcctgtcaatgtatgaatggataaaggaaatgtgatatatatacacaatgaaataatattcagccataaaaagaacaaaattctgtcatttgcagcaatattaatgaaactgtatatcattatattaagtgagataagccaagcagagcaagayatatatcacatattctcactcctatgtgggagctaaaaaaggagatcttatgaagacagacagtaaattggtgttttccaaaggccagaaagggtagagagtagaaggggttgaagaaagtttgatgaatgggtacgaactaacagttt

SEQ ID NO: 122912 - DNA, 634 bp, Homo sapiens
ttccagtgatagctgactgttaaaaacagcctggaaattcatccatttctctcttgcttcctctctcaccaagtgacctctgcacaggctggctccctttcaccttccaccatgagtggaaggaaaatgaggccctcaacagaaataggggcccaatttttaacttttggagacatcagaattgtgagccaaagaaacttttaaatttataaatcacccagcttcaggtatttctttttagcaacaccaaatgtactatgccaactatcatacatcaacgaaagatttttttttcctagctttctttccaaagatttggaatttaaatttttttacattttgaagtagtctgtgtatgtatttccccmaaaaaagtgaaatcaactaatcataagtgcatatatatacatatatatgtacagatgcctacggtaatttcaacaaatgtttatagaaaaaccataaaagaggcataatttattaagaactaataataaaaaagtaaccccatagtaaattaaactctatgcttaatgttaaagttagtctactttcttttgtttcaggaattggacattgttacagcttttctcaaatacagaaatccttaatggtaatcagtaaaattagtaaa

SEQ ID NO: 122913 - DNA, 542 bp, Homo sapiens
tggataaaatactaaaatgggaaagaaaaatctacattgacaacaaaaaaaatagtataagatactatgtttggaactctgagacagaaaagctttcttaaatatgactatgtatcataaatactaaaaaaaaaaaaaaaaaaaaaaaaaaggaatggctgggtgcagtggctcacgcctgtaatcccagcactttgtgaggccaaggcaggcagatcacaaggtcaggagatcgagaccatcctggctaatacggtgaaacctgtctctactaaaaatacaaaaaaaaaaaaaaatccgggtgtggtggtgtgtgcctgtagtcccagctattcgggaggctgaggcaggaraatcgcttgaactagggaggcagaggttgcagtgagctgagatcatgccatcttgttccagtctgggcagcacagtgagactctgcctcaaaaaaaaaaaaaaaaaaaagaaaagaaaaaagaaaggaatgcatttactgcatcaaaatgatagatttttaaccaaagtgcatcacagacaaaaataaa

SEQ ID NO: 122914 - DNA, 542 bp, Homo sapiens
tggataaaatactaaaatgggaaagaaaaatctacattgacaacaaaaaaaatagtataagatactatgtttggaactctgagacagaaaagctttcttaaatatgactatgtatcataaatactaaaaaaaaaaaaaaaaaaaaaaaaaaggaatggctgggtgcagtggctcacgcctgtaatcccagcactttgtgaggccaaggcaggcagatcacaaggtcaggagatcgagaccatcctggctaatacggtgaaacctgtctctactaaaaatacaaaaaaaaaaaaaaatccgggtgtggtggtgtgtgcctgtagtcccagctattcgggaggctgaggcaggagaatcgcttgaactmgggaggcagaggttgcagtgagctgagatcatgccatcttgttccagtctgggcagcacagtgagactctgcctcaaaaaaaaaaaaaaaaaaaagaaaagaaaaaagaaaggaatgcatttactgcatcaaaatgatagatttttaaccaaagtgcatcacagacaaaaataaa

SEQ ID NO: 122915 - DNA, 686 bp, Homo sapiens
tgttcaaaaatctgaatgggccactgggctctcaggaggtaatgagtttcccatcactggaggctttttaagcacaggctgaaaaacctcttayagggagtgaagagtatttaatttaaccctcaagaaactaccttcagacagtttggtatataaatgaagggaccctgaagcagacttctcctgggatccagagtccatctcgaggtgtcatagcctccagggagtgggctgagttgtagagattgggcctttttgcaaagagtagattcagtttaaaaacatccctgttcagtgtccgacttaacctctcacaggggttgtgctttgatggtatttgtcagctccctgctggctctagacaacagcatggcgaaagagaccccgtgctcgtgcccgtgggcaagttgcttctttggttgatcttgctggagacagcgcacggtgagggccttgctgaagcagaaggtgcgcattccacagtccccagtgggtggtggagaaggtagccagcaaacagcacagactctgccaatctccccaaagcaggtgccacgacagccagcaggcctgtggaaatgcctcttcaaagctggcttggctctgcccagcaatgcaggctgagcccatccatcagctgtcctactgcctgccagcgagagtgtctgctgggcttgccccgccag

SEQ ID NO: 122916 - DNA, 686 bp, Homo sapiens
tgttcaaaaatctgaatgggccactgggctctcaggaggtaatgagtttcccatcactggaggctttttaagcacaggctgaaaaacctcttatagggagtgaagagtatttaatttaaccctcaagaaactaccttcagacagtttggtatataaatgaagggaccctgaagcagacttctcctgggatccagagtccatctcgaggtgtcatagcctccagggagtgggctgagttgtagagattgggcctttttgcaaagagtagattcagtttaaaaacatccctgttcagtgtccgacttaacctctcacaggggttgtgctttgatggtatttgtcagctccctgctggctctagacaacagcatggcgaaagagaccccgtgctcgtgcccgtgggcaagttgcttctttggttgatcttgctggagacagcgcacggtgagggccttgctgaagcagaaggtgcgcattccacagtccccartgggtggtggagaaggtagccagcaaacagcacagactctgccaatctccccaaagcaggtgccacgacagccagcaggcctgtggaaatgcctcttcaaagctggcttggctctgcccagcaatgcaggctgagcccatccatcagctgtcctactgcctgccagcgagagtgtctgctgggcttgccccgccag

SEQ ID NO: 122917 - DNA, 584 bp, Homo sapiens
tcttgaacactttcaacgtgactgatgtgacaggaaccaaattttacattttaatttatttaaatttaaatagctccccgtgsctgtagcttctatattggacagtatagttctagaaagtaaaagcaacaagagttgatgattaattgggcaatttagggtggcagggtagacagagctagagacagaggggcaggttaattgtagaggggggaaagatgagtaccactgtgtgcatgttggctccaagtgcgagagacatctgggggaagaagtatgcccagcagtaagaaacgcaagcctctttggagaacgctgggctggagatagaaatttgagagctttcactgttaactatgataggtgagatcataaaactgagtagcacagggaagccacttcactgcttttggcctcagattcctgttgatttgatggtggtcataatatttgctctgcctaccttctgggactgttctgaaaaattcagatgggattacgtgcatgaaaatgctttgtaaactcttcagacattaggcagagtttataacgtctttaggagtgagaggaatgtgtcccacatg

SEQ ID NO: 122918 - DNA, 572 bp, Homo sapiens
tcttgaacactttcaacgtgactgatgtgacaggaaccaaattttacattttaatttatttaaatttaaatagctccccgtgcctgtagcttctatattggacagtatagttctagaaagtaaaagcaacaagagttgatgattaattgggcaatttagggtggcagggtagacagagctagagacagaggggcaggttaattgtagaggggggaaagatgagtaccactgtgtgcatgttggctccaagtgcgagagacatctgggggaagaagtatgcccagcagtaagaaacgcaagcctctttggagaacgctgggctggagatagaaatttgagagctttcactgttaactatsataggtgagatcataaaactgagtagcacagggaagccacttcactgcttttggcctcagattcctgttgatttgatggtggtcataatatttgctctgcctaccttctgggactgttctgaaaaattcagatgggattacgtgcatgaaaatgctttgtaaactcttcagacattaggcagagtttataacgtctttaggagtgagaggaat

SEQ ID NO: 122919 - DNA, 427 bp, Homo sapiens
gcatgaggttttaaaggggcctcatctttcataagcaacactccaagcacaaagcatatgccacaggcagtcagtcctctccagtgttcccagtagtagagaggagaggtgtggtgtgcccagatgtgccatcatggtgggacgtccagcttttctggaagccactgagcacaactgtcctttaccacagcaagtcacrgagaaggaaaaaaaaatccagagaaaacttcactatcaggaaatctttccttattgcagatggagcttagagaccaaagacgcgtgtacgtgctttccctctactaggaggccggggcttctgcctcctgcattttcaagactcttcaggggcacattcgttaatacaagggcaaagaaacattctgcatagtttctctggcttcatttgcatcactgcaatagaatt

SEQ ID NO: 122920 - DNA, 418 bp, Homo sapiens
atgatgttgttttgtatttaacagaataaagaacaaaattcttatttggttctatgtttaagagttttgattcaattctcaractgcttgggttcaaatctcaactctgtctcttaccagcttgacaatgggcaagttatttaacctctcttagactcagtttcctaattggaaaataataatagaactcatctcaaagagccctagtaaagattaacattggtaacatctattaattactcagcacagtgcttagtacataataggggctcaataaacatttggtattattaataatattgttttatttaaaacgaataaaaataattcatattttccataaatatactttatatgggattagtaatttcattgctttgttttttagttcatgatgattaaacattacatttaacca

SEQ ID NO: 122921 - DNA, 582 bp, Homo sapiens
gaattctcatgatggttccttctcatgtggagaggatgccactttaaatttttgaaattattttctgtggatagaatttttccttttcttattatttcttttcctttatccttctctcccttcctatggggtgtgactgtagagtatattgggtaagttcttttggattttcttctatagccttattctctctgtcagcagattttatattaaactgtctgactcaacttacaagcaagtagatggcacttacaggtaagaaccagctgtggcacaagcagatgggtatgtagtggatctttgtttactgtgagatgttctctgttgtttcaggtgataggctggacattggagtgcccagttccctgagcttcctgttctgtggggatgcagggccacagctgggcaaagctggcttgcccataaatacctcagtgatgagcacaggcatgggatttgatgagtatgggtgagaggagctcctggtaagattcactgatatctctgcaaagggcaactgggctgcacyagctccatgtcctagataggcagaaacaaaatgttttcctctcacacataggc

SEQ ID NO: 122922 - DNA, 364 bp, Homo sapiens
gaaacaagacatttgttttttgaaaagttaaacaaaattgacaaaccttttgccagattaagaaaaagggagagaraatacaaataaatcagagatgaaaaaggagatattacaactgatactgcagaaattcaaaggatcattagtggctactatgagcaactacatgccaataaattggaaaatctggaagaaattgacaattttctagacatatacaacctaccaagattgaatcatgaagaaatccaaaacctgaacagactactaacaagcaacaagatcaaagtcttaagaaaaagtctctcagttaagaaaaccaaggacctaatggcttcactgctgaattctagcaaacatttaa

SEQ ID NO: 122923 - DNA, 618 bp, Homo sapiens
ttggccagagtatttgcataaagtcagcaagaataattgtttgccatttaggctccttttttttttggtttaaattggttttgctagaactttatgtcataaaaaatctcagatttagctttaatgccttaggcccagcttgtacctgcaaattcctgtgtcaattggatgaattcctcacctcaaggtcccaggaaaatttggggctcctgggctgtcagaaaatgacattctttaattatcctgggacagaaatttgtacagtgactgtgtaaaccaggtatgaggccagctttcccaggggcacttttattggctctacaagtcaattttgattccttacaagagcctgtttgtagctgaatgcatgccattccagtcaaaaccttgtaaaataaccaggatctccaactgtgtcctgttacaaaagaaaataaattcttattaatcttatgtaagtaactgtattgttataagttaagaatactcatggctagcttccaagttttgaagaaatcaggyagaaagaaatatgctccaaattttgtttatactgtactcaattattaaaagctgcatatagctcaaaagaaaagtttccttggctctgaaaaacag

SEQ ID NO: 122924 - DNA, 508 bp, Homo sapiens
gtgtagacaaagacagtcctctcccttggtaacatcagcttcacacagttttctaagcttgccatgttgaaaattactcttaagtaagaagaacagtgcagtcacaaaccagtattaacatttccatctcttgacttgagcttggttacttagcattaataaggtagtatatcctatcttattaatgatagtagccatattctacttgctgggctcaaatctaaagagcaccccttctacatcagaggcaggccacggcattttcctgcacctcaccctcagaaacagattcacagccacaactcagtctgtgggcttcagctgctaaggtgtgctagagtcatagaccttggttctgtgggtaatctrcattcaacactgccacagagagtgaacctgcaccgcaagacccaggtgtcacaatacatgattaaaagaccctgagtctagaatgatgcttctatgacaacttcaaggatctgtacttgtaacccagcaccaatgccgc

SEQ ID NO: 122925 - DNA, 420 bp, Homo sapiens
caattcttatcaaagtacatatttttttcacagaattagtaaaaataatactaaaattcatgatggaaaaacaaaagatcctaaacagcaaaataaaatcctcagcaaaataacaaagctggaggaattatrttacctgacttcaaattatagttcttggccatagtaagaaaaacagcatggtactggtataaaagtagacatttagattgatggaaaagaatgaagaacctagaaataaagccacttaggtacagccaagtaacttttgacaaagccaaaacaaacatatgtttggggagaggacaccatcttcaataaatattgctgagaaaattggactgccatatgcagttaagtgaagctggacccatatctctcaccatatactataataaactcaagatggattacatattt

SEQ ID NO: 122926 - DNA, 573 bp, Homo sapiens
ccttgtgttagtagtatggtttggctgtgaactcgtttgtagtttgagtttgcaaggcagaataatagggatgaggttagtctgtgggcagttattagggaagttgcactggtaaaacttcagggggtttgaatgagaaaagctaygataacaagtgccatgtggcttatggaaaagtaatgagtgattttagatcagtttggcacagacaaaaggagcttgttatgattatttctcaaaaggatagtaagaaggaggaataagctataaactctgttagggggttaagaattaaggtgatttgtataatcctatagccatctaattttaggagtactgctgtgaggactattgacctggcaattgcggcctctatgtgggcttttgggagtcctaggtggagtccatagagagatatttttagtataaatgctatgatgcatgctaatcataaaaggctattaaaccaggaaattgttagttcttgaagctgggtattggtcttaaggtagactcgaaagtgctgataaatttctcaagcatcagtgtttgaataagcggagtttcaaattt

SEQ ID NO: 122927 - DNA, 609 bp, Homo sapiens
aactgaatcgctgctgcaggctccctgagttgccaagaaaccatgagtctgcttgctttctcagcagggaggctcatggtggggcaagttcacagccctggtcacaggctacctggaaacagactcggtgttgttgggagcaggtggggatcagtgggagtgaaactggcctttaggactgtgagctgtgtgggagcgaggtgaggcctgtgactgatggctttcccctggtggcccccatgattcagcagggacagccataatccccctggtaatataactccattgggctggaaaccacactcccawctcccacagcagccacagcaagtcccaaccaagaggaagctgagctaagaaatgtctaaccatgcccccacctggtggtctttctctacctgccctagtagccgaagacaaaggtcacaatctcatgggagctctatggccctgcccaccacctgaattcttaaccaggtgtttctaaggcaagtttgcatcctctctataggaccacagatgatgtgttcttgaaaccaccacctcctggctggaagccaaccaacacaaaaccagcacactaaacaaaaacacaaccaaggaccctca

SEQ ID NO: 122928 - DNA, 604 bp, Homo sapiens
  misc_feature (1)...(604): n = A,T,C or G
nnnnnnnnnnnnnnnnnnnnnnnnnnnnnnnnnnnnnnnnnncaagctttttccagaattgaaaagagaaggaatggaaaaacaagataagccattaggaaaagcccaatggacaaatgtagacagcgactcttggcaactrtacttgaaatccaagaagcctgtgccattcaaaaggaagggtgtaaagttttttgaggatttgctaaaattatcaaaactacgattccaaaaaggaaaataagaggaccgaaggaagtaagactagaagctggtaaaactttaaagaattataagaatggcaaatatgtggtaattgtgacaaataatttcccccaccctcctcattcaccccttcacctgccatccttggtagacatcaccaatgaatccaaatacaatcgtgcatggcatcatgacattccagtcaacaatggcctgcatatatgacagtggtcccataagattatatataataccttacattttgctgtgcctttgctatgttttatatatgtttagacactcaaatatttacagttgttataattacctacattattcagtacagcaagatgccgtacagttttgtagcctaggagcc

SEQ ID NO: 122929 - DNA, 604 bp, Homo sapiens
  misc_feature (1)...(604): n = A,T,C or G
nnnnnnnnnnnnnnnnnnnnnnnnnnnnnnnnnnnnnnnnnncaagctttttccagaattgaaaagagaaggaatggaaaaacaagataagccattaggaaaagcccaatggacaaatgtagacagcgactcttggcaactgtacttgaaatccaagaagcctgtgccattcaaaaggaagggtgtaaagttttttgaggatttgctaaaattatcaaaactacgattccaaaaaggaaaataagaggaccgaaggaagtaagactagaagctggtaaaactttaaagaattataagaatggcaaatatgtggyaattgtgacaaataatttcccccaccctcctcattcaccccttcacctgccatccttggtagacatcaccaatgaatccaaatacaatcgtgcatggcatcatgacattccagtcaacaatggcctgcatatatgacagtggtcccataagattatatataataccttacattttgctgtgcctttgctatgttttatatatgtttagacactcaaatatttacagttgttataattacctacattattcagtacagcaagatgccgtacagttttgtagcctaggagcc

SEQ ID NO: 122930 - DNA, 516 bp, Homo sapiens
ccaagggccactacaatgtctgacacatactaggcactgagtgaatatttctcagacraataagaaaaattcaaacaaaccagaagggtatatggcagagtaagtgtatgtgttgtttgcatgtctccctgctcaccatcactttttattttccatgtggctacctgccatgccttttttttttttttaagtgactacaaattccataatttatttaattggtccttttttatatgtatttatttaattttaacaaatagagacagggttttgttctcttactcggggtagagtgcagtggtgtgattatagctcaccgcatccttgaactcctggggtcaagcgatctttccaccttagcctcttgagtagctgggactataggcatgcaccaccacatctggctatacatagttatttaatttattttcagtcttatgtaactatagtctagtagctgactcattatatatctttgtgtatatgtgcagtagggtgttaatagaagtggaattc

SEQ ID NO: 122931 - DNA, 517 bp, Homo sapiens
agtcaaggtgcactaatgagcgagtcactgctgtgggcaactggggctcaatcacattggagactctgagcaatattgcagaatgtgcctcagaattggcccagcaaggggcagagaacctggatcctttagccactgaccaaccatccctcataggttgaggttgccctcaccctgggggcggggttgttaaaatctctggcacttccaggttgccctgtgagtggactgcactagctctcatggcaccagaggaagacctcaggctgagaaggatgaagtgaggatccaagatgggcagctgctagcaggccctgggactgtccacccaggcctgagaagaacttggaggtggctgagggcatcagcagtctgctaccgttccccactccaggctccaggacattgcgtcaagtcacttcacaatcttttcttctgggtccagacagcttcagaatcctcactgtggggccctgggtagctacccatcatygggtcaccattcaaaatgaaattc

SEQ ID NO: 122932 - DNA, 550 bp, Homo sapiens
cacccacattttccaattcaacactcttgggaagtgactaaggaagaaagattttttaatgctattatacaccttagagagaatgaacaagacctgcctcatcttcattcatatctctgtttccacaattgagctcccgaactctgccccttaccctctgtgcccctgatgtgaaaaatgttggtgtatgggttgaaggcaagatgagattagtaattcttaggccaaaaagttgaatatgtttgcagaatttgtctaatttatgggctcttgactgggcttatggagtacatggacttctaaaattgtcagtggaatgtatatgcaaggacactcttctggggagaggcctataacttcaataagatttgtaggccaggtacagtagctcatgtctgtaatcccagcactttgggakgccccgaggtgagaggatcacaacaaagcaagaccctgtctcaaaaataaaggggggattgtaaatgtgtcaggacactaaaatgtctagaactactgacccaatgtagcacccatttaaaagactggacag

SEQ ID NO: 122933 - DNA, 440 bp, Homo sapiens
gagttgacagggtcaaaaaaaactacgaagccagggtgctggatggttgtccaaagcaacatcaaagtcatccataatggtgccaaaatacaagctaaataaataatcytttgcattctttctgcatcagcaacaaatgaggaagcagagtgaggtttgcagatatacgtaaaagatcagaaaaaaaggcaagaacaagaaccagttgagagacagacatgagagaaagaaaacaggagggtatgagaggtgagcccatgagaaatcacagcctaagcatagaagaggaggggaacggggggatgatcttgccacctggggagtcaggcagagcagacctccaagctgagacccagcagtgctccacactgtactcagtgggcctggttagtggggggtaaatctcagatctcccaccgcccagccctcacatatattta

SEQ ID NO: 122934 - DNA, 500 bp, Homo sapiens
cactactatagatttaaaacactgcacaagtaggctacaataaatgtatttaaaaatttttcttcaataataatttagccttagcttactgtaatgtttttcctttacatatgctttaattttttaaacttttatactcttttgtaataacacagctgaaaacagaaacattgtagggatgtaaaaagaattctttatacacttattctataagcttttttctatttttaagttttttattgatatgttttattttttaagctttttttttaaaaactaagacacaaacacacattatagcctaggcctactcaggatcaggatcatcmagacatctctgggtgataaaaattttccagctccattataatcttatgggaccactgtagtgtatgtagtctatgattgaccaaaacatcattatgcagcacatggctgtatatgacactctggaaaaggaaaaactgtggagatagtgaaagaatccctggttgccaggt

SEQ ID NO: 122935 - DNA, 500 bp, Homo sapiens
cactactatagatttaaaacactgcacaagtaggctacaataaatgtatttaaaaatttttcttcaataataatttagccttagcttactgtaatgtttttcctttacatatgctttaattttttaaacttttatactcttttgtaataacacagctgaaaacagaaacattgtagggatgtaaaaagaattctttatacacttattctataagcttttttctatttttaagttttttattgatatgttttattttttaagctttttttttaaaaactaagacacaaacacacattatagcctaggcctactcaggatcaggatcatccagacatcwctgggtgataaaaattttccagctccattataatcttatgggaccactgtagtgtatgtagtctatgattgaccaaaacatcattatgcagcacatggctgtatatgacactctggaaaaggaaaaactgtggagatagtgaaagaatccctggttgccaggt

SEQ ID NO: 122936 - DNA, 562 bp, Homo sapiens
ccttctgtgtgttgtaggacagtgttgtttacagatgtccagccattctttgcatgaacatgcccatgttagtattaagcaaagactcagagttctttgggcagcattttttagtgtgggtattgggtaacattctgttctccagagttcttctggaacttctggaaatgtctacctcctcagaaccctccagtccgatctctgtctcctctacccaaggatactgccgtctcgtttttgggattcctctccctgcttcatgttcagaactgtgcttctatgtataaatctgttgtgaacgtaagaatcaccttgttttctttctttctcaaagggatcatacatggtcaaatgatgactgttgtctaatatctgcaaatgttgattcatatattttgtccataggacaagtggagggcaaaatctaaatcgtattgctccatcatagctagccagcagtgactactcaatttttagaattacatgtttaatgaacattttcaaagaagttccatatatctyaaatccaaataaggtctagatttagccatacttgtggtct

SEQ ID NO: 122937 - DNA, 604 bp, Homo sapiens
agaagtagtaaaatgaggtcatgtgacattttagggcagttttctttataacggggtcagtactccctccttcctttaccctgaaatattatactactatggttaagagccacagtatacgttgtgtctttcatcatggcaaatggagcccatttcttctgggctcagtatttttgtggttgctggaggaatataatcagaagaacaaatacacaagcactcacataaacatacacatgagcacaattttagtcctcacataacttctatccaagatgtgacagaatttcttatatctcaaaataactaaaagtctgaatagtttcaacacattctgggtcccttgaaagcaggaaacgttcacttgtatggagctaagacttgacaaaaggacaacttgaaagttttgcatgcaaaacattttgctcagtgatttatttaatgctaagcatttatcttccttgcccattgatgccaaaaatcatgataatgcttaattgagatgytgaattgtttttgtaattaagagacttaaaaccttagcttttgttgtcttcttttataatgtaaagaccttccattttctccatttcggaagcgaatg

SEQ ID NO: 122938 - DNA, 578 bp, Homo sapiens
ggatgttaactcaattctatttgacaaatatccttaagaacttgagctatgtagtgtggcaagctgagaaaaagaaacaacaagggcatgcaaagattaatacttcaatcaatrttcatcaagtgccatattagggaaatgctgtgggaaatcctgtacatgggaccttaggcctctctcatgggccatgtaataatgtctcttcttataggagcaggaggttaacaggcattgctcatgtgccccatcctacagctgaattgcctacctgcagtaagggaaggaaaaggaatgttggcaaagctttttaaagacctttgctgagaaatcatgcttgccagtcagtattccatgcttctaggaatattgggaaaaggctgtccctttgcatcccaaataaggcaatacgaaattgtacctggatgctaccatggacaaccagattctatccaggagaacataaatagaagtgatgagaacaccctctccctgctggaaatacatgtggggtccccctgtggggtttgactgtaggttcagggcaaaatgactctgtcttttctaaggcggctccacca

SEQ ID NO: 122939 - DNA, 487 bp, Homo sapiens
taaacagggttgaggcatgatttgattttaattttataaatattattctgatttctgttaaatatggtaagttgaacacatgcgtttatcatcatttgctttgaaaattccagtaacatgacaagagattaatttaaaaagttgcaaactcaaaagatcaaattaggccaggagatggaacaayaggaaatgagaaatagctacacgtactttgaaggtggaaagcatacagacagtggtaactgacacacagatgagactgcagaagtctaggcattcatgagacacttataagaaacaagggaattggatttttctgttatcacactactaataaagacatacctgagaatggataatttataaaggaaagaggtttaattgactcacagttccacatgcctggggaggcctcacagtcatggcagaaggcgaatgaggagctaagtcacatcttacatggaagcaggcaagagagcttgtgcac

SEQ ID NO: 122940 - DNA, 540 bp, Homo sapiens
agagtacagaggggagaggactttgctgagagacaatagcttgatcactggattggggttttggtattgctcagaatatataatagtaaatatttggggcaatatttccccaaagaggaaccaaaagagcatacaattagatatatctgtatcacaccaattcttaagtatcctgcagctaaatcaacatcttctgctactaaaagtaattcttttcttaaaagcagccacttaacccttcttctgcttgtaaactcactccacattcagggycttatagacggattttcactttgatcaatccacataaaagtcagtaataacgtattgccaaggcactaacttcttaaaatatccaagcaaacgaattacattctctaaacatggctcacgggtgggaacagaataggagcaagtactgtctacttagcagttagacaatattccaacagtgagtaaaacgtgctagtgggaatagacagtgacttggtaaagtggtagatattcaaaactaaaaaatactaggacttggagaccaac

SEQ ID NO: 122941 - DNA, 586 bp, Homo sapiens
ttatccctgtaatgtaggccccaaacttctaaaatatttataatttgtgagggagaaataaatccacaaacatttgaaaatatctaattttaacttaaattgaaaaacagcagtagtgtatttttgttaggcccttatattgggtaatatagtctatgtaagtatgggaaaggctggtgaaaactgtggatttatctacaaaatacattggtacattggggagttttgtgtgggaagtgtcctaacacctcaggaaatgctaaggaagaaatgggtaggrtagactgaacactccacaagggtagggagagcgtcttctcttcattgctctagccccagcacctagaatgtgcctggcactcaatcttttctttccttttttaactgatttcaggttgagtttataggctagctgagtttataggctggtagagtacaaggtctactaatttctctactcatgactactttactttctaatagcactttatgttcttcaagtgctttttttctttgttcttcaatgtataataaggtgagaacagttttatctccatcttgcagggagaagagttagttaagagac

SEQ ID NO: 122942 - DNA, 579 bp, Homo sapiens
atctacctgctttttgttgtcttctagcgcgagaaatctgcgatctaccagttggaggaggagtatgaaaacctgctggtaagctgatttatttctcaagtgcatcgactttctgttgtttccaattcaattcagttcaagaaatatcaagcacatcctggcggggaggcacctgttcatcgatgctaatgttgttgstgctgctgagtttcctttagaagtgaattttaaaagttgttttcttttctttttttcttttaagtagagacagggtttcaccatgttcaccatgttaaccagggtggtctcaaactcctgacctcaagtgatccgcccgccttggccttccaaagtgctgggattacaggcgtgagccactgcgcccggcctaaaagttgttttcagaagtcagtccctactgctgttctgttttcaagttgtgtcacataaatggcacttgttaagtacttgcagttgaagcaagaaaacgttgccacttgtgaattgtggtcttttttacgaagtgtaagcaaaaataaaagttatttttctcaagatagaggtctaccagatcgtcat

SEQ ID NO: 122943 - DNA, 579 bp, Homo sapiens
atctacctgctttttgttgtcttctagcgcgagaaatctgcgatctaccagttggaggaggagtatgaaaacctgctggtaagctgatttatttctcaagtgcatcgactttctgttgtttccaattcaattcagttcaagaaatatcaagcacatcctggcggggaggcacctgttcatcgatgctaatgttgttgctgctgctgagtttcctttagaagtgaattttaaaagttgttttcttttctttttttcttttaagtagagacagggtttcaccatgttcaccatgttaaccagggtggtctcaaactcctgacctcaagtgatccgcccgccttggccttccaaagtgctgggattacaggcgtgagccactgcgcccggcctaaaagttgttttcagaagtcagtccctactgctgttctgttttcaagttgtgtcacataaatggcacttgttaagtacttgcagttgaagcaagaaaacgttgccacttgtgaattgtggtcttttttaygaagtgtaagcaaaaataaaagttatttttctcaagatagaggtctaccagatcgtcat

SEQ ID NO: 122944 - DNA, 633 bp, Homo sapiens
tgcttcccagaacaaactcaagaatatttataggaaaacaaagatattcagtatccacaaaggtaaaattcacagccaatggaatgtgcaatctgaattcaatttaaaaaataccaggcatgaaaggaaataggaaaatgacctaygttgaagataaaaatcaatcaacaccaactcaaaatttatgtaaatgttagaatgatcagataagaacattaaaacagctattatattaataactgaattccgtatgttcaaaagccccagggttcattcagcagttcatggctgtcatcaagagttgaggctcttttcatccttctggtctgccatacttatatattgattatcaccttcaggctattttttatgatgctaaattgactgctgcagttttaatcccagtgaattgcacaaataacatccacagcaataagaaaggcagaaaaaagcttcttctaatgcgtcttccaactttgccagaaagtaaattctttccccaaatccctaagtaaatctcctcttacatatcattgacccaaactgggtcagaagcctaaacctaagtcagtcactggaaaggagagtgggatggtgggatggctgtgaatgacttacatcaatcgccattca

SEQ ID NO: 122945 - DNA, 633 bp, Homo sapiens
tgcttcccagaacaaactcaagaatatttataggaaaacaaagatattcagtatccacaaaggtaaaattcacagccaatggaatgtgcaatctgaattcaatttaaaaaataccaggcatgaaaggaaataggaaaatgacctacgttgaagataaaaatcaatcaacaccaactcaaaatttatgtaaatgttagaatgatcagataagaacattaaaacagctattatattaataactgaattccgtatgttcaaaagccccaggrttcattcagcagttcatggctgtcatcaagagttgaggctcttttcatccttctggtctgccatacttatatattgattatcaccttcaggctattttttatgatgctaaattgactgctgcagttttaatcccagtgaattgcacaaataacatccacagcaataagaaaggcagaaaaaagcttcttctaatgcgtcttccaactttgccagaaagtaaattctttccccaaatccctaagtaaatctcctcttacatatcattgacccaaactgggtcagaagcctaaacctaagtcagtcactggaaaggagagtgggatggtgggatggctgtgaatgacttacatcaatcgccattca

SEQ ID NO: 122946 - DNA, 563 bp, Homo sapiens
gcttttatgaaaagataaccatggcttcatggttccttctagacttcactactctacctcatgcctcagttcctttgtgttgtctcttgtctcactctattaatattgtgttattggtatctttaaaagaaatttcattccatgagtgttagagatagtggtctccataaagacaaccaggagcaaccaggaccaagtcaagyagtgaaggggcaagaatgtaccttttcacaaggttaggtactcttaggtccgctaagtactgacatcggtctctgtgtctcttaggtcaaatcatcaagagtaaaaatcatataaaataactgattattttttattactggttaggtaatataatggtgcaggcactgaaaggtgctcaacaaataattgtaaatgagtgaataataatcaaaaattataaaaatgaccatcaaatgtcataatcctcctacttgccaatagaaaatgctgctttggaaaggtattttaaagcctactgttctacatcaaacaataagttactgtttgggatctgagccccatgaagaaaagtgtcttct

SEQ ID NO: 122947 - DNA, 553 bp, Homo sapiens
gactcctggccacagaaactctgagataataaatgtgtattgttttaagccactaagttggtggttatttgttacacagcaatgcacaactaacacactgctatttcctcaattccttgaacagtgcctggctcatagtaggtaggtaataaatacaagttgcacaaatcaataaatgaaattaagtcctgtcactgatatagagttactgaaggtcagtaaactattcatcacggtgctgcaatgtgcaactagatgaataaagccaatttttacaacaagccttctaacaaattcaatttcctaaaaacaaacatgaagtaaataaatacaatttcccacaatgaacatgttaagcaagcttttcagtcatcatatcagcctgaaggttgactyatattttctaggagagaacaataaactttatagtttaaaacaaaattgaactggagaccccttttacccttcttggcaaagaaactgaccaggaattcaatttcatggtgacaacattcagaatatgcattgctctaacctaaatagtcctttaacc

SEQ ID NO: 122948 - DNA, 420 bp, Homo sapiens
gaattctttctagcgtgacattcaagaaccccttcttggggtctgggtctggacccctttccagtaacacattcatcaccatttgcyatttttacagcatgaccctgtggctgaaccaggtcaagagtaaggaagctgtcctatccccagccatccccaagttctgtctaactgaatggatatgcccccatccccctccgtctgttgtctgattgatctgtcatgtaacatcctctcctgcccttcctgggaaacgtttacagcaatttagtacagtctctgtgttctgcatttttcaagaccctctgcaaattgccaacacttaccatttccatcttcccttccctttttctccacacatgccctgtaattcagctcgagagtaacgcttgctctttcccgaacacacactgagcttcc

SEQ ID NO: 122949 - DNA, 518 bp, Homo sapiens
tatctagcatttcagaattgtcatcttggtttagatctattgatggggaacacttattatactgcagagtttgtatgagttcatttctcagaccacctatactgtaatcatctttgtcattataacatataatatagattctttgtccagacaccaagcatgcccaatcaaaatctcagagaggagaggactgaaactgctctttttaacaagctgtccaaatgatatgatgcatgtatacctaattttgagaaccataacaatagagggtagttaagtcttgaaaattagccttttgttaagctctactttttcccttcatgctattacttaagttttgcctaactttagagagttcttaacttagaagggctaccagtcggttcatcattagtatagttgtcaaaggaagctttttgacagccccttactagatcaacyacaggtttgaagaatacctcatacccatactgcttctaccaaaaaacacaccacttccccaccaaccatagcctctg

SEQ ID NO: 122950 - DNA, 587 bp, Homo sapiens
tgggaatctctacctaatggtatggaatctccttttcctttaacataagtaatttttgatacattaaggaattcmaaaaatgaccttcctctaacaataagttatataattggattacaacagttttgccagccaggcacagtagctcatgcctataatcccagcactttgggaggctgaagtgagaggatcacttgaagccaagagttcaagaccaccctgggcaacatagcacaacactgtccctacaaaaaattaaaaagttagctgggtgcagtggagcgtgcctgtagtcccagctacttgggaggctgagataggaggatcactcgagcccaggagttcgaggctgcagtgagctatgatcgtgtcattgcactccgggctgggcaatggtgtgagaccctatctctaaaaacaaacaaacaaacaaacagttgtgccaaacagaaaaatattgtttaagaactttaaatatacaagacacagtatctcttaaaaatctctaatagagttgtgtttttccatcatataattcttataacatttgcttatcaaaacacatattggccattaatatatagcaa

SEQ ID NO: 122951 - DNA, 587 bp, Homo sapiens
tgggaatctctacctaatggtatggaatctccttttcctttaacataagtaatttttgatacattaaggaattcaaaaaatgaccttcctctaacaataagttatataattggattacaacagttttgccagccaggcacagtagctcatgcctataatcccagcactttgggaggctgaagtgagaggatcacttgaagccaagagttcaagaccaccctgggcaacatagcacaacactgtccctacaaaaaattaaaaagttagctgggtgcagtggagcgtgcctgtagtcccagctacttgggaggctgagataggaggatcactcgagcccaggagttcgaggctgcagtgagctatgatcgtgtcattgcactcygggctgggcaatggtgtgagaccctatctctaaaaacaaacaaacaaacaaacagttgtgccaaacagaaaaatattgtttaagaactttaaatatacaagacacagtatctcttaaaaatctctaatagagttgtgtttttccatcatataattcttataacatttgcttatcaaaacacatattggccattaatatatagcaa

SEQ ID NO: 122952 - DNA, 631 bp, Homo sapiens
gctaataaatgaagcatcttgtcaaactaaaggatactatctatattatcttacttccagctccagtaaccatatttcttataacaaagagcatatacttgcataagaccaataagatagtctaataatcaaccagagaagtttctttaccctaggggagaagaggagagttttggtttttttgtttttgttttttagcrcaggtccaattgtgatggagagctcatacccctgagctcacatacctggggctagactaagccagatgacttttgagctttagaattccatgctttgagtagctctgcatctcccattggggtaagaaaaacccaatattattagtctagatcatactcaagaggcatctgaagcccagaagttcaattactttctaaacatcatattataagtcagagttttcgatggcaaaactcagtgattgggatctaaggtatacatgggttctcttcttaaaagggaagtggcaatttactcccacctggtgaaagacaaggtctatatccatggaacagaagagaacaaagtcatctggctagggaaggaaccagatccaagttcttctgatggcttcttgctctacacattgactgctcttgttctcatacca

SEQ ID NO: 122953 - DNA, 631 bp, Homo sapiens
gctaataaatgaagcatcttgtcaaactaaaggatactatctatattatcttacttccagctccagtaaccatatttcttataacaaagagcatatacttgcataagaccaataagatagtctaataatcaaccagagaagtttctttaccctaggggagaagaggagagttttggtttttttgtttttgttttttagcgcaggtccaattgtgatggagagctcatacccctgagctcacatacctggggctagactaagccagatgacttttgagctttagaattccatgcyttgagtagctctgcatctcccattggggtaagaaaaacccaatattattagtctagatcatactcaagaggcatctgaagcccagaagttcaattactttctaaacatcatattataagtcagagttttcgatggcaaaactcagtgattgggatctaaggtatacatgggttctcttcttaaaagggaagtggcaatttactcccacctggtgaaagacaaggtctatatccatggaacagaagagaacaaagtcatctggctagggaaggaaccagatccaagttcttctgatggcttcttgctctacacattgactgctcttgttctcatacca

SEQ ID NO: 122954 - DNA, 506 bp, Homo sapiens
ttgaaatattaatattagaaaaggaaaaagatgtttgaatggcctaagtttttaagatgctagctaaagaaaaaattaaacccaaaatacatagaagaaaaataaaaaaaagaatgaaaatgaaagataaacaataaaaaagtcaataaaaacaaaagttggtactttggaatagttaataaatctcttaaaattaatagaaaagaaacaaaacaaatatcaggaatgaaagggggcatcagtatagattcctatgcacattaaaaagattaagaggacattatgaaaaactttatgtcaataaattttaaaaagtagatgatattaccaaaaatttcctgaaaaatgcgacttattgaaagaatacaaaaagaaatataaatatctgagtagttctatatctattamataaattgaatttgtaattagaaacctttcaaccaagaaaaattcaatccagatcatttcactagtgatttctatcaaacatttaaggaagaaacaat

SEQ ID NO: 122955 - DNA, 691 bp, Homo sapiens
atgtaaattagtacagccattatggaaaagagtatggaggttcctcaaacaattaaaaatagaactaccacatgaaccagcaatcccttcactgagtatatgcctaaaagaaatgatatcagtatctcaaagagatatctgcaccctcatgaacattgyagcattattcacaataattaagatatggaaacaaccaaaacattcattgatggataatgagagaagaaaatgtgatacatgtatatatcatagtacatatacaatggaatactgttcagccttaaaaaaggaaaatgctgcaatttgtgacaacgtgcgtgaacctgaagaacattgtgctaagtgaaataagccagacatagaaagacaaatactgcatgacctcacttatatgtggaatcttaaaaagaaggacacatagaaacagagtagaacggtgctttccagggatggggaggggaaggaaatgggaagctataggtcaaagggtacaaacttgcagttatgtagggtaagtctagagatctaatgtacaatacgaggactacagttaataatattgtattatatattgaaagcttgctaagagagattttatgtgcttttaccacacaaacacacgcacaaccatacacacacatacgcacacacagttaattatggaagatgacggatatgttaaattgcttag

SEQ ID NO: 122956 - DNA, 599 bp, Homo sapiens
tctcatgttaacatgtgatccctagtgttggaggtggggcctagtgggaggtattgkatcatggaggtggatccctcacgaatggcttagagccatttccttggtgatgagtgagttcttgctctgttagttcatgcgatatctggtggtttaagagtctgggaccgctactctctcttgttccctctctcttgctcccactcttgccatgtgatatactggctccccgtttgctttctaccacaagtgtaagcttcctaagacctcactaggagcagaggccagcatcatgcttcctgtacagtctgtagaactgtgacccaaaataagcctcttttattgataaattacccagtctcaggtattcctttatagcaatgtaaatggactaacaccgttagtgataacatatagttcacaaatagactaatggatgtagatagctatgctatatttaccagtagaatctatattattttaagtaaataaatagattacctgggctaacattcttacttcattaacgaaaataaacaaattggtcttctcagtgtctgttatctgtactggtttcctttcttcaaagggatatcatgaag

SEQ ID NO: 122957 - DNA, 599 bp, Homo sapiens
tctcatgttaacatgtgatccctagtgttggaggtggggcctagtgggaggtattggatcatggaggtggatccctcacgaatggcttagagccatttccttggtgatgagtgagttcttgctctgttagttcatgcgatatctggtggtttaagagtctgggaccgctactctctcttgttccctctctcttgctcccactcttgccatgtgatatactggctccccgtttgctttctaccacaagtgtaagcttcctragacctcactaggagcagaggccagcatcatgcttcctgtacagtctgtagaactgtgacccaaaataagcctcttttattgataaattacccagtctcaggtattcctttatagcaatgtaaatggactaacaccgttagtgataacatatagttcacaaatagactaatggatgtagatagctatgctatatttaccagtagaatctatattattttaagtaaataaatagattacctgggctaacattcttacttcattaacgaaaataaacaaattggtcttctcagtgtctgttatctgtactggtttcctttcttcaaagggatatcatgaag

SEQ ID NO: 122958 - DNA, 599 bp, Homo sapiens
tctcatgttaacatgtgatccctagtgttggaggtggggcctagtgggaggtattggatcatggaggtggatccctcacgaatggcttagagccatttccttggtgatgagtgagttcttgctctgttagttcatgcgatatctggtggtttaagagtctgggaccgctactctctcttgttccctctctcttgctcccactcttgccatgtgatatactggctccccgtttgctttctaccacaagtgtaagcttcctaagacctcactaggagcagaggccagcatcatgcttcctgtacagtctgtagaactgtgacccaaaataagcctcttttattgataaattacccagtctcaggtattcctttatagcaatgtaaatggactaacaccgttagtgataacatatagttcacaaatagactaatggatrtagatagctatgctatatttaccagtagaatctatattattttaagtaaataaatagattacctgggctaacattcttacttcattaacgaaaataaacaaattggtcttctcagtgtctgttatctgtactggtttcctttcttcaaagggatatcatgaag

SEQ ID NO: 122959 - DNA, 613 bp, Homo sapiens
ttgctgcaactcaaatattcctatcacatatagaaaacaattggtcatattgattttcctagaagaaaaaaaaagtttccaatttcatcagttatatcacatgaattataatgaaaaataaattattggttttctttaagaaaagcaagcatttaaaattaacattgcatatattccttctttgtattcattttccatgattggaagttttgttattacatttttttaaagttaatgtattgtatcctacaagatcaatgaaactattttattgataatgtagttagaggtgtaaaaattattgtctgtgtatttacttggcaatatagcatgtkagatggtactgaacaaggatggaaaacctctctgtgaaactgggatattcaaccaactttgatatcttttatttttgaagttctcaatttcctctttaaaatgcaagggttcaaataattttttctatggttctttctagctcttacagtctacatgtatgtaaggaataatatatatttatttaaattgtgcatatttatccaaatgtgatgctgcaaaatagcatacatagagatttcagagtgggaaaaaggaagaccaaagacactaagcatcc

SEQ ID NO: 122960 - DNA, 560 bp, Homo sapiens
cgctgtgatttctcaatatgattaaggtagtctaattcaaattcattcagcttatctgaggtattgcaaaagtgctgttgcagtcactggtgacagtattcccaaagagaggcaattagacttcactagatttaaagtttaggtctcattatatatgatattttcagctggtacacatattgtagttttcatgaaagagctgcataaaacaagggttcctgtttgagctccactgatcctttaagaatgctgactgccaaactgccaattgtgttctcaaagaatagacatatcagccactgagtcaaacagctacgaagctctcacctgtcaacagtgggtaatcaagaaacaactgaaagatataccttcagaatgccagaataaagtkttaggaaacatcggattgctataaaactttccctcctgtagtcaccaggcataccatgggttaaagcaagcatgctccaaagccacatctttctccacatctttcttgaacagcaacaacaaaaagttaaaaaaaaaaaaactgcagattaaacccagctatagttcca

SEQ ID NO: 122961 - DNA, 632 bp, Homo sapiens
acactcatagatggatataatatttaaggaaaacagggagattaggtgtgaaggaaaggtactggtggtacctgacttcaaataccgaaaggtttggtcttcctgacttacctcctcccagtgctactccataggcagtggatattgaaggaattgtgcctttaacactaaggagtctctgaagggactattctttgtaaactaatgccagggccaatatctgcaaaaacttggggcagtaaaatatgaggctctgaatacacagccctcaagtgtgtggtgtggacatcacaagcgtcctcttcagtggtgcttatatatgataattcagaatttgcacaaagcttttgagaggtgcttttctattaaaggctgagaaagcctgttttattttttaagacctctcaccacatggtgtaatttccaaaagcttraactttctaaaggaataaacaaacctgattacttacctatgtcagaatgtttggaatttgtgcctcttaaaagtaatagcaataaaggtgaatccagattttacagaaaggactgatgtactgagagaagcttataactctgaaagcaccaactgtgacctactgggaagggtagactcaacctgaaccatcatataa

SEQ ID NO: 122962 - DNA, 569 bp, Homo sapiens
acaggcgacctagatctctcacatgagcagttcacaatagggttcatgctcctgtgagaattgaatgccgctgctgatctgaaaggaggcggagctcaggcagtaaggcttgctcgcccactactcacctcctgctgagaggccccattcctaacaggtcacagaacagaccagtaccagtctgctgccyaggggttggggacacctgatataagaggctttgaaatactgtgcatgcttcctaatacattactctatgtattagacatacagacatagaaacagtgacaggaaacattgaactccataaggccacgattattagaaaatgaaacaaagccatattttctcaatatgtatgactaagaactcatgtacctgcatagtaaagtatagaatttttggaaaatcattaactcttccaggcttaggggctatatagggaaatacaataaaatgagtgttttaaagctgtgcaatcattacaatgataatcgggccagtatatctagctctactgtaggactcacaatttatattatctaataagtgtcattcctggaggaaac

SEQ ID NO: 122963 - DNA, 495 bp, Homo sapiens
tgttcatgtgtacccaatgtttagcttccatttataagtgagaacatacggtatttggttttctgtttctgcattaattcacttaggataatggtctccatctgcattcatgttgctgcaaagaacataatatatatattttttaatggctgtgtgggattccatggtatatatgcactacattttctttatccaatccaccactgatggacacctaggttgattccatgtctttgctattgtgaatagtgctgtgatgaacatatgcctgcatgtgtcttcttggtagaatgatttattttcctgtgggtatatacccagtgatgggcttgttgggtcaaatggtatagtgcaattttcagttctttgagaaatctccaaactgctttccacagtggctgaactaatttayattcccaccaacagtgtgtaagtgttcccttttctccacagccttgccaacatttcttactttttgactttttaataatagcc

SEQ ID NO: 122964 - DNA, 598 bp, Homo sapiens
tgggggggtgcattctgtggatctctgtgggtgcagtgtgggaaggcccaggttgcctgcctctgctggcctcaagaccccccctttacctaagatcttgaaagcagaggtgaaaagtccacccaaatcccaccatccctgactagagagtggaggcccaatttggggggtaccctgtgccctcagctttagagtgtaaaatcaagaggagtcagagaaatgagaatctgaaaaacaaaaacaaaaatgaagggaggaatacagatggagaaatgggtccaccaaaatgtgatgaggctacctccagagaaaattaccaagaccattctgttagtattttccagctccacaggcctctggaagttcccagacaccctcctctttgcaastaagacagtgatgctcttaccagcaccaaggcaagggggtcttaaactcagccaagtggggcagggccagcccttcaggagggccaaccctgcagcctctgcccatttgggaaagaccgtgagttggatttatggtctggtgtggccttgtcccactgaccagccctagtgatgcaaggcatgtgaaccccaaacttggggcttagcct

SEQ ID NO: 122965 - DNA, 598 bp, Homo sapiens
tgggggggtgcattctgtggatctctgtgggtgcagtgtgggaaggcccaggttgcctgcctctgctggcctcaagaccccccctttacctaagatcttgaaagcagaggtgaaaagtccacccaaatcccaccatccctgactagagagtggaggcccaatttggggggtaccctgtgccctcagctttagagtgtaaaatcaagaggagtcagagaaatgagaatctgaaaaacaaaaacaaaaatgaagggaggaatacagatggagaaatgggtccaccaaaatgtgatgaggctacctccagagaaaattaccaagaccattctgttagtattttccagctccacaggcctctggaagttcccagacaccctcctctttgcaagtaagacagtgatgctcttaccagcaccaaggcaagggggtcttaaacycagccaagtggggcagggccagcccttcaggagggccaaccctgcagcctctgcccatttgggaaagaccgtgagttggatttatggtctggtgtggccttgtcccactgaccagccctagtgatgcaaggcatgtgaaccccaaacttggggcttagcct

SEQ ID NO: 122966 - DNA, 549 bp, Homo sapiens
tgagtaaaatacagccaagtaaaaagtgaggtagaggaagtgggatttacttaagctataaggcaagttcctgttagaaactaaaaaatgcaatgtgtcagataaggtagaagttctttctgtctcccataatggtctagaggaggataggggttcaagaccagtggcggcctggctccaggaaggcagaccaaaataacagtggatracccaagacagagatgtacttctcttttccacgtagaggtccagaggtagagagggcaggtttggtgcagaaactgctccatgaagttctcaggaaccgtatctaccagggctcaaccagggaagtagaaccactgcaaatatcatggaatgaatgattattataggaatgagattttacacaattgttggaggagacggagaagtagaggtcacaaagggagttgtaggatggtgggaaaatcacttatcggcccttggaaagcactggttgggggtggaggggagacaagctggagcttgctggaaaatgaggaagataagtttatcttgcttcctgca

SEQ ID NO: 122967 - DNA, 618 bp, Homo sapiens
agccaagagaatgacacatccagagtaatatgagctcagaaagaaaaataatacatccaaataatgtaatccttttaaaagaggaccccgaaaatgaagaacctatatgagaggaagcggaattaatggaccagtgagaacaagaatttaaaataatccttataggctgagcacggtggctcacgcctgtaatcccagcactttgggctaccaaggcgggcagattgcctgagctaaggagtttgagacctgcctgggcaacatggtgaaaacctgtcactacaaaaaaattttaaaaaaattagccgggtgtggtggcacacccctgtagtcctagccacctggggctgaggtgggaggatcacttgagcctgggaagttgaggctgcagtaagctgagattgcaccactgcaatccagcctgagtgacagaccaagcccccatctctgaaaaataaataagtaaataaaataaaataatcaaaataaaaktcttctaggaaataatggagaatgttacacattttaaaaaaattattatctaattttttttatacagaaagggtttctctctgtcatacaggcaggaatgcagtggcacagtcatagctcactgaa

SEQ ID NO: 122968 - DNA, 571 bp, Homo sapiens
ccaatctgacttgttttcaacataatgatgaatattgatttggtcccttcatccaacattctcagctggatctttttttgaccaaggatatacattactaggcgagtacaggcagttaattcttccacacgggacttkggagtttctgagttgaccagaatcacccaccttaacatctgccagtttataccccaagtcctgaccagtgccccctacctgctatgcctcatgttttcaatatagcataaaatctgaaatgaaagatgaaacatcatagccaatatcacagaaatacaaaggatcctaagaaactcctaggtataattacacactaaccaattggatcatctagaagaaatggataaattcccagacacgtaaaacctaccaagattgactcatgaagaaattaaaaaatctgaacagactaatagcaagcaaggaggttgaatcagtaagaaaatgtctcccatcaattaaaaacccaaaaccagatggcttcccagattaattctaccaaatattttaagaagaactaataccagtccttctcaaactcttccaaaaagct

SEQ ID NO: 122969 - DNA, 571 bp, Homo sapiens
ccaatctgacttgttttcaacataatgatgaatattgatttggtcccttcatccaacattctcagctggatctttttttgaccaaggatatacattactaggcgagtacaggcagttaattcttccacacgggactttggagtttctgagttgaccagaatcacccaccttaacatctgccagtttataccccaagtcctgaccagtgccccctacctgctatgcctcatgttttcaatatagcataaaatctgaaatgaaagatgaaacatcatagccaatatcacagaaatacaaaggatcctaagaaactcctaggtataattacacactaaccaattggatcatmtagaagaaatggataaattcccagacacgtaaaacctaccaagattgactcatgaagaaattaaaaaatctgaacagactaatagcaagcaaggaggttgaatcagtaagaaaatgtctcccatcaattaaaaacccaaaaccagatggcttcccagattaattctaccaaatattttaagaagaactaataccagtccttctcaaactcttccaaaaagct

SEQ ID NO: 122970 - DNA, 567 bp, Homo sapiens
tattttaagtttaccctaaaggtttcccagtacataaaaaactatatttcaacttgatatgtaaaacttgatatgtaacctactcttgtaacaagtagtgagtctcagccaatcacagcagctgaacttcagccaaccacaggcagccaactcttcaaaccaggttcaaataaggcaaatgctcagctgtaaccaamcctactctggttctgggggctgcctaattcacagatcattctttactcaattaaactctaaagttttcctttcaacatgtataattttcacatcacgaaataataatcttctttaatttttttccaatgtattaaaaatgtaaaaaccatttgcaggctacacaataaatggtagcaggctatggattcccaactcctgatctaagctaatataatatactgttttcttaagcagagttaatgaaattttgcaaaattggatcctccttgctcttttaaactcagtttttaaatcactcaccattaaaacaatcctggaccctcaaagggttaggtaccactgtgccaattaccacagtgctaatattca

SEQ ID NO: 122971 - DNA, 585 bp, Homo sapiens
agctgaattagcaagaaactccttggatggggttaatggcagctgtatttttctgggagctctgctttaattggataaagtaagttctggtaagatttcttcatcttcagtatctcaaatgttttcatttaaataatctttataacaacttttgatgtctgagtggattcccacacagtcatctattgtaagactttctgattccttttttttcctttggtcattatgaatagggcttctgtaaataactgcatggtagcttttgatgggaaataacatcaaagtagttgtcaaaatacttaggaatgttatttttggattgtaaggtgagacttgtttagctttggaaaaaaatgcmcaacttgtaataggggaggaaaaataattttctgtttttggaattcttagatggaacgctctgtaaaaactgacagattaaaatgagaaaaacagaaaagtttaaaaacatgtatatcttatggttacatgggagatactcagggaaaaatgagtaaatctccaacaggtggctttcaattcaagcataaatactatcttcaacttaaagaaagaagatttgaggtg

SEQ ID NO: 122972 - DNA, 518 bp, Homo sapiens
tttcattttcatttatcaatgctaatgcgaaagagtacgctgtcttcatggcagctgaattagcaagaaactccttggatggggttaatggcagctgtatttttctgggagctctgctttaattggataaagtaagttctggtaagatttcttcatcttcagtatctcaaatgttttcatttaaataatctttataacaacttttgatgtctgagtggattcccacacagtcatctattgtaagactttctgattccttttttttcctttggtcattatgaatagggcttctgtaaataactgcatggtagcttttgatgggaaataacatcaaagtagttgtcaaaatacttaggaatgttatttttggattgtaaggtgagacttgtttagctttggaaaaaaatgcacaacttgtaataggggaggaaaaataattttctgtttttggaattcttagatggaacgctctgtaaaaastgacagattaaaatgagaaaaacagaaaagtttaaaaa

SEQ ID NO: 122973 - DNA, 585 bp, Homo sapiens
agctgaattagcaagaaactccttggatggggttaatggcagctgtatttttctgggagctctgctttaattggataaagtaagttctggtaagatttcttcatcttcagtatctcaaatgttttcatttaaataatctttataacaacttttgatgtctgagtggattcccacacagtcatctattgtaagactttctgattccttttttttcctttggtcattatgaatagggcttctgtaaataactgcatggtagcttttgatgggaaataacatcaaagtagttgtcaaaatacttaggaatgttatttttggattgtaaggtgagacttgtttagctttggaaaaaaatgcacaacttgtaataggggaggaaaaataattttctgtttttggaattcttagatggaacgctctgtaaaaactgacagattaaaatgagaaaaacagaaaagtttaaaaacatgtatatcttatggttacatgggakatactcagggaaaaatgagtaaatctccaacaggtggctttcaattcaagcataaatactatcttcaacttaaagaaagaagatttgaggtg

SEQ ID NO: 122974 - DNA, 543 bp, Homo sapiens
tagctgggcatggtggaacacgcctgtaatcctagcactttgggaggccacagagggcagatcaccaggtcaggagtttgagaccagcctgaccaacaaggtgaaaccccatctctactaaaaatacaaaaattagccaggcgtggtggcgcatgcctgtaatcccagctactcagaaggctgagacagaagaatcacttgaacccaggaggtggaggttgcagtgagccgagatcgtgccactgcactccatcctgggtgacagaatgagactccgtctcaaaaaaaaaaaaaaaagagagagaaaagaattccaacccagaatyctcaacttcactgtgtcagaggatatgaagtaaacaaatattcatctctacatttgccagtccctgtggacttaggccagatagtataaataatagtcacaaaaggagtatgaatgggataagaagccacttctagtctgagacaattaagagtagtagtgccttctctgcactctcacccctcattctgacagctgaagtgaaggactcccaactt

SEQ ID NO: 122975 - DNA, 262 bp, Homo sapiens
agaattccaacccagaattctcaacttcactgtgtcagaggatatgaagtaaacaaatattcatctctacatttgccagtccctgtggacttagrccagatagtataaataatagtcacaaaaggagtatgaatgggataagaagccacttctagtctgagacaattaagagtagtagtgccttctctgcactctcacccctcattctgacagctgaagtgaaggactcccaacttctggaactgcccaatgaaagtagcct

SEQ ID NO: 122976 - DNA, 543 bp, Homo sapiens
tagctgggcatggtggaacacgcctgtaatcctagcactttgggaggccacagagggcagatcaccaggtcaggagtttgagaccagcctgaccaacaaggtgaaaccccatctctactaaaaatacaaaaattagccaggcgtggtggcgcatgcctgtaatcccagctactcagaaggctgagacagaagaatcacttgaacccaggaggtggaggttgcagtgagccgagatcgtgccactgcactccatcctgggtgacagaatgagactccgtctcaaaaaaaaaaaaaaaagagagagaaaagaattccaacccagaattctcaacttcactgtgtcagaggatatgaagtaaacaaatattcatctctacatttgccagtccctgtggacttaggccagatagtataaataatagtcacaaaaggagtatgaatgggataagaagccacttctagtctgagacaattaagagtagtartgccttctctgcactctcacccctcattctgacagctgaagtgaaggactcccaactt

SEQ ID NO: 122977 - DNA, 528 bp, Homo sapiens
gaagcagttgtgatgtgattcaatagggaataggtggggccttggcaaaccaaagaacatattctgtctaaagtggatggccacaacttgctccagctgtggaaacttgggccatgtactgctagatctaaggattttcttttgagagatgctagatatatacgttttttaaaaataaaattatcctgattttaacaacattgycttattatataaaacataccttggagggtgtgggtaagacacaatgtccttgaaattatatttcactgggttaatgaaattggctccggaagaaaataattttaaacagcaaaccaaaaagtgaaggccttcaaaactaacaaaccaaaggaaaacaaaacaaaatgacaacaagaaaaaaacaaagaaacaaaacccctggaccttaccatttttctaaggcatgttgacatgataaaatcaaaattgctttgtgcttataaggatcaaaggtatgcttatgactttataaattcagagaaaattaattggaattatttttat

SEQ ID NO: 122978 - DNA, 528 bp, Homo sapiens
gaagcagttgtgatgtgattcaatagggaataggtggggccttggcaaaccaaagaacatattctgtctaaagtggatggccacaacttgctccagctgtggaaacttgggccatgtactgctagatctaaggattttcttttgagagatgctagatatatacgttttttaaaaataaaattatcctgattttaacaacattgcsttattatataaaacataccttggagggtgtgggtaagacacaatgtccttgaaattatatttcactgggttaatgaaattggctccggaagaaaataattttaaacagcaaaccaaaaagtgaaggccttcaaaactaacaaaccaaaggaaaacaaaacaaaatgacaacaagaaaaaaacaaagaaacaaaacccctggaccttaccatttttctaaggcatgttgacatgataaaatcaaaattgctttgtgcttataaggatcaaaggtatgcttatgactttataaattcagagaaaattaattggaattatttttat

SEQ ID NO: 122979 - DNA, 528 bp, Homo sapiens
gaagcagttgtgatgtgattcaatagggaataggtggggccttggcaaaccaaagaacatattctgtctaaagtggatggccacaacttgctccagctgtggaaacttgggccatgtactgctagatctaaggattttcttttgagagatgctagatatatacgttttttaaaaataaaattatcctgattttaacaacattgccttattatataaaacataccttggagggtgtgggtaagacacaatgtccttgaaattatatttcactgggttaatgaaattggctccggaagaaamtaattttaaacagcaaaccaaaaagtgaaggccttcaaaactaacaaaccaaaggaaaacaaaacaaaatgacaacaagaaaaaaacaaagaaacaaaacccctggaccttaccatttttctaaggcatgttgacatgataaaatcaaaattgctttgtgcttataaggatcaaaggtatgcttatgactttataaattcagagaaaattaattggaattatttttat

SEQ ID NO: 122980 - DNA, 528 bp, Homo sapiens
gaagcagttgtgatgtgattcaatagggaataggtggggccttggcaaaccaaagaacatattctgtctaaagtggatggccacaacttgctccagctgtggaaacttgggccatgtactgctagatctaaggattttcttttgagagatgctagatatatacgttttttaaaaataaaattatcctgattttaacaacattgccttattatataaaacataccttggagggtgtgggtaagacacaatgtccttgaaattatatttcactgggttaatgaaattggctccggaagaaaataattttaaacagcaaaccaaaragtgaaggccttcaaaactaacaaaccaaaggaaaacaaaacaaaatgacaacaagaaaaaaacaaagaaacaaaacccctggaccttaccatttttctaaggcatgttgacatgataaaatcaaaattgctttgtgcttataaggatcaaaggtatgcttatgactttataaattcagagaaaattaattggaattatttttat

SEQ ID NO: 122981 - DNA, 462 bp, Homo sapiens
ttaaaaaatgaatatttcagatcaatgggtgacaatcccattagcatgataccccatgatatcaattaccacttcagtttcaatttggctggctggccacagggtaccatttctcagctttacttgtgatgggctggctctgtgaagcatgacattcttaaattgctgcccattatccaagtgtcattacttgtactgcctcagaattctctgaatcacaagcagctactgaggtcaagctttgcaaccagaggaattggacaagttggaaaattctttatatcaargcaaagttatttatctggcatccgacttagaaaatctaaagtttccattatcctgacagtgtgtcagttttgtgtaggtatattgatttaataatttaagaggttttatcaaggtagcaggaggttaaacgtttactgtgtttgcattattcagaatgttgctttgtttttttgg

SEQ ID NO: 122982 - DNA, 462 bp, Homo sapiens
ttaaaaaatgaatatttcagatcaatgggtgacaatcccattagcatgataccccatgatatcaattaccacttcagtttcaatttggctggctggccacagggtaccatttctcagctttacttgtgatgggctggctctgtgaagcatgacattcttaaattgctgcccattatccaagtgtcattacttgtactgcctcagaattctctgaatcacaagcagctactgaggtcaagctttgcaaccagaggaattggacaagttggaaaattctttatatcaaagcaaagttatttatctggcatccgacttagaaaatytaaagtttccattatcctgacagtgtgtcagttttgtgtaggtatattgatttaataatttaagaggttttatcaaggtagcaggaggttaaacgtttactgtgtttgcattattcagaatgttgctttgtttttttgg

SEQ ID NO: 122983 - DNA, 503 bp, Homo sapiens
ccccaccgccccacactgacacagtgggagtcaaatttcaacatgagtttttgtggggacaaaccacatccaaaccatagtaatttgtagcataaattctttttcacatgatgtattctgtcctgggatactccacatcctgagtaatttgatttaatttgaatagagtttgctttaaccacttggctgtaaaattctgcatatttmgacaaatgcattgtggcagatatcccactattaaagtatcatatggaatgcctcaaacccccaccccatggagccaatggcttcccatctgtgtagtttgccttctccagtgtctcattaaatgaggtcacactgtgtgtatcctcctcagactgtcttcttccacttagcaatgtgcatgcaagattcactcatgtctttgtgtgtgttgatatcttgttcctttctatggctaaatagtattccattacatgaatgtagcacaatttggttatgcattttggggagcagaacct

SEQ ID NO: 122984 - DNA, 513 bp, Homo sapiens
gtgctgggacatttgaaccttttctgaaaatttgagtcagggagagcatcttggggaggtgggaaggaaggtagaaggagcaaagcaacacccccctgaagcctgggaatattgtcagaaccttaaatataattcagctcaccattctgggtaaggacagactctaccaatgaaaatgggtgattaccagctgtgaaacacaaaaacatacttttacggttacacattcctttacaaacaaccgtgtacatttcagcctcctgccccaccatttcttttctccaggagggaaggctgcatgtcgaggtggtcrtagaatgttgagtatcctactttcctacctcgcttttatttgcgcgggtttaaatgcgccttaacagaacccgtgcaaaggcttgcctactgtctggctgcaccggatgagtagagcatcttccttggtggcaggtgggtgcgaggaggagggggctgggcttttctccggacggtgtttgcccagaagaccatcatccc

SEQ ID NO: 122985 - DNA, 513 bp, Homo sapiens
gtgctgggacatttgaaccttttctgaaaatttgagtcagggagagcatcttggggaggtgggaaggaaggtagaaggagcaaagcaacacccccctgaagcctgggaatattgtcagaaccttaaatataattcagctcaccattctgggtaaggacagactctaccaatgaaaatgggtgattaccagctgtgaaacacaaaaacatacttttacggttacacattcctttacaaacaaccgtgtacatttcagcctcctgccccaccatttcttttctccaggagggaaggctgcatgtcgaggtggtcgtagaatgttgagtatcmtactttcctacctcgcttttatttgcgcgggtttaaatgcgccttaacagaacccgtgcaaaggcttgcctactgtctggctgcaccggatgagtagagcatcttccttggtggcaggtgggtgcgaggaggagggggctgggcttttctccggacggtgtttgcccagaagaccatcatccc

SEQ ID NO: 122986 - DNA, 513 bp, Homo sapiens
gtgctgggacatttgaaccttttctgaaaatttgagtcagggagagcatcttggggaggtgggaaggaaggtagaaggagcaaagcaacacccccctgaagcctgggaatattgtcagaaccttaaatataattcagctcaccattctgggtaaggacagactctaccaatgaaaatgggtgattaccagctgtgaaacacaaaaacatacttttacggttacacattcctttacaaacaaccgtgtacatttcagcctcctgccccaccatttcttttctccaggagggaaggctgcatgtcgaggtggtcgtagaatgttgagtatcctactttcctacctcgcttttatttgcgcgggtttaaatgcgccttaacagaacccgtgcaaaggcttgccwactgtctggctgcaccggatgagtagagcatcttccttggtggcaggtgggtgcgaggaggagggggctgggcttttctccggacggtgtttgcccagaagaccatcatccc

SEQ ID NO: 122987 - DNA, 622 bp, Homo sapiens
tcttatctgtgtgcctgacgtgccatctttaatgttaaaattaaggtgttaaaattaagcctagttatatagacgaaataaaatgctaagtcactacactacatcgtttattttctattacgtctcattcttccctttctaaatggaactttttaaaacctacattattttccctcaatttattttcacaattcatatttattatagatagcagaagtaatccattttaatatggcctttaaaaattccaaatatttgaggttgaaaatgtcctggcttttaaaataggaaatttactatttatgagacttctaaaagaatgaataggagggcatgtaaatatattctccatttatttttcmttaccccccaacaagctggaaaaccatttgagatcaatttggaatgtagtggccaacatgtactcagggaaaataaaaggctataaatatacatatatatatatatactacattctttaagcactagaattttcaaaacttatttcctaaaaaaaaaactctgaaaagacttggccactacaaaggtttaagtgttactcggcgtcaggggacggagtggggggaaaccagacaagaacgcccatcatgaattgctcccc

SEQ ID NO: 122988 - DNA, 622 bp, Homo sapiens
tcttatctgtgtgcctgacgtgccatctttaatgttaaaattaaggtgttaaaattaagcctagttatatagacgaaataaaatgctaagtcactacactacatcgtttattttctattacgtctcattcttccctttctaaatggaactttttaaaacctacattattttccctcaatttattttcacaattcatatttattatagatagcagaagtaatccattttaatatggcctttaaaaattccaaatatttgaggttgaaaatgtcctggcttttaaaataggaaatttactatttatgagacttctaaaagaatgaataggagggcatgtaaatatattctccatttatttttcatyaccccccaacaagctggaaaaccatttgagatcaatttggaatgtagtggccaacatgtactcagggaaaataaaaggctataaatatacatatatatatatatactacattctttaagcactagaattttcaaaacttatttcctaaaaaaaaaactctgaaaagacttggccactacaaaggtttaagtgttactcggcgtcaggggacggagtggggggaaaccagacaagaacgcccatcatgaattgctcccc

SEQ ID NO: 122989 - DNA, 575 bp, Homo sapiens
gttatatagacgaaataaaatgctaagtcactacactacatcgtttattttctattacgtctcattcttccctttctaaatggaactttttaaaacctacattattttccctcaatttattttcacaattcatatttattatagatagcagaagtaatccattttaatatggcctttaaaaattccaaatatttgaggttgaaaatgtcctggcttttaaaataggaaatttactatttatgagacttctaaaagaatgaataggagggcatgtaaatatattctccatttatttttcattaccccccaacaagctggaaaaccrtttgagatcaatttggaatgtagtggccaacatgtactcagggaaaataaaaggctataaatatacatatatatatatatactacattctttaagcactagaattttcaaaacttatttcctaaaaaaaaaactctgaaaagacttggccactacaaaggtttaagtgttactcggcgtcaggggacggagtggggggaaaccagacaagaacgcccatcatgaattgctccccacaaagaaaacaaatt

SEQ ID NO: 122990 - DNA, 661 bp, Homo sapiens
aattcctttccgctctgttcgcccatgctcactagttggcatcacaggtgtcatctttgaaaaagaaaaacatctcatcccttggtttcctgacaaccacccccaccccctgccttggctctttttcatggaatttgcaccaaacagcacagagacaaacgtctctctaacgtctatgatttatccttgcttacacaagatcactccagcctataaaaaagtatttttaaaaaatatgaaaagttaccccagtcttggattacagagtttcagataaaaatgaaaacatagtaaaattgcttatcagagagtttcctgttcttattcgcccttactcctttcgcagatgtgagtcataaatccacaaccaaatcctccctycttcgaggtcaactcctactaacacccatgaggagggaatttggctcatataataacacttaattaaaatgtataatgtccacatgtacatgagaaataaaaagaatgcttcttcgggtatgtttccagcccaatctttcaaaatacgtgaagtatttcttaatctactataccctataaatgataaatataagatactaagatttaaaatactttcaataacactttcctaggcctccagatgagcactacataagtttataataaaatatttaaaata

SEQ ID NO: 122991 - DNA, 661 bp, Homo sapiens
aattcctttccgctctgttcgcccatgctcactagttggcatcacaggtgtcatctttgaaaaagaaaaacatctcatcccttggtttcctgacaaccacccccaccccctgccttggctctttttcatggaatttgcaccaaacagcacagagacaaacgtctctctaacgtctatgatttatccttgcttacacaagatcactccagcctataaaaaagtatttttaaaaaatatgaaaagttaccccagtcttggattacagagtttcagataaaaatgaaaacatagtaaaattgcttatcagagagtttcctgttcttattcgcccttactcctttcgcagatgtgagtcataaatccacaaccaaatcctcccttcttcgaggtcaactcctactaacacccatgaggagggaatttggctcatataataacacttaattaaaatgtataatgtccacatgtacatgagarataaaaagaatgcttcttcgggtatgtttccagcccaatctttcaaaatacgtgaagtatttcttaatctactataccctataaatgataaatataagatactaagatttaaaatactttcaataacactttcctaggcctccagatgagcactacataagtttataataaaatatttaaaata

SEQ ID NO: 122992 - DNA, 604 bp, Homo sapiens
tggctttgccagtagcatggtatttcaattaagtatgattaaacactcttcgagggaatagaaaggggaaggaagaatggagatggatcatttgtttcatgccttttacttacgtgtaaggaattatgagcaggtacctatggattttggaatatgcttctataacactataaaaattagaaagtgaaacttataggcacaaatgtcartttaaaatttctaatgacaatggaagaaattatttagactctctcctaaactattacaccatacatcattgcaaaacattttttttcattttgcccaacctccactcctgtcattccaccactcctatagtatctaaaatatagtttcttttaaagagattggtgcaccactcaacttgtcagcttgagggctttgaatggggttttcttttttttttttttttaatttcatggcaagctgacttacaagtgactcaactgtaagctaagacttattaatagcatggtttaaccaccaaagataatgaattcaaacaatgttacttacagcctttaatgtcacagcccctaaaaacattgaaatgtacatttttcacctgctagtcatcttcagt

SEQ ID NO: 122993 - DNA, 550 bp, Homo sapiens
cctaaaacaacaaaaatactggacaaaatatatgaaactatggccctcaagcaacaaagggaatcaatcacttggaatcaagcatcaaagggcagtgatcctcaagagatgagaaacaaatgaggctagccccacaattgacctcccaaacaccttaraaaactttccaggccacagcacaggaagaaagaatgcagatggagctcagaggtcttcctgagttgagaagacagaactgtgagtctgggaaggccaatgtggctagaattcatagggcagaatattgaggaggagagggctgtacagagacagagctctggaaatctgaagataatacttaccctccttgactgtttatcagagtagtgatcagagtatgcaggtatgaaaatcgccggagaggctggacccggtggctcccacctgcaatcccagcactttgggaggctgaggtgggtggatcacaaggtcaggagatagagaccatcctggcaaacatggtgaaaccccatctctactaaaaatacaaaacttagctgggtgtggtgac

SEQ ID NO: 122994 - DNA, 571 bp, Homo sapiens
aagaccatttgtcaacctctcttcaactccctgattctagccaaacttcatcaatcccaactgaggagccagagagaaatcaaaccccatatatgcagcawcattgtctactggagtcaaaaatcacaattccactacccaccccaacaccactggccctgtttctcccaattgctttttattgtgtttttaaaaaatcctctttccccatccctgcaacaccgagaaggaggaattatagtagataaatatgaagcatggagatcctttaaaagtgtttttaataataaatgagaaaatgaaaaggagagggttgggaaggaaggagggaattcaaatgccagggaattgttcagtttcgcttttaaagatgttaacactcatttatacatctgcaagacactccccttaaagaaaagttctatgagtgtgggtctggttgcatgaataaggataaaattacttttttagacgatggtttcccacatataattcagagacccctgaaattaggtatccctcttgtagatgtccttgagatgctgctggacctgggaaagaggaaactggg

SEQ ID NO: 122995 - DNA, 571 bp, Homo sapiens
aagaccatttgtcaacctctcttcaactccctgattctagccaaacttcatcaatcccaactgaggagccagagagaaatcaaaccccatatatgcagcatcattgtctactggagtcaaaaatcacaattccactacccaccccaacaccactggccctgtttctcccaattgctttttattgtgtttttaaaaaatcctctttccccatccctgcaacaccgagaaggaggaattatagtagataaatatgaagcatggagatcctttaaaartgtttttaataataaatgagaaaatgaaaaggagagggttgggaaggaaggagggaattcaaatgccagggaattgttcagtttcgcttttaaagatgttaacactcatttatacatctgcaagacactccccttaaagaaaagttctatgagtgtgggtctggttgcatgaataaggataaaattacttttttagacgatggtttcccacatataattcagagacccctgaaattaggtatccctcttgtagatgtccttgagatgctgctggacctgggaaagaggaaactggg

SEQ ID NO: 122996 - DNA, 571 bp, Homo sapiens
aagaccatttgtcaacctctcttcaactccctgattctagccaaacttcatcaatcccaactgaggagccagagagaaatcaaaccccatatatgcagcatcattgtctactggagtcaaaaatcacaattccactacccaccccaacaccactggccctgtttctcccaattgctttttattgtgtttttaaaaaatcctctttccccatccctgcaacaccgagaaggaggaattatagtagataaatatgaagcatggagatcctttaaaagtgtttttaataataaatgagaaaatgaaaaggagagggttgggaaggaaggagggaattcaaatgccagggaattgttcagtttcgcttttaaagatgttaacactcatttatacatctgcaagacactccccttaaagaaaagttctatgagtgtgggtctggttgcatgaataaggataaaattacttttttagacgatggtttcccacatayaattcagagacccctgaaattaggtatccctcttgtagatgtccttgagatgctgctggacctgggaaagaggaaactggg

SEQ ID NO: 122997 - DNA, 544 bp, Homo sapiens
actcataaaggaatgtcttataggctgataacacctttctattcatgcttatacttaacatttaggctaggataatttcctaacctcagtgtcgtcactataaratgggaattattataatccctacctcataaattgttgggaggattaaaatacttagtaaagtgcctgactaatagaaaggcattcaataaatgttagctattcatggtgtcatcatcattatatttaccattattactaatctcctgtattgcaagaattacagtttatattttcgtagaccatcactgtagctaaagggtctttgggccataggtgatattccataaaggttggttaaattgatctgtggtttttgactatggaaactcagaactccctcaaaatgtacaaaacagatttacctgctaaataaatctcttcaaagctgaccccaggtttaattgaattaattccaatgaatttgtcacaatgatggagaaaggaaacttagagggccccacagttgtttgctggtaaaatgagaagtttggattcgatc

SEQ ID NO: 122998 - DNA, 544 bp, Homo sapiens
actcataaaggaatgtcttataggctgataacacctttctattcatgcttatacttaacatttaggctaggataatttcctaacctcagtgtcgtcactataagatgggaattattataatccctacctcataaattgttgggaggattaaaatacttagtaaagtgcctgactaatagaaaggcattcaataaatgttagctattcatggtgtcatcatcattatatttaccattattactaatctcctgtattgcaagaattacagtttatattttygtagaccatcactgtagctaaagggtctttgggccataggtgatattccataaaggttggttaaattgatctgtggtttttgactatggaaactcagaactccctcaaaatgtacaaaacagatttacctgctaaataaatctcttcaaagctgaccccaggtttaattgaattaattccaatgaatttgtcacaatgatggagaaaggaaacttagagggccccacagttgtttgctggtaaaatgagaagtttggattcgatc

SEQ ID NO: 122999 - DNA, 544 bp, Homo sapiens
actcataaaggaatgtcttataggctgataacacctttctattcatgcttatacttaacatttaggctaggataatttcctaacctcagtgtcgtcactataagatgggaattattataatccctacctcataaattgttgggaggattaaaatacttagtaaagtgcctgactaatagaaaggcattcaataaatgttagctattcatggtgtcatcatcattatatttaccattattactaatctcctgtattgcaagaattacagtttatattttcgtagaccatcactgtagctaaagggtctttgggccataggtgatattccataaaggttggttaaattgwtctgtggtttttgactatggaaactcagaactccctcaaaatgtacaaaacagatttacctgctaaataaatctcttcaaagctgaccccaggtttaattgaattaattccaatgaatttgtcacaatgatggagaaaggaaacttagagggccccacagttgtttgctggtaaaatgagaagtttggattcgatc

SEQ ID NO: 123000 - DNA, 579 bp, Homo sapiens
ttacagctctcctgtcacccccaattcctgccccctctgcagccttggaggagaatggagctgaagggcctgccctctgtagggtgagaaagggaggctaaagcctggtgcccactgccctggctgctccgcattgcaggagctgcgcccttcctttcctggcacagggtccacagccccgaaaccccgttgtgtgggagctgggcacagggcagcaggactaatccttggaacagctcagggaggattatcccagccactgtcagcagcggtgcagctggctcattcccatatagggggaggccagagccrggggcctgccacaagttggaaggctggggaaggggaggccagcaaaggtgtcctggctgtgggtggctctgagggggctctcagggatggggctaaatctcaggggcaggattaggtaaatcaaaccaattctagccacagatttaaagtttggaaaaaaaaaaaaaacccagcctggcggaaagaatttaaattataaaaacttagaagtatggaatgtgaaatcatcctgtaggtgcttatttaacaacgaaatcatcccgacac

SEQ ID NO: 123001 - DNA, 364 bp, Homo sapiens
tattactgaactccatccccaaatgtgccaaatgttctccaggaggtaactttctctatttaccttwtccagcctctgccaggctgggagagggaccattatctggctatacaggtttgaagagaggatgtagggatctaacaacttcttatacagacttataacccaatcctcctatttttgaccctacctttatccccattttcagtggtatctgacatttggaagctgtttgggaggtctatgatgtagtcaggtacttccgagttttctccaagacaaatttagggatcatctttctcaggtgtgttacctcttgtctatatggcttctgaattccacaaccttgttgttcttgtcttcc

SEQ ID NO: 123002 - DNA, 577 bp, Homo sapiens
ggatgcacaatggttcatgggtgtagatgtaccatgcgtcatttattgatagacattcagttttggatccactgtcttttcctctatgaaaaatcctgatagcagctttgtttatatttgcctaaacttggaggcaattgagatgtccttcactaggtagataaacygttctatctagataatggaatatttattattgagcaattaaaagaaatgaactatcaagccatgaaaaggggtggaggaaacttaaatgttactaagtgaaagaaggcaatctaaaaagtctgcacaattgtatgattccaactatatgacattctggaaaaaggcaaaaccacaaagacagtaacaagatcagtgtttgccagaggttggaggaaacagacatgattcggtgaagaacagagaatgttgagggcaatgaaactattctgtaccacactatcatggtggatacatgttgctataaatttttgcaaacccatagaatgtgcaacaccaagagaagcttaatctaagctagactctgagtgataatgatgtgtcagtgtaagtttattgactgtaacaaacg

SEQ ID NO: 123003 - DNA, 572 bp, Homo sapiens
cacaatggttcatgggtgtagatgtaccatgcgtcatttattgatagacattcagttttggatccactgtcttttcctctatgaaaaatcctgatagcagctttgtttatatttgcctaaacttggaggcaattgagatgtccttcactaggtagataaactgttctatctagataatggaatatttattattgagcaattaaaagaaatgaactatcaagccatgaaaaggggtggaggaaacttaaatgttactaagtgaaagaaggcaatctaaaaagtctgcacaattgtatgattccaactatatgacattctggaaaaaggcaaaaccacaaagacagtaacaagatsagtgtttgccagaggttggaggaaacagacatgattcggtgaagaacagagaatgttgagggcaatgaaactattctgtaccacactatcatggtggatacatgttgctataaatttttgcaaacccatagaatgtgcaacaccaagagaagcttaatctaagctagactctgagtgataatgatgtgtcagtgtaagtttattgactgtaacaaacg

SEQ ID NO: 123004 - DNA, 586 bp, Homo sapiens
gggtttcacctgggtaaaatcaaggtgttaaccaggtgtgcacaccttctgaaggctctaggggagcatctgtcccttgtcttttccagcttctagaagccctctgcattcctttgctcacagcccctctatcttctaagccaccaatatttcatcttccagttcctgcttctgacccatctccctcataagaaccttgtgattacagtgaacccacctgaatcacccagggtaatctcycaatcttatgatccttaatcacctctgcaaagttccttttgccacataaagaacatattcacaggttccagggattaggacatgagcatctttgcagggccattgctctgcctaccacagcagctttccaaaaatattagactcatggatgtgaaatctgtaatgagctaacttttgctatcctgtgtgatatgtcactctcagttttctgagacttttcatcagttctttttttttctgcgaggctgaaaacaggattctgtaaagtagctggtatactagctctgcagtaacatacttcaatcctgtcaaggctgtgaggaaatacagctataccagggtacga

SEQ ID NO: 123005 - DNA, 597 bp, Homo sapiens
cattcctttgctcacagcccctctatcttctaagccaccaatatttcatcttccagttcctgcttctgacccatctccctcataagaaccttgtgattacagtgaacccacctgaatcacccagggtaatctcccaatctyatgatccttaatcacctctgcaaagttccttttgccacataaagaacatattcacaggttccagggattaggacatgagcatctttgcagggccattgctctgcctaccacagcagctttccaaaaatattagactcatggatgtgaaatctgtaatgagctaacttttgctatcctgtgtgatatgtcactctcagttttctgagacttttcatcagttctttttttttctgcgaggctgaaaacaggattctgtaaagtagctggtatactagctctgcagtaacatacttcaatcctgtcaaggctgtgaggaaatacagctataccagggtacgagactgtcttgagttataacttggcaacaaaggggatgggatggaagatggggttgttaaacagcaccttactttaaagatgtccagaagctccctctaggatgtggccaaagccatg

SEQ ID NO: 123006 - DNA, 586 bp, Homo sapiens
gggtttcacctgggtaaaatcaaggtgttaaccaggtgtgcacaccttctgaaggctctaggggagcatctgtcccttgtcttttccagcttctagaagccctctgcattcctttgctcacagcccctctatcttctaagccaccaatatttcatcttccagttcctgcttctgacccatctccctcataagaaccttgtgattacagtgaacccacctgaatcacccagggtaatctcccaatcttatgatccttaatcacctctgcaaagttccttttgccacataaagaacatattcacaggttccagggattaggacatgagcatctttgcagggccattgctctgcctaccacagcagctttccaaaaatattagactcatggatgtgaaatctgtaaygagctaacttttgctatcctgtgtgatatgtcactctcagttttctgagacttttcatcagttctttttttttctgcgaggctgaaaacaggattctgtaaagtagctggtatactagctctgcagtaacatacttcaatcctgtcaaggctgtgaggaaatacagctataccagggtacga

SEQ ID NO: 123007 - DNA, 582 bp, Homo sapiens
ataattatgtccctctttagagaagtacatccaccttgttttccatcccctcattgccccatgtagcttaatgtttgttttgtaaggctatagtgaggtaatacattctgaatgttgaggcatattttggttttctttggaggagacattaatttctggcccttcttaatgttcctcttttgttctttgtacagtgaagcaccaagagagtttctatttttttccacagaatttttactgtcttgaggcattcagggattggaaacccaaaacactggtgagccagtgacaggcgtcggcccatggtcggacccaacccaatgacataagctgagacaatctcactcagccagatttggtttctttactacgctctgctgmaaatgtttttctgaacacacccaaatcccaaggattttcatcttctctgggctccgcaacatccgctgtgtcaaacaacaagttattacagaacaaacccagtctaggtttccactaggattcttactggggacaccattcttccttgcaacagaatacctagaggcaatgagcttcaaagtcgtccttgatgatcttact

SEQ ID NO: 123008 - DNA, 582 bp, Homo sapiens
ataattatgtccctctttagagaagtacatccaccttgttttccatcccctcattgccccatgtagcttaatgtttgttttgtaaggctatagtgaggtaatacattctgaatgttgaggcatattttggttttctttggaggagacattaatttctggcccttcttaatgttcctcttttgttctttgtacagtgaagcaccaagagagtttctatttttttccacagaatttttactgtcttgaggcattcagggattggaaacccaaaacactggtgagccagtgacaggcgtcggcccatggtcggacccaacccaatgacataagctgagacaatctcactcagccagatttggtttctttactacgctctgctgaaaatgtttttctgaacacacccaaatcccaaggattttcatcttctctgggctccgcaacatccgctgtgtcaaacaacaagttattacagaacaaacccagtctaggtttccastaggattcttactggggacaccattcttccttgcaacagaatacctagaggcaatgagcttcaaagtcgtccttgatgatcttact

SEQ ID NO: 123009 - DNA, 588 bp, Homo sapiens
tgaaacatgtttctccagttttccatttatactaaagaaaaattatggtaagaccaatttgctttattrtactttgcctaattatttgtataaagtgcagcaagaataattatttgccatgtaagctttttaaattggttttggtgtggaactctgttccataaggaatctcaaataagactttttttttaaagctgagcccagccttgggtttgtaccctcaaatatctgagttgagtaaattcttctcctcttgaggttccaagacaacttggggcttctgggcctgatagaaagtggcattatttacttactacaggtcagaaaccttatacacagactgtgtggacaaggtatgaggcatttcccaaggggcttttattggctttacaagtcaagtttgatttcttaaaggaaaacacaccattccagtcaaagccttggtaaaatacccagtttttccaattgtgtcctgttacaaaaaaaaaaaaaaaatactgcacttatgcaaataactatattgctataagttaatacaaatagttcccaaattctagtgaaattgggtagggagaaacaaatatgctc

SEQ ID NO: 123010 - DNA, 588 bp, Homo sapiens
tgaaacatgtttctccagttttccatttatactaaagaaaaattatggtaagaccaatttgctttattatactttgcctaattatttgtataaagtgcagcaagaataattatttgccatgtaagctttttaaattggttttggtgtggaactctgttccataaggaatctcaaataagactttttttttaaagctgagcccagccttgggtttgtaccctcaaatatctgagttgagtaaattcttctcctcttgaggttccaagacaacttggggcttctgggcctgatagaaagtggcattatttacttactacaggtcagaaaccttatacacagactgtgtrgacaaggtatgaggcatttcccaaggggcttttattggctttacaagtcaagtttgatttcttaaaggaaaacacaccattccagtcaaagccttggtaaaatacccagtttttccaattgtgtcctgttacaaaaaaaaaaaaaaaatactgcacttatgcaaataactatattgctataagttaatacaaatagttcccaaattctagtgaaattgggtagggagaaacaaatatgctc

SEQ ID NO: 123011 - DNA, 588 bp, Homo sapiens
tgaaacatgtttctccagttttccatttatactaaagaaaaattatggtaagaccaatttgctttattatactttgcctaattatttgtataaagtgcagcaagaataattatttgccatgtaagctttttaaattggttttggtgtggaactctgttccataaggaatctcaaataagactttttttttaaagctgagcccagccttgggtttgtaccctcaaatatctgagttgagtaaattcttctcctcttgaggttccaagacaacttggggcttctgggcctgatagaaagtggcattatttacttactacaggtcagaaaccttatacacagactgtgtggacaaggtatgaggcatttcccaaggggcttttattggctttacragtcaagtttgatttcttaaaggaaaacacaccattccagtcaaagccttggtaaaatacccagtttttccaattgtgtcctgttacaaaaaaaaaaaaaaaatactgcacttatgcaaataactatattgctataagttaatacaaatagttcccaaattctagtgaaattgggtagggagaaacaaatatgctc

SEQ ID NO: 123012 - DNA, 617 bp, Homo sapiens
acacactgtcagcctgactgtgcatgttctccccacttttactgaacttcctggagacgtgtcattaaataaaggagaacagctacgattaagctgtaaagctactggtattccattgcccaaattaacatggaccttcaataacaatattattccaggttggtcatttaattctcaagaagtgaataaatacacctatgtagaactctagacgaagctctgtttcctccagctgtgaaaattgaaaagtaacaagaattgattgctttaaatgctgtaaaatgtgtgcctctgcttggattttaccctctacccaatatatatgttttgttccttcttttggaagcataagttgatcacagggccatatattgcaggttataagtagcttttttaacctraatataattccccttaccccatgagaaggcagtatgtttatataggcgcctaaacttatcccagctggacccccttcatcactgatcagtagattaagatggccgctgttggagtcctaaagattcacttaattttacagagaagaattctacttctcactgtttgcctcaacctctattatagtgtagattaatttatgtagaaaatttctagtc

SEQ ID NO: 123013 - DNA, 604 bp, Homo sapiens
aattcccatagtcatatctactttcttttggtttcataataagagcaaccatccaccacaagaaacgctaacagctattatgtgtttgccataagcaacgcattgttctaaatgctctgcatatattgttccattgagtactcacaatacctcgtacagtggtactgtatttccccagtgagtatataaggaatttgagacaccagaggtgagttaacttgcccacggcccaaagtttgtaaatggtacagccaggatacaaacacacgtagtgaactcagcccygggtccttaaccatgaggtagagtttctctcaccaatgtgaccactccacagagaaatgtgagccccaccaagtcaatcaaatggcacttaagattttcaaaagatagtactagaaatttagtaaatgtttaaactgcttaaaagtagctaatgattagtatttcttcataaaggataatcaagtattagtttaaaatacttaaattgattacatgtccacatatctactagcatcaaattcattttcatgtactcaatgaaaatattagtcctacataaaacagaaaaatacaggaacttaaccaggaattcgttaat

SEQ ID NO: 123014 - DNA, 502 bp, Homo sapiens
caaggcgtcctggcctgtgggaagctacttccaccccatcggccagcaccagcagggacmagagggagcatcaatggcatgagatacaccaaacagtcttaaagattaaattatctttggaatcacaacccacaaatgtaggccaggtcctgcatactaaacttatacagggtgactgccttctaaaatggaagatctaaacaggactcagaagctcccaatggaataaccaaaatgtccagaacacaatcagaactcaatcatcataccaagaaacagaaaaatcacatcttgaatgagaaaagacaactgacaccaacactgagatgaatcggatgttagcattctctgacaaggattttaaagcagtcatgataaaaatgtttcaacaaataattaaaaattctaataaaacaaataaaaaggaaaaacacaacagcagaatttgttttaattcggggatcgataaggaagcagaaatgacaaaggagagaatacataa

SEQ ID NO: 123015 - DNA, 502 bp, Homo sapiens
caaggcgtcctggcctgtgggaagctacttccaccccatcggccagcaccagcagggaccagagggagcatcaatggcatgagatacaccaaacagtcttaaagattaaattatctttggaatcacaacccacaartgtaggccaggtcctgcatactaaacttatacagggtgactgccttctaaaatggaagatctaaacaggactcagaagctcccaatggaataaccaaaatgtccagaacacaatcagaactcaatcatcataccaagaaacagaaaaatcacatcttgaatgagaaaagacaactgacaccaacactgagatgaatcggatgttagcattctctgacaaggattttaaagcagtcatgataaaaatgtttcaacaaataattaaaaattctaataaaacaaataaaaaggaaaaacacaacagcagaatttgttttaattcggggatcgataaggaagcagaaatgacaaaggagagaatacataa

SEQ ID NO: 123016 - DNA, 502 bp, Homo sapiens
caaggcgtcctggcctgtgggaagctacttccaccccatcggccagcaccagcagggaccagagggagcatcaatggcatgagatacaccaaacagtcttaaagattaaattatctttggaatcacaacccacaaatgtaggccaggtcctgcatactaaacttatacagggtgactgccttctaaaatggaagatctaaacaggactcagaagctcccaatggaatarccaaaatgtccagaacacaatcagaactcaatcatcataccaagaaacagaaaaatcacatcttgaatgagaaaagacaactgacaccaacactgagatgaatcggatgttagcattctctgacaaggattttaaagcagtcatgataaaaatgtttcaacaaataattaaaaattctaataaaacaaataaaaaggaaaaacacaacagcagaatttgttttaattcggggatcgataaggaagcagaaatgacaaaggagagaatacataa

SEQ ID NO: 123017 - DNA, 603 bp, Homo sapiens
ttttccaatccatgaacacggaatgtcttttcatttatttgtcttttaaaatttctttcagcaacattttatagtctttcaccactgagtatggtgtttgctgtgggcttttcatatgtgatcttattatattgaggcagtttccttctcctcctagttttgtgagtgcattctcttaattaaaaaaaattaaagtcttgaggctgggtgcagtggctcacacctgtaatcccagcactttgggaggccacagtgggtagattacttgaggccaggagtttgagaccagcttgggcaacatggtaaaaccccatttctactaaaaatacaaaaatgtgctgggtgtggtggtgcacgcctgtagtcccagcttcctgggaggctgaggcacgagaattgccagaacccaggaggtggaggttgcagtgagccaagatcacactactgaactccagcctggatgacagagtgagactctggctcaaagaaaaaaaaaaaatttaaagtcttgcattttatcccaagcacgatgattaggaaaccaagatgaagcatctgacttggtatratatctgttagtaggtgatgccaggtgacagagct

SEQ ID NO: 123018 - DNA, 596 bp, Homo sapiens
agcagagaattcaagttaagccacatctggatgtctaacacacagaattgtgagttagtaaataaatgttattttaagaaaaagaaagggaaacagaaagtagtgaagacatagcaagagaaactattcacaatgaaaaccagaagaaatactcaaagaaatgaacagagtaacactttgaacaggagctgtagggcaactccaagaggcctaatatatgtgtaattggagtccctgaagaggaagaattaggactgaaaatatttcaagaaacaatgggcaaaacaccctaaatttgatgaaaaccatataaaacagatccaaaaatctcaacaaacttcaagcacaaaaacatgaagaaaacaacatcaaggcatattgtaaacaaactgttcaaaacccatgaaaaagagaacatctttaaggcrgccagagaaaaccgacacactatgtacaaagacccaaagataagaacagtagattttccactagaaaccattcaagctagaaattactaaaacagcatctttaaatatttaaagaaaaaaaatgccagcttggattctgaacaaagcaaaaatatttatcaaaagtat

SEQ ID NO: 123019 - DNA, 382 bp, Homo sapiens
agtttatttaataaaaaaattgctgaaaaacctccaagttttggaaaacgtattatcattcagatccatgaagcttaaaaatctctaaacaaattatatccaagtaggttctcttcaagacacaatataattaaactgtccaaattaaataactattaaaagagaattttaaaagcagtgctagaaaagcaaaaggtcacatatttaaaaaatcaccaytagactatcaacagatttctcagtagaaaccttgcaggccagaagagaatgggatgatatattcaaagtgctgaaagaaaacaactggcagccaagaacatgatacccagcaaaactgtccttcagaaaggaagagaaataaagcctttcccagacaagcaaa

SEQ ID NO: 123020 - DNA, 653 bp, Homo sapiens
ctgattctaagcaaaattagctctttagtgtaaagatggctgagtgtaggtatgcttgtgttataattgtcatgactcctacttttaaccttgctcatttaaaaaattttgttttatttttttaaaaaatgttacagagaagcacaatcaattgaccactgccgtgtgcgtgtgtgtgtgtgtgtgtgtgtgtgtgtgtgtgtgttaggggtaggggaatctcaaaaggacatagcctgcccaacatcagtctttgatttcttcttgtaattctttggaaccattgggtagcaagtggtgttggtattttctggagattacatagagtgaatatttatcaatgatttaatactgctttgtggtactactaggttctcaattttaatcagatttttgaagacaaaatagaacatgaggaggcagcacattgagtataacacttctcagctcttcyaaaatgtggaacccatttaacataaaaattgccaaggatctttccagagctaaaatgctgtggcctacatttttagatggccttaacatatgaagagtggttagcatcttatacaaaataaaatagactgtgcattataatatcactggtggaagacattgtcaaaacatggctttatagaaatgaaaaggaaattgaa

SEQ ID NO: 123021 - DNA, 585 bp, Homo sapiens
tagcaaaagctctagtatattacttacacagctgagtcactgagatttgtacctattagaagatttaaaaatatcacccagaagaactatatatatatatatatatatatatatwttttttttttttttttttttttttgaggtggagttttgctcttgttgcccaggctggccaggctggcatgcagtggtgccatcttgcctcactgcaacctccgcctcccgggttcaagtgattctcctccctcagcctcccgagtagctgggactacaggcacgtaccaccatgcctggctaatttttgttttttttttgtttgtttgttttgtttttagtagaaacggggtttcactagattggtcaggatggtcttgatgtcttgacctcgtgatccatccacctcagcctcccaaagtgctgggattacaggcatgagccaccgcacctggccccagaagaactacatttttgaatctgcaataaatgtcatagtaagctaagtcactcatgaagagcttgcaggtgtaatgtactgaaactctcaagtaaaaatgtaaatttgtggcatattgggcataagtcttt

SEQ ID NO: 123022 - DNA, 571 bp, Homo sapiens
gcagtgcataataatcacatcagggtaaatggggtagttatcacctcaagtatttatcctttgtatttcaaacaattgaattgtactctttatttttaaatgaacaattaaattattttttactatagtcaccgtgttgtgctagcaaataataggtcttatttattccttctaacattattttgtacccattaaccatccctcctccctattccccctctcccccaataccattcccagcctctggtaaccatctttctattctctatctccatgagttcaattgttttaatttttatcccccacagatgagtgagaatatgtgaggtttgtctttctgtgcctggctggrtttatcatttttcattcagaattttactgtttacaaatagcatggcaatgtttaaaagaacataagattaactacattcatacatttaattttattagactttactaaaattgaatacttgggaagcattttgcttggtagacatttgaagaacgcagaaatttgaatatatttcttttgtaaattcagtttaaaatattaaagggagttaataaattg

SEQ ID NO: 123023 - DNA, 645 bp, Homo sapiens
tatttagtccttataagactatggatagtgtctgaaattcctccatgaggtttgtttggtttttgctttttaaatttgggcaatcaagcagaagtgatgtaaggtttttatcataaaggcagtgaagtttctacattgtcatgtggagcactcacactggagtgagtaagaaatttgacaatcctgagtctgccatgctgtgaggaagcccaagccattagagaagctgtgtgaggtgctctggttgacagtcccagctgagtgctgcatcccagcacaactgccaggcatgtgaataagggggcttccagatgattcctccccctgctgtcaggttatccctagcttgtgagttkccctaactgaggccacagacatggagaaaagataagcatccctgctgtcccttgtgtgaactgctgctagaatctgtgagcagaaacaaatgttgctttacacccctaatttttgggtggtttgttatgtagtaatattagtcagaacagaaggcaaccacaagtgtccacctcagaaaaagaccaccccattttctgagcatttttacctcactccacacacagacaaatttaaagttgtacgtaaataaagatacacacgacatatttagttgtgtatgaacgaaaa

SEQ ID NO: 123024 - DNA, 482 bp, Homo sapiens
gaattccaaactaggagagaagaaaaaggggaataaaaaaaaaaaatcttaaggcacaaacagaggggaaaagaaataaggaacagatggtactaagagaaagcacaaaatggcatggcaagtgaaaacccaaatatagtaataattgcattaaatgtaaatgagctaaatgccccagttaaaagatagtgtgtcagactggataagaaataacaccctactatatgtgtttataagagacccacctgacacaatcaagtgaaaaaagaggcacaagttgccaatrttaggaaggaagaggaaatatcactacaatgcacacattacaagataagaggatattaatagatactttcaggccaatactactcaatttttaatagaaaactccaaggaaaatacagcttacccaagttgcctatgaaatagaaaacttttatagtcctattcctataaaaggaatagaataagtggttttaaaa

SEQ ID NO: 123025 - DNA, 440 bp, Homo sapiens
cagttaaaactactagtattccataaacatttaatctttgagactagatggccatggttaagaggatacacaataaattggtaaatataatggacactgcataagaaaaatatggctgaaaatagtggagaggaggtagtgagagaagacttacatttcccagtgtatgatttgcagaaatttaygatttattttcattaatttctgaaaattaaattaaaactttattttaaaatagcatgttatgtatgtccaagtttagttatttgacaataaaaatagagatgctttaaaacctaaaggcaaatttagtgcattataatggcagtttttcatttggaccatttttagtgaccattttttctattcaaaagcagtcaacctcatgatgactggtgaatgattctatttattatgaaaccaaaaacaaagaccaagag

SEQ ID NO: 123026 - DNA, 621 bp, Homo sapiens
actaaaatgcattaacaataagagaagaaaggataagaattatagcagactgttcatcagaaattatgtgagccagaagagaatggagaaaaatattttgaattgaaggaaaaataaacactaacctagaattctatatccattggcagttttccttaaaggttaagaataaagactgtatcagacaaacaaatgctcagggaatttatcaacagtatatctgtcctgcaagaaatattgaaaaataattttcaagcagaaagaaaattacacaggtcacaattttgaattaacataaatatagaaaagcatctggaaaaaaacaaataaaagtcaaataaaatattttatttttcttatccttaatttatctaaatggtaattttaaaaaaaccaatagtatcaacaatgtattgggtgaggaaatcatattaaaaagtaaaatgaattacaaatattccaaaaaaggctggagggagtaattaagaatactcttttataaagaatatgcaccagttgtaaagcaatgtaatattgttttaaaatgaatytagattaaaaataaatattgtaaactatagggtcacccttaaatttttttataatcaatatcattgatga

SEQ ID NO: 123027 - DNA, 534 bp, Homo sapiens
ggtttggaattagatatttggtgtatgaatgaatgggctaaagtgcaaaagaacaggcagaataactgagctggtacagaggaaaaaaatcacacttaaaatctaaaaatatctgcttctcaatttgggctttcccacttagcagctttggcaccttagaaagaacacttaacttacctgagcttctattacttctaaaaagtgcataaagtgcaggctaagacatagttttttggcaaaattcagtcagactacatcaagtaaactccctaagtctcctagtataattcatggcacaaaaactggggaaaaaacagggaggatatgattataagttcagtttgkgttttttgttgagtgaatgtctccagccatagagatgcaagtgtagatacacagtaagagtagtatgaatggcagacaccttggaaggctatttcttccttcattcattcagttggtcactcaatgaactatcatgaattgagcactacctctgtttcttatcaacaaaggagactacggaaaagaaga

SEQ ID NO: 123028 - DNA, 621 bp, Homo sapiens
acttacctgagcttctattacttctaaaaagtgcataaagtgcaggctaagacatagttttttggcaaaattcagtcagactacatcaagtaaactccctaagtctcctagtataattcatggcacaaaaactggggaaaaaacagggaggatatgattataagttcagtttgtgttttttgttgagtgaatgtctccagycatagagatgcaagtgtagatacacagtaagagtagtatgaatggcagacaccttggaaggctatttcttccttcattcattcagttggtcactcaatgaactatcatgaattgagcactacctctgtttcttatcaacaaaggagactacggaaaagaagagtgactaagatctctgaagaagggaaaagctagatgactgggccacaagaggaaaaaaagcagcaagacaggtacaattgtttctggtccctcaagccagaaggtcctatcattatgtgaatactggaaacgggtggactccacctgtcctgagtggggaattcttccagtgcagcactggctgataaggagtgatttccaagtagcattgattgtgttctttaaaagctaggaattgataaagcagcagtgcgtggg

SEQ ID NO: 123029 - DNA, 621 bp, Homo sapiens
acttacctgagcttctattacttctaaaaagtgcataaagtgcaggctaagacatagttttttggcaaaattcagtcagactacatcaagtaaactccctaagtctcctagtataattcatggcacaaaaactggggaaaaaacagggaggatatgattataagttcagtttgtgttttttgttgagtgaatgtctccagccatagagatgcaagtgtagatacacagtaagagtagtatgaatggcagacaccttggaaggctatttcttccttcattcattcagttggtcactcaatgaactatcatgaattgagcactacctctgtttcttatcaacaaaggagactacggaaaagaagagtgactaagatctctgaagaagggaaaagctagatgactgggccacaagaggaaaaaaagcagcaagacaggtacaattgtttctggtccctcaagccagaaggtcctatcattatgtgaatactggaaacgggtggactccacctgtcctgagtggggaattcttccagtgcagcactggctgataagsagtgatttccaagtagcattgattgtgttctttaaaagctaggaattgataaagcagcagtgcgtggg

SEQ ID NO: 123030 - DNA, 553 bp, Homo sapiens
tgctacactgtgctcaagacttcccagtgcctttgtctcctctccctcaaatctctccacccaatgtcttgacaaatactgtagattcttcctgcataacctctccagaatcttttccttctgttatccatgctacagtgtttatggaggatgttttcttcacctatgaagtgtgatgggggctgaagctgcagmaagactcatgctgttcacctcaggagctgacacagtaaatgtggataaacctcaatcctttaatatctttatgacttctttcccagttaccccagcaaatttacagattgaggttaaaaccacaacaggactatcttcctggaaagaataggcttccctttaaggtttcacatagatactgggtgaggaaggagccctaaattgcttgaaaaattgaatggtctttgggcaaagcaggaagccttgctatggaagagcatcatttgaacataaatcagagtctcagtacaaacagagtgctcaggacatcaagatggttaaccagagagcctgaccagaatatctgtggtggagagaa

SEQ ID NO: 123031 - DNA, 553 bp, Homo sapiens
tgctacactgtgctcaagacttcccagtgcctttgtctcctctccctcaaatctctccacccaatgtcttgacaaatactgtagattcttcctgcataacctctccagaatcttttccttctgttatccatgctacagtgtttatggaggatgttttcttcacctatgaagtgtgatgggggctgaagctgcagaaagactcatgctgttcacctcaggagctgacacagtaaatgtggataaacctcaatcctttaatatctttatgacttctttcccagttaccccagcraatttacagattgaggttaaaaccacaacaggactatcttcctggaaagaataggcttccctttaaggtttcacatagatactgggtgaggaaggagccctaaattgcttgaaaaattgaatggtctttgggcaaagcaggaagccttgctatggaagagcatcatttgaacataaatcagagtctcagtacaaacagagtgctcaggacatcaagatggttaaccagagagcctgaccagaatatctgtggtggagagaa

SEQ ID NO: 123032 - DNA, 553 bp, Homo sapiens
tgctacactgtgctcaagacttcccagtgcctttgtctcctctccctcaaatctctccacccaatgtcttgacaaatactgtagattcttcctgcataacctctccagaatcttttccttctgttatccatgctacagtgtttatggaggatgttttcttcacctatgaagtgtgatgggggctgaagctgcagaaagactcatgctgttcacctcaggagctgacacagtaaatgtggataaacctcaatcctttaatatctttatgacttctttcccagttaccccagcaaatttacagattgaggttaaaaccacaacaggaytatcttcctggaaagaataggcttccctttaaggtttcacatagatactgggtgaggaaggagccctaaattgcttgaaaaattgaatggtctttgggcaaagcaggaagccttgctatggaagagcatcatttgaacataaatcagagtctcagtacaaacagagtgctcaggacatcaagatggttaaccagagagcctgaccagaatatctgtggtggagagaa

SEQ ID NO: 123033 - DNA, 553 bp, Homo sapiens
tgctacactgtgctcaagacttcccagtgcctttgtctcctctccctcaaatctctccacccaatgtcttgacaaatactgtagattcttcctgcataacctctccagaatcttttccttctgttatccatgctacagtgtttatggaggatgttttcttcacctatgaagtgtgatgggggctgaagctgcagaaagactcatgctgttcacctcaggagctgacacagtaaatgtggataaacctcaatcctttaatatctttatgacttctttcccagttaccccagcaaatttacagattgaggttaaaaccacaacaggactatcttcctggaaagaataggcttccctttaaggtttcacatagatactgggtgaggaaggagccctaaattgcttgaaaaattgaatgstctttgggcaaagcaggaagccttgctatggaagagcatcatttgaacataaatcagagtctcagtacaaacagagtgctcaggacatcaagatggttaaccagagagcctgaccagaatatctgtggtggagagaa

SEQ ID NO: 123034 - DNA, 571 bp, Homo sapiens
gctgctttcacgttcctcaccactgaggtcaaggacccgaggctggcaggaaattgaackaatgacacttcaagaagaccatgaatcttttcatttttttcagctggaaagctgagagcagacaaatggcagggaggccaagtgctatcaaccacatttagaaattttatttaatctgcacatcttaatttggtagaaagttttacaaataaaatttaacacaaaacaatttttttgaaaaaccatgttgacttaagcagagccaatgatgcaaagcataatgtatcagaagattcctgattcaactgctagcttgaagtcccccctacttgtgttctggaaagatggggtgttgtttatcatccacatatcaaaaagtaaacagcaatatttctgaaaccttttctttataaggagatcttcataaaacttgcattattactcttgttggatcataacacacctgagaaagattgggtggaggaaggtgaagaaggctggaaaagatttacaagggaataaatcaagaatctggtacaaattgactaatggtatcttctgcatctgccca

SEQ ID NO: 123035 - DNA, 571 bp, Homo sapiens
gctgctttcacgttcctcaccactgaggtcaaggacccgaggctggcaggaaattgaacgaatgacacttcaagaagaccatgaatcttttcatttttttcagctggaaagctgagagcagacaaatggcagggaggccaagtgctatcaaccacatttagaaattttatttaatctgcacatcttwatttggtagaaagttttacaaataaaatttaacacaaaacaatttttttgaaaaaccatgttgacttaagcagagccaatgatgcaaagcataatgtatcagaagattcctgattcaactgctagcttgaagtcccccctacttgtgttctggaaagatggggtgttgtttatcatccacatatcaaaaagtaaacagcaatatttctgaaaccttttctttataaggagatcttcataaaacttgcattattactcttgttggatcataacacacctgagaaagattgggtggaggaaggtgaagaaggctggaaaagatttacaagggaataaatcaagaatctggtacaaattgactaatggtatcttctgcatctgccca

SEQ ID NO: 123036 - DNA, 571 bp, Homo sapiens
gctgctttcacgttcctcaccactgaggtcaaggacccgaggctggcaggaaattgaacgaatgacacttcaagaagaccatgaatcttttcatttttttcagctggaaagctgagagcagacaaatggcagggaggccaagtgctatcaaccacatttagaaattttatttaatctgcacatcttaatttggtagaaagttttacaaataaaatttaacacaaaacaatttttttgaaaaaccatgttgacttaagcagagccaatgatgcaaagcataatgtatcagaagattcctgattcaactgctagcttgaagtcscccctacttgtgttctggaaagatggggtgttgtttatcatccacatatcaaaaagtaaacagcaatatttctgaaaccttttctttataaggagatcttcataaaacttgcattattactcttgttggatcataacacacctgagaaagattgggtggaggaaggtgaagaaggctggaaaagatttacaagggaataaatcaagaatctggtacaaattgactaatggtatcttctgcatctgccca

SEQ ID NO: 123037 - DNA, 571 bp, Homo sapiens
gctgctttcacgttcctcaccactgaggtcaaggacccgaggctggcaggaaattgaacgaatgacacttcaagaagaccatgaatcttttcatttttttcagctggaaagctgagagcagacaaatggcagggaggccaagtgctatcaaccacatttagaaattttatttaatctgcacatcttaatttggtagaaagttttacaaataaaatttaacacaaaacaatttttttgaaaaaccatgttgacttaagcagagccaatgatgcaaagcataatgtatcagaagattcctgattcaactgctagcttgaagtcccccctacttgtgttctggaaagatggggtgttgtttatcatccacatatcaaaaagtaaacagcaatatttctgaaaccttttctttataaggagatcttcataaaacttgcattattacycttgttggatcataacacacctgagaaagattgggtggaggaaggtgaagaaggctggaaaagatttacaagggaataaatcaagaatctggtacaaattgactaatggtatcttctgcatctgccca

SEQ ID NO: 123038 - DNA, 526 bp, Homo sapiens
aaccctcctggtggtcagatcaaagtatcatagtgtatatcagattcagtactatctgcagttttargcatttgctgggggtcttggaatgtatcctcaagaataagggggccctactgtaatagaaattacagtttgtgttatcattagaaatatattctttttggtggcagaattttctctttatttacttgtagaatttaaatttttgtctcaaacttttatgaaatagagtatacacatatcctacatggtaagcaggatataaatttgccttttcgtccataacagagggttttcattatgataacaataatttttctgaactatagataaaataaaaggcagcagtgcatagtaatgtaaatgtattgtttaaactgtcaagtcagtagagctagttcaaatcataattctttagtagctgtatagacaacttaccaatttcctcaagtctcatctgtaaagtgggaataatcattcctacctgagagaaatgttgtgagaattaagtgaaatatgcatg

SEQ ID NO: 123039 - DNA, 567 bp, Homo sapiens
actgcagtgggctccctataccaaggttgaactgacaggctggttgtggtggctgacgccagtaatcccaacactttatttgggaggccaaggtgggcagattgcttgagcccagaagttcaagaccagcctgggcacatgcaaaacctcatctgtacaaaaaaaaaaaaaaaaaaaaaaaaaaaaagaaagaaaaattagccagatrtggtggcacacacttgtaggtggaattaaagctgtaaaactacattcttcaaatggagccccagatgcagtccatgactaagatctaccacagaccactggaccggcctgctagcccatgctccaatgttaatgacatcgaaggcacccctcccgaggaaatctcaactgcaaaacccctactacaccccaattcagcaggaagcagttagagcagtcgtcggccaacctccccaacagcacttgggttttcctgttgagatgggggactgagagacaggacaagctggatttcctaggctgactaggaatccctaagcctagctgggaaggtgactgcttccacctttaaacatgggg

SEQ ID NO: 123040 - DNA, 459 bp, Homo sapiens
ttagatgtgtaaataggcacattaaaatagttatcgtaactatattccacatgtttaagaagatagaaaatggatttttcaattcaataagtgaaaaaaaagtagagaaaagattgaacamgttatatgatgacactaaagacataaaaaagatccaaacaaacttcaacagatgaaaaatacaatgtctaagataaaataataatggataggactaaaatcagattaaatactgcagaagaaaagattagtgaacttgaagacacagcaatcaaaactattcaaaatgtgacaaagagagaaagattgaaaaaaaataaagagagcattattgaactgtgggatagcattaagtagcctaatactgtggtttggctttgtgtccccaaccaaatctaatcttgaattgtaatccccatgtgtcaagggagagacctagtgggaggtgattggatcatg

SEQ ID NO: 123041 - DNA, 459 bp, Homo sapiens
ttagatgtgtaaataggcacattaaaatagttatcgtaactatattccacatgtttaagaagatagaaaatggatttttcaattcaataagtgaaaaaaaagtagagaaaagattgaacacgttatatgatgacactaaagacataaaaaagatccaaacaaacttcaacagatgaaaaatacaatgtctaagataaaataataatggataggactaaaatcagattaaatactgcagaagaaaagattagtgaacttgaagacacagcaatcaaaactattcaaaatgtgacaaagagagaaagaytgaaaaaaaataaagagagcattattgaactgtgggatagcattaagtagcctaatactgtggtttggctttgtgtccccaaccaaatctaatcttgaattgtaatccccatgtgtcaagggagagacctagtgggaggtgattggatcatg

SEQ ID NO: 123042 - DNA, 611 bp, Homo sapiens
aatgttttaatgtatatttaagacgaaagaataaaaaaacattgttgagcatttttttttcaaatttttatctcagcttaattttgaactgctcttaaaaactttgctggcactcaaagcggagaaaaagcaaagatgtttcttacattattattgattaaaaaaatgagaaacaacttagatgtacaaatatagagggtgtttaagtaaattatggtgtatccactgaatgaaaattaggcatgtataataatatttctgaaaattttacaaataattgataaacacttctgttttatattgagtataaaaaacatcattcaaactttcatatttaatatataaatgttcataatagctttattyttaataccaaaaaactagaaacaagccaaatgttcctcagaaggtaaatgaataaacaaattgtattgaattcctatagtggaatagtactcaatgatgaaaagaacaaactatggatgcatgaataaatctcaaaaacattatgccaagggaataaaagccaggcacaaataattacaaactctgtgtttccatataagaatttctagagtagacaagactaatctatggcaacaaaaaacata

SEQ ID NO: 123043 - DNA, 511 bp, Homo sapiens
gaattccatgcttctcattaccctatatttgatcagaagtttgctttgaaaaactgtgtcctacaaacagggtcctgctattcttagcaagcaacaagttcagcttctggtttcagatattgtagtgtgggcctcttccttcattcatggagagcaaatgatattyctaataaggagatttaagaaatggcgcgatcttctcctcgtatccacaaaaatctggttctggcaggagacctgccttaacattaaactaatcctagaccataggaggtgcatcttaatttactatctactagtttatattcctcatctgtttcccaaaacaagatgcatgtactacttgtggtttgggagattgttttgctggtacatagatggacttaaaaatgtgtgtgtgtgtgtattctttaacatggtatttgaaaaatgtaaaactagcatatcaaatcagtgatttcaggaacattattgcttaaaccaaagctaacataggatgttgctatggttt

SEQ ID NO: 123044 - DNA, 543 bp, Homo sapiens
gaattcagacagtcaattattaagctactcaaggggatttcagggaaaggtgaaaaccatcataaagaaatttagaaagcatttcaggatatgaatgaaaaattttctagaaagacagatattttaaagaaaaaccaatcagaacttctggaaatgaaagacatacttagggaattacacaatgctgtggaaagttttaacaatagactacaacaagtagaagaaagaatttcagagctcaaagacaaggcttttgaattaacctaatcagacaaaaataaagaaaagataatcaaaagaaatgaacgaagtcttcaagaaatatgggattatgtagaatggtcaaacctaagaataattgttgttcctaaggaagaggagaacacagtaagtctgggaaacrtatttcagggaataattgaagaaaaattccctggtctggctagagatctaaatatccaaatccaagaggatcaaagaactcctgggaaattcattgcaaaaagatcttcaccaaggcctgtagtcatcaggctatctaaa

SEQ ID NO: 123045 - DNA, 622 bp, Homo sapiens
ggctggaaaggaatttagagttttattactccaaatctttgttttattaaaagagaaaattgagacccagaaagaattaagaatttacccaaagttccaaaggggtacagtaatggagccaggtcttagatttagatgtcttgatttcagtttactatactccttttatgcctttctgcctcttctcctctagggaattccctaggtaaatatataccccttcttcttaaaagaggattatcagccaggcacagtggctcatgcctgtartcccagcactttgggaggccaaggcgggcagatcacgaggtcaggagatcgagaccatcctggccaacatggtgaaaccctgattctactaaaaatacaaaaattagctgggcatggtggcatgcacctgtagtcccagctactcggaaggctgaggcaggagaatcacttgaacccaggaggcggaggttgcagtgagctgagattacaccactgcactccagcctggtgacagagtgagactctgtctcaaaaaaaagagagagagagagaggatagtcttggtcaatacgatttttgaacgtgacaaactatccccattttctttgctctaccagagttcttgacaaag

SEQ ID NO: 123046 - DNA, 622 bp, Homo sapiens
ggctggaaaggaatttagagttttattactccaaatctttgttttattaaaagagaaaattgagacccagaaagaattaagaatttacccaaagttccaaaggggtacagtaatggagccaggtcttagatttagatgtcttgatttcagtttactatactccttttatgcctttctgcctcttctcctctagggaattccctaggtaaatatataccccttcttcttaaaagaggattatcagccaggcacagtggctcatgcctgtagtcccagcactttgggaggccaaggcgggcagakcacgaggtcaggagatcgagaccatcctggccaacatggtgaaaccctgattctactaaaaatacaaaaattagctgggcatggtggcatgcacctgtagtcccagctactcggaaggctgaggcaggagaatcacttgaacccaggaggcggaggttgcagtgagctgagattacaccactgcactccagcctggtgacagagtgagactctgtctcaaaaaaaagagagagagagagaggatagtcttggtcaatacgatttttgaacgtgacaaactatccccattttctttgctctaccagagttcttgacaaag

SEQ ID NO: 123047 - DNA, 552 bp, Homo sapiens
gagactatacctgggaaaccctgagaataataagtgtcagtaagtgttagctgttgccatcatcctcatcttggccaatagacactgagagatcacctcacattagcacttaatccatgtaacccttttgctcttcacacrgcctccaatatttatagtccatatcaagcccattgaggagtgtagctttcagacccagtcctataacactatctacttagagaaaagtgagaaaaagaaggggaaaagctacatgaccttctcttccttctcccgtgacatctaaagtgtccataaaagtcacaacagataataaaaagtacatgttgattgacaagttccttgaatttcactgatttctacaaacccagaaatcaagaaaccacgtttcctgtagaaaacactcattccacaaagatgtcacaggtaccagagaaaagcagagagcaagggaattaattaattagtttcagttaggcaccaatcaaataataccattatcttcctacctaatagcctgggacttaatcacgagctactactgaccataaa

SEQ ID NO: 123048 - DNA, 614 bp, Homo sapiens
tgcttgccgagtgtcattaaaagggagactacttatcacaacatttagcagcacaaaatgacactaacataaatggtgctgccttctttaagggacagcttccaaatggttcactagcagctctgatctttaagctctggatctttgggtgacacacagttccactcagcagctttgctcaggaaaacaaaaaaggtatgatcacagagtcatgtaaagtatccagattaaaatgggatttaaaatcagtaaaaatggtgtgcaagaaacagaagacagaacaaaagagctctkactcacagagccagacattcagattaaaaaatagatatgagttcacttctgaaggtgctaagggaaatgtcaccacactctaatgccctgatgatggtttccttttggcttcaataaataactgaaattacaaagatcctgtgacaatgtgataagcacgtagtgcaagtagcacgtgctcttaaatgctatttattggcaacacattttaccagaaaatgtcatttcctatcaaactttaccagtaaacggagtcaggatgacagaaacaaagaaggaaaggaacacatgttgtgagtccacaacaggcattagctgag

SEQ ID NO: 123049 - DNA, 614 bp, Homo sapiens
tgcttgccgagtgtcattaaaagggagactacttatcacaacatttagcagcacaaaatgacactaacataaatggtgctgccttctttaagggacagcttccaaatggttcactagcagctctgatctttaagctctggatctttgggtgacacacagttccactcagcagctttgctcaggaaaacaaaaaaggtatgatcacagagtcatgtaaagtatccagattaaaatgggatttaaaatcagtaaaaatggtgtgcaagaaacagaagacagaacaaaagagctctgactcacagagccagacattcagattaaaaaatagatatgagttcacttctgaaggtgctaagggaaatgtcaccacactctaatgccctgatgatggtttccttttggcttcaataaataactgaaattacaaagatcctgtgacaatgtgataascacgtagtgcaagtagcacgtgctcttaaatgctatttattggcaacacattttaccagaaaatgtcatttcctatcaaactttaccagtaaacggagtcaggatgacagaaacaaagaaggaaaggaacacatgttgtgagtccacaacaggcattagctgag

SEQ ID NO: 123050 - DNA, 508 bp, Homo sapiens
tcaggattgcacaattagcaaggggcgaagctaaaagtcaaactcaggtctcctggccgcatgcacttgattttccctccattaagaaagatcagtattttttttttaatcaagtcagcattctcaagtttgaaattcactgtcatttgaccactttgttccccaaatgtgatttttcaattaaaaggatttttcaaatggaaaggaaaaaaacctcaatcccatactgcatttgatttactgcttttacgatttaagggaaaaagaaatggtggtggtggkgggggagggaggtggtgaaggagcaaagaaaacaaaatgaacaacctcttcaccccaacacatcttccagccacctctgggttacatttaccaggaaaacttggatgccagtcggccctcccttacctctctgtatcagaatgagtcccagatccacactgagattcccagggtagacacaagatcaggggcatggtggaatccacctctcaaaggccagagtttg

SEQ ID NO: 123051 - DNA, 509 bp, Homo sapiens
gggggagagattttaaggaattggctcacatgattgtggaaacttggtgagtccaaaattagatgggagacgtgaggaggccggcaggttgcagactcagagaagagatgcagtttgagttgaaagacagtctgctagcagaattcctttctgcttggggagaagaggccagtctttgttctattaaggccttccattgtttggatraggcccacccacattatggagggtaatctgctttactcaaaatctatctcatccaaaaaacatctttgcagaaacatccagaataatgtaccaaatatctgggcactgtggcccagataagtagacacgtaaaattagccatcacaagggagttgtgggtctcattgtgaactggaaagatgttgccgaaaaggatccactatcttatctcagtgggtggagtttccagagagttagagattacatctggatttttgttgttgctgttgttgtttttgagacagggtcttgctctgtcaccc

SEQ ID NO: 123052 - DNA, 511 bp, Homo sapiens
gacaggtgcctgggagttaggcacagttggggtgggtcgagttgtctaagggtacctaggactgtcatacccacacctgagttggctccttccttccttcattgaacagacattattaagagcctacactgtgccaggctttgctaggtgctggggatgcaatggtgaaggtgaaaaacagatgggtcctttgacttcatggagcttccagcctatgccaatgacaggttaataaaaaaggagctgagtgctctgcagtgggtattaaagatggggtgagcaatgagtgagtgtattttctgtagagattttacaaacaataatacaaaggattaaaagttgttctgttttttatgatcaccacgcatctgcaattctaaaccacrtcagtgataaaacacttgaaggggtccataatacatcattgtagcataaaaattattttgagctaaaggcatttggttcctgaaatcttctatctgattaaaagcagagcctcccaacagaattc

SEQ ID NO: 123053 - DNA, 589 bp, Homo sapiens
agccaagaagagtattttatgatataattaacagtgttatttttcatctagctgtgcttccatgttaatccagatgttttgctgctgttcatctttgtcacagagagaagccyaataataacaaattcaagtgatgttattatctttcttaatagatcagaggcctcttctgagtcttatactgtaatcaaatagagaacaaacatctggatttaattttcacccttctcgtgagataataaacagcacagtccaaggaaatttactgtttctttaataatttcaatactacaaattcacaggagagaaaaattatcgttctgaatgtattaaaaacactaaatccagccccttgagtcctcaaatgatcaccaattttaaaatggacaagccactggctaataatgactacacaagcctgccaaggaaaacatcactgcaggctgctctagtaagtgcttggaatacagaggaagaatgctctttgtgcagtactatttggatctacttatctgatggcattaggttatcacacacccacagggctttccagaattcctcccacttcccgcccttgacatgctgagca

SEQ ID NO: 123054 - DNA, 589 bp, Homo sapiens
agccaagaagagtattttatgatataattaacagtgttatttttcatctagctgtgcttccatgttaatccagatgttttgctgctgttcatctttgtcacagagagaagcctaataataacaaattcaagtgatgttattatctttcttaatagatcagaggcctcttctgagtcttatactgtaatcaaayagagaacaaacatctggatttaattttcacccttctcgtgagataataaacagcacagtccaaggaaatttactgtttctttaataatttcaatactacaaattcacaggagagaaaaattatcgttctgaatgtattaaaaacactaaatccagccccttgagtcctcaaatgatcaccaattttaaaatggacaagccactggctaataatgactacacaagcctgccaaggaaaacatcactgcaggctgctctagtaagtgcttggaatacagaggaagaatgctctttgtgcagtactatttggatctacttatctgatggcattaggttatcacacacccacagggctttccagaattcctcccacttcccgcccttgacatgctgagca

SEQ ID NO: 123055 - DNA, 623 bp, Homo sapiens
gtttaattgttgaatatagttttctttaattctttgactatatttgtaatggccaatttgaagcctttgtaactttgcagattaaaacaagtatattatttcatagtgtctgtaggtccaaagtctggccatggcttagttggattctctgcttagagtctcaccaattgaggtgtcatctagggctgtgatcttatcttggactcagggtcctcttctaggctcactgggtgttggcagaaatcacttccttggrgtgataggatggaccaatggtctaaaagaccatttcccattccctgctatgaggccctctccacatgacatttgctcatttaaggctagtaggagagtgtttgttactgattcttatctctttcaaggggccacttgattaagttaggcccactcaggataatttcccttctgtttacacagaagtcaactgattagggatcttaattacatccacataattgcatcactggagtactataccatcatactcacagatcctgttcatactcaaggagaaggggattatgtggggtatgtacaacaaggggtcctcttagaattcttgcctaccacagcccaccctctggcccccaacaattgacatc

SEQ ID NO: 123056 - DNA, 623 bp, Homo sapiens
gtttaattgttgaatatagttttctttaattctttgactatatttgtaatggccaatttgaagcctttgtaactttgcagattaaaacaagtatattatttcatagtgtctgtaggtccaaagtctggccatggcttagttggattctctgcttagagtctcaccaattgaggtgtcatctagggctgtgatcttatcttggactcagggtcctcttctaggctcactgggtgttggcagaaatcacttccttggggtgataggatggaccaatggtctaaaagaccatttcccattccctgctatgaggccctctccacatgacatttgctcatttaaggctagtaggagagtgtttgttactgattcttatctctttcaaggggccacttgattmagttaggcccactcaggataatttcccttctgtttacacagaagtcaactgattagggatcttaattacatccacataattgcatcactggagtactataccatcatactcacagatcctgttcatactcaaggagaaggggattatgtggggtatgtacaacaaggggtcctcttagaattcttgcctaccacagcccaccctctggcccccaacaattgacatc

SEQ ID NO: 123057 - DNA, 559 bp, Homo sapiens
tcagtttagtagccatgagacacatttgactcctaagtacttgaaatgtggctaagaatgagtgagttactaaattttaaattttgtttaattaaaaatttttttttggttgggaggggcagggtttattctgttacccaggctggagtgcagtggcacaatcatggctcactgcagcctcaacctcccaggctcaagtgatccttctgcttcagcctctcaagtagctggaactagaggcatgtgccaccacgcccagctaattaaaaaaawttttttttgtacagacaggatctcactgtgttgctcatgctggtctcctggtctcaaactcctgggctcaagtgatcctcctccctcagccttccaaagtgatgggattataggcatgagctgccatgcctggccttaattttaatttttaaaaatttaaatttaagtagtcttatgtggctagtcccgctgtagagcatgtggctagtgactgccaagttgaacagcacagatgtgtattcccttaggtaggctccccagttctgctattgtaaccttctaaata

SEQ ID NO: 123058 - DNA, 600 bp, Homo sapiens
ctccagaaagttgcttggagttactggagtcctgaaatgctgtcagggtgggatcatgcagttgaaagccccctatatcatgggccaaaaagtgagacccaaagaaagggtctcagctgggcacggtaactcacacctgtaatcacagcactttgggaggctgaggcaggcggatcacgaggtcaagagattgagaccatcctggccaacatggtgaagccctgtctctactaaaaatacaaaaattagctgggcatggtggcgtgtacctgtactcccagctactcgggaggccgaggcaggagaatcgcttgaacccaggaggcggaggttccagtgagccaagatcatgccactacactccagcctggcaacagagcgagactccktcaaaaaaaaggaaagaaggaaggaaggaaggaagggagggaaaaaagaaagggtctcatcttcagggtggtgggaggcagggcccacagccggctcttccgcccactagtccagggtgcacctggggcatccagtgcaggcactgctcttgggaaacacggggaaaagacaaaccctgtcccccatggtgcatagataaataagccaact

SEQ ID NO: 123059 - DNA, 600 bp, Homo sapiens
ctccagaaagttgcttggagttactggagtcctgaaatgctgtcagggtgggatcatgcagttgaaagccccctatatcatgggccaaaaagtgagacccaaagaaagggtctcagctgggcacggtaactcacacctgtaatcacagcactttgggaggctgaggcaggcggatcacgaggtcaagagattgagaccatcctggccaacatggtgaagccctgtctctactaaaaatacaaaaattagctgggcatggtggcgtgtacctgtactcccagctactcgggaggccgaggcaggagaatcgcttgaacccaggaggcggaggttccagtgagccaagatcatgccactacactccagcctggcaacagagcgagactccttcaaaaaaaaggaaagaaggaaggaaggaaggaagggagggaaaaaaraaagggtctcatcttcagggtggtgggaggcagggcccacagccggctcttccgcccactagtccagggtgcacctggggcatccagtgcaggcactgctcttgggaaacacggggaaaagacaaaccctgtcccccatggtgcatagataaataagccaact

SEQ ID NO: 123060 - DNA, 585 bp, Homo sapiens
aaaaaaaaaatttagctggctgtggtgacatatgtctatagttcgagatactcaggggtctgagacagggaaaactgcttatgtccagaagtttgatatttttgaggttacagtgagctatgatcatgccactgtactctagcctgggtgacaaagcaagactcttgtcttaaagaaaatcaaaatggtaaattttaggtatattttaccataataaaaataaaggaagttagttggactacaaaaaaataaatttccttcaatacagaatatgggaggagttcacagtgttgagataatgggaagcaaaataccatgaagtaagaggttgataatagtgcccaagtcaagataaatactcacaacatattgccaataagaaaaggcattgcaaatctcccactgacatagaaggaaatgacctaatatgatgaccttttaccagtgatatggtttggcyctgtgtccccatccaaatctcttgttgaattgtaacccctaatgttggaagagggatgtggtgggaggtcatcggatcatgggggtggatttcccccttgctgttctcgtgatagtgagttctca

SEQ ID NO: 123061 - DNA, 585 bp, Homo sapiens
aaaaaaaaaatttagctggctgtggtgacatatgtctatagttcgagatactcaggggtctgagacagggaaaactgcttatgtccagaagtttgatatttttgaggttacagtgagctatgatcatgccactgtactctagcctgggtgacaaagcaagactcttgtcttaaagaaaatcaaaatggtaaattttaggtatattttaccataataaaaataaaggaagttagttggactacaaaaaaataaatttccttcaatacagaatatgggaggagttcacagtgttgagataatgggaagcaaaataccatgaagtaagaggttgataatagtgcccaagtcaagataaatactcacaacatattgccaataagaaaaggcattgcaaatctcccactgacatagaaggaaatgacctaatatgatgaccttttaccagtgatatggtttggccctgtgtccccatccaaatctcttgttgaattgtaacccctaatgttggragagggatgtggtgggaggtcatcggatcatgggggtggatttcccccttgctgttctcgtgatagtgagttctca

SEQ ID NO: 123062 - DNA, 529 bp, Homo sapiens
ttgctctaatttgagtgtcgtttccctttattggagcatttgaaaacagacatttaagggcaaaagagatggaacacatctgaggtaaatcgtgtatctatcttcaggctgtgcccaacctttagaaccacctagaaaggtacaaagctgagagcctctctcagatttttcatatagtatttcaagactcacctcttaattgcacccttcccccctcccattataaagagcatggaacctagracccaccgccttgtgtggaagtccacacaccactggtcacaggccactcacaggtttgggggactccatgatgattcctagactttctgagtttcccttgcctcatctgaaaaaagggccaggacctaactgcaggttgtgagagttgaatgaaatcaaataacaacttttcagtcagtgacagactgcatatacaaaggtggtctcatacgattataatagagctgaaaaaattcctattgtctctaaagaccttccaggaggacaggatgtgaggtggcatcag

SEQ ID NO: 123063 - DNA, 529 bp, Homo sapiens
ttgctctaatttgagtgtcgtttccctttattggagcatttgaaaacagacatttaagggcaaaagagatggaacacatctgaggtaaatcgtgtatctatcttcaggctgtgcccaacctttagaaccacctagaaaggtacaaagctgagagcctctctcagatttttcatatagtatttcaagactcacctcttaattgcacccttcccccctcccattataaagagcatggaacctagaacccaccgccttgtgtggaagtccacacaccactggtcacaggccactcacaggtttgggggactycatgatgattcctagactttctgagtttcccttgcctcatctgaaaaaagggccaggacctaactgcaggttgtgagagttgaatgaaatcaaataacaacttttcagtcagtgacagactgcatatacaaaggtggtctcatacgattataatagagctgaaaaaattcctattgtctctaaagaccttccaggaggacaggatgtgaggtggcatcag

SEQ ID NO: 123064 - DNA, 383 bp, Homo sapiens
aatgctcactgacagctgtgattgttttccacgtaactttgctgttggttagcgtcaatcttgcatgcaaaacctgaagcacggcttgaattatcaagtgaatgtgaatgtgaatgtgtctttttctgaggtctattttcgtgtttagctgctcttccaaaatcgtcacgtcctgctaaagacccagggatgaaatggtcgctgtggcttcccctgtgcctaagcattttatggcagcactggcgtgggaggcagctgccagcacagtgatgtggggcggccrcagaggcaggctgcagtgctgtgggtggagcacgctccacgcagcgctcagctccctgcggccttcagctgctgcagatgccacaggcctggggatgtgg

SEQ ID NO: 123065 - DNA, 558 bp, Homo sapiens
cctgctcgagtctgctcccactaatttcctctaaggctgacagatcagaggctttcctcgaactgttccttttggagctgagaagccctcctcgtaatcctgctgcttgtccgcaattaatccttccagttgcctcattattacctccaccacccacagacagaggaagctctgacccactggacactggctcctgactgaagcttcaaaggtgccaatcacaccctcatcagaaaggtgcctgctgtcagcatcagaggttttcatcccctcctccccgctgatcaaacattcttcctcagaagattaattcagagtccccgcccatttcctcccatatcctctttccctttttggtttacccaatgatccatctttgcctcgaaaagggaagccacggataatagaagtcctttcaaaacaaaagctgggcaaaggcaaatttaaatcccagctgttatcaacttttttttttttaacccatttaaacatcttaaggcagtgaggattaggrcctggcctgaaatgccattctttgatcaaagaccccaagacttt

SEQ ID NO: 123066 - DNA, 672 bp, Homo sapiens
tacaatgattaaggcacacagactakgctgggcatggtgggtcagacctgtaattccagcactttgggaggccgaggtgggcagatcacttgaggccaggagtttaaaaacagcttggccaacatggcaaaacaatgactttactaaaaacacaaaaattagccaggtgtggtggcacatgcctgtagtcccagctacttgggaagctgaggcaagagaattgcatgaacctgggaggcgggaggtggagcttgcagtgagccgagccgagattgtgctgctgcattacagactgggtgacagagcaagaatccatcataaataaataaataattaaatacacacactgtttccccattttgcaaatttgcaagcacagcagtcctagttatttggtttctgacatttcagagtggccttttgttcacagatggagccaccctgtttagccatgtctatggcatcttaatgcccaattgggatagtatgacacttctctatattaactgtccaatctacaagccaattgtcacacggctttctggtgtcagtcaaagcaggcctgtgtaacatcagcccaatctatctagaatgcaggagcgacacaagcgtgtgcataaagagtcataaagtagtatcatggggacttgtcaccagaaacaccattagttg

SEQ ID NO: 123067 - DNA, 606 bp, Homo sapiens
tggttctttaatttaataggactaaaacacaaggacttcaccctggatcatgaattgaacctccttttctagggtattttatgacagaagcatctcactgagaatctagccacccgctaggagtactcaagcatagctttgccaagaaagtcggtgaggaaagcaagaatagaaaacagcaagctgcccataaaaatggggagtaatatctgagtttttttaagtcatagagcagcttgagcaaatctcaagaaaaagaaacttgctacataattctttctcactccattgcccctctaaatagcaaacaggatatgagtccttgtaaatacctataaattttcagggagaaaaacaagtctgatctttgtgtacagagttctaggctgtaagraacatggttagatttctgtttcccttagaggaagatgccagaacagcattttcccatcaagtgttgataagaaaggcatttagcatttcataggatgaggctgctgtaagtgggtggtatgacatgataaattatggccaatgtcatattaataattacaggcccttccacacatgctcactctgttctcaagccaatgatatgttatcctg

SEQ ID NO: 123068 - DNA, 674 bp, Homo sapiens
taaacatcaaatgattgactcctttgtatagctcagccctccttttgcaagagtaaaagagctagctggtgtcgacgtaagctacagccacccactaataagtttaagataaaaggccaatatatttaaataagattcagacataatgtaatagtayttgttaccaagccccatctaattatatcaatcttttattaccagacccatgagtacagggaactctattataatttctctttataatgatctcttcactatctgactcctcgaactctgtagtaaattactcatccactggcaatcatgagtaaacatcaactcaattaagaattgataaataaacagttcactccgaggcttgtcgtgatacggatgggagaatcactgggtgcctgccagcatgagcttggctgggaagttctgaggtgtggatgggttctctaaggctgtactgcttctgctgtttatacgagatgttctggctgatgtttcctgctcctatcctgtctttggaggtggagaacgacttattcaagtgtctgctctgggtctaaacgtggaagagctgctcatcttatcctcactctgcactacatagcatctcatatctgagagaaaaccagtaggaaaacagtaaaatgcaagaaatgtggcataacaataaagtacaagga

SEQ ID NO: 123069 - DNA, 674 bp, Homo sapiens
taaacatcaaatgattgactcctttgtatagctcagccctccttttgcaagagtaaaagagctagctggtgtcgacgtaagctacagccacccactaataagtttaagataaaaggccaatatatttaaataagattcagacataatgtaatagtacttgttaccaagccccatctaattatatcaatcttttattaccagacccatgagtacagggaactctattataatttctctttataatgatctcttcactatctgactcctcgaactctgtagtaaattactcatccactggcaatcatgagtaaacatcaactcaattaagaattgataaataaacagttcactccgaggcttgtcgtgatacggaygggagaatcactgggtgcctgccagcatgagcttggctgggaagttctgaggtgtggatgggttctctaaggctgtactgcttctgctgtttatacgagatgttctggctgatgtttcctgctcctatcctgtctttggaggtggagaacgacttattcaagtgtctgctctgggtctaaacgtggaagagctgctcatcttatcctcactctgcactacatagcatctcatatctgagagaaaaccagtaggaaaacagtaaaatgcaagaaatgtggcataacaataaagtacaagga

SEQ ID NO: 123070 - DNA, 478 bp, Homo sapiens
ttttttcctgctcaagatatcaccatgtgctgtcccctctgcccttgtctacacccacgtgtccttctcccgccccggccacactcatggggcacactgtccttccctggctaatcctcccacactcgataccactttctctgggatattgcacccgatcytcagccgcagttgtcttcctatgacccactcccacagctctcgccacaatggtaattgtttgattcctacttgttgtccctgtgagactgcaaaccccagaggacaggggccctgggttctccttcgcctctggatcatcagcactaactgaatacctggcctagaagagatgctaacgatgctgaatgaataaataagtggaaagactctcagtaaagcaaaacctttctttaccattttatggccgtcaaggaggaaaacacattatcagtggaaaacgcaaaatgaggggatttgcttagcaaacgatgaattc

SEQ ID NO: 123071 - DNA, 632 bp, Homo sapiens
tgcttgattcctgaactcttctttacagtataattttaaaatatttgagtgggatacgatggagaggagggaggtgggggaagaaatgccccatggaaaacccactcatcaggttgagagtgtggagaagccctgtgtatctgagaactcttaatcatccacagacatggtatctctcaaagagaagtgggtgtaattccaaaatctaattttggcaggcgctcctgactaaatacttaatctggagatgtcttcaaggcaggcggaggttttcagtcctggctgcacattagaagtcccaggggagctttaaaaaattcccacgtcctccctgcatcccagactaattaatcgggatctccgagggtgggaccacacatcagggttttgtaaatttccctgggggtttggtggggttgggggtggaggcgtcyatcctatggccaaggttgagaaccactgctttttaaaagactgtttgcttgtttttgagatggggtctcgctctgtcacccaggctggagtgcagtggcgcaatctcagctcactgcaacctctgcctcctgggctcaagcaattctcctgaaaaaggctgttggttattaatgcttccccacagctattctattcat

SEQ ID NO: 123072 - DNA, 311 bp, Homo sapiens
attcagctggaatcccccaagtactgctccttggtcctattctccctctaccccaagccccacaaacaaaaccatcatcccaaatctgcttccaaatgtttcaaacactacatatcacggaacaacatgtttttctggaaacrtatttttgagatctatgcatggtgacttatgttctagttccttcattttaactgcatatgatattcctctataaataccacttatctatccatttgcctctgttgttagatgtttagtttatgtccattttttccccttttactaataatgctagagaagaacatttt

SEQ ID NO: 123073 - DNA, 559 bp, Homo sapiens
tctcttccaatatgtatgccattaatttactctccttgtttaactccattagctaagccctccagtacaacaatgaatagatatagtaatagtggacatcatcagtctcaaagggaaacccttcaaaacctcactcatatgctgtggggttttatagataactacacttaattaaatcaagtaagttaccttctatttttagtttgcatagttattttaaagtcaggatctggcagttccatctctggagcctctcataaacggagttaaaaacaagtgacaaactgcaagaaaatatttgtgagtcacagaacagaggactaacctccctaaagaattctggttgcattgcccatttccgttttctcacacatggttcaaaacactggtcctgactattgcgtcaggaatgaaagtttcaccrtctcatcagcatgaattagatgaaagacaatcttttcaaaggaatacatttttcataaagccaaatgtattcctttgaaaagattgtcttttcttctgtaggtatagtctctctaatttttaacactaaaatact

SEQ ID NO: 123074 - DNA, 598 bp, Homo sapiens
ttgcatcttgcttcatcctccctcctaattcaattattcatttgtttaaaataatttcctactgaaggggaccagaatatgtcaccccaaaatacgccactttggcaaattaactattttgaacagaaggcaattgagaaacagcagatgcgagaagggctctctgacctctccctttcttcctaaaatcacgccggacatacgtttcccgygagaaagaacccttccctgcaggaagaggagaacactcatctctggaaatgtgagtcaatttgaaaatgaatctgtacaaaccttaataaaataacccttaccttctattagttttcctcatatgcttcctagtcactttcccaccatttgctacccttattgtgaactcacactgcatttccacagcacatcattaaccctcatgtgagttacaacatggaatcacaagtgattatctttgctagtacaaaacaaaaaaaagatagtaatagtgacttatttactgtagaacctattaaaatgttatagttaagtccttgtcagagttactgtaataaaccaagtttgattcaacacaaaagttttagttgaacatttctgctgt

SEQ ID NO: 123075 - DNA, 598 bp, Homo sapiens
ttgcatcttgcttcatcctccctcctaattcaattattcatttgtttaaaataatttcctactgaaggggaccagaatatgtcaccccaaaatacgccactttggcaaattaactattttgaacagaaggcaattgagaaacagcagatgcgagaagggctctctgacctctccctttcttcctaaaatcacgccggacatacgtttcccgtgagaaagawcccttccctgcaggaagaggagaacactcatctctggaaatgtgagtcaatttgaaaatgaatctgtacaaaccttaataaaataacccttaccttctattagttttcctcatatgcttcctagtcactttcccaccatttgctacccttattgtgaactcacactgcatttccacagcacatcattaaccctcatgtgagttacaacatggaatcacaagtgattatctttgctagtacaaaacaaaaaaaagatagtaatagtgacttatttactgtagaacctattaaaatgttatagttaagtccttgtcagagttactgtaataaaccaagtttgattcaacacaaaagttttagttgaacatttctgctgt

SEQ ID NO: 123076 - DNA, 598 bp, Homo sapiens
ttgcatcttgcttcatcctccctcctaattcaattattcatttgtttaaaataatttcctactgaaggggaccagaatatgtcaccccaaaatacgccactttggcaaattaactattttgaacagaaggcaattgagaaacagcagatgcgagaagggctctctgacctctccctttcttcctaaaatcacgccggacatacgtttcccgtgagaaagaacccttccctgcaggaagaggagaacactcatctctggaaatgtgagtcaatttgaaaatgaatctgtacaaaccttaataaaataacccttaycttctattagttttcctcatatgcttcctagtcactttcccaccatttgctacccttattgtgaactcacactgcatttccacagcacatcattaaccctcatgtgagttacaacatggaatcacaagtgattatctttgctagtacaaaacaaaaaaaagatagtaatagtgacttatttactgtagaacctattaaaatgttatagttaagtccttgtcagagttactgtaataaaccaagtttgattcaacacaaaagttttagttgaacatttctgctgt

SEQ ID NO: 123077 - DNA, 557 bp, Homo sapiens
ttgttatagtttctacagtagagatataggggataagaggataaaatgatcatttctactttggagaaaaaaggcctttatttttaaagtgacacttgaaataagtctctatgaaaggtcagtgatacaatgtgaaaggaaattaagaaaacaattgcatcaacattataaataaaattataaaataattaggaatacaaaaattttaaaatacttaggaataaacttaaccaaggaggtgaaagatgcatattctgaaaactatgaaacattgctaaaagaaattaaagaaaatacaaataaatgaaaagacatcctgcctgttttaatgaaccgaaggacwacatattgttaaaatgccaatactgctcaaagcaatctaatgatttaatgtaaccctatcaaaatcccaatggtattttctgcagaaatttaaaaaaaatccatcctaaaattcatattgaacctcaaggatctctgaatagcaaaacaatcttgataaagaagatcaaagttagagattttacacttctgatttcaaaagttactacaaatct

SEQ ID NO: 123078 - DNA, 619 bp, Homo sapiens
aaaaataatttttcaatgatagacatacttctgttgacactcctgtggaccaggaattgtgtttggaatacatactactttttttttggaaacagagtctcactcactttctttcgcccaggctggagtatcgtggcctgatctcggctcattgcaaccttcgcctcctgggttcaagtgattctcctgcttcagcctccctagtagctgggattacagacatgagccaccacgcctggctaatttttgtatttttagtggagacaaggttgcaccatgttggccaggctgctctcgaactcctgacttcaggtgatcygccaagtgctgggattacaggcgtgagcccctgtgcccagtctagaatgcatactacttttaacactactcagaattgcacctctcaatcagttctgcacaaaatgacttggagtggtcttgagcaagcagtcagggatcttgaggcatccccacattccaacctgaacaaatacaggaaccaaaattcagggaggaaaccaccgtggttaccatatagtagagaacatatgatatggaatagcaaatgggaaccaacaaacaagacaaggcaaaaccagtcagcaaaacaaactgccat

SEQ ID NO: 123079 - DNA, 638 bp, Homo sapiens
agggtatctttctgttactgatttcttatttgaatccattgtggaacaaaaacatgcattggatgagttcagtatttttaactattgagacttgttttatggctcagaatgtggtctctcttggcaaaggttttctatacactaaaacaaaagtgtattctgttgttggctggagggttctgtaattttcagttaggtggatttggttagtactgtagtttatgtcttctgtattttcacagaatttctattttatcagctcttgagaatggtcttgaaatctcaaactgtaattgtgtatcatctattaaccttttagttctatcagtttttgcttcaggtgctttgatgctcttgttaagaggcatatatgcatttaggatttttacgccctcttgaagaattgattccctcattattatataatatctcttccgggtaatactttttccgaagtctgctttgcctgatattgattctttagctttctttccattgcattagtgtggcatacctttttccgtattattacctttaaccttcctgtctcttcatatttgaagtggattttttttggtasacatcatagttgattctgattttttaatccaaatcaacatctctgactgttcattgga

SEQ ID NO: 123080 - DNA, 571 bp, Homo sapiens
gagaattaacaacagaaccttaaattcaaagaaaatctaaatagcgtcttataaacagctaagaatgtgtcactgatgtgacatcctagcaaagatgaaaagtggaggtccatccaggtgcagaatcctgggagctgtttgccatgaaacccttttcagtggtagagggcttgactgtttgtttgtaaatggcttctttaagtaaatccttaaggtagaaagcaaagatagttttggccttgccttgtttttcaaacaargaaacagactccaaaaggtggcatgccttatccagggccccactgctatcagggaactggacttgaactgtcacctggggctctatgtcaatgccccggtgttatccttaccaccccataatctaagtgaacagtatttctggagagaaggcacttctcagcgtgtatatacagatatcctctgggagcgattcccagtccatctagataatttgaaaggctaaaatagtatatactttttgcaatctggggttacatgtcttactgttattttagtttaaaatcatgatttttgttaaatactaagtccc

SEQ ID NO: 123081 - DNA, 655 bp, Homo sapiens
aaaacattgtatatatagcacatggctgtatgtacaatttttctttatcaattatatctcaataaagctgggaaaaactttaaaatacatttaagaaacaaagttaaagtaataaataaggagtcagaaataaaggtgtcagcagagccatgctccctgtgaagtctctagggaagaatccttccatgtcttttcctagcttctggtggctttttgatccttggcattccttggcctgtagctgcatcactccaatctctgcttccatcattacatgcctttcttcccccgtgtgtatctgtgtgtcttcttcttataaggacattagtcattggatttagagagcctactaatataaatgtaactaattatacctgcaaagaccctatttccaaataagrtcacattttaaggttccaggtgaatataaacctcaaagttaatgaaataagacaatcaagagatggcaacaggtataagacagatatgttagaattatttgacaaagattttaaagcattgtaaaaatgctccaatgagcaattataaaaacacttaaaaatgaaaaaatagaaaatctcagcaaagaaaaagaatatataggaagaatcaaataaaatttccagaacaggaggatacaacaattgaaataaaa

SEQ ID NO: 123082 - DNA, 655 bp, Homo sapiens
aaaacattgtatatatagcacatggctgtatgtacaatttttctttatcaattatatctcaataaagctgggaaaaactttaaaatacatttaagaaacaaagttaaagtaataaataaggagtcagaaataaaggtgtcagcagagccatgctccctgtgaagtctctagggaagaatccttccatgtcttttcctagcttctggtggctttttgatccttggcattccttggcctgtagctgcatcactccaatctctgcttccatcattacatgcctttcttcccccgtgtgtatctgtgtgtcttcttcttataaggacattagtcattggatttagagagcctactaatataaatgtaactaattatacctgcaaagaccctatttccaaataaggtcacattttaaggttccaggtgaatataaacctcaaagttaatgaaataagacaatcaagagatggcaacaggtataagacagatatgttagaattatttgmcaaagattttaaagcattgtaaaaatgctccaatgagcaattataaaaacacttaaaaatgaaaaaatagaaaatctcagcaaagaaaaagaatatataggaagaatcaaataaaatttccagaacaggaggatacaacaattgaaataaaa

SEQ ID NO: 123083 - DNA, 585 bp, Homo sapiens
agcactctactggcagagttcttccactgtctcaattacatgtgcactggcaggtctgagcctctttttttttttttttttttttttttgagacggagtctcactctgtcgcctaggctggagtgcagtggtgtgatctcagctcactgcaacctctgcctcccgggttcaagcaattctcctgcctcagcctccccagtagctgggattacaggtgcgtgtcrccatgcctggctaactttttgtattttcagtagagacggggtttcaccatgctggccaggctggtctcgagctcctgacctcgtgatctgcccacctcagcctcccaaagtgctgggattacaagtgtgagccaccgcgcccggcctgagcctcattttttaatttgtaaaatgaaagactagtatttgaaaaatctctaacattttttctagatcttgtcatttatggctctatgaaatgtccttatcctccagcactgctttgccaagttttcattgtagcaaattaaaataaaagaatatcaaccaggattcatcttagagggggcaaaaaaatctttatttaataaatgttattaat

SEQ ID NO: 123084 - DNA, 585 bp, Homo sapiens
agcactctactggcagagttcttccactgtctcaattacatgtgcactggcaggtctgagcctctttttttttttttttttttttttttgagacggagtctcactctgtcgcctaggctggagtgcagtggtgtgatctcagctcactgcaacctctgcctcccgggttcaagcaattctcctgcctcagcctccccagtagctgggattacaggtgcgtgtcaccatgcctggctaactttttgtattttcagtagagacggggtttcaccatgctggccaggctggtctcgagctcctgacctcgtgatctgcccacctcagcctcccaaagtgctgggattacaagtgtgagccaccgcgcccggcctgagcctcattttttaatttgtaaaatgaragactagtatttgaaaaatctctaacattttttctagatcttgtcatttatggctctatgaaatgtccttatcctccagcactgctttgccaagttttcattgtagcaaattaaaataaaagaatatcaaccaggattcatcttagagggggcaaaaaaatctttatttaataaatgttattaat

SEQ ID NO: 123085 - DNA, 623 bp, Homo sapiens
tgctcttctttagactctgctctaccactctccctacctctctttattttgcaagattagtgctgtttctcaattttaattcatgcctcraatgcactgcagtttgacttctgttgtcatgaattcatcaacactagtattgactacttctccatttttatcttcttgaatatttctgcatcctatgacattgataaccatgctttccccctggaaatatgtttcccctgtttccatcatattctttgcgcctagttctcctattttatcctcccttcttaatcttcataatgagttctatctttatttcaacctatgaaatattgtattctcaaatgtattttcagtggttattgctgtttttctctaaaaaaacacagggtgatctcatccactccaattatattccattgttttatataagtatatggattgttcccaaatttattttcagattgaactgtcttgtgctcaataaaccaatacaagctgtccacaaacagatccattttactcctcaaaacttaactgctttacacgcagttagtgtcatgagtcattcaagtcagaaacatgaagtttatcttcacattgctcaaactccttaagtgtcccacccccaa

SEQ ID NO: 123086 - DNA, 623 bp, Homo sapiens
tgctcttctttagactctgctctaccactctccctacctctctttattttgcaagattagtgctgtttctcaattttaattcatgcctcaaatgcactgcagtttgacttctgttgtcatgaattcatcaacactagtattgactacttctccatttttatcttcttgaatatttctgcatcctatgacattgataaccatgctttccccctggaaatatgtttcccctgtttccatcatattctttgckcctagttctcctattttatcctcccttcttaatcttcataatgagttctatctttatttcaacctatgaaatattgtattctcaaatgtattttcagtggttattgctgtttttctctaaaaaaacacagggtgatctcatccactccaattatattccattgttttatataagtatatggattgttcccaaatttattttcagattgaactgtcttgtgctcaataaaccaatacaagctgtccacaaacagatccattttactcctcaaaacttaactgctttacacgcagttagtgtcatgagtcattcaagtcagaaacatgaagtttatcttcacattgctcaaactccttaagtgtcccacccccaa

SEQ ID NO: 123087 - DNA, 561 bp, Homo sapiens
tgtttgttgaatgacacttaaattgattccatatctttgttattgtaaataatgctgtgacaaacacatgagtgcaggtatccctttaatatcctgaactcttttcctttcaatagatatctagtactgggattactggattgtacagtggttctatttttagtttttggagaaatttccatattcttttccctaatggttgcactaatttacatttctgccaaaatgtataatagtttccttttcttcacatactcacaaatatctgttatttttgtctttttaataatagctgttctaacttgggtaagaygatatgttattgtggctttgattgcattatcatgatgattagaatgttgagcattttttcacatacctgtgggtcatttatatgacttttttttgagaaatgtctattaatgttttttgctcactttttaatgggattatatgtagttttaattgttgagtattttgaactccttgtatattctgaatatcagtcctctattgaagaatcatttgcaaatatattcttccattcaacaggttgtttct

SEQ ID NO: 123088 - DNA, 550 bp, Homo sapiens
gggtttggtatacaaatgattttgccaccagtgagcacagtacctgataggttgctattgatcctcatcctcctctcaccctcctctctcaagtaggcatcagtgtctattgtccccatctttttgtccatgtgtactcaatgtttatctcccacttataagtgaaaatatgagtcagccacgagtgcatgcatgccagaggagcagcaggtccccaagtgcatatgtgaaggggagtctgtgggggaaatgcccactggtaggagatcctctgcaaaagcactctgatggaagggtgggggctgctgacaaaagagttatggtggtggccactggcaaatgcttcagaggatgcagccaggcaggaattgygggagagactagcagacagggggcattcggatcagtctggctctgtcccatggtcaaaacagccttgcgctctccatgctggcagctaacaaagactaaagccacctagaagagtatggcaagctttggccgatggaagtccatggctatgctccacagcagctatccccatgacaaa

SEQ ID NO: 123089 - DNA, 598 bp, Homo sapiens
tgatatgatttcacttaaggaaacattgagacttgtttgtaatgtaacatatagtctttcctggagaatgttgcatgtgttgagaagaatatatattctgcagttgtcaggtagaatgttccaygaatgtatgttaggtcagcttggtttaaaatgaagtttaaaaccaatgtttctttgtatcttttctatcttgataatgggtctaatgctaagagtgggttgttgaagtcaatcattattattgtagtggaatctatctctctctctttagatctagcagtatttgctttatgaatctgtgtgctcacaatggtgctcacatatgttgagtgcatatatattttgaattgtcatgtcttcttgctggattgatctctttttcattatgtaatgactttctttgtctttttaaaatttactctttgtaaagtctgttttttgtttgcttttagtttccattttcataaaatattttttttactcctttactttcagcctatatgtgtctttacatgtaaagtgtattttttgtaagcatcatatagttgggtcatgtgggtttttttcctccttttttaaaaaaaatctgtttgtt

SEQ ID NO: 123090 - DNA, 565 bp, Homo sapiens
ttaatgtttcattattggttcattgattgtgacaaatgcatgatactaayataagatgttaacattaggcaaaactcagtatggggtatataagaacaagctaatgtcttcaaaatttttctgtaattttaaaagtattctaaaactgaaagtttatttcaaaaatagattcaccatcattcacacacataaagcctagaattatgaaatttaagcactaaaaaaagtttttcagcctctttaaacataaaaagtagctctattaaagcaaagggaattatagtgccttactcaaaaaattactttgagaatcaaataatgtgtcttaatgtcaattcttattaatagtgatagtctcaatgcctaaaacaagtttgtttatcaatgaaataaagcaatcacaacattcccttattctctttttcactctagcacacacagtaatccatttaaccatctttacctttcactgagttaaaaaatcaatcaatcaaagattagctggctcaggcaaagaaacaggggcttcaaaatgatggaatagattcttttgaaaagttgcatt

SEQ ID NO: 123091 - DNA, 565 bp, Homo sapiens
ttaatgtttcattattggttcattgattgtgacaaatgcatgatactaatataagatgttaacattaggcaaaactcagtatggggtatataagaacaagctaatgtcttcaaaatttttctgtaattttaaaagtattctaaaactgaaagtttatttcaaaaatagattcaccatcattcacacacataaagcctagaattatgaaatttaagcactaaaaaaagtttttcagcctctttaaacataaaaagtagctctattraagcaaagggaattatagtgccttactcaaaaaattactttgagaatcaaataatgtgtcttaatgtcaattcttattaatagtgatagtctcaatgcctaaaacaagtttgtttatcaatgaaataaagcaatcacaacattcccttattctctttttcactctagcacacacagtaatccatttaaccatctttacctttcactgagttaaaaaatcaatcaatcaaagattagctggctcaggcaaagaaacaggggcttcaaaatgatggaatagattcttttgaaaagttgcatt

SEQ ID NO: 123092 - DNA, 428 bp, Homo sapiens
ttgtgacaaatgcatgatactaatataagatgttaacattaggcaaaactcagtatggggtatataagaacaagctaatgtcttcaaaatttttctgtaattttaaaagtattctaaaactgaaagtttatttcaaaaatagattcaccatcattcacacacataaagcctagaattatgaaatttaagcactaaaaaaagtttttcagcctctttaaacataaaaagtagctctattaaagcaaagggaattatagtgccttactcaaaaaattactttgagaatcaaataatgtgtcttaatgtcaattcttattmatagtgatagtctcaatgcctaaaacaagtttgtttatcaatgaaataaagcaatcacaacattcccttattctctttttcactctagcacacacagtaatccatttaac

SEQ ID NO: 123093 - DNA, 632 bp, Homo sapiens
atcagagaaaactaaacaggtccttggaaatctgtggcacaatatcagatgatcttggaatccaagaaaaacaaaagagtaaacttgaggcataatatttatttgaacaactaatatctggggagatcagaaacttgatgaaaaaacattgatttacagatttaaatagttcaaagaacctcaagtattataaatagggagataactataccacaacaaattacagtcataatgctgaaaactaaagacaaagaaaaaagatcaaaagtaactagaggttaaaagaaaaatattctatacagaagaacaagaataagatatatcactggtttctcataagaaataatggaggccaaaagacaatgggataagataaagtactgagaggaaaacactatgaacctctgtctacatcttttgaaaatatcttttaaacatgaaaataaagttgttttcagataamgaaagctgagaaaagtcactaccagtaatctctcctacagcatatcctttataaaggtcaaaataaaccagatggaaacttggatctacaggaaggaagcaagagaagcaaaagtggcaaataggtgggttaatgtttttaaattgtgctttcttgagtatcgtaattt

SEQ ID NO: 123094 - DNA, 509 bp, Homo sapiens
actttcaaaagctccaccttatttcattcgcattttatttttaacttttaggttcatggatacaaatcaggtttgttacgtagataaacttgtattatgggggtttgttgcacatattatttgaccatctaggtattaagcctagtaaccgttagttattttttctgatcttctccctcccctcactctccaccctctgaaaggccccagtgtgtgttgttcccctctgtttatttgttctcctcatttagctcccacttgtmaatgagaacatgtggcatttaattttctgttcctgtgttagtttgctaaagataatggcctccagctccatccatgtccctgaaaagacatgacctcattctttttcatggcagcatcctattctgtggtgcatatatactacattttgtttattcagactatcattgatgggcatttaggttgattccatgtattggctattgtgaatagtgcttcaatgaacatacacatgcgtgtgtttttat

SEQ ID NO: 123095 - DNA, 618 bp, Homo sapiens
gttcacttatttatggagtatgtaaatatttccaatacattctgagaaagaacaacctatgctatttgcaccttttctaggggaaacactccccagaaaaccccttgttattaaggtagaaatatatccctgttaagaagtcagatttcacatataatccacaattcttaagcacaaatatgtcaactagtcaaatacattcaaaggacaaacagataatttttggaatacaggattgctatgagcctgaaagtttgtgtgctcccagaattcatatattgaagcttaatcaccaagtgatggtaataggaggtgggaccccgtggaggtgattaagtcatgaaggtagaacccatgaatgggattagtgcccttgcaaaagaagtcccagagagctgtgctgcctcttccaatatccgaggatgaagctaaaaggcactatctatgaaccaggaaatgggcttccatcagacatataatctgccagccccttggtctcagacttgccagcctttagaactatgagaaatacatttctgttgtttataagctgaccagtttatgkcattttgtaatagcagcccaagcaaatgaagacaggacatgaatagacaacat

SEQ ID NO: 123096 - DNA, 641 bp, Homo sapiens
tagaacatttttaatatgacagctggtggagtgatgactatagtttgaagaatagtactgatacttaaaatttaaaaaatactatagaacactcatgataaggttttatgtttgtttatccttgaggagttagatcttattatatacttactaagcatgcctttttcatattttaaaaaatctrttgttccaaagagcacctctttaagacaagagaaacttttccttctcaaatagttctagtactatatcattaaaaagtcattggactttatgttaaaccttttaatttcttgactaccattaaaaatgtataattggaattttttgtattattcttcccttagagtccacagatacacattttggatatgccacctagagatgatgtaagtgttgtcaagtttcctttcctggattttatgttcttcaggatgagaaacagaagtacataatttggcaaaaagaaaagtgattctccttttgcctaagaggcaaatgttttagtgatgtgcacaatgaaaacactacaaattccaactggtatgtgatgctgttctaaatgtgggaggtaagaatgtctggggaaaaggaattgtctgtggaggatggggtgggtctgaatgagtagggagtttgtt

SEQ ID NO: 123097 - DNA, 641 bp, Homo sapiens
tagaacatttttaatatgacagctggtggagtgatgactatagtttgaagaatagtactgatacttaaaatttaaaaaatactatagaacactcatgataaggttttatgtttgtttatccttgaggagttagatcttattatatacttactaagcatgcctttttcatattttaaaaaatctgttgttccaaagagcacctctttaagacaagagaaacttttccttctcaaatagttctagtactatatcattaaaaagtcattggactttatgttaaaccttttaatttcttgactaccattaaaaatgtataattggaattttttgtattattcttcccttagagtccacagatacacattttggatatgccacctagagatgatgtaagtgttgtcaagtttcctttcctggattttatgttcttcaggatgagaaacagaagtacataatttggcaaaaagaaaagtgattctccttttgcctaagaggcaaatgttttagtgatgtgcacaatgaaaacactacaaattccaactgrtatgtgatgctgttctaaatgtgggaggtaagaatgtctggggaaaaggaattgtctgtggaggatggggtgggtctgaatgagtagggagtttgtt

SEQ ID NO: 123098 - DNA, 620 bp, Homo sapiens
ctttgtgcttggggaagggagagcacaatgatggtgggattttggcattgaaactcagagttgccctgtcagaacagtagtaccaggcagaattcagttgtttcccacagaaggagcatttagaccagtcctagccaaaagggaatcacccaactcagtggtcagaattgatttctrggaagccttgccacaatgtgctaaagtgtgctgtgatcctaaataaacttgccaggcagtctatgccacaaggtctgcaattcctgggaaagtccaggtgctaagctgggctcagagccagtggtcttgtggggcacataacccattgagacaccagctgggacagacaagggagttcttgcaccacccataacccaacccaaggcagtgctgcttgcagctccaggagttactcttgccttctgcttgaggaacagagaaaggagagtaaaaagggctttgtcttacaacttagaaatcagcttaatcacagtaggataggacaccaggcagagtcctgaggccccgattctaggccctagtttattggcaatatttttatacacacactgggtcagaaggaaatctgctgccttgaagggaattacccatccctggcagca

SEQ ID NO: 123099 - DNA, 659 bp, Homo sapiens
acttctttgtaccccgctggcctctttgcagcgagctsctttcttcagcctccactctgcatggcgagtggctgtcggcacaggatgcccacaggcagatccatctcaagccaacgccaaacccccctccccttggaataagcccatcttcccacaccttattcccacccaccactgtcaactgggggatgtcagtcaccccagcctccaccaggccccacatcctgatgacttcattttgaaaatttaaaattttcatatttaaattttaaactaataactttgtaattagggataaaactcaaaaccataaagaaagcaaaattaaattatcccaattttaccacccagaaatcactaatgccaatgttcagtaagcattatcacaaacctctccatgaatgggaaagaataaaagaaggaaaaacacatttaaaaatgtgattataccataaatgctaaaatataacgaagtacagaattttaaatgaatttgaccaataaaacagggacctggactataaataaaggagaactgtcctttgcaattacaaaagaaatgagagctcccaaaatacagctctaaagttcgtcaaaatattaacaaaaacgtgaggaagatggaactttttaaaacccatggttcaggtttaggtcac

SEQ ID NO: 123100 - DNA, 659 bp, Homo sapiens
acttctttgtaccccgctggcctctttgcagcgagctgctttcttcagcctccactctgcatggcgagtggctgtcggcacaggmtgcccacaggcagatccatctcaagccaacgccaaacccccctccccttggaataagcccatcttcccacaccttattcccacccaccactgtcaactgggggatgtcagtcaccccagcctccaccaggccccacatcctgatgacttcattttgaaaatttaaaattttcatatttaaattttaaactaataactttgtaattagggataaaactcaaaaccataaagaaagcaaaattaaattatcccaattttaccacccagaaatcactaatgccaatgttcagtaagcattatcacaaacctctccatgaatgggaaagaataaaagaaggaaaaacacatttaaaaatgtgattataccataaatgctaaaatataacgaagtacagaattttaaatgaatttgaccaataaaacagggacctggactataaataaaggagaactgtcctttgcaattacaaaagaaatgagagctcccaaaatacagctctaaagttcgtcaaaatattaacaaaaacgtgaggaagatggaactttttaaaacccatggttcaggtttaggtcac

SEQ ID NO: 123101 - DNA, 659 bp, Homo sapiens
acttctttgtaccccgctggcctctttgcagcgagctgctttcttcagcctccactctgcatggcgagtggctgtcggcacaggatgcccacaggcagatccatctcaagccaacgccaaacccccctccccttggaataagcccatcttcccacaccttattcccacccaccactgtcaactgggggatgtcagtcaccccagcctccaccaggccccacatcctgatgacttcattttgaaaatttaaarttttcatatttaaattttaaactaataactttgtaattagggataaaactcaaaaccataaagaaagcaaaattaaattatcccaattttaccacccagaaatcactaatgccaatgttcagtaagcattatcacaaacctctccatgaatgggaaagaataaaagaaggaaaaacacatttaaaaatgtgattataccataaatgctaaaatataacgaagtacagaattttaaatgaatttgaccaataaaacagggacctggactataaataaaggagaactgtcctttgcaattacaaaagaaatgagagctcccaaaatacagctctaaagttcgtcaaaatattaacaaaaacgtgaggaagatggaactttttaaaacccatggttcaggtttaggtcac

SEQ ID NO: 123102 - DNA, 587 bp, Homo sapiens
caaagccagttaactgaacccaccttataccataatcaaactcccaagggcataaaagaagaaaaaaaaaaccacccaaaggacagcaacttcaaagattgaaagaacatcatcctacaaagatragaaagaaccactgcaagaactctggcaatttaacaaccctgagagtcttcttaccttcaaaccaccacactaattacccagcaatggttctttaccaggctgaaatggctgaaatgtcagaaatatcattcagaatgtggataaaaatgaagatcatcaacatatgggagagagtaaaaacccaatccaagaaatttaaggattataataaaacaatacaggagctaatagacaaaatggccactgtaagaaagaacaaaactgatctgatagagctgaaaaacacatgacaagaattttataatgcaattgcaaatattaacagaagaatcgaccaagctgaggaaagaatctcagaccttgaaggctggctctccaaaatgactcattcagacaaaaatgaagacaaaacaataaatactcatgagcgaaacctcttagaattgtgagattatgtaaag

SEQ ID NO: 123103 - DNA, 516 bp, Homo sapiens
tactaaaaatacaaaaattaactcaatgtggtgcctcatgcctgcaatcccagctacttgggtggctgaggcacaagaatcacttaacccaggaggtagaggctgaagtgatcttagatcacaccactgcactccagcctgggcaacagaacaagactctgtccaaaacaaaaacaaaaacaaaacaacaacaacaacaamaaaaatatggtgttctatggtgttccagcagggggaatgaatggtgtaggtttctattccatcatcttactctgccagaatttttaaatatatgtatataaaagcatagaaattgctttctcactaagaagaacttctagtgttttgtcacgtttggtctattttgggaatatagattacattttctgccatttatcttggattctttatattgaatatattctccttactgttaagatatgtcactaaaaataactctatgatggttaattttatgtgtcaacttgagtgaaccatgggatgcccaggtatttg

SEQ ID NO: 123104 - DNA, 601 bp, Homo sapiens
ttcactgctgctacctgcagaagctctgagagagcctcagtaaacatccgtctcctcctccctgatgacctgccggtgggaattctcttccccagtcctcattctgcaggcagctatctccgagtccctcaggctctggaaacttccagtggaaacaattctctgggagccaagaccccagagctctggctggggctctgtcaccaaccagccctgtgacctcaggcagctcttggttgttctctgggcctcagtgtccctacctgtacaatggcactatatctagcttgctgaccttggggtagggtttccaaaatgcacattgtgatctatgtgggtcatgaagtygatttaacagcatgcaaccagcatgattctttttcttaaataggaagagaatagggcagaaaatatttagtcttgcatagagtaagggtaagtattgtttcttgaaacttgtgtggagtgtgtgtgtgtgtgtgtgtgtacatgcgttctgggtcatgaggtaggatatatttttcaggggggttgtggtaaaacaaaaaagtaaggaagtcagtactggaagctgtgacagaagggtgacggtggcaactgg

SEQ ID NO: 123105 - DNA, 570 bp, Homo sapiens
tagagaagaaattatcaaagaaacaaatgtggccaggtgtgatggctcatgtctttaatcccagcatttgggaggctgaggagggaagattgcttcagcccagaagttggagaaccccatctctacaaaaaattttaaaaattaaccaggccaggtgcaatggcttacgcctgtaatgccagcacttcgagaggtcaaggcaggaggatcgcttgagcccagaagttcaagaccagcctggccaagataggtagacccccatctctacaaaaattttttttttttaattagctggacatggtgctctgctcctgtagtccagctactcaggaggctgaggcaggaggatacttgagcccaggagttccaggccgcagtgagctatgaccatgccactgcactctagcctgggtgacagagtaagaccctgtccctaagaaaagaaaagaaacaaacaaatgcaagaaaacatcgcagaacaaaagaacawaatatgtctccaggatgaaaaggcccagaacaacaaatggaaaagacctaaaccaatatacacacacacatcttggaatt

SEQ ID NO: 123106 - DNA, 566 bp, Homo sapiens
agaaaggaaatggccttccatattcttagcaccgacactggattgcatgatttactacctgaggcttgcatttctccccacatcaactcccctctagtgcaaacatctatcactttgaaggcagttcaaacaccaccttccccttgtcttcccctgtccctggtgccctccagccccttagcatttcctcmgatctgcctccttgccccagaggtccaagatcaggctggagccctgaacagacaccatgctgtcacccatccagtgaaagagaaagccctgcatgcccaggactggcaccaaggggctgccctgctgctagaaggtggggctggtgcggggtccctcctcagcccactgtggctgctgatggctgccatgaagatatatgggtttaatcaggcccctgacaggtaaagaccctgacaacgaggacagtttgttctctgaaactgttgagtatctaagcccaatgtttactttggaattgaatgaataacattgttctgggaaaggaaatttaaaaaagcaggcttgtaatttacagtagagaggagagcagatct

SEQ ID NO: 123107 - DNA, 648 bp, Homo sapiens
cttagtataaagaaattaagtgtgggcctaaagggagcatggtgacccccagaggccctgagggtgaaggtgtttccttggcctcggtggtgtcccagagctgcaggcaagtcctgatggagggagaggcaccccctgctggtgatggactctggggactaagaagagcctacgcaccttgcatgctgttctgctgctgtgtcaggaacagactcactcagaccgagggcagaaagtggttgctctttttctttcctgacatttatctgggccttcctgcttcttttcttccctgggtttgcacctctagttctggctggaaccctcagcaagcatggactttcaacccagacctgaaacctcactcactgtgtcctctgtcatggtgaatggcaagtcacaggattttcacattccatagtgtttcattcctcccaatgaaattccataagccctgcctcatcctgggctcagaccaagagaaagccccaggtatgagtctcrggcacttgaagccatcctcttccacactggtccctaggaagtgtggggaaactggcagattcgtgcatcattggtggaggtttaacttggtatggcctttttgggagagcaatacagcagtaccatcaagactttaatgacacc

SEQ ID NO: 123108 - DNA, 557 bp, Homo sapiens
ctttgtttcctttggaatattttaccactcattatacgatgtttatcctctcagtgtatcaaccattcttatgataacagaattaccaacaaatgttttttacttcaaaaaagagtaggtaatgcaagccaaagaattggtctttatacctaatgatataccataaatttattttcatgtcagtacttatatagccattgtgtttaatgtttaatggctgagtagtactttattgaataaattttctaagatatatttattcttgtactaatagtttgtttctagatatttgctgctaacacacttaactgaacacagacatacacacacaaacacacacagaytcacatactgtgagtttatctataggataaaatccaagcattactgaatacaaatgactaacagattttatttttaagacttacagatttaaaacaagagtagtatcttaagacactagtatcctgctgaaaatttacaatgtttacctttccccaaagggactctggccttttaccagagacctgtgcactggggaagattaagtctgcctt

SEQ ID NO: 123109 - DNA, 634 bp, Homo sapiens
tagacctatagaattaaactgttaaccaatgtcctgagtaacactgaaataaatgagaaattgaaaagcatgcaggttttgaagaaattttcccagtgtaaactcaacttatttttccaagtacgattctttatattttgtgattttgtagttttgctaagattattaagaattcagtaatcaaaatatttacacattcwgcactgaccaaatgtcttcttgtgttgattttagtttcagcagtatgtatgcacatttagtataagctgctatgagaatgatttttgaatgatcaccattttcttttaattttggcagttctatgatatccataactcagaaatgtaagttcaacctcacacataaccagaaacctaactaaactataaattatcgggtaaaattcctattttactaacaaaaattaaatgatcttttattacacatacgcacacacaacacgtaaactaaactatttatagaggactataagtaacacattgcatgccctcatttctctagtgtgacatgtactggagttctatttgagaagctttattactgctagctgtcttccagatatatgtctattcttggttttatttggagatttatttatatgcttctttggcgc

SEQ ID NO: 123110 - DNA, 562 bp, Homo sapiens
tcaaacccttgtctaaaactgaactcttgatatcccccaaccaaaatctattcatgtttaaacctcccccttttcactagattccaataatggcttttcagtttctcaggtcaacaattttagagacactcttgtctgtctctttgtctctgtctttctctatgtatacacacacatgtatgtgcatgcacacacacacacacacacacacacaccagtctgtcatgaatttctatcagctccatcttcataatataacttaatttcttcytaccacttcaactgccaccaccttagtccatgccatgattggactctggcttagattattgtgtaagtctgctaactggtttcccttattccactctttccacctctaatctaatctctacttagtatcttctttttaaaacaaggttcagattatatcacatttctattaaaaatcttccaatactttcccatcccactccaggaaaaaaaggtcatgttctcactatgacagctactgcgccctgctctcctatcagtcttcctatcccaagtctgctgctctctctcc

SEQ ID NO: 123111 - DNA, 576 bp, Homo sapiens
tgaacccctttaggctccttcattcctgccagctcacccttacctctccagtagtaaagggcttgtgcctttgcctgctctgggtgagagtcccagagcacagtagcccatcamactgtgttgcagctgtcactattccctggatacagaaagaaacaaaggccaaagttagggtgctaatggtttgggattcaccatggggagaaggtgaatcaacctctctgtggatggaggactggaggcgtgactgagaggcggtctgccacccagtgcagagcagaaacagagggctgactcagagaggcgttgtcacctgctggatgcacttgggcctggctctcttcccctttaacatgtgtctgaccttgattccctgtgagctggctctgtgggcatgggtcatcacagaatgctgggtttgtctatgggcagctgtgtcagatgatgctgacagcacatgttatcacatgcaaagtccttgtgccccggagttctggaggcaagcttttacctgccaaagttgcagtatgaaggactggactacatttgaatttttactttgagccatgaagaatt

SEQ ID NO: 123112 - DNA, 576 bp, Homo sapiens
tgaacccctttaggctccttcattcctgccagctcacccttacctctccagtagtaaagggcttgtgcctttgcctgctctgggtgagagtcccagagcacagtagcccatcaaactgtgttgcarctgtcactattccctggatacagaaagaaacaaaggccaaagttagggtgctaatggtttgggattcaccatggggagaaggtgaatcaacctctctgtggatggaggactggaggcgtgactgagaggcggtctgccacccagtgcagagcagaaacagagggctgactcagagaggcgttgtcacctgctggatgcacttgggcctggctctcttcccctttaacatgtgtctgaccttgattccctgtgagctggctctgtgggcatgggtcatcacagaatgctgggtttgtctatgggcagctgtgtcagatgatgctgacagcacatgttatcacatgcaaagtccttgtgccccggagttctggaggcaagcttttacctgccaaagttgcagtatgaaggactggactacatttgaatttttactttgagccatgaagaatt

SEQ ID NO: 123113 - DNA, 576 bp, Homo sapiens
tgaacccctttaggctccttcattcctgccagctcacccttacctctccagtagtaaagggcttgtgcctttgcctgctctgggtgagagtcccagagcacagtagcccatcaaactgtgttgcagstgtcactattccctggatacagaaagaaacaaaggccaaagttagggtgctaatggtttgggattcaccatggggagaaggtgaatcaacctctctgtggatggaggactggaggcgtgactgagaggcggtctgccacccagtgcagagcagaaacagagggctgactcagagaggcgttgtcacctgctggatgcacttgggcctggctctcttcccctttaacatgtgtctgaccttgattccctgtgagctggctctgtgggcatgggtcatcacagaatgctgggtttgtctatgggcagctgtgtcagatgatgctgacagcacatgttatcacatgcaaagtccttgtgccccggagttctggaggcaagcttttacctgccaaagttgcagtatgaaggactggactacatttgaatttttactttgagccatgaagaatt

SEQ ID NO: 123114 - DNA, 576 bp, Homo sapiens
tgaacccctttaggctccttcattcctgccagctcacccttacctctccagtagtaaagggcttgtgcctttgcctgctctgggtgagagtcccagagcacagtagcccatcaaactgtgttgcagctgtcactattccctggatacagaaagaaacaaaggccaaagttagggtgctaatggtttgggattcaccatggggagaaggtgaatcaacctctctgtggatggaggactggaggcgtgactgagaggcggtctgccacccagtgcagagcagaaacagagggctgactcagagaggcgttgtcacctgctggatgcacttgggcctggctctcttcccctttaacatgtgtctgaccttgattccctgtgagctggctctgtgggcatgggtcatcacagaatgctgggtttgtctatgggcagctgtgtcagatgatgctgacagcacatgttatcacwtgcaaagtccttgtgccccggagttctggaggcaagcttttacctgccaaagttgcagtatgaaggactggactacatttgaatttttactttgagccatgaagaatt

SEQ ID NO: 123115 - DNA, 635 bp, Homo sapiens
tgattacttctattttctaagtgaaataagagttaatgtcatgaactgagaatgaggagatttgagaagtgagaagttgtgaatgggaaaatggctggacagaaaaaattatagaatcgtgggggcaactccaggacctacttggagtttgtggtcatgagttggatgtgagacagcatcatgcggttgtgtgtttttctccagccactttcagttgctctggtaagggcagagaattgggttcaactaagccgggatattatcaggtgagtatggcaaattgggaggcggaaacaagcaattatattgctagactttggaacccaagcctggcagargaaagtgggggcaagaggtggtgttggcagtgaaatgagtatattattagataggatggtcccatactgccaaagacctattggaggagcaactaaaaaagggaaatggataaatgagttgggaattggccatcacatgcttgaaatggagacttggagatattggaaatggcctgggacatgtgatcacaaaattaggtcatctttattagtataatatcatgtctcgtgtttgctgggtctttctctcttctatatcaacttgatacttctggttgccaaagtaatcacaaaatt

SEQ ID NO: 123116 - DNA, 570 bp, Homo sapiens
tcagctttgtctccttctccccagtgactgaccttgatatcactaagtcctgtaaatttacaggactaccctacccctaccatacgtgtccctttctctctattttcattgtcactgctgcagttcatatgcttattgtctcttgcctgatatttatttcctaactaggctccctgtcatatttgctctctgccagttcatttatcttacttcagccagagtgatctgactgaagttgcaagtgtcaatctgtcattgaaacctctccatattgggcatttcatatgtacctcctcagactctttcagcctccgtctcctaggcctctgccacttgctctgtctcagccaytagcacttcaaacatctccatgcacacctgtagagatctccaagccaaggcctggagcttctggcccctctccactgcttccagactcaaacgaagccccatgtccagaccctcggagaagcaagtgccaaggtgaaattggacatgcaagcccgtgatgcagatctgcccctgattgaaagagaaagagaaaaagaaagaagggagggtgagtgcaag

SEQ ID NO: 123117 - DNA, 571 bp, Homo sapiens
ctgacagacgttttagcaaatccgctcctacctcagacatctctttcccttcctttgtagcagtggtttcatgaaggtgcatgggaggaaagaaaataagagaagaactgaagggggaaaaaaaagatcatgaaactatccaatattccttggcatttatcagaataatcagaaacaatcaacaaacataaactaaatgtgatggcttgcgttatcagtaaggaaagacatccaacatcctctaccctagtgttagatggtatgttacttttccagtgagrcattaaaccaacagcctcaagaaaaagaatgaggaactctgtattttagactaactttagccagcatataatataaccctaggcaaatcatttttcctcgctcagaaaccagagttctaaaataaagattataataaaattgaccctgttcatagtaaggttgttaggattaacttagaaataattacacaattacttggcaaatattgtattagatcagaatatgtaactccaggcaacatatctttgcagtggaaataaagtttgatatctctaggactgttcatcat

SEQ ID NO: 123118 - DNA, 570 bp, Homo sapiens
  misc_feature (1)...(570): n = A,T,C or G
tatagaaccaaaattacatagcttacatttcctttactcaaactntgagactacttggaaaaaaataaatagagtagcctcctaggtaatttgaataaaacttagtgcttgagagattcttttaaatggaaatgaacaattgttattcatttctgaccagtttccattttcrttttttctttaattactgagcttcctttctctgaaatcaagtctctaaaacagactttaattattcatttttaactgtaggaagatttattattcaaagagcagccagcattccagaatagatgttgttttgttcatattttaaagggttagtcagaaatatttcttccaatgggaatattttgtacaaaaaggcagtagtccaaaaggtaaaaagctttaaaaatatggaattaaagtaaatctataacagaagaaaatgactaaatctttcaaaatctttagtagcatgatccccatggaggaaatgaattaaattaacataattagaatagaaataatctttgtactcatacaacatctatttttccaagatcttgttttgctttctatcttaaa

SEQ ID NO: 123119 - DNA, 593 bp, Homo sapiens
cttcaaacaggaaagacagacggtattagcaaggtcctttacctgttttgtagcagtgctttgacattactgctcagtgtgaccaatgtctgtggccctcccttcccatggagaccctgccctttgcagatttcaaaatcagtctggtacctccctccacttagagccagttgggttataagccactaatgagtattttgttccttcttaagcaaacagaagaaacatagttctcatccatctgctatggactgaattttacctccctaaattcatatgtcaaagctctaacccccaatgcmtttggagatgggggctctgggtgatctttaggtttagatgaggtcataaaagtgggcctcctgatggattatgtcctcatgagaagaggaagaggcctcagagcttgctctctgccatgtgaggacacagcaagaagtgtaccatctgccaccaggcaggtagccttcaccagaacctgaccatgatggctccaggatctcagacttccagcctccagaaccgtgaggactaagtgtctgttgttaagccacccagtctacggcatttggttaaggcagctaagacaataa

SEQ ID NO: 123120 - DNA, 602 bp, Homo sapiens
tgtcatcagccaacattggaagtctgtgcataaaagagatttctaggaaaaaaaaaaatcagcagttcaatctatcggacacctgaatggaaatatcaagcatgtagttggattgtgacttgaagaaaagcatgaagagttacaagtgtaggccatgggcctatagatatttagagcagtgagactggataaaatcaagggagcaattgtagatagagaagaagaccaagaactgagccttggaccattccaacactaagagttyagaggggagatacaaagggaagggaaagaacttaagaggaaaaaaggaaaacaagagaatgcagtgacctggaaacatatgaagaaggtgtattaaggagacagggattattaaaatgtgccaaatgctgctaatcagataagaaaaggactgagaattgccattgaatttggcaatgtggaggtcacccaagagcagtgtgtgtggagagaaaagcttgaaagaagagaaggtttacaagagaacgggaggaaagaaattggagagagctagtatggacacttatttcaagatttcctgctaagagcaacaaatacatgggacaggtcctggtggg

SEQ ID NO: 123121 - DNA, 614 bp, Homo sapiens
gatatccaggcagtatgggccaccaatagtgcatgtttaagactgtgtgatgaatagctgaatgatgacataccctgtcagtgtgtttatgtgactctctatataatatcattgggagataatgccaaaagcataactttgaagtggcaataaatgctaaaccatagcaaaatggctgtttgcyacacacacctccctgctcatgtacacctggagcaggtgactgcaaactgaacgtggtaggcaatggataacatgtagggtagattttaaagaactaccagaactaagcaataatgggaggtgagacaaatcatgaagaactttgcagctatgctcagaaatttggaataaaggcaaaagagatctcaagagttcccttctctgaaaaaaagatagtgacaatgacaagccaatacttgcattttcccattctttatgtcactttcttaaaagactgtgatcttctgctaaaaatatcgagtggactcagaattaaataccaaatcatcgtgtacccatcgaacaagatgacaaaaacattgaaaaatagccttagttgagtaacttgggatgtggaatgatctggcttaaagatggaattttggcttatg

SEQ ID NO: 123122 - DNA, 596 bp, Homo sapiens
gactgcaaactgaacgtggtaggcaatggataacatgtagggtagattttaaagaactaccagaactaagcaataatgggaggtgagacaaatcatgaagaactttgcagctatgctcagaaatttggaataaaggcaaaagagatctcaagagttcccttctctgaaaaaaagatagtgacaatgacaagccaatacttgcattttcccattctttatgtcactttcttaaaagactgtgatcttctgctaaaaatatcgagtggactcagaattaaataccaaatcatcgtgtacccatcgaacaagatgacaaaaacattgaaaaatagccttagttgagtaacttgggatgtggartgatctggcttaaagatggaattttggcttatgttgaatatgaaaaatgttcaagaaaatgctcagcacaggagggttgcacaaattctgatgtagataaagcatcttaggatcccacaggttctgctgttcttctacaggcttccaccatcatcactcactctgacataatctacaagggatttggctggcgatgtctctccctcctctggtgccatatctttaccctagcaggt

SEQ ID NO: 123123 - DNA, 616 bp, Homo sapiens
gaattcctttcctccctttccttgttgtctcctctgcatttgatatgcttccattgcaatacagcacttatatttttcagaacttttaataagtgtaatatattcttttttgtctggcttctttcacatagcgtaattgttctggggttcatccactttgtyacaaatattgctgaggagtattccattgtatagatataccacaattttgttattcaattacctgttaataactactttggaaaacggttttagcagcttcttaaaaaataaaaaaaggctgggcgtggtggctcacgtctgtaatcccagcactttgggaggtcaaggcgggtggatcacttgaggtcaggagttccagaccagcctggccaccatggtgaaaccccattgctactaaaaattaaaaaattacctgggcttggtggcacactcctgtaatcccagctacttatgaggctgtggcaggagaattgcttgaacctgggaggtggaggctgcagtgagccaagattgcaccactgcactccagcctggacaacagagtgagactctgtcttaaaaaaaaataaaaaacaaaaaataaaataaaaaacaaaaagtaaaaaaaatctac

SEQ ID NO: 123124 - DNA, 576 bp, Homo sapiens
cacacatctttaagtgatagattttagtgaatatgagaaagtccaacctactttgcagatcatgttatagactgacttatgtgaatggtactttgtgcttctaatgtggaaagcttcttggttagcaatttttctgcatccgagaaaggaaaagagactgcaacaagaattgagttagtacaaagaatcagtcattaatattcaaatattttcactaataattttttaatgtttaatatatagagtttcttaaagatccatagatcatttaaaaattttaaacaactagtttaaattcattcaacaagtctaaaattgttggatttggrcttaagtttgtcagactgcttaaaatgcaaatacatgacaaagaggaggtaagttgagaaatacttcaaatgagtgggccatagaattacatacattctatgtatgtaattaatacatagaattaataagataaatctagaatttcaaagactattatataactatagttcctgtgggaaaatagaacatataatccttatagaaccattgaaccagaaacaacaatcaaagatataatgaagaaaa

SEQ ID NO: 123125 - DNA, 528 bp, Homo sapiens
gttctcattagctcataacagccaggaggagggaggaaggtttattgtataatttgggtgattaagatagcrgaaacaagagaaaatgtcggagtttgagagttaacagtgctagaaaagcagattaaagcctctgtggaattgataaaaagctaagagctaaatgagaaacgagataaagaggtcttactggcatagaaaaataagattcacaagagtaagcaagtggaaagacagaaaccttgattttaattattttgtttgtattaggtaatttatattttattaaatcttttttagatgatacacacacaatctagaaatagtaaataaaatgtttggtggaaataagtttcattgtttgaaatagggtctaaaaagcagaatactaaacaccaaacaataccaaagtttttaccatggaataatgcagaacaaagcctataggacatggaaatactgaccatttctttgcgcagtataatatgaatggaaaagattataaagttgttaagtaattggttattg

SEQ ID NO: 123126 - DNA, 609 bp, Homo sapiens
ttattcacattcattgtaacagtagggtggacctgctacaacatagggtgctgctgagcatatctttcttcctcttcattgcagctcattctcatcttggttcacatattcagcactcatatactggatttcaccatattattttgaagttttccatttttttcagtcaatgtggttattcaaaataagattttaattctctagagagcaagactgcaacttctctttcctttgtatcttttacactgcacggagcaaacaacaaatgctgtgagagtcagaatgctasagctatcattaaagatttaaaagtttagagtcccttttcagccaagaagatcaaatttcctactcctcataaagaacctgaaagtgcgaacttctcattcttaatcttaggggctgctcaaaccactggcatattctggacatctgattctgccgtggtctgagacttccgagttcgctggaggataacagatggaagaatcacagtgaagaacagagaacaatgcaaagaagggagcagcactaggagagatacagtgggggtgtgcccaggttatttaaaccaagaacagcaaattagaatccttaaaggaaaaagca

SEQ ID NO: 123127 - DNA, 528 bp, Homo sapiens
gttctcattagctcataacagccaggaggagggaggaaggtttattgtataatttgggtgattaagatagcagaaacaagagaaaatgtcggagtttgagagttaacagtgctagaaaagcagattaaagcctctgtggaattgataaaaagctaagagctaaatgagaaacgagataaagaggtcttactggcatagaaaaataagattcacaagagtaagcaagtggaaagacagaaaccttgattttaattattttgtttgtattaggtaatttatattttattaaatcttttttagatgatacacacacaatctagaaatagtaaataaaatgtttggtggaaataagtttcattgtttgaaatagggwctaaaaagcagaatactaaacaccaaacaataccaaagtttttaccatggaataatgcagaacaaagcctataggacatggaaatactgaccatttctttgcgcagtataatatgaatggaaaagattataaagttgttaagtaattggttattg

SEQ ID NO: 123128 - DNA, 604 bp, Homo sapiens
atataaaaacaaacaaaaacaggaaagaagcagaaagaaaaaaggagaaggagatagagaagaaaaaggagaaggagaaggatgagaaaagggaggaggaaaagaagaaaatacacacaagcaccctcccatgtactgtaaccttcatttcataaaaggaatcatatatcgtaccaaacactaaaaagatcagaatctctgtataaaggacagttcttaacattaactagtttctctrtataagacgtttttttttcactcaggaccttgaagcatttaagagtttcttctggcaccaaatgcaggaggcactctgctgttcattcataccctgcacaccaaacaagtagcgttgcctggaagtcactctccagaatgcaggcatctaggatgaaagcactctaccacatcttccacagacgttcctcctccttgtcaaggtgaaaatgaatcatttacaatatttccttactgttttttaagttcaattcaatcttcagctatttcccctgtttctagtttaaattgttacttccatcaaaataaaatgccttctcagatatcttattggtatgcaccaaaaaaaaaaaaatgaaaaaaagga

SEQ ID NO: 123129 - DNA, 642 bp, Homo sapiens
tattgaaagcagtgcctctgcagaactattttttaggcaggagcaaagcaaasgagaatgtttggaggcatctagtttctaggaaaatgaatggagcccaattcttttttttcttttattttgctgctttttctcactggaaaatagagcccaattttatagtccgttcttctccagaaattgaattatggtgatgagtacttgtttctggattgtttggcctaggatgaactattgacaaataccttgttaacctgaattgtatgcacttgaatatgggcttttagatgttgtctccagttgtggaggatcctgtcgagagtggatcatttatgaatcgagaatccctgggaaattatctttgtttgcagcagaatgggcatcatcagtgcttgggttcaacctgttaaactactactgttactactaaaaatctcagggttttatctgatgtttgggggtagtggttttcctatgtgtagtgttggtattatatcaaagcctttttctcgatatttttatgtattaaggatgctttgaaatgcctaaatccttagtggctgtgggtgtcttccaatagttgtcctgtgaaaaaggattggttagacagataccatcaggcactgtactgagagtgaccac

SEQ ID NO: 123130 - DNA, 642 bp, Homo sapiens
tattgaaagcagtgcctctgcagaactattttttaggcaggagcaaagcaaacgagaatgtttggaggcatctagtttctaggaaaatgaatggagcccaattcttttttttcttttattttgctgctttttctcactggaaaatagagcccaattttatagtccgttcttctccagaaattgaattatggtgatgagtacttgtttctggattgtttggcctaggatgaactattgacaaataccttgttaacctgaattgtatgcacttgaatatgggcttttagatgttgtctccagttgtggaggatcctgtcgagagtggatcatttatgaatcgagaatccctgggaaattatctttgtttgcagcagaatgggcatcatcagtgcttgggttcaacctgttaaactactactgttactactaaaaatctcagggttttatctgatgtttgggggtagtggttttcctatgtgtagtgttggtattatrtcaaagcctttttctcgatatttttatgtattaaggatgctttgaaatgcctaaatccttagtggctgtgggtgtcttccaatagttgtcctgtgaaaaaggattggttagacagataccatcaggcactgtactgagagtgaccac

SEQ ID NO: 123131 - DNA, 368 bp, Homo sapiens
gcattgccctttggacactttttttggtttggtctggaatttcaccatgagctttgaaaaatcataataattgtcagatatacacacacatacatacatatacacacatatttatttatgtaactgaattatataaatatgatatagtgtgcactctgaaaaaacaaacagtatttagaaaatcagaaaaccagaagagaagatatcctgaacagtgccttttacttttatagcaaagggttytaaattacaagtgtgataagaaaactattcattaatattcaagaaacccatattaagaacttaccattttcaataggataagaaaacatatgtctcattggcacattgattttaaaagtacctgt

SEQ ID NO: 123132 - DNA, 549 bp, Homo sapiens
gataagaatataaaatggcacatccactatgaaaaacagtatggtagttcttcaaaaaattacaaatagaattagcatgttatccagcaattccacttctaggtaaacacccaaaagaattgaaaacagggtcttgaaaagatattttcacacccatgttcataktagcattacacaacagtgaaaaggtagaagcaacccaaatgtccactgaaagatgcacaaataaacaaaatattgtataaacatgcaatgaaacattattcaaccttaaaaaggaaggaaattctgacatatgctacaacacaagtgaactttgagacattatgttctacagatataaatttctattgtaggctgtgatgatagtggtgatgatgtcactactctcattactgttatgaatactatcattaatctaagttggcatatgagactgaagagtggtgaaatggaaaaggataaggagcaagacagatatatatgtgaaccctggctgctgcacttataaactatgtggctagaaaattctacttttattatttgagc

SEQ ID NO: 123133 - DNA, 578 bp, Homo sapiens
ataaactaatttagagggtcagagaagacaactaaaaaagtgatctggaagttgagctttaaagggtgagtaggagttaaccataaatagttaaccaagggagagtctgggaggagaagcagggggaatcccatgggtgkggacaaagtatctgtggaaaccaagtccaacaggagcatagagtgtccaagagaaagttcgtgtggctggagtacacacagctaacacaaaatgaatttggggccagtaggcagggcacacaggaccttgcatattgtattcaggattctagtcattatcttagaactggggagtcattgaaaggttttgtgtgggtgaatgtgtgtatgtgtgtgtgtgcttgtgtgtacactctgacaacacaggctctggaggaaggatcatgcatgatcgtatttatacttcaactcagtcactctagctgggatatggagaagacattaaaaattgaaatggaaatcaagctacctatggagactggatagaaagctaatgccttgatctagggaagaggtgatgaaaaaatggcccaagataattaccaggaagcaagtcag

SEQ ID NO: 123134 - DNA, 612 bp, Homo sapiens
ctgcccgtagcccagcacctgaaaagtgaggttgttaaacagaggcactcacagtctttcctagtgagtccgcttttcaatttataaaagataaaacgttttggtaagttgtcaaagtagcaaaatgagcttcttcctctactcacatgtgttgctatgtgatgttcacctattcttgggattttgttttcttacaccttctaattgtctcattgactttacccttttaaaggtgtgtgtgtgtgtgtgtgtgtgtgtgtgtgtaaacatatatgcatgcatgtatctacacaaatatattttttcctgttcaaactactcaactaagaaagatgcatgagaatataaataacacttgtctcacctttttgagtattgactttggactatttaagaaggattttagtttatgagctgttgccamagcatttcagtttttctctgaaggcacttctctaaggcaaaataaggctgaataatggcttttggggacaagggaagtggaaacttatttgtttgtgtttttataggaacacaaattagaataggttgaggactccagtatcctcaatcccagaggtatccagggacgcttcattctcagctcatggc

SEQ ID NO: 123135 - DNA, 563 bp, Homo sapiens
ggaaaggggaagactgagagggattgtatgtgcttgacttccttcttatggaaaataaaaatctatggtggagactgatgccagcctcagttccaactttatctagtctgcttttccaacctgcacgttgaagcaattacatttttctgatgatgctaataacatgttttaattcttcagttaaaacatccatgtgtttacttaagtgttgtttttctgcagaaaaccccctgagtcagattttgctgtgtgtatttactgccagtgcctttacttgacactagggatctttttagctatagaaaccagtggagtccagagttcttgagggttttggagtttcctcaaatttctaattctcttcctcagagtttttctttatggaggcaactacaacaacaacaaaactcaaaacyggtatatttttacctagccattgaaaggtcatctgagatgcctctttacaaaaggaaagccagtcccccttcagaatctgtctgctgtgttcacggaaagggcagcccaagaaaagatgagtggagattctgtgctggtgggaccct

SEQ ID NO: 123136 - DNA, 571 bp, Homo sapiens
atctgttttaatatagtggtttggcctctgattatttataggttttataaattttagaatcaatttctctttaaggtggctcagatttttcaactcttgtgcacataaaattgagttgaagttcattgtgcctttttttctttatccaaattttgagttaaagcttcatatggtaactgcatcctgttcggacactatagtctaaatttttgaaactgtgtggtgttcgctaaaagtaggaataacaacrtaaaagctaattaaggtcacaaacttcggtgaaacccttaaaagtccaaatcttcttgatattgtgaaccgtaccccttccagtttagtttcttctggactttccttacttaactgacagttaccttttaaaatttgcacacattatgattaaaattgggcctctactgtgatgattcctatttcctctcatgttttaaagtgcaaactaacatttaagtgaacattagcatcaagtagtgcagacacttgtatgcatttccttgattcaatttgtgaccttaccagttttgaattggaattgcaccatttcgtagataaa

SEQ ID NO: 123137 - DNA, 571 bp, Homo sapiens
atctgttttaatatagtggtttggcctctgattatttataggttttataaattttagaatcaatttctctttaaggtggctcagatttttcaactcttgtgcacataaaattgagttgaagttcattgtgcctttttttctttatccaaattttgagttaaagcttcatatggtaactgcatcctgttcggacactatagtctaaatttttgaaactgtgtggtgttcgctaaaagtaggaataacaacgtaaaagctaattaaggtcacaaacttcggtgaaacccttaaaagtccaaatcttcttgatattgtgaaccgtaccccttccagtttagtttcttctggactttccttacttaactgacagttaccttttaaaatttgcrcacattatgattaaaattgggcctctactgtgatgattcctatttcctctcatgttttaaagtgcaaactaacatttaagtgaacattagcatcaagtagtgcagacacttgtatgcatttccttgattcaatttgtgaccttaccagttttgaattggaattgcaccatttcgtagataaa

SEQ ID NO: 123138 - DNA, 600 bp, Homo sapiens
aacatcataaacattttttcagcttaatttgtgcctatgaccagtcagatattagctacagcaatgtgtttgagtacttcatgccgcgtctaaatgcatccatccatctcagcatgaagatgtgtgtgtgaatgctcccctcatgggcaggggactgcttgtccttagggcaattctagttatctacatcaaatataaaatgtacatttggttgtgaaaatctgagtgtatcatagagccaggaaggagactacaaaagagggatcacacttggctgggaaacttggcaccttgcycagtgattggctttaaaggctcactgagaccaacttgctgagcaagggcttcgtttttcccatctgcatgtgcctcagtcatgccaggtggagagttcttaagcttcttctctctcatctcctgcaattcccaaagcaggggcaacctagatccctgcttcttttggagggatgagaagtgaagggccagttgcaggaccttgtgatgaaaaggtatctggtcctctcctcacccttggtaacatgggatcccagaattgctccacagggccctgccctgcaccatcagctcagctggccaggg

SEQ ID NO: 123139 - DNA, 600 bp, Homo sapiens
aacatcataaacattttttcagcttaatttgtgcctatgaccagtcagatattagctacagcaatgtgtttgagtacttcatgccgcgtctaaatgcatccatccatctcagcatgaagatgtgtgtgtgaatgctcccctcatgggcaggggactgcttgtccttagggcaattctagttatctacatcaaatataaaatgtacatttggttgtgaaaatctgagtgtatcatagagccaggaaggagactacaaaagagggatcacacttggctgggaaacttggcaccttgcccagtgattggctttaaaggctcactgagaccaacttgctgagcaagggcttcgtttttcccatctgcatgtgcctcagtcatgccaggtggagagttcttaagcttcttctctctsatctcctgcaattcccaaagcaggggcaacctagatccctgcttcttttggagggatgagaagtgaagggccagttgcaggaccttgtgatgaaaaggtatctggtcctctcctcacccttggtaacatgggatcccagaattgctccacagggccctgccctgcaccatcagctcagctggccaggg

SEQ ID NO: 123140 - DNA, 549 bp, Homo sapiens
agactcagcttctacagaaaatttaaaaattagccaggtatggaggcaagtgtttattgtcctagttacttgggaggctgaggcaggaggaccrcttgtgtccaggagttcaaggctgcagtgaactatgattacaccactgcactccagcctcagtgacagagcaagatcctgtttctagcttaaaaaagagaaaaaatggaggggcatattgtgttcatagattggtagactcaacttggtaaagatgttgattctcctcatactgatatacaggtttaatgcaattcctatcaaaatcccagcaatatattttgcagatacagaattattctaaaatttatacggaaaggcaaagtaagtagaatagttaaaacaattctgaaaatgaaaaacgaagtggaaggaatcaatctagccaatttcaagatatattacatagttacagtaataaacattgtgtgatatcagtggaagaatatacacattgaaaagaacagagaacccaatataagcctacacaaatatatccaactgattttttacaaa

SEQ ID NO: 123141 - DNA, 549 bp, Homo sapiens
agactcagcttctacagaaaatttaaaaattagccaggtatggaggcaagtgtttattgtcctagttacttgggaggctgaggcaggaggaccgcttgtgtccaggagttcaaggctgcagtgaactatgattacaccactgcactccagcctcagtgacagagcaagatcctgtttctagcttaaaaaagagaaaaaatggaggggcatattgtgttcatagattggtagactcaacttggtaaagatgttgattctcctcatactgatatacaggtttaatgcaattcctatcaaaatcccagcaatatattttgcagatacagaattattctaaaatttatacggaaaggcaaagtaagtagaatagttaaaacaattctgaaaatgaaaaacgaagtggaaggaatcaatctagccaatttcaagatatattacatagytacagtaataaacattgtgtgatatcagtggaagaatatacacattgaaaagaacagagaacccaatataagcctacacaaatatatccaactgattttttacaaa

SEQ ID NO: 123142 - DNA, 499 bp, Homo sapiens
tgcccatggaatttatcccatgatgacaaaacagaatagaacccagtcccaagccaatcagctatcacattcccttggcctcttagattggctcaagaatgagctagcaacataaattgatacaatccaaaggaacatcagacttttgtctaataattgaacgaaaagaacacctgaccaccatccccaccaccctcatggaagctcgtggtcctgggagcttctgggagcctcttgctaccttgagggagttggcttaggagcaaaatcaacaatgagaagccagagcatcccagcaaacagagccacggtcttaacaacatgacccttgcactcaaaccacacctaaagcctgcccttcctctggactttgcaattacaacagatgtgttagtctgtttttttgcattgctataaagaaatacctgagactacataatttytaaaaaaaaaaaaaaaaataaccaaaaactgccatgctgtacaggcatggcaccaa

SEQ ID NO: 123143 - DNA, 602 bp, Homo sapiens
ttatgttttcataactttctatcatgaatatgcctttcctttgttatcagagaaaatatcaatcttacaaaatgatctcaaatggcttaaattaaaaagttaataagcaacactcaagtattaacattaagccatctttgaagtcagaggtcaccctctatagacatctttaaataaagggtcacgctagtatcctccattctaggataagatcatgagtatttttctaaccacatttgtcctttttaatgaaataaaccaaacaaggtcttggggctggttaataactgcctggactagactctaggtctcctgtcttgagatccaggactatttccatcacccggtgccctctgcccagcccacaagcaacrgcattagaatgtatttgtcatccagagagaggtcattcaatacatttggagagtatcatcagttccctaaaaataacttggcagctcagaagctcactgtttaaaagacttaaaaccaaaggacaccctgagtttaaaatgtgaacaagcacacagtgggtttaaaatgtttgcattctctttcttgcctttcgggtttacataatagaaattaaagtgtgcatacac

SEQ ID NO: 123144 - DNA, 602 bp, Homo sapiens
ttatgttttcataactttctatcatgaatatgcctttcctttgttatcagagaaaatatcaatcttacaaaatgatctcaaatggcttaaattaaaaagttaataagcaacactcaagtattaacattaagccatctttgaagtcagaggtcaccctctatagacatctttaaataaagggtcacgctagtatcctccattctaggataagatcatgagtatttttctaaccacatttgtcctttttaatgaaataaaccaaacaaggtcttggggctggttaataactgcctggactagactctaggtctcctgtcttgagatccaggactatttccatcacccggtgccctctgcccagcccacaagcaacagcattagaatgtatttgtcatccagagagaggtcattcaatacatttggagagtatcatcagttccctaaaaataacttggcagctcagaagctcactgtttaaaagacttaaaaccaaaggacaccctgagtttaaaatgtgaacaagcacacrgtgggtttaaaatgtttgcattctctttcttgcctttcgggtttacataatagaaattaaagtgtgcatacac

SEQ ID NO: 123145 - DNA, 628 bp, Homo sapiens
aaacctgagaaataagagagagcttatagaatcaccatgtctggaaaatcttcactggtgattaaaatcttaagaattttgagggagaaggaatattattttgattaaaaatttcacagataggaggagcaccaatggcatcctcctgataatcaacatcctaactccattcattatcatttactacatagttagggaattaccagcttgatcttatttttaattactaaatatcctttctaagtatatactcctaaatttgggatatgatgacygcataaaatatgaaccacttgtcccatctattgtgagataagctaagtctcaattctttattgcttaacagtgttagcttccagtgggccagtgtggtaaatgtctgaaaacttctaaaacattctctatagaatgatcatattcttttataattttttgactttttgaagaagacgaagtaaaacagtcaaggtatgtataaagccattatagtagcctttatcaagggatcttcattttctggccttcaatctttagtctcattgtaaccaaggagaccaagtatccacatcataataacaaaacttaatatttactattcctagaaatttcctgagtattttttacacat

SEQ ID NO: 123146 - DNA, 628 bp, Homo sapiens
aaacctgagaaataagagagagcttatagaatcaccatgtctggaaaatcttcactggtgattaaaatcttaagaattttgagggagaaggaatattattttgattaaaaatttcacagataggaggagcaccaatggcatcctcctgataatcaacatcctaactccattcattatcatttactacatagttagggaattaccagcttgatcttatttttaattactaaatatcctttctaagtatatactcctaaatttgggatatgatgaccgcataaaatatgaaccacttgtcccatctattgtgagataagctaagtctcaattctttattgcttaacagtgttagcttccagtgggccagtgtggtaaatgtctgaaaacttctaaaacattctctatagaatgatcatattcttttataattttttgactttttgaagaagacraagtaaaacagtcaaggtatgtataaagccattatagtagcctttatcaagggatcttcattttctggccttcaatctttagtctcattgtaaccaaggagaccaagtatccacatcataataacaaaacttaatatttactattcctagaaatttcctgagtattttttacacat

SEQ ID NO: 123147 - DNA, 572 bp, Homo sapiens
gtggggttatgtggtaaaaaaaaaatgattagaaatgtcctgatgtgtcagacatctcaaccataaagctcacttaagccttctaaaagtttatacttaagtgatcaaaattctaaatttctaccagtcagagcccyagccatgaaaatttaaggcaactgggaattcaacttacctgtacatggccctctatgcactatgctattgcactgcctggagtacagcagtgccagcactaaattcaagctgaaagtgttttcttccacagagtgacatggttgtaccagttaggatacctttgagtacaaaggtccgaaacttaactaaatgagcttccataatgggactttgcttccttatacaaccaaggtctggggtaagggagctcccagtgttactccaagagctcagcagcatcactgaagaacaaatgtcttcccatcttccttttctatcatactcagcacagctttaggcttgccctttaacagtcagaagattgttactactgtttcaagcatcatgacaatcaatatagcattccttctaaggaaagggttattaagcattta

SEQ ID NO: 123148 - DNA, 572 bp, Homo sapiens
gtggggttatgtggtaaaaaaaaaatgattagaaatgtcctgatgtgtcagacatctcaaccataaagctcacttaagccttctaaaagtttatacttaagtgatcaaaattctaaatttctaccagtcagagccccagccatgaaaatttaaggcaactgggaattcaacttacctgtacatggccctctatgcactatgctattgcactgcctggagtacagcagtgccagcactaaattcaagctgaaagtgttttcttccacagagtgacatggttgtaccagttaggatacctttgagtacaaaggtcygaaacttaactaaatgagcttccataatgggactttgcttccttatacaaccaaggtctggggtaagggagctcccagtgttactccaagagctcagcagcatcactgaagaacaaatgtcttcccatcttccttttctatcatactcagcacagctttaggcttgccctttaacagtcagaagattgttactactgtttcaagcatcatgacaatcaatatagcattccttctaaggaaagggttattaagcattta

SEQ ID NO: 123149 - DNA, 648 bp, Homo sapiens
cagtgccagcactaaattcaagctgaaagtgttttcttccacagagtgacatggttgtaccagttaggatacctttgagtacaaaggtccgaaacttaactaaatgagcttccataatgggactttgcttccttatacaaccaaggtctggggtaagggagctcccagtgttactccaagagctcagcagcatcactgaagaacaaatgtcttcccatcttccttttctatcatactcagcacagctttaggcttgcccyttaacagtcagaagattgttactactgtttcaagcatcatgacaatcaatatagcattccttctaaggaaagggttattaagcatttatataattgtggataagaaactttcccataacccaaacagatagcccttcacatcccaaaccagactttagctacaatgggttaagatgcctggccataacctagtcacagataaagcaggcaaaatggttatctcacattttaatctttggccaaaaatgtcctaaaaatgtaaaaatggagaggttgtttgttgggtaatctgtaggcatatctgacacgataatggtcctcgattttgttagctgtctatcattagaatgtattcatgtaggtaacatagggttaccacaaaatttta

SEQ ID NO: 123150 - DNA, 648 bp, Homo sapiens
cagtgccagcactaaattcaagctgaaagtgttttcttccacagagtgacatggttgtaccagttaggatacctttgagtacaaaggtccgaaacttaactaaatgagcttccataatgggactttgcttccttatacaaccaaggtctggggtaagggagctcccagtgttactccaagagctcagcagcatcactgaagaacaaatgtcttcccatcttccttttctatcatactcagcacagctttaggcttgccctttaacagtcagaagattgttactrctgtttcaagcatcatgacaatcaatatagcattccttctaaggaaagggttattaagcatttatataattgtggataagaaactttcccataacccaaacagatagcccttcacatcccaaaccagactttagctacaatgggttaagatgcctggccataacctagtcacagataaagcaggcaaaatggttatctcacattttaatctttggccaaaaatgtcctaaaaatgtaaaaatggagaggttgtttgttgggtaatctgtaggcatatctgacacgataatggtcctcgattttgttagctgtctatcattagaatgtattcatgtaggtaacatagggttaccacaaaatttta

SEQ ID NO: 123151 - DNA, 620 bp, Homo sapiens
aactctcgccctctctagttctctttctgctcttatcctgttggttctgtttctctgaagaattccaacaaaagaaaaaaaaaagcttcttacatggcgggattctagctttatgtgaagggtcttctatttgactttccattttgaagctcctgggcattcattgtctccttgctttcaagtacattcagtctctgggttcaacaatctgcaaataaacaccaatgtcaatgcctagcttaccatcatgggagtgtgttttcatttagctttaagcctttaagtatttcttattaaattgatagctaattcatgcattagaggtatttttaaatgctgtgcatttttaggtattattttttgggggagttagagggttagccagggtcaccatacaactggaagtaaaatgataatttgtttccacagtgctatttctcatttgtcctttatctcacacatttacttcagctttgaagtagcagccctgatttctaggaaaaaaaacttatgtgcttcaaggatagcaatcagcagaatgcatactgctctttttagarcaagcattaaattaaagaggctgtggtgagctgaatctgagatgacatccatgattcctg

SEQ ID NO: 123152 - DNA, 457 bp, Homo sapiens
gtagcacagaatgcagactgcagccttggccagcactggggatgttctatcctcccttctttctcctttgaagggaaaatgagaataggctctctaaagatttccctagaaatgttgctcagttagtagatactgacaaaaaggaggctgattaaagactacagcattctctccaaatacagaagaaacagtcagacagcacggcgctaaatgctaagaaatctgtgaattttggattggacagagggyatgaatctcaacaatgccacttcctagttgtatcctgtttgaaaaattactcaataatttaacttcagttttcttatgtattaagagaggaaaatatttttattttgcagaattattgtgagtgttagaataagattaggcatagtagtcaccccttaaattatagctgaacagtatagaatcaggtacaaaatgaagtatagctatt

SEQ ID NO: 123153 - DNA, 527 bp, Homo sapiens
gtatttaatttataagactgtaaaactgttttcaaaagcgactgtagtatcttgcattcccaccagcaatgtatgagagtaccagtagctgtgcatcatcactagaatttggtattgttggatgtttttatttccattgtaagaggtatgtagtgatatctcattgtgtttttgagctgcatttccttaatgacaaatgctgttaaactccttttcatgkgcttattagccattcttgaattttctttggtaaaatgtctgctcaaactgttcccagttttcaattgggttttaagttttcttattattaattttgggagtcacttacatattctcaacacatgtccttaactagctacttaattcagaaatattttcttccgatgtggcttaaaaattaatgtattttaaaagttcttaaaactcttcaaagagcagagctttttaattgtgatgaagtccagtttattcattttatttatgaatcattccattgattttgaatgagtttgctcattagagctcaa

SEQ ID NO: 123154 - DNA, 458 bp, Homo sapiens
agaatcaaacaatatagaaaaaggataatacatccagaccaactgtggtttatcccagaaatgcaaagtagwtttaacattcaaaatcaatccatgtaatccatagtattaacaaactaaaaaagaaaaccatatgatcctttaaacagacacaaaaaattagataaaatccaacatccatttgttatttaaaaataaaattgctctcatcgaactagagatagaaggtagcattctcaacttaataaaggacatttatgaaaaacctacaatgtgatatttaatgctttcccctcccaagatcaggaataaaggaaggatgtccacatctagccaaaattgtagggaagattctagtcaattcaataggctgataaaaagaaacaaaagacatccagattgaaaaggaagtagaaaactgtctacttacaatgacataggtttgtctgtagaaatcc

SEQ ID NO: 123155 - DNA, 458 bp, Homo sapiens
agaatcaaacaatatagaaaaaggataatacatccagaccaactgtggtttatcccagaaatgcaaagtagttttaacattcaaaatcaatccatgtaatccatagtattaacaaactaaaaaagaaaaccatatgatcctttaaacagacacaaaaaattagataaaatccaacatccatttgttatttaaaaataaaattgctstcatcgaactagagatagaaggtagcattctcaacttaataaaggacatttatgaaaaacctacaatgtgatatttaatgctttcccctcccaagatcaggaataaaggaaggatgtccacatctagccaaaattgtagggaagattctagtcaattcaataggctgataaaaagaaacaaaagacatccagattgaaaaggaagtagaaaactgtctacttacaatgacataggtttgtctgtagaaatcc

SEQ ID NO: 123156 - DNA, 594 bp, Homo sapiens
gaaaggtactgtgcaacctgcaaagcttcaggttggccaaaagtcaagtgcacagaaggtcctctaggactttcctgggctgctggggaagaccaggaccatgctttggagccaaaatgtggaggcctgaacttgatcctggagacagaaggctcatgtgtttggattctttccataagrggggttcccttgtagaggcagatgtggtcataactgctttgggaaacttgccataggggagagagatctttcaaacttttaggaagaatttggcaactcagtggagagcacccacactggaggcagataaaaatgtgggacagaactgacttctttcttgaggctttgtcttactcccccatcaaaaagggagggagcctctatagggcagagacctcatagtgctatttgtttactgcacacagatggcacatctcctacgggagatgtctgcaatggctgtcacactgaactgagaagaaagtacagaggaaatgatatgtaaaattacaaagcaagtagtgtttttggtgaagggggagtgtcatcagaggaaagaattatttcagcaatgccttggggtttggaaattag

SEQ ID NO: 123157 - DNA, 620 bp, Homo sapiens
acctcctttgctaataataatgaaaataacaataaaaatggcaataataacaggtaacacttattgagaatatactctaggacagggacttacattgattatctcatacagtcccccacaacaaccctctgatgcgggaccatcattaatcacatttaaaaacaaagaaagaaagctcagaaaaactaggcagcttatccaagctcacacagctaaagcatgctaagctacactagtcgtatattctcttcacagctcttatcacaggtgaaatttgacattatttgtatgagtttttgattaataactttgtatcccagaagactgtaagctcaataaggttactatatccctagttccttacatagttattgtgccaggtgtagtttagataatcaataaatatttgttgaatgaatgtatttttttatgtgktttcatttttattggggcagtgttttcatttctctatagcaatcacaaaggaattttataagcacatattagcacgtaatcttttaattagagtttgatttctcactccaccatctataatgatagtaagtttgtgtatgctgatgtcaaaaaaactagtctcccagagacatgactattaacta

SEQ ID NO: 123158 - DNA, 569 bp, Homo sapiens
aacatacaatatttggttttccattcctgagttacttcacttagaataattgtctccaggaaaagtgtgttttaaaggatgatgagaaatttggaagatatggggaggttgtgggaaaaggagatcatacctctcgaggcaatggcagaatgtacccattctctcctgagaacatcaaatggtctggtttgcctggtgccctcagtgaagcttcaggaartcaggtgggaatcatgggtggtggccactttgcagagggtcgcgggatttgtggctggctcagcaagtatttgggagcagaaactgcctgctgctatcattgctaaatcttctacttagcggagctgctgaggggtgctttccaaaaagtctttaatcatgttttgagtctttataaaaactcagaaatcatacagtttttctttttcttctttcttcagatacatgtcatagcagtaagatatgtatccttaaatatttcctcagaaaaaattaatggagtgaattaaaagagactttctttcaagctgttccaaatgaactcatttcacagcctttatcatgccttc

SEQ ID NO: 123159 - DNA, 613 bp, Homo sapiens
gattttgtggtacctgggtgactgcccagagcactaaatcctggagttgagaatccctttgaagacccttcacaatgcctgggaatttcaaagaatatcctcataattcagaaaaccctccaaatgtcattttaccttgttcttttgcctccccattgtgctggctgtccctggtgacagactgcagcccagccatagcctgggggagggagtgggttgcagcagatgtgcacatctggatcacctgcccctaacccagcacactcyaacttctccatggctttggcttccacaggacatttctcggggtggcctcctctctgaggtaactgaatcttttagaatgagggtttaactactgattaagacactctgtaatattcaggctgttcagtaaactacatttagtcctctttggggtatggaatcttgctcatttccttgtaagtaaataattggttcttggattgtagtcctcctaacaaatggacaatacatagcttgaggtattgggagaactaagggcatcttttgcgttctgctatgtaagtaatctaggcaaaaggcagttttgattctaattctactttccctctgtgggttttacacacag

SEQ ID NO: 123160 - DNA, 569 bp, Homo sapiens
aacatacaatatttggttttccattcctgagttacttcacttagaataattgtctccaggaaaagtgtgttttaaaggatgatgagaaatttggaagatatggggaggttgtgggaaaaggagatcatacctctcgaggcaatggcagaatgtacccattctctcctgagaacatcaaatggtctggtttgcctggtgccctcagtgaagcttcaggaagtcaggtgggaatcatgggtggtggccactttgcagagggtygcgggatttgtggctggctcagcaagtatttgggagcagaaactgcctgctgctatcattgctaaatcttctacttagcggagctgctgaggggtgctttccaaaaagtctttaatcatgttttgagtctttataaaaactcagaaatcatacagtttttctttttcttctttcttcagatacatgtcatagcagtaagatatgtatccttaaatatttcctcagaaaaaattaatggagtgaattaaaagagactttctttcaagctgttccaaatgaactcatttcacagcctttatcatgccttc

SEQ ID NO: 123161 - DNA, 569 bp, Homo sapiens
aacatacaatatttggttttccattcctgagttacttcacttagaataattgtctccaggaaaagtgtgttttaaaggatgatgagaaatttggaagatatggggaggttgtgggaaaaggagatcatacctctcgaggcaatggcagaatgtacccattctctcctgagaacatcaaatggtctggtttgcctggtgccctcagtgaagcttcaggaagtcaggtgggaatcatgggtggtggccactttgcagagggtcgcgggatttgtggctggctcagcaagtatttgggagcagaaactgcctgctgctatcattgctaaatcttctacttagcggagctgctgaggggtgctttccaaaaagtctttaatcatgttttgagtctttataaaaactcagaaatcatacagtttttctttttcttctttcytcagatacatgtcatagcagtaagatatgtatccttaaatatttcctcagaaaaaattaatggagtgaattaaaagagactttctttcaagctgttccaaatgaactcatttcacagcctttatcatgccttc

SEQ ID NO: 123162 - DNA, 542 bp, Homo sapiens
caaaattacttataattttatgttgaatcgctttaggatcagaatcacatatgggtttgtgtctcttgtctttttgtcttcatttataggtatttatttctgtcttgatttttttttcatgctggctattacatataaagtaaggcagatgacctacatgtgattctccttcagaaacrattcatttgttttgccaggcagttagaataggagcaattcttcttgtttcaatcagagactgaagttatcaggccacgtatccatctctgtgagggctgatctatttataatatacattactcattgaatatctcaactgaaagcctttctgggatctcaactgcaagccaagtgtttatactaggcctctctcttggtgatccctaagtgatatttttgtgtgtgtctccagctcaataaaactgactaactgcttagtcttttatcctcttgttacaaccttcagcaagtgctttgagagaggcagagcactgtagaatgtcagctctcttctctcaagtttcctttttcccagtgctttt

SEQ ID NO: 123163 - DNA, 350 bp, Homo sapiens
gattttattcttttttttatagccatgtagtactccttggtgtatattttctgtatccatcccaccactgatcaacacttaggttgattccatgtctttgctattatgaataatrctgtgatcatgtaagacatgagtgcatgtatctttttggcataatgatctattttcctttgggtacatacccagtaataggattgctgtattgaatggcagttctgttttaaggtctttgagaaatctccaaaccactttccatagtcgctgaactaatttacattcccaccaacagtgtataagcattccattttctctgcatcctcaccagcaactgttgcttttggatgttt

SEQ ID NO: 123164 - DNA, 471 bp, Homo sapiens
gttatattgtggtctgtggttgataagggcttttatcttgactagcaggagagagtgcaatatggagcactctacagatcagcagttctctatcatttttcaatttgtaattawcaaactgcctgactgagaggcaggataactagtatcatctttcccagacttataagaagaattacctggaggcctcattaaacatacaaattcccagctccacccagatcctggtaaatgagagcctccagggaaggactgtggatattcatatttttagtaagtttgaaggtaattgtgttagctgatggttttgaggatttataattcaactttgccattgtctgtgttgagatgacatgatatttcaccatgtctaaacatgcttacttttctgtaaaagcaaggtgatgatagtatctccttctgggtactattgtgaacattaaatgacaaaatgtgtgcaaaacaattatc

SEQ ID NO: 123165 - DNA, 615 bp, Homo sapiens
ttttaaaagtgacttacgtatttttctcacaagggaggatgattgtagaggagtytagagcctgcatcgtggttccaagttagcatcaccgttcctggtccttccatctttctgcttagtcatatttaacttgtgtttatttcttcatgatcagaatatgtgtctttctcaactatcatatgtatgttctaggtagaaaggagaaaaacaagaatttatgttgttctgtcaaattatagaaagtttatttgataataaatcaactgttaaaaagtaccccttaaaagtatagtaagtatacaatattaaaagaaagcatgggactttgcacaattgtgaaatctattgagaattttgtaagtttttaaattttgatctgtgctgtcatttattaattcagtcaaaatttgcttcaaaaacacatagttgtcagaatatgtaagtgccttacaagagtgcaatctataagtaaaataattctgaatattcatctgaaatagtttgaaaaggttttgaaaatctactgtctctcttatttcttgtaatcaacatatttctcaataggaaaattcaccatttgccatcaaaatgtattgtctgaaacttccactggaa

SEQ ID NO: 123166 - DNA, 557 bp, Homo sapiens
cctttgaagccatgttgtatgaaagagcagttggatattgacgttggctacgaaaaccaatgggtaggcatttagattttggttcagtagaaaatctgaaccatctatcgattaagctctcaaaaactaaatagactgctgcctcctaaataaaatatgtctcccaccatggaaatgtcaagctagggtcacaattcaagtaatgtaaatatgaatctaatgacttccaagatgcttttccaacttaaagtgttagacaagtaccttttaaaacagtataccatttgaattacctgcaaccattttaatatttctgagagggttttttttgtgtgtgctccttctktcatcacatggagagttattttgccttttagggtaaaatataaaaacaaatgcacgtcacaatatgatgtggcaaacgttacccagaagccttagtgatgttgttgcgatggtattagcatgcacagagtatgcaactcgcagctctgctgtgtgcacttgttcttttgctttctctcatgtgttctgctccatatattttaagagagttt

SEQ ID NO: 123167 - DNA, 557 bp, Homo sapiens
cctttgaagccatgttgtatgaaagagcagttggatattgacgttggctacgaaaaccaatgggtaggcatttagattttggttcagtagaaaatctgaaccatctatcgattaagctctcaaaaactaaatagactgctgcctcctaaataaaatatgtctcccaccatggaaatgtcaagctagggtcacaattcaagtaatgtaaatatgaatctaatgacttccaagatgcttttccaacttaaagtgttagacaagtaccttttaaaacagtataccatttgaattacctgcaaccattttaatatttctgagagggttttttttgtgtgtgctccttctttcatcacatggagagttattttgccttttagggtaaaatataaaaacaaatgcaygtcacaatatgatgtggcaaacgttacccagaagccttagtgatgttgttgcgatggtattagcatgcacagagtatgcaactcgcagctctgctgtgtgcacttgttcttttgctttctctcatgtgttctgctccatatattttaagagagttt

SEQ ID NO: 123168 - DNA, 557 bp, Homo sapiens
cctttgaagccatgttgtatgaaagagcagttggatattgacgttggctacgaaaaccaatgggtaggcatttagattttggttcagtagaaaatctgaaccatctatcgattaagctctcaaaaactaaatagactgctgcctcctaaataaaatatgtctcccaccatggaaatgtcaagctagggtcacaattcaagtaatgtaaatatgaatctaatgacttccaagatgcttttccaacttaaagtgttagacaagtaccttttaaaacagtataccatttgaattacctgcaaccattttaatatttctgagagggttttttttgtgtgtgctccttctttcatcacatggagagttattttgccttttagggtaaaatataaaaacaaatgcacgtcacaatatgatgtggcaaacgttacccagaagccttagtgatgttgttgcgatggtattagcatgcacagagtatgcaactcgcagctctgctgtgtgcacktgttcttttgctttctctcatgtgttctgctccatatattttaagagagttt

SEQ ID NO: 123169 - DNA, 567 bp, Homo sapiens
gtttctctctctttcagagtcagctctcttcaggatgcgcatttatttctccctttggaggaggcctcagtccagctcagccaaggactgaaaggcacatctggctaattcaagactgaggtattgggaggtcyccttggccccagatctatgatatgttctcgagtcctgagacctgctgactctcgtatctcttttctcagttgggtcatatcttggggttatttgtgttcccagctctaacaggaaggttcctaagcactcatttcttcttaaccaatttctgaaggtaaaatgttggtgaagagtgctcttttcttcctgctaccattaattggtgtttattttgtgtcaggcactgttgagtattttacatttcttatccagtttgatctttacagcaactttatatgacagacattgttcccccatttttcaggctagaaatctgaggcccagtgtcccacaatggctgtgtggtgacactaggctttgagcacagatggttgacttccaaagcctatgttcctaaccattatgtcactctgtgttgtgacagcgccaaac

SEQ ID NO: 123170 - DNA, 567 bp, Homo sapiens
gtttctctctctttcagagtcagctctcttcaggatgcgcatttatttctccctttggaggaggcctcagtccagctcagccaaggactgaaaggcacatctggctaattcaagactgaggtattgggaggtccccttggccccagatctatgatatgttctcgagtcctgagacctgctgactctcrtatctcttttctcagttgggtcatatcttggggttatttgtgttcccagctctaacaggaaggttcctaagcactcatttcttcttaaccaatttctgaaggtaaaatgttggtgaagagtgctcttttcttcctgctaccattaattggtgtttattttgtgtcaggcactgttgagtattttacatttcttatccagtttgatctttacagcaactttatatgacagacattgttcccccatttttcaggctagaaatctgaggcccagtgtcccacaatggctgtgtggtgacactaggctttgagcacagatggttgacttccaaagcctatgttcctaaccattatgtcactctgtgttgtgacagcgccaaac

SEQ ID NO: 123171 - DNA, 567 bp, Homo sapiens
gtttctctctctttcagagtcagctctcttcaggatgcgcatttatttctccctttggaggaggcctcagtccagctcagccaaggactgaaaggcacatctggctaattcaagactgaggtattgggaggtccccttggccccagatctatgatatgttctcgagtcctgagacctgctgactctcgtatctcttttctcagttgggtcatatcttggggttatttgtgttcccagctctaacaggaaggttcctaagcactcatttcttcttaaccaatttctgaaggtaaaatgttggtgaagagtgctcttttcttcctgctaccattaattggtgtttattttgtgtcaggcactgttgagtattttacatttcttatccagtttgatctttacagcaactttatatgacagacattgttcccccatttttcaggctagaaatctgaggcccagtgtcccacaatggctgtgtggtgacactaggctttgagcacagawggttgacttccaaagcctatgttcctaaccattatgtcactctgtgttgtgacagcgccaaac

SEQ ID NO: 123172 - DNA, 404 bp, Homo sapiens
ttgcttcactgcagtgcctgaacatagtaggcatagtagattcaataaatctttggttccttggctggttgttgcctgctctgtgctgatgagaaaggagccaggcttccaggattcccttggtgttcttggctccctgctctgtctacctctcccctgcctctatggtaccttcccaggactgtctttgggctgctgcttgcattgrtagggtctcttcttcagggctgaggaggctggtcatgggataatgagacccctatacgatgctgcatgggagctggagttggatgggggccagtggaatatccgcgcaactctgcatccccctccatctactcatccctggttttgtttctctggagtaaggaatagagcaaggactgggatgggtgagccatgaa

SEQ ID NO: 123173 - DNA, 589 bp, Homo sapiens
ggctccttccccaaacaatccctcagtcacctcctcgctgtatggtacccagggaatgacccttccagatctgggcactgaggaggctgccccatccccaccctgcctggagccccactcactctgctgaaatgtcttctgattctcagcctctgccttgggggcttctcagttaaagcgcatcttgatcttgttcctctgtgactgtcyctggctcagcttccacccccagctggggctcagctatccctgtgtccccagtccagagcctgcctctcagccctcccaaggcggccttgagcgctgctcctgctcctccaggggagaggtcagtaaggcagggatttggctggtgccacttgaaccaagtccagatgcactgcccaaaataacttccctcgtctggccagcagtgcagtggagactgagttctgaagcaggcctttgtgaggtcagaggtggagttctgggtgggcactctgggcctcacagtcccagaggaaaggcctgtcctccaagccaatgtgcagcctgactctggggccagcgcctgaggaagccctccctgagccccagccctggggaaggc

SEQ ID NO: 123174 - DNA, 589 bp, Homo sapiens
ggctccttccccaaacaatccctcagtcacctcctcgctgtatggtacccagggaatgacccttccagatctgggcactgaggaggctgccccatccccaccctgcctggagccccactcactctgctgaaatgtcttctgattctcagcctctgccttgggggcttctcagttaaagcgcatcttgatcttgttcctctgtgactgtctctggctcagcttccacccccagctggggctcagctatccctgtgtccccagtccagagcctgcctctcagccctcccarggcggccttgagcgctgctcctgctcctccaggggagaggtcagtaaggcagggatttggctggtgccacttgaaccaagtccagatgcactgcccaaaataacttccctcgtctggccagcagtgcagtggagactgagttctgaagcaggcctttgtgaggtcagaggtggagttctgggtgggcactctgggcctcacagtcccagaggaaaggcctgtcctccaagccaatgtgcagcctgactctggggccagcgcctgaggaagccctccctgagccccagccctggggaaggc

SEQ ID NO: 123175 - DNA, 589 bp, Homo sapiens
ggctccttccccaaacaatccctcagtcacctcctcgctgtatggtacccagggaatgacccttccagatctgggcactgaggaggctgccccatccccaccctgcctggagccccactcactctgctgaaatgtcttctgattctcagcctctgccttgggggcttctcagttaaagcgcatcttgatcttgttcctctgtgactgtctctggctcagcttccacccccagctggggctcagctatccctgtgtccccagtccagagcctgcctctcagccctcccaaggcggccttgagcgctgctcctgctcctccaggggagaggtcagtaaggcagggatttggctggtgccacttgaaccaagtccagatgcactgcccaaaataacwtccctcgtctggccagcagtgcagtggagactgagttctgaagcaggcctttgtgaggtcagaggtggagttctgggtgggcactctgggcctcacagtcccagaggaaaggcctgtcctccaagccaatgtgcagcctgactctggggccagcgcctgaggaagccctccctgagccccagccctggggaaggc

SEQ ID NO: 123176 - DNA, 589 bp, Homo sapiens
ggctccttccccaaacaatccctcagtcacctcctcgctgtatggtacccagggaatgacccttccagatctgggcactgaggaggctgccccatccccaccctgcctggagccccactcactctgctgaaatgtcttctgattctcagcctctgccttgggggcttctcagttaaagcgcatcttgatcttgttcctctgtgactgtctctggctcagcttccacccccagctggggctcagctatccctgtgtccccagtccagagcctgcctctcagccctcccaaggcggccttgagcgctgctcctgctcctccaggggagaggtcagtaaggcagggatttggctggtgccacttgaaccaagtccagatgcactgcccaaaataacttccctcgtctggccagcagtgcagtggagacygagttctgaagcaggcctttgtgaggtcagaggtggagttctgggtgggcactctgggcctcacagtcccagaggaaaggcctgtcctccaagccaatgtgcagcctgactctggggccagcgcctgaggaagccctccctgagccccagccctggggaaggc

SEQ ID NO: 123177 - DNA, 553 bp, Homo sapiens
aatttcgctgtttacactgtgccttggtccagtaaccctgcactgcacatatacactttaaattggtgycttggggaaccacttcggtatttcttttttttttttcttttatgttgtaaacctttcttgtaaaaataaacaaaaaacaaaaaaaagacaaacaaacacattagactatgtcaacatgaggtcaggataatcaatattactgtctgaacctccacatcttgtcccactgaaaaggcttcagagataattacactcatggagttgttatttcctatggtaatgatgcttctttctgtaatacttcctgaaagatttgcttgaggctattgtacagatttaactgtttttccataagtagaaggggtaattctaatgataaaaattgtagtatataaaacaaataaaccagtaacagagtttatcattatctaatactatgtactgcacacaattgtatgtgtactttagtatcactgaaagaagagcaaatttgtttacaccatcatcaccacaaacagtagcaatacattttgctacaatgtta

SEQ ID NO: 123178 - DNA, 553 bp, Homo sapiens
aatttcgctgtttacactgtgccttggtccagtaaccctgcactgcacatatacactttaaattggtgccttggggaaccacttcggtatttcttttttttttttcttttatgttgtaaacctttcttgtaaaaataaacaaaaaacaaaaaaaagacaaacaaacacattagactatgtcaacatgaggtcaggataatcaatattactgtctgaacctccacatcttgtcccactgaaaaggcttcagagataattacactcatggagttgttatttcctatggtaatgatgcttctttctgtaatacttcctgaaagatttgcttgaggctattgtacagatttaactgtttttccataagtagaaggggtaattctaatgataaaaattgtagtatataaaacamataaaccagtaacagagtttatcattatctaatactatgtactgcacacaattgtatgtgtactttagtatcactgaaagaagagcaaatttgtttacaccatcatcaccacaaacagtagcaatacattttgctacaatgtta

SEQ ID NO: 123179 - DNA, 404 bp, Homo sapiens
ggtgtacaaagctgaaaaaggaaaaaatcttataaaacagagctataaaagatgatatttttgtatagctgcacaatgtgtttgtgttttaagctaaatgttattataaaaaatcaaagcgttgaaacatataaaagcgttaaaatatattagattaaaaggtatagtaagataatgttaatttcatggtccttaagtgtatcatttttataaaatccacagtcatatacrgtaatgtcctagggtttcacattcactcgccattcactcactgacttatccagagtaacttttagtcttcaagctccatttatggtaagttcccaatatagacgtaacatttttcatcttttacgctgtacttttactatacctactctatgtttagatacgtttaaatacac

SEQ ID NO: 123180 - DNA, 404 bp, Homo sapiens
ggtgtacaaagctgaaaaaggaaaaaatcttataaaacagagctataaaagatgatatttttgtatagctgcacaatgtgtttgtgttttaagctaaatgttattataaaaaatcaaagcgttgaaacatataaaagcgttaaaatatattagattaaaaggtatagtaagataatgttaatttcatggtccttaagtgtatcatttttataaaatccacagtcatatacagtaatgtcctagggtttcacattcactcgccattcactcactgacttatccagagtaacttttagtcttcaagctccatttatggtaagttcccaatatagacgtaacattttycatcttttacgctgtacttttactatacctactctatgtttagatacgtttaaatacac

SEQ ID NO: 123181 - DNA, 221 bp, Homo sapiens
ttaataataggaactaaagataaagaatataggattttacaggmagtatctaacaatcatttcaatatttatttcttagtctattaaagatcattccttcaaatcctcagataagtaaattctatcagaattttaagaatctgttatttattatgctacttctgaatatagaaaaacaaattgcctagctaaggctagcatatgttttattccaaaatcaa

SEQ ID NO: 123182 - DNA, 221 bp, Homo sapiens
ttaataataggaactaaagataaagaatataggattttacaggaagtatctaacaatcatttcaatawttatttcttagtctattaaagatcattccttcaaatcctcagataagtaaattctatcagaattttaagaatctgttatttattatgctacttctgaatatagaaaaacaaattgcctagctaaggctagcatatgttttattccaaaatcaa

SEQ ID NO: 123183 - DNA, 585 bp, Homo sapiens
tcagggaatatatgatgaagcaaaatctttatgtctgatgttctcagaatgaataaaattataaaatgcaaagtgcatatatcacagtttcagaagcaatattggtccmactgctgattttctaaaatggagaacagatcaacctctacacaaactgatagtgaggcagaatatcctggtcttcttattgtaagagaagaaaacgtctttcatggaagtaacagtgaaagaatccgttatcagaacataggacagaacgtttaggggtattttccctgcaggcactaattagatatatatcataagagctatgagcacacaggtttactatcagtgaggctgaagcagtgtaatttctgggaattataggcatgacacacatttgtgacaaataaaagacaatacagattaaactgctagatctaatgtcaacctgttttttgtagaaagcctagggataactgcccaaggtaaatttttacaatatgagcacctagtatttccagggacttctttactcctttccacattgcttttttgatgtatgacactttgattttgtctccgatacaatgaccacagcat

SEQ ID NO: 123184 - DNA, 585 bp, Homo sapiens
tcagggaatatatgatgaagcaaaatctttatgtctgatgttctcagaatgaataaaattataaaatgcaaagtgcatatatcacagtttcagaagcaatattggtccaactgctgattttctaaaatggagaacagatcaacctctacacaaactgatagtgaggcagaatatcctggtcttcttattgtaagagaagaaaacgtctttcatggaagtaacagtgaaagaatccgttatcagaacataggacagaacstttaggggtattttccctgcaggcactaattagatatatatcataagagctatgagcacacaggtttactatcagtgaggctgaagcagtgtaatttctgggaattataggcatgacacacatttgtgacaaataaaagacaatacagattaaactgctagatctaatgtcaacctgttttttgtagaaagcctagggataactgcccaaggtaaatttttacaatatgagcacctagtatttccagggacttctttactcctttccacattgcttttttgatgtatgacactttgattttgtctccgatacaatgaccacagcat

SEQ ID NO: 123185 - DNA, 585 bp, Homo sapiens
tcagggaatatatgatgaagcaaaatctttatgtctgatgttctcagaatgaataaaattataaaatgcaaagtgcatatatcacagtttcagaagcaatattggtccaactgctgattttctaaaatggagaacagatcaacctctacacaaactgatagtgaggcagaatatcctggtcttcttattgtaagagaagaaaacgtctttcatggaagtaacagtgaaagaatccgttatcagaacataggacagaacgtttaggggtattttccctgcaggcactaattagatatatatcataagagctatgagcacacaggtttactatcagtgaggctgaagcagtgtaatttctgggaattataggcatgacacacatttgtgacaaatmaaagacaatacagattaaactgctagatctaatgtcaacctgttttttgtagaaagcctagggataactgcccaaggtaaatttttacaatatgagcacctagtatttccagggacttctttactcctttccacattgcttttttgatgtatgacactttgattttgtctccgatacaatgaccacagcat

SEQ ID NO: 123186 - DNA, 585 bp, Homo sapiens
tcagggaatatatgatgaagcaaaatctttatgtctgatgttctcagaatgaataaaattataaaatgcaaagtgcatatatcacagtttcagaagcaatattggtccaactgctgattttctaaaatggagaacagatcaacctctacacaaactgatagtgaggcagaatatcctggtcttcttattgtaagagaagaaaacgtctttcatggaagtaacagtgaaagaatccgttatcagaacataggacagaacgtttaggggtattttccctgcaggcactaattagatatatatcataagagctatgagcacacaggtttactatcagtgaggctgaagcagtgtaatttctgggaattataggcatgacacacatttgtgacaaataaaagacaatacagattaaactgctagatctaatgtcaacctgttttttgtagaaagcctagggataactgcccaaggtaaatttttacaatatgagcacctagtatttccagggacttctttactcctttccacattgcttttttgatgtatgacactttgattttgtcyccgatacaatgaccacagcat

SEQ ID NO: 123187 - DNA, 611 bp, Homo sapiens
tgtatcaaaaatgaaaagtgaaatataaatgtgaaaggtctgatatttacttaatgaatatttaccaaatacttagcatttgcatattaagtacaagcctcagggaaaaaaatgtagccgtgtttaaatctcaactttatttcttccccttgctttattttttgaaaaataagaaatattcacattaaagaaaaaagagaacatatttwaaaatattttcatctatattctagtctaaccagagtatctataatttatattagttaccaaatgtattagacaaattaaaacacaagagtttttattattataatgcttttttaaaatatggacattcacaattttatgcttacaagagaatatataattcaagtactcccatgaaataaagtaccagttctctacaatcaaacctacagtgctaaacgtcagctgaaaattacttataaaactttcaattaaacttttactagtttaggtattctcttcatagttgagaatataatgcaaataaaagttgagtatgcctccctgcctccaactaggacataaagttgatcttccatgtcatgtttcttaaaagtaactctaaaataagtttctttcaaacc

SEQ ID NO: 123188 - DNA, 584 bp, Homo sapiens
gttaaaagcattcagttttaaaaggaaaacagatcataaaagtctagaaaatttgcagcctgacaatgtgatagaaaagaaaatcccattttctgaggagaaattcaagctggctgcagaaatttgcataagtagcaaggagctgaaagttagtcaccaagacaatggggaaaatgtstacagggcatgtcagagacctttgtggcagtccttctcctcacaggctgggaggttttagaggaaaaaatggtttcatgaggcaggctcaggttccctctatgtgcagtctagggacctggtgccctgcatcccagctgctctagccatgactaaaaggggccaaggtacagctcaggccgtggcttccaagggtgctagccccaagccttggcaggttttacatgttgagcctgagggtacacagaagtcacgaattgatttggcaacctctgcctagatttcagagaacgtatggaagcacctggatgttcaagcagaagtttgctgcaggggcagggtgctcatggagaacccctgctaggatattgtgaaatggaaatgtggggtgggcacccccacacaga

SEQ ID NO: 123189 - DNA, 598 bp, Homo sapiens
ttatcacaggtctatgtttttaaagagtagaagacacacgatttttaaagtatttctttttttaacgggaaaccaagtttatgaatgttgcccacagatcacaggacagagcctggcaggcagacagtcggagaactcctgctaaggcctgtgtggttgagcttccatgcctcggttcactccagctgctgctatgaaatatagcccagacacagggctaaaagggagcctcaacttccttgaaaattgcagatttcaccatcacctgtrtgcgtatggtgctcagctagtggctgctcatgtctacgacacagaccttttacatgttctgtagattacggcagacctttagctctattacatttatttcagattaaagtttactgggttgtaaagggaattgagctgatataaaacaaaaacaaaagcaaattaggttttatgatattactttaattttcaggtctacggtgagattatttttagtgtaataaaatttcgaacaagtgaaatactagtaattgtggttatatattgcttattttatatatatatatgtgtaatttcttagttttcatcaatgagtctttttttccat

SEQ ID NO: 123190 - DNA, 527 bp, Homo sapiens
aggctttatccctggaatgcaaggttggttcaatatatgcaaatcaataaacatgatttcatcatatagacataaataaagacaaaaaccacatgatcatctcaatagatgcagaaaaggcttttgataaaattcaacatcccatcttgttacaayccctctacaaactaggcatcaaaggaacatacctcaaactaatataagccatctatgacaaatccacagtcaacatcatactgaatgggaaaaagcttgaagcattctgcttgaagaactggagcaagacaaggatgaccactcttaccactcctatttaacctagtactggaagtcctagccagagcaatcaggcaagagaaagaaataaaaggcatcatccaaaaaggaagagaggaagctaaaatatctctctttgcaagcaatatgattctatacctaaaaatccccatagtctctacccaaaggttcctaggcctgataaacaactacagcaaggttcaagatacaaaattaatgtataaaaacaa

SEQ ID NO: 123191 - DNA, 501 bp, Homo sapiens
aattgtgccaggttggaaggaagaatcaatgacccatcatgagcaatgtacacacactcttggttttgccattttcttgtctttttgttgggccagaaggataccattgaaaattactgcttcagtgctttaaagagttaatgtagcttccagaaaggcttattacactccccrggagtagcttatgcattatgagaatgtggctcagtttgttggcaaaatgcacatctgctacaggatagggacaactgctgattaaaggagacttcagtggccctagtctttaggagcaagttgactgatggcaaagttttcgaagattatatctaaagtccagtgtcccttttatcaccacctcccgtgggtaatgattgaacataattagcattattttatatgctcgaatccttctcccattactgttaactgtctttctatcgcagtttattggattgccactgatctcaatttcaccttgggcattcaagtgaggctgaaatt

SEQ ID NO: 123192 - DNA, 501 bp, Homo sapiens
aattgtgccaggttggaaggaagaatcaatgacccatcatgagcaatgtacacacactcttggttttgccattttcttgtctttttgttgggccagaaggataccattgaaaattactgcttcagtgctttaaagagttaatgtagcttccagaaaggcttattacactccccgggagtagcttatgcattatgagaatgtgrctcagtttgttggcaaaatgcacatctgctacaggatagggacaactgctgattaaaggagacttcagtggccctagtctttaggagcaagttgactgatggcaaagttttcgaagattatatctaaagtccagtgtcccttttatcaccacctcccgtgggtaatgattgaacataattagcattattttatatgctcgaatccttctcccattactgttaactgtctttctatcgcagtttattggattgccactgatctcaatttcaccttgggcattcaagtgaggctgaaatt

SEQ ID NO: 123193 - DNA, 501 bp, Homo sapiens
aattgtgccaggttggaaggaagaatcaatgacccatcatgagcaatgtacacacactcttggttttgccattttcttgtctttttgttgggccagaaggataccattgaaaattactgcttcagtgctttaaagagttaatgtagcttccagaaaggcttattacactccccgggagtagcttatgcattatgagaatgtggctcagtttgttggcaaaatgcacatctgctacaggayagggacaactgctgattaaaggagacttcagtggccctagtctttaggagcaagttgactgatggcaaagttttcgaagattatatctaaagtccagtgtcccttttatcaccacctcccgtgggtaatgattgaacataattagcattattttatatgctcgaatccttctcccattactgttaactgtctttctatcgcagtttattggattgccactgatctcaatttcaccttgggcattcaagtgaggctgaaatt

SEQ ID NO: 123194 - DNA, 501 bp, Homo sapiens
aattgtgccaggttggaaggaagaatcaatgacccatcatgagcaatgtacacacactcttggttttgccattttcttgtctttttgttgggccagaaggataccattgaaaattactgcttcagtgctttaaagagttaatgtagcttccagaaaggcttattacactccccgggagtagcttatgcattatgagaatgtggctcagtttgttggcaaaatgcacatctgctacaggatagggacaactgctgattaaaggagacttcagtggccctagtctttargagcaagttgactgatggcaaagttttcgaagattatatctaaagtccagtgtcccttttatcaccacctcccgtgggtaatgattgaacataattagcattattttatatgctcgaatccttctcccattactgttaactgtctttctatcgcagtttattggattgccactgatctcaatttcaccttgggcattcaagtgaggctgaaatt

SEQ ID NO: 123195 - DNA, 596 bp, Homo sapiens
cccactgctaaagactgtcagacggactacagtgtttttgatgtactgcatgttagctttaatcacattacgtagaaaactcctatgacagcattctgtgccacttcgtggccatatacactatcaattatagctcccacttagctaggacagaaagaagcctcattataaagagtagagattggtcctccaatctgattcaaaacaatgattcataaaccatctttaaaattatagatgccaatatacccayataatccccatgtggatactcatatttttctctaatcttggttgatttcttaaatgaagttatttttgcataataggctattacgtttcccttctcctcacttcagtgtctgctttgttgttttttgtttgtttgttttgtcattttgaggactcgctttattgcacttgagtgtaactttacatctaaagacgcaactagttatctttgtccagaatgaagagttaggtcacaaattaaaaacctatataataatataaatgcacataaaagtgaaaataaattgttatatcttgaaacggaaaacatcaaataatgttttttacatataagtgaagaatat

SEQ ID NO: 123196 - DNA, 575 bp, Homo sapiens
  misc_feature (1)...(575): n = A,T,C or G
nnnnnnnnnnnnnnnnnnnnnnnnnnnnnnnnnnnnnnntagttttttggatgacattcaaattagcatcacttcaataaatgtwtactgggagtcctantgtgctggactcagagctaaatgtggaaaaggttaccaggtacagcagagttggctttagcccagagggagttaacaaactaggagagattacacagaatgcctgcagaaaccttcagtataggactgtgcttccagtactcaaagcactcagaagagggtaacacgacttccaatctgagttgggggcagggtcaaagaggcttaatgaatgaagtagaaggaatgcaagtttaagtaggaaccagacatggagatattgtggtgagcagacaccagatggtgaaatgtatttttttaggccatagccaatgttgcagtgtgacaaagatgttccagtgcactgggaggatgtgcagcacatttctgatcatatgactacaaattaaatttgttggctaaggagacacgattggaagaaagttattagaaggaacattaccgagctctacacagaaaggtgagagagtttaata

SEQ ID NO: 123197 - DNA, 585 bp, Homo sapiens
attcttttcttcttctgcacttctttycactgaaagagttttaaaggacagctgcaaaggacgatattttgtcaatcatatcaatagcattccctcattttaattttatttctgtataatcatttattctacacttagactcagattttttcctaaaataatttacatctaaggtaatgcttagtcaatggtgatggaactggtatacagaaagcaccttataaattacagtgatgaagaaatcccattcctatatctgactatcgagtatgccctttatactgtgttatgcatttaaatgggttatctcatttaatgattataacaaaattatgaagtaggtactttttgaaccccattttacaggtgagaaaattgaggtttagagagcttaagtagcaaacagtgatagaacaaggataattcacgattctgtctaattttaaactctgtgtgcttaagtcttaaccattacttttagtccttttctatcatgcaataataaattgggacttatccaaatgagttcattttcttgtatctcatgactttattgacatgactttataatgctatgtatatgca

SEQ ID NO: 123198 - DNA, 585 bp, Homo sapiens
attcttttcttcttctgcacttctttccactgaaagagttttaaaggacagctgcaaaggacgatattttgtcaatcatatcaatagcattccctcattttaattttatttctgtataatcatttattctacacttagactcagattttttcytaaaataatttacatctaaggtaatgcttagtcaatggtgatggaactggtatacagaaagcaccttataaattacagtgatgaagaaatcccattcctatatctgactatcgagtatgccctttatactgtgttatgcatttaaatgggttatctcatttaatgattataacaaaattatgaagtaggtactttttgaaccccattttacaggtgagaaaattgaggtttagagagcttaagtagcaaacagtgatagaacaaggataattcacgattctgtctaattttaaactctgtgtgcttaagtcttaaccattacttttagtccttttctatcatgcaataataaattgggacttatccaaatgagttcattttcttgtatctcatgactttattgacatgactttataatgctatgtatatgca

SEQ ID NO: 123199 - DNA, 554 bp, Homo sapiens
ctgtgagtgatgaagacaccttttttccatatagtggatacgtttaaaaataaaaataaaatcagaaagtttgcatttggatttaacatttttttaatcagacagccctaataagtagaaatattttactattgtcattaaatatttgttttcaagtttgtattttgtttattaagtaaatatatgtatatatcatagtacattaaataaaattacaaagattttttatatatgattcatattcctttagagcttggttaaggtaatcktttttacccatgtaattcaaattcaggcacatgtgtaaaactttgaaacatttttaaaccatggagaatattgctgttcatcagaagtagaatgtgcatattcagactttaaaaaagttattaagaaaagatcttgttttgaaaataactttttaattaatttttaaactttttaaaaaatgagggcatacagtcagcatttaaaatgcattataatttactcatttactcagttttttctagtctctctaataataagctaaaattatttttattttcaaaact

SEQ ID NO: 123200 - DNA, 590 bp, Homo sapiens
cagagacgtggagtcatgaggaggtcctggctaagaggccattcatttctctaatatctgaaagaacaggataattttgccacttcatgataaaccctccctggagttctgcacgtgtctctctgatgcctttaaagggcatccaggttcctgggaagagactcgtgctgtttcttacattccccctggctgggccagcactgggaaattccacaggggagaagagaggatacagaacaagatggtctrgttttgaagatgagaaatggagatagaggttgtgccttgttgataactacctgaaaatacctccaaccatgtttctctgtcttctaggggtggtgggaatattgggaagctggtgccagacggtgaagtgaggggttctttggggcctgccaagccatcaggggaattaccctaggcccagtgagggtgcattgccagggcaggaggcaacatcattgtcagaaacagcacctcatgcccaggcaggcattggggcacatctgaactgaagggtaaagctaggccagaattggatatccaaggagtgcagaggcaaatagtgagggggttggggatgggca

SEQ ID NO: 123201 - DNA, 550 bp, Homo sapiens
catactgtgtggcataagattaaaaaaaagaaccttgtagctgtacaataaatagttttattcctacgagaacatccaaaatatttaatctggtattctaagtaaaatccatgttcaaatttcatttttatcatatatttctaagatatttaaaaataacaacttaaatgaaattatgaccgcaatttgtaaatgtctgcactctaattatttttacagatgagctacactactttacttactaccaaggctaattataaggtagtatacaatattctgttccttagagtctatttctatatgttgtctcaaattagttgtttatttgaaaacacgttaaaaaaaagataaaaactttctttaaaaaygtaacatttatttcaatgtcagaacattatttttgacttaggaataatattttttgaagtagtgccttataggcgtatttctctggcttctagaactcatctgaagtttctgagacagatatatatactaagtaatttagcaaacagtacaattaatttaaagataagaaaactcattatat

SEQ ID NO: 123202 - DNA, 614 bp, Homo sapiens
actggacagtactatgttgaaaaagtcactagggctatgttgaagaaaaacaggagccaacaaggagcaaggaccaaagagcaaagagcaagaccaattacgaggctatcccaacagctgtggcaagaaatgtgggtaatgtaggctagcatgtaaagwtgaaggttgcaaaagtggtatttggatacattttgaagacacagttgacaggacatgctaatagattggatgcagagagagagaagagtcaagggtcaaagattacattattgaagtaagggcagaaatctggaaggatatacataaacataactgtggaggagatgactgagattaggaatgggtgaataaggtggaaaataataaaacaaaacccatgcatactagtgagataggataccatgcatgaaatgaggaacaagatgattcacttaactctgtgtacctgatggcctttaaaggacagaaaggaggtaaaaacaaggcaaacatgcaagcaagcagtttctctccattggtcaaaatgaggcccagccactctcctaagtgaaatgttgaaacagataaccaaatactgcatgttctcacttgtaagtgggagttaaacattggta

SEQ ID NO: 123203 - DNA, 660 bp, Homo sapiens
ttggaatgaatcaaggcagaaaattgatttcatgctgagacagtttacatatagaacacaaataattcattaaaatgtaaaaataaaattggaagcttttctcattataattgttattaatttatttagaaattaaaattagatatggtagctaaaatattcataaggtagccatgaaaattttattgctgatgaaaaactttaatcttttcaattaacaatgaaaataaaaatatattcttacaggaaaaaacaattttccaaatttttctgctcaagacatataacattaacatataatcagattttgaaacactgaaatcttttgaggcctagaattataaaacaaagacttagacatttcctctaaaaaagataactacatgctgtaaataaaataattatcatctacaaaaaactgttatcaactcaataaaaattgacacatttaaaaatatcaaactattatcaataactagtcagcttattaggtaagaacatgttgctttagttttacattatgaaaacttctaattcacgttcataaactaccttttgactttgtcrtctgtggaagtgagtaaaatgaaatggttcagtaaaaatttatgatgttaaaaggaaatgaactttgatgggggtacaggaggaaaacggtaa

SEQ ID NO: 123204 - DNA, 589 bp, Homo sapiens
tccttcttttctcaatgattttcttaatggtgtctgggaactcgtctgctgcttcttggttggcagatacagcttcccttgttatcttcatatttttaaaacaaatctcttcctaaaattatcaaaccatcctttgctgatattaagttcttcagctttagatccttcaccttcttttattaagttgtcataccatgactttgctttwtcttgaatcacattagagtttatagatatgcctttcttataacaattctgtatctacatgaaaagctgcattttcaattcaagataaaaaggtattttgcaaaaagtccaagattttcatgcctgctggcatagctgcagcagtggcttcatgagtctcctctcctctcctctcctttctttccttttttttttttatcaatggtccttataccggattcatttatcttgaaatgaaaccacagctgcagacctcaatctataatacacaccaagcaatttaactgtttcttgtaatgtcatgacttttttctgcttcttaggagcatttccagcatcactagtggcagtttgtatgggtgtcatgtgttattcaaggttt

SEQ ID NO: 123205 - DNA, 607 bp, Homo sapiens
cttcaccttcttttattaagttgtcataccatgactttgctttatcttgaatcacattagagtttatagatatgcctttcttataacaattctgtatctacatgaaaagctgcattwtcaattcaagataaaaaggtattttgcaaaaagtccaagattttcatgcctgctggcatagctgcagcagtggcttcatgagtctcctctcctctcctctcctttctttccttttttttttttatcaatggtccttataccggattcatttatcttgaaatgaaaccacagctgcagacctcaatctataatacacaccaagcaatttaactgtttcttgtaatgtcatgacttttttctgcttcttaggagcatttccagcatcactagtggcagtttgtatgggtgtcatgtgttattcaaggtttatgctattgcattaaaacatgttaaaaaaaatacacaggaaacatgagagatcacttttcattgtgacacgtaatttaccagagttatgacctgctcatgcagagatgagtagcattacatggcattttaagtggatacttttgacacttgagctcactacaatagcaacaggaggtggcta

SEQ ID NO: 123206 - DNA, 533 bp, Homo sapiens
cctgcttataatccaaggctggtatgtcactctgctcagagcctgccagtggcttcctatctcagaaagagcaaaatccaaagtcctctcagtggcttacaagactctacatgtttggagttatcccaccagcacctctctgacacatctcctgccctgcccccaggagctggctggctttagccacatagcccctttcttgttttctcagggcctttgcacatccttgtaaaagtctcatttctcctccctcccgtgttcctcaccttgttcaggtccctcccttctcaccttcttcaggtctgcccagcaagacctttccttgattccacttcttaatgcagcacagcctcactgcagcttcctcttccytgccttatttgttgactcttttcctacatcagaatataaactccaagacttcagcagtttttgtctgcttggttcactgccacacccccactgcctagaacagagctggtatattacaggcatttgataaatatctgttgctcacgcaagcattcaaccac

SEQ ID NO: 123207 - DNA, 551 bp, Homo sapiens
gtatggtagctctatttttagttatctgaggaatctccaaactgtcctccatagtggctggcctaatttacattcccaccaacagtgtatgagaatttccttttctccacatcctcgtcagcatttgttattgcctgtcttttggatataggccattttaactggagtgagatgatatctcattgtagtttggatttgcatttctctgatgatcaatgatggtgaacatcttttcatatgcctgtttgccatttgtatatcttctctggagaaatgtctaatcaaattttttccccatgttttgatcagattattagatatttycctatagaaaaaaattttccataagaaacttttatcattgatattattcagtatcttcattgtagtggtgataaaattgcttcttatatattttgtgggttgtctcttcactttgttgattgcttcttttgctgtgcagaagctttttaacttgatgtggttccttttgttcatttttgctttggttgcctgtgctctgggtgttactcaagaaatttatgtgcaga

SEQ ID NO: 123208 - DNA, 606 bp, Homo sapiens
ttgagccactgcgccgccttatgtctctttttgatatccatgctcaaatgactaagtactaggttctcctgagggactgcactaggttctccgaggtccttctcttgtaaggaccacacatttaattacccagatttgataccaaaaaaataggaaaggaagtaactgtatccactgggcagagctgtttagagccctgttatctactacttttgcggctcccagggctgaatgtgtaattggtattgataatttacattcttgttctgtaaatgttcatgatgtacaagagagatttttttgattggaagagccatttgtagagagggatagaaggatgcatgcacaactgatcacaacttggctttggttctcttcaagttttttgtktttttttttttaattagaattccagaaggagaaaaggaaaccacaaccttgaccaaggacttaaatacaatgggactaatgaaaaatgtaatatctcaatgtagcagccttgtatggtcagtgaaaaaaaaaactaatgggaatctggaggcttgtgttagatcatgccaactgaatttagttggtattatagtcctggctgttacagacattgtg

SEQ ID NO: 123209 - DNA, 567 bp, Homo sapiens
ctctttcactttgctcttttaacagtaagatactagtttaaagatgtgatatttataatcaatataaaaaggtagcaatcgatttttaagagagaagtcagggtattaactagaacgcacagttttctttggcagttgtagacaaargtcatagggtcctagtaaccatagctatcattgtcatttccagaattttaaataatctaagtgatcagaccccagattattttaatctaaaagataaaaacaaatacttgaagccatcctctacgctaaatgctaggttgacctgagaaggcaggtgttctaggcaaaagggccagcacctgcaaagggacagagttgagaaagcatgatctgttcaagaagcctaaagtggttttttgtttttgttttttggctggaatataaaatggcaaaaaaggaagctggagaggagtgcaacattaggtaggtcctaaactgtttaaaaataggcatgatggcatgatgacattagtgcatctccactctagatgcaatatgtgagactgatttgagggagacaacaatggctgcagtgacatc

SEQ ID NO: 123210 - DNA, 478 bp, Homo sapiens
gctttctaactaggtataaatgtaatgagaaagggtgaaggaagctctggccaggtagaggtcccagtcccttacatcaccttaaccaaacagctttatttgtatctgctttatgtgtaggggagttattaatgttttatttgagaaaaatttgcacagctaaaaactaaacagaaaaccatgaaatattagctccataaggacaggagtattttttctcttttgttcactccagtattctcagcacctataatggcagtacataggaagtgctctctctctctctctctctctmtatatatatatatatacatatataatatataaagccagggtctcactaggttgccaaggctagtctcgaactcctggcctcaggcagtcatgctgtcttaacttcccaaatttctgggattacaggcatgaacaggcatatttctggatgaacaaataaatgaatggatttaattaattttgg

SEQ ID NO: 123211 - DNA, 506 bp, Homo sapiens
agaaattgagccttattgaaattaaattactcttttgttcattgcaaggaagatacaggaaagtagggaggcatgggttttaaggcccagaaatccacagaaaatacttgggggctaactgtaactaagaagcccattagtgtgagggttaaatatgggcttcagagacagatggtgtgggtgaggatcatggctccacccctttagctctgggtccttcctgggcctcaattacctcatctgtgaaatggaaatactaacggcatatgtcccaatgaatgctttgtaagggcaaaatgtataaagacctatactgcttgatacatagtaaatatcaactaccagaattaaatgagtggcaaaaaaaaaaaaaaaatctaagaataraattaaacttgatctcttaagtcaagttattcacatttagtgaccagagttaggaaatagcttttccctttatacactgagttctataaggtatgaaatataaagatgtcagaagaaat

SEQ ID NO: 123212 - DNA, 506 bp, Homo sapiens
agaaattgagccttattgaaattaaattactcttttgttcattgcaaggaagatacaggaaagtagggaggcatgggttttaaggcccagaaatccacagaaaatacttgggggctaactgtaactaagaagcccattagtgtgagggttaaatatgggcttcagagacagatggtgtgggtgaggatcatggctccacccctttagctctgggtccttcctgggcctcaattacctcatctgtgaaatggaaatactaacggcatatgtcccaatgaatgctttgtaagggcaaaatgtataaagacctatactgcttgatacatagtaaatatcaactaccagaattaaatgagtggcaaaaaaaaaaaaaaaatctaagaatagaattaaacttgatctyttaagtcaagttattcacatttagtgaccagagttaggaaatagcttttccctttatacactgagttctataaggtatgaaatataaagatgtcagaagaaat

SEQ ID NO: 123213 - DNA, 506 bp, Homo sapiens
agaaattgagccttattgaaattaaattactcttttgttcattgcaaggaagatacaggaaagtagggaggcatgggttttaaggcccagaaatccacagaaaatacttgggggctaactgtaactaagaagcccattagtgtgagggttaaatatgggcttcagagacagatggtgtgggtgaggatcatggctccacccctttagctctgggtccttcctgggcctcaattacctcatctgtgaaatggaaatactaacggcatatgtcccaatgaatgctttgtaagggcaaaatgtataaagacctatactgcttgatacatagtaaatatcaactaccagaattaaatgagtggcaaaaaaaaaaaaaaaatctaagaatagaattaaacttgatctcttaagtcaagttattcacatttagtgaccagagttaggaaatagcttttccctttatacactragttctataaggtatgaaatataaagatgtcagaagaaat

SEQ ID NO: 123214 - DNA, 332 bp, Homo sapiens
cagttatgtactcccttctagattctgttaattctcaattcaatcaggaaacctggtggttcctgggaattacgtgcctgatatttttaattatattgttttcatcaaaatataaataattaggaaagataacaggtgcaacagaccactgaaaaatgctcttggtttgcaggtagaacatgcaaaaccaaccaagatccccagaggacatcaagacactcagactctgccaggttgggtagccccagtgccagttttggaagtgttaggtgtcarttattcccaacatctagaaactggatggaccctgttagaactgattttctgatttg

SEQ ID NO: 123215 - DNA, 536 bp, Homo sapiens
attagcatgtgggatgcaagcacaatcttagtaaatgcttgcacattggagctggtcttcttggaatgcttgctcttagaatccacctgccaggtaaagaagctctacctagccaatgtggagagaaagagctcacagcctccagctatccccmccaagattcttgagatataagtgaagccatcttggacgttccaattcatgccactatctgacaacaaatacatgaggggcctcaaatgagaccagtagaagaactgagcccctatcaacctacagaattatgggcaggtaaaatagtggttgtttaaatccactacatttgttatatagcaatagataatcaaaaccttgggttcacacacacacacacacacacacacacacacacgcacttaagtcagtttaatgtttgagcatgaaatgatttttcatatctgagaagttggtgtttttggacttgggttcaggctactttatcaggaaatacttttatttacttcctaaatttagttcagactcaagatggagcattg

SEQ ID NO: 123216 - DNA, 536 bp, Homo sapiens
attagcatgtgggatgcaagcacaatcttagtaaatgcttgcacattggagctggtcttcttggaatgcttgctcttagaatccacctgccaggtaaagaagctctacctagccaatgtggagagaaagagctcacagcctccagctatcccccccaagattcttgagatataagtgaagccatcttggacgttccaattcatgccactatctgacaacaaatacatgaggggcctcaartgagaccagtagaagaactgagcccctatcaacctacagaattatgggcaggtaaaatagtggttgtttaaatccactacatttgttatatagcaatagataatcaaaaccttgggttcacacacacacacacacacacacacacacacacgcacttaagtcagtttaatgtttgagcatgaaatgatttttcatatctgagaagttggtgtttttggacttgggttcaggctactttatcaggaaatacttttatttacttcctaaatttagttcagactcaagatggagcattg

SEQ ID NO: 123217 - DNA, 536 bp, Homo sapiens
attagcatgtgggatgcaagcacaatcttagtaaatgcttgcacattggagctggtcttcttggaatgcttgctcttagaatccacctgccaggtaaagaagctctacctagccaatgtggagagaaagagctcacagcctccagctatcccccccaagattcttgagatataagtgaagccatcttggacgttccaattcatgccactatctgacaacaaatacatgaggggcctcaaatgagaccagtagaagaactgagcccctatcaacctacagaattatgggcaggtaaaatagtggttgtttaaatccactacatttgttatatagcaatagataatcaaaaccttgggttcacacacacacacacacacacacacacacacacgcacttaagtcagtttaatgtttgagcatgaaatgatttttcatatctgagaagttggtgtttttggacttgggttcaggctactttatcaggaratacttttatttacttcctaaatttagttcagactcaagatggagcattg

SEQ ID NO: 123218 - DNA, 562 bp, Homo sapiens
cttttcttcctacaatctatttgccacatggcagccagagtgggcgttcaaattgtcaatcagctcctgtcactctcttgctgaattccctccagcagttacctgttgcacttggtgtaaaatccaaagtccttccatggcctacaaggcctggtctggtctggtcctatcaacgtctcccacttcatccctgcagaactctctctactctgtacatgccaggccccttggccttgtgtggtcactcaaaaagaacaaacctattcattcgttcattcatcttagaatctttaacaagctattccttttgtatacaacattcttggttaagttggtcccttcttatcttttargtctcaactcaaatattgccttctcgaacactcatataacccacttataactggcagtctctctctattctgttgcttttttgttttcttcagatcacgtattattatcttcacaagtgctgtttattcatttgcctaaatgtgtattgtctgtctacccccagtagagtataaactccatgagccagggccttcacctaccttgttct

SEQ ID NO: 123219 - DNA, 614 bp, Homo sapiens
tgggaggatatgagacctgactggggaacactgattggaccctggtgggaggacatcaggcctgattggagggcagtgattggacctggtagcaggacacatggcatgaagagaagcaggtgcagctgaggctgcagtcagcctgaagagtgtcctggggagctggctaaggaattggaatccttcttggggaggcagtgaaagttgatttgcttattttaagcaggaagtgatatgcttagatttatattttagaaatgtcactygagggagtgatttagaacaatagactggaagggagaaaaggctggagaaggggacagtagtggaagccagtgtagaaattcagaagagagagacagaaagagaaggagagaggccctcgcgggagctatcttaaggtagatgcaggcataagaaaaaaatcgaaagaaaaatatcccaataacaaacacaaaaccccgacaaacacacagagtacctggtagacttctgcataagaggttacggagtcccaggtcctagtctagaactttctattcatgggcctgatatatagcccagggatctgcattttgataatctcccaggggcttctggtgcaggacgctaga

SEQ ID NO: 123220 - DNA, 616 bp, Homo sapiens
gattgatggctttttgcaaccaatcagacgtttgcataggagtgtaactttgtaacttcactttagcctctgattcgttgctttccacaaccagtgagactgattgcaggccaccacttcatttgcatggggtgaacaccaagtggccaatgagaaacctctaggaggaatttggacccccaaaagattctgtaaccagggcccttgagcctctgctcatcccactcctaccctgtggagtgtactttcattttcaataaatttctgcttttgtttgcttcattctttccttaccttgctgcgcattttgtccaattctttgtccaaacttccaagaacctagacaacttgcagtcaagaccctctcctggtaacaacaggggctaaggtttcagaaaaaggatatggtgttgtggtgggaccttgtttgacmgatggaggtctggattttcctgatgaagtgttggctcacctgggagctgaagggtgcagagttaactagaggaaaagaggagagggaagagcatcacaggcagagggcacagcaagtgcaaagcctcttgactggagggagtttggtgattatgaggaggaaccgaaaagaggcctgagtggt

SEQ ID NO: 123221 - DNA, 657 bp, Homo sapiens
tcccagcagattgttgggcacataggtaggtagaggataaacatttgttcttttcctcagaatatgccaagaaacttggcgggttgggggccagaggctttggcatgtttccgaacytcctttccagttgatgcaggcagttcagtcagcatcaggtgtcacaaaaagagagagaaaaatcatcctctcaccacctggtgtgggtgagagaaggtcctctttgagggaaaacctctccccctaaggctcttggaatgccccatgtaaagagatgcaaaaagatatccccagaagagtgagaagctgaatttgctgtttgctcaaacaaaggattgattcagcatttctagcaaaaggagcaggaggcttgccagagggccaataaataactttgcctttcacatgtaatataatggtgaaagtaatctattggtttgggagcctctatctcttcatctgcgaaatggggatagagatcatagaattaaaggaggccataaagataaagcagtgttgcaaactgtagatgcaaggcaaatcatgtttttcttgtttatacagaagtaagcaccaaatgagctgaacactatcctggggtaaaatgaccgcatgaagcaatacacataagatgcacaggtctttcagacgatcttcatt

SEQ ID NO: 123222 - DNA, 657 bp, Homo sapiens
tcccagcagattgttgggcacataggtaggtagaggataaacatttgttcttttcctcagaatatgccaagaaacttggcgggttgggggccagaggctttggcatgtttccgaacctcctttcmagttgatgcaggcagttcagtcagcatcaggtgtcacaaaaagagagagaaaaatcatcctctcaccacctggtgtgggtgagagaaggtcctctttgagggaaaacctctccccctaaggctcttggaatgccccatgtaaagagatgcaaaaagatatccccagaagagtgagaagctgaatttgctgtttgctcaaacaaaggattgattcagcatttctagcaaaaggagcaggaggcttgccagagggccaataaataactttgcctttcacatgtaatataatggtgaaagtaatctattggtttgggagcctctatctcttcatctgcgaaatggggatagagatcatagaattaaaggaggccataaagataaagcagtgttgcaaactgtagatgcaaggcaaatcatgtttttcttgtttatacagaagtaagcaccaaatgagctgaacactatcctggggtaaaatgaccgcatgaagcaatacacataagatgcacaggtctttcagacgatcttcatt

SEQ ID NO: 123223 - DNA, 583 bp, Homo sapiens
tgtttttgtgagtgttaattgtgattcttagaaaagaagtaatcttggacattaaaaacatagaatccccaagttgagatttgagattatttaattcaactaataagcctaataagaattccagctatagttattcttataggtgatctgcttagattctcccagtactgggacatttgccacatccagagttattagaacattctaccagggacagatagactacaaagtattggtacyattaggcaaagttgcaggattttgccaactgaaaccccaaggcattttctaaggaacagacaagagacaattatgccatcctatctagttcccgctactgcatcaatttgcttgggagctaaaactgctttttactctaaaaacaagttgaaaaacctgagtatctctccagggtggaatcagctgcatatacccagggagataaaacggtctgaagatgtcatgggcattgtgaatagggacagcagaggttacatccagtgtcagaagtcagtcaactcataggcattcttgctgaagaaaagaggcaggaaggtcactgccaaatgtgaccttgcctgaa

SEQ ID NO: 123224 - DNA, 583 bp, Homo sapiens
tgtttttgtgagtgttaattgtgattcttagaaaagaagtaatcttggacattaaaaacatagaatccccaagttgagatttgagattatttaattcaactaataagcctaataagaattccagctatagttattcttataggtgatctgcttagattctcccagtactgggacatttgccacatccagagttattagaacattctaccagggacagatagactacaaagtattggtactattaggcaaagttgcaggattttgccaactgaaaccccaaggcattttctaaggaacagacaagrgacaattatgccatcctatctagttcccgctactgcatcaatttgcttgggagctaaaactgctttttactctaaaaacaagttgaaaaacctgagtatctctccagggtggaatcagctgcatatacccagggagataaaacggtctgaagatgtcatgggcattgtgaatagggacagcagaggttacatccagtgtcagaagtcagtcaactcataggcattcttgctgaagaaaagaggcaggaaggtcactgccaaatgtgaccttgcctgaa

SEQ ID NO: 123225 - DNA, 571 bp, Homo sapiens
cacacacacacacacacacacacactcacatatatacacatatatatttcattatatttcatttatcacctatacatatgtgtgtgtatatgtgtgtgcatatatatgtgtgtgtgtgtgtgtgtgtgtatgtatatatatgtgtgtgtgtatatatatatatatatgtgggtgatccagtgttgggtgcatatatatttacaattgtcatattgtccagctgaattgaccctgttatgattatataatgacattctttatctttttatagttgttgtcctcacatttattttgtctgatataagtatagctactcctgctcttttttgatttacattaactcttagatttgyccttttgaggctattttctagatcttgtaagcatgctttattcattgtctttctttcttttcctcccttactatgtatttttaaataggcagtcttcaagctcactagttctttcttctgttaatcaattctgctattaagacactctgaagcattcttcagtatgtcaattacattattcaactccggaatttctgcttgattctttttaaatattt

SEQ ID NO: 123226 - DNA, 554 bp, Homo sapiens
taaatgtggttacatgaactcgtctgagaattttcataaacaatgaaattttattaaaataaagaatctttgtaaataagggattaaaattattgttgaatttgccagctgatttgtttatgattaaaataattgttttagagcaaatacaaataatttcaatttgcatttaacatacaaatattgattattgaagatgccttagtgtttcaccattctttagttaactttgacattagtacctccaaaagtagatggaagaacaactgttgttgtcttttttccccacagaaccaggcatggaggaaaaaaatatgtttaatggttgaaggcagttttctgactgcaaaaaatgtgctgatatatagcaaaactaatagtaaaaagcaagactaaatacactgtggtggtttaataatagtggtatccattctttttttgattgacagatatctctgatagtcacatttttttwaaaaattgcaaatccacttcatattcaatccacttatcctttcttctttcagaaaaatgcaaattgaaataaaattatt

SEQ ID NO: 123227 - DNA, 606 bp, Homo sapiens
cagcaaccacaaaaatccagctttgcaaagacatgacagctcactccaaaaggaatataatgatgttgacattgcaaactacataaagccaatagattgttagatgtccagtagtcgttgagtataactatgtgtccctagaaactttwaaaaatcccacaacaaccctgtgaattcactgtggcatccctgggccgctcagccagtctgggaactgcagggctagagtaatagtttggaacatgctgtggtccgtggttgcagtaatggcccccacaaaccatgccttccatatccatgcacatgcctagtcccatccccacaaatacaagccattgtaacttgctttggccaatggaacattagcaaatgtgacacaagtagcaacttgagaggtacacgtgtattggagtttgccctctcttgctgctggaaaccctcctgctaccatgtgacatattcaagcaagcctcctggagcatgagactttgtggagagagacctcagtcatcccagtcatctcaggtgagaccccaggcatgttagtgaggccaacttagaccatccaattccagccaagccaactcagaccaaaagaattgctca

SEQ ID NO: 123228 - DNA, 606 bp, Homo sapiens
cagcaaccacaaaaatccagctttgcaaagacatgacagctcactccaaaaggaatataatgatgttgacattgcaaactacataaagccaatagattgttagatgtccagtagtcgttgagtataactatgtgtccctagaaacttttaaaaatcccacaacamccctgtgaattcactgtggcatccctgggccgctcagccagtctgggaactgcagggctagagtaatagtttggaacatgctgtggtccgtggttgcagtaatggcccccacaaaccatgccttccatatccatgcacatgcctagtcccatccccacaaatacaagccattgtaacttgctttggccaatggaacattagcaaatgtgacacaagtagcaacttgagaggtacacgtgtattggagtttgccctctcttgctgctggaaaccctcctgctaccatgtgacatattcaagcaagcctcctggagcatgagactttgtggagagagacctcagtcatcccagtcatctcaggtgagaccccaggcatgttagtgaggccaacttagaccatccaattccagccaagccaactcagaccaaaagaattgctca

SEQ ID NO: 123229 - DNA, 618 bp, Homo sapiens
gctgggaccggctggatgaggagacagctgagcaggggatgtgctggggagactgaggcagatggagtgaagggtttaacctgagaaaaaactggcacatttgaggaaccaaaataaggtcactgcagctggaatgttggagtgagtggacttttttcttttttcttttcttttctttttttttttttttagkggcttgcaataaatcaaggtagtcaggtggttggggaggggagttggggagaagaggcaagtcataggtagctcgaagctagattaagaagcacagatttatatattaaaaatccgactctttctcgaacataattttccccctcatgtaaattttgtttgtgttactatctgtcatttgatcaaggaaaataaatactttctgtaggtaagtattcaaagattatctgaagtcaaaatgctttctctgattaatcttgttctgttatctgattgtagcagaacattttgtgttgcacagttatttgcatgctagtcacctttggactgggttatttaatattcacagaaacgaatgcagtacagtttgtgtgcttgaaaaaagtaagtgggaaaaaatgttacaattttataattaactcttgg

SEQ ID NO: 123230 - DNA, 641 bp, Homo sapiens
tgctttgggtttctagtcacaaaaatgaaagaaaatgctgcttcaagatgcccatagtctaacctcacagtccaaaatgcataatctcgctcatgcactcattctggcacagcagaaaagtgaagaaaaacccccacactcagtactgcccagagctgctgatacagtctagttatacagctccacatgttctccctctattaccactgccattacaactactaatagtaatcatcattagtgatcatcactaagaatgataatacctacacccattattatttatgatgtgacaggactttatacagattatttgattccttggcaaccctataagattatttttattatgtcccttttatagaygtgaaaattaggattctaagtttaataatttgcccaagggccaaagctccaaactaataaaattaggattcatgctccctgtgaattcactacttttgtgactctcaacagacatttatcaagtacttactcttggagaggtactgtggtaagagctgggattaaaactgagcaagatatggtatctgccttcaaaaaatacctgatcttgtagaaacaacaaaaaaatgccaattacacagctacataattgtgctggaaatactgcatgtaat

SEQ ID NO: 123231 - DNA, 641 bp, Homo sapiens
tgctttgggtttctagtcacaaaaatgaaagaaaatgctgcttcaagatgcccatagtctaacctcacagtccaaaatgcataatctcgctcatgcactcattctggcacagcagaaaagtgaagaaaaacccccacactcagtactgcccagagctgctgatacagtctagttatacagctccacatgttctccctctattaccactgccattacaactactaatagtaatcatcattagtgatcatcactaagaatgataatacctacacccattattatttatgatgtgacaggactttatacagattatttgattccttggcaaccctataagattatttttattatgtcccttttatagacgtgaaaattaggattctaagtttaataatttgcccaagggccaaagctccaaactaataaaattaggaytcatgctccctgtgaattcactacttttgtgactctcaacagacatttatcaagtacttactcttggagaggtactgtggtaagagctgggattaaaactgagcaagatatggtatctgccttcaaaaaatacctgatcttgtagaaacaacaaaaaaatgccaattacacagctacataattgtgctggaaatactgcatgtaat

SEQ ID NO: 123232 - DNA, 595 bp, Homo sapiens
cttaactgtaaagagaatttttttttaccacatatagcagctaagtgctgacctctagtggccatttttattactgccactggactacatttacattattattaatgacaaacttgttttggtgatacagatcaacatataatttccattaactttttaaacacttaaacagaacttttaaatataagatatttacggttaaaaatctttacggttaaaaatcttggtatcaaagtttcagaattaaatcttagtttttaacttcttaggtaactttgggcaagttatcaaacttctctgaatgtcagttttcaaatctataaaatggcaaatagcagggtttgaagattagtcatcattattgttagtttaatcataaartatgcaactacgtctcattctatggaaggtcttcaggccttacttttcctaagactttttataaatatcaatgcttttcaaacaattcacaagtcaaacatcaaaaatgcagtcaatgtagaatgatttttaatgaaaatttctaaaacttcattggctttatctgaaaaggatgactttctatagtgttcattgttttgaattcactataaaa

SEQ ID NO: 123233 - DNA, 628 bp, Homo sapiens
caagaaagaaaataagaatagattgttaaataaaatttataggaggtgattggtttggactgagctcctrtactaggcctaacagaccaaaccaaaatggagttactcatgctgaagttccactcactaagccaaactaagttgtttatctgaccttccacaaaatcaggagaaagacaggtaatagccaaatccccaaatgggccagttttagctggcatgataaggaaattccctctgttttcacctttacgaagaaagtaaccttgcaacaggaacccactttttgttatgtttctgatttcttcagccattttctgactctaaagtcaacctcctctgctcagctcatcagagcactcattttgaggtgttgcctgatactagagttgcaaataaaagccagttgagatttttaaggtaaatttgttttgtcttttggtaattctataaggaaaatggaatatgagtggaagtagaaaaggataaatgagcttcaaatactctacctggtagcagataaacaaaatagtcaagttcttacctttaaaaaatgtagaaagtacctgattcaaatgcatacctgtggatgcatgcagacataaacccccacactggagtgtacatt

SEQ ID NO: 123234 - DNA, 619 bp, Homo sapiens
tcaatttttgatatattctattgccatagggaagaatttaagtatttcttgaactaaagaaacatcaggctttgatccaagataaaattttggagtctcagcttctgtgcctactaagcctgtaaccaagccacatgacatgcctggacatcacatgcctttcttttaccttctattcccttctgctaaattacctttctaaaagtatccattttttttcagcttcaaaacaatttamtgagcacttattatgtaggtttgcattatacctcatgctgggatcatagatgtgtgatccctgctctcaggggaagcctaactcagacgtagacttaactctgactgttagctctgaatgtaggatatggtcgtttgttttagacatcacttttacaaacctgaagtttaatttctttttttaaccaggcattttatttgctgctgcttgtaattttgtcaataatcatcaccacctgatttaagttgtcctttctgcctcctcagtactcatttctctcactcaggcatttttcccttgtctttgtcaatatggtgaatatgaaaaacaataaacttaagtaagatattttatcagaaagattaactctgaaagagttaa

SEQ ID NO: 123235 - DNA, 619 bp, Homo sapiens
tcaatttttgatatattctattgccatagggaagaatttaagtatttcttgaactaaagaaacatcaggctttgatccaagataaaattttggagtctcagcttctgtgcctactaagcctgtaaccaagccacatgacatgcctggacatcacatgcctttcttttaccttctattcccttctgctaaattacctttctaaaagtatccattttttttcagcttcaaaacaatttaatgagcacttattatgtaggtttgcattatacctcatgctgggatcatagatgtgtgatccctgctctcaggggaagcctaactcagacgtagacttaactctgactgttagctctgaatgtaggatatggtcgtttgttttagacatcacttttacaaacctgaagtttaatttctttttttaaccaggcattttatttgctgctgcttgtaattttgtcaataatcatcaccacctgatttaagttgtcctttctgcctcctcagtactcatttctctcactcaggcatttttcccttgtctttgtcaatatggtgaatrtgaaaaacaataaacttaagtaagatattttatcagaaagattaactctgaaagagttaa

SEQ ID NO: 123236 - DNA, 668 bp, Homo sapiens
tttctttaccatattttcaggacacctatcaaattctcatgcaaatagagctctgaagtctgttaccccctgtctgggactacatataagacttccttaatcctgtgtttttcctgatgtttacctgttagcatttcttaaatggtgatcaggaaacattgacatcaaaaccacctgagcagtcttgttaaacatttatatcagctgggtcagaatctctgagaccctaattaggacggctattatgaaaaagtcaaaaaataacaaatgctggcagggatgcagacaaaagggaactcttctacactgttggaaatgtaaactaatacagctaattaggaaaatagtacagaggttcctcaaaaaactacacagaactacygtatgatgtagcaacccctctactgggaatttatccaaaggaaaggaaatcaatatattacagagacatttgtactcccatgtttattgcagtactattcataataactaagatgcagaatcaacctaggtgtccaacaacagatgaatggataaagaaaatgtagtatatatacacaatggaatactattcagccataaaaaaggatgaaatcctgtcactcacaataacatggatggaactggaggacattatgttaagtaaaataagccaggaacagaaagtt

SEQ ID NO: 123237 - DNA, 612 bp, Homo sapiens
tgtggggattggctcatgcacttatggagtctgagaagttccatgatatgtcatctgcaagctaaagaactgggacagttataatttagtctgaggccaaaggcctgagaactggtgggctgctgatgtaagttccagagtccaaaggcatgagaaccaggagctctaatgtctaagggcaggagaagatggaggtaccagctcaaacagagagaaaatttgcccttcctctacttttttattttaatcacccatcagtgtattgggtgatggcttgccaacagtggtgggagcatcttctttattcagcctactgattcaaatgctaatctccttcaaaaacacctgcagacacacccacaaatactattttgccagctatctggggataccttaacccagtcaactcaatcccacaaagttaaccattacaataaactatagactgtctcttctactagactatgaactctagacaatgttttccttgagggttagaactctttttgtctttgtatckttagctccaaaactataccacaaagttctcctaaatgtttgctagcaagttcttaaaaatgtttattgaattaatgaatggtgataaatgat

SEQ ID NO: 123238 - DNA, 214 bp, Homo sapiens
taaacaaccttctggcattgccctcctcctcaaggtgttacatttgtgttttctggagcaggaatttaaaagccaactaggttaacagaaactttaaatatatataaatacacatatatatggaayagaatggaacttgacatatatatatgtatatacgtatatacatatgtatatacgtatatacatatgtatatatgtacacacatatagg

SEQ ID NO: 123239 - DNA, 214 bp, Homo sapiens
taaacaaccttctggcattgccctcctcctcaaggtgttacatttgtgttttctggagcaggaatttaaaagccaactaggttaacagaaactttaaatatatataaatacacatatatatggaacagaatggaacttgacatatatatatgtatataygtatatacatatgtatatacgtatatacatatgtatatatgtacacacatatagg

SEQ ID NO: 123240 - DNA, 214 bp, Homo sapiens
taaacaaccttctggcattgccctcctcctcaaggtgttacatttgtgttttctggagcaggaatttaaaagccaactaggttaacagaaactttaaatatatataaatacacatatatatggaacagaatggaacttgacatatatatatgtatatacgtatatacatatgtatataygtatatacatatgtatatatgtacacacatatagg

SEQ ID NO: 123241 - DNA, 594 bp, Homo sapiens
tgtttgaaaatgtacataatggaaagtcttaaaaaaagacactcaagagtactatgcctatgtcttatactctatggatttcatttgaaattaaaatgatgataagcataatgagacctaacatttactgagcaagtcttctgtgagcagagctccttaccaagcattctgcatgaattatctcatttaatcagcaaactacccccaggatatgggaagtatcattaactccattttgcaattaaagaaaccgaggcacaagaaggttagataaaatgccaaaaatcacacagctaataagtatccagggtgagattcaaacctaggttattcagtgcaaaaaataaaacaaagtaatgaaacaagttgtttttgrtttgcttttttttttttacctgaaagaaacaaggagttatgtagaaaagtcccaatgcattgcctttgctgcatgattactgtttagccctttatatttgtgaagtgcctgtgttcctttattactaattatagagtgtgcggcagtgtaatgaatagagaaggcctcaaagctgcctgttgaagtcataattgaaaccagtggtagctccaggctga

SEQ ID NO: 123242 - DNA, 459 bp, Homo sapiens
gtcatctataaaatgtggttagtaacgtctccattgtaggatcgttcctaggattctgtgagtgtgatgtatattaaaatacctgattgatattagggcctcagtcatgttcctttctttgctttagactcatttctctgaaaaagtaatacgatgtttatagttggggaaaaaaacccaaagagcgttcataatctggatattaccactattgaaatttctattttgattcagtgtttttttkgaaggtattcttatttttaagagagggaattataaaatatgccattttctaactcagtgtttaaaccttaaaaaaagagacatttcttgaaatgttaaacctatggctttgagcatggctgtgtgtggctgtatttgctcttggccatatttattgtggcagcgtggtaatgggtttatgcttgttttatcgcttgtggtttttataaaataaaa

SEQ ID NO: 123243 - DNA, 622 bp, Homo sapiens
ccctgcctggttcttctcgcctgcagctaatctcactggcatgattggagcctgccctctgtagcctggcttctcctcctgccctctgattccagaggacctgttgctctgccctgttccttcccttggtgctgtgggtgtgtcattattaccatctacygaacagatggtcttctggcctccactttggccagtggacaccagaattctcttgtcctatcaagttactgccctctcccttcttcaggaaaacactgtcagcaaagccaagggagcctgcatcagaatttggcctcctgcatatccagtctacatcaaatctttattaaatgcctcctataagatgaacatgatgccgtctgtgctcaaggagtgtcacaatttaaatcccatcccctcaatcagagagattttatggtatcctgagaaaggatgtgctctggagaaatatgaacccggtcaaatcctagcccagccatttactagctatgtggtcctaggcaagttacttaacttttctaagcctccgtttctttatctataaattaagggcaatagtatttaccttgcatggttactgttattattagagatgatgtacatagtagatgttcaacaagtt

SEQ ID NO: 123244 - DNA, 622 bp, Homo sapiens
ccctgcctggttcttctcgcctgcagctaatctcactggcatgattggagcctgccctctgtagcctggcttctcctcctgccctctgattccagaggacctgttgctctgccctgttccttcccttggtgctgtgggtgtgtcattattaccatctactgaacagatggtcttctggcctccactttggccagtggacaccagaattctcttgtcctatcaagttactgccctctcccttcttcaggaaaacactgtcagcaaagccaagggagcctgcatcagaatttggcctcctgcatatccagtctacatcaaatctttattaaatgcctcctataagatgaacatgatgccgtctgtgctcaaggagtgtcacaatttaaatcccatcccctcaatcagagagattttatggtatcctgagaaaggatgtgctctggagaaatatgaacccggtcaaatcctagcccagccatttactagctatgtggtcctasgcaagttacttaacttttctaagcctccgtttctttatctataaattaagggcaatagtatttaccttgcatggttactgttattattagagatgatgtacatagtagatgttcaacaagtt

SEQ ID NO: 123245 - DNA, 573 bp, Homo sapiens
tcttttgggagttgttcgaatctataacaggaaggcaaaatatcttttggcagattgcagtgaagcatttcttaaaatgaagatgacatttygcccaggtatacatgtaatattgatttgtctccttcttggttcccttttgcattttaattgggggtgggatcttttaatatacttcaggctagtatggtgaatgtaaacttagttttgaatgaatctaagtttccatggttgaggataaattgtattcatttccttgctctttttctatacctgcaggaaaaggttatgctttccaaaacttgtaatgttcctgcatatttatggaagacatatacttaaagccactacacttgcataagaaactctgatattctgtttttaatgggtcatttagtttgtcgtgcctgtttttgcctttataagagaaattagaaatagtgtgattgacaaaacagagatatcagtaattgttttcagaattctcaagattccaagcagcttgctatttatgacatatcaaaaattcctaagcattccaaagtgccagagatttacatatgtcataaatat

SEQ ID NO: 123246 - DNA, 376 bp, Homo sapiens
ttttctacttttttgatgtaggtgcttattgctgtaaattttcctcttagtgctgcttttgttgtatcccatagggtttggtatgttgtgtttccgtattcatttatttcaacaaatttttttcttttttcttatttttttctacttgtaaattttttatacgataacaaaatgtttttcactttccttcttaaatttctttattgacccactagtcatttaggagcatattgtttaatttccatgtgcttggacagtttccaaaattcctcttgttattggatttctagttttattccaytgtggtcagagaagatacttgatagtatttcaatttttgggaatttttacatacttgttctggggcctaacatat

SEQ ID NO: 123247 - DNA, 376 bp, Homo sapiens
ttttctacttttttgatgtaggtgcttattgctgtaaattttcctcttagtgctgcttttgttgtatcccatagggtttggtatgttgtgtttccgtattcatttatttcaacaaatttttttcttttttcttatttttttctacttgtaaattttttatacgataacaaaatgtttttcactttccttcttaaatttctttattgacccactagtcatttaggagcatattgtttaatttccatgtgcttggacagtttccaaaattcctcttgttattggatttctagttttattccactgtggtcagagaagatacttgatagtatttcaatttttgggaatttttamatacttgttctggggcctaacatat

SEQ ID NO: 123248 - DNA, 551 bp, Homo sapiens
actcctaactatcagaatagtgaattggaaaaggatctgagacagccctcgatctgaacctcagttttgggaagcagtgacatacctctgggactcaaagcaagtcacttggccctgctagactttgggatggccccggcactgtgccaactctttcaaaaacattacctcatttagtgctgaagccacccatgtcttgctttcttttgcataaaacttgttggatgaaaaaggacctggttaaggtttaaaatacgatttgtaataataatagaataataggctctgtgttttgagcacattccacatgccaggcatgtgatacttacaatgtatgtttccaaacaccgtctcatttaatctttagagtaaccctatgaggcaggtactgattgaggttggtaaatctcaggtcgtaaagatagtatgccatgttgtgaagataggagtagaaatctaaatcccraattattgtatttaaaatccagagcatcttttggcaaatctgtattttagcttcctagaactatactgaaattttttctggagta

SEQ ID NO: 123249 - DNA, 648 bp, Homo sapiens
ggcaatggttacagggattacacatttgtcaaaattcatcgatatgtttacctaagttatttactttgtatatgttagacctcaataaagtgctattcaaaataaacaaataagaacattaattcaaatgaacatcagaaaaacccattaactgaaatgaagcatcaatcccatgcacaattttagggcatgcagattctctgaaagtccaaatgcccctcactctacactgccattttctatacatgaagaccccctgatggttggtggagattgggagaatggaatgttctactgctgcagactgtctgccgggtgagtatttccatggttcccactgttacaaaggaaactcaattctatttttttaatattkttcagtgaggacacttaatatgagatgtaccctcttaacagattttcacgtgtataatacagtgttgttatctacagacacgatattggacatattgtattggctcctagaactttttcatcttgcataacttgttttaggctcactgagatacaaaaggagattgtggagctacagatacagtacactgaactcaaagaaagaaaagtagggcaattatttacaagaatacattttaataaaatatttcttactaaagttgaaataataaa

SEQ ID NO: 123250 - DNA, 648 bp, Homo sapiens
ggcaatggttacagggattacacatttgtcaaaattcatcgatatgtttacctaagttatttactttgtatatgttagacctcaataaagtgctattcaaaataaacaaataagaacattaattcaaatgaacatcagaaaaacccattaactgaaatgaagcatcaatcccatgcacaattttagggcatgcagattctctgaaagtccaaatgcccctcactctacactgccattttctatacatgaagaccccctgatggttggtggagattgggagaatggaatgttctactgctgcagactgtctgccgggtgagtatttccatggttcccactgttacaaaggaaactcaattctatttttttaatatttttcagtgaggacacttaatatgagatgtaccctcttaacagattttcacgtgtataatacagtgttgttatctacagacacgatattgkacatattgtattggctcctagaactttttcatcttgcataacttgttttaggctcactgagatacaaaaggagattgtggagctacagatacagtacactgaactcaaagaaagaaaagtagggcaattatttacaagaatacattttaataaaatatttcttactaaagttgaaataataaa

SEQ ID NO: 123251 - DNA, 180 bp, Homo sapiens
gataaacaaaatgtagtatacacaggcaaatcaatattactcagccctagaaagaaaggaaattctgactcatgctacagcatgaatgaactttgaggacattatgctaagtggaataagccagtcacaatagaacaaatattgmatgattccccctttataaggtacctaacatagcca

SEQ ID NO: 123252 - DNA, 650 bp, Homo sapiens
acttaaaggaatgcctaagaatattactctacgagtgtaagaatttggtttgtcagtttaaactgatatcagcagttacctaaaccaagttttttaataagaacatccaggactgacataatgctattttgttcagctctttgaaaaacagcacaaagctagcatctctgtgacattcattaggttctgtagcacaacatcccagaggatgcttttgggcttcctgcatctcagtcacttagaatgaaccttaaaattcagatttttcaaggctcatcccaaacctaccgaatcaaagtgacttcttctgttgartaagaatgtctgagggtggagtgttctattgagtcagaatgtctaaagtcatttgtaaactaatctcagatagataatccttgtatacattaagagaaccactgtcctatgtttacttgactgttttcataatgttttccttctgattgtggtaaagttaaaattgttttgagctaaatgtgtaccaatatcagtttctgcagtataaacaaagcttgattatttcaaggtcatgcagtgagaacatttatgctgtgtgggaggaacctctaattccttctaatgaataacacaagcaaaatacaagaaaaacaatgcaaacactggaaggcata

SEQ ID NO: 123253 - DNA, 650 bp, Homo sapiens
acttaaaggaatgcctaagaatattactctacgagtgtaagaatttggtttgtcagtttaaactgatatcagcagttacctaaaccaagttttttaataagaacatccaggactgacataatgctattttgttcagctctttgaaaaacagcacaaagctagcatctctgtgacattcattaggttctgtagcacaacatcccagaggatgcttttgggcttcctgcatctcagtcacttagaatgaaccttaaaattcagatttttcaaggctcatcccaaacctaccgaatcaaagtgacttcttctgttgagtaagaatgtctgagggtggagtgttctattgagtcagaatgtctaaagtcatttgtaaactaatctcagatagataatccttgtatacattaagagaaccactgtyctatgtttacttgactgttttcataatgttttccttctgattgtggtaaagttaaaattgttttgagctaaatgtgtaccaatatcagtttctgcagtataaacaaagcttgattatttcaaggtcatgcagtgagaacatttatgctgtgtgggaggaacctctaattccttctaatgaataacacaagcaaaatacaagaaaaacaatgcaaacactggaaggcata

SEQ ID NO: 123254 - DNA, 605 bp, Homo sapiens
tattcaattcaatttattcccagtatgggtttaaaattaattgcccttatatgcaatacattttattattttcatatggttccttcaaccaaaaacatttttgagattctcttgtaatttgttctgtctagaggatcccctgagtgacttttcaggattgcagattaatcaaatattcagatcctgggatctgcttccgctcagaaaacaataccccaaggcatgcctctttgacatgctgagtacttccaactaaagaagccttagaatcaaggttgctttgactttcttctgtcctgtgtcttttgcccctctgcctctcctaaagcacaggaaggggatttctttggagtctscatgtctgactgtaaggaaagttccaccagaagaaaaaatgcatttgctctaaacgccttccttggaatctaaattaaccagagaaggtgcaggagagcatattaaagacctccccacccaaaacactacatgcagacagacttttcatctattcttctgttttgtctattctgctgcctgagagactttgtctgcataataagaccacttttgttcatagtgcattcactctaccaaccctcccatag

SEQ ID NO: 123255 - DNA, 573 bp, Homo sapiens
tgagatgcctgctagatatccaggtgaagtaggaaactggatttatggatctgcaggtcaggagcaagattaatagtagagctaagagaacaaaaccaaaatctcacatctctcgactcccaacagagttcttttcacagtacgtagagtactctcccgtgggctggagaatttaaatacctgcgctcaaaacctaaaacgcaaagaggaaatacggtaaccctgagcgcactaccctagccctagctctagctctagctctagctctaccagcgccagagctggaggaggtcagaggagaggggccgtactggagggggctggctatcttggggaagttgggtgaggcccgagggggccaagggctcagcatgcaactgggscggagtgggggctgctgggcttaggagcggatctccaccgaggtctgggtttcttctctcgcaacggtcttgactgtttccttgagccaccgtcagatatttatttaacctcgcagttcagcctcctgggggcctgcagggaagggatggaggcagggcggagaaagctgggggagaaggggagcgaaag

SEQ ID NO: 123256 - DNA, 573 bp, Homo sapiens
tgagatgcctgctagatatccaggtgaagtaggaaactggatttatggatctgcaggtcaggagcaagattaatagtagagctaagagaacaaaaccaaaatctcacatctctcgactcccaacagagttcttttcacagtacgtagagtactctcccgtgggctggagaatttaaatacctgcgctcaaaacctaaaacgcaaagaggaaatacggtaaccctgagcgcactaccctagccctagctctagctctagctctagctctaccagcgccagagctggaggaggtcagaggagaggggccgtactggagggggctggctatcttggggaagttgggtgaggcccgagggggccaagggctcagcatgcaactgggccggagtgggggctgctgggcttaggagcggatctccaccgaggtctgggtttcttctctcgcaacggtcttgactgtttccttgagccaccgtcagatatttatttaacctcgcagttcagcctcctgggggcctgcagggaagggatggargcagggcggagaaagctgggggagaaggggagcgaaag

SEQ ID NO: 123257 - DNA, 643 bp, Homo sapiens
gcatttttaaatataaaagttgtcaaaatgtattttccattccccctttctcccgtagttactcaaggatgggttccaccagtacaaaggagtaaacaaagatccaagaatcaagaaaacgttgtagaggagacaaagagaagccccagaaacatgaggaagagacagctgtgtaccaactggtggaggcagtgcatccatacagggcaaaaaaaggctgcaggcatgactttttaggaagatgctcaacaaaatacttgctgagaaaaaaaaaaacaaaacttagaaatgctggttccaaaacatgtgcttttgtttgtttgttttttcttgttctgacttttaattcattacaccactgctctccaagaaaaggctatcaattattcccttccaacaatgcataagaatgactttttccctacttctccaggacagaatataattatcatttattttaatcttttttgaactgttaaaaagataaactgaggcacagtaaaattttaaagagttttggtgmgttttttttagcatgaacaatttatgaactgagcagctccgaaccagaaatagtttgggagctccactgaggaacacaaagaggagacttttataagacagacacagaagtaaagcaaag

SEQ ID NO: 123258 - DNA, 572 bp, Homo sapiens
gatctgctgggtgattttagagatggagtttcattgacttcccacactgccctgaagaggtcttattagtattagccccattttacagagaagggaactgaagctctatgcatgtaattagactctgaaggctgttgatggatggggaagragagggtccctctctgcttttaaggaatgcatggacagttatgattctggcctgagaaggaaactgaaggggctctgtgcccgtcccacataccctgccccacccccagggcctcatgggtcccaccaggggaggctcctggcttcccaacagaggaaggcatcacttcagaaagggctgtcccctcaggccttctgtaggtggccggtgggggtctaagtgtatgtgcccttcaatcccccttctccattcccctcgtcctccctgtgctcctgtaatgcccgctggaccactggagagcccccatagagagcaaacaacagcagagcacacagccggcctcccgagggtacagggcttgcctgaactctcaggtctagtaaaagcgagcttcctacagaaatgcacaggggactgagat

SEQ ID NO: 123259 - DNA, 572 bp, Homo sapiens
gatctgctgggtgattttagagatggagtttcattgacttcccacactgccctgaagaggtcttattagtattagccccattttacagagaagggaactgaagctctatgcatgtaattagactctgaaggctgttgatggatggggaagaagagggtccctctctgcttttaaggaatgcatggacagttatgattctggcctgagaaggaaactgaaggggctctgtgcccgtcccacataccctgccccacccccagggcctcatgggtcccaccaggggaggctcctggcttcccaacagaggaaggcatcacttcagaaagggctgtcccctcaggccttctgtaggtggccggtgggggtctaagtgtatgtgcccttcamtcccccttctccattcccctcgtcctccctgtgctcctgtaatgcccgctggaccactggagagcccccatagagagcaaacaacagcagagcacacagccggcctcccgagggtacagggcttgcctgaactctcaggtctagtaaaagcgagcttcctacagaaatgcacaggggactgagat

SEQ ID NO: 123260 - DNA, 572 bp, Homo sapiens
gatctgctgggtgattttagagatggagtttcattgacttcccacactgccctgaagaggtcttattagtattagccccattttacagagaagggaactgaagctctatgcatgtaattagactctgaaggctgttgatggatggggaagaagagggtccctctctgcttttaaggaatgcatggacagttatgattctggcctgagaaggaaactgaaggggctctgtgcccgtcccacataccctgccccacccccagggcctcatgggtcccaccaggggaggctcctggcttcccaacagaggaaggcatcacttcagaaagggctgtcccctcaggccttctgtaggtggccggtgggggtctaagtgtatgtgcccttcaatcccccttctccattcccctcgtcctccctgtgctcctgtaatgcccgctggaccactggagagcccccatagagagcaaacaacagcagagcacacagccggcytcccgagggtacagggcttgcctgaactctcaggtctagtaaaagcgagcttcctacagaaatgcacaggggactgagat

SEQ ID NO: 123261 - DNA, 562 bp, Homo sapiens
aaggagccagccataattcaccaaaaccaaaatagcgacaagagtgacctctggtcctcactgctacactcccaccagtgccatgacagtttacaaatgccatggcaacatcaggaagttaccctatatggtctaaaaaggggaggcatgaataatccaccccttgtttagcatatcatcaagaaataaccataaaaatggacaaccagcagccctcagggctgctctatggagtagccattcttttattcctttacctttttaataaacttgctttcactttgcattgcagactctcccttaatcctttcttgcgcragatccaagaaccctgtttcaggatctggatcaggacacctttcctgtaacagttttaagctcatggtttattatattaatctctctcaatttgttcatcaggatagaatatttggagaggtgaaacttctgtacttcctcagagcacccctagtcttcctgaattgcattttcctgccttttctttcatttcagcctaagagaatcccttttaaggtgtcctgatcctttacagtagtaacag

SEQ ID NO: 123262 - DNA, 562 bp, Homo sapiens
aaggagccagccataattcaccaaaaccaaaatagcgacaagagtgacctctggtcctcactgctacactcccaccagtgccatgacagtttacaaatgccatggcaacatcaggaagttaccctatatggtctaaaaaggggaggcatgaataatccaccccttgtttagcatatcatcaagaaataaccataaaaatggacaaccagcagccctcagggctgctctatggagtagccattcttttattcctttacctttttaataaacttgctttcactttgcattgcagactctcccttaatcctttcttgcgcaagatccaagaaccctgtttcaggatctggatcaggacacctttcctgtaacagttttaagctcatggtttattatattaatctctctcaatttgttcatcaggatagaatatttggagaggtgaaacttctgtacttcctcagagcamccctagtcttcctgaattgcattttcctgccttttctttcatttcagcctaagagaatcccttttaaggtgtcctgatcctttacagtagtaacag

SEQ ID NO: 123263 - DNA, 572 bp, Homo sapiens
tgaagaataaaaatacgttatagtgaaattgttaataaagcatcaaacatttgtataatgatttatacttttccatagctttcaaattcaaaacctcatgatacacaataaaataaatcataaaacttcaaataatatgtgactacatgtaacttgttaaataaataaaaccagaactggtgattaagataatcattcagaaaaatgcaaaacaaactgataaataagctactctgctctattaaagcttatacttaattcaaggactacatttaaggagcgatttattgttgtagacatattcrctacaaggaacttcagagaagtaaaattacagaacatagcaaaggtcaaatccatcatgtcagttaaaaatagatggataaatgcagtaaggtttggcactagatcgatagccttagagactgggcaattctaggagaaatgttcccagtaatcacaagctttgaacatgaatacaaactgatcagtattgggatcatagttctgtatacaagaatgtacttagaattcttctgaatgcaatatgaattgaatatacattataatgt

SEQ ID NO: 123264 - DNA, 567 bp, Homo sapiens
tcactacaagttgcaagaacttggactcttcgttcaacgtgattatttcctaccctctagctgtccataagagaatctcttaaacacgctgttcaggcctgatcaaaacattagccaagccttatgatgtctggacatgctaggcaacacgggagtcattaatcagggggttactgacmgatgttaagtacaagcatctgtatgttaagatttttcttttactgattaacacataacggggcctgaggcctggaaaaagggataaaacatatttggagatgtgcagtgcaggcagagttgacccagattcaggaaccagaagataaaatgcaaagtgggaatcttgacattagtaagtgaatttgaacagtattaaacatcttaattctcctaatgatcctgaatgttttaaggataattaaggttaactaaaataaataggcctgctcgttcaagtgcacatggtgagcatattcttaggaaatgaaattatccatttttgtttcccaggtaagaattaatttatagaaagaatccaccagcagaaaattttttttaatactcggt

SEQ ID NO: 123265 - DNA, 605 bp, Homo sapiens
tcaaatagcccattttaaatagttaggtttgaagtgtgatcatattcactttatctaatgaatttagttaattatcctcagcacatttcatctatattcttaacccccattttgagataatagtagtagtagtagtaataataataataataataataataataataataataaatgtacttatagccctatgtttgttttaactggcacccaaagggagggatcagtccattgtcagggcaactgtagtgtagggaaaatagaagtgggatatgattcaactcaacaaaaatccttgctccccaacctactaattgtttgacttaggtaagtcacttacgatccctgaacctgtttcctatttagcagatatgcataacaatggttatgaagttgctgtaaggatcaaacaggataattcatataatgatattaacatatatttattgaaaacttactgcatctactgttttaagtcttttaggtaaattatttgtcacaacaccactctttcaatgaatactattatttccattgtaatcstcaatatacaggtgaggaaaccaaggctcagagaagatgtaagaatttgctcagctttacgt

SEQ ID NO: 123266 - DNA, 625 bp, Homo sapiens
agtattctgatcaggatacgtgagttctattctcagatcttccatcatgcaggtatgtataattgaactatctgatactctgctttcctaggactcagtttccttatctatgtagtgaaaagcctagaataaaggcctgacatttccttctagctataaaattgttttcccacccactggaggatctagttcaattaggttgaaggtccatgtcaagaaacatactgcaaaagatccaccacatcacagcccgaaagaatctataacttttctcctgcaggctcatgaaggccagttgagtttcagcaggatggtcttagcaatggttgaccagagtatgatgcatcctttctgtccatagcagatcaaraatggaatagaatatgtatccaggattcaaataatcattcattcagcatttattatgtacctgccatgtgtcagggactctactaagtgccaggagtatagatatcagtaagacatgtggatcagagcgttcatataatagtaaagtaggaaacactggcatattaacaaatacttaagataaaggaattcaacattaaaaaaccaaatagagacatgtacaaagaactagggatttgtagggtcccttactacc

SEQ ID NO: 123267 - DNA, 621 bp, Homo sapiens
gtctgtttcactcataggaaggtttctggctctattatcacattgtcctcttcagtatctttacattttggtgctgtctgtgggsccaaacataaggttaaagcaatgctcataatagaaaaaggtaaaacaaggaagagcaagtacctccatgcccatccaaatgagactgtcttcccaatctattgtcatgccttgtctctatggtttgttggagtcccctcaggaatgagatacaccatattgggctgggctccctttcgtaatctaatcacacttggttatttttccttatatacaacagactgcccacttatcttacaattgcagaaataaaaataaataaaatacttgttccttacaagaatattggacattcttggtttcatcaaaaataagagaaatatagaagacacatgtttaggcttcagggtattgttaaagggtgggaggggatttgggtggcccatgatatttcttcatgctctaaaatcacactagcaagtagtcaactacttcatgtaacttgaggctattcttgctcagacttcaataataatttctcccttaaccagtgggcaccattgccgcttacttaaactattcctacagagatggttc

SEQ ID NO: 123268 - DNA, 551 bp, Homo sapiens
attctaacagtattttttttgagactttagggttttacatayattagatcaagtcatgtgcaaatacagacactctacacttcaactgttcctcctcccacattttctgttactgattcaattggcctcttttatttatcatatattaattcacaaattattatatagttattacttacataacttttatatgagttgaaagtgatttatgtatcaccattgcagtatctgagtaatctaatttgaaatacattcttttgttgacagtcaattttatattttcacatgtttctatgttgtgtcaattcattccaacttgaagttcctttagtatttcttataaggcagatctagtggtgatgaactccttcagcttttgttgctcttggagtcttcatttctgaagggtagatttcctgtttatactattcattggtaggcaggtttttcttttgtctttcagcactttaaatatatcatttttctctttcccagtttgacttttaaggatttcattataatgtgtctcattaaagatatctttatgttta

SEQ ID NO: 123269 - DNA, 601 bp, Homo sapiens
ctagcgctttcataaaaggaagttgaagtgggaatgaggagtagctgtgagttgtgaagtcagataaatgcttcaataagatggacaggatttctctcttcttttaattctaattgcacaatcatttacacagtgctataggaattaaaatcactttttaattcagctaaaatgagaaacactttcctttgtggctattcttgttcttttctacctttcctattttttcctaccccttaattacyagcaccacgtcctgtgcataataggtacacagtaatgtttttctacagctcttatttcttaatgccaaccttccaacttccaaatgcagcctgccctttcaggctccagccttcctttgcctctcagtattttacagaatctggtctaacttctaatttcatacattaggttttaatgattccaacaggtggcctgccttggccaatgtaaataagcaactgtcctgttttccaatcccctttcaactccagcttgtcacttctggttcttatttgtttaattgcagcaagttttctaccctgtaaattttaataaactcccatcagtcctctctggtcctaagcattcagttatg

SEQ ID NO: 123270 - DNA, 601 bp, Homo sapiens
ctagcgctttcataaaaggaagttgaagtgggaatgaggagtagctgtgagttgtgaagtcagataaatgcttcaataagatggacaggatttctctcttcttttaattctaattgcacaatcatttacacagtgctataggaattaaaatcactttttaattcagctaaaatgagaaacactttcctttgtggctattcttgttcttttctacctttcctattttttcctaccccttaattactagcaccacgtcctgtrcataataggtacacagtaatgtttttctacagctcttatttcttaatgccaaccttccaacttccaaatgcagcctgccctttcaggctccagccttcctttgcctctcagtattttacagaatctggtctaacttctaatttcatacattaggttttaatgattccaacaggtggcctgccttggccaatgtaaataagcaactgtcctgttttccaatcccctttcaactccagcttgtcacttctggttcttatttgtttaattgcagcaagttttctaccctgtaaattttaataaactcccatcagtcctctctggtcctaagcattcagttatg

SEQ ID NO: 123271 - DNA, 609 bp, Homo sapiens
tcctcctcctgtgaggtgtgcaccatgttgggtcttggatgaggactcctcctttacatgcctggattagcaggatccgctcagaagacttaacatgaggggagattttccaaggagaggccaccctgccttccacatgaggagggtgtgccccggcagaggggtctgattcttgtcaggagagtgactttaggaagacgatgctatctgatggtcctaccttaaaagacaagaaaaataaaaagtcttctgtcttcttatcctttattcaacaaacgcatttccccaaacacatgtgaaggcttaaaactagtgtcgcawgggctttctacaccttaggctttcttcacagtctggattgccccatggttattacctttgtcacatctaaagaagagatggtctcataatatattttcatccaagatttgaaatcagcattaagaaaagccaataccaaatgaattggggggacacagaactaaataagaacattaagaccttaacttagattactacaaagactctatgaaggctgtaaataagggataataaggactatttatctcctcacacctaaaagaggtgaggtctgtagagaccttccca

SEQ ID NO: 123272 - DNA, 556 bp, Homo sapiens
cctgttatatacagcattacacatcctgagaatagatcagtacaggactctcttacaaaattctttatccagtgaaatttacattctagtatgaaagtcagagaaaaataaagtagggaaggactggcagggatggggtctggtatggattcaccagttgtataaagacctgaaggaggttaggaagtgaactacatgggtatctgtgagaaaagcatcctaggyaaacgagacagcaagtgtaaaggccctgaggtgggagcatgtctcggagatttactccgagtaaaatgggaaaccgtgggaagatctggagcaggagagacatgctctaacattttaaaggaaaaaaactggtaactgtctagaataggctgttggtgtgagtgcctgggccatgataaatttttttaaaaaaatttcttaagaaaaaagataaaaaaagaatagctgtagggctggaagggtggaagctgagactagctaattcaaatgagatttataccagggtggagactgtggagataagaagtggctgaattttggatatattatt

SEQ ID NO: 123273 - DNA, 603 bp, Homo sapiens
atttaacacatgtgcaacattattgtttgtatcatattgccatcaccaccatacttggtgaaacatgagctcacatgtagctcttgttatataaatatcaatatgtcattttggcttcttcacagtgttcaaaactgtagttccttaaygtttgggatgttctttctcctcaaagcaggcatccaaggtattcacctcaagcattttgaagggttttaaatggctcttgattttatcacttgcctgttttaaaatctctggcccaaaatttcaaagttacactttctcccaggagaggtcctgtaagaattgtaactaatcatagcatttactgtttgatattatgtaattcaagaagtgagatgctagaggttataagaagggctgaaaagaactataagacataatcttactctcaaggaacttcctatctagtatgggagttagagctaagtcttagacttgtgggcaaaatatacgatttgggaaaagaaagactcctctgtgttgagctggtttgtgaaggtctcagagaaaaattggatcttgttttaagccttaaaaaatgactgatgtttagactataaccctgggaacttaatt

SEQ ID NO: 123274 - DNA, 603 bp, Homo sapiens
atttaacacatgtgcaacattattgtttgtatcatattgccatcaccaccatacttggtgaaacatgagctcacatgtagctcttgttatataaatatcaatatgtcattttggcttcttcacagtgttcaaaactgtagttccttaatgtttgggatgttctttctcctcaaagcaggcatccaaggtattcacctcaagcattttgaagggttttaaatggctcttgattttatcacttgcctgttttaaaatctctggcccaaaatttcaaagttacactttctcccaggagaggtcctgtaagaattgtaactaatcatagcatttactgtttgatattatgtaattcaagaagtgagatgctagaggttataagaagggctgaaaagaastataagacataatcttactctcaaggaacttcctatctagtatgggagttagagctaagtcttagacttgtgggcaaaatatacgatttgggaaaagaaagactcctctgtgttgagctggtttgtgaaggtctcagagaaaaattggatcttgttttaagccttaaaaaatgactgatgtttagactataaccctgggaacttaatt

SEQ ID NO: 123275 - DNA, 569 bp, Homo sapiens
gcttgatccattgaaacaaaatgtttcgattcaacaaagtttaattgcatccctacagtgtatcacacataaagcactgcagatacaaagatgaatgaatctctgtcttaaggggttcactgtgtagtggggctgacagatgtttgtgagaggtgccatcagagaggaatgtacagagaaaagaacacagaggagtaattacctctggaagtatgagaaaggaagcaaagtactgctgtctttactgtaaaatcaacatgtatctattctttgcttgtttctgcatttgtgtttagcatcccttggaaagttcaaatggctgcaatggagaaactsgtctctagtaagagaccagttttatgttgaaggatcatggaaaaatggatcccatatgtactcacaaagctttgcaaactttcaaaagtactctgaatgacttagttgaattagcataaccactcagagcttccttggtcttcaaggtttatagataaggctactaaaagtgtttcagctaaatttcatagagtttatttgaaaatttgaaaaagctgcaacaaaagtgagtt

SEQ ID NO: 123276 - DNA, 621 bp, Homo sapiens
attatgtgaccctcttcaatcctggaaatcacattctttaaccttgtagatggtcacatttcataatttatctttcctatttttagatgaatcattatacaccattcatggaaaattaaaagctgctgagaagacctaaaaattatcagtccattaggattttccccctttatacagaatttcccygatttggggcagtttccaagacagtagaataataccatagaaaatgtcacaatttcacttctcttttatgagaaaatttgtgtgttttacacaaaagatcacttcggaagtaatcatgaaatagatttgaaacattgaggctttctctctctttgtctctctctctgcctctttctctctctcttctttctggcagaaaccatacccaactttcaaatcaaatatcagttggtctagagaaggaaggcctgggaagctgtggatagctctaaaaccatttgattgcacaactgctatgagatgagggtatgacaaaggtgtttgtaatctcatagaaagttgaataaaagtacctatgattacatcaaattaaagtctattttagccatgcctaatccaatataacacttgatattaaccaatggttaaccaata

SEQ ID NO: 123277 - DNA, 653 bp, Homo sapiens
accatacctggataattttttgtgttttttgtagagacagagttttgccatgttgccaagtacccagcactttctgtcagcacctggattcttagaactacctggctgttttgtaatattcctcccctgggataaatcccatttggcaggttgggcaatttgtacttgttttccattctccttgaaatgctcttctcataaaaacacaaagctcacctctccagttccttcaggttccagcattgtctcatcacagggactttccctgaacacacttatgtaaaccttctccatgtccatattctctatgcctttaacccctattatttttattttagtatttattgctgattgatttctatttcttttttcctcactttctctctatttttattattatcactattattatctgtttccccaagataatacaaataattaagttgcagaagttgataggatttgaatgtagctctgtttgtcttcaagtagatgctctawctgggacaatacactgcatgtgttaaaccctttgaatactctaaaacactgtcaaaaactcataaacccacaatagtaatgactttttaaccaatacaactgaccaaatattcatgagtctttgtcacattttcttcattaatacagtaagt

SEQ ID NO: 123278 - DNA, 630 bp, Homo sapiens
agtttgccaccgtctggcagaggccccctcaggactgttgattgtggtgaggtgaggggatgctgtgtgtcagccttgagcattctcagagctttggagccagcacaggacctgccatgcttttattatgccttaacagcaagaaccagcccaccctgggcttaagggacagcctcaactctcctattattctgtttcaaagtctatgaatgtgaatgagttcatttttctagtgaggacatctatagctttcattatagtttctaacagttactgagttttyttccaggtactgttctaagcactttccatatatttatgcctttcaatttttatgataacccctttgaggtgtgtatcattactacatccatcttatagggagaaaattgagggctggagacagtaaggtcacacattgagaaagtaagagagcaagatctcaaactcagattgcaccacaagagtctgctatccaaaaaagattgcaacatcttgtttcaataagcccatttggaaagtaacattaccttcctcttacttgtagctcaagacagacaaggttactcataggtggttgtatctattttcattagccagtgtggtatacgatatgatcttttcaaatga

SEQ ID NO: 123279 - DNA, 576 bp, Homo sapiens
catctccttgtctgcaaaggctatttgctggcaccttctaagagggtttgggaatcataccagcaagttgctttgctgcttaccataagatgctcgtcttccctctgaggctctgccaatagcctcattgggtgcgagtgtgtggagggcccagacatgaagttcagggcactagaatcagaatatttgcagccattcagtcacaccctgcttctcttaggaaatagaggcaggagggtccacttcattgtctctgaactcagataaggtgtctgcaactcaccccaagcctgtgttttccagcctccttagggtcagagttgtgtccctttccctccaaagcaatggtccctttgatcaaaatctagaagacgtcatcaggttacccaccatccctgcaccacagtcwtgcacacagtgacccctctgaggtcacctacttcatttgaggacaggtctgactttttaaaatgtttttctattattgaactgaattccatgttttttttctacctggggagtccagttctagcctttgaagttttatagtagttttatagtagaaccagcttcata

SEQ ID NO: 123280 - DNA, 606 bp, Homo sapiens
gcctgagttattgctatcaggggcatttactctataccatgtccaaatcctaggaacctgtgactatgttaccttacatggcaaaagggactctgtagatgtgattaagggtcttgaaatggggagactttcctagatcactggggtagacccatgctaatcacatgatttcttaaaagccgagtctctcttgactgttgtcagaaagaaatgtgatgatggaggaaggctcagagttgctacattgccggctttggagatggagaatggggaccatgagctgaggaatgtgggtggatttagaagctggaaaaagcaaagaaataaattcttccttagatctttccgaaaggacacatcctgtctaccccctgactttagcccagtgagacccacrttggacttctgacctacagaacaacacgacactaaatttttgttgtttgaagtcactaagtccatagtaatttgctgtggcagcagtagaaaatgcaaacagttggcactgagggagagtgagtggatttctccagccagaatttggggaaaatgacaataaagtattttttcatttctatttttttaatctttagaagctttatttag

SEQ ID NO: 123281 - DNA, 544 bp, Homo sapiens
attgctcttctttaccaaaattaaaactcttgcaagggcatcttgtgacactaactacttggagcagttattcttttccagtagctcaccaaatgggtccagagctatgcatttggagttcgtgataatgtcaccactggtttttataagaaatttgtgttgccgcatgtttcttgcggcaacacaaatttgctgcaaatttgtttttgcgttgatcatggggctctcgttctgaaattgtataccraccagataagcatatcctgaaagagtgggaggagggcatgcttttagtttttggaagattcattgatttctcagcaagagagatagtgcctccagcaatagccatggagaaactatgctgcgagtattcacagttcttcaccgtagcacctccccacttcccattccttggattttcttttttgcttttattttacctattgctactaaaaaaagctttagatcataggcaataaacatacctttcacaactgaatttgtattatatttgatatacatgactattaaatatatatgt

SEQ ID NO: 123282 - DNA, 380 bp, Homo sapiens
tgtacatctcttttcaaattgttttcaataaatactgtttatggtgggtacattttaactaatacagcattgatcttttctaacacatttgcagaggaagatactcattactgttttagtgtgactcagaacacaaaaagtgctatttatgattggataaccagaccctgaattataagtagcttatatttcaaaagttaatttgtaactgcaatctgtaaaccccacctccataaatcaattaaattgattttatatgcrgcagtgacccctttggtcaggaccaaaaaagcctatctaatttataatgtgcctgtaatactaacagtatcttagtgataggaactaactaccatgagaagatatttttaggcagggac

SEQ ID NO: 123283 - DNA, 593 bp, Homo sapiens
tgtaaatctgactgtaggaattttaacgcacttagcctaaaatggtatcttttttttctttttaaagagatcctgtgttcagccaaggcctaaaggatatcttttaaatttggtcatttttcttttttttgtcttgagacggagtctcgctctgtcgcccaggctggagtgcggtggcgtgatgtgcaagctccgcctcctgggttcacaccattctcctgcctcagcctcccgagtagctgggactacaggygcccaccaccccacccggttaattttttttttttttgtattttcagtagagacgtggtttcaccgtgttagccaggatggtctcgatctcctgacctcgtgatccgcccgcctcggcctcccaaagagctgggattacaggcgtgagccaccgcgcccggcctaaatttggtcatttttttgactgatgtgctacttcttactagattagggagatgcacttagcttttaaaacctgagttcctgttacatgatgaggctcttggacgtgtgtctctgactctgcgttgcgagcagagtgagggatgcaggatgatccctggtcctgtcctgtgctccta

SEQ ID NO: 123284 - DNA, 563 bp, Homo sapiens
aatgacaataagtctccaagaaaaaaagttaaattatattcactatatagtagcactctacttaggaagggaggaaattttataatacattttacaatgatttctgcckgaaaatgttgagttttctcccctttctaacaatgtcagcattaatgcatttaaataatattctgagtaaatatactatctggaagcagttatttcaggagtctacaaaattaaatatttaaatctttactagagaaatatggaagtaagaacaaaagtgaataatcattgaggaactcttaagaattacggttttgcattctctgtgtagagaggaacctatgatgggaaaaaataaatttcctttttgacctactggttagtgctgtcataaagcccctccagcttaggcgacctgagagaatttttaaaaccctcttttcagaatagtggaaaaggttttctccccttctcatttccaagagaaaggtagtgttgaccctaaaagctaagagaggaaaagactagatgtgtgttgtggaatcctttctcgactcttctttctctaatattct

SEQ ID NO: 123285 - DNA, 653 bp, Homo sapiens
atcaatttacaagctttatacttacccctccccatttttgttcctctttcttaacatagggattaaattccctagaagtaaacccagatctgtcaacagacagcagtaaacaacagcaacaacaaaaatacaaaacattttctgagagtttatgttaattattgaacaagaagaaagtataaggaagaagttctttctgtagcttcctaactttkttctaggctcttttagagctgatatgttgaatgaattaaaacaaagtgacagtggggcacagccacaaatgctaagcattatcaagactttttttgtaatttgctgatgaaagcattacttttttcttcttcagtggaaattttgaaataataattttcaggattttcatcactattaatctctgtcttaaaactgtgctagatctcaagtataatatgcttgaaaaattttcagacaaaggtgtgaatttctttctagttccatgaagcttggagtaaacttatggagtggctagaagagtcagaaaagtctttggattctgaactggaaatcgcaaatgatccagacaaaataaaaacacaacttgcacaacataaggtgggtccataattaagaagagcatattgtctcattatatagttcaagatcactttaaa

SEQ ID NO: 123286 - DNA, 567 bp, Homo sapiens
ataatgtgattgtaattgtgttgtctattacttagaaatttccagatgtagttgcctattacccatgacaaattaaataatttagtcatattaaaacactttaaagtatgtagcttttaaaggccgtaaaaacttcttaggtaattataaccttgagattattttagaaaagtgtacatttgcatagcattttactatctagggtaattttaatttgctacaaggattgagaatcactgtattaatgtttccattatattttgtgagtttgtaagcttcccattaagttgacctttctttgttctcattcctgctattgtatattcagtarcagttatctcattctttctactcttcctattgaatatttataaacatctactaggtgtaagatgataatgagaggcctacaaagacaatgtccctgctctataaaagcttatgattgagttgtgtagaaagactatacagatgctcctcaacttacgatgggtttttatccccataaaccctctgtaagttgaaaatacggtaaataaaaaatgcatttaatacacctaacattag

SEQ ID NO: 123287 - DNA, 567 bp, Homo sapiens
ataatgtgattgtaattgtgttgtctattacttagaaatttccagatgtagttgcctattacccatgacaaattaaataatttagtcatattaaaacactttaaagtatgtagcttttaaaggccgtaaaaacttcttaggtaattataaccttgagattattttagaaaagtgtacatttgcatagcattttactatctagggtaattttaatttgctacaaggattgagaatcactgtattaatgtttccattatattttgtgagtttgtaagcttcccattaagttgacctttctttgttctcattcctgctattgtatattcagtaacagttatctcattctttctactcttcctattgaatatttataaacatctactaggtgtaagatgataatgagaggcctacaaagacaatgtccctgctctataaaagcttatgattgagttgtgtagaaagactrtacagatgctcctcaacttacgatgggtttttatccccataaaccctctgtaagttgaaaatacggtaaataaaaaatgcatttaatacacctaacattag

SEQ ID NO: 123288 - DNA, 599 bp, Homo sapiens
gatcagctatatgagcaatcagtcatgcctataggatgaagccccaataaaaactctggacatcaggtaaacctccctgactggcagtattccatgcatagtcactcattgacactagtgaaataatgctgtcctgagtcaaccacaggggacaactggaagctccctctttgatgtactcctatacattccctatgtgtctcttcctttggctgattttaatctgtttcttttcccttccaaaaactataactgtgagcataacagcttttagtgagttctgtgagcccttttcacaagttatcaaacctgaagtggttttgggaatcccctgaatttgcaactggtatcagaaataaggctggcctygtgtgcactgatccctctaacttcacagttaacttacacaatggatgaccctactttactagacaaagcaagctgttttctatcacttcttttaaagactaagaatagtcctcaagtctattggcagtctagagatccagaagactgcattttacgcatgcttctacaattgacttgataactgtgttcaccgaatgtgttacatttctctctgaccttcttgactataa

SEQ ID NO: 123289 - DNA, 541 bp, Homo sapiens
tcctctgtttagtatcccaggcctcttaaggcattcattctgtgagcctactgaacacccatagtgaatgctaaactaggctctgaaggaccataagacctgtgatatggtttggctctgtgtccccatcgaaatctcatcttgtagctcccataattcccgcgtgttgtgggagggacctgttgggagatgactgaattatgggggtgggtctttcttgtgctgttcttgtgatagtgaatgggtctcaggagatctgctggtttgaaaaacaggtgtttcgctgcacaagctcttctctctcattgcctgctgccatccatgtaagacgtgacttgctcttccttgcctcccaccgtgatagtgaggcctccccagccacatggagctgtaagtctattaaaaagggtccrttaaaacccgctttttcttcccagattcgggtatatctttatcagcacatgaagatggactaatgcaacctgccctgtggaaaaatacaataaagttgaggagatgaaacatgaagtgctgtgagaga

SEQ ID NO: 123290 - DNA, 570 bp, Homo sapiens
aggtagtggcaacatatcattgttaatttcttgattttgatgagtgtactgtgattatatgagataatgtttttattttaagaaatgcacattgaagtatttgragaagtaaaagaacatgtttccacttaaaatgatttttagatgggggagagggagaaagggaacaagaatgaaacagcaacagtgataaagtgttaataattgggaaatctgggtgaggtatacatgggagtatttttgctgttcttgcaacttttctgtaagtttgacagcatttcaaaataagaaacatttaaaaagagttttcaaaaatcctagttgtgtgctctcattcttgctaagttcctcactgacatggattccagtgtccatgttgactgatgtttgttaagaaatgatgatcccaccattcaactcctttattgcttcagagatacatgagccaacactgggtcatggtgaaggagtagggagaaaaaaatgtcagcttcctagtacatcaggtctaagaagaggcaaactagcaagacagtgattggagtgcctcccaaagcattcagagctcca

SEQ ID NO: 123291 - DNA, 634 bp, Homo sapiens
tcctctgtgatactgggctgaaatgaagatcagtagactctgggctctgagaaccaacagataacctttctgatgcaataaacggcatggtgaaagtcccagactgctctttagaaccaagcataccacacttcctgcagaaataataagaaactaacatttaaatgagtactgactataagctgaacattgtagtaagtcctgttttatctattatctcatttaatcttcacaacaaccctataagtaattatgctatcataatacccattttgcataagaaaactgagaggcatagagaggataaatattttgcccaaggttatgcagcgagtacaactccagacagactggctcccaaggaactctctaccactccatcatactatctatacatgcgcagtaatgacatagcrgtatttaaaaaagctacaacaaaacccacataattggtaagaccgcacagggaatagcaataaaattctgcatgacttgctgcactgagcctaccagtaatagcctatttcatgatattaatattttttaattctcagcttctccagccaaagtctcaaggttagagaaagtgtttatggctgtcaagactggcacacagacagatagcacaagctaa

SEQ ID NO: 123292 - DNA, 634 bp, Homo sapiens
tcctctgtgatactgggctgaaatgaagatcagtagactctgggctctgagaaccaacagataacctttctgatgcaataaacggcatggtgaaagtcccagactgctctttagaaccaagcataccacacttcctgcagaaataataagaaactaacatttaaatgagtactgactataagctgaacattgtagtaagtcctgttttatctattatctcatttaatcttcacaacaaccctataagtaattatgctatcataatacccattttgcataagaaaactgagaggcatagagaggataaatattttgcccaaggttatgcagcgagtacaactccagacagactggctcccaaggaactctctaccactccatcatactatctatacatgcgcagtaatgacatagcggtatttaaaaaagctacaacaaaacccacataattggtaagaccgcacagggaatagcaataaaattctgcatgayttgctgcactgagcctaccagtaatagcctatttcatgatattaatattttttaattctcagcttctccagccaaagtctcaaggttagagaaagtgtttatggctgtcaagactggcacacagacagatagcacaagctaa

SEQ ID NO: 123293 - DNA, 517 bp, Homo sapiens
ttgttgagtacctactgtatgttcttactccttggtaatccatcagtaaataagacaaaaattccttccttcaaagagcttacagtatacggagaatatattaaaataattcaataaatcacacattttgatattactccaacacttcacttatttaaaaatatcatgggtatttgcacattacaacaaacatataaaakattttacataaagtgaataaaaataaaactttaaaaggaaaaacaaattagttttatcatttgtttgttatttttcacttagcagccaccataataaaaactgtctcatgcaaaaatcatcaatgagtgctaaaacaaatgtgtgaaggtttgaggagaaacaggatatttatacagtctcaaagtattttcacacaagatattaattaaaaataagttaaataattttatgctggagtaagctagaggagtcccctcgaccaagaaatcaaatataacatctccagtaatgggtagtagtagatattatatgcctg

SEQ ID NO: 123294 - DNA, 650 bp, Homo sapiens
tatctctggcttttctgcctgggacaataagaccttcctgctattgacgattcctggatgtctaacyattccttgttgattcttttaacattgcttatgtgtctgtagatcctgtctttatgaaattatattcagctaaccccttttgagtgtaccattttgttccctgttaagactctaatgatatagtattgagctaaaaactagtgtatatttaattccaccatagtttagagacttaaattggtcttaagatatctagtaaatagcatcgtcttgcatcttatggaaatgaatcagctgaaattgcagtgaacacattttgtttggagctgatcagcttgctggagggcccataaactccccacatgttattggcaaccactacggtgaatgaaatttcccagtcgcacttggaatgtgatgtttttccataaggccgtgctacgaagatgaaatccaaagaatatgaaaacacgctttatggaccctgccaagaagtcctctagaatgtaggcaaaatggagctaaaagcatttgtaactctgtcatagaaagtggggctttggttgggagaagtttgactgaaatcacttgagccctcctgacgctggcttttgggaatgagtgagtactttgtaaatgaactg

SEQ ID NO: 123295 - DNA, 537 bp, Homo sapiens
aatgatatggtttggctgtgtccccacccaaatctcatcttgtactcccagaattcccatgtgttgtgggagggacctggtgggagataatttgaattgtggtggctatttcccctatactgttcttgtggtagasaatcagcctcatgagatctgatggttttatcagaggtttctgcttttgcatcttcctcattttctcttgccactaccatgtaagaagtgcctttcacctcccgccaggattctgagacctccatggccatatggaactgtaagttcaattaaacctctttttcttcccagtctcggttatgtctttatcagcagtgtgaaaacggactaatacagtatcacacatagaaagcctaggagattgtcttttagcttgactagcatgaagttttccttttggatatccataggcttttattggcggcaatcttaaaagccaagttctattatctaggacaaaagggtttctcctagcatttaaaaataagcgttttgaaaaaagaaaaattgatatgacatgaa

SEQ ID NO: 123296 - DNA, 533 bp, Homo sapiens
gatcattctcactgatgcaaaaattctcaacaaagtgctagcaaatcaaattcaacaatacatatcaaagatcatttatcatgaccaaatggaatttatccctgggatgcaaggatggtttgacatatgcaaatcaatcgatgtgatacatcacatcaacagaatgaaggataaaaacaatatgatcatttcaattgatgctgaaaaagtatttgataaaattcaacatcccttcatgaagaacaccctcaaaaaactayggaaagacggaacacacctcaacataataaagctatatatgactgacccacagctagtatcacactgtatagggaaaaactgaaagctttccctctaagatctggaacacagcaaggatgttcactgtcaacattgttatttaacatagtactggaagtcctgcttagagaaattagacaagagaaagatataaaaggcatccaaattggaaagaaataagtaaatttatccttgtttgcagataatatgatcttatatttagaaaaacctaa

SEQ ID NO: 123297 - DNA, 459 bp, Homo sapiens
aagaaaaaaaggaaaaaaaaaaaaaacaaccgtaattgtccaccaaaagttcatggttccccttccatgattattctgggtgccacctgccccttccttcagggtacagctatatgaacagttcttgccaaagacacatgagcagaagtgaagatctcttctgaaatggggttttgaagaagaaagtgtgccttccccaccacatatttccattttggctggctggagagggagggctcaggggtcctcagggatggaaggaaactgagaccctgaatcatcacatgaaaggagaaaaacttctgtttgttaagttgaatgttgggggactgttggtgtggtarattgcttaatggctgcaaattcctcccctcccaggctacctgcacctttgcgatatgactttgctgcaccttctgtccagaagtggaagaaaactgcctggcctcatgacttgtt

SEQ ID NO: 123298 - DNA, 592 bp, Homo sapiens
gtagaaacaaagcaagatcgcgatggaaagattactgaagacaatctaactatttggacagattgagagattttttgttgttgttttttgagacagcatttcactctgtcacccatgctgtagtgcagtggcccaatcctggctcactgcagccttaacctcccgggctcaggtgatcctcccatctcagtctcctgagtagctgggaccacaggtgtgtgacactatgcccggctaatttttgtattttttgtagagatgggattttgccatgttgcccaggctggtctcaaactcctgggctcaagccatccacctacttcagcctcccaaagtgctaggattacaggcgtgagccaccatgcccaaccagactgattttatgaaagaagtctcattttgacaagtcaccttttgaaaaaatatgacaggctgacttctgacttgtatttccaggtagaatgtagcagatcatggcaggccagcgctcttgctgcaacacytaagaaaaagaaggataagttaccaaaatcatagtgcaaaagatttagtgagagaccttagtgagagagctgtggaaacaatgaacacc

SEQ ID NO: 123299 - DNA, 628 bp, Homo sapiens
caaaaactccatttttgcctgcccataaaaaatcattgttgtatctgacatttttaaagtgtacattttaaagtgtcctatcacataatatgaacataggaagagaatgtcatgttaaaaattagcaaagtaattgtttctgcacagaatgcatttttcaatttgggcagttctcccagaataaagtaaacaagtgaagcaactagcattcttactagaacagtgacaaggcattttctttttagtttcttttcacttattagtctactaggatacttgaatactgtctctatgctggtgtctaaaaccctcaaaggagagtacaattgcaggataaacgaagagtgtccaggaagagaactagacaagaaaggaaacagatggtctctgkgctcggtgagcttggaagctgtcgaaagcaaactcgactggaccctccaaactcctatttcagatcaatacataaggttcagctgagttcggcctccaggcccaagaaagcaaaagccagcaacccgggggctggtcggcggctccctcgccagggacgccccacagcgagaccatgcctctcccacctctacccccgaaaaccaaaacaaaacagaaccaagcccaagcggtgctt

SEQ ID NO: 123300 - DNA, 628 bp, Homo sapiens
caaaaactccatttttgcctgcccataaaaaatcattgttgtatctgacatttttaaagtgtacattttaaagtgtcctatcacataatatgaacataggaagagaatgtcatgttaaaaattagcaaagtaattgtttctgcacagaatgcatttttcaatttgggcagttctcccagaataaagtaaacaagtgaagcaactagcattcttactagaacagtgacaaggcattttctttttagtttcttttcacttattagtctactaggatacttgaatactgtctctatgctggtgtctaaaaccctcaaaggagagtacaattgcaggataaacgaagagtgtccaggaagagaactagacaagaaaggaaacagatggtctctgggctcggtgagcttggaagctgtcgaaagcaaactcgactggaccctccaaactcctayttcagatcaatacataaggttcagctgagttcggcctccaggcccaagaaagcaaaagccagcaacccgggggctggtcggcggctccctcgccagggacgccccacagcgagaccatgcctctcccacctctacccccgaaaaccaaaacaaaacagaaccaagcccaagcggtgctt

SEQ ID NO: 123301 - DNA, 628 bp, Homo sapiens
caaaaactccatttttgcctgcccataaaaaatcattgttgtatctgacatttttaaagtgtacattttaaagtgtcctatcacataatatgaacataggaagagaatgtcatgttaaaaattagcaaagtaattgtttctgcacagaatgcatttttcaatttgggcagttctcccagaataaagtaaacaagtgaagcaactagcattcttactagaacagtgacaaggcattttctttttagtttcttttcacttattagtctactaggatacttgaatactgtctctatgctggtgtctaaaaccctcaaaggagagtacaattgcaggataaacgaagagtgtccaggaagagaactagacaagaaaggaaacagatggtctctgggctcggtgagcttggaagctgtcgaaagcaaactcgactggaccctccaaactcctatttcagatcaatacataaggttcagctgagttcggcctccaggcccaagaaagcaaaagccagcaacccgggggctggtcggckgctccctcgccagggacgccccacagcgagaccatgcctctcccacctctacccccgaaaaccaaaacaaaacagaaccaagcccaagcggtgctt

SEQ ID NO: 123302 - DNA, 544 bp, Homo sapiens
cttattccaatccaaggctgttttgtctccactgaaaatttgttagcawagctacctttatcaatgatcttagctagatcttctggatagcttgttgcagcttccccatcagcactcgctgcttcactttgcacttttatgttatggagaaaactttattccttaaacctcgcaaaccaactctgccagctgtcagtttttcttctgcagcttccttacccttctcagccttcattcattgaagcttaattatttctagcttttgacttaaagtgggagacttgtacctctttctttcacctgaatacttagaggtcattgtaggggctattaattggcctaattttaatatcactgtgtctcagggaatagggagacccaaggagggggagagatggggaaacaatggtcagtagagcagtcagaacaaaaacaacatttatcaattaagttcattgtcttatataggtatagctcatggcaccccaaaacaatcacaatagtaacatcaaagatcactgctctcagatcaacaaaacagata

SEQ ID NO: 123303 - DNA, 553 bp, Homo sapiens
ggtggcatggctccccatctcgggtccatcctatacttccatgggactccctatggctgaaggccttatgagtcaaaggacttatagccaattgattgttctaggccaggtaagaatggatatggacatgcatttattacctcttaaaattattattttaagtaaaagccaataaacaaaaacgaaaaggcaagttacgagactgacttatttttaacttctgtgtgttgagctactgtaagcttggcttttgttaaagacatacagcaattagctatgcaaacataagcattgttctgaaaaaaaatatatagatagatatgtttatctccataactcataactgggagtattatacccaagaggctttgttacaaggtattttttatcctgttagtaaatattttcctgtaattctataataagcaaataaattttcatggttggggtagatgcaaaagtgacacataatcrtttagaaagcaactaaacttgttttaccagctgtttaggcatttttgtaacccctccttgatttggaggtttgaccttg

SEQ ID NO: 123304 - DNA, 643 bp, Homo sapiens
actgacttcaattttgaaagaagtttacgatgagtaaaatgctatttaacagcatcgcattctacagataaaaatttcataaaaggaagactaaattgatgctacaaacttcaccattgtcttattttaaaaatagccacatctaccccatccttcagcaaccactgctgtgatccatcagcagccatcaacatcaaggcaagamgctacaccagcaaaaagattttcactcactaaagactcaaataatcagcatttttagcaataaactatttttaataaaactatgtacattttccagacataatgctgttgtatacttaatagaagacgttgtagctcaaacataacttttacacgaattgggaaagcaaataattaatgtgactcactttattgcaataattgctttattgtggtggtctggaactgaacccacaatatttccgaggcatgcctgtaagttagttttaaattgaagaagacagaagtcaaattttgctggagttcacttagatgacatgtagaagatttagtatttgaaatgaggtggtctgatctgtgctactaacgtttgtgctattttgattttatgtataagatactttagatatgaataccagaaaaagaatcacagtgattg

SEQ ID NO: 123305 - DNA, 644 bp, Homo sapiens
gcgttttcttctacaatgtctgaagaagtgamctacgcgacactcacatttcaggattctgctggagcaaggaataaccgagatggaaataacctaagaaaaagaggtaggagttcagagaagaccagctgtgtccttgggggagtggacaggtgttaaatgctttgaggtgccagctttaatactggcgttaaagacatgtgctgtgaaatctccaaaatggggacaaatagttgtgggatgtattagaaaagtgagtgttcccaaggttgaagtgaaaatatgtggctttcagaacctctttaaagttgtgtgatatcacacagtcagagaaattctgactgcacatgccagaaattgagcttggggaattagagatttcttcttatgaatataatccttgatatttataccttgttagagatgccaggaggatattctttcagaaaccagattggaggcttctaaaatagagaaggtagaggacgtttttcttttagatgatgtaagttacttaagagaaaactggaagatgagtgagtggattagaaatagatcagagctaatttttcttttgtcagtattttttcaaattttagggtagttgaaatccgagcataatttgtaatgttgaaccagtaata

SEQ ID NO: 123306 - DNA, 644 bp, Homo sapiens
gcgttttcttctacaatgtctgaagaagtgacctaygcgacactcacatttcaggattctgctggagcaaggaataaccgagatggaaataacctaagaaaaagaggtaggagttcagagaagaccagctgtgtccttgggggagtggacaggtgttaaatgctttgaggtgccagctttaatactggcgttaaagacatgtgctgtgaaatctccaaaatggggacaaatagttgtgggatgtattagaaaagtgagtgttcccaaggttgaagtgaaaatatgtggctttcagaacctctttaaagttgtgtgatatcacacagtcagagaaattctgactgcacatgccagaaattgagcttggggaattagagatttcttcttatgaatataatccttgatatttataccttgttagagatgccaggaggatattctttcagaaaccagattggaggcttctaaaatagagaaggtagaggacgtttttcttttagatgatgtaagttacttaagagaaaactggaagatgagtgagtggattagaaatagatcagagctaatttttcttttgtcagtattttttcaaattttagggtagttgaaatccgagcataatttgtaatgttgaaccagtaata

SEQ ID NO: 123307 - DNA, 644 bp, Homo sapiens
gcgttttcttctacaatgtctgaagaagtgacctacgcgacactcacatttcaggattctgctggagcaaggaataaccgagatggaaataacctaagaaaaagaggtaggagttcagagaagaccagctgtgtccttgggggagtggacaggtgttaaatgctttgaggtgccagctttaatactggcgttaaagacatgtgctgtgaaatctccaaaatggggacaaatagttgtggratgtattagaaaagtgagtgttcccaaggttgaagtgaaaatatgtggctttcagaacctctttaaagttgtgtgatatcacacagtcagagaaattctgactgcacatgccagaaattgagcttggggaattagagatttcttcttatgaatataatccttgatatttataccttgttagagatgccaggaggatattctttcagaaaccagattggaggcttctaaaatagagaaggtagaggacgtttttcttttagatgatgtaagttacttaagagaaaactggaagatgagtgagtggattagaaatagatcagagctaatttttcttttgtcagtattttttcaaattttagggtagttgaaatccgagcataatttgtaatgttgaaccagtaata

SEQ ID NO: 123308 - DNA, 576 bp, Homo sapiens
aatgttttattaaattttaatatttgtggtttttgtgattatttgtacttttttgatattttctttattgtatcgtcttctgcaaacttttagacatctagttctctcrtcttttctaatagccaccatttgatttgttatccctctcatttctcctctttttcactaacgtctcctattatctcattttttaattttgtatatttttctttcactctattgtgccagatgcatgtttttttcttatctattttgtttgtacacttttgaagtttcagtttgaggtatttggcttttattagttttagaagttggaatattatttcttcaaatatttcctatccgctattctttttttctctctctctgtttcagattcttgttatctagaaggtggcatttctacttctatttttcatatctctcagcttttattttatattttctaactgttttcttttctgtcatgtttttaatagcatctcctaggtcttattcattcttaatcagcgtccattctattaattaactcctcaaagtgttctttatttcaaacactatatttctataattatt

SEQ ID NO: 123309 - DNA, 576 bp, Homo sapiens
aatgttttattaaattttaatatttgtggtttttgtgattatttgtacttttttgatattttctttattgtatcgtcttctgcaaacttttagacatctagttctctcatcttttctaatagccaccatttgatttgttatccctctcatttctyctctttttcactaacgtctcctattatctcattttttaattttgtatatttttctttcactctattgtgccagatgcatgtttttttcttatctattttgtttgtacacttttgaagtttcagtttgaggtatttggcttttattagttttagaagttggaatattatttcttcaaatatttcctatccgctattctttttttctctctctctgtttcagattcttgttatctagaaggtggcatttctacttctatttttcatatctctcagcttttattttatattttctaactgttttcttttctgtcatgtttttaatagcatctcctaggtcttattcattcttaatcagcgtccattctattaattaactcctcaaagtgttctttatttcaaacactatatttctataattatt

SEQ ID NO: 123310 - DNA, 562 bp, Homo sapiens
tttacaattttttgtcatttttttaatgtggagttcaygtaactttgaagatagaaatgaaaaaaatgaacaaactacaaaacatcagtgaagagctccagagaaatatttctctacaactgatgagtaacatgaatatctccaacaagatcaggaacctctccaccacactgcaaacaatagccaccaaattatgtcgtgagctatatagcaaagaacaaggtaatcttgtattctcttggagttatttattggacaataaactaaaccactgagtctcttaagaatcattttataattagctagcagcctttctctagggagtcataatttgggggaaagaattacatgtggttgatggagaattcattgatatttccacgcagttagaagaaaaacagaaaaagtagtaacaacaataggcccccaaattatcaggagataatggttacataataaaatgttagacaagacagtttctctaatctgtcacttactataattattctgggcactgaggttaatagaagacagggaggaagtgacacctctttacaggtga

SEQ ID NO: 123311 - DNA, 584 bp, Homo sapiens
tttccctggtcctctgccttgatcagatagtaagtaacttgctcttatgttcacctgatttaacctcttctcaagaagactctatatcagaaactttgtttataaaaggaaatattgtaaggacaaatttgtaataataatttactgtttaaattactgtataaaagataaatttgtaagaataaattactgtttccttaggcccaagttcactatctaagccatggtatatcctagggaggcaaattcctccyggtgaataggagtacggtcattcaaaattgcccttgccctactaccaaaagacaatttagaggatttctgggacttataggatattgcaggtggtagatttccaacttttctgaattagctggcaccctcagtgacatgaattaaaatggtattcctgagcttctgccttggatggtcactacagagttagccattgaccaacccaaggcatttcattttgggtcaccccaaaattatactatctttttttttggtttatatataaaagggatgatcaagctcttggagttttatcttagaaacatgatggaaatcagagactcattggg

SEQ ID NO: 123312 - DNA, 604 bp, Homo sapiens
agttatcaacatctcccctgcaatccagagcctatactcagaactaccaccttatctaactctcacatatcaagccacatttcccctgccctaaatcaacccagggtcaggtaccagacaactaggaagcgttcctatgtccaaaaacccaccagaattattcaaagtagccaaccttaagctgtttctcctgccttgccttgcttttcctatggaaactccaataaaggctctagcataagcttccctcatttatttctgcctcctaaccaacactggtgcttccccatgtgaccctgtgtggcatgatgcattcccttctcttgggaaatgtaattaacaaaactttttcaatgggattagcatctctgtctgttgycatttggtcagctctataaattaaaatcctgtgggtacaattgagacactcagtaataataattaaaaaaaatgccaacaaagaaaagcctaggaccagatggttacactgctgatggtttaacaaataattaaataatttaaaccaatcattctcaaactcttccagaaagtagaaaagcagttaacatgtttcaattcattctatgaggccagcattaccctg

SEQ ID NO: 123313 - DNA, 445 bp, Homo sapiens
tatgatatgcacatatattctcccagtctgttgcttgcctttttctttttttgatggtgtcttttgaagtgaaaacgttttgaatttgggtgaggttcaatttatcatttttttttctttcatggaccattcttttggtgttgtacttaagaagtctttgcctaattgcaaggtctcagtgattttctccaatgttttcttctaaaagctttattacttcatctcttacatttaagtctatgattcattttgagttcattttttctctgtgatgtgaggtgagartctaaattcatctttttgcatgtggatgtagaaattgtcctagcaccatttgctgaatctcttatcattaacgtcttacattgctatgctatctatgtcacaactaataagcccacagtggtatattgctattaactataccccatgcttttttttttca

SEQ ID NO: 123314 - DNA, 593 bp, Homo sapiens
tataccatggaatactactactcagccataaaaaggaatgaaataatggcatttgcagtaacatggatggaattggagaccattattctaagtgaagtaactcaggaatggaaaaccaagcatcatatgttctcactcttaagtgggagataagttatgaggacacaaaggcataagaatgacacaatggactttggagactcagaggaaaggrtgggaaggggatgagggataaaagactacacatcgggtatagtgtacactgcttgggtgatgggtgcaccaaaaattccagaaatcaccactaaagaacttatccacgtaaccaaacaccacctattgcccaaaactctattgaaacaaaaaataaaaagcaaaaaaaaaaaattgaatcaagaaaaaaacgtgttttgtatcaatttgctaggcaccttgcaaggagttgaggagttgttaacaaaacagacattatctattaagattactatataactatagtaatcaagacagtatggtgttggggtgtccacttttttgcacaagtaattcaatggaggaaggatagacttttcaccaaatgatattggagcaat

SEQ ID NO: 123315 - DNA, 549 bp, Homo sapiens
acagggtcttgctctgtcacccatgttggagtgcagtagcacaagcatagctcactgtaacctcgaacttctgggttcaagcaagcctcccacgtaagtctcccaaagcactactgggattacaggcatgagccaccacacctggctaacatatactacttattatacaatgacaagttatatatgtctaagccaattaacaaatttattagtcctttccttataatgaggccacttaaaacctaaacccaccattctccagtacaaggacacagacttctgggcacttcataaaatgttacatcaaacctctgtggtaagcagcacaaaaatgtcaaagaaataatttcaactatacagaaacactttcaactatatttagcatatcagttacaacacattggtcccttctatcacccaagaaagagtagaaagaattccattttaagtatttcaaatctgttatttaacaaatgatacatgcagcaaatttctcctaataagacaatcaattcctgtracagaaagtcagagaataaaaagattaag

SEQ ID NO: 123316 - DNA, 582 bp, Homo sapiens
atataacaacattgaacccgtagaaagaatatatatttaaaacaagtgtattattataagggaagaggaagttgttaattacagtaaagtattaatcacttccacacactacagtcttctcacttagctatctgtattacatttagtgaaagtagaagccttgttacccattccagtttggcatgttctaacacatttataatcagtctcctgcatcacagaaaactcccttaaccagttctttcaggaaagggastttttctagttagattaactgattctgaacatcacaacaactttattcccttttccaggcactaggaactcaaaacttttaagaatgaacttggtcctgagactaaaactggtctggattatttacctgatctctgaaccagatgccaaacacaagggggaaaagtaatctcttacattaaaaatatttaaagattattaacttcttaacttgaattcttccgactcttctaatcaatttttaattcttctaaattctttccccattcaaacctgggtaaaagtaatcacttagtcaccttcaaattactgtctcttctgtgctct

SEQ ID NO: 123317 - DNA, 578 bp, Homo sapiens
gccagctactttataaacagtctctaatcctaaaaactcatttttcagataaggaaaccgaagtgatctacccgtggtcatactactactaaatggagagctagaattaaggcccaggtttaactctacatgtagctctccaaagctatrctcctctctcattcattcaaaagatattaaacacccactatgtgcctggcactgttacaggcactgatttactatatgccaagcaatgtgctaagggctttctttaaaccccatttaatcctagcaacaactctaagatgcaggtccaattatcccctttatagataaggacactgagtccgaaaggttaagtaacttgcttaagatcacttaactaggaagtggcagtactggagggagaacccttgacagtatgactccaaaactcttaaccacgacatacctctaggcatgatcaaataaaactgcctaaacagaacttggaagaaaaaatttggaaaggcttgggggaataaaggggtaggagctggattactgcaaggtcaagtttgtcttcaacaatcaaatctaaataaaaggcagttgtt

SEQ ID NO: 123318 - DNA, 581 bp, Homo sapiens
ttagagacagtactacagagaaaatctgtgtgtgtgtgtgtgtctatatataccttatgcattcatactagtatttctttagcataaaccactagaagtggaattaccgtgtaatttgcatttaaaattttgataagtgttaatgtacacttcaaaaagcttctaaccaatttatatttcagaagggaagaaaatacccaatttccaactaggtactattattttgaatttgtacrtatggtagaaaaaaatggaatcttgttttaattttgaatttttatagttgttggacagttgagtattgcatatatatttattggctattttgtatttcctctttaaattgccagttcatattggttttgcctattatctgttagtcccaaggactattagatgcctaaaataattctgggtcttattctaagagcttatatttgaaaaacatttttattatcttttgcagaatatctaatgataatatcatctgtgattatgtgaagttttccattttaaaaaagtagttgcttgtgcattaggccaattaatgtataaaagaaaagtagcactgaagtaagtct

SEQ ID NO: 123319 - DNA, 560 bp, Homo sapiens
atatataagtgaggccaacaaagctcatatactgaaagtkaagttgtattcaaatacaaaataatctgaatgttagattccaagaactgtccaagtatagagaacaaggaaagttacttgaaaacataaataggttttcagtagaggctaaattcagatcaattcatgcaatgaaattttttatttgactctataaagttgattacttttattggttttactcacagtctgaatagattaacctcacttttaacccattagatatattatgctttatgttgaatttttgtaaacttcatcaattttttttttttttttaagtataaagacaggccgggcacagtgactcaagctgtaatcctagcactttgggaggccaaggctggcggatcacttgaggtcaggagtttgagaccagtctggttggcatggtgaaaccctgtctctactaaaaatacaaaaattagctgggcatggtggtgggtgactataacccaagctactcaggaggttgaggcaggagaattgcttgaactcggaagccaagatcgcaccactgc

SEQ ID NO: 123320 - DNA, 560 bp, Homo sapiens
atatataagtgaggccaacaaagctcatatactgaaagttaagttgtattcaaatacaaaataatctgaatgttagattccaagaactgtccaagtatagagaacaaggaaagttacttgaaaacataaataggttttcagtagaggctaaattcagatcaattcatgcaatgaaattttttatttgactctataaagttgattacttttattggttttactcacagtctgaatagattaacctcacttttaacccattagatatattatgctttatgttgaatttttgtaaacttcatcawttttttttttttttttaagtataaagacaggccgggcacagtgactcaagctgtaatcctagcactttgggaggccaaggctggcggatcacttgaggtcaggagtttgagaccagtctggttggcatggtgaaaccctgtctctactaaaaatacaaaaattagctgggcatggtggtgggtgactataacccaagctactcaggaggttgaggcaggagaattgcttgaactcggaagccaagatcgcaccactgc

SEQ ID NO: 123321 - DNA, 560 bp, Homo sapiens
atatataagtgaggccaacaaagctcatatactgaaagttaagttgtattcaaatacaaaataatctgaatgttagattccaagaactgtccaagtatagagaacaaggaaagttacttgaaaacataaataggttttcagtagaggctaaattcagatcaattcatgcaatgaaattttttatttgactctataaagttgattacttttattggttttactcacagtctgaatagattaacctcacttttaacccattagatatattatgctttatgttgaatttttgtaaacttcatcaattttttttttttttttaagtataaagacaggccgggcacagtgactcaagctgtaatcctagcactttgggaggccaaggctggcggatcacttgaggtcaggagtttgagaccagtctggttgrcatggtgaaaccctgtctctactaaaaatacaaaaattagctgggcatggtggtgggtgactataacccaagctactcaggaggttgaggcaggagaattgcttgaactcggaagccaagatcgcaccactgc

SEQ ID NO: 123322 - DNA, 520 bp, Homo sapiens
cacaattgaattttctccttaatttctctcttaacttgcaagttaaatacatttttgtcattactctaagtgattccatttttcaataaggaatagctactctacattgtaaacctgtatctatcaagaggacaggatatatamggcacaggtcctttttttttttttttatgtttgtctgtttcttttttcttttgtgaaaataaactatgtatacagaaaagtacacaagttataagtctaggtgaattacagcaaagcaaacccacccatgtattcaccacccaggtcatgaaataaagccaagaaacttccttcttcctaatcattatcctggtgttcttttcaaaaattaatagtctatactcatagtcttctcttcaaagagtgatttcaagtaaaatgttttcacaaagtcagttttgccaaggagaattatgagtttttttagtgcacgtatgtatgtggcatcaaaacatggagcaagtacgtggcaataaatatgaacaagataggttgt

SEQ ID NO: 123323 - DNA, 520 bp, Homo sapiens
cacaattgaattttctccttaatttctctcttaacttgcaagttaaatacatttttgtcattactctaagtgattccatttttcaataaggaatagctactctacattgtaaacctgtatctatcaagaggacaggatatataaggcacaggtccttttttttttttttwatgtttgtctgtttcttttttcttttgtgaaaataaactatgtatacagaaaagtacacaagttataagtctaggtgaattacagcaaagcaaacccacccatgtattcaccacccaggtcatgaaataaagccaagaaacttccttcttcctaatcattatcctggtgttcttttcaaaaattaatagtctatactcatagtcttctcttcaaagagtgatttcaagtaaaatgttttcacaaagtcagttttgccaaggagaattatgagtttttttagtgcacgtatgtatgtggcatcaaaacatggagcaagtacgtggcaataaatatgaacaagataggttgt

SEQ ID NO: 123324 - DNA, 439 bp, Homo sapiens
ctgggctttcagatggaaggcttaattgctggcttctcttcagtctgcactgacagcctccttcaagctagacaagcttctattaatagtcttctcaatgcccttttagcttcctcgtactgcaggggtccaaagccatggccagatggttttgctgctccaaaccatgctgtttttattgcagtagcactcctctttcaaaccagtatstgcgttaggcagtatttggtgagaagcaagatcactatgatgatacaaactatggcatttattatagggcttagatcttatggaattgtgagagttgatggagtagtttgcagaaggcatctgcatctggtgttgagagtgacattgctgtaagtcagctgaaccattaggaaggaagaatgattgtgaagtagaggagaacaaggacaaaactgaaatccacaaggat

SEQ ID NO: 123325 - DNA, 551 bp, Homo sapiens
tcagctcactttgtgtcttaaactatctcttattttcttatgaattccacagtggctaatctggatccaaaagcgattccaagttttatgataaacctagagaaaatcattatgaaattgatgcagcatgaaactttcatgagaaagactcatttcttaaaatatactactataaatggcataagccaccaactaacaaatgagccactctctggggatcaaccagcttgagtgcaaaattggtagaggctgccaaaggaaggttaattcttctcaatagttccatggggcctattgctgtgccctgcrgaactgtaaagggctaatggagcaaggtatgttttactttaacccacacaaattatttgtcgtatcttaggagacatattaaggatgaattaatgttaaacatttatgatagtaaaattgagacactctaaaacatgcatagaaatacaatgcaaacacattgtttaaaagttccagaaatttggttttgagttactgtcatattgcatataataaatttaaaagtaacccccaattaataa

SEQ ID NO: 123326 - DNA, 567 bp, Homo sapiens
aagaatgtgttcgttcttcacaaaaagtaatctagatgacaagaaattttatatttcataaaattacatttcaaactttcacatttgctcctgaactttagcacaaatacaacaaaatttctctttccaaggtcagtgaaatggtacctttggatttccttagattgttttttgggtgacttgctactttagcatcatttttattgtcttactctcttttctgtttatatgtttgtcatgcttttatatataaagcacttatgttttagagatagataatatatgctattcagttacacaaacatagatgataagaatgttaccattcatttattttcatatcaggtaaaggatgcaggcaaatcttttctttaagcaagagtttataaattttaaaacttcttatgataggtttttataaaataccttattagagttttcctattgaaaatccgtttctaatccaacaaaactaaaaggcgtctatatattctacttcatgttagtagtaatcaatacttccatattcctacartactaaaatactatttaattgtgtatgtgctt

SEQ ID NO: 123327 - DNA, 400 bp, Homo sapiens
ttcttcactctgatatctaggctgtacagatcatatgatctttgtagacaatttttgagacttttgcttttattccaagagaaatgagaaggtattggaaggttttgagcagaataacatgatccattgtatatatttttataagggtgatgtcaggaagaacagctgaaggctaacactataaggtggtttggactaggatagtggcattaagaaaggggagagacaagtagtctgatttcagagacattgaaggcggagctgaaggatgtgctgacagattataggtgaagtgtgagagaaaaatagattcaacatgtctcctcagtatcttttwcttgggcaattgaaaatgtgctgtcttttatgaggatagctttcaggattaattataataaaa

SEQ ID NO: 123328 - DNA, 599 bp, Homo sapiens
caacacacacacacataggcacacacatgagttctttctttcctgttctgcagtggaatcttacttagaatcttattactatgtgcaaattagatgaagccagaagttgtctgattttggagggaggcaatgcagcaaatctgagcctctccctctactgacctcaagctcacctccaggacctcctgaaccactttgtttgtacagcagtctcccagaaagctgtggaagcctgtattttcttattaaggacaggcatagactatcatatgtctaccctatactaatgaaacaaaatctggaagatgaaaagtatgttataattattttctcaaacattattttttaataactttcttcatatttgttcctagaggccacaagttgatcaaagcacccttttgttttgttttgttttttgagacagagtctcgctctgtcgcccaggctggagtgcagtggcgctatctcggctcttcgctccacctcccaagttcacgccattctcctgcctcagcctcccgagtagctgkgactacaggcgtccgccaccacacccggccaattttttgtatttttagtagagacagggttttctc

SEQ ID NO: 123329 - DNA, 510 bp, Homo sapiens
tgtagctgtgtcatgcatttgttaatgagctgaacatgtgacatttcccaaataaaactaaatatgcaaatgaaagcaatggctggattaaggcctgttcatatgtttaacctgagatcctctacaaaaattattttttgaaatgactgttttgtaatattcattttctatggttactatctgtccagatggcattgttgtraaaactttctcagaagattaggtgtctccagcaatcctgtgctaaacattagtacagggtcactaaggtccaactgaaagggacaagatacctgaaaatttgtcaaatgcttataaatgtatttaacactgtagcctgaaagaggaaatgagtcactcattcagaattatcccaagttacactggctctcaaaccccttgtgccatattgattttgagtttctcttctttcatttcatgtccctcagggatttttctccacttggggcatcacaaatgtatttctgaggcatgcttcacttttggctc

SEQ ID NO: 123330 - DNA, 510 bp, Homo sapiens
tgtagctgtgtcatgcatttgttaatgagctgaacatgtgacatttcccaaataaaactaaatatgcaaatgaaagcaatggctggattaaggcctgttcatatgtttaacctgagatcctctacaaaaattattttttgaaatgactgttttgtaatattcattttctatggttactatctgtccagatggcattgttgtaaaaactttctcagaagattaggtgtctccagcaatcctgtgctaaacattagtacagggtcactaaggtccaactgaaagggacaagatacctgaaaatttgtcaaatgcttataaatgtatttaacactgtagcctgaaagaggaaatgagtcactcattcagaattatcccaarttacactggctctcaaaccccttgtgccatattgattttgagtttctcttctttcatttcatgtccctcagggatttttctccacttggggcatcacaaatgtatttctgaggcatgcttcacttttggctc

SEQ ID NO: 123331 - DNA, 587 bp, Homo sapiens
tctgccaagtttaagacacaggtttccaacactttctgaatatcaccattctgggcatcaaagagcagaagtgcagagtcaacaatttcctcttaagcaaatgaaggagaaattaaacatrtttcagttatacattattgataagaacttagacatatggttgcatcctttcatgatgaactgggaaatcctgttcctaactggaaagtcaactacaagttataattcctttactacaagaggattaaaggattttggttgccaagtagtagtatccttcaaaattggtctgggatacaatttcttctcattaggtgatttagaggcctattgaaaaatacaaaatataccagtttaaaagccttagaagttcacttagaattttacatcattcaaattctttgtcatggcagtctactgttaatctcattctgaacaataatgtaaatagtaaaagtaaataaatttaaaaaggtaacaggcaaacatttgctgatctcttagcatgtgccaggctccgtactagtgcctgactcaaattttcttatttattcctaaatgaaggtaataaaactcagccccatatt

SEQ ID NO: 123332 - DNA, 587 bp, Homo sapiens
tctgccaagtttaagacacaggtttccaacactttctgaatatcaccattctgggcatcaaagagcagaagtgcagagtcaacaatttcctcttaagcaaatgaaggagaaattaaacatgtttcagttatacattattgataagaacttagayatatggttgcatcctttcatgatgaactgggaaatcctgttcctaactggaaagtcaactacaagttataattcctttactacaagaggattaaaggattttggttgccaagtagtagtatccttcaaaattggtctgggatacaatttcttctcattaggtgatttagaggcctattgaaaaatacaaaatataccagtttaaaagccttagaagttcacttagaattttacatcattcaaattctttgtcatggcagtctactgttaatctcattctgaacaataatgtaaatagtaaaagtaaataaatttaaaaaggtaacaggcaaacatttgctgatctcttagcatgtgccaggctccgtactagtgcctgactcaaattttcttatttattcctaaatgaaggtaataaaactcagccccatatt

SEQ ID NO: 123333 - DNA, 587 bp, Homo sapiens
tctgccaagtttaagacacaggtttccaacactttctgaatatcaccattctgggcatcaaagagcagaagtgcagagtcaacaatttcctcttaagcaaatgaaggagaaattaaacatgtttcagttatacattattgataagaacttagacatatggttgcatcctttcatgatgaactgggaaatcctgttcctaactggaaagycaactacaagttataattcctttactacaagaggattaaaggattttggttgccaagtagtagtatccttcaaaattggtctgggatacaatttcttctcattaggtgatttagaggcctattgaaaaatacaaaatataccagtttaaaagccttagaagttcacttagaattttacatcattcaaattctttgtcatggcagtctactgttaatctcattctgaacaataatgtaaatagtaaaagtaaataaatttaaaaaggtaacaggcaaacatttgctgatctcttagcatgtgccaggctccgtactagtgcctgactcaaattttcttatttattcctaaatgaaggtaataaaactcagccccatatt

SEQ ID NO: 123334 - DNA, 586 bp, Homo sapiens
agactctttccaataattaagtttccacttatctgcatgtctgcccggtatcagagatattttggcattttttaaatttgttggtgagaagacgttgggcattataatatttatttgatgggtttgtaagtaaacattaagaaaatactataggaaattgtgtctatggtctgatgacattaatacaaaaataattgaacattgcccatttattgtaactactgagaccactgaagatgaccatatatttttctagtaaatcaktaaataggtgattgctcctgtctgttgccatttccactcaccacagggatcctgtgagatcgtgagattgaaatggactctatgaacatctttagtctaacaattttcaaaatctttttacatctatttttcttgctcacccatgctgacatgtgaaatctggctctcatttttgattttgtgctgattaaattgaaaccacctttagagaaaattgatatacacatgctaaaagtgaaaattcttctgtcatagatatttacagctaaagttacagtatatgggcagacctctacacaccagcaatgtgtttcatgttggt

SEQ ID NO: 123335 - DNA, 586 bp, Homo sapiens
agactctttccaataattaagtttccacttatctgcatgtctgcccggtatcagagatattttggcattttttaaatttgttggtgagaagacgttgggcattataatatttatttgatgggtttgtaagtaaacattaagaaaatactataggaaattgtgtctatggtctgatgacattaatacaaaaataattgaacattgcccatttattgtaactactgagaccactgaagatgaccatatatttttctagtaaatcagtaaataggtgattgctcctgtctgttgccatttccactcaccacagggatcctgtgagatcgtgagattgaaatggactctatgaacatctttagtctaacaattttcaaaatctttttacatctatttttcttgctcacccatgctgacatgtgaaakctggctctcatttttgattttgtgctgattaaattgaaaccacctttagagaaaattgatatacacatgctaaaagtgaaaattcttctgtcatagatatttacagctaaagttacagtatatgggcagacctctacacaccagcaatgtgtttcatgttggt

SEQ ID NO: 123336 - DNA, 651 bp, Homo sapiens
attctcctttcattgacagactctttctatagctatgttaataaattcagtcccaacatagtaaaatcctctgactttaccccccttaggttagtttacagtgcttcagaaggcattctttcttctcttagttttatatatttataaagggttatataaaactaagagggttgtatttttgtagccacctttctgattatccccatgtactgagaatatatgtgtgtgtgtgtattgatacattttatttatatgtgtgtgtgtgtgtgtgtgtgtgtrtatatatatatatatatatatatatatatatatatatatatatgcaagactatatgtatatagtcttgtcctatttggaggcccattaaagtattttttcttcctattcttttacttcaactatgatatacaattaattctgttatacacacacacacatacacatacatatacacatacatatatgtacgtgtgtgtatacatatgttttaataatcaaagttacaatttattttgaacatattatttgccagaatttatatggcatactttcaattcactaacctattttatctttaatatctaaatgggataattattattatttatttttcaaagatggggtaacaaaggcttctgttacccctcaat

SEQ ID NO: 123337 - DNA, 577 bp, Homo sapiens
aatcatgaaagaactccaattccacaattgttacagagaataaaatacctaggaatacagctaagaagggaagtgatagaaagaaccaatatgattaaaatggccatactacccaaagtaatttayagattcaatgctattccccttatactaacattgacatttttcacagaattagaataatctgttttaaaattcatatggacaaaaaagagtctgtagagccaagacaatattaagcaaaaatagcaaagctggggggatcatgctaccttacttcaaactacactacaaggctaccaaaccagcattgtaaacaaaacagcatagtggtggtgcaaaaacagactcatagaccaatagaacagaattgagaactcagaaataagaccacacagctacaaccatctgatcttcaacaaacctgacaaacacaagtaatggggaaaggattttctatttaattaatggtgctggaagaactatggaagaactttagccatatgcagaaaattgaaactggacccccttccttacaccttatacaaaaattagctcaagataggttaaagactta

SEQ ID NO: 123338 - DNA, 622 bp, Homo sapiens
gaattccttaaacccgggaggcagaggttgcagtgagccaagatcgggccactgcactctagcctgggcgacagagcaagactccgtctcaaacacacaaaaaaaaaaaaaaaaaaaagaaaaagaaagaacttccttaattttttgaagagactattctgtatccattttataattttgtggccactgaaaaatatatgttaaatcacagacacagtgaatatagtaagtggtagtttaaaatgttaaaatgttaaatcacgcctgtactcccagcactttgggaggctgaggggggaggatcgcctgaagttgagttcgagaccagcctggccaacatggtgaaaccccttctctactaaaaatacaaaaattagccaggtatggtggcacaaatctgtaatcccagctactcrggaggctgaggcaggagaatggcttgaaccctggaggcagatgttgcagtgagctgagatcaagccactgcactccagcctggacaacacagtgagactctgtctcaaaaataaaattaagtgttgaatttttacaagtcgttgttcctattctaatttttgaatgcaaccacagcctctaacaaaacagcctcgttaaactaatt

SEQ ID NO: 123339 - DNA, 157 bp, Homo sapiens
acctcatcttagttcttgtaatgtagttgcagatcaaataaccatgattcatraaccaacacaaaggaaccctttgcttcttgactgactccagaatgagtgaacaacatgactaagagcctagtcgcagagcctttctccagactaccttgctggg

SEQ ID NO: 123340 - DNA, 514 bp, Homo sapiens
taccccataatggctttgcaagatacttgtaaagaagcaaatgtctagagccttactttaagaaagttaaacaactttggtgaatgatttggattaagattgttacatccagctatagaaatgtggttttaattgsgttgatgtgagtgagtaccttccttttttgaataccacttaaaacagttaactttttaagtcttgaagatgagaaaaatattacttatctaatataactattttaatagttatctaatttatagttatctactataactatacattctgaatacttagcatgtactgtgctggggcacatatcttgttttcccagctgctaaacgattatcttccttttctccctggtattttaatgctcaagtagaaaatggaaaatcatgaaggaaaaatatcacttgtgaaaatcgtggcagttagctttatgaagacatagtggcctctgtggggacatgggatatgcagaaagagatggctagtacagttgttctgtcttctg

SEQ ID NO: 123341 - DNA, 514 bp, Homo sapiens
taccccataatggctttgcaagatacttgtaaagaagcaaatgtctagagccttactttaagaaagttaaacaactttggtgaatgatttggattaagattgttacatccagctatagaaatgtggttttaattgggttgatgtgagtgagtaccttccttttttgaataccacttaaaacagttaactttttaagtcttgaagatgagaaaaatattacttatctaatataactattttaatagttatctaatttatagttatctactataactatacattctgaatacttagcatgtactgtgctggggcacatatcttgttttcccagctgctaaacgattatcttccttttctccctggtattttaatgctcaagtrgaaaatggaaaatcatgaaggaaaaatatcacttgtgaaaatcgtggcagttagctttatgaagacatagtggcctctgtggggacatgggatatgcagaaagagatggctagtacagttgttctgtcttctg

SEQ ID NO: 123342 - DNA, 514 bp, Homo sapiens
taccccataatggctttgcaagatacttgtaaagaagcaaatgtctagagccttactttaagaaagttaaacaactttggtgaatgatttggattaagattgttacatccagctatagaaatgtggttttaattgggttgatgtgagtgagtaccttccttttttgaataccacttaaaacagttaactttttaagtcttgaagatgagaaaaatattacttatctaatataactattttaatagttatctaatttatagttatctactataactatacattctgaatacttagcatgtactgtgctggggcacatatcttgttttcccagctgctaaacgattatcttccttttctccctggtattttaatgctcaagtagaaaatggaaaatcatgaaggaaaaatatcacttgtgaaaatcgtggmagttagctttatgaagacatagtggcctctgtggggacatgggatatgcagaaagagatggctagtacagttgttctgtcttctg

SEQ ID NO: 123343 - DNA, 514 bp, Homo sapiens
taccccataatggctttgcaagatacttgtaaagaagcaaatgtctagagccttactttaagaaagttaaacaactttggtgaatgatttggattaagattgttacatccagctatagaaatgtggttttaattgggttgatgtgagtgagtaccttccttttttgaataccacttaaaacagttaactttttaagtcttgaagatgagaaaaatattacttatctaatataactattttaatagttatctaatttatagttatctactataactatacattctgaatacttagcatgtactgtgctggggcacatatcttgttttcccagctgctaaacgattatcttccttttctccctggtattttaatgctcaagtagaaaatggaaaatcatgaaggaaaaatatcacttgtgaaaatcgtggcagttagctttatgaagacayagtggcctctgtggggacatgggatatgcagaaagagatggctagtacagttgttctgtcttctg

SEQ ID NO: 123344 - DNA, 523 bp, Homo sapiens
aatggtaggaattgggattacttgtatcttagtttgctcaggcttttataacaggataccatacactaggtggcttataatcaacaaaaatgcagttttcrgttctgagactgggaagtccaaggtcaagccatgtgcatattaagtgtctggcaagggcttgttcacagaggacggtccagtcactgggatttcacacggcagaagagcaaattagctctctagggtttcttttgtaaaggcactaattctatccataacagtttgccctcatgacctaatcacttcccacagacccatctccaaatactcttaccatagggattaggtttcaacatacacattttgggggaataggggaatacaaatattgagtctgtaacactcttgtaaagtgatatttgtgttgagttattcaaagtcttatttaaaggtagattgagattagttaaaaatgtgtattgcaaactcacataaatcactaaaactgttctaaagtataactgacatgctaggagaggaa

SEQ ID NO: 123345 - DNA, 523 bp, Homo sapiens
aatggtaggaattgggattacttgtatcttagtttgctcaggcttttataacaggataccatacactaggtggcttataatcaacaaaaatgcagttttcagttctgagactgggaagtccaaggtcaagccatgtgcatattamgtgtctggcaagggcttgttcacagaggacggtccagtcactgggatttcacacggcagaagagcaaattagctctctagggtttcttttgtaaaggcactaattctatccataacagtttgccctcatgacctaatcacttcccacagacccatctccaaatactcttaccatagggattaggtttcaacatacacattttgggggaataggggaatacaaatattgagtctgtaacactcttgtaaagtgatatttgtgttgagttattcaaagtcttatttaaaggtagattgagattagttaaaaatgtgtattgcaaactcacataaatcactaaaactgttctaaagtataactgacatgctaggagaggaa

SEQ ID NO: 123346 - DNA, 523 bp, Homo sapiens
aatggtaggaattgggattacttgtatcttagtttgctcaggcttttataacaggataccatacactaggtggcttataatcaacaaaaatgcagttttcagttctgagactgggaagtccaaggtcaagccatgtgcatattaagtgtctggcaagggcttgttcacagaggacggtccagtcactgggatttcacacrgcagaagagcaaattagctctctagggtttcttttgtaaaggcactaattctatccataacagtttgccctcatgacctaatcacttcccacagacccatctccaaatactcttaccatagggattaggtttcaacatacacattttgggggaataggggaatacaaatattgagtctgtaacactcttgtaaagtgatatttgtgttgagttattcaaagtcttatttaaaggtagattgagattagttaaaaatgtgtattgcaaactcacataaatcactaaaactgttctaaagtataactgacatgctaggagaggaa

SEQ ID NO: 123347 - DNA, 523 bp, Homo sapiens
aatggtaggaattgggattacttgtatcttagtttgctcaggcttttataacaggataccatacactaggtggcttataatcaacaaaaatgcagttttcagttctgagactgggaagtccaaggtcaagccatgtgcatattaagtgtctggcaagggcttgttcacagaggacggtccagtcactgggatttcacacggcagaagagcaaattagctctctagggtttcttttgtaaaggcactaattctatccataacagtttgccctcatgacctaatcacttcccacagacccatctccaaatactcttaccatagggattaggtttcaacatacacattttgggggaakaggggaatacaaatattgagtctgtaacactcttgtaaagtgatatttgtgttgagttattcaaagtcttatttaaaggtagattgagattagttaaaaatgtgtattgcaaactcacataaatcactaaaactgttctaaagtataactgacatgctaggagaggaa

SEQ ID NO: 123348 - DNA, 545 bp, Homo sapiens
ctttgttcagggcctttatttgtagctaaattcttgtctttcttttcacagtggggtatgatagcaaagtattattggtgttgaagttttggggtgtgatctagtagctggtgctgaagtgtaatggtcactgtgtaggctcctgctcagtcatgtggctcctccgtatttcctcatgggttgcagctacgcttcctctcaatgttttgaaagtcagtgtaggctcctctcccacttgagtgctcgctgcagatcttggcttggtgcatccaggctgcacaccataattctgaaatgatcataggctttatgttacttccccagcttggaagcagcagagaaggagaccctgtggctcaacrtcttttctcgtcacttggggctccattgcagaaagatgcagaagtgcaatcaattagcatgatcagcctggcatggggcagctgtactgtgagcccaagctggggggatcctgtctggtgactagcagagaatgtgggtaggatccatgggagacagactggcctcctctccttagagcaact

SEQ ID NO: 123349 - DNA, 460 bp, Homo sapiens
tccctcacgatacatttttattgcaaaaatgattttgtatttatccattttggaaaagaaattttatctcttgagcccctaaaaatggaattgtacacattaagacccttayacatatcacataataatcttcagggtcaaacattatagttttcacctgctgctattcctttgcagtagactagaatagagaattatataaaatttctacgactgtcaaaaaaagatatatttttggaaatcatgtaaaatcaaccttctttattttacagatatagaaatttagatctgtaaggaccatcagtgtggtgaaggtcacatggtaagttaattacagaatcaaatttttccctttcatttcaatctgtttttaagttctacatgattccactttcaggaaaaagctattaaaatacagactggctttggtaagagtgatatatatttttatgtttcagac

SEQ ID NO: 123350 - DNA, 460 bp, Homo sapiens
tccctcacgatacatttttattgcaaaaatgattttgtatttatccattttggaaaagaaattttatctcttgagcccctaaaaatggaattgtacacattaagacccttatacatatcacataataatcttcagggtcaaacattatagttttcacctgctgctattcctttgcagtagactagaatagagaattatataaaayttctacgactgtcaaaaaaagatatatttttggaaatcatgtaaaatcaaccttctttattttacagatatagaaatttagatctgtaaggaccatcagtgtggtgaaggtcacatggtaagttaattacagaatcaaatttttccctttcatttcaatctgtttttaagttctacatgattccactttcaggaaaaagctattaaaatacagactggctttggtaagagtgatatatatttttatgtttcagac

SEQ ID NO: 123351 - DNA, 460 bp, Homo sapiens
tccctcacgatacatttttattgcaaaaatgattttgtatttatccattttggaaaagaaattttatctcttgagcccctaaaaatggaattgtacacattaagacccttatacatatcacataataatcttcagggtcaaacattatagttttcacctgctgctattcctttgcagtagactagaatagagaattatataaaatttctaygactgtcaaaaaaagatatatttttggaaatcatgtaaaatcaaccttctttattttacagatatagaaatttagatctgtaaggaccatcagtgtggtgaaggtcacatggtaagttaattacagaatcaaatttttccctttcatttcaatctgtttttaagttctacatgattccactttcaggaaaaagctattaaaatacagactggctttggtaagagtgatatatatttttatgtttcagac

SEQ ID NO: 123352 - DNA, 460 bp, Homo sapiens
tccctcacgatacatttttattgcaaaaatgattttgtatttatccattttggaaaagaaattttatctcttgagcccctaaaaatggaattgtacacattaagacccttatacatatcacataataatcttcagggtcaaacattatagttttcacctgctgctattcctttgcagtagactagaatagagaattatataaaatttctacgactgtcaaaaaaagatatatttttggaaatcatgtaaaatcaaccttctttattttacagatatagaaatttagatctgtaaggaccatcagtgtggtgaaggtcacatggtaagttaattacagaatcaaatttttccctttcatttcaatctgtttttaagttytacatgattccactttcaggaaaaagctattaaaatacagactggctttggtaagagtgatatatatttttatgtttcagac

SEQ ID NO: 123353 - DNA, 442 bp, Homo sapiens
tagaacttggcagtgatggaatagcctgcattttgattgcagtggtggttatgcaaatctatacatgtgataagttgacataaaactatacacacataccatcctttttttttttttttttggatagtgtgctatagttatgtaacaagtaacccttggggcaaactaggtcaaggtacacaaaactctactatttttgcaacttcctctaaatctataaaaagttaaaaagttagttgggsaaagggtcaagagaaagagaaccatggcttagattaagctgaaacctaccccaggccatccctcaggccaagcttatccaacctgcagcctgtgggccgcatgtggcccagcacagctttgaatgtggcacaacacaaatttgtaaactttcttaaaacatcatgagttttttggatattttttttttctttagctcatc

SEQ ID NO: 123354 - DNA, 626 bp, Homo sapiens
gactcacaagttctccttcactgattaatccttttcctcatcccttcctaccctcccatttgccctaagaacaaagagcttgtaaaccaataaattgggtggaggctgagagctcgggggtgtgagcaagcctccgaggctctggtcctctggacccaccttttaaactcttattctstctctttctaaatcttttgtctctgctggactcggggtacccgctgggtggtgtggggctgtggggctggtttccccaactctctctctctctctttctttctttctttccttctttcttttcttctttctttctctttctttctttcggtttctttctttctttctttctttctttctttctttctttctttctttctttctttcttccttccttccttccttccttccttccttccttcctttctttcctccctccctccctcctttctttctttctttcttttcaaacgaaactatttcttttcaaacgaaactattcactctgatgatagtttcatttgctgtgcagaagctctttagtttaatgagatcccatttgtcaattttgccttttgttgcaattgcttttggtgtttttgtcatgaagacttgcccatgcctttgtc

SEQ ID NO: 123355 - DNA, 590 bp, Homo sapiens
ctatcatctaccctatttgtcccagttcacctgtctcccattacctcacagcaacacctttaccacatccttaaatccccaaccaaaactccatccttaaaagccaatccactttctaggagatcttgtatcctacatgacaacaaaaacggagatcatcagatggtaatgccttcacgtcctggtctccccactacaaatctatcttctctaggtgaacccttgctccctcctttatgtcatagaggaagtttytttttccctatctgagaaaggagatagggaagctgtgctctaaatccatctactctctcctcttcactttgtcactatctcaggattgtgtatttaaaagtgctcaaggctttcccctctttaacaagaaaagcctctcttactataaattctttgtatacttttaatataagtcacctctatctaccaccagacctctgtgctttctttcatcatccaacacccacttctcttctccttccatgctccctccctgggttgtttgcttccactgcacatatgttcacttacagctatggtctgatgtgtatgtgcccccaaacacatgtgttgaa

SEQ ID NO: 123356 - DNA, 528 bp, Homo sapiens
aaggatatctcctggcacaccagtgatctatctgcagcatgcttgttggaaagctctggtttggggaacctacttgtcttccccaagggagagagaactgagctacacaagctttttttgaagaaggcaggtgaatcacgaggtcaggagatccagaccattttggccaacatggtgaaaccccgtctgtactaaaattacaaaaattagctgggtgtggtggcacrtgcctgtaatcacagctattcaggaggccaaagcaggagaattacttgaaccagggagtgggaggttgcagtgagctgagatcgtgccactgcactccagcctggtgacagagcaagattccatctcaaaaaaaaaaaaaaaaaaaaaaaaagaaaaatgacttggaggtcagagataaaggacaattttgagtgtagcattcattctgcaggactccgtctagcccaggccactgcatgttaaacaatgtttattgggctcctgcaagtgccacactgtgtgcagtgaacagagtgctcc

SEQ ID NO: 123357 - DNA, 528 bp, Homo sapiens
aaggatatctcctggcacaccagtgatctatctgcagcatgcttgttggaaagctctggtttggggaacctacttgtcttccccaagggagagagaactgagctacacaagctttttttgaagaaggcaggtgaatcacgaggtcaggagatccagaccattttggccaacatggtgaaaccccgtctgtactaaaattacaaaaattagctgggtgtggtggcacgtgcctgtaatcacagctattcaggaggccaaagcaggagaattacttgaaccagggagtgggaggttgcagtgagctgagatcgtgccactgcactccagccyggtgacagagcaagattccatctcaaaaaaaaaaaaaaaaaaaaaaaaagaaaaatgacttggaggtcagagataaaggacaattttgagtgtagcattcattctgcaggactccgtctagcccaggccactgcatgttaaacaatgtttattgggctcctgcaagtgccacactgtgtgcagtgaacagagtgctcc

SEQ ID NO: 123358 - DNA, 528 bp, Homo sapiens
aaggatatctcctggcacaccagtgatctatctgcagcatgcttgttggaaagctctggtttggggaacctacttgtcttccccaagggagagagaactgagctacacaagctttttttgaagaaggcaggtgaatcacgaggtcaggagatccagaccattttggccaacatggtgaaaccccgtctgtactaaaattacaaaaattagctgggtgtggtggcacgtgcctgtaatcacagctattcaggaggccaaagcaggagaattacttgaaccagggagtgggaggttgcagtgagctgagatcgtgccactgcactccagcctggtgacagagcaagattccatctcaaaaaaaaaaaaaaaaaaaaaaaaagaaaaatgacttggaggtcagagataaaggacaattttgagtgtagcattcattctgcaggactccrtctagcccaggccactgcatgttaaacaatgtttattgggctcctgcaagtgccacactgtgtgcagtgaacagagtgctcc

SEQ ID NO: 123359 - DNA, 561 bp, Homo sapiens
acaaatggccagaaagcatatgaaaagatgctcaacctcactaattttagggaaatgtaaatcaaaccaatgagatatcaccttacacattaggatcaataatatcacaaaaacaaaataagcgttggcgaggatgaggaaaactttgaatccttgtgtgctgttggaggaaatgcaaaattttacaatcactattgaaaacagtatggcagtttctcaaagacaaaacatagatttattatacgatgctgcaattttacttctgggcatatactcaaaagaattgggaacaggatctcaaagagatatttttacacctatgttcattgtagaattattcacaatacttaagaagttgaagcaacctaaatgtccatcagtgggtgaatcgttaaagaaaatgttatatacatataatggaatattattcaaccttaaaaaaggaaaggaattctgacacatrctacaacatggatgaacattgaggacattatgctaagtgaaacaagccagccacaaaaacacaaatactgtatgattccatttatatgaggtaactag

SEQ ID NO: 123360 - DNA, 621 bp, Homo sapiens
ctactgctgtaccccaggccctagcacagcgtgaagcacatgmatgtgctcagatcaataaatgagctaatgaagctgttatccaacaccctcattttatgccttacaattaatatctttttggggggcgggaaagaactcacatggtttttataatgaaatgatgttaatgtgtttttccttgaaaattttcttttcctgaaattcaaatctaaagtctgggaagaggaatatagggtaaatggtcaatggcatggcatgggagcagaaggcagccacagagggtacccagatggtgctctgttctaaacactgtaggaagcagcaccctttatatcttggagggtagcagactgtttctctgactctgtgccaacaagttcccaatagggatttgtgcctcttacaactaaaagggagtcaccttcatatctctcagtgaatttacaaaggaacagtgaatttacaagagatttacatatctctcagcgaatttaccttatttttaaggtaagactcaaaataaagagaaaccagcttacttaaaagaatctgggatacaatgttattcaggtgatggttaccctaaaagccttgacttgaccactacacaatttatgc

SEQ ID NO: 123361 - DNA, 621 bp, Homo sapiens
ctactgctgtaccccaggccctagcacagcgtgaagcacatgaatgtgctcagatcaataaatgagctaatgaagctgttatccaacaccctcattttatgccttacaattaatatctttttggggggcgggaaagaactcacatggtttttataatgaaatgatgttaatgtgtttttccttgaaaattttcttttcctgaaattcaaatctaaagtctgggaagaggaatatagggtaaatggtcaayggcatggcatgggagcagaaggcagccacagagggtacccagatggtgctctgttctaaacactgtaggaagcagcaccctttatatcttggagggtagcagactgtttctctgactctgtgccaacaagttcccaatagggatttgtgcctcttacaactaaaagggagtcaccttcatatctctcagtgaatttacaaaggaacagtgaatttacaagagatttacatatctctcagcgaatttaccttatttttaaggtaagactcaaaataaagagaaaccagcttacttaaaagaatctgggatacaatgttattcaggtgatggttaccctaaaagccttgacttgaccactacacaatttatgc

SEQ ID NO: 123362 - DNA, 621 bp, Homo sapiens
ctactgctgtaccccaggccctagcacagcgtgaagcacatgaatgtgctcagatcaataaatgagctaatgaagctgttatccaacaccctcattttatgccttacaattaatatctttttggggggcgggaaagaactcacatggtttttataatgaaatgatgttaatgtgtttttccttgaaaattttcttttcctgaaattcaaatctaaagtctgggaagaggaatatagggtaaatggtcaatggcatggcatgggagcagaaggcagccacagagggtacccagatggtgctctgttctaaacactgtaggaagcagcaccctttatatcttggagggtagcagactgtttctctgactctgtgccaacaagttcccaatagggatttgtgcctcttacaactaaaagggagtcaccttcatatctctcagtgaatttacaaaggaacagtgaatttacaagagatttacatatctctcagcgaatttaccttatttttaaggtaagactcaaaataaaragaaaccagcttacttaaaagaatctgggatacaatgttattcaggtgatggttaccctaaaagccttgacttgaccactacacaatttatgc

SEQ ID NO: 123363 - DNA, 417 bp, Homo sapiens
agatctgaacaatgtgtatgaattataccaatgttaatttcctagcttttatcatcatgtaagatgttaccactggggaaagtggatgaatggaacacaggattctctgtactatttttgcaacttctgatgaatctatacttattcctaactaaaaagtataaaagaaaaatacaggctcatagtagctacttayacaatacaaaagtctctctttaaaaatctggtaattatctaccctcttttaattcctgtgcctgaagaagccaaagtctggtgtggagcccttcttgtcttatctttcatatcaacacataagaaaattcataggattatttttccttttttttgtttcacatgtatcatctacattatcctgaaacttgcttctgccctttcccagtacgacacagacat

SEQ ID NO: 123364 - DNA, 408 bp, Homo sapiens
accaatgttaatttcctagcttttatcatcatgtaagatgttaccactggggaaagtggatgaatggaacacaggattctctgtactatttttgcaacttctgatgaatctatacttattcctaactaaaaagtataaaagaaaaatacaggctcatagtagctacttatacaatacaaaagtctctctttaaaaatctggtaattatctaccctcttttaattcctgtgcctgaagaagccaaagtctggtgtggagcccttcttgtcttatctttcatatcaacacataagaaaattcataggattmtttttccttttttttgtttcacatgtatcatctacattatcctgaaacttgcttctgccctttcccagtacgacacagacatcctctgatgttaactca

SEQ ID NO: 123365 - DNA, 521 bp, Homo sapiens
tactagtttacttgtttacattcttctaaaatatagtgtttactcatgaccctggacacactcttcctgtgtctgattaaattcaaatactcttttcatcagatttgacttccaggttttctaaatgggcttcccataaggggaagcaatcacactgtaagaggtttttctttacctttttgggaactggcctaaaaaacaaagattttatattctatcaagataattcctacattgtttttattaggtgtttggttacataagaaaacagagctttaaaaggattaaggyttttacatccatgaaactttatgtattacttttgaaaccttttgattattactctggttaaaagaataacttattttataatgcctcatgattctgttttgattaaatgttttaaatcttttgacatctgagtcaagttccccaagattaaaatcataaattaagtcttttttggatgaaaggataagaattatttggtaaattgtatgagaggcattgtcaaatgatga

SEQ ID NO: 123366 - DNA, 499 bp, Homo sapiens
cagttcaaaaaaccctaaaacttggcaaattctctttcctaaatttcaaaagaaaaggcaggtattcgtctaaatatagccaggccatcctgtcatgttaatgaggctrggtttactaagggcaatttacccacctataaatctgtagagctgtgtttgaggttgtctttaatcttgtctaccaaccaaacctctgaccaaaatttcaaattgattgacttgagtttcatctctagtttctgccttgcttatttgtatggttttggggaagacaataaaggaaggaaattgagggttggttgctttcattttagattcaactaacatttattgaacatctagacgccatgccatgaactctcattattaacctgtaaagtgagtatttatattttaagatgactaaagtgaggctcacagacattaaaagccttgttcataacagaactgaaatgagttacagacatttttttacccaaagttgtagatttttatatcc

SEQ ID NO: 123367 - DNA, 519 bp, Homo sapiens
gtgtttgtaaatgtcctggcaacagtgagtagagaggaataatcatgggttctcaaacctgactgcacattaaaatcaactggggagatttacaaaatattgatgtctggctcctaacctcagagattctgacttaatagtatgggatatagccttggccttaagattttaagaagatccccagatattcctaatattcagcaaagtttgagaaccactgcaatcgagaaaagagagatactggcatggaaactagccaaaaggctgtaataacacagggatagtaagaacatgagtcctgggactgctgaggtgggggacaaggggaatagagaggaagatttggatacaggtgacatttcaaaggaagaacatactaagcttcaggttagactgaacacaaaatgagaggaaagatttaaatatgctagcaagatttctgrgctcaatgtcttgttcatcggaagcacccagttaatatttgctgaaataaactgaacttaatatgataatatggag

SEQ ID NO: 123368 - DNA, 519 bp, Homo sapiens
gtgtttgtaaatgtcctggcaacagtgagtagagaggaataatcatgggttctcaaacctgactgcacattaaaatcaactggggagatttacaaaatattgatgtctggctcctaacctcagagattctgacttaatagtatgggatatagccttggccttaagattttaagaagatccccagatattcctaatattcagcaaagtttgagaaccactgcaatcgagaaaagagagatactggcatggaaactagccaaaaggctgtaataacacagggatagtaagaacatgagtcctgggactgctgaggtgggggacaaggggaatagagaggaagatttggatacaggtgacatttcaaaggaagaacatactaagcttcaggttagactgaacacaaaatgagaggaaagatttaaatatgctagcaagatttctgggctcaatgtcttgttcatsggaagcacccagttaatatttgctgaaataaactgaacttaatatgataatatggag

SEQ ID NO: 123369 - DNA, 631 bp, Homo sapiens
attagtatggtcagtttaactttcctttggttactatttgtatgacatagttttagaaatcttttatgttaaacctatttgtgtctttgaatctaaagtatcttttgtagacagcatataattagttgatgtttttaatctgtttcaacaagttcttcattttaattgaagtgctaaatctacttactttaattgcaattactgatatggtaagatttactttggtcattttgctatttgttttctatatatcttatgtcttttttccctccattgctccatttatgccttcttcattctaaccagatattttctagtgaggaatttaaattctatttctttttcttttaccatttcattatagtcattttcttagtcattgttctggggatcaaaattaataatttataataatctaattctgattaatataaacttgtttcaataatatgtaaaaatttggcccttatatacctccattcactctttctttrttatgctattattgtcacataaattacatagttatatattgtatgcacatcaagagaaatttatgattattgctttatacagttgtcctttaaatcacacagagaacaaacattacaaacaaaaaatacatttaact

SEQ ID NO: 123370 - DNA, 597 bp, Homo sapiens
tctttacacctttaaatcccatcaaccatctgctttttttttccttgattttatttacctagatcaagatcagaagtcaaaggcagtcactataatataggtagttatagaatcaatctgatgaattatttctagcccaactaatcaaatatatttttctgtttgacaagsttaggatggaatgctatttgtttcagatataaactataatcctttcatcatcttcaaacttgctaatttttaataaaaattaaacaagagcatgaagcgggtggctgggtataaaggttcctatccaaatcatttaaaactaagtcgttttgttgttgttgatagactgtctctgatgttgaaaagcaaaaataaaatataattataacaaaaagaaatttgggacaataatccttccttggggtcacctgactactatgtgatcaccttaacagataagttaatgacaacaaattttccatggtgaaaactgtggtgaaaggaaatcaactctcagaggcaactatttatagtggtcagaacattacccagacctcagactacacgggttcatatcctagctttgccatttactagctgtgtgac

SEQ ID NO: 123371 - DNA, 597 bp, Homo sapiens
tctttacacctttaaatcccatcaaccatctgctttttttttccttgattttatttacctagatcaagatcagaagtcaaaggcagtcactataatataggtagttatagaatcaatctgatgaattatttctagcccaactaatcaaatatatttttctgtttgacaagcttaggatggaatgctatttgtttcagatataaactataatcctttcatcatcttcaaacttgctaatttttaataaaaattaaacaagagcatgaagcgggtggctgggtataaaggttcctatccaaatcatttaaaactaagtcgttttgttgttgttgatagactgtctctgatgttgaaaagcaaaaataaaatataattataacaaaaagaaatttgggacaataatccttccttggggtcacctgactactatgtgatcaccttaacagataagttaatgacaacaaattttccayggtgaaaactgtggtgaaaggaaatcaactctcagaggcaactatttatagtggtcagaacattacccagacctcagactacacgggttcatatcctagctttgccatttactagctgtgtgac

SEQ ID NO: 123372 - DNA, 585 bp, Homo sapiens
aaggccctccccagcatccactatggcatccctctaagtacacacttagcattccggtgctaaaatcccaattttactttgaaataaaaatgcaactcaataaagagtgtcttttttcagtccttgctatggtctcttggaagttgaaagcttgctttggaagcagagacagagttgtttcctgagagccttgggctccacatgggagcaggtgaaaagacattttggagaatgtccagtgatggtcaagggccaattagttatagagaacttgtatgagaacaacgactgagaaaaaatgaaagttgaaattgtatgagaataaggactgggaaacagaaaacgagttatgtgagagtcccttaagacgggtaggactcccacaagaaaaaaacaaaaggctctactatgaaagatacgaagtttaatgttagtaaagaaaatgtctgaggtttkttttttttttttaatgtgggtgaaagaacaaacattttaaaagtctaagtagaactaagctttggaacttgagaaattacttgcactttgagttttcacaactatagaagatcagtaagaaaaaaagac

SEQ ID NO: 123373 - DNA, 579 bp, Homo sapiens
ttactatattgcttgtgcagacacttttaagttgacggttcattatacatttttatatcatatttgagtcatatttaaagggaaaagcactgatgaagttaattttcaagaatatggtcaaaaaaagagaagagtaactcttgawattactgtaaagaataaacacagtgaattacctcatattcctgggaaaacttcaagttgtcatttgctttcaatctttcaatgtggtctgcaagttccaagatgggtattggaggatggctagccatacctattgaaaaaagcaaagaagaaacacatttgaaaacaaatgaaaatgatgctaactattccaaaatatagagaatactatagttagaaatggcctgaaaatatgtgagtagtaaagatgttttaggtgaggaagcaggcaaatagtttggttactcaaagcaggacatgctctgggaagatgaattttgtagccaaatgaaaagtcaccaagcataatctccaaactaacactcctagtgtaaaagaaagcgttattgtgctatgaatcaataaggttagctagtggaaaaaactgacagtcag

SEQ ID NO: 123374 - DNA, 579 bp, Homo sapiens
ttactatattgcttgtgcagacacttttaagttgacggttcattatacatttttatatcatatttgagtcatatttaaagggaaaagcactgatgaagttaattttcaagaatatggtcaaaaaaagagaagagtaactcttgaaattactgtaaagaataaacacagtgaattacctcatattcctgggaaaacttcaagttgtcatttgctttcaatctttcaatgtggtctgcaagttccaagatgggtattggaggatggctagccatacctattgaaaaaagsaaagaagaaacacatttgaaaacaaatgaaaatgatgctaactattccaaaatatagagaatactatagttagaaatggcctgaaaatatgtgagtagtaaagatgttttaggtgaggaagcaggcaaatagtttggttactcaaagcaggacatgctctgggaagatgaattttgtagccaaatgaaaagtcaccaagcataatctccaaactaacactcctagtgtaaaagaaagcgttattgtgctatgaatcaataaggttagctagtggaaaaaactgacagtcag

SEQ ID NO: 123375 - DNA, 618 bp, Homo sapiens
ctttgctgacaattcacttcaccttccacacctctacatcatgttttacaaggagcaaggggcaaaatrttaaggccaacaaagattagacaggttgtaagctttattgcagcttaatgttttttaattaaagccaaaggatctttgttgggatccccaggggttagcatgcccatagcactgaaccatccaaccagctaggtatggagaagccagcacccagattagatcctgaaaggcctccaagggaggggggcggaaatgcagcagattaaataacgaataaaagacatggccaacaatgacacagttacctcatctaattccatttcatctggactctcccatggcttgataaatttcccgcgagatttcttcaaaggcacaattattatgtagtaacctctgcacaagaatgaatagataaaagttaggttagttgaaaggaggaaaacgtggatatacccttaaaccttccacagaccaatgaggttgaaggcaaattatggatatggggtgacttgtccatttcttacatcaatgacaaatatccacctgtttgttcaattttaaaaacaacacgggaagacatttatgtgtgattgcagtgatcttgta

SEQ ID NO: 123376 - DNA, 618 bp, Homo sapiens
ctttgctgacaattcacttcaccttccacacctctacatcatgttttacaaggagcaaggggcaaaatgttaaggccaacaaagattagacaggttgtaagctttattgcagcttaatgttttttaattaaagccaaaggatctttgttgggatccccaggggttagcatgcccatagcactgaaccatccaaccagctaggtatggagaagccagcacccagattagatcctgaaaggcctccaagggaggggggcggaaatgcagcagattaaataacgaataaaagacatrgccaacaatgacacagttacctcatctaattccatttcatctggactctcccatggcttgataaatttcccgcgagatttcttcaaaggcacaattattatgtagtaacctctgcacaagaatgaatagataaaagttaggttagttgaaaggaggaaaacgtggatatacccttaaaccttccacagaccaatgaggttgaaggcaaattatggatatggggtgacttgtccatttcttacatcaatgacaaatatccacctgtttgttcaattttaaaaacaacacgggaagacatttatgtgtgattgcagtgatcttgta

SEQ ID NO: 123377 - DNA, 635 bp, Homo sapiens
cacatgccactggagtactgctgaaaagcagtcatggctaactggaaaaagcagcaaggcttgcttccatcaccaaattttgtagcaagaaattatgcactctgagacttatatgtttcttatcatgaaattggagttaaccacacatatccattatcttgcccaggttgttagaggataacagacataacgcaatttgaaatgcgtcaagttccctgcagtggtataatctcggctggacacacctccaactgccacggtcatatcctttcttggattacattttctttctttaagtggtgggtgcacttccttccttggttgtttcagtatgctctgtgaggtgatgtgcctgatattatggccataattcctcattctctttgtttcctcctgtcctgtctccactttgcttcttgtccctgactgttaaaagttggcatacctgaggttctgtcacagtcactggtctactgtttctctaatcttaaaaaaraaactgcattcatttctaaaccttaaataattatttctgcccatattcctgatttatttccagctgtgacttccaatctgagctccagtggcatatacattgtaaatatctgctagatgttttcctgtgactacccagt

SEQ ID NO: 123378 - DNA, 443 bp, Homo sapiens
atgccattccataggaaaaaaaattatgtagaccaacagtaaatctctcagatgatagaaaatattgaccaaaaaaactgtttttttgtctcttattcacaagatcatttttccactttaatataaggttgaatctatagcagatgccgatgctaattgaggaaaaattccatccttcaagttctgatcaatctgaggaaggttttctccagaggtgaagagctgcctgaattctgaagtgtagtctggactccagggagtaatctttgtagttgttcctgaagacaataacaataaaattgtacagtcaaaatttccttatataccaggtaccaccattctcccattcctctctctgatcwacttacttactttcaaactctaataaacataaccgtagatcttagtaaaatgcagattctggttctgttggggggttttgg

SEQ ID NO: 123379 - DNA, 568 bp, Homo sapiens
cccaacctcaccaatctccagatacataygaggtctcaccaacattaaatctcagtgtgagagcaacaaacctactcatattactgacacaggaacccaatcctttccaaaattgccctgagtttcttctgaggttctccagaaagtgtttctcaggtgctcacgagtcagttctgcctaccactcctcattttccttgggaactctgagcccactccttgccccataacaccactgcctctacagctgtaccatagcattgggagcagcagctctgcccaggcccagatccctgcggagtcgcccaggcacaggctctcttttctggctgtgcgtcaacagctggactgtcccatgagaaattagaaaggaaaggtacgcgctctatccaccacagaactcaggaaatggactgcagctgagggtgggagcaggctaaatcatcagatagctgaaatgggattttcaggtaacacacacagcagccatttctctccttccccactgggtgcccatgggtatccagaaaagcagagttagagtgggagcaagtgccagaatcctcaag

SEQ ID NO: 123380 - DNA, 568 bp, Homo sapiens
cccaacctcaccaatctccagatacatacgaggtctcaccaacattaaatctcagtgtgagagcaacaracctactcatattactgacacaggaacccaatcctttccaaaattgccctgagtttcttctgaggttctccagaaagtgtttctcaggtgctcacgagtcagttctgcctaccactcctcattttccttgggaactctgagcccactccttgccccataacaccactgcctctacagctgtaccatagcattgggagcagcagctctgcccaggcccagatccctgcggagtcgcccaggcacaggctctcttttctggctgtgcgtcaacagctggactgtcccatgagaaattagaaaggaaaggtacgcgctctatccaccacagaactcaggaaatggactgcagctgagggtgggagcaggctaaatcatcagatagctgaaatgggattttcaggtaacacacacagcagccatttctctccttccccactgggtgcccatgggtatccagaaaagcagagttagagtgggagcaagtgccagaatcctcaag

SEQ ID NO: 123381 - DNA, 524 bp, Homo sapiens
acaatatctgactttgcaaaaggaaatcacctcactatatatttgtaggctcttgggtcaatataatgaaaagtaattgtattgaataccagaattctaaaataattgtttaaaaatagaaatacgacttatatccccccaaatttattaccatttccctcaggaatttagaatccatttatatttttcaagtcttaataaccaaaaataattttttaaagatcactagaagatactgggaagatgaaagttagataaaatactgcttatatcatgagtttataaaaagatgttcgatactattcagcacttctgcactgccaggctggtagacaatgctacttggaaatcagacctatagttatcaattgcaacgggttaaatggtggctcctccaaaagatatgcacattatctaaaacttcaagcttgtaaatggtaccttatttggaaacagtggtctttgcasacataattaagttaatcatctccagatgagatctttctacattatccaagtgggcc

SEQ ID NO: 123382 - DNA, 508 bp, Homo sapiens
acactttttatttgttatgtctctgatttttcttgatcagtcttatcagaaatttggctattatattaatctttccagagaactgtttttgttttgctgatcttctccatttgttttctgttttaaatcatttgtgctgttatttgaaaataatttttattgtatttcctttggttttattcttttataacgtgacttcttgatatgagcacctagctcatttagtttctgcttttccttttctgctaccagcattgtctgtacgtattcctttaaacattacttttkcttcctcctggaagattttgctatcatttagatataagtattttcaaatttcatttcctaatacacatggttatttaaaagcgtttgtcaagaacagtgaagggtctgagatttcatcctacttacaagcttatgagctagtctgctagaatgctagatgctggcaaaagccatgagacgcctgggtcagagacaaaggagggcttattattcacagcag

SEQ ID NO: 123383 - DNA, 508 bp, Homo sapiens
acactttttatttgttatgtctctgatttttcttgatcagtcttatcagaaatttggctattatattaatctttccagagaactgtttttgttttgctgatcttctccatttgttttctgttttaaatcatttgtgctgttatttgaaaataatttttattgtatttcctttggttttattcttttataacgtgacttcttgatatgagcacctagctcatttagtttctgcttttccttttctgctaccagcattgtctgtacgtattcctttaaacattactttttcttcctcctggaagattttgctatcatttagatataagtattttcaaatttcatttcytaatacacatggttatttaaaagcgtttgtcaagaacagtgaagggtctgagatttcatcctacttacaagcttatgagctagtctgctagaatgctagatgctggcaaaagccatgagacgcctgggtcagagacaaaggagggcttattattcacagcag

SEQ ID NO: 123384 - DNA, 603 bp, Homo sapiens
gtattactctgttgccacactgctatgaagaaatacctgacactgggtaattcataaaggaaagagatttaattgactcacagttccaccttgctggggaggcctcaggaaatttatgaccatggaggaaggcaaaggagaagcagggaccttcttcacagggtrgcaggatggagtgaaggcaagcgggggaggatgccagacacttataaaaccatcaaacctcctgagaactcactcactatcactagaacagcatgggggaaactgcccccatgatccaatcacctccacctggtcccgcccttgacacatggggctcatggggactacaattcgaggtgggatttgggtgcggacacagaggcaaaccatatcaccaggttttgatctgatttcccttcaatatttcgcttctatgttacttctgtcctgttctctcagctctacactaaaccagctatagtttccttgatgtgtccaaatgccacttggataaggtcttaataaagatatgggatggtgggagtggtagcaatatattgcagaagcccacaccaaactacctaaaatgaaatattggccatccctattattgggcgt

SEQ ID NO: 123385 - DNA, 670 bp, Homo sapiens
aggacttggttaatagtttgtttagtcatcatttctttagtttatcaactttrccctggcagcactcactggccagtacacatcgctggggagttctgatcttccccgcctgtggcaaatgtaagcacagagccaagcagagtgttgcaaccctgtaccatttagaaggaaggcaaaaggggaactgttcctttcagtgcctagtggctttggctagaccaaatttaagatcccccctttttttttaattagaaaaattcttgagtgtcagcctcaggaaaatatatgtagtggacaaaatatttttgatcctcccaggatctctttgcttcctcccttgccctggtccctttcccagctcagaggctgtccctgcatcatgcttcctgtgtcaaatcttgctgctaagggtctcctctcattggaagtacaagctccattaatccccagctgactagaaaacattctgataggcaattgtgccataattgttagcagcctgaagtgttcctcctaaggaatcccgtcttttaacattgagtgaatggagaccttttcttagcctcaagaaatacaattgagcacctatgattctcaccaaaaagccttctcaaccagcaggagtcttattgtaagtttgataatggccacccctctggaaatcctgtcc

SEQ ID NO: 123386 - DNA, 547 bp, Homo sapiens
ccctctaaaggttcccattggtcacttaatgtacaccctatgcaaatgaagtagtggtccgcaatcagagggttaagtgaaagtacaaaagttacaccctatgcaaacgtctgattggttgtggaaagcaaccaatcagaggctaaagtgaaggtacaaagttacacttytatgcacacaaagacttgacccgcaatcagtctgactggttgaggaaagcaaccaatcgggctgaagcaaagttacaaagttacactcctatgcaaactgattggttgtggaaagcaaccaatcattgatactttcaattttccatctaccacacagaaaagggggtgggggtttgcaaaaggagtagtctcaggtccttttattacttagatgtggaaagttggggttttccttttgatttagttctaggaagttagcatgaatcggccttaggttccctgcctccagaccctattctcatgtctcagtggcactgcactgccaataatcctccccttgctctacacttccaagctaaaacacctcatcttctgct

SEQ ID NO: 123387 - DNA, 557 bp, Homo sapiens
ttggggcctcactctcctctaggagctcctacagtgcctcccaatggccaaggttaactggagtcagcagacatgggggcccagggatgtaattcatatcctcagccctccagcaatgggcaggctggagaagagaggagagtggactagcaggggcacagagaagacatgcagccccatgaggttgtagcatttggggttaaggtggggtgagcctgggatcctggaagagagcccagtcccactctcaccagccctgttcccacactgccttcttcctgcactgacttgagttgctccaccaggctcacgcagacctaagacctggttggcctcagctcacaccattctttctgtgcctcactgctttatacagaggcgagcacacatctctttccaggagcttcgttaacacagacagagagaggagtgggtagaacatgtgaaaaagcatttccaggactctggtttcctgcttcttcgttctattttcttttattttttttctttttctttyttttttttttttttttgccttcttctctctcctctccttg

SEQ ID NO: 123388 - DNA, 535 bp, Homo sapiens
gaatcatgcacctgagaagaagcccagaccggcacccaagctccccatttctccccattcctcccttagctcctacttggattcatgacacccccaccaagcaccaccaggctaaccttccttgctagtgcctcacttctcagacctactggctttyaaatttcattaaatcttgagagtcatgtgacctactcccccaatatgcagtgccttacatcaaaacagctaccagcattaacgtgatgatgagaaatactaagcacattcacatatcaacagggtctttctggaagcattggtttaactgtcaggagtgatgttgaatgttgagaatagcgggggctgtggttggctgctgggaaacttctgtggggatggtcctgtttaatatctctcagatgacaagaactgtcaattctacccacagggctggatgtatcagccctctcacccccaaatttccataggactcttctaccctaatcggttctaatgtttggatgtagtcaaggacactcacatttataatatgcag

SEQ ID NO: 123389 - DNA, 605 bp, Homo sapiens
tttgctaacaagcagattgaaggaaaaaatggggggtcttgaattttggcactgcacatagggatttacatctacttagatgagtaaaactcttaagcctgcttaacatgaatgaataggtagcttagaatttgaagagatgtgtattgagtggagctcatttgtggcaacaaacagtactgaaattgctttcgctttacccttctcattgtgccttgaggcagtagcagtcaggggaagaatcatgcacctgagaagaagcccagaccggcacccaagctccccatttctccccattcctcccttagctcctacttggattcatgacacccccaccaagcaccaccaggctaaccttccttgctagtgcctcacttctcagacctactggcttttaaatttcaktaaatcttgagagtcatgtgacctactcccccaatatgcagtgccttacatcaaaacagctaccagcattaacgtgatgatgagaaatactaagcacattcacatatcaacagggtctttctggaagcattggtttaactgtcaggagtgatgttgaatgttgagaatagcgggggctgtggttggctgctgggaaactt

SEQ ID NO: 123390 - DNA, 605 bp, Homo sapiens
tttgctaacaagcagattgaaggaaaaaatggggggtcttgaattttggcactgcacatagggatttacatctacttagatgagtaaaactcttaagcctgcttaacatgaatgaataggtagcttagaatttgaagagatgtgtattgagtggagctcatttgtggcaacaaacagtactgaaattgctttcgctttacccttctcattgtgccttgaggcagtagcagtcaggggaagaatcatgcacctgagaagaagcccagaccggcacccaagctccccatttctccccattcctcccttagctcctacttggattcatgacacccccaccaagcaccaccaggctaaccttccttgctagtgcctcacttctcagacctactggcttttaaatttcattaaatcttgagagtcatgtgacctactcccccaatatgcmgtgccttacatcaaaacagctaccagcattaacgtgatgatgagaaatactaagcacattcacatatcaacagggtctttctggaagcattggtttaactgtcaggagtgatgttgaatgttgagaatagcgggggctgtggttggctgctgggaaactt

SEQ ID NO: 123391 - DNA, 649 bp, Homo sapiens
caggcatgagccaccatgcttggcctgaatcctctcttatgtgaactggcctgaggctccagttttgtaccctttactaataattgtaataataaatctatataaaatattttttccaacatttagagctttatgaacagaggaaacaaatagctttcataatgtcaagttatagacttatttttgttgcagagaagtacaatactttgttgcagagaagctaattaaagattcaagcataaaatatatttggataatgtactatgggagaagtgggatgggaatatgacttcaaggagaaaaaggaatatctaaaattactttgtttcagaagagcttgtttwtgtattttttaaatggatgatggttaagggtctataagctacggaagcagataaaccatcaaatctcaatggcttaagtagaaatttcttcttttttttatttttcttttttttattattattatactttaagttctagggtacatgtgcacaatgtgcagatttgttatatatgtatacatgtgccatgttggtgtgctgcacccaataacttgtcatttacattaggtatatctcctaatgctatctcttccccctccccccaccccacaacagcacccagtgtgtgatgttccccatcacac

SEQ ID NO: 123392 - DNA, 631 bp, Homo sapiens
tcttatataaggctgttttatgaaaatccatacaacttcttcagamcagcttaactaaaattaataaaatagttctggctgggcacagtggctcacgcctgtaatcctaccactttggaaggccaaggtgggtggatcacttggacccaggagttcaagaccagcctgaacaatatggtgagcccttgtctctgcaaaaaataaaaataatccaagcatggtgaactgtgcctgtagtcccagctactctagaagctgaggtgggagggttgcttgagcctgagaggtcgaggttgcagcgagctaggatagtgccactccagcctgggcaacagagtaagatcctgtctcaaaaaaaaaaaaaaaacaaaaaaaaaactttgagatacaaaccaagattcttaacatttcagttcgatgtgtgggaagtagctttgccaatgctccttctgtgcacaagatcataaaatgatgagttaatcactaggggatatttaccacaaatagtgtcagatgatatactgtaaaatttatgcagctaaaagctccagtgtacaatataatctaaagagatggctcagatgttctggacttattaggccagtgccactgtttattacaaggaagccta

SEQ ID NO: 123393 - DNA, 643 bp, Homo sapiens
tcaataaaatctgacatccctccatgataaaaaccttcaacagactaggcattgaaggaacattgctcaaaataataagagccatctatgacaaacccatagcccacatcatactgaatgggcaaaagctcaaaccattctccttgagaagtgaacaagacaagaatgcccactcttacaaatcctattcaacagagtattggaagtcctagccagagcaatcaggcaagacaaagaattaaaagccatccaaataggaaaagaagaagtcaaactatctctctttgctaacgatatgattctatacctacaaaaatcataaagactctgctaaaaggcccctagaattgataaacaactttagtaaagtttcaggatgcaaacccaatgtacaaaaatcagtagcatttctatacrccagcaacacgcaggctgagagtgatatcaagagcacaatctcacttccagtcaccgtgaagaaaatgaaatacctagaaatacagctaacaaacgaggtgggccattctttgatgtttcatacaaaccactgttttaagcaaaccaccttgttgtgcaattgtgagaggaaaatgcagaaggagattggctgcaaatattaaacccagcatagttaggatttatt

SEQ ID NO: 123394 - DNA, 570 bp, Homo sapiens
ctataatacagagatataggaaaagaaaagatggaccaaggaatgaagtttgactttttctctgagtaaaatggggagctaatacaatattctatgtgcaggactaaagtgaactgacatttacagagggttcatttttgcctgctgtgctrggaacagattggaaaggacagaggtagaaacagggagctcattacaggaattcagggaatagatggtagatccatggaccagggtggcaatattagtggcgatggtaagtggtcagatttggaaacaggagcatttcccacttaatggctataaaatatttctaaaatcagatgttctgcatgaaaatactcaagaggaacctgtcctccaatgtcttaaaataatgcatgagctaccactcaaccccttcccctgccaactgatttcctaaataactagttctaaaactcgggaaaatgccaatatgaaaaacaaacctatcatataaaataaatgtaaaatacccaaaatatcacgtagtagccactaaacaatatgattaacaaacagatattttctatgtagaaacaggagtat

SEQ ID NO: 123395 - DNA, 432 bp, Homo sapiens
atgttagcagcagtttataaccactaaaattaagtcactcaaactgaaaccaactatacttcctttaagttacctattagtatttatgtattggtgccaccattatcctaagcttgaaatcttaacactcctatagtctttcatttgtgcattctctctccctaattcccaaccttyatgcaaggcctaattcaaagggcatctcttccataaagggttccttgacctcttcagctggttatagtctttccctcatcagaagacccaagacagtctatgtgtacctctcatgacacttggtttatgtttttattttcagacactggttttgcgggagcaggatttatatctgattcttccttgcatactctatggcaccttgaacactgctttgctcaaagtactaaaaaactatgtaagatttgttatctg

SEQ ID NO: 123396 - DNA, 447 bp, Homo sapiens
atatgttagcagcagtttataaccactaaaattaagtcactcaaactgaaaccaactatacttcctttaagttacctattagtatttatgtattggtgccaccattatcctaagcttgaaatcttaacactcctatagtctttcatttgtgcattctctctccctaattcccaaccttcatgcaaggcctaattcaaagggcatctcttccataaagggttccttgacctcttcagctggttatagtctttccctcatcagaagacccaagacagtctatgtgtacctctcatgacacttggtttatgtttttattttcagacactggttttgygggagcaggatttatatctgattcttccttgcatactctatggcaccttgaacactgctttgctcaaagtactaaaaaactatgtaagatttgttatctgaactttggacaca

SEQ ID NO: 123397 - DNA, 469 bp, Homo sapiens
aacctgagaagggggttgtggtaacctcccacttgtggccaaaccggtcagaagttgtggtgacctgggaacctactgcttgcaattggtatatgaagtagggcacagtcttgtgagactgagctcttaatccatgagagatctgcacgagctctagttagtgtcagaagtgaattgaatataggctatccggctagcatcagagaattggtcagtgtgagaaaaatccacacatctggtcrctatactctctgtgttgagagtacagtaggagaaaattggttttttcctaccatacacactgggcttttacagtttttggctattctcaatcaagtggccatgaacattcttacatatgacttttgtaggtatatattttcatttatctgggataaatacatagaagtggaattgctgccaaacattttccagagtagttgtactattttatacccccacgagcaat

SEQ ID NO: 123398 - DNA, 469 bp, Homo sapiens
aacctgagaagggggttgtggtaacctcccacttgtggccaaaccggtcagaagttgtggtgacctgggaacctactgcttgcaattggtatatgaagtagggcacagtcttgtgagactgagctcttaatccatgagagatctgcacgagctctagttagtgtcagaagtgaattgaatataggctatccggctagcatcagagaattggtcagtgtgagaaaaatccacacatctggtcgctatactctytgtgttgagagtacagtaggagaaaattggttttttcctaccatacacactgggcttttacagtttttggctattctcaatcaagtggccatgaacattcttacatatgacttttgtaggtatatattttcatttatctgggataaatacatagaagtggaattgctgccaaacattttccagagtagttgtactattttatacccccacgagcaat

SEQ ID NO: 123399 - DNA, 469 bp, Homo sapiens
aacctgagaagggggttgtggtaacctcccacttgtggccaaaccggtcagaagttgtggtgacctgggaacctactgcttgcaattggtatatgaagtagggcacagtcttgtgagactgagctcttaatccatgagagatctgcacgagctctagttagtgtcagaagtgaattgaatataggctatccggctagcatcagagaattggtcagtgtgagaaaaatccacacatctggtcgctatactctctgtgttragagtacagtaggagaaaattggttttttcctaccatacacactgggcttttacagtttttggctattctcaatcaagtggccatgaacattcttacatatgacttttgtaggtatatattttcatttatctgggataaatacatagaagtggaattgctgccaaacattttccagagtagttgtactattttatacccccacgagcaat

SEQ ID NO: 123400 - DNA, 469 bp, Homo sapiens
aacctgagaagggggttgtggtaacctcccacttgtggccaaaccggtcagaagttgtggtgacctgggaacctactgcttgcaattggtatatgaagtagggcacagtcttgtgagactgagctcttaatccatgagagatctgcacgagctctagttagtgtcagaagtgaattgaatataggctatccggctagcatcagagaattggtcagtgtgagaaaaatccacacatctggtcgctatactctctgtgttgagagtacagtaggagaaaattggttttttcctaccatacacactgggcttttacagtttttggctattctcaatcaagtggccatgaacattcttacatatgacttttgtaggtatatattttcatttatctgggataartacatagaagtggaattgctgccaaacattttccagagtagttgtactattttatacccccacgagcaat

SEQ ID NO: 123401 - DNA, 535 bp, Homo sapiens
tctggagcaggacccctttgtggtaacaaaaccatatccaaacgatagccgagggtgtcattttagtaggagtgtgggtgattgatacagttaggatgctgccctaacaagggcaaaaatcgcagcaaatgggagggttatttctgtctcatatgcagtctgagtgtgtgcactgctgctggggcacctcatggggtcagactcccagcctccttggatttttttttccctctcaggcttcatgtgtgrcttctatcctcccggtggttctagctcacgagagcaagagcacgcagccaccagtgagaggagatgaaggagggtgtgcacattctcttcaagggcacaccctgggcgtcacacacgtcccttctgctcatatctctgtaaaccaaacataaaattctaagcccccaactgactaaatgagcccctttttggccaagggcatccccaagaaactgaaaaactagttcaggtcatgacaagaagtgggggggttgacacgcctcattgtaatcccttcctttggaat

SEQ ID NO: 123402 - DNA, 641 bp, Homo sapiens
aagtagcatatcaaagccagagtggtaacaatgaaagtaatcctccattcatataagagcccaatgtctctgtagcttcattttcctacctcttgccttcttcccaccawcaaagagttgagatagaaaatgtaagaattggatgtcataaaatcaagaaggttttctgttcaagatgttccattccttgcaattaactcccattggagcccaataccataataacgtttcctgtgccagagtccccaaaaagtaggtgatgttcccatggaagattagttgtttgtttcaacagggaaagagaagtaaatctaaggcaccacctctggcagcaggacacccccttctcctgcctcttgcattttaacacataaagcagataaggtggaggagagaatggggctggaggagaatgttcgagttacccagagaagacatgagcaagtagagcaaagaaagaactgtgacctcccagtcacccatatttattcctttatcaaagaacgcaggagttagacttctcttttcctgatctattgtttctggagctcaggaagtacaatgcaccatggcaagtcagagtcatgagtttcaattccaccttccccattatctggctaagcaatggtggacttaatcca

SEQ ID NO: 123403 - DNA, 554 bp, Homo sapiens
aattaaatatttagaccacttttaagtgcagagaagtgaagaatagggcctgaacgagttgagggaatcgtgtccctacccttgcctcaaacttaaacaagaactcaggaaatttttagggttatttggatactgctgcttatggattaactcacatgcactaaacagtaaaattctatatccaaaacttgcccmggggaagactgaccatttcctgtggacttctgaggaagtccatcaggttgaagagctgaaaaaaggcttataacagcccctgtcttagccttaccttccctagaaaagccattccacctttttgtcaacgtggataatggggtagctttaggagtgctcacttaagaacacggaggccatcggcagtccatggtggccttcctgtcaaaagtcttagatccagttactttgtgagtggcctcaatacatccaatccattgtggctacagcactaatggtcaaagaaagcaggaagttaacctttggaggaaaattgacagtaataacgccccatcgagttagaactatcttaaaccaga

SEQ ID NO: 123404 - DNA, 550 bp, Homo sapiens
tgatggtttgtcactttacttttaactgtctttttttaccatctcaattttcatgtattttcttattattgtaagagctactacttctccatctctattttcttttcatgagcatctgtatgttcagataaatgggagtacgatcttaagatarcttgaattttaagatatacctaccacagtgcctctgaactcacctcttctgtgaggattcatctactgaaagcttttcctggcagcaatatatgtacctctttctgatgcctttatctcttaattctgtttcaattgattgttttatgttatctatgtatccctagcagagaaactgaggactccttgtacagggtagttatttgtgtagatcatttaatatgtattattcatctcatccattattttccaaggcaatacagcaagcctgacaatcttagaggattgagttgcattctaatgacaaataaggttactgtagaaggacgaacactggtaaattattgtttagcaaggggactctaacagagtgttaggaattgctgttttatcaata

SEQ ID NO: 123405 - DNA, 501 bp, Homo sapiens
gcttgtcatcacgacgattcattaatacgtacagtaaaggacccagcacaatcagttaaagaaccaaagagaccaaatactgctaccaaataaccaaagaaacaaaagcacaatgaaatcttttaataaacagaaaaggacacaattctttctatcatgaactgttaggtacatggcctctgcccatgaaacgtgttcctcttcctggctaaccctgcttattttccaataaaagtatgaattttggaccttttctacagtgttactcagtctcacctctgttttcccacggcaccctgaccagagctttatccattcatttatgttctatttcatttgcttaacaagatcttcccaccagagagagagaagcctaatgctggagactttgtcttaaccatgttagttctctcagtgcttagcatrtggctggctgactctcagcaagtgaaggaatgggtgaatacctgcatagtgaataattattcaagagcagagaaa

SEQ ID NO: 123406 - DNA, 585 bp, Homo sapiens
atagcatatatcccaatccataattatttttatatttgtttcctatttactacctatatccaccactagcatggatacttttaagctacttgatcatctactatatccccagagccatgaaaacatcatacatagtaagtgctcagcaaattacttgctgaatgaatgaagtatatccatatagactgaagcaaaatctaagacattcctctaaatttaatatttgtaagattttttttaaatgacaagatttttatgtatgacctgtgatcattttagtatattcataacatgtggatgtatgcagaagatggactcattccacacaaaaatgccattgtacaaatactatctgttgaggcagcccagcagstactacatgacaaataggaggcaaaaataatattgcaaatcaccacagctatagagaaaacatagtatcacttacatcatattgatgtaagctgaaatctgtccagagctgaggctaatcatttgtgaaaagcagctgacaatatagaaagaacaagcatctaagttatatatgaactattttcaccattctccttataaagttttaaaaat

SEQ ID NO: 123407 - DNA, 585 bp, Homo sapiens
atagcatatatcccaatccataattatttttatatttgtttcctatttactacctatatccaccactagcatggatacttttaagctacttgatcatctactatatccccagagccatgaaaacatcatacatagtaagtgctcagcaaattacttgctgaatgaatgaagtatatccatatagactgaagcaaaatctaagacattcctctaaatttaatatttgtaagattttttttaaatgacaagatttttatgtatgacctgtgatcattttagtatattcataacatgtggatgtatgcagaagatggactcattccacacaaaaatgccattgtacaaatactatctgttgaggcagcccagcaggtactacaygacaaataggaggcaaaaataatattgcaaatcaccacagctatagagaaaacatagtatcacttacatcatattgatgtaagctgaaatctgtccagagctgaggctaatcatttgtgaaaagcagctgacaatatagaaagaacaagcatctaagttatatatgaactattttcaccattctccttataaagttttaaaaat

SEQ ID NO: 123408 - DNA, 580 bp, Homo sapiens
atgccagaaccatgggtcctataaagcctgaagaatcatgagccaattaaacctctttgttttataaattatgcaatcacaggtattcctttatagcaatgcaagaatggtctaatataatcagtgacactaatcatcaatattatcttattaattttcccagtttattcaacatcaaaaccagtacattttagttaaactcacattaaatgtttgtatttttttcattttatgagttgtctgtctgtatttttttccacttttatctcagtatgctcatcttcttttgttgttgtttgactgkaatacgtgttgcaagtaatttttccagcttctcatttgcatcttttttatgatggtgttagatatgccaaagttttgtgtcatgtgaagtattatctactgatactccccttagaatttttaaaaattaattttatgcttataaacttctctgccattttgcaatcttctatttacgtatttgttttctagatgactaacatggctttttcacaatcaagttcataacgcagctgaatttgcatacttacctaacttgaaaattttctctcaaata

SEQ ID NO: 123409 - DNA, 566 bp, Homo sapiens
agtaaaaggacatcagtcgtggtaaatcagatttgggaactgaacctacactagagccttgtgcatgttgtctcatttgacaatcacaatgaccaatcaaattggtgttaatatgattttcattatgcatatgtaggaaccaacacttacagaaagtgtaagcaacttatccacagctacccagaaagtaaattatagatctggatctgataatctcgattagtctgaaatacataaagacaccatacagctagactagggaatttctacccttgccctcatctcttgagtactactgcctcttttagtgccccagcccatagctgcatagttcagggcaaacccaatcattgccagcaaagcattttttcctatctactgattaagcatatgcagtaatgcaaggcatccattaatttctataaattccaaaatgctagaaaaggatggtgaaccatcagctctcaaggatggagttttatggaaattttatgaaaatattctctttctatattckaaagtaacaatgcttggtgcttgtccaagaagtggtaaatatttaaaat

SEQ ID NO: 123410 - DNA, 577 bp, Homo sapiens
ggaggtggggagtgaaagaaagagaaagtcatggatgactgcaatgcgtggcctgacaaccgggaatgaggaagaattaagtaacagcgagagaagagcaagtgtggtgggcaatggagattaggagtcccatcaggcatgtgcaaagcttgaagtgcctcttacgtaaataaacagagatggtcaagagagcttcatagtaggtcactggatgctggtcttgaatttccagagctgagcataactttggaagttaccagttttgattatttccatattattgtgagaattattttagtcttattatctccattgtatgtggaaaaatctgttttcccactatattaaaaactcggtggagagagaacatcatcggcagagtggtttgcctygtgacagataaatgcaagtagatagtataaaatgaaggctcaataaatactgatagaacttgtgataatacatttttctttatgggtaatttacttgatataataatttttgttataagaacagttttaaagacttttaaacatgtttaatgttgttccactggcattatttattaagaattatg

SEQ ID NO: 123411 - DNA, 460 bp, Homo sapiens
gaaatgtacgtgttaataaccttttattttcctcttcttaatctctcttttgttacagggatccttccaactaagaacttatggaagctgagaaaaaaattacaattactttcctacaggtccaaggcagtatgggagattcaagacatcagacttacgggacacatgtcaatgaacaaatgggtgtttgggtggttattgggcctatgatttgagaagcttctcctatatctatctatctatctatctatctatctatctatctaatctacctatctataaatcaattttttttggttcatcataagaacctttgaatgggcccaggtttgaaggccagcygtgccatcaataaaactgagtacaaaatacatggctctggcatgattaaaataaatgtaaggtaaattttcttgcacacctgaattgtttgaagaagagttacacctttcacatggaa

SEQ ID NO: 123412 - DNA, 636 bp, Homo sapiens
tttgcagacacttttcttgtatttttgaattcttattttgtcacaataatttgaaattatataatgcttcctaggttagtgagcattttcagaaacatcatttgatatccatatcarctcagaaagtattttcttctcacatgtcatagatgaagttcagaaatagtcagtaaatcatccaggttcacagaaaacaagaccaaaagttactaatactcaccaagcatccattagatggcaggcaccatctcaagccagaactcatatcttgacttttagactctgtattagtccgttctcacactgctataaaaataatatctgagactgggtaatttatgaagaaagaattttcattgactcacagttccccatggctggagaagcctcaggaaacttatgatcatggcagaaggggaagcagtcaccttcttcagaaggcagcaggagagtgagtgcagaaaaaactgtcacctttaaaaccatcagatctcgtgataactccttcactatcttgagaacagcatgggggaaactgcccccgtgatccaaacacctcccaccaggtacacctccctccacatgtagggattaccatgcgagatgagatttgagtggggacacagagccaaacca

SEQ ID NO: 123413 - DNA, 601 bp, Homo sapiens
tttatttattaatcagtttgcttccacccactgctgaggtcaattataattgtggttctatcttaagtaaaatttattctaccaagagacacttgaaagaagataatcactctgattctatttacaccctcctgattaaagagcaatgagtaaatttattaaaagttagcagaatctccttgtttgaagagaacactctctccaactctgctttttctcttcttaattgttatttctctgtcccaaatgcaaagaactccagttggggttggccagagagatgacgtcaaaacatatagatgggaactattctgatttctttgtttcggccctaggctcacctttgattccccatatacacacacagagttctyaatacggggccctggaacaggcttatgggttgtatgaagctcctaaattctatgcaaaatattagctgaacatgcagtgtgcatttccctggaggagaaggcctgtggctctcgtcaggcacttaagagagtctatgactctaaaagtattcagaatctcttccctaaagttacgattgtcaaaaatgttcaatttgattggttcatcaaattgaaattgattcaat

SEQ ID NO: 123414 - DNA, 452 bp, Homo sapiens
gtgaggggagcataaagtcttgttcatcaccctatctccagggcctaacacaggactaggcatatagtaacgccacaaaaattgtwttttgaaggagcgagccaacaagacctgctggagaggccacatattttgccttaaaaccaggagaaagcactgaagccggattcagaacatacaggtcttagttccagtggtctttattcagtcaagcagcatggaataagcacctactatgtgccaggtactagggacccacaaaagaactcaaagactcccgtctggcacagcgatgttcagtagggttggctcttgtgccatatgtgattgcttggtgggaggctgtactgagaaggatttgagaccacacatcaggcatcatcctctcgtcccttagcaatgtctgctacaggcaaaggattataaagcagcagcagcacatctgccatgac

SEQ ID NO: 123415 - DNA, 565 bp, Homo sapiens
cagtgtacactgcttggatgatgggtgcactaaaatctcagaaatcaccaccgaagaacttattggtataaccaaaacccagctgtaccccaaaaacaattgaagtaaaacttaaaaaagatattgcaataaaaaggttttcctcagtgtgttatactttttgatgctattgtaaattgatttttttwaaatttcatttcttcattatttgctggttgaatacaaaaatacaattgattttcctatgtagaccttgaatcttccatctttaccaaatccttttagttctagtagttgttttgtaattcccttggattttctgcacaattgtgttgtctcctaatagagacatattaactttacattcttttaaaagtggacttgactgtaattgaaaaggaaatatagcatattgctgctttagcatgcaggatgtcatctaacatgttggtatttatttattctgtaggaagagtaaccaattgtacactgaaaaccttggcaacggttggataaacagaattgtcataaaactagaagttattacagtttagtagatgaaaca

SEQ ID NO: 123416 - DNA, 565 bp, Homo sapiens
cagtgtacactgcttggatgatgggtgcactaaaatctcagaaatcaccaccgaagaacttattggtataaccaaaacccagctgtaccccaaaaacaattgaagtaaaacttaaaaaagatattgcaataaaaaggttttcctcagtgtgttatactttttgatgctattgtaaattgatttttttaaaatttcatttcttcattatttgctggttgaatacaaaaatacaattgattttcctatgtagaccttgaatcttmcatctttaccaaatccttttagttctagtagttgttttgtaattcccttggattttctgcacaattgtgttgtctcctaatagagacatattaactttacattcttttaaaagtggacttgactgtaattgaaaaggaaatatagcatattgctgctttagcatgcaggatgtcatctaacatgttggtatttatttattctgtaggaagagtaaccaattgtacactgaaaaccttggcaacggttggataaacagaattgtcataaaactagaagttattacagtttagtagatgaaaca

SEQ ID NO: 123417 - DNA, 573 bp, Homo sapiens
cagttgtatttgcaagtatgcacaatgctcatggatcgaacataaagaagaaattattgtaatgtcttaacttagtgttgtacctagcaaagggctttgcatattgaaaatgcaagcattagttgaatgaataaatgaaaaaaattaatacactggaaaatgagcactgacctaaactagcrtatcagtaaattagcacttttgttctcagtgtaatgttttgcttactgttgttttgattgggttctattaattgataatagtatttattgggcctattaaagatatatgtttagcatctgtttaccttgctaaaagttaattggtgggaattcaaacaccttttggatctatccctataggaattacagacaaatctattaatttgttaatcattaatatgcagccattggacatgtgcatgtaaatatacaaaccagatgctcatgttgtcaagttattgcttgtttctagtttggatcctgagtttccttggccaccctaacctgaacaaaagtgtagacaacagaacagtgaaaatccagtgcctctatgaagtgtacaagtaccaga

SEQ ID NO: 123418 - DNA, 553 bp, Homo sapiens
aatttctgagcataatctttttataaaatttttacaaaaatcttgccttccaacttttgctttccagttgaacctaatcactttgtgggttttgatgatctagcaggtatgaagcactatacattaaatgcagtgttgacaaaggaaattcactagcaagggtttcattaactgaggattaagctaaaaccccttcccagaattgccaataaatgagactctaatctaaaatttcacattaagtttagtacaactaaaacgtgtgtgttcgcayatgtgtgtgtgcttgttgaacgagtgtgtatgtgagtgagggaaaatcccaaaatgagttaaattttttttattatttagttggctgggaaagtacaaatttttcttgtaagtataatgcactaagcaagggaaaatcctacaacttaaacatactcagtggacccatccaagcagatgcatacatatacgtaattgttcatacccaaatataaaattgagagatttgaaaggggaactctttaccaccttatatgggtgggcttaggcctgaattgaa

SEQ ID NO: 123419 - DNA, 562 bp, Homo sapiens
tagtactctattatctattactttattggttagtcactaaataaagtacaaatgaaaaaaaaatgttaaccatcaatcccccatctccttaaaatggtgtgagcatatacacrtaagtactatttgagaaactgtattcaagccattatgacacatttaattcaaccaagtaactactgacaggtcctaaaaaatgtttagtgtcagcttccatttgtacaaagcccaagtgatttcactgaaattaaaagaaattccatttctggccaggcacagtggctcatgcctgtaatcccagcactttgggaggccaaggtgggtggatcacctgaggtcaggagttcgagacctcctggacaacatggtgaaaccccatctctactaaaaatacaaaaattaggcgagtgtagtggcatgcacctgtagtcccggctactcgggaggccgaggcaggagaatcccttgaacccgggaggcagagggtgcagtgagctgagaacacaccactgcactccagtctgggtgacagtgagactccatctcaaaaaaaaaaaaagaaaga

SEQ ID NO: 123420 - DNA, 457 bp, Homo sapiens
atattcgtttaagccttcattagtgttcactgggatgacttcagcaacttaaaaattattttttccactttaaacttgttaggttttatttctcatagcaccctgtggtaagtgacagcactcaatacagtttgcagttttactgtatttcagaaggtttttgtttttaaattgtgttaagatatayaaaatttttgcaaaactgaaactctgtatccattaatcactccctataccacccttcctccagccctaccattctactttctatctttattaatttgactaagtattccatgtaagtgtaatcacacaatatttgtctttgttactggcttatttcacttaccataatgtcctcaaggttcatccatgttgtgggatgtaaataacttcaaaatttgtctaattctacctgccctctcctccaattcatcttacataattctgtcagatt

SEQ ID NO: 123421 - DNA, 635 bp, Homo sapiens
tccaggctataaatataccattccctgcatcagccactcttggaacatttgactcaatagcctttctccttttttatgaaaaattgatactgtgggtagccttgtggttctccatgtcattaagttcagaaataaatgtgctcaaccacaaacttcccatttcgtcttcaaggcagatcaggttttcagtgtgcacgtaagttaagtgccttcttacctgcaaggagcatctttatctctccgggcccgggcagggctcaggccccagcaaatattgcttctaagggtatyatgtctaaaaatgtttccttctctcagaaaggcccagtgtcacttgtagctcagtctggtatggccgtaagtcaaggagtgcaaactcaggcagggacagggaagtaacccaatgggtgttgttggtgggtgttgagggtgggaaattgggagatgtacagcatggggactatagcccacaacaggcctgtgccctgtctaaaggatggcagctctcagcccagctgatggttgccaggcaggaatttggcccaattttgttacatgctgtttgttttccctacccaaagcaacaaatttgaattttcatgtgctatttctcaatttttaaatgttgtctacta

SEQ ID NO: 123422 - DNA, 581 bp, Homo sapiens
atttggtcaagttctattcttgcccgagtctgggcgtcctgtctctgtattcaagaagaaggaattgataatttttaaccttaaacactttatgatctttgaggtaacagacacttctgagctctacaaatagtttgtgactagagggctgtttgggagtgtgaaaggaaaatatcttgggctcccaaaattactaaggaaaactcaagctgtaaactctttaaggcaaacctgcctcccattctaatcaaagttatccctctgctgagacagatgcatatctaattgcctcctttggaaaggcyaatcagaaatcaaaagaatgcaaacatttgtgtctcacctatgtgttatctggaagctccctaccagctctgagttttcctgcctttgctgtaagttgtccctccttcccagacggaaccaatgtacttcttatgtatatggattgatatctcatgtctccctaaaatgtgcaaaaccaagctgtgccttcaccaccttggacacattgtcaggacctcctgaggctatctcacgggcacatcctcaaccttggcaaaataaactttctaaattaa

SEQ ID NO: 123423 - DNA, 582 bp, Homo sapiens
ttctagatctttctactgaaacagtctacccaaatgagaagggatcagaaaagtaattccagcaatatgactaaacaagtttctataacgcccctaaaagataacactagctctccaggaatggatccaaaccaagaagaaatctctgaattgccagttaaagaattcagaaggttgattattaagctacttagggagataccagagaaagatgaaaaasaacttaaattaaaaaaaaaattcaagatatgcattaaaacgtctccagagaaagagatattataatgaaaaaacaattacaacttctggaaatgaaaaacacacttaaagaaatgcaaaatatgcaagaaaatttcaacaatagactcaagtagaagaaagaacttcagagcttaaagacaaggctttcaaattaacccaatccaacaaagacaaagaaaaaagaattttaaaaaaataaagcctccaagaagtttgggattatgctaaaccaccaaacataagaataactggtgttcctgaggaagaagagaaatctaaaagtttggaaaaattctttgagggaataatcgagaaaagctt

SEQ ID NO: 123424 - DNA, 472 bp, Homo sapiens
gactgagtctggacctttacagggtgggtctagtaatgcagaaatgtatgcggctgtgtgtatgtatgtgtatgaatgtgtgtgtttgtgtgtgtgtgtgcacgctttgtgaactttaacatgttcttaaggcatgtgtcattgagtctgggaaccattgctagagagatcattgtatagatggggaagctgagatctgcaccaggccaggacgtttgctgattttgcaattgtcacatgctgaaggacggcactgtgagctttcagagccatatgatccttgcaaatctctgtggagagggagtgagctgtagtcttaycctaggggaccatgttagcctggtctaaacttaaaccttctcacttttttcaagctactttatgtgtttgtctgccctccgaagaactcttcctctctgggagtgaaaacaccagtaggtataaacttcctggaagacaaattggcttccaa

SEQ ID NO: 123425 - DNA, 530 bp, Homo sapiens
gaaaccaccatcttgtgaagagaccagaaaacagggcagatgttaaaaccatgtgtcctgaggtgtgaggtaagctcagagaacacctgagccaaaatcaggtgatctgggacaagtacctcaaaaaagctttaatgattggaatccaagggcgcaccgcccagaagcagaatgaaccccctccaatttgctgcaaagtgcccaagttcacctttcattcttgccccagggatcggcagcccagggaaacagttagctrtgctcttgtctttgcccttgtctctcgggtgtacttgtcattcccacctgctgctgtgtttatattcttctgcgaggccatcagcttctcggcacaggggctgaaggtgatggaagtggtggctgctgctgctaacatcaagtgtgagctctcagagctaattccactaggagatactcacacccacctcccaggggtggcacctgggagtgtccaggaggaagagtcaagcccgaagaatgcctagaccattgttaaggagctgctcctc

SEQ ID NO: 123426 - DNA, 591 bp, Homo sapiens
aatccaccaatactaataactccacactggatatccagagctaggagaaaatacttcatgccctgtagatttacaggtgaattttgggccatgtgctagggagaattgtgttctatttctctaccttttactaactatgaggccttcagcaggcataggatatagcaaaagaaattcccccataactaacargtactctggaactgtcctttctacaatgtgtcagccgcctccagaaatcctgcatggtgagcataccctaagccatcaggacaactttttacctgggcaggaagtgttctacagctgtgagcccagctatgacctcagaggggctgcgtctctgcactgcatgccccagggagactggacccctgaagcccccagatgtacaggtgcctctctttccccctcacatggaagtcttactcctgttgttttattttttcttctcgtgaaatcctgtgatgacttcctgggccaactccctcatggccgtgtgctgtttccacttaatctccagcttggggctaaggtatcctttgtttgtgatgaagggtgagtgtgacccagtgttgagaccaaggactc

SEQ ID NO: 123427 - DNA, 591 bp, Homo sapiens
aatccaccaatactaataactccacactggatatccagagctaggagaaaatacttcatgccctgtagatttacaggtgaattttgggccatgtgctagggagaattgtgttctatttctctaccttttactaactatgaggccttcagcaggcataggatatagcaaaagaaattcccccataactaacaagtactctggaactgtcctttctacaatgtgtcagcygcctccagaaatcctgcatggtgagcataccctaagccatcaggacaactttttacctgggcaggaagtgttctacagctgtgagcccagctatgacctcagaggggctgcgtctctgcactgcatgccccagggagactggacccctgaagcccccagatgtacaggtgcctctctttccccctcacatggaagtcttactcctgttgttttattttttcttctcgtgaaatcctgtgatgacttcctgggccaactccctcatggccgtgtgctgtttccacttaatctccagcttggggctaaggtatcctttgtttgtgatgaagggtgagtgtgacccagtgttgagaccaaggactc

SEQ ID NO: 123428 - DNA, 591 bp, Homo sapiens
aatccaccaatactaataactccacactggatatccagagctaggagaaaatacttcatgccctgtagatttacaggtgaattttgggccatgtgctagggagaattgtgttctatttctctaccttttactaactatgaggccttcagcaggcataggatatagcaaaagaaattcccccataactaacaagtactctggaactgtcctttctacaatgtgtcagccgcctccagaaatcctgcatggtgagcataccctaagccatcaggacaactttttacctgggcaggaagtgttctacagctgtgagcccagctatgacctcagaggggctgcgtctctgcactgcatgccccagggagactggacccctgaagcccccagatgtacaggtgcctctctttccccctcacatggaagtcttactcctgttgttttattttttcttctcgtgaaatcctgtgatgacttcctgggccaactccctcatggcygtgtgctgtttccacttaatctccagcttggggctaaggtatcctttgtttgtgatgaagggtgagtgtgacccagtgttgagaccaaggactc

SEQ ID NO: 123429 - DNA, 574 bp, Homo sapiens
agttaatcattgtttgatgtactaagtcttttatgtacacataattccgataaacttgggtatctcttcctaaattcatatcaaattagaagcatcaagtgcttttagggaaggaactgttctaaacagaagaaaagaaggaagaaatgatggctaataatctggaagaaagaaaaaaagcctctttggcaccatttaatctgtgtaaaaagagccttaccaatgtagtctgatgacaccactggaaatttggtattggtcctgatgataacagtcttgaatcaccaagaaacatttacattgctaaagatgatagttcatgactattaaagttcatagatttccttggaacttatggtctctgatggccaaaattttgtctgtcttgaacctcattgtcaacccaggaatcttactatgcctgatttaaagtagacaaccaaatgggtgtttgtaaaaaaattaaaaaaaattactttccaaattcattatgaacrtagctacctggatggtccaaaaacactgtctttgggcttttgcaatagactgtaatttaggtctcacaacagttagt

SEQ ID NO: 123430 - DNA, 590 bp, Homo sapiens
gagatcttgaggcagaaatgaaaggtgaatgacacacctgccctggacacctgtgcaccttcccagttccagatcaggcagtacctagctcaactgagaaaaacaagacaagggcctatgtgtgtctcaggaaaggttaaaagctcagtgccaatgcaagggatttttacaagcaaaagtctcattattaatgaggccagaaaaccaaaatgacartgatctttgatgatctgtactgacacgcaggggaggtgagttaatcagaaacacacatttactggcaccccctttgtgcccagtccctgctcctcgaaactgatgtttgtatttcagagtttagctgtctttgagtttgctgcagtgaaaagaaatatcccaagtgtgactgggaagagaagacccgggacaggccagaaactggagtgaggaagaaagaaccacagaatattaatgtaatgaataactttcaagtcctatctggtccgtgtcctggcaaagtcccttggggtctctcccctgctttccgttcatcaggatgactgagctcagtaattgtaacaaagggagtgtagtaggcaaggggacaaaac

SEQ ID NO: 123431 - DNA, 590 bp, Homo sapiens
gagatcttgaggcagaaatgaaaggtgaatgacacacctgccctggacacctgtgcaccttcccagttccagatcaggcagtacctagctcaactgagaaaaacaagacaagggcctatgtgtgtctcaggaaaggttaaaagctcagtgccaatgcaagggatttttacaagcaaaagtctcattattaatgaggccagaaaaccaaaatgacaatgatctttgatgatctgtactgacacgcaggggaggtgasttaatcagaaacacacatttactggcaccccctttgtgcccagtccctgctcctcgaaactgatgtttgtatttcagagtttagctgtctttgagtttgctgcagtgaaaagaaatatcccaagtgtgactgggaagagaagacccgggacaggccagaaactggagtgaggaagaaagaaccacagaatattaatgtaatgaataactttcaagtcctatctggtccgtgtcctggcaaagtcccttggggtctctcccctgctttccgttcatcaggatgactgagctcagtaattgtaacaaagggagtgtagtaggcaaggggacaaaac

SEQ ID NO: 123432 - DNA, 582 bp, Homo sapiens
cattcgggtttgatcttaaaggcagtagtggggcagggagggttcttgaggaaggagatgatgtaacgaaaagttgtgagaggaagactgtgtggtcagttgcataaagaagtgctgcagagggggaaagcctgcagtccaagagcagccgggaaagagaaggtcattgcaatcatccggcctttgccaggaggaagtctcttgccgggtagatgaaacacccacaagtcttctccctagtttaccacatgatctatctgatgcaaaagataggaaggccatagstaggagcatgagaagccaaaatgtcttgcattgccccccagtccagggtacacagcccatctcagttgctggggtggggtgggggaaaatgagagtcccatgggagggggacctcacattgtagctctttctgtctctgccagttacaggaagaagctctgaggttttgcttctctgagggtgacccacatgccactggcatcagaaaatagaggaagatcttcaaaatgtgcattcccaggcccagctccagcactgctgaattgaaatttcttgtgggtggtgagaagatcccag

SEQ ID NO: 123433 - DNA, 624 bp, Homo sapiens
cataccaggcagaggaagtagcatgtgcaaaggccctgtgctagaaggagcagagtggcagagggaaagccactgtgactaggactcagagatgaaggatgggcagtgaggctgaagacagaggtcaggccacacaaaattgtgtggccataytgaagagtttggatttgatactaaaagcaatgggaagcctttaaagccttttaagaagtagaaaaatataattttgattttaaattttttgattaaaaatatcttgctgtgtagagaattggttgaagatcaccagtcaggagaccagttatgcagttaacagtaatcttgatattgttatcatcaaatagcatgtttacaattcccaggcatagttagccttttgcttggtattctttaaaaagagtaatttctatagacatagtttctggcctcccagagtctaccccctaaaaaataaaaacaaaatttaaaaaatggtaggttcaaatagaataacatgcagacacataagatagatgaaaatttgagaaatgaatccaggtaaaacccagatcaatccatcaattagcacataaaggaaatataacttacttgaaaacctactagataagccagacatatggcacg

SEQ ID NO: 123434 - DNA, 587 bp, Homo sapiens
attttactttcttgaatctatcacggagatagtttctgatcctgttaataatttgcaccatctagaattcttatgttaaaaacattaaaactgcagctgggcgcggtggctcacgcatgtaatcccagcactttgggaggccgaggtgggcggatcacgaggtcaggagatcgagaccatcctggctaacacggtgaatgaaaccccgtctctactaaaaatacaaaaaattagccgggcgtggtrgcgggcgcctgtagtcccagctacttgggaggctgaggcaggagaatggcgtgaacccaggaggcagagcttgcagtgagccgagatcgcgccactgcactcccgcctgggccacagagcgagactctgtctcaaaaaaaacaaaacaaaacaaaacaaaacaaaacaaaacaaaaaacattaaaactgcaagaacagtgactattaaacccacttttaactttctctttctactctgttcatttcacttggaccgtttgtcctttctgcccctccaaaggattagttcaaattaatgtctcactttaaatactctgatccaccctgattttgttgttctc

SEQ ID NO: 123435 - DNA, 589 bp, Homo sapiens
aaacgcttcagttatgaaagtgatgttaagaaggattttatgaaaaagcattcagtatcatttgattttaaagtttgtaattggttatgctatacctacttgactacctctaatacctattggctaaggcacagtggcatgtgcctgtagttccaccttttcgggaggctgaggcaggactgcttgaagccaggagtttgaggcctcagtgcactatgatcacacctgtgaacagccactgcactccagcctgggcagcatagcaagtccccatctctaagtaatatttaagaataatacctattgcttagcttatcttcacccataggaccctgaattgcctggaagtgttttaaagtgggaatctagtcaggtgaagatcgaaagcaaacagaagtcgctgtgagtaggtaagtacaagaaatagatttgaggtgaaagaaagagaattttggaggctgggartgaatgactgcagctgctaagctactttgcactttctagtctaggtctttgggcagtgatactacatataggtattcagctgccatccagaaggctatggaatcactccaaaggcttcagtagt

SEQ ID NO: 123436 - DNA, 549 bp, Homo sapiens
ggaggctgggagtgaatgactgcagctgctaagctactttgcastttctagtctaggtctttgggcagtgatactacatataggtattcagctgccatccagaaggctatggaatcactccaaaggcttcagtagtgctctgacatcattcatgactctcttctctatcatcttatatctatatagtcttataaaaaccctaccaaactgttcttgttaagagtacagtacttggtggtagaagcagaaaacctttcctcttaattaaccatacattcataattgttaaagtcagagaaaaataaattattcaacactgacattttattttctgaagttttatcatttttacaaaacaaaacaaaatgaaacaaaaagcaggtatcaaaaacagcaaagagtttatagaatttctgcaccagtttgcacataagtcagtgattacaaaactggcatccaatgtaaatactaagcacaagctcacttccctcttggtcaggtggtttgttttagagctactcgatatttataactttttataagcaccgg

SEQ ID NO: 123437 - DNA, 534 bp, Homo sapiens
ctttgtttctcctaataactttgctagggccaataaatgtaagcttgacttttagcaactgttttactatatactgcaaatagagctgcttaaaaagcatattaacaaagccatttgtcaaatggatttgaaaggctttttaaaagtcaccaatgttaatgttttaaaaattgyggggtggagagaaacagtgttggaacagttcagcattttgttttgagattaagtgcaactattgacaaggggattcctgaggtccatgcctcataaacactcagagtgctgtttaccagggtctctggtccctgccagaatataatctctgactaggtttgatctaaaaggaggattctatgcacctgtggcaactggcacttaggcggtgtcttggtgttaacagatttgaattcacatcttctgagcctcaaattgtactcagtgggcgaatacaggcatgcttttgctttggttccatagtatggtaagattaatattaagaaaatagaaggtataacttaattacctttttttctg

SEQ ID NO: 123438 - DNA, 544 bp, Homo sapiens
ttcatgcctagcttctggtaatactctgaacatctatgcaaatgaacagcatagacttgatgcctgtagcgaagtattattgcacaagacacaagcactgccaaagctggcctgactttcacgacaaataataccccatgacttgtcaaactgaaatcatctggctactggcattttttttcctcaccatcaaaaatgatctgccttgataatccctgcmattatctcaatacctttgatttgtttaaaacagcaagaaagcctgaattcacatttttttatatcaggaaaaaaaaatgaaagtttttacattaaggagaaatttcaccaacaatttggtaataatgaagttcctctgaatttagaaataataaagcaaaatattaaaagtcaccaaacaatccatgtaagattttgctgccaggcaaaaaaggaatcaaatacaagagaccattaaatacataggagatgaatgttatacagatggatggcagatgatagatagatagatagatagatagatagatagatagatagatagata

SEQ ID NO: 123439 - DNA, 544 bp, Homo sapiens
ttcatgcctagcttctggtaatactctgaacatctatgcaaatgaacagcatagacttgatgcctgtagcgaagtattattgcacaagacacaagcactgccaaagctggcctgactttcacgacaaataataccccatgacttgtcaaactgaaatcatctggctactggcattttttttcctcaccatcaaaaatgatctgccttgataatccctgccattatctcaatacctttgatttgtttaaaacagcaagaaagcctgaattcacattwttttatatcaggaaaaaaaaatgaaagtttttacattaaggagaaatttcaccaacaatttggtaataatgaagttcctctgaatttagaaataataaagcaaaatattaaaagtcaccaaacaatccatgtaagattttgctgccaggcaaaaaaggaatcaaatacaagagaccattaaatacataggagatgaatgttatacagatggatggcagatgatagatagatagatagatagatagatagatagatagatagatagata

SEQ ID NO: 123440 - DNA, 683 bp, Homo sapiens
ctactcactgcttctatgagttcaatawttttggattccacatataagtgagatcatacagtatttttctttttgtgcctggttgatttcacttagtataaagtcctccaggtttatccatgttgttgtaagtcaatagcaaaaacaaaacaaaacaaaacaaaaaacaaaaaaaaacaaataacccaacttaaaaataggcaaaggaactgaaaatatatttttccagagaaaaagatatggaatcaacctacgtgtctatccacagatgaatggataaacaaaatgtgaggggtatgtgtgtgtgtgtgtgtgtgttgtgtgtgtacacaatggagtattattcagccaccagaagaagaaaatttttaaagagttattgcaaaagattccttactagtcttctagtttctcattacccctacatattggctcgatattctcaacacagtcgccgtagcaattattttaaaatgtaagtcagatcatatttttcctctgttcaaaatctgaactggtgccacatttccccagagtaaaaaccaaagtcttaaaactttctaaaaagtttaatataatttagtcttccctcatctttctgacttcattttctatttctatcccccttactaattccacttggtcttctttctgttagtcaaacataccaggtatattttcac

SEQ ID NO: 123441 - DNA, 629 bp, Homo sapiens
caagggggctcaagcatgcttattaagaggcaaaatggtggagtttaactggtagataaccttcctctgggaacattcaactggtaagaaaaaaatgcctcaagtgagcacgtgcacaatttcaataaacacactgtacatgcagcccctcccaagtgctggcaggccactgcacttgtagacagctcaccccaagggaagaatcagggaataaggaatggaagatcctggatgtacaccaacatataaaaccctaagtcaaatgtcaaactgcacttgagtctctcaagttgcctacttggccctcttccaagtgtactttacataaactttcgcttcwgctctaaaacttgcctcagtctctcactctgccttatgctcccagttaaattctttcttctgagaagccaagaattgaggttgctgcagacttgtgtggatttgctgctgctaacatcataaatatcaaattctgttccaatctaaatccagctacaagccaggcacagtggttcacaactgtgaaaatcccaacactttgggaggccaaggtgggcagattgcttgagaccaggagttcaagatcagcctgggcagcatagcaagaccctatcactacaagattttac

SEQ ID NO: 123442 - DNA, 629 bp, Homo sapiens
caagggggctcaagcatgcttattaagaggcaaaatggtggagtttaactggtagataaccttcctctgggaacattcaactggtaagaaaaaaatgcctcaagtgagcacgtgcacaatttcaataaacacactgtacatgcagcccctcccaagtgctggcaggccactgcacttgtagacagctcaccccaagggaagaatcagggaataaggaatggaagatcctggatgtacaccaacatataaaaccctaagtcaaatgtcaaactgcacttgagtctctcaagttgcctacttggccctcttccaagtgtactttacataaactttcgcttcagctctaaaacttgcctcagtctctcactctgccttatgctcccagttaaattctttcttctgagaagscaagaattgaggttgctgcagacttgtgtggatttgctgctgctaacatcataaatatcaaattctgttccaatctaaatccagctacaagccaggcacagtggttcacaactgtgaaaatcccaacactttgggaggccaaggtgggcagattgcttgagaccaggagttcaagatcagcctgggcagcatagcaagaccctatcactacaagattttac

SEQ ID NO: 123443 - DNA, 607 bp, Homo sapiens
gctgcatccaggccatagtaactgtggtcttcatgcaagctctcgtactacactgatcttagaatctgtgtgctaggggtacaacccagcatgaaaccagctttggcagccatgggagtgcctgtgttgccagcactcccaactctgggcaatgcagcacagagagacactccttccaactggggaagaaaagggaagagtacaagaaattttgtcttgcaaccaggtaccagcccagtcacagtaaagcacagcattgggcagaatcccaaagcccctgattctgagccactgttccatacawccctttgggccaggccagaagggaaagagaggtagaaaaaaatatattagaaagtttattcaaagaaatagtaacagagaactttcaacttagagaaagatataaatatccaggtataagaaggtcaaagaatacaaagaagattcaaaccaaataagactaccccaaggcatgtaataatcaagctccaaaggtcaaagttaaagggaaatccttaaagcagcaagagaaaaaaagcaaataacatataaaggagttcctatacatctggcaacagactgctcagtggaaattttataggcc

SEQ ID NO: 123444 - DNA, 528 bp, Homo sapiens
agctttggcagccatgggagtgcctgtgttgccagcactcccaactctgggcaatgcagcacagagagacactccttccaactggggaagaaaagggaagagtacaagaaattttgtcttgcaaccaggtaccagcccagtcacagtaaagcacagcattgggcagaatcccaaagcccctgattctgagccactgttccatacaaccctttgggccaggccagaagggaaagagaggtagaaaaaaatatattagaaagtttattcaaagaaatagtaacagagaactttcaacttagagaaagatataaatatccaggtataagaaggtcaaagaatacaaagaagattcaaaccaaataagactaccccaaggcatgtaataatcaagctccaaaggtcaaarttaaagggaaatccttaaagcagcaagagaaaaaaagcaaataacatataaaggagttcctatacatctggcaacagactgctcagtggaaattttataggccaagagaaagtggaatgaca

SEQ ID NO: 123445 - DNA, 584 bp, Homo sapiens
actcatattttaactcacttttggacttcttaaagtttgaactaactatcccttcaagaaaaaaaagaaaaatcttacaatgtacttcttagagactgattatctatttccataaccctcagtcatagacatttctatttacactaggctctgtaaattgaagaattttcttgttattatccagtaatcaaaggtggttgggttacctagtatggtgcctcaacatatcaagcagttcactgtgcttattctgttcatgcttcgaagtttagcagtgctaattagtaggtgttggcattataatcaaagaatttcaagtaaatatcgaacatcagacttgaagtataaattatccttaagaataaggcgtttaagaaaatattatctaaagctgtaaccaacagttggttttgtgaaaatcatcaggttctagatgtttctgcactctgacgaacactgaagatagtgggccacatrtttaggcattgtcaccaatgttgtaggtaataaatgctttgtgtttactgtctccatgtggtttattatcaaatggataccatctgttggaaccattttatactaaa

SEQ ID NO: 123446 - DNA, 446 bp, Homo sapiens
cacctgtagtctcagctactcgggaggctgaggcaggaggatggcgtgaacctgggaggtggagcttgcagtgagccgagactgtaccagtgagccgagactgtaccactgtactccagcctgggtgacagagcgagactctgtctcaaaaaaaaaaaaaaaaaaaaaaaaaaaaaagggtatgcaaataggaactatggaaggcaatgtggtgtagttatagctgagggatattacaggggagtaatgagcagcmccacttggtagaaattgttgaatgtgagaccaagaagtatgattttactaggagttttcttcaaattgctataaaaagtcactaaggtttactaatgccattaaggagaggaaatgagaaaaattgttcttgtcaaatctgtagtcatctccttaattcttatggtctacttacctgtttttttctgtac

SEQ ID NO: 123447 - DNA, 554 bp, Homo sapiens
aattaaaaagagaagctcaatagcatttataccaaactttgaatgaaagcacaaggagaaatttcctattcagtaaaaatgcagtcagaattttatttactgcagtaaaatctcaattaactcaattaatcctcaagaaggaaggatttagttaatgtaattttcctgccaattaaaatttaaatctagtatccccttacactaattctaattgttagatattttattttcttagcttagtaagctgagtaaaggaaatataattgaatcattgatcatttaggattttcactaggatcattaggcagatcagttctcatgctgtaatagaatagaggcaggtagagcaggaatgtttaaatgagtagtcgctttgctttgaccctaggactttagacaggcacattccctctgtctctgtctcgtgcactctgtctctctcttaastaaatctctgaaataagcttgctttattctccctcccctttggtttttattaatgtatttaatgaaagtactattatttgcaaatgtctttaaggtaattttaaatt

SEQ ID NO: 123448 - DNA, 504 bp, Homo sapiens
tgagagtctatcatttacttcggggaatcccagaagaaattaaaagatgaaggcagaggtaggcttttctctttgttgcctctcaggatgccggttcctatcaccttcctgtttgatgtgaggtatatacagagaacagtgaagcctacattaacattacatattctcaaactttgacactaaagaataatgtgaaaattacctgcatatataagttgccatgtttctgacaaatacactaatttcttctgctctttataatttatttttagaatgctttggaaaaaatattttggagaatgtgtttatatattcctgagaaagcaacagaaaagggactggttgtagaggaagatggtactaattatttaaaaagtagtatttaaattaagtacatgcttatgttggatgtctatctcacataactgccaagagaatgrttaggcagctacgggtgtcccaggtcactgctctggagaatttcctcgggtttaaagtgaattc

SEQ ID NO: 123449 - DNA, 574 bp, Homo sapiens
tttattgaatacttataccatatgaggtactatactatattctcagaatgtaattgtgagcaaaatagatatggcctttgttttaatagagacaaagggcgacaaaaacaagtaaacacatgcataaaagtatattgagttcaaaatatattagggtgaatcaggtgaaattactgacatttgaccaataaaaatgtcaatttcacatrgttggcctaatattcataaattttgataactgctaagtcacaatagaacacatgaaaagcacaggagggatggactgacttatttcgtggtggaagatcaaagaaaatctcttaaggaattaatatatgagctgagcataatgaagtagacccagctgcattaaggttgggggataaaaaattttctagacatacaaagtgctcattgtgctgttcgataattacctgttttaattatttccactaaattgtaagcattgcaatgccaggggttgagactgtttgattcctttctttgaaataggaggtatgcaattaaaagcttatttaatgaataaaggaatataggaaaaaatgaatgaatg

SEQ ID NO: 123450 - DNA, 611 bp, Homo sapiens
atacctatatataacatatataacatatataacatatatatatatatatatatattccatgcagcattaacattttcaacatcaaatcaattttaaggacagtcttattttattgcacaccattgtgctcttttttattgtactttaagttctgggatacatgtgcagaaggtgcaggtttgttacataggtatacacatcgttgtattcttaaagtgctaatactagacctaattcagtttttttttwaaaaaaaaactattttccacaccgtaaacatctactctgtgagatgatgcactgagagatgatcgagccgtgtacagctgttcagtcttatccaaaatggcctctgaatgctgtgtgtttagagatgtctgtctgtttccctggtgttcataaacacattttgaggatacctttttgccctctttacttctactttgacttgcactgaggtagttctttaggcttttgtctcaatgaaatcaagctgttcatgcctagggtgatgatataaatgactggccaaatgaggatacttttgaatggaaaagagtactattaataattatgcagtaacaatatgaataaaggagggttaccccagg

SEQ ID NO: 123451 - DNA, 533 bp, Homo sapiens
aaatgctggtgaggatgcagagaaaaggaaatgctcatacactgttgctgggaatgtaaattagtacagccactatggaaagcagtatgaacatgcctcaaaaaactaaaaatagaactaccatacaatccagcaatctcactactggatatatatagccaaaaagaaatgtaatcagtatattaaagagatattggcactctcatgtctgttgcagcactactcacaataaccaagaagtggaagcaagctaagtgtccatcaatggatgaatggataaagaaaacattacatacrcacacacacacacacacacacacacacacacacacacacacaatggaatactatgcagccataaaaagagttaaatcctgccatttgcaacaacatggatggactggaggtcattatgttaagtgaaataaagcaagaacggagagacaaatgtgggggctacaaatgtgggtcttgtggaggtagtgaatagaatggcggttaccagagactgggaagggcaaaaggagggagta

SEQ ID NO: 123452 - DNA, 533 bp, Homo sapiens
aaatgctggtgaggatgcagagaaaaggaaatgctcatacactgttgctgggaatgtaaattagtacagccactatggaaagcagtatgaacatgcctcaaaaaactaaaaatagaactaccatacaatccagcaatctcactactggatatatatagccaaaaagaaatgtaatcagtatattaaagagatattggcactctcatgtctgttgcagcactactcacaataaccaagaagtggaagcaagctaagtgtccatcaatggatgaatggataaagaaaacattacatacacrcacacacacacacacacacacacacacacacacacacacaatggaatactatgcagccataaaaagagttaaatcctgccatttgcaacaacatggatggactggaggtcattatgttaagtgaaataaagcaagaacggagagacaaatgtgggggctacaaatgtgggtcttgtggaggtagtgaatagaatggcggttaccagagactgggaagggcaaaaggagggagta

SEQ ID NO: 123453 - DNA, 601 bp, Homo sapiens
actcaaaataacctaagtgtcaatcaataggggaatggttcaaaaagcagactaagatattacaagtagctcatatcgatagctctatatgcacaaaaaagtggaataacctccaagtaatacttttcagatatatatatgtaatatatattagagagcaaaagcccaagtgagacagacatrtgtcttgcatactaaaaaataacggggaaaaatatgagattgtttaagtggaagctcgcatgcccctacataatcaaatgtaatgccatcatgtaattatgacttataaaattttactaaagtatcttagataataccaattatttttcaagcaagatataatatgaattactggctctgggtgaaatagctgacatactcctagtttttgagggttaatcagactaaatagtttgaaatgtactaatttaattaatcatccatacttttactaatagtttgaaggaaatccctgaactctcatacaatatggaacttatccacatttaaagtgtatcttcagttctcccaatgaagggacctttttatttacaaaaagaagttgtttctaacatattcttcttacaagtgttacttt

SEQ ID NO: 123454 - DNA, 595 bp, Homo sapiens
caaaaaaaaaaaaaaaaaaagaatgttagccagtcattttgtctctcagtttgggtgtgtttgttgtttcctcatgattatattcggtttatgcatctttggcgggrataccagagaagtgttattatgtgtttcaatgcatcctatcagatggcaccattagaaatgatgttaaccttggtaacttggatatgacggtatcaggcaagtttcccaattctgaagttgctatagtttttgtaatcaatattttggagagatactttaagatgatttaatatgctggttttcattaaacatgcacccactagatttataatccattgatgattcttgtctgaattattacttccaaaggtggagacaaatgctattagtaattttataaatctataattccttttgcacttactaattgtcatttactatttcaataacagctttccctactcatccatttattcatttttgtatataagtattcttattttaatctatgggttattaatccttgttgtcattatttatttaatgctcaaatcgtcctgcattaagaagtcttggaaactaatatttagagaccaacatttggaca

SEQ ID NO: 123455 - DNA, 529 bp, Homo sapiens
aaagcaaggggtatattgagtttcagtgactatttcagtttcacaaacaccccatgaaagttttaggcatattattttgagatggttgcttccattatgatgtgattttctagggtcagatgtctcctgctatgaatttggatgcttctagagcagaagtttctctttatgaaaacatcaaaattatctaagttttcatttcaataaagtccgctcaatccaagactccagcaaatataacattttctatgaaaccttcacttattttcacaggcggggagtgacaagggctaaggagagaaaggaggacatggggacagtgtgagtaaggacacgttcatgtacttatgagataagcggtgggtaaagtacatgtgttgtgctaagacatacagtgcccaaaagataagctgtgttgcatgtcatgacttggtgtgatttwtgttgtataacctatgtgtaatgaccatacgttgtgtaacgaccatatgttgtgtaacctgtgtggtgtaggtgtgcatgtggtagt

SEQ ID NO: 123456 - DNA, 549 bp, Homo sapiens
cagtggacacggcacacgaaagagaagaaacctcagattacttcaaggtgtttcgcctgagtgactggcaggtggagttggacttcaccaagatgggagaactacaagaggggcaggttgaagtggaaaggatcaattggatcaagtggaattgaacatattcaatttgaaacatgttaagtgagcaatggagaggaaasggttaatgtcagggctgcgaaaacctggtctccctggaaatgtttcttaagaaacagcagagttaagataaatggggaatgtctcttccaccctttgttgagtggctctgcacctgggatgggggagctgtgggctgtcatgtaggtcttagaactgcaaaggacttgaataatataaaacatttataagaaaaaggaactatgacttctctgtgtcaaggtgaccccataaaccctgactctcatccacagcagccttgtacaccccaagtgggagacagggcaaaaaggtctcgtatgtgggtcactaccgggccccttgataagatgaagatgctgtgcttgctga

SEQ ID NO: 123457 - DNA, 549 bp, Homo sapiens
cagtggacacggcacacgaaagagaagaaacctcagattacttcaaggtgtttcgcctgagtgactggcaggtggagttggacttcaccaagatgggagaactacaagaggggcaggttgaagtggaaaggatcaattggatcaagtggaattgaacatattcaatttgaaacatgttaagtgagcaatggagaggaaacggttaatgtcagggctgcgaaaacctggtctccctggaaatgtttcttaagaaacagcagagttaagataaatggggaatgtctcttccaccctttgttgastggctctgcacctgggatgggggagctgtgggctgtcatgtaggtcttagaactgcaaaggacttgaataatataaaacatttataagaaaaaggaactatgacttctctgtgtcaaggtgaccccataaaccctgactctcatccacagcagccttgtacaccccaagtgggagacagggcaaaaaggtctcgtatgtgggtcactaccgggccccttgataagatgaagatgctgtgcttgctga

SEQ ID NO: 123458 - DNA, 594 bp, Homo sapiens
tggcctcttggagcaccaccacaatgtccccccagtacctatcctgatcttcaagcccctggaatagcagggttcagaggagaaattgcaggttggggagaggggaggtgtgctcctgcagagacgatctggatttctttgtgaggtcagatgtttgggcatagtcatacttcttgtgttgggactttgatggggagttggaagttgaagtgggagacggcgggtggaaaggaaggcagaaggctrtaggagagcgaattgctgttccaatgaggctgtgaactcattgctttctgtgggaagaatactcttccctgggcttgctgttgatgggagagtctggtaaacagagtgctcagaacattttggctggagttagagctcttttatttgctttcagagtgtttaacatggttttctggaacctccataatttagaggattggctttggtagcttcatagtgagaaggcgatgaagaggtttgagattgatattagggagggaggaaggtgggaagggaggaagggaaactattatataatgagcaggtatgatgctaggtgctttcaaatcatttactcttgtgtaaccc

SEQ ID NO: 123459 - DNA, 583 bp, Homo sapiens
acgaacttcctgatgccatgtcacaaaattccctcttctccatatcttcagatagaaattaggggagaattccttctgatcatcactgcccagtcctttttgcaggttgtgacscactaatgaattatgaaacccagtatgtgggtcatgaatttaaaaagaatgaaaggaaatagcgtagaaaatattagaatgcaatacacatagtgaaagtaactattcttttgtgaagcttttcttatattttgtgtgcacaatgcaggctgagtcacaaggtaaattacatttctttcttgcagtaaaaataccccatcaccacacctctatagcatgttgtaagtggactttccaatgtcctaaccacctgtgctttgctttttcttaaaggtatgcaaaatccagtcagatcaagactgtatcaagcagcaagatattttttaaaggaagtagatttcgatataggtgggtaccaatggttccatttcagtgagggggtggggatgggcagccacttaaatttcaaaattctgcttgcaaataagtggcctttggcttgtgcctctgtttgagtcttccatttcta

SEQ ID NO: 123460 - DNA, 583 bp, Homo sapiens
acgaacttcctgatgccatgtcacaaaattccctcttctccatatcttcagatagaaattaggggagaattccttctgatcatcactgcccagtcctttttgcaggttgtgacccactaatgaattatgaaacccagtatgtgggtcatgaatttaaaaagaatgaaaggaaatagcgtagaaaatattagaatgcaatacacatagtgaaagtaactattcttttgtgaagcttttcttatattktgtgtgcacaatgcaggctgagtcacaaggtaaattacatttctttcttgcagtaaaaataccccatcaccacacctctatagcatgttgtaagtggactttccaatgtcctaaccacctgtgctttgctttttcttaaaggtatgcaaaatccagtcagatcaagactgtatcaagcagcaagatattttttaaaggaagtagatttcgatataggtgggtaccaatggttccatttcagtgagggggtggggatgggcagccacttaaatttcaaaattctgcttgcaaataagtggcctttggcttgtgcctctgtttgagtcttccatttcta

SEQ ID NO: 123461 - DNA, 609 bp, Homo sapiens
tgtgagccacctgggcatagcagccaccacagcagacactctgaggcagcatttttaccgaacacaagcacctgtgtaggggtcacgagtgggttctaatcttagctgtgttgtttgccaactgtatggccttgggtaaatcacttctcagatcatcagcktactcatctataacatgagatttacaacatcactttgcccaacttctaggctttgttatgagtattaaagtgctttaaaaattctaaagtgccatacaaatatgaggtgttgataatattactaccatctcttatccaaaaatgaaaaactggaatatgacagatacattcacattaaaatccctccaggtggagtttttagaggctggcactacttcttttaatttcaaggagggatataggaactccaggagtcactattttatgctaccatttttgagtcctgagtctgcctatataagcatcttttagttgagttacataatgtcagtttcctcacctgtaaatatggtatttttcttgcccatcttacatgcacaatgagaaaaacaaatgggataaatatattcaaaccacatttgccccagtattagaatataattgtagt

SEQ ID NO: 123462 - DNA, 425 bp, Homo sapiens
tatttcaaaatactgtttttgttcttcattggtatttggagagagacaggcagagaagtggagagaaggaagtcggaatcccaggcatagtgttttcacagagtaaagtgatcctgacctcctctccgtgatcctgacctccatgccgacggctcggtcccatgctactgctctgtgctttcagctgcttattggacacctccacctggagggcacataacagctcayatttaacgcatcaagcttaatatgtttacaactccactcatgacttcttttttctccaaaacccagtctcaaacctgctcctgctgacttggttgatgacatcactatgtacacagctgtcccagcaagaggcctggaagccacccttgccttgttacccttccccacactccacgtctactgagacaccagagtcc

SEQ ID NO: 123463 - DNA, 620 bp, Homo sapiens
gatattcataattttgcctttttcagaatgtcaattagttggaatcatacaatatgcagtcttttcagactggcttctttcactgaataatatgcatataagcttcctctatagcttttcatggcatttcttagcactgaataatattccattgtctggatgtgctcactgatttattttccagaagtttttgattattaatgtgtacatttaccatttgtcttttttgaaagtgtgttggrttttctattgaaattgcatcaaattttagattaatgagaggagagctgaattttcaatgtatcaaggccactattcaggaacaatattatgtttttctatttattgagattttcttttatgctactttgttatattttaacattgtcctcatgcaagttttccaggcttcttgttatggatattcctggatatatatggatgttttaatttgtgcatttggctattttgaatgatactttccattatcattttttatattgtctcttctgtatgcagtaaaccacctgctttaatatgttgatcttgcattccaacacctttttaaactcttattaattgtcctgtttcattttcatctcttttctatgtagataatt

SEQ ID NO: 123464 - DNA, 627 bp, Homo sapiens
gtttattttttattatagtgtagacatacccttcatctattatatcataatacatgttacattggactgaattagattttcccatttctaatagttggcaccattataagctataaggttcagaatcagaattttagtaacaactcaagagaaagttgttgaatataatccttagtgaaaacagtgtcctctaaccaatgcctatacaactaaatttatgctgggtttttggttytgtttttttaaaaatatttttatgtgttcaaactattttggtaaatttttagcaaaaaaaaaaaagaagcctcctggagttatttacatgtacagattgtaagactaatgcacaaaaggtatatcagaatttttttaatgttttggcgctactttgtttttaaaaatatttttggctgaacaataccataatttgttatgatctgcataggagatagaaaatgggtagaaagacactatagtaagtaagctgctaaaacagaggatggaactggaggatgtagaaactgagagcatcaagtggactcagggtggtccatttttcaaagtatttggacaagaggacttgttattttcatttgtattctgtccgtatattttggctggagaagc

SEQ ID NO: 123465 - DNA, 493 bp, Homo sapiens
agcacatacatggaatctctttttttttttttttttttgagacagagtcttgctctgtcacccagggtggagtgcagtggcacgatcttggcttactgcaacctgtacctcccaggttcaagcgacagaatctcaattttataatcatgactcaacctcacattttgggggaacgttaaatcttctactgtttgagtattttaattgaaatatatttaaaacattatggaaatgtaaacaagatcagagagtatcttctattttttgccgtctctgtgtatgttattggacatgatatgagaagctttatctcaacgttcctgtgcctaacaaccactgtggtaaactagttaaaatgtaaattcctgggccttatcctctgagatttaactcacaaatctgatttttaataagccctataaatcattttgatcttttgagcaatacygttaaagtgaaacagaaacactgaatcttccgtctgtacgtttct

SEQ ID NO: 123466 - DNA, 535 bp, Homo sapiens
ggagcaatccacagaactaccttggttggtaatgcccaagcagggttttgaaggataaatagaagctggccaggcagtgggatggaaaaatttcattttataataggcttggctcagattagcgccattataatttccctaagatgtcagttattgamtttcaggtatgagagaaaggaaactggatgccttctttgctctcttccaagttgacactgcagtttttagttcttctatgcacaatcctcaaaggagttccttatatgagttctgttgctttttgttcaacctgaaagttgcaaaattgaactgaggagaaaggccctgggtaatcgtgaccatgaggaagaagatgacttggaatgttgtgaagcatctttgtattcaaaaggcagctggctgccctccccagtgagtcacacataaagggcccctgtttattagtgtctccggtcctactgaacactcggcgttcgtgggttccccaggaagccctgagagtacactttgaaaatcagatacatgtctgtaaatg

SEQ ID NO: 123467 - DNA, 556 bp, Homo sapiens
attaggtacacacagttagcatcattatgccttgatgaattgaccctttataaagtagtgcaatgccattctatatctctggtaatgcctgttgtcccgaaatttcctttgtctgttactgtaagccatgacagctttcttaggattagtatttgcatagtatatctcttttcatcattttattttaatctacctttatctttgtatttgaagtatgtatatatagttggttcttatgcctttctttatccagtctggtaatccctgccttttaattgaaatgtttaattcatttacatttaatatactatattaatatggttagatttaagtttactatcttgcattttttctatttgtcccatttgttcttgttcatctttttcttattttcgtgccttctttagtattaatcaagtattttttwaaaatgcctcttagctttctagccataactctttttctttagtggtttctctatgatttataatatacatgtttcatatgttacagtccaccacgaatttatatcataacacattacatataatataaa

SEQ ID NO: 123468 - DNA, 556 bp, Homo sapiens
attaggtacacacagttagcatcattatgccttgatgaattgaccctttataaagtagtgcaatgccattctatatctctggtaatgcctgttgtcccgaaatttcctttgtctgttactgtaagccatgacagctttcttaggattagtatttgcatagtatatctcttttcatcattttattttaatctacctttatctttgtatttgaagtatgtatatatagttggttcttatgcctttctttatccagtctggtaatccctgccttttaattgaaatgtttaattcatttacatttaatatactatattaatatggttagatttaagtttactatcttgcattttttctatttgtcccatttgttcttgttcatctttttcttattttcgtgccttctttagtattaatcaagtattttttaaaaatgcctcttagctttctagccataaytctttttctttagtggtttctctatgatttataatatacatgtttcatatgttacagtccaccacgaatttatatcataacacattacatataatataaa

SEQ ID NO: 123469 - DNA, 592 bp, Homo sapiens
gaatcagagcagttagctgtctggctgagcaaataaaaaaattatttcaggctttcgtttctttggcctttaacttacgaattttggcctttgatttgactggatttttacacagcaaagtgatttcatttggagatttatgtcaacctctggaaatgtaataatggaagagttatagtgtccacatttggttctttcagtatcagtgacatattattgtctgcatactgatattcatttattgtgtactactgtaatctacatttgacaacatggctggtgataatttgaggtgggaaaaatcaatagtgtggcaaaacccaataggctaacagaaccaatacctgcaggatrtggagtataatctcccttcttctttcctctggtttttgtgagtgtctccattagaacaatccacctgatcttctctttactcctctgattctaaagtttggcagaagaccctgagcacatccacttcagccccctcttgactcctgcctctctccatgcctgtgagtttcaaatctcagtcaatttctatgctgtcatgtgatgatcagggagggccaactctgccctgtttgggagg

SEQ ID NO: 123470 - DNA, 592 bp, Homo sapiens
gaatcagagcagttagctgtctggctgagcaaataaaaaaattatttcaggctttcgtttctttggcctttaacttacgaattttggcctttgatttgactggatttttacacagcaaagtgatttcatttggagatttatgtcaacctctggaaatgtaataatggaagagttatagtgtccacatttggttctttcagtatcagtgacatattattgtctgcatactgatattcatttattgtgtactactgtaatctacatttgacaacatggctggtgataatttgaggtgggaaaaatcaatagtgtggcaaaacccaataggctaacagaaccaatacctgcaggatgtggagtataatctcccttcttctttcctctggtttttgtgagtgtctccattagaacaatccacctgatcttctctttactcctctgattctaaagtttggcagaagaccctgagcacatccacttcagccccctcttgactcctgcctctctccatgcctstgagtttcaaatctcagtcaatttctatgctgtcatgtgatgatcagggagggccaactctgccctgtttgggagg

SEQ ID NO: 123471 - DNA, 592 bp, Homo sapiens
gaatcagagcagttagctgtctggctgagcaaataaaaaaattatttcaggctttcgtttctttggcctttaacttacgaattttggcctttgatttgactggatttttacacagcaaagtgatttcatttggagatttatgtcaacctctggaaatgtaataatggaagagttatagtgtccacatttggttctttcagtatcagtgacatattattgtctgcatactgatattcatttattgtgtactactgtaatctacatttgacaacatggctggtgataatttgaggtgggaaaaatcaatagtgtggcaaaacccaataggctaacagaaccaatacctgcaggatgtggagtataatctcccttcttctttcctctggtttttgtgagtgtctccattagaacaatccacctgatcttctctttactcctctgattctaaagtttggcagaagaccctgagcacatccacttcagccccctcttgactcctgcctctctccatgcctgtsagtttcaaatctcagtcaatttctatgctgtcatgtgatgatcagggagggccaactctgccctgtttgggagg

SEQ ID NO: 123472 - DNA, 544 bp, Homo sapiens
agtctgacagttcatttggaaacctcataaggcaaaagttaggagtatagttattagaacaactctcaggttagtcacgcttcctgtctctttcctcccctcatccattaaaaagaggaggaagaaagaaaataagtttcataagttgaagttggatttagctaaggtcacttgaaataaccagcagtattttttcactgcctatataaaataataaaagatgctcatatgttgactgatgtgtgtggaactacttgcacagccttcataacaaagagctctggggttttgaagatgggtattttaattgaaaacaactacgaaaaataaacttttatatgattaacgtaaaccagttttacttaacattacacaattactaatacaaattgtaaaagttttgccaatatgytaaatcctttattcctctctctagtgcatatcctaaatgcaatcaaaggtgatgattagatgttttaaatttattctagcaattatatactttacgtaactattattgaaatgctcaaaaataaaataatgt

SEQ ID NO: 123473 - DNA, 644 bp, Homo sapiens
ggatatgaagtccagcttcaccactgactgggttttgaaccccagaaaaattaatgcaacattagaacctgagttaactcatctctacaatgggaataataatgagaataatgactaycttttataaactgaattatgtcaccctcaaaaaaggtgtgtctgaagtcctaaccaccagtacctcagaatgtgactttctttggaaagagaaactttaacagaggaaatcaaattaaaatgaggtcatgttgaagtgggatggaccacttatccaatataactagcgtccttttaaaaagaataacgtgaagaagagacacacggtacaaacatcatgtgaagatgaagacagagattggaatgatatatctactagtcaaggagtgccaaagattgccagcacaccatcagagctaggagggggcgtgtctcatctccagagctatgaaataatcaatgtctgttgtttaagctgctcagtttgtactactttgcaatagcaggctcagaaaactgacacactactcaaaaaggtgattgtgaggtttaaataaagtgatatataaagcatgtctcacaggataagctcttaataaattaatattaaaaatagtaacagtggtgggatattttgaaacataacc

SEQ ID NO: 123474 - DNA, 563 bp, Homo sapiens
aggaagacatattcatataaaaacacgtatacaaatgcttatacattagtgtaacagacaaaaactggaatcagcccaggtgtctttcaacagataaaaagttaaactgtagcacatacatacaatggaatgctgatcaaaaataaaaatgaacaaactattgatacatgcaacaacttggrtgaatctccaaaaattaggctaagcaaaaacccaatcccaaaaggtatgattccatttatatatcatgtttaaaatgacaacattttagaaatggaagacagagtagtgttgccaggaagtattgtttaggaagagggttggggtggaaaaatggagggaggtgagtgtagttataaaaaggcaacctgtcaaatgctcgtagtgttggaactattcaatgtcttgactgtggggtaggatacttaaacttacaaggtgatagcattttatagaacataatgaagacaaacatgattacaatgggcatggggtaaatctgaacaatattgggggtttatctcaatttcaatatgctggttgtgatattatactatagtttt

SEQ ID NO: 123475 - DNA, 515 bp, Homo sapiens
cattgatggatacttggaacaactgtatttataattagtattttttgtcatttaaagttcaccagatttgtagtcaattattggctaaaaaacatttattatttgcaatatattattagtttattatggctcattgccctaaaatacttcgtttaatcctttgcaggtccttaaacacaaatatggcagctattagcaacctcttcagtcaggcataaaattgtacccagaggcctcataaacaatacagtgctttgcaaagattaaatcagtgtacacagctgtgaaggaggccattaggaaatgcattatcattctgttttactgttactttgtgtgctactstgctcttgtcaatccatcagctagccctgcctctgccctgtaagtggaaaaggttttgcattttaccaggcaagagacagccactgggaaaagtaagatcccagcctttctgtgtaagattaaggggacttgggtgtcattgtgcagggtgagcttggaaaaagtcagtg

SEQ ID NO: 123476 - DNA, 456 bp, Homo sapiens
aatttactgaatattttaagcccactgttgggacttactgctcagaaaaaagatatctttcaaaaaaattactgctcattgacacacatagtcatccaagaactctgatggatatgtgcaaggagatgaaaattattttcatgcctattaatataacatccattctgcagcccatcaatcaaggagtaattttgactttcaaatatttaagaaatacgattcataaggatatggatgcatrgagagtacttctgatgaatctgtgcaaagtgaattgaaacccttctggaaaaagattcatcattcttcatgccattgaaaacactgtgactcaagggaggaagtcaaaatatcaacattaataggagtttggaagaagttgattccagccttcatggatgactttgaaaaggggttcaagatttcagtggaggaagaaactgcagatgtggtgga

SEQ ID NO: 123477 - DNA, 456 bp, Homo sapiens
aatttactgaatattttaagcccactgttgggacttactgctcagaaaaaagatatctttcaaaaaaattactgctcattgacacacatagtcatccaagaactctgatggatatgtgcaaggagatgaaaattattttcatgcctattaatataacatccattctgcagcccatcaatcaaggagtaattttgactttcaaatatttaagaaatacgattcataaggatatggatgcatagagagtacttctgatgaatctgtgcaaagtgaattgaaacccttctggaaaaagattcatcattcttcatgccattgaaaacactgtgactcaagggaggaagtcaaaatatcaacattaataggagtttggaagaagttgattccagccttcatggatgactttgaaaaggggttcaagatttcagyggaggaagaaactgcagatgtggtgga

SEQ ID NO: 123478 - DNA, 606 bp, Homo sapiens
aacctaggcaccttttccttccttttttttctttttcttttttttcctgcagatctcaccatataacaatacaaataatagcacaaattttgatatattatgaatttttcttcaacaaagtaatggattcatcacatatataagaattatgctgattacaatgtaattacatggttaaaaagtgatttygtactgcaatataggtagtgtgactgggtaattgagcaggggtttaaagttgcaggattgtgccatcttctttctttgtgactatattgataacttcatttagagattgcatcagaaatccaaatttgaggtcactgaggactagaagatccttgtagacattgagcatagtactttccagtcctgactatcccatataggatgaagaaaactccaaattttctctctcctcagtaagtcagccgagtccctagtgtggagaggccccctccttcaggaccccagatgtggggcaattgtgagcctagggctagagcatggctcaggttgactgaccttgcactactggggaatgtagcctgcctgtccttttaagttacagcagactcttacttttccaaacaggcgcctttggtt

SEQ ID NO: 123479 - DNA, 606 bp, Homo sapiens
aacctaggcaccttttccttccttttttttctttttcttttttttcctgcagatctcaccatataacaatacaaataatagcacaaattttgatatattatgaatttttcttcaacaaagtaatggattcatcacatatataagaattatgctgattacaatgtaattacatggttaaaaagtgatttcgtactgcaatataggtagtrtgactgggtaattgagcaggggtttaaagttgcaggattgtgccatcttctttctttgtgactatattgataacttcatttagagattgcatcagaaatccaaatttgaggtcactgaggactagaagatccttgtagacattgagcatagtactttccagtcctgactatcccatataggatgaagaaaactccaaattttctctctcctcagtaagtcagccgagtccctagtgtggagaggccccctccttcaggaccccagatgtggggcaattgtgagcctagggctagagcatggctcaggttgactgaccttgcactactggggaatgtagcctgcctgtccttttaagttacagcagactcttacttttccaaacaggcgcctttggtt

SEQ ID NO: 123480 - DNA, 492 bp, Homo sapiens
aattcaaacccatgttcttaatcaatatattatgttgcctttaagctgaattgaactttgtaataaaatgtcttaggttcatttattcaacaaatgtttattcagtgcctaccatggacgaggcctgtactggctgaagatacaaaaatgaaaaaggcagaaacattcttccctttggatactctacaatttagtggaagagaaaaactttagacaaggtttttcacatacacagaaatactgaaaatcatttaattccagcartgataggtgctgcaaaggagatgaatgaaaaaataagacttatcctggaatataggatcagatccatcctaggtaggcccagctaatggctgaggtagaggtcagctcttcattccctctggcctgtttactgagggtttgagggcttacagctccactttagccctcctgagcttgcagaagttggtccacaaacagattatttggggataaagacccacaaaagaa

SEQ ID NO: 123481 - DNA, 461 bp, Homo sapiens
ttatgtttatttttacttcattccctggggtttcccatctggagggcactttrctaactttgctagcccacgatcacagcgagttcatccaggagtctcccagaatatactcccatcatgtattctctgtgcctcttgggtctattctttcctaatatttgtgataatccatgttcatattgaatctcccctgggagatccttgaaaccagggactgtgtgtaagtcattgcttttacttcctagcacggaatctgtcacaagatacttctccaataaatgtctgcttttctagagaatttacttcactccttagaatctcaagtgagagctgtgtatcagttagctcctgctaggtaacaaaccacaacaaacatagtagcttccagcaacaatcatgtattattattctctctcctggttctgagagttgactgggatcagctagatgattcttgtgca

SEQ ID NO: 123482 - DNA, 461 bp, Homo sapiens
ttatgtttatttttacttcattccctggggtttcccatctggagggcactttactaactttgctagcccacgatcacagcgagttcatccaggagtctcccagaatatactcccatcatgtattctctgtgcctcttgggtctattctttcctaatatttgtgataatccatgttcatattgaatctcccctgggagatccttgaaaccagggactgtgtgtaagtcattgcttttacttcctagcacggaatcygtcacaagatacttctccaataaatgtctgcttttctagagaatttacttcactccttagaatctcaagtgagagctgtgtatcagttagctcctgctaggtaacaaaccacaacaaacatagtagcttccagcaacaatcatgtattattattctctctcctggttctgagagttgactgggatcagctagatgattcttgtgca

SEQ ID NO: 123483 - DNA, 461 bp, Homo sapiens
ttatgtttatttttacttcattccctggggtttcccatctggagggcactttactaactttgctagcccacgatcacagcgagttcatccaggagtctcccagaatatactcccatcatgtattctctgtgcctcttgggtctattctttcctaatatttgtgataatccatgttcatattgaatctcccctgggagatccttgaaaccagggactgtgtgtaagtcattgcttttacttcctagcacggaatctrtcacaagatacttctccaataaatgtctgcttttctagagaatttacttcactccttagaatctcaagtgagagctgtgtatcagttagctcctgctaggtaacaaaccacaacaaacatagtagcttccagcaacaatcatgtattattattctctctcctggttctgagagttgactgggatcagctagatgattcttgtgca

SEQ ID NO: 123484 - DNA, 461 bp, Homo sapiens
ttatgtttatttttacttcattccctggggtttcccatctggagggcactttactaactttgctagcccacgatcacagcgagttcatccaggagtctcccagaatatactcccatcatgtattctctgtgcctcttgggtctattctttcctaatatttgtgataatccatgttcatattgaatctcccctgggagatccttgaaaccagggactgtgtgtaagtcattgcttttacttcctagcacggaatctgtcacaagrtacttctccaataaatgtctgcttttctagagaatttacttcactccttagaatctcaagtgagagctgtgtatcagttagctcctgctaggtaacaaaccacaacaaacatagtagcttccagcaacaatcatgtattattattctctctcctggttctgagagttgactgggatcagctagatgattcttgtgca

SEQ ID NO: 123485 - DNA, 546 bp, Homo sapiens
tgaagaagtgagagggacccaccccatcctacctctacagaatgcttggcacccccaccaatgttcctagactccatctcaggaccaaggtagtgtagacccaaagcccggccctatcctggctcccawgcatcccacagcctctggggtagaggtggttagaggcaccagctctagaccttggctgccttctgtctgccctcagggtctgctcagatcaggacaccccctcccccaggctggggctcagcctcagcatccttggcagggctccccacaggggcatttccacaactttccagccctggcctcctgttcaagggttcggcctcaggcaggactagagctgagttgcagaggaggaggaggagcggggagagagccgagtagttcaggttgccgcaggggagacaggagggaggagaagagaaggaggggagggagcgaaggtcctcagaacccaagtgcggggcagcctcaggaaggtgacttctgttattctccctgtgtgctgtgtctttaggaaaatccccctcacacgacagc

SEQ ID NO: 123486 - DNA, 598 bp, Homo sapiens
tgcacttatttttggtacttattgtaccaaaaagggatccgtcaactcctagtccaatggactccttactgacctccatagcagcytggctcaagggagatggcctgacatcttggttacaagaaactctatgcctttccattatcttgtcaaaatgatacaaaggtatctgcaattaaactctaaagccagaatctcacactgaacagtatctttaaagggagttaatctcttcatacagtccttgtattcttctaatcaatgtgactctggcatgtggctataaagatgagtgtgttcaccctaattcggctctcctaagacagaaatgccactgctatcctgtggagtctgcacactacctctgccaaggtattttctttatcatggtcttgtttgaactctttttctgggaaagtaagtctagggctctgactggactggattttaaggagctagagctaatcctgagagaaaaggcggaggagggccaaggagatagtttaaagtgcatctaaaccaaaggtctgtggaaaatgataaaaaccgaaccagtaactagaagatattgatttaggctcccatcatcgataaccta

SEQ ID NO: 123487 - DNA, 588 bp, Homo sapiens
aagtcccaacatctagtggagaaaaagcagcatgcatcatagtatatcttgaggaacaccacttctaaagacttacatttatgtgatggggttaagagtcttacggtcaataagtgtgggaatgtcaggttaaacaaactaaacatatttcattatcacaaggctgctcaaagtctttattgcatcatgaaacttgtggagctccaagaaggtggcctttggaaacttactggaccatggaaccctagtttagaagagcaaactgagagctaaaatagtgtttagtytaatatatctagaaagctctgcattgggagatttccatttacagctacaagtgacatgaatgttttagtaggctgccgatcctttaatgtgagttgagcagacacagaataaatatatgcccctcaaatgtggaggagagaccattcacaatgtggtaagcgccatgaaaacaaggactgcatttggttctggtttctactatagctccaacatctagcactacctagcacatagtagacacttgatcaaatttgtttcataaatgtacaaaggaatgaattttatagaaatgacagaagg

SEQ ID NO: 123488 - DNA, 511 bp, Homo sapiens
aacttttctttcagtgaatggagtaagaatttccagatgtctaccagtgagtaccatacacaaaaatagaaaattcagcttatttaaaatgtagctcattatagtcttccctgaacatgctgattctcctcttctttccccctttcttgactagtgccatcatgtgcactttctcctttacctccaccattcagttcatgagtcacttagcctcatctctgtaatttttttcatggtattccttcccttgctattttcttagtctttattgtttctcctctggcctgtagtgatcgcctttaaaaacaagtctctttgcttctggtattgtatcctttctaaacttcacactgccatcagttatttttctacaacacagacttgttaatgacaccatccctttttatgagtttaacatgatctaaacctttcttaggatcttacacaggactcttcatgtactgatcctyaaatgacatatccagccacatttcacatcccctacattgca

SEQ ID NO: 123489 - DNA, 545 bp, Homo sapiens
gttccctttgcctagtaggagaaaattgttttatactgtgtgtttccttaggaagttgcacaagtttttattatagtttattaagatacatcaaaattatttatatttgtataagcacctatggtgtgaagtcctcagggaaracacttgtatctgtatctgtgattggcattgtaattggcacatgatagccatttaattatttgtctatgaaatagctattaacttctattattattgagcaacttaataaataaacatggatatttgattttaatatcattgacacctgtattttttccttgtagggtcctcttatatgttagcctctaagggagagcaagagtctgtgtctgtcttgctcactgctttttccccagaacttagcataagtcctggcacatgccaaataaatgtttatatatttatatggtaaaagttaaataagtatttgttgaatgagtgaatagtctacgtctttcctctctccatcacaactaccacccctcttgtgaggaggaagaatactttttttcttcttcatt

SEQ ID NO: 123490 - DNA, 650 bp, Homo sapiens
  misc_feature (1)...(650): n = A,T,C or G
nnnnnnnnnnnnnnnnnnnnnnnnncatttccatttttgaaaactttcagggaacatcagtgtttccaattaatgtggctcctacatcatgcatttctttgtggatgacttggtggaagcattaagcctttggttattgaaatgtaataggatctcgctaattaaccccataatgtggtaatgttagtatctctaaaataaacatgtggtactaagagtgtaggctgatagcttttctgtgcttcacttaccttatttgtaaaatgggtataataatgtaatagtgagactggtaggactagaggatgcaatatatacacagcccttagtacaatacctagcacttggtaagcactcagtaaagtaccctaacctaattataaatgtaaagaagtgctttaacactatctcgttggaatctattatatcaacctcttggaaggggggcgtagagagtattattatttttatgcatgaattggatgggttcaattatttcatttctactaaacccacatgaatgaagttgctggagagaaaaacatatgtgacttttgttttttcttttgccacactacatttctgagatttgatctcagctgggtctttcacaatgcccartgcccagcatttttttttctttgcattgt

SEQ ID NO: 123491 - DNA, 561 bp, Homo sapiens
aacatggtaccgagcatataacaggcatttgatatgaatagggattgaatacaatttttcaactactccagaaatactactactactacttccccccccccaaaatacttcttcatcaactatcaacttctgctgaggcataaacaaacgttttttgtttttttttgtttttcttctgagatggagtttcactcttgtcgcccaggctggagtgcaatggcacgatcttgactcattgcaacctctgcctcccgagttcaagygattctcctacctcagcctcccgagtagcttggactacaggtgcctgccaccaccactggctaatttttaaatttttagtagagatgagatttcaccatgttggccagactggtcttgaactcctgacctcagatgatccgcccgcctcggcctcccaaagatctgggattacaggcgtgagtcaccgcgtcctgccataaacagacttttgttggataaaatttagctactgtatgactgtttgtgagttggaatctattagtgaaaaggttaaaatcagtggtctcaatttctaac

SEQ ID NO: 123492 - DNA, 395 bp, Homo sapiens
accagctccagtaaagaggggttaacagcatgtcatatggttagtgtgaagagaagtttctgtggatttcttctaagctgaagccaggaagctatccccatggtcagttcatacaacacattagattctcagaaatctctcagccctgcagcaagttttctactcacacacatttttcattgttttaaagggtaaataatgcttttctggaccgactccaaggyaaaagtcaaccaggtggcctcgagcaatctggaggctgttggaatatgaatagcggtaacagctgggtgagttttttcttttctcttaaatcatctttcaatgttgaagaataaaaacaatgagaatttttaatatatgttttggccttctccccagatattacgtttttg

SEQ ID NO: 123493 - DNA, 395 bp, Homo sapiens
accagctccagtaaagaggggttaacagcatgtcatatggttagtgtgaagagaagtttctgtggatttcttctaagctgaagccaggaagctatccccatggtcagttcatacaacacattagattctcagaaatctctcagccctgcagcaagttttctactcacacacatttttcattgttttaaagggtaaataatgcttttctggaccgactccaaggcaaaagtcaaccaggtggcctcgagcaatctggaggctgttggaatatgaatagyggtaacagctgggtgagttttttcttttctcttaaatcatctttcaatgttgaagaataaaaacaatgagaatttttaatatatgttttggccttctccccagatattacgtttttg

SEQ ID NO: 123494 - DNA, 406 bp, Homo sapiens
cacattctacaagggtggggccattggattgttgtgttcagtggtgtatcccaggcataaaacaataactggaacttaccacacacacaaggaaacaagtggttgtgattcaacatcacaaacacaayagaaagacttagagccagatgatttcacatgctaaaatgattagatactgaatttaaaatcacgatgtataaaacgtttgatgaaataaaaattggatttgaaataatgaggaaaaaataggagataatgaaagacaaccaagcagacttcaaaaagaattaaaccaaaatgccatttcttatcaattatttggcaaaaaaaaccctcctaaaatattgacaatatactctgttggcaaggctgtggggaagtgggtactttacacattattggtggg

SEQ ID NO: 123495 - DNA, 553 bp, Homo sapiens
gaattgacagaagtaggcttcagaagatggataataaagaacttcgctgagctaaaggaacatgtaacccaatgcaaagaagctaagcatcatgataagacaatacaggagctgacagccagaatagccagtttagagaggaacataattgacctgatggagcagaaaaacacaacatgagaacttcacaatgcaatcacaagtatcaatagcagaatagaccaagcagaggaaagaatctcagagcttaagactagctttctgaaataagacaggcaaatgagaataaataaaaaaaraacaaaaagaaaaagaaatgaacaaaacctccaagaaatatgggattgtgtaaagacactgaacctacaactgattagggtacctgaaagagacagggaaaatggaatgaagttagaaaacatacttcaggttatcatctaggagaacttccccaacccagcaagacaggccaacattcaaattcaggaactgcagagaaccctagtaagatactccacaagaagatcaattccaaaacacataatcattggat

SEQ ID NO: 123496 - DNA, 576 bp, Homo sapiens
tcagacaaacaaattctaagggaatttgtaaccaccaggccttccttggaagagctcgtgaagtaagcactaaacatggaaaggaaaaaccattaccagtcgtgacaaaaacaaactgatgtacacagaccagtgacactatmaagcaaccacataaacaagtctgcaaaataaccagctagcatcatgatgacaggatcaaattcatatatcacaatagtaaccttaaaggtaaatgggctaaatgccccaattaaaaggcacagaatggcaagctggataatgagccaagacccatcagtatgctgtcttcaagagactcatctcacatgaaaagacacatataggctcaaaataaagggatggaggaaaatttaccatgcaaatggaaaacagaaaaaagcagaggttacaatcctagtttctaacaaaatggactttaaacaaacaaaggttaaaaaaaaaaaaagacaagggcattacataatggtaaatggttaaattcaacaaggagagctaactatcctaaatatatatccacccaatacaggagcacccagattcatacagcaagtc

SEQ ID NO: 123497 - DNA, 576 bp, Homo sapiens
tcagacaaacaaattctaagggaatttgtaaccaccaggccttccttggaagagctcgtgaagtaagcactaaacatggaaaggaaaaaccattaccagtcgtgacaaaaacaaactgatgtacacagaccagtgacactataaagcaaccacataaacaagtctgcaaaataaccagctagcatcatgatgacaggatcaaattcatatatcacaatagtaaccttaaaggtaaatgggctaaatgccccaattaaaaggcacagaatggcaagctggataatgagccaagacccatcagtatgctgtcttcaagagactcatctcacatgmaaagacacatataggctcaaaataaagggatggaggaaaatttaccatgcaaatggaaaacagaaaaaagcagaggttacaatcctagtttctaacaaaatggactttaaacaaacaaaggttaaaaaaaaaaaaagacaagggcattacataatggtaaatggttaaattcaacaaggagagctaactatcctaaatatatatccacccaatacaggagcacccagattcatacagcaagtc

SEQ ID NO: 123498 - DNA, 549 bp, Homo sapiens
gacatttaaaacctgggatttttcttcacgggattgcatgttttctgaatcagtcattctgtttgacaccaaaagtagcttttattgctttccccaccatgggcccttgatttaaaaggcttcatctaccaaacactctcttttgctaaataagaatatttccccatttttattcattaaagtccttttgatcagtgtcagataatgtgtgaccattaaatttgctgtaattctasatagaagcaaagaaacttgataatttggttggtatacagttttccatatatggttttggttagaaaataactcaaggactttccctaattgtgcacaagaacaagaatcctttgctaacctgagtgaaatttcttaggactaaggtcaacaatgggggttataaaataggaagggttttcctactgtttctgtaatgaggtcttcccattaacaaattcagttaaagtcactaggaattaacttacacacctggaaatgctcagacctgtcccacttggaaacaaactggagaaacagtagacatcagcaatc

SEQ ID NO: 123499 - DNA, 549 bp, Homo sapiens
gacatttaaaacctgggatttttcttcacgggattgcatgttttctgaatcagtcattctgtttgacaccaaaagtagcttttattgctttccccaccatgggcccttgatttaaaaggcttcatctaccaaacactctcttttgctaaataagaatatttccccatttttattcattaaagtccttttgatcagtgtcagataatgtgtgaccattaaatttgctgtaattctacatagaagcaaagaaacttgataatttggttggtatacagttttccatatatggttttggttagaaaataactcaaggactttccctaattgtgcacaagaacaagaatcctttgctaacctgagtgaaatttctyaggactaaggtcaacaatgggggttataaaataggaagggttttcctactgtttctgtaatgaggtcttcccattaacaaattcagttaaagtcactaggaattaacttacacacctggaaatgctcagacctgtcccacttggaaacaaactggagaaacagtagacatcagcaatc

SEQ ID NO: 123500 - DNA, 522 bp, Homo sapiens
ctccttaggctgtacccactgtccaaccagtcccagtgagatgaaccagctactacagttggaaatgcagaaatcacccatcttcttcatcgatcacgctgggagctacagaccggagctgttcttacttggccatcttggaatggatcctccattcatgattttaaagatatttttccatgtcttctagcttcattttgtcctatagaaactagacgtcatgtttatacacttctacataatatgtcttctttcgatgcttttaagatttattctttggttttcagcagtttgaccatgatacagttagttatatttttagttgcacttaccctatttgggatttgcggagtttcatgaatgtgtgggttgctgttttcaatcaaatttagaaatttttcatataatatagttgcarttttttttcttgctccatattctctctcctctccttcttaaatgtgtgtcagaccttttgagacaattgcacagctcactgggggtctgctaagttaaaaaaaa

SEQ ID NO: 123501 - DNA, 497 bp, Homo sapiens
tagagtcaaaccattagactcatgtcctttataatcaaggaatagagtatttatatttttaaaagtataatttaccaatgacccagggtggcttctaaatatagaagtgctattggggccctgtcctgtgaaagcagcagtcaagatccctgtcctggccagctgtgaaacctgtgattgatttctgaacaacctatmcaaaaaaaaaaaaaaaaaaaaaaaagtttaaggagtctgtgtaagaagtaaaagaaataaattgaacacacatgtgtaatcattattcatatgagcgttctctgtattacttcataacacagctgtgtacacacaaaaaaactttgcttctttctcttggagtcttattaatttctgtttaatgaaacacaaatgtttgtgcgcttgattttgaggagcatggtctagttgggtgtttgttaagcactagccaggatggctatgcccacctaatacaaatgtctttaggcctttcagag

SEQ ID NO: 123502 - DNA, 497 bp, Homo sapiens
tagagtcaaaccattagactcatgtcctttataatcaaggaatagagtatttatatttttaaaagtataatttaccaatgacccagggtggcttctaaatatagaagtgctattggggccctgtcctgtgaaagcagcagtcaagatccctgtcctggccagctgtgaaacctgtgattgatttctgaacaacctatacaaaaaaaaaaaaaaaaaaaaaaaagtttaaggagtctgtgtaagaagtaaaagaaataaattgaacacacatgtgtaatcattattcatatgagcgttctctgtattacttcataacacagctgtgtacacacaaaaaaactttgcttctttctcttggagtcttattaatttctgtttaatgaaacacaaatgtttgtgygcttgattttgaggagcatggtctagttgggtgtttgttaagcactagccaggatggctatgcccacctaatacaaatgtctttaggcctttcagag

SEQ ID NO: 123503 - DNA, 369 bp, Homo sapiens
ttttaaaagtttggcatttatgtctttatcattaaaaacattattgatgccttagtttctatatctgcamaatgataatgttggattaggttatctctttgggtcacttctgcctcctgtgcactatagcagcccatagctttgtctctttaataggaagtttgttgaactagagaatcatagtggtagtctaggctttaaaaatgcttatctgacattatacaaaattcctgaccagtactcttcaaagtgtgaaggtcatggaaaacaagaaaagactgagacactgatacagattagagaagactcaggagacatgacagctaaatacaacatggtatcttatatttaatcctagaataggaaaac

SEQ ID NO: 123504 - DNA, 606 bp, Homo sapiens
aggctgaagcagaaggatcagttgaggccaggtgttcaagcctaggcaacatagcaagactgcatctcaaaaaaaaaaattagctgggcatgatggtgtgcacctgtagtcccagctactcaggagctgaagtggcgggatgccatgagcccaggaataacaggttacagtgagctataatcacatcactgtatagtctggatgatagagtgagaccttgtatccaaaaaaaacccttaaaaacactaacaaaaatattgtctaaatacaaacagtgcaataattacagaacacagagggccagggacggtggcttaagcctatgataccagcactttgggagtctgaggaggaaggatcacttraggccaggagctgaagaccagcctgggcaacatagtgaaaccccatctcgatgaaattttttaaaaaagaacaaataaatagaatattttagaagacaacatgcaaaaatgtatagatttgctaaaatgaaatcttcaaaactgattgctgttattttaaaaggtgaagttgcatatattaagctattttaagaggtcttattaattctcataaggtggttaatgtactaaatgaggccag

SEQ ID NO: 123505 - DNA, 559 bp, Homo sapiens
cattttctctatggaatctttcagtacctgaattttttccagtaaaataactctttgagtttcaaatgacttttcataaataaactgtagatcaccctccataagacacatgtcttattaccatacatacaatattttactgggagtagcaattccataaacccaacaaggctcaagaccaatatgaacaacagaagtcaatacttaggcaaggcaggtagagctaggatcagaacaagcgcctttaggtggaagtcagggtagatgggaaaaacagatacaaactgtaatttgtcatttgtatgacctgtatctagtccaggatattacactttatctgtaatcaagtaagaaaaataaggataaatctgatgtttgggaaagtgcagagagtttattttacctttgtttttatccataggaccacytttattatcattttttcattgtataattcctgagggtaaagataaaatcataaaatcaggcttctgaaatttgaaactaattttagatttttgttttccatttaaacactaatgttgaaaagcagaccact

SEQ ID NO: 123506 - DNA, 604 bp, Homo sapiens
aaatttcatttattgctcaaaattattatgaaataaaactcatattgatacatgtatatatacaccactgatttaaacattacgtatcatacaatgaacatattaataactgctgtgtttcatcatatactaaggacttgttttcctagcactttttcttttttctttctttcttttttttttttttttttgagatggagtctcgctctgtcacccagattggagtgcagtggcacgatcttggctcactgcaaactccgcctcccgggttcacgccattytcctgcctcagcctcctgagtagctgggactacaggttcccaccaccgcgcccggctaattgttgtttttttttttttttttttttgcatttttagtagagacagggtttcactgtgtagctaggatggtctcgatctcctgacctcgtgatccacccgcctcggcctcccagagtgctgggattacaggcgtgagccaccgcgcccggcgcactttttcttttaacaatacagaaagcacttttatgtgtatccttatatatgcatgagagtttctccattgtgcagttatcagatgtaaaattaatagatcgtgcaagata

SEQ ID NO: 123507 - DNA, 620 bp, Homo sapiens
ttccttcatagcatgattttaaaatgatttatgatctttagaaagggcacaaattagaagtgagagaataaaaagagacaggcatcattaatgactgcaatgaataatcaataactgtgacataaaacaattgcaatgcaacaacaaaaccagaaagaacaaaaaaattatttcagtcttgatttcttaktaaaatggcaacagcattctataaatgtccacaggtctcaggaatgactatttgacaacagagccactaatgataaaaaggggcttctttctgttttatattttatatattctggctgaaatgatgggaaagaatataatggttgagaacacataatacaaaaaataattagaatgaaacagctcaatttcctaaatgtccttaagtactttacatctgaaaaggcaaactcaggtacgtctttttttttttaaactaataaaaggacaacactgaaaaaaaaaaaaaaagaagaatctttaaaagagagactagcatattctccccaatagttttgtaaccatatctcaagaaatcttatttcccacaggttttctaagagatttcctttttcccacaattgcttgaatttccctgctataaatctctg

SEQ ID NO: 123508 - DNA, 620 bp, Homo sapiens
ttccttcatagcatgattttaaaatgatttatgatctttagaaagggcacaaattagaagtgagagaataaaaagagacaggcatcattaatgactgcaatgaataatcaataactgtgacataaaacaattgcaatgcaacaacaaaaccagaaagaacaaaaaaattatttcagtcttgatttcttattamaatggcaacagcattctataaatgtccacaggtctcaggaatgactatttgacaacagagccactaatgataaaaaggggcttctttctgttttatattttatatattctggctgaaatgatgggaaagaatataatggttgagaacacataatacaaaaaataattagaatgaaacagctcaatttcctaaatgtccttaagtactttacatctgaaaaggcaaactcaggtacgtctttttttttttaaactaataaaaggacaacactgaaaaaaaaaaaaaaagaagaatctttaaaagagagactagcatattctccccaatagttttgtaaccatatctcaagaaatcttatttcccacaggttttctaagagatttcctttttcccacaattgcttgaatttccctgctataaatctctg

SEQ ID NO: 123509 - DNA, 620 bp, Homo sapiens
ttccttcatagcatgattttaaaatgatttatgatctttagaaagggcacaaattagaagtgagagaataaaaagagacaggcatcattaatgactgcaatgaataatcaataactgtgacataaaacaattgcaatgcaacaacaaaaccagaaagaacaaaaaaattatttcagtcttgatttcttattaaaatggcaacagcattctataaatgtccacaggtctcaggaatgactatttgacaacagagccactaatgataaaaaggggcttctttctgttttatattttatatattctggctgaaatgatgggaaagaatataatggttgagaacacataatacaaaaaataattagaatgaaacagctcaatttcctaaatgtccttaagtactttacatctgaaaaggcaaactcaggtacgtctttttttttttaaactaataaaaggacaacactgwaaaaaaaaaaaaaagaagaatctttaaaagagagactagcatattctccccaatagttttgtaaccatatctcaagaaatcttatttcccacaggttttctaagagatttcctttttcccacaattgcttgaatttccctgctataaatctctg

SEQ ID NO: 123510 - DNA, 565 bp, Homo sapiens
ccaagcttcagtgatcctctggcattcctccagctttctatatttcagacccaaggggaagaggtcatggtccctttagtgcagtacaaagtgagggacctgcagccacactaaccacatcggctatggagtggattctctggccatggggaaacaaagtcttgcactccttttcttctttttctgtaaataaatagctgtaccataccactggagcctagtgtacatgtcttcggttctcagtgaccccaaatcatgtaggtctcttccctgggtggcattcatctgcttgttaaccttggccacactcattttatattctgtcctgcagcacagcttgaccgccccgtgaacagtgaaacacagctatttctaaaaagtattttggtaaactctcttggaaggaacaaaactagtgtttgttggtcttctatattaccatgtgaaactgagagtgttaaggcacaactactgcagatagttgmtaagtgatgtcagggaaacttgtgcacctcttaaaaatgtgaacaactcaaagttgtgctgtattcaaagtttaaaatca

SEQ ID NO: 123511 - DNA, 428 bp, Homo sapiens
gaattcaggacacacgcctgtagtcccaactacttgagagttccaggcaggaggattgtttttgcccaggaggtcaaggctgcagtgatcgtgccgctgcaatccagcctgggtgacagagagagaccttgtctcttaaaaaaaaaaaaaaaaaatggccgkgtacggtggctcacacctgtaatcccagcactttgggagtccatggtgggtggatcgcttgagctcaggagtttgagacaagcttgggcaacatggcaaacctcatctctaccaaaaatacgaaaaattagccgggcacggtggcacgcacctgtggtatcagctactcgggaggctgaggtggggggatccgttgagcccgggaggttgcagtgagccatggtagcaccactgcagtccagcctggatgacagagtgagaccctg

SEQ ID NO: 123512 - DNA, 583 bp, Homo sapiens
  misc_feature (1)...(583): n = A,T,C or G
gaattctagttctcataatctccatgtgttgtgggaggggcctggtgggtggtaattgaatcatgagggtggttacttgtatctgttttcatgatattgagtgcattctcacaagatctgatggttttataaggggcttttcccccttttactcacttctcttcctgctgccatgtgaagaaggaaatgtttgcttcccattcctccatgaatttaagtttcctgaggcctccccagccatactgaactgtgagttaattaaacctctttccttcataaattacccagtcttgggtatgtgtttattaggagtgtgagaacagactaatacacatttaatatattgaattttaatttaatattgtawaacaacccaaaagaaacttgcagactggaaaatgtagtcactgtaatccctaagccattcttgcacaacagatcatggcatcatctattctatcttcaaaacaatggatggaaaagtgtgagatgtaatgnagncattagaatgattctatcattcgaccacaaaactatatccatagtcgcacattttatgtacatcatacaaattcacatatct

SEQ ID NO: 123513 - DNA, 620 bp, Homo sapiens
caacctagagggatgagccactgccctcctgtccccaacccaaagggtgacccagagccctcctgtccccaacccagagggtgacccagarccctcctgtccccaacccagagggtgacccagagccctcctgtccccaacctagaggatgagccactgccctcctgtccccatttcaggggtctcttgttccttgggcttcttatctgggactcatcttttctgccccatctctcatctccttcataccccggcggttctccctcatgtcttagagacctaaagggacctgttcagtgtcctctggccaagtggtcctattgtccttccctgtaatgcagagcatatcagaactggagcctacagattatctcgtcctgtccaaatactttattccactgataaaaccatctgagaaccagagattttcccaaggtcagaaatctagcagattaatgatatcaggtttatgtcttcaaacaacgtgccagtcactgcatttattattggaagacagatttgttcctgttgaaccaacagcaaaatagaggctatttcttgatgcttagcatggatcagagacagtgctgattctcaccataagattatccatttattca

SEQ ID NO: 123514 - DNA, 590 bp, Homo sapiens
tttcttggtcacaatttatgccagtggaagaactaaggcccaccaccagggaggaagttcttaggtggctggaagtaagaattctaaaggttctagactgccactcattcacatatatgaataaaagaatataaattcagccgggcatggtggctcacacctgtaatcccactactctgggaggctgagacgggaggatcacttgaggttgggagttcgagaccagcctggccaagacggcaaaaccccaatctctgctaaaactacaaaaattagccaggtgkgatgttgtgcacctgtaatcccagctactcgggaggctgaggcatgaaaatcacttgaaccaggaggtggaggttgcagtgagtcaagatcgcgccactgcactccagcctgggcaacagagtaagactgtctcaaaaaaaaaaaaaaaaaaaaaaaaaaggatataaattcatgggtaaggtgtgaaaatcacctctgaatttctgattttgttggcttgttcatagacttttccttgtgtctggatgactagtttccactgggtgagcagctgcagcagcaacttcagggacgaatcaaggagt

SEQ ID NO: 123515 - DNA, 538 bp, Homo sapiens
tacagtaagtacatttgggaacattgtcacttataattgaagtgagcttactagttagagagttcgtcagactggagggaagtaaaacttctataagggtcaaatgaataaacaaatttgctttatcaagctgcttatttatacatccatgtgttttcttatgatgagtcagtcccatgcaccctagtgtaatctagttgccatttgcggtatatagttgtcacgtattactgccagccagctggyagctgcattgccctactcattagtgattaagatggacaaaagtatataacattcttatttaatccacagtgatttttaagtaactataaacaagagttcttgaaacttgaaacagaaagaaaatagtacttacttttgatatgtcacacttgcaacttgtgcctggaattgagttcatcttccatctttagctaacgtggtctgtggccagagccacacttcctcgctcttggacttgattcccataactgaaaaagggaaggtgttgcctcaactagggatggcaagtgtg

SEQ ID NO: 123516 - DNA, 548 bp, Homo sapiens
tcccaaatgcacaatgcatccatgtatatacactatgagcttttctcttcctttatgtttatgctgactttggtctttattcttgttcaatatgataagtaaagtacaacttctaagacttgtaaaacgtccacctgtgaagtgaataactttactgttaataaataaaacaygatctaagtcttcttgaatttccttaatgaatctattaataatttcattttcttacagatttaaatgttattaatcctttgcaacaagggttttttttttgttattgttgttcatccatttatttgttgggcttaaggtaatggggaaaaaggaaaaaaacagaccatgatgtttgatggacacataacactagggaactcatttccacttacgcttgcggtgtttcagggagaagcctggaagactaccataagggacctcaaaaaacatcaacagcatactccattcttcctgcaagactagtgatccaggctctccacactttaaaccactgttcaccattaactactgaaagagagactattcacttataa

SEQ ID NO: 123517 - DNA, 577 bp, Homo sapiens
tgggtgactataaacaaaatatcttcctattcccttctgagacatatgcagggtcgtctttccttcagcactgtcatggagcagcacgcaattagctacagaatgttagccaccctgctggatgcaactccacatctccctctgtggtgtataatagtacaaaagtgacattaaacctatcaaacratcgtattcaggcagcatggcatcacacaaccccagctgtttgtgttagtgattttgtttttcaccagaggagatttttggggtgaatgtaatgaatggacaggctatgcttacttttaatgaaccccaagttaatgcttcggtctttttctgtccatttaaatgcaaaggagcacatttcagatcataatgaaataagcacactaatacacaacctcctttcttcattctgagcctctgcttccagaattaatagcttcctggtagggcatgtttgacattgttgctaaactctaaacagggatctaattcagagacaaatttacatcagcttatattttgacttttaattcctctggcaaccaaagaacaaacaagcaaaccaagaaag

SEQ ID NO: 123518 - DNA, 599 bp, Homo sapiens
ctggagatagaaataactccttgcctgtgttgatcctagctagtgaccagtgtccaggaggtgaaatcttgggaagagaggcctgggcttctgactcagcagaaamcaccgtcttgacatttttagtcttttctttggtcttgtcctactatagagacttctttctacaggccagatttgacaaaatagccctaccaaatcataatcagaggtgcaccagccaccctcccccaataaatttggccttatttcttgttaccctgatgatgctcaggattcataatacatatctctaaggaatctccagatttgtataatacttgaaacagaatatccaagaagaggagaaaaagaaatggctacaatagatcagtcctccaccaggagtggcttgaatctcaggggaggtttgacaatgtctggagacatttttggttttcacaacaatgggaagggggtttgtaccactggtgtctagtgggaggtcccaggaagctgctaaatgtcttacaacatgcaggacagtcctctacaacaaagaactattcagtccaaaatgtcaataaggctgaaaccctgaaatagaggaagacaaagag

SEQ ID NO: 123519 - DNA, 552 bp, Homo sapiens
agcctatggcagatattggggggcaggtcaagagtcattctggagatgcaaatgttgagacacctattagatatgcaggtaaggaagtgttcacagctgggcctcgggacaaatgttgggaactgtaagagtataaatggcatggaaagacatcaactctaaagaggagtgagtgaagattagagaagagggccatgcactcagccctgggacattccaacctacagaggcaacaagaggaagaacactaaaagggagtggtctgtgaggaagaaggaaaacacaggccagcaaggtccctggaaaccaagtgaagacagtgtttcaaagaggagggagtgctccactgttcctatagctgctgccgggccaaatcagccaaagactgagaaatgactgtcagatccagcaagtggaggccacaggtgaccctragaaaagtggtggagggggaatgtaggagcaaaagcctgatgaaggtgggttcaggagagaatggacgattacccagagtagtcaaatttacagagatagaaggtataaggatggttg

SEQ ID NO: 123520 - DNA, 594 bp, Homo sapiens
taaatgtccatctcatagttaaataactttttgaacacggttatttatttatgtattacagaacatgttctacatgggatttcaaatttaattaaaacagctaataaatactgattacctttgtttactagttctgtatttggccctttaatcttcactacaaccccaccaggtgggtattagcattaacagtataggtagggaatctggtgggtgtagcagttaagtgatttcaataagattgctcattttgaaaatattttaatgtttatatagtttaatgtatatctgttcctttttacagaaaacagaataacatttttatggagaaagatcctgtttgccttgtttaatttagctagagtatayatatcctattcatttaattgagaaacatgttttaaagtgtaagatgaaaagatacagaatttataccatgtcatattatgatgtaatccattttaagattattcttctcctctctgatggtagcaggcattatgatttaagctttaagaagctttagcagcctatgatcttcattgtaattatagttttttgtcatgaaatttagagttttgagagtctgaattc

SEQ ID NO: 123521 - DNA, 567 bp, Homo sapiens
aggctttttacttttatgtgttttaacagtggtagatacagctttcttttgcttccagatatatgactcccttaagcagggagtctagcagtgatgaattccctcagtgtttgattggctgggaaagactatttctccctcacctgtgaagaacagctatactgagtaaagcattcttacctgacagttattttctttaagcattttgtaggtatcatccaattctctcctagtctgtaaattttctgctaaaaaaaattgatgttggtctgatgggcattctcttatatgtgacttgacasttttctcttgctatttttataaatcactctttgcctttgccttttgaaaatatgaatataatatgtctcacagaagagtttttgagttgaatctatttgggaatctttgagcttcgtgtatctggatgtctatttctttcccaagacttagagagttttcagctattatttcattaaataggttgtctatgccttttcccatctcttctccttccagtaatcccaaaacacaaatatatatttgcttaattttatcccacatgtc

SEQ ID NO: 123522 - DNA, 606 bp, Homo sapiens
cagctaagtaaaccactaataataattattttctctactttcatatgagaaaaccaagaatcagaaaagttaagtaagccccacagaaaaggaggagcaaaactgtgctgtatcctcacatctgcctgattccaaatacctatcatctctttatctccctacctgtcaagggtggaatgtcagacaccatgacaaatggcakgcagagcagcacagggtgatggtctcacagccaggaagctggctttagttctggcttagccactgactaaatgatcttgagcaagtgacagcctcttaaacactttcgataggaaacaccattctctatgctcccatacagctagaagaatctggaaaagatttttgtgaacagtctttgggacatagaaatcttctgaggcttcctcatgtgccacagtaaaaatgacctcaaacgtactgccctgtcataaatctagtaccgaacataacaaattcattttttaatttgtttatttcaatcacttaagatattcaaaatagccttcaggctgaaactcttcccttgccctttctaattttccagtgaaatctcaatgatatattccagtgagggtatattaa

SEQ ID NO: 123523 - DNA, 606 bp, Homo sapiens
cagctaagtaaaccactaataataattattttctctactttcatatgagaaaaccaagaatcagaaaagttaagtaagccccacagaaaaggaggagcaaaactgtgctgtatcctcacatctgcctgattccaaatacctatcatctctttatctccctacctgtcaagggtggaatgtcagacaccatgacaaatggcatgcagagcagcacagggtgatggtctcacagccaggaagctggctttagttctggcttagccactgactaaatgatcttgagcaagtgacagcctcttaaacactttcgataggaaacaccattctctatgctcccatacagctagaagaatctggaaaagatttttgtgaacagtctttgggacayagaaatcttctgaggcttcctcatgtgccacagtaaaaatgacctcaaacgtactgccctgtcataaatctagtaccgaacataacaaattcattttttaatttgtttatttcaatcacttaagatattcaaaatagccttcaggctgaaactcttcccttgccctttctaattttccagtgaaatctcaatgatatattccagtgagggtatattaa

SEQ ID NO: 123524 - DNA, 434 bp, Homo sapiens
tttttcaaatgacatgacactcagaaaaatttaacaaaatcttatgtttttgaatcggcttatgaatcggctaaataaaaccttaagacactgacaaacccagttccaacctttgctttgccatttaatggctgcatgatcctgggaaagatatttgagtactccaagattcacagtccccactctatagagttcttgagaagagtgaaatgagttaagcatctaaaatgtgcctcccaattaytagccaatattagctccctcttcctccttcctttgccacaaacataccaggaaaaataaaattctgttttagatctgataaataattcctgaaacccagcatagcaaacataaacacactgtcctaaaatacatgggcagcatagtgtgtagccatcatgagccccgcctgcttgctttcccactgcatt

SEQ ID NO: 123525 - DNA, 581 bp, Homo sapiens
cctttgcagtcatacgacttacattcactttggtgtctgcctcagctgaaacttgttttaacatgctgttacatgttaattcaatcttccaatagtcaatttaacaaatatttattgagaactaactatatgcccagctctctactaagtgatatcaaattaaacatgttaccttccttttctcgaaattttacaaaattttactcagtctttggaatatgaaggtactggaaggatgggtcaaagtgtgtacataaataattaagttcaatctctaagtgctacaggagaatcaaccatttgctgtaggagcactgaggaaggaggaattcattctcagggattagtagggatggtcttcagtaatctccccataactacattatattcaacaatatgstcccttgggatgaaggagaagaaaggcttgccttacatatagagaaatctaaattaaagtttatttgtgaaacaacctgaattctgttattttttatatactgtatacagaaggttctaaaaagtcaacccctcagttagattccaaccaagtagatatcctcttaaaaccagttttaaaa

SEQ ID NO: 123526 - DNA, 581 bp, Homo sapiens
cctttgcagtcatacgacttacattcactttggtgtctgcctcagctgaaacttgttttaacatgctgttacatgttaattcaatcttccaatagtcaatttaacaaatatttattgagaactaactatatgcccagctctctactaagtgatatcaaattaaacatgttaccttccttttctcgaaattttacaaaattttactcagtctttggaatatgaaggtactggaaggatgggtcaaagtgtgtacataaataattaagttcaatctctaagtgctacaggagaatcaaccatttgctgtaggagcactgaggaaggaggaattcattctcagggattagtagggatggtcttcagtaatctccccataactacattatattcaacaatatggtcccttgggatgaaggagaagaaaggcttgccttacatatagagaaatctaaattaaagwttatttgtgaaacaacctgaattctgttattttttatatactgtatacagaaggttctaaaaagtcaacccctcagttagattccaaccaagtagatatcctcttaaaaccagttttaaaa

SEQ ID NO: 123527 - DNA, 615 bp, Homo sapiens
ttggttgttttgaataagatttctaatttaattagaaatgtgtagatgagggatatttagaaaaattttatgacttgacagctcaatttgggtatacactatcatcactttatctcaaatttaatgaaccygaaattgaaccaatctatccttccagaataattttcattctcaactccctatagatactattatttcagcgttttaagttagaaaacttatgattgatttttctttctccttgaatcctatttttagtaccaagacctttatttatttttttgtctttgctgcttcctttcaattcttgggtgtatactttgagtcatagcatttcatcatcttacctctggattattagagcattatttgtattgggctctcagtattctcctgtgagataaatctccctaaaatactgctttcatcacctctcttaaaaactcacgtttccctagcatcaattatttggcttttggggcactgcatcatctgtgccagtcttatctgttcgatactattcctatggtttccccacacatactccctatttaacctctgtttgcatcgtggctaccaggtacagtggtgccctgcccttggaacaatttctga

SEQ ID NO: 123528 - DNA, 615 bp, Homo sapiens
ttggttgttttgaataagatttctaatttaattagaaatgtgtagatgagggatatttagaaaaattttatgacttgacagctcaatttgggtatacactatcatcactttatctcaaatttaatgaacccgaaattgaaccaatctatccttccaraataattttcattctcaactccctatagatactattatttcagcgttttaagttagaaaacttatgattgatttttctttctccttgaatcctatttttagtaccaagacctttatttatttttttgtctttgctgcttcctttcaattcttgggtgtatactttgagtcatagcatttcatcatcttacctctggattattagagcattatttgtattgggctctcagtattctcctgtgagataaatctccctaaaatactgctttcatcacctctcttaaaaactcacgtttccctagcatcaattatttggcttttggggcactgcatcatctgtgccagtcttatctgttcgatactattcctatggtttccccacacatactccctatttaacctctgtttgcatcgtggctaccaggtacagtggtgccctgcccttggaacaatttctga

SEQ ID NO: 123529 - DNA, 537 bp, Homo sapiens
ctgtattgagaagaagatcaagggcaacttctagtttttagggaaataggcagtaagattatcagttcagtgtgtggataggtgacaagatgttggagattgagaagaaaggagagagatggctagaaattgagatatggtaggtctgcaaacattggtaatgacaagtttgaggctatggccatgtgagtgagtggttgaagtggagtagaggagaaggccattggtggagaaggtggtcaaggcactgagagccagagtgttggaaacacatctatagccacacaaataaaattagaatcacatttgaagatctgtatagtaaaagttatggccatcaataataagcactccacatggaatgtaatttcaaatatgattttccgatgtgtttttcaaatgctatctgcagataaatagaaragtattaaagagttttgagttataaatgagtggtcaagggaggcagtgtagtgcaatatcaatttgtatgtcagcatgatagattcacttaataaaatatttcttccataatta

SEQ ID NO: 123530 - DNA, 537 bp, Homo sapiens
ctgtattgagaagaagatcaagggcaacttctagtttttagggaaataggcagtaagattatcagttcagtgtgtggataggtgacaagatgttggagattgagaagaaaggagagagatggctagaaattgagatatggtaggtctgcaaacattggtaatgacaagtttgaggctatggccatgtgagtgagtggttgaagtggagtagaggagaaggccattggtggagaaggtggtcaaggcactgagagccagagtgttggaaacacatctatagccacacaaataaaattagaatcacatttgaagatctgtatagtaaaagttatggccatcaataataagcactccacatggaatgtaatttcaaatatgattttccgatgtgtttttcaaatgctatctgcagataaatagaaaagtattaaagagttttgagttataaatgagtggtcaagggaggcagtgtagtgcaatatcaatttgtatgtcagcaygatagattcacttaataaaatatttcttccataatta

SEQ ID NO: 123531 - DNA, 537 bp, Homo sapiens
cagaagtagtggcagctctcttagcaggctaattttgtgatgtgattctgggagttatttctaagatgcagggctrtaatgattctgcttcttgcatcatggaagaagagatcaaaaaggcattaggatgttgactgtagtgatttatcccgattatcagtatgatataggactgctgcttcttaatgtggattgctagggatgtgcctaaaacccagaagatctgtagagttactagtgtgtgctgccatgtccagttataaaagcaaatgagcaattattaggcaggattaccaaaaattaatagccctcagaaaaaaaagtttgcatcacctcataagtaaggaatactggctgactacagttcctcaggttttagaatggctttctataattagatttttaaaaatatcatgtgagagggtattcatattaataaatggatctagtacattaaatattaattatattacatgacttatttggttttgcttttttgaccttatttcattttataatcaataaccttatttcatt

SEQ ID NO: 123532 - DNA, 537 bp, Homo sapiens
cagaagtagtggcagctctcttagcaggctaattttgtgatgtgattctgggagttatttctaagatgcagggctgtaatgattctgcttcttgcatcatggaagaagagatcaaaaaggcattaggatgttgactgtagtgatttatcccgattatcagtatgatataggactgctgcttcttaatgtggattgctagggatgtgcctaaaacccagaagatctgtagagttactagtgtgtgctgccatgtccagttataaaagcaaatgagcaattattaggcaggattaccaaaaattaatagccctcagaaaaaaaagttygcatcacctcataagtaaggaatactggctgactacagttcctcaggttttagaatggctttctataattagatttttaaaaatatcatgtgagagggtattcatattaataaatggatctagtacattaaatattaattatattacatgacttatttggttttgcttttttgaccttatttcattttataatcaataaccttatttcatt

SEQ ID NO: 123533 - DNA, 560 bp, Homo sapiens
cctacagtctggtcctttcaaagtcttttccagaggtctgggttgtttatcggggctgtcttttttgggagccccagaactcccatgttttcctcctcaggctcattaggctgttgtgaaaactcaactcaactcatagtttcagggttttggtcactgttttctgctttgcttcttggcctcttcacctggctcttcttatagcctgacaaatgcctggaagggaaaaacactatgctccacttcccttctcttcatgatcttgaattctcaaattattatcttcaaacaaatacatggtgtattttctccaacttttctaattgtttcagactaagcttgtggaagaattgttctgcaattctgcactaacatcaggaacaggcaatcttgtaggctttcttcagtgagagaaaggtactcagtttcatgttatactcccagtgactttcacaactcttgatgcatgaaagtgctcrgaaattttttcaacgaataaaaatgtgcaagagaagcatgacctaacccatattcagaagcaggttttgatctgaagaaac

SEQ ID NO: 123534 - DNA, 562 bp, Homo sapiens
atccaaatacaccatcagtgtcattcatggctgccaccatggcctggtgagagggtggcaaaatcatagtgacaaaaagcaagaagagctgtttattgcaagcttgatatgcacccaataccatggtaattattttatagagatggtctcattagtccttataataactcaattcagaggtgctatggtagtcccaatttttagatgaggacactgaagcagagaaagattaagtcactatccaaggttatagagctaggaagaggaggaactaggtcagtgattgtggtaggatgtgacctaggaaaatatgttactctgttcaactctccatttcaaattctccagtcaatccctgatcctggtaatgaaggagaaagagagatgtatgactcacttgactgyttcattgccattagcatagaaacactgaaaggggtggagtgcttatttgaaagtttcctttcgccttaggtgtatataattaagcagcggttggtttttcctacagtaagcatcagttggctgaacaatttgtttctttcatattatggtttccctt

SEQ ID NO: 123535 - DNA, 596 bp, Homo sapiens
aatatattaatattaactatagtcaccatgttgtacaaaagatctcttacatttcttcctcctgtctaaaattttgtgccctttgaccaacatctccccaactgcctctccccagcctctggtaaccatccttctcctctgtttatataagtttgatttttttagagtccacacataagtgagtagattttaagtattctaaatgcaaatagataagtatatgaggcaatgattatgttaattagcttgatttagccattccacaatgtatacatgttttaaaacatcataccccataaaatatgcatactctttatttgtcaactaaaaaataagtctgccctcagtcacacattaagatatgacacactcrtatcattctaaacatatttcttggtataataaccccacattaaaaagattggccaaaattgtaaagctcttttgaggacttttaataggaggtatggactaaaaataagtaggtaaagcctacaattctgaaagaatgttcagggaacctgagtcttaagtaactttttaaaagaaggttctatggtcaaatgtttagtaaaggttatttatccctatattgg

SEQ ID NO: 123536 - DNA, 596 bp, Homo sapiens
aatatattaatattaactatagtcaccatgttgtacaaaagatctcttacatttcttcctcctgtctaaaattttgtgccctttgaccaacatctccccaactgcctctccccagcctctggtaaccatccttctcctctgtttatataagtttgatttttttagagtccacacataagtgagtagattttaagtattctaaatgcaaatagataagtatatgaggcaatgattatgttaattagcttgatttagccattccacaatgtatacatgttttaaaacatcataccccataaaatatgcatactctttatttgtcaactaaaaaataagtctgccctcagtcacacattaagatatgacacactcatatcattctaaacatatttcttggtataataaccccacattaaaaagattggccaaaattgtaaasctcttttgaggacttttaataggaggtatggactaaaaataagtaggtaaagcctacaattctgaaagaatgttcagggaacctgagtcttaagtaactttttaaaagaaggttctatggtcaaatgtttagtaaaggttatttatccctatattgg

SEQ ID NO: 123537 - DNA, 565 bp, Homo sapiens
cttattacatgaggcccaataaatatacatgaaatttccaaagtttgttgcagaaagattttattttgctggactttaaattcctattgtttaatgctcaaataagtactatcttcttccttctgcattattttcatcatagcatttactaccatctaatatgtattttgcttatttattttgcttattgttgcttttcccttcctccactagaatgtaatctctaagatgaaagtaacttaaaatttttttaaattgatgtataatagatgcacatawctttgggatacatataatagtttaatgcattcatgtgatttgtaaagatcaaatccatttaattgagatatctatcaccttaaatatttgtttttatgctagcaacatttaaattattcttttctagctattttgaatataaagagtagatcatattttaatataaaatagaagtataaccaattattataaactatagtcaccttacagatctatcaaacactagatcttatttcttccatcaaactgtacatttgtacttgttaatgaaccacaaatgaattcc

SEQ ID NO: 123538 - DNA, 483 bp, Homo sapiens
tcattctaaccatccaaaagcatgtatttaacataaataaatatatacatgcttctgctttggtgggataaggccttttcagtcttaaaatttctgctcttcataaggatatgttctgcacaaagggcaccccattaccttacatagcctccaacttcgggacacttccaaatcaattttcctcatccttgcaattaccatttagattagtgggagttctccagagaaacagaaccaataggatatacagagataaaaagaaatggatttattatgaaagattggctcacataattataaaggcagagaagcctcaccatctgccatctgtaaactgaasgccaagaagagccagtgcagtaattccagcccaagcccacagacctgaggaccagaagaaccaatgatgaaagtctcagtccaaaagcccaataactgggagtgtagaggggacaattgtttatgtctgaatgtccaagaatt

SEQ ID NO: 123539 - DNA, 499 bp, Homo sapiens
tatttttagtagagatggggtttcaccatattggccagggtggtctcaaactcctgacctcaagtgatctgcctgcctcggcctccctaagtgctgggattacaggcgtgagccatcacgcccagcctgcttatttatttatatttataggaagagtaaaatattatcattmttttactggttttctaaggaatgccattaatctatattacatcccagacaacttcaacttgctaaactgccttgataatttagtttataactgaataaccgaggttaaatgacatgaaataattttatagatgagaatttaagcaaagcatccaatatcaataggtgtcctcttgtgattccaaaagttctataaattaaatgtcctggggaatttgcctagaaatattttttcttgttcttacatagatcttcacaattttctagttcaaaaatttcttttacctcaaaacccctctatttggcctattatttgctttagttctgg

SEQ ID NO: 123540 - DNA, 499 bp, Homo sapiens
tatttttagtagagatggggtttcaccatattggccagggtggtctcaaactcctgacctcaagtgatctgcctgcctcggcctccctaagtgctgggattacaggcgtgagccatcacgcccagcctgcttatttatttatatttataggaagagtaaaatattatcattcttttaytggttttctaaggaatgccattaatctatattacatcccagacaacttcaacttgctaaactgccttgataatttagtttataactgaataaccgaggttaaatgacatgaaataattttatagatgagaatttaagcaaagcatccaatatcaataggtgtcctcttgtgattccaaaagttctataaattaaatgtcctggggaatttgcctagaaatattttttcttgttcttacatagatcttcacaattttctagttcaaaaatttcttttacctcaaaacccctctatttggcctattatttgctttagttctgg

SEQ ID NO: 123541 - DNA, 648 bp, Homo sapiens
tttctacatcttaaagttttaactaaagtaattggaatttctttttatgtgctatagaaatccaagctccccacgaagtttctgcacatcccaaggcttgcagtcacatagtcactcctacctctgctcccttgcttttaaaaaatttgctgttgtctgcctctttcctgtcatattagctgtatatgatttttttctcaatttccagttcccaaaacacacacacattatatacatgcaacccactcatgatgtatgtgtaaaataacttttatgaaatgatgattatagaggaagacaaagtctaaagaccacatactttcaataatttcaaattgaatgttgatttctatttttgcaagtctttttcagccctccaacaycaatccatgaagccgccattctcagctcattctctctggcccagagatctcccattcttgtgtgatactctcctctcctccccagatagtgagataatgtatcttccagtctcttacatttattatataagcagagaaatattaaatacccaccgcagggctctgaggatgaatgtaaactgaatgctttttgatcagcctgttgtctgttagatattttgggagtaacaatttttccaaaccaaacatacaaagtatggtgatc

SEQ ID NO: 123542 - DNA, 595 bp, Homo sapiens
tcttctgtagtctaactgtgacataactaacagtaacaatttcatgtggtccatgactcataaatccaaaaattccaggtttatttaccataagcagyaaacaactaggtacatcctgctaaaagcattccataggtaatggccatcaggaggatcaattcgcatgtttaaaagttttgatctgatcattttttctattctaacaacatatctcaatttcaatctaatacgtcttgttaccaggcacaattttatttctcactgcatagaaatagttgcctctgcagtttacctcttcctggccacgataaccacaatccaaatattccacagagagtcttctctcagttaaagaaaatttacctactggcttattactagtatcattatataatctattttagaaaaatccatgaaaattttcttgttcctttctctttctaataatggctgtgaatcacgttgttgactggattattctttgtaataactaatagcaaacccagagccaaaattttcagcctagcagaaagtgttgaggcgttattctgctaaaataaaatgtacgtgtattttgtgtcctaaccttataact

SEQ ID NO: 123543 - DNA, 595 bp, Homo sapiens
tcttctgtagtctaactgtgacataactaacagtaacaatttcatgtggtccatgactcataaatccaaaaattccaggtttatttaccataagcagcaamcaactaggtacatcctgctaaaagcattccataggtaatggccatcaggaggatcaattcgcatgtttaaaagttttgatctgatcattttttctattctaacaacatatctcaatttcaatctaatacgtcttgttaccaggcacaattttatttctcactgcatagaaatagttgcctctgcagtttacctcttcctggccacgataaccacaatccaaatattccacagagagtcttctctcagttaaagaaaatttacctactggcttattactagtatcattatataatctattttagaaaaatccatgaaaattttcttgttcctttctctttctaataatggctgtgaatcacgttgttgactggattattctttgtaataactaatagcaaacccagagccaaaattttcagcctagcagaaagtgttgaggcgttattctgctaaaataaaatgtacgtgtattttgtgtcctaaccttataact

SEQ ID NO: 123544 - DNA, 595 bp, Homo sapiens
tcttctgtagtctaactgtgacataactaacagtaacaatttcatgtggtccatgactcataaatccaaaaattccaggtttatttaccataagcagcaaacaactaggtacatcctgctaaaagcattccataggtaatggccatcaggaggatcaattcgcatgtttaaaagttttgatctgatcattttttctattctaacaacatatctcaatttcaatctaatacgtcttrttaccaggcacaattttatttctcactgcatagaaatagttgcctctgcagtttacctcttcctggccacgataaccacaatccaaatattccacagagagtcttctctcagttaaagaaaatttacctactggcttattactagtatcattatataatctattttagaaaaatccatgaaaattttcttgttcctttctctttctaataatggctgtgaatcacgttgttgactggattattctttgtaataactaatagcaaacccagagccaaaattttcagcctagcagaaagtgttgaggcgttattctgctaaaataaaatgtacgtgtattttgtgtcctaaccttataact

SEQ ID NO: 123545 - DNA, 400 bp, Homo sapiens
gaattctagaactctgctgctgggttctgagtgtttatctatcacatgagattctggaacactgctaaaatgtaggaatgtttgtccctcacaaagagtccagagcaccgcttgtgggttctgagtgtttgtccctcacataggattgcagaacaccgctgctaggttctgagtgtttgtcccaaacataggattcccaaaacactgctcagagggtctgaaagtttattcctcaccaaggattccagaacactgctgctgggttctgaaagtttgtccctcacatacgattccrgaacagtgctatgagggtctgaatgtttgtccctcaaagggattccagaacactgcttttgagttctgagtgtttgtccgacacaaaggattccagaacactgct

SEQ ID NO: 123546 - DNA, 562 bp, Homo sapiens
ggtgtttagagagaaactgtctcaggggagtattttctggtcgacttggctaatattatatgtaatctgaatttttctttcagatacctttaacctcttaatacaattttattcagactgagagctgtttttctcttcaatgctttcggtgtctgtcttcagaagggtcacccaaaagtgtctcatggtgtttctgagtgagttgggctgtcacaatgagaactctttggcactctatccagacccatgctgggaatccagcagtatttttttgtcaccattataaatagaaacgtagctgaaacattgctcccatttccattattgcaaaagtgcaatcctacccaggagtcctgcaggttctcctcctgcagttcagggaccctgctccataatgtgacactggagtgcagctgtggtggttggagtccatgtggaatstgggctgccagctgtgtgctgtgagctgtgcctcagtggtagatggtaggggaagagatgggacacaggccaccaggacagggcaagcaggattactacagcccgtggcctagggagtagg

SEQ ID NO: 123547 - DNA, 601 bp, Homo sapiens
acactgtgtttcttgtgttgagagcggctgtgcattttgggtgtttagagagaaactgtctcaggggagtattttctggtcgacttggctaatattatatgtaatctgaatttttctttcagatacctttaacctcttaatacaattttattcagactgagagctgtttttctcttcaatgctttcggtgtctgtcttcagaagggtcacccaaaagtgtctcatggtgtttctgagtgagttgggctgtcacaatgagaactctttggcactctatccagacccatgctgggaatccagcagtatttttttgtcaccattataaatagaaacgtagctgaaacattgctcccatttccattattgcaaaagtgcaatcctacccaggagtcctgcaggttctcctcctgcagttcagggaccctgctccataatgtgacactggagtgcagctgtggtggttggagtccatgtggaatctgggctgccagctgtgtgctgtgagctgtgcctcagtggtagatggtaggggaagagatgggacacaggccaccaggacagggcaagcaggattactrcagcccgtggcctagggagtagg

SEQ ID NO: 123548 - DNA, 616 bp, Homo sapiens
caggagttctggagactcagactgataaacaaattgcctccatttcatatggcctttagaaaaatagatgaagcagtcatggtccctgtcattcaaaaactctcagtctagarcaactggataaatagtttaattaagcatcatatagtcaatacaataaagtgggagtgttaaggggacttgggcaatggctctgatgttgttgtgacttctgatgtcaccacctgaagagctattctcaaacaggagagttatttgtatttctattgcttttaccttgctaagaatacatattttctaataaaattatcctagaaagccctaaaaattttggttaaattgcttattattatacgttataaaatagagtagtggctaaatggattaaaattatacaaactcttaagtttctcttggacaggcttaggaaagacagaacaagaagtactccagcagtatagagatcataattcaacataggacagtttctccaccccagctctgtccagattcaccattttctgagactcattcaggtctggtcccaccctggagtctctcctcacagaactcattagaggagaccagagatttgggaggtggctcctgctgcctc

SEQ ID NO: 123549 - DNA, 616 bp, Homo sapiens
caggagttctggagactcagactgataaacaaattgcctccatttcatatggcctttagaaaaatagatgaagcagtcatggtccctgtcattcaaaaactctcagtctagagcaactggataaatagtttaattaagcatcatatagtcaatacaataaagtgggagtgttaaggggacttgggcaatggctctgatgttgttgtgacttctgatgtcaccaccwgaagagctattctcaaacaggagagttatttgtatttctattgcttttaccttgctaagaatacatattttctaataaaattatcctagaaagccctaaaaattttggttaaattgcttattattatacgttataaaatagagtagtggctaaatggattaaaattatacaaactcttaagtttctcttggacaggcttaggaaagacagaacaagaagtactccagcagtatagagatcataattcaacataggacagtttctccaccccagctctgtccagattcaccattttctgagactcattcaggtctggtcccaccctggagtctctcctcacagaactcattagaggagaccagagatttgggaggtggctcctgctgcctc

SEQ ID NO: 123550 - DNA, 590 bp, Homo sapiens
cagtgctctgtaacacactcctgagcacatagtacctgcttaataagcattgcataagtatatgtgtacatgttgtttttcagtgcagacttactcagacattgttgccttctcctgtctctgtaaactttaaagagctaacaaagaatgtggtttttcaggatagagattgattgtttatttgatcagaagtatttgtgttgtgatgagtgatgagtgtgagagtctgttctatgcctkctttttctagctaaatgctactaatgatgggtctgtggaagctacatcagcattgacaggagatgtgtttaaaatgcactttcatggatgcttttaaaacctgcagaatcacattacatagtgtggggccagggttaccaaatgatttatatgcacattgaagtttgagaggcaatgcttagctaagtggttcttggcccaggcttctaattaagattccatggccaggttgcagaaatcttttcacttgtgcccttcccgcaggctctgtatattgatctgggtggaagcatccttgatgatataattaagtgcctcatgtgactccaggttgaggccagggtcaaaca

SEQ ID NO: 123551 - DNA, 590 bp, Homo sapiens
cagtgctctgtaacacactcctgagcacatagtacctgcttaataagcattgcataagtatatgtgtacatgttgtttttcagtgcagacttactcagacattgttgccttctcctgtctctgtaaactttaaagagctaacaaagaatgtggtttttcaggatagagattgattgtttatttgatcagaagtatttgtgttgtgatgagtgatgagtgtgagagtctgttctatgcctgctttttctagctaaatgctactaatgatgggtctgtggaagctacatcagcattgacaggagatgtgtttaaaatgcactttcatggatgcttttaaaacctgcagaatcacattacrtagtgtggggccagggttaccaaatgatttatatgcacattgaagtttgagaggcaatgcttagctaagtggttcttggcccaggcttctaattaagattccatggccaggttgcagaaatcttttcacttgtgcccttcccgcaggctctgtatattgatctgggtggaagcatccttgatgatataattaagtgcctcatgtgactccaggttgaggccagggtcaaaca

SEQ ID NO: 123552 - DNA, 550 bp, Homo sapiens
ccaaatgatttatatgcacattgaagtttgagaggcaatgcttagctaagtggttcttggcccaggcttctaattaagattccatggccaggttgcagaaatcttttcacttgtgcccttcccgcaggctctgtatattgwtctgggtggaagcatccttgatgatataattaagtgcctcatgtgactccaggttgaggccagggtcaaacacgaggaattcagaatacattcatgagagttgagttcaaactttattccaaagggaggtcacagggtctactatggttggatttggtaggtacaagttaatgtggcccatatccccattgctgtagcagaaattgttgcgtctgtggcaggaaaagagaaagataaattttgatctttgtggaggagctcactgtccttgaatctcacctgttataaagaacataaatgggtggacatgttctgcatgcctggatctttctacctgtgtttgtggtggtagcaggtgaagagattgtgctgattcctttaaaggcatattcccaagatgcaggtgtga

SEQ ID NO: 123553 - DNA, 550 bp, Homo sapiens
ccaaatgatttatatgcacattgaagtttgagaggcaatgcttagctaagtggttcttggcccaggcttctaattaagattccatggccaggttgcagaaatcttttcacttgtgcccttcccgcaggctctgtatattgatctgggtggaagcatccttgwtgatataattaagtgcctcatgtgactccaggttgaggccagggtcaaacacgaggaattcagaatacattcatgagagttgagttcaaactttattccaaagggaggtcacagggtctactatggttggatttggtaggtacaagttaatgtggcccatatccccattgctgtagcagaaattgttgcgtctgtggcaggaaaagagaaagataaattttgatctttgtggaggagctcactgtccttgaatctcacctgttataaagaacataaatgggtggacatgttctgcatgcctggatctttctacctgtgtttgtggtggtagcaggtgaagagattgtgctgattcctttaaaggcatattcccaagatgcaggtgtga

SEQ ID NO: 123554 - DNA, 550 bp, Homo sapiens
ccaaatgatttatatgcacattgaagtttgagaggcaatgcttagctaagtggttcttggcccaggcttctaattaagattccatggccaggttgcagaaatcttttcacttgtgcccttcccgcaggctctgtatattgatctgggtggaagcatccttgatgatataattaagtgcctcatgtgactccaggttgaggccagggtcaaacacgaggaattcaraatacattcatgagagttgagttcaaactttattccaaagggaggtcacagggtctactatggttggatttggtaggtacaagttaatgtggcccatatccccattgctgtagcagaaattgttgcgtctgtggcaggaaaagagaaagataaattttgatctttgtggaggagctcactgtccttgaatctcacctgttataaagaacataaatgggtggacatgttctgcatgcctggatctttctacctgtgtttgtggtggtagcaggtgaagagattgtgctgattcctttaaaggcatattcccaagatgcaggtgtga

SEQ ID NO: 123555 - DNA, 412 bp, Homo sapiens
gaattcctaatttaccctaaaggtttcattttcttcctttgtaggatgtgttttggtaatttctgctttgcatgagtaaatttcagatccctgttttcaagacaatcttgcggattttttggtgtggaaaatgaattcttcaggttgtttcattttgacctgaaytttcccctttcctgagtttatctatgttattcactctagataagtggtaatttcagaaacttagtgacataaaataatgttgtccacaccttaaaattcaattgccaccaccaatttttgattcagtaatactggggagtgaaacagaggaccctcatatttaatgtactttctgaatacgctaaaggttctgtcagtaaaaagtattttgggattaattttctagaatcttctattatgtcctctt

SEQ ID NO: 123556 - DNA, 412 bp, Homo sapiens
gaattcctaatttaccctaaaggtttcattttcttcctttgtaggatgtgttttggtaatttctgctttgcatgagtaaatttcagatccctgttttcaagacaatcttgcggattttttggtgtggaaaatgaattcttcaggttgtttcattttgacctgaattttcccctttcctgagtttatctatgttattcactctagataagtggtaatttcagaaacttagtgacataaaataatgttgtccacaccttaaaattcaattgccaccaccaatttttgattcagtaatactggggwgtgaaacagaggaccctcatatttaatgtactttctgaatacgctaaaggttctgtcagtaaaaagtattttgggattaattttctagaatcttctattatgtcctctt

SEQ ID NO: 123557 - DNA, 640 bp, Homo sapiens
gttatttgaattgaaatttttattcttttagtactaactgaggttggtaatttcaattctgtcttaatttctcaactgtaatataacgtagatatttcctacatttctacaattcactatgtcagggaacttagaacattactgagcatatgttaagctcccacttctttccttgttttttaaattactattttttaattttatcttgttcaggataaagtttaccagaactgtaatttatatgtgtgtatatatatgtaggtgtgtattgtggatttttttayaaataaaaattgtatatatatttattgtgtacaatgtaatgacttactgcatgtgtatattgtaaaatgattagcacaattatgtttctgagcatttttatcacctttcctcacataggtaccttttttgtaatgaaaacatctaagatctgctgacaccaaattttaagcatacaaaaatttagtgttaactgtatcatgaagctatacattacatttgaaaaacttactcataacagaaaatttgtgtcttttcaatatcttttcattttctcccatatctagtccctgacaacttccattgtagtctctgcttctgtgagttcagctttcttagattccccatataagtgaga

SEQ ID NO: 123558 - DNA, 640 bp, Homo sapiens
gttatttgaattgaaatttttattcttttagtactaactgaggttggtaatttcaattctgtcttaatttctcaactgtaatataacgtagatatttcctacatttctacaattcactatgtcagggaacttagaacattactgagcatatgttaagctcccacttctttccttgttttttaaattactattttttaattttatcttgttcaggataaagtttaccagaactgtaatttatatgtgtgtatatatatgtaggtgtgtattgtggatttttttacaaataaaaattgtatatatatttattgtgtacaatgtaatgacttactgcatgtgtatattgtaaaatgattagcacaattatgtttctgagcatttttatcacctttcctcacataggtaccttttttgtaatgaaaacatctaagrtctgctgacaccaaattttaagcatacaaaaatttagtgttaactgtatcatgaagctatacattacatttgaaaaacttactcataacagaaaatttgtgtcttttcaatatcttttcattttctcccatatctagtccctgacaacttccattgtagtctctgcttctgtgagttcagctttcttagattccccatataagtgaga

SEQ ID NO: 123559 - DNA, 568 bp, Homo sapiens
atccagttttttcagaagcaaatattaaaaagactatactttgttcattgtatatttttggtgcacttatcaaagattagtaaactttatatgyctgggtttatttctgggctctattctgttccattggtttattgtgtccatattttgcatgtatcatctcttttttttactacaatcttaaaatatagtttgaaatcataaagtatgaagtttggttgctttgtcccttttcctctagattgctttggtttttcaaagcctatcgtagtttcatgtaaattttagaattgtaatttccattactgtgaaaaatgtcactggatttttaatagagagttcattgaaactgtagatcactttgaatcatatggcgctttataatatttattcttccagttcataaacttgaaatctttttgcatttatttgtgacttcttccacttctttcatcaatatatgtttcagtgaaaagatcttttgccttctttgttaaatttatttttcagaaatttattattttaattctattggaaatgagattgttttcttccttttttatcagat

SEQ ID NO: 123560 - DNA, 568 bp, Homo sapiens
atccagttttttcagaagcaaatattaaaaagactatactttgttcattgtatatttttggtgcacttatcaaagattagtaaactttatatgcctgggtttatttctgggctctattctgtkccattggtttattgtgtccatattttgcatgtatcatctcttttttttactacaatcttaaaatatagtttgaaatcataaagtatgaagtttggttgctttgtcccttttcctctagattgctttggtttttcaaagcctatcgtagtttcatgtaaattttagaattgtaatttccattactgtgaaaaatgtcactggatttttaatagagagttcattgaaactgtagatcactttgaatcatatggcgctttataatatttattcttccagttcataaacttgaaatctttttgcatttatttgtgacttcttccacttctttcatcaatatatgtttcagtgaaaagatcttttgccttctttgttaaatttatttttcagaaatttattattttaattctattggaaatgagattgttttcttccttttttatcagat

SEQ ID NO: 123561 - DNA, 568 bp, Homo sapiens
atccagttttttcagaagcaaatattaaaaagactatactttgttcattgtatatttttggtgcacttatcaaagattagtaaactttatatgcctgggtttatttctgggctctattctgttccattggtttattgtgtccatattttgcatgtatcatctcttttttttactacaatcttaaaatatagtttgaaatcataaagtatgaagtttggttgctttgtcccttttcctctagattgctttggtttttcaaagcctatcgtagtttcatgtaaattttagaattgtaatttccattactgtgaaaaatgtcactggatttttaatagagagttcattgaaactgtagatcactttgaatcatatggygctttataatatttattcttccagttcataaacttgaaatctttttgcatttatttgtgacttcttccacttctttcatcaatatatgtttcagtgaaaagatcttttgccttctttgttaaatttatttttcagaaatttattattttaattctattggaaatgagattgttttcttccttttttatcagat

SEQ ID NO: 123562 - DNA, 573 bp, Homo sapiens
tggtctcaagacgccctcccacctcagcctcccaagtaacttaggactacagttgtatactactatggttggctaatttttgtattttttgcagagacaaggtctcactatattgctcaggctggtttcaaattcttgagctcaagagatttactagtctcagccttctaaagtgctaggattacaggcatgagacacaatgcctggcccgtaattttgttttattatattaaggtgaggtttctaccacattcttctggttacagaagtaatacatgctcaytgtatacactgaaaaatgtaaacagtataaagaagaaaataaaaaagaatatgaaaatgactagtggtcccattgcctaccgtaacattatgtgctgcttcctaatctttacttcctctccctccatgtgtgtctttgtgtgtgtgtgtgtctgtctgtccgtgtggttttttgtttgttttttttggcacatagtacaatagctgacatttatatctccccgaccagtgttgagcatggtgttaagcaattgacaaagtgtattgtatttaactcctacagaaaaccta

SEQ ID NO: 123563 - DNA, 615 bp, Homo sapiens
attataaatgtaattacttttgaaagaccttggaaaatttaaacccttaaaaaagagtactctggagacaaacattacaaatataaagagggttgtaatacctttacttgccctatataatgtacagattttatgctagaagaaaactctaaaggaattactcaaacttgttcagcrtcagagaatttatgttgaaggaaaccatacaaatgtaataaatgtggaaaaacatttgttcagaaactacagcttaaaaaacaccatgcagtttataataaaagatatttttgcagatggaatacatgtgtaaaaatatttattcaaaattaagtctttgtaaactttagaaaattcacagtagggaagaattaaggcactggcacttaagacgttacactaaatcagaatgttctgtatagaaagtaatccaaagctaaaactggtggataatttatttgtatataagtttaagaggagtggaagattattttttggagagttataattacattcaaggtatatgtttttccttgaaaaaaatgtagattttttgaaaagcaaatagtgaggtaattcaactgtaaaactgcttcattctgttccttttttcctgtt

SEQ ID NO: 123564 - DNA, 587 bp, Homo sapiens
aaaggtgctggaaaaactgtttagtcatatgcagaagasgaaaactcgaccactacttctcatgatatagaaaattaactcaagatacattaaagacttatctgtaagagttcaacctataaaaatcctagaagaacacctagaaaattctctccttggcattggtctctgtaaagaattaatgactacatcctcaaaagtgaaagcaacaaaaataaaaattaaaaattgtgacctgcacagcaagagaaactattaacaaaataaacagacaacctatagtatgggctaaaatatgtgtaaactgcatacaataaataactaatatatatgttttataaggaatttaagaaaaaatgttgacaaaaaatgtgaacctatacttttaaaagaaagacaaaaaaagcagccaacaaacatgaaaaattgatgaacatttctaatgattagagagatgtaaatccaaaccacaatgtgataccatctcaccccagtctaaatggctattatgaaaaagtaaaaaaaaaaaaaaaaaaaacagatgttaaaattgtgtagaaaagagaaccctgatatactcttagtgg

SEQ ID NO: 123565 - DNA, 548 bp, Homo sapiens
tgactttggtaatttttacaaatggtttttgcctggtactgttgaagttaggctgaattttgraccagtagatttgttgtttaccttatgtggttttgggttcatttgttctatatgcataatgcgtatccttttgggggtaatttggctttatttctgcttttttatttttacatctgggactggagaaattgctagaatttcaataaggttgatttgaaatcaggcaacagaaaatcccagaaaacactcaaggttgtatgtactggataatgcctttaggtgaggcttatacataaaacacaattcagtaaaatttatataatcattcaagtttgttaaatttgataacaaaatgcctatgacatattaggcacttgtcttagtttgtctttgacatccctatcttggagaagctgatattacatgaaaggatattactaatataatataataagaagtggaacaaatacttatgtgctagaaacattcccattaataacccttaaatacattttattctggctcaattctttttttttttaatt

SEQ ID NO: 123566 - DNA, 548 bp, Homo sapiens
tgactttggtaatttttacaaatggtttttgcctggtactgttgaagttaggctgaattttgaaccagtagatttgttgtttaccttatgtggttttgggttcatttgttctatatgcataatgygtatccttttgggggtaatttggctttatttctgcttttttatttttacatctgggactggagaaattgctagaatttcaataaggttgatttgaaatcaggcaacagaaaatcccagaaaacactcaaggttgtatgtactggataatgcctttaggtgaggcttatacataaaacacaattcagtaaaatttatataatcattcaagtttgttaaatttgataacaaaatgcctatgacatattaggcacttgtcttagtttgtctttgacatccctatcttggagaagctgatattacatgaaaggatattactaatataatataataagaagtggaacaaatacttatgtgctagaaacattcccattaataacccttaaatacattttattctggctcaattctttttttttttaatt

SEQ ID NO: 123567 - DNA, 571 bp, Homo sapiens
taaatttgataacaaaatgcctatgacatattaggcacttgtcttagtttgtctttgacatccctatcttggagaagctgatattacatgaaaggatattactaatayaatataataagaagtggaacaaatacttatgtgctagaaacattcccattaataacccttaaatacattttattctggctcaattctttttttttttaattgatggagtttctctcttgttgcccaggcttgagtgcaatggcatgacctcggctctcttcaaccttcacctcttgggttgaaactattctcctgcctcagcctcccaagtagctgggattacagcacctgccaccatgcctggataattttttgtatttttagtagagatggggcttcactatattggccaggctgttcttgaactcctgatctcaggtgatctgcccacctcggcctcccaaacttctgggactacaggcatgagccaccacacccagctggctcaattcttttggcaccactgttttttgtcccacaggcttcttcccaccaaatttaagccatggtgttttcaagtttg

SEQ ID NO: 123568 - DNA, 614 bp, Homo sapiens
aataaaatattattcaatcttaaaaaagaataaaatcctgccatttgcagcaacatggacagaaatggaggtcattacgttaagtgaaatcagccagacacagagacaaatgtcatatgttcgcactcataaatgggagctaaaaaagtggatctcatgaagatagagagtagattggtggtttaccagaggccaggaaagatagagggtgaagagtaacaaagagaggttgattagtgggtacaaatacttagtttggtagaagaaataagatctactctttgagagataaggagagtgactatcrtttactctaaatgtgtataaatactctattgtgtatcaaaaaaatcaaaaaataaaaaataagttaaaaaacataaagcaaaaatacacagaaatgatagagaaataaacaatttgacaacaatagttggaggtttcagtacttcactctcagttgtagatggaacaactaagcagaagattacaaggatcaatcttaaaaacaaactataactaaaagacacccatggaacaaccatacctggaacattcttagactatccattggcttacaaaacaaggcacaataaatgtaaatgactgagatc

SEQ ID NO: 123569 - DNA, 466 bp, Homo sapiens
tacagctccctttctggctgctttcatgagctggcattgagtgtctgcagcttttccaggtgcatggtgcatgttgtcagtggatctaccattctggagtctggacgatggtggccctcttctcacagctccaccaggcagtgccccagagggtgcttgactccacaattcccttccactctgtgctaacagaagttttccatgaggactctgcccctgcagcacacctctgcctggacatccagacatttccacaaattctctgaaatctatgtggaggttctcatacctcaattcttgatttctgtgtacctggaggcccaawgccacatgtaagctgccaagacttgagactttcaccctctgaagcaatgacctgatctatacactggctcctcttagccacagctgggatgcaggggagcaagtttggagagtgctcaaagcagcaaggccctggacccaa

SEQ ID NO: 123570 - DNA, 589 bp, Homo sapiens
attacaaatctctcacataataagaatcagcatctctccccagtctcctgatgaaactttttggcactgtgtttacatctcaagtacagaaagctcacttgcaatcctcatgactaagctaatttcactgacttggttaaaaagatattttccattttttttaacagcacagtctttgctaaagaatggctaccagggtttaatctcttatcctaattcgaatcacacagtccataatttcctggtatccaaacaaattcagtgggcaggcatgaacaaaatttggccataaacactagtaaycaccattttgtttcaagctttaataagagattgtggctacaatgctacttgccaatggagagaagtcctcatatcaacctcggcagtggatatgatttatttaaaaaagaaagaaaccaggagtcatctgggtaaaattaactgcctgtggtatgaactttgatcagcctaccagaaccacaatctagcaccaaaatccttgggtaaatcaaaaacattagaataaaaaataaagaaaatacaggcaaagagagagaaagcaaaactattctaaaactcatgtcag

SEQ ID NO: 123571 - DNA, 578 bp, Homo sapiens
atagaaacacaactgaaaggaaaatgacaaccaatcaaccagtaaaactgcaataaatacttttcaggtgagaaaacgtcaaaagagtgtggatttggaagtctttccattgtgctaattatagatcttttttatctctctgaacacttgtcaatagtcattaggtttatacaattttctctttttaatgcatcaaaaaatcaccaaataggaagaagtaaatctgtataacaggacatctaacaattggttttaaaatacataacctacagyctaaaataaagaagaaatatatacatgtgaagcgtttttttgactgactatattataaattatgctaaaattgtactgcaaatgaactctcctcacctcccaaataataacaaaacatacagtgaaactaaattgtacaagttatattaaggctctcaaatttaaactaagcataaaaactgagcaatttatcttgggattctaaaaaaaaaaagaatctaacaaaattcaaattgatgatacccgacatgttgtcataatataacagtcaaagtttactctctgaagaaatatcaagttttaaa

SEQ ID NO: 123572 - DNA, 567 bp, Homo sapiens
aaaaacccttgtcagtcagttgcagtggctcacaccggtaattccagcactttgggaggccaaggtgggcagatcacttgagcccaggagtttgagacmagtttgggcaacatgacggaaccctgtctctacaaaaactacaaaaaattagccaggagtggtgatacgtacatatagtcccagctatccaggaagctgaggtgggaggatcacctcagcctggtggtcgaggctacagtgagcctttttgataccactgcactccagcctggacaacagtgagatcttgtctctaaataaaagaataaataaataaacacatttgtcaaaatattaaaaatgtcttactgttggttatatatgcatagaaaagtaaaaaccaaaaaaaaaccctaaaactagtatttatatagtacactataatttaaaacactgataattaaaatacatgttttatatatttctttgaaatgtattcagagtagtttgtacagtatttgcacaacttctcatcatgtgactctcaatattttttatgctttggtgaattgccatacttctttataa

SEQ ID NO: 123573 - DNA, 575 bp, Homo sapiens
ttgattattgatagatattgagaaaagtgacatgactgatcatggatcttgatgcaaatctgatatttacctaatagttttatggactgaagagttaacagaaaaaaattgtacttcaatccgttagtcccaattaatacactsctgtacctaaactgttttgttttggggcttgtgctatgtaactaaagcatgataactaaagcctttgcatatcaaaactaaggaaaacaagaactgtctattttatgagccctatatcaatcattaaaattaaaacaaaatggaatggttaaaagttaatagtggagataaaagcggatcttaaaaactaaattctcaattcaaaagaaggcagaaaaagggggaaaatgaacagaaatgatgagatatttagaaaacatatagcaagagagtagttacacacccaatcatattgataattacattaaatataaattgacaaaatattcttattaaaaggcagagatcataagacaggattaaaaacactgactcaactatatgctctttataagaaacttatttgaaccaaaaaaaaaaaaaaagaaaaa

SEQ ID NO: 123574 - DNA, 575 bp, Homo sapiens
ttgattattgatagatattgagaaaagtgacatgactgatcatggatcttgatgcaaatctgatatttacctaatagttttatggactgaagagttaacagaaaaaaattgtacttcaatccgttagtcccaattaatacactcctgtacctaaactgttttgttttggggcttgtgctatgtaactaaagcatgataactaaagcctttgcatatcaaaactaaggraaacaagaactgtctattttatgagccctatatcaatcattaaaattaaaacaaaatggaatggttaaaagttaatagtggagataaaagcggatcttaaaaactaaattctcaattcaaaagaaggcagaaaaagggggaaaatgaacagaaatgatgagatatttagaaaacatatagcaagagagtagttacacacccaatcatattgataattacattaaatataaattgacaaaatattcttattaaaaggcagagatcataagacaggattaaaaacactgactcaactatatgctctttataagaaacttatttgaaccaaaaaaaaaaaaaaagaaaaa

SEQ ID NO: 123575 - DNA, 575 bp, Homo sapiens
ttgattattgatagatattgagaaaagtgacatgactgatcatggatcttgatgcaaatctgatatttacctaatagttttatggactgaagagttaacagaaaaaaattgtacttcaatccgttagtcccaattaatacactcctgtacctaaactgttttgttttggggcttgtgctatgtaactaaagcatgataactaaagcctttgcatatcaaaactaaggaaaacaagaactgtctattttatgagccctatatcaatcattaaaattaaaacaaaatggaatggttaaaagttaatagtggagataaaagcggatcttaaaaactaaattctcaattcaaaagaaggcagaaaaagggggaaaatgaacagaaatgatgagatatttagaaaacatatagcaagagagtagttayacacccaatcatattgataattacattaaatataaattgacaaaatattcttattaaaaggcagagatcataagacaggattaaaaacactgactcaactatatgctctttataagaaacttatttgaaccaaaaaaaaaaaaaaagaaaaa

SEQ ID NO: 123576 - DNA, 575 bp, Homo sapiens
ttgattattgatagatattgagaaaagtgacatgactgatcatggatcttgatgcaaatctgatatttacctaatagttttatggactgaagagttaacagaaaaaaattgtacttcaatccgttagtcccaattaatacactcctgtacctaaactgttttgttttggggcttgtgctatgtaactaaagcatgataactaaagcctttgcatatcaaaactaaggaaaacaagaactgtctattttatgagccctatatcaatcattaaaattaaaacaaaatggaatggttaaaagttaatagtggagataaaagcggatcttaaaaactaaattctcaattcaaaagaaggcagaaaaagggggaaaatgaacagaaatgatgagatatttagaaaacatatagcaagagagtagttacacayccaatcatattgataattacattaaatataaattgacaaaatattcttattaaaaggcagagatcataagacaggattaaaaacactgactcaactatatgctctttataagaaacttatttgaaccaaaaaaaaaaaaaaagaaaaa

SEQ ID NO: 123577 - DNA, 431 bp, Homo sapiens
tcctgctcctctttgagctgtgtgttcatctaggctgcttgctgttgccacagtagctataaattaaccaatracgccacaccagacactataatccacacccaataatagtgtaacagtgtatagccagtcactaataaatgttatttccataagccaatgagaatttgtgacaaacctctttgcatcatcccacttctggacccttttttgcctttaagaaactgcttgttgcaaagctccgaagggagttcatatccaaggacacttgggtctgtttcttccaggcagctgtcctcattttggctcaagtaaactctgaattacattttgtgcctcagcctcttccacttagattaacaacatggatttgtgtcaccatgtacagcaattaaaatgtttacacttttcccctcgagggcattgatgtg

SEQ ID NO: 123578 - DNA, 431 bp, Homo sapiens
tcctgctcctctttgagctgtgtgttcatctaggctgcttgctgttgccacagtagctataaattaaccaataaygccacaccagacactataatccacacccaataatagtgtaacagtgtatagccagtcactaataaatgttatttccataagccaatgagaatttgtgacaaacctctttgcatcatcccacttctggacccttttttgcctttaagaaactgcttgttgcaaagctccgaagggagttcatatccaaggacacttgggtctgtttcttccaggcagctgtcctcattttggctcaagtaaactctgaattacattttgtgcctcagcctcttccacttagattaacaacatggatttgtgtcaccatgtacagcaattaaaatgtttacacttttcccctcgagggcattgatgtg

SEQ ID NO: 123579 - DNA, 456 bp, Homo sapiens
gattaactgagtctggcacgtttacatttcaaaaaaccatttcctatctttacttcccaagaggagggctgctccctgtgaggtttcatccatgtaacaagacaacttctgctgccaggctcctctttcttccttgtcatcacctgccttctgcaaagcctgatttagcaaagtayagctctgtgttttctgtaacttcaagacagcataggcgtgttgactaccttgcctttcctggagtttttatacatatatagtatatatttgtatatcgatttataatatacaaatatttgtatatacatatttatatatattatgtaaactccaagtgcatacttgtgcacataattatatccgtaaaccttttttcctgttaatttgtacattatcagtttgtttgatagactcaaataattaaagcttcaagggaaatataaagaactaattaagtta

SEQ ID NO: 123580 - DNA, 591 bp, Homo sapiens
acgtcatcttataattttttctgcttctttctgatcaaaggcacctgtctgcacagtggtatctacagcaaagcactgatcttctggtgcccccaggtaggtactctctccctgtccccaaatgctatattttatataatatctttgccttcgaaaacctattgccaattttcttttyacaaaaataaaacacgtgtattgtagactttttagggaaaaagataagcagaaataacatgctaattagccacagttcccatcacccagagataatccctgttttttaccaggcttttccctgtgttcataagaatgttattttgaacaaaaacagtgtaacatttttgaaaacagatatcccaaaatagtaatggccctattcaaactcagtaaacctgctaaatttggtgagcaacctgcctctctaagcttaatacaagccctctgtgacagttggataaacaattcacctgaattttactcttatgatttaagttgcattttgccacattaaaacattatagcactctttggtctgtagtttatttttggatttatttagcacaaatgaagctactaattggcagtctt

SEQ ID NO: 123581 - DNA, 595 bp, Homo sapiens
tttaaaaaaccaaatctcacgagaactcactgtcacaaagagagcaccaagccatgaaggatccacccccgtaatcaaaacacctcccaccaggccccacctccagcattggggattaaaattcaacatgagatttgggcagggacaaatatccaaatgatatcaaatatttttgtccactttttctgcggtttgtagtcaaaagcattcctaacttatattaataagtgagacttcaatagccaaagatgcttcagggagagaatttttggcacaaagcacagccttaacaggagtacagaaatagggagcctaagggccatgtatgaggaaagcaagacctctartgtggcttgagaacaaggttactaaggccaagtaactgaaaacattttttaaaaattgcgggtcataggccgggtgtggtgactcatgcctataatcccagcactttggaaggccgaggcaggcggatcgcctgaggtcaggagtttgagaccagcctggccaacatggcaaaaccccatctctactaaaaatacaaaaattagctgggtgtggtggcaggcgcctgtaatcacagctacttgggaga

SEQ ID NO: 123582 - DNA, 605 bp, Homo sapiens
atttgaaccagcaattaatttcatagttaacatttaaataggcgtagaaatgtagcattttgttttgcagctgggtagcaagtacacccagctttctggaatacagtcagaaagctggagatttaaaatgcctatgaggagatatgaggacatgaggatttctgcacattcargtcaaatccttcttcctttgaaaaaaggtttaggctaaaggttgtggtgtcctctttaatatccctcaatggctatgaagctgacatgtttccatgggaatttcggcatgaaaggatatatattaaaagctgtatggtgatgtcatcacacttgttagggactttgcacaagaaatacaattatttttcttttttgtttttgtagagtctgggtgttgctatattgtacaagatggtcatgaacttctgccctcaagcaatcctcccgcctcagactcccaaaatgctggaattacaggcaggagccactgcaccaggccaaaatccaattttttaaaaagtcaaatataaagaaagacctaacaaattaaatgataagcaaagtagctcacctagtaagcagaagagccaacatacaattctcagccactg

SEQ ID NO: 123583 - DNA, 605 bp, Homo sapiens
atttgaaccagcaattaatttcatagttaacatttaaataggcgtagaaatgtagcattttgttttgcagctgggtagcaagtacacccagctttctggaatacagtcagaaagctggagatttaaaatgcctatgaggagatatgaggacatgaggatttctgcacattcaggtcaaatccttcttcctttgaaaaaaggtttaggctaaaggttgtggtgtcctctttaatatccctcaatggctatgaagctgacatgtttccatgggaatttcrgcatgaaaggatatatattaaaagctgtatggtgatgtcatcacacttgttagggactttgcacaagaaatacaattatttttcttttttgtttttgtagagtctgggtgttgctatattgtacaagatggtcatgaacttctgccctcaagcaatcctcccgcctcagactcccaaaatgctggaattacaggcaggagccactgcaccaggccaaaatccaattttttaaaaagtcaaatataaagaaagacctaacaaattaaatgataagcaaagtagctcacctagtaagcagaagagccaacatacaattctcagccactg

SEQ ID NO: 123584 - DNA, 618 bp, Homo sapiens
gctgggattacagatgcccatcgccacacctgggtaatttttgtatttttagtagagatggggttttgtcatgttggtcaggctggtctcgaactcctgacctcagatgatctgctcaccttggcctcccaaagtgctgggattacaggtatgagtcactgtacccggccccaaattttttaattgagaaaaagtaaatggccccccttcctctatgaatcagataaatatatttttaaatcacctagttaaaaaaaatatagatccctgggtttcaccctgggtctactgaatacagtctctatgggtggacatcaggcaagtggatgcttaaaacgttccccacatgattccaatgmacagccagggaagggcattgcttgccttggctgggatgtttcaatccttcaacccttttacccttaacacattagtgccactttccaatgtaaatggaagaactaatgtgttattcctaactcaatttttgtgaatagttcatggtggcaaaaaaaaataccaatagtaaaaacatcttttcaaagggcatacataggcaactttatacattaatgtaggataaacactgggtataccaaaaggctttgagaagctgat

SEQ ID NO: 123585 - DNA, 590 bp, Homo sapiens
cttaaaggatgaaatgatttaaccttaggaccacacagataatggcaggtcagaactgtaagccatgtctgaggtctccaacctcagctgtcttccctgatgcaatcatcccaggggaaagctggggcaacctcaggctatatacatacaagggtctgtactacactgttgaaataaaagcaayagcatactatttggaatataaggattggtcagtactctctattgaccataacaatcacttgaaagaatcataactgtcccaaacacagggcaacattgtaaaataaataaacaaagtaacaatttttgcaaaaacatttggcaaaacaaagtaatcacgttgaaaacaaaagggtcttggtagaaaaaaattttccttataaacgagaacctagaatcccttaatttagatttatgactaaaaagtgctttaagaatatagtcaaaattattttcatatatacttcaaaatgaactgctttttttttttttttagtttggtaaccaccattatcagttatatgactaacttattaaatgtaatcctaatcctgaagtaatttatcttgaactaatgcttcctatta

SEQ ID NO: 123586 - DNA, 444 bp, Homo sapiens
cttagtacactgccagaatacagctagcatatatagctctactctttttagtgtggttatctagcttttgactgataatttccaggattgggacataccatagtactgactattcaattattggaaatttctaaattgaaaccatctttgctctacattcatttgaaactggtttctatgtaaattctaactattagcgttacttccactctctaaaataaaattggttagaatctaattttactattcctggttgaaatctaattctactcactagctgcatattatttgaatgaaggttatcttttttttagagggcggacgtcagattactcatgaaaaattctcctatagtgctcagtccaatgtaggaaatagtgagctatctagtagtgagataagtaggcctgctaytagttccaattctgtcaataactctatgac

SEQ ID NO: 123587 - DNA, 650 bp, Homo sapiens
cctggcttcaagaactctccagtaacatttagcataggtctcatgaagcaccaggctacattgccaatagcaattatataatcctgtcattggagaaaaggttttatcctttcaaaacctcgttattcaaatctgactaatggtataatggaaaaaataagtcacaatgaggtgatacataaatttaaactaaawtatataaagcatttctattttatttcttacatgtttttgttgcggttttatcagtgccttgaaacagaaagtattcagactgtcctaacagatgctgaaagagcaataatgatgctgagaaaagagctattctgtgttcgaaaacatgtaaatgactcggttatcaattagcgtttttacagagatggcaggatattgtactaagcactgttttaaaagagttatgagtctatacccttgggtaagttatgaacttacaaccaaaattcacatatataatatgcaaaaaatctttaggcagatttacaataaaccatttcagtcacaaaaggatagaatggctcttaagtaaacatttattttgtgtgtactattgggtatatccatgcatgctcaatggatagaaattacaggtaggctgcaagtcacatggattctagatgtacataatacgc

SEQ ID NO: 123588 - DNA, 608 bp, Homo sapiens
ggatatctttacatttgtttgtgtcttcttcaatatcttccaccaacattttagttttcattgtggtctttcamctattcagttaaatttattttaagaatttttttcttgtaactattatatatgggattgtttcattgattttgtgtgtgtgtttgtggatagttcactgtaactagggagagtttttaaaaactttttctttcttaaatccaagctctcaaaagcgttgctaaaagttgcttgcttttgtataaatttaaggcatgcaaatacagttttgttaagtgaatatattatgtagtggtgaagtttgggtttttagggtaaccattacctgaataatatacatcagactattaagtaattttttaaccctcaccctcctcccactcttccaagtctctaatgtctgttattctacactctgtccatgtgtatacattatttagttcttactttataactgagaacttgcagtatttggttttctgtttctgagttgtttcacttaagacaagggcctttatttccatccatgttgctgaaaaagacatgatttcattcttttttatggcagagtagtattccattgtgcatatgaacct

SEQ ID NO: 123589 - DNA, 608 bp, Homo sapiens
ggatatctttacatttgtttgtgtcttcttcaatatcttccaccaacattttagttttcattgtggtctttcacctattcagttaaatttattttaagaatttttttcttgtaactattatatatgggattgtttcattgattttgtgtgtgtgtktgtggatagttcactgtaactagggagagtttttaaaaactttttctttcttaaatccaagctctcaaaagcgttgctaaaagttgcttgcttttgtataaatttaaggcatgcaaatacagttttgttaagtgaatatattatgtagtggtgaagtttgggtttttagggtaaccattacctgaataatatacatcagactattaagtaattttttaaccctcaccctcctcccactcttccaagtctctaatgtctgttattctacactctgtccatgtgtatacattatttagttcttactttataactgagaacttgcagtatttggttttctgtttctgagttgtttcacttaagacaagggcctttatttccatccatgttgctgaaaaagacatgatttcattcttttttatggcagagtagtattccattgtgcatatgaacct

SEQ ID NO: 123590 - DNA, 596 bp, Homo sapiens
tagtttactcactctcctctcacaatacagttcaaataggtataaagagtcaaacttagaatctaaaggagatctcctcagggccataaagtaagaagggatttaaagtcaaagtgatgagtatgagctaaggccaggaaagccattaaagcacagaacaaggtgtaaatttccatggctgactctaatgctcatataaagaaaggagtctggattatgaacccaaggcattcagagagctggaaataaactacagaaagctaggagtctgaaggctttgcctcatctatgagacaaggacaagcagaactatacacattcttggaaagcagtgacagtgcttttgacttcctgggtgttagcgcaagagttaaccacaagaaaytgaaagagtttggccttcactgtgcacatgtaggtatgccaaatttatgccacttattttccaaagtggttacagaatggcccataaatgctacatgatagcatgtgtgcaaatttagaaataatacaaagcattattacatatagtttgtgaatactcatataaatagtaagaatagaaaaaaatggagaaatcatattatatttatgcc

SEQ ID NO: 123591 - DNA, 557 bp, Homo sapiens
gctactgaattgtctacacatagtattgtgtgtcctgcttgtgattgcatgtaatattttaaacrtaactgtattgcttaatttaaaaaagtaaaaaaaactaattatagatacttcaaaaaacaagaaataaaaagattgtcataagcttaattcaatgactataatttaattttattgcctttattttgtatgcatattttgaatagttctatagtttatgtattgtgttgtatattttctaacttgacagcatatagttttccatattgctttattagattcacaaagtgtgaatatctttgtgaatcttataaagcaatatggattcttaaaggatacacattatattccaacatatccaatagatgaagtatttcttagctgaaaaatcttcttgtgactggatatttaatttgtagggttttcttttgttactcggctattatatctatatatgaactatatatgttacttaggttattagatgtttatgaactatgtatgtaagttatgatatatgatgataaatgaatattatttaacatgacactagt

SEQ ID NO: 123592 - DNA, 485 bp, Homo sapiens
catatcatgtcccccttctgctgaaaaccctccagtggcccccatcccactcaaagtaaaagccaaagtacctgcaatggcccacatgtcttgaacaattcaggccycatgatctagctttcctgacatctcttcttgtacccctggctcactccattctgtcataatcccctctttttgattctttgaacataccaggcgctctccaaccagctccaggggtgttccctctacttgttatgttctttccccagaggtcagcatgaccacctctctggtatgtcattgggacttcctcctttcttgctttattttctctacagcatttatcaccttctaatacattatttgatttactgtttgtgtttcatattttgtgcttctctctggaatgtgaggtccccaaacacagggctatttgtgtgctatgtttgctgctacacttctagggcccaatattggaggtgattgatgagtgttttgtt

SEQ ID NO: 123593 - DNA, 485 bp, Homo sapiens
catatcatgtcccccttctgctgaaaaccctccagtggcccccatcccactcaaagtaaaagccaaagtacctgcaatggcccacatgtcttgaacaattcaggcctcatgatctagctttcctgacatctcttcttgtacccctggctcactccattctgtcataatcccctctttttgattctttgaacataccaggcrctctccaaccagctccaggggtgttccctctacttgttatgttctttccccagaggtcagcatgaccacctctctggtatgtcattgggacttcctcctttcttgctttattttctctacagcatttatcaccttctaatacattatttgatttactgtttgtgtttcatattttgtgcttctctctggaatgtgaggtccccaaacacagggctatttgtgtgctatgtttgctgctacacttctagggcccaatattggaggtgattgatgagtgttttgtt

SEQ ID NO: 123594 - DNA, 505 bp, Homo sapiens
tgggcacagcctaaagacttggtgccttgcatctcagctgcttcagccatggtgaaaggggccaatgtagagctcgggccatggtttcacagggtgcaagcctcaagccttggcagcttccacgtggtgttgagcctgtgagtgcatagaagtcatgaattgaggtttgggaacttctgcctagatttcagaagatgtagggaaactcctggatgcccaggcaraagtttgctgtaggggcagggtcctcagggagaacctctgctagagcagtgtagaaaggaaatatggggagggagcccccacacagagtccctactggggcatcacctagtggagctgtgagaagtgggccaccatcttccagaccaccgaatggtagataaactgacagcttgcaccatgcgcctggaaaagctgcagacactcaatgccagcccatgaaaggaaccaaaaggacagctgtaccctgaaaagccgcaggggcagagctgcccaaggatat

SEQ ID NO: 123595 - DNA, 505 bp, Homo sapiens
tgggcacagcctaaagacttggtgccttgcatctcagctgcttcagccatggtgaaaggggccaatgtagagctcgggccatggtttcacagggtgcaagcctcaagccttggcagcttccacgtggtgttgagcctgtgagtgcatagaagtcatgaattgaggtttgggaacttctgcctagatttcagaagatgtagggaaactcctggatgcccaggcagaagtttgctgtaggggcagggtcctcagggagaacctctgctagagcagtgtaraaaggaaatatggggagggagcccccacacagagtccctactggggcatcacctagtggagctgtgagaagtgggccaccatcttccagaccaccgaatggtagataaactgacagcttgcaccatgcgcctggaaaagctgcagacactcaatgccagcccatgaaaggaaccaaaaggacagctgtaccctgaaaagccgcaggggcagagctgcccaaggatat

SEQ ID NO: 123596 - DNA, 596 bp, Homo sapiens
acagtgaatgcactggagatcctagaacaagctgctattgcctctgttgcaggccatgaccctctgtaggatgcaaaccacactgcatttatatcctatgtgttggtgaatagtgaagttgtaagaaagaaagggagtgaaatagaaacccgtaggaatgggaattcgtgcttccactgatatcagtctcacgaaatgtcagccggtgctaattgaaggatgccagaaaacacgcaccaaccaatattttccatacgaattccaaatcagagatttcagtgtttcttgacagcgttttagcctgtcatggtcagaagctgaaatacaaatagctgtgggcttcaagagaaagcgcctcttgggggaatttatatgacaataaaaaatgaggccctgcaagaaggaaacaaaaacgcagccagaatgacaaagaggtggtagaagaatatctaargcaaaccttttcttgactcttctcaggattagttatgtctagatgtagtagaggtggcacgctttcaacagttcacaagggactgagctacccattttctagaccaggtttttactcacttcaatgaaagcctgcacaattt

SEQ ID NO: 123597 - DNA, 493 bp, Homo sapiens
gcaatggcacgatcatggcttaatgcagccttgacttcctgggttccagtgatcctcccacctcagtttcttggctaatttttgtatttttggtagagacagggttttgccattttgcccaggctggtctcgaactcctgagctcaaggaatccacccacctaggtctcccaaagtgttgaaattacaggcgtaaaccaccatactgtcctttttttgtcttttaaatgacctttcatctttgtacattttgagggcttttcttttgttaactaagctatttaatgagaaaatttataatttatataagagagtttacatttttttggatgcaagaagcatttttttacctgctaggaacagagtctcttgastttttccttgttctggggtaaggacattaaccagcagtgtttatttaaaataccgagtgaatttccttgaacttctcattttgaatagacacaggagacataacacaaatgggttgttga

SEQ ID NO: 123598 - DNA, 546 bp, Homo sapiens
tcaacagaaatctcaaggataataaattattctcaaacctcaatttagctaacaattttaacttcaccactatacctacactagggatattaacccataagttggctgccaaataaaagtgccaaatagcccatgctaacctcagtaattcagaaaccaaagtagctaaaaattcattctgttgcatacatacaatgtgtttagagtttattactattagtagaaagatttagagtaaatgctgatgaaaacacacacacacacacacacayacacacacacacacacacacgaacaaacgaatatgcctgaaatggaatgaacagaggttaatataaaagcaatagtaagtacctgggagtacaacttttgtagatcagtgactcctgccaaggtcataaaccaaaagatgttttttcttagaagatgcaataatatcaatagtgcacaatgtactttttaaaattttaatttatttttctgccccagagtaaaaaggcattctcatctgtggtttttgtctttggattatatatctttctccct

SEQ ID NO: 123599 - DNA, 555 bp, Homo sapiens
ggcttctgaggttgatatcttttgacagttttggaaaattctcagccagtgtctgttcgaatgtgattactgcctgttgtctctctcctctccttccaggaatctgatgatatttcttattggaatattttactgtggcccatatgtatcttagcctcttttgcacactttccatcatttttgctctctgagtaaccccagtatttcccactgacctattttagagttcataatcctatctcctgctattaaacccatctattgagattctaaattctgtaattgcatttttagttatagagtttccatttgattatttctgtatctgtcatttatgttttaaacatataaatcaaatttcatatctgataacttcactaaccaggtcatctatacatctgttgattatgtatactttttgtcccttgggtcctgtctcttaaaatgtttagtaatttttaatttagtaactaacattgtatctaaaaaaatttagagactctaaatggtgctatayttatagaaagttcattctcctctggcagatacgtatag

SEQ ID NO: 123600 - DNA, 525 bp, Homo sapiens
ctctggttgttttatgagaactctggacctactttttgtttgcagttttaaatgaaaaaaatacacaaactgtccatatgttctcatgaaaaaataattatatcaatacaggggattatcttagtatttatgtgtgtcacaatgtctgtatagaggaggaaagccttttcctctaccctattaggttctatggctgggcctgagaattaaactgagaaaaggtagatttgcaggagaaaagcctaaaacttttatttgrttttaatatttttacatgtatgtggaagctttcatatataagaaatgaagactcaagaagtgaataggtcttatataccttataagtgctaagtcagggatgtctaatcttttggcttccctgggccacaatggaagaattgtctagggccacacataaagtacactaatgctaacaatagctgatgagctaaaaaaaaaaaaaaaaaaaaaaaagtaatcctaaaaaaaaatctcataccgtttaagaaattttgcaaatttctg

SEQ ID NO: 123601 - DNA, 591 bp, Homo sapiens
gtgtgtgtgcatgtgtttgtgcaatatagttatatctattatttctacttcatctatctatatatctaatccctccctcctctccttccttccttcctttccttccttccttctttctctcttctctttcttcctttctttcctttctttctttctttctttctctttctttcttttctttcttctttctttttctttctttcttctttctttttctctctttgccatgagtacatgtcagtaccatcaattctaacccaataccagagaatttattctagccctccttctttccatatttctaagagtaagaaacctgactccaattatcctcaaaatatttatttgtttgttcaattcactgaaactgccaaccmttcccactgcaaagtcaaacttactgactagagttcaatattttcttacatttctctctgttagtagcctaagagtacatgttcaaaatatgttcttcagctttacttgagttagttttggctctttttccaccccttcaatgtggttatattattgttgacatattattactattgtggtggtgatggctattgtttaatatgtaaaacatta

SEQ ID NO: 123602 - DNA, 422 bp, Homo sapiens
ataagggaatgttgtaactggcttgatctatgcagactacataaactttctctatatcagcaataaggctgttttgcttttttatcattcatgtgttctctgaactcacacttttaatttccttcaagaacttttttttggcattcacaacttggctaactctttgacacaacagatstagatttccacctcccatttcagttttcaacatgttttcctcactaagcttaattatttctagcttttgatttaaagggagatatgtggggctcttcctttcacttaaacacttacaggtcatttagggttattacttggctgaatttcaatattgttatgtctcagggaataaggaggcttgagtagagggaaagaaacagggtggttagccagtgtagcagtcagaacacacacatttattg

SEQ ID NO: 123603 - DNA, 508 bp, Homo sapiens
agtgttgggtagacagcatacagctgcaatggtgaagaagtctgccaggttagaatgagctgaaagctttacactgccctgtctttccctgatttcagtaggatgtcagtgagatcaaaaaacattctcatgtctcctcccaccaaaggaggtctggagggcttttgtagtagcaatggcaggaagggrgctagtaagcatgaagaactgcagggccagccaatgaaacagcaaggagtaaccatggtttcattttaccttaaaacttcaaccacaagatgccccaattgttgtatagcaatgcaggataacatgaagacaaaggtcaaaacctaagcaagacaagatacataggggaggcgagggacgaccaggggaccacagactggatggacaccttccttctctcaatgcttcccatgcactgagaaactcacatttctgcatatccacaagtgtattttctctttattgcttaacaatttacaattttcacaggttagagaat

SEQ ID NO: 123604 - DNA, 508 bp, Homo sapiens
agtgttgggtagacagcatacagctgcaatggtgaagaagtctgccaggttagaatgagctgaaagctttacactgccctgtctttccctgatttcagtaggatgtcagtgagatcaaaaaacattctcatgtctcctcccaccaaaggaggtctggagggcttttgtagtagcaatggcaggaagggagctagtaagcatgaagaactgcagggccagccaatgaaacagcaaggagtaaccatggtttyattttaccttaaaacttcaaccacaagatgccccaattgttgtatagcaatgcaggataacatgaagacaaaggtcaaaacctaagcaagacaagatacataggggaggcgagggacgaccaggggaccacagactggatggacaccttccttctctcaatgcttcccatgcactgagaaactcacatttctgcatatccacaagtgtattttctctttattgcttaacaatttacaattttcacaggttagagaat

SEQ ID NO: 123605 - DNA, 648 bp, Homo sapiens
gccacttcactccagcttgggtgacagagtgagactccggctcaaaaaaaaaaaaaaaaacgagagagagagagagaaataatacaaaggaaggtggtcccttgccagcacttgtcttgcctacttgagttttctcttccattcagctcatgttattccactcattctagactttctttctttgctttttctctyctctgccataacactcgaataacattcctcccagcatcaactccccttctcctgccaatagcacctcacttttccttttggaaaaccacccttttggaactcttaattcttgcagtttggatggggctgaggctacattcttctgcccctatccactccaggggtgggaacatgacccaggtctgcagaatcagaggcacagggagtcaggtaggttgagggtttctctgcagccctaaggaagaaggtattttccacctgggttgctgagctgataggatgtacatccacagctgccagacaccactccttgccttatgaaaatgcaatgaactcaggaaagcagagctgagaccgcatcctaatgacatcatttggtctccatccagccttccctgagcttacttcttgcctttttaattacatgattcaaccaccaacctcctccccacc

SEQ ID NO: 123606 - DNA, 554 bp, Homo sapiens
agtagtgggttccttatcataagcccttttgctcttgctctctcactatgtgatgccccctgccatgttgttaggcagcaagaaggccttctccagaggccagcatcatgctcttggcattcctaggcctcagagctaaatacatttattttctttataaatcactcagtctgtggtattctgttatagcaacaaaaatattaagacactcttcctatttcccctrctctccttcctccagcctctttcttacacacaaaatgttactgaaataccaggagttcaatctaggttctgttacttgcacacagaaagccaatcacttagacaatgaatattgccaaggaagaaggctttaattgcatgctacagctaaggatatgggatatcagtctcaattccatctcctcaaccagccgaaattaggggattatatagcaaggaagaaatgtaactatgagcaggaaaacaggaactagggagggctaaggaagcaatcatgacaaataaggaatctggcatctggcatctcattgtctcgacacagtggtctg

SEQ ID NO: 123607 - DNA, 596 bp, Homo sapiens
ctctgggtaattactactcatttccaaaataaggaaaatcaaatgtggatccccatgaagcttattgatcgcaagggcacttgggccagatgaaatctaagaggttcttcatgtcttccraaagaatcatcagtgtttcctgttctgtagaaacttctctcttctaatttcctttgaataaaatgctttccaactgaattagttatctaggggttgccataacaaagcaggatagagtggatgccttaaccaactgaaatctatttccctgaagttctggaggatgaaagtcaaagattaagatgttggcaggattggtgtcttcagagggctctcttctggccttgtacacagccatcttctttctgtgtcttcacatggtctttgtccatgtctgtgtccaactttctgtttcttatacgaacaccagccatactggattaatgtccaccctaaagaccttattttaacttaattacccctttaaagaccttatcttcaaatacagtcacattctgaggtactgaaggttaggacttcaacacatgaatttgggagaacaaaactcagcccataatatgcacattacttaaaac

SEQ ID NO: 123608 - DNA, 525 bp, Homo sapiens
agctcctgtgtgctaattcagtgagatttcagttttgcaggatagcataacctattgtgactaatataaccagagactaatatttttatataaaaaataaaagaatgtagcaaacaaggaaaatgagttatggttccyataaatagttatttaaaatctgtgattactatggcatattttagaacattcaaaccaaaactaaatcatatgaaaggaaaagtgtttaaggagtttgggctaacagatatctatcactaggctcttaacatcacttctctttagaaaggaaacattctgatacgtgattctttctagacaaggacagttggtgaaccacgcacctgaagtagcccaataggcgccttttaaatatttatcaaaaaaaactttgatatttttcttcaaaacattccttacactacctcctcctgtcctttaccaaataagtctgcctttgtatacagagaaatgtcctggttttagtctgaagagattatgaaaacagtgctgtattgttctcctgaa

SEQ ID NO: 123609 - DNA, 525 bp, Homo sapiens
agctcctgtgtgctaattcagtgagatttcagttttgcaggatagcataacctattgtgactaatataaccagagactaatatttttatataaaaaataaaagaatgtagcaaacaaggaaaatgagttatggttcctataaatagttatttaaaatctgtgattactatggcatattttagaacattcaamccaaaactaaatcatatgaaaggaaaagtgtttaaggagtttgggctaacagatatctatcactaggctcttaacatcacttctctttagaaaggaaacattctgatacgtgattctttctagacaaggacagttggtgaaccacgcacctgaagtagcccaataggcgccttttaaatatttatcaaaaaaaactttgatatttttcttcaaaacattccttacactacctcctcctgtcctttaccaaataagtctgcctttgtatacagagaaatgtcctggttttagtctgaagagattatgaaaacagtgctgtattgttctcctgaa

SEQ ID NO: 123610 - DNA, 596 bp, Homo sapiens
cctccttagcctcaagctctctgcaaggggatgggtgctgcctaaactactaattcagaagagtgggtgcctgaagatctgcttgggcatggagtgtagagggtcccactgaacaatctcctcacagaaatgcagtggtggctcagggtgctaattcaggcaaacaaatgttcctattgcctggagacctgcctgggcatggggtagagagagccccactgcaccacagtctctacatagaaagggtgggctggcttagggtactggtgcagatatatgggcgctctgagtgcctggagatctgactgggtcaaaagcaaagagggcccccatgcacccagatcactgcacaagaagggtagggtaacagaagctgccaatctgggcaactcggtgctytgaatgcctgggcatagagtggagagggccccactgcaccacagtctctgcacaggaagggtggggtggttcaggttgctgatccaggtgagtgtgtgctccaaatgcctggagatctgcctttatcaagcagatgtattcgcaggggctgtttccccacattcttctccctttaatctggaatgtagttcatggtt

SEQ ID NO: 123611 - DNA, 535 bp, Homo sapiens
gaattgcagataataatcaaaaccatattgtcttttgtgaaaatctggtttctatttctgtggtctggtagccatgttgtgttccattaatcattttttaatttatcaagtgcctagcattgagctaggaaccagagaataggagaaaaataccataaacatgatcaactctygtgaggtttcattagagcagcagaggcaagtattaaacaattcattacaaatttccttttttaaaattcataactataaaaagccaggagaatacagtatattttatacatttataatggagattgaggatgctggattctgaataatgagtagggaatagtttataaggataatgaaggttggtctgtgggaaaatagctgatggggctgagggaacattggtgtgagttcccacctatttcaaaatcttgaaataaagtagtagccaagagataaatgatacattttaaccatatgactatgaaaacagataaatctaatacctaatctatgcagaaggattagtttcacagtagaattc

SEQ ID NO: 123612 - DNA, 464 bp, Homo sapiens
gaattccacaaatcaccccattgcctaaggcarcagagagcttctgcaacaaacaaagatcaagtatatacacagccatattggctggctcctacctataagtgccatctaagggcttgtaggtcaaactgcacagcccaatataaaacctgctgaaagaaatgcatagggctatatagaagcaaagccaaaagaccctaccctgttggggtacagtacagttcctctacagtaacaggaactgtacagggagaaggggggaaggaaatggaaagaaaaaaacacaatattataggaaaacaaagaaaaagaaaaaaccctatcttcaggaaaataataacacaaattagaagtgccagtatctccagatgagaaggaaccagcacaaagattctgtgccatgaaaaatctgaatatagtgacaaaccaaaggattgcactagctctccagcaatggtttctaa

SEQ ID NO: 123613 - DNA, 590 bp, Homo sapiens
aatatagataggcccctcagattagaagcccttctctccctagggaactttgaaaaatgctagaaaggacaccaaggtttcccaccctccaagacaccatgctgggctggggtaatgagcctaacctcacgcaacttgctgaatcaaktgggccctttgaatttgacataatttccaagaactttcttttccttatttatgtatgtatttttttgtagagatggggtctcactatttgcccaggctggtctcatattcctggcctcaagtggtcctcctctgccttgtccttccaaagtactgggattataggcatgagctactgtgcctggcctcaaagatctttcagaactcacatcctccaggctcagacattagccccagcttggcttcacataaaaataaactaaaagcaacacctagccttaaaactggaaacacacaataaactaaccagtctcaaaatacagtagggaatatgtcaagaagaatgcattatgctacatgacagcaattagacatctgagcagagctgtctatttatgagtaatttctgtctgctctacagggattctaaggccaaaaagaaa

SEQ ID NO: 123614 - DNA, 590 bp, Homo sapiens
aatatagataggcccctcagattagaagcccttctctccctagggaactttgaaaaatgctagaaaggacaccaaggtttcccaccctccaagacaccatgctgggctggggtaatgagcctaacctcacgcaacttgctgaatcaagtgggccctttgaatttgacataatttccaagaactttcttttccttatttatgtatgtatttttttgtagagatggggtctcactatttgcccaggctggtctcatattcctggcctcaagtggtcctcctctgccttgtccttccaaagtactgggattataggcatgagctactgtgcctggcctcaaagatctttcagaactcacatcctccaggckcagacattagccccagcttggcttcacataaaaataaactaaaagcaacacctagccttaaaactggaaacacacaataaactaaccagtctcaaaatacagtagggaatatgtcaagaagaatgcattatgctacatgacagcaattagacatctgagcagagctgtctatttatgagtaatttctgtctgctctacagggattctaaggccaaaaagaaa

SEQ ID NO: 123615 - DNA, 661 bp, Homo sapiens
ctgaatacaggaatcagtttctgtgggattttcagacttcttacgagtagacaggcaactttcagttttgtgagctggtttatccaaagctgcaggcttgatgagttttgttccagataagatttctaaatattataaacaatgtataaatgcaccacaaatgtaaagttaaatgtrtactcatcaattgtgtccaataactaaaaatacaatggaaacacaaaaatgaggatctcagaataggctgatggactacactataacacagctgtttcactataactgattgcattcagaaagattgccactccataatcaacattctactaaatttgacacagatggccaattaacccaagactcatgtcaattgacaaatggagctaaataaatgtgagaatgtggatagaaataactttcagagtttattagttttaaataaattcttctgttaaatgttcatagcaataatcaatcaaaatttctaaatgacaaatcaaggagcagctgataacattatgaaacattttggtgcggactaagtgtgctttcagagcacattttttataaacaatgtatatcatgatattatagtatcaatggaataatataaattgcacggaggattttataattgttaatctaaatcagattttaaaag

SEQ ID NO: 123616 - DNA, 661 bp, Homo sapiens
ctgaatacaggaatcagtttctgtgggattttcagacttcttacgagtagacaggcaactttcagttttgtgagctggtttatccaaagctgcaggcttgatgagttttgttccagataagatttctaaatattataaacaatgtataaatgcaccacaaatgtaaagttaaatgtatactcatcaattgtgtccaataactaaaaatacaatggaaacacaaaaatgaggatctcagaataggctgatrgactacactataacacagctgtttcactataactgattgcattcagaaagattgccactccataatcaacattctactaaatttgacacagatggccaattaacccaagactcatgtcaattgacaaatggagctaaataaatgtgagaatgtggatagaaataactttcagagtttattagttttaaataaattcttctgttaaatgttcatagcaataatcaatcaaaatttctaaatgacaaatcaaggagcagctgataacattatgaaacattttggtgcggactaagtgtgctttcagagcacattttttataaacaatgtatatcatgatattatagtatcaatggaataatataaattgcacggaggattttataattgttaatctaaatcagattttaaaag

SEQ ID NO: 123617 - DNA, 635 bp, Homo sapiens
tgcattaatgaagacaaacttcactgatatttgaacaatgaatataaatggtttggaatcaagaattacctttattcattatcaacaattatcagacaagaccagtttccaaataacattttttcctaaattaacaggatgaccacacatctagatggttgttgtatgtgaggacagagacatcgccaaaggtctgtgaaggactaactgctataggaataggccataactagagaccagaaaaaaaaatttacaagagtgttcagacttctaggagcatgaaattgtgatagaagaaaacgtatgaattgaccattaccrttaccattaccctagcttgattactgaagcagaggccaggggtagaaactcaagcagagccatgtaatcccacagagttaaggagacagggatcaaggcactggaaagctggagtgtcaagaacttatggggaaaaatatgagagcagaagctgcacgatgagaagggttcaaagacctgcagaaggttaaaaaaacaaaaaaaaaacatgagtttttagctgagcattgatctgcataaatgttggataaaatgtcatgaagttctagaaagaacaataggaaaagccagagggtaaagaatttttggaattc

SEQ ID NO: 123618 - DNA, 542 bp, Homo sapiens
agaactgatggccaggaccatgcttgacttttggcttaggatggcacgcataggaagtaggcacttaggctttgcaggaacgctgctaccctggggaattccagacaacatcacccaaagaggtctgcacagttctgtgtcacattgctgcattcttatactcctcacattctgttggaataacattatcccattgaacaaacaaattaaaacaaaacaaaataatttttttaaatttccaacatttatggagttaaaatgctctctctctctccttttttcaatttaatcagaggctgttttttcttccccccttggtgkggggagctgggggaaaagagacagatggtatcgtttgcaaaaggaaagctgagaagttactcatatatctttcagctttgtggcaaatgtgatgccaagattcttgcttggagtgtatactgcaatacaggcacagaggcgtaccagaaagggtgaggccagcgcatggagggcagtgcaataaattgctgtgggctgatccaacaccagaacatgtgagc

SEQ ID NO: 123619 - DNA, 542 bp, Homo sapiens
agaactgatggccaggaccatgcttgacttttggcttaggatggcacgcataggaagtaggcacttaggctttgcaggaacgctgctaccctggggaattccagacaacatcacccaaagaggtctgcacagttctgtgtcacattgctgcattcttatactcctcacattctgttggaataacattatcccattgaacaaacaaattaaaacaaaacaaaataatttttttaaatttccaacatttatggagttaaaatgctctctctctctccttttttcaatttaatcagaggctgttttttcttccccccttggtggggggagctgggggaaaagagacagatggtatcgtttgcaaaaggaaagctgagaagttactcatatatctttcagctttgtggcaaatgtgatgccaagattcytgcttggagtgtatactgcaatacaggcacagaggcgtaccagaaagggtgaggccagcgcatggagggcagtgcaataaattgctgtgggctgatccaacaccagaacatgtgagc

SEQ ID NO: 123620 - DNA, 607 bp, Homo sapiens
accatccttcttctggatacttttactcttcacagttctgcccctataacctctctcctgcctgggcttactttctcagaccatccaactcagattgatgactcaactgggtggcctgcttggcttgttattttgaattctccataatgtcctgtcctacttctgtatattgaggctgtgggcttttcctgccttgtcctccactgttctgaactcctaatacattacagtctcaaatcaaagcctgtatttgtgattccttctcatctggacaagggttcaacctaaataataatcagaaggtgactgagcaggtataatgaactggctatttgtgtccttccaaaatgtatatgttgaggcaataatatccaatgccatgggacttgcagatggagattttgagagatcattacaattacatgaggtytgagcaaggggagggagaacatcagggtaaagagctaatgcatgtggggcttaatacctaggtgatgggttgataggtgcagcaaaccaccatgacatacttttaccatgtaataaacctataatttctgcacacgtatctcagaacttaaatcaaattaaaaaaaaaaaaaagcta

SEQ ID NO: 123621 - DNA, 632 bp, Homo sapiens
ctcactactcagggctaatcaggaactgcatctagtccttctgataaagagggctgtttggctaggggaggttagcaacgagaacagagtggagagcagaacttgcagttaggccatttgaattcctcctccttcctcccagatgttgaggcagcacataatattgggccttaatcgcaggccttacactgtaattrttaccttgcccaagaactgaattaaaccctggaagtgttgatgtccaagcttttgcaccatatgggggagttatgaaggagtatattactcagtagtgtgcctaattcttatttctagtagtcttagagagtacaattttaataaaagaaggtggaaaagaaaaaacattgtaatgcataatggtagttatattgttgaagaccattagaaaaatatggtatagttgttaaggattgttcaagaagtgtatgtgtgtgtgcctgtgtgcatctgagaacaatgatccacactcagtagactttgatctgtctccaaccattgagaaggccccaagagaaggaaactgcactgtgtataccaaagccccagatagactctgctgcttattatcaacatgtcagacttagaggaatgtattgatgtagggagatgga

SEQ ID NO: 123622 - DNA, 617 bp, Homo sapiens
taacatttggctacaaactgacttcataataccactggttagactgcaaatgtgggctatttccagcttagccaacgctggtagtcaggttcctgtcttagtgacttaggatcctagcaattgctgcagcacagtcatccactataacctttgactgctgataatctstgtattccagactgttttgcagctggtcacatgactgacaagtccattcatcaggaatgttcttccttcacccgaggccagccatccacttcagcttttagacatgaattcagcagaacagaggtttttaaagtaaatgctttaagatatgctagtcttctgatttcccccaaccctaaaaaataattggacaaaagcaataccctgttgggttgagaatttataagggagggcttctttgagatgtacagttgttttgagactgaaatggcagtcgataagttgtgttcgtgttgaaataacaatgtaattatgtgaagctgcttatctttagtatcttcaggcagaaaaaatgtttagaaaacctcactgagtccccaaagttttccagggattgtctgagatgccttggaatgctagcagaatccacacaggctgattagagggga

SEQ ID NO: 123623 - DNA, 484 bp, Homo sapiens
ctttgactgctgataatctgtgtattccagactgttttgcagctggtcacatgactgacaagtccattcatcaggaatgttcttccttcacccgaggccagccatccacttcagcttttagacatgaattcagcagaacagaggtttttaaagtaaatgctttaagatatgctagtcttctgatttcccccaaccctaaaaaataattggacaaaagcaataccctgttgggttgagaatttataagggagggcttctttgagatgtacagttgttttgagactgaaatggcagtcgataagttgtgttcgtgttgaaataacaatgtaattaygtgaagctgcttatctttagtatcttcaggcagaaaaaatgtttagaaaacctcactgagtccccaaagttttccagggattgtctgagatgccttggaatgctagcagaatccacacaggctgattagaggggaagctttcagcactct

SEQ ID NO: 123624 - DNA, 515 bp, Homo sapiens
acttaccccagttgctgacctgcaagttagagcactggraagaacattcactttttaagtaaatataaggatgagaatttacagagtaaggaaatggggtcgaaggagggcagatgagtgtataaatgttagttccagaatatgaaggaacgggttggagataatgcattctttggaaatagcaaatgctgttgaagcttttcaaaaaaggaaataaatcataaaagaatttggaatgctttttatgggttgaagtagaagaaaattgaacatcaatatgattctggaaagaaattttgtgtcactgcattatttaaatgttaggggaaaatgatcaaagcagccaacattcaaaaaggaataatctctttggaaaacttaatacacacatatctgcaaatatttaggggacaaggaaagactatggaggaaattttgtgtctatatagttagacattttctgatctagacctacccggaggcacatgctgaaaaccttcaatgtttaagctcag

SEQ ID NO: 123625 - DNA, 585 bp, Homo sapiens
ctttccactaattgtgaacaaacactgcttgggaaataaaaagatttgtgagactcaaactttataatttagttagatttaagaggtgcataagccaaataaaccaattattcaaagtaagtagtatattatttcatgagtcttcagaaaaagtagagattattgtggaagaagtttgggcttaaattatacctaaggacatgaaagtgaagaaaagtcattccaagcaggggcataatgtacataaaagaaaagacagtgtaacatgaaagatttaaaggatagttcatagagagtttggttagagaagcaagtagttataaaattgcaatagcagaagaaagtgatataactgaatttgaatttccttaacttcctttttaaggaagtggggtccaaacacaaattttggtccragtgaattaatgtgtaaagcatgattttaaaataattaacctagaggtggatgttggggtgtactgacaaagacaggttgaagcagtgaaaccagttacaaggctgtctgttgtcgtgaacagacagttctgaaatgataaaaatttgacctagggtgctgatgataaa

SEQ ID NO: 123626 - DNA, 568 bp, Homo sapiens
cccatttcctacatattagttagagaaaattaaaaaaaaaatctatttctatcagtgggtgaggggacatcatggtttttgcaacaaccmtgtttggtaaaatatgataaccagagttctccaaagctggatgtatatccacaagtagcaagctgctccactgtggtcctgtcataaacaaagtattgtgctgtgctctcttggctccagtagcgatttgacttagaaattttgtataaccttgtttttctcatgtgaagatgatggcactaatcagggatagcagtattttcactttaggcagttttttggtgtgtattagaatggattttacaaaagtcatctatagcattttgatatctagtctcttcacagcgcattttaaatggtggccaggtggctgggattaaaggcccgttatgtggccagaggagagaaatcaacaggcccacacaagaactagacctctaacacctgacttcatgggtgccattactttaagaactaagcagctttattgataagaaacatactgctatcttaccttttgaggaaacggtcccatcct

SEQ ID NO: 123627 - DNA, 568 bp, Homo sapiens
cccatttcctacatattagttagagaaaattaaaaaaaaaatctatttctatcagtgggtgaggggacatcatggtttttgcaacaaccatgtttggtaaaatatgataaccagagttctccaaagctggatgtatatccacaagtagcaagctgctccactgtggtcctgtcataaacaaagtattgtgctgtgctctcttggctccagtagcgatttgacttagaaattttgtataaccttgtttttctcatgtgaagatgatggcactaatcagggatagcagtatkttcactttaggcagttttttggtgtgtattagaatggattttacaaaagtcatctatagcattttgatatctagtctcttcacagcgcattttaaatggtggccaggtggctgggattaaaggcccgttatgtggccagaggagagaaatcaacaggcccacacaagaactagacctctaacacctgacttcatgggtgccattactttaagaactaagcagctttattgataagaaacatactgctatcttaccttttgaggaaacggtcccatcct

SEQ ID NO: 123628 - DNA, 614 bp, Homo sapiens
gggctaaggaatggctcttttctcttagtccagtgctcttttcgttggacatcactgcctttccagtaagggaaagaaggctgccttgatctgctcaacatctcagtactaaatgactagaaaagatttaaacctattcccactgccgaccctctgaatccccataagtcatttgagggtaccggtgaccaatggccagagggacctcttttaaataaccccagggaagaggaggttacaaatcccggcgcaagccccttcactgtcagataattccctcatattgagctgaaacctatttttgttactttgattccctggtccamgtttggccatttgaaatggcacaaaatttgaatatactctccttttctagagtatattcaagcatataaagaaagctatcatctgtgtccttttgagaatgagtgctttacctatattaacttccaataaaacatctgtaattatccaacttctaattgcagtgagtcctaacaaactgcttggcagaggaggaaaagaaaaactatcatgtaggacccctaccaaatcataaagtatttaatacaagtagtcaattgttactacagtcctctaaggcaggggtgtcc

SEQ ID NO: 123629 - DNA, 540 bp, Homo sapiens
tttatttcttttgccattatgaagaaaaatcataacatgggaacaatgacctaaataactgaaaaaggaaatgaattggccctggggaaattgccgtgaccagctgaggttagaaaagatggtctagaacaggacaaaactgacatcccttagcagaggatattacaacatgtccgcaaagtcaggaaacataagataaaatgatttttaaaactatattatttacacttcccaacagtgtactgtactcratatgttttctggctaagtactctaaatttaaagcaataggtccaactgtgactctggaaaaacatataatgagtaatctggaaacacagggagaatagtatattatatacttcacccaaaaacattctgagctcactatttagaagtgtaactaaacagttacacactgtttaaaaataagtttctcctatgtttctcgtctctgcaacacttgtggctgccagctgacacaaggcaggtgcagtgtgagtggctgccagtggacagtgacaaaaacaagacttactg

SEQ ID NO: 123630 - DNA, 545 bp, Homo sapiens
gcttactatgtgccagacactgttctaaatgttttacaaaccaaccaaccaaccaaccaactaaccaaccaaccaaccaaccaaccaaaccaataagcaaacaaaacggtctttaagagagcattacaggcagaggaaagaacaaagttcctgagataaaaagaagcttggtatgtctgatgaatagaaagaggtcaatgtacttacagctggaaggtattgtcattattccagctttacagataaggaaactgaggcttagagaggttaataatttgccaaagattatacaaccagtaagtagcaagaactctagagcacacaatttcaaccatataataggctgctatttattaagtggctcatgtacaggagtgctatacaaattatttatgacccagccggacaatgtgcccattattagcctcctcatatgttagttaatagaatttatactctttagagagtataaataactttcccaaggaggccaggcgyggtggcccacacctgtaatcccagcactttgggaggccgaggcaggc

SEQ ID NO: 123631 - DNA, 632 bp, Homo sapiens
ttaactttctctagtttccttcctcgttccatcttctcagtgggaaaatgagtgggtttattctcaactccctttcagcctcatgactttacaaatgatttattggatgcctgtccttgtgcccagccatgtaccaggargactgagtgatataaaggacttctatttttgagaagttgaacaatgaaatatgcactcactgtacagcaccagtaataaaagtgagggagagagggggaggctcacttaagtgtggtctagttttctcgctgtaatgatggcaggctctgatcagcctctttttcttctctctttaattcctctgttctttctttctatgagacaggagcaagaattaaatgaatgacgtgaggtaggatctagagaactccagaaaattgaattgtctgagctgtagtggcttgactggctggctgagataatcagtcctccaaattggtcctgcaatcttaagctaggcattggtagactgtgccaaacccacacatggttttcactgatctctctatttgttctcagtttccacctacctcccaactcctaagccttttcccccagatgtccatgccccaggctctttaaaattactgtttagctgccatttaccaagc

SEQ ID NO: 123632 - DNA, 594 bp, Homo sapiens
ttgtatcatcagtgtttggcacaatgaagggcacagtgtcttacagtggttggttgaatgcttatagttgttgcttgaatgctagttgaaaacccttctttcacagatgagagggagaaaagggaagaccagaaaaataagtgtaatggcagagctgtgctcagctcacagattgtttttgcagaccagaactcttggtgctgacttcagagtccagatttgcaattagactatttagggactagtgacattttagactactttctattctacaagcatgcctgagatcaaaccttagcccctatttcaagaggctgagcccagggcagttctctgcatgctgacccacctggtgcccaacttttatcgaagccctggtataatcactttcyacctctcttccctaaataatcttctctaagtggcaaagcactgagaaacctacagtaacctcctaggcctgtgcttaggtggtggttatttatattggctcaagcccctctttctccaactgttgaggctttgttctggaagaaagcaaggttgatggaggagaacagtgcagcagcctgttgcaggagtgtgcctgcagag

SEQ ID NO: 123633 - DNA, 439 bp, Homo sapiens
ttcccttgttggcaatactccatgcacattatcacacatcagtgctgcaaaacagcactttccttactccatgggggagaagataattagaagttccactttcagctacctttccttgactctgccctatgaattacttcttcccttggctgattttaatctgcatcttttccttataataagccataaccacaagtataaaatagctttcagtgacctctgagagtctttctaatgagttatcaaaaccaagggtggttttgggaacacctcgaactcacaattggtttcagaagagtgtattcctatgagagctgttcccctaactttgcagttagttaacttttgcacctccattcaagatgaaaatamaccctgcctccaggaaacctttcctgaccacctcaattaaaaaaaaaaaaaaatcttcctctgaatt

SEQ ID NO: 123634 - DNA, 543 bp, Homo sapiens
tacatgtgtgtatattaacagttcaacttaaatgatcaaaataaatagatcaaatttcatgttttattcaaccaccaaattcaaggaaaattgtgttcaaattttcttacaaatacatttgttgtttaatctatatttacctcagcaggtatcatttcttaaaactttgggcgctaattargaactcttactcttgaaactatttcatttgactttccacttgaagatctgcctaacttcactaaaacttgacattaatccctgctcttggaaaataactatttgcttcatgcctgttgggtgacatacaccttaaccatagatgctagcatgaagctgaacaaatatccttcaaaaagggcctgtcatgaaatgaaaacttttgtgggtttttttgtttttgtttttttgcctggtagatttgtctgttcatgtgtaatgaacatataatgaaaacagaatatcagccagcccgacccaggtatgaccaaacacacctttgcaccactatatttaggcattcagcaaacttcttactctctg

SEQ ID NO: 123635 - DNA, 402 bp, Homo sapiens
ttttttttttttttaaattatctgggcatagtgtcacatgcctgtagccaagatattctgaaagctgagatgggaagatggcttgagcccagaaattcaagaatgtagtgagctatagttgcaccactgctctccaacctggacaacagcaagaccatgtctcattcaaamaaaaaaattctaggcagagaagggaccacacattcaaaagacaaaaccctccaagaaatcattctaaaaaatccccatgaattaaaagacagattttcagactgagctgattcaagagtaaaacaaaacaaaaataagatacacaacataaagatgggcatggtgtcacatgagtgtagtccacattacttgagtgacatagggggaaagataacttgaaaccaggaattc

SEQ ID NO: 123636 - DNA, 402 bp, Homo sapiens
ttttttttttttttaaattatctgggcatagtgtcacatgcctgtagccaagatattctgaaagctgagatgggaagatggcttgagcccagaaattcaagaatgtagtgagctatagttgcaccactgctctccaacctggacaacagcaagaccatgtctcattcaaacaaaaaarttctaggcagagaagggaccacacattcaaaagacaaaaccctccaagaaatcattctaaaaaatccccatgaattaaaagacagattttcagactgagctgattcaagagtaaaacaaaacaaaaataagatacacaacataaagatgggcatggtgtcacatgagtgtagtccacattacttgagtgacatagggggaaagataacttgaaaccaggaattc

SEQ ID NO: 123637 - DNA, 402 bp, Homo sapiens
ttttttttttttttaaattatctgggcatagtgtcacatgcctgtagccaagatattctgaaagctgagatgggaagatggcttgagcccagaaattcaagaatgtagtgagctatagttgcaccactgctctccaacctggacaacagcaagaccatgtctcattcaaacaaaaaaattctaggcagagaagggaccacacattcaaaagacaaaaccctccaagaaatcattctaaaaaatccccatgaattaaaagacagattttcagactgagctgattcaagagtaaaacaaaacaaaaataagatacacaacataaagatgggcatggtgtcacatgagtgtagtccacattacttgagtgacayagggggaaagataacttgaaaccaggaattc

SEQ ID NO: 123638 - DNA, 582 bp, Homo sapiens
ctgcactttatattttatgttgtttttaaccttcattgttttcctgattacaaaaataactcatactcattgtgaaaatgtcaaaagttacagaaacatataaggtagatgttaaaatcctgtctttcagagatataaccacttttaagttgaggtgtatttatccagattgctttccctgcatatatgaatatttaatagatataaatatatatgtaaagtttacaaaatttatttttataataaaattaaaaatgtaaatataatataaaaatataatataaattttgaaatttatataaaatatttttataaaatcatagccagacttagaacttaagcaaccctaagcctaaaaatggttactctgtcccctggccctacacatgtataattcaaaattaaaatactaaacaaaaaaaaaataagcaaaaagtcaaagttttaattttttctttaatatttatttcagtattttttaaatgtattctttcaaaaagttgtggggttttttaggtttttgtgtstggtttttttttttttttttgtcttttgctttcttggtgccccaagcatatacct

SEQ ID NO: 123639 - DNA, 598 bp, Homo sapiens
tgctaaaaccatcattctaaaacaagatcttaccatgctaggtcttcggtgagataatggagaaagattacttttgaggaaaccctattgccttcagtctagaatccaacttgttgtattataaatggcatgccatagtctgacccatctccttctctaggcagttattgctatgatttttttcgctccaaaatggtgtttacattattcttcatctgggaaactccttctcatctctcaagatccaatttaaatgtcctcttcttagtagtgccttttcaattttccaaattagatttaatcatcccacaacaatctgaacrtacttctaatagagcaattgagacagtttttggtagtgatgggggttagccatctttctggtagcattgtgttttaggagcagattctgtccttttcatcttttgtcatcagcacattgactgcccttagtagtgcctatggtcccaaatgtttaccaaagctgtgcctgacaagtgtgtgtgcatgtttgccaaattgtacatatgtaattgtatacacacacacacattccaaatctatctccctcttttgtgtgtgtgtgtgtgtgtgtgtg

SEQ ID NO: 123640 - DNA, 598 bp, Homo sapiens
tgctaaaaccatcattctaaaacaagatcttaccatgctaggtcttcggtgagataatggagaaagattacttttgaggaaaccctattgccttcagtctagaatccaacttgttgtattataaatggcatgccatagtctgacccatctccttctctaggcagttattgctatgatttttttcgctccaaaatggtgtttacattattcttcatctgggaaactccttctcatctctcaagatccaatttaaatgtcctcttcttagtagtgccttttcaattttccaaattagatttaatcatcccacaacaatctgaacgtacttctaatagagcaattgagacagtttttggtagtgatgggggttagccatctttctggtagcattgtgttttaggagcagattctgtccttttcatcttttgtcrtcagcacattgactgcccttagtagtgcctatggtcccaaatgtttaccaaagctgtgcctgacaagtgtgtgtgcatgtttgccaaattgtacatatgtaattgtatacacacacacacattccaaatctatctccctcttttgtgtgtgtgtgtgtgtgtgtgtg

SEQ ID NO: 123641 - DNA, 598 bp, Homo sapiens
tgctaaaaccatcattctaaaacaagatcttaccatgctaggtcttcggtgagataatggagaaagattacttttgaggaaaccctattgccttcagtctagaatccaacttgttgtattataaatggcatgccatagtctgacccatctccttctctaggcagttattgctatgatttttttcgctccaaaatggtgtttacattattcttcatctgggaaactccttctcatctctcaagatccaatttaaatgtcctcttcttagtagtgccttttcaattttccaaattagatttaatcatcccacaacaatctgaacgtacttctaatagagcaattgagacagtttttggtagtgatgggggttagccatctttctggtagcattgtgttttaggagcagattctgtccttttcatcttttgtcatcagcacattgactgcccttagtagtgcctatggtcccaaatgtttaccaaagctgtgcctgacaagtgtgtgtgcatgtttgccaaattgtacatatgtawttgtatacacacacacacattccaaatctatctccctcttttgtgtgtgtgtgtgtgtgtgtgtg

SEQ ID NO: 123642 - DNA, 643 bp, Homo sapiens
ttgtgggtgtttttttgtgtgtgttgggtttttttcttttttctttagaaacagtgcttcttattctgtcacccaggctagtgtgcagtgctgccatcacagctcactgcagcctcccactcctgggctcaagcaattctcctgcctcagactccaaagtagctgggactacaggcccacaccaccatatccatctaatatgtttttattttgttttgtaaagatggggtctcactatgttgcccaggctggtctcaaacttctaggctcaaagaatcctcttgcctcagccccctaaagagcttggattacaagtgtgagccgctgcacttggccagggtagattttttgtgtctcccttcaataattaaatgtcatatccaggtcctacctttaagaagggaacttggttccatctctggcttatacatggttggtatttattaggcaccaaaacttcagcttctaggatacatttggtcctcttacttctgtgcacagctaagtyccactttctgatcattattttagatttgagtttccatttcatgtagcattgagcatttctttttatttatttattttttgctttagtgctcagatacgttggtttaaataattgttttgcattcattttttacat

SEQ ID NO: 123643 - DNA, 584 bp, Homo sapiens
aaagacgtccacaacctaattttcagaacctatgaatatgttgttatatggtgagggagaattaaggttgcagaaggaattaaagttgctcaggaatacagttgcccttgatattatcctggattatccggagggccttatgtaatcacaaasgtcctttaacatggaagagggaggcagaaggtcagtgatacaatgtgaaaacacacaatcggccattgtggctttgaagatgaaagaggtcataagcccaagaatatgaacagcctccagaagctaaaaaggcgaaaaaatggagtctttcctagggactccagaaagaatataaccctgccaatgtcttgatttttaaccctgtgtgatccattttggacttctgacttccagaactgtaagataaaaagcttgtgttgtattaagttactgtgtgataattattaacagctaagaaaggaaactaatacacttgtgttcattcattattttattcatattgagagtcatttaagttcctcaattggctaagcgctgtggtagaaacagaagtagaagataatgtgctggcccacaggcatttaaaatcc

SEQ ID NO: 123644 - DNA, 479 bp, Homo sapiens
gcttattctacagttgtttaaatttcccaatgtgaggttacatttttctttaccctgcttatcattcagtgagggctgtcaatttaaagatcttttttgggcaggggagccatctatgaaatattttactgattatttatttccttcctgtgtctctagtctttccttctggaacttctaataaatggatgtagaacaccatgtttttccatttttttaatttaaggtttccagattctccaatttgctcttcagtggtgtttttgctatatattctattattaattttttaatctatacaattagtatttttaagtgactatttggttaatgataagatagatttatgacacagtatcatttcttaaagatctgttattgaaagcctctttattattgtattaaatctgcttgttaggattgatgatgsctctttttaattctataagtttttctcaggtgttttctagtcctttgta

SEQ ID NO: 123645 - DNA, 552 bp, Homo sapiens
aaaaccaaaaattctatgttctcatttataagtgggagctaagctatgaggatgcaaaggcataagaatgatataatagatgttgggaactctccttgggggaggagagttggaggaaagtgagggataaaagactgcatattgggtacagtttacagtgtacactgctcaggtgatgggtgcaccaaaatatcagaaatcaccactaaagaacttatccatgtaaccaaaaatcacttgtactcccaaagctattgaaatatatagctataactaatatataatatatatattaaactaatatatattatatatgtatgtatatatatyaaactatttgcctggggataaaaaagcaaaacatgtttttctcctctgctgtaaaataaaattttctagaggcaataataaaatatgtatcacaaattctcattgaaattccatacaaacagaaaaaagtcaaattgatattataatctgtgaaccatattagattaaacttctatggatatttagctgaaggaaaataaatttaaggcaaaatagagcaat

SEQ ID NO: 123646 - DNA, 459 bp, Homo sapiens
gaattcagcaaacatttatgaagcatctggtctgtaccagcaccatattaggtatgaacaaggtggcaacatcccctcaaagagataccacagcactgaaggagatgggtgaataaatgaacattttaaatatgatgtgaggccaggtgcagtggcttatgcctgtaatcccagcagtttgggaggccacggtgggcgcatcacctgargtcaggagttcgagaccagcctggccaacgtggcgaaaccccgtctctactaataatacaaaaattagccaggtgtggtggcacatgcctgtaatcccagctactcgggaggctgaggccggagaatcgcttgaacccgggaggtggaggttacagcgatcctgccactgcacttcagcctgggcgacagtgggagattccgtctaaaataaataaataaatataatgtgagagttcctcaaaatagtta

SEQ ID NO: 123647 - DNA, 598 bp, Homo sapiens
caatgtgagaacgaactaatacaatctcccttccattcccctgctccagcaattcagtgttcctctccagaggtaamtattattattgatttcttatgcagcctttcagatatattttatgtatgtgtggcaggccaggtctcactaacacaggcctccattacaactgtctcagcactgacttagtagctaggttaaacattaaaaactgattgagccagtgcccttataaaaggctggaatgtaagaaagagcccaccaagagttttgcctaggcttttcctgggccttgaatcatgaaaagataatgaagacattcttaataggatccttttaggatttaacaagatttattgggagtctgaagagactccccagggctccacaaaatttattgggatctaaaggaactccccaaacctttgtgatttagcaggaaaaaagatacgggtaattaccccagcacctagacccatttagattaagtaaacttattcaggctccagaagaaggtctttaggactcggaccttagttatagattaaaataagttaatcacttatgtctttagactaatgcacacttacacgtagacata

SEQ ID NO: 123648 - DNA, 606 bp, Homo sapiens
ggaggaggtgagataacttgacctgtgtaggcggtggggcaaaggtgagcaggtgtacacagaggacagcaaatggtcatcatccaggatagagacacacatgtgtggtgcttgtgacaactgggaataggaatttccacctgtatctgtaagtaaaaagaaaacactgtaggttcctgagcacctcttacatgctagacatgtccatataaatcattcgtacctactaaactcttatctgagatttacagataagagaactgaggcttagagatgctgaacagattccccaattcatatagtgagcaactggtaggtctggaattcatcctccacttctcactgcacacataatacactccccatttcatgaccctacctattgaagagaggttattttggtaataggatgtggggaggctcagttctaaggcagagggtcattgggctccaagaggtcactgctctttctggaaggtgggaggcaatagggcagagggcaactcagtcaaggattctacaaagcggatgctgagaaacacctgggccctcatgctcttctgaagyccccaggcaggtaaggagcctgaggcagggagcagtctg

SEQ ID NO: 123649 - DNA, 618 bp, Homo sapiens
actgagctagcttaagaatcaacatggaaatttatcatgaagttattggggaaagggggtcgcagaagcaaaagacagcagctgaatcttaagaagaagctggcatcaggaaaggatatagtgtcaggtatccagggcacctctgcctatgcatttcacatctttacctgttatcatccatgcatttgctttatctgtctctgtctgcagactagctctctttacatacagtcacatggaacaaagggctatgtcacagcttctcatctgactttgtcaataggagaacagacaaatttgtgatatatctatataataaagtaatattcagcaataaaaagaaatgaactatgaagccatacaaatcatagatgaatcttaaatacatatcactaaatgaaagaaggcagcccaggaaagcgtattgtatgattccatttatattaaattctggaaaggrcaaaactatatacattccaaatagatcagtggttaccagagcttcaggagtggagagaggagggttgaagtgcaggggattttctttagggcagtgaaatatgatagtgtaatggtggatatatgacactacacattttttccaaatttcacagaatt

SEQ ID NO: 123650 - DNA, 531 bp, Homo sapiens
gtgcagtcttatttctgggttctgtattctgttccattggtctatgtgtctgttcttataccagtaccatgctgttttgsttaccgtagccctgtatccacagatgaattaatacctaaagagaaagcatctggatcttggaaacaaactgaccagaaaaggcttgggatttggaaagtgtaaatcagcctaacgaggtgggtacgcagtgtctcatatttcctatccttccatctcactttctctagagctccagctttagcaattacatagcctcatcatgactttcagttctgtgaccttgttacttttttcctattttcactggtcacaggtatttcccttcttacccaggtagatcccctgttcctttttgttcactcatttgcaaatgcattgatgttactcctccctccattgtactcaagaaccagccccaactagaaaacctattcatatgtcaacaatggtccaatatctacttggccataaacttgactatgataccatatggaaactgggaactgtggt

SEQ ID NO: 123651 - DNA, 570 bp, Homo sapiens
taaactcacagcaggacgtaaatttctgcttatcttccagattggcaaactcctactgacagtactcttgtgttttgaatacataaaaataaaagtgatctactacactgggaaaacagaaaagaacttttaaaacatttaaagatagctgtggactaagagtcaaaacatctttttgtttaatatgatggatgtttatttttcttttgtgtttgtctctatacctgataccccttttagacatttttctaatctgtctkctgtctgctgtagatacaggaagcagaaagatcttatcacctgaaaatgcactttctgtatttcttctgagaaaatgtattagagttttcagaaataaactgcagaaatgttgggtataatgacatggaaaatgcccatctatcaaacctcaactgctgatttctcaaagaattttgaaacaatataataggaattttctctttctgccaaagtctataccactaaacatctcagaagagactttatgggcagtttctctgtagatgtattgtttgcatgcaagaacatcagtctctttaaatgttggtc

SEQ ID NO: 123652 - DNA, 597 bp, Homo sapiens
tgctttattccttaacagactccgctctgaactcagtaattttagctaagaaacagtagytaagttaaaaaaaaaaaaacaaaaaaaaacaactacaacaacaaaaaaaacaccactcctagaacgaaaatacacctttctggcatttaactggctattttgaaaccttttttaaaaagaaatttacatctatataggaaatctgcatttgtaagggtgtctgctgtatacataagaaacttacaattgttttaaatttacataacaactcatacctttgtttaaggcacttttctggacagcctgttttaagtaaacttttacttacactattttttccttggctagagtgaatgatggtacagtatttaggtctcaaatcttatttctgtgcttttgagatataaactttctaccttgtttcacctgagttgtccctttagaaatgcaagtttagggttgcctagctaacaattacttagggcaatgaaacacataattggaagatggatagtgtgaatgaggaaaagaaaaactatttcgaagctagcaaatgagaatctttgtgaagggtataaaatctgcttctgtctgtgt

SEQ ID NO: 123653 - DNA, 597 bp, Homo sapiens
tgctttattccttaacagactccgctctgaactcagtaattttagctaagaaacagtagctaagttaaaaaaaaaaaaacaaaaaaaamcaactacaacaacaaaaaaaacaccactcctagaacgaaaatacacctttctggcatttaactggctattttgaaaccttttttaaaaagaaatttacatctatataggaaatctgcatttgtaagggtgtctgctgtatacataagaaacttacaattgttttaaatttacataacaactcatacctttgtttaaggcacttttctggacagcctgttttaagtaaacttttacttacactattttttccttggctagagtgaatgatggtacagtatttaggtctcaaatcttatttctgtgcttttgagatataaactttctaccttgtttcacctgagttgtccctttagaaatgcaagtttagggttgcctagctaacaattacttagggcaatgaaacacataattggaagatggatagtgtgaatgaggaaaagaaaaactatttcgaagctagcaaatgagaatctttgtgaagggtataaaatctgcttctgtctgtgt

SEQ ID NO: 123654 - DNA, 597 bp, Homo sapiens
tgctttattccttaacagactccgctctgaactcagtaattttagctaagaaacagtagctaagttaaaaaaaaaaaaacaaaaaaaaacaactacaacaacaaaaaaaacaccaytcctagaacgaaaatacacctttctggcatttaactggctattttgaaaccttttttaaaaagaaatttacatctatataggaaatctgcatttgtaagggtgtctgctgtatacataagaaacttacaattgttttaaatttacataacaactcatacctttgtttaaggcacttttctggacagcctgttttaagtaaacttttacttacactattttttccttggctagagtgaatgatggtacagtatttaggtctcaaatcttatttctgtgcttttgagatataaactttctaccttgtttcacctgagttgtccctttagaaatgcaagtttagggttgcctagctaacaattacttagggcaatgaaacacataattggaagatggatagtgtgaatgaggaaaagaaaaactatttcgaagctagcaaatgagaatctttgtgaagggtataaaatctgcttctgtctgtgt

SEQ ID NO: 123655 - DNA, 571 bp, Homo sapiens
ctagtctcaaactcctgggctcaagcagttctcccatctgagcctcccaaagtgctgggattacaggcgtgagccaccatgcccagcttattcttctgttaaaggaaaaacttggtcctttctgtcatggtatcctgaacctcaccactctgtttattgaatggtagtgacaaagccacatgagaccatagataaaatatagcaatctttatgctcttagcaatcttatgacaaaatacatgcaagaggttttatataagaagagcataattatgagtataaactgagaaggaattcgtttcacatttgttgtgttttttgccctcctatacctacatgcctatgtttctctctctttctcctctctgtcagtctctctcctctctctrtctctgtctctgtctctctctctgtcacacacacacacacacacacacacacacactttcttactccctcattcagacatatacacatgctcatacccatttattgttgccagtattttgggcttgttcatagaccagctttggtttgttggagaaggttggaagtgaaaccagaaaagttg

SEQ ID NO: 123656 - DNA, 571 bp, Homo sapiens
ctagtctcaaactcctgggctcaagcagttctcccatctgagcctcccaaagtgctgggattacaggcgtgagccaccatgcccagcttattcttctgttaaaggaaaaacttggtcctttctgtcatggtatcctgaacctcaccactctgtttattgaatggtagtgacaaagccacatgagaccatagataaaatatagcaatctttatgctcttagcaatcttatgacaaaatacatgcaagaggttttatataagaagagcataattatgagtataaactgagaaggaattcgtttcacatttgttgtgttttttgccctcctatacctacatgcctatgtttctctctctttctcctctctgtcagtctctctcctctctctgtctctgtctctgtctctctctctgtcacacacacacacacacacacacacacacactttcttactccctcattcagacatatacacrtgctcatacccatttattgttgccagtattttgggcttgttcatagaccagctttggtttgttggagaaggttggaagtgaaaccagaaaagttg

SEQ ID NO: 123657 - DNA, 627 bp, Homo sapiens
ttaaaattttcagatttgcagttggttaaggaagagaagctttgtttaaatatttggggtcaccagaaaagaatgttagctgtggcttgtatcacctcagatagactttacagcaaagaacaaraagagctgtcagaggcccgccctcagttttctctcacctgagctctgcgtgccagcaggtctgtttagtaggggtccaggtttctgaaaaacaggacatatgctaagatgttatcttacatttctgttgagaacaaaacatctcatgactctaactttgttggctactgttttaagcaactgttaccttcttatcaaattgctcatttacttctcagggctagcaaggtgcctggcatttccctcatatgaactcaagctttttctttacttccatgcctggaaggggtggaggttaggcccgtaagaggggtccctgcttcatcttagtaatgcagaatgaaaatgcgagtctattgtttaaaagtgattcagaattttgaactggtcaccgcagagcaagacacctattgtggcccctgtgtgagtatacgggtgattccacccacggagccagccctgagctgtgtgggagtgctgatggaaattatctcagggcactta

SEQ ID NO: 123658 - DNA, 627 bp, Homo sapiens
ttaaaattttcagatttgcagttggttaaggaagagaagctttgtttaaatatttggggtcaccagaaaagaatgttagctgtggcttgtatcacctcagatagactttacagcaaagaacaagaagagctgtcagaggcccgccctcagttttctctcacctgagctctgcgtgccagcaggtctgtttagtaggggtccaggtttctgaaaaacaggacatatgctaagatgttatcttacatttctgttgagaacaaaacatctcatgactctaactttgttggctactgttttaagcaactgttaccttcttatcaaattgctcatttacttctcagggctagcaaggtgcctggcatttccctcatatgaactcaagctttttctttacttccatgcctggaaggggtggaggttaggcccgtaagaggggtccctgcttcatcttagtaatgcagaatgaaaatgcgagtctattgtttaaaagtgattcagaattttgaactggtcaccgcagagcaagacacctattgtggcccctgtgtgagtatacrggtgattccacccacggagccagccctgagctgtgtgggagtgctgatggaaattatctcagggcactta

SEQ ID NO: 123659 - DNA, 609 bp, Homo sapiens
ctttaaggaggcagaagaagggaggagaaaacagggtccagcgcctttattgtgttttcatgggaaggaaggggccaggcaggtgaagcagctgagcaggtttaaaactggctagtttaaataatttcagtgagctctgagctatcaaacagtgacaggggaggcgtcctttgtcatccagtacctggcrctggagcgatttagggcagggaaatattgccttgctgtgtgagttagatgaagggggtggctggcagtgtgagctttggagtggttggtttgtacagggcaggtgtgttcacaggcgagttgtttactatctgtaggaattagctctgggaggggcagtctctccaggattagtaagatgctccaaaatgtcaaagcctcataagacacagaaaataaaaagcataatcaatacactgttgtttgaaaaagaaaattgtctttggtgtaagtttgataaatgttgcaaactttgtacttggcttgaatatttacaatacctactggcatagttaaggttgtatgaaagtcttacagtgaaggaaacttttttaacactttaacccagagtttcttacattgatttgaccatttacagcc

SEQ ID NO: 123660 - DNA, 622 bp, Homo sapiens
gttatggaacaaattttgaagtggagacaagtaataaataattaagcatgcaaataaacatgaaaacatataggaataaatggcacacagaaagcactttaatatgatggcaagtgacttattagctactctagtttcagtggttgaggaaagtctctataaggatayaattatttagactaaataagaaggagcggggaagaacattcctcttgaattttttttcaaagtactaacactgagcaagatctttttttacccctgaaatgaagtctcactcttgtcaaccaggctggagttcaatggtgcgatctcggctcactgcaacctccgcctcccaggttcaaatgattctcctgcctcagcctcccgagtagctggaattacaggtgcctgctaccactgggcaagattctttatcatgtgaatgatactgcagtgtaaacaccaactaaaataaaatttatggtgtttggagatgaaaatcaagctaacttgatgtttagaaaacagtccccacatgaacaatttattgggatgttgatgattctctatgcactttgagttttctgtataatatagtttttagttatcaattttcagtcttactttcaaaggtagt

SEQ ID NO: 123661 - DNA, 495 bp, Homo sapiens
aaaacaaagaaaactattcgtaagcaccttgtaattaaactgctgaaagccaaagaaaaaaaaatcttgaattcagctagagaaaacacacacattaattacaggagaagaaggctttgattgactactaactctcctaagaaattatggagcctggataatattggaatgacaaagcaaatggctacacatttaaacaattggtcaataattaattctatgcttagtgaagctatccaaaaaaggaagatgaaatcaaaacatatttagataaatataaagtgagaaaatttattaccaggaggatagcatyccaagtaatgaaaaagatgtacataaacatcttttatatacaggctatatcaacatatttttttctcttaaattctttaaaagagaaatgattgtttaaagcaaagacaacttatttgtgtttatattgtagatacaaatgacaaatattattatatatatagctcaaaagccagaaagtaa

SEQ ID NO: 123662 - DNA, 538 bp, Homo sapiens
caaagctttatcatagagtccttcaccaaaacaatgctcctgctcattcctctcaaacaaggacaattttgcaagagtttcagtggaaagtcattaggcatctgccttgcattcctgatttgtctctttctgcctttttgttttctaatcctaaaaattatttaaaggacaccattttttcttcagttaatagtgtaaaacatgttgccttgtcatcagttaaattctcaggattcacagttctttagagataaactaagtggctggtatcatttcttataaaagtctcttgaccttgatggtgcttatgttgagaaataaagtttacattttttattttaactttcaattccgtttttccatgaccttcttgaagtccccttgaatatttaggaaaaatttcacaacaatagtgaaatacctatgtaccaaaaactacaatccattgyttaaagaaattaaagaacaactacataaatgaggaacaacagaaaaattgtttatggatggaggactcaatagagttaacatgtcaatt

SEQ ID NO: 123663 - DNA, 550 bp, Homo sapiens
gtttccagttgagttcagccaatggcagatgctggcagaccagagggaggcaggaaggagacatgggggcggtcaytgtcagctcatcttccaacttggcaaatggggactggcagtggtagtaccctgctactgaaggacatggcctttgtcagggcacccctactagcaacaactctcaggatgctctggtgaccactgccttcccctttatgcctgagggtgacagtggctgctgcactgcctctagggcttgtgctttgggtgggctctgcttttccccttttgcccataaccctcctcattccatgaagagcccttggggacaagggctcatcgcacttggactgtatgcactgcacccttcctaatcaggctcccgcggccacggaccccccaagtcttctgcccaaatggctccaagcctacttgcaggttctgtcaggtctgtcttttccctgggtcgattatgcacctgtaatgttttcagtcataggcttaaggggtaagaaaatgtcagttgttcatgggggttgggatctgagctagg

SEQ ID NO: 123664 - DNA, 550 bp, Homo sapiens
gtttccagttgagttcagccaatggcagatgctggcagaccagagggaggcaggaaggagacatgggggcggtcattgtcagctcatcttccaacttggcaaatggggactggcagtggtagtaccctgctactgaaggacatggcctttgtcagggcacccctactagcaacaactctcaggatgctctggtgaccactgccttcccctttatgcctgagggtgacagtggctgctgcactgcctctagggcttgtgctttgggtgggctctgcttttccccttttgcccataaccctcctcattccatgaagagcccttggggacaagggctcatcgcacttggactgtatgcactgcacccttcctaatcaggctcccrcggccacggaccccccaagtcttctgcccaaatggctccaagcctacttgcaggttctgtcaggtctgtcttttccctgggtcgattatgcacctgtaatgttttcagtcataggcttaaggggtaagaaaatgtcagttgttcatgggggttgggatctgagctagg

SEQ ID NO: 123665 - DNA, 550 bp, Homo sapiens
gtttccagttgagttcagccaatggcagatgctggcagaccagagggaggcaggaaggagacatgggggcggtcattgtcagctcatcttccaacttggcaaatggggactggcagtggtagtaccctgctactgaaggacatggcctttgtcagggcacccctactagcaacaactctcaggatgctctggtgaccactgccttcccctttatgcctgagggtgacagtggctgctgcactgcctctagggcttgtgctttgggtgggctctgcttttccccttttgcccataaccctcctcattccatgaagagcccttggggacaagggctcatcgcacttggactgtatgcactgcacccttcctaatcaggctcccgcggccacggaccccycaagtcttctgcccaaatggctccaagcctacttgcaggttctgtcaggtctgtcttttccctgggtcgattatgcacctgtaatgttttcagtcataggcttaaggggtaagaaaatgtcagttgttcatgggggttgggatctgagctagg

SEQ ID NO: 123666 - DNA, 444 bp, Homo sapiens
catgtggtctacaaagcacatcctttgcctggatctccgctgtggaacgtggctttaatatgcacaggaggtagccaggcgcagtggctcatgcccgtaatctcagcactttgggaggctgaggcaggtggatcactttaggtcaggagtttgagatcagcctggccaacatggggaatccccstctttactgaaaatacaaaaattagccaggcgtggtggtacgtgcctgtaatcccagctactcgggaggcttaggcagaatccaggaagtagaggttgcagtgagccaagattgcagctctgcactccagcctggacaacagagactccatctcaaaaaaaaaaaaaaaaaaaaaaaaaaaaaaaaaaaattcacaggaggtggacaactgtggtagatagtagctgcattgtttatgcattcttccagagtccaggatt

SEQ ID NO: 123667 - DNA, 603 bp, Homo sapiens
agaacatgtatagaaattctcagcaaactaggcatcgaaattaactccctttacctaataaaaggcatctgcaaaaaacctacaattaatgtcatactccctgaggttcagaaaaagcaagatgttcattctcactacttctattcaagatcatgttgtgggttcccagccaatgayacaaggcaagaaaaagaaatagaaaatgtatagactgaaaactaagaaataaactttttctattcttgggtgtcattattgtatacatagaacatatcaaggaatctacaaaaagctactatacttgataagtgactttagcaaagccacaggacataagaacaacagaacataatcagttatatttctgtacactggaaatgaacaatcaaattgaaatagttaaaaatagtaccaattgtaataatataaaatataaaatatttagaaattaatctaagcaaccctgtacaagactgattaattgatctctttataagtataaaaccaattgatctctttataactataaaaccaattgatctctttataactataaaaccaatgaataaatatgacacatatgtgggtagtttatacatacac

SEQ ID NO: 123668 - DNA, 663 bp, Homo sapiens
agtaatcatgtttgatattgagatatagccaatggttttacatttataatagtggtgatataattaatactgcctaaaatttatgatacatgtggtattgactaagcagtagagatataaatcaatgaatcagagtggaaattctaaaattagacccatatgtatgaccaattggcttttgactaaaatgtcaaagaaattcagtgaagaaaaatagtcttacaaaaaatggtgctagaacaattagaaatacatatgcaaaaatagaatatttattcatattttaccttatccaaagattaattcaagaactgttatagtgttaaatggaaatcttaaaactacaaaaacttctaggaacatctttgtgtaaatctatatgggcctggcttagacaaagctttcttaaattcatataataaaattaattarcacattgaacttcatccaaatttaaaatttttgttctgtgaaagataattttaagaaaatggagacaaaagccccaaattgggaaaaaattacttataaaatacatatctgacaaagtacttaaactagcatagattttaaaactcttaaaatcactaataaaatcatgcagctcagttaaaaattgaaaatgaataggtatttcatcaaagacaatataacagacatgtg

SEQ ID NO: 123669 - DNA, 581 bp, Homo sapiens
tgtaatgtaacagaaagagaattgaaattaaaagacacagatgtgactcacctaatatgtgtatgcgatctcaaagcaaaatttttacatgtaacatgaatagatgataccaamtactttttgccatatcttacaaatttggcaatctgtgatagtctgctttttatatttatgtcaagaaaggctttaaagatcaattacaagtgtttacatgtaattcttatttggagaataaacaccaatgaaaaaagttctcctcttgccaaaaatattgggcctatctttagtaggcacctcgatttaaaaaaaatagggactttaaattgacaccaataggaggaaatggtattcttttttccttttaaatccatgaatacatgtaaagttacatttcattacaatttcaattttatatgactgcatcattggaatgttgctagtgaaatttgatgatagtttagggcttcagttcacctatgaataaccgagatgccttagctgaatgaattcttattccatgtctactattttgctcgaaccataaataacgttcaggcagagttatgtggaagaaaatgaaa

SEQ ID NO: 123670 - DNA, 585 bp, Homo sapiens
aaatgtctcatttctgaactagtgtttagaaactctgttatggcagcactaggactgaatgccgcaagtgtgcacagyttctgagaaacaaaggactggctacattctagaaaagctggttgtttcatcacaatacagaaattaaaaatcactaagctattacatggcaaacacattctgttccattttatttattaggatggtcttatatgaactattcaaaaggcttatttttaaaaaaggagttctccccaaccccatcactaaatagttcagtaatcactaagtagccatttattcaatttggtaatggtctgattaaacagctctctagtacactaaaaaccatagaggtgaaataaaacattagaggtaaatgattttacccactgatgcattttctctctgtttctaggtcctcccttttaaaactaagtcaaaatctggtatatttcagtggaactgagttgtttagctttgtgagtatcagttgctactctaatattacagtatataatataacattatatatatggtatacataacaatataacatataatataatactaaatgtaaagaccaat

SEQ ID NO: 123671 - DNA, 585 bp, Homo sapiens
aaatgtctcatttctgaactagtgtttagaaactctgttatggcagcactaggactgaatgccgcaagtgtgcacagcttctgagaaacaaaggactggctacattctagaaaagctggttgtttcatcacaatacagaaattaaaaatcactaagctattacatggcaaacacattctgttccattttatttattaggatggtcttatatgaactattcaaaaggcttatttttaaaaaaggagttctccccaaccccatcactaaatagttcagtaatcactaagtagccatttattcaatttggtaatggtctgattaaacagctctctagtacactaaaaaccatagaggtgaaataaaacattagaggtaaatgattttacccactgatgcattttctctctgtttctaggtcctcccttttaaaactaagtcaaaatctggtatatttcagtggaactgagttgtttagctttgtgagtatcagttgctactctaatattacagtatataatataacattatatatatggtatacwtaacaatataacatataatataatactaaatgtaaagaccaat

SEQ ID NO: 123672 - DNA, 602 bp, Homo sapiens
aaatatggctttctcttttgaacaaaattttcatgtaaaagataagagagttttgtttgccttttgagtaaaactacagaagaaaaaaatggtgggagaaasacagatttagttggcctcatgctgtctttcttgggtcttattgtttaggaaactgagtctcctatcaaagagaaaacatttttgtatcataattttggcaaaatgaatgactgttttatggtatcttgtgatcctattttgtgatatcaagtgttttaaacctttgatatttgacagactttccaacagcaaaatttcaagttcaaattaagtctttttgaccttaaactaactttttttggatattaggtttcctgaagtccaagaaagacatattaggtttatttatgttagaattatacaggaagcattgtcaaatttgaagtggtgtttaactttgggttttatttatatagaaatattgttaatatgtgttccaagattgtatgacattcctgaaattcttatatatattaatatatgttgtcagtaataattatgattattatgttagattattgtacaccacagaaataaccaaagttccatgtcaactgtgt

SEQ ID NO: 123673 - DNA, 577 bp, Homo sapiens
tctgaactatattaaagtaagtacacacagataacattatcacttgccctgtatgatctactaacgtcataactttctgtctccttgccttgctcagtgagattaaaaacatctgcaactcatttcctccagtttccttccaaaatcagtgagccagtaaaacaccctcatttcaaaaaactgttttatttgatacatcttgtaaatgaattacaagttaaccacaaaatacaaaaacatatagacattgcactttaaatattcaaaaaatgtataaataagaagctcaaaatctgatatggaaaaatattcaaaaaatgttcagagtctttttatcaaaataaaagttatttcctttttatgagtatgtgtgtgcatatctgtgattataaaaaaagtctttaaaaattcatataattcagaaagacatttwaaaaaaatcacctgagctagaagtactaattttaaggaggtagtggttgggggaacacttatagacttttatctgtgtaacacagacatattgctatgtatattttctatgtgcatagacatattgctatgtgcaatcattata

SEQ ID NO: 123674 - DNA, 562 bp, Homo sapiens
ggcacagaaaaacaaataccacatcttctcacttaaatgtggaatctaaaacaattgaacacatgtaagcatagagcaaaatgctggttaccagaggctgaggggtgaggaggcaatggggagatgttggccaaaggtgcaatgtttcagttagaccggaggagtaagtatttgaggtgatggatatgttaattacctcaattcaatcattccatattatatatcatagcatcactttgtacaccgtaagtataggcacttataatttgtcaatattcaatagtataaataaaaatttkaaaaaactttctgaccatcacaatatccaagagaaataaaaatatatgtcctaccagaaacttgtagataaatattcatagcagcattattcataataactaaaaagtgaaaacaacccactctccatcccctgatgaatggataaacaaaatgtgttttatccaaacactggaatattattcagccataaaagacataaactattgatacttactctaacataatgaagcttgaaaacatgataatattttaaagaaggcag

SEQ ID NO: 123675 - DNA, 581 bp, Homo sapiens
tggggaaaatcaagtgtgatgacccagtgtctaagtgtgttgcagaagcttatatacccatttccaggggagagggagatgaggaatgtagagaattccaagggacagtaactcattagggagagtgaagggaccctggagacaaaaattaattcataaattatttacctgggaatttgaatgwgtttaagagatagccattgtcttgtgaaaaggtctgtggaggtgttgttatattcctcaatcttcttttctgaagatccataaataatgcagtttcagggaggggatgggtataattgttctccttggtaagtccagtcttcacgcagataagagaaaagcctcttctagcatctgctgatctctaagggcctttcattcaaaatatttagtataccaggataccatatttgaggtaaaattctgtgagttcctttaccctcttttggaaaatggtaaattttctcataaaatgcaggctcatttatgattcatttatagcagtgttaatgtgtgcttattattatcaatagtgcttgtaactaacattaccttgaacccagaagatgaagggctca

SEQ ID NO: 123676 - DNA, 598 bp, Homo sapiens
tatcatagctctgtgtataatttgaaggcacgtaatgtgatttctccagttttgttctttatgcttaggatgtctttggctattctgggtcctttgtggtttcatataaattttaggatagttttttctatttctgtgaagaatgtcattggtattttggtagggattgcattgaatctgtagattgcttttggtaatatggacattttaacaatattgattcttccaatccaagaacatggaatatctttctgttctttggtgtccttcaatttctttcattagtgttctatagttttcagtatagagatctttcactttgttggttaagctaattcctaggtatttaattttatgtctggctattayaaatggaatcgctttttaatttctttttcagattgttccctgttggcatataaaaatgctactgatttttgtatgttgattttctattctgcaactttactgaatttgtttatgagttctagtacttctttaatggagtctttaggtttttccaaatataaaattatatcatctgcaaacaagaataatttgacttcttataaatttgtttcttataaaattgtttctt

SEQ ID NO: 123677 - DNA, 580 bp, Homo sapiens
cccaggaggaaaaagtggttttgtgagccggtcccagggtccccatactgtgttcagcctagggacttggtgccctgtgtcccagccactccagccatggctgaaaggggccaacttagcacttgggctgtggcttcagagggtagaagcttcaagctttgacagcttccatgtggtgttgagtttgtgggtgcacagaagtcaagaattcaggtttaggaacctccacctagatttcagaaaatgtatgaaatgcctggatgcccaggcaaaagtttgctgtagggataggaacttctgctagggcagtgtggaagggaaayatggggttggagcctccacacagagtccctactagggcactgcctagtggagctgtgagaagagggccaccatcctccagaacccagaatggtagatccactggcagtttgcaccatgcacctggaagagccacagacactcaatgccagcccatgaaacagccaggagggaggctataccctgcaaagccacagggatggaactgcacaagaccatggaaacccactttttgcatcagtgtgacctggatgtgaga

SEQ ID NO: 123678 - DNA, 565 bp, Homo sapiens
agcacaggttttagatcatttaaagacattaaggaactgagaggtattgatagcttttgttaatttgttgtaacaaaaagtatgccagaagactagaaacagcataaggtcttatttttaaaaaggaaaccagtagttttggagattgttttcctaggtatgccttggagaagaggcagagaagtacaggcttagctcatcagcattaagaacatttcattaatagtgtaaaataaactttcttaaatactgttagaaggaattaatgtcagactttgagagaagtatctaaaaaggtactttttgttgtccatttttaatattttcattaatgttttgaataaatgtacagttgtgcttataaaatgtcagaacaatttagctggcaaggataactaaaacaacttgtaagttctgtctgaaactacaggcagaaacctatagtgtgagctgcttaaaagtgtggaattaaaaaaatatggaattcagatagaaaaarttacatgagtaaaattttgttcaattaatgttaaggcactgtatgtactaagagaataaaaaatgt

SEQ ID NO: 123679 - DNA, 645 bp, Homo sapiens
ttaggaagacactgcagtaatgtatgtaggggctgatagtgatcagacttaggtaatagtgatgcatgtgggaacaagtggtgaaggtagcaaatctaaaaggattttgccaatggattggatacagaatgggagagaaataaaggaatcaaggaaaattccagggtttttggagtaagcaactggaaggatggagttgccataactgagatagggaaggctacggatggagcagatttgaaggtggagagtaggggttcagttttggaaatttggtgtgtaagctatttgctagacattttatgtggcagtattaagtaagcagttgaatacrtaagtctaaagttcaggaaatagagtagggctagagacataaatttgggagttatcagcaaatagatcattaaatattaaatttaaatatttaaagccatgaaaccataggagatcaccaaaggagttggagttagacctttccaggtggaagagaaaaggaccagagactggtcctgtatagctccaacattagtaatttggagaaaagaggaagaatcagaaaaggaagatagagaaggtacaaaccagtgaagtaggagaaaaagtctggagtcccggaagccaaatgaagaatgtgtgtagtgaaga

SEQ ID NO: 123680 - DNA, 451 bp, Homo sapiens
attcctttaagtattgaccacaaagctggggacatagcaactgtttagcaaatcttctattttactgattcatcaattggtacagatgaattattcttgcagtgccaggccatggaactgatatagagatcttagacttgttcttcatacaaaattgaaatatgcgtgtttccatttgttaatcttttggtatttgtattgcagaataaaatacagggtactcaattcaatttaaatttcagataaacaacaaacaatgttttagcgtttaagttatgtctcaaatattgcaaaggatatacttctaatgaaacaaattatttgttgtttatctgaaatttaaattgaagtagatatcttatatttttatttgctaaatctggtaatgctatttagtgttcataaaataataactttaaagkatatcctgaaaagacagggctatcattcc

SEQ ID NO: 123681 - DNA, 532 bp, Homo sapiens
gtttctacttttcccaattagtatttgtgtttcgaccaccctgcatggaaacatgggttatgaaatgccttcacaagtatggtagaaaatatgctgctattgtrtgttgccttggacttctagaagtctaggtgttggtggttattatatggcgatagtaaagtaaaatcctccctactgttctagtacccacaatactacttttcatactttagctactttaccttcagtctctctgtcaacctctgatctaaagacttctttactaaataacattcttcttgcctaatactgtattatggacttcatcagggaagggactaatccatctttgcatgctaacgtttaagctgaaataaagtaatccctcaattaacattttgcagaaacctccttaggttcccctacaaacctgcccctattttagttaatagaatgcattcccactgacatgctggaaatttcagcattgtctttggtcctccctccagtctaatctgaatctcacaagtcatcaaggcctgtggcttct

SEQ ID NO: 123682 - DNA, 537 bp, Homo sapiens
tctttgtgtgcaatctaagttttggacccaagggtggaggacctatcactgtacaatgctgagtaagacatggttttcaccgaagtcagtgaagttcccagtcctttctggcgcgagctgcattcccagacactcsagctcttacggaaagaagcactgtcttttgcgctagtgtttgtctaccgtcccctgtcctaaaataatgactgccctctacctgagggaaagggacttcaatggtggtaatctactcgcggctggctgcatccttaaaaaagcccatttctcttctactatcttcaagatcttggttaaccagattcacattgtatgtgccggactctttctcaggtgactgctctgtgcttttttatctaaagaagggcaagtcacccacgggtactaaccctcccccacccacatcaagggagaaacactcctctactcttttctggacattcctgttcagagtcgaggtaagggttgcacggccccgcccctccgttaccaagccttccctcgcctgcctcgcagcct

SEQ ID NO: 123683 - DNA, 536 bp, Homo sapiens
  misc_feature (1)...(536): n = A,T,C or G
agtcttttgcgtggtgctgctgatggggtaggggatggaggcaaacccatctatatctttaaaatggcggtatgatatggtttgggtctgtgtccccaccaaatctcatgttgaattgcaatccccagggttggaggtggggcctggtgggaggtgactggatcacgaaagcanggttcttgtgaatggttaagcacaaaccccccgtggtactgtccttgggatagtaagttctcattctcatggccgtttaaaagcatgtggcactttccccactcactctcttgctcctgccatgtaagaagcttgctctccgttcaccttctgcagaagctgctmtactccctgtacagcctgcagaaccacacgtgagccaattgaacttcctttttttatcaattaccctgtctcaggtatttctttatagcaatgtgagaatgtactgatacatgctataatacacttaccattacatgtaccattagtgcatttatttagttctttcacaatattgtacaaccttcaccactataggt

SEQ ID NO: 123684 - DNA, 613 bp, Homo sapiens
ttattagtgacagactaagcacatttaaactttagcaaaacatttgatcaaatgactcgagtgacttatgacattcttatggacaagatgaaaggttgaataataatatcatcagatgtatttgtaattcatcatctgcctttatttaatagtgttaatcagtcaatcaacatcaaattgtaaagggctatgcttgaggaatcctgcctgctcaacattatcattgatgatatgtttatcaaacttgaaatggccagaatctaggaaagatacctaactgtttaattatggaataaaattttagaggatcgtactcgacaggctaatataatgaatccaaaccagaagctgaaattttaaaaataaatattataagttgctttaaggttaaagatcttgtttataaaatccatgattagacaaatctactaaataattgttgatgtaaccaaaccctaaaaacaaacaaaagattactaataagttttactgaagatttaaaggctcagatgaacccagcaacagcatgatgcaattgctcaaaaaattttayatatggcacttatagcaacatagtagtattcattggcaatactgggtaatgatcaagaac

SEQ ID NO: 123685 - DNA, 587 bp, Homo sapiens
agttttacatcttttacttaaaaacaaaatgaaggcttggagtatttatcaaaattaagtgatgctgatataaagtaaatagatatcactatctttaaatcaaggtatcaattattaacatttggggatattactgataggcttattttgtttgcttatttcttgagacaaggtctttctctgtcacctaggctggagtgcagtggtgtgatcacagctcactgcagcctcaacctcctgggttcaagcgatcctcccacctgtgcctcctgagtagctgggactatatgaacacactgctatgcctagcttattttttattttttatttttagtagagatgaggtcttgccatgttgcccaggctggtctcaaactcctggtctcaagctatccttccarctcagctttccaaagtgctgggattacagacacgagccaccacacatggtcaactttttttttaaaaaaataccaaatcaaaaaagtcaactgaattgaatttaactcaacatctattgtgtatgatttgtaatatttttaaatttttccaaaattttaaaatagccagttagctgaaaaataaac

SEQ ID NO: 123686 - DNA, 587 bp, Homo sapiens
agttttacatcttttacttaaaaacaaaatgaaggcttggagtatttatcaaaattaagtgatgctgatataaagtaaatagatatcactatctttaaatcaaggtatcaattattaacatttggggatattactgataggcttattttgtttgcttatttcttgagacaaggtctttctctgtcacctaggctggagtgcagtggtgtgatcacagctcactgcagcctcaacctcctgggttcaagcgatcctcccacctgtgcctcctgagtagctgggactatatgaacacactgctatgcctagcttattttttattttttatttttagtagagatgaggtcttgccatgttgcccaggctggtctcaaactcctggtctcaagctatccttccaactcagctttccaaagtgctgggattacagacacgagccaccacacatggtcaacttttttttwaaaaaaataccaaatcaaaaaagtcaactgaattgaatttaactcaacatctattgtgtatgatttgtaatatttttaaatttttccaaaattttaaaatagccagttagctgaaaaataaac

SEQ ID NO: 123687 - DNA, 587 bp, Homo sapiens
agttttacatcttttacttaaaaacaaaatgaaggcttggagtatttatcaaaattaagtgatgctgatataaagtaaatagatatcactatctttaaatcaaggtatcaattattaacatttggggatattactgataggcttattttgtttgcttatttcttgagacaaggtctttctctgtcacctaggctggagtgcagtggtgtgatcacagctcactgcagcctcaacctcctgggttcaagcgatcctcccacctgtgcctcctgagtagctgggactatatgaacacactgctatgcctagcttattttttattttttatttttagtagagatgaggtcttgccatgttgcccaggctggtctcaaactcctggtctcaagctatccttccaactcagctttccaaagtgctgggattacagacacgagccaccacacatggtcaactttttttttaaaaaaataccaaatcaawaaagtcaactgaattgaatttaactcaacatctattgtgtatgatttgtaatatttttaaatttttccaaaattttaaaatagccagttagctgaaaaataaac

SEQ ID NO: 123688 - DNA, 563 bp, Homo sapiens
agttgtccaagctggctttggtgcagcatttctcgaagctttgccattgtgtcattttgaccttcaattacctggtacaactcctcagtctgaaaatgagagagggaatatcaaatatgttagtaaactaattataaattccattatatcacctgtacacattttagtaacaggactattccaaaatatcaattgagattaagctacaacttctccaggctaagacatgctagtctgacaatatccattttgacaaaatataaaatacttgtctactttgaagggaccaattgtttccacacaggtccttgattggtaaatatgttacctcacgttccctgcttttcagagtttccttgaggttctgaattgtaccatcttgcttttgagacractcctgagcacactttagttcatagctcatttcattaagtttctcttgaagaatctgaattcagcaaagaaaaacagttttttaggtcaatgatgtcttttagcctcaaatgaataaagcctttcctcaaatctaggatttaaagaatttcttaggggatattaccttg

SEQ ID NO: 123689 - DNA, 643 bp, Homo sapiens
aattcatcatttacttaatgataaaaccatctctataaaatttggcttcttacttcttcagcgtaaaacaacagtaacacctacagtaagatactttgaaattcaaactacaacaggcagaattaaagaaaatagcttcaagtttaaaatggcaaggaaggtggtcatatttatttactttaaaccaaacaatcttacagtggtgaaggaaactttataaactaaccatctgatccaatcctattttacatacaaggaaatggaaacttagagaagtaattagtccaaggtttcatgggaaatcaggaaaaagatccaattaaactgaactggatttccactcaggttgggaatgtatctctcatttctataaacccattgcctaccataatgccgggaatactgcagagatcaaaagtttttgtttaatgaacaaataagaacaataaaaacaaacaaaaacgrgcctttagtggctctcttagaaataagactgtatataacatatattcgaacagcaactttaaagccaaagaatgccacaggaaaatacataatgtatttgaatctcatatgaatcaatcttgacatgaataataataagaaacctctttttctataaataatgtactgacctaaaagt

SEQ ID NO: 123690 - DNA, 643 bp, Homo sapiens
aattcatcatttacttaatgataaaaccatctctataaaatttggcttcttacttcttcagcgtaaaacaacagtaacacctacagtaagatactttgaaattcaaactacaacaggcagaattaaagaaaatagcttcaagtttaaaatggcaaggaaggtggtcatatttatttactttaaaccaaacaatcttacagtggtgaaggaaactttataaactaaccatctgatccaatcctattttacatacaaggaaatggaaacttagagaagtaattagtccaaggtttcatgggaaatcaggaaaaagatccaattaaactgaactggatttccactcaggttgggaatgtatctctcatttctataaacccattgcctaccataatgccgggaatactgcagagatcaaaagtttttgtttaatgaacaaataagaacaataaaaacaaacaaaaacgagcctttagtggctctcttagaaataagactgtatataacatatattcgaacagcaactttaaagccaaagaatgccacaggaaaatacataatgtatttgaatmtcatatgaatcaatcttgacatgaataataataagaaacctctttttctataaataatgtactgacctaaaagt

SEQ ID NO: 123691 - DNA, 477 bp, Homo sapiens
agtggactgggagaggaagacccaccctcagtatgggtgggcaccatccagtcggctgccagcaaggctacaacaaaaacaggtggaagaggtgggatcaccttgctcactggggcttctggctgccttctttctccaatgctggatgcttcctcccgctcctcctgcccttagacactagactccaggttcattggcttttcgactctgggamttgctccagtggcttgctaggggctcttgggcctttggccacagactgaaggctgcattgttggcttccttggtttgaggctttcaaattcagactgagccactgccagcttctctcttccccagcttgcagatcgtgggactttgccttgtgatcgtgtgagccagttctccctaataaactctctctcacacacacacaccctattattctgtccctctggagaaccctgactaatatactccttttcccaacaggtgtaa

SEQ ID NO: 123692 - DNA, 487 bp, Homo sapiens
gtttcaccatgttggccaggctggtttcgaacgcctgacctcaagtgatctgcccactttggcctcccaaagtgctgggattacaggcgtgagccgctgtgcctggcctataagaacccaacatcttaaacagaatatagatgagctactttggttgaagtagtgagaggaggcctggagctccycatcctcgtttccccatgcggggcattgtgtggactcctgcagtccagtgagctacagcttgaaaacctcccaggttagagtatagcacaaagggaagtgcaagttgccttcacaagattcaagtaaatataagaccaaatcaaattatcagagaaacagacacaagtgccaactgcaagctactgtcttacattgttgagattttataagtgctaaggactgagatgctttcaaaccttacaagtgaaagatttcctgggatacaagactttcagtgctaaaatcaagacagtcatgggca

SEQ ID NO: 123693 - DNA, 487 bp, Homo sapiens
gtttcaccatgttggccaggctggtttcgaacgcctgacctcaagtgatctgcccactttggcctcccaaagtgctgggattacaggcgtgagccgctgtgcctggcctataagaacccaacatcttaaacagaatatagatgagctactttggttgaagtagtgagaggaggcctggagctcctcatcctcgtttccccatgcggggcattgtgtggactcctgcagtccagtgagctacagcttgaaaacctcccaggttagagtatagcacaaagggaagtgcaagttgccttcacaagattcaagtaaatataagaccaaatcaaattatcagagaaacagacacaagtgccaactgcaagstactgtcttacattgttgagattttataagtgctaaggactgagatgctttcaaaccttacaagtgaaagatttcctgggatacaagactttcagtgctaaaatcaagacagtcatgggca

SEQ ID NO: 123694 - DNA, 598 bp, Homo sapiens
atctatgttccttaggagagcttggaggacatgctgtttattaacatgatgaagaatttgctgatcagagagattccaacattgtggagaagcayagtccttcttaaaccagggatagaaggacatgtgattaaaagactggggtccattgtagcaagggggatggtaggattcctgattaacaggggccacagggaagcgcttaattgtcagaagcaaagtgagtgcagtcaccacaatgggaaactgggttgaaatggctgctgtgtgggtgggcgtgggaactgtcctaagctatccatggaaatggttactatgtgaaagggcaagatagatgagtcaccaacaagggtattggttcatacacataatcaaaagagatagaaaataaggagcgaaaggctgagatcggatgtctcaatggaaagtcataatttcttgccttgtcttcatacctgagtgagttctcttacccagaaactattgactgacggagatgctgggtctccatgagacaggaactgcaacattatagtaagtgtgtgactcttcagttcttccccaaaaggaccaagagtatttactcagaaaactgcac

SEQ ID NO: 123695 - DNA, 598 bp, Homo sapiens
atctatgttccttaggagagcttggaggacatgctgtttattaacatgatgaagaatttgctgatcagagagattccaacattgtggagaagcacagtccttcttaaaccagggatagaaggacatgtgattaaaagactggggtccattgtagcaagggggatggtaggattcctgattaacaggggccacagggaagcrcttaattgtcagaagcaaagtgagtgcagtcaccacaatgggaaactgggttgaaatggctgctgtgtgggtgggcgtgggaactgtcctaagctatccatggaaatggttactatgtgaaagggcaagatagatgagtcaccaacaagggtattggttcatacacataatcaaaagagatagaaaataaggagcgaaaggctgagatcggatgtctcaatggaaagtcataatttcttgccttgtcttcatacctgagtgagttctcttacccagaaactattgactgacggagatgctgggtctccatgagacaggaactgcaacattatagtaagtgtgtgactcttcagttcttccccaaaaggaccaagagtatttactcagaaaactgcac

SEQ ID NO: 123696 - DNA, 598 bp, Homo sapiens
atctatgttccttaggagagcttggaggacatgctgtttattaacatgatgaagaatttgctgatcagagagattccaacattgtggagaagcacagtccttcttaaaccagggatagaaggacatgtgattaaaagactggggtccattgtagcaagggggatggtaggattcctgattaacaggggccacagggaagcgcttaattgtcagaagcaaagtgagtgcagtcaccacaatgggaaactgggttgaaatggctgctgtgtgggtgggcgtgggaactgtcytaagctatccatggaaatggttactatgtgaaagggcaagatagatgagtcaccaacaagggtattggttcatacacataatcaaaagagatagaaaataaggagcgaaaggctgagatcggatgtctcaatggaaagtcataatttcttgccttgtcttcatacctgagtgagttctcttacccagaaactattgactgacggagatgctgggtctccatgagacaggaactgcaacattatagtaagtgtgtgactcttcagttcttccccaaaaggaccaagagtatttactcagaaaactgcac

SEQ ID NO: 123697 - DNA, 598 bp, Homo sapiens
atctatgttccttaggagagcttggaggacatgctgtttattaacatgatgaagaatttgctgatcagagagattccaacattgtggagaagcacagtccttcttaaaccagggatagaaggacatgtgattaaaagactggggtccattgtagcaagggggatggtaggattcctgattaacaggggccacagggaagcgcttaattgtcagaagcaaagtgagtgcagtcaccacaatgggaaactgggttgaaatggctgctgtgtgggtgggcgtgggaactgtcctaagctatccatggaaatggttactatgtgaaagggcaagatagatgagtcaccaacaagggtattggttcatacacataatcaaaagagatagaaaataaggagcgaaaggctgagatcggatgtctcaayggaaagtcataatttcttgccttgtcttcatacctgagtgagttctcttacccagaaactattgactgacggagatgctgggtctccatgagacaggaactgcaacattatagtaagtgtgtgactcttcagttcttccccaaaaggaccaagagtatttactcagaaaactgcac

SEQ ID NO: 123698 - DNA, 579 bp, Homo sapiens
atctgcatctttaattaatgcattttgaccacttacatttaaagtgatgattggtagagytggattaatgtttaacttatttgtaattgttttctaatggttgcatttattctttgtttctgtttatcatcttttaatgcctttactggttttaattaacaattttatataattctattttatcttctctcttagcacatcagttatcactttaaaaacatagtaattgccctggagtttgcaatgtgcattttttccagctgcattgatgtatattgacaaataaaaattttatgtactaatgacatacaacaaaatgttcagatatatgtataacattatgagatgattaccacaatcaagctaattaacatatccatcacttcacataattatcttttttattttgtggtgagaatatttctactttcttagcaaattttaagtgtagagtacagtatcattatagtcaccatgatgtacaatcattctcaagaacttattcatcctatctatctgaaaccttgtaccttttgaccagcatcccccattttccctactccccagcccctggcaact

SEQ ID NO: 123699 - DNA, 514 bp, Homo sapiens
agtggatgaagaaactgtggtacatacacacacacacacacacacacacacacacacacacacacacacacagtggaatactattcagccttaaaaaggacatcctatcrtttgctataacatggataaaccaagaggacactatgctaaatgaaataaaccgggcacagtaagacaagtgctgcatgatctcatttatatatggaatcttaaaaagttgaactcatagaagtagaaagtacaatgatggttaccagaggctggggttgagagtggaggagtgagggaatgacgagctgttggtcaaagggtacaaaatttcaattagacaaaaggagtgagttttttttttttttttaatactttaagttctagggtacatgtgcacagcctgcaggtttgttacatatgtatacatgtgccgtgttggtttgctgcacccattaacttgtcatttacattaggtatttttcctgatgctatccctcccccatccccccaccccacgacaggc

SEQ ID NO: 123700 - DNA, 627 bp, Homo sapiens
aatgtggcgtggatttgaaaagatgtaataaaggtggagcagcaacagttcacctgtgaggagaaggaagctcaaatttcttcgtgcrtcactctgtgccagaacttcccataaagcattttatttaatcccccccgtccccattttacagaagaaaatttaagtctgccccttccccacagcacctgcagccagagagttgagtcctcaagatgctggttggcccagcaacaccagtgccaacttcaaattgtaagtaaaagaaaatgaggagcacttgtaaagttaaaagacgaaaagaaacacaggaggggacaatttttccaatccattcccacccagcatcgacaacacaacaacaaaataaaacaaaacctgtcaggacaatcggatttggaagaacccttgcagttgccattgccaccttctcttctcagccctccttgcccctcagtgttgcctcctaaaatttctttccattcaaacgtcaagggagcttctttgtattgtttttgaggtttggctttctgaaaaccttggttttcatgagcgtgcatgtcaaaaggtaaatctccttctctttttactatgaacctttttaggaaggatggcaatgtacattccaaa

SEQ ID NO: 123701 - DNA, 627 bp, Homo sapiens
aatgtggcgtggatttgaaaagatgtaataaaggtggagcagcaacagttcacctgtgaggagaaggaagctcaaatttcttcgtgcgtcactctgtgccagaacttcccataaagcattttatttaatcccccccgtccccattttacagaagaaaatttaagtctgccccttccccacagcacctgcagccagagagttgagtcctcaagatgctggttggcccagmaacaccagtgccaacttcaaattgtaagtaaaagaaaatgaggagcacttgtaaagttaaaagacgaaaagaaacacaggaggggacaatttttccaatccattcccacccagcatcgacaacacaacaacaaaataaaacaaaacctgtcaggacaatcggatttggaagaacccttgcagttgccattgccaccttctcttctcagccctccttgcccctcagtgttgcctcctaaaatttctttccattcaaacgtcaagggagcttctttgtattgtttttgaggtttggctttctgaaaaccttggttttcatgagcgtgcatgtcaaaaggtaaatctccttctctttttactatgaacctttttaggaaggatggcaatgtacattccaaa

SEQ ID NO: 123702 - DNA, 576 bp, Homo sapiens
gttacaacataaatgaattatgaaataattatgcttagggaaagaagccaaagaaaaaagagtacatactctatgattccgttacagaaaactctatgtaatgcaaacttaacatagtgacagaaagtagatcaacattgcctgtgaacatggggtgggtagagaggagcaggaaaaaaggattgcagaggggcgcatggaaacttttgaggccaatggatatgtttactaccttgattgtggtgatggtttcatggggatatatgtatgctaaagtttatcaaattgtacactgtaagtatgtacagtttattacatatcaattataccccaatgaagctgttttttaaaataaaatttcttgctcaatatttctaactctttgaagatctaaagaaaatgaggagcaggagttgctggtagttcattatgactatttagtgtagtgagttaaagggacacaattaaacctactatactayataataataatgaacaacaatttctgtccttcattttgtatgcccaaaaaagatacgttcaagtcctgacactggtacctgtgaatgtgatctt

SEQ ID NO: 123703 - DNA, 583 bp, Homo sapiens
tcatggagaaactgcactaactttagttggaagaaaatagggagtcactggagttgtttttagtaggaggttggcctgagaacatgttatgaggactgatttccaatactgggcaggataagtcagatttaaaaaaaaaagaaatcagggaaacatttcgggggtgtaccccaacattccaggagctgaaatgaggaggactgaacttggaaatgaaatacagggaaaacaaacaaaaggcctggtgccagaagaacccaactcgagtgggtggaatatcctaacatattctgaggccaaactcctactaaaagagaccaaggggatcacaggagaccagagtaaaaagcacagggaaaacggccctcagaagaaaagctgatgtcggggacagtgaaacatcatctggtttgggacaagctgagttgaagttccctgcatttcacaggcactcacrtgggtgccacaacacaggagagaggtcagccctggaagcggtgttgaggtgaatggaggggagcaaaccagggaaggagagcagacaaaagagaacagaactagggagaggacctgggtacaggca

SEQ ID NO: 123704 - DNA, 603 bp, Homo sapiens
catgcacacacaaatacttgactagcatctcatgcacagatacttgcatacttgactggtacctcatgcttacttctatcagatgatagcgttggctaccccrtataggacgatctgtttacttatctgtcccccgccacaccagacataggccatcaggtccaccaggactggtgtctttattgttgcatgtttccattcttcacacagcacctggaaaataggtaaataaatattaagtgagtgaatgaatgaatgaatgaatgggatgaaggaatgaattcttgctactgactggtgcatagttgctacgcacatccacctccaattcagctccctgctggagtctgaaattgaaggctggtggagagaggatttggtcttcctaggcaaaatgcagttacctgacttaaccattcacactccatgtggatgggataaaaacacctaagtgagtttttcttgtcctggtgatttttgtagcagtttgtggctcatttttatcaagtctagatacaattttctttcatgtgctatgaagtcttggttcctgtaacacaaacctctttaatcattagtctttctggtagaatttgatagggg

SEQ ID NO: 123705 - DNA, 598 bp, Homo sapiens
ttctctttaaaggcctcccagttagcttgcaagccccttctacattcctaagggtgaattacccttataattattatcagtattgaatatttactaagtacccatactgggtgagatcatgaagttgtttgacaygtatatatggcagaaatattccaagtgtatttagccactgttaatgttcttccagagctgaaaatagcagggacgagtgtacttgacctgatcttttgcatgttgactcctttaactaagtctaaacagagcagaaaccttgccatcggagaagcgtttgcaaaagggagaccaggtcagagcatgagcagcagatggggcttgagagccaagaatgaaaatcccaggatgtggccaaactctgtaaatcattattgactgagctccatgccatcttaatggcttttactacctcttggttccaattcaaagtgcatattaaagcaagcagcactgcaaagaccagaggggctagaatagtaaactacccatagtttagtaatcattatgcattaattattcagaagctggatctcctctttgcaaacattaaaaccagtgacggcaaagaaatatgcccctc

SEQ ID NO: 123706 - DNA, 598 bp, Homo sapiens
ttctctttaaaggcctcccagttagcttgcaagccccttctacattcctaagggtgaattacccttataattattatcagtattgaatatttactaagtacccatactgggtgagatcatgaagttgtttgacacgtatatatggcagaaatattccaagtgtatttagccactgttaatgttcttccagagctgaaaatagcagggacgagtgtacttgacctgatcttttgcatgttgactcctttaactaagtctaaacagagcagaaaccttgccatcggagaagcgtttgcaaaagggagaccaggtcagagcatgagcagcagatggggcttgagagccaagaatgaaaatcccaggatgtggccaaactctgtaaatcattattgactgagctccatgccrtcttaatggcttttactacctcttggttccaattcaaagtgcatattaaagcaagcagcactgcaaagaccagaggggctagaatagtaaactacccatagtttagtaatcattatgcattaattattcagaagctggatctcctctttgcaaacattaaaaccagtgacggcaaagaaatatgcccctc

SEQ ID NO: 123707 - DNA, 575 bp, Homo sapiens
gcctcaagtccagattttcaatacatatggtgaggcatgctgaaagactgatgtcaagtatgaggcaagctgacagattctaagaattatgggtggatttatttctcaatacaaaattatcactatattatgggtatataatatatccattttaggatgttctcagtttttttcttttaggagtttacttatacatttattatgctatttatagttatatgtttataaggtatatatggtatttataaaatcacttatgttctgggatgtttacattaacaaagatctgcgagcaggattttctcagtaaagaggacttgatttacaaaactgaattctagaattttctgacagtaaatccaattgcaaatggctttatctgatatctatctcaaaggagacatcattcatcaaggaagctgatggcatgctggataaattctctaattcaacccgaaggagtcagctgtcttttctaagtctgacacatgagcaaggagcaaatcaaagtagaaaaggaattcattttaacatccagaattyatcacagtatttaaacaaataagaatttactt

SEQ ID NO: 123708 - DNA, 608 bp, Homo sapiens
cagctagaaaaagccacaagggattaaagatcaaaggaacatttttctttctctgagttgtgaatagctttgggtgagtaataaattgaaaagatttaagggcaaacaaggcccaaaaagaaaaattaaaaatatgttaaagaacaacaaaactcagagagatgaataaaagaatatcctgsggataatcatgctgatatgcagcttgaggagctagaccacaaaatgcacataagggccaattcctagggacccccccccccgccaaaaaaagttatctctagctccagctgctgaccagatactatgctgggtggcctgcagcatcctcaaatttaagaggttcaaaatttaactctagtacttcttctatctagttgtctaaatcaggaattatacttaacctttttcatgatctctgctaccattactttaatgcagctctccattacttcatgaataaaagaatgaacaaaagaatagctaaagaataatacttgaaagcccattttttggcaggtggttaattttattttttaatcaacaaataatacttgtacatatttatggggtacataatgatgttttgatacaaacaatgcatagtg

SEQ ID NO: 123709 - DNA, 630 bp, Homo sapiens
ctgtgtaggctaaggctaatgtgtctgtatcttagttttgtttgtttgtttgtttgtttgtttgagacagagtctcagtcgcccaggctggagtgcagcagcacaatctcacctcattgcaacctccgcctcccaggttcaagcaattctcccacctcagcttcctagtagctgggattacaggcactcaccaccatgcccagctaattttttgaatttttagtagagacgggatttcaccatattggccatgctggtcttgaacccccgacctcaaatgattcgcccgcctcagcctcccaaagtgctgggattacaggcgtgagtatcttagtttttaacaaaaaagtktgaaaaggaaagaaaaaatttaaagttttaaaaatagaaaaaagtttataaaataatgttataaataatgagaatatttttgtatagctatacaatgtgttttaagctaagtgctattacaaaaagagtcaaaaaggtttttttaatttaaaagtttgggggttttttgttttgtttttgtttttgtttttgtttttttgagatgacgtttctttcttgcctcccagactggagtgcagtggcgtggtgatcccagttcactgcaacgtccgcctcccc

SEQ ID NO: 123710 - DNA, 499 bp, Homo sapiens
cagccctcacatctggccacacgcattgtgtagagcacaatttcaggaggcactttttgcatattctatgacactacartacaatcagcagaatcattaccttacatttgaaaaaaaatattacatccatactctttcgaacttgtttcttttcctaggtatctaacgccaatattcacaaattatttctacaatcattttttcattctattgtaccctccaaatctcttcagatttcttcctttttgatattcttttctcactatcccttgtggcctactcattgcctttccactggtagcttgtttcacatagctctatatctttcccttcctccagactgaggatcgtctcatattcccttactcttttctccttgatcaatgtcatcaaagtaattcctcactccacctaacttaaatttacagattaattcatttatgtaagatagctcttgtcttaagtgcagaagcagaaacacaaagcaagtcacataaga

SEQ ID NO: 123711 - DNA, 597 bp, Homo sapiens
tgaataaatcattgtaatgttcccctgaagtgaattgaaaattaatttacacaaccaagatgatccttctaataacagggtacatggaatggggaaattggaaatcattacccagcaaacattatctgcattatttttgtagctgctttagattgcattgtaatagaaaattaggagaccggctgtgragaagtttaagagggtcccctgaagagcttctgctttaaaattgattctttaagaaagcattaaaaagctattggaattgattgcctgctaatataaaggaaaaactctttgccaccatttgagttaaaaaagagcatcttcattcatgcatgttattaaaactactggcctgaaagcccctgtagaaagataaaggatatagatgggatattaaaacggcaatctttaccttatctgggatttagacttaatatgttgcttttattaatttagcaagaaccattagttaggatgtcaaagagtgactatacaattaaaatgctatagaatggtgagatctttaataaacagtagaccaggaattcctcattaatcttccaagcataagccacatccttacaaaaaata

SEQ ID NO: 123712 - DNA, 597 bp, Homo sapiens
tgaataaatcattgtaatgttcccctgaagtgaattgaaaattaatttacacaaccaagatgatccttctaataacagggtacatggaatggggaaattggaaatcattacccagcaaacattatctgcattatttttgtagctgctttagattgcattgtaatagaaaattaggagaccggctgtgaagaagtttaagagggtcccctgaagagcttctgctttaaaattgattctttaagaaagcattaaaaagctattggaattgattgcstgctaatataaaggaaaaactctttgccaccatttgagttaaaaaagagcatcttcattcatgcatgttattaaaactactggcctgaaagcccctgtagaaagataaaggatatagatgggatattaaaacggcaatctttaccttatctgggatttagacttaatatgttgcttttattaatttagcaagaaccattagttaggatgtcaaagagtgactatacaattaaaatgctatagaatggtgagatctttaataaacagtagaccaggaattcctcattaatcttccaagcataagccacatccttacaaaaaata

SEQ ID NO: 123713 - DNA, 583 bp, Homo sapiens
ctattgtgaatggtgctgcgatgaatatagaggtgttaatgtctcttcaagattttgatttcaattcttttggataaatacccagaagtggcattrctggatcatataattccttgggattttttttaatgtaaatagtcatattatctgcaaatagagaaacatttttacatcttgttttccattctttgtcttttatttcctttctttgccttattgcaatgactaagattttcagtacaatgttgaacagatgtggtaaaagcagacatctttcattttttttctcaatctcagagaaaaaacaattcagtgttttatttactctaggtttctgcagattccttttataagtttgagaagttccctactgtttctagtttgtttttatcacacatgaatgtataattttgtcaaatgctttctctgtatctattaataatatgtttattctattaatatggtgaattgcattgctttttaaaaatatttcttatagtaaaatgtgcataacataagatttaccattttaagtgcttaagtgtaattaagttagtggcattaagtacattcccattgttat

SEQ ID NO: 123714 - DNA, 583 bp, Homo sapiens
ctattgtgaatggtgctgcgatgaatatagaggtgttaatgtctcttcaagattttgatttcaattcttttggataaatacccagaagtggcattactggatcatataattccttgggatttttttwaatgtaaatagtcatattatctgcaaatagagaaacatttttacatcttgttttccattctttgtcttttatttcctttctttgccttattgcaatgactaagattttcagtacaatgttgaacagatgtggtaaaagcagacatctttcattttttttctcaatctcagagaaaaaacaattcagtgttttatttactctaggtttctgcagattccttttataagtttgagaagttccctactgtttctagtttgtttttatcacacatgaatgtataattttgtcaaatgctttctctgtatctattaataatatgtttattctattaatatggtgaattgcattgctttttaaaaatatttcttatagtaaaatgtgcataacataagatttaccattttaagtgcttaagtgtaattaagttagtggcattaagtacattcccattgttat

SEQ ID NO: 123715 - DNA, 591 bp, Homo sapiens
aataatccctcaaaactcttcattttcaaaattttatatggratattacattattcctctaacttgttttttgtctatgtaaaaactataaattctcgacttcttttttttttttttttttttttgagacaggatttcactctgttgcccaagctagagcacagtggcacaatctcggctcactgcaacctctgcctcccaggttcaagcagttctcatgcctcagcctcccaagcagctgggattacaggcatgccccaccacacccggctaatttttgtatttttagtagagatggggtttcaccatgttggccaggctggtctcaaactcccgacctcaggtgatccacctgccttggcctcccaaattgctggggatacaggcgtgagccactgtgctcggctgacttcattttttaatttttattttttgttggattcttttatgcttttcaatgacctaacttcatatttttaataagccagtcatcttcctaaatttctccattgcttctaaatagtttttagttgattaagtttggttttccatatcatataatcatatcatcagcaaaaagccgaaaaaaaa

SEQ ID NO: 123716 - DNA, 615 bp, Homo sapiens
taaaaaaaaaaaagaggataacgaagtggacttaaaagtacaaggagataatgtatagatttgattatttcctctgctactttaggaaaaccaaaacccagagtttggacagagctggcaaacacggtcctggagctggctttctgtgagcaatattaccatgtgatctaaatttgcccaggtttggccgagctctcgcagtgtgctcatgacaatgctagagacgtcttctttcttgttctgaatcaaagcaagtccattctgctcaattttctctacttctttttcttttgctttaatcaaatcttccagatcctgaaagatttaaaaaatagtcactttaaattgttctattatggaactctggggtgcactgaaattgggccattatagtttcatgtcctaaaaaccttttactaatccaaaaagcttatctctttcagaagaggcacgcygcagaagtacttcttcctacactcaaatgcaaaaaaaaagtcatctttttacacatggcaaattagcataactttaaaaaagtaaaatttgatattctaccagataaggaaatggtactatgtaattttctcaagaggctgtgaggaaagaaatacatgt

SEQ ID NO: 123717 - DNA, 580 bp, Homo sapiens
cattcataggccaatcctgaacatggcacccatcaacagyttctgcgacaggttatggtcttaaaaaaatattcaaaagatttaagagatctaacaagcaaatgtagcatatgcatattgtttgcatccttattttgaataagttaacatataaaagaaattttaaagacaaccgaggaaataggattatgcgttgaacataaaataatattagaaattattaaacttttggtggtgataataatatggatgcattaagaaaatgtctatttttcaaagatatatattgtatgtaagaataaagtgacatgatgtctggtatttactatgatatctattttagaaaaagaaataatttaggcaattttttttttcttggaaacagggtctcactctgtcacccaggctgaagtgccatggtgtaaacatggcttactgcagcctcgatctcctgaattcaagcaatcctcccacctcagcctcctgagtagctgggactacagggacaagcaccaccacgtctggctgatttttgtagctttttgtagagagagggtttcaccatgttgcccaggctgca

SEQ ID NO: 123718 - DNA, 580 bp, Homo sapiens
cattcataggccaatcctgaacatggcacccatcaacagcttctgcgacaggttatggtcttaaaaaaatattcaaaagatttaagagatctaacaagcaaatgtagcatatgsatattgtttgcatccttattttgaataagttaacatataaaagaaattttaaagacaaccgaggaaataggattatgcgttgaacataaaataatattagaaattattaaacttttggtggtgataataatatggatgcattaagaaaatgtctatttttcaaagatatatattgtatgtaagaataaagtgacatgatgtctggtatttactatgatatctattttagaaaaagaaataatttaggcaattttttttttcttggaaacagggtctcactctgtcacccaggctgaagtgccatggtgtaaacatggcttactgcagcctcgatctcctgaattcaagcaatcctcccacctcagcctcctgagtagctgggactacagggacaagcaccaccacgtctggctgatttttgtagctttttgtagagagagggtttcaccatgttgcccaggctgca

SEQ ID NO: 123719 - DNA, 580 bp, Homo sapiens
cattcataggccaatcctgaacatggcacccatcaacagcttctgcgacaggttatggtcttaaaaaaatattcaaaagatttaagagatctaacaagcaaatgtagcatatgcatattgtttgcatccttattttgaataagttaacatataaaagaaattttaaagacaaccgaggaaataggattatgcgttgaacataaaataatattagaaattattaaacttttggtggtgataataatatggatgcatwaagaaaatgtctatttttcaaagatatatattgtatgtaagaataaagtgacatgatgtctggtatttactatgatatctattttagaaaaagaaataatttaggcaattttttttttcttggaaacagggtctcactctgtcacccaggctgaagtgccatggtgtaaacatggcttactgcagcctcgatctcctgaattcaagcaatcctcccacctcagcctcctgagtagctgggactacagggacaagcaccaccacgtctggctgatttttgtagctttttgtagagagagggtttcaccatgttgcccaggctgca

SEQ ID NO: 123720 - DNA, 360 bp, Homo sapiens
ctcaaaaaacaaagaaacaaacaaacaaacaaaaaacccaaacaaacaagcagtagaactagcaatgaggaagtgaaagagaaggcactgggaagccagtatgaggtcatttatttgggaaaaaaggagaaacatgaagaaagaaacaccctgtggtggctatacttgtctgagatgagtgcattttartgaaaaaaaatcttagatactcatcttaaattctgctgaggaatcagtcaataattacatcttataccagaaagaaatgtttgaaacagcttcttaggattactaagacaaagctgccctgtgtggtctctgggacaaaataatacttcagtgttatctgaaggcaatgag

SEQ ID NO: 123721 - DNA, 551 bp, Homo sapiens
tttaaagtatgttacaagctgttcaagtggttaaattaraataattagtattttgtgcaaataattttaccacaaatataagcctcaagagagagaagtgagagagttcaggaaattaaaatttattgtgaactaactgtgtatgggtaccacactaggtggtttacatacctaatttcacatttgtaataatcctataatgataaaaaaaataactgttgggtactaggcttagcacctgggtgacaaaataatccgtacaacaaacccccgtgggacaagttttacctgtaacaaacctgcacatgtattcctgaacctaaaataaaagttaaaaaaaatcttatgatctaagtgatggtgttatcttacagatgaaaaaaagttaaatttcagggaggttaaatagctgccttagatcacaaagataaattataaggctgggtcttgaacacatagctcatgctttttcccccatatcagacacgtgaagtaacataaaatggttagccatttataacctttatctgactggaaaatgacagtcatga

SEQ ID NO: 123722 - DNA, 584 bp, Homo sapiens
ctgtaattagaatcaggtagcaagtggtatgggaaaacactgaaggaaaataaactgcccagctgggtcaagggtgaggatcacaaaaaaaaagctttaacagttcaaatggcacttgccttagaaagccttcccagctttcccaagaaattagctgctctttcgtctctgatctcatggaactttgttttgccactgtaaagaatttagcacagtgttctatgttagatattcaactgaacttctcaagatcatagtccttcattgaaattctcagtgtttagtccatagtatgtgttcaataaatgtttgttggatggatggatgcatggacccatggatgcatggatggatgggcaggagggtggatgtatggagtctgattattaatgttttaacttaacactttctgtgacaaggaactcattgaacaattttctgtgaagtctatagacatgaattaatgagattctctcactattggaagtaccctctgaaagcagaaaaagtaactatcttggatgttgtctgattctttgaagccactaacgtatyattcagacatttagcactctaaaatatat

SEQ ID NO: 123723 - DNA, 605 bp, Homo sapiens
aggttgcggtgagccgaaattgcgccactgcactccagcctgggcaagggagtgagactctgtctcaacgacaaaaaaaaaaagaccacaatgagatacctaccatgtcacacccaaaggatggctataatcaaaaggacaataaaaatatcagtgaagggcaggcacagtggcttgtgtctgtaatcccagctcttagcaaggcagaagcaggagsatcacttgagcccaggaatttaagaccagcatgggtaacagagcaagactgtctctaaaaaaaattaaaaacaaaagccttaaaaaggaaagaaattctgacacatactacaacacgcatgaaccttgaggacataatgctaagttaaataaaccagtcacagaaggacaaatagtgtatgattctacttatacgcgacacttagagtagtcaaaatcatagagacaggctgggcgcaatggcacatacctataatcccagcactctgggaggccgaggcaggcacaacacttgaggccaggagttcaagaccagcctggtcaacctggtgaaaccccgtctctaccaaaaatacaaaaattagccaggcgtagtggggcatgcctgt

SEQ ID NO: 123724 - DNA, 551 bp, Homo sapiens
agtctgaatgattatgatgggttggcactctcataattgtgttattcccttctttttatagatgacagattggataaaatattgttttaacaaaaacttcctccatccctcccaaacttaaatgtgggtactctgcagacttctattcttggtttctttctcttctctgctcatyttccatgggtggcctcatccactgacatcatcaacaattccaatatgtgtatgtgtatctctagtctacatctctgtcctaaattccaaactatatactaacttcctgtacacctggatccacaaacatctcaaacttaacatgtacaacactgtcctcagtatcttcccttcctgagtcctgtcttcctccaatgttccctagatctcagtgaatggtaccaacatctacccacttgcataagccaaaacactgagaatcatctctcaatcctcttcctccatatgtcccttctaagcagttatcaattcatattaattgtacctgattaaagtctttccaatccacggatgtctctttccattcccactggagt

SEQ ID NO: 123725 - DNA, 551 bp, Homo sapiens
agtctgaatgattatgatgggttggcactctcataattgtgttattcccttctttttatagatgacagattggataaaatattgttttaacaaaaacttcctccatccctcccaaacttaaatgtgggtactctgcagacttctattcttggtttctttctcttctctgctcattttccatgggtggcctcatccactgacatcatcaacaattccaatatgtgtatgtgtatctctagtctacatctctgtcctaaattccaaactatatactaacttcctgtacacctggatccacaaacatctcaaacttaacatgtacaacactgtcctcagtrtcttcccttcctgagtcctgtcttcctccaatgttccctagatctcagtgaatggtaccaacatctacccacttgcataagccaaaacactgagaatcatctctcaatcctcttcctccatatgtcccttctaagcagttatcaattcatattaattgtacctgattaaagtctttccaatccacggatgtctctttccattcccactggagt

SEQ ID NO: 123726 - DNA, 596 bp, Homo sapiens
ccttaggaagggggtgacatttggaacccaacttgagggaaggttggactttggacatgtgtagaagggaggaagtctayactggaccagatcatggaggtgtgggatgccaggctaaggtgttcaggcatgacctagaggattgaatacagtgctgtcttcctccaaagtgtgaggctcaaatgagatattaattgacattttgtgagcactcactgtgtcagacactggtctaagctttttatatatagatccctcatctaatcaacccagcagtcaagtaaggtaggtgctactggctttggtgccagattgtggccttacttcctgcctatgggaaaggggcatctcttagcacctctgcccccatgcaaaggtggcggaagatatgggggaagggggagaatgaagcttctgcatccttttgctcacactctatcctttgtctttctgccttagagccttggggagcagtcccttttctaggagcctcttgaaggactcaccgtagatgcaggaagacattggatgaggtcagcatagctgaagtgaggtgtctgggttagacaatggctatggccctggaattgcaagcc

SEQ ID NO: 123727 - DNA, 540 bp, Homo sapiens
actggcaattttaacgttacgttaagttcatcagttttcacattatattataaaatgattattcagctttaaaatgataaaggatttgagaccatggagtattcattcatttctttttaaatacacttcaagggcaactaacatgtatcatccgcctgctctatgcaaaacactgtgctaggcacattacttagaggagattcttttgaccactactctgcatatattttcttaatttagagggaattttaatagcatgacagtaccatattctagcccatacatgactaaaagcagcamcttcagaatggagccggggagttagggatggggaatgcttctgctccattcctaatgttttcttcaatatggagatggaaaaatctgcaggcatcatggcaccccatcaggcacctctacctaagaagcaatttcccagattggtgagactgacatggtctgggcaaactaggcacattctccttcctgtccagagcaaaccactgggaacacgcattcctctttgcttctctttgcttt

SEQ ID NO: 123728 - DNA, 630 bp, Homo sapiens
atttactgattaaatcacatagatgtatggtagaggaaaagaatacaactttggccaatgtaagtatacaagacaatatctcagttctttttaaaattaaaagaacatttaagtattaaagatattttaagagaaatgaagtggcagataaacatgataaacactgcataattatgtacaaaatgaaaaccttttaaattttgaagacaaactaaaatttactggtttgaatttaaaacattattgtataatagtagatagttctctttagaaatttatctstagtttcctataaaaggtcatgctggttcactgttttttttggcagatttgggcctcacctcaataccaatttttatttgaataactgattcccaacatttcttgtaagcaggacttgatgctgaactaagtaacctaagctggattcagggccattggccggcaggcaggcaggcaagcaggcaggcattttttgtactacaggcagcccatggtggttgtcatctatacatcggatctctaaagacgtgccggaaaaaaatctgtggacacaatcttcccatgctgtattcacatgctcggttcacatctttagtttaccaggttgtcagaggcttgggtaagatg

SEQ ID NO: 123729 - DNA, 621 bp, Homo sapiens
gtggaactgaattctgccattgagctggacgtagatccgttcctagagcctccagaaaggagtgtaacctgccaacgccttaattttggcttcctgagattccaaccagagaactcactaagtcacactgtgcctagacttttgacctacagaaatcatgagacagtaaacttttgtgctgttttaactgctaaatttatagtaatttgttatgacagcagaaaatgagtacatctaggatggatggttctgtgcgagcttagtcttcctcacactggcggcatcccacttraataaataatgtgtccgtctctctttatacctgcctcaaaaccttctctgatgtcctgggagcctgcttggcaacaggagaccagaaatacaaggaagttaactcccctagggaaaatgcttgaccagtggaggagggggtcagtaggtaattgcttcagcctcacacctcctaactctgggaggcatttgtacacttctgaaaagacgtggcagaattaagtccccattatctatagcagcgacatcctcagtgcaccattggtttggcttttcttttgttcttgtctcattctgttcaattcctaactcttacttcctgagattacc

SEQ ID NO: 123730 - DNA, 604 bp, Homo sapiens
taaaactggatacatccttaagagaaaacaacgtgctgccttatttggcacggtatcttctcacttggtatgagygcattactcaattcccatttaagttctgtaacatgtctggattatctatattggctctttttccattaattcacagaaaagataccctagaatccatttatatcaagtgtatcacttacatcaactgtaagacattaaaaaaaattaaacaaatataaataatggtgtagattttgaggctaatgtaagataaaagtgttctgttttaataaaaatgtagcaaacaattctctaccaatgagaaattttatttttattcaaattatatataattatgaatgctggatgtcctaacattccaaaagatgaagaacacagaaaatgaagtaagaaggcttgggttcaagtccaaacaagtctcttaattcagccttctgtcagtagagaagtggagacaataatactgccagaattatgtaatgtataagatttctatgagactgaataaactaatttaaatgaaattatattctataaagcactaaataaatgtcatcatatcaatatgtcaacacgaaatttcagaaca

SEQ ID NO: 123731 - DNA, 611 bp, Homo sapiens
agtcttaaccttgaggatgttgcttcaagtcagaatgatcttggagattcccatgaagttcagagactgggacactgagtgggtttctcttcttgcaacatgagacatgatcagatggttccagcttcttggatccatgagaacaaggtgggcttgggggagacccattattaggagataatgagttatagggaatctctaaccagtcatgggactgcacctattaaaccataggttaaagttctgatgagaaacttcgaaaattaaaccagcctcattattaaatgagaccattcttggagggatttttcttttcaaacactcaragagatgaaggtctctccaaacctcacctccaccactgctttccgtctctgcgctctataaggttctgcagcatcttgctagtttagctcaggtaaagccagggggagagctgggagggaaggctggagtggcagtccctgacacgctctgggaaagcctgtgttcctcagtgacatagcttagaagtggggagaatccacctgcctgttcctgcagggactttttgcaactaacttgatcaggagatttgaaaggaagactggtgctaactgaacagggaggtg

SEQ ID NO: 123732 - DNA, 565 bp, Homo sapiens
atgagcattgagatcctgtgcctcttagtgcttggcacatagtagatattcaaactatgcttgttgaactatagaaaatctcacttctctgtgagatggagaaaggagcataagcaggtaatttaaggaggaaaaaaattacatccatggaatactaatgaagcttaagttcaagcttcagacaggtacatktttaaaagagagagcatatggtccttatttattaccagcctcttcaagtacctctgcaacttctttgttcttttttttctatttatttagagaaggtctcactctgttgtcctggctggagtgcaatggcatgatcatggctcactgcagtctcaatctcctaggctcaagcgatcctccccccgtgagcttcctgaatggctgggactacaggcacgcaccatcacacccagccgttcctttgtatttttagtagagatgaggtctcgctatgttggccaggctggtctcgaactcctgggctcaagtgatcctcccaccttggcctcccaaagtgttgggattagaggcaagagccactgtgcccagcctg

SEQ ID NO: 123733 - DNA, 565 bp, Homo sapiens
atgagcattgagatcctgtgcctcttagtgcttggcacatagtagatattcaaactatgcttgttgaactatagaaaatctcacttctctgtgagatggagaaaggagcataagcaggtaatttaaggaggaaaaaaattacatccatggaatactaatgaagcttaagttcaagcttcagacaggtacatttttaaaagagagagcatatggtccttatttattaccagcctcttcaagtacctctgcaacttctttgttcttttttttctatttatttagagaaggtctcactctgttgtcctggctggagtgcaatggcatgatcatggctcactgcagtctcaatctcctaggctcaagcgatcctccccccgtgagcttcctgaatggctgggactacaggcacgcaccatcacacccagccgttcctttgtatttttagtagagatgaggtctcgctatgttggccaggctggtctcgaactcctgggctcaagtgatcctcccaccttggcctccyaaagtgttgggattagaggcaagagccactgtgcccagcctg

SEQ ID NO: 123734 - DNA, 555 bp, Homo sapiens
tttattggctcctgcagatatgctgaaatacaaattctcacatgctggaaatgtctactaaatgtaccttgatatacaaattaaattctcctatagaaaactgtactgtactcaaaaacctatatacaaataaaaagactaaattctaaataacagttgatggttccgtgattatgaagaaattctagtcataaacaccagaatttaggttacaactttggagctcattaggkctttaataatgtaatttaccgaaaagattttgaaaatactttgttaatatttaaaagcatgatttccttatttaataataatttattctacagctaatttgaaaaagtgttagtcataaatgtgtttactttgtcttgttcttgaagatattgctgctaatgtaaaagaccagtgatttaaattcatgtatgtcttagttgcatgaaccattttactttatttttcttagattgtgcctataaacttctatatcttggtgagcttctctttttcctaaaaatgttacctaccatgtgtttttattccatattttcatcatat

SEQ ID NO: 123735 - DNA, 643 bp, Homo sapiens
ttaactctctggcctcagtttcctaatccggacaaatcagatatttgcctagagaatcttgcaactcctggtatctgtgattctatgaaaccaagttaagcaaactttataatatccattgttagctgattcccatgtcatataacagaaaattcatctcgatttccttgtgcctaatctaaatttggtgataattaaaaatccatctcctctcgatctgtcctttgcagaggtgtggaacagctagtttgtcacaatcttgcataatacttttctgttacgatgagaggagcaaaagcagtagggaaggatgagggaagctcttgaaggaaatgtctggtaaggaatgtggacatgctaaggcttcatctcatataaaatatttaagtaggagacttgacctcaacaagcaataggaaaaaaatccacaaagatttattttcctcgcctcgcccgatgaatgtttaaatgacatctagagagatgtaggtaatatataagtaataagtttktaactagtacatttacaaggcatgtggaaagaatattaggtttctccctttatctgtgaaaaatcagaaaatgtttttgcctatctggaaataaggatctggaccagactgccactgaggtttgggggtgg

SEQ ID NO: 123736 - DNA, 587 bp, Homo sapiens
cttcagcaatagactagaacaaccagaagagagactctcaacttgaagacrcatcttttgtaataatccacttagacaaaaataaaaggagtaaaggatgaacaaagtgttcatgatatatggacaccacatagtgatcaaatgtatgagttattagtatccctgaaggttgaggagagaatgaaggggttcggaaacttattaaacaaattaatagattaaaacttcctaagtctagcaagagatttagacatccagatacagaaagcctagtgacccccaatcacatgcaatgtaaaaaggtttctccaccccacattatagtgaaattgcctaaagtcagtgacacatagaaaatcctaaaaattgtaagagaaaagcgtttagtcacctataaaagagccccatcagactaagagcagctttctcagtagaaaccttacaggtcagcagagaatgggaggatatatttaatgtgctcaaagacaaaaaccctgccagccaagcataccttatctagcaaaatgattcttcatgaaggaaggataaataaagtcttttccagacaagcaaatgctgagagaatt

SEQ ID NO: 123737 - DNA, 426 bp, Homo sapiens
agaaatgtaagagacttcatcattagcacagctgtactacaaaaaaagttacaaggcttcttcaggatgaaggaaaagactgaaatggcaactaaaatctgtgagaaggaawaatgagcatgggaaatggtagatatgtgggtaaatacaaaataggccatatgcttccttttttatctacattccttaaaagcatttgactttaaaggaaaagttataatgttgtcatataaaaatagtaacatacatagatttaacatgaataacaataccactaaagagtaaatatctggtgtccttataagacaggaggacatgtaaagaaggggagaaggctatagaaagatagagaaaaagaacagtcaacctaatattctacattcagtactttaaaactgttgtgccatttcattctagcctgcctgt

SEQ ID NO: 123738 - DNA, 485 bp, Homo sapiens
atagacacctttcttcttattactttcaagcacaaccttagatacagtcaacagctggaggtatggtctctcttatctccttgcatataatctcattcatcctcaattcaaaacaagcgtatgtgtgtgtatgtatgtatgtgtgtatatataggtatgtgtgtgtatgtatattatatgtatatgtgtgtgtacatatatgcttatatttatatattattatatctgtatacagcgacactaaagttaattgcaaaaactgcattattatttgtaaataggtaatcttttttggagggcagtggggratagaaaaaagaagcatcttccaccagctttattgattgcatgcttctgagtttgcatactatctccccaattctctctcattctgacttacttttcagttatgagtctgctgtagtagtctactccccaaacgcaaggcaaggatatggaccatttccttgttgggctgcttttta

SEQ ID NO: 123739 - DNA, 598 bp, Homo sapiens
gggctctgcaacttggaatggggatgtatgggaggacctgatgaagctggggacactgagtttgtaaactctgatgaaacttttttgccagaaggaacagctttcccattcacagtaatgacaacatcccctccccaacccrtgctgccatcagcctttccaccttttctgaggagataaaccctgtgctgcctgaggcaacagtgatgacctgccctgaggcagttgccaagcaagataatgttgtttctccttaggagccacccccaacacccctgtttgcttctagacttataactagaataaagtcccagtgggtccctagaggtgaggttgagagtatgatccatgaggaagtgtgctacgctcaaagaaaattgtttgagttctctaatttatataaacagaaatctggagaacaggcatgggaatggatattaagggtatgggataatggtggaaagaacagaattggatcaggctgaatttaccgatttgggtccactaagaaagaactctgttattaattttgcagcttggggagtttaaaaaggttctaatagtttatttgcttggttagctgaaatatgaattaaaa

SEQ ID NO: 123740 - DNA, 598 bp, Homo sapiens
gggctctgcaacttggaatggggatgtatgggaggacctgatgaagctggggacactgagtttgtaaactctgatgaaacttttttgccagaaggaacagctttcccattcacagtaatgacaacatcccctccccaacccgtgctgccatcagcctttccaccttttctgaggagataaaccctgtgctgcctgaggcaacagtgatgacctgccctgaggcagttgccaagcaagataatgttgtttctccttaggagccacccccaacacccctgtttgcttctagacttataactagaataaagtcccagtgggtccctagaggtgaggttgagagtatgatccatgaggaagtgtgctacrctcaaagaaaattgtttgagttctctaatttatataaacagaaatctggagaacaggcatgggaatggatattaagggtatgggataatggtggaaagaacagaattggatcaggctgaatttaccgatttgggtccactaagaaagaactctgttattaattttgcagcttggggagtttaaaaaggttctaatagtttatttgcttggttagctgaaatatgaattaaaa

SEQ ID NO: 123741 - DNA, 538 bp, Homo sapiens
atgtgaattttggttgtaagttcataacttacccaagggtatagactcataactcttttaaaacagtgcttagtacaatatcctgccatctctgtaaaaacgctaattgataaccgagtcatttacatgttttcgaacacagaatagctcttttctcagcatcattattgctctttcagcatctgttaggacagtctgaatactttctgtttcaaggcactgataaaaccgcaacaaaaacatgtaagaaataaaatagaaatgctttatatattttagtttaaatttatgtatcacctcattgtgacttattttttccattataccattagtcagatttgaataaygaggttttgaaaggataaaaccttttctccaatgacaggattatataattgctattggcaatgtagcctggtgcttcatgagacctatgctaaatgttactggagagttcttgaagccagggataccatatcaggaactattcaggatctatgatattttctgaggtaactgggtaatagaatatcaaatt

SEQ ID NO: 123742 - DNA, 592 bp, Homo sapiens
gacttcttgggtttttttctagctttgaaattctagattatcacttagagcaagagatcttgttcctgaaaccattctgattgggttgtgtattctgccacacagagcaacggctgctaatgcatacagtycagaattgcctggtttgctcattagcaccctgatgatcatgagtccaaggctgccttccttcccctaccagaagctgattaggaagctttcataatctggagatggatgggatgtcccagagacatcttgtccaaaggattctttcatcccttgtcttgaaggcttgttgtgctgcaggcaccttgctcagtgtctgccctgggagggtagtccccttcctctcacaggacctctcacctggtagaggtcatgaagtgctcttggcaagtatttttgattgtttgaggcaagactcaggtggtgttaaatgaaactggcccagggacattccctaatggctcagtgctcagccacttcacttttgggccacagatcagccttttctggctgccccttggaactgctgattccctcaggctgctacttcaggtcttagggctagcccttctttcagggagtc

SEQ ID NO: 123743 - DNA, 592 bp, Homo sapiens
gacttcttgggtttttttctagctttgaaattctagattatcacttagagcaagagatcttgttcctgaaaccattctgattgggttgtgtattctgccacacagagcaacggctgctaatgcatacagtccagaattgcctggtttgctcattagcaccctgakgatcatgagtccaaggctgccttccttcccctaccagaagctgattaggaagctttcataatctggagatggatgggatgtcccagagacatcttgtccaaaggattctttcatcccttgtcttgaaggcttgttgtgctgcaggcaccttgctcagtgtctgccctgggagggtagtccccttcctctcacaggacctctcacctggtagaggtcatgaagtgctcttggcaagtatttttgattgtttgaggcaagactcaggtggtgttaaatgaaactggcccagggacattccctaatggctcagtgctcagccacttcacttttgggccacagatcagccttttctggctgccccttggaactgctgattccctcaggctgctacttcaggtcttagggctagcccttctttcagggagtc

SEQ ID NO: 123744 - DNA, 592 bp, Homo sapiens
gacttcttgggtttttttctagctttgaaattctagattatcacttagagcaagagatcttgttcctgaaaccattctgattgggttgtgtattctgccacacagagcaacggctgctaatgcatacagtccagaattgcctggtttgctcattagcaccctgatgatcatgagtccaaggctgccttccttcccctaccagaagctgattaggaagctttcataatctggagatggatgggwtgtcccagagacatcttgtccaaaggattctttcatcccttgtcttgaaggcttgttgtgctgcaggcaccttgctcagtgtctgccctgggagggtagtccccttcctctcacaggacctctcacctggtagaggtcatgaagtgctcttggcaagtatttttgattgtttgaggcaagactcaggtggtgttaaatgaaactggcccagggacattccctaatggctcagtgctcagccacttcacttttgggccacagatcagccttttctggctgccccttggaactgctgattccctcaggctgctacttcaggtcttagggctagcccttctttcagggagtc

SEQ ID NO: 123745 - DNA, 535 bp, Homo sapiens
ggaatggcccttctcagtagctcttttcaattcctctccatcccaggttacctctacggcattgaaattctcagtgacagagaagttctgggctcttcatccctgttttggggcagggaatctctcttttggccttgggctgtccctagtaaggaaggagctctaacaaggcttttgtgtgtgtgtcagaagacggcccgcccggcrggagcacagcagctctgttgtgggcccaagaggaagctctgtaagaacagtctaaggggaggaacaggggttggtggacgtgctgctaagtcacattaggggattccagtaaacacaggaaaagaatgtggtggttccccttcttgcacaacagcctagaatgcactttccatacagtgcatcctcaggaaggattaagaaataaggaattaaggacatggttttaggccctcatttctttgcttcttagagctcttctttcctcccttatcttggggtttttcaaggtattcaaagtccaaggttgaagctgggatttaggaaggtc

SEQ ID NO: 123746 - DNA, 632 bp, Homo sapiens
tccattcacacagccacaggctcttccttagctaccatgcagcagaagcagaaatcagaacgtgtagactgtggattcactcacagaaaggcttaaaatcccgttaaaggatttattgaaacatcaaccttcactttaaaacaatgaaattttattcaattgggactctgggaatgtccagaacccatggctcctcagtgctaatgtgctgaacgctgggtgcctcccagttctgcactgtgggatggacaaatgaatgaatgagtgaataagtggatgaagagcctgtcctcctagcccaagacaggcgtccagcagtctgggtgaggagaggattaggggtaaatgaatcttttgagcacaagatgactgctcctttgctggggatggggctgggaggccaatccaggtagtgggtggatgggatgatctcctggatccctttgtgggaatttttcctgaagatgcccgaagatttaagattggagtcaaacaaggagagcagacacagaattgattaaagcagcgggggatgggayggtcctgccctgtgcgcattgctttaaaaggcctaacaaaggcatcaaatgcttttttctttatgtatgaagagaaaagagggaaatgtataa

SEQ ID NO: 123747 - DNA, 539 bp, Homo sapiens
ggctagtgggagaaattgagagaaagatttggggaatgagatgtgcataggggctggcacgtgcccaggaagcacctgagaaggccacatctctgatctttggctgacctggaggttctgtgcrggcaggaagtggagctgcagtggtgacatcagctgcccgcctgagtgcggcaggggcaggagtgcaccacacacacaaagccctcagcactggggagagactcgccggctcaaggcattgatgcaaacctctgtccaacctcacctaactgagcagagactcaagcctcaacatagagtcccaccgtgtcctctggccccctccaatcctctcgtccctcccatcctcctgctgttataggagataagaaagaaatcatttaggtagatagggtaaaaatagtccacggcaaaaaattttccttctaacaaaaaacagctcagaaattgctctctttctaaccccaagcagttcaaagaaatcacttctcttctaacaagagcagtctagaagatcaataaaacacaagtaagca

SEQ ID NO: 123748 - DNA, 531 bp, Homo sapiens
gtcacagcagcttcctcacagcattgtgggacaaaagctcttccaggatgagttgaggggggcaggagctgaggaggcatcccctaagatttggggcctggacgagggttgtcactcctgtgtttccatttcagaaccaccctctctgaccccaggcacaacccaacccaaagccatggccagcaccctcagtccctggagcctcctcatcatcctctgctttatcctccctggcatctgaggagagttctttagagtgacaggtaatgtgggcaatattgggaggggagcaagargcagatgggtgaggtgggaggatgcagaaggagaattcccagagtcccacccatccccatggctgggaccttctcatcctgacatgagacagatgaatgagacctagtgtcacctactggcaatgacctgggtagctcagccctgagttctgatggattctcactgtcagaaccagagggaaagggaggggcccataccaaggctcaaggcctgttgagcttgagagagtttagc

SEQ ID NO: 123749 - DNA, 492 bp, Homo sapiens
cataatcctaatcttgtggcctttcattagttttacaaaggctgcttagttttgggaaagactattatcatccttcctttaaggttaaaccataaactaaattcctcccaaagttagcttggcctatacccaggagtgaccaaggactgcttggaggttagaagcaagatggactcaactatgtcagatttcccttactgtcatcattttgcaaaggtggttacaaaaatcccacttaaacgtctctgcatgtcactgaacacattaaatatagaatccacaggacattttctcattcgttcccccttccttccagtgtcatcccccccacccccatacataggagaagagcagcaaggatgtacaaaaggggcagccttgctcagggacctttatgttcattatcaatgtcaatgaaagctaaatcacrggcactggtttgaagaaggaaacattttggccctctgcatcagcagggaagagaagaaaaga

SEQ ID NO: 123750 - DNA, 639 bp, Homo sapiens
tgtgtaattggactcttctcatttacataaacgaaggatgaggcaaaagacctaagatcagcctaagaggagagatacrtttctcattcttttatgttaaaaaatatatattgtggaagaaaccaagaaggcagaccctacttcatcccccacccctcaccagacctgaaatattaatacttcatggccaaggagtaagcaggtttgcagagctttgagggttgccctacatctggtgcatcacagtcattatcacaggcacatgtttttgttttattttctctaagtaaaaagcttagaccaaagtgactgacagtaggacagcatatcctactttctcctctcatttttgactgggttaaaaaccaagaagaaagactgctctgtcttttaaagagcacaacactctgcttgggcttgagttgtctggctggtatcctccattcagttggtttcagcacctgattaattagttaattagtacttagagctgaccagccctggtcggcaattttcatgccctgcatggtgaaatgttgaatcccacattgaaatttctgtgtcgcacaccctaattattatcaccccactactttttaaaccattgcgccaaattattattatagacagagccggaca

SEQ ID NO: 123751 - DNA, 561 bp, Homo sapiens
tgtaaagacacatgtatgcacgtttatctcagcactaytcacaatagcaaagacatggaatcaacctagatgctcatcaatggtggactggataaagaaaatgtggtgcatatacataatagaacaccacacagccataaaaaataatatattatgtaatatttaatatgtataacttgctttttataattataataaataatacgtagataaaatgaaatgaaataaacagaaactatgttagacctctctaaatttttttttattttaaataaccaaggcaaaaatgtggagcaggaagtccatgcttttaattattttattagttgttagtcattggcaaaattctttaatcactctaggtttcatcactaaagtagaattgataaaccctactcaagtcagatgattgttttacaaataaaatcagctaatatgtattaaaatgcttcatattgttttacaaaaacacaaattataatgtattcatttatcaatttttgaaataaatattaaactcccattatgtcccatgtgcagcaccattatcatcatcaccat

SEQ ID NO: 123752 - DNA, 586 bp, Homo sapiens
aattgtgttgtggaaagtatccacaaatgcagtatccattttcattattgcttactgggactattttgaaaatataatgttttaactgggcttccaatccccagtctttcttctattatatcatttctggattcacatgacactgattaaatacacacacatacacacacacaagattatagtgctctgtggttaggaaactgtgacagttccatgatacttccatgttaaattttcctgcaaattttactaaaattcgggttcccaagacctayctacaaatatttaaattcttagttatcagatggtgcctaggaatcagcattttaagaaacaaagtctttctgatgttcgacagtctaatcacattaactttcttaccatctctgtaaagagcacctacctttactctccatggccattgtatgtcctgtatctagaatatttggaatcactctcacacaaaagctcaagtcaaaaatttcttctactccactgtctggaatgaataactctaactcctcaatcttccctggcatctcgtttgtaccccaaatagtcttctcttttatattagggtaagtta

SEQ ID NO: 123753 - DNA, 586 bp, Homo sapiens
aattgtgttgtggaaagtatccacaaatgcagtatccattttcattattgcttactgggactattttgaaaatataatgttttaactgggcttccaatccccagtctttcttctattatatcatttctggattcacatgacactgattaaatacacacacatacacacacacaagattatagtgctctgtggttaggaaactgtgacagttccatgatacttccatgttaaattttcctgcaaattttactaaaattcgggttcccaagacctacctacaaatatttaaattcttagttatcagatggtgcctaggaatcagcattttaagaaacaaagtctttctgatgttcgacagtctaatcacattaactttcttaccatctctgtaaagagcacctacctttactctccatggccattgtatgtcctgyatctagaatatttggaatcactctcacacaaaagctcaagtcaaaaatttcttctactccactgtctggaatgaataactctaactcctcaatcttccctggcatctcgtttgtaccccaaatagtcttctcttttatattagggtaagtta

SEQ ID NO: 123754 - DNA, 508 bp, Homo sapiens
tcagggtgaccatcttgcccagagaccacgcattgaaactcctagaaggaggttggattaaagatgatggggcacatctgggggcaaatttaagccttgctggtttgatactgggtgctaagcagagtggttaacgtctgtgttttatcacatgtattttgctctggccagaatgaaaaaataaataaatttttcctttatgatgtgktttggctcccagggtgatgatgctgcaagcgaaatcactagggccgctcagggaaagggaacccagaagcctggcatgctggcaaaaacataagaatttcttacatcagatttctggattctctctctctgtgcaaatggttgaatgaatggaaaaaaagaatcagtgtttatctcctctttaaagttttgattaatgcaaaaaaaattctaatgctagtcttaacctggtgtactttgtgctatgagttcatttttctgtgttgagggatactttaggataaaacaagggcttagaaca

SEQ ID NO: 123755 - DNA, 508 bp, Homo sapiens
tcagggtgaccatcttgcccagagaccacgcattgaaactcctagaaggaggttggattaaagatgatggggcacatctgggggcaaatttaagccttgctggtttgatactgggtgctaagcagagtggttaacgtctgtgttttatcacatgtattttgctctggccagaatgaaaaaataaataaatttttcctttatgatgtgtyttggctcccagggtgatgatgctgcaagcgaaatcactagggccgctcagggaaagggaacccagaagcctggcatgctggcaaaaacataagaatttcttacatcagatttctggattctctctctctgtgcaaatggttgaatgaatggaaaaaaagaatcagtgtttatctcctctttaaagttttgattaatgcaaaaaaaattctaatgctagtcttaacctggtgtactttgtgctatgagttcatttttctgtgttgagggatactttaggataaaacaagggcttagaaca

SEQ ID NO: 123756 - DNA, 464 bp, Homo sapiens
tacttcaggattaaatatgcagagttggagctccctcgggttctcagaaatgtgttggttaaaaaaaacagtgccatcagatagacaactttattaaagaaaaggtaaaattctaaatgatttctcctttcagagtatattgaaatataaatttattcatgactgtgctgtagatatttaagtaagttcatcagcctacaattcttaacatttaagttgaatcttttactgatgtcagatgtactttattacttaaaagaggcaacaacaatcatctcatgcattgttcttggctaccttctgctcttctgaaaactggcaattatacaggacacacaagtgtagctccagatgcataagcacaaatcaccagattatgaaagttacagcactagtagatggatmgctgcatggagcagcattgttgagtatatttacttactgtgaaggtcacaataggtatc

SEQ ID NO: 123757 - DNA, 606 bp, Homo sapiens
tgagtaaggaagaaagagtctttggaaatgaagacaaagggagaagggtggcaaatgaatgagtgtctttggatgagattaataacattttaaagtcatcgttttatggaaaatggaaaaacaatggacagaaggctgtgattttactgctttgtcagcattgaccagtcttattctcttctctcctttcctcttatgggcttaaatcatctgtggtggtagtttcygggttgttctttctctttctgtatgctttttcttttctgattttttaaagggattttgttagatttgtctccatacattttgcttccttggtgatgtgtcataaagagcattggtcagaatggccaagtcgtcattctggagtgagggcaggattagtgtgtttaaaaagtagtcaaatagccagtttgctcttctttaatgcacctcatagacacacatatttttgttccatggactgggcaatgtaatcttatgacagtgccaacctttcattgagtggcttccacctttagggacaaagttgaacattgtcaagatgtactgaaataaagtgggattttaggacataaggcataagataggttggttgcttgacta

SEQ ID NO: 123758 - DNA, 693 bp, Homo sapiens
gcagtgatagcagacaagcttgcatttattccattttactctaaatctcctatctaccatgtagtcttggtttcaaaggctgttctttgcatccgaaacaatttctcttgtttgcatagggttcttgtttcagatgcaagaaacarcagaattggtagtatatgtagacaataaggcttggaaagtaggcaggaacctatagtagatcaaaggtgggagataaatgtccagggtatcaccaacagcactgtctcctctgaatatgcactacaatagcaaagatacagaagatttgaacaacacatctaacaagtttgatttaaggagcacatatagaaccttgtacccaacagtgagagtatcacccattcatcataatgacacaagcaacattttcaaacctgcagtctgcctttcctaaggaagacagagaaggatagtacttgaagtcatttacaggccttttttgctttgtgaatataaacagggaataagcagatgtcaaaaagttccttgtactccaggaggatacatgatattagactatgatagttacaattataactttatatgtaatcattgcatattgcagttatatttttgtggaaaaatgaggccatgaacactagctcaatggttaatcagtttcaatgaccagtctgtggcgtaaacaaatccttacagaagcaagtc

SEQ ID NO: 123759 - DNA, 693 bp, Homo sapiens
gcagtgatagcagacaagcttgcatttattccattttactctaaatctcctatctaccatgtagtcttggtttcaaaggctgttctttgcatccgaaacaatttctcttgtttgcatagggttcttgtttcagatgcaagaaacaacagaattggtagtatatgtagacaataaggcttggaaagtaggcaggaacctatagtagatcaaaggtgggagataaatgtccagggtatcaccaacagcactgtctcctctgaatatgcactacaatagcaaagatacagaagatttgaacaacacatctaacaagtttgatttaaggagcacatatagaaccttgtacccaacagtgagagtatcacccattcatcataatgacacaagcaacattttcaaacctgcagtctgcctttcctaargaagacagagaaggatagtacttgaagtcatttacaggccttttttgctttgtgaatataaacagggaataagcagatgtcaaaaagttccttgtactccaggaggatacatgatattagactatgatagttacaattataactttatatgtaatcattgcatattgcagttatatttttgtggaaaaatgaggccatgaacactagctcaatggttaatcagtttcaatgaccagtctgtggcgtaaacaaatccttacagaagcaagtc

SEQ ID NO: 123760 - DNA, 531 bp, Homo sapiens
tttaaatatttgttggtacacttaatctgatggatataatcctgttgacatatctagttggacagatctgtatgtggtagattcatttgttagactttctgacaggcttatgtttgccagaagagatrtgaaaactttcagcatagataagaaaaagccatgtgaaaaccatacgtattgcaacagacagtgtgttgtctgagaggcaagaagataactttaccaggaaaaaaaaaatggccattttatgaaagctattagtccttaccaccctgctttctactataagaagcaatggaaagttccttttcaaatatgagagtagttatagccctggtctccaagagcttagagacttctgtagtagctctgatcagatgcaggtgtaaaggatatgtgccatgcttaatactaggcatagggtatggcacttaacttgcattttagaagcaatttgagtcagactcagaaagagtagttatctgacactggacaacaaaaagtaaggatgtgttttgcatttttcattta

SEQ ID NO: 123761 - DNA, 672 bp, Homo sapiens
ttgtcaggtatttctctcagcacttacgtaagttttttcgtttagtcctcttaataggcctatgaatgagggacaatcattactccattattatagatgaggaatttgaggctcagaatgcttcttctgcaaatagtcagtggtggagctaggactggaatccaggtctgcctaactccagaaccatcaaacttgccacctactaatttattttgaaggataggatttctgggatatatatgtwtatatagtctttcctgtgtgaatggtattattaagagtaataatgaaaattgtgataacaataatgataattatgaaaactgctcttaatttaggacttacgtgccaggaactgtaagtacattctaaatattatttattatgaaccgaatgtttgtgtcccatcaaaatttatatgttgaagtcctaatcctcaatatggatgtatttcaaggggggcctctagggaagtagtagttaaggttaaatgaggtcatggggtgaagccctgatctaataggattagtgtccctataagaaaatcagcaaagtgttcactccctcactctctgcacactgacaaagaggaggtcagaagaggacatggccaaaagtcaggactctgcaaccccaggggagtgccctcagcagacatcaaccctgccagca

SEQ ID NO: 123762 - DNA, 672 bp, Homo sapiens
ttgtcaggtatttctctcagcacttacgtaagttttttcgtttagtcctcttaataggcctatgaatgagggacaatcattactccattattatagatgaggaatttgaggctcagaatgcttcttctgcaaatagtcagtggtggagctaggactggaatccaggtctgcctaactccagaaccatcaaacttgccacctactaatttattttgaaggataggatttctgggatatatatgtatatatagtctttcctgtgtgaatggtattattaagagtaataatgaaaattgtgataacaataatgataattatgaaaactgctcttaatttaggacttaygtgccaggaactgtaagtacattctaaatattatttattatgaaccgaatgtttgtgtcccatcaaaatttatatgttgaagtcctaatcctcaatatggatgtatttcaaggggggcctctagggaagtagtagttaaggttaaatgaggtcatggggtgaagccctgatctaataggattagtgtccctataagaaaatcagcaaagtgttcactccctcactctctgcacactgacaaagaggaggtcagaagaggacatggccaaaagtcaggactctgcaaccccaggggagtgccctcagcagacatcaaccctgccagca

SEQ ID NO: 123763 - DNA, 479 bp, Homo sapiens
agactgtttatcctacaaagttaccataaccactgccatcattgcttggtatagatctgcagaaccgaaagaaaagaaaaatgggtagtaaatattcaatgaactagaacagagatcaatgccttaagtagaatctycacatcttcttttgtcatatatatcatagcctattttaatctacctgaactgttattttttaacagatgcattgagatattatttacataccaaacaattcatccatttagagtgcatcattcaatggtttttagtgtcttcacagagttattcaaccatcactactctctaattttagaacattctcataacctccaaaggaaacctacttattagtgggcagtctccatttccccacaaccaactcacctcctctcagctctaggaaaccagtaatctacctttttttttttcttttttgagacggagtctcactctgtcacccaggctggaggagtgca

SEQ ID NO: 123764 - DNA, 479 bp, Homo sapiens
agactgtttatcctacaaagttaccataaccactgccatcattgcttggtatagatctgcagaaccgaaagaaaagaaaaatgggtagtaaatattcaatgaactagaacagagatcaatgccttaagtagaatcttcacatcttcttttgtcatatatatcatagcctattttaatctacctgaactgttattttttaacagatgyattgagatattatttacataccaaacaattcatccatttagagtgcatcattcaatggtttttagtgtcttcacagagttattcaaccatcactactctctaattttagaacattctcataacctccaaaggaaacctacttattagtgggcagtctccatttccccacaaccaactcacctcctctcagctctaggaaaccagtaatctacctttttttttttcttttttgagacggagtctcactctgtcacccaggctggaggagtgca

SEQ ID NO: 123765 - DNA, 507 bp, Homo sapiens
ctttttatttatctggagtgcttatgttgaagtagaattgctgtgtcatatggcaactctatgttttaataaactgtgtattttacaaggagctttactattttacactgctaccagaagtatacaagggtttaaatttctttatatcctctttaaaacatattattgtctaactttttaaatataatcatccaaacaggtgtgaagtgatacctcagtatggcttttattttcattttgatgatggctagtggtgttgaatatctcttcatgtgcctttttccatctatctatactcttcagtaaactgtgtcttttgcccattttgtaactgattttttttttctattgagttttgggagccttttatgtattcaagatactagtatatctgaaacattgactttgtatcctacaaccrtgctgaacttgtttatttgttctagtttttatgtgtattccttaggattttctatatgcaaggtcatgtatttaacgagagatagt

SEQ ID NO: 123766 - DNA, 515 bp, Homo sapiens
atcagtttgaattttcatctcttctggtgcttacctccatcttgctaaataaattttaattttagacattaacctttttctcgctaaataaaaagtgagtcagatttcaccaccttgtttctcagtatactttttttcttcaaaatgctggtagttattttttgtcactcttttgattataattgttattttaaacagtactcttagtgtttcagttttcattaggagcaaaacagcaaagcatcacagcttttccacttcctcacttaaaaataataggcaasaacaatgggaatgaaaaaaaatctccacaatttacaccattagtgagaaggacctagggatttctggcaaattccctttaagatgtaaacgagcaggtagcaggggacattcaaacctagaattactgcaaatagctgtgatggtgtggtgggcatcatgggggaaattaggaagctgaaggaagacctagagaaagcagcacccagagaacatccccacccctagtggaa

SEQ ID NO: 123767 - DNA, 626 bp, Homo sapiens
aacaaatataattctctatcaacttgaaccaaagaggttgataaaatattgtcattttttctgtaatatttttcagtttttagcacgtaaaaactgttttaatacttattagtaaaaataaacatgtgttattttattgcatttactttatgatcactagatatgataataaccttattcctcaaggtctctctcagacattacataataaagactttaagttatttcataacgagatgaaaaaaaatctttttggctttatgaccacttttcagaatgtgggatgtctaggagttactacaaacacacatcaggatttttatatcctacctttcccaactgcagactttatgtgaaaatcctttaacatctcagtacaatgacttaaccatctgtgaaatgtgtgtagtaagaatacttggtgatttgaagcttaattaatgttataaacatcctttgaaatccatggataaaaaagktactaaaattgcaaaatctatgaaattataactagattatttttctttcaaatttatgaagcattattgatacagaagcatgatagaaaccaaagatcaaattttgaaggctggtcatattttccatctgtatataattgggagcaa

SEQ ID NO: 123768 - DNA, 542 bp, Homo sapiens
aatcaaacaccctagcagtgattgtgtgagtgaatctgaacactgccttgatcaatttggcttgagtttcttactacwgaatataacaaaatattaatttttattccttgaacaaaactgatggccagggcaggattctgctcatgtctgaggcaggagacagagcacaggacgtatcccttggagaaagggcacattctttcttgcattagatagctttctttctttaatgatgacattattgcagtttgcagatatactttaaggaatatacaaaaattagatatagcagcaaatatttcataagaatgagaaaaggaattatcatttaaaaaatgattaatactacaaacatcacacaacccagacacttgcgctagtgaaggactgtaaaacttaaactttaatatcttcatggaaagtcccctgttctttgtcattacagagctgcagagggaattacagtggttgttaccagaggctggactgggggcttggtagatggggaaagaaaggaaagatgttggtcaaaaggttcaaag

SEQ ID NO: 123769 - DNA, 542 bp, Homo sapiens
aatcaaacaccctagcagtgattgtgtgagtgaatctgaacactgccttgatcaatttggcttgagtttcttactactgaatataacaaaatattaatttttattccttgaacaaaactgatggccaggkcaggattctgctcatgtctgaggcaggagacagagcacaggacgtatcccttggagaaagggcacattctttcttgcattagatagctttctttctttaatgatgacattattgcagtttgcagatatactttaaggaatatacaaaaattagatatagcagcaaatatttcataagaatgagaaaaggaattatcatttaaaaaatgattaatactacaaacatcacacaacccagacacttgcgctagtgaaggactgtaaaacttaaactttaatatcttcatggaaagtcccctgttctttgtcattacagagctgcagagggaattacagtggttgttaccagaggctggactgggggcttggtagatggggaaagaaaggaaagatgttggtcaaaaggttcaaag

SEQ ID NO: 123770 - DNA, 542 bp, Homo sapiens
aatcaaacaccctagcagtgattgtgtgagtgaatctgaacactgccttgatcaatttggcttgagtttcttactactgaatataacaaaatattaatttttattccttgaacaaaactgatggccagggcaggattctgctcatgtctgaggcaggagacagagcacaggacgtatcccttggagaaagggcacattctttcttgcattagatagctttctttctttaatgatgacattattgcagtttgcagatatactttaaggaatatacaaaaattagatatagcagcaaatatttcataagaatgagaaaaggaattatcatttaaaaaatgattaatactacaaacatcacacaacccagacacttgcgctagtgaaggactgtaaaacttaaactttaatatcttcrtggaaagtcccctgttctttgtcattacagagctgcagagggaattacagtggttgttaccagaggctggactgggggcttggtagatggggaaagaaaggaaagatgttggtcaaaaggttcaaag

SEQ ID NO: 123771 - DNA, 608 bp, Homo sapiens
aatcatacatgaaatcttaacacaaaagcagatacaagccttctctagtataagggaggtgtagggctcagaatcctgcctggtcacctctttgctacactccccacaatggtttctatggctactttaatcaatccttaggtttttgaataacataggttgaaaactgctgatctacctcagccctatcatttgataaattaggacagyagaatgcaaaagatgaaggagcttacctaatgtcacaagaccagtgcgtgaagaactgaaatcagtatctagaggtcttaatcccccatcctcattggcaaccttttacttctcaacatgtctaaaacaaccccccagatgtttacaaatgattgtaacgaaaaatgtttggaaaaagtttcttagagcttgcaacactccacatttggaagctataccaggggaggcatccaacagaatgcttggaaggaaagcactggggtcaggtaaatcagtgtgtagaccctagctccactccttactggatggatgacttaaagtaacacactcaacctccaaattcctgattttcccatctgtagaagacactgcccatctcatagaggaggttatgagga

SEQ ID NO: 123772 - DNA, 548 bp, Homo sapiens
aaactccaaaaacacccccaaagaaatgctgccagtaagaaaaggttagcattaamcatctgccaaggctgcaaagcactgatgctagatcatcagaaaatactcatcaaggaagaatccttctaccttctcacttctccattgttggccaaactttatgccttgaagaagtcagaggtcaaggttagcaagatggaggaggcatggtaaaattgtaacttggggaaagaggaaaatctggaggaagagtgaagtttccactttaaataaaatatttgttgtaatatactgaactagacagattgattactgagcagagactatgtatggagaatagaggtgaaccccccaaattttcacctgaaaaaattatggtctttccttaactttcatccaaatgtcagaggaaacctgatccaagagttaagtctaaaaagtgggtgaaaagaagcaagtggtttttgcttttgtttctttctgatcttgccctatgaatcctgtttagccaaagggaagatttcatgaattaaaacaccttggtgcccaac

SEQ ID NO: 123773 - DNA, 315 bp, Homo sapiens
atcttcccccaaatttagctgaaaatggatcatagacctaaatgtaacacacaaaattataaaatttctagaatataggagaaaagctagataaccttgggcatggcaatgactttttaaatacaacaccgccaatggcatgatccatgaaaaaagtaattgataagctggacctcattcaaattaaaaacttctgtgtaatgcacagtcaagagaattagaagacaagccacagactggggaaaaacatctgtgaaagacatatctgataaagtactgttaycaaaatatacgaagaactcttaaagcaacaat

SEQ ID NO: 123774 - DNA, 506 bp, Homo sapiens
gaggaaaacaaatcctatgaggcctcctgtgaagggcctcacaggccacaacaaagaggctgaatcttatgtatcttgcatggtgctgtgggaaggttggaaggtggcccwagacatgggaggagcagttgtgagggtgcctgctaggaagatattgcaacattccagcaaggacgggagagatccgcgaggcttctcaggtggtaggcataacttgggcaccagttgatgaagacagtatcttaaagacaagagtctgttttgtctgagaggcctagaagatatcagaaagttagtgatgatggcatccgcccacaggcaaaaagtgtggggaaagcatctgaggaaagagatgagaatagaagagaaaatgacttaagtttgggatgttctgagtcaaggcacctgtatgattgatatggtttggttctgcatccccacacaaatctcatgtcaaattgtaattcctggtgttagaggagggacctggtaggaggtgattgaat

SEQ ID NO: 123775 - DNA, 549 bp, Homo sapiens
agaattcatggagcagtgactgtgcagtggcaagaatggcgccactgactgtcaactcgcagagacctcctggggcacctggtgttttaacccattacctcttcgttctgcagggttacggtmctggtccccaaaggagacataatttccccaagaaacaccataagagtcccatggaactctaagctgtggccaccacctggatgccagcaggcacagagacagtcaccatcctggcagaaagattgagcctggtcctcaggaggaggtcaagctgctgcgacacaactagggaggaaggagaagtgtccacatgggtgcctcatggtgctcccctggccaaccgtgagggtgaaaggaggggtgcaacggccttgcctaaaaagggcatggagaccgagggcttgaccctgggcggagacagtcacacaaccgggcaggccacaaggccagagttgtgctagctgaggacagggggacctgggatggatatgggtggaactgatggtggccctggtacaactgcagttctgggggttggagtgtgcc

SEQ ID NO: 123776 - DNA, 524 bp, Homo sapiens
tgccacttgttatttcttaggatagtttccgaacagccagatcttcaggcaaatcactgagctaaaaaataaacaatggacatttttcactggtattatactgaacatgttgcttttacaatttaattaaaatcacataccagtagcgtgcttgaaccyaatcaccatttttacagatctacactgaaaaaaattaacatttacatcttttatcagtttacttaagaaaaaaaaatcacattgtactaaatgaaaaaaaaaatcgagcctagacatttctctgctttccactgagaaaaatttctccaaaatgaaagattttatagaaagatttattttaaaagtgcaattattatgcataaaaggatgattatgttatctgggcccttcctaaacattgagccctttgataattaattttaacatgaaattaagctgcatatgtaaatttttaccaatggcaaaaagcacagactagatttaaaataatcaataatttgcaatatacattcattctttacaga

SEQ ID NO: 123777 - DNA, 500 bp, Homo sapiens
tgtctagattattcttggcacttttcccttctattttaaatttgagattcgtcttgtccaatttcagaaaaaattcttattgaaacttcaaaagaaattacattaaaactataagtcagttaagaacggacatctttatgacattaagtatttctttttatatayatggtatctgtttgagctttctccataaaagtcttttatagatgtatccttagtaccctattttttgtcattgttactttttttttatttctttacataaaactgaatttctgtttgttgctggtgtagagaaacacagttgacattgtgtattgattctgccagaaaacttgctaactatcttatatattctagtaattcttgtattagggttctctagagggacagaactaataagatagaaatatattcaacggggagtatattaaggatgctgactcacacgatcacaaggtgaagtcccacaacaggcgtctgcaagctgaggagcaagg

SEQ ID NO: 123778 - DNA, 455 bp, Homo sapiens
attttgtttgtcctgaccgccatccacaatgtatctcagaaactaacacctggggtggtttgacccaggccagttcctgtctaggcacattgcagggctcagaagctgccatgatactttttggatgaaagaatcatataaactgggaatactacatatttctccttgatattcaaatggcctcccaactttgggagggaagagcatacagaagaaacattaatgagagaataaaaggtttgtgcctgaatttaagtgttcagtggtctctggggaggtgggaacattctctctctrcttggcaaggccatattccctgaagagtggcattcccatggttcccactactgttcaggtacgtttctatgcccaataaagcgtagttgttgaaagtcgtgtgtgtcggccgggcgcagtggttcatgcctgtaatcttagcactctgggaggctgag

SEQ ID NO: 123779 - DNA, 551 bp, Homo sapiens
gattatttgttttctttcttgctgatttgtttgcattccttgtagattctgggtattagtcctttgtcagctgcataatctatgaatattttctcccactttgtgggttgtctgtttactctgctgattatttcttttgttgtgcagaagctttttrgcttaattatatcccttctatttattattgtttttgttgcatttgattttagcttcttagtcatgaattctttgcttaagccgatgtctgattttatcttttagagtttttctgattttatcttatagagtttttatgttttcaggtcttctatttaagtctttgatccgtcttgagttgatttttgtataaggtgagagatgaggatccaattttattcttctacatgtggcttgccagttatcttagcaccatttcttcaataggatgtcctttccctactttgtgattttgtatgctttgtcaaagatcagttggtagtaagtatttggctttatttctgggttctctattctgcgccattggtctacatgcctatttttatactgatacc

SEQ ID NO: 123780 - DNA, 551 bp, Homo sapiens
gattatttgttttctttcttgctgatttgtttgcattccttgtagattctgggtattagtcctttgtcagctgcataatctatgaatattttctcccactttgtgggttgtctgtttactctgctgattatttcttttgttgtgcagaagctttttggcttaattatatcccttctatttattattgtttttgttgcatttgattttagcttcttagtcatgaattctttgcttaagccgatgtctgattttatcttttagagtttttctgattttatcttatagagtttttatgttttcaggtcttctatttaagtctttgatccgtcttgagttgatttttgtataaggtgagagatgaggatccaattttattcttctacatgtggcttgccagttatcttagcaccatttcttcaataggatgtcctttccctactttrtgattttgtatgctttgtcaaagatcagttggtagtaagtatttggctttatttctgggttctctattctgcgccattggtctacatgcctatttttatactgatacc

SEQ ID NO: 123781 - DNA, 524 bp, Homo sapiens
gggagctgctgctcaccagtgggtcctgaaaaaggaaggaaaatgctactaaaagtcccaggagctaarggggttgggggcatggttttatctactctcaggagtctgaggatgaaaaggcttaggagcaacagcgagaggttttgagtccccatttcattcactgcttctctagccaaacgttgggtgccaaaaatgttgcagaacttttccttagttcagctaaaaacaaggttctttctcccacagccatgaaaattcaggcttgcagacaatttaaatggtgagtaagacagggttgtggtgggtgaaaaggaaggggcaaggaagaactcttggaaggtgagagtccctgctggagcatttccctcccacttttcaaatcccaggttccacacaggaagaggagaggcccgagtcctccccactgcaaagagtgcaaatttctgtggctccaccccagtgtgcaggctggttagagtatttctggggagccccctgccacctgcctctctcacatggat

SEQ ID NO: 123782 - DNA, 524 bp, Homo sapiens
gggagctgctgctcaccagtgggtcctgaaaaaggaaggaaaatgctactaaaagtcccaggagctaagggggttgggggcatggttttatctactctcaggagtctgaggatgaaaaggcttaggagcaacagcgagaggttttgagtccccatttcattcactgcttctctagccaaacgttgggtgccaaaaatgttgcagaacttttccttagttcagctaaaaacaaggttctttctcccacagccatgaaaattcargcttgcagacaatttaaatggtgagtaagacagggttgtggtgggtgaaaaggaaggggcaaggaagaactcttggaaggtgagagtccctgctggagcatttccctcccacttttcaaatcccaggttccacacaggaagaggagaggcccgagtcctccccactgcaaagagtgcaaatttctgtggctccaccccagtgtgcaggctggttagagtatttctggggagccccctgccacctgcctctctcacatggat

SEQ ID NO: 123783 - DNA, 575 bp, Homo sapiens
aaaactattgaccttggtatgttcctggggtttaaacacacaccactacctaaacagcagagcctccagagagcaggctgcattggatgaagaccttggataaggcagacagaaagggaagccaattgtatgttatggaaggaggcggtcagaaaaccccggcaaaaatacggttttattttattccttagaatttaagatactcactattatttaaaatcaggtcaagccagaaaatatcttttacatttttcagcgtaagcacaaaataacgttaactatacatttattagaatgtgtaaatgcttagatggaaattgtttcttttacaatgaaaaattatccaataatctgtttctttcacatggtataaatgyaaaagttcatttgaaacagattcttattcactgtggaacaaaatgagtacatgacaaaacataaaatcctgttgctcgaatttcatagactataatgtaaaacatacttagcatcgggtttctgactttttataaccactatcaacgcacagcaatataaatgatcatagtgaatttgaaacggtgatttcaaatctc

SEQ ID NO: 123784 - DNA, 492 bp, Homo sapiens
gaaaatagaagcacagaaagcactaaagaaagaggaagagagagaagagaagatagctgggccaggaagagataacacgaacgactggggacactttgataaacattgaaaaaagcagtgttaagccaggtttagtggctcatggctgtaatcccagcacgttgggaggccaaggtgggagggtcacttgagmccaggaattcaagaccagcttggggaacatagtgagaccccatctccacaaagaattcaaaaattagccagacattggggtgtatgcctataatcccagctactcaggaggctgaggtgggaggattgcttgagcctgggaggttgaggttgcagtgagcccatggttgtgtctctgcactccagcctgagcaacagagcaagacccggccaaaaaaaaaaaaaaaaaaaaaggaagaaaagaaaaaacaaaaaggcagctatagctgtggttctagatacaagcgcttataatttacc

SEQ ID NO: 123785 - DNA, 606 bp, Homo sapiens
ctacacaagacttttccttcagacgcttgtcatcatgacaaaacctctttttcattactactgatgtcaacatccccagtgcaattagaatttggggaaatcatatttytgttgtataattcagtcaggcaaatgctataactacagctattgctattagcccattgacttacagccctaaaacacccagcttaattatactcactcaaggaaaacacacagtagtggtaagtaaacatcactgaacctatggaaggccatatttacttcatctttcctttcaaagatgtttattttttaaacaatataagattgttaaactcaggatgtattcaaaatatcttaattttctcacttgcagggactttacaaataccccttacaatttcctaccccatagaaaaaaggatcataagtggtacatgggaaacatgtgtccatttcacttacagacctgccattcccattttaaagcaggacagatagacagctctctcatgggttgcatatcctcagcctgagtggcagtgtgctggcagaaaacacaatcgactgcttcccgctttgctacctctttgttcctttattggcagaaggtttttgtct

SEQ ID NO: 123786 - DNA, 606 bp, Homo sapiens
ctacacaagacttttccttcagacgcttgtcatcatgacaaaacctctttttcattactactgatgtcaacatccccagtgcaattagaatttggggaaatcatatttttgttgtataattcagtcaggcaaatgctataactacagctattgctattagccyattgacttacagccctaaaacacccagcttaattatactcactcaaggaaaacacacagtagtggtaagtaaacatcactgaacctatggaaggccatatttacttcatctttcctttcaaagatgtttattttttaaacaatataagattgttaaactcaggatgtattcaaaatatcttaattttctcacttgcagggactttacaaataccccttacaatttcctaccccatagaaaaaaggatcataagtggtacatgggaaacatgtgtccatttcacttacagacctgccattcccattttaaagcaggacagatagacagctctctcatgggttgcatatcctcagcctgagtggcagtgtgctggcagaaaacacaatcgactgcttcccgctttgctacctctttgttcctttattggcagaaggtttttgtct

SEQ ID NO: 123787 - DNA, 606 bp, Homo sapiens
ctacacaagacttttccttcagacgcttgtcatcatgacaaaacctctttttcattactactgatgtcaacatccccagtgcaattagaatttggggaaatcatatttttgttgtataattcagtcaggcaaatgctataactacagctattgctattagcccattgacttacagccctaaaacacccagcttaattrtactcactcaaggaaaacacacagtagtggtaagtaaacatcactgaacctatggaaggccatatttacttcatctttcctttcaaagatgtttattttttaaacaatataagattgttaaactcaggatgtattcaaaatatcttaattttctcacttgcagggactttacaaataccccttacaatttcctaccccatagaaaaaaggatcataagtggtacatgggaaacatgtgtccatttcacttacagacctgccattcccattttaaagcaggacagatagacagctctctcatgggttgcatatcctcagcctgagtggcagtgtgctggcagaaaacacaatcgactgcttcccgctttgctacctctttgttcctttattggcagaaggtttttgtct

SEQ ID NO: 123788 - DNA, 606 bp, Homo sapiens
ctacacaagacttttccttcagacgcttgtcatcatgacaaaacctctttttcattactactgatgtcaacatccccagtgcaattagaatttggggaaatcatatttttgttgtataattcagtcaggcaaatgctataactacagctattgctattagcccattgacttacagccctaaaacacccagcttaattatactcactcaaggaaaacacacagtagtggtaagtaaacatcactgaacctatggaaggccatatttacttcatctttcctttcaaagatgtttattttttaaacaatataagattgttaaactcaggatgtattcaaaatatcttaattttctcacttgcagggactttacaaataccccttacaatttcctaccccatagaaaaaaggatcataagtggtacatgggaaacatgtgtccatttcacttacagacctgccattcccattttaaagcaggacagatagacagctctctcatgggttgcatatcctcrgcctgagtggcagtgtgctggcagaaaacacaatcgactgcttcccgctttgctacctctttgttcctttattggcagaaggtttttgtct

SEQ ID NO: 123789 - DNA, 552 bp, Homo sapiens
atttaattaggctaagcaaaaagtcccttccccagcccacaacctaactgtgtaaatacatgaaatgttatgtatttacccacagctaactagataagcttgatataatccatcacggtgatgcagaagccaatatgctgcagtgatcttggcactaacgacattgcacgaagagtactgagctcctttcttatcctatattgacaaaataaaaaagcttccaaaagcaggaagactagaatgatgagtggcctacmaaaggaaacatgtttatgaaaggcttaaggaattgaggatgtttagatgaaacatgtttatgaaaggcttaaggaattgaggatgtttagatggcacagacacagaaagaactctaagctgcctttcaatacttgaagtatgctcatgatgaaacaggatgtgtggctccctatgacaggcgtgagccactgcgccctgcccaggtatttctttatagcaatgggagaacagactcatataccatgtatatgactcattgattgtcacatgtttaaggaaatctttccttcatta

SEQ ID NO: 123790 - DNA, 552 bp, Homo sapiens
atttaattaggctaagcaaaaagtcccttccccagcccacaacctaactgtgtaaatacatgaaatgttatgtatttacccacagctaactagataagcttgatataatccatcacggtgatgcagaagccaatatgctgcagtgatcttggcactaacgacattgcacgaagagtactgagctcctttcttatcctatattgacaaaataaaaaagcttccaaaagcaggaagactagaatgatgagtggcctacaaaargaaacatgtttatgaaaggcttaaggaattgaggatgtttagatgaaacatgtttatgaaaggcttaaggaattgaggatgtttagatggcacagacacagaaagaactctaagctgcctttcaatacttgaagtatgctcatgatgaaacaggatgtgtggctccctatgacaggcgtgagccactgcgccctgcccaggtatttctttatagcaatgggagaacagactcatataccatgtatatgactcattgattgtcacatgtttaaggaaatctttccttcatta

SEQ ID NO: 123791 - DNA, 514 bp, Homo sapiens
gtataaatgtgtaggctcccaacaccccacaaaatgctaacagacacacacacacacacacacacacacacacacacacacacacatctcagtggactcacagttgatgtgtctatgaaatgaatctttgcttgattattacagaaagcattttgattcactgaagtttctgagcatgcaggtgaccacatatttttatggccactataaccaatttatttrttaatggttgatacggtttggctgtggccccaccgaaatctcatcttgaattgtagctcccctaattcccacatgttgtggaagagacccagtgggagataactgaatcatgggggcagttcccccatacttttctcatggtagtgaataagtctcatgagatctgatggttttataaggggaaatccctttcatttggttctcattctctctttgcccgccaccgtgtaagacgtgccttttaccttccaccatgattgtgatgcctccccagccatgtggaactgtgagt

SEQ ID NO: 123792 - DNA, 514 bp, Homo sapiens
gtataaatgtgtaggctcccaacaccccacaaaatgctaacagacacacacacacacacacacacacacacacacacacacacacatctcagtggactcacagttgatgtgtctatgaaatgaatctttgcttgattattacagaaagcattttgattcactgaagtttctgagcatgcaggtgaccacatatttttatggccactataaccaatttatttattaatggttgatayggtttggctgtggccccaccgaaatctcatcttgaattgtagctcccctaattcccacatgttgtggaagagacccagtgggagataactgaatcatgggggcagttcccccatacttttctcatggtagtgaataagtctcatgagatctgatggttttataaggggaaatccctttcatttggttctcattctctctttgcccgccaccgtgtaagacgtgccttttaccttccaccatgattgtgatgcctccccagccatgtggaactgtgagt

SEQ ID NO: 123793 - DNA, 591 bp, Homo sapiens
aatccttgcacattgtacggaaccccaaacagtttcatgagagattcatgacagggtaataatcattagtctttcaagagtaagtgatcattatcaggaacctaaccaccaatgaggaagcatcatttcagctaatctgtgaccctgagccatgcttgtgtatgcatttccttgttgtcatttaaattctaaacatgggaaactgttatgaattttaatctaccacatgcaagcgcaaacaaaatcacattactttattttctataataaagaaacttatttttgactctaaagtcctgtctcaaygatggggagaaattcaattgcattcgagtgctaagaatgcttcctcttgccctggcatctcaccaaaaatgggaatggaccttgccctacaatgagcaagaggccgctggcatctgtctgtcatggttgctcattacccaatggctaaggtttccttagctaaggataactcttcatctatgtcactgttgatttttccaaggctgggagcctaggcctggagatccactgtctttgagtgcaccttataagcattcacgagcccgagatcctgagcagaaggga

SEQ ID NO: 123794 - DNA, 591 bp, Homo sapiens
aatccttgcacattgtacggaaccccaaacagtttcatgagagattcatgacagggtaataatcattagtctttcaagagtaagtgatcattatcaggaacctaaccaccaatgaggaagcatcatttcagctaatctgtgaccctgagccatgcttgtgtatgcatttccttgttgtcatttaaattctaaacatgggaaactgttatgaattttaatctaccacatgcaagcgcaaacaaaatcacattactttattttctataataaagaaacttatttttgactctaaagtcctgtctcaacgatggggagaaattcaattgcattcgagtgctaagaatgcttcctcttgccctggcatctcaccaaaaatgggaatggaccttgccctacaatgagcaagaggccgctggcatcygtctgtcatggttgctcattacccaatggctaaggtttccttagctaaggataactcttcatctatgtcactgttgatttttccaaggctgggagcctaggcctggagatccactgtctttgagtgcaccttataagcattcacgagcccgagatcctgagcagaaggga

SEQ ID NO: 123795 - DNA, 591 bp, Homo sapiens
aatccttgcacattgtacggaaccccaaacagtttcatgagagattcatgacagggtaataatcattagtctttcaagagtaagtgatcattatcaggaacctaaccaccaatgaggaagcatcatttcagctaatctgtgaccctgagccatgcttgtgtatgcatttccttgttgtcatttaaattctaaacatgggaaactgttatgaattttaatctaccacatgcaagcgcaaacaaaatcacattactttattttctataataaagaaacttatttttgactctaaagtcctgtctcaacgatggggagaaattcaattgcattcgagtgctaagaatgcttcctcttgccctggcatctcaccaaaaatgggaatggaccttgccctacaatgagcaagaggccgctggcatctgtctgtcatggttgctcattacccaatggctaaggtttccttagctraggataactcttcatctatgtcactgttgatttttccaaggctgggagcctaggcctggagatccactgtctttgagtgcaccttataagcattcacgagcccgagatcctgagcagaaggga

SEQ ID NO: 123796 - DNA, 562 bp, Homo sapiens
aggtctacaaaagacctcctggtgtattgtcttaccactgaaatggtggcacacacgtcccatgcctgtgttaggtaccagcataaatcaatgtcaactttaagaaaacaaaactaaagaagcatcttgccttctcatccccagcctattttcttaacagagacacctgcactacttccttaactagaaatgacctctgggatccaagctgcacagaagaaacaaaaatgatgtgtagtgaatggagggagagagactcaactggatccctgaaggatggtgcaatattggcaatagtttttatactgcacacccagagccctgcacagcttttctcagagattcctctgtgtcatacatgtgttccaggggaaggagtaggagggagggctgagtggagccccaggcccktcaccctcaaccaaccatcacagctccactctttctgagtaaatatgtgatcccattaaatttctatctgcagaaaggattccccagactaaaaacagtgaacatactgttatagggtaacaaattctatatttagaatcatgacagctgg

SEQ ID NO: 123797 - DNA, 507 bp, Homo sapiens
ggcaagtcaaatcagatgaaaaactggaacmatggaactagtatatgtgggcatttggaaaagtgacagtagggtgggtatcagctagtggtggcaggattaaatttagagtcacttaaatgtatagagtcagtgatgcctaaactttgccatacagtccacgtgttagcatctatgtcattaagagtttgtgttcaaacaaaaaaataaaacacagagagatactgctttgactagtttaagaagaaaaagagtttatttttaaaaaattagattcacagaatctccagtgaagccagagaacctagtttggagaaaactatgcaatagaatctatcatgaagattcaaaagtatcttcatagaagcaattctgatattcccaaagtagacatcataattacctctacaaagatagccttgcaaccaccacttttgtgaagcagcttttgcctatttgtcaattgttttatttttctttcttttcaaaatttatttgtaggaattc

SEQ ID NO: 123798 - DNA, 576 bp, Homo sapiens
ttctgtgcaacaaatatggtcactgcrcatgggtgcccacctgaggagggcaggggctgaaacccagcttcattctgcatgtcaaaccatgcacctgcaggactgtagaaacggctggtgccgttttctaattggcacagagctgctgtatggactagctggaggtctaacagcaaaggaagtattgatatattcccttccaaatcacaggctttacacaatacaactaggagaagaaagccaaactaaaattcaaatgtactaaatttttttcctatctctgggtgactttgggcaaatcattgaatctttcaacctcagatttattataagtaaaataaagtaacacctctcttaacctaccttaatgggtccaaaagctcatgttgacaaaacggttctctgactcactgtagggtcagaattactggctgtgactgcacataggagaatcatttctaatttttataacattttgcttcacagggaggctgagaagacaaaactccttatagctgcacagaaacaaaaggttgtggaaaaagaagctgagacagagaggaaaaaggcagttat

SEQ ID NO: 123799 - DNA, 512 bp, Homo sapiens
ggtttaatataaaaaaaatctccaaaacctgatctgaaggaattttgccttcgtgttttttttcttttgctatgtctgaacatattctttttcctttaaagtgactttagaaggaatacctaatraaggctactacaatgatgcttttttatgaattaaaatagttgtttcattgttttggatgactacactggttctctcggtatcttattctgttaggtgctctagcttttatctaactcaaaagaaaatagggagggggaatcttttctggattaccatatgcatttgtgtctttttctgtctttcccatatttcatcacacaattggaggaaaaataatttgtacagctcagtaatttgaattttagagcaagtgttctgaaacttcagacttaccaaagaggtatgaactgggtttaattgaatcttagttgcttaagtaggttgaggcgttaatgtttatctgattcttcatcatctgctcctgtttggactcgtaagcctcttct

SEQ ID NO: 123800 - DNA, 540 bp, Homo sapiens
aagcctttgtaactggtcataatacgctgctgggataggcttgacatggcaatgtcctagaataaaatatatggggatgctgaaactgtgttactgtattttgaggaaatggtcaaaaggcttatggaagtggaagtgttacaatatatttatgagagyctaagaacccccccacatgattctgttctccagaaggatccagaggacattaaagaatgcattatttattttcagatatgggaacagcagcataaaactataatccctacaagtgaattgcgccctacaactgatccagcttattgctagaagcagtttccaggttacagcacagggaagagtacccaaatagagcccaggagtctccttgaattgaacaaatagaaactaaactttagggaaattaagacaactaaaatgtgtaggacaaaatactgaagaggtaagagcttcacagagggagacctctggacttccacagagtgatccctttgagtctttggctgagtactgatcagtacctttttgtggtgacacctc

SEQ ID NO: 123801 - DNA, 540 bp, Homo sapiens
aagcctttgtaactggtcataatacgctgctgggataggcttgacatggcaatgtcctagaataaaatatatggggatgctgaaactgtgttactgtattttgaggaaatggtcaaaaggcttatggaagtggaagtgttacaatatatttatgagagcctaagaacccccccacatgattctgttctccagraggatccagaggacattaaagaatgcattatttattttcagatatgggaacagcagcataaaactataatccctacaagtgaattgcgccctacaactgatccagcttattgctagaagcagtttccaggttacagcacagggaagagtacccaaatagagcccaggagtctccttgaattgaacaaatagaaactaaactttagggaaattaagacaactaaaatgtgtaggacaaaatactgaagaggtaagagcttcacagagggagacctctggacttccacagagtgatccctttgagtctttggctgagtactgatcagtacctttttgtggtgacacctc

SEQ ID NO: 123802 - DNA, 540 bp, Homo sapiens
aagcctttgtaactggtcataatacgctgctgggataggcttgacatggcaatgtcctagaataaaatatatggggatgctgaaactgtgttactgtattttgaggaaatggtcaaaaggcttatggaagtggaagtgttacaatatatttatgagagcctaagaacccccccacatgattctgttctccagaaggatccagaggacattaaagaatgcattatttattttcagatatgggaacagcagcataaaactataatccctacaagtgaattgcgccctacaactgatccagcttattgctagaagcagtttccaggttacagcacagggaagagtacccaaatagagcccaggagtctccttgaattgaacawatagaaactaaactttagggaaattaagacaactaaaatgtgtaggacaaaatactgaagaggtaagagcttcacagagggagacctctggacttccacagagtgatccctttgagtctttggctgagtactgatcagtacctttttgtggtgacacctc

SEQ ID NO: 123803 - DNA, 540 bp, Homo sapiens
aagcctttgtaactggtcataatacgctgctgggataggcttgacatggcaatgtcctagaataaaatatatggggatgctgaaactgtgttactgtattttgaggaaatggtcaaaaggcttatggaagtggaagtgttacaatatatttatgagagcctaagaacccccccacatgattctgttctccagaaggatccagaggacattaaagaatgcattatttattttcagatatgggaacagcagcataaaactataatccctacaagtgaattgcgccctacaactgatccagcttattgctagaagcagtttccaggttacagcacagggaagagtacccaaatagagcccaggagtctccttgaattgaacaaatagaaactaaactttagggaaaytaagacaactaaaatgtgtaggacaaaatactgaagaggtaagagcttcacagagggagacctctggacttccacagagtgatccctttgagtctttggctgagtactgatcagtacctttttgtggtgacacctc

SEQ ID NO: 123804 - DNA, 586 bp, Homo sapiens
gcatgaacacagtccactacaaccttgaactcctggcctcaagtgatcctcctacctcagtctccagagtagctgacactacaggcatatttcatcgtgcctggccaaaaaaagagtttttgttcactttccctgtgtttgtagagaaacagtcccatttttgctaatatcatatgcaacatactaatataaggtaattattartaataggatgaatactacatcaaagaaacaccaataaaatctctactgcctgtatgtgtgtgcattattacatttattattctttattattttataattttttttctatgaagtgtttagcctagatatatttcattatggtaactctatcattcaaagaaaaataaataggaagcaatatcgtatcattgaaattcattataaaaaatgtttataatctccagtttgcacataagcatgggagtgttcaacataaaagaaaattacctttttacgaatgttaatttagttttacatttgatgtcaaagttagataattaaactggaaacatacgtataagaaaatattatgtttcctttgggtatatatatccagaagaag

SEQ ID NO: 123805 - DNA, 611 bp, Homo sapiens
ttttcatagtagaaaaatgttagtagctacaagctttagaaagtaacatcttttcaaaatgttgaaattacttttattctacaataatatctagttaacataaaatatttaattaattattggtgccacgctagtacagagtagctcatggtattctaggctaaaattgcaatgtaacttcaaaatggttacagtactgtttattagttttactacttaacacactaattgtgtcagataaagaacaaactgcttaagttgtgcagataaagaataaatcaaatttttcttcttactcaatgagaaagacttgggtagcatatgtataataattawcagtgtaattttaaaaaaaattgattatcctatagcaacacttgttaattggcatatttggtaacttcaggtttgagtaactctatgcaatttgtgatttcacaatgctctgcatgttaactgaaaccttgttgagcttagcaaagtgcagttaaaaatttggcaaagcaagagtgctgcagcaactttttgaccttttacctcatttcacggataccttcatccaggtaacaaatgtcagtgttggttctgcaagtaaactggttgctacattt

SEQ ID NO: 123806 - DNA, 555 bp, Homo sapiens
tggcactaagattttcatgagggatccactccagatccaatacctttcactaggccctgcctcaaatactggggattacatctgaacatgatattttgagaagacaaatatacaaaccatatcataacccaatatagtcaacagattattcttttgttggaataaaacatatccaatatgtgctcagtcacatttcttcatgagtgtttaagccatctggaaactgtcagaagcctaggaaacacatcaaaacatgctttttttttctccctyaagttgcatatttctaaaaagataacctaaatcattaaatggttttacatgtaaaagtctcacatgatgcaaagtgattttttttgttagtttgttttacaattattggctattgtctcatcccattcacgtaagatttatatagggtgatgtggttgtttccatttcgtggaacagaagagaaggcgacgtaaaggatgaaaatgagagataaccgtgtgatagaaaggacccttataaatctagggcagggtctttatgtcatcaaacgacacaagagcc

SEQ ID NO: 123807 - DNA, 555 bp, Homo sapiens
tggcactaagattttcatgagggatccactccagatccaatacctttcactaggccctgcctcaaatactggggattacatctgaacatgatattttgagaagacaaatatacaaaccatatcataacccaatatagtcaacagattattcttttgttggaataaaacatatccaatatgtgctcagtcacatttcttcatgagtgtttaagccatctggaaactgtcagaagcctaggaaacacatcaaaacatgctttttttttctcccttaagttgcatatttctaaaaagawaacctaaatcattaaatggttttacatgtaaaagtctcacatgatgcaaagtgattttttttgttagtttgttttacaattattggctattgtctcatcccattcacgtaagatttatatagggtgatgtggttgtttccatttcgtggaacagaagagaaggcgacgtaaaggatgaaaatgagagataaccgtgtgatagaaaggacccttataaatctagggcagggtctttatgtcatcaaacgacacaagagcc

SEQ ID NO: 123808 - DNA, 555 bp, Homo sapiens
tggcactaagattttcatgagggatccactccagatccaatacctttcactaggccctgcctcaaatactggggattacatctgaacatgatattttgagaagacaaatatacaaaccatatcataacccaatatagtcaacagattattcttttgttggaataaaacatatccaatatgtgctcagtcacatttcttcatgagtgtttaagccatctggaaactgtcagaagcctaggaaacacatcaaaacatgctttttttttctcccttaagttgcatatttctaaaaagataacctaaatcattaaatggttttacatgtaaaagtctcacatgatgcaaagtgattttttttgttagtttgttttacaattattggctattgtctcatcccattcacgtaagatttatatagggtgatgtggttgtttccatttcgtggaacagaagagaaggcgacgtaaaggatgaaaatgagarataaccgtgtgatagaaaggacccttataaatctagggcagggtctttatgtcatcaaacgacacaagagcc

SEQ ID NO: 123809 - DNA, 575 bp, Homo sapiens
atttgtctcatcattttgagtgatagcttcattctttgagaagatggagaaatggaacaagacagaaagggtattccaggtactagaaatagcatgggcaaagacgtggaggcacgaaagtatttggtgagttcaggaatgtagaacccttgtagtagcttcttggagttggaaatgtcagttgaagacagactttgaacttcacaggccaatataagaagtktatattttatctgctgagctttgaaggcacaatgaatattttaaaaggcaaatattataaataaatataagttttaggagctaaaaatgcagtgttaggattagtggttgaagtgtctgtgacatattcaataattatataattatggtaatctacctctataataattaaagaagtagatcctactgaatttatgatctactaaatgagagagataaaaaattagaataaaaggtgagagagggagtggccaagatggccaactagaaggagctagtgttcatgactctcatggagaagaatggaagagaaaagtaagcacaacaccttcaactgaaatatccaggtactc

SEQ ID NO: 123810 - DNA, 575 bp, Homo sapiens
atttgtctcatcattttgagtgatagcttcattctttgagaagatggagaaatggaacaagacagaaagggtattccaggtactagaaatagcatgggcaaagacgtggaggcacgaaagtatttggtgagttcaggaatgtagaacccttgtagtagcttcttggagttggaaatgtcagttgaagacagactttgaacttcacaggccaatataagaagtttatattttatctgctgagctttgaaggcacaatgaatattttaaaaggcaaatattataaataaatataarttttaggagctaaaaatgcagtgttaggattagtggttgaagtgtctgtgacatattcaataattatataattatggtaatctacctctataataattaaagaagtagatcctactgaatttatgatctactaaatgagagagataaaaaattagaataaaaggtgagagagggagtggccaagatggccaactagaaggagctagtgttcatgactctcatggagaagaatggaagagaaaagtaagcacaacaccttcaactgaaatatccaggtactc

SEQ ID NO: 123811 - DNA, 575 bp, Homo sapiens
atttgtctcatcattttgagtgatagcttcattctttgagaagatggagaaatggaacaagacagaaagggtattccaggtactagaaatagcatgggcaaagacgtggaggcacgaaagtatttggtgagttcaggaatgtagaacccttgtagtagcttcttggagttggaaatgtcagttgaagacagactttgaacttcacaggccaatataagaagtttatattttatctgctgagctttgaaggcacaatgaatattttaaaaggcaaatattataaataaatataagttttaggagctaaaaatgcagtgttaggattagtggttgaagtgtctgtgacatattcaataattatataattatggtaatctacctctataataattaaagaagtagatcctactgaatttatgatctactaaatgagagagataaaaaattagaataaaagrtgagagagggagtggccaagatggccaactagaaggagctagtgttcatgactctcatggagaagaatggaagagaaaagtaagcacaacaccttcaactgaaatatccaggtactc

SEQ ID NO: 123812 - DNA, 634 bp, Homo sapiens
tttatcaatgcttttccctgcaaagtaaaattccacttctaaacttttaaagatagaatgtgacagaacacttctctatctccatttctgttccttggcctccgaagccttattgttccatgggctctgacctttctttagttgcctggcatccaggcaagttctcagctgtcaaatttytatccaggtggcctccataaatatctcaacagaatttattttctttaattttctttggccttacttgagaatttgctgattggaagactgtttggggccagtatgctcaaagatggatagccacatctgcaagccatttggattaattattacacctgtgtcataaaacctgcattaataaagaggtgacaaggagactcatactgcagcttagacaggaccgtcactccttccaaattttccatccctatcactggcacgccaccatcttactctcctggcagaccacgttggagtattccaggtttcttcctctagcactcccatgactattgtgtatccttctaattcttcatctcaagtaccttttggagccatccttccctaccactttttagtcaatattctagtctgagccttctctaatcacatgacacctagaatattacaaaat

SEQ ID NO: 123813 - DNA, 558 bp, Homo sapiens
agaagtttctggcctttgtgttcttaatttttttttttttagcatgcatcattttcctcttatttggcattccaatgaaacaaatattaggtctttttaaaatcatcctacatgtctccaaggctatrtcgttttattttttcagtctttctttcctctctgatttccacattgaataatttttattgatttatctttaagttgactggcttttctgatatctctattctgctattcaacatattcagtaagcttttaaaaaaatgttggtaactgtattgatcagttctaaaactttcataacttattctttacatcttctatttctttgctgcaacattttattattccattggtttcaaaagtgtggtcaattgcttgctgaagctttttaataataactgctttgcagtatttgtcagataattgtagaatctttgtcatctaaatgttggcatctattgattatatttctcatgcaatttgagattttcctggttcatatgttgagtaattttggattttattcttgaaattttgagtagaatatcatgatac

SEQ ID NO: 123814 - DNA, 576 bp, Homo sapiens
atggtgataaactccttcagctttagttgcctgggagagtctttatttatccctcatttctgaaagatagctttgttgggtacagtattttcagttgagatttttttttttcttcagcactttaaatacattattccactccytcctggcctgtgagctttctcctgagaagtatactgttgggcatattggaactttcttacatgttattttcttctattctcttgctgatttcaggattctttgtctttgatttttaacagtttgattctaatacaccttggggtagtcttatttgaattgcttctaattggtgacttttgacctttttgtatctgtatctttccccaggtttgaaaagttttctgctattattttttaaaataagctttctatctctttgtgtttctttactccctctttaattctagtgaacaaaactttgccctttcagtgttgtcctatacattctgtatgctttcttcatttttttcttctatgactgtatattttcaattagagtctcttcaagctcactgatttttttcttcttcttgatcaattctgctgttgata

SEQ ID NO: 123815 - DNA, 576 bp, Homo sapiens
atggtgataaactccttcagctttagttgcctgggagagtctttatttatccctcatttctgaaagatagctttgttgggtacagtattttcagttgagatttttttttttcttcagcactttaaatacattattccactccttcctggcctgtgagctttctcctgagaagtatactgttgggcatattggaactttcttacatgttattttcttctattctcttgctgatttcaggattctttgtctttgatttttaacagtttgattctaatacaccttggggtagtcttatttgaattgcttctaattggtgacttttgacctttttgtatctgtatctttccccaggtttgaaaagttttctgctattattttttaaaataagctttctatctctttgtgtttctttactccctctttaaytctagtgaacaaaactttgccctttcagtgttgtcctatacattctgtatgctttcttcatttttttcttctatgactgtatattttcaattagagtctcttcaagctcactgatttttttcttcttcttgatcaattctgctgttgata

SEQ ID NO: 123816 - DNA, 544 bp, Homo sapiens
acttataagtgggagcagaacaataaaaacatatggacacagggagggaaacaacacactggggtctatttcggggttgtggggagggagagcatcaggataaatagctaatgcatgctgggcttaatacctaggtgatgrattgataagtgtggcaaaccaccatggcaaatgcttacctatgtaacaaaccttcatgtcctgcacatgtatcacagaacttaaaataaaatataatatactttttaaacttctgattaagaaaaaacataactaagacacaaggcatcaggatcctaagagaatcacagaaatagtagtatggcaatatcatctttggcaaaatttatgttccctgaaattaaggtctggtctgtcttgtcctcccgtaaattctgttttcttaaatacatggcccatgcttgtttaatgaaagctgagatatactgagaatgatttaggggaatgagaaaatggctttttggaggaggtgacatttaaagtaaactttgacaaagtataaggtcttgctttgatgaccagt

SEQ ID NO: 123817 - DNA, 566 bp, Homo sapiens
gcgctgataggctgcggaggccgccgccccgccccgtccctgataggataacgtggaagcacgagacgaggctgcgcccgccggtcgcagagctgtcagcaagctccaaaccgcggctgccgcccggagggaagcagacggggagtcggtggcggccgccgagtccgcatgcgcaggctgcaaaggcccttttkggccggtcccgccgcgctaggttggcgagtgggactatttgatcctttccaggttcgccagcgtggtgttacgagaggaaagcgcagccgcagcgtacgaatgggaaggccaaacacggtcccggggagtctgagggaagctgcagggcgcctggaattggggtctcgagtgagccggtaaaaaccgcctcccgctgagcgtcccggaacaaatactgtctgaactgagccgtaagcaagaaacggtcaggagaagctggggcgatctgatgattagaacatttcagggactaccagagagaagtgcgtaattgctctaaggcaggtaggtaattggcctggaaacttgggaacgccccgccccccaccccg

SEQ ID NO: 123818 - DNA, 555 bp, Homo sapiens
ttatcaccatctatcatacatttattgatttactttgtaaacatttgtctccatctcatgggatgtcactctccrtgaaagctgggacatggctgtttttaatgttctatcttgttaacaatacttcataatggtgttcagtgagtatttgttaaatgaatgaatacatccagctagggatttgctgagtgagttgtgagaaaggtgggaaaggctcataagtataaccataactaaaccaaataatatcgtgttgtgctctatgttttccaaggtgctttcaaagagggatggttagatggtcaataatctatgagaggggatttgggggagtttgatagttgagggcatcctgggtagttgtggtttagatagtggtacaaataagaaagtaagattaggatttctgagacagtcattcaatgttattgaaacaaatggagttgagagttggaagctgataacaggtttattgagaataaccatcataacagagcagaggagcgtagtagtctttctgctaaaaagagcatcatagtccagcattcccaacat

SEQ ID NO: 123819 - DNA, 555 bp, Homo sapiens
ttatcaccatctatcatacatttattgatttactttgtaaacatttgtctccatctcatgggatgtcactctccgtgaaagctgggacatggctgtttttaatgttctatcttgttaacaatacttcataatggtgttcagtragtatttgttaaatgaatgaatacatccagctagggatttgctgagtgagttgtgagaaaggtgggaaaggctcataagtataaccataactaaaccaaataatatcgtgttgtgctctatgttttccaaggtgctttcaaagagggatggttagatggtcaataatctatgagaggggatttgggggagtttgatagttgagggcatcctgggtagttgtggtttagatagtggtacaaataagaaagtaagattaggatttctgagacagtcattcaatgttattgaaacaaatggagttgagagttggaagctgataacaggtttattgagaataaccatcataacagagcagaggagcgtagtagtctttctgctaaaaagagcatcatagtccagcattcccaacat

SEQ ID NO: 123820 - DNA, 626 bp, Homo sapiens
gcagttcccacatgtcctgcaagtgtttcttgcctacactgtatcaggtgctgtctgactctcggggkttatagcagcacatacaaccgacaaaaatcctggcctttgtggaacttaaattctagtggggaagacaataaataaagtaaatacatgtgttatacttcagatgagaaaagtgaagtcactaaggcaggtgagattgagattttcattagggtagccaggccagtaaagggcacttttaaataaaaatctaaagtgagagagcaaattgtgaggagagctagttgaaacacattccaggaagagggaagaccaaagcaagctctctgaaacaggagccagcttgatacatttatgggacaatagagaaacaaatgagtctggaaacaagtgagtgagagaatagcagaagatgagttcagatggatgacaggtagccacatcatgtagggccttataagtcgagaacatacctgggcttttattctgaataaaactggaaggcattagaaagtattgaacacaggaaatatataatttgactttagcttgacaggagctctgcaactgctgtgttgggagtagatggaaatgtgcagaggcagaagcagggagaccaa

SEQ ID NO: 123821 - DNA, 618 bp, Homo sapiens
aggctgtgctcagcttatgctaccagcctggatatcatgcctccaagggtgagacaggcatggagcagcaaggggtatgtgagcaagcatgtgttccagccactgctgagacaagcctgctgctgctacagggtgggcagcaccaggtgccagcatgggcgctggctctccccaatgctgtggctgaaccaggcacaccacaagcaccttccccagctggcactgaggaatgcagtagcacctagaagctttgagacttcccaaaccacagggccccaaagagggagtcacagtcctggcttggggagctcccaggtctggggtccctgaagggctacagctcttctctcctttccttcacccaagatgtggccagcaaggagcatgattcagccctttttgtgttacagctcttttagccttgccatttagcaggtgctgagctcttgtcctacatccaggaagaatgaggtatgcatacaagcagaggatgagcaagatgaagaggagctttagtgagtgatagaacaactcatgggagacccacagtgggcccctcctttcyatacccaaggtgtcctgataagtgctcagctccttgcagaaaggagaccctgg

SEQ ID NO: 123822 - DNA, 531 bp, Homo sapiens
tctacaaaggaagaagctaggtgtcagaaggtttaagaaagtggcccagggttttacagttaaaaaacgkcagcctggactaagaggcaaagcacatctgcagttgtggtgagatggcgtgaattgggataagtacagatcatgaggattgaaagaactgcccagagtttagggcgttctgagtctcaaacactgtcatggccttaccatactgtcagacttccttaagtagctgtacattcctctcttgaaaactccagctgggaactgttttaggtggggcagccctgctaataacaaaattcttcatccactcaaagcaaccagcatggtgcatgtggcccagttctgcttctcagtctcagaatcacagaatctgctgattattcacctcaccttacatctcagaaacttgccagagccaagctgagctacctttatgtgtgattctgtcttggatcgtgccttacccagtactcctgacttcttgcactggatgttacacagtgatccagcttcctctgaccttca

SEQ ID NO: 123823 - DNA, 462 bp, Homo sapiens
cataaggttcagctctctattcctatcaccacaaaccaattccatctagctgcatgcagcggttcttaggagaaagaaaagccccctttatccagaaaaactctctttggatcctagtatctctcactgtcagaggcagcatcttctgaatgtagaagctattaaatgcaatggtactgtgtagtgtaagtgtaagtgaccccaggatatcaccagaagcaagctgcaaaataaggggaaggggctatgaagacatccagtgcctgacccaggrtctagccaggtacatatgggggtgggccaatttttttgttatttatttatttatttatttatttattttatttgtataaatttgtggggtacaactgcaattttgttacatgcatagattgcatagtggttaagtcggggcttttggagtatctgtcacctgaataatgcacattgcacccattaacc

SEQ ID NO: 123824 - DNA, 587 bp, Homo sapiens
gattttgggttgagttgcctatctgtctgaaagcattaggaacttcattgctgtggaaaatgaaatgctgacattctggcatacagcagcatcctgaattagctattgctgtcgtgacaaattaccataatcttagtggcttaaaacaacacaaggcattaattatttttttttaaattaaatttaaaaaatttttttgagatggagtctcacactgttgcccaggctggagtgtagtggtgtgatcttggctcactgcagcctctgccttctgggttcaagcaattctcctgcctcagcctcccaagtagctgggactacaggcacctgccaccatgcccatctaatttttatatttttagtagagaaagaattttcaccatgttagccaagctggtctcgaactactgacctcaastgatgcacccacctcagcctcttaaagtgctggggttacagatgtgagcctggcctaatttattatcttaaaatttgtagggtggaagtctgatagaggtctcactgggctaaagtcaaagtgtcagtaaggctgtgttcttttccagaggctccaaaggagaagctgg

SEQ ID NO: 123825 - DNA, 579 bp, Homo sapiens
taacacctttaaggaagaaaaaagctcaggttacagctttgcttgatttgctttgaatgaaattgcccagtttctcctgctttttttttttgttgttctgggctatctgatactgaaccatatagcctgaaattgagttttgtgctcaaatttgagagagagagcgagacacaagagcaagtatttgtaaaacttggggaaaacaagggcagcagcagttactttcgttatccctattgctgtaaccctggaattttgggttccttggtcagttgcagtatcatcagaacctggtaaagcagaacctaccaccaaccccagtagtcctaataatttaccctgggtctyacccacatcatcattctcctaaatgtaagaaggaactcaaagttcaagtcaactggccaggttggaatcctgattcccaaatacttagaaaaatctcttccctcttcaatatatcaagatgtgagtctttcaacatcttcctccaagagtttaagaaatcatctcactcactaggtttaaattgaatcccttgaaatgactaatatccactctcagtacctccagcaacag

SEQ ID NO: 123826 - DNA, 393 bp, Homo sapiens
gaattctacactgggcaagagattggatgatacaaytttcaaggtcttttctaatctaagatatttgattctaggagctgcactactcctaaaataatttagtgagaaggaaattaggatctaggtaaatcagatggtcattagtactagtctgctgataaatgtccactcacctctcctagtccaataacatctataagttggcaggatgttatcagactttctaaatcaattgcctattagagttcctttaatcattattttagatttttaaaatgcatattattccaaaatgagataccattttggctccaaagaaacatatttctggtaatttacatttggttccatgagtcaccttacacattagcattcaattcactattttttgta

SEQ ID NO: 123827 - DNA, 471 bp, Homo sapiens
tttgcatacatagttgtcatcatctgcactaatggaacttcttaagcatttcaatatgctgcaatcagaggtataaaatttgaatgtattctgtagtaatatttttaattctgaagtaaactgtgagtctacayattttctcacacaaattcgaggaagagtacctagaattcagcagggctgtgaaaaagcataccatagattattttttcagataattgagcattaaagtattctctggggtgtatagcaccaaaattgtttttccgtaataaaacaactttaaaaaacagtaaattagtaaacatatattataactaagtattttacaagcacaaattttaaaataaagaaatatttctaaaggtttgcctatgtttaaccattgccaaatgaaatgacatttctcactttctttttgcatggagagaaaggtagaatgagcaaaattggagctcaagaaaaatttgt

SEQ ID NO: 123828 - DNA, 575 bp, Homo sapiens
tataaataaatataattttattgctcaatgctttttgaagtgtgaaaggggccattgaggtcatatttaaatgcctataagagggttttacatctgcaatctccaaagagacattgataatgggaccataaaagaatacttgtgaagctagtccttagtgccactgactttttgcagtagttgtgagcatggttctatgaaggatttgatatatgttgttgcttaagtagaagggtccatgtttcacttggaattaattcagccctttctcttacagaggagcctctgcttctgttctgctctaatgacagcattctcattagaaagcccagaggggttctttaaaaatgtaaatgagatcacattactrggactaccctcaaaaccctccagacttcccatttattggacagaaaagtttaaaattcttacagtggcttgcaaagccttttgcctctgaccttatcttctattgctctgtgttccagagattttggcctctatgctattgattgtgtatactaaacatgctcccatctcaaggttgtcacatttgctgtttctactgcgcagaa

SEQ ID NO: 123829 - DNA, 542 bp, Homo sapiens
acacacacacacaatagttagcatagccaatcatatacaagaccctgcacagcatccatgctggcaagggtggtggcagttacctccagtattcaaaagcatcaaaaatacatagttattaggttattaaacagaaataccaaamtttatgataagcactgccgaggagtgggttatatttctagctctgaaatctaggatccatcacttacgtgttctgtgtgctggggaaagttgcttaacctcactagccttcagtttcttcatctctaaaatagagacatcaataatatacctatctgatagaactattattgtaataatatgaaataatgcatgtgtcttctattcaaatgtaacttgtttgtgaattaaattacactatgggtacatctgattatctgactggccctgaagaggaccatgtttggctgctcttgcgagtaaatcagtaactcaacagtggcagcagccaaatgagtgataatgaggtgaagtttcaacagcagaggttgcaatactttacgtgttgtatataactc

SEQ ID NO: 123830 - DNA, 542 bp, Homo sapiens
acacacacacacaatagttagcatagccaatcatatacaagaccctgcacagcatccatgctggcaagggtggtggcagttacctccagtattcaaaagcatcaaaaatacatagttattaggttattaaacagaaataccaaactttatgataagcactgccgaggagtgggttatatttctagctctgaaatctaggatccatcwcttacgtgttctgtgtgctggggaaagttgcttaacctcactagccttcagtttcttcatctctaaaatagagacatcaataatatacctatctgatagaactattattgtaataatatgaaataatgcatgtgtcttctattcaaatgtaacttgtttgtgaattaaattacactatgggtacatctgattatctgactggccctgaagaggaccatgtttggctgctcttgcgagtaaatcagtaactcaacagtggcagcagccaaatgagtgataatgaggtgaagtttcaacagcagaggttgcaatactttacgtgttgtatataactc

SEQ ID NO: 123831 - DNA, 542 bp, Homo sapiens
acacacacacacaatagttagcatagccaatcatatacaagaccctgcacagcatccatgctggcaagggtggtggcagttacctccagtattcaaaagcatcaaaaatacatagttattaggttattaaacagaaataccaaactttatgataagcactgccgaggagtgggttatatttctagctctgaaatctaggatccatcacttacgtgttctgtgtgctggggaaagttgcttaacctcactagccttcagtttcttcatctctaaaatagagacatcaataatatacctatctgatagaactattattgtaataatatgaaataatgcatgtgtcttctattcaaatgtaacttgtttgtgaattaaattacactatgggtacatctgattatctgactggccctgaagaggaccatgtttggctgctcttgcgagtaaatcagtaactcaacagtggcagyagccaaatgagtgataatgaggtgaagtttcaacagcagaggttgcaatactttacgtgttgtatataactc

SEQ ID NO: 123832 - DNA, 461 bp, Homo sapiens
ctgtttcttcatttactgagtgaccttcaactaagtcacttaacctccttaaacctagaatttcccattaataaaacagaggggatagttcttttcctacagggtaatgataaaaattatgtaaataatgtatgaaaacatcttgtgtatatctatttccttatgatagttataggctgatgtagaaagtcaaacccacgggcatcttgataatttgttagaaagccactccctaatgggacaatgtgcctagacaaaagagtttggaagtaaggtagagatgctaattagctgtcaactgattttgaactgatcaacataacaaagcttaaatagactctattgctattatcagtgcctgttaattcactcagagtatrtgagcaaactataaacctgcaaaggattacagaggatgcttagcgcagtgaagccctgtactgaatgaacaaataagcccc

SEQ ID NO: 123833 - DNA, 568 bp, Homo sapiens
ctgcttaatatagaaagccccttataagctttattaggcttatataatagcttatattaagctattayagatttatgaggaaagtcattgtcagctacaatttcatcttagagagctccagatccagctgagatcaagaagaccagagaatgtcaaaagaaacccttgagagaaaaagaaagaaaagaaatgaatcaatgagttcatttgtttgaatgcctgaaaaaataatattaaaaggtcttttacagatctaacatatttaataatgtttaaattgaattgaattaggccaataaaaagatggaaagttaacactgggatatgacaaagagttgtacaaaaaagcaaatgtaactacagcaccctatgtggcccaattgtgggcagtatttacatactcctgacaaatgaaccactgaatattaatttaagaaaaaatgaaatgtaattctattgataatgttgaaagagagataaagtagagtgagataactaaattctcatctaccaaaaaaggaagtcaatacatattatatggaaagaaaaaatacaaacatagcaatca

SEQ ID NO: 123834 - DNA, 568 bp, Homo sapiens
ctgcttaatatagaaagccccttataagctttattaggcttatataatagcttatattaagctattacagatttatgaggaaagtcattgtcagctacaatttcatcttagagagctccagatccagctgagatcaagaagaccagagaatgtcaaaagaaacccttgagagaaaaagaaagaaaagaaatgaatcaatgagttcatttgtttgaatgcctgaaaaaataatattaaaaggtcttttacagatctaacatatttaataatgtttaaattgaattgaattaggccaataaaaagatggaaagttaacactgggatatgacaaagagttgtacaaaaaagcaaatgtaactacagcaccctatgtggcccaattgtgggcagtatttacatactcctgacaaatgaaccactgaatattaatttaagaaaaawtgaaatgtaattctattgataatgttgaaagagagataaagtagagtgagataactaaattctcatctaccaaaaaaggaagtcaatacatattatatggaaagaaaaaatacaaacatagcaatca

SEQ ID NO: 123835 - DNA, 451 bp, Homo sapiens
gttcttttactatgttatatttatttatttatttatttatttatagacagagactagactctctgtcacccagtctagagtacagtggcatgatcgtagtttactgcagtcttgaattcctgggataaagtaatcctcccacttcagcctctggagtacacaccaccaagcctggctaatttttattttttttttaaagaaaggttctcgctatgttgcccaggatggtctcaaacttctagactcaagcaattctctcaccrcagcctcccaaagtgctgggtttacaagactgagccactgtatccagcctaccatttagttttaaatttaattgcctatcttgtttttaatgacttacaggatttctttatctattctaaataaaatcttttgttaaatgcatattttaataatcttcttctgtgtgtgggtttatggtccaaagaat

SEQ ID NO: 123836 - DNA, 598 bp, Homo sapiens
tcaacaaactagagagaaaattgaaagctttatggcacaaaatgttcaacatattaaatagcagaaaactgggcattgaatgtgtattgttttattttcaaaaagtttgccaaattctgaagctacaagtagcaaggtgctgaaaagctaagctgatattctctgtaaagtggtgtaaagttttctgcaatttatttttgctcaggasatgaaaaggaaagctgaggaccagccagtgaagggaactcagttatgataccaggctctcagttgtaaggtctagactcagtcacactgtagttgaaagtatgtagcctgggatcagtgtcaaagcagaagtctaccaagctttacaaaaagtgcaatgaagctcctattgaaatcagtctctctgttaagattaaagtgaacagtcctcattctctctgcttagcagaggaaattcgaaactatgtgtgcaggaaaatattaccacatggagtgtgtaacttcgtttataactaataccttgccttcatcaaaaacttcctcctaccaaaagacagaatcctataaccaaaaggaagattaacaaataaaataataacagagctgaggt

SEQ ID NO: 123837 - DNA, 598 bp, Homo sapiens
tcaacaaactagagagaaaattgaaagctttatggcacaaaatgttcaacatattaaatagcagaaaactgggcattgaatgtgtattgttttattttcaaaaagtttgccaaattctgaagctacaagtagcaaggtgctgaaaagctaagctgatattctctgtaaagtggtgtaaagttttctgcaatttatttttgctcaggagatgaaaaggaaagctgaggaccagccagtgaagggaactcagttatgataccaggctctcagttgtaaggtctagactcagtcacactgtagttgaaagtatgtascctgggatcagtgtcaaagcagaagtctaccaagctttacaaaaagtgcaatgaagctcctattgaaatcagtctctctgttaagattaaagtgaacagtcctcattctctctgcttagcagaggaaattcgaaactatgtgtgcaggaaaatattaccacatggagtgtgtaacttcgtttataactaataccttgccttcatcaaaaacttcctcctaccaaaagacagaatcctataaccaaaaggaagattaacaaataaaataataacagagctgaggt

SEQ ID NO: 123838 - DNA, 598 bp, Homo sapiens
tcaacaaactagagagaaaattgaaagctttatggcacaaaatgttcaacatattaaatagcagaaaactgggcattgaatgtgtattgttttattttcaaaaagtttgccaaattctgaagctacaagtagcaaggtgctgaaaagctaagctgatattctctgtaaagtggtgtaaagttttctgcaatttatttttgctcaggagatgaaaaggaaagctgaggaccagccagtgaagggaactcagttatgataccaggctctcagttgtaaggtctagactcagtcacactgtagttgaaagtatgtagcctgggatcagtgtcaaagcagaagtctaccaagctttacaaaaagtgcaatgaagctcctattgaaatcagtctctctgttaagattaaagtgaacagtcctcattctctctgcttagcagagraaattcgaaactatgtgtgcaggaaaatattaccacatggagtgtgtaacttcgtttataactaataccttgccttcatcaaaaacttcctcctaccaaaagacagaatcctataaccaaaaggaagattaacaaataaaataataacagagctgaggt

SEQ ID NO: 123839 - DNA, 592 bp, Homo sapiens
gctgggtgtcagtcttaacttccagtttgatacaatcattgttgtgtctttttctggaaacatccctccctctggaattaagacctttaggctagcagagcataaagtcacaggaacaggaaacaaaatttttgcytgtaggtcagtagaggtaataatgaatgttaccaccactccaatttccgtctgaacccctgaatcctggtaatcagagaaacagcgctatatcttgaacactgattaagctgaattgcattcaattccattgaaggggaatcctcccagtgacctgctatagcaaaaataccatagactggatagtttaaacaacaaaaatgtatttctcatggttctggaggttgggaagtctgagataagattgccagtattgctggattttggttatggccttcttcctagtatgcagaaggatgtctttttactgtgtcctcacatgttgaaaaccaaacaccaagaaaagaagccgtggtttatcttcttataagggcaattttcatttgtcttagtccgtttgagctgttataacaaaatatcttagaatgaataatgtataaataacagaagtttatat

SEQ ID NO: 123840 - DNA, 616 bp, Homo sapiens
agataatacataatatctcttaccctcacatttttctagtctattaagggacatacatgcaaacaatcttaatccagataatatcgggattgtgtcggcaatatatatgtgcataatatgatcgtgtgcctccaaaagtaagagtaatgaaagatgcccattagattttgcaattagatcgtcagtggtgatctcagcgaaataacttcctgccattcctgggataagagtcacattatgatgagttgagaaaagcaagaacaatgagaaaatcatgacagaaagttctgattatgggcaagagcaagagctgaacaggatgaagagttaagaggaggaatgtgtgtgtacaygtgtgttagaatgagtgccgtctggatatattcataaatttggaaggaaagagttgagtgagaaggaaaaaagtttaaaataagaagagaaagtgaatgaaaaattgtatctgtgtgagatggaagtaagacaggataaagagcacagaataggagatcatacagaagaagaaggagccctctacaaagttattagattttagaatacagaatgttgttctctattcagaaagtttccatccaaatattttctactaggtaaa

SEQ ID NO: 123841 - DNA, 582 bp, Homo sapiens
gacacagagaggggaacaacacacaccaggacctgttggagtgtggagggtgaggggagggaacttagaggatggatcaataggtgcagcaaccatcatggcacacatatatctatataacaaaactgcatgttctgcatgcatatcccatttttttagaagaaatgaagaaaaaataaaataaaaagactttaactcagcttcgtatcctcaaaaaagagaaaaatatgcaattcaaatttccctatgtacaaactaaattcttaaaaaagttaaaattttgtcttaaattacaaattataaatgtaaatcttaaattataaattcttaaaaatacatgtccccygtagtgagaaagagctgcagttaaaacagtggttagcaattcccagtctagtagtctaacaaatagataccttgtacattcagtgttttattttgcttttcattgtgttaaataatttttactaatattcacaaatttcaaatgaggacaatttaaaaatataattagctcagagcagaattccacaaaattagtccttcatgcttgaactgagtgacctgttcatgtactaacaa

SEQ ID NO: 123842 - DNA, 614 bp, Homo sapiens
actgggtaacaggcagaggttgaaagagtttggagggttcagaagaagacagaaaaatgtgagaaagtttagagcttcctagagacttgttggatggctttgaccaaaatgctgatagtgaaatgaacaataaaatccaggctgaggtggtctcagatgtagatggtgatcttgctgggaatctctagctagatttcagaggatgtayggaaatgcctggatgtccaggcagaagttttcagcaggggtggaaaatgctgtgaaagtacccaggagagagcctgtaccctgcaaagtctcaggggcagagctgcccaaggctgtgggagcctacctcttgcatcagtgtgacctggatgtgggaccttcagtcaaaggaggtcattttggagctttaatatttaacagcctcactgaattttggacttttatgtggcctgtagcctgttcgttttgccattttttcccatttgggtgtatttacccaatgccttcacccccgtgtatctaggaagtaaccagcttgctttcgattttacaggcttgcaggccgaagagacttgccttttctcagatgacacattggactgtggacttctgagttaatgctgaaa

SEQ ID NO: 123843 - DNA, 629 bp, Homo sapiens
ctgaggtggtctcagatgtagatggtgatcttgctgggaatctctagctagatttcagaggatgtacggaaatgcctggatgtccaggcagaagttttcagcaggrgtggaaaatgctgtgaaagtacccaggagagagcctgtaccctgcaaagtctcaggggcagagctgcccaaggctgtgggagcctacctcttgcatcagtgtgacctggatgtgggaccttcagtcaaaggaggtcattttggagctttaatatttaacagcctcactgaattttggacttttatgtggcctgtagcctgttcgttttgccattttttcccatttgggtgtatttacccaatgccttcacccccgtgtatctaggaagtaaccagcttgctttcgattttacaggcttgcaggccgaagagacttgccttttctcagatgacacattggactgtggacttctgagttaatgctgaaagcagttaagattttgggggactgttgggaaggcatgattgtgttttgaaatgtgagaaaatgagatttgaaaggaaggggtgaggggcagaatgatatgatttggctgtgtcctcaaccaaatatcatcttgaattttagttcccataatccctac

SEQ ID NO: 123844 - DNA, 614 bp, Homo sapiens
actgggtaacaggcagaggttgaaagagtttggagggttcagaagaagacagaaaaatgtgagaaagtttagagcttcctagagacttgttggatggctttgaccaaaatgctgatagtgaaatgaacaataaaatccaggctgaggtggtctcagatgtagatggtgatcttgctgggaatctctagctagatttcagaggatgtacggaaatgcctggatgtccaggcagaagttttcagcaggggtggaaaatgctgtgaaagtacccaggagagagyctgtaccctgcaaagtctcaggggcagagctgcccaaggctgtgggagcctacctcttgcatcagtgtgacctggatgtgggaccttcagtcaaaggaggtcattttggagctttaatatttaacagcctcactgaattttggacttttatgtggcctgtagcctgttcgttttgccattttttcccatttgggtgtatttacccaatgccttcacccccgtgtatctaggaagtaaccagcttgctttcgattttacaggcttgcaggccgaagagacttgccttttctcagatgacacattggactgtggacttctgagttaatgctgaaa

SEQ ID NO: 123845 - DNA, 561 bp, Homo sapiens
gaattcgagtcccagaagaagaagaatgcaagaaatagcacaattccaggcaaggagaagagatacaacactcaggttacttttaagaagaggaaagtaccttttggcctcaactcccagcttccagtaatttgataaaatgacgaacacagaggaaagaagagaggcaactgctgaggtcccctaggcctttgagaaaacggagttgtacctttggcaacataagtgcatatctacaagaaaggcgataatgtagacacsaagggaatgggtactgtccaaaaagaaatgcctcacaaatgtcaccatggcaaaactaaaagagtctacaaagttacctagcatgctgttggcatcattgtaaacaaacaagttaagggcaagattcttgccaagagaattaatatgcatattgggcatattaagcactctaagagccaagatgatttcctgaaagtgtgtgaaggaaaataaccagcataaagagggaagctaaagagaaacctgaagctgcagcctgttccacccagagaagcacactttgtaagaaccaatgaaaag

SEQ ID NO: 123846 - DNA, 522 bp, Homo sapiens
agctaatattcatttagtgcttacagtgtgctaagtattattttaagcacactacacagattatctaatttaatcatctgagttatgtgcggttattgttcctatatcatgtataggaaaatgtgggcaccaagcggttaggccacttgccccaaacccagagggaataaacagtggagccaggatttagagagttaggtggagtctagtctcctaacccctctgccaaaccacctctgatatgggggttaacatgagtcaatccacacccacaccttgtatgtggaaagagcgtctttgaaggccatgccctrtggataagtggagacaccatagtttcaggctccaataagcacatacaacagtctatatggcacctgaagcaggtaggtgccttccttgtcttgtaaaaacccaaaggaaaatattctaatgcctcagaaccttctggctggctccaccattcagcaacgctgtcaggaagagtagctcttacacgaccctcacaactttagatccact

SEQ ID NO: 123847 - DNA, 518 bp, Homo sapiens
accatagtttcaggctccaataagcacatacaacagtctatatggcacctgaagcaggtaggtgccttccttgtcttgtaaaaacccaaaggaaaatattctaatgcctcagaaccttctggctggctccaccattcagcaacgctgtcaggaagagtagctcttacacgrccctcacaactttagatccactttatgataaactggctaatgattagaaagaagtgcatctcagaactatcagcctaacttagatgacacagacttctggatcaggtcttgcctttccctgacttttttgaagtctagggtctcattttgcaatggttcagaattggaactggaccacctgcctgaggctgcttgggctgcccacacagcttgtaaaaactgtatgtaaacatgaaatgcagctgcaaaacaaacctagttttcctcacaggaagttatccccctaaggaatcaggattagtgtgacaggcttgtgcaaactgctcaaatgagggccatctttggcc

SEQ ID NO: 123848 - DNA, 669 bp, Homo sapiens
gaataattttaaactgttttccataattttataaaagttaaattatgctaatgtgccactaatattggcaagtaagattagcatttcaatataagtgttaaagttgtattcactatgtacctgagctatttggtatatccctatatagtgccatataagtgtgttgaacaggaaaagtttctgcatgcaccacaacaggtacaggaggatttgttttaaaatttattatgacttttgaattgcagtaatcataaaacctatgctgtgttagyagattaatatttagttcattaaaaataccacagtttttgttgttgctgttgttgttgttttgagacagagcccaagtagagtgcagaatcacctgggttcagacgattctcgtgcctcagcctccggagcagctgggattacaggtatgctccacgacacccagctaattattttgtattttttagtagagacggagtttcaccatgttggccaggctggtctcaaactcctggcctcaaatgatctgcccaccttgaccttccaaagtgttgggattacaggcatgagctaccgcgcctggcccatatgcatagtttgaagctaggagaaatagaaaatatttgcatagtaagcagtgacatatcattctgagtataaatttttttgtcatgacac

SEQ ID NO: 123849 - DNA, 408 bp, Homo sapiens
tacatttatttaaatgataaaatggtaatacagtgggaggaaagcaatgactgagaagagacatgaaaatgtatctgaccttgagagttgcaacaaatattcccagccaaaccagtctgtttaatrtgctttcatgcatgcaagtttatctgtttgactcaaactgtttaaacttataattccatcatggccactttaaatgtttttggaaacaaatacacatactttcacatatttaagaaaatcaccactccaatgtttctgttgaatcagacttttacatgatgttgtttaataaaatatggtaggttttgacatgtatgattttatcatataagtagcgtaactcctcagccaaaaatttagcatttgactctatagtagaaggctgagtcctgtacattatgt

SEQ ID NO: 123850 - DNA, 373 bp, Homo sapiens
gaattcaaaagcgggtttagccctggttttgagacagtacgaaagtttgaaggcgctattatttaatgcgtgtttagtttactttggcatttagtcctcagcataacatactctgttagcttctcaactggaacagccccttgatgtgggccttaccccttcactcattaatagaaagtgagtctcttaagcagcagcattttgtgacctgtgtcccctcggtcacctctaacaaaatggtaggagggtggytgtgcgttcctgggagatttcttgtcctcatttcccagtttattttcaaatcctggttctagaattaacacatgattattaccatattcttacatgtatgatcaaaggtgcagggatttac

SEQ ID NO: 123851 - DNA, 637 bp, Homo sapiens
gtgggaggatcccttgagccctggagttcaagattaccctgggcaacatagtgagatcttgtctctacataaaatacatttttaaaaattagccaggcaaggtcccagctatttgggaggctgaggtgggaggatcacttgagtctaggaggttgagtctgcagtgagccaagatcacaccactgcactccagcctgggcaataaagtgagaccctgtcctaaaaaaaagaaaaaagacaacgtggaactggcacaatygatgtagtgatcaatgtaatagaattaagattccagaaataaactcatatatctatagtcaattgatttttgacaagggtgccaagaccatcccatatggaaataatagtttttcaacaaatggtgctgggacaactgggtagccacatgcaaaggactgaagttcgatttttacctcacactgtttacaaaagataaaattgatgagtgatgtaaaagagctaaaactaaagttcttagaagacaacacgggtaaaatcttcatgacttcgggttttgcaaagtctccttagatatggcaccaaaagcatgagcaacaacaaaaatataagttggaacgcatcaaaatttaaaagttttgtgcctcaagggacatca

SEQ ID NO: 123852 - DNA, 405 bp, Homo sapiens
tttttttttttttttttttgagacagagtctctctctgcctcctgggctcaagcgattctcctggctcagcctcccaagtagctgggactacaggcacatgctaccgtgcccagctgatttttgtattattagtagagacagggtttcacyatgttgcctaggttggtcttgaactcctgacctcaggtgatccacccacctcggcctcccaaaatgctgggattaaaagcgtgagccaccacaccaggccagttcttggtatttctaaggctaaagcaaatgaacatggtggctgatgcccgatccctcactagatactggttagcaacagttctggcatatataacataccaaatgcaaccacattctattgtgtgtagtgtaaaaggaaaattggtaaaaaa

SEQ ID NO: 123853 - DNA, 609 bp, Homo sapiens
cacatattgcttccatgaagaaatatattcttatttccaaatctctattttatgaataatatrtaatattcattcctatcagtgtttctgtaattgggttgcacatttataatgctgtatatcagaatgttaaaattaagatttattaagtactgcatgttgatagcaatcagtatagagatgagaaagataaagaataatatttattttaatagtagttccttcttacacttttttcttaatgaagttcagacccttccaagattttaacatataataaagggattttgggggctttagagagaatgtttattcttaatcagagatgtagttgcatttatttcctgatttaaaaaagcaaatcataagacccaatgcagttttctagtgttacttatttttcttcccaacttcaattaaatgaagccctcaaaatgaaatatgtgaaaatgttaccttaatacctttaagtagaattatagcatgtttatttcacttgaaagtgttaatagaataaattataagcccttctagaaacacatattttaaaatataatatgtgaaaaacatttaagtagaggccattttgctatttcacagaaaattata

SEQ ID NO: 123854 - DNA, 609 bp, Homo sapiens
cacatattgcttccatgaagaaatatattcttatttccaaatctctattttatgaataatatataatattcattcctatcagtgtttctgtaattgggttgcacatttataatgctgtatatcagaatgttaaaattaagatttattaagtactgcatgttgatagcaatcagtatagagatgagaaagataaagaataatatttattytaatagtagttccttcttacacttttttcttaatgaagttcagacccttccaagattttaacatataataaagggattttgggggctttagagagaatgtttattcttaatcagagatgtagttgcatttatttcctgatttaaaaaagcaaatcataagacccaatgcagttttctagtgttacttatttttcttcccaacttcaattaaatgaagccctcaaaatgaaatatgtgaaaatgttaccttaatacctttaagtagaattatagcatgtttatttcacttgaaagtgttaatagaataaattataagcccttctagaaacacatattttaaaatataatatgtgaaaaacatttaagtagaggccattttgctatttcacagaaaattata

SEQ ID NO: 123855 - DNA, 609 bp, Homo sapiens
cacatattgcttccatgaagaaatatattcttatttccaaatctctattttatgaataatatataatattcattcctatcagtgtttctgtaattgggttgcacatttataatgctgtatatcagaatgttaaaattaagatttattaagtactgcatgttgatagcaatcagtatagagatgagaaagataaagaataatatttattttaatagtagttccttcttacacttttttcttaatgaagttcagacccttccaagattttaacatataataaagggattttgggggctttagagagaatgtttattcttaatcagagatgtagttgcatttatttcctgatttaaaaaagcaaatcataagacccaatgcagttttctagtgttacttatttttcttcccaacttcaattaaatgaagycctcaaaatgaaatatgtgaaaatgttaccttaatacctttaagtagaattatagcatgtttatttcacttgaaagtgttaatagaataaattataagcccttctagaaacacatattttaaaatataatatgtgaaaaacatttaagtagaggccattttgctatttcacagaaaattata

SEQ ID NO: 123856 - DNA, 609 bp, Homo sapiens
cacatattgcttccatgaagaaatatattcttatttccaaatctctattttatgaataatatataatattcattcctatcagtgtttctgtaattgggttgcacatttataatgctgtatatcagaatgttaaaattaagatttattaagtactgcatgttgatagcaatcagtatagagatgagaaagataaagaataatatttattttaatagtagttccttcttacacttttttcttaatgaagttcagacccttccaagattttaacatataataaagggattttgggggctttagagagaatgtttattcttaatcagagatgtagttgcatttatttcctgatttaaaaaagcaaatcataagacccaatgcagttttctagtgttacttatttttcttcccaacttcaattaaatgaagccctcaaaatgaaatatgtgaaaatgttaccttaatacctttaagtagaattatagcatgtttatttcacttgaaagtgttaatagaataaattatawgcccttctagaaacacatattttaaaatataatatgtgaaaaacatttaagtagaggccattttgctatttcacagaaaattata

SEQ ID NO: 123857 - DNA, 594 bp, Homo sapiens
gggaactcaatcattcgacaagccctaattgagcacctgttaggttccaggcgctgttctaactaagcgcagaggtttaaagtcatagacaggcaaagaccctcttgcagcttgcatgctggtggagtgagagaggggagacagacaacaaacaagtgacaaaaattgcaggtagtgataagtggtgtggagaaaaataaagcagaggatagggtgactttacacctggtgagatactgcctctcaaagaagacctttgagcgcatacacacgggatgaaggaataagtcttgcaaacacgcgggcctggaggaggaatagcctttccaagctgagagaaaatcagccataaacccagaggtggggatacgcctgccatgttgcagaaacagtgaaaggccggcatggctgagcagcgtcagccagcccgagagcagtaccagctaggcttggccagatccagtgaagcctgtgggccattataacaggaacgggaaaccaygagagaagggtgagccgaggaatgaccgcatctgattcatgttgttaaaagttagtcttgctgatgtgtgtaaaatacacaatggagaagca

SEQ ID NO: 123858 - DNA, 571 bp, Homo sapiens
aaaacagcaaacttagttgatgaatttgtgtgttctgattgctccactgattggcggttccccaatctctccctctccttgagcagaaatccatggataagtggacctgcatagttcaaacctgtgttgttcaagggtcaattgtattttaagcccactgttgcgacctrctgctcagaaaaaaagatttctttccaaatattactgttcattgacaatgtattttgtcacccaagatctctgatagagatgtacaaggagattaatgtgtttatgtctgctaacacaacatccattctgtagcccattgatcaaggagtaattttgactttcaagtctggtaatttaagaaatacattttgtaaggctatagctgccacagagagtgattcctctgatggacctgggcaaagtaaaattgaaaatcttctgaaaaggattcaccattctagatgttactaagaacatctgtgattcatgggaggaggtcaaaatatcaacattagcaggagtttggaagaagttgattccaaccctcatggttgacaaggagcttaagacttcagtggag

SEQ ID NO: 123859 - DNA, 579 bp, Homo sapiens
aataatttctttctttttctttttttttttttgagacagggtctttctctgtcacccgggttgaagtgcggtggcatgatgaggactcactgcaacctctgcctcccaggctccagagatcctcccacctcagccttccaagtagctgggattacaggtgtgtgccaccatgccccactaatttttgtatttttagtagagacagggttttgctatgttgcccaggctggtcttgaatgactgacctcaagtgatctgcccgcctcagcctyccaaagtgttggaattacaggcatgagccaccgcgcccagactttaccagtactttctatctaaatttttttgttagaaaggtttttcatccaaaaatatgaaaaattcacttattttctactactttcacagtttcatttttacatacacttttggtgataattctggattttactttgatataaaaattaaggcttggatccaggcttacttcttccaaatggctagccagtgtttttcaccatcatttcttgaattgcctctgtttctgtactgatttgaaatgttacttctctaatgtaccta

SEQ ID NO: 123860 - DNA, 613 bp, Homo sapiens
aaaaataccttcacagaaatatattggatgatatttaagtagctatctgggtactgtggcctaaccaagttggcacatgtgattaactatcactagcctccctcaactgtagttctctaacctccycatcataaggcaaggctgttgtcactgcaaaagagacagaaggcagaagcatcgcataacccaggaatgagatagtgtgctccttctacccacgtgcaccctaccctgagtgttaacatctcatttctttcctcttgcttcttgctgtaagttttaaatggatttaataaaccctgttattgaagcatcttaatttgacctatgagtctttcccttctgtgacctttgaaatagcttacctggtagtgtacttgaagagtaccattacaaaagggaatttccacactacaatgcctaaaaacttggcatcggctttgcaatgacactttcctgaaccttaggccacctcttgcttattctcagtagtcagcagggaatggagacaatgaggatcaaaatccaccccatccctgtgttggtaaaacagctttccacaaatatttgtatttttcaggaactagaggagtgggagaaactgtgaagttac

SEQ ID NO: 123861 - DNA, 488 bp, Homo sapiens
gatccatcttaaattacctgctcaaccatgaagtcttttctaatctccacgcccagttagattccgtttcttcctactttagccttttcagcactttcatctacactatatggttcttagcattcattgtttgatatcacagtaacttttttacttgaactatccatacagaaagctcttctacagcagtgaccacatgctctatttttgtacattgacactatgtgtatgttgaactatgataaattaagaaatgaaaggtaatttttaaaatttatttgctactgtctgtatattcagaggacattagtgtgcttaatctaagtctgaaaatgcgacagattcttgtgaagcagttggaataaggaaggacatttcaatgggaacaacagcatgagaataaaacatgaaggcatgaaatgacctggagcgtttgcaraactgtactgtaagcagttcatgatagctggaggtaggtaaggcacaat

SEQ ID NO: 123862 - DNA, 584 bp, Homo sapiens
gcataattaagtgtacagtgttgattattgataggatttacttccttggttaaatacataggaggcagaggggactctgcttaagctaggtggtagtcctggcatccaaaagcatttagccaagggcacttgtgaagaacataaatggccaccataggtttgtscttctcaggaggatgcatagattaggggagtttcagaagttagctatagtagaaggtacattttgatgtattcttagctagaaagttttgtgtttatcttcagaaatacccttagtagttgggaatcaaatttaataagtattgcaaatttcttttacaatagggacttgtaggtggcactggtcctccggggtttcctgggcttagagtgagtatcactaaatatcatcattcttaagaaaatattttattgtgcaatttatatgtgttagatgtgtttttgaaacttagggaaatgagaggttttactgtcattgttggttatcaaccttgattaaatgtatttttttcaaccagatatgaataattagaccagtagtataagtcaaaaaattaattgtattttatgataagaaaaaa

SEQ ID NO: 123863 - DNA, 558 bp, Homo sapiens
taccattaattttatgtaaatatgaaaaagtgtaaattcaaaagaaagaactgcttattattttatccatgtattgtgttagaatgtggtatcaatatggttttaagttcttgtttgaaacttttgtctcaatattttagcatactttatgaaattttttagcagtttgtaaatagtggtatgtctgccttttgtggtataataactttctcttctgttattctcttctyttagggtgctgttggtttaccaggaccaccagggatgagaggaaagtcagggccttcagtaggtttgaacttttgctttgctctttgtaattgacagagtgcatgtcatggcatgagtctcgacactgttgatctaagtagggtataagcctactgagcatttgtctccttagttttagaatatagcaaatccctcaggtattcagttcacattccatagacttttggacttccctctactcccaaccctaggccaaagccaagtttctgagagtcctaaagatcttggtcatattattctactgaataatttaatatagacaatatt

SEQ ID NO: 123864 - DNA, 518 bp, Homo sapiens
gcaagagacagtgagagtgaggcttttacttactcattttacacctttctgtactgttctaataaagaaaattaatgtcagcaggaattactttggtagggagataattgatttttttttatttgttttatcaaacttttgaaaactactttgggccgaagataagataagcattcatgaattaaaattagtgagatagccttgtattttgtctcttgttgtatttattacttgtttgtatctttttrttttaattaaaaaaaaaatttttagagacagggcctccctctgttgctcaggatagagtgtaatggtgccatcacagctcactgcagtctccaactcttggggtcaagtggtccttccacctcagcctctcaagtagcaaggactgcaggtccaccaccatacccagctaattaaaaaaaaaaaaaattgtagaaaccaggtcttgctttgttgcccaggttagtcttaaactcctggcctcaagcaatcctcttacctcggcctcctag

SEQ ID NO: 123865 - DNA, 518 bp, Homo sapiens
gcaagagacagtgagagtgaggcttttacttactcattttacacctttctgtactgttctaataaagaaaattaatgtcagcaggaattactttggtagggagataattgatttttttttatttgttttatcaaacttttgaaaactactttgggccgaagataagataagcattcatgaattaaaattagtgagatagccttgtattttgtctcttgttgtatttattacttgtttgtatctttttgttttaattaaaaaaaaaatttttagagacagggcctccctctgttgctcaggatagagtgtaatggygccatcacagctcactgcagtctccaactcttggggtcaagtggtccttccacctcagcctctcaagtagcaaggactgcaggtccaccaccatacccagctaattaaaaaaaaaaaaaattgtagaaaccaggtcttgctttgttgcccaggttagtcttaaactcctggcctcaagcaatcctcttacctcggcctcctag

SEQ ID NO: 123866 - DNA, 403 bp, Homo sapiens
agtttgaaatgtaagaggcttttgcctgaaatatagtcacaaagctctgtacattttgttgtarggggatttcagatttgaatacgatcttcccactgccaaaaggatgacacatgatcagttatatgattctcctttcttttgggttagaacatattaattattcaaaaggagggtagcaattcattgtattgtgtcatttccactattcagtatagatggatgttacaatgtgaaagcataattcagtgaaagtaattctattaggggccaaaatgatgagacctacatatatacttctatgatagcttttgttaataactgggtgataaaaggtttaagttaatatctgaaaattacagaattttggggttaacatcttctgagtgagaattgaggagtt

SEQ ID NO: 123867 - DNA, 578 bp, Homo sapiens
tcagtgaaagtaattctattaggggccaaaatgatgagacctacatatatacttctatgatagcttttgttaataactgggtgataaaaggtttaagttaatatctgaaaattacagaattttggggttaacatcttctgagtgagaattgaggagttagtctgagtaccttgagcaaattacttcaaytccctgggcctttcctcatctgtaaaacagaaatattaatagtaccaacctcataaagttgttttattacacacattaatacatgtaaaacacttcagcatgtagttaataggaaatgttcagtatgtattagctgccaccaccaccaccaccataattgaagacaggacacattgtctagacctaaggcagaaaagcctggccagttcaagatcagaaagaatgccaatgtaactggagtgagcagaatgaatgaagaggaaagtggtatacaatgaagttggaaaagtaggcaggagatatatcatgtatgccctcatagaggatagtgagaagtttggatttggttctaagtgcagcaggaagccatgagaggctttaaatagggc

SEQ ID NO: 123868 - DNA, 578 bp, Homo sapiens
tcagtgaaagtaattctattaggggccaaaatgatgagacctacatatatacttctatgatagcttttgttaataactgggtgataaaaggtttaagttaatatctgaaaattacagaattttggggttaacatcttctgagtgagaattgaggagttagtctgagtaccttgagcaaattacttcaattccctgggcctttcctcatctgtaaaacagaaatattaatagtaccaacctcataaagttgttttattacacacattaatacatgtaaaacacttcagcatgtagttaataggaaatgttcagtatgtwttagctgccaccaccaccaccaccataattgaagacaggacacattgtctagacctaaggcagaaaagcctggccagttcaagatcagaaagaatgccaatgtaactggagtgagcagaatgaatgaagaggaaagtggtatacaatgaagttggaaaagtaggcaggagatatatcatgtatgccctcatagaggatagtgagaagtttggatttggttctaagtgcagcaggaagccatgagaggctttaaatagggc

SEQ ID NO: 123869 - DNA, 476 bp, Homo sapiens
ttaaaataaaaattattacattaagagttgtaacagaagtagaggtatatgcaaagtataaataagaatttagaaaaaggagcaaaatcctttctgggaggattagcatatttttaatatgtgaaaataattttgtattgagttatgataggctaataaaaacttgtagataaaaataagcatacaataaaaaattataaacaacttctgttctggggctcaaaaggctctaagaacatacaatattaagataagggtgtgcatgaaagaaacaggctcagctccatagccagagtgtaacctgcagacggctgaccggttaaagggaatgaggtccccctaactctctcattgaagctatttactcgagatggaaccacttatccagaaccagaaataatcctttcrgtgaagcaggcaaatctaggctactttttctctcttctttcaaaaccaaaattataatcttaaaggaa

SEQ ID NO: 123870 - DNA, 588 bp, Homo sapiens
ttttcacttatgaagggctcatgtttccagagaattacaagttcctaacaaaaagaagaccatgttttaattttgtttttgagtcactgcttaaacacagtacccttcccattgtacaaactcaataaatatttcttagctgactaaatgttacctggagaataaatgtcttatacaagaaatctgtgtataaaatcctgktatagtatatagaatgtaaatcttcaggactgggtcaaagtaatcttagaaaactgtgtagagttatacatcttcctcttaccaagttagcttacctctctacagataaatacatgacatactgtaataattcagtgcaagaactatttccatatattacacaacataatcccacaaatagtaagctttctataaaaacttatcaggtctgctatgcaaaagacaataacagcctcttttagcatccctaattccatagccaaagtaaaaacacaaacctttatagcaacaaataaattattcctctgtttactggagaatagagaatatttatttgctactcttaccttctgcagtaagcagcaaaagatctggttttgctaatgt

SEQ ID NO: 123871 - DNA, 588 bp, Homo sapiens
ttttcacttatgaagggctcatgtttccagagaattacaagttcctaacaaaaagaagaccatgttttaattttgtttttgagtcactgcttaaacacagtacccttcccattgtacaaactcaataaatatttcttagctgactaaatgttacctggagaataaatgtcttatacaagaaatctgtgtataaaatcctgttatagtatatagaatgtaaatcttcaggactgggtcaaagtaatcttagaaaactgtgtagagttatacatcttcctcttaccaagttagcttacctctctacagataaatacatgacatactgtaataattcagtgcaagaactatttccatatattacacaacataatcccacaaatagtaagctttctataaaaacttatcaggtctgctatgcaaaagacaataacagcctcttttagcatccctaattccatagccaaagtaaaaayacaaacctttatagcaacaaataaattattcctctgtttactggagaatagagaatatttatttgctactcttaccttctgcagtaagcagcaaaagatctggttttgctaatgt

SEQ ID NO: 123872 - DNA, 476 bp, Homo sapiens
tattatgatgtatataaaatcaattaatctttctcaaaaagattacagtctaatagacacataagcacatcagaagttataatacataaagataagtgcttgataggttttttttcaggaatataggaaaagaatattccaattagatttgggaggaacagaaaaagcttcctggacatgttgcatgtgatgtgtaggtattagctagatgcagaagggcataggaacatatatatccagacaaaaaatatggcatgtaagaagctgtgagatttgagtaagtatggcatggtttggcactctaaatagttyggctgaagtgatgcttttggaagagtgatggtggatatgactgtataactacagaattatacagagaggggtttggtcataaagaacgttgtataaaaagttaaaaagtacaagccttaacatggaagttgtggaggtcactgaaggatttaagcaaaagagtg

SEQ ID NO: 123873 - DNA, 476 bp, Homo sapiens
tattatgatgtatataaaatcaattaatctttctcaaaaagattacagtctaatagacacataagcacatcagaagttataatacataaagataagtgcttgataggttttttttcaggaatataggaaaagaatattccaattagatttgggaggaacagaaaaagcttcctggacatgttgcatgtgatgtgtaggtattagctagatgcagaagggcataggaacatatatatccagacaaaaaatatggcatgtaagaagctgtgagatttgagtaagtatggcatggtttggcactctaaatagtttggctgaagtgatgcttttggaagagtgatggtggatatgactgtataactayagaattatacagagaggggtttggtcataaagaacgttgtataaaaagttaaaaagtacaagccttaacatggaagttgtggaggtcactgaaggatttaagcaaaagagtg

SEQ ID NO: 123874 - DNA, 476 bp, Homo sapiens
tattatgatgtatataaaatcaattaatctttctcaaaaagattacagtctaatagacacataagcacatcagaagttataatacataaagataagtgcttgataggttttttttcaggaatataggaaaagaatattccaattagatttgggaggaacagaaaaagcttcctggacatgttgcatgtgatgtgtaggtattagctagatgcagaagggcataggaacatatatatccagacaaaaaatatggcatgtaagaagctgtgagatttgagtaagtatggcatggtttggcactctaaatagtttggctgaagtgatgcttttggaagagtgatggtggatatgactgtataactacagaattatacagagaggggtttggtcataaagaacgttgtataaaaagttaaaaagtacaagccttaacatggaagttgtggagrtcactgaaggatttaagcaaaagagtg

SEQ ID NO: 123875 - DNA, 597 bp, Homo sapiens
ttcataaatgaggatgctgagaccagaaagtttaactgacttgccaattggcacatacagtagttaatggtagtattgcagtttaattaaggaaaaatgaccaaattgttttctccatctaatttggtgtgaatcttcattagcgaatcaaataatatttagtcgtcagccataagaattcatcatattgcaaagaacaacagaaaccccaaacaaaatgcattgtataacttgtttgcattaaaagctgttgctgatgtaaaggactttatgagatggatggaataccagatgtgtttccagttgcttggcctcctccaaacaagagtggctcmtgtaccctctcttattaattgattggtccttggtggtagctgattttggagtgactcatgcatatactggacattgctctataatttgggcagtatgactcaaaattaggaattggtctgatcaaaatttatcttacaggaaagtttttgttttagtgaaataaaaagtgcaaaaattgtataaatcataagtatatgcctcagtaaatgttcagaattgaacacatccatgtaactaccacccagataaaatattaaaaca

SEQ ID NO: 123876 - DNA, 640 bp, Homo sapiens
atgaaggtgattcttgctatgctttagcaaagagactggtgacattttgcacctgccctaaagatctgtgaaactttgaacttgagagagatgacttagggtatcttgcagaagacatttttaagtgacaaagcattcaagaggaagcagagcatgaaactggaaaatttgcagcctggcaatacagtggaaaagaaaaaaaatttttctggagagaaattcaagccagctgaagaaatttacaaagtaatgagaagtcaaatgttaatcatcaacacaatggggaaaatgtctccagggcatgccagagacctgtgcagcagactctcccatcacagaccctgaggcctaggagggaaaaatgattctctgggccagactcacgccccgtctgctgtgtgcagcctagggatgtggtgtcctatgtcccagttgctccagccatggctaaaatgagccaaggcacagctcaggctgtgtcttcagaaggtgcaacaccaagctttggcagcttcaacatggtgatgagcctgtggatgctcagargtcaagaactcaggtttgggaagctccacctagatttcagaagatgtacggaaatgactgaatgtccaggcagaattttgctataggagaagaa

SEQ ID NO: 123877 - DNA, 640 bp, Homo sapiens
atgaaggtgattcttgctatgctttagcaaagagactggtgacattttgcacctgccctaaagatctgtgaaactttgaacttgagagagatgacttagggtatcttgcagaagacatttttaagtgacaaagcattcaagaggaagcagagcatgaaactggaaaatttgcagcctggcaatacagtggaaaagaaaaaaaatttttctggagagaaattcaagccagctgaagaaatttacaaagtaatgagaagtcaaatgttaatcatcaacacaatggggaaaatgtctccagggcatgccagagacctgtgcagcagactctcccatcacagaccctgaggcctaggagggaaaaatgattctctgggccagactcacgccccgtctgctgtgtgcagcctagggatgtggtgtcctatgtcccagttgctccagccatggctaaaatgagccaaggcacagctcaggctgtgtcttcagaaggtgcaacaccaagctttggcagcttcaacatggtgatgagcctgtggatgctcagaggtcaagaactcaggtttgggaasctccacctagatttcagaagatgtacggaaatgactgaatgtccaggcagaattttgctataggagaagaa

SEQ ID NO: 123878 - DNA, 619 bp, Homo sapiens
tctttggaacttattcacttagcataactgaaacattatcttttttgaagaattctttatttctcccatttttcaggccctagcagcccccattttctctgttattaagagtttgactattaaagatacctcaaataagtggaatcatgcacaatttgtccttctctggctgacttatttcactttccataatgtcctccagtttcatccacgttgttgcaaatggcagggattttttttytttttttaaggctcaataatatataattgtttatttatactatgttttctagatccaggcacctgtttatatacaacttagattgtttccatatcttagctattgtgaataagactgcaatgaacacgggagtaaaaataactctttgtcatactgatttcatgttttttggacacataactggaactgggatttctgatcatatggtaattctatttttaatttttgagagacttccaaagtgttttctgtagtggctacagcattttacattctcaccaacagtgtacaagggttctaatttctacacatccccactgacactcttatgttcctttctgcttatgttattcatctgattttgcattttatctactt

SEQ ID NO: 123879 - DNA, 581 bp, Homo sapiens
ttcctaagacttccaccatcctggcccacaggagggagtcagcctgctcacactccaagcacattgctactacaaccagcatttggggaagccactatacaaaggctatctataaccaaagatcttatactgactgccttggaaaatacccagaaccaaagtcaatggaccctacacaacatcatacgttatacttccttaggattggattggggtgtgggggaaaatactattcaaacaaaagcaatattaaaacataaggagagrtagcttatccaaatatgaagaaaaaaaaaacagagaaacaaatcagaaggcataaaaacaaaaaacaaaaaaagaaaatctgaaaaaacagtgatacagcactccagaaagggaacattaactctccaaaaactgaattctaaccaaattgaaattttaaaaatatcagacaaatattttaaaatattaattttaaagaagctctatgagatctaagtgaaaactaaaaatctacacaaagaaatcaggaaagccattcaggacaggaaagaatgagatagacaccataaaacaaaacaaaacaaaacaaatac

SEQ ID NO: 123880 - DNA, 623 bp, Homo sapiens
catttacataatggatattatgtccttttggctcagtaatcatctaataacttaatattaaataatgatttccaggctgctgagcacatggtgagtatccatccttcatattcagggcttaatattctcctagcttttttccacgcttgagacccaataatatgcctcatgggacaataaaacatcaggattgacatagtgcattgaagagacaaatgttcacggagtaattgtgcagctcttgtacactgatagaagaagaatcttgccttcttattatggcttcttctaaactatcaaaacattacccaaaaaagcccctcttcctgctgttatgtcttatattattattggtcccgtcagagggtgacattctygtgagactaataataataactatttttaatagttaatgactagtccacatttgtaaaataaattgtctttaagaggacattgttacagttgtagaaagtggttgacccaatagccaatgtttataaaacatcttgaaaatgaaggccaccacacaggcaataatccaaaggatgttggtattctttttccagcttgtgaacattgcacataggagtttagagtcaaaattcttccaggataccttt

SEQ ID NO: 123881 - DNA, 577 bp, Homo sapiens
acgtacaggcacccagagacacaaaaagagagagaaagctcaccattcttgaaaaaggcagttctgcaggctccacaaacaagtacaccagtgaatgggaatgataagaggagaacaatttggttacattcagagacctggtgggcaaatggaaatgggacaagcagtagaaattaggccagatcatggaagatttgttttgttttgttttcatggcatgatacctgcaaggccaggaaggctgaagccagaacaccaatgcaattaattagcagaaaccaaaaagtaattaatttagcacgccaccatatagggcagaagcaaatactgctgtttgtagccagggatggggaaaggatctaaccacactccaggcacctctgcacatggcaccacagagagaaagatggaggaggagtgcagccgtacgctgggagtcatcacaattgtttttttaccgawaaaagcaagtgggaacaattggccaaaataagcctggattgtagtagaaaataagctaagaaagaaagatcaggggacattgtgataaaacaatccacgtaatttctataacatg

SEQ ID NO: 123882 - DNA, 577 bp, Homo sapiens
acgtacaggcacccagagacacaaaaagagagagaaagctcaccattcttgaaaaaggcagttctgcaggctccacaaacaagtacaccagtgaatgggaatgataagaggagaacaatttggttacattcagagacctggtgggcaaatggaaatgggacaagcagtagaaattaggccagatcatggaagatttgttttgttttgttttcatggcatgatacctgcaaggccaggaaggctgaagccagaacaccaatgcaattaattagcagaaaccaaaaagtaattaatttagcacgccaccatatagggcagaagcaaatactgctgtttgtagccagggatggggaaaggatctaaccacactccaggcacctctgcacatggcaccacagagagaaagatggaggaggagtgcagccgtacgctgggagtcatcacaattgtttttttaccgaaaaaagcaagtgggaacaattggccaaaayaagcctggattgtagtagaaaataagctaagaaagaaagatcaggggacattgtgataaaacaatccacgtaatttctataacatg

SEQ ID NO: 123883 - DNA, 592 bp, Homo sapiens
gaagcaaaactacctctatgtgtagatgacattaccttacatgttgaaaacgataaggattccacaaaaaactgttagaactaataaattaattcagcaacattgcaggwtacaaaatcaacatgcaaaaatcagctgtatttttatacactaggcatgaacaatttaagaagcagattaagaaaataattccgtttacaaaatatcaaaaagactaaaatatttaagaataagtttaacaaaggaggtacaagacttgtacactcaaaactaccaaacattattgaaagaaattaaagaagaccaaaatatatggaagcaccttccatgtccatagactgaaaaaattactattgttaagatgacaatactacccaaagtgatttgcagattcaatgcaattcctgtcaaaattcaatggcattttttacagaagtgaaaaagcctatcctaaaattcatatggaatttcaaggaaccctgaaatagtcaaaatagtcttacaaaagaacaaagatggagcactcacatttcccagtttcaaaccttactacaaaagctacagttaaaaaaaagggggggtggtgtggtac

SEQ ID NO: 123884 - DNA, 592 bp, Homo sapiens
gaagcaaaactacctctatgtgtagatgacattaccttacatgttgaaaacgataaggattccacaaaaaactgttagaactaataaattaattcagcaacattgcaggatacaaaatcaacatgcaaaaatcagctgtatttttatacactaggcatgaacaatttaagaagcagattaagaaaataattccgtttacaaaatatcaaaaagactaaaatatttaagaataagtttaacaaaggaggtacaagacttgtacactcaaaactaccaaacattattgaaagaaattaaagaagaccaaaatatatggaagcaccttccatgtccatagactgaaaaaattactattgttaagatgacaatactacccaaagtgatttgcagattcaatgcaattcctgtcaaaattcaatggcattttttacagaagtgaaaaagcctatcctaaaattcatatggaatttcaaggaaccctgaaatagtcaaaayagtcttacaaaagaacaaagatggagcactcacatttcccagtttcaaaccttactacaaaagctacagttaaaaaaaagggggggtggtgtggtac

SEQ ID NO: 123885 - DNA, 641 bp, Homo sapiens
ttcactacacagtggcttaaaagacgcatggcaatgctagtgactctctggttatgtccgattctccaagacaactaatttgcttgggctcggcaagggctctgtcataaggaaggtgtgcaggagcactgcaatcaatttaggacatgggggcagcacctcagagacacactgcacctccacatccgttctcctctttctgtaagaagatatgattggaagtcaggtgggcgccttgtgagtggtgtcctgaaggaatgatccatgccccttcctccttggggatgcagccagtcagaagtgtgggcctgtaatggggcagccgcctcctgtgctgggcaggggcacttgcacggctattgttttgggtctcttgcacagcaactagacctgtatccctacctcacaggataccccaacttcaggcccaaatgccacccccaaacagtaccatgaatacacaaccaacagyggggctgaggctgctggaggtgcaacagatgccatgcccttggtagagctgtgccctaggtgggaggagctggacactcaaaatgtggcctgcacagtcttttgccagcaaggtccctccagcatagtgaagggcagagaaaggtagacacgtacttttcatcctatta

SEQ ID NO: 123886 - DNA, 460 bp, Homo sapiens
ggcctgtcccctccacccccgatgctagatagctaattgctgtgaactgtgacactgcgactcctgccagcttggtccatctccatcacctataaattgagatggtccaccagctttgcaccttgtaagcactgaaggaacttgctttaagtaagtttaacatacaaatataaggtctacaaaaccaatgaacttgaagggcggcaatttgtgttttcckctaggttgctttgggagctggacagggagaagtgaacaaaagaacatttgtcttttagttatacttgaatgatgcattttatttagaaaggaaaacttgagcgctttttaaaaagttttgatcatgtttttcacgaagaatacattctctggcccttaacctcagcatttgtgatgtagtgaggaaagtgagaaaattctagcttgtgaactcctgtgataaatcataccaaagtgaggc

SEQ ID NO: 123887 - DNA, 516 bp, Homo sapiens
gaatcaccaaattctttcctgctgccagtgagagttaaggataattacacagacatttgacatttgcttcagagaaggaaatgttcaacgttaatagttaaatgaacsttttattttcttccttgaatcttgctgtgtttcatgaaaggaacccacatggtgatggcttatacatttatgaattatattctaagaacaaatacatacttcatttctctgtaaggggaagatcatctagaggatatgaagatgatgcagatgcaggctggggaagggtttaggtcgtctcacctggaaaaaggggtaaataacaggatgcctcagagggtgttaaggggatgaaattacttaatacacaaaaagcacttatcagtgtgccttgcacatagcaagtgctcagtaaatggtggtggttatttacacaggtgcgttcctccatctgagtcctcatgctattggccacttataccctgaattgcactttatttttatggccagtagccaagcaaagagact

SEQ ID NO: 123888 - DNA, 527 bp, Homo sapiens
cccgaactcccaagcagccattgtgtgagccccgcgcttctgtgggctctgtcgtgcgccgtgcctggcgctgctgcgcggaaatgtattatctcctaatcgttagaggcccctgcattattctgtgtaattaacttgacattattttgctcagaaatttaattcattctggatcttagtttcaaataaagatttgcaggatgcgtaattgagaaaataacaaaaccacaacacaaacccacagctgctccccacaccggttcccaggttctttagcggagagcggagtggctttgttttcgggggtgacacttgtgtatgtctgtgcttttgcagtgtgtgaygttcctctgtatgacatttgtgactacaacgtctccagggaccgatgccaggagctcgggtgctgcttctacgaaggcgtctgctacaagaaagcggttcccagtgagtagacgccccggccaccccgtggcggaagccgaggtagctggtgaccatgccgaccactgccctgcctgtctccc

SEQ ID NO: 123889 - DNA, 500 bp, Homo sapiens
gaattctccgacacatagaacaatagtttgaaggaaaactgcatttcaaatgctatcctgagagagcactcactatcttatttctccccactaaggctttcttgtcccaaagtgaggcaggggccctgcccccaacaggagaagggggcctgggctccagctgctgctgggcctggccctgggagaggaacctaactggctgggggctctcrctggggctgccttagggcagcagagggtggggtgagaagctgccaggcctgcgaaaagcactgccaactgaaagaggtggaactatgaatcagggactctcagaatcaacctttcacatacatacctcgaatgaagacaacctgtctccaaatctgaggccccagttaccagttgtgtaaccttgggcacatccctcaccctcttggtgtcctagctttcttatctttaaacacctgcctcatggggtcctttaaaggataaaatgagttaataactgaaaaaatacc

SEQ ID NO: 123890 - DNA, 613 bp, Homo sapiens
aaaaaactgagagagaaggagagctgacagtaattgtcactggttgtggaaagtgctcatgtggatgagtgggatgataaagagtaatttcaaacaaaccatccaactcagaaactaatggaaactctccatcatttgtcactgctgaaaatgcacctgaacaaaagggccatgaaaaattgtcaaaggaggtgaccaacatttaagggaaaaaaatttgtaaaatgtagctttgtttaaaatcccattatttgcatttgttytcttctttcttcacacttttcttcaatactttttaaaattgtgtgtgtgtgtgtgcctgtgtacatgtgactcattcatcactagtcaaaaatagaggctaaatacaaaggcacttcgaaaatgcattcaggacaagtattacagtggcaaaggccagttcccaaggagtgtgagctgtgttgtctcgcttagggccagcatctcctttttgctggaactctgaatgcttttcagaaaatcttcatgagattctgatgacttatccattgtatttggaatgtaacctgatacctttccagcacatcattttgttaaaaatgctatgagtatttggaatgtaattagacac

SEQ ID NO: 123891 - DNA, 613 bp, Homo sapiens
aaaaaactgagagagaaggagagctgacagtaattgtcactggttgtggaaagtgctcatgtggatgagtgggatgataaagagtaatttcaaacaaaccatccaactcagaaactaatggaaactctccatcatttgtcactgctgaaaatgcacctgaacaaaagggccatgaaaaattgtcaaaggaggtgaccaacatttaagggaaaaaaatttgtaaaatgtagctttgtttaaaatcccattatttgcatttgttttcttctttcttcacacttttcttcaatactttttaaaattgtgtgtgtgtgtgtgcctgtgtacatgtgactcattcatcactagtcaaaaatagaggctaaatacaaaggcacttcgaaaatgcattcaggacaagtattacagtggcaaaggccagttcccaaggagtgtgagctgtgttgtctcgcttagggccagcatctcctttttgctggaactctgaatgcttttcagaaaatcttcatgagattctgatgacttatscattgtatttggaatgtaacctgatacctttccagcacatcattttgttaaaaatgctatgagtatttggaatgtaattagacac

SEQ ID NO: 123892 - DNA, 602 bp, Homo sapiens
gtgtggtattgacataataagacatataaatgaatgaaatagaattgagggtccaaaaaacatatgcttacagttatggtcagcttgatttacaagggttctaagataattcactgggaaaaagaatggtttttcaacaatgttagattaactagagagacacatacaatagaatgattttggacccatttctcagaccagatactgaggtttaactgaaaacatatcatagatctaattaaaagactaaaactataaaattctttagaaaaaaatcttaggtggaaatagtatgatcttgcagttggcataagtttctttgatatgatactgaagcacaagcagcaaaagaaaaagtagatgaattgaatttgatcaagattaggactttttgtttcaaaggacacctaccatcaaraaggttacaaggccgggtgcagtggctcacacctgtattctcagctacttgggaggctgacgtaggagaatcgtttgaacccgggaggccgaggttgcagtgagccgggattgcaccactgcactccagcctggtagagcaagactcattctcaaaggaaaaaaaagtgaaaaagactacccac

SEQ ID NO: 123893 - DNA, 572 bp, Homo sapiens
taaatttcataaataggtgtatcaaagttaaatgcgtacacatatattttatttacattttatggatttaaccactagtgaatatggacagacatctacaaaataaaaattatacacacttatatgtatatgtgtgtttatatttgtatgtgtcaacacacatactaaatacaatattgaaccttataaatacagtttgcctgctttgaagcacccattgaacacttaaaaatgactacttagtagggcatacccgcaaaactaaaataaaaaattcaagtatagaaaaatacagacctcattattgtactgttaaataaaacctggaaatcgataagaaatatagaaactgaaaaccacaaaccacttaggaattgatttaattaatttcttatttttgtctttctctagttttatacaaggattggactgtgattgaatttgaattgatattctcaggcctaggggttgtagcgtcctagtatagtaacggcttcttagattcttcagcatcttttattaktagtagtagtagtagtacattttctgttttcttatacctggttggcagt

SEQ ID NO: 123894 - DNA, 545 bp, Homo sapiens
ttaatttcaacagtttataatcaccttaataatgaagctgtaagtaccacarctctgctatatgactggctgatatagagagataaaacagatacataaaagccatccaaggaaatgataccattaatcatttttagtagtataggaagaccaaaaggaatttctataaaaagaaagtagatggggaaaatcaagaaaccttttacagaatcaccatagatgtgatttgaatcaaaaaccaaattgtctatgttgctacgtatgattctattgagagcttagatgtttaaaaacgtaatatttgcacaaccctataaatataccaaaaccactgagtgcactttataaggtaatgtttgtgatgagctatatgttagtaaagttgcaacaaacaataaaacgtaaaagaaaataaatcagcaagggaaaagaagtccctcttcttaaaggaggatagttgaatgcaggttgaggtaaagacttgggagagttggccgggtgtggtggctcatgcctgtaatctagcactttgggaggccaacgcg

SEQ ID NO: 123895 - DNA, 545 bp, Homo sapiens
ttaatttcaacagtttataatcaccttaataatgaagctgtaagtaccacagctctgctatatgactggctgatatagagagataaaacagatacataaaagccatccaaggaaatgataccattaatcatttttagtagtatagraagaccaaaaggaatttctataaaaagaaagtagatggggaaaatcaagaaaccttttacagaatcaccatagatgtgatttgaatcaaaaaccaaattgtctatgttgctacgtatgattctattgagagcttagatgtttaaaaacgtaatatttgcacaaccctataaatataccaaaaccactgagtgcactttataaggtaatgtttgtgatgagctatatgttagtaaagttgcaacaaacaataaaacgtaaaagaaaataaatcagcaagggaaaagaagtccctcttcttaaaggaggatagttgaatgcaggttgaggtaaagacttgggagagttggccgggtgtggtggctcatgcctgtaatctagcactttgggaggccaacgcg

SEQ ID NO: 123896 - DNA, 520 bp, Homo sapiens
cattaaaagacaagagagtcaakcacattgacgaatggtgacagattctgccacaaaaattataggaacccaaagttgagatgaaagcatagcacccatcttaaataaactcccaacttcccaaaagtaaaatataagcaaatattatgatagagtaaatgaataatagaaatagagagaaaatacattaattttaactattaccttgtgatattgtagaacatatatgcttatttaccccaaaacaacttcaagatcgaaagtaactaaaatgtcaaatgaacttgatgaaactcagtcatatacacataaaatttcaactgtcttgttaaagtcaatattcaatattgagattaaaaaaaaatcaaggcatttttccctttttgctttcctgagataatcaatatcattggaaagtcaggtttcctattctgcttttagccttcaaaatttgccaaatcccaggaaagacatgcctctaagatataaaaataactgtacaaacttagttaataaggac

SEQ ID NO: 123897 - DNA, 520 bp, Homo sapiens
cattaaaagacaagagagtcaagcacattgacgaatggtgacagattctgccacaaaaattataggaacccaaagttgagatgaaagcatagcacccatcttaaataaactcccaacttcccaaaagtaaaatataagcaaatattatgatagagtaaatgaataatagaaatagagagaaaatacattaattttaactattaccttgtgatattgtagaacatatatgcttatttaccccaaaacaacttcaagatckaaagtaactaaaatgtcaaatgaacttgatgaaactcagtcatatacacataaaatttcaactgtcttgttaaagtcaatattcaatattgagattaaaaaaaaatcaaggcatttttccctttttgctttcctgagataatcaatatcattggaaagtcaggtttcctattctgcttttagccttcaaaatttgccaaatcccaggaaagacatgcctctaagatataaaaataactgtacaaacttagttaataaggac

SEQ ID NO: 123898 - DNA, 565 bp, Homo sapiens
ggaggtgattgacaatagtaagcatatgatttatttcctcatctttatgacatctcacwctggtccagaccaagattacttaatattcagattaatttcatgaactgctatattactccagcaactcaaatccaaaatagatgaaaaggaaactaaagaaaactggacagccattgctgcacctattgtatagttacaaatgctgactacataccaaaacactgtttaggtgacttataattctggaatgtcacatacgaatttaagaattgctggccaggcgcagtggctcacacctgtaatcccagcactttgagagacccaggcgggtggatcacctgaggtcaggagtttgagattagtctggccaacatggtgaaacccccgtctccagtaaaaatacaaaaattagccgggcgtagtggtgcgcgcctgtagtcccagctgcttaggaggctgaggcgggagaatcgcttgaacccgggaggcggaggttgcggtgaacagagatggtgccactgaactctggcctgggcgacagagcaagacttcgtctcaaaaataa

SEQ ID NO: 123899 - DNA, 630 bp, Homo sapiens
tgttagcagtggcacaagatcttacagaggatgaagaaacagtagaagattccataattgaggatgaagatgatgaagccgaggtagaagaagatgaacccacagatttggttagtgttacatactatttaatatatgtaaaatgtatgtaattgtattcatctgttctcatgctgctaataaagacatacccaagactgggtaatttataaaggaaaaaggtttcattgacccacagttcagcatgactggggaggcctcaggaaacttaccatcatggcmgaaattgaagcaaacatgtccttcttcacaaggtgacagcaaggagaagtgcagagcaaagggtggggaaagccccttataaaaaccatcagatcttgtgagaactcactttcacgagaacagcatggaggtaaccgtccccgtgattcatttacctcccaccaggttcctcccacgatgtgcagattatgggaactacacttcaagatgagatttggttggggacacagcaaaaccgttatcaatagtacatctagaatttatccttacttatttatttttagagacagagacttgctctgttccccaggctggagtgcagtggcacgagcatagctcactgcagcc

SEQ ID NO: 123900 - DNA, 630 bp, Homo sapiens
tgttagcagtggcacaagatcttacagaggatgaagaaacagtagaagattccataattgaggatgaagatgatgaagccgaggtagaagaagatgaacccacagatttggttagtgttacatactatttaatatatgtaaaatgtatgtaattgtattcatctgttctcatgctgctaataaagacatacccaagactgggtaatttataaaggaaaaaggtttcattgacccacagttcagcatgactggggaggcctcaggaaacttaccatcatggcagaaatkgaagcaaacatgtccttcttcacaaggtgacagcaaggagaagtgcagagcaaagggtggggaaagccccttataaaaaccatcagatcttgtgagaactcactttcacgagaacagcatggaggtaaccgtccccgtgattcatttacctcccaccaggttcctcccacgatgtgcagattatgggaactacacttcaagatgagatttggttggggacacagcaaaaccgttatcaatagtacatctagaatttatccttacttatttatttttagagacagagacttgctctgttccccaggctggagtgcagtggcacgagcatagctcactgcagcc

SEQ ID NO: 123901 - DNA, 470 bp, Homo sapiens
tccttacttatttatttttagagacagagacttgctctgttccccaggctggagtgcagtggcacgagcatagctcactgcagcctcgaactcctgggctcaagtgatcctcttgcctcagcctcctgagtagctaggactaccgtcatgccccaacaagcccggctaatttttgtaatttttttttgtagagacagggtcttgctatgttgcccaggctagtctraaacttctgggctcaagtgatgatcctcatgcctcggactctgaaggcactgggattatgggcatgagccaccacacctggcctagagcttatccttatacaaaaatttaaaatcccaacttttagaggtttgttaatgtgatcaaagtgaattgaagttgggagaataggcaccagtcattgagaacagagcataagtattttctggaacagggaaggagacatgaaatagttaacaattcag

SEQ ID NO: 123902 - DNA, 550 bp, Homo sapiens
atatttcttttctggatgttttcacagagccaaggatttgtgcagcgtgcagagtgcagagtgcagagtttttatttgtagctgacttcctgtctttggtttcataggggggtatattagcaaggtaattttgggttgaagctttggggtgtgatccagtaggtggttcttagatgtattggtcagttggtaggttgtatggcctccctatattttctcacagttgcagccatgttccctctcaatgccctgaaagtgtgggctcctcttccccttgagtgctggctgtagatcacagcttggcactcctgggatgcccactgcagctctgggatgatctcagggtttatgttccttctccaacctggaggcagcagaggaagggaccttagtagtggttgtggccaagggtcttctgcttgtttcttgggggctccacctcagatgcaggtcagcaattgctcaatgcaatcagcccaggatggagggtctgtgctatgsacccaagcccagggtttcctgtctgatgatgagcaggaggcatgggacc

SEQ ID NO: 123903 - DNA, 547 bp, Homo sapiens
ggaatggtaatgtctggggggaacayggggcattggagagagcactgaatccagagctggctcttcttgctctgtgacctcaggcaagttacttactctctctgaacctctaaagaagagaaattcctttacgagaaaaatgtattgaccaggcgcggtggctcacacctataatcccagcactttggaggctgaggtgggtggatcacttgaggtcaggagttcaagaccagcctggccaacatggtgaaacccagtgtctactaaaaatacaaaaaattagccaggcatattggcacacacctgtagtcccagctactcgggaggctgagtcaggagaattgcttgaacccaggaggtagaggttgcagcgagccaagatctcaccacttcactccagcctgggcaacacagtgagactgtctcaaaacaaacaaacaaaaaactacaaaaattagccaggtgtagtggcaggcacccgtaatcccagctactcaggagactgaggcaggagaatcaactgaacccgggaagtggagattgcaga

SEQ ID NO: 123904 - DNA, 621 bp, Homo sapiens
caatcccctccttttatagatgaagaaactgaagactagaaaaaataatagtcatacttgtccaagtttacatgctgtagtgaaattatctgtgcaayagcagtccttcatttaatattaaatacaagacattataatattttaccactcatctttattcttgaattctaaatttgtcagtaacttatatgtactcaattttttattttttggcattctgagttcaactgaattgtagcgtcatgtacataacacattgtgtagggatcaggttattatatgttaatttcctccatgctcctttgccatctagaacctgatctgctgttttaaacagcatgaggcctgttctcccatttaggctaacagtgggtgcagaagggttgaagcattatactttctaaactggttccttgttctggagagtatccatctgaagagattaccgctcttctggtgatcatcgccatcatcgtccaacacctgcctatgcaccatgtgccaggaattgtgcgaactgctttaatgtattatctcatgcagtctgtgtagtccacgcagctgctggtaaagaactctgtttcagagtaatacaaagagccagcaacagagaaagcataa

SEQ ID NO: 123905 - DNA, 567 bp, Homo sapiens
ctggcctataatccattcacttactttctgaggaaacagaaatgggggtgttgctggaatgatgtggagcagggaatttggtgtaatttccttgtgaaaagataatgactaaacctcctcgtaaatgaactaatagtattagaagaaaaagataccttatctatgaaatactcttagcaggatgttcctggtttaaggttgcttataaaacatcaatccagaatctgtggatttatggaaaatgagaaatataaaagctggctgacaatttaaggtgtattaggccaytcttgccttgctataaacaccagaggctgggtaattcttaagaaaataggtttaattggctcacggttctgtatgttttacaggaagtatggtgccaacatctgctcagcttctggggaggcctcaggaagcttacaatcatggcagaaggcaaagggggaacaagcgcatcacatggcaaaagcaggaacaagggagagagtatggggggcacactttacaacaatcagatctcatgtgaactcagagtgaaagctcggttattaccaagggaatagc

SEQ ID NO: 123906 - DNA, 566 bp, Homo sapiens
aggggtatgaatattaagatatttgactactatatagcaggagtcttagcccattgggctgcagtagtaaaatacccttaactgagtagcttataaagaaaagacatttatttctcacagttctggagtcttggaaatccaagatcaaggcattgacatatttggtgtctagtgaaggcccattttctggttcatatatggagacttctgggtatgtactcacatagttcaaagaacttaaggcagctttctagggactcttttataagggcaaactaatctcattcatgaaggctgagcccttatgatttaatcactttccaatggccccacctcttaatatcctcacatggtgattaggtttcaacrtatgaatttagagacaacacaaacattcagatgataatagccagcattatttaggtgcattcaagcattagtttatttaatcctcacaattatcctgagtttgttacattttgtcatttggaaaataaaacagaggaatcacacatcttgatctagggtacacagctggtgtgtaaatcagggcacacaaaatttaa

SEQ ID NO: 123907 - DNA, 552 bp, Homo sapiens
tcaaaacctcattgacagtattaggaagattatagaggcagaaaactaacctagatatttgggatctgtactcgacattccacctaatgtacctaacagacatctactgaactttccaccccaaaacaatagcataaacattctyctcatatgcatatggcacataccctaaaatcgaacacacaagaggtcataaaacaattctcagcaaattcagaaaaattgaattaataccaaccacactctcagaccacagcacaatcaaaataaaaatcaatataaagaaaattgctctaaaccatataattacatggacattaaacacctgttccttaatgacttttggataaacaataaaattaagactgaaatcaagaaatctttgaaactaatgagaaaaaacacacatgtattaagaatctctggaatacagctgacacagtattaagagggaagtttatagtgctaaatgcccacatccaaagttagaaatatctcaaattaacaacctaacatcacagatagagtaaaaaacaaagcaagccaaatcca

SEQ ID NO: 123908 - DNA, 552 bp, Homo sapiens
tcaaaacctcattgacagtattaggaagattatagaggcagaaaactaacctagatatttgggatctgtactcgacattccacctaatgtacctaacagacatctactgaactttccaccccaaaacaatagcataaacattctcctcatatgcatatggcacataccctaaaatygaacacacaagaggtcataaaacaattctcagcaaattcagaaaaattgaattaataccaaccacactctcagaccacagcacaatcaaaataaaaatcaatataaagaaaattgctctaaaccatataattacatggacattaaacacctgttccttaatgacttttggataaacaataaaattaagactgaaatcaagaaatctttgaaactaatgagaaaaaacacacatgtattaagaatctctggaatacagctgacacagtattaagagggaagtttatagtgctaaatgcccacatccaaagttagaaatatctcaaattaacaacctaacatcacagatagagtaaaaaacaaagcaagccaaatcca

SEQ ID NO: 123909 - DNA, 552 bp, Homo sapiens
tcaaaacctcattgacagtattaggaagattatagaggcagaaaactaacctagatatttgggatctgtactcgacattccacctaatgtacctaacagacatctactgaactttccaccccaaaacaatagcataaacattctcctcatatgcatatggcacataccctaaaatcgaacacacaagaggtcataaaacaattctcagcaaattcagaaaaattgaattaataccaaccacactctcagaccacagcacaatcaaaataaaaatcaatataaagaaaattgctctaaaccatataattacatggacattaaacacctgttccttaatgacttttggataaacaataaaattaagactgaaatcaagaaatctttgaaactaatgagaaaaaacayacatgtattaagaatctctggaatacagctgacacagtattaagagggaagtttatagtgctaaatgcccacatccaaagttagaaatatctcaaattaacaacctaacatcacagatagagtaaaaaacaaagcaagccaaatcca

SEQ ID NO: 123910 - DNA, 553 bp, Homo sapiens
cagagaaaaaagcccaaagtgaggatgagcagcagtttcccagcatgctgagggctggacttggggcccaggacaaaagtcactagatctacttttaggagacatcttcccaccagattcttaagctggtaggtgggatgctggtaataacctcactcttctagttcatagtctgagaggcatacaccctctaaacctcttttcttacctctacctgggccatcaagtttggccttggaccccatttttctggcttggtgggtagartggtactctctctgagagcaatgggacacttccctggactctgtgggggaagcctacatcttttgtatctgatcaaaatcctgcttccttttccatccatgccttaatgtccaaaggtgtgcaaggcccagagggtggaaagtctgggccacctctgacctatcagagctaccaggcaaagcaatagaagctgagtcatggtttctggattagcttcgaggaataacttgggaagggtcatgctcctcagactttgacatggttgcttggggatcttaggggcttc

SEQ ID NO: 123911 - DNA, 536 bp, Homo sapiens
attaagtaggattagccaggcaaagtggctagaggtagggagtaaagagagtgtttcaggcaaaagaaacagcatgtgcaaagctcctgtggccaaaaagacatggcatttggaactcaaaggtggccagtgtgggccaggcatggtggctcacacctgcaattccagaactttgggaggcctaggcaggaggatcacttgaggccattctcaggtattctgttagagcaacacaaaatggactaagacataagattattggctaagagtgagagggtggacacaggggttggaggtttaagaaaagaatggagaagatttgaaatagtcatcctggagaatgaaaagtactaaagaaatttagtacctgtttggattgtgaagcaatgttgaaggcttgattgagattggtgatttatagtggagcakgtcccgtttgtgacaatggaggtgggtggctgaggtagagtggaagagatggggcagtttaggaaccgggaagcccaggtgatggctgaattttaatttgtatactg

SEQ ID NO: 123912 - DNA, 451 bp, Homo sapiens
agcaatctgtttccttcaaagggtctgtggattctcttggctcctggtatattcccgcagtagttcttggagcaaatgttcatgatgagagttgacattaacattagtatgacgtttttgaaatagtttctctgagtttagcatagagtccattaacaaaactcataaataaagcaggttctatactgcttatctagggttagaacctgaataattgttccagatgtttcctaagtgatgtttatagttagaaaaagattcatctccttgctgtctgcattctcgaatctttgtccggtcgataattggtgaaaacgccatgggaataaaatctcattgaagggaggaggcaattaaagtcctacasctccctgtctttgtatgctgatgatcagagacataagaccaaagtcacgagtacttctaaggaactggaggactggcaaagtga

SEQ ID NO: 123913 - DNA, 606 bp, Homo sapiens
atatgctttctatttgtatttgttgacatgtcaaacgttttggaaaggaatgcctctctgcaaacatccatagatccatgttacatatgcatcatttgttcataaccttgaggtgacaacagaggcatctgaaacattatccaattacacactcatacctgatgataacccttcagtgtgtgcttattatgtagaaagaggcttttaatgatgtctctattttatttcccatcagagtcgtaaaatataatgcaaaaccaaatggtaatgtagaactaagagaaaatcaacacttcagtcttgcacttctgataaccttatcagccacattcacaacaagacattagagcgcaatagatgaaggcattttctgcaactaaaatgaattgctgtatatttcttttaagtcttgtcctctgtaaatcgtgtaagttgaatatttcctctaactcaaaatcacrcttttactctgacaaattgccttgcaggtgatttcttcatttcatgaataattatttcatccctgattttattgttacctaagtagggcagagcttgctttattttgtttttctttctcaaaggaataaaggaatatcattcctt

SEQ ID NO: 123914 - DNA, 641 bp, Homo sapiens
tactcaggcattttgattctctctctagtgctatttcctctttttctgtagcttttatttgcacttgaccctatgttttagaaagtgcacacaagtcagtattccagacatcccagggacttgaagagctgatctaatgtctgtgttgcaagataaaaaacagaggaattttgttgaacccataaaaaggatgacattttgcctggccctgagctgttctgttcaaaattgaagcttttgcagcttgcggctycttgatttgtgagctagagagcatcatatcttggccattactgaatcataaaagttctctgcctcttcccagcccattttatttaaaaggacaaagagaaaccctttatcttataaaatgcattttctttttattttccttcattgccggaatgtattctgtaagggttcagtgaaaacatatgtaaatggtaatttgaaaagaccattgagctgatacaagaaagggttatttgggtggttagattggaatatgagtcatgggaatagggtactttgcagtacttttttgtgccatataatcttgtgaaaggctagaaccctgtacatattaattattttcatcatctataaaatggtaatatagagccacataacacacccaggtc

SEQ ID NO: 123915 - DNA, 641 bp, Homo sapiens
tactcaggcattttgattctctctctagtgctatttcctctttttctgtagcttttatttgcacttgaccctatgttttagaaagtgcacacaagtcagtattccagacatcccagggacttgaagagctgatctaatgtctgtgttgcaagataaaaaacagaggaattttgttgaacccataaaaaggatgacattttgcctggccctgagctgttctgttcaaaattgaagcttttgcagcttgcggctccttgatttgtgagctagagagcatcatatcttggccattactgaatcataaaagttctctgcctcttcccagcccattttatttaaaaggacaaagagaaaccctttatcttataaaatgcattttctttttattttccttcattgccggaatgtattctgtaagggttcagtgaaaacatatgtaaatggtaatttgaaaagaccattgagctgatacaagaaagggttatttgggtggttagattggaatatgagtcatgggaatagrgtactttgcagtacttttttgtgccatataatcttgtgaaaggctagaaccctgtacatattaattattttcatcatctataaaatggtaatatagagccacataacacacccaggtc

SEQ ID NO: 123916 - DNA, 598 bp, Homo sapiens
gtttagtaagttcaaaggatcaatctcattataaagaaaatgtcaagccaatttgttaatccttttaaactaaaagtcaaagattattttataatgagttctttattgaagcaaaattcatctctttatattttctatggtctgcaaatttccttcaatatttattttattcttctgaacaaagaacttataacacatttccccccaatgacaaatcattacatttaggaaaaggaagtgttgtctttcaattttactattgattgtttctctctccactttaaatatatgagcatattagcagaattaggtaaaaaamatcctcaatttaatcctatgaaataataatttgatttaactcatatatttggaggatctttattttctctttattttaaactaaaaggaattgtttctaataagtatgaagtgatagcaggagaattccaaatgtcaaatctatttggtctttattatgtgaatagatttttccaatgcttacattaaacttaatttaataacattttctgcttccacttatagcatttttctatacttcaggtaaatcaattttatttaatcagccaagatctaagct

SEQ ID NO: 123917 - DNA, 608 bp, Homo sapiens
aatattttagaaatcaacagtccattctacttcctcctattccaacccattcccatgtgttaattcttggcatccccattttacatatttttctctattttataaatttatttgcataaagctcacacatttcttatcccaggtatccatttcctttgtttcccttttctcctacttcagaaccatgtgccttgatagtctcttagttctctgagcttcactgtactcatttgtgaaataggcatgaaaataattcccacttttagagatgttgtgaagagtaaatgacacagagactttaacacaatatctgatgcggaaagaatttaataactgattagtcagaaaaaaaagagaagctgtatactcaaaattcttggtggtaatagtcgtgatagtagtagcaatagaattaaaactttcctttatttaaaaaatcaatctattctactgattacrtatatacttaggcctgacttcatagcataacaatccatttcaaatgtattcaattttaagtttattcaaaaatcactcactaagcttaatattttctaggtgttggatttaaacatataaataatacacaccacttgcctttgagtagt

SEQ ID NO: 123918 - DNA, 558 bp, Homo sapiens
aacttaaatttttcttgcatcatttgttgcttattctgttctcttttccctttccttccatgtctcgtattatttaaagtcacttaaagtgacttaggagatgaaaggacatgaatatgcatatcaaaaataatttagtggaaaaggcagacatggaatggaaatgarcataagatatcaacagttcccatgccatttattaaaaactgagaccaagaaatcatttatttttatgccttaatttatcaattttatgcttctttattttcttgtctttcttctttccttctttcctttctttttctgtttatttttcattttacttttttactcttctaagtattaatccaataaatatttattgattttacattgtataccagatactgttccacataatgttataggcaggaaaatattctggtaaagaggtaaaaaaaatccttgtgcatataacttttactcagtgggtttcgttaatttctaggcaattgtttacatactgagagatatgaataaataaataaacaaaacagttatatgatatgatgacagaat

SEQ ID NO: 123919 - DNA, 648 bp, Homo sapiens
cccaatttcactttttttttttttgatatatacccagaattgggattgctggatcacatgatagtttatttttaaaaaattttcaggaatctccatgttgttttcatagctctacatcgttttacgttcctacaaacagtttacaaggattccaatttcaccacaacctcatcaaaacttcttatctttagtttgtttttttaaaaaataacagccaacctaacaggtgtgaaattatatctcattggtatttttaatttgcattttcctgataattaataatgttgaacatcttttgcatactggttggccatttgtaggtgtaattcagagagatttcttttcaagttctttgtcaatttttaattgggttattagttttttttgctatttagttataggtgtttcttatatttttttaaatgaactatttatcagatatatggtttgccaatattttctcccgttctgtaagttgcctcttcattctattaattgttttctgtgctgtgaagaagaaactttttagtttgatgtagtcatacgttatttttgcttttgttgcctgtgcttgttgcttgtstcatatacaagaaatcattcccaagaccatatacagaagagttaccccttcattttcttacagga

SEQ ID NO: 123920 - DNA, 575 bp, Homo sapiens
agagaataaaagtgcttaaatcaaatactttatcaggacaagatgcttcttcaagttcacttaagtaaaatctttaataaataagctggctttaaaattattggtaaaataagattagaaatgtcttaagaattgttagcatttttgtttgcacttattgcacaagtggttttgtgcttatccctgcagaatagtataagattttccataagggttataaaactataaacctggccgggcacggtggctcacgcctgyaaccccagcactttgggaggccgaggctggtggatcacctgaggttgggagttcaagagcagcctgacacacacaaaacaaaattataaacccagcccaaaacagaatgatctttgcttgtataatttttaataaataagccatgtaatattgttggttaaataaaaacagctaactactgagatattggttaaaaaaaataactttatatttaaccataagtttccttacttaggtaaacacctgaaattcatagtttataacattggttaacagggaattaactttaagtgatgactgtcacagtgttcataaat

SEQ ID NO: 123921 - DNA, 553 bp, Homo sapiens
attgtagcactcttgttaactctggggctttcaaattcaactaaaatgacaccctaaccaaacaaaacaggactgtggacagcctctgccaccagcctcacccctacccctccccactccagtctagcttcctaggctgtggattagcacatgagctggggagagacttcgctaaaggcaaatgagtagaaagatgggtactgaatacaagtcttgggcccccctgcattatattacatcccagtgcacaggcaggcaggaggctgtggaacgagggtgatgatagacttgggtcaagggcacgtgaccttgggctaaggatactgtctcatcattgtgagacttctcaactgcgaggcaggggcaagaatgatcacatcactgagttgtgaggatggcatcttcagactattctayagttatgtgctgcatgatgatatttctgttaacgacagagtaggtacgacagtgtatggtatttttgctgtgccttttctatgtttagatgtgttaatacacaaattctcatccttgtgttacagttgcccacatc

SEQ ID NO: 123922 - DNA, 553 bp, Homo sapiens
attgtagcactcttgttaactctggggctttcaaattcaactaaaatgacaccctaaccaaacaaaacaggactgtggacagcctctgccaccagcctcacccctacccctccccactccagtctagcttcctaggctgtggattagcacatgagctggggagagacttcgctaaaggcaaatgagtagaaagatgggtactgaatacaagtcttgggcccccctgcattatattacatcccagtgcacaggcaggcaggaggctgtggaacgagggtgatgatagacttgggtcaagggcacgtgaccttgggctaaggatactgtctcatcattgtgagacttctcaactgcgaggcaggggcaagaatgatcacatcactgagttgtgaggatggcatcttcagactattctacagttatgtgctgcatgatgatrtttctgttaacgacagagtaggtacgacagtgtatggtatttttgctgtgccttttctatgtttagatgtgttaatacacaaattctcatccttgtgttacagttgcccacatc

SEQ ID NO: 123923 - DNA, 591 bp, Homo sapiens
ttcagttgcttgtccttcatttttttcccctttggaccacaggttggattgtgtattccttccactgttcttgacatactgttcttctctcatggtggtgggtgataattttgggaggctaatgagaacattagcttgatgtagttagcagagctaaagtccaagctagtatcctcactgagagggatgaaacacaaatggataattgtgatggtaaatttttcaaagggactgtaatgagcaggggacagttttggtcatgtgttctcagctttgtttgggaacagccatctcatctgttttataacaataaaaccattggcttgggcatcacctattgtggtaaattcctgaaaatgtgcaaaggcctgcattccatatgtttcaaaataaaaggcatgggcacgtaaatgatggtgatttttttccttcttcaggaaatacctttgatgaataagactgcatcagcatgctgtgcttctgtggagyggataatgaggcatttgtgatgcagtgttggggtctgctttcacactggcattcacaatccaagcaaaattatttgactgaaaagtaacagacaatacataa

SEQ ID NO: 123924 - DNA, 559 bp, Homo sapiens
catgaggtattaaagtctcccaataatattttatgggggactaagtcttttgaagatctctaggaacttgctttatgaatctgggtgctcctgtgtcgggtgcagggtgcctatatacttacaatagttagaccttgttggattgaaccctttaccataatgaatgcccttttgtgtctttttgatttttgttggttgaaagtctgttttgtgcacgccaatgggtcttggttctttatccatcttgccactctgtgtcttttaattggggcatttagtctatttgcatttaaggttagtattgacatgtgtgggtttgatcctgtcatccatgtcatgatcctatcatcatgatgtcatcatgatggttattttgcagacttgtttatgtggttgctttatagtgtcactggtatatgtactttagtgtgtttttgtagtggctggtagtgatctcccctttccatgtttagtgcttccttcaggagctcttgcaaggtaggtctgstgataacaaatttcctctggatttgcttgtctgaaaaggaccttatttctc

SEQ ID NO: 123925 - DNA, 474 bp, Homo sapiens
ctaaactctataaggtaataagttttattattactaaccaagtatattttctgaaggaagcgtatcctcttagaatgtagttgtgggatcctaaatgcaaaaacaccttgttttctcataaatgaatgtcctctggtttgcatatytttcaaagcataattccaagaaaaacaagtgcaatttgatactactggatatcatctttgtgaatgaagccgaataaccaattagccttttttctttctgtttttggaagtgatatctcagtatcaactagctcaaatagaatagattgcaattgttaagtattttccaaatatgttcctgttaaactgtgtttccatactaacgtaattattaactttcttgcccaagcaaagggtgggtgtttattcattctaaagtttattgagtcaaatctggttcataattcaattgctgagatactttatatcctaattttatcaaataatg

SEQ ID NO: 123926 - DNA, 610 bp, Homo sapiens
taaacagaccacatactgattctgacatatatatatatcacatttttcatatatatgtaaaaacagaaagaataatataattataatatagaatataatatataatatagaataatataataataatatagaataatataaattaaaatcaatggataaagacyaaagtagtgtaatatcaatgtgaattgattaaactataatattaaaagtaaacagtccttatatcagcttccaaagccaggaccaagctacattctgtgtacgcatgctgcacataaaacacaagtgatcagaaagttgggaagtacaagggtgaataaagacatagccaaatgcaccaagggggaaagcaggagtcatggatctaatgataggcagggttgaattcaaaatgtaatcaaacaaagagcaccttacaatgaagacacaatagttttaaatatatacctacatttctaaccagtacactgaatacgaataccaaaacacaacacaatatagcattggcattaataaaacaaagattataggactaataagctaaaatagagaaacagtacctgtaggaaactaattcacttttccaaacccatgaagaacaaggact

SEQ ID NO: 123927 - DNA, 455 bp, Homo sapiens
acattctctcccctggatattgttggcacaaacacctcactctttcttatgaatgtccctcaaatctgcaaatctrcattattctggaagttaattattttgctgatcaggccaatggtgaacaaaattttctctggtcaccaaattcaccaggcaatgctttttttttttttttttttcctatgggttagggttgacacaaacccagtactgagagttcaactgtcttctcagccttagcctaggaaggtcaggatgaaatactccagattcaaatgtgtgcctagaccagtcctctaaaccaagggtaatgtagaggagactgtagaaactgggcttcacatacaaacaaataatttatttggactgttgtaaaagcattaagctaatccttaggaaatagggaggtatcacagctgtcacttgaaaatctgtcacctcatgaggggagcctc

SEQ ID NO: 123928 - DNA, 455 bp, Homo sapiens
acattctctcccctggatattgttggcacaaacacctcactctttcttatgaatgtccctcaaatctgcaaatctacattattctggaagttaattattttgctgatcaggccaatggtgaacaaaattttctctggtcaccaaattcaccaggcaatgctttttttttttttttttttcctatgggttagggttgacacaaacccagtactgagagttcaactgtcttctcagccttagcctaggaaggtcaggatgaaatactccagattcaaatgtgtgcctagaccagtcctctaaaccaagggtaatgtagaggagactgtaraaactgggcttcacatacaaacaaataatttatttggactgttgtaaaagcattaagctaatccttaggaaatagggaggtatcacagctgtcacttgaaaatctgtcacctcatgaggggagcctc

SEQ ID NO: 123929 - DNA, 580 bp, Homo sapiens
ggatcccatgccccttcctctagaaaatccaaggttactcacctccaaggcccccgcccacagaggcaaacatcagtgtgacaaacagcccgaagagctggtgcatggcctgtgacgtggcactgcgctggccctcggctatgagtggaaacacactctccaggctgcagggagaccagatagaggaaaggcaggggtagggagagagagggatgcagcccggggccagggctgctcatggcactggaactcacactggggaacaggaagtggccaagagggtctcgagggtgcatgccaggctgartctcacctccaggccactgctcaagccaggcccacagcctggaacaccttcccacccttgtaggccagcagacacctaggcaccttttaagactccatttgcgggttgcttttgcccacccttgatgtgcaaaaatagatcctaaaggtcattatctcttactgacccttcagtaacaagtaacactacttgaagtcatttgttccatgaccttctgctgcacttgatagaggaccaggaaggcagtttctgggttggttttgttaactccaa

SEQ ID NO: 123930 - DNA, 564 bp, Homo sapiens
ttaaggacatcttatttgcttccaagttttggcaattataaatacagcttctgtaaacatccatgggcaggtatttgtgtgggcttaagttttyaacttatatgggtgatactgacaaatatggccatagattgtatggtaagagtatatttagtttagtgtgaaactgccaccctgtttccaaagaggctactttatcagtgttcttgattttggccaatctaatatgtgaatagtggtatcttgttgttttaaatttaattgaaatttaaacaagcttcaacacaaatattatcaatttagctatttgtcaactattttaatattaaaatattattcagatttattttataaacaattctcatcaatttcaatcagataaacacctcatctcaacatttcatgcaggtgaaaataatttaaccatacattattatttgattttgatttcagtccatatccttgttattgccttaccacagaataagataatataaaatataaagtttgattcctaatactgtgagttttcagataaatttagtttttattgtgaattgatga

SEQ ID NO: 123931 - DNA, 564 bp, Homo sapiens
ttaaggacatcttatttgcttccaagttttggcaattataaatacagcttctgtaaacatccatgggcaggtatttgtgtgggcttaagtttttaacttatatgggtgatactracaaatatggccatagattgtatggtaagagtatatttagtttagtgtgaaactgccaccctgtttccaaagaggctactttatcagtgttcttgattttggccaatctaatatgtgaatagtggtatcttgttgttttaaatttaattgaaatttaaacaagcttcaacacaaatattatcaatttagctatttgtcaactattttaatattaaaatattattcagatttattttataaacaattctcatcaatttcaatcagataaacacctcatctcaacatttcatgcaggtgaaaataatttaaccatacattattatttgattttgatttcagtccatatccttgttattgccttaccacagaataagataatataaaatataaagtttgattcctaatactgtgagttttcagataaatttagtttttattgtgaattgatga

SEQ ID NO: 123932 - DNA, 546 bp, Homo sapiens
atcaactgagcccaggaagttgaagctataatgagtcatgattgctctactgtacttcaccttgaacaacagagtgataacctgtctcaaaaaaaaaattgktcaatctaatgccacattatattttgctttatatttggggtatattttatttcatagtttattatttttcccttcatgagttctaatagttttctcctcgacctaaggttaatccacttttaccatatgcttatcatctagtgcatagaacctccctgtttgtcaaagcactctaattgttgctttttattcatttcagaatgaatgttttctatatgcctgctgcaatgcatatcttttcctgttacttattttccttgaactcatggattagagtttctcttctatattttttgtttgcaattttcttccttatttgttataattcaccttcaattaacttgtttggctaaagtatatgaaaacaaaacctttggaattcttgcacatgcaaaactgttactatgatgctctcacatatgtttgtataatgtgtataattgc

SEQ ID NO: 123933 - DNA, 546 bp, Homo sapiens
atcaactgagcccaggaagttgaagctataatgagtcatgattgctctactgtacttcaccttgaacaacagagtgataacctgtctcaaaaaaaaaattggtcaatctaatgccacattatattttgctttatatttggggtatattttatttcatagtttattatttttcccttcatgagttctaatagttttctcctygacctaaggttaatccacttttaccatatgcttatcatctagtgcatagaacctccctgtttgtcaaagcactctaattgttgctttttattcatttcagaatgaatgttttctatatgcctgctgcaatgcatatcttttcctgttacttattttccttgaactcatggattagagtttctcttctatattttttgtttgcaattttcttccttatttgttataattcaccttcaattaacttgtttggctaaagtatatgaaaacaaaacctttggaattcttgcacatgcaaaactgttactatgatgctctcacatatgtttgtataatgtgtataattgc

SEQ ID NO: 123934 - DNA, 601 bp, Homo sapiens
cctcattttctttttgtgtttctattttcccaccaatccttgccagtttgctgtttatctgttcctgacagcattttgtttctgagtcctttgatcttttgacattagcagtatatcagaaaagccagatttcatttgagtattttttaaattttatggaaaacgctgtattgcactgtgatgtattcattatttttatgttcttcttttgccttttcttagtctaattattttccctttatttttattcttcatgcatttttggatttgcccagtgtctgttgtgattcttaaccacattataagttatttatgtgcaagttatttgtgaaatattgtgaattcattatctgtttatattgggcatgcattagggttgagctgtaatccataggatactttctcatcaaatgccatatstgcagatataactcacaggcaatcttgcaaggtatttttaggctcagtaaactccatatcgtataaaatttgtgttcttaatttagtctttcctttttctgttttctggcagaaaacaattattgagtttttgtgacatattttgcctggcactgtatatttatcttttttttattttcaa

SEQ ID NO: 123935 - DNA, 542 bp, Homo sapiens
  misc_feature (1)...(542): n = A,T,C or G
ggaaatggacatcagcttccccaccattctgggacccttcacagaacacttcactcctgtctcatcccacaggaaacattgggatactgacagggttagattaactgtggatcggttagaaccaaaaatgaaggtgcagttcacagtgaccagtgtgcagatcatggcaatttctctgcacttgaaccaccagaggttccacaccagagaaactagccaacatcatactacaggaagcatagtccacaggtttttcaggcatcaatctgtaaccatcttccagctattccccaggttgagcagcaactgcaggtcagtgattacctgcagagtgagcatttaccctgcccaaacccagacaaaaataagtaaaccaactaagtcttcctttaaatcttccccagactggctggcgactgcaggtcaacaattacccgtggagggagaattttgtcccacccaaccctagctgctgagtggtgactctgacanactttgcwgctctgcttaggtctacctcaggctaggaagcaagcccaaca

SEQ ID NO: 123936 - DNA, 633 bp, Homo sapiens
ttgtgtcaggcataatgatcaccttattattgtctttatttgaagattatgtatgatctcaggagatgtgtatgggtcaaggtgacatggggtggactcgtgatggttaataccgagtgtcaacttgattagattgaagggtgcaaagtattgatcctgggtgtgtctgtgaaggtgttaccaaaggagattaacatttgagtcaatgggctgagaaaggcacacccayctttaatctgaatgggcataatctaatcagctgccagtgtggccagaataaaaagcaggcggaagaacgttaaaagaatagactggcctagcctcccagcctacatctttctccaatactggatgcttcctgccctcgaacatcggactttaagttcttcagctttgggattcagactggctcccttgctccatagcttgtagatggcctattatgggactttgtgatcatgtggattaatactctttaatagactctgatatatatattttattagttctgtatctctagagaaccctgacaaatataacacatatttgaaaataattaaacttgattttaaccaatattatatctatttctagtatactaagtattgattatgttatcctaattatctgtat

SEQ ID NO: 123937 - DNA, 618 bp, Homo sapiens
cctcccagcctacatctttctccaatactggatgcttcctgccctcgaacatcggactttaagttcttcagctttgggattcagactggctcccttgctccatagcttgtagatggcctattatgggactttgtgatcatgtggattaatactctttaatagactctgatatatatattttattagttctgtatctctagagaaccctgacaaatayaacacatatttgaaaataattaaacttgattttaaccaatattatatctatttctagtatactaagtattgattatgttatcctaattatctgtattcttgcttatatcttaattattttctgttgatttatgaaagttttatgaagtaaattcatttttaatatatttctgtaagttctgacttaaatatttaagtgaaagtttttaatgcctcagtatgctcaactgttgtgttcatggtggacttcacttttgtaaatataaaaggtatgtgttgcactcacttaatagattcatcttcagtgtttattataagtattataattatgaccccccttctttttgctaccaatttcatgttatacatgtttatttttctatcttgttacttgttctattt

SEQ ID NO: 123938 - DNA, 633 bp, Homo sapiens
ttgtgtcaggcataatgatcaccttattattgtctttatttgaagattatgtatgatctcaggagatgtgtatgggtcaaggtgacatggggtggactcgtgatggttaataccgagtgtcaacttgattagattgaagggtgcaaagtattgatcctgggtgtgtctgtgaaggtgttaccaaaggagattaacatttgagtcaatgggctgagaaaggcacacccacctttaatctgaatgggcataatctaatcagctgccagtgtggccagaataaaaagcaggcggaagaacgttaaaagaatagactggcctagcctcccagcctacatctttctccaatactggatgcttcctgccctcgaacatcggactttaagttcttcagctttgggattcagactggctcccttgctccatagcttgtagatggcctattatgggactttgtgatcatgtggattaatactctttaatagactctgatatatatattttattagttctgtatctctagagaaccctgacaaatataacacatatttgawaataattaaacttgattttaaccaatattatatctatttctagtatactaagtattgattatgttatcctaattatctgtat

SEQ ID NO: 123939 - DNA, 576 bp, Homo sapiens
atatatctgagatattgctccatattagccatgcgtggcttagtctagcagttataatgtgtatgtttctgtgtgtcttcatgagactcacagacacctcaactatactagtgaacaagcatgagagcttagctgtattacaagtcgacattaacagatggatggccctaagcaaggcaaaatcaccacaacaaaacctagggaaagtgggggactgaagctttttgttgttaagccctattaaaaccctggcacacgcatatgcacacacacacccacccacccacacatacacatgtgcgcgcgtgcacacacacacacacacatatatatacacacatatatatacatatatacacatatatacatatatatacatatatacatatacacacacacacacacacacacacacayatatatatatatatatatatatatatatatatatatatcactcttaactatttcatgtcgggaaaaatagcaatatttttagattttcaacctccagttaattatgtaaaaacagcatgagaaaatgagtggaaagttatttttcatttgcagtgtgat

SEQ ID NO: 123940 - DNA, 569 bp, Homo sapiens
tactgttactggctgggtattggcacccttaagaatacacaatatgttttctgcagtctaaacttacttactaccatttccccacaaaagacctttatttttaagattgtgaccaggccttttttccctgtgttgttatgttccgaacatggggaaaactgtcctttatttcccctgaaagcactgtgcttcagagtcgcaacccaccagaacaccatcagctgctgagcttgtatggacccagattatctctactgctattcttctctgtcttaaatgtcgattacattatgattatctttctccttaattttttctctttttttgtgaccttaacacaattatgtagaagtcatcaagcaattgacatattctatcacctgtttggaygttgttatttcttatatataaactgcagttcctaatgcaggttgatatatattcaatgactattaattagaagaagcttatttcatatatgtatataattttaagtacataagtacatgtataataagtatggataacacaaaggtcaacacccaaggaaaggaaaacaacatattaat

SEQ ID NO: 123941 - DNA, 597 bp, Homo sapiens
caagttagagttacaaagctagagtgtgtcctcaagctggggcagctgggagaattttgtcattgggcttgggagggcagggatgctgagcacaagatggaagatcttgtgtgtgttttttctagagcaagctcttcctatcaagtcttctctgtataatgcttagcaccatgatgcatgcagttggatgctaataaatgtaactatagctactcagtgactatcaaggcatactcaaggcaagtcatttgacttgtagctgtgaccatggaatactcactgactatgggtaaggtttcctattcccttcagttgctgggagcaaaccagttccccatacctgggctcctgtgaaagagtctgttccctccccrttcttgcactgccagcaccatgtggctgcagcctaccagggcagcaacagagtgcattgcagaagctgctctcccctgactagtgtatggagggagggacatggcagaggaaggagccacctggattttagggtctggaagtctctcatatgtgacctcccagggcaatgtggcagccagggtgggcccaaggatggggactaatgataaacccacatagtgc

SEQ ID NO: 123942 - DNA, 597 bp, Homo sapiens
caagttagagttacaaagctagagtgtgtcctcaagctggggcagctgggagaattttgtcattgggcttgggagggcagggatgctgagcacaagatggaagatcttgtgtgtgttttttctagagcaagctcttcctatcaagtcttctctgtataatgcttagcaccatgatgcatgcagttggatgctaataaatgtaactatagctactcagtgactatcaaggcatactcaaggcaagtcatttgacttgtagctgtgaccatggaatactcactgactatgggtaaggtttcctattcccttcagttgctgggagcaaaccagttccccatacctgggctcctgtgaaagagtctgttccctccccattcttgcactgccagcaccatgtggctgcagcctaccagggcagcaacagagtgcatygcagaagctgctctcccctgactagtgtatggagggagggacatggcagaggaaggagccacctggattttagggtctggaagtctctcatatgtgacctcccagggcaatgtggcagccagggtgggcccaaggatggggactaatgataaacccacatagtgc

SEQ ID NO: 123943 - DNA, 562 bp, Homo sapiens
  misc_feature (1)...(562): n = A,T,C or G
aaatcaaaatttcattgaataaggctgtgtactcacaatattgacacattgtataaaatgttaggatggcctcagtagaagtagcaaattattgaattacatgttttttattataatgttaattgcaatcaaaaaacgctaacttttatacctttaaggtctgccttgatgttaaatgttagtagcatttagaaattaaaactattttgattagctaagggccatagtcagggtagaatgtgctctgtaaagaagcaaccaattttgaaagtaagttttttrcagaagcctactttgtgaacagttactgaatgttgggtttctancaacaaatcttgcacccagagcttgtaggttgtctactttttctctaaggaggcattttctctagggcccacagcagtgaatgacacatagtaggtacttagaaaataattgttgattgtctgggtggatggatgcaccacgggacattatataaaatgtatgccgtatctagctctgctataatgcaacttacattacttgcattattttacaaatagagcaaatttatggtctc

SEQ ID NO: 123944 - DNA, 561 bp, Homo sapiens
gtatgcttggtattatcctagtattagaaagattcctcaattaatgcatatccatttgctctcagtacacatatacatamatatgcacacacacacacacacacatatagagataatagagaaaaagatatggaatatatatatcatatatatgatatgatatgtatcacacatatattctatatcatatgtgtgatatgttgacatactgatatagcatacatactatatattgtatatcagctatatcacatttatatatgatctatatcatatatattatatatgatcataacctacagtatgatatatatcataggttttcatatatgatatataatgtttttgtatatgatatatatgaaatatggaatatgaatgatatatggcatatcatagatatttcatatcacatatataaagagaaaaagaactctgtgtgtgtgtgtgtgtgtgtgtatgcgtttatgcatgagctctggaataagccttctagatcttagttataacctcagcacaatgtgtgactttaggcaggttacctaacctaagacttagttt

SEQ ID NO: 123945 - DNA, 561 bp, Homo sapiens
gtatgcttggtattatcctagtattagaaagattcctcaattaatgcatatccatttgctctcagtacacatatacatacatatgcacacacacacacacacacatatagagataatagagaaaaagatatggaatatatatatcatatatatgatatgatatgtatcacacatatattctatatcatatgtgtgatatgttgacatactgatatagcatacatactatatattgtatatcagctatatcacatttatatatgatctatatcatatatattatatatgatcataacctacagtatgatatatatcataggttttcatatatgatatataatgtttttgtatatgatatatatgaaatatggaatatgaatgatatatggcatatcatagatatttcatatcacatatataaagagaaaaagaactctgtgtgtrtgtgtgtgtgtgtgtatgcgtttatgcatgagctctggaataagccttctagatcttagttataacctcagcacaatgtgtgactttaggcaggttacctaacctaagacttagttt

SEQ ID NO: 123946 - DNA, 566 bp, Homo sapiens
gtttttttgcagagggtagggggagctaattgggtcacatagaatggaaccttaatacttgcttaaatttagacttaaaatatgaatctaaaagaatgttttatgagcccagacaaaatataaagaaaaaattttatattaagaattccgaattgtcaatcctcttgaccatcttttgagtagatatgattgggtttaggctggtayggttaacaaaaaaacaattagtcccttagtagtataaaagactttttagaaaaaaattaggcgtgttttccagtatactcaatgttattggttgaggaaaggaatggcagcacaaattatgaggtggccagtccttcacttctgaatgctaacctacaggatgatactttcttctgacttttcttaataaattataagatttaaagtcataggcattctggtggtttgcagcctcataataacccttccagaagaacctaaactagtctcaggtaattatttgtctttcgaatctaataccttttctccaccttgccaagtcatttgatgtgcgccagttggtggaaggaaaattataa

SEQ ID NO: 123947 - DNA, 490 bp, Homo sapiens
gcaaatgttttctcccatctcataggttggctttcattctcttgattttttcctttgttgtgcagaagctttttagtttgtagttccacttgtcgactttttgcttttattacccgtgctttggtgtcattccaatgaaatcattgctaggaccaatgccatgaagctttccctatgttttctctaggatttttactgtttcacgtcttatgtttaagtctttaatccgttttgtaatttttttgtgtagtctaatataggcaaccaatttcattcctttgcatatgtatattcaattctcccaatatttcccaggatattgaagagactatcctttccctttggggcacccttggtacccttgtcacaaatcagttgaccatatatgtgtagatttatttctgggctttgtattctgttcsattaatctatatgtctgtcttcacatgagtaccatactgttttgattactgtagctttgtaatatatt

SEQ ID NO: 123948 - DNA, 446 bp, Homo sapiens
ataaaggtgttcatagtagccatgaatgatcttttgtatttttgtggtatcagttgtaatatctctcatttcatttctaatcgagcttattggatcttctcttttcttttcttggttattctcactgatgatctatcaattttacttattttttcaaagaaccagcttttggttcatttatctcttggattggtttttgktggtggttcaattttatttagttctgttctgatctttggtatttcttttcttctactgggtttgggtttagattgttcttgtttctctagttccttgaggtgtgaccttacattgtctatatttgctctttcagactttttgatgtaggtatttaaggctatgaacattcctctcagcaccgcttttgctttattccagaggttttgataggttgtgtcactattattgttcagttcaaagaattt

SEQ ID NO: 123949 - DNA, 546 bp, Homo sapiens
gttgtttaaaagaggctggcatctcctccctctctttctcactccctctctcaccatgtgacatgtgggctccccttcgccttctgccataattgtgaagtccttactagatgtcagcactatacttgatatacagcctgcagaactgtgagccaaataaacctcttttctttataagtttcccagccttgggtattcctttatagcaatgcaaatgaactaacacacgcatattgcttctgctcacagtccattggtcagaactagtcacatggcatgaacataagtgcaaaacagactgggaactgcagggcagcatgtggactatttggcaaataatgtcttggccaaaggctccactgactatctttcaaagttgtatttaattagtctgcaatttcctgtatggtgaattgtcaactgccctcttctcacaggttgattccacctttctcaagaagccattcagtcartgcctaaagctctgggtccaagaactcttacaggtcacacaacatgaagccaaatggagagggatagtccctc

SEQ ID NO: 123950 - DNA, 542 bp, Homo sapiens
atcactggtctgctttctgtcactatagattagtttgcattttttasaattttatataactcaattataaggcatgtacttttgcctgtttgtttcccactcagcctaattaccttcagttttacccagctgttgcatgtatcaaagtttgctcctttttattgccaagtagtaatcgattgtatggctatactgtcatttgtgaatccattcccctggtcatggacattgaggttgttttcagttttctgatattgcaaacaaagctgctacgaaaatttgtgtgcaagtctttgcacaaacttttatattcacttttcttgggaaaatatctagttgtggaatgggctggtcatatgcttggttgcatgtttaacttgcaaactgttttgcaaagggctcttgccattttccacttccacctgcaatgcagaggggttgccgttgctccttatcctcccatcatttgataatgtcagtttttttttaaattttaaccattctaataggcatgtggtagtatctcactgtggttttcattc

SEQ ID NO: 123951 - DNA, 542 bp, Homo sapiens
atcactggtctgctttctgtcactatagattagtttgcattttttagaattttatataactcaattataaggcatgtacttttgcctgtttgtttcccactcagcctaattaccttcagttttacccagctgttgcatgtatcaaagtttgctcctttttattgccaagtagtaatcgattgtatggctatactgtcatttgtgaatccattcccctggtcatggacattgaggttgttttcagttttctgatattgcaaacaaagctgctacgaaaatttgtgtgcaagtctttgcayaaacttttatattcacttttcttgggaaaatatctagttgtggaatgggctggtcatatgcttggttgcatgtttaacttgcaaactgttttgcaaagggctcttgccattttccacttccacctgcaatgcagaggggttgccgttgctccttatcctcccatcatttgataatgtcagtttttttttaaattttaaccattctaataggcatgtggtagtatctcactgtggttttcattc

SEQ ID NO: 123952 - DNA, 583 bp, Homo sapiens
gtagttcagtaaaagaacgacagcagtaaagggtctttaggaagaggaggtggaagacctgatttgggttgggggctccaagaagaatgtctgccttgctgtgcagaagcctgctacacaacctccctggtccccttgctcagtctcctggccagacccctgtgagccctggaagtgcacagtcagctcggccaaggcatctccagccaggactcatccctgggcatttctgtggccttgggtgccctggcctccaggccctgtcttgcaggcaatcatcctgcwagggaagggggaaaggaggctacttgacagttaactctgagtggctccacaaggtcctgacttagctcctagtcacttgcaaaacctatatacccccatctcatcccccaaatgatgaaaagaaactttgcaggactcatgccagacaaatagggtgggaccattctgtagagccaagttctcaggacatcaataagagatggaaaccacctgctggaaggtgccacagtgggaaccttggggtcagggagcagtcactgaactgtcagggtgaatcctggctcctggccctcacaca

SEQ ID NO: 123953 - DNA, 494 bp, Homo sapiens
aggtccctgtgtgaggattagacagtggattgttatgtgtgtaggggaatcagcttaatgtgtctgtccatgtctgaatttattgcagaaattgaaaagaaggggaaggggaagaaaagaaggggaagaagatcaaagaagaaaagaagaaggggaagaaaagaaggggaagaagatcaaaacccaccatgccccaggtaactttcagcaattgtggatgcttaattctgtgttaacacctggaggcaacagattcagggaaaccagagtgtgtttgatktcatgttttcaacgaaggctgaattactcctactgtcattgctgttggttttcattgcagtagatgtttaggtttccatttcttcctccccttatcatttagtaacgtaccataggttgaccatacttcaaaagctgtactctcatggccactgcatcgaattttgagcatattttatggaaaactattgagctcactcttttcatgatcacag

SEQ ID NO: 123954 - DNA, 494 bp, Homo sapiens
aggtccctgtgtgaggattagacagtggattgttatgtgtgtaggggaatcagcttaatgtgtctgtccatgtctgaatttattgcagaaattgaaaagaaggggaaggggaagaaaagaaggggaagaagatcaaagaagaaaagaagaaggggaagaaaagaaggggaagaagatcaaaacccaccatgccccaggtaactttcagcaattgtggatgcttaattctgtgttaacacctggaggcaacagattcagggaaaccagagtgtgtttgatgtcatgttttcaacgaaggctgaattactcctactgtcattgctgttggttttcattgcagtagatgtttaggtttccatttcttcctccccttatcatttagtaacgtaccataggttgaccatacttcaaaagctgtactctcrtggccactgcatcgaattttgagcatattttatggaaaactattgagctcactcttttcatgatcacag

SEQ ID NO: 123955 - DNA, 590 bp, Homo sapiens
aatctctggtgcccctctccttatacctgtcacgctgccacaagaaagcattgaggcaatgattaaaactataaacatacatctgtaacatttctttctaaactattctagcacttcaaagcctgaagcctattacttatttttatatggagaaatgtatgcatactaaatagtgaaaaacataggatcctatctagtgccacaaatggaagaagcaataccctcttctggctgtaatgagttatttggtgaaacactgaatgtaaagagggatactacatttgaaattatcttgtaaacagagaattctgactctggaaggccattctagaagtcatgttctgactaaatagcatgaccttggcttaaagaaacgtaaaggaatcagtaaagaacaaattttaagtagaatttaacctgtacctaatctaatktcacttgtgtacaacagtcaactctgagacagtattggaaataaaagttgactatgatcactttcatagttcttgcctctgttctttaacttggccttcccaatacttgcagtctactattacaagactactctcctggttttgattaccttctga

SEQ ID NO: 123956 - DNA, 529 bp, Homo sapiens
ttagcaatgaacaatctgagaagaaaattgacacaatgatttcatttataatagcactggtaagaataatatgcctgggaataaatttgttcaagaaggtgcagtacttgtacacagacaactacagaacattgctcgaggagattcaggaagacctaaatcaatggacagacatcttgtgtccatgggttggaagttgtaacatggttaagataaaaatacaactcaaagcaacccacagattcaatacaatcctatcaaaaagtggccttttttacaggaatgcctaasaagaacttcatattcctaaaaaatagtgtgtccccccaaaacaaaagcaatcttgaaatgcaagaagaaacattttctattccaaaggtctttaactgctctaagcagtacttggtagtcttcaatatataggctttcacatctctttttttcttcttttgtttctgcacaggatctcactctttcacccaggctggagtacagtggcacaatcacagctcactgcagcatggaattc

SEQ ID NO: 123957 - DNA, 563 bp, Homo sapiens
aagttgttcccccttttcagaccaaaccaagtacatcttacatgtatttgattgatgtctcatgtctccctaaaatgtgtaaaactaggctttgccctgatcaccctggacacatgttctcaggatctcctgagggctgtgtcacaggccattggtcactcatatttggctcagaataaatctcttcaaatattttacagagtttgactcttttccatcgacatgtttcagccctttgagttttcacaaccaacgtaatttgcagggtacttgcaaacaccaacagatattttagatataaaaatgctttaaataattggattatttgagctaatattattgccatatactccaaaggtaaaacagagctcactagtgtccttgcaactgacargaagcagaatatagtggtaatcagcacccgatgggatgcctgagagatgtgaggtctgagcagccatcacgttgtagagttgtagagaacgtgagaaaccatgggcaccaagttcccagggtgaatggggctgtgcaatcactgcttcattttgcttttgctttcttcc

SEQ ID NO: 123958 - DNA, 596 bp, Homo sapiens
ccaaaaaacaggaaatgtgacttataaccaggagaaaaatgtgtcaatagaaacagatctagaaatgacagatattaatatacaagacctttaaagcagctattataagtatgttcaaaaccaggcacggtggctcacacctgtaatctcagcactttgggaggtcgaggcaggcgaatcatttgaggtcaggagtttgagaccagcctggccaacatgataaaaccccaactctactaaaaatacaaaaattagctgggcatggtggcaggtgcctgtagtcccagctactcaggaggctgaggcaggagaattgcttgaacttgggaggcggaggttgcagtaagtcaagatcgcgycactgcactccagcctgggcaacacagtgagacttcatctcaaaaaaaaaaaaaagtacattcgagggtttaaaggaaaacatgagtataatgaagacagaagtagaaattatgaaaaattaaacaaaaagtgaagaaaagctgaaaaaatatgagatttaaaatttaaaaattcactgagtgagcttaatagattagatcctgcaaaagaacaagcaaacttgaagacagtaatag

SEQ ID NO: 123959 - DNA, 590 bp, Homo sapiens
agtttaatgccatcccccttggtattttcttgaaaatgagtgagttctaaggagatctggttgtttaaaagtgtgtagcacctctctcctctctctcttcttcctgcttcagccatgtgaagtgccaactccccctttttgctttccgccatgattgtaaggttcctgaggcctccccagaagcagasgagatgccagcatcatgcttcctgcatagcctgtagaactgtggatcaattaaacctattttctttataaattacccagtctcgggtattactttatagtagcacaagaactgactaatacataaaattaatacagaatggggcattgctataaagatacctgaatatgaaacaactttagagctgggtaatggatagagattggaacagttggagggctcagaagaagaaaggaagatgagggaatgtttggaacttccgatagacttgttgaatggtttcaacaaaagtgctgatagtgatgtgaacaatgaagtccaggccaagaaggtctcagatggaaatgaggaacttattgggaactggagtaaatgtcatttttgcaatgccttagcaaagaac

SEQ ID NO: 123960 - DNA, 595 bp, Homo sapiens
tagcttccgcggtttgctagctcgcacatctggcacccctcttgcctctgggccagcaggctctagactctagagtcctgcagagcctgggcaagcatccaattgctgatacagcagccagagagtgcttggggaatgcaggaatgatgtgccccttgtccaaggggcgggggttagccctgcttttgcttaagcaacatgagggggcggatctaggagaaatgagagagtctggagatcagaggctggcctctgtgcctaagggacccaccattcctcctgccatgagcagattcgaataattggggctgagtggcaaatgcagatgccctctttggcctgtgaagtcagccccgcttgtctccactctggcagcgcaatatgtcatctggaggaartcctggctacttgcaaatgcagctgttgttcacaaatacaccacagacccaatgaggagggggagcaactaagaaatctctttaggatggcaggcgatgtggatttctccttagattcagatgtgattcccgaacagactctcacaatgccttgccctttgcccttggccatgtcacttgcctttccctggcctcat

SEQ ID NO: 123961 - DNA, 596 bp, Homo sapiens
ccaatgccccagcgtcttggcatttatccatttggtttcctatcagaacactaagctgattatggcaaactcagggtcataaagtgactctcagggtcataaattcctgccagaactgagaaagcaaattcttcccatcttattaataacacttacactaatttatgcagctctacttaaggtcctagttcataagccaaacttgtcatcaatgtaagctcatcctcacccacagagagaaaacagagtcagtttccaaaatawcttcccttctcgctgtccagaaagcccatcttcctgattgcttgtatagttctaggtattcgagggatttaaaacaaatataaggaatgatccgatcctccaaggtaattatagtagcaatcacacatatttatggagtgcttacttttgtgccagatactgttgtaactaattatattgattcttttaattctcaaaacagcactctgacatagatattgctattacctctacattacagtgaagaaactgagatgcagagagtttaagtgacttgcccaaatgtctgaactgggatttaacctcagtctctctctagagttgtgtcctta

SEQ ID NO: 123962 - DNA, 596 bp, Homo sapiens
ccaatgccccagcgtcttggcatttatccatttggtttcctatcagaacactaagctgattatggcaaactcagggtcataaagtgactctcagggtcataaattcctgccagaactgagaaagcaaattcttcccatcttattaataacacttacactaatttatgcagctctacttaaggtcctagttcataagccaaacttgtcatcaatgtaagctcatcctcacccacagagagaaaacagagtcagtttccaaaatatcttcccttctcgctgtccagaaagcccatcttcctgattgcttgtatagttctaggtattcgagggatttaaaacaaatataaggaatgatccgatcctccaaggtaattatagtagcaatcacacatatttatggagtgcttacttttgtgccagatactgttgtaactaattatattgattcttttaattctcaaaacagcactctgacatagatattgctattacctctacattacagtgaagaaactgagatgcagagagtttaagtgacttgcccaaatgtytgaactgggatttaacctcagtctctctctagagttgtgtcctta

SEQ ID NO: 123963 - DNA, 597 bp, Homo sapiens
gccccatgtcattaagtcagcactagaggcataatttgaaccccgagtttgctggggccaccaacctgagctctttaaccaaatgatgctacttcaaagccataatcattagagccatgacagtggtacaaataagtgtggtgtcattcctgttaccatctgttatcacaaaaaggcagaagccaggcaccgtggctcacgcctataatcccagcactttgggrggttgaagcaggaggatcacttgagcccaggacttagagaccagcctggccaacatagcaagaccctatctctacaaaaagtaaataaataaataaaattaaaaaaaatattttaaatattaaaggaggaggcaagaagagaggcaaggagcatgtctggctggtaggatcagggaagtcactgcaaactgacttctatcccttttgtgaggagataggtttgctccacccagcaaagtgtggaagtaacactcccatttgatactattcccatttcagaatttattcaatggataggagtgaaaataataggagaagatgaagtcaaagaacaaataaatggccatgccatggaaatgaatgctagccttca

SEQ ID NO: 123964 - DNA, 585 bp, Homo sapiens
catttcagaatttattcaatggataggagtgaaaataataggagaagatgaagtcaaagaacaaataaatggccatgccatggaaatgaatgctagccttcagtggtaatttaaattaggtattttcatcttgattttttaagtaaataaattayttaaatttaattaaaatagatgatgttatgaccagtttttcccattgacactgaagttttaattctgggtatatggaaagataggacagtggtggcattaactgagagggaaaggaatttagaggaaaaagaattgagaatgggggaaatgataaaatatactaacagacccaaaattggaatttttttcatgaaaacccccaaactgttttggcgattgtgaataatactgcaatacaatgtgtgtgtgtgcgcgtgtgtgtgcatgtctgtgtataataaaacattacattgtaccccataaatacatacattattatttttcaatcaaaaataaaaatttacattaaaaaaactgaaatgatgaggcaaggactacacacccagtttcagtaccgtctgcccaggcagagctcttaatcagtctgtt

SEQ ID NO: 123965 - DNA, 585 bp, Homo sapiens
catttcagaatttattcaatggataggagtgaaaataataggagaagatgaagtcaaagaacaaataaatggccatgccatggaaatgaatgctagccttcagtggtaatttaaattaggtattttcatcttgattttttaagtaaataaattatttaaatttaattaaaatagatgatgttatgaccagtttttcccattgacactgaagttttaattctgggtatatggaaagataggacagtggtgkcattaactgagagggaaaggaatttagaggaaaaagaattgagaatgggggaaatgataaaatatactaacagacccaaaattggaatttttttcatgaaaacccccaaactgttttggcgattgtgaataatactgcaatacaatgtgtgtgtgtgcgcgtgtgtgtgcatgtctgtgtataataaaacattacattgtaccccataaatacatacattattatttttcaatcaaaaataaaaatttacattaaaaaaactgaaatgatgaggcaaggactacacacccagtttcagtaccgtctgcccaggcagagctcttaatcagtctgtt

SEQ ID NO: 123966 - DNA, 648 bp, Homo sapiens
ctcatctttatcctcccagtactccagggtttctaaattgaggatccatagttctctgccgagtcttggaatattttgaaattgaatgcagactccatgtgtacatatgtagctttttgacattttcttggcagagtccttcacattacatgagattctcaaaggcatctgttatgtagcaaagggaaagaatcattgctctacacrttgtggcctatccccagccctgagcaagtgcatcatctccgtctttgtcaggatgaattccaaaaccctctttccagctaatgctattctagtgagctcctaaccactgtctccactgcctgtttggcagctggagacacacagcaatgagcacacccaaaacctgagcttgttaccttcctcctcaaccttgtgctcctcctttgtacatgtggagtaaaatgccctttatttgtttttttaccatctgcagtcaacctgtcattaattcttgataacattacctctgtttttgaaatttactcccttttcttgattctctgttacttagagaacccatccaatctacaggatgtaggagagcccattaataagtgattctagtcttgtctcctatcatcatgccaattcagactccaactgcactatgtatattgttct

SEQ ID NO: 123967 - DNA, 664 bp, Homo sapiens
cagtagtgagagagacacatgatagacattcccatttcaaaggaagacattggaagaaataaaggggtcacaagtttcaaggaagtccaaagcctattagaaaaaaatctattagactgtaargttggagaatcattttctttgactttattctgtgtcctataggctgagggcaggtagagctcttttcttagcagccggggaagcaactccatcctctaggctctgggcttccagagactgttggcaccagctccactcttttggcccccagctagataaaagtagccagtctgaaaagcctacatagtatataatgctaattatacaacattctggaaaatataagattatagaggctgtaaagggatcaaggaaaagggagaaataaatatgtgaagcataggaaaattttagggcaaagaaattattatttataatcctgcaataaggcctgttttcaaaattgatagaattttacagcacaaagaaagaaccttaatatatgcaatttaaaaattatttagtaagttggaggattccacaaagaaatgcagactatggctagagaatctaactgtactacaaaagcaggaggctgataaattattcatttttgtaactttagaaatgagtggagttggtaagactaacggcaaatgta

SEQ ID NO: 123968 - DNA, 575 bp, Homo sapiens
atcccagcacaggtattactgggctaacatttaggtgctggcaaggtaaagttactttctggtagctgtaggggagaatctgtttttttgtttttgttttcttatctgcatttttggcagaattcagttccttgcaactacaggactgaagtctctgtttccttgttcactgtcagctgaggtktgctctcaaattttagacgctgcccacccttctcagctcatggccctttgctccatcttcggaaccagcaccagaaggctggatctctctcatgctttgaatctttcctgtctcttctctcacatgctctgccccacgctactgtcttcctcttctacttggaaaagcctgaattggacctcattaggtccatctggataacccagaatattttgcctattttaaggtatgccacctcaattttatgtgcaagattccttttgttatttgaggtaacatattctcaggtttgggggattaaatgttgacatctttaaaggatattattctacctgtcgcaggcaccattctgaaaaagctgctgcacttctcaaaagaagacattgatgca

SEQ ID NO: 123969 - DNA, 581 bp, Homo sapiens
aaaagaagcctttcttattaggagccacattacatgtaatcaacctaatcgaaatgcatacaactattaaccttttagataaattcattgtagctgaaagaaaaagctgtctgctcagactagcaacctgagctctcctcagaatataayatttgctaaagttgtttgaaaccagaaagataaccatttcaaaacaaaagattggctctggattgtaggtttcttatttgcaggactaggtcaaatttaggaccatgattagaaagggaagtgcttagcaatgaaataaaccattacaacagttgaaatacaatggtaaaaaagccaaaggtgcagtcatggtatagaagttaatggaaaatttacttgaccaagctttgaaaaatcaaggcagttttgtttcgaaaactccaaaaggaccaatgaaaatatttttggagaagccatcatgacttgatgtaattatcataacagctgattcttgataatgtcatctttcatgaactcacaactaaaaacttataatatttgatggtattcctccttatggagataggcaaataatcttagagaaacgaaaa

SEQ ID NO: 123970 - DNA, 595 bp, Homo sapiens
tggatttcccctggatgattgactttaattattatgtatcttctgtgtatatcatccatatgtggaccattcccaagtgggtctgaatgtgacagggcccctaaaatttaacatatccaaacatgagcatgatcatgatctcccccatatcttagctccctgtcaacttccctatttccctgtttcctctgtgtttaacggcatgttcagcaaagtctgaaatctgggagtcatcctctgtttctgcctctctgcagcttccacatcaaccaatggccgagtctctgtcttcacgcagacatcccactctcactccccttttgcatctctctgccatctctcccctggactattagaaccatgttataattgtttctctttagttccttctctatcctgctgccagttacatttctaaaatgcaaatctatgttacgctcctgtctaaatccttcagtagctcctcattgtaccrgattgctcctaacatcttcatttgaatcctttgtgatctagcccctgcctgcttgtccaggcttatccctcaatatggtttgaatgtctgtcccctccaaatctcacattggaattcaat

SEQ ID NO: 123971 - DNA, 526 bp, Homo sapiens
ggtctcccccttcacgtctgtggcggtggaaggaggtgggaggaggtaggagaagctggccccacacaggagaatgtggcttgctgtcttctcccctcccggagctgcccacggctgtggattaagcaggagtggagaggcgctccagactcttcctttcacttcctgcactgacagatcaatttggagtaatttatttataagctggattagtaagtctccatagagtaaacacagtgctcctgaatatagaaatgtagaggaatcccttcccagctgttcccaggctggagctaaatgctttggggatgaggacgtgggagggatgaggaaggtgtgtcacccaggcacactcagggttcctgggccacagcaaacagaaagcaagagccgagccaccccgccaggaacagatgtccaaaaacagtcttcatgaaatccctcctccctccggaatcctgtccccrgctccggggtgggctcacagtgactgctctgtgccacagaggacacagagtgctcttac

SEQ ID NO: 123972 - DNA, 625 bp, Homo sapiens
aatcttaaattcagagaaaaagttttgtggaccaagtactactaattctaggaagttgttttttattattattctatgcttttggctccattaatcctacggatctttttgatgtattctcagttttaagtacagattcaaacagcatttttgatgtacatatacacactcatatatgtttgtgtatgtgtatatatgtatgtatatatatatatttacattatttttattcttttacataatcctgccatgtggtttctaagtggcattgctctttctagtgctctcttctctctctttttgtaagcctttgggagcagctcaaggaagaagtagaggagataatttgttttttattatgtgaaaaacactgacaaatgaaataagacaacttagaaacgatctcctcttttgcaattctttatacttgatacatttcataaacaaagaccaattttgttttcaaagaaagaacgaaattyccctggtgatgaattaccagggtaaggggtgaattaccaccccttaccacggcaatgatccatttgatgcagggccaaaatgttttcaaaatgtttcttgttgccagagtcaccaaatttccccatacttctcaaaattcatt

SEQ ID NO: 123973 - DNA, 625 bp, Homo sapiens
aatcttaaattcagagaaaaagttttgtggaccaagtactactaattctaggaagttgttttttattattattctatgcttttggctccattaatcctacggatctttttgatgtattctcagttttaagtacagattcaaacagcatttttgatgtacatatacacactcatatatgtttgtgtatgtgtatatatgtatgtatatatatatatttacattatttttattcttttacataatcctgccatgtggtttctaagtggcattgctctttctagtgctctcttctctctctttttgtaagcctttgggagcagctcaaggaagaagtagaggagataatttgttttttattatgtgaaaaacactgacaaatgaaataagacaacttagaaacgatctcctcttttgcaattctttatacttgatacatttcataaacaaagaccaattttgttttcaaagaaagaacgaaatttccctggtgatgaattaccagggtaaggggtgaattaccacyccttaccacggcaatgatccatttgatgcagggccaaaatgttttcaaaatgtttcttgttgccagagtcaccaaatttccccatacttctcaaaattcatt

SEQ ID NO: 123974 - DNA, 627 bp, Homo sapiens
tttacctcagttcctaggacttcttcgatcagttcccattctcactcttaattacattttatatttacacctcatttacaatccctaaaaaacaaattttgaactatttatttaagagctaatgttatcttccccttcttcaaaagtttcctttaactctcccattgtaattatttattgattatctatggaaataaaaatcttactttaccaaaagtaagcctagagtttgcccatggctgggatttctgaccacattctcttaaacctccagttggatggcacagtgttayggaatgttcccaaatgatttctctgtgtctggagggttttatctagtgctgctttgccacttgagataggatcatcttctacctcaaatgtttgagtgtgtaacgcactgaatgaatggcatgtaggtatcttattactattgtcataagattaaaaaataggtactgaaaaagagagcatgcaagtattaaccaacgtaactcccctcttcatcgatcatcgagaaagggaacataaaaagataaaaagtccatttatctcaagcttatcaagcaatgggcttagtatttctcatattgttgagacaaaagggaggcccacccccatgccaaa

SEQ ID NO: 123975 - DNA, 627 bp, Homo sapiens
tttacctcagttcctaggacttcttcgatcagttcccattctcactcttaattacattttatatttacacctcatttacaatccctaaaaaacaaattttgaactatttatttaagagctaatgttatcttccccttcttcaaaagtttcctttaactctcccattgtaattatttattgattatctatggaaataaaaatcttactttaccaaaagtaagcctagagtttgcccatggctgggatttctgaccacattctcttaaacctccagttggatggcacagtgttatggaatgttcccaaatgatttctctgtgtctggagggttttatctagtgctgctttgccacttgagataggatcatcttctacctcaaatgtttgagtgtgtaacgcactgaatgaatggcatgtaggtatcttattactattgtcataagattaaaaaataggtactgaaaaagagagcatgcaagtattaaccaacgtaactcccctyttcatcgatcatcgagaaagggaacataaaaagataaaaagtccatttatctcaagcttatcaagcaatgggcttagtatttctcatattgttgagacaaaagggaggcccacccccatgccaaa

SEQ ID NO: 123976 - DNA, 555 bp, Homo sapiens
cttccacaagttaatgtcacgctcaagtgaaagatacctcctctctggagaagtttaataagtccccagatattcacatcccaaaaaaatgtatcactatttatggccatttttgaaaatgtrcatttaatccacatttatgagaaaggtaaacttggagtaattttcatctattgcgattactgatgtattgatttattttcacattttccttgtgatttattctgtttttccccttttaccccatttcttctttcaaattaattgagggtgggttgtttatttgtttagttttcacatttcatttttcacctattagtatgaaggttatactctccttgttattttttaactagttaccataggtggtataacatgcctatttaattaaaattatgaaaattaacctccgtagaaataacagacaacattaactcctttcaccttttctcacattcttgttaattttgtccggtatcttggttctatattgcctattttttaatcacaaattagaaattactatgattgctttagtgattccataaattccca

SEQ ID NO: 123977 - DNA, 631 bp, Homo sapiens
aataattgtttgggttctgattttcttttgtttctgtcctttttactgctcataatccattttgaaggttattcttatgtaattttaaaataatctgaatttgaataattcattttatttgctgagaaggagtttggcactgcccctgccatgcmtagaggtaagcatgtaaaatcaaactcagcaactcagagcgccccaggaaatataaaatgaccaaatatgagccagtcaatcacctatccagaacttttcatacggtgttaggaaaaaacaatgacaataacaatagcaacaaaaattctcatcctctagggtaactaagttgatggatgtgagtcaccagctttggctaccatctttgtcaactctactgagaatgacgccaacacacaagaaagaagaggcaaggggtggagacaaaaagagagtccagatggagtgatttgaatccctggatattgctatgccacaaaccataatattttaagtttatatgagtacaagtcttcctctgtttcttcttaaatctagcggaagcaagttttcacaattgtgactgatagagtcattattagtacatcctttcattctcatctcaaataataatatccttgaatatgcaaattct

SEQ ID NO: 123978 - DNA, 583 bp, Homo sapiens
ccatataaatgattgcacacgtccacctgtgttgttgtgaaggaatgtctgagactgggtaaattataaagcaaaacatctatttggctcacaactctgctgtttggaagattaggcctctggtgaaggccccaggctgcttccgtttatggtrcaaggagaagaggggctggcatgcacagagatcacatgatgagagaggagctaaagagatggggaagctgccacactcaactcaataaccagctctggagggaattaacatagtgagaacttgctcacttgtgcttcccagaggggggattaatttattcatgagggaaccttcctcatgacccagacacctcccattagaacccacctccaacactggggatccaatttcaacaggagatttgaagaagtcaaaccaaccatgtccacagtatagccacacccatttgtatatagaaatggctgtgtttacatttataggtgtgtttatgtgtgccaaaacttatgtatctctacaaacacagtgaaaaggttgggcttgctcaagtaatgatagggtcaacaaaaaggcacgtggccctagctgggg

SEQ ID NO: 123979 - DNA, 584 bp, Homo sapiens
tttgctaattatgagtagggagatgtttttgtgcagctgtatgtttgtctatacccatgtagtgttatcaatgaccagctttgtgaatgcatgttagagtttacagtttcagtggcttgccttatgaaaacatgctaataaaatatgagtagcaacaaaaagggctattttcccctcctttccatacaacaaatagtggatcctcctgaaaatctgtagatccttcatacgaagygactgtacctgccatatttctaatggagtctgattaggaggatgaaggatattatctgcattgtagtcaaaaaagtggatcttcctgagtctttcccaatttaggtttagggaaaaacctatgtttttagctgagtaaaataacaagccagttttttctactttatttttccattttctaaaagctgaggaggattaggaactggtgctaggtgaaaagcatattgattttatatagtgtcttaaggcaactaaacatgaaccctctttccagagcttgagttcatcttttgtacttacttcttttgaaatggaaatatacaaccataaattctggccttactatacca

SEQ ID NO: 123980 - DNA, 584 bp, Homo sapiens
tttgctaattatgagtagggagatgtttttgtgcagctgtatgtttgtctatacccatgtagtgttatcaatgaccagctttgtgaatgcatgttagagtttacagtttcagtggcttgccttatgaaaacatgctaataaaatatgagtagcaacaaaaagggctattttcccctcctttccatacaacaaatagtggatcctcctgaaaatctgtagatccttcatacgaagcgactgtacctgccatatttctaatggagtctgattaggaggatgaaggakattatctgcattgtagtcaaaaaagtggatcttcctgagtctttcccaatttaggtttagggaaaaacctatgtttttagctgagtaaaataacaagccagttttttctactttatttttccattttctaaaagctgaggaggattaggaactggtgctaggtgaaaagcatattgattttatatagtgtcttaaggcaactaaacatgaaccctctttccagagcttgagttcatcttttgtacttacttcttttgaaatggaaatatacaaccataaattctggccttactatacca

SEQ ID NO: 123981 - DNA, 548 bp, Homo sapiens
cctgctagtattagttttgccaaatgttcttcaactacagaatgcaggtcaccattttcccaggcttgagtggcaattttcttaccaccttcctggtctgcaataaatctacttgctattttttaagtttctatctagcaaagccaacaccatctgctttgggtttgtgttattgaagcatcccacttctttttttattttctaaaaaatattttgagacaaagtcttgccctgtcatccaggctggagtacgatggtgcagttattgctcactgcatcccacttctgataccaaattctgtttcactttttctattgctactaacaaagcacctcagaacacagtggctttaaagagcaattattcattatagttcttcatgtggccaggaagttctcccactmtatgtggtgttataggaagtgctgggatggctggagagttcagaatattctcactatcatggctggcaattggtattcatccctggcttgggttcagtgtgctgtagactggggcttctccaggtggcagtttgagctttgtc

SEQ ID NO: 123982 - DNA, 493 bp, Homo sapiens
aaaggctgggttgataggctgtcccagtgggaaacaaaatgtatttgaacaccatacagaaaaatcaatttctgatagatttcagatccaactgggaaaagcaaacaataaagcttttagaggaaaatataaaggaaatttttgtgaccttggagtaggaaaagatttcttaaayggtaagtagttaggttctaacaataaagaaaactgataaattgttctacgttaaagttaagaaggtcagaagtcaccattcagatagtgaaaaggccaggcagacagtgcgagaagagattcaaaaatacatatatttgaaaaaagacttcatatccacaatatataaagaactcctacaaatcaatagaaaaaaatatacagttgtcacttggtattaggaagtgattggttccaggacttccagtagataccaaaatttgcagatgctcaagtccctggtataaaatggagtggtatttacatataactacacaat

SEQ ID NO: 123983 - DNA, 579 bp, Homo sapiens
aaagtcattatttctttaaatctggatgatgaaggcaagggcttacattattctctatcctctgaggcagtggtccccaaccttttttgcaccagggaccagtttcatggaagagaatttttccacggaccagggtagggggttgtcttagtccattttcatactattgtgaagaaatagctgagattgcataatttataaagaaaaagaggwttaatggactcacagttccatatggctgggaaggcctcacaatcatggcagaaggtgaaggaggagcaaagtcacttcttgcatggcagcaggcaagaaagcctgttcagggaaactgccctttataaaaccatcagatcttgtgagacttactcactatcaacagaacagcacaagaaaacccgcccccatggtttaattacctcccagcaggtccctcccattacacatagggattgtgggagctacaattcaagatgaaatttgggtggggacacagcctaaccatatcagaagaggttttgggatgaaactgttccacctcagatcatcaggcatttagttctcatcaggagcacacaacct

SEQ ID NO: 123984 - DNA, 639 bp, Homo sapiens
ttaaattcagtagcagaaaaataatagctagcatgtattaaacatttgccacatgtaagatggtaagccctttacttgtcttgagctttgaaataactctattgtcttaaaataattattattgacattttacagaggagaaaagtgaagcacagagaccatattaattagcaaggttactgggatgtttacaccagggagtttgatacaaccaagacccaggyttccaactagtaactacacaatctctatgactgggcaaaactttaattagagagaaaagatttagccaggtgtgacataaatgtgcatggagtaggtagataaaaaactgaaatatagacgtcaacaataggggacctaaaattaggtatgagtttgtactgtatctcgaactctaatgtattagcacattgatcattccagtctccctcctttacttatctttaaattctcaccccaacattgagaaatctggctaccatcatccaccaagtatttacttaattgctcaatcgtagtaggcatgtatagtagtatcagaattcttaaccagttcccctatgggaaacaacttaatcaactacagtacaatgtttaatttgcctttagtcttgcagactaattcccaaagttatt

SEQ ID NO: 123985 - DNA, 639 bp, Homo sapiens
ttaaattcagtagcagaaaaataatagctagcatgtattaaacatttgccacatgtaagatggtaagccctttacttgtcttgagctttgaaataactctattgtcttaaaataattattattgacattttacagaggagaaaagtgaagcacagagaccatattaattagcaaggttactgggatgtttacaccagggagtttgatacaaccaagacccaggcttccaactagtaaytacacaatctctatgactgggcaaaactttaattagagagaaaagatttagccaggtgtgacataaatgtgcatggagtaggtagataaaaaactgaaatatagacgtcaacaataggggacctaaaattaggtatgagtttgtactgtatctcgaactctaatgtattagcacattgatcattccagtctccctcctttacttatctttaaattctcaccccaacattgagaaatctggctaccatcatccaccaagtatttacttaattgctcaatcgtagtaggcatgtatagtagtatcagaattcttaaccagttcccctatgggaaacaacttaatcaactacagtacaatgtttaatttgcctttagtcttgcagactaattcccaaagttatt

SEQ ID NO: 123986 - DNA, 639 bp, Homo sapiens
ttaaattcagtagcagaaaaataatagctagcatgtattaaacatttgccacatgtaagatggtaagccctttacttgtcttgagctttgaaataactctattgtcttaaaataattattattgacattttacagaggagaaaagtgaagcacagagaccatattaattagcaaggttactgggatgtttacaccagggagtttgatacaaccaagacccaggcttccaactagtaactacacaatctctatgactgggcaaaactttaattagagagaaaagatttagccaggtgtgacataaatgtgcatggagtaggtagataaaaaactgaaatatagacgtcaacaataggggacctaaaattaggtatgagtttgtactgtatctygaactctaatgtattagcacattgatcattccagtctccctcctttacttatctttaaattctcaccccaacattgagaaatctggctaccatcatccaccaagtatttacttaattgctcaatcgtagtaggcatgtatagtagtatcagaattcttaaccagttcccctatgggaaacaacttaatcaactacagtacaatgtttaatttgcctttagtcttgcagactaattcccaaagttatt

SEQ ID NO: 123987 - DNA, 546 bp, Homo sapiens
tgtttcataccctcgtcttatcctgaggttcagccgctttcctctggatttttgtttaagttagcacaaacatgtttctgacactttcaaccagaaggtcctaattaacaaaggaacatgaggaaggacctacctaaaagacgacacacagcatattttcctttgctgctcatcagtcatacagtcataagactgatgtttcttaccgaactccagagcttattaagtcttggggagaaatctgagtataacacaagaattgagtaagtagttagaaattattccatgagtctttctaacataatgagactagttttctgtatcacttggagaaatacttttgttgccttaaatttgaatttggtaatcttaggagtartgggcaagtcatgaatatccaaaatatctcaggaattcacatacctccatagcaaaataatttaaaaacccaatttaaaaaaaaaaaggcaaaggacctgaatgggagtatctcaaaaaaaaaaaacacacacacacacacacataacagtagccaacagattaatg

SEQ ID NO: 123988 - DNA, 548 bp, Homo sapiens
gtgtgaaaatctttagacatgtaccaagtttatgcatgctcaggaatctctaattggcatcaagcctacatctatcattattagcaagaccagtaatagcccattttctggcccaccttaggattcgtaccatgtaaaataattatcccartatgccttcaaattgtattttagtccttaatttttatttcatggaattttaaaattctgtcttgaatataaaaaactaaaaccttaaatatactttgttttcattaaatatcccaaatgggacaggtatctctcacttttgctaagacatgcctagataataatttaggtattccaaagcagctacatgagcttgtgttactttccagaatttcaacaacccttgcagaaacatttctcactgcacttatgatgtggtcataacaatgtattatgaccttgcaacattgcaggtggccagtaaatgggcaagaaaagaccaataatacccaactgctatatgccccaacatgtttaccccagaaaacaaaacttaacagcaatgaggtggaaacaca

SEQ ID NO: 123989 - DNA, 583 bp, Homo sapiens
ttatacacattacaaattgttcagatatcattatcagttatagatgatttcattttattttgaagatgcatccactatggtgctttggatcatcagctgggatggttgtagaatgggtacagcagggactattgactggagtgtatgtggcctcccagtatggcagtctcagggctctaacaggaagtattcccagagaaagtattccagcaaaactgtaraagctgaataatgaaactttgtcatatacactcttcagcatccacattatttgctggaataccccagtcaacaccgcctgtcctcagccatcccagtaggagccaaacatgtaagtaagtaaaacaagccacatggaatggaattgcccagctgcaagtattttaaccagcgattacagctgaggccccaaatattatgaaggtgacaagatctgtcttcactgtcccatttctgaatctgtaactcagagataccataagaataataaaatggtttagaccattcaattttagagtggcttgttacacagtgacaggtactgcaaacaccagaaaatagcaaattgagtgatagcaaccaa

SEQ ID NO: 123990 - DNA, 555 bp, Homo sapiens
tattatttaacaatctcaaagcttattcttacatttccatatatccctgcctaacccaactcttgttaacctaatatatcccatgggaaaccaataagcaaattctgatgtgtatatttcacactgtaaagtcagggaggagttgggggcagggagcaatcctgctcctatgtaacatatgcataatagacataactatgtacccatgatctatatgactgatttttatgtcagacaactgtgttctacctagcatcaaatttgatgtgtagttgaaggaaaatarcatgctttcatcagtttttaaaacactacatagttaacttgctatgaaagcaaaccttacaacaacaattcccactaataccagaatctcttataattactttttgctgtttccatatgttacacttgaacatacaaacatgcacacttttcaagctgttttcattgttttcagttatttcacactctgacaatcataccattagttaaaaaaaatgagcaccagctgcttcatactgcgacttttcttctccctattgagttatactg

SEQ ID NO: 123991 - DNA, 642 bp, Homo sapiens
ctaacatccatccctgtgctctcagttttcctttcagcctttgaacccacttcagactctcagtcctccagggatcagcacacatatatctcatgagcttgaccctttctcccttcacagtatcctctgggactataaattattggcttttttatttctttctcttatgattggggcttttaatatttcatattaaattgaattcttactcagcttaacatcctggatttattaaatttatatgacctaatcaacaaaaagtttctttatatgtcaatggaaagtgaaagttttaaaatcttctgaatatgcttggttttcaaaacaattgtcatgagatgatactctagcaatccaaagrtgaacctattttttttttacttctttctttttgtagtcctcctgtaaatcctatttatccctgaagcaaatagttgcctctggccgactaaagaataatcccaaacaaagggaacctaaaatataaaagtaaatatttttcaaaaaatatgatcttcattatgtagtcctgacaaataaatgacaaaacaaagcaaaggattataagtgtcaaaagagaaagcaatctaactggggaaagcagtcagagaaagattaacagccctacgagtttatggttta

SEQ ID NO: 123992 - DNA, 478 bp, Homo sapiens
cacaattcataaaagaaaatattaataaattggacttcattaaaatataaaattttgtttcaaaaaactattaagaaaattaattggcccggggaggtggttcacatctgaaatccctgcactttcggaagccaaggagggtggaccacttgagctcaggaatttgagaccagactggacaacagagcaaaatgccatctccacaaaaaatacaaaaattaaccaggcatggtggcgtgctcctgtagtcctggctactcagaaggctgaggtgggaggatctcttgaccctgggaggcagaggttgcagtgagccaagatcacaccacygcactagagcctgggtgacagagtgagaccctgtctcaaaaaaaaaaaaaaaaaaaaaaattaattgaaaaatcacagactgggagaaaatattttcaaaccataataagtatctgatagaggacttgtatctagactatgtaaagaa

SEQ ID NO: 123993 - DNA, 529 bp, Homo sapiens
tagtttggagtagcaggaagtcagagatgggttcattgtatcgttatttctagtcctagctcttcactgtccttggcaaggttcttaacctctctgggttcccctcttcttacctttctcctattcttccccaagtgtgggagtcacacttcaacactatacacccgggagtgttgtgttgttaaaaagtattgttaaatactttttaaacgtgttgaatacttgttaaatactttttaaatgtgtatttatttatttgagttagtactacatacacatggttcaacatgtaaaagacataaagggaaattcagtgccatctccctcccacctgctcctttctgcgtgtccctgttccagttctcagttttctttttcaaactcagaaatcccaagartctgtgaagggcaaatgaaaagcaaaatgactagactaaatctgaatgaaagggatttattctaaggtgatactgctcactgctcaaggtgcttatctgcccccttcatgggctccctcaagttttctgag

SEQ ID NO: 123994 - DNA, 647 bp, Homo sapiens
tgctgccttaactatatacaggttttgttataagtatgctcttaattttctgattaaggtatttatatactttttgttcttagaaatgttgagacttagataataaaatcatgaacatttaagtaggttgttttttcacctaaaaagtttcatctgggccacgtatggtggctcatccctgtaatcccagcattttgggaggcctagagagagggatcacttgagccctgctcaactgagcagcatggcaaaaccttgtctctacaaaaacaaacaaacaaaaaaaccagtttcatctgtgtgaaccatacaaaactataaaatgcatttttctgccattgatctctcctaattatgtaatagtttattgttagaactattattaaaatattagctattaattgtgagtactgcagacattttaagcgtgtcattatatttatacccccaaataatactataaagtaggtgctaacattcccacttgagagaaggctcagaaaagtttaatgccttggccaatrttacacagccagtaaataagtgatctggctaagactgaaagcaggcctatctgattctaaagtccatgcccctatgcaccgcactgtaatgcctctctcaccgtggaatgctcaccctcattt

SEQ ID NO: 123995 - DNA, 619 bp, Homo sapiens
ttttgcttatcttggcaaaaagaaacacaggaaggataaaacagaaattaataaaattggttatctctaaggagtgtggaaaagtaatgggatagaagagttaggagaaggagtgacacatctctgaatgtattttttatagtttgacttttttttttttttttaagagacagtgtcttgctgagagtggtggcatgatcatggctcactgcaaccttgagttccccaggctcaagcaattctcccacctcagcctcawgagtagctggtactataggtgcatgccactatacccagctaattttttctatttgctgtagagacagagtctcactatgttggggttaagggattttctatttgttgtagagacagagtctcactatgactggggtcaaggagaccccagtgtctgttgtttcctcctttgtgttcataagttctcatcatttagctcccacttataagtgagaacatgcagtacttggttttctcttccttcctgcattagtttgctgaggataatagcctccagctacatccatgttgccacaaaagacatgatctcattctttttaatgctgcatagtattccatggtgtatatgtaccacatttct

SEQ ID NO: 123996 - DNA, 619 bp, Homo sapiens
ttttgcttatcttggcaaaaagaaacacaggaaggataaaacagaaattaataaaattggttatctctaaggagtgtggaaaagtaatgggatagaagagttaggagaaggagtgacacatctctgaatgtattttttatagtttgacttttttttttttttttaagagacagtgtcttgctgagagtggtggcatgatcatggctcactgcaaccttgagttccccaggctcaagcaattctcccacctcagcctcatgagtagctggtactataggtgcatgccactatacccagctaattttttctatttgctgtagagacagagtctcactatgttggggttaagggattttctatttgttgtagagacagagtctcactatgactggggtcaagkagaccccagtgtctgttgtttcctcctttgtgttcataagttctcatcatttagctcccacttataagtgagaacatgcagtacttggttttctcttccttcctgcattagtttgctgaggataatagcctccagctacatccatgttgccacaaaagacatgatctcattctttttaatgctgcatagtattccatggtgtatatgtaccacatttct

SEQ ID NO: 123997 - DNA, 619 bp, Homo sapiens
ttttgcttatcttggcaaaaagaaacacaggaaggataaaacagaaattaataaaattggttatctctaaggagtgtggaaaagtaatgggatagaagagttaggagaaggagtgacacatctctgaatgtattttttatagtttgacttttttttttttttttaagagacagtgtcttgctgagagtggtggcatgatcatggctcactgcaaccttgagttccccaggctcaagcaattctcccacctcagcctcatgagtagctggtactataggtgcatgccactatacccagctaattttttctatttgctgtagagacagagtctcactatgttggggttaagggattttctatttgttgtagagacagagtctcactatgactggggtcaaggagaccccagtgtctgttgtttcctcctttgygttcataagttctcatcatttagctcccacttataagtgagaacatgcagtacttggttttctcttccttcctgcattagtttgctgaggataatagcctccagctacatccatgttgccacaaaagacatgatctcattctttttaatgctgcatagtattccatggtgtatatgtaccacatttct

SEQ ID NO: 123998 - DNA, 659 bp, Homo sapiens
tatgatctcagcatacagtaagagatgtggaatattctctttcagaattttatagagacactgcttatgttgacatttgtgataccacggtgtcaatttcatgaaaactgataggcagttttctttttccacttctggtccaaagggaaaaaaagttctatagactttgtgaaattgtaactgatcttttctctctttgctttggcttctaggaatctcatagcccwacatatagcctatcttctacagccatatcaatgtttttgatgtcttattcttgcttctgccctcatcttcatttctaattttttgtgtctctttgctccaactttcttgtttatttagtttatcctattatggaaaatggcttttataaggcttttggtaagttgcctaaaattctgtttttttttcataacgtggggtaaatacaactaacaatgccacatcgtgaagatgagctgttaggctaagatatgtctcccatatttgtgattcgttttctcccctttcttgttacagttatggcaagagagctttgattggatccataccaaggctgtcaatctatcagttttgtgagcttcaaagttttaaagctaggaatatgtcctatcaccgtgttatttttcttgaaagttttggtaaagtagatgatg

SEQ ID NO: 123999 - DNA, 642 bp, Homo sapiens
aggttgaagaagagaaaatggcccaaatccaatccagttttatacaattgattttaaaaaattcttgaaaatgtgtaaaatccatatatttcagctactttctgaatttatagattaggtacctactgtgtccaagaccaacatgataccatttcctacaattcatcctgagacagcaaaattaacttgtatcaatttcctcctttgtaaaggggagataatacagactttcggtcacataccggccakgtggccttgagcaagtggcacaggaatttatgtgcctaatatttattaaatgcttaccaggaggcatgccagacactcttccaatcacattacgtgtgtgatcatacttaattgccacaacagctcccccagtgggcactattatccccattgtacagatgaagaaactgaggcaaagacaaggttgagtaacttcctcaaatcatgtggcttgtaaggggctggaactgaagttgtccaaaaatcaaatcataaaataagttgggaaagagtctattttgctacagagatcagaacatctttctgcctgtgatgtctctttgaactgaaccttgaggattcaatagaatgtccaggcagacttgagacaagagattccatagaaagatagca

SEQ ID NO: 124000 - DNA, 593 bp, Homo sapiens
gctctttgggaggctaaggtgggtggatcgcttgaacttatgagtttgagaccagcctgggcaacatggtgaaaccccatctttacaaaaaaaaatgcaaagaatggccaggcatggcggcgcatgccagtagtcccagctactyaggaggctgagttgggaggatggcttgagcccatgaattggagtttgcagtgtgccaaaatcacaccactgcactccagcctgtgcaatagagccagaccttgtcacaaaacaaaacaaaacaaaacataccttgttagttcccctttatgtattatttctaggaagtgtttttaaattctaaatttgcatgttgaatttatcataggcttttctgtatttatttcaatgattatacatatttttcctcttataatttatactgtggcagatttaactgatagatttttaaatattcatttctggggtaaatcttacttggttgtaatgctattattttctacaccctggtgggtttgattcgttaggttaaggaatggtttttgtatctatatttatcagcaagattggtgtataacttcttttctgggacaaaccttgtgtctggt

SEQ ID NO: 124001 - DNA, 584 bp, Homo sapiens
gtctgttgtttaactcacccatctgtgataatatattacagtagcctgaactcactaagacaatcactgaagcagaccactgcaatccaaggtgttgagtgtttaaagagggcaatactgaaccctgtgggcatacagataggaaagcaaaagactgttagactgacaaagtcatattccaattgaagcaggcaaaacatgacttgtgtcctgaaggatagaagttatttaggctaggaggagtaataaaaagggaatggtacttgatgcaagggaaaagaatgtgcaagatatagcagctagggtatatggtttgtatagggatatgcaaattatttaatttacttgtttattaaacagaagtttgactgcttatcatgtctcargtactatgctaaatacagctgagaacaaaggcccagactcatgacaccagaatctctaagggtgggatccgatgaaatgtattataaaactttctagatgattatgatgcacagcagggttgaaaaccactggtctagatgaattcactttgctggcttccacagaaaagaagtaaagggactgactgaataaaaacc

SEQ ID NO: 124002 - DNA, 573 bp, Homo sapiens
tcctgcctgaaatgcccttctcctctttttcctttgacgatctccccactccaccctatcgtcctccaagggtcatgtcaggggaaacttcctccagaaagtttcctgtgatgctgytctccaccaccttttcttccacccctatcttcatattggctctcattgcacccttggagtccttctcacttagctacctttatgctacaatttctacttatgtcatctctttcacgagacaggaaagtctttgaggacaaaaattttgtttatttttgtctttttttttttatttaagttttggctttcctagaatctttctccaatgctctgtaataagtcatttaatgcttattgaattaggcctttgcagactaaagactaggtatagatgatcttttgtttttccttgcttgattactgaggaatgttttatgtgtccaacgagatcactgactcaaagaacttaaaggaaaagcagattagccactctgggtttggtataaatgttccacatcagaatgcaaaatcataataaaggaatctatagtttcgtgttgctgggagtcaggaggc

SEQ ID NO: 124003 - DNA, 573 bp, Homo sapiens
tcctgcctgaaatgcccttctcctctttttcctttgacgatctccccactccaccctatcgtcctccaagggtcatgtcaggggaaacttcctccagaaagtttcctgtgatgctgctctccaccaccttttcttccacccctatcttcatattggctctcattgcacccttggagtccttctcacttagctacctttatgctrcaatttctacttatgtcatctctttcacgagacaggaaagtctttgaggacaaaaattttgtttatttttgtctttttttttttatttaagttttggctttcctagaatctttctccaatgctctgtaataagtcatttaatgcttattgaattaggcctttgcagactaaagactaggtatagatgatcttttgtttttccttgcttgattactgaggaatgttttatgtgtccaacgagatcactgactcaaagaacttaaaggaaaagcagattagccactctgggtttggtataaatgttccacatcagaatgcaaaatcataataaaggaatctatagtttcgtgttgctgggagtcaggaggc

SEQ ID NO: 124004 - DNA, 466 bp, Homo sapiens
tcttctgagctccccctaaaatttacacacttctattattctataattcctctattttatgaacaaaaagaaaggacttgttcatatcttgagtagattattttgaccttgcctgaccagtgcctctctgtccagtcttggtctctagatttctatttactcagagtcatcatctaaccaatacatatcagatcaaggcactctcctcagagcaaccattrattgaatcccttcatccataaatcaagttcaaactgcttggaatgctatttaaagttcataatgctatttaaagttcatggcaagcttgccatgccaaccccaactccaaccactaccacacactctcagtaattactgtccctattgtccccagaatcagccatggactctaagctctgactcaagagtcatctctacatggaatgctcttttattaccttctcatcaattgaaattctacccc

SEQ ID NO: 124005 - DNA, 490 bp, Homo sapiens
gaagcaagagatacaaacggaagctgggaggttctgcaaggaggacacaagaaagagacatggccctttctctgcatcagggtatgtcatttccagatgaactgcaaagaacttctgctgtcattttgcagtgatgaagggacacaaacagcctggggggggggtagttgagatactgaagatggtagagtccagtaaaatggaaagagctgggtccccatcacgtttctaaatcaaataactaacctggcctctgatcttatttaatgagataatgtagttatttactgtgtaaattgggggtcagtacatttttttttctgcaaaaggccaaaargtaaatattttaggctttgctagtcacacagtctctgaaccaaccattctgcccttggacatgaaaacagctacagacattacataatgaatgggcatggctatatttcaataaaacgtgatttacaaaagcagacagtgggctggatgtcac

SEQ ID NO: 124006 - DNA, 579 bp, Homo sapiens
gctaggaatattttttttccagggaagctttgacccttctctttatctttctttttagactatgtgctgaaagaggtagaaatccatactcactcacccctttcttcccttgcatctttgttttcatctccatccttctcttgcctcctttctctccctttttgcctcttttccctttttcccctttgtwccttctctttttttccatttattctcctatcctttcacacagcatagagatgcaagctttggaacaaaatacattatgggtccaaattgcagctctgctccctggtaattagggatttgggcaagattatcaattttttttttttttttttggagcctctgttatttatctgaaaatggagactaaaattttcagggttttaaggttattaaatgaccttatttatagaaagaggcctgttaaggtatatgggcacataactggcatagaataaatgcaggtaccttcctgtattcagcaaggctttattgagttaagtccatgatatatgtaaagtcctgtggtagataccagagacagaataagttttggtttcttctgttaagtaa

SEQ ID NO: 124007 - DNA, 545 bp, Homo sapiens
atcctagtaagattataaatagtaatatgaagtctgctttaactgaatagaatttktagaattaagtttttggcttctacttttatttaacattttattatgaaaaatttcaagtatattcaaaataaacagaatagttatttgcagtctcatgtatcggtcattaaacttgaacaactaatttgcagtttttgtttcatataaccacttcctatttgtacaattttcattataatcacagttactttatgtaaaatttacatattttaaactgaacaaattttgatacaactaaataacccagaactctatcagggtatatgacatttccatcttccttcccacttaatcccagtgtgtctttaaaaactgaaaaggtacttatggaatttaattttgttttactagcttcttttccagggttttctttgttctccttcactcagatactgtctacattctttaacctttttatattatatgtatttctgtaacccattttaaatatttggggagtaaataagtagattaaataatagggtgat

SEQ ID NO: 124008 - DNA, 545 bp, Homo sapiens
atcctagtaagattataaatagtaatatgaagtctgctttaactgaatagaatttgtagaattaagtttttggcttctacttttatttaacattttattatgaaaaatttcaagtatattcaaaataaacagaatagttatttgcagtctcatgtatcggtcattaaacttgaacaactaatttgcagtttttgtttcatataaccacttcctatttgtacaattttcattataatcacagttactttatgtaaaatttacatattttaaactgaacaaattttgatacaactaaataacccagarctctatcagggtatatgacatttccatcttccttcccacttaatcccagtgtgtctttaaaaactgaaaaggtacttatggaatttaattttgttttactagcttcttttccagggttttctttgttctccttcactcagatactgtctacattctttaacctttttatattatatgtatttctgtaacccattttaaatatttggggagtaaataagtagattaaataatagggtgat

SEQ ID NO: 124009 - DNA, 629 bp, Homo sapiens
acttcagggaacatttaatactatgaaatactgatttatttggtagcatcataattataaagagcaaccctcaaccaaaaaaatgatgcagattcatttataaacaaaagtcccatgctacttaggtgagtttacactcatgtactactcgaggtcctagaacttccccatgaaataacatcacttgcccacagtggtgacttcctggctaatgaactctttaacagccttctcttaatctctttctcacttctctaccaatgctttctggattcacattttaaatatcctgcttgcttgtgaatttgttactggaaggagaycctgatccagaccccaaagaagggtacttggatcttgcacaagaaagagttcaaggtgagtccatagagtaagctgaacgcaagtttattaagaaagtaaaggaataaaagaatggctactccataggcagagcagccctgagggctgctgattgcttgtttttatggttatttattgcttatatgctaaacaaggggtggattattcattccctccccttttgagaccatatacggtaacttcctgacattgccatggcatttgtaaactgtcatggctttggtaggaatgtaacagtgaggacg

SEQ ID NO: 124010 - DNA, 629 bp, Homo sapiens
cacgtcgaaatgccattgtggatattttgaaaatataaaaacattacaagacaaagaaagaaagtaagaggagttccaaatcaaaaggattccttctggtaaacccttaatttcaacggtgttggacaagtctatggtacaaaggcattgtgtgaataagacctaactccacattggtgagaagtctagagcagtctttttaaaagcattttccaggttgtagacaatgatgaggcagaatttgcctgcttggccaaagagsattattttccctggggtaaggcatgcctacagataaattgggatttggaaggtagccaaaagttggtagcttcactatgtattccttccagaaagctcagtatttttcattgtggttaacatgtctcactggcttgataataatatcttaatcactgcttcctctgtattcttccaagggcagggaggttcagctgtgtaagaatctgtctaccacaaataaaaactatcaaacggattttaaaacctctgtggtcgacccttttgtaaaagcttcactatcagtctgctttagatgtgatttgtctgcttatttatttattgctttcatgcattattctatttggtctacaacatttaaaaaatac

SEQ ID NO: 124011 - DNA, 381 bp, Homo sapiens
aaactcttccaaaaaatagaagagggaggaacacttcgtaactcattctatgaggccagctttaccttgatatcaaagatagataaatcacaagaaaagacatcaaatcattacatgccgggcgtggtgacttaggcctgtaatcccagcgttttgggaggccgaggcatggaggatcccttgagccccaggagttcacgaccagcctgggtaacacaggaagaccccatctctactttttaagtactttttttttaaatcaaaaaagaaaaaagaaaattacaaaacaatatcccttataaatacacagatgcaaaagtcctgaagaaaatccaatgacrtatttaaaaaatggatatacaccattgataaaaggaattc

SEQ ID NO: 124012 - DNA, 574 bp, Homo sapiens
tgggagaactcaaaggggcagggtggggagtgtgcatggtgggggcggtgcagttccagatcgtaggtggattcaaagatttcctgattggcaattggttcctagagtttatctcctactaaattcccttctactcagctccagccacaatggcctccttgctatttctccaacatacaaggcacattcctcccacaaggtctctgagttcagagatgttaacagtttattgccacatccatttaatattttcggaccacagatgaccacaggtgactgaaactgtggataaggaggggctgttgtaattatttgggatatactgctagaacattcatagtttacaaataacaagaatttccgcttgctagaccaagtatttcctatgaaaggataaaatccacatgctatagcttcagtgactcaccctgaacacttgccatgtctcagggacaaagtcaggtatctgtgctaacatgtgactagcaacctcaacccttyatcattttcttactgccttagtatgtgatttaccttacctggcaagggccaaagctatggagagtgagctagc

SEQ ID NO: 124013 - DNA, 574 bp, Homo sapiens
tgggagaactcaaaggggcagggtggggagtgtgcatggtgggggcggtgcagttccagatcgtaggtggattcaaagatttcctgattggcaattggttcctagagtttatctcctactaaattcccttctactcagctccagccacaatggcctccttgctatttctccaacatacaaggcacattcctcccacaaggtctctgagttcagagatgttaacagtttattgccacatccatttaatattttcggaccacagatgaccacaggtgactgaaactgtggataaggaggggctgttgtaattatttgggatatactgctagaacattcatagtttacaaataacaagaatttccgcttgctagaccaagtatttcctatgaaaggataaaatccacatgctatagcttcagtgactcaccctgaacacttgccatgtctcagggacaaagtcaggtatctgtgctaacatgtgactagcaacctcaacccttcrtcattttcttactgccttagtatgtgatttaccttacctggcaagggccaaagctatggagagtgagctagc

SEQ ID NO: 124014 - DNA, 441 bp, Homo sapiens
cctttgctgtatgtcctggtaggtgtagccagtgcatcagcgaacatggtcactgccttgtcctccttgtcctgaccacaagggcttttcagttcactgactctggtttgtctctgtgcttttccttggctacatgaggatatatccagtgctccctttgcatgcagggcatttccagaggctgtttaaggtctgctgcctagatgccctctccccttcttctgcttcctctctatgatgggcatgggagaaacacygaggtcttgcaggtttcctgggctacccttgggaaagagcagcacagcttctgctctggagaactatgcccccctccactgacttaaccagaagagacagagcctaggtcccctccctggagatccacaagacctaaaccctcttattcccattcttctcctctatctcccaagtttggggaaa

SEQ ID NO: 124015 - DNA, 592 bp, Homo sapiens
atcaactcctttctttgaaaactggtgaataaaggggaaaaaaatcaaacatttattctccctttgttatatgagccatactactgaataatcacataataaatgagcagacatttttctttataggattcctcagctgattaatgaataaagaatgatagaagtagaatatcaccaattgcagtgcttaatgaactaatggatctatacatagatcataatggtagytagcactcaaaaagagaggcaaccatttattacatgcctccagatagaggaacattacctgtgaaatagtcttgtcaaaaagatttgaacctgtgtctgatcaagcctctagatccatatattaagttatggaaaatatgaggacataaagacatattattaaggaataccacagggatgtagaaaaatgaaggttttaggagactcaacaaataaaaatctgatttttgtcaacaaataaattgcaggatggagtgggggtctgggggatcttacagatcaaaggatgcctaaaagacttatcagccaatcataatgagtaaattttaattggctattgattgaaactattttttaaaattat

SEQ ID NO: 124016 - DNA, 565 bp, Homo sapiens
ctattcagttgttgattccatataactggagaagcagttttaatggaatcatcagcagttttcactaatacttctcagagttttgtagccagggagacatttctcccaattcacctttatttccttctgagccttgagcatactctacttttcctgaggagtgattttcaggagtatgatttgccccctgagaaggatttcagtgatttggtagaggaatgaagagtataaagacttctttgcttaagctgtgtagcagcaattttcttcctttaaaagttaaaccatctcttttccttttcctactctgatatgttctctyacatcaactcttttttaaaaattaacatttagagccacagcaggttgctaagagtacatagcatgccatcgtgttccagggccaccatggcctctgctcctcctgagatcatgatccctgtagagtcctcccagatggatctcttattttccttacctttttcctcaagggctctggaagcatttatcttttcatttaagaccatttataactagaaactaagctttagtgcttagttccttc

SEQ ID NO: 124017 - DNA, 477 bp, Homo sapiens
acatgatctctttctttttatggcggtatagtgttccatgttgtatagataccacattttctttattcaatctgccattgatgggcattttggttgacttcacgtctttgctattgtgaatgctgctgcaatgaacaaacatgtgcatgtgtctttatggtagaatgatttatattcttctgggtatataccagtaacagtatggctgggtttaatggtaactctgtttttagctctttgaagaattaccatcttaattaccacttaccagccttccaaaatagctgaactaatttccacttccaccaacagtgtgtaagtgttccttttctctacaacttagacagcattctgttattttctgactttcaataataggcattctgactgttatgagatggtatctcattatggttttgattttcatttttctrttgatcagtgatgttgagatttttttaatatgattgttggcca

SEQ ID NO: 124018 - DNA, 563 bp, Homo sapiens
caataagttatcaaattcgagttattttacttccaaataaagaagcttttctacaaagtgtgcacagaaaagtacagctttcatttacttttctcaaaaataggaaagtattctaatctaatgtgcctagaaagaatattcataaccatttcattgaagctagctatatcttataccaactttaagacaaattaaatattcagacaagagtagaataaaacaacagtattcactgcagaagagttgaattttacagagtagttctatagctttggraaaatattgacataaactgagataattgagtgatatttaactatacaactataatacatttgactcaaaacaatacacctctatgtgtattcttttgtttaatggaagcataagatatatttttagcatgtcctttgtttcaagattatcaaggtgtgtattatacattccatttgtttcagtcggtgttggatatatacagacaagatacaaagctaatctattaccttaccatggatagtgtaaaaagatattagacttatgggtcagaggcaaaggattgtaat

SEQ ID NO: 124019 - DNA, 586 bp, Homo sapiens
tttggcacttcaaattgttttctagcattgaattattgtaatggaaattctacttaaaaacttggtttgtcataatcacctgcaattgagcttatggtttatttacatatatggatttccttgctataattatcatcagatgacaggcatattcattagtatccatacaaagttcattggaaatgtccttaatagcaattagtgcaagaatggagatcagtaaaatatattttttgatgtattcatttattagtaccattgtacacatattaagatgggctgtagtagattaaagatgaccacacattatttgctacttctcccaagaggtgaagtctaattcccttctccttgaatctgggctggattcagtaacttatttgggtaatagaaaattccaagaatgttttgggacttcttaggctaagtcctaagccttggtactttctttcaggcctcttagaacacttgcatattgaaataaactgccartttgtgaggaagcacacaaaagctcataaagaggaactgaggcacccagctgacacactaacagagctcccagatgacaatcaacaccaacctg

SEQ ID NO: 124020 - DNA, 546 bp, Homo sapiens
gctgctctattttgtgacattactggtaacaagtcacatcttgttggagattttagattaaaaatgatctattttgtaattcagagtattactgcaagtccataaatttggttttgtctcctttttatacataatgaactgagttgcagaaagttaattgacatttgtacccatttatgccattagttagtgtggtggattcaaactcaagtttttcagctcccaaattgttattttaactttaattaattagagattatcttacaaaagccattaaagtctatagcactttatttgtgtaacarcggtccccaacctttttggcaccagggaccggtttcttaaaaaacaatttttccatggacctgggggtggggcagggtggtgatcttgggatgaaactgttctacctcagatcatcaggcattattagttgaattctcatgtggagcactcaacctagatccctcacatgtgcagttcacaatagggtctgtgttccttttagaatctaaggccaccgctgatctgacagtaggcgaagct

SEQ ID NO: 124021 - DNA, 606 bp, Homo sapiens
gtactatgacttttgtcactgtacatcttcttaaactctagactgtgttgtctccataacttgagaggctaagttatttcacaaagttcaatcataaaatmtcttcttacagatactctcaaacttgatgtactatgatttgatattattgtgctaaaattgtaagtccttttattactctaaatataaacacctatatttttattattttctgagtttgtatttttctggtcaccttgaggaagctgggatcagttctgatgatatgaaagtcatagtgtgcatatgaacctcaatgatactttttcctcctttgagacacaatatatagcattacattctcttcgtaattactgagttttccctcacacaattttaaaagtaagatctttgaggacttatttttattatttttgtgtctgctgaatcggtcatagtatatttaacagtattgaatttaatcaactattggattgtttaagaataaaaggtaaggtagaatgcatgtgtgagctctccaaaatctactcagcacagaggaaaataaaaagccttgcatatgagctggtggtgggaggacccttaattataaactggcaagaagca

SEQ ID NO: 124022 - DNA, 606 bp, Homo sapiens
gtactatgacttttgtcactgtacatcttcttaaactctagactgtgttgtctccataacttgagaggctaagttatttcacaaagttcaatcataaaatatcttcttacagatactctcaaacttgatgtactatgatttgatattattgtgctaaaattgtaagtccttttattactctaaatataaacacctatatttttattattttctgagtttgtatttttctggtcaccttgaggaagctgggatcagttctgatgatatgaaagtcatagtgtgyatatgaacctcaatgatactttttcctcctttgagacacaatatatagcattacattctcttcgtaattactgagttttccctcacacaattttaaaagtaagatctttgaggacttatttttattatttttgtgtctgctgaatcggtcatagtatatttaacagtattgaatttaatcaactattggattgtttaagaataaaaggtaaggtagaatgcatgtgtgagctctccaaaatctactcagcacagaggaaaataaaaagccttgcatatgagctggtggtgggaggacccttaattataaactggcaagaagca

SEQ ID NO: 124023 - DNA, 625 bp, Homo sapiens
gtaaaaacgtatccgtttttataaaagacagaagcttattcaagaagatcagagaattaaacagaataaattcaaaaaatttctgcccaagtgacagataataatcagactactaaaaaacaaatacaagaaaaaaaatcctaaaataaattacaaagaaaggatgcattaaatctatagagaaacaatggttcaaataattgtggatttttcatcagaaaccatggaggcatgaaggaagtgaattgacatttttaaaatgctrgaaaaaatctttccagaatgtatgtagagggaaacaaagaataaaaaaaagacatatagttaaaaaaaaaactgtaagaaatgaaaatggaatagtaaaaaatattaaatatacttagaaataggagactaaaaagactcatatcttccagaagatagcaagaaaaagaaaagagaaagacaaaatataaggaacagacagaaaacaaatcataaagtgaaagacctaaatacgattatagtcatatgttgcttaatgatggggatacgttctgagaaattcattgttaggcaattttgttgctgtgcaaacatcatagagtttacttacacaaacctaattggagtagcctactactca

SEQ ID NO: 124024 - DNA, 597 bp, Homo sapiens
cagtaaaagttcacatgtctgtaaactatccccatattattctaaatttcatggattttcagtctgaactagaaatccacagggatcctatcacttgtaaacctggagctcgctcctgtcttcaccctgtctggctggtgtttcatctcagagagtgatgtggctttaaggcagagggctccaagcagatgggctggctgagatgttcagtttatttgcttttgaccatggaaagttatatcccctttccaaacctatatcttcacctgtaaaataaggataaaaaaatagcacctatttcaaagagtaactgtaagagagaaatgaaacaatacacgtgatgtgcttatttgcattgagcctaaaactgaggagagttgataaatgacacctatttctatttttcctcttatgagagactttcatcagagtctgagtgagctgactcaaacgacattataaagcacctgctttgtgcaagacrtgtggggatttggaccatcacaatgatttcaaaaaaaaaacaaaaaacaaaaaacagagaaatggtagaggagcagccgttggcactttaggagtgtgaaaagcacagcacac

SEQ ID NO: 124025 - DNA, 590 bp, Homo sapiens
tgcttgatggaatattacatttcctccaatgaatctcccaatcttatgagatatgccctttttataaataaggtagtttggaaagattaaaaasttttgtaaaagagaaagctaataaatgacaaagcctggatttgaatgccaatctatcttgctctactagcccatactactgaaatctggcctgtgccagtgattttaccccgagaacatgaagtccaatcacttgggtactccgtgttgtgtgcttctgtataacacagaaatagcttaatttccaacctaagaaatataatcattccattcaagtcaccaaaagcaaaattctacagctgattcattttcctataaaggaaaagaaacatctgctgcagacattttgctttttatatcttgagctattacaagtagaaagctgggatagcactgcattggccattacccataagaaaaacatggcagacttcatattctaacagctcttgacgcgcaagtttgcaaccccttttctcacaggaactaatactatgtgtgtgtaaaaaaatatattatttatatacaatatataacaaagggatttcacaatattt

SEQ ID NO: 124026 - DNA, 514 bp, Homo sapiens
gatatgccctttttataaataaggtagtttggaaagattaaaaacttttgtaaaagagaaagctaataaatgacaaagcctggatttgaatgccaatctatcttgctctactagcccatactactgaaatctggcctgtgccagtgattttaccccgagaacatgaagtccaatcacttgggtactccgtgttgtgtgcttctgtataacacagaaatagcttaatttccaacctaagaaatataatcattccattcaagtcaccaaaagcaaaattctacagctgattcattttcctataaaggaaaagaaacatctgctgcagacattttgctttttatatcttgagctattacaagtagaaagctgggatagcactgcattggccattacccataagaaaaacatggcagacttcatattctaacagctcttgacrcgcaagtttgcaaccccttttctcacaggaactaatactatgtgtgtgtaaaaaaatatattatttatatacaat

SEQ ID NO: 124027 - DNA, 384 bp, Homo sapiens
tcttcccgttgcttggcttccaaccgctttctctctgtaaataagagcagtattaaccacagttgtctacttcatataaccaatgactttcccttartccaaattacaaggcaaactttagtcatgagacaagtggatatcctggtctctcttacctgataacaagagttaattcctttaatttcctaagtgctttgtaagtgaaaatgatactactgtaagtcattacatttactactatataataaaaaatatctgaggctaatagaagtatatggaataagtcagaatctagtagggactcagattctagtcttgctaatacatatttaaattctacttttcaactatgtttagtgcttcaacacaattgcccattattct

SEQ ID NO: 124028 - DNA, 593 bp, Homo sapiens
ccttgtactgacaatacaggcccagaactgttcacctttctgcagttttgaaagaggatcagaaattaaaatgctgctggcttctatactgattctgaggaaaaaatgttatgcaacaaatataacagagctcaaagggagatttttaattttaggagtcacctggttacaaaaacaaaaactatgagtgatkgaatctacttaatgttccctctttctgtttggaccagagatctagtcatcattcactaatggattgaacaataaaaacagagtacataattcactcagattcttcactgaatgtcccaactgactgcattagaatatacagcatctggaaagtgagtcaataaatccccacttaggcagtcaataacatgtcaattcagacatctttataaaatatgaattagaaatctgttaaaatgagctggaacttttaaaagatattgtgaaaaaaattagaacgacaggtgagggggtacaagggaactctgtactctgttcaattttttaaataaatctaaaactactcaaaaataaagtctatagatttttttaaaatggaatagaaaacagaaattagaaac

SEQ ID NO: 124029 - DNA, 593 bp, Homo sapiens
ccttgtactgacaatacaggcccagaactgttcacctttctgcagttttgaaagaggatcagaaattaaaatgctgctggcttctatactgattctgaggaaaaaatgttatgcaacaaatataacagagctcaaagggagatttttaattttaggagtcacctggttacaaaaacaaaaactatgagtgatggaatctacttaatgttccctctttctgtttggaccagagatctagtcatcattcactaatggattgaacaataaaaacagagtacataattcactcagattcttcactgaatgtcccaactgactgcattagaatatacagcatctggaaagtgagtcaataaatccccacttaggcagtcaataacatgtcaattcagacatytttataaaatatgaattagaaatctgttaaaatgagctggaacttttaaaagatattgtgaaaaaaattagaacgacaggtgagggggtacaagggaactctgtactctgttcaattttttaaataaatctaaaactactcaaaaataaagtctatagatttttttaaaatggaatagaaaacagaaattagaaac

SEQ ID NO: 124030 - DNA, 580 bp, Homo sapiens
cccagatgtttagaatcacttcctcccaattaagcgtctgccgggagtcgaggggcccgcctgtgtgcagggtccatgtctgttcaaaagggtctcagaagagagaaaatgggaactcctccctgcacagacggcgggaaagtggttcactgttgagctccctggggaagccgggaagccagcactctgaagcatgctggatgcggtggaggtggtgcctgtgcttgattgtccgcccgtgtggaagcgcgaggatgtgcaggtggcccagtggtctccagggagagatttgagtgtcagggcctctgtgcctagttctcctccctctccaaatggaaagagaactgtgggaggagaaaaacaaaagagmagaaagacacagcccctctaaagaaggagggcacaggtgccaaggtggccccatgggtcaaggcccagggtgtggacccctcctccaagggcactcttgccctgctcgggctaggctaggttttagggttccggtcctgtgcctcctcctggggtgcctttgctctgtgtcagagtcacatgtccacacagctaggcagatgacacaaag

SEQ ID NO: 124031 - DNA, 580 bp, Homo sapiens
cccagatgtttagaatcacttcctcccaattaagcgtctgccgggagtcgaggggcccgcctgtgtgcagggtccatgtctgttcaaaagggtctcagaagagagaaaatgggaactcctccctgcacagacggcgggaaagtggttcactgttgagctccctggggaagccgggaagccagcactctgaagcatgctggatgcggtggaggtggtgcctgtgcttgattgtccgcccgtgtggaagcgcgaggatgtgcaggtggcccagtggtctccagggagagatttgagtgtcagggcctctgtgcctagttctcctccctctccaaatggaaagagaactgtgggaggagaaaaacaaaagagcagaaagacacagcccctctaaagaaggagggcacaggtgccaaggtggccccatgggtcaaggcccagggtgtggacccctcctccragggcactcttgccctgctcgggctaggctaggttttagggttccggtcctgtgcctcctcctggggtgcctttgctctgtgtcagagtcacatgtccacacagctaggcagatgacacaaag

SEQ ID NO: 124032 - DNA, 580 bp, Homo sapiens
cccagatgtttagaatcacttcctcccaattaagcgtctgccgggagtcgaggggcccgcctgtgtgcagggtccatgtctgttcaaaagggtctcagaagagagaaaatgggaactcctccctgcacagacggcgggaaagtggttcactgttgagctccctggggaagccgggaagccagcactctgaagcatgctggatgcggtggaggtggtgcctgtgcttgattgtccgcccgtgtggaagcgcgaggatgtgcaggtggcccagtggtctccagggagagatttgagtgtcagggcctctgtgcctagttctcctccctctccaaatggaaagagaactgtgggaggagaaaaacaaaagagcagaaagacacagcccctctaaagaaggagggcacaggtgccaaggtggccccatgggtcaaggcccagggtgtggacccctcctccaagggcactcwtgccctgctcgggctaggctaggttttagggttccggtcctgtgcctcctcctggggtgcctttgctctgtgtcagagtcacatgtccacacagctaggcagatgacacaaag

SEQ ID NO: 124033 - DNA, 501 bp, Homo sapiens
gaacccctctcccagaaggtggagaagcttctcaaagcaactggcccaggcagccttgtacttgcttcattctggggtcaggaagaagctgcaggccctccttcccaccctcgcttcccttctcctccacactgtcaactctgctccaggaaggggcagtakccccagtgtctgctgggccagcacagccatctctcacccacctgagttcataatgactcctgtgtagagcagacttcccttggcttcactgaaaccattccttcttgtcttagaaagcaatcagaaatatagttaactgccttaaagttcccttatcattgaaatgaactagatcacagaagtgcctatttgcattttttattcttattcactgggtttttaaaaggagccaagagaggggagaggaaatgcatttacttgctgggatttcacttgggatgttcatgttcgtctggaaagcaaaataaaggcatgaagattgcccactgatttcctttc

SEQ ID NO: 124034 - DNA, 514 bp, Homo sapiens
tggccccttaaggctaagattgtttttttgccctcaacaccccagtgggtttgctttgagggccaactactactgtgaactctgtggcagtggatcaagatgtgctcaactggcactattgttgagctgtctccgcccattgtgtttagtggcagccaccctccttggagtggagaagtgtgtgctgcctttgggtccttgccaagtgagctgttgagacatttagtgtgtgaaaggtacaggcaagaagaagatgcatttagtctgaagtcctggcaggttctaggacatgatttgatgaaagataacattaagaaagctgtgtgacaactggatagcatttaacttgtctctcactccctactctgtgaattccctaatgtctttaaggctcttttttgccctccatcctgcccatcaaggagtccctgacatgctgttctccatcctgtttcctgtggagtyaaagtgtatttacaaatctgcagatgcactaggcgggcagggctggaaa

SEQ ID NO: 124035 - DNA, 661 bp, Homo sapiens
tgtatcagtctgtgtccattcaggaaaacagaaacactccttattttgacagaaacaataagcattggattaaacaggtgttagaggattgaaaaggcaaatatggagaattctagcatcacgcggaacagctattgccacactaaggatagggaacaagggaaaggagatggacttcttgaaacctaggaatttagaggagagacctgcagagcgagaacccaagcttytgaggtgggacactggctagtggggccggtgcttctgaggaaaggagaagaggatagttctggaagtgtggagaaaactgggaacaggaaccaactgctgctgccagattaaaaaaaaaaaaaaaaaaaatctatagggtgacacttacaggcctttctttctctcctgacttctgcgtctcttgcgccccctagtgacaaaacctaatagaggactgcccgcgaagtagaaccacggttgcaaagcccaggccagcatcacgaagtagagcccagaagggtaggtttggagctgacagacaagagtttatcagtccacagagagctgctggggtagatggagaaaatagagaagcatgtttcaagcagggatgcgtgcatgattccacactttaaaagtgcaactaaagtcagtaaatgcagagtaagta

SEQ ID NO: 124036 - DNA, 581 bp, Homo sapiens
agggtagggaccttgtctgaaaataggtaataaataaatagagaatggagcacctctaaaagagacttttagaggtcatatgtttctccttatttgggaacctcagtgagggagtggccactgccatttagttcacagctttattctgctcctcaaacaatgaatggtacaatgactgccttcaataaatgaaaaaatctgtctaacccaactcttccctgatttttcaatgtcaagygtactcaatccctcagtcaatgtcatctcccattcctcattcccagggataactggactccagatttagaagctccccaggatggcaagcccttctcaggccacttgttagagtttagggataagctccttaaaagtagcaaccgtaagtgaccatctttcaaccccccataaggcctagatgctgtcaatttgttttagcatgcattattgagcatcttctacgtacaaaacacatgctacatattttcatttcttaatgttcaaatcaatgagtattagggtactcattgatcattttaaaaagaacacagatgcctaggaaacatgagtgatatttcaaa

SEQ ID NO: 124037 - DNA, 574 bp, Homo sapiens
aatgttggggaaatagctcaagtaccaacagggaaataaagacaactttccctagtgtcaaactgagaagagtctatgtagagaaaattccagacccagattgggctgagattcgataacagagtggctctgcatgttatacagctatctgctcctccctatgccactgcacatgccacagactggccttygcctatctcctgtactagaaaaataactggttgggtggccattctgcctatagcttaccccaaccaaaaagaaaaaaaaaaaaccttccatactgcaacagtaaccatttaggattctttttcaatcaactttaaaattgtaaaaatagtttggaaactatggggatatagaaagaatagattaataatcatccccacatatcctgccacccagatagtactattgacacccctgcttattggtaccagagcacacctttcatcctactgccttcaggcacaaactcatgctatctttgggccttgaaaaccttcctcccttttaattttaattaaataaaaatttactgcctccaattagtcaaagctcattgagggcagaa

SEQ ID NO: 124038 - DNA, 291 bp, Homo sapiens
ggttgaaatatgctatgtgacttcaaaggctgggtcacaaaaggtcatgcagattccacctggtcctcttagraggctgtctctggggaagccagttaccatgtaaaaagtctcgctattctaagaccatcatgcaagagaggccagatgtaggtcctccaggtgacaaccccagaagagggctcagctggcatccagcatcaacagccaaccatctgagtgagacttcttggatgtccagcccagtcagccttcagatgaccacagctccaatcaacatctgacgacaaa

SEQ ID NO: 124039 - DNA, 291 bp, Homo sapiens
ggttgaaatatgctatgtgacttcaaaggctgggtcacaaaaggtcatgcagattccacctggtcctcttaggaggctgtctctggggaagccagttaccatgtaaaaagtctcgctattctaagaccatcatgcaagagaggccagatgtaggtcctccaggtgacaaccccagaagagggctcagctggcatccagcatcaacagccaamcatctgagtgagacttcttggatgtccagcccagtcagccttcagatgaccacagctccaatcaacatctgacgacaaa

SEQ ID NO: 124040 - DNA, 291 bp, Homo sapiens
ggttgaaatatgctatgtgacttcaaaggctgggtcacaaaaggtcatgcagattccacctggtcctcttaggaggctgtctctggggaagccagttaccatgtaaaaagtctcgctattctaagaccatcatgcaagagaggccagatgtaggtcctccaggtgacaaccccagaagagggctcagctggcatccagcatcaacagccaaccatctgagtgagacttctyggatgtccagcccagtcagccttcagatgaccacagctccaatcaacatctgacgacaaa

SEQ ID NO: 124041 - DNA, 429 bp, Homo sapiens
tcctcctgcctgcccctgtcccaccccgggccccccaagaccatctcccacccctcacacatcaagctgccccatccctcttccacctgaatgaggcctggaggaagaaaacacttgggggccctgaaagtctggaaggctgcgcaagtcgtgccttgaggacaggraaggccggcctctttctctaacaaggtccaggcagaagcgggggaagcagcagctggactgctgggatgagctgggcagcggccacccagccctgcccagagagaagcaaggaatcggttctggcccaagcacgcttgtcaagctctggcctcagaggccctctgcagggcccacctcctgaagcagaaagaaggtggggaatggggggaaagaccaggtgcttgggctggtcaggaccagaactcctccacgtacctgtgt

SEQ ID NO: 124042 - DNA, 643 bp, Homo sapiens
aggttccaaattaattatctcagctatttcagcctaattttaggtgtaaaaagctcagaaatgacattccttcatgcaaaataatgtattctacttaggtttgtgtgttttktttttgtttttgttttttaaacatagttgctgtaaacgtctatgggaaatacagtctttataataggttctgatagaataattgagtaattcccccccataagtacattttattgactgttactgcataataggcgataaatctgatgcttatttggaaaagaagtaggcattctttagatgagctgtgctttgaagactgttatgaaaaggaataagaagtcagcatagtggcactcctggtttccttttttggccccgccacagaaaagatggatgtagtaagaaagttggagtgaaagagaaagttccagggagaggggaggggagctagtagtcatcagctaaaaaagagaagaagaaaagtgattttaaggaaaaaaaaattaatagaataaaagataaaaagagtgattaattcttactttcaatggtaagaatacaggtactagctgcagatcctttattgttgactgctttacacatatactctcctccatcttctgggaaagtttctggtaagtaaaggcag

SEQ ID NO: 124043 - DNA, 622 bp, Homo sapiens
tctccctgattgttagagtttcttgatctttttacttatgcattaattatgattctctcaaggcttttcatcataccattgatttagattttagctctattctgttcctsgctttttctaacttgtttattaaatacttactgcattttttaatttccagattgtttctctgtctctgcaatatcattttatcatattatagggaatatatatcattttttcccaaactacatggttattttgtctttttatgttacaatcctttctttagctgtatgtataatactcgatatattatttttttcttcaacttcatcttgcttatgccttgtatgggcagctctgtccagattttgcactggttctgagcttggtctacttcctttcctttctggtgctagtcagtcttctttcgacctaaattttgagcactaggtgttgctagagggtgcgaagatgcactgggcagaattctggggaatccagattttctgtctcctctgagatcctattatatagcttttgtggcagcacttgctgcatttattcacatgtatctcccacacctgggaacaccagctttttcccccaactcagcacagtgcttggcaggatggccagc

SEQ ID NO: 124044 - DNA, 409 bp, Homo sapiens
gcagagaccagaataatttcatcttgctacatccctatcctttcctacacttaccccttaacatgttgacatacrtatggccaggccagtaaccctgctaaggggtggttgtgatgcatattagatgatgaagtaagcaggaagcatgggaagtgattttctttttgaaataccttcagcatcctcctccatgacctccagatcataatttgcgaagatttttacatcaagctctcattggtcatcttgggatttcacatattttcttaatagaactcttcttctgtgtttatatagagctacttattaaatataattatgactttttaaaaaatgtctattattgtatattttattcacaaatgcttttttttacattgttaatgctagcccaaagcaagtaatttga

SEQ ID NO: 124045 - DNA, 522 bp, Homo sapiens
catgctccagaagtcaggaggcctggctactagcctccattctgcatgaccttgattaagtcaccgggtgtctctaggctcctttcctgttcttccrgtggggatagtaacacctgcctcatctcacttggttcttggagaataaagagacataatagatgataaagggttttgcagatataataagctgctattacttcttggccttggcatcaccacaaaagcagtggcgaggttcctgttgagctctggcagcttctccaaggtgaccagtctttaggaagggggaagacggtgggggagaaaagcaagatgtgttggcaagctctacttagaaatgccaccttggagatacctgtcaaaactgctccatgccagatgggtgcatctacttgcagggcagtgtgctgtggtggttaagatcctggaggacctgagtttaagccccagatcaccctctggttagcatgtgacctcaggcaaattaagcaaattttctgcacctcagtttcttcatctgta

SEQ ID NO: 124046 - DNA, 522 bp, Homo sapiens
catgctccagaagtcaggaggcctggctactagcctccattctgcatgaccttgattaagtcaccgggtgtctctaggctcctttcctgttcttccggtggggatagtaacacctgcctcatctcacttggttcttggagaataaagagacataatagatgataaagggttttgcagatataataagctgctattacttcttggcctyggcatcaccacaaaagcagtggcgaggttcctgttgagctctggcagcttctccaaggtgaccagtctttaggaagggggaagacggtgggggagaaaagcaagatgtgttggcaagctctacttagaaatgccaccttggagatacctgtcaaaactgctccatgccagatgggtgcatctacttgcagggcagtgtgctgtggtggttaagatcctggaggacctgagtttaagccccagatcaccctctggttagcatgtgacctcaggcaaattaagcaaattttctgcacctcagtttcttcatctgta

SEQ ID NO: 124047 - DNA, 522 bp, Homo sapiens
catgctccagaagtcaggaggcctggctactagcctccattctgcatgaccttgattaagtcaccgggtgtctctaggctcctttcctgttcttccggtggggatagtaacacctgcctcatctcacttggttcttggagaataaagagacataatagatgataaagggttttgcagatataataagctgctattacttcttggccttggcatcaccacaaaagcagtggcgaggttcctgttgagctctggcagcttctccaaggtgaccagtctttaggaagggggaagacggtgggggagaaaagcaagatgtgttggcaagctcyacttagaaatgccaccttggagatacctgtcaaaactgctccatgccagatgggtgcatctacttgcagggcagtgtgctgtggtggttaagatcctggaggacctgagtttaagccccagatcaccctctggttagcatgtgacctcaggcaaattaagcaaattttctgcacctcagtttcttcatctgta

SEQ ID NO: 124048 - DNA, 522 bp, Homo sapiens
catgctccagaagtcaggaggcctggctactagcctccattctgcatgaccttgattaagtcaccgggtgtctctaggctcctttcctgttcttccggtggggatagtaacacctgcctcatctcacttggttcttggagaataaagagacataatagatgataaagggttttgcagatataataagctgctattacttcttggccttggcatcaccacaaaagcagtggcgaggttcctgttgagctctggcagcttctccaaggtgaccagtctttaggaagggggaagacggtgggggagaaaagcaagatgtgttggcaagctctacttagaaatgccaccttggagatrcctgtcaaaactgctccatgccagatgggtgcatctacttgcagggcagtgtgctgtggtggttaagatcctggaggacctgagtttaagccccagatcaccctctggttagcatgtgacctcaggcaaattaagcaaattttctgcacctcagtttcttcatctgta

SEQ ID NO: 124049 - DNA, 585 bp, Homo sapiens
ccctcttctcacagctccactaggcagtgccccartggggactcagtgtgggggcttccaccccacatttcccttctacactgccttggtggaagctctccatgagggttctgccctggctgccaacttttgcctggacatccacgcatttccacatatcctctgaaatctaagtggaggttcccaaaccttaattcttgacttctgtgcatcctcaggctcaacatcagatgtaagctgtcaaggcttgggacttgcatcctttgaagccacagcctgagctttacctgggccccttttagccacagctggagtggctgggatgcagggtaccaagtccctaggctgcacacagcaggggggcccaggactcagcccaggaaaccacttttccctcctaggcctctgagcctggggcccgtgatggaagggactgccgtgaaggtctctgacatggcctggagacattttccccattgtcttgctgattaatattggctcctcattacttattaaaatttctgcagctggcctgaatttatccccagaaaatgggtttctcttttccatggcattgtcaggctg

SEQ ID NO: 124050 - DNA, 585 bp, Homo sapiens
ccctcttctcacagctccactaggcagtgccccagtggggactcagtgtgggggcttccaccccacatttcccttctacactgccttggtggaagctctccatgagggttctgccctggcygccaacttttgcctggacatccacgcatttccacatatcctctgaaatctaagtggaggttcccaaaccttaattcttgacttctgtgcatcctcaggctcaacatcagatgtaagctgtcaaggcttgggacttgcatcctttgaagccacagcctgagctttacctgggccccttttagccacagctggagtggctgggatgcagggtaccaagtccctaggctgcacacagcaggggggcccaggactcagcccaggaaaccacttttccctcctaggcctctgagcctggggcccgtgatggaagggactgccgtgaaggtctctgacatggcctggagacattttccccattgtcttgctgattaatattggctcctcattacttattaaaatttctgcagctggcctgaatttatccccagaaaatgggtttctcttttccatggcattgtcaggctg

SEQ ID NO: 124051 - DNA, 585 bp, Homo sapiens
ccctcttctcacagctccactaggcagtgccccagtggggactcagtgtgggggcttccaccccacatttcccttctacactgccttggtggaagctctccatgagggttctgccctggctrccaacttttgcctggacatccacgcatttccacatatcctctgaaatctaagtggaggttcccaaaccttaattcttgacttctgtgcatcctcaggctcaacatcagatgtaagctgtcaaggcttgggacttgcatcctttgaagccacagcctgagctttacctgggccccttttagccacagctggagtggctgggatgcagggtaccaagtccctaggctgcacacagcaggggggcccaggactcagcccaggaaaccacttttccctcctaggcctctgagcctggggcccgtgatggaagggactgccgtgaaggtctctgacatggcctggagacattttccccattgtcttgctgattaatattggctcctcattacttattaaaatttctgcagctggcctgaatttatccccagaaaatgggtttctcttttccatggcattgtcaggctg

SEQ ID NO: 124052 - DNA, 571 bp, Homo sapiens
catgtccaccttctctggcggcactgctccctaaggcaaggcctgacacaccattgctgagcagrtgaaggaggaaagcaccgcgggaccgcacagcttcctaagcccacatgcatttccaggctcgacagaggcacattctttccttgatagcgacagtttcccgaggccttcaggggaaatcattttctatgtaatgatttcatttacatatgtctatgacttttcttcatgtccatggcaatttcaatacctaacctgcagaacagcccagttacaccaattccaagaaaacaaggacatacatattcagacatattcatcgccatcacctccctgctccccaagcaggggtgccgctgtagcctgtcagggctcaacctctgaggcaagcatctctttacaggtgaggtatttgggcccttccttctcctgcctccacaccctgccttgtggcagttccttgttctcaagtcccccagtcaggcaggatggacataagacttaactcaccgatgtctgttgtactgctcaaagccaggggtgggtaaggggccaggcaagtgaagcc

SEQ ID NO: 124053 - DNA, 528 bp, Homo sapiens
agactcctgcacttacccataggaattaggctgaatccggggggctgagcagcaacagtctgcagtccccacttctatggcacctcgcaggataagacccactggcttggaattcyagccagccactggcagaagtgttataccttgctgggatggagctcctgggggaggggcaggccaccatctttgttgtttgtgcgacttagccattccagcctttgggctttggagagtccaagctgaccagggacagaagggatctcccaacacggcacagcagctctatataaatgtggccagactgcttttctaatcaagtccttgatcccattcctcctcattgggtgggatctcccaacaagtgcctccagccacccctactagtgttctccagccaacagaaatttgaaacctccctggaatggggctcccagagggaggggcaggccaccatctttgctgtttgggtgacttagctattctgaccttcagattttggaaagtccaaggcaacgcggagctgaagtg

SEQ ID NO: 124054 - DNA, 528 bp, Homo sapiens
agactcctgcacttacccataggaattaggctgaatccggggggctgagcagcaacagtctgcagtccccacttctatggcacctcgcaggataagacccactggcttggaattctagccagccamtggcagaagtgttataccttgctgggatggagctcctgggggaggggcaggccaccatctttgttgtttgtgcgacttagccattccagcctttgggctttggagagtccaagctgaccagggacagaagggatctcccaacacggcacagcagctctatataaatgtggccagactgcttttctaatcaagtccttgatcccattcctcctcattgggtgggatctcccaacaagtgcctccagccacccctactagtgttctccagccaacagaaatttgaaacctccctggaatggggctcccagagggaggggcaggccaccatctttgctgtttgggtgacttagctattctgaccttcagattttggaaagtccaaggcaacgcggagctgaagtg

SEQ ID NO: 124055 - DNA, 528 bp, Homo sapiens
agactcctgcacttacccataggaattaggctgaatccggggggctgagcagcaacagtctgcagtccccacttctatggcacctcgcaggataagacccactggcttggaattctagccagccactggcagaagtrttataccttgctgggatggagctcctgggggaggggcaggccaccatctttgttgtttgtgcgacttagccattccagcctttgggctttggagagtccaagctgaccagggacagaagggatctcccaacacggcacagcagctctatataaatgtggccagactgcttttctaatcaagtccttgatcccattcctcctcattgggtgggatctcccaacaagtgcctccagccacccctactagtgttctccagccaacagaaatttgaaacctccctggaatggggctcccagagggaggggcaggccaccatctttgctgtttgggtgacttagctattctgaccttcagattttggaaagtccaaggcaacgcggagctgaagtg

SEQ ID NO: 124056 - DNA, 528 bp, Homo sapiens
agactcctgcacttacccataggaattaggctgaatccggggggctgagcagcaacagtctgcagtccccacttctatggcacctcgcaggataagacccactggcttggaattctagccagccactggcagaagtgttataccttgctgggatggagctcctgggggaggggcaggccaccatctttgttgtttgtrcgacttagccattccagcctttgggctttggagagtccaagctgaccagggacagaagggatctcccaacacggcacagcagctctatataaatgtggccagactgcttttctaatcaagtccttgatcccattcctcctcattgggtgggatctcccaacaagtgcctccagccacccctactagtgttctccagccaacagaaatttgaaacctccctggaatggggctcccagagggaggggcaggccaccatctttgctgtttgggtgacttagctattctgaccttcagattttggaaagtccaaggcaacgcggagctgaagtg

SEQ ID NO: 124057 - DNA, 638 bp, Homo sapiens
agaataaaaatcaaaggaatataaatcattctatgaagacacatgcacacacatgtttattgcagcattatttacaatatcagtgtcatggaactaacccaaatgccgatcaataatagattgaataaagaaaatgtgatatacatacaccatgaaatactacgcagccatacaaattaatgagatcatgtcctttgcaggagcatggatgaagctggaaacaatcatcctcagcaaactaatacaggaacagataagaaaatattgcatgttctcactcataagtgggagtttaacaatgagaatacatggacacagggaggggaacaacacacaccagggactgtttgggggtggagggtgaggggaaggaacttagaggacaggtcaataggtgcagcaaaccaccatggcacatgtatagctatgtaacaaacctgcacactctgcwcatgtatcccagaacttatagtaaaatatatatgtatatatatacacatatatatacatatatacacatatatacgcgtatatatgtatatatacatatgcgtatatatacgtatacgcatatatgcgtatatatacgtatacgcatatatgcgtatatatacgtatacgcatatatgcgtacgtat

SEQ ID NO: 124058 - DNA, 638 bp, Homo sapiens
agaataaaaatcaaaggaatataaatcattctatgaagacacatgcacacacatgtttattgcagcattatttacaatatcagtgtcatggaactaacccaaatgccgatcaataatagattgaataaagaaaatgtgatatacatacaccatgaaatactacgcagccatacaaattaatgagatcatgtcctttgcaggagcatggatgaagctggaaacaatcatcctcagcaaactaatacaggaacagataagaaaatattgcatgttctcactcataagtgggagtttaacaatgagaatacatggacacagggaggggaacaacacacaccagggactgtttgggggtggagggtgaggggaaggaacttagaggacaggtcaataggtgcagcaaaccaccatggcacatgtatagctatgtaacaaacctgcacactctgcacatgtatcccagaacttatagtaaaatatatatgtatatatatacacatatatatacatatatacacatatatacgcgtatatatgtatatatacatatgcgtatatatacgtatacgcatatatgcgtatatatacgtatacrcatatatgcgtatatatacgtatacgcatatatgcgtacgtat

SEQ ID NO: 124059 - DNA, 638 bp, Homo sapiens
agaataaaaatcaaaggaatataaatcattctatgaagacacatgcacacacatgtttattgcagcattatttacaatatcagtgtcatggaactaacccaaatgccgatcaataatagattgaataaagaaaatgtgatatacatacaccatgaaatactacgcagccatacaaattaatgagatcatgtcctttgcaggagcatggatgaagctggaaacaatcatcctcagcaaactaatacaggaacagataagaaaatattgcatgttctcactcataagtgggagtttaacaatgagaatacatggacacagggaggggaacaacacacaccagggactgtttgggggtggagggtgaggggaaggaacttagaggacaggtcaataggtgcagcaaaccaccatggcacatgtatagctatgtaacaaacctgcacactctgcacatgtatcccagaacttatagtaaaatatatatgtatatatatacacatatatatacatatatacacatatatacgcgtatatatgtatatatacatatgcgtatatatacgtatacgcatatatgcgtatatatacgtatacgcatatatgcrtatatatacgtatacgcatatatgcgtacgtat

SEQ ID NO: 124060 - DNA, 622 bp, Homo sapiens
tctttggtctgtagataggcaaactgtcttctctttggtccttactggatacatcagcctattctattcatgtcaaacatgacacttcttttaaaattaccttatggattctgttttactgtctatactttcatcatcttgacctttttgtagagatcttctctacttgtatttattttagaataaacaagtgtttatattagtatcttaattggtttggtcaccactgagtcccttaattggggattactcatgtcagtccatctactgtagaggtgctccaggcatctctctggggtctattccctcatctctgagttaagttagagcaggacttgcaattggaggatgattaacaagatgacctaatagccctggttcagacttggctagaaaattcccaagtttcacatgtaccactcatgtttcattgatttttattttcaaaagcaataactaaaaaatacaaatgcagtcaataaatatttgtagaaatttttatacagttgatcatttgcattaagaatcacktttagaatagtctgaattttctcaaggacttaatgatcatatctttggtgggagatgacaaccaccccgcactcccttacacacatacact

SEQ ID NO: 124061 - DNA, 623 bp, Homo sapiens
gcttcttttaaaaagtgtccttgttttttgcccactttttattggggttgtttgttttactttcgtamattggtttaagctctttatagatgctggatattagaccttcatcagatacatagtttgcaaaatttttctcccattatgtatgttgtctgattgccctgttgacaatttcttttgctgtgccgaagtttttaagtttaattcaagctcactaattcttttattctgcttgataaattctgctattaaaggacttcaatgcattcagtataccaattgcatttttcagctccaacatttttgtttgcttcttctttactattttaatctctttgttaaatttatctgatagaattctgaattccttctctgtgttatcttgaatttctttgtgtttcctcaacagagttgttttgaattttctgtttgaaaggtcatatatctctgtttttgattggtcactggtgctttatatagttcctttggtgagatcatatttttcttgcaggctcattgaggtactgccttgactgtcttggacagaatcagtgagaattatctggattactgacagattcttgttctcttctcttacttcttcccaaataaacagagta

SEQ ID NO: 124062 - DNA, 578 bp, Homo sapiens
attacaaccccaaactccactgacagagaagtggagtagcatgccagagaaggagagaagagaagagcatctgaacattgagaggagtctggcagggacagttgcaaagaagttctgccaggcataattgaaaggcttatgattatcttcccccctcaggggaagatattcttcctgttccatccccttttagctccccataccactgacaacatcaccatcacccaacaaaatctctgcattcaccgtcttcaagtccacgtgactaatttcttctggaccactgtgcaaaaacccaggtaccaagaggccaaggtgttaaagactgtcaccctgactctccactgagctggtgaacacttagctgtccatggatggcaactgctaaaaaagcattaactgtaacacacccctagatgtttccatggggccaaagcccaaaagtgcttgtcctggtgcccgcacctactatcctgcatgctccccctcctgcaaggggtttgagtgtggtggtagcctagtaagggatccacamccttgtcactagtctcgtgaaggggtcaagtgagttcccctgt

SEQ ID NO: 124063 - DNA, 633 bp, Homo sapiens
tgtttaattatcatttattactgtagtttacaataatctattgtgtatttcttttatattttccagatacagggtcttgctctgtagctcaggctggagtgcaatggtacaatcatggctcactgtatcctcaacctcccaggtttaagcgatcctcctacgtcagcatcctgagtatctgsgaccacaggtactccgtgtctggctaattaaagaaaaaatgttttgtagagttgggggttcacctatgtttcctgggctggtctcaaattcctgggctcaggttattcactcacctcagcctcccaaagctctgggagtacttacaattgtgagccactgtacctggccttgtgtatctcaaaatacctggaagaggctgaggtgggttggtcacgcctgtactcccagctacttgagaagcagaggtgggaggatcacttgagcccaggagtttgagtctagagtgagctatgatcatgccactgcacttcagcctgggtgacagaatgagaccctgtctcaaaaaaaaaaaaaaaattctgtctaagaatgacaataaaaaatacatagaagagaataattcaaatgttcttagcataaagaaaactatttaaaataatggatatccca

SEQ ID NO: 124064 - DNA, 540 bp, Homo sapiens
tgtcttcctctgctgcctccaagttgaggagggaacataaactttgagattaccccagagctgtgatgtgcagcctgcaagtgccaagctgtgaactgcagccagcaatcaggtgggagagaagcccacaatttcagagcattgataggaagaacagctgcaactatgaaaaaatatagaggagtcacatgacagaacaaaagcctacgtactgaccattacacttaagtgccataaaatgggtgacaccccaaaccttacacaccaaaaatactttgctaacttactgcctgtgaaaccaagacaagaagtcacctacaaataaagaccctgcacaaagcctcagccctctggaaaaagccagaacagatttctaccgacagtactcaatctacaccaaagacaaaggaatatccacagagattagaaagaagcagtgaaagaactctggyaactcaaatggccaaagtgtcttctgtcctccaaacgacagcactagttctccagaaagcgttcttaaccaggctgaaatgcctgaaa

SEQ ID NO: 124065 - DNA, 626 bp, Homo sapiens
gagaacaattcagccataaaatagaataagattcaatcatttgcaacaacgtggatggaactggaggtcattatgttaagtgaaataaaccaggcacagaaagaaaacatctcatgttctcacttatttgtgggatctaaacatcaaaacaattgaatccataaagatagagaatagaagaatggttaccagagactggaaagtgtagtggaggagtctgtgggaaaagtgggtatggttaatgggtacaaaaaaaatttagatgaatgaataagacctagtatttgatagcacaacagcatgtctatagtcaataatactttaattatacattttaaaataactaaaagagtataactggttttcatataacacaaaaaattaatgctccattttccataatgtgattattatccattgcatgactgtatcaaaacatctcatgtatcccataaatatatacatttactgtgtagccacaaaagttaaaaataaaaaattattaaaaatttawaaaagttattcaggacccaaactcaacacttgtccaaatggaactaaaagatatctacagaacactccacccaacaacaaaagaataaacattttcatctgcacatggcacg

SEQ ID NO: 124066 - DNA, 354 bp, Homo sapiens
caggctctacaggaagcatagcaacatctgtttctggggaggcctcagggagcttttactcatggtggaaggcagagcaggtgtaggcatttcacatggcgaaagcagagagagagagttggtggtgggggtgggtggctacctacttttaaacaaccagatcttggagaactcactcattttcatgaggacagtaccaagaggatggtattaawccgtgagaaaccaccctgatgatccagtcacctctcaccaggccccacctccaacattggggattacaatttaatatgagatttgggtggggacacagatccaaatcatatcaaagacttgcatgggaaaataaggaat

SEQ ID NO: 124067 - DNA, 585 bp, Homo sapiens
gcccacaacaaaatattcattgataatcttcagatgtgtctgcaacccttcccttcccctaggtggttctgactttttaagttgcatgattatttgtgggctggtaagtttacctgtctccatggttagtatagcggtgagtaccccccaccccgtctaagtttacctgtcttcaaatctttccattgggaggttcaaatgtaaattcagcaatggggaaaaaaactgtccattttagatattgagaacatacatctatgttcctgtgaatgaatattaacaaagatacacgatcccgactaatgtagctgggtgctcattttatgacataacatgttcctggaagtatatgaatggaggcctgctatggatgttcaaccttattaagtgggaaccttgcaattcacgggcaacagtgacaatcatcagacaaaccaagctgtaagacaaaagctagcggagtcagagccacagcagcacgtgcatcagtgactcaaagctccccctgcrtttcactccataactgagtttaccttttcatcatattatactcacagtgacatactccttctgtggcaccgctgc

SEQ ID NO: 124068 - DNA, 526 bp, Homo sapiens
tatttggctattgcaaaatggatgaggactaccatttttttctccttgacttttttcatgctcaaaatggacatatattttwactcagtagataaaggatttggaatgttaaagtgttttcagacccagaacatcataaatagctctaatctattgtttaaagtatgcctcactaggatgaatgaaagattaaataattagaaatgagaatggtttaaaatgaattaaatgtatgctatgaatacagtgatatagtaatcatattttaaatggcaagctggaagtggagaaggctaaaagtgatataaaaacaacataattgaagaaattaaggaaactacaaatcatttttctatataaatgcaatgtggttcaatgaaaagagactgtactggggacctaattaaatgtgtgctatatccaagaagtctccaaatactttatgccttaatgtgcttatttatggagagaggattaaccttcatctatgttttgctacaaggggtccaggaataatcttggaggt

SEQ ID NO: 124069 - DNA, 600 bp, Homo sapiens
ggacttggtatttttagtgctaaaaccggggaagtcccaggcaaaccagaatgaattaattagtcctctatgctaatatcacaaaagggcaacaagaaaagtaacatagtatgttaagaaacagaaagggtgattccatttctaccttggtgatgcctacagaatagctggaaattatattgttatcagttctactaagggttgcatgagaaactgaagatccgaaagctatactgaatttcctcagatcacacacctcgttagcagaataggycatttgttcaaaagagatcctctttcagcatcatttgatgagtaaccttcttctgcataaattccttccctgaatcactgtccagcagttgcttgctgaggccataaaaggggcccccagataatcggcctcaatacctcaatactctggggttagctataagtaaaagtgggttcctccataactatgtagagatgccagatctcaagacctgacacaaccaagtcccagattttagaatttcaacactagaatcaaatggtgccttgctccctacatttccaaaacaagtcaaactcctgaaacttctgtttagagaacagtgt

SEQ ID NO: 124070 - DNA, 660 bp, Homo sapiens
aacatgtggcaacaacaatacttctgtgatggataatgaaatagataagatttataatgcacaattatgtacaagacattagactgagctcactgcctataataactcatttatctcatttatcttcactgtaaccttatgaaataagcattactattaaaaccctgttataaaaactctattaaaactatgttgaggctaatgaggcacaagaatctaatacaacttgcccagtgtcaccccacaggtgggacaaatattcaatcctagatcaagcaaacagacagtgcaaagcccaagcattttttagaaaactatgttggaaaaggctttttatgcctggagtagagtgtgcacaaagagatttgaagagacagaaggctgaaagacaaagrcttatttactacctgcaaaggagtctggcttaaatgtgaaaacaatggggagttcctgagatatttttagcagaagagacacaatagaaagaaccctgtattagcaatagagagaatgaaggaaattgatgggcacaggtctggaggaagggagagcaattaggaaatcactgcaaaagtccagatgagaaatgttgaggtcccaaccagtgtgggcaactgtaggaatgagtagagctactcatataatgatctggtgaccgac

SEQ ID NO: 124071 - DNA, 542 bp, Homo sapiens
aaaaagcaagaaaacagcagccttcagggtaattgtagtaacattttcacttgaagattacctgggtactcactgtctatcagtgcatgcctatgcaaattgcctctagatgctatgaaaatcacatgcaaatgtgctcttggttgtcaaaaactgtttactacacctgctagagcccactgaaccagggagtgttgcctcctatgaatttttcatcagtattgtttatgttctaatcagcctggcccttccctctggtggaaagggcagggtatgggcttggtcttcccctcccacatatgagcctgggccttttctagagtggaaggccctgggagaggccattgctctaatggccaaatgttaacatggttgagagatcaactagagaaagggtaaatgtgagtcagatagtttcctgatatttttttctgtccctttagaccatcctagcttacaagcaaaggttgtatgccctggmaccactggtaataccatggctaggattttgttagttcaaaaacaaaatcttagaagaatac

SEQ ID NO: 124072 - DNA, 560 bp, Homo sapiens
gataatttacttaaaaattaaagaaaagaataccacattttttgtattagctgatctattttcagtttttccagttgaatttttttctttcaattttatcacatacttattttcttatttacaggaagaaaaaacaattgctttatacaggttgccaaattgttatccaaatgtattatacaaatagaggggaaaggaggaatagtacagttcacatttagagtacctactttgtgttataaaatatgtaagactctatgttgtccacaaagaatagacactattgttaaggagacaggattgataagacyggatgatggaaagagcaacatgggggaaaatatctaaggatatctaaggaagggtgattttctaaggaagcatgtgtcattctatgctatcatcaatgtagaatttgaaatatggaagacaaatgtttactgtgtattatttaggattgtgttcagtagctgaaaataacatgaaacctaaccaacagaagcttaaaaggggattatgtatttcagagattcaacaatgtcatcaaaaactaggcttct

SEQ ID NO: 124073 - DNA, 604 bp, Homo sapiens
tgcccaatgtataacagatagctaaacaatgtggttcctgcactcagttctctctttcttgtttttgtcaggcttgtgttctgatttccccagttattcattctttccaagaaatctaagtctgtgtgatacatttcatctgcccacaaatcaagttcagaaaagatagacattctaattctgggttccctgttgatcatcagttactcaagttagtcacaagtcataggcctagaaagttaaatccttctttatttagtgtacctggatttttaaaaagcaaaagtcccygcttcaaatccaaatgcaacatggtaatgtattgtcagaatccttcagactaagattatagtttaacatttaagtagataatttcataacgtaggtctgtataagacattttgttgtactattttgtagaaaacctatttaaactcatcacacatatgccttaattagaaaaagctttgtcttcattatgtataaatgtagaagacttcaagaaagatgacactcatctaatgcctccatataacaaaaaaaaaaaaaatagagtcttcttaaaggtaccagaattaactattctatcaaataaaattacatt

SEQ ID NO: 124074 - DNA, 604 bp, Homo sapiens
tgcccaatgtataacagatagctaaacaatgtggttcctgcactcagttctctctttcttgtttttgtcaggcttgtgttctgatttccccagttattcattctttccaagaaatctaagtctgtgtgatacatttcatctgcccacaaatcaagttcagaaaagatagacattctaattctgggttccctgttgatcatcagttactcaagttagtcacaagtcataggcctagaaagttaaatccttctttatttagtgtacctggatttttaaaaagcaaaagtccctgcttcaaatccaaatgcaacatggtaatgtattgtcagartccttcagactaagattatagtttaacatttaagtagataatttcataacgtaggtctgtataagacattttgttgtactattttgtagaaaacctatttaaactcatcacacatatgccttaattagaaaaagctttgtcttcattatgtataaatgtagaagacttcaagaaagatgacactcatctaatgcctccatataacaaaaaaaaaaaaaatagagtcttcttaaaggtaccagaattaactattctatcaaataaaattacatt

SEQ ID NO: 124075 - DNA, 588 bp, Homo sapiens
ccaaaatggatataacaaagacaaggctcagtgccttgtaaactgaagagaraaaattctccaccttgaagaaacctcaggataagaaaaatattctcaacactgccttacttcacttgaacttcagcacagccaacacttatcaagttatccactatagggcaaggaatacagtgagcagttttctattccttattccatttgttcttcctaacaatctgataagaaaggcattattggctgggcatggtggctcactgtgcctgaacaataatgtctgtaatcccagcactttgggaggccaaggcaggaggctcatttgagcccaggaggttgagaccaacctgggcaacatagtagaacctcatctctaaaatttaaaaattagctgggcatggtgtcgcagtcttgtaatcccagctacttggaggctgaggtgggaagactgcttgaccccaggaggtgaaggttgcagggggctttgatcatgtcactgcactccagcctgggtgacagggtaagaacctgcttcagaaaaaagaaaagaaaacaaaggaaggaaggtgtattaatctagtttcacatcgc

SEQ ID NO: 124076 - DNA, 588 bp, Homo sapiens
ccaaaatggatataacaaagacaaggctcagtgccttgtaaactgaagagagaaaattctccaccttgaagaaacctcaggataagaaaaatattctcaacactgccttacttcacttgaacttcagcacagccaacacttatcaagttatcyactatagggcaaggaatacagtgagcagttttctattccttattccatttgttcttcctaacaatctgataagaaaggcattattggctgggcatggtggctcactgtgcctgaacaataatgtctgtaatcccagcactttgggaggccaaggcaggaggctcatttgagcccaggaggttgagaccaacctgggcaacatagtagaacctcatctctaaaatttaaaaattagctgggcatggtgtcgcagtcttgtaatcccagctacttggaggctgaggtgggaagactgcttgaccccaggaggtgaaggttgcagggggctttgatcatgtcactgcactccagcctgggtgacagggtaagaacctgcttcagaaaaaagaaaagaaaacaaaggaaggaaggtgtattaatctagtttcacatcgc

SEQ ID NO: 124077 - DNA, 604 bp, Homo sapiens
ttgtaagttctgcatatgatagagcataacaaagtatgttgctggtgggggatgttgataatgggagaggcgatgcctrtgtaggggcaggggatatatgggaaatctttgtaccttcctctcaattttgctgtgaacataaaacttctcttaaaaaaaaatcgtctttaaaaaattaaatttaggctgggtgtggtggttcacatctgtaatccctgtatattgggaggccaaaggcaggaggattccttgaggtctcaagaccgtcctgggcaacatagcaagactctggtctacaaaaaatttaaaaattagccctgcatggtggggtgcatgcctgtagtcctagctacttggaaagctgaggcaggagccttgcttgagcccaggaattcgaggcagcagtgagctatgattgcaccactgcattccagccagcttgggcaacagagcaagaccctgtctcaaataaataaataaatttttaaaagactgatacttagtgttgaacagtataattgctgaccttgtctatgatgtagaaatcctgcctacaatgtggaatacctaggaagccacctcaaactctctctatgcaagcagc

SEQ ID NO: 124078 - DNA, 553 bp, Homo sapiens
caaaggcaaataagacccagccttgctctgaactttacttacagactagagggagagacaggccaggcagcatgtcacaactcaatgtgatgagagctgtgatacggaagtaaaggctgctgaggagcatggagaatgaccattgcatgcagcctgcgattaaggaatatctgagctaaaccctgaagaatgaataggagataacctggaaaagtgggtgtccaggggtctatgggataagttggcctgagttgagagaacagtgtatgcaaaaacataaagatggaggtgcaggctggggaggggatctaccagtggagcgacaacaagttttgttgggccagctttcacaggtgccacaaagggcttctgatgtcctgttaagaataccttggattttatcctaagagcagtggggatccattttcatttgcaatatatttttccaaaaatrtataatgcttcatcaattgtattgttctctcagtgccgtatcaagtcttaatcagctttattcaatgctgtttttgctgttttcatttccagtgttttt

SEQ ID NO: 124079 - DNA, 622 bp, Homo sapiens
aataggtattatacataatctagagatgatttaaagtatatgggaggatgtgtgtaggttatatgcaaatactacacgattttatataaggacttgagcatccttggattttggtatccttgaagggccctggatccaatctctcgagtatatagagggacatcagtattcttactaatgactaaatggaccatctttggtcatgggagcctctgaagctagctcctgaatgcttctaacacactcaagtagtctttgatgctttccttgctttctggtatcaccagatgttccaggctcatcttgtatgttttctgccccaatcttagaatcagccactttttcaaagggctctagttccttttagagggaartggtgcataaagacctctggtgtgaggggtgctcactgctcctgagctggtttttgtgtctaggccttctcagtggacagagctaggagcaaattttttaaaaggtaaaatacattatggattcacaattatatttctttctcccatgccaaaattctggttctcagttgcaccagtgtaattacttatttgctttgtgccacaatacacagccacagaatcacaataccaacactatcaccaaaaca

SEQ ID NO: 124080 - DNA, 571 bp, Homo sapiens
aaaataaagcagtgatggtttttatccatggtcaatgccaaagagcaatgcaatcagaagataaaactcctctcagtacttcggttctccacctacgagtccatttatttcaccaagctgttatttttattgttattggaagcatatccaaagatctctgctgagcccagawgagtaataaggccaaaatgtactattcaattcccactattaatttgggggatagtgttgtttttgtttgcttttaaaaaaacatttcttggtatgttaaaattcttaatatgagcaggtgaattaacattagattgagaacccaaatgcccaaactggaacaatgtacaaatctgctagtgatggatggattgtggccagtggaagcacatctgtgagtctgtaaccactgtaaataaaagaatccaccattgttctcagagcaactcaactcctctgccaacagaacatctttgagcaccctccaattttctataaatcccaggtttgaaattctgatataatcttctaatttctaaccctctaagtatttgaatgtacgttaagaggaaagagtcac

SEQ ID NO: 124081 - DNA, 607 bp, Homo sapiens
aagcctttgtggtttgaaaaggactccctatatagattctgatgaacatgcaagcactgagtagctttctccagcttctacttccccaaggaaaaacaacaactcaaaaggtcctaatttttacctacataactttagctgaattaattattgatcctttagttttggaaggttaaagtaggaccctcaatttcataagaaagcagggtgcatgggctggagggagatggatgagggggctggaagggggagctgaaatcctgagcaagcacaactggaaagtagacgacaaaagacagtgttccccagactctgggcatcctaaagcagcggtgtccaatctttctggcaccagggaccatttttgtggaagacagtttttccacagacgaggttggggtagggggtatagttttgggatgaaaccattccacctgagatcatcagacatcagattctcataaggagcgcacaacctagatccctcgcatgcacagttcacaatagtgttcctgctcctgagagaatctratgccctggctgatctgacagaaggcggagctcagaggttaatgctcactcgtaatgctcactcgctgaccactca

SEQ ID NO: 124082 - DNA, 306 bp, Homo sapiens
cccaagagactagcttttaatttagatttcatcaaactataacaaagtaagacaaaatggctgaaattttccagaaaagaaacccaccaaaatagccaagtagcccaacaattaatcaatcattttaatactcatagattgtctattccatcagcagctgggtgagacaatgtyataaaatggttttatcaggccccttggacaggaaacaaactaaacgagagaaaatctgaatttggcagcagaaggacatagtgaggcctgcttaatcccacaatttcctgacaaggcatgaaagaagaattc

SEQ ID NO: 124083 - DNA, 594 bp, Homo sapiens
gctgggtcaaatggtattcctagttctagatccctgaggaatcgccacactgacttccacratggttgaactagtttacagtcccaccaacagtgtaaaagtgttcctatttctccacctggatgatatcttaaatagaatcaaagatttggcatttttaaaaatcacaactaacattgaattaaaatgaaggcaacataaatcccaatttttatcagtcaggccacattttgagaatttaaactgtatgtgactttctccctgcaaaactcttttgatatgtaaagaatctatgtatctacagaattttaagtacaaaattcaaaccatgttggcttcagtttagcatatgtatgtatgtgtttagtgtctatgcctgcctcatgactatgcaatgctttttcaggacgaaatagattgtttacagaaagaagtagaagagcttaagagtaaaaatctcagcttggagtcacagatcaaaactattctggatcctttaaccttggtgcagggcaaccaaaatgaagacaaacatctagtcacagataatccaagtaaaattaacccagaaactgtagcagagtggaagaaaaa

SEQ ID NO: 124084 - DNA, 606 bp, Homo sapiens
cattttaaatcaatagaaaagctattgaaactatttaaaattttagcaaattaatatttggctaaatgaaaatttaaaatatgtgtgtgtatactgcaaactgcaaaattaaataacaaattagaggaaaacataaataagaacagaaaaggtatgaaatggcttaatatacaaaaggttttttttgcaactcaataacaaacaaaagcattttgatarcatgaacaaagtaaataaacatgaaaaatacaataggatatacaaaaatctcctaaatagaaataaaactgtaaattttaaaatatgagacagcaatatcgatttgataaaaatattttaaaaggtagtaacatttgccaaaacctatcaaatacacaacaccaaaagtgaaccctaacataagctatggattttgggtgataacgacgtatccaggtagatttattgatggtaaaaaaggtaccactgaggtgtaggaagtcaatagtggcagaggttgtacatgtgtgggacaggggcagatgagtactttctgctcagttttgctgtgaacctaaacctgttctaaaaaataaagttcattaatgaaaaatgacaaaaacactt

SEQ ID NO: 124085 - DNA, 511 bp, Homo sapiens
tgcttcaggcattctctttttcagtaatgaattgcttctcccaatttgggaaggacagtctgctgggttaactcagcaaatcagtctggccacctcccagattgctctaggccaatgttcccctcctgcaccttggcaggacccctgagctaaaaaggaagtgctgtctcacttccttatccattttctgttaacaatcaccaggaggtaactttaacccaatcaaagattaccatagctcctccagctgtccctacccatgagatgaggagctaaagggttgtacccacacagaaccccagagcccaccctctagaccacactctgcataagtgcgatgctggaattccctacccagtgtctctaagtcagcttcctgcagcccgtgctctttctgggatccatcttctggaaggcagaccattagatgtgaggtatggccaatgggtgactatttcaggggtkggggtataagcagagcttgaatgtgtgggctcgggtgttagcttgc

SEQ ID NO: 124086 - DNA, 549 bp, Homo sapiens
tctgatttcaggggctccagggactttctgacatttcaactagctagtgattctccatcattaactaatgtcagtatccaagaactgatatgctacaatgtagaggcaaaatctgtcttatatccagcaagctgaacatggcactatgacaaatacaatgttattatgactatgtgggagaaaatacccacagtcttattccaaccctaaatcttaactaagccaccraagttccactttcttcactcaatgtgtgtctgagagaccgccaatgaccatggctgacatctttcaatacggaaacagttttgatgatatatatatgcatagctataataagttaacattcatcataaagacagtacagttggaatatatacacataatacatattatatatatacacacatagtattatatacacataatatttaaaacatagtatacatacacacatatgtatctatacacacattttatatgtatatatacctatatacacacacatacacacacatatctatacaagaaaaacgaaaagtactatct

SEQ ID NO: 124087 - DNA, 492 bp, Homo sapiens
tcattgtaatactattttacattttctgaggcacccccacactgttttccaaatcagctgcatgattttacattccctccaacagaaggatttcaatttctctgcatgctcagcaatacttgttttctatttttccaaaggattttttggtcaagcatggtggctaacgcctgtaatcccarcactttgtgaggccaaggcaggtggatcacttgaggtcaggagtttgagaccaggctggccagcatagtgaaaccccatctctagtaaaaatacaaaattagccaggtgtggtggtacacacttgtaatcctagctattcgggaggctgatccagaagaatcacttcaacctgggaagcagagtttgcagtgagccaagatcatgccactgccctccagcctaggcaacagagtgagactctgtgtcaaaaaaaaaaaaaaaaggtttttataaaagtggttaagtcccatactgcctgaaaacagaatt

SEQ ID NO: 124088 - DNA, 615 bp, Homo sapiens
tttaaagcacctataaactgccctcaggattcaatcatttttccattccttccggcattatatactttgatgttttaatgttattagcccacaatacacaccagtttcagaaactcagtttttgtcctctaagggcttttagtcctcccaaaaaaagaatagggcaaaagcaaggaagatcatgaatctggttttctaaaagcattattacaagactgctttataaaattgtaatccccagctgcagagttccgcagatggcttgaaagtgtcttacatgcaaataaatraaaacaaaaggccacttatgcgagcagaacacagcgtgctcgatagtcatcttaaaccgagcaggtaggtactttatcagaggcagacaagggaaacgtcacttatttagagttcaccgcacgcctggataaaagtcctcactaacaaaatccctgcctttgtggattctgtgtcggaaagggaaacgataaagaatacggtttgtgacagcactactctcaggagacgaaggagagatgctaagatcttggaaaggagagagaataggaagagtcggaggggagatctcctctcagtaaaacggcacccacagcagtcagactt

SEQ ID NO: 124089 - DNA, 615 bp, Homo sapiens
tttaaagcacctataaactgccctcaggattcaatcatttttccattccttccggcattatatactttgatgttttaatgttattagcccacaatacacaccagtttcagaaactcagtttttgtcctctaagggcttttagtcctcccaaaaaaagaatagggcaaaagcaaggaagatcatgaatctggttttctaaaagcattattacaagactgctttataaaattgtaatccccagctgcagagttccgcagatggcttgaaagtgtcttacatgcaaataaataaaaacaaaaggccacttatgcgagcagaacacagcgtgctcgatagtcatcttaaaccgagcaggtaggtactttatcagaggcagacaagggaaacgtcacttatttagagttcaccgcacgcctggataaargtcctcactaacaaaatccctgcctttgtggattctgtgtcggaaagggaaacgataaagaatacggtttgtgacagcactactctcaggagacgaaggagagatgctaagatcttggaaaggagagagaataggaagagtcggaggggagatctcctctcagtaaaacggcacccacagcagtcagactt

SEQ ID NO: 124090 - DNA, 615 bp, Homo sapiens
tttaaagcacctataaactgccctcaggattcaatcatttttccattccttccggcattatatactttgatgttttaatgttattagcccacaatacacaccagtttcagaaactcagtttttgtcctctaagggcttttagtcctcccaaaaaaagaatagggcaaaagcaaggaagatcatgaatctggttttctaaaagcattattacaagactgctttataaaattgtaatccccagctgcagagttccgcagatggcttgaaagtgtcttacatgcaaataaataaaaacaaaaggccacttatgcgagcagaacacagcgtgctcgatagtcatcttaaaccgagcaggtaggtactttatcagaggcagacaagggaaacgtcacttatttagagttcaccgcacgcctggataaaagtcctcactaacaaaatccctgcctttgtggattctgtgtcggaaagggaaacgataaagaatacggtttgtgacagcactactctcaggaracgaaggagagatgctaagatcttggaaaggagagagaataggaagagtcggaggggagatctcctctcagtaaaacggcacccacagcagtcagactt

SEQ ID NO: 124091 - DNA, 609 bp, Homo sapiens
atgttttaaagaaatccttagattcctattcctgttcctatctttttgtgtttttcaacttttctgtgtttagcagatgttcctattatatcacttcttgtgctgtaaagtgattatttctgtccaagggaaaaatatgtatttgtaacatattaaagaaaagttgtagtgaattcttagtcgttattagcagtggtgtaaaaagtacttttagctcctgcaatagcccctggaatggaacacatcctggctgactcagctttatcccatctaacaggatgagccgtttttaaattgttggtgtcttgacatgcccggtatttctttggaaacagaaagtgttacttggggggaaataaagggacaagccctttgattcaatcaccctctatttctgtttcttcaggatttattgctgtgtttatttcccctaactcctattcttttcctagttgggtcttacatattagccttgaagtctgtggggtgctgaaaatatcttttactaacaactgcaaatatgtatkgagctcctactttgtgccaggcacagggggtttgactgtgactaagacagtcacagtatttattcatcttcatggagtttat

SEQ ID NO: 124092 - DNA, 546 bp, Homo sapiens
atttgtaaaataagaatagtaatatccttcctcacacagctgttacgaagattaaatgggatcatacattaaagagtctaccacactgcctagcaataatagccatcaacaaatcaataccctgaatgtggacactcaacccacagcccccaaatcagccgtcaacatttcccccatgctgtcarcatccactgacagaagtatagttacaaccaacctaagtggccatcctgaaagtctttcagggatgtttctccttctaaaaagcaacaaacacctcctagaattcctctacaactcctacctgaacctagttctttctggagctatctaaaaactaacatctatccctcctaacctattaattataatgtaattctttttgtttttaatcacacaacttctaaataacagttttaaagacccaaatcttctcactggctattcttaaagaatatatggctgttacagttttcttaatacctcagttttatttaaagacactgattatgaaatgcttcagatgactgtgatctaaaaattaag

SEQ ID NO: 124093 - DNA, 568 bp, Homo sapiens
gatgatcacttgagtccaggagttcaagcccagcctaggcaacacagtgagaccctatctctatttaaaaaaaaaaaaaaaaaaaaagaggccaggcgtggtggctcatgsctgtaatcccagcactttgggaggccgaggcgggcagatcatgaggtcaagagatcgagaccatcctggccaacacggtgaaaccccatctctactaaaaatacaaaaattagttgggcatggtggtgcatacctgtagtcccagctactcgggaggctgaggcaggagaatcacttgaacccggcaagcagaggctgcagtgagccgagatcgcgccactgcacagagcgagactccgtctcaaaaaaaaaaaaaagaaaagagaaaaaaagaaaaaaaaaatcacattaattttggccaggtacagtggcccacacctgtaatcccagcactttgggaggccaaggagggcagactgcttgagtccaggagctcaagaccggcctgggcaacatggcaaaaccccctctctacaaaagaaatataaaaatagctgggcatggtggcatgcacctg

SEQ ID NO: 124094 - DNA, 602 bp, Homo sapiens
caaatgaacgttttcattttggtatgtaaattatcttttacatgtggattattttacttgcttagccaattttttttcattttatactgtttctaagacagattttacatatcaatatacttacataatatttgataggatgtctggttattaaaatgaaatattagataccaatgtatgatttttataataatagcctcattctaatgcagctctatttagaaccagacaatttgaaaacattctctatacctcagatgtggctagcatcagctcaaatcttgttttagattagaaatttccactctaatgtggaaaatccatgattgcttataatacttctcctcacaagcaccattatgataggttatttatacattagtacattgcatattattataactcattcattcaacattaaaaacacatttattgagtatcatcgacaccaagtactaactcaggacaaagatgatcaagacatgtttcttatcctcacggaactcacaatgggtgggcaaaaatgtaaayaggaattgctacaaaataatataaaggctataatgtgatatatatctgaatataatacaatagcatatagc

SEQ ID NO: 124095 - DNA, 544 bp, Homo sapiens
aaatcctttgagattttctgggggccacctgagaaatctcaaagttagtttgaggtaaaaaagaacttcatttagaatttaatttttggaaagtttatcaaaaatgtcaaaagccttaaatatttgattaggtragttgtcagattactatgaacaatatttgggttatcttaaataatcaagaacatgataaaggttgacacaaagcaagggaaattattttgctaagacacaaaatctttgatttataggaagattatttaaagggtaaagaaagccctttaatttcttattaagaacagaccaaaaaaatccaaaaatactcggttacttagagaaaaaaacaaattgtagttttgcaccagtgcacttttgatattgtctttaaaatttttttctttctttaaacataaatgaatccatttaaattttagctagcttcatcacacataaaattcctttttcaagatttcttttccacagaccttctatgacttttttatatccactcaatttttgtcctgtatttttcctctttattatt

SEQ ID NO: 124096 - DNA, 424 bp, Homo sapiens
gtttaatccttcttggtcttacttccaaaatttgttggggaggaccaaagccatgattaatctaaggctaattattccccactactggggcaatgcccttctgagtagtctacctatgaaatatgaggaatgtcagtctagctggtgcaatcagttattatctgtgaccctgtgaaaatgttggatattgttccctctaatcttttcatgtgtacatatatatatatatatatatatatatatatatatatatatatatatatttttttttttttttttttttttttttcctctccttgaatagtttttttcacatacatgtactgatcagtagtctgctgaatattccagtggaacctactgkggatctctggtgttttctctctgtgcagttctctcctgttcagtactgtctcctacaaac

SEQ ID NO: 124097 - DNA, 593 bp, Homo sapiens
ggtatgacgtcatggtaataaactaatgggtggggggtactgtgcaaggtctgttcagatttttcttggtgtctttgtctgacattccttccctctgagtatagggcaggacacctatcacatgagagtcttccggaaagaagggaggcagaaggtcagaggatgaccttcgtagcttttacggcctgctccagggaataagcagtgagaggaattctagtttctatggcctgtttcagaagaaagggggcaggagaaggtcaggaagattttcctgcttctgctcttttttttcattcccaaggtatcatattttggggtagtgttttctacttgattagagttttaatattatttccttttatcactgaccattgggtgtagctatactaagagcaccctcatgkatgctacttctctctacttaaattgtgtaacagcaatcttatccaagttactaatgtaattccatgttttgcttgtttaacacatgtaaataaggcacctgaagtgaatggttgatatttcagttttcagttcagtgtaaccattattattgtttctgcaggtggaaatattacccctttgagtac

SEQ ID NO: 124098 - DNA, 362 bp, Homo sapiens
ttggactttcggcttgattcgggccamacattttggattgctgcgttaaagtgagtgaggggagggtgacaggaggacccaggactctgtatgtgtgtcgggggtcatctaattgtgtgttttgtttgtggacgtgttttggctctctgagcttctgatgtcaacagatgtgtatctgtgttttagatctctgtgtacctgtgtgatgtgtctctaactgtggattgaagcgactgtgtgttgccgggcctgtgtttccatgcgggggcagccacatctgtggtactctgtgcctgtgccatgcctgtgtgtgtgtgtgtgtgtgtgtgtgtgtgtgtgtgtgtgtgtgtagtggggctggt

SEQ ID NO: 124099 - DNA, 578 bp, Homo sapiens
taatgttacttaaaattatggtttggaggtggatggaacttccactgtttagttacttccactgactcctaaactataacattttgtcatttgtgccccttctaactttagagataataaaaacgggcctggaaggaaatgcagtagatacaagtggaaagagatatccttctcagaagaaagtaggtgatgcaaatgctattaaacagaaacagactggctttctttaacttattccatttttccatatgtgccatgatcttattgcctctgggcctttgcgtactctaactgcacttcactttggactcctcctagagttatcagtttaaatattatttctcccacgaagactttcctgatcacttcccctctaacctcacccctagaataggtcaggtatccctattacctcctctcgtagaatcaggtacatcatttatcatacctcttatttcactttgtgggactacataattcatwatttcctatttatgaaggtggagaccatgtctattttgttgattgatgctcagctaacacttaactgaatccatggaatggtaatatttaataaa

SEQ ID NO: 124100 - DNA, 632 bp, Homo sapiens
attatactgaaattaagttaaattgaaatgatataacaagttaaatttctagagcaaccactaggaggaaaaaaaaggtgcctacatattaaacttttcctataaagggccagagagtcaatattttagggccaagrggcaaaatcaaggacatccatgtaggtacttatgcaatgagagagaaaagaaatttatacaattattttatgacaaataattgagtacaatttttagtaacaagaaaaatagaattctttttttgtgtgtggggggaataacatttcacttatttagagtgaatattaatgtttcctattatcaaactgatgcaaaatgtaaagaggaaaataaacttaatacaaagaaagcaagaaaggaggaaaagaaaggatcatagagaatatataaaataggttagttgaagaaatcccaaacatgtcattaatcagaatagatataaatggaatctactctcctgctaaacgtgtgttcatcagacaagatttttaaaaatctagtttatagtccttgtttacaagaaacacactaaaaatatagtttttgttgctcttgtgaataaaatttattatttgttacattttctaattggttattgctggtgaataggaatg

SEQ ID NO: 124101 - DNA, 621 bp, Homo sapiens
aattattacaggcaaggaggattgagaacataataaaccctgcaacctaaaaacatttaggggattggctgagaatggtggttcatgtctgtaatcccagcactttggaggccgaggtgggcggatcacttgaggtcaggagttcgagaccagcttggtcaacatggtgaaaccccgtgtctattaaaaatacaaaaaaattagccaggcgtggtggcaggtgcttgtaatcccagctgctcaggaggccgaggcacaagaatcacttgaacccgggaggaggttgcagtgagccgaggttgcaccactgcactccagcctgggtgacagagtgacactctgtctcaaaataataataataataaataaaaataaataaaaacatttaggggactgacaaaagastaagtagaggagattgagaaaaaaaatgactagaggtaagagattcagagaatgtttttctggaacctagaggaaaataaaattcatgacacacaggatgctttagagctccccacataattactcctagcatgagctctccttttagaattctggtaatcccttaaaacccagcaagtgtatcacatacaagtttctcttctggattttcttgtt

SEQ ID NO: 124102 - DNA, 597 bp, Homo sapiens
tgattcaaaggacaccaccaagaacgtgaaaagataaactacagaatagaagatgttatttgaaaatcatataactgataatggtctcatgtacagagtaccctacaacttagaactctcataactcaacaataaaaagactaataacccactttaaaatgagcaaaggatttgaatttctccaaagatatgcaaatagcaaataagccaagaaaagatgctcaacatcattagttgtgagggagctgcagcgcaaactgcaatgagatatcacttcacacccactagaaaactgtaatcaaaaagacagataatcacaagtgttagcaaaggtatggagaaattggaaccctcagaaattgctgatggtataagtcactttggaaagtggttagtcacttggaaaatggtatagtcactttggaaaacaacttggcacttcctcaaaaggtaaacttagttgtcatatgacccagcaattccactcctaggtatatatccaagagaaaacatacatctgcacaaaaacttgtacacratatttacagcaacatctttaataatagcaaaactgaaaacaatgcaaatgatggcaac

SEQ ID NO: 124103 - DNA, 392 bp, Homo sapiens
taaattttttaaataattaaacctggagtcacattttaagagctaaagaaagcaccacatataagaatgcaacatagaacatgtgaatgtagtcaaatcaccaagtacaataatagtcatcccccttgattctcaaatttagctcatttagaaatcccatytgtctcatagtcaacatgatttcaatgaggaacattatttgagttcatagaatgacaatgctaagttcaaaagtatattgtgagacagagttgtgtgtttcactcagcagaaaaaaacactaaattttttttgcttggaaaggtcctgacctggcattattatataataggggtttcattgatgatggatctttaggttgaaatgttttgctgaagttaagaggagaagtg

SEQ ID NO: 124104 - DNA, 575 bp, Homo sapiens
tataagatcagggtttaaaaagggtgaaaagaggcaagaatgaycaatattcttcatgttcaatgtgtactttacaagtcagaatctggtaggatacagccaatatttttttttcattaaatcttggcctttgaaatatactcagccgtattttaaattctgtgtggttggccgtaacttatttgaattaataatggtgtgaaagagaaagatttcatcttactaatgccatagataatctgtataagacaaacatagcttgaactctatcagtcagtcaaacaaaaataattgtttctttagggttgttcctaggtagaggagaggaaaggggattagacatgggctgcccagaacacctttgttttagggagtagagctttgggggaaaaatgaaagaaataggaaacactaggaaagggctgtaggacaggaagaatgaaaagggaaatagaaacaaatatcaagtatacccctgcttggagaagctggcaaatttattttgttttataagcatatgtgctttgctgttttgaaggctaccttaggtgttcaaagcccttcagcctggactg

SEQ ID NO: 124105 - DNA, 575 bp, Homo sapiens
tataagatcagggtttaaaaagggtgaaaagaggcaagaatgaccaatattyttcatgttcaatgtgtactttacaagtcagaatctggtaggatacagccaatatttttttttcattaaatcttggcctttgaaatatactcagccgtattttaaattctgtgtggttggccgtaacttatttgaattaataatggtgtgaaagagaaagatttcatcttactaatgccatagataatctgtataagacaaacatagcttgaactctatcagtcagtcaaacaaaaataattgtttctttagggttgttcctaggtagaggagaggaaaggggattagacatgggctgcccagaacacctttgttttagggagtagagctttgggggaaaaatgaaagaaataggaaacactaggaaagggctgtaggacaggaagaatgaaaagggaaatagaaacaaatatcaagtatacccctgcttggagaagctggcaaatttattttgttttataagcatatgtgctttgctgttttgaaggctaccttaggtgttcaaagcccttcagcctggactg

SEQ ID NO: 124106 - DNA, 616 bp, Homo sapiens
taacatttttcttattctctaggcatcctcccattcttccatctccatctttttaacaaatacttaacaagctctgtgtttgagacagaattgacaagtgaataagataggcatggtccctgctttaaagtgtttgcaatctagtgtggtataaacaaatattaaagtgagttatgggaatacatcaccagggaccctagtcagttctgggaggttgacctcaaaactcatatctaaaagataagtcatagccagttggccattgtgagtagtcaggtatgggaagcagcacattcaaagacccaaaggcaagagagaatgtgtgtttgagggcttgaaagcagcctggcatggacagagcaaagggaggagtggtgagagatgaagctggagaggtaggcaggagtcacgttcatagtcttgtgtgcaggtatggagaatgaattgaaggctggccagaaggaaagtggcgagagtagtttggagcccgttgtagaacctcagaagggagataaggatgatttggccaagggtggtgcagtgtgccaaataaaaacaaatscaagttaggtaaggggggactttattgaaaaggatgattgcagtggggggtaag

SEQ ID NO: 124107 - DNA, 516 bp, Homo sapiens
gtgggccaattaatccacttttctttataaattacccagtctcaggtattcctttatatcagtgcaagaatgacctaacacagccatgtgccctctgaaacttgtaggggagaattcttctttgcttcttcctagcctttggtggtgrccattagtccatggcatcccttgacctgcagtggcagtggcatcaccccaatatctaccgctatcctcaggtggcattctcctttcctgtctctccccttatattgggttaagggcctaccctactctagtatggcctcatcttaactaattacatctacaacaggcccacttccaaataaggccacattcttttttttttttttttcagtagagtcttgctctgtcacccaggttggagtgcggtcacgtgatcttggctcactgcaacctccacctcccagcttcaagtgattctcatgcctcagcctcccgagtagctgggattacaggcgtgcaccaccacgtgaggcctgcattttgtatttt

SEQ ID NO: 124108 - DNA, 579 bp, Homo sapiens
ccttatctcataccacttctggcatacaaagtggacaaacaagaatactgctcacagctctaccctctaggagggtttcccctcatcactgtcctttagggccaccactgagttgggtggtagtgttgacagctgcccattctcaggcagcattgagtatctgaaccaatctatccatgaaccaggaatgagctgtgttgttcctccttcatcagtgaatcatagagttccctcactcctgcccccatatttatagatgtgagctgagagacatgtcaggacagcagaggtaggtgacatggagccctgggccaccctataccctctggacttgctcagatctggtcctgaatataccatttccatcataccttaccaccttgttggatctgacaatgtccagctcgtaataggaaactcctatcatataatcacttgatgtcccactttcaggtgcttgatctctcttgaccccttatcacatcagaagctgtttttytgagtagtgagtaattaaacaataaatagtctcttgaatggagtagacatgcctttctccagaaccctacccattctgta

SEQ ID NO: 124109 - DNA, 585 bp, Homo sapiens
acattagcatctggtgagagtcttcttgctttgccatcccatggcagaaggtggaagagcaaagagaggatgagagagagagtgggggagggggtgggcaaagatggctgaacttgtccttttataaggaagccactcytatgataacaaacacactaccatgataatggcattcatccacccatgagagaaatgtccccatggcccaaacaccttccatgaagcctcacctctcaacacttccacatttgaggtagagtttctgactgacacatgaaccttgggggacacattcaagccatagtagttgctattacaaggattgtcaatagattaattggatgaagggagcagtaaaaggtaaaagctaaagataaaatgtttcacatcaggggcctgtagagataccaatttctttaatcataatcaggtatgcatgaggataagtagaatggaaagaaaaatttataaattccgatttagaatattgaattagatgtccacaagaatatctccttgggagaggcttctgggcatttggaaaggtaggattagaaccggggtcctgggaagttcaggatggta

SEQ ID NO: 124110 - DNA, 449 bp, Homo sapiens
gaattcaacgtaattatctattgtcatcagaatagacatgaaggattatgagaagttctttttgtcatgaagcccatgctgatcccatatcacatggggatcaatctgcaaatcagtcatcgacaggggagatgagatttattgattgtacaacctgagcagctctaaatatgcaagtgtcaccattggaaatgaagacaatggcttgaaggcaacctgggaccatcattcacacaatttgagtggattttcataaagggaatctgagactgcggctggttaatacatggctaagtaggctatggctcaaattatgaaaaactgacaagcaatttataagttaaatcrtaaatatccaaagtccaggaccttgtgttttaagaaacaaaaatgtgtgactgtctaagcaagagatactggacaaaaatttctatgatatcagaactcat

SEQ ID NO: 124111 - DNA, 365 bp, Homo sapiens
tatgttggtgggtcataactggtgggactctgagggtatgtttcctgtttgggctccttcagggaagtagaagaaagtaggaatttcaggtacttaagatgctaggcagagcctaaagtattaagaaatgctgctatcctaacattaagtcctcggggaattgcacaatttctcagatattggtgataaaagcatccactcatgtattcctactacttttccatttcaggtcctgattkttcccttgggcatttagaatttgttccatcagtttcctacagtggtctgtgaccagagctgatcccaccagcagcacattagacaaggaaacttaatcgacagtggaggttattattatgcaatcc

SEQ ID NO: 124112 - DNA, 607 bp, Homo sapiens
cttttaatttgatataattgaatttttctctttttgcttttgttgtgtgtgtttttgtggtcatatccaaaaaataattggtcagaccaatattaagaagattttaaaaatattttctgctactacttttatagtttggggttttaaatttaattatttcattcatttcaagttgattttgtatatggtatgagataagggtccaatttcattcttctgcatgtggatatctggttttccttcccaaaggaaaagaagataytttactgtccctattgtgtattcttggtacctttgtcaaagatcaattgagtatataaatgtatggatttacttctggtctctctattccattacattggtctttatgtcttattatggccttatgatgccattctgtttacaacaactttgttgtttattttgaaataatgtagtttaatgcctccagctttgtttcattttgctcaagactgctttggctattcagggccttttctggtttcatatgaattttaaggttctgttttctttctctgtaaaaaattcattggaattttgatagagattgtattgaatctatacattgctgacatggtttggctgt

SEQ ID NO: 124113 - DNA, 594 bp, Homo sapiens
attacacctttccttggttaacacatctaaagttcttgaagctatggtttcaaaacctatgatattttcttcttaagtgcaggaatgctggaaaattaaaaacttaaaaactagtgtgtgtacaatttactggataccaacaatcatgaaattgtttctttagaattccaagtatatatacatatatatatatgcgcacacatataattaaaatctattttatttgtccatttatttatttatgaaataaatattatgaatacaaaattactttgagggaaaagtacctctttagatactgaaagataaatactaaaattaatcccaactcaacatatataattttatgtattatattattattaatatgtattatattagctatatggtttatgtataaaagaccttgccaagctattcagatatttacyttattaaatacttatttaaaatatttaataaatattttcttaaatatatgtattcatttatattatgaattagagatagaagacatgtatgaacttgttttttcttccagtttaacagaatactaacccatatttcagttctccatattgatagccaatacac

SEQ ID NO: 124114 - DNA, 583 bp, Homo sapiens
ttgttcactctttccaccacgtgaggacagagagaaagcaccatgtataaggaaagggcccttacaagacaccaaatatgctggtgccttgaacttgaacttcccagtctccagaactgtgagtaataaatttctactatatatagactacccagtgtaaggtattttgttataaggtattttgttatagacagactaagacacattcatccatacacgaggaaaaggcagggtccttggttaaagtagaaggtcacatgctgactggtaaacatggagggagtgctgaagtgatcctygtcattttgttgccatcacagcaaagattggttcaggtaagaatcccaatagatgctaaatctgaggggaaattgtaatgaggagcaggatatttgggtggtcttaaagtgtctctcttcaaactcattattttgcaaaggagaaaatagtaactatttacagttggagaaataggacaacactcctactgtgtgaggaaaactggtgtcaccagggaggggcagatagacatcgtgtgcctccagatgtggctgtctgagaagcacacaatatcacatatgca

SEQ ID NO: 124115 - DNA, 545 bp, Homo sapiens
tagttggacaaaaagactcagaaaagttccttccagaatggtaatattggtttgtttttatttccctagttatatgaaaggtggatctaatcatgattttgtgaccttgatagagaagtccaaatagagcgcacatacccccagagtaggcaaaaagaaatgatcataactrcaatttatatttattttttacctaatatttttaacaattataacattgtgtatatttatgaagtgcataatgccaaaatgcacttaaacaatttaaatatttacatgatacataaataaaaattttcattaatatcagtgccctatccccaaaaaactttgcagaacgtggaaatacaatgaagtatattctgccatgtaaaaaaaagtcacatgttgcctggtagtttggttgatactaaaggctcggttctgtcccaagctaacatgtgtcataggctaatattaaaatcctttaacttttatcctaagtgcaaccagtaaaatagtgaaaatccattaatgtaatcaattacaactgatatagtttggat

SEQ ID NO: 124116 - DNA, 561 bp, Homo sapiens
caataactcgggctgggcatggtggcttatacctagaatcccagcactttgggacgctgaggcaggcagatcacctaaggttcagagttcaagaccagcatggccaacatggtgaaaccccatctctgctaaaaatacaaaaattagctgggcatggtggtgcatgcctgtaatcccagctactcaggaggcccaggcaggagaattgcttgaacccaggaggcagaggttgcagtaagccaagatcatgccactgcaccactccagcctgggctacaagagtgaagactctctctcaaaagaaaaaaaaaatagattcaataactctgcagcccatcttccctgcaataaaaccactcaaatcacacactgaagtgatggaaagtcaatgggactrtaattcttatcaatcctctcagaaacttcgtcttgcaattgttgagaagatttaaaaccattttaatttaaataaaccattttaatattaaaaccatttaaatattattacattatgaattaaattataatgctatttatatcattataataatatagttatac

SEQ ID NO: 124117 - DNA, 592 bp, Homo sapiens
cgactcacaagaaaatcaaatttacatttttgccactaccatgttcattgagaagggtaaaactttcaaaatttgatcatgcatggtgcatcaccattcctcatgaatttttttttttttttgaaaaggagtctcactctgccgcccaggctggagggcaatggcggatttcggctcactgcaatcttcacctcccgggttcaagtgattatcctgcctcagcctcctgagtagctgggattacaggtgcccgccaccatgcctgggtaatttttgtatttttagtagagataggtttcgtcatgttggccaggctgttctcaaacccctcacctcaagtgaactgcccacctcggcctccctaagtgctgggatttcaggcatgagctaccgtgccgggcccattcctcatgaatttctactgaaggaagagrtatcataacaacaatttgaagccaagttttaaattactatgattaaagtaaatataacatttttaaataaaaatctagaattttctacatatcaaatattaaacttcaatatgaaattgtactgtggttctgcctattgcaaattgaaagcaaactga

SEQ ID NO: 124118 - DNA, 568 bp, Homo sapiens
taaaaatattttttcttcaataataaattaatcttagcttactttaatttttttactttatgwactttttacatttttttaactttttgacttttgtaataatacttagcttaaaacagatacattgtacagctatacaaaaagtattttcttcttatccttagtctataagcttttttctatttttaatgttttttaactttttaaatgcttttattataaactaagtgaaaaacacacacattagcttaggcctacgcaggaggagcaggatcattaagatgccactaggcaacaggaatttgtcagctccattataatcttatatgaccaccatcatatatgcagttcatcattgaccaaaacatcatcatacagcacatgactgcactgcaaaatttcatttatttagtgttagtgaaataatataattatatttgctaatgacattgttgatgaatatagatgaagagcagattagtgattatcaggggtttcatgtatcctaggtttacacactaacatagaaatctgaaagaattatttaacattaattgaagagaaatta

SEQ ID NO: 124119 - DNA, 568 bp, Homo sapiens
taaaaatattttttcttcaataataaattaatcttagcttactttaatttttttactttatgtactttttacatttttttaactttttgacttttgtaataatacttagcttaaaacagatacattgtacagctatacaaaaagtattttcttcttatccttagtctataagcttttttctatttttaatgttttttaactttttaaatrcttttattataaactaagtgaaaaacacacacattagcttaggcctacgcaggaggagcaggatcattaagatgccactaggcaacaggaatttgtcagctccattataatcttatatgaccaccatcatatatgcagttcatcattgaccaaaacatcatcatacagcacatgactgcactgcaaaatttcatttatttagtgttagtgaaataatataattatatttgctaatgacattgttgatgaatatagatgaagagcagattagtgattatcaggggtttcatgtatcctaggtttacacactaacatagaaatctgaaagaattatttaacattaattgaagagaaatta

SEQ ID NO: 124120 - DNA, 670 bp, Homo sapiens
ccctgaacagaaaaaaaaaaatagttgctgtgtttaaaatgtattgaatcagattgtgctgtcaatcgtgtacttatgttcttcttttgaacattctgtgcacacacgcatgtaccaggactccttccctaactctccttcttcttacctatattctttacctcctacaaatgtcccaacttgacaaatctagcagctttggggatttttaaattaattctatgaagcacatattaggtatagtcctaattatttgtacctcacaatttagcatttatttttacctctatgtaatgcttgcattcttgtaatataattawtctccactgagattaggacataacatctttcagaataggcaggatcttttaaacattcttgtttttgaaactttgtcacttcacagaacaaaaatacaattaaaagttaataaaattttcaaggcacacttcctagtgggaaagtaagcattgtctctggtctgatagttgcttgaaatcatatgtggtttttttctgaagaaaacaatccccaatcacaagtccagggtttctccagacacaagaagtaatttgtataccactgtgattctcatttctctaatggctaccataccacttattgagtgcttacatttagttcatctgacagctctgtgaggcaagtcata

SEQ ID NO: 124121 - DNA, 603 bp, Homo sapiens
atcgtgtacttatgttcttcttttgaacattctgtgcacacacgcatgtaccaggactccttccctaactctccttcttcttacctatattctttacctcctacaaatgtcccaacttgacaaatctagcagctttggggatttttaaattaattctatgaagcacatattaggtatagtcctaattatttgtacctcacaatttagcatttatttttacctctatgtaatgcttgcattcttgtaatataattattctccactgagattaggacataacatctttcagaataggcaggatcttttaaacattcttgtttttgaaactttgtcacttcacagaacaaaaatacaattaaaagttaataaaattttcaaggcacacttcctagtgggaaagtaagcattgtctctggtctgatagttgcttgaaatcatatgtggtttttttctgaagaaaacaatccccaatcacaagtccagggtttctccagacacaagaagtaatttgtataccactgtgattctcatttctctaatrgctaccataccacttattgagtgcttacatttagttcatctgacagctctgtgaggcaagtc

SEQ ID NO: 124122 - DNA, 403 bp, Homo sapiens
gtatgtattatgtgcaaatgcccctttctgtgtagccatggtgatttcctggtttgctgcacgtgggtctgtctgcatttgcgtcggtcagcctgtcattgtccctagccctcccacactctcaactgggtccgtggacccttccctgcctacccttagaatccaggatcagaggaaaccggaccagctgcaagcaagaggggtttatggacyatcagttcacccctctaacacttggcaccctctctgtcatagctcatccaattctattacttcacctggctgtggtcttgtgtctgctccaaacacaaggcagtgagggacttagcacccgggccagcagctgcggagggggcgccaggtcccccatcactgccagcccgcccacgcggcgctcgaattt

SEQ ID NO: 124123 - DNA, 568 bp, Homo sapiens
ttaaaaattcaaccattgtatattgattttcacattaatcctaggcacgtgggaccatgtgagcttcagattgcagtacctgatgatggaacaggttgaccttctgtgacaaattaaccttttattgctacaagattgggtatccaaacaaagcaagaatgtataccaatcaataaagctcatacttcagatatgtcacctgaataataaaattactagcttcctagaaaggrtatatgaatgcaacaaaggctaaaaatatttattaaacaagaggttcatgtaaataattattttttaatttcaaaattagaattatgttttaatgtatttttctgcttgtagatattcctttatagactttgttttgatatactcagaaaaccctggccactcaccctttcaggcctggacaagagctagggaataaaacatgctggtattctcaaacttgctgaatcagcagaaccacttaagaaacttaaaaatgcaggtacctgggaccctatcctggagattttgactcagtggatctagagacaggttccaaaagttatttcttattgtc

SEQ ID NO: 124124 - DNA, 535 bp, Homo sapiens
ggaagaaaaagacatctccaatgaagccaagaggaaggtcttcctctcagtcctgcagacacatggtaggctgcagaatttcacatggatagaagaagggagatgagcccatcacccagtgtaaagggaccgttctgaatcaggtgcctatatatccctttctttatctggtaaaatattatggaattgactgtgtttatggactagaacttcacagagatgaaagaattttaaagcttaaaatccttcctcataaggtgccattctcacaagtcagggatttctgccttgcaaataccataattggcaaagcagtgaaacacatgtttgagggagagcatggttctatggataaatggagggggatggtcstagcccaagcacctatcatgaaagcctggttttatattacttataagaaagatcctgtcttgcacatgtactagctactcgatgattataaggcaggtgacctctgcatcatgccagaatcaagtgtgtctcatccagtgaagagggaaccagaaggatttat

SEQ ID NO: 124125 - DNA, 511 bp, Homo sapiens
gtaatttattgatatgttataatcctttaaaaagcctcgtgtatactctatgacaaatatgattcgcattataaaaatcttgctcatccatgccggcttaataaagggaagtacagtttwgaaaacatgaccaaaaataattttgtcataaaatgtgcttgatgtttgtgtttgagaaaaaattttatgggaaaaaatatttactgccagctcaattgagagagataaactatctcccaatgagtgatatgatggttttgatcctatactgaatttagtaatcatctttatttccatactcactcttctgtctgatttttttccaacatagtatgcatgtttgacttaaatgaagtagaaatgcataattagttttgtctaatgtcttcacaaaagcccatgatatgatagtgttcctggaccaaactgaggattgggctgcttattcttgtggcccaataacgagatgcagatgaacgggaaaaggagggagtttttatttctgtaagtg

SEQ ID NO: 124126 - DNA, 523 bp, Homo sapiens
attttcaggcttattttacttgacctcacaggtgagtttgacctttttgatcaccccatttttcttgatggtcctgtctcccttagtttctgaaacatcactctaacttctccttcacagctgtctttttcatgactattcactcaaatgttggtgatagctaacctttgtttctggtctctgatcatcctacatcgaccctgagtgaactcactcactcccataatttcagtgactgtttattttctgttgacgcctagttatatgtctttatcacagacttctctcctgaacttcagactgcatcctgggcagctctaccacaacatcccacaggtaccttaaactcaacacgtttccaaacttctatgtgctcagcttagtgaattactatccacctagtcacccaagatagaaaayggggaagccactttctctctcttactctgcattcagaaaaccaggccgattttctttcagaactgctccctgacaatcctctgctctactcaaaagtatttaa

SEQ ID NO: 124127 - DNA, 509 bp, Homo sapiens
tcattgaaattttttccttttttttgatgtggggacttatagctgtaaacttctgtcttagtactgcttttgctgtatcccataagttttggtatgctgtgtttctattatcatttgcttaaaaattttcaaattccttcttaatttcttcattgaccyactgctcattcaggagcatattgtttaatttccataaatttttatagtttccaaaatttctcttgttattaatgcctagttctatttccttgtagtcagagaaaatgcctggtattatttcagtttttgttaatgctttaagactgttttgtgacataacatatgatctactcttgagaatcatctatgtgctgaggaaaagaatatgttttcagcagtcattggatgaaatgttctgtaaatatttattagatccatttaatctatagtgcagattaagtctgatgcttctttcttgattttctgtccaatgttaagatctgttgaatgctgaaggtggggtgttgaat

SEQ ID NO: 124128 - DNA, 509 bp, Homo sapiens
tcattgaaattttttccttttttttgatgtggggacttatagctgtaaacttctgtcttagtactgcttttgctgtatcccataagttttggtatgctgtgtttctattatcatttgcttaaaaattttcaaattccttcttaatttcttcattgacccactgctcattcaggagcatattgtttaatttccataaatttttatagtttccaaaatttctcttgttattaatgcctagttytatttccttgtagtcagagaaaatgcctggtattatttcagtttttgttaatgctttaagactgttttgtgacataacatatgatctactcttgagaatcatctatgtgctgaggaaaagaatatgttttcagcagtcattggatgaaatgttctgtaaatatttattagatccatttaatctatagtgcagattaagtctgatgcttctttcttgattttctgtccaatgttaagatctgttgaatgctgaaggtggggtgttgaat

SEQ ID NO: 124129 - DNA, 370 bp, Homo sapiens
aataggacttgaaagtcaaaattacttcttgatccatggactgcagagtagatgtactgtcagaaggcatgaaaataacatgaacctccttgtacatctccatcagagctcttgggttatcaggtgcattgtaagtgagcagtaatattttgaaagggatcttttttctgagcaataggtctcaacagtgggtttaaaatattcagtaagccatgctgtaaacagatgtgttgtcatccaggctttgtttctccatttatagagcacaggcagagtagatttygcacaattcttaaggaccctaggattttcacaatggtaaatgagcactggctttaacataaagtcactagctgcattatcccctcac

SEQ ID NO: 124130 - DNA, 451 bp, Homo sapiens
gaattctttccaaaaggttttcaacttactttgccagatcagagaatcagaagcagctatcaccttataaaatgtagcttttaaataataggacttgaaagtcaaaattacttcttgatccatggactgcagagtagatgtactgtcagaaggcatgaaaataacatgaacctccttgtacatctccatcagagctcttgggttatcaggtgcattgtaagtgagcagtaatattttgaaagggatcttttttctgagcaataggtctcaacagtgggtttaaaatattcagtaagccatgctgtaaacagatgtgttgtcatccaggctttgtttctccatttatagagcacaggcagagtagatttcgcacaattcttaaggaccctaggattttyacaatggtaaatgagcactggctttaacataaagtcactagctgcattatccc

SEQ ID NO: 124131 - DNA, 607 bp, Homo sapiens
ataggtctcaacagtgggtttaaaatattcagtaagccatgctgtaaacagatgtgttgtcatccaggctttgtttctccatttatagagcacaggcagagtagatttcgcacaattcttaaggaccctaggattttcacaatggtaaatgagcactggctttaacataaagtcactagctgcrttatcccctcacaagagccccttcaaagaattctttgaagctttgaagccaggcattgacttctctctagctatgaaaattttagatgacaccttccaatagaatgctgtttcacaaacattgaaaatatgttgtttagggtagtcagattcatcaacaatcctagctagatcttctggataatttgctgtagcttctccatcagcacttgctgctttacctttcacttttatgttatgagatgacttctttccttaagcctatgaattaacctttgctagcttcaaacttttattctgcagctgcctcacctctctcagccttcatagaattaaaaagagttagggctttgctctggtttagactttggcttaaggaaatgttgtggctggtttgaacttctacccagacaactcaaatttt

SEQ ID NO: 124132 - DNA, 530 bp, Homo sapiens
gttacataggtaaacgtgtgccatggtggtttgctgcacagatcaactcatcacctgggtattaaacccagcgtccattagctattcttcctgatgctgtccctcccccgaccwcccccaaaaggccctggtttgtgttgttctccccatgtatctatgtgttctcatcactcagctcccacttataagtgtaagctccacctcattgaggggaatatttacataaactatttggagttctttagtacagaaaatgtgtctattctctttatttattcaatcatttatttatatcagtgtggacttgtagatgtttattttgtactttgggttataattcaacattattttgttcctcaaaccctgctccacctttggccattaatagctccttcagtcaagtagctcctgatcatggtttgtttgttagcacttccttacctttgtggccctacaagatgcttcgggcttattttgtatatttcctgccccgtcctaaaatctgccatttatccaaggatcttctggtt

SEQ ID NO: 124133 - DNA, 629 bp, Homo sapiens
actcagctttcttcttcaagcctcaagatgcaatttgaataggatattcagtacattgattttctgaggcaatcacaggtgattctcttttgatcatatgtggttggttggctcctaggctttatatctcatcatcaagtatttaattcagcactgactcagctaaatgtatcaattacctaggagaatttcctatagcccttttgggttctgtaattccagtgttggccaggaacaaattgatttatgtagtaatgctaactatagcagcttactattaagcaacagacatcagaagcggtttactttgagattatcagctgtttattatgattgggtcagtaatgagagaaacgtcaagaagtgtttcaagaaagattttcttgtcttttttttttttttttcctattctccacatgtaggcctagtaagattgcattgcccagctcaatcatatgttccaaatctgcttcagcgtaaagtttaggaaaaagtgtcctgtcaatttagcacatccagattttgtatttatttatttattttttttactagagccttttctttcatgtagtttgagtagcayatcttttcttttctctatttaaacattgagacaagagttagggata

SEQ ID NO: 124134 - DNA, 578 bp, Homo sapiens
caggagcactgcttgaacccgggggtttaaagctgctgtgagctatgatagaactactgcactcctgcctgggcaacagagtgmgaccctgtcttcaaaaaaaatcttagtcaggacctgagctctgctattgagccaagtaaacagcagggatgggttttattgggaaatgagtaggtttgtaattagcatgatggatgttagaaacaggctcttggggaaattaaggttatgtggatttgccaaaatgctttagatgcccttcacgcttatgagaataagttatagaatccaatgaagtctagactttatcgttaggaatgttctcctaaagttcctaaatcattctctaagactccattctttaaaaggatttctggttgtctggtgccaacaagagtgacagcagactgcctttgaaatggttctgtgtcagccctcaatggatcttccaagcagtgaggtcagagcatctagaaggatggagagttaggtcctcagcaaacttacacaatagagcgtccacactgttcttctacttgctgttttgggctaaattgtgtccctcccccaaattt

SEQ ID NO: 124135 - DNA, 578 bp, Homo sapiens
caggagcactgcttgaacccgggggtttaaagctgctgtgagctatgatagaactactgcactcctgcctgggcaacagagtgagaccctgtcttcaaaaaaaatcttagtcaggacctgagctctgctattgagccaagtaaacagcagggatgggttttattgggaaatgagtaggtttgtaattagcatgatggatgttagaaacaggctcttggggaaattaaggttatgtggatttgccaaaatgctttagatgcccttcacgcttatgagaataagttatagaatccaatgaagtctaractttatcgttaggaatgttctcctaaagttcctaaatcattctctaagactccattctttaaaaggatttctggttgtctggtgccaacaagagtgacagcagactgcctttgaaatggttctgtgtcagccctcaatggatcttccaagcagtgaggtcagagcatctagaaggatggagagttaggtcctcagcaaacttacacaatagagcgtccacactgttcttctacttgctgttttgggctaaattgtgtccctcccccaaattt

SEQ ID NO: 124136 - DNA, 578 bp, Homo sapiens
caggagcactgcttgaacccgggggtttaaagctgctgtgagctatgatagaactactgcactcctgcctgggcaacagagtgagaccctgtcttcaaaaaaaatcttagtcaggacctgagctctgctattgagccaagtaaacagcagggatgggttttattgggaaatgagtaggtttgtaattagcatgatggatgttagaaacaggctcttggggaaattaaggttatgtggatttgccaaaatgctttagatgcccttcacgcttatgagaataagttatagaatccaatgaagtctagactttatcgttaggaatgttctcctaaagttcctaaatcattctctaagactccattctttaaaargatttctggttgtctggtgccaacaagagtgacagcagactgcctttgaaatggttctgtgtcagccctcaatggatcttccaagcagtgaggtcagagcatctagaaggatggagagttaggtcctcagcaaacttacacaatagagcgtccacactgttcttctacttgctgttttgggctaaattgtgtccctcccccaaattt

SEQ ID NO: 124137 - DNA, 555 bp, Homo sapiens
acagcaactatatgactgtatgtggtccttacacaatggataggtttatgacttgattatctaaggaaggaatgaaaaggaagaggaaagaaataaaagtgcaagaaccattgggaggtatctaggggcagatcaagggagtcctaacaactttgtatacagtatctcatttaatactgactcctaaagagagttaggtgatgactcaaagttccwacagtctgtccactttggagtcaggagttgagcttaggtctgattgactccaaaccctgtaggatgccaaaatgtataagattcccattataagtaaggcatggaactctaagaattgtaaatacttctctaaatttcacaatgactctctttttttttggtgtgattatcacccccaatttaggaaacagcctgagagagaggaagcagtaatggagttaggggaacagagccctgtggcttccaccttcacctctgatttagtcggggaatgagagatccagtagatgtaaaagcaatggcagacctcagtaaagggggaaccacatgggcctgagg

SEQ ID NO: 124138 - DNA, 550 bp, Homo sapiens
caaataaaatcagaacaatccatgttccagaaaaattgcattaaaagagaatgaggaacatttactaaaatgggggattttcaaggataaatcaactcagaattgagcaccaaagagttttgatgctcagaagaaatgcatacaagatactggggcataaaatgaaaaagaatgattgaccagaagaaaactaaactgactacggactagcacagtaggaaaaccaacatatccaagttggtgtgtgtggtcgcrtgcggaaagcaaagcaacgcagcacgttcatggtccttctctccccatcactccccagtatcctcatcttgtcttcctagttcccaggtatgcagacaaccagaaggcctttgttcttttttgaccctatttttatttttatttattcatttgttttctgagacaagctcttgcttggggacccaggctggagtgaagtggcacaatcttggctcactgcagcctctacctcccgagctcaagcgattctcccacctcagcctcccaagaagctgggactacaggcaagtaccac

SEQ ID NO: 124139 - DNA, 550 bp, Homo sapiens
caaataaaatcagaacaatccatgttccagaaaaattgcattaaaagagaatgaggaacatttactaaaatgggggattttcaaggataaatcaactcagaattgagcaccaaagagttttgatgctcagaagaaatgcatacaagatactggggcataaaatgaaaaagaatgattgaccagaagaaaactaaactgactacggactagcacagtaggaaaaccaacatatccaagttggtgtgtgtggtcgcgtgcggaaagcaaagcaacgcagcacgttcatggtccttctctccccatcactccccagtatcctcatcttgtcttcctagttcycaggtatgcagacaaccagaaggcctttgttcttttttgaccctatttttatttttatttattcatttgttttctgagacaagctcttgcttggggacccaggctggagtgaagtggcacaatcttggctcactgcagcctctacctcccgagctcaagcgattctcccacctcagcctcccaagaagctgggactacaggcaagtaccac

SEQ ID NO: 124140 - DNA, 524 bp, Homo sapiens
ccactgtgtaggtgttggaaagagggaggcatgcttcatgtaagtaaagacttgaaagaaaattacagaatgtcttttctatttctcagattgaatgctagcaattcccttgcctgtatttagaacctgaggacactcttaaccttattctttctcacctaatttttcctctacccatctatagcatccaatataatggcatttgaatttttttctctcgcaaatggtaaacacaactgtctcccattcaattagtatttgrgggattgaggatttgggataaacttagtccctaaattcaaaagtattctaaattgtctattttgggggaaaaaatcaatgactgcaaaatatagttacagacctatttattatatttacagagtaaagaatcagagaaaacccactgtgcttgcttagaaggaaaattaaatcataaaattaggattgtcatccatacagctgttgtgttgttttagaactgtagcttctgtgtgtgtgtgtgtgtgtgcgtgtgtatgtgt

SEQ ID NO: 124141 - DNA, 524 bp, Homo sapiens
ccactgtgtaggtgttggaaagagggaggcatgcttcatgtaagtaaagacttgaaagaaaattacagaatgtcttttctatttctcagattgaatgctagcaattcccttgcctgtatttagaacctgaggacactcttaaccttattctttctcacctaatttttcctctacccatctatagcatccaatataatggcatttgaatttttttctctcgcaaatggtaaacacaactgtctcccattcaattagtatttgagggattgaggatttgggataaacttagtccctaaattcaaaagtattctaaattgtctattttggrggaaaaaatcaatgactgcaaaatatagttacagacctatttattatatttacagagtaaagaatcagagaaaacccactgtgcttgcttagaaggaaaattaaatcataaaattaggattgtcatccatacagctgttgtgttgttttagaactgtagcttctgtgtgtgtgtgtgtgtgtgcgtgtgtatgtgt

SEQ ID NO: 124142 - DNA, 642 bp, Homo sapiens
atgtttttttcaatagatctcttgggaccatctttctgtagaagagagtcccaggacgagactgttcctttaaggaagtacatgtattgtactttctttttccaatattcaaaattaagcccctccaaatggcttacaaaccgaagtttataacgtcagcctacacaagttcagtgcaaaaagatctacagcctgcaggcagagcgaggaagctctttaaagatgaatcattttcataaatgagtgcagagggaggtcaggccagggaacagggaaggttacatgtgtgcctgagataaggcctcatccatcctcctcttactgtcaggccttgatgggtgaacactgccttgagctcccataaaacatgttgtttgcagaaaacttgcaggtggttcataaaaaagtccaaactgttaccatgaaatttatcttccactgtgggatctgtttataatagaaacgaaggatctcaaatagaaattaagtatctcagactgacttatattggctgggaggattgaaaaattcaacctgcttcccaatcatcgcactaaaaacgtcaaagtatttgtattgatgacatcttgacaagatacgagtatgttcaaaagaaaamtaatgtccattgtgtgcacagtc

SEQ ID NO: 124143 - DNA, 561 bp, Homo sapiens
aattttaagttttctaaaatattttcaatatttctcacttccgtgacctcatggaaccaataacacttatttaaaagaaaagaaatctattctacatgtaaatgtgccaagcaagtgtctccatttgttatcaaactatcttggtcttagctcaacttccaaaatgatagttttagaaaataaagttaagaagatcactaaactggattatagtaccactataccaagcaccttggtgttttgccaattaagctttagtgttgaattgttaatatactaatcttytttgacctaaaacaaaaccatcaaaaaaaaaaaaaaaaaaagaatctcaaaaagatactctttcctgctcaacccaatgtgccatgagctatatttcctcccatggtcaccagtaggcaccagagctaacattcctgaaattttttgtccatttagaattatttagataaaattggtttaagcgactctttgtgcccctttacttaccattctccaggcttttgttgaacactaattattcagtgcaaagcagagtagaaaatagaggaataagcc

SEQ ID NO: 124144 - DNA, 561 bp, Homo sapiens
aattttaagttttctaaaatattttcaatatttctcacttccgtgacctcatggaaccaataacacttatttaaaagaaaagaaatctattctacatgtaaatgtgccaagcaagtgtctccatttgttatcaaactatcttggtcttagctcaacttccaaaatgatagttttagaaaataaagttaagaagatcactaaactggattatagtaccactataccaagcaccttggtgttttgccaattaagctttagtgttgaattgttaatatactaatcttctttgacctaaaacaaamccatcaaaaaaaaaaaaaaaaaaagaatctcaaaaagatactctttcctgctcaacccaatgtgccatgagctatatttcctcccatggtcaccagtaggcaccagagctaacattcctgaaattttttgtccatttagaattatttagataaaattggtttaagcgactctttgtgcccctttacttaccattctccaggcttttgttgaacactaattattcagtgcaaagcagagtagaaaatagaggaataagcc

SEQ ID NO: 124145 - DNA, 561 bp, Homo sapiens
aattttaagttttctaaaatattttcaatatttctcacttccgtgacctcatggaaccaataacacttatttaaaagaaaagaaatctattctacatgtaaatgtgccaagcaagtgtctccatttgttatcaaactatcttggtcttagctcaacttccaaaatgatagttttagaaaataaagttaagaagatcactaaactggattatagtaccactataccaagcaccttggtgttttgccaattaagctttagtgttgaattgttaatatactaatcttctttgacctaaaacaaaaccwtcaaaaaaaaaaaaaaaaaaagaatctcaaaaagatactctttcctgctcaacccaatgtgccatgagctatatttcctcccatggtcaccagtaggcaccagagctaacattcctgaaattttttgtccatttagaattatttagataaaattggtttaagcgactctttgtgcccctttacttaccattctccaggcttttgttgaacactaattattcagtgcaaagcagagtagaaaatagaggaataagcc

SEQ ID NO: 124146 - DNA, 547 bp, Homo sapiens
ccacctcactgagttttgggtgtgaacatggaaggagttaatatgtactaagtgcttggtgtctattcagccttagataaatgctagctccctttccattcctttctctctcaactagagtggtattcattggtgtttcatgtttcatgaaccactgagaagattagaactggaagaaaacttacttgagagtttctggtgtgagctgctcagtttacaggtgataaagacgaggcctaaagaccaaactcctcstaaaaaaaaataagaatttgggctgtgcaaactctccccttctttcttgcctaaattgtcaccttgctcctcagtagggttggaaattcttcacatccaccagaaagagactctgcttgaggcttcagcactgacacttacggttgcacaagttgtgcactgcacaattaaggaactgcattcacacaaacaatgacgggaatggtatcccaaaattttgaaccacagatccttggatgtcctataaagaaagggacaccccttcttctctgagatggagccaaccaaaggc

SEQ ID NO: 124147 - DNA, 396 bp, Homo sapiens
tgtgtccttacaaggtctttattttgtgttgtgcatccttggtgtatttcttagtgtccacatttcctgtcctcttaaggacaccagtcaaattggattagggcccaccctaaaggcttcactttatcctaatcacctttctaaatgctctatctcctaatacagtcacattctgagacaccaggggttagggcttcaacacatgaacttaagggagacacaattcagcccatattgccctctatgtttcactcccactctctctccatcctttgctttttcttatttccttacttttttcttaarcacttattgagcacctgctttgtatgctagccagtgggctacaggctgaagatacaataattaatgaaagaaatatagttttttcctctt

SEQ ID NO: 124148 - DNA, 611 bp, Homo sapiens
acatctttctttgctctattttatttttctttgtgcttaagtttgaatattttatataggcttgaatttgagttcaataatcctgtctcttgctgtgtatagtctgcttttaaatccatctaataaattttaaagtttatacattgtatttttattttgagtgtccatttgactataaaataaattctaattatctgttaaaatattctaccttcatgaccattttaaactttaaaaaatattttatttagcatattaatcatactttattttaaagcttttgctaactctaatgtttgcagcatctctgcatctgcttttgctgattgttttatgtgctaattgttggctgtgttttcctgtttcactctatgactaggaatgattgcaggggactgtgaatagtatgctgcacattctcttggttaaattactgtcttagtgcattttgtgttgctataacagaatacccragactgggttatgtataatgaacagaaatgtattggttcacacttctggaggctgggaagtccaagatcaaggcactgacatctggcaatggccttcttgctatgccaccacatggtgaagggcatagggcaaagaag

SEQ ID NO: 124149 - DNA, 526 bp, Homo sapiens
gctgcaattccctagccatgaggtgggaataagacccatgtcaggtcaataggatgctctcttgaaatttaagtcttgggcagaggcacaatgatactgatggggcacatcktttctaaaggtcatattctcaccagattgttgccagctagggctttttatataattcttgttccacggggttggggaattaaaaacagggcacttcagtcagaagtttcaaggtttcaattatgcaaggtaagtaaatcctggagatcccctgtatagcctagcaactatagttaataatatcatattgtatacttaaaaaattgttaaaatagtacatctaatatgttgtatattcttttttttttttttttttttggtttgttttttttttttgacacaaggtcttgctctgtcacccaggctagagggcagtggcacagtcagggcctactgcagccttgacttcccaggcttaggcaattccccgcctcagccttttgagtaactgggattacaggaacataccactatg

SEQ ID NO: 124150 - DNA, 592 bp, Homo sapiens
gaaaatagcatttttacttctaacgttttgcatctcactccagagccaggctcagcaactggcctgaccaaggcctgccagtgatgaaggaggcactgtggcaaatggttacctgagatctgatttggggatgtttaggatctcctggatttagaaatcaccaactgggtcccaaaatagctccacctctattttcagtagcaaaataatcgctaacatctacatgacaaaaaytattttcaggcaatgatctaagtacttcatgtatagaaactaactgatctcaacaatcccttttggaatgaggtgctgttattaaccccttttcacaggtgaggaaaccaagacacaaagtttacaaaacctgcctgaagacacgtgacaaatggcagagccagaatttgaacccagggattctgtgtacctaatgactatgctgtctctgagcatcactcagaaaccttccaggttccccactgccagagaatgacacaaggagctggagaatgacagtccttataagcttggtttgaaccacaaaggtcaggttcaaagtaagaccagagcagtcactatttctctctggagcttg

SEQ ID NO: 124151 - DNA, 592 bp, Homo sapiens
gaaaatagcatttttacttctaacgttttgcatctcactccagagccaggctcagcaactggcctgaccaaggcctgccagtgatgaaggaggcactgtggcaaatggttacctgagatctgatttggggatgtttaggatctcctggatttagaaatcaccaactgggtcccaaaatagctccacctctattttcagtagcaaaataatcgctaacatctacatgacaaaaactattttcaggcaatgatctaagtacttcatgtatagaaactaactgatctcaacaatcccttttggaatgaggtgctgttattaaccccttttcacaggtgaggaaaccaagacacaaagtttacaaaacctgcctgaagacacgtgacaaatggcagagccagaatttgaacccagggattctgtgtacytaatgactatgctgtctctgagcatcactcagaaaccttccaggttccccactgccagagaatgacacaaggagctggagaatgacagtccttataagcttggtttgaaccacaaaggtcaggttcaaagtaagaccagagcagtcactatttctctctggagcttg

SEQ ID NO: 124152 - DNA, 616 bp, Homo sapiens
ctgaaaatattttgtgccttctgacggcagcacctaagataagacagaggagaaagggctgctttgtgcattcccaggagcagagtttaccgagacaatgtagtacrtttgcagaagggaaaaaagggtaattttcctaaggccaggaaggcaggaagaaaggtgatccagaaaataaagaaatgtggaaggagtgagaatttcctttgtctcccactccaattcctggtttgtactcccttccatcaaaggcatcaagccactgagcctgcatccagctctgccactacctaactttgcgggcagaggtaacctctcagttgtcccacctataaataacaacaatatcagctaataattgtgaaagtgcctaggaacgtgtgttcagcagaacgaatggaaaaggaggagggaaaggtcctaagattattttctgagatgagaaaaaaagtgcctggctatgcaacaaaggaaagaaaggatgacaatctcagtgctctaaagaaggcagttgagagagcagcaggcagcaggcagctgaccttcaccaccccacagggccggaaccccagcaggctgggggtccactcatttgcataggccactccctgaacag

SEQ ID NO: 124153 - DNA, 616 bp, Homo sapiens
ctgaaaatattttgtgccttctgacggcagcacctaagataagacagaggagaaagggctgctttgtgcattcccaggagcagagtttaccgagacaatgtagtacatttgcagaagggaaaaaagggtaattttcctaaggccaggaaggcaggaagaaaggtgatccagaaaatawagaaatgtggaaggagtgagaatttcctttgtctcccactccaattcctggtttgtactcccttccatcaaaggcatcaagccactgagcctgcatccagctctgccactacctaactttgcgggcagaggtaacctctcagttgtcccacctataaataacaacaatatcagctaataattgtgaaagtgcctaggaacgtgtgttcagcagaacgaatggaaaaggaggagggaaaggtcctaagattattttctgagatgagaaaaaaagtgcctggctatgcaacaaaggaaagaaaggatgacaatctcagtgctctaaagaaggcagttgagagagcagcaggcagcaggcagctgaccttcaccaccccacagggccggaaccccagcaggctgggggtccactcatttgcataggccactccctgaacag

SEQ ID NO: 124154 - DNA, 630 bp, Homo sapiens
tgctgcttatcctttaaaataaaacacaagcatcagctctttcagggagccttccttaaacccttggtctcattgaggtgtccctccttgcacaaggtttcccacagcaccccactagaggatgtcatcctcttctgtatctgttgtcttgtctgcctccccatgagagcatgagtaagaactgtcatattcatctctgtgttcctatattttagcacaatacctggtacattatagatgctcaacaagtgcttaaataattaattgatgagaaataaacctgatgaaaggtaaactccctgggcagtgaggaatgagaggcaagaaagcaagatgtgcaaatgcccaargctgtcaaacacttgtttcttttaattcccaggaaaaaagaaagtgaacaaccaggtgcacgaggaggattttaacagactacaagcatggggtagtcctgctctgtggtcctaataagaaagcaagttgagaagggaacttagggtatttctctgcgagtgttttagaacagaaatgccttttacagccactggcaaaagtcaatatcaaaacaatgggtagaagaaaatctccattcagaaatctacttgaagagaagatttgggtcgggtgatatta

SEQ ID NO: 124155 - DNA, 630 bp, Homo sapiens
tgctgcttatcctttaaaataaaacacaagcatcagctctttcagggagccttccttaaacccttggtctcattgaggtgtccctccttgcacaaggtttcccacagcaccccactagaggatgtcatcctcttctgtatctgttgtcttgtctgcctccccatgagagcatgagtaagaactgtcatattcatctctgtgttcctatattttagcacaatacctggtacattatagatgctcaacaagtgcttaaataattaattgatgagaaataaacctgatgaaaggtaaactccctgggcagtgaggaatgagaggcaagaaagcaagatgtgcaaatgcccaaggctgtcaaacacttgtttcttttaattcccaggaaaaaagaaagtgaacaaccaggtgcacgaggaggattttaacagactamaagcatggggtagtcctgctctgtggtcctaataagaaagcaagttgagaagggaacttagggtatttctctgcgagtgttttagaacagaaatgccttttacagccactggcaaaagtcaatatcaaaacaatgggtagaagaaaatctccattcagaaatctacttgaagagaagatttgggtcgggtgatatta

SEQ ID NO: 124156 - DNA, 624 bp, Homo sapiens
tgtgtatgtgagtgtgtacatatgtgcacattttttttcagctacgtcatgcccaggcacaaaaccacgttctgtgagcatttcaggctgtgacaatctgagggacatagcctgacagtcagtgcttctaacagctgtgcttcattccagccctggctctaatttcttaaaagacaggcaaaggttgcacatttttagcaccagcctatggcacatagcaggttcttggtacatatttgccatgttgaattgctatcaaggtaaagggaggcaggtaccaggctgggctggcatgggacacacagacggccacatcccacataaaagccarcaggcaggatggctcctttgtgcatggccccagctcacattttggacctactgattaagcactcagcagaaatagctgtgtaagtgctgggatgggactagaattttaaggaaccattaaaaataagcagtgcccatgacatcattgtctgctgctcagtgaagctggaggaactgcagtgaaccactggccaactgggagttaggccacaaagacaacaggggcaaatgaggccagagcacacagagcccaggagcagcatcagcttgaagaaaaggggcccagccattccc

SEQ ID NO: 124157 - DNA, 403 bp, Homo sapiens
tagttattcttcccaattataggctatttagagattactgaggagaaaactgaggctcagaaacattaaataatttacctgatgtcaggcaactaggaagttgcagagttgggattcaaactaattctgcctaacccctacacttgttatttttccactacacctcacagcctggtgaccttttatttcacttaactggtgacctcttatttyacttaactgagtgttagtttccttgtttgtgaaaagaggatgacccctcaagttcattcaactatgagatctcaagttcatccaactatgagatagcaaagtggtgaggtttatattactatgatagctgggagccagatttctcttcagaagagagcaatctgttgaaactatactttgaggccaggca

SEQ ID NO: 124158 - DNA, 500 bp, Homo sapiens
aatagacaaatataaagaataccataaaatctgtatactcacaaccagctttatagaattttaacatcttgcttcatttgaacacccccactatcttataatttttcatttggacttttaattttaccttttaaaaaacaaacacaaatatttatctttttacagtaaattgcaattgcatttactgccatgttttgtaaatttctgtgttcatcattgcttcttgtgatcttctctctggctttattttatttctaaataaaatacactcttgctagtgcttttagtgagggtctgtggatgttaaatttttttagcatttttatatcrgaaaatgtttttattttgtcctcattcttaaatactaactgtggcagtgactgctagttatccactccgggtccttattctccttcttccttagaaacagaattggaatgctgggtttattcgggcacggtcatgtgctcagcagaaagactacatttcccagactctct

SEQ ID NO: 124159 - DNA, 629 bp, Homo sapiens
ggtaagtcccacaagaagggcttagacacagcaacaaatgcttccctaatggctcaaaggcagcaggtgcaagggaagatcatcagagctagaagcaaaagatcagggttctatcagctgtgttaccttgagaaagtcaccttacctctctaagcctttgtctccacatctgcaaaatggggaccttaaatctgtgtcctgcctacctcatactagcagatgaaaatcaggctgattcttgtcccataacccccaggctgagtgagctctgtgccttctggggcaagagaaagtgcatcaaacctgcagatgtgctgagccctgtccccagaggttctggctgaggtatgcagccagcccagcccatgcctcccaggaacaggcggtcagtcctccctacctgctggatgagttcctcttcgtgcagcaggtgcagccgggagatgctgtactgctcttccaggrccagtgcaaagtactcgatacttcggatggacagcttctccttcacggtgaggatgatgtcctagcaggcacagagaggtgcaggagttacgcaagaaacaggaaggacttccctggccttcctgccattcctcagtgcagctagggagagaaaagcctgcact

SEQ ID NO: 124160 - DNA, 338 bp, Homo sapiens
tcggccccactccggggttggggcgctgrccccgccgcagcgctgcgtgtccggggccacgtgcgccgcctgcgcctgcgcgctgccctccagccgcgcccgtctggccgggctccgcctggcacccgccaaggtgaccctgtccctttctccttgctgcggtgagaatcaggccgagacagccaaaggaaggttcactttcctttaattctacctcatactttttgagtgccttctaggtgtccggcgcgcccccacgtgcttccccagtgttaattcattctctctctagtccatgtcatgttgcctctcaaattttacatccctctcattcccat

SEQ ID NO: 124161 - DNA, 552 bp, Homo sapiens
ctgccactcctacactgctaagctaacagcagtgatcttgctttcagaactagcaattcacatttttacctatcattatgttaactgttgaaaattatttaacacagcattaatgtcaacagcatagtgagaattgtgactcttatgtgtagtgtctgattatcctaatcttcaccttgaattcatatgtttaagggagatgactcaatgagtgtctgtgacctctgaagttcttccatctcctttcctttattagttgatgagctccctcagctgcatcttatgaaatccagttatttattatacttattttagatgaacaacctaaaaaatgtgatttgagcacttaactcagattcttatttatcttcaatctggtgtacacctaaagattctcttgcaagaattttaacaagggtcaaattatcagtcttctatgaaaytacagaaaatatcacagacttgtttttaaaacttttcttaaagaaacaggcagaaaactgtcaaaaacatgggtgagcgctacctaggtagagaaataaaatattactc

SEQ ID NO: 124162 - DNA, 459 bp, Homo sapiens
atattagaaaagaagaaatatctcaaaacactaacctaagttccaacttaagaaggtaggaaatcatgaatattagtgtataaatcaatgaagcaagtgcaatatagaaaaaactgttttcttaatcttctcaaagaatgaataaaaccaatcaaagttagttctttgagaagaataaatgatatatttctagcaagaacaatgaagaaaaaaagaagaaacaaattacctgtcatttggcatagtatagggcattgattgaaatggttccaataattgaagggtatacaattattttaacttttgaaatgtccaaagtgtcagggttttrtctgaaaaacaccgccaaaaaaaaagagaatacccaaaagagttccattattaaatggaaattttatatgaaggaaaattctacaagaaggtacagcaatggccttggtcatattcatgagtaaatac

SEQ ID NO: 124163 - DNA, 632 bp, Homo sapiens
tttttacaattagattttttaaaagatgataatcaataaagaattgccatccaaatattggaataaaatacagagatttagggatacaagttttatataagtgaaatgagtcatattctagtgggatttgcttgagtaaactgcaatcaaaccattaaagtgcctataacagtacataaaactagttactttaaatatttatgagattattagaaaatatttcaattttttgtgtatacttgatttatttggattatttactttgtcttgaatgtcaattatgtagtttacataagaattaatatatacttttatgaactaaccattaatgaaagatgattaaataagaaaaataaacacatattcatwtacataactatttctaattgaatcagaagatattcataatgagttagtttttataaacatactagtgatggagttgagaataatggaaaggttcaaaaaacctagaagatgggttttttaaaaagtctttgatatttagttacccatttggtaaaattgggaataatttgctttataatttccctccaactttctgcccatatgggcgaaattggccaaaagaaaggggctacagtccccacacaagttcaaaacccagcagg

SEQ ID NO: 124164 - DNA, 637 bp, Homo sapiens
gtatcaacttgagggtaacaatcaaataacatgtagaaacggacaatggtcagaaccaccaaaatgcttaggtaagtactttaatattctcatggattctggaaaaatcagtgtgatgagtctgatatttcactgtttgtaatagaattttcacagattaacaaacaagcattctgctgaatgcttgcctaccaaatgtctatatgatagaatgtaaagtttagaaatttttctctttatatttatattttatttaaaaacatttagttgataaataaaaagaatacatatttatkttctacaacatgttgatttgatatatttataaagcaatgattactataaattaattaacacattcatcaccacctatggttaccattgtgtgtaagtgtgtgtgtgtgtgtgtgtgtgagagagagagagagagagagatgaggactcttaaaatctgctctcttttcaaatttcaagtaaataataccatattattagctattaatgtcattacatttctctatttgattcccagttcttgttcatcttattactgaaagtttggattctttcaccaatatcataatcaaacaaaaacagcaatgataggttctaaaatgcaactatcttaatatgacaa

SEQ ID NO: 124165 - DNA, 586 bp, Homo sapiens
atccaagttgggaaggaagaaaccaagttatccttgtttgcagatgatatgatcttatattcggaaaaacctaaagactcaaccagaaaactattagaactgataaatttgataaatttgctgggtatgaaataaacatacagaaatcagtagcatttctatacatcaacagtgaacaatgtgaaaaagaaatcaagaaagtagtcccatttacagtagccwcacataaagttaaatacctaggaattaaataaagaagttaaagagctctttaatgaaaactataaaagcctgatgaaagaaattgaaaaggatacaaaaagatggaaagatattttatgtttatggattggaagaatcaacattgttaaaatgtccatactacctaaagcaatctacagattcagtgcaatcactgtcaaaataccaataacattctttacagacataggaaaaaacaattctaaaatttatatggaaccacaaaagacccagaatagccaaagctatcctaagcaataagaacaaaactagggaatcatattacctgacttcaaattatactacacaactatagtaatcaaaa

SEQ ID NO: 124166 - DNA, 586 bp, Homo sapiens
atccaagttgggaaggaagaaaccaagttatccttgtttgcagatgatatgatcttatattcggaaaaacctaaagactcaaccagaaaactattagaactgataaatttgataaatttgctgggtatgaaataaacatacagaaatcagtagcatttctatacatcaacagtgaacaatgtgaaaaagaaatcaagaaagtagtcccatttacagtagcctcacataaagttaaatacctaggaattaaataaagaagttaaagagctctttaatgaaaactataaaagmctgatgaaagaaattgaaaaggatacaaaaagatggaaagatattttatgtttatggattggaagaatcaacattgttaaaatgtccatactacctaaagcaatctacagattcagtgcaatcactgtcaaaataccaataacattctttacagacataggaaaaaacaattctaaaatttatatggaaccacaaaagacccagaatagccaaagctatcctaagcaataagaacaaaactagggaatcatattacctgacttcaaattatactacacaactatagtaatcaaaa

SEQ ID NO: 124167 - DNA, 641 bp, Homo sapiens
ttaattaaagcttaaaattaaataaccccgtgtggctggtggctgccgcattgaaaggcactccaacatttcttacactgtcctccccatctctcttcctcccaggctttctgcagcccctcygatccatgttcatccagcccctcctcttacctccggatgctgcacatgaactgttctccacctggaacctcttcctccccaaactctttgtctagtgaatgccgacttctgcttcagatctcagcccaatcatcacttccacagacacaagcctcagaggaaatcagaactccctggcgactgctctcatcgcaccaggcacttgtcactcccagcactgatcacagttgtgattttagaggcattggccgattctctgggtgtttccaccccctcagaccacgagctcaggagagtgaggccggagcctgtcaccttttcactgttgtgtgccccatggctggcacagtgtctggcacatagtaggcctttcatagagactctgggaatgaatgagtaggatgttgctggtttagacgaggcacccagcgagcgtgtcctctgggtcagctgacagagcacatggccgtttacaagaggataaagcaagtcacagacggtgtctgctgctgagccac

SEQ ID NO: 124168 - DNA, 555 bp, Homo sapiens
agaagtttcatctcactagatccccatatttaagtgtgaatcctgaggcctagggaagaaaagtgatttrctcaaaatttcctatctagtactagcagagctgggagtatcatgtgtctaaccccattctttcccactacaagctgagtcacttccatgagcatctccttggtacctgctacctgggggactctctggtgagctctgaggggaatgcaaagatgattaaggcactatccctgtcttcaaggtatgtacagtccaagtgctgagataagaccctctcctataatcaagacaggctatggtacctattggtacccatgccgaagcaaatgacaatggctttggtcttcctacaacccaatatatggatgtttactgaagaactttttaagttacagtcaacttctacttttccagaagaactacaagaagccaggattaacatttatatcatgaggatatgccaatttttcaaaagttctagtacattaagcccaaatcctagccaacaaaatttcttttttctatgaggacagtgttacacaaaag

SEQ ID NO: 124169 - DNA, 559 bp, Homo sapiens
ccccagtagaaatacaggaaataaaaaaagttttataacacttctgataatatcactagaaattggtcattagttctcaaagcagaacttcttgcttgatatatatttggccctatttgattttatcattcattcaagggtggaattgttacagaaatatattctagggtcactaatcccatcactatgcacaattatacatttattttttrgacaactgtccagattccaaatgtaaacctgaaagacctaaagaaatttttcaacacccagtctaggattgatcttaactggactttggctgtctatggcatctcaagtagctatttccaacttcactgtagaggacagccattacaggtttgggcagctatctccaccatgagaaagagttaattttttgtataattttgaagtctgagtgaagttgaagtgtgaattcattacaggatatcgtgaatgttgttaagtggatcatacgaatgcagttccctctatatttcctataatgatttgtatatactctaagtaattacaggcatttatatttataattagc

SEQ ID NO: 124170 - DNA, 572 bp, Homo sapiens
cccttctccctttctgtatgtgactaaccctcactcatctttcatatttcaacagaagtaccacttccttcaagaaacctccttcctttagaaaacgtttttctgtgtttaatttgttggtttatttgtccatcttctttgctatccaagatgggaaccatatttctcacttccacgtctggtgtgtctatcacggtgtatggcatagagctggtacaaacaaattcttgctggagaaagaaagaacggaaagaagatatgcaacaatcaactatgaaagtttgagcaaamataataattcaagataattcaagactgaaaccatccttttgttacttaaaaccaatagttagtcacattttctgaaaaaccgcttgatatggtttggctctgtccctgcccaaatctcatcttgaattgtagctcccataattcccacctgtcatgggagggacccactgggaagtaattgaatcatggggcgggtctttcctgtctgttctcatgatagtgaatacatctcacaagagatgatggttttataaaggggagttcccctgcacatgctgtct

SEQ ID NO: 124171 - DNA, 572 bp, Homo sapiens
cccttctccctttctgtatgtgactaaccctcactcatctttcatatttcaacagaagtaccacttccttcaagaaacctccttcctttagaaaacgtttttctgtgtttaatttgttggtttatttgtccatcttctttgctatccaagatgggaaccatatttctcacttccacgtctggtgtgtctatcacggtgtatggcatagagctggtacaaacaaattcttgctggagaaagaaagaacggaaagaagatatgcaacaatcaactatgaaagtttgagcaaaaataataattcaagataattcaagactgaaaccatccttttgttacttaaaaccaatagttagtcacattttctgaawaaccgcttgatatggtttggctctgtccctgcccaaatctcatcttgaattgtagctcccataattcccacctgtcatgggagggacccactgggaagtaattgaatcatggggcgggtctttcctgtctgttctcatgatagtgaatacatctcacaagagatgatggttttataaaggggagttcccctgcacatgctgtct

SEQ ID NO: 124172 - DNA, 397 bp, Homo sapiens
atgcctggctaatttttttatttttagtagagatggggtttcaccatgttggccaggctggtctcgaactcctgacctcaggtgattcacccacctcggcctcctaaagtgctagggttacaggcctgagctgcctcgcccagcctcagcattyttaaaaaaaaaaaaaagaaaaaagaaattccaaccaagaatttcatatccagccaaactagtttcataagcaaaggagaaataatatcattttcagacaagcaaatgctaagggaatttgttactgccttgcacagtcattaagggagtgctaaatatggaaaggaaagactgttaccagccaccacaaaagcacacttgagcatataggtcgttgacactataaagcaaccacacaatcaag

SEQ ID NO: 124173 - DNA, 276 bp, Homo sapiens
gatctttgatgttactatcgtaattatttgaggcaccatgagccacacccggataagatagaaaacaatcaataaatgttgtgwgtgttctgactcctccactgacaggtggtttatctctctcttctcagtccttcctcttccctgaaatgcaacaatattaaaatttgaccaattaactttaattaactaacttcaattaattaattgaagttaataggcatcattaattgaagttaattggcataatttattcaagtgttcaagtgaaaggaa

SEQ ID NO: 124174 - DNA, 567 bp, Homo sapiens
ctccaaaagaagaaatggggtcggactagagcccaacattaatgctggaggctgcaacttcaattccttcctcagacgagctgtcagattcgttggtgggtgtggggaaccacaaagaaaagaaatgcttttttttttatattgaaatgttatatttaattatagatattaagtctcgtacgctataatttagatgtataatttcagtacatgatgagttttatattgtacaagaaactgttaaaacaccaaaatttgggttttgtatctgaaatgtgttatttacagttgtagcccttgttttgagagctaatatgccatgtgtttcaatttatttttgccttagctctggttgaagtatgaatttattttaaaatggtttcactggatctgtggtcagtttttcaaaatggagaacaaacgtcagcaggccagaatgaatagacaactcttcagraattactttagccacattaatgattccatttcaattgtcctggagtgtttccatccagaagttactacactttgaaatgtcactattgagtactgcatcatggccatttt

SEQ ID NO: 124175 - DNA, 457 bp, Homo sapiens
gtagctgggattacaggtgcccaccaccacatccagctaatttttttgtaattttagtagagacggggtttcaccatgttggccaggctagtctcgaactgctgacttcatgatctgcccacctcatcctcctaaattggtatctttatatgtccaaaagagtcaactggtggcaatttagtgaggtttaatctaataggaaatgatagagctgggatcgaacagagccatgtgaactcaaaacctatgcttccccttccacctttttgaaaaacattgtctaggctgggcacgrtggctcatgcctgtaatcccagcactttgggagacggaggtgggtggattacatgaggtcaggagttcgagaccagcttggccaaaaattagccaggcgtggtggcgcgcgcctgtggttcccactgaagcacaggaggctgaagcacaagaatcacttgaa

SEQ ID NO: 124176 - DNA, 515 bp, Homo sapiens
atcaatatcatgaaaatggccatactgcccaaggtaattcatagattcaatgctatccccatcaagctaccaatgactttcttcacagaattggaaaaaactactttaaagttcatatggaaccaaaaaagagccygcatcgccaagtcagaggccatgttttaatagctctgcagcgcggcctccctgccatccatgactgtggggatgctcgcccctgtctcccagccctggtgcatccccagccccatgctccagtcttctcacggtccttgggcatatcaaaacgtctctgagcctccatttcttctctgtgagacaggggtgaggattacttgagaaaatgttcagcatttctgtgtgtaactgtcgaaaaaaaaaaccagagcttagttttcctctgtactctgtctttcaacacttttaatttggactctagctttgcagaggcaaaggttctcagaaaatctataaccgaaacccctaactttatactcgagcaaactgggtccaga

SEQ ID NO: 124177 - DNA, 618 bp, Homo sapiens
tctctgtttccagtcagcctgagagttcaccaagtcagaaactgagtatcttgtattcccagtgcccagcacaaggaattcgttctggaattctgagtccatgaatcaccataatgacattttgtctgaaggatcaggaatagaatgttccattctccattcattcaaaacgaatgaacacggatgaatgaagtataaggaccagaactccacaccacagacagggatactagtgatcccaaattaactccaagccctgtgcaaggggtaagccactgagttgagaggagatagaaggaaggtgtgtgtcagggcaactgggggtggagtggaggaaatgccagcaggagggagagggaaacratgtccagttcatttactggagcctcccttctattctgaggtccagtgaccactcttgtttctggaaagcctttgaatcactgggaagcatttgcgagaaagaaaccccttggggaaaaaaatcagtcagcacttcagcccaagtacaccttcaccatcctgccagcattcccaccctctggccagccctgggaagatgctctaaaactggccttgaaaaatagcctgaagttggccagaggaagaagtggggag

SEQ ID NO: 124178 - DNA, 619 bp, Homo sapiens
ttttccttggtttgtgtaatgcttattagctacagaagtcaatagcttccacatgaacaggttatgtttacttggttacttgaaaaacagatgcctgtttgaacataaactgagagacttaggggaagacatttaaggttcaatgatgtaaagactgtgctaaagttgtctgaatcaggtaaatggcttcccaaaagacggtgttacattttataatctctttcttgagaataaacttgctttgtttataagacattgtatgatttacatagtcactaaaatggaatattaaactcaacttcctttcagaagcaaattcttttagtgtgcttgtttcatttggatggaaacttaggagatccaatttaggtaaaaaggtgcttggcttattgagtaatggtaaatatccctgacttcttatgcagcttctaagagcaggcagggaacattcagacaaagcaaaggagtagtttatgtgcatgtgggggtttcttrgatttttgtggaaactcaattgtctacttttgtcctgcttgctttaatttctaggcatttgttttgttttattatctcttttccagacacgactttgatcagctcataggaagtcatctgtagc

SEQ ID NO: 124179 - DNA, 605 bp, Homo sapiens
tataataaacagccaggaaaccgattcaaaaaagtttttttaaaaaatgtccttaagtcagaggtaccttgattttcacttccagtagtttaatattaattttcttggtcctaataacagctacattaaagagaactttagagtaataaaattagagaaaagaaaataaatgatggaagtttataaggaartagggctttctatgttagttggttgagtgtcaagcctgtctcttttcgtataatttataatgttaattttgcaagtgttgatctttcttaaaggaacttgaatccttgatgaaaatgaatgaagttctaaaacattaaagaaccattttccaaagagtttctataataaatactgtttttatttttaaaaattaccttactagaaagaaaaattgtttcgaaggataacaaaactttaaatttggattccccatcgaagaaaaataaaagtgttagctccctgcatccaccttcgttgctgaatgaagtcatcggtcaatggaaaatgggaaaggccagaacccttggttccgctgtcagcttcttagtcacacaaatatggttgagtgccattagttcaagccgaagcattca

SEQ ID NO: 124180 - DNA, 612 bp, Homo sapiens
attacttatggaggggttttttttggtattatatttcatgatgctttgacacgttgaggccttgctaatcctggagagactacctctcccacggctagctaattcctaaaaatagcaaataagagccaggcacggcagctcacacctgtaatcctagtgtgttgggaggctgaggcgagcagatcgcttgagtccaggagtttgagaccagcctgggcaacatggagagagcccatctctacaaaacatagaaatattagctgggtgtagtggaatgcacctgtagtccagctactcagcaggctgtggtgggaggatcacttgagcccagaaggcagaggttgcaatgagctgagatcgcgccactgcattccaacctgggtgacagcgtgagaccctgtttcaaaaaagaaaataaaaaacaagatagtaaacaatttgcctgtgtatttgcctttcgtatgcaaaccaaccagtccagaaaccatacttccagtcaccccctttatctaactctcaccaagccagtatttctttaccctaaatcatctcatgaccaartaacagatgactagagacaccgctagaacccactgaagttactcaaattac

SEQ ID NO: 124181 - DNA, 415 bp, Homo sapiens
gaatctggtatccacctggggccttgtaattacctggggtctgggcatccacctagggcttgagtatccttctggggccttgagttttactggggactcgtgtctgccttggacctgggtgtacatctgttgcctaatgtacaccttgagagtgatgtcaacctggggacagttgtcctcttggggtctgagtgtgcacctggtgcctgatgtctgcctggggacttgtgttcacttgagacctgatatccacctggggcctgggtgtccaygaagggctgatgttcagctggagactggatatccacctggggcttagggatctatccagaaactgatgtcaaactgggacctgatgtctacctggggactaggtatccatgtgaggcttgatgttcatccgcggccagacgtc

SEQ ID NO: 124182 - DNA, 473 bp, Homo sapiens
gggccctcacccatggccaggccctctggaagaagtgggcagcccctctgcagcccaggagtccaccctccccagggagccagcagaggctggctgtagagaggagctctggaagtgagggaatgatggactttctgggctaaccctatgttccctccctccttctgtgtcctctgtgcargccacagcccaggaagccaaggccctcctggatgcagggcatcctagaagggcactgggctactgactactggccatcctggctggtggcaacagtgcctgtcacctgcatctgctggctgcctgatcaaactgcatgagtttggaggctttgggggcctgtacaatgtgctgtaggaaggttcaggggatgacaacctcccaagatggatagagacttctgcaattggggttgcctgctgctgagcctgaaggacaaggtgagggcaaagaggcctttgcccaggccctta

SEQ ID NO: 124183 - DNA, 551 bp, Homo sapiens
ccaaacctcaggtcataaaataaacctcaataaatttatgaagacagatataatacagagtatatgatctgtccaaactggaatgttggaaaccaataatatatgggaatttgagaaattcacaaatatgtggaaatacacacattcctaaataacygatgtgtcaaagaagaaataatcaaaagggaaatacaaaatattttgagatgaataaaggcacaaataccaaaatatatgcagttaaggcacttagaaacttatacgtgtaaatgtttgtatttaaaaagaggacttcaaatcaacaactaaacctcccaccttatgaccctggaagcaaaaaagcaaactaaacataaaacaagcagaaagaaaaaaataaaaagaattatagaagaacttaatgaaatagacaataagaaaacaactgtgaaaacacaataaaatcaaaagccagttctttgaaaaggtcaacactactaacaagcctgtacctagactgattagcatattaatattattatctcaacagatacacaaaatgtctttgacag

SEQ ID NO: 124184 - DNA, 444 bp, Homo sapiens
cggccccaggtgcgcatcaggcctcaggtgaataaccagtccccaggtggacattagcctgcaggtcaaccacagtccccaggttgatacctgatctccaagtggctacccaatctgcagggtaacattaggcccctgtaggatcccaggctgcaagtggattcctaggccyctggtgaacatcaggtgcaggtgtccaagcaggtcctgggtggacataactgtgtacaggtaaggagttgacctgtggggagggtgagcagtcagcagcccactggggtcctgagaaggttttctggaaggaggaggctgagggcatggaaacttaaagaagcgacctcacttccttgccaacagaccctaacagaaataagaattctggtaaccaggccaggcacggtggctcacacctgtaatcccagcactttgggaggctgaggcagg

SEQ ID NO: 124185 - DNA, 376 bp, Homo sapiens
gaattcaccctgagggggacattcggccccaggtgcgcatcaggcctcaggtgaataaccagtccccaggtggacattagcctgcaggtcaaccacagtccccaggttgatacctgatctccaagtggctacccaatctgcagggtaacattaggcccctgtaggatcccaggctgcaagtggattcctaggcccctggtgaacatcaggtgcaggtgtccaagcaggtcctgggtggacataactgtgtacaggtaaggagttgacctgtggggagggtgagcagtcagcagcccactggggtcctgagaargttttctggaaggaggaggctgagggcatggaaacttaaagaagcgacctcacttccttgcca

SEQ ID NO: 124186 - DNA, 444 bp, Homo sapiens
cggccccaggtgcgcatcaggcctcaggtgaataaccagtccccaggtggacattagcctgcaggtcaaccacagtccccaggttgatacctgatctccaagtggctacccaatctgcagggtaacattaggcccctgtaggatcccaggctgcaagtggattcctaggcccctggtgaacatcaggtgcaggtgtccaagcaggtcctgggtggacataactgtgtacaggtaaggagttgacctgtggggagggtgagcagtcagcagcccactggggtcctgagaaggttttctggaaggaggaggctgagggcatggaaacttaaagaagcgacctcacttccttgccaacagaccctaacagaamtaagaattctggtaaccaggccaggcacggtggctcacacctgtaatcccagcactttgggaggctgaggcagg

SEQ ID NO: 124187 - DNA, 543 bp, Homo sapiens
tatttacctttcagagtcattcattcattcaaaaaatggactaagagcctactttatgccaagtaccctgtcccaaccttggatcatggatatataaagacagacaacatacgcacactcaaggaagtttcactagagaaacagttatgagaacaatcgagaatatctaaaatacagatttgagagtaataaaagtaattactataagtaacagggaaggaaagacaaatagagaagaaagactatcatagaagtattcactaaaagcrtaaaatgaaccataagactatgcttgaaggatgaaaaggaattgttcagtagacaggggtaaaaaaaacattccaggtggaatcttaatatgatacagcacagatgcttgataaaactttcttcagtgtgtaggtttagaaggaaaaacaaaaacaggcaaagaccagattataaacagacctttaggaaactggcctttgttttttgcataatgtggtataactaaataattttgagtaggaaagttaaacgatcagcttcatagttaaggaa

SEQ ID NO: 124188 - DNA, 543 bp, Homo sapiens
tatttacctttcagagtcattcattcattcaaaaaatggactaagagcctactttatgccaagtaccctgtcccaaccttggatcatggatatataaagacagacaacatacgcacactcaaggaagtttcactagagaaacagttatgagaacaatcgagaatatctaaaatacagatttgagagtaataaaagtaattactataagtaacagggaaggaaagacaaatagagaagaaagactatcatagaagtattcactaaaagcgtaaaatgaaccataagactatgcttgaaggatgaaaaggaattgttcagtagacaggggtaaaaaaaacattccaggtggaatcttaatatgatacagcacagatgcttgayaaaactttcttcagtgtgtaggtttagaaggaaaaacaaaaacaggcaaagaccagattataaacagacctttaggaaactggcctttgttttttgcataatgtggtataactaaataattttgagtaggaaagttaaacgatcagcttcatagttaaggaa

SEQ ID NO: 124189 - DNA, 543 bp, Homo sapiens
tatttacctttcagagtcattcattcattcaaaaaatggactaagagcctactttatgccaagtaccctgtcccaaccttggatcatggatatataaagacagacaacatacgcacactcaaggaagtttcactagagaaacagttatgagaacaatcgagaatatctaaaatacagatttgagagtaataaaagtaattactataagtaacagggaaggaaagacaaatagagaagaaagactatcatagaagtattcactaaaagcgtaaaatgaaccataagactatgcttgaaggatgaaaaggaattgttcagtagacaggggtaaaaaaaacattccaggtggaatcttaatatgatacagcacagatgcttgataaaactttcttcagkgtgtaggtttagaaggaaaaacaaaaacaggcaaagaccagattataaacagacctttaggaaactggcctttgttttttgcataatgtggtataactaaataattttgagtaggaaagttaaacgatcagcttcatagttaaggaa

SEQ ID NO: 124190 - DNA, 616 bp, Homo sapiens
tagacattaatgactccatactgaaaaagactgaataaataaatataagggggagaacaaattyccaattcagaagaattccaaataatttatgcagatactccaccatcaaggaggtggaatgtaactctctaccaaaggtacagtatggaaagggacaaaaaagagtatctttacagcaaagaaacctgaaaaagactacctcagctgggtagtcaaggttaacatcatcaatgacaagacctattaatagcattaatagcagatactcttgaaatgatgagttaagaatggcactttaccatctgtcatgtgcttcccaaaaatacgtcagtcaagtataatcatgagaaaaacattagacaaatcccagttgaaggacattccacaaaatacatgactcatactctttaaaactgtcaaggtcatcaaaaacaaggaaagtctgagacgcttcgccaagaaaagcctaaggaggcctgacaactcagtgtaatgtggtattcctggatggggtactggaacaaaaaaacaaaaaaagacattaggggaaaaacaagtaattctgaataaagtatggactttagttaataatcatgtatcactgttgattcat

SEQ ID NO: 124191 - DNA, 616 bp, Homo sapiens
tagacattaatgactccatactgaaaaagactgaataaataaatataagggggagaacaaatttccaattcagaagaattccaaataatttatgcagatactccaccatcaaggaggtggaatgtaactctctaccaaaggtacagtatggaaagggacaaaaaagagtatctttacagcaaagaaacctgaaaaagactacctcagcygggtagtcaaggttaacatcatcaatgacaagacctattaatagcattaatagcagatactcttgaaatgatgagttaagaatggcactttaccatctgtcatgtgcttcccaaaaatacgtcagtcaagtataatcatgagaaaaacattagacaaatcccagttgaaggacattccacaaaatacatgactcatactctttaaaactgtcaaggtcatcaaaaacaaggaaagtctgagacgcttcgccaagaaaagcctaaggaggcctgacaactcagtgtaatgtggtattcctggatggggtactggaacaaaaaaacaaaaaaagacattaggggaaaaacaagtaattctgaataaagtatggactttagttaataatcatgtatcactgttgattcat

SEQ ID NO: 124192 - DNA, 616 bp, Homo sapiens
tagacattaatgactccatactgaaaaagactgaataaataaatataagggggagaacaaatttccaattcagaagaattccaaataatttatgcagatactccaccatcaaggaggtggaatgtaactctctaccaaaggtacagtatggaaagggacaaaaaagagtatctttacagcaaagaaacctgaaaaagactacctcagctgggtagtcaaggttaacatcatcaatgacaagacctattaatagcattaatagcagatactcttgaaatgatgagttaagaatggcactttaccatctgtcatgtgcttcccaaaaatacgtcagtcaagtataatcatgagaaaaacattagacaaatcccagttgaaggacattccacaaaatacatgactcatactctttaaaactgtcaaggtcatcaaaaacaaggaaagtctgagacgcttcgccaagaaaagcctaaggaggcctgacaactcagtgtaatgtggtattcctggatggggtactggaacaaaaaaacaaaaaaagacattagggraaaaacaagtaattctgaataaagtatggactttagttaataatcatgtatcactgttgattcat

SEQ ID NO: 124193 - DNA, 615 bp, Homo sapiens
tctgcacaagcttcacagcttttctgtaaatctagaactattctcaaacagtatgtttattgaaaggaaaaagaaaaaagagaaaasagaaacaggcatgaatccatattattctaccaaaaaaattccatttcatttttaaaattttttgatctattttcttttctttttttttttttttttttgagagatgggctgtcacactgttgcccaggctggagtgcagtggcatgatcttggctcactgcaacctccacctcccaggctcaagtgatcctcccatctcagcctctcgagtagctgggactacaggtacatgccactatgcccagctaattttccgtatttttggtagagacagtggtttcatcatgttgccacggctggtcttgaactcctgagctcaagcaatccacccacctcggccttccagaatgctgggattacaggcgtgagccacccaccctggccctattttttttattattgttttaaatgcatttacacactcaaacccatatacatatataactgagaaatgattctatatacaatttttgtttcatctttttgcatgtaatactattttgtaaacattttcttatcttatcaata

SEQ ID NO: 124194 - DNA, 615 bp, Homo sapiens
tctgcacaagcttcacagcttttctgtaaatctagaactattctcaaacagtatgtttattgaaaggaaaaagaaaaaagagaaaagagaaacaggcatgaatccatattattctaccaaaaaaattccatttcatttttaaaattttttgatctattttcttttctttttttttttttttttttgagagatgggctgtcacactgttgcccaggctggagtgcagtggcatgatcttggctcactgcaacctccacctcccaggctcaagtgatcctcccatctcagcctctcgagtagctgggactacaggtacatgccactatgcccagctaattttccgtatttttggtagagacagtggtttcatcatgttgccacggctggtcttgaactcctgagctcaagcaatccacccacctcggccttccagaatgctgggattacaggcgtgagccacccascctggccctattttttttattattgttttaaatgcatttacacactcaaacccatatacatatataactgagaaatgattctatatacaatttttgtttcatctttttgcatgtaatactattttgtaaacattttcttatcttatcaata

SEQ ID NO: 124195 - DNA, 552 bp, Homo sapiens
ataaaaaccactgataaatcccgggttccccacaggtaatttggtacatccttaattatctggtttatgagcaaattgccacctcagctttggttctcagcttgttagatgcacgtgtgtgcacaccctygtcttgcatggcaaacttcccacagactcagggtttaaatgatgtcaaaacataatggggcgggggtgcgggggcaggggaaagatgtagaaaataaaaggactgaagtttgtgttggagttttggtttttggtttttgtttgaagagttaatttgattttgattttcattgttgttgctgttattgtacattagggcacactcctagacctaggggcctgcaaaaggtggccaatgacagctgactgcatcaaaagaaatccgtcctgttttgttaaactgaagttttttggtgaaagctgagatgcctctctcacagcagtcccatctaggctacattctacctttccatgctagcaggaagatctaggaggctcaggattgccttccatcaattaaaccttcccaaaaggaaaatcctc

SEQ ID NO: 124196 - DNA, 592 bp, Homo sapiens
cgtccatggttctgatccacctggacacaaaagccaggctgtgtcggagactgaggaggaatgaagggaccaactgtcatgcttccctgtagcctcatctctacttgttccaggtcctgactcctgtttgggttccatgtcttctgtgactctcagaaccccaaaatattatgtgctgtcgaccgcctacaattcctcacaattgactgcatggaccaacacttcttatacttactgaagagacagacatactgcaaattcagtgtatttaagaatgttgtggaatactcatgcctctctccttcagtgttctgatttttttattgaaaactctgttttagtaagacagacttttcaaagtgatcattggtatgtaactcaaatccccctgccttttaaaaaatgatcccagctaccctataatatgcactgcttcttctgacattttgtacccatgacaatctaagggttactgtcatctccccactcaccttttgcacacctgtctcctcccagaacatctgcttgaaaatggccttcccatcaaagaagttgcagaagcaagagtttyagtttatcccctgctaaataa

SEQ ID NO: 124197 - DNA, 424 bp, Homo sapiens
gcatgtttgggtgcaatgatctccgaatgggacacgagtgcctaacaggctaagatttaaaggtaatggcagagaaatccctgtggatgtgataggaaggaagggaaccagaagcaattgcaggtcgtaagacaggaaaatattcataggtgaaaagcaaaaggtttcatttttcttccattgagatcctagaagaaaagaaacacaaaagaaaattcaacagctgtatctctaatccccttaggcaaacaattgatctctccaaatctcaattgcttcatccatktaaagtagattcaaacctttcttctgagaaggaagccctgcatcttttatgattgagaaatctgagttacaagtgtatttgtcatccacattactcaaatgattttggtcagatttaggagacacttccaagatttgg

SEQ ID NO: 124198 - DNA, 631 bp, Homo sapiens
tagcacacaaaaatacttatatgtttccttgaatgggagaaactccagaaaaggagaatagtgaatttaatatcagagacacactaaagatacatacccaaacgagtcttgtaagggaaatggtttctgacaaacttctgattattgtttaaacaaatgacttgttcacatattcaattgcttaatgatgtcaagcttataatcactacacatgggtgtgtatgtaacacatccatggctagagaaggtgaaagtccctgctgcttttcacagtgaggtccaagaataagaaggcagaaaactccactcagggggcctcccatgcattgcttcacacagttcagaaggccccactctctgcctaccttctgtataaccatgccttctcctccttggaaaagcctacacrccaaaggacagaagagacagacagaacaaacaacttccataaaatgctcggtggaggcaaggactaaactccatctgaaaacataatcttgtttctagtgtttatgctttaattctctgttttaagcccaccctaactgcttcttctgcttatggttaaaatatacagagatcacttactgcatacattatctttgttatgtagtgatgcatatgcaaatat

SEQ ID NO: 124199 - DNA, 596 bp, Homo sapiens
gatagtaacggagaatttcccaaacctagagaaagatatcaataaccaaatacaagaaagttataaaacatcaagcagatttaactcaaagaaaaccacctcatggcattaaataatcaatcccaaaggtcaagaataaagaaaagaccctaaaagcagcaagataaaataaacaaataacatacaatggagctctgtaatacgtttggcaggagacttttcagtggaaaccttacgaaccaggagagagtggcatgacatatttaaagtgctgaaggaaaaaaccttctaccctaaaacagtatatctggtgaaaatatctttcaaacatgaagaagaaataaagactttcccagacaaagaaaagctaagggatttcctaaacwccagaccactcctacaagaaatgcaaagggagtacttcagtcagaaagaaaaggatgttaattagcaataagtaatcacctgaaggtacaaaactcactggtagtagtaaatacacagaacacagattattataacatagtaactgttgttataaactactcttagcctaagtagaaagactaagcaatgaaccaatcaaaaaagataac

SEQ ID NO: 124200 - DNA, 576 bp, Homo sapiens
tagaaatctattgaactaaaaggatctggaagcctcccagaactggaatcaatgcaaaggaaaacagaacaattctcttcctgatcaccaggctgaggctgggaacagttagtcacaatcacaggtattgttagggtcatttatgaggtgagtcataagtaatttgttaacaataacaaagcgtggaagtgtcccaatgatgtgctccttcacagattagagcagattcaaggttatcactatagcaatgatgtagcccaatatgctttgttgagtgagtttgctcctgagagtgtgttgcacacatttgcatactgattgcaatgtagatcaaggcaaacmagaaaaaataaaaacaaatgaaagtcaactgattcaggctagagaagtattggacctcttctgattttcactgtgagcgagaagtcagttcgctggctccatctttcctcccatgacccacagtaggaacagatcgggggaggagggcaatgctgcctttatttataggaagcagcagagaaatcctttttaaatgatttattttaataatgtaaaaagtgaaaccatataatt

SEQ ID NO: 124201 - DNA, 607 bp, Homo sapiens
tggagattttccctaaggtttcttagagtagtttcatagtttgaggtcttagatttaagtctttaacccacttctatttgatttttgtgtatggcgagagatagggatctagtttcattgttctgcatatggatatccaattttaccagcaccatttattgaagagactgtctttcccccaatgtatgttcttggcacctttgttgaaaatcagttcactgtaaatatatgaatttgtttctgggttctctatcctgttccattggtctatgtgtctgtttttacgcaagyactatgctgttttgattatctctgtagtatagtttgaagtcagttaatgtgattcttccagtgttgctctttttgttcagaatagctttggctattctgggtcttttgtggttctatataaattttaggatttttttttatttctatgaagaacttcattggtattttgatagggattgcactgaatctgcagattgctttgggtagtatggacattttaacaatattgattcttccaatctatgaacatgaaatatctttccatttttttggtgttctattcagtgtctttcatcagtattatatagtttttatt

SEQ ID NO: 124202 - DNA, 358 bp, Homo sapiens
gctcatgcctgtaatcccagcactttgggaggtcgaggctggcagaccacctgaggtcgggagatcaagaccatcctggctaacacggtgaaagcctgtctctactaaaaatacaaaaatttagccgggtatggtggcacatccctgtaatcccagctacttgggaggctgaggcaggagaatcgcttgaacctgggagacggagattgcggtgtgtcaagatcgtgccattgcactccagcctggacarcaagagcaaaactccatctcaaaaggaaaaaaagaaaaaagaaaagaaaagaaaaggaaatttagataacaccttctgccaatagaaggctgttttgtctacattgaa

SEQ ID NO: 124203 - DNA, 592 bp, Homo sapiens
aacctctgcaagtctctctcaataattaattgaagattaaacagatttagggaaatattgctttttaaatgaaaatgtggcatgagattgacttggcatgcagtttcattacagaagagaatctgtgtctgcttaattttatttacaagagaacagttctcttcctttctcctttgaattcttcaaatcttacaaaaacgtggcaatggatcgaggttgtgtttatagagcaaatcactagaccagactaaaagtaaataaatacwtaacagtcctgtcactgatagtgaaaacagagtgtaaggtaaagcatcgaaagaggaccaaccgtggctaagaccttattctaattctttctgcactgcaaagaacgcttttactcagaaggtggtttcaactagttgtagtccaacaaatgttgtctcctactaatatattgagaaactgttaaaaaaggatgtttttggttgcatacataaaagtattttaattaaaaaatgaataaattttattccgtgagatctaacagcttaaaaagacagttctggtttttaattattcagaagaatctaatattaacagattcaatgac

SEQ ID NO: 124204 - DNA, 505 bp, Homo sapiens
ttgaattcttcaaatcttacaaaaacgtggcaatggatcgaggttgtgtttatagagcaaatcactagaccagactaaaagtaaataaatacttaacagtcctgtcactgatagtgaaaacagagtgtaaggtaaagcatcgaaagaggaccaaccgtggctaagaccttattctaattctttctgcactgcaaagaacgcttttactcagaaggtggtttcaactagttgtagtccaacaaatgttgtctcctactaatatattgagaaactgttaaaaaaggatgtttttggttgcatacataaaagtattttaattaaaaaatgaataaattttattcygtgagatctaacagcttaaaaagacagttctggtttttaattattcagaagaatctaatattaacagattcaatgaccttattattggatactcagttttaaataagagaaatagctcataaattatattatatatgtaatatatacatattctatattgtat

SEQ ID NO: 124205 - DNA, 505 bp, Homo sapiens
atatttaatttgtaatgatgtgcacgccgtcctctacctgccaatagatcattacaagggcagggtttcctcctggggtactcttggctgcaaatgagtgcaagcgtgaaatactggagtcaggctcagcccacataataaagggaggcaatcagctattcagatggagaaggaagaggcaggggaaggactgacgcccagcacagcccaggggaggttaaattacccatcaaccttcttcgcccaatcaataggcaccagaaacctcacatgaagaaaaataacctcagaggagaaaaacgtttctagctataacatgctgtggwtgtaaccagtttgtattaattccctatattggatctctttttgtgagttaattcacaggcaaataatcaggaatgtgtattcacatatctagcaggaaaacattgaaataatctaaaatactccaggatagttttgaaatattaaacgacatgcctttagcttttaacttccataattg

SEQ ID NO: 124206 - DNA, 505 bp, Homo sapiens
atatttaatttgtaatgatgtgcacgccgtcctctacctgccaatagatcattacaagggcagggtttcctcctggggtactcttggctgcaaatgagtgcaagcgtgaaatactggagtcaggctcagcccacataataaagggaggcaatcagctattcagatggagaaggaagaggcaggggaaggactgacgcccagcacagcccaggggaggttaaattacccatcaaccttcttcgcccaatcaataggcaccagaaacctcacatgaagaaaaataacctcagaggagaaaaacgtttctagctataacatgctgtggttgtaaccagtttgtattaattccctatattggatctctttttgtgagttaattcacaggcaaataatcaggaatgtgtattcacatatctagcaggaaaacaytgaaataatctaaaatactccaggatagttttgaaatattaaacgacatgcctttagcttttaacttccataattg

SEQ ID NO: 124207 - DNA, 608 bp, Homo sapiens
atatctaacttttccctaagcttgttagaattggtatttattctaattttcttcaaagtgatgtaatataacactgtctttgttttctaaaggctttttaaaagtttactttgtaatatacaaagcaatgttagtaagagcacagtgctcaatcccaagaatatggcaataattactttttaccctttgaactggcaggtcataaggccagaggtgcgagcatggacttgttttcttcctctccttgttcctaagctccttggctgtcccatggccaccccctccaggcctcttttctcacatgttcttctttatacacttttcttcattttctctttttcctcaggaattctgcttcytgcagaatttcctcagatattctgtaaatattctatttgtgatagcaacctctcttaatttagtaacccctttgaacttcaagaacactccattgattccattgttcagattatgggtacgacattgctgtccaaggacttcatgcataatccaacaagtatttattaagcccccaccaggagccaacgttagtgctaatactcaggacacaggtaaacaagatggacatgagctcttccctagcacct

SEQ ID NO: 124208 - DNA, 620 bp, Homo sapiens
taaaacatagtcggagcagtcataaatgtggcatacaacgttgccctttctaagaaccacaacctgaagtcaaagcacgtttctggtaatgtcaccatgtgcagattcccattttcttcttgccctccctcatgcttttgcacattcaaagacttgtctgggcaaagtgtgacctcaggaggagaaaacgtgatgtgacaagactccatgaccagttccattctctgaatgccactgagggcctggacaactgcagcagttgaaggagccaagtgattcttttgaactaaaaagtygaacacagtattggtgaggaatgctcactacagcagctccacagggctttgttgcacgaaaaatgggttaggtggtatctctgtggacgcttctggcatcctctgtgtgtctgcctattgaactagtgattacccgtaacacccagggctgctgacaatacaaatggcattatgattctagttggtttagcaaaatgagatattttgctgatggagttctactagtgatgatttagtgggcccttactatgtaccatgtgtcttatataagtaagctttcataagtttattatcattgcattaaaaaaaattttttttgatatg

SEQ ID NO: 124209 - DNA, 398 bp, Homo sapiens
ctggctggtctgctggatatttgctctcctcagtttcttctgaggcctctctccttggcttgyagatggccaccttctggccatgtcctcccctggtcttttgtatgtgcctgcatatccttggtgtctctctgtgtgttcacatttcttcttcttgtgaggacttgagtcaggttggatgagggccccccttaacgacctcatttttacttaatcacctctttaaaggcctaatctcccaatacattcacattctgaggtcctgggagtcggggcttcagcataggaattttgaggggacacaattcaccaaaaataaaattgtgagctccccatccaattgaacagatgctcctcctggccaaggggactccagggaaacctgaaaaagggaattc

SEQ ID NO: 124210 - DNA, 618 bp, Homo sapiens
actgtgagtgccccagctgtggaagtgggaaagggagaccctcctcttcctaacacacaccggcacyggcgaagctaaaggtctgtttgtgggagaagttactgactttacctggacctgagaaaatttagagtggagtgtaatacaggggtagaggaagctgcagaaaggccctgggagctcactgggttcccaagcagcgcattcctgcctagcaccacagggatccatcaggagggtggccagagaagcaggaggtaaaactccacagggagaaggaaatctctagctgaactttgtatcagtttgaacagggcaagaagcctcctggccagaacctcaaggatggtgcaaatctgctgtgcagactccacaggcaggggaagaaccaagcccttttctttcgcagctgggaggtgggaggtgggcagcctcaggcaagttttcaagcctgtcttgccctccacctagaaatagactcaaggctattgtggtggggacatggtgggagtgagactggctctttggtatgcatgggagctgagtgaggcctgtgactgctggatttaccccacttctatgacaacttgatgactcagcagaggcagccataatcct

SEQ ID NO: 124211 - DNA, 612 bp, Homo sapiens
cccctttttttttaactgctcactttaggcttagtttgttcttgtttttctagttcctctggctgtgatattagagtattaatttgaaatctttctaactttatgaggaaggcatttagtgctgtaaactttcctcttaacactgcttttgctgcatcccagaaattttagcatgttgtgtctctgtacatttatttcaaagaattttaaaaatttctgccttgattttgttgtttaccccaaagtcattcaggtgcaacttgtttaatttctatgtcattccgtggtttgaagagatcttgtggtatggacttctgtttttattccattgtggtctgggagaatggttggcatgcttttgattttttttaatgtattgagacttgctttatggccaagcatgtggttaatcttttttwaaataattattttattgttttgtttatttttaagttgcagggtacatgtgcaggatgtgcatgtttgttacataggtaaacttgtgccatggtggtttgttgcactgatcaatccatcatctaggtatttagcccagcatgcattagctcttttccctaatgctctcacttccagccctcctctgacaggccc

SEQ ID NO: 124212 - DNA, 583 bp, Homo sapiens
gttatctgttattatccctttgaataaaatttccacctcaatcgctgtctctatttcctctttaaagcccataacccttagatttaatmtcttgagggtacttccaaatcttgtaggcacgcttcattttttgaagttttttcttttgtatcctctgaatgtgtatattcaaatagtattcttcaagctcactaaatctgtcttctgcttggtcatttctggtgttaagggactctgatgcattattcagtatgacaactgaatttttcagttccagaatttctgctttatttttaaatattattttaatctctttgttacatttatctggtaggattctaagttccttctctgagttattttggatttcactgagctttttaaaaacagctattttggattctctgtatgaaaggtcacatatctctgtctatcttagataagtaactggtgccttctttagttcgcttggtgaggtcttattttcctacgtggtgttgaaaatcaatatgtatgttcatcaatgtctgggcattaaggagttaatgtatttattgtagtcttcacagtctgggcttgttta

SEQ ID NO: 124213 - DNA, 583 bp, Homo sapiens
gttatctgttattatccctttgaataaaatttccacctcaatcgctgtctctatttcctctttaaagcccataacccttagatttaatatcttgagggtayttccaaatcttgtaggcacgcttcattttttgaagttttttcttttgtatcctctgaatgtgtatattcaaatagtattcttcaagctcactaaatctgtcttctgcttggtcatttctggtgttaagggactctgatgcattattcagtatgacaactgaatttttcagttccagaatttctgctttatttttaaatattattttaatctctttgttacatttatctggtaggattctaagttccttctctgagttattttggatttcactgagctttttaaaaacagctattttggattctctgtatgaaaggtcacatatctctgtctatcttagataagtaactggtgccttctttagttcgcttggtgaggtcttattttcctacgtggtgttgaaaatcaatatgtatgttcatcaatgtctgggcattaaggagttaatgtatttattgtagtcttcacagtctgggcttgttta

SEQ ID NO: 124214 - DNA, 583 bp, Homo sapiens
gttatctgttattatccctttgaataaaatttccacctcaatcgctgtctctatttcctctttaaagcccataacccttagatttaatatcttgagggtacttccaaatcttgtaggcacgcttcattttttgaagttttttcttttgtatcctctgaatgtgtatattcaaatagtattcttcaagctcactaaatctgtcttctgcttggtcatttctggtgttaagggactctgatgcattattcagtatgacaactgaatttttcagttccagaatttctgctttatttttaaatattattttaatctctttgttacatttatctggtaggattctaagttccttctctgagttattttggatttcactgagctttttaaaaacagctattttggattctctgtatgaaaggtcacatatctctgtctatcttrgataagtaactggtgccttctttagttcgcttggtgaggtcttattttcctacgtggtgttgaaaatcaatatgtatgttcatcaatgtctgggcattaaggagttaatgtatttattgtagtcttcacagtctgggcttgttta

SEQ ID NO: 124215 - DNA, 536 bp, Homo sapiens
agtgccccatacgaaagaattgacttcaaaggcacagcacatcaaagtgacttgccaggcagctgtgagatcttgctgagctgagctggcctggtccgcttctccccctcactgcctggctcaaaccaccactcakggactactcagggatggaagagatttcagagctcaagctggctgcatccatctgcaccagcaggggaaagtgctagatacataccaggtgttacatcttttgttttgattagataaatgctctcaatagatagcgctgaataatattatcacctaattctcctgaggtttctttctccttcttgaagtatttgacagtagttttccaattaggtagcaaaaatgaaatgaggatttgtgccagtgtagcctagtgtgttgagtgaataagacctaaggatgaatcatcatctgtgatatcatcaaaagggtattattggagctgcagcaacacatgttacgagaaaggaaacaaatgaacttgaaagaatctatcatgctacaaaaccaaatgaccctca

SEQ ID NO: 124216 - DNA, 536 bp, Homo sapiens
agtgccccatacgaaagaattgacttcaaaggcacagcacatcaaagtgacttgccaggcagctgtgagatcttgctgagctgagctggcctggtccgcttctccccctcactgcctggctcaaaccaccactcagggactactcagggatggaagakatttcagagctcaagctggctgcatccatctgcaccagcaggggaaagtgctagatacataccaggtgttacatcttttgttttgattagataaatgctctcaatagatagcgctgaataatattatcacctaattctcctgaggtttctttctccttcttgaagtatttgacagtagttttccaattaggtagcaaaaatgaaatgaggatttgtgccagtgtagcctagtgtgttgagtgaataagacctaaggatgaatcatcatctgtgatatcatcaaaagggtattattggagctgcagcaacacatgttacgagaaaggaaacaaatgaacttgaaagaatctatcatgctacaaaaccaaatgaccctca

SEQ ID NO: 124217 - DNA, 602 bp, Homo sapiens
tggcatcgccatgttcgccaggctggcctcgaactccagagctcagacaatccacctgactcggccttccaaagtgctaggattagagacgtgagccaccgtatcctgcctaaaaagtagttctgattggcagaactttgcataacaaatgtttccttctttacttcctgggattctcacagttctttgcactttcaaccttagagtaggataacatctgatcaatttaattgttgatgatccagaacatctcccagtaaaaattctttttgctttgagcaaaggatgaataaatttgggaaggattgaaagtatcccttaaaaggtggctgcacaatggcaaagcaaacaactggaaattgaaaactggttatttgctttattttaggtgaaaaaaaagggaaaaatctcataaactcattattttagtttttaaaatgaacaaaatgaattacttgttgagatacataccaaacctagattgcaaatrcatgtcttatggacaaattattcttactttatacctcagaaaaatagtttcatatccattttttcctggtgcaaatagatgagttcttgctatttgcatcatttggaaaaca

SEQ ID NO: 124218 - DNA, 575 bp, Homo sapiens
agaaaacattatgccatttaagtgacctctttttgattcaagtgttacttatcatagggcgaactttggagaaagccacagttcagtttctatgcactgaaaagtgtgatctcagtgacggtaagcactgctagccagcacagtggtgatagactaggagagtaatttaagttggtgatatggtttggccatttgtcctgcccaaatctcatgttgaaagataatcaacatgttagaggtgggccctggtggaggttgtgggagtggatttctcatgactggtttagcgccatctccttggttctgtcctcacaatagygaatgatttctcacaagatccggttgtttaaaagtgtggcaccttccccatctccctctcttgctccatcctgccatgtgacacactggctccccttcacctgccaccatgattgaaacttcccaaggccctcaccagaagtagatgctggcatcatgcttcctgtacagcctgcagaactgtgagccaattagacctcttttccttgtaaactacccagcttcagaaattacctctttctttatagcagtgcaag

SEQ ID NO: 124219 - DNA, 575 bp, Homo sapiens
agaaaacattatgccatttaagtgacctctttttgattcaagtgttacttatcatagggcgaactttggagaaagccacagttcagtttctatgcactgaaaagtgtgatctcagtgacggtaagcactgctagccagcacagtggtgatagactaggagagtaatttaagttggtgatatggtttggccatttgtcctgcccaaatctcatgttgaaagataatcaacatgttagaggtgggccctggtggaggttgtgggagtggatttctcatgactggtttagcgccatctccttggttctgtcctcacaatagtgaatgatttctcacaagatccggttgtttaaaagtgtggcaccttccccatctccctctcttgctccatcctgccatgtgacacactggctccccttcacctgccaccatgattgaaacttcccaaggccctcacyagaagtagatgctggcatcatgcttcctgtacagcctgcagaactgtgagccaattagacctcttttccttgtaaactacccagcttcagaaattacctctttctttatagcagtgcaag

SEQ ID NO: 124220 - DNA, 549 bp, Homo sapiens
gaattcatgtctagtgtccttcacggtctgaatccagccctcttctctcacttcattttccttgttccagccacctggcagctcacacctgctaggcttttgtacaagttgttctctctactttcagtgccccttctccccgcacccagttgctgaatggaatctgatacttcaagacccagcccaagtggccaccacatttggaaaagttgtgctcactcctccagacgtaacctgtttcttcctctcctgtgttcccaaagaacttttctgcacttcagatacgtcccatgcctgtccccaaacagagtgaattgttggacagagatggtgtctcacctttgcaactcctacccatagcacagagcaaaacttgaagcagggccttagtaaacagttcagtaactgaatttttaaaatatatatatgtgattctttccttataaccctccsctgggagagtagacagacctttcgctctactttccaaaaccagaaaatgagacacaaagcaagttcacaccttgcccaggccacaggctcactgtg

SEQ ID NO: 124221 - DNA, 411 bp, Homo sapiens
aattgacagccaaagacagtttcaattcagaagtgctggtagtcatggtggtagaggttctagggtaatgtctcattgagatgcgaggatgaggctctgaactcaggaaggaaacactcaaaatgtcctgcaggcattatgaacagcagccactgaatccactaatatccttcctcagacttcactgctttttaaagacagcaaaatattgagatagatttttaattgtaaattctgaaaaacagccacacccaagactttaatacctctctttcttctcaaagttaggaaagtggtatgctcagtgtcaaataactaatgctcattaaaaatggtcagaatgccgttgcagatgaaaagtgaagctctggtgtgtgaaacawgaacccaaatgcattgtccacaatgtct

SEQ ID NO: 124222 - DNA, 661 bp, Homo sapiens
ctacaattagtccattggccaggtgatggtcatgtgcctggttagagtagggcaggctccatttgctgatgggctgtgcgactcaatgttcacaaatgtttagtcattcagctccttttcaaggaataagcctggatcaggcaagtaattaacctttgctagtcccaaggtttgttcattagaggcagggaaggaggaatcttctcacttttcttctcagtcctactgctcgccccagctttatgaaacatgagctatgtcctaagggaagagcaagtgggcctcaggtcctcagaaagcaccacaaaactcttaaaatattaagcgtargagtctattgttcctttgttttcctggacagggaaacctctttaacattggacttcattgtctgtaccccatttcctgttcttacagtggctgttcagtcagcatgatggccggtgggacctggaggtccagcagcagctaagatgtccaggccctactcgtttgtacccctggtagcattctgccttagatatgagagacacttcccaggctcttcctgcatttccatcttatgctctggcaagcaaatgccaatcttggctcttttccacttaaaatagtccttctactttttatctgctgtgtaaattggggttagaaatattgactt

SEQ ID NO: 124223 - DNA, 584 bp, Homo sapiens
tggacacatatgctttgcacaggtagatttatccaaattcattaaaaatagtgtgaccctgccactgggagaaaaataataatctgttacttacttcctgaactaactgctatttaccacctatcattatgaaactttcttgtgggttttcagttcagtcttagtactaaataggaagtaactgaaatattagttgagttggatatttagaggttattggcaaacacttactgtgcacatattacatgttcagcactgcatccacccgacacatgcaaaaatgaataaggcatagtctccactcacaagacrctcatagtctaaaaggtcaactcacacctaaagagaaatataagatactcagtagcaagccagaagccacagagtctagaaaagtgggtcttagtcccacctagtttaagggaagactttcaggacagaatgatagtttatccagtaagagttggccaaataaaaataggaagggtattccagagagaaggatctttgtgaagtgcagagcagcagagtatgaaggaaccactagagtataatgcatcaggtgtcaagcagggagggtggaa

SEQ ID NO: 124224 - DNA, 550 bp, Homo sapiens
ctgcattactatctaagcccttttctatacaaatcaaaatgaaactacaccactgttttaatttcaaaattaaattaaaatatttcccatgaaaggctgatggcagatacttcaggtgaaaatccaacactaagaaccatctataaccaattcatttaacttgattgatgcaagagtttgccattgttttcccatcttggtgataaaaagatgtttcataccttcatcatatgggttggttgaaaatctcagaaattctttgattatgacagtaaaaattatagtaataagataaataatggtttataattaaaatttcaagagcagtaaagatggtgactatcaaagagttaaaagttaataatgtaayttaataacctctgtacccggtgaaacatcgaaacggtctatagtaactaggattttgtgtattttgaacctattttttatttttattttaattatttctaattttgtactccttgaaataaaaaacctgttaattcaagaataagttaagcaaaatttgttatatactagcaagtaacta

SEQ ID NO: 124225 - DNA, 626 bp, Homo sapiens
cctaatatccaaaaaaaatagtttgaggtcaaaaagactgaatttcgatcttgaaattttgcttatagaaagtttgccaaatatcaaagttttaagacacttgttatcacaaaatagaatcacaaagtcactgtaaaatgtcattcatttagccaaaattatacaaaaacatttactttttcatagagaggagactaattttcctaagcaataagatgtaataaagatagcatgccaactaaacctgtctggccccccccactccattttctctttgcaacttactcagaaggcaaacaaaatcttttatctcttaatattacacaaacattttgttcaaaagcaaaaaccaaaattttcytttatatattattaaagttaataaaactatataaacaaatctatctaattttaatcagtttgaccataaggtaagatttccataaacttttaataactggccccaattttctttttaaagagcatatcagtgctccaagaaaaccatgttcttctaacacatagacccagatgctggccttgcatcagtgtgcttttggtattaatgtttaatttatagaaaaactctgatcttatccctcaaaatcggcctttacagtcttaca

SEQ ID NO: 124226 - DNA, 626 bp, Homo sapiens
cctaatatccaaaaaaaatagtttgaggtcaaaaagactgaatttcgatcttgaaattttgcttatagaaagtttgccaaatatcaaagttttaagacacttgttatcacaaaatagaatcacaaagtcactgtaaaatgtcattcatttagccaaaattatacaaaaacatttactttttcatagagaggagactaattttcctaagcaataagatgtaataaagatagcatgccaactaaacctgtctggccccccccactccattttctctttgcaacttactcagaaggcaaacaaaatcttttatctcttaatattacacaaacattttgttcaaaagcaaaaaccaaaattttcctttatatattattaaagttaataaaactrtataaacaaatctatctaattttaatcagtttgaccataaggtaagatttccataaacttttaataactggccccaattttctttttaaagagcatatcagtgctccaagaaaaccatgttcttctaacacatagacccagatgctggccttgcatcagtgtgcttttggtattaatgtttaatttatagaaaaactctgatcttatccctcaaaatcggcctttacagtcttaca

SEQ ID NO: 124227 - DNA, 383 bp, Homo sapiens
gatggacagacagataaatagtagaacccttctgcttacatgtaatttcatatattcttaaaacatggagagatgggttttgttaccatagttggcaagtgaggaacctgaggcatttggaggttaagtaatttgccccaaaccacatcgctagaactgggcaggacaggcccccagctctgttgaccacaaattccagggatttcctctccagaccctccagctggttctactggaagcaaacaatgccgtgctaaccagcctcagctctttctcactgggatgctggactgctggaggtgagaatgctgagttttggccaaragggtaatataggcctgttaggatatgctagtgaggccagctcccatgctaacagcagg

SEQ ID NO: 124228 - DNA, 539 bp, Homo sapiens
gatccccagtttctggtttgagcaatgggtggatggctggagaattctgtttctagacttccccccatgggtyttcttatggaattcaaaggcttgcttttaaatggtgcgatcatagcttcatcatcatccactgcttctcaagtatttcctctagttttgtgttggttctgcagtcttactctctaattttcatgttacttaatagtttatttacacctggctttgtagaactgatatcttgcttcttaatttagtctaatatttacttccatgtgtacaagaaatgcattcacataattaaatttgttttgcttttaccattccaatttagtgaactctaggagtgtggctgtgtgagtccacagaacacaccatgtgaacagctaggctattaatgggagctgtgtggaccactggcctcttcctccctattttgccttccaacataaaattatatagatattccttccatcaatttacctgacctatatagctcaatgaactgtgttcattcatattttcaagctttaccaaaa

SEQ ID NO: 124229 - DNA, 545 bp, Homo sapiens
cataaaaatgttatgaattgatagatagcagctaattcattctaaagactttcttttcttttttcttttactcacagacactctttagaagtgatgtattagaaatgagctggattttatgaatcattagcaacagtgggatgcagtggaaataatagtggcctgagagtctcatcatgtctcttccacttggataccttcagcctaatactcagcaatctcctgtattaaaaaaaaaaaagcgactagttcatctttaagaatctgtcttttcttagaatttcagaattctaacatattgataggaagcagaggatttgatcctaattttagtagtcctgtgaacmcttttgagatttttaggatcttacatattatatattataattgagaatgctgatcctcagaaaaggcatcttataccaaggtgtgggctagttcctgagaactgaggtttctgtaacaagagctttttagtgggaacttccagttttgttttgtttttttaatttccaaaatatgaaaaatgtacatttgtctatgat

SEQ ID NO: 124230 - DNA, 475 bp, Homo sapiens
ttcttgttcttgagttgttaaaaactactatagtttgaatgtgtcccctccaaaatccatattgaaactccrttcccatttggcggtgttaagaggtggggcctttcagaaagtgacaaagtcatgaaggatccaccttcaagaatggatccgtgccttataaaagtgctggaggaaagtagtttaggccttttgttctcctgctgtttctccacatgaagatacatacacagcatcatgcatgagaaatgggccttcactgcttgctcttgatcttggacttcccagccttcagaactgtgacaaataaatttatgttctttatgaattagccggcttgtggtatttggttacagtaacacaaatggactaagacagtaagacaggagtttttttaaaaagatattcttgatgtcaatcctttatcagatatatgacttgcaagtattttttcccattctgtgggttgcatttt

SEQ ID NO: 124231 - DNA, 430 bp, Homo sapiens
tctggccctggcctgcagtcaacctcagacttgtctatccaactgcctgtacaacaacacaacttggttgtctaatgggaatcgcaaaacataactatcttctgcctgaagatgtgataccctgcaaagcataataaatatttgttggatgaaggaacaagccaatgttagatagtaatagccagagaaaacaatgtgcagcctgagcggtattcaaggagtctttgaaaaaagaggaagacctctgcatctgcagaaaccaggaggagctaatattgcttaggaaagcctgactcctggatgggrcaccttggccagggtccaggtacatatgggcctaacgaaagcagaagtatctaaaactgcttaagtctgaatctgtgatgatacatctgaccttaccttggcttcagaatcccagtgaataatg

SEQ ID NO: 124232 - DNA, 554 bp, Homo sapiens
ttgcaagcaatgtgtgtagttgcaattttaacttccaagcatttgtcagttttaaaacacagctatttcaatgacatataaaggactgtcactgttcatgcataaattgatttgcagctttgatttggctaaaggttttcagaaaaacacaaatgtttccaattatacagtttggtaaattaaaggaattttgaatatgtttctgaagtatcttgcccatgccaaactagatggaccattgaggaaaaaagagttgggttaataattacagtaaagatagttggaatgttatttttataattatgatcagatatataacaaaatttaccattttaaccattttaagtatacaattcagtggcattaattgcgtctgcaatgctgtgcaactatcactgtttatctactttcaaaatttctcaattatcttaaacagaaactctttaatcattaagcaataactcccattcccctccctccagcctttggtaawctctaatctgctttctgcctctaaatttgcctattcaagatacctaatgtaagtggaatca

SEQ ID NO: 124233 - DNA, 567 bp, Homo sapiens
ttttatgacatatttgccatctattgtcatgtaacaaatcctcaaaatttcgcagtttaaaatgacagacactaattatctcacattttctgtcagtcaggaatctgggcaccacttagttgggtgtttctgactcaagctctttcatgagctatagtcaagatgttagrcagagctgcagtctcatgtggatgagatgactgaggtcagttaatttgtgtacaagctcattcacatggctgttgacaggccttggtcactcaccccatgggctactccataggactgccctacaatatggcagctggcttcccccaaggcaagtgacgccagagctgtgagggggagcacactcttccatattctattcattagaagcaaggcaataattccagccaccccaaagaagaagagattgcctaaggccaggaacactaggaagcaaggatcattgggactcctctcacaggttgcctaatgcattgtccaaggatttcatgtaaatgcttccttttagtcaatatctaaatatgtcaagctcattactacattatacacattatccct

SEQ ID NO: 124234 - DNA, 589 bp, Homo sapiens
ttctgtccctgcattaagtcactttgaataatggcctaaagttccatccacgtggctgcaaagggcatgatttcattttttagagtgaaactattccatgttgtatatataccacatttcttcatcaagcycaccactgatgggcgtctaagttgattccttgtctttgctattgtgcatagtgctatgattaacatataggtgcatgtgtgtctttattattattattattatactttaagttctgagatacgtgtgcagaacatgcaggtttgttacataggtatgtacatgtcatggtggttttgctgcacccatcaactggtcatctatatgaagtacttctcctaatgctatccttcccctagccccccaccccctgacaggctccagagtgtgatattccccacattgtgtccatgtggtctcattgttcaaatcccacttgtgagtgggaagaggcggtgtttggttttctgctcctgtgttagtttgctgagaatgatggtttccagtttcatccatgtccctgcaaaggacatgaactcatccttttttatggctgcatagtattgtgtggtgaatatgt

SEQ ID NO: 124235 - DNA, 558 bp, Homo sapiens
gttccaggaggggctaggtgctgacagtctgccttaattcaagaattgattttgcattatttagaggaatagctgtgctgtctaaccttcagtcaatgctctataagtaraaattatatctcatatttgagcttgtgatttgtattgagcaagaagagttatatttgctgacctggacctagagtgcaaatattccacattgacaagagcagatccatatgctttcataatcagcccaaatgggagtagaaatgacatatcttaatgaaaaatggaaaccctaactgggaaacattcgtgataaaaagacagttatacatggaaaacggaaaacagaaaacaaacaaacaaaaaaaaagtgcaggggcactctggacaagagcaagccttccctccctcataaaacagttctggccttttcccatgtacaggtaaaatgaaaattagggctccaaaatcctgcaccacagtattactgagataattttagcctggaaaatttttaaggttagtgtcaccaaacacccaccaggccattaaaatctctgtaaagcactc

SEQ ID NO: 124236 - DNA, 603 bp, Homo sapiens
aactggttttataacaagatttaaaaaaytgacaaacctttacctagagtgttcctcaaaaaaagacagagtaaggggactcaaactactagaatcaggacagaaaggtgggacattactattgacttatagaaagaatagaactataacagaatactataaaaagcagtatttcaagaaattatcaaactcagttcaaaaacaaatagacaatcttcatagaactgtaataagtaaagagatgcaattagtaataaaaaaaaattttttataaaaagaacagccccacatggcttcactgatgaattctagcagacatttaaagaattgccatcaatcctgcacaaattcttccaaacattaagagaagggaacactttctaacccatttaatgaagccaataccctcatatcaaaagcagaaaaaaaatcaaaaggaaatgagacaaaaacatctaagtatagatgcaaaaatctgaacaaaatattagcaaaacaaatgtagcaacatagaaaaacgattatatacaatggcaaagtggaatttatcccaggaatgacaggttgggttaatatcaaaaaactgatcgatattaatatcat

SEQ ID NO: 124237 - DNA, 584 bp, Homo sapiens
ccaggcaaacccagccagttggccaccataagagaaaggattggcaaactttaaagggtcaggtagtaagtattttagccttcatgggccatatggtctctgttccaactactgaatcctgccaatacagtgtgaaagtagccacagagaatacaaatgggtgtggctgtgctccaataaaactttatttacaaaaacagccaatgggccaattttggtccacatcctatagttttctgactcattctcaagactttaasatttgtacttcctaatttaaccctatgccatactttttttatgttgtttcatatggatgagttttgtctccgtggttggaatataaaggaagcttaatatcttgacattatgctatgtcacttcacagctgtgtgaacttgggtaagttactcaacctctctggcttcagtttctttatctgttaaaaggggataatttactgactccacaagtatttgtgaagattaaatgagtcctctttgcacagcagatggcacagagtgagtgctgaatctatgttagctgctatcatcatcattgttgtcatcccatgtgtcttcttc

SEQ ID NO: 124238 - DNA, 501 bp, Homo sapiens
tagtgatttcttaggtggatttcatgtaaacaaccatcacctgcaaataaaaatacttttactttgttccaaacgttatatccttatattatttcttttcttttcttctttctctctctctttctttctttctttctttctttctttctttctttctttctttctttctttcctttctttcttttctttctttctctctctctttctttttctgagatggagtttcattcttgttgtctgagctgaagtacaatggtgtgatctcagctcactgcagcctccgcctccacctcctgggttcaagtgattctcctgcctcagcctcctgagtagctgggattacaggcgacygccaccacaccccactaattttttatatttttattagagacagggtttcaccatgttgaccaggctggtctcaaactcctgccctcaggtgatccgcctacctcagcctctcaaagtgctgggattacaggcgtgagccactgtgccttg

SEQ ID NO: 124239 - DNA, 602 bp, Homo sapiens
atgaggaaattgaggcttagaaagtttaaataatttgtgacccagtgaatccaaatctgcctgagcccagagcttgcacccttcttattgtacttcctttcttggggcaagagagaaagatggcatcgatgttaagatggaagaccagctgaaggagagtttggcagaagcaaaaagaccagggaggtgaagggtagtgagcccaggggtagtattctctagcctgagctggggagtgctccataggagtgtacaagtgtaagcctaacattcatgtaccttatgtacttgttttttatttttaatttttttcgagacagagtctctctttgtcgctccagctggagtgcagtagtgcaatcttggctcactacaacctctgcctcctgggttcaagtgtttctcctacctcagaggcacaygtctacctcctatagacatgtgcctataatcccaggtgtgccacatccgagtaatttttgtacttttagtagagacagggtttcaccatgttggccaggttggtcttgaactgacctcacttgatccgcccgcctcactctcccaaagtgctgggatttcaggtgcgagccactgtgccc

SEQ ID NO: 124240 - DNA, 602 bp, Homo sapiens
atgaggaaattgaggcttagaaagtttaaataatttgtgacccagtgaatccaaatctgcctgagcccagagcttgcacccttcttattgtacttcctttcttggggcaagagagaaagatggcatcgatgttaagatggaagaccagctgaaggagagtttggcagaagcaaaaagaccagggaggtgaagggtagtgagcccaggggtagtattctctagcctgagctggggagtgctccataggagtgtacaagtgtaagcctaacattcatgtaccttatgtacttgttttttatttttaatttttttcgagacagagtctctctttgtcgctccagctggagtgcagtagtgcaatcttggctcactacaacctctgcctcctgggttcaagtgtttctcctacctcagaggcacatgtctacctcctatagacatgtgcctataatcccaggtgtgccacatccgastaatttttgtacttttagtagagacagggtttcaccatgttggccaggttggtcttgaactgacctcacttgatccgcccgcctcactctcccaaagtgctgggatttcaggtgcgagccactgtgccc

SEQ ID NO: 124241 - DNA, 504 bp, Homo sapiens
gttttagacagcaacttttattgacacagcaggtyccagcattggcagcagcagcagaggtaccaatggcagtgtgcccagagtagcagctcaaaggcgagtctgcagtcatatttatacccacttttaattacatgcaaattaaggggcagattatgcagacatttttaggaaaagggtggtagtttccaggtcatcaagttgtaactgaaaggggctgtaacttcagggtgttgccatggcaatggtaaactgacatggcacacaggtgggcgtgccttacggagaggtgcttctgctctgtccctcttttagctagtcctcaatatggtccagtgtccaagcaccacctccagagttgagtcccacctcctacctcagttttttgcagtaagctgttttctagaacgtgcaaaaaaaggttggtgtggggggatgggaggggtttactttacccatcactgtcttccaggagcaaagggcttcagtgaaattcaatattgt

SEQ ID NO: 124242 - DNA, 570 bp, Homo sapiens
aattggtacacacaaatattatacctcccacactcactgatttgaaaaatggcccaaggaccagggacttctcatattccaagttgccagaagaaatagyttccattgctacttccctttatgttaaatcagatgcaggacatagtgggaaatgaatattagtgggcagaacttgcccatgcacgtcacgggaagaaaagagaggatttctgctagattttttgtctgcttgttcatttcttatccctagcacctgtgatacagcgcctgtcctctagtggacactgaataaatatttgttggacaaagaggaattcaccttacactaaattctgatcattacgagactactggattaaatatttcttacagcaggaatttgcccttatttgttttggtgtccccagccccgggcacagttcctggctgaataatgtttgttgaactacatttcaaggactaaaacctctggtgagaactacaaatgcatatgcaaaactaaggatgaatattcaaggaaaggagccaaaacacaataaagtacatcctatatgactgtacttatataaa

SEQ ID NO: 124243 - DNA, 557 bp, Homo sapiens
aaaaaaaaaaaaaaaaaagagggaaaggaggaccgaattccaattgtcattcttctttgttctaaatttcttcctgagggtcacctggatagaggaaaacccacaggccaaactmtcatattcttttctgctgaccccaactttttagacaaagccttgcttccttgaccaattgcaaatcaaagaatctctaaacttaccaatgacctgtaagaccccacttgaagatatcccaccctgctgggccaaaccaatgtataacctccatgtattgatgtacaattttgcctgtaagttcttcttttctaaaatgtacccctgcctttcaattctttgcctcttggccatctggaagttcaggtcttaagcagtagcagcctattctccttgcttgggaccatgcaataattagttcactttctcttgctgcaaatcctggtgtcagtattgtcttgttctgtgcactgggtgaatgaaccccgtatcagtttgggaacagaatgggaaattctaggtggaaattgcagatggaattaaagttactcatcaattgactt

SEQ ID NO: 124244 - DNA, 543 bp, Homo sapiens
tttacagtcatctgcactcctaccgaatacacaacccaacaccaaaagacaaaaagggcaaaattgatgacttyatgatcattaagatgtcccaaacattgaccttctcttttgccctcacccacaaatcccacgtctccattacaattaggatgaatttagtgcagggtcgcttcctcctcctggccaagtttgtttgaatgagtatgagattagctaaaggctgaaatcggatgacagacatggagatgtttgcggatctttcctttcacaagaattcttaactgaaagtatctggaaaggctcttcacaagtgaaatcatacaagttaaattcaatacaccctggaaggaaaaacaatggctccatcattatttaactgggctggacatagctaagatcactctcccaggttttctgataccatctaagctttctctggaggagtaaccacagaatttaatgtttttggcattgaaaggatttacccacaacaacgttcatttgcctggaaaatattcttcctgctgccatgcagatgaa

SEQ ID NO: 124245 - DNA, 507 bp, Homo sapiens
aagctggaagaagtccaaagagtaacaattaggctgcaccatgaagagaagtccatgaaaccatccctctcatctacagaaacgaagcagggccagcccggtggctcacacctgtaatcccagcactctgggagaacgatgcaggagaatcacttaaagccaagagcttgagaccagcctgggcaacatagtgagactccatctctacgaaaaagaaaatgaaaattagccaggcatggtagcacacacctgtagtcctagccacttggaaggctaaggctggagaatcacttgagcccaggaaattgagactgcagtgagctgcagtcacatgacrgaactccagcctgggcaacagagtgagactctgtccagaaaaataaaaaagaagaaggaaggaaggaaaaaaaggaagaaagaaaagaagagaaaaaggaaaaaaatctaaaaattaaataagtatcttagcaagtatagaattctattcggaagcaaaatgtgaatgtg

SEQ ID NO: 124246 - DNA, 507 bp, Homo sapiens
aagctggaagaagtccaaagagtaacaattaggctgcaccatgaagagaagtccatgaaaccatccctctcatctacagaaacgaagcagggccagcccggtggctcacacctgtaatcccagcactctgggagaacgatgcaggagaatcacttaaagccaagagcttgagaccagcctgggcaacatagtgagactccatctctacgaaaaagaaaatgaaaattagccaggcatggtagcacacacctgtagtcctagccacttggaaggctaaggctggagaatcacttgagcccaggaaattgagactgcagtgagctgcagtcacatgacagaactccagcctgggcaacagagtgagactctgtccagaaaaataaaaaagaagaaggaaggaaggaaaaaaaggaagaaagaaaagaagagaaaaaggaaaaaaatctaaaaattaaataagtatcttagcaagtatagaattctattyggaagcaaaatgtgaatgtg

SEQ ID NO: 124247 - DNA, 579 bp, Homo sapiens
ctttcagtctctgaagtatgagactttcccactggcttctttctctgtaacctctagcttcttcatttttcctgtatgtttatgactctgctctttttcccttctaaattttatgaaccatgacctagaggcctgcttatccccacttaaaactgcttctcaatgtattttattttttataagaaagaaaattttctctttaaaaactactcaacgtatatattctttgtcttgctacatgtattatctaattcarttatcataaccctaggaaataagatactattatcccaaatatgtagtgaggtaatccatgcacagagagttagataagttatctaagtttccacagtcagtcaatggtggagccaggatctgaaattctcaagtatgtgtggagaaaggatgttattctaacatcagtagagtgtcttcataagcttagaaatttctgtaattacttctaatttcaggtgacatctgctgtggaaaattattcagtaaagtagctttgtggctttattcaatctgctggcaacatgatttagttaaatatgcaacctgatgctgcccttttat

SEQ ID NO: 124248 - DNA, 574 bp, Homo sapiens
gtgctttcacatacattactacatttactacttaaaatagttgcttggtttcatgttgtcatttttacaaatgggggaattaaatctcagaaaaagataagtaactcatcaaaatcatatagctattacatatcagagctgggatttgaatgyaactcatcagctttaaataagtgtataagagttatcacaatggactacataattaattgctcaatgaataatttattttcctgtggcttccctgtttgttttctgtgaaagcaaatagttgcacaacaacattaggttaaaacaaattcagacattctttcaattcattttaattattaatagacaacaggaaaccaattgaggcttccaataagttactgtgtattaaaccatggttgaaaacttcaagataagatgcgattcttagaagcagcgaaataaaaaacagattatgttagattacactttatattatctgctgtgacagttacagaaatattagtaaaaggtcaatcaaatcaagtcttgttgtggttgttaaaatgaataaacttataatagatgtagtaagaaattttta

SEQ ID NO: 124249 - DNA, 559 bp, Homo sapiens
tgttttcccggattctcagctctatatgctacctctccaatgcatgttttatattgaagataatggagcaaactatttaagagacaagtcagactatgctaacaggatgtcaatgctacaagagagtctcatgttgaagactctagacccagaagagaaggaaagcagagataagtgagcctgacattgtgtggtttgataatcctaaattgaacaagcagcagaaaattggggctaaagactaagaaattagaagaatcttaggccatctcacaatttcaagaagacagaaattagaatccatgcggggcatggtggctcacacctgtaatcccagcattttaggaggctgaggagggtggatcacctgaggccaggagttcgagaccagcctggccaacatggtgaaaccccatctctacaaaaaayacaaaaattagccgagtgtggtggtgcacacctgtaatcccagctactcgggaggctgagacaggagaattgcttgaacttgggaggcagagttgcagtgagccaagatggcgccactgcattctagtct

SEQ ID NO: 124250 - DNA, 615 bp, Homo sapiens
actgcctggatgggattggggctaatcaattttttcctgggaggaaaagaataaatggagatgaggtttccctaaagggaagccaatgcattctaagagctattaatgaacttgggactgtcagatgacaaaggaacattaagttctctctgttgtacagtggagagattttttaaacttagagattatgtcatataagggacagtgccctgacatttgtgccagagacatctgacaggtgaaaaagatatatgataaaattagtgatgtggaaccaaaaaaacgccagaggttagatttaagattaatcgagttcttgttcagagagagagccaataattttttttttttttttggtgagctatcttcttgtggagtccctgggacaagatttgtctagtgtagcagcataattaaagttctgccctatcaaagaacaagtgtttagatacattctcttctgaactagtttaatgcttgttcatacccaggcacaagaacaaaactgttacaaaacaaaatmaccccagaataaaagaaaatgaaaggctcctcttccattctgggatgttggggggcaggtctggaagataagcaggaaggggagtaaagtca

SEQ ID NO: 124251 - DNA, 624 bp, Homo sapiens
ataaacctgtttcacttattttgaagctatacttcagttatttctcttatctacattgacagattgtactagagtttgcaatgaaaatagctaaaatataatgaaagggagcttctagcttaatcttctatgtttaattgaggatataacacctcttgaaataacttctgaggaattgaaaatacaccctctaggaatatcttgaagacagagaaaaactaacctgagccttaacttgtgcttgcaaacccacagaaattattttaaaatacaagaaaatgtaactatctgcctgtgtgctttgtatcagaaattaaagtggtttatgtttcttacagaataaaaatcctagttgttttaagtttcatgaccacgattgttacttataatttttaaaaaacggttcgtcaaaattggatttacattatttaccatgttttcttctctcagatttgaacaatcatktctgaaataaattttacatgttcctaggagtcacatctggccttttcactaccaaaatttcttagttaaaaatggcttaacttaatatctttgtgccttgcctattgacattcacatatctttataaaaagaatattgtccaatcagttgatatttagt

SEQ ID NO: 124252 - DNA, 609 bp, Homo sapiens
atcctgccttgaattctcatccatatctgattcagatgagactgtgtacrttgaacttctgagctgatgctggaaagttatgacttttggggctattgcatgacatgaatgtgtcttttatgtgagaagaacatgaatttggggagccagggtggaatgctgtggtttaaatgtgtcccccagaaagcacgtgttgaaaatccccagtgtaacagtgttgggagatgaggcctaatgggaggcatttaggtcatgagggcaccatccccatgaatgattaatgccattataaaagggtttgaggctgtgagttcactcttttgctctcttgtgcacacatgctcttttgcccttttatgcttctatcatgggatgatgcagcaggaaggtccttgccatatgcagccccccaatcttggccttactagcctctagaattgtgagcccgataaatttctgttcattacaaattacccagtctgaagtgttctgttatagcagcacaaaatggactaagacactattaataccagtcttatttatattaatagaggacattttatctctctctctctctatatatatatatatatttgctaaatgatcaac

SEQ ID NO: 124253 - DNA, 609 bp, Homo sapiens
atcctgccttgaattctcatccatatctgattcagatgagactgtgtacattgaacttctgagctgatgctggaaagttatgacttttggggctattgcatgacatgaatgtgtcttttatgtgagaagaacatgaatttggggagccagggtggaatgctgtggtttaaatgtgtcccccagaaagcacgtgttgaaaatccccagtgtaacagtgttgggagatgaggcctaatgggaggcatttaggtcatgagggcaccatccccatgaatgattaatgccattataaaagggtttgaggctgtgagttcactcttttgctctcttgtgcacacatgctcttttgcccttttatgcttctatcatgggatgatgcagcaggaaggtccttgccatatgcagccccccaatcttggccttactagcctctagaattgtgagcccgataaatttctrttcattacaaattacccagtctgaagtgttctgttatagcagcacaaaatggactaagacactattaataccagtcttatttatattaatagaggacattttatctctctctctctctatatatatatatatatttgctaaatgatcaac

SEQ ID NO: 124254 - DNA, 567 bp, Homo sapiens
gccattatcaaacagttccttaatagcccttgattttgagactgaggatgaggtggaatgaaagtgcataactataagagttttagaatcaaacaattctatttcttgcatgggcaaattgtgcagcctttccggggctcatcttcttatctgtaaactgggtagtgtgatatctaaacyacagagtgattgtaaacttttaatttaaatgcagtgatatacaaaaagtagttaagtgtctatcacaatgtaagcaccacatttattcattctttcaacaggtatttattacaacacaacaggcactgttctaagtgttaagaatgtaacagagaatgaggtccttatcataattgtaacataaagagtcttcagataaaactacctgcccttattcttctgtctccaattaccaggaggccaatttctggggctgctgttagggaccagtaaacacctatctaatgtaaagtgtcgggactgcaggtgactctgtccatttatctgaaatctgagggattaatgaaaacagtgtggtcttgagcctgacttgagaatgtgagttca

SEQ ID NO: 124255 - DNA, 509 bp, Homo sapiens
gaattctctcatcatttgtttgtctggaaaagactgtatctttcctttatttatgaaacttagtttcaatggatacaaaattcttggcttataattgttttgtttaaggaagctaaaaataggaccccaatctcttctagcttgtagggtttctactgataaatctgctattaatctgatatgttttcctttataagttacctcatgcttctgcctcacagctcttaagattcyttcctttgtcttgactttagataacctgatgactctgtacctagacaatgacctttttgtgatgaatttcccaggtgttctttgggcttcttttatttggatgtctagatctctagcaaggctggggaagtttccctcaattattccctcacatatgttttccacacttttagatttctcttcttccttgggaacactaattattcttaggtttggatgtttaacatagtttttgatttctttaagttgaacttcacctttctctggtgcctctt

SEQ ID NO: 124256 - DNA, 562 bp, Homo sapiens
tggagaccaatgttcttttgaagtctcatagcggttgcccttagaaagaagagttggcaaaatgtttggtattcagacccttcaaaaggtgctagactcttagctaatctattcagaattggaggggcctggaagaaaaaggtctagctatgttaatagagatttttcacagatgtgaattttcccctaaaaggacaaagcttgcagggccatttcaacttgtgacaaagaaacatgtttttggggtaaaatattttgattttcctccttgccttgtaatgttataccagagtcagcatggaaagtaagtcatgatatatagggttaaatcaaacccatctgatgagaatttatggtttgtaggggttgactcctcagattctttagataggaatttgggcaagataaaaaaaatcataatttagtcttcagaagtttacccacaattgacccttaagcacccctgaccccaagcccgctcccacccagggttttagamaactcaaggattggaaagacctcaagaaggataatattcaattgctagctaagagggcagtgg

SEQ ID NO: 124257 - DNA, 648 bp, Homo sapiens
acaggtgtgagccatagcgcccagcccctaaagttttatttttctaaattaaatgtgtggggcaattatgctagaaggttctaagtgctttacatgtgttactttatttcatcttcattgaaatcataggaggtaggcgatataataatcccatcttacagagagtaagtgagacttagagagagtgtgtgagttgccccaggccacacagcaaattcctggattccaagcatactttgtctctcaaaagccagagctcttaaggctgcctgtacgaactccatttgggaatgaagatagagggaaggtgctctagatactaccaccagtcatgcattaacacaagtagtgggccacagcctcaataaacggctccttcttaattagcattctttctccttttggcctaatattttatgttgggcatgattattttctattagtaatgtaatagtattgctttctaaccccrttcttatcccagccctccacctatccgcctctgaaccttccaagtctagccgttccttttcatctatttctcctgacagtttatgataacgccctgaaccagttcaacatctctcaagcttcaattgagaatggagtatttaccacagagagtacctgtgctgttccaacattctt

SEQ ID NO: 124258 - DNA, 674 bp, Homo sapiens
cgtaaaagaagcctttttcaaagcattaaactttcattccaatatttattaagaatctactatgttccagacagatatattatgactcttacacatttgctcacgtgcataaaaagtcatttggtttagacattcccaccgtctaccagttcctggggaggtatactgcaatctccacgtcaactgataaagataatagaagacaaagtcagtcaaacaatgtgaattcctagacctttttgattaatgatacaaatggccacgacatcattctcaactatcttcccaactccttatcattatatattctggtaaaagataacaaagtttcaggtaaagtttcaggaagtcagcttttgattattttaaatgggtttgcacatatgtayctgtcactatttgaccagaagactacattttggacattctcatgccagattctgactggcccctgatgtgtacctgcaattaagataattatttccatatacaaaactacaaactggatcccattttcattaccttttgggttggagctggatacacagatcacatgttcatccgatgtccttctctaccacaggggagccacacacaatgcccacccctagtaacaggaaatgaaacactaatgagccaaacagccatctgcctgtgcccagaatgaacagtcc

SEQ ID NO: 124259 - DNA, 547 bp, Homo sapiens
caatgcagttgtctctgtagatcccatttcatctgaargaaacttcctatttcccgggcctatttctattacactggttgttgtactgtctcctaatggttggtttacttcttctgcatcaggtcataaccttcatgagggcacagaagtgtcatactgactttcagtttcctagtttctaatggtgtgccaggcaaaggaggtacccaatacacatttgtttaacaaataaataatccaaatatacacttactgacacatcacattatgcattaaaattgtgaccacttctttcctatgaacacatgccaataaatccacataaaggcactcggtaagcttatgcaagtgaaggcatagatttgtgctctcaaaagtttgtgatcttcagttttaatacatacaacaatccttacacaacttggtgatgtcattgctggaatgtgacaatctcagatagtaaatctctttttactagcaatatgaaagaccacgaccttacccttaaatttatttggcacctacagcgcatattccaagtaaagac

SEQ ID NO: 124260 - DNA, 547 bp, Homo sapiens
caatgcagttgtctctgtagatcccatttcatctgaaagaaacttcctatttcccgggcctatttctattacactggttgttgtactgtctcctaatggttggtttacttcttctgcatcaggtcataaccttcatgagggcacagaagtgtcatactgaytttcagtttcctagtttctaatggtgtgccaggcaaaggaggtacccaatacacatttgtttaacaaataaataatccaaatatacacttactgacacatcacattatgcattaaaattgtgaccacttctttcctatgaacacatgccaataaatccacataaaggcactcggtaagcttatgcaagtgaaggcatagatttgtgctctcaaaagtttgtgatcttcagttttaatacatacaacaatccttacacaacttggtgatgtcattgctggaatgtgacaatctcagatagtaaatctctttttactagcaatatgaaagaccacgaccttacccttaaatttatttggcacctacagcgcatattccaagtaaagac

SEQ ID NO: 124261 - DNA, 572 bp, Homo sapiens
gtcctgatttttgcgcatacaattttttcaaggctagtttcagtgaaatgaagtcaggtacataaaactcgaatgcctacagattttgattacgcttcaatgaaagggggtgggaaagccagttttgagttgtggtaaaagcaaagacttcaaatctctggaggttgccacatgtgaaatgccagggccaattcagcctgaagtccaatgactcaagtaatcagggaactggaaaggctttgtggtttgaatactcgatgacgggggtcaaaagtcactggctctatttctgctaacgtactgacagattttcttggcttgagtaacccctatcagttttctgagcaacaactcccacagagtttaattactgaatgattcacaagtatttgctggacaactgtcctggtctaaattaagcctcttaagatccagtgaatctgctcgkcattattgcaaataaattcttgagagctaaaatcccttaggttaaaatatacataaatacatacatgtgatctagtgattttaagtctatgcttaaaaatacacagatgtgtaatacagagata

SEQ ID NO: 124262 - DNA, 648 bp, Homo sapiens
acaggtgtgagccatagcgcccagcccctaaagttttatttttctaaattaaatgtgtggggcaattatgctagaaggttctaagtgctttacatgtgttactttatttcatcttcattgaaatcataggaggtaggcratataataatcccatcttacagagagtaagtgagacttagagagagtgtgtgagttgccccaggccacacagcaaattcctggattccaagcatactttgtctctcaaaagccagagctcttaaggctgcctgtacgaactccatttgggaatgaagatagagggaaggtgctctagatactaccaccagtcatgcattaacacaagtagtgggccacagcctcaataaacggctccttcttaattagcattctttctccttttggcctaatattttatgttgggcatgattattttctattagtaatgtaatagtattgctttctaaccccgttcttatcccagccctccacctatccgcctctgaaccttccaagtctagccgttccttttcatctatttctcctgacagtttatgataacgccctgaaccagttcaacatctctcaagcttcaattgagaatggagtatttaccacagagagtacctgtgctgttccaacattctt

SEQ ID NO: 124263 - DNA, 585 bp, Homo sapiens
gtatttttctctcatttcttgcctggcttccattgcatccctagtttgctgaaatagagcattcatgaatcaactaggatttgttacagaaaacaaaaactatgggatataagacagggaattgggtacttaaaaattactcagagagctggaggagtaggactaaggcctgcttgtactattaagttcaagaaaactctgatctgggcatcgggaagttggaagctacaagccacaacactggacactgcagttgccctttgacaaccacctgactctcatgaccttccagggaggcacagccaaagcagcaggaagtgagctcacctcccttccccctgccatgactttcatcagtgcctgactcaatgccttgtgtgtattcaggttttcaataaaagacagttatttaatcaaatggcattaattaaattagtctgttattcygtagattcctgctttgctttacttgaactgttttttccagattacgttctttaatttctatgttgattagcttatttgatgagacataaaataacaaaaaagaataccttaggaataggcaggtgttctgattggtgg

SEQ ID NO: 124264 - DNA, 563 bp, Homo sapiens
tttttccagatgctttagaaatgtttaatatgtatttcctcttactcaaaaagcacagctacacattatcttatgcagagaaatgccttatttggagaaaaataaatataaacattatggttatgtataaactatgccaattcttggacttatcccttattgttatttttgaaaaccacctgcctggattaaatctttgccacctgtatttcaggaacatcttctggttagtgtctctgtctctaggtgctagcgattctraacagatatctattccaaaacgtatttgccaaaacagtctccttaacttaaggagattaagaccttaaaaatcatttaccgtattctcctgcttctttgcttcaagccatttgctcaaaacaaaattctggaaagtggcatcagcaacatgaagaaatagtttctcatggctatccctcctcccacagatgcaccaaataaacacctatacatggatcagttccctccaagagaaagccagaaactagttgaaagactcctgaacaccaaacaactgagaaagtatccacattgaaacaggc

SEQ ID NO: 124265 - DNA, 545 bp, Homo sapiens
tgccaacaaaaagaaagttgcattttaaagaaaataccaagacttctacttaaattacaggttcatcacaacagatgatttacattctccaagcccactttgtattatatgtggctaccggctactcaacaaagccataaaaccttcaaaactgcttcaccacatggagacaaagcaacctgcattaaaagacaagtgcttggagcttttcaaaagaaaacacgtagccacaaagaacagaagtaattgttgaaggcaccacttcatcaaatgtgtctgcactcagagcatcattcttgtggctaaccacattgctaaagctaagaagtccttcgctactggtgaagagttgatcttgcctgctacttargatatttgtcatgaacttttaggagaggctacagttcaaaaggtggcaccgtaactagatgaattgatgaaataccaaaggatattgaggcacaattgttagagaggatcagtgagtcaccatggtacgcaatccaggttgataagtctaccaatgttaaaaacgaggcaaaaat

SEQ ID NO: 124266 - DNA, 545 bp, Homo sapiens
tgccaacaaaaagaaagttgcattttaaagaaaataccaagacttctacttaaattacaggttcatcacaacagatgatttacattctccaagcccactttgtattatatgtggctaccggctactcaacaaagccataaaaccttcaaaactgcttcaccacatggagacaaagcaacctgcattaaaagacaagtgcttggagcttttcaaaagaaaacacgtagccacaaagaacagaagtaattgttgaaggcaccacttcatcaaatgtgtctgcactcagagcatcattcttgtggctaaccacattgctaaagctaagaagtccttcgctactggtgaagagttgatcttgcctgctacttaggatatttgtcatgaacttttaggagaggctacagttcaaaaggtggcaccgtaactagatgaattgatgwaataccaaaggatattgaggcacaattgttagagaggatcagtgagtcaccatggtacgcaatccaggttgataagtctaccaatgttaaaaacgaggcaaaaat

SEQ ID NO: 124267 - DNA, 545 bp, Homo sapiens
tgccaacaaaaagaaagttgcattttaaagaaaataccaagacttctacttaaattacaggttcatcacaacagatgatttacattctccaagcccactttgtattatatgtggctaccggctactcaacaaagccataaaaccttcaaaactgcttcaccacatggagacaaagcaacctgcattaaaagacaagtgcttggagcttttcaaaagaaaacacgtagccacaaagaacagaagtaattgttgaaggcaccacttcatcaaatgtgtctgcactcagagcatcattcttgtggctaaccacattgctaaagctaagaagtccttcgctactggtgaagagttgatcttgcctgctacttaggatatttgtcatgaacttttaggagaggctacagttcaaaaggtggcaccgtaactagatgaattgatgaaataccaaaggatattgaggcacaattgttagagaggatcagtgagtcaccatggtacgcaatccaggttgataagtctaccratgttaaaaacgaggcaaaaat

SEQ ID NO: 124268 - DNA, 579 bp, Homo sapiens
tctattttatactttcaatgactaagctaaatgctcattctaggcagtaacatccctggttttcaacaaacatccttaacatttaacactgtatagaaaagagataggaaccacaacagccaccaaagaaagcaagaaataaacaacaataggaaagactggaggtcctagtgccgacgggcagttggggactggagttagttcagaggcctttggataatactgaggtatggccttggccagataccctcagttgccccaggacctccttccagtcccatgcaatgggtagacctccaggaagggaaattgggttggaacaaagccaacattcccaacacccaagggtgataggggattgacaacrtcctccccagcaagcctgtcctctgtgtcttaagtcctgcaactgctctagtcacttttaactggctgacagaggcccggtatttttccttcattttgactattgtggagtttagagactccaaaaaacaggacagaatcgtttttacccttctacagatcctgaacaagcccccaaaatgttcacaggatctctggggtgtcaatttttct

SEQ ID NO: 124269 - DNA, 579 bp, Homo sapiens
tctattttatactttcaatgactaagctaaatgctcattctaggcagtaacatccctggttttcaacaaacatccttaacatttaacactgtatagaaaagagataggaaccacaacagccaccaaagaaagcaagaaataaacaacaataggaaagactggaggtcctagtgccgacgggcagttggggactggagttagttcagaggcctttggataatactgaggtatggccttggccagataccctcagttgccccaggacctccttccagtcccatgcaatgggtagacctccaggaagggaaattgggttggaacaaagccaacattcccaacacccaagggtgataggggattgacaacgtcctccccagcaagcctgtcctctgtgtcttaagtcctgcaactgctctagtcacttttaactggctgacagaggcccggtatttttccttcattttgactattgtgkagtttagagactccaaaaaacaggacagaatcgtttttacccttctacagatcctgaacaagcccccaaaatgttcacaggatctctggggtgtcaatttttct

SEQ ID NO: 124270 - DNA, 607 bp, Homo sapiens
ctgccagtactcaatttctgcctgatatttatgtactgtagtcatcgtttttacttaatccagtggtggccgtgtgagtaacattgagttcttatcaacgcccccatctaaggatgagattaaaaaaccagctcagagggtggcagctcactgcaggtaactggttaaagagaaaaatctgagattataaactggattctccaaagaaggctatacccctgtttctgagataggtcctttgttccactctgggcttcagtttccccattagcaaaacaggttaaaaacacagaaacaccctgtgtacaactttgggctattgtgaagattatgaaattatgaatgggaagtacctcacaaacttgaagtttgatgtaggcccacgtgaagggctcttatcaccatgtaatcgtaataatagtaaacagtacatgcttctttgaatccttttctgccgaaggagaattggcacattttagactagtttttaacttayaggctaggcaataaacccgaagcattgtttgcaatagcaagaaattggaaatgacttaaatacccattgataaaggaatggataaacagagtatgtaatcctcagttgaaa

SEQ ID NO: 124271 - DNA, 577 bp, Homo sapiens
tttgttgttatacagtttatttacacagtttaaaaatcacttgaaaagagtgccaccaataattaaaattatatcttaagttaaacatctgagttattgcacagactttttaagaccacacaaattttgttgcagaaattgcaaggaatggaattgyccccaacctaacacagccactgattgctctcatctttcaaagtataggtttccctttacattattgaataaaccacttttctagtctcatgtaaggaatgatttcaaatggaaaggctttggccatctctcagcacaatacaatgaaagctatcaatccttgtgatgactcttcaaaatcccaattataagtgcctttcactaaagtagacatgtttcatggaagatacacaaattttaaaaaacaagagaaaagttaaaacagaatttcagagaagtttatgattttctgtaataattgcttttaaaactgaaaggaattttcattcatataacccaaattctattctagttttaggtttagaagatattgaaatgaatcaagaaactctatagcattgttcttggttaacttttatca

SEQ ID NO: 124272 - DNA, 444 bp, Homo sapiens
gagatgtgggtggtgagctgggcattcaaaagagaaggtaggccgggcatggggggctcatggcagctcatggcctatagtcatagtgctttgggaggctgaggtgggaggatcacttgaggtcaggagtttgagaccagctgggctgatctcagaacccatctctacaaaattttttttttwaaaaaaaacctatctgagtgtggttgcacgtacctgtagtcccagctacttgggacattgaggtgggaggatcacttgagcccatgagttcaaggctgcagtgagctatgattgtgccactgcactccagcctgggtgacagagcaagaccccatctttaaaaaaagaaaaagaaaaaaaaatgatcaggtatatgttaagtaaacatgaaatctatataacagaacaaaaattcactcttatgtcaatgtcagcgtgtta

SEQ ID NO: 124273 - DNA, 596 bp, Homo sapiens
accaactgggtgccctcaaaattaacctgggatggtcaactttgaggatccttgtataattgttatctacaactgtgtagataatgattgtgttatctataattatgtagatacaactgtgtaacaaattacctccaaatttagcagcttaaaatagcaaacacctgtcaactcaatttctatgggtcaggaatccaggagcatcttagctaggtgcctctgcctaaaagtctcttgtgaagaagctgcagctaacttaccagtcacggctgtggcctcacttgaaggttcarttgagggaggactttatattgttgcttcaaaactccacttgttaatgttatcaattccttgtctagtaggcttcaatgtgtgttagctcatagcataacaaatggatatcatcaaagtgttcaagcaagagagcaagcgagggtgaagactgtggaagccagagtgttttcgtaacctaatcttggaagtgacatctcatttttgtcatattctatttttttagaagtgagtcactgctccagcccacacttgaggaaaggtaattaaacaaaggcatgaatatcaggaggatgggctcactg

SEQ ID NO: 124274 - DNA, 596 bp, Homo sapiens
cttttctctgctgcagtgcagaactcagaccataatgggttcattttggatctcatttgacagaattgattatgacaagaaatagaaagacttcatttcaataatgaattgaggaatctaacaagataagatagatgcatgggccctcaaaagtcagtttctgtgaaatgccagtggaattgttttattaaaacaaaacccagccaaacaaaaaaaggacgtggagagaaggaggaacacactggtgttcagcttttcttaaggcagaggagattttcttaagacactgaagctatctgctgttaattcctttaaaaaaaaaaaaaaagcacctagttcattttcaggtggcctctttaaatttagtaatggttctaaagtgatacagaattattaattttaacttcagagaaatgctttttactattctaataattttctgttaaagttarttatttttacagcagtaaatttcaagtccataattgtgatctaagttctctcttaaaaattaagccccaaggccaggtgcactggctcatgctctgggaggacggcttgaggccaggagtttgagaccagcctgggtaacatag

SEQ ID NO: 124275 - DNA, 552 bp, Homo sapiens
aatcccaatcttctatattaatttctcctacccaaatttctaaaatatattctgcttaaaaaaaagagtaacttgcttttgagctcagagcttttctcatatactgaattaatcatgttttcctggtgagttatgttctttagcctaagagactatttctaaaaatgcatgttgttaaaagaataaaagccaagagacaactcaagttttgtctaaagaaataattgtttagcaagtaatatttcaaagctattgtattcagaacaygaggatattgtttataagacataccacactacatttcttacataattttcttttgtgcctgaaaatgtttctgaaaattgaggagaataaggatgagctacccagtacagtaagttgttacaaagatttttcactttaggttttagcacacctatattccatcatcacactgaagtgcagaaaatcacttcccggtatagatacaaatttacttcatattttaatgcaaagtataggggtgtggtttataaaacacccccataagctcaatttctttttcatagc

SEQ ID NO: 124276 - DNA, 552 bp, Homo sapiens
aatcccaatcttctatattaatttctcctacccaaatttctaaaatatattctgcttaaaaaaaagagtaacttgcttttgagctcagagcttttctcatatactgaattaatcatgttttcctggtgagttatgttctttagcctaagagactatttctaaaaatgcatgttgttaaaagaataaaagccaagagacaactcaagttttgtctaaagaaataattgtttagcaagtaatatttcaaagctattgtattcagaacatgaggatattgtttataagacataccacactacatttcttacataattttcttttgtgcctgaaaatgtttctgaaaattgaggagaataaggatgagctacccagtacagtaagttgttacaaagatttttcactttaggttttagcacacctatattccatcatcacactgaagtgcagaaaatcacttcccggtatagatacaaatttacttcatattttaatgyaaagtataggggtgtggtttataaaacacccccataagctcaatttctttttcatagc

SEQ ID NO: 124277 - DNA, 575 bp, Homo sapiens
taaggtcaggagttttaacaccagcctgtgaaacacggcgacttcatgactacaaaaaaaaaaaaaaaaagccaggtatggtggcatgcacttgtggtcccagttatttggagggctggggtttcatatcaaacagcctttttgtttgatatgaagctggtaatgatacaatgccatttcctccacctaatttccataatgatttacactgtccctgatgatcaccataacagtttaatcatgtggtttatattttttcctctagccctatgttttaaagattgtttcaagtgctctgctttgtagctattcagaatataagtagctacttagatgttaaaatacagaattactagatgactgttaaaaacatgactagataggaatcatctttcttatacatgaaatggggatttttacaacgaaaactgctttcccttgtagatgtgaatccaccaagtcagcaggttctagaactgctgtatttatctgcyttacagcagtgacccaaccgttctgtttttagacattagcaaatatatgattatcagcaaaacttcagaatgagccacaaa

SEQ ID NO: 124278 - DNA, 583 bp, Homo sapiens
aagcatttatgagctctctattctgttccacgtatctatcttttcattcctgaaccaatactacatggtattaatgcagccaataacatccacaaaactgayagcagaagatctcttgtgccttccttccccacctcccttcttctccttctccaatgccttggctcttcctgtgcctggaatttttgcatattttgaattaccttgtcatgtgtacctccctcaccccaaatacctcctgggatctgagtgggattgaactgaatctagaaatcaactgaaagattaaccacctctctgcattttgattctccacaacacggcacatctctgcatttgtttaggttttcagcaatgtctttcagtctttcagtaaagttttataatttttctcataaaagtttttcacactattcttttttatctattataattgctattggtgatgctattggtgatttttaaatggtatatttttaaatgacattttctatttgttgcttttatatagaatacaattgaatttttatactgatattgtttttggtaaccccccataaacgttcttactaattccaatagt

SEQ ID NO: 124279 - DNA, 633 bp, Homo sapiens
gtgatgctattggtgatttttaaatggtatatttttaaatgacattttctatttgttgcttttatatagaatacaattgaatttttatactgatattgtttttggtaaccccccataaacgttcttactaattccaatagtttatctgtaaaatattttttaatgtactacagataaaattgttttatctacaaaaaatggtggcttagttttttcctttcctcagcattgcccaggtgaggcctctctgcagcggttcacccctgaatttctgcttgccattgccccagtacaggctctctgcrgtggctctgctcctgtgacaagtccctgcctggggccgcaggctgtccatgacatctcttgaaatctaggtggaggctgccccacagctctagcattcttcttgcctaaaaattggcaccacatggatgccaccaaggtttatagcttgtactttccagagccatggctgcagccacagctgcggtgactgagcactgcactggttgtgggttccctggagctcccggtcagtgatgggggcagccttgaagatcttggaggtgccttcagggtcattctccctgtcctgatgattccttctctccccagtcatctcctcagtgaaca

SEQ ID NO: 124280 - DNA, 597 bp, Homo sapiens
ttccttctgacctcccatctcctgtggtgtcttgcatttgctgaacctgataggaaaccagaagagaaggaggctttatcgcagcagaatacacaagcctgcctcccaggcaccaaaatgmggggagaaaagtggattgtaaacccatggaggtgagtggaaaccctccagcccaaagtgattcctgtggataactgatttaatcatcacaataactataccataccgataaataacattagtcctattttacaggtgaggcaactgatttaggcactctgccgttaggtcatacatttcatgagcagcagaggaaagatttgaacccagacagtctttttgcacaaacagtactctgactcactacgatgtgctacccaaggaatagctttctccctgctccaaggacaaaacccaagacacagaacatggctctcttcctggagggtttcttccctttcatgctttcccatttttgtgtctacacatttaatttgagaaccttagcagccatgggatagtgtgatatttgtcattcaccttagggtgtagataaccatgtgagacattcttctcagaacagttatattctttgaa

SEQ ID NO: 124281 - DNA, 551 bp, Homo sapiens
gttggtagattcgatggtggaagagaatttttcttacttccgtgagtttttcactgagagtaaaggtggtctggagagaatgtggaatttgaaagaagaactaaagtgagttcactagacaaatgtagaagggtgtctgggcacttctgagtggtcctgggtactcatttaaaatttgctgttacaaattaaaatggagtcctagtggtaaggctgtgtgattcctccagacactgggagcagagagagacaagtagggaggaagttaggtttgggtagtgctggagttttgtgagattgtcagcgggtgtcaggggaaggtggaaagacttgaaagtacattaaacaacttactgcaatgatggaccatgaaccctaagctggttgagggaaaatgagtacatragccaggagaaagtggaaaacttgtagtctaagtgggttggaagttcaaatggagttaaatttttgtcatggatggaatggagtaaatgagcataaaatatagaaaatggtgatcacagagatttgaaatttaggctttggaaaga

SEQ ID NO: 124282 - DNA, 500 bp, Homo sapiens
gggtaatttggtttgtggactactacaaaatgagtattttgttgattgcatctccatagtagaatttaacatgctcctctgtcctctgtacttcctataaattggaaattagatatagaagcttgatctgattcaggttagattttcttttttcaatactattttataaatgatgtgtttttttcattaggaagcaaaaaatatcyagctatctctctttttatgacatagtcagtctttgttgcggaatgtctacactcatttcttcagtggagattgaaaatgatttaacttaaccccccttcctcaccaaagtcccagtaaacttcccagggcagacagacagaaaaaaaaatctcctaaagtgcataattctttaataccagacctccccaccccaccaaaaaaaaaaaaaaaaaaaaaaaaaacttcttgaattctacacctattggtccattatggctccaggaatgtaaaaaacctaatgccatgaatcactg

SEQ ID NO: 124283 - DNA, 573 bp, Homo sapiens
cattatttttaatgtcatgggtatacagtataactgattatatactctgtcctttggaatgccacaacccatcccaatttctacatttttttcatctcccaaaaaccagttttcacatcctgtggataatattgcccatactgagaccacagtgcaatctatatgccaggaaattcactatgtattttgtattcatatttataatattttgttaatagattatttttttagcatgtgactgggcatttctctaattataggtgaacataaaagttatcctacttatatgaagtagcttataaattctgtcttccaaaaggctatacagcaaataccattcttttggaccttcttttgatttttttcctgygcattccttcaccgtatgcacttctatatactttaaccatgagaaataagtagtgtcaaagtactgaaaggctaacactacatcataccatgtggctaaggtagtgtctgcaactgctatgggattttcaaatgtaaattgctttttatttttcttattaactacatacttctggaaccaggatgaaaaagatatgaagctat

SEQ ID NO: 124284 - DNA, 647 bp, Homo sapiens
tactgtgtgccattcatcatgccagattttggggagacaaagcttacagaatttggtctcttcttattgtaataacagttctattagcaatactccctgcaatcatttaaggtgtgaaccatagctttaaataaagttaaatattaaaggtgttcatatgttatgcaagccaaacatatgaacagagtaaacatatggaccgagtttartgtaatcaaatataacacaaacaggttcatctagttcattaaattctatctgtgcattcctttaacagatactggttgaacacctactatgaaccaggcacagtgctttgctgggggtacacagatgattgaaacactggtctccgcttcaaagagctaatgggagaggtagacccataagcagacaactatgactcaatgtgggagcagagtgcaacagtttggtaacctacccagtagtcactcccaaccctttctggcttccagagccctcttcccgttataaaagtgagaatgctttcctatctttccttgtaaccaggaaaagggcaggttaccaaatcctggtcagtctactggaaggattttagcaaagatttttcacctgaaaacggagaggaactcctatccctgaatctccttctgttatgggctgaa

SEQ ID NO: 124285 - DNA, 551 bp, Homo sapiens
ggattgcaggtgtgagccactgtgcctggccaagcattattctttctaatcctttcaggaagttttttcctcactctgaggaaatttcctcacgtacattcattgatctaaattcagctgagtactcaaaagaaaccggccctgtgcagatctctggagtcctctctatgcagcagtttcctttttgatactctggcctgtgaactccagccaccttgccytcctggactcttaattttgactcctcaactcggggaataccacaggactccacttgagttcccccttcctgtgccttggcctggaaactttgtccaggaagtaagctggagcaatgtagggctccctgcatttgttttccacttctcaggagtcgctgtccttcatttcctggtatccaatgtcttgagaacaattgtttcatatattttgtctattttttttagttgtttcagttgttttcaactgaaacaaccgaatccagttcctactactctatctgggctaaaaagaaaaattctgcttgccctttattttcaaactttaaccct

SEQ ID NO: 124286 - DNA, 603 bp, Homo sapiens
ctttgctattcacttttcctctttgtgccttaagtcttcctgtcataaatgaggagtcatatattgttattggggggtagcttctacttgtcagacattctgagctactgttacgacacacatcagggtacatccagggaaccctggatgattaaaaataaaaccaaacttctgcyttaggaaaggattttaaccattcatccaacacgtgtttatttcgcacttattacaataggcaaaatttatgaagctctttctctgtgtcaggaattatgctcaacattttagatagattacatttcatttaatcctcacaataatgctctgacatactacgagccacagagaaactagtaacatatctgagggcatgtggtaggccatgatggagccagcacatgcacccacaatggctcctcctgggcccatctctaacctctcagtactgcctccaaggtactgggctaggtctattaataaagaccacacagggctcacaaggataccaatgctgcccatgaactgcctcaaaggcaatccattcaccagtcttgaaactacatgtatatgacaagaaatcatggaaatagacattccagaatt

SEQ ID NO: 124287 - DNA, 553 bp, Homo sapiens
atatataaaatatcatgaaaatagtatgcaaaggaatgatgtttaaaaaacatcaacctgcataaaaatatacaaatatggactttgaagaactcatgagttgtttcaaaaataaaatgagataatgatgtgaaagtgatttgaaaattaaagtacatttttgttgttgttatcattattaataagaagtaagttaacttgactactkagagcagtggtgagaatggtacattgttgagatacaatgaaataatgagttaaagtttggttctcaatggcctttaaaatatgatttatttctgttgagtcaatgacccagaagaggtgggctattttataactacattttaaaaaataaaatagaattttaaaagacaaatacatcttagacaaatgcattttagttctttgcctctcacaatgtcccagtagttcttagaaataaatagctttgcttttagacaagttagaaaacaacaacttttatgacaaaagtgtttctcaatggaaaattaatctattctcccaaatagacactaatgcatacctgtct

SEQ ID NO: 124288 - DNA, 645 bp, Homo sapiens
gtatgacatcgtgccctctcaaagccctgattttctttctgtaaaacaagacaggacgctctccaaaggctttcccagttttaaagttccatcaaacttcagttgtgaagggagagaacagatgattgaagcgtcaaagcccaagmaactaagacagagtcaagcgattacaaagcagaccatgaatgttagctagtaaatagtccactcagctgtctgggtacaagtgctaagggatatttaattttggcatgcttttattttctcaggagaaaaatagcagaaggaagtgcacatgccattttattccattgaaactgccaatgtgctcaacttaggacttacatggggttagcaacgtaggggcacacaagtcagtactttgttaaactgctccccaggcagggaatgttgtgggttcaggtctaaagaatgtaacagtctcaaggactttggtgtaggagccacttatggtatccagttcactccagacttttgacactgcctgggccctcttcagcaaactcatctctcagcaggtgtggggcttggggacaaaaagttcagcctgaaagtggaaaaagagttccaaaacatgccgggaaggctgaggcctaagggctgaatatgtgtgtatctgtctat

SEQ ID NO: 124289 - DNA, 506 bp, Homo sapiens
cacgattgttccgaaatacaacccactgtgtgcctgtgctttagcagagcaggatgtggcccaagggtggtgacggggtagagccaagaygaattggaaagaggaaactgtagggcttattgagcaacctgtttgttgggaggctatgtaatatagtgtttaagtgcatgggttttgactcagactgtctataaaatcttcctgctctcacttaatagctgtggaaccttaggaaagtttcataacctctctaagttgcaccttctccaaatgcaaaatagagataatgacagtaccttcctcataaaggttttcttctgccaaattaaagaaggtcatcttctaaagtgcttggcttggcatcttcaaacttagaaaggcaccagaaatgttaggtgtgatgatgatgatagtagaggaaggtggaagggtggtggtttgagaaatggaactgagaatggctcctgattttggtgagtgggtggaaatcatgtcaatagagaatt

SEQ ID NO: 124290 - DNA, 617 bp, Homo sapiens
cttatccagactaatggtccccaactctgaccacattagactcacctggggaattaaaaaaaaaatacattgatgcctgggccccaccccagagattctgatagaattggtctggagtggacccagagcactaatattttcaaatgttcctcagctgagtctcacaggcagcttggttgagaacygttgcacctgactgtaaaagagggctctgagctgggaacttttttgctgtgaccttattgctctagcatttttatttcattttacatattcaacaaatttatgtttaagagggaaatatttttaaaatacttctttgggtatcttttctcccaataatccatacactcttctcttcaccttgcaacctcattatggctaaggcagagatttatcacccctgggaaggagaagctgggttctgccaagaacggtgatttgcaaccctagatgccctttagaatcacctggggagctataaaaaaattgccagtgcctggaatccacttcagactaattaaatcagaatttggggggatgggctgaaggattactactataaaagtacatcaggcttaatacttttttattatgcagctaacattgagaaccat

SEQ ID NO: 124291 - DNA, 593 bp, Homo sapiens
acttaaatgggaaaagcgaacttaaaaatctttggaggaaaatatgatgtaagagtacaggatttttgtttttttaaaaaagagatcaagtggagtacttatacatctgaatacattaaaatttaaaactcatgcataacaaaggacatcataaaccaagctaaaagacaaactactgtatatacttctgagaagatgaaatcgatgtatttttctctacccctcttgctaagtacaattacataccctggacattatacataaaacaagcataacgacgttctgaaaagtcaagaagacaaactgggtaaggaccttggaacccaagaaacatcatgatgatgagttccctagcttttcttttgcctcatatatcccagacttggagctgaggaagccagcagtcaggaaacaccaaagggtacagatcttaaaagcctgctctctctagccaaagaactaggaaagggacagcctaggaagacagaaaactttcagacaataaatgctctatctagccaaataccatagaaaaagcagtggatccatcccaacygatgtcagaaaaggcttagtggaaaacctagacttcc

SEQ ID NO: 124292 - DNA, 549 bp, Homo sapiens
tttcttaaaaccattatgagatttttttgtgtgatttttttaaagctcatcagctattgttagtgttaacatattttatgtgtggcccaagacaattcctcttcttccaacatggccaagggaagccaaaagattggacacccctgcattaaaccatagctttggggaggcaggggcaatgtttatcatcactgcggtattcctagtgcccagtccagtgactgtttcactccatgtacggtttgttgaaygaacaaattgcattgcatttaaaagagatcttaatgataatgaaattgggtcataggactgtttcttgtgttgcttatggtcttgtagttaattaacagttatattaaaactggaatgctacaaagaactctgattctgtctgaacaaactcaaggtatttgccaggttccctcttatcaatgagtaaggctgaagtctcaagtagttcctcaaagttttaaccaagctcttcctttttgtttgcctttatattgtttttcctttctctgaggttaattctctctccctccaccagac

SEQ ID NO: 124293 - DNA, 574 bp, Homo sapiens
gaaataatgctttcatttctcttaggtaaatacctaggcgtgaaagggctggatcatatgggaagtatgtctaactttttaagaaaccaccaaattattttccaaagtgtttgtatgattttacacttctatcagcagactaggggagttctaattgcttcacatctttgccaacacttgtggatttgtagagctatctcagtatgattttaattcgcatttccctaatgatgaataatgttgaacatcttttcatgtatatgtaagccatctcaaaattttctttgaggctgggcacagtggctcatgcctgtaatcccagcactttaggaggctgaagtgggaggatcccttgaagtcaggagttcaagaccagcttgggcaacatagagagaccccatctccacacacacacacacacaaatttaaaaattagccaagtgggcgctgarcacctgtagtcccagctactagggaggctgagggtggagaattgcttgagcccaagagttcgaggctgccctgagctatgatggtgccactgcaccccagcctgggagtgcggtgtgagacc

SEQ ID NO: 124294 - DNA, 574 bp, Homo sapiens
gaaataatgctttcatttctcttaggtaaatacctaggcgtgaaagggctggatcatatgggaagtatgtctaactttttaagaaaccaccaaattattttccaaagtgtttgtatgattttacacttctatcagcagactaggggagttctaattgcttcacatctttgccaacacttgtggatttgtagagctatctcagtatgattttaattcgcatttccctaatgatgaataatgttgaacatcttttcatgtatatgtaagccatctcaaaattttctttgaggctgggcacagtggctcatgcctgtaatcccagcactttaggaggctgaagtgggaggatcccttgaagtcaggagttcaagaccagcttgggcaacatagagagaccccatctccacacacacacacacacaaatttaaaaattagccaagtgggcgctgagcacctgtagtcccagctactagggaggctgagggtggagaattgcttgagcccaagagttygaggctgccctgagctatgatggtgccactgcaccccagcctgggagtgcggtgtgagacc

SEQ ID NO: 124295 - DNA, 518 bp, Homo sapiens
tgttcagctgagcaactgttcaaaaacttccttgggatggtgggcctcttcccastcaccgcttactgacacttggccattggtaggtcgcaagtagtcttgcttttcaattagctgagtttttgttactatttcagttcttttcagggtgcctcaatatagcttccaggaacagaacaaaaccttgagtttaaatacagtgtatacgacttaacttatttgtgtaaggaaacatggagcaaacagtgcacactgacaattaattagtaggttccattgcaatgcattgctctgcccatggtctgagatggtaaactcagtaatttactgtacattgctaaaaacaccaaagacattgatttgtctccacatctgagagtcaaatatggttagttccagagacatagactctacctgcccaaatggctgcaccagtttccattcctactaccacattacaatatttatcatgttgagtcttgttcagtattgttcagtggagtcttaggcttaattac

SEQ ID NO: 124296 - DNA, 518 bp, Homo sapiens
tgttcagctgagcaactgttcaaaaacttccttgggatggtgggcctcttcccactcaccgcttactgacacttggccattggtaggtcgcaagtagtcttgcttttcaattagctgagtttttgttactatttcagttcttttcagggtgcctcaatatagcttccaggaacagaacaaaaccttgagtttaaatacagtgtatacgacttaacttatttgtgtaaggaaacatggagcaaacagtgcacactgacaattaattagtaggttccattgcaatgcattgctctgcccatggtctgagatggtaaactcagtaatttactgtacattgctawaaacaccaaagacattgatttgtctccacatctgagagtcaaatatggttagttccagagacatagactctacctgcccaaatggctgcaccagtttccattcctactaccacattacaatatttatcatgttgagtcttgttcagtattgttcagtggagtcttaggcttaattac

SEQ ID NO: 124297 - DNA, 524 bp, Homo sapiens
ctgtggatttatttctgggttctctattctaatccattggtccatgtgtctgtttttatgccagtaccatgctgttttagtactccagctttgctcattctgttcagcattgctttggattttcaagatctcttatggctccatatgaattttagaattttttttctctttctatgaagagtatattgatattgacagggattgcattgaatctgtagattccattcggtagtayggacattttaacaatattaattcttaagcccgtgagcatgaggtatcttttcatttttttgtgtgttctcttcagtttctttcatcagtgttctatggtcttaattgtaggtctttcacttctttggttagatttattataggtttttttttttggtcattgtaaatggtatttctttcttgatttttcttttaggttgtctgctattgttgtatataaatgctactgattttgtgtgctgattttataacctgcaatttactgaatttatcagttctaacacagtttt

SEQ ID NO: 124298 - DNA, 588 bp, Homo sapiens
ctgaaaaaaaatttttgtgaaaaaatgtattttccatttagccacaaactttaccatttttggtcctttttctttttgtagagacaagttttcaaatgatattttctttcagcctaaagatctttctttaatattgcttatagtataggtttggtaggaatgaatattctcagcttttgtttgtttgaaatgtctttattttccttcacttaaaaaatgtttgctggatataaatttctaggttgrccaatttatttttctttcagcaaatttcagacactattatactgtcttatgatttgcagggaagattccattccttgcctcttccagctattggtggctgctggcattccatagcttttcatggtatggtcaagatgacttccctgctgtcctggtttaggaagcgaatatcttgtaaagctattatttagattaccacaacctatttcttttcttcaagtaaaatatttcctgtcctttcagcttcacagaatgtcagttgaacacacaaaactcagaagttagaaaacagcttcatccctgaggtgatttatgaggacaaacagtaggaaagaaagttgg

SEQ ID NO: 124299 - DNA, 551 bp, Homo sapiens
ttgactatgatctctaaggtactttccagctctgttttggtaatatgtttaatatcaattccattccaactgttttctttctcgacatacattagaataaaaacagcagaatacatgactctttcctttatatacttgttcaatacatctttattaagaacataccatrtcccatgcattttttgaaacactaaaaatatattaatgttcaaagctgatgaagtatcccaccctcatggagcttatattttagtgggagaaaatacataaacaaacaaataaataaaatatgtaatatataagataaattctatcaagaaaaggaaagcaggaaagggatggagattctatggggtagaaacaatttttaataggctcgttaaagaagttctccttgagaaagtaacatttgaaccatgcgtatagttataggtattgtgggatgatctggaaatcctcagctacttgaagactgacataagtcagtaaacataaaagtgagattttagcgactgttcacaagaaagatcacggcggtgagcctgtgagca

SEQ ID NO: 124300 - DNA, 551 bp, Homo sapiens
ttgactatgatctctaaggtactttccagctctgttttggtaatatgtttaatatcaattccattccaactgttttctttctcgacatacattagaataaaaacagcagaatacatgactctttcctttatatacttgttcaatacatctttattaagaacataccatatcccatgcattttttgaaacactaaaaatatattaatgttcaaagctgatgaagtatcccaccctcatggagcttatattttagtgggagaaaatacataaacaaacaaataaataaaatatgtaatatataagataaattctatcaagaaaaggaaagcaggaaagggatggagattctatggggtagaaacaatttttaataggctcgttaaagaagttctccttgagaaagtaacatttgaaccatgygtatagttataggtattgtgggatgatctggaaatcctcagctacttgaagactgacataagtcagtaaacataaaagtgagattttagcgactgttcacaagaaagatcacggcggtgagcctgtgagca

SEQ ID NO: 124301 - DNA, 527 bp, Homo sapiens
gtggactcctgacctgacattttttattaaccaagatagtcgtcactttcttcctctccctcttcttacttactccctatcccccaggttctccaaagttttctttgtgttggttgaataaagacaagtctgtgcctttttttcttcctgtagctaaacactttcattttaacacaagcaagtgtaaatatctgcttaaaaggtgcaaagtgaatgcatttcaagttaaatcttcctccaaagtgctaactcccaagaaaactaaactgtaacaggaactttaatatcctatgtgtactgctcactcctaaataatattccgttttcccaaacttgccagcagaaaatgtgtttaatgcaaatagaggttgaagtgatcagcaagtagctagctagcagttccccgacacccgacagttgcaaactsgcagcttgtgagatgaaaacaccttgcagacatgttcaattttctttaggtttgaataagttgtatttattttgaaaattgagaagtttattgagccagt

SEQ ID NO: 124302 - DNA, 444 bp, Homo sapiens
aatacagcaaaaaaattgaaagcttgaagtaatttttaaatataatcaagagactgtcaatttgtatgtatgtcttaagaaacaatagagcagaagcaatttaaaaaaacatgaggtcctgttccatcattttccacttggtttactgcccaaagcagcaagttctttatgtaattgaagaaaaacatrtatgtacatgaaaacgcacaacttataggtgtacagggtgcatttctgtaaagtgagcccttttatgtagccactgcctgcatcaagctgcagagatgtgatgtccaatgcatgtggttgtttagcatttaccatgcagttaccaaaactggctatttttatttattgtataacttttaagcatacttgaaacaactttagcatgtgaatttactttttatctataaaatttataaaatctaagtacagatcaag

SEQ ID NO: 124303 - DNA, 324 bp, Homo sapiens
atatgggccagatttatgtctcctggaaacaataataatagtaacaccaaatatcactgatcccacattmccataatagatataataataatgaaaaagttcaaaatattgtgaaaattaccaaagtgcatcagagagagaaagtgaacacattctattgaaaaaaatagtgtcaatagacttgtacagttcagggttgccaccaaccttcaatttgtagaaaacacaatatctgcaaagcgcaataaagtgaagcacaataaaatgaggtattgctgtgtttgttacttgaatgagacagtattcaccatcaattttattcct

SEQ ID NO: 124304 - DNA, 324 bp, Homo sapiens
atatgggccagatttatgtctcctggaaacaataataatagtaacaccaaatatcactgatcccacattaccataatagatataataataatgaaaaagttcaaaatattgtgaaaattaccaaagtgcatcagagagagaaagtgaacacattctattgaaaaaaatagtgtcaatagacttgtacagttcagggttgccaccaaccttcaatttgtagaaaacacaatatctgcaaagygcaataaagtgaagcacaataaaatgaggtattgctgtgtttgttacttgaatgagacagtattcaccatcaattttattcct

SEQ ID NO: 124305 - DNA, 621 bp, Homo sapiens
aaactagagttcatcacatagaaagctatggctattttgaatgacttcataaatacatacagtcttatatgcacacattttaaaaataaatgttactgtcatgcacgaaaattactgtataacttcaaatatgtttttgccacagactggtacaagacttcctgatggggagagcaacctgaacagtcagctcagcttgcaatgtgctcctctggaggcaatcggctctgcctcactgtgactcttttcccaaactatgttttatggaactctgggccaaactattagagcttctacaaaaacagtaagatgtcagtgattgaacaattttagtaatagagttaacgtactaaactaggtttcttaattgcaggaattttcagagacttcagtattttaataatattgtgatttatcatgtaggtatacatgtacgtgtagaatttttcaaaagtttttaaaaccagttctccatttattttctcagaaaatcaatcagctattgaacaactatttttcacaaaacacaattcaagctactattttgctttaaccccatactagtttcttgtggctactgtcacaactaycacaaattttgtggttaaaataacataaact

SEQ ID NO: 124306 - DNA, 547 bp, Homo sapiens
ataatataaaggaactatgttaatagactggtaataattttttaagttggtatttgacacaaaataatactaggacaaggaaataaaataaattgacctttgttgatgcttaagttgagagggatcaaagtcatattattttttttacctttgaatatgtttgaaatttttcataatgtaaagtttttaaaggacaaaaaattaagtttctttgtttcccaaccatcttacaccagaaatttatcattctgaatttctgattgtcctargaaaaaaaattttctgacatccttgtaaaacccattatcagtttatctatgttttagaattatcagaggacatcgtttatttaatatttggtctcaacacttaagttcagacatatttaaaaccaactttaataaaataaggcagaaaaagtgtcagaaagtactaacaataattctgtctggacagtaacaacaaaaaccagaatgtttcctgctaacccttgagggctttgctatcacatactctaagtaatagtcattccatagaagaggcccac

SEQ ID NO: 124307 - DNA, 547 bp, Homo sapiens
ataatataaaggaactatgttaatagactggtaataattttttaagttggtatttgacacaaaataatactaggacaaggaaataaaataaattgacctttgttgatgcttaagttgagagggatcaaagtcatattattttttttacctttgaatatgtttgaaatttttcataatgtaaagtttttaaaggacaaaaaattaagtttctttgtttcccaaccatcttacaccagaaatttatcattctgaatttctgattgtcctaggaaaaaaaattttctgacatccttgtaaaacccattatcagtttatctatgttttagaattatcagaggacatcgtttatttaatatttggtctcaacacttaagttcagacatatttaaaaccaactttaataaaataaggcagaaaaagtgtcagaaagtactaacaataattctgtctggacagtaacaacaaaaaccagaatgtttcctgctaacccttgagggctttgctatcayatactctaagtaatagtcattccatagaagaggcccac

SEQ ID NO: 124308 - DNA, 608 bp, Homo sapiens
cagactaaatctccaagaaattaaccttcaggggaagttcctgaccaggaagttggaattaggaggctatcactgggactccrgacatcaatttcatattgtcgttaagtatgaccaagtatgatctggggatcaggaagacactgcctctgtaacccgaaatgactctcagcattgtcaaagccagtgattgtggactgggaagcttctgcaaattccccaataactttattcctgcaaatgagagggaaaaatatgaaagtgtagcaagattggctctgtctcatcttttgcctttcagatctgattggagtatttttatttggtggaaactgattcaccttcaaatctcttgatattttccaaagtctagaagcgtagacatatatatatatattagacaaatcttaatgacaaacctcatgctgtgctctgaattttccctctaacaatgcaggctttgtcagtaagtcacgtttgtctccctagcactcagctattctagggtgaattctcatgttccatagaagttgacttgaaagagtttggcagatcatgtttcctaaaatggcacaacaataactcccattccacatgccctattgcaa

SEQ ID NO: 124309 - DNA, 592 bp, Homo sapiens
ttgttctcttataaaatcatttagctaatttccgtaatccctgcatttgttgaaaattgaaggtacatctggagtttccttattttaaaaaatttgaaatgaacactttatagatattcactgagattcatattgttttacataaggaaacacaaaatatcctattgcctatttttagagaagctaagattcaattgtggttcagaagacaacagcttcttttttcctttttgaaattttccatcaaggagtcattcaaaaatttcaattattacttattgtttccgaaataattatttctgaagaattgccaaatgtagattttgaaatatttttactttccttgtattttggctttcatgatacatattygttcttagctttcttcaaatttagtttttcttctgaaactaaaagaatatgtttttctaattgtttgctaatatttgtcagttttcactttacgtcctcctgctgtctggctaaaaagattaaaatttgtttgcattctaatcagtgtttttacaaagcttggtatttctctatagaactttaaatcatctttttactcttttaatttgcttggtggaca

SEQ ID NO: 124310 - DNA, 541 bp, Homo sapiens
ggcggaggttgcagtgagccgagatcgcgccactgcactccagcctgggcggcagagtgagactccgtctcaaaaaacaaaaaagtctcaattaaattcatcagtggggtgaaggcactggaggtctgcggctgcgtgcacacagtgccttccactgctagcctgcttgggatgctgacaccagcagaacttcaaagctgtctagagagcaattttggtttggagtcagtctgctcttcctgcatgaatcccatttcaaaaccaaaactttcacacaggaaaccaaacatttatattctacatttttgttccttttattgcattttgggggagcattacctcactttatgtcaatttatatagtacattaaatgctgtaaattaccataaaatgaaacaacacatcaaacagtgatattggaacaataaatcattactatttcctactgcaaacagatgttcttatttttaggcccatgycaacattcattttgttcttccagattgtagagccaaactttaaattttctcgttatcaaaa

SEQ ID NO: 124311 - DNA, 580 bp, Homo sapiens
ttttcacagtaatagtgctctgtctttcactgttaggaatcaccatttgatctttattactcttcttccattgaaatcraacagccaaattccacagtgcttctcgtccatgatctcccatctacacagagtaggataatgtggtaataaagtagctgggctggttccacataatctacccattccaaaattctgagccaggaaacttctggtatttcaaacctgtctctttagagaaccacatacttcaggtttcaattaaccagcctctcaggtactggacacagactctcaggtactggacactctcaggtactggacacagtatattaattctcaaatctagggtcagtgtaagaatagctaatctacttggcctaatctacttttaaagttgctctgctccatttaataactttatggctaatctgttatgcagagttctgatacttcaacttagcaagattttgataatactacagttcaacctctggccataattattcacttcattcccatgtttttatccctatcacagtaacccctcaaatctcctccacttgcaaaggcaggcttagaa

SEQ ID NO: 124312 - DNA, 676 bp, Homo sapiens
cctaactgcttccttgagggtcaaaaggaggactggtgtgggtggaacagtacagtcctctggtaagcagcatctgccacgtggggaggcaggggacgccttggctgccatgccacttgattagctttactctcagaccactgggtgtagggggtcagccctgtaggtggagactggctgatgttaaggactgmagtctattcaaggtatcttcaatatccatatacttccccagtcacagagtagaaggaaggatcagattttataaagcaaaaaatccggcctacaacaaagcagtaatcacgttctaggccagaactttgtaatattgacattacttctctgagtaactaagttattatctttaaaatgattggttactttcttttaggcatgaatcctcactatttaaaaactcaaagcaaaagaatcgctaagtaactcagaccctaatggctttctcaaagatcacattctcatttcatattgtaatttttttgatgagacagtgtttttatatttatactactgaaccaattttattttaaaaataactaatttgaaattatagcatcatgaaatagaaattgagcacataaacacatctacccagcgtcttccttattctaagtgataatttctttgtggccccaatttctagtataacatgcagaat

SEQ ID NO: 124313 - DNA, 676 bp, Homo sapiens
cctaactgcttccttgagggtcaaaaggaggactggtgtgggtggaacagtacagtcctctggtaagcagcatctgccacgtggggaggcaggggacgccttggctgccatgccacttgattagctttactctcagaccactgggtgtagggggtcagccctgtaggtggagactggctgatgttaaggactgaagtctattcaaggtatcttcaatatccatatacttccccagtcacagagtagaaggaaggatcagattttataaagcaaaaaatccggcctacaacaaagcagtaatcaygttctaggccagaactttgtaatattgacattacttctctgagtaactaagttattatctttaaaatgattggttactttcttttaggcatgaatcctcactatttaaaaactcaaagcaaaagaatcgctaagtaactcagaccctaatggctttctcaaagatcacattctcatttcatattgtaatttttttgatgagacagtgtttttatatttatactactgaaccaattttattttaaaaataactaatttgaaattatagcatcatgaaatagaaattgagcacataaacacatctacccagcgtcttccttattctaagtgataatttctttgtggccccaatttctagtataacatgcagaat

SEQ ID NO: 124314 - DNA, 582 bp, Homo sapiens
cgtacaactgtctgatcttcgacaaagctgacaaaaataagcaatggggaaaagactacctattcaataaatggtactgggataactggctagtcacatgcagaagattgaaactggaccccttccttataccacatataaatatccactcaagatggataacagacttaaatgtaaaatcctgaactataaaaattccggaagacaacctaggaaataccattctggccatagtaataggcaaatatttcatgatgaagatgccaaaagcaattgcaacaaaagcaaaaactgacaaatgggatctaattaaagagctctagcacagcaaaagaaactatcaacagagtaaacagacgacatacagaatgggaggacatttttgcaaactatgcatcagatagaagtctgatatccggcatctatatggagcttaaatttacaagataaaaaacaatcctattaaaaagtggacaaaggacgtgaacagacatttttcaaaaaagttatatgtgcrgccaacaagcataagaaaaactcaatatcgctgatctttggagaaattcaaaaccacaatgagat

SEQ ID NO: 124315 - DNA, 541 bp, Homo sapiens
atttacattcccactagcagtgtataagtgttcccttcgctctgcaaccttgtcagcatgttattttttgactttttaatgacagccattctcactagcataagatggtgtctcattgtggttttgatttgcatttcctagatgattagtgaggtggagcattttttcatatttttgttggccgtatatatgtcttttgagaagtatgtttatgtcctttactcatttttcagagttgttttttgcttgttgattyatttaatttccttatagattctggatattagatctgtgtcagatgctgatatggtttggctatgtccccaccaaaatctcaacttaaattgtatctcccagaattctgaagtgttgtgggagggacccagggggaggtaattgaatcatggatgctgtctttcccatgttattcttgtgatagtgaataagtctcacaggatctgctgggtttatcaagggtttctgcttttgcttcctcctcatttttttcttgctgccatcacgtaaggagtgtctttcacct

SEQ ID NO: 124316 - DNA, 554 bp, Homo sapiens
gaactaatttacattcccactagcagtgtataagtgttcccttcgctctgcaaccttgtcagcatgttattttttgactttttaatgacagccattctcactagcataagatggtgtctcattgtggttttgatttgcatttcctagatgattagtgaggtggagcattttttcatatttttgttggccgtatatatgtcttttgagaagtatgtttatgtcctttactcatttttcagagttgttttttgcttgttgattcrtttaatttccttatagattctggatattagatctgtgtcagatgctgatatggtttggctatgtccccaccaaaatctcaacttaaattgtatctcccagaattctgaagtgttgtgggagggacccagggggaggtaattgaatcatggatgctgtctttcccatgttattcttgtgatagtgaataagtctcacaggatctgctgggtttatcaagggtttctgcttttgcttcctcctcatttttttcttgctgccatcacgtaaggagtgtctttcacctcccgcca

SEQ ID NO: 124317 - DNA, 366 bp, Homo sapiens
cacttgcactgcaactttaaactggaaaaaaaatcatactttgcaaaaaaactcctatagagatagctatytggattagctaatgtgagtagacagattgggtaatagataatccaatgtttgtcctgaaaataaatagttggttggttaaatgattgcctagaatctgcttggaatacatgtgttaatttcaaccgggaatcttgatcatcataatgagaaagcagatttttagaaaaactgtacaatcagaaagcaaaacaaaattttcaagacaattctggcctaagaaaattaccttagaaacagacaatttactataagaaaattatgttagagaaacttggagtcttttttttctttctt

SEQ ID NO: 124318 - DNA, 533 bp, Homo sapiens
ttttgggaggccaaggtgggaggatcactctagcccagaaattcaagcccagcctaggcaacagagggagaccccatctctacaaaaaattttttaaaaaatcacccaggcatggtggtgtgcgtgtgtggtcacagctccttgggaaactgaggtgggaagattgttgagcccagacaatgtaggctgcagtgagctgtgatcccaacactgcactccagcctgcrgagcttagctagagcctatcaatcaatcaatcaaatcaatggatgctaaatgtttaaaagctatataaccttgttgctccaagcattgataatttaggagttcttaatacctccttccatattcaagtcattaataagttatttcgtattctttcccaagtctctctgaatttttttcacctttctctggttccattattgtcccctaagccccaaatatgccattatctctagcctggtctactgcagcattctcctaattagcttctcctatctacctttgcccctttccaatccattctccac

SEQ ID NO: 124319 - DNA, 533 bp, Homo sapiens
ttttgggaggccaaggtgggaggatcactctagcccagaaattcaagcccagcctaggcaacagagggagaccccatctctacaaaaaattttttaaaaaatcacccaggcatggtggtgtgcgtgtgtggtcacagctccttgggaaactgaggtgggaagattgttgagcccagacaatgtaggctgcagtgagctgtgatcccaacactgcactccagcctgcagagcttagctagagcctatcaatcaatcaatcaaatcaatggatgctaaatgtttaaaagctatataaccttgttgctccaagcattgataatttaggagttcttaatacctccttccatattcaagtcattaataagttatttcrtattctttcccaagtctctctgaatttttttcacctttctctggttccattattgtcccctaagccccaaatatgccattatctctagcctggtctactgcagcattctcctaattagcttctcctatctacctttgcccctttccaatccattctccac

SEQ ID NO: 124320 - DNA, 599 bp, Homo sapiens
tttccaatatagtcttcctttggatgtaacagggctttactcatattcaagttactttttttttggtgtattctctttattctgatcattctgatcatttcctttatgtatttcaaatactgatattagaccttagaagctttaattatgtttatgtgcatagtattatcttccccagaatcttgtctttgaatctgttcatttacaactgtgtccttagtgttacatgtaacaatattgatcctcacgcttgtgccttagtaacactggtggaacattccttgtgaataatggctgcattcattttctattgctgcagtaacaaatgaccagaagcttagtggtttaaaacaacacaaatttattttctcagagttctggaagttggaagtctgaaatgtttctcactgggcttaaatcaaggtgccagcagggcttgtttttccctggaggttctgaagggaggatccayttttttttgcctctttttggcttctagtgaggtctcatctttggcttgtggcccttttctccatcctcaaagcacttcactgcattcttcgcttttgccaccaccccatctttttctctgctgctag

SEQ ID NO: 124321 - DNA, 572 bp, Homo sapiens
atccataataatctccccaattcaagatccttaatcacatctgcaaagtctctaaggtaacatttctacaggttctggggaatagggcatgggcatttgggggaccattatttagtctaccataatgcccatatggttgatatcttcacgatcactcttttggagagtcacagaaaacttgcaacatggccatggttcaaacccctagccaatataaactaggctcacataacactttcttgagatcttagtgataagggtccccatctttctagtgatgagccagtaagctcatcctcctcagcatctcacctgaccacacacagatgcagcctcacctctgccccagaaaccagtgtagtgctgaatgagagcacctggtttttaaaatcaaatactttacaaatgacaagagcaaaaattgcaaagtaaaaacagttcatacaggttacccattaggtaatagcaaaacatactgtttgggctctgccttaactagggtagaaaggaggaaaaacagaactgagatcttaagatgccacyttctagttaatttcaaaaatattaggctc

SEQ ID NO: 124322 - DNA, 576 bp, Homo sapiens
tctgcctttcctccactataatatttatattattaatggaaacattatctgaagccagtctcatgcccatttcctgaggcactactctgggcatcttcctgtggttttaatacattaatgaccatctttattcttttttttatgagaatttgaccaaaattgagcccttgtgacaatattcacatctgagctaatttgacttaattttccaagttggcttcatgaagcacagtagcaaagtgctttattaaaatctggataatcaaattagcctattcatctactaaccgtgtgcttgtatcacatgattaaattcattttttatagtaaactcctatcaattataccagagtagatgaagtcaatgatcataaacattttgcttccctrtgttttccatgctaggtagaattttaaggttagctttgggcatgtagcctaaaatacaaactgcaaatttaacctctgttgaggtgatatttatattgaagggctcacagtagaaatctagaatattagaaacattattttaaaaggtacctctctgctttaaaagaaaaggtctttcaaactcac

SEQ ID NO: 124323 - DNA, 424 bp, Homo sapiens
gaattctcacttggaatgagaatggggctrttctgatgtcagtctgctcaacagggagttctcctgaaagtacagtaaagctctcaagtgctatttagacatttgtgtcttcacatgacttagtcgggacagcagacaagagctgtggctccaactgcaagatctgtttctggaagctcctcaccaagcaacagcagaaagtaatcaaacaatggcccaacaatctcactggcacctgtaggagaaaaatgaccctggagtgaagccagatgcaatttttatattcatattgttgttgtggaatgttcctagcaaatgagaaaaccaagtccccccagagccccgcactcaagggctgtagacatagaacttgaggattaagctgctgactgtgtttaaaaggaaaagattacaaagcggaata

SEQ ID NO: 124324 - DNA, 426 bp, Homo sapiens
ttgaattctcacttggaatgagaatggggctattctgatgtcagtctgctcaacagggagttctcctgaaagtacagtaaagctctcaagtgctatttagacatttgtgtcttcacatgacttagtcgggacagcagacaagagctgtggctccaactgcaagatctgtttctggaagctcctcaccaagcaacagcagaaagtaatcaaacaatggcccaacaatctcactggcacctgtaggagaaaaatraccctggagtgaagccagatgcaatttttatattcatattgttgttgtggaatgttcctagcaaatgagaaaaccaagtccccccagagccccgcactcaagggctgtagacatagaacttgaggattaagctgctgactgtgtttaaaaggaaaagattacaaagcggaata

SEQ ID NO: 124325 - DNA, 619 bp, Homo sapiens
gttaataaatatgaaaaattatactataagacagcataatcctataataattgtgagatggtagattcataaaacttgctagccttctacagaatgctggtacacaacagacaattcacagttgtctacttcctagttctctctgttaaaaaaaggttggtaatggttaaaaattataatccatatttgtaaaggaaactattacaattaataagggtgaggtgaaacaactttgtttgcaaactmtgttttcattaagggaaaagagagtaattttgttctaaagtaaaatgactggttgttccagaatgagaaagaaacaaatataggacaaaacttgaataactataaaaagttgtaaaaggtttgtgagaaatattgcaaaaggaatcttatctcatgtggccaaagctcactaagattggattaatttatttataaggtttcttttttaatgcattttagtctctgttaaaatgacaaagttttcttggattattgatctgctcttagtaacatattttaaaaaggttttctttatcttttgagtaatccacctaggaaacaaagattttatgtcttctcagaataatttcctgtcctaacctttaccatgtcc

SEQ ID NO: 124326 - DNA, 543 bp, Homo sapiens
cactggactagtgggataaagtaataattagactctgatagacatggaaatctagtatatgataatgacggcatttcaagtttaaagatggacttttttttcttttttggagacagagtctcactctatcacacaggttggagtgtagtggcgtgatctcggctcactgcaacctctgcctctcaggttcaagcaattctcctgcctcagcctcccaaatagctgggattacgggcgcgtgccaccacgcctggctaatttttgtatttttaatagagacggggtttctccatatggtcttgaactcctgacctcaggtgatctacctgcctcagcctcygaaagtgctgggattacaggtgtgagccgctgcacctggcctaaggatggacttttaagtaaatgatgttcagataacaacttagaaaagataaatttagattcatatctcataccacacaagaataaacttcacataaattagggaactaagtgttaaaaagtgaaatcatacaaacactacaggaaaacataggtgaattc

SEQ ID NO: 124327 - DNA, 592 bp, Homo sapiens
taaaacacatttaaaaatttctgaacatttgttcaggcaatatattaatattgtgaaatcaaatgtttaaagagtcaacactggaaagttcatggatgactggtataagaatcagagaagtcagtgtattgaacagaaactctgccatgtaaaagtgaacactatgagtttttaaaacttacacaaaatatattagcgatagatgtgttggcttyctgcagagatgttcctggagacaatcctagcacagaagaagcctcttcaccctcctggctgactttctgtgttctcaccataaaactctgccctccaacctgttttcattttagttcctctgcagtgtttggtgggatgtatcaaaagattgttataaatacctaagaattgtaacacagcatagtcaaatctcaattttgaatacaaagttaataaaatatatgtaatataaaataaatttatataattacatataatatatgttacaacgttgtatgaataacatacactattatttgtaatatgaaaatgatattacatataattcagtaattaccacaaatctgtcagatgagttttattatttaaacaatac

SEQ ID NO: 124328 - DNA, 592 bp, Homo sapiens
taaaacacatttaaaaatttctgaacatttgttcaggcaatatattaatattgtgaaatcaaatgtttaaagagtcaacactggaaagttcatggatgactggtataagaatcagagaagtcagtgtattgaacagaaactctgccatgtaaaagtgaacactatgagtttttaaaacttacacaaaatatattagcgatagatgtgttggcttcctgcagagatgttcctggagacaatcctagcacagaagaagcctcttcaccctcctggctgactttctgtgttctcaccataaaactctgccctccaacctgttttcattttagttcctctgcagtgtttggtgggatgtatcaaaagattgttataaatacctaagaattgtaacacagcatagtcaaatctcaattttgaatacaaagttaataaaatatatgtaatataaaataaatttatataattacatataatatatgttacaacgttgtatgaataacatacackattatttgtaatatgaaaatgatattacatataattcagtaattaccacaaatctgtcagatgagttttattatttaaacaatac

SEQ ID NO: 124329 - DNA, 670 bp, Homo sapiens
tcttttaagcagatagagaaggttgaatcaaaaatagtatcaggtgctggatgtggtggctcacaccagtaatcccagcactctgggaggccgaggtgggtggatcaccctgagatcaggagtttgagaccagcctggccaagatgatgaaacctcgtctctactaaaaatacaaaaattagctgggcatggtggcgggcacctgtgatcccagctactcgggaggctgagggaggaaaatcgcttgaacccggaaggtggaagttgtagtgagcagagtgcatggagtgccactgcaatccagcctgggagacagagtgagactccgtctcaaataataataataataataacaatatcaggcattttaatggatgtactattttttaaatactatgtagtgtttatacttgcatttaataagtgatgagattgaatctttgagatttgaaatgactgggtaaattcatagagcttgttagtggcagtaatcatcatattaaaacaagtcttaacactgctattccttctgtactataacttcttaaggttatcattacatttacctcakttgtagacaatgtttcctccaccctgaaattcggaaagctttctactaaaagaagagattcttgtctattctgagatatccaattattttccaaggaaa

SEQ ID NO: 124330 - DNA, 644 bp, Homo sapiens
caaatacagccctttatgggggaaaataattgattgccattgtatttggcttatgaataaatgcatttttgattttataattgaattgtgacttggcttctattatattgaaataaaaaaattcaatgggaagttcccttcatccactgaatttattcgtacttctacataacagcttctccctcatcccatttttttcacctaaatgaacagtattgtttggcccaaacatgtttttctgctttggtgtcattggtgcacagtattgacagaagggtatcaaagataaggctgtgtgggaaaatgatccgttggcggattatcagtaggcctgtgcctgtgaacctgtccaggaatgtatcacaggagccatttaagcagagctatcccagatatgctagaaaataaatgttttgtaatctgtaaaacacagattaaaacttttttcccacgttgagkcactaacaccccaacacctactcccaaataacattttatttctagtcaaaaatttgtcagtggaggtacatcctgtctttatgtactagtcttatgatgtgaaagaaactggaatagaatagttcgctgtttttgaactattgctgtcagccaacaacagactgacagcagtgtgataaacatga

SEQ ID NO: 124331 - DNA, 615 bp, Homo sapiens
taaagtatagtttgtgagcaaacattgaaacatttgcttttgctctttacctgatattttcataattcaaaagcctttgtaagtattcttatttttatgtcaatgtagttatttgcacaagtttaataagaagccrttctccttgtaacaagacagaattggaaacactggttatattaccaaggttttgactggaatgaagtattttcaggtatgactaaacagctttaaaaaactaaggttgactttatgggtgcaattatgtcccccatggaaaaacttgcctgaggtttcccagcttcagaggtgagtaaagaatgtcacttcctcacaagcccgagaagcataggatatttggagaaccttgacaagaaacaaattcacccaattctataggtgttacaaatatagaccaatgacaagtctttggtttgacttcctggcctcaagaggttttatacaagtccaatctgagattgcttgtcaaaagttcctgcaaagcaaacttaaaagagcctatataaacagtcactagtcttgctgcacttacataaatagtagttcaagttcattgagactaaacttattttaaaaacaaattagtcttaatttgat

SEQ ID NO: 124332 - DNA, 615 bp, Homo sapiens
taaagtatagtttgtgagcaaacattgaaacatttgcttttgctctttacctgatattttcataattcaaaagcctttgtaagtattcttatttttatgtcaatgtagttatttgcacaagtttaataagaagccgttctccttgtaacaagacagaattggaaacactggttatattaccaaggttttgactggaatgaagtattttcaggtatgactaaacagctttaaaaaactaaggttgactttatgggtgcaattatgtcccccatggaaaaacttgcctgaggtttcccagcttcagaggtgagtaaagaatgtcacttcctcacaagcccgagaagcataggatatttggagaaccttgacaagaaacaaattcacccaattctataggtgttacaaatatagaccaatgacaagtctttggtttgacttcctggcctcaagaggttttatacaagtccaatctgagattgcttgtcaaaagttcctgcaaagcaaacttaaaagagcctatataaacagtcactagtcttgctgcacttacataaatagtagttcaagttcattgagactaaacttattttamaaacaaattagtcttaatttgat

SEQ ID NO: 124333 - DNA, 605 bp, Homo sapiens
atggtttattgtcttttggaattcttagtctccattttcttaaaaactatatgaaataagaggatctgctatggtttgatgactgtatatgtgtgtayatatgggaatataatcatctaaccaataaaatttttcactaggtcagcagcttctgtttagacaggaagaaattatctcaacaataggaagtaattactgctgggagtgtgtgtctctgtgtgtgtgtgggtgcatgtgcatgtgtgtgtacacattaaatggctatactacagtcaagctttcttaccatgggactcattgtcttcaataatagttggaagcattggatataagaatcaattatagaactggtttattcccttgttctatattcatgtaaaatgaaagcaacataacccaaatatcctattatatagagataggatagcctgatttatttagtttcttttcctaattctgaaatttgtgtgaaaaaatcagaaaaattatgcaaataattcacttcatgataaatcttttgaaaggatactctgatataggaacaaaattgactctatatacagtttttacttacaaaaattgaaagcaaaataataaatacacaa

SEQ ID NO: 124334 - DNA, 559 bp, Homo sapiens
gctgagaggagacagcctggaaaacagggaagcatggagatggtaggagtcttgcagaagacaggggctgagctacatcacaggaagatgttgtgtgtgggaaaacaaggaattactgatggctgtgtggttgaagggcctgccaccacaaagatgcctaatgattcattttccgccgtttgcattctgtttcaacaagtgctctccatagcacaaaagtttcagtaaagtctgccatacataaatgcctgggcggtgtgttgagtggaatcaatgaaaagtcaccccagttggcacagagcagacatgaggggagagctgtggctgggccatgagggggagttcagcagagcagtaacttggagtcagtggtgacagacatgagcctacgacctgggaaattctctgaaatcctggcaaggacacagaggtcccccatgrctgtgacttagaaaggtcaagccaattttatgggagacctcagctgacatctgggttacaccagtattaatttatccatcttcactaagaatggctggctcagggatcggtcacacgg

SEQ ID NO: 124335 - DNA, 534 bp, Homo sapiens
ctattttctttttttcattatgcaaaacaaataactaagaatatggtcaaaccccgtctactgaaaatacaaaaacaaaacaaagcaaaacaaaacaaagcaaaacaaaacaaaactagctgggcatgtgggcatggtggcgcaggcctgtaatcccagcttctcaggaggctgaggcagaagaattacttgaaccygggaggaggaggttgcagtgagccaagatcgtgccactgcactccagccggggcgacagagcgagagactccgtctcacaaaaaaaaaaaaaaaaaagaaaaaagaaaagaaagaaagaaatattttacagttgtttttaaatgtttaatagcttggattatatatatgttcataaacctgctgtcaagttagtaccagtgttgatctgggttgcaaggaacttagtttgaaagtttggataatacgtaaagtgccacagttatataactaaggcaattatctgtcagttagattaaatttgtgtttgtttatttaacaaatactaggcacccactc

SEQ ID NO: 124336 - DNA, 584 bp, Homo sapiens
taatggaggagctgggaagtgtaggggttcaataaaaggaaagatgcagaaaaaggagtaaagtaaggggactggggaaatatgaatagatttaatgaatatttattaagtgcctactaggtatcwggtaccgtgctaggtactgggacaaaataacaagcaaaaggcaggatatttctcatggagcttatagcttagttgggtgggaggagactagtgttaaatgaagagccacataaatgaatgcactgttcccggaatgaaccaaggatcaggctgcttattctcacggcccaataacgagatgcagatgaactgggaaagaagagagtttacttctgtaaccgggaacagagagaaggccgggaaaataacagcagaccaactcaaaattacagttttgcagagcttatataccttctaagctacatgtctacgtgtaagtgtgcattcatcggaagacataagttattaatttcttctaacctatagctaaagtctgtggcctaaagaccttcctgtggagcctcagtaaatttacttaatctagatgggtccaggtgccaaaggtaattacccttatc

SEQ ID NO: 124337 - DNA, 584 bp, Homo sapiens
taatggaggagctgggaagtgtaggggttcaataaaaggaaagatgcagaaaaaggagtaaagtaaggggactggggaaatatgaatagatttaatgaatatttattaagtgcctactaggtatcaggtaccgtgctaggtactgggacaaaataacaagcaaaaggcaggatatttctcatggagcttatagcttagttgggtgggaggagactagtgttaaatgaagagccacataaatgaatgcactgttcccggaatgaaccaaggatcaggctgcttattctcacggcccaataacgagatgcagatgaactgggaaagaagagagtttacttctgtaaccgggwacagagagaaggccgggaaaataacagcagaccaactcaaaattacagttttgcagagcttatataccttctaagctacatgtctacgtgtaagtgtgcattcatcggaagacataagttattaatttcttctaacctatagctaaagtctgtggcctaaagaccttcctgtggagcctcagtaaatttacttaatctagatgggtccaggtgccaaaggtaattacccttatc

SEQ ID NO: 124338 - DNA, 584 bp, Homo sapiens
taatggaggagctgggaagtgtaggggttcaataaaaggaaagatgcagaaaaaggagtaaagtaaggggactggggaaatatgaatagatttaatgaatatttattaagtgcctactaggtatcaggtaccgtgctaggtactgggacaaaataacaagcaaaaggcaggatatttctcatggagcttatagcttagttgggtgggaggagactagtgttaaatgaagagccacataaatgaatgcactgttcccggaatgaaccaaggatcaggctgcttattctcacggcccaataacgagatgcagatgaactgggaaagaagagagtttacttctgtaaccgggaayagagagaaggccgggaaaataacagcagaccaactcaaaattacagttttgcagagcttatataccttctaagctacatgtctacgtgtaagtgtgcattcatcggaagacataagttattaatttcttctaacctatagctaaagtctgtggcctaaagaccttcctgtggagcctcagtaaatttacttaatctagatgggtccaggtgccaaaggtaattacccttatc

SEQ ID NO: 124339 - DNA, 584 bp, Homo sapiens
taatggaggagctgggaagtgtaggggttcaataaaaggaaagatgcagaaaaaggagtaaagtaaggggactggggaaatatgaatagatttaatgaatatttattaagtgcctactaggtatcaggtaccgtgctaggtactgggacaaaataacaagcaaaaggcaggatatttctcatggagcttatagcttagttgggtgggaggagactagtgttaaatgaagagccacataaatgaatgcactgttcccggaatgaaccaaggatcaggctgcttattctcacggcccaataacgagatgcagatgaactgggaaagaagagagtttacttctgtaaccgggaacagagagaaggccgggaaaatawcagcagaccaactcaaaattacagttttgcagagcttatataccttctaagctacatgtctacgtgtaagtgtgcattcatcggaagacataagttattaatttcttctaacctatagctaaagtctgtggcctaaagaccttcctgtggagcctcagtaaatttacttaatctagatgggtccaggtgccaaaggtaattacccttatc

SEQ ID NO: 124340 - DNA, 602 bp, Homo sapiens
tgtttaagagagagtttaaaatgtagtatctgagtaacaaatatttagtaaataatctctactttctattttaatatgttgtaccaaaatttatattttctgagcaaaccaatctatatgttgtgctcctaaattaataaagtgcttatattttataaagtacaaaataacttctgtagaagttgtcattgttctcaatatttttatattttccatattttttggaaagtccccaaaaattaactcccttaaaagtcttcttgtaaattccagtaaattacatgtattcaaagcaaggagttcttgcttggggtttccaaaatatgttattttccacttgaattcgaatattgtcccagagatcatgaaggttcctagaatgtttattcacaattctaactattctaacaataatatctggattctacaacctctatcaaaagtcccaatactctaaaatatccttgcwtggtaaacatactgaaatccttgtccttagagttaattcctctttttaatccaagatgactagaagaccccaggagaaaaatgatatataaagaaaaggtattatcactgaccaatacatttgctcattcatc

SEQ ID NO: 124341 - DNA, 587 bp, Homo sapiens
ttaaatctatatttgtctgactccaaagccagagttcataaccacttctggataattatcattgtgtggtctgaatcatctggtaggactctatacagagatatatttaactggatcattcacatatttttactttacttggtagcaaatagatttttagagtttaacaagtaactgtcgactactttaacatttttgaagggcgatgctataacaaccacaaaaaaactcatttagttcctcttcttcatacataatatatatacagctattcctaaacatccatgtggcattggttctaggacccctacagataccaaaatccacagatgctcaagtcttatattaaaaaggtgtagtgtttgcatctaatctacatacattctcctgtacactttaaatcgtgtgtcgattacttataatacctaataagatggctaacacatcacttcgtttgtgtggattcaacatagtactcgtcakgtggcaaaatcaaaatcaagtgaaacttctgtttggaactttgtagagtttttttttttcctccacatatttttgatctgcagtttttgatctgatcagcggat

SEQ ID NO: 124342 - DNA, 548 bp, Homo sapiens
gtccctttcgttatctcaccatccagaggtcctagcctacatttacgttggcctatagttacatgattcaacttataacctaaggccccttgccagttgctccctgcacttcactttactatttcccgaagcaacttctttgttttagttgaggagggttgctaccttcctgtggcagtggttgccaaagtattgttttaagaatcattaccaggccatgtaaggacttggtagaaaaaatggttttataggttagcagtctgctggtgtgaggggtggaagatatggtggagccttggaaaactcactgtcaggaaaacacagctatacctcctatgcaracactttgctcaacagcacttaggcacaacttacctgctgtctaacccagaactccatccaaattccattccacttatccacgtctgacacttcttaagtttctataaagatttttctaacactctttctctgctgatcactggctgacaaaattcattctataattcactctgaaattgacagcattgtcctagatggatggcatg

SEQ ID NO: 124343 - DNA, 583 bp, Homo sapiens
aatttgtccccatcccataaaaagcaacctccaatatgcttaaagccttagaggaattcaaagtcaaataacacctatttttgcctttcaaatcagcaagattggtaatacctaatgttggtgagggtgcaagcaaaatggtacttcacataggtggtggtggtgatrtaagttggtattatctgctctgactacctatgaccccaccatctctgctgagctgcttctgctgaagttaggaatgacgcccacatcactaattcaggaccacttttcagcatgtgtccttcttgccacaacttccttgctttggcttatatgaccccatagttccattcatttattcgttaaaaatacatgttcctggaattgtgctaagccttagaggtaaaatagtgagagaaaactaacctgctccccaaccacagggagcttgcaattctacaggttttccctctctctggcttctctttctcagcctgcctcatttgtctccacccagcctgtaagtcctggatttcccccaggtccagtccccttctcatttagtctctccatgagggaggatcactgccctagcctg

SEQ ID NO: 124344 - DNA, 572 bp, Homo sapiens
gaattcaaagtcaaataacacctatttttgcctttcaaatcagcaagattggtaatacctaatgttggtgagggtgcaagcaaaatggtacttcacataggtggtggtggtgatataagttggtattatctgctctgactacctatgaccccaccatctctgctgagctgcttctgctgaagttaggaatgacgcccacatcactaattcaggaccacttttcagcatgtgtccttcttgccacaacttccttgctttggcttatatgaccccatagttccattcatttattcgttaaaaatacatgttcctggaattgtgctaagccttagaggtaaaatagtgagagaaaactaacctgstccccaaccacagggagcttgcaattctacaggttttccctctctctggcttctctttctcagcctgcctcatttgtctccacccagcctgtaagtcctggatttcccccaggtccagtccccttctcatttagtctctccatgagggaggatcactgccctagcctgccccaccaatttgcatctaatacaccactgagctgtactcca

SEQ ID NO: 124345 - DNA, 566 bp, Homo sapiens
actccacacatcttcctctataacgcatgtcacaaatacagctttgcagagaagaaacgaaataaaataaagtccaatctccccgtccacgtctctccccaccccttgcctacacccccaaaactcagtggcgaaagaagcccctaaaatgcattgacattttttaaggggaattggggctcgccgggggcgggagcgctcttgtcacgttatcttcccaggcgctgctggagaagaccctgcacaccgcgcatgtgtgagtgtgtgctgtgtaaaataagtcgtgaacatttctgtcttttaaaactgtgactccttggactctagccttctctgggaggccgggaggctgcgcgcgggacggattttgcaggcgcacgcgtcccagcaggtcgcagcccgtgsgtccctcgctgtccttcctgaaccccgcttaggcgagactctagcgggtgaccctggctccttccctgtcctctctgccgtccccttcttgtgcggtttccatccgttcattcattcgttcgacctctcattcattccgaacttcctcctgctgcgtcttc

SEQ ID NO: 124346 - DNA, 626 bp, Homo sapiens
tttcgttttatcggaaaatggtattagaaaacagaatctgggcactaaatgtgcttgttgctgctgaggtattgttgcttctaggcactctcagctgactaagcaaggaaataygttaaatatatatgtgtatatacacatttccatcagtagcttgctatgtaaccgtctatatctgtattaagttaaacaagagttcatatggatgtctccaactctaacccatcacacacattctagtcccctccccttgcctcactgctgtgtaacctcccactccaatagtgggaaatctggctcctgccacctgccagccatttacttaattgttcagttacagtacatgcgtatagtgatttcagaatcattaacctgttccactatgggaaacaactttttggctgagtaaagtgcttccgtgcagttcctcttgcctttagtcttatagactccacttagttcaaagtcacttcggtcagcaccttttcccctcacccccttcagtgaggttgtttcgtacacttgtaagataattagactcttttgtcatattctgcattctgtcttgggattctttgacctcctaaatgatttttaaaaatttgcatacattaaggttcattctt

SEQ ID NO: 124347 - DNA, 626 bp, Homo sapiens
tttcgttttatcggaaaatggtattagaaaacagaatctgggcactaaatgtgcttgttgctgctgaggtattgttgcttctaggcactctcagctgactaagcaaggaaatatgttaaatatatatgtgtatatacacatttccatcagtagcttgctatgtaaccgtctatatctgtattaagttaaacaagagttcatatggatgtctccaactctaacccatcacacacattctagtcccctccccttgcctcactgctgtgtaacctcccactccaatagtgggaaatctggctcctgccacctgccagccatttacttaattgttcagttacagtacatgygtatagtgatttcagaatcattaacctgttccactatgggaaacaactttttggctgagtaaagtgcttccgtgcagttcctcttgcctttagtcttatagactccacttagttcaaagtcacttcggtcagcaccttttcccctcacccccttcagtgaggttgtttcgtacacttgtaagataattagactcttttgtcatattctgcattctgtcttgggattctttgacctcctaaatgatttttaaaaatttgcatacattaaggttcattctt

SEQ ID NO: 124348 - DNA, 577 bp, Homo sapiens
tcttaactctctctcttttttttaaatcatgagtcttctgttgtctcttacctttcctctatacattctcttaattctgcattacaaagccactgaagccagcctggcaaagactctctttggaaggtggcgaaggtgaagcatccaaactgacagacaaagttgttctgagtgggctggaagtgggaggagggaggctgggtactctcattgatgagtaaatctttgtcacaagttatctgagaagggagctacaagtcctacatctcagtgtacagcacagtgcttggyacaaagaggaacttgaaaatctgagtaaaggaggcaaattagggaggccctcgacctagcttagaagaggaggatttgagtgggtgtagaggcagttggagggcattccagggatagaaggatcagggtgtctgggtttatttttctgtggtggaatgtacatgaggatggggggcagtgaaaagacttggcatagggcattggaacccctcaatggggagaaatggagaatctatttttcacttaatagtggtttaatagtgggagccatctattggcttccaaa

SEQ ID NO: 124349 - DNA, 563 bp, Homo sapiens
ggatatcttgccaacaaagaccacctgggggatgcgtgggatcaagctggttgggatgcataaaaccctaggggtggatccagtgcagagccgggggctgagacacatggcatggtggccccttgactacgtctatgctacaatgactcccaggagccacctgctcattcccagcccatgtcaatggccaaaatatttgagagcattcagagattatcatcaatgagtggagccaggcaagggaatgaagaccaaggaagacaaaagtggaatctagaatggytctggtgcagatcgaatcctaaatctggaggacactcatttgcatttgtgttcacagtactgctgattggggtccacgcaccccacagagcaggcacaacctcagagcgctgactccaatagatacaaaccttgtgtgtcaaagaggagctaagagaaagactaaaataggaaccaataaataagtaaacccccaacaaatgaagagaccccccccccattactgcttgaaatggcctcatttttttttttaaacaacaaacatggaaataaaaaccaca

SEQ ID NO: 124350 - DNA, 510 bp, Homo sapiens
  misc_feature (1)...(510): n = A,T,C or G
aaatcaaacagccttattaaaaaatgggcaaagaacataagcagatacagtccaaaagaaggcatccattcatccaataagcatatgaaaaaatgctcaacgtcactaatcattagagaaatgcanattaaaaccacaatgagatagcatctcacaccagtcagaatggctattagtataaagtaaaaaaaacatctagtagtgaggctgcagagaaaaaggctcagttatacactgttggtgggaatgtaaattagttcagccactgtgraaagcagtttggagatttttcaaagcagttactacagaactaccattcaacccatcaatcccatcactgggggtatacccaaaaggatataaattattctaccatgaagacacatgcactcacatgttcactggagcattattcataatagcaaagacatgaaatcaacctagatgcccatcaacggtggactggataatgaaatatggtacatatataccatggaatactatgcatcc

SEQ ID NO: 124351 - DNA, 588 bp, Homo sapiens
acaaagtgcatcaaactacaccagaaaaaaagctatccttatgccctgaggctaggcagaaaaaaaatcttggggcctgacattgcctgtatctgctaagtagtgtcactctgaaaaagttaagtctagacttcaaggtctttcttgaagggaacattgctctctcccaggaattaggaaatattagcacatgttttggttcattaaccaatggactctgacctcccatctgttccatttggagaattcccctctatgccatggggtagtgccttgagaaacctggcacttacctgccttgagaagccacctctgtgctgaggccatcctctaatgggcactatactttgctctcatatctcagagttgcatctaacagtawatacttctgacatatcataacccaataaccaaagtgacaggtgtgcaatggggaactacactgtaaggattactgtgattgtatgcatgtgtgtgtgtgttttgtatgtcacagatatgtaaagtacattaccttttcctcatctaatttatggtgtaataaaacttactgtgtccccactctgttaagagagtgtagaagcaaaa

SEQ ID NO: 124352 - DNA, 533 bp, Homo sapiens
ttgacttgatggaaacgtggaatggcgttttgaagactgttcttgcaacatcttgtagggctggtgtaaggttctccagaaggctggatgtactctaaattgtgtccaatatatgatgttgattcttccatatccaagattaatgagtccaggaatcaatgggtggaaatgggagtggtaccccctcttttttttttagacggagtcttgctctgttgccaggctggactgcagtggcacaatctcggatcactgcaacctctgcctcccaggttctagcaattcccctgcctcagcctcccgagtagctgggactacaggcatgcaccaccatgcccggctaattttttgtattttagtagagacagggtttcaccatgttggccaggatggtctcgatctcctgacctcrtgatccacccacctcagcctccaccactcattattactgctagtgactcactagcaaaatttttccttcctgtgcatacactttatgctctactggcctagagattcaagctccaagagga

SEQ ID NO: 124353 - DNA, 576 bp, Homo sapiens
aaatctgctctcttagcaattttgaaacatacattacattattattaactataaagtcaccttgctgtgcaatagatttcaaaaacttattccttctaactgaaactttgtaccctttgaccaatacctccccagtccccttcttaaaaatggaatcatatatttttaagccataagtatatgacaataacattatagcagcataatagtttgaaataatagtctacaatatactattgacttttacttctattatcctgatgaatttttacaataattataaataggaatacatacttattctcacttcacagatggggaaactgaggttcaaacaggtaaagtcactatcaaggttgctacttaattagtggaagaaccagggcttaaattcatgctaaggcctttatttgtactctaatgcttctcataaatagtattatgaaggtaaatttgatgagaatgtgataacagtgttattctagagctygctatcactctcttcatctctactgaactctcacctacacagtgtttagggatgtcattataaagagaggataacagtgcagtagc

SEQ ID NO: 124354 - DNA, 591 bp, Homo sapiens
tgttttaaatagcttatttgaagtataaatgcacacatttatacctttagtaactgcacacatttaaattttcccatttgataaacctcaacgtatgtatataccatgaaactatcaccacaatcaaaataatgacaagtccatcacccatttttaatgtttttctccatcatacctcatcaccaggccatcaactgatctctgttctgtcactagaaactagcttgcattttctagagtaaatggtatcatacatactccatttttgtctccctttttcaaccagcataattattttgagattcatctacatttttgtgtgtatcaataattcatttctttttactgttgagtagtagcctattgtttggatatgccatgatctgtttatccatttaaatgttgacgtatatttggtttgtttccagtttggggctattgcagataaakccaatatgaacattcacatagagtttctatatagagatagaattctgtattaaccatgtgtttctgatattttgacatttgaaaccttgctgatcttagagacattgcctctcccaaggtaagccagttcctaaaggtaac

SEQ ID NO: 124355 - DNA, 563 bp, Homo sapiens
atgtctggggtggtgcttacagcaagaccttgggaagattatgttatttggtgtttctttatttatctttttgagacaggatctcactctgtcacccaagctggaatgcctggtagtgcaatcatagctccctgtggcctcagactcctgggctcaaacgatcttcctgctcagcctcctgagtaactggtactacaggcatgtgccaccacacccagttaattttaaatttctttttggagagatggagtcttgctatgttgcrcaggctggtcttaaactcctgggcttaagcaatcttcccatctcagcctcctgagtaactgggactatgggcatgtgccaccatgcccagttaattaaaaaaaatttttttgagagacggggtcttgctatgttgcccaggctagtcttaaattcctgggcttgagcgatcttcccacctcggcctccccctcctgaagtgctgggataacaggcatgagccaccacacctaacctaagcttacattattaatggctaaaaagctctagcttcttaaggttccctcagtaaagataca

SEQ ID NO: 124356 - DNA, 484 bp, Homo sapiens
gcttaacatttctgggatatgccccaggcctttatggaaggctgtttcctcattcaaaagaggtaccggtttcctgctgagtgtgagaggtttatcagaatattttttaaaacctactttttgtgtaggacaacttaatcggtattagttgttgctytttggtatactttttgttgtctatagtagttgtgtctttgtacattcaggggacattttcagggagcctgctgtgggtaaagaaaaccataggggctataggggatgagaagtccaatgagacttgggaggtaccctcagggaccttccaggatccctggtacattaggatggtactctaatacaaaatggaatctgaaaagggccagaggagaggctcaggtaaacttctagggaagttcttcatcatcatcatcattatcatcatcatcatcatcatcatcattatcatcatcatcatcaacaacagtaaacatttcttgaattc

SEQ ID NO: 124357 - DNA, 591 bp, Homo sapiens
tgaatgaatgagtgagtgaatgaatgaatgatgactgaaagctaacatttattaaacctgcttactatatgccagtcattgcatttaaaataagccttttacagatgagggaactgaggcacacagaagtaaagtgattggccaaggtcaaaccctaggaaggatatttcagaattcgtgcttttcatttaactatcttgccatactgcaagtgcatgaaagaaaagtaggtggatggatttccattttaccaacaaggaagtagcaacattgaagggcaagaggctcctayagttgtaaagtaatcagtggtcaagtcactgctagttagctcttttgatctctagtccaacatgctgctaactagctccagcttgtatcccacactacttgggcaggctctgggtcctcccaccacataccgagtcaagctgttgtcttcagcccacccattgtcccaccctcacctcagtgtgctcttgccccacattttcaaaaatagtcataatggaaatagcccaggattatggttagaagtttaagttccagttttgatgcttgttagctgaatgactttgggcagggcaagaa

SEQ ID NO: 124358 - DNA, 430 bp, Homo sapiens
atgacaaaaactgaggcctatttgagggtgaagggtgggaggagggtgaggatcaaaaaaacacctattgagtactatgcttattacctgggtgaccaaataatttgtacaccaaaactccacaacamacaatttacctatatagcaaacctacacatatacccctaaatctaaaagttaaaaaaaaagtttggcaattttaaacaattgccatctacattaattccccaaatctaacaccaatcatcatggtccacatgtgttcattattcttaagaaattcaatagcatgtgactaaaacaaatcagcatatttggaaagtttcatgatataaccctcataataatattatgaactattattatatccatttcaaaaatagaaaatcaaagcttagagaaattaagcaattatcaaagtcacaaaagc

SEQ ID NO: 124359 - DNA, 608 bp, Homo sapiens
ttagtttattgactatccaaaggaaaaatgaacttctcatatctttgtgataaaagatagttttggaactaggctcctgccctttagattcctaccttgccatagaaatggggagataagggcactatctttcttgatggttacttctcaaagatatgcatcccacatcttggaagaagacattcttgggtcataaagctgacaagaaacctatctagttttcaaaaggatttgtatacatgtcaaagaggcagaaaaagactttataagwacaaatcttctaaagtaaacactctaacaaagggaggaagaagtctctttccttaatttcaaccgggagaattaattctttcttttcaattggtatttacccttataatatcaactctgagttaaaagggagataactgtgaacattgtgtaggagtactgagacaggctgagaggacataagcccttgacttttgcaaatcatgggatgaatctacatggagaatatcaatagctttgttactgggagttccaacactgtttatgcagctctgaggggcatctgagtttcagaagaacagctcataatcttggcgagccaggcaggaggaaaagat

SEQ ID NO: 124360 - DNA, 608 bp, Homo sapiens
ttagtttattgactatccaaaggaaaaatgaacttctcatatctttgtgataaaagatagttttggaactaggctcctgccctttagattcctaccttgccatagaaatggggagataagggcactatctttcttgatggttacttctcaaagatatgcatcccacatcttggaagaagacattcttgggtcataaagctgacaagaaacctatctagttttcaaaaggatttgtatacatgtcaaagaggcagaaaaagactttataagtacaaatcttctaaagtaaacactctaacaaagggaggaagaagtctctttccttaatttcaaccgggagaattaattytttcttttcaattggtatttacccttataatatcaactctgagttaaaagggagataactgtgaacattgtgtaggagtactgagacaggctgagaggacataagcccttgacttttgcaaatcatgggatgaatctacatggagaatatcaatagctttgttactgggagttccaacactgtttatgcagctctgaggggcatctgagtttcagaagaacagctcataatcttggcgagccaggcaggaggaaaagat

SEQ ID NO: 124361 - DNA, 498 bp, Homo sapiens
gagcaaacaaatatggacaaccactcattttctagaaatgggcctcaatgcccaggrttggaggtaagctggaggtaatgcccagaatccttccaggctgcccagtttttgatatagcaggggcatctggctgaatatggctctcaatcttttaattaattaatttcagtttatattttgtttaaaatatttttcaattggttgagaaatttagaaactgggagatttcacaaaaaagtccagatttcagaattccctaagtatatcatagtatctggtaatacttggctggactgagctggggacagggttgtcctttccagttagccacatcctcaccgccttcccggcattcccgtcactggcctctgacgccacaggagtttgcagccagcacatttccttcattactgccccatgatgtcctctatcacaagtacacaaaaattgtgtactggtcttagttgcttttccagattgcaaacaccttaacgcagc

SEQ ID NO: 124362 - DNA, 498 bp, Homo sapiens
gagcaaacaaatatggacaaccactcattttctagaaatgggcctcaatgcccaggattggaggtaagctggaggtaatgcccagaatccttccaggctgcccagtttttgatatagcaggggcatctggctgaatatggctctcaatcttttaattaattaatttcagtttatattttgtttaaaatatttttcaattggttgagaaatttagaaactgggagatttcacaaaaaagtccagatttcagaattccctaagtatatcatagtatctggtaatacttggctggactgagctggggacagggttgtcctttccagttagccacatcctcacygccttcccggcattcccgtcactggcctctgacgccacaggagtttgcagccagcacatttccttcattactgccccatgatgtcctctatcacaagtacacaaaaattgtgtactggtcttagttgcttttccagattgcaaacaccttaacgcagc

SEQ ID NO: 124363 - DNA, 618 bp, Homo sapiens
attttaaatctgtttccactggcatttgaatggataaagaaaatgtggtttgtatatatataaaataggatatatatataatatatatgtgtgtacatatatgtatataaaaaggatagtttgtttccatatcttggctattgtgactaatgttgcaatgaacatgagagtatggatatctcttcaaacagtgattttatttcccttggatataaacccagaactggtattgctggatcatatagtacttcttatggctgtcctaagcatcatcttttaacgaataaatataaagatgtttggaggtaatgtttatgccaaggctgctggctcctggcactctcaatgcagcaaacacaggaggtgccaaagaggtgcttcacttccagaggccgctgctgcccacgccacgctgtgtggtgtcccaggtgcaaagcagcttttatgtagcccttgtgtctcacatagatccatataaaaacattttcttctgccaaagrtttttctctccagaagatgacaggttaatccctaggtttgtccgtacaaaaatattcaatcccatattatgattctctctacaggaaattttctttagatgagtaattttccttagat

SEQ ID NO: 124364 - DNA, 587 bp, Homo sapiens
gtgtgcttgttcttcgagaaatgtctctaaagttttggcagaatcaaaaggctagtaccccaggccccttcctctcctgaggccccacaccgcccactccacagacagcaaacagccccaggagggttgctactctgtaactgcggtcatggacccctgagtcttcattttaaaagaatccatgcacccctctgtttgtgtgtggggtgctgggagagtctctaacctatttcactgaaactgaataatttccagttgtctgtggctaccgcagctgcctgcagactaggaatgttctggtttcattttgaaacaactcccaggcatgcaggcaagaagtatcaactttcctctcagatatgtgaactcagagaggaagccaaagtttggctgactggtttctaggagtacagagtgaaaacgttgcttgtatttatttaaaatggctaaaaaatgagaactttttttwaaaaaaataatcatatgtggcactattcttttaaatccaacagcagtttttatagggaataatatgtagatggataaataagtagacaaatactctttttcattatttcattaggtca

SEQ ID NO: 124365 - DNA, 406 bp, Homo sapiens
gaattccaagatgaggacttaagagaattgcaygcataggggctatgattgtcagaatttgccacctctgggctggcacttgggactggagtgggaaaggaagattgacatttgaggcaatgacattgtaaaaaactaggggattacgcagaaagtctgggtacaaaattgaagtgcagagtgctaaggtgccagatgaaagtgccaaattcagagtatgaagtcagaaatctaggtcccaggagaaagagcaagtatgcatgagccaagaacaggagggcagcggttctgggaatgttgccactgactcccaactggccagggtgaacatggccgggcttaaagaaccaaaataggagaataacttttgcatcttatgagggagcttgaggtgcacatatagaca

SEQ ID NO: 124366 - DNA, 405 bp, Homo sapiens
aattccaagatgaggacttaagagaattgcacgcataggggctatgattgtcagaatttgccacctctgggctggcacttgggactggagtgggaaaggaagattgacatttgaggcaatracattgtaaaaaactaggggattacgcagaaagtctgggtacaaaattgaagtgcagagtgctaaggtgccagatgaaagtgccaaattcagagtatgaagtcagaaatctaggtcccaggagaaagagcaagtatgcatgagccaagaacaggagggcagcggttctgggaatgttgccactgactcccaactggccagggtgaacatggccgggcttaaagaaccaaaataggagaataacttttgcatcttatgagggagcttgaggtgcacatatagaca

SEQ ID NO: 124367 - DNA, 606 bp, Homo sapiens
aattttctgagtatcttttatgacatcaaaatcgtgacaataaaaaggaaaattcagatgctgagaaacktatcttcttttgtaatttataaagtgacaaatcttctgttccacaagttagatattatgttcacatagtaaacatgctaaatgtttaaagaaaaatagatcctatgattacatttatgttttccctcttgtttttacgagatttggaaaaatcttgatgtatctaacgtcttgttaatctgaatgttatatgcattcgaaataaaacttataatcttactctgtgatttgttccactggcattatcaatattgattgagacattcagtaagggaaaatacatcttttagaaattatgggaagttgaagaaacagtagctcttgctgtttgaaaagttcacaattagaaagagaaatgagagaggtaaatatgacataaaaatattatgaaatcaatgaattatcaactaatgattgtacttgaaaagaattatagaaaattgtgtgactgaatgcagagtgggtgctatggtttgaatgtttgtgtttcttcaccccaaaattcatatagtaaaaactttaaccccaaagtgatgg

SEQ ID NO: 124368 - DNA, 576 bp, Homo sapiens
tatgataattttaaaatgtaaacatgccagactagtagatataaagatggaatatctgaaatatttttattattttaatttaatgcatacttttaaagacaaccaaataaaagttccagtagaacttctttaacttgactaaaatcttacatttcctggaggaagaataaaaaaataagtaaaattaaaaaaataataatttcataaagggagaggaagggtgcttgtcctatcagatattagaatattgtcatggtttgaaagtttgtcccctccaaaacttaatcacgaatgtggcagtgttgagaggtagggactttaagaggggattgggttatgagggctttgttctcatgaatgaattaatctattcctaggtagattaataaaccagtgggctaacggattaataagttatcgtggtaaggggactggtggcttaatgraaggaagtaagacctgagctagcacactcagccccctcaccatggataacttcttctgccttgggaatctgcagcgtctcccccagcaagaaggcccccaccaaatgcagcccctcctgctttactcctc

SEQ ID NO: 124369 - DNA, 592 bp, Homo sapiens
cccaagtaccacttaaaaagagtgcccaaaggtcaaacctgattgttactgggtgctggattcttactggttgatgaaaatgccaacctagaaattatttaacttcccarctaacttctgggaactctggttcatctgtgacatctgggtagaatgctttaaactgcattgagttctgtgtgaacctatttctccctttcagggcactctgtgactctctacattctttcctaaccagcctgcacatgcctgctgttgacctgatacactgaggagttccaggtctagtgctcataaagatgtcacaggccctgaagctgagcccttttccaggagcaagcctagggaggatcatgcctgctagagggagccttttttttttcactctcagaatggtgtcaatcacttgatttagggtctctcattctcactggactcacaatgagtaaagatgagtcttactttccatattttgccaccaataaccaacaataattggtcttttgcctctcagtgcctctgaagttaccttaggtctacagcaccaataggtggaaattttttaccgtgtgtctccagacactgacaccag

SEQ ID NO: 124370 - DNA, 563 bp, Homo sapiens
ctgcacattcttattgcttattttctgttttagttgttgccgttagatctatacaatttatttatatttttatttaacagcgttaggtattctgtatagtttcttagtatttgggattttcaagttatatgatacatcaaaaatcatttttccaatctttccaatatttatgcttcaattttattgtttaaaaaattgcaatgtgaatgatagcaccatttacatatatctttcccttctttctgattttaatgaaatggcacagatatgttgttttatcctttagcatcatgactgtgtcaagaacatgtagaattaagcctatgatttataatctatataatatggaaatcctattttcattaaaaacatatatagtgtatacacattatataaatatattttayatacattatgtgtgtgtgtatatacacgtgtgtgcagtgtgtgtgtatttgtgtgtgtgtatttgtgtgtatctccttttaaaacaaaatcaaattgctatacaataagtctttttgtcctgtgattacagtagacttatagtggcattttatagc

SEQ ID NO: 124371 - DNA, 531 bp, Homo sapiens
gaattcctcaaaactccttgatttagcaagagacaaaataagggtaatcaccccagcacctggacccatttagattaagtaaatttactgaggctccagtggaaggtcttcaggactcagaccttagttataaattaaaagaagttaatcacgtctttagatgaatgcacatttacacatagacatatagcttagaaggtatataagttctgaaaaactttgtaattttgagttggtccagcgataatttcctggccttctccctgtaaccggttacagaaataaaaactctcttcctccccagttcatctgcatctcgttattgggccaggagcaatagcagcccagccctcagtttggtccaggaacaggcctggaagctccgcgccctgacaccctgccctatgtgtctcctccrtttagctgttcctgagttgtgtcctttatataaaaaaccagtaatagtaagtaaagtcctttcctgagttctgggagccattctagcaaattagtagatctaaaaagggagtt

SEQ ID NO: 124372 - DNA, 553 bp, Homo sapiens
ctgcatattttcactcatatgtcagggctaaaaatgctgatctcagggaggtagagaacatgcaatgatggataccagaggccagggaagaatatgggtgggaggtggatgatgaggaggggttggtgaatgagtacaaacatacagttagatagaatttgtaagttttaatgtctgatagtagagtaagctaactatactaagcaatgatattttgtatatttcaaaataactagaatttgaactgttcccaacacacagaaatgataaatgttcaaagtgatgtacamcccaaatgccttgacttcatccttatgcattctatgctgcaacaaatcctcatatgtacccccaaaatgtgtaaatatgtaaattacatatcaattttaactaaatgagaaatatgatatatccattctgtagaatgctactcagcactaaaaaggactgccttacttacgggttcatatgacaacatggatgagttacaaagatagtgtcatttcagctctcagaaatgacatggacaaggaaattgagggctgagagaata

SEQ ID NO: 124373 - DNA, 553 bp, Homo sapiens
ctgcatattttcactcatatgtcagggctaaaaatgctgatctcagggaggtagagaacatgcaatgatggataccagaggccagggaagaatatgggtgggaggtggatgatgaggaggggttggtgaatgagtacaaacatacagttagatagaatttgtaagttttaatgtctgatagtagagtaagctaactatactaagcaatgatattttgtatatttcaaaataactagaatttgaactgttcccaacacacagaaatgataaatgttcaaagtgatgtacaccccaaatgccttgacttcatccttatgcattctatgctgcaacaaatcctcatatgtacccccaaaatgtgtaaatatgtaaattacatatcaattttaactaaatgagaaatatgatatatccattcwgtagaatgctactcagcactaaaaaggactgccttacttacgggttcatatgacaacatggatgagttacaaagatagtgtcatttcagctctcagaaatgacatggacaaggaaattgagggctgagagaata

SEQ ID NO: 124374 - DNA, 601 bp, Homo sapiens
taaaccacaatgagatgacatttcagtttactaaaatgcttaaaatcaacaatacaattcctagtgttaacaaccatgaggagcaactggaactcttacaaaattctaagggttttgtgctgcaggagcatgaaatttaataattattttagagaactgcttgccacttcgttataaagctaaacataaccctactcagcgttttctagcaattccagtaattctctaacagatatttacctgagatacatgaaaacgtatgtccacaaaaatcwtgtgtgagaataatcataccaattgaaaacaatgcaagtgctcatatacatggaaataaacaaattgtggtatattcatacaacgaaataccgcttagccataaaaaggaatgggactactaataaaacaacattaatgagactcaaaaacattttgttgagcaaaataaaacatacatgaaagaatgcatattttaagattccatttacatgaattttaagaatagacataacaaattatggggatgctattcagaaaatgttgccactggtggatgttagagttgtagaattgattagaaatttgcacaaggctactttccaga

SEQ ID NO: 124375 - DNA, 606 bp, Homo sapiens
gagctataaaaccaaaaatctaagaaagctcaaataaacacaaattcacacacacacacacacacacacacacaycaggaaaaagtccaaggcatataataagcaaattgctaaaaatgaaacataatgagaaaaatgtgaaagaagctcaagaaaaaaaggcttattatatcaaagagaacaatgataggaattttttctgacttttctcacaaaaaatgcaagacaaaggacaatgaaacaaaatctttcaagagttgaaagtgtaaagaaaaacactgctgtccaatattttttatccagctaaaatgaagttgaaataaagatatttgctgagcaatgtaatacaatttgtcatcagcagatatgcacttcaaagaatgataaagaaaattcttcaagttaaatgaaaatgatactagatagaaaattcattccaagtgaaggaagaagaaagctggaaatgatcaataataaaagtgactaatagaagataaatagcaagaatacagacctaaacccaaatttattcacaattgcattaaagaaaagagactaaaaatgtaagctaatcattcaattaaagggcaaagattgccagagtgt

SEQ ID NO: 124376 - DNA, 595 bp, Homo sapiens
aaggttagtgactgggaagactttagagatttctgcatttttrtggagcaaaatcacattgtgacatggctgcttttcaaagatgaatgcttcattcagcactttgcttcatttcctaatacaattgaaaagtcatttgctgacagtaaaccagtggcaggtgtgctttcgtgttgacagctgctattctgacatggatcacagacaagctctactgacagtgctagaacatctggagcatttggtcagatttcaaaagctaatttaagtggactgtcttcttccatttcaaaaaatgaaagcaattatggacactgggaccatatttacattgtgatagtataataatttattcaatttcttttttattaaatatggaggcaaaggcagcaaagcatgccaatacatctaatgtctgggaagatagtttgtaatgtagcttactgcagtcgcctgctcctattaagatttcctttgatattgtgaaagcaattgattgacagaaaatgaactaaaatttcatccctataaatatgtttctgagaaattgttatacggatttatacaaagaaaacatttaatatttattgaatga

SEQ ID NO: 124377 - DNA, 595 bp, Homo sapiens
aaggttagtgactgggaagactttagagatttctgcatttttgtggagcaaaatcacattgtgacatggctgcttttcaaagatgaatgcttcattcagcactttgcttcatttcctaatacaattgaaaagtcatttgctgacagtaaaccagtggcaggtgtgctttcgtgttgacagctgctattctgacatggatcacagacaagctctactgacagtgctagaacatctggagcatttggtcagatttcaaaagctaatttaagtggactgtcttcttccatttcaaaaaatgaaagcaattatggacactgggaccatatttacattgtgatagtataataatttattcaatttcttttttattaaatatggaggcaaaggcagcaaagcaygccaatacatctaatgtctgggaagatagtttgtaatgtagcttactgcagtcgcctgctcctattaagatttcctttgatattgtgaaagcaattgattgacagaaaatgaactaaaatttcatccctataaatatgtttctgagaaattgttatacggatttatacaaagaaaacatttaatatttattgaatga

SEQ ID NO: 124378 - DNA, 433 bp, Homo sapiens
acattcctttctattgattccagattttttgataattgccagttagaaaagctttgaatccacctatgatctggaagcccccttcaagttgtcccatgtgtcaggtcctggagtcctggtccagcccatgctgaagtctgaggggagtgggtggatgggcagaaagaacactcaggggctataggcaggtgaatatggttttattcagcggcagctctcttacacagcttacttaaactagctttctcattagcagcttactttcacactgtccaccctatcttggctgcttgagccagcagcctgcatgcacagcacacagccagcttttacttgccttcagggtcagcagcttaactctttctttctctgagcacgagtaagmtgagctgtgacctggctccctcctgtccatctgcaagatggacagctt

SEQ ID NO: 124379 - DNA, 422 bp, Homo sapiens
atgcaaatctatttatcttaaatgcacaaggtaataaacatagaacaatgtaacacctggagtccattaactgtaaaagtttaaacgatattatggtttagagaaaccataatatyttagtaacaacagataaggcaaaaatatcttaaataggacataaaaaactttgatcatagaaggaaaatgaaaaaaccctaataaacagaaataaatcaaaattaagaacttctgttcatcaaaatatatcatccagagagtaatgagaaaatccaccaaagagttgaatataaagtgcaaatattcagtggtgctctggtaaatatttcacaactagctctccagaaggaaaaataaagccattatttttggtgtttctcaaactatgttgtgaaaatacttctatcatgactgattttcaaacc

SEQ ID NO: 124380 - DNA, 618 bp, Homo sapiens
tgataaatggaaagagatatagtcagagaacatctaaatttttagtcctgtgtacagacctaggccactctgaggtatgactgttaaaaacagaggggaaaaaagagatatatcactttgacatgatttctacaatctctgattttattagtatatcacatttattccattttatcagtgtttgaagaagtaattggtaatgatcttattcttcttcatcaattagcaagcatttattgaacatctatgttcctaagtgtcatttcagatactggagagcataagtcatcactctctcctgtgatgytgaattaaggaagccagtctatcatagcaatgttgaaaaatatgagaggaggaaatgtatgtgtatataggtaacaaaatgtgttatgtgaatataattgttgtaaagaggggagacaaaaaaattattttagaggaaaataaagctggaatcaacttcaggcttctactattttagttgtattacatccagcaagttacttaacttaaggaggcctaaataataattataattgttaatactaatatataagagataatagtaatgatataagcaaacacatgtgcacattacatgtgttttagggtttt

SEQ ID NO: 124381 - DNA, 372 bp, Homo sapiens
acttgatgacaaaattgcctaaagatgcatttctcagaacatattctcatcattaaatgatacataatgtagttccaaagttcakactatgagaccaaggtaatactgactttatcagcacagttctgtgttagatactctgccactcccatttcacatttccacaaggctgacaggttatggataattaaaggaaagaaattgtttaactaggaaatccttgttaaaatggcaaccctgggctcatacctgtaatccaagcactttacaaggccgaggtgggaggatcacttgagcccagcagttgacggccagcctgggcaacatagtgagaccccatttcaaaaaaaaaaatggcaaccccaactttac

SEQ ID NO: 124382 - DNA, 564 bp, Homo sapiens
atattacatctacctaaacagctcccatagcttctactaacttcctagttaaatacttacaaatacatggaaataagaagaaaactcacaatagacaacttatcatcagaatctggaaggaatctctattaaacttaaggcagatggagcaagactgaaaaatccaatgcagaatatgcctygtgatctgtatcttgtggtttaggggcttttctttttttttttttttttttgcattttacattttggattccacagctaaaataagtgtcacactaaataaaaaataaagaaaacaataaagaagtacaaaaatagaaagcataaaaacccaaacacatcaattgtaagaattttaaacaggttaaactcctctattaaaagacaaatgatcaaacaacaaaatccaacctcttatttatgaaaaaaaaagcaaacatacatcaagcaaattcaaaccaatataaaaacagaattcaaggcaaaagatgctgaatgagataaatgtgataattttatactattaaagagatatgcaaaaggaaaatggaaaacttacaaaat

SEQ ID NO: 124383 - DNA, 631 bp, Homo sapiens
cagttgttttccctgctgtttgcaaacgtttgcctgagcataggacaatgagataagtacaaggtctaggaatactcattctggaagtatttagactaagacactatttacttgccatgagctcttgggcacgtcacttcacttctgtagacctctgtgaatttgatgagctggttagagaaaatgatccctccctaagtcctttgaaaaaaacgaccacaaagcaacagcattttctactagcttggagataaggaaagttgcaacagtgggcctcaaaaagagaaaataatttcattaaattaacttcacagttgcttttgatttgcttcaaagtaggctaggagatttctatcactccgacaggaatgmtggaaattatttctatcattctatcgtttagttattatagagttctatcatttagtgattgttattttttaggttggacaaaaatttaaggacaacccttaggtacataatggagaagctggaaagtggaagtcatcttgatgagtttgcaaaatagatgaaaagataaaatggaaaagatgacaaaccaacaggtcaggggatgcctgataccgtatcacaaagatcagacatacgtgtggagactaacaggtaaaac

SEQ ID NO: 124384 - DNA, 570 bp, Homo sapiens
ttttcagaagcctcatgtcctattacttctctgagtagcacagagccgagggaattttgctacagatcaagtgcagggaggtatttggggaaaatagcttattgtgacattgcctgagcacttgactatgaaaccaggtctcctcctaagagcattgaatgtgcattaactcattccctcctcaaagcaaacctaygtggcaaacaccaaacaccaatatcatgcccacttaacagatggagaatctgaagcgcagcacgaagaggtgtattaacttgatgaaggtcacacggccagtaagtggtggagccaggaagcctggcacctgagtctcttttcttagcccttccgcaatacttcctcatacaacaaccatgtaaggtagtgtgacataggaaaaacaaactcagtttctcctgtgataccctctcaccacacaatcaacacagaacacttctgtgacctctggtcaccaagaagtgtgtggcaatttctctctggcagcaaccagttctctgggagatctttcagcagacaccagctgggtgtcctctaattcagttcaatttt

SEQ ID NO: 124385 - DNA, 537 bp, Homo sapiens
taaatttagctttgaaagtccatttctggaaaggaaaaacaagtctccaagggctagatcccatggaggctcagcccagctgcaccgtgtaggagggttacatgcccaggcaggcagggctgggctttccctggtcagcagtgcctgggctgtgctccaaggtgatttctcactctgctgactcttcttgctagtcttccccacccctcttgagttttgttcctttaattacactgcaattgagtcattaagagggggaaaggatgaggaatggagaaaagccrgtctctctcccctactgaaccagattccagcttttgcctccctctgagcagtgctataaggttcctggcctatactaaatggaaatccatatgtttattcatcttgacttttagaaaggcagctcttgttgttgtctctcagcacctgtgcaatcagggatcctatgatctttcctaatatctggcaggccagatggttttttagatcaaaatgaaaaaagaaaaagatggggcagaggcggcagaaatgtga

SEQ ID NO: 124386 - DNA, 473 bp, Homo sapiens
tgccagcaatcaccaaaactaccaacatcctcttcattatttaggatttcctgggcacctgctatgtgttaagcatggtgcaaggttcccttcctgtaatattccctgtgattttcacaagagccctagaaatgacagttttatacccaatgtgcagctggagaaacaggggcttagggaagttatgtcacttgctccagttctcaatggcgtgatgcagtgaggccaggctgtgcactcgaatctgcctgacctcaagtcctgagttaaactttaacaacttaccctgtgtcttgggcaagtcagagccctcctaacagtaaggcccgtaagaatgtgtgttcaatctctctgtcttagcagaggaggacagaatgggcagagcctgwgagttctttgtgtacctcccacagcctgattcctgggccatgcatgtggtccacaatagcctcaatccatgcaggaatagaagg

SEQ ID NO: 124387 - DNA, 526 bp, Homo sapiens
cttttgctgtggattgtgcctaaggccatcatcactgcccacctgctcccaaaaaaataacctcaggcagacagatttaggtgcagcgcactgaaggtgcaggtgacagctgtcaaggaccaaatgtagatgggaaggacacatggcaagtggtaataccaggcgaaggactgcaagatcaagctctgtgctctgtgacgattgtcaagtcaatctcctctctgggcaatcagggtctaactctaaaaagcgaggcttgaatcttcacattccctcccagactgagtgccagtaattctgaaaaccagatggtcaaactcacaatcaaggattacasgccatttaggaaactgcttctcacacagataaaaatgatacatgatgagcattccacttgttagcgtttaactgtgagcttttcaagtgcttgaacatacacacaaagatgtacatgcactaagtgatcactgaggcattgtttgtagtagcaaaaaactgaaaacaacctaaatactcttcagttagg

SEQ ID NO: 124388 - DNA, 684 bp, Homo sapiens
cccttctgtcagtagacatttgggttctgaagtttttgcctttaaaactaatgatgttacagatattctaggttgtgtgccctagtgctccagctggctggaattcatgggcggagttcgcgagaagagggaactatacagagaaagaattccagaggtctgcatggtatcccattgagtctgttgcagattacaaagtcatacatgcatttgtaaaccacatgaaaccagacaactattggggaactataagttgaacaaatttcagataagtgaacctcactagaactagaaaatatgtggacaagtatgaaaattttcttctattattttatttaaaagatgattaactgttcatgataaagttaataargatgtattttgtagtttataatacacgtagaaggaaaacatatgacaacaatagcatagaagatgagactggggaaatggaaatacattgttctaagtttcttactttatgaacaagtataatatttaagggcagactttgataaattatgaatgcatattaaaaatcctagaataccagtaaaaataaccagaatctatagctcatgggccaacagaaaagataaaatagaatgctaattcttttattagaattagcatattagaatgctaaaatgtaaaagaagatagggtaaagggggaacaaagaac

SEQ ID NO: 124389 - DNA, 684 bp, Homo sapiens
cccttctgtcagtagacatttgggttctgaagtttttgcctttaaaactaatgatgttacagatattctaggttgtgtgccctagtgctccagctggctggaattcatgggcggagttcgcgagaagagggaactatacagagaaagaattccagaggtctgcatggtatcccattgagtctgttgcagattacaaagtcatacatgcatttgtaaaccacatgaaaccagacaactattggggaactataagttgaacaaatttcagataagtgaacctcactagaactagaaaatatgtggacaagtatgaaaattttcttctattattttatttaaaagatgattaactgttcatgataaagttaataaagatgtattttgtagtttataatacacgtagaaggaaaacatatgacaacaatagcayagaagatgagactggggaaatggaaatacattgttctaagtttcttactttatgaacaagtataatatttaagggcagactttgataaattatgaatgcatattaaaaatcctagaataccagtaaaaataaccagaatctatagctcatgggccaacagaaaagataaaatagaatgctaattcttttattagaattagcatattagaatgctaaaatgtaaaagaagatagggtaaagggggaacaaagaac

SEQ ID NO: 124390 - DNA, 684 bp, Homo sapiens
cccttctgtcagtagacatttgggttctgaagtttttgcctttaaaactaatgatgttacagatattctaggttgtgtgccctagtgctccagctggctggaattcatgggcggagttcgcgagaagagggaactatacagagaaagaattccagaggtctgcatggtatcccattgagtctgttgcagattacaaagtcatacatgcatttgtaaaccacatgaaaccagacaactattggggaactataagttgaacaaatttcagataagtgaacctcactagaactagaaaatatgtggacaagtatgaaaattttcttctattattttatttaaaagatgattaactgttcatgataaagttaataaagatgtattttgtagtttataatacacgtagaaggaaaacatatgacaacaatagcatagaagatgagactggggaaatggaaatacattgttctaagtttcttactttatgaacaagtataatatttaagggcagactttgataaattawgaatgcatattaaaaatcctagaataccagtaaaaataaccagaatctatagctcatgggccaacagaaaagataaaatagaatgctaattcttttattagaattagcatattagaatgctaaaatgtaaaagaagatagggtaaagggggaacaaagaac

SEQ ID NO: 124391 - DNA, 575 bp, Homo sapiens
aaaactacagtaattaagacttcaaaatgaggtactactgacataaggacagacagaccaatggagtagaattgagagcccacaaacaaatcctcacatttatactcaactggtttttaatgaggttgtcaagacaattcaataggaaaaaatatactttttcaataaatagttcaatgaaaacaggattcactctcacaggttacctgataaacatcaacctccaactcctttgtgcaaattcattttaggttacactaaattaaaccttctctcttccatccaccaactctttcccaccactcacctctccacaaactactcattccatctgaaacctttcttctgttccacactgaaaatatattaagggctatgtcaatgtgcagggcatacaggaagcccatttatgataagccattcttttccattgtcacataatctatgtgcaatattgatatycatcttcagtttgtggtaggatattttgtattttctacttatttataattgtttccatttgactgcagtgtctatattattctactcatgtagattatttttatttcaagaag

SEQ ID NO: 124392 - DNA, 614 bp, Homo sapiens
cttgatgttgtttctccacatcccaaattttctcagtatcttgcaaatgtttgagttattaagttaaaaataaatcaacatttcaacaatctatggactaaaatacaattttgttcatagacaatttttgtgctgctgctccttattctcatgagactctgattaagtaattagaaaacatcacaagtgcaaagggctgggttgggggtgtctcattttcaccagaaactggtgcctttaaaagtgctcacctcctaacaccgatgcattagtgttggcacagactagaatccctgcagcatgggctggcaggcaatgccaatttgggatagcttgaaaatatcattagagagctactgtatgaaagctgaaggtaagaaagagaattcagatgtcagtgtgcaaaaataagtgtgggttttattaaagtcgacatctgaaaattaaagataatttgtgtgtgtgtgtgtgtgtgtgtgtgtgtrtatatgtgtctgtttatatatatatagatgaaatctcactctgtcaccaggctagagtgcagtgcagtggcgtgatctcagcgcactgcaacctccacctcccaggttcaagtgattctcctgcctcag

SEQ ID NO: 124393 - DNA, 562 bp, Homo sapiens
gaggtgtttatggtattctctgatggctgtttttatttctgtggggtcaaaggacatcaccattattttaaaagttcactaaaagtaactttctgagttgcatctgatctatctgtctatctatctatctatctatctatctatctaatcatcttcaatattgataataatatttagcatcaaagttgtacacatttaaaaactagaagccaagaagtagctgtctggagaattaaattgtctaagaaattattaaagaatactaaacaatastttaagtaattatgatttctaaaaataatagcagaaagaacaattttatgagaaagtataatgtgaaaactgttcatttagcaaaaaaacaggcatttcagttttttaaaataaactgcaagaactagtgtcaatttttatgtagagaccaatcatcttttcctgatactttaaaggatttagtgaccagaaataactggtcattagttacattcagctccaatgatttacaatcttcaaagcagcagcttcagcagaatgaagatgaattcaagaattagacaattaa

SEQ ID NO: 124394 - DNA, 556 bp, Homo sapiens
tctcaactttatcataaaattaccaaactgtccccaaatttccagtaactcaattatgctgataccctggrcaggaagtaatggagatgttcagaacagtcagtcaacaaatgttcaaatggaaagcattccaacgttaaatataaaagggtaatatgtggcggcagctggctagcgggggcttcccccctatttatctggaagatagatgtgtacaagaattgagcatgtcatcgtgagctgcagattttaggaaagaatggtccctgttcttccacttccttaaagtcagatttctatctctcctcgtggtctaaattcaaaaacctttgccccagataccactgcaaatttgtctgttattactggttggggaaaaataacccagttcaccttactccaaaaacatgagcatttcagaaaagtttttatactgcctctaaaatgaggccattaagtgatattcaataatcaggcttccttcacccgaatttaagaaatttcctgccgtctttgtgtaatacattttttttttcttccatgtgcgtttaaattt

SEQ ID NO: 124395 - DNA, 565 bp, Homo sapiens
agtgatattcaataatcaggcttccttcacccgaatttaagaaatttcctgccgtctttgtgtaatacattttttttttcttccatgtgcgtttaaattttaacacccctcccccccgcagaatctggagaagaggtgtgcggatcaagacccccccgcccgccattgtctcaagtttaatttacatgctgtaaccaaacccttccctctttagaatatttaacaagattgagattcctttaattccatgttggtagmtgttctgtaaatacctttcaggtttttattttttaacatcccagtaatctaaaaactattctgtttttagatttcaattgtagtaactggatttaaaatcttattacatttattttattagtggaatactcagtttatgcaactgtctcatgtttttcattcctactttctaattctaaggcttgaaaacagccattgctcagtccttcagcttcaccttcccaattcattcattaaacattccgctcagggattaaactgaaatgggaaattaggaaggaacgatttaaaacaaatcatacccagc

SEQ ID NO: 124396 - DNA, 587 bp, Homo sapiens
catgcgttggacagataattagacaaaactgaagaaagaattagcaaactgaagataaacctgagagyactacacagaatctagcaaagaaagagaaagagattgaaataggtggaggataaaatggaagtatccagcaaatatctaactggaattccagaaggaataaacagactggtattaaaagagacattgtctagaaatgagtcatataagatgcctaataagtttgtttctattggttatattcatgtaactctgaagttcaaacaccattaaccacgagagctctgtgattaccgtaggccttctacattgtggtatagtcatggcattttatgcatggaaagaatttttaaggtaacctaatgatgtaacctgatgaacaaagctgagttttcatcctagctctatcacttattaggcaaaaatattgcttaaactctctaagctctagtttcttcaaccataaaatgggaataaaaacaattaatctctaataaaggtttctgtgaaaatcaaaagaaaaatgcatgtagaacgcttaatatagagtctggcacagaatgagattcaacaaatgggaa

SEQ ID NO: 124397 - DNA, 587 bp, Homo sapiens
catgcgttggacagataattagacaaaactgaagaaagaattagcaaactgaagataaacctgagagtactacacagaatctagcaaagaaagagaaagagattgaaataggtggaggataaaatggaagtatccagcaaatatctaactggaattccagaaggaataaacagactggtattaaaagagacattgtctagaaatgagtcatataagatgcctaataagtttgtttctattggttatattcatgtaactctgaagttcaaacaccattaaccacgagagctctgtgattaccgtaggccttctacattgtggtatagtcatggcattttatgcatggaaagaatttttaaggtaamctaatgatgtaacctgatgaacaaagctgagttttcatcctagctctatcacttattaggcaaaaatattgcttaaactctctaagctctagtttcttcaaccataaaatgggaataaaaacaattaatctctaataaaggtttctgtgaaaatcaaaagaaaaatgcatgtagaacgcttaatatagagtctggcacagaatgagattcaacaaatgggaa

SEQ ID NO: 124398 - DNA, 436 bp, Homo sapiens
atctctaacgtaaaaagaccttagaaactgtaacaattgtaaatgcrttataacttaaagagatattatcttcacattagaggctaacaggcttatacctactgatagctgacaagtattacaggaatcctggcaggcaaattgttgcataaaaattatgtaatttactaactgtaaaataacctttagagtttagaatcagtcaaataagtagaacagacaattgttatcaaagccatataaatggctattaaaattatgttttgctaccctcattttatctctgaagagacatcttgttaaaaaatgaataatagacacatataaatacctaattacaagcagagttaagattaaaattcagcctcattggggtgggatagaaatcagtacagtaaagaatattttggtgcaggtagtttgtttcaaatgattc

SEQ ID NO: 124399 - DNA, 436 bp, Homo sapiens
atctctaacgtaaaaagaccttagaaactgtaacaattgtaaatgcattataacttaaagagatattatcttcacattagaggctaacaggcttatacctactgatagctgacaagtattayaggaatcctggcaggcaaattgttgcataaaaattatgtaatttactaactgtaaaataacctttagagtttagaatcagtcaaataagtagaacagacaattgttatcaaagccatataaatggctattaaaattatgttttgctaccctcattttatctctgaagagacatcttgttaaaaaatgaataatagacacatataaatacctaattacaagcagagttaagattaaaattcagcctcattggggtgggatagaaatcagtacagtaaagaatattttggtgcaggtagtttgtttcaaatgattc

SEQ ID NO: 124400 - DNA, 436 bp, Homo sapiens
atctctaacgtaaaaagaccttagaaactgtaacaattgtaaatgcattataacttaaagagatattatcttcacattagaggctaacaggcttatacctactgatagctgacaagtattacaggaatcctggcaggcaaattgttgcataaaaattatgtaatttactaactgtaaaataacctttagagtttagaatcagtcarataagtagaacagacaattgttatcaaagccatataaatggctattaaaattatgttttgctaccctcattttatctctgaagagacatcttgttaaaaaatgaataatagacacatataaatacctaattacaagcagagttaagattaaaattcagcctcattggggtgggatagaaatcagtacagtaaagaatattttggtgcaggtagtttgtttcaaatgattc

SEQ ID NO: 124401 - DNA, 436 bp, Homo sapiens
atctctaacgtaaaaagaccttagaaactgtaacaattgtaaatgcattataacttaaagagatattatcttcacattagaggctaacaggcttatacctactgatagctgacaagtattacaggaatcctggcaggcaaattgttgcataaaaattatgtaatttactaactgtaaaataacctttagagtttagaatcagtcaaataagtagaacagacaattgttatcaaagccatataaatggctattaaaattatkttttgctaccctcattttatctctgaagagacatcttgttaaaaaatgaataatagacacatataaatacctaattacaagcagagttaagattaaaattcagcctcattggggtgggatagaaatcagtacagtaaagaatattttggtgcaggtagtttgtttcaaatgattc

SEQ ID NO: 124402 - DNA, 522 bp, Homo sapiens
tgtggatagtaaaacaattatccatacaggtatgatattggcaaagaatatcacaaaatgttttaatgagcaaacactttggggatggtaataatctttctaccaccttcattgtcttgtttaagtatctctacattcttctttaaaaattaggaatatatctttcttgctcttttgttgttgttgaacaccagaaggggatattccttaattctccatagctaaggacagtacagcacaatattccattcagcaggtgaagtcagtatgaatgaatgcatttcaatcagcaaattgctggttgtgttgcaactcctagttatgatgttttgtgtactttgaagggctcccattaattaaggtatttcttataagcatttagaaagattttttttcttggcatgtgacttgaaaatttgtacygatattttccctgtgacaatgttttgtgaattgtaactcagccactcaagtggctcctcataataaagccacatggtatccatgtacacatatttaaca

SEQ ID NO: 124403 - DNA, 534 bp, Homo sapiens
gctgtaaggactcaggaaatccattctttcaacaaaagttactgaagactttccccattagtatcctaaacaatgtctgcaaaattggttttcatacctggataccttgtcttctaagagacacggcagggaaagatcataggaaaaaagtcaatatcaggcacagctaacaactagcaaacccatagtctttaaaagactgatcctttgattcctatctctcaagtaaagaggtttaggtcatcttcatattacaggaaagtatccctaccaaaaacttctaactaatgactcttaggattcttccaaaagcaaatagtctttgggagaagacagcttccatcaaatgcctttggatcaagtgaatcactatatgagatatcggtatctgcaaaccaagatccacataaaaagatccattgtttgtcatatttaatctgyatatcttgagttttcattttcctagttaactttatctttttatgcttaaggttacatttaattactttacctataaagctactattcctaatt

SEQ ID NO: 124404 - DNA, 507 bp, Homo sapiens
aactgttgtgttcctttctgaaggttttaggggaaaatcagtttccttgacttttccagcctctagaggctgtcctgatttgttagcttgtggtctttcatttgttcaaaccagaaatgctgtatctctctgaccattcttttgaaatcatatcaccttatgtttctagccaagaatgtttccctattttaaacccatttgattacactgaactcaaaaggayactttttcatcttaccatccttaacattataatacttgcaaagccccttttaccagataaagttaacatattcacaggttccagaaatcaggacatgcgttttttttttgttgttggtttgtttgttttgtaaaccattattttgcttcctatactgtcttaattggaggaagcaacttcttcgaataggtgaattaatttcaaattgataatgtggtgattctgaatgaacattaaagaaatcaactattacaccaaacattactttattgagctaaacaaat

SEQ ID NO: 124405 - DNA, 507 bp, Homo sapiens
aactgttgtgttcctttctgaaggttttaggggaaaatcagtttccttgacttttccagcctctagaggctgtcctgatttgttagcttgtggtctttcatttgttcaaaccagaaatgctgtatctctctgaccattcttttgaaatcatatcaccttatgtttctagccaagaatgtttccctattttaaacccatttgattacactgaactcaaaaggacactttttcatcttaccatccttaacattataatacttgcaaagccccttttaccagataaagttaacatattcacaggttccagaaatcaggacatgcgttttttttttgttgttggtttgtttgttttgtaaaccattattttgcytcctatactgtcttaattggaggaagcaacttcttcgaataggtgaattaatttcaaattgataatgtggtgattctgaatgaacattaaagaaatcaactattacaccaaacattactttattgagctaaacaaat

SEQ ID NO: 124406 - DNA, 507 bp, Homo sapiens
aactgttgtgttcctttctgaaggttttaggggaaaatcagtttccttgacttttccagcctctagaggctgtcctgatttgttagcttgtggtctttcatttgttcaaaccagaaatgctgtatctctctgaccattcttttgaaatcatatcaccttatgtttctagccaagaatgtttccctattttaaacccatttgattacactgaactcaaaaggacactttttcatcttaccatccttaacattataatacttgcaaagccccttttaccagataaagttaacatattcacaggttccagaaatcaggacatgcgttttttttttgttgttggtttgtttgttttgtaaaccattattttgcttmctatactgtcttaattggaggaagcaacttcttcgaataggtgaattaatttcaaattgataatgtggtgattctgaatgaacattaaagaaatcaactattacaccaaacattactttattgagctaaacaaat

SEQ ID NO: 124407 - DNA, 407 bp, Homo sapiens
ataaaaaacccatattatcgatcagggacctgtggattatgtgctattagaaccatacaaaatgtctctatatagttttctgtatctttggaatatctttgggtgaagctgcagaccttcttggtgagtgttacagctctgcgcagagccaaacagtgagcagcagcaagattgcaaagagcaaaagaacaaascctccacactgtggaaagggaccctagcacgttgctgttgctggctctggcagccgcttttcttcccttatctcaccccacccacatcctgatgattggtccatttcatagagagctgatgggttcattttacagagagctgcttggtctgtttacaatcctttagctagacacaaaagttctccaagtccccaccagattagctagacacag

SEQ ID NO: 124408 - DNA, 407 bp, Homo sapiens
ataaaaaacccatattatcgatcagggacctgtggattatgtgctattagaaccatacaaaatgtctctatatagttttctgtatctttggaatatctttgggtgaagctgcagaccttcttggtgagtgttacagctctgcgcagagccaaacagtgagcagcagcaagattgcaaagagcaaaagaacaaagcctccacactgtggaaagggaccctagcacgttgctgttgctggctstggcagccgcttttcttcccttatctcaccccacccacatcctgatgattggtccatttcatagagagctgatgggttcattttacagagagctgcttggtctgtttacaatcctttagctagacacaaaagttctccaagtccccaccagattagctagacacag

SEQ ID NO: 124409 - DNA, 407 bp, Homo sapiens
ataaaaaacccatattatcgatcagggacctgtggattatgtgctattagaaccatacaaaatgtctctatatagttttctgtatctttggaatatctttgggtgaagctgcagaccttcttggtgagtgttacagctctgcgcagagccaaacagtgagcagcagcaagattgcaaagagcaaaagaacaaagcctccacactgtggaaagggaccctagcacgttgctgttgctggctctggcagccgcttttmttcccttatctcaccccacccacatcctgatgattggtccatttcatagagagctgatgggttcattttacagagagctgcttggtctgtttacaatcctttagctagacacaaaagttctccaagtccccaccagattagctagacacag

SEQ ID NO: 124410 - DNA, 599 bp, Homo sapiens
atcaaattttagcatgagatttggtgggtacaaacagtatattcaaactatagcacttaccatatggttctgcaatcgtgctacttggtatttacccaaaggagctaaaaacttatgtccacataaaaagctgcaaaaggatgtttatagcagttttattcataatgaccaaaacttggaagcaaccaagatgttcytcagtaggtgaatggatacataaactgaggaatatccaaacaatggaatattatatagagctaaaaagaaatgagctataaagacatggcagaaacttaaatgcttgttactaagtgaacagaaaatccactgtatgattccaaccatatgacattctcaaaaaggccatatgatggggcagtaaaaagatgaatggttgccaaatgttagagagagggagggataaataggcagagcacagaggatttttagcgcagtgaatctactctgcatgaaactaaaatgagagctacatttgtttaaatgcagtttggaaacgtgaagtttgtctgataatgatgagtaaatgcaagttcaaaaattgtaacaaaatgtaccactctagtgggagatggaaaagg

SEQ ID NO: 124411 - DNA, 593 bp, Homo sapiens
ttctagaagtagagtttaagacagtgattcatatgcatacattttattgggcatacttctgtcagacaaggccaattctctggagtgagctgacatcacttggcagctggagatcgctcactgacccagtaaagaatatctmggtagggcactgtccaacccttgcaagcctcagatgaatatggctctcgcattaagttcaccatatccatggttacaaacgctgcccattcatagctcaatgtgggcaactgtgcaattggcattatgcttcagagccgaactttatgaaatacagtttatgtagccaaaccttccactaggagctttaaaaaaacataaaaataaaaaggtttaagaggaaattttaatacactaacaggccacttagagaatatttcagtgttcaaatgcaaattcttagcatggtatggtttttcaattgttaaaaaaaattgaattcaaaaactgtatatataaaatgttacatttttctctaaattaagagtctcaaactccagtgaaattaattttaaaattcttaatatcaaatatgtatattagcagttttttaagattaaacatagtctatt

SEQ ID NO: 124412 - DNA, 593 bp, Homo sapiens
ttctagaagtagagtttaagacagtgattcatatgcatacattttattgggcatacttctgtcagacaaggccaattctctggagtgagctgacatcacttggcagctggagatcgctcactgacccagtaaagaatatctaggtagggcactgtccaacccttgcaagcctcagatgaatatggctctcgcattaagttcaccatatccatggttacaaacgctgcccattcatagctcaatgtgggcaactgtgcaattggcattatgcttcagagccgaactttatgaaatacaktttatgtagccaaaccttccactaggagctttaaaaaaacataaaaataaaaaggtttaagaggaaattttaatacactaacaggccacttagagaatatttcagtgttcaaatgcaaattcttagcatggtatggtttttcaattgttaaaaaaaattgaattcaaaaactgtatatataaaatgttacatttttctctaaattaagagtctcaaactccagtgaaattaattttaaaattcttaatatcaaatatgtatattagcagttttttaagattaaacatagtctatt

SEQ ID NO: 124413 - DNA, 593 bp, Homo sapiens
ttctagaagtagagtttaagacagtgattcatatgcatacattttattgggcatacttctgtcagacaaggccaattctctggagtgagctgacatcacttggcagctggagatcgctcactgacccagtaaagaatatctaggtagggcactgtccaacccttgcaagcctcagatgaatatggctctcgcattaagttcaccatatccatggttacaaacgctgcccattcatagctcaatgtgggcaactgtgcaattggcattatgcttcagagccgaactttatgaaatacagtttatgtagccaaaccttccactaggagctttaaaaaaacataaaaataaaaaggtttaagaggaaattttaatacactaacaggccacttagagaatatttcagtgttcaaatgcaaattcttagcatggtayggtttttcaattgttaaaaaaaattgaattcaaaaactgtatatataaaatgttacatttttctctaaattaagagtctcaaactccagtgaaattaattttaaaattcttaatatcaaatatgtatattagcagttttttaagattaaacatagtctatt

SEQ ID NO: 124414 - DNA, 510 bp, Homo sapiens
gagagctgccaggtgaagcaaacaagcaaaacaattgcatgtttaaaaaattaaacaagtagccaacatttggaaaattatattatggaaaagaaaaacctttccaaatttgcaggataaagtctctgaaagtgtcgaaagggacttaaaatgagaagctacaaatatgttcattatcraacaatggccatgggtaaaaaagcaaggagtgctcaagaagggaagaaaaacaaaatggaagagacagactaacaccacatggataaagagactttattatattttaaaattatatacagtaattattatatacattcattcataaattctatataagtaaacattctaatcacagtgtttcaattccatttttctcaaaacacacacacacacacacacacacacgaaaagcctgtaacctttgaaagcctaaaatgtaggagttcctccaggtactcacttcatagttcagatggatcttaccagattattagcaacaagaattcagtg

SEQ ID NO: 124415 - DNA, 510 bp, Homo sapiens
gagagctgccaggtgaagcaaacaagcaaaacaattgcatgtttaaaaaattaaacaagtagccaacatttggaaaattatattatggaaaagaaaaacctttccaaatttgcaggataaagtctctgaaagtgtcgaaagggacttaaaatgagaagctacaaatatgttcattatcgaacartggccatgggtaaaaaagcaaggagtgctcaagaagggaagaaaaacaaaatggaagagacagactaacaccacatggataaagagactttattatattttaaaattatatacagtaattattatatacattcattcataaattctatataagtaaacattctaatcacagtgtttcaattccatttttctcaaaacacacacacacacacacacacacacgaaaagcctgtaacctttgaaagcctaaaatgtaggagttcctccaggtactcacttcatagttcagatggatcttaccagattattagcaacaagaattcagtg

SEQ ID NO: 124416 - DNA, 593 bp, Homo sapiens
gtgtcttcagtgcatgcccagatattcccacatgttcaaccttccacttagctcccaataaaacatgtttcttttttcacaactaggagagctctccttttcatacctctgcagtgacatratggcatactaaatagagaagtaaaaggttcatatgaaactgtaatgtaaatattattcacatattgaaattctgtaaacagtattaatatttttcctgtgatgcttttaaattttaatattctgtaaagtatattttaagcattcacaatttggatttattcgtgataagagtatattttacctataatagattgggaaatatatacatatgtgtgtgtgtgcatgcgtgtgtgtgtgtgtgtgtgtgtgtgtgtattaatatattttccttgagactagtagtgaaggcaaagttctgaaactgaatttgccaaaatgggattagatgtgtgagggatttatttggataaacacttttgcaaggtgaggtggaggaagcaggaatagacacagccttcagccacaatacttgtaaaccttatgaaggaggaaagaaaataaaaaaggttaggtaaaatgagtttcagata

SEQ ID NO: 124417 - DNA, 593 bp, Homo sapiens
gtgtcttcagtgcatgcccagatattcccacatgttcaaccttccacttagctcccaataaaacatgtttcttttttcacaactaggagagctctccttttcatacctctgcagtgacataatggcatactaaatagagaagtaaaaggttcatatgaaactgtaatgtaaatattattcacatattgaaattctgtaaacagtattaatatttttcctgtgatgcttttaaattttaatattctgtaaagtatattttaagcattcacaatttggatttattcgtgataagagtatattttacctataatagattgggaaatatatacatatgtgtgtgtgtgcatgcrtgtgtgtgtgtgtgtgtgtgtgtgtgtattaatatattttccttgagactagtagtgaaggcaaagttctgaaactgaatttgccaaaatgggattagatgtgtgagggatttatttggataaacacttttgcaaggtgaggtggaggaagcaggaatagacacagccttcagccacaatacttgtaaaccttatgaaggaggaaagaaaataaaaaaggttaggtaaaatgagtttcagata

SEQ ID NO: 124418 - DNA, 563 bp, Homo sapiens
tccaaacccacactctccaatagccaggctctcagatgggaagcttcaaagccttgtgacagcctggctgaacctctccagcctgggcgctccctccatttcctgccccggaaacaggcatctcctctggccacctcccaaagcctgtctggaagcctcaggcacccgctcctggaagcctgtacgattcacaacaaagggccygtccacccagtcgtgctgagcacacccctattcccccgagctctgaattgtcctttgcccaggctaggacaacatctcagagccttctgcctgctgcagactcggctcagcccaaatcactccatgaaattggggtgtggcatctgcctcaaggagcatttctacaacctctgctgcctctaccgcaaatgaaactggctctcacccactggctctcggtgacgggcacagtgcggagccccacagggagtgtgtagaagtcaaaggccccagtgacttctgtgcagtcagccgcacctatgacagccaaagcgccaggtgtgagcgccccgacagcctgagccccatctggcctgccc

SEQ ID NO: 124419 - DNA, 563 bp, Homo sapiens
tccaaacccacactctccaatagccaggctctcagatgggaagcttcaaagccttgtgacagcctggctgaacctctccagcctgggcgctccctccatttcctgccccggaaacaggcatctcctctggccacctcccaaagcctgtctggaagcctcaggcacccgctcctggaagcctgtacgattcacaacaaagggcccgtccacccagtcgtgctgagcacacccctattcccccgagctctgaattgtcctytgcccaggctaggacaacatctcagagccttctgcctgctgcagactcggctcagcccaaatcactccatgaaattggggtgtggcatctgcctcaaggagcatttctacaacctctgctgcctctaccgcaaatgaaactggctctcacccactggctctcggtgacgggcacagtgcggagccccacagggagtgtgtagaagtcaaaggccccagtgacttctgtgcagtcagccgcacctatgacagccaaagcgccaggtgtgagcgccccgacagcctgagccccatctggcctgccc

SEQ ID NO: 124420 - DNA, 563 bp, Homo sapiens
tccaaacccacactctccaatagccaggctctcagatgggaagcttcaaagccttgtgacagcctggctgaacctctccagcctgggcgctccctccatttcctgccccggaaacaggcatctcctctggccacctcccaaagcctgtctggaagcctcaggcacccgctcctggaagcctgtacgattcacaacaaagggcccgtccacccagtcgtgctgagcacacccctattcccccgagctctgaattgtcctttgcccaggctaggacaacatctcagagccttctgcctgctgcagactcggctcagcccaaatcactccatgaaaytggggtgtggcatctgcctcaaggagcatttctacaacctctgctgcctctaccgcaaatgaaactggctctcacccactggctctcggtgacgggcacagtgcggagccccacagggagtgtgtagaagtcaaaggccccagtgacttctgtgcagtcagccgcacctatgacagccaaagcgccaggtgtgagcgccccgacagcctgagccccatctggcctgccc

SEQ ID NO: 124421 - DNA, 563 bp, Homo sapiens
tccaaacccacactctccaatagccaggctctcagatgggaagcttcaaagccttgtgacagcctggctgaacctctccagcctgggcgctccctccatttcctgccccggaaacaggcatctcctctggccacctcccaaagcctgtctggaagcctcaggcacccgctcctggaagcctgtacgattcacaacaaagggcccgtccacccagtcgtgctgagcacacccctattcccccgagctctgaattgtcctttgcccaggctaggacaacatctcagagccttctgcctgctgcagactcggctcagcccaaatcactccatgaaattggggtgtggcatctgcctcaaggagcatttctacaacctctgctgcctctaccrcaaatgaaactggctctcacccactggctctcggtgacgggcacagtgcggagccccacagggagtgtgtagaagtcaaaggccccagtgacttctgtgcagtcagccgcacctatgacagccaaagcgccaggtgtgagcgccccgacagcctgagccccatctggcctgccc

SEQ ID NO: 124422 - DNA, 580 bp, Homo sapiens
gtgaatgctaagcagcacttcagcactatgcttgggggttaatttaaatggcaaaacaaccaacaaacaatacaaaaacaggaaaagcatggcattaaatagaccacaaaaaggatacctgactattgtatgagagctgaaaaagaaggcagaatatcatcctgttcaaactcaaattcttttgacactctgcgcaaacacatgactatgaaaggctgtgagtactgatttgggggttacaaaaaatagtaggtgagttcacaaatacaaaagctgaaaacaaggaggatmgactgtattttcgtagacaatctaatctcagaagatttcaattcagacaaaaatcatgagaattactgtattacaaaagggcactagataggggaaaaagagtaaaaatcacaattaaaacaaaggttcaaaattctgcagcaaccatatccagttacactttaatatgtttgtggcagactacattattgttcccaactcatcacccctccctatatctaaaacctttccccaagacaatgcagttcctcctgctagagatcaggtatatttatctatactatcaatg

SEQ ID NO: 124423 - DNA, 580 bp, Homo sapiens
gtgaatgctaagcagcacttcagcactatgcttgggggttaatttaaatggcaaaacaaccaacaaacaatacaaaaacaggaaaagcatggcattaaatagaccacaaaaaggatacctgactattgtatgagagctgaaaaagaaggcagaatatcatcctgttcaaactcaaattcttttgacactctgcgcaaacacatgactatgaaaggctgtgagtactgatttgggggttacaaaaaatagtaggtgagttcacaaatacaaaagctgaaaacaaggaggatagactgtattttcgtagacaatctaatctcagaagatttcaattcagacaaaaatcatgagaattactgtattacaaaagggcactagataggggraaaagagtaaaaatcacaattaaaacaaaggttcaaaattctgcagcaaccatatccagttacactttaatatgtttgtggcagactacattattgttcccaactcatcacccctccctatatctaaaacctttccccaagacaatgcagttcctcctgctagagatcaggtatatttatctatactatcaatg

SEQ ID NO: 124424 - DNA, 551 bp, Homo sapiens
cagtggtggttgctgaagattggggtggctgtggcaatttcttaaaatgagacagtaatgaagtttgccacgttgatcgattcttcctttcacaaaagatttttcagtagcatgtgatactgtttgatagcattttacctacagtaaaacttctttcaaaatctgagtcaatcctctcaaaccctaatgctgctttatcaactaagttgatggaatattttcaatcctttgttgtcatttcaacactgacaaccagaatatattctatctccagagaccactttctttgctcctccataagaagcaactcttcatccattaaagttttatcatgagattgtagcaatttagctacatcttcaggtgccacttctgactctttctcttgctctttctcccaaatctgcagcaacttcctccactgaagtcttgaacccttcaaagtcatccatgagggttggaatgaacttcttataarctcctattaatgttgatattttggcctcctactatgaatcatggatgttcttaatggcatctagaatggtgaa

SEQ ID NO: 124425 - DNA, 639 bp, Homo sapiens
tgacaatatttcacaaataccacaaaaggaccatgctcagcaaagacaattccaggcttggcactaagcaatgtaatctatcaactggcaccagtgagtctcacttggtgtgaatgttccacagcacagaccagtaccactcttagatctgggcaagaggagactaacttgggcactgtgattaagaggatttcactctggtctttctccaggcaccatccttctcacagggtgagggtcccaggggccaaagggctatgcctacctagaaactgactcccttcttttaaaccatatttcagatatgaggggccccagaatttcagctctgccactggcccttttctgagtccctctacccttgagtggacagtgcctctggcagtcatatctttaggctgggggttgtccaaggagcagccattataagaagaatgaacacagatgtgttcacaagacctttcatgtgttgggcaaactcagggtgggaaaagagagtagaagggctgtgatccagggcctarctcttcccacaccaccatacttcagcagagacctcagaagagtcctaaaactctctatataaatagtattcagtttaggtaataattgagttactatgtggcaggcacaatcagg

SEQ ID NO: 124426 - DNA, 572 bp, Homo sapiens
ccactgcacccggccaactttttatctgaaccaaagtagatgtttataaagaattaaatcaattactatattgtaggagtgatcaaacagtccacatgaggaacaccatgaacagaagacaatgtaaaacaccgtaacagagaacaaaaacagactctgacagattgctttataaacagggaaaacaaccctctccaagcccccataaccactattccactctctacttctatgagatcaacttagatgtactaccttttacctgtctttaccaataggtcaattaggaaaggaaaaaatgtgaattcctttttgggaactgtttcacctgtttccaaaggttagtgtctgctttcattaccatagtcaagatattctcaaatgcctgtttttatctcctctttgactcaggttgttcaagagagttttaaattgaaggtgaacagtctttgttgtyagaagcagcctgattctttttgccccatataatgttatctttttacctagctacccaaaagactatctttaaggtccaaaacttttctagaatatgttctgctatctagcgtata

SEQ ID NO: 124427 - DNA, 571 bp, Homo sapiens
aaaaagtatccaaaataaaagagagagaaaaaagaattaggagaaaaaatttgacagggcagtgaactgtgaaccaatttcaaggaaagacatatacatttcattgaagttcctgaaggacaagagagagagaaaagaacagaaatatgtaataaaattatgaccaaaatttttccaattttgataagctacatacccaagaagctcaataaactaaaggcacaagaaacattaaaaaaaaaaamaaaaaacctacatcaagggacatcataatcaaaccttccaaaatcagtgatttttaaaagaaaatgggaaaaagcagccaaataacaaaagacaggctatacacagaagaactaagataagtatgacaacagaattatcttcagaaaaaaagcaggcagccaggtagccaagagtggtggctcacaccggtaatcccagcactttgggaagctgaggcaagagggcagcttgaaaccaacagttccagaccagcctgggcaacatagcaagacatatctctgttcattaaaaaagaaaaaaagaagtagaaaatgagtgataagac

SEQ ID NO: 124428 - DNA, 670 bp, Homo sapiens
ccttgaacctccacctggcatgaacacttctgtattcagatcataatattgctgtctgctcagatttttaaactgaattcatcaagaaaagccctccaaaagaatgcatcatctggccttgtacttctaccataaataaaatgctattatctacttcttagtataaaggttcacaaggagaaaagggaatgccttaagtttttgtttgttcctttgctggtttgtttcctgctgttgtagcaattgcagcagagatctagaacctcaataaagagaaagcttgctcctttaccaaattaaaaatccttctgattactttaatgtgtgtggttttatcgttttcttttatttaagtcacaaactgcaattggcatttaaagtgccatagcattataattaatactaattataatggcaataacctaagagccaggaggtagtgtgggagggagcacaatagtcccttttcaggacacttattaaaagcaacctgtcactggcctyccttgtggctgcagttcaatctaattcggtactgaatggaaatggtcacctctcctgtgcagagccctgagcttgtttttggaccccagtccttcattcatgcataacctcagcagccacagaataaagcttcctatctgtactggcaccaccttcaaccacacgt

SEQ ID NO: 124429 - DNA, 602 bp, Homo sapiens
agatttttttcatctttcacatttcaagcttttgtttgggaagccagcctattgttcacctgtgattgcattttctttctgtttacggggaaaagaaaagaaattatcaaacaagttaagggatcaaaaataataataaaagtgcctttggcatgaacaaaaagcatatatcaattaacgcagcccagtagaagtaaaagcatgtgactggtgccaagtactccactcacttcatctacaacattgtgtttgttgagagtctgcagtttgtatgatatcattccagaggttttaagtactgaatatcatttttaaygctaccatgtctccattctcaacacaattgccccttaattttgcttactatttatttctgtgtcgtttccttgacctacacagccttccttctccctttatcctcctccatctgtctaaatcccattcatcctcccaggttatgccttaaataatatccctctttggaatctccctgcctgcttcaaattcagtcagcaatgcctttctctgcacgtctcagtttctgaatttgtgaaatggagatgataatagtatctgtcacataagattgtagtgaagacaca

SEQ ID NO: 124430 - DNA, 637 bp, Homo sapiens
aatcatgaaagagaacggataaaataataagaagctttaaaatatgcctaagagaatttccagaaagaaaaaaggaatggagaggcattactgaagagataatgtataactcaaagaaaattaactcaaagaaatacctacagcatattcaagtatgttaaagaaaaaaaagagaactcataacaaaaactataacatatcaaatattaagaatcataacagctatcaaaagtaataaaatcatctaaacaggtaagatcttcagataggcagcagacttttcatcagtaaaaacagaagtcagaagtagaagtaagaacatcttcaaagcactaagtggaagataactctcaactataacattcctaccagcaatggaggattccaatttctccacaaccttaccaacaaccgtttttttaaaattgcaactatcattgtgggagtgaygtactatcttatgtagttttgattcacatttccctaatgactcaggatgttgagcatctttacatgtgcttattggcacatttgtgtatctactttgaaataatggctattccaagtattgcccatttttttcctccaacttttattttaggtttgggagtacatgtgcaggtttgatacgggggta

SEQ ID NO: 124431 - DNA, 453 bp, Homo sapiens
aagacagatgtttttttaagtggaggtgaaagacagcaacaatgctttttgatcttctgaacttctccacaaaccagacagaagaactaaactagaataaaaaaatcaaagaaaatatccccaacaaaatatttccaacagaacttagtaacaaaatattcccacaatgatcaaaccaattcaagacagctacctgacttatgtagtaacaatatctgatgggagaaaccagtgggaaagccactaatcttttcacagttttgaaagagaggaacccaaaatcacaacagatactaattagaaaactcagcccattaagtaacacgagttaaacaaagagttttcmaggttccaatttaacaatgggtgtaagggaactgctacaagactagttctaatgatgctggggcagtctggaatgtgtaaaccttcaaaactgacaaattcgaattc

SEQ ID NO: 124432 - DNA, 631 bp, Homo sapiens
caacaatgcacttgattagaaattatgtttaagtaaagtgaatgacagcaatgggataagaggcatgaattaggaatattttattatcataaggtacttgcactacctgtgaagtgttatagagttatttgaaagtagacttggactcattgttaatgtatattgcaaattctaaggcaaccactgaaagaagtaaaaaaagaagtgtaattgatgtgctaagaaaagaaagaaaattgaatcatataaaatgctaaattaaaactacaaatggcagaaaaaagagtggaagacaaaaataggaacaaagaacaagggcaattaatagcaagcagtaacaaatatggtagatattaatccaacaatatcaataattactttaaacatcaatagtcaacatatgacaactaaaagatattgccaaagtagattaaaaacaagatccaacattatgttgtctacatgaataccacttaaatataaaaatacatataattaaaagtaaagggatggagaaaaatatatcacrctaacactaatcaaaagaaaactggagtagctatattaatttcagacagaccagactccagagctgaggtaattatcagggataaagagggtgctgtagact

SEQ ID NO: 124433 - DNA, 585 bp, Homo sapiens
gaaagtctgaagatctgagaaagaaaaaaaagtcaatagaacaaggtcccataggaagaaggcaagatcagaagcaattctttatctaatattaactccccaaatcctcagtgaatgcctgtgtgccaggctcggcttggcactggggaatcaatggtgaacttgattcccaaaggggccctgacctcaggaagcgtcgaggctagcagtggggcgacaggtgagaaacaagggaagagacaaacataggccatggtatgtgtggtgaaggaaacaaaccaagtgctggataaaacattatcttccataaatggtgacactaaaactgaaacctgaagtttgggaaacagccttatagagactggaggggagaggtcaaggtggggagtcacggggagaaggggacaaggtgctgcaagaggaaagcagaatccgcygggatgtcttaaaaatactcctgggaggatgagggataaaaaactacatattgggtacaatggacactactcagatgatgggtgcactaaaatttcagacttcactatacaattcatccacgttaccaaaaaccacttgtaaccctga

SEQ ID NO: 124434 - DNA, 547 bp, Homo sapiens
gtgattatgattccactttctttacttggtcagttctgtcattgtcatctgtcatggacttcacatagacctaaatcacaaagacatttaggtcaatgatgacgatgacgatacttgtggtgctttccagtttaatggttgtacatccccaatgaaaaatgtgtttcttttctttaatggtaaactttggtttgcaattgtacagaaaataagatttcaatgcatgatgtggttcataccaacagtgcctgaaacagatgcatctggccccagaaacttacttcatgttgrattgtgaaactcctgctccaggagatgtgtacagatagctctttgtctcttcattttttcctcccctcattgtcctttctttaattacacttaatgaagacttactatgagcaaagcatagttctgggcactagaaacaaacaacaacaaaaaaatcaaataagactggttcttcccttggggaatagatggaatcagaggagtaagccagtgaagaccagggtggtaagtgttaagagggaggcaagctctgggt

SEQ ID NO: 124435 - DNA, 641 bp, Homo sapiens
acaatctgttttgatccaagattgaaagattattattattagctttgtacttttttactgaggtcaacatatacacagtaaagtgcactcatcttaattgcacagctcgatgaatttttatctatgtatacaaacatggaaccagcacctagatgaaaataaagaacaattccagcaccctaagactcgatcacactccttttcccatctcctccttcctgcaacaatcaatacatctgactcctgccagaggtaaccacttatctaatttttatctccacaaattaattttacctgtgtcttaggctgttttctgttgcttataataaaataacagaaactggataatttataaataaaataaatttatttcttacagttatgaaggctgagaagttcaaagtcaaggggccacatctgatgagggtcttattgttsttaaggaccctctgcagagttccaaggctgcacagggcatcgcatggtgaggggctgagagtgctctgatctcacttactcttcttataaagccaccagtcccactcccattatagcccactaatccatgaattagttagtccattcacgagggcaaatctcttatgtccccatcaccccttaaaggcctctccatactgcta

SEQ ID NO: 124436 - DNA, 592 bp, Homo sapiens
ctgttttctgttgcttataataaaataacagaaactggataatttataaataaaataaatttatttcttacagttatgaaggctgagaagttcaaagtcaaggggccacatctgatgagggtcttattgttcttaaggaccctctgcagagttccaaggctgcacagggcatcgcatggtgaggggctgagagtgctctgatctcacttactcttcttataaagccaccagtcccactcccattatagcccactaatccatgaattagttagtccattcacgagggcaaatctcttatgtcccmatcaccccttaaaggcctctccatactgctaccttggggattacgtttcaacatgagttttggagggaacgcacattcaaaccatagcatcctgtatttgaacttatgtattcttttgttcctaatgtgagtattcgtatctcctgcatgttgctgcatgcagttgttaaagattggtttttaagaaaatcaaacactcttaaggccatagggaaatatttaacatcatcatagtgatttgattcatgttgtctgttggggaaataaaccagatgtatactgcttagc

SEQ ID NO: 124437 - DNA, 524 bp, Homo sapiens
gggtcaggggcttctgttctggacacatccagaaaaataaatagctttggatcttgttgggtgaagttggaagaaaagaggattatgctctctaatggaaggcgcaatcccggagagctttaaaacccagggaaaggagacattgaaaggcaaactctctctggagaatggagcaagaacagcctaaggtcatcttagctccttcaccaagacactrcagtggggtctgcagtaggaacatgatgcctgctcacagtgtgacctagaaaaacccggctcctctgttcatctggcccgtgtttccctctgggtcactaggagcctgcctctcccccaggtgcgttcttcttcatggaggagtcttggagacctctcctgcccttccccttcaacagccgacagcacagggccagatgctgcccacccatctttgaaaaacctggacattctcctgactgtcatcaacaagtgaaaggactcattctggagtaagggaaagaggatgagatttaggattagggaaa

SEQ ID NO: 124438 - DNA, 607 bp, Homo sapiens
ggggtttaggaaagtgaataccagtgagttccaccaggccattttagaggctgggcagaagcttctcttaacttctaattgctcaggaagtaggcacaatgttttttttggttttttggggkttttttttaatcagtcataacctcaagttagaaaaatgcctgtccgggatccctgaactttagaatgggtctatgctggaagagccactttggagcctttttagagaccatgtgtgggtgtcacttggatttttaatctcttttgtaaccatctcctcctttcagaagtcactacagctcctccagctaaggcctgaagtgcctagaccaggagacatctcatctcctgcccctagactccagcaggcactgtggacactgaccttcctaagaccagcttgaccatggcccactgtgaaaccttcaggggtgccatatggccttgaggattgcaagaccatgtaatttatcatccaagcagggacacttaagaggaaaagggggcactagtaatagtcacattgggacgaagcaccctgggaaactggaccacaaggtcatcctactatatagaataaatccaatccctctaacggcttgaattc

SEQ ID NO: 124439 - DNA, 652 bp, Homo sapiens
gcttgaattcaagattctccaccatctgggyccgacttacttcacagtctttttgcgttctgactgtgccacatggtctaatcacagtgggcctgcaggtgcccagcatgccttgggcttcactgtctctgtccatttgctcacggcagtccctcctcctgcctccacccatccccatccccaccagtctgtaacgcccccttatccatctaggtaggtctaaatctcaccctgcattcaaaacagaatttaactagtatcattcattactgcattcatccaacaaatatgtactgcctgcttgttatggcacatggtgaaaaagactgaaaaaattccatctccctgaaactttaattcaagtgttgggggaggtgcatgcacactcacataaccgtgataattggtcctaaggaagacacacagtgacatgctggagaagccaccctgttatggttttgaacagacacaaccaccaccccacaaggctgtagtaagctccttgagggctaggccaaagaggtccatttcccacccctgctaaacctatcacacgcccctgggtagagcgggtactcaacaaacatttgctaggtgaagaattaatattaaagaagcttacttacttaatctgaagagagtttgctaacaa

SEQ ID NO: 124440 - DNA, 585 bp, Homo sapiens
ggagtgtggctggagcaggaagtaggaaatctcttaggatgagggacaggatatgagacaggatcagccacccagcyccagaattaatgcggctgctccctttactgcacccttggaaaatcattagaaagaagatgatttctttacagaagcccaagggtgcttgagcttggatggagctgagttagcctcaagaatgaaggagttcaccagtgtggataggtctatccaaatttggcctaacgcaccctatgagagaggtaccttctgcaccataaaccatagccccgagaaatggtgactgccagcggccatattaagtcctcagggacccaagagagcagagtagctgcctccaccctactccagacatcacagtccctgacctagggtcgccaatgccaactcagctctgtctggccacacgatagccctgaattgacatccacacccaccccccaccaaggtcagtgggttttacctgtcactgtctaggtctgaggcaccagctgggcctggtggctccagatctgggtagtgtagttcttcaggtgtggtcaccagcccagcagcattgcctgggaa

SEQ ID NO: 124441 - DNA, 585 bp, Homo sapiens
ggagtgtggctggagcaggaagtaggaaatctcttaggatgagggacaggatatgagacaggatcagccacccagccccagaattaatgcggctgctccctttactgcacccttggaaaatcattagaaagaagatgatttctttacagaagcccaagggtgcttgagcttggatggagctgagttagcctcaagaatgaaggagttcaccagtgtggataggtctatccaaatttggcctaacgcaccctatgagagaggtaccttctgcaccatamaccatagccccgagaaatggtgactgccagcggccatattaagtcctcagggacccaagagagcagagtagctgcctccaccctactccagacatcacagtccctgacctagggtcgccaatgccaactcagctctgtctggccacacgatagccctgaattgacatccacacccaccccccaccaaggtcagtgggttttacctgtcactgtctaggtctgaggcaccagctgggcctggtggctccagatctgggtagtgtagttcttcaggtgtggtcaccagcccagcagcattgcctgggaa

SEQ ID NO: 124442 - DNA, 585 bp, Homo sapiens
ggagtgtggctggagcaggaagtaggaaatctcttaggatgagggacaggatatgagacaggatcagccacccagccccagaattaatgcggctgctccctttactgcacccttggaaaatcattagaaagaagatgatttctttacagaagcccaagggtgcttgagcttggatggagctgagttagcctcaagaatgaaggagttcaccagtgtggataggtctatccaaatttggcctaacgcaccctatgagagaggtaccttctgcaccataaaccatagccccgagaaatggtgactgccagcggccatattaagtcctcagggacccaagagagcagagtagctgcctccaccctactccagacatcamagtccctgacctagggtcgccaatgccaactcagctctgtctggccacacgatagccctgaattgacatccacacccaccccccaccaaggtcagtgggttttacctgtcactgtctaggtctgaggcaccagctgggcctggtggctccagatctgggtagtgtagttcttcaggtgtggtcaccagcccagcagcattgcctgggaa

SEQ ID NO: 124443 - DNA, 587 bp, Homo sapiens
tctttcccacctcaaacccccattccaccctctaccccatgaggtcccaaaggagatgagcagagaacaagacctggcaaagagaggttgttaatggagctccgacctcaaaccctgatgtctcaccttagactcatttccaggagtggggccctgggtttcatattttaaaaagcatggcatattggcgtatgtctcccccgacccccaccaccactgccattggaatgcctaaggccagtggtgtgctgaagctggcttgtaccagctcgtgagagctgattgttaaacttttaagaactttgcaagctgattattaaacacagctattactgaaagctaaattatataagcttaggattcaataaattataccggaagcaaagataataaatacccaaagctcaccacttcctattcatttactattatctatgttcttgaggtttttacctctattgtatctttaatggtggaaatactatgtaataatgsagagctatgcatctcttcctaattctacactcagtaacattacattggaagcttgaaatcagagcatttataccaccgaaatcagcaaatac

SEQ ID NO: 124444 - DNA, 608 bp, Homo sapiens
ggaattcaaagagaaacctactttacacatgttagatttgagatgcttgtaagcgatgcaagtagaaatttcatgtgagaagttggatatacaagtctgaagcctcagtatctcagaattagaggtagaatttggaagagtcatcattatataaatggtatcaaaaccttggaattggaactggaacttctagcctggggagatgccaacattgagaggaaaggaataaaaatgagtgagtgggcagaaagtggaagaaaaccaggagagtatagtgacataggagccagtaaaagaatatatttcattcaactcaagaatgttcctaawtgtgggagtatgctgaatacagaattttaagtgaggactgtggacttaggtggtaggtttgggggtcattagctggcagatggttttagaagtcttcactgtgaatacctgtgggtaagtagataaagtgaagagaaagctgagagagccatgaaaggtaagcagagtaagttcatgaactgttacatttgaatttgtacaaaccaaatctttctatgtggttatcattaaaagcttgtaagcactgtaagtccatttatatttctattcctaaaggg

SEQ ID NO: 124445 - DNA, 585 bp, Homo sapiens
tgacttggtatctccatctttaaaataatatcccccataaaagctagccatgaagatcaaatgacttgtgcaagcagattttgaaaattctgaaatactctcccttcaaaggcaaggaattattatctactgcagcataaactgaagcgaggcagctataggcaagggctagaagaacccagactctgaaggcctcggaagaccacctgtgcttcagtggatcctcaagtcatggagacaattggcctccatgatccatcatccatgggttcctccacggagaaacttggcyagagctgggttcagtgggcccgggagctgggtactggcaggccaggaacccaggggcagaccccatgctgcaaactctactgcaagccctgccatgcacccctccccaccacatcatgaggtgggaatcctctacccaccccataaaccaggaaacctgtcaccaatcaggcgctgtgcacagctgtctttcactccctccctgaagtccttcctgtggccaggcagccacaggaaggggctcttgggactgtgaaatccagaggtctctaaggaaggtaggaagaaaggggg

SEQ ID NO: 124446 - DNA, 585 bp, Homo sapiens
tgacttggtatctccatctttaaaataatatcccccataaaagctagccatgaagatcaaatgacttgtgcaagcagattttgaaaattctgaaatactctcccttcaaaggcaaggaattattatctactgcagcataaactgaagcgaggcagctataggcaagggctagaagaacccagactctgaaggcctcggaagaccacctgtgcttcagtggatcctcaagtcatggagacaattggcctccatgatccatcatccatgggttcctccacggagaaacttggctagagctgggttcagtgggcccgggagctgggtactggcaggccaggaacccaggggcagaccccatgctgcaaactctactgcaagccctgccatgcacccctccccaccacatcatgaggtgggaatcctctacccaccccataaaccaggaaacctgtcaccaatcaggcgctgtgcacagctgtctttcactccctccctgaagtccytcctgtggccaggcagccacaggaaggggctcttgggactgtgaaatccagaggtctctaaggaaggtaggaagaaaggggg

SEQ ID NO: 124447 - DNA, 477 bp, Homo sapiens
tccataatcaatagaaaactttctattttctcaacactagtgaaacctgcttttctttggtgacaccagttgataaaactatttttgattcaatatgttgctttcccctttggttatcagtagtttaattgaattattgactacagttttatggmaaatgtgaattctgggttgaacaaactaaattgagatgcaaataccaatttgtaacattgatcctgtgggtgaataatttcatagtcccaacaaatgtacttatgtttaccaacttgcaatacaaggtctttttaaaagtaattaatttatttttatttttatttttttaaagacagggtctcattctgtcttgcaggctgttgtacagtggcctgattatagctcactgtagcctcgaaattctgggccgaaatgatccgcctgcctcagcctccaaagtagctgagactacaggtatgtgtcaccacacccagctaaatt

SEQ ID NO: 124448 - DNA, 567 bp, Homo sapiens
actttaggatatttgattgactttcttagcagtgaattcctttctacatttttctccattgacttcctttcttctctcaattctctgtctcatctccctcaccttagagttctcccatttgagagaagtttaagacttcaccatctggattttaatttttcaagtttatttaagactacgagagtgttgccaagaatgtaaagctcttttcttgctctttctgggagttttctggcttaactgtcaggattaaagcggacaaaaatcaacctctttactgtaagcagttgacattaaataatattatctactcagctgatatttaataaactttttgkcatcattcaaacttctttcaggagattttagaaattaatattatgtatcctgtctttccatcaagtaatagtttctgataaattaatttccacggaaactgatatggggaaagtataattttgttgacatgttgagaaataaattatgtaaagtattgaaagagaaaagagttccaagaaactcattagtaattacatttcaacaatgttaaactaaagcagtgtctaa

SEQ ID NO: 124449 - DNA, 596 bp, Homo sapiens
gggattggttggaggggaatggggtgttaatgctcactggccatggagcttcagttcagagttataaaaacattttggaaatagtggtaatggtagcacaacactgtgagtggaattaatggcattgaattgtatacttgaaatggttaaaatggcaaattttatgtgatatataccactgttttaaaaattaaaaattaataaaagtaacattactgaaaaccattgaattgtgtactttaagtttgtgaattgtatggcatgtgatttatagctccataaagctgttaaaaataaaaatacaaaatattcacctcraagtcatgtttactggatgtaacatagattggtttttgttttattctttttttctcctttcccatttgtaatagtttcagactattataaacacttccatgcttttatcaacactaaaacaatgttgtcagttaataagtgaattccattagaagtataaatatgctcgctaaattaaaattggaaactgccatcagaattatcttagttctgcattgatctaggtctcttgtcacacattcagaatgccacttcgcacagtatctgcacgtaatgga

SEQ ID NO: 124450 - DNA, 571 bp, Homo sapiens
aagcacaaaactggaagcatcatgctacctggcttcaaactgtactacaaggctacagtaaccaaaacagcatggtactagtacaaaaacagaaacatagaccaatggaacagaatctagaactcagaagtaagaccacasatctacaaccaattgatctttgacaaacctgacaaaaaactagcaatgaggaaaggattccctatttaataaatggtgctgggataactggctagcatatgcagaaaaattgaaactggaccccttttatacacattacataaaaattaattcaagatggattaaagacttaaatgtaaaacccaaaactataaaaaccctagaagaaaatttaggcaatactattcaggatataggcatgggcaaagatttcatgatgaaaatgtcaacagcagttgccacaaaagcaaacattgacaaatgggatctaattatactaaagagcttctgcacagcaaaagaaagtatcatcagagtggaccgacaacctacagaatgggagaaaatttttgcaactattcatctgacaaatgtctaacatccagaatgt

SEQ ID NO: 124451 - DNA, 571 bp, Homo sapiens
aagcacaaaactggaagcatcatgctacctggcttcaaactgtactacaaggctacagtaaccaaaacagcatggtactagtacaaaaacagaaacatagaccaatggaacagaatctagaactcagaagtaagaccacagatctacaaccaattgatctttgacaaacctgacaaaaaactagcaatgaggaaaggattccctatttaataaatggtgctgggataactggctagcatatgcagaaaaattgaaactggaccccttttatacacattacataaaaattaattcaagatggattaaagacttaaatgtaaaacccaaaactataaaaaccctagaagaaaatttaggcaatactattcaggatataggcatgggcaaagatttcaygatgaaaatgtcaacagcagttgccacaaaagcaaacattgacaaatgggatctaattatactaaagagcttctgcacagcaaaagaaagtatcatcagagtggaccgacaacctacagaatgggagaaaatttttgcaactattcatctgacaaatgtctaacatccagaatgt

SEQ ID NO: 124452 - DNA, 624 bp, Homo sapiens
cataattagggagtgattaattatttaatcagagcagagagcagcccaaacaatgacacctcctctcatttgttgggctacaggcctccattaatcacagatcctgacattctgcatgcaaaagggacaggtggatttgaagcttggtgttgcgataacctcactactgctccctgatctgcttccaaatgctgccaatgtgttacrgcaaacatcaccatcagcagcccaggcttcattcctagatgaacgtcttaggaaggggaacgttatatctgcacatcaaggcatttcactctgtcccttctcctcgttcaggtacctggggtttggccccaccattccgtctcctgctggtaacaggttctgttactgcaggtgtagttttaaggcttgtttgagcatatgaaccgctcactttgcacctcttcattctggcctaaggatgctcccgataggtgctgttctaacacctcttcattcacagaagctgcagcccaggtgccagcagggacggaaatgagtcaccctctgctgtgtctatcaccctctgcattgagggctcacttggcctgccctgagtgctttcaggtgactcttgtgttccttggcaccactcatggc

SEQ ID NO: 124453 - DNA, 622 bp, Homo sapiens
attcagattcctgggcctcagctccagagattagagtttagtaggtgtttggtcaaactcatatggaggtttggagtttaaattctttggcaatttcacagtcttttaaaatatcaccatgtggcagggtctgcgctgactgcttgggtaattttggcatccaggcctcaccccatcctctaaacagggccacacttccgtagccaggaaaagacaatggtcctaggcttccaggtgaccctaaatgtgtccccatgaggcacgagggtactttctagggacagataaacacctctctgcaagtataggtgcccatattgcccatgttgaaattgtgctgcaattcagttcttcttggaggacctacactcacaaggactcctttctgctcacccagaagaaggcaaaagtccatcaaaaggcayggcctgaaaggcacctagcacgtgacaggtacacaagaaatattgactgaatgaatgaacgtagccagctcttcaaactctacttccattctccttccaccctccttccaccttctctctcccacaggtgaccagcctatcttgcttctagtgaccttcagccttcacctagcaatgctgccatttggttggggcct

SEQ ID NO: 124454 - DNA, 571 bp, Homo sapiens
gaacctggtcaaagcatttttaagaactggaaataatgtaaacttctaggcattacattgagaagttgacacaaattcttgatgaattttgctccaatttttctggcagcttagacacaaagggaaacacactggattatgtattttgttctgcggcaggagaatatgttcaaatttaagtgcaggggatgacagyaattgggacactctatttttatgtcctttaaaagaaacaactatatatctgttgcctttttcgtgtaacactcattttacattcttttgctactctcttctccttctttgcagaactttcactttctttgtaactttcatccaacagtgaaacaaactggaaattatggtctactaaggaactgactatggaagagaacaaatgaatgattccttctcaggtttttcagggtacaatatctcacccattgcttcttctgagaagcttctttggaggctttttttttttttttctgagatgcttttattcaaccagtatctccctagtccatatttgtttctcagtcaagaaactatgtagatgtctaatcttcca

SEQ ID NO: 124455 - DNA, 513 bp, Homo sapiens
tgttgtgagcctttcctgctggaggggcctaaggactcagttccctttatctaagacaaaaccgaatggagacagtaagagcccatcacactccaccctccctccctcaccttcttgcagagctggtagagtgtagtggccaagagcaggtcctctgcggtgtcacaattggagacctcttctgaatccatccctcaccaactcagtgaccagagctggttacccarcctctcagtgcttcaggtttggtttgatgttttcaatctctagaatgcaacagtcgtagagttggtgagaagattatgcagctgtgctgaggaaagagtaagagctcaaacatgtcagctgtcattcaaatgtcactacaatggccttttttcaagtgtgatccacttgcaccaaaattacctgaggtgcttgtgacaaggatcttacagattcagtctccacggaaggttccagaagtgttttagtgatcgaggcaggggctctacagtcagacagacccaactt

SEQ ID NO: 124456 - DNA, 513 bp, Homo sapiens
tgttgtgagcctttcctgctggaggggcctaaggactcagttccctttatctaagacaaaaccgaatggagacagtaagagcccatcacactccaccctccctccctcaccttcttgcagagctggtagagtgtagtggccaagagcaggtcctctgcggtgtcacaattggagacctcttctgaatccatccctcaccaactcagtgaccagagctggttacccaacctctcagtgcttcaggtttggtttgatgttttcaatctctagaatgcaacagtcgtagagttggtgagaagattatgcagctrtgctgaggaaagagtaagagctcaaacatgtcagctgtcattcaaatgtcactacaatggccttttttcaagtgtgatccacttgcaccaaaattacctgaggtgcttgtgacaaggatcttacagattcagtctccacggaaggttccagaagtgttttagtgatcgaggcaggggctctacagtcagacagacccaactt

SEQ ID NO: 124457 - DNA, 551 bp, Homo sapiens
ggctgtctccactgggccctgccctgtctaccctattccgcccaggactagtctggattgtacgtatctgttgctttggctggtactagcctggtctactgctgttgccatcccttctctctagaactactgaaggtgccactgttgagctgctgctatcctctcttctgctcatctgcacagctaacaaccgcccctgcagctctctgaccatgaagtatatatcccctttctgtctctctacctgtttctctttcttacaagacgagattgaacctttaaatagtcttgctttatgtttcaagtttccatagttctacaacaaacctccaaaaaatacttgaagttagraaaattacaaaatgttgtaatgttttttgtactaatttctgccacgacatcctcatctgtactagctctccttacgcttagggtggtagattttttcatgcacattctacagattttatgggttagacacacagatctctcactatggatatctagaactaaatgaaaaaatgaaagactctatctctacatccttctgc

SEQ ID NO: 124458 - DNA, 551 bp, Homo sapiens
ggctgtctccactgggccctgccctgtctaccctattccgcccaggactagtctggattgtacgtatctgttgctttggctggtactagcctggtctactgctgttgccatcccttctctctagaactactgaaggtgccactgttgagctgctgctatcctctcttctgctcatctgcacagctaacaaccgcccctgcagctctctgaccatgaagtatatatcccctttctgtctctctacctgtttctctttcttacaagacgagattgaacctttaaatagtcttgctttatgtttcaagtttccatagttctacaacaaacctccaaaaaatacttgaagttagaaaaattacaaaatgttgtaatgttttttgtactartttctgccacgacatcctcatctgtactagctctccttacgcttagggtggtagattttttcatgcacattctacagattttatgggttagacacacagatctctcactatggatatctagaactaaatgaaaaaatgaaagactctatctctacatccttctgc

SEQ ID NO: 124459 - DNA, 639 bp, Homo sapiens
aacaccacccatacaaatctttctaagatataaaaccactgttttatcttcttatcaaaaatcctaaacatgttcttgcttactagtcctagccctgtgacagtggtccctcagggttggcaaaggtgagtagtagggctgcttggyccccaactaatgagactgtgatgcctttcgagcactagagtatcttctgggccataggcggtcacttctcattgccagcaggaagcatcctacctagacttaatgtgctgtgagccggcagagcatggctctcaaatgttattccagggtgtcaagtagaagtgattaggctttgagagggaagttctcatgagagacaatggatgagtttcagcaaatggaatgtgtaacttctattctgactgttcagagtggttggtttgtcttttcctctcctaaagatttttgttacatttcagataagtgcaatttcaaaagaaagagcctatgactctaagcattactaccatggtttacacactgtaatgtacacatggcaaatgtttgactgcgatcttatttccccaccacttggtgagccgatggccacctcatttgaccatcagtcagtgaggactcactttaatacgagcctcagcaaaacttaaaaat

SEQ ID NO: 124460 - DNA, 577 bp, Homo sapiens
gaatttcttctaggatcttctaaccacccttacaatcattgggcatcttcctctacttttgcagattttaaatcagcagttttgttaacttccaaatctgtatctctggtccctacctctctactagccatcagactcacacctgaactgtttggctctgcggtccttcaaatgttctggtgtctagattgcygtgcaggcatggtaggtggcaaacaggagagtgggaagagctgtaggataaggaaagaaaagtaatgggtgattagctaaaagcaagctgctatatcaacttatttctaaaagaacggggctttttaaactcctctctgaagtgcttgcacacaccaaaatcacctgtgttggataactaagttaagaaatccttgagtgtatgctcagctttacctatttcctaactatgggaccaagagtggacttgggtcacagaattgtcattctggggcactgtcattaagggaactcactctgcaagtgggttcttctctccaactagcaaattcttttgattctattagtttcaatttctctgaaagagaatttgattggcccaggt

SEQ ID NO: 124461 - DNA, 623 bp, Homo sapiens
ataaaacaaagtgatccatataaagcatttaagccagtgccagcacatagtaattgctttgcaagtaatacttatttctctcttcatatttgttttttaaagaatatatatatattcattatatatatatatacattatatatacacattatatatatacacattatatatacacattatatatatacacattatatatatatacacattttatatacacacacacacacacacacacacacacacacayatatttggttggaaatacagactttagataagagaaatgtataaatatgtaacccatctgtcttatgacaattccagtgatacatatataataataaattgacaatttaaatatttttttggtgggggagatggcatataattttcattgataagtagtttgccttgtttttaatgttcaccatttgttttcactaccaaaggaaatagacattacaaaggaaagcacattgcaatttatgttgtgttaatcactagtttaattcaacaatttggttccacatttataagaattatgtatcatgtgctattgtaggcattgagattataactaagagccttactacagtctagcagggtagatatatatatat

SEQ ID NO: 124462 - DNA, 642 bp, Homo sapiens
aaacatcttcatttccctgcagatgatccgtgatttccctgtagtcagaattgttcttgtaccagaagatttagaagaaatgacccgtgcatagcccgcggtcttcttccttactcacagttgacatggctatggttacatttcccccagtgtgatagttttccatcagaagacaagccagctgccacctcccaacaagccctttaagtaaaggtgacaaaacactgcttctctccaggtgtttgcacctctctctgggacaggccctatgtggcctgtgcctctggaagaggcagtcctgctgcccttgctgaagtctctgtgtgggttttttaaggtaaatrctagttgatcttcctttttaaaataaattattaattagaaattttactttaataagagaagttattaaaagctgcaggaaccctattcttttaattcaatttccaagtggactccttaacaaggtaacaaagacactcaccagagccttcagtgtgtggagtggatgtggagtcacatgctgtgacgcgagtcttttcccttcccccagcctcaggttcctgttggaaaaattttagtctctcctctatgcagttcccagaggttttttctttaaaaccatgttcacaagaccagtgg

SEQ ID NO: 124463 - DNA, 654 bp, Homo sapiens
atggtttacccaggagctgcactttcttattctaggccaggacagagagacttcattcaggtccttttctgcatctaatcccatgtgccaaagagagatgaaatgcaagagagagtcaatgatgcatctgaaagagtcagacagacctggattcaaatccttactctcycacttcttaactggatggagttgggccagttacggagtgctctcaactgtaggagaaggtacatattcaaaatgaaacaaaaaccaaaacaaacaaaaaccacacacttaggtaacatttattaggtgccaggaactgttttaagtgtattgaatagtataagctattgaatcatcacaacaccatattgttggtactgtggttatccatgttttacagataagcaaacagaggcacagaaaagataaatctttagcaaaggtcacatagctggtaagtggcagggcccccaggcagtctggttccagtgtccatgttcttaacctctgcacttgctgcttctatcaagatgatatagaaaaagcatgaacttctgaatcagaaggcattcaagggtgctgatatctaatcttctgcttcctagatgtgactttgggctgattacttagtctctctgagctaaataccttcttcattttattata

SEQ ID NO: 124464 - DNA, 609 bp, Homo sapiens
ttgttcatggccacaaagccatggaaggattcaaatccttctatatacagtacatgccttctggaaatggggacaggacagcacaatatacaaactatatgtttagtaaaataaggagctcccaacttccatatatgcacatgtagtgccagctttagagagccaggactgcatcctactcatcttagtgtctccagaacctagtgcaccttagcacctaagggcttttggggaatgaatgtgagttgaatgagacagaacagttattctatcccgctaccaactgtgattatacgtagccacatccttaatcacaggacatagattttagttgaaccccagtgttaggaaactaacactgaagcaattttccttatttaaggtgtgtgtgtgtgtgtgtgtgcgtgtgtgtgtrtgtgtgtgttgtaacttctctttaacaaaatatgcttcgttgtcactttggtgattgctaattgattaaacacacctggctccactttgcctgttagacaaatttaagcccaactcacaggtctggaataccctcagctggttaactagtgcatctccctatatttaggcaaggaattcatgcacatctttcta

SEQ ID NO: 124465 - DNA, 586 bp, Homo sapiens
actggtgtgtgtatagcatatgtttagagagctgctaagaagaagaagctgactttttatagctgttgtctagttatgaaaatttaaaagaaattaatgaaattttaagaacaaaagaggacatgagtatttactgaattccacctcctcgttttaattgttggtgaaacaaaggcttagagaggaaaacggatagggagtcagtggagttcagagagagacctggacacaggatcctgctgacagattcattcataaaaatgtttactgacaaatttatagagataaaggagagtgacagttgccaggggctgggaggagtagggaatgggaagttgtttaatggtagcatgagtttgggaagacaaaaattttctggagataaatggcagtgatagttrcagaacaatgtgaatgtgcttaatgccacattactgaatacttaaaaatggttcaaatggtaatgataaattgtatgttatgtatattttactataacagtaaaatcatagatgtacaaaacccttattgtatacatcaggcactgtacttgatgcttaggataagaaaagaaaatgctgctgct

SEQ ID NO: 124466 - DNA, 598 bp, Homo sapiens
gataaaaaaaccaaaatgttgcctacaagaaaacacttcacctataaagacacacatagactaaagggatagaaaaaggtattacatgccaatgaaatctaaaaagtgtaggagtcactatacttatttcagataaaatacatttcaaaacaaaaactataagagaagacaaagacggtcactatgtaatgataatggggtcattcggtatgataatataacagttttaaatatatatgcacctaacactggagcacccagctgtataaagcgaatattatgcaaatcactcaatgtaatctatcatatcaacaaaatgaaaaataaaattcacatgatcatttcagttgatgctgaaaaagtatttgataaaattcaaaatcccttcatcataaaagccttcagagaaccggtaatagaaggaatataactcagtgtaatraaagccatgtatgacaaacagcacattatcatctgaataggaaaaaactaaaagcctttcctctaagatctggaaaataacaaagattttcactgtcaacactgttattcaatatcatactggaagtcctaggtagagtaagcagacaagagaaag

SEQ ID NO: 124467 - DNA, 583 bp, Homo sapiens
aactgtaaatgtaaacaaattaaataaatgttccatttaaaatatagattggtggmataaataaaagaaaatcaatctatatgcaacttacgagaaactggttaaaataattattgcctgaaggtaaagaagtgaaatgagatatttcatgcaaatgaaaaccaaaatagcaggagtagctatgctattataataacaggtaaaacattttaaattaataatcataaaaaacacaaagaaggttattacatgatgataaagggatgacttcatctagaagatataacaattctaaatatatacgcactcaatgaaagagcacccagattcataaaacaatcattagtaaacctaagaaaacagatagtcatacaataatagtgggggacttcaaaactccactgacagcactatttagatcactgagaaagaaaatcaaccaagaaaaactggacttaagttggactttaagaaactaccatcagagtgaacaggcaacctacagaatgggaaaaaatttttgcaatctactcatctgacaaagggctaatatccagaaactacaatgaactcaaacaaactt

SEQ ID NO: 124468 - DNA, 636 bp, Homo sapiens
atacctaccctttcctaattggttttctacactgtagtgttcacctttgagtggtgttttcactttaactgttttgcatactcacaaaccaatcagcacgccttccccatcctgtccatataaagaccccaaactcagtcactacagggagagacaacctgacttcagggaagagacaatctaattttggggaagatgacctgcccttcccatcctctcttcagctcccctcttcatggaaagcaattttcatcactcaataaaattctccaccttcaccattcttcaactgtccaggtgacctcattcttcttggacacaagacaagagatcaggatccatcaagtgtgggtacccagaaaggctgtcacactggccctttgccctcaatggcagagagcagttgtcccacacaatgaggtaaaggggcctactgagatgctaacacaatgccattcaccaacggtggaactaaaggagcactgtcacaccacctctggggattcagggttgtgggcatcctcacatgggcaycaccatattcccctgaaggcaacatgcctggtctagccatgggccctgcacagagcttgtttttgtgttggtgcccagagaaaccaatcagatcccacactc

SEQ ID NO: 124469 - DNA, 660 bp, Homo sapiens
aggaactaaaagcaaatagatccctctcaaattatatttttgtcatccagatatatgtgatgattagaccctagaaactgcatgttttcctagccctgcctcttgaagcactccaccctgagaccagcaatccaattaggagatcagcaaatgaagaatcttacaactactggatcttcktctgtctttccaagtagttatatgtgtgttatatttgttctaattaattggccgagaaaaaataagtccttagcacaaatttgttttgaagaaaagataaaaggtgtggcaccttttagttcacatgaccttaatctttgaaaaataaaaacagttttaaatattattggtaaaatacaaatgtcttcaaaatgtaaatatgtggtctaaattatacagtttagatattaggtttcctaaatgttttaaggtcatagactgcttttatagtttttgagccctgattgacttgcttgctttacaatttggtaaggtctggggaaatatgaaattaaccatactcctaattttgtttgatacacagggcccctggaacatccaaaatggaggtaaacagtattatttgacacatttgacatgtttacatggaattgccaaaataaaaaatctgtgttatatatatgtatatatatatgcaca

SEQ ID NO: 124470 - DNA, 425 bp, Homo sapiens
cgcccgcctagccgccgccgagcacggcaggggcggggcgccggcggctcagccctcccgckattgcgcggcccggctaggcgggcgcgcagcgcgattggtgggcggtggcgtggggtgggactcgcgggaggcagaggcggctcggggctctcggattggtgcaccgcgcggccgggcccgcctcctagggcggggcggggctgagggaagggagaggggccctgggaaggcagtgggaggtcgcagggctggcggggcagggagagcgcgagcagaagaaaagaagaaacaatgacaaggagaaacagtttgtggctgcagcggccttccagggtcccgccagacttgagctcgtagaaccctgaagcaggcccggaaggtagcgagtctcctttctcagaaagctggcgcccagagagagc

SEQ ID NO: 124471 - DNA, 518 bp, Homo sapiens
tttagaactaatgcttatagatcctcttagcacaggttcagtgatattctaagtgctcccttaatgttagtttttaccttggaagggaaagttggataggtggttacttgtttgtatgtatggtttacttctatgtccaggcttccatgtatacattcagaaaatacttccttgattctttttcgctatttgttttttacacaaaaacgaagaggcacgctgktatatgattattactatgggtttagttaacacactttgaattagatgttgtggaccccacatttctttttttttagtgacttgcactcagagagtttggttagaaagtcactttggtcttgagggagataaacaacacatccccaaagggcaacctggagttgccctttgatgtgatagttgccctttgatgtgatagttaaccacatcagttagtgaagtgagtgaggggaggggtagtttgatgagctagctcccgcaaggagacaaggtatccccccacattaacctcatgc

SEQ ID NO: 124472 - DNA, 510 bp, Homo sapiens
acagctggtaatgtgctgagtctcatctgaaaccagtaagtctcagaggctcactaaggccttcgatgtcatacttgggtattgctgcttgttattcaggtcccaagggctctttagttagcaggtgattaatacttccagaactgggtcatttcctttaagacagccagttccctcctggcccaaggtgtgtgtagaaatgttgtctgagagcttgggtctggaacagagaccccatgactctgactagtgtcctatcctgctgtgtctgagctggcatcccagatggaagacaaagttctcccctttgtttcctctcctctcctcaagcagaagaaaggggtctcttttggacccataggctgttcagtctgggaatgggaagggggtgatgccasaactctcttggctgtcccagttggtgtctcagtatgtcacatgtcccctcagttcattgtctctgggcccggttcagccctaggatccacctagaagttgcagtccttatgg

SEQ ID NO: 124473 - DNA, 594 bp, Homo sapiens
ctcctaatgttgcttgtttaaaagtgtgtagcacctacctcctctcccttccttcttcttcagcaatgtagaacatactggcttcctcttcaccttctgtcataactgtaagtttcctgaggcctccccagccatgcttcctggacagcctgcagagctgtgggccaactaaacctcttttttaaaatataaattgcccactctcaggtagtyatttataacaacttgaaaattggctaatacagaaaattggtactagagaggcaggccattgctataaagatacctgaaaatgtgaaagtcactttagaactcggtaaaagggcagatgttgaaacattttagagggctcagaagaagaaaggaaggtgaggaaaagtttgaaacttgctagagacttgttgaatggtttcaaccaaaatgccaatagtgatatggacagtgaagtccaggctgaggtcttagatggagatgaggaacttaccaggaattggagtaaaggtcactcttgctatgctttagccaagagactgaccgcattgtgcccctgctctagggatctggtgaacttagaacttgagagaaatgatttac

SEQ ID NO: 124474 - DNA, 584 bp, Homo sapiens
gaacacatggacaaaggaaggggaacatcacacaccagggtctgttgtggggtggggggaagggggagggatatcatttggagatatatctaatgttaaatgaccagttactgggtgcagcacaccaacatggcacatgtatacatatgtaactaacctgcacgttgtgcacatgtaccctaaaacttaaagtataataattaaaaaaaaaagttaaggcatttattgggaagaaatgagatcctgaaaattaggctggagacattcatacagatcayaatgaggctggggatttttaacctctaaaacctgtcaagtcttttcaatcagtggaagtagccccgcaactgctgcttggaaagattagttctcttttttcatgaaaaacctataatggcactgctgttctcctcagacccttctcctaccacccctattagcctcaagacctaattttctatcattcctctaagaatttactgcaaacttcatggtttaaattatatacatttattatcttacagttttgcatgttataatcccaacatggttctccctgaaataaaactacgatgtcagtaggg

SEQ ID NO: 124475 - DNA, 615 bp, Homo sapiens
tgtttaaaagttaagcctgtattagttaagattatactaattaaaaaatctagatgtttaagtgcttttattttactattcataaatacttttcacttagtctgcatgataagtacttcactgtactctaaagcctgaggcgaccggatggtagaattacagaatttggagctcagagagacttagagactcacagaggtcacttaatttgacatcttaactttacacaggtaaaaagtaagcctcagaactgtggcttatatttgtaaaacatcagtttctttctttatgaaagagctatagacagaccattgagtctatgattaatagatagagaaaactgatttgttatggcattgcatttagcattctgaacaaatgaaaatagaggcatggtaagagttatgatacagagcacattaaggtcccaatgccacaagacatgcagtaacattactgtaggaaatgatttctaagtctcagagaaagaattgtcatttcctaagtaactgtaatcagttttcraaaatgagacctaggatctcaagcggtgtattctgcacagcagtatattccactatggataaacattaactatactcttgtatcatgctt

SEQ ID NO: 124476 - DNA, 567 bp, Homo sapiens
gctcttgcaaaataactattaaaactttagaccaataagtcttaattatatagtctaattgcagtgaggtttgttcacatcttctcagagatcagttagcctcactccaaactcctgatcaatagcttaagtttaaattcaaaatctcctcacttgtgccttctgcacacaaagctgtacctttactctggtccccatatattgcttttggcccattcatcaccaaagaccaatactcrgtaaataatgtggaaatcaactttatccttaagaaggagctgaaaatcaaaatgcaagaagagaaataatttgacaaattctatctaagttcccagatgtctcctaattctaggcattatatgagcatggcaaaaggccttaaagctaatacacacatacaaaagaggattttatgaattctaattagaactaagaaagaaaaatctttcttaaagagattttataataaaaaagaatgatatcgttttttgtttcatttcccaggtattatgtaacattcattgagtactgatactgaaatcatacaaatacttattttcaactatt

SEQ ID NO: 124477 - DNA, 567 bp, Homo sapiens
gctcttgcaaaataactattaaaactttagaccaataagtcttaattatatagtctaattgcagtgaggtttgttcacatcttctcagagatcagttagcctcactccaaactcctgatcaatagcttaagtttaaattcaaaatctcctcacttgtgccttctgcacacaaagctgtacctttactctggtccccatatattgcttttggcccattcatcaccaaagaccaatactcggtaaataatgtggaaatcaactttatccttaagaaggagctsaaaatcaaaatgcaagaagagaaataatttgacaaattctatctaagttcccagatgtctcctaattctaggcattatatgagcatggcaaaaggccttaaagctaatacacacatacaaaagaggattttatgaattctaattagaactaagaaagaaaaatctttcttaaagagattttataataaaaaagaatgatatcgttttttgtttcatttcccaggtattatgtaacattcattgagtactgatactgaaatcatacaaatacttattttcaactatt

SEQ ID NO: 124478 - DNA, 595 bp, Homo sapiens
tctctgcgtcctttcaagttcatcttctgtctgtccattaacgttgatatacctcaaggttctcttctttcctcatttcctatgggaccttctttacatcttcagttatctttgtgcaggtgatatgtatttatcgatcaccaggcctgatttttcctttcaattccaggcctgaacttcatcagcctccttgtcatcacttcatggatacctcacagacatctgaaaataagcatgttcacaaccaaaatcataaaccctccccaagattttatcatctttcaatatcagtggatgtcaccactattcaacttcttctgtctcctgtagacccagtggtcagtcttacattgcccacttcctcacctctatattcaactcctcactgtgtcctgttgatttaacctcttagtyatctcacaaatccagccatttctctaccatcaaaaatttagtccaaagtgatctataatactcttcttgaaatggtataaacaggtatttttattcatcattacctatgcatttacagacattctctttcacatatacacgcacactcatatacatttgaaaagtaaagtataaatgagat

SEQ ID NO: 124479 - DNA, 604 bp, Homo sapiens
tggggtttatagactaataagacaaagtacatatcctcagaaagctaacagtctatataaataaaacaatgcrtaatgattttataaaagtgcaacttaattcaaatggtatttttctttttctgtataaacctggggagattacattaaatctgaatttatgaacgttattccttggacatttgagacagtagtttgaggaccacacattcagcctagagcatggagagttggaaacaatagtttcaatgttcattgcactgtttttcttatatatcaaatatgtaaaacaaatttttggtaaaatttggatcccaggctagtcatgacttatttttgaggcatgtgcctaggtcttgaatattatgtgttggtgactgaagactttagtacacatttagaaagttgactttcaattttcttgtgaaactttgaagagttcttgtggagtttttttgggtttttctgccaagacattggaacagtcaccatctgttcttcctggaactcatgaggatcaatagaaaggacaatatttttccccagtaagatctctgaatgtacttgagcccttggacatgcgcttggttgacttcccagaaat

SEQ ID NO: 124480 - DNA, 604 bp, Homo sapiens
tggggtttatagactaataagacaaagtacatatcctcagaaagctaacagtctatataaataaaacaatgcgtaatgattttataaaagtgcaacttaattcaaatggtatttttctttttctgtataaacctggggagattacattaaatctgaatttatgaacgttattccttggacatttgagacagtagtttgaggaccacacattcagcctagagsatggagagttggaaacaatagtttcaatgttcattgcactgtttttcttatatatcaaatatgtaaaacaaatttttggtaaaatttggatcccaggctagtcatgacttatttttgaggcatgtgcctaggtcttgaatattatgtgttggtgactgaagactttagtacacatttagaaagttgactttcaattttcttgtgaaactttgaagagttcttgtggagtttttttgggtttttctgccaagacattggaacagtcaccatctgttcttcctggaactcatgaggatcaatagaaaggacaatatttttccccagtaagatctctgaatgtacttgagcccttggacatgcgcttggttgacttcccagaaat

SEQ ID NO: 124481 - DNA, 635 bp, Homo sapiens
attaaccttgcctcaacagattggggaaggctttgcactctgaagtaagatggcatttgaactgtatctttaagaacaagaaaaaattaatcaggcagagaaagatggaaaagtattcattcagtgctatttcaggtatctattgytgcaatatcaaaccccccaaacatagtatcttaccacaacagttatttattttgctcataaatcttcgatttgagcaggacttgacagtcacagcttgtttctactcagtgtggcttcagctggagtggctggcttagtaagttgttggccagttgttggttggcagatcaactagggctgccatctggggtcctttctatgaaactacctgggctttctcacagcatggcagagggtttcaagaccatgtattccaggagacaggaagcagaagctgtgagcctcttaaggctagcacttagaaagacagtatcatttctgtgtgtttgcccaaaattaagaaaatgggaaaaagactcccagaatattggtggccttccttaatataccacatgttcagagaaaatactgttattcattgcccactaaatgcacaatttggtcagagaatattgagacatcagttgtggcaagcagcggaacacaaa

SEQ ID NO: 124482 - DNA, 606 bp, Homo sapiens
ttttaagtggcaatgtttagagacagcattttctctgaagtcatgttatttgacactgactttatattaagggtatgagagttasttaatgatggaaagtccaaaacagtgatgatcacaaattcatgtttcatgtgaaaggactttgttttagtaaaggggaaaaggggtaagtctctgcaaaatgttagaagttataccctttccccagagtatttcctggttttctaccagcaaatcagccctctgaagtccaagttgtcaggaagcctgtgtctcttgtaaagtgggaagaaaccactccacaattctgctattctctaagcttaatgaaatgctagcaggctgccctgctgttcccgtatcttatatttccaggccttgccacctgtgcaacaaaagcaagcaatctatttagaagagtgtttttcattctcttaactctgaaggtctttattctcagcatgagattattgcaacaacttaacaagccgtgttttctccccctattttcctttcttttctttttgcacctatgtccttttaagtccattcaggccttagggaaacatttagtacttaggctttggtttttcaagctcaatc

SEQ ID NO: 124483 - DNA, 345 bp, Homo sapiens
cagcccagtgtggtggttcacgcctgtaatcccagcactttgagaggccaaggcaggcggatcacctgaggtcaggagttcaagaccagcctggccaacatggtgaaatcctgtctctactaaaaaccacacgyacctgtaatcccagctatacttgggaggctgaggcaggagaattgtctgaacccggaatgtgcaggttgcagtgagctgagatcgcgccactgcactccagcctgggccacacagtgagactttgtcttaaaaaacaaaacaaaacaaaacatgacaaatgcttgggccacaagtgaccagggtgggagaggcagctgagctcctcatgtg

SEQ ID NO: 124484 - DNA, 585 bp, Homo sapiens
aagggtagcagtgatttctattttgacatacactaaattctctttgtccaccccttatgtatcttccatattcacatttgcaaagttgggccaagatggacaaaggcaacccattttgactgaccccattttcaccccattggcgtttccactttctcacttaggttgccaaaaatatttagtccttggaaggaggttataattagatttgattttccctcttatctcaagatacaatcagtattaatcttattattcctcttatcctaagttatttcaatctttacatgaagcccaagattcccagatcatatctttggcctagattctccccagtaagkttctatactctccctaatctatctcaatcttaaaccctttgactttctgagctggtgtgttttttttgtttttgttttgttttgttttttctttgaggcggagtcttgctctgtcacccaggctggagtgcaatggcatgatctcggctcactgcagcctcttcctcctgaattcaagtgattctcctgcttcagcctcctgagtagctgggactacaggcacgtaccaccatgcccagttaac

SEQ ID NO: 124485 - DNA, 572 bp, Homo sapiens
actcaagtctgcattagtagtatgaaagctgccatagataaaatgtaaacaaaagaacatggctatgttccaataaaactttaaataggcagtgggcatatctggtccatggactatagtttgccaacccttggtcttggctattacagcctggagtaaggatgatcagaaactgaacttcgatgcttatgctcacaaatactaaataataaacataatgtaacaaagaatccaaaaatttaaggacgttggagaatatttatcatgtacagcctctcatttactcatactaygtatctcactgccccctcctaaataaatcccctgagagaaccaacttcatgaagtcactgagaaaggtgctagagagggggcaccagcatctttgaaaggctgtgcagtggctgtcctctgtagcctggtgacagcagagggaaaaagctgattttgagatgggctttctaattttaatagggatcatagggcctgaagagcccaagatcaatgtgacagcttttagttaccaggaacaaggtggtgcatggacaatatggaaagcaggatgacatggt

SEQ ID NO: 124486 - DNA, 641 bp, Homo sapiens
tttatacagtgattttgtgttctgaaactttactgaagtaatttattaaatctaggagcttttggaggagtctagagttttctagacataaactcatatcaccagtgaatagaaataatttgactgtctctattctattttggatgccttttattttgttgtcttgcctaattgctctggctaggacttccagyaatacgttgaataggattggtgagagtgggcatgcatgtcttgttctagtttttacagggaatgctttcaacttttctctattcagtataatattgtctgtgggtttgtctgttctggcttttatttttagatatgtttctttaatgcctatattgtgagagttttttttatcatgaagggatattgaatttttctgaatgccttttttgcgtcgattgggatgatcatattgttttgtttttagttctgtaatgtgatcaattgcactgattgatttgcatataatgaattatctttgcattcctggaataaagcccacttgatcatggtgtactatctttttgatggactattggatttggctagccagtattttgttgaagatttttgtatctatgttcgtcaaggatattcgcctgtagttttctttatttcgtgtgtccttg

SEQ ID NO: 124487 - DNA, 641 bp, Homo sapiens
tttatacagtgattttgtgttctgaaactttactgaagtaatttattaaatctaggagcttttggaggagtctagagttttctagacataaactcatatcaccagtgaatagaaataatttgactgtctctattctattttggatgccttttattttgttgtcttgcctaattgctctggctaggacttccagcaatacgttgaataggattggtgagagtgggcatgcatgtcttgttctagtttttacagggaatgctttcaacttttctctattcastataatattgtctgtgggtttgtctgttctggcttttatttttagatatgtttctttaatgcctatattgtgagagttttttttatcatgaagggatattgaatttttctgaatgccttttttgcgtcgattgggatgatcatattgttttgtttttagttctgtaatgtgatcaattgcactgattgatttgcatataatgaattatctttgcattcctggaataaagcccacttgatcatggtgtactatctttttgatggactattggatttggctagccagtattttgttgaagatttttgtatctatgttcgtcaaggatattcgcctgtagttttctttatttcgtgtgtccttg

SEQ ID NO: 124488 - DNA, 641 bp, Homo sapiens
tttatacagtgattttgtgttctgaaactttactgaagtaatttattaaatctaggagcttttggaggagtctagagttttctagacataaactcatatcaccagtgaatagaaataatttgactgtctctattctattttggatgccttttattttgttgtcttgcctaattgctctggctaggacttccagcaatacgttgaataggattggtgagagtgggcatgcatgtcttgttctagtttttacagggaatgctttcaacttttctctattcagtataatattgkctgtgggtttgtctgttctggcttttatttttagatatgtttctttaatgcctatattgtgagagttttttttatcatgaagggatattgaatttttctgaatgccttttttgcgtcgattgggatgatcatattgttttgtttttagttctgtaatgtgatcaattgcactgattgatttgcatataatgaattatctttgcattcctggaataaagcccacttgatcatggtgtactatctttttgatggactattggatttggctagccagtattttgttgaagatttttgtatctatgttcgtcaaggatattcgcctgtagttttctttatttcgtgtgtccttg

SEQ ID NO: 124489 - DNA, 574 bp, Homo sapiens
ttctcctttccttttaaaggttttatgatgcattattatcattagccagtcttttaaatggccagttgaaacaaagagttttgaggctcttcttccacaactgttaagactgggttggcaggtattagggataatattcatttagccttctgagctttctggggagacttggtgaacttgccagctcctagcagccttcttgtccgctacttggatgacaccacggcarctgtctatctcgcattacgaacagccaaaggacgcagaggaggatagtcagaggagtcctcaacatgcgtggcttgccaggaacctcatcaacaaatggcagcatcaccagatttcaagaatttagggccattttccagcttcttaccagaatggcaatcaatcttttccttcagttcagcaaacttgcaagtaaggtgagctgtgtgacaatccagtacaggggcactgccaacagggatttggcctggatggttcaggataatcacttgagcagtgaagccagctgcttccattggtgggtcatttttgctgtcaccaacaacattgccacaacgaacatctt

SEQ ID NO: 124490 - DNA, 527 bp, Homo sapiens
cgcagaggaggatagtcagaggagtcctcaacatgcgtggcttgccaggaacctcatcaacaaatggcagcatcaccagatttcaagaatttagggccattttccagcttcttaccrgaatggcaatcaatcttttccttcagttcagcaaacttgcaagtaaggtgagctgtgtgacaatccagtacaggggcactgccaacagggatttggcctggatggttcaggataatcacttgagcagtgaagccagctgcttccattggtgggtcatttttgctgtcaccaacaacattgccacaacgaacatctttgacagacacattcttgatattgaagcccatgctgtccccaggaagagcttcactcaaagcttcatggtgcatttcaacagactttatttcagttgtaacattgactagagcaaagggaacaccatgctgggtttgagaacaccagtttccactcagcccaaaggcacattaccaatactaccaattttgtagacatcctggaaaggcagatgc

SEQ ID NO: 124491 - DNA, 527 bp, Homo sapiens
cgcagaggaggatagtcagaggagtcctcaacatgcgtggcttgccaggaacctcatcaacaaatggcagcatcaccagatttcaagaatttagggccattttccagcttcttaccagaatggcaatcartcttttccttcagttcagcaaacttgcaagtaaggtgagctgtgtgacaatccagtacaggggcactgccaacagggatttggcctggatggttcaggataatcacttgagcagtgaagccagctgcttccattggtgggtcatttttgctgtcaccaacaacattgccacaacgaacatctttgacagacacattcttgatattgaagcccatgctgtccccaggaagagcttcactcaaagcttcatggtgcatttcaacagactttatttcagttgtaacattgactagagcaaagggaacaccatgctgggtttgagaacaccagtttccactcagcccaaaggcacattaccaatactaccaattttgtagacatcctggaaaggcagatgc

SEQ ID NO: 124492 - DNA, 527 bp, Homo sapiens
cgcagaggaggatagtcagaggagtcctcaacatgcgtggcttgccaggaacctcatcaacaaatggcagcatcaccagatttcaagaatttagggccattttccagcttcttaccagaatggcaatcaatcttttccttcagttcagcaaacttgcaagtaaggtgagctgtgtgacaatccagtacaggggcactgccaacagggatttggcctggatggttcaggataatcacytgagcagtgaagccagctgcttccattggtgggtcatttttgctgtcaccaacaacattgccacaacgaacatctttgacagacacattcttgatattgaagcccatgctgtccccaggaagagcttcactcaaagcttcatggtgcatttcaacagactttatttcagttgtaacattgactagagcaaagggaacaccatgctgggtttgagaacaccagtttccactcagcccaaaggcacattaccaatactaccaattttgtagacatcctggaaaggcagatgc

SEQ ID NO: 124493 - DNA, 625 bp, Homo sapiens
agttgctacatagtatatcttctttatttgattccattgatctatttatctagaccagtggcaataccactaccaatcttattcttctcatttataattgtttgggatagtctggatttagttttgaattttataatttaaggtcagttatttgggattgaatttttgtaaatttgaggagaattgatattgttaagatagtctatccttttgcgatacaatatacctatttattcagatcttsttttgtaatgttaatgaagtccatttattcattcatcaaatatttttttgaggccctcttatgccaatattatcctaagagtttggatatcactgaggaaatgaagcctacattctaaccagaagaaagaacatatattatatataaataatttatatcacatgtaaaacaatgtaagtgctaagggaaaatgaaaagctaaagcagaataggatttcaggggtcatgagaaaaggcagtttcaatttaaacagggtggttagaatagatccaattgagaaaggacatatgagcaaatacctgcaggagttgaaggaagaatattccagtcatagtcaatagaccctatatatatatatatacacacacacacacacacac

SEQ ID NO: 124494 - DNA, 590 bp, Homo sapiens
cctaacactaggggtcatttcagcttgtggcaacagtgtatgatatttagttttaataaaagaagagagtaggaatatgacatttcctagaaaaatattatcctggagaaacattttcctgggctaggattcctaatttttccccyagttaaagtgtgaacagattctgttacagtgtctacttttcaaaagtaaaaccaagaagtgctttgggtttcttttcttgagctcatttttgttaattctactaaaatgttcaggttccactcctgaaggcatcatgtttcatctcacattttgcctctggttgctacttactattttgtcatcttttggggtttgcttggcccttttcttcaagcctttacattctgattgtcttgagttacaatggaagtcttacttatttttctctaattttcaaactgctgtgaagtatagcacacgcatctgttagagtagaactttgttctttccataacaaaataaacacattctattatagctcagattttctacccttaaacgtttttaaaatttcaagccgtttcttaaaagttctttgattttcctctctgggacttaataat

SEQ ID NO: 124495 - DNA, 600 bp, Homo sapiens
tataatttgccaaccataaaattcattcatttaatgtatgatttaataaacttttgtagagttctagaattgcacaactatgatcacaacctaattctagatcatttctatcatactaaaaagaaatcttacacccatttacaatcactctccattctcacccccagccctatgcaaccatgattctattttmtatttctatatgtttgcctttctgggatatttcatataaatggaataatatgatatgtgttcttttctgtcaggccctttcattgagatatttttaaagtttggaggttcctccacactgtagcatgtacagtcctatttttcctttttagtgatgaatagtattccattgtatgaatgcatcacattttatctattcatccagtgacagacatttggatgtgaattgtttgtgcttttgggatgtttgtattattactgttacagacattcctgtatagatctgtgtgtggacatatattttcatgggtagatacataggaacagaactgctgagtcataagataaacctgtttaactttttaaaaactgctagcctgttttgcagatgtttgcattattatacat

SEQ ID NO: 124496 - DNA, 600 bp, Homo sapiens
ggtaacaatttatactaccatcagmaataaataagaattgctgtttcctcacatcaccaccaacacttgatgtaaacccactgattaatttttgtcagtttaatggttgtgaagttatatctcattgatattttaattttgtctgactactaatactattgagcatatatttttatattttattgactatttacactcctatgaattgcttgttcatatcctttgctaatttcccttctgactttatgactttatgtcttcttattcttgttggttttcaagacaaaggttgcaaaatatctttctatgtcagtcttttcatcttacaatgtctttttcatgaaactgcttttattttaatgggcttaaatttattgatattttcctttatgatttttgcgttttgtattctgttaaagaaatgcttcttcacataatgccataaaagttttctctaatattttcttttaaaagatttacaacttttatttttatatcattattattattatgtagagatggagtctcactctgtcactcaggctgcagtgaagtggtgcgatctcggctcactgcaacctcagcctcccaggttcaagc

SEQ ID NO: 124497 - DNA, 600 bp, Homo sapiens
ggtaacaatttatactaccatcagcaataaataagaattgctgtttcctcacatcaccaccaacacttgatgtaaacccactgattaatttttgtcagtttaatggttgtgaagttatatctcattgatattttaattttgtctgactactaatactattgagcatatatttttatattttattgactatttacactcctatgaattgcttgttcatatcctttgctaatttcccttctgactttatgactttatgtcttcttattcttgttggttttcaagacaaaggttgcaaaatatctttctatgtcagtcttttcatcttacaatgtctttttcatgaaactgcttttattttaatggrcttaaatttattgatattttcctttatgatttttgcgttttgtattctgttaaagaaatgcttcttcacataatgccataaaagttttctctaatattttcttttaaaagatttacaacttttatttttatatcattattattattatgtagagatggagtctcactctgtcactcaggctgcagtgaagtggtgcgatctcggctcactgcaacctcagcctcccaggttcaagc

SEQ ID NO: 124498 - DNA, 614 bp, Homo sapiens
cactaccagctaatacaaaacaaaacacttaaatgcacagatcagtgacactataaagcaactgcacaagcaagccagcataataaccagctaacaacacaatggcagggtcaactccacacatatcaatactaatcttgaatgtaaatagsctaagtgctcccacttaaaagtcacagaggccgggcgcagtggccgcacttgtagtcccagcactttgggaggccaaggcgggtgaatcacaaggttgggagttcaagactagcctggccaacattgtgagaccctgtccctactaaaaatacaaaaaaattagctaggtgtagtggcaggcacctgtaatcccaacaactcaggaggctgaggcaggagaaccgcttgaacctgggaggcggaggttgcagtgagctgagatcatgccactgcactccaggctgggtgacagagtgagaatccatctcaaaaaaaaaaagtcacagagtgccaagctggataaaaaagcaagacccggccaggtgcagtggctcatgcctgtaatcccagcactttgggaggctgaggtgggcagatcacaaggtcatgagttttagactagcctggccaacatggtaaag

SEQ ID NO: 124499 - DNA, 447 bp, Homo sapiens
tgaaagcctaagggaaagcacccctcatccttaacaaaggcatagtcctacaggtcctctctctctctttctctttctccccacctgctggttgagctccctgtcatctctcaacttcccattggtgctcctaacctctctaggtttcctccattttatgcattttggttttccttcctcattgtgtctcacctgacacacacacacmtgaacccaactttctcctccagtcaggggtctcctaaagagtagctatcttagcttatggccactcccaacaaagagagaaacctcaagaccaaatcagaaagaaaccataatcatagaaatcacaacaggagataggtacaacccgtgacttactttggttaagaaagtatgagcagaactatgtccttgagtggtgaagcttcaaaagtcaattagcaatttgtcttcctcttctct

SEQ ID NO: 124500 - DNA, 602 bp, Homo sapiens
agtaaacttaatgtgtatctcatccaataccacttgactatagaagacatagattttggagcccaaattagtgagctaaaatctcatatctgatcatttagtagctatgtgactttgagaaattcacctagtctcttttctatacaaatgtaacacagattaagcatcccctaacctgataattcaaaatcctaaatgctccaaaatctgraacttaagcctcaacattatgccacaagtgggacattctccccatgacctcaactgagaggtcacagtaaaacttaggctcccaagacacagtttattcggcatccccaaaggaaaaaaggcccctccagcaccctcagctgtgatatatcttttctgaacacacccagattccctcatacaagcatgatcacaagaagcaataaaacggcatgtgtgaaggctggacacaccaagggcaggttctccatgatgccccaccaagggccaagacctagatgcatttctgctgcatttttttttacttattctctgctctgtagtgtaaagatattgttgcaaatgtcaaaaggcctgcagataaccctatgggtaacagtgataagaataga

SEQ ID NO: 124501 - DNA, 537 bp, Homo sapiens
gcaaactctcctggttgtgcattttattactcaatctacccctgatgttgggaggaacctaaaaagagcagcagtgggactctaaacccctataagcaaactcttaaacatggcctttggacttacaacaatagagatggaaaaaacaaamaacaaaacaaagcaaaaaaaaaaaaaaacagagaaaacaaaaccccaaaagtacaatcattaacatctgctttaagccccttgctacctcaggattatctatcttgagaaagtgtcatgagatcagcatctgggatgcccagacaagagtccccagcttgctggcccctgggccagaatcagtgtgactactataatcaagaggggcattggcaatgagactatcctaacaatccctggtgagagaataaaaaggctccctgtcaataccagagctaaccatcttccattcaccccaatgaactgccttggttgaataaaattactggggttcctggacccttgacttgacagacagtctgcaatatcaactagcagctacccaaa

SEQ ID NO: 124502 - DNA, 610 bp, Homo sapiens
ttttgcataaaaaacacttcttgggcttcaaatttattctatatttagtgaaataaaaccacacaaacagtgtaaaatgagcctttgctaaacaaatcacttttatgactaagcaattgcacacactcaccccaaggaacacacaaacaaaatagaagaggcaagatgcctgtttgaaactgcagacaagcaattgcaaatacagcactccacagtaaaacaaaattaagtaacattctaactttagaaagtatggcactgatttagatcagatgttttttgatagaaaattatttcagcaaagtaattgtaagccagtcttttgcactgctcatttccttcttccctacgatttcactccatatcagtatccccagtaaatatattgctcttgaatactaagaaattatgaaagcaaggaacagagatcaggcattcctgggtatctgggaaacaagcacactggaggctaattttgtgtaagatttcttttacttcycatcaatatgccataagcctgacctggaggatccccttcaattgatgcaagaaagtaattaagtctccaggctcatcacaacctgtgcaatctcatgtgcaaagattgagc

SEQ ID NO: 124503 - DNA, 599 bp, Homo sapiens
ctaattcttttgagaccaaattaagaacaaagatagcaggaacaggcttcatcaaataaaaatgtaaatatgctgcatctcatttgtgcttgaagaaactttatttaaatattttttatcaagtggaatagtctggctatatcattatcagtgtctgggaaagtaataacctggcgagtcagtgtaagtcagggaggggaaagtgagctcatacattctgttaatgtggcctactttggagtgagatttctctatgacttccaaaaagaaagtggtaatagtgttgatgtacacagtctargacaattgtcatgattaacttcattttactatatatcaaatgaagaattactgacttcgactaacggtattgtgcaaagtagtgatgatgtatttttaagtgaataaaatgggggataatttgcagatttttatctattttagactttggtttaaagaatggtaagagaaagctccaggtagtcacaaactaaatagactctgttgaattttatttcctctaacttggtgcaaagtatgatattgcatcttcagcagtggccaggaagtaaagcaaagaatcaggcttgccacataaa

SEQ ID NO: 124504 - DNA, 621 bp, Homo sapiens
ttttttactatatttacaatattttatacttctctctgtttaactgaatctcagtgttaacccatatttcttttacttttttagagaaaaaagttaccaagtcttgagttgtttattttgattctttttcccattagctgaattatatctttaaaaaagtattctcagcccagaggatgaaaacaacgtgtttcatggatcttgttatctgagattattttcccatcacattactgtaagaacaaccttttaattatatatttgaatctgtctgtagaatttctataggaaattatccatttaatttcagtgttcagaatttcccaaggctgggcatggtggctcacacctgtaattccatcactttgggaggcaaaggcaggaggatctytggaagccaagagttcaagaccagtctgggcaacaaaggaagacgctggctctaaaaaaaaaaaaaaaaaaaaaaaaatatatatatatatatatatatatatatatatattatattatattatattagccaggcatggtggtgcatgcctgcagtcccagctactccgaaggctgaggagggaggattgcttgagcccaggagtttgaggttgcattgagctataatca

SEQ ID NO: 124505 - DNA, 621 bp, Homo sapiens
ttttttactatatttacaatattttatacttctctctgtttaactgaatctcagtgttaacccatatttcttttacttttttagagaaaaaagttaccaagtcttgagttgtttattttgattctttttcccattagctgaattatatctttaaaaaagtattctcagcccagaggatgaaaacaacgtgtttcatggatcttgttatctgagattattttcccatcacattactgtaagaacaaccttttaattatatatttgaatctgtctgtagaatttctataggaaattatccatttaatttcagtgttcagaatttcccaaggctgggcatggtggctcacacctgtaattccatcactttgggaggcaaaggcaggaggatctctggaagccaagagttcaagaccagtytgggcaacaaaggaagacgctggctctaaaaaaaaaaaaaaaaaaaaaaaaatatatatatatatatatatatatatatatatattatattatattatattagccaggcatggtggtgcatgcctgcagtcccagctactccgaaggctgaggagggaggattgcttgagcccaggagtttgaggttgcattgagctataatca

SEQ ID NO: 124506 - DNA, 621 bp, Homo sapiens
ttttttactatatttacaatattttatacttctctctgtttaactgaatctcagtgttaacccatatttcttttacttttttagagaaaaaagttaccaagtcttgagttgtttattttgattctttttcccattagctgaattatatctttaaaaaagtattctcagcccagaggatgaaaacaacgtgtttcatggatcttgttatctgagattattttcccatcacattactgtaagaacaaccttttaattatatatttgaatctgtctgtagaatttctataggaaattatccatttaatttcagtgttcagaatttcccaaggctgggcatggtggctcacacctgtaattccatcactttgggaggcaaaggcaggaggatctctggaagccaagagttcaagaccagtctgggcaacaaaggaagacgctggctctaaaaaaaaaaaaaaaaaaaaaaaaawatatatatatatatatatatatatatatatattatattatattatattagccaggcatggtggtgcatgcctgcagtcccagctactccgaaggctgaggagggaggattgcttgagcccaggagtttgaggttgcattgagctataatca

SEQ ID NO: 124507 - DNA, 410 bp, Homo sapiens
tgaattcacaaaacattaagaagaatcagtatcactcctcaaactcttggacaaattgaagaacatttcctcactcatcctaagaggccagcattaccctcatatcaaagccagacaaagacaccacaagaaaaatgacatgccaatatccctgataagcatcgttggaaaagtcctcaacaaaatgccagcaaaaccaattcaggagtataataaaaaaattatacaccctgaccaagcaggatttattcctggaatgcaaggatagttcaacgtacraaaatcaatcaatgttccacataaaaaatgttcaacatacaaaaatcaatcaatattagccgagtggaggaaggaaactacatgaccctctcatctgatgcaggaaaagcattcgaccaaattcaaaaccc

SEQ ID NO: 124508 - DNA, 595 bp, Homo sapiens
aactaaaattatgaacaagatactgactatgtcttttatgactcattagttcagaattagaacctgggctctggaaaaaaaataacacagccatttcattgtaaatttgtaaactttgcagcagtttaaccatgagagttggcatataggtcagggaataggcctggtgggttttgctgtcaaatcccattatactcctgcagagaataaagtgctttgtgcttcgtgaaaattggtttgtagtatgtgtgtaccaattatcaggattgtcagaaatgttggccaatttcctttcaggttcatagggacttaaatctgaaatacttctctacaaaaactttacttagctgcataattctgaaatagytttattctggccaactgcttatttataacagccttttcaggtaatattctaggagttatttctcaagatttattccctttatttttcttgatattctttcaggtgcaaggaaataaaaaataatttggcttatgtatacaatttggataattttgtagtttttcttacactgtgttgctcatttatgagaaataggcaaatagataaagaaaattcggttactgcatg

SEQ ID NO: 124509 - DNA, 595 bp, Homo sapiens
aactaaaattatgaacaagatactgactatgtcttttatgactcattagttcagaattagaacctgggctctggaaaaaaaataacacagccatttcattgtaaatttgtaaactttgcagcagtttaaccatgagagttggcatataggtcagggaataggcctggtgggttttgctgtcaaatcccattatactcctgcagagaataaagtgctttgtgcttcgtgaaaattggtttgtagtatgtgtgtaccaattatcaggattgtcagaaatgttggccaatttcctttcaggttcatagggacttaaatctgaaatacttctctacaaaaactttacttagctgcataattctgaaatagctytattctggccaactgcttatttataacagccttttcaggtaatattctaggagttatttctcaagatttattccctttatttttcttgatattctttcaggtgcaaggaaataaaaaataatttggcttatgtatacaatttggataattttgtagtttttcttacactgtgttgctcatttatgagaaataggcaaatagataaagaaaattcggttactgcatg

SEQ ID NO: 124510 - DNA, 566 bp, Homo sapiens
ctggatcatatggtacttgcatgttcaatttgtaaagaaactaccaaacatttttccagagtggctctaccatttgacattgccagcagcaatatgtgagtaatttagtttttcttcatcatctcctgcatttggtgttggcactgtgttttgtcttagtcattctgttaggtgtgtagtgatatatacacttactgaaaattaactcagattatgaggtgaattatgcaaayattgtggttttaatttcaatttccataatgactaataacgttgaacatctttttatgtacttatttgcctccatctgtatatcctctttggtaaaatgtctcttcgcatcttttgcccatgttctaaatggattgtttagctttttaccattgagcttgagagttgagagttctttatatattctaggtactatcctctatcagatacatgatttacaaacattttctccaactctgtagcttgacttttttttcattcttttagcatttaacatttaagtctgtgatctattttgagttaattttgatataagatttgagacataagtcaaa

SEQ ID NO: 124511 - DNA, 548 bp, Homo sapiens
ggtctgctggaaaaatgaggtctggaggaagaaagtgagaattttgctgagcctggaactaaaggatcttgctctctagggatacacagcagggatctgcttcctggccccaagtctcaaccctctgcctaccccacatgtgacctggaaacatcctggagccctgaaagtgaaatctgagccaaatccctagcagactcagggcccttgcccctcttctccttttgataaaaacttaccttttcagggaaaataggctccakctagggtgaacatgtttccaccagagagatgccattcctcttcccattctgagctccttctgagctccatgacaaggtgagagcctagttttggaaagctgctgaggcttcctttcaaaggctcataggaacttacaatgcccagggaaatctttctactaagtgcctaggtgtgtaggtcccaggaactggacttagccttcgagtcctatggatgcctccatggagtccagaaagggagaacgaaagagcctgtaatacaatcttcctcctctgactgtacca

SEQ ID NO: 124512 - DNA, 568 bp, Homo sapiens
gggaggctgaggcatgagacacatctgtaatcccacctactagggaggctgaggcatgagaattgcttgaacccaagaggcagacgttgcagtgagctgaggtcctgccactgcactctgtctcgaaaaaaggaaaaaaagaggcagggagaaataaagactttctcagacaaacaaaaattgagaamatttgtcaccatagacctgccttgcaaaaaatgctaaacaaagttcttcagagagaaggaaaatgataagtcataaactcaaatctgtatttaaaaaggaaaaagcattagagaaggaataaagtagaataaaagctttcattttttattcttaattgatttaacagataatcctttgttcaacagaactatagtaacaatgaattcagtgattatagcttgtatgtaagtgaaataaatgacagtaacgttatatgaggctggaaagatactctacgatgttaggttggtgcaaaagtgattgcggtttttgccattaaaagtaatgcaaccaacctaatacttgcactacccatgaagtgttatacccatgaagtgtt

SEQ ID NO: 124513 - DNA, 498 bp, Homo sapiens
gccctgcctgatgctctgcacgtaacagctgagagatttctataactgtgtttcaaaagcctgactccccttccacccctggcccaattttcttctgaatcttttcttttggaagagaacaaggaaggacattttccacctccctatacctttacagggaggtgggtggggctgccctggrcctgtggtcacccacccccatcatcctacccccagcctaacaatttttccctggggaccctgggggcagggaaaggagggctttggaaacaaaagtcaggtgtgtgttcaggctcagactcttacttatgacccaaggtttgccgctcaacttccctgagactcaatatcctcattggaaaatgggaatgttggattgttgggagtgtgattgaagatgagacatgagaaaagatcccgtgaaatctggagcattttacaggcttagcaaccatgactactaaaaaaccttcccgcttacttaccttcaggtcttct

SEQ ID NO: 124514 - DNA, 490 bp, Homo sapiens
taaaggtagaaaagggaatgaaaagacagaaccaggaagatggaagagtgcaaaggagtaggcctggtgttgctggctttgaagatggaagaaggggccatgagccaaaaaatgtgtgcagcctgtagrtgctggaaaggacaaggaaacaggttctcccctagagactccagaaaggaacataaccctgccaacaccttgattttagctcaaggagactcatttcattcttctgaactacagaactataagacaatatacttgtattgttttaaaccactaaattggtaatcatttgttatagcagtcacagaaactaacatactgggaattggagaatgcatattttaaaaacatgatgagtaatgaaaatggctatggctttcacacacacatgagaaggtttttcagtttacagttctatcaccagtgtaaaaaaaaaaaaaaaaaaaaaaggtcattttcccttatcttcaccagctctggattt

SEQ ID NO: 124515 - DNA, 614 bp, Homo sapiens
aaacaaatccattcattcctttacttttgagataggaaactattattcagagaagttaagtacattgtcgaatgccacatagccatcagcagagctggagccagaagccaaatctgctgattcctaagttagttttctctgaattcccctatattatctcttcatctctttggccatagctaaaaaacagaagagtagccttcctctgtatatactgagttgagaaatcaagccccatagaaatggcatgcaagcttccctgcagtactcaggacaaaatggacatgccagaaaaggaggttccacttgagcagagctgagcaaccacagcccaakgtggaatgaacgacctcctcgtctgctgcacctcatgatttattagctgctactggtggccatgaaatattcatccactctttcctagagttactgcttcactgcatcaacaaaccattgctttcccatctgtttaggtgtgcagcttggagaagaaaagcttcacacaaaatggaaaagaggcttattttcatgtttagcccagaggcagaacaccaattcacatcttggttcattgtcgttttcccagaggcacagtcagggctgactccctaggc

SEQ ID NO: 124516 - DNA, 494 bp, Homo sapiens
acataattgtggtctccggagagagcagagcaggcatcccaagtgagtctcaaatggcttgagagggcaggaaacgagaagcctggctagggcttttattggggttgtggctggggctggagagaggattcctttatgcaggcagtggtttgcatggttggaatcttcccccagtgccaaaggagggagcccccagactttcttatcagcttacccagttatggggcagagtggcagagggagggtgaggctcaaaagcagatagcagtcaaatgtctaaaaccagagttagactccttataatckccagtcactgagcagttacattgacatatccttaggctccttcaagtgctgaagggtgggagcactggtatatcagagagttcgctccccaaagtgctagtttacgtccatgtttatgtagttgctaatggcaagagacaaccaaccaaccattattaaaaataaaaacatttgtgtcaggaacttca

SEQ ID NO: 124517 - DNA, 539 bp, Homo sapiens
agaggagacgaagctcaggttggcagagctgctgaggtacaccaggcctgggtgccctctgtggcctgaggatcccctcctccctggagccttcttttaggattccatgatgtcagctacagaaaacaggagttcccacagcagtggaagcacccagccaatgacatcagaatctgtggggtggacccagcatatgctcttttcaaagccctctggttaatccaatgtgcagctaaggctgagaacmtccactctaaacatttagaccgtagttgctctgggtcctgactgcagattcaaaccacatttcttgaaaaattatcctgtcttttaggcctatctcccaagactctgctatcgcatggggtgggccaacccaggcattgggaatttaaaaaaactccccaaaatgattctaatgagcaaccaaggttgggagccaatgtcctaattttaagaaagcagctaacaactaaagccagaacctcccctccacacatcacctaagaggtggcagaaatagctcaacaaacactcct

SEQ ID NO: 124518 - DNA, 607 bp, Homo sapiens
agttggcaacctgtgattgactgaagctcgactgctgcgattggcggagactctgctttttgttacagaagtatgctcctaagttaggcttttccttagtggactttatgtaagtaatattgcagttcttcaagtgaagaatcagtaaggagccatcctcaggccaaatttggtgtaagttaacacactaygctacactgtgctgctccctacagtttccccctctggtcatctctgtgcaagggctgaaagcagaaggctgcgtgtcctcatttgttgccagctgggaatgtgtatgttgggtgactcaatttttcgctgctctgtgcatgtccacaaatgactgcgaaagtaccatgattattaattttggggttaaaaataaatttcagtgagtagacatatttgcaaatatgggattcatgaataatgaagattggctatgtatgtatcacagagggtggttgtgtggattagatgtattaataccagttacaatcctgttacagaagcatttgctaaatggcaactatttggaaaatctgatttcagaattttatttggtaaattaatgtttagtagtttatgtgtccaagtaaaggcagag

SEQ ID NO: 124519 - DNA, 484 bp, Homo sapiens
gagcaggagcaggtccaggcctcacattcagagctgaattcctgccgtgagatggccctgacagggagccagcaagaggcgctgaagaaaccctctgctactcagtgttgagtcataacgtgcctgtgggcattctgtccactcactgaggtcctcctccttccagccgaaatcggagcctgcattagtcctgcagtgtcatttttgctggctgcccaggggctcattgtttcttcccagccacgcacaaaagcctcaaccatctgcacactccacacagcagggaccagcagtgagcaaaccctcatccaccacctgggggaacatcctgccacccgctgaggagtcctatggggttaccaaaccagcaaggggcactccctgccaacaggggcttagaagatgggctaagggggcaggaaacaaacaagaagcagaattacttggaaagcacrgaggccctgagggatggggaaaggcacag

SEQ ID NO: 124520 - DNA, 626 bp, Homo sapiens
aatctgttgtacaaggtagtggttttcaaaattttcaagtggtacagatctttatgcaaataagttaagtgaaaaattaatttaccaaatacacaaaattctgctcttttttgaaagtataggagtagaaagcagtggaaagtacctatcctcaatcacttggctttcaccttacccttcctctgaaatccaatggccaactctgggaaactttaggatttcataatattttgtttaattagtggaaggtgaaaaatctgagggcttggaagataattyaacttctaccagggacatactaggcttctttatgaatttttcctgcttaaaattgatctctatatccactccatgcaacacagacacatgtatttacttaaatagaaagtagtcaaaataaaataagattaaaaatttactttctcagtcacactggctgcatttcagttgcttaacaaccacatgtaagtagtagctactctattgtcagtaccaataaagaacagtaccatcattgcaggatgttccactggacagcattgctctcagcattgtgtctctggaaaaactctaaaatctccttgtctttttcaaataagttatcacataaatcctaggacagggac

SEQ ID NO: 124521 - DNA, 576 bp, Homo sapiens
ctcattgcaacctctgcctcccaggtttaaactattctcctacctcagcctccagagtagctgggattacaggcacccrccaccacgtccagctattctttgtatttttaggagaggcagagtttcaccatgttggcgaggctggtcttgaactcctgacctcgtgatccacctgcctcagcctcccaaagtgctgggattacaggcctgagccaccgcacccagcctcaattttctttttttcagcttgtgatgctttctaatctaagtggtaacattttaagatattatttttgctatacaaatatgcaattaatattttttaatattttagtcactcaatgaagaagctgcatgatagaaataactgaatttcgtctgactgtattaagagctagtttgacagtagctagtggcaaagctgtaaagtgtagcagaaattgtcaagtgtcctagtcttcatattgatataagattcacacaccacctttcagatgttattatctttctttctaatgtatagattcttcctcctttttataaagcactttctccataagtacttgcatgtttttt

SEQ ID NO: 124522 - DNA, 556 bp, Homo sapiens
atagtttataatttttcccatggaaggtgcagtacattgagataagaaaaacaggtatacctcagaaatagtttgggtccagagcacctccataaaacaagtcattcaaattttrgtagtaaatataaaagttctgttcgcactatactatattaagtgtgaaatagcattatgtccaaaaaacaatgtatataactttattaaaaatattttattgctgaaaaatgctaacaatcattggagccatcagtgagtcagaatctttttgccgattgagggtcttgccttgatattgttggctgctgactgatctgggttgtgattactgaaagttggggttagccatggcaatttcttaaaacaacactaaaatttgctgcatcaattgactcttcctttcataaaagttttctccataacaagtgatgctttttcattgaattttacccgtagtagaatttcatttaaaactggaatcagagaaggaggtaagatggctgattagatgcagccaggataaacatctcccaccaaaaaaatgggacttcagcgaaga

SEQ ID NO: 124523 - DNA, 415 bp, Homo sapiens
tagtaaatataaaagttctgttcgcactatactatattaagtgtgaaatagcattatgtccaaaaaacaatgtatataactttattaaaaatattttattgctgaaaaatgctaacaatcattggagccatcagtgagtcagaatctttttgccgattgagggtcttgccttgatattgttggctgctgactgatctgggttgtgattastgaaagttggggttagccatggcaatttcttaaaacaacactaaaatttgctgcatcaattgactcttcctttcataaaagttttctccataacaagtgatgctttttcattgaattttacccgtagtagaatttcatttaaaactggaatcagagaaggaggtaagatggctgattagatgcagccaggataaacatctcccac

SEQ ID NO: 124524 - DNA, 662 bp, Homo sapiens
ttctttgctttttttgttttctgtttgttttatattagtttgttttacagcccttaaaaactgtaaaatactttcttagctcccaggccatacaaaaacagatccataagtttgccaacctctgatatggaaatttgattgactaaggattctttaaacaattttgcatagatattgcctctttctactgaaatttgctaagacagcaatgctaaatttcaagtcgtgcttactaataagtacctgatttataacccttcttatttaccagttaattatgaaagctatattatttcccagcaagtcaagttagggatataattgctattgtcttgaaaaagtttagaaacctgactgttattttggttttcttgagagcagatgccaatatgagattagatattcaagacatatgtttaaagtaatgtttatggaagataaacagaaaaagcagagataatcttcatacagtaatacygaaacctgtgaaagaacaaaccatagggaggtggattgaatatgaaaagttccagactgtagcacagctttgaaaaagatttggtcaggccataaaatagtgctatgtcccacagagaatactcatactctgttattgactgaggtattccagaagaaatgtggactcagcacaaagcagagat

SEQ ID NO: 124525 - DNA, 662 bp, Homo sapiens
ttctttgctttttttgttttctgtttgttttatattagtttgttttacagcccttaaaaactgtaaaatactttcttagctcccaggccatacaaaaacagatccataagtttgccaacctctgatatggaaatttgattgactaaggattctttaaacaattttgcatagatattgcctctttctactgaaatttgctaagacagcaatgctaaatttcaagtcgtgcttactaataagtacctgatttataacccttcttatttaccagttaattatgaaagctatattatttcccagcaagtcaagttagggatataattgctattgtcttgaaaaagtttagaaacctgactgttattttggttttcttgagagcagatgccaatatgagattagatattcaagacatatgtttaaagtaatgtttatggaagataaacagaaaaagcagagataatcttcatacagtaatactgaaacctgtgaaagaacaaaccatagggaggtggattgaatatgaaaagwtccagactgtagcacagctttgaaaaagatttggtcaggccataaaatagtgctatgtcccacagagaatactcatactctgttattgactgaggtattccagaagaaatgtggactcagcacaaagcagagat

SEQ ID NO: 124526 - DNA, 662 bp, Homo sapiens
ttctttgctttttttgttttctgtttgttttatattagtttgttttacagcccttaaaaactgtaaaatactttcttagctcccaggccatacaaaaacagatccataagtttgccaacctctgatatggaaatttgattgactaaggattctttaaacaattttgcatagatattgcctctttctactgaaatttgctaagacagcaatgctaaatttcaagtcgtgcttactaataagtacctgatttataacccttcttatttaccagttaattatgaaagctatattatttcccagcaagtcaagttagggatataattgctattgtcttgaaaaagtttagaaacctgactgttattttggttttcttgagagcagatgccaatatgagattagatattcaagacatatgtttaaagtaatgtttatggaagataaacagaaaaagcagagataatcttcatacagtaatactgaaacctgtgaaagaacaaaccatagggaggtggattgaatatgaaaagttccagactgtagcacagctttgaaaaagatttggtcaggccataaaatagtgctatgtcccacagagaatactcatastctgttattgactgaggtattccagaagaaatgtggactcagcacaaagcagagat

SEQ ID NO: 124527 - DNA, 527 bp, Homo sapiens
attatacagtgaccttctttgcctctttctataatttttcatcttgaaatctattttgattaatataagtatagtgaatcttggtcttttttggtttccatttacatggaatatcttttctctgtgtctttatttttagtccatgtgtatctttataggtgaagtgtgtttttgtaggcaacagataaataggtcttttttaaaaaaatctgttcagctactaatattgtttgggtttctgtccctgctgaaatctcatgtcgagttgtaaccccagtgttggaggaggggccttgtaagaggtgattgaatcatgggggtggactttccccttggtgttcctatgatagtgatttctcatgaaatctgattgtttaaaagtgtgtatcacctgccccttctctcttttcctcctgctctggccacatgaagacaggcctcctttctcttcrccttccaccatgattgtaagtttcctgaggcctctcagtcatgctttctgtacagcctgcagaacagtgagccag

SEQ ID NO: 124528 - DNA, 558 bp, Homo sapiens
atcactagaaaatcaaactacatttcttaaagccctgcaaagtgaagctagacaacttgatataaacatcacaagaaatcaccacgacaactgatatataaacagccgtcatgctggctgatatatcaactactcagaaagttcaattgaatatttgctttgagttattatccagaaaaatctgtcagcttgccactgcaatctgaayacgcttcagagactctagaaaaacaagtctatagagtactccggacattaacctttgtttttcttgtttctatagaaatgcttcttattaaagatctgttttcttgcatgatatatacaggcctagtccatctgcaatagcatctcctggagtgggacacagctgctgaaataaactgatctattctcaggactaagagactgattaagaatgatatacatatatatataaatgtgctgttttctgcgtatcctaatttggttactttctattcctttgccttttttaatctaataaactctaaccaaaatatcttcaatgctataagccttactttaacatataaaact

SEQ ID NO: 124529 - DNA, 558 bp, Homo sapiens
atcactagaaaatcaaactacatttcttaaagccctgcaaagtgaagctagacaacttgatataaacatcacaagaaatcaccacgacaactgatatataaacagccgtcatgctggctgatatatcaactactcagaaagttcaattgaatatttgctttgagttattatccagaaaaatctgtcagcttgccactgcaatctgaacacgcttcagagactctagaaaaacaagtctatagagtactcyggacattaacctttgtttttcttgtttctatagaaatgcttcttattaaagatctgttttcttgcatgatatatacaggcctagtccatctgcaatagcatctcctggagtgggacacagctgctgaaataaactgatctattctcaggactaagagactgattaagaatgatatacatatatatataaatgtgctgttttctgcgtatcctaatttggttactttctattcctttgccttttttaatctaataaactctaaccaaaatatcttcaatgctataagccttactttaacatataaaact

SEQ ID NO: 124530 - DNA, 613 bp, Homo sapiens
caggcctagtccatctgcaatagcatctcctggagtgggacacagctgcygaaataaactgatctattctcaggactaagagactgattaagaatgatatacatatatatataaatgtgctgttttctgcgtatcctaatttggttactttctattcctttgccttttttaatctaataaactctaaccaaaatatcttcaatgctataagccttactttaacatataaaacttcttaaagttttaaagtggaagctgaaagaaaatcaaaatattttaccccaaaacatatttctttgatgtattttgagacacctgtttagaaatccagcaaagagaagtagagaagtaaccctacaaagttgtcttttgtgggggcagatttgcatctgtagagaatctgcattgttgcagccagattttctctgaggcctccttttatccagatctaggaaagatttactgaaagtctgacacttttataggtctgaaaaaaacagttatcatgtattctttctgaggtctgctacctgtgaagtttcatctgcataacaagaccacttttgctagctaagcctcctcttctctacctcccataacctgttttgccacc

SEQ ID NO: 124531 - DNA, 566 bp, Homo sapiens
tagttttcattttaataacttatctctttattaatattctctgatgaaacattgtcaattacctgtttgatacagtttggatttgtgtrcccactaaatctcatgtcgaattgtaatcctcaatgttgaaggtgggacctggtggaaggtgattggattatgggggcaaatatttcataaatggtatagcaccatctctcttggtgatgtcctcatgatagcaagttctcatgagatctggttgcttaaaagtgtttcgcagctctcccctctcacttttgctcctgctctggccatgtgacatatctgctccccttttactttctgccataattacaagttttatgaggcctctccagagcccaatcatatgccgctatatttcctgcacagcctgctgaaccatgagacaagtaaacctcttttctttataaagtacccaatcccaggtatttctttatagcaatatgagaaaagactaatacagaaaattggtaccaaggcttaaagcattgttatcaagataccaaaaaatgtgaaagcagttttggaattgggtaagaggc

SEQ ID NO: 124532 - DNA, 566 bp, Homo sapiens
tagttttcattttaataacttatctctttattaatattctctgatgaaacattgtcaattacctgtttgatacagtttggatttgtgtgcccactaaatctcatgtcgaattgtaatcctcaatgttgaaggtgggacctggtggaaggtgattggattatgggggcaaatatttcataaatggtatagcaycatctctcttggtgatgtcctcatgatagcaagttctcatgagatctggttgcttaaaagtgtttcgcagctctcccctctcacttttgctcctgctctggccatgtgacatatctgctccccttttactttctgccataattacaagttttatgaggcctctccagagcccaatcatatgccgctatatttcctgcacagcctgctgaaccatgagacaagtaaacctcttttctttataaagtacccaatcccaggtatttctttatagcaatatgagaaaagactaatacagaaaattggtaccaaggcttaaagcattgttatcaagataccaaaaaatgtgaaagcagttttggaattgggtaagaggc

SEQ ID NO: 124533 - DNA, 474 bp, Homo sapiens
gaattcattttcacttcaagaaagaggaacactgcagccagataagaaactccatctgtcttcaagaaaaagggtcgtggatttgggtgtcacgaatcctgtaatatcttaaattaaggtgccacttctgaatgctttcttcatatttatcaaatgattattctacagaggtgaatttaatattgttaaaataatgatcatgcatgtttaatacatcaatttaagttattatctcccatgctataaaatgcaggataatttcataaataattataaagcatttacaaatgkcgacttaatgcaaagcgttcttgctaatcctttatctttcacaaacacagaaataacgattagattcatggaatgaaaaagggaggttatgttctacaatgtgtcacctcctcactgaatgcaaataagaaggccaaaaaaaaaaaaaaaagaaagaaagaaagacagacctggattgaaaca

SEQ ID NO: 124534 - DNA, 548 bp, Homo sapiens
gcactgctgcttagatcctggccacagggctgcatggggaccccctccctcgggagcaggaacctggactggctgtgctaaagcccttccttccactggcctcgctccgagagaggaaagggaaaacgtacaaacctgaggaggccgtgcccacacctcctgccctgcctgtgcccacaggagtgcgcaggggagccactcttcatgctatactgtgccatcaagcagcagatggagaagggccccattgatgccatcacgggcgaggcccgctactccctgagcgaggacaagctcatccggcagcagatcgagtacaagaccctggtgaggaagccggaagctccgggcccgcctgtgtatcttctacttctgccccttgctctgccttctgtccataaaagcagtctagggggtcaataaagaggatgggaggctggtctggggtgagcccaaaggacaactaagtrtaccaagagcaaggtggcaggcccgcccacccatcccaagcactctatgcctcggtttatcctagataatattggggg

SEQ ID NO: 124535 - DNA, 172 bp, Homo sapiens
actcagcctttattagtaatgagatgatattttgtcctctgtatgccatttgttcttgattttgtttagaacttggtcagagaagatggggcatatgggagcctattagagaccccartagaagtaacaaatgattaactatttttatttactacattatgttatattacca

SEQ ID NO: 124536 - DNA, 578 bp, Homo sapiens
acatttctgttgtttttgagccacctgctttgtgatcctttgttatgacagcccaggggactcacacagctcccagcctggactctagtgtccccctcaggaaatgggacctcctacactcagtttcaggtagcagacacctgggcactgtcctcggccctccctttccctctccctccctgtgtatccagcccagcccaggtccctccaatcccaccacttcacttacagccacctccacccagtgatggtgtagcctcctgactggctttcatgtctatcttgctgccctggtccaccctccacaagcatcccgattggyccttctccacatgggttcacatcaccgcactgcttattaacactctgtggactccactgcacgtcaggtgaaacccacaccaccacagaactaccttgcattgcctgatgtctgctgtcccttctggcttcatcagctgccaccaccgtccccttgatcataaaactggacaatgctggcctttgggtcttccttcatgtggctgttatttttgccaaagtctctaactcccatttgccattaggtctcagcccaa

SEQ ID NO: 124537 - DNA, 578 bp, Homo sapiens
acatttctgttgtttttgagccacctgctttgtgatcctttgttatgacagcccaggggactcacacagctcccagcctggactctagtgtccccctcaggaaatgggacctcctacactcagtttcaggtagcagacacctgggcactgtcctcggccctccctttccctctccctccctgtgtatccagcccagcccaggtccctccaatcccaccacttcacttacagccacctccacccagtgatggtgtagcctcctgactggctttcatgtctatcttgctgccctggtccaccctccacaagcatcccgattggcccttctccacatgggttcacatcaccgcactgctwattaacactctgtggactccactgcacgtcaggtgaaacccacaccaccacagaactaccttgcattgcctgatgtctgctgtcccttctggcttcatcagctgccaccaccgtccccttgatcataaaactggacaatgctggcctttgggtcttccttcatgtggctgttatttttgccaaagtctctaactcccatttgccattaggtctcagcccaa

SEQ ID NO: 124538 - DNA, 562 bp, Homo sapiens
tcattgtttccctgctcatagcaatacactgaaattattctgatttgcctacttaagacggaaagaaagataggagcaaagttacattggaaccagaattacctcaatacytaggtcattttttcctaaagatgggtttgctgcaaaatcaggggaataatctccctcccagggcccttctaaatagtaccctcatggcctagaagaactaatgtccttgctacacaagagcctttgcaacagaggagccctaactgccagggccgatcttggaattttgcctccctcagtcaggtgttcaagttgaatcaaagaaaagaaatagaaaatgccctccatgagtaggctaaagccttcttctgccttatgtttctatcacgttctggagaaggactcaatgttgatccaagtacagaaaccatgtcaggttgcttggataacaactgtaaacgggtttaattgtgctggtttggggtgggccccagcccgggagcattgcttctctgtgtacatcaacactgagtagtgtgcattctaactctttcaccacaaccatatgatc

SEQ ID NO: 124539 - DNA, 562 bp, Homo sapiens
tcattgtttccctgctcatagcaatacactgaaattattctgatttgcctacttaagacggaaagaaagataggagcaaagttacattggaaccagaattacctcaatacctaggtcattttttcytaaagatgggtttgctgcaaaatcaggggaataatctccctcccagggcccttctaaatagtaccctcatggcctagaagaactaatgtccttgctacacaagagcctttgcaacagaggagccctaactgccagggccgatcttggaattttgcctccctcagtcaggtgttcaagttgaatcaaagaaaagaaatagaaaatgccctccatgagtaggctaaagccttcttctgccttatgtttctatcacgttctggagaaggactcaatgttgatccaagtacagaaaccatgtcaggttgcttggataacaactgtaaacgggtttaattgtgctggtttggggtgggccccagcccgggagcattgcttctctgtgtacatcaacactgagtagtgtgcattctaactctttcaccacaaccatatgatc

SEQ ID NO: 124540 - DNA, 562 bp, Homo sapiens
tcattgtttccctgctcatagcaatacactgaaattattctgatttgcctacttaagacggaaagaaagataggagcaaagttacattggaaccagaattacctcaatacctaggtcattttttcctaaagatgggtttgctgcaaaatcaggggaataatctccctcccagggcccttctaaatagtaccctcatggcytagaagaactaatgtccttgctacacaagagcctttgcaacagaggagccctaactgccagggccgatcttggaattttgcctccctcagtcaggtgttcaagttgaatcaaagaaaagaaatagaaaatgccctccatgagtaggctaaagccttcttctgccttatgtttctatcacgttctggagaaggactcaatgttgatccaagtacagaaaccatgtcaggttgcttggataacaactgtaaacgggtttaattgtgctggtttggggtgggccccagcccgggagcattgcttctctgtgtacatcaacactgagtagtgtgcattctaactctttcaccacaaccatatgatc

SEQ ID NO: 124541 - DNA, 634 bp, Homo sapiens
gggcgtgcccacagctgcgctcgcgggtcgccggctgcaccaggcacagctggaaagcaccttgcgcaagggtctcacggggtgcagactcgcgactcctcccccttcctcctccttcccgtatccgcagcgccagggcagtgctggtctgggcagtacgcggggaagcggggacccgctgtcactgcgcctcccgctgccgacgccgcctggacggccgcactctccctgcccgagacccggtgagtgcagctcggaggctggaggacccgatcctcccaaatgctgggtgctttgataatttataagccttttaggctcccttgacttagagaaccaggaggaaaggagtgggagtgtgggttggcggagcccaaagacttgtgaatggctggractaaattcaagtttgtaacccggactctatcccatgactaaagaggtcatagcagaacacgaaggctgggcttttggtctaagaaagaatactaggagaaaaaaaaagttattttcacggaagttgttttcgagcgatagtgcatgatcaggactctgaaatttttctagctctgggcggagaaggacgcctagggattgtctccatagttaacaggggaaggccaccggctgcctg

SEQ ID NO: 124542 - DNA, 455 bp, Homo sapiens
gtgttttccttccatgattccaagtctgcatggaaagacatcaaagaaatttgaggtaatgtagccactacagtaggagtgggctcagggtgagggaagtgcaaatgaggcagagatcatttcttyggggtgaagggatagtggttcaccatctaaatgtctaagagaagttgacattaaagctctgtcttgaaatgtaagttaatgagacagatgacttattaaatgacatccagcagaggcagcatttgaaagactggtattgaggcacgaaatactgagatatattgatggggggaggtgttgcgcattcttggaataacagcagctgggtgaacaggagggattcagagagtgctggggagagaggaagtcaggtacccacccttgggaccctggcatgatggttctgagcagtgacctgcagtcctggtgaaggagagaggaggacaacg

SEQ ID NO: 124543 - DNA, 576 bp, Homo sapiens
tggtggtctagaaccaaaacataatgtcaaaggtatacctgtattgtgaaaggtataaaacgtgtttcttggttcaattttggtaaatggatgtccaaatgtcccagcactctttgttgaaaagactatcatttctctattgaattgccctttctcctctgtcaaaattttgtagactgtatttttgtaggtctatctccaggctctttttctgttccatttatcaactagttaggaaacacgctcactatttccagtttctggatgagattgtaaagatttgacaccatttcttcctggaatggttgatagaattraccagtaaaaccatttgagcctggtgcttacttctgtgtaagaccatcatcactgattcaatttcttaaatagatacagtgataatcaggttacatattgctaattttgtgagtttgggtagtttatatgtttcaaggatctaatccatttcatctaaggcattaatttttggccatagaattgttcatagcattctgtaattttcctttcaatgtgcactataggatcaggattgatgacagttgttttatttgtgat

SEQ ID NO: 124544 - DNA, 544 bp, Homo sapiens
atgagaaaacctggcttgtgtatgcacaaaaaatgaaaaatggactacaacctaacaccatataaaaggtaagcttaaggttgattaaaacttgatttggttaatatagaatgtatatatatatagaaacatcatactgtatcccacaaatatgaacaattactaagtattcattaaaacaaaagaagatttttaaaaaacaatgttggagctagggtttagggaagagttttattttcatttgtttgtttttttcttattttgggaccacattttcagtaattattatgcttttgcaaaaatagaatcacatcaaaaattttatttttattgtgagccacaaaataaaaaaaaacttttaatctgcttataaaaataacctgaaaggtgagagrtgaaattattaacagaagttaatttaagaagatatttatggttgaccaaaatggaagaattttttaatatttccaaacacaaaagtggggcaaagtattagactgtattacattaaaattaagaatttgttaaaaaatatttaatggag

SEQ ID NO: 124545 - DNA, 605 bp, Homo sapiens
cattttcaaaacttatcaaactctatacttaaaatgggtgtattgtatccaatttatatttcaataaagttgctatctagaaacaacaccatgaataaarataagagagagatgataaagatacttgtaatttcgaaaactgacaacatagcaatatctagaatgtactcaaaaatcctgctacaattgtgatagcaaaagagacagaaatattaagaaaatgggcaaaagtcatcacagaaggggaaacacaaaagactaagaaaaatattgttgagaatatgctcaaaatcattattaactagaaaatgaaaattaaaatacaataataaatttctttatatccaccagattgccaagttttgggcaagattttaacagaaattaaggtacatttctaataatacatctaaaccaaactgtctgataactgaaataccccattacctaacagtcatagatttctgcttctggttataaataatctagagaaatttttagacagatccataaggacattttaaaatatgttcattgcagtatagtttaatatagaagtgagttggaggctatctacatgtcactgtaggaaagaataatcaaaa

SEQ ID NO: 124546 - DNA, 461 bp, Homo sapiens
atggacccataaatacactgggcctgctgtaagatgactccagctaaactgaattgatcacttgaactccataagcccatatgctcactggttggtcacaatgatgttttggatctgctgaaattagtgtaagtttggagctgatgttcaataatccctaaaatttctgattattttcttctccccagtgcaaagttaccctcataaaaagccacaggctcctatgagaaaatctgagagaaagattaacagtataaattttctgtcgtgtatcagggtccttcttcaggagaacccaactttccccttattcaaggagttggggtctgaaaattcatctaaacawcggctcatgtctggaaattgattgagggaccattactcagtttttagattcaggctagatttttattcacttgacctaaaagttttctgcttatacagatcaaatgaaatgtagt

SEQ ID NO: 124547 - DNA, 559 bp, Homo sapiens
gatggatgcattctcctgttctatttctgagtattcttgagtaaaatgtatgcaaccttattacttatagcagctattcaactttaatgggaaaataactgtaatcaatattgagtatcaattctggttgacattgatcctaaccatatgtcttattttgcttaaaagatagcagtttaatatgaaagtcattgtatgtttttctatttacatgtgaatataaataagtgtatttcattttgaaaatgttttttatctaggctttcagtgcgttgaagtttcttaggatcctgtagtctacttcaaattaatgttaatccaagtcatttccctttacttaaactaactgtggagatttgtgctccttaatgtctttatctcacttacatagttagacctacttaaattctaattaattgctttaactstctcagatttcagagtttgagagaggaatttcatggatggtttgcatggaaaactaaatatcactttatcatgtatattttcattaaaataagtttgttaatataataatagacattatttagtaaaatag

SEQ ID NO: 124548 - DNA, 555 bp, Homo sapiens
gattgctcatatatctggaggttggctcatctaggatggccatagctgacataattgggagcaacttggcgccaccctaaaactcagtggcatacaacaataagcatttatttacttcataaagctgtgggtcagctggctggttcttctggtgttggctggtgtattaatcatctattgttgcatagcaaattacacaaacttagtgccttaaaacaatacacatttatatctgacactttctgtgggttaggaatctaggtaacagttagctgggttttatgcttctgggtcttaccaggctccagtcagtactggctaggctgtgcttttatctggagtttcaactggggaggggtctgcttcaaattcactctggttgttggcataattcagtttcctatagctgtagaatygaggctctaagttcctaaaaccttccacattgcttttccttctgccacacgggcctctccacatttcatatgtggcttctttctttgaggcttgctggagtgtcagagccactctagtgaaatggtcttatataaataa

SEQ ID NO: 124549 - DNA, 579 bp, Homo sapiens
ctgccttccatatccatgtggcagaggttcagaaatgccaggtaattagctaaagcttccacttggatcttctatagatctcacttaaaacaccagtgtccctgtgtggaggaacagatggagctaaatgactctaaggtccttgtcaatcacagacttacatttccctaatgagagagatggccttgaaagtcctgagactttggaaacagcatgggagccaatcccttcctttyctcgcctttcaagggtaagaaagtaaagatagccactatcatgagaactgaagctatccaaatgcagcctcatttatatcaaattgatacctccacactatagcttcctcccagagccacgtgttacaaacatccagtccaggctgaactcaagagagttttctccccttcctccctccctccctccctcccttcctctgtccctccctccctcccttccttccttcctttcttccttccttgcttctttccttcctttctctctctttcttcttttttctttctctttctctctctctcttcctccctccctccttctcttaacctattttgaaaacaaaca

SEQ ID NO: 124550 - DNA, 588 bp, Homo sapiens
aagactgtattagatgaaatttatagttgtttaacaaaacaaaaactattatgtcagccttagaagcagtaattcatcaatttatgtagagcaaacaattcatgccagatgagtacagagaaataaatttcctactcactttgcaaccattattctttccaccacggaaagatggggtaatcygagactaaaaagagagagagagagagacagagagacagaaaaagagaaagaaagggtggtgtaataaaatagggccttatttagacactaaatataaccacaacctagagttcacttatccaataaccataagctcttgatgatttctgtcagtatatccagtatttcaataaccccaataaaataaattactgagatttaaaaccagtccgaaatgcccctttcaataaccactcctcatcaaaattcttatttctttagaatattttctgccggaagagaaagggagaagcaatatttcattaccattttagaatgattttgtaagcagggatataaatgtagtcacacatatttatgccagataggagcttatcttgcttgaccacataaaaagttaggtta

SEQ ID NO: 124551 - DNA, 267 bp, Homo sapiens
gtgggttggctgtgtaattttgctgcggatgctggagttggtagtcacaaggtgctaatagtaatttgctctttgcttgtgcctccatcccagatctcgaggcagatattaccaccttggttttgcacaggctcattgaggttaaagggctggttggaagttacttggcaaggggtygagtgcggaggccctaaaattctctggcccgttagaccttgagctagtcagtaaactagaaatggaccgagacccgggagacctgaattc

SEQ ID NO: 124552 - DNA, 665 bp, Homo sapiens
ctccaggattacagcccccaaaaagagttgatgcctctctctactctttagaggtcatgtacccctaaaaatgatctaagaatcttcggatgtcagtatgaaggacctcctttcctcattctcccatcccttgtgtctttctcctccaacatccacctcccctaatacgcacacaagagtccacaggtggaggaggggtgacaggaacccttcagccctgactctaatcctattctatatacgcaaaagatcaactctaaatctggtccctgcagtgaaaggacaatcacctactatttaaattmattcagctctttattcaacaaaacgttgtagcattttcatcagtggaccaactgaacaatcaaccctacaaaaaataaagcgtcggctggagcagaaaagaggccttcatgggagtttgcagttccacataatggctggggaggctgagctgtcactgcttttcttcatcccagtacccatgcatagcatcagctctagcgtgaagggagatttaaaagcaactaagaacatataaacatttctcattcattatctggggtttctgctactgggtgacatatcattagtcctagtgtaaggcaagctttaaaaccgtaattacttaatcatgcagttagcttcccatcaatcctagcagc

SEQ ID NO: 124553 - DNA, 438 bp, Homo sapiens
caaaatttcaacatttatggaatgagagtggaagatggaaacctgaccaggacatcacctcatttcatttggcagcaamcttttttttaattttagtctctgtccaattctatattcaccttaagaaagcaatccctgtaaacagagaaatacagcaaagttttacggtaatcagttatcaataaatgtgttatcctttacattttaggtccttcattagcaattaattataagtaattaattatgaattaattttatttttccaaaaaattgattaaaaggacaatgtacacaaagaaattagcaagtttagactgtgaatgctggaattatattagactgtgtttataaattaaccaggactttcagtagtattaggaactgaattcaaaatagctcaggcaataacacaaaacaaaaaccaacaataatatattg

SEQ ID NO: 124554 - DNA, 438 bp, Homo sapiens
caaaatttcaacatttatggaatgagagtggaagatggaaacctgaccaggacatcacctcatttcatttggcagcaaacttttttttaattttagtctctgtccaattctatattcaccttaagaaagcaatccctgtaaacagagaaatacagcaaagttttayggtaatcagttatcaataaatgtgttatcctttacattttaggtccttcattagcaattaattataagtaattaattatgaattaattttatttttccaaaaaattgattaaaaggacaatgtacacaaagaaattagcaagtttagactgtgaatgctggaattatattagactgtgtttataaattaaccaggactttcagtagtattaggaactgaattcaaaatagctcaggcaataacacaaaacaaaaaccaacaataatatattg

SEQ ID NO: 124555 - DNA, 521 bp, Homo sapiens
ttttatatattccactttaggttatatatgtacatttaacaatatatacactatatatatgtatgyataacaatatatacactatatatatgtatataatttgaagaggaataattttgggaggtcttaataataccgatatttttaacatttctagatgtcaacctgcttttaatagcagatttacaattacacatccacaaccagaaatgtgtgtattttcagatatttttcaaattcaccaagaaaagaacacattaacttatttttaataacacataagccatctctcttttaatggcacttattcaggacagaatagtgacttttcacaggccagattttaaactgtgttatctcattccctcatggtgtgcaacgagagctaccatgaaactggactgatcaaataggtttcttttaccagataccaggttatgtgaatcttccatcattgcctccataaggtccttgttaatctgtacattatcaggaggaggagaaggagtatcactgcatag

SEQ ID NO: 124556 - DNA, 568 bp, Homo sapiens
ctgagtttctggaggcatcagtaatgcctgacactggctctcaaagaggatggtgataacaaacccttaccaggtagcttggtctaagatatattttaggcaattttagaccaggttatataagaagatgtgctacctcagcatacacccagcccaacccaaacctctctgtgtcatgtggtcacaggctgtaagtgctttctttagaatatcattgcctaatgcatctttggtagtcaccrtaccttatcagccagtaattgtaggaatctaaaaacctctatgcttcactacctaggtataatgaagtggattaaagcttggagacctgactacttacaaaggcccttaaatggattagaacgtgttattttcctgtgcaaatggcttaggccactttaaacacattgtactcataatgccatggacttaccagatctttcattcctgacctcaaagcatgctgcaaacaaaacgctttctccattttgtaaagacagaaagggtgtagcacaacatagtaaaatgcaaactggaatttacagttcttttagaggaaccttataat

SEQ ID NO: 124557 - DNA, 604 bp, Homo sapiens
atgtgtgtggtgacatagacaatttcctcactaagttttgtagtgaatgaaaagtaaaggaatgagaggtaattgggaggagatgtagacatctagttttttttttttaagttggagattgtattagtccattttcaagctgctgataaagacataccaaagactgggcaatttacaaaagaaagaggtttaatggacttaaaagtccaagtggctgaggaggcctcacaatcatggcagaaggcaaggagcaagtcatgtcttacatggatggcagcaggcaaagagagagcttgtgcagggtaactcacccttataaaagcatccgatctcatgagacttattcactatcgccagaacagcacagggaagacctgctcccatgattcaattacstcccactgggttcctcccccaacatgtgggaattcaagatgagttttgggtggggacacagccacaaaatatcagagataaaacggcaaactcgtttgctgatagataaaatacagtagagtgggagagaaactgataatgattactagaagacaggccctgagactgtaagatggggtgggactctaagcaccagaatggggttggc

SEQ ID NO: 124558 - DNA, 557 bp, Homo sapiens
ttgacagctttgagcctaagtatccttgtctaaaaaaatgagggcatgcaactagttattaataatktccatcattcttttcactcccatattttattaagaaaacagaaaaaaaactctcatataaacaatttaaaagtttagaaattcagcagcctgactgaaagaagctggtttgagatgctactcagctttgaatgtagattcaaacacattcaaatctagagatgcatgacagcataaccttttcaaatgtgaccgctcccttcttcccatgaatctcttatcccacacttcactgcttgccttccaatcaaacttttatgattcactacaactttggtcagaactattctcaaatctacctgttttttttaaatacatttcactcagtatttccatgtaaggaaactctttggcataagttaggaataaatcccaggatttcccaaacattaaaccaggtagtccctccttgtgtctaacttagacgtcctgagccatgattttcagccctttccctcgtgttctctgactctctttaaggagaaacacct

SEQ ID NO: 124559 - DNA, 557 bp, Homo sapiens
ttgacagctttgagcctaagtatccttgtctaaaaaaatgagggcatgcaactagttattaataatgtccatcattcttttcactcccatattttattaagaaaacagaaaaaaaactctcatataaacaatttaaaagtttagaaattcagcagcctgactgaaagaagctggtttgagatgctactcagctttgaatgtagattcaaacacattcaaatctagagatgcatgacagcataaccttttcaaatgtgaccgctcccttcttcccatgaatctcttatcccacacttcactgcttgccttccaatcaaacttttatgattcactacaactttggtcagaactattctcaaatctacctgtttttttwaaatacatttcactcagtatttccatgtaaggaaactctttggcataagttaggaataaatcccaggatttcccaaacattaaaccaggtagtccctccttgtgtctaacttagacgtcctgagccatgattttcagccctttccctcgtgttctctgactctctttaaggagaaacacct

SEQ ID NO: 124560 - DNA, 549 bp, Homo sapiens
accacaccccgtttcaacaagttctgtcttctttttaaaatcaccttttggattttgaaagccatggactatgtttcctaaattctaaacagaagcatttgtgtgtgtatatccaatttactcacttaagagttcaatttttwaaaaaattctcgatgacatttccatgtttgtgtttcaatggaggggctgccattccagacaatcagataagtcttctatcagattgttaatgcccttaattgtaatttgtctttgtctcattatggtatatatgcctcgagaagtcaaatcaaacagtgaaaaatcagaacattgggaaagacaatacaacctctatctttatggacaatcagagaacaaattggtagttaaccctctgctgaggctttctgctcctggacctcctaggaatgtgtggcagccctctcctaatctcagaggctggaagcaactcaacccactcacattgctgctccccattccctccaaggtcacctggactggcaagtctccctaggatgatggaacatttatttgctggagggc

SEQ ID NO: 124561 - DNA, 648 bp, Homo sapiens
attatttccctgaataaaattatttgtcatcaagacaacaagtgagaacaggctcaaaagaatcacaaaaaagtttttgttttagttatcattttcttgctgacaagtacctgccatctagccatcacattgcttcatatcacacctgtctactctctaagaagtaggcaggagctggcagaagatggaatgttgagtcagaggaaggcatgactacacttggagagggaaattkactgtaagagaggaaaggatgaaggagaaagataggagaaggcagtcctgatgaaaaactggcagatgatcctctatacaagtatctcaaaccttgatttaaaagcaaaaaggaatatagataaaggtaacttaccttgacagtttaggactcgtgatattgaaaagtaagaaaaagaacgaccaccaacttgatttctcctatatataaaactcctaggaaaataataacttggccaagtttatgtttcccctcacactaactgaatttgtagcaaaatgtagtcagcagtgaaaaatagtgataaatatatgtagataaaagctctaagtaagctggaaatatgtttgtcttgttcactgttgtattccttccacttactttaatgcagaatatagcagaccctcaaaaat

SEQ ID NO: 124562 - DNA, 538 bp, Homo sapiens
acacaggaggattgcacttggttgcatgttctctaagccccttacctgggcctgatcccaaccccaaggctgcaaacagaggagactctgagctaggccaacccttgggagctccagattccaagcaggccacacagcagggtgtggcgcagcccagggaagtgtagggtgagatgggagaggggagtaaatccagtctgtgggctcaggaaagatagattctggccagcccagggaccgggctagctgttactcaaaagtcagaccagggagatggacagcaaaattaagagtaagtgcttagcaaattgacaaggtgatcttatgtttgttgaatctaataatttttaaaatatggggcctgcattcatacaccagtattcatagcagtattattcacaatagccaactggcagaaacaactcaaatgtcccttgacaggtgaatgcataaaccaaatgtggcatatgkgtacaatggaatattattcagccttagaaaagaacaaagtgttgtcacatgctacaacagggatgga

SEQ ID NO: 124563 - DNA, 577 bp, Homo sapiens
aggaaaatactatttctgggaaagaagggatcaagggtaggaaaattcataccataaagtgcaccagagttgctacatccaagactacttacactaattttgttctcccattatataaaattttgcagaaaataaagagaataacagtgatttctaccatgtgcttggtaagaaattcttacacttcttctggcttattagattctgggttccattcactgcgatttcaggaagagcagagctttggtatactgtgcacagtgccaaaacagtcagggtcacgggaaaacttcctctttactctctgaagtttcactaaaaaatcaacttacaagtggcagattaactggraaaaaggcgcacaaatttatgaatgtgcacatgggggagaacaatagttattatctcccagccccctaatgggattcagaagcttatataccatcttgaagttactgaaagaattggggcttggcataaaaaagtgcaaaataatgtcttttgcagcaatttggatgaaattggaggccattattctaagtgaagtaactcaagaatggaaaacaaaatactgtat

SEQ ID NO: 124564 - DNA, 574 bp, Homo sapiens
ccaaccttttccttttaatctctttgccactttgcattttgtttcctgtagaaatcacataatagcattgttttactttttaaatccagtctgagaatctttaccttatgattagattgcttaatccattcacatataacatcattgttgatatagttagatttatgtctgtcattttactttttgtttctctatgcctcatatctttctcttcttttacacatccattattcctttattttctatgaagtgaatattttctagtgtaacaattaaattgttttaatggtttgttttactatatttttagttgttttcatactagtggctctagggcttaccatgtaaaacttattggagacwatttaacttcacactgatttaattccactgaggtatagaattactactcttaaataggtctataacttcttcccactttttgttattattatatgtagaatacttaaatataacagcaatatattgtcacaggtaattctttatttaactttatgtctattaagtaatctgaaaaagaaaagaaataattaaatacttatagtttgtcata

SEQ ID NO: 124565 - DNA, 527 bp, Homo sapiens
ctttgttccgtcaccctaatgtctacatttgctttggtcttcattgcatggggacataaagttctcactactaccaccagtctttttccaaagtttccttttggttctctagtcttgattctacatattgcctgagttattagatgagaaatatagtttgttacttttatattcaaatagcaagttagctgggcataaaatctttgggttgtactttttatttgcaaaatattttgctggggccgctcttacagtactgaatgatatcgtagaaaagtatatttagccttatatttccccctcataagtatcccaatcctctggccagctatcyatgaaaggctttatcttcaacatttgttactaatgaggatatatctcactgttgacaacagtgagtaatttttccctgatatattatgcatgtcttcaaataataggttcaaatgatttgaaatcatatttcaggaacttattctttaattacactttgaaatgtttcttctgttgcattattttagttttat

SEQ ID NO: 124566 - DNA, 631 bp, Homo sapiens
gctcaaaggaagtgctcactggagcatttgagatctcagatttttgaatttgggatgttcaaccaataagtatgatgcaaatattccaaaatctgaaaaactctgaaatccaaaatacttctgatcccatggattccaaataagggatactcaacttgtatggagaaaattatagtggtctgcatagatgaaaggagccacaacatcccttaagtcaaagcctactccagagcaaggccctaattctcttcaattcaaagctgacaaagaagctgcagcaagttacccaacagatctagctaagatcatygattaaggtggctacactaaacaacagattttcaatgaagatgaagcagccttatattggtaaagatgccatctaggactttgtagctagagaggagaagacaatggctgacttcaaagcttcaaaggtcagaccaattttcttgttaggggctaatacagctagtgactttaagttgaagccaatgctcatttaatattctgaaaatcctaggacccttaagaactacactacctctactctgtgctttataaatggaataacaaaacctgaatgatagcacatctatttacatataaaacaaagtattcattctatgat

SEQ ID NO: 124567 - DNA, 568 bp, Homo sapiens
cattctataataacacactcaagacacagaggaggaggcttaagaaaatgctattgctttctcttgctrtttctaccaaaattttcaaggaatagtttattttccatgatagatatttaatttaaatgctgaaatttgaatctggtttagatagtgctaaacagaatctactaaggacctatgcttatatatagccaagtatttttgtagtgaattcttacaatttttttgtgcctcagcatccctttcaaatataaattggactttctgatatcagaagcagggttcagtcacccttgacagtttccagttcacctcctccaggtttctcaatgtgactgatcccagtatctgccttatacaaccttctgttggtgactacttcattatgggacagctagatataacctccctacagacccccgtactctgcatggaccatgtggatatatcaatgaccacctctcagtcacagcatgactccatggaactcatgactgcttgcattaaatccaccagttagacctccccgtaggaaacctgctcaggtaacaccttacatcccaat

SEQ ID NO: 124568 - DNA, 568 bp, Homo sapiens
cattctataataacacactcaagacacagaggaggaggcttaagaaaatgctattgctttctcttgctgtttctaycaaaattttcaaggaatagtttattttccatgatagatatttaatttaaatgctgaaatttgaatctggtttagatagtgctaaacagaatctactaaggacctatgcttatatatagccaagtatttttgtagtgaattcttacaatttttttgtgcctcagcatccctttcaaatataaattggactttctgatatcagaagcagggttcagtcacccttgacagtttccagttcacctcctccaggtttctcaatgtgactgatcccagtatctgccttatacaaccttctgttggtgactacttcattatgggacagctagatataacctccctacagacccccgtactctgcatggaccatgtggatatatcaatgaccacctctcagtcacagcatgactccatggaactcatgactgcttgcattaaatccaccagttagacctccccgtaggaaacctgctcaggtaacaccttacatcccaat

SEQ ID NO: 124569 - DNA, 568 bp, Homo sapiens
cattctataataacacactcaagacacagaggaggaggcttaagaaaatgctattgctttctcttgctgtttctaccaaaattttcaaggaatagtttattttccatgatagatatttaatttaaatgctgaaatttgaatctggtttagatagtgctaaacagaatctactaaggacctatscttatatatagccaagtatttttgtagtgaattcttacaatttttttgtgcctcagcatccctttcaaatataaattggactttctgatatcagaagcagggttcagtcacccttgacagtttccagttcacctcctccaggtttctcaatgtgactgatcccagtatctgccttatacaaccttctgttggtgactacttcattatgggacagctagatataacctccctacagacccccgtactctgcatggaccatgtggatatatcaatgaccacctctcagtcacagcatgactccatggaactcatgactgcttgcattaaatccaccagttagacctccccgtaggaaacctgctcaggtaacaccttacatcccaat

SEQ ID NO: 124570 - DNA, 568 bp, Homo sapiens
cattctataataacacactcaagacacagaggaggaggcttaagaaaatgctattgctttctcttgctgtttctaccaaaattttcaaggaatagtttattttccatgatagatatttaatttaaatgctgaaatttgaatctggtttagatagtgctaaacagaatctactaaggacctatgcttatatatagccaagtatttttgtagtgaattcttacaatttttttgtgcctcagcatccctttcaaatataaattggactttctgatatcagaagcagggttcagtcacccttgacagtttccagttcacctcctccaggtttctcaatgtgactgatcccagtatctgccttatacaaccttctgttggtgactacttcattatgggacagctagatataacctccctacagacccccrtactctgcatggaccatgtggatatatcaatgaccacctctcagtcacagcatgactccatggaactcatgactgcttgcattaaatccaccagttagacctccccgtaggaaacctgctcaggtaacaccttacatcccaat

SEQ ID NO: 124571 - DNA, 594 bp, Homo sapiens
taaatctttacaagcttttcggtggttttcatgcacactaacattttagaatcagtgctatataataaaagataaaatgaccgagaagaggagaatatggctaaaaatgaccagacatgtaaattaaaatccttaatacattcctgggaacatgctcagcatttgtggaaaagtgaaaggcaaagcaacactgaacagaaataaattctggaaagtaccctgaaaaaactgttttgaacaaacaggttaatttatctctggyttgcattcaaatccagtgacaccatgatggtaaccagaaagcatcgtggaatctctttatggtaagtgatagtttagggaggtcaacattgctggtttgacattcagccttaaaacaaacatcagattttctctattcacatgttttctcttacccgacaattctttaaggaagtacaggaaaagacaatctttttcttcattactatttggacttttagatcatatccatcgcctgttccaacacctaaatgaaattaaaaagttaggttggttagtgtgaagatcaaaatgtcttgccaattaacattatggattaaaaagagaaaaaaa

SEQ ID NO: 124572 - DNA, 594 bp, Homo sapiens
taaatctttacaagcttttcggtggttttcatgcacactaacattttagaatcagtgctatataataaaagataaaatgaccgagaagaggagaatatggctaaaaatgaccagacatgtaaattaaaatccttaatacattcctgggaacatgctcagcatttgtggaaaagtgaaaggcaaagcaacactgaacagaaataaattctggaaagtaccctgaaaaaactgttttgaacaaacaggttaatttatctctggcttgcattcaaatccagtgacaccaygatggtaaccagaaagcatcgtggaatctctttatggtaagtgatagtttagggaggtcaacattgctggtttgacattcagccttaaaacaaacatcagattttctctattcacatgttttctcttacccgacaattctttaaggaagtacaggaaaagacaatctttttcttcattactatttggacttttagatcatatccatcgcctgttccaacacctaaatgaaattaaaaagttaggttggttagtgtgaagatcaaaatgtcttgccaattaacattatggattaaaaagagaaaaaaa

SEQ ID NO: 124573 - DNA, 594 bp, Homo sapiens
taaatctttacaagcttttcggtggttttcatgcacactaacattttagaatcagtgctatataataaaagataaaatgaccgagaagaggagaatatggctaaaaatgaccagacatgtaaattaaaatccttaatacattcctgggaacatgctcagcatttgtggaaaagtgaaaggcaaagcaacactgaacagaaataaattctggaaagtaccctgaaaaaactgttttgaacaaacaggttaatttatctctggcttgcattcaaatccagtgacaccatgatggtaaccagaaagcatcgtggaatctctttatggtaagtgatagtttagggargtcaacattgctggtttgacattcagccttaaaacaaacatcagattttctctattcacatgttttctcttacccgacaattctttaaggaagtacaggaaaagacaatctttttcttcattactatttggacttttagatcatatccatcgcctgttccaacacctaaatgaaattaaaaagttaggttggttagtgtgaagatcaaaatgtcttgccaattaacattatggattaaaaagagaaaaaaa

SEQ ID NO: 124574 - DNA, 665 bp, Homo sapiens
tcttcccaataaacaaacagcaagtatatagccagcaccactggccacagccagctcttacccattggcgccatctactggcttgtaggtcaaaccacatacccaatataaaacctgctgatagaagtgcatatagaggcaaggccaaaagacctacctagcattgctctaaagtcacatcacctaaggaggagggaaagggaaagcataataataataataatgatataggaaagaaaagataaagaaaaaatcctacccacataaaaacarttacaaaaattagaagtgctagcatctccagatgagaagaaccagtacaagaattctggcaccatgaaaaacctgcatgtagtgataccaccaaaggatcacactagatctctggcaatgctttctaccaaaatgaaaactcagaaatgacaataaagaattcaaagcatggattccaaggaagctcaatgagattcaaggttgaaatcaacaaaaggaaacttctaaatcaattcagcaaatgaaggaagagataaacatcttaaaaagaaatcaatcagaacttctggaattaaaaaaactcacttaaggaatttcaaaatacaatggaaagatttatcaataaactggaccaagcagaggacataatttcagagcctgaagactggtct

SEQ ID NO: 124575 - DNA, 665 bp, Homo sapiens
tcttcccaataaacaaacagcaagtatatagccagcaccactggccacagccagctcttacccattggcgccatctactggcttgtaggtcaaaccacatacccaatataaaacctgctgatagaagtgcatatagaggcaaggccaaaagacctacctagcattgctctaaagtcacatcacctaaggaggagggaaagggaaagcataataataataataatgatataggaaagaaaagataaagaaaaaatcctacccacataaaaacagttacaaaaattagaagtgctagcatctccagatgagaagaaccagtacaagaattctggcaccatgaaaaacctgcatgtagtgataccaccaaaggatcacactagmtctctggcaatgctttctaccaaaatgaaaactcagaaatgacaataaagaattcaaagcatggattccaaggaagctcaatgagattcaaggttgaaatcaacaaaaggaaacttctaaatcaattcagcaaatgaaggaagagataaacatcttaaaaagaaatcaatcagaacttctggaattaaaaaaactcacttaaggaatttcaaaatacaatggaaagatttatcaataaactggaccaagcagaggacataatttcagagcctgaagactggtct

SEQ ID NO: 124576 - DNA, 665 bp, Homo sapiens
tcttcccaataaacaaacagcaagtatatagccagcaccactggccacagccagctcttacccattggcgccatctactggcttgtaggtcaaaccacatacccaatataaaacctgctgatagaagtgcatatagaggcaaggccaaaagacctacctagcattgctctaaagtcacatcacctaaggaggagggaaagggaaagcataataataataataatgatataggaaagaaaagataaagaaaaaatcctacccacataaaaacagttacaaaaattagaagtgctagcatctccagatgagaagaaccagtacaagaattctggcaccatgaaaaacctgcatgtagtgataccaccaaaggatcacactagatctctggcaatgctttctaccaaaatgaaaactcagaaatgacaataaagaattcaaagcatggattccarggaagctcaatgagattcaaggttgaaatcaacaaaaggaaacttctaaatcaattcagcaaatgaaggaagagataaacatcttaaaaagaaatcaatcagaacttctggaattaaaaaaactcacttaaggaatttcaaaatacaatggaaagatttatcaataaactggaccaagcagaggacataatttcagagcctgaagactggtct

SEQ ID NO: 124577 - DNA, 615 bp, Homo sapiens
aaagaattcaaagcatggattccaaggaagctcaatgagattcaaggttgaaatcaacaaaaggaaacttctaaatcaattcagcaaatgaaggaagagataaacatcttaaaaagaaatcaatcagaacttcyggaattaaaaaaactcacttaaggaatttcaaaatacaatggaaagatttatcaataaactggaccaagcagaggacataatttcagagcctgaagactggtcttttgaactaatgcagtcagacaaaaataaagaaaaactatttttaaaaagtgaggaacgtctttgagaaataggttatgtgaagtgaccaaacctacaaattactggcattccctagagacaaggagaaaaagaaaacaacctggaaaacatatttgatgcaatcattcaagaaaatttcctgaatcttgctagaaaggtagacatctagatacaataaagccagagaacacctgcgagatactataaaaaagtggacattaccaaggcatataccaaacagtccaaggtcaacgttaaagaaaaaatcctaaggccagatcacatacaaaaggagccctatcaggataacagcagacgtctcagcagaaaccttaa

SEQ ID NO: 124578 - DNA, 578 bp, Homo sapiens
accagacctgtcctagaagaaatgctaaagggagtacttcaatcagaaagacaaggacattagtgagcaataagtaactacctgaaggtataaacctcactggtaatagtaaatacacagaaaaatacagaatgttaygacactgtaactatggtgtataaactactcttattgtaagtagagagacaactatgagccaatcaaaaacattgactataacaacttttcaagacataaatggtataataagatataaatagaaataacagttaaaaagtagtgagactaagttgtagagtttgtattagttttcttattacttgtttgtttatgcaaacttattttataagcttaaaaataatgggttataagatagtatttgcaagcctcatggtaacctcaaaccaaaaaaatacaagggatacacaaaaaataagaaacatgaaactaaattatatcaccagagaaaattaccttcattaatggaagacaggaaggaaagaaggaagagaagactacaaaacaaccagaaaacaattaacaaaatggcaggagtaagtccttgcttatcaataata

SEQ ID NO: 124579 - DNA, 578 bp, Homo sapiens
accagacctgtcctagaagaaatgctaaagggagtacttcaatcagaaagacaaggacattagtgagcaataagtaactacctgaaggtataaacctcactggtaatagtaaatacacagaaaaatacagaatgttacgacactgtaactatggtgtataaactactcttattgtaagtagagagacaactatgagccaatcaaaaacattgactataacaacttttcaagacataaatggtataataagatataaatagaaataacagttaaaaagtagtgagactaagttgtagaktttgtattagttttcttattacttgtttgtttatgcaaacttattttataagcttaaaaataatgggttataagatagtatttgcaagcctcatggtaacctcaaaccaaaaaaatacaagggatacacaaaaaataagaaacatgaaactaaattatatcaccagagaaaattaccttcattaatggaagacaggaaggaaagaaggaagagaagactacaaaacaaccagaaaacaattaacaaaatggcaggagtaagtccttgcttatcaataata

SEQ ID NO: 124580 - DNA, 578 bp, Homo sapiens
accagacctgtcctagaagaaatgctaaagggagtacttcaatcagaaagacaaggacattagtgagcaataagtaactacctgaaggtataaacctcactggtaatagtaaatacacagaaaaatacagaatgttacgacactgtaactatggtgtataaactactcttattgtaagtagagagacaactatgagccaatcaaaaacattgactataacaacttttcaagacataaatggtataataagatataaatagaaataacagttaaaaagtagtgagactaagttgtagagtttgtattagttttcttattacttgtttgtttatgcaaacttattttataagcttaaaaataatgggttataagatagtrtttgcaagcctcatggtaacctcaaaccaaaaaaatacaagggatacacaaaaaataagaaacatgaaactaaattatatcaccagagaaaattaccttcattaatggaagacaggaaggaaagaaggaagagaagactacaaaacaaccagaaaacaattaacaaaatggcaggagtaagtccttgcttatcaataata

SEQ ID NO: 124581 - DNA, 578 bp, Homo sapiens
accagacctgtcctagaagaaatgctaaagggagtacttcaatcagaaagacaaggacattagtgagcaataagtaactacctgaaggtataaacctcactggtaatagtaaatacacagaaaaatacagaatgttacgacactgtaactatggtgtataaactactcttattgtaagtagagagacaactatgagccaatcaaaaacattgactataacaacttttcaagacataaatggtataataagatataaatagaaataacagttaaaaagtagtgagactaagttgtagagtttgtattagttttcttattacttgtttgtttatgcaaacttattttataagcttaaaaataatgggttataagatagtatttgcaagcctcatggtaacctcaaaccaaaaaaatacaagggatacacaaaaaataagaaacatgaaactaaattatatcaccagagaaaattaccttcattaatggaagacaggaaggaaagaaggaagagaagactacaaaacaaccagaaaacaattracaaaatggcaggagtaagtccttgcttatcaataata

SEQ ID NO: 124582 - DNA, 470 bp, Homo sapiens
tgaaaccaatataaaatatgracaaaagtattgtaaaggccaaattttaaaggtatgtaagactgacctactgctataggctacggcagaaatatcctaccatattacttcattacatttcttcatagagatgagagagatatgaagaatctatacatctgaaacaaaaacgaaggatgatattcatttgcaccttacaatttggcagccagaatgatagtaactgtcacatatgtttcatatttaattctaaaaaggagtgagatatttgtgagcataggcattttgaatatcaataaactgaggctcaaaaatgtgaagtaatttgctcatatttaatattttatctgtaaaagcagcaacagaaaaatagaaaagcttcaatatctgagtttttctcacatcatttggattaaacttttaatgatgcctgcagaatacattaaggtgtggtgtagatgtcggtgctt

SEQ ID NO: 124583 - DNA, 516 bp, Homo sapiens
agcaatttatccatttctggctctcaattccctgtttttccttaaatcacattcactttgcattcacagccacgttttctccttgttcttgactgagacacagaataagggtcctttctattatttttccccacattattcactcaaggtatatgtgtagcaagagatgtaccaaggaaagtttatgttgtaccaacaagatactcttaaaatatactagttctgtagaaaaccctgatcttggagtcaagtagaaaccctgcagctgggagtttgtctctggctgtattttcctcagacttcatttatctacccatgttctatttccttctccttgtccctctgttttttctacccctcccctttcctagttcttggtcagctccgtgcttccataaacacattttacctgtttttgcatgattgtgtagctaacctttatttcactctgttcttaaaggttttgttgcastctcaccgtccttaatcgtcaattaggaactccacaactgggaa

SEQ ID NO: 124584 - DNA, 516 bp, Homo sapiens
agcaatttatccatttctggctctcaattccctgtttttccttaaatcacattcactttgcattcacagccacgttttctccttgttcttgactgagacacagaataagggtcctttctattatttttccccacattattcactcaaggtatatgtgtagcaagagatgtaccaaggaaagtttatgttgtaccaacaagatactcttaaaatatactagttctgtagaaaaccctgatcttggagtcaagtagaaaccctgcagctgggagtttgtctctggctgtattttcctcagacttcatttatctacccatgttctatttccttctccttgtccctctgttttttctacccctcccctttcctagttcttggtcagctccgtgcttccataaacacattttacctgtttttgcatgattgtgtagctaacctttatttcactctgttcttaaaggttttgttgcagtctcaccgtccttaatcrtcaattaggaactccacaactgggaa

SEQ ID NO: 124585 - DNA, 437 bp, Homo sapiens
aagtatctattccagtgaggacaaaccactgccctttccatgatagaagagatccaaaataatcaacctgccactaagtaggtggctgaccaccctgaggaaagggtgccatatcaagggctcagtaatggtgttttctgctggcaaattatattagtttgtttccacacagctataaaaaaaatacccgagactggataatttatagagaaaagaggcttaattgactcacagttccacaggactgaggaagcctcagaaaagttacaatcatggtagaaggtgaaacaaacatgtccttcttcacatggtgccaggaaaaagaagtgccgagcacagggggaaaaggcctttattaaaccatcagatctcatgaraatttgctcactatcacaagaacagcatgagggtaactgcctccatgactcaattacctc

SEQ ID NO: 124586 - DNA, 594 bp, Homo sapiens
aactagacttttaccttcgttttccacaatttatatttttgatgtaacaatttacatctttttatattgggtatttttaacaacattataattttagttattgttaaccatctttttttctttttctttttcttttcarcttttattttagattcacatggtacatgtgtaggtttgttaactgggaatattgcatgatgctgaggtttggggtatgaatgattctatcacccaagcactgagcatagtacctaatagttaatttttcaacccttgccccctaccccattcccttctctaattgttcccagtttctattgttgctatctttatgtctatgagttgttcactgttttgacttataaccatactagagttatgtatgatttacacaccattacaacagtattggaatattctggatttgagtatgtatttacctctaccagtaagttttagattttcatatgtgttcataatagtaattatcttctttatgtttcaacttgaagaacttccttaagcatttcttgtagggcaggtccagtggtgatgaattccttaaattttttcttgtctgggaaaaactgtctc

SEQ ID NO: 124587 - DNA, 571 bp, Homo sapiens
gcaggcaatgtaaccatgcggattagagtgatgcagccccaagccaaggaatgccrgcagccacccaaagctggaagaggcaaggaatagattctctcctagagcctccagagggagcagggctctgacaacaccttgattttggcctagtggaactgattgtggacttcaggcattcctaactgtgagaaaataaatgtatgttgctttaagccaccaagtttgtggtaattcgttacagtagccataggaaactaatacagagtacaaaacctgttaaggcattttgggttttggctgactctctgttgccaatgtaggttatacagagtgaacacagaagcctttgatcttcttatttccccattaggtaaaaatctggagtcatttgtcttatctctgtccctttttcagaaaggcagagtgtacaaatctggcagtttttcttgtcagaaatgcttcaaaagcaagacttgggttgggtgggactcaagagggcaaggctgaagtgaaagtgggcagattggatctgggccaattgccaagacctgagagccaaggttcaagcatc

SEQ ID NO: 124588 - DNA, 478 bp, Homo sapiens
aaaactggaagctgataagtactgccaaagaatggagaaaactatcaatgaaaaaactcaggcttgtttttgatttctggacctgtactggttttcagtcatacataaagcccaaaggtatacgggcacttaatagaaaatcagttacacaatatgtgaagtgctagaaaaattggcagaattcttcacaatcctccctaatgtgttcctgaagtttcctagtgagcctactcatgagattgtatttacttgtactttgttgccaggcaagaatcaaggtgttgtatttcaaccagatgtcttgagctgggttttgcaagatagcgtagcaaacagggagacatgtgttttcctttacacagaccttcttaggccatcaccagctgctttcagtctcatgtgtggatctctccacttgtcaratttcctagctcctgaggttttggaaaagccactcttggtttctttaatccatttt

SEQ ID NO: 124589 - DNA, 441 bp, Homo sapiens
ggtgctgtggaagtggggcccacagaactgcttggctccctggaatcaccccccttcctagggacatgtatggatggacttgccagtgatcctgggtctggagtatgcattataaaactcttgggtttctgtgtgtgcctgagtggctgctctgctgagactccacacagctctgtgtattggacccaaggtcctggtggtgtggggtcacaaggtgatctcctgatccatgggttgcatagatcygtgggagaaacgtggtttcctggggcagggtcacacaatcactcacagcttcccttggctgggggtggagggttcctttggctgcatgtcactcccgggtgggccgtcatccctctctacttttcttcattctctgtaggtcaagttgtttgcctagtcagtcccaatgggagaacctggatatttcagttgaag

SEQ ID NO: 124590 - DNA, 563 bp, Homo sapiens
acaccaatgcattagaaagtgtgcgtaatgcccttaaaatgcaacccaattttacagtaaattttaccaaaaataacctgctagtcacaagggatctatttgtagtaataaattctttctttttgctatcttgtaatacaaaaattcttgtggtgttggaggcagtgtatggtctaaatgatctgactttgttcccaaacctggcagtgcatcagtcacctgatgagctttaaagatgcaggtttctgggcctgaaccccagagaatgtcattgaataggactgtggggaggccaggaatgtgtatttttaaaagttccctaggcgattctgacgcacagccaagtttagaatcctaggcatggatgtgtcagtacctatttatctttcccatccctttttttcagcaagctcatacattcagaatcattccaccgaccataacatttgtgctggtaataggtttaatamgtgtttccaaggtgtttctttcattgaaaaacattttaaaaagtaaaggctgtcttgaagtttgaaaaacattttagtaagtgaggatgaagt

SEQ ID NO: 124591 - DNA, 584 bp, Homo sapiens
gatttggtacagctactagaacactgtatgcatttaactaatggtagccatctgtaaactccagtaatacaacagcattaaagttctacctgcttagagagtggtagaccttctatagaaccaagttagcaaatattcaatatcagtacactagaaatatttcagaaaatagattagytatgctcctctaagataagggctctcaaccttttcattataaccatctcacacatgattatctctacagtcttggttgtctgtcattgtcctacacctcgtggaccacactgacacatattcagtgactcacaccataaagtagtagttattattgttacctcatcctccctatcctttgctgctgatactcatcatcaccaagtcaattaattttcattccctaaatgtctctgcaatgtatcctgtctcttttctgtagtttttaaatcttcactgccaccatcttctcctgagctattgtaatagtcttgtaattagtcccttacatacacacacagctccctctgatacattatttacactgtagtgatctttaaaataaacacacatacacaaatgtgtta

SEQ ID NO: 124592 - DNA, 584 bp, Homo sapiens
gatttggtacagctactagaacactgtatgcatttaactaatggtagccatctgtaaactccagtaatacaacagcattaaagttctacctgcttagagagtggtagaccttctatagaaccaagttagcaaatattcaatatcagtacactagaaatatttcagaaaatagattagctatgctcctctaagataagggctctcaaccttttcattataaccatctcacacatgattatctctacagtcttggtygtctgtcattgtcctacacctcgtggaccacactgacacatattcagtgactcacaccataaagtagtagttattattgttacctcatcctccctatcctttgctgctgatactcatcatcaccaagtcaattaattttcattccctaaatgtctctgcaatgtatcctgtctcttttctgtagtttttaaatcttcactgccaccatcttctcctgagctattgtaatagtcttgtaattagtcccttacatacacacacagctccctctgatacattatttacactgtagtgatctttaaaataaacacacatacacaaatgtgtta

SEQ ID NO: 124593 - DNA, 584 bp, Homo sapiens
gatttggtacagctactagaacactgtatgcatttaactaatggtagccatctgtaaactccagtaatacaacagcattaaagttctacctgcttagagagtggtagaccttctatagaaccaagttagcaaatattcaatatcagtacactagaaatatttcagaaaatagattagctatgctcctctaagataagggctctcaaccttttcattataaccatctcacacatgattatctctacagtcttggttgtctgtcattgtcctacacctcrtggaccacactgacacatattcagtgactcacaccataaagtagtagttattattgttacctcatcctccctatcctttgctgctgatactcatcatcaccaagtcaattaattttcattccctaaatgtctctgcaatgtatcctgtctcttttctgtagtttttaaatcttcactgccaccatcttctcctgagctattgtaatagtcttgtaattagtcccttacatacacacacagctccctctgatacattatttacactgtagtgatctttaaaataaacacacatacacaaatgtgtta

SEQ ID NO: 124594 - DNA, 584 bp, Homo sapiens
gatttggtacagctactagaacactgtatgcatttaactaatggtagccatctgtaaactccagtaatacaacagcattaaagttctacctgcttagagagtggtagaccttctatagaaccaagttagcaaatattcaatatcagtacactagaaatatttcagaaaatagattagctatgctcctctaagataagggctctcaaccttttcattataaccatctcacacatgattatctctacagtcttggttgtctgtcattgtcctacacctcgtggaccacactgacacatattcagtgactcacaccataaagtagtagttattattgttacctcatcctccctatcctttgctgctgatactcatcatcaccaagtcaattaattttcattccctaaatgtctctgcaatgtatcctgtctcttttctgtagtttttaaatcttcactgccaccatmttctcctgagctattgtaatagtcttgtaattagtcccttacatacacacacagctccctctgatacattatttacactgtagtgatctttaaaataaacacacatacacaaatgtgtta

SEQ ID NO: 124595 - DNA, 606 bp, Homo sapiens
taaagaaattgattttaattaagatcacacagaagaacagacaaagcaggaacaataaaacccatatctattctcagagcactaaatcttaaccgtactatttttataatatgcttgtgctttaaaacttacaaatggctgccagtggcatctgttgtataatgttatttagttcacaaagataaataaatgcatgcaaaagaatttctagctgcctttcaatcgtttttaaaataatttatttcatttctttaatatgtagtcaccacatgacaagtacaaagcatattattattgactaatatacatttccatgattgataggttagcacttttattttgggcagctttttacataatttaggtatttggggactgtttcctctcaaattccatctcccacctgctctggtatggcaggtcaacaatcmatcttggctcattgctttgttatcttgacacagttcagattgcaaaacatctggagctattgatgacttcatatattgcaaaaccatgtgttttcccctgaggagtatttttcattctgttttaaaatatgaatcacttctgaaaggatggctcactgattatttaacttcaaga

SEQ ID NO: 124596 - DNA, 603 bp, Homo sapiens
cttggcacgtgccctgtgtactatactttaactcccctggtttctttcagtttcccaaactttttttttgcctccagcctttgcrcaagtgatttgctctgggtaagtattctttctttttcttttctttgagacagagtctcactctgtcacccaggctggagaacagtggtgcaatctcagctcactgttcaatctcactcccaggttcaagtgactctcccacctcagccccacaaatagctgggaccacagacccgcaccaccatgcccagctaatttttgtattttttgtagagacaggatttcgtcatgttgcccaggctggtctcaaactcctggactcaggcaatccgccagcctcagtctcccaaattgctgggattacaagcatgagccaccatgcctggccttattcttcctatcagaaaaatcaaataaacagacaaacaaacaaacaaaacctggtttatagtgcagtccagcaggtaataacatcagttccatacagttgtcccaactatagatgtttggaagggaaatgacaatcaacacatgttatactactcttcctttgatcaagcttatatttaaaaagctttt

SEQ ID NO: 124597 - DNA, 603 bp, Homo sapiens
cttggcacgtgccctgtgtactatactttaactcccctggtttctttcagtttcccaaactttttttttgcctccagcctttgcgcaagtgatttgctctgggtaagtattctttctttttcttttctttgagacagagtctcactctgtcacccaggctggagaacagtggtgcaatctcagctcrctgttcaatctcactcccaggttcaagtgactctcccacctcagccccacaaatagctgggaccacagacccgcaccaccatgcccagctaatttttgtattttttgtagagacaggatttcgtcatgttgcccaggctggtctcaaactcctggactcaggcaatccgccagcctcagtctcccaaattgctgggattacaagcatgagccaccatgcctggccttattcttcctatcagaaaaatcaaataaacagacaaacaaacaaacaaaacctggtttatagtgcagtccagcaggtaataacatcagttccatacagttgtcccaactatagatgtttggaagggaaatgacaatcaacacatgttatactactcttcctttgatcaagcttatatttaaaaagctttt

SEQ ID NO: 124598 - DNA, 603 bp, Homo sapiens
cttggcacgtgccctgtgtactatactttaactcccctggtttctttcagtttcccaaactttttttttgcctccagcctttgcgcaagtgatttgctctgggtaagtattctttctttttcttttctttgagacagagtctcactctgtcacccaggctggagaacagtggtgcaatctcagctcactgttcaatctcactcccaggttcaagtgactctcccacctcagccccacaaatagctgggaccacagacccgcaccaccatgcccagctaatttttgtattttttgtagagacaggatttcgtcatgttgcccaggctggtctcaaactcctggactcaggcaatccgccagcctcagtctcccaaattgctgggattacaagcatgagccaccatgcctggccttattcttcctatcagaaaaatcaaataaacagacaaacaaacaaacaaaacctggtytatagtgcagtccagcaggtaataacatcagttccatacagttgtcccaactatagatgtttggaagggaaatgacaatcaacacatgttatactactcttcctttgatcaagcttatatttaaaaagctttt

SEQ ID NO: 124599 - DNA, 595 bp, Homo sapiens
ctcttctactcttggtaaactctccttttatcagtgaaggggaggagcatacatatataacctgcccacccacacctaccactcctcctcaccaaaatcccccaccctctgaatcaaatggtcgtattctgctttgaataaattaattctaatttcctggacatttttagattattcatctacagggatatgtacagggaccatgttgatgttaatttatcactcattttaaccaggatgtctaagracaggtaagactaaatctcatgaaacatttaaaaacagtgaaaccagtaagtaatatattaccaaaatgagttttttcctgagcattatatggtactggaatgagagtttcctaaggaaagggcacgtgctggagaaaagatgaaaaaaaaaaaaaataggcctaggagcaagactatagaagaccacgtgtgtcacccactgagcaagctattagagaccctttagagaattttcaacagaaaaaagatgacaaaaatggccttagaaaccttaggctaacggaatacaacattctaaatctccactaaaatgatgaaaaagatgcaagcagtataacagctttaaa

SEQ ID NO: 124600 - DNA, 595 bp, Homo sapiens
ctcttctactcttggtaaactctccttttatcagtgaaggggaggagcatacatatataacctgcccacccacacctaccactcctcctcaccaaaatcccccaccctctgaatcaaatggtcgtattctgctttgaataaattaattctaatttcctggacatttttagattattcatctacagggatatgtacagggaccatgttgatgttaatttatcactcattttaaccaggatgtctaagaacaggtaagactaaatctcatgaaacatttaaaaacagtgaaaccagtaagtaatatattaccaaaatgagttttttcctgagcattatatggtactggaatgagagtttcctaaggaaagggcacgtgctggagaaaagatgaaaaaaaaaaaaaataggcctaggrgcaagactatagaagaccacgtgtgtcacccactgagcaagctattagagaccctttagagaattttcaacagaaaaaagatgacaaaaatggccttagaaaccttaggctaacggaatacaacattctaaatctccactaaaatgatgaaaaagatgcaagcagtataacagctttaaa

SEQ ID NO: 124601 - DNA, 635 bp, Homo sapiens
ttgtattgtactcacttgatagaaaagtaaattgggactgagagaggtaaatttctcagagttcagttattaagccaggatttgaaatcaggtccatttggctctataaaacatgctttctttctcccactcaccttatttttcaggatttcttgatgataggaccttcctggagtgtgtcaaatgttagcagtagggggaattataaataaaaggatatattatggaagcaacattacaaactatgacagtgggccactaaatggacatctaggcagatggttcctagaaatccagcagcaggaaggaggtcaatatattaaaaggttttataggtcaatatatcaaaaggtttttccgaagattaccataacgtatctccagatatgtagctcttttaggactttgtaactcctccttcaaaaggtaaaatctatggyactatctctgaacctgggttggcctttgtgactgctttgatcacaagagtatggcagaagtggctctgagattagtcaaaagaatggatgcactcttggagcacttgtttttggaatctatccatcatgctgtgagaaagcctaagatgccttggagaggcccatgtacagaggaactgaagccccagcccatac

SEQ ID NO: 124602 - DNA, 592 bp, Homo sapiens
gcaggagtcgaattgcagagaggtaaacaggaaagagaaacacagtgtaaatattaagaagctttctactaaactcacactgacgtcaagaacttccatctgcttacccaaaggttgccatcctgagtttcctgatttctgtaagatcagctcatttgtatctgkttttttttttttaatattacattttttcaagaaagggtgatttgctgttaaaaactttaaaagccaccatcctacattaaccctcctgcagtaaaataggcctacctgctatttcccaaatatttggtacactttcccctatctactttacttatagcctgctttctatgccagcctcagacccattgtctcagaagagaagtaaaacgttgtagccacacactaattcatcctacactgttcagttgattgggaaaaggtctttcagaaacttcgagctgttatcttggagccatcaaagttaccataaatgactatttttctgagcagaatttgaaacaggtaactgacttcatggcatgaccagtccatatgataataccattttctatgatgattcctctggctctcaagtcttaatgttatt

SEQ ID NO: 124603 - DNA, 556 bp, Homo sapiens
gaatataggtaaatggatttttaaaaacagctaccctaatacagtgctagaacctgctgtaatgaaagaagtggcagcagagtaatgcattcgtaaccagaagccatctgtttaggtgtattttgcttttatcatcaatatgtctagatcttagtctttataaaatgcagacaccccacatttacccttaagctgcatgaatgtttaaagatcaggtargttttataatatacctaaattaattgcatgtatgctattcatttttatacattttagctattcaaatattttctcttactaatgcaaggtcaatgattgatacacatgccaaagaaaatataagataggtgccccagacatacacacacacacatacacacacacaagcaattcctttaaattttatcccttcatgagagtaaaacattcaatgggttattttaccctagatgcctgcagctgtgccaggcactatctgtcccaaaagcaatctattgagtctccaggtcccagaccggttaaggcaattccagtttgctctcagactttagggaca

SEQ ID NO: 124604 - DNA, 602 bp, Homo sapiens
tcttaatctattcatctgtcaatagacatttaggttgtttccagctcttgaatactgtgactaatgctgaaatgaacatggagtgtaaatatctcttccacattttgttttcaatcctttcagataaatgttcagaagtgaggttgctggatcatgtggtagtcctacatcaaactaaaaagcttctttctgtgcagcaaagaaaacaatcaacaggatgaaaaggtaacctctgaaaaatatttgcaatataccctatacatgataaggcactaatacccgaaaatataaactactacaactcaatagcaaaataaccaaataacccaattaaaaaatgggcaaagaatttgagtagacatgtctccacaaaagacacacaaatkgctaataggtatatgaaaagatgttcaatattactagtcatcaaaaccacagtgaggtatcttacctcatatctattgggatggtcattatagacaaaccaaccaacaaacaaatctagaaaataatgtgttggcaaggatatggagagataggaacgcttgtgcattgttggtgcgattctaaaatggtatactgtctatggaaaacagtatgga

SEQ ID NO: 124605 - DNA, 602 bp, Homo sapiens
tcttaatctattcatctgtcaatagacatttaggttgtttccagctcttgaatactgtgactaatgctgaaatgaacatggagtgtaaatatctcttccacattttgttttcaatcctttcagataaatgttcagaagtgaggttgctggatcatgtggtagtcctacatcaaactaaaaagcttctttctgtgcagcaaagaaaacaatcaacaggatgaaaaggtaacctctgaaaaatatttgcaatataccctatacatgataaggcactaatacccgaaaatataaactactacaactcaatagcaaaataaccaaataacccaattaaaaaatgggcaaagaatttgagtagacatgtctccacaaaagacacacaaattgctaataggtatatgaaaagatgttcaatattactagtcatcaaaaccacagtgaggtatcttacctcatatctattgggatggtcattatagacaaaccaaccaacaaacaaatctagaaaataatgtgttggcaaggatatggagagataggaacscttgtgcattgttggtgcgattctaaaatggtatactgtctatggaaaacagtatgga

SEQ ID NO: 124606 - DNA, 609 bp, Homo sapiens
tttgtcattgccagtcagtatatcctgttcataatctcttttaactatcccagtctatgataactcttgttatccttccagcttaatccatcctgtaaactcatttccaaaattcactgatcaaaactgaatctaaaattgaacatactacctcattattttcccttaccacccttgtgcacatgtcataactctcctccttattcatcttaaatgtcatgatataacattaaaattacttctctcatacattctcaataccctttctcctttctcgctcctttgaacttgcccagcaaaaaccrttacatggattaaacccaactttatctacttcatggcttcactaagatagatgaacagagctggacaaaaacacaaattgttcattaatatcattttaaatccatgaccataacctcacattggccctcaggtattgggtcagttcactgtgtttgtttccctattaagtcttccgttctccttgatgactatttcaaagttcctcgtttctcgaatcacccaaaccctttgcccttgtctctctccagtcccccatcacatctaccacctcacctatatctctgttcatgtagtcggctttcc

SEQ ID NO: 124607 - DNA, 609 bp, Homo sapiens
tttgtcattgccagtcagtatatcctgttcataatctcttttaactatcccagtctatgataactcttgttatccttccagcttaatccatcctgtaaactcatttccaaaattcactgatcaaaactgaatctaaaattgaacatactacctcattattttcccttaccacccttgtgcacatgtcataactctcctccttattcatcttaaatgtcatgatataacattaaaattacttctctcatacattctcaataccctttctcctttctcgctcctttgaacttgcccagcaaaaaccattacatggattaaacccaactttatctacttcatggcttcactaagatagatgaacagagctggacaaaaacacaaattgttcattaatatcattttaaatccatgaccataacctcacattggccctcaggtattgggtcagttcactgtgtttgtttccctattaagtcttccgttytccttgatgactatttcaaagttcctcgtttctcgaatcacccaaaccctttgcccttgtctctctccagtcccccatcacatctaccacctcacctatatctctgttcatgtagtcggctttcc

SEQ ID NO: 124608 - DNA, 550 bp, Homo sapiens
actcagcatcatgtggtacctacttaggctccagctctgctttgcaagaggtacatgaggcctgcccttgcactgtagagctggggagatgtcaccaaacatgcagttattatgtcattagtgaagtacaatcaatattggagatttgcacaatgtgctatgagtatgagagtgggtactgagtagttcattctcactacaacagttaagaaatgtttcccagagcaattaatatttaaacaaagttttacaggataagtasaactcatacagcatgaatgggtaggggaggtattatatgtaggacataggtattccctatgaatattagaggatttggccctactatgcccaaaattcctacatatggccataattaccagagtgaaatgtcctttcggatagggagtatgttggtctttacctactttatttgcttatatacttaacctcttaagcaactgagtttgagatccctggtctgccaattccagccggggtccatatgaccacaaaacaatcaatggaggtggtcaattatacgcaactc

SEQ ID NO: 124609 - DNA, 550 bp, Homo sapiens
actcagcatcatgtggtacctacttaggctccagctctgctttgcaagaggtacatgaggcctgcccttgcactgtagagctggggagatgtcaccaaacatgcagttattatgtcattagtgaagtacaatcaatattggagatttgcacaatgtgctatgagtatgagagtgggtactgagtagttcattctcactacaacagttaagaaatgtttcccagagcaattaatatttaaacaaagttttacaggataagtacaactcatacagcatgaatgggtaggggaggtattatatgtaggacataggtattccctatgaatattagaggatttggccctactatgcccaaaattcctacatayggccataattaccagagtgaaatgtcctttcggatagggagtatgttggtctttacctactttatttgcttatatacttaacctcttaagcaactgagtttgagatccctggtctgccaattccagccggggtccatatgaccacaaaacaatcaatggaggtggtcaattatacgcaactc

SEQ ID NO: 124610 - DNA, 562 bp, Homo sapiens
ggctataaacccctcctttgggggcaggggagagcttgatgaccctgtgaatgtgtgagactaattaagccttcctaaaaagactccagggaagagtttgctcagagccctcaagtcatagaaagagtccagaaaggctgggggaaagcagagaaaataactaaaggtggaaacgtgtggctaattgaagctagacatctgtttgtggaaatgccttttgtagataatctgaaccaaaatatttttcagggggttcctagtttcaacacarcttgcactaacacaagcctatcagctaacagtgtgatatgtgatatttagtgggaagatagttgccatcctgtgcttctcaaactttagagtgcatcagaatcacctagaggaggggtattacattgtggattccactgccagtgttcctgatgcagtagatgtgggatggggaccaggaatttgcatttctaacaagtccccaggaaactactcattgggatgctgtagcaaatatgcattcctcctcttgctgtttcaggtgctgcagttaacagcacattcctgctaa

SEQ ID NO: 124611 - DNA, 578 bp, Homo sapiens
atgagtgaaaaaataaattctttaatgcttggccactgaaatttgatagactttctattcataggagctactatttgcctaacacatgccttttctctgaataagtaatggcgccatttttggccacatacttcttaatggcttggtttattcattacacaaacatctagcttcttataaagcctaactaagtttcttagtaaatcactatggcttctggaatgtgcgtataggggtaaggatgcagcaaggaggataggccatacagttacatgttttcatgacaaatatctctgaacgctggacacagtgaaatctgaactcatcatctayaagcatgctcttctggtttatttttaatttcaataattagcattacacttataattactcagaccagtttccttctttccctacattttctaatataattagtcagagtccttttgattctatattttcaacattcctcacatctatctcttaccttcttcccatttttactctcactattgtagatctgaccctcattatttcttatctgtattattaccctggccttgtaactcctcagtttc

SEQ ID NO: 124612 - DNA, 578 bp, Homo sapiens
atgagtgaaaaaataaattctttaatgcttggccactgaaatttgatagactttctattcataggagctactatttgcctaacacatgccttttctctgaataagtaatggcgccatttttggccacatacttcttaatggcttggtttattcattacacaaacatctagcttcttataaagcctaactaagtttcttagtaaatcactatggcttctggaatgtgcgtataggggtaaggatgcagcaaggaggataggccatacagttacatgttttcatgacaaatatctctgaacgctggacacagtgaaatctgaactcatcatctacaagcatgctcttctggtttatttttaatttcaataattagcattacacttataattactcagaccagtttccttctttccctacattttctaatataattagtcagagtccttttgattctatattttcaacattcctcacatctatctcttaccttcttcccatttttactytcactattgtagatctgaccctcattatttcttatctgtattattaccctggccttgtaactcctcagtttc

SEQ ID NO: 124613 - DNA, 629 bp, Homo sapiens
gctttccattcttcctccaccttctttctcccttctacaccttgtcttcacatctgacctcatctatatcygtcttcatctgaacactttgtcactatgggaatagatgtgataatcatgcatacatagacaattccatatccaaaagtcatcaactatcttcaagctgacttcatgtacctataactgactgatcattttgaaaagagatttccattgagatcaaccagggtttggggattgctaaaaaccatcccggctggaaataagtgtcagccactacctcattgtatgggctagcaaataagattaggccattattccagttatttgttttggacttcttcctgtttctaatagtgcactagagatgccttttatttgattttttaaaataattatatttagctgggagtggtggctcacacttgtaattccagcactttgggaggccaaggcgggtggatcatgaggtcaagaggtcaagaccagcctgactaacatggtgaaaccccgtctctactaaaaatacaaaaattacctgggcgtggtggcacacacctgtaatcccagctactcaggaggctgaggcaggagaatcacttgaacaagggaggtggttgcagtga

SEQ ID NO: 124614 - DNA, 629 bp, Homo sapiens
gctttccattcttcctccaccttctttctcccttctacaccttgtcttcacatctgacctcatctatatctgtcttcatctgaacactttgtcactatgggaatagatgtgataatcatgcatacatagacaattccatatccaaaagtcatcaactatcttcaagctgacttcatgtacctataactgactgatcattttgaaaagagatttccattgagatcaaccagggtttggggattgctaaaaaccatcccggctggaaataagtgtcagccactacctcattgtatgggctagcaaataagattaggccattattccagttatttgttttggacttcttcctgtttctaatagtgcactagagatgccttttatttgattttttaaaataattatatttagctgggagtggtggctcacacttgtaattccagcactttgggaggccaaggcgggtggatcatgaggtcaagaggtcaagaccagcctgacyaacatggtgaaaccccgtctctactaaaaatacaaaaattacctgggcgtggtggcacacacctgtaatcccagctactcaggaggctgaggcaggagaatcacttgaacaagggaggtggttgcagtga

SEQ ID NO: 124615 - DNA, 500 bp, Homo sapiens
aagagaaaacagataaagaatctaacaaaaatcaggaaaacaagaacaaaagaagtttaaagaagagaaaacattaaaaaaataaattctggagctagaaaatgcaatggctgaattaaaatatgctatagagaactttaacagcagacaatcaagccaaagaattggtgaactcaaatacagctcatttgaaattatccatttgaaggttagaaaagaaaaggagtgaagaaagcctataggatttatgaaacaccatcaagtgaatgcatatatgtattataaaagaargggaaaagttattttcccctttctttgagttatttaaagaaataactcaaaacttcacaaatctggggagagagacaactatccaggctcaaaaaacccacaggacccccatgtaggttaaacataaagagccctacatcaagacacagtataattcaattgtcaaaaatcaaagacaaaaaattttgaaagtagcaagagaaaagcta

SEQ ID NO: 124616 - DNA, 563 bp, Homo sapiens
ggtgaactcaaatacagctcatttgaaattatccatttgaaggttagaaaagaaaaggagtgaagaaagcctataggatttatgaaacaccatcaagtgaatgcatatatgtattataaaagaaagggaaaagttattttcccctttctttgagttatttaaagaaataactcaaaacttcacaaatctggggagagagacaactatccaggctcaaaaaacccacaggacccccatgtaggttaaacataaagagccctacatcaagacacagtataattcaattgtcaaaaatcaaagacaaaaaattttgaaagtagcaagagaaaagctartagtcacatacataggaacacacataagactcttggcagatttctcaacagggaccttgcagactaggagagagtgggattatatattcaaagtactggaaacaaaaatactgtatctttataaaggtattcttttaaaatgatagtcttttttgcttgacaaacatacaaaatattttgtaagatatagtatattttgccaaacaaaagtactatatctttgtaaag

SEQ ID NO: 124617 - DNA, 563 bp, Homo sapiens
agaataatgtagcactgtaatcgtggtgcacaartaacccataaccttaatatgaaaattaaaaaatgaaagtattaagaatagctaaaaccacaaaaatttggtaacagatttataatagagaaaaaagtaaaatctgacttcaagaacaagaacgggggaggagaaagttaaattcagtttttatatgcaattgaacttaagttgttaacaagttaaaatagttggttataactacaagaagatttatacaaacctcatgttaactacatattgaaaacctatagcaagtacacaaaagatagggagaaatgagtcaaaccaaaccactacaaaaaataatcaaagaacaaaagagaaaacaaaaggggaagagaggaataaaagaactgcaacacagtgaaaaaactgcgaacaaaataacaatagtaagtccttacctgtcaataatcactttaatgtaaatgggctaagtcctcaatcaaaagacatatagtggctgaatggattaagaaaaggaaatcaacaagatgcattcatattctgtcatagagactcacttt

SEQ ID NO: 124618 - DNA, 563 bp, Homo sapiens
agaataatgtagcactgtaatcgtggtgcacaagtaacccataaccttaatatgaaaattaaaaaatgaaagtattaagaatagctaaaaccacaaaaatttggtaacagatttataatagagaaaaaagtaaaatctgacttcaagaacaagaacgggggaggagaaagttaaattcagtttttatatgcaattgaacttaagttgttaacaagttaaaatagttggttataactacaagaagatttatacaarcctcatgttaactacatattgaaaacctatagcaagtacacaaaagatagggagaaatgagtcaaaccaaaccactacaaaaaataatcaaagaacaaaagagaaaacaaaaggggaagagaggaataaaagaactgcaacacagtgaaaaaactgcgaacaaaataacaatagtaagtccttacctgtcaataatcactttaatgtaaatgggctaagtcctcaatcaaaagacatatagtggctgaatggattaagaaaaggaaatcaacaagatgcattcatattctgtcatagagactcacttt

SEQ ID NO: 124619 - DNA, 543 bp, Homo sapiens
gtcccttacctttcaccatacacacaaaaaaaccttacatttaagtctttaatccatagtaagactcaaactatgaaaatcctagaagacaaccaaggaaacacctttttggacattggcctagacaaaaaatttgtgactgaaacctcaaaggcaaatgcattaaaaacaataaataatcaaaagtgtaaatgggaaacctacagaattggagaaaatatttgcaagcctatgtatcagacaaatatccagaacctataaagaacttaaacaagaaaaaagcaagtaacaacattaaaaagtgggcaaatgacatgaacaaagacttctcaaaagaaaacatagaagtggtcaggaaacatgaaaaaatgctcgacattgctaattatcagagaaatgcaaattaaaacyccaatgagatagccattctgactgctatgagatgacatcattaacaagtaaaaaaaaaaaatgatgttggtgaggatgcagacaaaagggaatgcttatacactgttggtacaaatgtaaattagtacaaac

SEQ ID NO: 124620 - DNA, 673 bp, Homo sapiens
tacaacagatatcgttcttacagataaaaatatagaaagtggtaaatttaattgaattttgtattttttcaatggtagaaagtagcagaatcaagacagaaaactccaggtaactgactacaaatcttaggtagggtgatatgaaggtagttggatagatagataaacaggtagattgacattcagtagttatattgccctctctcattcttgttatttttctattagtggcccagcatgaatgatagctctaaaaactagagttgttaattactgttgttctataatgctttacttataattaatgtgctaattttttggtttattccctgggcatttttataatgggtgcaattttataaagcaaccgaataactaaatayatgttaaagctgccttctagctagcaggctggttcagacagaattgaatatcatgttcctgagtaacttctatgtgcccaatgacaagaacctaagcaaaggcagactgagattttagtaacttcatttcaagaatcccctaaaggaccattagctatgaagatgacaaaggcagagtaatggccagtggagagcaacacatcggttattctcctgaagaggtcaaatgtgtaaactcataaggcttgaatgttctatcctggatgaataagagccctgtagaatggact

SEQ ID NO: 124621 - DNA, 673 bp, Homo sapiens
tacaacagatatcgttcttacagataaaaatatagaaagtggtaaatttaattgaattttgtattttttcaatggtagaaagtagcagaatcaagacagaaaactccaggtaactgactacaaatcttaggtagggtgatatgaaggtagttggatagatagataaacaggtagattgacattcagtagttatattgccctctctcattcttgttatttttctattagtggcccagcatgaatgatagctctaaaaactagagttgttaattactgttgttctataatgctttacttataattaatgtgctaattttttggtttattccctgggcatttttataatgggtgcaattttataaagcaaccgaataactaaatatatgttaaagctgccttctagctagcaggctggttcagacagaattgaatatcatgttcctgagtaacttctatgtgcccaatgacaagaacctaagcaaaggcagactgagattttagtaacttcatttcaagaatcccctaaaggaccattagctatgaagatgacaaaggcagagtaatggccagtggagagcaacacatcggttattctcctgaagaggtcaaatgtgtaaactcataagrcttgaatgttctatcctggatgaataagagccctgtagaatggact

SEQ ID NO: 124622 - DNA, 536 bp, Homo sapiens
aaaaaaaaaaaaaaaaaaaaaatgaggacctgcacagggtttagcttgaggcatggatttggtgtgtcatcaattgcagagaaggatagaacaattataggaaattaaggaaggaagtaaataattttgtaaagaatgttgctcatatatgatctatgacttgataaaggaaagaatatatatggcatagggtcaaaggggttagacrtccttataagcttacatagcatgtagacaagtctttactcagcagttctcaaaaaatgttgtggtattgatacacaatgaaggcagagcctaagttgagataaactcagatatagtgagtaatagattgggaggacagagcagtagaaaggagaatgtgaaagtggaacgaggtaggatcccagggctcttccaacagaaaatacatcatctcaaagttatcaacttgttgatgaaaagagtcaaaatctgaaaatatttgcagacatttgttctgagccaattatgagtgaccaatggcatgcaatacagcccccagagattctgag

SEQ ID NO: 124623 - DNA, 514 bp, Homo sapiens
tagctttttctgggaaaatgaagagggaaattggaaagattgccttgtacatgcaaatgataataaaagtaactaatacttattgaatgcttatactgtgtctgaaaattacatacagatctttccgctttacaggtgaggaaattataagagaaagttaagaattcttgagctttttttttttaactgggaacatgaagrcaacatttttttttaaaaaaggctaacaagtctaaaattatatggactcttcaaatttacttttgacctttgttcaatgtatatgaatatatttcatagtttttatcagtttgtatgtgctaagtttgtatgtgcttgcttctgtcatttacatctgctgttttgttatatttattattatttaatttatttatttataattgtatttattatatgttggggttacattccccccgccccttaattctgcatttctgagaagcaatagaacaatgacttccatgcacagaggtttctgtttgtctgtctaatg

SEQ ID NO: 124624 - DNA, 529 bp, Homo sapiens
actctcctcacccagcaaagaaaatcaacccatcccttcactctgattggtaaacttaaattacaatctgagccctagaccaaagggaatgacaacatattttttgtcatatgtcaaacatatgacaatatgtttgatcaacatattttctacaaatggacaaggcataaacatctgaaaaattggtgytcttgaaagaaaagaacaatgataaatgtcggaaaaatcaacattaattaagcaatcaggagtgctcactaagcacataggggaattcagttctatttgttagatgaatgctcattgaatactgcttgctctcaacttgtaaatatttaagggctttgtggaaatttctcaaacaaataatactgatattatataacagcatatttcaaaattatctctgattttcttatatgtccatttattttaatattcttttgaaaccatcataggttattttaatactgtgttacctctttctgattacttttatatagaatacaccacatcacatcttcaaatt

SEQ ID NO: 124625 - DNA, 548 bp, Homo sapiens
ccacaggatgctcattgctgccccatcatacactgcaacatccaaaccctacagtggtccttaccctggaaatacttttaatggatctttgtgaaagaaaaacaccacattttcttcatgcttaactaacaaataaatagaatgcctaggaaaattagttcaaaagtgactgctatttagcagcccacatctggttagcaaattcacattggtttctactgcaaagtaaactgtatcttcttgtcaatgtattaactcaaatttgcaaaatgagaaaaacaattaaggaattaataagaaaacatgtttttatttggcatgctcccaatttgatcaatgtcactgagattatataaacggtaactgtttcagttaacattttgttttttattatctgatagagatatgcaaattattacagattttastcctttacgacctccagcaactccttgtgctgactgtgattcagtttctttctaaaatttgttgctgaaggtatttttaacatgagaggaggactcattcttaaatatagggcagttctt

SEQ ID NO: 124626 - DNA, 522 bp, Homo sapiens
aatgtgctaatcctcagaaatgaatcttccagttcatttggcagttgtatttctaaaggtaaataatcaaaaccagtgtctagggccataatctgcatgawgaaccagtcttttttggctcactttgccctggataaaatgacaaaatatagtttcttgacctactagaacttgattgctgctgtgattctcttatgaaaatattgtcagcatttagacattaggaatctcttgctaatttagcagcaggttcctgtctatgaagtaaaaaatgaatcctgtttagaaaagaatcttgaaaatgatgtctcagtttctaacagaaaggtaaaaaattttataagagtgatgaacactgaaaagataatgtctgaaaacagttttctccttatgttaggtttggaaaatgtggtcttgaaatttggtgaaaatacaactcacagagaattctaaaagactatccctcagactgattggtctgcaatttgggatttatgaaaaatgtttgctctttttaaagat

SEQ ID NO: 124627 - DNA, 522 bp, Homo sapiens
aatgtgctaatcctcagaaatgaatcttccagttcatttggcagttgtatttctaaaggtaaataatcaaaaccagtgtctagggccataatctgcatgatgaaccrgtcttttttggctcactttgccctggataaaatgacaaaatatagtttcttgacctactagaacttgattgctgctgtgattctcttatgaaaatattgtcagcatttagacattaggaatctcttgctaatttagcagcaggttcctgtctatgaagtaaaaaatgaatcctgtttagaaaagaatcttgaaaatgatgtctcagtttctaacagaaaggtaaaaaattttataagagtgatgaacactgaaaagataatgtctgaaaacagttttctccttatgttaggtttggaaaatgtggtcttgaaatttggtgaaaatacaactcacagagaattctaaaagactatccctcagactgattggtctgcaatttgggatttatgaaaaatgtttgctctttttaaagat

SEQ ID NO: 124628 - DNA, 558 bp, Homo sapiens
tacggggcacagtgtgatgttgtgatctatgcataaattgtagaaagattcaatcaagctaaggaacatatgcaatgycttaatgaggctttggcaatgtcagtcatacattagtatataatcctaacgtcgcaatctgagagctacctctcccccgtgtctgtgctggttctccctctgcagccactttgccaatcacatttcaaatgcagaacccaggcctgcctgtctcagggcagaccatgaaacagagacactggctgccagggtcacttttgattgcagggccagctgccctcccatctgcttgtcaggctggagaaaaggctgagaattgaaaatgtgaaaataatgcagccccagtgtaaaaaaaaatccagatttttcaattgccattctgcgagtaaaacctaggaattaacctgtggcctttttgttttattgtttcataaatgagtaatagctagagggaggtatcccttagaccatttcaggcccaattgctacagagaagaaaatgatactatgaagtcacataaggatgaaacattttagaag

SEQ ID NO: 124629 - DNA, 558 bp, Homo sapiens
tacggggcacagtgtgatgttgtgatctatgcataaattgtagaaagattcaatcaagctaaggaacatatgcaatgtcttaatgaggctttggcaatgtcagtcatacattagtatataatcctaacgtcgcaatctgagagctacctctcccccgtgtctgtgctggttctccctctgcagccactttgccaatcacatttcaaatgcagaacccaggcctgcctgtctcagggcagaccatgaaacagagacactggctgccagggtcacttttgattgcagggccagctgccctcccatctgcytgtcaggctggagaaaaggctgagaattgaaaatgtgaaaataatgcagccccagtgtaaaaaaaaatccagatttttcaattgccattctgcgagtaaaacctaggaattaacctgtggcctttttgttttattgtttcataaatgagtaatagctagagggaggtatcccttagaccatttcaggcccaattgctacagagaagaaaatgatactatgaagtcacataaggatgaaacattttagaag

SEQ ID NO: 124630 - DNA, 558 bp, Homo sapiens
tacggggcacagtgtgatgttgtgatctatgcataaattgtagaaagattcaatcaagctaaggaacatatgcaatgtcttaatgaggctttggcaatgtcagtcatacattagtatataatcctaacgtcgcaatctgagagctacctctcccccgtgtctgtgctggttctccctctgcagccactttgccaatcacatttcaaatgcagaacccaggcctgcctgtctcagggcagaccatgaaacagagacactggctgccagggtcacttttgattgcagggccagctgccctcccatctgcttgtcaggctggagaaaaggctgagaattgaaaatgtgaaaataatgcagccccagtgtaaaaaaaaatccagatttttcaattgccattctgcgastaaaacctaggaattaacctgtggcctttttgttttattgtttcataaatgagtaatagctagagggaggtatcccttagaccatttcaggcccaattgctacagagaagaaaatgatactatgaagtcacataaggatgaaacattttagaag

SEQ ID NO: 124631 - DNA, 566 bp, Homo sapiens
tgtgtcaagattgcacagcaatcagtatgcagcctattgatttatgtgaagactctcatcttgccaagcaaagagaaataaagtacaattagcttactttgtgatcctgctgtttacaaagaagatcaaacaaaagacacctacaaacagccacttagatctggaatacaaagcacgatgcttctatttagttcctgattcttaccatgtctgccatatggtagcaagttggcataacctaaataccagagaatcttgttttgaatttctacaaccatatctgggtttctcagtattggtgtccagcccatcaacagatggygcccagcattttacccattaaacaccatgatctccataaccatttaataatgagattggaccagataagatcaaggaatagattaatattctgcacagattctgccagcttttcaactgcaaagtgaatttatggattgaatcctctgaaattatcccataaaagcagaacaatattctttagtcagttcacaaaacagtgtttggaggaaaatggcagcattgcagccatatggacacttgca

SEQ ID NO: 124632 - DNA, 566 bp, Homo sapiens
tgtgtcaagattgcacagcaatcagtatgcagcctattgatttatgtgaagactctcatcttgccaagcaaagagaaataaagtacaattagcttactttgtgatcctgctgtttacaaagaagatcaaacaaaagacacctacaaacagccacttagatctggaatacaaagcacgatgcttctatttagttcctgattcttaccatgtctgccatatggtagcaagttggcataacctaaataccagagaatcttgttttgaatttctacaaccatatctgggtttctcagtattggtgtccagcccatcaacagatggtgcccagcattttacccattaaacaccatgatctccataaccatttaataatgagattggaccagataagatcaaggaatrgattaatattctgcacagattctgccagcttttcaactgcaaagtgaatttatggattgaatcctctgaaattatcccataaaagcagaacaatattctttagtcagttcacaaaacagtgtttggaggaaaatggcagcattgcagccatatggacacttgca

SEQ ID NO: 124633 - DNA, 547 bp, Homo sapiens
tatactgacaaagtagattagtggctactgggggctgggcagagggaggaattgggagagactatcagtgtgtacagggtttctttttggtgattaaaatgttctaaaattagatagtgatgatggttgtgwgactctgaatgtatatgctaaaaaacactgaattatacaactagggtgaattctatggtaaatgaattacatctcagaaaagctgttattaaaaagtcaatagagaaacattatataaggctagaaggcaaagagaactattttgggccacagctggaataaactggcttttagaattgaaatgccttacctaccctgatgcccacacttgcaacctgaggggacaggagggtttctaatgattcctctttcataagtaggaaattagtcatttgctgcttgagtttaatacataaaacactacattttatgactgattcaggctcagactttttatcatgaacactcatcatcaccactatcaacttcttgaagcattaagcgccctttggccttctacctatgacaccaagct

SEQ ID NO: 124634 - DNA, 587 bp, Homo sapiens
tttaaaaaaatttcatggttaagaatcaataaaacaacaaaactagacccacaaagatattgccacaaaatttatcaacaatgaaatacaaaataaatatacttaacatgtttagaggaataaaagaggcattaaaagtatgatgaaattagaaacaatgaaaagctacctaacagatttgaaaaagagccacataagacttgtagaaatgaataatataactaaaattagaaagtcawtagatgcgctttagagcagattagacaaaattaaagagaaaatgagacgctagaaggtagatataaagaaatgacaagaatgaggatcacagatagaaaaccatgaacagtgaaaacacgtggaaggtaagatagtacaagatacgtctaactggaattctagaaggcagactataggaagattggggtagaggcaaaattgttgggaggcactaatcctcaaaatcaggaagcctaatgagtcacaaatagaggatacctaaatgagaaaatcacacctgacatatcttaaggaaaatgccaaacactcaaagcaaaaaccttaaaagtagtaaaggaaaaaagata

SEQ ID NO: 124635 - DNA, 557 bp, Homo sapiens
tgtgggagaagggtgaggattgctgattacctgggtgacaaaattatctgtacatcaaacccctgtgacatgcaattaccagtgtaacaaacctgcctgtttacctctggaacctacaaataaaagttggaaagttaaaaaaaaaaaaagccacagtgtgagttctccaagggcagaagtggggtctgtccatttcatcaagagacttggagtctcaacccttggctactattcctaccgatgccagcagggacttcctgagagtcccccagggtgcttccttgtctctcagaggcacaccagtaaggaaataaggataaataatactggtaaaggaggcatgctggagaagagggtacaaaggcaggacagcccactcggaaagcaagcaaggagcattgctctttatgactcaaaaaaawaaaaataaaaaatcgtgctcctgctgccttctttcctaagctagactctacctatttctagttcagaatttcaacataaaataaagcttaaaatactggaaaagaggagccatgtgccttgagcctcaaacatag

SEQ ID NO: 124636 - DNA, 346 bp, Homo sapiens
acatatgtctactgcagtagacatatgtatagttatgtatatattcttatactgtctttaactatatgcatatatatgtgaaggacatttatcaaaatgttaagtgtaactatttctgaagagtaagtcttccaggtagtttttgtttctttccttttgtatgttttcattttctatgctagccatgctttactttgataataagtaaarcagttattaaatgggaaaaatccaagagatttaacaggttacttaacagaaataagagaattcacaaggattacccggcacaaactagttttctcatataatagtaaccaggttaaaatataaaatgagaaaatta

SEQ ID NO: 124637 - DNA, 562 bp, Homo sapiens
ataccaccacaatcaggaagtaggatagttctatctttctccaaaacaagcccactgctactccccactgcctcccagacagcattggctgtatttttacatatgacaaaatgaggtggggaggtttctgtgttgcccaaggtcattcagtgacagattyggaattagaacgtttgaatgtgtctgctagtccagctacctggaaaggtagattcctcagtctacagagcccaagaggcagcagtggcttggggcacacatggggcagagggaggaagccccttgctctaagctggagcctcagaaatccccacatctcccactccacgcagggctacttaaccaaacacccactccttgggcagctaaggaacaaaggtggctgtattctgcaaggcctaaatccacaagtaaagttgagtggcagggcagctgcgccatctaggagcttagggtccagtccagaccacagtgcccagtgccctggcacgactccactggccagtctggttaatgagttactatcctagttaatttccctgcacatcggggccagaccccg

SEQ ID NO: 124638 - DNA, 580 bp, Homo sapiens
agttgcctttcatctttaccaatggctgaaagtcatcattatctaacagatgctcggtggcccttgtgaaatgaattggtcatcccaatcaactattaatgggcaggcaactgtaacaggcaaatcataactattacaactaattaaactcgagttttgtatttacacagacagaacaaagtgaaactgagatatagctatcaattttgtgaggaaataacaatacttcaaaatgaattaaaggttgttattctgagatagcgtctgagtcaactcccctttcaattcctccaacaatttctttttgagttctgrccatgcaagtagactagaaaatttaaaaatataaaaaatagcttcttttaataaacttacaatccagaagacagaataagcaaaatatttacacaataattaccatgatagacatgatagaagtacaggcatacctcattttattgcacttcatagatattctgctttttacaaggttaagctttgtgccaatcctgtgtcaagcaagtctgttggtgtcatttttccaacagcatgtgctcacttcatgtctctgtgccatatt

SEQ ID NO: 124639 - DNA, 580 bp, Homo sapiens
agttgcctttcatctttaccaatggctgaaagtcatcattatctaacagatgctcggtggcccttgtgaaatgaattggtcatcccaatcaactattaatgggcaggcaactgtaacaggcaaatcataactattacaactaattaaactcgagttttgtatttacacagacagaacaaagtgaaactgagatatagctatcaattttgtgaggaaataacaatacttcaaaatgaattaaaggttgttattctgagatagcgtctgagtcaactcccctttcaattcctccaacaatttctttttgagttctgaccatgcaagtagactagaaaatttaaaaatataaaaaatagcttcttttaataaacttacaatcyagaagacagaataagcaaaatatttacacaataattaccatgatagacatgatagaagtacaggcatacctcattttattgcacttcatagatattctgctttttacaaggttaagctttgtgccaatcctgtgtcaagcaagtctgttggtgtcatttttccaacagcatgtgctcacttcatgtctctgtgccatatt

SEQ ID NO: 124640 - DNA, 627 bp, Homo sapiens
agggttttgtatgacaaaagtcttctttgtttggtcttgttttctttggtcatgattagctaagtttggcttaatctaaaagttataggaagctatgtagcatttttaacaggaaagtggcatgattccatatagcagcagtatacaattcaggtctcagagggagaatctggaaactggaggaccaactatgggtctatgatgacagctccaaaaagaagtggcaaagtcttctctcayagggaaacatcaaggaagtcaatcaataaatagccatgtctgattctgagttaaaaggtaacattaaccaaaatactttattttcataaaactatcaagtatcaagggattagagatactgtaatttttatgatttctaacatttcttttcccactgttaggagtctagtggaaagttcactttcccaggacataacagcctctctaggaacatgaatctactttgatgtgagacactaaatttttcagccaaccatgatgtctatgagagacaagcaaggtacagttcaaagaggtcaaagggcaaaactcaccaagacaagcctcttcatgtcagagaacaggctcagatttcattaaaaaaatccaaatctttgatagccataa

SEQ ID NO: 124641 - DNA, 627 bp, Homo sapiens
agggttttgtatgacaaaagtcttctttgtttggtcttgttttctttggtcatgattagctaagtttggcttaatctaaaagttataggaagctatgtagcatttttaacaggaaagtggcatgattccatatagcagcagtatacaattcaggtctcagagggagaatctggaaactggaggaccaactatgggtctatgatgacagctccaaaaagaagtggcaaagtcttctctcatagggaaacatcaaggaagtcaatcaataaatagccatgtctgattctgagttaaaaggtaacattaaccaaaatacyttattttcataaaactatcaagtatcaagggattagagatactgtaatttttatgatttctaacatttcttttcccactgttaggagtctagtggaaagttcactttcccaggacataacagcctctctaggaacatgaatctactttgatgtgagacactaaatttttcagccaaccatgatgtctatgagagacaagcaaggtacagttcaaagaggtcaaagggcaaaactcaccaagacaagcctcttcatgtcagagaacaggctcagatttcattaaaaaaatccaaatctttgatagccataa

SEQ ID NO: 124642 - DNA, 523 bp, Homo sapiens
gctgtgaatacagcaatctgtccatatgcataatgaaactatgttcctgcctgctttgaggctttgatctccttggcttgatatctgagatatccttccatattttatgctcctacatgaaatctctctaaattcccaagactcagtrtaaaaaaaaaacaaaaaaaaaagcaaaaaacacttattattgaagaattatttcccccagattgaattattcatgctcacctatgtttcttagcacattgagcatatttctatgttattattattaatttccttgagagtgggaaagtaaacacctttggtcatgtctgcactaatgctttgcaacagggcttgacactaagtaaaaagcacagaaaatacttgttgaacatttttgaattgaatcagattaaagtgaattgacctgattaaggtttatagaattgcctgggatgagttggcctccaaagagctgttttccttttttttaaacaaataaattcagacttaattacagcaattaatttcattttaa

SEQ ID NO: 124643 - DNA, 547 bp, Homo sapiens
tatcagctcaggtgttttcatttggcagtttcttattagtcatatacttagccataaatcaatgggaaatactactttaggagggaaaatggcatcaatatctcacatatatactcagcagccagttgacagatgtggtaatttcatcactatttactgtaaattcttctgcaacagacaaaataaatttgttttctccattcggtataatttagttttataagaatgtagtcttatgaaatatcaaagaatactttatggctaaaggtacaaggaaagtaaacttttcctcatttgggtgtattaactctcatgcaacaaagtaaagaacagacaagagtttataatcaagaaaagagtgaaagagagaaatattcaggttcatgaattrtaccaaactgttgattaagaagaaaaaacctcacctattatgcctttccattatatgataaaatatgatgtagtacaatgaaaataatcttgctgaccagaaagcctaggtttggagagtggctctaccatttgctacttagaaggccttgggaaa

SEQ ID NO: 124644 - DNA, 627 bp, Homo sapiens
agtggctctaccatttgctacttagaaggccttgggaaagtcatatcacttcaatgggattaagtttcattatttgcaaaatattaaagtatctatattttaaagaaatttgttttatgttttgaagatattataaagcttaaatgattacctatccccacaacctgacacataattggctctctataaaacatgtaaatatgaatattacacatttaacctttcatgattttatttcacttcttccttttgatttaagtaactcacctcactgcctatgcacttaaggttaataaatactggaaacaaattggaccctaattatgttcrtgtcatctctgattattttttcctaagaggtctctagtgaaatagtcacttatttctgtcaattagcttagatcttaaacatataatgtttattatttatgtacacacttttgtaaactttggcaattatttagactcacaaaatgacatttcataatggaaggcataaatattcatttaagcaaaacaatagtaacttaataaatattctaatagctgccaccattaatggatattagccaagatattgagctataatagataatatatctgaggacgaagaagaggagataagga

SEQ ID NO: 124645 - DNA, 627 bp, Homo sapiens
agtggctctaccatttgctacttagaaggccttgggaaagtcatatcacttcaatgggattaagtttcattatttgcaaaatattaaagtatctatattttaaagaaatttgttttatgttttgaagatattataaagcttaaatgattacctatccccacaacctgacacataattggctctctataaaacatgtaaatatgaatattacacatttaacctttcatgattttatttcacttcttccttttgatttaagtaactcacctcactgcctatgcacttaaggttaataaatactggaaacaaattggaccctaattatgttcatgtcatctctgattattttttcctaagaggtctctagtgaaatagtcacttatttctgtcaattagcttagatcttaaacatataatgtttattattyatgtacacacttttgtaaactttggcaattatttagactcacaaaatgacatttcataatggaaggcataaatattcatttaagcaaaacaatagtaacttaataaatattctaatagctgccaccattaatggatattagccaagatattgagctataatagataatatatctgaggacgaagaagaggagataagga

SEQ ID NO: 124646 - DNA, 595 bp, Homo sapiens
tatgccaatagatcattgtctaaaatctcgacatatgctgtttttcaaataataaaagtgcattaattattttgtgatgcgttataacattttctgctatctttttttatgacacaaatctaattagtacatattcttgagacatctaaagtaagaaactttattaaacattttcaaacttcttcctgagctagtagaagagcaagccaartgaatttcaagtgacattaaaaataatcacagcaaaaggcttgagaaaaggaatgacatagtcagctttaaatatgtatattcctatcacatgctaatcatacttgcaaaaattgtagaattgcttatttggtatcattacttgcttgaactacttactacattcttgaaggtaattagtcctcagtaaccacacttccatgtattcttctttaaatagaatacctttgtatctaaagttagatatagagaagttaccttctttaaatagatgcctttatatctagagttagaacttaaagagaaatatctccataacagccaaaaaacccagatgtagcgtattactgtactctactatgttcatatttttttatttttcaac

SEQ ID NO: 124647 - DNA, 536 bp, Homo sapiens
gggagcacaatcattagaaatttatcttgtgagtagaaaattcatggcaaagcctgcctaaaggcaaagtgaattaggtgggatgaacctaaagagatattttggggctcctcttttaatattctaatttaagcataataataatacgcttcttgtaatgctctgtgactttgaatagaatgggaggcaggtttgccmtaagcaatatccagctcgagttttccttagtgattttggaggtccaagatattttcctttcacaggtcaatgaataagaaaaggagcaaatacattaaaaagctgacctaccgtatgcggctgacttctcataattttgtgaatcctaaaaggtattctttcttactttgttctcagcttcctttcatctgagaaagttcttaaatacctagtatccaagaatcttatctacccttctcaactcctagatgaaggggggatcttaaaagtttcttcctcaccattccttgaagggggttctatagacatatggagttaccctggctggatgaagccac

SEQ ID NO: 124648 - DNA, 603 bp, Homo sapiens
aaaggagaaggcttcccaaaggaaatggcacccagactgagtctcaaagcatgaatgaaaattgatcagccttagaagaggagaagagtatcccaggctaacaggaaatctcatgagagaagacatagaagcatgaatcactaatgtgttttgaagcaattgcaaggagttctgagagagtgaggggttagaggaaatcggcatgagccagattatatggtgcttttatgcttctgcttggattttactctgcaggattttactcttaaggagcttttcaagagttttagggagggaacaaactatatttgggttttatrctagtagttgtgtgaagggtaagttgcaggggactagagtagaaacagaaatcagtttgtaagtttgttacaataacccccataaaaatcctaagtactggaactaagggagataagcaaataaaaagcctggtgaagagattaggagagaaaatagataaaagttcacaccaattgtcatagggtgtaattgtactatatccttcaatgactcagtattagactcttcaatacttcactagactttctggatgcaatgactgtaatggtaggaattttgaat

SEQ ID NO: 124649 - DNA, 603 bp, Homo sapiens
attttactcttaaggagcttttcaagagttttagggagggaacaaactatatttgggttttatgctagtagttgtgtgaagggtaagttgcaggggactagagtagaaacagaaatcagtttgtaagtttgttacaataacccccataaaaatcctaagtactggaactaagggagataagcaaataaaaagsctggtgaagagattaggagagaaaatagataaaagttcacaccaattgtcatagggtgtaattgtactatatccttcaatgactcagtattagactcttcaatacttcactagactttctggatgcaatgactgtaatggtaggaattttgaatatgtcagaagcaacctgtgagttataaggattctgaaaacacctcagccacacttcagtgacactagcctttcccacagaggtgcaagcttgaactaaaaaacctaaagctaccaattttcttccttattttcttcagcatgttgttgttgttgttttgatacaaagcttgtttcagattgcctttacttttatctttatttttgtcttattttactaaatgatttaactttaatttattatcttaaagacgactg

SEQ ID NO: 124650 - DNA, 579 bp, Homo sapiens
ttcacttattatcttggtagatggcatctatattcacttaattatctaagccagaaacctgggaaccatctaagaatgttcgtttcttacctttctcattggaaaagtacctcaataatagcaataggtaaaaaaagaaaaatctgcaatccttgtcctcctttttagcaataccaccacgaagaagaagaattaaaccaccactgcaaatgacgagctctgcagagaaacytagtgtttctcaaacatcagaaaatagagtggataatgctgcatcactgaaatctagatcatcagaaggaagacatagaagagataatatagacaaagtaactttaccttgaaagtattttaaaaatattttttcaagtaattgtggaaatatgtattgagctaactccttttgcaagctgcaagtgtctcattttgtttaaagcattaccttttttcccctaaatatttattgcccttgaaagtagggtccttctggcatatgactcatttactgtgcttacaataaaagttatgaatattaattcactataacttgatttacacatttgggagcataaatgaacc

SEQ ID NO: 124651 - DNA, 586 bp, Homo sapiens
ctacttccaaagttgcttccacttttttgggtatcttttcagcaacaccccattctgctggtaccagtttactgtattagtycatttcatggtgctgataaagacatacctgagactaggaagaaaaagaggtttaatggacttacaggtccacgtggccggggaggcctcacaatcatggtggaaggtgaaaggcacgtctcacatggcagcagacaagagaaagaatgacagtcaagcgaaacatgtttgcccttatcaaactattagatcttgtgagacttattcactatcatgagaacagtatgggggaaactgctcccatgattcagttatctcccactcacatgtgggaattatgggagtacaattcaagatgagatttgggtggggacacagagccaaactgtatcaggctttatggtggagatgaagcttaaagagttatctggaggaggaccggttgctggccaaggtgactaatgtgggagttgggaaaggaaatttaatttcagtatttactgccatcaatcaatatttacagaattattggcatatcttcatttttaatgcatagctgtaactg

SEQ ID NO: 124652 - DNA, 586 bp, Homo sapiens
ctacttccaaagttgcttccacttttttgggtatcttttcagcaacaccccattctgctggtaccagtttactgtattagtccatttcatggtgctgataaagacatacctgagactaggaagaaaaagaggtttaatggacttacaggtccacgtggccggggaggcctcacaatcatggtggaaggtgaaaggcacgtctcacatggcagcagacaagagaaagaatgacagtcaagcgaaacatgtttgcccttatcaaactattagatcttgtgagacttattcactatcatgagaacagtatgggggaaactgctcccatgattcagttatctcccactcacatgtgggaattatgggagtacaattcaagatgagatttgggtgsggacacagagccaaactgtatcaggctttatggtggagatgaagcttaaagagttatctggaggaggaccggttgctggccaaggtgactaatgtgggagttgggaaaggaaatttaatttcagtatttactgccatcaatcaatatttacagaattattggcatatcttcatttttaatgcatagctgtaactg

SEQ ID NO: 124653 - DNA, 495 bp, Homo sapiens
gaattcccttgaaactaatgaacaaatacaaaacaaaaaaatagaagttaaaaaaataaaaatagaaattatataactaaaatttaaaatgaccaaaataagccaacttgctaaatgggctaaaatatagagtggagatgacaaaatatagaaacaacaaactcaaagacagatgaatatagtttactcaatctgaagaacagagaaaaatggactgaccattgggacccagggagcaacagggtaataagttctcctggttttctttctgcctcataaatcccagacttggaagtgaagaagtcagcaacctagaaatgccaacaagaacagacagaaaaaaaaaaaaaaaagccctagcaaaatcctgctctcttgagccaaaggaccaaaaaaggagcaacccagcatgagaraaaacttttcgataatatccgctttagtcaaacactacagaaaaaaaacctgtggccccaccccattcacacaaacaac

SEQ ID NO: 124654 - DNA, 539 bp, Homo sapiens
catgttttacaaatattttctcccagtctgtggcttgtctcttgattcacttcacagtatctttctcagaaatttttaattttaatgaagttcaacttatcagttttttttctttcacagattgtgcttttggtgtyctatctaaaaatttattgccaagcccaaggtcatctagatttctcctatgttatcttataagagttttatggttttgtgctttgcatttggatctatgatccattttgagttaatttttgtcaaagttgtctagatttttttgtataaatgtccagttatcccagcaccatttgttgaaaaaaaaactatcccttctccattaggttgcctttgctcctttgtcaaaaatttattgactgtatttgtgtgggtctatttctgttccattaatttgtggtatttcacaaataccactgtcttgattactgtagctttatagtaagtattgaatcaagtagtgtcattcttcaactttgttgttattcttcaatattgtgttggctgttctgagtcttttgcct

SEQ ID NO: 124655 - DNA, 632 bp, Homo sapiens
tgtttctttccttgtgctaattttgggtttggtttgttcttgcttttctagctccttgaggtacatcactaggttgtttatatttaaaatgtttcccttttttgacataggcatttattgttataaacttctgtcatagcactgcttttgttgtatctcataggttttggtatgtttccattttcatttgtttctagaaattttaatatttccttcttaatttcctcattgacccagtggtcactcaggagcatrttagttaatttccacgtatttgtatgatttccaaagtttctcttgttattgatttctagttttattccattgtggtctgagatgatacttgatataattttgatttttaaattttgttgagacttgttttgtggcccaagatatggtctgttttggagaatgtcccacatgctgatgaaaagcaaatgtattctgcagttgtaggataaaatgtcttgtaaatgtccgttaggtccatttggtctaaagtgcagtttagatccaaaggttttttgttgattttctgtctaaatgatctgttgctgagagtagggtgttgatatcccccactatgattatattggagtctatctttccattttgatctaataataatt

SEQ ID NO: 124656 - DNA, 616 bp, Homo sapiens
cagcctgggtgacaagagcgaaactccatctcaaaaaaagatgctatattctcatcacattcaaagtgattcattttgccaccaaagtcacatagattcagagaaagttcaagagagtgctgtcatgagatgggttttggaagataagaagttctcaaagaaacacagagggaagtagattttaggtaaaggtaaacagcaccacctgaggtatggaggcttgaatgcatgccaaggacctgaaaaggaggtggtctcagccctgtgtataatcagagcccacccctgtgtagtctgacacggtagaggaagagaccagagctgtaggaagatactaggggcccaatcatgaagattgtcccagcctcacaaaggaaattttatttwtttggcaatgggaaacccagaaggagacttcttgctatagttaaccacttctgacctgtggagaaggagagaaacaaaaatacatccttgctggtggctatgacgtttgctgtctctgagactgtgaatgttccagatgagatcttcaaacgagtgaagactaaaatgtctcagcgcactcgtggcagatgtagtctgctctggtgcctctggtccaatctggtccctt

SEQ ID NO: 124657 - DNA, 560 bp, Homo sapiens
  misc_feature (1)...(560): n = A,T,C or G
gaaaaggaggtacagtatgtttcataaagccagcatcatgctggatttgcaatatctaccaagcccccctgctaattgttctactttccttatctcttttacgcctcacaacaacctgatgagctaagttcaattgctctcatctacagagcaggaaacagacaatgagagtttaggtctctgcctggccaggtcacgagaatgcttgatcatcaagctggcttgcaggctttgagctccagkggcctaggtccagagctggagtttgggactgccacactatccccacctctctccattgggatttcttcggcacgtatttggattctgttggagctcagagagattgcacagcctgtacacacttagatcaacttgtcagtggcagggctcgctcacaacagatctttttcatccctcctccctcgactcatgaggctgacagagtggtatattggatttccaaaggcatctttcagtagaaaaaaatattttcttttgatcaccctctctcttcccaaagttgcaaaggtgggagatcaagttgccaactggattnc

SEQ ID NO: 124658 - DNA, 584 bp, Homo sapiens
caacctagatcccttgcgtactcagttcacaatagtgttcccactcctgtgagaatctaatgccgctgctgatgtgagaggcagcagagctcaggcagtaatgctggcttgccctatgctcaccccctgctgttgggcctgatacctaacaggccatggactggtccgcggcccaggagttgggaacccctgatctagaatctttctagatgctggaattctggatgaaacaatcttaatcacctcctctaccgatgtcttctcacagtccaaagacttcctcaagatttttgcgatgttcaaaagatcttggtttcacgacaaaacaaaaggattcttctttttattagcaaacatgtataaaaggcagttgagggttataatatatgtttttttcttaaayaccaatacacttttggttctaattcttaaacaacagtgacaaaaccctgaggtagatatttttaattccactttacagataaaaaaattgagtacgtattagggatttttaatgatgttttgttctctcacatagcaaatagctggtagattaattatcgaaatccagatatgtatgactt

SEQ ID NO: 124659 - DNA, 617 bp, Homo sapiens
agatatgttcattcctgttatcaagttacagtctgattaagaagataaaatctaagtacatgactcagtagtaagcaatataataaatagatgacagcatactgtgagttggtgctccttgagtagactttttgaaaaatgttgaacttgacctaggcctttagaagttgatagggtgtagacagactgaccttcaaaactacatgtaaattgtgttttacattttttagactgcttcttatccacttattcaactgttgtgtaaggtaagttgggaaggtattatgatgtacttttgatgataaatatgattctcttatcatatttattttatgaaaagattatggagatataagatatttgcccaaaatcacttacctaacttaatattcagcaccttgattaaagtgttgggtccagaatgaagaaaamttagttgattaaatgactgctacagacattatggctttcatctggagttccatctcaatcattaaatcttgtatttctgaaagatcttcaggccaaataactcggggtctcttctgtttacaatgacacaatatcacagattatgacatatatatctttgacttacctaatgcttgcaagctgac

SEQ ID NO: 124660 - DNA, 572 bp, Homo sapiens
aatcagaagagtgctgatgtgttatggaagtcacgaagtcatgtaaggagaaagtttcaaaaaagagaaagtggtcaacaaggagatcaagtaagrcacaaactcaaaagtattcactggatttggtaagaagataccgactaagcctggccacacagttccagttgagatgtagggaaagaagttgtattgctgagggtttctggagtgaatgggatacgaggaaggagagataacagccattttcaaggtacgattgactctgcccagggtgggcaagtatgtgtatgttttactttagaaaatacttttttcaactattctaccacattttagcagtgtctcctttctcttccagtcacatttctttgtaacacataaagtactcccaataagaattatcaaagtaaaattgttaccaaaaaaggcattcagcagcttctgaacctgaatattgctgcccacagtgcggtacaacccttctgtcttgatccctagtggaggaaaaaatcaggttaatttcacttgtatagctagagttgtcatctccccttggtacactagagtcaatt

SEQ ID NO: 124661 - DNA, 601 bp, Homo sapiens
cacctgggagcagcacagagccaaaaaaccttcaccccccagccaagggaagtggtaagtgattgcacaaccccacccaggaaaccacacttctcctacatatctttgcaatcagtggatcaggagatcccctagtgagccaatgcaaccaaggccttgggtttgacacacagagctgtgcagtctcagcagagcagttgctcaggctcacacagagacccaggagtctttcagactcaggccctgggaatcccagcagacaagcagcatcattctgcaggccccacttaacatggcacctcagaagttaagacccactggcttggaattccagctgcctgccgagtgcatcaggctggagactgcctgagacagattagttcctgggggaggggtrgccaccatttctgtgcttaggtcaacccagctgttctagcctgccagttccagtgagtcctggcagcccaggtgaggagaagtccctcacaacacacctgctgtgccagatagtggccagaatgattgtttaagtgggaccctgatccatctggcctccctgcgggaatttcagcaactccaacctgggttatactaacagatg

SEQ ID NO: 124662 - DNA, 601 bp, Homo sapiens
cacctgggagcagcacagagccaaaaaaccttcaccccccagccaagggaagtggtaagtgattgcacaaccccacccaggaaaccacacttctcctacatatctttgcaatcagtggatcaggagatcccctagtgagccaatgcaaccaaggccttgggtttgacacacagagctgtgcagtctcagcagagcagttgctcaggctcacacagagacccaggagtctttcagactcaggccctgggaatcccagcagacaagcagcatcattctgcaggccccacttaacatggcacctcagaagttaagacccactggcttggaattccagctgcctgccgagtgcatcaggctggagactgcctgagacagattagttcctgggggaggggtagccaccatttctgtgcttaggtcaacccagctgttctagcctgccagttccagtgagtcctggcagcccaggtgaggagaagtccctcacaacacacctgctgtgccagatagtggccagaatgattgtttaagtgggamcctgatccatctggcctccctgcgggaatttcagcaactccaacctgggttatactaacagatg

SEQ ID NO: 124663 - DNA, 526 bp, Homo sapiens
tcaggaattgcttgaacccaggaggtggaagttgcagtgagcagagatcacaccactgcattccaagattctgtctcaaaacaaaaacataaaaagaaaaagaaaaaagaaaccaagtattaatcaaaagtaaagtagactggaaaattcaatcatggtatgttcataaaataaagtgctatacatcaatgaaaatgaacttcagttatatacayaatacatagtaagaaaacaccaaatacaaaacaaacatgaaatatggttcatttatgtaaatttcaaaaacaggcataaactaaactgttttaaaagttaagtctcagtggttacatgtgcagatgaggaaagagactagagagtagacacaaagtaggctcctgagttgctgacagcattttatttcttcacgtgtatacaggactagctacataatttgtggggcccagtgcaaaatgaaaatgtggggctgcttgttcaaaaactataatgaatgtcaaggttgacagtagagcatcaaaccaaccac

SEQ ID NO: 124664 - DNA, 453 bp, Homo sapiens
caggctggcaagctgggactcgcaggcccctcccttgcgctcccaggctttctggaagcggtgagagaggctggaagactagacctcccgctccccaagcaggtgtccctagcccggggcctccctcagggtgtccacgcagcttctaatctctaatcaatctttccagatttgctgccaaactcattgagggtgtgttggatttcaaggtcatgattgacaagtgagcatccccacccctgcccagccccacacctgcccaggcctgcttaattaccacagccacctctgaccccagccctggcccggcatgccagcttgggccctgggccctgctccagctgctggaatctcctcttggtgggtgaccctgtcccatcccaactaaagaggaccccagagttttattcgctgyttcatctcccctgtgacaaactgaagcccagagagggg

SEQ ID NO: 124665 - DNA, 498 bp, Homo sapiens
agagatcgcgccactgcactccagcctgggcgacagagcaagactctgtctcaaaaacaaaaacaaaaacaaacaaacaaacaaaaaataccagagactcactgggcacggtggctcatgcctgtaaccccagctctttgggaggctgaggccagcggatgacctgaggtcggtagttcaagaccagsctgaccaacatggagaaacctcatctctactaaaaatacaaaattagctgggcgtggtggctcattcctgtagtcccagctacttgggaggctgaggcaggagaatcgcttcaaccccgggaggtggagattgcagtgagctgagattgtgccattgcactccagcctggaccacaagagcgaaactctgtctcaaaaaaaaataaaaaaaaataccagagactcttgcctgatggacccatcctcccttactcatgaacaaggaagaggggacaagggagtggttatgcaatattaggacttcagagaa

SEQ ID NO: 124666 - DNA, 617 bp, Homo sapiens
actgggggatttactggtgatttgtgatttgtaattacccagaatatggtccaatggtcccttgtcctttgaagcaattggcccgttctcttgactgctgctctgtactttcccactctcagctctctcataagggccccattccttctggtctgttctattggaacagtctctttccacttcattcttaatttctccttgttgctggattactgtatgttagtgcttctcaaattgtggtccccagaccagcacattagcatcacctggaaacgtattacaagtgcaaattcctggctgggcacggtagctcatgcctgtaatcccagcactttgggaggccaaggtgggcggctcacttgaggttaggagttcaagaccagcctggtcaacatggtgaaaccccaactctactaaaaatacaaaaaaattagccaggcatggtggcatgcacctgtaatcccagttacttgtgaggctgaggcaggagaatcacttgaacctgggaggcagaggttgyagtgagccgagatcgtgccactgcactcaagcttaggtgacaaagtgagactccctttcaataaaataaaataaaataaaataaaaagaaatgcaat

SEQ ID NO: 124667 - DNA, 611 bp, Homo sapiens
aaccatattttgaaatgaatatcataatacatcctttgcaagcctggaatttggaaacaaagaacttgctttaatctgtttttcttcttacctgataagcaggatgacagtgctgctggaggaggtttagacctgtccccagtctcatttgcttttcttcctctttcttcatcgtgtgggccctgacaacctttctttctgaagctacataaattaaacagggctaagactatcaatttttgtaccagctccaaaacaagccaagacaagaaagaatcctccagttgatcgacagacttccagtatttctgctaaactggtagagcggtgaagtctccatgctttcctctctaatgaaataacatcagaggttggatccttggctgtctttaattttttcccttttacgtagctaaaaagatatttcaaatgatgtagaaagacaaaataagccaagtttatattctcctttattgttcattccttctatttcacaaatgcttctagtcttggggtatcagctcccctgaaagtcagatctaagaacctcagcacacaagccctgaagtggcctgaagttcacagsaaaccagtgaactgtgctgcctgaa

SEQ ID NO: 124668 - DNA, 448 bp, Homo sapiens
cctactagggaattggcaaaactgggattgaacccaggacgtttgtttccaaattccacattcacggctattgtataatyctacttcctcgtcagctgagtaaggccttccggtccttattccaaaaatcatttcttagaagaaaactaggctcaacaggcagccagatgcagctgtcagaaaaagcaagatacttcctcacaaaaagaaacacattcttccagggctttaaatgctgcctcgcaccagaagtcccagtacccttgaagggagggtgacagtaagtcaggcttaaacccagggtgacctggaagcccagataaactgcaagctcctgtgatacccgaaaggctattgtgttggcaatttatcatctaggaagccgagtttttgtttttgcacaggaaatgcacttcaaagctcctgctctaactgaaatacatctttc

SEQ ID NO: 124669 - DNA, 551 bp, Homo sapiens
ctggtccatctttctgtatctcagcagatcaatcagcaactatttaytgggtgtctagtgtggacaagcagcataggaggagtcattgactaagagttatggcagctggattcaaatcttatctaagctccagcttcacggaagggaagcctagcttagccaccgcatatctcagcattggaccaatgggaaagggaaggaattttgagaacatgtactaatctggctgatgctcaaagaagaccaccagcagctcataagtttcaaatggcataaaaatctggggctcaaattgagttgcagtgatatctaaatgagagagtggatgaagaaccacatatttgaagtgcaagatgagggaggacaattctgtagttgacatgttttgtcacttcctttggtttgggaaaaagatttaagccctgaagcttatagtatatgaagctgatgccagccatcaaatagaagggcctggtagagaggagaacggaactacagtttattgaacatctggtgtgtggtaggcaacgaacatacaattactcaaatta

SEQ ID NO: 124670 - DNA, 551 bp, Homo sapiens
ctggtccatctttctgtatctcagcagatcaatcagcaactatttactgggtgtctagtgtggacaagcagcataggaggagtcattgactaagagttatggcagctggattcaaatcttatctaagctccagcttcacggaagggaagcctagcttagccaccgcatatctcagcattggaccaatgggaaagggaaggaattttgagaacatgtactaatctggctgatgctcaaagaagaccaccagcagctcataagtttcaaatggcataaaaatctggggctcaaattgagttgcagtgayatctaaatgagagagtggatgaagaaccacatatttgaagtgcaagatgagggaggacaattctgtagttgacatgttttgtcacttcctttggtttgggaaaaagatttaagccctgaagcttatagtatatgaagctgatgccagccatcaaatagaagggcctggtagagaggagaacggaactacagtttattgaacatctggtgtgtggtaggcaacgaacatacaattactcaaatta

SEQ ID NO: 124671 - DNA, 585 bp, Homo sapiens
cctaactctgtttaattccataaagcctgagagaggtgagaaagctgcagaagaaaaactggatgttagcagagattggttcaggaggtttaaggaaagaagctgtctccatagcataaaagctcaagatgaagcattaagtgctgatggagaagctgcagaaaattatccagaaaatctcgctaagctcactgatgaagatggctacactaaacaacagattttcaatatggacaaaacagcattctattggaaagactttcataattacagagaagtcaatccctggcttcaaagtctcgatggacaggctgattctcttgttaagaatgaatgcagctggcaacgttaagttgaagcctatgctcatttaccactctgaaaatcctgggactcttaagaattatgctacgactgctttgcctgtgctctatcaataaaataatggaacctagatggcaaagcctactattgagaamtgctgctcagaggaaaaaaaaaattatgttaaaatattaccactaattgactcattgacaatgtaccttctcaaccaagaactctgatgtacagagatgtacaagg

SEQ ID NO: 124672 - DNA, 472 bp, Homo sapiens
caaaaaaaaaaaaaaaagctgacttagaagtgtttaataagtccaatatctggatttcctcagggacagtttctgttatttgcttttcttcctgtgtatggttcatattttcttgtttctttgcatatcttataattttttgttgaaaattacatttggacattttaaataataaatgatctttgaaataatgtggacattctaaataatataaaaatgtccaaatagtggagacttayaataaaataatttgacaactatgaaaatcacattttgccctctcttcagggtttgttggagtacttgtagttgtttcttcatttaatttcttttgtgaattaattctgcaaactctatttgatgtgtgtgactacctcagtagataattcagtctctagttggttagcttagttgttgctaatgactggacaaagatttctttacatgcctggaaccagtaaatctcctagtc

SEQ ID NO: 124673 - DNA, 568 bp, Homo sapiens
aaggaaaacattaagagaagatgaaagaaatagaggagctacaagatagtcagaaaacaacaaaatgacaatgttaagactttatccacaattacttttaatgtaaatggattaagttctctaatcaaaaggcagagttttttaaaatatatttttyaaaagatcctacagtattatgcctaaaagagattcattttagcattaaggacacacataggctgaaaatgaagaaatggaaaaagatatttcacgcaaatggtaaccagaagagaatggggtggctatatttatgtaagataaaatagacttcaagtcaaaaactgtcataagagacaaagtcattatacaatgataaagaaggcagttcatccagaagatataatagttgtaaatatatatacactcaacatcagagcaccaaaatattttttataatgagaaagccaagattctaaaatcttaacagaaatgataggaacaatagatagtaatataataatagggacttttgtacctctgctttagcaatagatagattagccagacagaaaatcaataaagaaataac

SEQ ID NO: 124674 - DNA, 563 bp, Homo sapiens
ggcacttcttgaaagaatgtggaaactttccggggggagggaggactggaaatggaaataaatgaaggattaatctgyttgtcatgtcagatccaaaggcattcttccaacttactgtcaacttctaattcagtcaccaggagaataatttgtcgctgtggcttggatagaaacccgtggaatccattggtgctcataaaaaaccccagtataagaagaagaagggaaataggaatcacatgtcttagaaagttttaattttatatgtgctctgcccaccaggcttctcacttgtttctgggattctgaaggccggcccggggcatatagctcctgccctgctggaaacgtcaccccagcggatgcagccagaaaccagcttggggtggtccccctgcctgtcagaaccctgagctttattttaaaacgaacagatttttttttcctgtcatggtagccattcaaatcaacatcaagaaacacaaatgagtcagaagagaaaaaatcacacttcttaaaagtgacagaggaggaaacagagattactaaagaagaacaagcga

SEQ ID NO: 124675 - DNA, 491 bp, Homo sapiens
cccagtacttccttcgccatgtaactgtgtttggagatggacctttagagaagtgattaagttaaaatcaggctgttagagtgggccataatccaatattactgatgtccttagaaaaagagaatatttagacacacaagagatgtagtgttcagtgctttgcttttctactgaaatctgattccttggttcttattctaaaatgtaacatcattacgttgagttattaaatagttcatatactctacccccaaaaagagttagaggtatgtagacaacaggcagaacgtatacatttagttttatgtgcrcatagaagtagacatttctctctctctctctctcacttgctctctctctcacatgatcctggaattgttggctttttttttttttttttggctcctttttataagagtcacactatggcaaaatcctgagtgcatatccatcctattctgattgggcataggatgccaccattgtgtatg

SEQ ID NO: 124676 - DNA, 550 bp, Homo sapiens
ctgtgatgtcatttaccatggctgggttgacttggttgattactccaaagcagtaacagaggaccctagtgaaggctgaccacatcactgcgatttttgcatggctcgtcatagccctgtgcacggaatgatctcttgaggttgtttctagctataagatctataactctatgaaccacctctatttattatggctcgtaaaagtcactggccacatattttattctcacgtggcacataaaggatcagagaggataattgaataaccccggcccatgcagcaagacaacattcattctgaaaccacacttgggctatttgaagctcagagcgcactgcctyacccacctttctttgttgatcaattgcatacagcaaaggaagagtgacaatttatcatccaaatcgacactcttgagagtacacggggacaccattaatagtcatgctgagacgacagtcctaaaccatgacaaacgggtatgttcagtagaaggggaaagtaaggtagatttttatgagggcatcaatgggtcttaaatatgaattc

SEQ ID NO: 124677 - DNA, 383 bp, Homo sapiens
taattcaaggttaccttcggtcattgccatggctccagtgcttattatcattgcctcatccacatcttttgagaacactctgagaatctacacggctttaacacacttcttcgcactagtgagaacgcccgcaatgccttattcagtaaggttaaatgagtttgtttgctgaaacattcgccacatgatcccaacgctcctccagctccatcccgtctataatcgcagagcraacactcactcaccttgggcgtgtcaataattgatggtctggggatggaagcgtgaaacaccactgcttcacagtccgccccatcatccagggacccgggcacatcttcaggcgtctccgcgggctgggccgcagtgcggtgacttgaatt

SEQ ID NO: 124678 - DNA, 555 bp, Homo sapiens
gtctaagttacgtttttatatagtttcaaagaaaattgtgctcttacgttttataaagagtcataaaatatctaattgtaaagaaatcagagcccattttctaagtgtgaagtgtcccctaatgacttaagcatgtctgggtactctgtgctagactaatggtttcttgatttttagagccctgtgttaccatttggtggcttcaaataagtaatctggcaaatacagtcaactctatggactacactagtggatatacaktttattttccaatatgtgatatcagtcattgcttggctagtggaaaaagaaactgttttttgttgttgttgttgttgttgttgttgttgttgttgttgtttggttagtggggaaatttggagactagagaaaggaaagttaccctgggaccaaatgtcaaacagcaattattaaagcaaatggaaataattcctccaatttacagaattgccatcaactgctctgatctactcaagaaatgaaaaggtggcagctacttaaataggtactcaccactgtgtaaagagtcaagca

SEQ ID NO: 124679 - DNA, 539 bp, Homo sapiens
ggaaagaaaatagcatctctttgttctattaatagtggcattgtgagggttaagttacaagtgggagaaaaggacattgggtttcttttccttataacatctcctcccttcagttgcccccttgagtaccaagcatggcgggagagtttaaaactatcactaccaaacacaagacctactacatacccccatttaacactgcacagaagatcaagtatgtcatatctgggcagatartttactctcttaaggaattcccagcccccaatcaacagtactccagaattgagctcagagactataacactccccaagcacatttaattattatttgctctgtttaatatgcattaccagttagatttattaaacatgtactatgtgtcaagcactttgggccctgagtattaggccttgagtataatgagattaataagaactattttgtccttgatgaatgcactttccagtagagtagacaaaactataaatagataaatggtgttgtcatctattaagtgttattactgaggtaaaaa

SEQ ID NO: 124680 - DNA, 569 bp, Homo sapiens
aaactgaatggcctgcaagagctgtttagtgtgtataattgctttcattattgtaattatttacagtactggtagcttcacacttgcattactaataaacctttcaaagtgtactggcatttgggttggttatgaaggttcaaaaccttacaagtttccatagtgatcccaaaatattcagaaaccgtaaactactttgaaaaataaaaaacatcatagagaagtayacattagtatcctgaaaaaaagaacattctttgccacaacagtaacatcaattcagaaatgtttccttagacctggaagcaacttaatgtaatttgaagccaggggataactggtgtttagagagttccagaataggatgtggtcaagacccccttccctgcccgtatggagatcttacaataatatttaactgagcccttgctatacatctacccttaatctaagtgctttacatttatttgatcctcttagccactccatgaaataagtactatctttatgttcattttatggatgagaaaactgaggcacagaaagattgatttgtttgcccaaggtta

SEQ ID NO: 124681 - DNA, 621 bp, Homo sapiens
aattatagggaatacaaactgaagtttagggtaataataaaaatagccagtagagatattccacagagatctgaaaattcaaggaagaattgagaattgaggtctagagtaaaaaaaaaatgaagtcatctcttaaattcaaactgatattggtagattacagaatagcctgggcacaggaattgaatactccgcagaatgtcatggataaatttcttttttggcaaagtgttttacactgcctgtagtaagagaaagttggaagctggagacagaggatttatggagacgaggagacaggctgcagaaatgtcacccaggctgattccagcaagggtggcactggaaataaacaaggatgagaggctcacagtgtagtgtttcaatcctggtacatgtcasaccccctgagatcagaaagttgggtggagcggtggaaagaccataaaattttgagtcagatagaccagggttcaaatttgggttcctccacttattctgaatatacttaaatacgttaacttttctgagcctggggaagatgaaataagatgacatttgtgaagatgaattatagatagtacttaggcaggaagttacatatatatttgtcatgagggg

SEQ ID NO: 124682 - DNA, 632 bp, Homo sapiens
ttttcatgattttagacagagaatttaagtgacagtcatttaatcactgaattcatacaatcacttatattgagcagaactatggtgaacatgtaaaagttacttttcaacaatgcaaatgaacatcttatatttttttccattagtttggatatgtaaaattttctactgaggtgatttacatggggtcataattataaaacatggaagaaacagctttagaatcaatgcagagtataaaaggcacacatgaatgtatatgtataaaaatctgcagccataagctatcacacatataattaaaatggatttattgcttttggctttgattttttttctccctgttattaaataattatagggatcccttgagttcaattgtaattacacatatacaaactataatatttcacawatatatactacacatatagtctttaaagctgaactaatataataatatatatgcaaatttaaatgtatgaaattcaggtaattaaaaattatgattccctaaacaacattaacttacagatagttataaatcatggcattatgtgttagatttatattacaatatatatctctggtaacgtggatttatggtgtatgtgtgagtttttaaaatttgt

SEQ ID NO: 124683 - DNA, 577 bp, Homo sapiens
tcaagtacttatttgctttttaagactttgctcacaagaacacacacaattaagctctgtagtatttacctcaaatatgcagtctcaggagaatctaacttttctagcatatatgtccttgattccacttgtagtttttcaatggaaacttcaaaacaagggtggaaatctttagtgttatcccattgtgtctctgaatggttaaataaaattgaacattaaacctaagcctgcttcctgaatgaggaaaagggaarataaagggtcctctgatcttcttttggcaggttaaaaattacaccaatctttaaccaccctcttttctcctccacaccaaacaagccaacaagcaaacaaacacaagtacttgcccaaaaagttcctgtgctgctttgagcatcttccaacattatgcagaaattagttctactcctcatacaagtttttcaccttcaccaagaaaatgcaaatgttgggagcgtgctaattgatcaaggactggcaggagaggggaaggcggagtagacatttttaatacatcaactctccttatcatctcaaccctcactgtgatata

SEQ ID NO: 124684 - DNA, 641 bp, Homo sapiens
aaatggattgagcagctgctatttgccaaattttgttttaagggctgcagataaagatgtgaacaaagtaggtagaaccctattctcaagaaatgtacaatctagtgttggagacaggcaacaaacaaagaaaagaatagatatacagagtcattgctgatagatatatgtgctgtgatgaagaaaataaatcagataaaagagaaagagaatgataaatatgtcattttagatagtcagggatgtatctctgtaaactaggtgtgattatcatcattttacagaagaagaaactgagtctcccagagattaagtgacttgttcatgatagcaccattagcaaagatccttcctaggattcaagttgccctaacaaggaattggtgctactcaaaagtcttgaactaattcraggataaaattattaacatatttttctaagtgtgtgaattgatatgtcattgtgtctgagcatctgagaatttctaccattaactcccatctataaagagcttgagagctacagaaagatcagtctcatttacgtacttaccaaggagataaaacctattataagagaggtggaatcatcgaatactcaagcaaacattgcctagtgtaatcaagtgaaatcatttctt

SEQ ID NO: 124685 - DNA, 616 bp, Homo sapiens
ttggcaatatggaggctcttggtgatctagtcccgcacagcttcagtggagaggtaggtgtacagggtgggtggacgctctacaggagtgcgctggtgagacggcacacatcttttgcagacagctctttggagaacttttyctttttgccaagcaaaggggtgcagaacagagccccacactaccaggaaaaaaggacaatcacttttcccaattaaccactttcaacccctcagctagacacctttcccaaacggcagaagcctctccctctgcctccacccctgacctttctcctaatggtctggatgtgggtgggaaggagaaggaaccacttgcttttgtcctccatgtggacacctgttcatcctactgcccaggattcatctccccctccttctgctaatgagccccaacccctgccccacctggtttttgactccagctagctcaaattaagtttctatcactttcaagcaagagaccctaatgaattcaccctttcctctcaaaaggctcaaggccagcttttcttggctttctcacttagccaacaatgaggtaggacatgaaaaatgctaagaaatggcacagagtagaaaattaagaacttgta

SEQ ID NO: 124686 - DNA, 587 bp, Homo sapiens
aattcctttccaaggtcacccttgctgctggatggagagctaagtgccacgtggccagagcaaaggctgtgagaacaggcaggaggtcattgcagtggcccagagaaaaagtggcagtagcttggctcagatggtggtggcactgaggatgaagcgaaggacgggattttaagatgttattgagatccacagatagggtttaatgaaggagcagaggaggagagtcagataattgtattacttaggtctctcctrtaatgctgaataacaactccaaattctcagtggcttacaataatcatttatttttcttgttaatagttctgcaggttggctggggcatttctgcttcaggttgcaagtgaggttcagggcatccctttgtgtctcttgttctaggacctgcagcaacacagggcaagctcttcatggttaatagaagaagggcaagaggccacaccgaagcacacagcccattccaagtcactggcaagacaaagcctaaaaagtgtctttgtgtatccatcagccacaggacaccaaatggcatagcccaaagacagtgacagagggaattaaactctgac

SEQ ID NO: 124687 - DNA, 578 bp, Homo sapiens
cacctgctgggtacccagaacagtggaatgtcattccatagcragagggttaaaaaaggcaaaggcacccacaggcaccagattcagaagggaaggcactctcccttttgaattcatcctattcttcatataaagtgtaagggggaattattatccctagggtggaaggagttattatcaacagatttcagcaaagttgaaaaaggattgaggaaatgaaagaagatgaccataggaataggacccataatgaaaattactatcattacaaagaaaataatgacagttgggagcattatgtgtaaaatacagaaggaagaccataacagtgatgagaaagcaaagacagagtaaatgtgcaacacagaaatcataaaggtgtatgtgtgtgagacagagattcagaacagaaacacagagatggaaacgtaagagaataaggctgacatgcagatgcaactttctttccctaggtttacctgattacggcaatgaagccactgtccagtcctattcctgaaggtttggggctagaaaacagaacaggaaaggaaatcaagagtagagaatggaccacc

SEQ ID NO: 124688 - DNA, 599 bp, Homo sapiens
ggctgctgctgtcaaactcaggaacttttaaaattttgtttgttcccccaaagaagtgcatgcccaaaccaccaagagagggtaagtgatgacaagcagatctgcaaggcggggccccagtcacagtagcaagcaccctatctcacaacagccctgcaaccggcaaagttgcagcttctgctacagtgcgcatgtgtgcgggtccccttctcccctcttccctctcccctctcccctctcagcccatcctcctcagcccagatccctccctgtaccaagaccattccagctgcacgcaataatcaggcaagcaacttctaacccagcctaggggactcagacgagataatgcttaatttttctgcaacgccttcttaaggctccagggatctgtaccccaggatggagaatgctttcccagaagcacagcctgtttctccagcctgagagtgtgtgctgcagagctgggaccccaccctgtatctaaagtaattgctgtatctaatggtgkggtgctgctgacttccttaccagctgtagctttctgttgcccgaccctgttattactggctcctgctttattttagggatgttaacct

SEQ ID NO: 124689 - DNA, 490 bp, Homo sapiens
agttccagctaattgggaggctgggacatgagaatcgcttgatccctggaggcagaggttacagtgagccaagatcrcaccactgcactccagcttgggctacagagtaagactccgtctcaaaaaataataataaaaataaaaatagaactcacttgtaccaatgtctgtaatttacttcatataatcaatgtactatgatgtttgaccagttaaagctttaattctaaggatggttagctgacatgatatcaagaatgcatagttcatgggtggtcacctatattacatcagaaaaggccatgctctgaagtatgtattacaagtccttcagataccagtacctcaatcaacaagctttgctaattagcatcctgaatgctttaaaaaaatgggttttattcattaaactagtgaccagcatgatgaatactaaacttggcttcaatggtgacattagaagtaccaagacagggaaatgggccaaaac

SEQ ID NO: 124690 - DNA, 605 bp, Homo sapiens
atttcctatgtttaaggtagttggatttagattatctgtttcttgctgttgaatgcatcttaagcaacatagttttgacctgtttgtgctggtttattttatgtgtcaacatggctaggctacagtacccagttattcagtcaaacactaacctaggagttactagtaaggtttgcaggtgtgataacatctactaaaaatgacttgaagtagattatctttgctaatctgggtgggcttcatccaatcaattgaaagttcttaagagaataaacaagtttccttgaagaagaaaaaattccacctgcagactgcaacatcagctcttgctcaagagtttccagcctgctggcctgtcctacagtttcagacttgcctagtcagtccccacaatcacataagccaactcctgtcacaaatctcttgctctccttctgtctgtgtatatatgtatatacgcatatatatatatatttatatactggcastgtttctctggtctaaccctgattaatgcacctcttttttcctttgtgatacttatctcaatttgggattatatactttgcatttattatgtatattccaatattcacagttagact

SEQ ID NO: 124691 - DNA, 415 bp, Homo sapiens
gtacttgttgactatcggtctcgtgccggtatttagccttagatggagtttaccacccgctttgggctgcattcccaagcaacccgactccgggaagacccgggcccggcgcgccgggggccgctaccggcctcacaccgtccacgggctgggcctcgatcagaaggacttgggccccccacgagcggcgccggggagcgggtcttccgtacgccacatgtcccgcgccccgccgcggggcggggattcggcgctgggctcttccctgttcactcgccgttactgagggaatcctggttagtttcttytcctccgctgactaatatgcttaaattcagcgggtcgccacgtctgatctgaggtcgcgtctcggagggggacgggccgctcggcggacggacggacggaatcgcgc

SEQ ID NO: 124692 - DNA, 408 bp, Homo sapiens
ccggggccgacgaaccccgaaccccgagccgcgcgcggcgcgagggagccccccgagggaggaacccggaccgcaggcggcggccacgggaactcggcccgagccggctctctctttccctctccgtcttcgcgggcggcggcggcgccgccctccccgtctctctcagccgggcgcgcccccctctcccccccgccacccgacgcgtgaccacgcagggcccrcggggggagggggaaggggcgggcgcggcggcaaggggagggcggacgccgccgggtctgcgcttagggggacggagggcccccggcgggccctgcgagggaacccccagccgcgcaccccgaggagcccggaggcacccccgggggcgattgatcggcaagcgacgctcagacaggcgtagcc

SEQ ID NO: 124693 - DNA, 387 bp, Homo sapiens
accttccacccggccggggccgacgaaccccgaaccccgagccgcgcgcggcgcgagggagccccccgagggaggaacccggaccgcaggcggcggccacgggaactcggcccgagccggctctctctttccctctccgtcttcgcgggcggcggcggcgccgccctccccgtctctctcagccgggcgcgcccccctctcccccccgccacccgacgcgtgaccacgcagggcccgcggggggagggggaaggggcgggcgcggcggcaagrggagggcggacgccgccgggtctgcgcttagggggacggagggcccccggcgggccctgcgagggaacccccagccgcgcaccccgaggagcccggaggcacccccgggggcga

SEQ ID NO: 124694 - DNA, 279 bp, Homo sapiens
aaggtttcacaccacggggaggcgcgcgccgcccacgcgggggcgagcgcggacaccaccccacaggcgcccgggggttcccgcccccacggcgcggggcgcacgccacacgcgcggcaggcgcgcgacggccgccgggtaaagcccccacccgacggccgccgcggcgkcggcggcggcgcggccccggccggggagcggagtccgcggtggaggcgcgggaggggccgggcccctcccgacgggactcccccgcgggcccaccaccgcccccgaccc

SEQ ID NO: 124695 - DNA, 308 bp, Homo sapiens
ctccccgccgcccgccggccccacgacacgcgcacaccaacgacacgcccttctttctctctctctctctctctctcycccccgtctccctcccgagttctccggctctcgcggccggcggggccgggcggcgaacgaacgagcgagcgaacgaacgggcacgcgggccccgcccgcgcacgcgccgcgtcgcggtgggggggcgggtgtgcggagggaagcgcgcggcggcggcggcgccgccgcgggcctcgccctccgggctccgttaatgatccttccgcaggttcacctacggaaaccttgtt

SEQ ID NO: 124696 - DNA, 572 bp, Homo sapiens
acgcaagagtattcaatgcagagatacacgttgtcgttgtttgcatataagcgtacagaaacgtttacattactacatataagtaaacgcgtggaaacgaaagaaataaaaaagcgaaatgagtcaacaggccgggcacggtggctcacgcccgtcatcccagcacttcgagaggccgaggtgggcgcatcacaggaggtcgggagttggagaccagcctgagcaacatggagagacacggcgtgcctactaaaaacacaaacatcagccaagccaggcgtgggggtgcctccctgtmatccccgctaatcgggaggctgaggcaggagaagcgctcgaacccgggaggcggaaggtgcggtgagccaagatcgcgccattgcactctagccgtggaaacaagagtgaaactctgtctcaaaaggacgaaacagaaagaaagaaagaaaggaaggaaggaaggaaggaaggaaggaagaaagaaagaaaagaaagaaggaatgaatgaaagaaaagaaagcaagaaagaaagaaagaaagaaaaagaaaagaaagaaagaaaagaaagcaag

SEQ ID NO: 124697 - DNA, 465 bp, Homo sapiens
gtcccaggcggggccaccaacggacgtgaagccggtgagccgctcggggggaagaagaggatcggcgggcggcgggcggggaagagggcacagacgggcgagggccggggaccgcgagggcaagggcacccgggagcccgcagaggcggcggctcggggagaaacctcaggcacggccgggccaccaggaaaacacggccgcgggatcccaccgccacagacacgagggcggtcccgcggcgccccgcctgggacgccggacggccctcggcccccaccgagaaccgcctcgcgagccccggggccccgccaccgggggccccggagcgaccgcagccacgaacccgacacgcccscaccaccgtcgctcgtgattctcgtccatcctccgacccggtcccgctccgggagaccggcgcgcccccaccgtgggacgctttcccagggccaggcgggcccgacccc

SEQ ID NO: 124698 - DNA, 572 bp, Homo sapiens
acgcaagagtattcaatgcagagatacacgttgtcgttgtttgcatataagcgtacagaaacgtttacattactacatataagtaaacgcgtggaaacgaaagaaataaaaaagcgaaatgagtcaacaggccgggcacggtggctcacgcccgtcatcccagcacttcgagaggccgaggtgggcgcatcacaggaggtcgggagttggagaccagcctgagcaacatggagagacacggcgtgcctactaaaaacacaaacatcagccaagccaggcgtgggggtgcctccctgtcatccccgctaatcgggaggctgaggcaggagaagcgctcgaacccgggaggcggaaggtgcggtgagccaagatcgcgccattgcactctagccgtggaaacaagagtgaaactctgtctcaaaaggacgaaacagaaagaaagaaagaaagraaggaaggaaggaaggaaggaaggaagaaagaaagaaaagaaagaaggaatgaatgaaagaaaagaaagcaagaaagaaagaaagaaagaaaaagaaaagaaagaaagaaaagaaagcaag

SEQ ID NO: 124699 - DNA, 572 bp, Homo sapiens
acgcaagagtattcaatgcagagatacacgttgtcgttgtttgcatataagcgtacagaaacgtttacattactacatataagtaaacgcgtggaaacgaaagaaataaaaaagcgaaatgagtcaacaggccgggcacggtggctcacgcccgtcatcccagcacttcgagaggccgaggtgggcgcatcacaggaggtcgggagttggagaccagcctgagcaacatggagagacacggcgtgcctactaaaaacacaaacatcagccaagccaggcgtgggggtgcctccctgtcatccccgctaatcgggaggctgaggcaggagaagcgctcgaacccgggaggcggaaggtgcggtgagccaagatcgcgccattgcactctagccgtggaaacaagagtgaaactctgtctcaaaaggacgaaacagaaagaaagaaagaaaggaaggaaggaaggaaggaaggaagraagaaagaaagaaaagaaagaaggaatgaatgaaagaaaagaaagcaagaaagaaagaaagaaagaaaaagaaaagaaagaaagaaaagaaagcaag

SEQ ID NO: 124700 - DNA, 640 bp, Homo sapiens
acatggagagacacggcgtgcctactaaaaacacaaacatcagccaagccaggcgtgggggtgcctccctgtcatccccgctaatcgggaggctgaggcaggagaagcgctcgaacccgggaggcggaaggtgcggtgagccaagatcgcgccattgcactctagccgtggaaacaagagtgaaactctgtctcaaaaggacgaaacagaaagaaagaaagaaaggaaggaaggaaggaaggaaggaaggaagaaagaaagaaaagaaagaaggaatgaatgaaagaaaagaaagcaagaaagaaagaaagaaagaaaaagaaaagaaagaaagaaaagaaagcaagaaagcacgaaagcaagcaagcaagaaagcaagaaaacaaggaagcaagaaagcaagcaagaaagaaacaaaagaaagaaagcaagaaarcaagaaagcacgaaagcaagcaagcaagaaagcaagaaaacaaggaagcaagaaagaaagaaacaaaagaaagaaagaaaacaagaaagcaagaaagcacgaaagcaatcaagcaagaaagcaagcaggaaagaaacaaaagaaagaaagaaagcgagaaaacaagaaagcacgaaagcaagcaagcaagaaagcaagcaagaa

SEQ ID NO: 124701 - DNA, 352 bp, Homo sapiens
acacaaagtaaacttctgaaacactccattttttaaaagacagrcggaaaggaaagaaacacgaaaaagagagaaagaatgaggaaagaaacgaaggaaagaagggaaaaagaaacagagaggaaagaaaaaagaaggaaagacagggaacgaaagagaaataaagcacgaaggaaaaaaggacagaaagagagaaagaaggaaaggaagagaggaagaaaaacctaaagaaggagagaaaggaagaaaggaaggaagaaaaacacgaaggagaggaagaaaggaaacagagataactacgtacgctcgttcatttacacacataaatacgacgcttttcatacgtaaaata

SEQ ID NO: 124702 - DNA, 553 bp, Homo sapiens
aagagagataccctctacttgggagaaggaaaaggaagtaagaactggagtttgccttggtcctaaacacaggctggaccagtaaagcagtaaagtagatccctaccaggcctagggtccaggccacccaatagaccctggtggcgggctggcccccataaactgaggccccaggcccacccttgcagaagctggtactctaggtctatgccagtatcagtctagcctctgtggaaccagatttcaggctggtttccaaggacatacattctagacccaatcctgcagaygcaagtgccagggttgcccacctgctgatctaggcactagaccagcctgttcaaggagtacagtaacaaacctgcctgtgggcaacctgccaggaatctctagatgatctgactggtgaagggctttcccagacaaggccagtctgcaagtattagaataatttactactcttaaatttacagacaccaactcgtggttacaaggaccaagaacaataatggaaacatgaccccaccaaaagaacaaaataaagcaccaaaag

SEQ ID NO: 124703 - DNA, 528 bp, Homo sapiens
attattttggcttttctgttttttttttttttttttttttgcatttccatataagttttgggattagcatgtcaaattctgtaaaatgtctactgtgattttgatagagattatactgaatttatagatcaatttgaggggtattactatctgaacaataggtcttatagtccaaaacataaatgatctctatatttagataatttaaaatttcctttggtgatgttttgtagttttcaatacataaattctacacttggttaaatttatttccgtgtatttattattgatgctgttgtgaataaaactgtcttaatttcaattttgattgttcatcaatatgtagaaataaaaatgatttgtttactaatcttacatcatgtgaccctgccaaactcacttattcacagttttttttttttctgttttttaraagtttagcatataggagagtgttgtcggagaatacagttttacttcttcgtttctaagattgatgtgttttatttctctttcttgattgaacta

SEQ ID NO: 124704 - DNA, 528 bp, Homo sapiens
attattttggcttttctgttttttttttttttttttttttgcatttccatataagttttgggattagcatgtcaaattctgtaaaatgtctactgtgattttgatagagattatactgaatttatagatcaatttgaggggtattactatctgaacaataggtcttatagtccaaaacataaatgatctctatatttagataatttaaaatttcctttggtgatgttttgtagttttcaatacataaattctacacttggttaaatttatttccgtgtatttattattgatgctgttgtgaataaaactgtcttaatttcaattttgattgttcatcaatatgtagaaataaaaatgatttgtttactaatcttacatcatgtgaccctgccaaactcacttattcacagttttttttttttctgttttttagaagtttagcatataggagagtgttgtcggagaatacagttttacttcttcgtttctaarattgatgtgttttatttctctttcttgattgaacta

SEQ ID NO: 124705 - DNA, 647 bp, Homo sapiens
attatggaatgaaaatcaaagatctataacctgtatacatataattttgaaaaatgttaatattattctttaatggtaatagaaacaaaatagtagtccagggctacagtgtatgaccactatatcrtaaatccccaagacctgtctcaggttcataaatttactagaaggaatcacggggtctcagcatatacttgtattagtggctgagggttattataatggcataagtgagaacatatagccaaatcataagggaaaaagacacaggtggcatgtgcaggaatccttgtgcaagcttccttacgctctctcccttcaacaaggggtcacacaaagcacattcttaccccagtaacaaaaagaaagcaacacatgcaatgtttctgtctagggaaggccattagacactcaatgttcagggttttccttgggggctggtcacactctctgcctcatacttaccacaattacagataaaagaaggtattcagtcatattatttgaagtgcttgagagggtatctggtggtctaactgcttcttctacagaatttcagtcatttctcctattttcagctctaccaaaactcaccacttacataagtaatcctgattggtatggctttctgaggtttggtgccacaa

SEQ ID NO: 124706 - DNA, 562 bp, Homo sapiens
tccttatgtcttccgagttaaccggtgtgaaggcagtggtggtgtaagtcttcctctggattagttgtccccatctggccttctccttgataatccagtaagaaatctccacctaacatcacatagcaggcagaaacataaccagttctatgagatccatgttatgtacagtaaccaccagctgagccttcttgttcttcaccaaggaagtgacagtgttaacacctgctggaaggactggacgtctcttagtggagacatccccattgctggcagctttcttctctacctggatccaacagtatgtgctgcttcccttgctttgcctcttgtctgtacttgtgggcaagcttaagcagataagtagctgtttggtggtccaacrcctgtgtggactggttaattttgtgaagcactttcaactgcttataggagacaggcttttgctgtggcagctggatgtagcagggccgtttgacaaggtggatgagctcccttttgggctagatgtcctgtccagtacccaaattattgggccttttctcaaacaggagatttacca

SEQ ID NO: 124707 - DNA, 516 bp, Homo sapiens
gaattcttagctaaattattcacttacctgaccacccccccccaacaagcccccaaataaagtgaatttccaacatggtgtttgcattgctaattgatgtctacctgcaagattttccaagtggaaggtacaaagggagacggcaggtctccaaaaacagatcagggctccctagcctttgtgtgtcacctgtttctaaacagcacaattagagcaataaatgctgcagccccrtgtttggcctgacgggatgatgaccctgcggctcagcaaggccacgtatgacagactaactacttgaaaaaggactctcttgagggttacttaacacagtcacctgttgatttatgaacacgcacactcacacataccttgtctcacccttttaatcatatcaatttgctgcatctcagcaaaagaaaaaaaaaccgaaaccactaattactcacaaataagtcaatggcaaagctccacatctgctcaatctggatggatgaagtttgtaaaccactaaca

SEQ ID NO: 124708 - DNA, 541 bp, Homo sapiens
gtggtaatcagagcagagtggcaggatgcagggagtttttatttatttatttgttcttgttgctgacrttgttttcatactattttttgtttgttaaagagggagagttgtgagtataaaataacctataaatagggaaaaccaggaacagattcatgtgaaagcccttgactgagaacagaattaattacccgtgcagaggtagtcttcaagccttggcaggtaagcaactgtctgagacacagctggctcgggaacagggcctttctttggctggcaggcttgaggcagcataatttggaagcggatatgagaaagggcataataatgtgaaatttgactgcctagtgggggagaaactttgaatattatgaggcggttatgaaagtatttccttcttatggcttcaatggcactgcctctgagcattagtgtttgtcctcaggaggtaagtgtggggactgtatcagcagttactacctagataagcacggtgtataggggtaacatggtttatagagcatgcaagccttcacctctt

SEQ ID NO: 124709 - DNA, 541 bp, Homo sapiens
gtggtaatcagagcagagtggcaggatgcagggagtttttatttatttatttgttcttgttgctgacattgttttcatactattttttgtttgttaaagagggagagttgtgagtataaaataacctataaatagggaaaaccaggaacagattcatgtgaaagcccttgactgagaacagaattaattacccgtgmagaggtagtcttcaagccttggcaggtaagcaactgtctgagacacagctggctcgggaacagggcctttctttggctggcaggcttgaggcagcataatttggaagcggatatgagaaagggcataataatgtgaaatttgactgcctagtgggggagaaactttgaatattatgaggcggttatgaaagtatttccttcttatggcttcaatggcactgcctctgagcattagtgtttgtcctcaggaggtaagtgtggggactgtatcagcagttactacctagataagcacggtgtataggggtaacatggtttatagagcatgcaagccttcacctctt

SEQ ID NO: 124710 - DNA, 541 bp, Homo sapiens
gtggtaatcagagcagagtggcaggatgcagggagtttttatttatttatttgttcttgttgctgacattgttttcatactattttttgtttgttaaagagggagagttgtgagtataaaataacctataaatagggaaaaccaggaacagattcatgtgaaagcccttgactgagaacagaattaattacccgtgcagaggtagtcttcaagccttggcaggtaagcaactgtctgagacacagctggctcgggaacagggcctttctttggctggcaggcttgaggcagcataatttggaagcggatatgagaaagggcataataatgtgaaatttgactgcctagtgggggagaaactttgaatattatgaggcggttatgaaagtatttccttcttatggcttcaatggcactgcctctgagcattagtgtttgtcctcaggaggtaagtgtggggactgtatcagcagttactacctagataagcayggtgtataggggtaacatggtttatagagcatgcaagccttcacctctt

SEQ ID NO: 124711 - DNA, 577 bp, Homo sapiens
atatacaacgtttgctgaatggatgaataaatgaatcagatagaaaactaggacacttctctctgacaactgtaagtgaaaggttggttttgcttgtgcacaagcaaagttaacgctggaaatattaacatcttaacacctttccatgaagtggattagggttagtgcttcagggcatagtccagggttcccagagagtaggcattaggaaaggtctggagtggactgaataaggaagtgcagtgtagtggggagaaagggggctttggcatcaaatggtgactgacatagtttttggtattaacagtataatgttgaacaagcaggtcatctgagtctgtttgtcatctataaaatgataataagcatatatattgttttaagaaataaataatagccaaaagatagaatcaacccaaatgtccatcaatagrtggttaaacaaaatatggcatactgtggtatatacatacaatggaatattatagagtcttaaaaaggaagaaaattctgacaccttcttcaagacagatgaaccttggggacgttatgttcattgaaataaggacaaatactg

SEQ ID NO: 124712 - DNA, 616 bp, Homo sapiens
atactacacaagtaaatcacgagagatgagcgaacgaagcactgggcaaattgttcgaaacaaagggaaagtttctcagctcacaagatgaaagctttgattttctcataaaagaaaactaataagaaatagttattttcctgaaatacaacgttccaaatgggagttggcgggggggagcaacagtattttaatacattttgcaatctgcaatgctgcttgattttgttgtataattttgcgatatgcttaaaaggtggaaaatagaattaagagggttggaaacgtgaagtaaaatattttggttctgatagtaccaatcagaaagcagaaacagccacacactgcctttattattcttcataaaggctgaggcagaaggggaaartgacaccgaagtctctgtggcgcaatcggttagcgcgttcggctgttaaccgaaaggttggtggttcgagcccacccagggacgcgctctccttttatgagctggtcgcgggaagttttgcagaaatcgagttcaggcctccgggataagaaggggtggatttccagggaccaagcaaagaaaccaccgacccttacactacgcggccagccggcgagcccttcgctt

SEQ ID NO: 124713 - DNA, 393 bp, Homo sapiens
gatggattacacaaggcactactcagtgtcggtgtgagcaaaaggtctaatattgtgattgggaatgagaacaaggaaacaggtactctctatgctagcaaatttgaagatgttttgcctaccttcactgcccttgagatgtcatcaattctgcgtcactgctgtgatcttctgataggcattgctgccrgatcgagtgacccgatatgcaccaacagcctccaagtacagagacaattcaaggcaatgatgatatccattggaagacctttgcatagtgaaagtgctgatttattaattagctataatgcagggccagctatagattggatcaactcaagaccatgggttggaggattaatgttcacatttctatttggagaatttgaatcc

SEQ ID NO: 124714 - DNA, 393 bp, Homo sapiens
gatggattacacaaggcactactcagtgtcggtgtgagcaaaaggtctaatattgtgattgggaatgagaacaaggaaacaggtactctctatgctagcaaatttgaagatgttttgcctaccttcactgcccttgagatgtcatcaattctgcgtcactgctgtgatcttctgataggcattgctgccagatcgagtgayccgatatgcaccaacagcctccaagtacagagacaattcaaggcaatgatgatatccattggaagacctttgcatagtgaaagtgctgatttattaattagctataatgcagggccagctatagattggatcaactcaagaccatgggttggaggattaatgttcacatttctatttggagaatttgaatcc

SEQ ID NO: 124715 - DNA, 571 bp, Homo sapiens
ttaaaaataaggccaatttaagagtgtcaaaaggttcatgttatttattcaggattatttgtttttactcctatacttgttcgacactagtatagacttactcatcttcacttggaaattttataattctaacccaagggaaataacccttctttgattgctgtaatccatttccttcttcacatgtctttttatctctttttaaagaaagtcatacgcttgacttgtaacacttcatgctacctgagaagaaaggaaaagtcactttgtgcttgactcacgtaagattcacgtaagatgattgaaatacctgttcacaagaataatagcagagcattatttacgaacctgtgcatcatattaaacatcattttcttctctttatgtttcacaaaaacaagctctgcggggatctcttttggcaatatggcaatckagttagccaaatcatcctttctgctgaaaataactaaaaagtttgaaaatcagagccttcttaaaagcactgatgagctggcaagaaaccaagaaatacacagggcaaaatctgaggggaagtgggaaccgaaag

SEQ ID NO: 124716 - DNA, 614 bp, Homo sapiens
tagtcatttgatttactcaattggttgcctttaagcctagactcrtggctcataattgttatataaactgagattatcatattactattatttttactttgtattttcttttcttttcctttttttttttaactttgtacccgttgcttgtcaaatttctacaatacaaatcctaacaaaagaatgctagcccagcactttgagatgataatcaatgtttatggaacagacaaaattcaacttaacaatggactgcaggtaggcttgaaagccactctttcagaaattccctgtggctcaaatgtggctgaaagagttttgacaccgactcctagttgtcaatcactccctccagtgtgggaccagaccaacccatgtcaggtccattctggcaccaaaatataaccaaaacctaactacaggattattgatcagcaatgctttcagggaaagatctcaatcaaaagggggaattgtaaaagttctgaaaattaaaataagtcactgtgtgaaaatcctgacaaatagagccagcgaaagccataaaggaaaagatctcacacatgtctatctggtaacaagaactatcacaaaagactctgcaaaaatcacaa

SEQ ID NO: 124717 - DNA, 575 bp, Homo sapiens
gactgggtgaaagtcaatattgccctgctcaggaccaagagacattgctaccattggcactgcttggatgttcctgatgctcccagaacctctgtcacttaggaaattacaagggtttagatactttgtaccagaaatgaggyaaaagccaaatatatatttatttctccttatatatatatagagagagagagatggggtcttgcttgttgctcagggtggtcttgaactactcctggcctcaagcaatcctcctcttggcctcccaaagtgcagagattcatatagatagatagatagatagatagatagatataatacataagaaatatatctattttttcttgttttgtattataatctcctattatttttatctgacccatcaaattctgctggaaggatctggtatcataccttagtatggacttatccagtgagtccctctgttatttctctggaggtatcttcaccctcagcaatcctcctgaaagatgctcatcctgattgcagcactattcacaatagcaaagacgtggaaccaacccaaattcccatcaatgatagactggata

SEQ ID NO: 124718 - DNA, 548 bp, Homo sapiens
atcttgaactctatgaggtttcaggttagaactgaccaaacaaggtacctctacgacatttaaaaggtggaaatggggctggacgcggtggctcacacctgtaatcccagcacttttgaaggccaaggtgggcagatcacgaggtcaggagatagagaccattctggtcaacgtggtgaaaccccatctctactaaaaatacaaaaaattagctgggcatggtggtgggcgcctgtagtcccagctactcargaggctgaggcaggagaatggcatgaacctgggagacggagcttgcagtgagccaagattgcaccactgccctccagcctgggcaacagagcgagactccatctcaaaaaaaaaaaaaaagaaaaaagaaaaagaaaaaggtggaaatgaaatgcgctcaatacagtcaggtggcccttgtggtcagatgcagtgaaaggcagatgcagaggggccagcagattccagctccttctttgttttcatggcttaattcccatctttatttcccttttctttttttttaattcaaggat

SEQ ID NO: 124719 - DNA, 567 bp, Homo sapiens
ctactttttggatggggttgtttgtttttttattgctgattcatttgagttccttgtagattctggatattagtccyttgtgagatgcatagtttgaaaatattttctcccagtctatgggttgtctgtttactctgttgatcatttcttttgctgtgcagaagctttttagtttaattaagtcccatctatttatctttgtttttgttgcatttgcttttgagttattggtcatgaactctttgtctaagtcaatgtctagaagagtttttccaatgttatcttctagaatttttatggtattgggtcttagatttaagtctttgacccatcttgaattgatttttgtataaggtgagagatgaggatccagcttcattcttctacatttggcttgccagttatccctacaccatttgttgactagggtgtcctttccccactttatgtttttatttgctttgttgaagatcagttggctgtgtttggctttattctacgttctctattcggttccattggtctacatgcctatctttatactagtgtcgtgctgttttggtaatt

SEQ ID NO: 124720 - DNA, 567 bp, Homo sapiens
ctactttttggatggggttgtttgtttttttattgctgattcatttgagttccttgtagattctggatattagtcctttgtgagatgcatagtttgaaaatattttctcccagtctatgggttgtctgtttactctgttgatcatttcttttgctgtgcagaagctttttagtttaattaagtcccatctatttatctttgtttttgttgcatttgcttttgagttattggtcatgaactctttgtctaagtcaatgtctagaagagtttttccaatgttatcttctagaatttttatggtattgggtcttagatttaagtctttgacccatcttgaattgatttttgtataaggtgagagatgaggatccagcttcattcttctacatttggcttgccarttatccctacaccatttgttgactagggtgtcctttccccactttatgtttttatttgctttgttgaagatcagttggctgtgtttggctttattctacgttctctattcggttccattggtctacatgcctatctttatactagtgtcgtgctgttttggtaatt

SEQ ID NO: 124721 - DNA, 502 bp, Homo sapiens
gctaatgaaaacaaccagtctgctactgctagcctttgtttttcactaataatatcaaattaaaaaaatatttaatttagaatagtcttaagtaaaaaagcaaaattgtatatcaagaaagtttggttattttattgatgacattagggatctcttcaaatttctgtgaggacatcaactaaaaggtttctaaaaacacacaacacttctaagaataagtatgagtgagaaagaaattgtatgtatgtaaatgggaccgtggatttaaagtttaccaagtttgttgaaagattgacaaaatctgcataatccttgttgatgagttcgaccatggctgttttaagaagtttatagtagagctccaggtcatctctcagttcttccagctggacccgcttcctacagtcagacacaaaatgatcgacatcgaaatcttcctgaaaaataaaaccagagaagaaaaaattatrgcaatgatatcacagtgacatatacaaatgaa

SEQ ID NO: 124722 - DNA, 560 bp, Homo sapiens
taatatgaaagtgcaaaatgcactggtagaggtaaatacaaagtcatatctagcatactccaatattgtaatagcagtgtttaaatcatacatacttccagtatggaagacttgtaagttaaatggtcaaaaatgatgaaagtcataataagtttttaaggaatacacactataagatgtaaatcgtgatatcaaaaacataaatggggaggggtgaataaaagcctagagtttttgtatggaacagaagttaagctggtatcagcatcaagtagttgattataagtataagatgttttacrtgagccaaatggtagcaacaaaacaaaaaactacagcagatatacaaataataaaacaaggtatcaaagcttagcactacagaatattatcaagtcacaaaggcagaaaacaagagaaaaagaaaggaacaaaggaatatcaaaacaaccagaaaacaaataacaacatggcagcagtaagtcctccttatgtattgataataaccttaaatataattggattaaatttttcagctaaaagacactgagtgacagaat

SEQ ID NO: 124723 - DNA, 594 bp, Homo sapiens
aatgattagctttgtctaatgtcttggttctcatgagtaatgtagggaaactgctaaaactaaataaatgtaaatgagatgaatgcttgtaggtaaactttttgtaaagtttaaatttttaaaattattttagacacttactggatggctgggtcatttccaattaaaaaagggttataatatggagcaatggttacacttctgagactgttaatggaaaataaacataataaaatctataatgtggggaaaacattggtggacctcagtgagctggcagaaaccttccacccattasacaccctaataaggaaaggtgaaaaatgggaccagacacaaacagagcaatagctattggctgtatatagggcattacaacaaacggaggacatcacgtgtctcactgctctcagcatcatgtatggcatgccaagatgaatagacagtgatcagggctcccgtttcacaggctatggtactcaacctgggcatcaggaaaaaccatagactggaggttccagttaccatataacccaacaggggcaggcctcatttaaaaaaaaaaaatggcctgttaaaaacccaattatgtgc

SEQ ID NO: 124724 - DNA, 467 bp, Homo sapiens
ctccatccagattaccccatgcatgttgccagactaatttatctttttcttctcctgctgaaaacattgcagtggtgttctgttgccttctctattaatastaattccttatcctggcactcaaagacttccacaatccatccccaaactgtgttttcatttttattttcattggttccctctaaatatctagacttgtgaaatattagccttatgtattcttaaaatgcatttggatcattctctttccaacacttgaaatacacctttccttctctctgttaaaactgttcaactcttgtcagcctttcacccaccacaaataatattttgtctatatcagctcttagtaatctcatgtctttgaatagttacacttaacctgtaaaaccgtgtgtgtgtgtgcttgtgtatgcgtgtgtgtactcatgcattacccaacaatatctcttgtatttttgtcttat

SEQ ID NO: 124725 - DNA, 467 bp, Homo sapiens
ctccatccagattaccccatgcatgttgccagactaatttatctttttcttctcctgctgaaaacattgcagtggtgttctgttgccttctctattaatactaattccttatcctggcactcaaagacttccacaatccatccccaaactgtgttttcatttttattttcattggttccctctaaatatctagacttgtgaaatattagccttatgtattcttaaaatgcatttggatcattctctttccaacacttgaaatacacctttccttctctctgttaaaactgttcaactcttgtcagcctttcacccaccacaaataatattttgtctatatcagctcttagtaatctcatgtctttgaatagttacacttaacctgtaaaaccgtgtgtgtgtgtgcttgtgtatgygtgtgtgtactcatgcattacccaacaatatctcttgtatttttgtcttat

SEQ ID NO: 124726 - DNA, 614 bp, Homo sapiens
accacaatgaaataccactacatacagaagaattgctaaaattaggaagatggacaataccgtatattgggtagatcyatacagtgcttttgaaggtggggatgtattggtgcagccactttggaaaagggtttgatatcatctactaatgtcgaatgcatgaattcactatgatgtagcgattcctctcctaggcatacaacaaacagaattgggtgtgagaaggtgcagatttgtgtgtggatatttatactggcactactcttagtagccaaactagaaacaacccaaatgtaccacagtagaatggataaatacattgtggtgacttcatccaattgaatattatgtagcagtgagaatgagctacatctatacttgacaacataatgctgagcaaaagagccaggcacaaatgaatatgtagtacataactgtgtttaaatagcatcgaaaaccaggcaaaactcatctaggatattaaaagccagagaaagagttatcaagggaggggattgggcactgtgaatggacagaggcttggggaggcttctgaaacacaggtgacattctctttattgatttggaacaatacgtatgtgttcatttttgat

SEQ ID NO: 124727 - DNA, 576 bp, Homo sapiens
gagctacatctatacttgacaacataatgctgagcaaaagagccaggcacaaatgaatatgtagtayataactgtgtttaaatagcatcgaaaaccaggcaaaactcatctaggatattaaaagccagagaaagagttatcaagggaggggattgggcactgtgaatggacagaggcttggggaggcttctgaaacacaggtgacattctctttattgatttggaacaatacgtatgtgttcatttttgataattaactgagttacattcacgttcactttgtgataagtaactgagttacactgtgttcattttgtgataattagctgaatcagacacattatctgtgtactttactcaatataaattatgctttattaacaaaattaacttatttatttcccctgtgaatctccataccctaaccctaactaggaacaagtggccctccaggatgcaggatgaaaggtgagagtctccttggtctcccctttgatatacatccctgagattttattagtcatgttctgaattcagttattttcaaggagctgtttgtgacagctttagatagtc

SEQ ID NO: 124728 - DNA, 569 bp, Homo sapiens
tgagggcgtgggctgataagctgccacaagatgcatctgagcatcaygggaagtcctctatgagtgctgaatgggctgaagtgttgcactgagagaacgcttcctggacttagagaataaaacaaattggtaacgtgtaaaagttacatattaaagggatctcttcacaatgcccacgttataggtctgcatataatttttcagcatggaagttttcttgaagctgttgcgtttggacttacagatattatacacagttctccgtgaatatcattttgtctcatgtgccacactctgaatcatttgaagcacaaggacttgacttcaggaaagatttcccccaaagacttttatcaccttttaagaaaaatttcacccaagatacctttaatatgaggaaaactaagccaccaaatgtgacctctatttaccttctgtctgtctccttaccttaatcctcaccaaacccaacttcctctctcatcccgatcccttcctccagactaggaaatggctaaccttctccttgccaaagccaacccctccatctttgccctcaataacatcca

SEQ ID NO: 124729 - DNA, 569 bp, Homo sapiens
tgagggcgtgggctgataagctgccacaagatgcatctgagcatcatgggaagtcctctatgagtgctgaatgggctgaagtgttgcactgagagaacgcttcctggacttagagaataaaacaaattggtaacgtgtaaaagttacatattaaagggatctcttcacaatgcccacgttataggtctgcatataatttttcagcatggaagttttcttgaagctgttgcgtttggacttacagatattatacacagttctccgtgaatatcattttgtctcatgtgccacactctgaatcatttgaagcacaaggacttgacttcaggaaaratttcccccaaagacttttatcaccttttaagaaaaatttcacccaagatacctttaatatgaggaaaactaagccaccaaatgtgacctctatttaccttctgtctgtctccttaccttaatcctcaccaaacccaacttcctctctcatcccgatcccttcctccagactaggaaatggctaaccttctccttgccaaagccaacccctccatctttgccctcaataacatcca

SEQ ID NO: 124730 - DNA, 569 bp, Homo sapiens
tgagggcgtgggctgataagctgccacaagatgcatctgagcatcatgggaagtcctctatgagtgctgaatgggctgaagtgttgcactgagagaacgcttcctggacttagagaataaaacaaattggtaacgtgtaaaagttacatattaaagggatctcttcacaatgcccacgttataggtctgcatataatttttcagcatggaagttttcttgaagctgttgcgtttggacttacagatattatacacagttctccgtgaatatcattttgtctcatgtgccacactctgaatcatttgaagcacaaggacttgacttcaggaaagatttcccccaaagacttttatcaccttttaagaaaaatttcacccaagatacctttaatatgaggaaaactaagccaccaaatgtgacctctatttaccttctgtctgtctccttaccttaatcctcaccaaacccaacttcctctctcatcccgaycccttcctccagactaggaaatggctaaccttctccttgccaaagccaacccctccatctttgccctcaataacatcca

SEQ ID NO: 124731 - DNA, 633 bp, Homo sapiens
tttcctgtgtttcctatgggcccagttttgtcttgtccatgcagttgtaggtaattcaccctagtattagcatgggattaattcttaaggaaatatgaagcaagtcaaatatttttccaatttaagttaatcataggtttctgtttatttattcaattaaaattatatgttatattttaattaaaactaaaaaattacttaccacattttcagcatgttttctcatgttctcctaaaaattatgagaatgattgtaattatttcaatatgcagagtgagctggaatagaaaaaactgagtttatcatgaagctgagtatgaacctttaagttcaaagattgtaggcttcctcagaagctaacaatgagaaggggatatgaaattgtgataaacctgtctcaaaaacctcttacatgtgaccaagtagaaaattagcttctgcatgccctgcrtgatgtgacccatgagaggatgaggggacagatactgatcgcctaagctgaagtcatgtacttaggaaagatagccttagttcttaggtcagagactcaaacttgtttttagttgacatgttttgaccccatttccacttttaaaagacctatatttccaagcatagctgcccttactccc

SEQ ID NO: 124732 - DNA, 586 bp, Homo sapiens
tctcaccctgttgccttgactggagtgcagtggcacgatcatagctcactgcagcctcagactcctggactcaagtaatcctcctgtctcagccttctgagtagctggaagtacagatgtgtgccaccctgcctggccatatttcatcatttctaatacatgttgtttcactttttaaaattttatcctttaaaatattttaacatgtgccttatatcaatggcatctttaggcaggtggcatttgtgacatggctggcattaatcatasttggtttttatacctggtgccatgagtagacaactgccaccacttgtgtttcagtcaacaaactattttgttttgttgttgttcacttgaaaatgaagtaagagttcaagctcttgctgaataccaccttcagctggcaccttccaatgagcttatgaaagcaccaatatcaaaatatgcagaaagtgtgccagcagtttagaagaaaatgctgaagataaaagtaatgtattaacatttaagacatgcttcatcaccaatacccttcatgtaataaagcaggggctcaaactcaagcatgtgtcagaatcacctg

SEQ ID NO: 124733 - DNA, 618 bp, Homo sapiens
ggaatatatctaaaatctttctacctattatctacctgtgatctattgcttacactgtattatcagtcacatccatcatttttagtgttaacaggccaaacacagaactaaaaagaacattccatattccatctccccaccaacatgctgcaatttcttaagctctattgcagaccataggaatttattcccttcttcaagattgccaggaagaccatcccggttcagctcatgyatagtgtaagaatcctcacacaagcgtatctttaaaaggcatttaaattggcaaaatatataactttgtaacttagcaacgttagacttataatagacacattgtaagtaacaattaatgtctatagcccacgaggatattatacttggtataacttagatcctgaaagattaatttgcataatagactatgaccacattaaaaaaaaaaaaagacaattatgcctagcccaaagtactttatcataaaaacagacacagtcacgtgggaactaattttctatttggcttctttctgtaaatcaatatccgaagaagcctaaagtttcttaagctaaaaccagaatgaattacttcagggaatgagattccacacctgaccaa

SEQ ID NO: 124734 - DNA, 572 bp, Homo sapiens
catagtgtaagaatcctcacacaagcgtatctttaaaaggcatttaaattggcaaaatatataactttgtaacttagcaacgttagacttataatagacacattgtaagtaacaattaatgtctatagcccacgaggatattatacttggtataacttagatcctgaaagattaatttgcataatagactatgaccacattaaaaaaaaaaaaagacaattatgcctagcccaaagtactttatcataaaarcagacacagtcacgtgggaactaattttctatttggcttctttctgtaaatcaatatccgaagaagcctaaagtttcttaagctaaaaccagaatgaattacttcagggaatgagattccacacctgaccaatgttccctggctacaggacaggaaaatctttgttgtttattacaacatccaaataccatattaagcgcttaattgcgagtagtgttatgtgaaatactaatatgacaggacttggactttaaaaaagaacttgaataatatgaccagggcatgccttcagcacatacaaggcataattgcacttcata

SEQ ID NO: 124735 - DNA, 615 bp, Homo sapiens
gcttaagagagaaacttttcttttcaactagagataacataaacttgcattcagttcatgycactttattcatttttagaaaataccatctgcagtgcaaacaacttatctcttgtattctcagttgagtgtatggcctattaattatgctggccctgtgtaatcataataatttacatttcaattatattaagaacactgagtatcaactatttacatgctcacacaatgaagtatcacataatcctggtctacaagaagcttataatccaatggggaagcagagaagcccaccaggaagggtaatgaaagcaggtgggagtttcgagctggagttttggctctgtactaatatacatgtaattattttaaaattaatattaattgaccaaattttgattagttactcaccctttgccagacactaagaggatacaaggttaatgaaagataagctatagtgatgatagcggttgtagtggtttggaattataagggaccattattctacctatcacaagtggtacaggtaaaggggaaccatggaaagttattagaaagcgttacagggaaggtcatcagtatttagtctgggttagaagaaggaaaattgga

SEQ ID NO: 124736 - DNA, 557 bp, Homo sapiens
gtgctacagctgctctgactgctcggaaagtcaggtttttaaattatcaaaagtggccgggcacggtggctcacacttgtaatcccagcactttgggaggtggaggcaggtggatctcaaggtcaggagtttgagaccagcctgaccaacatggggcaacccccgtctctactaaaaatacaaaaattagctgggtgtggtggcatgcacctgtaatcccagctactcaggaggctgaggcaggagaatcgcttgaaccygggaggcagaagttgcagtgagctgagattgcagcactgcactctaccctcggtgacacagcaaaactctgtctcaaaaaaaaaaaaaaaaagtatcaaaagctagactgatctggtgaacatcaccttaatcaaagaatcaaagcttaatggccaggcgtggtggctcacacctgtaatcccagcactttgggaggctgaggtgggcaggtcacctgagatcaggagtttgagaccagcctggccaacatggcgaaaccccatctctactaaaaatacaaaaaaattagccaggca

SEQ ID NO: 124737 - DNA, 557 bp, Homo sapiens
gtgctacagctgctctgactgctcggaaagtcaggtttttaaattatcaaaagtggccgggcacggtggctcacacttgtaatcccagcactttgggaggtggaggcaggtggatctcaaggtcaggagtttgagaccagcctgaccaacatggggcaacccccgtctctactaaaaatacaaaaattagctgggtgtggtggcatgcacctgtaatcccagctactcaggaggctgaggcaggagaatcgcttgaacctgggaggcagaagttgcagtgagctgagattgcascactgcactctaccctcggtgacacagcaaaactctgtctcaaaaaaaaaaaaaaaaagtatcaaaagctagactgatctggtgaacatcaccttaatcaaagaatcaaagcttaatggccaggcgtggtggctcacacctgtaatcccagcactttgggaggctgaggtgggcaggtcacctgagatcaggagtttgagaccagcctggccaacatggcgaaaccccatctctactaaaaatacaaaaaaattagccaggca

SEQ ID NO: 124738 - DNA, 557 bp, Homo sapiens
gtgctacagctgctctgactgctcggaaagtcaggtttttaaattatcaaaagtggccgggcacggtggctcacacttgtaatcccagcactttgggaggtggaggcaggtggatctcaaggtcaggagtttgagaccagcctgaccaacatggggcaacccccgtctctactaaaaatacaaaaattagctgggtgtggtggcatgcacctgtaatcccagctactcaggaggctgaggcaggagaatcgcttgaacctgggaggcagaagttgcagtgagctgagattgcagcactgcactctaccctcggtgacamagcaaaactctgtctcaaaaaaaaaaaaaaaaagtatcaaaagctagactgatctggtgaacatcaccttaatcaaagaatcaaagcttaatggccaggcgtggtggctcacacctgtaatcccagcactttgggaggctgaggtgggcaggtcacctgagatcaggagtttgagaccagcctggccaacatggcgaaaccccatctctactaaaaatacaaaaaaattagccaggca

SEQ ID NO: 124739 - DNA, 607 bp, Homo sapiens
ggatagtctctgaggttgagcatttttgttcagtgatgaggcatttgaattaccaacatgcttaatgctatggaaatctatggaacccatttctttaagaaatggattcatatcttaataaagaacaacttttttattgtttaattgcygaaacaagatgtcaacctattaccctaagtaaccagttcaatcatagccattcacatcatctagtaccaagtgatatttttcacggaaatgaacatgtggaggaaaagtccttgactggaaaaaaaattgatatatataatcattacagagctgtatatttatataagactaactgtgagatgaatggagaaagctctgagattcactgttgagtagcttataatttccaagtcctctgctagacatgaaaactatttagtgtagaacaaaaatatgatgctgtatctcacaactcctatataaatgtttccattcctactttatttctgctttcattttcacggtgcatctacagtctctcttccagcctcccatttgtattttacaacatgcataattacagatttattctttaattatttcattttcatatgatttttatatctcttgaaagatt

SEQ ID NO: 124740 - DNA, 607 bp, Homo sapiens
ggatagtctctgaggttgagcatttttgttcagtgatgaggcatttgaattaccaacatgcttaatgctatggaaatctatggaacccatttctttaagaaatggattcatatcttaataaagaacaacttttttattgtttaattgccgaaacaagatgtcaacctattaccctaagtaaccagttcaatcatagccattcacatcatctagtaccaagtgatatttttcacggaaatgaacatgtggaggaaaagtccttgactggaaaaaaaattgatayatataatcattacagagctgtatatttatataagactaactgtgagatgaatggagaaagctctgagattcactgttgagtagcttataatttccaagtcctctgctagacatgaaaactatttagtgtagaacaaaaatatgatgctgtatctcacaactcctatataaatgtttccattcctactttatttctgctttcattttcacggtgcatctacagtctctcttccagcctcccatttgtattttacaacatgcataattacagatttattctttaattatttcattttcatatgatttttatatctcttgaaagatt

SEQ ID NO: 124741 - DNA, 636 bp, Homo sapiens
gtgtccttctttgtaggatccaaatctaaaaaaataaaaaataaataaaaagttattggcatgtaaaaaccattcagaaaggtatgttcttatgtaaaatttcaatcataaaataaaatagcaaatgaataaataaaaaagattcatgcatataggaaaggcaaactaaaattttaacccccaaagtcctctttccatggttatggataattccaaaagcacatctgtttaagaattattggctagcattgctgaaaaataagtccagattttctctttcatcttgagtttgaataatattctcttataggcaaaggggccattaagcctgaaatgctattcatgttacatttatgcatataaaaatctattttsgcagaacttctaaattgtctacatgtgttaatgtgctgcagattaactctttgcacatgaataactatttaattatacagctctggttgatatgatagaatacaaaagacactaggaagaaagctaagacttgcacataagaggccacttccttccttttcttcataagcaaccataatatctaacctctataatgtaagagacaggagacctgcttcctttgtcatcttaaaagaataataacaaggaatatcaaattta

SEQ ID NO: 124742 - DNA, 601 bp, Homo sapiens
aggtggtctactggcaatttaactatctgccacactattattctacatattctagagaaaaataatgtaatacagagtcactgcagtgtattgttcacaatatttggaatataataaaaattactagatatgcaaagacaaaagaaaaatgactaacaagcaagaaaagtaataatcaataccagtataccagagattagataagatataytggggttagcagagaagggcttcaaaaaatgttattattatattaaataaaatagagaaaaaatattggtaaaatagatgaaaagatgcatatttccaaaatgtaattagaatgtataaatatatgtaagtcaagtctatattctaaaactgcaaaatattatatctgaaattaagagctatttcaataaatgggttgtttacagcagacagtaaacttaatgatgtccattgaaagtattccaaccaaaacatgtagaaaaaaaaaggaaaactgataaaagagcatatattaaatacacaaaaggtctaacatacatgtgagacatcaacccacagattaaagaatttcaacaaaccacatgcaggctataaataaacaaaaactcac

SEQ ID NO: 124743 - DNA, 561 bp, Homo sapiens
taagtttcataaataaagaaaaaataaagcattttttagacaaatagatgctgagagaattcaccactgccaagataacactacaagcacgctaaaagaagttctatatcttgaaacaatacctcaacatacaccaaaataggacctcaataaagcataactcccacagggcctataaaacaataacacaatgaaaaacataccaaagtattcaagtaacaactagcataatgaacagaatagcacctcatatctcaatactaacggtgaacgtaaatggcctaaatgctccacttaaaagacacagaatggcagaatggataagaattcaccaaccaagtatctgttgtcttcaagaaactcacctaccatgtaaggtctcacataaacttaaagtaaagggatggaaagagatattttatgcaaatggacaccaaaagcaagcaagagtagctatattcttatatcagacaaaacacactttaaagcagcaacarttaaaaaagacaaaaagggaccttatataatgataagaggactagtccaacaggaaaatattat

SEQ ID NO: 124744 - DNA, 591 bp, Homo sapiens
aagtcaggattgaatccctggctgtgcagaggctaaacaaagcctagacatagggttacagtccactcccccaggacataaaacaagatggagccctgaagcgaagtttgctacagacggtacagaaagacgtgcaaaacacaccagattggctacagcttaaaaccagcctcataaatcctttttcataattaaaactctacagacaatataaatagtaatactccacatcatttctggcccagaaaaatgtcttccaaaagggggaaaaaaartcacttaaaagttacctcctgagagggtaaaggattcctgaggaaagaacctcttattcttatgcaagtggttcctccaccagggagaaaagtttaattgctgtagaatggagcagaactctttggctgggagagggggagactccatgagggcctggcggggaactccagctagccgtgcagggcccttgggccatttgtcccaacctggtcaggaagaggagagtgactgctcacctgtctgtcccaaaaaaggaaggaaaaggccatggaaaggctgggttggactgaaaccaacatttctgacacccaggag

SEQ ID NO: 124745 - DNA, 546 bp, Homo sapiens
ataacacctgggaaccctggtggccacctcttagtggaaacactatgcagaagagaaagcccacagagaggaaggcaaagctgggaaatggagtccaasccaaaacaacaactcctggacttttcaaatttgcaagaagatattatctttttttttttttttaaggcactttgaattaggattctgtcatgtgtgaccaaaagagtactgaacagagagactccaagaggagcagctgcaggggacagaaaaagggatcttcattgatgttctttaagaattaaaaggagggagtgtatatttagggcaacttgaatctatgctcctgggttgcagtccccaggcttggcccaaataaactctctctgctctctctctctctctctctctctatatatatatatatacatatatatgaatttaaaagaaaagattgaaactcctttcaatggtttttggaagctagactatgcttccgtgcatgtgacatttcaccaagactgtgtggtcttcccaagtgtggtcccaggatttagtagagtcatt

SEQ ID NO: 124746 - DNA, 586 bp, Homo sapiens
tggaacagtggtaaacataaggagtttgttaytcccgaaattatttccattctggatataagaatttaggaagtaactatgttttccccttttggtgtgtgtttagagaaacaatccttaactgacgtggaagttcagcatttagattaggagagggatctttagggacatattgagatgtgacctacatgcccacgtggcgaatggtggagggggcagccatctatgacaacttatatcttagatgggacaagaatggacagactgtgatggacccacagtaggagaagctggcagggttttcctgggtggaatccacacagccagctgagactggagcatggcagggcttgctctatccttcaccatgttacccctgacagcagcaaacactcctgagaagaatctcttaccacaataacgtattgaagataacctatttggagtaacaaatattagagaaaaatgttttttgctgttgctgttttgtggttgaggcccatcactctgaagaatgtgactgttccaggcaaatggaatttgaaggcacaattccaaaggggcaacagcatgaaacaggacttac

SEQ ID NO: 124747 - DNA, 609 bp, Homo sapiens
caaacaatccactgactcaagaagcccaatgagctccaattagaataaaaataaatccttaaatgaatacatcatattgaaagtacacaaaagaaaaaggacaccaaaaaggaaaatccctaaagaacagccagaaaaaacagagcagcagttagcttgacaactgactttctaagagcaacaatggacatcagaataccacagaatggtatctttaatacgctgaaagaaaaaatacctgtcaacctagaactttatactcagcaaaaataactcttaaaattgattaaaaaaagaaagatattttggggcaaataaaaacttcaaatatgttaccayagacctttcctaagtgaaatactaaaaaggatcctcaggcagaatataagtgttttcagatggcatgtctgagttgcaagaaggaatgaaaagcctaaagagttatatatggtttaatcactgattgtacaaaacaataataacaaattgccaagactaaagtcaaataacataaaaatataataacatcacaggtaaggaggaggcaaaaggagtccaagtgtcctaatttcttctattatgtaagaaaaggtacagctattaattaac

SEQ ID NO: 124748 - DNA, 447 bp, Homo sapiens
gagcaacagccacatgtatgaatatggatgaatcaccaaagacatacagggcaaataaagtcacagaagaaaaccagcatgagtccatttatgtaargttctaaatacagctttaaaatttttctaatgctttaaagtattgaatgctttaaaaaatttttaagttgcatttagggatatataatgagtggtaaaaaaacaacaggaaaacagaaaagcaagagaataattatcaaatttgggactgtggttatcttgggggaaggagagtgaacaaaagtgatgaagaaaggtacacggggtgcttcttcagtatgtataaatattttatttcttaacctgggtggtagtcacatgggtgtttatatacttacgtgttttataagcttttctataggtataacaaatgtcactaaaagtaaggacatagtgcttatgactcagccc

SEQ ID NO: 124749 - DNA, 555 bp, Homo sapiens
tccattactgtggagtactgatagtgctatgaaacaaactatccctcagaaaatggccatcacatgacagtgtttatggcctcaattgaccaaatgtcactcagtgatgccaagtcataagaaggcttctagagcagtcttcctggcaggaaaaatcactcatrtgttacagtcaaccataatcacaatcatagtagatttaagttattctaagtaagtagttgacaatattcaatgtgttctaaagattaaatatgccaaaacacattttcccttttaaaaacctgaaaatttgactgaaaatatgaatgaagcatgactattagagtgttctcaatcccagttttttgtattaagctacagaagtgtttgtttttggctactccaaccccttgcagcagtggtgaggcctctaggctggctcaccttatgcttcagtggctctgtgtggaggatgaggatgaattggatgtacacgatggaggatagaagaccaggtaggcacagtctagtagttcagaagtgaagaaataaagatttacaccaaaggaggat

SEQ ID NO: 124750 - DNA, 641 bp, Homo sapiens
cagctgcccgcttgcctgtagcagactcagcttcctcttcatctccatcctcttcctcaccatcaccttctttttcctcctcctcttcctccccactttcttccccttcttcatctacctcattgtcagcctcctgctccccattttcctcattagcattcccgttagcaggggcgtctcttccattttccgcgtctttcacaacttccttcttctcctttaagtccttggcaatgatttcagagctggtgtctacagctgcatctgacatggtggggcacgccggtgatctgatgcaggggattaaaaagaaaacgagagttcagggactccggcgataaagctgccagagtctgcggcggaggcagccgcggcgagcaaggagctggacaaggaacaatgcaaagatggcttttcagagcagccaatcgggatcttgaaactattraggcctaaaatcattagcactgttttctccctctaagacatatgtggcttttcactttattttcaactgaatgctttcgctgttttgggtttagcaagcttttggtcttaaaaatatccaacaatgcagttaagaggccagatgactttatgcatgaaacattgttaagatgaggaattttcccatagaaagg

SEQ ID NO: 124751 - DNA, 617 bp, Homo sapiens
atctgttcgattccctgctttcaattcttttgggtattgttgtactgtgaaatatatatttggtctttgttccaatttcctggcatacaactcctaagatccttggaatctccaaagtgatgtctttttgtgtgctaatgagttgccagatggctggcagctcctaggtagcttcaggatgggggctggtcaccagaaatgattagacggttgggacttttggccctagccccatcctttagagaggaaaaaggggctcaaggttaagttgatcaccagcggtcaatggtttaatcaattatgcctacctaacaaagcttctataaaaactgcaaatgacagggtgtgggaagtttctgaatagttgaactcatgaaagttcctggagggtggcatgcctgggaggrtataaaagctccacgtctattttcatctcttaccctaggcatcttttcatcaataccctttgtaatattctttataataaactggtaaatgtaagttaaaagttaagtgtcttcctgagttctgtgagccactctagcaaattaatcggaccagaggtggggatcccccatttatagccagtcagtaagaagtgcaggtaaagcaacctg

SEQ ID NO: 124752 - DNA, 618 bp, Homo sapiens
caggttgctttacctgcacttcttactgactggctataaatgggggatccccacctctggtccgattaatttgctagagtggctcacagaactcaggaagacacttaacttttaacttacatttaccagtttattataaagaatattacaaagggtattgatgaaaagatgcctagggtaagagatgaaaatagacgtggagcttttataccctcccaggcatgccaccctccaggaactttcatgagttcaactattcagaaacttcccacaccctgtcatttgcagtttttatagaagctttgttaggtaggcataattgattaaaccattgaccgctggtgatcaacttaaccttgagcccctttttcctctctaaaggatggggstagggccaaaagtcccaaccgtctaatcatttctggtgaccagcccccatcctgaagctacctaggagctgccagccatctggcaactcattagcacacaaaaagacatcactttggagattccaaggatcttaggagttgtatgccaggaaattggaacaaagaccaaatatatatttcacagtacaacaatacccaaaagaattgaaagcagggaatcgaacagata

SEQ ID NO: 124753 - DNA, 582 bp, Homo sapiens
taacatgattatttctgtatgtgtgtgtacragcatatgtttatttttgctctaaatagcacctgcctatggcaaacatatttttccctcactggtagagtaaatttgcctttactgacttttgctgagccactgtaaaaagaatgtttcccctgaataaaagatttttccatgtccttgctcctgacaataaaatcacgaaggcagttgcacacaactaaggcagaagcagcccaaggtccccatgtgcctgcacagacacctcctgctggacacctaggatcttccctctgtttctcccttggaagcatcaactgtcaatgagcacctggcctgggttcatccaggatgacgaggcaaggctaaggaattgcattgtgatcactattgtgctcaggggccagggcaactaggcacgtctacacattgcagtataaacagaataagcagccttgaggcagcagttggcttgggccagccctggctgaggaggtatcacgtggtgcgactccttctttcccaggggtgcactggctctcagttaaagcagtggtttatccctccagggatgagtcaagctct

SEQ ID NO: 124754 - DNA, 582 bp, Homo sapiens
taacatgattatttctgtatgtgtgtgtacgagcatatgtttatttttgctctaaatagcacctgcctatggcaaacatatttttccmtcactggtagagtaaatttgcctttactgacttttgctgagccactgtaaaaagaatgtttcccctgaataaaagatttttccatgtccttgctcctgacaataaaatcacgaaggcagttgcacacaactaaggcagaagcagcccaaggtccccatgtgcctgcacagacacctcctgctggacacctaggatcttccctctgtttctcccttggaagcatcaactgtcaatgagcacctggcctgggttcatccaggatgacgaggcaaggctaaggaattgcattgtgatcactattgtgctcaggggccagggcaactaggcacgtctacacattgcagtataaacagaataagcagccttgaggcagcagttggcttgggccagccctggctgaggaggtatcacgtggtgcgactccttctttcccaggggtgcactggctctcagttaaagcagtggtttatccctccagggatgagtcaagctct

SEQ ID NO: 124755 - DNA, 582 bp, Homo sapiens
taacatgattatttctgtatgtgtgtgtacgagcatatgtttatttttgctctaaatagcacctgcctatggcaaacatatttttccctcactggtagagtaaatttgcctttactgacttttgctgagccactgtaaaaagaatgtttcccctgaataaaagatttttccatgtccttgctcctgacaataaaatcacgaaggcagttgcacacaactaaggcagaagcagcccaaggtccccatgtgcctgcacagacacctcctgctggrcacctaggatcttccctctgtttctcccttggaagcatcaactgtcaatgagcacctggcctgggttcatccaggatgacgaggcaaggctaaggaattgcattgtgatcactattgtgctcaggggccagggcaactaggcacgtctacacattgcagtataaacagaataagcagccttgaggcagcagttggcttgggccagccctggctgaggaggtatcacgtggtgcgactccttctttcccaggggtgcactggctctcagttaaagcagtggtttatccctccagggatgagtcaagctct

SEQ ID NO: 124756 - DNA, 551 bp, Homo sapiens
gagtcaagaaagaggaaggaaagagtgggaaggataggggaagagaaagagggacaggacacagataaatgactgaaaacacaaacacagctattgcctcatgctgagtttaacccactttctgttagaaaactgaatttaggccaggcgcagtggctcatgcctgtaatcccaacactttgggaggccaaggcgggcagataacctgaggtcaggagttcgagaccagcctagccaacatggcaaaaccctgtctctactaaaaatacaaaaattagctgggctacttgggaggctgaggcaggagaatcacttgaacctgggargtggaggtcgcagtgagccaagatcacaccactacactccagcctgagtgacacagtgagactccatctcaaattaaaaaataaaataaaataaaataaaataaaataaaataaaataaaataaaataaaattgaatttagccatattccaaccatcatccactagaatagccaatatcagcttcagccagattacaaatgaatgaaagatccagagtaaaaagt

SEQ ID NO: 124757 - DNA, 620 bp, Homo sapiens
aaaaaaaaaaaaaaaaaaagaagaagactttttgaattaaagaaagatttacatctcctctcattaatagcactattgatttttatttgatttaacacattatttcattgttattacaaattatgtgttttaaatgcctattttgatgtataattctataatgtacacttagttcagtagtacatgtgtattacttgtatttatcatgtgtgaatatatatatatacacacatggtatgtgctcaaaatattttacagattagagtatgtgaaaaaaatttgaagaccactctgcataataaatgtgcaggggctgrcccatgagacatgttcagtaaatgcttgtttccatcctctttctccctggaaataaagtcgatagtgtgtgtgtggaccttgcttattaaaggaaagtggctgatttgatttctggaacaaggtgcatctcaaactagctggcagcactacctcggcctggccccatcccagctgttcacaccgagttccagacatttgtaggagcccggacgaggccagctggctgcctatcagtggccttcttctgtcagcactacacagttgtcacggctcacatccaaccgccagacagccaagaagga

SEQ ID NO: 124758 - DNA, 531 bp, Homo sapiens
atgtgcttttttgatgtttgaaatttatagtctctgttgaatgttggccaggacagcacttcgtcatttgaacaatttccattttccacaagctctctgtgattgatgacctaaccaggcacatggcattccgttccaccagsaatgtggccagtggggagatggctatgtcagtaacacctgtttgtggtagaccaacaatggcgccctaaaagatatatccgcatcaaatccctgggacctatgtgtgtgaccttatttggaagaggggtttttttttgcagatgcaattaggaatcttgagatgcagagaacatcctgtgctatccaggtgggccttaaatgcaatgacaactgtcttcataagagacgtatagggagatctgacagatagaaggggagaaggcaatgcgatcaccactaggtagaggttagagggatgcacccctaagtcagggaatgccagcagctgccagaagcttaaagaggcaaaggatgaattgtcccctagagcctccaaagggagtgtgg

SEQ ID NO: 124759 - DNA, 517 bp, Homo sapiens
agccagacattagaaataatggggtcagggcaccacttacatggtattaatagccagaggtcttgaatcttcctccagactacagtgaagagagatacacatgttatctacctggtgatagataccaaagggaagcaaagtaccacactgaagcaaagtaccatggaaggactgctccccacttttgatgcatgataaagaccaacctgcctgcakgaagatgatggtgcacttctcctgaacttcaccatcatgatcacagtcaaagccagtgatgatggagtataatcacaccagtaaatgaagttcccctgctgtcttctgactcacttctaagtggcctggaccctggtggttaagaaaagtaaacccccaaagcagtcagtcattgtcggtttgctaacttgagcatcctgaaattaaaggactaagtactttaactgggtcacctctattagtgggtaaaaagctgtgtggtctttgttcacttccttaaaatgctgctatacgtgatggc

SEQ ID NO: 124760 - DNA, 538 bp, Homo sapiens
gtacagtcatcatagttattactttcaattcaggctcctattgtctcttgactatactcttataatagtctccttgcctgcagtcttcacacagcaacccattctcagtaaagtatccccagtgagctttccaaaacatcttcctcttttacaccctcaagtggctccctgtcacctgcaggggaacatctgacatgctgaactagacccaacctggagcttatctcatctccccagggccatctcccacccccctccatcttgtacatccttctccaaaacagggtgtctcccagaactctaaacacactgcgctcttttacacctcctggcctttgcacagcttgttctctctgcctatatactacctcccccctagcccccattgagagcctatgcatccttgaarttcagttcttatttcatctcctctgagatgccttcctggacccttctctggcagttcccctagatcccaagaactgcctccttatccttactgattcttgagctcacccctgtcatcaaactgtatcaa

SEQ ID NO: 124761 - DNA, 525 bp, Homo sapiens
aacccaccaggaacactgatcgtcactgaagaaactgcactttccttcgtttgattcaatgcttctctttcagccttgggctgatgggagtcaggcccacacactcccacagagggtgctctaattctcagagggacaggaggccccgctgcaggggcctttccttccctgcctcccagctgcagaagaggcttgagttgtgcactttgcaagctgagagaaagtgaaggcagaggsgtcattcccagggatgagccagtccttccagcagtccagcaatcttggggctggagggcagatttccacggtgcacacagagagaaaccaagagtacagggaccaagctgtggttacacagggagtcagggtgaagccacggccagaggccaggtccaggctttccctggcacaaggcagccaggcaggatttgtacttctcagaaatggaactggccataaaggaggttgccatgaaggtagatgccagaaggtgagcagagtgaaacagttccaaggccaggtgag

SEQ ID NO: 124762 - DNA, 589 bp, Homo sapiens
ttgggttggatgaccatccctgtaccaatcaatgtaaccagtggttaaaggatggagtaaaaccttctaataataggtctttgtgcaaacatacagtttgaatggcagaagaaacaaatccttcaggaggcttccaaggtattccaagaagggtgaggtgatttgttcccaagatacagagtaaaaatggtaggtaagaagctagaatctaaggctttttctttcaaagcaaatgcgttcttttctacttcatgcaattattaccatccaaagaatcacttcaccattttacgaggttaatctcaccaatttgtccttcacatagtaaccttatctgcacctccatgccgtcatcartttggtcttttattcttcttggtccttgggtctttatatttttcaagatgtcattcatgcagagtaaacccattaagggtccccttgtcctccaatattctaaagcacatatattttacttatatcattttttgtggttttatattaatttgaattccttattattgtgtgcctgtggatgcaccctttttccccttttctttctccaagctgattataagccttttgaagt

SEQ ID NO: 124763 - DNA, 589 bp, Homo sapiens
ttgggttggatgaccatccctgtaccaatcaatgtaaccagtggttaaaggatggagtaaaaccttctaataataggtctttgtgcaaacatacagtttgaatggcagaagaaacaaatccttcaggaggcttccaaggtattccaagaagggtgaggtgatttgttcccaagatacagagtaaaaatggtaggtaagaagctagaatctaaggctttttctttcaaagcaaatgcgttcttttctacttcatgcaattattaccatccaaagaatcacttcaccattttacgaggttaatctcaccaatttgtccttcacatagtaaccttatctgcacctccatgccgtcatcaatttggtcttttattcttcttggtccwtgggtctttatatttttcaagatgtcattcatgcagagtaaacccattaagggtccccttgtcctccaatattctaaagcacatatattttacttatatcattttttgtggttttatattaatttgaattccttattattgtgtgcctgtggatgcaccctttttccccttttctttctccaagctgattataagccttttgaagt

SEQ ID NO: 124764 - DNA, 551 bp, Homo sapiens
cctgctttattcagaattccaaccctcaggaagatttttttcagctctagagcaaacttggttaatctaaattagtaatgtattaaaacatgtttagctaacttttcagagggtatgaaagcctaatttgtagcactttccagtttttgtggtgtaaatacttccatggtggtcattttcaggcaagtgacatcaattggttagcaaaattcctgaaaacttagcaatgtgttctcatgagccagcataacygggccctagcatgccactggaaaccaattataatcatcccactgcccctgaaagtgattcatgtagaaacaggcatgtgaacgcttctagccagttaactgtgatgagatgtgaggaagagctgagaaaggttttcttagtcatagaaagaagctcataggaaagacagatctttctccctccatgggacaagctcatattattacatgacacatggagccacgttagccctaactttcactcctactccatcagtctcaagcaagcctggatttcggtgaccaatttaggcatgaact

SEQ ID NO: 124765 - DNA, 550 bp, Homo sapiens
gagatggagcatggtagcttgactcagaccctgagggatgggcagagactggatgtggtgcgaggcgaggacagcaggaaggataacgtaagcaggaagagggcctgggcagacaggagcaccgcctgctttagggacaagctggagatcttccctgctccaacagaaaggtaaagaataaagctggttttgtgaagtgggcatacgagctagctagaaaaggtcacgcttggtcatagaggctacaggaagtcaccaaagctaaatgagcagagaagaaatatggtgaaacaggtattttagtaaacttcatctagtgatagaawcagatgagataggagaaagaagaggctacaggcagtgaagccatttaaaatcttatttttgttatctaggtattaatttataagggctggaccggaatgaaagccactgtgagaacagtgatatttacaaagaagtgatatttataagaaataaatggcagaccttggtaggtgattagatctgaaggacacaggaggaaaaaaagttagagctgacgtatttc

SEQ ID NO: 124766 - DNA, 573 bp, Homo sapiens
gaaaatctgagatgctttcattacattttatttatgtttgtgtgaaaccagtatatttttgttctatatgaaaatgtatgtcataaacattcagaaattcagaggagttcatccgaaaggctgacatggtacaccgtggaccgaagcctctggggcaaaatgttttctatgtatcattcgttgagtctcagtttgaagaagtacttacacatttgttctctttgtattttgctatccaaatgtttgctcataaattccaatgtagtaaataaggacagttttgaaagtcagaaactctaaatttcaaaaaagctttatttttctttgggtttgttttcrtatgtagtctattgtagtctatgcagtgaactttgtcttatatgcttaaaagggcactgatatttggtgggcattggggggcggggagttacctaaccagtactgaaaagttactaaactacctgacacagctgaaaccaggaaggaaggctgtatcaggaagagactgaatatagtccttaggtggattttagtattaggtgacaaattaggttgtattggactggcactgtc

SEQ ID NO: 124767 - DNA, 573 bp, Homo sapiens
gaaaatctgagatgctttcattacattttatttatgtttgtgtgaaaccagtatatttttgttctatatgaaaatgtatgtcataaacattcagaaattcagaggagttcatccgaaaggctgacatggtacaccgtggaccgaagcctctggggcaaaatgttttctatgtatcattcgttgagtctcagtttgaagaagtacttacacatttgttctctttgtattttgctatccaaatgtttgctcataaattccaatgtagtaaataaggacagttttgaaagtcagaaactctaaatttcaaaaaagctttatttttctttgggtttgttttcgtatgtagtctattgtagtctatgcagtgaactttgtcttatatgcttaaaagggcactgatatttggtgggcattggggggcggggagttacctaaccagtactgaaaagttactaaactacctgacacagctgaaaccagraaggaaggctgtatcaggaagagactgaatatagtccttaggtggattttagtattaggtgacaaattaggttgtattggactggcactgtc

SEQ ID NO: 124768 - DNA, 479 bp, Homo sapiens
gtaaatagagttttaaaaggtcaattatatcagacgatgtaaaaaggtgtaagaataatattttgaagcaatgtttaaagaaatatatgaaaaataacttctcttacatattgatccacacagttaagcaaagtttggaaacaagtcatccaaattacctaattctatgtagaaagaaaaagggctacatctgcttattttggtgaaaaagaagtaaactgacaagcaaggtgacratgtcttgtttataactgtgatgttataaaatgaggaccagcttgcagttactaaaatagcaagtgaccttctgcagctctgatttcaaccactcagcgggttttttttccaccaaagcggcttattttacctctcactagatagacatttcagcaaatggcgctctccaaaggctacaatgtctcagacacggattgcacgggtagtttcattagaatgccacatcctgggagtggggaaag

SEQ ID NO: 124769 - DNA, 520 bp, Homo sapiens
tttcttttcttattttgcacttgaaacattaagttactgagatctttcacatggccttacctcagtgatatttaaaataaatacataaataaagcaaaactctgggagggagcagtgcatggtagctttatacattgtgtggctggatgtttacttacaaaaatgtcaataataaatcagtccaatatttactgagcatgctgtatatgttctctaaaataataaaggatattgatggaggataacatatgctaatgatgctaataatctaattaatgaaattaatacatggagaaatcaggataaattatgagggtaccaaatatgaattcaatacaaactgaaatagtttcattggagatgaaggcatttttgttgattctgaagatcgtgcaggatttaattaggmcgaagggaaaggcaaagggcatttctgttggcagaagggaaatgaaaaaagattggaggcctgggatgattgtggattgtgatcattgagacaataacttggctataatgt

SEQ ID NO: 124770 - DNA, 546 bp, Homo sapiens
aaaattaaatctatttatttgatggcattcctttcttttttttttttttttttgagacagtctcactctgtcgctcaggctggagtgcagtggcacagtcttggctcactgcaacctccgccttcggggttcaagcgattctcttgcctcagcctcctgagtagctgggattacaggtatgcaccaccacacctggttcatttttatatttttagtagagacagggtttctccatgttggtcaggctggttttgaactcctgacctcgggtgatccacccgccttggcctcccaaagtgttgggattacaggtgtgagccacggcrcctggcctctattattcttttattgttctttttaagtagcctactatgatgtttgatgcagttgctaaggaaggattcctaactagactaggaatggaattaaatttcacatattttaaataaagcatgtgcaatagtgtgcaggataaggtagatataaaaattgctaaaggtgttgtcctataagaggacagtttatggatcatttaattcttgactt

SEQ ID NO: 124771 - DNA, 602 bp, Homo sapiens
ttccaggagaaaaagtaaagcgccaaggtggcaccatcattggtggcattttaaggcatgaaaggagagtaggtttagaatcttgatacttaaaaaacttgaaggtttaaaaaaatttggctgggtgtggtggcacacgccactttgggaggccgaggcggttggatcacgaggtcaggagattgagaccatcctggccaatgtggtgaaacccggtctccaccaaaaatacaaaaattagctgggtgtggtggggggcgcctgtaatcccagctacttgggaggctgaggcaggagaattgcttgaacccgggaggcagaggttgcagtgagccaagattggaccaatggactccagcctgggygacagagtgagactctgtctaaaaaaaaaaaaaaacatttaattaatgatgatttaaattttgtcagtattgggctgtttaggaataagaaaattctggcctataacttgccagcatctacttttagcaactgactttctttaggattttcatcttatagtgaatttttttattgtaactttaaaaaaatccatctgctaaattagtcacaaagttcttccaaatattatggtggag

SEQ ID NO: 124772 - DNA, 612 bp, Homo sapiens
gaatcaaccaaacgatctgaggagatgaacttcaaagttcaaagtcagcacaggcttcagtcattcttctaagtcaggatattctctttccatggctacccttagattcccattgcattttcattaacgtgacataaccttagactacactaattccttgtggatgcaggtgtgtggttaggacatctacatggttagcaggagcttaggaagaataacgggaaaagagagagccccgcgggggacgggatataactttctggccagccagaaatacgaagaaagagagagggagattgtgaacttcagcaaagtaactatagactcctctacatcctaggagaattagaaaggatttatcagcatagagctatgggcctaaaaccacccagaggtgtggtgtggcccatgattcctggaaagcttgcatgtaaagcacatggtgaggcacaagcacttgaacatgttttcagaagtgaattgaaggcatggtactcgctgagtgttagttgtgagaaaataaaaagcaacatyctctctaagcctgcatatggtgagctgagtgggctttgcctctgagggatatcagcagttctctatggcttcctgttg

SEQ ID NO: 124773 - DNA, 597 bp, Homo sapiens
aactttttgaatgactgtttctgactgttatttctccattttctgtgtgaatgagagtataaccactgagctcattttgctcaccaactcttactgtccttttgttttttcacacattactcaytaagagccatttataagattgttatatgggtgccttttcctgtagggttttagtaagatctggggccccaaatggctaaataggattaggtcatgtgagacagctccctggtaaagccactataattactctcaaacttgactacaatttacaaactcctttccatattcttgactccttgatgtaaaggcaccttcatcttctgtgttcttgttccatcacactttcttgggtttccagtactcccccacctcctttgcagttgattccttctcctcagcctactaacaaatttaggttgtttctatacaaaggaaacaaatagtctttttcttgatttacctagctttcaagctaccactccaacccttcacctccaaattaattgaaagagcaattaacatttgatctttagcccatggggtgtgccccatcacttttctgaaactccactacaactgctaactcacttg

SEQ ID NO: 124774 - DNA, 352 bp, Homo sapiens
acttatacaaataatacttaagcatttatatgaaattgaaaaatggacacaaccaaactatatttttaatgaaaagatataaacacataaacatacctattcatatatacgtagtaaacaattaaccttgctaaaagagagctctggccttttcccttcgccctgggaaatcatggctaagttcttggaatgtcctgtttgatatgagtgtcactgtttacctgggcctcttggactgcaccagatargctatgctaacaatgtgatttatgtcagaggccttgggccacgcgctatccaagtgatttttggtgaagctggagacaaaggccttgcatatagtcaacgtgtt

SEQ ID NO: 124775 - DNA, 352 bp, Homo sapiens
acttatacaaataatacttaagcatttatatgaaattgaaaaatggacacaaccaaactatatttttaatgaaaagatataaacacataaacatacctattcatatatacgtagtaaacaattaaccttgctaaaagagagctctggccttttcccttcgccctgggaaatcatggctaagttcttggaatgtcctgtttgatatgagtgtcactgtttacctgggcctcttggactgcaccagataggctatgctaacaatgtgatttatgtcagaggccttgggccacgcrctatccaagtgatttttggtgaagctggagacaaaggccttgcatatagtcaacgtgtt

SEQ ID NO: 124776 - DNA, 642 bp, Homo sapiens
cagcatgtatagatttatgttgacttatcttaatgtagacaaagcatactcattacattgcttaatggatgatagtacccataaaaatgtcaatattatctttggatttcagatatgaaatgtaaggtaatctacaaaagtggaaatgtggttagaacagaaatgatgaagtgattgcacaacagtttaagacagaacaaatatttcaacactctcaaggccataaagagcaggggattgggacaaataaatgggcaagaagggaccacaatgatcctagtggtccacaagctaaccatgtattagggttttttttgagactcaatatttggattttagaaaagactgcatcagacaggaatttttaagtaaccattctcaacaggggaatagtgacaatagcttcaagctttgacgttttaygggccaagtgtggaattatgtttgctactttcctctctgtttcatagtggcatgttaagtttgcaaccaaaaatcacaggagctgtaacttttctttcattttacaactcagcgtaaacctgaataaaagtaaaagttaataacagggcaaagcaagccttaataaaattcaacagatccttctggatacatgtacttcttggtgattattatttgctt

SEQ ID NO: 124777 - DNA, 555 bp, Homo sapiens
ctgttgtttgcttgtatgtgtgaagagagaaaagaaaagccaatgcttaatacaacacttgcaactcacatttactattgtatrttcataaatattaatctggagagataattagctctataaattttacaattagcctttcagaagagaagtggatgctaataaaataaggcatgctttcaagctgcaccactgcaaatgcttttactctcacaactctgaggcagggcctgtctttgtttaatcttttcctgaaataggcttgctttacacttattccctttctcccttgagacaataacttgcaacagggaaaataggtttctattctcaaaatctggttaccatctattttttaatttttttcttttttctctggaatatcctggaataacaaaaaggccatgtttgaccctctaggagactgctccaattcaggccaaatgaaacttacatgtttcagagattgcttgggtgaaatcaagatgtttgcatttgcgtgctcttctgtatgcattgatttgaaacacataccctagtccttaaatctgagac

SEQ ID NO: 124778 - DNA, 555 bp, Homo sapiens
ctgttgtttgcttgtatgtgtgaagagagaaaagaaaagccaatgcttaatacaacacttgcaactcacatttactattgtatgttcataaatattaatctggagagataattagctctataaattttacaattagcctttcagaagagaagtggatgctaataaaataaggcatgctttcaagctgcaccactgcaaatgcttttactctcacaactctgaggcagggcctgtctttgtttaatcttttcctgaaataggcttgctttacacttattccctttctcccttgagacaataacttgcaacagggaaaataggtttctattctcaaaatctggttaccatctattttttaatttttttcttttttctctggaatatcctggaataacaaaaaggccatgtttgaccctctaggagwctgctccaattcaggccaaatgaaacttacatgtttcagagattgcttgggtgaaatcaagatgtttgcatttgcgtgctcttctgtatgcattgatttgaaacacataccctagtccttaaatctgagac

SEQ ID NO: 124779 - DNA, 616 bp, Homo sapiens
gtggggggttttgacaatattttacagcctatattaatgctaagaaactgcacatttggaaataatattacaaaaattataaaaataacaacatagataatgttcagttgtcttccatgttacaaaatgaaaaataggtgtaaaattgataatccattaatatcaggttaaaggaaaaattgaataaatgtcaaaaataaatccagattcaagatactttgatattgttttcatccaaaaattacaaagatttatcataactgtgctagttaaggtgcacatttttcctattccccattatctagcttccattttacatagatgtgtgtgtgtgctttattctaatattttgttcatttccaagttttacaattcaaaatattattcargcagagacatactgatgatctttccaatattaccaccttttgggtaactcgtaacaattttgtcatgcctttaatttaaaaagacattaaagttgtgtatacattgtaacatgcatatctgttaaaggaatatttgttcaccaacaaatatcatttcttctctcatcatgtttcactatcagatttgttcagcgatgtttatagaactaatattaatacatttggga

SEQ ID NO: 124780 - DNA, 616 bp, Homo sapiens
gtggggggttttgacaatattttacagcctatattaatgctaagaaactgcacatttggaaataatattacaaaaattataaaaataacaacatagataatgttcagttgtcttccatgttacaaaatgaaaaataggtgtaaaattgataatccattaatatcaggttaaaggaaaaattgaataaatgtcaaaaataaatccagattcaagatactttgatattgttttcatccaaaaattacaaagatttatcataactgtgctagttaaggtgcacatttttcctattccccattatctagcttccattttacatagatgtgtgtgtgtgctttattctaatattttgttcatttccaagttttacaattcaaaatattattcaagcagagacatactgatgatctttccaatattaccaccttttgggtaactcgtaacaattttgtcatgcctttaatttaaaaagacattaaagttgtgtatacattgtaacatgcatatctgttaaaggaatatttgttcaccaacaaataycatttcttctctcatcatgtttcactatcagatttgttcagcgatgtttatagaactaatattaatacatttggga

SEQ ID NO: 124781 - DNA, 536 bp, Homo sapiens
gtacctaatctgtgatatgacagctgagtagaaattgagtcagtatagctgaaaagagatcttatttcaggcagacaaatcacaagtgcaaaagacatgaagcatgtgtaagcatggcagatagaagagaatgaaagtagtattgtaagtgaagagagcacagttttatacaacctgaagctggagaatttggttggggccaggccatggagtttaaaaaccaaagagaggaattgtgaattgatcctaagaacagtggaaataattctaatcacaaagaatcatgattgggtgtatgacacaattacataagttttgaaactatatctctgactaattgtaaakaattcagattagatgtagtcaggaggtgctttcagtagtccaaatgagaaacaacaatggattgagcaaggaatgtggtgcaatcagaacgatgtaatcagaattaaggtatttaagatactgaatgtacttactgataaccaaatatgcgacaagagtaagtcagagattcgcaactcacttacacaatt

SEQ ID NO: 124782 - DNA, 536 bp, Homo sapiens
gtacctaatctgtgatatgacagctgagtagaaattgagtcagtatagctgaaaagagatcttatttcaggcagacaaatcacaagtgcaaaagacatgaagcatgtgtaagcatggcagatagaagagaatgaaagtagtattgtaagtgaagagagcacagttttatacaacctgaagctggagaatttggttggggccaggccatggagtttaaaaaccaaagagaggaattgtgaattgatcctaagaacagtggaaataattctaatcacaaagaatcatgattgggtgtatgacacaattacataagttttgaaactatatctctgactaattgtaaagaattcagattagatgtagtcaggaggtgctttcagtagtccaaatgagaaacaacaatrgattgagcaaggaatgtggtgcaatcagaacgatgtaatcagaattaaggtatttaagatactgaatgtacttactgataaccaaatatgcgacaagagtaagtcagagattcgcaactcacttacacaatt

SEQ ID NO: 124783 - DNA, 559 bp, Homo sapiens
acattagctagattaaccaagaagagtgaaggttcaaataagctcaattagaaatgaaactggattacaactgacaccacagaaacacaaaagatcatctgagagcactatgaacccttctatgcacacaaactagaaaacccagaggaaatggattcattcctgaaaacagacaattctcttagattaaatcaggaaaaaatagaaaccccaaacagacaacaagcagtgagattaaattagtaataataaaaaaattttccaactaaaaaaaaaaagaaaaaaaaagtccagactaaatagatttatagctgaattctactagacattcaaagaagaattggtaccaatcttatttaaattacccctaaagactaagaaagagggaaccctccytaaatcattctatgaagccagtatcatgctgataccaaaaccaggaagttacgtaacaacaacaacaacaaccaaaaaaactacagaccaattcctgatgaacatatctatgttcatctatgcaaaaattctcaaccaaatactagctaaccaaatccaacaa

SEQ ID NO: 124784 - DNA, 597 bp, Homo sapiens
gagcaactgcttaatgcatacaagcgttcctttacggatgataaaaaaattttggaactagatagagttggtggttgcacacacatggtgaatgtattaaatgccaccgaattattcatttttaaatggctaattttatattacatagatttcccctcaattgaagggaaaaacagacggtttcagccagcactcactttctatgctttgcctttcctctttttctgacagggatgaggatgtgatgcctagaaaggcagcagccattttttcagcgtaaggacagaataatagtaacaataacagctaacacttatagagcacttaatatagagccaggtactgttttaagctctttgcatacatctrgtcatttaatatttacaacaattctataaggaagatactgttattcccacatcataaatgagaaaacaggtacggagaagaaaaatcatggtccatgctaaggatggcagagtgaaatctagttgaagcctgaaccctccatgcgccatggaaactctgtagcagccctggattcctaccttggtcttcttaagtatttgaaaaaagcactccctatttaattaaacc

SEQ ID NO: 124785 - DNA, 597 bp, Homo sapiens
gagcaactgcttaatgcatacaagcgttcctttacggatgataaaaaaattttggaactagatagagttggtggttgcacacacatggtgaatgtattaaatgccaccgaattattcatttttaaatggctaattttatattacatagatttcccctcaattgaagggaaaaacagacggtttcagccagcactcactttctatgctttgcctttcctctttttctgacagggatgaggatgtgatgcctagaaaggcagcagccattttttcagcgtaaggacagaataatagtaacaataacagctaacacttatagagcacttaatatagagccaggtactgttttaagctctttgcatacatctggtcayttaatatttacaacaattctataaggaagatactgttattcccacatcataaatgagaaaacaggtacggagaagaaaaatcatggtccatgctaaggatggcagagtgaaatctagttgaagcctgaaccctccatgcgccatggaaactctgtagcagccctggattcctaccttggtcttcttaagtatttgaaaaaagcactccctatttaattaaacc

SEQ ID NO: 124786 - DNA, 597 bp, Homo sapiens
gagcaactgcttaatgcatacaagcgttcctttacggatgataaaaaaattttggaactagatagagttggtggttgcacacacatggtgaatgtattaaatgccaccgaattattcatttttaaatggctaattttatattacatagatttcccctcaattgaagggaaaaacagacggtttcagccagcactcactttctatgctttgcctttcctctttttctgacagggatgaggatgtgatgcctagaaaggcagcagccattttttcagcgtaaggacagaataatagtaacaataacagctaacacttatagagcacttaatatagagccaggtactgttttaagctctttgcatacatctggtcatttaatatttacaacaattctataaggaagatactgttattcccacrtcataaatgagaaaacaggtacggagaagaaaaatcatggtccatgctaaggatggcagagtgaaatctagttgaagcctgaaccctccatgcgccatggaaactctgtagcagccctggattcctaccttggtcttcttaagtatttgaaaaaagcactccctatttaattaaacc

SEQ ID NO: 124787 - DNA, 597 bp, Homo sapiens
gagcaactgcttaatgcatacaagcgttcctttacggatgataaaaaaattttggaactagatagagttggtggttgcacacacatggtgaatgtattaaatgccaccgaattattcatttttaaatggctaattttatattacatagatttcccctcaattgaagggaaaaacagacggtttcagccagcactcactttctatgctttgcctttcctctttttctgacagggatgaggatgtgatgcctagaaaggcagcagccattttttcagcgtaaggacagaataatagtaacaataacagctaacacttatagagcacttaatatagagccaggtactgttttaagctctttgcatacatctggtcatttaatatttacaacaattctataaggaagatactgttattcccacatcataaatgagaaaacaggtacggagaagaaaaatcatggtccwtgctaaggatggcagagtgaaatctagttgaagcctgaaccctccatgcgccatggaaactctgtagcagccctggattcctaccttggtcttcttaagtatttgaaaaaagcactccctatttaattaaacc

SEQ ID NO: 124788 - DNA, 563 bp, Homo sapiens
catgacaaacttcccctgagtagagagacagcttaacatatcctggtaccttcctgaaactgggagtgaaaacacacaggttatatgactcaaaatatgttaattcaagcaaaatggtaagttataatttgcctgagatctatgcttgtatggtccttatctgttcaaagtcagctgagtggcaaatagtagttawggtcaaaaaattaatacacttgtgattaatgaatgaaacgcaataaaacaaaagacaaaaagcctatatcaaagaggctttattctttatttgttttgcttttatgaaaatgtaccacataagaggtatgggcataatgataaaaagtatattctcatgcttggcatcatgaaaactagatatatagataatattgtttcatgggttgtttgtacctttttttccttttcctttttttgtattgcattactacacagttaacaggtttaaagtactattatttatttcataaaatatacataaaaggcacacatccatattacaaaaagaataaaataaaatatatttatatcattttattgcctct

SEQ ID NO: 124789 - DNA, 455 bp, Homo sapiens
aatctaccagcaaacaaagagtcaagaaatttcatggaaattagtaaataaattgtctctcaaagagtctactaagaatctattacctatagggaatgcagactcacaggaagacaaatatagcaagcaattcttagagctttcaccacactatcatcctgaaatttacatgacctcactacatgagggagaaaacaacataagagcakatatcttctttttaaaggcttctgtaaatcatctttattcagtagatattttattgtcctagatgtattacaaaaacgaatacttaaattgcgttagtatccatttattttggtaatattttatctaaccatcaaatttatacatgggaagatgatttgtcaaatccacttttttctatgaaattaaagctattcatttcatataatgcacactttcttgaaatagaacacaaactacttgtgagt

SEQ ID NO: 124790 - DNA, 455 bp, Homo sapiens
aatctaccagcaaacaaagagtcaagaaatttcatggaaattagtaaataaattgtctctcaaagagtctactaagaatctattacctatagggaatgcagactcacaggaagacaaatatagcaagcaattcttagagctttcaccacactatcatcctgaaatttacatgacctcactacatgagggagaaaacaacataagagcagatrtcttctttttaaaggcttctgtaaatcatctttattcagtagatattttattgtcctagatgtattacaaaaacgaatacttaaattgcgttagtatccatttattttggtaatattttatctaaccatcaaatttatacatgggaagatgatttgtcaaatccacttttttctatgaaattaaagctattcatttcatataatgcacactttcttgaaatagaacacaaactacttgtgagt

SEQ ID NO: 124791 - DNA, 455 bp, Homo sapiens
aatctaccagcaaacaaagagtcaagaaatttcatggaaattagtaaataaattgtctctcaaagagtctactaagaatctattacctatagggaatgcagactcacaggaagacaaatatagcaagcaattcttagagctttcaccacactatcatcctgaaatttacatgacctcactacatgagggagaaaacaacataagagcagatatcttctttttaaaggcttctgtaaatcatctttattcagtagatattttattgtcctagatgtattacaaaaacgaatacttaaattgcgttaktatccatttattttggtaatattttatctaaccatcaaatttatacatgggaagatgatttgtcaaatccacttttttctatgaaattaaagctattcatttcatataatgcacactttcttgaaatagaacacaaactacttgtgagt

SEQ ID NO: 124792 - DNA, 624 bp, Homo sapiens
ctggttgctatggcatgacaatgatttttcttrtttttttccaaacaaataataacttttctgtaacaatgcacttaggttttaaaaagtgcatacttgctcttcaaggctattttcaattgtatagaccaactgtactttagcttctaactgtctttaatcttcagtgttattagaaaaggattcatgtccttggggacagagggtttttaattgaaacccaaaccccacagcactaataaaatattctgtgatatagcaatatgaaggttatttaaaggaagaaaagagcaataatttggttcattcaaaaaagtgaataaactctggccccaatttagagctaggaaactagatcctatctagcagggaacctgctttgatctgtctcttcccaaagcatttgtccagtaaccccagtttagcatttgatccctcccctgtgtacaccactccaccactgaattatagtcttccaaggaaagggactccgacgggtcttataaatctctgtgtgcccacagagtagagcactgggcggggcactggtgaatgttcagtgagggccccacttctgagtggtggatcaggtctgtaaagcacagaggtcttcccttaggcttc

SEQ ID NO: 124793 - DNA, 579 bp, Homo sapiens
tgagcatatagatggacaatacatccaaaatctggcctcaaacattactttattttcataatttcaatgaatttcccaccattctagttctgctctccacatcccatggagcaggcctggtcttttttcatcacttgaaatgctcgtgtctggtttcttaaacaaaaatattgctatctgataaccacaagtcctatccttccagctgtctcacttggctacttacacaatgcctgtagctaaaaagtagctcaatggttacagcaagtgctctagcatcagatgccctaggctaagascaattctgccatgttcagaatgtgtgaacacaagcaagtttccaaatcttgctaagcatctgtttttcctgtgaaaataatagttgtcattgggaggataatataaactataacatttagcacgacagcactgacaaaacatgcaatatatcacactcctttttattattacttgacctcatcaagacatctagttacttcattcttccactttcttctttattagccagtttttaaactctcttcccctcactcaccctgcaccccagtcttagacaat

SEQ ID NO: 124794 - DNA, 579 bp, Homo sapiens
tgagcatatagatggacaatacatccaaaatctggcctcaaacattactttattttcataatttcaatgaatttcccaccattctagttctgctctccacatcccatggagcaggcctggtcttttttcatcacttgaaatgctcgtgtctggtttcttaaacaaaaatattgctatctgataaccacaagtcctatccttccagctgtctcacttggctacttacacaatgcctgtagctaaaaagtagctcaatggttacagcaagtgctctagcatcagatgccctaggctaagagcaattctgccatgttcagaatgtgtgaacacaagcaagtttcyaaatcttgctaagcatctgtttttcctgtgaaaataatagttgtcattgggaggataatataaactataacatttagcacgacagcactgacaaaacatgcaatatatcacactcctttttattattacttgacctcatcaagacatctagttacttcattcttccactttcttctttattagccagtttttaaactctcttcccctcactcaccctgcaccccagtcttagacaat

SEQ ID NO: 124795 - DNA, 579 bp, Homo sapiens
tgagcatatagatggacaatacatccaaaatctggcctcaaacattactttattttcataatttcaatgaatttcccaccattctagttctgctctccacatcccatggagcaggcctggtcttttttcatcacttgaaatgctcgtgtctggtttcttaaacaaaaatattgctatctgataaccacaagtcctatccttccagctgtctcacttggctacttacacaatgcctgtagctaaaaagtagctcaatggttacagcaagtgctctagcatcagatgccctaggctaagagcaattctgccatgttcagaatgtgtgaacacaagcaagtttccaaatcttgctaagcatctgtttttcctgtgaaaataatagttgtcattgggaggataatataaactataacatttagcacgacagcactgacaaaacatgcaatatatcacactcctttttattattacttgacctcatcaagacatctagttacttcaytcttccactttcttctttattagccagtttttaaactctcttcccctcactcaccctgcaccccagtcttagacaat

SEQ ID NO: 124796 - DNA, 601 bp, Homo sapiens
cactcaccctgcaccccagtcttagacaatttggacattcactttagtctccctcctgccagtgttctcaaatcccacctcactgtcccactgtacttccaatgcattctgtctgtaaaaccccagtcctaggctgccaccaaataataaataaatataaaattgtaaactgaatacctctgggtatactgtccttaggacagtgtaagtgtttagtaagtagaatgaatggatggatgctaccataaatccaaggcctgtatccttgaggagaacctcagagctacccaccagctttatttcctagtcatctctctccttttttttcaaagtagttacttggctgccattcttctcaaactccaagccctgccacctgacttctcagggactgcaatctgtgtcttcctcccactcctgtattccttctctactggatcttctctatcagccttgaatcatccrtgagtctctcccctgcccacatgaaaacaaaacagcacgtccaagcatcttttctcctcagatcctctccagttactgccctatttctcttctgctttttccacggaaattccttgaaagtattatttatagtcac

SEQ ID NO: 124797 - DNA, 570 bp, Homo sapiens
tttgagaaaaaatacgcagggaagaaaaatgaagagaataaaatagctgtttatctgaaaactgtgtttttctatgctgagcactctgtttatagagccaatacatcatgtccaccaacaagtggaagtgaagcatgtttcttccacacattgtttgacacggaaagtgagtattttattggcattgggtaatttaaactcacatagtggtgtctgaagtatattagcagcataccatgcaaagactagattgttcagcaatttgtgtaccagagagaagcagtccaaaacaattcaggagagaggcaagggcaaaaagtctkgagaagttgctttatgtcagactaatatagctgtcattaggaagatattcattagcatcaggtaaatctaaaaattttgccacccagtttgctaaatgctagtttaaatggcagagttacaggtaatgacatggtaatactgatctaccacatactcagcactgatgctgcctcagataatccattggattcattcttcctatttttccctaacttctccataacaaacaacatctgaagggacaca

SEQ ID NO: 124798 - DNA, 548 bp, Homo sapiens
ggcacagtggctcacgcctgtaattccaacactttgggaggctgaggcgggcagatcacttgaggtcaggagttcgagaccagcctggccaacatggtgaaaccccatctttactaaaaatacaaaaattggccgggcgtgatggtgcatgcctgtaataccagctattgggaggctggggcaggagaatctcttgaacctgggaggtggaagctgcagtgagtagagattgcaccactgcattccagcctgggtgacaaagcaacactctgcctcaaaaaaaaaaacaaaaagacaagacacaagagagctcacacactctctcctccatgtggaaatacagagagaaggaagttgtctgcaagccagtaagagagccctcaycagaaaccaaatcctgctggaaccttgatcttgggcttccagcctctagaactctgagaagataaagttctgctatttgagccacccagtctatgatattctgttatggcaggctgagcagactaaaacactgtctctctattctttctacaaaatggtgattc

SEQ ID NO: 124799 - DNA, 546 bp, Homo sapiens
ctctagaaggcttggctttttaggtaaaaatctctggatagcaagaagccacaacaagacctaatgtagatcatgatcatcatgccagggctgcgtgggtgggacttgtaaaggtcttgggagatggtgagtatattttacatgagaaatgtatgtaaataattgaagctggaggtcctctctagtaatttgattgcaaaaattaccctaattttctgtsttttcctttatccttgctctttaaaatgtaacctttaagcttctgccattaataagtggagtctgtttccctacttcttgaatctgggatgaagttttggcttttttttttttttttttggctaaataacgtagcagaagtgatgatattccagttctacacctatgtcttaagatactatgcatgattcctctctccttcttggaattttgctattgccaagagaacaaatcccagttagcctgccagatgagagacacatggaggagaactacgtcttccagttgagaccatggtagagtagttagctccagcttacctgcctg

SEQ ID NO: 124800 - DNA, 482 bp, Homo sapiens
cacaacaagacctaatgtagatcatgatcatcatgccagggctgcgtgggtgggacttgtaaaggtcttgggagatggtgagtatattttacatgagaaatgtatgtaaataattgaagctggaggtcctctctagtaatttgattgcaaaaattaccctaattttctgtcttttcctttatccttgctctttaaaatgtaacctttaagcttctgccattaataagtggagtctgtttccctacttcttgaatctgggatgaagttttggcttttttttttttttttttggctaaataacgtagcagaagtgatgatattccagttctacacctatgkcttaagatactatgcatgattcctctctccttcttggaattttgctattgccaagagaacaaatcccagttagcctgccagatgagagacacatggaggagaactacgtcttccagttgagaccatggtagagtagttagctc

SEQ ID NO: 124801 - DNA, 506 bp, Homo sapiens
ttagtgtcacccagactgaaagcctgagaagataagaggcttttaaaaggtcatgcaaataatgctgagttcatagtaacactgataagctgtatcattgagtcaaacactagctacaaatgtattatctaaaacattatttctatcgaaagaaaaaaaaaacccaggttcctcaaaaacccaggttccrcctcttttttattttaaacagaatatcttagcattcctgaaatatcaataggctgaagtccattttggcacaatatggtctaagttatactgatgagcaaagggccggtatatcttaacaaaaacaaaggttatctaggaaagcttcattttgtggaattactattttagaacactttgagaacttctgcatacttatcaaagccatacttagcctactttgagagttcaaccagccattgataattgaataataagccagatttttgctaataatacatttttgctgggcttaagtgttcagctgccaccatcaa

SEQ ID NO: 124802 - DNA, 597 bp, Homo sapiens
aactttgacacagcctacaagaatgacaatttatattgcaaatattaatatcaatttattcattcaacaaatrtaaattcagttcttagttcaagccaagaattactctatgagcaaaacttaccaaaaaaaaaaaaaaaaaaaaaaaaaaaccctgtcctcattaaacgtgcaggcaaggcaggatggagggtctagtgagagagacaagaaacaaatatacacagtgatgcagtgatgaatgctacagaggaaactaaagcagaagagggaaagagagctgatatttggggaggctgttgctatttaataatgagtggtcacgaaaggcctttctgacaaggtgatcttttagcagagccgtcaagcacttgtgaaaatcggcaatttgcccatttgagaggagtgttccatgcagaaagaatagaaagtgcaaaagtcctgagatgacagttagtgggcacattggaggagctacatgccagtgtggctggagcaaagggagtgagagagaaaagtagaccatgaggtcagaaagttcagatcaaccagagcagaaagtccttgtgcagatattggatcttacaaagatccaac

SEQ ID NO: 124803 - DNA, 597 bp, Homo sapiens
aactttgacacagcctacaagaatgacaatttatattgcaaatattaatatcaatttattcattcaacaaatataaattcagttcttagttcaagccaagaattactctatgagcaaaacttaccaaaaaaaaaaaaaaaaaaaaaaaaaaaccctgtcctcattaaacgtgcaggcaaggcaggatggagggtctagtgagagagacaagaaacaaatatacacagtgatgcagtgatgaatgctacagaggaaactaaagcagaagagggaaagagagctgatatttggggaggctgttgctatttaataatgagtggtcacgaaaggcctttctgacaaggtgatcttttagcagagccgtcaagcacttgtgaaaatcggcaatttgcccatytgagaggagtgttccatgcagaaagaatagaaagtgcaaaagtcctgagatgacagttagtgggcacattggaggagctacatgccagtgtggctggagcaaagggagtgagagagaaaagtagaccatgaggtcagaaagttcagatcaaccagagcagaaagtccttgtgcagatattggatcttacaaagatccaac

SEQ ID NO: 124804 - DNA, 616 bp, Homo sapiens
ttcacagtttaggagaaacatagtttctcattcacaatctgtcttccagccaacctattctattaccaatatcaggaaggtgcagagataaaatatagtttaaatctcaaatccctcaaaccaggctgtcagggaggggaaaggtcaatgctgccatgctggataaaagaaagctgatgatgaccactgtggtgatagcagcttttcacttgataagtaggaattggaagaattgggatgggatcagcagaaaatgagagttgggttatttgaggcttgtgctgttgaagttagagacagatgtgccyagagagggttagctaagtagtaggttaggcaatgtatgttcaaatggaggtaaagcatctacaagctctgggactcacttctcctctgctaaatgctgtaagagattcttttcttctgattctggaaatttcatgcccaagcacaggagggataggcgtctttggtctgtaagtgtactcatgtcctccactgagtttcacttaagcatgtttctgtttcataaaataaacatacaaaaatgttcagaaggttagtgggatatgatttggagttctcattcacatacaaaaataattgcttgaattat

SEQ ID NO: 124805 - DNA, 563 bp, Homo sapiens
tgttacaactctaagatgttaaatgtaattcccatgatgaccacaaagaaaatagctatagagtatacacaaaaggaaattagaggggaataaaagtttcactccaagaaatcatttttttactaaacacctaagaaggcaatattacaggaaatgaggtagctaaaagtcataaggtatgtagaaaacaaatagcaaaatatcagaaggaagtcctccttatattactttaaacacaaatggattcaattctccaatcaaaaaacaaggattgrcagactggatttttaaaatataatccaactatatgttgtctatgacactaactttagactcagtgacacaaataggttaaaagtaaaacgatggaaaaggacagtaatgcaaatagccatcaaaagagagctggagtagctatactaatatctgataaaatagactttacattttaaaaaattataagagaaaaatatatacattacatattaataaacattgatactgcaagatacatagcagttataaacatttacacatctaataacagaccttcaaaacatcct

SEQ ID NO: 124806 - DNA, 590 bp, Homo sapiens
  misc_feature (1)...(590): n = A,T,C or G
tgtttgatacccgagtgaccattcccctcagaggtaacttanggtgagcagggggttggggtgtrgctcctcagggagcatctagggaccccccttcctgtgctccaccacttggagtccactggctttaataatggggatccattattaaactcagagaaaaatgactgaccccagtagaagcctacagcttgtgactgtgtttatggatccacctggcatccacacctttccttccttttctgacccccgatagactgcacagccctcgacaggcaggagctgagaggagatgcaggaagaccctttctcctgggacactttgctgcacgataagttcaccaggattgacgtgctcttccctaggcctgtgatgacgaatgctgcagccaagaaagacagacatgctgcaagcattcagaaaatagagtgtctcattctcttccagctctgtgctgctgttattgttgtttaatcaacaaccacagttgtaaatctgtgcccctgcagccctgcagtgccctctctgagaaagcctcaagaccttgctcccagtgggagtgcaagacacgaaccagtgctcatgaatt

SEQ ID NO: 124807 - DNA, 590 bp, Homo sapiens
  misc_feature (1)...(590): n = A,T,C or G
tgtttgatacccgagtgaccattcccctcagaggtaacttanggtgagcagggggttggggtgtggctcctcagggagcatctagggaccccccttcctgtgctccaccacttggagtccactggctttaataatggggatccattattaaactcagagaaaaatgactgaccccagtagaagcctacagcttgtgactgtgtttatggatccacctggcatccacacctttccttccttttctgacccccgatagactgcacagccctcgacaggcaggagctgagaggagatgcaggaagaccctttctcctgggacactttgctgcacgataagttcaccaggattgacgtgctcttccytaggcctgtgatgacgaatgctgcagccaagaaagacagacatgctgcaagcattcagaaaatagagtgtctcattctcttccagctctgtgctgctgttattgttgtttaatcaacaaccacagttgtaaatctgtgcccctgcagccctgcagtgccctctctgagaaagcctcaagaccttgctcccagtgggagtgcaagacacgaaccagtgctcatgaatt

SEQ ID NO: 124808 - DNA, 590 bp, Homo sapiens
  misc_feature (1)...(590): n = A,T,C or G
tgtttgatacccgagtgaccattcccctcagaggtaacttanggtgagcagggggttggggtgtggctcctcagggagcatctagggaccccccttcctgtgctccaccacttggagtccactggctttaataatggggatccattattaaactcagagaaaaatgactgaccccagtagaagcctacagcttgtgactgtgtttatggatccacctggcatccacacctttccttccttttctgacccccgatagactgcacagccctcgacaggcaggagctgagaggagatgcaggaagaccctttctcctgggacactttgctgcacgataagttcaccaggattgacgtgctcttccctaggcctgtgatgacgaatgctgcagccaagaaagacagacatgctgcaagcattcagaaaatrgagtgtctcattctcttccagctctgtgctgctgttattgttgtttaatcaacaaccacagttgtaaatctgtgcccctgcagccctgcagtgccctctctgagaaagcctcaagaccttgctcccagtgggagtgcaagacacgaaccagtgctcatgaatt

SEQ ID NO: 124809 - DNA, 633 bp, Homo sapiens
gcaaataatataacctgttactttaagttaaggaagacttaatgctgactgcataaacaaacaaataagtaaagatagaactaataaaaacgacactttaactcgsccctctactttttaactttttatttctatttatattttattatgctatttatgtcttgaaaagttgttgtagttattatttttgaaaggttcatcttttcgactactcagtatatgaatagtttacacaccaccattacggtgttataatattttgtattttttctgtgtatttaatattatcgttgagttttgaaccttcagacgatttcttattgctcattaatgttcttttctttcacatagaagaactccatttagcatttcttgtaggacaagcctggtgttgatgaaatcactcagctttagtttgtctggaaaagtatttatttctccttcatgtttgaagaatatttttgctggatatactattctaggataaaaaaagttttattccttcagcactttaaatatgtcatgccactctgagacactccactgagaagtctgcttcaagatgcattggagctcctttatatgttttttgtttcttttcccttgctacttttagattctttctttatcttt

SEQ ID NO: 124810 - DNA, 540 bp, Homo sapiens
accacgttggtggtctttggtgagatgtgtgagaattgtctagattaccaggcagagactcttgttctcttcccttactttctctcagatgggttctctgtccctgtactgagctgcctggatctgggggaggggtgacacaagcatctctgtggccatcagcaatgggactgcactgagtcagacctgaagccagcacagtactgggtcttgcccaaggcccacagtgaccacttsctggctactacctatgctcactcaaggcgaaagggctctacagtcagtaggtggcaagctcagccaggcttgtgtccttcccttcaggatggcaagctcctcccagccccagatgggtccacagatgatattcaagatccagggcctgcctggagtcaggaaacttaggaatctacctgctgctgtattctactgtggctgagctagcacccaagctccaagataaagttcttcctactctttcttcccctttcctcaagcagaggattctctctctatggccaccactgccccaggcccaca

SEQ ID NO: 124811 - DNA, 499 bp, Homo sapiens
gaattcccttttctatgcatccttgccaacatttgttctgttacagagtcttgctctgttcacccaggctggagtgcagtggcagaatctcggctcactgcaacctctgcctccggggttcaagcgattctmctgcctcagcctcctgagtagctgggattacaggcatgtgccaccacgcctggctaatttttgtatctttagtagagatagggtttcgcagtgttagccactcaaactcctggcctcatgtgatccatccacctcagcctcccaaagtgttgggattacaggcatgagccaccacacctgacctggccagtgatagccattctaactggggtgagatgatatcccgttgtggtttagatttgcatttccctcatgattagtgatgatgagcattgttttcatatatttattggacatttgtatgtcttttgggaaacgtctgttcacatcatttgcccatttttaaattgaattttttttttttttt

SEQ ID NO: 124812 - DNA, 499 bp, Homo sapiens
gaattcccttttctatgcatccttgccaacatttgttctgttacagagtcttgctctgttcacccaggctggagtgcagtggcagaatctcggctcactgcaacctctgcctccggggttcaagcgattctcctgcctcagcctcctgagtagctgggattacaggcatgtgccaccacgcctggctaatttttgtatctttagtagagatagggtttcgcagtgttagccactcaaactcctggcctcatgtgatccatccacctcagcctcccaaagtgttgggattacaggcatgagccaccacacctgacctggccagtgatagccattctaactggggtgagatgatatcccgttgtggtttagatttgcatttccctcatgattagtgatgwtgagcattgttttcatatatttattggacatttgtatgtcttttgggaaacgtctgttcacatcatttgcccatttttaaattgaattttttttttttttt

SEQ ID NO: 124813 - DNA, 640 bp, Homo sapiens
ccgggtgtgagttgagatctgttccatcaaagtcggcctcatattttcttgtttcatctgaagacatgacccatcaacaaccaagattgaatctgaattttctagaggagtttctggtaagtctatttaggacatagtttactgacagtagtttcctgctttttaaggaatagaggagtagcaagggtcaacaaacccttttctgtaaagggccagatagtaaatgttttaggcttgctgggccatgtatagtctctgttactaattttttaaaacaattctttaaaaatataaaaactattcttagctcatggtcagtgcaraaatgagccatgggctgaacttggttaaattctttaataattatataattacagaaaaatggggacctactaccttcagtagtcaatgagataaaggaatcttcatgattttctttgttgcatacctcagaaaggtttgaacggtgtgtaatctgcccagagtaagaggcatacctccttaggataaatcatgcactaggtaacgcggtagtccctctctgtccccaggagagatacctttcaagacccccagtggatgcctgaaaccatgaacttcatataaactattaatatatttttttaatctgataaccaag

SEQ ID NO: 124814 - DNA, 598 bp, Homo sapiens
taatagagggaactctggacaggtttaaatcccagctagctctgtgaccttggccaaatrccagacccctctttacatcagttttctcatctgcaaaatgggccacttggctgttaccagcattacatatgttaatagataagatatgccttcagaagtaactggcatattataaatgtacataagttttggtccctgttagtattacataaattaccttcctgatcttggtagatatttgagtttgctattctacctctagtaacaagtttaacaactgaagtttttctgggcactgaatcttcttcaagttaccacgctttcaccttttcttacaggcgtatcttttagaagagttgtttgttcatactgcttctagttcctcactttccatttcctcttcagcccactccaatttggcttctgcctccctcattccacttaactgtacttgctaatgtcactgtaaacccattgaacacttacagagacagtatcacataatggctacaaattcaggttctggaagctgcctggtttgctagctgtgtgactttgaacaagttacttaccttctctagaccttaacttgttaaac

SEQ ID NO: 124815 - DNA, 487 bp, Homo sapiens
gaattctggaatgtggtgatgaccaacaggaattttatgagtgtccctctgtggaggagcctgagagaaaggctcatggagggcagagggtggagggcgtgggaccaagttccttagataaggctgtggccccatggtaagggtctggacggggaaggtcagtgttaaccctttgaagggcccccggggagtggatcaggttcagagcccaaggctttcacacataggtgtgttctaaagctggtaaagcctctgatcatcagccagtgtcaggtgtcacagcatagccaagcgaccagacgagcagatgagaccttgttaatctccagtggtgatgagtaaccrttctctctatcacatatcacatactgggtgcgttagggggcccttaggactcgctccattctgccttaccccacagtgacttgaaggcacagctcctgttccccaaatgagtctcagtgtgttgttctcattcctgcccttt

SEQ ID NO: 124816 - DNA, 556 bp, Homo sapiens
catgtggtaactggcttctaagaggactaaaacaaaagctgccaggcctcttaaactcttaggctgccctaagaagccttgcagtgtcaccttgtcacgttctgtgtgttgaaacaagccaggccatattcagacaagggggaaatagactccacctctttatgggaggagtaaactggagatgccaaagggcttgctcttgggatgggaggactgttatagccatctatgagaaaactctgtgagttaccaatttaaaaaatactttaagtactagtttggtttgtaccattctctacagtctgagtgtgcatttagacataaaccaaaatctcatgagcaagcaatttataaaatacatctgattagtttaggtaatatatgttagtccatatatatgtcaactttaaataaccatattcagaaaatatgattaagtgtaaagtttgtttgagctcaaagcttgagaatggtcaccccgtaacataggttcaagtagccctgaatatacactctgattagyagcaatcataaataggtttttaagaaaaaaaga

SEQ ID NO: 124817 - DNA, 556 bp, Homo sapiens
catgtggtaactggcttctaagaggactaaaacaaaagctgccaggcctcttaaactcttaggctgccctaagaagccttgcagtgtcaccttgtcacgttctgtgtgttgaaacaagccaggccatattcagacaagggggaaatagactccacctctttatgggaggagtaaactggagatgccaaagggcttgctcttgggatgggaggactgttatagccatctatgagaaaactctgtgagttaccaatttaaaaaatactttaagtactagtttggtttgtaccattctctacagtctgagtgtgcatttagacataaaccaaaatctcatgagcaagcaatttataaaatacatctgattagtttaggtaatatatgttagtccatatatatgtcaactttaaataaccatattcagaaaatatgattaagtgtaaagtttgtttgagctcaaagcttgagaatggtcaccccgtaacataggttcaagtagccctgaatatacactctgattagtagcaatcataaatrggtttttaagaaaaaaaga

SEQ ID NO: 124818 - DNA, 542 bp, Homo sapiens
cttcctgaatcgtttcatctggagaccaataggaagtaaaaacaaccatcaactggcaagataatattttccttttgtagcaatagtccctgtctttaccaatttttaaataactccaaaaccaagtgattttttcacccttttcatttgtatatgttggcattctagagacatggcctaggtcatacaaaatgattattcctctagcacttcagatgatgcacatatcagggcttatattcatttcctagggctgccatcacaaastaccacaaactgggtggcttaaaatagcagaaatttattatttaacagttctgcagtccagaagtcctaactcaagttggtagggccatgctttctctgaagactctaaggatggatccttccttgtgtcttccagcttctggtgtttgctggcaatccttggtattccttggcttgtacaggcagcattccagtctctgcatccatcttcacgtggccttctacaaaaactgagtccaaatttccttcttcttctaagaacaccactcatagta

SEQ ID NO: 124819 - DNA, 542 bp, Homo sapiens
cttcctgaatcgtttcatctggagaccaataggaagtaaaaacaaccatcaactggcaagataatattttccttttgtagcaatagtccctgtctttaccaatttttaaataactccaaaaccaagtgattttttcacccttttcatttgtatatgttggcattctagagacatggcctaggtcatacaaaatgattattcctctagcacttcagatgatgcacatatcagggcttatattcatttcctagggctgccatcacaaagtaccacaaactgggtggcttaaaayagcagaaatttattatttaacagttctgcagtccagaagtcctaactcaagttggtagggccatgctttctctgaagactctaaggatggatccttccttgtgtcttccagcttctggtgtttgctggcaatccttggtattccttggcttgtacaggcagcattccagtctctgcatccatcttcacgtggccttctacaaaaactgagtccaaatttccttcttcttctaagaacaccactcatagta

SEQ ID NO: 124820 - DNA, 628 bp, Homo sapiens
atgtgtatatttattaggtattacaagtaatctatagattatttaaagcatatggggggatgtgcctaggtaatatgcaaatactataccattttgtataacggacgagagcatttgtggattttggctctggtctgcagctcccagcgagaccaatgcagaaggtyggggatttctgcatttccaactgaggtacccagttcatctcattgggactggatagagagtgagcacagcagatggagggtgagcagaagagggtggggcgtagccttccccccacgaagtgcaaggaatgggggctttccctcccccagccaagggaagctgtgaggaactgtgctatccagcccagatactacacttttcccatggtttttgcaatccacagaccaggagatttcctcatatgccaacaccacaagggccctgggtctcaagcacaaaactgggaggctgtttgggcagacactgagctagctgcaagagttttttttaattttttatttaatttaatttgatttttttcgtaccccagtggtgcctggaatcccagcaagacagaacttttcactcccctggaaagggggctgaagccagggaaccaagtggtctcactcagtgggcc

SEQ ID NO: 124821 - DNA, 628 bp, Homo sapiens
atgtgtatatttattaggtattacaagtaatctatagattatttaaagcatatggggggatgtgcctaggtaatatgcaaatactataccattttgtataacggacgagagcatttgtggattttggctctggtctgcagctcccagcgagaccaatgcagaaggtcggggatttctgcatttccaactgaggtacccagttcatctcattgggactggatagagagtgrgcacagcagatggagggtgagcagaagagggtggggcgtagccttccccccacgaagtgcaaggaatgggggctttccctcccccagccaagggaagctgtgaggaactgtgctatccagcccagatactacacttttcccatggtttttgcaatccacagaccaggagatttcctcatatgccaacaccacaagggccctgggtctcaagcacaaaactgggaggctgtttgggcagacactgagctagctgcaagagttttttttaattttttatttaatttaatttgatttttttcgtaccccagtggtgcctggaatcccagcaagacagaacttttcactcccctggaaagggggctgaagccagggaaccaagtggtctcactcagtgggcc

SEQ ID NO: 124822 - DNA, 628 bp, Homo sapiens
atgtgtatatttattaggtattacaagtaatctatagattatttaaagcatatggggggatgtgcctaggtaatatgcaaatactataccattttgtataacggacgagagcatttgtggattttggctctggtctgcagctcccagcgagaccaatgcagaaggtcggggatttctgcatttccaactgaggtacccagttcatctcattgggactggatagagagtgagcacagcagatggagggtgagcagaagagggtggggcgtagccttccccccacgaagtgcaaggaatgggggctttccctcccccagccaagggaagctgtgaggaactgtgctatccagcccagatactacacttttcccatggtttttgcaatccacagaccaggagatttcctcatatgccaacaccacaagggccctgggtctcaagcacaaaactgggaggctgtttgggcagacactgagctagctgcaagagttttttttwattttttatttaatttaatttgatttttttcgtaccccagtggtgcctggaatcccagcaagacagaacttttcactcccctggaaagggggctgaagccagggaaccaagtggtctcactcagtgggcc

SEQ ID NO: 124823 - DNA, 560 bp, Homo sapiens
tcatacattctaccagaggagaatagacaaaatgacccagcagtccccaccctcctctgcagggctggtccaaaggcagcccaagggaccccacctacatagataatctaagccagttctctaaagccccacttgagcaacccctgggcataagcatctgattgctctctgggagagtcwatccccacctcaagcagagacacatcctctgttatagtctctcaagtgatctgctggattttttttaaacctgttttcactttggtgggaaatttgaatgcctagtcaaaacaacagtacccacagctaaacttctaagaaatctcagaagttacatttgctgtttgtattaaaaggagtcttcaacaaaacaccccagcccctctctgaaatataaagcagagttaactctcaaggggaactttttcaaaaagggaggtgccgtgttatggaagcctccaaagcacaatacataaccctcagcctcacaaagcaacccaaacccacaagggagtcctgcctgccacgtttttgaaagttcttgaagctgttggctatga

SEQ ID NO: 124824 - DNA, 528 bp, Homo sapiens
tagataatcaagaagaaacgaacaaattcctagacatatacaatctaccaagattgaatcatgaagaaatagaaaatctaaacagatcaataataagaggatagaatcagtaataaaaattctcccatcaaaaaacagcccaggaccagatgtcttcattgctgaattctaccaaacatttgaggaagagctaattcttctcaaactatttcagaaatttgaagaagagagaactgttccaatctaattctgtaaggccagcattaccctgataccaaaaccagataaggatgcaacaaaaaaagaaaacttcaggccaatatccctgatgaaaacagttgtaaaatttctcaacaaaatattagcaaactgaattcaataacacatcaaaaataactattcaccatgatcaacagatgaacagataaagcaaacataatatgtacacaaytgaatactgttcagccacaaaaagaatgaaatcctatcatttgccacaaaaagaatgaaatcctatcatttgcaaca

SEQ ID NO: 124825 - DNA, 600 bp, Homo sapiens
tgctaataccatgatttgtaaattctccttccttatgttctgtatttggaattaaggtttattagacaagttcatttttaaagacatttttctgggctggctgagccaggctgccactcctgtgttcatatttagttctgctccatgatgattagcaaaataaaaggagactgttcaccacagaaggacttaaaatgtactgtgatatcagctttccatactgtaagtggattggaggagtcactgttcctaactcaattttctcaaataacaagaaacacccataaatgattgttgaaaaaggatatctgaattgtatggttttctggtcacatttgtcagaaccccttttttcttagatttttaaaaagaaaataaaaccaaatgttatttamttgattattatctgctatttttattattattttgttagatttcattattgaccttctagaacaaaaaggaagaaaggtaaaaaatctttttggcaataccttgtctttatactaacatgtcctaaaaacatatttgaatgacttaagtctcatataaataagatcgttgtagtaaaatcattgagtgctttatagaaacaagatg

SEQ ID NO: 124826 - DNA, 594 bp, Homo sapiens
tatgctgggcaataagtaaatcatattacatttaaaaggattgaaattatgcaaagtatgttttctaagcacagctgaattaaacagaaaaatatctaggaaaaccccaaatatatagaaattaaaaattaaatagttcacggatcacataaaaaatacagtagacattasaaaatattctaaatctaataaaaatataaatcaacatatcaaaatatgtgggaagttacaaaacaattctcagaaaaaaacttatacctttaaatgcttgtgttaaaaaagaagatataagatcaacgatctgaggtctgactttaaaaagttagaaaaagaagaacaaagaaaacccaaagtagacaaaaggaagaaaatgataaaactaagagcagacgtaagtaaaatttgtagacaaacaatacaacaaagtcaaaagctagttctttgaaataattaagcaaattgataagtccatagttagactgatttttaagagtgataatacatattgtgaaaatcaagaatgaaagaggggttatcactacagatcctatagacaccaaaaggacagtgagtactattagcaaccttatgcca

SEQ ID NO: 124827 - DNA, 558 bp, Homo sapiens
ccccaccaagaccccatatctcattccgtattcacaattttaccttcttgttcttaaagaaggacatccaaatggaaaagctctcaaccccccaaaacttggatgtgaacctggagcatctgtcatctgtcttgttcactacttgtccacctaccaggatcctaaacggaaccctacgtagggaagaggcagtggctgtaaaggctggatttgggtctggaagccgcccagctttacgaaaacaaagagggctccagcatcaagcaggtgggcaggggccagagtgggaattacattgactcacacaacatagtgtaaaagggtacaaactatgaggtttaaaagatgctgctggcttgtatagaaacatgtccttaggagaggggagggggacaggatggcaacagccatgtctatgaacagacatccttaaatccttgttaattctgaagagaccaagatactttcaccacacaacctcttcttggcaktagctccaggtttcctgtttccatgccagcttttgctgggttatgctacaataatacaccgccccca

SEQ ID NO: 124828 - DNA, 572 bp, Homo sapiens
tcagaggcagtgtctgcataaaaggctgtacatgagatttaggacaagtcttatcattctttaacaatcagtgtttgaagaagtatcctgtattcaatgtaagaaatagaataagaagttctagaaaacctgatgcaggtttttccttctcagagagtaagttattatgaactaaatatttcaataattctaaaatgaaattaaatcaagcaaaggaatmatcattattcctttttaaaaaatcacaatataggcttggcacggtggctcacacctataatcctagcactttggaaggctgaggtgggtggattgcctgagctcaggagttcgagaccagcctgggcaacgtggcgaaactccgtctttactaaaaacacaaaagcaagactctgtctcaaaaaaaaaaaaaaaaaaactcttaatataaagggatgtaagtagactattaatacaatcattcctattcctattattcccattacctgttaagttcatccaggcataagcgtagtgtttcataagttgttagagcaatttcacatttcctctgctttacacgaattaattca

SEQ ID NO: 124829 - DNA, 643 bp, Homo sapiens
gtaagactgatataatttggatatctgtccctccaattctcatggtgaaatgtgattttccagtgttgrgggtggggcctggtgagaggtgcttgggtcatgaggatggaaccttcatgaacggcttggtgtcattcctgaggtaatgagttaccatgagatctgtttcttgaaaagagtctgagacctctcccacccacatcttacctatgtgacaggcatgcttcccctttctcttctgccatgatttcccttcctcttctgccatgattgtaagcctcctgaggctttaccagaagcagatgctagtgtcacacgtctacagactgcagaactgtgagcaaaataaacctcttttatttataagttatccagccttaggtattcctttataacgtgaaatggattaacaaaacgactaattaaatattgctggcttaatgtaaacacctctatcttcttaattatcagcaaaataccaatacatttaaccttaagattcatacttgggtgataaacacctgatcttgacaggctgtaacaagaagataattagaaatgatgactatccttgtctaatatcccagtttttataagtaatccaggtgttgttaaaaataaatacgttaggtaaatacaaatc

SEQ ID NO: 124830 - DNA, 643 bp, Homo sapiens
gtaagactgatataatttggatatctgtccctccaattctcatggtgaaatgtgattttccagtgttgagggtggggcctggtgagaggtgcttgggtcatgaggatggaaccttcatgaacggcttggtgtcattcctgaggtaatgagttaccatgagatctgtttcttgaaaagagtctgagacctctcccacccacatcttacctatgtgacaggcatgcttcccctttctcttctgccatgatttcccttcctcttctkccatgattgtaagcctcctgaggctttaccagaagcagatgctagtgtcacacgtctacagactgcagaactgtgagcaaaataaacctcttttatttataagttatccagccttaggtattcctttataacgtgaaatggattaacaaaacgactaattaaatattgctggcttaatgtaaacacctctatcttcttaattatcagcaaaataccaatacatttaaccttaagattcatacttgggtgataaacacctgatcttgacaggctgtaacaagaagataattagaaatgatgactatccttgtctaatatcccagtttttataagtaatccaggtgttgttaaaaataaatacgttaggtaaatacaaatc

SEQ ID NO: 124831 - DNA, 678 bp, Homo sapiens
tccagaaaagaatgatattatatattatattcaaactgccagaagaaaagaaaaaaaaagtgttcaaccaagaatattataactgacaaagctgtctcttcagaaatgtggagaaatttgcttgttgatatctcagacaagcaaaaactgagggaattcatcactactggtcagccctacaagatattatttaaaaatcctatatctggaagcaaaaatrcagtatatattattataaaaacactcaaaaagcataaaaaatattggtatagcagataccctcatgagaaagagaaaggaatcaaatgttatcattgcagaaaaccaccaaaccacacaaataataaaagtaagaaagaaacaaaggatatacacaataatcagaaaatgattaagaaaatgacaggaatatgtttcaatagaaaagtaaaaaccttgaatgtaaacactttaaattcccaaatgaaaaaatacagaactgctgaattgattaaaaaaaaacaagacccaacaatattatggctataagaaactcacttcacctctaaaggcacacatagacttaaaatgaagggatgagaaaaagatattccaggcaaatggaaaacaaaaccatgcaggagtactatacttatatcagacaaaatagatattttaagtcgaagaacaaaagggaca

SEQ ID NO: 124832 - DNA, 678 bp, Homo sapiens
tccagaaaagaatgatattatatattatattcaaactgccagaagaaaagaaaaaaaaagtgttcaaccaagaatattataactgacaaagctgtctcttcagaaatgtggagaaatttgcttgttgatatctcagacaagcaaaaactgagggaattcatcactactggtcagccctacaagatattatttaaaaatcctatatctggaagcaaaaatgcagtatatattattataaaaacactcaaaaagcataaaaaatattggtatagcagataccctcatgagaaagagaaaggaatcaaatgttatcattgcagaaaaccaccaaaccacacaaataataaaagtaagaaagaaacaaaggatatacacaataatcagaaaatgattaagaaaatgacaggaatatgtttcaatagaaaagtaaaaaccttgaatgtaaacactttaaattcccawatgaaaaaatacagaactgctgaattgattaaaaaaaaacaagacccaacaatattatggctataagaaactcacttcacctctaaaggcacacatagacttaaaatgaagggatgagaaaaagatattccaggcaaatggaaaacaaaaccatgcaggagtactatacttatatcagacaaaatagatattttaagtcgaagaacaaaagggaca

SEQ ID NO: 124833 - DNA, 678 bp, Homo sapiens
tccagaaaagaatgatattatatattatattcaaactgccagaagaaaagaaaaaaaaagtgttcaaccaagaatattataactgacaaagctgtctcttcagaaatgtggagaaatttgcttgttgatatctcagacaagcaaaaactgagggaattcatcactactggtcagccctacaagatattatttaaaaatcctatatctggaagcaaaaatgcagtatatattattataaaaacactcaaaaagcataaaaaatattggtatagcagataccctcatgagaaagagaaaggaatcaaatgttatcattgcagaaaaccaccaaaccacacaaataataaaagtaagaaagaaacaaaggatatacacaataatcagaaaatgattaagaaaatgacaggaatatgtttcaatagaaaagtaaaaaccttgaatgtaaacactttaaattcccaaatgaaaaaatacagaactgctgaattgattaaaaaaaaacaagacccaacaatattatggctataagaaactcacttcacctctaaaggcacacatagacttaaaatgaagggatgagaaaaagatattccaggcaaatggaaaacaaaaccatgcaggagtacyatacttatatcagacaaaatagatattttaagtcgaagaacaaaagggaca

SEQ ID NO: 124834 - DNA, 611 bp, Homo sapiens
tgccaaaaccaccatacaagtatgctcataatagcattaccaataatagccacaacctggtattactcaaaatgcccgtcagtagtatcatttttaaaaacaaaagatagtaatggtatgttctcacaatcagacactgtacaggaaaaaaatcagtgagtgaaccactacatgtaartataacaaaggtagatggatttcaaagaaaataatgtctacatatacaccaaagctagaaacataagaataaatacttaggattgggtttatttacagttcaataaaagacaaaactaatcagtatgttatgtcaggtgagcgcttccccatgtgaggagtggtcttcactgggaagaatatgaggagggcttttggagtactgctaatataggatttcttattctagatcatagttacacagatatgttcaattttcgaaaattagttgagatacttacgatttctcatgatttctgtattttctacttcagtaaaatttaaattgtgttccgtgcaggtaggcaaccatcaaaagggacccagttcacaacaaggagataaaccttggtagcctctttatcccttggttccgacactcttctccctcactt

SEQ ID NO: 124835 - DNA, 539 bp, Homo sapiens
ttccgttccagcagagacgccgcttgctacggcgggttgcccgtctccacaggtatctccggctgactctagagctcaacttcccctttaaacttcaccctgcgcttgccgattkgcttcgggaatgcccgaggcaccggacgaagcagtcgggtctggccccagtcgactccagccaggcggggctccaagccgagactcctgcacgcccggcccgaagctagcccgacaccctcagctgagtcctccgccgtcccagcattccctgcgtccctaccatcgagagcagcttccggcgtggctggtgtaggcgggtggagaaggatcggggccctcgccgctctgtctcattccctcgcgctctctcgggcaacatggcgggtgtggaggaggtagcggcctccgggagccacctgaatggcgacctggatccagacgacagggaagaaggagctgcctctacggctgaggaagcagccaagaaaaaaagacgaaagaagaagaagagcaaagggccttctgcaggtaaagagagtttt

SEQ ID NO: 124836 - DNA, 576 bp, Homo sapiens
aaactagttgtgctttattttaatgtctagtttacagaaaaactggatgatactttctaactttagccaatatgttgacacacagaattttttttttttttgtaattaacattttaaaacttgtttagaccttcaaaacaaaaatcgtacatttcctgcataaattcctttttataacatttttcatgactttcacagacaatcttcaacgtgccttacctttctatgttttataaccttccttactaaaggtgcattcttataacttttctaatatttcctttcccttcttcctgctttatttctctccttagtacttctttttgtgttcttctctgatctctgtcttttctagtctctttcttactcattctttccttttatttctctctctagctgtggacacaagcatactttcttcctcatgttaataattcacttggaccacgccatttattactgttcacatctttccataaaattgyaggttttatgccttaagaggttttagcaaagtgcttttctgcagctgattgaaatttgtcatataaattttaaaaattaaggttaaataaa

SEQ ID NO: 124837 - DNA, 576 bp, Homo sapiens
aaactagttgtgctttattttaatgtctagtttacagaaaaactggatgatactttctaactttagccaatatgttgacacacagaattttttttttttttgtaattaacattttaaaacttgtttagaccttcaaaacaaaaatcgtacatttcctgcataaattcctttttataacatttttcatgactttcacagacaatcttcaacgtgccttacctttctatgttttataaccttccttactaaaggtgcattcttataacttttctaatatttcctttcccttcttcctgctttatttctctccttagtacttctttttgtgttcttctctgatctctgtcttttctagtctctttcttactcattctttccttttatttctctctctagctgtggacacaagcatactttcttcctcatgttaataattcacttggaccacgccatttattactgttcacatctttccataaaattgcaggttttatgccttragaggttttagcaaagtgcttttctgcagctgattgaaatttgtcatataaattttaaaaattaaggttaaataaa

SEQ ID NO: 124838 - DNA, 454 bp, Homo sapiens
tgggattacagatgtgakccaccacggccagccatgtctggcgttttctaacccttcaggtatggccttacatattttctcatcaggagacctttccttagtgctcccagtgaaccatcatctctcttaccacaccattagtgcctctcattgcatcaccacctaggacgttttattgtttgtaattttatttagtggtaggcagtggggcaagagatacctaaattacttctctcaatatttccattggtttttctctgagatttggctaacatacatcttaaattctttttagtcaatagtttaatattatgttggcagtagacagttctaaaaaatatgagacagaaagtcatactctaagataaaaataatgttgaataattttatttcagaaataagaattttctggtaattatgtattattcatcataatttaaaagttagctttgat

SEQ ID NO: 124839 - DNA, 454 bp, Homo sapiens
tgggattacagatgtgagccaccacggccagccatgtctggcgttttctaacccttcaggtatggccttacatattttctcatcaggagacctttccttastgctcccagtgaaccatcatctctcttaccacaccattagtgcctctcattgcatcaccacctaggacgttttattgtttgtaattttatttagtggtaggcagtggggcaagagatacctaaattacttctctcaatatttccattggtttttctctgagatttggctaacatacatcttaaattctttttagtcaatagtttaatattatgttggcagtagacagttctaaaaaatatgagacagaaagtcatactctaagataaaaataatgttgaataattttatttcagaaataagaattttctggtaattatgtattattcatcataatttaaaagttagctttgat

SEQ ID NO: 124840 - DNA, 611 bp, Homo sapiens
tgtgtcagggaaacctggcccttccttttgagcgttcaggggactcgcatgggccttgccccttctccaggacctggaagcttctctctctgaagagccctgagttccagtctcaagtgtctcattccccattgcctcctgcttctcctttcatcccccccaccaccacctggggctcacactccctgcctttgggcttcaaatgttgtactaygtgcttgacccactagcctgcttaatcttcaaaatcactctatcaaaaagacattttaggctgggcattgtggctgaagcctgtaatcccagcactttgggagacccagatgggctgattacttgagtgtatgagttacagaccagcctgggaaacataacaagatcctgtctctacaaaaatagaaaaaaattagtggagtgctgtggcacatgtctgtaatcccaactacttgggaggctgaggtgggaagattgcttgagcctgggatgtcgaggctgcagtgagctgagatcacgtcactgcactccagcctgggtaacagactgagaccctgtctcaaaataaaaataaaaataatttaaaaagcgaaattgccaaaatcattcatttaacc

SEQ ID NO: 124841 - DNA, 534 bp, Homo sapiens
agagtccatgtattaaacccagtagaaattgacttgagtttggaagatttgaagacaaacacaattttaattttattagtatacataagacagatttcatttccccagggacatataaaaaaagtctaacaaatcccaaatycctttacctcaccccagctgtttggtgactagggaaccttaaattcaaatatttgtttgtacacacgactataattctgtgctagctttatttgtatgcattcctgcattagtacagtcctaatgtattttacttgatacatttttgtgcagggcttaaagcacatttttcgaccacatgttggaacatttgtgcacaaaaaattcccatctttatgtttgaaatttatgggaacacaattaaaatgagaggggtccaaaggtatcaagataattacatttttctaatcttactaaacaagataaattacctgcaggccctcttataaaagatgaaatcttcataataagtgaattaatcaagcagcagcttgctactgcacttgcatttat

SEQ ID NO: 124842 - DNA, 534 bp, Homo sapiens
agagtccatgtattaaacccagtagaaattgacttgagtttggaagatttgaagacaaacacaattttaattttattagtatacataagacagatttcatttccccagggacatataaaaaaagtctaacaaatcccaaattcctttacctcaccccagctgttwggtgactagggaaccttaaattcaaatatttgtttgtacacacgactataattctgtgctagctttatttgtatgcattcctgcattagtacagtcctaatgtattttacttgatacatttttgtgcagggcttaaagcacatttttcgaccacatgttggaacatttgtgcacaaaaaattcccatctttatgtttgaaatttatgggaacacaattaaaatgagaggggtccaaaggtatcaagataattacatttttctaatcttactaaacaagataaattacctgcaggccctcttataaaagatgaaatcttcataataagtgaattaatcaagcagcagcttgctactgcacttgcatttat

SEQ ID NO: 124843 - DNA, 551 bp, Homo sapiens
tagtaaataatctcaagattytctaaaaagagctttataaatttaattttcttgacttttggtgtcttgaaatagaagattatttttgtatgtatgtatctacctcacagaagttattgatttggtggaagagcactaggagtagagtcagaaaagctgggaaaaatcctgcagcttccttatatttttaaccttttgctatagaattataactaaatgagttcattgatttgtgtgtgtaaaagtgcttagtacaatgcctagacttatcatttatcaataaatatcattcttaaaactgaccataaaaatattagaaaagtagaatatctagacaatattttagaaaaagggagcttaaagaatttggaaaatgtcattcatctgtccaaatgtctgccaagctaaggctctcactacagggagaggtatagtttagatgttagagtgtaaacccaattttttaatgtggtcatagttattaattctttatgccttgcaatttgttgtaattcagtaaaagccttttttcatcctgaaatttaaaaaaa

SEQ ID NO: 124844 - DNA, 551 bp, Homo sapiens
tagtaaataatctcaagattttctaaaaagagctttataaatttaattttcttgacttttggtgtcttgaaatagaagattatttttgtatgtatgtatctacctcacagaagttattgatttggtggaagagcactaggagtagagtcagaaaagctgggaaaaatcctgcagcttccttatatttttaaccttttgctatagaattataactaaatgagttcattgatttgtgtgtgtaaaagtgcttagtacaatgcctagacttatcatttatcaataaatatcattcttaaaactgacmataaaaatattagaaaagtagaatatctagacaatattttagaaaaagggagcttaaagaatttggaaaatgtcattcatctgtccaaatgtctgccaagctaaggctctcactacagggagaggtatagtttagatgttagagtgtaaacccaattttttaatgtggtcatagttattaattctttatgccttgcaatttgttgtaattcagtaaaagccttttttcatcctgaaatttaaaaaaa

SEQ ID NO: 124845 - DNA, 656 bp, Homo sapiens
gctctttttgcccaggttggagtgcaatgacatgatgtcggctcagtgcaacctctgcccaccaggttcaagtgattctcctgcctyagcctcccaagtagctgggattataggcacatggcaccatgcccagcaaatttttgtaattttagtagagacaaggttttaccatgttggccaggctggtcttgaactcctgacctcaggtgatccacctgccttggcctcccaaagtgctgggcttacaggcgtgagtcaccgtgcccggtcagtagttttattttttagtcatttgagaactctttatatggttttccatacaggtgatactaatttacattcccgcccacagtgtgtaagtgttccctattgtctgcatcttccccaatgtctgttattattattgtttctttaatagtgcccattctgattggtgtaagatgatatgtcattgtggtttttatttgcatttcctcgatgattagtgatgagcatttttttcacatacctgttgactgtttgtcttcttttgagaaatgtctattaatgtcctttgctaactttaaaattcttaaaaattttttatttaaattttttcttaagaccagttaagtgcagtagtgaaaggggagtaaagagtaaaaaacaaggagttt

SEQ ID NO: 124846 - DNA, 656 bp, Homo sapiens
gctctttttgcccaggttggagtgcaatgacatgatgtcggctcagtgcaacctctgcccaccaggttcaagtgattctcctgccttagcctcccaagtagctgggattayaggcacatggcaccatgcccagcaaatttttgtaattttagtagagacaaggttttaccatgttggccaggctggtcttgaactcctgacctcaggtgatccacctgccttggcctcccaaagtgctgggcttacaggcgtgagtcaccgtgcccggtcagtagttttattttttagtcatttgagaactctttatatggttttccatacaggtgatactaatttacattcccgcccacagtgtgtaagtgttccctattgtctgcatcttccccaatgtctgttattattattgtttctttaatagtgcccattctgattggtgtaagatgatatgtcattgtggtttttatttgcatttcctcgatgattagtgatgagcatttttttcacatacctgttgactgtttgtcttcttttgagaaatgtctattaatgtcctttgctaactttaaaattcttaaaaattttttatttaaattttttcttaagaccagttaagtgcagtagtgaaaggggagtaaagagtaaaaaacaaggagttt

SEQ ID NO: 124847 - DNA, 608 bp, Homo sapiens
ttaactgacttcaaattatattacaaagctatagtaactgtagcagcctggtactggcataaaaatagacacataaaccaatggaattgaacagataacccagaaaaaaattttatacattttcactgaactcattttcaacaaaggtgccaagaacttaaattagggaaaagacaayctcttcaataaatcatgcttggaaactggatatctacatgcaaaagaatgaaattataaccccaactcttgccatatacaaaagtcgaatcaaaacggattaaatacttaaatctaagacctcgaattaaaaaactactgcaagaaaacattggggaaagtctctccaggtcttggcaaaaatgtcttgagtaataccccacaagcacaggcaaccaaagcaaatatggacaaatgaagttacatcaagttaaaaatcttctgcatgtcaaaggaaatgatcaataaagtgaggagacaacccacagaataggagaacatatttgcaaactattcacctgacaaaagattaataactagaacagataagcagctcaaactactgtataggaaaaaaatctagtaatctgatctttaaaatgggcaaaata

SEQ ID NO: 124848 - DNA, 608 bp, Homo sapiens
ttaactgacttcaaattatattacaaagctatagtaactgtagcagcctggtactggcataaaaatagacacataaaccaatggaattgaacagataacccagaaaaaaattttatacattttcactgaactcattttcaacaaaggtgccaagaacttaaattagggaaaagacaatctcttcaataaatcatgcttggaaactggatatctacatgcaaaagaatgaaattataaccccaactcttgccatatacaaaagtcgaatcaaaayggattaaatacttaaatctaagacctcgaattaaaaaactactgcaagaaaacattggggaaagtctctccaggtcttggcaaaaatgtcttgagtaataccccacaagcacaggcaaccaaagcaaatatggacaaatgaagttacatcaagttaaaaatcttctgcatgtcaaaggaaatgatcaataaagtgaggagacaacccacagaataggagaacatatttgcaaactattcacctgacaaaagattaataactagaacagataagcagctcaaactactgtataggaaaaaaatctagtaatctgatctttaaaatgggcaaaata

SEQ ID NO: 124849 - DNA, 608 bp, Homo sapiens
ttaactgacttcaaattatattacaaagctatagtaactgtagcagcctggtactggcataaaaatagacacataaaccaatggaattgaacagataacccagaaaaaaattttatacattttcactgaactcattttcaacaaaggtgccaagaacttaaattagggaaaagacaatctcttcaataaatcatgcttggaaactggatatctacatgcaaaagaatgaaattataaccccaactcttgccatatacaaaagtcgaatcaaaacggattaaatacttaaatctaagacctcgaattaaaaaactactgcaagaaaacattggggaaagtctctccaggtcttggcaaaaatgtcttgagtaataccccacaagcacaggcaaccaaagcaaatatggacaaatgaagttacatcaagttaaaaatcttctgyatgtcaaaggaaatgatcaataaagtgaggagacaacccacagaataggagaacatatttgcaaactattcacctgacaaaagattaataactagaacagataagcagctcaaactactgtataggaaaaaaatctagtaatctgatctttaaaatgggcaaaata

SEQ ID NO: 124850 - DNA, 608 bp, Homo sapiens
ttaactgacttcaaattatattacaaagctatagtaactgtagcagcctggtactggcataaaaatagacacataaaccaatggaattgaacagataacccagaaaaaaattttatacattttcactgaactcattttcaacaaaggtgccaagaacttaaattagggaaaagacaatctcttcaataaatcatgcttggaaactggatatctacatgcaaaagaatgaaattataaccccaactcttgccatatacaaaagtcgaatcaaaacggattaaatacttaaatctaagacctcgaattaaaaaactactgcaagaaaacattggggaaagtctctccaggtcttggcaaaaatgtcttgagtaataccccacaagcacaggcaaccaaagcaaatatggacaaatgaagttacatcaagttaaaaatcttctgcatgtcaaaggaaatgatcaataaagtgaggagrcaacccacagaataggagaacatatttgcaaactattcacctgacaaaagattaataactagaacagataagcagctcaaactactgtataggaaaaaaatctagtaatctgatctttaaaatgggcaaaata

SEQ ID NO: 124851 - DNA, 613 bp, Homo sapiens
cctttctgactcatatatacaagaaaagttgctagagaagcagacaactcagaaacaccaacaggcacacacatacrtaaaactccaagaaaattctgctgtctcttgtcaaaaaagcagggaagcggcaggctaccaagaaaaaaaaactcacagacaacaaccaaccagtttaagccaaagggtacaaataaaaccccaagccatataccttttgcaaagacttaaaaggaggacatagtcagccattccccactcctacccacagacaacatgataccacagcaggccaagtggggacacaggacactcatacccactgagcagtaacgcggcttcctccctctagagtgtgggtggaaaaaaagtggggagcctgagttcaacacccacccaatgataaggacatatccctatccctccctctacagagatatgacagcagaggcctactggagaatccaaactcaaagcactgctcagtgataacttaaccacccctccatcccagtgtcagtggaggccaagtgaaaagcaggaaccttttgagccagggtggtattcacaaaggtataatgcaagtccagagttttcattcctactcagcatttac

SEQ ID NO: 124852 - DNA, 613 bp, Homo sapiens
cctttctgactcatatatacaagaaaagttgctagagaagcagacaactcagaaacaccaacaggcacacacatacataaaactccaagaaaattctgctgtctcttgtcaaaaaagcagggaagcggcaggctacyaagaaaaaaaaactcacagacaacaaccaaccagtttaagccaaagggtacaaataaaaccccaagccatataccttttgcaaagacttaaaaggaggacatagtcagccattccccactcctacccacagacaacatgataccacagcaggccaagtggggacacaggacactcatacccactgagcagtaacgcggcttcctccctctagagtgtgggtggaaaaaaagtggggagcctgagttcaacacccacccaatgataaggacatatccctatccctccctctacagagatatgacagcagaggcctactggagaatccaaactcaaagcactgctcagtgataacttaaccacccctccatcccagtgtcagtggaggccaagtgaaaagcaggaaccttttgagccagggtggtattcacaaaggtataatgcaagtccagagttttcattcctactcagcatttac

SEQ ID NO: 124853 - DNA, 613 bp, Homo sapiens
cctttctgactcatatatacaagaaaagttgctagagaagcagacaactcagaaacaccaacaggcacacacatacataaaactccaagaaaattctgctgtctcttgtcaaaaaagcagggaagcggcaggctaccaagaaaaaaaaactcacagacaacaaccaaccagtttaagccaaagggtacaaataaaaccccaagccatataccttttgcaaagacttaaaaggaggacatagtcagccattccccactcctacccacagacaacatgataccacagcaggccaagtggggacacaggacactcatacccactgagcagyaacgcggcttcctccctctagagtgtgggtggaaaaaaagtggggagcctgagttcaacacccacccaatgataaggacatatccctatccctccctctacagagatatgacagcagaggcctactggagaatccaaactcaaagcactgctcagtgataacttaaccacccctccatcccagtgtcagtggaggccaagtgaaaagcaggaaccttttgagccagggtggtattcacaaaggtataatgcaagtccagagttttcattcctactcagcatttac

SEQ ID NO: 124854 - DNA, 613 bp, Homo sapiens
cctttctgactcatatatacaagaaaagttgctagagaagcagacaactcagaaacaccaacaggcacacacatacataaaactccaagaaaattctgctgtctcttgtcaaaaaagcagggaagcggcaggctaccaagaaaaaaaaactcacagacaacaaccaaccagtttaagccaaagggtacaaataaaaccccaagccatataccttttgcaaagacttaaaaggaggacatagtcagccattccccactcctacccacagacaacatgataccacagcaggccaagtggggacacaggacactcatacccactgagcagtaacgcggcttcctccctctagagtgtgrgtggaaaaaaagtggggagcctgagttcaacacccacccaatgataaggacatatccctatccctccctctacagagatatgacagcagaggcctactggagaatccaaactcaaagcactgctcagtgataacttaaccacccctccatcccagtgtcagtggaggccaagtgaaaagcaggaaccttttgagccagggtggtattcacaaaggtataatgcaagtccagagttttcattcctactcagcatttac

SEQ ID NO: 124855 - DNA, 581 bp, Homo sapiens
cctggggctgagtgagatcccctggagagagaaggaagcttatgtttgagccctagttcagcccaacatttagaagaacccctttgggaagaggagaagaacgagcaaaggctaaatgtgactccctgttttagaagaacctccttcagaagaagaaycaataaagcaaaggctgaactcaactttgtctccttttctcccccagacataatttatgttcttttattgggagtttgtttcccactcaacctttcaggttagagctctgaagtcacgtttgatttttccctcaacatcaaagagacacaacagtttgcttctgtggtgactgttttttgtttgtttttgtatttttgtttttttgtttttgtgtgtgtgtttgtgttattttaatttgtttgtttgtttgagacaatgtctcactctgtcacctgggctggagtgcagtggcacaatctcagctcactgcaacctccacctcctgggcttaagtgatcctcccacctcagctcccctagtagctaggactacaggcacacaccaccactcctggctattttttctatttttaatagagatgg

SEQ ID NO: 124856 - DNA, 581 bp, Homo sapiens
cctggggctgagtgagatcccctggagagagaaggaagcttatgtttgagccctagttcagcccaacatttagaagaacccctttgggaagaggagaagaacgagcaaaggctaaatgtgactccctgttttagaagaacctccttcagaagaagaatcaataaagcaaaggctgaactcaactttgtctccttttctcccccagacataatttatgttcttttattgggagtttgtttcccactcaacctttcaggttagagctctgaagtcacktttgatttttccctcaacatcaaagagacacaacagtttgcttctgtggtgactgttttttgtttgtttttgtatttttgtttttttgtttttgtgtgtgtgtttgtgttattttaatttgtttgtttgtttgagacaatgtctcactctgtcacctgggctggagtgcagtggcacaatctcagctcactgcaacctccacctcctgggcttaagtgatcctcccacctcagctcccctagtagctaggactacaggcacacaccaccactcctggctattttttctatttttaatagagatgg

SEQ ID NO: 124857 - DNA, 576 bp, Homo sapiens
gaatacccagtgtaaacatttcttccttgattccctctatccttttacttttcatttcaaaaatgtaattatattatttctttgcttagactataatcaagctcagtttgtaaaagtcaaatactcttgttgtgggaggcaaagtaatatttttgtttattttatcagatatcagtgttatcctccaaatcagagttttggagtcacctttcttaagcttttatgagatataacaagttgcattattaaawgggttacctctctaaatatcagagttatgacacatcattttccatttttaaaaccatatgcatgtagatgctgtggttctccattgatatcagtatttgtggattaaaatgcattttttttaaaaataaaggaaatacatagaatctttgagagcaggatagtgtccataaatttttgtttcagattttaattttctctaatgatgtcaagaattttacacttcaagctttgctctccttgttttagtttgagcttataatttcttgtttattagggagaattctcaccatcacataaataaagaactattaaaaatacatgaaa

SEQ ID NO: 124858 - DNA, 598 bp, Homo sapiens
gaattcaccttcccctagaacaatgtcatgagtgctaatgtacttccctggccagctcactaggatcctctcaactcacaacgcaggtgcctttcatactactaacactaattcaaatatgtgatgtctacctttggcatctgccaatctgctttctgtaacaccctctttccacacttaggtgcctcaaacttctcaacagtgctactgcccaagccttaaaatgacttactctcgggccaggcgcggtggatcacgcctgtaaacccagcactttgggaggccgaggccggcggatcatgaggtcaggagatcgagaccatcctggctaacatggtgaaaccctgtctctactaaaaatacaaaaaattagccgggcrtggtggcaggtgcctgtagtcccagctacttgggaggctgaagcgggagaatggcatgaacccgggaggtggagcttgcagtgagccgagatggtgccactgcactccagcctgggcgacagagagagactccatctcaaaaaacaaaaacaaaacaaaaaaaaacttactcttccttcttccttcctcactcctcctctcagccaaactccaattct

SEQ ID NO: 124859 - DNA, 481 bp, Homo sapiens
ggttttcaatcctgttcaggtcatctgcaaccacagtccactttggcaaagctaccaatgcagagaagagcctgggcaggtaggcagtcgtccagcatccagagagagaagagcagagccaatgggaccagcatgcggagcccgcccagaaacaccagaaaagggtggaacccagcctcagggtgagggaggccagattctggctagagacaccagcatctgaggaggagtcaagtaggccaacaatgttatttgcatccatttggtaggccagaatagtagctttaaacgcyagtgtcagattcaagatcaccacagagtagagcagtggttcttaaaccttagcttgcactaagaccacttgcagggcttattaaaacagatcactacttcagcaggtccagggtgaggccgggtgacctgcactttttttttttttttttttttttgagatggagttaccctcttgtcacccaggctg

SEQ ID NO: 124860 - DNA, 551 bp, Homo sapiens
aaccccaaaagagttgtgaattctgcttagttttacatggaactcattattagtaagttgtggtatagatctttaagctgaggtcagtcatagagaaaagctttttataaaaacactcagcgagttaaaccaaatacaccttttagaaacttttgctccatgaaacaayagttccctaaaccaggttttgtttggttcgtttttttaaactgtgggtttctatttaccaatggcatgtgaaatcaattcattggaacaaaacagcttttgcacaaacaacaaaacaaaacagactttattgcagagcagctgacgaaaaataagtataataataataatttcatgaaaaattttcattcacaggtatgtgctgtgtgtgtgtgtgtgtgtgtatgtgtgtgcggtgtatgtgtccagggttacaatggaaaatttacttgttaagttgggttacaataaaaaagtttgaaaagcactactcctaaaccatacatttttcttcaaactgtctgtctgaggtttcccttgatgagtgaccttcagtggccacc

SEQ ID NO: 124861 - DNA, 551 bp, Homo sapiens
aaccccaaaagagttgtgaattctgcttagttttacatggaactcattattagtaagttgtggtatagatctttaagctgaggtcagtcatagagaaaagctttttataaaaacactcagcgagttaaaccaaatacaccttttagaaacttttgctccatgaaacaatagttccctaaaccaggttttgtttggttcgtttttttaaactgtgggtttctatttaccaatggcatgtgaaatcaattmattggaacaaaacagcttttgcacaaacaacaaaacaaaacagactttattgcagagcagctgacgaaaaataagtataataataataatttcatgaaaaattttcattcacaggtatgtgctgtgtgtgtgtgtgtgtgtgtatgtgtgtgcggtgtatgtgtccagggttacaatggaaaatttacttgttaagttgggttacaataaaaaagtttgaaaagcactactcctaaaccatacatttttcttcaaactgtctgtctgaggtttcccttgatgagtgaccttcagtggccacc

SEQ ID NO: 124862 - DNA, 613 bp, Homo sapiens
ggatccaaagacaggattaaartattaaaggagtgctgaatgtgttctaggaacctgtctgcaagtcgcttcttcaaggtgctcctgctgaggacatggagagtgtgtggtagtctgtttcactgctataaaggaatacctgagactgggtaatttattaaaaaaagaggtttatttggcccatgggtctgcaggctgtactggcatgtgcttctggtgagggctttaggaagcttctgaaaatcactgtgtaaggcaaaggagagcctgtgtgtcacctgggaagagacagaaagagaagggagggaggtgctggtctctttttaacaaactgatctggcaggaactaatagagtgagaatccactcattacctcaaggagggcaccaagcagatcatgagagatccttctgtgtgacccagatacctcccaccaagccccacctccaatattgagaatcagatttcgatatgagatttggaggagtcaaatatcccaattatatcagtagctcctgtgttgttgactgagagctcgtctttagggttaagaagccacatgagcaagagctgggactgatgacctgttctgcaaactggagcacctaatagt

SEQ ID NO: 124863 - DNA, 643 bp, Homo sapiens
tcttttgttggccaaaattatatcaggcaatcagaatgaatcttgcccaacagttaattaatattcaccaatctgtgtgtgagattacaagtagaattctgtaagtttgaaaaataaataataagagtaataaaatttacatttctataatgactgaagatttagaaacacctttcttatccatactattttaaaaagctcacattgatgttacaattatcattcttaaaatgaggattgaaatggttatgtgactagcctgagataacagaccctaaatttctaaaaagaaaacaaaaaaaattccaacaaggcttactactgaccttgagctctttgtactatactatcttttttaagttacacrttccctcttacctgacacttgccatactgcccaaattcttcagaacattattacatgccttgtaaatgaatctataaatggtttgtgaaaaatgaacctcttatagctcagcaggcagccagcagtgataactgttatctacctgctgtgagacttagggcaagttagtaaatctctctgaaacttaactttctcttctttaatatcaaaataatagtatatacttgcatttgagagaaaacaataaagtacatgtaagagacactctcccagaac

SEQ ID NO: 124864 - DNA, 561 bp, Homo sapiens
ttcacgagaccaagtattgtatgttggtctcattgactgatcattccttaatacctaacatagagtctgtcatgtattcacaaaaacaaaaatatatttaaaaaattttttaattcatagattttttaaaaaacctgaaatagaaatctgtcagacgtgcaaaggttgagcaaggtgttaagaacagatatggtacattttattttatattggagaatttagacaagtaactaatggcctttttgtgtgattcattcagaaatctgagaatacacttcttattcaagataattaaaactttagtcaagaacaacacaaagcaaattgtacattttttgtcaataagttaaaattctgggtgagttatgaaggattaataatttgttagagaaaaaagcaacaagtttataaaagaagaaaaatgtcttaagaaataagtccattcaggaaactatacaataaatactgaaactgagaaaatttttttccaacraagataaattttttttccaacaatgataacaaaaaattactctttttttttaaatgaatacggcaaat

SEQ ID NO: 124865 - DNA, 605 bp, Homo sapiens
agacataaaatgccaatcaatgaactcaaaataataattgtctaatgccctacctgctggtgctgggcaggttggcctagctggaaggggtttcccaggggtttcccataaactccagctatgtagcatgtgacaccctaaatggattttgcagctaacataccacagtctggcaaaagtggtttaagtctctctggacaggcataacttcccaagactcaagtgctggatcatgagccatgaggttgatatccagaaaaataactgcaagaaaccattcagctggacatgggaagaggactctagcaaagatcattctccacacctaggcttctacaacacggcattgtgttgtgtaaaggggccagattcaattcatggcacagaggagaaataggcgtaattcamaaacagaatgtaattgaccaatcattatgaaaaaatgcttaatggcactaataacaaaaggaaaacaaactagaatctgattcgtcattcattcattcattccacacatgatttttgaatatcttttatgtgcacatattgggaatacagcattgaacaaaagcgacagatacctctaccatggcaaagcccatgtt

SEQ ID NO: 124866 - DNA, 605 bp, Homo sapiens
agacataaaatgccaatcaatgaactcaaaataataattgtctaatgccctacctgctggtgctgggcaggttggcctagctggaaggggtttcccaggggtttcccataaactccagctatgtagcatgtgacaccctaaatggattttgcagctaacataccacagtctggcaaaagtggtttaagtctctctggacaggcataacttcccaagactcaagtgctggatcatgagccatgaggttgatatccagaaaaataactgcaagaaaccattcagctggacatgggaagaggactctagcaaagatcattctccacacctaggcttctacaacacggcattgtgttgtgtaaaggggccagattcaattcatggcacagaggagaaataggcgtaattcacaaacagaatgtaattgaccaatcattatgaaaaaatgcttaatggcactaataacaaaaggaaaacaaactagaatctgattcgtcattcattcattcattccacacatgatttttgaatatcttttatgtgcacatattgggaatacagcattgaacaaaagcracagatacctctaccatggcaaagcccatgtt

SEQ ID NO: 124867 - DNA, 583 bp, Homo sapiens
cctgtgacaacataataaattcaaaaagttctgtaactcagacaatttagatagaagtgaggactttggcctagacagccctgttcactctaaagatggattaaacaaggaaaaagatattgatatcaaaaattcaatcaggaatttgattaaagcatttcattaaatgtgataattgcttagtatattatcttacatatgcaatattcatgtgtgacaaattaaatacaagtaaacatttgagcatattatctgcagcataatttacatatcaatttacatattcagttttgctyacatgaaaacttggatcttctcaatagaaaattgtgaaatctttaattcctcatccccaggaatgtaaataaataaatataaatataagtcagtgattttttcctaggaagacagtaaaattactttacacgccttctcattgtaaacctaaataacaaacagagaaaggttctctaaaggaaaaagacacatcttagggaggaggacactgcaatgggaatatgcatgacaaagcaaactgtgtagattcaaatggtaaaggaagacaaggtctttaaaagaaaag

SEQ ID NO: 124868 - DNA, 600 bp, Homo sapiens
agagcgactcctttaagcaagcaataagaaacttcctgtgacaacataataaattcaaaaagttctgtaactcagacaatttagatagaagtgaggactttggcctagacagccctgttcactctaaagatggattaaacaaggaaaaagatattgatatcaaaaattcaatcaggaatttgattaaagcatttcattaaatgtgataattgcttagtatattatcttacatatgcaatattcatgtgtgacaaattaaatacaagtaaacatttgagcatattatctgcagcataatttacatatcaatttacatattcagttttgctcacatgaaaacttsgatcttctcaatagaaaattgtgaaatctttaattcctcatccccaggaatgtaaataaataaatataaatataagtcagtgattttttcctaggaagacagtaaaattactttacacgccttctcattgtaaacctaaataacaaacagagaaaggttctctaaaggaaaaagacacatcttagggaggaggacactgcaatgggaatatgcatgacaaagcaaactgtgtagattcaaatggtaaaggaagacaa

SEQ ID NO: 124869 - DNA, 583 bp, Homo sapiens
cctgtgacaacataataaattcaaaaagttctgtaactcagacaatttagatagaagtgaggactttggcctagacagccctgttcactctaaagatggattaaacaaggaaaaagatattgatatcaaaaattcaatcaggaatttgattaaagcatttcattaaatgtgataattgcttagtatattatcttacatatgcaatattcatgtgtgacaaattaaatacaagtaaacatttgagcatattatctgcagcataatttacatatcaatttacatattcagttttgctcacatgaaaacttggatcttctcaatagaaaattgtgaaatctttaattcctcatccccaggaatgtaaataaataaatataaatataagtcagtgattttttcctaggaagacagtaaaawtactttacacgccttctcattgtaaacctaaataacaaacagagaaaggttctctaaaggaaaaagacacatcttagggaggaggacactgcaatgggaatatgcatgacaaagcaaactgtgtagattcaaatggtaaaggaagacaaggtctttaaaagaaaag

SEQ ID NO: 124870 - DNA, 583 bp, Homo sapiens
cctgtgacaacataataaattcaaaaagttctgtaactcagacaatttagatagaagtgaggactttggcctagacagccctgttcactctaaagatggattaaacaaggaaaaagatattgatatcaaaaattcaatcaggaatttgattaaagcatttcattaaatgtgataattgcttagtatattatcttacatatgcaatattcatgtgtgacaaattaaatacaagtaaacatttgagcatattatctgcagcataatttacatatcaatttacatattcagttttgctcacatgaaaacttggatcttctcaatagaaaattgtgaaatctttaattcctcatccccaggaatgtaaataaataaatataaatataagtcagtgattttttcctaggaagacagtaaaattactttacacgycttctcattgtaaacctaaataacaaacagagaaaggttctctaaaggaaaaagacacatcttagggaggaggacactgcaatgggaatatgcatgacaaagcaaactgtgtagattcaaatggtaaaggaagacaaggtctttaaaagaaaag

SEQ ID NO: 124871 - DNA, 556 bp, Homo sapiens
tgtctatggggcaaccccatagggtgagagagtaactcagtcctggccctgatgctggctctggagaattccctgagctctcatttctgtggcctccgtgagaaccactacaggcctgtagacatttgtgaaagatgtggggtggaggcagctggtctcctgccatacccccaaactcaggcaagaacccttgagtccctccctcccttcatgccttccctcctccctcccttccccttctgcaggcctatccccctgcaccctctcagtgcctcaagaactgctgcagctcccgcaaaccctctgcctgcaacaagggtgcctgcgaagtgatggagacactgacagtgcaggaagaggcaaacccagggacagaggggtgcaggactcgggccctggcacacaaggaggtagctggtggtcgargcaaagaccacaatcacagggaaaaaaggcttgttcctacacacagaaaattaaactgtccaggcagtaataagaaacatagggtcttcctcctgttcttggtgtgaggatggtctttcccaacacagag

SEQ ID NO: 124872 - DNA, 556 bp, Homo sapiens
tgtctatggggcaaccccatagggtgagagagtaactcagtcctggccctgatgctggctctggagaattccctgagctctcatttctgtggcctccgtgagaaccactacaggcctgtagacatttgtgaaagatgtggggtggaggcagctggtctcctgccatacccccaaactcaggcaagaacccttgagtccctccctcccttcatgccttccctcctccctcccttccccttctgcaggcctatccccctgcaccctctcagtgcctcaagaactgctgcagctcccgcaaaccctctgcctgcaacaagggtgcctgcgaagtgatggagacactgacagtgcaggaagaggcaaacccagggacagaggggtgcaggactcgggccctggcacacaaggaggtagctggtggtcgaagcaaagaccacaatcacagggaaaaaaggcttgttcctacacacagaaaattaaactgtccaggcagtaataagaaacayagggtcttcctcctgttcttggtgtgaggatggtctttcccaacacagag

SEQ ID NO: 124873 - DNA, 556 bp, Homo sapiens
aaagttcatagccctaaatacctacatcagaaagtatgaaagagcacaaacagacaatctaagatcacacctcaaggaactagagaaacaagagcaaaccaaacccaaacccagcagaagaaaggaaataaccaagatcagagctgtattattctgttttcatgctgctgataaagacatacctgagactgggcaattgataacagaaagagattcaatggactcacagttccrtgtggctggggagggctcacaatccaggcggaaggtgaaagtcacatatcacatggtggcagacaagagaagagagattgtgcagagagactcctgtttttaaaatcatcagatcttgtggacttattcattacgatgataacagcgttggaaagacctgcccccatgattcagttacctcccactgggtccctttcatgacacgtgggaattaaagttgagatttgggtggggacacagccaaacagcatcattctgcccctgacccttcccaaatctcatgtcctcacatttcaaaaccaatcatgccttcccaacagtc

SEQ ID NO: 124874 - DNA, 578 bp, Homo sapiens
aatcaaggaattactatcaaggccattatccttagcaaactaaagcaggaacaaaaaaccaaatactgcatgttctcacttataagtgggagccaaatgatgagaacacatggatatatatagaggggaacaacacacactggagcctaccaaaaggtggagggtgggaggagggagaatatcaggaaaaataactaatgggtactagggttaatacctggtttatgaaataatctgtacacaacaaaccctcatgatacaagtttacctatttaacaaacctgcacatgtgcccctgaacttaaaagttaaaaaagataaccacaatagtagtagcaaatatactacatggtagggttgcaaacttaagagtcaaaatataaagtgattttaaagtgaaaatgaaaggtagctaaaattgctcttgaatatcctgttgcaaaacttcaagttgtgkgaagttagtttcaaagaggtttaatatagcacttcccacctgccttgggataatttttttcagttaaaaagtagtataaaagtataaaaaatagttgtcttgcatttatgggtgaagttgt

SEQ ID NO: 124875 - DNA, 530 bp, Homo sapiens
acttcagaattcctctgaaaacaaaaaaggggaaaaaaagaagaaaacatatttccttccagctttaagtcacagcccatctttgcattgactggatagcatttttttttttaaagcatgtgacttctctcttagggagagagacagcgagagttatcagcatcttggacaaaaggtgtgatttcaaagaacaggctaaatggagagaggcacagacctgctgtctcattccacaatttgaactgtaccatgaaaaagatcactggacaagtatgctcattaaaacattattcgttatagaaaaaaagtctcataaaatctggaagcaaatgaatgtcarttaagagattatttttatcgaatggaaatatgaatcagcttaaaattgtgcatttcgttacacagaaagaactttgtaacatattatggaaggaagaaaggggacacagaagagtcttcagatcaataggcatgtgtgtgcacgcacatgtatgtacacataaatgcttgaacagtttttcattaaacta

SEQ ID NO: 124876 - DNA, 546 bp, Homo sapiens
cttagctcccacttacaagtgagaacgtacaatatttggtttttaattccggagttacttcatttagaataatggcctccagctccatccaagttgttgcaagggccattatttcattccattttttggctgagtagtattccatagcatatatatacaccacatttcctttatccactcattgggtgatgggcattaggttggttaatatttctgcaattgcaaattgtgctgctataaacatgcatgtacatgtatgtctttttcatatactgacttcttttcctttggatagatacccagaagcgggattsctggatcaaatggtagttctacttttagttctttaaggaatctccatactgtcttccatagtggttttactagtttatattccagcagtgtgaaagcattcccttttcaccacatccatggcagcatctaaagtttaaattttctactattattacagtgtggtagttaacttttgattataattattattgactcgtagtgagcactcattcaggcccattatccctttgc

SEQ ID NO: 124877 - DNA, 614 bp, Homo sapiens
atcagctaggatgggacttctttttccatcaatatcttgtataacaaacgggttgtatcatctgggtggggaagggagggggtagcctgcttctaagtaactggtactggcttatctggcatggaaagtagaatacattatgcctcaaataaacatgtaggaaaatgttgtcaagagtccatgaaaactgccaaagacatttcttcttcatttaaaaattatcttatcaggttggtgactccaaccttgcaagggaagaagctattttagacaaatttacagctttcaatgctttctgccatatgtggaactaatctgactccaagtcaagtctgcaaaactgttttttttcctacatagttcgtttaaaaatctcaccaaaacttatagtgccatatgtcaaaatcaagttaaattaaatacattaatgcattgcaatgtgtatacraaatagggaaagaacaaaagaaatatgaagaaagttgagcatttcacattgctcagctcctcttaggtaaagatcttgacaagaagggcctgggaatgaaggttctgattagaaatgccaggaaaaaggtgaacaaaatgaattctatttactaattctcaacaac

SEQ ID NO: 124878 - DNA, 553 bp, Homo sapiens
  misc_feature (1)...(553): n = A,T,C or G
nnnnnnnnnnnnnnnnnnnnnnnnncgatatgtcaaactaaccagaaataagtgtatgaacttcatkgtcttcagaataaaacacaacccacattataataacaatgaaattgccctaccgtaattgtgataatgataaagaattgatttctggatctctagaattatcttctctagctattattgtcttcatggctttgtaaacttaaatcctctcttatgccccccagtttgtaaacttgtattacaattttgaatttttttcagaaactatagtatgctttattagtataaaataaagtgattttaccttgtaagaatttaattaattagaaagagcagaattctgtaacataaaattttaatttaaaagaaatgtcaaacttgacttgtgataatagatcatgagagatactatgagatataagacattggagagaagattaattcataatgatttagcttgatacatagtataatatagtcagactccatcacttggaatttttttttgcttgtactggacagaagcagatcattttaaaaagtgatc

SEQ ID NO: 124879 - DNA, 553 bp, Homo sapiens
  misc_feature (1)...(553): n = A,T,C or G
nnnnnnnnnnnnnnnnnnnnnnnnncgatatgtcaaactaaccagaaataagtgtatgaacttcatggtcttcagaataaaacacaacccacattataataacaatgaaattgccctaccgtaattgtgataatgataaagaattgatttctggatctctagaattatcttctctagctattattgtcttcatggctttgtaaacttaaatcctctcttatgccccccagtttgtaaacttgtattacaattttgaatttttttcagaaactatagtatgcttkattagtataaaataaagtgattttaccttgtaagaatttaattaattagaaagagcagaattctgtaacataaaattttaatttaaaagaaatgtcaaacttgacttgtgataatagatcatgagagatactatgagatataagacattggagagaagattaattcataatgatttagcttgatacatagtataatatagtcagactccatcacttggaatttttttttgcttgtactggacagaagcagatcattttaaaaagtgatc

SEQ ID NO: 124880 - DNA, 543 bp, Homo sapiens
tgaaccactacattacactcattcattagaggaaaattaaccactaatgtattttttttaaccatcrcatggttaaaaattagaggaaaattaactacacatgtgattttttaaccatcatatttatttttaagtgtacggtttagtagtactaagtatattcatattattatgcaacagatctctagaactatttaatcttgcaacactgaaactttacagccattaaataccagttcaccttcttccctttccccagtccttgataaccacctttctacttttggttgctatgattttggctactttaaatacttcatatgaggggaatcaaagagcatttctctagcttattttatttagcataatgaccttaagattaatccatgttgtaggacatgacagaatttttttccttttttaagaccacgtagtattccattgcatgtgtataccacattttctttatccatcatctgtcaatggacatttggatttctttcacctcttggctattgtgaataatactacaatgaaaattga

SEQ ID NO: 124881 - DNA, 543 bp, Homo sapiens
tgaaccactacattacactcattcattagaggaaaattaaccactaatgtattttttttaaccatcgcatggttaaaaattagaggaaaattaactacamatgtgattttttaaccatcatatttatttttaagtgtacggtttagtagtactaagtatattcatattattatgcaacagatctctagaactatttaatcttgcaacactgaaactttacagccattaaataccagttcaccttcttccctttccccagtccttgataaccacctttctacttttggttgctatgattttggctactttaaatacttcatatgaggggaatcaaagagcatttctctagcttattttatttagcataatgaccttaagattaatccatgttgtaggacatgacagaatttttttccttttttaagaccacgtagtattccattgcatgtgtataccacattttctttatccatcatctgtcaatggacatttggatttctttcacctcttggctattgtgaataatactacaatgaaaattga

SEQ ID NO: 124882 - DNA, 614 bp, Homo sapiens
acttccttctcaaaggagcgggatggggtggaagccaatagttgtatccctgccaggttaaatttgtggtgcctaatagatgttaatgtgcagttgtcaaatagacagttggatccaaagtctgtaccttgggggaaagtctggaaaagtgatataaagtgtttaaagtccaggaagacaatgttaagagaagcctgagagttgatagggaggagacaacagaacagcagttctatggacgatggtcagaggtcttgtaaagaaaaaagaaactagcaaaggcaggggcatgatggtatagctaatgccagcrtatcttccacaggaaaggacttaaaatatttgaggtatttatcacagtctggaggtacacacaactcagctgagataaaattccatacaaatgagaaaattgataatgtttgtgatttaagtaatctttttggcatttaagaaaggagaaatgagaaaactatgcttagaaaaactatgagaatcagatactcacattctgtttatttctaccagaacttgatgaatctgggacaaaagcctccaaatggaacagctggaatacaatatccatcacacacactgtggaagctggagctccc

SEQ ID NO: 124883 - DNA, 350 bp, Homo sapiens
aattctgcattcagttacttttacattaaacgggatttactgggaaggaatgagagaatttgaccagtggggaataaagtgagtaatttttatactgatttaaacaatgccaagtactttatgaccgaatagctgaagaacagcattgtatagctccttaattaccctcactttttcttccatacttgttgggcaaaaggagaaaacattagctaataattcagttcacaagaacaaatgtgattgcrctgactcattagggcttgtggccagatatgtgtgaatgctgagtgccttgagttagagatagttgagaatgaagggaaaccaagaatggacatgtgatgaat

SEQ ID NO: 124884 - DNA, 516 bp, Homo sapiens
gtacatgccaacaaaattaaagcctatagagattgcattgattcaataagtcaattttggtaacatttatatttcaataatatcgagtcttaagatccacaagtattgcgtgtttctccagttatttagatatttaattttttccagcaatgttacagttttcagtgtaaatgtcatgcatatattttattaaaatgtagtattctttcatgtgtttttatcctctcagaaatggtattttaaatttcaattttgggttacttgttgttggtacatagaaatacaattgattttttatattagtcttatattctgcaactgtgttaaattcacctatttgctataatagctattttatggatcctttsgttgttttccatgtacatggtcatgtctgcaagtaaaagagttatcttttcatttaaaatctgtgtgccttaatatctattcattgccttataattggccaggacaccttatgtaatgtaggatacaggtagtgactgctaacctact

SEQ ID NO: 124885 - DNA, 652 bp, Homo sapiens
tttcttcttttttaactgagtagagagaattacttcatttgtctacagatatataactttttactctatccaaaggaagcactcaccagaagcttaaatcctacttagtgagagaataataggtccctatactatgttagcgagactctatactatgttacttcacagagtgtatttaaatagaaatactttgtcagactttatcgttatcaaaaatcactgaagattatcctgttgaaatatcatttttcatagctgtatgttttaaaatctaagtttaaaatatatctatttgaacctgagtagtgacaaaggactatcaccaatgtcagttgacaactctgatttttttttccacacatcaaatgacacccctgaggaaaaaaaaatcatctgtgcttctattttaaccatataagcatttttacttgtaactgtatttttacagaaggatataaatgctacctgagattattttaagcaactctatgtgactacctattcaacctagttcctaaaagacaactgmtacataaatagaaataatgaaacaatatatccaatacctctttttattggacaatcttattgaagatgaaagggcactagtccttttgctgtgttacctggaaaatctatacctaatgatagt

SEQ ID NO: 124886 - DNA, 577 bp, Homo sapiens
atggaagatccatactctgcctcagcatactcagagggaatcctgagcaatgctgggggcctcaggcactctctagaagttagttacctccttagggccaaggaatgagaccagggattgtcacgtacctcctcagtaaaggatggactttcaattctttatacttctactccccatttgttttagtccattttgcgttgctatagcagaatacctgagactgggtgatttataaagaaaagaattttatttagcttatggttctccaggctgggaagttcaagggcatgatgctggtttctggaaaaggtattcctgcttcattgtatcatggcagagaaggkcaaaggggaagcagacacttggaaagaaagaaaacccaaggggcatcctgcctttataccaacccattatcaagggaactaatccattcccatgagaattaatccagtctcaccagaaggaggactcactcactaccactagaatgcactagtagccattcatgagggatctacccccatgacccaaacacctccctgtaggccccacttcccaatactaccacagtggggat

SEQ ID NO: 124887 - DNA, 449 bp, Homo sapiens
gaattcaagaccagtcttggcaacatagtgagaccctgtctccccaaatagtttttaaaaaatagctgggtgtggtggtgcgtgcctgtagttcctgctacttgggaagctgaggtgagaggatcactggagcccaggtgtttgaggctgcagtgagctatgtttgtaccacttcaggctgggccacagagtgagaccccaaattgaaataaataaacaaagaagaaatgagagagcttgctctctctcaaacatgtgaggatacaatgagaagatggccatctgcaaaccaggaagtgaccttctccagacaccagatctgttcgtgccttgatcttggcctccagaactgtgagaaataaatgtctgttgtttggagccacccaatytgctgtgttttgttatggaagcctgaatagatgaagacaactaccattcccatttctccg

SEQ ID NO: 124888 - DNA, 491 bp, Homo sapiens
tagctcagttcccccaagcccagctttactctgttcccagctttctcactctttttcccttgttccttcattttggtcttggcttcctctggggcagatgtcatgcagcttgttccatgtcatcttctctggcaggarcctgctttcctcaactgacagaaggggtcttgttagcaggaatctcacccaaggactcgccttagcacccttaggccaagagtcaggctgaaaggctagcacaagctgccctggtgaaagaccagcctttgtatctcgccaggagcaacaaggactctctctggtcctgcacgatccatgtggcagcatctttagattggccactggcttctccacccacacctggctgtagacttgcaagaccagcaagagcaggaggtgttcagggcagggctttgtgggccccttcttggtcctggcttttaatgcatcgtgtttgatctttgccacgtggtggagggttcctgtcgctc

SEQ ID NO: 124889 - DNA, 593 bp, Homo sapiens
atacattttgttatttatggaatactcatagagagtccaataggctgtgggggtgttgattgatgtaaaaaggtaactagctgtgattattaggtaatgagactgttttttttgtgtgtgtgtggctccttggctagctccaaatgaataaatgactgaaacatcaggcctcgggactccttcagaatgcatggtgaatgaagaaaggcaagatgatcaggtccctgtgtttggtcaaggttttgtgaacaagcaaggtcttggagttgaaagtaatacaatcagtattaaataaaatgatatgagagagcacctaaacagatagcagatattctcatgggttttcaccaccaagttatttaccatgattattattaaaaccatctgctgcctggcaaaaaaaaaggcttttgtctgggcaccaaccatcccactctctttattgyttttatatggagcctggggagggagatggatgggatgagtggccacaactccatttgggagtgtctcagacaggctagcatagcatgttgtattgcattcagagaactgggtgactgtatttatcaaggtgacaagaataggcagca

SEQ ID NO: 124890 - DNA, 606 bp, Homo sapiens
tagggcaagggccattttgattttccagacttagatgggaaaatggaagcatgttaagggaaattatatcaggattacatcaagttaaagtagaacagcgagtgaaaggggcttcartattctctgggatgtatcaggaagagctctgatgttatggggatatcaagtaagcataacattactgccatttcctcagcatcttgacctaaggaaacaaaaatgtgttctacctccccagtagatcaggtgccattctactcaaataggttctccctactttgcagattaatgcacagattcacattttgaagtttaaagcttttgccttaatctaagagccaaggtctcccaacataccctgttgcaaccattctgtaaagccttactcaatacaaaaactcttctttaattcaacatcaacaacagtcaagcggcagactaactagatgctctccagcctctctttcccatcatggggatgcagaaaacctacatttcttatcttcccttgcagttttttgagggccatgtgatcaggttctgaccaaagaaatatgggaaggaatgatgactgccacctccaagctgcatataaaacatcccaca

SEQ ID NO: 124891 - DNA, 516 bp, Homo sapiens
ggaccaatgaagaccaatgagctattttttagcaggaaaaagaaatgaaggtgggcttccatttttttcctatgcttcaatgactcccctttccagatctgcctgttgcaaagttcttttactctctgacagtgaaaaaaaaattatgtgtgaaaggaacaaaatcatttattaacaatcaacctccaacttcaaactgccagccactcaaaagactagatcctgacaaccggagggtcccctgtttaatgggtaaagtggggtgtttagatatgggtttgggggcaatacattgctctgcataagaaaggaaaaactatggagaggtgccttaagaaaagatctcagcctaaatttctcttaataaayacatattgagcatccactccatgttaggcattgactagatgggatttacatatgttccttcaatgtaagtcacaaactagacatcatggctggtttttgttttttaaatgaagaagcagccttgggaagtgcaatgatttcctgaag

SEQ ID NO: 124892 - DNA, 640 bp, Homo sapiens
aatgtaaaacagctgtcaactggaaaaaggaggaagtaagtgttggcacctacaaagctacaaagaccaatttttttaaaacatgagattacttaagtgtcatatttacagtcagaatcaccttattctttgaagtaatgaaacaagatgattttcacattttcaaagtactaatgaaaacccagcayacttaattattgcaaatgcttagatgcatgtgatcaggggtcatgtcttctagtgtattttttaatcacaaatggtgttatataccatcctcaacagcatctgacactgtctctacactcagcaggtactccataaacatcagtggctagagtttccaggcacaactccagcctcatcaggtcactggaatattaagcagagaaactgaggcagaagcccaattgtgaaccaacccagtggctgtaatcccagcactttgggaggctgaggtgggtggatcacgaggtcaggagatcgcgacaatcctggctaacacggtgaaacccagtttctactaaaaacacaaaaaattagccgggtgtggtggcaggtgcctgtagtcccagctacttgggaggctgaggcaggagaatggtgtgaacctgggaggtggagcttgctgtgagccgag

SEQ ID NO: 124893 - DNA, 640 bp, Homo sapiens
aatgtaaaacagctgtcaactggaaaaaggaggaagtaagtgttggcacctacaaagctacaaagaccaatttttttaaaacatgagattacttaagtgtcatatttacagtcagaatcaccttattctttgaagtaatgaaacaagatgattttcacattttcaaagtactaatgaaaacccagcatacttaattattgcaaatgcttagatgcatgtgatcaggggtcatgtcttctagtgtattttttaatcacaaatggtgttatataccatcctcaacagcatctgacactgtctctacactcagcaggtactccataaacatcagtggctagagtttccaggcacaactccagcctcatcaggtcactggaatattaagcagagaaactgaggcagaagcccaattgtgaaccaacccagtggctgtaatcccagcactttgggaggctgaggtgggtggatcacgaggtcaggagatcgcgacmatcctggctaacacggtgaaacccagtttctactaaaaacacaaaaaattagccgggtgtggtggcaggtgcctgtagtcccagctacttgggaggctgaggcaggagaatggtgtgaacctgggaggtggagcttgctgtgagccgag

SEQ ID NO: 124894 - DNA, 500 bp, Homo sapiens
aagtgggactttatggagtcttcgtagtatcagccacttggaagatgcttcatggagaggctgtcttctgcgtaatcttctcttggcaataaagagtaattgcgaggaaggggaagtgaaagaggctaggagtggagactggggaaaagagacattccaaaatgagcttcatgggatggcacccacrtatgtgcaacacacaaaaccatatacactcctcacctggggcccttgccttcaaacgcattccattgcaacattcacagtcctttcctgcctccaaatcaagagcatggagaagcaggaagaatttctgcaacggcaatttggcaagtctaaatcagatcatcgtcctttcatagatcatggtggtatttgtgatcacagtacactattacccttgtttatccagactttgtctgcatccaccacatcttaaggccactttaaacttggccaacaggtatgctactctacacagctagcagtgaacttcactt

SEQ ID NO: 124895 - DNA, 558 bp, Homo sapiens
ttctaaaggacccgaatgaatgatgcctggtataagtatggccaattaacgaaatgaaaacaggccgttgttgaggccacatttagggacaacctcagttaagtacctaacattctgttgcttgcagatcatgcttcatgcaatttycagcttaagacagcaaacagaagagggaaaaagtcacttccattccactctttgggggaaaaagtgagagagaaactcatgtgattggagagacccaaattacacacctattattcttttcaagaagaaagagggttttgcacattccctcttgggtagaaaatcttctgattttagtgaagaagtagatgcagtctcttgctcctcttcttggttactcagaggaagagaccaaaaagaaagagactttctaggggaaaacaaagctagcagaggctttgatcctgagcaacctgaagcctgcgagagggctgaacagagaggacacacaggtcactgaggactcacggctcatttacagctctatagccacatgaggggattagacagagggctggaatggtaacatgt

SEQ ID NO: 124896 - DNA, 695 bp, Homo sapiens
cttggcttatatgattttgattcctgacttcagtacagctgtttctccatgtgcatgctgcagaaaagcgcaagaaggtgggtgtggttgccatgaattgcatcactcagctatccttctgcagggatcataaatagctgatgctgtaggcactgccactctggacccaccatcacaattactcagcagtgatgctcctcacaagctgtwcccagccaacaactaaacatgacaggtagttcctataaagatgtaagactctgctgagtcactttcatccaaggacccttcactggactggctaagcctcacttaaaactgtgctgtagtgtgagactctcgctattgaatccattttcctttcttctctcgtttcataggtataggcctgtgtcatggtctgaatgaactctgcactgggttctgcacccaccccaatcaatctctcgtctaatcctgtcttggaatctgcatatagacagatctgtgggaactcgctttgcttcccataagttcatcaaaagacatcacatctgaatagaatgcaaggtctctgatgaataataaaaactaacttatgttcaaaatatgaattatagaattttcaagaaatgaaattttatcatagtccaataaacacaccataattaaagtaacaaggaattggccaacaaagtacctttaataagtaaata

SEQ ID NO: 124897 - DNA, 615 bp, Homo sapiens
aggccactgggcagaggcatgggacagcatcagaggaaggagaaggtggctaatgtcgcttcagaaagagggaagatatggcccagaggatgtatcagaggcacaggcagagcgaggggaactgatctctgaaagattcccaggggatgaaggaagaaaggagtcaacagataaggaaagtaggtgacaagacgctggtgtcccaacctctctggagcctcaggatagaggggatggggcaaaggaagttggaagcagatgccattttccttacttcctgactgaggtttataatttgggttctctagaagcagatgctgagatggaatttgggatgcaagatatttattagagatcaacaactgtggaagagtcaaggagaagcagaactggacagagagatgttgaacttcagaacaggaccagcaaggcatcagccaacctcacagggaacsgagatgtagatggcatgttggcatcttccgggattgagccaaactagccaggcagttattcccctgctgcactcaaccaatggatgtccattgtcctaagagaggtgggctcttaggtgtggcagctctggagctgaggcacactgggcaggggctgaca

SEQ ID NO: 124898 - DNA, 595 bp, Homo sapiens
gtatgagtaaaaatgagatatcaatgtctgtctatcaaaatggcaaaatgaaaaactatgcaacctatattggtgagggtccactttgaaatagctgttaacaatgtagagactttgtgaagggtattttggcagtcagtattaaaatactagaaattggtgcatatcatatccagcaatcatatttctagaaaattttcttaataaaataaacagggatctgcacaaagatttatctaccatggtaattggagcagtcctctttataacactgaaaaactggaaataatttaaatgtccaagaattatgacatsttcacaaactgtcattatgtcatgttgtgtttaataacacagaaaaatgtagattaaaaagaaaaatataaataataaaagaatgagatgtctgttatgttatgtagagtatacctacatgcatatatttatgaatagaaaaagaaaatatgtcccaaatgtttaaaaaagttttattacaaaaaatttgtaatatatgccaagtgaacataatagtataatgaactcaaatgcagccatttactcagctttaataaatatcaactcatggccaatctta

SEQ ID NO: 124899 - DNA, 534 bp, Homo sapiens
aggatttagtggtgcctccccaccgggggagtgatctgtggggtcttctggagtcttctgaagtgggaatgattcaaatccagctcattggtctatactgttggttctcattcctgctatgaaagccatagctcaacagtctaataagttcttcaaggtcaagaagaacccaggtcctatccctactgttgcatttctttcttgcacttttcactatacctcatagtaccaggtaactgacatgatttcaagcatcacaggcatgacaatcattatctttgacttcctttagggatttttgtaagagcaaagaaatatttcccaaatctcccagcaaacctgttctgtaacaggtaactagtaacaattggaccatgtgcctttacctaaacccaattctaaagaggagaatcagcctccaggatggacttaagctaaggcaggctcacccaacaactgcagctggaccctggttgccctaaagctgtggctacatgaaagagaacttktactttctttgtagaactggctgtg

SEQ ID NO: 124900 - DNA, 532 bp, Homo sapiens
ctccctgtaagatatccacaccccccacccaggctctttctcgcccattagccacactctaagttgttggtggtgccaggaggagccctcagcacctgttcacccagggtggtgacagagcctcamccctgcgggacagctacactcagtgtccagacatctgcctgcagttctccctggggctcctcattctgtatatacctcatctggaagaaaacagactctaaaaggctgctttcccataaaaacatgagcctttcactggccctgtgtccagtgtgcactagtgagtggtttctcttccccttgggaagtggatttaagattgtaggaggaggtgctcccactctcagacgtcaccccttaaccttcaagctgcactttcttttctgcaacatggagccatcgtgcctgattctgatgccccgccatcctccagggtcagagtcatgcgtggagccacacccatctctgtggccgtccccaccctccgctggaggactgaggcctggagacaccggccctgacggga

SEQ ID NO: 124901 - DNA, 532 bp, Homo sapiens
ctccctgtaagatatccacaccccccacccaggctctttctcgcccattagccacactctaagttgttggtggtgccaggaggagccctcagcacctgttcacccagggtggtgacagagcctcaaccctgygggacagctacactcagtgtccagacatctgcctgcagttctccctggggctcctcattctgtatatacctcatctggaagaaaacagactctaaaaggctgctttcccataaaaacatgagcctttcactggccctgtgtccagtgtgcactagtgagtggtttctcttccccttgggaagtggatttaagattgtaggaggaggtgctcccactctcagacgtcaccccttaaccttcaagctgcactttcttttctgcaacatggagccatcgtgcctgattctgatgccccgccatcctccagggtcagagtcatgcgtggagccacacccatctctgtggccgtccccaccctccgctggaggactgaggcctggagacaccggccctgacggga

SEQ ID NO: 124902 - DNA, 608 bp, Homo sapiens
gaaagaccacaggcaagaaagttgctgtgtgtaagagatctaggctgaaaatgtaagcgtggatgagaagaagcaggaaacgccaaacttcagggtgaaaaccaggcttcacacagaatagttagtgaacatgcaaagcacatgaaaatcaccagctatttattcagagcagtaataagcaaaagtgctggtgccaccccatgacaataatgacgatggctaacaactatggaatcctctaaatgtcacacgtacatcatgaccgtcaatttacaratgagagaactggagtgcagaattgaatgttgaaggtcgtaagtgcaagagctgggggtagaatccaggcagttgatagaggcttgtgctttggaactccatgcttcgtggcctcttgacttgtggagaatgctgggggcctgccctgggtaacaggaacctgtgtgcctgtgctacagggactgctgtccccagaacttctcatcctgtctcccttacagccctttctgagagaccagcactcccctctccttggggttgcagctcacagcactggagttctctggcccagagatagtggtggacaggaaatggcccaacagagtgggttt

SEQ ID NO: 124903 - DNA, 627 bp, Homo sapiens
tgttgaccgattaaggataggagacagcaaataaaccagaagctgctccctggagagccaacaccaggctccatgctccatccttagtctcagaggccaaggatgtcttgtcttcgtggcccttgcaggaagaatcattaggttggagcccacggtggggatgggtttcttcctgggatggtacaaatgaaatgttaggtcagctgaattatgccacagcacctacagctttatttttattttttatgttccagaataattataatcttacactgttacaaaagccatacaatctttgctttggtttcttaatttacaaagttgctttcctgtactttcagtagttttatttcatgatttttatcagttaaaaatgaatacacgtgtgaagttcccatattaccttatgaccaacccagcctcaccacagcaagttgcgtttagtgccacattgatgcagtaatggtatttgtagggctcatgccttgtggtaaggactgggcacacaagaatsgagatgtggtccttgcccccaacgtttctacagagttgaccaaacgcccagctacatatgtgtctcctcctacctagtggttgactgcggtgagagaaaaatatgaatggatc

SEQ ID NO: 124904 - DNA, 530 bp, Homo sapiens
ttcaaggactaatattcatagataatgcttaaggctgccttctttcatatacaacattcaccctttatcactgttttccttatcactacaacttttctcagaaraagacacttccagatgacaatgagagcagaaataaatctataccggtgagagaagacagttctggagaggttgagcacagctaaatattgaaggcatccacggagaagagctccacagacctgaaaaagaaataaggcactcttcttttcaagtatttctaggtccaggagaatcttttattagaggtcccctacatcccatctaaatagctcttctgagacccctcagagcaagatatatatatattttaaatttaccatgtccagggaacattctgtattggataaatccagatgaacaatggcatttggctgggccaaaaaattatacatgtgcttgaaaaaaaataaaagataaatgttaggattctagaaacacacacatacacacaatgcaagttaatgttttaaaaggaagttgccaga

SEQ ID NO: 124905 - DNA, 530 bp, Homo sapiens
gaattcaaaaggtggactattaaagctgttcaaggaaatacaagacagaggtaaaaatcagcataaagaaattgaaaaaacaattcacagtatgaacaaaaaattttctaaagagacagatattctgaagaaaaaccaatccgaacttctggaaattaaagatacacttaggaaattgcaaaatatagtagaaagttttaacgctagactagaacaagtagaaaaaagaatttcagagcttgaagataagcctttcaaattaacccagacaaaaataaagaagaattaaaagaaatgaacaaagtctccaagaaatatgagattatgtaaaacagtcaagccttattttctatggtgttactgaaggagaagagaaagcaaaaaatttgggaaacttatttgagaaaataggtgagaaaaatttccctggccttgctggagatttargtaaccaaatgcaagaagcataaataattcctgggagattcactgcaaaaaggacaccatcaaggcatacagtcatcaggcta

SEQ ID NO: 124906 - DNA, 590 bp, Homo sapiens
accccttgaacctaaaataaaagttggaaagaaaaagcaacaatattgtaacaaatgtaaaaaaaaaagcatgaaaaagataaacattttaatttaaaaatggacagagatttgaaacatcagttcccagaaaaatkcatacaagattgactgtagccttgttggcagtagccaaatcctgaagataaatgttcttcaatggcatgacttgttaactaaactatgataacagctgttaaaggagtgagatggagttacatatattgacatgaaaagttgttcatatttccaaaatacaggttgagtatcccttatccaaagtgctggggatgagaagtgttttagatttgggattttttttcacattttggaatatttgcatatacataatgagatatcttggggatgggacccaagtctaaacacaaaattcatttatgtttcatatataccttatacacacggcctgaaaggaattgtatacaaaattcttaataactttgtgcatgaaacagtttgtgtacactgaaccattgggaaaaaagggtgtcactatctcagccacccttgtggacaatctgtggttgttt

SEQ ID NO: 124907 - DNA, 590 bp, Homo sapiens
accccttgaacctaaaataaaagttggaaagaaaaagcaacaatattgtaacaaatgtaaaaaaaaaagcatgaaaaagataaacattttaatttaaaaatggacagagatttgaaacatcagttcccagaaaaattmatacaagattgactgtagccttgttggcagtagccaaatcctgaagataaatgttcttcaatggcatgacttgttaactaaactatgataacagctgttaaaggagtgagatggagttacatatattgacatgaaaagttgttcatatttccaaaatacaggttgagtatcccttatccaaagtgctggggatgagaagtgttttagatttgggattttttttcacattttggaatatttgcatatacataatgagatatcttggggatgggacccaagtctaaacacaaaattcatttatgtttcatatataccttatacacacggcctgaaaggaattgtatacaaaattcttaataactttgtgcatgaaacagtttgtgtacactgaaccattgggaaaaaagggtgtcactatctcagccacccttgtggacaatctgtggttgttt

SEQ ID NO: 124908 - DNA, 580 bp, Homo sapiens
tttaccatagtaaacttacagtaatttgttacaataaaaataggaaactaatacaataccttaatcctatcctacctcaaactggaccaggcccatataatcaaacttagagcatccactctaaagggagattactctaatttagaakgagccaactcccaacatctcctcctttctatccacttccagaagctgggccccctatgagagcagctactccatacggaaatgaattattggttgttaccatggcttcctcaggcatagaagaacccctcataggcatgctcagaccaccagaagccagagcagatgaggcagacctagcaacgcaggttcagaagaggaactgtgtgctactttcttggacaggtttgattttaccttctgctgcatgcagccagcaacccaagcaattccctttattctggaaaccagagcacatatcaagaggtggcatcatttcaggaataggaaagtcatgtgaccaaaggaagttgtagccatgcatcatggatacaataaacagaaacaatatggaagaacatgtatgcagaggggatacctacatatacggcac

SEQ ID NO: 124909 - DNA, 633 bp, Homo sapiens
ggtagagggaaagtggaacaaaagttaaggactcttccttgggctgcaaggtggacasttatttcagagacaagcaatgcaggcaaaggagaattaggagaaacagggcacagaagtgttgaaaaaagtgttcagtttgggacctcagtgaatttcaggcttttgcagaaaatcaaagtgcagacgtttaataggtaattgaaacccttaaagaactcaatttggtaaaaaagacaaaatagtaggggagacactcagaagcatatttagttgttgccattctttgaaaaactaataggaataattagagcattatgttgccagttactatccatattttctgcaacttaattactaatcaattatactgatcactttgaaattttaattctggcacttcttgctccatccttgtaaaacttcatcactgtggaatagaactatataaatatatattaatgtttatactgatatgcaaaataatatatatctaatatgttttatattatatgaatgtatacttatatttacataaatacaaaatttatatcatgtcccaaaagtcactatcaggatttgggttagtcaccatgatgaaagtgcatcttcttaaactgcattacataaaacaaa

SEQ ID NO: 124910 - DNA, 610 bp, Homo sapiens
ttggaaatatatgccaaggatcaaaaaaaatatattttgcatgctgactgagctgtccagtttttgatattttatgttttccttattcagctctattagtatccaaaagccagagctggcagtcacaataaaaatatgagagaacttaatgaaaatctaactaagaagtatttagcaaagggtaaaatgagcactgttatgacataaaatgcaggtgaattttgagaataggaaaaaaatgaaatttgggtaaggaaaataaagcaaaaggagtaaatattttgtaatgtagttgtcagagatatcacagtgagagtttcwcaaacagtgaaatttatcacagcttatatgccacacagctggccccttctcctccagtgtcatctctcacaattctccatctaatccactctgcttcaaccatgctagacatctttcaatcccttgagcttgccatgctttctcatgtcaactccgacgtaatcttcatttttttcaactgagatttcaattccccaggcaggcctttcctcaccacagcccaagtgaagtccctcagttatatgctctgaaagcaccctacgcttgtactttaacagccctcttttaa

SEQ ID NO: 124911 - DNA, 603 bp, Homo sapiens
aggccaaaaaaaaaaaaaaaaaagctgaatatagttacacttatgccagactaaagggcgaaatttatgattactgataaaggttgttatacaaaatgtaacacttttagtatatatataatatgatagtctcaaaacttgaagtcccaagaggaactgtgaaattataatcatagtagatgttttaacacatctgtctcagggaagtaaagctgactttaaaaattagtgaggaagacttttcaacaagtcattttgggaatgataatgagagttgtccaaatagtgcttctggttccagctcaatgaggttcagggtccttcttaggcaaattttccgtagtaaactcctatggggaggagrgagcaggattctctgacctttgctgtcacctgtgcaggactccctcatgtggctgaggcccctattccagccttgactcagggagggggtgattttggcatgtgagtactgctgttatgtaacttggctacgatttttttccttctgcgttttaagttagtgcaagctattgtggcctcaagattctttacacacagctgaggctgcagaaagtcacatgcgttagttagaatgtaggc

SEQ ID NO: 124912 - DNA, 508 bp, Homo sapiens
agagcagctatagggaatgccttgttttctccttatatggctatttctctcagtccagaatcccagggtgtattttacgtggttgaaatacacaaatggagtaacagtcttagccaaacatgctatgtggctttaaaattaacaagcttctctctacttctgtaccccaaacacacattcacatgcatagtttctgttgagactctgcaaagatactctctytttttttttcagccaaaaatatttgatggggtgaatttctacagttcccttgctttatacataagaaatatttcttttgaggagaggtgtttgcaagcgtgtgggtcaaatctaagcatcaagttcttaatgagcagctactgtgtgtgtagctaactctagggtataaagacagaattgggtgcccaacattaaaatatgacaaggaaagatgtttaatgaaagttcaagatgacactgggcaaagtagcagaaggcagcactaggtgagtaagcacatgggctt

SEQ ID NO: 124913 - DNA, 606 bp, Homo sapiens
atggttagcataggcaaacctagccaaggagagagagctcagcagtcaccagggaaaacagtgccattcattctgagaatgtgcagaaacagcatttgattgggaagaggccttcggtcatttatctctcacttttaaaatgatgagatcgatgtgtctccccartgggctgtcccccttctattcagcaacaatacactacttcttttcaaagagaaatatgcttccaataagggggaagggaggctgggggtggtagtgaaggggatcaagcaactttcattgaaggattcatttttgatttaaatattttgttctaatctccaacttcctttttaacttggcagaatgaccaaaagaaaaacaatgtccctccctagcccagtttacagcctgtcagaggagaggatccggttacttcttccaaattgtatacgttgggttgtttgatatactaggttttttttctttttacatccattgctcatatacatagggttttcttttaatggcttgtcaaagtggactttggtgaaaaaccacaggagaaaaaaaaagaatgaaaaatatagatcaaatatagccagctatttaataatttttttt

SEQ ID NO: 124914 - DNA, 606 bp, Homo sapiens
atggttagcataggcaaacctagccaaggagagagagctcagcagtcaccagggaaaacagtgccattcattctgagaatgtgcagaaacagcatttgattgggaagaggccttcggtcatttatctctcacttttaaaatgatgagatcgatgtgtctccccaatgggctgtcccccttctattcagcaacaatacactacttcttttcaaagagaaatatgcttccaataagggggaagggaggctgrgggtggtagtgaaggggatcaagcaactttcattgaaggattcatttttgatttaaatattttgttctaatctccaacttcctttttaacttggcagaatgaccaaaagaaaaacaatgtccctccctagcccagtttacagcctgtcagaggagaggatccggttacttcttccaaattgtatacgttgggttgtttgatatactaggttttttttctttttacatccattgctcatatacatagggttttcttttaatggcttgtcaaagtggactttggtgaaaaaccacaggagaaaaaaaaagaatgaaaaatatagatcaaatatagccagctatttaataatttttttt

SEQ ID NO: 124915 - DNA, 532 bp, Homo sapiens
gcttcttgacaaacgatggccatagtgatgcatcaaatcacgttgctatggcattttgcttgcttcattttcccatttttttcttcatcctcaacactttcagtaagcactttgcaaacccaatataagcacttggaatacttgcccctgactttactatttggaagaactatcataaaacatacatgttacttgaaatgaaattttatactggagttctttattttacaaaaacattatgggtgtataatagtartatatatttatggaggacatgtgatgttttgatacaggcatataatatgtagtaatcaaatcagaataattggggtatccatcaccccaagactatattatttatttgtgttaggaacattctgattccactcttttacttatttttaaatatatttttaccagaggctgggaaggaactcttagagggaggtatgaagtagggatggtcaatgggtacagaaatacagttagagagaatgaataagatctagtattagtagcacaatagggtgac

SEQ ID NO: 124916 - DNA, 609 bp, Homo sapiens
gaattcataaggaacaggataaacattcttgagtacataacagtttttaaatgtatggcaaagataccatgaattaaaaaaaacactcagattatagagtaggaaaacatttgccacccatatgacatagaaatggctaatacatattatcagagataggtacttcctacattgagattctatcttaatgcattatctatactagtatttctcaacctaaatataaataagctgtggatcttgttaaaataaagactacatttcagcaggggtttggcctgagattacacatttctgacaagctccatgtgatgttgatgctgctagtttacaccatgttctgaggaatattgatctagaacactccagttcatgcaacactgtaaataacctaactgacttcaaaaaaatttaragagaagttgtcaaatttttactcatggaaattttttgaaatggtggtatttaaagttgtttgaaaaggtactcttgctgggcaaggtggcttatagctgtaatcccagcaatctgggaggccaaggagggaggattgtttgagcccaggagttccagaccagcctgaatgacatagcaagaccccatctttac

SEQ ID NO: 124917 - DNA, 608 bp, Homo sapiens
actgtgatttgttttcagtgcctgctatggaccatatgatgctacagtagagtcaggttggaatttggtatcttactgttctgtcagtcttaggacctttatttttttttaacttttattttaggttcaggggtattacacgtgcaggtttattacgtaggtaaaactgtgtgtcacaggggtttggtgtacagatcatcacccaggtagaaagcgtagtacccaatgagtattttttctgatcttttctctcccccaagcctccactctcaagtaggccccagtatctgttgttcccctcctagtatccaggtgttcccattgtttagcttccacttatgcatgagtacatacrgtatttggttttctgttcctgcattagtttgctaaggataatggcctccagctctatccatgttgctgcaaaggacatgatctcgttctttctcatgtctgtgtagtattccatagtgtatatgcaccacatgttctttatctagtctactaccattgatgggcatttaggttgattccatgtcttgctattgagaatggtgttgtgatgaacatatgtgtacatgtgcccttatggcagaacaatgtataca

SEQ ID NO: 124918 - DNA, 621 bp, Homo sapiens
tatatgtatttatttttgaattgggaaacatatmgtttagaatggtaaagtagtttattctcaatttctacattgagtggttttgctctatttaccatagcacaattaggccacctaatagtttgattggttttgcattactttgaattttttcacagattattgccattgatcattatcatgtattcttgggtattgggagaccataataatttgaatatgggtggttttataaatatgttaatgagaatatgggagattagaaatcaaggctgctataagataattgcttaaataagcctatcctcaccttaatactttttacttcatacttacatacattatacttctgcgtactttatactgcccccctaagccacatcattaatgaagagaagagttggttatatacttcatgcctgcatactctaagcctggtgttcttgcccatggcaaccatttacctcccaagaaattattaatggagataggttaataataaaactgaaaaccatcaaattcaattaatgtatttatcggaacctcacagaaaaaagtaatggaaaccaacatacttatatactactttaattttattattataagttcccatgataaata

SEQ ID NO: 124919 - DNA, 621 bp, Homo sapiens
tatatgtatttatttttgaattgggaaacatatagtttagaatggtaaagtagtttattctcaatttctacattgagtggttttgctctatttaccatagcacaattaggccacctaatagtttgattggttttgcattactttgaattttttcacagattattgccattgatcattatcatgtattcttgggtattgggagaccataataatttgaatatgggtggttttataaatatgttaatgagaatatgggagattagaaatcaaggctgctataagataattgcttaaataagcctatcctcaccttaatactttttacttcatacttacatacattatacttctkcgtactttatactgcccccctaagccacatcattaatgaagagaagagttggttatatacttcatgcctgcatactctaagcctggtgttcttgcccatggcaaccatttacctcccaagaaattattaatggagataggttaataataaaactgaaaaccatcaaattcaattaatgtatttatcggaacctcacagaaaaaagtaatggaaaccaacatacttatatactactttaattttattattataagttcccatgataaata

SEQ ID NO: 124920 - DNA, 524 bp, Homo sapiens
gcataatcaggatagaaggtaagttctttaacgtcataagttgcatctgtgaaaaaatattcaacaaatactattaatggttaaagtttgaaagtattctcccttaaaataaggtataagacaatgtctcctatacttcttccagccttggcagctgaataaggaaatcaaagacataagttagaaagaaagactcacaaatactatgcagctgatatgcctgtcaacatggaaaacaccaaggaatctaattaataaatggagcaagactgtttgatttttaaaatggcatatagaactcaatttcatttctacacaatgctgatagtatgtaaatattaaaataactatttcaaaatagtatttttaacatatcaaagcttataaaacaaaagacttgcatsaaatttatcagggaagttattttaataaccaaaaaatattaaggaaaccaaataaaacagcgactgcttaatagtatctagtccaagaataaatattgcacagtatgtatgtttcattaa

SEQ ID NO: 124921 - DNA, 596 bp, Homo sapiens
ttgagacattcatgaatgctctagttattgatttatataattctccatgttgttatacttcaattaattaggaaaaaaattaaaagagaaagaaaaaaatgcaaggaagacactaaaggaaaaaaagaaaatttgccaggcttaataaatgatacaagaatttaaatcaaagatattcacaaattggcatgcagaagaaattttaaaagccccacatgtaagtttactttctgaattgtcaatgttataggaataaggagarttattaaaaacttcaagattgtaaaaaaaaaaaaaaaaagcaggttagcaccaaagaagcaaggctaagacctatatatttatcaaaagctgtgggtcatggaagataaagataaaacaacctcagatttttaagagaagtgctattcaagctggtattcatctctgagacaaactgtccatcaattataaatgaaaataaatgcattttcgtaaatgatagcattttaaacaactctcctccatgtactatttcagaagcagagctcaagaaaatgaaatcctaaaaggacaattctgaacaggcattgaaagtagttataagactaaacatc

SEQ ID NO: 124922 - DNA, 623 bp, Homo sapiens
tacaatcatggcagcaatcatgtccttctttacaaggcaacaggaaggagaagtgcagagcaaaaggaaggggaaagccccttataaaaccatcagatctcttgagaactcactcactatcatgagaacagtgtgggggaaaccacactactcattcaattatctccacctggtcctgcccttgaaacrtggggattattacaactcaggataagatttgggtggggaaacagccaaaccatatcaggactcaatgagaaatttcaacaattattataaatgtgtattttatcaaaattccattaaggaatcacaatgtgacatataacaataaaattgattatagctaacgattttattaaaaaatgagtgggagacatcttaagaaactaggtagttccaattattcatttgttgaacttaattcattcacagcagaatagttaatagaaatgacttgtgtcggagtgcctgggtttaaatatttggttggtaatttactaacaatgtagtactcaatttttaaaatctgtaataggggaataataatttacctttaataataagattgttataaatattaaataatatgtaaaatttgtaaaccatgtaaagtagcatat

SEQ ID NO: 124923 - DNA, 661 bp, Homo sapiens
ggataactgctagctcaggattcatagcctatgatctcctataggctgggggttgttggcyggaggaaaagaggtagtttcacaaaaagtagatttgaagatgggaagataattactcggatataccttacgattgatgtaacatctgactgagaaattatccttggactataaaatatttgagctctttcaaaatatagcaagtcatattttctctgactgactgagtacatcatcttaaaactacactccctgagattggtttcacataagccacatttggatggctttagaactaactgtagggacagcatttctagacataacagaacactatgtttataaatccaaatgtcaacttccaaggttatattcttgaagaccagatatgaatgagattagcaaagagatacattttcttagaagtcacaaatctgggttacatgggcatgcaaagatttttgatatttcattgatatctgccatagattcagacactacttatttagtctttattactaccctaaagacagggagagagttggaatcttaaatatatttgaagtacttttagaggcaaaaggcctttttttcagtattagctagaagacgacagactccagctgctttataacttgtagggaaattagaaaacttgttt

SEQ ID NO: 124924 - DNA, 661 bp, Homo sapiens
ggataactgctagctcaggattcatagcctatgatctcctataggctgggggttgttggccggaggaaaagaggtagtttcacaaaaagtagatttgaagatgggaagataattactcggatataccttacgattgatgtaacatctgactgagaaatkatccttggactataaaatatttgagctctttcaaaatatagcaagtcatattttctctgactgactgagtacatcatcttaaaactacactccctgagattggtttcacataagccacatttggatggctttagaactaactgtagggacagcatttctagacataacagaacactatgtttataaatccaaatgtcaacttccaaggttatattcttgaagaccagatatgaatgagattagcaaagagatacattttcttagaagtcacaaatctgggttacatgggcatgcaaagatttttgatatttcattgatatctgccatagattcagacactacttatttagtctttattactaccctaaagacagggagagagttggaatcttaaatatatttgaagtacttttagaggcaaaaggcctttttttcagtattagctagaagacgacagactccagctgctttataacttgtagggaaattagaaaacttgttt

SEQ ID NO: 124925 - DNA, 661 bp, Homo sapiens
ggataactgctagctcaggattcatagcctatgatctcctataggctgggggttgttggccggaggaaaagaggtagtttcacaaaaagtagatttgaagatgggaagataattactcggatataccttacgattgatgtaacatctgactgagaaattatccttggactataaaatatttgagctctttcaaaatatagcaagtcatattttctctgactgactgagtacatcatcttaaaactacactccctgagattggtttcacataagccacatttggatggctttagaactaactgtagggacagcatttctagacataacagaacactatgtttataaatccaaatgtcaacttccaaggttatattcttgaagaccagatatgaatgagattagcaaagagatacattttcttagaagtcacaaatctgggttacatgggcatgcaaagatttttgatatttcattgatatctgccatagattcagacactacttayttagtctttattactaccctaaagacagggagagagttggaatcttaaatatatttgaagtacttttagaggcaaaaggcctttttttcagtattagctagaagacgacagactccagctgctttataacttgtagggaaattagaaaacttgttt

SEQ ID NO: 124926 - DNA, 470 bp, Homo sapiens
cggcaaccgcaattctaatttgtttctatgaatttagctactttagttacctcatataagtggatttgtatagtatttgtctttttgtgactgacatatttgacttagcgtaatgttctcaaggttcattcatgtaacatgtatcagaattcttccttttaaaaactaaatgatatcccattgtgtgtacctaccaagttttgtttattcattcatccattgmtggacatttgggttgcttccacctctcagatgttgtgaataatgctgttgtaaacatggatgtgcaagtatctcttcaactccctgttttcaattctttgggacatatactcagaagtgaagttgctggattatatagtaattctattttttttttttttttttttttttttttagaaacctccatactcttttccttagtggctgcaagattttataattccacaaaaccaaaaattttggggggg

SEQ ID NO: 124927 - DNA, 470 bp, Homo sapiens
cggcaaccgcaattctaatttgtttctatgaatttagctactttagttacctcatataagtggatttgtatagtatttgtctttttgtgactgacatatttgacttagcgtaatgttctcaaggttcattcatgtaacatgtatcagaattcttccttttaaaaactaaatgatatcccattgtgtgtacctaccaagttttgtttattcattcatccattgctggacatttgggttgcttccacctctcagatgttgtgaataatgctgttgtaaacatggatgtgcaagtatctcttcaactccctgttttcaattctttgggacatatactcagaagtgaagttgctggattatatagtaattctattttttttttttttttttttttttttttaraaacctccatactcttttccttagtggctgcaagattttataattccacaaaaccaaaaattttggggggg

SEQ ID NO: 124928 - DNA, 496 bp, Homo sapiens
atgttggtcaggctggtctcaaagtcctgacagcaggtgatccacctgcctcagcctcccaaagtctgggatgacaggcgtgagccaccacccctgccccctgccccctcctccactttttttttcctgaaatcatagggcagttctgctagcatggtatagagtgcaggtastccagggcagggtgacccagtgatatgggataaccacccagctactttgagattgttgaaatgtctgctttctgatttccctgtccaggctgtctctgtcagattagagcaattaaatgataatgaggactgtacatagggaaaattaattctggggactgtaattagcatcctccctatgggaaacttatacatgtgtgtaagcactgaggaaaaccctgaaatatctgctagtataataaaaagaggcagttttgagatagaatgctggattaatttattatgaaccggaagcatgttgttgtaagagagacaaattcgat

SEQ ID NO: 124929 - DNA, 567 bp, Homo sapiens
ttaacacagtactaactttccctagagaatgatgcaatgaaatgtactacccaatgaacataaatagaaattattactgaagccttatttggcctttgtgacaagtgagaaaatatatgtaaatctaaatgattacaataaaaagatctataattgttaacaggaaataatatccaaacaagagactaccttcttaacagtgtagagtttaaggaaaatgcaagtagaataagtgaagaaagaaaaacaaaattggcaagagtggtataaagattaacaactacagtgaactgtagctattttcctattgtcagatgaaatccttagatttgaggaaaagagcygtggtccacacccaaacaccaccattgctttggattgctgaaacaacaggaaataaagctaagacatttctggtacaaaatgacagctcttcattttagtgtcactcaggttgacaactgatgcacaggatacatgtcacaactcatcactgcctatcttgagggtatgggccttgcaagcctccagcaaaaatgaaaactctgaacaacacagtgaaatctc

SEQ ID NO: 124930 - DNA, 601 bp, Homo sapiens
atattttttccattttgttgttaacacaaaatttaactaattaactgaatcagttactcggcctgggctattgatgatgagataatattacaagaagttatatgtatacacataagctggttgctgtgatttaggagtgycaatttattcttactcagaacatgcttagcagtgtatacaaaggtttccagtataacaaagggttgactatatatagaaatataggttagaatgagcttaattctatgtgataaccaaggttgatttttacaactggaataacaatttcctagaacagaaaaacctgtagcatatttaaaaatgagttttaacctttctagccatgattttaaaaagcacagtcttgacaaaactgcttagtcccctaaaggatatattttcaaaagtatgatcttatgtttgaaaaaaaaaaagtctaaaaatgttctgtactttaaaaggcccacaaaaagtgttttttttttttttcttttttaagtgagcctctgtcacaattactataatcaggaaaaatggaatacaaataagcaagagcaggctttttcccagtacgacacttcctacagctatcttcattcag

SEQ ID NO: 124931 - DNA, 606 bp, Homo sapiens
agaataaaacaaataactccatcaaaaagtgggcaaaggacatgaatagatatttctcaaaagaggatgtacacagccatcaaacttaggaaaaaatgctcaacatcactaatcatcagggatatgcaaattaaaaccacaatgagataccaccttactcstgcaagaatggacattattaaaaagtcaaaaaacaatagatgttggcatggatgtggtgaaagggaacacttaaacactgctggtgagaatgtaaactagtacaaccactatggaaaacagtatggaaattccttaaagaacaaaaagtagaactaccattcaatccagtgatcccactactgggtagctacccaaaagaagtcattatatgaaaaagacacatgcacacatatgtttatagcacacaattcgcaattgtaaaatatggaaccaatctaaaagcccatcaactaacaagtggataaagaaaatgtgctatatatacaccatggaatactgctcagctataaaaacgaatgaaataatgtattttgcagcaacttggatggagctggaggccattattttaagtgaagtaactcaggaatgaataaccaaatattg

SEQ ID NO: 124932 - DNA, 483 bp, Homo sapiens
acttattcaatatagtactggaagtcccagccagagcaattacacaagagaaagaaataaagagtatctaattggaaaggaagaagtcaagctgtcctggttttcaratgacacgatcttgtatttcaaaaaacataaagactttagcaaacaagctatttgaactgatacacgaattcagtaaagttgcaggatacaaaatcaacatatgataatctgtagcatttctatatgtcgaaagcaaacaatctaaaaatgaaatcgagaaagcaatcccatttacaatacctacaaaagaaaccccgggaatctgccttttaaaatatatatatatatatatgatacatgtgtagttttgttacacagatacactgcacagtggtgaggtctgggattttagtgtagccatcgcctaaatactgtaacctgtacccattaagtaaattctaattccttactctcctcccaatcttccacccttcc

SEQ ID NO: 124933 - DNA, 391 bp, Homo sapiens
gaattcaattgttttagattccacatataagtgagaacatgtggtttttgtctttctcagactcacttactttacccagtttaatgttctccaggtccatccatgctcctgcagatgaaaaaattttcttcctttttgtggctgaataatattccattgcatatataatatggtttggctgtgttcctacccaaatctcatcttgaattgtagctcccacaattcccatgtcatgggagggaccaagtgggaggtaactgaatcaggsggcgggtcttaccccatactgttctcttggtagtgaataagtctcacaagatctgatggttttataagtggtttccctttctgcttggctttcactctcgctttgcctgctgccatgtaaggc

SEQ ID NO: 124934 - DNA, 656 bp, Homo sapiens
ttggattcaggtgatgtggagaacttgtggtggtagaaatgataggaattggacatttactaaacatggctatcaaatttctatgtctgagccacaggatagatttttgacagggtagatttttgttgccattaatagatataagaaaacgaggaagaggagactggtggaaaagatctgatttgtcaggacacacagaggaacatgtataatagaattctagaagtatagagctgaagtttgggaaagatgtcccartgatgtattcctaaaccaaaaaagctaacctcctaaaggaggaggagttagtcaggatctaaaatctggaacattggtttgggtaaaaacaacagcaagcaaacaagaatgccctgaggaggatccacattataaaatgctcccatttgtgttactaattgagaatagaagaaaacaaaaaaattgataataatcagcttatttctacaagattattaagagcacagtatattacttccatatatatctcaactaaaatgcatttgacaaatgtttgctgattacctactaagtgccttttgtttttctaggcactggagctctgagatgaggcatggtgatttgaaagtggtccattgtagaggttaacagtgtaggcttcagcattggaattatgc

SEQ ID NO: 124935 - DNA, 656 bp, Homo sapiens
ttggattcaggtgatgtggagaacttgtggtggtagaaatgataggaattggacatttactaaacatggctatcaaatttctatgtctgagccacaggatagatttttgacagggtagatttttgttgccattaatagatataagaaaacgaggaagaggagactggtggaaaagatctgatttgtcaggacacacagaggaacatgtataatagaattctagaagtatagagctgaagtttgggaaagatgtcccaatgatgtattcctaaaccaaaaaasctaacctcctaaaggaggaggagttagtcaggatctaaaatctggaacattggtttgggtaaaaacaacagcaagcaaacaagaatgccctgaggaggatccacattataaaatgctcccatttgtgttactaattgagaatagaagaaaacaaaaaaattgataataatcagcttatttctacaagattattaagagcacagtatattacttccatatatatctcaactaaaatgcatttgacaaatgtttgctgattacctactaagtgccttttgtttttctaggcactggagctctgagatgaggcatggtgatttgaaagtggtccattgtagaggttaacagtgtaggcttcagcattggaattatgc

SEQ ID NO: 124936 - DNA, 419 bp, Homo sapiens
taccacagtgtgtaatcccatttgggtaagtgaattaatgttataataaaataactactaacttcmgctttgccaaatgtttacgactacagatgatgtccatcacatcagtggggagactgagttcagtttctttagtttatgaatatggtttctgaacagggatgggaggcagaagtctgcagtctatgtgcatcctttttattactttcagcgtcatcatttttaaattctgattttctttttggcttagaggttgttagtcattcagaagttgcctctacaaaatttttgactctgaggcatttgagaaattatgaggcagttaaacctggagtctgtcttggaaactggtctatcattttcttcctagtaccctcaatggcaacaccattatgcattaaaatggtaaaagcata

SEQ ID NO: 124937 - DNA, 579 bp, Homo sapiens
tgcctcagcctcccaagtagctgggattacaggtgtgcgccactatgcccagctattttcttttgtatttttagtagagatcaggtttcaccacgttggccaggctggtcttgaactcctgacctcaagtggtccacctgcctcggcctcccaaagtgctgggattacaggtgtgagccaccatgcccggccaccccattcaccttttcacccttgtaacagtgcttcctaatacatctgctgataaacactggcacaacctattcatttgrtccatactcagtttcctaccatatgcagaggggcacagttatccaagagagaaatctgggtatgtgtattattaagattcttatgctctgtgttcattttggtgccatgctttctctatgaactccaaataacttatcttcaatttccctttagccttgttttcactactgtgggtatctcacgctacgagattaactatacttcacctgtgcagccttatttgatctatttgcactgacttaccatcccacatccagtcagtcaccagtccctgtcagttatttcccctacatgtctctcaaatac

SEQ ID NO: 124938 - DNA, 579 bp, Homo sapiens
tgcctcagcctcccaagtagctgggattacaggtgtgcgccactatgcccagctattttcttttgtatttttagtagagatcaggtttcaccacgttggccaggctggtcttgaactcctgacctcaagtggtccacctgcctcggcctcccaaagtgctgggattacaggtgtgagccaccatgcccggccaccccattcaccttttcacccttgtaacagtgcttcctaatacatctgctgataaacactggcacaacctattcatttggtccatactcagtttcctaccatatgcagaggggcacagttatccaagagagaaatctgggtatgtgtattattaagattsttatgctctgtgttcattttggtgccatgctttctctatgaactccaaataacttatcttcaatttccctttagccttgttttcactactgtgggtatctcacgctacgagattaactatacttcacctgtgcagccttatttgatctatttgcactgacttaccatcccacatccagtcagtcaccagtccctgtcagttatttcccctacatgtctctcaaatac

SEQ ID NO: 124939 - DNA, 579 bp, Homo sapiens
tgcctcagcctcccaagtagctgggattacaggtgtgcgccactatgcccagctattttcttttgtatttttagtagagatcaggtttcaccacgttggccaggctggtcttgaactcctgacctcaagtggtccacctgcctcggcctcccaaagtgctgggattacaggtgtgagccaccatgcccggccaccccattcaccttttcacccttgtaacagtgcttcctaatacatctgctgataaacactggcacaacctattcatttggtccatactcagtttcctaccatatgcagaggggcacagttatccaagagagaaatctgggtatgtgtattattaagattcttatgctctgtgttcattttggtgccatgctttctctatgaactycaaataacttatcttcaatttccctttagccttgttttcactactgtgggtatctcacgctacgagattaactatacttcacctgtgcagccttatttgatctatttgcactgacttaccatcccacatccagtcagtcaccagtccctgtcagttatttcccctacatgtctctcaaatac

SEQ ID NO: 124940 - DNA, 557 bp, Homo sapiens
tgttgcatgtaacaacattatttttccttttttagtgttgagtagtgtattctattttatgaatacatcacagtttattgacactgcagccatttcccatttggggcttttatgaataatactgctatgactactcatgtataacttattttatggacatatattctcatttgttttgggtaaaaatggaattgcttggtcataaggtcgataaatgttataatttataataaacagccatctattttcttaaatagatcctaccattttatattctctcaacaatttatgaaagtttcatttgtttcatatcctcactaacatccagtgttgctattctttttcatttaaaattagttacctgcatacataaaaagattaatttagacccttcacataagacacaaaaattaactcaaagtggatcatagacctgaatgttacttctaagactatamaacttttagaagaaaacacaggagaaaatctttttgaccctgagggttaggaaaagatttcttagatacaatacataatagtatcttataatacctaga

SEQ ID NO: 124941 - DNA, 513 bp, Homo sapiens
aaccaatgtagagcgttctctcattgtgtcaccatggatatttctgatggtgacactcaccaaatcttactccttcttcagacttttattttttatggaagagtatgttaacactttcctctatgaagtcttattttcccagaatgtcattgtaaatggtcatgtaaggaaaaatagtagatactttttagggaaagaaatttatttagatttgtgaaagctccatagtgatgataccatcacggtaggccccttccccctcagcaaggtctccataggaaatttcctcatacctctatcatcacatttgacatcagctcagacatggacctacccagcagcaataatccatctattttcatccaatcattcatcaattcatccctctaagcattcattcaacaattaattattgtacacctatgctctgtttaaamctagcaattccttttagtctttttattatttatgataactaaggaaatatattaatgaaatactttggctattttc

SEQ ID NO: 124942 - DNA, 418 bp, Homo sapiens
gaattccactgtcagaggtaaggtgggggtgaggggatttatgtaaattaggcccttccaagctggaagaaagttggattatttaaaaaaaaaaaaaaaacttttccaagtttaraaagttagaagtgtttttgttcccacactcttctgaatagcagtgacttgaagttctcagaatcaggttaaaaatattatctggaaaccatggctatgaatttccacagatttctcaaagctttgaaggcaactgtgatccatatcttcctgcctttctggtattaccatgtgtgagtgctgggaagggagggtggatttttggatgtgatatttagtttcctgtttctaaaatgggatgagtgtaatcaatcagattaatctaagaaataaacagtcatttgtctgaaggtttcgtaaggtg

SEQ ID NO: 124943 - DNA, 567 bp, Homo sapiens
tggccttaaaaattgtaggtataaaggtttgtcaattttatccttggatcagtgtttcattgctttttatcaaaagctagagtaatatttttaaggaaacaaatgactttattattttatgtaattataggacatagttttagttgcttttctttaagaagaaatacattttagagaaaaatacaaatagcttggaaacatatgaacagatgctgaatttcacacataatattaaatttaaaaaaattttgttacaaatagatcatgattttcataaataataggtaaggaaacyttagttcttatttttgagagtataaaattctgcgttgaaaaatttgtttctatcgatttccttctagattgaaaagtagcagttgcctcaagaatctctgaggtctggtacatggtagaggttaagtaacaaagaaggtctctcatctaagaagtcctacagtttccagtttgctcagctatgggaacctagtggattcaatagggcctcgaatataccgtgtcacagggcagcctctctcatagcccattttaaggtttagctttccctct

SEQ ID NO: 124944 - DNA, 611 bp, Homo sapiens
gctggcttctatgtcctttgaaatattatctgagcacttccttattttctggcacaacaagaagttccaggctcatcttgtcctttccttcctcagctckggaatcacccatttctgcaaggattcttgagtctttttattagagaatagtatttagaaaccaaaatctaggtagttattgcttttcaagtggagcacccagagtaggcactggagcagaaaagtgattctatctatgtctacaagttacctagatgctaggtaacttcattgtcactgtaatgttgctgctccaaggccctttgcgttaacagagctggagaatatatagatacatattaatatatttgtattttttctatgtctgtttatatgttgaaactatgagttcacagagatatctccaattccaatccacaggaatcattttagctctttctctttccatatttgtgatttccctttctgtatttccacgttttcattcctcaacaactgagaaattagttcccagcagcctcaatatatttacttattgctcaactccccagagtataacagatttcctgctgccaacaccctttccattgaggatggtctacgcaccttgc

SEQ ID NO: 124945 - DNA, 611 bp, Homo sapiens
gctggcttctatgtcctttgaaatattatctgagcacttccttattttctggcacaacaagaagttccaggctcatcttgtcctttccttcctcagctcgggaatcacccatttctgcaaggattcytgagtctttttattagagaatagtatttagaaaccaaaatctaggtagttattgcttttcaagtggagcacccagagtaggcactggagcagaaaagtgattctatctatgtctacaagttacctagatgctaggtaacttcattgtcactgtaatgttgctgctccaaggccctttgcgttaacagagctggagaatatatagatacatattaatatatttgtattttttctatgtctgtttatatgttgaaactatgagttcacagagatatctccaattccaatccacaggaatcattttagctctttctctttccatatttgtgatttccctttctgtatttccacgttttcattcctcaacaactgagaaattagttcccagcagcctcaatatatttacttattgctcaactccccagagtataacagatttcctgctgccaacaccctttccattgaggatggtctacgcaccttgc

SEQ ID NO: 124946 - DNA, 611 bp, Homo sapiens
gctggcttctatgtcctttgaaatattatctgagcacttccttattttctggcacaacaagaagttccaggctcatcttgtcctttccttcctcagctcgggaatcacccatttctgcaaggattcttgagtctttttattagagaatagtatttagaaaccaaaatctaggtagttattgcttttcaagtggagcacccagagtaggcactggagcagaaaagtgattctatctatgtctacaagttacctagatgctaggtaacttcattgtcactgtaatgttgctgctccaaggccctttgcgttaacagagctggagaatatatagatacatattaatatatttgtattttttctatgtctgyttatatgttgaaactatgagttcacagagatatctccaattccaatccacaggaatcattttagctctttctctttccatatttgtgatttccctttctgtatttccacgttttcattcctcaacaactgagaaattagttcccagcagcctcaatatatttacttattgctcaactccccagagtataacagatttcctgctgccaacaccctttccattgaggatggtctacgcaccttgc

SEQ ID NO: 124947 - DNA, 505 bp, Homo sapiens
gtttaaatgtaagttgtttaactttttgatatctggggcttttctagatgtratattttggtagtttgtaatttaattccattttgatcagggaacaaattgtgtaaaattcaatcttttcaaatatttttatgatttatttatggtccatcatatggtctatctttatatacattttatgagtacttgaaaagaatatggatcttcagttgttgagtgcagtgctatataatcgacaattaagttaaaaaaaaaaactcagaaagcctgaaagagaatactgtattactggagaaattgcaaagattaattacatcataatggatctgaaggatgcacaggtggtgattaccatcacctccctattcagctcacctaattttgtctgtacagaagagatacggatctgggaaaatggcagtggattttcacaaaattaagttagcagcaattccaaacccaactgctgttccagatattgtgtctttactgaagcaaatcagca

SEQ ID NO: 124948 - DNA, 593 bp, Homo sapiens
atgagttgtttaaatgtaagttgtttaactttttgatatctggggcttttctagatgtgatattttggtagtttgtaatttaattcyattttgatcagggaacaaattgtgtaaaattcaatcttttcaaatatttttatgatttatttatggtccatcatatggtctatctttatatacattttatgagtacttgaaaagaatatggatcttcagttgttgagtgcagtgctatataatcgacaattaagttaaaaaaaaaaactcagaaagcctgaaagagaatactgtattactggagaaattgcaaagattaattacatcataatggatctgaaggatgcacaggtggtgattaccatcacctccctattcagctcacctaattttgtctgtacagaagagatacggatctgggaaaatggcagtggattttcacaaaattaagttagcagcaattccaaacccaactgctgttccagatattgtgtctttactgaagcaaatcagcacattctcttgtatccagctactgatctacaaatatttttatccctatacttgttagtgaagaccattagaagttttctttc

SEQ ID NO: 124949 - DNA, 593 bp, Homo sapiens
atgagttgtttaaatgtaagttgtttaactttttgatatctggggcttttctagatgtgatattttggtagtttgtaatttaattccattttgatcagggaacaaattgtgtaaaattcaatcttttcaaatatttttatgatttatttatggtccatcatatggtctatctttatatacattttatgagtacttgaaaagaatatggatcttcagttgttgagtgcagtgctatataatcgacaattaagttaaaaaaaaaaactcagaaagcctgaaagagaatactgtattactggagaaattgcaaagattaattacatcataatggatctgaaggatgcacaggtggtgattaccatcacctccctattcagctcacctaattttgyctgtacagaagagatacggatctgggaaaatggcagtggattttcacaaaattaagttagcagcaattccaaacccaactgctgttccagatattgtgtctttactgaagcaaatcagcacattctcttgtatccagctactgatctacaaatatttttatccctatacttgttagtgaagaccattagaagttttctttc

SEQ ID NO: 124950 - DNA, 290 bp, Homo sapiens
gaaaaccagttctctatctctattttacactgtaattccaattacctgtccatatttataatgctgtgctgaagtttcttaatctcttgtttttttccccaagcccatcaaacttaatgttggcttcctccactctctaactaaactagattaatatttctgctaatatttctttcctgcttgtctggtttgtttcttaaaaaaaaattcacatacagagttcacttgatttctttggtttttattactcaggcsaaagctgccctccatttgtgcaaataataacatat

SEQ ID NO: 124951 - DNA, 624 bp, Homo sapiens
atttacgatgtccagtgttcaatcaaaaattagtaaatgtatgaaaaaacaggaaaatttaagtccaggcaatagaaactaaatttcagatggtctaaatctttattttaggaaacaaagtccttaaggaagcaaacataaatatgttcaaagaatcaatgtttaaaatggtcaaataatttaaaaaaatggtcctcataaatgaacagataaaaaatataagcagatcaatggaaactataaaatagaatcaaatagaaattctagacctgaaaagtaaataactgaaattaaaaattcataggccrggactcacagcagattggagatagcacagaaaagagtcagaggatagagagttacatcactggaaactgaccaatctgaagaatgcaaaaggagagcatatcagagaaaactaaacaggtccttggaaatctgtggcacaatatcagatgatcttggaatccaagaaaaacaaaagagtaaacttgaggcagaaaaattatttgaacaactaatatctggaaatatcagaaacttgatgaaaaaacattgatttacagatttaaatagttcaaagaacctcaagtattataaatagggagataactataccacaac

SEQ ID NO: 124952 - DNA, 624 bp, Homo sapiens
atttacgatgtccagtgttcaatcaaaaattagtaaatgtatgaaaaaacaggaaaatttaagtccaggcaatagaaactaaatttcagatggtctaaatctttattttaggaaacaaagtccttaaggaagcaaacataaatatgttcaaagaatcaatgtttaaaatggtcaaataatttaaaaaaatggtcctcataaatgaacagataaaaaatataagcagatcaatggaaactataaaatagaatcaaatagaaattctagacctgaaaagtaaataactgaaattaaaaattcataggccaggactcacagcagattggagatagcacagaaaagagtcagaggatagagagttacatcactggaaactgaccaatctgaagaatgcaaaaggagagcatatcagagaaaactaaacaggtccttggaaatctgtggcacaatatcagatgatcttggaatccaagaaaaacaaaagagtaaacttgaggcagaaaaattatttgaacaactaatatctggaaatatcagaaacttgatgaaaaaacattgayttacagatttaaatagttcaaagaacctcaagtattataaatagggagataactataccacaac

SEQ ID NO: 124953 - DNA, 653 bp, Homo sapiens
cttgaaggagctattgtttcagcaggttgatgaaattaaaatctaaatttgcttattaacaacgttgtttttgatgtgtaatttttctctaagccttgtttgttttcatctggaagtatctgaaaagagtcaggtgacacatttaagtggtgaaggcagtactctgaattatttcccataacataatgactgatcatttcttgaagtagcttaaatagtgactttctcaagtatttgctcctcccacaatcagaacccagcagttgagatcttctgtaaggttctattctctgaaatacgaatggtcatatatattaaaatatggtctctcactttccaaattcacatttaattccttaccttccagtgtttcctaggttgttttaactgatgaactggtctctagaatgtgagcaactttatttattactatatcctgtgcaatgaaagattcaacacaggtgacccagacattttcatctgcatagcttcagccatctctaaatctttcagcacaacatactgtttcaacagtggaaatcacagagatcattcttttccccctcaccaaagwcttcgtattttatggtggcttttatatgacctttacatctattttttaattctcttcaaacttcctgggatgtatttgt

SEQ ID NO: 124954 - DNA, 467 bp, Homo sapiens
ctgtcctccttcctgggagctgcaccaagggaggtcttctgggataagggttctttcaaaatgctcatagggcagagtcgcacttttttttttggcagcaagcacaaatgatctcttgycccctttgatttttatgatgagcgtgaattggggaaggctacatatcaaagatggcattgctttattttcataatagtcataatatttcaccactgcaacatctcccacagtgggagaaaaattcaggggacatatgctcaagtcattttcccttcctgatttttaactggccaggtagacttttaaactgcatttcctgttttaaaagcagttttggattgcagctaatacgtgaggggcagttcttgaagctgttagtacctattcactgtggagcaaatgctttcttcttccattttcctctggaaatgagactggacttgggttttgaatccttgtccattctt

SEQ ID NO: 124955 - DNA, 596 bp, Homo sapiens
tccatgtccattgaatgaatgagaaaactcccaccccttccacagcccaggtaggctggccacgacacagtgtctgtgggatacatcttggccttgtcccctcgcctggtcagcctcgtcatgcaggccttttttgctttccattctccaggactttgtttccactctaccaaagcatctgataaattaatccagagccaacactggtgccggaggcccatgacagccccttccscagctacttataactaacttggggagcaggggcctctgaagactgcgagaactttgaggccaaaaggaatgagtatctaatggtggaacttcaggtaccccaaatggcagtagaggaaaaggctaaccctgatcttaacactgtatcaataccttttcttggaactcaaagactctaagtcagccccgtcttccaagccgcattgagggcattgtgctagcacactgtgggcacatgcatgtgtgtgtgtgtctgtgtgtgcacacgtgtgcctgtgtgtgtgtgtgtgtgatgaattagagggaacagaagacaaagacattggtcttgattggcagacctataggagaaggcagggccc

SEQ ID NO: 124956 - DNA, 493 bp, Homo sapiens
ataagtatgtggttatacaaaaaataattttaaaaaatgttagaagacactttgctcaaagccaaaagaacaatgtatttgggatgttataacaggataggcataaaatgtatgacactaatgaaacaaagaccgtaacagaaaaagatagargtactgctataatgttctcacatcacacgtgagtggcaaaaattattgaggatggaccttaataagttaaagatgcttagtatatctaaagtaaactcgtaaaacagaaagtatagctaatacatcaactaaggagataaaaatgaaatgataaataattaatccaaaaggaggcaaaggaaacaaagagaaaattagttgaatatgaaaacaaatagcaatttggtatatttgaaccaattcatagtcacattaaaataatcacattaaatataaatggtcaaaacaccccaactgaaagacagactgtgaaactgaacacagaagcaaggtccaacta

SEQ ID NO: 124957 - DNA, 608 bp, Homo sapiens
cctttctggcaaaaagaatatgatgctagaagaaaaatctagatgttcaccagaaaaaaattttaaataccagaactcataagtatgtggttatacaaaaaataattttaaaaaatgttagaagacactttgctcaaagccaaaagaacaatgtatttgggatgttataacaggataggcataaaatgtatgacactaatgaaacaaagaccgtaacagaaaaagatagaggtactgctataatgttctcacatcacacgtgagtggcaaaaattattgaggatggaccttaataagttaaagatgcttagtatatctaaagtaaactcgtaaaacaraaagtatagctaatacatcaactaaggagataaaaatgaaatgataaataattaatccaaaaggaggcaaaggaaacaaagagaaaattagttgaatatgaaaacaaatagcaatttggtatatttgaaccaattcatagtcacattaaaataatcacattaaatataaatggtcaaaacaccccaactgaaagacagactgtgaaactgaacacagaagcaaggtccaactatatgccatctagaagaaacctaccttaattataaaaa

SEQ ID NO: 124958 - DNA, 527 bp, Homo sapiens
gatatatttacagaatatgatgatactacatccatcttgacaaagttctggagattattactacagacattactcatattaagtcagaagaactctataatgccatatattattaatattatcaatcaatcaagactctcaaataccaatttactaaaattattatataattgatctataatgttcatgtactttccacatatactcatacaaaaatattttaaatagagccattatactaaaattattttcagtattgattgccctcatgtattaaacacttaaacgtttattttatatttttattcttttaaaatagtttgatagcagaatatttaatcacactawcaatgacctctaagttgtctatgttgagactaaaggggtaattatttagttgtcctttgatacttccctttgagcataaccactatttaaggtagactttgtgcagctctgagcctgaaggagcgggcagggaggtgaaggagtagggtaggggagttcagttctgctgatagctttaa

SEQ ID NO: 124959 - DNA, 527 bp, Homo sapiens
gatatatttacagaatatgatgatactacatccatcttgacaaagttctggagattattactacagacattactcatattaagtcagaagaactctataatgccatatattattaatattatcaatcaatcaagactctcaaataccaatttactaaaattattatataattgatctataatgttcatgtactttccacatatactcatacaaaaatattttaaatagagccattatactaaaattattttcagtattgattgccctcatgtattaaacacttaaacgtttattttatatttttattcttttaaaatagtttgatagcagaatatttaatcacactatcaatgacctctaagtygtctatgttgagactaaaggggtaattatttagttgtcctttgatacttccctttgagcataaccactatttaaggtagactttgtgcagctctgagcctgaaggagcgggcagggaggtgaaggagtagggtaggggagttcagttctgctgatagctttaa

SEQ ID NO: 124960 - DNA, 527 bp, Homo sapiens
gatatatttacagaatatgatgatactacatccatcttgacaaagttctggagattattactacagacattactcatattaagtcagaagaactctataatgccatatattattaatattatcaatcaatcaagactctcaaataccaatttactaaaattattatataattgatctataatgttcatgtactttccacatatactcatacaaaaatattttaaatagagccattatactaaaattattttcagtattgattgccctcatgtattaaacacttaaacgtttattttatatttttattcttttaaaatagtttgatagcagaatatttaatcacactatcaatgacctctaagttgtctatgttgagactaaaggggtaattatttagttgtcctttgayacttccctttgagcataaccactatttaaggtagactttgtgcagctctgagcctgaaggagcgggcagggaggtgaaggagtagggtaggggagttcagttctgctgatagctttaa

SEQ ID NO: 124961 - DNA, 629 bp, Homo sapiens
agtatgcctgaatgaaatcatacaacacacggaaactttctgtacggagctgtcagttttattaccctatctctgcagtggtctcactggcaaagtacccatatctttgcagtggtttcactggcaaataattagggttgcaatttataggattaattaatttaagaaaagacaacagggggcgtggtgactcatgcctgtaataccagctctttgggaggacaaggcaggcagatyacttgaggccaagaattcagaccagcctggcctacatggcaaaaccccatctctactaaaaatataaaaatataaaaattagctgggcgtggtggcacgtgcctgtgatctcagctacttgggtggctgaggcaggagaatcacttgaacccagaaagtaggggttgcagtgagcccagatggctccacagcactccagcctgggtgacagagtgagactccgtttcaaaaataaataagaaaagatgacaatgtaaactactaaaattatattgtatctgtccttgatcatttactgaacttaaagagatcaaatttatccaaaaccaaaatgacttctactaaaatgctttctgggagcgtgttatgaacacactttacaaatatatttt

SEQ ID NO: 124962 - DNA, 558 bp, Homo sapiens
aaacctgttgaccaagcaaagcttacacagtcttagtgtctctaaaaagagaaatcacagaggaatatatacagggtttgggattctggattcatgaggttaaggcaggtgtttcaaggtggggaattgataggaatgtgtgaagttcatgacacagtattttaggactggtggacacagtaaggtgacagtctggagatgagttttatgaagagcaaactattgtcctgattaagtgagctgtttacctcagtaagcaaactgattgtataaattggtttgcagaatttgctgatamaaacagtatagtactttattgttctgcaatcacatttttcctggcaagaatttcttggggaataaaagcaataatattgacacaggtggtctcagctctcagtcccatagttaagttcgggctgatgcaggtacccttgattcttaatactatggaatattagacatcaatgggaatgaataatgaactaataaatgcatcagtatgaagaattgtaaagcctaaaattaaaaaagaactagtatgtggtgatagaaata

SEQ ID NO: 124963 - DNA, 587 bp, Homo sapiens
gactgccgtgagctgtgttcgtgccactgcactccagcctggatgacaaagtgagaccctgtctccaaaaaaaaaataataataatcataatcataaaaacttaacatctaaaaacaaagtacctagggaaggacaagggagaacagcattccagaaaagaaacagcagtactgcaaagctacaaagttttaagtggacaattaaagtaaaactataatttaattttcagatggtcaatataaaaacaaggcacagtagaaaaactgcaacatttttatgctttctaatctattccttctttaatgagacttgttcatctttctactgtcacagaacttatctttgactatacaaatactgcacactctacttaagacacatagaaaatactactgttatacaaagttaaatggttagcattttccaamcattttaaaagccataaaaatcaactttaatccttaagacctgttagaaagatatttctattctagtcgtcaaataaagaagtttctgctctggaggggctacaaagtatgccttctgaattgttctcactaatctatgcatggaataaacaagtctt

SEQ ID NO: 124964 - DNA, 587 bp, Homo sapiens
gactgccgtgagctgtgttcgtgccactgcactccagcctggatgacaaagtgagaccctgtctccaaaaaaaaaataataataatcataatcataaaaacttaacatctaaaaacaaagtacctagggaaggacaagggagaacagcattccagaaaagaaacagcagtactgcaaagctacaaagttttaagtggacaattaaagtaaaactataatttaattttcagatggtcaatataaaaacaaggcacagtagaaaaactgcaacatttttatgctttctaatctattccttctttaatgagacttgttcatctttctactgtcacagaacttatctttgactatacaaatactgcacactctacttaagacacatagaaaatactactgttatacaaagttaaatggttagcattttccaaacattttaaaagccataaaaatcaactttaatccttaagacctgttagaaagatatttctattctagtcktcaaataaagaagtttctgctctggaggggctacaaagtatgccttctgaattgttctcactaatctatgcatggaataaacaagtctt

SEQ ID NO: 124965 - DNA, 580 bp, Homo sapiens
ctgactaggtacagagacataaattcaggagtgtacttgcatctgtttacagttaaacyggtgtcaaatactgctacatgcttcaaatccacactgaagaccactgatgtggggtctataaatttgctgctgatgatgctattttttcttgaggtggctttttgttgttttaatctctcaaaaagcatatggctcatgtgtgaaattatttcaattcaacgactgaaatgctttttagaaagtttagaaatattaactaactggatacttggtataaatcgttatttatcctaaaatatcattttactttagaataactatttcaggaactgtaataattatggaacttaaaccctgaaaataagtttgcggatacgtttttagttttttcgtatgacttatcccatggtgcaaaatcatacatttctaggataatactcttggaatagaatatagcttcccagatttttttccattgctttaaacaaaatttgcatttgaacatgtatttaatccagctttatagttttttaaagtaactatattactgatagtaatgttcattaaatggtgaccacag

SEQ ID NO: 124966 - DNA, 605 bp, Homo sapiens
tgcaattgctctgacgcagatgaatgaatatccagaagatttctgaggattcctgccttggcccttgagcaagctttactataccatcaggctttttttactgaggcctcctaaccttttgaggtggcccacttgggtaagatttaaaacaatactaaggagactctctagctttatacccacccaaaacacaggcccactgaagatggaagtgaagtgactttttacctacaattttctgctctgtttccacagcctgattcagtgaccttcttgtccttcacctttctccagtgtgggtctctcactagtccactgcgtcccccatgcactacggaacttgcatcagagcatcccttaccagatgtaaggtaaaaataaggaaattatctcccttccatcactgacaacttccaaaagagttgtggaatttagttaaatcataacttctgtctcagtctcttcaatctcagcttaaaagaaaaaatttacaatacctgtttttagtatgtgtgatctagtcccttactttrgaatatgaaaatccttgccaactcttttcttggaaatataactgaaattgagacataaagagttgcattgtt

SEQ ID NO: 124967 - DNA, 590 bp, Homo sapiens
atgaatgaatatccagaagatttctgaggattcctgccttggcccttgagcaagctttactataccatcaggctttttttactgaggcctcctaaccttttgaggtggcccacttgggtaagatttaaaacaatactaaggagactctctagctttatacccacccaaaacacaggcccactgaagatggaagtgaagtgactttttacctacaattttctgctctgtttccacagcctgattcagtgaccttcttgtccttcacctttctccagtgtgggtctctcactagtccactgcgtcccccatgcactacggaacttgcatcagagcatcccttaccagatgtaaggtaaaaataaggaaattatctcccttccatcactgacaacttccaaaagagttgtggaatttagttaaatcataacttctgtctcagtctcttcaatctcagcttaaaagaaaaaatttacaatacctgtttttagtatgtgtgatctagtcccttactttagaatatgaaaatccttgccaactcttttcttggmaatataactgaaattgagacataaagagttgcattgttacat

SEQ ID NO: 124968 - DNA, 598 bp, Homo sapiens
gctataaatctctggaatccaccctatggtaatagtgcattaaacacttgggcagctaagattcatatggacaaatagaactgagagggcacactaccgtataattctataaagattatgaacacaacaggggcaggaaattggctactcagcaccaatactgctttgtgtcttatctaattgtacatagcctaggttagctgagctaaggacatctcctgctgtgctcaaaatagataaacagtgcctaaagttgataataattgacaaagaaaaatattgtgctgcaaatgacaagacacctctgaggattatcaaatttattatcttgaaaagatwggattttcacaagactatcaaatgggaagaggaaactgaggggagtaagaaaaccgagagttaattgaatttgcaagatatattggctgtcaacaggaaaaaaatcaagggaattacatggataatttaagggaaaagaacccttttccttaaagtttgaatattcagtttacagttcatgtaaatatgtattgggtgtgtgtgtgtgtctgtgtgtgtgtgacagagttttagaaacatcttaatggtaataaagtca

SEQ ID NO: 124969 - DNA, 570 bp, Homo sapiens
gcaatatagcacacaaagaagcactctttcaaaaaatttatttctattgatggaaatatttgaaatcagcaacaaaaaattaacatggcaaatagcaaaataacacttaatgcaattagtttgttggttaaagacataagcytaaagccaatagggagtttgtaaacagtgatcacagccataaactgaagggagaggtttatatgtaaactcttcagaaagactcactggtcatctccgttattatgtatcatgatgttctgccccaggaaggcaatagtgcatactattcgaaacacaggaaattaatgattatgagatccatggtttctgcagttccaggttaggatcattattccagtttttaatattcacattctttataatgagttttgcattttcttcaattttctccgggcagatatatttcaattccacataacataatagggaaattgtgttaagataatacacgaataaaaggtgccccttcattttctttttttcctaagggaaaaacaaaatacaagagatagtaaagtgaaactttgctaaaaaatatagcacgag

SEQ ID NO: 124970 - DNA, 570 bp, Homo sapiens
gcaatatagcacacaaagaagcactctttcaaaaaatttatttctattgatggaaatatttgaaatcagcaacaaaaaattaacatggcaaatagcaaaataacacttaatgcaattagtttgttggttaaagacataagcctaaagccartagggagtttgtaaacagtgatcacagccataaactgaagggagaggtttatatgtaaactcttcagaaagactcactggtcatctccgttattatgtatcatgatgttctgccccaggaaggcaatagtgcatactattcgaaacacaggaaattaatgattatgagatccatggtttctgcagttccaggttaggatcattattccagtttttaatattcacattctttataatgagttttgcattttcttcaattttctccgggcagatatatttcaattccacataacataatagggaaattgtgttaagataatacacgaataaaaggtgccccttcattttctttttttcctaagggaaaaacaaaatacaagagatagtaaagtgaaactttgctaaaaaatatagcacgag

SEQ ID NO: 124971 - DNA, 623 bp, Homo sapiens
ggacctaaatctaaactgtgaggaactgagttctaacatgaattcaatagtgatcttgaaagaggaccctaagccccagatgagatcacagccctagctgacacctatttcagtctggtgagagtctgagcagacagtctggtcgtgccatgcctatacttaaaacctacaggtactaggagatgttaaatgtgtgttaagttgttaaatttgtggtaatttataacactaacacagaacagaaatttacatttttcagtcatacaaagactcatgtgtaggaaattaagttagctagaacctagtgatgttttagcctttcaggatccacatttgtaaagattctcatctcatttggcctgcttctttgtctcactcaaatattttattagtaccttagagaatataaagtctgacaagggttgagctaggaatttcctatggttccttatctatagggattttggaaaataatgtctacggtttctttcaacccaaatatcataggatgatattgtaatatttatgagattagtatagttaatgtcaatatgacttagctacwagtacacaaaaataaaagataaatttggaacactgtatatatagagagaattaatgtt

SEQ ID NO: 124972 - DNA, 604 bp, Homo sapiens
gatgagaaaagtgttatttagtgttcacaataaaattccctgtgacatgaagcagcaatgactgcggcttgaagctcctctcgacacagctgcagctttgtggcccacccgcagccttgagagcycaagagaatgaatcagagaacagaggggagggctgatgtagctcttggactcaaagtggtccacccacaagcagcttctgcatcgccttagagcttataagaaatgcagacctctaggcctctccacagatccactgtatagggatctccaggttaacaatatccccaggtgatctgtgtgcacattaaagtttggaaagtgctgatcagtgcttctcaaactgggctgaacatcagcatcacctggggagcttaaaaaaaagactctgatgtctagatcccaccattgaacattgtgatttaattggtctgagacatgaccaattttttttttctttttttgagacagggtcttactcttttgccaggctgaagtgagtacagggcacgatcatagctcactacagccttgatctccagggttcaggtgatgttcccatcttagcctttcaagtagctgggactacaagcatgcgcca

SEQ ID NO: 124973 - DNA, 518 bp, Homo sapiens
ctcagttttcctaagtaatcaaaaacctggccgggtgcagcagctcacgcctgtaatcccagcactttgggaggctgaggtgggtggatcacgaggtcaagagatcaagaccatcctggccgacatggtgaaaccccgtctctactaaaaatacaraaattagccgggtgtggtggcacacacctgtagtcccagctactcgggaggctgatgcaggagaatcgtctgaacccggtaggtggaggttgcagtgagccaagatcacgccaccgcaccccagcctggcaacagagctagactctgtctcaaaaacaacaacaacgacaacaacaaaaaaccaataaagacagcatgaagcacaggaaattaccttgataaaacacagaatctttgtttcctagaccaattaccaaaaaataaatactcctgcagtgtaattgcttcttataggaagtccttttagataatctgaaaatctaacctaatgaaaaggtacttgaattcaaattgacactgga

SEQ ID NO: 124974 - DNA, 432 bp, Homo sapiens
tttttcctcccttatactattcaatatttcctaacttttctataaagcgtatgcattacatttataaatggaaaaaagttaatgttttaaaaagaatacatactttgccctgaattgatcattacacattctatgcatgtaacaaaatttcatatgtagcccataaatacatacaaatacaatgtattattttaaaatacacactttgaatccagcacctgcttgtgaggggaagccctcagaggacaggaggtggtagtttcaggtacacccccaccccataataacccccacttgcctgtgtgcgctgcttcagagcttgcaaaacatcttcacttccgtgatctcacctaagcctcccccacgtgaccctgtggaattctcattgccagatttgcwgcttcagaaggatgagcttgacagacaaaatcc

SEQ ID NO: 124975 - DNA, 567 bp, Homo sapiens
ttttgggataaatgccaccatcttcagtggacagctgttatttcttaacacaactggctttaaaaatagagaaaaattctaataacttaagcatctcctaggatttaaacagaacccacagccctcgtcaggtaaacttttccgcgtgaacaaagcatggagatgatgtccagggagcccctcccttacctgccagagacgtgaagagaattcccagactcgctcctcttataaaccacagatgctgcttgaggggatggaagggacgcctctgagactcagagcggcttccctcccggagcccaatcaagtggttaaatcagcagcggctgtttttaaacttcctctcagaaatttttaaattagatattaaaatttagatttttaaaaarcttacaatttaagaaatccccttagaagccaggagtggggcttctaatatgtggggagctcttggcatatgcctggtcctcatgctaacatcagaggggaggtattcttattaccactaaacagatgacgagaccgagtcacacggtagtcatggaccttggccaaggtcacagg

SEQ ID NO: 124976 - DNA, 643 bp, Homo sapiens
ataatatagtcattcttagatgcctttatgctcatttattctgtttatcattttccaaggccatgtcagtccttattacatactttcatgttttgtgtttttgaatagatttgtgactcagataaaaggtgctattcaaatttaaggattgctgtattaattcccatattatattagcattcaccaggtcattaggagggtaaaacattcagatggcattttgtcttatttatttctgtaaaatgatgtaataagcatgtttacaatattttatttcagtctatcttaatattgatatttcccgtgatctttgtttagtggtgttttctcttagtttaaattttattttgcccaacagctttcttttcttttataaaaaacattcagcttgaggtgacattgcctggctaaattacatttgtgtgtgtgtggaccactataatttttctttatttttaaatgttgctattgtttgtaaatttgtacaacaaggcactagagtgcacagtccctactgaaaacaaggcaggtttcagggaaacaygtcaggcattactagtttgaagcaactattaaagtatccatattggaaatttcaaatttaacctaccatatttctatttcttatactttagctaacata

SEQ ID NO: 124977 - DNA, 552 bp, Homo sapiens
cttggggttcaaaacaaagggctattagcataattatgcctactggtcttgagaatatgaaagaataggaaagagaagtaactgcacagaactataccggcaaatcttctggaacgtcccaaataccaagttatcccaaaagtcagttcctgtctagatcacccatgattaggggcttgatatgacagcaatgtacttttaaaacaagacaacatacaaacaaaaaatcaaagacacaaaaccaaarcacggtaaagaaaattttcagcaatgagaataaatacacttggaaaactacaagtagttatcactactttagagaaatcaaagcatattataaaacctatccaattcatctgagaggctttcattttgtcttttttaaacttcctttatctgtggtatgtgatgaaaaggttacttggtgaagctcccgggctctgggtatgaagtctcacccttgtgcttcaccagcgatgtagccatggacgctcactcatgtcaacattctgtgcctcaggttcctcatttaaaaatggggatataagacta

SEQ ID NO: 124978 - DNA, 552 bp, Homo sapiens
cttggggttcaaaacaaagggctattagcataattatgcctactggtcttgagaatatgaaagaataggaaagagaagtaactgcacagaactataccggcaaatcttctggaacgtcccaaataccaagttatcccaaaagtcagttcctgtctagatcacccatgattaggggcttgatatgacagcaatgtacttttaaaacaagacaacatacaaacaaaaaatcaaagacacaaaaccaaaacacggtaaagaaaattttcagcaatgagaataaatacacttggaaaactacaagtagttatcactactttagagaaatcaaagcatattataaaacctatccaattcatctgagaggctttcattttgtcttttttaaacttcctttatctgtggtatgtgatgaaaaggytacttggtgaagctcccgggctctgggtatgaagtctcacccttgtgcttcaccagcgatgtagccatggacgctcactcatgtcaacattctgtgcctcaggttcctcatttaaaaatggggatataagacta

SEQ ID NO: 124979 - DNA, 552 bp, Homo sapiens
cttggggttcaaaacaaagggctattagcataattatgcctactggtcttgagaatatgaaagaataggaaagagaagtaactgcacagaactataccggcaaatcttctggaacgtcccaaataccaagttatcccaaaagtcagttcctgtctagatcacccatgattaggggcttgatatgacagcaatgtacttttaaaacaagacaacatacaaacaaaaaatcaaagacacaaaaccaaaacacggtaaagaaaattttcagcaatgagaataaatacacttggaaaactacaagtagttatcactactttagagaaatcaaagcatattataaaacctatccaattcatctgagaggctttcattttgtcttttttaaacttcctttatctgtggtatgtgatgaaaaggttacttggtgaagctcccgggctctsggtatgaagtctcacccttgtgcttcaccagcgatgtagccatggacgctcactcatgtcaacattctgtgcctcaggttcctcatttaaaaatggggatataagacta

SEQ ID NO: 124980 - DNA, 632 bp, Homo sapiens
tttctaacccattctatgaggccaacattgccctaataasaacaaaaaagaaaaagacatcaaaataaaactacacaccaatatctctcatgaaaataaatgcaaagattctcaacataatattatcaagtagaatccaaagatgtattttaaaaattataaaccactaccaagtgggatttattccaggtatgcaagcctggtaaaacatttgaaaatcagttaatgtaagccattgtatcaataggctaaagaagaaaaaaaatgtgattatatcaatagatgcagaaaaagcatttatcaaaatctaacatctattactgatgataaaaaaatttcagcaaactaggaataacggggaacttccataacttgattaaaaacacttagaaaacatacagctaacattatacttaattataagaaacttcaagctttttcagtaagaccagcaacaaggcaaggatgtctcctctcacactccttttcaatatcgtactagaagttctagctgatacaataagacaagaaaaggaaataaaatatatgcagatggggaaggaagaaataaaactgtctctgtttacagatgacatgattatttatttggaaaattaaaaactaattcaaaa

SEQ ID NO: 124981 - DNA, 473 bp, Homo sapiens
tcgcttgaggccaggagttggagaccagcctgagcaacatagtaaaaccccatctcccccataatacaaaaattagccaggcatggtggcatgtgactgcagtcccagttactcggaaggctgaggtgggaggatggcttgagctcaggaggcaaaggttgcagtgagttgagattgtgtcactgcactccagcatgggcaacagagccagactttgtctcaaaaaaaaaaaaaaaaaaaagtatgctgagccactattttacgggacatgttaaatttcaaaaaagcatcyggcaatgtcagatatgtatggggtgagtaggtgagtatttaatgtttgccaatagacccacgtgttagcatttaaacttggtggtttaaacatcctcaactttttggtctcataaactccaattcaatgatttgaatatgattagacatagggatgctgagtcacaccaatcaaagtcaca

SEQ ID NO: 124982 - DNA, 599 bp, Homo sapiens
attaataattaaccttccatggatagtctttttatggtcttgcctatgattgctgttcttaccttcattctgttctataccatggggtacagtaatgttttcagaatgattagtgtatttcacttcttatttctgttgtccttggcactagattctttccttttaaccccttgttgtataatacacatatttgatccatgcatacttaaccttgtaaaacttgtgtcttcttgcctagatgccatcgaactccaaacagtcaggaaaccagcrccttggatgatggttcccttttgctagggacccttaggtagacttctgggaggaatctgacagctcgttctccccaaaaccacaccccctgttagcaagaagtagctaaaatcaggcatcgtccgtattctagtggcaattagatgtgcctcttcagtcaggggacatgatgggggcaggaggcagaaaatttctaggcagaaaagggtgggtccctggcaatagccccattctcaagtcaaaaggcctgaaactgtggcccaaagtgagaacttctatccctgttttcctgctcaaatgttgcctttcccaaaaccatgtatggc

SEQ ID NO: 124983 - DNA, 599 bp, Homo sapiens
attaataattaaccttccatggatagtctttttatggtcttgcctatgattgctgttcttaccttcattctgttctataccatggggtacagtaatgttttcagaatgattagtgtatttcacttcttatttctgttgtccttggcactagattctttccttttaaccccttgttgtataatacacatatttgatccatgcatacttaaccttgtaaaacttgtgtcttcttgcctagatgccatcgaactccaaacagtcaggaaaccagcgccttggatgatggttcccttttgctagggacccttaggtagacttctgggaggaatctgacagctcrttctccccaaaaccacaccccctgttagcaagaagtagctaaaatcaggcatcgtccgtattctagtggcaattagatgtgcctcttcagtcaggggacatgatgggggcaggaggcagaaaatttctaggcagaaaagggtgggtccctggcaatagccccattctcaagtcaaaaggcctgaaactgtggcccaaagtgagaacttctatccctgttttcctgctcaaatgttgcctttcccaaaaccatgtatggc

SEQ ID NO: 124984 - DNA, 599 bp, Homo sapiens
attaataattaaccttccatggatagtctttttatggtcttgcctatgattgctgttcttaccttcattctgttctataccatggggtacagtaatgttttcagaatgattagtgtatttcacttcttatttctgttgtccttggcactagattctttccttttaaccccttgttgtataatacacatatttgatccatgcatacttaaccttgtaaaacttgtgtcttcttgcctagatgccatcgaactccaaacagtcaggaaaccagcgccttggatgatggttcccttttgctagggacccttaggtagacttctgggaggaatctgacagctcgttctccccaaaaccacaccccctgttagcaagaagtagctaaaatcaggcatcgtccgtattctagtggcaattagatgtgcctcttcagtcaggggacatgatgggggcaggaggcrgaaaatttctaggcagaaaagggtgggtccctggcaatagccccattctcaagtcaaaaggcctgaaactgtggcccaaagtgagaacttctatccctgttttcctgctcaaatgttgcctttcccaaaaccatgtatggc

SEQ ID NO: 124985 - DNA, 611 bp, Homo sapiens
caccctctggggcttcaggggttgttggcaccctgccaagacactgctgtggggcctgcacggagttttgctcctgctgacacccaaaagcacttgccctggctcctgcacctgctcacctccatgctccctcctgcaaggggtggaacacagggtcccagtcagtgaagtgagtttgttcctgccagtgccaaagtagccggctggttctagcattcatgcactccagttcctgcctcattcacttgcatgctccctcccatgaggagttgaaagctgcaggctgggtaaacraggcacccctatggcaagtcttgcaaaagggcaagagaaacatcctgcttcgccataatgtgaggacactgcaaaaagaccgtctatgaaccagaaagtgggccctcaccagacaatctgctggtaccttaaccttgaacttcccagtctccagaactctgagaaataaatgtttattgttcataagctactcagtgcatggtattttgttatggcagcctgaacaaactaagaaaacttcttcatttaagaaatgttttccttataccaaaatcaaagaggtattctcctgtatttccttctaaatgctttaaagt

SEQ ID NO: 124986 - DNA, 611 bp, Homo sapiens
caccctctggggcttcaggggttgttggcaccctgccaagacactgctgtggggcctgcacggagttttgctcctgctgacacccaaaagcacttgccctggctcctgcacctgctcacctccatgctccctcctgcaaggggtggaacacagggtcccagtcagtgaagtgagtttgttcctgccagtgccaaagtagccggctggttctagcattcatgcactccagttcctgcctcattcacttgcatgctccctcccatgaggagttgaaagctgcaggctgggtaaacgaggcacccctatggcaagtcttgcaaaagggcaagagaaacatcctgcttcgccataatgtgaggacactgcaaaaagaccrtctatgaaccagaaagtgggccctcaccagacaatctgctggtaccttaaccttgaacttcccagtctccagaactctgagaaataaatgtttattgttcataagctactcagtgcatggtattttgttatggcagcctgaacaaactaagaaaacttcttcatttaagaaatgttttccttataccaaaatcaaagaggtattctcctgtatttccttctaaatgctttaaagt

SEQ ID NO: 124987 - DNA, 554 bp, Homo sapiens
ttgtatttctgtggggtcagtgggaacatcccctttgtcatttctaattgtgattattttcatctctctcctttattagtctagccagtggtctgttttattattttttttcaaagaaccaattcctaaatttgttgatcttttgtctagttttttgagtctcagtctccttcagttcagctctgagtttggttatttcttgtcttctgccacctttggggttacttttcttttgcttctctagttcttttagttktaatgttaggctgctaaattgagatcttttaaaatttttgatgtgggcatttagtgctataaatttccctcttaacactgccttaggtgtgtcccaaagattctggtatgttatgtctttgttcttgttagtatcaaagaacttcttgatttctgccttaatttcattgtttacccaaaagtcattctgaagcagattatttaatttccatgtaatcacatggttttgagcaattttttagtcatgatttctatttttattgcactgtggtagaagagtgtgtttggtatgacttcag

SEQ ID NO: 124988 - DNA, 554 bp, Homo sapiens
ttgtatttctgtggggtcagtgggaacatcccctttgtcatttctaattgtgattattttcatctctctcctttattagtctagccagtggtctgttttattattttttttcaaagaaccaattcctaaatttgttgatcttttgtctagttttttgagtctcagtctccttcagttcagctctgagtttggttatttcttgtcttctgccacctttggggttacttttcttttgcttctctagttcttttagttgtaatgttaggctgctaaattgagatcttttaaaatttttgatgtgggcayttagtgctataaatttccctcttaacactgccttaggtgtgtcccaaagattctggtatgttatgtctttgttcttgttagtatcaaagaacttcttgatttctgccttaatttcattgtttacccaaaagtcattctgaagcagattatttaatttccatgtaatcacatggttttgagcaattttttagtcatgatttctatttttattgcactgtggtagaagagtgtgtttggtatgacttcag

SEQ ID NO: 124989 - DNA, 648 bp, Homo sapiens
acaaatggcttttgtttaggtctcatgcatccctgctcytgcatctttagctaactagcacttatataacactggctaacatttatgcttcatctcttttgtttctcataccaatactatacaatttatattatgatttttcattttacagattaagaaactaaagcttagggaggttgagcaatttatttaaaatgacaactaggatatggcttagccagaacttgacccagatttatccaagtccaaaactctaaatggtcaccaggacttcattcttttctctaagcaccaccaactgaaaaatcctccctactcgcagtctcaccttttctcataagtgtctcttgacaagtcgcagagacctcagtctttctctaactcttaatcatttgaagccacaatcttctactgtcttggcatttttttcatgttggatggtttgttgtccctattgtcatcccctcgatcatttatttcacttgtctatgacaaagattggtgtgtctttattttaattatcagagtatctagtttagcactttgggtgtagaagtttacaagaggtaaaatgaatgaatgattagtattggaagcattgagctttcagctgtatctttatttttcctttgaacacttggaaaagat

SEQ ID NO: 124990 - DNA, 604 bp, Homo sapiens
  misc_feature (1)...(604): n = A,T,C or G
ttgtctcatttaacactcaaaacagcttttcttctgtgtrgtgttcactaaaagtaggaataacaacgtaaaagctaattaaggtcacaaacttcggtgaaacccttaaaagtccaaatctttttgatattgtgaactataccccttccagtttagtttcttctggactttccttacttgtcagttaccttttaaaatttgcacacattatgattaaaagtgggcctctactgtgatgattcctatttcctctcatgttttaaagtgcaaactaactttaagtgaacattagcatcaagtagtgcagacatttgtatgcatttccttgatnnnnnnnnnnnnnnnnnnnnnnnnnnnnnnnnnnnnnnnnnnnnnnnnnnnnnnnnnnnnnnnnnnnnnnnnnnnnnnnnnnnnnnnnnnnnnnnnnnnnctcgcattgtttttattttatttataactcagtttaaaaagactaaaatcctctttcaaaagaggcatctaaatgtgtgtcctaattttgtatatgggcttaggttttgtaaccaattaaaaaaaaagctgctatccaatatgataaaacattgaaaacttaaaaaaatttaaa

SEQ ID NO: 124991 - DNA, 604 bp, Homo sapiens
  misc_feature (1)...(604): n = A,T,C or G
ttgtctcatttaacactcaaaacagcttttcttctgtgtggtgttcactaaaagtaggaataacaacgtaaaagctaattaaggtcacaaacttcggtgaaacccttaaaagtccaaatctttttgatattgtgaactataccccttccagtttagtttcttctggactttccttacttgtcagttaccttttaaaatttgcacacattatgattaaaaktgggcctctactgtgatgattcctatttcctctcatgttttaaagtgcaaactaactttaagtgaacattagcatcaagtagtgcagacatttgtatgcatttccttgatnnnnnnnnnnnnnnnnnnnnnnnnnnnnnnnnnnnnnnnnnnnnnnnnnnnnnnnnnnnnnnnnnnnnnnnnnnnnnnnnnnnnnnnnnnnnnnnnnnnnctcgcattgtttttattttatttataactcagtttaaaaagactaaaatcctctttcaaaagaggcatctaaatgtgtgtcctaattttgtatatgggcttaggttttgtaaccaattaaaaaaaaagctgctatccaatatgataaaacattgaaaacttaaaaaaatttaaa

SEQ ID NO: 124992 - DNA, 604 bp, Homo sapiens
  misc_feature (1)...(604): n = A,T,C or G
ttgtctcatttaacactcaaaacagcttttcttctgtgtggtgttcactaaaagtaggaataacaacgtaaaagctaattaaggtcacaaacttcggtgaaacccttaaaagtccaaatctttttgatattgtgaactataccccttccagtttagtttcttctggactttccttacttgtcagttaccttttaaaatttgcacacattatgattaaaagtgggcctctactgtgatgattcctatttcctctcatgttttaaagtgcaaactaactttaagtgaacattagcatcaagtagtgcagacatttgtatgcatttccttgatnnnnnnnnnnnnnnnnnnnnnnnnnnnnnnnnnnnnnnnnnnnnnnnnnnnnnnnnnnnnnnnnnnnnnnnnnnnnnnnnnnnnnnnnnnnnnnnnnnnnctcgcattgtttttattttatttataactcagtttaaaaagactaaaatcctctttcaaaagaggcatctaaatgtgtgtcctaattttgtatatgggcttaggttttgtaaccaattwaaaaaaaagctgctatccaatatgataaaacattgaaaacttaaaaaaatttaaa

SEQ ID NO: 124993 - DNA, 604 bp, Homo sapiens
  misc_feature (1)...(604): n = A,T,C or G
ttgtctcatttaacactcaaaacagcttttcttctgtgtggtgttcactaaaagtaggaataacaacgtaaaagctaattaaggtcacaaacttcggtgaaacccttaaaagtccaaatctttttgatattgtgaactataccccttccagtttagtttcttctggactttccttacttgtcagttaccttttaaaatttgcacacattatgattaaaagtgggcctctactgtgatgattcctatttcctctcatgttttaaagtgcaaactaactttaagtgaacattagcatcaagtagtgcagacatttgtatgcatttccttgatnnnnnnnnnnnnnnnnnnnnnnnnnnnnnnnnnnnnnnnnnnnnnnnnnnnnnnnnnnnnnnnnnnnnnnnnnnnnnnnnnnnnnnnnnnnnnnnnnnnnctcgcattgtttttattttatttataactcagtttaaaaagactaaaatcctctttcaaaagaggcatctaaatgtgtgtcctaattttgtatatgggcttaggttttgtaaccaattaaaaaaaaagctgctatcmaatatgataaaacattgaaaacttaaaaaaatttaaa

SEQ ID NO: 124994 - DNA, 514 bp, Homo sapiens
ttctacttatggatataccacattttatttattcatttgtccrttgatagacacttggattgtttccatcttttggccttaatgagtaatgtttcaataaacattcatgtgcatgctttttgtggacaaacatttgttttcatttctctttgggtatatatcacctaaggagtggaattgctggatcatatggcaattctatttttaataatttgaggaactgccagactgttttccaaggtgtttttggaaaacctacacaattttacattcacatcagcagtgcatgtgggttctgatttctccacatacttgccaatacttattatctgacttttgattctagctataatagagggactgaagtgttattttattgtagttttgattcacatttccctaatgacaaatgatgtgaagaattgtttcacatgcttattggctatttgtgtattttctttgagggaaattttttctgtgctgttgttgttgttgcttgtgctggtgtcatagc

SEQ ID NO: 124995 - DNA, 534 bp, Homo sapiens
ggaaatgacatagcactttgtttttctaaatcaaattaatctggctatgagtcctctcttggtatgggtgggcgaaaatgcaatctgtcctttttctcctccaaaccaaatgtgttraggcactaggcatgcagtctcccctggcatcccgtggctacaactactgccatcttagtctgggatggggtctgctgcacacaaggcatggatctgtccctaataggaaagctcacgcctctaccctctccccctgggttctgtcctccacctccaactcaaagcaccagtttgcagtgctgcctctggggtaactcagtgtacttgggcctcccctgggagaggggcctaacagtctcttgtttcaagggtctgacagtccttaacactaggtcctgaatcacaggccctatgaacccttgtctccaacaaatccatcagcttacctcctaactacatttagaacccagccatttctaccatcgtagcccaagccattttctctcacctggatcatcgcaataactgtctaactgg

SEQ ID NO: 124996 - DNA, 424 bp, Homo sapiens
aggggaccaaaggaggctggtctcaactgtttggggctgataaagcttgtgtttcttcaataaagctatcttgctaaggatctgggtgtagaacaaattctttrgagggcatgtccataggcagatgatgcacccacaagcatttggggaaacacccaattggggaaacacccaccaaaacagctcttctttgagaaactccgtgtaatatgatccttcaaaaaggacaaaaaccgattcatctgccagaattcgcttctcctttcacactggttcattctctcatctgattggcgctggctgggctggagcccattctcctggattctgggaattaagctttccccagcagctacactaaagacaatgtagtcccattggctgaccaactcccagattcatgcaccaaagacacctgcaacct

SEQ ID NO: 124997 - DNA, 604 bp, Homo sapiens
aaataactaaaattaaaaaatttaacctagtgctgacatacatcagtgcaacaaaattaagaattttgaatcaataagcaaatgatggattatcaaatgttatcagcctaagtggctgttttggaaaaatcaagttcttttcttacatcataccaaaaaaaaaagttccaaatatgttaaagggttgaaaacaaaaatataaaactgaaaatattagaagtaagtagactacctttaaaatcttagtttggcaatgaaactctaatcaagttaaaatgcagaaaacacagcaaaggtatggctgcactgagctaataaattactgtatatgatcgaaagacaaagacacattaaaataaatgtttacartatatataactaaagattactatctgtaacatccatattatctaaataaaaatggaaaaatgtgcaaaggacatgcatggtcaatttactaaagaaataaaaataaaaatagtcaataaaaatacagaggaagcttttcaaaattttcccacacttgtaatctgggaaatgcaaagtaaaacaaggtactgttatttttgcccgtcagacttgcacaaatttaaaagattcatat

SEQ ID NO: 124998 - DNA, 580 bp, Homo sapiens
tctttcttttctgtcccttcatatcaaaagttttcaaaacgcttaagctggtagaccctatgagtgtgtggcattaggcawccccagcctagatttttgtttgtttgtttgtttgtttgtttgagatggagtctggctctgtcgcccaggctggagtgcagtggcacgatatcgggtcactgcaacctctgcctcccgggttcaagcaatttccctgtctcagcctcccgagtagctgggactacaggcgcacgccacgaagcctggctaattttcgtattttttagtagagacggggtttcaccatattggtcaggctggtcttgaactcctgacctcaggtgatccatccacctcggcctcccaaagtgttgggattacaggcttgagccaccgcgcccggcccggatttattttttaacacacccaaatccgcagtcattaagtgacaagacttttgttttcaacaatatgaagtacttaaaatctggatattagatttttctccggtttggaagatcaaaaggtaattaattcatattcaatagctccccttccactacatggctcctacacagaa

SEQ ID NO: 124999 - DNA, 580 bp, Homo sapiens
tctttcttttctgtcccttcatatcaaaagttttcaaaacgcttaagctggtagaccctatgagtgtgtggcattaggcatccccagcctagatttttgtttgtttgtttgtttgtttgtttgagatggagtctggctctgtcgcccaggctggagtgcagtggcacgatatygggtcactgcaacctctgcctcccgggttcaagcaatttccctgtctcagcctcccgagtagctgggactacaggcgcacgccacgaagcctggctaattttcgtattttttagtagagacggggtttcaccatattggtcaggctggtcttgaactcctgacctcaggtgatccatccacctcggcctcccaaagtgttgggattacaggcttgagccaccgcgcccggcccggatttattttttaacacacccaaatccgcagtcattaagtgacaagacttttgttttcaacaatatgaagtacttaaaatctggatattagatttttctccggtttggaagatcaaaaggtaattaattcatattcaatagctccccttccactacatggctcctacacagaa

SEQ ID NO: 125000 - DNA, 580 bp, Homo sapiens
tctttcttttctgtcccttcatatcaaaagttttcaaaacgcttaagctggtagaccctatgagtgtgtggcattaggcatccccagcctagatttttgtttgtttgtttgtttgtttgtttgagatggagtctggctctgtcgcccaggctggagtgcagtggcacgatatcgggtcactgcaacctctgcctcccgggttcaagcaatttccctgtctcagcctcccgagtagctgggactacaggcgcacgccacgaagcctggctaattttcgtattttttagtagagacggggtttcaccatattggtcaggctggtcttgaactcctgacctcaggtgatccatccacctcggcctcccaaagtgttgggattacaggcttgagccaccgcgcccggcccggatttattttttaacacacccaaatccgcagtcattaagtgacaagacttttgttttcaacaatatgaastacttaaaatctggatattagatttttctccggtttggaagatcaaaaggtaattaattcatattcaatagctccccttccactacatggctcctacacagaa

SEQ ID NO: 125001 - DNA, 546 bp, Homo sapiens
tcacctgggtgcaaagccatgcttcactaccacaaaacttgtcatattcattttatttaaaaaactatgtgcatttcacattaaaagaaagaaaaatagagttggcattttactaagttgctcaaagaaggttcgtggcaaagcaggcattggcactatatttttttaaaaaacagctttatcaaggtgtgattgatactcaaaaatctgcacatatttagtgtatacaatttgatgagtttggacatgtgcttgcactggtgaaaccatcgctacaatcaaggtaataaawatatctatcatttccaaacacttgcttgggcttgttttttgcttttgtttgttgttgctgtaaaagcacaacatgagagctacacttttaaatttttcagtgcacaatacagtattattaacttacagacaccatgttgaacagcagatctccagaaattatttatcttgtagaactgaaactttctatacattgcacaattcttcatttcttcttccacccttcccccggcaactgacattctattatctgct

SEQ ID NO: 125002 - DNA, 499 bp, Homo sapiens
agagttctcctggccagaatcaactagtattccagtgtctctcgaacttcagggaacacataaaagcctgttaaatggttatcataaagcttctctctatttgctttaagaaaagggagaaacacctttctccattcccaaaaagaagatcaaggccagaattctgaaattatctctcctaacagaatgtttcaatcttcgattttcatgcaaaccaaagatagcagaacctatttcatagtcataatatgcttctcataggtgggtcacctcttcartttaggatctgaggatactttacaatattccatttttttttttgccaaaactgagacaaaaaaaaaatgaaaagaaaaaaaggattccatcttaactttctgtcatatattgtaccaccagaaaaaaaagtatgttttatttcttgctactcctcatttttctgcttctttctcttatataaatgcttacccatgctattttaaagattctatttgtgttt

SEQ ID NO: 125003 - DNA, 591 bp, Homo sapiens
tttccaaaatttattctttgacattgtatatactttgatattgtgtcctcagttttaaaatgattatattatctattttatagttttttattgtttatattttttgaataatgggtaaaccatgtataatctgtaaaagagagttttctttaaagtgatttgttattaaatatttgctactatgaaacaatttgaaaaaacagaaatagctatgtttttaaattttaaatgtgctaaggtattatttatatatagtattctccattstcttaaagtgtagatgcaatgggtctggaaagttttatacaccatcacctaccttcacaatcaaggtataatccaaaactcaggaaagatttcttgtgccactttgcagtccattcctccctccacccctgaccctggttaaccacgatctactttctatcaccttaggttagtttgcattttctaaaattttatgtaaatagaattagaaaacatgtatttatttttctctggcttgtgtgtctgttttctaacaaactttttattttaaaataatttttgtattatagttaatttacaaatataataccagaggtttcatac

SEQ ID NO: 125004 - DNA, 591 bp, Homo sapiens
tttccaaaatttattctttgacattgtatatactttgatattgtgtcctcagttttaaaatgattatattatctattttatagttttttattgtttatattttttgaataatgggtaaaccatgtataatctgtaaaagagagttttctttaaagtgatttgttattaaatatttgctactatgaaacaatttgaaaaaacagaaatagctatgtttttaaattttaaatgtgctaaggtattatttatatatagtattctccattctcttaaagtgtagatgcaatgggtctggaaagttttatacaccatcacctaccttcacaatcaaggtataatccaaaactcaggaaagatttcttgtgccactttgcagtccattcctccctccacccctgaccctggttaaccacgatctactttctatcaccttaggttagtttgcattttctaaaattttatgtaaatagaattagaaaacatgtatttatttttctctggcttgtgtgtctgwtttctaacaaactttttattttaaaataatttttgtattatagttaatttacaaatataataccagaggtttcatac

SEQ ID NO: 125005 - DNA, 336 bp, Homo sapiens
tgaacatctttcctcaatttgtgcaagaagggattagtgtggtatggtrctttcaggatatctagaacataattctaaaaatgcaagacacaaataaaaaatgtgcacaggttatataatttttaaatctttagattaataatctaaaaatattaataactgccactgctgtctttcaaatttacttcatcccacaaaatcctttcaattcattcattataccaatctctttcctgacccgattaattgcacataacattcctccttcttcttgcttttcccatggtgtgctgcttctcatctctaagatcttacctttactctcacttctaaaga

SEQ ID NO: 125006 - DNA, 557 bp, Homo sapiens
agaatttttaggaaacaaacaatcaaaagcaaagtaggcagctagcttaatatcactttgaaggctttggcttgttttattggagatctaatcttttggatgtgctactgggcacaaaccaaagccaaacatatttaactagcaaagctttacagttatttcagaattgctcaatggaatgtgttattgcagttacaaagtgatgttttaaatctgctaaaatgagtgaatttttcttagaaaccctaagtgtatttagaataatagaggacgatatttatttgaaaaagaaaattacgttgctagagctatttaattcgaacatcagttcacagttcacatggatcagttagtttacggtaatarcatacctgaaagataaactaattaattcatatttttagttggatatattctgagttacctcaacagaaggtttactgatttctcattttaaataccaaatatatacttttaagactgatatgatgtgttcagtcatgggtgatgagctttcccttcatttacttaataaatagttattggatacctagtgt

SEQ ID NO: 125007 - DNA, 591 bp, Homo sapiens
ctatcaacagtgaattgaataaagaaattgtggtacatataccccatggaacactatgcagctataaaaaaagaagagtggaatcacattctttgccacagcatgggtgcagctggagccaataacctaagcaaattagcatagaaacagaaaacaaaatactctatgttcttacttataagtgggagctaaacatggagcacatgtggacataaatgtgggaacaatagacactagaaactaacgggtagggaaggaggggcccagggttgaaaaactattttaaaatataaaagatattaaacagtgttaagaaaaataaaaaatgaatttggtctctaacaatagactcctcactaaaggaacttcccaaaggtgaacataagaagtacaacaaaaaaaaatcctagagttaagttcttatatgaaagaagtaatagtgagcatttaaactgctaagcacaaaaatgaatctcaataaatattaatcaaaattacaaattgtcgtcactactaatttggaaggcataataatgaygtaggagtaaaataatcaacagtaatatcatgtaagatgggaaaggccaccag

SEQ ID NO: 125008 - DNA, 548 bp, Homo sapiens
tgccaaggtctgacatcaccgagtttctgtgattctagtagaagccagaagtatgttctctgtaattagagggaattagayaaactatcaggaaatgccatacagagccttcagaagaaaagaaatacaaaggaaaatcagactgacgattatgttctgtaaagctgcttctcacaattgtggcagccactacatatacacagtctcccaacccaggagcactatatgcccatagccacagaggagagattatgaatgagccagagcaaattcttcctcctagagggaaaaacaggaagtgtatctcttcctgctcatattctcattctacagttctactcgcatctacatgattaagcatattgtttatgaagaagccaatgaaaagaacctgaaaaaagatacatggtgaattataaagtattattccgaagaataatggttctctgtctctttcctggtttgcactaaaaccttacattcaggaagacaagcacacttagataagattatccatcctcttcgttgccagaggttaaagtgcaaat

SEQ ID NO: 125009 - DNA, 548 bp, Homo sapiens
tgccaaggtctgacatcaccgagtttctgtgattctagtagaagccagaagtatgttctctgtaattagagggaattagacaaactatcaggaaatgccatamagagccttcagaagaaaagaaatacaaaggaaaatcagactgacgattatgttctgtaaagctgcttctcacaattgtggcagccactacatatacacagtctcccaacccaggagcactatatgcccatagccacagaggagagattatgaatgagccagagcaaattcttcctcctagagggaaaaacaggaagtgtatctcttcctgctcatattctcattctacagttctactcgcatctacatgattaagcatattgtttatgaagaagccaatgaaaagaacctgaaaaaagatacatggtgaattataaagtattattccgaagaataatggttctctgtctctttcctggtttgcactaaaaccttacattcaggaagacaagcacacttagataagattatccatcctcttcgttgccagaggttaaagtgcaaat

SEQ ID NO: 125010 - DNA, 494 bp, Homo sapiens
agaacatctccttccaacaaaaggtcaccctacaaaagtccacaagccaaatcgtagcaaagtgctcctgttgcaaggaggtctctttcctgagatccgtgaataagctctgcagtccagagatggaaacccatgcatttaatgtaaaatgtgtggctttacagagggagagaaatgtattcaaagtagcgtgacagcttagaaaagctgcctcttaagctctaaatatgtctgagcaaattgatcagatatatacrgaagtaacaaacgtactacagaataaatatattttcaacactctcacacgcatatatttatatagagagcaatctaaacgcattagcattcataaacacaaagtcgaatgtttttcagagctacagaatggaaagatcagtgtctgcattccacagtagtttaagagctggttaagagctaagtttctggtcatgctgcccaagtttaactctcaactgtactttttaacagctcct

SEQ ID NO: 125011 - DNA, 587 bp, Homo sapiens
ttatcttgggaaaatttaatatttcatcttgtcctttaatgtgcttgccaaggtatttaaagagctgagtaaaaattaggatgactggtattagaatgatgaaaaatgctttaagcactttaaaccactgggtgtaaattcaggaagataaggttaagaagcccgcgtatgctgccacatggtaatgtcaaggttgaaatggacatggtgacattccacagtgcaatgamtgacaaccgagtgcaattagctgcctcgtgtagccaggtctcccaagactcatcagtggcactgatgggggtcatatcaacaccgatagatcagcttgtgccctcacctactgacagcacctcctgccttggaaagttccctcaaggcaggtttcagtgttcctggggtttcatgtgtgtattcctgagtgatcactcccctaatagctttgccatgtctcccttctcttctatgttgaagcctgaggaagaggtgtggggaagggtgaaaatgtccccatctagttcatcttatgctctgtgagccatggggaatgcaggctgctagtgctctcaatgatagaggctgcaaggaag

SEQ ID NO: 125012 - DNA, 564 bp, Homo sapiens
cattcacatgtcacctcgcatgggaataaagaccaaccaaattagaacaggccacagctgtttactcagagcttgctatagcgatggggtcagccaccatcaactttgagttcttccattttggcaagaactcaaaggcatgcagaggagtgggaaagcttagtagtggaaaaaagggaaggctttcygtacaccaggattggaggctgttggtgtggggaagctgtaggcaggctaactaggagtggggctccctatgggattggttagagctgcatatttggctttctctgatttgtcctacattggaaggggggacaaaaatcaggaaaactgtcagttattaatcaagtcctagccacttggggatgattattacagaggttattgttcagcttcctgaattgttatcaaagatagtagtctgacttcttataagtctgactcataggttgcaggtgggcttcctgggctgtttattgtagatgtcgatactggggttgtttttctgagcagcttgctgcagcttgtggccctgagttctacttttttatgtggtccgac

SEQ ID NO: 125013 - DNA, 564 bp, Homo sapiens
cattcacatgtcacctcgcatgggaataaagaccaaccaaattagaacaggccacagctgtttactcagagcttgctatagcgatggggtcagccaccatcaactttgagttcttccattttggcaagaactcaaaggcatgcagaggagtgggaaagcttagtagtggaaaaaagggaaggctttccgtacaccaggattggaggctgttggtgtggggaagctgtaggcaggctaactaggagtggggctccctatgggattggttagagctgcatatttggctttctctgattygtcctacattggaaggggggacaaaaatcaggaaaactgtcagttattaatcaagtcctagccacttggggatgattattacagaggttattgttcagcttcctgaattgttatcaaagatagtagtctgacttcttataagtctgactcataggttgcaggtgggcttcctgggctgtttattgtagatgtcgatactggggttgtttttctgagcagcttgctgcagcttgtggccctgagttctacttttttatgtggtccgac

SEQ ID NO: 125014 - DNA, 553 bp, Homo sapiens
agcgggcttgacttcagagggacagcttgatggcataacttcggagaagaatcagccgaatatggccggacttcagaggaagattacytacacacctcatcctcttttcagcttccctccccgttaagggccactttcactggcaataaaatcccctgcattcaccagcttcaatttgatcatgtgacctcgtttttccctgatgctggacaaaagcttgggagccacgagtgcagagggctgtcacactggccctttgccttcactggcagaggtcagccgcctcatgtgaaaaggcaaagagcccaatgagctgttaacacttaagctgcctgcgggcagcagagctaaaagagcactgtaacatgccctctgggactttgtgaattgcaggcaccctgcctggacactgctgcagtgcatgcatgaagtttgctcctgtcagtgtccaaaagaggttgctccagcttctgcgcctgcttacctaagtgttctctcctgtgaggggtggaatgtagtgggtctgagtcagtggagtttgatcccgccggcg

SEQ ID NO: 125015 - DNA, 553 bp, Homo sapiens
agcgggcttgacttcagagggacagcttgatggcataacttcggagaagaatcagccgaatatggccggacttcagaggaagattacctacacacctcatcctcttttcagctyccctccccgttaagggccactttcactggcaataaaatcccctgcattcaccagcttcaatttgatcatgtgacctcgtttttccctgatgctggacaaaagcttgggagccacgagtgcagagggctgtcacactggccctttgccttcactggcagaggtcagccgcctcatgtgaaaaggcaaagagcccaatgagctgttaacacttaagctgcctgcgggcagcagagctaaaagagcactgtaacatgccctctgggactttgtgaattgcaggcaccctgcctggacactgctgcagtgcatgcatgaagtttgctcctgtcagtgtccaaaagaggttgctccagcttctgcgcctgcttacctaagtgttctctcctgtgaggggtggaatgtagtgggtctgagtcagtggagtttgatcccgccggcg

SEQ ID NO: 125016 - DNA, 513 bp, Homo sapiens
tcattgtgtgagtgataagcaatcaaccaacagatggtgccagcatctgtttatgttgtaaatagcctgatgctttatgtacctgtagaaatgtccccataaaacctcttgttgacaatttaagtcatggaggatctgacatgacaaatccaagaacttctattgttaaactcatatatttcctaagttggaaaaccttgtaggacagagaaggctttgtttgagtcttacgttagttatgaagaaattcgatttacttcctctctctgggatttcatgaatttgtacaggtttggatcatttcctagcacctgtcatgtaacttayattggatgtacagttaatgaatagagagagttcagattgaaagtgcacagtccccagtcagggagctttttgaattcctaatggaagcagacggctagaatttttaaatctaaaaattaccatagattcagattcagacagtatagaattgcccttcagctatggcagaagaggctccctccccag

SEQ ID NO: 125017 - DNA, 586 bp, Homo sapiens
tcaataatgtgctcctaacaggactgctcttacatgaaaggcatgattcacaagaggaagttcctgttactacaccccaaagggttctcaaggcctgaatgccttcctagagatacttgtgtttgcatgccaagccatcacataaaactgaaagcacagaaaaggtctcacaggtgtcttaaagatacaagtacagcaggacagcagaggtgtagtgagctggtagctggactcgggatctggaagatggaaacaaagagtatagggtatgccataggtctcaayattataatgttggacaaaagcctgtggttgaaaagataatgaacatgcagtttagtgaccaaaataagggagtgaatgtacggaaaaacatttttcacaatgcctaccttacagcatgtgcatgataggtggttttttaatgattttgtagtatatgggatcagaagccctgtctgcaaaactccatacaaggtccctctctccctgcccatgactaccagccacattctgaaaggaatgggtatgatgacctgcagggggatcgatgccagatactaacaaattataccccagtgaaaat

SEQ ID NO: 125018 - DNA, 668 bp, Homo sapiens
tattcctgggctcttgattctgttccattgctttatatgtctgtttttatgcgagtagcatactgttctgatactatagctttctaatatattttgaagtcaggaagtatgaggcctctagttttgttctttctcaagattgttttggctatctgggactctttggagtcccatatgaattttaggattgttttcctattactgaaaagaaaaaagcattggaattttratagggaatgcattaattctgtagattactttgggcaggatgagtgttttaacaatattaagtctttcaatctatgaacacaggatatcttcccatttatttgtatctttaattccttccagccatgtttttaaaattttcggtggataagtatttttatccctggtcaagtttagtcctgattattttttgatattgtaagtggaattattttcttaattatctttttcagattgttcatgtcagcatataaaaagagcttattttatatgttgattttatatcttacaactttgaatttattcaacagtttgtgtgtgtatggcagagttgtttctacatataagacatcatctgtgaatagaaataataaatattacatcttcctttcagatttagatgccttttatctcttttgtttagctaagacttccagtac

SEQ ID NO: 125019 - DNA, 525 bp, Homo sapiens
tatgttcatacatgtcatgtttggtcagttctaatctccatggtcactttttaggaggggagaatattcttggtctgccagtttttgtttttgtttttttccctgttgtgttcttttctttttctttgggaatttctccataggtcctatagaactagagcctagtcttagtggatttatggctggtttggtcaagcttcttatcccactgtgtgtttgtgtgtgtgtgtatgtgtgattttctatttttatagacttagagaaggtacaaatgctgacttgttatgtggatattttgtgtagtggtgacgtctgggctttccatgcaactatcacacagatggtgcacattgtacccattaggtaatttctcatccctcattctccttcacttctccgatgtctagtattccaccaagagagggagagagattctaatctttcccctagccagcagagattgatgctgcaggacagcaatcaatgmaaaccttctcctgtagtcagcctgtcccactcactgac

SEQ ID NO: 125020 - DNA, 479 bp, Homo sapiens
cttttctccctgtgtgaagaatgctagttaatttaaaattttgcttgcttactttagatttcaacctttgctcctctcaatcttctccaaatctcatctgccctggagcccagatgagaactgggggtgagggcagatgttccatactatcagagtgctgtgacaaaccatgccagctccccttgcagcatcagataatgggctgtcttttaaatgagaacatagaagtgcttactcccattcagcttgaaatccttcaatacccagatgttttttctgttgcatctggatttggctgttggagttttatcatcctttcytcaatgacacaacatatccaggttgttgaatggtgtatcactgcctgtgttttcttagccattacattgtccacctcatggatatggatgctggagaaggtgtgtgtctgtctggtagctcagtcactaccaccatttgtgttctcaccgcagaaaaga

SEQ ID NO: 125021 - DNA, 614 bp, Homo sapiens
caggttatactgatgtaaaaggtgggttcccatggtcttgggcagctctgcccctgtggctttgcagggtacagcttccctcctggctgcttttaggggctggcattgagtgtctgtggcttttccaggtgcacagtgcaagctatgagtggatctaccattctggggtctggatgatggtggccatcttctcacagctccactaggcagtggcccagtggagacttagtgtgggggatccaaccccacatttcccttccacactgccctagcagaggttytccatgagggccccgcccctgcatcacacttctgcctgggcattcaggcatttctatacatcctctgaaatctaggtggaggtttctaaacctcaattcttgacttctgtccacccataagctcaataccatgtggaagctgccttcttgaggcttgtaccctttgaagccatggtctgagctgttccttggccccttttagccatggctagaacagctgggacacagtccctaggtaggcttcaccaatccatgaaaccatattttcctcctaggccttcaggcctatgatgcaaggggttgctgtgaaggtctctaacatgccctggagac

SEQ ID NO: 125022 - DNA, 584 bp, Homo sapiens
tacagtaaattactcaaagttacagagctaagaaggtctcaactgtaggacctgaaccttggttttctgactctaggacaaagattttttatatttgttccctccttaaaaaaaaattcattcccttctttaaaaaaaagtgaggtcacaccatgtgatgaggtcacacctggcccagatgccctgctcacaccatgtgatgaggtcacacaggaggcatctaaattcaacacagaggtgagggagggcattgggaagtgatcctattgctgtgtttccagggtcagcgagaggtctcacgcrtgcagggcacagctggagggagcagttcgctcccagctgaggcagccacacaggagcaggaggcacctgacaggagaagcgcagcatggagagtggcaggagatgagctactgttgtccaccatccgggacgtgcaggttaagacttggaatctggcctggggacagtcagagcagctgagtggacatgaagctgaagagtgaggcataggtttgggtttggaaagctcactctggcggtgtggtggagagggggtagggggacggcaaaaaagtgcagag

SEQ ID NO: 125023 - DNA, 584 bp, Homo sapiens
tacagtaaattactcaaagttacagagctaagaaggtctcaactgtaggacctgaaccttggttttctgactctaggacaaagattttttatatttgttccctccttaaaaaaaaattcattcccttctttaaaaaaaagtgaggtcacaccatgtgatgaggtcacacctggcccagatgccctgctcacaccatgtgatgaggtcacacaggaggcatctaaattcaacacagaggtgagggagggcattgggaagtgatcctattgctgtgtttccagggtcagcgagaggtctcacgcgtgcagggcacagctggagggagcagttcgctcccagctgaggcagccacacaggagcaggaggcacctgacaggagaagcgcagcatggagagtggcaggagatgagctactgttgtccaccatccgggacgtgcaggttaagacttggaatctggcctggggacagtcagagcagctgagtggacatgaagctgaagagtgaggcataggtttgggtttggaaagctcactctggcggtgyggtggagagggggtagggggacggcaaaaaagtgcagag

SEQ ID NO: 125024 - DNA, 651 bp, Homo sapiens
acttaaatgattaattttagatatttattctattctaatatatgtgttggatgctataaatttccctctaagcactgctttcactgcaacccacacattttgataagtttgattttcattttcatttaattcaaaatacttttaaattttttttgatatttcttctttgtcccaagtgttatttgaaagtgtgctatttgatctccaagcatttgggaatttctcaaatatctttctattgttgacttgtagtttaattccattgttctttgagagcagacattgtattatctctattctttttaatttgttaaggtgtgtttatgcatcagaatgtgctctctcttggtaaatactctgagtgagttttagaagaatgtgtaatcagctgttgttgaatagtcagtttattggtgttgctatttagttcaactatgtcattatggattttttgcctgctggatctgtccatttctaatagaagagtgttgaagtcttcaacaataattgtggattcatctacccctccttgaaaycctattagtttttgcctccgatattttaatgctctgtagttaggtgcatacacattaagaatttttatgtcttcttaaagaactgatccctttatcattatgtaatgcccttctt

SEQ ID NO: 125025 - DNA, 648 bp, Homo sapiens
agacgtgtttagaggaaaatttttatcattaagtgcatatattagtaaaaaataaagagctaaaataataatctaagcttccattttattaaatcagagaaggaagcataatttaagctcaaagcaagcagaacaaaagaaataaaaaacaaagcaaaaatcagtgatatggaaaacagtagagaaaatcaatgagctcaaaaactggtgtttttgaaaagattgataaaatggataaactgctatccaggctattcaaaaattagtgagagagagaaattgctaatatcagaaatgaaaaagcagtcatcactactgaacccatgaacattaaaaggacaatgaataaacataaacaaccctatgctcacatatttgatgatttaaaggaaatggaccattatttgaaagtcataaactgccaaaacttacataaggaaaagtagatcatataaatgggcctatatctattacatacrtttaatatgtaattaatagtctaaaaaagaaagcactagacctaaatagtttcgctgttgaattctacttcacttaaagaagatatgatatcaattcttcatcatgtatctagaaaatagaagccaagggaatagttctaaacttacttaattaactaagctatcatta

SEQ ID NO: 125026 - DNA, 594 bp, Homo sapiens
ctctcctttgcatctcccctttctgacccttttaccaccccctaccatgatccccacttgaatgatgtttctggacaagggttgcacttagttacataaattaaattaattaaaatgggcctaggtgtaggaaatttggatgtggactaaagctctcttttgtgtggttgggataagaggatgggtgtccattttgataatcactacatttctcaactactgtcctatgtcctttaatctccacaacttcatgaggtgggtgctattatcccattttacagatgaagcaatgggggctctgagggcttgaaaaacattcctaagatcaggcagctagtgagtggcagatttgactaattccagagctcactctgttacctcatgtctggacaacttatgggagtgactgcacacagtccagttcactgmagcatccccgtggctcttggggacctgcactacctccctcacctcccacctcagaactacctggttaccacgtgaacctgagggccctacctattccacttcaaaaagttagcataacctctgtaggcctgtttcattttaagtgggtggaattgtgtctcccct

SEQ ID NO: 125027 - DNA, 543 bp, Homo sapiens
ccaagtgtgaacagtcttttccttgggggtgtttgttgaaaagaatcacaggcaattagtcaatactgcagccgcctaagkcagtggattagagttaggggcaaacaataggcttaccaaaaagcttaaaagaaaaagcttgggaatgagatgcccataggagactttgaaaagctcccacatattcctgggaatctagaaggtgaagcctatatagggctatgtgcatgcccacagctgtgtatatgctcagaaaatacttgagaaggccctaaggtctgaccactggctaaccttaaggctctgcagaagcagaaagtaaaggctaaggcagagttgtaaagtgcttaactgagcattgaaagtgtgtcctagtgtgcatatagaaccccttggcaaagactgcaagatttattggtcccaggcatctaaagaaatttctgttcagtcattagtgtaccactaagctaatcaagcagagatttcagtggccacacatgacaaacaatatagactttacagaactatctcagaaaagtcact

SEQ ID NO: 125028 - DNA, 543 bp, Homo sapiens
ccaagtgtgaacagtcttttccttgggggtgtttgttgaaaagaatcacaggcaattagtcaatactgcagccgcctaaggcagtggattagagttaggggcaaacaataggcttaccaaaaagcttaaaagaaaaagcttgggaatgagatgcccataggagactttgaaaagctcccacatattcctgggaatctagaaggtgaagcctatatagggctaygtgcatgcccacagctgtgtatatgctcagaaaatacttgagaaggccctaaggtctgaccactggctaaccttaaggctctgcagaagcagaaagtaaaggctaaggcagagttgtaaagtgcttaactgagcattgaaagtgtgtcctagtgtgcatatagaaccccttggcaaagactgcaagatttattggtcccaggcatctaaagaaatttctgttcagtcattagtgtaccactaagctaatcaagcagagatttcagtggccacacatgacaaacaatatagactttacagaactatctcagaaaagtcact

SEQ ID NO: 125029 - DNA, 543 bp, Homo sapiens
ccaagtgtgaacagtcttttccttgggggtgtttgttgaaaagaatcacaggcaattagtcaatactgcagccgcctaaggcagtggattagagttaggggcaaacaataggcttaccaaaaagcttaaaagaaaaagcttgggaatgagatgcccataggagactttgaaaagctcccacatattcctgggaatctagaaggtgaagcctatatagggctatgtgcatgcccacagctgtgtatatgctcagaaaatacttgagaaggccctaaggtctgaccactggctaaccttaaggctctscagaagcagaaagtaaaggctaaggcagagttgtaaagtgcttaactgagcattgaaagtgtgtcctagtgtgcatatagaaccccttggcaaagactgcaagatttattggtcccaggcatctaaagaaatttctgttcagtcattagtgtaccactaagctaatcaagcagagatttcagtggccacacatgacaaacaatatagactttacagaactatctcagaaaagtcact

SEQ ID NO: 125030 - DNA, 574 bp, Homo sapiens
gagagtgaatttgcttgaggtctccacttgggattcagtgattggaagtggaaaaatgaatgactcaaggtatctttgttgatggaggccaggctagggagaatcaaaactgcaaatcccaccagagcagggttctctagttctcctgtgtctatccctttctttgattggctacgcaaaccacagcagagaatacatgtgtttttttgtttttgtttttttgagacagagtttcgctattgtctcccaggctggaatacaatggcgcaatcttggctcactgcaacctccatctcctgggttcaagcgattctccarcctctggagtagctggggtttcaggtgcccaccaccacacccagctaattttttgtaattttagcagagacggggtttcaccatgttggccaggctggtttcaaactcctgaccttcagtgatccaccagcctcggcctcccaaagtgctgggattacaggcatgagtcaccatgcctggtcgcatgtgtttaccccactttttgaacccctacaaagaggtttgcatttggcaaataatccacacctagcagagg

SEQ ID NO: 125031 - DNA, 575 bp, Homo sapiens
ttacttaagaccctagaaacacacataagatccaaggaagaactaagaacaccatttttcatcttttycctaacaagattatggaagacaggatgattctaaagatgctgtgctaaaataatatgacaaatttttttcagtttgtggatgtctgtacaaagcataaataaagtaatatatttcatagtattattactaggcaacatgtgttttagcatttttattgtaaaagtaatatatgttcgtgattttttaaaaggcaaaagtgtttacggtaaacagcaaaatccccttccctgacccacctctgaatgtatactaaagtttttctctaaaacgaactactataaaagcatgtatccacatataaacacatatatatcctggattttggtacacaaatagggttttatttacattctcttgtttaaatgttgtctacttcacatatctcttggatatatttcttgctaaaatatacatccataacattattcataatggatataggtatcatggatataaagcatatggcccagctaataaatcttaaacatacatattatacctgactc

SEQ ID NO: 125032 - DNA, 639 bp, Homo sapiens
attattctgcctgtctacacccatatcccatctgtaggaagaaagtactggaatggattgcctggatttgatttctgtggctggaatatyacatattgtaatatgcgcataaaaatatgtgacaacaaaggcaataaaaattccatcaattatgaaataaccttgaacttcctttttctaatcacaaatgtacattactgtaggttgatcctaggtacaaataaagaatgtgatgttataggtactttcccaggttatagcctgaaagaggttttaccattaggatgggtgaaaagttgcatggcttaaacaagaaaattcctgaggattagttcgttgtttctttccttccttcttctttgctcctgtgttgtttttccccccatacatctggatatccaaattacttctattatgctaaccacttttaatctgaatactctcttttggatttttttcaattctctgattaatttaaggagtgtcagtattgatggttttcaattagaggggtttcctaggctttagctttagctaccagctggtggtagctgttatttaatactgaaataaagaatccaaaaaattttctaaaatttagcattaacacaattactcctatgttcatttgaaaaattg

SEQ ID NO: 125033 - DNA, 581 bp, Homo sapiens
agagttttaaatgtctttgaattaaacaaaaaaattagagtaattatatatttaccttaaaattataaaatgtgtatataactcttaacaaaacagaataaagaattaataaaattacaaaccaaaattaatgacaacagaatattggtagaattaatgaacwcatccaagacatttctctgaaaaggccagtaagataaatctttggcaaagcaactaaaataacttaaaaaatagaaaaagtggtattacatatttctcattatgaatgaaacctgagaatgtatatcaatgtagaccaaaaatgttgaatatttcacaaaatgtttcacaatattattcacaacattatgttgcatataatacatataacattttaaaatattatatatgactctgagataggaaatataaaaatatttgtcaataagcatcattgaatatacagcattcttaagggatactcttttttaaacccaaaaaagtgctaagggttttttcccctattttttcttactgttttatatctactattataaattgctccatgaatatcaaatctctaaatcaaataggatctg

SEQ ID NO: 125034 - DNA, 628 bp, Homo sapiens
taatgataaagggctcaattcagcaagaggatacaacaataataaatatctctgcactcaactccagagctctcaaatatgtaaggcaaatattaacatatctaaagggagtgatagactgaaatacaatagttagggacttcaaaaccctactctcactgatggacagataatccagacagaaatctgtaagaaacgtcagggttaaactacatgctagacaacattaggcctgacatttacagagcattttatccaactgtggcagaatacacatttttcttatcatcacatgaacrttctttaaaataaaattatttaaagccacaaaacaaatcttgacacttgtttcacacttcaagccttgattactacttttcagaaaagtaaaacttacatcaaatatcttttctgggcacaatgaaatgaaactagaaatcaataacaagaggaaccttagaaactacacaaacacatagaaattaacatgctcctgaacaatcaatggatcaatgaagatattaagaaggaaatttaaactttgttgaaacaaatgaaagtagaaataaaacataccaaaatctatagggtacagcaaaagtggtactaagagtgaagtttatagcaa

SEQ ID NO: 125035 - DNA, 660 bp, Homo sapiens
aggaaacataaatgcatattgctaagtaataagccaatcagaaaaggctacttactgtatgattccaactatatgacattctggaaatggcaaaactgtggcaactgtaaaaagatcagttgttgcctggacttaaggggagggaagtatgcatatgcagagcatagaggatttttgaagcagtgaaaatactctgcataattctatagtggtgratatatgtcattgtgcatttgtccacatccacagaatgttcaacaccaagagtgaattgaggctgggtgcagtggctcacgcctgtaatcccagcactttgggaggccaaggcaggtggatcacctgaggtcaggagtttgacaccagcctgaccagtatggtgaaaccccatctctactaaaagtacaaaaattagctgggcttggtggcatgagtctgtaatcccagctactcggtaagctgaaggcaggataattgcttgaacccaggaggcgaaggttgcagtgagccgagatcgcaccactgtactccagcctgggcaacagagtgagacttcgtctcaaaaacaaaacaaaacaaaacaaaacaaaacaaaagagtgaataaactatggactttgggtgatgatgagatgtcagtgtagatccatcaactgcaacaaat

SEQ ID NO: 125036 - DNA, 562 bp, Homo sapiens
gctacatttttcaaatgttgctttaaaaaattttgtattggctgggcggggtggctcacacctgttatcccakcactttgggaggccgaggcaggcagatcacatgaggtcaggggttcgagaccagcctggccaacatgataaaaccctgtctctactaaaaatacaaaaattagctagatgtggtggtgcacgcctgtaatcccagctacttgggaggctgaggcaggagatcacttgaatccaggaggcagaagttgcagtgagccgagatcacaccactgcgctacatgccactgcactacagcctcggcaacaaagtgagagtctatctaaaggaaaaaacaaaaaacaaaaacaaaaaaaacctttgtattgaaatacaacatgtatacagaaaagtgcagaaatcaaaagtgtatagctcagtggctttcacaaagtgaacacacccatgtaaccaatgcacagacaagaaacagaacatgaccagtgcgccaaaagtcccctcacccccatctagtcaccatctcactttcaagggttgctactgtcagaggtg

SEQ ID NO: 125037 - DNA, 562 bp, Homo sapiens
gctacatttttcaaatgttgctttaaaaaattttgtattggctgggcggggtggctcacacctgttatcccagcactttgggaggccgaggcaggcagatcacatgaggtcaggggttcgagaccagcctggccaacatgataaaaccctgtctctactaaaaatacaaaaattagctagatgtggtggtgcacgcctgtaatcccagctacttgggaggctgaggcaggagatcacttgaatccaggaggcagaagttgcagtgagccgagatcacaccactgygctacatgccactgcactacagcctcggcaacaaagtgagagtctatctaaaggaaaaaacaaaaaacaaaaacaaaaaaaacctttgtattgaaatacaacatgtatacagaaaagtgcagaaatcaaaagtgtatagctcagtggctttcacaaagtgaacacacccatgtaaccaatgcacagacaagaaacagaacatgaccagtgcgccaaaagtcccctcacccccatctagtcaccatctcactttcaagggttgctactgtcagaggtg

SEQ ID NO: 125038 - DNA, 582 bp, Homo sapiens
ataaaaaaattcaacaaaattgccaggtgtggtgactcacgcttgtaatcccagcactttgggaggtcaaggcgggtggattacttgaggccaggagttcaccaatgtggtgaaagactgtctttactaaaaaaaattaaaaataaattcaacaaagctcactgactcgttgagacgactctggccrtgttgactgctgacgctgtgctccagccttctcagttagggggcctaagatctctttggtacctgggttgtctggtaagagccagacttggcagcaatcctctttctaggctgaaccttgagtcccattgctttttgatagatctaatggattactgctctgcagccagttcttcatgtgttacccgttaggccagttctgggggaggcatcctcgtctttctttgccatagaacaaacactagtcagtcttgcaaagcctttctttcactttcaagtgagattaagttaattccgatttggttaaaaacttcctaaaggagataatttagtctactggtttgatacaggtaaatggactttaaactttctttaaagtaaagaagttggtaggta

SEQ ID NO: 125039 - DNA, 582 bp, Homo sapiens
ataaaaaaattcaacaaaattgccaggtgtggtgactcacgcttgtaatcccagcactttgggaggtcaaggcgggtggattacttgaggccaggagttcaccaatgtggtgaaagactgtctttactaaaaaaaattaaaaataaattcaacaaagctcactgactcgttgagacgactctggccgtgttgactgctgacgctgtgctccagccttctcagttagggggcctaagatctctttggtacctgggttgtctggtaagagccagacttggcagcaatcctctttctaggctgaaccttgagtcccattgctttttgrtagatctaatggattactgctctgcagccagttcttcatgtgttacccgttaggccagttctgggggaggcatcctcgtctttctttgccatagaacaaacactagtcagtcttgcaaagcctttctttcactttcaagtgagattaagttaattccgatttggttaaaaacttcctaaaggagataatttagtctactggtttgatacaggtaaatggactttaaactttctttaaagtaaagaagttggtaggta

SEQ ID NO: 125040 - DNA, 582 bp, Homo sapiens
agcagaaaccaggacagaagccaagagatcaatcaagaggatgtggctatgatccagatgacatatgtcatgcatgagggtgaagaaagcaaaggcaggaaaatctgatccaatttgacaaatrtttgaggtcattcaagagacttgccaatgaattgtataagggggagatgagagaaagaagagttcaaagtttccaaagtcttctgccaaaacacttctcaggggtggtggtgaatccagtgaaggctttccagatggtttgggatgggttaacttggaagccctaatcatttatctgagctgagaagttgaggatacagttacatgcatgaatctgaagtagagaaaagatgtcaaagccagagatgggaatttaggattttgagtggatgtgtcaagtcctggggctgagtgagatcccctggagagagaaggaagcttatgtttgagccctagttcagcccaacatttagaagaacccctttgggaagaggagaagaacgagcaaaggctaaatgtgactccctgttttagaagaacctccttcagaagaagaatcaataaagcaaaggctgaact

SEQ ID NO: 125041 - DNA, 582 bp, Homo sapiens
agcagaaaccaggacagaagccaagagatcaatcaagaggatgtggctatgatccagatgacatatgtcatgcatgagggtgaagaaagcaaaggcaggaaaatctgatccaatttgacaaatatttgaggtcattcaagagacttgccaatgaattgtataagggggagatgagagaaagaagagttcaaagtttccaaagtcttctgccaaaacacttctcaggggtggtggtgaatccagtgaaggctttccagatggtttgggatgggttaacttggaagccctaatcatttatctgagctgrgaagttgaggatacagttacatgcatgaatctgaagtagagaaaagatgtcaaagccagagatgggaatttaggattttgagtggatgtgtcaagtcctggggctgagtgagatcccctggagagagaaggaagcttatgtttgagccctagttcagcccaacatttagaagaacccctttgggaagaggagaagaacgagcaaaggctaaatgtgactccctgttttagaagaacctccttcagaagaagaatcaataaagcaaaggctgaact

SEQ ID NO: 125042 - DNA, 617 bp, Homo sapiens
tgtccctctgtttctgtgtctccctttctatcactgtctctctgtgtttctgtctcttcatctmtgtctcgctctctctgtgtatctgtctctgtttctgcttctctgtctctgtctctctgtctccatctctttctctctctgtgtctctcttagtgtctctctatctgtctctgtctttctctccatctctgtatctgtccctctatttctgtgcctccctttttctatcactgtctgtctgtgtgtttctgtctcttcatctctgtttccctctctctctgtgggtctgtctgtttctgcctctctgtctctgtctctctgtctccatgtctttctctccacctccctgtgaggtgggagcctcacccttagcccactggctaccaccctggtccacatctttccccctaacaccgacagacgtaaaaaccacagctcctcccaggacactgcctcaatgtggccccatttctcttcatcagatctctcccttcaatgctaataagtctgtctccaactccgtgtttcttttggggaaaaaaaaaaaaggagaggaaggctgggcacagttgctcacacctgtcatcgcagaactttgggaggccgaggcgggt

SEQ ID NO: 125043 - DNA, 617 bp, Homo sapiens
tgtccctctgtttctgtgtctccctttctatcactgtctctctgtgtttctgtctcttcatctatgtctcgctctctctgtgtatctgtctctgtttctgcttctctgtctctgtctctctgtctccatctctttctctctctgtgtctctcttagtgtctctctatctgtctctgtctttctctccatctctgtatctgtccctctatttctgtgcctccctttttctatcactgtctgtctgtgtgtttctgtctcttcatctctgtttccctctctctctgtgggtctgtctgtttctgcctctctgtctctgtctctctgtctccatgtctttctctccacctccctgtgaggtgggagcctcacccttagcccactggctaccaccctggtccacatctttccccctaacascgacagacgtaaaaaccacagctcctcccaggacactgcctcaatgtggccccatttctcttcatcagatctctcccttcaatgctaataagtctgtctccaactccgtgtttcttttggggaaaaaaaaaaaaggagaggaaggctgggcacagttgctcacacctgtcatcgcagaactttgggaggccgaggcgggt

SEQ ID NO: 125044 - DNA, 526 bp, Homo sapiens
ctaataagtctgtctccaactccgygtttcttttggggaaaaaaaaaaaaggagaggaaggctgggcacagttgctcacacctgtcatcgcagaactttgggaggccgaggcgggtggatcacaaggtcaggagattgagaccagcctggccagcagggtgaaattccgcctctactaaaaacccaaaaaattagccggccatggtggcagacacctatgatcccagctacttgggaggctgaggcaggagaatcgcttgaaaccaggcggcagaggttgcagtgagtcaagatcacgccactgcaattcagcctgggtgacagagcaaaactctgtctcaaaaataaaagggggaaatattcgattaataaacaacagcctcacatgtgctcaccactgggttgaagcaaagccttcttccaaaagcaaaaattggaaaaatatgctaccgacagactgcccctaaaggtaatattaaacagggactccaaaggcagaagagaagctgacccaatgcgacatgaa

SEQ ID NO: 125045 - DNA, 378 bp, Homo sapiens
tcgtcagggccagtctctgtggcccagagcaggccgatagagagatcggggagagctgtcctcaccacctggaagtgagtcccacccagaccttatcaaaactactcactccacctgggccgctgctgaagccctattttgaaatttcccttttccagagcttttttcctgtcctaagccccataaataaatgaaggcacttctttggaaggttatggagtctgtttgactagtgctaaaggaaacaattcacgcagatgtataaaacttgcttttttwaaaaaaaaaataacctaagcagaattttcatattaaaaactcactttttttgacagaaagtaacagcttcagcatataatttgatgtttcacaaggttt

SEQ ID NO: 125046 - DNA, 481 bp, Homo sapiens
gtgggcaccacacatattgccctggcatcttatttatttctctcattaccagtgcatacytacctatcatgttaaaacaagaaaaggagaaaagtggactttatatgtaacactttagaggcatagtggaatgtatattattattaacaaattagatagcaaagcattatatttgttatgctagaagactatggctgtgctaaaagaatataatatatgtcaacattgccagactgggcacttctcacaatattcccaaccaacaggaataaaactaaaggtcagaaaaaaaaaatagtaaattaaaacaaaattttatcacagcagaatttcttctcaaaaacaaaaaatggaaattaggctataattaaagtaagtttttcaatggcttgttagccaagcaaggaaaaccattaccaacagtagttaattaaattatgttttattatggtaaccaaagatgtgtccatagaaaataaac

SEQ ID NO: 125047 - DNA, 590 bp, Homo sapiens
gaggaaagcacacagttcttggcaccaaaaaattaaaagatattgagatattataaaagtacaattcacatgttttatttaaatcagaaagaaaattatgtgctttttgtataatttaattgattacaaagaaataatttttagaaaattttatcaccaacttgttaaaaatagatggcacttccattgaaacttttgcagaatattgatgattcttttatcagatctgattagcaccagaggactgacagtggcataggcattgaccacaaacttgtggacaccataggtgacagggccaattacccataacagcattgtggatgatgagaggatgaagtccactgagtacatcagcacaaaggaattcaccagcatcaggatggtcttggtggccattttcactagagaagtccttaatataaggctgctgctgtgaaagtgctgggagtgcctctgatgcctggacaaaagaatgaccatgtatacacttgagagcagcgtgattcctatgaagaaggcatctctggataatgayagcataagaaatagcgtcctgatgaggacattcattgggaaaaatgtgcaat

SEQ ID NO: 125048 - DNA, 525 bp, Homo sapiens
tttgtgtgctgcacccagtaactcgcccccactattattgtgtggctgtctaagtctttttgcaggtttagaagtatttgttttatgaatcagagtgccctaatgttggatgcctatattttcaggatttttatgtcttcttgttgaactaaatscttcatcattatgtaatgccctttattttttttttactgttcttggtttaaagtctgttttatatgacatagcaatagcaacctctggtctttttgtttttcatttgtatgagagatctttctccaaccttttcctttcatcccatggatggcattacatattagataggtctcttgaagacagtatatggttgagtcttccaacttaccacctgtccctcttaagtggggtgtttggaccatttacattcaaggttaatatcgatatgtgagatttgtatcttgtcattgttttgttagctggttgttttgtagattcaactgtgtagttgctttacatggtctttgggctatgtatttaagtgtgttt

SEQ ID NO: 125049 - DNA, 452 bp, Homo sapiens
tcccttcttcacctagccaactcctattcacacttcagaactcagctcaggtcagatgaggtggttcatgcctgcaattccagcactctgagaggccaagacaggaggattrcttgaacccaggagtttgagaccagcctgaacaacctgatgtaaccccatctctacaaaaaatacaaaaattagctgtgtgtggtggcatgtgcctgtagtcccaccctgaagtaggaggatcaattgagcatggaaggtcaaggctgcagtgagcagtgattgtgccactgcatttcagactgagctacagagaaaaaaaaactcagctcaagaaaaagcattcctccaagaagccctccctgttgttcctctggaatcccacagtccccatccttcccctgtagttctgaccccatggggctggcagtagatacatccaactttgtctcccctagact

SEQ ID NO: 125050 - DNA, 452 bp, Homo sapiens
tcccttcttcacctagccaactcctattcacacttcagaactcagctcaggtcagatgaggtggttcatgcctgcaattccagcactctgagaggccaagacaggaggattgcttgaacccaggagtttgagaccagcctgaacaacctgatgtaaccccatctctacaaaaaatacaaaaattagctgtgtgtggtggcatgtgcctgtagtcccaccctgaagtaggaggatcaattgagcatggaaggtcaaggctgcagtgagcagtgattgtgccactgcatttcagactgarctacagagaaaaaaaaactcagctcaagaaaaagcattcctccaagaagccctccctgttgttcctctggaatcccacagtccccatccttcccctgtagttctgaccccatggggctggcagtagatacatccaactttgtctcccctagact

SEQ ID NO: 125051 - DNA, 629 bp, Homo sapiens
gtgctttgagtttggattctccagtaggcctctgctgtcatatctctgtagagggagggatagggatatgtccttatcattgggtgggtgttgaactcaggctccccactttttttccacccacactctagagggaggaagccacgttactgctcagtgggtatgagtgtcctgtgtccccacttggcctgctgtggtatcatgttgtctgtgggtaggagtggggaatggctgactatgtcctccttttaagtcttkgcaaaaggtatatggcttggggttttatttgtaccctttggcttaaactggttggttgttgtctgtgagtttttttttcttggtagcctgccgcttccctgcttttttgacaagagacagcagaattttcttggagttttatgtatgtgtgtgcctgttggtgtttctgagttgtctgcttctctagcaacttttcttgtatatatgagtcagaaaggaaacctagggaattcatcctcttgtgtttcttggcacctgaagccctaattggtctgccctctctctacattttgttgtcttcctttgtttgtcttatgtatcacggccaagggtttttaaagctgtatttagtggaaagaacagggaaaagt

SEQ ID NO: 125052 - DNA, 449 bp, Homo sapiens
tacacataaaacattgaaaacaattataattttaactrctgtagtccctggttaattagcagaatataaagtcagtgtagtaacatgtgaagatatccacagtaatgttagcagggtccaactgtctctgctacgtgaggctccagttatctcagctaagctgtttatgagccacactcacaaacaagatcaccaaaagttaagactttttggtatatgtataggaacacttatctattagggcctgtttgaagcagcatttttggtgctttggatacaaagatagtatggtgcctcaactgaaggatcttggattaggatgagaaaaagataaactgatcatgtaatggcataagcaagtaggtactatgtaacggtgtaaacaaaaatttatgttagatagtcatttcccacagagagatttcatactgtacagtacagggcccatc

SEQ ID NO: 125053 - DNA, 449 bp, Homo sapiens
tacacataaaacattgaaaacaattataattttaactgctgtagtccctggttaattagcagaatataaagtcagtgtagtaacatgtgaagatatccacagtaatgttagcagggtccaactgtctctgctacgtgaggctccagttatctcagctaagctgtttatgagccacactcacaaacaagatcaccaaaagttaagactttttggtatatgtataggaacacytatctattagggcctgtttgaagcagcatttttggtgctttggatacaaagatagtatggtgcctcaactgaaggatcttggattaggatgagaaaaagataaactgatcatgtaatggcataagcaagtaggtactatgtaacggtgtaaacaaaaatttatgttagatagtcatttcccacagagagatttcatactgtacagtacagggcccatc

SEQ ID NO: 125054 - DNA, 449 bp, Homo sapiens
tacacataaaacattgaaaacaattataattttaactgctgtagtccctggttaattagcagaatataaagtcagtgtagtaacatgtgaagatatccacagtaatgttagcagggtccaactgtctctgctacgtgaggctccagttatctcagctaagctgtttatgagccacactcacaaacaagatcaccaaaagttaagactttttggtatatgtataggaacacttatctattagggcctgtttgaagcagcatttttggtgctttggatacaaagatagtatggtgcctcaaytgaaggatcttggattaggatgagaaaaagataaactgatcatgtaatggcataagcaagtaggtactatgtaacggtgtaaacaaaaatttatgttagatagtcatttcccacagagagatttcatactgtacagtacagggcccatc

SEQ ID NO: 125055 - DNA, 587 bp, Homo sapiens
ttgattgctacattgaagtatgtagttttttttttgtgagtctaactatttatgtccctgttaacttataattgatgagtttattttgtatttatttttaggcagggtaaaaaatagtaatatgtctcataaataatatatgttcctattactagttttggtgggatttaaaaactttataataatcctcaatatagaaacctgcccctttaaccatattactatttgctttaaamaaaaatctttaggttttgtttcaaaaatgcttcacaatttatttttgaaaatataaggaatgaaattctaactttctaatttgaatggaaggatgagttggtagcacacgaagcactaaattgagtaatgtagattttattatttctaacgaatcctttgtttaatattttgcaggttccatttgtttacttgtgatgtacagagttttttataccttcccagcttatatttgaatattccttttcaaggttttataaagcgatttctctcctttacccctttcagcgatgtgcattttgtaagcactttggagccactatcaaatgctgtgaagagaaatgtacccagat

SEQ ID NO: 125056 - DNA, 587 bp, Homo sapiens
ttgattgctacattgaagtatgtagttttttttttgtgagtctaactatttatgtccctgttaacttataattgatgagtttattttgtatttatttttaggcagggtaaaaaatagtaatatgtctcataaataatatatgttcctattactagttttggtgggatttaaaaactttataataatcctcaatatagaaacctgcccctttaaccatattactatttgctttaaaaaaaaatctttaggttttgtttcaaaaatgcttcacaatttatttttgaaaatataaggaatgaaattctaactttctaatttgaatggaaggatgagttggtagcacacgaagcactaaattgagtaatgtagattttattatttctaacgaatcctttgtttaatattttgcaggttccatttgtttacttgtgatgtacagagttttttataccttcccagcttatatttgaatattccttttcaaggttttataaagmgatttctctcctttacccctttcagcgatgtgcattttgtaagcactttggagccactatcaaatgctgtgaagagaaatgtacccagat

SEQ ID NO: 125057 - DNA, 553 bp, Homo sapiens
ttatttcctcagaaaaatcaaataaagtttgcatgttttttattcttaaaacattttaaaaaccactgtagaawgatgtaaatagggactgtgcagtatttctgacttatactataaaattattaaaaagtcaatcagtattcaacatcttttacactaaaaagccatccagttgaagaattagaagacagttcactcaggtgttatttcaggatttacgttaataggaacaccaaacacttctgaaattcttggaaattgtgtatccctgataggtgtgatagaaatctctgctagcaccttttcatgattcatctatcttagtcatctgtaatctgcagttgtgctgtttttctttcttttccaaatagtattttataattcaatgaaaatgtttaaatgcttgaaatttacattatacaggaaattataactctactgttgtatcattaaatagagatctctcctttttcttactatgtgttttcccaatgagcatgtatattttgggatattttttctcctagtctattgaatttccaatcttattatg

SEQ ID NO: 125058 - DNA, 553 bp, Homo sapiens
ttatttcctcagaaaaatcaaataaagtttgcatgttttttattcttaaaacattttaaaaaccactgtagaaagatgtaaatagggactgtgcagtatttctgacwtatactataaaattattaaaaagtcaatcagtattcaacatcttttacactaaaaagccatccagttgaagaattagaagacagttcactcaggtgttatttcaggatttacgttaataggaacaccaaacacttctgaaattcttggaaattgtgtatccctgataggtgtgatagaaatctctgctagcaccttttcatgattcatctatcttagtcatctgtaatctgcagttgtgctgtttttctttcttttccaaatagtattttataattcaatgaaaatgtttaaatgcttgaaatttacattatacaggaaattataactctactgttgtatcattaaatagagatctctcctttttcttactatgtgttttcccaatgagcatgtatattttgggatattttttctcctagtctattgaatttccaatcttattatg

SEQ ID NO: 125059 - DNA, 553 bp, Homo sapiens
ttatttcctcagaaaaatcaaataaagtttgcatgttttttattcttaaaacattttaaaaaccactgtagaaagatgtaaatagggactgtgcagtatttctgacttatactataaaattattaaaaagtcaatcagtattcaacatcttttacactaaaaagccatccagttgaagaattagaagacagttcactcaggtgttatttcaggatttacgttaataggaacaccaaacacttctgaaattcttggaaattgtgtatccctgataggtgtgatagaaatctctgctagcaccttttcatgattcatctatcttagtcatctgtaatctgcagttgtgctgtttttctttcttttccaaatagtattttataattcaatgaaaatgtttaaatgcttgaaatttacattatacaggaaattataactctactrttgtatcattaaatagagatctctcctttttcttactatgtgttttcccaatgagcatgtatattttgggatattttttctcctagtctattgaatttccaatcttattatg

SEQ ID NO: 125060 - DNA, 270 bp, Homo sapiens
tgagttaggagtaaggttgacatctttttataaaagttgagaaatttaacaaaatcatgcatctcattataaagaaatccgctaaagagagtatctgtgaagaaggccaagattttcatcaggaaacacttttagggtgctctgtcataggtaaatggctggtcattgttgcaacattgttttcatgatgatacaaggatacrttaaccttgtctggaaattttacactaaaaatccatctaggagatacaaccagatatacttcctgaa

SEQ ID NO: 125061 - DNA, 635 bp, Homo sapiens
tgactgagttaggagtaaggttgacatctttttataaaagttgagaaatttaacaaaatcatgcatctcattataaagaaatccgctaaagagagtatctgtgaagaaggccaagattttcatcaggaaacacttttagggtgctctgtcataggtaaatggctggtcattgttgcaacattgttttcatgatgatacaaggatacgttaaccttgtctggaaattttacactaaaaatccatctaggagatacaaccagatatacttcctgaataggaaaactgaatggtaagaagccaatcatgcaagataagaggaaagaacattccagggagagggaacagaccactacacagaccttgaggagtggacttggcatgattcatgaacagacagcatrtcattttacttggagcatagtagcctactaggtgggggtagtagagacatcatcaaggtgaacaaaggctagatcatgtaggcttctaagcaagggaaggagtttgggttctgttcggtctgcaatgagaagtttttgcaaggtttaaacatggaaatgctacacatcttaattcaccccctgttcctcaatgtatttactcatcatttagctttaattccttttacttcactt

SEQ ID NO: 125062 - DNA, 635 bp, Homo sapiens
tgactgagttaggagtaaggttgacatctttttataaaagttgagaaatttaacaaaatcatgcatctcattataaagaaatccgctaaagagagtatctgtgaagaaggccaagattttcatcaggaaacacttttagggtgctctgtcataggtaaatggctggtcattgttgcaacattgttttcatgatgatacaaggatacgttaaccttgtctggaaattttacactaaaaatccatctaggagatacaaccagatatacttcctgaataggaaaactgaatggtaagaagccaatcatgcaagataagaggaaagaacattccagggagagggaacagaccactacacagaccttgaggagtggacttggcatgattcatgaacagacagcatgtcattttacttggagcatagtagcctactaggtgggggtagtagagacatcatcaaggtgaacaaaggctagatcatgtaggcttstaagcaagggaaggagtttgggttctgttcggtctgcaatgagaagtttttgcaaggtttaaacatggaaatgctacacatcttaattcaccccctgttcctcaatgtatttactcatcatttagctttaattccttttacttcactt

SEQ ID NO: 125063 - DNA, 610 bp, Homo sapiens
ttccagtaatcaaaaaaaagcccttatgtgatttgaatagtctgtttatgcttaagaagcatcttagtctaattgataaaaacgtttccttaattttgtctcttgtctgattttgtaatttcaaaatatatttagcattcaaagaaaatgtttatgttacactgcaaagctttcttagttggtattttccttgtttggttctttgcagtgagcatatattgagcattaattaggtatccagcattatcattggcattaggaatagaaaattaaagaagacctgcttatggtcttaagtagatatagccacaaataattgcaaaactatacgattaaatttaatgtggttacatttagattaaataccctacagtgtttttattgatacctctttctgattagatgacaattcaatgtgaataacttcaaatgtctgaaaggttcatgatgcaaatcctttcaaatgattttactgtgtagtcagaaaaaatttaaattcttatacaacaatttcattgttttactgttaattatagcgaaggaagatgcaaactgtgcagtgtgcracagcccgggagacctcttagatcagttcttttgtactacttgt

SEQ ID NO: 125064 - DNA, 721 bp, Homo sapiens
tttccacccagtagcacatagcagttayagcgccttcctctcaaaaattatattttaaaagtaaagatcagaggctattcatcttgccttaacccttcctcctttgcaggaatcctaaaatggctagagcaagttaaccataggtgagcattgagtaaagacaccatttaggagggaatccttatggtagggttacctctgttactatctgcagagacaaaacagatactgaggtatttatgaactgtgcggttcccaggactgatgattttcatgattacttatgttgcaaaacataagtttaaagataagccatcattaatgctatcttactttttagacaatcgggagaagatagcaagatgctagtgtgtgatacgtgtgacaaagggtatcatactttttgtcttcaacgaattatgaaatctgtaccaaccaacggctggaaatgcaaagtaagttgtttacttttttaaatcctctgtatgttttatatggagaacagacaaatcggatatctattcaaatctatacattaccatcagctttttaaaaacagctttattgacatataactgacatacagtaaactgtacactcttcaagataatgaacatagtcatcaccgtcaaagtttcctggtgcctcttggcttgctttgtggctgttcaaacccaaaccctctgtcttcctagtctgctttttcactatagattagtat

SEQ ID NO: 125065 - DNA, 721 bp, Homo sapiens
tttccacccagtagcacatagcagttatagcgccttcctctcaaaaattatattttaaaagtaaagatcagaggctattcatcttgccttaacccttcctcctttgcaggaatcctaaaatggctagagcaagttaaccataggtgagcattgagtaaagacaccatttaggaggkaatccttatggtagggttacctctgttactatctgcagagacaaaacagatactgaggtatttatgaactgtgcggttcccaggactgatgattttcatgattacttatgttgcaaaacataagtttaaagataagccatcattaatgctatcttactttttagacaatcgggagaagatagcaagatgctagtgtgtgatacgtgtgacaaagggtatcatactttttgtcttcaacgaattatgaaatctgtaccaaccaacggctggaaatgcaaagtaagttgtttacttttttaaatcctctgtatgttttatatggagaacagacaaatcggatatctattcaaatctatacattaccatcagctttttaaaaacagctttattgacatataactgacatacagtaaactgtacactcttcaagataatgaacatagtcatcaccgtcaaagtttcctggtgcctcttggcttgctttgtggctgttcaaacccaaaccctctgtcttcctagtctgctttttcactatagattagtat

SEQ ID NO: 125066 - DNA, 721 bp, Homo sapiens
tttccacccagtagcacatagcagttatagcgccttcctctcaaaaattatattttaaaagtaaagatcagaggctattcatcttgccttaacccttcctcctttgcaggaatcctaaaatggctagagcaagttaaccataggtgagcattgagtaaagacaccatttaggagggaatccttatggtagggttacctctgttactatctgcagagacaaaacagatactgaggtatttatgaactgtgcggttcccaggactgatgattttcatgattacttatgttgcaaaacataagtttaaagataagccatcattaatgctatcttactttttagacaatcgggagaagatagcaagatgctagtgtgtgatacgtgtgacaaagggtatcatactttttgtcttcaacgaattatgaaatctgtaccaaccaayggctggaaatgcaaagtaagttgtttacttttttaaatcctctgtatgttttatatggagaacagacaaatcggatatctattcaaatctatacattaccatcagctttttaaaaacagctttattgacatataactgacatacagtaaactgtacactcttcaagataatgaacatagtcatcaccgtcaaagtttcctggtgcctcttggcttgctttgtggctgttcaaacccaaaccctctgtcttcctagtctgctttttcactatagattagtat

SEQ ID NO: 125067 - DNA, 721 bp, Homo sapiens
tttccacccagtagcacatagcagttatagcgccttcctctcaaaaattatattttaaaagtaaagatcagaggctattcatcttgccttaacccttcctcctttgcaggaatcctaaaatggctagagcaagttaaccataggtgagcattgagtaaagacaccatttaggagggaatccttatggtagggttacctctgttactatctgcagagacaaaacagatactgaggtatttatgaactgtgcggttcccaggactgatgattttcatgattacttatgttgcaaaacataagtttaaagataagccatcattaatgctatcttactttttagacaatcgggagaagatagcaagatgctagtgtgtgatacgtgtgacaaagggtatcatactttttgtcttcaacgaattatgaaatctgtaccaaccaacggctggaaatgcaaagtaagttgtttacttttttaaatcctctgtatgttttatrtggagaacagacaaatcggatatctattcaaatctatacattaccatcagctttttaaaaacagctttattgacatataactgacatacagtaaactgtacactcttcaagataatgaacatagtcatcaccgtcaaagtttcctggtgcctcttggcttgctttgtggctgttcaaacccaaaccctctgtcttcctagtctgctttttcactatagattagtat

SEQ ID NO: 125068 - DNA, 579 bp, Homo sapiens
ttctactaggcatctgcctgagtggtgggggttgaggggaggggctttctctcctggggggaaaaagagctgctgggtaactgtgctcagctgtggctacctgggaagtgggacctgagggctgaaggattgtgatgaactctggcctgcttcctcaggtagttcagattccttctcttgctgaatgacatcattggaaaggaaaaactctgctrtttgactgatttgtatatttacactcttatcttcactcagttcctctacttgcctttttacttttaatatgaagttgaatttgtaattcattgtctttcctaaggaaaaaggacatttaagactataagtttaccttaggctatagctttgactgaagccaagtttattgtatttgtaactttatgtatgtatataccttagcgaataactttgttttttttaagttgtgctgaagtatgttaatttatgcttacatttcatttaatcagagaatttaactaaggtaggtttcttaaaataaatgttttgatacttgaagtattgactttttaaaggtgtagcatttgtgtttattaatttcat

SEQ ID NO: 125069 - DNA, 579 bp, Homo sapiens
ttctactaggcatctgcctgagtggtgggggttgaggggaggggctttctctcctggggggaaaaagagctgctgggtaactgtgctcagctgtggctacctgggaagtgggacctgagggctgaaggattgtgatgaactctggcctgcttcctcaggtagttcagattccttctcttgctgaatgacatcattggaaaggaaaaactctgctgtttgactgatttgtatatttacactcttatcttcactcagttcctctacttgcctttttacttttaataygaagttgaatttgtaattcattgtctttcctaaggaaaaaggacatttaagactataagtttaccttaggctatagctttgactgaagccaagtttattgtatttgtaactttatgtatgtatataccttagcgaataactttgttttttttaagttgtgctgaagtatgttaatttatgcttacatttcatttaatcagagaatttaactaaggtaggtttcttaaaataaatgttttgatacttgaagtattgactttttaaaggtgtagcatttgtgtttattaatttcat

SEQ ID NO: 125070 - DNA, 564 bp, Homo sapiens
ttgatacttgaagtattgactttttaaaggtgtagcatttgtgtttattaatttcatttagttagatgaagtccttttaccttattttttgacttgttgattcaacaagttacaattgaccactattaattgttcctatcaatttatcatatttttaaacaaataayttgtggctgttatttagcaagtaggtcaggccagtgttaatatattgtgttttttaccagtataaaattgttctttattctatgtaatgtgttttttgttgagggatcaggaagggcaggtattttgctttgcctgacactatggccacgtagggtgttagtttaacggttgaatggttatcttttcacatcttattttggattcttttgtgttataaaaatgtatcttttgaaaagcttaatagaggtaactggattgacggttgtaattgaaatgcttggctgttttgaggcaaaatttttctatttttctcttcttttacttcctgcaatgatttataattcagaatctcattttgtgaatgtaaatgattataaatattaaagatataaattt

SEQ ID NO: 125071 - DNA, 601 bp, Homo sapiens
catttagttagatgaagtccttttaccttattttttgacttgttgattcaacaagttacaattgaccactattaattgttcctatcaatttatcatatttttaaacaaataacttgtggctgttatttagcaagtaggtcaggccagtgttaatatattgtgttttttaccagtataaaattgttctttattctatgtaatgtgttttttgttgagggatcaggaagggcaggtattttgctttgcctgacactatggccacgtagggtgttagtttaacrgttgaatggttatcttttcacatcttattttggattcttttgtgttataaaaatgtatcttttgaaaagcttaatagaggtaactggattgacggttgtaattgaaatgcttggctgttttgaggcaaaatttttctatttttctcttcttttacttcctgcaatgatttataattcagaatctcattttgtgaatgtaaatgattataaatattaaagatataaattttctcccattccccactgaaaataaagtttttattccccttttctctgtttgattcgattaacctagattgtaaaccctgtcacaattttct

SEQ ID NO: 125072 - DNA, 533 bp, Homo sapiens
attaggtgaataataaaatgtcatgactccattttactgtagtatcttagcattaatatttggaattgttattctagaccttagcaaaaatatatgttttgattatgaattttctgaagctttccagttaagtgtaaaacaagtgaaaaatataacttcgtattttgtgtattttgctttttataggtgtctactgcagatatttcatcaaataaggatgatgaagaaaactctatgcacactacggttgtgttgttttctagcagtgacaarttcactttgaatcaggtttgaacttgacaatttactgtcttcctcattgaattcctccttgcacatttctgctttatctcatctacacagaagtgatccaatatttagctatagagctatattagttaagaaggtatttttaaagtaaaatttgtaggtttttagcttagtctccatttaaaatatgttctgttttcttaacttcaggatatgtgtgtagtttgtggcagttttggccaaggagcagaaggaggattact

SEQ ID NO: 125073 - DNA, 628 bp, Homo sapiens
tagaattctgcataatcaagtcttactaagacaggtttattatattttctcattacttattggtctataggaattctacctctaaagagagaattaggtgaataataaaatgtcatgactccattttactgtagtatcttagcattaatatttggaattgttattctagaccttagcaaaaatatatgttttgattatgaattttctgaagctttccagttaagtgtaaaacaagtgaaaaatataacttcgtattttgtgtattttgctttttataggtgtctactgcagatatttcatcaaataaggatgatgaagaaaactctatgcacactacggttgtgttgttttctagcagtgacaaattcactttgaatcaggtttgaacttgacaatttactgtcttcctcattgaattcctccttgcacatttctgctttatctcatmtacacagaagtgatccaatatttagctatagagctatattagttaagaaggtatttttaaagtaaaatttgtaggtttttagcttagtctccatttaaaatatgttctgttttcttaacttcaggatatgtgtgtagtttgtggcagttttggccaaggagcagaaggaggattacttgc

SEQ ID NO: 125074 - DNA, 566 bp, Homo sapiens
tgtacatttcataatttactcatgataaattttcaagttgaattcctaggccaaagggtatacagattttaaagactttcaatgttggcagatatcactgtaggataattataccaatttatactcttaacagtaatatatgagtgtatatatttacctattccttgccagttctggaaattgtgaatttaacagaatcttccaaaaagcattgaaaattggyctgggaatgtaaatatccttttcttccccattcagcttactaatgaatctatcataatctcagctgtctgaatctaaaagagaaccagtaaaattgagataacaagtttattgcaaaataaatgacctgaaagccacaggcattgggtggggtaggagaagggcaggtagtggtgactgaggtgactctgtgtttgggtttttgaaaagattgtagatttgaaggataatgagttcagagaagtagaaaggcaaataggggctgttataaataaggacagtggcatgagccaacggggttatctctcatatttaaagaacatggctagatctggtttccctat

SEQ ID NO: 125075 - DNA, 629 bp, Homo sapiens
attgaaaattggcctgggaatgtraatatccttttcttccccattcagcttactaatgaatctatcataatctcagctgtctgaatctaaaagagaaccagtaaaattgagataacaagtttattgcaaaataaatgacctgaaagccacaggcattgggtggggtaggagaagggcaggtagtggtgactgaggtgactctgtgtttgggtttttgaaaagattgtagatttgaaggataatgagttcagagaagtagaaaggcaaataggggctgttataaataaggacagtggcatgagccaacggggttatctctcatatttaaagaacatggctagatctggtttccctataagttgattccttactgttattctgagttgaatgcatatcttttgtctcagtgaagcctgaatggcttttgatgtctctgatctggaaaggttgtttgtgtatctcagaataagtcattttgctaaaaaaggctactcctgagggagaacagtggaaaaaagagttggaaaagtggattgtagctagttgaaaaaaggatttgaatgtcaagctttaggaattaggttcttatttggtatgttacaggcaaccatatggacttttgagcaggt

SEQ ID NO: 125076 - DNA, 629 bp, Homo sapiens
attgaaaattggcctgggaatgtaaatatccttttcttycccattcagcttactaatgaatctatcataatctcagctgtctgaatctaaaagagaaccagtaaaattgagataacaagtttattgcaaaataaatgacctgaaagccacaggcattgggtggggtaggagaagggcaggtagtggtgactgaggtgactctgtgtttgggtttttgaaaagattgtagatttgaaggataatgagttcagagaagtagaaaggcaaataggggctgttataaataaggacagtggcatgagccaacggggttatctctcatatttaaagaacatggctagatctggtttccctataagttgattccttactgttattctgagttgaatgcatatcttttgtctcagtgaagcctgaatggcttttgatgtctctgatctggaaaggttgtttgtgtatctcagaataagtcattttgctaaaaaaggctactcctgagggagaacagtggaaaaaagagttggaaaagtggattgtagctagttgaaaaaaggatttgaatgtcaagctttaggaattaggttcttatttggtatgttacaggcaaccatatggacttttgagcaggt

SEQ ID NO: 125077 - DNA, 566 bp, Homo sapiens
tgtacatttcataatttactcatgataaattttcaagttgaattcctaggccaaagggtatacagattttaaagactttcaatgttggcagatatcactgtaggataattataccaatttatactcttaacagtaatatatgagtgtatatatttacctattccttgccagttctggaaattgtgaatttaacagaatcttccaaaaagcattgaaaattggcctgggaatgtaaatatccttttcttccccattcagcttactaatgaatctatcataatctcagctgtctgaatctaaaagagaaccagtaaaattgagatarcaagtttattgcaaaataaatgacctgaaagccacaggcattgggtggggtaggagaagggcaggtagtggtgactgaggtgactctgtgtttgggtttttgaaaagattgtagatttgaaggataatgagttcagagaagtagaaaggcaaataggggctgttataaataaggacagtggcatgagccaacggggttatctctcatatttaaagaacatggctagatctggtttccctat

SEQ ID NO: 125078 - DNA, 415 bp, Homo sapiens
gcattttctacttcaagcctaaaatgtgcattttmaaataattactctcacatataattgtttttaaaacatgtaaattctaaacaaacttctgaaggtataattacacaaattcttagcaatcgcaaaagtagatgactgggccactgtgtcatttttctacctgtgttttgttgataatatgcaaaatttagcaataatgaagaaaaatgatgtatgtcaatatagcttacagatgaaactttttttggcttcacaaagacatacttattatcataactgatacaattttcatactacagtgctctcttgctttataaatactcaagttattttgtgtgctgcttcaaatttacttttgtgcgtcaccttccatctccttagtacatcttatagtagctgtaagttgatcctg

SEQ ID NO: 125079 - DNA, 415 bp, Homo sapiens
gcattttctacttcaagcctaaaatgtgcattttaaaataattactctcacatataattgtttttaaawcatgtaaattctaaacaaacttctgaaggtataattacacaaattcttagcaatcgcaaaagtagatgactgggccactgtgtcatttttctacctgtgttttgttgataatatgcaaaatttagcaataatgaagaaaaatgatgtatgtcaatatagcttacagatgaaactttttttggcttcacaaagacatacttattatcataactgatacaattttcatactacagtgctctcttgctttataaatactcaagttattttgtgtgctgcttcaaatttacttttgtgcgtcaccttccatctccttagtacatcttatagtagctgtaagttgatcctg

SEQ ID NO: 125080 - DNA, 415 bp, Homo sapiens
gcattttctacttcaagcctaaaatgtgcattttaaaataattactctcacatataattgtttttaaaacatgtaaattctaaacaaacttctgaaggtataattacacaaattcttagcaatcgcaaaagtagatgactgggccactgtgtcatttttctacctgtgttttgttgataatatgcaaaatttagcaataatgaagaaaaatgatgtatgtcaatatagcttacagatgaaactttttttggcttcayaaagacatacttattatcataactgatacaattttcatactacagtgctctcttgctttataaatactcaagttattttgtgtgctgcttcaaatttacttttgtgcgtcaccttccatctccttagtacatcttatagtagctgtaagttgatcctg

SEQ ID NO: 125081 - DNA, 618 bp, Homo sapiens
ggtatacagtagttgtgtgtataaatggggtatatgagatactttgatacaggcatgcaacatgtaacaatcacagcatggtaaatggggtatccatctcctcaagcatttactctgtattacaaaaattgaattatatgatttcagttattttaaaaggtacaactaaattattattgattataataattgtcaattattgacaattgcagtgttgtggtatcaagtactactgttgtgctaccagtacaaactgtgttatcagtacaaatactactgttgtgctatcagcacaaataccctgttgtgcaatcaaatagtacctctacctcttattcattctttttaactatttcttgtacccattagccatcctcacttccctccatggccctaccaaactgcccccctrctatgcttctcagcctctggtaaccatccttctactctctatctccgttgaattcaactcaatgggatccttagcgcccataaataaatgagaacatgcaaagtttgtctttctgtgcctggcttatttcatttaacataataaccctcatccatgttgttaaaaatgacagaatctcattctttttttctggctccactgtgtat

SEQ ID NO: 125082 - DNA, 392 bp, Homo sapiens
tcttgcatccttgtgataaatcacacatgatcatgaagaatgatatttttaatrtattgcttaaaggtttgctagcattttgttgaggatttttgcatcaatattaattggagatattgtagttttctttttttaaagtgtctttgattttggtataaaggtaattctggtgttatagaatgagtttggaagtattccccatctgtattttgtggaatagtttcagtaggattggtgttagttctttaaatatttgttagaattcagtagtgaagccatagaatattggggcttttcttttctgggagactttttattacagctttgttctcattatttgttattggtctgttcatgttttgtatttctttgtgtttcaattttggtgtgtt

SEQ ID NO: 125083 - DNA, 392 bp, Homo sapiens
tcttgcatccttgtgataaatcacacatgatcatgaagaatgatatttttaatatattgcttaaaggtttgctagcattttgttgaggatttttgcatcaatattaattggagatattgtagttttctttttttaaagtgtctttgattttggtataaaggtaattctggtgttatagmatgagtttggaagtattccccatctgtattttgtggaatagtttcagtaggattggtgttagttctttaaatatttgttagaattcagtagtgaagccatagaatattggggcttttcttttctgggagactttttattacagctttgttctcattatttgttattggtctgttcatgttttgtatttctttgtgtttcaattttggtgtgtt

SEQ ID NO: 125084 - DNA, 392 bp, Homo sapiens
tcttgcatccttgtgataaatcacacatgatcatgaagaatgatatttttaatatattgcttaaaggtttgctagcattttgttgaggatttttgcatcaatattaattggagatattgtagttttctttttttaaagtgtctttgattttggtataaaggtaattctggtgttatagaatgagtttggaagtattccccatctgtattttgtggaatagtttcagtaggattggtrttagttctttaaatatttgttagaattcagtagtgaagccatagaatattggggcttttcttttctgggagactttttattacagctttgttctcattatttgttattggtctgttcatgttttgtatttctttgtgtttcaattttggtgtgtt

SEQ ID NO: 125085 - DNA, 528 bp, Homo sapiens
acccaggtacagtggaattcgaggtaaacagcagaacagatgcatgctcaggtacatttgagttggagataaacagcaaaacagatgcgtgctcargtacacttgaattcgaggtgaacagcagtatgcatgcgtgcccagctacacttgaattcgagataaacagcagaaaagatgagtgcccatgtacacttgaatttgagataaacagcagtatggatgcatgctcaggtacacttgaattcaaggtgaacggcagcacgatgtgtgcccagctacacttgagttcgaggtaaacatcagcacgatgcatgcccagatacacttgaattcgagataaacagcagaacagatgcgtgctcaggtacacttgatttcaaggtgaacagcagcacgaggcatgcccagataacacttgaattcgagataaacaggagaacagatgtgtgctcagctacacttgaattcgaggtgaacagcagtatgcatgcatgcccagatacacttgaattcaaagtaaacagcagc

SEQ ID NO: 125086 - DNA, 528 bp, Homo sapiens
acccaggtacagtggaattcgaggtaaacagcagaacagatgcatgctcaggtacatttgagttggagataaacagcaaaacagatgcgtgctcaggtacacttgaattcgaggtgaacagcagtatgcatgcgtgcccagctacacttgaattcgagataaacagcagaaaagatgagtgcccatgtacacttgaatttgagataaacagcagtatggatgcatgctcaggtacacttgaattcaaggtgaacggcagcacgatgtgtgcccagctacacttgagttcgaggtaaacatcagcacgatgcatgcccagatacacttgaattcgagataaacagcagaacagatgcgtgctcaggtacacttgatttcaaggtgaacagcagcacsaggcatgcccagataacacttgaattcgagataaacaggagaacagatgtgtgctcagctacacttgaattcgaggtgaacagcagtatgcatgcatgcccagatacacttgaattcaaagtaaacagcagc

SEQ ID NO: 125087 - DNA, 495 bp, Homo sapiens
agctgggtttatagtcgtatgcccccatgctcagctaatttttgtgtttttagtagaggtggggtttcatcatagtggtcaggttgggcttgaactcctgacctcaggtgatctgcctgcctcggcktcccaaagtgatgggattataggtgtgagccactgtgcccagcttagttttgtttttttttttttgagatggagtctcgctgtgttgcccagcctggagggaagtggtgtagtggtgtgatctcagctcactgcaacttctgcctcctgggttcaagtgattctcctgcctcagcctcccaagtagctgggactacaggcgcatgctgccacccctggctaagtttttatattttagtagagatggggtttcaccttgttacccagctggtctcaaattcctgagctcaggcaatccgcctgcctcggcctgccaaagtgctaggattacaggtgtgagccaccatgcccagccattcccagctagtt

SEQ ID NO: 125088 - DNA, 495 bp, Homo sapiens
agctgggtttatagtcgtatgcccccatgctcagctaatttttgtgtttttagtagaggtggggtttcatcatagtggtcaggttgggcttgaactcctgacctcaggtgatctgcctgcctcggcgtcccaaagtgatgggattataggtgtgagccactgtgcccagcttagttttktttttttttttttgagatggagtctcgctgtgttgcccagcctggagggaagtggtgtagtggtgtgatctcagctcactgcaacttctgcctcctgggttcaagtgattctcctgcctcagcctcccaagtagctgggactacaggcgcatgctgccacccctggctaagtttttatattttagtagagatggggtttcaccttgttacccagctggtctcaaattcctgagctcaggcaatccgcctgcctcggcctgccaaagtgctaggattacaggtgtgagccaccatgcccagccattcccagctagtt

SEQ ID NO: 125089 - DNA, 495 bp, Homo sapiens
agctgggtttatagtcgtatgcccccatgctcagctaatttttgtgtttttagtagaggtggggtttcatcatagtggtcaggttgggcttgaactcctgacctcaggtgatctgcctgcctcggcgtcccaaagtgatgggattataggtgtgagccactgtgcccagcttagttttgtttttttttttttgagatggagtctcgctgtgttgcccagcctggagggaagtggtgtagtggtgtgatctcagctcactgcaacttctgcctcctgggttcaagtgattctcctgcctcagcctcccaagtagctgggactacaggcgcatgctgccacccctggctaagtttttatattttagtagagatggggtttcaccttgttacccagctggtctcraattcctgagctcaggcaatccgcctgcctcggcctgccaaagtgctaggattacaggtgtgagccaccatgcccagccattcccagctagtt

SEQ ID NO: 125090 - DNA, 590 bp, Homo sapiens
gtttattgcagttattaattcggaatgtctacagcatcagggtggagtaagatgtcagaataattttgtgaagtctatattctgattaagaatatgagtgctgatttgttcattcattcaaagtaatcacagtcatcttatgtttatatgccatattaaatcatgagagtccagagcatttggtaaactgaaattattctagtgttcagctataacaataatagtacaatgtgaaatcagataacacaaactacaggaatctgccaaaatttgaaatatgcccatattaygatacatgttttaaaataagtcctgtgagttcaaattaataatcttgtttatatacagaatagcatcttagaatcacagcatcttaataaagtaggaagagaccttgacgatcaccttttccaaccatttcattttacagatgaggaaactaatttctacggttttgatttcttgctggttcttactaaattacatcattaccttcatgctattgcttgcaaaagtagtatcatattatttactgaatatgaatatgaaaagtatgtatcaccactaccacccaattcagaaatttaaat

SEQ ID NO: 125091 - DNA, 590 bp, Homo sapiens
gtttattgcagttattaattcggaatgtctacagcatcagggtggagtaagatgtcagaataattttgtgaagtctatattctgattaagaatatgagtgctgatttgttcattcattcaaagtaatcacagtcatcttatgtttatatgccatattaaatcatgagagtccagagcatttggtaaactgaaattattctagtgttcagctataacaataatagtacaatgtgaaatcagataacacaaactacaggaatctgccaaaatttgaaatatgcccatattacgatacatgttttaaaataagtcctgtgagttcaaattaataatcttgtttatatacagaatagcatcttagaatcacagcatcttaataaagtaggaagagaccttgacgatcaccttttccaaccatttcattttacagatgaggaaactaatttctacggttttgatttcttgctggttcytactaaattacatcattaccttcatgctattgcttgcaaaagtagtatcatattatttactgaatatgaatatgaaaagtatgtatcaccactaccacccaattcagaaatttaaat

SEQ ID NO: 125092 - DNA, 590 bp, Homo sapiens
gtttattgcagttattaattcggaatgtctacagcatcagggtggagtaagatgtcagaataattttgtgaagtctatattctgattaagaatatgagtgctgatttgttcattcattcaaagtaatcacagtcatcttatgtttatatgccatattaaatcatgagagtccagagcatttggtaaactgaaattattctagtgttcagctataacaataatagtacaatgtgaaatcagataacacaaactacaggaatctgccaaaatttgaaatatgcccatattacgatacatgttttaaaataagtcctgtgagttcaaattaataatcttgtttatatacagaatagcatcttagaatcacagcatcttaataaagtaggaagagaccttgacgatcaccttttccaaccatttcattttacagatgaggaaactaatttctacggttttgatttcttgctggttcttactaaatkacatcattaccttcatgctattgcttgcaaaagtagtatcatattatttactgaatatgaatatgaaaagtatgtatcaccactaccacccaattcagaaatttaaat

SEQ ID NO: 125093 - DNA, 610 bp, Homo sapiens
acaaatatacacattattgtaaatacatgtgttggatttacacaattattaaactgcgctactagtctctgaatgctgggctagcgcaaaacccagattaaaaattaagttgcagaatttgatgaaagatagacattgataatactctcaaaatgtaataagtcatatggtgaaaggattggagatcactgaatatgcttccaggggaaaatgtcacatgtaattaagctcagggtggagtcctaatatctctggggtgataaactaatggacttaaactattttctcacttcttttagatatttctgtctctcctgatcaaagttgtaacttataatgggtaaaagacttctgagagcttagataagtatttaaaaaagttctttgcatattttaagtagccttcrcatccttttgcaatctttgttgatcaataccttccacctcctaatctacccctgtccttacccatgcaaatcaaattaaccactgttttagcctatcctaaatagcagagagtgaggcaagactacattgccaatcctttatagggaaatgacatttctaggcaaaggtgaaggaaaaggaaatgaatcacagagggatggaa

SEQ ID NO: 125094 - DNA, 618 bp, Homo sapiens
taaacatctattttccttttttattttattaagaatgtcataatgaagagctaagggctgctacattatctcaacaaaaactactaacgatacagaagttaatgacaaaaataatcttatatttgcctattaatttagtcttcaaactcattttcttatttgaccataccattcatgaaataattaggacttatatattgttttcatcttgcagatatggaaactgaggctcatagaaatgaaataacttctccaatgctccacatttagcatgcttgggaactatctctagggctggccaagacagaatatttttcactgcaaagtcaactaaacaccatttgtcttctttacctatactcttaacaaatttttctcattttaaaattgccayataatttttggtgccaattaccctattttgaattgccaacaaagaaaacctattattttcaacatatgcttgctttttcttagggttaaattatatatagccctaacctcataattctggttaggctgatgtgggtaaatactgtgatattcttttcaatactatatttgaaaatgctgttgcattgtgtataatttttcttttgtgttattctctattttgta

SEQ ID NO: 125095 - DNA, 674 bp, Homo sapiens
tgagtttgaacccaatccagtcaatcattgcttgggtgatcttgggtaattcacttaaatttgctgcttctcaatctcccaacctatagattaaaaagtcactcatttattcatcaaacaaatagttctgaaaacttagtacatgtcaggtattagaactgtattttttatgattttttaaaaacatcatttaccccaagagtaagtaggtaaaatgtaaagtataataggaagagcattactgagatcaagttaagtgagataaagtatccagtacttgcttacttcacagttaacacttacggcatattgctacatcctcaagcctactttaaaaaaaaaaatcattgtattccccttgtaagaattaaacctcccatctcttcagtgctgcaactctcattaaggtatcaatctgattacctaagtgaagaacagtaatttacccttaggggaatttatgctcccataaataayttactatttttaaacgggagctttttaactctaatggaagtcagctcaaggcaaccaataactactaagcacctactatgttttaagtcatgtggagatgtaatccccaccttcatgagttttgaaatctataagatttgtaaaaataatatatcaacccattaaaatttaaaaagctaaattttgaaagcaacaaa

SEQ ID NO: 125096 - DNA, 674 bp, Homo sapiens
tgagtttgaacccaatccagtcaatcattgcttgggtgatcttgggtaattcacttaaatttgctgcttctcaatctcccaacctatagattaaaaagtcactcatttattcatcaaacaaatagttctgaaaacttagtacatgtcaggtattagaactgtattttttatgattttttaaaaacatcatttaccccaagagtaagtaggtaaaatgtaaagtataataggaagagcattactgagatcaagttaagtgagataaagtatccagtacttgcttacttcacagttaacacttacggcatattgctacatcctcaagcctactttaaaaaaaaaaatcattgtattccccttgtaagaattaaacctcccatctcttcagtgctgcaactctcattaaggtatcaatctgattacctaagtgaagaacagtaatttacccttaggggaatttatgctcccataaataatttactatttttaaacgggagctttttaactctaatggaagtcagctcaaggcaaccaataactactaagcacctactatgttttaagtcatgtggagatgtaatccccaccttcatgagttttgaaatctatawgatttgtaaaaataatatatcaacccattaaaatttaaaaagctaaattttgaaagcaacaaa

SEQ ID NO: 125097 - DNA, 578 bp, Homo sapiens
tcataggtacagctatattccttaatgttagttcattgtatttactagaaagaataatgtcagaagtaattttcatgattgttctactttctctactgtaaatatataactcatgtacactttttcaatattatttctttagatgaaaaaaagagactatcacatatacagtttttccccactacagaagattgggtgttagtaagccatcattttatacattttgtatcattttgtacatcaatgtacttacatttagcattcaactgctaataaaaggaacatttttaagtgtwactcaatctaaagataacgttgtcctcactaagtcagttctccatgctctatggagattgtgagacccagagaagaagcctaaggtgcatatgaccaagtcagtattttctcataaaaagttttgagtgtctctcctatgcttggcattgttaactctgagaatccacaggtgaatatgacacatccctttccgcaaggaacacacaactttatttaactaccaaccactttccctttataaggtaggtataaaagctaagtatctgaatataagtattaat

SEQ ID NO: 125098 - DNA, 568 bp, Homo sapiens
aagatgacctttctcagtgaagtagtaaagtataaatggccgagattaaaagaggagagattggcaactagaaaacaaattgatagcagtcttcctggaagatggataaggaataggctggtgatgactgaaagttttatggaatgatgttgaaaactcagctgactttggaaagcataagtagtgggttcagtcatcacatttaaagtggttcctctagaaatgcctagtagacaaaagaaaaggaaagcaaacacagatgttcagccggactaagggtgaggagttggcaagacccaactgtggtatcagatcaagggcatgaaaggagcaaaaaaagacgcagttgaaagggtgcaccgtgttttggggccgggtcatgaggactctcagctcagaggaagggaagctggtaaactggggaacggagggackgaagaagtgaaaatattgcagagggcaaatagctgatccaattttaggtgatgaggagaataaagttgtttcactgtggggaaccttctgcagtaaagcggcataaaagttgccagaaaggaaaaaaatgtca

SEQ ID NO: 125099 - DNA, 633 bp, Homo sapiens
tgggggtggccacactcactgaacaacagcttggcagccttcatgtgttctgtgcagtgcctgggcctcctgaaggaaggtccttgcccaccctccaccctacccaggaccagtcctccccacttsttcctctccttcactagccaggatggcccatctccctgcccacctcccaaccctgctctccctcaagccttggtcttctctagttcctgggggtggaaagacatccaccctctgtggaaaccactgaccctttccatccagcatttgggttggttgtttttgtctaaccctcttggtgtctagtgcaaagattcatggctgattgtgggctggagaggggccaaaaggcctctcatgcacgtgtggggaggtggaatgcacccacagtacaaggatttacactgtgcatgtaatcccagcaggcagtgttagagccagttgtttctggattaatttatttagctattacattgatagtgacttagactaagcaccatcatgaaaacacaaattactgtaacaatggcttgcttctttgagatttacatgtttttagtggaatgcatacctgaaagcagttccagattcccctacaggtgcatggggacgttgggcttactttgcata

SEQ ID NO: 125100 - DNA, 445 bp, Homo sapiens
tgagaagttcaagaccagcctggtcaacatggtggaaccccctctctactaaatatacaaaaattagccaggcatggtggygggtgcctgtaatcccagatactcatgaggctgaggcaggagaatcacttgaacccgggaggtggagcttgcagtgagctgagattgctctactgcactccagcctgggcaacaagagcaaaacttaaaaaaaaaaaaaaaaaacacatttgttgcaaaaatttggagcccaaagaactggggcagggactagtgggcaaatttaattactctgaatacctaaagatctccaaaaccttgaacttctccagccaccgagagatgctctttctttcttttctcgtggtcctattcctgccttatctaaagaccatagaattaactcatctcagtgaatttcccaggactgcagagctgcttggcc

SEQ ID NO: 125101 - DNA, 445 bp, Homo sapiens
tgagaagttcaagaccagcctggtcaacatggtggaaccccctctctactaaatatacaaaaattagccaggcatggtggcgggtgcctgtaatcccagatactcatgaggctgaggcaggagaatcacttgaacccgggaggtggagcttgcagtgagctgagattgctctactgcactccagcctgggcaacaagagcaaaacttaaaaaaaaaaaaaaaamacacatttgttgcaaaaatttggagcccaaagaactggggcagggactagtgggcaaatttaattactctgaatacctaaagatctccaaaaccttgaacttctccagccaccgagagatgctctttctttcttttctcgtggtcctattcctgccttatctaaagaccatagaattaactcatctcagtgaatttcccaggactgcagagctgcttggcc

SEQ ID NO: 125102 - DNA, 659 bp, Homo sapiens
aaagaattttgagtggatttaggcataaatgaaagaaagtaatgagccagcacatataagcaactcttcaacaaagrgacagaggtagactgaacagtgacttgtgcagagatcttcatccaaattattgctattttgttatttatgacttaatctcaatagtatttcttaatgtttgactctatgtggctaataactgtgtctactttggttagtcttgtatcttcagttaacacaattcccataacactggcccataactggcacttaaaaatacttaaaaaaatacttgctgaataaataaataaataacaaataaatgaatgaatgactggaagaaccagtctccattttccaaatgcttaaaagtgtaatgttatgtgaatataacacttgtatgtcatattacctggaaattttatttctttatcaagcctcctttaaaaacaatttactttgttttctagtggaatgtgtcctacttgaatctagaacatgacccttttgcgaaattggttgtcattttgtgaactttgaggaatgccaaccaggaaggaacagtttgcattatgagaaatttgagtaggtacaccaatcagatgacagccatacttcagaaacacatcttaaaataaatgaatagctctacctggccaaac

SEQ ID NO: 125103 - DNA, 551 bp, Homo sapiens
tgattattcatataaattttaacatagccatttaatcgtcccatcactcataaaacatattagttttaatagaaaaactgtcatgcactaccagctgctaaatttcattttttacctgtctgccatctaatttggcatcatttaattaaattacaaaatatgatgataaatgccacggaataaaataaactaaaagagaaacagtgattctatgaagaacacttccttttcaaaagtattttttgaaaacatttcattgacataatgcaacatttaacattatatatgtgtaatgataacataaataaaatattagaacatgcagctgtgttctggataatatcatgctgtttcacatagcaccattccctattcctttagctactggattactggaaaaaaatgtatctcaaaatctaatcaagtcatttgaaaatatgtcatttatattcytattttatctcgcaatcaacatttgttaaaacctcaggaagtaaattgatagaatgtgtttcaaacaaccaatattatgctttggtccttttacatca

SEQ ID NO: 125104 - DNA, 619 bp, Homo sapiens
tttgtggaagaatggttaggaggctattgcaataacaaaagaaaatttgaatagctgtatccaacatgaaaagattgctagtagaattaaatgagttactataggtaaaacaatcagggaagtaattaaagagaatctgcactaacattgttttattaatttaaaatatctgtacacaatcctttgactcatttggaattagttttagtgtattttagaaaataaggtttattttttattttctcccaaaacaattcttcaagacaacttttcgaacagtaaattccttctttgtttataatatgtattttaataaagtcacttatcttcatgatttctaggacatcggttctatctaatctattgttcagcattcgtctgagtattttctgagcagcaattaacccctctgtacctctgagtgcccacatttccttgatccatttcaccttgctgatcaatccttctttactcatagtctaaattttttttttagaacttctgagagtgccycaaaccttggtcttgggtcttccttcaatcttatttgtctttccacctgatcttaattatttacatcacattataccctatctttatggtgacaaatctcaaaatt

SEQ ID NO: 125105 - DNA, 586 bp, Homo sapiens
gctgcaggctatgggggtgggggagagaggggagcatgggctgaataactacctactgggtactatgctcactaccagggtgcactgtacaaaagtaacaaatctgcatatgcactatctgtgtctgraaaaaactgaaattataaaaaccaagagaatatgtttctaatgaatgtagactttatttgatggactggattagaatataatatctttttaaggggaaaggcattgggggatgcacaatgtctacaggtttctaaacctctctggtttctgacctaattcatagtctcttatgtcattttcatagttttcatattctgcctttccacctcttctttttaacaagtaaaattcctcatagcatacaaaaaaacaattttataaaaaacccatattatagatcagggacctgtggattatatgctattagaactatacaaaatgtctctatatagttttctgtatctttggaatatctttgggtgaagctgcagaccttcttggtgagtgttacagctctgcgcagagccaaacagtgagcagcagcaagactgcaaagagcaaaagaacaaagcctcca

SEQ ID NO: 125106 - DNA, 586 bp, Homo sapiens
gctgcaggctatgggggtgggggagagaggggagcatgggctgaataactacctactgggtactatgctcactaccagggtgcactgtacaaaagtaacaaatctgcatatgcactatctgtgtctggaaaaaactgaaattataaaaaccaagagaatatgtttctaatgaaygtagactttatttgatggactggattagaatataatatctttttaaggggaaaggcattgggggatgcacaatgtctacaggtttctaaacctctctggtttctgacctaattcatagtctcttatgtcattttcatagttttcatattctgcctttccacctcttctttttaacaagtaaaattcctcatagcatacaaaaaaacaattttataaaaaacccatattatagatcagggacctgtggattatatgctattagaactatacaaaatgtctctatatagttttctgtatctttggaatatctttgggtgaagctgcagaccttcttggtgagtgttacagctctgcgcagagccaaacagtgagcagcagcaagactgcaaagagcaaaagaacaaagcctcca

SEQ ID NO: 125107 - DNA, 584 bp, Homo sapiens
tgggggacactgtgagttaagggccatgacagaagtcttcataagtaaactgttaattgacacaagctgctacctgcccaggtgagcaatctgttggcccagaggagagttgcttactgacataaattgatttgcagaaatttcctgaagcaaacaataagttatttattggtttgcagccttactttcctgaaaaataattttctggaatgaattgtgaaatcatgttgacacagatggcctcaggtttcagttcggataattaagctgtgtaaatatagaaagtcgaaggtttctgggtgctgttgattcacagtatgcaacaatgatcatattacttttatttactatgagcttcagctgaaaatccaaaagaaactttaatttcagatatttaatgaaatcattatagctgtggtaatttcctttagctgggtgtgagtgtgtgatgtgagcgtgtgrtgtgtgtgtgtgtgtgtgtgtgtgtactctggcagcatattccaaataatttctgtaaaatttcagtttgaaattaatagaagacatattaaattgtttaaactctttgttatttaaattct

SEQ ID NO: 125108 - DNA, 511 bp, Homo sapiens
tgtagggacagacatgaaaatgacaaatacatatagagatagaaaggtatcttgtgcattatactgagaaagacaatagaaataaacaatttacatgggttgatttattttgattaagatatataagtggttagataaatgttaaataggtcagtatgtaattacagaaaatgacaaattgttatgtatggtacatttgtaggcataacacagacattacattttggaaaattgtgttctatgcaacagtgccaagtctaatgaaagtaagaggaagaggaattcagccaaagtaccaacccctgttatccattccttaagaaaggaacttctttatacactcaaaagaggggattctttttaaatttgtttccagaggggcatctgcatacacatacacayacacacacacacacacacacacacatttacattatatttaaatgtgtgtgcatgatatatatatatacatgtatttatttatttaatatatatgtgttatctgggtcct

SEQ ID NO: 125109 - DNA, 604 bp, Homo sapiens
cttttcagctactatatattagaatatttcttaacttttttatattcattctgaaatttcttgctgaaatttgttcagaaggtgagttaacggagctatacatctttagtgtcatgtgctctaaattgcaaaatacatgtatttttatttcagacaacttgagyaacatttgtgcaaatgttttatatacacggacttaatttggtaaatttaggcatgtggtagacaaatttaaaaatgtataaaaatcgtgggcaagcatatgaacattctatttttgctactataaaaaaatagcagactatccaactattttatgatactcaacgatacatcttactaaatggtcacgactcttgcctctcagggtcagagtttgcaatagtgaaagcaagagaaagccacggaaaaaaaaacagggagagggaaaatattaagctctagaatatgtacattgttttgcttgtataaatttagaacattcaacacatgtttacaatgaatacatataaaataccaatgacatgaggagaattagaatagaaataaatacaaggattctttcatgataactaaaaatatcagtgaaggtttgtacataaaa

SEQ ID NO: 125110 - DNA, 535 bp, Homo sapiens
tactttttaatccctcccacctgtacctccccactccctgatccctttctagagataatcactatttctgctttctgtcacgagattagtttgcattttttacgatattatttgtctaactttttccactctgcataacaattctgataatcatctatgttgctgcatagactaatagttgttcctttttattgctgagtagtattacattataaagacatataatagcaaatatgtacatataatagcaaatgtccacatagcaatggacatttgggttgattccaattttcagctattataaataaagttgctaagaacattcatgtaaaagtctatgtgtggacacacaatttcatttctcctgggggaatgtttggaacttgcagtagatcaatgtttacatttttaagaaactgccaaactgttttattttaaaccccaccagcaataacaaagttcaagtttctccacatcatcaccaactctattgtctgtcttgctgattakagtcatttcagtgggtgtgtagtgg

SEQ ID NO: 125111 - DNA, 567 bp, Homo sapiens
ttctgtgcagtaagggagttatagaaggttttgaagcaggagaggattatgatacagtagatggtacaagaagattaatcttacatgggtgcctaacatgggctaagagaagaggaagctcctaggtgagaagtgtggggaattccacaatcactcaggtgtgagaaaatgagaacttgaataggaaaaacagataccggaccaacgtcagaggaatcagaagtagtgaacagccaaaagaagggaggatgttacagggaaggttggagggagaagctaaaaggcatttcggtrttcatctctatgcctgggagagtgaaggtaacattgcattcaaagaaatgggaaacacagggctagaaacaggtttgggaatcaagtggtaatcttacaaattggtaatcttggcttacatgccttgcacaatgtttgatgtaggtgtttcatatttgcagcaaaaaaataatgatttttaaaatttattattcaggcttttagacatttaggtgatttttaatttttttctaaaaattatataaggatttactgaacatgctaaattacatt

SEQ ID NO: 125112 - DNA, 503 bp, Homo sapiens
gcaattacaaaaaaaaacaaaacaaaaatgtcccaggccttcaataaattttaaaaggaacttgaaattccagcttatttaggttttccttgaacttgcaccactgagcataaagggccccaaagggccaaactcctgatgaggaaataggaaaagcagcaatcctctctgatgctgatattgctgtctgtggccaaagtgattcacaaaaatttagtctctaagtataaagaggctttgattcaaactttgtgataagaaagaagaaaatgttgagcatgcttagaacaggcttcaagatgactgactagargaatctgatactgatctcctttccaaagaaaaaccaaaatagtgagtagataatcatacttcaaataatctaagagaaaacactgcaatttcacagagcagtgacaagaaaacacctacggcaaggaaggagaaggaagtgaggcaccttgttcagccaggattggctgggaggctggagaggttcccca

SEQ ID NO: 125113 - DNA, 476 bp, Homo sapiens
cctcctggtttaccaagtgtcactggacacgtcagggcgttctgagaccttagagagcatccagtcctgtccctgcagtttacaaatgaggaaaccagtaccctgagagtggctgtactatccactctcaggataccaaagatcatctggaaagtcactggtggagctggaccggggcccaggcatctcttctcctgtccggggctcttgacttcaggaccacctttctgaaacccatgatggggcaacaccaggacactttccagcctgcaggtgtctgtcccgcggaagcgagccaggccacrtgtgaattcctgttttctgggtgggtttcagaaggtacgagcaagtcggcagggtgacagcccaggtgcttcttgggttccccaaaacgcggttatgtttagcagcatcctcagaaccaaaggtggggtgggggctgcagatgttgtgggggccctctgaagtgaaaagag

SEQ ID NO: 125114 - DNA, 325 bp, Homo sapiens
aacaccattgaatagaagcaataataagcagacacttacaaataaatgtggttgacaactattacaaatgtaaaktttaaatgtgaaacttttctcacagtactttgggaggcaaaggcgggtggattgcttgagcccaggaggagttcgagaccagcctgggcaaatgtgaaaccctgtctctaccaaaaaaaaaaaaaaaaaaaaaaagcaaaagttagcctggtgtggtggcttgcacctgtagtcctagctagctactcgggaggctgaggtgtgagaattgcatgggaggtgcaggttgcagtgagccaagatcacacca

SEQ ID NO: 125115 - DNA, 604 bp, Homo sapiens
tatttctttgtcaggacttgggtaaagaaagaaatggctctagtttctctctagcttttccaaatgcttgatgtagattagggccatggttaatttctactctaagtctagctctgaccacatttttttcttatataagactttcaactttttacatctctaatctcatccgtttttctgaatgcctacaaccttagaagatatatgggttattttacctacttcctgattctatagaagcaacttacacaaacagttttaataaaatagaaacacatatgttagaagcagaataagaaaagtatacaacaaaaaagtcaaggtaaacgaaaagttaaaacacagatttatgggttaaaggatctggcctaaatacttactaaaaactgaatttttaaaaagtaactttaagcttcttactgtacaatgaagaaatgataagttatatggttctctctcactataagaaagaaaaagcataccatatttcaaggaaacaaagcttttttctggcactaataaataaaaggcctcaaatgagayaccaaataagtattaagatctcttttgaggagagggaactcaagtacaagatatgtttaac

SEQ ID NO: 125116 - DNA, 552 bp, Homo sapiens
ttgcatttgtagctttatacaaagtagtcgctggtttccaatatagttaaggtttgtagataaacaccagtcctaagtagaaatatttctatacctccagccaataggtagacatgtgcattatcagatctgatcatactgggtgatcaatggagattaaatgtttccaatttcattacatgcatctgattaattatctgagtaccaattaggcaagcattattctttgcaattctagaaagagacaaaatatgtgttccaaaggtggctgggttgttgttgttgttttgagatagagtctcgttgtgtcacccaggctggagtgcagtggtgcgatcggggctcactgcaacctctgcctcccaggttcaagcgattctcctgcctcagcctcctgagtagctgggcacacaccaccgcccccagctaatttttgtatttctagtagagatggggtttcaccatgttggtcatgctggtttcgaacttctgacctcaggtgatctgcctgcctcagcytcccaaagtgctgggattacaggcgtgagccat

SEQ ID NO: 125117 - DNA, 505 bp, Homo sapiens
aaattttccaaagccattaagaaagctatgcttgtttaaactctcagtgtaacctgaaatagtttgaaacaactgtttagaaaaagtggggaataaacgctatagakggaaagtaggaaataataacatagataaacaggcaataaacaagaaaatggcttttgtatcaaagacagacagaaaacatttttttcttgatggttcactttccacacatggaagttaagcttaacaaaagaagaactgttttctgtctttcccatctttatctgtatccctcggcaccaacagtagtacctaccacacaactggctctcaataaataatttgaatcaatgaatcaattgataattttggccagatttttaaatagattatggacaaaattgatacgagtaatagtgatacagcggtagtacctggcacataattggctctcaataaataatttgaatcaatcaaccaattaataattttagccagattttaaagaggttatggacaa

SEQ ID NO: 125118 - DNA, 468 bp, Homo sapiens
ttcagacagtttgcacaatgcagcagattagctaattgctcctctgcctactataagcacagctggctacattggttgaaaaaccaacccagggaataggctatgaaattggtattgaagmtttggcagcagactaaccgatcaagatactgaatgcaaagctaaaacacaaagcacagcttgtttggtttggtttggcttttttatcagtaatttctactggcggagacagatgtttcttaaagtggcaagagatttgcaaagcagaatgttctaccacttactgtaattgctttattaatattgtatgtgtttatggcttctatcttctggcttgtggcacctcttactttaaatgactttgggtttcctgatgactggcagttaatcttgacttcagagattctttgagtcatgcatccagctttgctcctgtatagtgaattatttcatatgaagccgaattct

SEQ ID NO: 125119 - DNA, 558 bp, Homo sapiens
ctctgtactttgttcatcagtttaattatctggagagaaggctgtgcttgcatgaagggtttgacctgcatttggaaattgcaacctgccatctctgggatgaagggtgtacttcaccagagtcttgattgaggcaatggaaatttccagttggaaaacttaagacaatgaaacatgaggctctatcctacagtccagtgctaaatcatacaaaatgamtttatgtttgaaaagaatacaaaggttttgacacatggcatatgtagttgcaagcacatatcaaaatatacacgtttttagagaattattttaagcaatttttttaggctcaaatccaattttttccaggtgttacttttaagaaatcattcttaaaatgattattattcattttaggggacactgtttcagacctggtgttttagggcttttgtataataaaataacatttgaggaacaagaaaattttttcaactcatcacataactgaaaaacgataatcaatatttctgctgtctaactcccttttcccagagaaaataattaatgacctttatt

SEQ ID NO: 125120 - DNA, 305 bp, Homo sapiens
ttggtgtgttcttccattaatacttctgattgtattatgaaattcctgtagtgaacttttctcctcaataagttcagtttgagtctttcttaaaatgggtgttttgcctttcagctcttaaattgttttactggatrccttggcttccttggattttcaattttctcaatcttgatgagcttccttgccatccagattctgaattccatatctgccatttcagacaattcagactggttaagaactcactgctagtgagctaacaggctcctttggaggttaaggggatactattttttaattgt

SEQ ID NO: 125121 - DNA, 642 bp, Homo sapiens
cattgggactgactaggaggttggcgtgactcagagagagcaaggaaaagcacagtggagctagggcccacctgggagccagccacacagggcaaagggagctcccttccccagccaagggaggcagtgagrgattgtgctacccctccctgaaaaccatgcttttaccatgaatccttgcaacctggggatcaggaggtcccctcatgagcccatgccaccagggccttgggttccaagcattaagctatgcagactgatggtggctgctgaggtgggtggcacttgagcaggcactgagaccacgagttcctggggggaagaggcagctgccattactgtgtcttcagtccaccgttttcccctaccatgatgccagtgcagtttggatggggagcaattcccccacagcacagcacagcggctgggacagtttgtggccagactgcttctttaggtgggactccaatccattccccctcacggagcagggcctccctgtgggaattttcacatccccagtggagggtttatggatagaactctgatatccctgagaagaggctctaggaggagggttggccacgctatcgtggatcagccattttagtctttcctgcctactggctctggagagggaga

SEQ ID NO: 125122 - DNA, 644 bp, Homo sapiens
cattgggactgactaggaggttggcgtgactcagagagagcaaggaaaagcacagtggagctagggcccacctgggagccagccacacagggcaaagggagctcccttccccagccaagggaggcagtgagggattgtgctacccctccctgaaaaccatgcttttaccatgaatccttgcaacctggggatcaggaggtcccctcatgagcccatgccaccagggccttgggttccaagcattaagctatgcagactgatggtggctgctgaggtgggtggcacttgagcaggcactgagaccacgagttcctggggggaagaggcagctgccattactgtgtcttcagtccaccgttttcccctaccatgatgccagtgcagtttggatggggagcaattcccccacagcacagcacagcggctgggacagtttgtggccagactgcttctttaggtgggactccaatccattccccctcacggagcagggcctccctgtgggaattttcacatccccagtggagggtttatggatagaactctgatatccctgagaagaggctctaggaggagggttggccrcgctatcgtggatcagccattttagtctttcctgcctactggctctggagagggagatt

SEQ ID NO: 125123 - DNA, 495 bp, Homo sapiens
gaattcagcaccttcaactgaaatatccaggttctcacattgggactgactaggcaaacaacttgatccagagagaaagaagaaatgcagggtggagcaatgaatggcctaccaaggaacagcagggagccaaaggaaactcaccctcagccaaggaaagtggtgagtgattgtgccaccccgcccgggaaatcacatttctcccagagatctctgaaacccagatcaggaaatcccatctttgatcccagatctttgcagatcaggagatcccattgtgagcccatgccactagggccttgggttcgayacacagagctgtgtggagtctcagcagagcaaacgctcaggcacacaatgaggcccaggagttttacagattctggccctgggatcctggcaaggcagaagatatgacagtgcatatcccaaggaagggggctgaatccagggagccaagcagttgttctgcacgtcccacttccacagcacctc

SEQ ID NO: 125124 - DNA, 526 bp, Homo sapiens
gtgcacagacatcaaagaatggaggaaagaaacagagccatgtctgctccagccccttgcagcctccccttctcagatagacgtgagcttgagtgggggtccctgcttgcaggtgaggaactgcagacatggggggctatgtggctgcctggttgttccgcctatgtgtggcagggacagctctggagattagactggaccctgcctcacctgctggagcaggggcctggcttgtgttccagctaaggccaaggttgggggaggccgccagggatgtgggccatgcccgtggggcagggcactgggggagcagaaagagactctgggagctgctgggatggggaagaggtcggtgaggaccagggtgttccagaagcaggtgccagatttgagaggccaatctactgcgtgtctagctgcaggtctagttaatttggttatttttaaggatccaagacagctgggccacaggctgcaggtttcygagcaaggaggttgccacctgcctgcccgaggtgacagaaaa

SEQ ID NO: 125125 - DNA, 525 bp, Homo sapiens
gtgcacagacatcaaagaatggaggaaagaaacagagccatgtctgctccagccccttgcagcctccccttctcagatagacgtgagcttgagtgggggtccctgcttgcaggtgaggaactgcagacatggggggctatgtggctgcctggttgttccgcctatgtgtggcagggacagctctggagattagactggaccctgcctcacctgctggagcaggggcctggcttgtgttccagctaaggccaaggttgggggaggccgccagggatgtgggccatgccsgtggggcagggcactgggggagcagaaagagactctgggagctgctgggatggggaagaggtcggtgaggaccagggtgttccagaagcaggtgccagatttgagaggccaatctactgcgtgtctagctgcaggtctagttaatttggttatttttaaggatccaagacagctgggccacaggctgcaggtttccgagcaaggaggttgccacctgcctgcccgaggtgacagaaa

SEQ ID NO: 125126 - DNA, 617 bp, Homo sapiens
tactcaatctgtaatagtggatcagcatcatcagtgtgtcctcagagcttgttaaaatgcagaatctcaggccctaccccagacctaatgaattaaaatacgctttctgacaagatccctaggcacatgttattgtttaagaacrtctgttttagaactcactttgggaaacctgtgctagaatttattgtaatgctgaaaaagaccagctgaaactcttaagatttgatttcaacattcaaaaaataattttctatagttcaatatagttcaaagatgcataatgattaatttttgtaggttttgttccagctttattaaagatagaagatccactaattattatgggcttgaaactaaatttttaatttttttgtttgtttttgagacggagtcttgttttgttgccaggctggagtgcagtggcgctatctcggctcactgcaacctcagcctccctggttcaagcgattctcctgcctcagcctcccgagtagctgggactacaggtgcgtgccaccacgcccagctaatttttgtatttttagtagagacggggtttcaccatgttggccaggctggtctcgatctcctgacctcgtgatccgcactcccca

SEQ ID NO: 125127 - DNA, 582 bp, Homo sapiens
taagccaaaagaaagttaataagataaagggaagtctttaggtacctatgaacaaccggacattttctttaaaagcccctcgtaatgttgagtgcctttatacccattttactgattgaggaaactgaggttcacagagaaaaaataacttgcccaagacctcatagctagggcaaggtagtgatggggttgaaatgctggtataattctaatctctccatgaaaacacagatgtagctcagcaggcaggcaactagggatgtgattataggcccaaggctattgtgatatgtgaatcagtgctgagcagtacaaaaagcagatttgtaatcagaaggtccaggctctgctactcattagacctatgaccttggacaaattgcttgttactctttaaccccaatttcttcattattttttttctctttttaagaaaaaaaaaaaagaggaggaagaggatacaattatctacttaacctgaaaaaagctccccaaacagaacaatttaggagcartaacatgtagcctttttatgtcatgatgcccagttgcccagttgtcccagtgacactagcaccacag

SEQ ID NO: 125128 - DNA, 535 bp, Homo sapiens
gctaaagtgagattgtaggttatcagtaacaatttaaaggaaacaaccactcttttgaatgtacaacttttttttctgaaatacacttttctaaaaccctcttaactggaggtttcctgttttcttcttgttttaactggtggtttccagtaggcaaaataaaatgacaggcatgctagttttttttttttttttttttttttaaraaaactgaaattaagccaggcagggtggcgcactactataatcccagctgctggggcggctgaagtaggagggtcacttagcccaagagtgcaaatctgccagcctaggcaacatagcaaggtcccatctctaaaaaagaaatttaatttaaatttgtaagaaaaaagaaaactgaaacagaactgccagtacaatgtttgttgcaattgtttccaaaactttgagataacgaaacccctattcaaatgtaaattttacccattcccacctgatagtactgtttattactttgctatgcaggagaaacaaaacagctttttatttgtgt

SEQ ID NO: 125129 - DNA, 535 bp, Homo sapiens
gctaaagtgagattgtaggttatcagtaacaatttaaaggaaacaaccactcttttgaatgtacaacttttttttctgaaatacacttttctaaaaccctcttaactggaggtttcctgttttcttcttgttttaactggtggtttccagtaggcaaaataaaatgacaggcatgctagttttttttttttttttttttttttaagaaaactgaaattaagccaggcagggtggcgcactactataatcccagctgctggggcggctgaagtaggagggtcacttagcccaagagtgcaaatctgccagcctaggcaacatagcaaggtcccatctctaaaaaagaaatttaatttaaatttgtaagaaaaaagaaaactgaaacagaactgccagtacaatgtttgttgcaattgtttccaaaactttgarataacgaaacccctattcaaatgtaaattttacccattcccacctgatagtactgtttattactttgctatgcaggagaaacaaaacagctttttatttgtgt

SEQ ID NO: 125130 - DNA, 583 bp, Homo sapiens
  misc_feature (1)...(583): n = A,T,C or G
tttggctcctttttttattctaactgtaaaatactctttgaaccgaggaagatgtgacaggaattacaagttttacytttgttctttctgacaactaaagagtatttaaaagggtttcccattaaatttttaagttttatccactgtattaattggatgtgagctattatgagaatgattacagagtgaaagtgtaaattgtcttgaatttgaatgtcttttaattaagcagtttctcaaactgcttctttcagtgtgaaacctaaataggagacacaagataatnttagcaccaaatgaggcctttaggatttagcttacttgcattcattcagtaaatattcattgtacttattttgcaaaaatgttgtattggctacctaaatcagtgaagggaaactacaaaggtaaatcagaaatgtactgtgagatcaagaagcccgtagctctgaggagagacaaaagtgtctaaaataatgagagtgtgaagtggagaaatgggctagtattgtaggagacagacaagaggaggagaagcttaatcaaggaaatgacaccataagctgaatgtaggctccttttg

SEQ ID NO: 125131 - DNA, 545 bp, Homo sapiens
tacagatttggggtatatgctaaagttaccaaagttgtagaaaataaggccgggcattgtggctcacatctgtaattccagcactttgggaggccgaggtgggcrgatcatttgaggtcaggagtttgagaccagcctggccaacatggtgaaactccgtctgtactaatagtacaaaaattagccaggtgtgatggtgtgcacctgtagtccttgctactcagaaagctggggcaggagaatcgcttgtacccaggaggcagaggttgcagtgagcagagattgtgccactgcactccagcctgggtgacagagtgctatgagtcaccacacctggtatgagccaccgtgcctggcccacaatgacttttacacatgttgttaaatcatcttacagattttataatttgggggaagaaaagttttactaaatggtcttttaatggaaactctacaagaaccagaatctttgctttgttcacttatgtatccattcctaggcctagaaaaatgtctgacacatagcggcaattattcattgaata

SEQ ID NO: 125132 - DNA, 545 bp, Homo sapiens
tacagatttggggtatatgctaaagttaccaaagttgtagaaaataaggccgggcattgtggctcacatctgtaattccagcactttgggaggccgaggtgggcagatcatttgaggtcaggagtttgagaccagcctggccaacatggtgaaactccgtctgtactaatagtacaaaaattagccaggygtgatggtgtgcacctgtagtccttgctactcagaaagctggggcaggagaatcgcttgtacccaggaggcagaggttgcagtgagcagagattgtgccactgcactccagcctgggtgacagagtgctatgagtcaccacacctggtatgagccaccgtgcctggcccacaatgacttttacacatgttgttaaatcatcttacagattttataatttgggggaagaaaagttttactaaatggtcttttaatggaaactctacaagaaccagaatctttgctttgttcacttatgtatccattcctaggcctagaaaaatgtctgacacatagcggcaattattcattgaata

SEQ ID NO: 125133 - DNA, 545 bp, Homo sapiens
tacagatttggggtatatgctaaagttaccaaagttgtagaaaataaggccgggcattgtggctcacatctgtaattccagcactttgggaggccgaggtgggcagatcatttgaggtcaggagtttgagaccagcctggccaacatggtgaaactccgtctgtactaatagtacaaaaattagccaggtgtgatggtgtgcacctgtagtccttgctactcagaaagctggggcaggagaatcgcttgtacccaggaggcagaggttgcagtgagcagagattgtgccactgcactccagcctgggtgacagagtgctatgagtcaccacacctggtatgagccaccgtgcctggcccacaatgacttttacacatgttgttaaatcatcttacagattttataatttgggggaagaaaagttttactaaatkgtcttttaatggaaactctacaagaaccagaatctttgctttgttcacttatgtatccattcctaggcctagaaaaatgtctgacacatagcggcaattattcattgaata

SEQ ID NO: 125134 - DNA, 642 bp, Homo sapiens
actacttctgagataaggtgggcttttgttttttttttcttaacatcctcatcacctccattggaagagtgagggagatcagactgggagaggttgagggattagcctggcctctcctgggtgtgcaggtgagctgtgtgactgtaccagatgctctgtctgcagaggcacaggtccccttgcctgcagtcttccaatgtagtatcagaaatccagttcccatcttagtgtcaaagtcttcccaaatgcaaccataagccaaaaataaatgtataccttccctccataaaccattattccaaattcttctgctgttgccagtgacaatcatctgccttctagtcttccaaaggaagaatcaaagaagatgyttccaaaggaggcatcaaaacctaataatcatcactgataatctctctccttcttgtgcccatgtccagttggttgaacaagtgctaacctagcagtaccacatccagctatgatggggcaggtgcaaagatggaggaagaaagatggccccagagatcacggttttgtaaagtcatgaaggagataactggaacatgaatcattatcaactgagataggaaataagaggacacaaaagaagtaacataaaacattcttactaatgtgagg

SEQ ID NO: 125135 - DNA, 611 bp, Homo sapiens
gccttctgagatcaagcaatcctcccatctcaacctcccaagtagctaggactacacatgcatgtcacccatgcccagatcatttttgtagagtcagagtttcaccgtggtggccaggttggccatgttggccagatggggtcttcttttgttgcccaggctggccacaaattcctgggctcaastgatcctcccacctcgtccttgtagagatgagatttagttatgtcgtccaggctgatctcaaactcctgggctaaatcgattgtctcacctcagcctctcaagtatgttatgaaggttatatgttaggaagggtcccaggaggtagacccacacagatgggatttgggcataggtttggtttcccagggggcagtgctgagctctttgccagtgggaaatgggatgctggtgatttccagtaggtgacctcacagtgactcaagctaccacttactgttgattgtgacgaaatgccagctgaggcacatgccttgggagctaagtggttgctgcccttgaccactgtgaagactggtgtgggaagggtcgctttggatgcacttgagcaggggttccccaacccctgagccatggagccgcaagga

SEQ ID NO: 125136 - DNA, 611 bp, Homo sapiens
gccttctgagatcaagcaatcctcccatctcaacctcccaagtagctaggactacacatgcatgtcacccatgcccagatcatttttgtagagtcagagtttcaccgtggtggccaggttggccatgttggccagatggggtcttcttttgttgcccaggctggccacaaattcctgggctcaagtgatcctcccacctcgtccttgtagagatgagatttagttatgtcgtccaggctgatctcaaactcctgggctaaatcgattgtctcacctcagcctctcaagtatgttatgaaggttatatgttaggaagggtcccaggaggtagacccacacagatgggatttgggcataggtttggtttcccagggggcagtgctgagctctttgccagtgggaaatgggatgctggtgatttccagtaggtgacctcacagtgactcaagctaccacttactgttgattgtgacgaaatgccagctgaggcacatgccttgggagctaagtggttgctgccctkgaccactgtgaagactggtgtgggaagggtcgctttggatgcacttgagcaggggttccccaacccctgagccatggagccgcaagga

SEQ ID NO: 125137 - DNA, 526 bp, Homo sapiens
tcttgtctgagtgaagggggataattagcctaaactgaggactactccaacccctcccaacaattcttaacaggaagaatcagtttcctagataattaacwgtatactagaaccaaaatgaagaatatttatataaatacacaagtttatagcacccaaaaagatataattcataatgtctgacaatcaatcaaaaattaccatgcagaaaatataatcattaaagaatagaaaaatcagtcaactgatactgatccagaaatgacacagatgtaagaattagcaggcaagaatattaatacagttattataactatacattcaaaaagttaagcagatatatgggagacataaaaaaaagaaccagttcctaattctacaaatgaaagctgcaatatgtaggatgaaaaatacactgaatgaaattaatagcagttatgtatttagaagaaaagttagtgagttttaagaaataggaatacaaaccattcaatatgaaatatagaatataattttttttaagtat

SEQ ID NO: 125138 - DNA, 526 bp, Homo sapiens
tcttgtctgagtgaagggggataattagcctaaactgaggactactccaacccctcccaacaattcttaacaggaagaatcagtttcctagataattaactgtatacwagaaccaaaatgaagaatatttatataaatacacaagtttatagcacccaaaaagatataattcataatgtctgacaatcaatcaaaaattaccatgcagaaaatataatcattaaagaatagaaaaatcagtcaactgatactgatccagaaatgacacagatgtaagaattagcaggcaagaatattaatacagttattataactatacattcaaaaagttaagcagatatatgggagacataaaaaaaagaaccagttcctaattctacaaatgaaagctgcaatatgtaggatgaaaaatacactgaatgaaattaatagcagttatgtatttagaagaaaagttagtgagttttaagaaataggaatacaaaccattcaatatgaaatatagaatataattttttttaagtat

SEQ ID NO: 125139 - DNA, 526 bp, Homo sapiens
tcttgtctgagtgaagggggataattagcctaaactgaggactactccaacccctcccaacaattcttaacaggaagaatcagtttcctagataattaactgtatactagaaccaaaatgaagaatatttatataaatacacaagtttatagcacccaaaaagatataattcataatgtctgacaatcaatcaaaaattaccatgcagaaaatataatcattaaagaatagaaaaatcagtcaactgatactgatccagaaatgacacagatgtaagaattagcaggcaagaatattaatacagttattataactatacattcaaaaagttaagcagatatatgggagacataaaaaaaagaacyagttcctaattctacaaatgaaagctgcaatatgtaggatgaaaaatacactgaatgaaattaatagcagttatgtatttagaagaaaagttagtgagttttaagaaataggaatacaaaccattcaatatgaaatatagaatataattttttttaagtat

SEQ ID NO: 125140 - DNA, 612 bp, Homo sapiens
tgctagccaatatggttattattagaaaccaattacattttcaacttaaaaatagtaatacttattgcagactcaaatgtgcttattctaaaacaagtaaatgtttgcctatggtctgagattctaatccacggagttcattctaatccacattcaacactatcatgtaccagtgggcctcataacccacctagccctgtgatttttcaggttcacttttctaaacttgtgaattaaatatttattttcttagttcagaagaggaaaaaaactcttgtaattgttgcccatttcaggagaaatcttgcatatgaaaacaagagataaatatacacarctgagggctgtggtttaaacaaaatcttgagaatgttttttgaccttatacatttgtgctttagtataacaaaatgatatagacaaaggtaacttttaatagaaccagtcactaaattaaaaaaatgacaaattcttctgcttagctaagcaacagagaaggtaaaatactaattcaattcatcaatttaagcaatactcattaagagccaagtatgtgcttactgaataagctgctaaggtttggtggttacagagtgtgcggtgaaatgatgt

SEQ ID NO: 125141 - DNA, 612 bp, Homo sapiens
tgctagccaatatggttattattagaaaccaattacattttcaacttaaaaatagtaatacttattgcagactcaaatgtgcttattctaaaacaagtaaatgtttgcctatggtctgagattctaatccacggagttcattctaatccacattcaacactatcatgtaccagtgggcctcataacccacctagccctgtgatttttcaggttcacttttctaaacttgtgaattaaatatttattttcttagttcagaagaggaaaaaaactcttgtaattgttgcccatttcaggagaaatcttgcatatgaaaacaagagataaatatacacaactgagggctgtggtttaaacaaaatcttgagaatgttttttgaccttatacatttgtgctttagtataacaaaatgatatagacaaaggtaacttttaatagaaccagtcactaaattaaaaaaatgacaaattcttctgcttagctaagcaacagagaaggtaaartactaattcaattcatcaatttaagcaatactcattaagagccaagtatgtgcttactgaataagctgctaaggtttggtggttacagagtgtgcggtgaaatgatgt

SEQ ID NO: 125142 - DNA, 558 bp, Homo sapiens
gttcacttttctaaacttgtgaattaaatatttattttcttagttcagaagaggaaaaaaactcttgtaattgttgcccatttcaggagaaatcttgcatatgaaaacaagagataaatatacacaactgagggctgtggtttaaacaaaatcttgagaatgttttttgaccttatacatttgtgctttagtataacaaaatgatatagacaaaggtaacttttaatagaaccagtcactaaattaaaaaaatgacaaattcttctgcttagctaagcaacagagaaggtaaaatactaattcaattcatcaatttaagcaatactcattaagagccaagtatgtgcttactgaataagctgctaargtttggtggttacagagtgtgcggtgaaatgatgtctacatcacagtccaacattcacagagtttaaaagcctaccaagaatcaagacagacacaaatacctaacatagacgtctgtatatgataagagagccagagtacaatttaggagaagaaattgtatggaaggaaggttcatttccattagaccag

SEQ ID NO: 125143 - DNA, 558 bp, Homo sapiens
gttcacttttctaaacttgtgaattaaatatttattttcttagttcagaagaggaaaaaaactcttgtaattgttgcccatttcaggagaaatcttgcatatgaaaacaagagataaatatacacaactgagggctgtggtttaaacaaaatcttgagaatgttttttgaccttatacatttgtgctttagtataacaaaatgatatagacaaaggtaacttttaatagaaccagtcactaaattaaaaaaatgacaaattcttctgcttagctaagcaacagagaaggtaaaatactaattcaattcatcaatttaagcaatactcattaagagccaagtatgtgcttactgaataagctgctaaggtttggtggttacagagtgtgcggtgaaatgatgtctacatcacagtccaacattcacagagtttaaaagcctaccaagaatcaagacagacacaaatacctaacatagamgtctgtatatgataagagagccagagtacaatttaggagaagaaattgtatggaaggaaggttcatttccattagaccag

SEQ ID NO: 125144 - DNA, 558 bp, Homo sapiens
gttcacttttctaaacttgtgaattaaatatttattttcttagttcagaagaggaaaaaaactcttgtaattgttgcccatttcaggagaaatcttgcatatgaaaacaagagataaatatacacaactgagggctgtggtttaaacaaaatcttgagaatgttttttgaccttatacatttgtgctttagtataacaaaatgatatagacaaaggtaacttttaatagaaccagtcactaaattaaaaaaatgacaaattcttctgcttagctaagcaacagagaaggtaaaatactaattcaattcatcaatttaagcaatactcattaagagccaagtatgtgcttactgaataagctgctaaggtttggtggttacagagtgtgcggtgaaatgatgtctacatcacagtccaacattcacagagtttaaaagcctaccaagaatcaagacagacacaaatacctaacatagacgtytgtatatgataagagagccagagtacaatttaggagaagaaattgtatggaaggaaggttcatttccattagaccag

SEQ ID NO: 125145 - DNA, 593 bp, Homo sapiens
ttgttccaggtttgggtttgcctatgaaagaaactcatgagagctggaaatgaggagtgaagaggaggtcttcacataaagcaggcttaaggattagacatagcaggtttgacagatgtgatggcttgcagaatcctttatgagctcccactgtccatctggataagatttacagacctttcagaaattcctataagcttgggttctgtgcccacwctctagactgtcaggctaagatctctgatataaaacagacctcttctgatttttgtctagctgcttttctaatatctattcaccaagctcttccaataatagcataaggccctaattaatattaaacttttatcattataatacataggatgtcttctgttttcctgatcaaattctgactactattaaaatataaagaattgtccagaaatatataaaaaaagaatcacacattgatcttctttaaatgaaaatataacaattgtatggactaggatgattacagttgttcagttctgactgttatttgaagaaaaaagcagtaagaagcctcagcaacttaacagaaggagctgccatttactaggagaaaagat

SEQ ID NO: 125146 - DNA, 572 bp, Homo sapiens
gtattcaaacttgaaaagactttaaatatttgtattattagatgtagattatgaaacacatattttaatgtggttaatttttttaaggaatcaaaactatgagtaaagaccaagaaaattgtgctggatggccacttccaccatggctcccctcctatttaagtctgggtactgtgtcacccgaagtcttcaggcacattgttccaggtttgggtttgcctatgaaagaaactcatgagagctggaaatgaggagtgaagaggaggtcttcacataaagcaggcttaaggattagacatagcaggtttgacagatgtgatggcttgcagaatcctttatgagctcccactgtccatctggataagatttacagacctttcagaaattcctataagcttgggttctgtgcccacactctagactgtcaggctaagatctctgatataaaacagacytcttctgatttttgtctagctgcttttctaatatctattcaccaagctcttccaataatagcataaggccctaattaatattaaacttttatcattataatacataggatgtcttct

SEQ ID NO: 125147 - DNA, 479 bp, Homo sapiens
gaatcctttatgagctcccactgtccatctggataagatttacagacctttcagaaattcctataagcttgggttctgtgcccacactctagactgtcaggctaagatctctgatataaaacagacctcttctgatttttgtctagctgcttttctaatatctattcaccaagctcttccaataatagcataaggccctaaytaatattaaacttttatcattataatacataggatgtcttctgttttcctgatcaaattctgactactattaaaatataaagaattgtccagaaatatataaaaaaagaatcacacattgatcttctttaaatgaaaatataacaattgtatggactaggatgattacagttgttcagttctgactgttatttgaagaaaaaagcagtaagaagcctcagcaacttaacagaaggagctgccatttactaggagaaaagattgtggatgagagtgta

SEQ ID NO: 125148 - DNA, 567 bp, Homo sapiens
aaaacagacctcttctgatttttgtctagctgcttttctaatatctattcaccaagctcttccaataatagcataaggccctaattaatrttaaacttttatcattataatacataggatgtcttctgttttcctgatcaaattctgactactattaaaatataaagaattgtccagaaatatataaaaaaagaatcacacattgatcttctttaaatgaaaatataacaattgtatggactaggatgattacagttgttcagttctgactgttatttgaagaaaaaagcagtaagaagcctcagcaacttaacagaaggagctgccatttactaggagaaaagattgtggatgagagtgtagcaaaggtcagaattctgtgaagcttgagatgtttattataatgaattatcttttatactcactacaatttcctaacaattttggggtttatatttttgaaagagatatacctttaattttctttctttgtactattgttaggtaactttgatgtgcagattatactacagtgaaagttgccaatgacaaggcaaagtcacttac

SEQ ID NO: 125149 - DNA, 567 bp, Homo sapiens
aaaacagacctcttctgatttttgtctagctgcttttctaatatctattcaccaagctcttccaataatagcataaggccctaattaatattaaacttttatcattataatacataggatgtcttctgttttcctgatcaaattctgactactattaaaatataaagaattgtccagaaatatataaaaaaagaatcacacattgatcttctttaaatgaaaatrtaacaattgtatggactaggatgattacagttgttcagttctgactgttatttgaagaaaaaagcagtaagaagcctcagcaacttaacagaaggagctgccatttactaggagaaaagattgtggatgagagtgtagcaaaggtcagaattctgtgaagcttgagatgtttattataatgaattatcttttatactcactacaatttcctaacaattttggggtttatatttttgaaagagatatacctttaattttctttctttgtactattgttaggtaactttgatgtgcagattatactacagtgaaagttgccaatgacaaggcaaagtcacttac

SEQ ID NO: 125150 - DNA, 567 bp, Homo sapiens
aaaacagacctcttctgatttttgtctagctgcttttctaatatctattcaccaagctcttccaataatagcataaggccctaattaatattaaacttttatcattataatacataggatgtcttctgttttcctgatcaaattctgactactattaaaatataaagaattgtccagaaatatataaaaaaagaatcacacattgatcttctttaaatgaaaatataacaattgtatggactaggatgattacagttgttcagttctgactgttatttgaagaaaaaagcartaagaagcctcagcaacttaacagaaggagctgccatttactaggagaaaagattgtggatgagagtgtagcaaaggtcagaattctgtgaagcttgagatgtttattataatgaattatcttttatactcactacaatttcctaacaattttggggtttatatttttgaaagagatatacctttaattttctttctttgtactattgttaggtaactttgatgtgcagattatactacagtgaaagttgccaatgacaaggcaaagtcacttac

SEQ ID NO: 125151 - DNA, 567 bp, Homo sapiens
aaaacagacctcttctgatttttgtctagctgcttttctaatatctattcaccaagctcttccaataatagcataaggccctaattaatattaaacttttatcattataatacataggatgtcttctgttttcctgatcaaattctgactactattaaaatataaagaattgtccagaaatatataaaaaaagaatcacacattgatcttctttaaatgaaaatataacaattgtatggactaggatgattacagttgttcagttctgactgttatttgaagaaaaaagcagtaagaagcctcagcaacttaacagaaggagctgccatttactaggagaaaagattgtggatgagagtgtagcaaaggtcagaattctgtgaagcttgagatgtytattataatgaattatcttttatactcactacaatttcctaacaattttggggtttatatttttgaaagagatatacctttaattttctttctttgtactattgttaggtaactttgatgtgcagattatactacagtgaaagttgccaatgacaaggcaaagtcacttac

SEQ ID NO: 125152 - DNA, 558 bp, Homo sapiens
tataatgaattatcttttatactcactacaatttcctaacaattttggggtttatatttttgaaagagatayacctttaattttctttctttgtactattgttaggtaactttgatgtgcagattatactacagtgaaagttgccaatgacaaggcaaagtcacttacatcagacccaaagcaaagtggagccgggtcatgaaaaaggggatcttgtgtgtctgtccacgataagcactatcacaaggactttctataaactcacaagaaatttctgcccacccagcacactctgtttgtccagctcatcctgtaggtgtctctataataggacctatcataaaaaattcctcaagactgcagcatttcagataagccaccctcacaagaacacttgcctagcaatggctgtttctgccagtaagttaacaccagctcctgcatcagaccctgtgaccaatgatgtttgtttcaaaacagcttgcatggacttctttttgtctttacatattttccttacctcaacctcttgggatgcacctatgattgatcatagca

SEQ ID NO: 125153 - DNA, 539 bp, Homo sapiens
attttctttctttgtactattgttaggtaactttgatgtgcagattatactacagtgaaagttgccaatgacaaggcaaagtcacttacatcagacccaaagcaaagtggagccgggtcatgaaaaaggggatcttgtgtgtstgtccacgataagcactatcacaaggactttctataaactcacaagaaatttctgcccacccagcacactctgtttgtccagctcatcctgtaggtgtctctataataggacctatcataaaaaattcctcaagactgcagcatttcagataagccaccctcacaagaacacttgcctagcaatggctgtttctgccagtaagttaacaccagctcctgcatcagaccctgtgaccaatgatgtttgtttcaaaacagcttgcatggacttctttttgtctttacatattttccttacctcaacctcttgggatgcacctatgattgatcatagcacaaatatctcagattataatccttgtttatttccaaataaatttatttctttggagatcc

SEQ ID NO: 125154 - DNA, 539 bp, Homo sapiens
attttctttctttgtactattgttaggtaactttgatgtgcagattatactacagtgaaagttgccaatgacaaggcaaagtcacttacatcagacccaaagcaaagtggagccgggtcatgaaaaaggggatcttgtgtgtctgtccacgataagcactatcacaaggactttctataaactcacaagaaatttctgcccacccagcacactctgtttgtccagctcatcctgtaggtgtctctataataggacctatcataaaaaattcctcaagactgcagcatttcagataagccaccctcacaagaacacttgcctagcaatggctgtttctgccagtaagttaacaccagctcctgcatcagaccctgtgaccaatgatgtttgtttcaaaacagcttgcatggacttctttttgtctttayatattttccttacctcaacctcttgggatgcacctatgattgatcatagcacaaatatctcagattataatccttgtttatttccaaataaatttatttctttggagatcc

SEQ ID NO: 125155 - DNA, 602 bp, Homo sapiens
attttctttctttgtactattgttaggtaactttgatgtgcagattatactacagtgaaagttgccaatgacaaggcaaagtcacttacatcagacccaaagcaaagtggagccgggtcatgaaaaaggggatcttgtgtgtctgtccacgataagcactatcacaaggactttctataaactcacaagaaatttctgcccacccagcacactctgtttgtccagctcatcctgtaggtgtctctataataggacctatcataaaaaattcctcaagactgcagcatttcagataagccaccctcacaagaacacttgcctagcaatggctgtttctgccagtaagttaacaccagctcctgcatcagaccctgtgaccaatgatgtttgtttcaaaacagcttgcatggacttctttttgtctttacatattttccttacctcaacctcttgggatgcacctatgattgatcatagcacaaatatctcagattataatccttgtttatttccaaataaatttatttctttggagwtccactttttctgttattatacattgacattgttattatgaaattggttgggtgatgtgtcttatt

SEQ ID NO: 125156 - DNA, 604 bp, Homo sapiens
tttcaaaacagcttgcatggacttctttttgtctttacatattttccttacctcaacctcttgggatgcacctatgattgatcatagcacaaatatctcagattataatccttgtttatttccaaataaatttatttctttggagatccactttttctgttattatacattgacattgttattatgaaattggttgggtgatgtgtcttattttcttgtctccagaagaatttctgtaacagtgcaattaaacgttctttgcatgtttgctagaactcacctgtaaaattgtctgagcaaccaaagcctggtttttgtgtttagtttttcttttgtgattggggaggggggtttatcgtactgattcaaggtgtgaaggtaacatcattttgattttatacatcttcttcagtccatttaagcatgttacatagcgttgtttgttcttttcatgatattctttacagtagtctcctaaatgttccctctgmttctgccatgagcccctacaatctatttcaactcagaagctatagagtttgtttaaaacatgtaacatattatgccacctttcttactgtaaaacatcccatggtttctcgta

SEQ ID NO: 125157 - DNA, 632 bp, Homo sapiens
caccctcacaagaacacttgcctagcaatggctgtttctgccagtaagttaacaccagctcctgcatcagaccctgtgaccaatgatgtttgtttcaaaacagcttgcatggacttctttttgtctttacatattttccttacctcaacctcttgggatgcacctatgattgatcatagcacaaatatctcagattataatccttgtttatttccaaataaatttatttctttggagatccactttttctgttattatacattgacattgttattatgaaattggttgggtgatgtgtcttattttcttgtctccagaagaatttctgtaacagtgcaattaaacgttctttgcatgtttgctagaactcacctgtaaaattgtctgagcaaccaaagcctggtttttgtgtttagtttttcttttgtgattggggaggggggtttatcgtactgattcaaggtgtgaaggtaacatcattttgattttatacatcttcttcagtccatttaagcatgttacatagcgttgtttgttcttttcatgatattctttacagtagtctcctaaatgttccctctgcttctgccakgagcccctacaatctatttcaactcagaagctatagagtt

SEQ ID NO: 125158 - DNA, 597 bp, Homo sapiens
ttttaggaagcagacgggtgtataaaaagaaaatgaacaaagatttcacttattggggatcaggcataactggatgcctggattgtcctgccacccagctgccaccaataaaatcattcatcactctgcaagagggaccagatgcttccatcatcagtactccttgtttttctgttatctcctttgaggtagctaaaaatggcagccaaaaaaaaatgttgaggcttttctcaagtatatactcatgttattttgcagaagatagggtcaacttcttcagttgagttatctgaaagtgttgggcagtgacaccatgccaaacactgttaaattcatgccattaaaaacagtggagtgttctgcaaagcccgattctctgcagctttaagactggacagtattgaaatattcacaggaatcttccaagcygtgaaaccttaatattaaacagcccttttaattgcaaaggagaaaaaaatggagacacttgtgaaaccttgcattctgagtgctgccacaaataaattaaggaattccagaatttcttcatctacttctgcagtcttaactctgaattaatgactgtatatatcaaac

SEQ ID NO: 125159 - DNA, 597 bp, Homo sapiens
ttttaggaagcagacgggtgtataaaaagaaaatgaacaaagatttcacttattggggatcaggcataactggatgcctggattgtcctgccacccagctgccaccaataaaatcattcatcactctgcaagagggaccagatgcttccatcatcagtactccttgtttttctgttatctcctttgaggtagctaaaaatggcagccaaaaaaaaatgttgaggcttttctcaagtatatactcatgttattttgcagaagatagggtcaacttcttcagttgagttatctgaaagtgttgggcagtgacaccatgccaaacactgttaaattcatgccattaaaaacagtggagtgttctgcaaagcccgattctctgcagctttaagactggacagtattgaaatattcacaggaatcttccaagctgtgaaascttaatattaaacagcccttttaattgcaaaggagaaaaaaatggagacacttgtgaaaccttgcattctgagtgctgccacaaataaattaaggaattccagaatttcttcatctacttctgcagtcttaactctgaattaatgactgtatatatcaaac

SEQ ID NO: 125160 - DNA, 556 bp, Homo sapiens
aagcatgaataacacacactccytaatctccatccattcatgggaggagcacttcacctgccatgctcctgagaatctcgggagtcatagaagtcttctatgaggaggtgatgccaaagcggacaagtgacagaggagtcaaagctagctaggaagagagtagaggtttaaggggaagcatattataagcagaggatattacccacttcagagactcccagaggagaaagagtgtgcgttcaaggggcagatgaggctcagttggactccatagcagatgaaatggagaggggcaagcagtgaggctgccttgcaaggcagggcagagcaggggctgttaaggagtttggacttaatccctgaggcaaggagaagtgatgtaaatgggggagtaacatgatgagattcatagattagagacatggctcaggctgctgtagagaaggcaccaggaagagcagatggctcaatgtgtgtgcagaagacctctccctgagtttagggagaggtttttaaaacagaagaagtttgagtaatttaaatgatgatgggaagg

SEQ ID NO: 125161 - DNA, 556 bp, Homo sapiens
aagcatgaataacacacactccctaatctccatccattcatgggaggagcacttcacctgccatgctcctgagaatctcgggagtcatagaagtcttctatgaggaggtgatgccaaagcggacaagtgacagaggagtcaaagctagctaggaagagagtagaggtttaaggggaagcatattataagcagaggatattacccacttcagagactcccagaggagaaagagtgtgcgttcaaggggcagatgaggctcagttggactccatagcagatgwaatggagaggggcaagcagtgaggctgccttgcaaggcagggcagagcaggggctgttaaggagtttggacttaatccctgaggcaaggagaagtgatgtaaatgggggagtaacatgatgagattcatagattagagacatggctcaggctgctgtagagaaggcaccaggaagagcagatggctcaatgtgtgtgcagaagacctctccctgagtttagggagaggtttttaaaacagaagaagtttgagtaatttaaatgatgatgggaagg

SEQ ID NO: 125162 - DNA, 356 bp, Homo sapiens
gggtatggattctgcatttraaagtgctgaagctgagagactgggtcttggtggaccccgagaggtctgtttctcctctactcattgttcctttttttcccaacagctggcattgctgtttaaatgggttgttctttgctgttttaagttgtttcatagtggtgtgtcaggatttgggttttcttaatactttccaagctggtgacttgagtggtggttagggaggaaatgttttagggctgttctggagctattgaggtcgggtgtctagatactcccagcttgtctgttgaggagaatgctgttctcattgtgctgcctttggtggtgctgtgtgtggctctttagatgtgcgt

SEQ ID NO: 125163 - DNA, 539 bp, Homo sapiens
ccttgtggagctccacaggccccagaggggtatggattctgcatttaaaagtgctgaagctgagagactgggtcttggtggaccccgagaggtctgtttctcctctactcattgttcctttttttcccarcagctggcattgctgtttaaatgggttgttctttgctgttttaagttgtttcatagtggtgtgtcaggatttgggttttcttaatactttccaagctggtgacttgagtggtggttagggaggaaatgttttagggctgttctggagctattgaggtcgggtgtctagatactcccagcttgtctgttgaggagaatgctgttctcattgtgctgcctttggtggtgctgtgtgtggctctttagatgtgcgtggaggtgagctgggggagttaatgagatcttttttaggtgcttttgataaagtagcctgcactacaggattcactgtgacttttttccttaacctatgcatttctctctgctagcttttgctgtctttctcatgcctttgattttcccagctcctc

SEQ ID NO: 125164 - DNA, 539 bp, Homo sapiens
ccttgtggagctccacaggccccagaggggtatggattctgcatttaaaagtgctgaagctgagagactgggtcttggtggaccccgagaggtctgtttctcctctactcattgttcctttttttcccaacagctggcattgctgtttaaatgggttgttctttgctgttttaagttgtttcatagtggtgtgtcaggatttgggttttcttaatactttccaagctggtgacttgagtggtggttagggaggaamtgttttagggctgttctggagctattgaggtcgggtgtctagatactcccagcttgtctgttgaggagaatgctgttctcattgtgctgcctttggtggtgctgtgtgtggctctttagatgtgcgtggaggtgagctgggggagttaatgagatcttttttaggtgcttttgataaagtagcctgcactacaggattcactgtgacttttttccttaacctatgcatttctctctgctagcttttgctgtctttctcatgcctttgattttcccagctcctc

SEQ ID NO: 125165 - DNA, 539 bp, Homo sapiens
ccttgtggagctccacaggccccagaggggtatggattctgcatttaaaagtgctgaagctgagagactgggtcttggtggaccccgagaggtctgtttctcctctactcattgttcctttttttcccaacagctggcattgctgtttaaatgggttgttctttgctgttttaagttgtttcatagtggtgtgtcaggatttgggttttcttaatactttccaagctggtgacttgagtggtggttagggaggaaatgttttagggctgttctggagctattgaggtcrggtgtctagatactcccagcttgtctgttgaggagaatgctgttctcattgtgctgcctttggtggtgctgtgtgtggctctttagatgtgcgtggaggtgagctgggggagttaatgagatcttttttaggtgcttttgataaagtagcctgcactacaggattcactgtgacttttttccttaacctatgcatttctctctgctagcttttgctgtctttctcatgcctttgattttcccagctcctc

SEQ ID NO: 125166 - DNA, 632 bp, Homo sapiens
actgctatccctcttatcctttcattaattttcttctagttttctcacatgtgaatctatttctaaatacatttctttattttgcaagtttttggacttcatataaatgtaaccatattgtatatattcttcttcagcttcttagtttttcactaaacaatatgttttgctgatacttacattcatatgtacagtaatrgttgatttattttaatggctatatattattccattgttagaatacaccaggatttatttttacttattttttttgctggaaaattgggtgtcttttttattttttgatataacaaacaatgttgtaatcattttgtatttacttcctagtccactcctgtaagtttctcttgagtacatactagcaatgaatatgctgagtcactgcatatacatactcacaactttattctataatgtaatattctataaagtagctgtatcagtttatactttaaccagtaatggacaagattttctgttacttcccatctttgttaattattacttttagactctaacttttatcaggctcatggatgtaaaaagcatctcagggtggttttaatttgcatttatctgctcatctatgaagatgagcttcttttcatata

SEQ ID NO: 125167 - DNA, 568 bp, Homo sapiens
ttttctttttaaaaaaatctattggttattaatttgaagccttccttttcatagctgtgctccttaattgggagcaaacatgaatggaccacaacttagccaattttctatatacgatctttgccatcctaatttaaaggaatattaattctttcttttcctctttcattccacaaacctstattgactacatctaagttctaaatggtgcactggatgttgaaaaagttgatgatgagcaagaagaaaattcctgctttcaggagacttacagttcaatatgggaaatataatttgttaaaatataaaagtgcaattgtgttacatgctgtacgaagtacatgttgacatgtgagcatataataaatgggctggaggccagaggattgccaaagagaatgggcctcctgctgagatgaaaagttgagcagggattagtttgcgaaagtggagggacgatcctttctaggcaggaggaagaacatgtacagaatctctgaggtgtgatgcgacaaagtctatataaaaaactgaagaaaggtctaatgtggcttaaatacagaagcta

SEQ ID NO: 125168 - DNA, 568 bp, Homo sapiens
ttttctttttaaaaaaatctattggttattaatttgaagccttccttttcatagctgtgctccttaattgggagcaaacatgaatggaccacaacttagccaattttctatatacgatctttgccatcctaatttaaaggaatattaattctttcttttcctctttcattccacaaacctgtattgactacatctaagttctaaatggtgcactggatgttgaaaaagttgatgatgagcaagaasaaaattcctgctttcaggagacttacagttcaatatgggaaatataatttgttaaaatataaaagtgcaattgtgttacatgctgtacgaagtacatgttgacatgtgagcatataataaatgggctggaggccagaggattgccaaagagaatgggcctcctgctgagatgaaaagttgagcagggattagtttgcgaaagtggagggacgatcctttctaggcaggaggaagaacatgtacagaatctctgaggtgtgatgcgacaaagtctatataaaaaactgaagaaaggtctaatgtggcttaaatacagaagcta

SEQ ID NO: 125169 - DNA, 589 bp, Homo sapiens
tatttgaaattaatatttcaaattaaagcaaaatcacaaatttatactttatattatgaatgagattcacaaaaggagcatgataatatattctgttgtcatcgcatacaaaataataacatatagagtatgaatcaataatttttcaaatacaaagctattacaattaggaatacaaagaaatcataattaggaatacttctacaatattaacacacaatagtggtaacacttgcaaaataaaaagtggtggtttttttttttttttttttyccccgacagagtcttgctcttgttgcccaggctggagtgcaatggtgtgattttggctcactgtaaactccatctcctgggttcaagcgattctcctgcctcagcctccctagtagctggtattacaggtgcctgccaccacacccagctaatttttgtatttttagtagagatgggggtttcaccatgttggccagcctggtcccgaactcctgaccttaggtgatccaccagcatcggcctcccaaagtgctgggattacaggtgtgagccactgtgtccagccagtggtgggtctcatatctcaatgtggact

SEQ ID NO: 125170 - DNA, 589 bp, Homo sapiens
tatttgaaattaatatttcaaattaaagcaaaatcacaaatttatactttatattatgaatgagattcacaaaaggagcatgataatatattctgttgtcatcgcatacaaaataataacatatagagtatgaatcaataatttttcaaatacaaagctattacaattaggaatacaaagaaatcataattaggaatacttctacaatattaacacacaatagtggtaacacttgcaaaataaaaagtggtggttttttttttttttttttttccccgacagagtcttgctcttgttgcccaggctggagtgcaatggtrtgattttggctcactgtaaactccatctcctgggttcaagcgattctcctgcctcagcctccctagtagctggtattacaggtgcctgccaccacacccagctaatttttgtatttttagtagagatgggggtttcaccatgttggccagcctggtcccgaactcctgaccttaggtgatccaccagcatcggcctcccaaagtgctgggattacaggtgtgagccactgtgtccagccagtggtgggtctcatatctcaatgtggact

SEQ ID NO: 125171 - DNA, 589 bp, Homo sapiens
tatttgaaattaatatttcaaattaaagcaaaatcacaaatttatactttatattatgaatgagattcacaaaaggagcatgataatatattctgttgtcatcgcatacaaaataataacatatagagtatgaatcaataatttttcaaatacaaagctattacaattaggaatacaaagaaatcataattaggaatacttctacaatattaacacacaatagtggtaacacttgcaaaataaaaagtggtggttttttttttttttttttttccccgacagagtcttgctcttgttgcccaggctggagtgcaatggtgtgattttggctcactgtaaactccayctcctgggttcaagcgattctcctgcctcagcctccctagtagctggtattacaggtgcctgccaccacacccagctaatttttgtatttttagtagagatgggggtttcaccatgttggccagcctggtcccgaactcctgaccttaggtgatccaccagcatcggcctcccaaagtgctgggattacaggtgtgagccactgtgtccagccagtggtgggtctcatatctcaatgtggact

SEQ ID NO: 125172 - DNA, 585 bp, Homo sapiens
gaactcctgaccttaggtgatccaccagcatcggcctcccaaagtgctgggattacaggtgtgagccactgygtccagccagtggtgggtctcatatctcaatgtggacttttactaactcccgatgcctcattttcctcatcagttgaaaggaatgaatgaaagatttgtgtttttcatattaccaggtagatgataaggagattttaattttctttttttttaacttttattttaagtttaggggcatttgttacataggtaaactggtgtcacagggggttattgtacagattatttcatcacccaggtattaaacctagtacccaatagttatcttttctgcttctcttccttttctcaccctccaccctcaagtagaccccaggtctgttttattctttgtgttcattagttctcatcatttagctcccacttataactgagagtatgctgtatttggttttctgttcctgcattagtttgctaaggataatagaaggtccatccacattccagcaaaagacatgatatcattttttaatggcggcatagtattccatggtgtatatgtacagcctgcat

SEQ ID NO: 125173 - DNA, 517 bp, Homo sapiens
actcaaaaatgatcaaataatagtgcatgcatcaagtgcaatcggaagctcttctggagagggagagaagcttccagttaaggtgacattgaagccaagtcctgtaagataaggaagagttgtatgagagtggggagggaagggggaggtggagggatggggattgggctgggatgggatggagtgagctgcccaggcagggaaaccagcactatacagacctgaacaatgaagatggcacattttgttcagggaatggtgaattaagtgtggcagaaatgctttgtagagacagtaatttgcttgtrtggaattttgcccaagagacctcattacagtttctaattttttgatgttatcatgcatcactgcccttgtcagatagtatcatgatcacaataacatcaagcataatatttcattgattctcacaaaaacaggtgggtgccacagttatccccattatatgcacaaaatgatgaagacttggggttaatgagcgatttgcccaagctca

SEQ ID NO: 125174 - DNA, 213 bp, Homo sapiens
ctgggcgaccgagactccttctcaaaaaaaaaaaaaaaaaaaagccatgtgttgtggcatgcagctgtagtctcagttcctagggtggctgaggcgggaggattgtttaagcctgggaggttgaagttgctgtgagctgtgattgcaccagtgtactccagcctgggcaataaagcaagaccttrtttcaaaaagaaagaaagaaatgagcat

SEQ ID NO: 125175 - DNA, 579 bp, Homo sapiens
ctttttaacatctgacctgtagtactttttcttatgttacatctcaagcacctagaactgtatcaggcacaaaatgtrgctaatgaatattagcagaatgattgtcaatgcagaacctgggaaaagaattaccatgtctcttcccaacacaactggaacagtgccaagggcaggagctaccttctgagtaggaaacagattcccatgtgagcaatgtttctccacctaggccaaaaggactaaaattaagcatgagaagacaaactatgagtgaaaattgaagagccaataaacaatcaattcagggttcccaaatctatggatattagagtaatcagaaaagaatgcagaatagttactatgagttgtttaaagatataaagattataataagaaaatactgggaactaatagatttacaaaatataactcttgatgtaaaaatacatgaatctgtttaacagcagattatgggaagaatttaaccagcatttacttaggagagacaacaagatagaaaatgtgaaagagaggttaagggatgagaattgaatgagaaaatctaatataggaatgact

SEQ ID NO: 125176 - DNA, 474 bp, Homo sapiens
gaattcaagacctggtgataatgcaggaactgataaagtgaagagagctatggtcacattgtggtatgttaggattttaaaaagttcagagaacaatgtctgctgatgctgaggtccacagaggatggagatcgttgaatgtaggggatgatggatgaaattgggaaaagtgaatctgtgagtcaggactcaaggttctgcctctttactccccaaagcatctyaattgtgatattggatatttttaatgtaagacattacctttaagagaatgtctcttgggttacttctatagataactaatctcatcataggcaaaattttcacttgttcaactttctgaagataactgcattttcaggttcttcggagggcaccccatcatgaactgcccctatagatggcattgctatctatatcatttggtttccaagcaacgatgccctcactccgatactctactttctcttgtat

SEQ ID NO: 125177 - DNA, 572 bp, Homo sapiens
acatgagcctgttcccactgcagggtttttattctctcatgcagagccaagtgaaggatgccggtgactattgaagcccaaacacaacaaacccagaagcctggggggaaaaaawtggctttattctcagcatgaaaggcaagaggacctgactgggcaagtggtgggcagattgctgtcacggcccacttccgatgacattaaaccgcaaaacctaggaatgactttgggccctgcctttttcggattttgatttttaccatcctgggtcttccatcctgccagccagccggcaccccagcagttgtgggaggaggaatttgactttgattaaccgagaaaaactgtgcacccgttttctgtttttttctggaactgtgagggttttcccatgccccaggggctccctcacagttgtcctatgccaagcattcccgacaggaatctccagctgggttggagtgacagctggcctccagcaccgcagctccgcaaccaccgctggcgtctcctgaggctcgcgcgccccctgctgggcctgagaggaggcgtccccgctgcggtccggcctc

SEQ ID NO: 125178 - DNA, 572 bp, Homo sapiens
acatgagcctgttcccactgcagggtttttattctctcatgcagagccaagtgaaggatgccggtgactattgaagcccaaacacaacaaacccagaagcctggggggaaaaaaatggctttattctcagcatgaaaggcaagaggacctgactgggcaagtggtgggcagattgctgtcacggcccacttccgatgacattaaaccgcaaaacctaggaatgactttgggccctgcctttttcggattttgatttttaccatcctgggtcttccatcctgccagccagccggcaccccagcagttgtgggargaggaatttgactttgattaaccgagaaaaactgtgcacccgttttctgtttttttctggaactgtgagggttttcccatgccccaggggctccctcacagttgtcctatgccaagcattcccgacaggaatctccagctgggttggagtgacagctggcctccagcaccgcagctccgcaaccaccgctggcgtctcctgaggctcgcgcgccccctgctgggcctgagaggaggcgtccccgctgcggtccggcctc

SEQ ID NO: 125179 - DNA, 619 bp, Homo sapiens
aaactctatacagacctcaaacacatctacaaattcaattttagcttagaaaagatatattgcattttatgtctgggagggttatgagaaagactgcaaaatctttgagcttgtagctatgcctgttctcctttgggttctcataactggcccagtgcctgatgcataaaggacacttggaaagttaatggttgaaatcaaacaagtaatgacttgggggagatatggaaacatgagctagagtattaaaccaagaatataaaatcctagatccctggactttcatttaaacatggcctatcttgttaacaaataaatgagtaaataagtttgtaaaatggaaattgagagtagaaatgccctactaacttgaaaagttggatttcaagaattatcataaagtctaaatatattttaagtttttctaagtggaatgaagcaataagaatatatttcacagtaaaatccaagtttttgacttttagaaatgtaatttcaggtttgcacccctgaaakaatcaagcattatgcttatttagaactgaaatggtaactacaaaaatctatctcatttaatttcccaccactgcctttaatgacctttagcaacctgagccac

SEQ ID NO: 125180 - DNA, 550 bp, Homo sapiens
tttcatttgagaagagtcatgaactctgtgtcttctgggtaagacacggagtttttttctttttcttttctctttgcctgaaaatgtagacaaattttatgtctcaatcttctttagcatctgaacacttgattgatccagttatgctccaaggagaacaatggcaaataaggcaaataggtytctctctcctcacagtttgtgatctactttacaaatgttttctatgacatcgttctctttctcacactctacttccactcacttagaagcaaatattctttcctttgtgctctttcatactttgtatggactttgtttataacctccaattaccttctgacatgggtggagcctggtagccagaagtttcttttgcaggtgaatttggaggacatggcacagggataaattatagctctctaggaaggaggaacaaaagagtgaaagggccctagggaagacaaaacttttagatgcaaatcactgtgggaaatggctgagaatgaaaactccagatgtccagcactaccagggacttgggagaaga

SEQ ID NO: 125181 - DNA, 617 bp, Homo sapiens
actttgtatggactttgtttataacctccaattaccttctgacatgggtggagcctggtagccagaagtttcttttgcaggtgaatttggaggacatggcacagggataaattatagctctctaggaaggaggaacaaaagagtgaaagggccctagggaagacaaaacttttagatgcaaatcactgtgggaaatggctgagaatgaaaactccagatgtccagcactaccagggacttgggagaagaaatatagtgcttagggcatcacagttatgtgttatggaagtttgagcataaaacttttttatctgtatgtttaaatctccttctaatctaaacaaataacatattatttcatttagcacttttgaaaaccacgttggtcttcacctgctaaaatatacactgtttggcacagagtgtttatatctcctgtgtttatcctggagcctgtcatggactaattgctcaagtaatcattgctgcatgtggatgactgaatgaaagactgaagaaacatttcaacatggcagcatcctagacttgggaaagaatgagtagtcctggagrctggccttctggtggctaaagtgtttctgcatgttctacagccc

SEQ ID NO: 125182 - DNA, 613 bp, Homo sapiens
actggtcatcctgtttgaacwtgctccagctcatcagtgacactctggaagcagcttgccctcaactagacatagaaattcagctgcaggctcattgctgtgcaatacataaggaattgctgtacaatacagaaggaagatacagctacctcctttctatggcaaacattccattcatcctgaattattaggatacagagagcctagtttagcctagattagcattcatacctagactgttggtgatctgtggactatttaatatgtaaggcatgatgcacaggctcagaggttataaactgaggttataagcccatatggacagttccatgcttagatatggcaggtaatagtaaataatagcttgaatagtgttatttatagtaaaatatctacctgacagccagttgtggcattaccatgcagttttgggtattttgagacatgtgacccttgtgttaaaattatgtacattggattgactttttttttttttttaaggaattctgggttttggtaaaataaggaggaagtaaaatttttctcatcctaaactttcttttcttttctttttttttttccaattagagcataacaaatcatccctcagagg

SEQ ID NO: 125183 - DNA, 613 bp, Homo sapiens
actggtcatcctgtttgaacatgctccagctcatcagtgacactctggaagcagcttgccctcaactagacatagaaattcagctgcaggctsattgctgtgcaatacataaggaattgctgtacaatacagaaggaagatacagctacctcctttctatggcaaacattccattcatcctgaattattaggatacagagagcctagtttagcctagattagcattcatacctagactgttggtgatctgtggactatttaatatgtaaggcatgatgcacaggctcagaggttataaactgaggttataagcccatatggacagttccatgcttagatatggcaggtaatagtaaataatagcttgaatagtgttatttatagtaaaatatctacctgacagccagttgtggcattaccatgcagttttgggtattttgagacatgtgacccttgtgttaaaattatgtacattggattgactttttttttttttttaaggaattctgggttttggtaaaataaggaggaagtaaaatttttctcatcctaaactttcttttcttttctttttttttttccaattagagcataacaaatcatccctcagagg

SEQ ID NO: 125184 - DNA, 613 bp, Homo sapiens
actggtcatcctgtttgaacatgctccagctcatcagtgacactctggaagcagcttgccctcaactagacatagaaattcagctgcaggctcattgctgtgcaatacataaggaattgctgtacaatacagaaggaagatacagctacctcctttctatggcaaacattccattcatcctgaattattaggatacagagagcctagtttagcctagattagcattcatacctagactgttggtgatctgtggactatttaatatgtaaggcatgatgcacaggctcagaggttataaactgaggttataagcccatatggacagttccatgcttagatatggcaggtaatagtaaataatagcttgaatagtgttatttatagtaaaatatctacctgacagccagttgtggcattaccatgcagttttgggtattttgagacatgtgacccttgtgttaaaattatgtacattggattgactttttttttttttttaaggaattctgggttttggtaaaataaggaggaastaaaatttttctcatcctaaactttcttttcttttctttttttttttccaattagagcataacaaatcatccctcagagg

SEQ ID NO: 125185 - DNA, 477 bp, Homo sapiens
ctagacttttgtagcagcctgaaatttcacaggctataaacagaggtgtgatgtatatatatatatatatatatayacacacacacacatgatatacatgatatacatgatatacatatacatatgattatatttctatgactcagcataagctcatttctatgcttgcatttgaccttgtaaaactgatttcttattggacagtcaagataaattcagtgaaatcagtaatttctctcttcttcccaggattacctaaaagtttcaggaaggttttcacaatgccagtgctaatgggttggggactcttggtctgggtgttgtcattcattgaccctggcattgctgagatatttagggttccttgtggtcttagttatagttttcatgggtcactttgcatctttgttgttccaactataagtcatctttaggctcatcagcactgtaagctacttccccacccttccgctgcaa

SEQ ID NO: 125186 - DNA, 530 bp, Homo sapiens
tagattaatagcaggttaattaggttaatagcaggcaaataaataataactctagttttgccaatgtytcataacaaatgtttcagtgaaagcaaatagttactttcttctttttatgagacattaaagtattccgctgagcaatttgaactgctttgtccctcacacaggactttgtacatcacttggcacattataggttcttaatccatgtttgttggatggattaatgaatgaatgatatggctagttcatcaggtcattttattttcctagttcctaggtaactgtccatatttcctgttatcgaaaaagttcttccaatcagttattctctttgtcgacttttagctgtgacttcctattattgaacataacccagtactctaagtattcgaatttaatacaaaaagaaaatctattggaacatttggtaagagatatttgacttacatattgtgtgtaactctgattggagtttcagcacttctttattgtataggtatgaccaagttggcctttaggaggcc

SEQ ID NO: 125187 - DNA, 530 bp, Homo sapiens
tagattaatagcaggttaattaggttaatagcaggcaaataaataataactctagttttgccaatgtctcataacaaatgtttcagtgaaagcaaatagttactttcttctttttatgagacattaaagtattccgctgagcaatttgaactgctttgtccctcacacaggactttgtacatcacttggcacattataggttcttaatccatgtttgttggatggattaatgaatgaatgatatggctagttcatcaggtcattttattttcctagttcctaggtaactgtccrtatttcctgttatcgaaaaagttcttccaatcagttattctctttgtcgacttttagctgtgacttcctattattgaacataacccagtactctaagtattcgaatttaatacaaaaagaaaatctattggaacatttggtaagagatatttgacttacatattgtgtgtaactctgattggagtttcagcacttctttattgtataggtatgaccaagttggcctttaggaggcc

SEQ ID NO: 125188 - DNA, 613 bp, Homo sapiens
gttctgtgttattttaattgaaattcatgctgatgaatcatttttccttaagtattcttttcttctattaggttataaattactcaaatagctagaaatcagcaatattgtttagaaaataagaactgatttccacamagacccattaatactgtttcctttggaattgtaatactcatctgctcttcagtaacaaagacaggcttctctaacatgacattatcaatgtttgcttcctggaacactagttctttaagatgctccatgaacataatgacccatggtcaattatatctgggaaatcaaatactgtctttatgctactggaacattaatttcacacattgagggtaattcaaagaataggcttcattttgccagtgttgaaggccattttaatttcaagtagcatttcgtgataatataggaacaaaaagatcttcaaattctctgggcattcattgtacttaactttttacttaagagttggtatttatcaatatgatttttgtgttgtatctgagacttatgtggtcccacatgcaggggcagatcaaaattttgttgagcctgaagtgtatacatttttggagtccccttttaaggaaaagaa

SEQ ID NO: 125189 - DNA, 625 bp, Homo sapiens
tactgaacgtctgcaaagcagacattgtgtgcttcatagtttggcatgtcagttgccatttttaaaataaaatcagtggagaatttcaacttgaagcacatataaatgacaataaatagtacttttgcaaactttatttagtatttgcaaataggttccaaatgtccagcttaatttttctgagttcttatttcattcctttctagccatgcttatttttatgtaaaggagaaaacatgcttaattactctaaagaaaagttattttagaaatgataaaagttgaacatatttaaaggaaaaaagcagaataaaattaataattaaaatactaaatttggacaggaaaatggctattgaataagtccaaacatttccakgaaagacataaaggcatccttgtttttaagaaaacatacggcaaactatataaaatgaaatattactaagacttctttggtctcctcatcatacgtcaataatgaggagagctttgcaatgataaagcttttgaagtggcttgtggaatattaaattgtttaagtataattttggcatcaagtgaccttacatattttgaatgttggttatctatgcgttatgtataatgccaccacattattcat

SEQ ID NO: 125190 - DNA, 625 bp, Homo sapiens
tactgaacgtctgcaaagcagacattgtgtgcttcatagtttggcatgtcagttgccatttttaaaataaaatcagtggagaatttcaacttgaagcacatataaatgacaataaatagtacttttgcaaactttatttagtatttgcaaataggttccaaatgtccagcttaatttttctgagttcttatttcattcctttctagccatgcttatttttatgtaaaggagaaaacatgcttaattactctaaagaaaagttattttagaaatgataaaagttgaacatatttaaaggaaaaaagcagaataaaattaataattaaaatactaaatttggacaggaaaatggctattgaataagtccaaacatttccaggaaagacataaaggcatccttgtttttaagaaaacatacggcaaactatataaaatgaaatattactaagacttctttggtctcctcatcatacgtcaataatgaggagagctttgcaatgataaagcttttgaagtggcttgtggaatattaaattgtttaagtataattttggcatcaagtgaccttacatattttgaatgttggttatctatgcrttatgtataatgccaccacattattcat

SEQ ID NO: 125191 - DNA, 619 bp, Homo sapiens
gaccttcggggtgaaaaatcttagcaagcacttcctttgggctcctcatagagctctgattcacgtgagatggatgctgactaaatgcttttgactgcttcgttaaagtgaatgaagaatacttgttttaaaccaatgtttgtgtcccttttgataagagtaagtaggcaaaaggcttagtcaacacatattacttgaacacccagtgtatgccagactctggtagctactgagctgtaattttgaggaatttcayagctcttaagatactaccacttttttactagcaaaaggagaaagcagctgagtaaacaaaggtattatactatatctgcaatttccccttttttcacttccctgaattggacctgtcaatgaccatccataatatatcaattggtagctttctgagtgagtggaaatcttcatagatcactcttgcccttgtgggcatagcaatactacataggaaccttttctgtgaatggatacaagctgtgcttgggctgttctccaaggaatccattagacaaagacatagctgaaaggcacaaaatcaactagtttatgaaaacctggaaaaaggacttaaatgtggcacttagatattggagttagg

SEQ ID NO: 125192 - DNA, 431 bp, Homo sapiens
ctcttgcaactctgtccagatgccaatcaaccatggagagtctgttttccaatttctgcagtgttttctgtctttgtttcttacttttcactttggtttccattstgaggctggaaccatttttcgagcatctgctctcttgaaagaagccccaattttctctttagctttttctaatagtattttattccctgcagttccacccttactcagagattcttaatccaattcaagtaatccacctcaaactgatgcaccagtgtccaccccaaagacactggtggcccaccaattcaggtgatgcatggatcacatataaatgtgacatgccccactgaatgatgattggaactacattatattatttcccagtacccagtcctaactgttctttgagtctgtcccattttcccaccaaaatctttaattct

SEQ ID NO: 125193 - DNA, 596 bp, Homo sapiens
  misc_feature (1)...(596): n = A,T,C or G
nnnnnnnnnnnnnnnnnntattaattaaacacctaccatatgcataatcatggtgctacatgagagcacattcaactttttctctaacatatgtatcctccttccacgtgcccaacaagtacataagttgcacagatattttctagaatttggaaagttcttccatatttagagttggaattcatcatcttaaatttccaaaatttgctcccagttgtatcctcgtatgccaagtattttgccacatacccatacttcgaatactggagatagtagcatggtatgttccttctactccaggtcaatcatctcattactttaacttttactcagatgatgtctgcataggattccatytggagtatcatatagcaatgaaaatgccttgaaaccaaagcctgtgcctttgatttgcccctcagcacctagcagtgtcatgcggatagtgggcactaaacaaatacttttgaatctagtgctaagatgttttgtagataaacttgttaagctcaaaagcagactgaggttttggggagaagtagatgataacccctgtgatcatctcttaactacagttaaggagataggcagagaga

SEQ ID NO: 125194 - DNA, 614 bp, Homo sapiens
atgggttacagacacacagctgttaagcacagggaggaaagaaatacctggaggatacttracctccaaaaaatagagggctgggttcttagactagaatgaactctcagattgctctgatggtattggtggtgatgatgatgatgatgacgatgatgatgattttattgtatcctaggagtcttcacatataatcttccaaatgtgatatttttctcctctccagttttttctctccttccttctctcctttctttcttccaaactaaatttgtttctagcttgaggtaaattcagtggagatgccttaaaaatagtatgagcaagtcagtaacaagagttatgttatatttctagcctcactcatatttcccacttagtatagtaaaaacactggggaactgaagagttatcaccatcatcaacaacaacagcaaccacataataacctgtctgattctgggtgaatcaacatcttcatgtccctctcacaatactagactttatggatgtactccattttaaatactataaaattacattattttaattcttaaatgtttcatacacatcaatatttctttttaaaaaatcaagttaaacaggtatttatt

SEQ ID NO: 125195 - DNA, 614 bp, Homo sapiens
atgggttacagacacacagctgttaagcacagggaggaaagaaatacctggaggatacttaacctccaaaaaatagagggctrggttcttagactagaatgaactctcagattgctctgatggtattggtggtgatgatgatgatgatgacgatgatgatgattttattgtatcctaggagtcttcacatataatcttccaaatgtgatatttttctcctctccagttttttctctccttccttctctcctttctttcttccaaactaaatttgtttctagcttgaggtaaattcagtggagatgccttaaaaatagtatgagcaagtcagtaacaagagttatgttatatttctagcctcactcatatttcccacttagtatagtaaaaacactggggaactgaagagttatcaccatcatcaacaacaacagcaaccacataataacctgtctgattctgggtgaatcaacatcttcatgtccctctcacaatactagactttatggatgtactccattttaaatactataaaattacattattttaattcttaaatgtttcatacacatcaatatttctttttaaaaaatcaagttaaacaggtatttatt

SEQ ID NO: 125196 - DNA, 348 bp, Homo sapiens
atcacagggaaagtatctgaaccacgttctgatggtgaatttgaaatggagatttgcattagagatctcggaagctttctctagctgccagaatagagaatggtttactttatcattttcttttgtactattttaatcatgcttttggtgcatggattgcagtggctaatttccttctttcttccctgtgacttggacctgtgaactgtgcagaagagaaaaccatactacrgccctgggagagaaatatactcaggctttgatggattgtagagaaaatagattctaagaatgaagattttccccaagaaattcaggaagaaaaattaaaatctattgtttattaat

SEQ ID NO: 125197 - DNA, 433 bp, Homo sapiens
tatttctggcttctctgtagtttcttaaattacaactttaaatatgtaaaagtttccagtatacatagcaaggtgatgcaataaataaattaaaaaagaagctgatttgtgagaaagagaggagattagcaacaagctagaaattcacagctgatgtggcaatgaatagtggagtcttcaagcatttgggggaatccagtgcaggtcaaggatggtggattctgaagttttaatattgcatgctaaagtgcaaacccatttggcacatgaccaaatatcagtatggataaaattcagtagctgatgtttatatttttcttgcactcattggaggatttgtctgtgtagcaataaactttccaagacagaatggtagggaagatgcttgaatttgtaatttattgttattcwacttaagcatgtgttttatgcc

SEQ ID NO: 125198 - DNA, 599 bp, Homo sapiens
gtgatgtcaaacaatgggctgagccttccccagtgtcaggaacttacccaaccagaagtcattaagctcggtggtttccctcttgcctccacaagcactcattaggggctgcgaaagaaatgcctttttatgtacattctccctgaagtttcctactgtgtgagattggcatttgggtgcagatttcatcatctgggctccctgccaactgcagtggaatagttcaaacttccagcctgtgaagtctsctggtcagggacctttacgctctgttttgctgaagggtatgacatttgcaagtcagcagaaggaaggtttctgtacttctcgaatatcttggtagaaataaaatctttatgagggagaccctgtgtgggatgatttgagccaaccacttggctttcttacagaatagacaggtataatttccatgtcccaaaccaggtcatcctagtgtagtttgtccatttgacaaatagaaggcaaagaaagagcaagaagcaatgctgaatgcttcggtttcaaagttcagggcaaagagctacaactggaatgttcacattttttcagtactcatcccacgatctgaaattcctaat

SEQ ID NO: 125199 - DNA, 599 bp, Homo sapiens
gtgatgtcaaacaatgggctgagccttccccagtgtcaggaacttacccaaccagaagtcattaagctcggtggtttccctcttgcctccacaagcactcattaggggctgcgaaagaaatgcctttttatgtacattctccctgaagtttcctactgtgtgagattggcatttgggtgcagatttcatcatctgggctccctgccaactgcagtggaatagttcaaacttccagcctgtgaagtctcctggtcagggacctttacgctctgttttgctgaagggtatgacatttgcaagtcagcagaaggaaggtttctgtacttctcgaatatcttggtagaaataaaatctttatgagggagaccctgtgtgggatgatttgagccaaccacttggctttcttacagaatagacaggtataatttccatgtcccaaaccaggtcatcctagtgtartttgtccatttgacaaatagaaggcaaagaaagagcaagaagcaatgctgaatgcttcggtttcaaagttcagggcaaagagctacaactggaatgttcacattttttcagtactcatcccacgatctgaaattcctaat

SEQ ID NO: 125200 - DNA, 531 bp, Homo sapiens
tctccacaaccagagtatggccccttcaaaaaactccatgttatatctgtaaggcatttcatctccctcaattccttcactcagccttaaacacaccttcaaattcttatgcaaaggactcagggaattcaggtgagttcccytgagccatgattttctccaaggagctgatgttgcacattagaactaataggcttcaagtaactgcagcaagactaatatcttctgctaataatgctgtgagtgacttgagtttccaatgagctattatttgtagaaagacattgactttactcttggactcttgaaagtacttgactgatctgagttaattaagccacataagcctcctgaaaggcagagagaagacccaggaagaaaaagaggagggagaagaacaggaaagtgttgactaacactgagatgcacctgcctgctggtccagtaatattatagcaagtggacctcactactgcagccagtgaaaccccagggaaatttacagatcctttgtaacaacagaaagtgtca

SEQ ID NO: 125201 - DNA, 577 bp, Homo sapiens
gggaggatgtacataggtgatatgcaaatactatgccatcttatataaggaacttgagcatctgctaattttctggtttctgaaggaagttctgtarccaattcctcatggatacctagggatgatggtatattgcctttgttaccaaaccaaccggaattttgtttgtttgtttgttttgaggtgaagttttgctcttgttgcccaggctggggtgcaatggtgcaatctcggctcactgcaacctccaactcctgggttcaaacgattttcctgcctcagcctcccaagtagctgggattacaggcattcaccatcacacctggctaattttgtatttttagtagatatggggtttcaccatgttggtcaggctggtctcgaactcctgacctcaggtgatccacccacctcagcctcccaaagtgctgggattacaagcatgagccaccacgcttggtcccagccagaatttatttatccaaatgaatgttgtgcagtaccctgaatttgagctagagaagaaattcagtataatttcttcagttacatctagtgtttaaccaaactttagtat

SEQ ID NO: 125202 - DNA, 530 bp, Homo sapiens
ttatcagtgcacctgccacagttaatttctgtattcttttcatacattccatctgacacatamgagtgcactataatggcttgcctagaactggtaagaagtggtctgtgaatgtatattgaaaaaatgtgggttcataagtaaaagcgtaacgcagatatttgtgtattctgtattcacagcgtaggctgccttttgctttaaatgcatattcatgtatctttgtgtgctaagaatgcatgttagcccttttgaaaagtaggcactattcatacacagtagcttcttggaattaactcatctttgttaacttagtggcacatagtccaaatttttaaaaagcaagacccttgaatatgccaagagaaaatctaaagctagcaaacttaaaaaacaaaacaaaaattacacgtcgtgtacagttatgaatttagaatagcacactttttccattcagatttcatacatttgagccaaattcttatactccatgttttaattttaaaaggataattttaatccaagattta

SEQ ID NO: 125203 - DNA, 530 bp, Homo sapiens
ttatcagtgcacctgccacagttaatttctgtattcttttcatacattccatctgacacatacgagtgcactataatggcttgcctagaactggtaagaagtggtctgtgaatgtatattgaaaaaatgtgggttcataagtaaaagcgtaacgcagatatttgtgtattctgtattcacagcgtaggctgccttttgctttaaatgcatattcatgtatctttgtgtgctaagaatgcatgttagcccttttgaaaagtaggcactattcatacacagtagcttcttggaattaactcatctttgttaacttagtggcacatagtccaaatttttaaaaagcaagacccttgaatatgccaagagaaaatctaaagctagcaaacttaaaaaacaaaacaaaaattacacrtcgtgtacagttatgaatttagaatagcacactttttccattcagatttcatacatttgagccaaattcttatactccatgttttaattttaaaaggataattttaatccaagattta

SEQ ID NO: 125204 - DNA, 438 bp, Homo sapiens
tttcttggtgtttatgtcttacagaaatgcaatctcctattgtacaaatatgcctaatcataaaacagttgcggacagtactgtatttcaaagtgtatttcaagttattcactggggcttttgtgacagattctttcaaatgatcatgctttttgaaaaatagttccttttatgaacagataaatatatgtctaccaaatacaaaacttctaatgtatggaatcaactggtgtgcaatctttttttttccaaagacatatttttgcctaaaggaaaataaggctttgaggctctttttccctctccctttctataaaaagagaaatgatgatattaaaraaagatagaaacaataagatactttatcttcaaagtgcttgataaattcacagaagaaaatagtttctatattcacccattacagattaagaacaaaag

SEQ ID NO: 125205 - DNA, 549 bp, Homo sapiens
aaataaaatgtgcagtatttcacacagtgttccaactacttaccaccatatcaccttcaacatgacataatcttggttgccaaagtagattgctaataaattattatagtacatagaataagacctggactctgttctcaaggtcttgttgttctaattatggcccatggatcagcagcattgatgtcttttggaaatttgtaagaaatgcaaacttactttataatagcttctacccctaaacgactgagccataatctgcatcttaacagaagtcccaggttgatccattcgcatatttaagtttgagaagaagtgatgtaaggcagtgtttcttgaacttgagcattcttaagattgacccagagggcttgttgaaacatgtatacatagattcctgggcccaaaaagtgatttcataggcctggggtatgtgcattgggarttgtcttttccctggacatcttgcagctttggttggatgtcttccagggctgggatattccaagtgtcgtttaggtggttgaactcaattagtttaagattgtg

SEQ ID NO: 125206 - DNA, 579 bp, Homo sapiens
gcagtggcacgatctcagctcactgcaagctccacctcccgggttcacaccattctcctgcctcagcctcccgagtagctgggaacacaggcgcccgccaccacgcccggctaattttgttgtatttttgtagagacggggtttcacagtgttagccagaatggtcttgatctcctgacctcgtgagccgcccgtctcggcctcccaaagcgctgggattacaggcgtgagccaccacgcccagctaggaggttgttctgaagtacctctcaagcaagatgattagaagttgtggcatttgcccaaataacttggcttttgctgcttcactgaaaacaacgcaggctaaattggcttgcagaaaatcagatatattcattcaattgttagaagcccattctccagcaatggcttcagtattctttcaagattctgaaacttgacccaatgacatctcsaacagatgccaatactatcaagataaccatggcaactttatctccaaaaatgtacttaagatataatttgtgtagtatctgaatgtctagtatgcctaagacactgtcaacagattaaaat

SEQ ID NO: 125207 - DNA, 592 bp, Homo sapiens
gaagcccattatcctcactgacacagtaaatagtgttagagcctgaactagaaccaagatttaagaccttattttgtacagttggctgattgtagcacttcacaagctatgatataatttgctaaccagtggtagaattaagaagttctgtgcaaatagaaaatatctcaaaaatctctgaccaaaagcctatacttacccgtttcagaggagatgagagatatattatgagtgggcttaggagtggtggggtaggtacctttatttctatcattgaggttgaatacaacattgaaacttagtcctttatgttcaaatttatttatttctcattattcrtcagtggaccattcaaagatatatttccctgaatttggttttttacctctgccatgatataaacactgtggactttccttaagctggcattttaggtggtaagtacgtattcaatttccatgaaaacaacatcaatgtaaatctgatgaatatctatctatttagtccagtcctaaaatcctaaaatactttcacttttgcagaggcagcacataggaataggactccatttgggaaaaacttgagagttagt

SEQ ID NO: 125208 - DNA, 592 bp, Homo sapiens
gaagcccattatcctcactgacacagtaaatagtgttagagcctgaactagaaccaagatttaagaccttattttgtacagttggctgattgtagcacttcacaagctatgatataatttgctaaccagtggtagaattaagaagttctgtgcaaatagaaaatatctcaaaaatctctgaccaaaagcctatacttacccgtttcagaggagatgagagatatattatgagtgggcttaggagtggtggggtaggtacctttatttctatcattgaggttgaatacaacattgaaacttagtcctttatgttcaaatttatttatttctcattattcatcagtggaccattcaaagatatatttccctgaatttggttttttasctctgccatgatataaacactgtggactttccttaagctggcattttaggtggtaagtacgtattcaatttccatgaaaacaacatcaatgtaaatctgatgaatatctatctatttagtccagtcctaaaatcctaaaatactttcacttttgcagaggcagcacataggaataggactccatttgggaaaaacttgagagttagt

SEQ ID NO: 125209 - DNA, 613 bp, Homo sapiens
ctgtccctactctttggatattaactttggtgcaaaaagttccatgtttgagcgcctatgtttgagttccacttttgatatggcagcatgaggagctctgtggacatgttcctctcagaaactagtgaaaattagtaaaacacacacacaaaactattaaaagtctgtgaaaatagttcaaagggcaaatgatgaaacattgatttaagaaaatgyactaagacgtggtggaaatagtgagagtctatagtatctgaacccagactcactcactccccactcccagctcagtgagacagaaactggactctaggctgatcctctccagaacatggacctctattaccccacaactcccagctgaggagctacctagggcaagatatcaccatttctcatattacttccacctacctgtttctgaggctaagttctgggcaagtgaaggcaaaattggatgttcctttgttttctgctcagtctccactatatagaatgagggctctaccttggacattcatcactaagtattaaaattccaatcacccatatcccatttgttaaggcagtgagtggtttcgtgctgggagagggaagcctagaagacctgaag

SEQ ID NO: 125210 - DNA, 613 bp, Homo sapiens
ctgtccctactctttggatattaactttggtgcaaaaagttccatgtttgagcgcctatgtttgagttccacttttgatatggcagcatgaggagctctgtggacatgttcctctcagaaactagtgaaaattagtaaaacacacacacaaaactattaaaagtctgtgaaaatagttcaaagggcaaatgatgaaacattgatttaagaaaatgcactaagacgtggtggaaatagtgagagtctatagtatctgaacccagactcactcactccccactcccagctcagtgagacagaaactggactctaggctgatcctctccagaacatggacctctattaccccacaactcccagctgaggagctacctagggcaagatatcaccatttctcatattacttccacctacctgtttctgaggctaagttctgggcaagtgaaggcaaaattggatgttcctttgttttctgctcagtctccactatatagaatgagggctctaccttggacattcatcactaagtattaaaattccartcacccatatcccatttgttaaggcagtgagtggtttcgtgctgggagagggaagcctagaagacctgaag

SEQ ID NO: 125211 - DNA, 579 bp, Homo sapiens
tcattaccaagcagggcttcttggcttgggaccacaaggcagccatcccacctcgggcctatcgctctgattgatagtggtgctgtatttctcttaagtggagccccaagagacaaatgaaaagccttctttcattgccactaccaaggtccctgtccctggttcccccaagctggggagggaacataaagccagagctcaccccagggatgctgtgtgcagccagggagygccaagtcaaaatctgcagccagcagtcaagcaggagaggagctcacaccctcagagcactgagagggagcacagctgcaaatgcatggagatagagaggagcttggctaagcaagagcctacctcccaagcacaaagcctcagccctctgaaaacatccagaaatgaagtcagctgattatactcaaactacaccacagttaaaggaacatcagcccacacacatgaaaaagaaatagtgcaagaactctagcaagtatgaaagccagtgtgtcctcttacctccaaacaattgcattagatccacagcaatggttcttaaccagaatgaagtggctgaaatgacag

SEQ ID NO: 125212 - DNA, 581 bp, Homo sapiens
tgatattgaattctcaattttagaagagattacagggcaggattatctccaaaaataaataaataaataaaaccagataaaattaagatcctaagtattaggcaaagggcatgttcattaaattacccgtgtgcccttgggcaagtcacttaacctctctggatcctggttttcttatctcaaatgtcagggaattggcttaggtgatcttaatagtcctttctgtttctaacagtctatgattctacctctattttataaatgtataagctactgaacttagatgtatggcttgtccaaaaatgccaaatctattcaagtacatttccccactccttagaaaacttgaaatctgccatagaatctaagactccctgaactacccatatcagtttagagctgaaggcatttatgtccagagaggcaaaagaacatatataaggtcacatrcaagtttgggattggcatcttagaaggcaagcttctggattcctagtcacaaaggaggctgattcaacacatttccttcccaatcttgctgcctttatgttcagtactgggtgtttttaagaactcttttt

SEQ ID NO: 125213 - DNA, 622 bp, Homo sapiens
aaccaacatgtttaatgatataaaagatgcaggaaaaatagaaaggatgcttttttaaaaaatgccaaagatataaagagaaaacaagtatctcatcaccatgttcctgtacttctttccttcacatctgcaatttgttctccaattaagaacttccagagatgaggatgcagacgtggagctagtcacagaaatgtttgcagttaagacatactgatgttgacattaatagagttattatagtaaagttcattagtttgatatataactttgtataaatttttagtgaaaaaaaatcaggcttaaacaatgaaggatatttattgcatcaaatgtgtaaaatggtgacaggtaacacaagcttcaggtgaggattgatcyagtaaagcaacagtgtcagcaagaaaaacacctggtgtttttctgtatcctctttctacttcagcatgagcttcattctcaggttgatttcctgcatagccataaagtggtttacagtaacaatctgggctatctaccgcctgatatatatccagtgagagacaagctatttgtttattccaactgattctcagagttctgagtctgactctcattgaaccaccttagataacttattcat

SEQ ID NO: 125214 - DNA, 636 bp, Homo sapiens
ttatatttttttaagttgttatactggtatacctgaaggggcaggaagagaagatgcatgtccttgagggccagaaaggagaaggaaggagcatattcctcaaaactagaaaagaggaacaaaatgattaggtctttctattaatggagacatatgtcctgttgggtggcagatcttctgtgaggtagcggaacctsaaaggtgatgaccacatgggggcaccaaaagaggctgaaccttggaccctgcaactccaagccccatcaaagtgtgcctgtgccctaattgtgacacagaaacagcttagccatgggaacttgaagggactttgtgggctgcacacaaagggctgcagagctaaccagtatagatcagcaccttgagggcctctttgatgcactaagatcccgtaggggagccccaataatcacgactgggaatacatttcctgtggcccaatgtgatggtggctttaatgccatacatacattcactttaaaattaaaaaaatgtaaaagtgatcctttttctctgcaactttgccagcatctgttgtttctggactttttaataatcgccattctgactgacatgagatagtatctcattgtggttttgatttgcatttctaatgat

SEQ ID NO: 125215 - DNA, 648 bp, Homo sapiens
taaggcattaggtcagtgtttttgtacatttatgcctttatactatgtaaatactgtgtgctgtttagagaagcaacaagaaagtgatatgagtaagggatatataactattatttatgtttttaatttttctgcaggaaatagatctcttataagatgaaccagaaaatttatcttcccaagatctttgcaaaccaaaattcaaatgtacccagggcactacaattacattcctaataggaatttttacaacttcttaaatagtctagtattgaatatgcttgggggaaaatgtaagtgttaagaaagaacagaaaaaacaaaaaaacaaaaaacaaaaaacaaaaaaaccaaaaaacagtctattttgccactgaagctttttcacatgcaaaaaaccaaacaacaacaaaaacagaaaaccaaccaaactccygcattgttgatagacatacctttttttttcacaagaaaacttttaaaaaagcaatttgcatatttctgcagaaacatgaagctctgtggttcttttggttatgttgcagaattgtgcagaagtctctgcccagcaataaatgaaggcaaacttggaaaggttagctgcagggtctgcaggcagagaagaaggcctggaacctggaaggggac

SEQ ID NO: 125216 - DNA, 648 bp, Homo sapiens
taaggcattaggtcagtgtttttgtacatttatgcctttatactatgtaaatactgtgtgctgtttagagaagcaacaagaaagtgatatgagtaagggatatataactattatttatgtttttaatttttctgcaggaaatagatctcttataagatgaaccagaaaatttatcttcccaagatctttgcaaaccaaaattcaaatgtacccagggcactacaattacattcctaataggaatttttacaacttcttaaatagtctagtattgaatatgcttgggggaaaatgtaagtgttaagaaagaacagaaaaaacaaaaaaacaaaaaacaaaaaacaaaaaaaccaaaaaacagtctattttgccactgaagctttttcacatgcaaaaaaccaaacaacaacaaaaacagaaaaccaaccaaactcctgcattgttgatagacatacctttttttttcacaagaaaacttttaaaaaagcaatttgcatatttctgcagaaacrtgaagctctgtggttcttttggttatgttgcagaattgtgcagaagtctctgcccagcaataaatgaaggcaaacttggaaaggttagctgcagggtctgcaggcagagaagaaggcctggaacctggaaggggac

SEQ ID NO: 125217 - DNA, 590 bp, Homo sapiens
tactatggtgttacagttgcctacagtattcagtgcagccgcatgctgtacaggtttaacctaggagccatatataggctctatagccatataggagccaggtttagccatatagcctaggtgtgtagtaggctacaccatccaggtttgtatgaatacactctacgatgctcacacaaggacaaaatggcttaagggtgcatttctcagaatgtatccccatccttaagctatgcatgactgtaattgagttctactatccattcactagctttcagatgtcaagacacaagaaatctactttgttagttcagttcatgctggagctggtggtaggatcaaaggctgagatctgtgtgaggctgctcatgatgatagcatgatatggaaccagcaatgccctcgtgtagaagccrcagcagctcccctgctggcctgacttgagtgtgattcttggaatcctgaatgttcaacctagagcagtagttctcagcctggctacaaaccagagttgcctggaggggttgtatgaatcccgccatctgtgccccaggtggctactattttacactttgggagtgaattcagca

SEQ ID NO: 125218 - DNA, 618 bp, Homo sapiens
ccctccactaacactggatattacaatttgacgtgaggtttggatggggacaaatatccaaaccatatcagtgtggatgggataaatacaccaattaaaagacaragattgagtgcataaaaaaaagaggcaacaatacatagtctacaaaataactcacttaaaatacatggttatattgagtaaaagaataaaggaataaaaaaagatatgccatgtgtattattcagggttctccagagaaacagaaccaataacataggtatgtatattggctcaagtgattatggaggctgacacattccaaaatctgcagttggtgagctgaagacccaggagagccaatggtgtcattctagctcaagtctgaaggcctgagacctaagagagctgatgataatttcagtccaaataccagcaggcttgagatccaaaaaaagctgatgtttcagtttgagtctgaagaagggaaaaaactgaagtcccagaatgaagcagtcaggcaggaggagttctgtcttacttgtgggagggtcagctttgtgttcttttaaaatttccagctgattgaataaggcccaactacttcagggaggacagtctgctttacttgatcta

SEQ ID NO: 125219 - DNA, 618 bp, Homo sapiens
ccctccactaacactggatattacaatttgacgtgaggtttggatggggacaaatatccaaaccatatcagtgtggatgggataaatacaccaattaaaagacagagattgagtgcataaaaaaaagakgcaacaatacatagtctacaaaataactcacttaaaatacatggttatattgagtaaaagaataaaggaataaaaaaagatatgccatgtgtattattcagggttctccagagaaacagaaccaataacataggtatgtatattggctcaagtgattatggaggctgacacattccaaaatctgcagttggtgagctgaagacccaggagagccaatggtgtcattctagctcaagtctgaaggcctgagacctaagagagctgatgataatttcagtccaaataccagcaggcttgagatccaaaaaaagctgatgtttcagtttgagtctgaagaagggaaaaaactgaagtcccagaatgaagcagtcaggcaggaggagttctgtcttacttgtgggagggtcagctttgtgttcttttaaaatttccagctgattgaataaggcccaactacttcagggaggacagtctgctttacttgatcta

SEQ ID NO: 125220 - DNA, 537 bp, Homo sapiens
agatgtgtggaagagggatcccaaatcaattcataacacctacaaacatagcatctgtgtcaaaggagagagcraagcatgcctctgagattaatgcagactcgaggaccaaaactgtctgccctgccatctggccaggtttcaggtaggcctggggcctgggtaaccggcctgctgccccccacccatggaggaaacacaggcagtggccactggggtttgtgaacgggtggagagggcactgtactgacatgaaataaccacaggctgctccctcggcagtgccccgagctccgacctgagcccaaaggaagctatgccaaggaccagcttcctaggggggatgtagcttcttacccattctacaggtgccccctcccttctcaatcctcatgaggaagaggtggagggccgggacagcccctccttgtagggcgtgtagagctctatgtctcagtcatttggctaaactgagggtcactgagtctgtgggtgacatggaccaggccctgaactccatgcacattctctatgggg

SEQ ID NO: 125221 - DNA, 646 bp, Homo sapiens
acacctgtagaaaagataatcgaaagattgtgctttgtttgtgtaaccaccgcctcctactcagaggctggggctctgctgctcactttggccacaacctgaagtggttccccctcatggtagacccgtgctgcttctctgcttctagaaaccaccaacttccttgggaaggatatccttcctgtctgaaggcgggggagagaccaaatactatcttttgatttctctaatgctaaggtctgtgattctttaataaggaagacacagacctaagtggaagagtaaacatttcttttttttttccccattaagcattatcttaaagggtctcaaaattctgtgacacatttttgatcaagatgtttccattaaaaagtattgattttaaaaactggtacacaaacacacaaaatgaatagtccacaaaacaagtagaaatttcttgaaggatgctttcagagtttgcagataagacatccggcgttagaccccatgtaacatcccatcaggaaaattcacactaaattttaaatctcagaaaaagctactggtagaccatttggcatattcatgcacattcatagaaggaaccyttaactctagggccatttatggcttagcgatgaatttaccattgcttggtaca

SEQ ID NO: 125222 - DNA, 570 bp, Homo sapiens
aaggggatatcggatctggggactggacaccaggcaggagccaagtatgtgggactggagaagggtatccaggcaaagagctcggagtgatgggggaagagaaaaagctggagcatgcaggagcatkcaggagggatgtggccagagacggcagagcgagggcaggcaggcctcagaggtcatggtcaggagcacagtgctcatgggcagagcagtaggaggcccttgagggtttgagcaggggaatgatggggtctggcctgttttttcaaaggatcacactggttgctgctgtttatatgaccttgttggctctctgacctggggcaagttgtttaagctctcaaagcctcagtctcttcgtctgtaaaatggggatgatcacagtacccacctcacaggcatcattggaggctgatgtgtgaaaatctggagagcacttagcaatgtgacccatgcatttcagtgcaaataaactttgctttctcacatcccctcgtccaaagccctcatcctccatcatctgacttgaacctgttgatcctgcctatgcaatgacttcattatttc

SEQ ID NO: 125223 - DNA, 570 bp, Homo sapiens
aaggggatatcggatctggggactggacaccaggcaggagccaagtatgtgggactggagaagggtatccaggcaaagagctcggagtgatgggggaagagaaaaagctggagcatgcaggagcatgcaggagggatgtggccagagacggcagagcgagggcaggcaggcctcagaggtcatggtcaggagcacagtgctcatgggcagagcagtaggaggcccttgagggtttgagcaggggaatgatggggtctggcctgttttttcaaaggatcacactggttgctgctgtttatatgaccttgttggctctctgacctggggcaagttgtttaagctctcaaagcctcagtctcttcgtctgtaaaatggggatgatcacagtacccacctcasaggcatcattggaggctgatgtgtgaaaatctggagagcacttagcaatgtgacccatgcatttcagtgcaaataaactttgctttctcacatcccctcgtccaaagccctcatcctccatcatctgacttgaacctgttgatcctgcctatgcaatgacttcattatttc

SEQ ID NO: 125224 - DNA, 350 bp, Homo sapiens
gggtctgggcagcccctctctcagcctgagggaggctgaagggtctgcagtcccagtcgctcccccatggccaagctggcacttccctccaacaggcacagaatccccagccccagacacctgctccttcctggagctcagcaccaccttcctttcggaacgctgggcctgggcctgtcctcagctgctgctgccctgccgcccctgctgggggtctcctarccctgcccccttggggtctccctccatacccctgtctacactgttctcacccagtccagggcaccatcttctctccccagacactgcacagctgctccagtctcctggacccagaccctccccctgca

SEQ ID NO: 125225 - DNA, 605 bp, Homo sapiens
ggatggggttagccagatgacctgaaggcctctccagccagctcaacccccttaatccagaattactccctgtgccaggctgacggtgtggccagagaggccagggcctgggagggggcctggcagtgggtggtgggaagagatggagtggctgtgtcrggggaaggagagagcaggttgttcctgtacaggtttcgctcctcggatagggggctgcaatgacagcttccaggaaagaccaggcatgtgcctcaccccatccattcttgctcacccctgcggcctcttgaccaatggctgctgtgaccctgtcctcctctgggaatctggtctcggggaggagccctggaccctgacattgactagaaacctgaccccatgtctgagcagagagctcccatctctctgtcagcagatggggaaactgaggacagggcggagagcggcttgcctgtggccacacagtgactgatgatgattggttcctgctcatctcgtgcttctgatgaagaaacttgaaatcataatcctaataataatcagcacatgggcatgtgctgtgtgccaggcacgcactgagcactttacaggtgagatttcatatc

SEQ ID NO: 125226 - DNA, 540 bp, Homo sapiens
ggatggggttagccagatgacctgaaggcctctccagccagctcaacccccttaatccagaattactccctgtgccaggctgacggtgtggccagagaggccagggcctgggagggggcctggcagtgggtggtgggaagagatggagtggctgtgtcgggggaaggagagagcaggttgttcctgtacaggtttcgctcctcggatagggggctgcaatgacagcttccaggaaagaccaggcawgtgcctcaccccatccattcttgctcacccctgcggcctcttgaccaatggctgctgtgaccctgtcctcctctgggaatctggtctcggggaggagccctggaccctgacattgactagaaacctgaccccatgtctgagcagagagctcccatctctctgtcagcagatggggaaactgaggacagggcggagagcggcttgcctgtggccacacagtgactgatgatgattggttcctgctcatctcgtgcttctgatgaagaaacttgaaatcataatcctaataataat

SEQ ID NO: 125227 - DNA, 605 bp, Homo sapiens
ggatggggttagccagatgacctgaaggcctctccagccagctcaacccccttaatccagaattactccctgtgccaggctgacggtgtggccagagaggccagggcctgggagggggcctggcagtgggtggtgggaagagatggagtggctgtgtcgggggaaggagagagcaggttgttcctgtacaggtttcgctcctcggatagggggctgcaatgacagcttccaggaaagaccaggcatgtgcctcaccccatccattcttgctcacccctgcggcctcttgrccaatggctgctgtgaccctgtcctcctctgggaatctggtctcggggaggagccctggaccctgacattgactagaaacctgaccccatgtctgagcagagagctcccatctctctgtcagcagatggggaaactgaggacagggcggagagcggcttgcctgtggccacacagtgactgatgatgattggttcctgctcatctcgtgcttctgatgaagaaacttgaaatcataatcctaataataatcagcacatgggcatgtgctgtgtgccaggcacgcactgagcactttacaggtgagatttcatatc

SEQ ID NO: 125228 - DNA, 540 bp, Homo sapiens
ggatggggttagccagatgacctgaaggcctctccagccagctcaacccccttaatccagaattactccctgtgccaggctgacggtgtggccagagaggccagggcctgggagggggcctggcagtgggtggtgggaagagatggagtggctgtgtcgggggaaggagagagcaggttgttcctgtacaggtttcgctcctcggatagggggctgcaatgacagcttccaggaaagaccaggcatgtgcctcaccccatccattcttgctcacccctgcggcctcttgaccaatggctgctgtgaccctgtcctcctctgggaatctggtctcggggaggagccctggaccctgacattgactagaaacctgaccccatgtctgagcagagagctcccatctctctgtsagcagatggggaaactgaggacagggcggagagcggcttgcctgtggccacacagtgactgatgatgattggttcctgctcatctcgtgcttctgatgaagaaacttgaaatcataatcctaataataat

SEQ ID NO: 125229 - DNA, 603 bp, Homo sapiens
tcacctttttaattctttcatttccacaagtcctgattttatgtactccttaacgtccagctcgtttcaacctactgccatcttatttgagttagacatagtaacttcttgcttgaactcatagagcatttgtttctctttattttccttccttctcacttcccattttttggattgttgtctgttttgttttttacattacgacttttgttccactcctggcagaagttatcatcttggttgcatttttatgttgacaatgctatctgccactcctgaaagtcatcttcttgtgattatggaactttgcatccacaaaatcaaaggcagcatctgcattttgtacayagctgaacaatttttggtgaattcaattgattaacattggcattcctaatataggcatgattgagaaaatttgcaaaaggattattgttcactaattactacatacttactatgctgtaggcactgcattaaatattttacacattgacagtgtcaattgctacttttaatatctaaagaaagagaagccctgagaaaatcaatataaatggcaaaaatacagcttgactttaacatgatcttcaaaattcatat

SEQ ID NO: 125230 - DNA, 557 bp, Homo sapiens
ggagcagtgcttccagtgaaaatgtgaggcagtgcctggctttccctgctatactccaccctcctccastccctggactgcctgccaagaaagagaagggtgagcaatagagaaggaagtgaatcactagcacttcacaagtgctgctgcagaggcctgccatagagagctggctgagacctaggtgctctcctgctgatctgagagggcagaaaaataaataaatagaaatgtcaaaaagaggacagcagcagtgtagggaagggaggcagagaggaacaaccccgggcaggaggagtgtgggtcaaatgtgagaaccaataccctccttccctagctaaagttgttcccccatcagcctcagtttccaccatctctgaggcattcacaggaggaataactggtgtgttaaaatccaccaaccacttatatacaggaaagaaaaaaaaaaagatagggtctttaatcttgttgcagtaaaggaaacacaatggaagataagcgtagagcctctcggtgagaggagtggcaggttttaacagagtttctgcttgtgc

SEQ ID NO: 125231 - DNA, 557 bp, Homo sapiens
ggagcagtgcttccagtgaaaatgtgaggcagtgcctggctttccctgctatactccaccctcctccactccctggactgcctgccaagaaagagaagggtgagcaatagagaaggaagtgaatcactagcacttcacaagtgctgctgcagaggcctgccatagagagctggctgagacctaggtgctctcctgctgatctgagagggcagaaaaataaataaatagaaatgtcaaaaagaggacagcagcagtgtagggaagggaggcagagaggaacaaccccgggcaggaggagtgtgggtcaaatgtgagaaccaataccctccttccctagctaaagttgttcccccatcagcctcagtttccaccatctctgaggcattcacaggaggaataactggtgtgttaaaatccaccaaccacttatatacaggaaagaaaaaaaaaaagatagggtctttaatcttgttgyagtaaaggaaacacaatggaagataagcgtagagcctctcggtgagaggagtggcaggttttaacagagtttctgcttgtgc

SEQ ID NO: 125232 - DNA, 488 bp, Homo sapiens
gaattctttcttgtctcttcctggcttctggtggtttgccagcaatctttgtcattcctctacttgtagcagcagcacttcaatctctgcctccaatatcatgtcattctcacctcatgcatccatgtcttmacatgacattctcttctgtgtgtttctatcccttcttcttataaggtcaccagtcatattggatccctattctaatgatctcctttgaatttgattacatttaaaagatcttatttctaaagaagatcacatgcacaggtactgaagcttcagatttcaacatatattttgggaggacaacattcagcctgtaacactgattattctattataccttcttctgaacttctgaaagttgaagcatcctagctgagtcttcagacttcttcttttgcatactccctcagtaataatcttatcgggtcctaagtctttaaacatcacctcaacattaaagtttccaaacattatattat

SEQ ID NO: 125233 - DNA, 522 bp, Homo sapiens
acatgtccttctattctttctcatcttaggaaatgaaaatactatttctcactgttgctcacattaaaaatttgaataaytttaaactttgttaaaacccagtaaatctgaaatttagcatcctaaatttaccatctagcatcgtctgatatccttgcccagtcatcattgttttttgtttctaatttaactttagcccttgcaatagttctctaattggtcttcctgtttacattattacacattgtattccatcatctgcaaactaaccacagtagtcattttcatgttcaaaacttttattggcttctcattacacatagaacaaagttcatatttttaaactctaaacaatattgttctatgtaatctagcattgcatcctcctcctcaatctcacttccttcccttcttcctgttgctcactccactagctttctagcttctgtttgaataagtcaagcactttcctacctcaagggctttgcaatagttcctttctgccgggcacagttttctcaa

SEQ ID NO: 125234 - DNA, 522 bp, Homo sapiens
acatgtccttctattctttctcatcttaggaaatgaaaatactatttctcactgttgctcacattaaaaatttgaataactttaaactttgttaaaacccagtaaatctgaaatttagcatcctaaatttaccatctagcatcgtctgatatccttgcccagtcatcattgttttttgtttctaatttaactttagcccktgcaatagttctctaattggtcttcctgtttacattattacacattgtattccatcatctgcaaactaaccacagtagtcattttcatgttcaaaacttttattggcttctcattacacatagaacaaagttcatatttttaaactctaaacaatattgttctatgtaatctagcattgcatcctcctcctcaatctcacttccttcccttcttcctgttgctcactccactagctttctagcttctgtttgaataagtcaagcactttcctacctcaagggctttgcaatagttcctttctgccgggcacagttttctcaa

SEQ ID NO: 125235 - DNA, 609 bp, Homo sapiens
ccctttcctccatcagactgcagccctatgaggatcaggatttttgtctgtttttagtatatttaaaaaattcctgcttaatacataggagttattcaaaatatttctgaaaatggagtaatttttatttattgatacatacctagtatttatcagaatgcctggcataatataggtttcagtaggtatttgctcaatgaatgaagagtttcttaatgtaaactgaataaacagaaacaawttattaggaaatgtaatttagatttaaaaggcctctgttgtttacaaatgaattctaatcaggtaggtactagcagctcctcagggaggtaaaagctatcatttagaatgtggctgccctttctgggtagctttttgttttttctgatcataatggcatgcaaaaagataatacaagaaagtaccaatgctaaggcttacattggtaaagagagagagaatattactcttcagcaattgttcattgttatcagtactggatttgattacggatataggatttatagctctaaatttggagctctaaagaaacctttagttttgaaataactgtaagaatttgtaactcttgagtttccaatattaaat

SEQ ID NO: 125236 - DNA, 609 bp, Homo sapiens
ccctttcctccatcagactgcagccctatgaggatcaggatttttgtctgtttttagtatatttaaaaaattcctgcttaatacataggagttattcaaaatatttctgaaaatggagtaatttttatttattgatacatacctagtatttatcagaatgcctggcataatataggtttcagtaggtatttgctcaatgaatgaagagtttcttaatgtaaactgaataaacagaaacaaatyattaggaaatgtaatttagatttaaaaggcctctgttgtttacaaatgaattctaatcaggtaggtactagcagctcctcagggaggtaaaagctatcatttagaatgtggctgccctttctgggtagctttttgttttttctgatcataatggcatgcaaaaagataatacaagaaagtaccaatgctaaggcttacattggtaaagagagagagaatattactcttcagcaattgttcattgttatcagtactggatttgattacggatataggatttatagctctaaatttggagctctaaagaaacctttagttttgaaataactgtaagaatttgtaactcttgagtttccaatattaaat

SEQ ID NO: 125237 - DNA, 609 bp, Homo sapiens
ccctttcctccatcagactgcagccctatgaggatcaggatttttgtctgtttttagtatatttaaaaaattcctgcttaatacataggagttattcaaaatatttctgaaaatggagtaatttttatttattgatacatacctagtatttatcagaatgcctggcataatataggtttcagtaggtatttgctcaatgaatgaagagtttcttaatgtaaactgaataaacagaaacaaattattaggaaatgtaatttagatttaaaaggcctctgttgtttacaaatgaattctaatcaggtaggtactagcagctcctcagggaggtaaaagctatcatttagaatgtrgctgccctttctgggtagctttttgttttttctgatcataatggcatgcaaaaagataatacaagaaagtaccaatgctaaggcttacattggtaaagagagagagaatattactcttcagcaattgttcattgttatcagtactggatttgattacggatataggatttatagctctaaatttggagctctaaagaaacctttagttttgaaataactgtaagaatttgtaactcttgagtttccaatattaaat

SEQ ID NO: 125238 - DNA, 565 bp, Homo sapiens
aagccgacattcaaattcaagagatgcaaataacccctgcaagatactatatmagatgaccatcccaaagactcataattttcagattcttcaaggttgacatgaaagaaaatatattaaaggcagctagaaagaaaggacaggtcacctacaaagggaaactcatcagattaacagtgactgtttcagcagaaacactccaatctgaaatagattgggggcctatattctgcatttttaaagaaaagaaactccaaccaataatttcctacccagccaaactaagctttataagcaaaggagaaataagacccttttcagacaaggaaatattaagggaacctgttacaaccagacctgccttacaaaacgtacttgagggagttctaaacatggaaagcaaagaccattaccagccaccacaaaaacaaacttaagtacataggttatggacactataaaacaaccacataataaagtctgcataataaccagctaacaacacaaagataggatccaattcccttcccccacccccccgtgaatattaaccttgaaagtaatg

SEQ ID NO: 125239 - DNA, 565 bp, Homo sapiens
aagccgacattcaaattcaagagatgcaaataacccctgcaagatactatatcagatgaccatcccaaagactcataattttcagattcttcaaggttgacatgaaagaaaatatattaaaggcagctagaaagaaaggacaggtcacctacaaagggaaactcatcagattaacagtgactgtttcagcagaaacactccaatctgaaatagattgggggcctatattctgcatttttaaagaaaagaaactccaaccaataatttcctacccagccaaactaagctttataagcaaaggagaaataagacccttttcagacaaggaaatattaagggaacytgttacaaccagacctgccttacaaaacgtacttgagggagttctaaacatggaaagcaaagaccattaccagccaccacaaaaacaaacttaagtacataggttatggacactataaaacaaccacataataaagtctgcataataaccagctaacaacacaaagataggatccaattcccttcccccacccccccgtgaatattaaccttgaaagtaatg

SEQ ID NO: 125240 - DNA, 565 bp, Homo sapiens
aagccgacattcaaattcaagagatgcaaataacccctgcaagatactatatcagatgaccatcccaaagactcataattttcagattcttcaaggttgacatgaaagaaaatatattaaaggcagctagaaagaaaggacaggtcacctacaaagggaaactcatcagattaacagtgactgtttcagcagaaacactccaatctgaaatagattgggggcctatattctgcatttttaaagaaaagaaactccaaccaataatttcctacccagccaaactaagctttataagcaaaggagaaataagacccttttcagacaaggaaatattaagggaacctgttacaaccagacctgccttwcaaaacgtacttgagggagttctaaacatggaaagcaaagaccattaccagccaccacaaaaacaaacttaagtacataggttatggacactataaaacaaccacataataaagtctgcataataaccagctaacaacacaaagataggatccaattcccttcccccacccccccgtgaatattaaccttgaaagtaatg

SEQ ID NO: 125241 - DNA, 565 bp, Homo sapiens
aagccgacattcaaattcaagagatgcaaataacccctgcaagatactatatcagatgaccatcccaaagactcataattttcagattcttcaaggttgacatgaaagaaaatatattaaaggcagctagaaagaaaggacaggtcacctacaaagggaaactcatcagattaacagtgactgtttcagcagaaacactccaatctgaaatagattgggggcctatattctgcatttttaaagaaaagaaactccaaccaataatttcctacccagccaaactaagctttataagcaaaggagaaataagacccttttcagacaaggaaatattaagggaacctgttacaaccagacctgccttacaaaasgtacttgagggagttctaaacatggaaagcaaagaccattaccagccaccacaaaaacaaacttaagtacataggttatggacactataaaacaaccacataataaagtctgcataataaccagctaacaacacaaagataggatccaattcccttcccccacccccccgtgaatattaaccttgaaagtaatg

SEQ ID NO: 125242 - DNA, 617 bp, Homo sapiens
gccagagatataagattctttgctagcctagaagtaaggtgggtccagccagactgaccttcatctaagagtttccatgttggttcccatggaggtgatagattatagttgtctaaggacatgaaccctgccctgtttacagtagagacacagtagtgcttgctggactatgctatgtgagtgcacggggcgggtggtatacagtcgtcyccacccgacacagtcagtactaattctgaccttccatctgaccaccacaccacgaccagatattgctttcttcttttattcggaagcagacacagggtgggaggcagtgcgacacctcctggtgagaaccaggataacagcagtcagagtcagggacaccaccacagccaggcctacgcccagcagcaccactgaggtgtcagaaggcaaagcccactgctctacttcatggtcacccctcctgtccaggaagatcagtggccccacggtgacatctgcttcttctgtcactgtgaaaggagaacacacaaccaagggtcatcttagtccctaaccgggaactgggttggaggttttattctgcctcagtgggctaaactaatatgttgtcttttttgtgtgggcta

SEQ ID NO: 125243 - DNA, 605 bp, Homo sapiens
tataagattctttgctagcctagaagtaaggtgggtccagccagactgaccttcatctaagagtttccatgttggttcccatggaggtgatagattatagttgtctaaggacatgaaccctgccctgtttacagtagagacacagtagtgcttgctggactatgctatgtgagtgcacggggcgggtggtatacagtcgtccccacccgacacagtcagtactaattctgaccttccayctgaccaccacaccacgaccagatattgctttcttcttttattcggaagcagacacagggtgggaggcagtgcgacacctcctggtgagaaccaggataacagcagtcagagtcagggacaccaccacagccaggcctacgcccagcagcaccactgaggtgtcagaaggcaaagcccactgctctacttcatggtcacccctcctgtccaggaagatcagtggccccacggtgacatctgcttcttctgtcactgtgaaaggagaacacacaaccaagggtcatcttagtccctaaccgggaactgggttggaggttttattctgcctcagtgggctaaactaatatgttgtcttttttgtgtgg

SEQ ID NO: 125244 - DNA, 568 bp, Homo sapiens
tttaaaaaataataaatgggaaaattaatgtaattttctgtattaayaggctgaataagaaaaattatattgtcttttcaaaaaatactgtaaaaacaataaaattcatcctccattcccactaaaaattcacagcattctaggaatagaaaagaatgtccctaccttaacaaagggcaactacaaaaacttacggctaacatcatacttgaagataagtgggtaaatgctttcccccaagactggaaaaaatgtcaacagttcctctcgcaccacttgtattagtgtgctctcacgctgctaataaagacatacctgacactggctaatttataaaggaaagaggtttaatggactcacagtttcacatggctgcggaagcctcatggtcatggtggaaggcgatggaggagcaaagtcacatctcacatggtggtaggtaagagagcttgtgcaggggaactcccatctgtaaaaccatcagatctcgtgagatttattcactactgtgagaacagtctgggggaaactgccccatgattcagtgatctccacctggccctgccct

SEQ ID NO: 125245 - DNA, 603 bp, Homo sapiens
aggaaggagcaggcagcatctttgctgttctgcagcctccactggtgatagctccaggtgcaggagggaccccagcaaatagggtctggagtggacccccagcaaactgcagcaaccctgtggaagaggggcctgactgttgaaagagaaacaaacagaaagcaacaacaacaacatcaacaaaaaggaccccacaaaaacccaatccaaaggtcaataacatcaaakattgaaggtaggtaaacccaagaaaatgagaaagaaatcaatgcaaaaaggttaaaaattcaaaaagccagagtgtctcttctcctccaaatgatcacagcacctctccagcaagggcacagaactgggatgaggctgagatagataaattgacagaattaggcttcagaagataggtaataacaaactttgctgagctaaaggagtatgttctaatccaatgcaaagttctctcagtggaaaccctacaagttagaagagattgggggccaatattcaacattcttaaagaaaagaatttccaacccagaatttcatatctggtcaaactaagttttataagtgaaggagaaataaaatcctttttagacaacc

SEQ ID NO: 125246 - DNA, 520 bp, Homo sapiens
atcttcaagtacagaagttctttcttctcctttgtttaatctgttgttgaagtgcttgattgtatattttaatttcattcattgaattcatcagctgaggatttccatttggctctttttaatgatatctaccatttagttaaatttcttattcaaatcataaattattttctaatttcattgaatgttgtatctgtattctcttgtaactcactgagtttccttaagattattattttgaattctttttytggcattttatatatttccttatgattgagatctgtcataggagaattattatttttctttggaggtgacatgtttctttgcgttttcaaggttaatgtgttgaggtgtctctatgttgatttctatacatctggtgggaaaaaaaatcacctcttttgcttgtatggagtaagttttgaagcaaaagactcattcatgtgaatgggcctcagggcatcagttcagtggggtgcattgccctgggctctagatggatgcagtaatgtag

SEQ ID NO: 125247 - DNA, 520 bp, Homo sapiens
atcttcaagtacagaagttctttcttctcctttgtttaatctgttgttgaagtgcttgattgtatattttaatttcattcattgaattcatcagctgaggatttccatttggctctttttaatgatatctaccatttagttaaatttcttattcaaatcataaattattttctaatttcattgaatgttgtatctgtattctcttgtaactcactgagtttccttaagattattattttgaattctttttctggcattttatatatttccttatgattgagatctgtcataggagaattattatttttctttggaggtgacatgtttctttgcgttttcaaggttaatgtgttkaggtgtctctatgttgatttctatacatctggtgggaaaaaaaatcacctcttttgcttgtatggagtaagttttgaagcaaaagactcattcatgtgaatgggcctcagggcatcagttcagtggggtgcattgccctgggctctagatggatgcagtaatgtag

SEQ ID NO: 125248 - DNA, 525 bp, Homo sapiens
aactgcacaataagagaactaatgtaaagtgagagaatagtgattgcttggggctgagatgaaggatttgtatcaaaagggcagagaagagcttgttagggtaattgaaaygttctgtatcatgatgtggaggtgtttacatgggtgtataagcttttgagaacttatcaaattatacacaaatatgtacattttattatatggaaattatatctcattaaagttgatacaaaacaagaatccagaactctattttgacatctggtggacatcgctccaatcatgattccatgtctctctgcatatacagaaagaaagttaaatttgtatagctagagaactgcttagattaggttgaaagataaaattttatgagaatatcatatatgttttaaaagcaagttttagctatatttactaataaaaagaaaggaaactgatgaagctaaagaagttcaggaaaatatttctcataaagattagtttccaagaaactacattactacatatcctcaccctgtgagg

SEQ ID NO: 125249 - DNA, 541 bp, Homo sapiens
tttgggtatcttttcagcaacacaacagcccactcctggtaccaaaatctgtattagtcagggttctctagagggacagaactaataggataaatattatatatgtatatatatatgtatatatgtaaatgggagtttattaaatattaactaacatgatcacgaggtccccacaataggctgtctgcaagctgaggaccaaggagagccagtccaagtcccaaaactgaagaacttggagtctgatgtttgagggcaggaagsatccagcatgggagaaaaatgtaggctggaaggctaagccagtcttgccttttcatgtttttctgcctgctttatatttgctggaagctcattagatggtgtccacctgattaagggtgggtctgccttccccagcccactgactcaaatctcctttggcaacacccacacagactcacctagggttaatactttttacagtccttatttctgcagctggtcatgtggtcgtagctggtattgatgactaccttcttctatcacccactgtgtattc

SEQ ID NO: 125250 - DNA, 557 bp, Homo sapiens
tataagcacatgttcattgtagaaaaagtagagaatatcaagaagaaagcaataaaaagggagcacctataatcccaaaaccaattagataaccattagtaaccttttaaagtgtactgtctagatgttttcatatgcwttaattgtaaaaataagggagaaggaattctactctatataattttataacctgttttcattaacttgacagcaatttcaagcctaatgacatagcaccatagacattatttatgatttatttaaccttattgttggatttctggatttctttccactttatctcaataataaacacttccacaatgaacatgcttgtaggttaatctttgtacacatcctaaattttattatgatagatttttagaatgtaattgaggagacaaggaataggaacttttttaagtttgtcaaaacagttccaaatttccctacagaaatttggtatctgcaaagtgtgagactgctcgtacccatagtgtggttatttgtactgatggaaacatttttctcttaatttatgtcactcatattgccac

SEQ ID NO: 125251 - DNA, 526 bp, Homo sapiens
aaaacaggaatgcagtcacagtgcacatataactcaacacaaagcaacattgtttttaacctttattcagtgcttaataggcacaagatattattatgctgagaatcatacatgattttctcatacaatcctttaaaagaacttaactaatgataaactccgagccataggttgataattcattcaaagttgcacagctaacatattcagcagccaaggctgagcctgtgtttctggctgccctaggctttcctaccttatttactgaacatttactaccatctattttgagcaatgcactgttctaggctaggagagaggtagaaaatcaggaaagaygtagtttctcctctcaacatccttatgttccagcaggggaaatcagaccctatataataatactagcatctggtagaatgcaatctgcactcaatgaatgccaaccaaacactgatagagcacagaggagaactccagctgaggagaaagtagggcttccaggaggaactggcatttgaactgcact

SEQ ID NO: 125252 - DNA, 593 bp, Homo sapiens
gctgtgacatattatgaaaaccttgggtctctcatttgatataggagccagcttatgttttgaggtggatttcaccaagacctaacaatagctctcatgtactcagaggcaatgtagtgaggtggttaagagtatgccttctggagccctggtacctgggttcagatcctggctctgctgtctgtgacctgcgtgacaatgggcaagttacctaacgtggcctattgttgcaaaatggccccaagaatctccttcattataaccctgccttttgcaatgtgatttgctattgagagacagattttatttcctcatgccatgaatctgggctggctttttgacctggtgtgatgaacaaactatggcagaaccaaaagtgatccacccccaaggttaggcctcaggagccctgaaatgcttcacttgttctcctggaatgctgccaccaccatgaggacaaggccagattaatctgcaagggaattaaagatcacatggcccactcaccccctcccagatgaggagtcratgaccaggaatgtgaatgaggccgttgcagactccccaggccccagtaagccaattgctaattg

SEQ ID NO: 125253 - DNA, 431 bp, Homo sapiens
cacacaacctaaatccctcacatacagttcacaatacagtttgcattcctatgaraatataatgcccgtcactgatctgacaggaggtggagctcaggtggtaatgagagtgatagaaacaggctgtaaatacagatgaagcttctctcatgcacccacagctcacctcctgctgtgcaggccagttcctaacaggccatggactggtagcggtttgtgatctggggttagtgatcgctgctttagaggtttaggtgcttcttcatctaaccatcctgaaggaagaatgaatggaaaaggcacattgacaccttaatcaccttcaaccagaagacacatacatcacttctgctcccattccattgatgatcattcgtctcatggcctatttagatacaaccaaatctgagaaatgtagttactggctgggc

SEQ ID NO: 125254 - DNA, 616 bp, Homo sapiens
attttgctatattaatactagaaaggcttgtgtcacatttaatcatctaatgcaagtgggcagaggtgctttgtctcatatagccatgcaaaccaagatgccatcttttcagaaaagggtttctcaaccttggtgccattgacatttgattcgataatttttttttttttggatggggatggggggatgggagaggactttctttgcgatgatgaaatcatgttttaaaattagattatggtgatggctgcacagctctgtaaatatactaataaccatggaattgttcactttatttttttattatttattttattgtactttaaggtctagtacatgtgcacaacgtgcaggtttgttacatatgtatatatgtaccatgttggagttctgcacccattaactcatcatttacattaggtatttctcctaatgctattgtggcaactgtcctgtatattgcatgatatttatgagggtcccaagattctatccattagaatacaatagtatcatcccagttttcatraacacaaatttctccagatgtggtcaggtgatccctgggtggaaaagggaaattatgtcattaggaatcattgatatagaaactata

SEQ ID NO: 125255 - DNA, 600 bp, Homo sapiens
aaatctgcaatttcacattatattttttaccatactaagtgaattgtattactaattgagatggttactagcagacacaattgaaagtcatatctgatatatttcagtgatgttgcaaatgttcataaggggaaaagtgatgtctttatgttatctttgtgaaacatttggacactggctgcttgaagaaggtattgaccacaaaattgccaccttcattgtaatagaatcgtaggaatcaatcaatcttttggatcacatgtttagaaagctggcaarggaaagttaataattcctgactgcatataaagaataacaagaaaaagttaaaataactaatttttaaaatttataattggcacatattagtgaatactggtggggcacagtgtgtttcaatgcatgtatacattgcataatcaccaaatcagggtaattatcatatgcatcactttaaacatttttttgtagtaataacacacaaaattttctcttctagctacttgaaatatacactacattatatttgcaggaaaataccagtctaaagtacagtgagctatcacctcaccccagttagaatggctattatcgaaaaag

SEQ ID NO: 125256 - DNA, 600 bp, Homo sapiens
aaatctgcaatttcacattatattttttaccatactaagtgaattgtattactaattgagatggttactagcagacacaattgaaagtcatatctgatatatttcagtgatgttgcaaatgttcataaggggaaaagtgatgtctttatgttatctttgtgaaacatttggacactggctgcttgaagaaggtattgaccacaaaattgccaccttcattgtaatagaatcgtaggaatcaatcaatcttttggatcacatgtttagaaagctggcaagggaaagttaataattcctgactgcatataaagaataacaagaaaaagttaaaataactaatttttaaaatttataattgrcacatattagtgaatactggtggggcacagtgtgtttcaatgcatgtatacattgcataatcaccaaatcagggtaattatcatatgcatcactttaaacatttttttgtagtaataacacacaaaattttctcttctagctacttgaaatatacactacattatatttgcaggaaaataccagtctaaagtacagtgagctatcacctcaccccagttagaatggctattatcgaaaaag

SEQ ID NO: 125257 - DNA, 609 bp, Homo sapiens
tgtgaggcagtgaactcaggactgccctgttatagaagaaaacaaaactaaaccaaacttagctgatgcctgcccatggaggcagaatttgaatcatccctagccagaggggaatagtcatcatagtggtccacaccaagcctccccactattttctaaagtgctctgggactctaaattaatttggaagacagtctaggccaaaagactgcaactcttaggcaagtcctagtgctaaactgrgccgagagccattaaactgggaaggcaaacagcttactgagccactagctggagcagctaagataatgctggcatcaccctttcacagccccaggcttcacaacaggtagctcctctcaaggagatgacaggaaagaatggggaggactttgtcttgcatcttggataccagctcagccacagcaagatagggcaccagtcaaagtcatgagtcaccctgtccaagccctggctcctgggcaacattttgggacatgttcttgaccagaagagaagctgctgccttgaagaaaaaaacccagttctggcaggattcatcaccagctaactgaagagcccttgagccctgaatcactagcagcaata

SEQ ID NO: 125258 - DNA, 584 bp, Homo sapiens
aaaacacagtagaccagaaaataggamgagaagaaaagctagtttctccttccttttcttgcttctagaggcacctataaaagtagttatctccttctgtgttcccaatttcaaccagaacttcctgtctggtggatcatatatggagctctactatgattgaaggtgggcccttcctttccaattctaggactaactgggcagaaccccagcagcgcagaaccaaatgtctggggtcctactaacaccatctcctttctttactcacctttcccagttctaagaatggcagtggcttcctgaagttactaatctctagatagctctcttgtttatttcttctcctccaaaactctttttcccccttatttccttccaatgtctttacataactaattctctttagtaaataaaaaaataggagctttattttattattttctctaactgaatcctgtatgttaacggaatgaatagaaaattgaatagcaaacacaagtctatataagtaaggaaaatggtaggcagaacagaacctctacatcatagtttaccttaagcttcactaagaatttaaaacttac

SEQ ID NO: 125259 - DNA, 540 bp, Homo sapiens
acagagagatctcatgtatactttatccagtgataatagtgaaactatagtatagtaccataatgaggatatggacattgatacaatgatactatattctgatcttgttcagattttgccagttttacttgttgtgtgtatctgcacaggtatttagttctataaaattttatcrcatgtatatgtttatatgtttaacaacatactcataatatagaatatttccatcatcataaggactctttatgctgccgtttttaaatgacactcactttcctcccatgcctatcttctcctttaacctctagcaaccactaatctgttctccattttcataattttgccatttcaagaatgtatttaaatggaatcatacagtcatatagaatcatatagtagatagcttttctgacttagtctaatcccctgcggttcattcaagtgggtgcacatagcaatagtacactcctttttattgctgagtagtattccatgcagtgcaggtatcacaatttgtttaaccgcttacctgttaatggg

SEQ ID NO: 125260 - DNA, 582 bp, Homo sapiens
atctttccaaaatactttcacgatgtaattcacttatgtataatttagataaccatataataaagaaagaatataattaggaatgcrattccagttttattctgccaggtagaaatagcttaagtaaaggtattcttcagaaactctccaaatactattttgatgtacctaacacagaagtgatacaataactccaccaaagactccataacattttgaggggttagacatttaatttagtgtttgtgcatgttgcttggttttggttattcagaaagagagagatattaaaatctcctgatgggtgataaaggtattaaagttaaatttgttggaagctttgttgtctaatgaaaaacatctggctatttggaagcaggcagatgctcaaataaatttttcatttttcataaaatgtgcctgccacttggctgaaatcttagtatgttagatataaatgtttcattcatccatatatttaaataatatgagtaggttaagatagcagaattacagaggtactttattgctatgttatattacaattatgtcaacaaattaactttgttatttggatgtaaa

SEQ ID NO: 125261 - DNA, 629 bp, Homo sapiens
agccggtggccttcccctgttaactatggagacaatccctaggcgtccttctccgcccagagctagaaaaatttcagagtcctgatcatgcactatcgctcgaaaacaacttccgtgaaaataactttttttttctcctagtattctttcttagaccaaaagcccagccttcgtgttctgctatgacctctttagtcatgggatagagtccgggttacaaacttgaatttagttccagccattcacaagtctctgggctccgccaacccacactcccactcctttcctcctggttctctaagtcaagggagcctaaaaggcttataaattatcaaagcacccagcatttgggaggatckggtcctccagcctccgagctgcactcaccgggtctcgggcagggagagtgcggccgtccaggcggcgtcggcagcgggaggcgcagtgacagcgggtccccgcttccccgcgcactgcccagaccagcactgccctggcgctgcggatacgggaaggaggaggaagggggaggagtcgcgagtctgcaccccgtgagacccttgcgcaaggtgctttccagctgtgcctggtgcagccggcgacccgcgagcgcagctgtgggcacgccc

SEQ ID NO: 125262 - DNA, 629 bp, Homo sapiens
agccggtggccttcccctgttaactatggagacaatccctaggcgtccttctccgcccagagctagaaaaatttcagagtcctgatcatgcactatcgctcgaaaacaacttccgtgaaaataactttttttttctcctagtattctttcttagaccaaaagcccagccttcgtgttctgctatgacctctttagtcatgggatagagtccgggttacaaacttgaatttagttccagccattcacaagtctctgggctccgccaacccacactcccactcctttcctcctggttctctaagtcaagggagcctaaaaggcttataaattatcaaagcacccagcatttgggaggatcgggtcctccagcctccgagctgcactcaccgggtctcgggcagggagagtgcggccgtccaggcggcgtcggcagcgggaggcgcagtgacagcgggtccccgcttccccgcgyactgcccagaccagcactgccctggcgctgcggatacgggaaggaggaggaagggggaggagtcgcgagtctgcaccccgtgagacccttgcgcaaggtgctttccagctgtgcctggtgcagccggcgacccgcgagcgcagctgtgggcacgccc

SEQ ID NO: 125263 - DNA, 536 bp, Homo sapiens
gttcattcacttttgccattgtcatgcttcctctgagactttgggtggaatcytctcttgtcttcttagcttctgatggtggccagcaacgcttggtgtttctgggattgtagatattaatatctcactccagtgtttgcctctgttttcacatggtcatcttcctgtgcatccctgtcgtctcctcttcttataagggcaccaatcatattagattagggacccgtcctactccagtatgatcttatcttaatcattcacaaccaccccttttccaaataaggtcacattctaaatattggggaccagggcttcaacatgttgttttaggggacacaattaaactcataatgatgacggaaatgatgaagcctgctggtattccttgtagacccaattactctttggtagttttagtgcctgtttctcctaagagtttattttttagcctaccacagttttatgaatgctggcagaacaaatatgcatcttgagtcaaagatggagaagagtttattacccatagcaataggagt

SEQ ID NO: 125264 - DNA, 536 bp, Homo sapiens
gttcattcacttttgccattgtcatgcttcctctgagactttgggtggaatcctctcttgtcttcttagcttctgatggtggccagcaacgcttggtgtttctgggattgtagatattaatatctcactccagtgtttgcctctgttttcacatggtcatcttcctgtgcatccctgtcgtctcctcttcttataagggcaccaatcatattagattagggacccgtcctactccartatgatcttatcttaatcattcacaaccaccccttttccaaataaggtcacattctaaatattggggaccagggcttcaacatgttgttttaggggacacaattaaactcataatgatgacggaaatgatgaagcctgctggtattccttgtagacccaattactctttggtagttttagtgcctgtttctcctaagagtttattttttagcctaccacagttttatgaatgctggcagaacaaatatgcatcttgagtcaaagatggagaagagtttattacccatagcaataggagt

SEQ ID NO: 125265 - DNA, 665 bp, Homo sapiens
gttagtcattttccttgagaaaaacgcagttttactctgatggttttcaagcccagtatttcttcaaaggatgaacattctgctttcaaacacaatttgtgattgttcccaaaagaaagaacagtgtgaaacaggaaaagattattatttctattctgaccattattctctccatttgtcccactaaatatataagaaatgaaagaattttaagcagcagtcattaaacaagcatagagagtgaaggaactatgctgaaaaataatatccagaggggaaatttttttccttagaataaaggtcccattaaagtgctgtctaactttcagagtttaataattgaagagcatcgtttccattatcttaccaactatcaaatgtattgtccatactatacacccaatgaataccaaaaaccccagcatctcctaggataagtagaccaaaaccttaggggatgaccattgtccatttttctctgaaactatctccaaaatagaaaatgaataagtattaggccattctttctttaattatttgggactgtagaattattttcaaagtcccagaatggtcttcatctaagttattatggaacccataatctgtcccatyaaatacaagggagagaattcaccaaaaccaaaatgaatgaacaatcacac

SEQ ID NO: 125266 - DNA, 468 bp, Homo sapiens
gaattcaggatataaagttaatatattaaagtcaattgcttccctatgtaccagcaatggtcaattgtaatwtgaaattaaaacacagtgccacttgtattagcaaagaaatgaaatagtcataagtatcacaaaatatgtacaagatttatgtgaggaaaaacacaactctcttgaaagaaaacatagaagtcctaattaagtggaaagacattgcatgtacatgaaaaggaagactcaatattgttaagacgtcagtcttcccaacttgttgtatagattcaatgtaatcccaattaaaaccccagaaagttatttttcggaagccaacagattctacagtttcggtgaaaagacaaaaagtccagaatacctaatacaatgtaaaagaaaagaacaaagttggaaaagtgacactacatgacttgaagacttactatgaaggtacagtactgaagacagtaggaa

SEQ ID NO: 125267 - DNA, 609 bp, Homo sapiens
ttttgagttaacctttccttgcttattctaaaataatgagttccttaacttcctttcactgagaagtgacatttgagcaaagatttaaagaagatgagaatgtgagccatggagatacgtgggctaagagtgctctaggaagaggaagcagacaatgccaaggctgcagggtgtgtgtgccaggcatgttcaaggaagagcaaacagaacagaaytgccgtggcagagggaacagataacagtggggtagggctttaggtgggagaagttaagaacagccagattacatagaatgttataggttagaattccggtctctttattatcggtcttttctataagcccatagggaaattagagataaagatttagagagacacaaagataaaaacagagatgccaagctatacatttatattctgtgtgctgcatgtgtataattgctttagttaaaattatattgaaattcaacaaactttttaagtgctgtgatggaaatagatgcagcagacgtggtcttggtcttgaaagatttacaattaaaaaaatctgattataacttaaaacatcaaaaagaaattttaaaaggtacaagaatttgttattaat

SEQ ID NO: 125268 - DNA, 609 bp, Homo sapiens
ttttgagttaacctttccttgcttattctaaaataatgagttccttaacttcctttcactgagaagtgacatttgagcaaagatttaaagaagatgagaatgtgagccatggagatacgtgggctaagagtgctctaggaagaggaagcagacaatgccaaggctgcagggtgtgtgtgccaggcatgttcaaggaagagcaaacagaacagaattgccgtggcagagggaacagatmacagtggggtagggctttaggtgggagaagttaagaacagccagattacatagaatgttataggttagaattccggtctctttattatcggtcttttctataagcccatagggaaattagagataaagatttagagagacacaaagataaaaacagagatgccaagctatacatttatattctgtgtgctgcatgtgtataattgctttagttaaaattatattgaaattcaacaaactttttaagtgctgtgatggaaatagatgcagcagacgtggtcttggtcttgaaagatttacaattaaaaaaatctgattataacttaaaacatcaaaaagaaattttaaaaggtacaagaatttgttattaat

SEQ ID NO: 125269 - DNA, 386 bp, Homo sapiens
ggctatttgggctcccttgatattctatatgaattttaagatgaacttccctatgtctgcaaaaartgttgagctttagataggaattgtgttgaatacaagattgttttgtgtagtatgtacatcttcataatgttaatttttcaatccatgaacatgggatggttttcatttatctgtatcttctttaatttctttcagcaaagttttgtagttttcagtgtacaaatctttaacttccttgattaggtttattcctaactatctcaactctttttcatgctagtatatagaattttcttaacttttaaaatgctcagtgttagtgtatagaaatgtaactgatttctgtgtgttgatttatattttgtaactttactgaattc

SEQ ID NO: 125270 - DNA, 472 bp, Homo sapiens
agtctggcactttacctccgggcctctgcactagctatcccctcccctgtaatgctacccctcgcctctgattttttcacctaattcccattcttcctttgcatctcagcccagatgcctttccaaggaggctttcttagctccagactcagcatcatgccccaaaacccctgtgccgcttccattgttgtgtctgctctctgggctcagatggcctgtcctggaatccatgtctgcctgggtgtcgaggctttcagggctgggcctgcccsccggcccttcagcacaaggctctgcccaggcaggtgctaggggtacccatcgaagctccacagctgcctccagaacaggctgcccatttccgcatctggtgcccctgtgcctttgcccgccgcttccttcttggcagccctctctctctctctctctccagactcccctgactcggggacatcacccttcaagaccctcc

SEQ ID NO: 125271 - DNA, 549 bp, Homo sapiens
aggacaaactgaggaaagagatcattttcagattgtgagcctcaagttttctgtgggacggggtttagctagcaggctcagctagcaggaatgtggaatattcctccctttgtgagggtctggaaacagccttcgaataacaatgaaggagaaacctctacaggtaagttgcctccaggacaaattgcatggagctttttatcactgatgactacatattttaccagtttggaaaataaaagaacaaaaagctcagggctggtacaataggaaagcacagggacagagcagcatttataacatcctaaaaactttaaacgaaacaaagaaaaactcaaatgtgtgggttgatggctgctgcttctccyctcctgcaacagtaatactggagaatgggagcattgaaaatattctctctgagttacaccaaacattaaaagataccccaaactgagggtcagtgtatgcacgttctgtggcaataaagtttccttaaaaactggaagattggccgcacatggggagtccagactcgtctgcaggaatggt

SEQ ID NO: 125272 - DNA, 549 bp, Homo sapiens
aggacaaactgaggaaagagatcattttcagattgtgagcctcaagttttctgtgggacggggtttagctagcaggctcagctagcaggaatgtggaatattcctccctttgtgagggtctggaaacagccttcgaataacaatgaaggagaaacctctacaggtaagttgcctccaggacaaattgcatggagctttttatcactgatgactacatattttaccagtttggaaaataaaagaacaaaaagctcagggctggtacaataggaaagcacagggacagagcagcatttataacatcctaaaaactttaaacgaaacaaagaaaaactcaaatgtgtgggttgatggctgctgcttctcccctcctgcaacagtaatackggagaatgggagcattgaaaatattctctctgagttacaccaaacattaaaagataccccaaactgagggtcagtgtatgcacgttctgtggcaataaagtttccttaaaaactggaagattggccgcacatggggagtccagactcgtctgcaggaatggt

SEQ ID NO: 125273 - DNA, 585 bp, Homo sapiens
gggggaactggtgtgtccacttcaaatacccctgtccccagctgacggttgccaggtgggaatgtggatttagcmcagtgaaatcttacagtgttttaagggaggtagaaatctgaatttttatgtgaaatctcttgatttatgaacattagctcaaatttaattaaaatgccctgtgggccaaaggaaatccgtctgctggcttgtgggcagccgggggaaagcctctgctgatcggctctggaagtggaggctgcaactgcctcaaaaagaggagcggagcagaggctgggctggaggcagcctggggcctggagtgtgcttagggttaggaattgcagccagacctgggttccattctcctctctgccaggtaactgctgtgtgatggtagatgggttgcacagcttctctgttttccaaagcatttagagtaagtaattgtatccattctcctgtgaggattctgctgaaggagctgacacagtcgaggcacctggcgtgtagtgggtgcccaacaaacacgaatcctctcccctcccctcccagggctcacttaggagttggggatttgaacactgcttt

SEQ ID NO: 125274 - DNA, 585 bp, Homo sapiens
gggggaactggtgtgtccacttcaaatacccctgtccccagctgacggttgccaggtgggaatgtggatttagcccagtgaaatcttacagtgttttaagggaggtagaaatctgaatttttatgtgaaatctcttgatttatgaacattagctcaaatttaattaaaatgccctgtgggccaaaggaaatccgtctgctggcttgtgggcagccgggggaaagcctctgctgatcggctctggaagtggaggctgcaactgcctcaaaaagaggagcggagcagaggctgggctggaggcagcctggggcctggagtgtgcttagggttaggaattgcagccagacctgggttccattctcctctctgccaggtaactgctgtgtgatggtagatgggttgcacagcttctctgtttyccaaagcatttagagtaagtaattgtatccattctcctgtgaggattctgctgaaggagctgacacagtcgaggcacctggcgtgtagtgggtgcccaacaaacacgaatcctctcccctcccctcccagggctcacttaggagttggggatttgaacactgcttt

SEQ ID NO: 125275 - DNA, 673 bp, Homo sapiens
aatgaacatatcacttttatttgggtcagtctttcatttcacaattttgtggtttctcattaagggacagcattagttattcatattcaggagggcagaggtaactctcacagatatggttacaaagttacaaaayagatttcaaagttcttttatttactttcatgttgttaaaacatttcccatagttttttttttttttcagttcagttttatgacttaccgatccaggaaaatgcttggaaagcacagtaacaacttttaaacttaatattaaaaacaaataaaattgctcattgccaataaatatacctatgtaaaatactactcagtgtaagaatttcaactgacagtgacctgtcaaattcaggcaattctaaaataggatggtggtggttacactgtgcaaaatattcaatagagagagttcaggaatgccaataattttttgttattattatcaaaacattcaataaagatagttcaataatggcagcaactcttactgttatctccctcctatcccaccttgggggccttgtaataaattttgcttgcaaattgcctaagtgttatatgtggaaagctaagttaacaggtgtcatgtttcccatttataccactgatgttccaatgcaaggtgcccggggaaactgccatcccttaatccagc

SEQ ID NO: 125276 - DNA, 578 bp, Homo sapiens
aaaagctgggaaaagaggcatgggtcaaactctccctcacagtctcagaagtaaccaacctaccaatgtcttgttttcggatttccagcctccagagtggtgagacaagaaacttctattgtttaagccacttggtccataatacttagttacagcagcccaggaaactaatgtgtggtacttcagacatactggttatagtttgtgtcactttttactttagttaaatgtttatgtatccatctccacttgtgattgtgaggcctttgaaatcatatatgatgtcttagtcatcttcatatccccctgcacaagcacactattgatttgaattaattacatcctcgataccccttgctatcccgcaagcccacatcaagtctatttccctggaacagggtgtatgtactcctctattattttggttcactgaaacttagtgakagttgtatcgtttctgcttccttgtattaacatttcaagcaccttttgctttttctctcttttgcacttaaatgtttacaagttcagccataagttactgtttttgaccagtgttcctgttgttttcttatgag

SEQ ID NO: 125277 - DNA, 623 bp, Homo sapiens
ttgtctattggaaataaatctatctgaatgttgtattgatctccttgccaggctggcaaaaatcccagggagaggatttaccactgaggatggctctgggtcaaagccttcataatgatatccacttttagaggatcctttggagttttgaaaatgcttasatagaatgagtggtttctggatcactacagcagtgagatattctactttggctttgcgagtcagaactgcagttaattaatgcctttccttcaggctgagagcaagaatgttacaacacctgaggctgcattcaacttcagattagcatatattacacccagtgatcactgaacatgctctaaagatgtgcagggacaatttcaaaccaaatccagtttacgacttctttgttttctgtgaaatacattccaaaagcagaaggaaaaggcggccaaagataaatgaccctattttattattctgcatttgttatcagtatatcttaattacttttcttaaagtatgtgtttttgatatcaatctgtgaagtatacttttttggggcttgcttttagagagaatcttgattttaggtaagatgaagctgaaggaaatcatgctagaaagtttagtgtcagtga

SEQ ID NO: 125278 - DNA, 407 bp, Homo sapiens
aaaacatagtttttgcaactctattcacttcatagttacaagagccttttgtttatacattattcactttattaagggctttgaaatccctttttcataaggtgaatatgcctgttttaccattttcagaytggatgccagcaactgcaaattttgaacaactatttcttattaaagaatatacatttgcatattcctaaaagaatagcatacttgtttattgctttttaattaaacaacagaaagagtaaaatattcttataaaaggacttctatttttaaaaagtgactagggtataaaataagagtgtggttaaaacaaatactgctatgctgtgataaagaaaatgttaggtaagtggtctataaatagagccttactaggccgggcatggtggctcacgcct

SEQ ID NO: 125279 - DNA, 595 bp, Homo sapiens
attttcattgtaatacattttttgttttagataggctaccaatttccgagctgtttaaatgtgaaaaatatgccctcttagaaataatataattagctgcttcaaagtacgaattctgggatcagatctttttggtggcttaatttaatctttctaaacctcagtgcccctatatgtaaaatgagggtaaaaatagttcctacttcaggctgggcacagtggctcacacctgtaattccagcactttgggaggatgaggcaggtggatcacccgaggtcaggaattcaagaccagcctggccaacactgtgaaaccccatctctactaaaaatatagaaattagctggatctggtggcacatgcctgtaatcccagctactcaagaggctgaggcaggagaattgcttgaagccaggggatggaggttgcagtgagccgagatcatgccactgccttccagcctgggcaacgagaatgaaactgtytcaaaaaccaaaaaaaaaaaaaaaaaattcctgccttgcagggttgtgaaaggattaaatgagatgattcacatgaagcttatagcccaatgtcagacattcagtaagt

SEQ ID NO: 125280 - DNA, 603 bp, Homo sapiens
ctgaattcttctagagcctactctgttccacttctccatcctaatggccagtcttcttttttcttgattcagttgtcttttcactactacacagtgcatcttgggataaaaaggtccttccatctgaagtaccaaaagcaggtgtaaagaagaaaggtgaaagtgataaccaaatamaatttgaggattgtctgtgggcttcatttacatgggatcctgatgcccttagccccaggattcctttaaagttacctttgcccaggggctggcattatccagctctagctctttcctgcattaccacacccttcccctgggttttctctgatgtgcactcttgtccaaatggaaccctgacctgctgactagctgctcactgtgtcctctgaaggctgcaccctgctcccagtggaacaaaccgtccagaatcacctcccttcccccgacttagggtatccaaactcccaggtaggcccattcctcactttaaaacccctctgatagcaatatcttgttcaatgcaaaaggtcattttgacagtgaaatttagacctgttcatcaccactaaacatctccaacacattgtcaaaatgatttgcaaa

SEQ ID NO: 125281 - DNA, 586 bp, Homo sapiens
agaaatgtaagacagtaatttttattattttaagccactaaatttgaggtaatgtgttacagcagcaacaggaatctaatacagtctccaaacctcgttttgcacaatacttgcaatcttcagtccttcagtcccttttatcatagtgtgtacagaaacagattaatctgaacttcatctctattacttttctttacctgttttgtgggagggtagctaataaaagtgaataaatttttaaaaattgttttaacagcaataatagaacaacctgattaaaaaataggcaaaagacctgaacagacacctcaccaaagaagataacaaacagtaaataaayatgtgaaaagatgctctaaatcatatgtcattagggaaatgcaaattaaagcaacaatgagataccactatacacctattagaatggccataattctgaacactgtcaaaaacaaatgctagcaaggatatggagcaacagaaatgctaacacttagataatgggaatttaaaatattgcagccactttggaagagagtttggcagcttcttagaaaactaaatatacctttaccatataattgag

SEQ ID NO: 125282 - DNA, 586 bp, Homo sapiens
agaaatgtaagacagtaatttttattattttaagccactaaatttgaggtaatgtgttacagcagcaacaggaatctaatacagtctccaaacctcgttttgcacaatacttgcaatcttcagtccttcagtcccttttatcatagtgtgtacagaaacagattaatctgaacttcatctctattacttttctttacctgttttgtgggagggtagctaataaaagtgaataaatttttaaaaattgttttaacagcaataatagaacaacctgattaaaaaataggcaaaagacctgaacagacacctcaccaaagaagataacaaacagtaaataaacatgtgaaaagatgctctaaatcatatgtcattagggaaatgcaaattaaagcaacaatgagataccactatacacctattagaatggccataattctgaacactgtcaaaaacaaatgctagcaaggatatggagcaayagaaatgctaacacttagataatgggaatttaaaatattgcagccactttggaagagagtttggcagcttcttagaaaactaaatatacctttaccatataattgag

SEQ ID NO: 125283 - DNA, 550 bp, Homo sapiens
tttggagctttcaaatattcaaattaaagaaaagactcatttttgagaagtcagacttctctttgttttagttttgtctgtagatactacaatttagatgcatttctcgggtcaattattatccaacctttgttttaagtttgaaaaaccaccagagtgcctgatggtggccagtcagagactgttcctttagaatctgggtcacccataacactcactttatgaaagtgcccctttgaatgcagctgaagtgtaagtgtcctcacaaaactgaattgtgagtgtaccttacaaagtgcaagcatatccccgaagtgtgggcatactctattaatggctaccccatagagctggatgggcagacttcctaaagaaaataaagtctccaaaayttcagcccaaaaatgggagaccttagattcgaaaagccttgcccaattcctccccgatgcagccaggaagtactgaacataaggggctcatgtaggcacctatgccttggtccaactggcattgggaaagaggtttggggccacttcagatcccatcc

SEQ ID NO: 125284 - DNA, 550 bp, Homo sapiens
tttggagctttcaaatattcaaattaaagaaaagactcatttttgagaagtcagacttctctttgttttagttttgtctgtagatactacaatttagatgcatttctcgggtcaattattatccaacctttgttttaagtttgaaaaaccaccagagtgcctgatggtggccagtcagagactgttcctttagaatctgggtcacccataacactcactttatgaaagtgcccctttgaatgcagctgaagtgtaagtgtcctcacaaaactgaattgtgagtgtaccttacaaagtgcaagcatatccccgaagtgtgggcatactctattaatggctaccccatagagctggatgggcagacttcctaaagaaaataaagtctccaaaacttcagccmaaaaatgggagaccttagattcgaaaagccttgcccaattcctccccgatgcagccaggaagtactgaacataaggggctcatgtaggcacctatgccttggtccaactggcattgggaaagaggtttggggccacttcagatcccatcc

SEQ ID NO: 125285 - DNA, 499 bp, Homo sapiens
ggaggccggctaccaggccacagctggttttcttttctttttttttttttttttgagacggagttttgttcttgttgaccgcccaggctggagtgcaatggcacgatctcagctcaccgcaacctctgcctcctgagttcaagtgattctcctgcctcagcctcccgagtagctgggattacaggtaagggtcaccacgcccggctaattttgtatttttagtagagacaggatttctccatgttggtcaggctggtctcgaattcccgacctcaggtgatccrcccgcctcggcctcccaaagtgctgggattataggcatatgacaccgcacctggccacaactattaataacaataagatattttttctcaaaagcatgttttggttattaaatatatatttcaaatatacatttaaatgcatatttcaatatatttaatcttaaacttttcaaataataataaataatgatatttacttagtactttctatatgc

SEQ ID NO: 125286 - DNA, 559 bp, Homo sapiens
gctcttttggattcccaatcctaaaagtggaggtttcttaccaggatagcccctttcttggtgggcaatgctgtccaatttctgttatggtcatgcaatgatgtcaaaagctctgctactctttttagcctctcatctctttcttctgaaactggcagactcatctaggagaagaaacctaccttgaatgctgggtttgcctgagactcctccttctcccagatattcgccttgtaattcctgcctggttcagtctccaacactttcatatgtatatttcaacattttaaactagcttttctgattgttctcagcaggaatatgtgtctaaattgtacatttatcactgctgaaatccctgcaatcagtatttcatttaaattatctcacaataggagtagcacaaatactttggcttttttttttgaagtttcttattcaatgaacttcaaacgatgggctggattaagctcaagtacaccaatggatgggaggastagcttcaattcatctgaaggggaattttagaggaagactgaaattagccagacttgcaaga

SEQ ID NO: 125287 - DNA, 594 bp, Homo sapiens
ctctgcgtcctttcaagttcatcttctgtctgtccattaacgttgatatacctcaaggttctcttctttcctcatttcctatgggaccttctttacatcttcagttatctttgtgcaggtgatatgtatttatcgatcaccaggcctgatttttcctttcaattccaggcctgaacttcatcagcctccttgtcatcacttcatggatacctcacagacatctgaaaataagcatgttcacaaccaaaatcataaaccctccccaagattttatcatctttcaatatcagtggatgtcaccactattcaacttcttctgtctcctgtagacccagtggtcagtcttacattgcccacttcctcacctctatattcaactcctcactgtgtcctgttgatttaacctcttagttatctcacaaatccagccatttctctaccatcaaaaatttagtccaaagtgatctataatactcttcttgaaatggtataaacaggtatttttattcatcattacctatgcatttacagacattctctttcacatawacacgcacactcatatacatttgaaaagtaaagtataaatgagat

SEQ ID NO: 125288 - DNA, 519 bp, Homo sapiens
cttgctttgtaaaatgatttttattgttcacaatgaagattatttcattcttccttttgttcttcttcagtgtgcttatttcatcatgtttgctggacaaagtcatatgtacaattattacatattggtaataaataagagcctcaaaaagtcaagtttctaaattgtggggaaaaatcttagtaggttttatttttgagrctgtatttttgagatttatggaaggtaatatgaaagtaggtaataatttcattgattaggaacaactcttaaatatgattggttaacagtataatagtctcacaaattttatagctgttgtgttggaagataaacatataaatattctcaaaaatagtttgctttatctacgtgattgtgatattcagtttgtctataactgatgatgataattgacatcttaataataaacaaacggaatagtggggatagaatattaatatagccaccgaaacaaatgatccaaaatacttgaaaacattatgaaatgcttttaaa

SEQ ID NO: 125289 - DNA, 584 bp, Homo sapiens
aagggatgttaactgaaaactttctggaaaaagcacacatctttactgaaaagaaccttatgagaggtaagttctcgttttattttttctagaagagattgtgtctgcctagaactaccacagccattttgccatcctgaggggagagaccgccatcataccaaggacggcagactgggaaaatagaaatatttgtgtccttgactgcattgtcaagcaactgaactaacccagtaactgtcctgtatctagacttcttcttatggaggtgataaatgctgttattaagccaaatttaatttgaatattctcgttgcagccaagagtgttctaaatgacatatatcctaagagggtggatgcaacaggttgctttttaaatttgtctacatgtttaagttaagactgtatttttagccatttctacacaaagatttagcaagaygtactatttgtatgtattttccagaattggtgatggatttctgcttacctatccaaaatggcttgctttaccctttaaacaagagcaaacatggtcttgatggtgagcctcaggaggattacagtctgcctgatgcactc

SEQ ID NO: 125290 - DNA, 635 bp, Homo sapiens
ggattcggagctggagcgccgggaccccaacctcccgcgcggggctttggtatgccggtccacggaatgggcctggcggggccagcggcgcgagcgtcggggcctgctgaggagcccttaactcccccaccgacttctcctcccctacccttgccgcccgtggtcctggccacgcagtacctgccaagggctcagcgctcacatcccccgcccaagatatcctctctgccgccggcgcaggcctgttstagcctcagctgccgcaacagattcagcctgtgccttcagcccccggaaacgcttcccggtcccgccccccgaaactgacagtgcttccgggggtgcgtcagagagaaagcggagtgcgcatgcgggacttaccgtctgagctgggcgtcgggagagagcgcggaggtagcgggcgcctgcgcagtacactctggagcgggtcaattttagggactgactacgctgttgaaaataggggagcagatactgagttctaaaccttcttgaaaccttggcataggccaggcgcggtagcccacgtctgtaatccctgcactttgggaggccgagaggggatgatcgcttgaggctaggagttcgagaccatcctggccaacatggtgaaa

SEQ ID NO: 125291 - DNA, 635 bp, Homo sapiens
ggattcggagctggagcgccgggaccccaacctcccgcgcggggctttggtatgccggtccacggaatgggcctggcggggccagcggcgcgagcgtcggggcctgctgaggagcccttaactcccccaccgacttctcctcccctacccttgccgcccgtggtcctggccacgcagtacctgccaagggctcagcgctcacatcccccgcccaagatatcctctctgccgccggcgcaggcctgttgtagcctcagctgccgcaacagattcagcctgtgccttcagcccccggaaacgcttcccggtcccgccccccgaaactgacagtgcttccgggggtgcgtcagagagaaagcggagtgcgcatgcgggacttaccgtctgagctgggcgtcgggagagagcgcggaggtagcgggcgcctgcgcagtacactctggagcgggtcaattttagggactgactacgctgttgaaaataggggagcagatacygagttctaaaccttcttgaaaccttggcataggccaggcgcggtagcccacgtctgtaatccctgcactttgggaggccgagaggggatgatcgcttgaggctaggagttcgagaccatcctggccaacatggtgaaa

SEQ ID NO: 125292 - DNA, 345 bp, Homo sapiens
ctttgcacgtgacattagcagatttgttgatggccaccagggacagcaggtccggaggcgggagggcttgaggtccctattcttgcccaaccctcctgtgattctcttctcttccacctttgtctcatcccaaccctgagccatctccaaccttaaaagaaatgcattcaccccatctccatttcactctatcccattctccaacactttcattcattcaatcaaccagtatttgygaaggccccttaagtgccagccaccaggctgagaactggggattggctatccctgcttcaaggagatcgcagtgtgatacaagctcagttgaggtacaaagaaaccctg

SEQ ID NO: 125293 - DNA, 642 bp, Homo sapiens
tctttaatacagggtagcctcccctttataacctgttctttttccaagtggtacctgaaaccttaacatccactattcaacagcccatttcaatgcaacttgactcacagaagtctgaccacagagagaagctaagccctcattccttctaaacttagaaactcatactaagcaggtgggtatatctaagtagctaacttccccatggtaattaacagatttaacttttcccttgaagcaggagtctacctaccacacacaccagtgtaacattatttttgtagccctcagcaagataattacattagtacaacaaatgaactctcagactatgagagcaacacacacacacacatacacacaaagtaacaaggagggcagaatttgtttagaaaaatattctctcactgaagcacactcagaaattcaatgaatagatagagtccactggctctgacctgctagtggaagagcagagatggtaggaaaactgaaagaaaaccaaggtagagtcactgttcttcctcctcattttttacttccaatgttaccattctttaagtctaaaactsgctacctttatgcttcatattagccacttgtcttctgtaaacagataaagttagcaccaaataaaaagag

SEQ ID NO: 125294 - DNA, 568 bp, Homo sapiens
aaatgtgggagccgaagctgtcatttgaaaatgaccacaacaggccatgcaaataatagaagacaatctacaggtgctccaagaaaagcagacaccaaagacaatgagatgctggaaagaaaaagtaagagagcgttcgcaccctcccttagtatccccaagtctcagtcccacaagaacaagccatacttcawttcttacctgtggattgccttaaaattacctgttgtatccttaaaataaatctctcattttataaaatttaattcattttttaaaagacttgtattccttgcaaccaagtatgtcctgattaagtcagccacagaaacagaaaaccatagttatctgcgaatacacaaaacatcatgattaggacacagagggatttagagtgcaaatcacgagaggaccctctctaccctccttctcatttggtgatgactctactttcagttcatgggtgctagaaacatgtgcatctactactgtattgaaacttattaattagtaagttatttctactactaagtacatacaaaaatcattaggtcatatctatacatca

SEQ ID NO: 125295 - DNA, 622 bp, Homo sapiens
ggattacaggcgcatgtcaccacgcctggctaatgtttttgtattttgaatagagacagggtttcatcatgttggccaggctggtctcaaactcctgacctcaggcgatccacccaccttgacctcccatatttctgggatyatagggtgaaccatcatacctgaccacgtcttcttttcaaaaatgtctattcaggtcttttatccattttaaaatcagatttttaaaattaatttatttttgctactgagttgtttaaattccttatatattctagatattaaccccttgtcagatgcatagtttgcaaatattttctccccttctataagatggctcttcactatgttgattgattactttgctgtgcagaaactttttaatttgatataattcaatttgtttatttttgctgttgtctgtgcttttgaaaggtcttatccaaaaaatccttgcctagaccaatgttataaagtgtttcccccaggttttcttcagtaatctcataattttgggtctcccttttaagtctttgatcaattttgagttgattttgtatatggtgaaagataggaatctagttttattcttctgcatatccagttttcccagcacgattta

SEQ ID NO: 125296 - DNA, 586 bp, Homo sapiens
catttgggctgaactacattgtcataagccaaccataaaatcattaaatattttcctcataattcttatgcacactgaaatgtttcatactgataatagcttcctctcttagggattggaattatgccaggaattaaagttgaagtcattaatcaatcatttgtatcatatttttctttcatggaatatatagtttaagtgtagtacttcttgtctatgtacttatagatagaaagaaaagaaatttgattgtagagatagaaaaaacatwaaaaaggggtaaaggagcatcccagaaataaaatactctattgacttgagtggtattttgctacatgtgatgatttttggaaattacctccaacactaggaaatgactaagacttggagtccttcaacactcctccctccaaatagtggtgcctaatttctctccccttggatatatgctggacttagtgtctcacttcgaaagaatagatatggctgaagttaacagtgtgtgagtagataattgatatggtttggctctgtgtccccacacacatctcatgttgaattgtaattcccaatgttgagggaggtg

SEQ ID NO: 125297 - DNA, 617 bp, Homo sapiens
aaaattaaaattaagtttcaaaactagaatatttattgttagcaaaatattgttcatgtgttttatttatagcattactgctttgcacaaacttctgaaattcctctgtctatttctgtctcaagcacattttgtatttcagcgaatttagtattttctggaatagtcatcccatatatcacatgccacatttctttgttttaaaataatacatgtatactaactaggttctcaactcaattgaaatgtttcattgaagtttagtttagtattsatgtgctattttagttatataaaagatccattattggtccaatccaaaatcccctcctcattcaccactgaccaatacactctatttcttttcttcaccttttcagctcccaataccaactcctgtctctacacactgaggattttatcttgagcatcaattatgggcatcttgtttggtctcatattagtaatttgaaaggagatggatgttttgtagaggatattttggttcaatctcttttttaggcaaaaccacacatattggctaaaaatttaaagaagtaataccaatttctcagtattcttgtaaagtgtttgggtaaactgaagataaagaaaat

SEQ ID NO: 125298 - DNA, 519 bp, Homo sapiens
tggatatgtgtgggtctatatcaccaagctcttcttactgtaatagtttatttttaaaacttttctaaagtgtaaatttctgggaactttggctttctagttatcttttaaattgatttcttwtttaatttcatattctaaataattatactgttttaaaatttgatgagtctttctttatggcccattatagtcaaaattctacctatgtcagtaggtcaagtttgtaatttgttaaaatcttttgtatttttattatgtttttgtctgattattccatcagatattgaaagggtgtattacatctcccattataaatgtggatttgtgtatttccctgtttaatgctgtgaatctttatatattttagggctatgatgatgcttgcatacgtatttagaattgtgatatccttcttttgcattggtcattttctcatattaaatggcccaccctaactctaattttgcttccaatgtgaattttacattttattttatttttatttttgtaataaaa

SEQ ID NO: 125299 - DNA, 519 bp, Homo sapiens
tggatatgtgtgggtctatatcaccaagctcttcttactgtaatagtttatttttaaaacttttctaaagtgtaaatttctgggaactttggctttctagttatcttttaaattgatttcttatttaatttcatattctaaataattayactgttttaaaatttgatgagtctttctttatggcccattatagtcaaaattctacctatgtcagtaggtcaagtttgtaatttgttaaaatcttttgtatttttattatgtttttgtctgattattccatcagatattgaaagggtgtattacatctcccattataaatgtggatttgtgtatttccctgtttaatgctgtgaatctttatatattttagggctatgatgatgcttgcatacgtatttagaattgtgatatccttcttttgcattggtcattttctcatattaaatggcccaccctaactctaattttgcttccaatgtgaattttacattttattttatttttatttttgtaataaaa

SEQ ID NO: 125300 - DNA, 580 bp, Homo sapiens
aaaaacaaaaacacaacaaataaaccaacaaaaagaaacccatagtagaacatacaaccaccttcatagagatattatgtagcttaatgatgctgtttgaaggtatgtggattatcgcatcttctgcctacaaagatgaagtatctataagtgggtagcctaatatatagtaagtttcttatctttttaaattttattttcaaatagtagttacagggctatgtagacataatcattgacaactttaggaattttatcataaaaatgacatatgtgatagacacatattttgagttttgggtaaaaatccccatcatattctatgaatgcaactgtgttcattacacatttatgagytcatcacaacttaattatcaataaggtgttaaaattgttaattaaattattcttcacccttgggaatgaatcttttctttttgtgttaaaacatcagtataatcaatcagtgtattggaaaccagagatttttaaaacacgaatgtttttattaaaaaagaaggagaaatgagaaggtatcacatatgttttctagaaaataaaaagaataaaatttctaaaa

SEQ ID NO: 125301 - DNA, 563 bp, Homo sapiens
gaaataaaagaaactgcagaatttaaaatgtattatttgatgttttgatatatgaatctataaaaaatcaccatctgtaagattatgaaaatatcagtcactccccttgcattacaaataagaaacttctgaacattttaaggttagaatctgtctagtgacatgtttcctacttaaagtttcatgagtatattcacatatctccataatcaatattaaatgtcttttacactgtagaacttayaaaacaaagaaaatattattcattgtttaagttaaaatgagataatatttcataaaattaatttctgttatagtcttacaaaatatgctatttctactagcatagtgaataaatcctctttggttcataaaaaattgtagacatggagacataggaagctagatattacatgaagttacatttaagatgggagctgagtgtttagatctctttcaatttaccttgtccattagcataggaaacccacaaggtgagaatgacattaattagtaacaacatgttagatattctcagtagtatagtaatgcaaaagtttcag

SEQ ID NO: 125302 - DNA, 563 bp, Homo sapiens
gaaataaaagaaactgcagaatttaaaatgtattatttgatgttttgatatatgaatctataaaaaatcaccatctgtaagattatgaaaatatcagtcactccccttgcattacaaataagaaacttctgaacattttaaggttagaatctgtctagtgacatgtttcctacttaaagtttcatgagtatattcacatatctccataatcaatattaaatgtcttttacactgtagaacttacaaaacaaagaaaatattattcattgtttaagttaaaatgagataatatttcataaaattaatttctgttatagtcttacaaaatatgctatttctactagcatagtgaataaatcctctttggttcataaaaaattgtagacatggagacataggaagctagatattacatgaagttacatttaagatgggagctgagtgtttagatctctttcaatttaccttgtccattagcataggaaacccacaaggtkagaatgacattaattagtaacaacatgttagatattctcagtagtatagtaatgcaaaagtttcag

SEQ ID NO: 125303 - DNA, 609 bp, Homo sapiens
tactgaagaagatattacatgtgctattctttaatagcagaatagatcaagcagaagaaagaattgttgagcttgaagacaagctatgtgaaaatacacagtcagaggagacaaaaaaataaagaattaaaaacaatgaagtatgcctacaggatctaaaaaataacctccaaaaagcaaatctaagagtattcaccttaaggaagaagtagagaacgagataggagtagaaagtttattcaaatggataatcacaaagaacttcccaaacctagagaatgakatctatatcaggtactagaaggttataggatgccaagcagatttaacccaaagaagactacctcaactcatttaataatcaaattctctaaggtcaaggataaagagactattctaaaatcagtaagaacaaagaaataaataacatacaatggagcaccaatacacctggtagcaggctttttagaggaaaccttacaggagtgatatgacacatgctgacagaaaaataacgtttatcctagagtagaatatctggtgaaaatatcccttaaacataaagaagaaataaagacattctcagataagcaaaaggtgaggaatttt

SEQ ID NO: 125304 - DNA, 609 bp, Homo sapiens
tactgaagaagatattacatgtgctattctttaatagcagaatagatcaagcagaagaaagaattgttgagcttgaagacaagctatgtgaaaatacacagtcagaggagacaaaaaaataaagaattaaaaacaatgaagtatgcctacaggatctaaaaaataacctccaaaaagcaaatctaagagtattcaccttaaggaagaagtagagaacgagataggagtagaaagtttattcaaatggataatcacaaagaacttcccaaacctagagaatgagatctatatcaggtactagaaggttataggatgccaagcagatttaacccaaagaagactacctcaactcatttaataatcaaattctctaaggtcaaggataaagagactattctaaaatcagtaagaacaaagaaataaataacatacaatggagcaccaatacayctggtagcaggctttttagaggaaaccttacaggagtgatatgacacatgctgacagaaaaataacgtttatcctagagtagaatatctggtgaaaatatcccttaaacataaagaagaaataaagacattctcagataagcaaaaggtgaggaatttt

SEQ ID NO: 125305 - DNA, 609 bp, Homo sapiens
tactgaagaagatattacatgtgctattctttaatagcagaatagatcaagcagaagaaagaattgttgagcttgaagacaagctatgtgaaaatacacagtcagaggagacaaaaaaataaagaattaaaaacaatgaagtatgcctacaggatctaaaaaataacctccaaaaagcaaatctaagagtattcaccttaaggaagaagtagagaacgagataggagtagaaagtttattcaaatggataatcacaaagaacttcccaaacctagagaatgagatctatatcaggtactagaaggttataggatgccaagcagatttaacccaaagaagactacctcaactcatttaataatcaaattctctaaggtcaaggataaagagactattctaaaatcagtaagaacaaagaaataaataacatacaatggagcaccaatacacctggtagcaggctttttagaggaawccttacaggagtgatatgacacatgctgacagaaaaataacgtttatcctagagtagaatatctggtgaaaatatcccttaaacataaagaagaaataaagacattctcagataagcaaaaggtgaggaatttt

SEQ ID NO: 125306 - DNA, 568 bp, Homo sapiens
ggttcctcagcggttatttaggagtttatatgactttatgtattagttgatagtattttaattttttcaatattcagtgaatacaaagtgaaatacccaaactgaaacatgcttcatacttttatctttttttacataaaatttctcctatggaataattttagatttacataaaagttgtaaagagtattcagataaggtctttgttaatctgaaaatcaataaaacaaagattagatttattacatgaatgtcaaatgaacttattttttgtaagataagcatacttacaamagacatttagcttctctttctgtagtagttagaaaggctaggcgtaaatatattaaatagaatatatgtactcagcaatattgaaatatataatattatcactattattattattattattattaagtgtgaacaccatgctgtgaaatagatagtaaaatgtattcctctagtctaactgaaaatttataccctttgaccaacacctcctagaaacaccgccatcccttcagcttctggtaaccaccactctactctcaccttctgtaaattt

SEQ ID NO: 125307 - DNA, 568 bp, Homo sapiens
ggttcctcagcggttatttaggagtttatatgactttatgtattagttgatagtattttaattttttcaatattcagtgaatacaaagtgaaatacccaaactgaaacatgcttcatacttttatctttttttacataaaatttctcctatggaataattttagatttacataaaagttgtaaagagtattcagataaggtctttgttaatctgaaaatcaataaaacaaagattagatttattacatgaatgtcaaatgaacttattttttgtaagataagcatacttacaacagacatttagcttctctttctgtagtagttagaaaggctaggcktaaatatattaaatagaatatatgtactcagcaatattgaaatatataatattatcactattattattattattattattaagtgtgaacaccatgctgtgaaatagatagtaaaatgtattcctctagtctaactgaaaatttataccctttgaccaacacctcctagaaacaccgccatcccttcagcttctggtaaccaccactctactctcaccttctgtaaattt

SEQ ID NO: 125308 - DNA, 560 bp, Homo sapiens
ggggagggcggggagtggagacggagtcttgctctgtctcccaggtgaaatgcagtggccccatcttggctcacagcaacttctgtctcccaggttcaagggattctcctgcctcagcctcccaagtagctgggaccacaagtgtgtgccaccaccaggcccggctaatttttgtatttttagtagagacagggtttcaccatgttagccaggctggtctcaaactcctgacctcaggcaatctgccctcctcggcctcccaaagtgcttggactacaggcttgagacaccgcgtctggctgcttatggttaatttctaaataaataagattaatcactaagagtttcttgatgaaagtgattttggcatctctgactggagttaggtaagaaaaattgacatggacaaaaakactctgatttcctcatgtttacatgctacaaatattcaattaaaaaaaaccatgatagcttaggttcatggttaacaagcatattcacatggaatactatggtctggatgttgttagtccttgccaaaacttaagttgaaatttaat

SEQ ID NO: 125309 - DNA, 592 bp, Homo sapiens
ttggcagtgggctttttgttagaaataaactgagtctttttctagactgtgttgttaaaagccgtacagcatccatgcctgtgtcctggtttttctagaaatgttgaagttccttgttattctccataaacctctttctgcataaactagatagagtggatgttattatgacagattgagtggcaaccaagaccctggataatatagagataacattgattgtatgatagaatagttagtgacagattgagtaatttctccaaattcttgaccttaccctatatccacacatgtttaaccatgtgattttccagtttcttccaaaaacaataaagtgaattttctccacctttttgatttggcttggccatttgtctggttttggtycatagggtactaatagacatgccataaaccggagctttatacgtgtttgtgcaaatggagcttggtctcttgcacttaatacattgcgaagagtggcctaaatagcttctgcccctttgggatgaacatcaaattcaagaatagagttctctcagctgatcagtctattggtctgcatacaaatcatagtcattccagatgccat

SEQ ID NO: 125310 - DNA, 590 bp, Homo sapiens
ggccagtttttccagtacaatttttgaaaggttataagattttcatacctaaaattgcaagtgttagttatttaaacataacacgaaagatgcaaagctacttttgaaattgtaataaaaaatgtatactatggtttctcccaggtcttatagaaacaaagctgttacatgcaacgcaaaacatctttgtggtaaatagaaaatattttgtttgtacagcttccttcaatgtacaccagtggaagataattagtaaacaagaatttaatgagttgcaagtatctttttgttgtttggatttttctaaattaaaaaaaaaatccaaaccaaaaattgttaaattttgatacatgtgtgcacgcacacacacatgcacccacacacatatttayatataaatgacattttattaaagttttttttttccaataaagcaagtgttcataagtgttgaatggcaatgagtttaaggtcatccttgcaataacaatctataacgaaaagtgttctttattccagattatgtgcaaaaattcttaaatattcagctagagcaatgtttatttccttaatcctagggatttgttttt

SEQ ID NO: 125311 - DNA, 598 bp, Homo sapiens
taataactgatggattgattgttatgtatttcattatttttacaacacagagtgcttcatgttagagaaatatcaatgcgtggcttttgtaagccatctctttggatcattctggaatgcttaccctcttttcctgcttagtatrctgctattcagccctcaaattccagcacgtatgccccctcctccataaaaaattcctctaatccccaaagaatgagctaattcctcctgctggctcccccaggactttgaacatgtatctattatagctctttgtgcattgtactttgggttgatgtatctatctaactcccctgcatctgtgagtagggaccatgtcccatttacctctgtgtctcagtagccaggcacagctgttgctcagtgataatagttgaattaacaaatgaaagacttggctatcattaagatcccttccagatctcaaattctttggccagtttaacacataagagctctcaatctttcactcctctctcacttttattcctttcagcgactttttggtgatactgttcaatatggaaatggcacatgtaaaacaaacaacgaacatttactggacactttacta

SEQ ID NO: 125312 - DNA, 598 bp, Homo sapiens
taataactgatggattgattgttatgtatttcattatttttacaacacagagtgcttcatgttagagaaatatcaatgcgtggcttttgtaagccatctctttggatcattctggaatgcttaccctcttttcctgcttagtatgctgctattcagccctcaaattccagcacgtatgccccctcctccataaaaaattcctctaatccccaaagaatgagctaattcctcctgctggctcccccrggactttgaacatgtatctattatagctctttgtgcattgtactttgggttgatgtatctatctaactcccctgcatctgtgagtagggaccatgtcccatttacctctgtgtctcagtagccaggcacagctgttgctcagtgataatagttgaattaacaaatgaaagacttggctatcattaagatcccttccagatctcaaattctttggccagtttaacacataagagctctcaatctttcactcctctctcacttttattcctttcagcgactttttggtgatactgttcaatatggaaatggcacatgtaaaacaaacaacgaacatttactggacactttacta

SEQ ID NO: 125313 - DNA, 584 bp, Homo sapiens
tgcttcatgttagagaaatatcaatgcgtggcttttgtaagccatctctttggatcattctggaatgcttaccctcttttcctgcttagtatgctgctattcagccctcaaattccagcacgtatgccccctcctccataaaaaattcctctaatccccaaagaatgagctaattcctcctgctggctcccccaggactttgaacatgtatctattatagctctttgtgcattgtaytttgggttgatgtatctatctaactcccctgcatctgtgagtagggaccatgtcccatttacctctgtgtctcagtagccaggcacagctgttgctcagtgataatagttgaattaacaaatgaaagacttggctatcattaagatcccttccagatctcaaattctttggccagtttaacacataagagctctcaatctttcactcctctctcacttttattcctttcagcgactttttggtgatactgttcaatatggaaatggcacatgtaaaacaaacaacgaacatttactggacactttactatataatagacactttgctgagtgcttaaactcagcttg

SEQ ID NO: 125314 - DNA, 357 bp, Homo sapiens
gcaggagttctggggcagagtggaattgttgtgcttaataaaggagtggcaaggtgggttcccagggaagatcctgagctggagaaaagagccagggaaactgatccctgaagaagagaaagttgaaaaagaagagaagatcatggtggctggaagaggaaacacgtgaaagagaattttaagttgatggctgtggggtaatgtgcaaggtaaactgttccctacctcccccatgaaactgtacattctactttgctcacttatgctcttgtgcaaataccattttggggggagggcrgaaggcttgaagaagagaataagaagacaatttttctctgggctaccagaaataaaatt

SEQ ID NO: 125315 - DNA, 354 bp, Homo sapiens
tcatcctgagatccaagcccatataggaactatttactaaatgagtctccgtaggtgtttcatggcacctggaactcagcatgccccacccgaaactcaagtcttccccatcaagatttattttctgctgtgtttcccaccgcccacacactcaaatgggaaaacrgcatccacttaaaaggccttcctttagcaccccacctccaccatccaccatcactttctatccattccacatgagaagcatctcatatgctggttctccccatcctctcgccctggccattgccatgattcaggcttataccactcagtgggactgctgctgccagcctcttccttgtttccctacta

SEQ ID NO: 125316 - DNA, 577 bp, Homo sapiens
agtgtacactgtacccaatgtgtagtcttttattccctcaccctccccacccttccacccgagtccccaaagtccattatattattcctatgcttttgcatcctcatagcttagctcccacttataagtgagaagatgtgatacttggtttttaattcctgagttacttcacttacaataatggcctccatgtccatccaagttgctgcaaagaccattaatttcattccattttatggttgagtagtattccatggtgtatatgtaccacattttctttatccactcgttggttgatgggcatttgggttgtttccatagttttgcaattgtgaattgtgctgctataaacatgtattacagtctcttttgtatataatgacctttttttccccttaggtagatayccagtagtgagattgctagattgaatggtagttctagttatttaagaaatctccacactgttttccataatggttgtactagtttatattgccaccagtaatgtaaaactgttcccttttcaccacatccatgtcaacatctattatgttttgattttttaattatggcc

SEQ ID NO: 125317 - DNA, 577 bp, Homo sapiens
agtgtacactgtacccaatgtgtagtcttttattccctcaccctccccacccttccacccgagtccccaaagtccattatattattcctatgcttttgcatcctcatagcttagctcccacttataagtgagaagatgtgatacttggtttttaattcctgagttacttcacttacaataatggcctccatgtccatccaagttgctgcaaagaccattaatttcattccattttatggttgagtagtattccatggtgtatatgtaccacattttctttatccactcgttggttgatgggcatttgggttgtttccatagttttgcaattgtgaattgtgctgctataaacatgtattacagtctcttttgtatataatgacctttttttccccttaggtagatacccagtagtgagattgctagattgaatggtagttctagttatttaagaaatctccacactgttttccataatggttgtactagtttatattgccaccagtartgtaaaactgttcccttttcaccacatccatgtcaacatctattatgttttgattttttaattatggcc

SEQ ID NO: 125318 - DNA, 585 bp, Homo sapiens
tcctcttcattggatcttggatcagatgttgagtatggtggtcctacagagtatctctggtggcttgccacaggactctggcatcctgtctcagttgatacctttgtcaatgccttggatatggacttagtagccagttccatcatatctactcagaataagaactagaagaagccaaggctaagtcagttaaagaaacaggatccaaaaaggtctcaaaagsctgggtggatacactgaccaagtgtattagtccattctcacgctgctaataaagacatacccaagactgggtgattttataaaagaaagaagtttaattgactcacagtgcagcatggctggggaagcctcaggaaactcacaatcatggaagaaggggaagcaaacacatccttcttcccatggcaccaagaagaagtgccaagcaaagggggaaacccccttataaaaccagcagaactcatgagaacccacccattatcatgagaacaacatgagagtaaccacccccatgattaaattacctcccaccagattcctcccatgagacgtggggattttgggaactgcaattcaagatga

SEQ ID NO: 125319 - DNA, 486 bp, Homo sapiens
agaataaggtttatttgtgtggttgcaagggcaagaactaggacccaaaggccaaaagctacaggaaggcaagtttaggcttagcataaggtcgatcattatcacagtcagaagtcaagcagagatgaggtgtttcagcaggcagtgagctctcaccattgcaggagaccaagctgaggctggctgtttgcctgtgagggtacaggagggtttgaagggtagaaaagaccagcgatcttttaaggtgacctctaatgccatgatcctgagactttaagaacacagcggaatactttaagaacatttgagacaactttgataagtacctaatgacgttttactgtgttagagctagttgagaaataaagaygactcaggagagtgcttgacctctatgagctgagagtcaagtgtggggaaatggacaaggaaacagataattattgtagtgtgcgaggaggactctgacacagggcagcagggtca

SEQ ID NO: 125320 - DNA, 595 bp, Homo sapiens
cataaaccaggtgaataaggaagggcagagggagaggtgcaaaattccaggtagaagaaatagcatatgcaaatcaaggagaaagagtatggtaagtccagggaccagtacgttgctcagtatagtgcaccccaatggtgaacaatgagctggaggtctgtgcatgctcactgaaatrctggccttcttttccagacgcagaggctctcttgctttcagtgttcaccttgcatgattcctgcagcttgccatcctctctgtggtttctgagaggtcaacactgactctagccactgttatcatcactattcctggcataatccagccaagattgttctcatttatgccctggcctcagcagcaagcccttccaaaaccgagtccaacctttgagtgaatctggacattcatctccttttactcatccttacctacttgctgccccaaccattcccatgcaactcccttctcttccaggtaaacttctactcctagtaattttggaagatgagttttgaatgtctttagggtctagcaagtgggaggggcagaaaaagttgtggctccctcctttgtgcttctactgtatttgttt

SEQ ID NO: 125321 - DNA, 584 bp, Homo sapiens
tgtctaacattgacatatgtagtatgttactattactgatatgccctatgatggtaacataatgctataagaaaattataaatatctaaataaaatcaaagtstcatcactgctttcaaaacagcaagaaaagaggcaatcgagaagagagggtagagatctggcttaagactgaaaaatctgaactctgcttccaacgcaccttcaaggaaattacttattcatagtcacacaattcaacttctatgaacctccattttcccacctctaaattcttgccttgcttatttcatgagcattgtaaaaattaaatgagaaaatcaatttgaaagtacttcaagaactgtaaagtagcatgcaaataaacaaatatagaagtttttttaaccaacctccacataactaactcactagatcgggcagggctctccattccctctatagagcaccccacctagtgtccaaggatgctccgtggatgctcctggacaagccatgcactattcccacctcttgagttctattctgacaagattcagtagggtttgatcccaaagcttgttatacagtttcagctatataat

SEQ ID NO: 125322 - DNA, 611 bp, Homo sapiens
ttttcacattgcctttgcctttcagaaaactttgttagttaagtcaatggaagaattctccacacacacagcaaatctgacattatatgacctggcaatgggtttgacttaaatgatgaaatcaattaggtgaggagtagaaaatagaagaaactctgaaatggatcacaggtccttcatcctgtttcattcttagctctgtcccaccatccccactctcttcacgaagtcataggtgcttaaatatatttcttttcccttgctccctaaactctctctgatctctgaaaactctgawctgaggcaggagaaagttatagagctataatccaagctgtgattcagtatcaagtctcctctgctaattcaggttgtatattctggcctatatttgataacaagatgtatgcattattcctgaaatgcaatttctactttgtacctgaattccattagcagatccctattcctgagttttcgctttgatcacttactttgcacctcagttgctctaaggctgggactgtctgggactgtgattcctgtctgtcttacaggcagtgaagttttgctgctaaaccctatatggtggctaaggcactgttctctta

SEQ ID NO: 125323 - DNA, 615 bp, Homo sapiens
gtcatgcccatacaacgaaatgcagaaacctaaagggcatcagcagtgtacacccacttatggtaaaaaagctatggttatagaccagtatggggaccattccaagtgtgcagagatgagaaattaggctgaagagagggacaaggggccagatctcaaagggactcatgggtcacatcaaggagtttgtattatggccataatcagcagggagcattttaatcagggcatgttttagtcaaattttgtataatgtggctcacgctagcagtggtgcgaagcttagtttggcaaagtgagagacaraagcaggataaatcatttaaaaccctctaagctccacttttctcatctgaaaaatgggataacaattgccgattgcaactcccaaagttgaaaatgacagaaaattacataatgtataagaaaggatgctgaaagatgtaaagttcactgaagaataaagatcaatatgttgaatatgtgataattttggaatgtatatcacatttgattacagtagggatcatgagcaagtagttctggcccagaggaaaatattcagtagcaaattagttgacctctttccatttccagttgcctaccaactccact

SEQ ID NO: 125324 - DNA, 643 bp, Homo sapiens
atcatttatcattcaagtgtagagagcctgctttttctttctaggttgtactttatttaacatggaaaataacctgataatttttcaccatcagatgtatctggttaagaattttgatttacaattttctcagttttgctgtgacataaatgaagattgtttacacactaaataatagaatttctgttgagcaaaactttttatcctggttgaaaaatatggttatatatgaactttaaacataacatcttgtttaacctaatatgtaactatttataaaaactcaaaaataatctatagaaagtcaaaaatatttatatcttaaatttggcttatgttccagtacatttctttccagttttttttctgtgtacagcttatgtaaacatattaataaaatatggttgaaaagactagtgaagaatgcaagataaacataagacaactaatttgtgttccatacaaactaccaaaattaatgatttaaacaccaattatactgagtcttggtcaaacttggcctatgcaagggtaattgggctttagtatgtctctaagattcctgaaaattgagtgtgtacacacattttcttcwgatttgtctgtagatttatcagattctcaatggattccatgatctaaa

SEQ ID NO: 125325 - DNA, 628 bp, Homo sapiens
ttaatgcccatcatttccaaatgcaaccattaaagtcaagaaattaacattgatgccttactaacatctaatattcaggtcccactccagctctcctgttggctcaataacacctgccagagaaaaaacaatccaattccaaattataccttgctttcagttgtcttatctctatgttctccttcattctgggatcattttccagcgttttctttccagcgtttataacctcggagagacttactaatcggtagcagcattttgaatagtaatatccaaaacaaatgccagtaatatttcctaggctctaaagaagagctacaccacagtctaattgttatcaaaaggaattcaaatattgcccagagcccaattatagggaaaaatgattttaggtttattttctccatgccacccctgtctactttccaacagtcatacaatttagtgagaggtcatcttgcatttccccaatgaccccagggagatcccaccctcgatctgggatckttcccatttctccaccctcagtacacccagagggaaaagaacactggggtgtcagtgatgggtggaaagctaagctattttaccaggtggttttagaagacaaacaatattcagattt

SEQ ID NO: 125326 - DNA, 487 bp, Homo sapiens
tatctaggttctgatcttaagtcggggctgggacgaagagacagacctgaactggaagaaaactttggcctggagtgctctggtcaaagtctccgagtcctcctcttacttcccaaaccgagctttgaaccggaaccaacagcagcggaaaagtaaagttagcagctcttccccaagtgggagtagctcctcatcactcactgcctttaaaatcctggtttgttttacatcagggcagaacgatgtaaaaacaacagrattcaaatgaaatcatgaacacgtttgccctttgtacctgtgtactgctctggcacagtgcgcgctgaggagggaggggtcgttcccaggaggaatccacctgggccccggctgccacagggcagggctactccatcggccacagtaaggagaggagggacagcggacatctcgaaagctccctccgctttcagctcctgtctaaacatttgagtcctgcaccgaattc

SEQ ID NO: 125327 - DNA, 571 bp, Homo sapiens
gctgtttgtatcccaatgttctttctcagcgttcttcaagaaggaaccactgaattttaactggatacatgttgacagaataaagactaccttttccttgcagctaggtgtggccatgtagttaagatttggccaatgtcatgtgaccagaagtgatatgtacaatttcccttacagaacagggtcatgcccttccaacatcccatcctgatggctggaatatggacatgagggtgaaccaccttggaccatgtgaaacagggtaacaccccaagggcagtagaacaggaagacaacaagcctgggtctcagataactttgtagctcaggatccacataaaagattggactgttatatgagaaatccttttaaagwtctataaggtctctcttgcatacaaccaacttatgtgctaactaatgtataaagtgagagaaaacctcatcctatgacatattctctgtactaataaagccttgaagacattgacactctggatcaggctgtgccttgaggtgagaaccattgctatttgctaggttccccaaaattaacgaataatttgtccct

SEQ ID NO: 125328 - DNA, 566 bp, Homo sapiens
ttccacagctctgcctgtaataagcatattccaaacagatctctttttcttcacctagtctcacttcccagaagctgcttctctttccatgcttcctgttttgatggaagtccactcagatacatggcaggagcccagacatcatctttccctccatctgcctcaccatccacatccattcaatcactaaactctacttacttggctcccaaaatacagctacatgctccccacttttccctatccccgctgtcttcacactagcccacatatatgctggcttgggcttctataataaccttctatctggtttcttctttaattcagggtttattacatggagtgtgaagaccccccccccccacaccaaagtatgtaggtagaattcagagggctcatgaactttgttgagaaaaaatatatatttattttcactaatctataactaaaacttagtatttcctttttatgaatgtaagcaataagccrcaataatattagcactacctgtaactttactaacaatagaaattataaatatttcaagtctgggcacagtggctcac

SEQ ID NO: 125329 - DNA, 642 bp, Homo sapiens
gtgtgtgtgggtgagtgtgtgcatgttttgtatacacctacattrcttgattcatgtacatacagttttctgggttcacctaatgtttcttgaagatggtaccacatattagcaaacatgaaattcatgttatgttcaaattattccctaatatatccatccagttagaacaaattcttgttttcaaaacaagcattatagcagaactgactgtatttcgtggtaaaccaccataaagaatagtgagttccagcactgaaatgcattaaaaaccacctagaaagcttctaaaaccatgaaaccctgagccttacccccagagattctgattcagttagtctttgaaaatgggggaaaagaaaacctttctaagtggaagaacaaagaaagagaaacttcttgctcaataggtttaattcagataaatagttattgatttcttactgtatgtgcctacattgaggggtacgagtggagaaaatgaagtctctcttagtcttctgcttgtgaccaaatatctatccacagaaaaagatgatataaaacaattttatctaatattgaattattacacaaagacttgatgcaatgaatatatcagagaattgaggaattggatggtggtctgagagcgagtggaac

SEQ ID NO: 125330 - DNA, 539 bp, Homo sapiens
cagaaggccagcctccaggactactcattctttcccaagtctaggatgctgccatgttgaaatgtttcttcagtctttcattcagtcatccacatgcagcaatgattacttgagcaattagtccatgacaggctccaggataaacacaggagatataaacactctgtgccaaacagtgtatattttagcaggtgaagaccaacgtggttttcaaaagtgctaaatgaaataatatgttatttgtttagattagaaggagatttaaacatacagataaaaaagttttatgctcaaacttccataacacataactgtgatgccctaagcactatatttcttctcccaagtccctggtagtgctggacatctggagttttcattctcagccatttcccacagtgatttgcatctaaaagttttgtcttccctagggcyctttcactcttttgttcctccttcctagagagctataatttatccctgtgccatgtcctccaaattcacctgcaaaagaaacttctggctaccaggctccaccc

SEQ ID NO: 125331 - DNA, 565 bp, Homo sapiens
aagtatgaaagagcacaaaggaaagaatatttgcttctaagtgagtggaagtagagtgtgagaaagagaacgatgtcatagaaaacatttgtaaagtagatcacaaactgtgaggagagagaracctatttgccttatttgccattgttctccttggagcataactggatcaatcaagtgttcagatgctaaagaagattgagacataaaatttgtctacattttcaggcaaagagaaaagaaaaagaaaaaaactccgtgtcttacccagaagacacagagttcatgactcttctcaaatgaaaagtcagggaaatttgctgcattcagagtctagttagaataaattttgtgtagcccctgacactaatcccacgtagctttaccccacactaccttggcccttggcagagaggactatctcaagagttaaagttttgtttggtgagcttagatttaaaagttaagacattatgtggtcttaaggatgcttccctcaggctataatggaatctagcgggccgtcatctgtcactcaaagtaaagcaaattattacttggattt

SEQ ID NO: 125332 - DNA, 515 bp, Homo sapiens
cttgataaagagcaagaaatgacagaatattggtgtgttttttttttcttttcacagctgattccttgaaccatcctcacaaactcaactcccctggagtatgctctccaatcaaaactgcttcatcctcctgcttcccccagccacatgaaaaccatttataaggaggaagcaaattyaaattaccttgtgatccataatggttccaaacagcaggatgaaaaaaccctgtggcaaaattgaacagattcatgagggatggtttttcaaaaaatattcctgctgttattttcataccgctcttctagatacctcctagggcagttattggacattagaaagttcagtttccactaatgcagataaaaatgcactgatgggtgttcctttgagtctgcccccacccttggaagaggatcatcacccacaaaggaatgtgcaggagggttattgatatttattgaatggctgtagatgtaggatagttttcagccttatgcagttatgttactttc

SEQ ID NO: 125333 - DNA, 376 bp, Homo sapiens
tactcaccagagtaacttcaagagtggggaaatttatcaaaagtcccagagtctttgataaaaaaaaaaaaaaaatccctcatgtcaaagatttcactgtaaagcaatgcaacagaaagagtataataaatgtgctctatagttactacagaattatgrgtaagatatataattgatctgagttggcatttctttaaagtctgctttctattttgtatcatgcttttaaacagaatgatactgacatgttaataggaatactttgatgtttagttacattatttaaaagagtagtggggaacattctactgcaaagaaccaaatagttgaggcccagagaaaagtggcattcccaagatcagctaacatatggcaa

SEQ ID NO: 125334 - DNA, 620 bp, Homo sapiens
gttgaacaagtctcagttttaatctagtaaagaaaacagaaacttgagaaattagtcagagaaaagtatgtcctatgacatcctaattattcattatttattcagataattaaatgacrtaagaatagtaggacaagaaaaataaagatgtgagtattcaaaaatagagggctgtctttattcatttaacactagattgtatacatagaaaaatctacagataagagattagaaaatataagtaaatttagcaaggctgctagatgtaggagcaatacacaaagaaggaaatttttttctacataacagaaaaacaattaaaaacgaatacttttaaaataacaaaaatatcaaaaaacaccaaatacctaaaagtgaaaaatatacaagacacagagaaaactacaaaacatgtggagaaattaaagaaaacccattgaccaaaagactaagatggaagggtaaactatgttgatgaattaaagacaaaaatctgcaaagatattaacttcctacaaattcaatttaattccaatcaaaattcagcagattgtttttgtgtatattgacaaactgtatttagactcatcattgcataaggttaggcttaggacagcaaa

SEQ ID NO: 125335 - DNA, 464 bp, Homo sapiens
tcacctttccttcttcctagtgtcatggatcccaaagtcaatacttagtacatctcttaggttgatacttaggttgcaattgactcttttgttttgccctggctcactgctctaggactggttgatcttcctctcatcagtaagactgtttcagaagagcaggtcttgtgcttgcacacctagatatgtcaactcctgcagaagctctgttgttacttggtgctgcctttccactctggctttatagcttgtatttttttaaccattatcattaayagtcatttgcctagaactttgcagattcatatattatttgaccactagaaaatattttaagaatttattgttaatgtccattttcaaataagcaaaccaaagctcaaagagatcaaattgttttcctgaggccatgttgtcaaaggtataaaaagtgattccttaaccctggtggtctgattccagga

SEQ ID NO: 125336 - DNA, 464 bp, Homo sapiens
tcacctttccttcttcctagtgtcatggatcccaaagtcaatacttagtacatctcttaggttgatacttaggttgcaattgactcttttgttttgccctggctcactgctctaggactggttgatcttcctctcatcagtaagactgtttcagaagagcaggtcttgtgcttgcacacctagatatgtcaactcctgcagaagctctgttgttacttggtgctgcctttccactctggctttatagcttgtatttttttaaccattatcattaatagtcatttgcctagaactttgcagattcatatattatttgaccactagaaaatattttaagaatttattgttaatktccattttcaaataagcaaaccaaagctcaaagagatcaaattgttttcctgaggccatgttgtcaaaggtataaaaagtgattccttaaccctggtggtctgattccagga

SEQ ID NO: 125337 - DNA, 665 bp, Homo sapiens
tcttcacgacttttctgttaaaagtaatttgttaattaacagatgtgattctaacacttartgaggaatgtcctattccaggtagcaaatgtgtgttataattggaaccttccagaaataatgccttatcctaaagtgatagggaatgatgggcattctagcactgtgacagattggtggggcagtgactggatcttttggatgtcccatcacactaaatgacatgtgattccatttatttttgagcgagacaagcaacttcactcaaaataattgaatatttgtattacttgaatttccagaaataacattaaaacgtgtatgaattatcaccaaagaactaaaagcatagtcatatggcataacataagctatatattactaaataatcaactttagcctaagtacaagtatgaatgactattccattatttgacgttagtgtatggccagtgtgacgtctcaatagatttctcagttcccagtctaaaagaccatatagttcagcatacttttcactggtcttgattctagaagggaagaagagaaggaagagagggagaggaaatttaaagaaacaaataccaaatgaaacgtgttagataggtaagatctctcaatttggtctgggctacagcacttcaattatccccggtaactaattg

SEQ ID NO: 125338 - DNA, 665 bp, Homo sapiens
tcttcacgacttttctgttaaaagtaatttgttaattaacagatgtgattctaacacttaatgaggaatgtcctattccaggtagcaaatgtgtgttataattggaaccttccagaaataatgccttatcctaaagtgatagggaatgatgggcattctagcactgtgacagattggtggggcagtgactggatcttttggatgtcccatcacactaaatgacatgtgattccatttatttttgagcgagacaagcaacttcactcaaaataattgaatatttgtattacttgaatttccagaaataacattaaaacgtgtatgaattatcaccaaagaactaaaagcatagtcatatggcataacataagstatatattactaaataatcaactttagcctaagtacaagtatgaatgactattccattatttgacgttagtgtatggccagtgtgacgtctcaatagatttctcagttcccagtctaaaagaccatatagttcagcatacttttcactggtcttgattctagaagggaagaagagaaggaagagagggagaggaaatttaaagaaacaaataccaaatgaaacgtgttagataggtaagatctctcaatttggtctgggctacagcacttcaattatccccggtaactaattg

SEQ ID NO: 125339 - DNA, 608 bp, Homo sapiens
taattaggcacaacttcacaaatcaaggagaggaacagtaaggatctttgtcaaagtcatctgcagtaaagaaaaaaagaaaattttcagctgcggcatcagggactttgcacatagtagaagcataagaaaattttatcaaatgaaggaaaaaataaagcaattagaagagaagggaaggatatggtgctttctttggactgttttatataaaatccggggtgaattaattcatcctgacagcactgtttggacaaccagtgcatatgttcttcctacattgtgaataagaggcagcattattgaccttaaccttaacctaggagaggatatttatgtacaaactcggaggccttcaagagaagatgacataaaatgtgaacatacacatttataccccttacatatttgatattcttgcactgaaagtttggctatttctcaagcttgagaaygcctggtggtacagagggcatgatttttcactctctgctaatagaatcaagcttctggctgtcactagtacaatggaaggacccagatttcagttttagaacctgtggcaggtctacctgccccactggctcagttcctctcaactgatgagc

SEQ ID NO: 125340 - DNA, 524 bp, Homo sapiens
ggaatcatcatcgaatgagatcgaatggaatcatcgaataacatcgaatggaatcatcgtcgaatggagtctaatggaatcaacaaatggactcgaacggaatcgtcatggaatgtaattgaatagaatcttctaacggactcaagtggaatcatcgaaagcaagcraatggaatcatcatcgaatttcatcgaatggagtcatcatcatatggaatcgagtggaagcattgagtgggctcaaaagaaatcatcggagtatggaattgaatggaatcatcaaatggactcgaatggaatcatcatcaagtggaatcaaatggaatcatcgaatggacacgaatcaaatcatcgttgaatggaatcgaatggaatcatcgaatggactcgaagggaatcattatcgaatggaattgaatgaaatcataatcgaatggagtcgaatggaatcatcatcgaatggagtcgaatggaaacatcactgaatggaatcaaatgaaatcaccgaattgaatcaaatggaat

SEQ ID NO: 125341 - DNA, 524 bp, Homo sapiens
ggaatcatcatcgaatgagatcgaatggaatcatcgaataacatcgaatggaatcatcgtcgaatggagtctaatggaatcaacaaatggactcgaacggaatcgtcatggaatgtaattgaatagaatcttctaacggactcaagtggaatcatcgaaagcaagcgaatggaatcatcatcgaatttcatcgaatggagtcatcatcatatggaatcgagtggaagcattgartgggctcaaaagaaatcatcggagtatggaattgaatggaatcatcaaatggactcgaatggaatcatcatcaagtggaatcaaatggaatcatcgaatggacacgaatcaaatcatcgttgaatggaatcgaatggaatcatcgaatggactcgaagggaatcattatcgaatggaattgaatgaaatcataatcgaatggagtcgaatggaatcatcatcgaatggagtcgaatggaaacatcactgaatggaatcaaatgaaatcaccgaattgaatcaaatggaat

SEQ ID NO: 125342 - DNA, 524 bp, Homo sapiens
ggaatcatcatcgaatgagatcgaatggaatcatcgaataacatcgaatggaatcatcgtcgaatggagtctaatggaatcaacaaatggactcgaacggaatcgtcatggaatgtaattgaatagaatcttctaacggactcaagtggaatcatcgaaagcaagcgaatggaatcatcatcgaatttcatcgaatggagtcatcatcatatggaatcgagtggaagcattgagtgggctcaaaagaaatcatcggagtatggaattgaatggaatcatcaaatggactcgaatggaatcatcatcaagtggaatcaaatggaatcatcgaatggacacgaatcaaatcatcrttgaatggaatcgaatggaatcatcgaatggactcgaagggaatcattatcgaatggaattgaatgaaatcataatcgaatggagtcgaatggaatcatcatcgaatggagtcgaatggaaacatcactgaatggaatcaaatgaaatcaccgaattgaatcaaatggaat

SEQ ID NO: 125343 - DNA, 585 bp, Homo sapiens
ctctgtttcaccacacggcattcatctaactccacctgtgttagcggatgtgctgacatagtgcagagctcttcaagggacactcagaaccttccrgccccacctctctccttttccctccccacaaagcccagagtgctgtaggtgcccagctggatggtgagcccggcccagggctctacctggggtctggggaacagatggcttctgcgctgctctatctcagccctcacactctgggctgctcagggaagatctcattagagagggatatatatgccgcattaaatattaagttaaacacctgctctaccagctagggccacagttctgaaactgctcaccatttgcaaactggtgacatggccagcctgttactgcactgtcagcagtttgggcctgtcctgattgggactaattatctgcaggtgtctcattgggccacaggcctgctgatgggggagccactgtgcctacctgccagagaggacagcgggtggggcaccaggctccccacttctgctcacctctctactggtgaaggacttagctgggtccacctgaccttttgcctgagagaacaaa

SEQ ID NO: 125344 - DNA, 563 bp, Homo sapiens
acaggttctggcctgggggcattatttactttgttttcggagtgctatattggcttgcagtctgaccagcagtcatggttttgcccctcaagctcctttacaaggtatagcgtggtcagaatgtgggtggtgttggtcttgactactccgtactactcagatcatgcccggaggaggactgcagcccatttgggggtattgacctttaagagggrcggtgacaaatgggattgtgtcctgggcgaagagggatctgatacagcatctgggaacacctcaagcctctagggatattttggcacaaagaagagcagaataagcgagactggattgctgccttcaagtatttggagggctgacatggaaggaggaaggaatgagatctcattgcatggccttaaagtgtgtggctgatgcagaggtgatttcacctcagtttaaaaagaaccaagttgcacatatgagagtggcctaggataaaaggagatgcctcgggaggtaatgagtgccctatctctggggatatgtaagcagagactaagtggccacttgttgggctgcca

SEQ ID NO: 125345 - DNA, 563 bp, Homo sapiens
acaggttctggcctgggggcattatttactttgttttcggagtgctatattggcttgcagtctgaccagcagtcatggttttgcccctcaagctcctttacaaggtatagcgtggtcagaatgtgggtggtgttggtcttgactactccgtactactcagatcatgcccggaggaggactgcagcccatttgggggtattgacctttaagagggacggtgacaaatgggattgtgtcctgggcgaagagggatctgatacagcatctgggaacacctcaagcctctagggatattttggcacaaagaagagcagaataagcgagactggattgctgccttcaagtatttggagggctgacatggaaggaggaaggaatgagatctcattgcatggccttaaagtgtgtggctgatgcagaggtgatttcacctcagtttawaaagaaccaagttgcacatatgagagtggcctaggataaaaggagatgcctcgggaggtaatgagtgccctatctctggggatatgtaagcagagactaagtggccacttgttgggctgcca

SEQ ID NO: 125346 - DNA, 614 bp, Homo sapiens
atctggaaggaaaagattaatctatttgtgccctaactgaagaggacaaataattaacagcacacataacagccaacgccatagacagctcaactggttcagctcacacaattctgaagttgagcaaactttccactcaatgagtgccaaaaccattgtgcctagatcagctgcagacaaaagtagagctgtcagtggacattttaaacaggtgggatcaagatcctgtactattttctcaaagaattgtatcagcaagtgaaacatggctttactgatatgatcttgaagatgaaatacaaagcattggctaccagaagtggaagtggttcagtcaaagcaaaagcagaccaatcaaaagcaaaggtcrtgtcaacagtttctagggatcctcaaggcattttgctgttgactttttctgcagggccaaagaaagataacatctgtttattatgaaagtgttttgagaaagccaaatctttagcagaaaaatgcctgggaaagcttcaccgagagtcattctccaccatgccaatgctcccgctcatccttctcatcaaacaagggcaattttgcaatttatagtcctggtttggctccctctgacttctttt

SEQ ID NO: 125347 - DNA, 567 bp, Homo sapiens
tgaaatatatagggtgttacaatcactcagagctttttgcccaaacccaaaacctgaaaaatatcattaaatccttgtgtgcagttagtttctaatgttagacaattttctaagcctacctagtatttatttctgcycttaaatatataaacctcaatacagttcatgagaacatatagattcatagcctgtagaaataattgcttttcaaatgtattagtcagagagaattgtttaagaatttttttaaagatctgtcaaaatcacaaaaaccagaccatctctgagaggcaggggaaccatctgctcagatccatattggcactgctctccctccagaacactgctctccctccagagtagcttgttctgaaaggatgaggacctgtctcaagtggctacagatcctggctcaggtgataacctttcttaggtagactatattgatagctggaggagtgatagagtactctgttttaattgtaaagatgatgtcactccgcctggttcttccttgaagcattctacagcgtagaattaagcagaatgtctgaggtcccagatgac

SEQ ID NO: 125348 - DNA, 573 bp, Homo sapiens
ccccagacactggagctatttgaaagggaatttaaaacaactttgattgatatgttaaaggttctaattgaaaagtagaacacatccaagatcagaggggtaatttcatcagagaggtgatagaaaaaatataaaaccataacagagacaaataacatctttaacagctcatttgtagactcaacacaaatagacttgaagaaaggtaagtaagagcaattaccmcaaatgaaatcccgcaaggaaaaaaaatgaatataaactttcaaaagaatagaaaatccaagagctaggcagtaatattctggaggacaagaaagagaaaaaggggcagaagaatatatgcaaagaaataatgaccaagagttttctaaaatttataacagccatgaaacagtatatctaagaaactcagaaaataccaaccatgataaataccaaaacaaaaaaagatctagacataacatattcaaactgctaaaacaaagacaatgagaaattcttgaaagacaatcaaatataaaagaaactttatatatagatgaataaacataataattacaacaaacttct

SEQ ID NO: 125349 - DNA, 573 bp, Homo sapiens
ccccagacactggagctatttgaaagggaatttaaaacaactttgattgatatgttaaaggttctaattgaaaagtagaacacatccaagatcagaggggtaatttcatcagagaggtgatagaaaaaatataaaaccataacagagacaaataacatctttaacagctcatttgtagactcaacacaaatagacttgaagaaaggtaagtaagagcaattaccacaaatgaaatccmgcaaggaaaaaaaatgaatataaactttcaaaagaatagaaaatccaagagctaggcagtaatattctggaggacaagaaagagaaaaaggggcagaagaatatatgcaaagaaataatgaccaagagttttctaaaatttataacagccatgaaacagtatatctaagaaactcagaaaataccaaccatgataaataccaaaacaaaaaaagatctagacataacatattcaaactgctaaaacaaagacaatgagaaattcttgaaagacaatcaaatataaaagaaactttatatatagatgaataaacataataattacaacaaacttct

SEQ ID NO: 125350 - DNA, 573 bp, Homo sapiens
ccccagacactggagctatttgaaagggaatttaaaacaactttgattgatatgttaaaggttctaattgaaaagtagaacacatccaagatcagaggggtaatttcatcagagaggtgatagaaaaaatataaaaccataacagagacaaataacatctttaacagctcatttgtagactcaacacaaatagacttgaagaaaggtaagtaagagcaattaccacaaatgaaatcccgcaaggaaaaaaaatgaatawaaactttcaaaagaatagaaaatccaagagctaggcagtaatattctggaggacaagaaagagaaaaaggggcagaagaatatatgcaaagaaataatgaccaagagttttctaaaatttataacagccatgaaacagtatatctaagaaactcagaaaataccaaccatgataaataccaaaacaaaaaaagatctagacataacatattcaaactgctaaaacaaagacaatgagaaattcttgaaagacaatcaaatataaaagaaactttatatatagatgaataaacataataattacaacaaacttct

SEQ ID NO: 125351 - DNA, 634 bp, Homo sapiens
  misc_feature (1)...(634): n = A,T,C or G
cactacctacccattaaaatgactaaaattaaaaagactgacaataccaaatgttggtgaggattagttgtggaattatacagcatttgaaataatatatcttgttaccttttcttgaaagtgtcatcaatgactcagctgactatgatttattcaagtatctgatggattttccaagagagtttttttataattttgattaaaattattcttaaaatataaatttaagaaaaatakatcaggctaccatagactttttcccaaaacagtatgtcagaagacaaagacgccacccaagaaaatttcaaggaaagaatattggaacccaaagttactgttcatatggaaggggagaaatataaagcattatagaaatgctagtgaagcaaagcaaaatggctgaagagaaggcnccaccaacttgacccccaccacccaacagtaacaccaaatttcacaactatctatacagaaaagaaccaaaaaccaggtaccagcttgacacagtggagtaaagcctcaagcaggctcttagagtctctgattccaggctttggctctttcatggcctttctggacctgccctgggccagaggggagtccactgcctaaagagtgagtcccaggccaggcc

SEQ ID NO: 125352 - DNA, 632 bp, Homo sapiens
attgccaggcatggactcaaacaaagtaggcacttggttaatatgtattgaatgaaagaaatgagcaggtaggcttttaggaagtggatcttttgactgactcccaaatgctggtcattgcatttctagaacaaaggccacattttagaaacaactggggagtctttttcatggacacatgcccagccccattagagcatcctggcagggtgtccagccgtgtatgttttgaagctcctgtggttcagacacaacctgttacacaactaccaccttgttatctctgtggtcctggcctgtgctgatgctgtgatattttcaccctgaaatgaagagtcatcccaacatcaaggtcagtaaaccaattcctgtccttaaaatggattcwttattatttgaatttcaaacaacagaccaaccatagctcaatgtttctcaagagtatcctgtggagcacagtgcgtgaacgcccagaagaaagcagtctgtggtcaggtgggtttctgtgccatttgctgccaccttccctgcaaacagtgatttacagcacacattgttcttgtgtctgttctgcagtgataaaacccatttaactcagtggttcccaaatgtactgaccgtggaactgtttt

SEQ ID NO: 125353 - DNA, 582 bp, Homo sapiens
attatgaacaagacctagctataataatgtrcagcagcaatccattatcaaatagacatagtatgtacaagatcagactcaagcaagctcagagcacaagcaagttacacgagcaggtggcccagacccccacagcacttacttctgatgccttttggcctctccctcaaccagcacttgtggtttcatggggagctccttatggcctgttgaaagagggggaaaatacacttgggccttatccctgtcaaaataccaatgacattcttcataaaaacaaaaaaatcctaaaatttatacaggaccacgaaagatcttgaatagccaaggcaaacccaagccagaaaacaaagctggaggcatcatactacctgacttcaaaatataccacaaagccatagtaatcaaaacagcatggcactgacataaaaacagacacatagaccaatgagacagaatagagaacccagaaattaatctatgtatctacagccaactgatttttggcaaagggaccaagaacatacattggggaaaggacaatctcttcaataaacagtgctgggccaggcacgatggctc

SEQ ID NO: 125354 - DNA, 627 bp, Homo sapiens
ctctagctcccatagaagaagttgcaaggcgagaaggggtggaggcaggggttcttcccattctgcccacaggaccccagagccagccccctcagagccacaggagctgggccaaggaagcctaaggctccagggcaggaggagcctccagcccagcctttctcccagcaaggccctcccatgtacctgggcggagcagcggcttcagactgccccctgaccttccagccagaggtgattcaagctggggaagggactccctgggtcctgacaaggtccttctgaaggcagcacccacacagccatggcccagaggaaagacagaccctccccccygccgccccgcaaccacacaaggcccctgagagcacttggttcttcggtcagaaaggctgggacagagcagagttagacccaaatcctgaggccacctactgccaggctggtcagacttctgtggcagcccaggaggctgactcccctcaatcaaccagttctgactggagacccagccttcctacccacccctggactgcaagactggcaggccttggagggcctccttaggggctaagaactggcctgagaaaacaagccctctccttggacctctgtgtaggcaacatg

SEQ ID NO: 125355 - DNA, 627 bp, Homo sapiens
ctctagctcccatagaagaagttgcaaggcgagaaggggtggaggcaggggttcttcccattctgcccacaggaccccagagccagccccctcagagccacaggagctgggccaaggaagcctaaggctccagggcaggaggagcctccagcccagcctttctcccagcaaggccctcccatgtacctgggcggagcagcggcttcagactgccccctgaccttccagccagaggtgattcaagctggggaagggactccctgggtcctgacaaggtccttctgaaggcagcacccacacagccatggcccagaggaaagacagaccctcccccccgccgccccgcaaccacacaaggccccygagagcacttggttcttcggtcagaaaggctgggacagagcagagttagacccaaatcctgaggccacctactgccaggctggtcagacttctgtggcagcccaggaggctgactcccctcaatcaaccagttctgactggagacccagccttcctacccacccctggactgcaagactggcaggccttggagggcctccttaggggctaagaactggcctgagaaaacaagccctctccttggacctctgtgtaggcaacatg

SEQ ID NO: 125356 - DNA, 574 bp, Homo sapiens
ctttgacagaatgcatagcaactccaaattagaaacttattagggactgcctttatcctctgcacacaatttaatactaaactggggacaaagattgtcatttgagcctccaccatgcccccagtgcccacacagcacagtgcacagcataaagcagatgttagacaaagatacagtgaaggaaaacatcagtgagccactgattccttcaatggatccagtgtgctttcagtgaaccaatggctcagaaacagtgagctccagtgctctggggttgacagcgtccctgtgaccttagcacactaatcactctctctgattctctatttctttgcctttaaaatggggattacrcatgtcgctcttcctgtggctgagtaaagattaaattacttgggcgctagagacgtttattagttgaggttctccagagaaatagaaccaataggctacacacacacacacacacacacacacacacacactcacacatgcacgcatgcacacacaccctttcatacataatgagatttattataaggaattggcccatgtgattatgagggctgaggta

SEQ ID NO: 125357 - DNA, 574 bp, Homo sapiens
ctttgacagaatgcatagcaactccaaattagaaacttattagggactgcctttatcctctgcacacaatttaatactaaactggggacaaagattgtcatttgagcctccaccatgcccccagtgcccacacagcacagtgcacagcataaagcagatgttagacaaagatacagtgaaggaaaacatcagtgagccactgattccttcaatggatccagtgtgctttcagtgaaccaatggctcagaaacagtgagctccagtgctctggggttgacagcgtccctgtgaccttagcacactaatcactctctctgattctctatttctttgcctttaaaatggggattacacatgtcgctcttcctgtggctgagtaaagattaaattacttgggcgctagagaygtttattagttgaggttctccagagaaatagaaccaataggctacacacacacacacacacacacacacacacacactcacacatgcacgcatgcacacacaccctttcatacataatgagatttattataaggaattggcccatgtgattatgagggctgaggta

SEQ ID NO: 125358 - DNA, 604 bp, Homo sapiens
ggactgttgataagcatgggctgtgtctcctttggtttgagctagtttgcttttaaaagcttgttaaaatgacttaatgattcagaaaacccattgttctactgctgggtaagcaggaagggatgggtgagtttaggtttattgggcttgtgagtgccatgggccaggtaggctgctgggagctttgtgtgcatcctcttgtttagtgttggacatttgtccccattcacagtcaaggaaaccaaggttcagagagccaagtggcctttcccaggtgacacaaccaggaagggccagggccaggatgtgaactgaagtccccctgtgtctarctccactgccttgcagaacaggccacattctttttcttctgcctgtggagaccacggcacagtctcctaaaagtgacctcaaactccatcagaggctcagaggactgagagtccagtggtcaaggtacacctagccaggagcaatctttattttttagtttggggagaatttgatatttactaagcaaactgccaagcctgtgagcttgaggaaggaagtttatgaagaaacactgtgcctccctgcagatgtctttcaggcttggagctcc

SEQ ID NO: 125359 - DNA, 607 bp, Homo sapiens
tacataaaatttcactatggagaatatcacccctgctcaaccccactcactgtaaaaagctattgaggctgggctctgtggctcacatctgtaatcccagcactttgggaggcctagatgaatggaccacttgaacccaggagttcaagaccagygctggcaacatggcaaaactccacctctacaaaaaatacaaaaattagctgggcatggtggcatgtgcctgtcatcacagctacttgggaggctgaggtggggcagaatagcttgagcctgggaggtcaaggctgcagtgatctgtgatggggctactacactccagcctgggttacagagcaagatcctgtctcaaaaaaaaaaaaaaaaaaaaagctattggtaggaagagtaattgagaaataactgcttaatgggtatagggttttcttttcgagggatgaacatgtttgaaacttcatattgatggtggttgccaccaaaatgtgcattttaaagtggttaatttcgttatgtgaatttcacctcagtttttttcaacaaagttttgacagatgaaaggtttaagtcacttcagaagcagctccttgggcacaactaaacttgaaag

SEQ ID NO: 125360 - DNA, 549 bp, Homo sapiens
cttccgccttgatcatcacactcagtatttttgccaagtccttttcatagctaatgtagttgataaatttctggtggaagcactagtgatgataatatatgcaatactatatttaaaggtaatctaaatctagctttctagcttaaaatctactgctacttgaaatattctaaattcagaattatctcattatattccatttcacatatcctaggttgcataatactgtattacatacttattgaatgcagagcaaattgtactaaattctaggaaaatcatggtgtacacaaaaatgtagatatgaaaacaaaataagacaattaatataaaaggtacttagatatatttgtaatttattaatttcagagtggaaatagttatcctttcaatagttccctttaaagtcaccttctttgcatgacaaagtttattttttaaaatagtgtttttatttgttttatgaaactkaaatgtgttattttatttattagattaatatataggatcagtttggtgctatgaacttttagtattatttaaaagact

SEQ ID NO: 125361 - DNA, 532 bp, Homo sapiens
  misc_feature (1)...(532): n = A,T,C or G
gcaatccttgctggttttacttctttagtggccttcaagccgtttccattgttaagctgatggctttgaaactgtgtttaggagctcttgggtttccaggaatcatcatctcatgtcctaannnnnnnnnnnnnnnnnnnnnnnnnnnnnnnnnnnnnnnnnnnnnnnnnnnnnnnnnnnnnnnnnnnnnnnnnnnnnnnnnnnnnnnnnnnnnnnnnnnnacaaagtacttccaaacccctgcttgaccacttccctgctgtgctaactccagccatgatactacatstttctgtatcttgctttcttcctaagagctgagtcctgtatatggacagcatatcccagtgtctggcatgtggtggggacacaatatacattcctttctgcaacagagttttgagagctttctgtgtacggggcaccatgtttatactaggggctctgtataaaaatggcaaatgtgatataatatccaccttcacaggattgtgtgtagaccagatgcagaaaaatataaagtaattgtagt

SEQ ID NO: 125362 - DNA, 577 bp, Homo sapiens
aaagattattggtaaaataaagacatttggtctaaattgcgccagtcagatttaggtttgccaaatgctttaatatcataaagtgcttttttaacttgataattgttcaacttacctgctttggagccattagattccaggtaaggcatgggaacatgtggagttagccatgcccccggctatgctgaaaaaggaccttatctggacttatgtctagtgtcttaggctccacacctgatagataattaaaatccttacttaccagatttttcaccaaaaataaaagttgctcagttagcattgtaacgtttaattgagtctactgaataagcagttttacatacaaggtgtgtaaggacagtgacgtgtttttggtaaaaaattataagaaggcatgggaatayggatttttttggcctagtttagaggcttaaaaacttttttcaagctagatagaaaaaagctgaaggtttaaacaagttgtggaaggtttgtgaacaattaatcttataaaagaaattctgtgtgtgaacatattagctaaaattaaaggaggtattattcagtttttttcata

SEQ ID NO: 125363 - DNA, 521 bp, Homo sapiens
gtttatgagaatcttaccttatgatctaactgattaagattggatagattagtctataaggttttttttttaagaattaggtttggcwtcaatactgcattaatgcaaaggtgaaatttggctttctctgttgaacaaggttttcatgttatattaaaaaatacgaaaatgtttttgtttgccttttaaataaactataagaaaaagaagggaaaggaaagagtcagattgtttggaaagctaagtcttccctctattaagaagtaaaagatgtatttgtgtaaatatgttttaggtatgtgttccaaaattatgggaaactcctataattctgatatgatttagtggatgttattaatagtcataattattatgtaaaattgttgtatgccacagaagtaaccaaaattttcttgtcaattgtggctttaatagtggctgttctaagactttttgtcaaccatggacaattgctgtcttattttgatccccttcaaaaggtggtttataatcagctataa

SEQ ID NO: 125364 - DNA, 521 bp, Homo sapiens
gtttatgagaatcttaccttatgatctaactgattaagattggatagattagtctataaggttttttttttaagaattaggtttggcatcaatactgcattaatgcaaaggtgaaatttggctttctctgttgaacaaggttttcatgttatattaaaaaatacgaaaatgtttttgtttgccttttaaataaactataagaaaaagaagggaaaggaaagagtcagattgtttggaaagctaagtcttccctctattaagaagtmaaagatgtatttgtgtaaatatgttttaggtatgtgttccaaaattatgggaaactcctataattctgatatgatttagtggatgttattaatagtcataattattatgtaaaattgttgtatgccacagaagtaaccaaaattttcttgtcaattgtggctttaatagtggctgttctaagactttttgtcaaccatggacaattgctgtcttattttgatccccttcaaaaggtggtttataatcagctataa

SEQ ID NO: 125365 - DNA, 521 bp, Homo sapiens
gtttatgagaatcttaccttatgatctaactgattaagattggatagattagtctataaggttttttttttaagaattaggtttggcatcaatactgcattaatgcaaaggtgaaatttggctttctctgttgaacaaggttttcatgttatattaaaaaatacgaaaatgtttttgtttgccttttaaataaactataagaaaaagaagggaaaggaaagagtcagattgtttggaaagctaagtcttccctctattaagaagtaaaagatgtatttgtgtaaatatgttttaggtatgtgttccaaaattatggraaactcctataattctgatatgatttagtggatgttattaatagtcataattattatgtaaaattgttgtatgccacagaagtaaccaaaattttcttgtcaattgtggctttaatagtggctgttctaagactttttgtcaaccatggacaattgctgtcttattttgatccccttcaaaaggtggtttataatcagctataa

SEQ ID NO: 125366 - DNA, 562 bp, Homo sapiens
ttaaatctaatctccctcagtatgtacttttaagagacacctctctaattttattttgaaaaatatttgtgtaaattgttttaaatgttcaaaatattacaattttactgtgatactatcaccatcatcccacatcaacccagacagagcattcttgtacatctgacaatcttgagtttttggacatttccgataagaaaaatatttttttccatgttatctctgaataaatttctattttgctcttaatcctcatccaaatgagcttatgatgtgtttctccttagaattgctgagggcagacattgttttaatcctccatttattcctacyttttgggttcaggttctagcacagagttagagctcaaaaatgcctgtttatctgaactaaagattgcacatgataccctgtgtggtttctcagaagacactgccagaggagtttgaccagctttggctctaggcttagatcatgatgctctctggaagtgctgaccaaacgcctcagcaatgcccggtgatttgtgaacagcattgcctccaggatgtttgaaagacca

SEQ ID NO: 125367 - DNA, 572 bp, Homo sapiens
cagttcgggagttaggatttcaaaatgtgcattttgagggacacatttagaccatagcgtaggtcatgtttttaaagttgctttcttggccctggaatggcaatgcagtcatctgaattggtcttaacctaccaggaatgggcttatattttgaaaatatttctcgataagggagtaaaataagttgtatgggttttttgtttaagaaaggattcctttgtttactctggtatgcttatccacttctgtgatgtcaaccatgggtagtgacctaacattaatttaattcaacagatatctttgtctgccttgattcctgcatcccctgggctccacagctattcacttgtattgattctgttaactcttacacattaactttgagctgtgtctccttccttttatcattttgtgagtaaagaattttaatttgccaacaaatcctaatgtggactttgtcamgttgtgaaataaagtgattttttggtatggaaatatgtgttaagacagactgttagtctttgcactttaacaactagctgatacacttacgtcacatggatgaaaacata

SEQ ID NO: 125368 - DNA, 602 bp, Homo sapiens
agttatactatatggtctaaaaagaggaggaactctcagttctgggaattgcccacctctttcctggaaaactcaggaataatacaccccttgtttagcatataatcaaataactataagtataatcagtcaagcagcctatgccactgctctgtctatggagtagccattcttctattcctttactttcctaataaacttgctttcactttactctrtggactcaccccaaattctttcttgcatgaggtccaagaaccctcacttaaagtcttgatcaggaccctttttctgtaacatcttcctggtgaccacaatgagattaaactaaggagactcccctacccaaaagaaatagattagatcaccaatgtatgactttgggtaagtgataggaaccattttacctggttaaaggatggaattgggttagaggcccaacttaggagagttagagcctctcctaagacagagagcttaaaggcccctcttaataaaaggcaaggacgcttgatggaacttaggttcaaggcccaaactaggaaggttagagtccttcctaagattaagggggttagaagctcctctcagtaaagtccttc

SEQ ID NO: 125369 - DNA, 531 bp, Homo sapiens
ctcattctcctcctgtgggagttgaggaaatgggtggtattaacccctggacattgtggagggcagaatgagatggcatctatgaaagcatctgcttggtgctgggyacgtagagcttgagttctgggtcttcatgtttagttaactataatccatggtgacatttacatcccaccgagtcacagagtcacagaatctgggcattggggtgggctgaaggggttgtagatttcttcttcccaccctattaagaactccttttacagtatccctgatggtggccaccttgtctgtgcttgattaagtctagaggttgaagttggctacatcttggagacccagacagcactcagggttagaaagttcttcctttctctgtgtccatcagcaggccttcccctgcatactcacatatactctgacacacgtcagtaggagcataaatatttatgacatgtagctaatgcagtcggcttataggattcccagagcttcagatgggagatttttgcacgagaagccctttatctg

SEQ ID NO: 125370 - DNA, 624 bp, Homo sapiens
tggctgcaggccccatgtggtggagttgaatggtcataaaggtaaagatcatgagaactggtgtacccatgaaacaagaataagaaaaaccccacaggccatcttggaagttgatgaggaaagtttgatgttcactgtggccatgggtatataacaggtctctaccagtccattcttgcacagctataaagaaatacctgaaactgggtaagttataaagaaaagaggtttaactggctcacagttctgcaggctgtgcaggtagcrtagctggggaggcctcaggaaactttcaatcacggcagaaagggaaaaggaagcaggcatgtcttcacatggacggagcaggagaaacagagaatggaaaggtgctacacacttctaaacaaccagatctcatgagaactcactcactatcatgagaacagcaaatctgcccctatgatccaatcaccttccaccagacctctcctccaacactgggggttacaatttgacatgagatttgggtggggacgcaaatccaaattgtatcaggtaatgatagccattatgaataaattggcatcatgaaccaagtgatgggcttgagttctaagttcctactacttacatggtcaggaa

SEQ ID NO: 125371 - DNA, 580 bp, Homo sapiens
acctcttcttttcatagggtctgtgggcaaatctttatctatagccctgaccccttgtctgaactttaaactcatataaccaactgcttcctagacttctctgcctagataaaccacatgcacctccaaatcaaccagacaccttccctatctcagagttttcctgactctccaactagccacccgacttacatatctcaaggtcatcctagattcattacctacacatgcagttatcttgaccagaccgtacctcccttattcatagtgagctggcatctcttctccatcctcactgatctgcaagtctagacccctataatatctccagtttagactattgaagaccttcactatcaggcctccaatctctggtttcttatgatagataatatagtttgcaaactgttttcagagtgtggtcattacaaaacactgatctgtttttctctgttctgaatagaggytggcagtatcgtctgattgcctataaataaagcctatctttttaagctcgtatctagcaaaatctcacagagtactctaagatctagttactttagattatttttttttcccc

SEQ ID NO: 125372 - DNA, 624 bp, Homo sapiens
tttttttttccccgattcatcaatgtgggacctcrtactttgtggtgtgtaactcacagccaagctcagatctttccccttgtaacataatcgttgggacagatcagttcattcctaaagtggtaccaccaagctgtgatcccatggtattcctcctcttgtattacctgttttaaactgctggccatccagaggcccaagatgaaaacccagaaatcatcctagacttttaagttaatgtagtcaacaggtaatgaacatattatttgtcaggtgtcataaataatatggcataataataacaccaaacacatacatgctaagtgatgggcacttttgaagtgagataaacagacaagtagacagaagaaatatattaatatataacacttagaagcaaaataggaatagtatgcatctcaaatacttgtgaggattaaatgttctaaataaactcatatatatcacttagaacattttatcttcaccacaaccatttgagatccatactattattattctattttacatactggagaaacgttggctcagagaggattagtaacttactcaagatcacataactaataaacactggagctaggctttgaatccaatcagtgt

SEQ ID NO: 125373 - DNA, 665 bp, Homo sapiens
ttatattacaggagaggaaagagttcagataaatctttagagttctagataagttttgaaatatgagtaggtgttctccagatagacaaaaaggaaaaatctaaacaagcaaggggcaaaatcagggagcagtaactcctaaagaccatacgtctagctgaagagttagcacacacctttgtgtctccagcatattgctttggagatctacagtgatgtgagataggaacacaacgagggtggagagatgatgttctcattaagattaagccatgtttattactgaactgggaagaatgaygccttctatatttgtatagcaccaattttaagatgctatcttagtaatatttacaaccttggagatctggctatttataattatcaccattttccgtgagggaatccagaagtagaagcatccaaagttgttcaaacaattatcagtagatctagaaagcagaccctaatttatagctcactgaagtgctcaaaataacaagattatactaattctacactctcccaccatttctcttcttatctttagaaaaatacagcaaaatgcaacagctgaaaaagctaaggtagagttaaaatacaatcagaaatagtaatgggccatgcagaaaatgatgaataaactatgagacaggtttgtggtg

SEQ ID NO: 125374 - DNA, 603 bp, Homo sapiens
tattattattatcaaagtattatataccgcacatcattgtatgtgctgcacataatcatatgtgctctacaactggcagcacaataggtttgtttgcaaccagcatcaccacacacgtgtgagtaatgtgttttgctccaatgttatgatgcctacaatgtcactaggcgaataggaattttttagctccattttaattttatggaaccaccatcctataggcagtctgtcattgaccaaaatgacattatgcagtgcaagactgtatttttatcttgccaagttccttttcgatccctttccaagtgcattaactgtgaatccttatttttagctgattaattatctaactcctctttcacaggcacaagaaccaatgtgaacycaaagcaatgaggaaggaaggcaggaaagggaaaataagggagtgttccttgttgccctggaggcttggaggaaagctgcttaattctcaatttatttttctccatttattcagtcaataaatgttactacaaaatttttaagtacttttcatttcttaaaattcttcagctgtgtaattacttgttcattgatcttctgcccagttagactgtaagc

SEQ ID NO: 125375 - DNA, 603 bp, Homo sapiens
tattattattatcaaagtattatataccgcacatcattgtatgtgctgcacataatcatatgtgctctacaactggcagcacaataggtttgtttgcaaccagcatcaccacacacgtgtgagtaatgtgttttgctccaatgttatgatgcctacaatgtcactaggcgaataggaattttttagctccattttaattttatggaaccaccatcctataggcagtctgtcattgaccaaaatgacattatgcagtgcaagactgtatttttatcttgccaagttccttttcgatccctttccaagtgcattaactgtgaatccttatttttagctgattaattatctaactcctctttcacaggcacaagaaccaatgtgaacccaaagcaatgaggaaggaaggcaggaaagggaaaataagggagtgttccttgttgccctggaggcttggaggaaagctgcttaattmtcaatttatttttctccatttattcagtcaataaatgttactacaaaatttttaagtacttttcatttcttaaaattcttcagctgtgtaattacttgttcattgatcttctgcccagttagactgtaagc

SEQ ID NO: 125376 - DNA, 588 bp, Homo sapiens
ttttattcttactcttcacagttgaacacaaatatcagcttaagtccaataataatctatttgagatgtagatctgccatttaggggatatcttttattatgtcacaatcacttttttgttayggcttttcacatattagaagggcaaatgcgattagctattcaaataatagaacaagcaaaaattgctgcataaagataatgatgccatccgaattgaacctaggaatcctggccgaaggcaccactagttgagagttcaaattcatgctcattgggtgatgtgtggaagctgatattaatttagtactttgagtgtcaatgtgcaatgtataagatttcacacattaaaaaaatacaaatttgaagcagggcacagtggctcacgcctgtaatcctagcactttgggaggccgaggcaggcgaatcacgaggtcaggagttctagaccagcctgaccaacatggtgaaaccccgtctctactaaaattacaaaacttagttggatgtggtggtgggtgcctgcaatcccagctactcaggaggctgaggcaggagaatcatttgaactcaggaggcagaggttgc

SEQ ID NO: 125377 - DNA, 588 bp, Homo sapiens
ttttattcttactcttcacagttgaacacaaatatcagcttaagtccaataataatctatttgagatgtagatctgccatttaggggatatcttttattatgtcacaatcacttttttgttatggcttttcacatattagaagggcaaatgcrattagctattcaaataatagaacaagcaaaaattgctgcataaagataatgatgccatccgaattgaacctaggaatcctggccgaaggcaccactagttgagagttcaaattcatgctcattgggtgatgtgtggaagctgatattaatttagtactttgagtgtcaatgtgcaatgtataagatttcacacattaaaaaaatacaaatttgaagcagggcacagtggctcacgcctgtaatcctagcactttgggaggccgaggcaggcgaatcacgaggtcaggagttctagaccagcctgaccaacatggtgaaaccccgtctctactaaaattacaaaacttagttggatgtggtggtgggtgcctgcaatcccagctactcaggaggctgaggcaggagaatcatttgaactcaggaggcagaggttgc

SEQ ID NO: 125378 - DNA, 518 bp, Homo sapiens
aaccctgtctataaaaattagctgggcatggtggcacacacttgtagwtccagctacttagggggttgaggcaggaggctcatttgagcccagcaagttgaggctgctgtgagctatgttcacaccactgcactccagcctgggcaacagagtgagaccctatctcaaaaaaaaaaaaattacgtatcagttacctactggattctcttattgtctgtaaagtttttttcctcccagttgatttccttggagttttcagacatatgattatatcaagtagaaataatgtttaaagttttttctgtcataatatttacatattaattatttttcttttctaattgcattggctagtactttttaaacaatgttaagcaataataataattgttagcaacttgtcttgttcctgagtttaattagaatgtttaattagtttcattagaatgccttttccctaagtttaattagaattactaagagtggtactggagtttaaattaaaatacattatttat

SEQ ID NO: 125379 - DNA, 518 bp, Homo sapiens
aaccctgtctataaaaattagctgggcatggtggcacacacttgtagttccagctacttagggggttgaggcaggaggctcatttgagcccagcaagttgaggctgctgtgagctatgttcacaccactgcactccagcctgggcaacagagtgagaccctatctcaaaaaaaaaaaaattacrtatcagttacctactggattctcttattgtctgtaaagtttttttcctcccagttgatttccttggagttttcagacatatgattatatcaagtagaaataatgtttaaagttttttctgtcataatatttacatattaattatttttcttttctaattgcattggctagtactttttaaacaatgttaagcaataataataattgttagcaacttgtcttgttcctgagtttaattagaatgtttaattagtttcattagaatgccttttccctaagtttaattagaattactaagagtggtactggagtttaaattaaaatacattatttat

SEQ ID NO: 125380 - DNA, 443 bp, Homo sapiens
tggaaatcctcagcacatctgggtggtcatgtcccctaggatggtagtggggcaggcactaccatcaaatttccagggacagctattgtcatttctccattttaatatttatgtagtacrtatgtacatatgcatatacatatatatacacatatatttctgtgtgtgtatgggcatattattgattcctacagccctggttctttacctcaccacttgcactcatgttgctggctgcaacttctataacgctagcagaaccagtcaagaggataaactttccgtgctttccttatatatactgctccttctgactaggactgtcatccttaaccatctatttaatttattaaattccattcatcttttgagtctcaggttaagtattatgtcctccagcaatttacaatgtcattgtaatagtcatttttactgtttaccag

SEQ ID NO: 125381 - DNA, 656 bp, Homo sapiens
tgttagaaatgaattattagttagtatgtctcaaaaactagtaagagaacttttaatcaaaatctcttacatttcaaggccatgtttactctgaagatttttctatgaaaataacttcaaacggagtacacatcctgattccaaatgtattatcattagcagtattagcagtaacctttagatttaaaataaaattagatccagaaatttaccagttagtagaagtttcattctttgagattttaaagttcaaatcagccatccctcctacaggtactctgtcactccctgtagtaaaatgtagcaacttcttttgaagatcaagaggaaatccaagcacaacatcccaaaagtatctagagaataccaaaggaaattaacatcaaatgtcttgacaaaaatcctataataaagtaatataaaggaagctctaaggaaaggactttccttaagcatacataatatcctgaatttctgtaaaattaaggaatggtgagcttcyatatacgtattagacttttgactaacattataaaataatatttttataaaagtatataagttcagcagtggatagtacaggaaccatttttctcctgcataactttcaagtcttatttttcaacatagtgctattaaactgttatttacaagga

SEQ ID NO: 125382 - DNA, 662 bp, Homo sapiens
ttcttggtatgatttgaatgtagtcccatcatctatgtttactggcatttagggcttagctttaattactataacccccacccagggcctttatggaataaccatttaccacggtagttttgacctcagaggttgatgacatgttggaaatttgcataygtttacaccacacaggctgaggctagggtatgggagtcgatcgcttggctcctgagcaaagctatatctgtggtttcttgttctctactcttctgaaatgatacaactttattcctttgtaaaaaaaagagactgaaagaaagccaactactagtcctgataatgcatgtaaaaacaaagtgaggaagatgtatttagaatttatgttttgtacaaacagtggaattatcagggaaatgcaaattaaaactacaatgagatactaactcactcctacaagaaggagaaaaaattcaaaaaacaatagctgctggtgtggatgtgataaaaagggaacacttttacactgctggtgggaatgtaaattagtacaaccactatgaattccttaaagaactaaatgtagaactaccattcaatccagcaatctcactattaggtatctacccaaaggaaaagaagtcattatatgaaaaagacacatgtgcgtgcatggttatagc

SEQ ID NO: 125383 - DNA, 662 bp, Homo sapiens
ttcttggtatgatttgaatgtagtcccatcatctatgtttactggcatttagggcttagctttaattactataacccccacccagggcctttatggaataaccatttaccacggtagttttgacctcagaggttgatgacatgttggaaatttgcatacgtttacaccacacaggctgaggctagggtatgggagtcgatcgcttggctcctgagcaaagctatatctgtggtttcttgttctctactcttctgaaatgatacaactttattcctttgtaaaaaaaagagactgaaagaaagccaactactagtcctgataatgcatgtaaaaacaaagtgaggaagatgtatttagaatttatgttttgtacaaacagtggaattatcagggaaatgcaaattaaaactacaatgagatactaactcactcctacaagaaggagwaaaaattcaaaaaacaatagctgctggtgtggatgtgataaaaagggaacacttttacactgctggtgggaatgtaaattagtacaaccactatgaattccttaaagaactaaatgtagaactaccattcaatccagcaatctcactattaggtatctacccaaaggaaaagaagtcattatatgaaaaagacacatgtgcgtgcatggttatagc

SEQ ID NO: 125384 - DNA, 662 bp, Homo sapiens
ttcttggtatgatttgaatgtagtcccatcatctatgtttactggcatttagggcttagctttaattactataacccccacccagggcctttatggaataaccatttaccacggtagttttgacctcagaggttgatgacatgttggaaatttgcatacgtttacaccacacaggctgaggctagggtatgggagtcgatcgcttggctcctgagcaaagctatatctgtggtttcttgttctctactcttctgaaatgatacaactttattcctttgtaaaaaaaagagactgaaagaaagccaactactagtcctgataatgcatgtaaaaacaaagtgaggaagatgtatttagaatttatgttttgtacaaacagtggaattatcagggaaatgcaaattaaaactacaatgagatactaactcactcctacaagaaggagaaaaaaktcaaaaaacaatagctgctggtgtggatgtgataaaaagggaacacttttacactgctggtgggaatgtaaattagtacaaccactatgaattccttaaagaactaaatgtagaactaccattcaatccagcaatctcactattaggtatctacccaaaggaaaagaagtcattatatgaaaaagacacatgtgcgtgcatggttatagc

SEQ ID NO: 125385 - DNA, 599 bp, Homo sapiens
cggggtcttagaatcgcgtcctatgtacaggttattgatccagctgaaatgagaaactatagccagggtctaatcacttcaaagcttgtcaggactttcagaatggctttcatgaagaaataaatagctacaaagaatatcaaatagctttttgggtagtgtgcacacacctaatagctcaattgattgcactttggttgagatgagaaaatgcttaaggttacagaaatcatatttttctaagtagaawcatacatagtagtcaacgaaatccttagaaagtgaagaatcaagcatatactttgagtatgctttctataactttgtttcctatatcaaaacattctggtatgtattaacttgctatttggacttaaagcttcacagggattttacacaaatttttaaaatatagtaatttttcactaaacttactacttcaccatgacctaatttttgacccatgggaattacatactaaattatgacaaaacacacaaccatacccaattttttaaaatccaaattcgaatgaatgtctgttcatatcttgtaaatagtttttcttcagatagttcactgctcttggatttatgcaa

SEQ ID NO: 125386 - DNA, 562 bp, Homo sapiens
atttttaattccagagaatgatgatcataccacctcatttttaagggacctccagctccatctgtgttcctgcaaagtcctctattcatattcttttttctggctgcatagtattctatggcatatatgtaccacatttctttatccaacctgcccctgatgggcattttggttgattccatgtctttgctgtcttatagagtgctaataatatagagtgcataagagcattccattaagattttctacttttgcctaatagagaactttgatcccaaatcatggagacttgtgtttcattaggaattttcagattgacaaataagtacagygggtcaactttttcagcagcactatcagaatgattttttttttttattccagaggatgctgatggcactgcctcattttgaaggaacctcagctttgccaacccattttattacctcaacctctaataggcagacaaaagtataggcaaatttttctataaataacagacctttcctcactcgaacattcagttgccaggttttaagctgctttgctgctgttctaggta

SEQ ID NO: 125387 - DNA, 562 bp, Homo sapiens
atttttaattccagagaatgatgatcataccacctcatttttaagggacctccagctccatctgtgttcctgcaaagtcctctattcatattcttttttctggctgcatagtattctatggcatatatgtaccacatttctttatccaacctgcccctgatgggcattttggttgattccatgtctttgctgtcttatagagtgctaataatatagagtgcataagagcattccattaagattttctacttttgcctaatagagaactttgatcccaaatcatggagacttgtgtttcattaggaattttcagattgacaaataagtacagtgggtcaactttttcagcagcactatcagaatgattttttttttttattccagaggatgctgatggcactgcctcattttgaaggaacctcagctttgccaacccattttattacctcaacctctaataggcagacaaaagtataggcaaatttttctataaataacagacctttcctcacycgaacattcagttgccaggttttaagctgctttgctgctgttctaggta

SEQ ID NO: 125388 - DNA, 530 bp, Homo sapiens
tacaaaaaaatattaaatttttatgtaccaagatggactcagaaagaacacatgtaatcattttagtttctaaacttggccaggttggtggataggaaggaaaggcatggcagttggaattgcagaactcyggagtcaggttgacacgagttgtaaaatactccattactcattagcaatcatcttgcacaaactattcactcacctattcaattttctccttactaaaatgggaatcatatagctgaaagtttggatttaagatcagagaataatgtgtatgatttagcatagtgtctggcacacagtagatgccatataaattatagttactattggtaatgaaacagaataaaaataaggccttctgtaactcttcagaaattaaggatgcacactatcaccttttaccaaaattaaaatggtatcagtgagcagtcaatgcagaatacagttttaagtcctttcttttcacagctattttcagttttgtctagttctcactcctattttgccaattcctaattttg

SEQ ID NO: 125389 - DNA, 623 bp, Homo sapiens
ataatggactccttggattatataaaagtactcctactcaataaagacgatgagaaaatacagatgcctgatcatattgacattgccaataaagacaatgagaaaatacgaattccttctcctaactttccattcaaatactaatgaatagacaaggaggaatgaagaatttcaatagctctagagactaagaatattgaagaataatctgccagatattagccaaatgtgtcatgaagtcctgaggcagaaagcaggaccttaatggaatgaaggagatagaggaagaggttccatccaacagctcctactggatagctcttcctctccactaaagctagagaaatattctgcccctatgcaagggctttctacggtcatcaacaccacttctctttcatttctatcacccttattatctcctccactcttttttcttgctgtgtgtactatytgtcctaactttttatcttgaaggaattctagactcatgtaagagttgcaaaagtaattcagagagttcccatatacccttcaaccagcttcccctaagtgcattggtacaatattattaactatgctacagacttcattcagacttcaccactttttgtctgtgaatg

SEQ ID NO: 125390 - DNA, 600 bp, Homo sapiens
attagtgaaagatggaagtgaaatgaaggcaggactaaggatgggatgaaagttttgggagctgattaggaatctgctcatttaacaagcatgaaggtttttttccttattgttctagcatggaatggattcttaaagaatcaaggcagttatcaagctgaagaaacttaattctaaggaattttggcttggattctccagagtggtagttttccaggctaaaatgcaccaaaaaaggtctatcatgagctcccttttgtgatacatgaaggtttcttgaaactggcactagcttttcaggatgatgtaaaagctttaactctgcattcartcttttgggccattttatttctaccttttatgggcaatgttaaataaagcttcaagtactatgaagaataaaacctgattgtcctggtcccagtcacatcttaatgctctttccagaaagctagaacagcatattcttcctaggtggtatgaagattagcaaagggaaaaaaatgatagaaagaggccaggtgcggtggctcacgcatgtaatcccagcactttgggaggctgaggtgagcagatcacgagctcaggagtttgagacca

SEQ ID NO: 125391 - DNA, 594 bp, Homo sapiens
cggctaatattttatatttttagtagagatggggtttcaccgtgttagccaggatggtctcaatctcctgacctcatgatccacccgcctcagccttcgaaagtgctgggattataggcatgagccaccgtgcccagctgcaactttttttgtaatgttcaaaacacataaataaattctccctttcttgcttcctattttcatcaggaaacatttattgagtcatgtgtcagatacattaaaaagagggctaaaactagatsatgcatttaaatatcaaaaaatacttccaagtaaataaaaattaacccaataatatactcttaaggagacgtggttgtgtggttgtttgtttgtttgtttgtttgagacggagtctcactctgtcacccaggctggtgtgcagtggcgtgatctcagctcactgcaacctccacctcccaggttcaagcaattctcctgcctcagccttccaagtagctgggattacagacccatgtccagctaatttttgtatttttagtagagacagggttttgccatgttggccaggctgatctcgaactgctgccttcaagtgatccacctgcctgg

SEQ ID NO: 125392 - DNA, 542 bp, Homo sapiens
ttacctcagactcctaagtagctgggactacagatgcgtgccaccatgcctggctattttatttatttattttattttattttattttatttatttatttatttatttatttatttatttatttatttggtagagatgaggtcttgctttgttaaccaggctggttctgaactcctggcctcaagcagtmtttccatcacagcctcccagaacacgaggattacaggcatgagctgccatacccagcctatattttagttttgaatgtgacttttttgtgatcacaaattttcaatgacacaaaactgtccgtcatcccccaaaactctttcatcaagcttgttttctctgggaacagaaaactagtattacagatgaatactgagcaaaatttggcacctctacctgatttattatgggctatttaggaagataatatttcctactatgtaaaggactttgtgttgatcttttggcctttatgtaatttatgtttatgtttctggcaatgccctgatggttaatgtccttatggtaattaa

SEQ ID NO: 125393 - DNA, 542 bp, Homo sapiens
ttacctcagactcctaagtagctgggactacagatgcgtgccaccatgcctggctattttatttatttattttattttattttattttatttatttatttatttatttatttatttatttatttatttggtagagatgaggtcttgctttgttaaccaggctggttctgaactcctggcctcaagcagtctttccatcacagcctcccagaacacgaggattacaggcatgagctgccatacccagcctatattttagttttgaatgtgacttttttgtgatcacaaattttcaatgacacaaaactgtccgtcatcccccaaaactctttcatcaagcttgttttctctgggaacagaaaactagtattacagatgaatactgagcaaaatttggcacytctacctgatttattatgggctatttaggaagataatatttcctactatgtaaaggactttgtgttgatcttttggcctttatgtaatttatgtttatgtttctggcaatgccctgatggttaatgtccttatggtaattaa

SEQ ID NO: 125394 - DNA, 524 bp, Homo sapiens
gatcattgctcactgcagtgtcaaactcctgtgctcaagcgatcctcccactttagcctccccagtagctgggactacaggcacgcaccatggtccctagctrgttttgcttttttttttttttttcatgtcatgtagagatggagtttcacctcccaaagtgctgagattacaggcatgagctaccatgcccagccaaaatgtttctaaggctttcaggagttccctgagataagagaatacacgtagaaccacagaatctcagagctatattaaagaagagagaactcagtcacagtgagatgaagcaacttaacctagagagtcccatcttgtgttagaggtaaaactgagacctagagtccagatcttctgattcccaggtaaacattcctattaccactcacgctaatctttttctaatggtataaaatgtttctcaatattatagaagaatatttcaaaatatttgggttatgattaaaactcatttgccactgagttacaacacttaagcactgttg

SEQ ID NO: 125395 - DNA, 639 bp, Homo sapiens
ttattttatatttttaatagaaaaaacttagaagactgctaaaatacatgtttatccgagactacaaatcaaagattgtcaaaggcatcgatgaggatgatcttctcgaaggtaaccaaaacaaaacacaaaactaaaacatgagcttatgacacatgtgtgctggataacacatttatgcaattccaatgtaactggagaactagttaattttgtttactgtcaacaaatcaagtggaatacccttgcaaaagtatatatttctgataaaacatattataccgtgttacctatttaatattactacacttctcatagattctaattcttgaaaaatagttctgcagatgaattgaaatgtttctttttatggagcacatagtgaatgcagacttagagtaaaacagacckgaattccaatcaataccagttctctgctttctttgtgtgaccttgagggtcagtttcctcatttatgtggagggaaattatattgtgtaacacgtggagtgcttaggagagtttagcataatatatgaaaagcacttgatacctgcctgccactaaatgaatgatagcagttaacaccatgcttcagacaccatgaaggtttgggattgtaagaagtaatattcagtt

SEQ ID NO: 125396 - DNA, 600 bp, Homo sapiens
agaagtaaataagaagtccaggtgcccaggtatgctgaagagtaggtgaggagccatgttttttgtctcagttttacttccagtgatagcagagccaggagagccacattcaaaaaccttaggagttcagcctggccaacatggtgaaaccccatctctactaaaaatacaaaaattaaccagacgtggtagtgccgcctgtaatcccagctactcaggaggctgaggcaggagaactgcttgaacccgggaggctgaggttgcagtgagctatgatcaagacactgcactccatcctgggtgacagagcaagactcggtctcagaagaaaacaaaacaagaaaaaacccttagaagttgatacctaaatggtcaatgggcacaacagaaattttattcgtaaattaaagcatgaggctcagcaattgagttaggaagtttctgtctgcctataatctaaaattcagtaaggcaataatgatttcttcttattgccatggacctgttcagggcatcatgctaagtaaaaaaataaaaataaataaaaaataaaatwaaaaaaaattcagtggctgaagacaacagcaatgacttaacatt

SEQ ID NO: 125397 - DNA, 577 bp, Homo sapiens
ccccaggtggtggcagctgctcagagccatccacacagtgcacacttgccagttcattctatggagcccacacttctccacgaggaatgaagagggatgctgcaaggaggggcagggggaggtcataactgggatgattgaggcttcagaaagtccctgggcacatcccagcctacctgctcctcctcttccagggtcaatgtgtggtctcgaacaggttggcaagagctcaggacttggggctggggctcctcgcctttaagatggagcaagctggctgtgacttgtgttgaattcactcctacagtgcaagaattcttccaggacaaaacaagagcctgcccctggagtctgcattttagcagagcagggagtgctggatcaccaggacaccatacagaagtragtcctgcagagatgcagtctggaacaaggctgtgaagagtcagcaagcccagtggtgtccagagtggatgccgggtctcagggggaccctgcccagaggtcctggggagctgagtggcagacagggaggtgggaagcggagcagaggagcaggtcttgatcacagagctcc

SEQ ID NO: 125398 - DNA, 535 bp, Homo sapiens
attaagttttaagtttaagaaccattacccaactttctagctatccttgcaagaataaaaactatgtgaatctctggattaattgatcatgagaagagcagatattcttggtacttgagttagaaatttctccccagggccctcctggcaaaaatcccatgcaatggtcttagtagttacctttcaggagacacagaaatgggcttcttgaggttcttctagaatgttctttgctcaatgccgaggacacctcaacaaagagcaatttgttatagataagctaatgccgaaataacacttgaaagctgagggattcagcttcatgaytgagcttggtagagaggtaagctttcaaatagctgatggaattgatgaaacaaatacactttaaccaaacttcccttcataaaggttgtttcagcttgatttttgctaaatggtgggtgggcctgaagctaaaagggtgctcattatggggctagtttatgtcactttttaaataggcaagtatctaggcagacaatacagattagtt

SEQ ID NO: 125399 - DNA, 634 bp, Homo sapiens
atatcagtcccccagagtaagagcatactgtctaggagccctgagctgagccttgaccccctcaaatcttccagtagtgaagctagtccactgaccaccttataccatcatcaaacccccaaggtcatggactagggtaaaagaaaaataaaatccatccaaaggacagcaacttcaaagaatgaaggaacgtctgcctacaaagataagaaagaaccaccacaagaacttaaaaagccagagggtcttcttttctccaaacaaacacactagttcyccagcaagggttcttaactgggctgagatggatgaaatgacagaaatagaactcagaatatggataggaatgaagataattaagattcaggagaatactgaaatccaatgtaaggaagctaagaatcacaataaaatgttacaggagctgacagacaaagtagccaggatcaaaatcaacataatcaacctgacagagctgaaagacactctacaagcatttcataatgcaattgcaagtattagcagcagaatagaccaagctgaggaaaaaatctcagagccttgaagactagcttttggaaataagacagtcagacaagaagaaagaagaaagaatgaaaagaaataaacaaaa

SEQ ID NO: 125400 - DNA, 615 bp, Homo sapiens
gagtgtaaatttcaagaggcactaattctcagtgcaaagtacatgaaatggtgcctcactcatcctaacctactcctagctctgcctagaatattaagttagcatcaccctgaaaaatattcatcacatttcccatctcttcctatgagtagtgaagtggcagrttagattctttccttaggcagaggcacagttttcagcttctgcaagggaagaggaacagctgaattgcatagaaagtttgcactgcaatgaaataacaacagagaaccaggccaattagacaacgaagactttagtctccatcgacttgaagttccctcttatccagacagtatatgcaggtctgtcatgctttgacctctattggttagattttcagcatgaatgtagataagtacatcttcagctggttggtgatgggcatctaaatctaagcaatgaatttatgtcagtggtccattatgataatctatacttatacctcattttttaaggttgctgagaagaggagaaaaaatgagaatgaatcttttaaaaaaattctttcttttttttcaactcttattttaggtttagtttttcctatgagtatattacatgatactgaggttt

SEQ ID NO: 125401 - DNA, 615 bp, Homo sapiens
gagtgtaaatttcaagaggcactaattctcagtgcaaagtacatgaaatggtgcctcactcatcctaacctactcctagctctgcctagaatattaagttagcatcaccctgaaaaatattcatcacatttcccatctcttcctatgagtagtgaagtggcagattagattctttccttaggcagaggcacagttttcagcttctgcaagggaagaggaacagctgaattgcatagaaagyttgcactgcaatgaaataacaacagagaaccaggccaattagacaacgaagactttagtctccatcgacttgaagttccctcttatccagacagtatatgcaggtctgtcatgctttgacctctattggttagattttcagcatgaatgtagataagtacatcttcagctggttggtgatgggcatctaaatctaagcaatgaatttatgtcagtggtccattatgataatctatacttatacctcattttttaaggttgctgagaagaggagaaaaaatgagaatgaatcttttaaaaaaattctttcttttttttcaactcttattttaggtttagtttttcctatgagtatattacatgatactgaggttt

SEQ ID NO: 125402 - DNA, 547 bp, Homo sapiens
attatttacctcatagtaaggattaaataaggtagtgattgtaaaatgcttctcattgtattccgcagcatctgataaaatgtttagtaggcrtcatgcatccttcttctatcattcattattatttaagctatgtatttcctatttgctgctttatttttaatacagtgagttgacctaagggctcagattattgttttgtttatcatcttgtggctgaagagcaaagttttctcctaatcaaaaaaaaaaaaaaaaattgcagtttcccattctattctttttaaaaacaaaacaaatatttttattaaaacagaagttgaagtttaaaaagccatctacttttccttctagggctcaaagttgtagtgagctgtagtaatagaagatcagtttccatacaatttaaaagtgaacatggacagacagttcaaatggcgagtgagtgtgataatccctttgttctcaggaagagcacagatcttccttgctttataaagtaggaatattttttaaaggcctagttaaattatcttaatggaaatga

SEQ ID NO: 125403 - DNA, 547 bp, Homo sapiens
attatttacctcatagtaaggattaaataaggtagtgattgtaaaatgcttctcattgtattccgcagcatctgataaaatgtttagtaggcgtcatgcatccttcttctatcattcattattatttaagctatgtatttcctatytgctgctttatttttaatacagtgagttgacctaagggctcagattattgttttgtttatcatcttgtggctgaagagcaaagttttctcctaatcaaaaaaaaaaaaaaaaattgcagtttcccattctattctttttaaaaacaaaacaaatatttttattaaaacagaagttgaagtttaaaaagccatctacttttccttctagggctcaaagttgtagtgagctgtagtaatagaagatcagtttccatacaatttaaaagtgaacatggacagacagttcaaatggcgagtgagtgtgataatccctttgttctcaggaagagcacagatcttccttgctttataaagtaggaatattttttaaaggcctagttaaattatcttaatggaaatga

SEQ ID NO: 125404 - DNA, 547 bp, Homo sapiens
attatttacctcatagtaaggattaaataaggtagtgattgtaaaatgcttctcattgtattccgcagcatctgataaaatgtttagtaggcgtcatgcatccttcttctatcattcattattatttaagctatgtatttcctatttgctgctttatttttaatacagtgagttgacctaagggctcagattattgttttgtttatcatcttgtggctgaagagcaaagttttctcctaatcaaaaaaaaaaaaaaaaattgcagtttcccattctattctttttaaaaacaaaacaaatatttttattaaaacagaagttgaagtttaaaaagccatctacttttccttctagggctcaaagttgtagtgagctgtagtaatagragatcagtttccatacaatttaaaagtgaacatggacagacagttcaaatggcgagtgagtgtgataatccctttgttctcaggaagagcacagatcttccttgctttataaagtaggaatattttttaaaggcctagttaaattatcttaatggaaatga

SEQ ID NO: 125405 - DNA, 587 bp, Homo sapiens
catcctctcattttgtcctggaaacattctcataaagaaggcaggctaggtattttcaaataattattcctattgtacaaggacccagaacagaaagagtacaaagtgtatgagtggaagcagtctactttaatgcttaggatggtgggctttggaaacaattctggattctaatttggactttgccactgattagccatttactttgagtcaatgactaaactttagttttctcaactagaaaacagtatcctcctcaagtgaggataatagtagtccctacctcccagggttgtgaggatgaaatgtgaacatctatgtaaggcaytgagcattgggctgacacagtagtcaatggtggctacttttacttcgtaaattgtttagtttaaacaactagctgatggcagagcccaagctggattccagagctgtctaacttagtgtcaagttctttgcataagacagggtataaaaatgagtttgagataaagtgatgtagaccctataggcttggataacagatgaagaatggaagctcctggatgtcctttgtgcttcttacacaagggattttctgaaaagga

SEQ ID NO: 125406 - DNA, 393 bp, Homo sapiens
aggcgaagagagaaaagtaagtctccctgcctcctctgcactcccatgtccctcttccccttcccacagaccacgctgtgaccagttccttttatcctgcagagagagtccatgaatgaccctcgacagtgctttgaggtattattattctggagttacatattaggaaactgaggttctgagacaggaagtcactttcccaaggtcacaccacttcagggcaaagctgggagttcaccccagatgtgctgactgaagcccatgtgttgagggtcaccctgcmtcccacaaagaggagagaaccagaaagctgagctgagaagtgtgtgctgggcagccagctggacttgctcacaaataggctttggctgcatacactggtcttgaagaatt

SEQ ID NO: 125407 - DNA, 611 bp, Homo sapiens
ggcagaagagaaaaagagcaagccaaatcatgcaaaccctttccaaaccctgggggcacactgcacccactaatattccactgatgaaaacaggtcacagggaaaagctcaaagtcaaggcacaaggaaacatgttttgttcatgtaggtggagcaggaatkaatatttctgaacaataatcaaatttaccacaacctctcaggtatagtttcttccagagtagacagaaaggagtctattccatgattaaagaggacaaggctcagcactggagcgctaaccagtttctggacattaaacttaaaatgttgtctcttccaacttgccttttccccacttatcatgggttttcacctttttttcccccaaatcacaaggcagataaaaacatgacaattttacttcatcctactatttacttactcattgatagctactgtatgccaaccactgtgctgtggaagactgggaggtgagcagtcccttccctcaagaatctcactctttttcaaaggagacaggcagtaaagagagtaataacacagcatgtgtgccggacagactccaagatggcccctagaatccctgcatcctggtatttacacctgag

SEQ ID NO: 125408 - DNA, 492 bp, Homo sapiens
caccatgtccagctaattttatttttgtatttttagtagagacggggtttcaccctgttggccaggctggtctccaactcctgacctcaggtgatttgcctgctttagcctcccaaagtgctaggattacaggcatgagccaccgcacccggccaactatgatttgattactatgctgtctcatttctccttgcccctgtctgccttccctccccctggaagacacttgctcactatgtgagtgtggaaaatcacaatctctctgtgcctcattttccttatctataagrtgacaattcctgcttaatgttgttttgaaaatgagaaaataatgtagctcttcgtgatgtctagcaccaagtacattctcaattaatggaagctattaatattatcatcactattatatttccctattatccttcagcccttgtttatagacacccaaatttccatataattgaaagaatggtttacttacatatagaattc

SEQ ID NO: 125409 - DNA, 455 bp, Homo sapiens
acagtacattctaagtacattctaagtactagctgttctcccaagggctgaaaacctgtctgtaagtggtatcmtatagaccactgcaaacatcccagatgactagcacaagttcaagtcaccttcaattcctgaacatcaactagattcccccaactatactgtacccagttgaatagaccttgcctaagttttgctatgtcttttagaaaccgggggtccaactgcctggatatatctttggaatacatttctacagccaggccagttcttccagctcatgaagtaatgcaaagttctaagcatatggcactagacacacaatattaacagcagcatctttctttgaataatttctgcaagatcttattgtgaatgcattatttaaaaactaagaactagacataactgagctctgtttcagagcaactgtaccaggggctaacattagaatt

SEQ ID NO: 125410 - DNA, 584 bp, Homo sapiens
caggtccacagctgggacatggggaaagggtggcatcagcaattcaagactgtcttttttctacactattcagtgcttctttcagtgatatgaagttaaaaccaggtactatgattgcttacctgatttttagttcctatgcaggtggtttttttatttagatagttgctaaatttgctattcctgaagggagcacaattggcagagactgctattcagccatcaggttccacctctgtgattccatacattctgaaagacagtcttaactggagaaacaggcaaatgtaaaaaaaaaaaaaaraaaaaagaaaaacaaaaacccgaaacctcttgccactgcctgtcatgatcttgatcttcatacggtgctcaatgtcatcaagaggtgttccttcaggtttccctaagtgtcacccacaaagccattctcaatctctagtggacactgtgagagcctctgctcaaaatgcctccctggctctctctacctaccagctccaaggcccttccctttaaagcagtcatgaggctagactggaagaaagaccccatgaagcttctgtttcagcatcatgttggtg

SEQ ID NO: 125411 - DNA, 567 bp, Homo sapiens
aaacaaaagattgaatatacagagttttctccagaaaatcttcaatttctatagataatcttcagtcttctatagaataaaatgaaagattacaaaattgaagattagaaaattacatagagagctgggcatggtggcttacacctgtattcccagcactttgggaggccagggtgggtggatcgcctgaggtcaggagttcgagaccagcctggccaacatggtgaagcaccrtctctactaaaaatacaaaaacttagctgggtgtggtggcgggcacctataatcccagctacttggaaggctgaggcaggagaatcacttgaacccaggaagcagaggttgcagagagcagagattgcaccattgcactccagcctggtcgacaagagctaaactccatctcaaaataaataaataaataaataaataaataaataaataaataaataaaaagaaagaaaattccatagagaaacagctatttctcgatcttcttgattcttgtgctcatgacaagactgcaagttactcagttccactgtcttttgcatctgtggttgtggt

SEQ ID NO: 125412 - DNA, 592 bp, Homo sapiens
aaggcaggggacgtgagtacataggaggggccagattcaagagaaactgaggcagcagaagcagcatggcccatgactagctgaaccaggtagatgasagaaagcaaggactccaaggctaatcccaggataacaagcacaaaggcaccaccaccaactaaggttggggagaagaccataaattctacatttgagctgggctgaggtgttctgagtttcacatacctgtggaacaagcaggagaataaatctgataaagcatttggacttgcagttactaggagcttggggcaaggcctgagtgaaagacatgatttgggagccattagcgtacagatgacagggaaaaccatgggtgtgcatgatgtacttggaaagatgaattggatctaccattcaggaaattgcttcttcaggtccagactgtgaggctaagatttcaatatccaggattataaaaagcactcatcacaatgcaacagaagttgcaggccagtgtttccttgacattggaattcactctccccacttgatacgaaccacatggtcttggtagagcatgtttccgggacctttgattactaccaggcta

SEQ ID NO: 125413 - DNA, 592 bp, Homo sapiens
aaggcaggggacgtgagtacataggaggggccagattcaagagaaactgaggcagcagaagcagcatggcccatgactagctgaaccaggtagatgagagaaagcaaggactccaaggctaatcccaggataacaagcacaaaggcaccaccaccaactaaggttggggagaagaccataaattctacatttgagctgggctgaggtgttctgagtttcacatacctgtggaacaagcaggagaataaatctgataaagcatttggacttgcagttactaggagcttggggcaaggcctgagtgaaagacatgatttgggagccattagcgtacagatgacagggaaaaccatgggtgtgcatgatgtacttggaaagatgaattggatctaccattcaggaaattgcttcttcaggtccagactgtgagkctaagatttcaatatccaggattataaaaagcactcatcacaatgcaacagaagttgcaggccagtgtttccttgacattggaattcactctccccacttgatacgaaccacatggtcttggtagagcatgtttccgggacctttgattactaccaggcta

SEQ ID NO: 125414 - DNA, 570 bp, Homo sapiens
gaatggactaacacaaagactgcgcttttaagcactaactatactatgctgtaaagataatgcattagagtagaatctgtagatggtagggaatccaggaaggctccctcgaggaggtaacatttaagttgattcatgaataatgtatagaagttaggcaagcaaggatggggaaagtgttttaaagaagcaatgggtagaaagtcaagaaaatgcrggaagcatttggggaggtaaaaaagtgcccagaattgctggagaataggatggtaaggttggagtggctgcacatggttggggaagcaaggagagagccaagagattaccatacctaaatgcctcacattatagtgccattatctccttaaatcctcatcccaatcctgcaaagtatgactgcattgttttgtatgaaaaagaaagacagcttagatagctcacctaacttgcccaagaattacatatttacaatggagctgagagtatggattccaaaatccatttcatgtcaatatgtccaattctgaacctcacaatatatggactttcttattttaggaggtcacaaac

SEQ ID NO: 125415 - DNA, 656 bp, Homo sapiens
ggcaagcaaggatggggaaagtgttttaaagaagcaatgggtagaaagtcaagaaaatgcgggaagcatttggggaggtaaaaaagtgcccagaattgctggagaataggatggtaaggttggagtggctgcacatggttggggaagcaaggagagagccaagagattaccatacctaaatgcctcacattatagtgccattatctccttaaatcctcatcccaatcctgcaaagtatgactgcattgttttgtatgaaaaagaaagacagcttagatagctcacctaacttgcccaagaattacatatttacaatggagctgagagtatggattccaaaatccatttcatgtcaatatgtccaattctgaacctcacaatatatggactttcttattttaggaggtcacaaacacttccttgaacattcgagctagagatgtcaccaccaaataattcttattagtatcaatgttaataaattgagtgttatggggagatgctgcttctaggggatcatgtgcataataaaatccaactattatttgcaaggaaaacaaagaaccaggttcagagttctgtcaaatctgcayagggttttggaggaagtttctctctttgaatttgagttgtacaaagtaacatattataatgca

SEQ ID NO: 125416 - DNA, 555 bp, Homo sapiens
cctgtctctgttcttcttactttgtctctgtctcccattcaccccacttcctgttctctgacctctgtgcctaccaaggaacactgcctgagccacagctggtgkggagctgcccctctgcctccctctggtctcctgatcctggttcggcttgcctggggttgggactgatagggtatagggtgcctcccccccggggccctgcactcagtgtttctttagccttgtctctgaggaaaactggtggtgccagctttaggaggaggtgagacctggaggggacttcaaggactcaatgggggaaggcaccgaaggggcacagccaggtgagcttatgggtgggcaaggcccagacctgcacccatcctcctgacagcacctgggcgcacaagaacctggggagggaatgggagtgtcaatctgggtgagcctgtgggtgggcggagcttcaccccaccctgcacctacctccagacatcacttgggcacacttgcagagacagtggtcgttgtctgagtcaagggtgctaaagctggtgttctgcaggaccaggc

SEQ ID NO: 125417 - DNA, 555 bp, Homo sapiens
cctgtctctgttcttcttactttgtctctgtctcccattcaccccacttcctgttctctgacctctgtgcctaccaaggaacactgcctgagccacagctggtgtggagctgcccctctgcctccctctggtctcctgatcctggttcggcttgcctggggttgggactgatagggtatagggtgcctcccccccggggccctgcactcagtgtttctttagccttgtctctgaggaaaactggtggtgccagctttaggaggaggtgagacctggaggggacttcaaggactcartgggggaaggcaccgaaggggcacagccaggtgagcttatgggtgggcaaggcccagacctgcacccatcctcctgacagcacctgggcgcacaagaacctggggagggaatgggagtgtcaatctgggtgagcctgtgggtgggcggagcttcaccccaccctgcacctacctccagacatcacttgggcacacttgcagagacagtggtcgttgtctgagtcaagggtgctaaagctggtgttctgcaggaccaggc

SEQ ID NO: 125418 - DNA, 474 bp, Homo sapiens
gaggtcaaggctacagtgagctgtgatcatgccactgcactccagcctgggcaacagagtgagaccctgcctcaaaaaagcctttgctttggtggccagtggcttaaatgggactcagctggaggaaacagtgggggcatatcactgagaagttcccagaagtggaatcaggcataaagttcaggaggacagagagtcattcagagattccttgtggggaagcgaccttcccaccagtggaggtattccagcacggctggatgatgattgcaactatggagggaatctatgaagaaccagatgacacgtgagattttttgcagccctgtgagtgtgaatcctggttcagagatagccaggacccaggcttatctaaaagatccttaaatttctctgagaggcaatatcatgttgtggagacatcatgagttttgrcagcagggagatctgagttcaaattccagctcatttaac

SEQ ID NO: 125419 - DNA, 582 bp, Homo sapiens
tgaagttgaattagagatgagtactgtaaactaagcaaacaagctgagctcaccacagtcctgactcagtgcatgggaggaccaggcagggagggcgagtgtccctgaatatatgaggagaggggctgsggggggtgcatgctggggagccatcatccatagtgggacgttaacagcacctaaaattttttaaaaagtcaagaagaaggaatataggaatgcaattttagtttggaagcaaatacaaaaatggaagaaaataccaaaatgaaagagttgctgctggggaaggggaaatggagggcatgaataggggacaggatactgctctccagaaaagcctaatcaaactgtatgagcattgattttaaaaatgtcactaaaattgcatatacacacaaaacagcaataagtgtaaacacatacacacacaaacacatgcacagaaaaacagtcagagaagatacatgcccaaccaccccatgagagcagttacctcctagcactcagcttggtttgagatcctctgaaagcagagcctgaggcagtattgaggagtaatggtgatgctggaagcagaag

SEQ ID NO: 125420 - DNA, 582 bp, Homo sapiens
tgaagttgaattagagatgagtactgtaaactaagcaaacaagctgagctcaccacagtcctgactcagtgcatgggaggaccaggcagggagggcgagtgtccctgaatatatgaggagaggggctgcggggggtgcatgctggggagccatcatccatagtgggacgttaacagcacctaaaattttttaaaaagtcaagaagaaggaatataggaatgcaattttagtttggaagcaaatacaaaaatggaagaaaataccaaaatgaaagagttgctgctggggaaggggaaatggagggcatgaataggggacaggatactgctctccagaaaagcctaatcaaactgtatgagcattgattttaaaaatgtcacwaaaattgcatatacacacaaaacagcaataagtgtaaacacatacacacacaaacacatgcacagaaaaacagtcagagaagatacatgcccaaccaccccatgagagcagttacctcctagcactcagcttggtttgagatcctctgaaagcagagcctgaggcagtattgaggagtaatggtgatgctggaagcagaag

SEQ ID NO: 125421 - DNA, 582 bp, Homo sapiens
tgaagttgaattagagatgagtactgtaaactaagcaaacaagctgagctcaccacagtcctgactcagtgcatgggaggaccaggcagggagggcgagtgtccctgaatatatgaggagaggggctgcggggggtgcatgctggggagccatcatccatagtgggacgttaacagcacctaaaattttttaaaaagtcaagaagaaggaatataggaatgcaattttagtttggaagcaaatacaaaaatggaagaaaataccaaaatgaaagagttgctgctggggaaggggaaatggagggcatgaataggggacaggatactgctctccagaaaagcctaatcaaactgtatgagcattgattttaaaaatgtcactaaaattgcatatacacacaaaacagcaataagtgtaaacacatacacacacaaacacatrcacagaaaaacagtcagagaagatacatgcccaaccaccccatgagagcagttacctcctagcactcagcttggtttgagatcctctgaaagcagagcctgaggcagtattgaggagtaatggtgatgctggaagcagaag

SEQ ID NO: 125422 - DNA, 531 bp, Homo sapiens
gttttccaactttataagccattgacatattgctccttctctttttattttatttgaaaacataattttaatggctacaattgccgtatcatatgattgtgccatgcatgaatcaatttatatatacatagttttttttttttgtgacagagtctcgctctgtcacccaggctggagtacagtggtaagatctaagctcactgcaacctctgcctcctgggttcaagtgattcttgtgcctcagcctcctgagtagctgggactactggcatgcactaccacatctggctaatttttgtatttttagtagagatggggtttcactgcgttggtcargctggtcttgaactcctgacctcaagtaatctgccctcctcagcctccaaaagtgctgggattacaggcatgaactaccatgcccggctacatttgctaatttatattttttaattttgctatcattggtatcaccctgaactctcttctttcagggatatacctggttgctctaaagagtattggtagatgagg

SEQ ID NO: 125423 - DNA, 645 bp, Homo sapiens
atttgaaagacaggaaatgtactaatgaatgtgtgggtctccctaaggagatgacgaggcagaatgctgacaayggttattggctttttctagctgagtatgataaggaatgagaggagaaagagagatgtactaaagtcatctctatttgtaagcagaatttaaagaaagtacagaggacctgatatatactgagtttctaaatgaagttggttttgtttgtaatatttctagtcttttcaacaggcaaaagattctcaagggaaaaatgaaaatgccttcaggatcacaatcaaatcaagaatgtagatataagactttctgaaaaattaagatgttgtctaatagaccttctcagctagacaaaaatcttaagggccttgtcctacagcagcaccctgaaattccccatccaagtacagaagaatctatttcaaacatagttgtgaatatggtttttgtttaatggagtataatgtgatgcacagaaaacccaaaacatttttaaaggagttgtagcagcttggattgaagaaaacaaacacagtttaaaacacaaagaggactgtggtccccaaagtttacagttagaaagcaggctaagaaagctacaaacatgaaccctctcttatggaaggaaaaaga

SEQ ID NO: 125424 - DNA, 645 bp, Homo sapiens
atttgaaagacaggaaatgtactaatgaatgtgtgggtctccctaaggagatgacgaggcagaatgctgacaatggttattggctttttctagctgagtatgataaggaatgagaggagaaagagagatgtactaaagtcatctctatttgtaagcagaatttaaagaaagtacagaggacctgatatatactgagtttctaaatgaagttggttttgtttgtaatatttctagtcttttcaacaggcaaaagattctcaagggaaaaatgaaaatgccttcaggatcacaatcaaatcaagaatgtagatataagactttctgaaaaattaagatgttgtctaatagaccttctcagctagacaaaaatcttaagggccttgtcctacagcagcaccctgaaattccycatccaagtacagaagaatctatttcaaacatagttgtgaatatggtttttgtttaatggagtataatgtgatgcacagaaaacccaaaacatttttaaaggagttgtagcagcttggattgaagaaaacaaacacagtttaaaacacaaagaggactgtggtccccaaagtttacagttagaaagcaggctaagaaagctacaaacatgaaccctctcttatggaaggaaaaaga

SEQ ID NO: 125425 - DNA, 548 bp, Homo sapiens
aatgtaaaatgacataaatctgccattatagtatcaaacagcatagtttcactaccgtaaaaatcttctgtgcatcccaccctccctacaacacatggtaatcactgatctttctactgtctcaatagttttaccttttccagaatgtcttatgattggaatcatgtagtacgtagctttctcagattggtgtctttcgctcggtaatatacactgacatttcccctcctggctttttaatgagcatcataaaaacagaatagttatttggcagtgacggcatcataagcttgtggtgaaaatgccttttttgttaataactcccctgatgtgtgtgcatcttacaaagcattgtcctcacatcctcagtacctggaagggtaccgggcacagggcagatgcttaataatttttactgggtaaatgaaatttcatrtaattatagcaatgagagggtcagcaacactacgaggttgttttagaacagtggtcctcaaacttttgcagtgcatatatcagtaaatgaaaacctagtttaattgggaggc

SEQ ID NO: 125426 - DNA, 604 bp, Homo sapiens
cgaattcatcctgaagaactcagagaaagccggtgcaggaagtgggttcccgctctccctgcacaggcacagtgatgctgccagagctctcccagaaagaccaggaggcttgttctggagaagtcaagcccagggatgtggctcaggctggtccaagctctttggaggagtccaagcgtgcccagcccagagggaggttcagaggcactgaccgtcttctgtttgggaggagaagctcactcttggagccacagccagcactaggtcaggacccaggccccggcccaggagtggggcaatacccagcgtctaccccagatggcaccctgctgtgaactgggcgccctcagcccctgccttgaggaaggggcaataccaccagcgtgtcttttatcagggaagatattgctgcagtttggccgctgcaacttaagagaaaagctraggggtcccccagcatcccttggggtgccactgcaaatactggctgggcctggagatgacctgggtcccattcacttcctagggtgaaggaggtcatcattaccacccctgctttcagccatttcttcattcattcaatcaacaaactggctgagctgca

SEQ ID NO: 125427 - DNA, 543 bp, Homo sapiens
tcactgaattacaattggccacaatttatcaagcattattcttgggaattcttgcaaaatgaggaaaatttcaccacctataaattcttttcaaaaataatgcagtgtcatgaaatttttatgagaactaaatggaacaattaatgaactcgccatgatgttagttttctagatgtttaattaaacatttattgattttaattttgcagtgggttttttttycttccatatttttgggcacaaacattttcagaggctcttgaaacgtctgtcagcctgatgttctaagactttcacacctgaaaggtaagatcgggaaatggagggacacacatccaagggacagggccctggcctcccagaatagtggacagggtgtgaattgatggtggcattgggtgttgctgagtgcgggacagaagacagggcaaggggagatgcgtttacatgttaatgtgtaacttcttttcatttaaaatgggtatcctcctttgaaatttgacccaaagacttggtaacccaacagcaacttacatttatttg

SEQ ID NO: 125428 - DNA, 616 bp, Homo sapiens
gccacttattgaagatctttctatatgctgctggctttaaagaattttactttcctaatattattttcctgttactattgctgcataaaataaaagatcaccccaaaaattagtggcttaaatcaaccattttcatgtattctcagattgtgagggtgaggatactgaaaagagcacaaagggttagctagtcacaatgtctggggtttctgctaggaaaactagaatactgtaagtgacttgatggttgacagctggaattatctggaatgtctcctttcrtgtagctgacagttaatgctgacccattagtagtaccctcagcgggtctgttggcagaaacacccacatgtggcttatccataaggctgcatgagcttcctcttaacaaggcagccccagggtgcttgaacttcctacagaggagcgccaaatccaaatgtgaaacctctctaacaggcagaagagtaggatttttatgctctatattcaaaaggcatacagaataacctccactacatcccatttgttataagtaagtcaaaagcctgtccaaattcaaggaaagaaaaattaaactcttcttctggatggaggcaatggatatgttctagaa

SEQ ID NO: 125429 - DNA, 600 bp, Homo sapiens
ctaacccatatttttaacagtgtattagtccattttcatactgctatgaagaactgtctggcactggataatttataaaggaaagcagtttaattgacagttcagcatggctggggaggactcagggaacttacaatcatggggaaggcraagaggaagcaaggtaacttcttcacaaggcagcaggaaggagaagtgctgagtaaaggggaaagatccccttataaaaccatcagatctcatgagaactcatgccctatcacgagaacagcataggggaactgcccccgtgatccaattacctccacctggtccctcccttgacagatggagattatagggattacaggaattacaattcaagatgagatttgggtgaggacacaaagccaagccatatcaaacactgagaagaaggtatgtgttattcattaaacaatagtaagaactgatttcctcaacatacaaaaccttccaagaaatcattgaaaaagaaacagaatagaggcatatcatagacaaatgacaaaaaaagaatatacttcataaatacatatatggcaagctgcttaatacctgactcaagacagatgtgaatta

SEQ ID NO: 125430 - DNA, 464 bp, Homo sapiens
gtacccctgatatgttctgatgaaattggcacttcatctctgtgatattccacccccaaacatacaaccccagtgtcatgatgagaaaaacatttttaaaaatcccaattgcagaataggcagcaaaatatttgactagtatttgtcaaaactctcaagatcatcaaaaacaaagaaagtctgagaaactgtgagaaatggcctgctatggtttgaatgtttgtacccctccagaattcttattgaaacttaatcaccaaggtgatggcattaaggggtggggcattttargaagtgattaaataatgaggactctgccctcgtgaatgggattaatgcccttatcaaagtgtgagaaggaagtagctgggcccttttgccttttattgccttctgccatgtgaggatgcagcaaggaggcaccatcttggttgcagagatatttcatcagacattgaatctgc

SEQ ID NO: 125431 - DNA, 621 bp, Homo sapiens
actttatagaaacatgggcccagtgttgccagatcttctattttttttctttttaggaaagcccraaatatagatttttacatgaaatcttatgagttctgaatattggcaacttattcaaagacgttttaagccctatgtagaccaaacaaaaatactatcaaatcttcaggcaatatttgatttattttagaattttagtattcagatcctgttgaaatcaggatccaagtacaattcacatattgcagttgggtgacatgtctcttaagtccctttcaatttacagttttctctttttctttttttcacctgaaatttgtttgatcatttattttgcagttttccctgcagagtttgtcacagtctggattttactaatttcatcatcatcatgtctgatgacatgttcctctgtcccctgtattttctgtaagttaatcaatagggcttaatctaattcaggaccacttcttttctggagaggaaggactatgttaaagatagtgttggtttctccatgaggaggtacatgctgtccagttgtatctattttttctggcatagcagtcattgatcattgactagattcattcttttattcttgcaaaatggtgatat

SEQ ID NO: 125432 - DNA, 553 bp, Homo sapiens
gcttcacatttcaattagaataacatccaagcacctttctgtgcctgcaagatcccataagctctagtctctttctacttttcggaactcttgccctctgtcttctagtcatgctggtttatttgtgtccctcggacaccacgctttcttgccttggggattttgcaattgctagacacttggcttaaaaacagttctcccgtggctgccttcatttctccactcttgtttcaggcttccccagagaagcctttcctgaccgatcaatctaaagtcttccccttctttggttactgtcatctcattaatcttacattatgacatgttcttatcctttgaaaggcrgggtctctagttgtcttgtacactgctccaaccccagaggtaggaatgatatctattacatggtagggactctaatatgtgttacaagaaataaaacccaaatctaagtaattgtgcaaattaccatccttggtctattctgatgctatatatcagtgtagtgaaagaaatacaggaacattcaaacctgaatttgatcctaaactct

SEQ ID NO: 125433 - DNA, 514 bp, Homo sapiens
ctaataggaagttttccagcccttgcccctctccctccctcctgctttttggagtccttagtatctattgtycccatctttgtctgtgtgtactcaatgtttagcacccacttacaagtgagaacatatattatttggttttctgtttctacattaatttgcttaggataatggactccagctgcatccatgttgctgcaaaggacaagattttgttcttttttatggctgcagggtattccatggtgcatatgtatgacattttatttatccactccaccagtgatgggcacctaggttgagtccatgtctttgttattgtgaatcgtgctgtgatgaacatgcaagtgcaggtgtctttttggtagaacaattcatttttctatgggtatatacccagtaatgggattgctgggccaaatggtagttctatttttagttgagaactctcttcttttcacagtgtttgaactaatttacactcccaccaacagtgaataagctttccctcttc

SEQ ID NO: 125434 - DNA, 514 bp, Homo sapiens
ctaataggaagttttccagcccttgcccctctccctccctcctgctttttggagtccttagtatctattgttcccatctttgtctgtgtgtactcaatgtttagcacccacttacaagtgagaacatatattatttggttttctgtttctacattaatttgcttaggataatggactccagctgcatccatgttgctgcaaargacaagattttgttcttttttatggctgcagggtattccatggtgcatatgtatgacattttatttatccactccaccagtgatgggcacctaggttgagtccatgtctttgttattgtgaatcgtgctgtgatgaacatgcaagtgcaggtgtctttttggtagaacaattcatttttctatgggtatatacccagtaatgggattgctgggccaaatggtagttctatttttagttgagaactctcttcttttcacagtgtttgaactaatttacactcccaccaacagtgaataagctttccctcttc

SEQ ID NO: 125435 - DNA, 511 bp, Homo sapiens
aacatctgtatcttttatatgtgtcattaaagaaattaggtactttaatcaacaggcaattcctctatagaaataattgggaggaatggagaaaagaattggctatggggagaaaactaaaagatggttgaattacagactccataatttttaaataattgaatgaaaagaacacaacatctttctatttttttcaaatataatttcataagagtacctattcttgctactctgaggcaatgatgatgtgaccttggattaactctcttcagaaaagaaattttggtgttttagaaasaacatggatttgaaggcagacaaatttgtgttacaacccccaaatctttatccgactaagtgtgtgaccttggacaagtcctttaatggctccaaacatcaggcttgtattttataaaatggaaatagtcatgcaagcttgtcttgagaataaaatatgacatttatgttgcaaggtcacacattttttcacactgctctcagatacacgaaa

SEQ ID NO: 125436 - DNA, 518 bp, Homo sapiens
cataggtggctcttactatgttgaagtatgttcctccaatgcctcatttgttgagggtttttaacatgaagkgatgttgagaaaatacctgatgcttctctagagacaaatatatgaaagcaaacaacatttcatgaaggaatgaggaatattttgtggcagcaagaatgagaatgactctccaagatgccctggaaactgaatatgttacatcacataagggattttgcagatgtaattaaggttgcagaccttaggagatgatcgtgattcatgcagtgggctccatgtaatcacatgagcacttaagagatttaactctggttggaggcagaagagacacagaagagaggtgtgggtgaggggaagccagagaaactagaagcaggagaatgtctctctgcaccattgctggtttagaaaataaactgggcactatgaagagcaacgcaggcagcctgacattgctgagaggccccaactaccagccagtgatgaattgggacctcactcctaca

SEQ ID NO: 125437 - DNA, 577 bp, Homo sapiens
ccactgggagcaggatccttcagcccacctgctgcatgccgtggtgtgtccccaatttgcaggtcatctgaggagccgcctggccttaggtcaatgactggcaagagctgcactgtttctaactttggctctttccctgagtgagagctgccttcctcacctgaagctgagactgcagaagtttgacgttttggaaccagccttmtgcttttgagtcactggtctccactctcaggccatcgtatgggggcatctttttttttttttttcaatttaatgttgccctgctgactctacccatgggtagccaggttaatatgaaaaaatgaagaagaagaaaaacccaccaatttcctgatgccagataaatggaaaatgttatttgcaccaaagaaaccttgagagacttggaacaaatcactggtggatgtgggtttctggatctcactagatttattttaatagaaagtttaggccagacgcggtggctctcacctgtaatcccagcactttgagaggctgaggtgggtggatcatctgaggttagtaattcaagaccagcctggccaacatggtg

SEQ ID NO: 125438 - DNA, 593 bp, Homo sapiens
ttattgaattaataatcctcttaattcttaacttaatgtgtttatttcttaatgattagtgagatgcagtagaattatacaaagttcactctctatcccattcttcagaaggttctgctgtaccatttaaacttttatttcttttgtaaatataaaaatataaaagattttagtcttcaaacttttaaacaaatatggtgttaaatgttaaacttccaagtgtctgtgaggttatgtatrgtttcgataagctaaaaagaagccttaatatgagggaggcttttactttagggatctaaagcagaaagtattaaagttaaagagataaagcttcagttattaaaatagaaatctaaacacaacatttaatttttatggaacttttagggaggaaataagagtacaggcattgagaggtgcttcatttattccagtaagaggaatcttcattgactattttttgaaattgtgctagtgattaacaatataaggtcaaagagaggtcaatgaaaaacacataagtacaaattctatacttcatttttttcattttaatgaacactgtaaagaaaactcaatcctctagtgataaa

SEQ ID NO: 125439 - DNA, 593 bp, Homo sapiens
ttattgaattaataatcctcttaattcttaacttaatgtgtttatttcttaatgattagtgagatgcagtagaattatacaaagttcactctctatcccattcttcagaaggttctgctgtaccatttaaacttttatttcttttgtaaatataaaaatataaaagattttagtcttcaaacttttaaacaaatatggtgttaaatgttaaacttccaagtgtctgtgaggttatgtatggtttcgataagctaaaaagaagccttaatatgagggaggcttttactttagggatctaaagcagaaagtattaaagttaaagagataaagcttcagttattaaaatrgaaatctaaacacaacatttaatttttatggaacttttagggaggaaataagagtacaggcattgagaggtgcttcatttattccagtaagaggaatcttcattgactattttttgaaattgtgctagtgattaacaatataaggtcaaagagaggtcaatgaaaaacacataagtacaaattctatacttcatttttttcattttaatgaacactgtaaagaaaactcaatcctctagtgataaa

SEQ ID NO: 125440 - DNA, 558 bp, Homo sapiens
cagctccttttttgaaatagaaaaagtataaaaatggtagaggaggaagttatttaacatagctgttactagattagaaaactataaaattatgaatatatattaagaaaatcatcgatttacaatagaaaaaatagaataattacatgtgactggatgaaccctaaattgtgttcacatttagctagatgacccctgatattctagaaggcaggtgtcccactgactgcagaaaatgtttgtttaatgcaggtggccactagagcattcctgtcaacttttggaactagtgttatttcatagcccttgtgcaagatttgccctttgccaacataagagactaaattccagtagtaggaagtacagyattaagcactgataaaacaaagacggttaatatattgaccttgcactcaaagtgcttacagtctcataggagaaatggatgtaaaagaagagttaaaacatagagtgctttgtgaggcaatcccacttacatgtggaattctaaaaagttgatttcacaaaagtacagaggagagtgatggttaagaggaa

SEQ ID NO: 125441 - DNA, 558 bp, Homo sapiens
cagctccttttttgaaatagaaaaagtataaaaatggtagaggaggaagttatttaacatagctgttactagattagaaaactataaaattatgaatatatattaagaaaatcatcgatttacaatagaaaaaatagaataattacatgtgactggatgaaccctaaattgtgttcacatttagctagatgacccctgatattctagaaggcaggtgtcccactgactgcagaaaatgtttgtttaatgcaggtggccactagagcattcctgtcaacttttggaactagtgttatttcatagcccttgtgcaagatttgccctttgccaacataagagactaaattccagtagtaggaagtacagcattaagcactgataaaacaaagacrgttaatatattgaccttgcactcaaagtgcttacagtctcataggagaaatggatgtaaaagaagagttaaaacatagagtgctttgtgaggcaatcccacttacatgtggaattctaaaaagttgatttcacaaaagtacagaggagagtgatggttaagaggaa

SEQ ID NO: 125442 - DNA, 425 bp, Homo sapiens
gatgaaaatcagccctatccctttgcaactgcagtgacacaaatgccagaatccatattgccttcccccaagttgatatacttctcttaagagatttttttctattgctctgggaagattcacacaaatttgcagaagtgctctgcagcattttttcaacatataactacacacgtgaggatataaactggctgctgtgtgatgtgttgcctctggctgacttgctcaactagtggaacaggtgtgatagaggccaaattataaccccctcatcagggagtgccatggcctcaggaaaccagccgtccacctctttccataactcagtgtgagggatggctgatggcagtccttggagcctctctgcatatggtgacctctagcagtgctacaataacgcamtcaagaggcaggtgtgtccctgt

SEQ ID NO: 125443 - DNA, 587 bp, Homo sapiens
cacacatcttaaacagcctctgacaaactacactgcactgagtgtggtttattaaatgctacccaaacagttgcatccatgtgtatcaaagagggtctaaataggctgccctgacaggcatctcgtttttagtaaagtacaactggtasataacttctgcccttttattgttgtttctccttggttctagtatgaagttggttcaacaaggacatctcatactggtaaaggcaaatgggatacatggtaaagatattcttgaaatgcaacttaggccataaataccttaccatttcttaaattttttacctgcagagatacttaacagaaaataaaacaattgagcaatggtagtggatatggcatctgaggtggaggcagtgaaatcaaattcactatggtagtggcagtaggctagccattccaagtctaagcaggaacttgtcaatcaaaatgttccatgttccatttccaatcctgtatatttcacttagccttttcagactttagaaggtgattacactaaagtagtataaaaaatagatgggagttttagcgtaaccaccaaagagtctattcctaccggt

SEQ ID NO: 125444 - DNA, 587 bp, Homo sapiens
cacacatcttaaacagcctctgacaaactacactgcactgagtgtggtttattaaatgctacccaaacagttgcatccatgtgtatcaaagagggtctaaataggctgccctgacaggcatctcgtttttagtaaagtacaactggtacataacttctgcccttttattgtygtttctccttggttctagtatgaagttggttcaacaaggacatctcatactggtaaaggcaaatgggatacatggtaaagatattcttgaaatgcaacttaggccataaataccttaccatttcttaaattttttacctgcagagatacttaacagaaaataaaacaattgagcaatggtagtggatatggcatctgaggtggaggcagtgaaatcaaattcactatggtagtggcagtaggctagccattccaagtctaagcaggaacttgtcaatcaaaatgttccatgttccatttccaatcctgtatatttcacttagccttttcagactttagaaggtgattacactaaagtagtataaaaaatagatgggagttttagcgtaaccaccaaagagtctattcctaccggt

SEQ ID NO: 125445 - DNA, 587 bp, Homo sapiens
cacacatcttaaacagcctctgacaaactacactgcactgagtgtggtttattaaatgctacccaaacagttgcatccatgtgtatcaaagagggtctaaataggctgccctgacaggcatctcgtttttagtaaagtacaactggtacataacttctgcccttttattgttgtttctccttggttctagtatgaagttggttcaacaaggacatctcatactggtaaaggcaaatgggatacatggtaaagatattcttgaaatgcaacttaggccataaataccttaccatttcttaaattttttrcctgcagagatacttaacagaaaataaaacaattgagcaatggtagtggatatggcatctgaggtggaggcagtgaaatcaaattcactatggtagtggcagtaggctagccattccaagtctaagcaggaacttgtcaatcaaaatgttccatgttccatttccaatcctgtatatttcacttagccttttcagactttagaaggtgattacactaaagtagtataaaaaatagatgggagttttagcgtaaccaccaaagagtctattcctaccggt

SEQ ID NO: 125446 - DNA, 601 bp, Homo sapiens
ttgtgggatcctagtcactgtacacaaagatgaatgagacaagagtacttccttcagagaaatctcagtttcagctaaggtctaaaagcagtcagacaacagcataaatattcagttccttcttttcacttcttttcctaggaagtaggactatgggatgatacattagaatgactggaggacagctgtttcaggaagtgaggcctgtgttaattggcacctgaatgctgttttcatcatgtgcttccyagggttgttgtgttaagattttggtggcatctgtacctggtgatttaactgttgagagggaagaggtaggggcagtgtttgaggagaatgttaaattgcattaattttctgggtactttatttagctctatttatctaaaaggtgcattaccactgtaaactgtgaataagatatttagaaatttctatttaaaaccatgtgaatgctctttgtaagatgcatttttgaagtggcaatttatccccaaatatcttgatgatcatgtattaatattttcagggaaatgatacatatattcttttcaagaactatatataaactatgtctttaaaaataaactcagcaaaatat

SEQ ID NO: 125447 - DNA, 593 bp, Homo sapiens
tgatgaacatagacataaaaatcatcaataaaataatggcaaactgaattaaacagcacattaaaaggatcatacaccatgatcaagtgagattcatctctgggatacaaggatattttaacatacacaaaccaataaatgtgatacaccccattaacagaatgaaagataaaagatcataagattattcaataaagaaaaggcatccgatgaaatttaacatcctattataataaaaactctcaacaaattaggtatagaaagaatgtgcctcaacctcataaagactatgtgtgataagcccacaactaacaccatactcaacagtgaaaagctttttctctaagatcakgaaggaaaaaacaatacccattcttgccatttatattcaaaattgtattgaaagtcatagcccgagcaactaggcaagaaaaacaaaataaaaggcatccaaattagaaagaaataagtaaatttatatctgtttgtagatgattgatgatggatggatggatcggggaggcagggggcagggagggaggggagggagggagagagagagagcgagagcaagagagagagtgagaaagaga

SEQ ID NO: 125448 - DNA, 644 bp, Homo sapiens
gtgtgtagtggtaatcattttacaatgtatacatatatcaaaacatcacattgtacrccttaaatatatataattttgtcaattctattttgataaagccagaaaaagtaaataaaaattttaactttaaaataaaaagaaagatatgaaggatatagggagagagtcttacctagttctgattagtatcacagaagaaaaatatgcacatgatatgctttaagttgtctttttccccatataaaataataaaaaggataatctcccctgatgaatggtcacatttaagaagttaaaaatgtatcttttggacaggcatcttcaagtatacaggcagaagaactaccaaaacaaaactaaattttataaaataaaattgaataaaagccccatttagttaaatttgcaaagctacttaaattgggccacaattttataacagctgttgacatggaaaaaattaccttcataaagtcatataaatgtttacttttccaataacagtacaggtattttgtgaattatgattgttctctctgtgaaacgtttataccacaggttaatttaattgtgtaccaattgtaagacttctaattagctatgattgcttgtgtcctagatttaaaagcccacttaatatcaca

SEQ ID NO: 125449 - DNA, 644 bp, Homo sapiens
gtgtgtagtggtaatcattttacaatgtatacatatatcaaaacatcacattgtacaccttaaatatatataattttgtcaattctattttgataaagccagaaaaagtaaataaaaattttaactttaaaataaaaagaaagatatgaaggatatagggagagagtcttacctagttctgattagtatcacagaagaaaaatawgcacatgatatgctttaagttgtctttttccccatataaaataataaaaaggataatctcccctgatgaatggtcacatttaagaagttaaaaatgtatcttttggacaggcatcttcaagtatacaggcagaagaactaccaaaacaaaactaaattttataaaataaaattgaataaaagccccatttagttaaatttgcaaagctacttaaattgggccacaattttataacagctgttgacatggaaaaaattaccttcataaagtcatataaatgtttacttttccaataacagtacaggtattttgtgaattatgattgttctctctgtgaaacgtttataccacaggttaatttaattgtgtaccaattgtaagacttctaattagctatgattgcttgtgtcctagatttaaaagcccacttaatatcaca

SEQ ID NO: 125450 - DNA, 644 bp, Homo sapiens
gtgtgtagtggtaatcattttacaatgtatacatatatcaaaacatcacattgtacaccttaaatatatataattttgtcaattctattttgataaagccagaaaaagtaaataaaaattttaactttaaaataaaaagaaagatatgaaggatatagggagagagtcttacctagttctgattagtatcacagaagaaaaatatgcacatgatatgctttaagttgtctttttccccatataaaataataaaaaggataatctcccctgatgaatggtcacatttaagaagttaaaaatgtatcttttggacaggcatcttcaagtrtacaggcagaagaactaccaaaacaaaactaaattttataaaataaaattgaataaaagccccatttagttaaatttgcaaagctacttaaattgggccacaattttataacagctgttgacatggaaaaaattaccttcataaagtcatataaatgtttacttttccaataacagtacaggtattttgtgaattatgattgttctctctgtgaaacgtttataccacaggttaatttaattgtgtaccaattgtaagacttctaattagctatgattgcttgtgtcctagatttaaaagcccacttaatatcaca

SEQ ID NO: 125451 - DNA, 644 bp, Homo sapiens
gtgtgtagtggtaatcattttacaatgtatacatatatcaaaacatcacattgtacaccttaaatatatataattttgtcaattctattttgataaagccagaaaaagtaaataaaaattttaactttaaaataaaaagaaagatatgaaggatatagggagagagtcttacctagttctgattagtatcacagaagaaaaatatgcacatgatatgctttaagttgtctttttccccatataaaataataaaaaggataatctcccctgatgaatggtcacatttaagaagttaaaaatgtatcttttggacaggcatcttcaagtatacaggcagaagaactaccaaaacaaaactaaattttataaaataaaattgaataaaagccccatttagttaaatttgcaaagctacttaaattgggccacaattttataacagctgttgacatggaaaaaattaccttcataaagtcatataaatgtttacttttccaataayagtacaggtattttgtgaattatgattgttctctctgtgaaacgtttataccacaggttaatttaattgtgtaccaattgtaagacttctaattagctatgattgcttgtgtcctagatttaaaagcccacttaatatcaca

SEQ ID NO: 125452 - DNA, 574 bp, Homo sapiens
tatgaaatgttaatgtggaaggagaatttttagtgaagaaatctgagtttcttcctttctgatgctggaggcagggttggattcatttagtatgtaatggcttagacaagagcgtgtttcaaatcctgagcctccagttatggctcaaccggggctctgcacagcagcagctgagaagttaatgttacccacagctcttctccagaaagcagatgagtaattccaccttcagagggtgacctgttggcactcccttgctcatctcggtataaacaacacatagggagasggttatttgttggcgaggtatatttctgtgggaggtagggagcaaaagaagaggcaataaaaagagacttagatagttgaaaactacaaatctcaacatggcaagcattcagagcatggtaactggccaaaagaggaatcttaagtgcacaaaagtgcctgatctctcagacccttcaggtagaacctcagtggggtaacgtcctgctacatttccccagcgcattctctagacctcaaagaggaacccactctgggtttctgcccaacttctctccctgcagtg

SEQ ID NO: 125453 - DNA, 574 bp, Homo sapiens
tatgaaatgttaatgtggaaggagaatttttagtgaagaaatctgagtttcttcctttctgatgctggaggcagggttggattcatttagtatgtaatggcttagacaagagcgtgtttcaaatcctgagcctccagttatggctcaaccggggctctgcacagcagcagctgagaagttaatgttacccacagctcttctccagaaagcagatgagtaattccaccttcagagggtgacctgttggcactcccttgctcatctcggtataaacaacacatagggagacggttatttgttggcraggtatatttctgtgggaggtagggagcaaaagaagaggcaataaaaagagacttagatagttgaaaactacaaatctcaacatggcaagcattcagagcatggtaactggccaaaagaggaatcttaagtgcacaaaagtgcctgatctctcagacccttcaggtagaacctcagtggggtaacgtcctgctacatttccccagcgcattctctagacctcaaagaggaacccactctgggtttctgcccaacttctctccctgcagtg

SEQ ID NO: 125454 - DNA, 527 bp, Homo sapiens
attaaataagtgttaatgattgtcaaagtatttcaaaactatgaaatgtgtatatataggagatagtaattaaatgcttccttttagagttctaaagatgttttttgtataagatttcagatagctcctctgaagaattccagcctattggaacccaaatcctgatgcatataataaagtttaaaaggcttattttttatgtatgtaacaagaactcacctttataacttcttacktgagtgaagtaaaattgttccatataagagaaatgcatcctctccaaatacagcgtgcagaaatagcatctgaagatttattacagaaacaaaacaaatggtgcgcaattaaaataggcatgttctccaggaaaaacatccccagcaggcttcaaaatcctgactctacttttggatttgtctggtctggtctggcatatataccaagaatctaaagtattttagggtgatgcaattttttatttcagtgatcgtgatgatacgagaaatcaaagagcacttgggaaagtg

SEQ ID NO: 125455 - DNA, 527 bp, Homo sapiens
attaaataagtgttaatgattgtcaaagtatttcaaaactatgaaatgtgtatatataggagatagtaattaaatgcttccttttagagttctaaagatgttttttgtataagatttcagatagctcctctgaagaattccagcctattggaacccaaatcctgatgcatataataaagtttaaaaggcttattttttatgtatgtaacaagaactcacctttataacttcttacgtgagtgaagtaaaattgttccatataagagaaatgcatcctctccaaatacagcgtgcagaaatagcatctgaagatttattacagaaacaaaacaaatggtgcgcaattaaaataggcatgttctccaggaaaaacatccccagcaggcttcaaaatcctgactctacttttggatttgtctggtctgktctggcatatataccaagaatctaaagtattttagggtgatgcaattttttatttcagtgatcgtgatgatacgagaaatcaaagagcacttgggaaagtg

SEQ ID NO: 125456 - DNA, 527 bp, Homo sapiens
attaaataagtgttaatgattgtcaaagtatttcaaaactatgaaatgtgtatatataggagatagtaattaaatgcttccttttagagttctaaagatgttttttgtataagatttcagatagctcctctgaagaattccagcctattggaacccaaatcctgatgcatataataaagtttaaaaggcttattttttatgtatgtaacaagaactcacctttataacttcttacgtgagtgaagtaaaattgttccatataagagaaatgcatcctctccaaatacagcgtgcagaaatagcatctgaagatttattacagaaacaaaacaaatggtgcgcaattaaaataggcatgttctccaggaaaaacatccccagcaggcttcaaaatcctgactctacttttggatttgtctggtctggtctggcatatataccaagaatctaaagtattttagggtgatgcaattttttatttcagtgatcrtgatgatacgagaaatcaaagagcacttgggaaagtg

SEQ ID NO: 125457 - DNA, 522 bp, Homo sapiens
ctttggcttcataatgaccattaagttagaatattcttctttgaatttaaacttgatcttacacactaccactaaattccaatgcctatgcctctagcctgtgtggctagttaaattttcagctactggaatatccaaaattccttctctgtattgttcttatccagaaaacaaaccaacasatctctcattatataaatttttaacaagtctgaaaaccagagaaaaagtagtttctcttatccaaaattatgctaagttcttcaccataaataatctcttgtcactgaaacagcaaagagtaactaaatgcctattaattggccctgcaccaggcactatgcaaggtactcagagtacagcagtgaataagacaggagacttacactgtgctgtgaggcaaataggcaagtaagcatttccagtgcagtgtttaggtttctattagaagtgagtacaaggttttacataaagaccagagaatggatgacaagccagctttttgggtacagttagataagc

SEQ ID NO: 125458 - DNA, 580 bp, Homo sapiens
attctgcagggcagtgaagagaggcagagaagaggccatgtttgaactggatttagtaaactcacctaaaggctaggtgatgtgccaaagatccaaagaaactaaagactgttctgcctctagcacattcctatcactacgttccatactcctatcactcactttttcactgtctaccagatgtgatgcttcatagsaaagatctgttactacctaaaagttaagacctacttggttggtaatgtagacagtcatagtcataaaacaagttattatttccttaaaaccaagagagataaagtagtatggaggggagaacaaaggctaagggacctgttggggctgagttatagactggattggcaataagctgtgtgtctttggtcaagctacttattctccctgtacttctttttccttcaactgttaaatgaaagcaagttgtgcttgggaaaattaaatatgataatgtatttaaagatcacagtaggtgctcaataaaggccatgtctcatccttcagcttccttctgtagcagttgtctgttttttctgcacacttctctagtgagctgtgcagg

SEQ ID NO: 125459 - DNA, 553 bp, Homo sapiens
tcttggcatctagtgattaaccagtgacagcagacagtagtgaccaagagagatggagagaacgatggtgtaagacagtatataaggacagtaagccactgtatttgtggaaccactgcatgtcaaaactccttaacactctaacaaagcatttttggtcttttaagattaakgacagtccttacataagggactcagtttcaaactaaagtgcatcaaaaagcaaattataccccacaaacaactttaaagaggtagccacaaacccagttgttttagattggccttctaaatgaagtcagcacatggatccatgtgtgagtgtcatggacgtcagtgattatgtaactgtaactgaaagaaaaaggcacagctctgcagacacccaagagaagctggcatgtttaatgtggatgtagaagggataatgtccatggcaactgattggaacacaactgtcagcagcctcaacacaggctaagactgggttaagccccaggagatgcagagaacgactgaggaagctgtgctctaaggggacattacagaaggt

SEQ ID NO: 125460 - DNA, 553 bp, Homo sapiens
tcttggcatctagtgattaaccagtgacagcagacagtagtgaccaagagagatggagagaacgatggtgtaagacagtatataaggacagtaagccactgtatttgtggaaccactgcatgtcaaaactccttaacactctaacaaagcatttttggtcttttaagattaaggacagtccttacataagggactcagtttcaaactaaagtgcatcaaaaagcaaattataccccacaaacaactttaaagaggtagccacaaacccagttgytttagattggccttctaaatgaagtcagcacatggatccatgtgtgagtgtcatggacgtcagtgattatgtaactgtaactgaaagaaaaaggcacagctctgcagacacccaagagaagctggcatgtttaatgtggatgtagaagggataatgtccatggcaactgattggaacacaactgtcagcagcctcaacacaggctaagactgggttaagccccaggagatgcagagaacgactgaggaagctgtgctctaaggggacattacagaaggt

SEQ ID NO: 125461 - DNA, 569 bp, Homo sapiens
aagaagtaacaagtgggtttctctaaagcacagtttggctttttactagaatatcaagtcacctttttgggtgaggagagtacaatgggagtgggcagctggtgcaaataaacatttaaaattacttaaaacttcaacaaatgggatccgtatttaaatstgttttggtctgtcttccctttgttttttctaatccattccaacaatgcaaacctcagccactgtcaagggcaatctcagactggaggttgctgcctagggtgaggttctagcaagactgacaagcagagctcagggaaaagtctgcatgggaaaacagagccagacttagaaggcattgctgatgaattccattttcttactacagaagagctagcaaaaactgcaatatgatgtgtaaagtcagtgtaatcttatggacattataccaagtcacaacatgaggcatgaaatacctcagatgttgttccctctaaatctcatgttgaattgtgatacccccaatgttggtggtaggtctggaaggaggtgattggatcatgggggtggatttctcagaaatggtctag

SEQ ID NO: 125462 - DNA, 542 bp, Homo sapiens
gcagtgcacatggggttctgccactcacagtgtaggatgtttcaccatgtcttcctgaaatgatttgcaaatagtcaagaacaaatgactgtggtgatagagatgtatttattgctgccaccttgttcccacttcaccrttgcatatttgtacacaggacacatatttattcttttaagtttagattttactgagaaatgaggaccttatctggacttcactgggagaattatgagtggccagagatactacattttgagctggatgccagaccttgaaagaactctgcatttttcattttgagagaagtcagtgtgttttataatgggaggaagattaaagcaggtattttggcatcagaaggactgaccttgacagagattggtgaggtaacattatttccttctttggaccacaagaaaatgctgtatttttcagcctcaattgcaggtaggatgagaccatttcactggtgaatgaaatgtaggtagaagttatatttcccacttttagactgagctataagatacctcatgcaatgc

SEQ ID NO: 125463 - DNA, 566 bp, Homo sapiens
cgttgtagcctccaacgcctaggctcaagcaatcctcccacctcagcctccctcccaattaactaggattacaggtgcatgccaccacacccggctaattttattcttagatatgrgatcttgctatgttgcccaggctggtcttgaaatcctggcctcaaggtgacctcagcctccagtgtagctgacattacaggcgtgagacactgtacctggctgaatgagtgcctctatcctgacacttgtgtccccacgggatcctgcagaattcaggaccctgtccacacaggggaaaactctctgttgcagtcctgatgactgagaagggagcttacccatggctctcttggtcatttttatttaatagtgagcacagaacctcacattttctggaatgttcccatatgattttgtgagagaaaagagaatagagaccccaactccaagctcactgtgtcaaagggaaaattaagcttgggaactgagttacgcaatactgccttccttgttctcaaacacatagccataacttcacaaccctgtgtcatagcctcatccataagcca

SEQ ID NO: 125464 - DNA, 487 bp, Homo sapiens
ctaatgtctgccttagatctgtgtcccactggggccttgtgttcaccagggactggtatccagctgtggcctgatgacctactgcatcctgttgctcacctacggcctggtgtctacctggggcttggtgatcacctggraactggatattaacctggggcctgggtgaccacttaaggcctgatgtgtgcctggggcctgactgtccacctggggactgggtgtccaccttgggtctgatgtctacctgaagttaggtatctacctaaggcttggtgtctacctgtggcctgatgtccacatgagtctggggttcggttggggcctgctgtacatctgggaccttggtgtctatctgaggcctgatgtctacctggtgactgccatcctcttgaggcctgctatccacctgggaatggtttatccatggaaatggttatgtccacctggggctggatgttgcccaggggctagatgtccacctgtg

SEQ ID NO: 125465 - DNA, 352 bp, Homo sapiens
tcttaaattatttcttctatttggtctagtctgttgctaaggctgtgaactgttttttgaaattcctatagtaaatttytcaatgcaagaagctctgcttggttctttctcaaaatggctatgttgtcattcaaatccaggatcgttgttatggggttgttgttggatttcaactttctgttggattttggtgatttttttttgccacttatatcttgaatactatacctgtcatttcagacgttccattctggttaggactcattgctagattgctggtgtaatcctttggaggtgatggaacattctggctttttgtattgccagagttcttgtgatggtttcttctcat

SEQ ID NO: 125466 - DNA, 352 bp, Homo sapiens
tcttaaattatttcttctatttggtctagtctgttgctaaggctgtgaactgttttttgaaattcctatagtaaatttttcaatgcaagaagctctgcttggttctttctyaaaatggctatgttgtcattcaaatccaggatcgttgttatggggttgttgttggatttcaactttctgttggattttggtgatttttttttgccacttatatcttgaatactatacctgtcatttcagacgttccattctggttaggactcattgctagattgctggtgtaatcctttggaggtgatggaacattctggctttttgtattgccagagttcttgtgatggtttcttctcat

SEQ ID NO: 125467 - DNA, 352 bp, Homo sapiens
tcttaaattatttcttctatttggtctagtctgttgctaaggctgtgaactgttttttgaaattcctatagtaaatttttcaatgcaagaagctctgcttggttctttctcaawatggctatgttgtcattcaaatccaggatcgttgttatggggttgttgttggatttcaactttctgttggattttggtgatttttttttgccacttatatcttgaatactatacctgtcatttcagacgttccattctggttaggactcattgctagattgctggtgtaatcctttggaggtgatggaacattctggctttttgtattgccagagttcttgtgatggtttcttctcat

SEQ ID NO: 125468 - DNA, 352 bp, Homo sapiens
tcttaaattatttcttctatttggtctagtctgttgctaaggctgtgaactgttttttgaaattcctatagtaaatttttcaatgcaagaagctctgcttggttctttctcaaaatggctatgttgtcattcaaatccaggatcgttgttatgggkttgttgttggatttcaactttctgttggattttggtgatttttttttgccacttatatcttgaatactatacctgtcatttcagacgttccattctggttaggactcattgctagattgctggtgtaatcctttggaggtgatggaacattctggctttttgtattgccagagttcttgtgatggtttcttctcat

SEQ ID NO: 125469 - DNA, 470 bp, Homo sapiens
acgagattaatgtacacaaatcagtagctcttctatacatcaacagctaccaagctgagaatcacatcargaactcaaccccttttacaatagctgcaaaaaacaaacaaaaaaacaaacaaaacttaggaatatacctagcaaagtaatcaaaagacctctgcaatgaaaattacaaaacactgctgaaagaaatcatagatggagccaagcacgttggcgcatgcctataatcccagctactcgggaaactgaggcaggagaatcgcttgaacccgggaggcagaagttgtagtgagccgagatcacaccattgcactcccacctcagcgacaagagcgaaactacctctgaaaaaaaaaaaaactcaatcaatcacacgaaagaaaagaaatcatagatgacacaaacaaatggaaacacatccccatgctcatggatgggtagaaccaattttgtgaaaattacca

SEQ ID NO: 125470 - DNA, 470 bp, Homo sapiens
acgagattaatgtacacaaatcagtagctcttctatacatcaacagctaccaagctgagaatcacatcaggaactcaaccccttttacaatagctgcaaaaaacaaacaaaaaaacaaacaaaacttaggaatatacctagcaaagtaatcaaaagacctctgcaatgaaaattacaaaacactgctgaaagaaatcatagatggagccaagcacgttggcgcatgcctataatcccagctactcgggaaactgaggcaggagaatcgcttgaacccgggaggcagaagttgtagtgagccgagaycacaccattgcactcccacctcagcgacaagagcgaaactacctctgaaaaaaaaaaaaactcaatcaatcacacgaaagaaaagaaatcatagatgacacaaacaaatggaaacacatccccatgctcatggatgggtagaaccaattttgtgaaaattacca

SEQ ID NO: 125471 - DNA, 501 bp, Homo sapiens
ctgtgggtcagttaaacctcttttcctcataagttgcccaatatcaggtagttttttataacagtgtgaaaatggactaatacaaggwcttaggataacaaccatgcttcaggccataggtggacatctggctgcaactggacactattccccaggtggatacctaggctcaaggttgacattagtccccaggtaaacaacaagccccaggtgaatatctatgccctagtagacatcaggcctcaggctgacactcagtctaacctcaacattaggctccaggtggacgcccagactgcaggtggatactagaccccaggggtacaccagactcctggtaggcataagaccccaggaggacactagaatccaggtgtacataaagccactggttgacaccaagccctcagatgaacatcaggccaactagtggatgttaggcacatgagaatacttgggcaccaggtaggtatcaggccccaggtaaacatcaaacttcag

SEQ ID NO: 125472 - DNA, 501 bp, Homo sapiens
ctgtgggtcagttaaacctcttttcctcataagttgcccaatatcaggtagttttttataacagtgtgaaaatggactaatacaaggacttaggataacaaccatgcttcaggccataggtggacatctggctgcaactggayactattccccaggtggatacctaggctcaaggttgacattagtccccaggtaaacaacaagccccaggtgaatatctatgccctagtagacatcaggcctcaggctgacactcagtctaacctcaacattaggctccaggtggacgcccagactgcaggtggatactagaccccaggggtacaccagactcctggtaggcataagaccccaggaggacactagaatccaggtgtacataaagccactggttgacaccaagccctcagatgaacatcaggccaactagtggatgttaggcacatgagaatacttgggcaccaggtaggtatcaggccccaggtaaacatcaaacttcag

SEQ ID NO: 125473 - DNA, 501 bp, Homo sapiens
ctgtgggtcagttaaacctcttttcctcataagttgcccaatatcaggtagttttttataacagtgtgaaaatggactaatacaaggacttaggataacaaccatgcttcaggccataggtggacatctggctgcaactggacactattccccaggtggatacctaggctcaaggttgacattagtccccaggtaaacaacaagccccaggtgaatayctatgccctagtagacatcaggcctcaggctgacactcagtctaacctcaacattaggctccaggtggacgcccagactgcaggtggatactagaccccaggggtacaccagactcctggtaggcataagaccccaggaggacactagaatccaggtgtacataaagccactggttgacaccaagccctcagatgaacatcaggccaactagtggatgttaggcacatgagaatacttgggcaccaggtaggtatcaggccccaggtaaacatcaaacttcag

SEQ ID NO: 125474 - DNA, 577 bp, Homo sapiens
ctggggaatggggttcacctccctcttgtttcttggagctgatggagtactctctcaactgaccaagggagcaggctgagacacccagcaatgacacacacagaccagttccaggttgcaaagctgttcttggctgcaagtctcaccatccttgagaaacctctgctttagcaactctcttcccactacagtcctgcaagaggagagagcctaattccaacacttactgctggggcactttccacacttaacactcaattctggctgttgaggctgctccyctgctccagagcaagcactccaattcctagcccaagattaaagtgtctgcagtggccaccattgccaggcaccaaaaaatgattgactttgtatgagcccagattaaaaaggtcatccttctctcagtcccaggtctggggaaatgcctgcagcttttctgagtgtctttcctctttccccatctctcagccacttttgtgctagctccaaggcttgggagaaacagagtgctctcccttaatctggattgcacagatccccagtgaaaatgtgagttgcagagggagactggctg

SEQ ID NO: 125475 - DNA, 235 bp, Homo sapiens
tggcaactcccattttatagtttctcagctcaatattcttggtgtccccttttaattctgtctctgtagctctgtcactctcttcctgtatctgtctgattctctccctctctctcctctctctcttgctcactctcactcttgctctctttccctgcttcacacrcacacaaacacacacagacagacacacacacacacacacacattttcagatctgatgtgtatggaattc

SEQ ID NO: 125476 - DNA, 503 bp, Homo sapiens
ggaattcctgccagctttacctttaaagtgtagtaattccaaatgttgttgaaaattcaccttcccacccccaccacttggtaactatagcgctttccacacaaggccaagtgcacagatttcttggggaaataatgagaactattatacactcttatttcaaggacccttaaaattataggattgccatatttgatactaatttaagcttctgtcattgcccctttttcaatccagtctccacacagctaccacagtgtgcaagtagaagtctcagccatatcaccaaactcctgctttaatgtccctactccattgcttcttttctccttcagaagagtttaagcttaatgaagctgggcaactttacatatttttccatgagctggagatcacttggtgtaaggtaaaaatgaycagtaaatattttcaaataacagaatctacgaataatagtcttgtttctttgagagtacattgacttttaaaaatcaagaaaatag

SEQ ID NO: 125477 - DNA, 505 bp, Homo sapiens
atggaattcctgccagctttacctttaaagtgtagtaattccaaatgttgttgaaaattcaccttcccacccccaccacttggtaactatagcgctttccacacaaggccaagtgcacagatttcttggggaaataatgagaactattatacactcttatttcaaggacccttaaaattataggattgccatatttgatactaatttaagcttctgtcattgcccctttttcaatccagtctccacacagctaccacagtgtgcaagtagaagtctcagccatatcaccaaactcctgctttaatgtccctactccattgcttcttttctccttcagaagagtttaagcttaatgaagctgggcaactttacatatttttccatgagctggagatcacttggtgtaaggtaaaaatgaccagtaaatmttttcaaataacagaatctacgaataatagtcttgtttctttgagagtacattgacttttaaaaatcaagaaaatag

SEQ ID NO: 125478 - DNA, 346 bp, Homo sapiens
atttagagaaaacattctctctttgaagaacactagaattgaggaaaatatggtagagcatataggttattttgcctttgttactttgtagaccttaaatcatggagtgwgttagaacacagtatatttgtgacaaccatgacagttcagagaaatgcagtgaggtcatttactctgaaactgaaagacactaatctctgctctgagacccacaaaatcagattatctgttttacctgcgtgatttctattcctctcattttgttgttctttttataaaacatctttgttaaataataaagttattactctaaggtagtgtccaagtctctttgataataatgaaa

SEQ ID NO: 125479 - DNA, 346 bp, Homo sapiens
atttagagaaaacattctctctttgaagaacactagaattgaggaaaatatggtagagcatataggttattttgcctttgttactttgtagaccttaaatcatggagtgtgttagaacacagtatatttgtgacaaccatgacagttcagagaaatgcagtgaggtcatttactctgaaactgaaagacactaatctctgctctgagacccacaaartcagattatctgttttacctgcgtgatttctattcctctcattttgttgttctttttataaaacatctttgttaaataataaagttattactctaaggtagtgtccaagtctctttgataataatgaaa

SEQ ID NO: 125480 - DNA, 346 bp, Homo sapiens
atttagagaaaacattctctctttgaagaacactagaattgaggaaaatatggtagagcatataggttattttgcctttgttactttgtagaccttaaatcatggagtgtgttagaacacagtatatttgtgacaaccatgacagttcagagaaatgcagtgaggtcatttactctgaaactgaaagacactaatctctgctctgagacccacaaaatcagattatctgttttacctgygtgatttctattcctctcattttgttgttctttttataaaacatctttgttaaataataaagttattactctaaggtagtgtccaagtctctttgataataatgaaa

SEQ ID NO: 125481 - DNA, 346 bp, Homo sapiens
atttagagaaaacattctctctttgaagaacactagaattgaggaaaatatggtagagcatataggttattttgcctttgttactttgtagaccttaaatcatggagtgtgttagaacacagtatatttgtgacaaccatgacagttcagagaaatgcagtgaggtcatttactctgaaactgaaagacactaatctctgctctgagacccacaaaatcagattatctgttttacctgcgtgatttctattcctctcattttgttgttctttttataaaacatctttgytaaataataaagttattactctaaggtagtgtccaagtctctttgataataatgaaa

SEQ ID NO: 125482 - DNA, 559 bp, Homo sapiens
tatgatctgtactaaattaatttttgtatcatgagttacgtgttaaagttctactttttgcatatgagyatctaattgttccagcagaatttgttgaagggctatcttttatttactgaattacctttgtatctttggagaacaccaatttaccaaaattctgtacatatatttctgaattttctattatcttccaatgacatttctgtctatctttatgccaatatcacactattttcattactgtagccttataagctttggcattagattgtgctaatccttcaaaaatattcttatttttaagaattattttggctattttagactctttgcatttctactgaagttttaaaattagtgtgtaaattcctataaacaatgcctaataatattttaattgggattgtattgaatctatatttagggataatcacattttaccatgtgaattttctaacccatattcatattacatctttccatttatttaagtcttctttaactttctgcagtgttttgagttttagtgtaccagactcacatcatttgatagatt

SEQ ID NO: 125483 - DNA, 575 bp, Homo sapiens
tattctgtttgctaagttttgtatcttctttcttgtttttcttaaaagttgggtgacaatattttacatgggtagtttttctgttaatcatagcttatctccaatgattaggaaaataacaactatgaagtaggacaaagtaacctggtttcttgtgttttagcattgctgctccctgttccttcctggttttgttaattacctgagactctgccctgttgatgttagtcagattctaagactcaccttgccaagcaagcactgctttgttattccaaagtgaagttcattcttactttgtctggaaagcagtctctgcatcttttacctcattatttccctcctttcatattatgtttcttcctttaccaattttaatggagcttcccctttttcgtctctaagatctcctcaaaaacaaaacaaaaaaacattatcagcattaacatatacracagagagcttcattgatgtggtttggctgtgtccccacccaaatctcatcttgaattcccataccttttgggaggaacctggtgggaggtaattgaatcatggaggtaggcttttcctgt

SEQ ID NO: 125484 - DNA, 592 bp, Homo sapiens
ttttacaggtgaagaaatcaaggtctacaaaagaaatcaaatcatatgtccaaattcatatgggctttgatttttgaactttcaaatttttgtctttgcttaataccttttgttttaaaataatttgactcataagaagttaaaaaaagaagtaaaatgaatgaccatgctattttcaggcaactttccccaatgattatawctaacttaacctagtacgttgccaaaatcaggaaatggacattgtttccataccattaactcaggttcagaccctatttatatttctaaggattttacatgtacagatgtgtttgaatgtatgtgtgatgtgtgtatatagatctatgaagtgtggatttatgtaaccattaccataatctggatgcagaactgctctatcaccacaaacaaagtacatgttttcacattaaccctcactaatcacatcttccaaccaaccctaacccttggcagctactgttctgttctccagcactgggattatgctatgtaattcaggtatttttgaaaccaagcttatgaggttgctaaataaataataatgtttataaactattattttcagtct

SEQ ID NO: 125485 - DNA, 457 bp, Homo sapiens
caagtgatcctcctgccccagcctcccaagtagctgggactatagttgtgggctaccttgcccagcttattctgcttatttctacataagaagtatcaatttactcaattgcattaggaagttgtatctttccagagaaatcaaggaaacatctgtaaattctgaggataagttcgtaaacagaaaatgaggaaatttttttcaagcaaaatttgcaagaggatcagaaatgatggtaggttctagcagtttcacttcttggttgctataggcctagtttcttgccatktctactgtctgtggagatctatttccaaactgatagatgaaatacaaataattgtggtgctgaagctttaattatctctttcttttattcaaaacatttacttggtatttactatgtgccaagctctagtatacaagggtaaataagacacagccagtgcttttatgg

SEQ ID NO: 125486 - DNA, 655 bp, Homo sapiens
aaccttgtcaccactgtgagcaaaaaacatttcagtgtatatctttcaatttttttccctgtaatcttttaaaaagtaatttataaccttatcatacatttaatacccatttgtttcattaaagcttatggcataaatattgcccatcttactgcatggtattcataagcatcttatttaacagttccataatatttaatccctctattgttaggtatcagattgttgccaattttttaaaatatcataagtatttgtgtgttcagcaaatattcgttgagtgcctactgtgtgccagggccccaggctaggccctgaggatagattttcccaaatagtgttgctgatcaaagaaaaagaacatttttctggttctcracacatgttgataattggtactgttacactgtattttcacccattgtttaaaaaatattatttttttgctaatttgaaagatctgatcattttttggtctgtttatgtcactggtttcttatcaacctgtatgagcccttcatgttaaaagataaaaaggttaagtgaaataacatgagtcatcatcctcttgccagggttaggtacctatttttttatttctctcctttccgtctatcctgtagatgtggaatagcgatggcattcaggcctgtga

SEQ ID NO: 125487 - DNA, 655 bp, Homo sapiens
aaccttgtcaccactgtgagcaaaaaacatttcagtgtatatctttcaatttttttccctgtaatcttttaaaaagtaatttataaccttatcatacatttaatacccatttgtttcattaaagcttatggcataaatattgcccatcttactgcatggtattcataagcatcttatttaacagttccataatatttaatccctctattgttaggtatcagattgttgccaattttttaaaatatcataagtatttgtgtgttcagcaaatattcgttgagtgcctactgtgtgccagggccccaggctaggccctgaggatagattttcccaaatagtgttgctgatcaaagaaaaagaacatttttctggttctcgacacatgttgataattggtactgttacactgtattttcacccattgtttaaaaaatattatttttttgctaatttgaaagatctgatcattttttggtctgtttatgtcactggtttcttatcaacctgtatgagyccttcatgttaaaagataaaaaggttaagtgaaataacatgagtcatcatcctcttgccagggttaggtacctatttttttatttctctcctttccgtctatcctgtagatgtggaatagcgatggcattcaggcctgtga

SEQ ID NO: 125488 - DNA, 655 bp, Homo sapiens
aaccttgtcaccactgtgagcaaaaaacatttcagtgtatatctttcaatttttttccctgtaatcttttaaaaagtaatttataaccttatcatacatttaatacccatttgtttcattaaagcttatggcataaatattgcccatcttactgcatggtattcataagcatcttatttaacagttccataatatttaatccctctattgttaggtatcagattgttgccaattttttaaaatatcataagtatttgtgtgttcagcaaatattcgttgagtgcctactgtgtgccagggccccaggctaggccctgaggatagattttcccaaatagtgttgctgatcaaagaaaaagaacatttttctggttctcgacacatgttgataattggtactgttacactgtattttcacccattgtttaaaaaatattatttttttgctaatttgaaagatctgatcattttttggtctgtttatgtcactggtttcttatcaacctgtatgagcccttcatgttaaaagataaaaaggttaagtgaaataacatgagtcatcatcctcttgccagggttaggtacctatttttttatttctytcctttccgtctatcctgtagatgtggaatagcgatggcattcaggcctgtga

SEQ ID NO: 125489 - DNA, 575 bp, Homo sapiens
  misc_feature (1)...(575): n = A,T,C or G
tcctggttgaaacattttatagatgtttctcaagccccatcttaattgtgtgagggttggtgtcaattatttctcctccttgaaattctccacaagtagcaccagtctttcttggtttcccttctacatttctggcttttattagctgctcttactctacctttgtctcttaaatgtattcttgagaggtctcagtccacttcttttctttctttcttttttttatttttatttttcagaaacagggtctcactctgtcatccaggctggtgtccaatggcatgatcagctcacttgaggttcaaacttctggactcaagcgattccttcncaccttagcttctgcagtagctgagactacagggtgtgcaccaacaagcacaagctaatttaaaatttttttagtagagacagagtttcaccatgttgcccaggctggtctcraactcctgagcttaggcagtccacccgccttggcctcccaaagtgctaggattacaggtgtgagccactgggctcagccagtccacttcttttcttactctatataatcggagtggtctcattcaggtttt

SEQ ID NO: 125490 - DNA, 522 bp, Homo sapiens
agatcttcctttaaaaggaaattggggtattgttaggacgtgaaatggatgctggtcagaaaaaacaaaacaaaccaaaccaaattatccctacactaaacttaccaattgccttttcttctctttaccttgtaaacctgtcagtgcccagtcactgtagacaacctcaccggcaacatgctgcccacacctagaataggagcccatggggcagaataatggagaccgtcccattccttacagtttgtataatgcttgctcaagtatattgaactctgccagtcctggaatcaaaacattttagtcttagaacaagaactgagaggttttcataytgactttcactcattctccattctccttaattctcctcaaatgcatagaaatcctgtgtttcatgtgttcattcattcttctatgcaaccactatttatggatggcaaccctgtgctagacattgttctaggtgctgaggaaacaaaagtgaagtggaaagacatatctgccctggtgaggctggaa

SEQ ID NO: 125491 - DNA, 528 bp, Homo sapiens
aaaacaaacaaacaaaaacacacacaaatccaacaagagccagtgtgactaacgagaaaacacacacacatgcaaacacacacacatacagccctttgaagatctagaaatgagtgactaattaaatagcctaaaaacctccaagtgcataaagtttctgtcagtactcctgtttcaataaagcagcagtgaaagcccatagaatggcaggagtggatgmgttactataaatcatggggtcaccagaaggtataaatctgggagtctttgagagtcattatagtttgggctcatagatagatatctaggcattgattgctctttcaccgataaagaaaacaaagtactggatctaaaaattcttctaaaaaaagagaattcaactgaagctacatatttcatggagcatgaagccagctgttttcctgcatgttaaaaaataagtatttaattaaaaaaaaaaagacctcttgcctgaccataaccagatcaggcaaggccaccttgcctatgaaggctagagtgtcc

SEQ ID NO: 125492 - DNA, 504 bp, Homo sapiens
ggcagtgtcttgctcacgtcacacaggtggtattaagtggaaactaggatttgaacccaaagccattggactccaaagtcctcatgctctagcactattatatacagccagtctcactataaagccagagagaggctctgtaacatgcctgtcttataggttataagtcaaacgaaggatatggatggatttgtgaatgccagctatttccttgctctttgctggagaaagagatgaggtgtttgctggtggacttctcctttccctgtgaactgccctttggtttggagccataaaaagctaacagagaagaaagaattaayatctactgagtaggccaagaaattattgtaaagaaccccaaactcatatgtatattatcgaaacttgtccataagccagcccttctcaaaacatattccagaattaaatgttggtacttagaaaaaaaaaaaaaagacttatgtggtcaaagaagtttagaaactgctagactcctcagat

SEQ ID NO: 125493 - DNA, 503 bp, Homo sapiens
cgcctcactctttacacacacggtcacttgccccgcgcactcccgagccctttccagccctgacacacagctgggattctcacttccgatccgcggtcctgaacccgctcccaggrcaggggaactccttcgtggcgaagcagcaagtggcgaagcagcagcctctgcgctgcctcatctacatagaagtcgccctgtctgtgatgtcaccgacagtgccttgcccagtccccgtctgcctttctgccactcaaccgaccaatctgctgccagagccgccaaggggaagtgacgtctgcctctccctttttccctcccgcccctgcgtctgttctctcccaaagaagctggtccttagcctgtgttaaggagcaacctttcggtggccagatggagccggggcatccttcttcaaataatggcttttaattcgcagactagaatgtttcggattacaaaagaaaccggttctcttcacatccttatccttgtgatgcagcatt

SEQ ID NO: 125494 - DNA, 589 bp, Homo sapiens
ccacaatttcccacacattttcacagagcacaataaacacaaaaaaaggaagcagcgtacccttatgtgaaaaggaggagaatattaggttctttcttaaattctccttgttttataccccacttgtgggtgccagaaaaatcaacaaaggcacaattgagcatgccattagaaacttacaaatagttaaagacaatggaatgttttggtttggaaaaggacttkgtttaataagtgagaatagctggcaaaaggaaagatcttgtgaacaacaggggctccaacatatgcaaaaatattttattggtgtacgtcccagttctttacagtaattttcattactgcagtggattagagaatgagagaataggacccataggcttggtagacaagatggccatgcatgtttgatggggctcatcattccagatactatttcttaattatggtcactttatgtggacataaatatgtaaaaataaagattagttcatgaacaagttaatgtatatggatgtgtcattagtaataaggtcctgatagcttaatgtcatcatcataggattagcctattattggtagcccagga

SEQ ID NO: 125495 - DNA, 589 bp, Homo sapiens
ccacaatttcccacacattttcacagagcacaataaacacaaaaaaaggaagcagcgtacccttatgtgaaaaggaggagaatattaggttctttcttaaattctccttgttttataccccacttgtgggtgccagaaaaatcaacaaaggcacaattgagcatgccattagaaacttacaaatagttaaagacaatggaatgttttggtttggaaaaggactttgtttaataagtgagaatagctggcaaaaggaaagatcttgtgaacaacaggggctccaacatatgcaaaaatattttattggtgtacgtcccagttctttacagtaattttcattactgcagtggattagagaatgagagaataggacccataggcttggtagacaagatggccatgcatgtttgatggggctcatcattccagatactatttcttaattatggtcactttatgtggacataaatatgtaaaaataaagattagttcatgarcaagttaatgtatatggatgtgtcattagtaataaggtcctgatagcttaatgtcatcatcataggattagcctattattggtagcccagga

SEQ ID NO: 125496 - DNA, 565 bp, Homo sapiens
gtactttcctaaaactatggcttaattaaaaaatttcattccactacccaccacccacacaataaaaagcaccaaggaaaactaacaataaaatacatagagagaagggattattctctctgggaakcagcacaagggaagacccgaggtcaagtgagcagtacattcattcaccagatgaatttgaggtctctggtcctctgtcaccatagcaacaataaactccaaacccaccccaatttcctactagaggaaaacaaacccctatactaaaggcctactacagaaaaacatataggcatctcaaaatattttctttgttatctaccattctatataacaagtatagttttcaacaacaacaacatataaaaactcaaaacacacaaaaatcacagtctgaaaatataaagcaataatcagaaccagattcagatatgttacaaatattgttatgatcagacaaagtcaaaaaatcacaatgatagatacattgaggcctctattggacaaggcagatatatgataaagcagataggtaattttatcagagagggaaactgta

SEQ ID NO: 125497 - DNA, 608 bp, Homo sapiens
taagcacgataaaattgatgttttaaaaatattacccttttggctgttgaagctgaagtcagagtaaaagctactagagcagtaaaatgagttcagaaactgcaggaggtttttttacttttttttttttagatgaaggtggaagtggtacctactcgataattattaagcatatagagttttygtcgtgctttatttccctcatagtcagtcatgggcgaagtcaaggtcaaaaaaacaagtcagggacgtaaacccaacccacagcttcggattctcggttcaatactttatgcagctaaataatgtgaaaatgtgcctggatgctgcctgatagagggaaggttccatttttaatatgtaaaacttacctttgtatgcacgaaataaattataagagctgtgccactttaatcaatctgttttgctagaactaggctctatagctattaaaagacttctacttccggagacttcctcatgccatgcagcttagtcatgcctccttgagcacatggaggcatgaataaactttaaaagagaaagaggaatatgccttcactggttttgtaaacacagcagccaatgtgtttgcctaaagggagaga

SEQ ID NO: 125498 - DNA, 599 bp, Homo sapiens
aaaattaaagcttataaatttttctttttatgaatagctyaaggtagatttggaactcccttgaaaaaaaatcagaatggtggcaactagcctttggttaatggcttagatttatttaagagatggtgtctttctctcttgcccaggctggagtacagtgggacaatcacatctcagtacagccttgaactcatgtgctcaagtgatcttcccacctcagcctactgagtagctgggactccaagtttgcaccaccaaatctttagattatttttaaaaggggaagaatgtatgtacatcttcccatataagtaaagttgaattatgagactaactgtgtacctgtgctgccagagattctcaaatagagcctaatggtgtccttggataaaactaacgttacagccaaagttatgatgaggcccatctaatcttctgccatttgttgtcatcaactcactcatgcacctctgcaaatctctgtccaaatatcacctgattggagaagctatttctgcttcctcaccttacatggtgagtgcaaaagtaattgtggtttttgcaatgttgaaatttgccatttgatagtggaatgcttt

SEQ ID NO: 125499 - DNA, 571 bp, Homo sapiens
ataccccatgcaaattcacaacttttcttgatcctatcaggaagatggaattgcaaggcaataagctagaaaaaatgtctaaggaggggaaaaaaaacttcaaggaaagacaagatgcaaacactggcttaagtaagatagacacaagtggacactggtaataagagtttggttgaaaatttggtagaagacaggtatgtactggtgataaagcttaatgtccctgaggatgacagaaattccagatgtcaataccctctttgggatttttttatrtagttaccccaacaagagcttacaaaaaagactgtagtgagtcctaacaaaatgtttcttgaggtacaggtttgggggagggaatagtaaccactgccagagaatcatgcaactccattggacactgttctatctctgttatgtgagtcgtaaaatataatgggttgaatagtgacctctcaaaagatattcatgccttaattcccaaacctatgaaattaagtcatatgacacaaggtataattaaattaagggttttgaaaacagaactttatcttggattatctgggtgggc

SEQ ID NO: 125500 - DNA, 571 bp, Homo sapiens
ataccccatgcaaattcacaacttttcttgatcctatcaggaagatggaattgcaaggcaataagctagaaaaaatgtctaaggaggggaaaaaaaacttcaaggaaagacaagatgcaaacactggcttaagtaagatagacacaagtggacactggtaataagagtttggttgaaaatttggtagaagacaggtatgtactggtgataaagcttaatgtccctgaggatgacagaaattccagatgtcaataccctctttgggatttttttatatagttaccccaacaagagcttacaaaaaagactgtagtgagtcctaacaaaatgtttcttgaggtacaggtttgggggagggaatagtaaccactgccagagaatcatgcaactccattggacactgttctatctctgttatgtgagtcgtaaaatataatgggttgaatagtgacctctcaaaagatattcatgycttaattcccaaacctatgaaattaagtcatatgacacaaggtataattaaattaagggttttgaaaacagaactttatcttggattatctgggtgggc

SEQ ID NO: 125501 - DNA, 587 bp, Homo sapiens
  misc_feature (1)...(587): n = A,T,C or G
caaaaaacaaacaaacaaaaaaaaaaacgggctgggcacggtggctcatgcctgtaatcccagcactttgggaggccgaggcgggcagatcacraggtcaggagatcgagaccatcctggctaacatggtgaaaccccgtctttactaaaaatacaaaaaattagcagggcatggtagcaggcgcctgtagtcccagctacttgggaggctgaggcaggagaatggcgtgaacccgggaggcggagcttgcagtgagcccagatcgcgccactgcactccagcctgggcgacagagcgagactccgtctcaaaaaaaaaaaaaaaaaaaaaaaaaaannaaaattcctgaatcatctctttgagatctcgagtattacaattttattgtgattttcagtcatcattggtttgtctcacccagattggtggggaccagtttgctccaggtttgctgcagctatagaatcccgtgactcctgacaaaatcgtggtcacagatgagatttcttcccacatcaggttcccagatctctgcctacaaagtgtggtcaaagcaagagtagtaggagtttgtctttttcccttt

SEQ ID NO: 125502 - DNA, 587 bp, Homo sapiens
  misc_feature (1)...(587): n = A,T,C or G
caaaaaacaaacaaacaaaaaaaaaaacgggctgggcacggtggctcatgcctgtaatcccagcactttgggaggccgaggcgggcagatcacgaggtcaggagatcgagaccatcctggctaacatggtgaaaccccgtctytactaaaaatacaaaaaattagcagggcatggtagcaggcgcctgtagtcccagctacttgggaggctgaggcaggagaatggcgtgaacccgggaggcggagcttgcagtgagcccagatcgcgccactgcactccagcctgggcgacagagcgagactccgtctcaaaaaaaaaaaaaaaaaaaaaaaaaaannaaaattcctgaatcatctctttgagatctcgagtattacaattttattgtgattttcagtcatcattggtttgtctcacccagattggtggggaccagtttgctccaggtttgctgcagctatagaatcccgtgactcctgacaaaatcgtggtcacagatgagatttcttcccacatcaggttcccagatctctgcctacaaagtgtggtcaaagcaagagtagtaggagtttgtctttttcccttt

SEQ ID NO: 125503 - DNA, 587 bp, Homo sapiens
  misc_feature (1)...(587): n = A,T,C or G
caaaaaacaaacaaacaaaaaaaaaaacgggctgggcacggtggctcatgcctgtaatcccagcactttgggaggccgaggcgggcagatcacgaggtcaggagatcgagaccatcctggctaacatggtgaaaccccgtctttactaaaaatacaaaaaattagcagggcatggtagcaggcgcctgtagtcccagctacttgggaggctgaggcaggagaatggcgtgaacccgggaggyggagcttgcagtgagcccagatcgcgccactgcactccagcctgggcgacagagcgagactccgtctcaaaaaaaaaaaaaaaaaaaaaaaaaaannaaaattcctgaatcatctctttgagatctcgagtattacaattttattgtgattttcagtcatcattggtttgtctcacccagattggtggggaccagtttgctccaggtttgctgcagctatagaatcccgtgactcctgacaaaatcgtggtcacagatgagatttcttcccacatcaggttcccagatctctgcctacaaagtgtggtcaaagcaagagtagtaggagtttgtctttttcccttt

SEQ ID NO: 125504 - DNA, 593 bp, Homo sapiens
gttcaaatagcaagtgcaaattcagttttggccatttcatataatttatgttactataatgacataaatctaaacggaatattcacagaaccatttatttgttttgttttttgcttttttgtttttgttttgtttttttttttgagatggagtctcactctgtagcccaggctagagtgcagtggtgcaatctcggctcactgcaacctccacctcccgggttaaaaggattctcctgcctcagtctcctgagtagctgggattacaggcatgcaccaccacacccagctaatttttgtatttttagtagatatggggtttcaccatgtcggccagactggtctcragctcctgacctcaagtgattcactcgccttggcctcccaaagtgctgggattacaggggtgagccactgcacctggcctgaaccatttatttgttacattgatatttgaataataaagtgacaactcttctcttttattttcagtctccctcccaagcagctctgagggtacatggataacacttataatcttacaatctgtgattaagtcaataaatagtcagtgtttttagcagtctatctcat

SEQ ID NO: 125505 - DNA, 575 bp, Homo sapiens
ttggccatatttaggccaagcatggtggcttatgcctataattccagaactttgagaggctgaggtgggaggaccactttttcttataattgtgagggcagaatgagataatgaacttaaagtttgattatccactgcctgtacctagtattccttctattaatgcyagtgattttttataaatgaatttttatattttcatgaattattcttaaactttaagaactagtcttatgaaggtgcaatcataaagtaattcatattcaagaacacattttaagacacagattatttttataatgaaagagagtgaaacacaaataatttaaacttcagtttaattggctgaatttaggcctagcatggtggcttgtgcctatagtcccagcaattttagaggttaaggtaggaggatctcttgagcccaggagtttgagacaagcctgggcaacagagtgagaccctgtttctcaaaaaaaaaaaaaaaaaaaaattactcaggcatgatggtgcagcctgtagccagctatatgggagactgaggttggaggattgcttgatctgggttggttgag

SEQ ID NO: 125506 - DNA, 570 bp, Homo sapiens
cttcagttttatttggttaattgttcatcatatttaagcctcagtgaaagtttggcttcctccagaaactccctccagaatacctgccatttttcattacagagcttgaaaacatggcagatctgatgactactcctttttctttttcttttttttttttttttagcaattttttcttgcstgaagtaattcttctggtaagtgatttctggattcactctcgaaattctcataactctttcactagtctttttaggataatcttctattctaagactaagcctcacataagtaaaattgtgtacaaatacatgcaacattaaataaaaccgaatcttaaatggagggtgaataaggagtgtaacaatgggccttcagggggaaaatatgcattagaagggaaagagaacagagttaagatactggtggaagtttaaattctgagaatgagttatgaatatctgagaataatatttttgagaactatttttaattctcagtagagtatagaaggatgtagcctttgaatgacattaaaaattcactagaagtgtaaacaataatagtcat

SEQ ID NO: 125507 - DNA, 580 bp, Homo sapiens
gtgatttcacctcaagaaaatgtagtgatttcaattgatataataggaattgcaaacagagaagcccacacaagctagccaaattaattctagtatattggataaacggcatgatgtgtattctagttcaaatttgaaggttggcataaaccttttcagacactgcagatgagacaacctttcacyaagactgggtgtcaggaagacaaaagaaatagaatagtatatagagtaaaaatatagtaaaagtaaaaaaatactgcataatatggtgcatggctaaatgttttttaacatctaggcaaattagacatggaaaaatcctgaaagagagattaatagaggaaataattgactcagtaagaactgtgaagaagcattacagtgacggaaaccaggagatctttatattggtttgatttaaaaagggagagagaataggaacattgaaaaagatggacagaaaaagatagcattattcaagactctttgcaagagtgaagcagaaagcttataaattgcttgattacacccagcatataattatttgaagttttctattgagagtgagaacatgtaa

SEQ ID NO: 125508 - DNA, 517 bp, Homo sapiens
gagtatttggctttaaggaaatcacctggtgtttttcacaatgcatttattcccatcctataggttcaaaattaggcagatggcacaccaagttgtaagatatatctgggaatgcggtttacactcaaaaccatatttattcttatcatttgattcagaaaacaaattaaatgactggcacaactgaaaataacccaagagatttgttcaatgaaacaaagctgaacctcaaccaaatagataagctgctgcctaagattagcacaatttcttagtattcaagagtgagtaaaccctgctttttaccactgtcraggtgtccagtgttgtcctttttagagcatggctagctgagggttagatggcaagaaacatcatacttgtattttactcccttaaatgaatgatttagataggaatgattctccaaattttgaaaacacttgtcagaaatgttctcttattccttcactctataccatgtagactataataaactgtctctcttctgccttca

SEQ ID NO: 125509 - DNA, 517 bp, Homo sapiens
gagtatttggctttaaggaaatcacctggtgtttttcacaatgcatttattcccatcctataggttcaaaattaggcagatggcacaccaagttgtaagatatatctgggaatgcggtttacactcaaaaccatatttattcttatcatttgattcagaaaacaaattaaatgactggcacaactgaaaataacccaagagatttgttcaatgaaacaaagctgaacctcaaccaaatagataagctgctgcctaagattagcacaatttcttagtattcaagagtgagtaaaccctgctttttaccactgtcaaggtgtccagtgttgtcctttttagagcatggctagctgagggttagatggcaagaaacatcatacttgtattttactcccttaaatgaatgatttagataggaatgattctccaaattttgaaaacacttrtcagaaatgttctcttattccttcactctataccatgtagactataataaactgtctctcttctgccttca

SEQ ID NO: 125510 - DNA, 559 bp, Homo sapiens
attaactgggttattttgaaatgctggatttcattagatggaaagttagtattcatgccttccagaaaccttaggagttcctcttaggaccattagtcttggtttttaggtaatgccatttccaggtgtttgagtcattgataatgtcccagttctgcagacacctcagcaggaactcaaatgcctttactctcacaactcggaggatacatttcagagggtattatttctgaaattcttgctatgtgtgttattatgtatttctgaggagaaggacaatgaaagttcttctttttccatggtttgagtaagaaaaatcaccccatttgtgatatgttgtttatataaataatttaccgttcacaatataaatgaaaagttgcctacttctgaattamaatttctttgtctttcatatactacatgtacaatattcaaaatcctccccttccatcccagcccagcttctgccaagtcttaccagagcctgtcacaaatatagctgaataagacaaacgccaggccactcaatcaagaggcttgccgtaagaaaaagatg

SEQ ID NO: 125511 - DNA, 615 bp, Homo sapiens
ttgttttgtttttattaagtaattgtgccagtaaatatcagttattatttgtttagtttttgcaaattagaaagaaattgttcattttgacactagtaaattagaaaaccttttttgtaagtagctaatggatcaaaagaacggttataaactgaattcttcactgtcatccttataaacattacaagtaattaatttccccttcatactctaaagttaccttcaaggataatagaattaacaaccatgaacatatttatagacagtcctacatgatgagagaataaatgggactagcacaatgggtgagataaaaatcttagtggcctttctttcaattttctattctattgttgtaggttggatatatgtatctggtataaaatgtatagttaatgtgaataattatttgaagcataaaaataaaatcaatatatgcgcatttcctaatactaatgttattgaaattatgatgaacctggggaagatgataataaaaatctcctagaatatcacyacttttcttagttgctcaaaatgaaagtaaatgttttattttgaatgatcttttgttcatctctgtcctttacattagaaggtaatgcattcattaga

SEQ ID NO: 125512 - DNA, 575 bp, Homo sapiens
tttaaattttaacattgcatgagggacagacgatgttatccccatcttacaaattagaacgccaaagataaaatggtttaaaaacttagtccaaggtgacacagctagcagaggtgatttgaattatttgaatggagatctatttgattgcaaggcctatgtcattaatcactgtgctgcactgacgattgtatgtccttctatatatatagggcatctctgtttaactgtttccattcccaactctatttttatagtaatacttttaaatgtttacatactggttttgcattatctactactcagatgcacacttcaatacatgtatttcaaaacaatacatgaatgggatacattctgagccttcgtttatcttagaakttacttttattcactcatacataaaaatgttagttttttttatcaacactatgatctcatgaattttaggtttgcaaaagaagatactgatattgtccactaaaagtaacagtaactaccacaacatactgtctactagtattacataacgagaatgttatttttgtatgaccactattcttcaatgcttgttt

SEQ ID NO: 125513 - DNA, 520 bp, Homo sapiens
tccttctatatatatagggcatctctgtttaactgtttccattcccaactctatttttatagtaatacttttaaatgtttacatactggttttgcattatctactactcagatgcacacttcaatacatgtatttcaaaacaatacatgaatgggatacattctgagccttcgtttatcttagaatttacttttattcactcatacataaaaatgttagttttttttatcaacactatgatctcatgaattttaggtttgcaaaagaagatactgatattgtccaytaaaagtaacagtaactaccacaacatactgtctactagtattacataacgagaatgttatttttgtatgaccactattcttcaatgcttgttttcctttttggttgcgattttgttttgttgatatttcttaaccctcaaataaccgttcaaagtattgttaggctatttccaagagtcagactatattgtttttatttcctaaaaaatgcaagttattacaatttgaatgta

SEQ ID NO: 125514 - DNA, 520 bp, Homo sapiens
tccttctatatatatagggcatctctgtttaactgtttccattcccaactctatttttatagtaatacttttaaatgtttacatactggttttgcattatctactactcagatgcacacttcaatacatgtatttcaaaacaatacatgaatgggatacattctgagccttcgtttatcttagaatttacttttattcactcatacataaaaatgttagttttttttatcaacactatgatctcatgaattttaggtttgcaaaagaagatactgatattgtccactaaaagtaacagtaactaccacaacatactgtctactagtattacataacgagaatgttatttttgtatgaccactattcttcaatgcttgttttcctttttggttgcgattttgttttgttgatatttcttaaccctcaaataaccrttcaaagtattgttaggctatttccaagagtcagactatattgtttttatttcctaaaaaatgcaagttattacaatttgaatgta

SEQ ID NO: 125515 - DNA, 592 bp, Homo sapiens
tcctttcattgaagtttgaaggagtcaatgagaccagaaacattagaccagtgatataaatgttcttgtagccatgcagccagtgtgggattctttatatgactaagaactgctaacataagcataaatttaatgatgatctggatccttaagatgttgattctgagagctgccccaaaaggaaacagattagcagaatatgttgcatatgttgattgtaaaattagagaacactctaattaaatagtgcaaaaaggaataaagttcaaaaaatgagtgcatgaaaaaattagtgaaatccccataagktctgttgattgtaatgtgtcaatgtcaattttctggttttgacaatgtactatagttacataagatgttactatccaggaaaactgagtgatgggaacaggagacctctttgtactatcttggcaactttttataagtctatatttattccaaaatgaggcgaaagaaaaaaaaaaagagtcaagccttcatagctaaaacatgaacaaaagattttcagaatagtgtaatcagggggcaatatgctttaaatttatgggaaatatgaggaaagtttacttaa

SEQ ID NO: 125516 - DNA, 592 bp, Homo sapiens
tcctttcattgaagtttgaaggagtcaatgagaccagaaacattagaccagtgatataaatgttcttgtagccatgcagccagtgtgggattctttatatgactaagaactgctaacataagcataaatttaatgatgatctggatccttaagatgttgattctgagagctgccccaaaaggaaacagattagcagaatatgttgcatatgttgattgtaaaattagagaacactctaattaaatagtgcaaaaaggaataaagttcaaaaaatgagtgcatgaaaaaattagtgaaatccccataagttctgttgattgtaatgtgtcaatgtcaattttctggttttgacaatgtactatagttacataagatgttactatccrggaaaactgagtgatgggaacaggagacctctttgtactatcttggcaactttttataagtctatatttattccaaaatgaggcgaaagaaaaaaaaaaagagtcaagccttcatagctaaaacatgaacaaaagattttcagaatagtgtaatcagggggcaatatgctttaaatttatgggaaatatgaggaaagtttacttaa

SEQ ID NO: 125517 - DNA, 592 bp, Homo sapiens
tcctttcattgaagtttgaaggagtcaatgagaccagaaacattagaccagtgatataaatgttcttgtagccatgcagccagtgtgggattctttatatgactaagaactgctaacataagcataaatttaatgatgatctggatccttaagatgttgattctgagagctgccccaaaaggaaacagattagcagaatatgttgcatatgttgattgtaaaattagagaacactctaattaaatagtgcaaaaaggaataaagttcaaaaaatgagtgcatgaaaaaattagtgaaatccccataagttctgttgattgtaatgtgtcaatgtcaattttctggttttgacaatgtactatagttacataagatgttactatccaggaaaactgagtgatgggaacaggagacctctttgtactatcttggcaactttttataagtctatatttattccaaaatgagrcgaaagaaaaaaaaaaagagtcaagccttcatagctaaaacatgaacaaaagattttcagaatagtgtaatcagggggcaatatgctttaaatttatgggaaatatgaggaaagtttacttaa

SEQ ID NO: 125518 - DNA, 201 bp, Homo sapiens
aacattaatttatttttcaagtttggtgagcattttttataatgactagatattgacttttatcattttttcacttattcagatattcatttaattgtcattgtattaagttacatttattactcttttcaatattaaaccaaatgygcctttatgtgataaactcacattggatttatatacatgctttatcaaactgat

SEQ ID NO: 125519 - DNA, 672 bp, Homo sapiens
acaggtattaaacatatccgacaaatgagtcatgcccatggaaacaaccaaccacaaaagactccatttgtaaggaactggcttagtggttaccaacttaacatcaggggcccacggccattactactattattcctactgttatgtactagttttagactttagggtatcatgatgtttcaatgactcattactattgagcatttcatgtggcctatttggatgtatttcttattaaaaatgtttttcatttatttcacatataatattggtgtaagacacttataatttcaatctctagtaaaggtaagaaggctactgctcattattgcctgctccatatatttttaatatttaatgaatctctctttgaactttcttgggggtgtcttctaacacaacacctttatttatttatttatttttaattatactttaagttttagggtacaggtgcacaacgtgcaggtttgttacatatgtatacatgtgccatgttggtgtgctgcaaccattaactcgtcatttacattaggtatatctcctaatgctatccctccccsccaccatcccacaacaggccccggtgtgtgatgttccctttcctgtgtccatgtgttctcattgttcaattcccacctatgagtgagaacatgtggaacacaacacctt

SEQ ID NO: 125520 - DNA, 425 bp, Homo sapiens
gaattcttctaaccctagggaataagagggactccagtgtttatttttattgtatcctccattttttcttcttctttaagaatggaggaaagagttattgcctttcagcgcaacctgttttcattttgcaattcttttatattttcacttgccagcctggagaaaaatgtgttcagaatattggtacctaagaaaggagaatatggttgatttatttcctgttcgcagagtccttgccgtgtgcacaagagtgggagctacatggccagcaggttagaaccccacacgctgtgcgcccygggcatgagcgtcactgcagtcctgactgtctgactcggtgacggggcactgcaaataaaagaaagcacagggtacaggcaaaacaaatgggacaagtgtgggtggagcagacacacgaactgagc

SEQ ID NO: 125521 - DNA, 613 bp, Homo sapiens
gaggcttgaaatgtggaagaggaatgtgctaccatagcagcctcactctgagggtggcctaaattgacttggcattttggctcatagctttgaaaattccctttatttctaccccaaattcaagttgtcggatgtcagtacccatttatgtatatagcgttttgttttcactttccagttctccctcattctacttgtaataaatcaacctagaaatatttttgacctttcctgtgtcctatcattattcttttagttaagatttttgaaaaaaaaatgaaagaaggaaaaaaaaatagtagtttactgttcttcaccaarcagtcacacctcagcacataaaaatctggcttccatttccaccacttcccaaggaatgttctcatcatattcaataaactcataaagccaagtttaatcagcactttttgtttttttctgttgggaattactgattgctcttctgagatcgagactattatgtgctacataatgaacattctctatttgtacaatgtgcagtgctcaaattaaaagctaagtttatcatctcccaaactagccatacctccttatcctgcccaaaatttgtcctttgtattaggtgttttgc

SEQ ID NO: 125522 - DNA, 592 bp, Homo sapiens
aagaagtatcacactagcagcagatttctcatctgtgacacagaaaactagaaatagtaatttctgcaggccatggagatgttaccaaaataccaagggtttggtctaggccctacttgctcaccacacagaaagccaatcacgagacgatgagtattgccaaggaagaaggctttaattgggtgctggggctgaggagatgggagatccttctcaaatccatctctctgacagactaaaaccgagggcttatatagcagggcagaaatgtaacaatgtataagaaaacaggaactagagaggggcaaggaagcaatcatgatcartgaggggcccctcaaggatctggtgtggtgatctggtgagtttcagttctttgatacttttttttgagtggactggaagtactctcctgaggacggagctcagataaaacaaatacaagttttaagctttaagacaagaaagggcaatctatgtttatacaaaagaatagtctataggactactgggttggtttcagagagaaaaaagacagcagccagaaaattccatacatttccctgtcaggaggaaatttattactacataa

SEQ ID NO: 125523 - DNA, 586 bp, Homo sapiens
tggctaaggcacagaagaccaggcatgaccatccagatatgtgacaaccaataggtcargtccatgggagcagccaggaaagaaacaagccaataataaatacttgtccccttcctgctccctgcttccccaatcaaggctgctgggtctccaagagggagcaggaaatagctgttggagtcagaacacatcacctgtttcccactctaggtattcagagttccagttcaaggctgttgggagcaaggatgatggggacacaaggcatgagatttacattacttgagatgaaaattttaaacaagattgaattttaattgttcaaagagaccagaatataatagaatttactcaagatgttgctaaggggtgggaaagggaaacttcagaaagccttgaaaaattttggccaaagaaaaaataaagtgtttcatgattatatttattcccctgagagttatgcttactggaactgggcaaaaactagtaaaaaaaaatattattatacaaagctaatatcttgcacttaaaagtatcttctgggctaagtgatttgcatacattatattaattaatcaatccctac

SEQ ID NO: 125524 - DNA, 541 bp, Homo sapiens
tgcgctgtcattcctcagcacagattcaggaggacaactatgataggtagaaataaaataaaaggggaaagaattttcatggtttggagtatgttaataattacatttaaattgtaaagatttgaagctactttttcatgcaaacttttttgccagtacagaatataaagtagttttttgtgataggttaagtttatctgcacacttattagtgtatgtaaaatattttttcaattgtttccaatttctaacataacagttatagttttaaaagatattttaaataaaaaataacctgtagtcaaaattacaaaaaacatcagagagtttacarttttaaaaaagattttggtaaatctgtttgttaaataaactaccaccattttatatttgacaaatctagatttttgttttgttaaaggcaaggtacagttacaagatcatagctgtagcaaatgttcttttctatttattgcaggctttttttggcacttctagaaagaaaagaaacaaatggatcaagcaataatgcaagagagat

SEQ ID NO: 125525 - DNA, 636 bp, Homo sapiens
cggcttcaagattgtttcatcaaggtgactgagaacaaaaactactgaggaaagaaaattcgagcttaaaccgagctcccatacatccattatttatcgttctagatcctttaggaacgagatttctaacacatctttatgcagaactcgggaccggaggaaaggggcgaggccgctgcgtgtgtgcrctgccaagcgagccgtggctcggcccgtgcgtgtgcaagcgcccctgctccccacgtgtgcagacgcccttcaacagcccacagccagagagggaaaggcccggaccaggagacagctctccacgggtcagtgagttattccaagaaaccacggggatgtgggcgaacccacacttaactgaaattaaggcctacgttcctggggatgctaagagccttgcaataaggtgtctggtgtatagggctgttatccacttccaaattacgttaaggccattttattgtaatacgtggtcactgacttttccctttcataacctgctgtgggtgagaatacctaaaagtcaaaagagtaaattcccaaagcatattttacacccaaaaatgtacatttttggaaaaacattttcacttcatactcataatcatccagaatattccatattgg

SEQ ID NO: 125526 - DNA, 630 bp, Homo sapiens
tatgatcatttcattagatgctaaaaatttaaataaaatgcaacattgctttatgataaaagctgtcaacaaacagcatatagaaggaacatctcaacacaataaagaccatataggacaagcctacrgctaatacactgaatggcaaaaaactgaaagcacttccactaagatctggaccaagacaaggattcccactttcactgcttttatttaacatagtactagaagtcctagccagagtaatttggcaagagaaataaataaagggcatccaaattggaaaggagaaagtcggattatccttgtttgcagatgacacaatcttatatttacaaaaacctttaggctccaccaaaaacccttagaactgataaatgaatttagtgaagttacaggacacaaaatcaacatacaaaaatcgatagtgttgccatacactaacagcaatcaatctgaaaaagaaatcaggaaagcaatacaatttgcagtcaacacacacacaccctaggaatacatttaaccaaaaaagtaaaagatctctcactgatgagagaaattgaaaaggacagaaaaaaatggaaagatatcctacattcatgaattgaaagaattaatattgataaaatg

SEQ ID NO: 125527 - DNA, 635 bp, Homo sapiens
cagtttgagggagccagagcgggattttactagcagcaatcttccttcttcctcttccatacctcttctaactgccttctggctcaacagcaggctgatagcttttttgcacaatctaatctgtgacaaaccaccaggccagcttctccagatagtgacagattaatagcaatgttggtttgagggctagtctttggtaaaaggcaactaggctaacatttctttattgctatgtgctctatgactcttaggttctttatttacttgcttgctggtaaatttttactgccttgttctgccaaatattgttckcctttggattaaggcctcatttctgaaatacaacttttgaactttggactgcagtaaaatcactattgctattatgagttgactctttataaaattacaaagtttttcaggatagaagtttggagaacagtaaaaaaaaaaaaattacaaagttttccttctaaggacattattatagcaagagattatctggtagacagtgtgcaaaatcttcttaggctgataacccacagcctggagaagaaccaacctaacctctacggcagagggtgaaagttagaatcaactgagaagctttaaaaagcaagaatgcctgagtctaa

SEQ ID NO: 125528 - DNA, 558 bp, Homo sapiens
agaccagcaggcaaaacttttccctacaagttttgataggtagagctgctgtgcttgtttatttgtaagcatggtactttctaatttccatgatatcaaggctttgggccccatctatgagttttgacaaggagcattttccaacccaagcatcccaaaggcccttgaacttttggctttgacccgtcattgattcacaaatcttttgtttaatttccaaagtttcctttttcttctgatcttttgtcagttctaacagatttttagagtggatactaactagaaaggatagagctagagaggtgtctagagttgttattttagttgaatgtttaactaaattgacaatgcctgattatcagtatgcaggccagttatggagtggccaggtcaaatccctgctccaggmctgacttagctgtgccacttggatgccccactccactaatggtctcaggccactggctgctcattgggaggacagtgggagccgtgggcagagttgttctgtccctcttcctctgtggctcctggctgtatgcacatagcactgttcca

SEQ ID NO: 125529 - DNA, 548 bp, Homo sapiens
caacaaagagttgcctacagagaagccaacaaagagttagtctgtctcgtaagtatctatgctgtcaccataatttcataaaataaagtccatcttaaaatttatcagttggaaggaaataataacacaatgaagaacattccagccgggcacagtggccaatgcctgtaatcccagcactttgggaagtggaggtgcaggatcacttgagcccaggagttcaagaccaacctgggcaacatagcaagaccccatccattaaaaaaaaaaagaaaaaagaaaaggaaagaaaataacacacttttcattgaagagacatttgacaaatttgcacatatcacacacacatgcacatgtaccacacactcgccagatattcacaggtactatacattagttggccttctggaattgcccatgagaatcttttatcatcattaaataagtgaatctgtgcgatgacccactgtggaaatayatggagttgcctgtgtgagaagctgcttgatgataaattaccatctttcattcaaagaatcaccctaaaa

SEQ ID NO: 125530 - DNA, 592 bp, Homo sapiens
caagataaaaactccttctcaaacatgcacactttcataacatcctcttcacagtagcccttactaccatcatattccacatccaatgactaaaaagcaggagcattttttggaagggatgagaagaaagtatgtaaatgggactttgcttactttccagaagtgctcatcttttattttttctgggcttcgagcatctttttatacaacataattctttagatattgaaaaagtatccaggtaggttcagatgctgtgttatccattacttggaacaacagtcttctttgcaattatcattattgacatgtcaaagtgactaccaatggtgccaaaatcctatgtattaaggaggaaagaaaatgaaccaatatgatagactgagtacacagatttacctcccaatatcccaaatcccttgaagttacagaaaaaaaaaatgctttgtaaacatgattccttcattcatctgacaaatatctaaggcwctcctactatgctgtaggtgctacggtggtgaacaaaatatgtggtgaacatgaggtcactgctaaagtggtgaataaaatacgtggtgaacatgaggtcact

SEQ ID NO: 125531 - DNA, 552 bp, Homo sapiens
ctctgcacatgctgtcaagcccctgccaaaaactccccaatgacttcccacagaaactatatagagtctaccaggcctgttaaatctggccgctgcctacatttttcaatcccatctcattctagtctcttcctaacacaacatgtcaaggactctggcttactttctgtttcttaaacatgccaaatacttgcctctctcacagccttctcacatcctgtcttctctacctgaatttcctcgctccctgtaccagggctagtttcttaacctccaggtttcatcgctagtatagtgatgccttgaataacaaagttcccatgaaggacagaccacatatgcaacagtggtcacatatgattataacagagctaaaattcttattgctagtatgccttatactatgctttttattgttttagagtatactccttctatggtgtatgtgtgtgtgtgtgtgtgtgtgtgtgtgtrtatacacatatatatgtgtatatatattttatatatatatatatatatatttatatatttagaattaaccataaaaca

SEQ ID NO: 125532 - DNA, 279 bp, Homo sapiens
actttgtctctctctctgggtatacattgagtagacaaaaacggtatcataacctataatctttttttcactcaacaatatattgtgagtgacttctcatgtcmattaatattttctacaacattattcttaatgactctatgaatttcattctaataaaatatcatgatttaaccactgtccatggttcaatattgatactatttctagtgtttgctattatatacataaatgatgttgcaatcagtagccttatccttttagaatggaattccaaag

SEQ ID NO: 125533 - DNA, 622 bp, Homo sapiens
acaatgtgtgaaagaatgggtgtggctgtgctccaatcaaactttagttacacaaactggtagcagacagatttggctcatgggctatagtgtgccaaatcctgtctgtatcaatcaaaatacagaaaaatgaaagggattattattctcattacaccctgtagacaacaagccataagccaattcttgagttcatttctgggctccaaaactttaattggccagagacaagaatagagacctccctattggtcattaatacactaacctggaacagtttttcagtcagctaagactcttcctagagctactgacatttcatttgagcttctctatctagtccccatggagaacatggccatccctstgcgaaccttgctggaatcagtccacccaagtctactacagccctctgctaatcaaaggagaggaggttactatgtggaatgttggtccttagtgaactcatgcagttcctaaggatcagtttctttaaaatgcctaccaggtgatctttcagtagactgtcctagatttttagctacaagatggcaaatccacaggcagaaggcacaaactggtagcctattggccctatctctctacagtcctatttaattca

SEQ ID NO: 125534 - DNA, 524 bp, Homo sapiens
aggaatagtcagcagagtaaacagacaacccacagagtgggagaaaatcttcacaatccatacatccgtcaaaggactaatatccagaatctacaaggaacgcaaacaaattagcaagaaaaacaaacaaacaaacaaacartaccatcaaaaaataggctaaggaaatgaatagacagttcttcctttgcatttgtatttgtctgctctcttgcgtattttgggcagcccttgctgctgactcctactgcttgatccccacactctcccctagacaactttgcagttcatacacgactccctgaaagagaacacagaaaacatttggaagtggtggagtgtgctgtaaagagtgtgagatttctgtcaaaagttctgattgtaagccttacttctggcttattcactgtgcagctgagaattttcttaacccctctgagatttcattgcttcatttgtaaaatgaagacaagggtaactcaaagagaattgttttgagataaagtattggagggtaaatttta

SEQ ID NO: 125535 - DNA, 614 bp, Homo sapiens
ggagtaggaaaattagggagatgcttgtcaaagaacacaaaatttcagttacacaggaggaataagttcaagaaatctattgtacgtcatagtgactacagttaacatattgtatatttgaaaattgattagaaagtaaatttcatatgttttcactacaaaaaatattgatatgtgaggtaatgcatatgttaattatcttaatttagccatttctccatatatacatataacaaaacaccatgctgttcaccatacatraatatgtataacttttacttgtcaattaaaatagaggctgagtattaaaaatatatacaataatttagataattaacacattattttttaatgcattaaaaataatgagtgtaagctttacactctgtagcaagatacagggattttatacatttaaatgtgtgtttttctctctaaagttgtcactttagaatttctatatataacttattccagtgatgatgccatttattaaaacactttcaaaatttccctttgtgaattttccccagagccactttataaagtacaaaaatgttttatcaatttataatcactccctcctttttttaacaaaaaaagtggtaattctt

SEQ ID NO: 125536 - DNA, 624 bp, Homo sapiens
tagttcaataatatctaatattccttagagaagtgcttcttaacttttcatgtgtgtatctatcacctggaaattagttaaaagcagatctagcaattttcattcagtaggcctggggcagggctggagatcaaagttgttgcttagaatatgagatatggaaggcttgatagacctgtacttgtaactgttttaaaagtaataagattttggtctactaagtgagaatatttgttaaaagatgttcttttaaaagaagtaatgaagggtattgaaaccagaaacattaagcacacaataatgaagtaaagatttaacgtggacaccactagataactggacagtcatatttctgtaacaattgttgtcatgataaccatatgtttacttcttcatgtactgggacattctgatttatgaatatgtggttacaaagttgccattacataatrtagattccccacccctcgtgcagttttcaactgtacaattctgagcaagccacaagctgcctatgatgtgtttttgccaggcacccactagatgctcagtgaatacttgttagctgaattgaacccaaaggaaactcacatacgtgcctacacaatttaaacaatgcttgcc

SEQ ID NO: 125537 - DNA, 575 bp, Homo sapiens
acaggctacctgataagccaaggtctgcactttttcaccctgtgctcacaggcgggacagcaaggtctccgacatttcggcctgaactaacctggcacctctttctaatcatagctcatcctgtaactrataagcccccacctgtgctgcaagctcagcttccttggctgttcacagtgtagtcaggagcaaccagccaaccacagctgccacagtctaggcactttcacatagttggatccacctactgcaacagctcttccagaccgttcaatgttttggggtatccctgtacgcacgtgttgggcctcatccaccaaacacaggggctattgggccccacataaatgtgtatggccagcctggaatttcccccatggatttccccttccccaatcccatctccttggcactcatgggatttttctccaacattccagctagctcatcaattgtctggtggacccgtgtttacctcaataggaagggaaccaggttcaagaggctgaagagacgcaaagccagtgaacaaaacatagggtttatttggggagaacttacaggatagtccagtg

SEQ ID NO: 125538 - DNA, 575 bp, Homo sapiens
acaggctacctgataagccaaggtctgcactttttcaccctgtgctcacaggcgggacagcaaggtctccgacatttcggcctgaactaacctggcacctctttctaatcatagctcatcctgtaactaataagcccccacctgtgctgcaagctcagcttccttgrctgttcacagtgtagtcaggagcaaccagccaaccacagctgccacagtctaggcactttcacatagttggatccacctactgcaacagctcttccagaccgttcaatgttttggggtatccctgtacgcacgtgttgggcctcatccaccaaacacaggggctattgggccccacataaatgtgtatggccagcctggaatttcccccatggatttccccttccccaatcccatctccttggcactcatgggatttttctccaacattccagctagctcatcaattgtctggtggacccgtgtttacctcaataggaagggaaccaggttcaagaggctgaagagacgcaaagccagtgaacaaaacatagggtttatttggggagaacttacaggatagtccagtg

SEQ ID NO: 125539 - DNA, 606 bp, Homo sapiens
agcaataccagacccttctactctcactcttggagaattctcaaattgagtccagtgttttattttctttaatagagagaaatatggatggttgagagtatgaccctaggcaagtcatttgatctttcagagccacagtttcctcatccacaaaatagaggtggtaataatacctttgctacctacctcaagaagttatatgaggctcaatggatacctttttttttttaactaaggctcaaaaacattatccactaaaactcctttcaaactagctttaacactgccattaactcccacccacattaccatgataactcacatcctgtgacaaacatcagggttaatattggaggaataagtctatttgcaaatcaaagatgtttgtccccatgagtgtcctcctaccttcattcatcagccttttgcaacagagaatgtgtagaggtctccagatggatcctggctttcatttcctttttggcatcccrgcacctgcaatcagacacacacaaagttatgtaaatcctacatgactatgccaaggaaggtgataataaaataacctaagacataatggactcaagtagtgactattgctgggaa

SEQ ID NO: 125540 - DNA, 505 bp, Homo sapiens
tcatttcttcaatgacccagctattatttgagtgtctcctccaaaactcacattgaaatttaattgtcatttcattgcctacatgggtgggatgtatgcctctatagacagttgagttcagccttcttctctcttgcctcttctgccccttgcracgtgagtatccaaccttcctctcctctggaagacttcatatgcaaggcaccatctgggaatcacaatcaccaaacctgcagctgccttgaccttagacttcccacttccagaactgtgagccaatacattcttcatacattacccagtctcaggtagtctatatagtgaaaaaaaatggactaagggagaccactttaaaaatatctgagtgcctgatgtgtgctaattactgtttcaggagatatactgataagtaaacaggtagtatagctgtgtagggtaaatgcaaaataaaacaagaaagcattgatagttctgtgggacagttctaagaaattttctactggaa

SEQ ID NO: 125541 - DNA, 592 bp, Homo sapiens
tgtggcagtgtggcagtgaaggccatggactgtggtcatgagtccctccataatgccaaagttgtcatggatgaccttggccagggaggctaagcagttggtagygtaggaggcattgctgacaatcttgaggctgtttttgtatttcttatggttcatgcccatcacaaatatgggggcatcagcagaagggccagagatgatgactgttttgattctcccctctaagtgagctccagccttctccatggtagtgaagataatgggtagactctacaacataatcactattggcatcacccagtttgattttggtgggatctcactactggaagatggtaatgggatttccattgatgacaagcttcgcattctcagccttgatggtgctgtggaactcgtcatgggtggaatcatattagaacatgtaaataccatgtggttgaggtcaatgaagtagtcattgatcatgacaaaatctactttgccagagttaaaagcagccctagagacctggtgtctaatacagccaaactcatttactccacccttcactttctccatagcatctcagggatgtggctggcactac

SEQ ID NO: 125542 - DNA, 615 bp, Homo sapiens
gttagcatttagaatggtgcttgtcctgatatagtgctctctaaaatggtttaaggaatgaataggaccaaacagatttatgtgctttctttggtttatcttgagcataatggtctaatgctaaggtattttatcattatttatcactggaaatgtgttatattattatctttatgtgtgaaataaagggagctcctttgacctggaaccaagaggagaaagtcatttgaatgactgtaatatcagaacstctgacatgatcacttcttcttactgatatatgtatgacacatgcttctacaacacacattttaatctgtctttttttggacaaattggcaaatgattggtacatctctagatggtgttactctaaaattatttgtgatatgtacagttttctagaatgacttactaattgtgattccacagctaacctggggacaacacatagtcaaatgggcttatgtaatgggtccaaaggatagaaatttaggaaggcctcaaaggggattgaggtagtattttgtattacctagataagcattatgaatttggaattatagcagctctaggattagatatttagcctaccatcttgaatttctccaatac

SEQ ID NO: 125543 - DNA, 556 bp, Homo sapiens
tgattggaaaagtgaaaacaactgcttggtcatttcactagtgggaggtggagccagaggtagaacccacagatccttttattttacatctataatcatatttactgtttatttagagcctaccagatactgggacgagtccttcacatgcactgaatcatgagacctccttgactctgagatatagatatggttatctccatttgacaggttaggaaacagattcagagagcttaaaagggcctgcytattcaaggtcaagcagtagaattgaactagaaatccggtcttctggaaggcaagtgtttctttcatgctttcaggttgtgtcagtgtgtaaggtcttagaaggtatttttgacggtattattttcagatcctggaaggaaagtttggggacagtggaggtgctgaattgcctgttggtatcttgcactttttctgcccacctgagttctctcctcagtgtcctagaggcaggaagcctgcacactttattttccagaatcctttgtcagcaggctcctactgcagatgccacagatgacaggaattc

SEQ ID NO: 125544 - DNA, 668 bp, Homo sapiens
gtcagtctagggaatccaatgagccaataaattttaacccaaagaaaagtaaatgtgatctgaaatgtattctattttgaaccatgattcccttgttgtagtatgctgaaaacatgtcctcctctgcaaaaattaatttacttattaatgcctggaacctatgagtattatcttattaagcaaatgcattttactttctgtggcaaaatatatgattaagttaagggtcttaaaagtcagagttyatcctggattaactgggtaaaccctaaatgcaatgacatatttttataaaagacagactgaaagagatttgagacaaactgtaaaggagaagagacacatatgtcaaacatatgtgcccaaaaagctatttcagaatgagacaatagaatggagatcgattaataaaagaaagataaaagagcactttatgtagctgaacaaaaccaaaacttttaagtagaaaagtgtccccaggatttttaaaaaccatactaaatttcaggacaatagttaaaagaaaatcctaaaaacttctagagtggaaacatatttctcctacaaaggtaaaaaatggatttttattagacttttctagattccagaagataatgaaaatatgccttaagccattcttaaggaaaataattttgaatcaagaattc

SEQ ID NO: 125545 - DNA, 668 bp, Homo sapiens
gtcagtctagggaatccaatgagccaataaattttaacccaaagaaaagtaaatgtgatctgaaatgtattctattttgaaccatgattcccttgttgtagtatgctgaaaacatgtcctcctctgcaaaaattaatttacttattaatgcctggaacctatgagtattatcttattaagcaaatgcattttactttctgtggcaaaatatatgattaagttaagggtcttaaaagtcagagttcatcctggattaactgggtaaaccctaaatgcaatgacatatttttataaaagacagactgaaagagatttgagacaaactgtaaaggagaagagacacatatgtcaaacatatgtgcccaaaaagctatttcagaatgagacaatagaatggagatcgattaataaaagaaagataaaagagcactttatgtagctgaacaaaaccaaaacttttaagtagaaaagtgtccccaggatttttaaaaaccatactaaatttcaggacaatagttaaaagaaaatcctaaaaacttctagagtggaaacatatttctcctacaaaggtaaaaaatggatttttattagacttttctagattccagaagataatgaaaatatgccttaarccattcttaaggaaaataattttgaatcaagaattc

SEQ ID NO: 125546 - DNA, 537 bp, Homo sapiens
tcataaaactaaggggctatggacttgaattccagggaccaacaaaaagcacagaccctggtgaactccttgactttgtcttgggatcttaaagagtggcagcactgaactaagaggtaaatagcaccccttcccaatatgtcagtagctttgagtcatctcattcactcattgttatgggctgaattatgtccccctgaaattcatatgttcaagtcctaacccctggtacctcagactgtgacagtatttggagacagagtctttaaaaagtaattaagttaaaatgaagccattagagtgagccttaatgcaatgtgactggtgtccttataagaagaaaagattaggacacagacacacacagagggaagaccaggtaaagacataggaaggagaagatagccatctataaaccaacaagagaggcttcagaagaaactaaccctgctagcaccttgatctgagacttctagcctccagaatcatgagaaaataaatttcygttgtttaagccacccagtctgtgatagttta

SEQ ID NO: 125547 - DNA, 585 bp, Homo sapiens
tgggatctctctttctctgatgatcattcttaataaactcctttattaggtgcatgaattaatgaaagataaaagataaacaggatgccgatcccctggtcctctcatcctactttccctgtctcagagtagttttgatcagagatgagactgttcatagttaagccttcctccaccccacaaactcctcatcacccaaattcccatccatgaagacagaaccaacttcttactagacccttacatgaaaacagaaccagcttcttactagaccctttcattcaagacagctatagtagaaatgctgggggtaaagttctgggggtggtcctttttgctttttggattttcttgatgacaaaaaagagttctaaccatgatttacccaaatattttgtcctacttaggggcaaagtttaatacattagaacattattctggtggattagtttggccagcatgaatctatcctttgaataatagtacactctgagccaaaactaattcrctttctaaaccagaaaaattagaatgtgcttaatatatatgtttccatggggataaaaactatctacagaagcctga

SEQ ID NO: 125548 - DNA, 635 bp, Homo sapiens
tgtgagctctttcaggtaggctcctgtgccctttctgcatgtccccatcttttgttgagcacttctttattttccagaattataagatattccagactcatcttgtattttccttgccccagccttggaatcaaccaccaaggtttgagcaataggtgtgcttgttgctattagggtactatttctctttcctgtttccttacttgtaatttctttcccaagctcaagaaactttgtcctcactgcctacaatatatttacttattttkttcaaccttagtataaacataaactggttttagaatttctaacccatacctccaagagaagcaactaatactataactagagtatagtattagttcacaattttctaagttcatgatacctttgtattaaatcacactatctggatggttattattataatgatgatttttggcttttgaggcaaggaaaacctttgcaaaaggtattcccatacacaaactggaaggtgcttcatcttctttattccattttctaagaactacatatgtttggaaggcaggatcagaaacactgtactcaatgcatagtttattgtacaggcataccttggagatactgaggttatattccagaccactgcaata

SEQ ID NO: 125549 - DNA, 633 bp, Homo sapiens
tctccccgtaataagctacctcagagaggttccacttcactctagcttagatgttgatcaagagtcatttgcttttgacactcttgaatttcatcttatgatgaaaggctttttctccatgaaaagaatttgagcccctgggaagctgaggagagaaagatttctgtaaagagctttccagaaccacagacattacctccaaggacaataagatcctgacttcatccccagtctccacctctccctgtcatgcacatggctctgcccacgcctgttcctcccaggcaccagtcaggctgtgycacccagaggctgctctctcttctgccccagggagatgaaaactgcagcccaccagagctgccagacttccctggcccctttcactttgatctcctcacagtcattgtgaatgcctgaggatatctgtgccctgagggcctgcagggcagtgctgagcaagggagtctcagccctgcctgttgaaagtgagatcacagaacatgggggatgagtagaatgtggtgtacccacaggtggagaacctcagggtctagcttgtcgttcatttattcaatcaacaaatctgatagggtgtctaaaatacagtaactaccttcaaatataaattcc

SEQ ID NO: 125550 - DNA, 568 bp, Homo sapiens
ttagtttagctaatgagtgaagaagcatttggcacattatcgggcaccaaaaggcagttcctttctgaatgatctctctccctcaagctcgtgctgtgcgtgtgtgtgtttgtactacgtgtgagtttgaaaccattgggtaaaaaattctcatgcgtgattcatctaaaaacataagaccctcatcagacgcttcttcgggctatttttcattctctgcctccacttaacaacacacgygcctcttcttcttttcagtattcttcccttgccctcactggccctacccctaacccacacccaccaccttctctgctcttctacatatttgcctcacaaaatgctacctccttcaggtcagccaatccaattcccccagtagggaactctttgtcttcaaaacatctttgtgacctccaaagcacaaaagcctgaggggccccctggcatcatggtacccatattgggccttgtggagagctgaaacactgtttcgtatacacttactgtcaaaactcctggtatgatttttgtttctctaaaaccactttattgtatgtgtatgtcc

SEQ ID NO: 125551 - DNA, 570 bp, Homo sapiens
ggcttgttagaacgaaaattaacaaacagaaagaaatatcatcaacatcaacaaaaaggacatccacacagaaaccccacccaaaggtcaccaacataaaaaaccaaaggtagataaatccacaaagatgaggaaaagccagggcaaaaaggctgaaaattccaaaaaccagaacacctcttctycttcaaaggatcacaactccttgccagcaaggaaacaaaactggatggagaatgagtttgatgaattgacagaagtaggcttcagatggtgggtaataacaagctcctctgagctaaaggaacatgttctaacccaatgcaaggaagataagaacgttgaaaaaagattagaggaattgctaactagaataaccagtttagagaagaacataaatgacctgatggagctgaaaaacacagcacgagaacttcgtgaagcatacacaagtatcaatagccaaactgatgaagtggaagaaaggatatcagagattgaagatccagttaatgaaataaagtgtatagtgaagattagagaaaaaagaatgaaaaggaatgaataaaa

SEQ ID NO: 125552 - DNA, 540 bp, Homo sapiens
gaacctctaaaattcttacaacattgcccactaaagagccagcttgaaccctctgcaaaccaagagagaaaaagacaccagccaagtaagaactgcctgtcccttacattttcttccccctrctctaatcagcccccttccccagtcagacagcagctagctagtggaagggaaggtaaatgtggagaaaacagcatgaaaagccattaggctcccatgcaccactgaaggcctggctggaaaaaggggagacggaaacctgtattggtttggtactgctgcataacaaattaccacaatcttagcagcttcagacaacatccacttaatatctcacagttctgcaggacagaagtcctgcatggctctactgggttctctgctaagagtctcacaaggctaaaatcaaggtgttggccagcaaagcttttatcttgaggatctggaaaggaattcacacccaagctcatttggttgtcggcagaattcaattccctgtggctctaggtctgagctctccatttgctggctgttggccag

SEQ ID NO: 125553 - DNA, 540 bp, Homo sapiens
gaacctctaaaattcttacaacattgcccactaaagagccagcttgaaccctctgcaaaccaagagagaaaaagacaccagccaagtaagaactgcctgtcccttacattttcttccccctgctctaatcagcccccttccccagtcagacagcagctagctagtggaagggaaggtaaatgtggagaaaacagcatgaaaagccattaggctcccatgcaccactgaaggcctggctggaaaaaggggagayggaaacctgtattggtttggtactgctgcataacaaattaccacaatcttagcagcttcagacaacatccacttaatatctcacagttctgcaggacagaagtcctgcatggctctactgggttctctgctaagagtctcacaaggctaaaatcaaggtgttggccagcaaagcttttatcttgaggatctggaaaggaattcacacccaagctcatttggttgtcggcagaattcaattccctgtggctctaggtctgagctctccatttgctggctgttggccag

SEQ ID NO: 125554 - DNA, 540 bp, Homo sapiens
gaacctctaaaattcttacaacattgcccactaaagagccagcttgaaccctctgcaaaccaagagagaaaaagacaccagccaagtaagaactgcctgtcccttacattttcttccccctgctctaatcagcccccttccccagtcagacagcagctagctagtggaagggaaggtaaatgtggagaaaacagcatgaaaagccattaggctcccatgcaccactgaaggcctggctggaaaaaggggagacggaaacctgtattggtttggtactgctgcataacaaattaccacaatcttagcagcttcagacaacatccacttaatatctcacagttctgcaggwcagaagtcctgcatggctctactgggttctctgctaagagtctcacaaggctaaaatcaaggtgttggccagcaaagcttttatcttgaggatctggaaaggaattcacacccaagctcatttggttgtcggcagaattcaattccctgtggctctaggtctgagctctccatttgctggctgttggccag

SEQ ID NO: 125555 - DNA, 540 bp, Homo sapiens
gaacctctaaaattcttacaacattgcccactaaagagccagcttgaaccctctgcaaaccaagagagaaaaagacaccagccaagtaagaactgcctgtcccttacattttcttccccctgctctaatcagcccccttccccagtcagacagcagctagctagtggaagggaaggtaaatgtggagaaaacagcatgaaaagccattaggctcccatgcaccactgaaggcctggctggaaaaaggggagacggaaacctgtattggtttggtactgctgcataacaaattaccacaatcttagcagcttcagacaacatccacttaatatctcacagttctgcaggacagaagtcctgcatrgctctactgggttctctgctaagagtctcacaaggctaaaatcaaggtgttggccagcaaagcttttatcttgaggatctggaaaggaattcacacccaagctcatttggttgtcggcagaattcaattccctgtggctctaggtctgagctctccatttgctggctgttggccag

SEQ ID NO: 125556 - DNA, 347 bp, Homo sapiens
gtctgagctctccatttgctggctgttggccagtcactactttcagttctttatggctctcgggtccttgcacatrgccccatccatcttcaaagccaacgatagctcatcaaatccttcccaggcttacaatctctctgacttcttctgctaccaaccagagaaaacgctctgcttttaaagggctcatgtgattagattggcccatctgaataatctcccttttgccatttaaagtaacctaatcacaagagggatagtttatcatattcacagatttcaccctcagtcaaaggaaaggcagttatacaaaagtgaagttcactggtggtcattcttagaattct

SEQ ID NO: 125557 - DNA, 576 bp, Homo sapiens
ctctgctaagagtctcacaaggctaaaatcaaggtgttggccagcaaagcttttatcttgaggatctggaaaggaattcacacccaagctcatttggttgtcggcagaattcaattccctgtggctctaggtctgagctctccatttgctggctgttggccagtcactactttcagttctttatggctctcgggtccttgcacatggccccatccatcttcaaagccaacgatagctcatcaaatccttcccaggcttacaatctctctgacttcttctgctaccaaccagagaaaacgctctgcttttaaagggctcaygtgattagattggcccatctgaataatctcccttttgccatttaaagtaacctaatcacaagagggatagtttatcatattcacagatttcaccctcagtcaaaggaaaggcagttatacaaaagtgaagttcactggtggtcattcttagaattctatcattccacaaacactgaataaggttggaagttttgattattccttagttttgaacattcaaatgactaaatcaaggatctttttgcaaaacaaagga

SEQ ID NO: 125558 - DNA, 614 bp, Homo sapiens
aacatattcataaaactatatgtataaaacaatgtatttattgatatgagatatttatccttagttctatatttaattgcttctatattttttatttcatgatacaatttgtatatttttgtgtatatacattttcagaagttatattttgttttagtaattccttttttattactttacttattttttgtagagatgggawttttctgtgttttccagactggtctcaaactcctggcctcaagtgatcctaccacctcaaccttccaaagtgctgggattataggtatgaaccaccatgccaggtccctgttttgtttttatgagctgtacttactaatttctttctaaaagcaatgatgaaattagtacaattttaatgtcttcattttcatctctttccattttgccactcaatttttttgtttaatacgttattttttattaatgttacttttagttttctatgtatatatttatatcactttgacttgatttattatccttgactaatacttacccttggtgataaaacatgaagaagtcagcttacattcattgcctctcatctcctctcttttcagctttatttattttgtcaggattataacatt

SEQ ID NO: 125559 - DNA, 614 bp, Homo sapiens
aacatattcataaaactatatgtataaaacaatgtatttattgatatgagatatttatccttagttctatatttaattgcttctatattttttatttcatgatacaatttgtatatttttgtgtatatacattttcagaagttatattttgttttagtaattccttttttattactttacttattttttgtagagatgggatttttctgtgttttccagactggtctcaaactcctggcctcaagtgatcctaccacctcaaccttccaaastgctgggattataggtatgaaccaccatgccaggtccctgttttgtttttatgagctgtacttactaatttctttctaaaagcaatgatgaaattagtacaattttaatgtcttcattttcatctctttccattttgccactcaatttttttgtttaatacgttattttttattaatgttacttttagttttctatgtatatatttatatcactttgacttgatttattatccttgactaatacttacccttggtgataaaacatgaagaagtcagcttacattcattgcctctcatctcctctcttttcagctttatttattttgtcaggattataacatt

SEQ ID NO: 125560 - DNA, 560 bp, Homo sapiens
taacattataaacatcaactgggatacacatcatattgaataagtctttgggcacatttgaaattatttccacagaataaattcttagaagtggagttgctgcatcaaaagttgtgtacattttaagtttttaaaatattttgggccaaatcgccttccagaaaggttttaccaatgtttgctcccaccagtatccttatcagaaacagacttttaaaattcccattcttttttgtctttgctgagtagacagatgagaatggtactgtactgtgtcagagaaatcttcatcatctgggtcaaaaggatggtgtgatctgagcaggtagaaagtggagaggaccagggatatggcataagatatcaagatttatccaaatgtcatgagattcccattagtcagaaaacatacactgagcactcactgcaacctagaaaaccaactagaaatctccctctgcctatgggaatttcactgtgcagtaggsggcaaagggaggtctgccatggcaacagataacaacataatacagtgtggaaggtgtaaggagacatgccct

SEQ ID NO: 125561 - DNA, 580 bp, Homo sapiens
ttaaatattggctgtgaattctaacagtagacctatgcaccatggaatactatgcagccacaacaaaagttaaatattggctgtgaattctaacggtagacctgattctatgcatgaaaagttgcttgggttttagacagttattttcagacataccaagcttaatttagaaaactctatcttctactgctataaatggccctggcagcctaagaaatttcagctccttccaaaggtgaacatttctcatctccttgttagttaactcagcgtgtttatatagtatgaatacagttaggcataacmaattggctcaggcccatagtttacccagctgatcttgtccctggcatgacgttactaggatccacaggggtccgtgttctaatggaagtcaggtccaagcacaagtttaaacaaaatatttgagatccaggacagatgcacagaatgatggtgctacattttcattctctgtatttagcaggtatatgcaaactacccacctggctgggtggtgcccaggtacgctgggtcattccctagtattgctgattggaaagcttttgggatccaatga

SEQ ID NO: 125562 - DNA, 580 bp, Homo sapiens
ttaaatattggctgtgaattctaacagtagacctatgcaccatggaatactatgcagccacaacaaaagttaaatattggctgtgaattctaacggtagacctgattctatgcatgaaaagttgcttgggttttagacagttattttcagacataccaagcttaatttagaaaactctatcttctactgctataaatggccctggcagcctaagaaatttcagctccttccaaaggtgaacatttctcatctccttgttagttaactcagcgtgtttatatagtatgaatacagttaggcataacaaattggctcaggcccatagtttacccagctgatcttgtccctggcatgacgttactaggatccacaggggtccrtgttctaatggaagtcaggtccaagcacaagtttaaacaaaatatttgagatccaggacagatgcacagaatgatggtgctacattttcattctctgtatttagcaggtatatgcaaactacccacctggctgggtggtgcccaggtacgctgggtcattccctagtattgctgattggaaagcttttgggatccaatga

SEQ ID NO: 125563 - DNA, 509 bp, Homo sapiens
aatggctcacgactgtaatcccagcacttttgggaggccgaggcaggcagatcacgaggtcaggagatcgagaccatcctggcgaacacggtgagaccctgtctctactaaaaatacaaaaaattagccgggcatggtggcgggtgcctgtagtcccagctactcgggaggctgaggcaggagaatggcgtgaacccgggaggcggagcttgcagtgagccgagatcgcgccactgcgctccagcctgggcaacagtgtgagactccgtctcaaaaaaaaaaaaaaagaaaaggatattatttcttgtagttatgaaagctgagaagtcccaggtcgaggggccgcatctgacaagggccttcctgctggggggcctctgtgaagagtcccaagatagcacagggtattacatggtgggagggccaatgaggtctctcaggtctctcttccccttcttataaagccaccwgttctactcccatcataacccattaattcaccaattcac

SEQ ID NO: 125564 - DNA, 647 bp, Homo sapiens
ctcaaccagcaccttaaagattgattctgtcttttaaatttgtgtttaaaataacaaatatttttgtctcattagtctgaaaatcttgacaactttagctattttcctcttcacatttcatccatgttctattcatagcacctagtgagctgaagagagagaaagagagagagagttcagagctaagtatgtgccacagaatatctcaagccaatgtctkcatctagcaagagaacttaaataaattatttatacagttaaatttccactcttattaaaacaattactgctgaatatgtaagaggctatatttggaataaggttattaataaatccacctgttcgaatttcactggtgctattcactccaagaaatgtttttccaatactttgatacaaaaatatttagttaaagaagtttattttatttaaaataatttaaaatttcagaaataaaaaggtaaatagaagaacaattttttaaattatttgttatttttctggctaaaaaaatttagtcattttttaaattttgctctctgtgaaacactctaggccacatttttaaagtgatgtgtcatcacttctaagagtaaattcagcaattttggtagcttctttagttgtttctctgtacacaaatgcac

SEQ ID NO: 125565 - DNA, 594 bp, Homo sapiens
caacttctggtggtgtttgctataaagcaactcataatcacttgactgggagcagcacattaaaagtcacctcattttatctccaatatgcttcctttgaaaaaagtcaccttgcagccacttttgcagaacaatttgttagtgtatttaccttctcctcgtcattcaggcttagcttagcagtcagaaggagagcattacttttcagcctgtttctaaaagctcataaaagctgtccacaactgcttttgcttcctktaccagcaaatgcctccctttactactcagctgccagtgttttctttggtgctctatggggctgccctgcttgttaatgatggcaacaaataattgccaataacacgccccttttcaggaaacctgagctatagtcagtaaaaatgtacaaagcagatatgcagcctgatgtggggagagcagacattaaatgaagtgggatggtggcttgattcacttcacaaaatattcttccatgtacgtggcaggcttcctttgtgccctttcaaatctgactcaacttacaaaattaaacacaagtcaccttttcctctatcaaagtagagataacatata

SEQ ID NO: 125566 - DNA, 545 bp, Homo sapiens
cattaaatgaagtgggatggtggcttgattcacttcacaaaatattcttccatgtacgtggcaggcttcctttgtgccctttcaaatctgactcaacttacaaaattaaacacaagtcaccttttcctctatcaaagtagagataacatatagatttcacgaatctaacatcaggctttgcctgtggaagaacaattaatgtcaacataggtgaygtacccatttgaccatattgggtatcctgagccttcagcatcctggtctcaaatatatatataatgtatgtgtatatatacatacacatggagaaaaacgcaagtaagttcactgtgtatgttcaccatgtgcactgtggctgcctctgagctgcatgggtgaagtacatggcccgtgaggactcttactggagctgagcaccctcagaccaaggcagctggaccacaagggaaaggccgccaacccctggacctttacttcagatctctcctggaatatatgtatatatacatatatacacatacagtacataacagagatgagatata

SEQ ID NO: 125567 - DNA, 613 bp, Homo sapiens
ctctctctctctctctctctctctctctctctctctctgtctgtctctgaacacacaggcaccaaggaaaggctctgtaaacacatatgaccactagaaggtggccatttgcaagccaggaagagagccctcaccagaaatcaaccatgctggcaccttgagtttggactcccagcctagagaactgtgaggaaataaatttctgctgtttaaaccatcagtctatcatattttattayggcagcccgagctgactaagacacagtttttttccatacataatactaatgttaaaaataaccaaaataattatacataagagaaaaataaaggttcagcaagataatgagtaaaacacttagcacacacaataagtactcaataaatgtcattgtttatggcttgacaaggggatttggcttaggaagtggaacagatatgttttggatctaggcactctagattcctaatgtcatgcagagagataaaatagtaaataagtaaatagtctgaaaactataaagaattagcacacaagagataatgtcaatgtgagggagaggaagaaaactagaaggtcaatgatgactaccaaattaaaaaatccccagtg

SEQ ID NO: 125568 - DNA, 643 bp, Homo sapiens
cttctataataacatgtctgttggatttcattcattcccaaatactgaagacagtctgcaaaaaattttctgggaaattgtaaaatacagatgaataagcccacagagggtgagccgaaatttctctatttataagatctctgaatgaatctaataaagagtggtatctgcaaatcagaggactaatgctcatgctgtaagattcttccacctgttacatcaagaacactaacatttcttattgtgatgtagaaacagggtgatggccttctgaaagccagcacgtaatgacagcatgaaatattttacttgttaattttttgtttgtctrtttttcagatgtttttgaccttcgtggagaagaagtttggtggtggggcaggagcagaagttagaactcgggatttctttgttcaccttggctgcgaagccacccatatatgaccagtgttgaaactcattgcaccaggccaaccaattagtctgtattggccccataaactttgagctgacaagtatcaagtgaaaggttcttgagaataagactgaaaaatccttcttacttccccctacaaaaaaaattctccagccccagaatgttattccttcccaagaaacacaaattaactagctgcactaatga

SEQ ID NO: 125569 - DNA, 644 bp, Homo sapiens
ttgctcctactctcgaagagtttatatctggatagatgtgaataagtgatttataacattgtatgatgaaggcaatgataacaaatgcagaagctgccaaattaacgcagaaatatgggtaatgagttttggtaggccagagggagaggacttcaggggatgctttatgtagaggaggtgacaccacttacaagaagttcaggatgagtaggagttcaccagtcgacacgcattttagacgaagaaaccagttccaaaaatcagacacaaaaagcagcatagtaacttttggaactgtaagtgatttggcatttctgatgcctaaattggaaggtgtgtggcaggagatgagcctggggaagtgaatggaggctggattacaaaraatcttgtgtgtttttgaagtttaaagggcgagagggggtgagaactcttcgagggaaaatttcttaacatatgggatttagaggatagtaggaggggattttgtggggtgagagaaatattctagataaagcaacaaaaaagtaccacattgagtggcccagcttgactacaacagagggaggaatttagtaatacatagagaaacataaaatgagttcagattatgattaaaatcaggcaagtacatttattttaaa

SEQ ID NO: 125570 - DNA, 400 bp, Homo sapiens
tttttaaaaacttctcctctattagttctttaaagtttgaaatatcctaggctagaaaattacttattctaaagacttaagttcttgtcttaaagacagtacagtagtccctccttatccacggggaatacattccaagacccccagtgaatgccagaaactatggataggaccaaaccctatatgtcaatatttattcctatatatacatacctatgatcaagtttaatttataaactaggcacagtaagagattagtaataactagtaataaaatagaacaattataacaatatactgtaataaaagttatatgaatgttgtcyctctctcaaaatattgcagtatctttggactacagttgaccacaggtaactgaaacctcagcaagtggaatagc

SEQ ID NO: 125571 - DNA, 561 bp, Homo sapiens
ggtgaacctcctctgaaaagctcccttggtccaacaggcctaagttaaaggctcctcttggatgctccctgagcaacctgcttaccgctaatcaaaacacatatcacagtacattgtagttgctggggtagccctccccactcctatctcacagtaacctctaacatcctaaaggcagggaggatgtcttagtcactgtcaaattcctaacccagcaaagtgctttcaacagagcaatggattcataaatacacttttaataaatgcaattaaaaaaaaagagttcttcatctggaaagaagatartgaataaaagcttagtgctttttttaaaaaaagcttatttaatgcttctggatccttactgagcaattcagtttttccaaatgtttaaaaaattgtgacaagttatttattcctatattttaatttcaaaaaattttatcctatcactgtctataaaaggaggctaaattatttgcaatgaaatttactttgcaatagataaatggtattatattaattcttccatttaattgaacctggaaccatctgattgga

SEQ ID NO: 125572 - DNA, 561 bp, Homo sapiens
ggtgaacctcctctgaaaagctcccttggtccaacaggcctaagttaaaggctcctcttggatgctccctgagcaacctgcttaccgctaatcaaaacacatatcacagtacattgtagttgctggggtagccctccccactcctatctcacagtaacctctaacatcctaaaggcagggaggatgtcttagtcactgtcaaattcctaacccagcaaagtgctttcaacagagcaatggattcataaatacacttttaataaatgcaattaaaaaaaaagagttcttcatctggaaagaagatagtgaataaaagcttagtgcttttttwaaaaaaagcttatttaatgcttctggatccttactgagcaattcagtttttccaaatgtttaaaaaattgtgacaagttatttattcctatattttaatttcaaaaaattttatcctatcactgtctataaaaggaggctaaattatttgcaatgaaatttactttgcaatagataaatggtattatattaattcttccatttaattgaacctggaaccatctgattgga

SEQ ID NO: 125573 - DNA, 492 bp, Homo sapiens
tggggcttatgtgaaaaaacaaatatcctcaaatacaaactagagagaatagatctgtctgtgaaactgctttgtgatgcatggattcatctcatagagttaaacctctcttttgattcagcaggttgggaagactctttttggagaatctgcaaagggacatttgggaacccattgaggcctatagggaaaaacccaatatccccagataaatacgggaaagaagatgtctgtggaactactttgtgatgtctggcttcatcacacagagttaaaccattttttttaattcagcactttggaaacagtctttttgtagagtttgcaaaaggacattttggagcccattgagtycaacgaggaaaaaccaaatatccacaaatgaaaactagaaagaagctatctgtgaaactgctttgtgatgtgtggatttatctctttgattctgcagtttggaaacactttctttatagaatctgtgaagggacgttt

SEQ ID NO: 125574 - DNA, 525 bp, Homo sapiens
agaggtgaggtcagcacatctggtttctgccctcagacttctttacagatgagggaaaggtgcgctcttcaaaaggacagtcaagcaggtcccaagasaccccaagagatctcagctgtcccctacctgggggatgtcaggcttcttcagcatcaagctggcagaggctccaaggcctggtgtggaagggcagagcagttttcccatgtgatggggaacttgtttcagaggtgtcaagagatccacactaagcctggtgctataaactccagctggttcccaactgaagtttcggggggaaggggaaggagggtgatttctaggataggggaaatatgccattggttgaatataggattttacttatctcgatatgtcttggaaaatttccttaggtttcgggagactcagaaccctccagagtttcaatttcagaggctaagtctttgagggtcccatcaagaaatataaacagtacagcctgctggtgataaaaacaatggtggtagtgaggagaggaggata

SEQ ID NO: 125575 - DNA, 473 bp, Homo sapiens
tttacataactgcacatgtctgttcttacagagaacagaacgacaaaaaatggaacagaagaaaatcccttactaaatgtcaagaattggacttacctgtcaaaacgagcttggctgcagaggtgaaagcagaatccgggacgtactcggccagctcaccctttccactgctcaaggtttgtttatgatgtctgtactctagcatagttggtcatattgttgtgagcagtgaagagttttactttctgcctacataggaaagagtggttaattctaagactcgtgtgtattatcaataactatgatatatccactaatccactaagtagtgaatgctttccactatgtagttaaagccatacctacatgtggtgactattcatgaatgacacaataagaatcagcaatttgactgcacactcctatttgtcaacctactaaaaggyaatgtaacatccacctgccacttacca

SEQ ID NO: 125576 - DNA, 569 bp, Homo sapiens
ttagctgtcactcataaatgagaacatatagtatttggttttccattcccgaattacttcacttagaataatggcctccagcatcatccgacttgctgcaaaagacattatttcattccttttcatgtctaagtagtattccttttttatacataccacattttctttatccactcattggtcagtgggcagttaggttgactccgttatctttacaattgtgaattgcgctgctataaacgtgtgtgtgcctgtgtctttttcatataatgacttctttttctttggatagataccctgyagtgggattgttggagtgaatggtagatctacttttaaggaatcgccacactgtttcccttagaggttgtactaatttacattcccattagcagtgtaaaagtgtttccttttcgccacatccacgcccacatctatcgttttttgactttttaactatggccattctttcaggagtaaggtgatatctcattgtggttttgatttgcacttccctgatgattagtgatgttgagcattttttcatgtttgttagtcatttttctata

SEQ ID NO: 125577 - DNA, 569 bp, Homo sapiens
ttagctgtcactcataaatgagaacatatagtatttggttttccattcccgaattacttcacttagaataatggcctccagcatcatccgacttgctgcaaaagacattatttcattccttttcatgtctaagtagtattccttttttatacataccacattttctttatccactcattggtcagtgggcagttaggttgactccgttatctttacaattgtgaattgcgctgctataaacgtgtgtgtgcctgtgtctttttcatataatgacttctttttctttggatagataccctgtagtgggattgttggagtgaatggtagatctacttttaaggaatcrccacactgtttcccttagaggttgtactaatttacattcccattagcagtgtaaaagtgtttccttttcgccacatccacgcccacatctatcgttttttgactttttaactatggccattctttcaggagtaaggtgatatctcattgtggttttgatttgcacttccctgatgattagtgatgttgagcattttttcatgtttgttagtcatttttctata

SEQ ID NO: 125578 - DNA, 569 bp, Homo sapiens
ttagctgtcactcataaatgagaacatatagtatttggttttccattcccgaattacttcacttagaataatggcctccagcatcatccgacttgctgcaaaagacattatttcattccttttcatgtctaagtagtattccttttttatacataccacattttctttatccactcattggtcagtgggcagttaggttgactccgttatctttacaattgtgaattgcgctgctataaacgtgtgtgtgcctgtgtctttttcatataatgacttctttttctttggatagataccctgtagtgggattgttggagtgaatggtagatctacttttaaggaatcgccacactgtttcccttagaggttgtactaatttacattcccattagcagtgtaaaagtgtttccttttcgccacatccacgccmacatctatcgttttttgactttttaactatggccattctttcaggagtaaggtgatatctcattgtggttttgatttgcacttccctgatgattagtgatgttgagcattttttcatgtttgttagtcatttttctata

SEQ ID NO: 125579 - DNA, 546 bp, Homo sapiens
gttggtcaggctggagagcagtggcccaatcattgcactgcagcctcgaactcctcagctcaagtgatcctcttgccctcagccccccaagtagctcggactacaggtatgcaccactatacttggctaatttttaattttttttgtagagacagggttttgctatgttgctcaggctggtctcaaactcctagcctcaagtgatccttccacttcagcctcccaaagtgctgggattatagagacgagctactgtgccaggccaacataggctaggtgaggagagaaaaaaggcacaaactggtcatcttagamattgagtgaatgaactgaaaaaatacagttgaattgccaggaggctctaagggcccatttgagatgcgtgatcatcaatgtaaaacttgatcagtttctttttatggaacatacttaccctatttttctgccttttatgaaggattatcatatcgtcattgcctctgggaagcactggatatttctgcctccatcccctcctcccattcatgcttctcagtttctttcccc

SEQ ID NO: 125580 - DNA, 565 bp, Homo sapiens
ttgtcacgttcctgtcttcaaagggaatgatctaacttcttgccatttggggtgattgttgtaagttttcattagattctgcttatcaggttaagaaagttcattttaatttttatttgctaagagttctttaaaattgtgaattatttttgaataataaaaaataaattttccccatccattgaaatattcatttcttttcttttgctaaagtagtcggattatactaattaggttttctggtgtgaacccatctgaaattggactcaatgcattatttattttatacgttgctggttcaatttaatcataattgatgtagktacttttaaatttatgttttaaaataaatctggcttatttttctcacagtacttgagtatgtttttggaatcaatgttatataagcatcataaaacaagttggaggctgggcgctgtggctcacacccgtaatcccagcactttgggaggctgaggcagaaggaccacttgaaggcaaaagtttgaggctgcagtgagctatgatagcaacactacactccaggctgggtaacagagcaaga

SEQ ID NO: 125581 - DNA, 556 bp, Homo sapiens
gcagctgttaaactgagcaaaggcaagcttggggagtcacaatctatgcataaatgatagggatatctgtgcagaaggtgcgaaagaagatttttagccccctccctcccccaaatctcccccttcccaaatgaaatgcacagttcagccagcttcttaactacactacactcctgctactggctgccaagaggctcaaaaaatccaccttcacttttcagtcagaagaggcagaagtggatgtgagagaaagagagacacagagagacagagagccaaagagggcaagagacttgactttaagagactcctgtactgacaactccatgcagttcggaaccagaacgactacggctgaaccagggttcatggggacatggcaaaacgctgatactaacctcttattcagaatgtcccaacaggtaagttactttctttcttgattttttttttcttttttttaagaaaccttgaattgttatgggcacttttgtttctggtgtttttctttctaaataytttttaaaatgtggtcacttcctagttaggctcttgt

SEQ ID NO: 125582 - DNA, 592 bp, Homo sapiens
cccctgtccttggacaacaactccaagctcccctacctgtgtactctagggcttaaaccagaagccaccaggttctcaggactttggtctgggactgagagttacattatcagcttctctggttctgtggggagcttcagactttgagtgagccacactaccagcatcccagggtctccagcttacagatggcatgtggcatgggaggggcttttcagacttcataactgcatgagctaatccctctaatgatgtatttgaaggattagctcgtgcagttacgaagtctgaaaagctttttaacttaaaaagatttgagggatcacaataaatgataaaatgtaattccactgattttgtctcactggaaaacacctgagtaatggaaaacacctgagtmatacagtgaccaaagcagacagtgaagtttctattattatatccatttatagaaaaaaaagacagaagtgcagggagctattgaattgtggagccactgtctgaatccagaaaatctgactgaatcgtcaggtcttacatgctccctgggaatattttggccataaaaaccagatgtgatttctagactgat

SEQ ID NO: 125583 - DNA, 618 bp, Homo sapiens
cataaacaacccttacaactcaataagatgacaaacaagccactgaaaatataaccaaaagatttaaacagatgctttagtacagaaaagatatgattggacaataagcccataaaaagacactcaacatcattagtcatcagggaaatgcaatgcattatctctaccacttaactagaatacctaaaactaaaaagcctgaaaattccaagtgttgacaaggatgcagaacaactggaaatctcataagttgctggtgggaaatcaaaatggaagaaccactttggaaaacagtttggcaatctagtggttaattttatgaattaaattggcagagccacagtgcccagatacttggtcaaatatyattctatatgtttttgtgaaagagagagagagagatagagagagatagagagaaataaagttggtttcttcatttgcagatgaaggtttttttttgaggagattaacatttaaatggtagactttgagtaaagcagattgcccactataatataagtgggcttcatacaatcagttgaaggcattacgagaacagactgactaccgcctgaacaagaaggaattctcccagcagactgcctttgaatttga

SEQ ID NO: 125584 - DNA, 540 bp, Homo sapiens
acttcacatacttttttgactttagagtctttgtcatgattaggccacttttgtcatgttcatttctatctaacttttttgagatatagtacttcttgagtttctgtatgatgctaccaccacaaactttattccaaaccctgtgtgctcattcacttaatgtaagaacgtttgttttatcctttcttcctaaaggagtatatttatgatctctgcaacccagcacttctgtatgtcttgtgtaaagacatccaagacaagcaattgtaaagctcctycccaggaatatttacttcaattggtgttaaaatcatggcctcctttactctgtattcattcagtcatttatcttctttcaattgcatagccttcagaagtatccctatcttgtgttgattgagtttatttccggctatcttctccaaatagttcttaagtaacctctgaaacacacaactccttttcatgaaatctgcagtcttaccaggtaatatgttttttcatggtttctctctttaaaatcagttgccgtcacatcca

SEQ ID NO: 125585 - DNA, 217 bp, Homo sapiens
  misc_feature (1)...(217): n = A,T,C or G
nnnnnnnnnnnnnnnnnnnnnnnnnnnnnntcccaagcaccttaaactctacctgtctccatctgagcccactacttcctcctaacaacttgattcttgactaggattctcaktgaggggcctcactgtccacccacatgcacaagcaggaaactaggcatcctccctggatccccagctttctcactatcccttcacccaacccaccagctaggcc

SEQ ID NO: 125586 - DNA, 217 bp, Homo sapiens
  misc_feature (1)...(217): n = A,T,C or G
nnnnnnnnnnnnnnnnnnnnnnnnnnnnnntcccaagcaccttaaactctacctgtctccatctgagcccactacttcctcctaacaacttgattcttgactaggattctcattgrggggcctcactgtccacccacatgcacaagcaggaaactaggcatcctccctggatccccagctttctcactatcccttcacccaacccaccagctaggcc

SEQ ID NO: 125587 - DNA, 560 bp, Homo sapiens
tgcataaatcttccctgatacttaattaaaccaaacttcttttgatttccccttttttctgcctcatcgagtgtggccagcatgcctattagatgttcatcctccccaagtggcctggggctggacaggatcctccaagggcctccacacacgctggtcactccagctaccagctgggagcttggggaagccaggtgacccccacctgccgtcggcagactctctgtgtgtggctttggggagaggctccctgcagcctctggggagtagaggagacctgggaagayactggctgcatcccctcaacagatgccccctccagacctgaaagatggaggctttgaagagtagcaaagcgaagctgtgacctcccatcctccctgcttctcagacagggaagacctgtgagtccccaagcctcaggagtggctgagtcccacagagaagctggctttggctgtgtccccctcaatcccctctccatttcccaccctggcaccctggcccggggactccactgcgaacccagccagcgctgggcgtctccctgaacagcaaga

SEQ ID NO: 125588 - DNA, 540 bp, Homo sapiens
  misc_feature (1)...(540): n = A,T,C or G
nnnnnnnnnnnnnnnnnnnnnnnnnnnnnnnnnnnnnnnnnnnnnaaaagtcaaggcacactatgtactgcataagaatacataataataacactaaggtaacagccacaacactcacgctactgccagtcactgttaaatacattacaaacattagctaatttaatcctcaacacaattctatgaggaaagtcctgctattaatcctcacttttgagacaagacaactgaggcactaagaggtaaagtaacttaaccaaggtcaccatcaarctatagggcctctctctataaataggtatttgcagatttgtgggaaaaggattggagggatacagaccaaactgttaacgataattacctctgggaaagggaaggtgacagtgctttattgcttgaatcttttacagtgagagtgtatttatacagtataatacttgcactattaaaacaaaacaatactttacaaagacatgaatgaatgaatgacagaagtgagctgacagattccctggatgtctgcctacttcaagaaccaga

SEQ ID NO: 125589 - DNA, 387 bp, Homo sapiens
tattcaactgtttttttttaacaaggatgcaaaatcagtttaaaggaaggatatctttttcaacaaatggtgctacagcaattggacattcacaggtacaaaaactaagactgacctaaatttatactttatataaaatttagctcacataaatcacaggcttaaatgtaaaatgtaatattataaaacttaaagttgtgtatggtagctcgtgcctgtaatcccagctactactcaagtggctgaggtggaagcatcacttcaatccagcagttagtggctgcagtgagcaatgatggcaccactgcactacagyttgggcgaaacctcgtctcaaaaataattaataaataaataaattcactaaactttttaaaatagaagaaa

SEQ ID NO: 125590 - DNA, 611 bp, Homo sapiens
aaattgagttgggaagcacactgaggctcaagaaaagggaagctccaggttaagatgcaagagaagaagggaaaaggcagttttctgcaagttcaagcacaaataatttctttaccttctagttctggaaataccaggtgctgtgtatgtaaagcaggaattttggttgaatattatataattttctgacccactgttactaatccagtttcccctgtactyagatcttccatactacagacagacctgacagatgctcagcaaatagtagctaatattttctaggaaactatgtgctaaacgagttttcttaaatttctacctccaggtctgtaagttgatttgaagcattaccagtttctggttctgcacaggttgttgagcgcaggacttctctcctccagtggaaagtccacctgctcacaatcaaccatcctttcctgcagccttggagacactactcagtgtagcacgcctcccagtctagaataggcacactcatcatcagtctctctcattttctgtcttatctccattccatctacatacagtttttgttttcgccaatgtttttaaataaacaattgtacaagcacgacgacaacagaaac

SEQ ID NO: 125591 - DNA, 584 bp, Homo sapiens
aattctacagaaagtattccaaaaaatcaaagtgggactccttcctaattaattttatcatataatatcagtctcatcttgatatattaatcaggtaaagacacaacaaaaagaattacaggccaatatgcctgatgaatacagacacaaaaattattcatgaaatgcttgcaaactgactcaggaaatcaaagttatttcactgcaactatgtggacattattctgtgaatgcaggaatgttttaacatgtgaaatctataaatgtgattcaacatataraaataattaaaaaacaaaaccacattacctcaatagatgtggaaatagcaattaataaaatgtaatatctatttatgaaaaaaattctcaaaaaactaggcattgaaggaacatacctcaaaataataacagccatatgagacaaatcctcagccaacatcatactgaacaggtgaaagactaatgcatccttcctaaaaaattgaaagaagaaaagaatgtgcactttcaccactcctattcaacatagttctgaaagttttagccagaacaatcaggcaagataaaaaaagaaaaagcact

SEQ ID NO: 125592 - DNA, 541 bp, Homo sapiens
gtagttttagaaatgaattaaaagttgagcagctagctttgatggttcaggtgagagccttccaataaagaggaaaacctagaagtgataataagtaccatctacttagtgctttctgtgtcctaggcatggtgctaagcgctttaactcattgrcccctcaaaagaacactgaaggtaggcgtctgatctccctgtcataggtaaggactctgaggcccagaggtgtgaaagtcttgcctagaagcatatagctagtaaggactgagatgggatttgaacacagctctgcatgattttaagggaactcagagccatttggttctcttagtccattactctggagtctgtatccaataccataaaaatttcaagatctgtgctttaaaccagggagtatttaataggaacttctacatccagcatcagcctagacagaaggtgggtggatttgagtgggagaatcagactttccatgtccttacttaaacaagactaatccacatttataaatcaacatgagatagtatataattaacccc

SEQ ID NO: 125593 - DNA, 545 bp, Homo sapiens
ttgttgatgtggttgttggctggactccatttcttgagagatattgaactgagggcctcagttccttcaaagctgttggtccaaggctaccctcagttccttgccacatgggcttctccaacaaggccatttacattaacaaagccaatgagaaagagagttaccgggcatggtcgctcacaccycttaatcccagcactttgggagcccgaggcgggtggatcacttgaggttaggagttcgagaccagcctggccaatatgctgaaaccccgtatctactaaaaatacaaaaaaattagcctggcatggtggtgggcacctgtaatcccagctactcaggaagctgaagcaggagaatcacttgaacttgggagtcgtaggttgcagtgagccaagatcgagccattccactccagcctgtgcaacaagagcgagattccatctcaaaaaaaaaaaaaaaaaaaaaaaaaagagagagagagagaaagtctataagcaagaggcacatcacaatcctgtgtaacctaatcatggaagggatat

SEQ ID NO: 125594 - DNA, 598 bp, Homo sapiens
tgaatgaaatgagagaaggagctctgtaggcaatggctaggagtttgaatttcattctgagtgtggttagaagccaatggatggttcagggaagtagagtgcatcatctgagatatcttgctgtaattaatctgttcaactttcgttagcccagtatctccaaacatacctgaccataggacatctacctaaaaacatcttgcaacgtagtctgggaaattcttcactggagcacaaggcttcatagattttaaagggactgcaaatttgctcttgttcatctagatctgcactaaaaatccaaacatactgcttgggacaaaataggcatgcccaggaaggaaaacctagctctagaggtagagacaagcaggatgtcatcctaattagcagctctttttggcaaagacaatcaatgagcacagccaggcctcagcagattctggaagcccatttgatgccaacggaaactcgccaatatctacccaaggctaataagtgtttgcaaacagtacaccttggcttaartattctccaaaaaggaagtacataaaacttgagatccagccagaggttctgggagaaaaacagaggtcaa

SEQ ID NO: 125595 - DNA, 612 bp, Homo sapiens
taactctgaagacattctgacatgtgaataacagcataatctaacttataggggtttcctgagaagaaaatgaattccttagcccaacacatgacattaagtaagtgcttaataagtatgagctatgatgatgatgacaattatgtttattattactaccatacttgaaatttaagcaagactgcatagagaaggcctttttagatttccaaaaccttcccttctccacctcccaactgcaacatactgcaatcagaggagtaaaagaatagaaataatgtctgaggtagaagtaattgtatctatatctcttcataaaaagtagatatcaaattcaagaagtcagttctacctgtgcaaacagttgttatgtgctgaatcattttacatgtaacartatgttccagtaaagtcttagaccactttatggtttttaacaaaaatgtgacagaaagtgtcctcactccgtactgattccatatgtttgtgtgaacttgtagtctgggaaggagtgtggagaatggctcggggaacagtggcctccacctacaagaagataaacaggtctttgggattgaagaacttaaccctccttaattctagaagaaatag

SEQ ID NO: 125596 - DNA, 430 bp, Homo sapiens
agaattcattgagtaaaaatgattcaggatggtatttgtattagacaaaactccatgttgctagtacagaaaactcaactcaagctggcattaacaataacagacttagataatgtgcccactcaaaaaggaaaactggaaccagggtaacattatgtactgaccagctcaggcgtggatgatatacccatctgtgtaccacaaactgtgggaggggcaaaatggataacttgaactgcagtttgggcaattactgaagccaaggatggggacaattccaccaaaattgaatggctgtccctttacctggagagggagaaaatggmaaaacagaagcacaagaagatgagggaaaataaatcagagtcaaataattggaatccttacttcctctctcagtaaaagattgacacacaaataaaacttaaaa

SEQ ID NO: 125597 - DNA, 546 bp, Homo sapiens
tctacgttgtttgactataggtcataggtccccattccagagagggctttgccccatatccaggaggaaggaacacatgctcaggaggccaagaagaatccagacaagctttgctgggtctccccattcagtctgctagcattaggtcatgccttttttggcccaatcatatttctacactactatctatggttctgtctcatgaacttaagcataaaaataaacaattccctttatatctttggatcttcattctgaggatatctacactacatgaaactatgatcaaataaatttgtatgccttttcgcctattaatctgcctcgtgtcagtgagtttcagcaaacctttagagagtgaaggggaagtttttctttggacacaacaccttccagagcccacattctagagtagatasataaacagatatatccattccccccgaggctacccatacaaaaatacagcaagtgaggaggaaaggggagaatcagggaaggtctctttgagaaagtagttttatagcagagaccctaaggaagtga

SEQ ID NO: 125598 - DNA, 553 bp, Homo sapiens
taagcttttacctctggctggtcttcaggctctgtgcaagcagcaaatgaaggctaaggtaaaattgtaaattgcctggctaagtgttgaagccatatccaaacactgagtcaacctacaaagatctgaagagtatttttttcttttctttttttcctttggataccataatattcaaaatamccagttttcaacaaaacaaaatatgaaacatgcaaagaaacaagaaactcattctcattctcacaataaaaaaaattaacagaaactgtccatgctacagcacaaacactggacttatcaaagactttaaatcaactgtcttaaatatgtccaaagagcaaaaagaaaccagtgcaaataactaagaaaaaggagaaacacaatgtctcaacacataaatagtttaaaaatatattatcataaggatccaaacaaaaacactagatctgaaaagtacaataactgaaataaaaaaatcactacagggtttttaacagcagatctgagcagagagagaaaagaatcagcaaacttgaagatatgtcaaatg

SEQ ID NO: 125599 - DNA, 554 bp, Homo sapiens
tatcttgagaggcaggcgcggttatttccggggacggtggccaaagtaccctcacacccagaggcgatgacagtcctgaggcctgcaaggcggggcagcagcggcgctgtggttaccacggtgaagcctccagctcctcccacagcttctgtgccccaaaacactggagcggcccagacccgcccagagtcgcctaagccgggccgtcaygacgcatgcgcttgctctgcacctcttgtatgcgcaggctcagtctgaggcggtggcctcagagtttgacgcaccggggagccgagcagggaagttttggtgcagttttgagcgtccgtgtataaggagtggctccgtagtcaccgcccccttgaggatgggaatagaaagggctgtcaggtcagcttgaaaggagagaggggaatccgataaccttttagttagcgaatgctatacagcagtccagctaataagggaggtttctatttgggggcctgaatggccctgattgcacttacaagctctaacttatggagataatctgaccgttgtacaaaatggat

SEQ ID NO: 125600 - DNA, 554 bp, Homo sapiens
tatcttgagaggcaggcgcggttatttccggggacggtggccaaagtaccctcacacccagaggcgatgacagtcctgaggcctgcaaggcggggcagcagcggcgctgtggttaccacggtgaagcctccagctcctcccacagcttctgtgccccaaaacactggagcggcccagacccgcccagagtcgcctaagccgggccgtcacgacgcatgcgcttgctctgcacctcttgtatgcgcaggctcagtctgaggcgstggcctcagagtttgacgcaccggggagccgagcagggaagttttggtgcagttttgagcgtccgtgtataaggagtggctccgtagtcaccgcccccttgaggatgggaatagaaagggctgtcaggtcagcttgaaaggagagaggggaatccgataaccttttagttagcgaatgctatacagcagtccagctaataagggaggtttctatttgggggcctgaatggccctgattgcacttacaagctctaacttatggagataatctgaccgttgtacaaaatggat

SEQ ID NO: 125601 - DNA, 559 bp, Homo sapiens
ttaaaagataaaaataaatgtacaaaactaagtagatatgaaaggttacataaggaagtttgtctacctaacttgtgttccctagtacccatagtttttctgccaccactgtctagtttctagtttctaccaccaccactgccagagagattttatgcatatacaatcaaatgcacatttggaacaaatgatcacatactatatgcgttattctttatcttttttgtcaacatttcagtatacgttggctagcttttcactatcagtacataaaaattggtctcwttctttttaagggctgcataatgttgcattgtatagatgtgctgtaagtaacttaacaacacctattaatagattttgtagatgggttaaaacactaaaaacaacgtttcaacaagcaacctttataaatatttcatacatgtttcagtttattgaatactaatttttctaagtaggatgtctgggtgagagtgaatttcatctgaaaattctaatctgtatttccaaattgttcttgtcattgtttttacccttttatactatcataagcaaa

SEQ ID NO: 125602 - DNA, 324 bp, Homo sapiens
cttgttgttctcatgatagagagtgagtcaattaaaacttttttcttcatagattacgcagtcttaggtatttctgtatagcagcatgagaacaaaccaatacaccactcctccctcttccsccctggcagctgtagcatgatgcaaaaaagtttttgtgcactggggagagggaaacctcagcaattgtgatgcaatgaacgcagagctactctgttacagcagaaaaaatatactggaccaaactgatgccagaccatggagggtgcatttaaaccagtcctagccagagaggaatcactgctcccaatgttcagaacttga

SEQ ID NO: 125603 - DNA, 583 bp, Homo sapiens
aaaccagtgtgtcaatgaagaaattaagaatgaaatttaaaaattacttaaaacaaatgataatggaaacagaacataccaaaacttatgagatacagcacaaagagtactaaaaggaaagtttatagctatacattcctacatcaaaaaagaaaaaaaaactttaaaaaaatctgccaatgcacttgaaagaactacaaaggcaagagcaaaccaaacccaaaattagtagaagaaaagaaataataaagatcaaagaataaataaattaattgaaatgaagataatacaaaaggtcaatgaaaccaaatattggttctttgaaaagttaaacaaactgacaaatttttgccaaaatraaaaaggcaagatcccaaaaaataaaatcaggggcaacaaaggagaccttacaactgataccacagaaagtcaaaggatcatcagaagctaccctaagcaactacatgcaaataaattggaaatcataaaagaaatggacacatttctagatgcataaaaccaaccaaaattgaactaggaagaaatccaaaacctgaacagaccattcacaaataacaagatc

SEQ ID NO: 125604 - DNA, 354 bp, Homo sapiens
atatgccaatagtgaaaactccgaaaaaagaattttacacagtaatccaattataacagccacaaaaattatatacctgggaaataacttaaccaaagtgaaaaatatttataataaaaactttaaaacattaataaaaaaatgaagaagacaccaaaaaatagaaaaatatttcatgttcataaattagaaaaatcaatattatcaatatgtccatactacccacagcaatctacagattcaatgcaattcctattaaaataccaatgacattcttcacaaaaawaaaaataaaatgataaaaattatgtggaatcacaaaaaacccagaacaaaactggagaaatcacgtta

SEQ ID NO: 125605 - DNA, 573 bp, Homo sapiens
taatcaattggatagtttgtgctgacccatttttgggttattgtgttctctctgtaatatttatcttcaataccattttagccttatgtatttttatacatttgtaaaatgaaagcactctccttatgctgattctagagtttttatatgccaggtacatataatgcaaaggtacacataatttaaaaagttaatccagtgttcggcataataaaaagtttctccatcaagtatatttagtataggaaacrattaatgtaattaagctgagggatacattttttagatacagtagtatgaacactacatcgattataaatttgagacttttttctcttatatatttgtcccataaattcatagattctagaatttggaagtaaccttaaatgtaccatattccaacaaggcataaaatgtttgaattccctctacaacatctccaccatgtggttatctggcctaagtcaccaccagtgaacaggaaacacattatgtcctgtggaaattaattttatctctgtttagtcctaactattgcatagtccctctttatgttaaattcaaaataat

SEQ ID NO: 125606 - DNA, 573 bp, Homo sapiens
taatcaattggatagtttgtgctgacccatttttgggttattgtgttctctctgtaatatttatcttcaataccattttagccttatgtatttttatacatttgtaaaatgaaagcactctccttatgctgattctagagtttttatatgccaggtacatataatgcaaaggtacacataatttaaaaagttaatccagtgttcggcataataaaaagtttctccatcaagtatatttagtataggaaacaattaatgtaattaagctgarggatacattttttagatacagtagtatgaacactacatcgattataaatttgagacttttttctcttatatatttgtcccataaattcatagattctagaatttggaagtaaccttaaatgtaccatattccaacaaggcataaaatgtttgaattccctctacaacatctccaccatgtggttatctggcctaagtcaccaccagtgaacaggaaacacattatgtcctgtggaaattaattttatctctgtttagtcctaactattgcatagtccctctttatgttaaattcaaaataat

SEQ ID NO: 125607 - DNA, 594 bp, Homo sapiens
tgatatcagtcaatgttatatttaaaaattctctttgatctagcaaaaactttatagcaaagattctctcttaaatgtgaaagacattataaagatttattacattattgtttgtaccagagagattgaaaaaatataaatattcttcaatgagagatgaattaattaaattatgctataaccatacaaatttcatagaactgtgataaccagtgaggaaacttatctttaagtrtgaacactttattgaatttatagaaatctatggaacttggagctttattaaaaaaaagttccaacagcaagaaatagtcaataattcagtaaaaatatgatactatagttttaaaatacggagattttatctacatacatgtatatatttatatgatctagacttcttcagtttatatcctgcttctaccacttagctctctgagtgatctcttgtacaagatataaaaactttctgtgtcatagttgtctcattaataaaaagctgataataatgacaccaatataatgaggattaagctccagacactgctcttggtacaggagctatatgttagtttcagtgtcataataattact

SEQ ID NO: 125608 - DNA, 594 bp, Homo sapiens
tgatatcagtcaatgttatatttaaaaattctctttgatctagcaaaaactttatagcaaagattctctcttaaatgtgaaagacattataaagatttattacattattgtttgtaccagagagattgaaaaaatataaatattcttcaatgagagatgaattaattaaattatgctataaccatacaaatttcatagaactgtgataaccagtgaggaaacttatctttaagtatgaacactttattgaatttatagaaatctatggaacttggagctttattaaaaaaaagttccaacagcaagaaatagtcaataattcagtaaaaatrtgatactatagttttaaaatacggagattttatctacatacatgtatatatttatatgatctagacttcttcagtttatatcctgcttctaccacttagctctctgagtgatctcttgtacaagatataaaaactttctgtgtcatagttgtctcattaataaaaagctgataataatgacaccaatataatgaggattaagctccagacactgctcttggtacaggagctatatgttagtttcagtgtcataataattact

SEQ ID NO: 125609 - DNA, 589 bp, Homo sapiens
gattttgtttcctgcaactttactgaattagtttattagttgtaacagttgtctctstctgtgtgtgtgtgtgtgtgtgtgtgtgtgtgtgtgtaatccttcattttttttacatgtaagattatatcatctgcaaacagagataattttatttcttccgttcaaaattgaatgctttttactcctttttcttgcctaatttctctggctagaactttcagtactgtgttgaatagacatggcaagactgggcatgcttgccttgtttctatttgtagggggaaagcttgagtatgatggtagctatgggcattacctatagggctttttatatgttgatgtaattttcttttatttctatattattgaattttacatgaaagggtgctgaattttattaaaagcttattattgcactaattgagatgatcatgtgacttttttacctttctgtcagttaatatagcgtattgcattgactaatttttgtatgttgaaccatccttgcatcccaggaataaataccacttggtcatagcgtactgctgaattaagtttatgattttttgttgagaatttttgcatcaac

SEQ ID NO: 125610 - DNA, 589 bp, Homo sapiens
gattttgtttcctgcaactttactgaattagtttattagttgtaacagttgtctctctstgtgtgtgtgtgtgtgtgtgtgtgtgtgtgtgtgtaatccttcattttttttacatgtaagattatatcatctgcaaacagagataattttatttcttccgttcaaaattgaatgctttttactcctttttcttgcctaatttctctggctagaactttcagtactgtgttgaatagacatggcaagactgggcatgcttgccttgtttctatttgtagggggaaagcttgagtatgatggtagctatgggcattacctatagggctttttatatgttgatgtaattttcttttatttctatattattgaattttacatgaaagggtgctgaattttattaaaagcttattattgcactaattgagatgatcatgtgacttttttacctttctgtcagttaatatagcgtattgcattgactaatttttgtatgttgaaccatccttgcatcccaggaataaataccacttggtcatagcgtactgctgaattaagtttatgattttttgttgagaatttttgcatcaac

SEQ ID NO: 125611 - DNA, 589 bp, Homo sapiens
gattttgtttcctgcaactttactgaattagtttattagttgtaacagttgtctctctctgtgtgtgtgtgtgtgtgtgtgtgtgtgtgtgtgtaatccttcattttttttacatgtaagattatatcatctgcaaacagagataattttatttcttccgttcaaaattgaatgctttttactcctttttcttgcctaattkctctggctagaactttcagtactgtgttgaatagacatggcaagactgggcatgcttgccttgtttctatttgtagggggaaagcttgagtatgatggtagctatgggcattacctatagggctttttatatgttgatgtaattttcttttatttctatattattgaattttacatgaaagggtgctgaattttattaaaagcttattattgcactaattgagatgatcatgtgacttttttacctttctgtcagttaatatagcgtattgcattgactaatttttgtatgttgaaccatccttgcatcccaggaataaataccacttggtcatagcgtactgctgaattaagtttatgattttttgttgagaatttttgcatcaac

SEQ ID NO: 125612 - DNA, 535 bp, Homo sapiens
ggctgcacagtattccatggtatatatgtaccatgttttcttttttcagtctatcactgatgggaatttaggttgattccatgtctttgctattgcgaacggcgttgyggtgaacatacgcccattactgggtatatactaaaaggaatataaaacattctattataaagatacatgtttctggaccctacagctctgtatatctctgagattcatccatgtcaattcatgaatcggttttgtgttcctttttcctgttcagtagtattcctttgtatggctacactacaattgtttacacagtctcctactgagggatagttgggttgtctctagttgttggctgtaaataacattactttcaaaaaggcatataggcacttgcttttcagaagaatgctacagtgaatcatcccaccacttacctgcttttcaaaacttgcagagtccaccactctttggttttggacacatcaggccattgattctggcttcaaggactccgcctctgctcatcggtacccttaagctttga

SEQ ID NO: 125613 - DNA, 635 bp, Homo sapiens
cactgatgggaatttaggttgattccatgtctttgctattgcgaacggcgttgtggtgaacatacgcccattactgggtatatactaaaaggaatataaaacattctattataaagatacatgtttctggaccctacagctctgtatatctctgagattcatccatgtcaattcatgaatcggttttgtgttcctttttcctgttcagtagtattcctttgtatggctacactacaattgtttacacagtctcctactgagggatagttgggttgtytctagttgttggctgtaaataacattactttcaaaaaggcatataggcacttgcttttcagaagaatgctacagtgaatcatcccaccacttacctgcttttcaaaacttgcagagtccaccactctttggttttggacacatcaggccattgattctggcttcaaggactccgcctctgctcatcggtacccttaagctttgactcatgccctctatttctgcatggcacttaaccaattttggtctatgacttttggtttgattcaaatcatgtgacctcagagaatcccacccatctaaattgacctaaaataatatctcaatccagtcaccaggagttgaaggtattatggtaa

SEQ ID NO: 125614 - DNA, 584 bp, Homo sapiens
ggacttttctttgttaggaggcttcttactcctgactgagtctcatcactcattattagtctgttcagattttctatttgtcattcagtgttaatagtttgtatgtataatttatccatttcttctaggttttcctgtttgtgagtatatagttgttcataataatctctgatgatctttgtatttctgtggtatcagctgaagtgtttcccatttcatttttgattttgtttatttgtgtcttttttttattggttaatcttcctagtgggttatcaatttagtttattttttcaaaaaamcaactttctgtttcatcattgatgtgtgtgtgtgtgtgtgtgtgtgtgtgtgtgtgtgtgtgtgtgttgtctccattctgtttggctctgctcgcatctttgttattcctttccttctagcaatttggggttttgtttgttcttgattttccagttactcaaggtgcattattagattatttatttgaaatcttactggtttttctgatgtaggtgtggattactatcagcttccctcttagcacagtttttgctgtattccatagatttgagtatgttgtg

SEQ ID NO: 125615 - DNA, 581 bp, Homo sapiens
attctaccattgatacctgtagaaaacagatctctcgccctggctggcaaaacccaaaataaattctattggaaaagtctaagagaaaagtggtatcatgactaccgatgagttaaacctcccagcctctgctgagctggtccagttggtacctcacagtatcgtccactatagtataatatgtacatctagattatttgaaaatttgagtgcataattgataataaaaccaaaagagctttaatattaatcagctcctctcattgaggagtgagtacaatctcactgtgaggacacggtgaaatcttagtggtttcttaagtgggataagcatttcacagagggtkcaggaagaaaaaacagaccttaagtgtatatttattcagtctcattcttttatattactttggttgtagtaaggtatataaaatatgtaatatattagtgcaatagcacatacatataatttataaatacataaatatacatattaactgggcatttattcagattgtttttataagatatgcacaggatgaaagcagaacggaaaccctattacagataataaagatggtgct

SEQ ID NO: 125616 - DNA, 548 bp, Homo sapiens
gttcttccctttcccaacgtgtgaaggtcaagtcattttccagagcttctgaccttgctttgataaaacccttttttgccagatgctatccaaaatattactctaggcttcccagacctatcaccatagtaatatttcttgaaaatgttagggcttgagactgataatgatcaatmtaagtcatagttttattccaatttatgtgattttgttttctttagaagcaccttacttcatgcatatggataaaacagatggttgcctttaaatagaatcaaattagagttagatgataaaagtgtaatatttcatcagaaaaccaagcatattcaggggatatcaataaagtgagctcttaagaaaatagccatataattgaggttgatgatggacaggggtaagtggatatgtcagagggtgaaataacgtgataatgtaaaagaacaattgaagagaaggtacttgaataagcatattgcatgttaagagactgcagttggaaaatagcatgtctgagtttgtgatgtaagagatgattcagttttgaa

SEQ ID NO: 125617 - DNA, 585 bp, Homo sapiens
tggctggtttctacagcctagctgagctcagatggtatatagaggaaatattgccaagataatgaatgagaacttaggagctatacggaattactcctgacaagacagtattttctttctgttcaacaggtgactgcagaagagatccattgaaaaattacattaactgataccactatcaactcataaagcaggatagggagagtaagacaatactcaaagaaaagatgcctagaataccaagcaaatgattttctgagtatcccagtaatgttgtattcacttcttgaaataagggaartagtaagtggtcattaataaaataagataagaagtgatatctttaattaaatgggcaacttgttcttattacagctgttctgactgattatgattaactgccaattctgagacttgactcattaattcttcagtgtacaggacttaggagcagaatattgcatgagacacaacttaccaaatcctctggaaataacgttgttgttgtttttttttttaaatcaagatcaactatatttcaattattagaaagcacacaccttgaccaccttgacatgtggagag

SEQ ID NO: 125618 - DNA, 585 bp, Homo sapiens
tggctggtttctacagcctagctgagctcagatggtatatagaggaaatattgccaagataatgaatgagaacttaggagctatacggaattactcctgacaagacagtattttctttctgttcaacaggtgactgcagaagagatccattgaaaaattacattaactgataccactatcaactcataaagcaggatagggagagtaagacaatactcaaagaaaagatgcctagaataccaagcaaatgattttctgagtatcccagtaatgttgtattcacttcttgaaataagggaaatagtaagtggtcattaataaaataagatargaagtgatatctttaattaaatgggcaacttgttcttattacagctgttctgactgattatgattaactgccaattctgagacttgactcattaattcttcagtgtacaggacttaggagcagaatattgcatgagacacaacttaccaaatcctctggaaataacgttgttgttgtttttttttttaaatcaagatcaactatatttcaattattagaaagcacacaccttgaccaccttgacatgtggagag

SEQ ID NO: 125619 - DNA, 625 bp, Homo sapiens
agttcatgaatgaaattagaaaatagatatattttggtctgtagctatggaaatgaygcagttgaggttcctcatttataaatattggtcatccaatgtaaggatcaactaagaaaacccttcctggacaaactccataatttactagtcacaagaaatgtgaaggactaacagggaatgtataaccaaaaatatcttggacaagcacccagaaatctttgccaaatatttgaaaggcaaattttcccatatacgttttcatttttattcgcacatgtctttagtcaggaccaggagacctaaagtccacattgtagaatgtgggagatcatctttgtgtttaaactctgttggtttcatcagcatttacgaagaagttatattctaagcactctgttgtaaaagagagagaagcaaggacatattaaagaaaacctttctctcaaggaatttacaattaagttcaggatcagtagaaacaaatatgaataaaaaattaactgcaaatacatagattgctttagcataaacagtaatatatgtggcacaggataaatcagagtagaatcatggaggcttattagtaatatttctgtcctttcttctgaatttttgttatttgtac

SEQ ID NO: 125620 - DNA, 564 bp, Homo sapiens
ctacatcttatctgacagtgggaaaaattccgcatgggaattatgatggtcgcatttttgcaaactataggcaagcataaccttgagaaaattatcttcttttttcaatgaaataagttgttgatcctaacaggtaaagattctactcttgatggttttgtgagcgtaaactaaatgattgatatatgattgaatattgagtgtgtgtatagattacttttgggctggcagctatggygtttgcagagcctggatctatgggaactttctcaccctgtctcataggctactcacctctttttgactgtttaggtcaaattaatacattttcagtcactgtcaaaagtgtactgctctacttgaagatagttatatgtgggtgcatgtataaatatgataggaaatagttaaagtttgattaccccattctaagagaagaaaagcaaaaaggagaaaaattatgctttgggtttttctctagtcttaactaaccagccaaagtatatgttttaagaaaagcttttaaatacagcacattgtcaaagaggcagagcttcagtgacc

SEQ ID NO: 125621 - DNA, 564 bp, Homo sapiens
ctacatcttatctgacagtgggaaaaattccgcatgggaattatgatggtcgcatttttgcaaactataggcaagcataaccttgagaaaattatcttcttttttcaatgaaataagttgttgatcctaacaggtaaagattctactcttgatggttttgtgagcgtaaactaaatgattgatatatgattgaatattgagtgtgtgtatagattacttttgggctggcagctatggcgtttgcagagcctggatctatgggaactttctcaccctgtctcataggctactcacctctttttgactgtttaggtcaaattaatacattttcagtcactgtcaaaagtgtactgctctacttgaagatagttatatgtgggtgcatgtataaatatgataggaaatagttaaagtttgattaccccattctaagagaagaaaagcaaaaaggagaaaaattatgctttgggtttttctctagtcttaactaaccagccaaagtatatgttttaagaaaagcttttaaatacagcacaktgtcaaagaggcagagcttcagtgacc

SEQ ID NO: 125622 - DNA, 558 bp, Homo sapiens
tcattatgctgttttaagtacagcacagaaaacagttctaaactatggtgaatgaatcaatgccacggtgactctctctctaaattcctaagtttggattccactgttctcgaagtagactgtagctatgtaccatctcagtaatagaataaatcagctgttacagcaggcctgatgtactcctagattacaaaaccactgtttactataattatccccggtacaatgcaatgtttaagagtacggagcttggagtccagcagccaaagcttgaattattattttgatgcattcagccattttagtttggagaactaaattggcacaccttatcttgaaaaacaggatgataacatctatctggatatgtaatttgtggacatcataggaatccaattcttgttgaatgaatgaataaatgcatgaatgtagtcatgaatgactygaaacaactgccttctatggttgctggggctgagtttcaagctgtcataagatgattatataggcatatatggaatgtaacaaaacttttcacttcatactgatttgtagaga

SEQ ID NO: 125623 - DNA, 601 bp, Homo sapiens
gggtggtctcctcccttattctgattattgtagttttgtattgtattttgaaataaggatgtgtggtgtctccagctttgttttgttcaaggttacttcgggtatttggggtcttgtttttttagatgtttttctatttctggaaataatgttattggaattctgatcggaattgcattaaatctgtagatcagtatgcatactaaaacatttttaaagtattaattctcttctaaaccatttacagaggatgtctttccatttatgtgagtcttctttagtttccttcaacaatgtattataattttcagtgtataaatatttcacctctttggttaagctgatttctaagtattttgttatttttgttgctattgtccgtggtatattttgatagctcattgtttgtgtatagaaacatagctaaattttgtatgtttaatttgtatgctgcaacttaactggatttttttattagttctaacattaattgttgttgactatttaggattttcctacatatatactcatgtcatctgagagagataattttamttcttcctttccaatttgggtgccttttatgtattttttttctgtc

SEQ ID NO: 125624 - DNA, 548 bp, Homo sapiens
cttgccttgtacaagattgcagaagaaaagctctcaatttttcccaaagttgtttatgattttaacactgggcttttcatatatggtctttattgcattgaaataagttccttctatacctattttgttgagagtttggtgaatatacatagaattttgtcaaatgccttttataaatctactaagataataatgtcatttttatgtttcattatgttaatgtggcccattagattgactgatttgtgtatgcrgaacctttctgcatcctagaaataaatcccacttggtcatggtgtataatccctttaatgtgctgttgcatttggtttgctagcattatgttgtggatatttgtatgaatgttagttattcataatggtctgctttcctttcttgtggagtctttctctagctttgggatgggtactaatgacctcacaaaatgagttgaatgtgttccctttgctgttttggggagtggttaagaagattagtatcaattatttctttgatgttagatagaatttacccatctagccattgag

SEQ ID NO: 125625 - DNA, 535 bp, Homo sapiens
aatgctcttacaagaaaagaccagagagtgtgtgctctctctctccgtcactcatactatatatatgaagaagagttcatgtgtgctcacagagagatggtagtcacatatgagctgtgaagctggtttacagtgtagtgactgccaacttctttcagtccagtgggacaaaagattcatgcmcaaaacatgttacatgaagtggtttattatttacagataggcagcaaaggaaaatgagaattcattttgagctagttcctcaagactcagcaagcttcctggggtggataaagtcttgcctgcacatgtcctacgtgcaccatagctgagggagtctagggagtagcatgccctggggtttatacatcaggtgtcacagaaaatgctgggcaaatgtgctgttccggccattctctttcctatatcaggaaattaagttccaagcgtattctatagttattctttagaacaacaaattagaaagtggaggagaactgggttggttcaatgccacccagaggattgtcgtgaa

SEQ ID NO: 125626 - DNA, 535 bp, Homo sapiens
aatgctcttacaagaaaagaccagagagtgtgtgctctctctctccgtcactcatactatatatatgaagaagagttcatgtgtgctcacagagagatggtagtcacatatgagctgtgaagctggtttacagtgtagtgactgccaacttctttcagtccagtgggacaaaagattcatgcacaaaacatgttacatgaagtggtttattatttacagataggcagcaaaggaaaatgagaattcattttgagctagttcctcaagactcagcaagcttcctggggtggayaaagtcttgcctgcacatgtcctacgtgcaccatagctgagggagtctagggagtagcatgccctggggtttatacatcaggtgtcacagaaaatgctgggcaaatgtgctgttccggccattctctttcctatatcaggaaattaagttccaagcgtattctatagttattctttagaacaacaaattagaaagtggaggagaactgggttggttcaatgccacccagaggattgtcgtgaa

SEQ ID NO: 125627 - DNA, 567 bp, Homo sapiens
gcttttgccccttttgctcagcgcttctccttgctgccactgtgtgaagagggacatgtttgtttccctttctgccatgactgtaagtttcctgaggcctcccaggccatgctgaactgtgagtcaattaaacatctttcctttatacattacccagtcttgggtatgtctttattagcagtgtgagaaatgactaatacatcatccttgtaggatctgtctgaataatatttggctccagggtgacagagaagacaaatttaacatttcgtagaactaggaaaggagaacctacgaataataagtgtttctcatctagatcaatgtgtcttggtcatccatacttgagaacacatgctttgagatggatttaagttaatttcattaatacactgcatgtctaaactacagaatctttattacatattaaacaaaactattttcaacacattagtgcctgtcattgctaagtttggtcttaactagtcttatatgtatgyacgaaacttatggttaccatacaccttatataaaaaatgaaataaaattatatatggtaggaaaaaa

SEQ ID NO: 125628 - DNA, 649 bp, Homo sapiens
tatttaaacaagctctgtagtaattgcagggacctaatcaaaggcatcaccttaaggaaagatgcctatagtttcaggagaagggctagatatctctaggcttggtagtsatttggacctaagaaagaatccataaagggccacttagggcatttcaatgctctgcaagacagacctgggggcttacagccagtagaacccagccaaggactgataaataaaggctggcaactgggggcttagcaaacaaaaatcatgaaaattgaaaccactctctgtaaaacgtgaaattacttgtgaccctgcaggctaacatctgtaactttagttggtacaggttgcttccacatgcatgctttctctgcttatttcacaagattatgttaaaccctctacatcttcaatgtattttcctaaagttccttttcatcttcttatgctgggtatgcctcaaatatattgttccctttagtatgtctctcagctgaaggcttttagacagccacaaaaacagtgagtgtagacttctccattcattactgcgttttcaaaacttttatcctttttttttctacaaaagattccatttcactggagcacacgatattagactataccaccttctatcttacatgctatcccagcttct

SEQ ID NO: 125629 - DNA, 649 bp, Homo sapiens
tatttaaacaagctctgtagtaattgcagggacctaatcaaaggcatcaccttaaggaaagatgcctatagtttcaggagaagggctagatatctctaggcttggtagtgatttggacctaagaaagaatccataaagggccacttagggcatttcaatgctctgcaagacagacctgggggcttacagccagtagaacccagccaaggactgataaataaaggctggcaactgggggcttagcaaacaaaaatcatgaaaattgaaaccactctctgtaaaacgtgaaattacttgtgaccctgcaggctaacatctgtaactttagttggtacaggttgcttccacatgcatgctttctctgcttatttcacaagattatgttaaaccctctacatcttcaatgtmttttcctaaagttccttttcatcttcttatgctgggtatgcctcaaatatattgttccctttagtatgtctctcagctgaaggcttttagacagccacaaaaacagtgagtgtagacttctccattcattactgcgttttcaaaacttttatcctttttttttctacaaaagattccatttcactggagcacacgatattagactataccaccttctatcttacatgctatcccagcttct

SEQ ID NO: 125630 - DNA, 649 bp, Homo sapiens
tatttaaacaagctctgtagtaattgcagggacctaatcaaaggcatcaccttaaggaaagatgcctatagtttcaggagaagggctagatatctctaggcttggtagtgatttggacctaagaaagaatccataaagggccacttagggcatttcaatgctctgcaagacagacctgggggcttacagccagtagaacccagccaaggactgataaataaaggctggcaactgggggcttagcaaacaaaaatcatgaaaattgaaaccactctctgtaaaacgtgaaattacttgtgaccctgcaggctaacatctgtaactttagttggtacaggttgcttccacatgcatgctttctctgcttatttcacaagattatgttaaaccctctacatcttcaatgtattttcctaaagttccttttcatcttcttatgctgggtatgcctcaaatatattgttccctttagtatgtctctcagctgaaggcttttagacagccacaaaaacagtgagtgtagacttctccattcattactgcrttttcaaaacttttatcctttttttttctacaaaagattccatttcactggagcacacgatattagactataccaccttctatcttacatgctatcccagcttct

SEQ ID NO: 125631 - DNA, 386 bp, Homo sapiens
caaggagttttgggggtgagggaattgtttgtaacctgattgtggtagtgatcacgcaaatctatatatgagtcaaaattgatagacctatgcactaaaaagaaaaaagtcaattttactgaatggctgaagggcccatgcagtagtgcataaagactcaagaagcaggtggcagggctgtacagagctagaaagaggtttcaaatgcattctggaggcaatagggaaactaaaaatttttcctcatgagacagacatgattagatctgggttttagtaggatcattctgttgacagattgaagrtggattggaggtggttacatggaagagaaggaagtcaattagtattccatggcaagaaagatcaattaagggcaacagata

SEQ ID NO: 125632 - DNA, 544 bp, Homo sapiens
aaaatcaactccaaatggattaaaaattcttaacataagaccaaaaactataaaactcctagaaaagakgggaaatctttctggacattaggtcttggcaaggatgtttttggttatcacaccagaagctcaagtcacaaaagcaaaaatgaatacatagtactacatcaaactaaaaagaactgtttcctgcagagcaaaggaaacaatcaacaaaatgaaacagcaaccaacagacccggaaaaaaatatttgcaaaccgtatatctgatcagggattaatatccaaaatatataaagaactcatacaactcaatagtggaaacacaaataacctaatttttaaaataggcaaaacacctgaatagacatttctccaaagaatacatagaaatcaccaacaggcataggaaacgtgctccacatcattaatcatcaaggaagtgcaaatcaaaaccactgtgcgatatcacctacaccctttaggatggctattaccagagacaagtgataaatgtttgcagagtgtggagaaaagagaatt

SEQ ID NO: 125633 - DNA, 555 bp, Homo sapiens
caacagtccatgcttacctggctgtattctgaagaaatggtccacacttacctggctccatcctgcaggactggtccatgcttacctgggcccatcctgaagaaacagtccatgsttacctggctgtattctgaaggaatggtccacacttacctggctccatcctgaaggaatggtccatgcttacctgggcccatcctgaagaaacagtccatgcttaccttgctccatcctgaaggattggtccctgcttacctgattccatcctgaaggaatggcccacacttatgtgactccatcctgaaggaatggtccatgcttacctgggcccatcctgaagaaacagtccatgcttacctggctgtattctgaaggaatggtccacaattacgtgactccatcctgaaggaatggtccatgcttacctgggcccatcctgaagaaacactccatgcttacctgcctgtattctgaagaaatggtccacacttacctggctgcatcctgaaggaatggtccatgcttacctgggcccatcgtgaagaaacagtccat

SEQ ID NO: 125634 - DNA, 555 bp, Homo sapiens
caacagtccatgcttacctggctgtattctgaagaaatggtccacacttacctggctccatcctgcaggactggtccatgcttacctgggcccatcctgaagaaacagtccatgcttacctggctgtattctgaaggaatggtccacacttacctggctccatcctgaaggaatggtccatgcttacctgggcccatcctgaagaaacagtccatgcttaccttgctccatcctgaaggattggtccytgcttacctgattccatcctgaaggaatggcccacacttatgtgactccatcctgaaggaatggtccatgcttacctgggcccatcctgaagaaacagtccatgcttacctggctgtattctgaaggaatggtccacaattacgtgactccatcctgaaggaatggtccatgcttacctgggcccatcctgaagaaacactccatgcttacctgcctgtattctgaagaaatggtccacacttacctggctgcatcctgaaggaatggtccatgcttacctgggcccatcgtgaagaaacagtccat

SEQ ID NO: 125635 - DNA, 555 bp, Homo sapiens
caacagtccatgcttacctggctgtattctgaagaaatggtccacacttacctggctccatcctgcaggactggtccatgcttacctgggcccatcctgaagaaacagtccatgcttacctggctgtattctgaaggaatggtccacacttacctggctccatcctgaaggaatggtccatgcttacctgggcccatcctgaagaaacagtccatgcttaccttgctccatcctgaaggattggtccctgcttacctgattccatcctgaaggaatgscccacacttatgtgactccatcctgaaggaatggtccatgcttacctgggcccatcctgaagaaacagtccatgcttacctggctgtattctgaaggaatggtccacaattacgtgactccatcctgaaggaatggtccatgcttacctgggcccatcctgaagaaacactccatgcttacctgcctgtattctgaagaaatggtccacacttacctggctgcatcctgaaggaatggtccatgcttacctgggcccatcgtgaagaaacagtccat

SEQ ID NO: 125636 - DNA, 555 bp, Homo sapiens
caacagtccatgcttacctggctgtattctgaagaaatggtccacacttacctggctccatcctgcaggactggtccatgcttacctgggcccatcctgaagaaacagtccatgcttacctggctgtattctgaaggaatggtccacacttacctggctccatcctgaaggaatggtccatgcttacctgggcccatcctgaagaaacagtccatgcttaccttgctccatcctgaaggattggtccctgcttacctgattccatcctgaaggaatggcccacacttatgtgactcmatcctgaaggaatggtccatgcttacctgggcccatcctgaagaaacagtccatgcttacctggctgtattctgaaggaatggtccacaattacgtgactccatcctgaaggaatggtccatgcttacctgggcccatcctgaagaaacactccatgcttacctgcctgtattctgaagaaatggtccacacttacctggctgcatcctgaaggaatggtccatgcttacctgggcccatcgtgaagaaacagtccat

SEQ ID NO: 125637 - DNA, 602 bp, Homo sapiens
gaattctcactataaacgtgtaagtctcaccgacaccgacagccctgcgtgccaattcagaggttcttgtctggcgccctcacccaaagaaatgttacactctgcagcttaattcccatcccagcttcgccgaccacctcccggtggcgtctccatctgtaacttcctttcccaggctggactgcgtccctctaaaatccacagttgaagtccgagcccaggcagctcagaatgaggcttcacagttcttccctggcactcgaaggagactggtccaaggaacccctcaggtgtaaacycatggatgcccaaggcccttgtatagaatggcatggttttccatataacctgtgcgcctcctcctgtgtgctttaaatcagctctggaatacttacagtacctaatacagtgtacatgatgtgtcaatagttgttgctttgtgttaattttttatctgtattatttttattgttgttagtatgttcgatctgcagctggttgaatccataaatgcagaacctggggataaggcgggaagtgtatttgggcataggattgctgcagaggtgattcatggagatgcggtcatagtggagtaggat

SEQ ID NO: 125638 - DNA, 590 bp, Homo sapiens
ttcctgctgaacccacggcctcgctggccgcactgagagcgtctggtccacagtggcaggagagacaaacgattgtaggagaaaaatctgggtttttttaattgtgttatttttttacattaaaattactgggagagaaaagtaatggatatcctttaaaatattgggaaaaatacagaaaagtacataaagaaagttactcatgcttatgtcacttttgagctccctcaagtccccaggcattagasggggaagaggaggggcgaggccacagagcagggagagcattgaaaatacccacaatgagggtgcacgaccaaccattgacctatgggcccttgtcagagcttcgcctcctgaagctaattgttcatccaagtgattctgtcaaaattatatgctgttagcaaataaaaatgattcataaacatgtatgagcaccccaaatcctgcactttctactaagaaacaagtccggccaattctctctctacttctgacatggtgagaggtgtcagaaagtgacggggtgagtttgacattagaaatggagggcaaataggagaagaactgacaaactggaggtgccc

SEQ ID NO: 125639 - DNA, 540 bp, Homo sapiens
ttcagcagtggactaaatcaagtagaatcaagaatctcagaattttaagacaagacttttgaaatatcccagtcaaataaaaatacatacaaaaaagaataagcaaagcctatgtgacatatgagacaccataaagtgaccaaatatttgaattttgctgtcccagaagattaaaaaaaaagtattagaaaacctatttaatgaaataacagawaaagacttcccaagtctaatgagatttagatatccaaatacaggaggcacagagattcccaaatagatacaattccaaaaggttttgcccatggcaaattatagtcaaactgtcaaaatttaaagagaaagagagatttctataaacagcaagtgaaaagcatctagtgggaacacccatcagattaacagcagatttctccacagaaactttacaggccaggagaaaatggcatgatatatttaaagtcctgtaagaaaatgcctgccagttgaggatactatacccagcaaagttatccttcataaatgaaggaaaaataaagt

SEQ ID NO: 125640 - DNA, 552 bp, Homo sapiens
ccagtaggaggtatacatagtaaaggtgctactgggatttgatctcacccaattgtatatgaaagctgttgtttttatagttgacaaggaactttaagtccacaggtcaggcccttaaaaaaagataagtaagagcaggaactcaggagaacacatgccagctgcctctacttatgttctttgtgaaataactttcctagaggagaaactgacaacctatgtcatgaaattrtagagaaatctggctcaggagtcagttaagttgaaggaggaatgtgggtgaaatggagaatttatactcatggctgctgttccatgccaataaaagtaagccagcagatacgtgacgtgtgagttacaaaggcacttccactgcatttctgaaagcaaagaaagcaacagcaacgacaaaaacaacaaaaatattctgtttcaagtcttcctctgaaatctcactgaaaaatatatctgtggaccactctaaccagaagcttaaaggaaagggagttctgggaagcatactttagcctaaccaagttgacacaatataaa

SEQ ID NO: 125641 - DNA, 581 bp, Homo sapiens
agcctggggtaacaaagtgagacatcgtctacaaaaaaaaaaaaaaaraaagaaagaaagaaagaaagaaagaaagaaaagaaagtaaaagtggtcctagttgtctattgcatttttactctactatgttgctttatcctgcagctaacaaattagcctgctacagttatatggatgcaggcataagagatgagattcctgagtctagggtatagtacagtttatttctcatgttataagcagtagccagaatatcagcattgtcttgggccagttgttcaaactgtaatttgtataaggcgacatacagagggaaagatgacaaatgcacacacagtgggttgagttaaagaaaaatcctgagcttaggaaactccaaactttttacatgagtgaaaaataaacctaactttttccccacaagaaatattttctttattatactgtagaagaaaaaaaacctacctcttgctccatgggaggacattatctccaattttaacgtccatctactaaccatataatgtccatctactaaccttaagaatttggttacatggttactgatgcttgcactcaca

SEQ ID NO: 125642 - DNA, 550 bp, Homo sapiens
tgctaacagttggcctccttataagtattatttgatattgttaggaggtaaatctatatttatgtcttttataaagtatatatattatatcttggaaagatgctcctgagtttagctttgtttatggtaaataaacctactatctacagatttattagccacmgcttcctgaaaatatcatgtaagcccttacatggactggatataaaatgaggatgtttaaattacctaaactctccccactgtatgatgtggtaagtcaatcttacttagaggtctcattttatcctctggtcagagatcacgtcagatttatagagcttgatcctgggggttcacaaacgatgtcacagaactctcctgctttctcgtgcttgcagatttcttgtgtccttgaaattatgtaaaatttaacacaaaatttgtaagattttccaaggtatttaagaaaattatgtaatatctcattacaaccttcaaatgaaatgagacacaaacaatctcaggcaaagaaagtgtggtcatttacaaggaaagagcaggaatcacc

SEQ ID NO: 125643 - DNA, 442 bp, Homo sapiens
agtccatgcttacctggctgtattytgaaggaatggtccacacttacctggctccatcctgaaggaaggggccatgcttttttttttttttcccgaagaaacattttttgggtggccttgctccatcctgaaggaatggtccacacttacctgactgggctgtgaatgaatggtccatgcttacctgggcccatcctgaacaaacagtccatgcttacctggctgtattctgaagaaatggtccacacttacctggctccatcctgaaggaatggtccatgcttacctgggcccatcctgaagaaagagtccatgcttaccttgctccattctgaaggaatggtccatacttacctgaatccatcctgaaggaatggtccatgcttacatgggcccatcctgaagaaacagtccatgcttaccttgctccatcctgaaggaa

SEQ ID NO: 125644 - DNA, 442 bp, Homo sapiens
agtccatgcttacctggctgtattctgaaggaatggtccacacttacctggctccatcctgaaggaaggggccatgcttttttttttttttcccgaagaaacattttttgggtggccttgctccatcctgaaggaatggtccacacttacctgactgggctgtgaatgaatggtccatgcttacctgggcccatcctgaasaaacagtccatgcttacctggctgtattctgaagaaatggtccacacttacctggctccatcctgaaggaatggtccatgcttacctgggcccatcctgaagaaagagtccatgcttaccttgctccattctgaaggaatggtccatacttacctgaatccatcctgaaggaatggtccatgcttacatgggcccatcctgaagaaacagtccatgcttaccttgctccatcctgaaggaa

SEQ ID NO: 125645 - DNA, 442 bp, Homo sapiens
agtccatgcttacctggctgtattctgaaggaatggtccacacttacctggctccatcctgaaggaaggggccatgcttttttttttttttcccgaagaaacattttttgggtggccttgctccatcctgaaggaatggtccacacttacctgactgggctgtgaatgaatggtccatgcttacctgggcccatcctgaacaaacagtccatgcttacctggctgtattctgaagaaatggtccacacttacctggctccatcctgaaggaatggtccrtgcttacctgggcccatcctgaagaaagagtccatgcttaccttgctccattctgaaggaatggtccatacttacctgaatccatcctgaaggaatggtccatgcttacatgggcccatcctgaagaaacagtccatgcttaccttgctccatcctgaaggaa

SEQ ID NO: 125646 - DNA, 606 bp, Homo sapiens
gaatgtgaagtcacacattatatctcagcaaaattttattaagaattctcaatattttagagagagagagagagagcccccaaagcctatacccattaatggcctgacctcattcccccacaccaaccctcggcaaccactgtctactttctgtctttatagatttgtttattcttgatatttcatataaatgtaataataagatatrtagtttttctgtctgacttctattgcttagtatgatgtttgaaggtcaatccatgttgtaacactaattagtaattcatttatttttattgccagataatatagatatacattttatttatccattaattagtagatgaatgtttgagttgtttctacattggggctcttatgaataatgctgctattagaatttatgtacaaatatttgcttgaatatctgttttcaattattttccatatatgtataactagaagtgaaatttctgggtgatatggtaattctatgtttgtttgaggaaccaaggaaccacaaaacagttttttctcagtagttacactattttatatttccaccagcaatgtatgaaagttctaatttcttcatttactaattat

SEQ ID NO: 125647 - DNA, 606 bp, Homo sapiens
gaatgtgaagtcacacattatatctcagcaaaattttattaagaattctcaatattttagagagagagagagagagcccccaaagcctatacccattaatggcctgacctcattcccccacaccaaccctcggcaaccactgtctactttctgtctttatagatttgtttattcttgatatttcatataaatgtaataataagatatgtagtttttctgtctgacttctattgcttagtatgatgtttgaaggtcaatccatgttgtaacactaattagtaattcatttatttttattgccagataatatagatatacattttatttatccattaattagtagatgaatgtttgagttgtttctacattggggctcttatgaataatgctgctattagaatttatgtacaaatatttgcttgaatatctgttttcaattattttccatatatgtataactagaagtgaaatttctgggtgatatggtaattctatgtttgtttgmggaaccaaggaaccacaaaacagttttttctcagtagttacactattttatatttccaccagcaatgtatgaaagttctaatttcttcatttactaattat

SEQ ID NO: 125648 - DNA, 605 bp, Homo sapiens
catctaaaatgggtgggaagggcttgtttcttctggaagctttaggtgagaacctgtttccttatcttttccaggatctccaggcagtcaacattgcttggctcctggatctacgttaccctgacatctgcttctgtcgtcgtgtcttctctgaccctgcaaatcctgccttcatcttctgaggcaccattgtgattatatctggcccaaccagataattcagaataatttccccaattcaatccttaacttagtcacctctacaaaagttcctttgtaaggtaacaaatatacaggttatgggaaataggatgtggatatcttttggggtaagggactttattctacctactacacatataacaacatataaacaggaaaacacaatgaaggcacagttgtaagatgacagtatagttacatgtttgtattcttgagayggatacaagaactctttttaggactccaatataagtcatattcaaaaacctagttttctgataacacaaaattccaaaaatatgattcttcagataagaagcttttatctcaatagtaagatattctcaatttatgaaacaaaagagacttcaccaaaaagaaat

SEQ ID NO: 125649 - DNA, 556 bp, Homo sapiens
ttctattataaggtctattggttaatccaaacttggttttaatgtacagatgataaagaaaggtgtagaaatgccttggtatagtcacgatctgtatttattaagaactttcaaaaatatcaaacaataaaacataatgtctttatgacattttagacaaagtagaaaaactactcatagctctgaaagaccagcccagggccccagctcttactagctacacaaggactaatgtagatcaaaatttcagcacccctgtataacaggtacagtatcctgtattgaggaactgtaaatattggggaaaataaaaatttcagaagaaaagattatgtttgttatcctcaattgattcagaaaagattcccattaccaaagatctgatgcattctttcagtggggcaaagtttstacctttgtggaaacacttttggcacatttctgggtgctgaagaggctagtgagagttgcactaattaaaatggacttgtgatgatgatttaagcatttttgatgattatgtgatcatgtcttccctttgaattaaatagattgg

SEQ ID NO: 125650 - DNA, 564 bp, Homo sapiens
tttatttttccatgttcctcttatgacataatgttacaagattgaatatcattgtctttgttccatgcagtttccatttctgccactgaagttcttaagcaaaatagcaaagtacaaaattggtgattgattggttatctgttrgacatgataaaataaagttagtcaaatgagatgacactcttccatgatgttttcttggtgtttttattttttaagaaaatgtgcacattaaaaaatatacttcactgaattacctgaaattaagcacatgatttgaaccactaaagatgaatgcataagaaagtaattgttcctgatgtttaaacaattttatgctgtgttttatagcattcaaacatgagttctgggaaaataaaacaggactggtgagaggaatcatggtgccgatagacaggagtaaactgattcaagttattgggcaaagatgccctcgatgctagagatttggatttgatagacatagtaataaaaatagaaatacagtggtataaaatctacctaaaaggggcaaaatcaagattgctgactagttgctggtag

SEQ ID NO: 125651 - DNA, 564 bp, Homo sapiens
tttatttttccatgttcctcttatgacataatgttacaagattgaatatcattgtctttgttccatgcagtttccatttctgccactgaagttcttaagcaaaatagcaaagtacaaaattggtgattgattggttatctgttggacatgataaaataaagttagtcaaatgagatgacactcttccatgatgttttcttggtgtttttattttttaagaaaatgtgcacattaaaaaatatacttcactgaattacctgaaattaagcacatgatttgaaccactaaagatgaatgcataagaaagtaattgttcctgatgtttaaacaattttatgctgtgttttatagcattcaaacatgagttctgggaaaataaaacaggactggtgagaggaatcatggtgccgatagacaggagtaaactgawtcaagttattgggcaaagatgccctcgatgctagagatttggatttgatagacatagtaataaaaatagaaatacagtggtataaaatctacctaaaaggggcaaaatcaagattgctgactagttgctggtag

SEQ ID NO: 125652 - DNA, 630 bp, Homo sapiens
aatgtaaaatggtttagcatgcatgttgctggaataccaggtggaaagcaatgaaaaaactgagcataagacacatttgaggaaacagtagccaagaattttcccaaaatattgtactgccttaactgtgagatctaagatgctcagtctatcccaatcaggataaatgcacagaaaactaaactaagcatattatagtcaaaggactgtacattaaataaaggaagaaatcataaaaactgctgggctcttgggaaatggcacactttaaaaaatcaaataagcaaaatgacactaaaatcttactagaataaaatagagaaagaagacaaaggagataatggaataacatatttaaagtgctgaggacaaagtaaactataaacctgaaatgttatatctagaaaaaacrtattgcaaaaagaaggcaaaataaaaagatatttaaaaataatttttaaagatataatttaatttttctccagcaaagttgcattgcaataattgataaagtagtttttcattctgaagttatataatatgaaatccaaatgtgtagagagaaataccgcaattggtaaacatatgaataaggataacttatctggtcatcaaaagaaaaagtgaatt

SEQ ID NO: 125653 - DNA, 630 bp, Homo sapiens
aatgtaaaatggtttagcatgcatgttgctggaataccaggtggaaagcaatgaaaaaactgagcataagacacatttgaggaaacagtagccaagaattttcccaaaatattgtactgccttaactgtgagatctaagatgctcagtctatcccaatcaggataaatgcacagaaaactaaactaagcatattatagtcaaaggactgtacattaaataaaggaagaaatcataaaaactgctgggctcttgggaaatggcacactttaaaaaatcaaataagcaaaatgacactaaaatcttactagaataaaatagagaaagaagacaaaggagataatggaataacatatttaaagtgctgaggacaaagtaaactataaacctgaaatgttatatctagaaaaaacatattkcaaaaagaaggcaaaataaaaagatatttaaaaataatttttaaagatataatttaatttttctccagcaaagttgcattgcaataattgataaagtagtttttcattctgaagttatataatatgaaatccaaatgtgtagagagaaataccgcaattggtaaacatatgaataaggataacttatctggtcatcaaaagaaaaagtgaatt

SEQ ID NO: 125654 - DNA, 628 bp, Homo sapiens
atcagtgtaactaaatcatgggaaagcctcattataatataattagtagattttgtgaaaatgaaggcaatataaagtatgttaacttacaaattttcctcattttattttattcttatccaaccactgcctttgcatcaatagaacacctagatatctgtagtagatcttaatacactggctcccttagccagaaaacatactttacaaacagttaaggatacataataaaagtatcyaatattagtgtcatcacaacttttagataaaaagtcaattaattcaataattgtttgacttttttcatccaattaatgcaaatgaattgaagcttctgggaattcattatgtcaatgataaaatatccttcatttgtggaaatattagtctaaaaagttaatattaaataaaaaattgttttgcactaatatgaatgcaaattttgtgctaatataaatgtaaattttgatagaacacagcgtcatattttaatgtgttttattaaggatcttataaaggaaaagtttactttggattggcagtgatataaatatacagtttataactgcctcaaaacccctgtaatgttttacctattgtaataaactggatagctatagacaaaagc

SEQ ID NO: 125655 - DNA, 615 bp, Homo sapiens
aaggaaacaatgtctactatcattgaattatttgtactgtcattactagcacaacaaagcaaagttttgtgaggattggaagaggagggctgcacactttttaattagctaacaatatctcaattagmgaagtcaacagttaagaaataaactaagaaagcaagtaaaagtgtttgacaaattttctagatgaagcacgggcttacaaatactggtaacatatctctaaccaactagaaaacataaattgtaaaaatatacctttcataatatcaataagaactatgtgtataataattaacttaagcgagaatatagcagacgcttggacaaataagtttaaaattctaataaaacattgattataatatgaattaataaatactccaaagttctaatttaaattgaaaaagactttattagaaccctaacccacctagggaaagggtatttatctaacaccagacacctctactgttcactcatattaattgaggaaggaagaactgtaaaacatttgttaatgtcaacacttcaagatgtagactggaaattaatcacaggactatgaaatattatgcaatactaaattactatcgtatcaacaagggtcag

SEQ ID NO: 125656 - DNA, 615 bp, Homo sapiens
aaggaaacaatgtctactatcattgaattatttgtactgtcattactagcacaacaaagcaaagttttgtgaggattggaagaggagggctgcacactttttaattagctaacaatatctcaattagcgaagtcaacagttaagaaataaactaagaaagcaagtaaaagtgtttgacaaattttctagatgaagcacgggcttacaaatactggtaacatatctctaaccaactagaaaacwtaaattgtaaaaatatacctttcataatatcaataagaactatgtgtataataattaacttaagcgagaatatagcagacgcttggacaaataagtttaaaattctaataaaacattgattataatatgaattaataaatactccaaagttctaatttaaattgaaaaagactttattagaaccctaacccacctagggaaagggtatttatctaacaccagacacctctactgttcactcatattaattgaggaaggaagaactgtaaaacatttgttaatgtcaacacttcaagatgtagactggaaattaatcacaggactatgaaatattatgcaatactaaattactatcgtatcaacaagggtcag

SEQ ID NO: 125657 - DNA, 590 bp, Homo sapiens
ggattcagctgtcttctaattaaattagtcattaaggagatttgaaaaaataaatgagtccagtttttttccttatttttattggtttktaaattacagttatttttcataaaatattatctcgttagcatatgatgttttctttttacttctattttgaaatgaagaaatagcttcagtttgctcagttttaatttctaatactgtaattattgatctatgtaacctatgtaaataaaagcctctctagatcctcaataattttttaaagagttcaaagtgggcctgagatagttagagaacttctgacacatgtcacagcatatatgttataccagaggatctaattctagctgcatataagagtcacctagtgagcttttaaaaagaaactgtagataggcgccatccacataacctgatttagcaagattgggattgggcttcagcatcagtaagtttaaaaactcctcatgttattctaataaacactcaaagctgtaaactctttaactttgaaaatatgtattaatatgttgaattttatttttcatttcttgtttgtataagctaaataagctcaatgatgc

SEQ ID NO: 125658 - DNA, 626 bp, Homo sapiens
aaagctctacaataacttcccaattcaaagcaaataccaaagtactttaaaaggcctcagagtctcataggatctgacctccctttatccttctggtttacacttcactacctcctcatctctcccttttctctggtcccacaggacttaaagatgttcctcaaattcaccgcgaaagcttctatattggtgtgattgaagttgttaaaacttctgcctgaaaatctccctcataacacaacaaccagaaaaaggttttttcctgtgtttsgtcaaatgaaaccttctcattagtggttcttggaattttcaaaattgtatctttcctccctataatccttacgtgcttgcctcctaattttgcatcttataatcatctaccatggcatgtatttttatctttgttattgtctataacctgcagtagaatgcaagctccataaagaaaataatttttgtttgctagattccttattttatgctcagctcctaaacagtgaaccagaaatattttaaaagaagaaattaaaatgcattcatggttgttattttattgtcaacttgaactatattttaaaataagtaatatactcctatttggagtaacaaaaggaattctgaatgca

SEQ ID NO: 125659 - DNA, 626 bp, Homo sapiens
aaagctctacaataacttcccaattcaaagcaaataccaaagtactttaaaaggcctcagagtctcataggatctgacctccctttatccttctggtttacacttcactacctcctcatctctcccttttctctggtcccacaggacttaaagatgttcctcaaattcaccgcgaaagcttctatattggtgtgattgaagttgttaaaacttctgcctgaaaatctccctcataacacaacaaccagaaaaaggttttttcctgtgtttcgtcaaatgaaaccttctcattagtggttcttggaattttcaaaattgtatctttcctccctataatccttacgtgcttgcctcctaattttgcatcttataatcatctaccatggcatgtatttttatctttgttattgtctataacctgcagtagaatgcaagctccataaagaaaataatttttgtttgctagattccttattttatgctcagctcctaaacagtgaaccagaaatattttaaaagaagaaattaaaatgcattcatggttgttattttattgtcaacttgaactatattttaaaataagtaatatactmctatttggagtaacaaaaggaattctgaatgca

SEQ ID NO: 125660 - DNA, 597 bp, Homo sapiens
acaactgcttacgcatgtggcaatatgagcctaagacaggtgctgatgccttagtcacttggccacacagttttgtggtttacragtcatgggaattgcttgtcttactctgactgctaaagttctgtcctattgtcttttcatgtaatagcaacatgactctgatgacaaagcccaactaattacacaacttaatttaatagtttaaagcgcaaagggcattccctgagcagtaaaatcttttgtttggaaattttaaaacaaattatattttactttatgttttatatttacgtaataagtatttacaagaacacaattttctcaagatttaaactgctcattgttccataaataggacacacatttagaaagaggatttttttttaaaggaatattttagtgattacttctggctaaaaacatgaaactcttttagtgcttgatgttactggaaacttgctctagattattttttgaatctttgctgtgaggttaagaatagaaatgttttcactcccaattattgctttgaattaagattttgtgtctgggtgaaattttcctctggcttaatgcatgaccaggctggtagaa

SEQ ID NO: 125661 - DNA, 597 bp, Homo sapiens
cccttatgtatatatggcttctaggagaagattcaagctactcttagttgtttcataggaagctaagggcctttcagtgacccacaattatatttgtaaaagaacaaatgttaatactcagaaaaaaattattttttggagtcctatttgcacagggacttagaaaaatgaccaaggatacatgtggtgaaacatgacaaggaaatatgtgttaaaatattaagaactyttttttcctgaatgtctatttattctgattttgagataaaatacagtgtatacaacattagtgcctgaactaatattttcttttaaaggaaatggcttatatatctttagcactctataattttcaaagtttattgcatattattttctcatttaatagtcacaaaatttctctaagacggaccttttatttgaacagatacttcttctcattctacagtttagaaaattgagactcagaacatttatgggaactaccaaggtcagatattttctgagaaatggagctggggacataacaggagtctccctgctctcagcactgttaatatagctattgagcaaaagaggaattaatagacattaaag

SEQ ID NO: 125662 - DNA, 585 bp, Homo sapiens
tatctgaaaacacttgagttgtcagcccttttgggtattgcctcagcaaaatcacactgtcctctcaatccccacccaatgactgatcaacggctaataaagtcttggctctttgcaactcaggtcatctctgaaagggtatttcatcttcagaactccctcgaggatggctaagcagtccattaagactgcattgcagctggtcttctccctgcccatttgtttccctctctcccttccataggtgttgatcccaagaatactccttaataaacttcctgcacagcaatcttcacctagtctgcttcctggggaacccaaactgggttacacgttctgcccaaaggcagccattgctaacagggatgcatatgttattcctggcttccttttttttttttwaaaaaagacgtatctagaatgttttaaattaatttttctctatattctgtacactgctttgttgctacgcttttaacctgttacacatagatctctgacctgcagaatctttagcagcattcaatgtctactagatgagctgttccaaataattattattaaccttacaagtgcagtgagaca

SEQ ID NO: 125663 - DNA, 558 bp, Homo sapiens
atctcctgacctcgtgatccgctcgcctcggactcccaaagtcctgagattacaggcaagagccaccgcacccgggtccccttctgacatttcttcagatcttcctcggacacccaacgaccttaaaatccctctaaccttctttctctcaaagtttactttctataaagagctgataaactcattcatactaaagtctacagggttgtaaatcttaatctattatcgcttaaaagatgcttgtatcaatttacaccaaagggatgaagctctaattgtggggatttagtcatcagaaaatctagtaggggaaattctccctacccacaatcagagtagattctacaatagcaaaaagggttccaggctcacttaactttaggaacgctgataagaagaccgctkacagctgcggaggtactgatttggtaaagggagggaaagagattgtatacgtgagagtgaaaaaattgggtagaaaaatggaagagcatcagaaattcacttagcaacaccaaatatatttggcaccactaacctagtttctcctgtgtttgc

SEQ ID NO: 125664 - DNA, 625 bp, Homo sapiens
attgtggggatttagtcatcagaaaatctagtaggggaaattctccctacccacaatcagagtagattctacaatagcaaaaagggttccaggctcacttaactttaggaacgctgataagaagaccgcttacagctgcggaggtactgatttggtaaagggagggaaagagattgtatacgtgagagtgaaaaaattgggtagaaaaatggaagagcatcagaaattcacttagcaacaccaaatatatttggcaccactaacctagtttctcctgtgtttgcctttccaatccgttggaccttaggggatggaccgcccactttctccccagagcggctcccgggtccggttctcagtyctaatcactgccccaagcctccatgctccagggcctgtggtcacagagcaagtcccaaggagcagaagtaaagttctaagagaaatcaccatctccttgtgcagggaacactcccaagcccagtgtccacagacaaatcacctccagcgactcgaagaggagaataatccctgtgggggcactggaggctccgcgtgaaagtttccaaagccatgttctgccccaggactcctttctctcctcccagaagcttcaggctttcgc

SEQ ID NO: 125665 - DNA, 633 bp, Homo sapiens
acgtcttcattagggaattcactagaatcggccgaattcacacacttatcgccccacatgcgtcccctgtccctgtcgggagaattttcagctctactcccgtgggtatattcacgagaaccttacattctgctccaccgtactcrcgttgccctgccacggatatccaggaagcactccacctgcctctcggaaactttgtgccctttgacccacatctcgcattggcatcttttccctgcccctaccccggccccaggcccggccaaccacctttctcctctctactttcgcgatcctcaccgctttccatcccacatcccaaggagatcacgcaatacgggtcggatgggcctggctgatttcactgggcaccatgacttttgggtccgtgcatgacgtcccagatgaccggctctcctttcctttccctgatgtgtttcttctgcgaaccccactcctttgtccttctctagtcatctactgatgggcacttaggtcgattccacgtcttggttacaggtagcgtgccgacaaccaacgcagcaggacacatatttgcaccacatcccgatttcgtgtccttaggcgatacgtccagaagtgggatgactggacgtatcccactggact

SEQ ID NO: 125666 - DNA, 633 bp, Homo sapiens
acgtcttcattagggaattcactagaatcggccgaattcacacacttatcgccccacatgcgtcccctgtccctgtcgggagaattttcagctctactcccgtgggtatattcacgagaaccttacattctgctccaccgtactcacgttgccctgccacggatatccaggaagcactccacctgcctctcggaaactttgtgccctttgacccacatctcgcattggcatcttttccctgcccctaccccggccccaggcccggccaaccacctttctcctctctactttcgcgatcctcaccgctttccatcccacatcccaaggagatcacgcaatacgggtcggatgggcctggctgatttcactgggcaccatgacttttgggtccrtgcatgacgtcccagatgaccggctctcctttcctttccctgatgtgtttcttctgcgaaccccactcctttgtccttctctagtcatctactgatgggcacttaggtcgattccacgtcttggttacaggtagcgtgccgacaaccaacgcagcaggacacatatttgcaccacatcccgatttcgtgtccttaggcgatacgtccagaagtgggatgactggacgtatcccactggact

SEQ ID NO: 125667 - DNA, 633 bp, Homo sapiens
acgtcttcattagggaattcactagaatcggccgaattcacacacttatcgccccacatgcgtcccctgtccctgtcgggagaattttcagctctactcccgtgggtatattcacgagaaccttacattctgctccaccgtactcacgttgccctgccacggatatccaggaagcactccacctgcctctcggaaactttgtgccctttgacccacatctcgcattggcatcttttccctgcccctaccccggccccaggcccggccaaccacctttctcctctctactttcgcgatcctcaccgctttccatcccacatcccaaggagatcacgcaatacgggtcggatgggcctggctgatttcactgggcaccatgacttttgggtccgtgcatgacgtcccagatgaccggctctcctttcctttccctgatgtgtttcttctgcgaaccccactcctttgtccttctctagtcatctrctgatgggcacttaggtcgattccacgtcttggttacaggtagcgtgccgacaaccaacgcagcaggacacatatttgcaccacatcccgatttcgtgtccttaggcgatacgtccagaagtgggatgactggacgtatcccactggact

SEQ ID NO: 125668 - DNA, 633 bp, Homo sapiens
acgtcttcattagggaattcactagaatcggccgaattcacacacttatcgccccacatgcgtcccctgtccctgtcgggagaattttcagctctactcccgtgggtatattcacgagaaccttacattctgctccaccgtactcacgttgccctgccacggatatccaggaagcactccacctgcctctcggaaactttgtgccctttgacccacatctcgcattggcatcttttccctgcccctaccccggccccaggcccggccaaccacctttctcctctctactttcgcgatcctcaccgctttccatcccacatcccaaggagatcacgcaatacgggtcggatgggcctggctgatttcactgggcaccatgacttttgggtccgtgcatgacgtcccagatgaccggctctcctttcctttccctgatgtgtttcttctgcgaaccccactcctttgtccttctctagtcatctactgatgggcacttaggtcgattccacgtcttggttacaggyagcgtgccgacaaccaacgcagcaggacacatatttgcaccacatcccgatttcgtgtccttaggcgatacgtccagaagtgggatgactggacgtatcccactggact

SEQ ID NO: 125669 - DNA, 636 bp, Homo sapiens
gggccgcagctgctaagtggcaggtaagggactgttattctcctgtccctttcacagaggacaggaggaaagtgaggacaggtggtgtacatgcatcttttctgcagcaggcccagatcagctttgcacatggtgctgacctcaaattcagccctagaggggcctgtctctgccctgagtgagtattgaagtgcaggcttcttcccctttgttctgtccatttccaaaaatgtgaacacacacctccaacatgtttctgtgtatattattgtgtgcatagatactaccattgtgaaatattatgcagattaataatgcactatgccattgaaaatttcaaaagaaatgtgtaatraacatttaaaattaatatttttgttctcagttaagggttaagggatataatcaggttctctgcaaaatactatggtttaaaaataacaaagataatatgggtattaataacatttcctcaacaggaatgatggagaatgcttcagtttttctgtagggatttagtttttgaattgggattttgggtaagatatctttaggataaaatatgtgcacacaagaaaatagcatatttttcctaaaaatttgttttttatgcattattatatacacataaaaatg

SEQ ID NO: 125670 - DNA, 627 bp, Homo sapiens
tccctgttctcgctcaatattgggcattatttactggatcactgtactctttctgagtgaacccagagttggcctcagaatcattgtgcagcgtgcattccagaaggtactatgcatcaacttggactgtcacaggagacctatttgccattgcacacctggattttttttactcttgagccatagattaaaaatacttctggctgggcatggtggrtgcctgtaatctccagcactgtgggaggccaaggtgggtggatcacttgaggccaggagtttgagatcagactagccaacacaatgaaaccccatctctactaaaaatacaaaaaattatctgggcatgctgtaatccctgtaatcccagccactcaggaggctgaggcaagagagttgcttgcacccaggagatggaggttacagtgcactccagcctgggcagcagagtgaggctctgtctcaaaaaaaagaaatacaaaaaatgcacaaaacttctgaactattttgaaatctaagttgttacactaaaagcagagacataagtacagaaatggttttcaaaaacatcatacctttattttaatacaatattaatttacataatataaaatattataatttggcatg

SEQ ID NO: 125671 - DNA, 522 bp, Homo sapiens
cgggccccggggggcgccttcctcccggggcccgccggcggcacgcagcccagcgcctcgcagcgcgcctggctcacctggcagctggcgcacgccggggccgccctgcactgggcgctggccacgctcgacagcctgctggctgcggggccctggcccgcgggcccgccgccctttgcgcccgctcctggggggccttaggtgtgcacgggagccagcaccctcgccttggaaaagctcgaaccctctgccccagaggcgatcccgactctgcaccgcaaactctacggcgccctgcaggacggcggcctcctgccgcttggacgccagccaggagctccccggcagcagcagagcagaaagaaggatggccccgccccacttcgcctcccggcggtctccctcccgccggctcacggasatagatggctgcctagctccggaagcctagctcttgttccgggcatcctaaggaagacacggtttttcctcccggggcctcaccacatctgggactttgac

SEQ ID NO: 125672 - DNA, 522 bp, Homo sapiens
cgggccccggggggcgccttcctcccggggcccgccggcggcacgcagcccagcgcctcgcagcgcgcctggctcacctggcagctggcgcacgccggggccgccctgcactgggcgctggccacgctcgacagcctgctggctgcggggccctggcccgcgggcccgccgccctttgcgcccgctcctggggggccttaggtgtgcacgggagccagcaccctcgccttggaaaagctcgaaccctctgccccagaggcgatcccgactctgcaccgcaaactctacggcgccctgcaggacggcggcctcctgccgcttggacgccagccaggagctccccggcagcagcagagcagaaagaaggatggccccgccccacttcgcctcccggcggtctccctcccgccggctcacggacatagatggctgcctagctccggaagcctagctcttgttccggrcatcctaaggaagacacggtttttcctcccggggcctcaccacatctgggactttgac

SEQ ID NO: 125673 - DNA, 522 bp, Homo sapiens
cgggccccggggggcgccttcctcccggggcccgccggcggcacgcagcccagcgcctcgcagcgcgcctggctcacctggcagctggcgcacgccggggccgccctgcactgggcgctggccacgctcgacagcctgctggctgcggggccctggcccgcgggcccgccgccctttgcgcccgctcctggggggccttaggtgtgcacgggagccagcaccctcgccttggaaaagctcgaaccctctgccccagaggcgatcccgactctgcaccgcaaactctacggcgccctgcaggacggcggcctcctgccgcttggacgccagccaggagctccccggcagcagcagagcagaaagaaggatggccccgccccacttcgcctcccggcggtctccctcccgccggctcacggacatagatggctgcctagctccggaagcctagctcttgttccgggcatcctaaggamgacacggtttttcctcccggggcctcaccacatctgggactttgac

SEQ ID NO: 125674 - DNA, 522 bp, Homo sapiens
cgggccccggggggcgccttcctcccggggcccgccggcggcacgcagcccagcgcctcgcagcgcgcctggctcacctggcagctggcgcacgccggggccgccctgcactgggcgctggccacgctcgacagcctgctggctgcggggccctggcccgcgggcccgccgccctttgcgcccgctcctggggggccttaggtgtgcacgggagccagcaccctcgccttggaaaagctcgaaccctctgccccagaggcgatcccgactctgcaccgcaaactctacggcgccctgcaggacggcggcctcctgccgcttggacgccagccaggagctccccggcagcagcagagcagaaagaaggatggccccgccccacttcgcctcccggcggtctccctcccgccggctcacggacatagatggctgcctagctccggaagcctagctcttgttccgggcatcctaaggaagacacggtttttcctcccggggsctcaccacatctgggactttgac

SEQ ID NO: 125675 - DNA, 439 bp, Homo sapiens
aggatgcccggaacaagagctaggcttccggagctaggcagccatctatgtccgtgagccggcgggagggagaccgccgggaggcgaagtggggcggggccatccttctttctgctctgctgctgccggggagctcctggctggcgtccaagcggcaggaggccgccgtcctgcagggcgccgtagagtttgcggtgcagagtcgggatcgcctctggggcagagggttcgagcttttccaaggcgagggtgctggctcccgtgcgcacctaaggscccccaggagcgggcgcaaagggcggcgggcccgcgggccagggccccgcagccagcaggctgtcgagcgtggccagcgcccagtgcagggcggccccggcgtgcgccagctgccaggtgagccaggcgcgctgcgaggcgctgggctgcgtgccgccggcgg

SEQ ID NO: 125676 - DNA, 537 bp, Homo sapiens
ggcaggctaccttgattaggttargcgggttggaggggttccgctttctccctgggtccctgccgctctgtctccggcaagtgatgagcaattttgcggagtggcagaacagagacaaaggtagctgtgggcttcacggtaatttcaaaggaagtgccctacttcgttgcccatttcgaagtcctctctacctctgcgttggacgatttctccacttcctggtgtgcacctgcgtgtgtgcgtgcctgtgtgtgtgtgtgtgtgtgtgcgcgcgcgcgcgcgtgctggggtgtgtgcacactatgccgagagtcgggcaaatttcgagtgaagggagaccgagtcccgcaggttctcttgctcctgcagtctgcggaggaaaaactcctttctggcacggcggcaggaatccatctaccgacgttaggaaaggacagggtgtgctttcgtcccagcttagttttctatggagaaacaggcagcagaggagagtgggccagagggccacattttgcccacgaccagccaggtttgagt

SEQ ID NO: 125677 - DNA, 537 bp, Homo sapiens
ggcaggctaccttgattaggttaggcgggttggaggggttccgctttctccctgggtccctgccgctctgtctccsgcaagtgatgagcaattttgcggagtggcagaacagagacaaaggtagctgtgggcttcacggtaatttcaaaggaagtgccctacttcgttgcccatttcgaagtcctctctacctctgcgttggacgatttctccacttcctggtgtgcacctgcgtgtgtgcgtgcctgtgtgtgtgtgtgtgtgtgtgcgcgcgcgcgcgcgtgctggggtgtgtgcacactatgccgagagtcgggcaaatttcgagtgaagggagaccgagtcccgcaggttctcttgctcctgcagtctgcggaggaaaaactcctttctggcacggcggcaggaatccatctaccgacgttaggaaaggacagggtgtgctttcgtcccagcttagttttctatggagaaacaggcagcagaggagagtgggccagagggccacattttgcccacgaccagccaggtttgagt

SEQ ID NO: 125678 - DNA, 537 bp, Homo sapiens
ggcaggctaccttgattaggttaggcgggttggaggggttccgctttctccctgggtccctgccgctctgtctccggcaagtgatgagcaattttgcggagtggcagaacagagacaaaggtagctgtgggcttcacggtaatttcaaaggaagtgccctacttcgttgcccatttcgaagtcctctctacctctgcgttggacgatttctccacttcctggtgtgcacctgcgtgtgtgcgtgcctgtgtgtgtgtgtgtgtgtgtgcgcgcscgcgcgcgtgctggggtgtgtgcacactatgccgagagtcgggcaaatttcgagtgaagggagaccgagtcccgcaggttctcttgctcctgcagtctgcggaggaaaaactcctttctggcacggcggcaggaatccatctaccgacgttaggaaaggacagggtgtgctttcgtcccagcttagttttctatggagaaacaggcagcagaggagagtgggccagagggccacattttgcccacgaccagccaggtttgagt

SEQ ID NO: 125679 - DNA, 537 bp, Homo sapiens
ggcaggctaccttgattaggttaggcgggttggaggggttccgctttctccctgggtccctgccgctctgtctccggcaagtgatgagcaattttgcggagtggcagaacagagacaaaggtagctgtgggcttcacggtaatttcaaaggaagtgccctacttcgttgcccatttcgaagtcctctctacctctgcgttggacgatttctccacttcctggtgtgcacctgcgtgtgtgcgtgcctgtgtgtgtgtgtgtgtgtgtgcgcgcgcgcgcgcgtgctggggtgtgtgcacacyatgccgagagtcgggcaaatttcgagtgaagggagaccgagtcccgcaggttctcttgctcctgcagtctgcggaggaaaaactcctttctggcacggcggcaggaatccatctaccgacgttaggaaaggacagggtgtgctttcgtcccagcttagttttctatggagaaacaggcagcagaggagagtgggccagagggccacattttgcccacgaccagccaggtttgagt

SEQ ID NO: 125680 - DNA, 400 bp, Homo sapiens
gcagctggagaaagaggagggggtgggggacacctgggagcagagccattcctgccttgaagtcactctgggagcttggcccttgcaaccctcccgcagccgtctacggacgggtcatggcccactcactgtcgacctcctcttcccccgcatcttccatcgggcacagccgggaggcctctgcgtccaggcacaaacggtggagaatccccgacggctcccctcgcagtcccggcagataaaccggaaaccgatggcggaaggtcaagccacgaccagccccatccggagagcgaggccacgacaagcccgattccggcagakcacgacgcccccacgatcgcatatgatgcaggtttaggggctgggatcttggatgggtggggaggatggcgcatgg

SEQ ID NO: 125681 - DNA, 674 bp, Homo sapiens
gaatattgcaataaagtgagtcaaacaaattttctggtttctgagtgtatataatagtttatgtttgcactagagtcattaagtgtgcaatagcattatgtctaaaaaccaatgcacatgccttgatttttaaatattgtattgcagccacgaggtggctcatgcctatagtcgcagctactcaggaggctgaagtgggaggactgtttgagcccagcagtttgaggctgcattgagctatgattgtgccactgcacttcagcctgggtgacagagcgagaccctgtctctaaaaagaagaaggaggaggaggagagggacagagggagaaggaggagaagtagaaggagggggagaagaaggagaagaagaagaaaaacattgctgaaaaaggctctcactttgtgagataaakaaacaaagtgagcacatgttatcagaaaaatggccttgatagatggtccaggcagggttgccacaaacattcaatttgtaaaaagtgcaattccccaaataaataaaataaaataaagtggtgcacaataaaacaaaacatgcatgtgtttttggttcttgaatttccatttaggtccttttttattattcccagtcctctgctgaaattcttaacgatgcctttgaggatggtaaacatagttactttaaagttggtt

SEQ ID NO: 125682 - DNA, 533 bp, Homo sapiens
tgggcgtggtctgtctaggcatgattgtgttttgcataaactcttatgcatgaagtggctctatttgcaactagacaggatccaaatttcagaaacactttaacaaccgactataaagtttattaaaaaataaaaaatagaaaagtcatttcaccttttgcccgcagtaaaactctgggaatggactctcctggcctcaaagctttcttttcttctctgcagaagctgctgaagacaccctccacaggcttascctacccaggttacggcaccctgcctgctgcactcagggaactcaaggtgttgcctgttcaacgtttgagcagaaccagagtcatggcttacgctagctgtgactttgtaccccagttctggtctctgagtccctgcctggggtatccatgcagtacccaggcctgctgcttccttgtgggctaacctggggaggctggctgcctgccaccatcatgctgccatgctcagaacctgctcaggctcgtctctggaaagctccttcacagccattgcccatc

SEQ ID NO: 125683 - DNA, 539 bp, Homo sapiens
tggttaatggagataagcttaaggaagatgactaagatcaacctaaaaatcctatcacctaaaaataaccatggctatcatttcatagatgtatttgcaaacctttaaacatcacacaatgggttcattacagaatactktataacctacattttttttactgttaagtaaatggtaaaattgaacaagagtcattgtcaatactcttccatgctggtaaatattgatcaacactatttacacatgatattcacaaacacatcatggtctgcataactaggtctccaatactgggcatttatgttgtttttgcacttgctgtcaagtgtaatttaaaataatcattcccattgatagttactcttaattttcttagaataagtttttagaattggaataaattagcaaaactatgaagactttttcagactcttcagcaagactgcattttgggagcaataaaaattactccacttaagaaattaattatggtagaggggatttcttttgtttgagagcaaaagtgaatacaaagttaa

SEQ ID NO: 125684 - DNA, 539 bp, Homo sapiens
tggttaatggagataagcttaaggaagatgactaagatcaacctaaaaatcctatcacctaaaaataaccatggctatcatttcatagatgtatttgcaaacctttaaacatcacacaatgggttcattacagaatactttataacctacattttttttactgttaagtaaatggtaaaattgaacaagagtcattgtcaatactcttccrtgctggtaaatattgatcaacactatttacacatgatattcacaaacacatcatggtctgcataactaggtctccaatactgggcatttatgttgtttttgcacttgctgtcaagtgtaatttaaaataatcattcccattgatagttactcttaattttcttagaataagtttttagaattggaataaattagcaaaactatgaagactttttcagactcttcagcaagactgcattttgggagcaataaaaattactccacttaagaaattaattatggtagaggggatttcttttgtttgagagcaaaagtgaatacaaagttaa

SEQ ID NO: 125685 - DNA, 539 bp, Homo sapiens
tggttaatggagataagcttaaggaagatgactaagatcaacctaaaaatcctatcacctaaaaataaccatggctatcatttcatagatgtatttgcaaacctttaaacatcacacaatgggttcattacagaatactttataacctacattttttttactgttaagtaaatggtaaaattgaacaagagtcattgtcaatactcttccatgctggtaaatattgatcaacactatttacacatgatattcacaaacacatcatggtctgcataactaggtctccaatactgggcatttatgttgtttttgcacttgctgtcaagtgtaatttaaaataatcattcccattgatagttaytcttaattttcttagaataagtttttagaattggaataaattagcaaaactatgaagactttttcagactcttcagcaagactgcattttgggagcaataaaaattactccacttaagaaattaattatggtagaggggatttcttttgtttgagagcaaaagtgaatacaaagttaa

SEQ ID NO: 125686 - DNA, 539 bp, Homo sapiens
tggttaatggagataagcttaaggaagatgactaagatcaacctaaaaatcctatcacctaaaaataaccatggctatcatttcatagatgtatttgcaaacctttaaacatcacacaatgggttcattacagaatactttataacctacattttttttactgttaagtaaatggtaaaattgaacaagagtcattgtcaatactcttccatgctggtaaatattgatcaacactatttacacatgatattcacaaacacatcatggtctgcataactaggtctccaatactgggcatttatgttgtttttgcacttgctgtcaagtgtaatttaaaataatcattcccattgatagttactcttaattttcttagaataagtttttagaattggaataaattagcaaaactatgaagactttttcagactcttcagcaagactgcattttgggagcaataaaaattactccacttaagaaattaattatggtagaggggatttctttygtttgagagcaaaagtgaatacaaagttaa

SEQ ID NO: 125687 - DNA, 489 bp, Homo sapiens
atattttcaacttacaatgggtttattgggaacatgaccccatcataaattgaggagcatctgtatgtggcacatgtgtgtaatgtccctaatgacttcccacctattttgtccctaataagaccatattctactatccattgctctagacccctgtgggtcaggacatcttagtgattattcygacattccaattttgttggccatgatggtagtcacatctactttgcctctgatggttaactaacacaatctaccctctgttattcccttattgtcctttcattctcattgacactatggaatctagttcaatcagcatttcctacctcagaccaaggcaataaaggacagccacaattgggcctctcaataatgatagtacggcccacccaatcaccagcacatttcttgtaactttaatgaaataagtgtcttctgcgacctcttgaaaaacatacacagtttctgagtttcaggattatgtaa

SEQ ID NO: 125688 - DNA, 579 bp, Homo sapiens
gtgggaattgaaccatgagagcacatggacacaggaaggggaacatcacacaccggggcctgttgtggggtcggggtagaggggagggatagcattaggagatatacataatgctaaatgacgagttaatgggtgcagcacatcaacatggcacatgtatacatatgtaactaacctgcacattgtgcacatgtatcctaaaacttaaagtataataataaaaaaaaaaatagtttcctataattctttaaaagtggcaacaatggctactttggaatttttgtttattaagtccagcctttgggccstctcccaggaagtttctgtttattgcttcttttcctgtgtaagggtcacactttctagtttatttgcatgtatcatgtgttttttctttaaaagtgggtatatttagagattagaatgtagcaactctgtggtaatgatactcctctcccctttaaggtgtgctggtggcttgttatttggttggactatttagatagactatattagtaaagtctatttctcctgaaatgggatgtctctgatgtcactcctcaggggactcaaccctgg

SEQ ID NO: 125689 - DNA, 556 bp, Homo sapiens
cattttataattttgtttttaaaatagagtacaccatataggcaaactgggattgaacatataattgaatatayggcagatggtgagagcctgatttctcaatattggagtaagaaatgatagctaagcaaggaaggctagaataaaccatgtgatactaaattagagttaaggacatcagtataaactaatggttagcttatacagaaaaagatggatacatattgaaataattatggatatacactgattagtatatgcacatatatttctaatctctgtccactgagaaagcttagaagcaatgacattccactagcaatgagcacaaccaacacacttggtttacaacacaatttttcaataacagaagccaaggctcactagagcaatgagttaatctaggttcaggacagagactatacaagataagtctgaagcatcttgtatgaccagaaagccagggagtgctctgaaaaggaagtggtggtgttattggggaagagacacaagagccaactgaaagagttcccaaggctggaaaaatatgagcaac

SEQ ID NO: 125690 - DNA, 556 bp, Homo sapiens
cattttataattttgtttttaaaatagagtacaccatataggcaaactgggattgaacatataattgaatatacggcagatggtgagagcctgatttctcaatattggagtaagaaatgrtagctaagcaaggaaggctagaataaaccatgtgatactaaattagagttaaggacatcagtataaactaatggttagcttatacagaaaaagatggatacatattgaaataattatggatatacactgattagtatatgcacatatatttctaatctctgtccactgagaaagcttagaagcaatgacattccactagcaatgagcacaaccaacacacttggtttacaacacaatttttcaataacagaagccaaggctcactagagcaatgagttaatctaggttcaggacagagactatacaagataagtctgaagcatcttgtatgaccagaaagccagggagtgctctgaaaaggaagtggtggtgttattggggaagagacacaagagccaactgaaagagttcccaaggctggaaaaatatgagcaac

SEQ ID NO: 125691 - DNA, 556 bp, Homo sapiens
cattttataattttgtttttaaaatagagtacaccatataggcaaactgggattgaacatataattgaatatacggcagatggtgagagcctgatttctcaatattggagtaagaaatgatagctaagcaaggaaggctagaataaaccatgtgatactaaattagagttaaggacatcagtataaactaatggttagcttatacagaaaaagatggatacatattgaaataattatggatatacactgattagtatatgcacatatatttctaatctctgtccactgagaaagcttagaagcaatgacattccactagcaatgagcacaaccaacacacttggtttacaacacaatttttcaataacagaagccaaggctcactagagcaatgagttaatctaggttcaggacagagactatacaagataagtctgaagcatcttgtatgaccagaaagccagggagtgctcwgaaaaggaagtggtggtgttattggggaagagacacaagagccaactgaaagagttcccaaggctggaaaaatatgagcaac

SEQ ID NO: 125692 - DNA, 562 bp, Homo sapiens
  misc_feature (1)...(562): n = A,T,C or G
gaactttccatagttccaacattagttgctacttgaaacaaacaaaaacacacacacacatacaacgaaacaataatctttggtgaggtcttgctgatacctaactgaggctagagtgagagctaagtggtgatacaggccaggtgyaaactgagtgcagctaagtggataatctctggtagtgaactacagtctagaagaagatagtaataatagattgaaaagaaagtctcctgaaatgaactagctggcctgtggtgtaggacacaggacccagccccaccttatggctctaaagcccttgctcaaagccactgcagatgagttagctaggtctctaccacctcccataatactcctctgnagagaaataaaggtctttcacaccctgcccaggaaagggatttgcttagcctcaaatgtgcacattcagaaatagcttgtcataagaaagagaggatagtttgcagagaaataacccttgtaagtccacatcctattccttttaaataagagagtggtgccaagggaagagcccttagaatgtcaaagccaacagggt

SEQ ID NO: 125693 - DNA, 498 bp, Homo sapiens
gggtgtagagagacaggacaaagtacagattagggcttgaagtgcccctgaccagtcgacagcaaccacatggaataatgactcatgtgcattaatgatcacactaaatgatatttgttttttacctagtccttcaactgacagcttaaagaacttcaggttgttctgattcttgagtctcctctacagcttcagaraggactttcattttattttggatcaaatgctccacaactagttgaaactggaattaaattttatatgaagttcctagatgatttaaagctgtaagaagaagaataatgaatcataagaaaacttgctgctacagatatcaaaaaggaatgttaccatccctcatgctaatccttttcattttaaataaacaggatctaaaaaaaataatgctgggaagtcctaaccacatcaagaatgcctcagatcagtgacccaaggaaccttccagaatggatgaaatagacccaaagctgaattcac

SEQ ID NO: 125694 - DNA, 394 bp, Homo sapiens
attcatggccatgatattcttctccattattcaagttttcttatctatctttcaaaaaaggacataagacactagcatatttcttgttaggcttttcctaggtaatttttaattgctattataaatagtatccrtttttcccataaaatatttctatatgtttgtatattaatcttgtactgttacctttttcaactctattggttctgataacttgtcagttgtctacctttcatcttctaggtaaatatttcttacaaataatgagatttgctcttactttccaatttatctcattacttttacttgtcttactgcactggctaggacacccaagaatactattgaatagaagttgtagagggtatccttgtttgatccctgaaaagaattc

SEQ ID NO: 125695 - DNA, 522 bp, Homo sapiens
ctactaattaataatacaaccaaaaattaaatttagagtaagctttctgacagccacagcaaaaggaaaaacaggttacttgcattatttgataaaagatatatacyattttttgttattatcatttttgatgaaaacaagctatttggaaaatattacttgtgttcttatatgagagaaactccccttaaatgatattacttagctttttcaggccttactaagcagtttggatgctttcttctaagcaatgtacatctcgtaaaaatgtactttaattctcacggcaactatgtgaggtaggtaacatatcagctattttatgaaggaagaaatcagggacagaaaactcatgtaactttccctagcccatacagctggtcggtagcagacccagcattcaaacccaggaattctggctctaaaacatgtgtttcacaacatgccatgaactcaatatttattttcagctgtttttaagtgatatgatagcacattaatccagactttcattctatttct

SEQ ID NO: 125696 - DNA, 519 bp, Homo sapiens
tgaattctactaatcatttacaggaaaactaacaccaattcttctcaaaccacttcaaaatcttcctagtttgttctataaggtcagcattatcctgatatcaagactagaaaggggatgacaacaacaaactacaggccaataaccctgatgaacgcaaatgcaaaaactctccacaaaatactagcaaactgaatccagtaacaccacaaaaagttaacaccccaggataaagtaggacttctccctgggatgcaaggatggttcaacatatgtaaatcaataaacatcatacatctcatcaacagaatgaagggaaaaacacatacaactatctcaacagatgcagaaaagcatctgataagattcatgagaaaaactctcaacaaatcaagcacacraggaacatccctcaacataataaaggtcacataagcaaagccacagctaacatcatactgaatagcgaaaagcggaaagcctttcctctaagaactggaacaagacaaagatactcac

SEQ ID NO: 125697 - DNA, 615 bp, Homo sapiens
tttattttaacaatcttatgaggatctactgttagctctgttttaccctggaggaaacagagtggttaagtactttgtctagagaaacatgcctggtaactgttgaagccaggatgtgcaaccaggcagtaaaccatgaagtgacaggcaatcctgcttccctctgaatgctacaggctgtgccagagacttgaggtgtatgcaatgggtaaaccattagtgcattcaattcaatctagaagtttttcccttcatgaatggaaataaggattatagagaagggacatgtttgggtaaccatctcttgtactctgaaagcatcctctgtatttatcgaaaatgacacatcacaatactagatgattacatgtttactttactgtgtcttctttactttctccaccacattcaccacttccctggctgcatctccttgatggtagggactctgccttttttgctgttggatccacagctcctggtgggtggagtgattgctacctccaggcatgatctttgtcacctgcaagaccagawaagagttcagaaaaaaacagtacaggcaggagatgatgaggcttaaaccacagtcctagcaaaggggaagagaactag

SEQ ID NO: 125698 - DNA, 537 bp, Homo sapiens
ttttcagatgaaagtgagtgccttcactttatgcatttgtgtgtgtgcaaccctcaaggaaagtcacccaaatcccaagatgggtgtgtcttccccttactgacagaattcagccaaaaacattcccttctgatcctgtcctaccatttccactgagcaagagtgactgactcttcctgttatccatcctcattcttgctttttcaacctaggaagtggagttgaaccagcacttctagggaaggttttttgtttgtagcaattacttcagccccttagaatgactttcctagatggcagtcttgacttttctggtcactcgaattgaaattttcaattcctcttcctgaaacctcaaatcagtcatcactgctgcattttyatttagtagactttatcactttctggcatgctacagattttatgtatgtatgtacccctatttccctccctggaatgaaagaaagccccacaaagggaggtttgttgctgctgtgttgttttgtttctgtttttcttgctgtgtccctaacatcc

SEQ ID NO: 125699 - DNA, 610 bp, Homo sapiens
attgttaactcttgtcatcctattgtgctaccaacactaggtactccttttatttaactttatttttgtacccattaactacacctatttatccccctcttcccaatattcttcccagcctatattaatcttcattttactctctgtatctatgaattcaatttktttttaactcccatatgtgagtgagaacatgcagtatctgtctttctgtgcctggcttattttacttaacataatgtcctccagttccatccatattgctgaaatgacaggagttcattctttttaatggctgaatagtgttccattgtgtacatgtgccatattttcttcacccattcatccattgatggacacttaggtttattgcatatcttagttattgtgaatagtactgcagtaactatgggagttcaggtatttctccaaaataatgatttcctttcttttggatatatttccagaaaactatggaaagactaaggagagtgagaactctagtgaccagtatatttaagttaattaacccacccaagattacttataagttagtgtttatttgttattgctgttcacaatacagtaacaactagtattttaaaagaaa

SEQ ID NO: 125700 - DNA, 565 bp, Homo sapiens
tgatttaaatttggtaataaagtagtaagacactcaaaacaaatatgctatatgagctttgaacttgagaaagaggatttagggtatctggtggaagaatattctaagcagcaaagcattcaaaaagaagcagagcataaaggtttggaaaatttgcagcctaatgatgcaataaaaaagaaaaacccatttttggaggagaaattcaagatggctgcagaaatttgcataagtaacaaggagccaaatgttaatcaccaacacaatttggaaaatgtctccagggcatgtcagagacttcacagcatcccttcccatcacaggcctggaggccgagaagggaaaaatggttttgtgggccrggcccaaggccctgctgctttgtgcaccctcaggacgtgaggtcctgtgtcccagccatggctaaaagaggccaacatagagctcaggtggttgctttagatggtgccagccccaagctttggtggcttccacatgatgctgagcctacggatgcacagaagtcaagaattggggtttgggaacttctgcctagatttcagag

SEQ ID NO: 125701 - DNA, 547 bp, Homo sapiens
cattatttttcctccttttaagataatgcctgtttttgttgttcttggtgctcctaatatttctctgtctttgaattttaaaggtkatttcttcatatttattcttcttgaggcttgctgcatttcttgaatttgtgggttgatgtcttcattagttttagaaaatgttcatttattacctcttcaaatattgattctgcctcatatctgtctcttttctccttctaaggctctaattatgtagacattttagcatgctccatttgtttctaagcttctttcctgaattttatattcttttatgtctttgatcatcagcttttgatctacaattcagattatcagttcacctttcagctgtgtctaatgaagtctgtattttgagattttagttttagttctggtattatcagtatgacaattttaaattgattcctttttaaatattttagttcctggtgaacttctccatttcccttttatcctcttgagtgtattaatcacagtttaagctcatgtctgataattccaatatctggaaaacctg

SEQ ID NO: 125702 - DNA, 547 bp, Homo sapiens
cattatttttcctccttttaagataatgcctgtttttgttgttcttggtgctcctaatatttctctgtctttgaattttaaaggttatttcttcatatttattcttcttgaggcttgctgcatttcttgaatttgtgggttgatgtcttcattagttttagaaaatgttcatttattacctcttcaaatattgattctgcctcatatctgtctcttttctccttctaaggctctaattatgtagacattttagcatgctccatttgtttctaagcttctttcctgaattttatattcttttatgtctttgatcatcagcttttgatcwacaattcagattatcagttcacctttcagctgtgtctaatgaagtctgtattttgagattttagttttagttctggtattatcagtatgacaattttaaattgattcctttttaaatattttagttcctggtgaacttctccatttcccttttatcctcttgagtgtattaatcacagtttaagctcatgtctgataattccaatatctggaaaacctg

SEQ ID NO: 125703 - DNA, 547 bp, Homo sapiens
cattatttttcctccttttaagataatgcctgtttttgttgttcttggtgctcctaatatttctctgtctttgaattttaaaggttatttcttcatatttattcttcttgaggcttgctgcatttcttgaatttgtgggttgatgtcttcattagttttagaaaatgttcatttattacctcttcaaatattgattctgcctcatatctgtctcttttctccttctaaggctctaattatgtagacattttagcatgctccatttgtttctaagcttctttcctgaattttatattcttttatgtctttgatcatcagcttttgatctacaattcagattatcagttcacctttcagctgtgtctaatgaagtctgtattttgagattttagttttagttctggtattatcagtatkacaattttaaattgattcctttttaaatattttagttcctggtgaacttctccatttcccttttatcctcttgagtgtattaatcacagtttaagctcatgtctgataattccaatatctggaaaacctg

SEQ ID NO: 125704 - DNA, 616 bp, Homo sapiens
ctttttcctccaggggagaaagtgttcttcctattaaagcccactctctccatagggctcctttcagaaatcctatggtatcaactatggaggttttctcatgtattttcaacttccccctacaaataggattaaattattctcatcagcatgaaaatatgtaccggttttttccgtaaaaccacaataaaaaaatgtctgtttggacataacttctgtttccttctttcataaccaagtttctgaagtctgtttyataaatgctacctatgcttgatttctcattcacgtagccacttactggaataagttctctagtgctaccattcaacaaaatctaaagtcaacagtgatatctctgttgctatatctaatgaacaacttttcttcctcattttacttgtcatcagcattataaagcgcttcccacttcctatttggagaaacattctcttcttttgtctcccatgatgtatgatcttggcattcctcccatctctcaaatagctccttggggtttttttggccagctctttttccccctctcgatcttagaaagttaccgtttcttagaattgttcctgaactccagtgtcttttcttggtagaccacctt

SEQ ID NO: 125705 - DNA, 616 bp, Homo sapiens
ctttttcctccaggggagaaagtgttcttcctattaaagcccactctctccatagggctcctttcagaaatcctatggtatcaactatggaggttttctcatgtattttcaacttccccctacaaataggattaaattattctcatcagcatgaaaatatgtaccggttttttccgtaaaaccacaataaaaaaatgtctgtttggacataacttctgtttccttctttcataaccaagtttctgaagtctgttttataaatgctacctatgcttgatttctcattcacgtagccacttactggaataagttctctagtgctacyattcaacaaaatctaaagtcaacagtgatatctctgttgctatatctaatgaacaacttttcttcctcattttacttgtcatcagcattataaagcgcttcccacttcctatttggagaaacattctcttcttttgtctcccatgatgtatgatcttggcattcctcccatctctcaaatagctccttggggtttttttggccagctctttttccccctctcgatcttagaaagttaccgtttcttagaattgttcctgaactccagtgtcttttcttggtagaccacctt

SEQ ID NO: 125706 - DNA, 616 bp, Homo sapiens
ctttttcctccaggggagaaagtgttcttcctattaaagcccactctctccatagggctcctttcagaaatcctatggtatcaactatggaggttttctcatgtattttcaacttccccctacaaataggattaaattattctcatcagcatgaaaatatgtaccggttttttccgtaaaaccacaataaaaaaatgtctgtttggacataacttctgtttccttctttcataaccaagtttctgaagtctgttttataaatgctacctatgcttgatttctcattcacgtagccacttactggaataagttctctagtgctaccattcaacaaaatctaaagtcaacagtgatatctctgttgctatatctaatgaacaacttttcttcctcattttacttgtcatcagcattataaagmgcttcccacttcctatttggagaaacattctcttcttttgtctcccatgatgtatgatcttggcattcctcccatctctcaaatagctccttggggtttttttggccagctctttttccccctctcgatcttagaaagttaccgtttcttagaattgttcctgaactccagtgtcttttcttggtagaccacctt

SEQ ID NO: 125707 - DNA, 539 bp, Homo sapiens
aacttataagtattaaaaatacatctaaagtagattctagaggcatgtgtaggcaaacattatgaatgagtttacacagagcaagtgtgtagtgtttcatcttattgaatgaactcagccagcctaactaaatggtgtcccataagaaccttgtaaacccagttcctccgtgggtggtggcctcctgttctcttactagactccagtgcagcatgattcttgacaccatctaccccatgtccctcagctaaattgcagcagatgtggccctaatctcttccatgtgaagggaaatatcatttrtaagtgtattggggacttcttcatcttatgcaacagcagctggaaactttaattttctccacacaaaatgcatgcaatatgggtgtgaaattacagaaggttgtataagtccctagttctggcacctcattaaacactttgcaatgcattctccatttaaaataaaattttaaaaagtagcctacacacatgagcttgaatgtatgtgtggttgaccctaaaatattatgatgagt

SEQ ID NO: 125708 - DNA, 539 bp, Homo sapiens
aacttataagtattaaaaatacatctaaagtagattctagaggcatgtgtaggcaaacattatgaatgagtttacacagagcaagtgtgtagtgtttcatcttattgaatgaactcagccagcctaactaaatggtgtcccataagaaccttgtaaacccagttcctccgtgggtggtggcctcctgttctcttactagactccagtgcagcatgattcttgacaccatctaccccatgtccctcagctaaattgcagcagatgtggccctaatctcttccatgtgaagggaaatatcatttataagtgtattggggacttcttcatcttatgcaacagcagctggaaactttaattttctccacacaaaatgcaygcaatatgggtgtgaaattacagaaggttgtataagtccctagttctggcacctcattaaacactttgcaatgcattctccatttaaaataaaattttaaaaagtagcctacacacatgagcttgaatgtatgtgtggttgaccctaaaatattatgatgagt

SEQ ID NO: 125709 - DNA, 539 bp, Homo sapiens
aacttataagtattaaaaatacatctaaagtagattctagaggcatgtgtaggcaaacattatgaatgagtttacacagagcaagtgtgtagtgtttcatcttattgaatgaactcagccagcctaactaaatggtgtcccataagaaccttgtaaacccagttcctccgtgggtggtggcctcctgttctcttactagactccagtgcagcatgattcttgacaccatctaccccatgtccctcagctaaattgcagcagatgtggccctaatctcttccatgtgaagggaaatatcatttataagtgtattggggacttcttcatcttatgcaacagcagctggaaactttaattttctccacacaaaatgcatgcaatatgggtgtgaaattacagaaggttgtataagtccctagttctggcacctcattaaacactttgcaatgcattctccatttaaaataaaattttaaaaagtagcctacacacatgagcttgaatgtatgtgtggttgaycctaaaatattatgatgagt

SEQ ID NO: 125710 - DNA, 562 bp, Homo sapiens
taaaccctgggaaaggtgtgttaaatggttaaaaccaaaaggactattacaaagagtttttcagtacaacaaacaacaaacctacttcttccttagaatagaacctttttcttcagcccagagcaaatgtttcagctgaattactttctggactttataaggtgttgacacaacttctacgtgcacatcgtaaatgtgccaccctaataatccgtgtttaattactgtttattgtaaatgaattttctcagcaatccaatgtggtgcttttcatttttctgtcagtgaggtttcctctctcagaacctttgcccccagctaccaacgatatgaccatccaaagtatgcacccatccagagactgagggggaaccrcacctggaatgctggaggcaacatctttgttgaaattcaagtacataaaaactaaatcagccttttaaaataataggaaaagctactgtgccttcagagcaaatgttttctaaagatgggattatacactcatgagttaacaccactcccattcagaccaaaacaccctttccttggaagactgaca

SEQ ID NO: 125711 - DNA, 601 bp, Homo sapiens
gagtgaaccccttagttcactcagcatctagtaagcatttactgtgttcagttacccaccacaaagaagtataaagctggctgttgtcctcaggtattttatagacactagtatccacttttgcatgaatgataccaggcattggtattgtaatgtttatgctaaacccctatttcagccttaacttacatttctaagtaaaaaacctgaaattacttataacagcaacaaaactataactaaaatgggaataacagtaaaaataaatagtgtttagcacttaccaataaatatttagcaaccatgtaagtgtttttttaatatcaggtagtttcatattattccattttatagctcaggaaactcaaccctagagaaattatataactcacctagagagacacaggtagtgcacagcagagctgaaatgttagtctttgtcaggtgggctcagggccagaatgattggtctggctgtgtgatcttggggaaattgattgattggttgatttatgagaccgagtctagctctgctgcacaggctggartgcggtcgcataatcttggctcactgtgacctccgcctcccaggctcaagcga

SEQ ID NO: 125712 - DNA, 614 bp, Homo sapiens
ataaagtgatacagcttcctaatccactgaaaatacaaaccaagactggcaatacacgtcagatatgttctgtactgcatcaatacatcgatacgtcacttttcagttgaaattacaatttttgacagcctacattcttcctacagagaaaataattctatagccttttaatatttttatagtttctgcagcattgcaagctcaaatcagaataacttaagtagtttaatgttgcttaagacgactttttcagcagaagtaaatttctgtacacaaatctgaatttawtccatatgagcacggtgtgcgactaggtcagttcaggtgttgtcaatgcaaagaatgaaagctggtttcaagatttagtgtctctagaaatctttttagaaaatattcattaaacaaatgaaattttaaaaaacaattcttctcacttattatatgcatattagtcacctggggatatttaaaatgcaggatctgatttagtagttcagagacaggaactgtgattagggggctaaaccatctggtgttgtctcaaactgaagagtttcctgggacaaaggacttttcttgctaaaactgggtatattcttagcaaaccaccaccg

SEQ ID NO: 125713 - DNA, 532 bp, Homo sapiens
aaactgtaagcattgcctttctcttgaaaataactccttagtgtatctgttggttttacaaatattcttcttaatctgccattgcacaacaaactatcgcgagactcatgtttaaaataacaacattaatttatgttgctgccgaataaattacttcgccttctcttggtggggacagttcatgtgcattctacaggatgttggcaagggcaggcrgctcacatggatgaaggatccacagccaggatgactccttcacatggctgcaagttggtgctgtacttgtgatcctccacatgtgggcctctacccaagccttccttattttcaagagaaaggcagtgcttacagtgttgtggccaagaatgagggaatttattacctttgtcatctcttctgcccctgtaaatatccagagtcccatggtagaacctgaaaaccttgattctgaacctgaaacaaatacttgattttataatttatgtgtatatttaacatatagacttgtatatgagaattgggagagagagag

SEQ ID NO: 125714 - DNA, 593 bp, Homo sapiens
tatgccaacctactcaaaagttcagactcagcactcaacacattagtgccatgcattgttcttcctccacttaaggaactgtcatcaacaatgcctttcacttttccaggtagcatattcactgaagcaagacagtgcaaaragaaaccaacacaaaaaaagaataaaaaaaagaaagaaatctcagcaaatttaagatcatgcacttgataaaactgttttcttagctagacacagtgtgaaattcttttcacggttttcagtctaagtaatttgatcagatcactattccgcttcagcatgtcacccagtactgctcacttactctgagtgcctccttgaacatgtttcctctcattcaagttcctttccactgatggaacaagaagattaacaggattaggtatctcttattttttcttattcagactgggaaaattgtgtctgattttttaaatgttttattttattggtctacttttgacaggttcaagattttccctacccactcctatccctttgtaaaagtctacataatttaaaaagattatcttctaaactttctttgctgttaaacttgctcaagaaaatac

SEQ ID NO: 125715 - DNA, 593 bp, Homo sapiens
tatgccaacctactcaaaagttcagactcagcactcaacacattagtgccatgcattgttcttcctccacttaaggaactgtcatcaacaatgcctttcacttttccaggtagcatattcactgaagcaagacagtgcaaaaagaaaccaacacaaaaaaagaawaaaaaaaagaaagaaatctcagcaaatttaagatcatgcacttgataaaactgttttcttagctagacacagtgtgaaattcttttcacggttttcagtctaagtaatttgatcagatcactattccgcttcagcatgtcacccagtactgctcacttactctgagtgcctccttgaacatgtttcctctcattcaagttcctttccactgatggaacaagaagattaacaggattaggtatctcttattttttcttattcagactgggaaaattgtgtctgattttttaaatgttttattttattggtctacttttgacaggttcaagattttccctacccactcctatccctttgtaaaagtctacataatttaaaaagattatcttctaaactttctttgctgttaaacttgctcaagaaaatac

SEQ ID NO: 125716 - DNA, 593 bp, Homo sapiens
tatgccaacctactcaaaagttcagactcagcactcaacacattagtgccatgcattgttcttcctccacttaaggaactgtcatcaacaatgcctttcacttttccaggtagcatattcactgaagcaagacagtgcaaaaagaaaccaacacaaaaaaagaataaaaaaaagaaagaaatctcagcamatttaagatcatgcacttgataaaactgttttcttagctagacacagtgtgaaattcttttcacggttttcagtctaagtaatttgatcagatcactattccgcttcagcatgtcacccagtactgctcacttactctgagtgcctccttgaacatgtttcctctcattcaagttcctttccactgatggaacaagaagattaacaggattaggtatctcttattttttcttattcagactgggaaaattgtgtctgattttttaaatgttttattttattggtctacttttgacaggttcaagattttccctacccactcctatccctttgtaaaagtctacataatttaaaaagattatcttctaaactttctttgctgttaaacttgctcaagaaaatac

SEQ ID NO: 125717 - DNA, 615 bp, Homo sapiens
aattttaaaaggtcatagaattgagactatgtgctgaaatgtaccatgcaccttagcaagaggagtataagcattaagaggaactacatcttgtttgccagggaatggaataaagtctttcaagaagagattcctcccacttgcgtcagacagctcaggagagattcccaaaggccaagaaagataacggtgagtaatccatttttacttctaccaaagaaagcaagagaaagaattaatacatttgaatatagataaatgtttgtactaaaatccagattyctcaaaaacaaaaaaatttaaaacatttcacagcatcattcaacaatataatccttaacttcaaaacccctcaagccagaaaaggagacttctgaatatatcgtaacctaccagctctgaaaatagatatccattaacttggctgttaagtatgccaccagtgcatccagcatctatcaggtggtttcttctaggccaaagcagaccattcccaaaatagtccatgccagcaagtgtgtctatgggctctcagatccaggtgatctaagatgtgttggagctaaatcgtaagacagtcaaggaagaatttttaagaacaaggacagcaaagag

SEQ ID NO: 125718 - DNA, 481 bp, Homo sapiens
gacaaattcactattatacttggagacttaaacactcctctatcagtaattgacagacatggcaagcataaagtaktaagaatttagttaactacatatcattatcagtcaactagttctaactgacatgtataggacagttgttgacttcatacaagaagagcataatacacattcttcttaagctcacatggaacacttaacaaaatataccacatgctgagccataagacacaccttaacaaatttaaaagaataaaaatcatgtaaagtattctttcacatcacaatgacattaaatagaaatcaataacagaaaaacagaaggaaaataacaaattatttagaaattataccacacacttataaataatgcatgggccaaacaatgagtctcaagataaatttaaaactattttgaattaaatgaaaacaaaaatacaactcagtatttgtgggattcagtgactgaaagcagtgt

SEQ ID NO: 125719 - DNA, 481 bp, Homo sapiens
gacaaattcactattatacttggagacttaaacactcctctatcagtaattgacagacatggcaagcataaagtagtaagaatttagttaactacatatcattatcagtcaactagttctaaytgacatgtataggacagttgttgacttcatacaagaagagcataatacacattcttcttaagctcacatggaacacttaacaaaatataccacatgctgagccataagacacaccttaacaaatttaaaagaataaaaatcatgtaaagtattctttcacatcacaatgacattaaatagaaatcaataacagaaaaacagaaggaaaataacaaattatttagaaattataccacacacttataaataatgcatgggccaaacaatgagtctcaagataaatttaaaactattttgaattaaatgaaaacaaaaatacaactcagtatttgtgggattcagtgactgaaagcagtgt

SEQ ID NO: 125720 - DNA, 603 bp, Homo sapiens
aaagttctagcacattttcaagagtcagagaaaatttttttcaaaagcatattcattgctttttctgtaaaaaggcatcaacaatagccacacagtatttattattgaattaaatgcaaaaatgcatatggaaattcttaggaaatttcaaagcttggtataaatacaaggattttatgtaatgtgggttcacaagttcatggctaactcaaaatcgagacttttttacaattggaaatcaacccctgcaaaatatgcttgaaaataactacaaaaataaatcacaccaacaatttttggccaatagaccagctattttgctctttggtaaactcactaaaacagagggatttattgatattccttctttgctaaacagaatattctgggaacacatgcagaaaagataaataaatatgtgttctgatagaggagttgaaacgaatrtggaattgaaagccatcagaacaaagccaataatcatttctgagactatgatgattccacatatgccaaataagtgtttcaagatgcgtcggatccattaactatcactggccaattcagaagacaccaattctgggtacctgccaacctaattag

SEQ ID NO: 125721 - DNA, 580 bp, Homo sapiens
tttcctcaggcaatgcagggttaatcctctcagacagaggtggaaaggcacataccattttgggaaaatgctatggaagaaatgcttaaaataattagaaatcatggaaacataaactaagtccatacatataagagtgcataaaataaaaaagctgtgtaatgctaagctctggtaaaagattgtagagatagaaaactttcatgaattgctggtaggagtatagtctggtgtagccacttcagagacctatctggttgtacttrgacaaactaagaacacacaaactctaatatattagaattcagcagttccatttgtgggcttatatgcccaaattattttacacagaatcataagaagacatgagcaaagattctactacagttttacttatgacattgaggagctagatgtaacctggtgtttactctgggagataagccaggtaaaataatgcagatgcacatttgtggagtataatggagcagttggaagaaacatgaatttctggaaaacatgatggttggtgaaaaaagtaaaaagtgaaattttagaagaataggcaccatttacatgc

SEQ ID NO: 125722 - DNA, 616 bp, Homo sapiens
cagtcaattgtgatcctaagcaaattgttttctttgttatattgtatttacaaaatggggataataattaatatgtcttagttactttataaaatatctaggatgatcatatatgtatgtttatatctgtgtgtatgagtgctttgaaaaccatgataattatataagaaacaaatttttaagtattaatgaaactagttcactacttacttggggagaaattcatacgtgcatgtatatgtgtatatatatgtgtgtgtgtgtgtatatatacacacatatacatatatatgtgtatcaagacatacatatatgrgaacagctgtttgtatttctttttcttggcctctgctccatgcacacaaggctatgacttcatttaagtacttccatctggaacaaaaagtaaagttgaggaagtaatgtgccttctcaaacttccagaccacatttccctagagttcaaggtctggcatgccttggaagagtttacaacattttatacaaaaaaaaatcttcctgtaacaacacaaattcatttggaaaaggcatctagagccaatattcagcatgtttcaaaaaacacctaatgtgaatctctactattgcagtagca

SEQ ID NO: 125723 - DNA, 577 bp, Homo sapiens
gcccacccatccctctgggagttccatctgaggagttttcaaatttctgtaggcaagggaacactggcagggacagctggagggcccaattaggcagtcctgccaagtgaggagtaatgacatcagagacccacttmgaaaagctgtctgagcctgattttatggagcagctgagatgtgtatgggtaccacttttgccccagccagcttgggcactccaaagcctggaggctggaatgactaagtcacccaaacagcaaagatggttttttgctcttccctctgggagctctgtctcagggacttttcaaatctctgttggctggagaatacagacgggggtggctggaggccccagttggaaggtcctacccaatgagatggaatggatttgggacctgctttaaaaagtagtctggccacattttggtacagcagctgttctgtgctatgggatcccttccacccacagttagcttgggttctccaaagcctaacggctggaatgggtaagtctcccaaacagcaaagaaggtgacctgcccctcccactgaaaactctgtcccagagagtttt

SEQ ID NO: 125724 - DNA, 577 bp, Homo sapiens
gcccacccatccctctgggagttccatctgaggagttttcaaatttctgtaggcaagggaacactggcagggacagctggagggcccaattaggcagtcctgccaagtgaggagtaatgacatcagagacccacttagaaaagctgtctgagcctgattttatrgagcagctgagatgtgtatgggtaccacttttgccccagccagcttgggcactccaaagcctggaggctggaatgactaagtcacccaaacagcaaagatggttttttgctcttccctctgggagctctgtctcagggacttttcaaatctctgttggctggagaatacagacgggggtggctggaggccccagttggaaggtcctacccaatgagatggaatggatttgggacctgctttaaaaagtagtctggccacattttggtacagcagctgttctgtgctatgggatcccttccacccacagttagcttgggttctccaaagcctaacggctggaatgggtaagtctcccaaacagcaaagaaggtgacctgcccctcccactgaaaactctgtcccagagagtttt

SEQ ID NO: 125725 - DNA, 577 bp, Homo sapiens
gcccacccatccctctgggagttccatctgaggagttttcaaatttctgtaggcaagggaacactggcagggacagctggagggcccaattaggcagtcctgccaagtgaggagtaatgacatcagagacccacttagaaaagctgtctgagcctgattttatggagcagctgagatgtgtatgggtaccacttttgccccagccagcttgggcactccaaagcctggaggctggaatgactaagtcacccaaacagcaaagatggttttttgctcttccctctgggagctctgtctcagggacttttcaaatctctgttggctggagaatacagacggkggtggctggaggccccagttggaaggtcctacccaatgagatggaatggatttgggacctgctttaaaaagtagtctggccacattttggtacagcagctgttctgtgctatgggatcccttccacccacagttagcttgggttctccaaagcctaacggctggaatgggtaagtctcccaaacagcaaagaaggtgacctgcccctcccactgaaaactctgtcccagagagtttt

SEQ ID NO: 125726 - DNA, 388 bp, Homo sapiens
agcctgttcctcttccttacttaaaagtgcttttacccttctcagcattccacaagttacttcctccttcctttgttctcctctccttttgcctcttttaaaaagttctaagttgctagccagttgggacaaacacagaatgtgaggtctctttccagccaatggaaaccggacacagcagtagggtggacgcgtcaggttataaatgaccctgtctcctttgttcagtgtactgtcatggcraaacttctggcaagtgtaccctttctgcaggaagtaaaaatagccttactaaataaattaaatttatgttcaagtgctatttttttaagggcacggaagaagcatttcaaacaaaaatgaaatgtttaagtgaaattgttgaagt

SEQ ID NO: 125727 - DNA, 362 bp, Homo sapiens
aacccaggccaggtgcagtctccctcagctgagagagaagaggagacatgggggcattctatccagcatcccttctctatgccaggcctgggatggggtgtctccttcccygtgcaccccttccttggcttcaccagagccaacactggctcagggttcaagtcagtcatgaacccagcaggattgagtctaggatgggtgtggcctcagtttctgagcagccacctggccccccacgcctcgggtccttcctcctcacctggcatggttccccctcccacagtccccacctctctccccccactgtccctgcctgctcccgttccctccaacccggctcaggggccctcacctgcagagct

SEQ ID NO: 125728 - DNA, 603 bp, Homo sapiens
ccattctctctgtcactagaataaactgtcctggcctttttcctaagcagatttcttttcagattgttccaaaagataatatggaaaaaaaatctcccttgactccaatgattatattgatgggtatacattgatttttattgccaagtttctattttatgggaaaactattctccaaaaaaatcaaaacaagagactcaaggttgtctcactcagaggcacttaaaaaataaataaataacctggccaccaggctttccacaaggaaaaggaacaattaagcattataccagaggtctggtataatggtttctatttcatacaaaactaaaggtagtttttgtctctcgttctctgtttctgctcaaatatccatcctgctctctctctctctctctctctgccctctctctctccttgtctttgtgtgtgtatgtgtgcatgcaaagatgtgtgtttgtacaascaaaaaccttggaaatttgtggtgtttttactccagcatcctgactttatttaaatcaagatgtaaataaaactcttttgttttgaagaccaataggaattaaatccaagaaggaaggctttgtaaaatatggtgca

SEQ ID NO: 125729 - DNA, 572 bp, Homo sapiens
atatcaaaaaaatgaaaagacaacatacatactgggagaaaatatttacaagttgtatatctgataaggaaattgtatccagaataaagaactcctataacgtaacaagaagacaacccaatttaaaaatgggcaagggacttgaaaagattttcaatatcatagtcatcagagcatgcaaatcaaaacaatgagataccactttacacccactaggattgctgtaataataataataattaatggaaaataacaagcattggcaaagatgtaaataaaytggaatccttgtacattgcttgttgaagtgtaaaatcgtgcagccactgtggaaatgtttggctgttttttaaaaagtcaaacacaaaattaccatatgacccagcaattccactcctagacatacacccaaaataactgaaaaattaattcaaaccaaaacttgtatatatgttgatagcagcactagccacaattgccaaaaggtggaaacaactcaaatgtccatcactgaatgaatgagtaagcaacatatggtctatccccaaaagaaatattattcagccgtgcaa

SEQ ID NO: 125730 - DNA, 572 bp, Homo sapiens
atatcaaaaaaatgaaaagacaacatacatactgggagaaaatatttacaagttgtatatctgataaggaaattgtatccagaataaagaactcctataacgtaacaagaagacaacccaatttaaaaatgggcaagggacttgaaaagattttcaatatcatagtcatcagagcatgcaaatcaaaacaatgagataccactttacacccactaggattgctgtaataataataataattaatggaaaataacaagcattggcaaagatgtaaataaactggaatccttgtacattgcttgttgaagtgtaaaatcgtgcagccactgtggaaatgtttggctgttttttaaaaagtcaaacacaaaattaccatatgacccagcaattccactcctagacatacacccaaaataactgaaaaattaattcaaacmaaaacttgtatatatgttgatagcagcactagccacaattgccaaaaggtggaaacaactcaaatgtccatcactgaatgaatgagtaagcaacatatggtctatccccaaaagaaatattattcagccgtgcaa

SEQ ID NO: 125731 - DNA, 425 bp, Homo sapiens
gaattccaagtccctaaggatttcataatttgtctggtgaactcctatccacccttcaaaacccagttcaaatatcctctcccacctctccatgctgcttatctcatgctactccctcactggttctctgcacttggccatgtgacctttcggcagctgtgggttgacgggacgcagcaaagctcctgccctcctgaagacctttactgggtgctgcaccctctgccccctcccactcaccattctgagcaacccatgcctacccctcaaatctcagctcagacggcatctccagcatatacagagtgagggcccatggactttacaggyaaggccactgatatgatttgggtctgtgtccccacccaaatctcatgttgaattataatccccaatgttggaggtggggcctggtgggagatgat

SEQ ID NO: 125732 - DNA, 584 bp, Homo sapiens
ggtcattttcctgagaaatgcaaaagaatttaaaaattgacacggttttaatttggtattatggtccctttgcaaaagcacaaaaatgtccttatctcttcccatatagttctagaatgtatattctgactcaatctacttatctattttacaattaataytacaccatttaaaattactgtagctgaatactttaaattcaagaaggcaaaccccttctcattattcttatttttcaaaattgttttctaattgctaactttttttttttgagacagagtctcgctctgtctccaggctggagtgcagtggcgcgatctcggttcactgtaatttccgcctcccgggttcaagcgattcccctgcctcagcctcctgagtagctgggactacaggcgcgcaccacgatgcccggctaattttttgtattttagtagagacggggtttcaccatgttggccaggatggtctcgatctcctgacctcgtgatccacccgcctcggcctcccaaagtgctgggattacaggcatgagccactgcgcccagcctctaactcctaacttttatgcaaagtgtccagta

SEQ ID NO: 125733 - DNA, 584 bp, Homo sapiens
ggtcattttcctgagaaatgcaaaagaatttaaaaattgacacggttttaatttggtattatggtccctttgcaaaagcacaaaaatgtccttatctcttcccatatagttctagaatgtatattctgactcaatctacttatctattttacaattaatactacaccatttaaaattactgtagctgaatactttaaattcaagaaggcaaaccccttctcattattcttatttttcaaaattgttttctaattgctaactttttttttttgagacagagtctcgctctgtctccaggctggagtgcagtggcgcgatctcggttcrctgtaatttccgcctcccgggttcaagcgattcccctgcctcagcctcctgagtagctgggactacaggcgcgcaccacgatgcccggctaattttttgtattttagtagagacggggtttcaccatgttggccaggatggtctcgatctcctgacctcgtgatccacccgcctcggcctcccaaagtgctgggattacaggcatgagccactgcgcccagcctctaactcctaacttttatgcaaagtgtccagta

SEQ ID NO: 125734 - DNA, 609 bp, Homo sapiens
ctggtagagtcttagaggatgaatcagagttagccaggwcaaccagacactttggggaatgaaggaatggcaggcagcaggaatagcatgaggaatggcagggaggcaagaagtaggaaaaagaagcagttcaatattgctgtgccataaatcagggacaatggtcagggagaggtggttgcaggtgatgggagaggaggctagaggggttgacaagagagctaccagagccagcctaggaaagctgggacttcatcctgaacacataggaagacaaggaagcattaagcagatgagtgataggacaggaagtgcattactcagaaccaaattgctatgactgtggagacaaagcaagggacttgggcaccgaagaggtggtgggcaagaagacacaaaggaacaaagtaggaggctaacgcttggagtgaggtcaaatggaaaggccacacctggagaaggaatgagaagcaagtcaaaagtgagcaaaagagatagtagaaattatgattaaggtttaaatctacatttattgacagagaaagatgtccactaaatattgtcaagtgaaaaaggattgaaaggcagtatttcacaacacgtgtgaaa

SEQ ID NO: 125735 - DNA, 609 bp, Homo sapiens
ctggtagagtcttagaggatgaatcagagttagccaggacaaccagacactttggggaatgaaggaatggcaggcagcaggaatagcatgaggaatggcagggargcaagaagtaggaaaaagaagcagttcaatattgctgtgccataaatcagggacaatggtcagggagaggtggttgcaggtgatgggagaggaggctagaggggttgacaagagagctaccagagccagcctaggaaagctgggacttcatcctgaacacataggaagacaaggaagcattaagcagatgagtgataggacaggaagtgcattactcagaaccaaattgctatgactgtggagacaaagcaagggacttgggcaccgaagaggtggtgggcaagaagacacaaaggaacaaagtaggaggctaacgcttggagtgaggtcaaatggaaaggccacacctggagaaggaatgagaagcaagtcaaaagtgagcaaaagagatagtagaaattatgattaaggtttaaatctacatttattgacagagaaagatgtccactaaatattgtcaagtgaaaaaggattgaaaggcagtatttcacaacacgtgtgaaa

SEQ ID NO: 125736 - DNA, 609 bp, Homo sapiens
ctggtagagtcttagaggatgaatcagagttagccaggacaaccagacactttggggaatgaaggaatggcaggcagcaggaatagcatgaggaatggcagggaggcaagaagtaggaaaaagaagcagttcaatattgctgtgccataaatcagggacaatggtcagggagaggtggttgcaggtgatgggagaggaggctagaggggttracaagagagctaccagagccagcctaggaaagctgggacttcatcctgaacacataggaagacaaggaagcattaagcagatgagtgataggacaggaagtgcattactcagaaccaaattgctatgactgtggagacaaagcaagggacttgggcaccgaagaggtggtgggcaagaagacacaaaggaacaaagtaggaggctaacgcttggagtgaggtcaaatggaaaggccacacctggagaaggaatgagaagcaagtcaaaagtgagcaaaagagatagtagaaattatgattaaggtttaaatctacatttattgacagagaaagatgtccactaaatattgtcaagtgaaaaaggattgaaaggcagtatttcacaacacgtgtgaaa

SEQ ID NO: 125737 - DNA, 609 bp, Homo sapiens
ctggtagagtcttagaggatgaatcagagttagccaggacaaccagacactttggggaatgaaggaatggcaggcagcaggaatagcatgaggaatggcagggaggcaagaagtaggaaaaagaagcagttcaatattgctgtgccataaatcagggacaatggtcagggagaggtggttgcaggtgatgggagaggaggctagaggggttgacaagagagctaccagagccagcctaggaaagctgggacttcatcctgaacacataggaagacaaggaagcattaagcagatgagtgataggacaggaagtgcattactcagaaccaaattgctatgactgtggagacaaagcaagggacttgggcaccgaagaggtggtgggcaagaagacacaaaggaacaaagtaggaggctaacgcttggagtgaggtcaaatggaaaggccacacctggagaaggaatgagaagcaagtcaaaagtgagcaaaagagatagyagaaattatgattaaggtttaaatctacatttattgacagagaaagatgtccactaaatattgtcaagtgaaaaaggattgaaaggcagtatttcacaacacgtgtgaaa

SEQ ID NO: 125738 - DNA, 447 bp, Homo sapiens
ggttgcagtgagccgagatcacgccattagactcgtctgggcgacagagcgagactccgtctccaaaaaaaaaaaaaaaaaaaaaaaaaatacagataggcctaagtggaaactattaccctccatagagggcagaggggcagagtagatggctggttttgaggtagttcattcttcattcaracgtgtggcgcccttccccaggccctaacccctggaagagggaggaaaaaggcgatccacagaagtgtctcataagaaatgtagctgctcatctggccattagccgcatctagtcctcaggtgacttttctctgagtcgctctgcctgtcccctgcaagccaaaagggcagccgacgcagcccgtgatgctgggacagcgtccggccgcgcgcaactgacggtcgcgttctgcgcgcgagctagttgcctcccgtacctgccgc

SEQ ID NO: 125739 - DNA, 591 bp, Homo sapiens
aaataatgggcatttaaaaaatattctcagacttctgctctgaccaagatggagaaacagattatacttctacctgaaacaactaaaagacactcaaataaaatataagaaataggctgggtgtggtggctcatgcctgtaatcccggggctttgggaggscaaggcaggaggatcacttgtggccaagagttcaagactgcagttagttataactgcaccactgcactccagcctgacagagcaaaactctgtttcttatttaaaaaaaaaaaaaaaagatttctatacaaaggacattaccagggataaaaagagtcatttataattatgaaagagttgattcatcaaaaggacataacagccaggtgcagtggctcatgcctgtaatcccagcactttgggaggccgaggtggacagattgtctgagctcagaagttcaagaccagcctgggcaacatggcgaaaccccatctctactaaaaatacaaaaaattagccaggcaatggtgacgcgtgcctgtaatcccagctactgggaaggttgaggcatgagaatcacttgaacccaggaggcagaggttgcagtaa

SEQ ID NO: 125740 - DNA, 526 bp, Homo sapiens
aaatgtcccaattatacaaatccagactgtagagtaacttttggagaatagatttatacattaacaaacactgtgaattcttgttgctatggtcarttggacactgtgaccaagcaggtaactcctcagatggatagatgagtacttaaaggattgaaagtgggggttgcctactgcgtcaattcctgtaagacagtcttgatcaatgccaagactttggaaatcctgaatactaaaggcaaaactgtaactccatttaagctccatgatcagaatgagaaataagtaaatatcaaatgagtcagaacgctctcctcctttgcacgagctagtctgcagtactctgcaggacgtttttctgattaaagggcttaagcaatttattttaacaaaagtggtcagtaagctttccagcaatcaaagttgaaagttaagtaaaagatacccttggaaattcttggcttggtctcttatttatcactcagaactttcttgatacaaaaaaccatttgatattttcagtgtt

SEQ ID NO: 125741 - DNA, 612 bp, Homo sapiens
tcaaaacatttcatacaaaaggaatggttttaacccagacaaatcaagaggaaatgcactgaattcaaaaacttctgaaacaggcattttttggaccatttataaaatactaaaaagttcagaactgctgaaaaacaaaagtttatataaaataaagccaaggggtgaaaaactatcaaatgtattaaaaycatctaaagccaaatataatataactgaatatataatttagaaacaggtttaagtgcattttctttgtacaactgactatcacatgtaaaaactggcaattaattaaaatgcaattaaatacagatttgcaagccttctggccattatgtaaacatttaaaaattaactgaattgccaattgaaaaataagagcttacatacgtatcttaaaaaagcacaaatggtgaaagatgcactataaaattgtgtgacaaaacatatgcataccaacaaagatctttttaggcacttgcattcagaaacattccttttataaataagcacttataacagttccactccaaaaaataaacctgattttcccaaattgcacctattagttgagactatatcatatattagggatgcattcaaatggac

SEQ ID NO: 125742 - DNA, 304 bp, Homo sapiens
gatcctgtctccaaacaaaacaaaaaaagcaacccctcctccaccatattatataattagcttgatggaaaaagaaaamagcacaagtgaaaaaaaaaatggatttttccaagcacatctaattagggttagttgttgctctcatttttagacagttctcattgcctacaactttcataagttaacattggcttttctgggtgtaccattcccactccatttcccttcttggagttttaaaagcctattatccatctcactagagtcaagccctaaataatggatgatgacagtggaaagtttc

SEQ ID NO: 125743 - DNA, 528 bp, Homo sapiens
atatacattcttctcttcagttcatggatcattctaaaggatggaccatatattaggccacaaaacaaatctttaaacattcaaaaaaaaaatgaaattctatcaagtgccttctctgaccacaataaaatgaaactagaaatcgawagcaagaggaattttgaaaaccatacaaacacatggaaattaaataatatactcctaaagtaccagtggtcaataaagaaactttaaaatttcttgaaacaaataataatggaaacatgatgtaagagctatgagatgcatcaaaagcagtactaagaggaaagtttatagctataagctcctacatcaaaaaagtaaagacttcatataaacaacctaattgggcatcttaaagaactagaaaaacaagagcaaaccaaacccaaaactagtacaagaaaataaataataaagattgacgcagaataaaagaaattgaaatgaagaaaaaaaaaacaaagatcaatgaaacaaaaagttttcttttttttttgagaaggt

SEQ ID NO: 125744 - DNA, 617 bp, Homo sapiens
ttgtgagtatgtacctattatatactcacaaaaattaaaaattaaaaaaaaacctttctgagtaaatgtaatctgagcagacatgtgaatgaaatgtgatcatgatgctatttagatatctggaagatcatttcaggctggtggagcagctagtggaaacgcttcaacatgtttcagaatcagaaaaaggccagtgtggctagagagcaataagcagaacagacagaaggcaggtgagtcagaacaattatggaggtatcgtggctgtagtattgactttggattttattctgagtgagatgggaagccatttagcgcaacagaatgaaattacctgactttttatagtaagcattttaactaatggattgagactagactaaaatggaagcaagtgaggaagtgtggagaccagttagggctaccacactcacatgggaaaggtgagggagactgggacttgggtgctagcagttaagatggtgagaagcagttgggttttagatgtgttttgaaagtagagctgacagaatttgctgatggattagatgtgagatgtttgagaaagacaaaaaggccaagcatamttacaaaaaaatttggcctacatttacaga

SEQ ID NO: 125745 - DNA, 602 bp, Homo sapiens
gggtttcactatggtttccagaccagttccaggctggtctggaactcctgacctcaggtgatccacctgccttggcctcccaaagtgctgggattacaggcrtgagccaccgcgcctggcctaagtctgatttctcttatactttcacagtccttacatagtgtaggcattcaataaaggttgtttgaattttaaaaagtctaatattgaatgacgaaataaacgaatgatgaggctgacccttaatatagctaagccaaatagatctttataataaagtttacttttaagttaaaagcttgcattttcactagtaattgaaaatacagccttcaaatacagctgggcatttctatttggggaatagcttgagaagctcaggaacaatgttatatattaattctctgggaatgcttggtatacaaccaccatacaggtgtttcctgttgagactccaagttcccatgcaagaacttagaggacagctgagaacaaaacttagcctgcttaattatatctgcccagtgtgctgcataaaaaagtcattgaccaaaaataacatgtttaagtaatgttcaagttgagatacagaccagcagcag

SEQ ID NO: 125746 - DNA, 602 bp, Homo sapiens
gggtttcactatggtttccagaccagttccaggctggtctggaactcctgacctcaggtgatccacctgccttggcctcccaaagtgctgggattacaggcgtgagccaccgcgcctggcctaagtctgatttctcttatactttcacagtccttacatagtgtaggcattcaataaaggttgtttgaattttaaaaagtctaatattgaatgacgaaataaacgaatgatgaggctgacccttaatatagctaagccaaatagatctttataataaagtttacttttaagttaaaagcttgcattttcactagtaatygaaaatacagccttcaaatacagctgggcatttctatttggggaatagcttgagaagctcaggaacaatgttatatattaattctctgggaatgcttggtatacaaccaccatacaggtgtttcctgttgagactccaagttcccatgcaagaacttagaggacagctgagaacaaaacttagcctgcttaattatatctgcccagtgtgctgcataaaaaagtcattgaccaaaaataacatgtttaagtaatgttcaagttgagatacagaccagcagcag

SEQ ID NO: 125747 - DNA, 401 bp, Homo sapiens
gaattccacttagcacagtagaggtagggtttgtaactccgcccactgtagtgctttctagtggatatcaccttgaggacaagggagaaattcttcctgatgcccaaggtacaggggtatgccttatgtagattagcactactggtccgaaagcaagcatartgtttctcctctgtatcatacagggaaactcctactcttggatttatactgttgtacctggagaagcttcctgggacaagttgacctttctgttcaattcctagcatggttctacttagggatcaattggtcaaaattccttataagtattcaaaacttcttttcttctctttctaaacacctccttctaggtaatctcaacctgacccccagttttaaatacaagtatatactgtgac

SEQ ID NO: 125748 - DNA, 614 bp, Homo sapiens
cagctttctacatatggctagccagtaaatagttttgttcaaactaggaaggttttcttctttttcattgcatggattttgccattgttattaaayagttggcattaggaaaactcaaaacaaatgaatagtattttaaataaaatttataaagaacctaagtgttactaataatccaaggatttttgtaagtcagagattataccataaagaattgagagtttttttgtttgtgtgtttatttctttgaggcagagtcttgctctgtcgcccaggctggagtgcaatggcctgatctcgctcactgcaagctctgccttctgggttcatgccattatcctgcctcagcctcccaagtagctgggattataggcacccgccaccacacccagctaattttttgtatttttagtagagatggggtttcaccgtgttagccaggatggtcttgatctcctgacctcatgatccacccgcctcggccttccaaagtgctgggattacaggcatgagccactgcgcccggccagaattgagattttttcttttttttttttaaactcaatttaagataaaaatgcctataggttttataataaaatctttcaggagga

SEQ ID NO: 125749 - DNA, 588 bp, Homo sapiens
tcagctgtatggctctgttgatctcaagggggtttggtcttttgtctagggttcagctggaggtgagttgatgtaggttttatgtggctrggatggctgaattcttttgcccaaacaagcatatttttcttgtggcaatggcaaaggcgaatgagagctagctcaataatgcaagcacttttcatgttgttggtcatgtgacacccaataacactccatcgcaagtcaagtcacaagacagaaaccaaagtctagggggtgggaatacataatcctctttagtcagattgcaaacatcccttgtcacagagaatgggtacaggcgtagatggagaacaagagcttttactgaaattaattgaaaacacaatacaactatagatagcttgagtcagtattatttttaaaagcttgatggcaccaggagaagaaagctaaccaatgctcagatgaagtacattttgtgtcaaattttaaaatgctttgaatgttatattttaaaatatgcttgtcatcataagcatcctttgctccttcctttttcagaagccccctgaaacacacacacacacacaaagttgaacctta

SEQ ID NO: 125750 - DNA, 588 bp, Homo sapiens
tcagctgtatggctctgttgatctcaagggggtttggtcttttgtctagggttcagctggaggtgagttgatgtaggttttatgtggctaggatggctgaattcttttgcccaaacaagcatatttttcttgtggcaatggcaaaggcgaatgagagctagctcaataatgcaagcacttttcatgttgttggtcatgtgacacccaataacactccatcgcaagtcaagtcacaagacagaaaccaaagtctagggggtgggaatacataatcctctttagtcagaytgcaaacatcccttgtcacagagaatgggtacaggcgtagatggagaacaagagcttttactgaaattaattgaaaacacaatacaactatagatagcttgagtcagtattatttttaaaagcttgatggcaccaggagaagaaagctaaccaatgctcagatgaagtacattttgtgtcaaattttaaaatgctttgaatgttatattttaaaatatgcttgtcatcataagcatcctttgctccttcctttttcagaagccccctgaaacacacacacacacacaaagttgaacctta

SEQ ID NO: 125751 - DNA, 527 bp, Homo sapiens
tttcccttgagggtccttatgtgacaggtgtcataccctatacctggaagaaggaatgctgcatagagaggcccggaagaatctgaaaaaacaggccttactgggctccttcagtttatcaccattacaacacaccctttttgtccaatygtatttctatacagctgatcctgcattgagtgcaagcaaaaaactgtcaagttttccctggatctttgggctttcatttctgaagtctcctgtgtcacgtaaaactttgttaaataaatttgttatgcttttctcttgtaacctgtcttttgttgtaggagtgtcaggcaagacccttggaatgggtgggcaaaaggtgttactatttcacttctacagcctcaagacctagcaccatctctagcatatgttgtattaatgacgttagatgattgaatgactgttatctcaataattgccactgatttgactatttaagcaggtcattttttccccctaaatattccccccgtgctatactgaaagtcacagaacat

SEQ ID NO: 125752 - DNA, 527 bp, Homo sapiens
tttcccttgagggtccttatgtgacaggtgtcataccctatacctggaagaaggaatgctgcatagagaggcccggaagaatctgaaaaaacaggccttactgggctccttcagtttatcaccattacaacacaccctttttgtccaatcgtatttctatacagctgatcctgcattgagtgcaagcaaaaaactgtcaagttttccctggatctttgggctttcatttctgaagtctcctgtgtcacgtaaaaytttgttaaataaatttgttatgcttttctcttgtaacctgtcttttgttgtaggagtgtcaggcaagacccttggaatgggtgggcaaaaggtgttactatttcacttctacagcctcaagacctagcaccatctctagcatatgttgtattaatgacgttagatgattgaatgactgttatctcaataattgccactgatttgactatttaagcaggtcattttttccccctaaatattccccccgtgctatactgaaagtcacagaacat

SEQ ID NO: 125753 - DNA, 596 bp, Homo sapiens
acaatggataaatgagcttgagaggcttcaaaaatttgtttctttaatttagttatgtccaaggataaattatgttccctacccagcaggtrtcctttgaccatttcccatgaatgatcagtcttcttgtaggaatatggtgtgatacagaaatcagaagtattccaatcgcactgcatttgcatgcgatgtttgagacttattagctgatctccaagccaaataacagactgtcttaaatcattaatttgattagctaatttttgatcaatgccctgttgagaattctacatttgggtggaattagcttgccaatcattaacaaaatcagccctttgaataggttggtgtaatgccacgccggcggtggtggccagtgcagtgactgtaattaggcccatgatcacagcgattaaagtgaaaacgaatctcttagatcttttgagaattcgttgtaacacttcattaattaaatgtactgagggtgaagattcccaaggtctgggtaaagttaccagtatccagattccttctcacttctcaagctcacacaacattacacttttcctgaagtcaaaatgggagttaacacaagt

SEQ ID NO: 125754 - DNA, 622 bp, Homo sapiens
catatgattatattaggaaggcaaattttatataaatttttaaaattaaaaaatgagacaaacatatctttagttgttcagtcgacagcttcatcttctgcctattcttagacatttttgtttcartgaaaaagtttgcatagggtacctctaggttattttcctctgttgcaattactctattagaatcaaaaccatcagaaaatatggcttgtgataatttttaatccacagacctgaatctcagagactttcatagcctcccccacttcttccactcactcttatgggactaaagtgcacaaatacagtcatgaccattatgcctgtaagcagtgtgagaagatgatttaatgaaccatttgtcatcacttattaatatgttattaaatctgctctagagttttatcagaaactttgtcatgataaactaaataaaataatttagatatgtgtgatcctcctcctttatatgatctgcttcacttattttgcttgtgatttaatcaaaaagctctagactgcattgctggacattttccatagccgtccaagtccatttctttgcaatgaaacttttgcaaatctcagttctttaagaaagaagtaacaccagtgctac

SEQ ID NO: 125755 - DNA, 569 bp, Homo sapiens
tcctaaaaacaaggattataaatcattctactataaagacacatgcacacacacatctttactgcagcactattcacaatagcaaagacatggaaacaacccaaatgcccatcaatgatagactggatgaagaaaatgtggcacatatacaccaaggaatactatgcagccataaaaaagaatgagttygtgtcttttgcagggacatggataaagctggaaaccatcattctcagcaaactaacacaggagcagaaaaccaaacaccacatgttctcactcataagtgggagttgaacagtgagaacatatggacacagggaagggaacatcacacactggggcctgtagggggttggggggcaaggggagggagagtattaggacaaatagttaatgcatgtggggcttaaaatctagatgatgggttgataggtgcagcaaccaccatggcacatgtgtacctatgtaacaaatctgcaccttctctacatgtatgcccgaacttaaagtaatataaaaaaaatttaaaaagaagcagtttcttgatggttttattgtgaacttaa

SEQ ID NO: 125756 - DNA, 569 bp, Homo sapiens
tcctaaaaacaaggattataaatcattctactataaagacacatgcacacacacatctttactgcagcactattcacaatagcaaagacatggaaacaacccaaatgcccatcaatgatagactggatgaagaaaatgtggcacatatacaccaaggaatactatgcagccataaaaaagaatgagtttgtgtcttttgcagrgacatggataaagctggaaaccatcattctcagcaaactaacacaggagcagaaaaccaaacaccacatgttctcactcataagtgggagttgaacagtgagaacatatggacacagggaagggaacatcacacactggggcctgtagggggttggggggcaaggggagggagagtattaggacaaatagttaatgcatgtggggcttaaaatctagatgatgggttgataggtgcagcaaccaccatggcacatgtgtacctatgtaacaaatctgcaccttctctacatgtatgcccgaacttaaagtaatataaaaaaaatttaaaaagaagcagtttcttgatggttttattgtgaacttaa

SEQ ID NO: 125757 - DNA, 569 bp, Homo sapiens
tcctaaaaacaaggattataaatcattctactataaagacacatgcacacacacatctttactgcagcactattcacaatagcaaagacatggaaacaacccaaatgcccatcaatgatagactggatgaagaaaatgtggcacatatacaccaaggaatactatgcagccataaaaaagaatgagtttgtgtcttttgcagggacatggataaagctggaaaccatcattctcagcaaactaacacaggagcagaaaaccaaacaccacatgttctcactcataagtgggagttgaacagtgagaacatatggacacagggaagggaacatcacacactggggcctgtagggggttggggggcaaggggagggagagtattaggacaaatagttaatgcatgtggggcttaaaatctagatgatgggttgataggtgcagcaaccaccatggcacatgtgtacctatgtaacaaatctgcaccttctctacatgtatscccgaacttaaagtaatataaaaaaaatttaaaaagaagcagtttcttgatggttttattgtgaacttaa

SEQ ID NO: 125758 - DNA, 458 bp, Homo sapiens
aaatgacctctgtttcactcaggcaaattgtattcttcagacttaactattcatatagatcatgaaaatgaccatgaaatatacctaaatgagcataaaaataaagtttaaacaaactatcagcaaaataagtcccacaagactgcttcccaagtaagttaaattcaactaacatttataragcacttacaaattgcaaagcattgttcaaaatgtacagaggacacagagatgacaaaagtatatttcctgccaccaagacccttagaatctattgagtaaaacaggcatagaaattattaactctaatacagtgtaaatataataaaattacacaataaaactatttgttgagagcattatatgtataagctattttaataagtgtttctcattagttaacatacttgagctccccaaatcgtaagaaatatgcactcctagtaatcctgttttcc

SEQ ID NO: 125759 - DNA, 627 bp, Homo sapiens
gttctttgttagaagttctaatcaactaataatgacacccttgcagaaattttatttttaaatgaagacatgttttatatttggctgtttcttaaatgagcctcygtgaaagtcatgggcagtagagtaaattgtacttgtgggaaatgcaattgtacttgtacttaatgcaaggccaaagtgatgtagtttgggtttgcagcttattggttcagtacaggtttagtgccaacttttccataactttaaataataaatgctgctcagaatggaataatctattattctaaagcacagtttcatttgcttaagaatatgtaaatatcgcacccttttgtataacttctataaaagcatttgaagttttaattatttaaaggttatatacaaaaagctactttagagggaacttttttataacacggtgttcttttattttccaggaagagagaaaagccaaaaagtaattaaaataatgaaggtgaaagtgattattatctccatagtatctccaaaaacgaaatagaatgaaacacaacgaaaaacgaatttaaacaatacagaaaataattaaaaccttgctaaaattgtttaggttctctggcttccagtgaaaaatcagactaa

SEQ ID NO: 125760 - DNA, 509 bp, Homo sapiens
agatggggtttcacgattttggccaggctggcctcgaatccctgacctcaagtgattcgcctgcctcggccttccaaagtgctgggattacaggcgtgagccaccatgcctggcctaatattttgtattaatrtataaataaataacaaactatatatttttggagtataatgtgatattttgagagctttatagattgtggaatgactaaatcaagctaattaacatatccaacacctcacataccattttgagatggcaagaacatttaatatctactctctcagcaattttgaaatataccgtatattattattaaccgtggtcagcttcctatttgatctccagaacttattccttccatttaactgcagctttgtgccctttggccaacatctccccattcctccacccctctgtccctgcccctggtaaccaccattccactctctacctctgtgagtttgactttttagattccacatacaagtgggattatgcagtgtctt

SEQ ID NO: 125761 - DNA, 593 bp, Homo sapiens
ttaacttttattttaaaatcatctagtgacagaagtgcttatgagtcaaaattattttaaacatcatttggctaatggtggatcgtctactgaaagattaatgggtaaagattacataccttgtttttaaaataaacttcaattggcaaaatgaaaccagcatacccagattcttctactttgtaaggtggatctttgcacactgcaacattaaaaaagaaaataggtaagatgagaataatagacaaaaagacattcttcttttaaaaaaaaaaatcccaytctaccatctagatcacacgcaattttcatagccccttgccaaactcccagttgagtctccgatctatcctttatttcttctccagaaactataacaataattgctcttatgtaaagcagatatgtaagtcatttattcaaatcttggtggagaatagctcatcacagtcaaccatgattattaatgagtgaacttcacttgttattaccctgcccaaaagctttagggaaactgatgattgctccctatgacccaaagtttgaaaagaactgtaagcttcctaacaagagtattatctgcatctagtctt

SEQ ID NO: 125762 - DNA, 627 bp, Homo sapiens
gaacaacattaatgggtttacctggaatctgatctgctaatatctaaaacacttttttttttaaagatcacttgctataacaggtgaactaagaataccttttattcactatctaatcttaccgtcctaaagccaggtccctgctgggtagggaggggtgtcatatatttgacaaataataattgaaacagccttttccttttctttttgttgacagtctattcagacaaaccaggctaaatacatttccagattcccttatgtgcacaaggagagaacagctccataaaggtccacagagacatctggaacaagcagcatctctacctgctaagcataaatactgcttttctgccttcctggatggtgcttttaatttctcttacaatcctaaagcctctcagctgggttagaaagcccattgtttttttccctttatccttcagtgaaggccttgtctatacctcttggccacagacagacagaacaaagagtagtcagacctacagatttctgtacttgaccttctttatgtgggaaagacgttggcgtccaayactgctataataagaaaaaggaaagtgagttgcaggaatgacaaacagaatctgtaaaagaagaaaaaga

SEQ ID NO: 125763 - DNA, 582 bp, Homo sapiens
aagacaatgggataaatgtctccagggcatgccagaggtcttcacggcccctcccatcactggcctagagatctaagaggaaaaaaattgtttcatgggctgggcccagggccttgctgctttgcacattctcaggacttggtgccctgcatcccagccatggctaaaaggggccaatgtacagctcaagccattgcttcagagggtgtaagccctaagccttggtggcttacacatggtgttgggcttgcaggygcacaaaagtcaagaattgaagtctgggaacctccatctagatttcagaggatatatggaaacacgtggttgtccaggcagaagtttgctgcaggggtggcgccctcatggagaatctctgctagagcaatgcaaatgggaaatgtaggatcagagcccacgcacagagtcaccaatgggacactgcctagtggagatgtaagaagagagccaccatcctccagacaccagagtagtagatccactgacagcttgcaccacgtgcctggaaaagacagagatgctggatgccagcctgtgaaagcagctgggagtgggactgtaccc

SEQ ID NO: 125764 - DNA, 625 bp, Homo sapiens
aaacaacacaccttataattaggcaatatgaaattaatatgaatggtctagcattatcgttactatttcccctaattgaaaggcagctagctagtatactaaggaaaaaggaatgaagtttttaaaagtattggaaaaagaaggagtctatgactgaatagaattatttttatggattaatctaatttgctaagcacagtagcaaaataaagagcaggtgaataagaaatgcacaatccatgcaatgttttgaatgtttttgtcctctctaaaactcatgtgttggaaacttaagccccaatgcaacagtgaggtgaggcctaatgggaggtgggcaggtcaggagggttctgtccttatgaaaggattcatgaacctattttctactgcagaagyggcttccaggagtgggttctctctctctctctctcttgctcttctgtcatgtgaggacacaaagttcctccccttgggaggatgcagtattcaaggcaccagcttggaagcagagacaaggtcctaaattgtgcaacaaaaataacaaagattttctttacatctaattagacataaaggctagaacaatgttcttgtgaaaggatgcttttaagatgcttttttggaa

SEQ ID NO: 125765 - DNA, 528 bp, Homo sapiens
attgtggtctttaaacaaactttgtagggtatctattcttccatatttgttaagatgtgttttatgacccagaatatattggtgactatgagctgaagaaaaatgtgtattatgctgttattggatgaagtattctataaatgtcaaaagaacaagttgattgatagcgttgttaaggtcatctgtatccttactgttatattctgcctgtttgatctattacctacagaggtatgttaaaagtttctgactataacagtggattcctctatttctccttgcagttctatcagttctkgcctcatgtgttttgctgttgtcttcagttaggattattatgccgttttaaagaattgatcactttatcattatttaatgcttttcttttccatagtagtcttactttttctgaagctagctttttcagaaattaatatacctccagctttttttgattagtgttagcaaggtatatctttctccatctctttatttttaatttatctgtgtctttgtacttaatgtagt

SEQ ID NO: 125766 - DNA, 569 bp, Homo sapiens
tatcttagattttctatccttccttctaatgtttgctgaactacaaagagaaatggtttgcacagtgtccagaaagagaacacaaaaggggaacatttataaacacatacttagccccatccagggaagagcatgccctgaagagccaacaagcctggtttagtgtttatggtctgcttatattgttgaaaaccccaagctatagtgtctttaagatgccagccatctagataataccacttatgctagtgkttcctattacaagcttaccaagcagtctcctagttttagcttgcctgtccacatatcttttcccacactgtacacatcacctgacacaagtctatcgatttgcttagaagctaaatttcttattataaatgtatacattattctggttagttcactctttaacaagttttattagtgtacctcatcttctagaacagatcacttctgaaaaatataaacactcaaatttctagacatgaatttttttgtccccaacttcagacttttggagactcataaaggtatatagttaactgggttaaatgcagaacttggct

SEQ ID NO: 125767 - DNA, 569 bp, Homo sapiens
tatcttagattttctatccttccttctaatgtttgctgaactacaaagagaaatggtttgcacagtgtccagaaagagaacacaaaaggggaacatttataaacacatacttagccccatccagggaagagcatgccctgaagagccaacaagcctggtttagtgtttatggtctgcttatattgttgaaaaccccaagctatagtgtctttaagatgccagccatctagataataccacttatgctagtggttcctattacaagcttaccaagcagtmtcctagttttagcttgcctgtccacatatcttttcccacactgtacacatcacctgacacaagtctatcgatttgcttagaagctaaatttcttattataaatgtatacattattctggttagttcactctttaacaagttttattagtgtacctcatcttctagaacagatcacttctgaaaaatataaacactcaaatttctagacatgaatttttttgtccccaacttcagacttttggagactcataaaggtatatagttaactgggttaaatgcagaacttggct

SEQ ID NO: 125768 - DNA, 508 bp, Homo sapiens
gaattctttctacataatgtcttttggaaaccttttatccataaagattccagccctttgctgtcttttaggaattgccaaaattaaagatttttgtgcttgtataattcatgtttgactattccagtctttgctttacttttaaatacttctacttcctccctcccccttgttatctcactggtctaatctgtgcagtaagatgaaggcataaatgtctgaattatagatttaggtgtagatagaaatacctactgatatcacagcatgccttattcattgtttctgtggacacacacacaaacacacaaacacacacacacacacacacacacacacaatgaaaggtaaagrgtatcaaagaagtccctgaaggtagctgcacctatgctggacttttaagaagattgtttttactgcatttgggtagactacatcaaagttctgtcagattacctcttagtaggccaggtgcagtggctcatgcctggaatcctaacagtttggg

SEQ ID NO: 125769 - DNA, 425 bp, Homo sapiens
tttctaggctccccattcagatttgtttataagatgacatcaaagtgcaaaaagttaagcatatcatatttatcaaagtagaatttctaaattttagcaaaaatcatctcatctagcaaagagatatttgactggaaatacatgttaaaattttccagcagtccgaatctctggagatctagtaataaagaggatcaagaataatgtattaataytataaaacattcttgaggtggtcagaaatcatgaaaactttgcccaacattactttttgcgtaatatggttgggttttctgcccccaccccaatctcgtcttaaattggaatccccataatacccatgtgacaaggaagaaaccaagtggaggtaattgaatcatgggggcattttcccccatgctgttctcattatagtgaatgagtta

SEQ ID NO: 125770 - DNA, 576 bp, Homo sapiens
tgcaaatgaaaaccacaatgagataccatctcacaccagtcagaatggctattaagaagtcaaaaatagcagatgctagtgagataaaagaatacttgtacactgtcagtggggctgtaaattagttctaccattgtggaagactgtgtggcgattgctcaaaracctaaagacagaaatactattcaactcagcaaccccattactgggtatgtactcaaaggaatataaattttctatcataaagacccatgcatatgtatgtccattgcaacaatattcacaatagcaaagacatggaatttacctaaatgcccatcaatgatagtctggattaaaaaaaatgtggtacatatatgccatggaatactatccaggcatagaaaagaatgagatcatatcttttgcaggaacatggatggagctggaggccattatccttagcaaactaatgcaggaagagaaaaccaaataccacatgttttcacttataagtgggagctaaatgatgagaacacatggacacatagaggagaacaacacacactcagacctattgaagttgtgagatgggag

SEQ ID NO: 125771 - DNA, 608 bp, Homo sapiens
tgggttaaaggttatatgagagattatagtgtttctatatgtgttaggtttaaaaaaaagtcatcacatacttcaaaaattttgtaaaatttgacttcaaatttagcaagccataggtgaattttaaggaaatttatatatgcagaaatgaccttgaattgtttataaggaatattcagagctgaaaataatatagagtaccatttcaagaggttcgattattgagaaaagcaaaaagctagggtgttagtgtaagaaggaagaatggctaaaatatgragtttataagacagaaggtatctaataataccatgcagaagaaaaggatgcagtacatctagtaataaccatttattaaacatttaacaatatcagaattttatgttaaattactatcttagtctgttttcatactgctataaagaactgcctgagactgggtaatttataaaggaaagatgtttaattgaattacagttcagcatagctggggaggcctcaggaaacttacaatcaaggaagaaagcaaagagggagcaaagcaccttcttcacaaggcagcaggaaagagaaatgcggagcaaagggggaagagctgcttatgaaac

SEQ ID NO: 125772 - DNA, 608 bp, Homo sapiens
tgggttaaaggttatatgagagattatagtgtttctatatgtgttaggtttaaaaaaaagtcatcacatacttcaaaaattttgtaaaatttgacttcaaatttagcaagccataggtgaattttaaggaaatttatatatgcagaaatgaccttgaattgtttataaggaatattcagagctgaaaataatatagagtaccatttcaagaggttcgattattgagaaaagcaaaaagctagggtgttagtgtaagaaggaagaatggctaaaatatggagtttataagacagaaggtatctaataataccatgcagaagaaaaggatgcagtacatctagtaataaccatttattaaacatttaacaatatcagaattttatgttaaattactatcttagtctgttttcatactgctataaagaactgcctgagactgggtaatttataaaggaaagatgtttaattgaattacagttcagcatrgctggggaggcctcaggaaacttacaatcaaggaagaaagcaaagagggagcaaagcaccttcttcacaaggcagcaggaaagagaaatgcggagcaaagggggaagagctgcttatgaaac

SEQ ID NO: 125773 - DNA, 557 bp, Homo sapiens
ttatttttaaagcatatttattgtaacatacacaagtaattaatgtacttatttaatttttgctggaactagtatagtgtattcttacttttcctgagtgtcattgaactccaggccaattaaaacacacctttgaattttgatgagtattttgctttgctgaagtttagtttttcatttgtgaagacagctcattcattgggtcactgaattccagaaacatgttgtgaacatttatatcaatcataattcataagatgctgtagaaagtgaaagtcattgcagagaaacttagttctcaagggatatagcatctaatcacctgctaacaagcaacraatagtataataatttattattcacaaaattatacttgatctttaaaaacaaaatatgtaaatgaatagcaaagaaatgttaaaatgattgaagtctgttcatgaaatcagtcccaattgaagttagttgagaatgattcatggaaaagataagttagttgaaattaggataaataggtgacagataaagaataagaatatatctggttattagacaat

SEQ ID NO: 125774 - DNA, 293 bp, Homo sapiens
ctgccatgcaggtggtttgagaattaatgagaaggccaccttttcactttgtagaagaacagaatgaggtctaaggggtcaaagtaagtagaatatgttctggaatcttggacagtgcactttccaawgcttggtaagtagcctgaggtgaaggtgctagctaacagtctcactcactgcacaacctttgaagtttttctccgggaggtggggggcagcccccgcccggccagccgccccgtctgggaggtggggggcagcccccgcccggccgctgccccgtctgggaggtg

SEQ ID NO: 125775 - DNA, 589 bp, Homo sapiens
gtccatttgttctagggcacagtttgagtccattgtttctttgttgactttctgtcttgatgacctgcctagtgctgtcagtagaatattgaagtcccccactattattgtattgccatctatcttatttcttatggctagtagtaattgcattatgattttgggatctcccatgttaggtgtatatatatatatatatatatatatatgtgtgtgtrtatatatatatcacacatgtatataaatatatatatatatttaggattgtgatttttcctgttggacaaggccttttattatataattttcctctttgtcttttttaactgttgttgctttaaagtctgttttgtctgatataagaatagctactcctgctcacttatcatagaatacctttttcatgcctttaccttgagtttatgtgagttcttacgccttaggtgaatctcttgaagacagcagatacttggttggtggatttttatccattctgccatcatgtatttttaagtggagcacttagactatttaaattcacattagtagtaagatgtgaggtactgttttattcattttgctagttgtt

SEQ ID NO: 125776 - DNA, 631 bp, Homo sapiens
ttttctatattacaaactaggacatttgctgattttgaggtggcacaggagactgcgagtgaagggctgaaaggcaagggtcaaggcccccacagtctacaggcatgagctttttctatgattctagttgtctgcactgcatctgtcatctaggtctttctagagatactgtagctttcctttatctaccacagatatctctaacaacatgacatctttcagatccgatggccaaaaaaagtggatcttctggcaacatagtctgagtcagacaaattcacactagaggaaactgcaataattctttctcttaagacacttataaaattttgaattcacatgtgtgagtggcttaagagttaagcttaaaacatccgaaagttacaattttcagagtaaaagaattagacaaygattggtttttataacaagctaatgtgagccatgcccaagctggaactctgcagaaaaaaacagtggaattactgacaatcttgcttgacaatttgtatttaggagagaaatttttgatgaggaggggagggatctgagaaatgtgtcacatgaatctaactaaagctgccacctatccctgactcagctcaattatgatggtgctgagataatcaca

SEQ ID NO: 125777 - DNA, 502 bp, Homo sapiens
ctctgttacccatgatctttcttctttctctcatcattttctcagcttcctttgctcgaatcctcccaatggcataccccaaattttaggtaccaaaaagggtaggttctggctgccatctcttctttagctgtactctttccttacatgcacagatctactctcaggttttaaaaagtatctatagacaacccaatttatatctttaacacagacatcgtctattaattccaggctcttgaattttactttytactccattagaacttcaattcaatgaaaatatttctataaaatatatcttaatttcctatcacacctatcatttctacacttcaataaatgacaatatcattcacaaaagtaatcaaactaaaactgtggagtaacttttgattcctctttctttcaccattccatcaatcctataatatcaacctttaagatgagtctcatatctagttatttttcagtttctattgacaataacctagcccaagcc

SEQ ID NO: 125778 - DNA, 482 bp, Homo sapiens
gcttgtagcgaggatcatttccaaactaaggcttaaaattagagctaaaggaaaatttaagttttaatgtaactacaaacaatgtgagagaaaactatcagtcaagactttggactgaaaacaagactgaagtgcagaatgtactggatttttaagttaaataattaaattacttgggaatattattgaatagaatgtataatagtaagaaattagacacataaaatcctatagctttaatatttctttcttacagattgttggctataaggacattgaagtaacaggtcatcatataaagaccgtaactctttaataaartgcctagtattggggctattctgtgtaacataaagactaataggttataatttttgtatatgatgcatggctttgtctcctacgcatgaagtactaatgaattttctgaatgatatctgacatgactgaaaagagataaacaatagtttaaatgggactag

SEQ ID NO: 125779 - DNA, 573 bp, Homo sapiens
caatgaggcatcagacccctgatctgactgcctgctgcgtgttgacaagctcctctataaacccctaactttagtcagttggagagatggatgtgaggcttgtcttccatctcctgtctcttggctgttgttgttacctgcaataaagtctgccttccctgacaatactcattgtgtcaatgggctttctgtgaggcaaacaactagaatctaggctgaacccctagtgttcaacaacgattactctatttttaatcttgttttgcacttacagtattttgtgtaagttcctggaaaggaagagcaagttttcaccagtgacagtggaggataactgtaaggacttaggctaaattacactggtctggmagaactgcccgtctgtatctcaggaatgatgtttttctgtcctttagcttaaaactgccttaggacttgggtttagggagcttgtgcctagtattagatacagccttctgggaggaagggcatccaaacacattgttggaatcccattcccagaccctctcaccatgcactgtcctataaatcatcacatcaaagcctgagcta

SEQ ID NO: 125780 - DNA, 573 bp, Homo sapiens
caatgaggcatcagacccctgatctgactgcctgctgcgtgttgacaagctcctctataaacccctaactttagtcagttggagagatggatgtgaggcttgtcttccatctcctgtctcttggctgttgttgttacctgcaataaagtctgccttccctgacaatactcattgtgtcaatgggctttctgtgaggcaaacaactagaatctaggctgaacccctagtgttcaacaacgattactctatttttaatcttgttttgcacttacagtattttgtgtaagttcctggaaaggaagagcaagttttcaccagtgacagtggaggataactgtaaggacttaggctaaattacactggtctggaagaactgcccgtctgtatctcaggaatgatgtttttctgtcctttagcttaaaactgccttaggacttgggtttagggagcttgtgcctagtattagatacagccttctgggaggaagggcatccaaacacattgttggaatccyattcccagaccctctcaccatgcactgtcctataaatcatcacatcaaagcctgagcta

SEQ ID NO: 125781 - DNA, 612 bp, Homo sapiens
ttaatttaaacatgtaagaagatggaaatttcttcctctttaagatattttgctctttgaaggactgtcttaagcaatggaagagttccaaagaaatttaacaaagctgctcatgaattttgctgttttccctcattattactaataatagaagattgctttttacatgttctaacatgttgctagaaaaaatatactgtaaataaaaatactcatacttcagagctctagacagtcctcagtccaaatcaygatcctatcatttattacccctgtaatcctgggcaaactgcttcacctctatctgtctcagtttgcatagctagaggtgaggctaatggtacctacttcataaatgttccctccccggctttgatctccaccgtcctgtctaactgcatggcatcctctcaggatagattttctggccatctcatctaaaattgcaatccaaacatgtcattgtcttttttttttttttttgctttattgtggcacttaccacctgcggaacagggctccacccttgtgacccaatcacttcccaaaggccccacctccaaataccaacacattggggatttggtatcaatctgttaatttgaggtgaag

SEQ ID NO: 125782 - DNA, 612 bp, Homo sapiens
ttaatttaaacatgtaagaagatggaaatttcttcctctttaagatattttgctctttgaaggactgtcttaagcaatggaagagttccaaagaaatttaacaaagctgctcatgaattttgctgttttccctcattattactaataatagaagattgctttttacatgttctaacatgttgctagaaaaaatatactgtaaataaaaatactcatacttcagagctctagacagtcctcagtccaaatcacgatcctatcatttattacccctgtaatcctgggcaaactkcttcacctctatctgtctcagtttgcatagctagaggtgaggctaatggtacctacttcataaatgttccctccccggctttgatctccaccgtcctgtctaactgcatggcatcctctcaggatagattttctggccatctcatctaaaattgcaatccaaacatgtcattgtcttttttttttttttttgctttattgtggcacttaccacctgcggaacagggctccacccttgtgacccaatcacttcccaaaggccccacctccaaataccaacacattggggatttggtatcaatctgttaatttgaggtgaag

SEQ ID NO: 125783 - DNA, 612 bp, Homo sapiens
ttaatttaaacatgtaagaagatggaaatttcttcctctttaagatattttgctctttgaaggactgtcttaagcaatggaagagttccaaagaaatttaacaaagctgctcatgaattttgctgttttccctcattattactaataatagaagattgctttttacatgttctaacatgttgctagaaaaaatatactgtaaataaaaatactcatacttcagagctctagacagtcctcagtccaaatcacgatcctatcatttattacccctgtaatcctgggcaaactgcttcacctctatctgtctcagtttgcatagctagaggtgaggctaatggtacctacttcataaatgttccctccccggctttgatctccaccgtsctgtctaactgcatggcatcctctcaggatagattttctggccatctcatctaaaattgcaatccaaacatgtcattgtcttttttttttttttttgctttattgtggcacttaccacctgcggaacagggctccacccttgtgacccaatcacttcccaaaggccccacctccaaataccaacacattggggatttggtatcaatctgttaatttgaggtgaag

SEQ ID NO: 125784 - DNA, 612 bp, Homo sapiens
ttaatttaaacatgtaagaagatggaaatttcttcctctttaagatattttgctctttgaaggactgtcttaagcaatggaagagttccaaagaaatttaacaaagctgctcatgaattttgctgttttccctcattattactaataatagaagattgctttttacatgttctaacatgttgctagaaaaaatatactgtaaataaaaatactcatacttcagagctctagacagtcctcagtccaaatcacgatcctatcatttattacccctgtaatcctgggcaaactgcttcacctctatctgtctcagtttgcatagctagaggtgaggctaatggtacctacttcataaatgttccctccccggctttgatctccaccgtcctgtctaactgcatggyatcctctcaggatagattttctggccatctcatctaaaattgcaatccaaacatgtcattgtcttttttttttttttttgctttattgtggcacttaccacctgcggaacagggctccacccttgtgacccaatcacttcccaaaggccccacctccaaataccaacacattggggatttggtatcaatctgttaatttgaggtgaag

SEQ ID NO: 125785 - DNA, 549 bp, Homo sapiens
  misc_feature (1)...(549): n = A,T,C or G
tttcatggttgcagtttttcatcscatacctgagggcgcggtattttctaagtccgcttgcgcggctctggaaagcccggcctggcagggcgcccggcccgcaggctcgcggttagcttttccacgggccagactgggagtcacgtagggagagtctgtattcttcccagcagtcagccttcccttatgctgcntggggatgcgtcgtggtgacctggagctccaagaggagccagacgcgctccacccacccaggtctgagaaatgagatccgacatggactgcagccctttgctccggttgtcgggctccacctgccggtcgatgttacctattgcacttgttctctggagctcccgccagagagaagtggccactgtgcaccgggtcgagttccaggatgtccctagcgttagcaggattgttccgtccgctggcaaagcattcgctccccatctgttcgtggaagcttggacctgcagcttaagctcggaggaggctcttagccctggatgctctgtggtggggcaacatgcgggtcgaccagca

SEQ ID NO: 125786 - DNA, 564 bp, Homo sapiens
  misc_feature (1)...(564): n = A,T,C or G
ggggtggaaaggggaggtacaggaccagatagggagaggagggagtaataggggaagggagatcaagaaaaggtcaaggagaggagggagtagataagggacaaggagggaggaagagggaggagaggaagatgaggaagggggagggtgaagataggcaaggggatggcccanaggtattcatttgaaagcagccccagcaggactgattgtagcagtggctgtccagtgagagagaaaggaaagaatcaagaacaaattctagatttttgacttgagaaactgggagaagatggggacttttcccaactcagtgcttttcactgagagaagaaaaggaagagccatatttgagtgtgaaaacaagagtcgcctttgagatctattaagtttaatatgcttcattaggaagctccctcatttcccccgtagcatcaacattctttcyaaaacatttggaaagcattatgatttttattgtagagtccccccaccccagcgattttctctacttttttcctattcattggtcatggaagctgcttccaattttcagctattgtg

SEQ ID NO: 125787 - DNA, 463 bp, Homo sapiens
actctaggtcctaacctctggagtgcactaatgaccaagaggtgcatgagcaccaaatgtgagaggacaggagtctggaaacctagcacaggagtcttctcagaaccttaggacattcctactgttgtgagggtaggagaagaatgcctagctaaggaaacaagtgtttagtgtccaatgtgagtaactgccatggggaagaataaagcagggaagggcaagaagatgcccagggtggacaaagaagctctcattgataaagagacattagaacacacatctgaaggtggcragatagtcagcctttcagatatctggagcaagcttgttgcactaagaggaaaaagcaggtgcaaaggccctggggcaggaacgtgctagttgtgtttgaggggggcagccagctgttgtaactggaacagagagagaagggggaagatggtagtgaatgaaatctgaaaag

SEQ ID NO: 125788 - DNA, 463 bp, Homo sapiens
actctaggtcctaacctctggagtgcactaatgaccaagaggtgcatgagcaccaaatgtgagaggacaggagtctggaaacctagcacaggagtcttctcagaaccttaggacattcctactgttgtgagggtaggagaagaatgcctagctaaggaaacaagtgtttagtgtccaatgtgagtaactgccatggggaagaataaagcagggaagggcaagaagatgcccagggtggacaaagaagctctcattgataaagagacattagaacacacatctgaaggtggcaagatagtcagcctttcagatatctggagcaagcttgttgcactaasaggaaaaagcaggtgcaaaggccctggggcaggaacgtgctagttgtgtttgaggggggcagccagctgttgtaactggaacagagagagaagggggaagatggtagtgaatgaaatctgaaaag

SEQ ID NO: 125789 - DNA, 463 bp, Homo sapiens
actctaggtcctaacctctggagtgcactaatgaccaagaggtgcatgagcaccaaatgtgagaggacaggagtctggaaacctagcacaggagtcttctcagaaccttaggacattcctactgttgtgagggtaggagaagaatgcctagctaaggaaacaagtgtttagtgtccaatgtgagtaactgccatggggaagaataaagcagggaagggcaagaagatgcccagggtggacaaagaagctctcattgataaagagacattagaacacacatctgaaggtggcaagatagtcagcctttcagatatctggagcaagcttgttgcactaagaggaaaaagcaggtgcaaaggccctgggrcaggaacgtgctagttgtgtttgaggggggcagccagctgttgtaactggaacagagagagaagggggaagatggtagtgaatgaaatctgaaaag

SEQ ID NO: 125790 - DNA, 463 bp, Homo sapiens
actctaggtcctaacctctggagtgcactaatgaccaagaggtgcatgagcaccaaatgtgagaggacaggagtctggaaacctagcacaggagtcttctcagaaccttaggacattcctactgttgtgagggtaggagaagaatgcctagctaaggaaacaagtgtttagtgtccaatgtgagtaactgccatggggaagaataaagcagggaagggcaagaagatgcccagggtggacaaagaagctctcattgataaagagacattagaacacacatctgaaggtggcaagatagtcagcctttcagatatctggagcaagcttgttgcactaagaggaaaaagcaggtgcaaaggccctggggcaggaacgtgctagttgtgtttgaggggggcagcmagctgttgtaactggaacagagagagaagggggaagatggtagtgaatgaaatctgaaaag

SEQ ID NO: 125791 - DNA, 406 bp, Homo sapiens
gcccactttttaactaggttttttttccttattgttgtgttttcagtgttttttttgtatatgttggatatattgatatattttttgcatatatgtatatgtcggkgtattttagtgatgtaaaatgaatggaatctatagccttaaacataatataaatatataatggttaagatttcccactcaacaatccaggcttgacagaaaatcataaaatgtatttaaatgtaaatgtttttttctttgttgatactagttcttagttttaacatgccgaagagggtatatttgatcaaggacaagattaaatgttctgattggttaactatcaaaccgctgcctccacttttttttgcaacttgaaaataatatttagttatcacgctagcacagccatattaatata

SEQ ID NO: 125792 - DNA, 586 bp, Homo sapiens
tctgcaaaactctcttcatcttgtaaaactgaaatgatatttattaaaacctaacccctaccccctcctcccagcccctggcaaccaccattctaacttctgtctatgaagttgatattctaggcccctcatttaaatggaatcatgcagtatttgtttttgtgactggcttatttcacctagcataatgtactcaaggtgcatccatgttatagcatatgtcagaattttcttccttttggaagctgaataatattccactgtatgtatgtatatgtcagattttgtttttccattcatccctcaatgaatgcttagattatttccacttttggctattgtgtctaatgctgctatgaacacgggtgtacagatatttctttgagaccctgctttcaattattttkgtattccacccagaagtggaaatgctggatcatagggtaattctgtttctaatttcttgaggaatcaccatactgttttccataccagatgtatggttttatattcccaccaacaggaatataagcattccaaacatgaattttgtgggaacatatttcaaaccatagcagtcaccaaa

SEQ ID NO: 125793 - DNA, 586 bp, Homo sapiens
tctgcaaaactctcttcatcttgtaaaactgaaatgatatttattaaaacctaacccctaccccctcctcccagcccctggcaaccaccattctaacttctgtctatgaagttgatattctaggcccctcatttaaatggaatcatgcagtatttgtttttgtgactggcttatttcacctagcataatgtactcaaggtgcatccatgttatagcatatgtcagaattttcttccttttggaagctgaataatattccactgtatgtatgtatatgtcagattttgtttttccattcatccctcaatgaatgcttagattatttccacttttggctattgtgtctaatgctgctatgaacacgggtgtacagatatttctttgagaccctgctttcaattattttggtattccacccagaagtggaaatgctggatcataggktaattctgtttctaatttcttgaggaatcaccatactgttttccataccagatgtatggttttatattcccaccaacaggaatataagcattccaaacatgaattttgtgggaacatatttcaaaccatagcagtcaccaaa

SEQ ID NO: 125794 - DNA, 584 bp, Homo sapiens
taagaaatgagatagacagcaacacgataatagtgggggacttcaatactccactgacagcactagacaggtcatcaagagagaaagtcaacaaagaaacactggatttaaactacactttggaacaaatggacttaacagatacatacagaacatttcatccaacaaccacagaatacacattctattccacagcacatggaatcttctccaagatagaccatatgataggccataaaacgagtctcagtaaattgaagaaaactgaaattctatcacgcactgtctcagatcacagtggaataaaactgaaaatcgactccaaaaggaatcttcaaaaccatgcaaatacatggaatttaaataacctgctcctgaatgagcattgggtgaaaaacgaaatcacgatggaaatataaaaaatttcttcaaactggatgacacaacctatcaccacctatgggatacagcaaaggcagtgctaagaggaaagtttgtagygctaaacaccgacgtcaaaaagcctgaaagagcacaaacagacaatctaagttcacatctcagggaactagagaaacaggaac

SEQ ID NO: 125795 - DNA, 584 bp, Homo sapiens
taagaaatgagatagacagcaacacgataatagtgggggacttcaatactccactgacagcactagacaggtcatcaagagagaaagtcaacaaagaaacactggatttaaactacactttggaacaaatggacttaacagatacatacagaacatttcatccaacaaccacagaatacacattctattccacagcacatggaatcttctccaagatagaccatatgataggccataaaacgagtctcagtaaattgaagaaaactgaaattctatcacgcactgtctcagatcacagtggaataaaactgaaaatcgactccaaaaggaatcttcaaaaccatgcaaatacatggaatttaaataacctgctcctgaatgagcattgggtgaaaaacgaaatcacgatggaaatataaaaaatttcttcaaactggatgacacaacctatcaccacctatgggatacagcaaaggcagtgctaagaggaaagtttgtagcgctaaacaccracgtcaaaaagcctgaaagagcacaaacagacaatctaagttcacatctcagggaactagagaaacaggaac

SEQ ID NO: 125796 - DNA, 584 bp, Homo sapiens
taagaaatgagatagacagcaacacgataatagtgggggacttcaatactccactgacagcactagacaggtcatcaagagagaaagtcaacaaagaaacactggatttaaactacactttggaacaaatggacttaacagatacatacagaacatttcatccaacaaccacagaatacacattctattccacagcacatggaatcttctccaagatagaccatatgataggccataaaacgagtctcagtaaattgaagaaaactgaaattctatcacgcactgtctcagatcacagtggaataaaactgaaaatcgactccaaaaggaatcttcaaaaccatgcaaatacatggaatttaaataacctgctcctgaatgagcattgggtgaaaaacgaaatcacgatggaaatataaaaaatttcttcaaactggatgacacaacctatcaccacctatgggatacagcaaaggcagtgctaagaggaaagtttgtagcgctaaacaccgaygtcaaaaagcctgaaagagcacaaacagacaatctaagttcacatctcagggaactagagaaacaggaac

SEQ ID NO: 125797 - DNA, 540 bp, Homo sapiens
tgttttctttgccacagtttaggggcaaagaaaagtttctacctctctgaaatggtaggagaaacccttggggcttaggtaacaaatcaggctctctctttcacatgttgtgagaaaagaaatatttaaccatcagcaccaacaatgtcatttgcataagggagtgacttcctggctgagagatggtcagaataacatagagcctagagtgaaggcagtcaagtttgtgagcctagggctctgcttctggtgtctgcttcatggctgtgtgatcttgggcaagtttcctacattttctgcttctcagttttgtcatccataaaatgataacaacagtacctgcctcaaatagtgtgtggaagaggcttaaacaagctaatgtaagtcaaatcttgagcacaatccctggtgtagctatacatgtttgtgtatatatcagaagctcaaaattctaccattagtattaataacatactctgraccctcattataatgctattctcaatatcccaacacttgatttctattgacaactcctag

SEQ ID NO: 125798 - DNA, 586 bp, Homo sapiens
accacatgacttatttgcatgaggtaatcaaatctaagcagccatgccagtgttacccatattgcatgtcgtggtagtagatgcagccccccaaaataaaagtcaaaagatgctggcacattcctgaggttcttytcagccactaacaattggtgtagttcatcatcacctggaatgaccaaaatgtctcccatggaaatgtggctcagctctgtaggcttccatttaactttgtcaggttctgaggcagggctggcttgagtggtcttgtttccactttggctatgatgaataatgctgctgtgaacattaaggtatacgtttttgtgtggtttcatttcttttaagtatataccttggagtgtaattactggatcatatgataactctgttttaatttttgagaaactaccaaaatgttttccacaacagacaagattttacattccctcagcattgaatgaaggttcttatccagtttcctgtttttgctgagacttcttattgtttgtcttttgaatttagttatctcgttggggtgaagtggtgtatcattgtgttttgatttgcatttccctaataatga

SEQ ID NO: 125799 - DNA, 586 bp, Homo sapiens
accacatgacttatttgcatgaggtaatcaaatctaagcagccatgccagtgttacccatattgcatgtcgtggtagtagatgcagccccccaaaataaaagtcaaaagatgctggcacattcctgaggttcttctcagccactaacaattggtgtagttcatcatcacctggaatgaccaaaatgtctcccatggaaatgtggctcagctctgtaggcttccatttaactttgtcaggttctgaggcagggctggctkgagtggtcttgtttccactttggctatgatgaataatgctgctgtgaacattaaggtatacgtttttgtgtggtttcatttcttttaagtatataccttggagtgtaattactggatcatatgataactctgttttaatttttgagaaactaccaaaatgttttccacaacagacaagattttacattccctcagcattgaatgaaggttcttatccagtttcctgtttttgctgagacttcttattgtttgtcttttgaatttagttatctcgttggggtgaagtggtgtatcattgtgttttgatttgcatttccctaataatga

SEQ ID NO: 125800 - DNA, 477 bp, Homo sapiens
aaggtaaactcatgtcatggggtcttgttgtacaggttatttaatcacccaggaattaagcccagtacccaacagttactgtttccactcctctcccacctcccacacggcatgctcaagcagaccccagtgtctgctgtttccctctttgtgttaataagttctcatcatttagcctccacttataagtaagaacatgcagtatttggttttctgttcctgcgttagttgctgaggataatagcctccagctctagccatgttcctgcaaacgacataatctcattcttttttatrgctgcatggtactccatggtgtatatgtaccacattttctttatccaatctgtcattgatgggcatttaggctgattccatgtctttgctattgtgaatattgctgcgatgaacatttacatgtgcaagtgtctttatggtagactggtttatactcctctgggtatatacccagtactg

SEQ ID NO: 125801 - DNA, 620 bp, Homo sapiens
ccttacagcaatttaaatatcattgcatcatcttttgacttgccctgtttctgataagttagcaaccattcttattgtgtctcaagtgagtttaatgcatcttttttcttctagttgcttttaatatttaattttcgtgattggtttttrgcagtttgagaatgatgtgctttggtgtggttttcaatgtttatcttgcttgagttttgttgatattcttgaatctttcatctaaattaggaaatatttgatcataacatcttcaaatatttttctctcccatgtctatttcttcttttagtactccaattgcatatattttaatcttattactattttcctacagtttaattagtccctcttcattgtttaaccagcatttaaaaaaataaatgctttagttttgctttagtttggatagttttcctaaccctgagttcaaattcactgttccttccttctgctgtgtttaatctgccattaagcccatgaaataaatttttattttaaatgttgtattattcagttctaaaatttctatttttatgggtctcatttctctcctgagtcctatttattctcttattatttttacattttcatttaaatcctttattgta

SEQ ID NO: 125802 - DNA, 620 bp, Homo sapiens
ccttacagcaatttaaatatcattgcatcatcttttgacttgccctgtttctgataagttagcaaccattcttattgtgtctcaagtgagtttaatgcatcttttttcttctagttgcttttaatatttaattttcgtgattggtttttagcagtttgagwatgatgtgctttggtgtggttttcaatgtttatcttgcttgagttttgttgatattcttgaatctttcatctaaattaggaaatatttgatcataacatcttcaaatatttttctctcccatgtctatttcttcttttagtactccaattgcatatattttaatcttattactattttcctacagtttaattagtccctcttcattgtttaaccagcatttaaaaaaataaatgctttagttttgctttagtttggatagttttcctaaccctgagttcaaattcactgttccttccttctgctgtgtttaatctgccattaagcccatgaaataaatttttattttaaatgttgtattattcagttctaaaatttctatttttatgggtctcatttctctcctgagtcctatttattctcttattatttttacattttcatttaaatcctttattgta

SEQ ID NO: 125803 - DNA, 533 bp, Homo sapiens
ataccatagcttagctattcccacataattggacattaaatccttccgatgttttgttgttacaggtaatgctgctgtgataacttcatgtgtgtagcttttcctttcctttaaattatgtcctgtgaagagattcccaggagtgaaactactgaaagataagaaagagtggtatagttgagatgaaattagcattaggaacagaattgaagacaaagatcagcccagcaatggcccattcccctgcagggagaattctcaaccagatattgactggtttaattgatttcgtggtgttcctgctcatcatgaatatatccacaataaccacatcaggtgagtcactgttggacaattcttaacatttacgatgagcaatgtcgatcctacagctatatcgtattgatctccttcgatactgctctcgttggtctgtgctcctcctattttgtytacagataaaaagtgtagagtcatgaagaatccaggatttaaagactagaggtctggactgaagttgtcttctacttagc

SEQ ID NO: 125804 - DNA, 529 bp, Homo sapiens
gagctgtgtatcttgtacctgtgcttctagattccatcctcttctgctctgctctgccctggaggctgatctgcatggcagcatcaccggagcttctttgcactctggactccagtggattcagccaatgaggggcactggcaggaggtcagacacagagaggagagaatgtctaagaagtctgtgtcccggaaccctccccactgagctgtgatttggcagtggttgcattcttcttctgaaggtgacagtccctgtggttgtccctctctgatagcctcagcctttcttgggttctgggaaataatcacagctccactctgctgctcaccccaggggcttcacggtcccttgtggtttctctcaccatacctttcctctacaaatcrcctcctcattaaactcttttctgcctgcttctgagtctgtgatctgtatttcttgccaagccctgatcacaccagaaacttcatgtgcttgcctgtcagctggtggacttcatggcaacatggctggcctcttcgctggc

SEQ ID NO: 125805 - DNA, 531 bp, Homo sapiens
atcaggaaacatctggtctagtgaattttcagctcagggattgactgactctgaaagacttttcccccagactcagagtccctgaaacatcacttcctctcttactgcatatatgaataactatttttaaataataactttcacttcattaatttaacgcctggrgctggatgcagtggctcatacctataattccagcattttgggaggttgaggcaggaggattgcttaaggccaggagtttgagatcaacctgggcaacacagtgaggcatagtctctacaaaaaaataggctgtggtgggaggattgctgaagctcaagaggccaagcctacagtgagccatgatcacaccactgtactccagcctgggacatagagaaagaccctgtctcaaaaaaaaataataattcaatacatgagaaaattatttaaaaaaatctaaaatgcagtggctgcattatgcaaggaaaaatatttataaaatagaaaacaattgcaaatacttaagtgtcctaagaaaggatgccg

SEQ ID NO: 125806 - DNA, 531 bp, Homo sapiens
atcaggaaacatctggtctagtgaattttcagctcagggattgactgactctgaaagacttttcccccagactcagagtccctgaaacatcacttcctctcttactgcatatatgaataactatttttaaataataactttcacttcattaatttaacgcctggggctggatgcagtggctcatacctataattccagcattttgggaggttgaggcaggaggattgcttaaggccaggagtttgagatcaacctgggcaacayagtgaggcatagtctctacaaaaaaataggctgtggtgggaggattgctgaagctcaagaggccaagcctacagtgagccatgatcacaccactgtactccagcctgggacatagagaaagaccctgtctcaaaaaaaaataataattcaatacatgagaaaattatttaaaaaaatctaaaatgcagtggctgcattatgcaaggaaaaatatttataaaatagaaaacaattgcaaatacttaagtgtcctaagaaaggatgccg

SEQ ID NO: 125807 - DNA, 537 bp, Homo sapiens
ccaccacttgagtgaaaagccaagaaaaacccacttgtttctgacaggaagtagggaaagtaagcattgaaaatacacctacagatagaggcttctccctaacaaagaccaacacagcagagggaaattctttaccagagcagcatataacctcagggggagggaagttttccagttccagcccccttcagcatgtctcatctaagtggggaagrggaaacactaagaagcccatatgaagtcacatccagggcataggcctaaaggactgagatttaatcataagattataaaacactcctcctccccaatactttatcaccacaccaaaagagctctattgcaataacagtggcttatagttgaaatgctgcaaagtataaactgtatttaaaaacaagttcttagggaagcccaaagataagagaaaaggtattgggtagtgatagtataaggatatccataataaataacagcaaccttataatggacaagaggaggacactggggttactctattatatggtgcactacatg

SEQ ID NO: 125808 - DNA, 537 bp, Homo sapiens
ccaccacttgagtgaaaagccaagaaaaacccacttgtttctgacaggaagtagggaaagtaagcattgaaaatacacctacagatagaggcttctccctaacaaagaccaacacagcagagggaaattctttaccagagcagcatataacctcagggggagggaagttttccagttccagcccccttcagcatgtctcatctaagtggggaagaggaaacactaagaagcccatawgaagtcacatccagggcataggcctaaaggactgagatttaatcataagattataaaacactcctcctccccaatactttatcaccacaccaaaagagctctattgcaataacagtggcttatagttgaaatgctgcaaagtataaactgtatttaaaaacaagttcttagggaagcccaaagataagagaaaaggtattgggtagtgatagtataaggatatccataataaataacagcaaccttataatggacaagaggaggacactggggttactctattatatggtgcactacatg

SEQ ID NO: 125809 - DNA, 537 bp, Homo sapiens
ccaccacttgagtgaaaagccaagaaaaacccacttgtttctgacaggaagtagggaaagtaagcattgaaaatacacctacagatagaggcttctccctaacaaagaccaacacagcagagggaaattctttaccagagcagcatataacctcagggggagggaagttttccagttccagcccccttcagcatgtctcatctaagtggggaagaggaaacactaagaagcccatatgaagtcacatccagggcataggcctaaaggactgagatttaatcataagattataaaacactcctcctccccaatactttatcaccacaccaaaagagctctattgcaataacagtggcttatagttgaaatgctgcaaagtataaactrtatttaaaaacaagttcttagggaagcccaaagataagagaaaaggtattgggtagtgatagtataaggatatccataataaataacagcaaccttataatggacaagaggaggacactggggttactctattatatggtgcactacatg

SEQ ID NO: 125810 - DNA, 433 bp, Homo sapiens
tcatgcagtcccagggcttgtcagcccaggatatatacccaaggaacatgcctgggaccaggcaccatgctgtttataaagttctccaggtgattctgatgctgacgcagggtgaggacgctgagctactctgagcttccctagtcacaggtgaagccaggaagacccagacatcccaacaaagggtgagcccatggcccgcagtcatttaggatgraacttgcgatgactgacttggatccgtgttttcactcctgcacagcatgccatagctctgtcacaggtgagttagaaagaatgccggaaacattcatcttctcactctgcatcttcttaggagactggctgaaatatcagctgcctagaaagatccctacatttccagggtaaatctataccagatataaagcatgtggcaataaagtcacaggga

SEQ ID NO: 125811 - DNA, 433 bp, Homo sapiens
tcatgcagtcccagggcttgtcagcccaggatatatacccaaggaacatgcctgggaccaggcaccatgctgtttataaagttctccaggtgattctgatgctgacgcagggtgaggacgctgagctactctgagcttccctagtcacaggtgaagccaggaagacccagacatcccaacaaagggtgagcccatggcccgcagtcatttaggatggaacttgcratgactgacttggatccgtgttttcactcctgcacagcatgccatagctctgtcacaggtgagttagaaagaatgccggaaacattcatcttctcactctgcatcttcttaggagactggctgaaatatcagctgcctagaaagatccctacatttccagggtaaatctataccagatataaagcatgtggcaataaagtcacaggga

SEQ ID NO: 125812 - DNA, 433 bp, Homo sapiens
tcatgcagtcccagggcttgtcagcccaggatatatacccaaggaacatgcctgggaccaggcaccatgctgtttataaagttctccaggtgattctgatgctgacgcagggtgaggacgctgagctactctgagcttccctagtcacaggtgaagccaggaagacccagacatcccaacaaagggtgagcccatggcccgcagtcatttaggatggaacttgcgatgactgacttggatccgtgttttcactcctgcacagcatgccatagctctgtcacaggtgagttagaaagaatgccggaaacattcatcttctcactctgcatcttcttaggagactggctgaaatatcagctgcctagaaagatccctacatttccagggtaaatctataccagatataaagyatgtggcaataaagtcacaggga

SEQ ID NO: 125813 - DNA, 503 bp, Homo sapiens
cctacatttccagggtaaatctataccagatataaagcatgtggcaataaagtcacagggacagtgagagtcatataaaaggaattcaattctatcccattccacaaggatggcacagggacagaaaattacattgtttttacttctccccagtctaccaaaaattgagttgacctacaaccaagacacacacacagatgtgatgtttacacacagtaattttaggaaagacaatataataaaataaaaatcaggaatcagaaacagagaaaacatttttaaggataaaaagaaaaaaaatatatagacagatattgaatgaatcatgaagcatyacttgtagatgcttagaactaaagaaaataatatctaaatatgtattaaaggggatttaattaaatatattatgagatgcctatacaatgcagtcatgaagaatgaggtggcttatgtaatgacatgaggtcatctccaacacaaacaaaggcaatgcacattcaggc

SEQ ID NO: 125814 - DNA, 503 bp, Homo sapiens
cctacatttccagggtaaatctataccagatataaagcatgtggcaataaagtcacagggacagtgagagtcatataaaaggaattcaattctatcccattccacaaggatggcacagggacagaaaattacattgtttttacttctccccagtctaccaaaaattgagttgacctacaaccaagacacacacacagatgtgatgtttacacacagtaattttaggaaagacaatataataaaataaaaatcaggaatcagaaacagagaaaacatttttaaggataaaaagaaaaaaaatatatagacagatattgaatgaatcatgaagcatcacttgtagatgcttagaactaaagaaaataatatctaaatatgtattaaaggggatttaattaaatatattatgagatgcctatacwatgcagtcatgaagaatgaggtggcttatgtaatgacatgaggtcatctccaacacaaacaaaggcaatgcacattcaggc

SEQ ID NO: 125815 - DNA, 605 bp, Homo sapiens
cattctcttgactgacctgactttcagtggctctagagaatactgattagtattctgactcatcagctcacaattaacttgtttggtgtaaaagataaaaatttcccctcmaattttcctacttctaacaagtttactctatgagctgtgactgaaatttggaaagttaaaatacagagcaaccggtttgtcttttggaacctctgccatcattaaagaagagccataattgctataaaaattgtaatgtttatgatgggagctgattatgaatagaaattccacgtagctataaagttcttacaactctgggagaggcagccatatatttctaggctaggaggaagagctgtggaaataactgaagtttaaacatacaaacatgccctgaaatgatcagtttattgttcttctttcttcatttagtttttctgtgaaaactgaatcatagccaagctcatgtctcatgggtaggacttaggtttcaacattacttaggaagagtagtgctgaaaaccacacggttaaaaatttttttcctaccaaaaggactctgtaaaatatgttatgcctgtattttgattcatagtttactgagaattaag

SEQ ID NO: 125816 - DNA, 605 bp, Homo sapiens
cattctcttgactgacctgactttcagtggctctagagaatactgattagtattctgactcatcagctcacaattaacttgtttggtgtaaaagataaaaatttcccctccaattttcctacttctaacaagtttactctatgagctgtgactgaaatttggaaagttaaaatacagagcaaccggtttgtcttttggaacctctgccatcattaaagaagagccataattgctataaaaattgtaatgtttatgatgggagctgattatgaatagaaattccacgtagctataaagttcttacaactctgggagaggcagccatatatttctaggctaggaggaagagctgtggaaataactgaagtttaaacatacaaacatgccctgaaatgatcagtttattgttcttctttcttcatttagtttttctgtgaaaactgaatcatagccaagctcatgtctcatgggtaggacttaggtttcaacattacttaggaagwgtagtgctgaaaaccacacggttaaaaatttttttcctaccaaaaggactctgtaaaatatgttatgcctgtattttgattcatagtttactgagaattaag

SEQ ID NO: 125817 - DNA, 597 bp, Homo sapiens
ctacatagcagtcacataggatagctatatgggttattttgtatatgtagcatggcatatattcagtagctattaattcatgatttcttggatacctaaaagttggatggaactcacttccttggaaggattcccatctagaggtattaaaactcttctgtggattttctcaggggttatcagaataggatggttaacagaaggtggaatgcaaaagaaggaagttggcaccccttcctttgactctgttctctctcacccactttgggaagctttcattcatcacaaatgaagacactcttgttgctgttaaatctgctgayaagtaatgtcatcggttctacttcaaggtgtaggagaccttgtagaatcaggtaaatatgctgccatgtgccctcctctgccttgggagtgaaaggaggaaatctaacactgacttagggaacaacatatgcctcatgaatacagaacacagaaactacattgacgaaagattgccatttcaacactgcatttagaatcacaattccataaggttcaaggtttgctgaatcaatcagtcaatcagtcaaaaaaccataagatgttacaggaaga

SEQ ID NO: 125818 - DNA, 607 bp, Homo sapiens
ctgatttaacgtgttctaaatgtgcagccaggactgaaaatcactagtttaatacttagttgtcagatttttttaaagggagataatatatgagattcaatgaaatactttatgaaaatgtttagcccagaccctggcccacccagctcaataatgctggtcgttattgttaaggcaggagatacagagggatcactgtctagagctgggactggcaatctggagtcagagcaaaactggctgaggtgacccctcactgccgatcttactaccctgctgcatcagatgagttattagcctaactggagccctcaggagagtctgatcccaactctaatcctgggagataatctgaaccctgactccttaatcctgagagtctgaaccctagctttttaattctggagtaaagtctgaaccctagccccttaattccggaggagagtctgaaccttagcttcttattcctggaagtgtctgaaccctggctccacagtcctgagagagattctgaaccctcaatccttaatcctgggacagaatctgaacactagctccttagtactgtgaaagartctaaaccctacctccttattccagggagaca

SEQ ID NO: 125819 - DNA, 595 bp, Homo sapiens
taaaatgaaaagatgagagttttagagttagacctgtatttgaatgctgatttcaacacttactgacttgacaaattcctgaaaccctttgtgcctttagttcctaatttgtaaaatgtggctgataacagacacctcttggggttgtcacaagataacctgtgtaaagaacctggaatgtgataagctctagatgaaagttctccaatacctccttccggagcagctaaagtacatctggttctaaagcacttgaatagcccaggaagtcagttctgggctcaggccaggcttttcttatgtggtaaatatttaactggacatggggacccatctaggtgctgggatctattggactaaggattgatccctgtgggtccaagacacatatgagttcagatccatggatagcccaatgggatgagtctaggagcctgaccatattggacctggccacasagataacctgtaatcactggattttgagattgtacacccgtcagttaagaggcaccaatttagcaggggatgttcctggtatccattggaggagccacatgccagaatgttctagtggttctcgcattaatatgta

SEQ ID NO: 125820 - DNA, 585 bp, Homo sapiens
cctgggccctgatcttctgccagtgattaactgacccttcttgcctcagcgtattaaactcttgactctaccatctggtgctcacccatcatctgtgtttcctgttgctgctgttgcagaggctctccaggatgtaccacatggtgtatctattcatgagtcatggatatgtaggytgtttctgctttttaactattattggagttatgaacatgcatttataagttttggtgtggacatagttttaaattttttggtatatacctagaaaaggaattgctgtgccacactaaactccatgtttaaatggactccatgtcaaactccaagtttaactttgtaagaaactttcaccaggtcacatatcataaaaggcagttactaaggaaggcatattttcctatttgcctattctggatattttatataaatagaataatctgatatatggccttttatgtctggttcagagacagaaagtaagtcagtggtggctaggggctgggtagaggaggacatgggaaattggtacaagggatcttttggaggagatgaaaattttctaaagagttttaagaatggtga

SEQ ID NO: 125821 - DNA, 585 bp, Homo sapiens
cctgggccctgatcttctgccagtgattaactgacccttcttgcctcagcgtattaaactcttgactctaccatctggtgctcacccatcatctgtgtttcctgttgctgctgttgcagaggctctccaggatgtaccacatggtgtatctattcatgagtcatggatatgtaggttgtttctrctttttaactattattggagttatgaacatgcatttataagttttggtgtggacatagttttaaattttttggtatatacctagaaaaggaattgctgtgccacactaaactccatgtttaaatggactccatgtcaaactccaagtttaactttgtaagaaactttcaccaggtcacatatcataaaaggcagttactaaggaaggcatattttcctatttgcctattctggatattttatataaatagaataatctgatatatggccttttatgtctggttcagagacagaaagtaagtcagtggtggctaggggctgggtagaggaggacatgggaaattggtacaagggatcttttggaggagatgaaaattttctaaagagttttaagaatggtga

SEQ ID NO: 125822 - DNA, 585 bp, Homo sapiens
cctgggccctgatcttctgccagtgattaactgacccttcttgcctcagcgtattaaactcttgactctaccatctggtgctcacccatcatctgtgtttcctgttgctgctgttgcagaggctctccaggatgtaccacatggtgtatctattcatgagtcatggatatgtaggttgtttctgctttttaactattattggagttatgaacatgcatttataagttttggtgtggacatagttttaaattttttggtatatacctagaaaaggaattgctgtgccacactaaactccatgtttaaatggactccatgtcaaactccaagtttaactttgtaagaaactttcaccaggtcacatatcataaaaggcagttactaaggaaggcawattttcctatttgcctattctggatattttatataaatagaataatctgatatatggccttttatgtctggttcagagacagaaagtaagtcagtggtggctaggggctgggtagaggaggacatgggaaattggtacaagggatcttttggaggagatgaaaattttctaaagagttttaagaatggtga

SEQ ID NO: 125823 - DNA, 585 bp, Homo sapiens
cctgggccctgatcttctgccagtgattaactgacccttcttgcctcagcgtattaaactcttgactctaccatctggtgctcacccatcatctgtgtttcctgttgctgctgttgcagaggctctccaggatgtaccacatggtgtatctattcatgagtcatggatatgtaggttgtttctgctttttaactattattggagttatgaacatgcatttataagttttggtgtggacatagttttaaattttttggtatatacctagaaaaggaattgctgtgccacactaaactccatgtttaaatggactccatgtcaaactccaagtttaactttgtaagaaactttcaccaggtcacatatcataaaaggcagttactaaggaaggcatattttcctatttgcctattctggayattttatataaatagaataatctgatatatggccttttatgtctggttcagagacagaaagtaagtcagtggtggctaggggctgggtagaggaggacatgggaaattggtacaagggatcttttggaggagatgaaaattttctaaagagttttaagaatggtga

SEQ ID NO: 125824 - DNA, 536 bp, Homo sapiens
gcagtaggggtgtgactacaggttactcccacatagatgtcagaggactgcaggcaactgtgcaattgcaagacctggtgccacgctgctgacagctaagaattcaagggacattgggttcaagttccgaagaattaggctacaagattttggtaaagggggtctaaaaggctgtctgatatacttcaaatgcatgttttgttattaccatgaatctgtttgtcccaggatgactccttctgaaataagcatctccttttatttataccctttgaatatcaaagaaayggtcaaaagaccacatggccatgccttaaatttgccctcaggaaagagggaatatgtgagtcctaaactgaagttggatgacaggagggaggatgatttattacctggggcacttagtattcttcagaatgtcccagactggccaacatatgatacacagaagtactgcagtcagctacttcctgggctactgtgtgcaggctccaaactcttcctggatgacctgctgattaggagtaatcacatgg

SEQ ID NO: 125825 - DNA, 417 bp, Homo sapiens
aactaacatttccaaatttttccttcatttttctgacttaaattcactaaaattgtaactaccttttccctgatgccctgcaagctgaagcttgtgtaaacaacctcgtgacatgcaaacaacagaaaaatctgtccgattgccactgcctacttccactttaaccaaagatgctttgactgtaatatctagacacctcaactgactgccctccagactctaaaaaaactggtatatagactattcccaacattaacctttttttttccaggcattttcaataaaccaaacattatcctttgtttttcttctgtttgagagcctgtctgcaatgccatctcctaaaattgttactggaaaggggtcccaattcagkcatcaatagagggttcttggacctcatgcaagaaagaattc

SEQ ID NO: 125826 - DNA, 468 bp, Homo sapiens
ttaaatgcaaaacctaaagcaataaaaactgtggaagataacctaggaaataccattctggacataggccctgcaaagtttttatgatgaaaactggaaaaacaactgaaagaaacccaacagttgaatgtgatccagcaatcccacttctggttatatacccaaaagaatgaaagtcagtatagcgaagggatatctgcactcacatgtttgttgcagcactgttcacaatagctaagatttggaagcaatctaagtgcctatcaacagatgaatggataaaaaatgtggtaggtatacacaatggactactactcagccataaaaaagaatgagattctgtcatttgcaactatatggatggaactggagatttttatgttacatgaaataarccaggcacagaaagacaaacatcacatgttctcacttatttgtgaaatctaaatatcaaaataattgaattca

SEQ ID NO: 125827 - DNA, 604 bp, Homo sapiens
tgaactaaagaaccaattaatgtgttgttactaattggtccctaaatgcaccactttcagctttatattaagccctattttaaatcagatttgcaataattaccatgtgattgatatccactgatgttttagtgaaaattaaccttctgtgggctaatctggaatattgctaacatttcccttctttttatcatataacttatctttctaatgaatccctaatagtatttggcattgacttttmacagtataaaaattgagcaaccatgcttttcttccttattttaaattatttttcttattaaaaatatatatttttgttatagaaaaacaatttttaaatcactgatagacccagacttttcactgtagaaatgggaggttgcaggaaaacaagggaaaggggctacaataatctatgtagcaatagatgagagttggagtcataaatataaactcatagttggcttaatatagatgcagatagttatataaaaaccattacagatacacaacacacacacacagatatagataagtatacatccatgtaatgtcattgctctgtcagggattagaagcaatgataactcagtaacaacca

SEQ ID NO: 125828 - DNA, 559 bp, Homo sapiens
tcatttctctagagtgtttctgccagtgtgctggtggacaagggtacatttacaacagccctggcatgcagaagtatttaggcaatggttctgacttaaaagcatgccaaattgcattgtaagccacataattaatttcagtttgttttctaagaccttgctcctcaaagtgttttgtatagaccagcagcatgagcaccacctgggagcttctttgaaattaaaactcctcaggtcttacaaaagacctactgatcagaatctgcatttcaacaagctccccagatgattaatatgcccctttgtgttagagacrctcagatctaaaactcaaggttgacctcagcactcctaattcatgatgtgatttggaagactcatatattgttgagactgaatatgccataagaaaatatggtaattgagactctcagcatatcgtttatcatggtgttatcatggaaacaccaaagaggtatctggagaattatcaagaggctgttctatattgaaaaaccctcatccctatcatctacagttgagcctgtcacctgtttaa

SEQ ID NO: 125829 - DNA, 586 bp, Homo sapiens
ttggtatgggtttgtcataggtggctcttattattttgaactaggttccttcaatgcctagtttgttgagagtttatagcctgaagatatattgaattctgttgacagcctttstgtgtctattcagatgatctcatggtttttgtttttagttctgtttatgtgatgaatcacatttattgatttgcataggttgaaccaaccttgaatcccagaaataaagcttacttgatagtggtggattagctttttgttgtgctgctgcattcggtttgccgtgttttgttaaggatttttgcatctatgtttattagggatatttggcctgaagttttctttttttgttgtgtttctgccagatttgggtatcaaaatgatactggcctcacaaaataagttggggaggagtcctcctctttgatttttcagaattgtttagtaggataggtaccagctctgttagaatttggctgtgaatctgtcccattcagggcatttttggttggtaggtttttattactgattcaattttgaatctcattattgtcatgttcatggatttgatttcttctcagtttaatcttca

SEQ ID NO: 125830 - DNA, 585 bp, Homo sapiens
ttggtatgggtttgtcataggtggctcttattattttgaactaggttccttcaatgcctagtttgttgagagtttatagcctgaagatatattgaattctgttgacagcctttgtgtgtctattcagatgatctcatggtttttgtttttagttctgtttatgtgatgaatcacatttattgatttgcataggttgaaccaaccttgaatcccagaaataaagcttacttgatagtggtggattagctttttgttgtgctgctgcattcggtttgccgtgttttgttaaggatttttgcatctatgtttattagggatatttggcctgaagttttctttttttgttgtgtttctgccagatttgggtatcaaaatgatactggcctcacaaaataagttrgggaggagtcctcctctttgatttttcagaattgtttagtaggataggtaccagctctgttagaatttggctgtgaatctgtcccattcagggcatttttggttggtaggtttttattactgattcaattttgaatctcattattgtcatgttcatggatttgatttcttctcagtttaatcttc

SEQ ID NO: 125831 - DNA, 605 bp, Homo sapiens
actggtctacaagtttcagagggacatagggaccttatttttaaaacctacatgtcttcatctgtctaagctgtataaacaataatgaagatcaatactgaaacacgagaatatgtgttttggaaaaatgaaaaattattctgtatgttgcaatagagagtaagctcctactgttcaaagtgaatgtgtgtgyatatgtgtgtaaacatatgaagatctgatccttttctgagcatatcattctcaaaagcaccatagcttagtcagtgaaagtacatggccttagattctgacagccccgccagcaaacctcaactcatttgacaatttttgttcctagtcgattgctataaatttttataaatttgtagttgattgctataaattttcaaggcaatgctacttatttgcacaatggtaatatttgtacttcctgaacagagtactggcatgctataaaattaatatgatatagatagtacatggtagttgctcaactgatgaaaggaattattaaatattacttcaatgccataggaaatacagtaaatatcatagttgatgacatttacaaatatgtttatggttgtttcactcatatgtaa

SEQ ID NO: 125832 - DNA, 605 bp, Homo sapiens
actggtctacaagtttcagagggacatagggaccttatttttaaaacctacatgtcttcatctgtctaagctgtataaacaataatgaagatcaatactgaaacacgagaatatgtgttttggaaaaatgaaaaattattctgtatgttgcaatagagagtaagctcctactgttcaaagtgaatgtgtgtgtatatgtgtgtaaacatatgaagatctgatccttttctgagcatatcattctcaaaagcaccatagcttagtcagtgaaagtacatggccttagattctgacagccccgccagcaaacctcaactcatttgacaatttttgttcctagtcgattgctataaatttttataaatttgtagttgattgctataaattttcaaggcaatgctacttatttgcacaatggtaatatttgtacttcctgaacagagtactggcatgctataaaattaatatgatatagatagtacatggtagttgctcaactgatgaaaggaattattaaatattacttcaatgccatargaaatacagtaaatatcatagttgatgacatttacaaatatgtttatggttgtttcactcatatgtaa

SEQ ID NO: 125833 - DNA, 536 bp, Homo sapiens
gccctctactgacagagttgaacctttcttttcatagagcagttttgaaacactctttttgtagaatccgcaagaggatatttgcatagctttgaggatttcgtgggaaacgggattgtcttcaggtaaaatctagacagaagcattctcagaaacttctttgggatgtttgcattcaagtcacagagtagaacattccctttggtagagcaggtttgaaacactctttttgtagtatctggaagtggacatttggagcgctttcaggcccatgttggaaagggaaatatcttcccgtaacaactaggcagaagcattctcagaaacttatttgagatgtgtgkactcaactaagagaattgaaccaccgttttgaaggagcagttttgaaacactctttttctggaatctgcaagagtatatttgcctagccttgaggatttcgttggaaacgggattgtcttcagataaaatctagacagaagcattctcagaaacttctttgggatgtttgcattcaagtcacagagtagaac

SEQ ID NO: 125834 - DNA, 536 bp, Homo sapiens
gccctctactgacagagttgaacctttcttttcatagagcagttttgaaacactctttttgtagaatccgcaagaggatatttgcatagctttgaggatttcgtgggaaacgggattgtcttcaggtaaaatctagacagaagcattctcagaaacttctttgggatgtttgcattcaagtcacagagtagaacattccctttggtagagcaggtttgaaacactctttttgtagtatctggaagtggacatttggagcgctttcaggcccatgttggaaagggaaatatcttcccgtaacaactaggcagaagcattctcagaaacttatttgagatgtgtggactcaactaagagaattgaaccaccgttttgaaggagcagttttgaaacactctttttctggaatctgcaagagtatatttgcctagccttgaggatttcgttggaaacgggattgtcttcagakaaaatctagacagaagcattctcagaaacttctttgggatgtttgcattcaagtcacagagtagaac

SEQ ID NO: 125835 - DNA, 348 bp, Homo sapiens
gaattcatacaaattgcagactgcagcgttctgagaaacatctttgtgatgtttgtattcaggacacagagatgaacattccctatcatagagcakgttggaatcactccttttgtagtatctggaagtggacatttggagcgctttcaggcctatgttgaaaaaggaaatatcttcccataacaactagacacaagcattctcagaaacttgtttgtgatgtgtgccctctactgacagagttgaacctttcttttcatagagcagttttgaaacactctttttgtagaatctgcaagaggatatttgcatagctttgaggatttcgtgggaaacgggattgtcttc

SEQ ID NO: 125836 - DNA, 586 bp, Homo sapiens
ataattgctctgtgaacttccactttgataattatggacccagtttctgctaccagatctacacctcttttgactgccttacttggctggaaggatggtcttgtaactgytgatgttggttttacctactgatattgtcattctttctcaaatgtaaagtgtttttattttattgttcttgttgttgttttataatttctattataatttcagggatatatgtgcaggtttgttacgtgggtgaacttgtgtcatgggggtttgttgtacagattatttcatcacccaggtattaagctagtatgcattagttatttttcctgatcctctccttcctccccacctccatcctctgaaaggccctagtgtgaattgttccctctatgcgtccatgtgttctcatcatttagctcccacttataagtgagaacatgaggtatttggttttcttttcctgcgttagtttgctaaggataaaggcctccagctccatccatgtccctgcaaaggacgtaatcttgttcatttttatggctgcacagtatttaatggtgtctatatcatgaactttctatatcaataagca

SEQ ID NO: 125837 - DNA, 586 bp, Homo sapiens
ataattgctctgtgaacttccactttgataattatggacccagtttctgctaccagatctacacctcttttgactgccttacttggctggaaggatggtcttgtaactgctgatgttggttttacctactgatattgtcattctttctcaaatgtaaagtgtttttattttattgttcttgttgttgttttataatttctattataatttcagggatatatgtgcaggtttgttacrtgggtgaacttgtgtcatgggggtttgttgtacagattatttcatcacccaggtattaagctagtatgcattagttatttttcctgatcctctccttcctccccacctccatcctctgaaaggccctagtgtgaattgttccctctatgcgtccatgtgttctcatcatttagctcccacttataagtgagaacatgaggtatttggttttcttttcctgcgttagtttgctaaggataaaggcctccagctccatccatgtccctgcaaaggacgtaatcttgttcatttttatggctgcacagtatttaatggtgtctatatcatgaactttctatatcaataagca

SEQ ID NO: 125838 - DNA, 586 bp, Homo sapiens
ataattgctctgtgaacttccactttgataattatggacccagtttctgctaccagatctacacctcttttgactgccttacttggctggaaggatggtcttgtaactgctgatgttggttttacctactgatattgtcattctttctcaaatgtaaagtgtttttattttattgttcttgttgttgttttataatttctattataatttcagggatatatgtgcaggtttgttacgtgggtgaacttgtgtcatgggggtttgttgtacagattatttcatcacccaggtattaagctagtatgcattagttatttttcctgatcctctccytcctccccacctccatcctctgaaaggccctagtgtgaattgttccctctatgcgtccatgtgttctcatcatttagctcccacttataagtgagaacatgaggtatttggttttcttttcctgcgttagtttgctaaggataaaggcctccagctccatccatgtccctgcaaaggacgtaatcttgttcatttttatggctgcacagtatttaatggtgtctatatcatgaactttctatatcaataagca

SEQ ID NO: 125839 - DNA, 649 bp, Homo sapiens
gggaaagaatgcaagccttctgaaaggtcagaaggttctgcagagccctgggggagaacagctgaaggcagctgttctataactctgaggcagagggcaaggagtaggtacaagggagtgtgggggaatgtatcttaaacaggcttgtttatttatgttgaccaggaactgacctttgatcatccacatgcgtgatgttccctgaaaggggaacaataaatgttaattccctacaggttgtgttggctccaggttttcggcattgtgcctgcactgaataaaagyaagcagctccagcttctcggggatgttctctggccactagagccaggcagtcacctagctgctcttacattgcatacctgtgtctgagtactcatttcatccatcagccagggtctgtgggacagacccggcaccctagtccctgttaatcactattttactttctgtctttatgaatgtgcctactctaggtagcttatataaattgaatcatacaatattgtccttttgtgactggcttatttcacttaacataataccttcaaagtttatccatgttgtaacatgtatcagaatgtcttttcttttttaaggctgaatattccattgtatgtatataccacattttgtttatccattcatc

SEQ ID NO: 125840 - DNA, 649 bp, Homo sapiens
gggaaagaatgcaagccttctgaaaggtcagaaggttctgcagagccctgggggagaacagctgaaggcagctgttctataactctgaggcagagggcaaggagtaggtacaagggagtgtgggggaatgtatcttaaacaggcttgtttatttatgttgaccaggaactgacctttgatcatccacatgcgtgatgttccctgaaaggggaacaataaatgttaattccctacaggttgtgttggctccaggttttcggcattgtgcctgcactgaataaaagtaagcagctccagcttctcggggatgttctctggccactagagccaggcagtcacctagctgctcttacaytgcatacctgtgtctgagtactcatttcatccatcagccagggtctgtgggacagacccggcaccctagtccctgttaatcactattttactttctgtctttatgaatgtgcctactctaggtagcttatataaattgaatcatacaatattgtccttttgtgactggcttatttcacttaacataataccttcaaagtttatccatgttgtaacatgtatcagaatgtcttttcttttttaaggctgaatattccattgtatgtatataccacattttgtttatccattcatc

SEQ ID NO: 125841 - DNA, 538 bp, Homo sapiens
aaactcttcttggttatcatgttgagggtgcctatcagggtcagaaccaccagtgggacagctcccttaggagaaggcctgtcaaaaaattggcccttaaggaaagttttagaatttcaaagtgtgcagaaataaggtcagtgaagcagagaaagactttacctcatggtgctatgaagatagcaggtgatctgtagtgctttggttcaggcttggaggctccttcaaggttcrtccacagagttctagggcttctcagataagcatggtgcttatatatgggaggtatatccaggcagttttttacacccttgatgcctagtgaattggcagggtgaaaatgatacagaggaatagggctgtctctgctttgattacaaatacatgctgagttttggcagctaagaggatgggtgtgtgagaagcagttttgatacgcaaattcccttgctggagtcaatgtggtgtaggagatagagggtaactggactttatgatgacattcagtgttgtggaaaaaccagtggcagacaggaac

SEQ ID NO: 125842 - DNA, 596 bp, Homo sapiens
gaatggcttcagcaaataactcattaaatatgcactgtttggcccaatgtgaagtgatatatctaaatggcatttgtaaatgcttatgtgaaactacttttagaaatgtcttaaaccacaaataaaaataaagagataggaagaagagacatttttctgtggatgcttttgttgttacaggtacccattctctttaattctgaagcctggttggtggaattgagatgaatttgttagggtcatattttaaacctcaggtagcacttcccccagctatccactatctttccatggcatattttatagtttagatctgcagggtaagcctcataaaaattacaaattttatcaccccacattaaagtgactggtatgacgagctgtatgagttaagagcatggctaattatctacctcttagcatttgcaaggtcagtgcatsaaccgctaagaaggtcagtactgggtgaagggctgacaagaacttgggaggttttgtgaaaagatcaatgaccttcatttgtcttaggaggcaaaacaggctgaaacaattccagcagagggcagcagtacctacatcagcatggcactgtgtca

SEQ ID NO: 125843 - DNA, 517 bp, Homo sapiens
ccatttctaccccaccaaggtaaccagtctctcggactctggaaattccattccctcccttattcctgtagcctaagggtgataacaactttctasttttgctaatttgggggttacctttttatcaactgtttggtatttaagctcctcccacatgtttgtagctagttttctattttaaaaccttactagttggctacctggaatgggtttcactttcctgatataggcccatgcaaatagacctcaggagtcccaaccctacaaaatacctacccaggtgtatctgaacactggtgaaggcaacatagactttgcttggatctgtaatacaggcatatattgaatcaattaacatatggtcaaatgtgaagacagagtcattgaagagccatctggaacttttgaacaggctgatagaaaagatggcgagggtggtgatgaatgtttcagtgcatggagttcaggatgaggggtggcatttctgaaaaatgaaacatcacatttaggctgggcg

SEQ ID NO: 125844 - DNA, 497 bp, Homo sapiens
ccacctggctaggtccattcaccctcacaggccaccctcgcggctatgctcgagggtcagctgaattccctggctttgctctccagccttagcagtggtctcctctccatcagtgtgtgcagatgagtttccaggagcccatcctttcatgggacacccagctctcctcgccctcctgcagggactcctgaggcaatgttcattctcctgttttccccaatattctcttttccccaaattctcattgtgactcctgcttccactaaygtggccactcttgcccctccctctccatcaacctaccaaagaaacatcagcctctggactttcaacccccatcctgctcccatcccaaatctatacttcaggtgtgcatattggaaatccccacccaaggtgctctgagaagttcataccatctgctcatggctctaccaattagcacctgaaggaacagaaaaactttgaaattagaatgttttccccctgcaggaacc

SEQ ID NO: 125845 - DNA, 607 bp, Homo sapiens
acagacatatcattataacacttgcatatctcttaaaaggaaaatacaagcaatataaaaaaggtattcctaaaattttcttcaaattcagagtctgaatatrcagactcattccttgatccagagtcattaccatctgtttttttcataagttttattgtccattaagtcatttgaagagcattggaaatgaataaatttggaatctgaaaaaagatagaggaaatattgaaaaccaaaggtggtttttaaaaagatcaatgccatgataaactgctagttagagggatcaaaaagagagagagaagttcaaatgaccaatatcaggaacaaaggagaggccatcatccttttagatgctgtagacactgagagaataataaggggcattaggttaaacttgatgctaatgaatttaacaacttagatgaaatgaacaaattctttgaaagatacaactactaatgtttgctaaagaaaaaaagagataatctgaataggcctgtatctattaaataaattaaatgattgtaaaaatatttttagagagaaaactccagggtcaggaccactagtgaatgctaccaaacatttaaggaaaaaataa

SEQ ID NO: 125846 - DNA, 612 bp, Homo sapiens
ccttcttaataaatagtcctgtcataaatgggtagccagtggaagaagatacaatctgtcttagtctgttttccgttgctataacagaatacctcagactgagtaatttataaagaaaataagcttayttagctcgtgattctgggggctgggaagtccaagagcagggtgccagcatctggtaagggccttcctactacatcataatatgacagagtgcatcacatggcaagagagcaagagcatgtcaacctctcaggtctctggtcttcttataaagccaccagtcccattatggaggccctaccctgatgactttatctaatcctaattatctcccaaaggccccacatccaaatgccaccaatctataaatttgggagttacatttccaacacatgaaattaggaggacatgttcaaacaagagcaccatcatatctgtttttccacttaagataaattccaatggatcaaatatctaattttttgaaagaagtaaagctatataaatactagaagaaaatatgatgaaaattttctataatcaagaaattggaaacacttttctaactctaactcaaaatccagatgcaatacaggaaaagaccaa

SEQ ID NO: 125847 - DNA, 612 bp, Homo sapiens
ccttcttaataaatagtcctgtcataaatgggtagccagtggaagaagatacaatctgtcttagtctgttttccgttgctataacagaatacctcagactgagtaatttataaagaaaataagcttacttagctcgtgattctgggggctgggaagtccaagagcagggtgccagcatctggtaagggccttcctactacatcataatatgacagagtgcatcacatggcaagagagcaagagcatgtcaacctctcaggtctctggtcttcttataaagccaccagtcccattatggaggccctaccctgatgactttatctaatcctaattatctcccaaaggccccacatccaaatgccaccaatctataaatttgggagttacatttccaacacatgaaattaggagsacatgttcaaacaagagcaccatcatatctgtttttccacttaagataaattccaatggatcaaatatctaattttttgaaagaagtaaagctatataaatactagaagaaaatatgatgaaaattttctataatcaagaaattggaaacacttttctaactctaactcaaaatccagatgcaatacaggaaaagaccaa

SEQ ID NO: 125848 - DNA, 583 bp, Homo sapiens
tgctcttgtttttaagaaaccagcttctgttcaggtggttttgtttgtatgcaaagattaaactgttaaataaaatcacaagcaccgtctattgtatcacagagtttcattttctcccggagctgaaacattttgkttttttttttaactatgacagtatttctgaactccatctacagtgaaaatcaaaaagcccgattttaacttacaccttattccagcacttaaacatatgaagttatgagttgctaagtgtgtacccttatttagctacttctaccagaataaaccaaatctcagttcaatatagtaatagacctgattatttaaatagagaaagagaaataagccctgcgctgagaaggaaagcttgagtattgccgcctcttggctaaaaataaatctatttctatagatcctgtttttatacaactataatccttttttatatatacaactgactttggaagaaaaaattgtatatagaaaaaaactattttaagactaatgagacgtttgagaaattgggctccgcaggcaaaaggcaccccacagaaagaattatgcaggacctcaactgttg

SEQ ID NO: 125849 - DNA, 583 bp, Homo sapiens
tgctcttgtttttaagaaaccagcttctgttcaggtggttttgtttgtatgcaaagattaaactgttaaataaaatcacaagcaccgtctattgtatcacagagtttcattttctcccggagctgaaacattttgtttttttttttaactatgacagtatttctgaactccatctacagtgaaaatcaaaaagcccgattttaacttacaccttattccagcacttaaacatatgaagttatgagttgctaagtgtgtacccttatttagctacttctaccagaataaaccaaatctcagttcartatagtaatagacctgattatttaaatagagaaagagaaataagccctgcgctgagaaggaaagcttgagtattgccgcctcttggctaaaaataaatctatttctatagatcctgtttttatacaactataatccttttttatatatacaactgactttggaagaaaaaattgtatatagaaaaaaactattttaagactaatgagacgtttgagaaattgggctccgcaggcaaaaggcaccccacagaaagaattatgcaggacctcaactgttg

SEQ ID NO: 125850 - DNA, 583 bp, Homo sapiens
tgctcttgtttttaagaaaccagcttctgttcaggtggttttgtttgtatgcaaagattaaactgttaaataaaatcacaagcaccgtctattgtatcacagagtttcattttctcccggagctgaaacattttgtttttttttttaactatgacagtatttctgaactccatctacagtgaaaatcaaaaagcccgattttaacttacaccttattccagcacttaaacatatgaagttatgagttgctaagtgtgtacccttatttagctacttctaccagaataaaccaaatctcagttcaatatagtaatagacctgattatttaaatagagaaagagaaataagccctgcgctgagaaggaaagcttgagtattgccgcctcttggctaaaaataaatctatttctatagatcctgtttttatacaactataatccttttttatatatacaactgactttggaagaaaaaattrtatatagaaaaaaactattttaagactaatgagacgtttgagaaattgggctccgcaggcaaaaggcaccccacagaaagaattatgcaggacctcaactgttg

SEQ ID NO: 125851 - DNA, 437 bp, Homo sapiens
agaattcaatgatttatatcttagagtgatattgtactattgagggaaatcatattaataggaaaaaaaagtttacctatgagacttttgttattgttaatttgatgaaaatttaccagttccttcattaagattaacacttagaaatcttgcttgtaaaaacaaattaaaacaaaacaaacaaaaacatctctaaaacaccttaataatcttttataaaataatgatgagttatatgtagttaatttttgccaacgtattagaacatgaggtgytctgtactcctttttaagcaattgataatgtccaaatctcaagctgatttttacatttaaataaaggaagttatttattattacatactcatattcattaatcaaaatatataaaatatttaaaaaatatgtcaatggaaagaaacctttctgttataaact

SEQ ID NO: 125852 - DNA, 572 bp, Homo sapiens
gatccatctttgtgaacttaatgattcaaactctgttgtttatagcaggtttaaaagaacagctcttattactagatgttcagaaaaatataaattttatgtttctattaaatttagaagattctacccatttttagcattaaaaaatatgaaatgtttattcagataaaaatttagtccaatgtagatagatatacagtgtcttctaggtaaaaatgtttagtctcccagacacctttccttcttagtttttgtctccttaagatagtgcctattcatagggraggggttggggggataaatggaacttattttataaggtttcatggtggtaggggaagcaaacaaacaaataccttgagtgctatgtcctcagatttctacggtttccaaagaattggttatgtgctgttggcacagaattggttatgtgctgttgacatctgctagtgatcactgctgattctgtatcgagtgtgagtctctcagcttagaaagcatgtaaaagtgatcatgtgatcaagtgatcttcatcaagtggaaggttcacctcagcttccactgcacctgtc

SEQ ID NO: 125853 - DNA, 593 bp, Homo sapiens
tgaccacctcaaccctggtacactaagaacagatagctcagcataggactcaaatggaaaagctagacggatttctgcccacccttgctttgtgcccacatttagaggagaagacagaaggatttggtgccttctttgctagtgggtgtccttctcttgacttttgtttgtctttttacatttattgcattcagataactaattatttattccttaatgtgtcaggtgctgttctaattttttttttttttgagactgagtcttgctctgttgcccaggctagagtgcagtggtatgatctcggctcactgcaacctgggtctcccgcgttcaagcgattctcctgcctcagccttcygagtagctgggattacaggcacctgccatcacgccctgataatttttgtatttttagtagagacggggtttcaccatgttggccaggctggtctcaaactcctgacctcaagtgatctgcctgccttggcctcccaaagtgctgggattacaggtataagccaccgcgcccggcctgttctaaacattttacacatataaactattccatttagcttgaaacctcaattacaggg

SEQ ID NO: 125854 - DNA, 593 bp, Homo sapiens
tgaccacctcaaccctggtacactaagaacagatagctcagcataggactcaaatggaaaagctagacggatttctgcccacccttgctttgtgcccacatttagaggagaagacagaaggatttggtgccttctttgctagtgggtgtccttctcttgacttttgtttgtctttttacatttattgcattcagataactaattatttattccttaatgtgtcaggtgctgttctaattttttttttttttgagactgagtcttgctctgttgcccaggctagagtgcagtggtatgatctcggctcactgcaacctgggtctcccgcgttcaagcgattctcctgcctcagccttctgagtagctgggattacaggcacctgccatcacgccctgataatttttgtatttttagtagagacggggtttcaccatgttggccaggctggtctcaaactcctgacctcaagtgatctgcctgccttggcctcccaaagtgctgggattacaggtataagccaccgcgccyggcctgttctaaacattttacacatataaactattccatttagcttgaaacctcaattacaggg

SEQ ID NO: 125855 - DNA, 440 bp, Homo sapiens
tgaggggccatagtggagagtcatggcctcttacctagttttcaaacttgtttccaaacttagtttcctaagtcagttcacagaccttgaagccctttattgaaggggagacttgattcctttgagaaaagacagccctgcactgttgctccaggttcataccatgccttttcctccaagccttccctaaagaggcctatgggccatttactaaagtgactgtgcattggagaacaagaaatgcccmgaccttttagggaaagctggaaactgactctgaattggtgctaattcctagggcttcaaaatgttattatggtcagcaagtcaaagtagaggcttatggtggttagatgatagatggagtcctacgtctcactaacagtggaccaaattagtccacagacccaccctgcagttgtttcccagctcctaaatgt

SEQ ID NO: 125856 - DNA, 524 bp, Homo sapiens
gaaggggagacttgattcctttgagaaaagacagccctgcactgttgctccaggttcataccatgccttttcctccaagccttccctaaagaggcctatgggccatttactaaagtgactgtgcattggagaacaagaaatgccccgaccttttagggaaagctggaaactgactctgaattggtgctaattcctagggcttcaaaatgttattatggtcagcaagtcaaagtagaggcttatggtggttagatgatagatggagtcctacgtctcactaacagtggaccaaattagtccacagacccaccctgcagttgtttcccagctcctaaatgtagagagatctatacgtcaggacagatctcagcaagatcaaagggagtaggtacacactacagagcagacatacatggaacagacacacatggcaactggcacattcccacattggttctctgacccatgcagtgaagatcactatrgtaggaaaggctaagtggtagcacctggaacttccctac

SEQ ID NO: 125857 - DNA, 659 bp, Homo sapiens
tttccctttttgcaaccttacagtttctattctttttcatctcattattctttaaacatasttttgttaaagtcttttacagattgctcattgttggaaattcctaggctgtttaaacatccacttgttacctctgtggactttctcagggtggttgtttcctcaagaaattgataatttttgacaaaaagttcatctttagtgggaaatttttctcctccatgggagatactctttgaagcagttcaatatctaccttgcctaaatcttcagcattcttccacagtcccaccatccatcagggtttagcctgggcttgttgctctggcttgagttcctctcagtgtctggaaacaggatttctctttcttccttgtgaggttgactttacattaatgtttcctgttgtgtatttcatccagcatttctgactttggaagaataatacagatgtctccccacttttactttctagtgagtactcccaagtctttcctcagagccctcagagccctgcaactgacacttgtgcccacagaacattcctgatatggtttggctctatgtccccacccaaatctcatcttgaattgtaatctccacatgtcaagggggacacggtgggaggcaattggattatggaggtagtttcccccatg

SEQ ID NO: 125858 - DNA, 498 bp, Homo sapiens
ttatggaaatgagtgaagcatttctaagtgtattgagcttggaagatacatatagacatacttgtaaattttgtatttgtatttatattatagtctttatattagactatatattgagtctttggtactcttatttttcataattcagtttggaagtgcattaaatttacctttgtcctatctatttttaaaatgcttacaaaggaaaataaagataaaaatataattataaggaaaattttatccttcttatatctttaagaatgaacttttacatctttgttacccaggctggtctcgaaaacttgggcccaaaaaatcctcctgcctctgcctcccaaagtgctgggattagagacgtgagccaccacatttggcctgaaagatttcaaagcaaacaataaagaccaaaaaaaaaaaaaamaaaaacaaaaacaaaaatcctagtagaaaacaaaggaaaatattttttgcaattttgagatgaaaacatttgtg

SEQ ID NO: 125859 - DNA, 407 bp, Homo sapiens
caatagccggcaaaagaaggaaaagggaagaaatctcaacgatacccctctgtgtttcccacctacaatgagagcatgagattggatgaaattggattcaccagcttctctcactacctcaacaccctagggattcttcttataattgggatacatatgtagccaccgctttatgatatgcaaggcccattcctttatacattcattcaagaaagttacattcacatctggtgtacaatatctaagtaaaaatgggtgctaagaacagagatgataatcactattttatagatgagaacagaggaaacrattatgaacttgatcagacatagctaagtggagtaggcaaatgcagaacccagggcttctggttcctagctcacttctctttctacctcatccaaaat

SEQ ID NO: 125860 - DNA, 577 bp, Homo sapiens
tagctcagggactggtttgctggtatcaaggttttttgtgctgtttctcaggccagaaatgtgggtacattgagtgagttgaccaagtcagggaactgcttgctagggtcagggctgccaggctgttatgctggctgggggcacggaccatggctgatcaactggctcaggggctagtcctttttggttgggtccactggaccttttttctggttggaggcattggcctgtagcttctgagttggcttggggtttatctactgggtgctggtccactagtctgtttctctggccaggcgaatattttgcccataatttccaccttaaagattttatattcaaaaacagtcacattctgagttactgagggttagtacttcaacataaagwtttgagggtaggcatttctggccataaccattggcatctgtattagtccgttctcacattgctatgaagaaatacccaaaactgggtaatttataaaggaaagaggtgtaactggctcacagttccacattgttggggaagcctcagaaaacttgcaatcataatggaagacaaaggagaagcatgc

SEQ ID NO: 125861 - DNA, 618 bp, Homo sapiens
taacattacacagactccctttacaatctaaccttagtctaattttcttccaccttctaattttttatttatttttttcttttaagacagtgtcttgctatgttgcccaggatggacttgaactcctgggctcaagggatcctcctgcctctgcctstgaagtagctgggactataagcatgtgctatggtgcctcgcttctaacttttaaaaaagataggctctttactatcatgcctctgtaattttttcctcaggcttttactgctttttagaatgttctttcccccatatttctatttgctgaattcctattcaaactgtgaagaccatctcaattgctattactaatataaagtcttctttgttccaactccatgttcccaagcttgactaataatttcctcttccatgtatataaaatcattatagcactacgttgagtttgttggtacttgtttgaatgccttcctctccccctaaattatgagtctcctgaggggcaaactacatctcttatcaacttcatactccatagttgttcaatatttgttaattaattaacaaattaatgaggttgtacattgtacaacctcaagtattggtgaggttatacaa

SEQ ID NO: 125862 - DNA, 618 bp, Homo sapiens
taacattacacagactccctttacaatctaaccttagtctaattttcttccaccttctaattttttatttatttttttcttttaagacagtgtcttgctatgttgcccaggatggacttgaactcctgggctcaagggatcctcctgcctctgcctgtgaagtagctgggactataagcatgtgctatggtgcctcgcttctaacttttaaaaaagataggctctttactatcatgcctctgtaattttttcctcaggcttttactgctttttagaatgttctttcccccatatttctatttgctgaattcctattcaaactgtgaagaccatctcaattgctattactaatataaagtcttctttgttccaactccatgttcccaagcttgactaataatttcctcttccatgtatataaaatcattatagcactaygttgagtttgttggtacttgtttgaatgccttcctctccccctaaattatgagtctcctgaggggcaaactacatctcttatcaacttcatactccatagttgttcaatatttgttaattaattaacaaattaatgaggttgtacattgtacaacctcaagtattggtgaggttatacaa

SEQ ID NO: 125863 - DNA, 551 bp, Homo sapiens
gctccaaaaattaaatgcgatagtggagtggtcatttaccgggagttaaattatcaaataaacaagtaaacaaaatatatatgtctcaatagatagatagatatagtctactgtaattctactaacagaatataaccactgttaatatactgatgtttctcttctacatttttaaacatacatgcacatatctatgtctacacctagaaatacacacacacattgtatatattgcaatgaacctcttgtagctaaatactttcacacttctgaattagttttcagattctttgtatttgtaatatgtatgatctctttggacaaaccaacacattaatttttttgtgataaaacttaaaaaatttttaatttatggcattttattttgtgcactgtyttaaaaaatactttttgagctccaaaataaatattaacctgtgctcttttattaatttattgtatcatgtgtttttaaaaatccatagccctgctaagatattgtgatgtaaggtatgtgatagggaaccaaacattcccccccaaaatgttag

SEQ ID NO: 125864 - DNA, 592 bp, Homo sapiens
gagcatcctggtaggatatacagctttgtaggtttaaaaatgtgatgtactcagtgcacgaatagctaagtgagttcaagagactattccatacagaccaagctcagaaattgacagaagagttaattgtccctataccaattttttaatttacagtaagattagaacaggcaagggggcaccagatattcatgtcagcatgtcagtgtatccttccctagtatgcaaacctacatgggatgtcaagtttccatttgaaaattatttggtgagcatagttgtagagctggtatcctcatgttacctggttaccacatacgagagaggtaaccaggaaaaataaacttgttggatgcagatgtctgagattatttgttatggtgggcagtggggatatgaagtcaaaatatctgtttagaatgtgcaatcttyaatgaagcctgacctccaaccataaaatgtgtcagatgaccctggaaagggacaaagaacttgatgtctgctaaaacatgccaaagcctccacagatgagaggactgccatcaatctgggctctacatggaagaagcaatggggtttaaagttctcctta

SEQ ID NO: 125865 - DNA, 637 bp, Homo sapiens
gagcctacaactctcctccatactggttgtactaatttacattcctgccaacagtgtacaaaggttccttcttctccacatcctctccagcatttgttattgtctgacttttggatagaagccattgtaactggggtgagataatatctcattgtagttttgatttgcatttctctgaagatcaatgatgtggagyactttttcatatgcctctttgccatatgtatgtcttcttttgagaaatgttcaaatcttttgcccatttcttgatcagattactagatttttacctatagttatgaatccattgtcagatagatagcttgcaaatattttttctcattctgtgggttgtcccttcacttcgttgacagtatcctttgttgtgcagaagctttttaacttgatgtgatcccatatgtccatttttgctttggttgcctatgcctgtggggtattactcaagaaattttttgctcaaaccaatgtcctggagagtttcccccatgttttcttgtggtagtttcatagtttgaggtcttagatttaagtctttaatccattttgattttacttttgtatatggtgagacataggggtctatttttattcttctgcatatggatatccagttttc

SEQ ID NO: 125866 - DNA, 614 bp, Homo sapiens
ttgacacttgatttctcttcaaatcttcagctggacaaatgtctgcccagtcccaagcctctctttcttagataccaggtgcagaacctacacacaagtctctggaaacgtttaaaggttagatgcttcctatagggcaatcgaaagtaattttcactacttgtgtgcacgtcttkatgtgttccagagggaagatgttcatacgccttgaaaagctggatgaaatactatctcgcttctatgagcctgattcactctgatcacgctacttttacgtcatggcttcaagttctttatctaattactgcatgtcctcatgggtgtctatagagggggaggggtgcttttttttttcttttccttatttctctaagaaagaaaggtgtgcttttcttactacaaggctacagtaaccaaaacagcatggtactggtgccaaaacagatacatagaccaatggaacaaaacagaggcttcagaaataacaccacacatcgacaactatatgatctttgacaaacctgacaaaaacaagcaatggggaaaggatttcctatttaataaatggtgttgggaaaattggctagccatatgcagaacactgaaactggacc

SEQ ID NO: 125867 - DNA, 614 bp, Homo sapiens
ttgacacttgatttctcttcaaatcttcagctggacaaatgtctgcccagtcccaagcctctctttcttagataccaggtgcagaacctacacacaagtctctggaaacgtttaaaggttagatgcttcctatagggcaatcgaaagtaattttcactacttgtgtgcacgtctttatgtgttccagagggaagatgttcataygccttgaaaagctggatgaaatactatctcgcttctatgagcctgattcactctgatcacgctacttttacgtcatggcttcaagttctttatctaattactgcatgtcctcatgggtgtctatagagggggaggggtgcttttttttttcttttccttatttctctaagaaagaaaggtgtgcttttcttactacaaggctacagtaaccaaaacagcatggtactggtgccaaaacagatacatagaccaatggaacaaaacagaggcttcagaaataacaccacacatcgacaactatatgatctttgacaaacctgacaaaaacaagcaatggggaaaggatttcctatttaataaatggtgttgggaaaattggctagccatatgcagaacactgaaactggacc

SEQ ID NO: 125868 - DNA, 516 bp, Homo sapiens
atgcctgtgtccaccaaagtcggggtgtattcctgagggttgggcatgatgtcartgttcagctctttaccactgtccaacttgtgtctgccagtctctcatagagaatcttgttcaaggcatcagaagcattagaaatcaattcttgaaggaaatatctgcttgttggaatagaagatattgataataagagacctgagttgggcaatttctgtctgaaaggcaaaagtctccacctcctctccatggtgtacttcctcagacatcttgaaaagaaaagccttacaagtactagagagcaaggtgggttgggactgtcccacatgtatgcggcaccaaggctgtgcaacagtgacttggagcccatatgtcttcttttgaattgaattgtcttttcaagtcttttgtacatttttcaaaatgaggttattttctttttattattgagttttaagagtttcctaatatactctggataaaagttatttgtcagatatttgtgttacaaatgtgttg

SEQ ID NO: 125869 - DNA, 576 bp, Homo sapiens
cagtctggtagaaacagagtagaaaggtgattaccaaaggctgggggaagggagagagatggggaaagggaagatgttgatcaaaggatacaaaatttcagttagactggaggaataagttttagtgatctattgcactgcatggtgggcacagttaataatgtattatatatttcaaaattgctaaaagaatagrtttttaattttctcaccaccaaaagaaagataatttggcactatgatgtgaatatcccaaaaatgatgtgttgaaaacttgattcccagtgaagcagtgttatgaggtgaggcctaatgggagacattcaggtcatgagggttccaccctcacaaatgaattaatgcccattgtaaaatggcttgaggctgcaagttcagtctcttgctctctcttctgtcataatatatgcagcaagaaggccttccccagatgccaaccactcagtcttgaactttccagcctccagaaccatgagccaatacattttcattataaattaacgtacctcaggtattctgttacagcagcacaaaacaaattgagacagttggtgaggt

SEQ ID NO: 125870 - DNA, 576 bp, Homo sapiens
cagtctggtagaaacagagtagaaaggtgattaccaaaggctgggggaagggagagagatggggaaagggaagatgttgatcaaaggatacaaaatttcagttagactggaggaataagttttagtgatctattgcactgcatggtgggcacagttaataatgtattatatatttcaaaattgctaaaagaatagatttttaattttctcaccaccaaaagaaagataatttggcactatgatgtgaatatcccaaaaatgatgtgttgaaaacttgattcccagtgaagcagtgttatgaggtgaggcctaatgggagacattcaggtcatgagggttccaccctcacaaatgaattaatgcccattgtaaaatggcttgaggctgcaagttcagtctcttgctctctcttctgtcataatatatgcagcaagaaggccttccccagaygccaaccactcagtcttgaactttccagcctccagaaccatgagccaatacattttcattataaattaacgtacctcaggtattctgttacagcagcacaaaacaaattgagacagttggtgaggt

SEQ ID NO: 125871 - DNA, 543 bp, Homo sapiens
cagattgtggggaggggtgctgcagatagtgaagtctgattttttgctgcctactcagagtttctttacatctctgtggccctggtagttgtttcatcctcatatttgagttctgggatatctcagtgctgtatatttgttttctattttctgtggaggagagtgaggccagcttgtttgtatgccaccagtttggaaccagaaactgaataataatgtattgcatatttcaaaatgtctaaaaacttaraatttacatattctcaccacaaaaatattaataagtatgtaaggtgatgaatatattaattagcttgatttggccattccacaatgtatataaacatcacatatcaaaatatcacattgcatccccaaaatatatacaattattatttgtcaatgaaaaacaaaatttaaaaaaatctatgtacatggaggcaaaaaataaataaattccactctcccccagtaatactgtattgaaaaggagaattgcccctctaagtgcatttccagttaggtgaatttcaggctgggggg

SEQ ID NO: 125872 - DNA, 616 bp, Homo sapiens
gtttagtgccaaacagattgtggggaggggtgctgcagatagtgaagtctgattttttgctgcctactcagagtttctttacatctctgtggccctggtagttgtttcatcctcatatttgagttctgggatatctcagtgctgtatatttgttttctattttctgtggaggagagtgaggccagcttgtttgtatgccaccagtttggaaccagaaactgaataataatgtattgcatatttcaaaatgtctaaaaacttagaatttacatattctcaccacaaaaatattaataagtatgtaaggtgatgaatatattaattagcttgatttrgccattccacaatgtatataaacatcacatatcaaaatatcacattgcatccccaaaatatatacaattattatttgtcaatgaaaaacaaaatttaaaaaaatctatgtacatggaggcaaaaaataaataaattccactctcccccagtaatactgtattgaaaaggagaattgcccctctaagtgcatttccagttaggtgaatttcaggctggggggttagtctatcaagatgaaaaggctttcctggtgacttgccaaacaaatgaggataattat

SEQ ID NO: 125873 - DNA, 616 bp, Homo sapiens
gtttagtgccaaacagattgtggggaggggtgctgcagatagtgaagtctgattttttgctgcctactcagagtttctttacatctctgtggccctggtagttgtttcatcctcatatttgagttctgggatatctcagtgctgtatatttgttttctattttctgtggaggagagtgaggccagcttgtttgtatgccaccagtttggaaccagaaactgaataataatgtattgcatatttcaaaatgtctaaaaacttagaatttacatattctcaccacaaaaatattaataagtatgtaaggtgatgaatatattaattagcttgatttggccattccacaatgtatayaaacatcacatatcaaaatatcacattgcatccccaaaatatatacaattattatttgtcaatgaaaaacaaaatttaaaaaaatctatgtacatggaggcaaaaaataaataaattccactctcccccagtaatactgtattgaaaaggagaattgcccctctaagtgcatttccagttaggtgaatttcaggctggggggttagtctatcaagatgaaaaggctttcctggtgacttgccaaacaaatgaggataattat

SEQ ID NO: 125874 - DNA, 432 bp, Homo sapiens
gatgtttcaattgaagtcacagtgttgaacagtccctttcatagagcaggtttgaaacactctttttgtagtatctggatgtggacatttggagcgctttcaggcctatggtttaaaaggaaatatcttcccctgaaaactagacagaagcattctcagaaacttatttgtgatgtgcgccctcaactaacagtgttgaagcattcttttgatagagcagttttgaaaaactctttttgtggaatctgcaagtggatatttgtctagctttgaggatttcgttggtaacgggattacatataaaaagcagacagcagcattcccagaatcttgtttgtgatgtttgcattcaagtcacagagttgaacattccctttcatagagcaggtttgaaacactctttttrtagtatctggatgtggacatttggag

SEQ ID NO: 125875 - DNA, 533 bp, Homo sapiens
atgtcctgtgttccaaggaatgagccaaggcttcagatgttcctcaaagataaggaatgaatctccgggttggccactcctggattccttagcttggaactctgagcacacattcttcctagaccattgggtcatttgcagggtatgcttaagttattgctgtcaggcacatctgccatacagttaccttggacgataaaaatagtgaacatctattggtcattaacaatgagccagacactcttctaagctttttctatgcattcacttgtgtcctcataaccttataaggtagatgctaggaayagctgtattttacagatagagaaacgggggcactgcctggtaacttgcctaagtttaaacagtggcagagtcaggatgtaaatgtcagcagcctccttcaagagcccatgctatcagccaccattagctgcaccccttactgagtctgtttccacccctgaaaacttggtgagacacaattgctagaagttggtatgaagaatttatctcgttgaagtctcacaagc

SEQ ID NO: 125876 - DNA, 562 bp, Homo sapiens
gccggcaccttcgttatggacttccagccccaacaccgttgttgacaagccagccagtctatggcactttgctrtggcagcctgaacaggataaggcacactccataaagaaccggtattcaacatgcatttttgtacctgctcttatcatttttttatttacacttgaatatcttgctctgggcagaatgatctcggtctcattaaagcacaaaatttagattctcccaactttgctcaagtgatctccctggctgaaagtttcctttcccacccatacgctgtctgactccctgagtccctatgcttgaagtccaatctccattatgaaccccacagtcggtgccctctgcttctgaatgcttttgactcttgctatggtaaacattcaacttgacattttcatattgatttgcagttttcagctgaataataaattgtaggaaagagccataattcaccctctatggtatcctccagggatgaataacagtgattttcaccttgtactggagacagaacccttggacactgaggaactcgctgtggagcctgctgaaat

SEQ ID NO: 125877 - DNA, 562 bp, Homo sapiens
gccggcaccttcgttatggacttccagccccaacaccgttgttgacaagccagccagtctatggcactttgctgtggcagcctgaacaggataaggcacactccataaagaacyggtattcaacatgcatttttgtacctgctcttatcatttttttatttacacttgaatatcttgctctgggcagaatgatctcggtctcattaaagcacaaaatttagattctcccaactttgctcaagtgatctccctggctgaaagtttcctttcccacccatacgctgtctgactccctgagtccctatgcttgaagtccaatctccattatgaaccccacagtcggtgccctctgcttctgaatgcttttgactcttgctatggtaaacattcaacttgacattttcatattgatttgcagttttcagctgaataataaattgtaggaaagagccataattcaccctctatggtatcctccagggatgaataacagtgattttcaccttgtactggagacagaacccttggacactgaggaactcgctgtggagcctgctgaaat

SEQ ID NO: 125878 - DNA, 562 bp, Homo sapiens
gccggcaccttcgttatggacttccagccccaacaccgttgttgacaagccagccagtctatggcactttgctgtggcagcctgaacaggataaggcacactccataaagaaccggtattcaacatgcatttttgtacytgctcttatcatttttttatttacacttgaatatcttgctctgggcagaatgatctcggtctcattaaagcacaaaatttagattctcccaactttgctcaagtgatctccctggctgaaagtttcctttcccacccatacgctgtctgactccctgagtccctatgcttgaagtccaatctccattatgaaccccacagtcggtgccctctgcttctgaatgcttttgactcttgctatggtaaacattcaacttgacattttcatattgatttgcagttttcagctgaataataaattgtaggaaagagccataattcaccctctatggtatcctccagggatgaataacagtgattttcaccttgtactggagacagaacccttggacactgaggaactcgctgtggagcctgctgaaat

SEQ ID NO: 125879 - DNA, 562 bp, Homo sapiens
gccggcaccttcgttatggacttccagccccaacaccgttgttgacaagccagccagtctatggcactttgctgtggcagcctgaacaggataaggcacactccataaagaaccggtattcaacatgcatttttgtacctgctcttatcatttttttatttacacttgaatatcttgctctgggcagaatgatctcrgtctcattaaagcacaaaatttagattctcccaactttgctcaagtgatctccctggctgaaagtttcctttcccacccatacgctgtctgactccctgagtccctatgcttgaagtccaatctccattatgaaccccacagtcggtgccctctgcttctgaatgcttttgactcttgctatggtaaacattcaacttgacattttcatattgatttgcagttttcagctgaataataaattgtaggaaagagccataattcaccctctatggtatcctccagggatgaataacagtgattttcaccttgtactggagacagaacccttggacactgaggaactcgctgtggagcctgctgaaat

SEQ ID NO: 125880 - DNA, 566 bp, Homo sapiens
agcacatgtgttggattactaattaagagatctcatgtrcaacatgaggattaaagttaataaaattgtacagtattagggatttttgttaagtagattttagctgctcttgtcacacacaaatagtaactatgtgagatgatagctatgttcatctgcttcactatatagccattttactatctctctatatcccatgtcatcaggatataaacctcaaatacacaccatgaaatgtgcttttaaaacacttgcattcataggttatttagacaatagtaacaccattaagggaatatacaaaatggtgctccttatcaggtgcagccaaagctgtctcatggcgaatatattagcattaaataatttccctatgaaacaacaaactacaacaaacaaccccagcaaatcatttaggaattttttaaggttacatttaaacataatctagcaatgttaaggagaattaggtatgataaaatataaagttaaagaatcagtaaaaagtggagtttatatatgcaagagctggttcttaaaaataataatgacaaatgtctgaaaat

SEQ ID NO: 125881 - DNA, 512 bp, Homo sapiens
gtgggtgagttaagtttcaagtgtccatatgagacattcaaagggagatatttcacaggaagtcatatatagaggtctaaagctgtggaragtggtcttggagggagacagatttcagccaggggagtcggaggaatcctccaggaagacagccaaggaagagagcagaggacctgacacagaacccgagaaacaccaaaaggaaagagaagctcagaagaagaccgagagggcatggtgtgagggagaaaaccattaggagggtggtggcacagaaacccaggaaagagctattttcaagctagaggcatcatttaagaggttcaactctgcttggaggtcacaaaagataaggattgagacatagtgctttggatttgtcaacaaacaaatcatcacgggcttcaaggagagcagttcctgtagaatattggggcagaaaccagactgcagtggactgaaggggagaggggaggggagcaacaggaggcaggtggagaaacccagtggtg

SEQ ID NO: 125882 - DNA, 512 bp, Homo sapiens
gtgggtgagttaagtttcaagtgtccatatgagacattcaaagggagatatttcacaggaagtcatatatagaggtctaaagctgtggagagtggtcttggagggagacagatttcagccaggggagtcggaggaatcctccaggaagacagccaaggaagagagcagaggacctgacacagaacccgagaaacaccaaaaggaaagagaagctcagaagaagaccgagagggcatggtgtgagggagaaaaccattaggagggtggtggcacagaaacccaggaaagagctattttcaagctagaggcatcatttaagaggttcaactctgcttggaggtcacaaaagataaggattgagacatagtgctttggatttgtcaacaaacaaatcatcaygggcttcaaggagagcagttcctgtagaatattggggcagaaaccagactgcagtggactgaaggggagaggggaggggagcaacaggaggcaggtggagaaacccagtggtg

SEQ ID NO: 125883 - DNA, 596 bp, Homo sapiens
attagtattattatattttttcagaaacggggttttgctatattgttcaagctggtcttgagcttgtgagctcaagagaccctcttgctttggcttcccgagtagctgggactataggcacgtgccacagtgcccagtgataaattttttttaattgacaaataataattgtacatattcatggggtacatggtgatattttggtacatatgatgtmcagtgatcagatcagggtaattagcatatccatcatctcaaacatttatcatttctttgtgctgggaccgttcaatattcttctggctatttgaaactatatatcatccttaactatagtcatcctacactagtattgaacattaggacttatgcttcctgtctagctgtaattttgtagcctttaacaaatctctccttatccttcccttcccactatgggaaggttaggctcttgaatcagtacatcagaccaaaaaaattccattgataatggttaattatttttgaaaaattccctaggcctataccatttgggagacctacatgattgtttctcaaagagccgaagtagtccatttttctcctctcattaggag

SEQ ID NO: 125884 - DNA, 596 bp, Homo sapiens
attagtattattatattttttcagaaacggggttttgctatattgttcaagctggtcttgagcttgtgagctcaagagaccctcttgctttggcttcccgagtagctgggactataggcacgtgccacagtgcccagtgataaattttttttaattgacaaataataattgtacatattcatggggtacatggtgatattttggtacatatgatgtccagtgatcagatcagkgtaattagcatatccatcatctcaaacatttatcatttctttgtgctgggaccgttcaatattcttctggctatttgaaactatatatcatccttaactatagtcatcctacactagtattgaacattaggacttatgcttcctgtctagctgtaattttgtagcctttaacaaatctctccttatccttcccttcccactatgggaaggttaggctcttgaatcagtacatcagaccaaaaaaattccattgataatggttaattatttttgaaaaattccctaggcctataccatttgggagacctacatgattgtttctcaaagagccgaagtagtccatttttctcctctcattaggag

SEQ ID NO: 125885 - DNA, 596 bp, Homo sapiens
attagtattattatattttttcagaaacggggttttgctatattgttcaagctggtcttgagcttgtgagctcaagagaccctcttgctttggcttcccgagtagctgggactataggcacgtgccacagtgcccagtgataaattttttttaattgacaaataataattgtacatattcatggggtacatggtgatattttggtacatatgatgtccagtgatcagatcagggtaattagcatatccatcatctcaaacatttatcatttctttgtgctgggaccgttcaatattcttctggctatttgaaactatatatcatccttaactatagtcatcctacactagtattgaacattaggacttatgcttcctgtctagctgtaattttgtagcctttaacaaatctctccttatccttcccttcccactatgggaaggttaggctcttgaatcagtayatcagaccaaaaaaattccattgataatggttaattatttttgaaaaattccctaggcctataccatttgggagacctacatgattgtttctcaaagagccgaagtagtccatttttctcctctcattaggag

SEQ ID NO: 125886 - DNA, 527 bp, Homo sapiens
tcacaataacaaaaatgcttttgaaaaatagtctgtttgcagaggagctcatacagcatattcacatacaagagtgaattctttttgtttgtttgtttktttttgagacagagtctcactctgtcacccaggctggagtgcagtggcgcgatcttggctcactgcaacctccgcctcccgggtagctgggactacaggtgcccgccaccacgctgggctaattttttgtatttttagtagagacagagtttcaccgtgttagtcaggatggtcttgatctcctgacctcatgatccgcctgcctcagcctcccaaagtgctgggattacaggcgtgagccaccgcgcccggccacaagagtgaattcttaattctttcccaaaacctagctgatcctggctggaattgcttctgcatctgtggggtaagctaggggttggctgtcagcgcagctcatggggctgatgagccacatgtctctcatcatccagcaggtcgcaggggcttgtgcttgtggctgcagcagg

SEQ ID NO: 125887 - DNA, 527 bp, Homo sapiens
tcacaataacaaaaatgcttttgaaaaatagtctgtttgcagaggagctcatacagcatattcacatacaagagtgaattctttttgtttgtttgtttgtttttgagacagagtctcactctgtcacccaggctggagtgcagtggcgcgatcttggctcactgcaacctccgcctcccgggtagctgggactacaggtgcccgccaccacgctgggctaattttttgtatttttagtagagacagagtttcaccgtgttagtcaggatggtcttgatctcctgacctcatgatccgcctgcctcagcctcccaaagtgctgggattacaggcktgagccaccgcgcccggccacaagagtgaattcttaattctttcccaaaacctagctgatcctggctggaattgcttctgcatctgtggggtaagctaggggttggctgtcagcgcagctcatggggctgatgagccacatgtctctcatcatccagcaggtcgcaggggcttgtgcttgtggctgcagcagg

SEQ ID NO: 125888 - DNA, 527 bp, Homo sapiens
ctcatccattatttataatgctttcctgtatgtatgtgcaattatatttctgtgtayattttgagaaataaattgcactggtcccttttctttctcaccccctagagatgttatagagacagtaaaagtgtccaaatttgtgagaaattggaataatcaagcattacctggatggaatgctattaatgatagcgattcacgctagagtccctttcatctgagacactcaggatctgttaagagattaaaagtactaaaagacaccgatctagagaattttcattatcttgtgctctgaaaactcagaagttcattggtttgaatgggcccgaaaatacatttttattactaggggcatagaagcctctagcagcattcttaataaagcaaggtgagttataagcaatccttggatgaagggtaaatgtaccacactccattttaagaaaaatacaatataaaagccttagcatggaagaaaatctttatatgatcttttaagaaaactcaagaaaaatagagacatg

SEQ ID NO: 125889 - DNA, 527 bp, Homo sapiens
ctcatccattatttataatgctttcctgtatgtatgtgcaattatatttctgtgtatattttgagaaataaattgcactggtcccttttctttctcaccccctagagatgttatagagacagtaaaagtgtccaaatttgtgagaaattggaataatcaagcattacctggatggaatgctattaatgatagcrattcacgctagagtccctttcatctgagacactcaggatctgttaagagattaaaagtactaaaagacaccgatctagagaattttcattatcttgtgctctgaaaactcagaagttcattggtttgaatgggcccgaaaatacatttttattactaggggcatagaagcctctagcagcattcttaataaagcaaggtgagttataagcaatccttggatgaagggtaaatgtaccacactccattttaagaaaaatacaatataaaagccttagcatggaagaaaatctttatatgatcttttaagaaaactcaagaaaaatagagacatg

SEQ ID NO: 125890 - DNA, 527 bp, Homo sapiens
ctcatccattatttataatgctttcctgtatgtatgtgcaattatatttctgtgtatattttgagaaataaattgcactggtcccttttctttctcaccccctagagatgttatagagacagtaaaagtgtccaaatttgtgagaaattggaataatcaagcattacctggatggaatgctattaatgatagcgattcacgctagagtccctttcatctgagacactcaggatctgttaagagattaaaagtactaaaagacaccgatctagagaattttcattatcttgtgctctgaaaactcagaagttcattggtttgaatgggcccgaaaatacatttttattactaggggcatagaagcctctagcagcattcttaataaagcaaggtgagttataagcaatccttggatgaagggtaaatgtaccayactccattttaagaaaaatacaatataaaagccttagcatggaagaaaatctttatatgatcttttaagaaaactcaagaaaaatagagacatg

SEQ ID NO: 125891 - DNA, 582 bp, Homo sapiens
gattcagggtcaatttaaaaaggtaaataatcatatgagaactcattattcttctctataaccgtattttatcttcagtggttccttttacttacaaaaaatgagcaccttattagttttatccctggtatgacaattagttacatgacctcccactgagtactaaaaactaaatataaaacactgactatagttattaatacatatgagaagaaaaagagtaaaagacaagtttaagaaagacagattcaaagctaaaaggagaaaaagaggttaaaatgccagtttagtaactaggaaaaaggaaaagtttwaaaaagtgctctgtacagaaatgaaaccctggttcttggcaatttattgcaagaagaatcatatccaaaagagccacctaaagactttagaatgcaaaaggacaaaacatccatccatgaacaacatcagatcttttaagaaaccaaaaagagtgaagagcaaaaattgtttataatgtattttatatcatttagaatataattacaatattatttctatttctaaagtaaattattaatgcccttgatcataatgcaaataaaaaca

SEQ ID NO: 125892 - DNA, 402 bp, Homo sapiens
atatccagaggtactttctgagtcatcaaggaragattaaattatgctcattcagggtctcccatcgaatgcagttattactttctcattcgttggaaattggttaactggatatttgatttaccagtatacctcagtttttccattaaagctgagtacagagatttactgtaaaataatatcactgaaaataacgacctcaatcctccattacaaaactcatttctcccttccatcctgaagtggtcttaagctttccaaacaaggctgccaagtgaaatacaaaatgtccagttaaatttgacgcagacaaacaagacataatttttcagaataagtatgtcccatgcaatatttgagacatatgtgtactaaaaaattattcattatttctctgaattc

SEQ ID NO: 125893 - DNA, 588 bp, Homo sapiens
ggtataatgggattaaaggagcacctttttggttagttttctttttaaaaagtacattaaaagatgattgtaattcacagaaaatgacagttttagtgatatcagcaaagtatttgagaaactgacatggccaagaagatgttacataacaatcttaataatggtgactttgtttgtttttttaatgctacagagtaaggtgatttcttaattgtcccaactgaggctttgctctctgtgaaggtgycatctcctggccaaagctgaaaggctgttatatttagcctgatgaagtcaatggagattagatccatggaaaatatcttcctgctgtgttttgaagtgttgcattgtgagctttttatcaatgagaaactccagaaagatataggaagaccagcataaggcattcctttcactatctttctaagctgattcatatgaatgactagtgctcagtgttgaagggtgcatttgagattctacaaatgtggcaaaatacttacctccttttgtgaaggctttgagaagaatccacagatttaaattttacaggggattggaatgccctagggggaaaaaaaaaac

SEQ ID NO: 125894 - DNA, 641 bp, Homo sapiens
caggtggctcccttgttcctgagccatattcctgcatgactttgagaaaatcacttagcctccccaaagagaacacaactgggtgtcgcctgagttttactgatgttggcagagtttaatacaatgactgtatttttctatgtaaggagacaaagcatggattgagacaagcttcctctataataacagaaatctacttttccatcgtagttgtgagtctgtcttcacgaacactgtagcttgtacttacgctgaagtttacttcatgaaaagaaagagattttagaaaattgatcttgcttatttactttttaaccaagagcagctattaaccctctaggagttacatcaaactctttagatccaaaatgtaactcaaatacaggcactactagttttatatttttctccagattcagaatcctgtgtgcattttttttttaagaaaactgtgcattcattttctctgaaaatgacttctttgtgctccagttttctagcttaaagataaaattggattctttgaagaggcttagaaactaattttaaaaatctaaggcccatcagtaagtgacagagrgtcctttgggtatcatttgtgctccctagaaaaaggcacaacaacatttttttaaaaaaat

SEQ ID NO: 125895 - DNA, 640 bp, Homo sapiens
tatatatttaatataaaaataaaaatataaaatatataaaagttacacatatataacatttcctccaagtggtgttcactctattttatgtgtatatattatatatatattatgaataaagaactgataaacattccttccagcgtgatggttccagattttttccatgctacggccaacagtagccctactagtgttggaaaaaaatggacacaaaggaataagaaattatttgttagagacatccccctgacgtacataggggtgaaataacaatttctagggtttcttttaaaaaccttcgaggcagggagagaggataggcggtggaaaaagtaaatgcggtaaaatctttgattgctgaatttargtgacaggaacatgcagaatcactgtcgtattctctccacttttgtgtctattttaaatattaataataaaaaccaaactaatggaacccaattgtttctgattccaaaccctgtggcagacatctacatattgtaacatttcctccaagtggtggtcactctcttttttgaagttaacatcactttaaaaatgtacagcacaagtattttctcctaaatggccatttctcacagcccacacacgttgttttatgggcaagtaagcttga

SEQ ID NO: 125896 - DNA, 577 bp, Homo sapiens
ttgtaccagtgcatatttggctttgtacaaacaggattaggacaagaaaattaccagttattgcgggggtcagtaacccaccaatataaaatagaagacactgatgatggtgaacagtattatgaaagagagacagtctctgattccaggaagtttactgttttaatgaggaggtaaaatgtgcacatgatgtatttaaaagaagaaaatgggaaggctttaaatagggaaatagagaaagtgctctaggagtttagtgtaggaacatattgttcttactagggaatcacaaaagcattgcagaagaaattaaatgtgaacctccaacagtggggatgggaaagatgggtgttctaggagtggagaccagggtaagtgaagctacagaagagggaaagtcacaawtcctatagttgagcaatatttttcctggcattgaaggaacattgaaagtgattggaaggtaagtctgtgaaggtgggttgtagcaaatggtggagatctagaatgccaaatggaggttagcatttacagggtgcaagtcaaatggtctccacgtaccagcttccatgtgagg

SEQ ID NO: 125897 - DNA, 480 bp, Homo sapiens
aaaacccataatttccttcacctgaagcgttaacattattaatatcttggggtctttttacccaaatccttttatctcaatctcttacactcatgcatatgtaattattacatacatatacaatagctgagaaaatagtatacaaattgaattgtarcatctttttttttttaattaggagaagcagaggggcattgtggttgagagattatttgtgcagctgggcagacctgttggaatcctcattttgcagccaagtattatttgatagtggtggtaacttttcaaggctcttctttctcatctgtaaaacgcagatcccagtatcaacccacacaccaggattaaatgagatattatatgtgaagtgcttaggaccatgtctgccatatagtctgagttctctaaattatagctgaagcagacagctatcatcaggcttttctgcctctgtaacatttgttttctgtcctctccttc

SEQ ID NO: 125898 - DNA, 368 bp, Homo sapiens
  misc_feature (1)...(368): n = A,T,C or G
tcttggcttctgttgagacctcaggaagcttacaatcatggtggaaggcgaagggaagcagcatatgtattagcctgttttcatcctgctgataaagacatatcagagactgggtaatttaccaaagaaagaggtttgttggactcgtggttccagatagctgggaaggccttacaatcatggcggaaggtaaaaggcacatctcacatggcagcagacaagagaagaacttgtgcagggaaactcctctttttaaaactatcagatctcatgagwcttattcactatcacaagagcagcatgggaaagacctgctcctatgattcaattacctcccaacaggtccctcccacaacacattgnnnnnn

SEQ ID NO: 125899 - DNA, 580 bp, Homo sapiens
atatttgggaggttgaggcaggagaatggcgtgaacacgggatgtggagctggcagtgagccgagatcacgccacggcactccagattgggtgacagagcaagactctatctcgaaaaaaagaaacatatttcaacccaataaaggccatatatgacacaaccatacctaacattatactgaataataaaaagttaaaatcctttcctccaagaactggaacaagataagaatgcccactttcaacagtcttattcagcatagtactgaaagttttagcargataaatcaggcaaaagaaagaaataaaaggcatccaagttgaaaatgagaaagtcacattgcccctgttcattatgatataatcttatatctagaaaaacctagacttcaccaaaaatctctaagatttgataaatgcattcagtaaagtagtatgttataaaatcaacatgcagaaatcagtagtgcttctatacactaataataacttagcaaaaagaaagaaagaaagaaaaagtttttaccacttacaatagctaccaaaaataaaatcaccctagaaatatatttaaccaagg

SEQ ID NO: 125900 - DNA, 538 bp, Homo sapiens
gtctggaggagttaatgccccctggaacagccctcaagtttaagagttgttcttcaccattgtccagaagttctcaatgagaatgaagcccagattcccagagcactaatctcctttcctttcctgacttccccattcccctgccaatgttcttttggatcacctctcaaattaactactttccctcaagtttttgtctcaaggtctgctcctataggactccaatctaacatatggagcctcagaagaaagatttttttccttccaggtattagaaaaatatactaagtctagggtactctkaaggccaactccaagtcacatgcattcctttttgctaagcaaagaaccaatatgtgtgtttcttacataaagtaatatttgtatattataatatatgtggagcaggcaaaatgttgtagttttacaagagttgggatatctcatgaattaaaaaccgttgtatgaggcaaataataagaaacatctacttctggcttccaacatatatcagccaaattactactgagctacccaa

SEQ ID NO: 125901 - DNA, 622 bp, Homo sapiens
aaagggctttttcctgacttgctaaacctagaatcatttgggagtgacatataaacattacaataaattaatcaataggcttgggtacatagtatacttcaagtttcaaataggaagaccacagctgagggcgaaagttcctacagattctcatactctgggccatctgtgttggaagaatactgtaggcatcaacttccaagtagcaacacaatataggaattattagacattagaggcactctaaatattcaagtttcatatttttctgtagtattttctgtaaacaagagaaagtgggaatatgtaagtgaacgagaaaatgaagtaaagtatgtttgctgcaatgaaattttggtagaaatagagtcaggtgctctaaggctttgtaatggcatccctgtgataatgatcaacaagggttaagggagcgccctcctgggattcactgtgctctggcatatcttcctctgtcattaattagaagcatatcatctcatatgtgcagaaagaaaaaaggttaatagagtccccrggcatacataagtattagactttggtttagataaattatgctaacaaagttatcaaagcattcaagattttccagtgacaccattgc

SEQ ID NO: 125902 - DNA, 641 bp, Homo sapiens
tcagtttgattactactgacattgatcagtagttcgatgcatttttttttttaattttattttctctttttgctggggtatcatacattttttgaaatacactttgtagaataacactatcaatataaaactattttcttcctttcattaagtgcatttttatttgtytaaatatgataatcgtagtagctctgcaaagaaatttatatatattgttataattatgaaccattttgacaaaaagagcaaatcagcattttttaaccctaatgggacctaaactatatagtcattcatcagcatatataatcatacaatacttctactaatgagagttttaaaaattgtgtgggcttatacacaatttacaggagcatcaccctaaaaaaaaaaacgggaaaaaaaaaagtagctaactatttatcagatagcttattgtacaccaggcttggccatttaaaatcctgtttctcagatttttgaaatattcctactatggctctaaaatgactactaagcttttgtatttatctgtcttggggaaggaacttctttgggggtttcaagttatctagagattgtcacttgatgtattactttaatcattttgttgttttaatcaatgtgtacatgtgctcaga

SEQ ID NO: 125903 - DNA, 673 bp, Homo sapiens
actctgtacttcgcatttctctatgaacctaaaactgtcctaaaaattaaagtctattaaaaattttttaaaagagccaacaagataggaatgaatatggcattaaacattaagttaatgttagcattaggaaatgtaagtattcaagtgtttctctctttgaatggctggctcacctccaggtatgatccaagtgttactgtttaagatttttaatatttagcatttattaaaaggaactattccagcctgggcaaaatgacaaaactctgtctttacaaaaaatacaaaaattagccaggcatggtagtgtatacctgtagtaccagctacttgggaggctgagtggggaggagcacctgagcctggggaggtcgagagtgcagtgagctgagatcacaccactgaacttcagcctgggcaacagagtgagaccctgtctcacacacatgaaaaagagaactattacacaattgttctgtatgatactgttctgcaggatactacaatggtggatacatgtcattatgcatttattaaaactcaaaaatrttcaacaccaagtttgagccttaatgtaaactatggactttgagtgaaaaggatgatagggacgtgtcaatcaatgtaggtccattgaatgtaacaaggtaccactctgataatggacaca

SEQ ID NO: 125904 - DNA, 381 bp, Homo sapiens
cttggcagcttccacatggctttgagcctgcgggtgcacagaagtcaagaattgaggtttgggaaactcctcctagatatcagaagatgtagaagtttgctgtaggggtgggtccctcatggagaacctctgctagggcagtgtgaaagggaaatgtgagattggagcccccaaacagagtmcctactggggcaccatctagtggagcagtgagaagagggccactgttctttagaccctggaatggtagatccatggacggcttgcactgtgcacctagaaaagccacagacactcaatgccagcctgtgaaagcaacctggagagaggctgtaccctgcaaaacctcaggggcagagctgcccaagaccataggaacca

SEQ ID NO: 125905 - DNA, 459 bp, Homo sapiens
tttgtaaagcggagaaaaattaaggagaaaggaattgtagaacactaacaggaagaggacagatactgaggaatggctcatggtataagtgagattatcagagactctctacaatggaatttgaaacgcagggagcacatttggtgtatggttgtagaggacttacactaagggcattcttctgctacctctgccagcagatgagtggctcctgagaatgcataccaaattaattccccagctgttcacatgcatataagcagctgctgctgttactgcctaayacttatggcagtctgtcagcacctctaatctctgccatagcagacaagccactcacctaaggcctctgctgtacttccaaagaaagaatttctcaagtagagactgagtggaactagactgccagctgtgagcctcagagctcctggctgcctgttgctgagtctatcagctgct

SEQ ID NO: 125906 - DNA, 459 bp, Homo sapiens
tttgtaaagcggagaaaaattaaggagaaaggaattgtagaacactaacaggaagaggacagatactgaggaatggctcatggtataagtgagattatcagagactctctacaatggaatttgaaacgcagggagcacatttggtgtatggttgtagaggacttacactaagggcattcttctgctacctctgccagcagatgagtggctcctgagaatgcataccaaattaattccccagctgttcacatgcatataagcagctgctgctgttactgcctaatacttatggcagtctgkcagcacctctaatctctgccatagcagacaagccactcacctaaggcctctgctgtacttccaaagaaagaatttctcaagtagagactgagtggaactagactgccagctgtgagcctcagagctcctggctgcctgttgctgagtctatcagctgct

SEQ ID NO: 125907 - DNA, 648 bp, Homo sapiens
tccggtatggacaattctttttttttttttttttttttttcacttgtttgtttgttgtgggggttgcaacagcagcaacacagacgacacatatttccctattcttctcgccctttttaccctccctacccagctcctgccttagaaataggctttcctacactgtatctgtccacactgtctgaactcttccttgaattaatcgttttcaataggagggggctaaatcccttattaatgccctaccaggagtgaatgaataaagccaagttaaaggagwcctgggtaccagatactgtgctaggttcctttgcatgtatcctttcattctgctggagctaaagattttctgcctcctctccataaaacgcacccaaactccaaaaccaggaaattctccatagaaaataggagtgaagagagaaaagactaacaggataaaacccaaagcaggaagaaagttctatctcccatttctctcaaggaatttttggacccaccaaggctactgtcctgaaatatcctgctgcttctccttccccaaatattgtccacttactgagagtaaggctgacttgccgcaggcttataaagtgtttggtcacagtaagacaactgtgagtaataacacacattgtatactgtttt

SEQ ID NO: 125908 - DNA, 565 bp, Homo sapiens
ggctagcactattttaaggcactagagaagatataaaacaaataaaaattttaaattaaataaataagaaaataagatttccttggcactgaaaaagcttacaatccaaaatataagtcaaatttcataacatagtcaaatgtgataagtacataagacaggttatttctagtttattttcacataatcaaaatcaagacttttcttaagatttaaattattgcctaaagaatgagacatcttaaggtatcattcctaacatctctcaccaaatccaaatccaaatccarctcataaatgttttacataacatatgcctaagtttccaaactaccaattcattttgcaatctctgaatatatgctgataacaaaagaatgagtttaattatgctaaggaattcaaccagttacccgccacatatattagagctcaatgatggggcccagcttaataattcttaaatttcttaatgattattacttttgaaaaagtaagaaaatttcgactggtttttaaaaaggtgaaaaagggaaagagaaagggagaaaacatagtcgcttaa

SEQ ID NO: 125909 - DNA, 624 bp, Homo sapiens
ttcttctaatcaagggacacacattgcatttgattatttagctcaagactttttttaacctggaaaataccctcactctttgtttatgtatttatttartgaaattgattgttgaaaaactagtcagttgtcctgcagaatatttccccttctggaattttctggttgctttttatggtgtcatttaacttttcactctgttttttcctggttaactggaagttagttctaaaggcttttaggcctgctataacaaaataccaaaaactggatgacttataaagaacagaaatttatttctcacagttctagagactagcaagtttaagatcaaggagcatgcggttttgatatctggttaggaccaactttctggttcatagattggccttcttgctgggccctcacatagtgggagagactagctagctctctggggcctcttttataagggcactaattccaatcatgagggctctgtccttatgatctaatgaccgcctaaaggccccaccttttaataccagcacctttggggttaggatgtcaacatattaattttgggaagacatacacgttcagcccattgcaaggtttagttagattcaggttcaacttcttttt

SEQ ID NO: 125910 - DNA, 624 bp, Homo sapiens
ttcttctaatcaagggacacacattgcatttgattatttagctcaagactttttttaacctggaaaataccctcactctttgtttatgtatttatttaatgaaattgattgttgaaaaactagtcagttgtcctgcagaatatttccccttctggaattttctggttgctttttatggtgtcatttaacttttcactctgttttttcctggttaactggaagttagttctaaaggcttttaggcctgctataacaaaataccaaaaactggatgacttataaagaacakaaatttatttctcacagttctagagactagcaagtttaagatcaaggagcatgcggttttgatatctggttaggaccaactttctggttcatagattggccttcttgctgggccctcacatagtgggagagactagctagctctctggggcctcttttataagggcactaattccaatcatgagggctctgtccttatgatctaatgaccgcctaaaggccccaccttttaataccagcacctttggggttaggatgtcaacatattaattttgggaagacatacacgttcagcccattgcaaggtttagttagattcaggttcaacttcttttt

SEQ ID NO: 125911 - DNA, 593 bp, Homo sapiens
gaatatatctcagataattatgatttgactgtatgtattgaatataacctgtagtgggccccttggtaaacaacttacagttttgttgcaagttttagccaagagaaaatgtatttgttgactagtcatgccctttattggccacatgatgagcagcaatgatattaacacacagtgcaccttgcagaattcaagaatgtctcagygtcttgtgaactaggaagctgaaatgcagtggtatgcagaaggctggctcagtaggagccttgggagtgtcctccagatagatgtttgtgcaggttgtatttgattccagttggccatgaaaagctggttgctctaaagaatgagaatatacttggttttgcatttactagaactatctggggaacaaattcttggggtggaagaaagaagggagggagagaaagctgtgcttcaatacctagggcttctttcctggaatggatctgagaatctgggattgggtggctaatatctcatctctagaagggagaaagaactgggtggtgatggctttgtattttctactggagttcactacagaataggtgaatggaatgggctgctat

SEQ ID NO: 125912 - DNA, 593 bp, Homo sapiens
gaatatatctcagataattatgatttgactgtatgtattgaatataacctgtagtgggccccttggtaaacaacttacagttttgttgcaagttttagccaagagaaaatgtatttgttgactagtcatgccctttattggccacatgatgagcagcaatgatattaacacacagtgcaccttgcagaattcaagaatgtctcagtgtcttgtgaactaggaagctgaaatgcagtggtatgcagaaggctggctcagtaggagccttgggagtgtcctccagayagatgtttgtgcaggttgtatttgattccagttggccatgaaaagctggttgctctaaagaatgagaatatacttggttttgcatttactagaactatctggggaacaaattcttggggtggaagaaagaagggagggagagaaagctgtgcttcaatacctagggcttctttcctggaatggatctgagaatctgggattgggtggctaatatctcatctctagaagggagaaagaactgggtggtgatggctttgtattttctactggagttcactacagaataggtgaatggaatgggctgctat

SEQ ID NO: 125913 - DNA, 593 bp, Homo sapiens
gaatatatctcagataattatgatttgactgtatgtattgaatataacctgtagtgggccccttggtaaacaacttacagttttgttgcaagttttagccaagagaaaatgtatttgttgactagtcatgccctttattggccacatgatgagcagcaatgatattaacacacagtgcaccttgcagaattcaagaatgtctcagtgtcttgtgaactaggaagctgaaatgcagtggtatgcagaaggctggctcagtaggagccttgggagtgtcctccagatagatgtttgtgcaggttgtatttgattccagytggccatgaaaagctggttgctctaaagaatgagaatatacttggttttgcatttactagaactatctggggaacaaattcttggggtggaagaaagaagggagggagagaaagctgtgcttcaatacctagggcttctttcctggaatggatctgagaatctgggattgggtggctaatatctcatctctagaagggagaaagaactgggtggtgatggctttgtattttctactggagttcactacagaataggtgaatggaatgggctgctat

SEQ ID NO: 125914 - DNA, 546 bp, Homo sapiens
tctgtggtcttcattcactctttttatggggaagtaaaaggagtgggacagattatgagaacagctgggtcctcccagttgctggggtggttattttaagctttgtttaatgtgtccagagacccagatggcatttttaactaagctgctttattaaatcttgtgataaagcatagtgatgtttattgaaaaggcagacacacatcagcaacattatgcgtgaaacttgccctaagaattttctataaaacatctgttctctttgagccttttgtgaactctggaagtttgctagtttctatacagacttgaggacaagaagttggwacccacttttggagatgtccaagcataggtattggaatcattaatcctaaccctctcagttttaaggccccggatacccttctgttagacaacagtaacatgagcaagcactgtaataacatttaaacaagattatttggaaataatggacaagaaaaattagtataaattgtttggggattttaaaattaaagataaaaagctagggcttcaatgacc

SEQ ID NO: 125915 - DNA, 546 bp, Homo sapiens
tctgtggtcttcattcactctttttatggggaagtaaaaggagtgggacagattatgagaacagctgggtcctcccagttgctggggtggttattttaagctttgtttaatgtgtccagagacccagatggcatttttaactaagctgctttattaaatcttgtgataaagcatagtgatgtttattgaaaaggcagacacacatcagcaacattatgcgtgaaacttgccctaagaattttctataaaacatctgttctctttgagccttttgtgaactctggaagtttgctagtttctatacagacttgaggacaagaagttggaacccacttttggagatgtccaagcataggtattggaatcattaatcctaaccctctcagttttaaggcccyggatacccttctgttagacaacagtaacatgagcaagcactgtaataacatttaaacaagattatttggaaataatggacaagaaaaattagtataaattgtttggggattttaaaattaaagataaaaagctagggcttcaatgacc

SEQ ID NO: 125916 - DNA, 603 bp, Homo sapiens
ccataaggactcctcagcttcttacttcaatgggtcttctatgacaaacacactttattaactctaagagtggaatttattttaacagataattagcataggtcaatatatgcttaaaatagggtcaaattaaacctactasctgttataaaggacagatgacaaattaaaatccacatagaagcatcgactcttaaataatctgaaagtactacttctaagaggggtgggcatgggtgaagggaatggtggacatgtttcagaatttcaaacagccaactttaaccaatcttttcctcattttgttcaccttcttgggggcttatgctaaagtgaagtgaatagccataaggctggcttcaggagaaaggtggtctaaaagaactggataattataagcaaaattggtcttgaatgattgaaaattgatgagaatgtgcttgtctcctgatttggcatcctgaattagactcaggaatactgaacttggatcccaaaggctttggtcttttttgatatcctattggatactcataagcaggctagaaaaatagaaaactagaatttattctctttgaactgacaaatctaaccagtgggctg

SEQ ID NO: 125917 - DNA, 632 bp, Homo sapiens
acttttttttccagtaaaccaggatttaccttttcttagtttgttgactgaaactttgaggggttgaagttgaccagttatgccattgtgactaacaacaaaatttatactgcatgggcartgacacaacattccagtgccaccaggccaacagatgtccgggatgttaaaatgtaaagtatgattgtattagatttgacataatataataactccttttgcatatctgccttcttgtcttaggtgatacccttacctgataatctgagcactgctttcctagctgactgggataacctttattagctcctttttactttagctgagcatcttctcaaatgctctactgggttgtccttatttctatcttatgtacaacctactctactttgataatattcctaatcctttcatttcaactaattttccattttatggtcatcaactaatagaaaacaaaacaaaaatgaaaaggtcaaccaagattttgcatctcaaaagaagacacacttcatctctcactgttttaaagaagagctatacagctttatggtaaagagacagttcttagccatggctgtgagaaaaaataatttgtagagatacttaaaatgtagactgcagcgggatta

SEQ ID NO: 125918 - DNA, 632 bp, Homo sapiens
acttttttttccagtaaaccaggatttaccttttcttagtttgttgactgaaactttgaggggttgaagttgaccagttatgccattgtgactaacaacaaaatttatactgcatgggcaatgacacaacattccagtgccaccaggccaacagatgtcygggatgttaaaatgtaaagtatgattgtattagatttgacataatataataactccttttgcatatctgccttcttgtcttaggtgatacccttacctgataatctgagcactgctttcctagctgactgggataacctttattagctcctttttactttagctgagcatcttctcaaatgctctactgggttgtccttatttctatcttatgtacaacctactctactttgataatattcctaatcctttcatttcaactaattttccattttatggtcatcaactaatagaaaacaaaacaaaaatgaaaaggtcaaccaagattttgcatctcaaaagaagacacacttcatctctcactgttttaaagaagagctatacagctttatggtaaagagacagttcttagccatggctgtgagaaaaaataatttgtagagatacttaaaatgtagactgcagcgggatta

SEQ ID NO: 125919 - DNA, 414 bp, Homo sapiens
gaattctgtacaaaatacacagacatttcgytcctaacatcctccctcaaaataaagcacatgcttaaaaaaaaaaatcacctaagcagactttttccaagaagcacatatagtactttttattcaaggcaacatgcagacctgttaaacattttttttttaatttttttaagtttgcagtcttctctgaagacttcaataaagcaaagggagctcatatgcctcacccagtctgcctgacttaaagtagtgtgaggcaagaatcatccacatgtagagttaaacaatgaaattttccaagtatatacatgctgtgagaatcaataacctcttctcaaaccagcaaattggtttcaagtattcggttcactggttacatccaacagccacaataagaggccaccttccgagtga

SEQ ID NO: 125920 - DNA, 461 bp, Homo sapiens
ttagaaagaaatattctcaggtgctggatcatactgggcttgtgaagctcaatgacaggatgaaaaacaatcctggctgaakagctacgtggatgtgaagggctctatgtccttagtagctcattgactcagtgaatagtttttaagctcctgctatgtgctaggtattgaactaggcaaggaaaaacaagaatttgtcctcgaggcactagttactgttggcggcagctgcagtgtgaggtcttctgagtaatgtgaacagggcacataactgagcaagggggttgttccaggtctgtattcccactatcactgggctacacttggtattttttgtttatttctcttaaagccttcttttttattattgaccttctcttttttattttattttttatctttttctaagtggctacatactggatatcaacactggatttgtagtagttcagttaggctcc

SEQ ID NO: 125921 - DNA, 563 bp, Homo sapiens
gagaatttctgatctagtctaactgccctaatccaaaacatcttaatctcagtcctagttaattattattttcctcactgattttactccttccattcttgttactctagaatcaattctacttcaaataccaggggtctctttagaatatgtaagtactgtctcactcactctcttgctaaaaatcttctgatgctttcccagtacactgactcaagtccacattccaaaccatagtccaaatgycacacatctagtttcttccagtttctctgacctgaccaattacgcttttctttacctactctcctggctttctttgtatgcctctgtcataaatttgatattgtctatggcctttgtttggctttggtccttagtgctggctggaattctctcctccaaacgcttctccctaccagatacttgtatggcttccttcaaacccaccaggtttcaactcaaacaccacctcccaacattatccttgattacccaaactaaagcagctctttcttccccaggtccctgtgtcatgtcacagaattggcttcagaattgtt

SEQ ID NO: 125922 - DNA, 582 bp, Homo sapiens
ttatcatcaataattcctctagtctactttgaattttttgtcattttgggatagtgtcttcagtaaatcaggcctttttaaacgattctattagttttatgattcaccagtttttgctttaatctttaacaatttctttagtctacttttaatgactgttttgtcatcctttttgcagtatgcttaatttatctccaatcttgttttcaaataaatataattagtgccacccatttgtgtcactttgacccaaatcacacacatttttatatgccatgctctcattgtcagtcatttccaaataataagtaatttcacataatataaaaatgagcaaaatatataarcatataagtgtttttaaaagaaataggaaatagcccttaaacaattaaaatatgttcaaccccacttataataaggaaagtactaaaatacaatttcttgcctatcagatcagcaaaaatctcagtttgacaacacactctgttggcaaggctgcagggcaaagatactcatatattgcaggtgggaatacaacagctagcaaacttacatttgcatttttctttctgacccaga

SEQ ID NO: 125923 - DNA, 432 bp, Homo sapiens
atcataaggtgggccagtaggccgggcacggtggctcatgcctgtaatcccagcactttgggaggccaaggcggccggatcacttgagatcaggagttcaagaccagcctggccaaaaggatgaagctccatctctactaaaaatacaaatactagccaggtgtggtggcgcctataatcccagtactcrggaggctgaggtgggaggatcacttgaacctaggagccagaagttgcagtgagccaagatcatggctttgcactccagcctgggtgacagagaggattggtgggggttatggggaccatggagattagagaccctacccccatgtaaagtgtcaatcactagtcagctccagccagttattgccatacagaaatgtaggctcaatgttgactatcttcttattttttggaggaagtcagaaa

SEQ ID NO: 125924 - DNA, 545 bp, Homo sapiens
tctaaatatacacacacataaaacatatttaattttacataattaaaatgcactttgaatattgtatcaaaaagtggctgtttttacaaaaataaggttacccatcagtaagtcttaccaacaatgttactttaaatagctgcttamaatttcatggcataggtggaagagcatcactttttttcctaaaaatttgaagacatgcatttaatattttattaattttatatattatacaattgtaaaagttaaaacagcattggtaattacagagcagagagcaaaacgtcaccaccaattttaactctcagaagtacattgtaatattagatgagccgcattcctgacattttcctgtgcatatatacagttggaaatagaactagataaaagaaatcatttttataaaaatgaattttgccatacatattaagtaaaatgtttcaaatttaattataattgaagataatagggagggaaataaagtcaaattttgtagaattgtttctgtgtatgaaaaagtaccacctccaggatctatcact

SEQ ID NO: 125925 - DNA, 566 bp, Homo sapiens
ggtgttgtacctaagagatcattgcctaattcaagattacaaggatttatttctatattttctcctatgagttttgttttgttttgttttgtttgtttttgtttttgtttttatatggcattttgctctttttaaagcccaggctggagtgcaatggtgtgatcttggctcactgcaacctccgcatcctgggttcaagtgactatcctgcctcagcctcccgagtagctgggattacaggcacacgccaccacacacagctaattttgtatttttagtagagacagggtttcaccacgttggccaggctggtcctgaatgcctgaactgtttcagctctaggtaaggttaaatcattctcctgtaatgtrgattgtcagattccccagggtggatattgttcagaggcagacatttccccctctcacacttagggaattcgaagttttttggctatctcacagagtttgcagcagcaacctgcttctttcaaaggatctgtgaattcttacagccttcctggtatgttcccatgatggttcttggagcaaaagtttacaatgtga

SEQ ID NO: 125926 - DNA, 482 bp, Homo sapiens
acaaggatttctttatccagatcatagctttaacacattttctcttagccatagcttcctatcccaggtggaaatttctgtacaaaatttaagaaatgcttccataattgaggttttttagtagaagtgaaggtgactagagtctagataatggaacacaatgattcaaagccataaatggcagttttcaaggcaggactttacaccttgctcttggcttcaggtttctcacctggaaaaggtgcagacatggcctcctaacattagacaggcacctgaacacttttactctgaaggaagatrcagtttggggaccgggaccacacatgcttctgtgacacatcaacagaatttctggcttcaagaactcctagctacagactgaaaaagaggcctaagccccagccttctggtgtaaccgagtctgttttccaaccagcagctgtccaccaaccttcacatgtgagtgccaatgaccaggc

SEQ ID NO: 125927 - DNA, 482 bp, Homo sapiens
acaaggatttctttatccagatcatagctttaacacattttctcttagccatagcttcctatcccaggtggaaatttctgtacaaaatttaagaaatgcttccataattgaggttttttagtagaagtgaaggtgactagagtctagataatggaacacaatgattcaaagccataaatggcagttttcaaggcaggactttacaccttgctcttggcttcaggtttctcacctggaaaaggtgcagacatggcctcctaacattagacaggcacctgaacacttttactctgaaggaagatacagtttggggaccgggaccacacatgcttctgtgacacatcaacagaatttctggcttcaagaactcctagctacagactgaaaaagaggcctaasccccagccttctggtgtaaccgagtctgttttccaaccagcagctgtccaccaaccttcacatgtgagtgccaatgaccaggc

SEQ ID NO: 125928 - DNA, 458 bp, Homo sapiens
tgttgggtttgtgggctaatgccaaaaaaatcaggaaactatttcactgatgcctatccctctttgtgttcccaatgagagtcaccctgaaactccaaggaaagaatgaaaagcttttttttttttggagacagagtattgctctgtcacccaggctggaatgcaacggcacgatgttggctcactgcaacctctgcctcccaggctcaagcaattctcgtacctcagccttacaagtagctgtgactatgggcatgcaccaccatgcccaggtaattttcatatttcttgtagacagggttttgccatgttggccaggctggtctcaaactcctgacctcaatcaatcrgcctgcctcagcctcccaaagtgctgggattataggcatgagccaccgcacctgccctgaaagctattcttgatattctaaatatcactgctacttgctttcctacac

SEQ ID NO: 125929 - DNA, 404 bp, Homo sapiens
attataggcatgagccaccgcacctgccctgaaagctattcttgatattctaaatatcactgctacttgctttcctacacccactaaaaacaacactctaacttttccagctgaaaactcaatcattaccaaatataaaaarccaattcaagtgattcctgcaaaaggcatattgtgcttccaggcatcatgcactcaagattttggaactacctgtgttggtacaagtaattgcttgtataatgtaactggattaaattcagtatggtctttttttactagatatgtttatacacccttacagcatgttatgaagaggccacaaaaaagtaaatttctcactggacattgttcaggagctatgcagatttatggatgaacaaacctgactgaccactgcttaa

SEQ ID NO: 125930 - DNA, 404 bp, Homo sapiens
attataggcatgagccaccgcacctgccctgaaagctattcttgatattctaaatatcactgctacttgctttcctacacccactaaaaacaacactctaacttttccagctgaaaactcaatcattaccaaatataaaaagccaattcaagtgattcctgcaaaaggyatattgtgcttccaggcatcatgcactcaagattttggaactacctgtgttggtacaagtaattgcttgtataatgtaactggattaaattcagtatggtctttttttactagatatgtttatacacccttacagcatgttatgaagaggccacaaaaaagtaaatttctcactggacattgttcaggagctatgcagatttatggatgaacaaacctgactgaccactgcttaa

SEQ ID NO: 125931 - DNA, 603 bp, Homo sapiens
atcatgagtgagaaagagatggggcccaaatggcatctgatacactttgcaataatgctttttgcagtgacttgcagacagaaatatgctggaataattgagctagcacatagcataatctgctgtagccaccrcaaaattgcagaatcagacccattggtgctgtatttgaccaagagcagccatggagggaaaaatatctatttcccactagactaattatgctaattttatattaattgattgaacggttttacttgaagctgctgtggaattttgtttttgtgttaaagttgcataaaactataagctgaagaagttcagcaagcgctgcatttggacatactaagtaacattaagtacacgtaatatagatctccacccaaggttcacaatctttttttttttccaaagttaccagttcattactcaaagtagagaagtgctgtttgggaggaaatatttcagatactgggcagctgctaagggtaagggaataagggggtgaagtccagaggcaagcccccttctgtggatggggtggggtttcatgaagagttgacggagacattctgacaaaggcagcaaccaagccaggctagg

SEQ ID NO: 125932 - DNA, 603 bp, Homo sapiens
atcatgagtgagaaagagatggggcccaaatggcatctgatacactttgcaataatgctttttgcagtgacttgcagacagaaatatgctggaataattgagctagcacatagcataatctgctgtagccaccgcaaaattgcagaatcagacccattggtgctgtatttgaccaagagcagccatggagggaaaaatatctatttcccactagactaattatgctaattttatattaattgattgaacggttttacttgaagctkctgtggaattttgtttttgtgttaaagttgcataaaactataagctgaagaagttcagcaagcgctgcatttggacatactaagtaacattaagtacacgtaatatagatctccacccaaggttcacaatctttttttttttccaaagttaccagttcattactcaaagtagagaagtgctgtttgggaggaaatatttcagatactgggcagctgctaagggtaagggaataagggggtgaagtccagaggcaagcccccttctgtggatggggtggggtttcatgaagagttgacggagacattctgacaaaggcagcaaccaagccaggctagg

SEQ ID NO: 125933 - DNA, 603 bp, Homo sapiens
atcatgagtgagaaagagatggggcccaaatggcatctgatacactttgcaataatgctttttgcagtgacttgcagacagaaatatgctggaataattgagctagcacatagcataatctgctgtagccaccgcaaaattgcagaatcagacccattggtgctgtatttgaccaagagcagccatggagggaaaaatatctatttcccactagactaattatgctaattttatattaattgattgaacggttttacttgaagctgctgtggaattttgtttttgtgttaaagttgcataaaactataagctgaagaagttcagcaagcgctgcatttggacatactaagtaacattaagtacacgtaatatagatctccacccaaggttcacaatctttttttttttccaaagttaccagttcattactcaaagtagagaagtgctgtttgggaggaaatatttcagatactgggcagctgctaagggtaagggaataagggggtgaagtccagaggcaarcccccttctgtggatggggtggggtttcatgaagagttgacggagacattctgacaaaggcagcaaccaagccaggctagg

SEQ ID NO: 125934 - DNA, 597 bp, Homo sapiens
gttatattactcattcttttgtaataccaaatatgctaaaagacttgagcaaaattaatattctgtagttctttacatttgatttttgttgtagaatcctatttatctgttttaatcccgtcttcactttctaaataattaaaacatgttaacctttgaagttcatttccatagtaaaattctgccctgctattcacaggaaatatgctttttaaaaatcatacttaaaaactacgcattttacaacttatagtcaagaaaacttattttattccccagttcatcctaattctggccttgatcctacagccattggaatataaaaataaaaatacactctttttactaaagtcatttaaggctacttcaacaaacctkcccctacactaatgatgtctaaaagcagagtggtcaccctgtcctccacagtctcctcttcattgcaaaggaatatatggccactcagaaacccatcccagaggaggctccaaatatgatgacagtggattctgagcactgcctgatgcagtttctgggtcctgaaacaaccttccagttttataagtcaggatgttgttttccatgacaaccaaaatg

SEQ ID NO: 125935 - DNA, 579 bp, Homo sapiens
atgcctatgtcctattcatcaaaytccttggaaatttaaacttctttggggaaggactgttctccaggtccctgcttctggtcacatctcaagcagaagttctccttcctctggatacatgatcttttctgggccatatcttcccctctcagctgcaaaatcttgcatctttttggatgatgtcattctcttcccttcatcctgtcggcatctgccatccttttggcctggtggtcttcctctctacctggctgcctgaaagattcgccccatgtctggcctctattgtcatggttctccttttcctcattgacatttcctgcaccacagtccagctgtcccaccaatagtcatatcctgctccctggcatcacaatagaatatgggtttcaagcatcctaattccagtccagtcacatagctatgcctcctcttcagcaggcctatgtctcccctgtgctcaggatctcttctttctaagtgtctgtctcttccacaccctcacttctcactgttagatcttctccatttttataagaggtagcaaaaacattttctgtctctctcactcatttgtcc

SEQ ID NO: 125936 - DNA, 546 bp, Homo sapiens
caagtacatgctgtattatgaaaaatgaaaattcctttctgtcactactgtcsagggatgagaggagagtgggaaaaaggtgggagagagaaagaaaatagtgagaaaatgaaagagagggaaagaaccagagtgtttgattttgcaaatgttaatctctcttaaccacaggcaatggaggctccaaattcccttactctgcaatccaaggcaatatgttaagcctcctggaaatgtagatcacatcctgggagaagggcaaggaaaggagaagaagaaagtaaccataaaacaatcctattattgaagcgagtacattgtttgccttaagagttgattgaagagcagttgagttcagttatagaaaatacttcacatcgtcccatctgatttgtagaatgtaaatattccccctttctacacacagtcttcaaagtttcgtgagaacaaatcttgtcatgcgtggacctcatatgttgtcacattacagtgaaatatgaggagatctggtaaacttggaggaagtaattgctatggctaaattgc

SEQ ID NO: 125937 - DNA, 546 bp, Homo sapiens
caagtacatgctgtattatgaaaaatgaaaattcctttctgtcactactgtccagggatgagaggagagtgggaaaaaggtgggagagagaaagaaaayagtgagaaaatgaaagagagggaaagaaccagagtgtttgattttgcaaatgttaatctctcttaaccacaggcaatggaggctccaaattcccttactctgcaatccaaggcaatatgttaagcctcctggaaatgtagatcacatcctgggagaagggcaaggaaaggagaagaagaaagtaaccataaaacaatcctattattgaagcgagtacattgtttgccttaagagttgattgaagagcagttgagttcagttatagaaaatacttcacatcgtcccatctgatttgtagaatgtaaatattccccctttctacacacagtcttcaaagtttcgtgagaacaaatcttgtcatgcgtggacctcatatgttgtcacattacagtgaaatatgaggagatctggtaaacttggaggaagtaattgctatggctaaattgc

SEQ ID NO: 125938 - DNA, 546 bp, Homo sapiens
caagtacatgctgtattatgaaaaatgaaaattcctttctgtcactactgtccagggatgagaggagagtgggaaaaaggtgggagagagaaagaaaatagtgagaaaatgaaagagagggaaagaaccagagtgtttgattttgcaaatgttaatctctcttaaccacaggcaatggaggctccaaattcccttactctgcaatccaaggcaatatgttaagcctcctggaaatgtagatcacatcctgggagaagggcaaggaaaggagaagaagaaagtaaccataaaacaatcctattattgaagcgagtacattgtttgccttaagagttgattgaagagcagttgagttcagttatagaaaatacttmacatcgtcccatctgatttgtagaatgtaaatattccccctttctacacacagtcttcaaagtttcgtgagaacaaatcttgtcatgcgtggacctcatatgttgtcacattacagtgaaatatgaggagatctggtaaacttggaggaagtaattgctatggctaaattgc

SEQ ID NO: 125939 - DNA, 561 bp, Homo sapiens
gcaagagtcgctgggatttctcttcttcctcattgccaccctgggtcctgtgctgtctctgtggctgggggggaaagagagagtaataaattgtacactgtcactttagctttcctatcataagtgacacttgctttacactgagcaaagaagtaaacttaccactcattactcctaaggcacagacagcccaattatatcatgcctgttggacagatagaaatatctgcgatcgacaccaacgcaccatagactatcactatccacccttcaggtcgcaaaagattcagttcactagctttttacatgcagaacacactaacctcttttccaagggagaaagcctaaaagtcttaaacacccactgaatccagttcagtgtccaagarcttttgattatgcccagttcacaggagcatcccctgggacctgagacttgtgaactaaaaagaaaagaaatctgctgtcctgtcctctcctctccttcagaccccagatatacaatagcggaataggtacaggatgatcttatcccgaaagaagaaatactgggcaaacagc

SEQ ID NO: 125940 - DNA, 557 bp, Homo sapiens
gactgaacacatccagaggaaactaatggtcatttctttagtcagtaaccttacatgttttatttgttcataactaaagctcccgcagtgcctgtcacctgagaaaaccaatctctaagacattctataagagtttgtagttttctttcagggaatcccagctatgtcacagaacattgaaaatgtatctgttgcatgttcccttgtgaatttgttatcaattaaagagtttggtgtaaatgttaagggttaaacttgccattaaaggctttctctcatgagacattcaaccagaagatagcctgagcacacatcagatctggtttcctggagatgcatctcttagtacattgtaaaggaccttttaaaactaattgccttgttgaacattatctttaaaaattttagmatgtcataagtaaattaaacgttatatttagtgttattttatttatttgagtttataatacttacccccaactaattctggcaaatcagatcaatgaaaagaaattaagagaaaacacatatgccacaaatgagcaagtctggaattc

SEQ ID NO: 125941 - DNA, 650 bp, Homo sapiens
ttcttggagtcttggttctggtttactgattggacttgcattcgtttcctaggactgtggtaacaagttaccacaaccttgctgccttcaaagaacaaaaatttattctcacgcctctggaacctagaagtccaaaaagatgcctcagattaaagaaccacttctgggggccgaagtccagaggtgctagtggcggatgttttcttgcctctcccagcttctgttggctcctggccttccttggcttgtggcaacatgtctccaatctctgcttctatcattacatggccttcttatctatgtgtctctgtgtctcaaatctctccctcctttctcttataagggcattggccaatgaatttaaggctcactctaaagtttttaaatccaggatagtctcgtcttgagctccttacataaatgacatctacatttggayccttattccaaatacaatcacgttctgaggttctgaagacatatcttttgagggtcacaattcaactcactacaggactgtaatcaatgatgttggttcttcaatccaaggcatcatttttcaaagcatgttccgtggagcactagccccttgagattcttcagaggaaaaaaaaaggttagatggttctgtggtcaagtaagtttagaaa

SEQ ID NO: 125942 - DNA, 589 bp, Homo sapiens
ctgtaagacttcattttatcaagtgggtctttcatttctgagatgtttaactctccttttctacctctgccttcctatcaataatcacatctatcttccacagcagctcccccagtatgccatgttctccctgcacctcatctttccttagcccttcaatgatgagcattttgaagggtttctctgccttgactgtttctacattcttactttccattcattccccaagccaatggaattggaactcttccaaaatttcactcaatcttctcttgccaaggtcaccaatgatatcctaatttcaagacccaatggacattcttatttcttacttactttcttattttctaaataggatgtctgtactatttggtattggttacttcttcctcaaaatggacttctttccaggattctcaggctcctacaaagattctttttcctttactgactttgtaaatactaaggtttccsaggattctgtttgactatatcttttccttcaatatacttttcttttccctcccttctttctttcccttctctgttgttctttttcctcctcttttcttttcccctactcttttct

SEQ ID NO: 125943 - DNA, 604 bp, Homo sapiens
tgttacacatgctggagcaacaataccttgtatttatggagtggctgtctctgaggggctcagaccattttatagacatgatctcattcatgctgtctcaggtcttctattgaattacagaatggttcattgttccaaacgatgcaaactatttcttttagatgcactcttagaattatccattctcctgttacaggttcaaagatttacaaatcatcgccaaatggctccagaattgctaccgcaggaaaggaggtgggtggaaatggaaatgttctgaatttataatttatgaactcttcaaatattaggaagtcactttttgtacacccatcttaaaaacaagggaaaacatatgctatgactttgttgcagccatataatatgataataaaggtagaaaaaaagaatattaatttttataacattagctaaagctataaaaataagagttaaccagtgtggctaagaggyaggataatcataaccataataagcataaaagcagaaggtaatgtggacatattcccgagctaaggtcacaagaagcaggatcttcatttgctctgctatgaaaaactctgtgaccttaaacaaacgctta

SEQ ID NO: 125944 - DNA, 604 bp, Homo sapiens
tgttacacatgctggagcaacaataccttgtatttatggagtggctgtctctgaggggctcagaccattttatagacatgatctcattcatgctgtctcaggtcttctattgaattacagaatggttcattgttccaaacgatgcaaactatttcttttagatgcactcttagaattatccattctcctgttacaggttcaaagatttacaaatcatcgccaaatggctccagaattgctaccgcaggaaaggaggtgggtggaaatggaaatgttctgaatttataatttatgaactcttcaaatattaggaagtcactttttgtacacccatcttaaaaacaagggaaaacatatgctatgactttgttgcagccatataatatgataataaaggtagaaaaaaagaatattaatttttataacattagctaaagctataaaaataagagttaaccagtgtggctaagaggcrggataatcataaccataataagcataaaagcagaaggtaatgtggacatattcccgagctaaggtcacaagaagcaggatcttcatttgctctgctatgaaaaactctgtgaccttaaacaaacgctta

SEQ ID NO: 125945 - DNA, 651 bp, Homo sapiens
gcttgcagtgccccctcatagatgaagccaggtatttgcaaacagcttcagcacacatgcacgcaatcaatatcacaaaagataaatctgctgcaattgactccaggctgtactgtcactaagtgacgatgaaaaatgatcagcacttgaatacattgcatttttatctttaaatctttctacagaagtggtgtcaatatcagagtactaaataatctctagatagcaggaagatgcaagaacatttttttttcttcatggaagatggatgtagctttttcgaaggccttaaatactgaaacaaggaattagctctctaaatgccctacaatgactggctgccttgtcagtcctctgagggcgatttragtacctaactccactcttccatcagtgttctttaaataacagtgcttggctctgaggactagggaccttttccaagccctaatgaatccataaatcaaggtttactgcatcttcttcctcaggccaagcttagtgagttgatgggggaaatcgaggcaaggggaagagtcttgtctaaccaaagtcacataggaactcaattttctaccagagtggacacctatcatccttcagaaggggacagggccaatttctcttggggctataaggtaaaagttacat

SEQ ID NO: 125946 - DNA, 572 bp, Homo sapiens
cttctgattttttaatctatgagattgggatttctcttgatgtataattgtataattcccatgtagatttttatctgaattttataaatttcataaaacattcatgacagtgaagaaaartgtcatgtgtctttgtgactctgaaaaatgttatatgtacttgaaagaactcttgaaatgtcaactgtaaatgaaggtacacaacaacatttaattttatgaatactttaaaaatattatgggtattttgtatgctgtaaaaccattctatgtgaaaatgtttgtttctgcctgatcagatctttttgagtaaaatacataggcaacatgagtgaaagaataagcacatgacaaacaagtcctggaagttaaagattgagatttccagggagatatccaggtttatcactcatggagcatttttctgccatcctggaaacaatctccgtttcccatagagaacttgttacttaagaaggtaagaattctcctctcctccagtgaggaggaacagcagccatgtaaacttgtctgtatcagatcagaaattaataattttggggtttctcata

SEQ ID NO: 125947 - DNA, 643 bp, Homo sapiens
taggcaacaattatattgtgctgtcacctatgcacttgaattgagagtgtacattattagaaagtgttcagaaaaaaagttcrtcacaaatacatttgtcaaatgtttaccttaatttttaataattacatttcattcagaaactattctaaaatatacacctgaaaataagcagtagatgtatatattgtgaatttcatttaaaagtggacaacagtaaaaacattccttaaaaacttaaaaagagaactaccccttgattcaacaattccgctattgcatatacagccaaagaaaatgaaatgagtgtgttgaagagataactgcactcccatatttattgttgtcaacctaagtatccagcaaggacacataagttgatttttttaatgtagtacatggatgcagtactcttcatcgctaaaaaacgaataaaactctgtcacttgtgatgacaacatgggtgaacctaaacggcattatgctaagtaaaataattcaagcatgaaagaacaaataccatataatcttacttatttgtgaaatctaaaaaaaaaatgatctcataaaagtagagaggctgtggggaagcagagaggaagggggatgaagggatgttagtaacaactaactgtacaaagtt

SEQ ID NO: 125948 - DNA, 628 bp, Homo sapiens
ctgccgtgactggtcacaaatgccatgtcaggcatttctatttttcttagtgggggccattgcttttccatgtttccaagatccaaataataatagcacattaattcttatctggagtttactttacgtatcttgggccagtgaccaccttttgaaaagtactccattttaagattatatcccatctcatgtgatctctttggattcttatgatactgatactctcttgttccctgtacacaaggttctgcagcaccatttaatagagttcctttccttctgtgcaaacccaggataactctgacatgctacattgtgacttgaccttggttattgttctggcagcagtggaagaggtgttatggaggatcctgagagcctgtattggacttcaaggtgaaggcattgtccaattgggaatataagaagcatttctacagccaagagggtataggaggaacacggtttctataccaagactcaggtcccatttttttwatcctcttttattttttaatttttgttttatgtttgaggggtacatatgcaggcttattacttgggtatattgcgtgatgccatggtttggggatacaaatgattctgtcatccaggtagtgagcatggt

SEQ ID NO: 125949 - DNA, 625 bp, Homo sapiens
gagaaatgttgtctaaaccccttataagggaagtcttatcccaactacatcaagggacccattgggggcctcaggccatgtgtgatgcagttctcagggtttatggttgtataggaatttataccctggccaaacaggttacagatagttgcttagtatgtaagaaaactaatagacatactataaaaagattacctctcaagagaaggaatccgggcttaaggccattccaaagtatccaagttgattacacagaaatgcctccaataggtcgtctgaaatatttactagtagtagtagaccacctcactcactgggttgaagctatcccttttcaaatgcgacagccaataatgtagttaaggccctaattgaaaatatagtacctaggtttggactaatagaaaatattgactcagacaatggaactcatttcaccgcacacattattaaaaagctatcccaaacattagacattagatgggaacacmatattccctggcacccaccctcatcagggagagtagaaagaatgaatcagatgcaaaagaaccacctaaccaaatcagtcttagagacttggttgccgtggaccaagtgtcttcctataccctgctgagaattc

SEQ ID NO: 125950 - DNA, 604 bp, Homo sapiens
acccaccaagctactgaacccacccgttgtgtaggtaacacaagtgcaacaaggtctagcgcctcagaagcagtgtgtagccagaagcagcctatctggttggattatctaagaatggagttttttttctattttttcttttttctttttgagatggagtctcgctctgtcccaagctggagtgcagtggcatgacctcggctcactgcaacctccgcctcctrggttcaagtgattctcctgcttcagccttccaagtagctgggattacaggaacatgccaccacacctgggtaatttttgtatttttagtagagacggggtttctccatgttggtcaagctggtctcgaactcccgacctcaggtgatctgcccgcctcaccctcccaaagtgctgggattacaggcgtgagccactgtgccttgccaagagtggaatttctggcatccatcccataggaaacacattaagtatacactcacagttctaccactgtgtactctgatggagtccatggtcaaacattagggcttcaatcttatgggtcagatttttctggctgtaatgaagctggaggaaattggaatacatttccatttct

SEQ ID NO: 125951 - DNA, 567 bp, Homo sapiens
cagcttaagtcttagaattaacttgctaaaatgtgagcctttggtaattaggctgttttattagggagtgtgataatatttgaatttcttttcatatttgtgctttgtgtcattttcaaatgacccttgaaatgtattttaaaactagataaaagccagaaagtgatttgattgtctatccagcaaaagatggaaggtggttcattttcttgtcctcttaataccaaggcagtgctaataacacttgccacaacttgggaaattccatgggtctatgccacattgctcccagagtaatgaggcaaaatagtgctctgttatagaattgcttgtttcacratacatcatgacagataaccatacaacatggaatgacacaaacataatatgccacactccagaatatgtaatgctcgtcttccaggggggttcagtctaaggtaatctctaccaggaagaaatgctagatgactttagacatgtgcattggtttggaccttctaattagttgaatttttacttattttgacatgagagattacatagaatctctatgttgcccaggtt

SEQ ID NO: 125952 - DNA, 596 bp, Homo sapiens
tgtgatagagcacattttgtttatcctttcactttttgatgaacatttagatagcttctaatgtttttagtatttacaaaaagctgttgtaagtatttgtgtgaaagtctttgtacaaacccatttttttttttttgcccttgagggaaatgctttggagagggatcatatattaagtgcacattcaatttttttaaaaataaattttattgtgyatatttaagatatacattacattttggggcacatatagccagtaaaaagggtactgtactgaagcaaagtaacatgtccatcatctcacatagttacccatttttttgtgtgtgcatggcaagaacaactaaaatctactcatttagcatgaattccatatatcgcacgattttattacctataattctcatgttctcccttagatccctagacttgttcatcctacatatctgttactttgtatcctctgacctacatctccccattaccactcccccgacccccatgtctccctgccccccacccattgcccctggtaaccactattttgttctctgtctctgtatacttgcatttttttatatagaaagaaaaacatt

SEQ ID NO: 125953 - DNA, 578 bp, Homo sapiens
aattggacttacagctccacatggctggggaggcctcacaatcatggcggaaggtgaaaggcatgtctcacgtggtggcagacaagggaagcgagcttgtgcaggggaaactcccctttataaaaccatcagatctcatgagatttattcttatgagaacagcgtgggaaagacctggcctcatgattcaattacctcccactaggtccctgccacaacacatgggaattcaagatgagatttgagtggggaaacagacaaaccatatcatccacattctgaagtcacttctgttgtttaagccatgtcagcctcagccccattctgaacccttgcaggagaggtgatgtggtcatttggaagagagakggtactctggctttttgacttgtcagagttcttgcatggattcttcctcatctttatgggcttatctaccttcattttgaggttgctggcctttggatgagttttttttgttgttgtggttttggtttttctttaacagttgggccacttttccataaggttgctgaagtttgctgggcgtctgctccagtccctagtcaccacagatt

SEQ ID NO: 125954 - DNA, 549 bp, Homo sapiens
ttgcaacagtcagaatggctaytattaaaaagtgaaaaacaacagatgtttgtgaggctgtggggaaaaaagaatgcctatacactgctgatgggagtgtaaatttgtacaacctttatggaagtcattatggagatttttcaagggctacaaataaaactattatttgacccagcaatcccactaatggatatctacccaaagggaaaaattattttataaaaaataaacctgcactcatatgtttattatagcactatgcaaaatagcaaagtcatggaatcaacttaagtgtccatgaatgaatgattggataaagaaaatgtggcatatataaatcatggaatactatgcagccaaaaaaatgaatgaaatcaggtcttttgcagcaacatggatggaactgaaggccattatcctaagtgagataactcagaaatggaaaatcaaataccacatgctctcacttgtaagtgaaagttaaacaatgggtacacgtgaacataaaggtagaaataatagacactggggatccaaaaagggtgaggg

SEQ ID NO: 125955 - DNA, 633 bp, Homo sapiens
ggatttctcgggtagagaaaacagtctatatattgatacwtgtgtggattacacaggtttatgcttttcaaagtagaaacaaatatacacttaggacgtatgcatttcgctatgtttcaatacagaaacagtcatgcaaaaatgaagataccatttatagtgacagcagaaaatataaagaatttgaaaacgtacttaataaaaatatttatatcctcggccgggagcggtggctcactcctgtaatcccaacgctttgggaggcctaggccggcagatcacttgaggtcaggagtttgagaccagcttggccaacatgaggaaatcccgtatctactaaaacacacaaaaattagccagacctagtggcgtgagcctgtaatcccagctactcgggaggaggctgaggcaagataatcacttgaacccgggaggcggaggttgcagtaagccaagatggcgccactgcacactccacactgcatatatataaatacacacatatatatacacacacacatatataaattattaaaaacatattgttttatatattatatatgtaaaatctctattaaggaacacgaaataaggtctgaataaatatttaaaatagcgcagctaaatgacaaa

SEQ ID NO: 125956 - DNA, 610 bp, Homo sapiens
ttgtgttgttagggaagatttgaaattcataacactactttttccagcaactggaaccaataggatagtcaacttaaagatatgagatgcacaaatatggtatattttttatgtcatcttctctgataatttgtctatattatgaacacaaatataactaatttttaagtgtattattaggaacatgtaggataatattgaacatggtggaagagcaagtacaaggaaaaatgttggttgatgtttaacagatatttgacaattttcaaagtgttataatactcattatttaatttgttctcagaataaccatgagaaagggcaggacatatagccttttttttctaacgatgataaagcagtctcagtgacatgagttgaatccctagcttatgagaggcagaagttatctagaaaaagggctttttacagcawtttcagagttttttctatattatgtataaaatagaatatgtaaatttattctatgtttctatataagtaaaaatttctaagtgtgccttcaatttatttcacatggatctattcacctggttaataaagattatgagaaatatctgtgacaaataatttggaacaaagttaaaag

SEQ ID NO: 125957 - DNA, 520 bp, Homo sapiens
atgttcctgctttgtatattccagtggagttatggtttctttcaaagaagtgtagtttttctaatttcaaaaatagcatgaaagagacagggaacagatgtggatgttcagtccactgatgcaagtagagcactagttcttgtttgcaccctgtttttaaatgtgtctgtatgcaaatggatagagttctagaaacagaatgtgtaacaaaggttgtgaacagtttgcaacatacagttgtaacatatagttacaagagacagagaagcattggaatgaaaacaaaacaataatagactcaattcaccatgttttaaggttggaattatcagataaaaaggtcgctactgtaattaataattttgtatkgtttaatgtctttggatggcattttccagctttattgagatataactgacaaaaatgttatatatttaaggtatacaacatgatgttttggtagatatatactttgtgaaatgaatatggcaataaaatattaacatattatcactcacat

SEQ ID NO: 125958 - DNA, 520 bp, Homo sapiens
atgttcctgctttgtatattccagtggagttatggtttctttcaaagaagtgtagtttttctaatttcaaaaatagcatgaaagagacagggaacagatgtggatgttcagtccactgatgcaagtagagcactagttcttgtttgcaccctgtttttaaatgtgtctgtatgcaaatggatagagttctagaaacagaatgtgtaacaaaggttgtgaacagtttgcaacatacagttgtaacatatagttacaagagacagagaagcattggaatgaaaacaaaacaataatagactcaattcaccatgttttaaggttggaattatcagataaaaaggtcgctactgtaattaataattttgtatggtttaatgtctttggatggcattttccagctttattgagatataaytgacaaaaatgttatatatttaaggtatacaacatgatgttttggtagatatatactttgtgaaatgaatatggcaataaaatattaacatattatcactcacat

SEQ ID NO: 125959 - DNA, 520 bp, Homo sapiens
atgttcctgctttgtatattccagtggagttatggtttctttcaaagaagtgtagtttttctaatttcaaaaatagcatgaaagagacagggaacagatgtggatgttcagtccactgatgcaagtagagcactagttcttgtttgcaccctgtttttaaatgtgtctgtatgcaaatggatagagttctagaaacagaatgtgtaacaaaggttgtgaacagtttgcaacatacagttgtaacatatagttacaagagacagagaagcattggaatgaaaacaaaacaataatagactcaattcaccatgttttaaggttggaattatcagataaaaaggtcgctactgtaattaataattttgtatggtttaatgtctttggatggcattttccagctttattgagatataactgacaaaaatgttatatatttaagrtatacaacatgatgttttggtagatatatactttgtgaaatgaatatggcaataaaatattaacatattatcactcacat

SEQ ID NO: 125960 - DNA, 609 bp, Homo sapiens
gaaagagaaagcaggaaaaaaatcagcaagaattcatctcaagaagaatcataatataatatattatggatagaatgttttatccagtggaaattattcccagataaaatgagttaaagagtaagttaaagggaaaatatgycagtatatctacataaatatgatgtacaaagataatactaatgctcttttaagggactaaaatatatagataactaaaagtcatgagaaaaaaccctcagagtacaaaaaaaaaaggttaatggaacttctgttcttataagacccttgtattgaatagaaatgtggaaaaactgctaataagtaagaatttacattgctgcattagaatgaactaataaaaaggagaagaatgaacaaaaaggagctgtggtaagggaaaatttattgtaaaaatgcttaatccaaatgtgttctaaaggggagctacaaaatatagaacgggggaaaaaacagaaaacacatgcttcgactaaagctataaactgaaatattaacaattacataaaatggtcatggcattaattataaatattgtctggatcaaaatttaaagagaaccctagcacatacaacttacaatagata

SEQ ID NO: 125961 - DNA, 613 bp, Homo sapiens
ttaaatataaattactaaacatgatatagaattctatattgatttaaaattatatgcctgataccacataatagtgcacttatttttagccatgtcatcactctttttctcttggagtcttatatttcctgtattttggttctgttaattggtagtttaccaactgtctacattgtattytttcatgagctttataaacatttctatttggagatagcatcatatgatgttcacttacaaatgtgataaaataaatggatacgttgtgcaatgcattgaacctacatgggatttagtagttttaaagccaaagttatttgtgttccacatgcagtgaaaagggatgtttcaaaatctgagaagagagcctactttaagaaaaaataaaattcttaaatgatggtgctagtttttatggatccttgaaaggaataatatgacatgcttgtaaatgttactgaggcaaacatgaggcagtctctgcctgaagaataaaattgaggcatatgttctttccatcccatcaaacccaagtttctaaggaatatataaatcttatgtgcaatgtataactgtttttcatccaagcaaagcaagttcctgattctaccta

SEQ ID NO: 125962 - DNA, 568 bp, Homo sapiens
cacaggctttaagttgtgcwagtgatggtctgctgatagtgtgcttccaggatgtttctaccaccaaaatgcttaattaaacatttgtacatagagtaagacagggtcccattcagtcatccaggctggagtacagtggtggaatcatagctcactgcagcctgtactgcctgagctcaggtgatcctcccacatcggcctgctaagtagctgggactacaggcaggcacaaagaccccttggtaatttctcttggtgtatgtatgtatgtatgtatgtatgtatgtatgtatgtatgtatgtatgtaagtatttattttgaaacagagtctcactctttcacccaggctggagtgcagtggcttcagctcactgaaacctctcctcccctggttgaagcgattctcatgcctcagtctcccaagtagctgggaccacagtcctgtgccaccacgcctggctaattttgtatttttagtagagatggagcttcaccatgttggccaggctggtctcaaactcctgatctcaagttatctgcccaccttggcctcctaaagtgctggaa

SEQ ID NO: 125963 - DNA, 536 bp, Homo sapiens
actatgtgtcttggggttgcttttcttgaggagtgtctttgtratgttctccatatttctgaatttgaatattggcctgccttgctaggttagggaagttctcctggataatattccgaagagtgttttctaacttggttccattctccccatcactttcaggtacagcaatcaaacgtagatttggtcgtttcacatagtcccatatttcttggaggctttgttcatttcttttcattcttttttctctaatcttgtcttcttgatttatttcattaagttgatattcagtctctgatatctttcttccgcttgaccgaatcagtgcttgatccttgtgcatgctgcatgaagttctcatggcgtgtttttcagctccatcaggtcatttatgttcttctctaaactagttattctagttagcaagtggtctagccttttttccaggtccttagcttccttacattgggttaggacatgctcctttagcttggaggagtttgttattacctaccttctgaaacctacttctctca

SEQ ID NO: 125964 - DNA, 536 bp, Homo sapiens
actatgtgtcttggggttgcttttcttgaggagtgtctttgtaatgttctccatatttctgaatttgaatattggcctgccttgctaggttagggaagttctcctggataatatyccgaagagtgttttctaacttggttccattctccccatcactttcaggtacagcaatcaaacgtagatttggtcgtttcacatagtcccatatttcttggaggctttgttcatttcttttcattcttttttctctaatcttgtcttcttgatttatttcattaagttgatattcagtctctgatatctttcttccgcttgaccgaatcagtgcttgatccttgtgcatgctgcatgaagttctcatggcgtgtttttcagctccatcaggtcatttatgttcttctctaaactagttattctagttagcaagtggtctagccttttttccaggtccttagcttccttacattgggttaggacatgctcctttagcttggaggagtttgttattacctaccttctgaaacctacttctctca

SEQ ID NO: 125965 - DNA, 648 bp, Homo sapiens
tgccagcttgcttgcccctgttggattcagcagagggagataggccttgccatacctgtggtgtctgccaaagcttcctcctggcaattcttgggagtgctgatacctgggccacagttagtccaagtttatcactgaagatcctatcaaagttttgtctgaaattccacttttgccttttgtcctaagtggttgtggacatttccaggggctgataccaaggactaggaacagctgagggaggcagaaaggttcagagtacatctctatttacagggaacagaacaccggcctccgagagtccatggagcaatgggaaaattgcagtgattactcatcactgtgaaacttctactttgaatacagtatcttctggcaagcataggggactgcagtcgacaatgctgctgaatatacctgagtacatagkaagacatttgtttggtaaacagtcaatgcatacaataaattaccttgagagggccatctgtgctccagatgtgagagttcatgtgaatagaatggccgcaattcaaagaatcttcacaggaaaacagggctcagagctcatccacaatggacagacagggagggaaacaggtggaggttagttcaccacttcctcataagaaggtaataaatagtttg

SEQ ID NO: 125966 - DNA, 562 bp, Homo sapiens
acagtatcttctggcaagcataggggactgcagtcgacaatgctgctgaatatacctgagtacataggaagacatttgtttggtaaacagtcaatgcatacaataaattaccttgagagggccatctgtgctccagatgtgagagttcatgtgaatagaatggcygcaattcaaagaatcttcacaggaaaacagggctcagagctcatccacaatggacagacagggagggaaacaggtggaggttagttcaccacttcctcataagaaggtaataaatagtttggtgaaataaaatggtagcactgagtaattgcgggcttctggataggcagtcaggttgatttcatgttgctactgctggacttgagggctggcttggctgtggtggcagacacagcagcagctcaggatgatggtgatggtccatgccagccagaaccaccaatgttcatagtagtagttacaacactgagactgcccatagcagtgtcctgttgtgtcacagatgtagctttgattgttggtacacacacaggcttccttatcctgtgggggttca

SEQ ID NO: 125967 - DNA, 581 bp, Homo sapiens
gggaattggacaatgagaacacatggacacaggaaggggaacatcactttaaaaaaaaaacaataatgctgatcttttaaaatgagtttggaaatactctttctccttcaagtttttggaagaatttcagaaggattgtattattattttttaaaatgttagaattcagcaatgargttttctggtcctgggatgttctttgatgggagatgttttattattgatatactctccatactcagtattgttctgttcagattttatctttcttcttgactttctctaggtaagttgcatttttctagaaatttatctgctttttctaggttatccaatttgttggcttgtaattgtttatagtggcctcttatgatcctctgtatttctgtggtattagttgcaatatttcctctttcatttctgattttattgctttgagtattctctcatttttctagtctagctaatggtttgtcagttttatcttttcaaagaacaaattcttagtttcattgatctgttctattttctttcacagtcttttttgtatttgaaggacttgtatttgttaactggctcaa

SEQ ID NO: 125968 - DNA, 621 bp, Homo sapiens
gcttcccatcctgcagtgatttcataaggagcctatgccacctgtcatgtaaggctttttccatgcctaataaatatgttttggagggatttcaccagagtttttgctaagatgcataaaatggccacagaggttgtgagaaatctctgcagtttctctttgtctatacacatgaaagtatwgaagaccagcacttggattagttaagataatgttttaattcatcactgtctcctcctccccttggtaccagcttttatgttcattgcattccccatccttttaagtactcagtacctcctgcatggtaacctattctgatatttgatattatcatgcttaatttgactgaatccatttggatattttatctttaagaaatttgtagttttatacttttaatttatgataaaattagattaatatcaaacattaacaagtgacttttaggaaggtatatgagctttcttattgacttcaaactataaagtacaaactgtgacactagaaatttagtcctttaacacatgttgtatttatatgtgaagtggagggtgagcagaaaacagtgttatatttctctgtgtccagatggatactcacctcaatgattttcctata

SEQ ID NO: 125969 - DNA, 629 bp, Homo sapiens
tgattgacaagtaagactaataatcccagatcatagtaaggtcttaacttcaagtcaataatctttattacttatggttcattcctctccctyatgttttccaataattttaaaatgcataattaaaacaattctcatttaaaaacatagtagccatgactaatgatcttccagtgggaaggtactaagactttacaacatgtttcttgctggggataagacagcctacagccagcattcaactcatttttctaaagtctatggatcaatttgaaatacagaaaaagtagaacagagataaagttaaaacaagattaaaaatatgggaagaatgggagaaaggggagattagaagatatgaacaatgatttaaaaataaaagagcctcaaaggagaagagaaactgctaagcaagactaaggtaggatgaaatacagtagtctctgtttctgagaacacaggttaaaaagaacataaataaaataaatttatcacctttaatacactcattcaaggatgctactgagtttgactttgggaatttctcacctttaatacactcatctggggatgctacggactttgacattgggttgcatttaaagggggagagaaagggcagttgcttc

SEQ ID NO: 125970 - DNA, 635 bp, Homo sapiens
ggcagaagagacgattgccattaagaacaggtggaggaggttatgccaaggacattgacctgaccctttaggaattagtgaaaattgaataggagaagaatgaggtatacaatgtgtgaaaaatacctaaattgatataacaggaggagaccttttcatatcaattatcattacttctgtgtatataaccatattagatacccacaaacgaatagaaagtggatagttcttgattgacaagtaagactaataatcccagatcatagtaaggtcttaacttcaagtcaataatctttattacttatggttcattcctctcccttatgttttccaataattttaaaatgcataattaaaacaattctcatttaaaaacatagtagccatgactaatgatcttccagtgggaaggtactaagactttacaacatgtttcttgctggggataagacagcctacagccagcattcaactcatttttctaaagtctatggatcaatttgaaatacagaaaaagtagaacagagataaagttaaaamaagattaaaaatatgggaagaatgggagaaaggggagattagaagatatgaacaatgatttaaaaataaaagagcctcaaaggagaagagaaact

SEQ ID NO: 125971 - DNA, 629 bp, Homo sapiens
tgattgacaagtaagactaataatcccagatcatagtaaggtcttaacttcaagtcaataatctttattacttatggttcattcctctcccttatgttttccaataattttaaaatgcataattaaaacaattctcatttaaaaacatagtagccatgactaatgatcttccagtgggaaggtactaagactttacaacatgtttcttgctggggataagacagcctacagccagcattcaactcatttttctaaagtctatggatcaatttgaaatacagaaaaagtagaacagagataaagttaaaacaagattaaaaatatgggaagaatgggagaaaggggagattagaagatatgaacaatgatttaaaaataaaagagcctcaaaggagaagagaaactgctaagcaagactaaggtaggatgaaatacagtagtctctgtttctgagaacacaggttaaaaagaacataaataaaataaatttatcacctttaatacaytcattcaaggatgctactgagtttgactttgggaatttctcacctttaatacactcatctggggatgctacggactttgacattgggttgcatttaaagggggagagaaagggcagttgcttc

SEQ ID NO: 125972 - DNA, 603 bp, Homo sapiens
ctaaggtaggatgaaatacagtagtctctgtttctgagaacacaggttaaaaagaacataaataaaataaatttatcacctttaatacactcattcaaggatgctactgagtttgactytgggaatttctcacctttaatacactcatctggggatgctacggactttgacattgggttgcatttaaagggggagagaaagggcagttgcttctattatctgcccttttggactcacagagtttctttgaaaagcacagatgataataaatggaaatattgccttttatactatacaataatatacacatgcaattcactggaaaaagtatacttgttactatgatttgaggatactaccatatactaatcaagagaaacacatgtacagaacaaagaaggcacatgaaatttttactagtgtgtgttttccttgtgttctaccaccccaggagcagcttctgctactgaagatcacagtagagttatttccaaaagttgtgggtctgcagggtggacttatcacatagctgtttgccaaaattcaaaagtccagaaaccatttccaaattttcacctcttttatcttcaaatcctaaaacta

SEQ ID NO: 125973 - DNA, 603 bp, Homo sapiens
ctaaggtaggatgaaatacagtagtctctgtttctgagaacacaggttaaaaagaacataaataaaataaatttatcacctttaatacactcattcaaggatgctactgagtttgactttgggaatttctcacctttaayacactcatctggggatgctacggactttgacattgggttgcatttaaagggggagagaaagggcagttgcttctattatctgcccttttggactcacagagtttctttgaaaagcacagatgataataaatggaaatattgccttttatactatacaataatatacacatgcaattcactggaaaaagtatacttgttactatgatttgaggatactaccatatactaatcaagagaaacacatgtacagaacaaagaaggcacatgaaatttttactagtgtgtgttttccttgtgttctaccaccccaggagcagcttctgctactgaagatcacagtagagttatttccaaaagttgtgggtctgcagggtggacttatcacatagctgtttgccaaaattcaaaagtccagaaaccatttccaaattttcacctcttttatcttcaaatcctaaaacta

SEQ ID NO: 125974 - DNA, 603 bp, Homo sapiens
ctaaggtaggatgaaatacagtagtctctgtttctgagaacacaggttaaaaagaacataaataaaataaatttatcacctttaatacactcattcaaggatgctactgagtttgactttgggaatttctcacctttaatacactcatytggggatgctacggactttgacattgggttgcatttaaagggggagagaaagggcagttgcttctattatctgcccttttggactcacagagtttctttgaaaagcacagatgataataaatggaaatattgccttttatactatacaataatatacacatgcaattcactggaaaaagtatacttgttactatgatttgaggatactaccatatactaatcaagagaaacacatgtacagaacaaagaaggcacatgaaatttttactagtgtgtgttttccttgtgttctaccaccccaggagcagcttctgctactgaagatcacagtagagttatttccaaaagttgtgggtctgcagggtggacttatcacatagctgtttgccaaaattcaaaagtccagaaaccatttccaaattttcacctcttttatcttcaaatcctaaaacta

SEQ ID NO: 125975 - DNA, 603 bp, Homo sapiens
ctaaggtaggatgaaatacagtagtctctgtttctgagaacacaggttaaaaagaacataaataaaataaatttatcacctttaatacactcattcaaggatgctactgagtttgactttgggaatttctcacctttaatacactcatctggggatgctacggactttgacattgggttgcatttaaagggggagagaaagggcagttgcttctattatctgcccttttggactcacagagtttctttgaaaagcacagatgataataaatggaaatattgccttttatactatacaataatatacacatgcaattcactggaaaaagtatacttgttaytatgatttgaggatactaccatatactaatcaagagaaacacatgtacagaacaaagaaggcacatgaaatttttactagtgtgtgttttccttgtgttctaccaccccaggagcagcttctgctactgaagatcacagtagagttatttccaaaagttgtgggtctgcagggtggacttatcacatagctgtttgccaaaattcaaaagtccagaaaccatttccaaattttcacctcttttatcttcaaatcctaaaacta

SEQ ID NO: 125976 - DNA, 585 bp, Homo sapiens
gcaggtatcaagaataaaggaggagaagagagaacaaagagagagagaagagaacttctgtggcagaagatcaagtgggatggtagaataaaggagaagaaatacaagaaaattgaaataaaatttacagaaatgttctacattgtaagtgggcagttttgacctggcacattgttggcacacattataaatgtcaaatgtattaatgaatgaatgaatggataatataatgaatgtgatggagttgtcaaaagctgaattaattaaaagtccccacgagaggttagatgacaaaattttcagaaactttccatgccactctgttgtgacatcaacagtgctggacccttgaaatcaaaccaaaaggattccaccatgagaatgaaaagggctgagaaggggaatgctgggtgacacagaaggtgacaaagggcgaaaggtttctagrcatttgatagactgatggacgtccgagctgaccataaggcacaggccacacaggaaggaaaatgagacccaacgcgaagaaaagtagggctaaacagtcgggaaaatgtgggaagaaggatgaatagtcatacgatc

SEQ ID NO: 125977 - DNA, 585 bp, Homo sapiens
gcaggtatcaagaataaaggaggagaagagagaacaaagagagagagaagagaacttctgtggcagaagatcaagtgggatggtagaataaaggagaagaaatacaagaaaattgaaataaaatttacagaaatgttctacattgtaagtgggcagttttgacctggcacattgttggcacacattataaatgtcaaatgtattaatgaatgaatgaatggataatataatgaatgtgatggagttgtcaaaagctgaattaattaaaagtccccacgagaggttagatgacaaaattttcagaaactttccatgccactctgttgtgacatcaacagtgctggacccttgaaatcaaaccaaaaggattccaccatgagaatgaaaagggctgagaaggggaatgctgggtgacacagaaggtgacaaagggcgaaaggtttctagacatttgatagactgatggacgtccgmgctgaccataaggcacaggccacacaggaaggaaaatgagacccaacgcgaagaaaagtagggctaaacagtcgggaaaatgtgggaagaaggatgaatagtcatacgatc

SEQ ID NO: 125978 - DNA, 585 bp, Homo sapiens
acctgcctcacagaagagtggctgcatttttcttcctgcagttttcagtcctcacttctccttaccaagcasggccgcctggcctgggactcctgtacaactaccctgcccccgacctgaccacttcaataagaagtagcccagcatttctccaaggaggaaataccagagtcaattcacaaccactgcaattgtagtggtaccaccataacagcccttgggctgcagaaggaactaagagtctaatcactacagtggcaccttcagcacaccacagccaccatacagagaggaatccagccccctcccctgggaacccccaccacccactccaccaggcacagcacccagctcataactgcagatcagttgccccacccacagctgagcttacctactggcagtggcccagactttccctagggagaggctcccagaggcaaacggcagcctctctgcccctgtcacagcagcagttctatccatgctgtcctcaggcttggaaagaaacaaagcgcctgaaggctgcacctgaacttacagcatgccacagttcccatatggagaggagaccagtctcttctc

SEQ ID NO: 125979 - DNA, 585 bp, Homo sapiens
acctgcctcacagaagagtggctgcatttttcttcctgcagttttcagtcctcacttctccttaccaagcagggccgcctggcctgggactcctgtacaactaccctgcccccsacctgaccacttcaataagaagtagcccagcatttctccaaggaggaaataccagagtcaattcacaaccactgcaattgtagtggtaccaccataacagcccttgggctgcagaaggaactaagagtctaatcactacagtggcaccttcagcacaccacagccaccatacagagaggaatccagccccctcccctgggaacccccaccacccactccaccaggcacagcacccagctcataactgcagatcagttgccccacccacagctgagcttacctactggcagtggcccagactttccctagggagaggctcccagaggcaaacggcagcctctctgcccctgtcacagcagcagttctatccatgctgtcctcaggcttggaaagaaacaaagcgcctgaaggctgcacctgaacttacagcatgccacagttcccatatggagaggagaccagtctcttctc

SEQ ID NO: 125980 - DNA, 585 bp, Homo sapiens
acctgcctcacagaagagtggctgcatttttcttcctgcagttttcagtcctcacttctccttaccaagcagggccgcctggcctgggactcctgtacaactaccctgcccccgacctgaccacttcaataagaagtagcccagcatttctccaaggaggaaataccagagtcaattcacaaccactgcaattgyagtggtaccaccataacagcccttgggctgcagaaggaactaagagtctaatcactacagtggcaccttcagcacaccacagccaccatacagagaggaatccagccccctcccctgggaacccccaccacccactccaccaggcacagcacccagctcataactgcagatcagttgccccacccacagctgagcttacctactggcagtggcccagactttccctagggagaggctcccagaggcaaacggcagcctctctgcccctgtcacagcagcagttctatccatgctgtcctcaggcttggaaagaaacaaagcgcctgaaggctgcacctgaacttacagcatgccacagttcccatatggagaggagaccagtctcttctc

SEQ ID NO: 125981 - DNA, 585 bp, Homo sapiens
acctgcctcacagaagagtggctgcatttttcttcctgcagttttcagtcctcacttctccttaccaagcagggccgcctggcctgggactcctgtacaactaccctgcccccgacctgaccacttcaataagaagtagcccagcatttctccaaggaggaaataccagagtcaattcacaaccactgcaattgtagtggtaccaccataacagcccttgggctgcagaaggaactaagagtctartcactacagtggcaccttcagcacaccacagccaccatacagagaggaatccagccccctcccctgggaacccccaccacccactccaccaggcacagcacccagctcataactgcagatcagttgccccacccacagctgagcttacctactggcagtggcccagactttccctagggagaggctcccagaggcaaacggcagcctctctgcccctgtcacagcagcagttctatccatgctgtcctcaggcttggaaagaaacaaagcgcctgaaggctgcacctgaacttacagcatgccacagttcccatatggagaggagaccagtctcttctc

SEQ ID NO: 125982 - DNA, 585 bp, Homo sapiens
tatgcaggctgtacatatacaccatggaatactatgccgccattaaaaaatgatatcatgtcttttgctggaatrtggatggaccttctattatccttagcaaactaatgcaggaacagaaaaccaaatacagcatactctcagttataagtgggagctaaatgatgagaactaatgaacacaaagaataaaacagacactggggtctacttgagggtggagggtgagaaaaggaagagaagcagaaaagataactattgggtactaggtttaatacctggatgatgaaataatctgtacaataaccccctgtgacaccagtttacctatgtaacaaatgcccctaaacttaaaataaaagttaaaaaaaaaaagaaaattaaaatctccttatcatctacctggtaatatgaaaaacacaaatctttcattcattcctttcaactgatgaggaaaatgaggcatcgggagttagtaaaagtccacattgagatatgagacccaccactggctggacgcagtggctcacacctgtaatcccagcactttgggaggccgatgctggtggatcacctaaggtcagga

SEQ ID NO: 125983 - DNA, 452 bp, Homo sapiens
catactctcagttataagtgggagctaaatgatgagaactaatgaacacaaagaataaaacagacmctggggtctacttgagggtggagggtgagaaaaggaagagaagcagaaaagataactattgggtactaggtttaatacctggatgatgaaataatctgtacaataaccccctgtgacaccagtttacctatgtaacaaatgcccctaaacttaaaataaaagttaaaaaaaaaaagaaaattaaaatctccttatcatctacctggtaatatgaaaaacacaaatctttcattcattcctttcaactgatgaggaaaatgaggcatcgggagttagtaaaagtccacattgagatatgagacccaccactggctggacgcagtggctcacacctgtaatcccagcactttgggaggccgatgctggtggatcacctaaggtcagga

SEQ ID NO: 125984 - DNA, 585 bp, Homo sapiens
tatgcaggctgtacatatacaccatggaatactatgccgccattaaaaaatgatatcatgtcttttgctggaatatggatggaccttctattatccttagcaaactaatgcaggaacagaaaaccaaatacagcatactctcagttataagtgggagctaaatgatgagaactaatgaacacaaagaataaaacagacactggggtctacttgagggtggagggtgagaaaaggaagagaagcagaaaagataactattgggtactaggtttaatacctggrtgatgaaataatctgtacaataaccccctgtgacaccagtttacctatgtaacaaatgcccctaaacttaaaataaaagttaaaaaaaaaaagaaaattaaaatctccttatcatctacctggtaatatgaaaaacacaaatctttcattcattcctttcaactgatgaggaaaatgaggcatcgggagttagtaaaagtccacattgagatatgagacccaccactggctggacgcagtggctcacacctgtaatcccagcactttgggaggccgatgctggtggatcacctaaggtcagga

SEQ ID NO: 125985 - DNA, 594 bp, Homo sapiens
gtaaaagtccacattgagatatgagacccaccactggctggacgcagtggctcacacctgtaatcccagcactttgggaggccgatgctggtggatcacctaaggtcaggagttcgggaccaggctggccaacatggtgaaacccccatctctactaaaaatacaaaaattagctgggtgtggtggcaggcacctgtaataccagctactagggaggctgaggcaggagaatcgcttgaacccaggaggtggagtttacagtgagccaaaatcacgccattgcactccagcctgggcaacaagagcaagactctgtcggggaaaaaaaaaaaaaaaaccaccaccatcattttgcaagtgttaccactattgtgtgttaatattgtagaagtattcctaattatgatttctttgtattcctaattgtaatagctttgtatttgaaaaattattgattcatactctatatgttattattttgtatgcgatgacaacagaatatattatcatgctccttttgtgaatctcattcataatataaagtataaatttgtgattttgctttaatwtgaaatattaacttcaaatatgtta

SEQ ID NO: 125986 - DNA, 578 bp, Homo sapiens
  misc_feature (1)...(578): n = A,T,C or G
atggtgtataaacaactttagattctttgtttaagaaattactgccagtttgtaatatatgcttcattcagaagaagctaagggctgtactggnctaatagtaggcacntaatattgttgaaaaggaatactgagtagctgggacctcctgagtagctgggaccacacacatttaacctgtatttatanaattactgtttagagaataacatttgatggaatcatgcttttactttctgcttaygactcaattgtttgtactgacattaacatcccaaatccttagcatggcctacaaggccctgagcaatgtggcacctgctgaagcctgctgcctcatttaataactctttgtctctttcccagatccagccactctaacattttttagctcctggaccaagacaagctcttcccagaacctgacctttgtacctgttctttattcctggagtatttttcccctgacaaattacttatcatctatcataattcaggttaaatggcactaactcagggaaggcttccctaactgcctcccttctccaaccaaattaggaacaattatatggccacat

SEQ ID NO: 125987 - DNA, 644 bp, Homo sapiens
tttcccctgacaaattacttatcatctatcataattcaggttaaatggcactaactcagggaaggcttccctaactgcctcccttctccaaccaaattaggaacaattatatggccacatagtatcgaatcaagttyataattttaaaataattgggagattttgttgtttaacacttgttttcactataagactgtaattacatgcaagtaagaaccatgcctgtttgttcactcctgccacagtcagaatagtgcctggaatatgcagtaagggctgaacaaacactaaataaatgaacaagtgaataaatggatattgtatcatttttagaacagagtgctgaaaggatatttttacactatcttgggatgtcacataggggatatacaagggcttcagttgcagctcaaatttacctttatctggatacaggtcttgataggtctcttgatgtcatttcatttcagattcttctttagaaaacttggacaatagcatttgctgtcttgtccaaattgttactaagaatcaagagagatatctgacatgaaatgacattggaaaacattaaacatgagaaataatgctagccaatatggttattattagaaaccaattacattttcaacttaaaaatagta

SEQ ID NO: 125988 - DNA, 644 bp, Homo sapiens
tttcccctgacaaattacttatcatctatcataattcaggttaaatggcactaactcagggaaggcttccctaactgcctcccttctccaaccaaattaggaacaattatatggccacatagtatcgaatcaagtttataattttaaaataattgggagattttgttgtttaacacttgttttcactataagactgtaattacatgcaagtaagaaccatgcctgtttgttcactcctgccacagtcagaatagtgcctggaatatgcagtaagggctgaacaaacactaaataaatgaacaagtgaataaatggatattgtatcatttttagaacagagtgctgaaaggatatttttacactatcttgggatgtcacataggggatatacaagggcttcagttgcagctcaaatttacctttatctggatacaggtcttgataggtctcttgatgtcatttcayttcagattcttctttagaaaacttggacaatagcatttgctgtcttgtccaaattgttactaagaatcaagagagatatctgacatgaaatgacattggaaaacattaaacatgagaaataatgctagccaatatggttattattagaaaccaattacattttcaacttaaaaatagta

SEQ ID NO: 125989 - DNA, 518 bp, Homo sapiens
gaataaatggatattgtatcatttttagaacagagtgctgaaaggatatttttacactatcttgggatgtcacataggggatatacaagggcttcagttgcagctcaaatttacctttatctggatacaggtcttgataggtctcttgatgtcatttcatttcagattcttctttagaaaacttggacaatagcatttgctgtcttgtccaaattgttactaagaatcaagagagatatctgacatgaaatgacaytggaaaacattaaacatgagaaataatgctagccaatatggttattattagaaaccaattacattttcaacttaaaaatagtaatacttattgcagactcaaatgtgcttattctaaaacaagtaaatgtttgcctatggtctgagattctaatccacggagttcattctaatccacattcaacactatcatgtaccagtgggcctcataacccacctagccctgtgatttttcaggttcacttttctaaacttgtgaatta

SEQ ID NO: 125990 - DNA, 531 bp, Homo sapiens
tcaacactatcatgtaccagtgggcctcataacccacctagccctgtgatttttcaggttcacttttctaaacttgtgaattaaatatttattttcttagttcagaagaggaaaaaaactcttgtaattgttgcccatttcaggagaaatcttgcatatgaaaacaagagataaatatacacagctgagggctgtggtttaaacaaaatcttgagaatgttttttgaccttatacatttgtgctttagtataacaaaatgatatagacaaaggtaacttttaatagaaccagtcactamattaaaaaaatgacaaattcttctgcttagctaagcaacagagaaggtaaagtactaattcaattcatcaatttaagcaatactcattaagagccaagtatgtgcttactgaataagctgctaaggtttggtggttacagagtgtgcggtgaaatgatgtctacatcacagtccaacattcacagagtttaaaagcctaccaagaatcaagacagacacaaatacctaacat

SEQ ID NO: 125991 - DNA, 625 bp, Homo sapiens
agcaacagagaaggtaaagtactaattcaattcatcaatttaagcaatactcattaagagccaagtatgtgcttactgaataagctgctaaggtttggtggttacagagtgtgcggtgaaatgatgtctacatcacagtccaacattcacagagtttaaaagcctaccaagaatcaagacagacacaaatacctaacatagacgtttgtatgtgataagagagccagagtacartttaggagaagaaattgtatggaaggaaggttcatttccattagaccagaaaagacagcacatttgaaggcctgaataagaaatattctggataagatattgtggctgctaccagaatggctcttgatgatctctacctcttggtatttatacccttatataatctctttcctatagtataagctggtcccaggtacttgtttctattgaatagaatagaacaaaagaaatgagatgccacttctgagattagattataagatactgtgaatttcatcttgtgccctctccctctctctctttctcttgccctctcatttgaatgaagccaactggcatgctgtcagtggcccagtgtaagtcctgttacaagaaattgatgattacctgt

SEQ ID NO: 125992 - DNA, 625 bp, Homo sapiens
agcaacagagaaggtaaagtactaattcaattcatcaatttaagcaatactcattaagagccaagtatgtgcttactgaataagctgctaaggtttggtggttacagagtgtgcggtgaaatgatgtctacatcacagtccaacattcacagagtttaaaagcctaccaagaatcaagacagacacaaatacctaacatagacgtttgtatgtgataagagagccagagtacagtttaggagaagaaattgtatggaaggaaggttcatttccattagaccagaaaagacagcacatttgaaggcctgaataagaaatattctggataagatattgtggctgctaccagaatggctcttgatgatctctacctcttggtatttatacccttatataatctctttcctatagtataagctggtcccaggtacttgtttctattgaatagaatagaacaaaagwaatgagatgccacttctgagattagattataagatactgtgaatttcatcttgtgccctctccctctctctctttctcttgccctctcatttgaatgaagccaactggcatgctgtcagtggcccagtgtaagtcctgttacaagaaattgatgattacctgt

SEQ ID NO: 125993 - DNA, 468 bp, Homo sapiens
atctggataagatttacagacctttcagaaattcctataagcttgggttctgtgcccacactctagactgtcaggctaagatctctgatataaaacagacctcttctgattttgtctagctgcttttctaatatctattcaccaagctcttccaataatarcataaggccctaattaatattaaacttttatcattataatacataggatgtcttctgttttcctgatcaaattctgactactattaaaatataaagaattgtccagaaatatataaaaaaagaatcacacattgatcttctttaaatgaaaatataacaattgtatggactaggatgattacagttgttcagttctgactgttatttgaagaaaaaagcaataagaagcctcagcaacttaacagaaggagctgccatttactaggagaaaagattgtggatgagagtgtagcaaaggtcagaattc

SEQ ID NO: 125994 - DNA, 608 bp, Homo sapiens
cctaattaatattaaacttttatcattataatacataggatgtcttctgttttcctgatcaaattctgactactattaaaatataaagaattgtccagaaatatataaaaaaagaatcacacattgatcttctttaaatgaaaatataacaattgtatggactaggatgattacagttgttcagttctgactgttatttgaagaaaaaagcaataagaagcctcagcaacttaacagaaggagctgccatttactaggagaaaagattgtggatgagagtgtagcaaaggtcagaattctgtgaagcttgagatgtytattataatgaattatcttttatactcactacaatttcctaacaattttggggtttatatttttgaaagagatatacctttaatttttttctttgtactattgttagataactttaatgtgcagattatactacagtgaaagttgccaatgacaaggcaaagtcacttacatcagacccaaagcaaagtggagccgggtcatgaaaaaggggatcttgtgtgtgtgtccacgataagcactatcacaaggactttctataaactcacaagaaatttctgcccacccagcac

SEQ ID NO: 125995 - DNA, 608 bp, Homo sapiens
cctaattaatattaaacttttatcattataatacataggatgtcttctgttttcctgatcaaattctgactactattaaaatataaagaattgtccagaaatatataaaaaaagaatcacacattgatcttctttaaatgaaaatataacaattgtatggactaggatgattacagttgttcagttctgactgttatttgaagaaaaaagcaataagaagcctcagcaacttaacagaaggagctgccatttactaggagaaaagattgtggatgagagtgtagcaaaggtcagaattctgtgaagcttgagatgtctattataatgaattatcttttatactcactacaatttcctaacaattttggggtttatatttttgaaagagatatacctttaatttttttctttgtactattgttagataactttratgtgcagattatactacagtgaaagttgccaatgacaaggcaaagtcacttacatcagacccaaagcaaagtggagccgggtcatgaaaaaggggatcttgtgtgtgtgtccacgataagcactatcacaaggactttctataaactcacaagaaatttctgcccacccagcac

SEQ ID NO: 125996 - DNA, 532 bp, Homo sapiens
gatggagagatcttcctgggttacccagatgggcccagtctaatcacatgagttcttaaaaatggagaacctttcttagctgagtccagagagagatgtgacaatgaaagaatggtcagagaaatgtgacattgccagctttaaaaagagagaggagaggcaatgagaaaaggaatgctgatgttctctagaagatagaaaaggccaggatatggattctaccctagccaccataaagaaacatgcctgtcracaacttgattttagttcactaaaattcatgcctgatttctgacttgtgtacactgtaagatgacaagtttgtgttattttaggtcacttagtttgtagaaatttgttacagcagtaatagaacaagtggttatccatatgaggcaaattagattggatacctatctccaatagaaatcaattcaaggtgaattccaggaaaatacttaaaacatttagattaaaaataaatgagaatttttgttacttttggtaggtcatagaaccaagaaaaacaaac

SEQ ID NO: 125997 - DNA, 599 bp, Homo sapiens
ttagaaatcagtaagtaaatagatggacaatgtaatgaaagatgctaggcaaataatgtggtagggagaataatggcccgcaaagatgcccatgcctaaccctggaacctgtgaatatgttacactgaatgcaataaaggcttatcagatgtgattaaggatgcaaaccgagatggagagatcttcctgggttacccagatgggcccagtctaatcacatgagttcttaaaaatggagaacctttcttagctgagtccagagagagatgtgacaatgaaagaatggtcagagaaatgtgacattgccagctttaaaaagagagaggagaggcaatgagaaaaggaatgctgatgttctctagaagatagaaaaggccaggatatggattctaccctagccaccataaagaaacatgcctgtcaacaacttgattttagttcactaaaattcatgcctgatttctgacttgtgtacactgtaagatgacaagtttgtgttattttaggtcacttagtttgtagaaatttrttacagcagtaatagaacaagtggttatccatatgaggcaaattagattggatacctatctccaatagaa

SEQ ID NO: 125998 - DNA, 470 bp, Homo sapiens
gtagaaatttgttacagcagtaatagaacaagtggttatccatatgaggcaaattagattggatacctatctccaatagaaatcaattcaaggtgaattccaggaaaatacttaaaacatttagattaaaaataaatgagaatttttgttacttttggtaggtcatagaaccaagaaaaacaaacattaaggaggaaaaatgaacatatgactacatcaaaatataaagcttctctatttggatgatatcataaggtgacaaatcataaactgtaatatttacaacatatatatragtgaataaatatacatttagaatatatatgacttcctaaaaatcacaggaaaaaatagacatagaacaagcaaaatgcataaacaaaagaaggcaaaacaaaataatgactcataattatatgaaaagaaactcatcttcatagatgagcagataaatgcaaattaaaaccacc

SEQ ID NO: 125999 - DNA, 580 bp, Homo sapiens
gaattcatagaagtagagaatggaatggtgattatcagaggctaggagttgggggtagacatggaaaaggtagatgttgataaaagggttcaaagtttcagttagacaaagtttcagtgaactattgcacrgaatggtgactgtaataaataacaaggtattgtatgtttcaaaatgactaacagagtagattttaaatgttttcaccacaaaaaagatatgtatgtcaataagatagacctaatctttccacaatttaaacatgtatcaaaacattacattgtaccccatagatacaattattatttgtcaatttaaaatttttcactaatttatattgttattgttgcaccaactcctttccaccaggcagattctcataaagactattttctctcttacatgaagcatttcctacacacctcttaatcacggtagcattgacatcattccaccagattctatctccagtgttaaaataatcaagaacccagaaatctccaccagggggcaaccaatgcgtatcaaagtttcccactttcctttagatttacttatgggtaacttaagggaaaaaata

SEQ ID NO: 126000 - DNA, 592 bp, Homo sapiens
agaattattatgtagtatattagtctgtaatttcatttcttttaatatccttgtatggttttactatcatggaggtaccaccatataaaacaagttggaaagtgttatgtcttcccaattctctaaaaatattcatgtaacattggcattatttctttattaaatatttggtaatatttctttattaaatattgcatccacctagccctggagttctttctacaggaaaaaaaaattttctaaataaaatttctacaatgaaaaaaaaactactcagtttttctagtttttttctgatcatttcataaaagtaggtatttttcataggaacttgaccattccttatgattgtcaaatttattaatatmaagtttcatattttatatttattttatcagataaataaaattatatgttttgaaatatatattcattgtaaaatagccatgttaagctaacatatgcattaccttacatgcttatctttttttatgagaacacttaaaaatctactcttagcaattttgaagaatacaagtacatcccctatggagaacagtttgaaggctcctcaaaaaagtaaaaatagagc

SEQ ID NO: 126001 - DNA, 528 bp, Homo sapiens
ttgtgcctaaaaagacaacttgagcactcagggcctgtgaaatactgtaggaagagataggagagtagaagctggaaacagaggtatgagcctggaaaagaagtgcattggcttcagggcttggctgagaattattagaaaaatgcttatacctcttttagagcatgttacaaagcatgattaggtgcacttttaccttgcaatctcaataaaatatttatcaaatagatataatccttcccatttcacagatgaaagaaactgagcctcagggatgttgtcatgtaatcacctgccattgtgtaacagaaccaggactagaaaccaggtactctgcttgcatttctgctatggatggtaactacagatggggaagaatgaaagaaaatcacagggagtatagggaaattatgcaaataatcctatgttttctattctttctcctggggatgccccatcacacaataccaccaaggatgctcccacaaatgaaaacgtcaktctgcagttatgcaattgtggcagaat

SEQ ID NO: 126002 - DNA, 603 bp, Homo sapiens
taatcagtctaattaggtttgtgtcattcagtacattctagggcattgctaatggggctgccatcaagcagatacttgaaaaatccctggttggcatatctcttctaggctcactgaagatttccaactgttgtttagcaaaggtaagaacactaaaaactccttgaattttcctgagttttaagatccttgacccagaaaaagagtggattcctggggtccttaaaaaggtaattggaggctgggcacagtggctcacacctgcaatcctagcactttgggaggctgaggcrggtggatcacgaggtcaagagttcaagaccagcctggccaagatggtgaaaccccatctctactaaaaatacaaaaattagctgggcgcagtggcaggcacctgtaatcccaactacttgggaggctgaggcaggagaatcgcttgaacccaggtggcagaggttgcagtgagccgacatcacgccactgcactccagcctgtgtgacaaagtgagactccatctcaaaaaaaaaaaaaaaaaaaagtaattggaaaatctttagaccagccataactgtcatttctaaggttcaaactaggaatcatag

SEQ ID NO: 126003 - DNA, 603 bp, Homo sapiens
taatcagtctaattaggtttgtgtcattcagtacattctagggcattgctaatggggctgccatcaagcagatacttgaaaaatccctggttggcatatctcttctaggctcactgaagatttccaactgttgtttagcaaaggtaagaacactaaaaactccttgaattttcctgagttttaagatccttgacccagaaaaagagtggattcctggggtccttaaaaaggtaattggaggctgggcacagtggctcacacctgcaatcctagcactttgggaggctgaggcgggtggatcacgaggtcaagagttcaagaccagcctggccaagatggtgaaaccccatctctactaaaaatacaaaaattagctgggcgcagtggcaggcacctgtaatcccaactacttgggaggctgaggcaggagaatcgcttgaacccaggtggcagaggttgcagtgagccgacatcacgccactgcactccagcctgtgtgacaaagtgagactccatctcaaaaaaaaaaaaaaaaaaawgtaattggaaaatctttagaccagccataactgtcatttctaaggttcaaactaggaatcatag

SEQ ID NO: 126004 - DNA, 603 bp, Homo sapiens
gatttttaccctttaccttacccaaactgtccataattcagttgtttctttgcaaagctgtactttgccattagatacctggatatttccaaaaagagcatttgtgtatcaaaaattacagaggaaactacttcagttccccaccttagtttaggtctatcaatgcatccgaagtgctgcttttttttttrtgatcacagagaaggaaaaagtgcatttattcatctgggaggtgtataatcagtcactctctccatcagcccccaaaagcagttcaaacagcatctatttaaattgaagaccaattaaataattatcaaaagcatcaagaagacagcaaggctaagactcaaaggagcacatggagtccggtagaaaaacatagttgctgttgtgaatttttccctcaccatttattagaccatgtgctgccagtgacctccgcatatcaaacagggccttgggcagcttcttttgagtgtatggacctccctgagcacaaaaatgtttcctagtgttttgcagatttagaaggagatgtattttttgtttgtttgtttgtttgtttccagctaagctgccaggccatttggctttgcagaa

SEQ ID NO: 126005 - DNA, 603 bp, Homo sapiens
gatttttaccctttaccttacccaaactgtccataattcagttgtttctttgcaaagctgtactttgccattagatacctggatatttccaaaaagagcatttgtgtatcaaaaattacagaggaaactacttcagttccccaccttagtttaggtctatcaatgcatccgaagtgctgcttttttttttatgatcacagagaaggaaaaagtgcatttattcatctgggaggtgtataatcagtcactctctccatcagcccccaaaagcagttcaaacagcatctatttaaattgaagaccaattaaataattatcaaaagcatcaagaagacagcaaggctaagactcaaaggagcacatggagtccggtagaaaaacatagttgctgttgtgaatttttccctcaccatttattagaccatgtgctgccagtgacctcygcatatcaaacagggccttgggcagcttcttttgagtgtatggacctccctgagcacaaaaatgtttcctagtgttttgcagatttagaaggagatgtattttttgtttgtttgtttgtttgtttccagctaagctgccaggccatttggctttgcagaa

SEQ ID NO: 126006 - DNA, 540 bp, Homo sapiens
ccaggctggtcttgaactcttgggctcaagcgatcctactgccttggcctccccaagtgctgggattacaggcatgaatcaccagactcagtctaatttttgtatttttttgtagagatggggtttttctrtgttgcccaggctggtctcaaactcctgggctcaagcagtccatctgcatcagcctcccaaagtgctaggattacaggcatgagccataatgcctgaccctttgcccacttttaaatggaattattatcatgttttactgttgaggtatttgagttccttgtgtattctggatgttaattccttgttggatgaacagtttgcagatattttctcccattcaacaggttgtctcttcactgtgttgtttcctctgctgtgcagaagctttgtagtttaatataatccaatttgtctacttttgtttttgttgcctgtgcttttgaagtcttagccataaaatcttttcctagaccagtgtcctgaagtgcttccccctatgttttcttctagtagttttatggtttcagg

SEQ ID NO: 126007 - DNA, 512 bp, Homo sapiens
agatggaaaagaagactggcaacggtttttctttggtagaatgttaatgttttcctttgatgtaagcttggtgtttggaacggggagccaagatctgcagtttwaggtttgaaattttctctgtggctcacggccagttagttcatatcttgactttgggattctgaactttaaatgaagtacagaaatttctttcttccctggggtgaagggctattgtagagcttaattaatttgtaacttgtaatgtgctttgaagaataaaaggactttataaaaatactaaacattatagtaattacaacttctgtgtttgtaagcaaactattttgtaagcaaactattaagacaattgaggccatttatacatcaaaaataaagtgaagatttggccatgttccaggtgagttgataaatgtagacagctgaaagatagttcattatataaagtgaactttttccccctggaggaggaggtgctcttgagccagtttctctgtctgcaggattca

SEQ ID NO: 126008 - DNA, 512 bp, Homo sapiens
agatggaaaagaagactggcaacggtttttctttggtagaatgttaatgttttcctttgatgtaagcttggtgtttggaacggggagccaagatctgcagtttaaggtttgaaatyttctctgtggctcacggccagttagttcatatcttgactttgggattctgaactttaaatgaagtacagaaatttctttcttccctggggtgaagggctattgtagagcttaattaatttgtaacttgtaatgtgctttgaagaataaaaggactttataaaaatactaaacattatagtaattacaacttctgtgtttgtaagcaaactattttgtaagcaaactattaagacaattgaggccatttatacatcaaaaataaagtgaagatttggccatgttccaggtgagttgataaatgtagacagctgaaagatagttcattatataaagtgaactttttccccctggaggaggaggtgctcttgagccagtttctctgtctgcaggattca

SEQ ID NO: 126009 - DNA, 512 bp, Homo sapiens
agatggaaaagaagactggcaacggtttttctttggtagaatgttaatgttttcctttgatgtaagcttggtgtttggaacggggagccaagatctgcagtttaaggtttgaaatttwctctgtggctcacggccagttagttcatatcttgactttgggattctgaactttaaatgaagtacagaaatttctttcttccctggggtgaagggctattgtagagcttaattaatttgtaacttgtaatgtgctttgaagaataaaaggactttataaaaatactaaacattatagtaattacaacttctgtgtttgtaagcaaactattttgtaagcaaactattaagacaattgaggccatttatacatcaaaaataaagtgaagatttggccatgttccaggtgagttgataaatgtagacagctgaaagatagttcattatataaagtgaactttttccccctggaggaggaggtgctcttgagccagtttctctgtctgcaggattca

SEQ ID NO: 126010 - DNA, 412 bp, Homo sapiens
gtttccgtcggcttctgctgcaygtctgctgaatcagctgggggatctgctcctcaatgtttcttcgctccaagaaacccaggccaataaagcagtttctatctagaacattgccttctccctgcagaggaaaatgagaactcttgaggactgcgcactggtgattaaatacttctcttgcagatcactggccagattaagtccagtgacccagcatagccctagggggcctggcagtgtgatcccatccagttatcagaaggcgagagcatttgaaatatttagtgaagacccctaatgactaccaagtttatggagttttgtagattgtagtgtcttcagcaaatatttagcaaaaaaacagttttgtgccaggtatggtactaaacactgaagataagacatggttctc

SEQ ID NO: 126011 - DNA, 554 bp, Homo sapiens
gtgtgcccttgccatttcagtaacattatatcacatggcgatttttactacaaccactcagatggagagaaagggaacaattccttcagaaggcatgacaggcaaacaactttctcagtatcttctaccataaggagcagcacaaagagagaaataattaatcatcacaatagttaggatcattttcataaagagaagcaactgtagttacagaaagcatatgagagataagttgtcttatattgctaagcacttattgtgcatagaactatgcaaacaaacgggttatgactgtgttctatgtggtagtttctttaaakcaatgagtggttttcaaataacttttagcatctatgccagaaagaatgtattatgttatactgtggtaacaaacaactctaaaatctcagtggcttcagaaagcaaagatgaacttcttgttcatactacctgtctattacaagttgaccaagggctcttctcccctttctccatcaggaatacacgtgaactgaacatcccccaactgtctcccacagcaggaagaaaagaaa

SEQ ID NO: 126012 - DNA, 405 bp, Homo sapiens
ttggttcatgaggtttaaagaagggagctatctccatacataaaagtgcaaggtgaagcarcaatgctgatgtagaagctgcaggaagttatatagaagacctagctaagatcattgatgaaggtgtctacactaaacactgtatttccaatgtaaaagaaacagccttctattggaagaagaagccacctggaatattcaagctagagaggagaagtcagtgtctagcttcaaagttttaaaggacagggtgattctcttattaggggataatacagctgatgactttgagttgaagccacccatttaccattgtgagaatcctaaggcccctcagaattatgttaaatctactctgtttgtattctataaatgcaacagaaaagcttggaagatagcacatct

SEQ ID NO: 126013 - DNA, 405 bp, Homo sapiens
ttggttcatgaggtttaaagaagggagctatctccatacataaaagtgcaaggtgaagcagcaatgctgatgtagaagctgcaggaagttatatagaagacctagctaagatcattgatgaaggtgtctacactaaacactgtatttccaatgtaaaagaaacagccttctattggaagaagaagccacctggaatattcaagctagagaggagaagtcagtgtctagcttcaaagttttaaaggacagggtgattctcttattagggrataatacagctgatgactttgagttgaagccacccatttaccattgtgagaatcctaaggcccctcagaattatgttaaatctactctgtttgtattctataaatgcaacagaaaagcttggaagatagcacatct

SEQ ID NO: 126014 - DNA, 640 bp, Homo sapiens
atatccaatagcttccattcattttgtaaaaaatttaaagttatgcctacagaatagagggtgtctagtgctgttgggttagtgttcagcatgccagaatcttatctcccagcagtacagtgatatgctaagcaaaagtcagttgtatttgtcctcattgtcctctgttgtattttttaatgtaataagattgaatgaaatatcatgtaagctaataaaatgtgagtttttacacttgatcttagccaaaaggctgagaaacgataaaacttgaggttttataaagacatttgtatttatatgataaagttcatacaactatctcaatacaaatatttaatacaactgtatcaagaccagtaattaaagtcaacttggtaaaagacacttgtcaaattagtcatgataaagaccacrgtaaaagattggaggaaaattataaaaaactaaaaggcttaaacattcaaattccctccaagtgcctttatagcttgcttcactttaaagaaccttaaaattgtagaggttatgggtacaatcactcaagagagttggctgatattcggccatcagaaaaggaaaccctgcaatatgcaacagcatggatgaaccttgaggatattaagctaagtgaaataag

SEQ ID NO: 126015 - DNA, 520 bp, Homo sapiens
tgaatttgaaactatgccatatttgaaagtcagagctctggtataakggttacaactctgtcaggtaaaagtgcttctttttaaaaataaaataatttttgtatttatccccatcacaagaagaaaaaataatattattagactacattgattttttaaattgcagttaccaaaaacagctgtgtattcatttatatacataaatttgtatttcataaatttatattttactaatcctaaagctattttcatacacttgttttaaaaaagataatatttcgagaaactacattttttccagtatacaaattcttgtgcccacatggatttatgaatcccttccaaaaaaaatttctaacatcccacaatgatccacaggatggaaaccactattcgaaaatattacaactaaaagggacatttaaggttaatataaaccaccttaatacctactgaacatgtcccagcttcagtttgaatcctaggcacgtgttgtctgtttgaacatactcaaagacct

SEQ ID NO: 126016 - DNA, 595 bp, Homo sapiens
ttgtctatgatgcaccttgatattttctttgtgtttgtcctgttgagatccttgggaaaaaaaaatggcaattatttcttaaataatttttcttccctcctttttctgggtctctaattatatagatattatactatttcatattttctcaaggtaattgaggctctgtttattttttgtcttatgtttcttttatctacatgtcttcagttggttagttgcaagtttgctaatcttttgttctgttgttaagtccatcagatgaatattgtatttcagatacttcattattcawctctagaatttccatttggttatttcttgactcattgtgtttatattattctttagatacttcgaaatatttataatagcaattttagagttcttgtcatctaattacatcatctctataacttttggattcatttctactgactgattattattccagatatgggtgacatttttctgtttctttgcatatctagtattttttattggatattggacattgtaagttttacattattaaatatctagattttgctgtcttcctttaaagaatgtgacagcttgttctgttcgacattta

SEQ ID NO: 126017 - DNA, 586 bp, Homo sapiens
actattttttttatgtgagccattcaaccaagcacctcactctcagaaacgtgttcagttgtggctaccatgaacgcttccttcagctgctgatggtaagaggaacatgcctggcaaggacagtacggccatggtgctgagctcctcatacctgtgtgttgccttagatttctcttaccacacaggcaggtctatgctaaaaaagtataatttatatattctgaaccaccattaataggtagcaattgatatttactaagtgcaaatcatycattgaggtttaaaacttaaagcagaaaacttctaatagatttactttcaatgatttaagtctaatgtcagtagagtagagagtagagagcattctgaattgtattcactttaacaaaagatggctggaaaggctaaaacccatctaaaattcatgtgagtgatctggcatccctacatgggaaaggcccaggctggagtgcagtggcaattcacaggaatgatcaacgcacacagcagccttgaactcctggcctcaagggatccttctgcctcagcctcctgagtagctgagactacaagcgtgtgccactgc

SEQ ID NO: 126018 - DNA, 567 bp, Homo sapiens
  misc_feature (1)...(567): n = A,T,C or G
attatgataatgctgtatttacccaaacgatgttttttttagtcattgttctctttgaggaataaagaggtaagagaaaaaaactaacataaaacatcatgttgggatttaagatatggattcaggccrggcgcagtggctcatgcctgtaatccgagcactttgggaggctgaggcaggtagatcacctgaggtcaggagttcaagaccagcctggccaacatggcgaaaccccatctttactaaaaatacaaaaattagttgggcatggtggcgtgcgcctgtagtcccagctactcgggaggctgaggcaggagaattgcttgaacttggcaggcagaggttgcagtgagccaagatcaggccactgcactccagcctgggcaataagagcaaaactccatctcaaaaaaaaaaaaaaaaggatttggattcagacacgcataataataatagctaatctttactatggcaggcatgacacaaccaggcttacatgtgtatgacacacatgcatgttacaggcatatgtgaatcacaaaggtgtctcctttaacccnnnnnnnn

SEQ ID NO: 126019 - DNA, 567 bp, Homo sapiens
  misc_feature (1)...(567): n = A,T,C or G
attatgataatgctgtatttacccaaacgatgttttttttagtcattgttctctttgaggaataaagaggtaagagaaaaaaactaacataaaacatcatgttgggatttaagatatggattcaggccgggcgcagtggctcatgcctgtaatccgagcactttgggaggctgaggcaggtagatcacctgaggtcaggagttcaagaccagcctggccaacatggcgaaaccccatctttactaaaaatacaaaaattagttgggcatggtggcgtgcgcctgtagtcccagctactcgggaggctgaggcaggagaattgcttgaacttggcaggcagaggttgcagtgagccragatcaggccactgcactccagcctgggcaataagagcaaaactccatctcaaaaaaaaaaaaaaaaggatttggattcagacacgcataataataatagctaatctttactatggcaggcatgacacaaccaggcttacatgtgtatgacacacatgcatgttacaggcatatgtgaatcacaaaggtgtctcctttaacccnnnnnnnn

SEQ ID NO: 126020 - DNA, 617 bp, Homo sapiens
attaccctcatgctgttcttgtgatggtgagtgagctctcacaagatctaatgggtatataagaggcttttccctttttgctcattcttcttttctctgctgccctgtaaagaagaacgttcctgcttccccttccaccatgattgtaagtttcctgaggcctcctcagccaccctgaactgtgagtcaattaaacctctttcctttataaattacccagtctagggtaactttattagcagtgtgagaacaaatgaatacaccaccccctcatccattaacatacaaagcaaaattaacaaacaaacaaacaaacaaacgttaaaatgatgccagatgggagtaaactcattctccaagagaatgatactcccaagtattgtcttgtagcacagcctgaagcatgctctctaagcatgaaatacctttgcagtctcttgttttatcttaaaatctaatgagattctatttactcttcagtcataacaaaatgtccttatatgtccttttgctaactttsttaacccctttttagaataggtaagttatattatcaatgatcttacaaataaaattaatggattatgtctttaatggaactaatattaatgactact

SEQ ID NO: 126021 - DNA, 515 bp, Homo sapiens
agtctggtctgcaactctgctgctcagtaaaacaggcaaatactgtatatatactattgttttgccatcaggaggaatagaatgatagtgaagagcacaaattctgttatcaggtagacctaaggttaaattctgacactmgttctgtgaccacagggaaactatgtaatttatctgggtctcagtttctttgtatacataagatggacaattcataactcataaagttagtatgaagattatattagatagttacataaagctttgaagcacaatgtctcgtatataataagccctcaatactgctagctgatttgatgcttttacaacagaaaatagcacagtgaaacatatatgtgtgcttcatggaatgcataaaatcgagaacacattacattctttctggatggggtataaaatgtttgtaattatatgaaatttgatttgaagacagaatagtaatattccaacatatatcacactaaaataaatagaacagtatttatttttgaatt

SEQ ID NO: 126022 - DNA, 608 bp, Homo sapiens
ccttacctaaattaccactttgatctgtcaaactgagtaagagtttaatgggtgccaggtgataaaagatgttctaacacaatttgcctcatgttggaagcagtagaattttagaagcactctgattatttctccaactgctggcattacattggaattcaagtggccaaattccatattacctcccaccctattgcacaagggttgttttaattgaatgttctacatgaaaagtattggaactccaatttactatggaaataataaataaaaattaaatkctgcaccctggagatattataagtatttgtacttccacaaaaaattcaaagatgtatgtgaggttattcctatcacatagtcatatatttatttttaaacttttaagtagaaaatactgatacataagtagaatatgataaattaatgaaaataatattgaccactcacatttcatttgctgatctaaatttaattaactactggcactgggtttgagtctattgatgttaataaatgtttatcttttgggggaaaagggactaccaaagtttttgcatagtaaaaacatcagtacatattttcttattcttttattattatgataa

SEQ ID NO: 126023 - DNA, 527 bp, Homo sapiens
gtgagttgaacaggcaaggagaaacacgctctctccaagagtctctggaaccccagcaggaggagactctatgaccaaagagacagttgaagtkgcgggaagagctgctaagagaagtggtggggtggtgagccagctgatgcggagcccagagggtttggtacaaaggcatctgtagaggagcacagccaggtgtggccatccctctatgctcaacttactcctgtaagagacattagccctaggggaactatcagatctgatcgctgcaggatggccttgcacttcaaggggggctggtctgacctgagcacctcttggtctgctgccctctctcagggccccaacctggccatatctgcctacaaggcagtcttgggtatcctaggggcctacaccatagcttctgccctggaagagtatgtctgaccgatggagaactcccgcaaggtgactactacaactgcacaccagcctgcacattccctccccatactgaagcttcctctaagcccacagcaactccc

SEQ ID NO: 126024 - DNA, 545 bp, Homo sapiens
ctatatccatccggttgttactcctacataaatgttagcctgctacatgagtgtcctgagactttgatgacatttaaatcagcagctgctccagcctcctaccttcaagccaactagcagttcatttcccaaaagagggcatgctttaagggctaatgtctcagccgacactgggctgctactacaaaatgcagagcagggaggcacgcrgggccaggtgtccacaacaaatagaaggtgtcctgagcctcaaaaaccggccgtctccccatggaggtcagcacaggcttattcatcaactctgctcttgtaaacacaggcatcactgggtataaaacatgccatcaactgagtggggagcattttttctataacccctgttgccaggtcatataacctattgccaggttagatgaccatcacaaggatgatcagccaggacagaggggtgacctggtgacctgggtcatggtactctgcagggctccctagctgtctggccagtcattggcagctctgcagaacatcaagcaagttacagggtg

SEQ ID NO: 126025 - DNA, 524 bp, Homo sapiens
agaattcatggggaaatttattacagatccatttcttatgtaagttgtgtcctcctgtgatgagctcagtggaaggagcaaggccaagaaaggttatttgggccaaatatcattatcgtttcccctttgagaaataagatattcttcatctagatattcttctagtcccaggaagaggaaggagggcaggaaaaaaaaaccctcaaactttctacaaggacarttctttgcctttaggagaagtctatctatttctcaattcttcctgcaaactgggcgaaactgaagaacagtagggataaacagaggctgaaaaaactcacaggttggcaaataccacagtcctgaggggtaagagggtcttcagaatctcaggttctttatcttccatggtaaactcttgcagagtgcgagtccttttataccacaaagactctgagaccacagacatcacaagtaacaagacagcactgtggaatgtcaaagcatggactgggaagctaaatggactcatagcctaattc

SEQ ID NO: 126026 - DNA, 495 bp, Homo sapiens
caaaagtgaggtcgtaatataatagtgcctgctccgatggctgttatgaaaattaaatgagttcctagcccataataagtgctgtgttaatgttggctttcatcattactatgaaaattattctcatttaaatgcaatgcgcaggtaaagggtataaaaggagaatcatatgcttgccccaaaatgtttttaaaagaattaaaagataatgaagccaggcgtggtgcgtcgcgcyggtaatcccagcactttgggaagacaaggaaagcagatcacgaggtcaagagatccagaccatcctggccaacatagtgaaatcctgtctctactgaaaatacaaaaaatagcagggcatggtggcacatgcctgtagtcccagctacttcggaggctgaggcaggaggatcacttgaacccgggaggcagaggttgcagtgagccaaatcacatcactgaacttcagcctggcgacagagtgagactctgtctaaaaaa

SEQ ID NO: 126027 - DNA, 610 bp, Homo sapiens
atcccatcaccctgatagtgaacacagtcactgataggtagttttttaacccccacctcgtctttgcaccctctagtagtccacaatgtctattgtttccatatttatttccgtgtgtgctcaatacttaggtcctacttataagtgagaacatgtggtgtttgattttctgttactgcattaatttgcttaagattatggcctccagctccatccgtgttgctataaagaacatgatttcatttttatggctgcattgtattccatgacatacatgtgccacattttctttgtccaatctaccattgatgggcacctagattgattgcatgtctttgttattatgaatagcacagttgcaaacattcaacttcatgtgtcttgtgtctttttggtagaataatttgttttcataacatttaaaataattgtttatgttcttctttgatgttatatcaaaatttgaaaagcagcaatttcttttttgtttgttttcgcttttaagttcaggggtacaagtgcaggtttgttacataggtaaacttgtgtcatggaggtttkctgtacagattatttcatcacccaggtattaagcctagtacccattagt

SEQ ID NO: 126028 - DNA, 428 bp, Homo sapiens
gaattcggtagtaaatttagaggagtggtactacagagattgaccgccctgccccctactgtggaggtagacaagcattgtactgagacagaagaagcgactgggacccatctgggttggctgtaggtaaatttgcctgtgctgggggctgtattgggaccgcttgaagcagaaacacaatattggtctgagtctgaggtgtcccatttgatactggggcctgggactggycctgcttcccatttccctggttctgtggcaagggattgccatctatatcagacttagagtggcaagtacttgcccagtgtttacctttacgacaatgagggcaaacagtagcaggagcatttggccatgtttgttgagctggcttggccgcttttaacagtgcaatttttttgggtatgatgaagttgaccacaatt

SEQ ID NO: 126029 - DNA, 564 bp, Homo sapiens
cagtcctatgagaaaaaaatcctgggaaagacagatgacaggagaaagcagcaaggtagggaatgagcartttgcaagggagaagtttaaaaagcccaggtctgcaggtgaaatgtatttcacatgaattccagatggacagatcacataggcaaatcacgtttcaattttttttaattattatgtttgttagtgaaaatccactcaacagttatgcaaaacctggaccttactggcccagaaagcagggaaggccactgagaggaacagatcctttccacaagagaggtggatccccagttctcaatcagctcccagctctaactctaatataggccaagaaaagaatgccgtaacaacggctgccttcaggcaagtggcagatgcaggggggtggctggggacacatccaaggcacagaggcacaatagtgatggctttatacaagtaccatcagtaagggcttaaaagaaaacttgaaacaggtgcattagatttggtggagcagttccccaaaagtatcagggaaattcatttgtattcattgttgaaggttgagcaact

SEQ ID NO: 126030 - DNA, 617 bp, Homo sapiens
atgctgtgtgtttttttttttcttatacatacatacctatgggattgcttaagttagaatttggctccgtaagagactaataacaataataaaaatttataacaatagcctataataaaagttatatgaatgtggtctctctctcaatatcttgttgtactatcctcgcccttcttgtgatgacatgagaatataaatacttacatgatgagataaagtgaggtaaattacatagagaggcattgtgatgtagcatttaaagcttatttctggaattgtttatttctggaatttttcatttactattttcagaccatgattgactatgagtaactgaaaacacagaaarcaaaactgaggataagtggggactactgtaactacttactgaaagaaggttgggtgaattaacacctgtgtattatgttaatatatgcaattttaaaaaattcataatgcttttgtgtgtgtatttggtatctctagattattgaacaatggcttggcattagtaaaaatttactagatatttagtgaaaaaactacggaaatatagatctcagatcaatgagatatggattcaatagtttcatggggaaaatttttaaaaacaataa

SEQ ID NO: 126031 - DNA, 577 bp, Homo sapiens
gagaatttctgatctagtctaactgccctaatccaaaacatcttaatctcagtcctagttaattattattttcctcactgattttactccttccattcttgttactctagaatcaattctacttcaaataccaggggyctctttagaatatgtaagtactgtctcactcactctcttgctaaaaatcttctgatgctttcccagtacactgactcaagtccacattccaaaccatagtccaaatgtcacacatctagtttcttccagtttctctgacctgaccaattacgcttttctttacctactctcctggctttctttgtatgcctctgtcataaatttgatattgtctatggcctttgtttggctttggtccttagtgctggctggaattctctcctccaaacgcttctccctaccagatacttgtatggcttccttcaaacccaccaggtttcaactcaaacaccacctcccaacattatccttgattacccaaactaaagcagctctttcttccccaggtccctgtgtcatgtcacagaattggcttcagaattgttcccaccacctgaaa

SEQ ID NO: 126032 - DNA, 576 bp, Homo sapiens
ctgcaggatatgaccattgtcatcttccataagcttatcaatccaattgattagttatagccctattagggcacataattgtgtctagtagtgttttcatagttactctagtaagtagtcatccagatttcttctgcaagttgtggaatttaacactgttttgttaatgattagtgaaagtattattttcatgtgagaaggataaaatattccaatttgaaaatgtatccaagtagaatttatagtaacattataactttctctttcttttgtcctattaggcagttaagttcaagtaaccacagggcttttgctcttaaagagatctggctcagaatgaataccaggttgaagaggctgagacagagcagacttgctgaaggatttgggggatatttaggaataatgttaaaaataaaaaaagccttagttgttggtgaagccagagagacaggagaagaaacatgctggttgtgccgggagtttagctattctgtctcatayaatcctcacatctttcagaagataaaagggatactcaagcagttaagtaacttgcctggggtaaacggttgt

SEQ ID NO: 126033 - DNA, 591 bp, Homo sapiens
ggtggcttgcaaaccaaaaataaaattctaagcgcccccaccaaccatctgagtggactttctcctcagccaggattcttttaaaatttaacctgagagactggtgtaggccatgatgggaagcaggggttggacatacctcactgtacctctccaacatcaacgcagacctttaagtctgataagaagcatttacaatctattctccctgaagcctgctacctggaggcttcatctgcatgactaaactttagtctccacaacctcttatcgcaacccagacatttttctttctattgatgccaggcctttagataaactcaatcaattgtcaacccaaatatttgaaatctacctatatcgaaaagcccccacttcaagttctcttgcctttttggaccaaaccaatgttatttcttaaatgtatttgattgaagcctcatgactccctaaaawgtagaaaacaaggctgcaccctgaccacgttgggcacatgttctcaggatctcctgagggctgtgtcatgagccatggtcactcatatttggctcagaataaatctcatcaaatattttacagaacttgactctt

SEQ ID NO: 126034 - DNA, 607 bp, Homo sapiens
ggaaaggcagcaacagcagaaagctgactgtggtgttttattgctgctttagacctcatttttaagatagaacaaaccatcctcttggattrcttatttattcatcgcctttcttgccctctggtgtgtaagttccacataggtactattccatcacctagaaagtatctgtcagctttttgcaatgaatgaaggaataaaatatctttattgtaaacatcgtgatcacagattgtacatatattaacctaatatatatatggaatttttgtccaaatcatccaaaattttactcatcagatggtggatacgtgtcaaaacactaatagcaagattgcagtaagtttagccattacttcttgtacagaatccaacagttcagtaagttcttatttaacgccttaacaaggaagagatactgtctcagaccttaagaaatttgaaacacttggaagataaagacaatatttaaacatgtgaaacaaataaggtgcaagattctcctgtgtgcctactctgagagagaatgttccctaccttggcttcaaaagtgaagacactgtatatcagttctatggaaatggcagatctccccagcgtaaaacgc

SEQ ID NO: 126035 - DNA, 561 bp, Homo sapiens
aaaacaggccgggcggtggttcacacctgtaatcccagcactttgggaggctgaggtgggtggatcacttgaggtcaggacttcctaaccagcctggccaacatggtgaaaccctgtctctactaaaaatacaaaaattagcagggcatggtggctgtgcacctgtaatcccagctccttgggaggctaaggcaagagaatcccttgaacctgggaggcggaggtttcagtgagccaagatcacaccattgcactccagcctgggcgacagagcgagactccatctgaaaaaacaaacaaacaaacaaaacaacaacaacaacaacaacaacaacccataaaacagsatggaaagctcctttaataaagccagcacagctttcatagttcaatcaggtacagaggatgcaaagaaaagggtatcatagactaatttcacttgcacatgcattcagcaaatgtttattgagcacctactaagaatgtctgttactgttctaggggcagggaatatagcagggaacaaaacaggttaagtccctgttctcttgagattactta

SEQ ID NO: 126036 - DNA, 566 bp, Homo sapiens
actttttggtagcctcactgttatcttcattagtgggtaaaattttgtctggttgaactattgtctgaagaatgtcttttgtagctattgaaaggtggtgccttcatgttcctttaccatctggaaataactgaatgagaggttctgtgtcarcaattggcttggtactggccttccataggtgtttcaattctgtttaattaaagcaagtcaaagagaagcattgcttttggttagaatgctctttagcatatacagatgaaatgattaggttcttatgtgcaatagaacagttcagagatttttgatggtgaaattgaaagcatttattcacgtttattttattatttatagagtgactcaagccatcctcctgcctcagccttcctaatagctgagattataggtgcatgccaccgtgcctggctaaatttctttttttatttttagagacaggggtctcactatgttgcccaggttggccttgaacacctgacctcaagcagtccttccaccttggcctcccaaagtgctgggattacaggcatgagccactgtgtctgtcc

SEQ ID NO: 126037 - DNA, 527 bp, Homo sapiens
cagaaaaactaaggtttcagacttgtgtattttatagacatttccttgaaaatgagtgaaataaacctgtcacttcatgaaaaacagttttcagtatttattgccaatgttaaaatttgaacttccaagtgaaaattagtattttggaaaactgtatctgccactgtgaaattggatagcttcccaatacttaaaagactttttgagtaagattggtagtgatattaatgaatgtgtgtttttttttttaaggattgtagaatgaaatgtatcartgttaggaagatttgcataactcagtgaaccaattattttccaatagatgatgttatgaaatcatgcttggataacagccattcaaagtgcatgttaaacccatgttttttaatggattttaatgtaacagagtatgaaaagtttttagatagggttttagattccaattgcaactcatctttttttaggggggtggggtggggtggggtttagattccaattgcaactaatttttttttttttttttgaga

SEQ ID NO: 126038 - DNA, 527 bp, Homo sapiens
cagaaaaactaaggtttcagacttgtgtattttatagacatttccttgaaaatgagtgaaataaacctgtcacttcatgaaaaacagttttcagtatttattgccaatgttaaaatttgaacttccaagtgaaaattagtattttggaaaactgtatctgccactgtgaaattggatagcttcccaatacttaaaagactttttgagtaagattggtagtgatattaatgaatgtgtgtttttttttttaaggattgtagaatgaaatgtatcagtgttaggaagatttgcataactcagtgaaccaattattttccaatagatgatgttatgaaatcatgcttggataacagccattcaaagtgcatgttaaacccatgttttttaatggattttaatgtaacagagtatgaaaagtttttagatagggttttagattccaattgcaactcatctttttttrggggggtggggtggggtggggtttagattccaattgcaactaatttttttttttttttttgaga

SEQ ID NO: 126039 - DNA, 490 bp, Homo sapiens
tgtgtgtcctgaaggaaggtgctctagaggctgaggtgggaggatcacttgagtctgggaggttgaagctacagtgagctatgattgtgcctttgcactccagcctgggtgatagagcaattccctgtctcaaaaaaaaagaaaaaagatacacaaactagtacctacagggaagagagctagagacttatgtttgtatcttttaaaatttgtaatatgttaatgccctactctaatcaaacaattgataaacaaataaatagaaaatttaaatgtaagcaagacgcaggattggcatagtggatgtgraacctatacacttgcaaagggccctgctctgggcttaatgctttgatgttgccatcttgaaattcttaatgacttttgaacaaggcatccttcactttcatcttgcattggatcctgtaaattatttagccagttctggtgagacccttggtttacaggtgctgtcctgatttaaaaggag

SEQ ID NO: 126040 - DNA, 641 bp, Homo sapiens
aaaattagacaatacttacttcgtagcttatacacrcaggcattttgttcttatcggaacagtggaaatgctacataattcaaaaaaatacacaattctttttattttatttcttgatatgtgcacattctaacaacactttctacctttggtttattgatgagaatggaaggagtgaaaggtaaaacaactccaggttgccctatctttccctttcattctttgaatggaatgggatgaatcctttcaatgaaagtgattagctaatatagggacgtaacataagaaagatacaatagatagagttccttggctgtttgtttcttagaaacaccactgccttctttctatatgagaagcaagatctggatcaaatggaaagtgatgtcttcttagggttgtcggtcattgatgtcatacacttaccttgtacttgctttgcatctcactgaagtcccactcattgtgggtacactagaaatactgggatcatgtgatattgcaaatgtggacatgcatattgcaagtatctcctcagctcatgcacagactcttatccaattagacttcatgtaccaaacacaagttcgaagatagaactattacaagtttcaagatggcaacaacaaagcattaaacca

SEQ ID NO: 126041 - DNA, 641 bp, Homo sapiens
aaaattagacaatacttacttcgtagcttatacacgcaggcattttgttcttatcggaacagtggaaatgctacataattcaaaaaaatacacaattctttttattttatttcttgatatgtgcacattctaacaacactttctacctttggtttattgatgagaatggaaggagtgaaaggtaaaacaactccaggttgccctatctttccctttcmttctttgaatggaatgggatgaatcctttcaatgaaagtgattagctaatatagggacgtaacataagaaagatacaatagatagagttccttggctgtttgtttcttagaaacaccactgccttctttctatatgagaagcaagatctggatcaaatggaaagtgatgtcttcttagggttgtcggtcattgatgtcatacacttaccttgtacttgctttgcatctcactgaagtcccactcattgtgggtacactagaaatactgggatcatgtgatattgcaaatgtggacatgcatattgcaagtatctcctcagctcatgcacagactcttatccaattagacttcatgtaccaaacacaagttcgaagatagaactattacaagtttcaagatggcaacaacaaagcattaaacca

SEQ ID NO: 126042 - DNA, 372 bp, Homo sapiens
gtgtgcctgggcgcatacaagacactggatatgtgttaaaagaatgaatgaatgaatgaatgaatgaatgaatgactcaaatattatctcaaacttcactgggtactttgagtttttacaataaagttctcattcactcttcccagtcacggtaggcagttcctctcctcagtggatggctgccattawctagaaaatgggcaggtgctatcaatcaatctgggtacaatttaatttaggttaaccgggattacctactacatgatttttgaaggttcattgcaaataatgcagttatccaaggcaaaacactaaatatttctaggcccatttgattccttaaaatttttgcctctcggtaactaatgttca

SEQ ID NO: 126043 - DNA, 608 bp, Homo sapiens
cccttgagaactgaaagaaaacaaggtggcccactcacatcacacctattctgcacagtcctggaagtcgtagccaaagcaattaagcaagagaaagaaataaaaggcattcaaayaagaagacaggaagtcaaactatctctctttgcagatgatatgattttacacctagaaaaccccatagtctctgcccaatagctcattgatctgatatacaacttcagcaaaatttcaggatacaaaatcattccacaaaaatctgtagcatttctacataccaacaacatccaaggtgagaggcaaatcaagattgcaatcacatttacaatactcacaccaaaaattacctaggaatacagctaaccagggaggtgaaagatctctataacaagaattaaaaacgctgctgaaaaaaatcagagaggacacaaatatgaaaacattccatgctaatggataggaagaatcacctttgttagaatggccatactgcccaaggcaatttacagattaattactatttctatcaagcttccaaaggcattcttcagggaactaggaaaaactattctaaaattcatatggaaccaaaaaagagcccaaggcaa

SEQ ID NO: 126044 - DNA, 608 bp, Homo sapiens
cccttgagaactgaaagaaaacaaggtggcccactcacatcacacctattctgcacagtcctggaagtcgtagccaaagcaattaagcaagagaaagaaataaaaggcattcaaacargaagacaggaagtcaaactatctctctttgcagatgatatgattttacacctagaaaaccccatagtctctgcccaatagctcattgatctgatatacaacttcagcaaaatttcaggatacaaaatcattccacaaaaatctgtagcatttctacataccaacaacatccaaggtgagaggcaaatcaagattgcaatcacatttacaatactcacaccaaaaattacctaggaatacagctaaccagggaggtgaaagatctctataacaagaattaaaaacgctgctgaaaaaaatcagagaggacacaaatatgaaaacattccatgctaatggataggaagaatcacctttgttagaatggccatactgcccaaggcaatttacagattaattactatttctatcaagcttccaaaggcattcttcagggaactaggaaaaactattctaaaattcatatggaaccaaaaaagagcccaaggcaa

SEQ ID NO: 126045 - DNA, 608 bp, Homo sapiens
cccttgagaactgaaagaaaacaaggtggcccactcacatcacacctattctgcacagtcctggaagtcgtagccaaagcaattaagcaagagaaagaaataaaaggcattcaaacaagaagacaggaagtcaaactatctctctttgcagatgatatgattttacacctagaaaaccccatagtctctgcccaatagctcattgatctgatatacaacttcagcaaaatttcaggatacaaaatcattccacaaaaatctgtagcatttctacataccaacaacatccaaggtgagaggcaaatcaagattgcaatcacatttacaatactcacaccaaaaattacctaggaatacagctaaccagggaggtgaaagatctctataacaagaattaaaaacgytgctgaaaaaaatcagagaggacacaaatatgaaaacattccatgctaatggataggaagaatcacctttgttagaatggccatactgcccaaggcaatttacagattaattactatttctatcaagcttccaaaggcattcttcagggaactaggaaaaactattctaaaattcatatggaaccaaaaaagagcccaaggcaa

SEQ ID NO: 126046 - DNA, 640 bp, Homo sapiens
ggatacctattataggcgatgatactttaaacaaacaaagcaagaggaagtcttagaagtgagaaacctttgccataaatgattgaagatcctgaccaaaacacacaacttatatttgaagaccaaaatttygaaatgatttttataagctgttaatcttgatataattatatatatacatatacgtgtgtgtgtgttaaacatactcaaataggtgataaatttaaactttttaactctaattttgaaataattacctttactaacaaataatgggtaaatatattatctttaatttaccaacttaataacctgcacactttttaaatcagacaacatatattcattatcaagtgtacatattctcttttccctgtacatattcctcttgagggatgatatatccgaaatagtgcctcactgtggaaatagtttctgccttctgaaacacaacttgaggatataacagaatttccagcagggaggtatagtttgaaaagattccagaaacgattctgataccacactcactgttgcgaatcaatgacaatatgtcacttccatttgagaaattaaatagtaaatgatgtttattactccctagattttaatgtaaagtttaatagttcagtttagtttt

SEQ ID NO: 126047 - DNA, 686 bp, Homo sapiens
taatttgtgattataatatcacaaaggactgaggaagggagacacataagagcaatatggttgtgtaatgttctaattatggtagtattaatctgaactagacttttataaattgttacatccagagaaaccactaaaaaagcgattcaaaaagagtatagataacatccagtatgaatagatatcaackttttttcaggtaagaatatattgttaaaattctgtatttgcttttaatatatcaggcattggtgattcgaaatgatttctttttttgagatggggtctctgttgctcgggctggaatgcagtagtgtgatcataactcactgcaaccttgaactccagggctcaggcaatcattctacccaagccaccaaagtagctaggaccacaggtgcatgccaccacacctagctaattttttattttttgtagatacagggtctagttgtgttgcccaggctggtctctggctcctgggctcaaataatcctcccatctcagcctcccaaagtgctgggattatacatgtgagccaccacgtctgagctcaaagtgaattctgactattatggagttattaatgcttgttctaaaatattctgttctctctttgattaggattatacttatccactccctttgaatccagaagtcatgtgtcttaatttgaccaataaact

SEQ ID NO: 126048 - DNA, 686 bp, Homo sapiens
taatttgtgattataatatcacaaaggactgaggaagggagacacataagagcaatatggttgtgtaatgttctaattatggtagtattaatctgaactagacttttataaattgttacatccagagaaaccactaaaaaagcgattcaaaaagagtatagataacatccagtatgaatagatatcaactttttttcaggtaagaatatattgttaaaattctgtatttgcttttaatatatcaggcattggtgattcgaaatgatttctttttttgagatggggtctctgttgctcgggctggaatgcagtagtgtgatcataactcactgcaaccttgaactccagggctcaggcaatcattctacccaagccaccaaagtagctaggaccacaggtgcatgccaccacacctagctaattttttattttttgtagatacagkgtctagttgtgttgcccaggctggtctctggctcctgggctcaaataatcctcccatctcagcctcccaaagtgctgggattatacatgtgagccaccacgtctgagctcaaagtgaattctgactattatggagttattaatgcttgttctaaaatattctgttctctctttgattaggattatacttatccactccctttgaatccagaagtcatgtgtcttaatttgaccaataaact

SEQ ID NO: 126049 - DNA, 552 bp, Homo sapiens
ggtcatatatttttactgttaagaattactgatatgtcccagatgtaaagatcatagtttttatgtccttgagagcaaagcccagttggtaaatgataagaaagttcattataagttcattagtcaatctgagtaagtatttgagtaagtatcagggcaggtgtgtgtccttatttgaagataagattaccaaagagtggcagtttacactgtctgagcaggcacataatctacatgtatccaacaaaagcagaaacsctttctgtcaataaagttaatttgataagtttaggagtcaaaatctggaagtccaaaaagatgcatagtgaggagaatcatcaagcatgcatgaggaaaccaactgggatggcattacaggaaaatgatgtagttacttggaagcaagccaccttcgtggtttgcattctttggaaatatgttctatctaattgctgaactttgcaaaaaaatgagtgatttgacttgctgattccaagttaattacttggccattgaaagtttttatagaagagcattcatggaatttgtgtg

SEQ ID NO: 126050 - DNA, 581 bp, Homo sapiens
cctgtcatcattagtggctcagggcattagattttaattagaacaatagcctctgcaaaaatgtacagtgattgggcccagtttgctaatgtgccttcatcagcaacaccaaagtgacctgcaagggaaagttgaaacaaaaaacaaacatctagtaaatataatttatcattccttatctagtctattcctttgttggaataaggcgtttgtcatcatcatcattatatttgtatgtttggaatgctgtcacaaaatagtataaactgggtggcttaagcaacattaatttattttctcatggttccaaagtggcttaagcaacattaatttatttcctcatggcacctaaagcaaggtgccagctgatttggtttctcctgtcctggcttgcagatgaccactttcttactatgtcctcacrttgcctatcctcagtgtgtgcatgtggaaggagagagagcagaagctctctggtgtctcttcttataaggccaccaatcttattagagccagggtcccacccttatgagcttatttaaccctaatcacttccttagaggccccatctgtaaatacag

SEQ ID NO: 126051 - DNA, 571 bp, Homo sapiens
ttaggaaagcctgcaaactgagaagacggtagactagtatcttcaaataccatcttaaggcagtacaaatttcaggctctttttatgttaagggcaggcagaagaggaggggggtcaggataaataggtgaccatcaatagcagacaactgggcaccagcacaggaccaaggaatttgaaaaattctttgttctttgtcaggtcacaatgctcctatgaatctttaaggtaacctagttagttgtttacattcttctcctttaatcccagagttagttttaaaaattacatgattgctgtttttgcacattatctctgctctaaaatcatcccaacctacgtgcaagaatgggtgtaggccccgtaaacaaaatggagttagttatgttaggtattttgctgtctcactgctacaattgcaacacaaaatgaatgcttttaaagggctgcttgccaaggaagatctggctttaactacagaytcagccacattgcttagtatggttgtctttggctgtctatggttggcattacaatagatgatattttccagtcatagtaatagaaggtt

SEQ ID NO: 126052 - DNA, 573 bp, Homo sapiens
tatgactttcacacaatgcatatttagaaagaagtcagaaggaactttattccaattaatattctataataacagtatgagattatttatttctcagttccacagaacatagcttcatggttgtgtcccttatccctaacatgattcttggatacgttattttaaaatatttgttaaatgaatagtagtagtcttttgctgtaagcactggctatatgttgacttgtatcttyccaaaattcattctgttgtaatcctaacttttaatacctcataatatgatgctaaagataggatcttcatagagattatcaagtgaaagtgaatttattaggttgagctctactccagtataactgtggccttatgagaagaggacattaggatacagagagaagcacacagagggaaagccatcggaacatgaagatagccaacttcaggctaaggagaaaggcctagaacagaccctctcttcacaggcctcgcaaggaaccaactctgcagacaccgcaatttcaaagttgtagcctccagaactgtgagacaatgaatttttgttgagttagcctc

SEQ ID NO: 126053 - DNA, 647 bp, Homo sapiens
ctacaacttcttaacttcttatttgtataataagaagcctttcttaaagcctaagcaagttagtttcctgttatttgtggctcaaagcatatcaactgacataattagaataattaaatttaaagcttgaaaggattcaaaattcatagtgcacatccttcttgttttgtagtagaacacatggaagacttgagaaaataaatgactgaggtgggaggtcaaacgattaattataagcagaatyaggcttcctaagttccacaaatattctgccttctcatctttaatacatttcagatttcttagaagatcattatacaaataaaaccatccagaagagtatgtgacatgtaataaatactgaataatacctgactgaaaatatggactcttatttccagctttgcccaactagtgaacagttttgatattaaccatccaattatgacagtgagaaaatatatgctacttacaactcactgagtcatacatgtatggatttataggttttcctacatgctttcctctatgacgtttacacatttttttaaacgataatcagatgctatgtcccttcatctactaattataacttaatgggaggtagctcttaattttccactgatgggtaactaaagttttgatgg

SEQ ID NO: 126054 - DNA, 433 bp, Homo sapiens
tacagaagattgtaagtatagatrcatgtagatattaatgccttgatataaatctattactgatatatacacacatatattatatatatatttagaaaaaacttgttaacattaaaatgttttaccaatattattagtgctaataagcaaccaccatatgacagattccatattaaatggtaaaaatatgagcataaataaggacaagtctcatatatggttctcgaccttaaaaaaattaaaatctaaatgaatataaaccatatgcaggagagctaggaagaaacacatggtgaatgtgactcagagtgaggatgggtaaagaactcttatttgtatggacttgagagagaaggtctgtgtggtggataaaatctgcagagatttatatgagggtagaaactgtacacttaaaacattcagttaccaaatt

SEQ ID NO: 126055 - DNA, 597 bp, Homo sapiens
ctaagaaagctcaaataaacacaaattcacacacacacacacacacacacacacacacacacacatcaggaaaaagtccaaggcatataataagcaaattgctaaaaatgaaacataatgagaaaaatgtgaaagaagctcaagaaaaaaaggcttattatatcaaagagaacaatgataggaattttttctgacttttctcacaaaaaatgcaagacaaaggacaatgaaacaaaatctttcaagagttgaaagtgtaaagaaaaacactgctgtccaatattttttatccagctaaaatgaagttgaaataaagatatttgctgagcaatgtaatacaatttgtcatcagcagatatgcacttcaaagaatgataaagaaaattcttcaagttaaatgaaaatgatactagatagaaaattcattccaagtgaaggaagaagaaagctggaaatgatcaataataaaagtgactaatagaagataaatagcaagartacagacctaaacccaaatttattcacaattgcattaaagaaaagagactaaaaatgtaagctaatcattcaattaaagggcaaagattgccagagtgt

SEQ ID NO: 126056 - DNA, 579 bp, Homo sapiens
acagtagttggttatagtctcttaatctgataaaaagaaaacaaatgagaatgttccctacaggtttagtgggaaggaggatcctactttagctcctatagggtcccagggtaatagggagaaagtagattaggggaatttggcatattttgctttataggtaaactggttgtaatatcttctccaacatccattctgctccactatgttcctttaccataacaacagtcacccataatgaatgatagaaggttttggttgagatagattgacactcctatcctgtctttttatcaccttccacaatgaaagaacatcagaccattcatgttccagagggttcttatcattccagactcctwgctctaccaccccccaccaacaaactaagtccaatattatgctttcagtatcccacgtttcccaaagtaataggtaagttggattaaacaagattagtttctgatcatgagtgttatgaaatccagttaataaaagaaaatgcaagatggcttggaagatatcctaaggaatttagttgaaacacaaatccaagaaagtaaccacaaaaaccacatt

SEQ ID NO: 126057 - DNA, 656 bp, Homo sapiens
cagtatccaatgtagtagtgaaaaacagaatcctaaacaaataagctttaaaataaactattataaagaaagcataactagtgtacaccaatcagttaagtaataatacataaaaaacaggaaaatgcatatgcacctttattagttcttcattcagggatttgtgaagcatgagtacaaaataacgtaatgtataatrtccttttctggtcctcaatgacgcatgcaaatattatttttttccctcaagctattgtttaaccacaaggaacaatcttatctaattagtgttcattactatctaaaagtcaataactatccacggaactgggactaaaagaatccccagattcatttctagagaatacaaccaatgaatgcaaagatgggaatttgagaattcatctttctggcaaataaaattttatcacatgtaactcatccaccacaagcttgtatagctaaacccttgacagattaaatgtttattgtcaaaaattgattgggtctgctttgaaaatttaattgaaatcatctcttaatttgattttagaaatatttgtttttgttgtattttttcttaatgtcatcctatggcacatttagttccaggttgtatttttcagagtgtcaataatcactatagaatagaatac

SEQ ID NO: 126058 - DNA, 458 bp, Homo sapiens
ggaatttgagaattcatctttctggcaaataaaattttatcacatgtaactcatccaccacaagcttgtatagctaaacccttgacagattaaatgtttattgtcaaaaattgattgggtctgctttgaaaatttaattgaaatcatctcttaatttgattttagaaatatttgtttttgttgtattttttcttaatgtcatcctatggcacatttagttccargttgtatttttcagagtgtcaataatcactatagaatagaatacattaggcctgatcttaagttagaatgaactatatctatttcttttttaactatgttaacccttttatattaataagaaatgggttttattgaaaaattacattaacaaatcagtgttacaataagaaatcaatgaacatcaactgaaaattttgatctcagacatgctgtagcatttggagttttatttc

SEQ ID NO: 126059 - DNA, 580 bp, Homo sapiens
tggcacatgtatacatatgtaacaaacctgcatgtcgtgcacatggaccctagaacttaaagtataataaaaaaagaaatttcagaatattgagtcatcatatgataaaatcattatagtctcacatacatttggaaaatatactttattcaataatataaacaatgtagtagatatatttgattatttaataatcattttaagtttattgyacagatgcacatgtcaataattagtgtttttcagatgggatgatatacattctgcttttatttttatctctttggtaacaattattgacagaacaatgaaacaaagataaattgttttacagttgtaatacccttgtatggtaattctcagcctcttttatcttatattctactagcacttacatctaataggtctcaataaagtagaaatgtaaaagtatgtattttcagaaaaggtcatatttcataaagattctgttactatgttagtcatttatcataagtgttaagtctaagaaaagttgtaatagaaattgctaagactttaaaataaaaactactcctttagtagttaaaaaatgttatta

SEQ ID NO: 126060 - DNA, 636 bp, Homo sapiens
tttaaatgcaataaataaaagatggccaaaaagcatttgaatagatgctgtactatactaataatcaaagaaacacacattgaaataagaatgcaagttcctttttttgctatacaaaatgcaaagttatctagtattgataactatggggatcaaacattcatatactgctaaggttaaatgggtataattttcttgagataaatttggcaatgtatttcaaaattttaaaygtgcatgctcttagggttatgctcccaagtgtgtaggtacaaatgatgcatggtgcatcaattattttgtcttggaatttttcctatgcaaatagttagatcagtaactcaagatatatgaacaggaatattcattgatgctttatttataagtaaaaagaatacagagaagagagaagaaaaagagcaattgagtttccagtcatgaaggattcactattcaatcattttatgcaggagtaaaagtcattaatagtaaaaatatagttctacacttacagactagacagaggaaaagagaggtgaggaggagagggaacatgaggagaaggaggggagaggaggggaagagagggaaggagaggaatgtgttttggcaggctacatacaaaaatgttaataa

SEQ ID NO: 126061 - DNA, 636 bp, Homo sapiens
tttaaatgcaataaataaaagatggccaaaaagcatttgaatagatgctgtactatactaataatcaaagaaacacacattgaaataagaatgcaagttcctttttttgctatacaaaatgcaaagttatctagtattgataactatggggatcaaacattcatatactgctaaggttaaatgggtataattttcttgagataaatttggcaatgtatttcaaaattttaaacgtgcatgctcttagggttatgctcccaagtgtgtaggtacaaatgatgcatggtgcatcaattattttgtcttggaatttttcctatgcaaatagttagatcagtaactcaagatatatgaacaggaatattcattgatgctttatttataagyaaaaagaatacagagaagagagaagaaaaagagcaattgagtttccagtcatgaaggattcactattcaatcattttatgcaggagtaaaagtcattaatagtaaaaatatagttctacacttacagactagacagaggaaaagagaggtgaggaggagagggaacatgaggagaaggaggggagaggaggggaagagagggaaggagaggaatgtgttttggcaggctacatacaaaaatgttaataa

SEQ ID NO: 126062 - DNA, 458 bp, Homo sapiens
gtgaactagtatgatttttacagggtgctaaacagccttgttttgtcattttaccagagttggttttctggttccttctcatttgggtaggctctgtcagaggcaaggtctagggctgaaggctgttgttcagattcttttgtcccaagcggtgttctttgatgtagtactcttccccattttcctrtagatgtggcttcctataagctgagctgcagtgattgttgcctgtcttctgtgtctaccaagcaagtctacccagctccagcctggtactgggggttgtctgcatagagtcctgtgatgtgaactgtctatgggtctttcagctgtggataccagcacagtatttgtggtgtctcctggatcccgcaggagcagtccggctcctttagaggatctgggggtcctcttgggattggtggtttgttcttgcagtcagtttggagctagaattc

SEQ ID NO: 126063 - DNA, 553 bp, Homo sapiens
ttcttctgtggttgctttggttgaccagatccccatcagattggcatgttcatattttagaggtggtgatatcttcagttatatcwctgtcttgctagcctaaaagacagtttgtctctttctggtgaccattcctctatttcaggggtcagcaaactagagctttgtttcattgtttcgtttgtacagcccatgaactcataatggtgtttactttttaaaatggttgcaaaaaacaaccgaagaataatatgttatggcgtttgaaagttatataaaattcaaatttcaatattcataaataatagttggaacatagccatgcccataatggtgccattttaataggaaaaaaaattgtcatagacatctggataaatattccactgagaggacactatgacagagcagcaaggtccgtgggtgagacatcagaggctaattgtgagttacagctgccacctccgaccctgagacatcgagtgtgttatttaaattatctaattctcatttcctcatctataataactaacttgtaagttattcagagact

SEQ ID NO: 126064 - DNA, 553 bp, Homo sapiens
ttcttctgtggttgctttggttgaccagatccccatcagattggcatgttcatattttagaggtggtgatatcttcagttatatcactgtcttgctagcctaaaagacagtttgtctctttctggtgaccattcctctatttcaggggtcagcaaactagagctttgtttcattgtttcgtttgtacagcccatgaactcataatggtgtttactttttaaaatggttgcaaaaaacaaccgaagaataatatgttatggcgtttgaaagttatataaaattcaaatttcaatattcataaataatagttggaacatagccatgcccataatggtgccattttaataggaaaaaaarttgtcatagacatctggataaatattccactgagaggacactatgacagagcagcaaggtccgtgggtgagacatcagaggctaattgtgagttacagctgccacctccgaccctgagacatcgagtgtgttatttaaattatctaattctcatttcctcatctataataactaacttgtaagttattcagagact

SEQ ID NO: 126065 - DNA, 655 bp, Homo sapiens
ataaggttagagaaagagaagaaaatgatctctgcttgggtaggctgttcagggatgactctactggggccatggcatgagttccrttctgacatccaattcagaattcaccaggcaaagccagggaggccttccagcccagagagcaaacagcaagtccaaagatacagaggtgtgagggggaaaacacattagggatttttccaaactacaaactgaaattatataggctacaagagggtgtggaaaataataccagataaagcagcttcatttgcattcttgcttgtgaagagaagcaactctgtggtgaaaaagaacctaaaactctgtggtggaaaaagggaacaaactaatggccaaccacatacaaaaaaaatgtggaaagttccaaaagaaagccaccagcagctctgcaaactcaagttgcggtggatggtttaggcaagtgtttctctaagtgtggtcacctgagcagccacattagcattacctgggaactggtcagaaatgcacattctcaggctccactccagaactactaagttctggaacttaggaaactctcaggatgcagagaaacctgtgttctaacacaccaccctccaggtggttctgatgcacactacagtttgagaactactaatttatgggt

SEQ ID NO: 126066 - DNA, 655 bp, Homo sapiens
aattcctggtttggaggtttgcaaaaatgaggactcagaattggtcaagtttacttaggcttcagtttattatagaaccaagtagcaaggaatgtgccagtaattactccaataagtgaacctgctgcttagagcttccctttaatctycataaaggtatcttcaagttatcagtctccccagtctgtgcagagtgagaaacaggccaactcactagagcccagttcaaagcttctccgttttctctggcatttttgaaagaataagaactcaagggtccatcctattactaaaagaggaagttcttgccttgtccctgttactaccccattttctcctctgatttacgtttttcctctgtcttcaggcctattactggcagtgggcctgtccatggcctgactcatgatacattagcagagacactggctttgaagagttaaaaaaaattccccttctcttactaagaactttatttaatctaattgagctcctttttctagctgcaaaacaggataatactctctagagtttgcatgaggatcaaatagtacaatatgtttacagagagcctgacacccagcagactctctcaaaaggaagtccaccgttcttgatcttcaacaacttgcgcaagaaaaaggaaaaatgaaaa

SEQ ID NO: 126067 - DNA, 571 bp, Homo sapiens
aagatgtgcagaaataaatgatatctgttcactgacccaaacttaccaatgtgattccatttattcaaagaccaatatggccagctgaaataagctggaagccagtttactatatatttaaatgaaaataagaagatattagacctactctgagtaaatactagcataattctcaamtcattctataaatgaaatgcataaaagaacaaaaaggagaaaatcaagatagctagattgcacttgtcaccaaactgcatagcaggcagtgctggaggaaaacaacacacagaaagaaaaagaaaagccagagggctgggtccaaagaagaggctcagtttagttaacctgtgcagctgcaaccaaaacaggtgtttaaggggacaatgccataaatgcgtgttctaaagcattatttaccccacccaataataaattgggctaaaataaatgttctgaagtctgtccaatcagaataataaatcctcctctttgaggaaaggagagataagagattaagaaaaaggagcatgccccatccctacagatgcatagtttgccaaatgtattgacc

SEQ ID NO: 126068 - DNA, 545 bp, Homo sapiens
ttcctagactattaaatggacccaccccaaattagcaagaattaactcctttgacttcacatattttcaggatattttatagtttctccccatgtgaatgacagtgattttcagtaattttccatgagtgtttgctaagtgagggtcaaaaggccaatagagaagtcttgaagacttcttgttcttgtctattatatttactaatgctttgcttctgcctttggtgtaggtacaaagacgtatgtcactaaaatatgtttgaaactactggtctttaggatattgtctatggcatcatccctaagtattttttaaatctcatattttgtcattctctccctggcacctcatagtcaaytcctacactctgtatccaactatatgtacaactagacagagttcttggaatataacttcctcctcaatgcttctcagcttcatacattctgttccagctgcttggaatgtcttctcattgacaaacgcctttacaggcattacaactggaagaacacctttattttttcatttgtgtttttcaacct

SEQ ID NO: 126069 - DNA, 479 bp, Homo sapiens
taagctctgcctgaagaattgaaatcaacttgagttraggtaaggggcaggggtggtaggggttgtggaagccaaaattcttgtcatgtagatgaagcattcaggtatcaggctgcagagagaatagatgtgaatgtcatttattaaacctaaaatggtgtcagactttctggaaaagaccaagtaagggaaggagattctctacagaacataaatttcccccacaagagacagcttttcaggaccatttcaaaatatgtcaaagaaacttattttggggcaaaatactttatttctttcagggcctggtgtctgtcatgtgatattatactggagtctggctggaatttggtatcttactgttacagagggtctatcttgtcagtctcaagatctctgtttcaatgttaatgctggtcagttgtgtctaaattccaaatgaaggagggtagaatgaagcaggtctgatccctcacttt

SEQ ID NO: 126070 - DNA, 593 bp, Homo sapiens
aagaacctctttcctttgaagagagttcaaagtcctgatgaaggtgatatgtgatgattctaattgccagatgtgattctrttgcttcacatgctggctactaaaggcctttgaagtcttctgccatctaagaaaccagaatatctccgaaattttaattaattgaattatgatacattcatttgcatctacatttatttttatttaagtaaaatctcatctcagataagttatgacagctttatcttccacagggaacaattcaacctatatgtgaatcagtgtaacttttgtaacttctcttaatagtaattcctatccaaatattgttatctgaaaacatatcttctcaaaatagatatgcagaaatcattgggattatgtgtcatacatttcttaaaaaattaataaagttctaaatgtttataattcatgaaatttctataaaatttatagatttataaaattgtataaaggtaaataagataccagatgcctgacataaaatactttgccaaatacaattccataaactaccctctaattatggatacacaaaatgcccggttgaattgaatgattttagagtatta

SEQ ID NO: 126071 - DNA, 532 bp, Homo sapiens
gactggggtgggtcaactcacactcagcctcactggctattgttagaactttgagttattctgagacactgagtataggagagtctatkaatatttatagaaattctgaacgtttacaggatgaataaaagttgtatgctagtaaacctattggttgggtggggagaagcccagatttgtagcatttgctaatttccattgtgtaaatatttctactgatggtttgacaaacacttcacaaaatttctgggtacttaattatcagctccagtagagtgctgcatgtatgacaccccatttgccaattccacactagattctattgggaacaagctgtatgagagtcaactggtggcagaaataaggaagtcctcaataaaaatcagcatttacttttgacagatgtgagattctggaacttatttctctttacttgctctgcctggtgattaaattatgattttaaaagaaatagttttaatttcttattagaatgctgccaccaaataaataaaatacgtactttaactat

SEQ ID NO: 126072 - DNA, 529 bp, Homo sapiens
gcaaagacttttagagagttctaatttgttttatgcawtttttttttttttttgcaaatttgactccacaacagtgtattatcacaacactgactttgtgtgtaagcattgtacatgtacataaaaacattaaaatttcctcaataaatgagaagatatccttttgcacatttgcatttgggaaagagaaaattccttaggatctcagctctttgactgaatattacatggtgacccatcccagcttttgatgaatctggtcaaaagacttaggttgtctgtcacagtattccagatgacctaagttataaagctgagttcacccagttaccaaccacgcttttatacattttgctttttgacccatttctttacaaatacaactcatctgctcattaccattatacccgtgagactatcgttagcatacctgagttttacgcttgcaaatatatgcatgttattattgcctattgattgtgtaaagtggcctaggaagggttctgttgtgtttttataagtttctcaa

SEQ ID NO: 126073 - DNA, 529 bp, Homo sapiens
gcaaagacttttagagagttctaatttgttttatgcattttttttttttttttgcaaatttgactccacaasagtgtattatcacaacactgactttgtgtgtaagcattgtacatgtacataaaaacattaaaatttcctcaataaatgagaagatatccttttgcacatttgcatttgggaaagagaaaattccttaggatctcagctctttgactgaatattacatggtgacccatcccagcttttgatgaatctggtcaaaagacttaggttgtctgtcacagtattccagatgacctaagttataaagctgagttcacccagttaccaaccacgcttttatacattttgctttttgacccatttctttacaaatacaactcatctgctcattaccattatacccgtgagactatcgttagcatacctgagttttacgcttgcaaatatatgcatgttattattgcctattgattgtgtaaagtggcctaggaagggttctgttgtgtttttataagtttctcaa

SEQ ID NO: 126074 - DNA, 529 bp, Homo sapiens
gcaaagacttttagagagttctaatttgttttatgcattttttttttttttttgcaaatttgactccacaacagtgtattatcacaacactgactttgtgtgtaagcattgtacatgtacataaaaacattaaaatttcctcaataaatgagaagatatccttttgcacatttgcatttgggaaagagaaaattccttaggatctcagctctttgactgaatattacatggtgacccatcccagcttttgatgaatctggtcaaaagacttaggttgtctgtcacagtattccagatgacctaagttataaagctgagtkcacccagttaccaaccacgcttttatacattttgctttttgacccatttctttacaaatacaactcatctgctcattaccattatacccgtgagactatcgttagcatacctgagttttacgcttgcaaatatatgcatgttattattgcctattgattgtgtaaagtggcctaggaagggttctgttgtgtttttataagtttctcaa

SEQ ID NO: 126075 - DNA, 529 bp, Homo sapiens
gcaaagacttttagagagttctaatttgttttatgcattttttttttttttttgcaaatttgactccacaacagtgtattatcacaacactgactttgtgtgtaagcattgtacatgtacataaaaacattaaaatttcctcaataaatgagaagatatccttttgcacatttgcatttgggaaagagaaaattccttaggatctcagctctttgactgaatattacatggtgacccatcccagcttttgatgaatctggtcaaaagacttaggttgtctgtcacagtattccagatgacctaagttataaagctgagttcacccagttaccaaccacgcttttatacattttgctttttgacccatttctttacaaatacaactcatctgctcattaccattatacccgtgagactatcgttagcatacctgagttttacrcttgcaaatatatgcatgttattattgcctattgattgtgtaaagtggcctaggaagggttctgttgtgtttttataagtttctcaa

SEQ ID NO: 126076 - DNA, 396 bp, Homo sapiens
aagaattcaaactcacagagtttattttgtagggaggaagggaatgaagagaacacaggtaggggagaagagaaataagacaaggaagaggagaaaattaataaagataggcttctcaagccaattaccacagtaggcaactgaaacttaatcccgcatgagcacgctaggggcccgtgaaaaacacatgcttcagggtcccccgagggttaaaggagctgaygtatttatacaacaacatcatcatgcactactgctgggatcccaacagagccatccatcacttcttatatggactccctttggctcaaagcacttcacctagtatttacttttctcttactatttcatctttttttgtggatgacaggaaatcactggctaaccaataatcag

SEQ ID NO: 126077 - DNA, 322 bp, Homo sapiens
aatattcaagtatgtttgatttctagcaaatccagatagatagttttggcaacaaccaagtcataatttgaagtcttgttataggagctaraattttattcaagggacaactgacttgattagataagatgctgtgcactgcatgtttgcatcaacaaatgcacatgttgaaactctaacaatagaatggcattagaaggaggacctttgggaagtaatttggttttgatgaggatggagttcccacaatggggttagcatcctaataagaagagtaggagactagagccctcttctctcagccatgtgaacatacaacaag

SEQ ID NO: 126078 - DNA, 415 bp, Homo sapiens
gaattctgtaaatatacacaatagggtaggaatgagaaaatctttagaggaaatattcaagtatgtttgatttctagcaaatccagatagatagttttggcaacaaccaagtcataatttgaagtcttgttataggagctaaaattttattcaagggacaactgacttgattagataagatgctgtgcactgcatgtttgcatcaacaaakgcacatgttgaaactctaacaatagaatggcattagaaggaggacctttgggaagtaatttggttttgatgaggatggagttcccacaatggggttagcatcctaataagaagagtaggagactagagccctcttctctcagccatgtgaacatacaacaagaacacctgcaaaccagtaagagggccttcaccagacactggt

SEQ ID NO: 126079 - DNA, 421 bp, Homo sapiens
gtaggaatgagaaaatctttagaggaaatattcaagtatgtttgatttctagcaaatccagatagatagttttggcaacaaccaagtcataatttgaagtcttgttataggagctaaaattttattcaagggacaactgacttgattagataagatgctgtgcactgcatgtttgcatcaacaaatgcacatgttgaaactctaacaatagaatggcattagaaggaggacctttgggaagtaatttggttttgatgaggatggagttcccacaatggggttagcatcctaatwagaagagtaggagactagagccctcttctctcagccatgtgaacatacaacaagaacacctgcaaaccagtaagagggccttcaccagacactggttctgctggcccagattttaatctttgaattc

SEQ ID NO: 126080 - DNA, 421 bp, Homo sapiens
gtaggaatgagaaaatctttagaggaaatattcaagtatgtttgatttctagcaaatccagatagatagttttggcaacaaccaagtcataatttgaagtcttgttataggagctaaaattttattcaagggacaactgacttgattagataagatgctgtgcactgcatgtttgcatcaacaaatgcacatgttgaaactctaacaatagaatggcattagaaggaggacctttgggaagtaatttggttttgatgaggatggagttcccacaatggggttagcatcctaataagaagagtaggagactagagccytcttctctcagccatgtgaacatacaacaagaacacctgcaaaccagtaagagggccttcaccagacactggttctgctggcccagattttaatctttgaattc

SEQ ID NO: 126081 - DNA, 213 bp, Homo sapiens
tagaatggcattagaaggaggacctttgggaagtaatttggttttgatgaggatggagttcccacaatggggttagcatcctaataagaagagtaggagactagagccctcttctctcagccatgtgaasatacaacaagaacacctgcaaaccagtaagagggccttcaccagacactggttctgctggcccagattttaatctttgaattc

SEQ ID NO: 126082 - DNA, 594 bp, Homo sapiens
ttgatttgagtagtatggtcatttcaacaatattaattcttctagtccatgaacatgggatatctttctatttattttaattttttaaattgcttttatcaatgtttaataattttcatctttctgtggcttaatttacttataggtattttggttttttatagctttttaaatgggggattattttcttgattcctttttcagatagtctgctattgttgtagagatgttactgawtttttatgtagcttttgtatcctgaaaccttattgtattcatttactatttctgattctcagtggtgtatttagggttttttacatatatgatcatgtcgtctgcaaagagggacaatttgacttttttttccaatttggatgccttttatttctttctcttacataattgttatgactaggacttccagtactatgttgaaaaaagtgattaaagtgaacatccttgtcttgttccagatcctagaggcaaagctttcaagttttcaccattcagtataatgttgcctgtgggttatcacatatggtctttattttattatgttgttttataactaatttgttaaaaggtttgatc

SEQ ID NO: 126083 - DNA, 398 bp, Homo sapiens
gaatatttgtccataacataggattccagaacactcctgcagttgtttgaatttttgtccctcccataggattccagaacactactgctggggtgtgagtgtatgtccctcacttaggattccagaacactgcaaagattctcttaaagattgtccctcacataggtttccggaacactgctatgagagtctgaatgtttgtccctcacacaggattccataatactcctgctgtgttctgaatatttgtacgtcacatrggattcctgaacactactacgagattctgaatgtttgttgctcacataggattccaaaatgtccctgctgtgttctgagtgtttgtccctcacatagggtcactgctgctgggttctcagtgtttctcactcacatag

SEQ ID NO: 126084 - DNA, 398 bp, Homo sapiens
gaatatttgtccataacataggattccagaacactcctgcagttgtttgaatttttgtccctcccataggattccagaacactactgctggggtgtgagtgtatgtccctcacttaggattccagaacactgcaaagattctcttaaagattgtccctcacataggtttccggaacactgctatgagagtctgaatgtttgtccctcacacaggattccataatactcctgctgtgttctgaatatttgtacgtcacataggattcctgaacactactacgagattctgaatgtttgttgctcacataggattccaaaatgyccctgctgtgttctgagtgtttgtccctcacatagggtcactgctgctgggttctcagtgtttctcactcacatag

SEQ ID NO: 126085 - DNA, 404 bp, Homo sapiens
gaattccagataattgagacaatattctgaatgtttgaccataacataggattccagaacattccygctcttgtttgaatgtttgtccctcacatagcattgcagaacactgctgctggggtctgaatgtttgtctctcacataggattccagtacactgctacgattgtcagaatgtttatccctcacctaggattacagaacactgctatgatgctctgaaagtttgtccctcacataggattccagaacactgctgctgaggtataaatgtttgtccatcacatgggattccagaacaaagctacgagtgtctgaatgttcctcacagcagattccataacactcctgctgtggtctcaatgtgtgtccctcacaaaggatttcagaacacggctaagagg

SEQ ID NO: 126086 - DNA, 408 bp, Homo sapiens
catagaattccagataattgagacaatattctgaatgtttgaccataacataggattccagaacattcccgctcttgtttgaatgtttgtccctcacatagcattgcagaacactgctgctggggtctgaatgtttgtctctcacataggattccagtacactgctacgattgtcagaatgtttatccctcacctaggattacagaacaytgctatgatgctctgaaagtttgtccctcacataggattccagaacactgctgctgaggtataaatgtttgtccatcacatgggattccagaacaaagctacgagtgtctgaatgttcctcacagcagattccataacactcctgctgtggtctcaatgtgtgtccctcacaaaggatttcagaacacggctaagagg

SEQ ID NO: 126087 - DNA, 408 bp, Homo sapiens
catagaattccagataattgagacaatattctgaatgtttgaccataacataggattccagaacattcccgctcttgtttgaatgtttgtccctcacatagcattgcagaacactgctgctggggtctgaatgtttgtctctcacataggattccagtacactgctacgattgtcagaatgtttatccctcacctaggattacagaacactgctatgatgctctgaaagtttgtccctcacataggattccagaacactgctgctgaggtataaatgtttgtccatcacatgggattccagaacaaagctacgagtgtctgaatgttcctcacagcagattccataacactcctgcygtggtctcaatgtgtgtccctcacaaaggatttcagaacacggctaagagg

SEQ ID NO: 126088 - DNA, 603 bp, Homo sapiens
aatgaacactcagactgcttctcacttcctatcacagtgaatactgctgcacaggcaccctgtggatatgtgtgagaatctcttcaacacgtgtattcagaagcagaattattgggccagagggggtgtctatacttaatttagtcaattttaaccaaatactgtcagattgcactccagaatgcccatctcttgcctgcttctccaaccggtctttaagttcctgcatcttcaaatccaggccaacacttcatgttgtctaactttctaatttttatccagtagactagatagagagtaacataccattgcaattttaatttttcatgtctcacattactaatgagcttaagcatctcttcatatgcttgagaaatttgggagtttccttttctattaattgcctattcctgtcctttgaccatttttttttttctatttagggttcttctttttagtctgatgaatttgcagaagttccttggatgatctagatactagacccgttgtcagttttaggcacttctaattttcatcttttatctttagacaaaattttactcctgakttcgatagccaaattgatatcagtagacagatctg

SEQ ID NO: 126089 - DNA, 547 bp, Homo sapiens
tcaatgtattctggttttacacttgcccccatatgttcaatacagccacctggatgacactgaagaaatgtaagccacattaagtcaccttgctccacatcctgcagtggctccctatgttattcacattaaaagttcaatgcttaaaatgacctcctgggctttcccattgttacttacattacttctttcctactatccccttctttcctctccccaccctgaccacactgactaccactctgtttcttggatacatccatctgggacacttttgaaacaagtgttctgctctgcctcttttctctatctgaaatacaattccctcagattttcacatgtctaccattttttaaaattttattttatttttagttctgggatacatgtgcaggatgtgcaggtttgttacataggtaaatgtgttccatggtgatttgctgcacctatcaacccatcacrtaactattaggccctgcatgcattagatatttttcctgatgttcactctccccctgccaccctgcccccgcaaggcccaagtgtg

SEQ ID NO: 126090 - DNA, 573 bp, Homo sapiens
tcctaactacttaaaatgtaaatcctaattaattgcagaatcttttctccacttttgagactgttaagttcagaaccaagtaaaacatgggaggaaaaacaacttttcaccatttcgaaaacaatggtttcatctgtgaggtgaattgtaacttctcatcttgtaaaaagatggaaaaccttcaaaaccaacaaggcagctacaaattgacattctctttcatttctgtttccatcaatgactcctgaacgagtcttctagcatgaatgatgtcaccttttagcctctccatctcactcttgctccctgagtaggtggttctgatctctttctgcagctcttccatgctgctcagcagcccyatgaatttggtttgggcagtgggctgctcccagtttcctgtattattgacaacaccagctacttatcaaagtatctagaacataggtagtaggcattcaaaaatattacccagtaaattaacaaataagaggcagccacatgaaaaccatgcagacacgcctgtggtgttggagtttgactgttctatgaacaaatcaaaggcaatttatt

SEQ ID NO: 126091 - DNA, 631 bp, Homo sapiens
aaaacctattttttctcttagaatatcttattcagcagttaggcaaataaggacatttttgaacggcaggactcctgaaacacatcctaacaagtggtcttgtttgatttttcttacaattttttgattacttctttctctttacatctataaaaccatctgattagaagcaatttacaggtattaacaataaagaagaaaggacggaataatttaggacacagtaagtcctatttcccacactccctttgtaagaaatgacaatttgtgtaaaacaaaattcttcatctttaccaaaaatggcttttaatattttactaaagtcccctcattctttcagttttcaaatttcagaaacaaatttgacagttacctgttttatattacatataaaactattgccttaattatgccaattatttctttktaagttttataaaaatttggtcagtttctcattttaattggtattattctaatttagttcttacagtttcttttatacaggacttcactaatatccaactgatctcttccttgagttctctatttcttccttccttttttccttctgttcatccatctttctttccttccctccaaatttatcttgatttataattacaatgtt

SEQ ID NO: 126092 - DNA, 573 bp, Homo sapiens
aggaattctgacttgtagagaaccaagctgggaaaccgggccaggagcagggagaggccggtgagcctgggttgtgcgagtgcaagcctttatttaaagttttaatattttgtctatcatgggttttttttctttgcgattacattcaattttaaaactatttcattcattcaggattagcgttacttaacagttgctcctgagactagtgcgttagtcccttcaccctagtcctggccttggtggaagtctaaaatttatgttttattccagctttctgtccaaaagagcaacccctgcaagtgtaggatgaggagctcagtccagcagcagctaacactgcactccttgcgygcctgctgtgtgctagagagaggggcagaggcgggaggcgggaggcagggggcgggggggtctttctctttttctcttcctctgcttctcaaattcacagtaggggcaaagattgacaaactcactcacattaccaccaccgcgagtttccaaaaaagaaaaaagaaagaaagatactaacttttttagatggtatctctaagaaatagtgtattaatc

SEQ ID NO: 126093 - DNA, 594 bp, Homo sapiens
ctgggtgctgaagaaacctacaatcctgcactgacaggcacagacaaaaagagtacaaagaaaagcctgcttcttccagccagaggtctgagaaaatggtggtctaacagaacaggaaacacttttgatgttttctcatgctcaggccaaaccaaaatgatacaatcctgtggttccatggaggctgagcagggagctaatgttccctgccgtagatacacaggatctgcatgctcttatatgttttcttccatgagccatgaagaatcctgagaaagttccattcttaggatatgctgggagatggtcacagcagccactaccaaaattytgcctagaaccaaattattatctaatttatggaacaaatgtcttaatctgcaagggcaagaatataataagttgttttagggcactgacaggaactcatagcagctatgggaaggaaacaagaaaaaaagaagcacagaagtaagaggagaggcaggaatacacagtagacccaatactcaagcagaagagataagataaagtagcacttgcaataaccatggcttcaaacctgaagacacaatgcattcaacagctgaattc

SEQ ID NO: 126094 - DNA, 563 bp, Homo sapiens
catagatggtaatatcaacaacattgtgccaacagatttgacaacttagatgaagtggacaaatgtctccaaagacacaattatctagtcttactcaaaaacaaacagacagaatagcccggtatctattaaagaaattgaagctgtaatttaaaacctttccacaaagactccaatgctaggtctaaatggcttcagtgaagaattctaccaaacatttaagaaaaacatgataccaattctgctagttcttaccaattattctaattaaagagaaaattgaaaaaggaaggaatacttccgaataacctcttgcacttttctcagacttgtaagtgtgacactgggatgaccagttcatggggagaattttatattctttacaggtgaattggctacaaccacaggcaatttcaatttctttccaaatttcttcaggggaatatctgaggaaaaataaagtgcttttgaaatataaacactttctaggaatacaggaatgttgcttatayatgattttaccaatggtctcatgaaaattgtgtggaggactgtggctataa

SEQ ID NO: 126095 - DNA, 595 bp, Homo sapiens
gagagatatatatacttacatgtttattacagtgttatttacacagccaaggtatggaaactacctgtgtccattgacagatgaatggatgttttaaatgtattacacacacacacacacacacagacacacacamatatgtaatggaatatcatttagcctttaaaaatgaggaaatactgccatttgtaacaagatggataaacctggagtttattatggtaagtaaaataagccaggaacagatgcaaaaaaatcctgcatgatttcacttatatgcatactaagaaaatgtcaaactcatggtaacagagtaaaatagtgcttactagggcctgggagttgggggaaaagaaaaaatgtttgtcagaaagtacaaactttcagttataagatgaataagttctggagatctaatgtacagcatagtgactaaagtcaatataatgtatactttgaaatttgctgaaagagtagatctcaagtgttctccacacacaaacacaataaaaaggtacccaggtgaggtgatgaatatgttagcttgattgtggtaatcatcacttcacaatgtatatgtatatcaaaatatcac

SEQ ID NO: 126096 - DNA, 618 bp, Homo sapiens
ctgatgtgggcagtatctaggtaaaggggaaatatgttaagagtggtatttacttttgatagtataaatataattcaagtgaggtgtacataaatgcaaactcatgaaatgtcacagaaagatttacagaaaatataacatgagaagacatacttttaaggaattgtcttgattatataggataagtggaagttatgaatgcctttgaatttgaagactgcaacaataagaatctctgacaactgggtggggggcatcatacttgttctgcaaatgagactagccacatagatatctctgagaatttggaagtaagggctgtagcctttgagacttcttcacaaagatgggcaaaaaagatatcctattgttgctttatttgtgacttttctgataaccagtgaaagaagtacctcttcatataactactggcattttgttgcccatctgtgttaattgcttctttatatccacagccaaattctttttgattcccygttatttcttataacctaaataataatctcttgtatttattaattctttgaggttctcaacagtcagttattactatttttcatctggggtctttgagcagaatttcctaattcttaatta

SEQ ID NO: 126097 - DNA, 557 bp, Homo sapiens
agtttgctattggcccctgatacactccaatgaagaattttgcatgcctgggtcacaatgctgtgatggatatgaaacatttgtcatgaccactgcaataagagttgagacatttatgatacatatttgttatgtctcaataaagcatccactgactcatcaaagagatttttttaggtgataatccttttcacaacatgaaggcacaggcttacccgctagaatctagtcataggataaaaagtccgaatctatcagtgcctggaggaattagcagctcactcaaatattcattctgcttatcagctgtaaccctaagtagtgaatatggataataagcactgtcataattgtgacacytctgttagggtttttctttgctattttttaaagaatctatcaagcaaagtatgacttccctttgggaagtgcatgtccttaaatgccagttcaactattctgctttgtaagagtaggcatacatcctgattaatgattgacattgatttaggaatttgtgattttggttagtaagtgtcagcttaccaacgtggacc

SEQ ID NO: 126098 - DNA, 620 bp, Homo sapiens
agtaagttcttaaggaatgcacagtataaaacatataaattgtggcaacaaaaatataaatagttggggggagggtaaaggtaaaaggtatatgcaaccaaatttaagttatcagcttaaaatggtctattataactacaaaatatcttatgtaagcctcacagtaactacaaagaaaaaaaatattacagagatacacaaatgagaaaaagaaagaaaccaaagatcagcactacagaaaatcaccaaaccacaaaggtaaacaaggaagaaaggaaaaaaaggatctattaaaccaccaggaaacaattacccaatatcagtagtaaattcttccgtatcaataatgacattractgtaaatatccaatcaaaagacatagagtggctgagtagattgacaaaagaaaagactcaactataggctacctataagagacccattttagcttaaaggacacacagctgaaagtgaagggatgtaagaagacatttcttgcaaatagtagtcaaaagagaacaggggttgctatgcttacattagataaaatagacttcaagtcaaaaattatttcaagagagaaagacggtcattgtataacaataaaagcatcagttca

SEQ ID NO: 126099 - DNA, 597 bp, Homo sapiens
ctataggcagagcagccctgagggctactggttggccatttttatggttatttcttgattatatgctaaacaaggggtggattattcatgagttttctgggaaaggggtgggcaattcccagagctgagggtccttccccttgttagaccatatagggtaacttcctgacattgccatagcatttgtaaactgccatggcgcttgtgggagtgtcttttagcctgctaatgcattatagttagcatataatgagtagtgaggaggaccagaggtcactttcatggccgtcttgattttggcgggttttggctggcttctttaccttaacctgttatataagtaaggtctttgtgacgtgtaccttgtgccaacctcctatytcatcctgtgactaagaatgcctaacctcctggtaatgcagcccagttggtctcagcctaattttacccagcccttattcaagatggagtcactctttttcaaacaccgctgacactgtcactcttcccaaatcttccagggagtgctttcatccccattctttggatgtcacaaaaagccacttttccttcacaaaattcagtggaaagtatgcc

SEQ ID NO: 126100 - DNA, 627 bp, Homo sapiens
ggatactggtgagaaaatagaaattgcaaagtatttctcaaacagtctgagtaattttccttcactattttttccccaggagtaataacaaatagaaatactacttgtcttttggaatctttttttgctgaaaagtgtgaagcgattccagagatattckgaacagagggaccccatcagcatgcagtcctataggagaatgcaacctgtctgcaccttcttcccaagggggccagtgaatgaatgaacgaaagaataaatgaatgaacaaaccattcagctacacacacttaattttacagagcaaatgcctactagtcatgcgttactatcctagcttgaggcccaattatttctctatctaaataatgtgggtgttttccttgatcataaatgaaacgtgctcattataaaatgcttagaagatacagaaaagtataaagaagaaaataaaagtcatccataatcctaccccacaaaaaagtcttattaatattgaggtttatatcatacacgtgttcctctgagctcataaacattacatggctgagatcttgtgtatatacaactggtatctgtattagacagaattctaagatgatcccggaatccacatggctttacgta

SEQ ID NO: 126101 - DNA, 627 bp, Homo sapiens
ggatactggtgagaaaatagaaattgcaaagtatttctcaaacagtctgagtaattttccttcactattttttccccaggagtaataacaaatagaaatactacttgtcttttggaatctttttttgctgaaaagtgtgaagcgattccagagatattctgaacagagggaccccatcagcatgcagtcctataggagaatgcaacctgtctgcaccttcttcccaagggggccagtgaatgaatgaacgaaagaataaatgaatgaacaaaccattcagctacacacacttaattttacagagcaaatgcctactagtcatgcgttactatcctagcttgaggcccaattatttctctatctaaataatgtgggtgttttccttgatcataaatgaaacgtgctcattataaaatgcttagaagatacagaaaagtataaagaagaaaataaaagtcatccataatcctaccccacaraaaagtcttattaatattgaggtttatatcatacacgtgttcctctgagctcataaacattacatggctgagatcttgtgtatatacaactggtatctgtattagacagaattctaagatgatcccggaatccacatggctttacgta

SEQ ID NO: 126102 - DNA, 612 bp, Homo sapiens
agacctctctcccacaaagcccactttggagattggcgcccgccttctgctgctagttagttgtttgaaaagtgctgacgcttctcttcatccaccgtgccaggactccgtgccaaagccgcccacacaagcaaggctcgccctgcatgccagggtttcagaaagtggacctggcaccaaccaagcgtagaaagagaggcccttgtgatacagcctcccgacacactcacacacacacacataccagccagagaccagagaccccaatcagtacttttaaaaggaataaaaattgctcaatctctttgatgatattcaaagagtcttttttaatatatgaagaagcacattctaaattcttaacacatctggtgtcacccgctcttttccccctctaaaccctcttaattccataatttagaaggtcttaagataccgaaggatctcactgaggcataattggrtatcttgtgcgttccaagttgcatctgatgtcccacctcatcccagaaacttttccactgagttggagagaaaagatttgggggttcggggagcaaggacggtgctctgcctgctcaagtgggctttgacagaaaagctgagctgcct

SEQ ID NO: 126103 - DNA, 643 bp, Homo sapiens
cttgggtttaaagtatggaccaaccagagccaactttattctgccagtttcatggctgtgaagtgtgaaatgtccatgtttcctcccatgctgttcttaggaactggttatgcaactttttgggtagtcacagcttctttaacggaatctaatacagatcctccagttggcgatatagaacaaatcttcacagtgaaccccagaactgtggtgatggtggacacctccacaaggaagcaacagggacaagggagacctcccatcactcctccctatatgagattgtcccttccttgaaaagtcagacaggtcttgatcatggtggggcagccagcaggtttcctcgtaccagcctttgtggagcttgatgcctccgtcagcatcagatctgaaggtgaaactgagcttgaagctggagctcatgcctcctggctttaccctatcctaactgcgtttgcccctttccatcatcattgaamcctggagagtttagagaagggactctagagtcacatgccattcagctatgtgacttagggcaaattaactctctttcctcagtttccttatctgaaaaatagggataataataacaaaacctacctcacaggtttgtgagttattagacataaagcactcagga

SEQ ID NO: 126104 - DNA, 640 bp, Homo sapiens
gagaccaatggagttggaggctaatgaatgttgggagacagcatggagtgaggtcagagaggaaagcaggccacagaaccttacaggtcgtggtgatgcatatggaaggctcttgctgcggggtggaagaatgtggtttatatttcaaaagccctctctgacttctttgtgaagaaggaattgcaggggaaatgtagaatgaaagcaaagagactattaacaagacagttgctaaagtccaggcataaagtaaaggtagtttgaactatatggtagctattgagtcggataaaacaaattcaaggcagattttggagggtagggtcaattagacatacatgaaatgtaatgatttaggagcataggccctgggtacaaacttcctaagttcaaatctttcatctaccacatgctagccatacgagcttgaacaagttattaaacttccctgaaccttaatgtcctcatctgaaaaataggacttagtgcctatctcacagggtgttgtgagcattmaatgagataataaaggcaaagcacttaacacagtacttgggcacataataaccgatatttatgtaaatggtatttatgtatacataaatggctattgttattttatctattgatgatggattga
